(19) United States
(12) Patent Application Publication
(10) Pub. No.: US 2017/0009304 A1
(43) Pub. Date: Jan. 12, 2017

(54) METHOD AND KIT FOR DETECTING FUSION TRANSCRIPTS

(71) Applicant: SplicingCodes.com, Palmetto Bay, FL (US)

(72) Inventor: Degen ZHUO, Palmetto Bay, FL (US)

(73) Assignee: SplicingCodes.com, Palmetto Bay, FL (US)

(21) Appl. No.: 15/188,982

(22) Filed: Jun. 22, 2016

Related U.S. Application Data
(63) Continuation-in-part of application No. 14/792,613, filed on Jul. 7, 2015.

(51) Int. Cl. C12Q 1/68

(52) U.S. Cl. CPC C12Q 1/6886; C12Q 2600/16; C12Q 2600/158; C12Q 2600/156

(57) ABSTRACT

This present disclosure provides a kit and method for detecting at least one KANSARL fusion transcript from a biological sample from a subject. The kit comprises at least one of the following components: (a) at least one probe, wherein each of the at least one probe comprises a sequence that hybridizes specifically to a junction of the at least one KANSARL fusion transcript; (b) at least one pair of probes, wherein each of the at least one pair of probes comprises: a first probe comprising a sequence that hybridizes specifically to KANSL1; and a second probe comprising a sequence that hybridizes specifically to ARL17A; or (c) at least one pair of amplification primers, wherein each of the at least one pair of amplification primers are configured to specifically amplify the at least one KANSARL fusion transcript.

### CROSS-REFERENCE TO RELATED APPLICATION

[0001] The present application is a continuation-in-part of U.S. patent application Ser. No. 14/792,613, filed Jul. 7, 2015, the contents of which are hereby incorporated by reference in its entirety.

### REFERENCE TO SEQUENCE LISTING SUBMITTED ELECTRONICALLY

[0002] The content of the electronically submitted sequence listing, file name Human_Cancer_Fusion_Transcripts_20160621 ST25.txt, size 199,892 Kbytes and date of creation Jun. 21, 2016, filed herewith, is incorporated herein by reference in its entirety.

### BACKGROUND

[0003] Genetic predisposition to cancer has been well known for centuries initially via observation of unusual familial clustering of cancer, and later through identification of studying cancer-prone families that demonstrate Mendelian inheritance of cancer predisposition (Rahman 2014). 114 cancer predisposition genes (CPG) have been identified so far, including BRCA1 and BRCA2, the DNA-mismatch-repair genes (relevant for colon cancer), TP53 in Li-Fraumeni syndrome, and APC in familial adenomatous polyposis (Rahman 2014). All of these 114 CPG have derived from known genes, but none of them are fusion genes (Rahman 2014). Despite extensive research, known genetic factors can explain only a small percentage of familial cancer risk, implying that so-called low-hanging fruit of novel candidate genes remain to be discovered (Stadler, Schrader et al. 2014).

[0004] Recent rapid advances in RNA-seq make it possible to systematically discover fusion transcripts, and to use this technique for direct cancer diagnosis and prognosis (Mertens, Johansson et al. 2015). In the last several years, RNA-seq data have growing exponentially, and around 30,000 novel fusion transcripts and genes have been identified and accumulated by scientific and medical communities so far (Yoshihara, Wang et al. 2014, Mertens, Johansson et al. 2015).

[0005] The key challenge of this technique is how to fast and accurately map RNA-seq reads to the genomes. Although enormous progresses have been made, and more than 20 different software systems have been developed for the identification of fusion transcripts, none of these algorithms and software systems can achieve both fast speeds and high accuracies (Liu, Tsai et al. 2015).

### SUMMARY OF THE INVENTION

[0006] Previously, the applicant had disclosed a method of identifying fusion transcripts, whose content has been provided in U.S. Patent Application (Publication No. US20160078168 A1). In one aspect of the present disclosure, the applicant has used the method as disclosed above to analyze RNA-seq data from human cancer and other diseases, and has identified 886,543 novel fusion transcripts. A set of isolated, cloned recombinant or synthetic polynucleotides are herein provided. Each polynucleotide encodes a fusion transcript, the fusion transcript comprising a 5′ portion from a first gene and a 3′ portion from a second gene. The 5′ portion from the first gene and the 3′ portion from the second gene is connected at a junction; and the junction has a flanking sequence, comprising a sequence selected from the group of nucleotide sequences as set forth in SEQ ID NOs: 1-886,543 or from a complementary sequence thereof.

[0007] In another aspect, the present application provides a kit and method for detecting at least one KANSARL fusion transcript from a biological sample from a subject.

[0008] The kit comprises at least one of the following components:

[0009] (a) at least one probe, wherein each of the at least one probe comprises a sequence that hybridizes specifically to a junction of the at least one KANSARL fusion transcript;

[0010] (b) at least one pair of probes, wherein each of the at least one pair of probes comprises: a first probe comprising a sequence that hybridizes specifically to KANSL1; and a second probe comprising a sequence that hybridizes specifically to ARL17A; or

[0011] (c) at least one pair of amplification primers, wherein each of the at least one pair of amplification primers are configured to specifically amplify the at least one KANSARL fusion transcript.

[0012] In some embodiments, the kit can further include compositions configured to extract RNA sample in the biological sample, and compositions configured to generate cDNA molecules from RNA sample in the biological sample.

[0013] The biological sample can be a cell line, buccal cells, adipose tissue, adrenal gland, ovary, appendix, bladder, bone marrow, cerebral cortex, colon, duodenum, endometrium, esophagus, fallopian tube, gall bladder, heart, kidney, liver, lung, lymph node, pancreas, placenta, prostate, rectum, salivary gland, skeletal muscle, skin, blood, small intestine, smooth muscle, spleen, stomach, testis, thyroid, and tonsil. The biological sample can be prepared in any methods. For example, the biological samples can be buccal cells prepared by buccal swabs, or can be a tissue sample prepared by biopsy, or can be a blood sample prepared by liquid biopsy. There are no limitations herein.

[0014] In embodiments of the kit comprising components as set forth in (a), the junction of the at least one KANSARL fusion transcript comprises a nucleotide sequence as set forth in SEQ ID NOs: 886,550-886,555. Optionally, the components as set forth in (a) comprise a plurality of probes and a substrate, wherein the plurality of probes are immobilized on the substrate to thereby form a microarray. As such, the kit as set forth in (a) can be used to detect at least one KANSARL fusion transcript by microarray analysis, but the kit can also be used for analysis using other hybridization-based method.

[0015] In embodiments of the kit comprising components as set forth in (b), each of the at least one pair of probes comprises a pair of nucleotide sequences selected from one of SEQ ID NO: 886556 and SEQ ID NO: 886,567, SEQ ID NO: 886566 and SEQ ID NO: 886567, SEQ ID NO: 886568 and SEQ ID NO: 886569, SEQ ID NO: 886560 and SEQ ID NO: 886561, SEQ ID NO: 886558 and SEQ ID NO: 886559, SEQ ID NO: 886564 and SEQ ID NO: 886565, and SEQ ID NO: 886562 and SEQ ID NO: 886563. These pairs of probes are configured to detect the presence or absence of any of the KANSARL fusion transcript isoforms 1-6, among which, the probe pair SEQ ID NO: 886556 and SEQ ID NO: 886,567 is used for detection of isoform 1; the probe pair SEQ ID NO: 886566 and SEQ ID NO: 886567, and the probe pair SEQ ID NO: 886568 and SEQ ID NO: 886569, are used for isoform 2; the probe pair SEQ ID NO: 886560 and SEQ ID NO: 886561 for isoform 3; the probe pair SEQ ID NO: 886558 and SEQ ID NO: 886559 for isoform 4; the probe pair SEQ ID NO: 886564 and SEQ ID NO: 886565 for isoform 5; and the probe pair SEQ ID NO: 886562 and SEQ ID NO: 886563 for isoform 6, respectively. In these embodiments, these probe pairs are respectively used to detect the presence of any of the KANSARL fusion transcript isoforms by co-hybridization of the first probe and the second probe in a hybridization reaction, including in situ hybridization and Northern blot.

[0016] In some of the embodiments as described above, the first probe and the second probe respectively comprises a first moiety and a second moiety, configured to indicate co-hybridization of the first probe and the second probe in a hybridization reaction to thereby detect a presence of the at least one KANSARL fusion transcript. The first moiety and the second moiety can be fluorescence dyes, radioactive labels, or some other moiety capable of being conveniently recognized. The co-hybridization of the first probe and the second probe in a hybridization reaction refers to simultaneous detecting of the hybridization of the first probe and the second probe in one hybridization reaction. Examples include co-localization of the first probe and the second probe in an in situ hybridization assay, such as fluorescence in situ hybridization (FISH), and also include co-localization of the first probe and the second probe in a Northern blot analysis. There are no limitation herein.

[0017] In embodiments of the kit comprising components as set forth in (c), each of the at least one pair of amplification primers comprises a pair of nucleotide sequences selected from one of SEQ ID NO: 886556 and SEQ ID NO: 886,567, SEQ ID NO: 886566 and SEQ ID NO: 886567, SEQ ID NO: 886568 and SEQ ID NO: 886569, SEQ ID NO: 886560 and SEQ ID NO: 886561, SEQ ID NO: 886558 and SEQ ID NO: 886559, SEQ ID NO: 886564 and SEQ ID NO: 886565, and SEQ ID NO: 886562 and SEQ ID NO: 886563. Each of these pairs of amplification primers is configured to amplify one isoform of the KANSARL fusion transcript by PCR.

[0018] Among these, the primer pair SEQ ID NO: 886556 and SEQ ID NO: 886,567 is used for PCR amplification of isoform 1 (with an expected size of 379 by for the PCR product); the primer pair SEQ ID NO: 886566 and SEQ ID NO: 886567, and the primer pair SEQ ID NO: 886568 and SEQ ID NO: 886569, are used for amplification of isoform 2 (with an expected size of 431 by and 236 bp, respectively, for the PCR product); the primer pair SEQ ID NO: 886560 and SEQ ID NO: 886561 for amplification of isoform 3 (with an expected size of 149 by for the PCR product); the primer pair SEQ ID NO: 886558 and SEQ ID NO: 886559 for amplification of isoform 4 (with an expected size of 385 by for the PCR product); the primer pair SEQ ID NO: 886564 and SEQ ID NO: 886565 for amplification of isoform 5 (with an expected size of 304 by for the PCR product); and the primer pair SEQ ID NO: 886562 and SEQ ID NO: 886563 for amplification of isoform 6 (with an expected size of 160 by for the PCR product), respectively.

[0019] In some of the embodiments as disclosed above, the components of the kit as set forth in (c) can further comprise a DNA polymerase, configured to amplify the at least one KANSARL fusion transcript using the at least one pair of amplification primers. Optionally, the components of the kit as set forth in (c) can further include an instruction of how to perform the PCR reaction for amplification of the isoforms.

[0020] In a third aspect, the present disclosure provides a method for detecting presence or absence of at least one KANSARL fusion transcript in a biological sample from a subject utilizing the kit as described above. The method includes the steps of: (i) treating the biological sample to obtain a treated sample; (ii) contacting the treated sample with at least one components as set forth in (a), (b), or (c) of the kit for a reaction; and (iii) determining that the at least one KANSARL fusion transcript is present in the biological sample if the reaction generates a positive result, or that the at least one KANSARL fusion transcript is absent in the biological sample if otherwise.

[0021] In some embodiments of the method, the reaction in step (ii) can be a hybridization reaction. In some of the embodiments where the components as set forth in (b) are utilized, the positive result in step (iii) is co-localization of the first probe and the second probe in the hybridization reaction, and the hybridization reaction in step (ii) can be in situ hybridization (ISH) or Northern blot. In some of the embodiments where the components as set forth in (a) are utilized, the positive result in step (iii) is hybridization of the at least one probe with at least one polynucleotide in the treated sample. The hybridization reaction in step (ii) can be Southern blot, dot blot, or microarray, and the treated sample in step (i) can be a cDNA sample, and step (i) comprises the sub-steps of: isolating a RNA sample from the biological sample; and obtaining the cDNA sample from the RNA sample.

[0022] In some embodiments of the method, the reaction in step (ii) can be amplification reaction. Under such a case, the components as set forth in (c) are utilized, and the positive result in step (iii) is obtaining of at least one amplified polynucleotide of expected size. In preferred embodiments, step (iii) can further comprise verification of the at least one amplified polynucleotide by sequencing.

[0023] Specifically as examples, each of the at least one pair of amplification primers in the components as set forth in (c) can comprise a pair of nucleotide sequences selected from one of SEQ ID NO: 886556 and SEQ ID NO: 886,567; SEQ ID NO: 886566 and SEQ ID NO: 886567; SEQ ID NO: 886568 and SEQ ID NO: 886569; SEQ ID NO: 886560 and SEQ ID NO: 886561; SEQ ID NO: 886558 and SEQ ID NO: 886559; SEQ ID NO: 886564 and SEQ ID NO: 886565; and SEQ ID NO: 886562 and SEQ ID NO: 886563; and the expected size of the at least one amplified polynucleotide is 379 bp, 431 bp, 236 bp, 149 bp, 385 bp, 304 bp, or 160 bp.

[0024] Among these, the primer pair SEQ ID NO: 886556 and SEQ ID NO: 886,567 can be used for PCR amplification of isoform 1 (with an expected size of 379 by for the PCR product); the primer pair SEQ ID NO: 886566 and SEQ ID NO: 886567, and the primer pair SEQ ID NO: 886568 and SEQ ID NO: 886569, can be used for amplification of isoform 2 (with an expected size of 431 by and 236 bp, respectively, for the PCR product); the primer pair SEQ ID NO: 886560 and SEQ ID NO: 886561 for amplification of isoform 3 (with an expected size of 149 by for the PCR product); the primer pair SEQ ID NO: 886558 and SEQ ID NO: 886559 for amplification of isoform 4 (with an expected size of 385 by for the PCR product); the primer pair SEQ ID NO: 886564 and SEQ ID NO: 886565 for amplification of isoform 5 (with an expected size of 304 by for the PCR product); and the primer pair SEQ ID NO: 886562 and SEQ ID NO: 886563 for amplification of isoform 6 (with an expected size of 160 by for the PCR product), respectively.

[0025] In a fourth aspect, the present disclosure provides a method for detecting the presence of KANSARL fusion gene from a genomic DNA sample of a subject. The method comprises: (i) contacting the treated sample with at least one primer pair for PCR amplification; and (ii) determining that the KANSARL fusion gene is present in the genomic DNA sample if the PCR amplification generates a positive result, or that the KANSARL fusion gene is absent in the genomic DNA sample if otherwise. Herein the positive result refers to the generation of a PCR product of expected size after PCR amplification. In some preferred embodiments, the PCR product can further undergo sequencing for verification.

[0026] In one specific embodiment, a primer pair as set forth in SEQ ID NO: 886,574 and SEQ ID NO: 886,575 can be used, and the positive result is the generation of a PCR product of 360 bp. The genomic DNA sample can be prepared from a tissue sample, obtained from any method. For example, it can be prepared from buccal cells via buccal swabs.

### BRIEF DESCRIPTION OF THE DRAWINGS

[0027] FIG. 1 shows schematic diagrams of identification and characterization of KANSL1-ARL17A (KANSARL) fusion transcripts. a). Schematic diagrams of putative mechanisms via an inversion or a duplication to form a genomic structure of KANSL1→ARL17A from a genomic structure of ARL17A→KANSL1. Solid black, gray and white arrows represent KANSL1, ARL17A and other genes indicated by letters and their orientations, respectively. Solid and grey squares represent KANSL1 and ARL17A exons, Vertical triangles are introns. Dashed lines show omitted exons and introns. Dashed lined horizontal arrow indicates unknown genomic sequences; b). Schematic diagrams show the six KANSARL isoforms identified and their junction sequences. The black and grey letters represent KANSL1 and ARL17A cDNA sequences; c) A graphic diagram shows the distribution of the raw counts of the six KANSARL fusion transcripts identified in the ECD39, where the numbers indicate the KANSARL isoforms; d). A graphic diagram shows that 11 cancer lines in the ECD39 have been identified to have KANSARL fusion transcripts. The black bars indicate raw counts of the total KANSARL fusion transcripts; e) A diagram shows distributions of normalized counts of KANSARL fusion transcripts observed in the 11 cancer lines. Y-axis represents the number of splice junctions per million reads (NSJPMR).

[0028] FIG. 2 shows the KANSARL isoform RNA and protein sequences. a) KANSARL isoform 1; b) KANSARL isoform 2; c) KANSARL isoform 3; d) KANSARL isoform 4; e) KANSARL isoform 5; and f) KANSARL isoform 6; The black and underlined letters indicate peptide sequences from KANSL1 and ARL17A genes, respectively.

[0029] FIG. 3 shows schematic procedure of validation of KANSARL isoform 1 and 2 in A549, Hela-3 and K562. a). RT-PCR amplification of KANSARL isoform 1 in A549, Hela-3, K562, 786-O and OS-RC-2; b). RT-PCR amplification of KANSARL isoform 2 in A549, Hela-3, K562, 786-O and OS-RC-2; c). RT-PCR amplification of KANSL1 in A549, Hela-3, K562, 786-O and OS-RC-2; d). RT-PCR amplification of ARL17A in A549, Hela-3, K562, 786-O and OS-RC-2; e). RT-PCR amplification of GAPDH in A549, Hela-3, K562, 786-O and OS-RC-2; f). Sequencing validation of KANSARL isoform 1 splice junctions; g). Sequencing validation of KANSARL isoform 2 splice junctions; h). A graphic diagram shows the relative expression levels of KANSARL isoform 1 and 2 in A549, Hela-3 and K562; and i). A graphic diagram shows the differences between KANSARL isoform 1 and 2 in A549, Hela-3 and K562. Y-axis indicates folds.

[0030] FIG. 4 shows analyses of RNA-seq datasets from diverse types of cancer to illuminate that those KANSARL fusion transcripts are rarely found in cancer patients from Asia and Africa and are detected predominantly in cancer patients from North America. a). Analysis of KANSARL fusion transcripts in the CGD glioblastoma RNA-seq datasets. CE, NE and Normal represent contrast-enhancing regions (CE) of diffuse glioblastomas (GBM), nonenhancing regions (NE) of GBM and brain tissues of non-neoplastic persons as a normal control, respectively. b). Comparative analysis of KANSARL fusion transcripts between the BGD and CGD datasets. BGD and CGD represent 272 glioblastoma patients from Beijing Neurosurgical Institute and 27 glioblastoma patients of Columbia University Medical Center, respectively. c) Comparative analysis of KANSARL fusion transcripts between the VPD and BPD datasets. VPD and BPD are 25 prostate patient samples from Vancouver Prostate Centre and 14 prostate tumor samples from Beijing Genome Institute (BGI), respectively. d). Comparative analysis of KANSARL fusion transcripts between the MULCD and SLCD datasets. MULCD and SLCD represent 20 lung cancer patients from University of Michigan and 168 lung cancer samples from South Korean Genomic Medicine Institute. e). Comparative analysis of KANSARL fusion transcripts between the HIBCD and SKBPD datasets. HIBCD and SKBPD represent 163 breast cancer samples from Hudson Alpha Institute for Biotechnology and 78 breast cancer patients from South Korean, respectively. f). Comparative analysis of KANSARL fusion transcripts among the NLD, BCLD, YLD and ULD datasets. NLD, BCLD, YLD and ULD represent 41 sporadic forms Burkitt Lymphoma from National Cancer Institute, 13 cutaneous T cell lymphoma from Yale University, 23 diffuse large B-cell lymphoma from BC Cancer Agency, and 20 lymphoma samples from Uganda. Black and gray bars indicate total numbers of samples and numbers of samples having KANSARL fusion transcripts, respectively. Dark gray cylinders are percentages of KANSARL-positive samples in the datasets.

[0031] FIG. 5 shows Venn diagrams of overlaps between KANSARL and TMPRSS2-ERG fusion transcripts. a). KANSARL+ tumors; b). KANSARL+ adjacent tissues; and c). KANSARL− tumors. Gray, white and black circles represent the KANSARL-positive, TMPRSS2-ERG and KANSARL-negative, respectively.

[0032] FIG. 6 shows family inherence and population genetics of KANSARL fusion transcripts. a). Diagrams of KANSARL inheritance in the CEPH/Utah Pedigree 1463, which includes four grandparents, two parents and eleven children. Black and white squares represent KANSARL-positive and KANSARL-negative males while black and white squares indicate KANSARL-positive and KANSARL-negative females. The black lines are relationships among the family members. b). frequncies of KANSARL fusion transcripts in some populations of European and African ancestries. GBR is British from England and Scotland); FIN represents Finnish in Finland; TSI is Toscani in Italia; and YRI represents Yoruba in Ibadan, Nigeria.

[0033] FIG. 7 shows RNA-typing of KANSARL fusion transcripts in cancer cell lines. a). RT-PCR amplifications of breast cancer cell lines including MCF7, BT-20, H5578T, HCC1937, AU656, HCC1550, SKBR-3, T47D, MDA-436, SUM-159 and b). RT-PCR amplification of lymphomas cell lines including. DHL-5, DHL-8, Ly-10, Val, DLH-4, DHL-10, Ly-01, and Ferage c) KANSL1 gene; d) ARL17A; and e) GAPDH. All markers are 100 bp DNA markers;

[0034] FIG. 8 shows RT-PCR amplification of KANSARL isoforms. a). KANSARL isoform 1; b). KANSARL isoform 2; c). KANSARL isoform 3; d). KANSARL isoform 4; e). KANSARL isoform 5; f). KANSARL isoform 6; g). GAPDH was used as a control; DNA markers are 100 by markers. Cell lines used for RT-PCR amplification include A549, Hela-3, 293T, K562, HT29, Ly-10 DHL-5, DHL-8, and Val.

### BRIEF DESCRIPTION OF THE SEQUENCE LISTING

[0035] The instant disclosure includes a plurality of nucleotide sequences. Throughout the disclosure and the accompanying sequence listing, the WIPO Standard ST.25 (1998; hereinafter the “ST.25 Standard”) is employed to identify nucleotides. The sequences of sequence ID 1 to sequence 886,543 are novel fusion transcripts. The sequences of sequence ID 886,544 to 886,549 are putative fusion polypeptides of KANSARL isoform 1, 2, 3, 4, 5 and 6. The sequences of sequence ID 886,550 to 886,555 are junction sequences of the putative fusion mRNA sequences of KANSARL isoform 1, 2, 3, 4, 5 and 6. The sequences from sequence ID 886,556 to sequence ID 886, 581 are primers used for RT-PCR and DNA amplifications.

### DETAILED DESCRIPTION

[0036] Kinsella et al. have developed a method of ambiguously mapped RNA-seq reads to identify KANSL1-ARL17A fusion transcripts (Kinsella, Harismendy et al. 2011), which have been shown to have identical fusion junction with a cDNA clone of BC006271 (Strausberg et al. 2002). However, they are not verified experimentally. There is little information how this fusion transcript is related to cancer, which mutations cause fusion, which person has it, how it is inherited, and where it expressed.

[0037] KANSL1 and ARL17A genes are located at the chromosome 17q21.31. KANSL1 encodes an evolutionarily conserved nuclear protein, and is a subunit of both the MLL1 and NSL1 complexes, which are involved in histone acetylation and in catalyzing p53 Lys120 acetylation (Li, Wu et al. 2009). KANSL1 protein also ensures faithful segregation of the genome during mitosis (Meunier, Shvedunova et al. 2015). It has been found that there are two haplotypes, H1 and inverted H2 forms of which contain independently derived, partial duplications of the KANSL1 gene. These duplications have both recently risen to high allele frequencies (26% and 19%) in the populations of Europeans ancestry origin (Boettger, Handsaker et al. 2012). Some mutations have similar functions to the duplications, and both result in the Koolen-de Vries syndrome (KdVS) (OMIM #610443) characterised by developmental delay, intellectual disability, hypotonia, epilepsy, characteristic facial features, and congenital malformations in multiple organ systems (Koolen, Pfundt et al. 2015). ARL17A gene encodes a member of the ARF family of the Ras superfamily of small GTPases that are involved in multiple regulatory pathways altered in human carcinogenesis (Yendamuri, Trapasso et al. 2008)

[0038] Previously, we have observed that recently-gained human spliceosomal introns have a signature of identical 5′ and 3′ splice sites (Zhuo, Madden et al. 2007). Based on this finding, we have found that both 5′ exonic sequences (E5) immediately upstream of introns and 3′ intronic sequences (I3) were dynamically conserved, and appears rather reminiscent of self-splicing group II ribozymes and of constraints imposed by base pairing between intronic-binding sites (IBSs) and exonic-binding sites (EBSs). Therefore, we have proposed that both E5 and I3 sequences constitute splicing codes, which are deciphered by splicer proteins/RNAs via specific base-pairing (Zhuo D 2012). This splicing code model suggested that a yet-to-be characterized splicer proteins/RNA would decode identical sequences in all pre-mRNAs in conjugation with U snRNAs and spliceosomes, regardless whether the E5 and I3 sequences are in the one molecule or two different molecules. Using this splicing code model, we have developed a computation system to analyze RNA-seq datasets to study gene expression, to discover novel isoforms, and to identify fusion transcripts.

[0039] Based on our splicing code model, we have implemented a simple computation system to identify perfectly-identical fusion transcripts of two different traditional transcriptional units. In the previous application of U.S. patent application Ser. No. 14/792,613, filed Jul. 7, 2015, we had used this splicingcode system to analyze RNA-seq datasets from cancer cell lines and cancer patients in ENCODE project and NCBI database and had identified 252,664 novel fusion transcripts. Since then, we have continued to analyze RNA-seq datasets from cancer, other disease and normal samples in the NCBI. After we removed the fusion transcripts identified previously, we have identified total 886,543 novel fusion transcripts of unique fusion junctions. The sequences of these fusion transcripts have been set forth in Seq ID Nos.: 1-886,543.

[0040] To demonstrate the feasibilities and reliabilities of our approaches, we have selected KANSL1-ARL17A (KANSARL) fusion transcripts for systematical investigation. Existence and abundances of multiple KANSARL isoforms in a cell line rule out the possibilities that KANSARL fusion transcripts are trans-spliced products and therefore KANSL1 and ARL17A are adjacent. FIG. 1a shows that a putative inversion or duplication of a normal genomic structure of ARL17A and KANSL1 genes at 17.q21.32 results in a inverted genomic structure of KANSL1 and ARL17A gene order (FIG. 1a Right). FIG. 1b has shown that six KANSARL fusion transcripts of unique splicing junctions have been identified in the ECD39 datasets, which are described in the previous patent application. From these six KANSARL isoforms, the KANSL1 gene has used three splice junctions of exons 2, 3 and 6, suggesting that 5′ breakpoint occurs at least downstream of the exon 2 and it may be downstream of the exon 6 in some cell lines. ARL17A has returned exons 3, 4, 7 and 8, indicating that the 3′ breakpoint occurs upstream of the ARL17A exon 3 (FIG. 1b). Sequence analysis has shown that the KANSARL isoform 2 has an identical fusion junction with a cDNA clone BC006271 (Strausberg, Feingold et al. 2002) and KANSL1-ARL17A fusion transcripts reported previously (Kinsella, Harismendy et al. 2011).

[0041] FIG. 2 shows that the six KANSARL fusion transcripts encode 437, 483, 496, 505, 450 and 637 aa proteins, respectively, majorities of which are from KANSL1 sequences. Consequently, KANSARL fusion transcripts will retain only coiled coil domain and results in loss of WDR5 binding region, Zn finger, domain for KAT8 activity and PEHE, suggesting KANSARL fusion transcripts are similar to some KANSL1 mutations (Koolen, Pfundt et al. 2015).

[0042] To estimate gene expression levels of these six KANSARL isoforms in cancer, we have analyzed distribution of the copy numbers of the six fusion transcripts. FIG. 1c and Table 1 have shown distribution of raw counts of the six KANSARL fusion transcripts. The KANSARL isoform 2 is expressed at the highest levels among the six fusion transcripts and is 50 folds and 1216 folds higher than KANSARL isoform 1 and isoform 3.

TABLE 1
Distribution of KANSARL isoforms in the ECD39 dataset.

| KANSARL Isoforms | Counts | % of Total Expression | Folds |
|---|---|---|---|
| 1 | 48 | 1.93 | 50.69 |
| 2 | 2433 | 97.87 | 1 |
| 3 | 2 | 0.08 | 1216.5 |
| 4 | 1 | 0.04 | 2433 |
| 5 | 1 | 0.04 | 2433 |
| 6 | 1 | 0.04 | 2433 |

[0043] To study the KANSARL fusion transcript expression patterns in cancer cell lines, we have analyzed distribution of the total KANSARL fusion transcripts among the individual cell lines. FIG. 1d and Table 2 have shown that the KANSARL fusion transcripts have been detected in 11 out of 39 cancer cell lines, which included A375, A549, G401, H4, Hela-3, HT29, K562, Karpas422, M059J, OCI-Ly7 and SK-N-DZ (Cautions should be taken for OCI-Ly7 since ENCSR001HHK dataset of Encode project is shown to be KANSARL-negative while ENCSR740DKM dataset is KANSARL-positive). As Table 2 shows, the KANSARL positive cells are from varieties of tissues and cell types as well as diversities of cancer types. Out of 11 cell lines of the positive KANSARL fusion transcripts, the genetic lineages are 6 Caucasian, one black (Hela-3) and 4 unknown genetic backgrounds. To rule out the effects of RNA-seq dataset sizes, we have normalized expression of the KANSARL fusion transcripts. FIG. 1e has shown that the highest expressed fusion transcripts have been found in Karapas-422 cancer cell line. A549, H4, HT29, A375, SK-N-SH, and K562 are among highly-expressed cancer cell lines.

TABLE 2
Basic information of KANSARL-positive
cancer cell lines in the ECD39 dataset.

| Cell Lines | NSJPM | Tissues | Tumors | Sexes | Ages | Ethnic |
|---|---|---|---|---|---|---|
| A375 | 0.13 | Skin | malignant | Female | 54 | Cauca- |
| | | | melanoma | | | sian |
| A549 | 0.11 | Lung | Carcinoma | Male | 58 | Cauca- |
| | | | | | | sian |
| G401 | 0.03 | Kidney | rhabdoid | Male | 0.25 | Cauca- |
| | | | tumor | | | sian |
| H4 | 0.14 | Brain | neuroglioma | Male | 37 | Cauca- |
| | | | | | | sian |
| Hela-3 | 0.06 | cervix | adeno- | Female | 31 | Black |
| | | | carcinoma | | | |
| HT29 | 0.42 | colon | colorectal | Female | 44 | Cauca- |
| | | | adeno- | | | sian |
| | | | carcinoma | | | |
| K562 | 0.22 | Bone | Leukemia | Female | 53 | Un- |
| | | Marrow | | | | known |
| Karpas422 | 1.01 | B cells | non-Hodgkin's | Female | 73 | Un- |
| | | | lymphoma | | | known |
| M059J | 0.09 | Brain | malignant | Male | 33 | Un- |
| | | | glioblastoma | | | known |
| OCI-Ly7 | 0.02 | B cells | non-Hodgkin's | Male | 48 | Un- |
| | | | lymphoma | | | known |
| SK-N-DZ | 0.61 | Brain | neuroblastoma | Female | 2 | Cauca- |
| | | | | | | sian |

[0044] Since FIG. 1d shows that A549, HeLa-3 and K562 express KANSARL fusion transcripts, we have then first sought to verify them at sequence levels. To this end, we have designated primers specific to all six KANSARL fusion transcripts to perform RT-PCR on total RNAs isolated from A549, HeLa-3 and K562 (Table 2) while cell lines 786-O and OS-RC-2 are used as negative controls. FIG. 3a shows that amplification of A549, HeLa3 and K562 cDNAs by KANSARLIsoF1 (Seq ID NO.: 886,556) and KANSARLIsoR1 (Seq ID NO.: 888,557) generate expected 379 by PCR fragments. Sequencing of the PCR fragments has confirmed that cDNAs have the splice junction generated by RNA-seq analysis (FIG. 2f). FIG. 2b shows that KANSARLF1 (Seq ID NO.: 886,566) and KANSARLR1 (Seq ID NO.: 886,567) are used to amplify A549, HeLa3 and K562 cDNAs to produce expected 431 by fragments, which are confirmed by DNA sequencing to have the expected splice junction (FIG. 3g). To check whether these KANSARL-positive cancer cell lines have intact KANSARL parental genes, KANSL1 and ARL17A, we have designated primers across breakpoints of both KANSL1 and ARL17 genes to perform RT-PCR amplification on these five cancer cell lines. FIGS. 2c & 2d have shown that A549, HeLa-3 and K562, similar to 786-O and OS-RC-2, have RT-PCR products detected, indicating that these cell lines have at least one copy of KANSL1 and one copy of ARL17A while PCR products generated by GAPDHF1 (Seq ID NO.: 886,570) and GAPDHR1 (Seq ID NO.: 886,571) are used as a control (FIG. 3e).

TABLE 3
The primers used to perform RT-PCR and real-
time PCR

| | | | KAN- |
|---|---|---|---|
| | | | SARL |
| | | SEQ ID | Iso- |
| Primer IDs | Primer Sequences | NOs | forms |
| KANARLIsolF1 | CAAGCCAAGCAGGTTGAGA | 886556 | 1 |
| KANARLIso1R1 | TCTCCACACAGAAACAGGGGTA | 886557 | |
| KANARLIso4F1 | TTGTGCAAGCCAAGCAGGTT | 886558 | 4 |
| KANARLIso4R1 | TGGGAAGCTGATAGCTAGGGGT | 886559 | |
| KANARLIso3F1 | TCAGAATGGAAATGGGCTGCA | 886560 | 3 |
| KANARLIso3R1 | TTCCTGGGCTTCTGGCACCTT | 886561 | |
| KANARLIso6F1 | AGACGCAGGTCAGAATGGAAAT | 886562 | 6 |
| KANARLIso6R1 | AAACTGGGAAGCTGATAGCTCT | 886563 | |
| KANARLIso5F1 | TGTCTTGGCAGACCACATTC | 886564 | 5 |
| KANARLIso5R1 | GGAAAAAGGCTCACCATTTCA | 886565 | |
| KANSARLF1 | GCCTTGAGAA AAGCTGCCAG | 886566 | 2 |
| KANSARLR1 | aacatcccagacagcgaagg | 886567 | |
| KANSARLF2 | GAGACGCAGGTCAGAATGGA | 886568 | 2 |
| KANSARLR2 | Aaatgc tgc cac agaggtct | 886569 | |
| GAPDHF1 | CAAGGTCATCCATGACAACTTTG | 886570 | |
| GAPDHR1 | GTCCACCACCCTGTTGCTGTAG | 886571 | |
| GAPDHqF1 | GCGACACCCACTCCTCCACCTTT | 886572 | |
| GAPDHqR1 | TGCTGTAGCCAAATTCGTTGTCATA | 886573 | |
| KANSARLgF1 | TGTGCAGCCTAAGCATGATCCT | 886574 | |
| KANSARLgR1 | GACACAGTGGCTCATGCCTGTAAT | 886575 | |

[0045] FIGS. 3a & 3b demonstrate that A549, Hela-3 and K562 express both KANSARL isoform 1 and 2 and Table 1 shows that the counts of KANSARL isoform 2 reads is 50-fold higher than those of KANSARL isoform 1, suggesting that KANSARL isoform 2 is expressed at much higher level than the KANSARL isoform 1. To establish a relationship between KANSARL expression levels and counts of RNA-seq reads crossing splice junctions, we have performed real-time PCR of A549, Hela-3 and K562 on KANARL isoform 1 by KANSARLIsoF1 (Seq ID NO.: 886,556) and KANSARLIsoR1 (Seq ID NO.: 886,557) and on KANARL isoform 2 by KANSARLF2 (Seq ID NO.: 886,568) and KANSARLR2 (Seq ID NO.: 886,569) while products amplified by GAPDHqF1 (Seq ID NO.: 886,572) and GAPDHqR1 (Seq ID NO.: 886,573) is used as reference control. FIG. 3h shows relative expression levels of KANSARL isoform 1 (grey bars) and 2 (black bars) in A549, Hela-3 and K562.

[0046] Table 4 shows that KANSARL isoform 2 are expressed at 0.35%, 0.28% and 1.28% of the GAPHD expression in A549, Hela-3 and K562, respectively while KANSARL isoform 1 are expressed only at 0.0056%, 0.0037% and 0.015% of the GAPHD expression in A549, Hela-3 and K562, respectively. FIG. 3i and Table 4 show that KANSARL isoform 2 (black bars) are expressed at average 73 fold higher than KANSARL isoform 1 (gray bars), which ranged from 63.7 folds in A549 to 82.9 folds in K562. These qPCR differences between two KANSARL isoforms are generally consistent with that obtained from RNA-seq data analysis (FIGS. 1c&d). K562 expresses KANSARL isoform 2 at 1.2% of GAPDH gene expression levels; while A549 and Hela-3 express this isoform at 0.3% of GAPDH ones (FIG. 3h). The former level is about 4 fold of the latter, which are also consistent with data obtained from RNA-seq data analysis (FIG. 1e). Further study is required to confirm whether four folds of the qPCR differences between A549 and Hela-3/K562 are genotype differences between KANSARL⁺/KANSARL⁺ and KANSARL⁺/KANSARL⁻ or gene expression differences among different cancer types.

TABLE 4
Real-time PCR Quantifications of KANSARL isoform 1 and 2 in A549, Hela-3 and K562.

| | | Ratios of KANSARL soforms and GAPHD Expression Levels | | | | | |
|---|---|---|---|---|---|---|---|
| Cell Lines | Gene/Isoforms | Rep 1 | Rep 2 | Rep 3 | Average | SD | Folds |
| A549 | GAPHD | 1 | 1 | 1 | 1 | 0 | |
| | KANSARL Iso2 | 0.0035 | 0.0037 | 0.0036 | 0.0036 | 0.000087 | 63.7 |
| | KANSARL Iso1 | 5.69E−05 | 5.5E−05 | 5.7E−05 | 5.6E−05 | 1.12E−06 | |
| Hela-3 | GAPHD | 1 | 1 | 1 | 1 | 0 | |
| | KANSARL Iso2 | 0.00288 | 0.00288 | 0.00278 | 0.0028 | 5.66E−05 | 76.3 |
| | KANSARL Iso1 | 3.58E−05 | 3.8E−05 | 3.8E−05 | 3.7E−05 | 1.36E−06 | |
| K562 | GAPHD | 1 | 1 | 1 | 1 | 0 | |
| | KANSARL Iso2 | 0.0129 | 0.0128 | 0.0128 | 0.0128 | 5.132E−05 | 82.9 |
| | KANSARL Iso1 | 0.70002 | 0.0002 | 0.0002 | 0.00015 | 1.07E−06 | |

[0047] As Table 2 shows that KANSARL fusion transcripts are expressed in diverse cancer types, this has prompted us to analyze RNA-seq data from varieties of cancer types to identify and characterize KANSARL gene expression among diverse cancer RNA-seq datasets. To investigate whether KANSARL fusion transcripts are expressed in brain cancer and tissues, we have downloaded and analyzed the glioblastoma RNA-seq dataset of Columbia University Medical Center (designated as CGD), which has total of 94 samples included 39 contrast-enhancing regions (CE) of diffuse glioblastomas (GBM), 36 nonenhancing regions of GBM (NE) and 19 non-neoplastic brain tissues (Normal) from 17 samples (Gill, Pisapia et al. 2014). The CGD has total 27 patients and both CE and NE datasets have 24 patients, respectively, 21 of which are overlapped.

[0048] FIG. 3a and Table 5 show that KANSARL fusion transcripts have been found in 13 CE patients and 11 NE patients. Together, 14 (51.9%) of the 27 GBM patients have been found to have fusion transcripts. In contrast, KANSARL fusion transcripts have been detected only in 2 (or 11.7%) of 17 non-neoplastic brain tissues. The KANSARL-positive glioblastomas patients are 30% higher than the non-neoplastic persons (FIG. 4a). The difference is shown to be statistically significant (Z=2.03, p<0.04), demonstrating that KANSARL fusion transcripts are associated with diffuse glioblastomas. In contrast, the difference in numbers of KANSARL-positive NC and NE samples is statistically insignificant (Z=0.577, p>0.8), suggesting that KANSARL genotypes of the NE samples are similar to those of the NC samples.

TABLE 5
Statistical analysis of number differences of KANSARL+
samples between glioblastomas CE and NE samples

| | # of | # of | % of | Z | proba- |
|---|---|---|---|---|---|
| Types | Samples | KANSARL+ | KANSARL+ | Scores | bilities |
| CE | 24 | 13 | 54.17 | 0.577 | 0.5637 |
| NE | 24 | 11 | 45.83 | | |

TABLE 6
Comparison of number differences of KANSARL+
samples between glioblastomas and non-neoplastic samples

| | # of | # of | % of | Z | proba- |
|---|---|---|---|---|---|
| Types | Samples | KANSARL+ | KANSARL+ | Scores | bilities |
| Total | 27 | 14 | 51.85 | 2.029 | 0.042 |
| Normal | 17 | 2 | 11.76 | | |

[0049] Since we have shown that KANSARL fusion transcripts are associated with diffuse glioblastomas, to characterize that KANSARL fusion transcripts in other glioblastoma datasets, we have performed comparative analysis of the glioblastoma dataset deposited by Beijing Neurosurgical Institute (designated as BGD), which have 272 gliomas of different clinic prognosis stages (Bao, Chen et al. 2014). Surprisingly, only two KANSARL-positive samples have been detected out of 272 BGD glioblastoma (FIG. 4b). Only less than 1% of BGD glioblastoma is KANSARL-positive and is 52 times lower than that in the CGD dataset. Table 7 shows that the difference between BGD and CGD is statistically significant (Z=11.26, p<0.0005), suggesting that the BGD's KANSARL genotypes are divergent from those of CGD. Larger numbers of high-quality RNA-seq reads per sample in the BGD's dataset rule out the possibilities that the RNA-seq datasets are responsible for the difference between the two datasets (Gill, Pisapia et al. 2014).

TABLE 7
Comparison of number differences of KANSARL+
samples between BGD and CGD samples

| | # of | # of | % of | Z | Proba- |
|---|---|---|---|---|---|
| Types | Samples | KANSARL+ | KANSARL+ | Scores | bilities |
| BGD | 272 | 2 | 0.74 | 11.26 | <0.00001 |
| CGD | 27 | 14 | 51.85 | | |

[0050] The dramatic differences of KANSARL fusion transcripts between the CGD and BGD have raised the possibility that KANSAR fusion transcripts are associated with the cancer patients of European ancestry origins, but absent in cancer patients of Asian ancestry. To study this possibility, we have systematically performed comparative analyses of RNA-seq datasets of prostate cancer, breast cancer, lung cancer and lymphomas around the world. Prostate cancer is the most common nonskin cancer and the second leading cause of cancer-related death in men in the United States. We have downloaded and performed analysis of the prostate cancer dataset from Vancouver Prostate Centre (designated as VPD), which contains 25 high-risk primary prostate tumors and five matched adjacent benign prostate tissues (Wyatt, Mo. et al. 2014), and BGI prostate cancer dataset (BPD), which contain 14 pairs of prostate cancer and normal samples (Ren, Peng et al. 2012). We have detected KANSARL fusion transcripts in 13 (52%) out of the 25 VPD prostate samples (FIG. 4c) and 4 out of 5 adjacent benign prostate tissues. KANSARL isoform 1, 2, and 3 have been detected in the VPD samples and have very similar patterns to those observed in ECD39 (FIG. 1c). In contrast, we have found no single copy of KANSARL fusion transcript in the BPD prostate tumors and their matched normal samples (FIG. 4c). Table 8 shows that the difference between VPD and BPD is statistically significant (z=3.118; p<0.05). It is well known that TMPRSS2-ERG is one of the most frequent fusion genes in prostate tumors (Wyatt, Mo. et al. 2014). To investigate relationship between KANSARL and TMPRSS2-ERG fusion transcripts, we have performed analysis of TMPRSS2-ERG fusion transcripts and have detected 15 out 25 prostate tumors to have TMPRSS2-ERG fusion transcripts. Even more surprisingly, 13 out of 15 TMPRSS2-ERG-positive prostate tumors are KANSARL-positive or all of 13 KANSARL-positive prostate tumors are shown to have TMPRSS2-ERG fusion transcripts (FIG. 5a). In contrast, only two TMPRSS2-ERG-positive prostate tumors are detected in 12 KANSARL-negative prostate tumors (FIG. 5b). Table 8 shows that the differences of TMPRSS2-ERG fusion transcripts between KANARL-positive and KANSARL-negative tumors is significant (z=4.25, p<0.0005), suggesting that KANSARL fusion transcripts are closely associated with TMPRSS2-ERG and may play roles in generating TMPRSS2-ERG in prostate tumors. On the other hand, two samples out of 5 adjacent benign prostate tissues have been shown to have both TMPRSS2-ERG and KANSARL fusion transcripts (FIG. 5c), suggesting that prostate tumor cells are present the adjacent benign tissues. In contrast, only one BPD's patient has been found to have TMPRSS2-ERG fusion transcripts.

TABLE 8
Comparison of number differences of KANSARL+
samples between VPD and BPD samples

| | # of | # of | % of | Z | proba- |
|---|---|---|---|---|---|
| Types | Samples | KANSARL+ | KANSARL+ | Scores | bilities |
| VPD | 25 | 13 | 52 | 3.118 | 0.002 |
| BPD | 14 | 0 | 0 | | |

TABLE 9
Overlaps between KANSAL and TMPRSS2-ERG
fusion transcripts in the VPD samples

| | | # of | % of | | |
|---|---|---|---|---|---|
| Sample | # of | TMPRSS2- | TMPRSS2- | Z | proba- |
| Types | Samples | ERG+ | ERG+ | Scores | bilities |
| KANSARL+ | 13 | 13 | 100 | 4.25 | 2.10E−05 |
| KANSARL− | 12 | 2 | 16.67 | | |

[0051] To investigate whether KANSARL fusion transcripts are associated with other fusion transcripts, we have investigated differentially expressed fusion transcripts in both VPD prostate and CGD glioblastomas. To count fusion transcripts as a differentially-expressed fusion transcripts in cancer, fusion transcripts must have ≧75% of ≧5 samples in one group. Supplementary Table 9 shows that KANSARL-positive prostate cancer patients 26 differentially-expressed fusion transcripts, 81% of them are read-through (epigenetic) fusion transcripts while KANSARL-negative patients have 16 differentially-expressed fusion transcripts, 69% of which are read-through fusion transcripts. On the other hand, KANSARL-positive glioblastomas patients have 20 differentially-expressed fusion transcripts, 95% of which are read through while KANSARL-negative glioblastomas patients have only 6 differentially-expressed fusion transcripts, all of which are breakthroughs (Table 10). Data analysis shows that there are no overlapped fusion transcripts between prostate cancer and glioblastomas patients, suggesting these fusion transcripts are tissue-specific and cancer-specific.

TABLE 10
Comparison of differentially-expressed fusion transcripts
in KANSARL-positive and KANSARL-negative patients.

| | |
|---|---|
| KANSARL-positive | KANSARL-negative |

| | | | |
|---|---|---|---|
| Counts | % | Counts | % |

a Prostate Cancer

| | | | | |
|---|---|---|---|---|
| Genetic | 5 | 19.23 | 5 | 31.25 |
| Epigenetic | 21 | 80.77 | 11 | 68.75 |
| Total | 26 | | 16 | |

b Glioblastomas

| | | | | |
|---|---|---|---|---|
| Genetic | 1 | 5 | 0 | 0 |
| Epigenetic | 19 | 95 | 6 | 100 |
| Total | 20 | | 6 | |

[0052] Lung cancer is the leading cause of cancer deaths in the World, especially in Asia. To investigate the expression of KANSARL fusion transcripts, we have analyzed the Korean Lung Cancer RNA-seq dataset (designated as SKLCD), which has 168 lung cancer samples (Ju, Lee et al. 2012) and Michigan of University Lung Cancer Dataset (designated as MULCD), which contains 20 lung tissue samples (Balbin, Malik et al. 2015). We have found that eight (40%) out of 20 MULCD samples have KANSARL fusion transcripts (FIG. 4d). Even though SKLCD data are more than five folds larger than the MULCD ones, no single copy of KANSARL fusion transcripts have been detected in 168 SKLCD samples (FIG. 4d). Table 11 shows that the differences of KANSARL fusion transcripts between MULCD and SKLCD is significant (z=8.38, p<0.0005), suggesting that KANSARL fusion transcripts are associated with MULCD lung cancer patients.

TABLE 11
Comparison of number differences of KANSARL+
samples between MULCD and SKLCD samples

| | # of | # of | % of | Z | proba- |
|---|---|---|---|---|---|
| Types | Samples | KANSARL+ | KANSARL+ | Scores | bilities |
| MULCD | 20 | 8 | 40 | 8.3777483 | <0.00001 |
| SKLCD | 168 | 0 | 0 | | |

[0053] Breast Cancer is the most common incident form of cancer in women around the world and about 1 in 8 (12%) women in the US will develop invasive breast cancer during their lifetime. To investigate whether KANSARL fusion transcripts are expressed in breast cancer, we have performed analyses on the breast cancer dataset from USA Hudson Alpha Institute for Biotechnology (designated as HIBCD), which consists of 28 breast cancer cell lines, 42 ER+ breast cancer primary tumors, 30 uninvolved breast tissues adjacent to ER+ primary tumors, 42 triple negative breast cancer (TNBC) primary tumors, 21 uninvolved breast tissues adjacent to TNBC primary tumors and 5 normal breast tissues (Varley, Gertz et al. 2014), and breast cancer samples from South Korean (designated as SKBCP), which have samples from 22 HRM (high-risk for distant metastasis) and 56 LRM (low-risk for distant metastasis) breast cancer patients (PRJEB9083 2015). FIG. 4e shows that 50 (or about 30%) HIBCD breast samples have been found to have KANSARL fusion transcripts while no SKBCP patients have been observed to have KANSARL fusion transcripts. Table 12 shows that the difference between HIBCD and SKBCP has been shown by χ2-test to be statistically significant (p≦0.001), suggesting that breast cancer patients from South Korea have no KANSARL fusion transcripts.

TABLE 12
Comparison of number differences of KANSARL+
samples between HIBCD and SKBCP samples

| | # of | # of | % of | Z | proba- |
|---|---|---|---|---|---|
| Types | Samples | KANSARL+ | KANSARL+ | Scores | bilities |
| HIBCD | 163 | 49 | 30.06 | 5.43 | <0.00001 |
| SKBCP | 78 | 0 | 0 | | |

[0054] Since HIBCD have multiple breast cancer types, we have performed further data analysis of the HIBCD breast samples. FIG. 4g and Table 13 shows that normal tissues, breast cancer cell lines, TNBC primary tumors and uninvolved breast tissues adjacent to TNBC primary tumors have 23.8% to 28.5% of KANSARL-positive samples while ER+ breast cancer primary tumors and uninvolved breast tissues adjacent to ER+ primary tumor are 35.7% and 40%. KANSARL-positive percentages of The TNBC samples are much closer to the normal one, which are shown to have no statistical differences. On the other hand, the KANSARL-positive ratios in the ER+ samples are 15% higher than the normal one, suggesting that KANSARL fusion transcripts have much bigger impacts on ER+ breast cancer than TNBC breast cancer.

TABLE 13
Comparison of number differences of KANSARL+ samples
among different subtypes of breast cancers in HIBCD samples

| | # of | # of | % of | Z | proba- |
|---|---|---|---|---|---|
| Types | Samples | KANSARL+ | KANSARL+ | Scores | bilities |
| ER+ | 42 | 15 | 35.71 | −0.386 | 0.699 |
| ER+BTA | 30 | 12 | 40 | 0.882 | 0.378 |
| Normal | 5 | 1 | 20 | −0.188 | 0.852 |
| TNBC | 42 | 10 | 23.81 | −0.416 | 0.498 |
| TNBCBTA | 21 | 6 | 28.57 | 0.280 | 0.779 |
| BCCL | 28 | 7 | 25 | | |

[0055] To investigate whether the KANSARL fusion transcripts are expressed in cancer samples from the African population, we have analyzed the Uganda lymphomas dataset (designated as ULD), which contains 20 lymphoma samples (Abate, Ambrosio et al. 2015). We have performed analyses of multiple lymphoma RNA-seq datasets including NCI lymphoma dataset (designated as NLD), which has 28 sporadic form Burkitt Lymphoma (BL) patient biopsy samples and 13 BL cell lines (Schmitz, Young et al. 2012), Yale University T-cell lymphoma dataset (designated as YLD), which has 13 cutaneous T cell lymphoma and BC Cancer Agency lymphoma data (designated as BLD), in which 23 RNA-seq data of diffuse large B-cell lymphoma have been identified (Morin, Mungall et al. 2013). Even though lymphoma subtypes and the sample sizes are different, we have found that have 34% to 38% of NLD, YLD and BLD samples have KANSARL fusion transcripts (FIG. 4f). On the other hand, no single copy of KANSARL fusion transcripts have been detected in 20 ULD lymphoma samples (FIG. 4f). Table 14 shows that the differences of KANSARL-positive samples between Uganda and North America are statistically significant (Z≧3.0; p≦0.0026) and suggested that Uganda lymphomas are not associated with KANSARL fusion transcripts.

TABLE 14
Comparison of number differences of KANSARL+
samples among the NLD, BCLD, YLD and ULD samples

| | # of | # of | % of | Z | proba- |
|---|---|---|---|---|---|
| Types | Samples | KANSARL+ | KANSARL+ | Scores | bilities |
| NLD | 41 | 15 | 36.59 | 3.11 | 0.002 |
| BCLD | 23 | 8 | 34.78 | 3.23 | 0.001 |
| YLD | 13 | 5 | 38.46 | 3.01 | 0.003 |
| ULD | 20 | 0 | 0 | | |

[0056] As shown in FIG. 4, samples of diverse types of cancer from North America (USA and Canada) have been found to have highly recurrent KANSARL fusion transcripts, which ranged from 30% in breast cancer to 52% in prostate tumors. In contrast, KANSARL fusion transcripts have been detected in two glioblastoma samples from China and Hela-3 cancer cell line, ethnicity of which is black. No KANSARL fusion transcripts have been found in the rest of the cancer samples from South Korea, China and Uganda. Based on localities of health services, we can conclude that KANSARL fusion transcripts have been rarely found in the cancer samples from Asian and African ancestry origins and are specifically associated with cancer samples of European ancestry origins.

[0057] Presence of KANSARL fusion transcripts in normal and adjacent tissues raised the possibility that KANSARL fusion transcripts are an inherited germline fusion gene. To test this possibility, we have performed RNA-seq data analysis of the lymphoblastoid cell lines of families from the CEU population (CEPH/Utah Pedigree 1463, Utah residents with ancestry from northern and western Europe), which has a 17-individual, three-generation family (Li, Battle et al. 2014). Table 15 shows that KANSARL fusion transcripts have been detected in 15 of 17 family members as indicated by black squares and circles (FIG. 6a). Only the father (NA12877) and daughter (NA12885) are not KANSARL carriers. Based on these data, if we can assume that the father and mother is KANSARL⁻/KANARL⁻, and KANSARL⁺/KANARL⁺, their sons and daughters would have KANSARL⁺/KANARL⁻ except for one daughter. The daughter (NA12885) is an outlier, which may have the mutated gene or may be promiscuous. However, based on the RNA-seq data, the more reasonable explanation is that the father (NA12877) may be mixed up with one of his sons during experiments and have a genotype of KANSAR⁺/KANARL⁻. Consequently, their sons and daughters would have one quarter of KANSARL⁺/KANARL⁺ and are well fit with what is predicted by Mendel's law.

TABLE 15
Distribution of KANSARL fusion transcripts
in the CEPH/Utah Pedigree 1463

| Individual ID | Run ID | MB | KANSARL+ |
|---|---|---|---|
| NA12877 | SRR1258217 | 4670 | 0 |
| NA12878 | SRR1258218 | 3709 | 10 |
| NA12879 | SRR1258219 | 4759 | 11 |
| NA12880 | SRR1258220 | 4523 | 3 |
| NA12881 | SRR1258221 | 3548 | 7 |
| NA12887 | SRR1258222 | 3900 | 5 |
| NA12888 | SRR1258223 | 3141 | 2 |
| NA12892 | SRR1258224 | 3509 | 7 |
| NA12893 | SRR1258225 | 3529 | 8 |
| NA12882 | SRR1258226 | 3801 | 10 |
| NA12883 | SRR1258227 | 2644 | 3 |
| NA12884 | SRR1258228 | 3086 | 4 |
| NA12885 | SRR1258229 | 4242 | 0 |
| NA12886 | SRR1258230 | 3485 | 11 |
| NA12889 | SRR1258231 | 3313 | 15 |
| NA12890 | SRR1258232 | 3145 | 1 |
| NA12891 | SRR1258233 | 3189 | 5 |

[0058] FIG. 4 shows that KANSARL fusion transcripts are rarely detected in cancer samples from Asia and Africa, but are observed in 30-52% of tumor samples from North America and FIG. 6a shows that KANSARL fusion transcripts are an inherited germline fusion gene. To estimate the percentages of general populations, we have downloaded and analyzed RNA-seq data analysis of the lymphoblastoid cell lines of the 1000 Genome Project (Genomes Project, Auton et al. 2015). Table 16 has shown that no single copy of KANSARL fusion transcripts has been detected in the Nigeria YRI (Yoruba in Ibadan) populations and that KANSARL fusion transcripts have been found in 33.7% GBR (British from England and Scotland), 26.3% FIN (Finnish in Finland) and 26.9% TSI (Toscani in Italia) populations, respectively (FIG. 6b). Table 16 shows that the differences of KANSARL frequencies among the GBR, FIN and TSI populations are not statistically significant (Z≦1.11, p>0.27), suggesting these differences may be caused by sampling errors. On the other hand, their difference with the YRI KANSARL frequencies is statistically significant (Z≧5.2; p<0.00001), confirming the previous observation that KANSARL fusion transcripts rarely exist in the tumor samples from African ancestry.

TABLE 16
Comparison of KANSARL frequency differences
of GBR, FIN, TSI and YRI populations

| Sample | # of | # of | % of | Z | proba- |
|---|---|---|---|---|---|
| IDs | Samples | KANSARL | KANSARL | Scores | bilities |
| GRB | 95 | 32 | 33.68 | 6.024 | <0.00001 |
| FIN | 95 | 25 | 26.32 | 5.206 | <0.00001 |
| TSI | 93 | 25 | 26.88 | 5.266 | <0.00001 |
| YRI | 89 | 0 | 0.00 | | |

[0059] As shown above, KANSARL fusion transcripts seem to be expressed in many human tissues and organs. To systematically understand the patterns of KANSARL gene expression in human bodies, we have downloaded and analyzed RNA-seq datasets from Science for Life Laboratory, Sweden (designated as SSTD), which originated from tissue samples of 127 human individuals representing 32 different tissues (Uhlen, Fagerberg et al. 2015). Table 17 shows that KANSARL fusion transcripts have been detected in 28 of 32 tissues analyzed. Only bone marrow, kidney, stomach and smooth muscle have not been found to have KANSARL fusion transcripts. Since G401 and K562 originated from Kidney and bone marrow, respectively, our data suggest that KANSARL transcripts are expressed in the most human tissues if they are not ubiquitously expressed in the human tissues and organs and may be similar to the KANSL1 gene expression patterns.

TABLE 17
Distribution of KARSARL fusion transcripts
in human tissues and organs

| Tissues | KANSARL |
|---|---|
| adipose tissue | + |
| adrenal gland | + |
| ovary | + |
| appendix | + |
| bladder | + |
| bone marrow | − |
| cerebral cortex | + |
| colon | + |
| duodenum | + |
| endometrium | + |
| esophagus | + |
| fallopian tube | + |
| gall bladder | + |
| heart | + |
| kidney | − |
| liver | + |
| lung | + |
| lymph node | + |
| pancreas | + |
| placenta | + |
| prostate | + |
| rectum | + |
| salivary gland | + |
| skeletal muscle | + |
| skin | + |
| small intestine | + |
| smooth muscle | − |
| spleen | + |
| stomach | − |
| testis | + |
| thyroid | + |
| tonsil | + |

[0060] In order to verify KANSARL fusion transcripts could be detected at such highly frequencies, we have performed RT-PCR amplification of uncharacterized samples of breast cancer cell lines and lymphomas available. FIG. 7a showed that we have performed RT-PCR on 10 breast cancer cell lines and 4 of them have been found to have KANSARL isoform 2. These four KANSARL positive breast cancer cell lines are HCC-1937, T47D, MAD-436 and SUM-157, all of which have Caucasian ethnic backgrounds. Furthermore, we have performed RT-PCR amplification on 8 lymphomas cell lines. KANSARL isoform 2 has been detected in DHL-5, DHL-8, OCI-Ly10 and Val (FIG. 7b) as does KANSARL isoform 1 (data not shown). FIGS. 7c & 7d showed that all eight lymphomas have at least one copy of KANSL1 and one copy of ARL17A gene while FIG. 7e showed RT-PCR amplification of GAPHD mRNA as controls. Even though the numbers of breast cancer and lymphomas are relatively small, the percentages of KANSARL-positive cell lines are within those obtained from RNA-seq data analysis, suggesting that KANSARL fusion transcripts are highly recurrent in the cancer samples of European ancestry origin.

[0061] FIG. 3 and FIG. 7 show that many cancer cell lines have been shown to have dominant KANSARL isoform 2. To investigate the KANSARL isoform expression, we have performed RNA amplifications of all KANSARL isoforms on some of the KANSARL positive cell lines. FIG. 8 shows that all KANSARL isoforms except for the KANSARL isoform 6 have been detected in nine KANSARL-positive cancer cell lines, including A549, Hela-3, 293T, K562, HT29, LY10, DHL-5, DHL-8 and VAL. This suggests that RT-PCR amplification can be used to detect KANSARL fusion transcripts expressed at <0.05% of the GAPHD gene expression levels.

[0062] We have demonstrated that KANSARL fusion transcripts are familial-inherited, and that KANSARL are expressed in the majorities of tissues. Supplementary Table 8 has shown that KANSARL fusion transcripts have been found in an average of 28.9% of the population of European ancestry, which ranges from 26.3% FIN to 33.7% GBR (FIG. 6b). No previous evidence has suggested that KANSARL fusion transcripts are associated with cancer or are derived from cancer predisposition gene. We have provided four lines of evidence supporting that the KANSARL fusion transcripts are associated with multiple types of cancer. First, the frequency of KANSARL fusion transcripts in the CGD glioblastomas patients is significantly higher than the non-neoplastic (normal) control. Second, all KANSARL-positive prostate tumor patients also have prostate cancer biomarker TMPRSS2-ERG fusion transcripts. Third, we have shown that 4 out of 10 breast cancer cell lines and 4 out of 8 lymphoma cell lines have been detected to have KANSARL fusion transcripts. Fourth, the high frequencies of KANSARL fusion transcripts in glioblastomas, prostate, breast cancer, lung cancer and lymphomas patients from North America suggest that KANSARL fusion transcripts are associated with multiple types of cancer. Therefore, we can conclude that KANSARL fusion transcripts are derived from the cancer predisposition fusion gene.

[0063] FIG. 2 has shown that six KANSARL isoforms identified encode proteins with 437, 483, 496, 505, 450 and 637 aa, majorities of which come from the KANSL1 sequences and bear similarities to some KANSL1 mutations (Koolen, Pfundt et al. 2015). KANSARL putative proteins would lack the WDR5 binding region and the Zn finger domains responsible for KAT8 activity, and PEHE domain. Loss of these domains results in KAT8 HAT inactivation to catalyze H4K16 acetylation (Huang, Wan et al. 2012), which is recently recognized as a common hallmark of human tumors (Fraga, Ballestar et al. 2005). In addition inactivation of KAT8 to catalyze p53 Lys120 acetylation inhibits the abilities of p53 to activate downstream p53 target genes, which regulate p53-mediated apoptosis and can promote cancer (Mellert, Stanek et al. 2011). Association between KANSARL and TMPRSS2-ERG fusion transcripts have been observed in prostate tumors, but not in glioblastomas or any other types of cancer analyzed so far, suggest that genomic alternations are tissue-specific and cancer-specific. Understanding these specific genetic abbreviations not only help us to develop better detection of much early stages of tumors, but also enable us to identify drug targets to block these processes. Supplementary Table 9 shows that KANSARL fusion transcripts are specifically associated with many read-through fusion transcripts, which are thought to be epigenetic. Understanding how KANSARL affect how epigenetic alternations will result in tumor genesis. One approach is to use KANSARL-specific antibodies or siRNAs to degrade KANSARL mRNA or proteins and to check whether such degradation will restore epigenetic changes. It has of great interests to investigate whether blood transfusions from KANSARL carriers cause cancer because blood is more likely to have cancer progenitor cells and KANSARL may activate epigenetic pathways in weak patients. If cancer patients express KANSARL fusion transcripts and will reduce histone acetylation, these patients may be sensitive to histone deacetylase inhibitors (HDAC inhibitors). Therefore, typing of KANSARL fusion transcripts will improve outcomes of HDAC inhibitors.

[0064] This research has used RNA-seq datasets from diverse laboratories around the World to identify and analyze KANSARL fusion transcripts. The qualities, lengths and numbers of RNA-seq read are greatly variable from sample to sample. The main issues to analyze RNA-seq data—“Big Data” are fast and accurate. To solve both problems, we have used splicing code table and removed majorities of highly-repetitive splicing sequences from the current version of the implementation. Because our model requires that both 5′ and 3′ genes are present in the splicingcode table, we have greatly improved the accuracy of detecting the fusion transcripts and dramatically increased computation speeds. In addition, we have identified only fusion transcripts, whose sequences have to be identical to reference sequences. Because of these quality improvements, the maximum random error to generate a fusion transcript is 1.2×10⁻²⁴ and the medium error is 1×10⁻⁵⁹. Since the number of RNA-seq reads would dramatically affect detecting KANSARL fusion transcripts, especially if the samples are KANSARL negative, we have selected potential KANSARL-negative datasets with higher qualities and at least 20 million of effective RNA-seq reads. These quality controls have greatly increased data reproducibility and reduced data errors. For example, the CGD dataset has 27 glioblastoma patents, which have 39 CE samples and 36 NE samples that are effectively constituted as multiple duplication experiments. All KANSARL-positive samples have been detected in the corresponding CE and NE samples and the duplication samples and all KANSARL-negative samples are also reproducible. That is, 100% of both KANSARL-positive and KANSARL-negative samples can be reproducible. If cancer samples might contain different ethnic backgrounds, especially samples from North American may have higher possibilities of having patients from African and Asian ancestry origins, it would have some negative impacts on our data analysis. However, these minor imperfections would not affect our conclusion that KANSARL fusion transcripts are associated with cancer samples of European ancestry origin.

[0065] As shown in FIG. 4, KANSARL fusion transcripts are specific to European ancestry origin and likely result from inversion of ARL17-KANSL1 genes or local duplication. The genes KANSL1, ARL17A and MAPT located in 1 Mb inversion of chromosomal band 17q21.31 have been shown to have polymorphism. This inversion has resulted in the H1 and H2 haplotypes of 17q21.31, which have been shown to reach high allele frequency (26% and 19%, respectively) in West Eurasian populations, but absent in both African and Asian populations (Boettger, Handsaker et al. 2012). Analysis of genomic structures has shown that the population of European ancestry origin have short (155 kbp) and long (205 kbp) duplications corresponding to the promoter and first exon of KANSL1 associated with the H2 and H1 haplotypes, respectively (Steinberg, Antonacci et al. 2012). Both duplications have resulted in novel KANSL1 transcripts. The cDNA clone BC006271 identified in ovary adenocarcinoma (Strausberg, Feingold et al. 2002) has later been detected in one lymphoblastoid cell line of H113 population of the European ancestry origin (Boettger, Handsaker et al. 2012), and has been shown to have identical fusion junction to KANSARL isoform 2.

[0066] Isolation of Total RNAs from the Cell Lines.

[0067] Cell growth media were removed from the petri dishes. 1 ml of Trizol reagent (Invitrogen, CA) was added directly into the cells in the culture dishes per 10 cm² of the culture dishes. The cells were lysed directly by vortex for 15 second vigorously and the mixes were incubated at room temperature for 2-3 min. The samples were centrifuged at 4000 g for 15 minutes to separate the mixtures into a lower red, phenol-chloroform phase and a colourless upper aqueous phase. The aqueous phase was transferred to a fresh tube. The organic phase is saved if isolation of DNA or protein is desired. The RNA was precipitated by mixing with 0.5 volumes of isopropyl alcohol. After incubating samples at room temperature for 10 minutes, the RNA precipitate was pelleted by centrifuging at 12,000 g for 10 minutes at room temperature. The RNA pellet was washed twice with 1 ml of 75% ethanol and was centrifuged at 7500 g for 5 min at 4° C. The RNA pellet was air-dried at room temperature for 20 min and was dissolved in 40-80 μL RAase-free water.

[0068] Isolation of Genomic DNAs from Cell Lines.

[0069] The gemomic DNAs were isolated from A549, HeLa3 and K562 by QiagenBlood & Cell Culture DNA Mini Kit as suggested by the manufactures. In brief, 5×10⁶ cells were centrifuged at 1500×g for 10 min. After the supernatants were discarded, the cell pellets were washed twice in PBS and resuspended in PBS to a final concentrations of 10⁷ cells/ml. 0.5 ml of suspension cells were added to 1 ml of ice-cold Buffer C1 and 1.5 ml of ice-cold distilled water and mixed by inversion several time. After the mixes were incubated on ice for 10 min, the lysed cells were centrifuged at 1,300×g for 15 min. After the supernatants were discarded, the pelleted nuclei were resuspended in 0.25 ml of ice-cold Buffer C1 and 0.75 ml of ice-cold distilled water and mixed by vortexing. The nuclei were centrifuged again at 4° C. for 15 min and the supernatants were discarded. The pellets were resuspended in 1 ml of Buffer G2 by vortexing for 30 sec at the maximum speed. After adding 25 ul of proteinase K, the mixes were incubated at 50° C. for 60 min. After A Qiagen Genomic-tip G20 was equilibrated with 1 ml of Buffer QBT and emptied by gravity flow, the sample were applied to the equilibrated Genomic-tip G20 and allowed to enter resin by gravity flow. After the Genomic-tip G20 was wash by 1 ml of Buffer QC three times, the genomic DNA was eluted by 1 ml of Buffer QF twice. The eluted DNA was precipitated by adding 1.4 ml of isopropanol by mixing several times and immediately centrifuged at 5,000×g for 15 min at 4° C. After removing the supernatants, the DNA pellet was washed by 70% of ethanol three times. After air drying for 10 min, the DNA pellet was resuspended in 0.2 ml of TE buffer to the final concentration of 0.5 ug/ul.

[0070] cDNA Synthesis

[0071] The first-strand cDNA synthesis is carried out using oligo(T)15 and/or random hexamers by TaqMan Reverse Transcription Reagents (Applied Biosystems Inc., Foster City, Calif., USA) as suggested by the manufacturer. In brief, to prepare the 2×RT master mix, we pool 10 μl of reaction mixes containing final concentrations of 1×RT Buffer, 1.75 mM MgCl₂, 2 mM dNTP mix (0.5 mM each), 5 mM DTT, 1× random primers, 1.0 U/μl RNase inhibitor and 5.0 U/μl MultiScribe RT. The master mixes are prepared, spanned down and placed on ice. 10 μl of 2×RNA mixes containing 2 ug of total RNA are added into 10 μl 2× master mixes and mixed well. The reaction mixes are then placed in a thermal cycler of 25° C., 10 min, 37° C. 120 min, 95° C., 5 min and 4° C., ∞. The resulted cDNAs are diluted by 80 μl of H₂O.

[0072] RT-PCR Amplification

[0073] To identify novel human fusion transcripts, fusion transcript specific primers have been designed to cover the 5′ and 3′ fusion transcripts. The primers are designed using the primer-designing software (SDG 2015). 5 μl of the cDNAs generated above are used to amplify fusion transcripts by PCR. PCR reactions have been carried out by HiFi Taq polymerase (Invitrogen, Carlsbad, Calif., USA) using cycles of 94° C., 15″, 60-68° C., 15″ and 68° C., 2-5 min. The PCR products are separated on 2% agarose gels. The expected products are excised from gels and cloned Fusion transcripts are then verified by blast and manual inspection.

[0074] Quantitative Real-Time PCR.

[0075] To quantify expression levels of different KANSARL isoforoms, The primers are designed using the primer-designing software (SDG 2015). 5 μl of the cDNAs generated above are used to amplify fusion transcripts by PCR. PCR reactions have been carried out using SYBR Green PCR Master Mix (Roche) on a LightCycler 48011 system (Roche) as manufacturer suggested. For each reaction, 5 ul of 480 SYBR Green I Master Mix (2×), 2 ul of primers (10×) and 3 ul of H₂O were pooled into a tube and mixed carefully by pipetting up and down. 15 ul of PCR mix were pepetted into each well of the LightCycler® 480 Multiwell Plate, 5 ul of cDNA were added into the wells. The Multiwell Plate was sealed with LightCycler® 480 Multiwell sealing foil. The Plate was centrifuged at 1500×g for 2 min and transferred into the plate holder of the LightCycler 480 Instrument. The PCR was performed for 45 amplification cycles.

[0076] PCR amplification of genomic DNAs 0.25 ug of human A549, HeLa3 and K562 genomic DNAs were used for PCR amplification. Genomic KANSARL fusion gene was amplified by primers KANSARLgF1 (Seq ID NO.: 886,574) and KANSARLgR1 (Seq ID NO.: 886,575). PCR reactions have been carried out by HiFi Taq polymerase (Invitrogen, Carlsbad, Calif., USA) using cycles of 94° C., 15″, 60° C., 15″ and 68° C., 2-5 min. The PCR products are separated on 1.5% agarose gels and generate a 360 by PCR fragments.

[0077] Statistical Analysis.

[0078] To compare two different populations, we have used the two-tailed Z score analyses to whether two populations differ significantly on the genetic characteristics. We set the null hypothesis to be that there is no difference between the two population proportions. Z scores are calculated based on the following the formula:

$$Z = \frac{( {\overline{p}}_{1} - {\overline{p}}_{2} ) - 0}{\sqrt{\overline{p} ( 1 - \overline{p} ) ( \frac{1}{{n}_{1}} + \frac{1}{{n}_{2}} )}}$$

### REFERENCES

[0079] Abate, F., M. R. Ambrosio, L. Mundo, M. A. Laginestra, F. Fuligni, M. Rossi, S. Zairis, S. Gazaneo, G De Falco, S. Lazzi, C. Bellan, B. J. Rocca, T. Amato, E. Marasco, M. Etebari, M. Ogwang, V. Calbi, I. Ndede, K. Patel, D. Chumba, P. P. Piccaluga, S. Pileri, L. Leoncini and R. Rabadan (2015). “Distinct Viral and Mutational Spectrum of Endemic Burkitt Lymphoma.” PLoS Pathog 11(10): e1005158.
[0080] Balbin, O. A., R. Malik, S. M. Dhanasekaran, J. R. Prensner, X. Cao, Y M. Wu, D. Robinson, R. Wang, G Chen, D. G Beer, A. I. Nesvizhskii and A. M. Chinnaiyan (2015). “The landscape of antisense gene expression in human cancers.” Genome Res 25(7): 1068-1079.
[0081] Bao, Z. S., H. M. Chen, M. Y Yang, C. B. Zhang, K. Yu, W. L. Ye, B. Q. Hu, W. Yan, W. Zhang, J. Akers, V. Ramakrishnan, J. Li, B. Carter, Y W. Liu, H. M. Hu, Z. Wang, M. Y. Li, K. Yao, X. G Qiu, C. S. Kang, Y. P. You, X. L. Fan, W. S. Song, R. Q. Li, X. D. Su, C. C. Chen and T. Jiang (2014). “RNA-seq of 272 gliomas revealed a novel, recurrent PTPRZ1-MET fusion transcript in secondary glioblastomas.” Genome Res 24(11): 1765-1773.
[0082] Boettger, L. M., R. E. Handsaker, M. C. Zody and S. A. McCarroll (2012). “Structural haplotypes and recent evolution of the human 17q21.31 region.” Nat Genet 44(8): 881-885.
[0083] Fraga, M. F., E. Ballestar, A. Villar-Garea, M. Boix-Chornet, J. Espada, G Schotta, T. Bonaldi, C. Haydon, S. Ropero, K. Petrie, N. G Iyer, A. Perez-Rosado, E. Calvo, J. A. Lopez, A. Cano, M. J. Calasanz, D. Colomer, M. A. Piris, N. Ahn, A. Imhof, C. Caldas, T. Jenuwein and M. Esteller (2005). “Loss of acetylation at Lys16 and trimethylation at Lys20 of histone H4 is a common hallmark of human cancer.” Nat Genet 37(4): 391-400.
[0084] Genomes Project, C., A. Auton, L. D. Brooks, R. M. Durbin, E. P. Garrison, H. M. Kang, J. O. Korbel, J. L. Marchini, S. McCarthy, G A. McVean and G R. Abecasis (2015). “A global reference for human genetic variation.” Nature 526(7571): 68-74. Gill, B. J., D. J. Pisapia, H. R. Malone, H. Goldstein, L. Lei, A. Sonabend, J. Yun, J. Samanamud, J. S. Sims, M. Banu, A. Dovas, A. F. Teich, S. A. Sheth, G M. McKhann, M. B. Sisti, J. N. Bruce, P. A. Sims and P. Canoll (2014). “MRI-localized biopsies reveal subtype-specific differences in molecular and cellular composition at the margins of glioblastoma.” Proc Natl Acad Sci USA 111(34): 12550-12555.
[0085] Huang, J., B. Wan, L. Wu, Y. Yang, Y. Dou and M. Lei (2012). “Structural insight into the regulation of MOF in the male-specific lethal complex and the non-specific lethal complex.” Cell Res 22(6): 1078-1081.
[0086] Ju, Y. S., W. C. Lee, J. Y Shin, S. Lee, T. Bleazard, J. K. Won, Y T. Kim, J. I. Kim, J. H. Kang and J. S. Seo (2012). “A transforming KIF5B and RET gene fusion in lung adenocarcinoma revealed from whole-genome and transcriptome sequencing.” Genome Res 22(3): 436-445.
[0087] Kinsella, M., O. Harismendy, M. Nakano, K. A. Frazer and V. Bafna (2011). “Sensitive gene fusion detection using ambiguously mapping RNA-Seq read pairs.” Bioinformatics 27(8): 1068-1075.
[0088] Koolen, D. A., R. Pfundt, K. Linda, G Beunders, H. E. Veenstra-Knol, J. H. Conta, A. M. Fortuna, G Gillessen-Kaesbach, S. Dugan, S. Halbach, O. A. Abdul-Rahman, H. M. Winesett, W. K. Chung, M. Dalton, P. S. Dimova, T. Mattina, K. Prescott, H. Z. Zhang, H. M. Saal, J. Y. Hehir-Kwa, M. H. Willemsen, C. W. Ockeloen, M. C. Jongmans, N. Van der Aa, P. Failla, C. Barone, E. Avola, A. S. Brooks, S. G Kant, E. H. Gerkes, H. V Firth, K. Ounap, L. M. Bird, D. Masser-Frye, J. R. Friedman, M. A. Sokunbi, A. Dixit, M. Splitt, D. D. D. Study, M. K. Kukolich, J. McGaughran, B. P. Coe, J. Florez, N. Nadif Kasri, H. G Brunner, E. M. Thompson, J. Gecz, C. Romano, E. E. Eichler and B. B. de Vries (2015). “The Koolen-de Vries syndrome: a phenotypic comparison of patients with a 17q21.31 microdeletion versus a KANSL1 sequence variant.” Eur J Hum Genet.
[0089] Li, X., A. Battle, K. J. Karczewski, Z. Zappala, D. A. Knowles, K. S. Smith, K. R. Kukurba, E. Wu, N. Simon and S. B. Montgomery (2014). “Transcriptome sequencing of a large human family identifies the impact of rare noncoding variants.” Am J Hum Genet 95(3): 245-256.

[0090] Li, X., L. Wu, C. A. Corsa, S. Kunkel and Y Dou (2009). “Two mammalian MOF complexes regulate transcription activation by distinct mechanisms.” Mol Cell 36(2): 290-301.
[0091] Liu, S., W. H. Tsai, Y Ding, R. Chen, Z. Fang, Z. Huo, S. Kim, T. Ma, T. Y Chang, N. M. Priedigkeit, A. V. Lee, J. Luo, H. W. Wang, I. F. Chung and G C. Tseng (2015). “Comprehensive evaluation of fusion transcript detection algorithms and a meta-caller to combine top performing methods in paired-end RNA-seq data.” Nucleic Acids Res. Mellert, H. S., T. J. Stanek, S. M. Sykes, F. J. Rauscher, 3rd, D. C. Schultz and S. B. McMahon (2011). “Deacetylation of the DNA-binding domain regulates p53-mediated apoptosis.” J Biol Chem 286(6): 4264-4270.
[0092] Mertens, F., B. Johansson, T. Fioretos and F. Mitelman (2015). “The emerging complexity of gene fusions in cancer.” Nat Rev Cancer 15(6): 371-381.
[0093] Meunier, S., M. Shvedunova, N. Van Nguyen, L. Avila, I. Vernos and A. Akhtar (2015). “An epigenetic regulator emerges as microtubule minus-end binding and stabilizing factor in mitosis.” Nat Commun 6: 7889.
[0094] Morin, R. D., K. Mungall, E. Pleasance, A. J. Mungall, R. Goya, R. D. Huff, D. W. Scott, J. Ding, A. Roth, R. Chiu, R. D. Corbett, F. C. Chan, M. Mendez-Lago, D. L. Trinh, M. Bolger-Munro, G Taylor, A. Hadj Khodabakhshi, S. Ben-Neriah, J. Pon, B. Meissner, B. Woolcock, N. Farnoud, S. Rogic, E. L. Lim, N. A. Johnson, S. Shah, S. Jones, C. Steidl, R. Holt, I. Birol, R. Moore, J. M. Connors, R. D. Gascoyne and M. A. Marra (2013). “Mutational and structural analysis of diffuse large B-cell lymphoma using whole-genome sequencing.” Blood 122(7): 1256-1265.
[0095] Rahman, N. (2014). “Realizing the promise of cancer predisposition genes.” Nature 505(7483): 302-308.
[0096] Ren, S., Z. Peng, J. H. Mao, Y. Yu, C. Yin, X. Gao, Z. Cui, J. Zhang, K. Yi, W. Xu, C. Chen, F. Wang, X. Guo, J. Lu, J. Yang, M. Wei, Z. Tian, Y. Guan, L. Tang, C. Xu, L. Wang, X. Gao, W. Tian, J. Wang, H. Yang, J. Wang and Y. Sun (2012). “RNA-seq analysis of prostate cancer in the Chinese population identifies recurrent gene fusions, cancer-associated long noncoding RNAs and aberrant alternative splicings.” Cell Res 22(5): 806-821.
[0097] Schmitz, R., R. M. Young, M. Ceribelli, S. Jhavar, W. Xiao, M. Zhang, G Wright, A. L. Shaffer, D. J. Hodson, E. Buras, X. Liu, J. Powell, Y Yang, W. Xu, H. Zhao, H. Kohlhammer, A. Rosenwald, P. Kluin, H. K. Muller-Hermelink, G Ott, R. D. Gascoyne, J. M. Connors, L. M. Rimsza, E. Campo, E. S. Jaffe, J. Delabie, E. B. Smeland, M. D. Ogwang, S. J. Reynolds, R. I. Fisher, R. M. Braziel, R. R. Tubbs, J. R. Cook, D. D. Weisenburger, W. C. Chan, S. Pittaluga, W. Wilson, T. A. Waldmann, M. Rowe, S. M. Mbulaiteye, A. B. Rickinson and L. M. Staudt (2012). “Burkitt lymphoma pathogenesis and therapeutic targets from structural and functional genomics.” Nature 490(7418): 116-120.
[0098] SDG (2015). “http://www.yeastgenome.org”.
[0099] Stadler, Z. K., K. A. Schrader, J. Vijai, M. E. Robson and K. Offit (2014). “Cancer genomics and inherited risk.” J Clin Oncol 32(7): 687-698.
[0100] Steinberg, K. M., F. Antonacci, P. H. Sudmant, J. M. Kidd, C. D. Campbell, L. Vives, M. Malig, L. Scheinfeldt, W. Beggs, M. Ibrahim, G Lema, T. B. Nyambo, S. A. Omar, J. M. Bodo, A. Froment, M. P. Donnelly, K. K. Kidd, S. A. Tishkoff and E. E. Eichler (2012). “Structural diversity and African origin of the 17q21.31 inversion polymorphism.” Nat Genet 44(8): 872-880.
[0101] Strausberg, R. L., E. A. Feingold, L. H. Grouse, J. G Derge, R. D. Klausner, F. S. Collins, L. Wagner, C. M. Shenmen, G D. Schuler, S. F. Altschul, B. Zeeberg, K. H. Buetow, C. F. Schaefer, N. K. Bhat, R. F. Hopkins, H. Jordan, T. Moore, S. I. Max, J. Wang, F. Hsieh, L. Diatchenko, K. Marusina, A. A. Farmer, G M. Rubin, L. Hong, M. Stapleton, M. B. Soares, M. F. Bonaldo, T. L. Casavant, T. E. Scheetz, M. J. Brownstein, T. B. Usdin, S. Toshiyuki, P. Carninci, C. Prange, S. S. Raha, N. A. Loquellano, G J. Peters, R. D. Abramson, S. J. Mullahy, S. A. Bosak, P. J. McEwan, K. J. McKernan, J. A. Malek, P. H. Gunaratne, S. Richards, K. C. Worley, S. Hale, A. M. Garcia, L. J. Gay, S. W. Hulyk, D. K. Villalon, D. M. Muzny, E. J. Sodergren, X. Lu, R. A. Gibbs, J. Fahey, E. Helton, M. Ketteman, A. Madan, S. Rodrigues, A. Sanchez, M. Whiting, A. Madan, A. C. Young, Y. Shevchenko, G G Bouffard, R. W. Blakesley, J. W. Touchman, E. D. Green, M. C. Dickson, A. C. Rodriguez, J. Grimwood, J. Schmutz, R. M. Myers, Y. S. Butterfield, M. I. Krzywinski, U. Skalska, D. E. Smailus, A. Schnerch, J. E. Schein, S. J. Jones, M. A. Marra and T. Mammalian Gene Collection Program (2002). “Generation and initial analysis of more than 15,000 full-length human and mouse cDNA sequences.” Proc Natl Acad Sci USA 99(26): 16899-16903.
[0102] Uhlen, M., L. Fagerberg, B. M. Hallstrom, C. Lindskog, P. Oksvold, A. Mardinoglu, A. Sivertsson, C. Kampf, E. Sjostedt, A. Asplund, I. Olsson, K. Edlund, E. Lundberg, S. Navani, C. A. Szigyarto, J. Odeberg, D. Djureinovic, J. O. Takanen, S. Hober, T. Alm, P. H. Edqvist, H. Berling, H. Tegel, J. Mulder, J. Rockberg, P. Nilsson, J. M. Schwenk, M. Hamsten, K. von Feilitzen, M. Forsberg, L. Persson, F. Johansson, M. Zwahlen, G von Heijne, J. Nielsen and F. Ponten (2015). “Proteomics. Tissue-based map of the human proteome.” Science 347(6220): 1260419.
[0103] Varley, K. E., J. Gertz, B. S. Roberts, N. S. Davis, K. M. Bowling, M. K. Kirby, A. S. Nesmith, P. G Oliver, W. E. Grizzle, A. Forero, D. J. Buchsbaum, A. F. LoBuglio and R. M. Myers (2014). “Recurrent read-through fusion transcripts in breast cancer.” Breast Cancer Res Treat 146(2): 287-297.
[0104] Wyatt, A. W., F. Mo, K. Wang, B. McConeghy, S. Brahmbhatt, L. Jong, D. M. Mitchell, R. L. Johnston, A. Haegert, E. Li, J. Liew, J. Yeung, R. Shrestha, A. V. Lapuk, A. McPherson, R. Shukin, R. H. Bell, S. Anderson, J. Bishop, A. Hurtado-Coll, H. Xiao, A. M. Chinnaiyan, R. Mehra, D. Lin, Y. Wang, L. Fazli, M. E. Gleave, S. V. Volik and C. C. Collins (2014). “Heterogeneity in the inter-tumor transcriptome of high risk prostate cancer.” Genome Biol 15(8): 426.
[0105] Yendamuri, S., F. Trapasso and G A. Calin (2008). “ARLTS1—a novel tumor suppressor gene.” Cancer Lett 264(1): 11-20.
[0106] Yoshihara, K., Q. Wang, W. Torres-Garcia, S. Zheng, R. Vegesna, H. Kim and R. G Verhaak (2014). “The landscape and therapeutic relevance of cancer-associated transcript fusions.” Oncogene.
[0107] Zhuo D, C. W., Zhu S, Dong C and Glass ADM (2012). Decipering splicing codes of spliceosomal introns BIOCOMP 2012, Las Vagas, Nev., USA, CSREA Press.
[0108] Zhuo, D., R. Madden, S. A. Elela and B. Chabot (2007). “Modern origin of numerous alternatively spliced human introns from tandem arrays.” Proc Natl Acad Sci USA 104(3): 882-886.

1. A set of isolated, cloned recombinant or synthetic polynucleotides, wherein each polynucleotide encodes a fusion transcript, the fusion transcript comprising a 5′ portion from a first gene and a 3′ portion from a second gene, wherein:
the 5′ portion from the first gene and the 3′ portion from the second gene is connected at a junction; and
the junction has a flanking sequence, comprising a sequence selected from the group of nucleotide sequences as set forth in SEQ ID NOs: 1-886,543 or from a complementary sequence thereof.

2. A kit for detecting at least one KANSARL fusion transcript from a biological sample from a subject, comprising at least one of the following components:
(a) at least one probe, wherein each of the at least one probe comprises a sequence that hybridizes specifically to a junction of the at least one KANSARL fusion transcript;
(b) at least one pair of probes, wherein each of the at least one pair of probes comprises:
a first probe comprising a sequence that hybridizes specifically to KANSL1; and
a second probe comprising a sequence that hybridizes specifically to ARL17A;
or
(c) at least one pair of amplification primers, wherein each of the at least one pair of amplification primers are configured to specifically amplify the at least one KANSARL fusion transcript.

3. The kit according to claim 2, further comprising compositions configured to extract a RNA sample from the biological sample, and to generate cDNA molecules from the RNA sample.

4. The kit according to claim 2, wherein the biological sample is selected from a group consisting of a cell line, buccal cells, adipose tissue, adrenal gland, ovary, appendix, bladder, bone marrow, cerebral cortex, colon, duodenum, endometrium, esophagus, fallopian tube, gall bladder, heart, kidney, liver, lung, lymph node, pancreas, placenta, prostate, rectum, salivary gland, skeletal muscle, skin, blood, small intestine, smooth muscle, spleen, stomach, testis, thyroid, and tonsil.

5. The kit according to claim 2, wherein the junction of the at least one KANSARL fusion transcript in the components as set forth in (a) comprises a nucleotide sequence as set forth in SEQ ID NOs:886,550-886,555.

6. The kit according to claim 5, wherein the components as set forth in (a) comprise a plurality of probes and a substrate, wherein the plurality of probes are immobilized on the substrate.

7. The kit according to claim 2, wherein in the components as set forth in (b), each of the at least one pair of probes comprises a pair of nucleotide sequences selected from one of SEQ ID NO:886556 and SEQ ID NO: 886,567; SEQ ID NO:886566 and SEQ ID NO: 886567; SEQ ID NO: 886568 and SEQ ID NO:886569; SEQ ID NO: 886560 and SEQ ID NO: 886561; SEQ ID NO: 886558 and SEQ ID NO: 886559; SEQ ID NO: 886564 and SEQ ID NO: 886565; and SEQ ID NO: 886562 and SEQ ID NO: 886563.

8. The kit according to claim 7, wherein the first probe and the second probe respectively comprises a first moiety and a second moiety, configured to indicateco-hybridization of the first probe and the second probe in a hybridization reaction to thereby detect a presence of the at least one KANSARL fusion transcript.

9. The kit according to claim 2, wherein in the components as set forth in (c), each of the at least one pair of amplification primers comprises a pair of nucleotide sequences selected from one of SEQ ID NO: 886556 and SEQ ID NO: 886,567; SEQ ID NO: 886566 and SEQ ID NO: 886567; SEQ ID NO: 886568 and SEQ ID NO: 886569; SEQ ID NO: 886560 and SEQ ID NO: 886561; SEQ ID NO: 886558 and SEQ ID NO: 886559; SEQ ID NO: 886564 and SEQ ID NO: 886565; and SEQ ID NO: 886562 and SEQ ID NO: 886563.

10. A method for detecting presence or absence of at least one KANSARL fusion transcript in a biological sample from a subject utilizing the kit according to claim 2, comprising the steps of:
(i) treating the biological sample to obtain a treated sample;
(ii) contacting the treated sample with at least one components as set forth in (a), (b), or (c) of the kit for a reaction; and
(iii) determining that the at least one KANSARL fusion transcript is present in the biological sample if the reaction generates a positive result, or that the at least one KANSARL fusion transcript is absent in the biological sample if otherwise.

11. The method according to claim 10, wherein the reaction in step (ii) is hybridization reaction.

12. The method according to claim 11, wherein the components as set forth in (b) are utilized, and the positive result in step (iii) is co-localization of the first probe and the second probe in the hybridization reaction.

13. The method according to claim 12, wherein the hybridization reaction in step (ii) is in situ hybridization (ISH) or Northern blot.

14. The method according to claim 11, wherein the components as set forth in (a) are utilized, and the positive result in step (iii) is hybridization of the at least one probe with at least one polynucleotide in the treated sample.

15. The method according to claim 14, wherein the treated sample in step (i) is a cDNA sample, and step (i) comprises the sub-steps of: isolating a RNA sample from the biological sample; and obtaining the cDNA sample from the RNA sample.

16. The method according to claim 15, wherein the hybridization reaction in step (ii) is Southern blot, dot blot, or microarray.

17. The method according to claim 10, wherein the reaction in step (ii) is amplification reaction, the components as set forth in (c) are utilized, and the positive result in step (iii) is obtaining of at least one amplified polynucleotide of expected size.

18. The method according to claim 17, wherein:
each of the at least one pair of amplification primers in the components as set forth in (c) comprises a pair of nucleotide sequences selected from one of SEQ ID NO: 886556 and SEQ ID NO: 886,567; SEQ ID NO: 886566 and SEQ ID NO: 886567; SEQ ID NO: 886568 and SEQ ID NO: 886569; SEQ ID NO: 886560 and SEQ ID NO: 886561; SEQ ID NO: 886558 and SEQ ID NO: 886559; SEQ ID NO: 886564 and SEQ ID NO: 886565; and SEQ ID NO: 886562 and SEQ ID NO: 886563; and
the expected size of the at least one amplified polynucleotide is 379 bp, 431 bp, 236 bp, 149 bp, 385 bp, 304 bp, or 160 bp.

19. The method according to claim 18, wherein the first amplification primer and the second amplification primer respectively comprises a nucleotide sequence as set forth in SEQ ID NO: 886566 and SEQ ID NO: 886567 and the expected size of the amplified polynucleotide is 431 bp.

20. The method according to claim 17, wherein step (iii) further comprises verification of the at least one amplified polynucleotide by sequencing.

The application's sequence listing, which the Patent Office published only in electronic form, follows.

SEQUENCE LISTING (886579 sequences)

SEQ ID NO: 1 - DNA, 100 bp, Homo sapiens
ctcctttcaggatacagtacgggatcctttctggaatggaggtcttatgagctgctattgaacacggcaggagttggtaaaatattaaagaagatcaaca

SEQ ID NO: 2 - DNA, 75 bp, Homo sapiens
agagggtttgaaaaccttgtaccttatacttcaactgttagctggcagcctgataggcagattccatttcatgat

SEQ ID NO: 3 - DNA, 78 bp, Homo sapiens
tgtggagggcagaagtaggaagtctttgggacaaaactgtatttaccttgattgagaggatccagaatccagatctct

SEQ ID NO: 4 - DNA, 100 bp, Homo sapiens
cttgaaacgaaagtgaccgaggagctccttttcgagcttttccaccagaatatgcttataggcgtggaattgcagaggctgttggtcttccaagtattcc

SEQ ID NO: 5 - DNA, 50 bp, Homo sapiens
tcacccccaggatgtcatcgaggattacatgaagcagatgacatttgaag

SEQ ID NO: 6 - DNA, 82 bp, Homo sapiens
aagtggtgagcctttttgtcactgaacctgcacttgttgccaagtcttccatcttactagatgtgaaaccttgggatgatga

SEQ ID NO: 7 - DNA, 75 bp, Homo sapiens
aaaaagaaaggtcttcaagaatgtttcccagccatctgcaggtgtgggccatgtttgaggattgccccagcattc

SEQ ID NO: 8 - DNA, 89 bp, Homo sapiens
aacttggttccccctccctcagcttccgccccaaaagtatgctattgcggcagcacctcccgagatgtgttatgtggaaccgatgtagg

SEQ ID NO: 9 - DNA, 75 bp, Homo sapiens
gggacaagatggtttacatctcgaacgaatgccagctgatgaagaccgagaggccgcgacccaacacctttgtca

SEQ ID NO: 10 - DNA, 99 bp, Homo sapiens
gatatagaagcatttgaaatgatggagaaggatgagctatgacttgctaaacaatctgttggaataacttagcttgcacatgaatgcagtcatgcaaac

SEQ ID NO: 11 - DNA, 75 bp, Homo sapiens
ccgaactccaagggacgacgctcgcggaagcagaggtttgggttccagggtctccctccactgctgtagtaaccc

SEQ ID NO: 12 - DNA, 98 bp, Homo sapiens
cgcggtgcttggctgcggtgctcacactcatgaggagccggaagtttcacaaccaaagaggagctggggaagacagtgcctcagctactgactcctgg

SEQ ID NO: 13 - DNA, 100 bp, Homo sapiens
ggtgaaatgtgaggcgtgtcaccagtttatcacagggaaagtcctggaggtatctcaacacccagtttattaaaaagaataaattaacagaagcggacct

SEQ ID NO: 14 - DNA, 80 bp, Homo sapiens
aatggacagtggagatgaagcctaagaatatgatcaggagttcatgatcaagtgttgcccacaccaaatgcttcatccag

SEQ ID NO: 15 - DNA, 75 bp, Homo sapiens
gggccgacccggcccgtagtgtggaagcagcttcaggttgggggccgtcccgctcctaaggcaggaagatggtgg

SEQ ID NO: 16 - DNA, 100 bp, Homo sapiens
ctccacagctccagggaaggcactcaaaagtggggggcaggaaagggtgtcagtgtggaggcagttgatccagtgttccaagctaaaatgttggatatgt

SEQ ID NO: 17 - DNA, 100 bp, Homo sapiens
acaacaaatacatcattctgcaaaaactggcaaatgtgtttgaacagcccgtagcagaacaaatagagaaatttctgaataaattggcagaagaacgcag

SEQ ID NO: 18 - DNA, 98 bp, Homo sapiens
aaagacaaaaggagattctgatgaagaagttattcaagatggcttcgggagcaggaaagaaaagaagcagaagaagctagtcaaaaggaaatagaaga

SEQ ID NO: 19 - DNA, 100 bp, Homo sapiens
gaaggtgctctgaagtgaggctcttagtggactcagtggcctctgaggatgtggctgtgaacttcacacttgaggagtgggctttgctggatccttccca

SEQ ID NO: 20 - DNA, 100 bp, Homo sapiens
aagcattaatactcatcttgtccagaactctgtcaaatgaagaacactttcaagaaccagcaactcaagcatcccaaccttgttaacctcctggaagtct

SEQ ID NO: 21 - DNA, 100 bp, Homo sapiens
agcccctgtacttttggtggttggatcatttgaagtggtgtctacacttataaaaagccaggctttcgaggactgactcctccaattccttgggaacatg

SEQ ID NO: 22 - DNA, 100 bp, Homo sapiens
gcacacagataccgtttattaaaagagctgtggctcggttcagcgaggaagaatgcctccaacccagcccaatccaggccagtacgcactcaccaacggg

SEQ ID NO: 23 - DNA, 75 bp, Homo sapiens
gtgaatgtgtttgctctcatgaacatgcaatgagaagactgatcaatctgggattttgcagatacctggaaaaac

SEQ ID NO: 24 - DNA, 100 bp, Homo sapiens
ggcgatcgttgatgtgaagatggtctctggcttcattcccctgaagccaacagtgaaaatgcttgaggcagccctaggtgaggccaagaagcaacttcag

SEQ ID NO: 25 - DNA, 100 bp, Homo sapiens
tcaggctcagatcagtggccgaggccccagagattgccaaacaatccttgcgacccttctgcaccgtttgcaaccgctacttcaaaacccctcgcaagtt

SEQ ID NO: 26 - DNA, 100 bp, Homo sapiens
cgaccaggaggtgccggtggccgcgctcggacccgggccggtgcataaacttctcccgagttccatctcagtaaaagggaagcaggaagaccaagaaggt

SEQ ID NO: 27 - DNA, 75 bp, Homo sapiens
ctcacctacagctggttccaggacaacatcaatgtcttccacattagccccatgatcacaagctctcagatcaac

SEQ ID NO: 28 - DNA, 83 bp, Homo sapiens
ttacttctccttgccttccaccaagaatgtgaggcttccccacccacatggaactgaaaaccagtagattcccagacatcgcg

SEQ ID NO: 29 - DNA, 100 bp, Homo sapiens
tggaggaaaacaacttcgagggcagagtgatggcttggacaacagtgtagcttcccccagcacaggtgacgatgatgaccctgataaggacaaaaagcgt

SEQ ID NO: 30 - DNA, 90 bp, Homo sapiens
tacgaccagtgaggcggccgccgcagcccaggcgcgggggcgacgacagggccgttgctccagggagaactgcaaatatcttcatccacc

SEQ ID NO: 31 - DNA, 87 bp, Homo sapiens
cacccccggcggcggcacgatgccctttgacttcaggagcggcacccgacctgacagcgttcagcgacccgcgccagttccccgcgc

SEQ ID NO: 32 - DNA, 100 bp, Homo sapiens
aggggccccagcagcccccgaaggccctatcaggacatggagtatgaaagacgtgttctaagaacggaagcatctgggctggatggaatttagcatcaag

SEQ ID NO: 33 - DNA, 90 bp, Homo sapiens
ggaacgggtacgtgaggagcagcgctgcagccgcagccgcagccgccgccggccagcttcttccagaccagctggtcttgcttctggagc

SEQ ID NO: 34 - DNA, 100 bp, Homo sapiens
cgactccggagacagcccaaatatcctcggaagagcgctcccaggagaaacaacatacatcaagagagtgatcgcacacccatccttccataatatcaat

SEQ ID NO: 35 - DNA, 119 bp, Homo sapiens
tcaaaagctcctaggtgcgcgggtggatataattcccggcttctcgagaagacactacagcctcaaggagacaccattcgcttttcacccaagatgatttgatgtcttataaaactctg

SEQ ID NO: 36 - DNA, 90 bp, Homo sapiens
gcatcacaagctcagcctggacagcaacaggtgcttgaggaatccaaagccctcgtgcgctgcaacatgaagatggagctggagcaggcc

SEQ ID NO: 37 - DNA, 100 bp, Homo sapiens
tataatgtctcctgcataatgatcatgccccagcaccaaaggcaaggatttggacggtttctcattgatttcacagcctcccgcgacgatgcccctcaac

SEQ ID NO: 38 - DNA, 100 bp, Homo sapiens
cttcatttactgaacaatggacagatggttttgcatttcagaatcttgtgaactcccttgcctcagctcctatgatagctactgcagcaatcaagtagcc

SEQ ID NO: 39 - DNA, 100 bp, Homo sapiens
ctggggagcccttctgcgccacagaaaatgctgtcctgtatcaaaactacaaggaaaaggcccttgacattgattctgatgaagagtcagagcccaaaga

SEQ ID NO: 40 - DNA, 100 bp, Homo sapiens
ctgcgagccagcctgagcgcaacacttctccgagccagcgagccagcgagccgccgacccgccgagcaaaatgaatggcttattcagaagagcataaagg

SEQ ID NO: 41 - DNA, 82 bp, Homo sapiens
ctaatttgaaccatgtttggattgaagccgcctctgtattacttaccagaaaactttagaaactgttcctttggagaggaaa

SEQ ID NO: 42 - DNA, 78 bp, Homo sapiens
tttgatcttcccaaccaccaatgagtgcaaacatccttttggatgatcagtttcaacccaaactaactgattttgcca

SEQ ID NO: 43 - DNA, 100 bp, Homo sapiens
tcgggggtcggcggaagatggcggccggcgaaaggagctggtgcctgtgcaagttgttgaggcgacattgactacagcaccgtgctcctcggcatgctgg

SEQ ID NO: 44 - DNA, 75 bp, Homo sapiens
aggacatggcacagcgcaggaaagaagcagctgatatgctaaagaagtttccaagggtcacttgtgtctcgtccg

SEQ ID NO: 45 - DNA, 98 bp, Homo sapiens
gatcaacaaatgattcaaagtcagaggccaatgatgttacaatctgccttagcatttgaacagataattaaggagccagcaccgctctttgaccttgc

SEQ ID NO: 46 - DNA, 98 bp, Homo sapiens
gcatcgggtgagacgctggctgcttgcggctagtggatggtaattgcctgcctcgcgctagcaggaaggctgctgatactttggctgtgaggcaaaaa

SEQ ID NO: 47 - DNA, 100 bp, Homo sapiens
ggcgtgctcaaggagggcttcctggtcaagagggtgaccaagaatatggcccaggtgaccaaagccctggacaaggccctgagcaccatggacctgcaga

SEQ ID NO: 48 - DNA, 50 bp, Homo sapiens
attttcacaaccttcaagaaattcggaaataaactatcaatcttgcccag

SEQ ID NO: 49 - DNA, 76 bp, Homo sapiens
ctcaggctggaacttgccctgtctcctcgcagatgagatgctattaactgagtacttggatatgaaaaatactcgt

SEQ ID NO: 50 - DNA, 75 bp, Homo sapiens
ctactagtggagggggtccaatgtcaccccaggatgatgaagcagaagaggtacagtgctgtggataccaatcca

SEQ ID NO: 51 - DNA, 87 bp, Homo sapiens
cggcggccgcagcgaggagaagatctcggactcggagaaataaggatctggcatgtcaacacaaacataggaagttgaggcagtcaa

SEQ ID NO: 52 - DNA, 97 bp, Homo sapiens
gctgtcctgaggctctggatgactttattcttcaaatggctttaccctcccagtagctccaggactactggctctctctcctctacaagcgcctgat

SEQ ID NO: 53 - DNA, 100 bp, Homo sapiens
agtggatggtcaagagcgtgccctacttcaaggataagggtgacagcaacagctcggcgggctggaaggagacttcctgtgatcagagtgaaggttctgg

SEQ ID NO: 54 - DNA, 75 bp, Homo sapiens
gccgcctccgaagatgggggatttctacgacccggagcacccgacccctgagtctaagagtgtaaccagttccag

SEQ ID NO: 55 - DNA, 75 bp, Homo sapiens
ttggaggactgcttggggatgccactgacaacatgcaggctgtattcatcaccaaagaaaaaacttacaccaatg

SEQ ID NO: 56 - DNA, 80 bp, Homo sapiens
cagaccctggagcctcagttggaagcagccgatccagcctgcggagcctgtggggcagcatgcaatgatgctacctgttc

SEQ ID NO: 57 - DNA, 100 bp, Homo sapiens
gtcctgagcagccaacacaccagcccagacagctgcaagtcaccatggacgctgaagtacaagggtcaggtgcctgagaacgaggctaacgtcgtaatca

SEQ ID NO: 58 - DNA, 82 bp, Homo sapiens
ataatgcaatagaagctgtggatgaatttgcttttctggaaggtcgagtctatgctgtcttgtcaaagagagaaggtcgggt

SEQ ID NO: 59 - DNA, 75 bp, Homo sapiens
tcaagaaaactgcgaataaaattcgagccaagttaaagggtgaatcaaaaactctggttttaagcaacctctcct

SEQ ID NO: 60 - DNA, 100 bp, Homo sapiens
ggaggcacagggcgtcggacctgcacgagctgtctgggattaaagcctgtggtttccacagaagcaccacctatcatatttgccacaccaactaaactga

SEQ ID NO: 61 - DNA, 75 bp, Homo sapiens
ttgtaaatgtgagtggaagccatgaggccaaaggcagttgtattgaatcgatgatgcaaccaacttggtccagct

SEQ ID NO: 62 - DNA, 80 bp, Homo sapiens
gggcctgggcgtgtggagccaggcagtctcgaatcctctcctggtttagggaggggaagaaatgcactcggtgatggaaa

SEQ ID NO: 63 - DNA, 98 bp, Homo sapiens
gtcaaatgaagaacactttcaagaaccaggtttctgcctcaatgctcaagcagtttcccaacagtggcctgagtccaggtcttttcaatgtggggccc

SEQ ID NO: 64 - DNA, 100 bp, Homo sapiens
gggtggagctgagccggagacagattacaccaggaagcaaggcggcagctgccaacctgtgtcctggagatgtcatcctggctattgacggctttgggac

SEQ ID NO: 65 - DNA, 51 bp, Homo sapiens
ccggcgcatcgcggcgcgcacagacccagggaaatcctcattgacgattca

SEQ ID NO: 66 - DNA, 100 bp, Homo sapiens
gccgctgagccgtcgcggagccgcgcagccctcggagcacggctggcgcccatgcggctctacacgctctccaagcgccactttgtcctcgtgtttgtcg

SEQ ID NO: 67 - DNA, 82 bp, Homo sapiens
caggaacgaatctctcaggctgcatcaggatgaatgatgacccaagtatggaaaatgaaatgaatgatgtgcctttctttga

SEQ ID NO: 68 - DNA, 77 bp, Homo sapiens
tctgggcgccgcggatacacattctagatatgtgctggagaatctggtaaaagcaccattgtgaagcagatgaggat

SEQ ID NO: 69 - DNA, 97 bp, Homo sapiens
ttaataaagcatctacaaatgaggcagcctggggcagatgtgaaggaatggacaagagttgagcagcctttctgctgattatcacacatcatgagct

SEQ ID NO: 70 - DNA, 75 bp, Homo sapiens
cctggcggtgctcgagtgcctgcaggatgtgagggagccatctccccagaagtctgagcctctgctaccttctgc

SEQ ID NO: 71 - DNA, 75 bp, Homo sapiens
ggtgcttgtcctggctggacgctactccggacgcaaagctgtcatcgtgaagttcccagaaatgaatgctatgat

SEQ ID NO: 72 - DNA, 123 bp, Homo sapiens
ctgcaacttcaagtagtggaaggagtacagggaagtctataagctttgcaacagaattacagagtatgatgtcaactttgtagtgtgccaactctttgccttgctagcagccatttggtttcg

SEQ ID NO: 73 - DNA, 130 bp, Homo sapiens
gctgaccagttgcgtgtgattttcgcagggaaggagctgaggaatgactggactgtgcaggcacagttggtggatctgaaatctgaactgacagaaacccaagcagagaaagttgttttggagaaagaag

SEQ ID NO: 74 - DNA, 100 bp, Homo sapiens
tctgccagcaggttgggagatggcaaagacatcttctggtcagagatacttcttaaagatcctgattgagtcaatgctttgcattctcagtcctctgcat

SEQ ID NO: 75 - DNA, 75 bp, Homo sapiens
aaaatccccgttgtttttcgattgcaagaggttgtgaaatactggcccgagaaggggaagtccgggtttctcgtg

SEQ ID NO: 76 - DNA, 75 bp, Homo sapiens
taattttagggtcctttatatagaagggagagtaggatatatgattggatgcctgaacaaccaaatatattccaa

SEQ ID NO: 77 - DNA, 80 bp, Homo sapiens
cgtcccccgcgggtctgctctgtgtgccatggacggcagcgtccgtctccaagagagtatgaagagagtgcgtctgtagg

SEQ ID NO: 78 - DNA, 51 bp, Homo sapiens
tgtggttccagggaccagaagcagacatatctgaagagatggattaagaat

SEQ ID NO: 79 - DNA, 82 bp, Homo sapiens
ccggatcctgaggaggcagctgcggtggcagctgctgagttctcggtgaagtacggaatcagagcccacgagtggatgttcc

SEQ ID NO: 80 - DNA, 99 bp, Homo sapiens
gggagcatgggttaccagcgacgcaccctgaaaccaacatgtctgacaaaagtgacttaaaagctgagctagagcgcaaaaagcagcgcttagcacaga

SEQ ID NO: 81 - DNA, 90 bp, Homo sapiens
gcttgtgaaaatggacatacggatgttgcagatgttttacttcaagcaggggctgatttaactgaatctggatatggatctgaatccagc

SEQ ID NO: 82 - DNA, 75 bp, Homo sapiens
ggatcgtgtgcattacaggagtcctccacttgccactggcaactggccatgccacagcacataaagattacagtg

SEQ ID NO: 83 - DNA, 97 bp, Homo sapiens
gctgtgtaaggagaagcccacaaccgccctcctggacaaggtggccgacaacctggccatccagcttgctgtcttcaaagcttcacctttctccaaa

SEQ ID NO: 84 - DNA, 100 bp, Homo sapiens
gccgtgctggatgccgtgatctccagcgccggcctcctcagtgcgaagaagctgcagccgcacctggccaagggtataaagatggctgtgaccacatcgg

SEQ ID NO: 85 - DNA, 100 bp, Homo sapiens
caacacagtgtttggtttggggttttcctctgagcagcagctgacaaaggtgtacgtgaacggagagtgggtgaccaacatcagcgagggaggcagcttc

SEQ ID NO: 86 - DNA, 100 bp, Homo sapiens
gatgttcagcctgtcccattaaggtcagaatgaaggaacgatttccgtagttgaaggagaaacattgtatgtcatagaggaagacaaaggcgatggctgg

SEQ ID NO: 87 - DNA, 82 bp, Homo sapiens
agcaagctccacatccccgtgacaatgcagatcttcgtgaagactctgactggtaagaccatcaccctcgaggttgagccca

SEQ ID NO: 88 - DNA, 90 bp, Homo sapiens
agcccgtgccgcgagcgcggcctgcaggaggcccctggccccaacatggcccgtcgctctcagagctcctcgcagggggacaacccactg

SEQ ID NO: 89 - DNA, 74 bp, Homo sapiens
ggaacatccaaggcaagactggcacccagcacagcaggtccatggtgtggtgaatgatacaatagcatttgtga

SEQ ID NO: 90 - DNA, 100 bp, Homo sapiens
tgcaagagtcaggttccgatgatcgcgctgcagcttcagaacttgatgatgatgttccaaaagcaaactgcctctccactgaaagcactgacactccgaa

SEQ ID NO: 91 - DNA, 100 bp, Homo sapiens
cttttctttcaccttcacagaggcagcaaagctggccaagatgaagattccccccagtgagatgttcttgtcagaaaccgacaaatactccaagtttgat

SEQ ID NO: 92 - DNA, 89 bp, Homo sapiens
tcccagagcatcctgagggcggagaaccagaagacgatgaggctcctgcaaaagaggccccacagtatcaaatatccgcctggctggat

SEQ ID NO: 93 - DNA, 73 bp, Homo sapiens
gcaaatagcgaaagtagtcatcaaaatctgtgaacatgagacctgctcccctcaaaagcttcgtgccaacaga

SEQ ID NO: 94 - DNA, 82 bp, Homo sapiens
cgcaggaccggccgcagtgccacttcgacatcgagatcaaccgggagccggatcagcttgaacgggtctttttacgacttgg

SEQ ID NO: 95 - DNA, 76 bp, Homo sapiens
gtgcctcatgcctgtttcaatattgggttttggagacattattgtaccagggcaattgaaggaacagactaaaaat

SEQ ID NO: 96 - DNA, 83 bp, Homo sapiens
tttggggaccccttgtcttgacagtatcatgcacaggtgtcgtgaaaactacccctaaaagccaaaatgggaaaggaaaagac

SEQ ID NO: 97 - DNA, 98 bp, Homo sapiens
ctgggtccaccgacccttaccctcagcgagagaagtaaccctcagagtcaagatctccactgaagttggcatcacaaatgttgatctttccaccgtgg

SEQ ID NO: 98 - DNA, 75 bp, Homo sapiens
ggggatcttggcagcgctgcaggtatttagcgtggactacaatgatgaactggatatcttggtgagcggctctgc

SEQ ID NO: 99 - DNA, 83 bp, Homo sapiens
ctcgctgggagagaggtacctctccttttccctctccctttccctaaggttctgcggggagtgtctccagccctgcctgcagg

SEQ ID NO: 100 - DNA, 96 bp, Homo sapiens
tgcgcccgtggctggaggagcagataaactccaacacgatcccggggctcaagtggcttaacaaggttcttagcatgataatcaacgcagcctaca

SEQ ID NO: 101 - DNA, 95 bp, Homo sapiens
aattacttaaggaagagaagtgtcaatatcctttttaacctgactcatcgaggtgacccacaacacaactctgaatggcaaagatacacttcatc

SEQ ID NO: 102 - DNA, 90 bp, Homo sapiens
ctgacgagcagcggctgtacaagggatccagcaccggctcctcctccggcaaccacggtgggagcggcggaggaaatggacataaacccg

SEQ ID NO: 103 - DNA, 82 bp, Homo sapiens
cgggaggaaggaacgaggcaaggagctaaagcagcgtgcgttcagccctggggatcgaatcatcaatttagttgttggcagc

SEQ ID NO: 104 - DNA, 96 bp, Homo sapiens
attttgacatcagttatattccatctactgtctttttcttcaatgggcagcatatgaaagtggattatgggttgtcctgaaagaagagcaggactc

SEQ ID NO: 105 - DNA, 82 bp, Homo sapiens
cttcgagtgacccgggtgccgaggagcgggaagagttgctggggtacatgtcccagagcaagcacacggaggcccgggagct

SEQ ID NO: 106 - DNA, 100 bp, Homo sapiens
acgggaagaacttcttcagaattagaaaggagctgcttcccaataaggaaacatatgaagtgaaggctcctgttccttctgcctgtttcaggaatatttg

SEQ ID NO: 107 - DNA, 100 bp, Homo sapiens
aaagaatggattttttcagggatataaccgactgacctggatagtagttgttcttcagcttctcccgttggcaacggttacatcaagcctccggttccac

SEQ ID NO: 108 - DNA, 75 bp, Homo sapiens
cccaggtgtaagcgcagaaagcaggcgaacccgcggcgcaataacgttttccaagagataacttcaccaagatgt

SEQ ID NO: 109 - DNA, 82 bp, Homo sapiens
gaaattcagagaggggaagtgatttgcctcagcttgtactacagtgagaccgtgcactaccactatggccctaaggacctgg

SEQ ID NO: 110 - DNA, 85 bp, Homo sapiens
aagcaaatataataatggcagcacagagctacattcgagacactgtttccagcaagttgcaaaacaacaatgtttatactattgc

SEQ ID NO: 111 - DNA, 100 bp, Homo sapiens
ccgcaccaggctcatcctgtccatcgtgtgcctgatgatcacgcagctggctggcttcagtggaccaattcgattacgtatcctccctggcacggagcag

SEQ ID NO: 112 - DNA, 87 bp, Homo sapiens
gacactttgcaaaaaaacttgatcctcgaagagaaggtggtgatcaaagggctcctgttccaaagagtgcacttattcctgtaattc

SEQ ID NO: 113 - DNA, 82 bp, Homo sapiens
caagggctacattgaggtgatgagaaatggtggagtcaatgaagaaagtagcagggatggatgtggagctgacagttgaaga

SEQ ID NO: 114 - DNA, 89 bp, Homo sapiens
aggtcttcatagaccagaaccttagtcccgggaaagattttaggtgatgggcaagtcagaaagtcagatggatataactgatatcaaca

SEQ ID NO: 115 - DNA, 98 bp, Homo sapiens
gatttctaccctgtccgaaggagctccaggaagagcaaagccgagctgcagtggcctgattccaccaagagaaggcccaggaggaagaagagaaaaag

SEQ ID NO: 116 - DNA, 80 bp, Homo sapiens
gacctccgcgcgacgtacccgccgccgccgttggctggagtaatctcaggggcgatataatcaatgaggtggtcctaaag

SEQ ID NO: 117 - DNA, 73 bp, Homo sapiens
gcggatcctgctggtgggagaaccctactcatgaaggttacttctcttgtttggatatctggacgctgttttt

SEQ ID NO: 118 - DNA, 99 bp, Homo sapiens
ccgcgccccatccgcaacctggaggtcaagttcaccaagaacatggtccaagacaattcctgggaaagttcagttcttctcaagtgagggttctgacac

SEQ ID NO: 119 - DNA, 99 bp, Homo sapiens
atccgagggatgctgaaaacctttgggcttcatggagtcgtcttagatgttgattcagacctgggtcggtgagaggaataaatggatccatcagtctgg

SEQ ID NO: 120 - DNA, 100 bp, Homo sapiens
atcacatcctggagcacctgcccgcccggctcaatgagggactgcctccgggcctgccaggagcagatcgaagccctgctggagtcaagcctgcgccagg

SEQ ID NO: 121 - DNA, 85 bp, Homo sapiens
ttcgccgcgctattgcttgccaggtttgtactacagaaagtgccagttaatttccaaggaagatgttactcatgatacgaggctt

SEQ ID NO: 122 - DNA, 100 bp, Homo sapiens
ccaagcacccgccgccggcagcttcgctggaaggataaaagaatcagagtgtctcaacccttgacaagaggaccaagtgcctttattccagagaaggaag

SEQ ID NO: 123 - DNA, 100 bp, Homo sapiens
ctagaattcacacagagccacctagtgcctacaccaactaatgttacaattgaatcctataacatgaaccctatcgtatattgggagtaccagatcatgc

SEQ ID NO: 124 - DNA, 88 bp, Homo sapiens
gcaaacagtggttctgctggattgataaacccagctgctacaggtgccagcgagatttcagattcctgtaaacctctaaagaaaagga

SEQ ID NO: 125 - DNA, 98 bp, Homo sapiens
acccaaggaacagtgccaagttagatgccgattacccacttcgagtcctttattgtggagtccaacgtggagcacctgacggagaaaatgaagaccac

SEQ ID NO: 126 - DNA, 98 bp, Homo sapiens
actccctcctgcccagatccggccaaggacctcagcagtgtaaacaggaacatcgataagtagtgtaaaaacttgcacaatgaaatccgaagccaagg

SEQ ID NO: 127 - DNA, 100 bp, Homo sapiens
tcgttccgggggtgaagcctcctgcgccggccttgcctcgggcattgtttccaagtcgtacgagtgccgtctaaagggacaaggagccaccttcgtggag

SEQ ID NO: 128 - DNA, 75 bp, Homo sapiens
gtggaaaatgcgctcgggctggaccagcaggccatgggtgtgtacctctacggggagctgatggtgagtgaggac

SEQ ID NO: 129 - DNA, 98 bp, Homo sapiens
cttgtttcttatatgtgatgccattccagcactggactcatggaggctgagcatttattcaggtcacagatgtgacattgatgtgtccactgaagcca

SEQ ID NO: 130 - DNA, 90 bp, Homo sapiens
caggttctgagactctaggcaggctggcaggcaacaccttaggattttagtccatggagaacagaatgaaatggccagattgaaagcagc

SEQ ID NO: 131 - DNA, 100 bp, Homo sapiens
gcccagacaagtccccagggaatgccacagcatcctccagcacctcagggtacttgtcaggattgtaaagtccaaggaccaaatctttgggcatgtctgg

SEQ ID NO: 132 - DNA, 75 bp, Homo sapiens
gccgaggccgggaggccgtgcccggaggtagcacaggcggagtgcagcggaggcccctgccgctgccgtcatgcc

SEQ ID NO: 133 - DNA, 98 bp, Homo sapiens
gccgaacttcttgtgaggaagttagggacgacttggaactggggaaacttgtttgcaggctttacaggaagtatggtgctggcatctgcttggcttct

SEQ ID NO: 134 - DNA, 97 bp, Homo sapiens
agttttatattaatgttgagagagagtttatacatgaaagcatccatgatgaggttgtaaacagacttaaaaaggcctatgcacagatccgagttgg

SEQ ID NO: 135 - DNA, 98 bp, Homo sapiens
cctgtgttccagcccttttcaggacagggtcacagactaggaaggattatagctggacagacatccgctgcccctttgaaaaacgaagagatgcagca

SEQ ID NO: 136 - DNA, 100 bp, Homo sapiens
gtctgccttggaggcagtcgtgcccaggagcagagccaggactgtctccagtttggtcctcctgctgaaggggaagtggtccaagtgagatggacagacg

SEQ ID NO: 137 - DNA, 75 bp, Homo sapiens
ccggcccggtgaaactgaacttataatcgtcactggattgtgctggagaatctggtaaaagcaccattgtgaagc

SEQ ID NO: 138 - DNA, 87 bp, Homo sapiens
acattcaggatcaacttgaacgaatatttctggttgtggcagcactgcctgaaggtatgagaccagattctaatctttatggttttc

SEQ ID NO: 139 - DNA, 84 bp, Homo sapiens
ggagactcgccactgcacattgccgcccgggagaaccgctacgactgtgtcgtgagtaccaagaggacaggaatgaccttgtga

SEQ ID NO: 140 - DNA, 75 bp, Homo sapiens
atcactgtcgtctcatgggagaaagacactgtttcacttgtctcagggaaaagaagatctcccggagcagtgccc

SEQ ID NO: 141 - DNA, 100 bp, Homo sapiens
gtttggacccaagcttaacttttccaatgtggaatcctgggccttcattgtgtttgtcaggttcaactccagccatggtttcccagtggaggtcgattct

SEQ ID NO: 142 - DNA, 76 bp, Homo sapiens
accaaccactgccacaacctgcgcagcagacaggaaccagcacctatgacagaagatctgctagaagagcagtctg

SEQ ID NO: 143 - DNA, 76 bp, Homo sapiens
cggcagaggattcgctcccagagcagctgcggccaggtgacagtatgttgactgctgtctctgtggccagagattg

SEQ ID NO: 144 - DNA, 82 bp, Homo sapiens
aaaccatgtgctgaaatgtttgacgacactgatggtttgggaaccctactctggaaactgtcagtcccagggcactggggag

SEQ ID NO: 145 - DNA, 82 bp, Homo sapiens
ctcggatcgaatccctcacgcgggcgcggatcgaccggagcagagagctggcgagcaaggtttcccaccgttttcgagaact

SEQ ID NO: 146 - DNA, 90 bp, Homo sapiens
cattgacatttaattttagggtcctttatatagaagggagagtagactcagacgatgccctgctgaagatgaccatcagccagcaagagt

SEQ ID NO: 147 - DNA, 50 bp, Homo sapiens
gcatcatccgctatgcaattgggaatggcattgtgcccatcgtggagcct

SEQ ID NO: 148 - DNA, 75 bp, Homo sapiens
cttctcacccccaggatgtcatcgagggagctatgaagacatgattggtgaggaggtgccatcggatcaatacta

SEQ ID NO: 149 - DNA, 95 bp, Homo sapiens
tggctagtgcttcatccagccaaagaggtcatcgtattgaggaagttcctgaacttcctttggtagttgaagataaagttgaaggctacaagaag

SEQ ID NO: 150 - DNA, 100 bp, Homo sapiens
catgtcccaacattacatcccagtcagccccagttgatgctgacagcaggacccagtgttgccgtccctccccaggcaccttttggttatggttataccg

SEQ ID NO: 151 - DNA, 75 bp, Homo sapiens
gagagctgacctcagctgacagagaaacagcagctaagagaagttctcctatcaacagtcaaagccggacctgtg

SEQ ID NO: 152 - DNA, 75 bp, Homo sapiens
aatcagatgtctgtctgccggctccttcccgaactcacaaatcctgacgagctcctgtcttatctggaccccccc

SEQ ID NO: 153 - DNA, 83 bp, Homo sapiens
cttgtccacgacaccggctacttctcagctttaccatccctggaggagacctggcagcagttctttatagctccaagctctac

SEQ ID NO: 154 - DNA, 96 bp, Homo sapiens
tagggaatcctcagattactttgctagatgaaccatctacaggtatggatcccaaagccaaacagcacatgtgagacagggtttcgccgtgttggc

SEQ ID NO: 155 - DNA, 51 bp, Homo sapiens
gtatgatcttcacctagcgcagttgccaagtttccaggacagtgaagatga

SEQ ID NO: 156 - DNA, 100 bp, Homo sapiens
caagcttctaaataagcacaaaggtgcttttgaagatgatgatatcacgcacgttgaaggaagtgtagatcctattcgagatatagaaataatacatgaa

SEQ ID NO: 157 - DNA, 51 bp, Homo sapiens
cgttgacctgccccttgtcctggccccggtggatccataaagaacccagcc

SEQ ID NO: 158 - DNA, 100 bp, Homo sapiens
atgacttctcagacggggatgtctttggcccagagctggacaccctcctggactcgctggtatttacatgaggaatttccagagtcctggtcagttccca

SEQ ID NO: 159 - DNA, 75 bp, Homo sapiens
gtcaggcgtgaagcatcacattgccagtgacatagcttcagacagatcccagcatggtgagtgcctacatgtacc

SEQ ID NO: 160 - DNA, 50 bp, Homo sapiens
acttccagttccagcgtacgagtgagaaagatcagtctaaagaaaaggag

SEQ ID NO: 161 - DNA, 98 bp, Homo sapiens
atctaccagtctgcaagcgtcttcaaaggagccccacatgaggtcgctgaaaattttgttccccctctgttggatgcagttctcattgattatcagag

SEQ ID NO: 162 - DNA, 83 bp, Homo sapiens
tgctgggattataggcgtgagccaccgtgcctggctgaaggactctccttcagcaactccagaagcttcagactttggtgatg

SEQ ID NO: 163 - DNA, 100 bp, Homo sapiens
aagaagaccaaaccatcccacggctccaagattttgcaagaacgaggctcaaggatgtgagggacacagtattgacagctgaagaaatgatttacgtttt

SEQ ID NO: 164 - DNA, 100 bp, Homo sapiens
gtttagcttaaaaacagctcattctcctaatgttttccttcagcaaggacaaagatggagcagcatattgtatgggacgtatgaattctgactgttggta

SEQ ID NO: 165 - DNA, 98 bp, Homo sapiens
agtattcagctcttcacagggggtagaacaagtggtactaggattatacattgtaagaggtgacaacgtcacaacctccaagagggaaaacatttctc

SEQ ID NO: 166 - DNA, 98 bp, Homo sapiens
gcgcgcccgcgccctccgcgcgacgccagcacaggaagtcctggagaacctgaaggaccgctggtaccaggcggacagcccccctgcagacctgctgc

SEQ ID NO: 167 - DNA, 80 bp, Homo sapiens
gcgaggaaaatgagcagtctctgcccccgccggccggcctcaacaacaatgcagatcttcgtgaagactctgactggtaa

SEQ ID NO: 168 - DNA, 58 bp, Homo sapiens
cagcgcgcggagaagaacggggagccaggagcctcctcaacaagcccaagagtgagat

SEQ ID NO: 169 - DNA, 100 bp, Homo sapiens
ccctctgaggaagaggactttgcttaacagagcgttccaaaaagaggactctccagctactttttattgcatcagtatgcagtggtttagagaatgggaa

SEQ ID NO: 170 - DNA, 74 bp, Homo sapiens
caccttgaagcagaggagcagcaggaccaggtttcaagtgccccatttgctccaagtctgtggcttctgacgag

SEQ ID NO: 171 - DNA, 82 bp, Homo sapiens
agctaagacgctgtttcagagcgtttgggtcctctgaggccccttgaccaggtattgtcttctaagaactctgaagcaatgt

SEQ ID NO: 172 - DNA, 75 bp, Homo sapiens
agcccggggacggcgaggccctcatgtaccacacgatataagcttaccaaagtcagcaacaatatgctacacagc

SEQ ID NO: 173 - DNA, 74 bp, Homo sapiens
gccttgctcctcgccgcggcggggactgcagacctgtgaccgcatcaagcagtcagcagctggcaccaagcgtc

SEQ ID NO: 174 - DNA, 100 bp, Homo sapiens
aatatttgtaggcgggttatctgcgaacacagtagtggaagatgtaaagcaatatttcgagcagtttggcaagtgtgcaggagaagagaattgggtggac

SEQ ID NO: 175 - DNA, 74 bp, Homo sapiens
ggctggtgaatggaacctcgcagtcatttatcatcagacctcagaaagaataatcatgggccagactgggaaga

SEQ ID NO: 176 - DNA, 100 bp, Homo sapiens
gtgaccaccatggatgcagagctggagtttgccatccagcccaacaccaccgggaagcagctatttgaccaggtggtcaggttccccagcttctgattgt

SEQ ID NO: 177 - DNA, 90 bp, Homo sapiens
gaatctgtcatgaaggaaactctatatccaaaatatgagaatctccaagcaaagattttggtccaactctgggtttgaaaaagtccagct

SEQ ID NO: 178 - DNA, 50 bp, Homo sapiens
ggcccggaggacctgcctctcgtcagatggtcagtaggacagaaggtaac

SEQ ID NO: 179 - DNA, 75 bp, Homo sapiens
gcagcggggacgcggggtctcgcggcgcctggcagcagagaccaccagaaggggttgttgggggctttgacgtac

SEQ ID NO: 180 - DNA, 100 bp, Homo sapiens
gccagctgtcaacattcagtatgaagtcatcggtaattactattcgtctgagagaatggctgatgttggagtccggggtgacctggtctcagtgaagaaa

SEQ ID NO: 181 - DNA, 101 bp, Homo sapiens
ggtgctgaaacagtgccgacttgcaaacgtggacgtgatgctgaatccaggcagtgccacttcgaatgttgctatttctgtggatcagagacaagtgaaaa

SEQ ID NO: 182 - DNA, 97 bp, Homo sapiens
tttgctttatttgtgaaatttggcaaagaggaaacagagcaaatgcagcgttacaatcaaagacttattgaggaattgaaaaacagacagactcaag

SEQ ID NO: 183 - DNA, 74 bp, Homo sapiens
gatgtggtggtaagatgtatgttgaccacgttgttcctgagcctgggacaagcctgctcgctgcctttgaccag

SEQ ID NO: 184 - DNA, 100 bp, Homo sapiens
gaccctgatggaggaagtgctcctgctgggcctcaaggaccgcgaggtcaagagcaatctgaatccaaatgcaaaggagtttgttcctggggtgaagtac

SEQ ID NO: 185 - DNA, 99 bp, Homo sapiens
ctgacacagcagagtattggtgctgctggaagccagaaggaagaggttgacggatatattcagacgttacgacacggatcaggacggctggattcaggt

SEQ ID NO: 186 - DNA, 80 bp, Homo sapiens
tcccagttggagagggaagaaaagctttggatgaaggagcttcaaacccaaagagattgcaacacctgctcggtataccg

SEQ ID NO: 187 - DNA, 90 bp, Homo sapiens
tgagcagtgagctggagaccaccagcttctttgactcagatgaggatgactccaccagcagaccacagcaccgggaagtccagtcagcgg

SEQ ID NO: 188 - DNA, 82 bp, Homo sapiens
ttttattcctcttcctatccaatccctgccttttgagtccaggtgcatttgacattgtgcagcaaagaaatggttatggaga

SEQ ID NO: 189 - DNA, 88 bp, Homo sapiens
cacgcggccctgctgaaagtggcgcaaatgctgaaccatccgttcatcttcaagccatcatgagctgtaagaagcagaggtcacggaa

SEQ ID NO: 190 - DNA, 75 bp, Homo sapiens
agcccggaagcgcagaagctgtaagctgtgctagaacaaaaatgcaatgaaagaaacactggatgaatgaaaagc

SEQ ID NO: 191 - DNA, 83 bp, Homo sapiens
cattgccgtcgatggttgggcgttaactatgttatccagggaaaatgtgtgagttcttgatacgaatgaaaggccaagagttt

SEQ ID NO: 192 - DNA, 82 bp, Homo sapiens
caggatgctaccatcaaagtgcgcccacagcagcaaccttggagcaggcaggctgacaaacgggctcatcataatgcactgg

SEQ ID NO: 193 - DNA, 97 bp, Homo sapiens
ggagcggtacatcgcctcggtgcagggctccaccccgtcgcctcgacagattacaggagcttattaatcataagaaggctgaggacacagagaagaa

SEQ ID NO: 194 - DNA, 100 bp, Homo sapiens
cgagaaagaggaggaggcgagaaactcccaccgacccacagagaacacggagagttcctggctctggatcttggagggaccaacttccgtgtgctttggg

SEQ ID NO: 195 - DNA, 98 bp, Homo sapiens
ggacccatcgccgcttctagaccctactgcggtctcggatattgccggattatagcatttgatgagctgaagactgattacaagaatcctatagacca

SEQ ID NO: 196 - DNA, 50 bp, Homo sapiens
caggcccatgcaagtaccaaaggaaggagatggggaagaagatgaaggtg

SEQ ID NO: 197 - DNA, 100 bp, Homo sapiens
gcaacgtcaactattacaatcgcttgtacaaaggagagtttaaacagccaaaacagttcattcatattcagcgtgtcatggagaaactccagctgggccc

SEQ ID NO: 198 - DNA, 82 bp, Homo sapiens
ggacaaagcaagtccagatcagaatgcttcaacccacacacctcagtcttcagttaagttccagtctcatcagattttccat

SEQ ID NO: 199 - DNA, 100 bp, Homo sapiens
caggatgggggacaggaggctgcggggcctcaggctaagtcctatcagccatggaaacaccattgctctcttcttccggtcactgttgccaaactatacc

SEQ ID NO: 200 - DNA, 82 bp, Homo sapiens
aagagtccctggtgtgaagcaagatcgctagaacacaccttacctgtaaacagtgggagccaagaagaaaggtttgctcccg

SEQ ID NO: 201 - DNA, 75 bp, Homo sapiens
ttgaactcatccggcagaataagagactggacgctgtgaggatgggagtcccagcttctggagacggggttcctg

SEQ ID NO: 202 - DNA, 100 bp, Homo sapiens
agcgcgaatatcgtcatcgttagaagttccgcagctctctgtacttgctcatggagaccctcaatgcgacgacgccccactacgttcgatgcatcaagcc

SEQ ID NO: 203 - DNA, 82 bp, Homo sapiens
ttcctgtacagcctgcagaactggaaatcctcattgacgattcaatttgttgaaggccaatttgtggactcctacgatccaa

SEQ ID NO: 204 - DNA, 74 bp, Homo sapiens
ttgataacagcaaactagttgaaggtttctatcctgcaccaggactaaaggtggaacctaacttcttgtggaac

SEQ ID NO: 205 - DNA, 146 bp, Homo sapiens
tcttctatttcttgtggatattatggctaataacacaacaagtttagggagtccatggccagaaaacttttgggaggcacagaaatggacaccagaaataaggcccagctccttgtgctcctgactcttctcagtgtgctcttctc

SEQ ID NO: 206 - DNA, 102 bp, Homo sapiens
gtcagtacatggacaagcaccctggggggctgcatccagataatgtgaaggatcgaatcatcaatttagttgttggcagcttaacatccttattgattctag

SEQ ID NO: 207 - DNA, 75 bp, Homo sapiens
ggactgcaaaccgagctcccgtctgccttgcaggttctgaagctgctgctcgtggcctgggatcgccgcctcatt

SEQ ID NO: 208 - DNA, 100 bp, Homo sapiens
agcctcccaaatacctgggattacaggtgaaggaggccatgcagcggattcacgaccgagggaacattggcaagttaattctggatgtagaaaagacccc

SEQ ID NO: 209 - DNA, 100 bp, Homo sapiens
tgggccgccgtcggcagcaagaacagagagagaggtggacagatctgagagatactgagaacctgccctgagcaagggggtggagaacttgcaagccctg

SEQ ID NO: 210 - DNA, 83 bp, Homo sapiens
agccaagctcgtagcctgccactccgtgcagtccggcagcgtcttctcttgagggagcaatttggagaagagctggaacccag

SEQ ID NO: 211 - DNA, 80 bp, Homo sapiens
ggccgatccgctccgctcacggtctggtgagctgtaccttctttctggcagtgaatggtctgtattcctctagtgatgat

SEQ ID NO: 212 - DNA, 100 bp, Homo sapiens
atttgtttggtggcctggcaaacgaaagcgaagattcaaacaataatgttcccaggaggcaggtggaagtcatcataaagtttctgtttcacccgtcgtc

SEQ ID NO: 213 - DNA, 100 bp, Homo sapiens
gtggctggagacatgagcaagaaaagcctctgggagcagaagggaggctccaagacctcatcaacaattaaggagattagcagaggcatttcatatcagt

SEQ ID NO: 214 - DNA, 90 bp, Homo sapiens
tccaggagttcgtctcttacgtctgcggaagtgcagctgcctcagttcttagcgcagattaaaaggagcccaagccccatctcatcctag

SEQ ID NO: 215 - DNA, 100 bp, Homo sapiens
tccaccgccatccgccaccatggccctgggctgcatcttgtacctgctgtgcttccggcagcacccttttgaggatggagcgaaacttcgaatagtcaat

SEQ ID NO: 216 - DNA, 98 bp, Homo sapiens
ccgggagcggcgctggccccaaggcgctgccctgcgcaggggtatcttcatcaaagattccaactcactggcttactacaacatggccaatggcgcag

SEQ ID NO: 217 - DNA, 98 bp, Homo sapiens
gccgctcccgggggccgtgacggtgggtgtgtacactggcactgagctgcagtaggatttttccttggatagtctggtctggagctgggacagcagct

SEQ ID NO: 218 - DNA, 51 bp, Homo sapiens
cagaggagaaattcagacggctcccgaggggacacggccaacacggtgaag

SEQ ID NO: 219 - DNA, 90 bp, Homo sapiens
cccagggtgtcatctggactgtgtttaaccagacagtgatgctgagtgctaagcagactggcacagcctccaggttggcgggctcatctg

SEQ ID NO: 220 - DNA, 75 bp, Homo sapiens
cttggagagaggagaacgaacatcttctggacctttgtccaggtgactctgacatcattagaagcatgccagaac

SEQ ID NO: 221 - DNA, 74 bp, Homo sapiens
gagagaggtacctctccttttccctctccctttccctaagatgatgacactgccacctctgacttctgcctctg

SEQ ID NO: 222 - DNA, 75 bp, Homo sapiens
gctctccagaggtgaaaggctattgggatttgagttttgtcaccggctcccacgtcggagagctgatcatctggg

SEQ ID NO: 223 - DNA, 102 bp, Homo sapiens
gtacttcaccaagattgccaccaggtgtattgtacgagcattgaaagatccaaatgcatttctttttgaccaccttcttactttaaaaccagtcaagttttt

SEQ ID NO: 224 - DNA, 100 bp, Homo sapiens
cctctcgatcacatacagaagaggattgcacggaggagctctttgacttcttgcatgcgagggaccattgctttgggagcctctggtggagcaagtaatt

SEQ ID NO: 225 - DNA, 96 bp, Homo sapiens
tagagtgaaaagtgcagctgcaaccaatctctcagccctgtattatatggtgcagctaaatcaagtccagcagctaaaccaggatccacaccttct

SEQ ID NO: 226 - DNA, 98 bp, Homo sapiens
ggaccacagcattcctgaaatacatccaggaaagacatggagattctcttaaaaaggcaattaagttggaatatgcaaggttggttaagttggcccaa

SEQ ID NO: 227 - DNA, 121 bp, Homo sapiens
cgtcattaagctacagggccccttctccccggaggaggacccctccaggtgacaaattctaccgccagtaatcacttgtgaaaaatcaacagtgaagcccagtggctcccggtcccccgga

SEQ ID NO: 228 - DNA, 74 bp, Homo sapiens
ggaggagatgtactgtgcttggctggaaaaccccaaaagtgtacataagatcatttgcatatcttacaattaaa

SEQ ID NO: 229 - DNA, 88 bp, Homo sapiens
ggggaccatgcagcggaggtgggtcttcgtgctgctcgacgtgctgtgcttactggtcgatctgccgacaccccaggccatcgagccc

SEQ ID NO: 230 - DNA, 76 bp, Homo sapiens
gtctcaccatgcaaactcccccacagcagctccatcaagtatgatggtgaaggatgaatatgtgcatgactttgag

SEQ ID NO: 231 - DNA, 100 bp, Homo sapiens
cctccccgctggagagggagccagaacagggaagaacggattcacacaggatggcttgcagaagacgctattttgttggaggctgtagcctttgaccagg

SEQ ID NO: 232 - DNA, 88 bp, Homo sapiens
tatgatggacctaggactgctgtgaacaaggggagaagaattgccttcagctccacgtcgttactgaaaatggcccccagcgctgagg

SEQ ID NO: 233 - DNA, 100 bp, Homo sapiens
tgggccatcattggttggctcctgacaacgtgcacgggggtgaatctctacattaagaacttggatgacactattgatgatgagaaattaaggaaagaat

SEQ ID NO: 234 - DNA, 87 bp, Homo sapiens
cgcctggtcatggcgcagccgggcccggcttcccagcctgacggactcgggcagccgcaagtagctcctccagcgccagcagccagc

SEQ ID NO: 235 - DNA, 75 bp, Homo sapiens
cacgcgggcgcggatcgaccggagcagagagctggcgagcaagaactggacataagtgtgtgcttcactttaaac

SEQ ID NO: 236 - DNA, 100 bp, Homo sapiens
cacagtcttttcagaaactcatatttaaggctgcgttcctttgcctgcaacaggggtcaagatgagttttgcctgacttctttgatgtcctgaactttcc

SEQ ID NO: 237 - DNA, 100 bp, Homo sapiens
cctcgctcccccatcaacgtggagagcttgctggtgctgggagaccgtgaagtgcaaagcagatggagtccaggccctcggggagacagcacgccagtga

SEQ ID NO: 238 - DNA, 90 bp, Homo sapiens
atcatgtcgcgttacgggcggtacggaggagcaaattgtggctactaatttgccccctgaagatcaagatggctctggggatgactctga

SEQ ID NO: 239 - DNA, 100 bp, Homo sapiens
tgaaagagaagatggttggcggcattgcccagatcatccgccagctggagaacaacatcgagaagacaatgatcaagatcatcaccagccagaacatcca

SEQ ID NO: 240 - DNA, 117 bp, Homo sapiens
tcaggttcagacccgaccgttatccagtcggttcgtggagaggagaggttgccaacttggcctgttccatctcaaataatgaagaaggtgtaaagcttgttcgaatgtctgcaagcc

SEQ ID NO: 241 - DNA, 51 bp, Homo sapiens
cgagctgaccctgggagacatcgacggccaacagagattttgagaaacaca

SEQ ID NO: 242 - DNA, 100 bp, Homo sapiens
aacctagcaacaaaaagaaagctgcgttaatgtttgcaaatgcagaggaagaatttttctatgagtgggaggaactgagcggcctggatgaggaacagca

SEQ ID NO: 243 - DNA, 98 bp, Homo sapiens
ggctattgtgaaggagggttggctgcacaaacgagagtgtgaacatggctacgcctcttcattcccgtccatgccgagcccccgactgcagcattcaa

SEQ ID NO: 244 - DNA, 83 bp, Homo sapiens
tggcgacgacgtgcggatctcctcccgggggaagctggctgaacgcgacatcgtccagacattgctgtcgaactgctccagaa

SEQ ID NO: 245 - DNA, 82 bp, Homo sapiens
aacctacttagatgacaatgtcaagaaagaaaactcctccttgtacctaggtgtgagttcttgatacgaatgaaaggccaag

SEQ ID NO: 246 - DNA, 97 bp, Homo sapiens
gtgccggacccgatgagctcgggagtccaccatcgctctgcaagccgcaggtgaccattgtgaggtagatattttgttctaattttccagatgagga

SEQ ID NO: 247 - DNA, 74 bp, Homo sapiens
ttgcagcctatggcctgttatttgtctcaacaaaagagttgggggccgtcccgctcctaaggcaggaagatggt

SEQ ID NO: 248 - DNA, 75 bp, Homo sapiens
ctcatcactattatggccctcacatttggatatgagcaggtttggatgcatctgctcagactacttctcatgaac

SEQ ID NO: 249 - DNA, 83 bp, Homo sapiens
cttacagacgctgccagcatcgccgccgccaggaggctactcacagtcgaactacaactccccggggtccggccagaactaca

SEQ ID NO: 250 - DNA, 82 bp, Homo sapiens
cccacactgaccccgggggagcggcagcaggactggcattgcggactgacctccagggagaggcccagatctgatctgcaga

SEQ ID NO: 251 - DNA, 100 bp, Homo sapiens
ggacctcagccccaacggcaagcaacttgctagtgtcagcagtgggatacctgcgcttgaaggacatcatccaccgtgacatcaaggatgagaacatcgt

SEQ ID NO: 252 - DNA, 83 bp, Homo sapiens
cctccttggtcgccgcgtccttggctggcgtggatgcccgctgtctgtagccccggcatggtgcccgtggccctgcccccggc

SEQ ID NO: 253 - DNA, 123 bp, Homo sapiens
tgcaacgttatattttgtcttctgtgtggattcttcagaaagtgaacttggcattttagatctaattcaactggaaactgacaaactagctctcccgatgagccccagcccgcttagcccgag

SEQ ID NO: 254 - DNA, 75 bp, Homo sapiens
aggccgaggccgggaggccgtgcccggagcttggacgaaccttgacaggatgggtgcagcgaactttccagagca

SEQ ID NO: 255 - DNA, 82 bp, Homo sapiens
ggaaatgtccggcaagatcgagaaagcaggaagggaaaaggccgaggcatcagcgtgtgaagaccgcaaagacgatcccgag

SEQ ID NO: 256 - DNA, 82 bp, Homo sapiens
ccgaacaccgggtggctggtgcagccgaggtcttcgggaattccagcgagggtgtctgacttccagcaactgctggcctgtg

SEQ ID NO: 257 - DNA, 123 bp, Homo sapiens
ctccattctgttggttttatgcatctttatccaatcaagtgcccttggacaaagcctgaaaccagacaatgcagatcttcgtgaagactctgactggtaagaccatcaccctcgaggttgagc

SEQ ID NO: 258 - DNA, 100 bp, Homo sapiens
gaaacaaagacttggaagggtttaagactctgacattcctggctgtcatgctcattgttctgaactccacggtttcttccaaggtgaaatccagtcccac

SEQ ID NO: 259 - DNA, 100 bp, Homo sapiens
caggagagctggagtcaggcggagaccgcaggctgaccccgcagcggccgggctgtcgcggcccccacctcagcttatgtccctgatgccaaaaatgcac

SEQ ID NO: 260 - DNA, 107 bp, Homo sapiens
cctcgacgtcttgcctgtgtcccacttgttcgcggcctatagatgaaggatttgggggcagagcacttggcaggtcatgaaggggtccaacttctcgggttgttgaa

SEQ ID NO: 261 - DNA, 75 bp, Homo sapiens
gtacaagaaaaagtcgtgtttctgtgtctccagggagaacttcaggtaaagagacgagttgtactgctgtcacag

SEQ ID NO: 262 - DNA, 100 bp, Homo sapiens
acaactgaaaacagattctgagtaatcaacaagatgccacatcagtagcaactgagtcttcagaatcaagcacttcagatttgccttcattcgaagttgg

SEQ ID NO: 263 - DNA, 75 bp, Homo sapiens
aaagctcacccagttagaagagatgaatccacatgaagcctgcctacagttttcacaaatctgtatcctttcagt

SEQ ID NO: 264 - DNA, 50 bp, Homo sapiens
tatgtttggagacaggccactgaagtcctcagaatggttggaatgaccct

SEQ ID NO: 265 - DNA, 73 bp, Homo sapiens
gcagcttcacctggccgggctgcgtcgcttcgatgccgcgcagagagaagaagaaggaggttcctgctgtgcc

SEQ ID NO: 266 - DNA, 50 bp, Homo sapiens
gtgaacttccagcagccggcggacgggctttctctacgtgctgttgtctc

SEQ ID NO: 267 - DNA, 74 bp, Homo sapiens
gctctttgtagcgtggtgcttctgttgctcacagaatttgcaccatcctgggattgtaaacctggaatgtatgt

SEQ ID NO: 268 - DNA, 100 bp, Homo sapiens
ccgtggacatcggggcagctgacctcgcccacgcccagcagcagcagcaacagctgtggaaatacaaagaactctgaatcaacttggaacacctcaagat

SEQ ID NO: 269 - DNA, 100 bp, Homo sapiens
agcgcctgacgtcaagcccgtgcagaatggcagccagctcttcatcaaggagctgcggagccggacctttcccaggcttctccagggaaagtgaccgagg

SEQ ID NO: 270 - DNA, 75 bp, Homo sapiens
cggcttatcgaacagagccgggagttcaagaagaacactccagaggacggaagccttcccagtcctgcagccacc

SEQ ID NO: 271 - DNA, 100 bp, Homo sapiens
gtggagggcctgcttatggtcccccaccgtcacttcatgcacgagaaggacgttatgagcggagacttgatgggtccggtgtctaaaagactatggagaa

SEQ ID NO: 272 - DNA, 100 bp, Homo sapiens
gaccgcctctgctcccgcctggggaaggcgacatgccaattcatgaacttctcagcctttatggttatggtagtactgttcgactacctgaagaagatga

SEQ ID NO: 273 - DNA, 100 bp, Homo sapiens
cggagggggcggcggcagcgacggcagcggcggcggctggactaaacaggtcacctgcagtttgtttcgacgccggaccgcgtaagagacgatgatgttg

SEQ ID NO: 274 - DNA, 100 bp, Homo sapiens
tcctggagtgcaacagcttcacgtcgcctgacccccacaaggtaggataattgcggactgaaccctcgggctgcggtcatatatgagaacttgctccgcg

SEQ ID NO: 275 - DNA, 98 bp, Homo sapiens
tcgctgcttcaggaggacctgcaggaggacgcagacggatgatccgagccagagacaacaacggctcctacgccctgtgcctgctgcacgaagggaag

SEQ ID NO: 276 - DNA, 98 bp, Homo sapiens
gttccagaggcacgaggagcccaagaccatcactgacgagtttgagcagatgccccttggtgtggccactgcaaggctctggcccctgagtatgccaa

SEQ ID NO: 277 - DNA, 90 bp, Homo sapiens
aacttggctgaccattggaaagtgcagtgtgccctgaaccgccctgccttctttgctgagaggctctactatgctatgaaaggtgctggc

SEQ ID NO: 278 - DNA, 83 bp, Homo sapiens
caaatccctggcccgggtgacccacgcggaggccgtcaagacagaatgttgctgcgggatgtaaaagctcttaccctccacta

SEQ ID NO: 279 - DNA, 75 bp, Homo sapiens
ggagcgggagtgttcgttgtgccagcgactaaaaagaggaaaaggggaagatagtgatgtactcagtataaatgc

SEQ ID NO: 280 - DNA, 90 bp, Homo sapiens
ctgttctacagaatctcagagtcgacctctttccaatcccagggacagctacagagcttcctcacagatttcagccttccaagttctgat

SEQ ID NO: 281 - DNA, 75 bp, Homo sapiens
cccagcccaaaccaggagattgcgagggagcgatgcggtgcagcgcgttgtcgccgtgatcctgaaggcgctgac

SEQ ID NO: 282 - DNA, 98 bp, Homo sapiens
agacatacatacacagcttcaagatgtcaaggctattttggcattctgctggatatatgttcgtaaataccaaagtcggcgggaaagtgaagttgtct

SEQ ID NO: 283 - DNA, 97 bp, Homo sapiens
agggtggctggaaggagaactaaatgggagaagaggaatgttccctgacaatttcgttaaggttgggggccgtcccgctcctaaggcaggaagatgg

SEQ ID NO: 284 - DNA, 74 bp, Homo sapiens
tatcaacgaagagatatcacgtcgccactgggacactgtgaaccaggagtgagtcggagctgccgcgctgccca

SEQ ID NO: 285 - DNA, 96 bp, Homo sapiens
tgggaaggaggccgagccgggatctcaggtcctcgggggcggcggccacgccaaggacggggggatatgagactttctactcggaatatcctgagt

SEQ ID NO: 286 - DNA, 130 bp, Homo sapiens
ctccccggtggcccaggcctcggactccgcggccggcccggcgcggcccagcgccctcaggtgctggagaatctggtaaaagcaccattgtgaagcagatgaggatcctgcatgttaatgggtttaatgg

SEQ ID NO: 287 - DNA, 50 bp, Homo sapiens
gtttgtgaccggagggaagaagaaagctgtatacctgcacaagtggtggc

SEQ ID NO: 288 - DNA, 112 bp, Homo sapiens
aagcccgcggcgcgcgcctctcccggaccctgcagggctgaagggtatgtgattggcagctgtattaaacacattccaatcgcaggacgagatataacatattttattcagc

SEQ ID NO: 289 - DNA, 75 bp, Homo sapiens
ggtgggcgcagctcgtcgcgctccgcacaaaggagtgcatccgccccaacccttttccccctcgtctcctgtgag

SEQ ID NO: 290 - DNA, 90 bp, Homo sapiens
tttccaacacagatgtccaagctgccaaggttgctcatcacccatggtggtaaaatttgctgatacacagaaggacaaagaacagaagag

SEQ ID NO: 291 - DNA, 82 bp, Homo sapiens
gcggccgcaccttcccgccttctcagggtgcttcaaggatgaccgcatcgtcttctggacttggatgttctccacctacttc

SEQ ID NO: 292 - DNA, 75 bp, Homo sapiens
catcaggaactcccggggaagaagctgctctctgagaaaaagctggaaaatgtttcaacgtgcgcaagagttgcg

SEQ ID NO: 293 - DNA, 100 bp, Homo sapiens
gccacattgagatgatccttacggaaaaggaacagattgttcctaaaccagaagaggaggttgcccagaagaaaaagaaaaagcttgtggtgaagggggg

SEQ ID NO: 294 - DNA, 101 bp, Homo sapiens
cggacctctatgccatgaacttcaatcccatcatttccagaaaggacatcacaggaggccaacggtcctgctgatggctacgcagccattgcccaggctga

SEQ ID NO: 295 - DNA, 101 bp, Homo sapiens
tgaaggtgtattcccttaaaaagacggacagcccatcgtgtgaactatagagtttgtggacagatttatattgtgggctcgggatgagtttgaaggcctct

SEQ ID NO: 296 - DNA, 100 bp, Homo sapiens
aggccgtcggggagacgctgtggtgtgactggggcaggaccatcagaaatgagccgtcagactgctacagcattacctaccggtacctcgaagtgtccac

SEQ ID NO: 297 - DNA, 98 bp, Homo sapiens
tggagaagaaagatgttttgcctactgttgatccgatctcacattcttgaaggtggcattgaagagcactaagatcggaagatgagtgagcttgacca

SEQ ID NO: 298 - DNA, 51 bp, Homo sapiens
ggaggagtctcagagctgtcagaaagggcaagcaagctccacatatgcgga

SEQ ID NO: 299 - DNA, 75 bp, Homo sapiens
caaagttccccaagaagaactggaaaatgccagcctagtgtttacagccaagaagacctgtgcagacagtgactt

SEQ ID NO: 300 - DNA, 90 bp, Homo sapiens
gggtgagcggcggccacggcatcctgtgctgtgggggctacgaggaaagttgttgaatgttgggtcacgaagatctcaacctggccaaag

SEQ ID NO: 301 - DNA, 75 bp, Homo sapiens
cttggtttcgggatctcggtgctgcagacggcgagacctcctgcacaggccgccatggcatcagatgaaggcaaa

SEQ ID NO: 302 - DNA, 73 bp, Homo sapiens
ggcttacccaggggatggacattcagtggaggagaattctgcctaagccaactcgaaaaagccgtacaaaaaa

SEQ ID NO: 303 - DNA, 75 bp, Homo sapiens
ccagatttgcagatggctctgctgtagtacaggtgtattacctgactgcttaaccgatggctctgatgtggtcag

SEQ ID NO: 304 - DNA, 90 bp, Homo sapiens
caaatatcggaacccctccttgaagctgatggtgaatgtgtgcggacacactctgaattccatataagcaactgactgttggagtcccca

SEQ ID NO: 305 - DNA, 82 bp, Homo sapiens
cgcgagcacagagcctcgcctttgccgatccgccgcccgtccacacccgccgccaggagctggtgactgccctcatgtgtga

SEQ ID NO: 306 - DNA, 100 bp, Homo sapiens
ataggtttcctcggcatcagaagtccttcaaccctgcagtgttaagtccaaaagtgctgggcattgccatcgctcggtatgacttctgtgcaagagatat

SEQ ID NO: 307 - DNA, 100 bp, Homo sapiens
gagagcgtcaacaagctgtaccaggacgaaaaggctgtgtttgatgtggacaagaagaaagggttgactctgattgagctctgggaaggcctgacagtgg

SEQ ID NO: 308 - DNA, 101 bp, Homo sapiens
ggtcagaggatgggagacggggcagtgaaacaaggcttcttgtatcttcagcagcagcagacgtttggaaaggtttgtgaaatggctgctgacatttctga

SEQ ID NO: 309 - DNA, 90 bp, Homo sapiens
caggagcagattccaaaggcacaggaagaagcttgcaggactcagcccaggagagtgttattactcgagatattcatcgtacatttcccg

SEQ ID NO: 310 - DNA, 100 bp, Homo sapiens
atgctcagaatccaagcggagagagtcagcctctggttcagactgcagtaaccagttcatagccttctatgaagagtgtggaagaatcacaacaatgaag

SEQ ID NO: 311 - DNA, 100 bp, Homo sapiens
gcttgggagcaggaagatgtcgaatgaacttgagtgccatgcctctgcaactcctcctgttgctgatcctactgggccctggcaacagcttgcagctgtg

SEQ ID NO: 312 - DNA, 145 bp, Homo sapiens
accagtttcggtcctggaggtggggccgggcctgcgtagtgaaactgcgtaggaacctgggaagaaggtgaccaagaatatggcccaggtgaccaaagccctggacaaggccctgagcaccatggacctgcagaaggtctcctca

SEQ ID NO: 313 - DNA, 100 bp, Homo sapiens
atcacttgtctggagcaagggaaagaggcctggagtatgaagagacatgagatcatggtggccaaacccacagggaactgtacctggggaatgaattgta

SEQ ID NO: 314 - DNA, 75 bp, Homo sapiens
cccgtggagtcggctgagggaaaagcgaggcaaggcaggcggatctgactgcagccatgagcagcaatgagtgct

SEQ ID NO: 315 - DNA, 71 bp, Homo sapiens
cggagtcagggcgctgagggagcgttgacagggaagcagccggatgatattgatgatgttaagaagttcaa

SEQ ID NO: 316 - DNA, 74 bp, Homo sapiens
gactcaaaagtggagaagattcgcaggaactccgaggcggacaatctctatgggaagcagaaggcaaggacccc

SEQ ID NO: 317 - DNA, 100 bp, Homo sapiens
ctcttggagcagctggtcatcatggcactgacccttgacctccggtggctcccccatctctcaggcgcgatggctacgggcgcggatgtacgggacattc

SEQ ID NO: 318 - DNA, 88 bp, Homo sapiens
tttctggtcactccccaggattatgcgcgaaaaatggctacaaacttcctagcacatgagaagatctggttcgacaagttcaaatatg

SEQ ID NO: 319 - DNA, 82 bp, Homo sapiens
cggaggcggctttggaagccgtgcggagcgagttacgagaattcccggccgctgcaagggttccaaagaactactggttcag

SEQ ID NO: 320 - DNA, 100 bp, Homo sapiens
ctgagacggacaccgaaggagacagtgaatcctgttcagccagagaacaagaatgtgaggattactacagcatcccatttcccacacccactactccgct

SEQ ID NO: 321 - DNA, 74 bp, Homo sapiens
aaggacctggccgacatcgcggccttcttccgatccggtttcaagtgccccatttgctccaagtctgtggcttc

SEQ ID NO: 322 - DNA, 100 bp, Homo sapiens
gaacccccatgggtgccgttaatcccctcctctcccaagctgagagcagccacacagaattatatccagatcgagagacagaagattctgaaagggttca

SEQ ID NO: 323 - DNA, 100 bp, Homo sapiens
ggcgacaagtacatcgccaagtttcagggagaagacacggtcgtgatcgcgctctctctccagatcggattcaaccgcacatcatgacagatgttccggc

SEQ ID NO: 324 - DNA, 100 bp, Homo sapiens
aaacagttcattcatattcagcctattgacctgaaaagtggttctggaaaagtgtaccaaggccctgcaaaaggtgctgctgatacaacaatcatacttt

SEQ ID NO: 325 - DNA, 75 bp, Homo sapiens
gtctctctgtgtggctgtaacttacgtgtactttaccaacgagctgaagcagttgctccgctctgctgctgattg

SEQ ID NO: 326 - DNA, 100 bp, Homo sapiens
aaagagccatacgaccttcggggtgataaaagaaaatgtggctgaagttacccgaagttcagcttgcagtgtaattcagaagagttaagaccagaagtac

SEQ ID NO: 327 - DNA, 100 bp, Homo sapiens
cacggagtggaatgtattggggacagatcagagtttgcatggctcgattatttgatgaacctcagcttgctagtctttgtctagatacaatagacaaaag

SEQ ID NO: 328 - DNA, 83 bp, Homo sapiens
cagcaatgagctatgttaaactgcgaactaatcttcagcatgccatgtgagccagccatgagagggtatcttgtggccatatt

SEQ ID NO: 329 - DNA, 98 bp, Homo sapiens
gcgcggcggccactgggcgcagcacccaggtctcctctgagcctccggcctccataagacccaaaacagatgacacctcttcccagtcccccgcgcct

SEQ ID NO: 330 - DNA, 75 bp, Homo sapiens
atgggtactctttcctcgtggaatttgaagattctacagataaatcaggtgatgcagaagatggggaagaatatg

SEQ ID NO: 331 - DNA, 100 bp, Homo sapiens
aggtcctgggcaggaccggttctcagggacagtgcacgcagacacaactcaaggctcagaacagcaggatccagcaactcttccacaaggtggcccagca

SEQ ID NO: 332 - DNA, 75 bp, Homo sapiens
cttagacgctggatttttttcgggtagtggaaaaccaggcctccggtgtggctgtctctgatggtgtcatcaagg

SEQ ID NO: 333 - DNA, 51 bp, Homo sapiens
tcaatctgttctgccacattttagccagaggaagctgcccgggagtgtcgc

SEQ ID NO: 334 - DNA, 50 bp, Homo sapiens
ccaggagtcatcggacgccagaatctgtttgctggcctagacctgaactc

SEQ ID NO: 335 - DNA, 74 bp, Homo sapiens
agaaccgtttggcaatatgtacgacgcggatgaggagatggagtttcaccattttaccaaagctggtctcgaac

SEQ ID NO: 336 - DNA, 75 bp, Homo sapiens
ggcatttgcgctcgcacctgaggcagtccctgctgtgcacctgggggtacaggatgcgaagtacaaaactgcttc

SEQ ID NO: 337 - DNA, 75 bp, Homo sapiens
gatctgcccatcttgttactccctagcagtgtggtaaggaagccatcggtatcagattctacccctgcattctca

SEQ ID NO: 338 - DNA, 99 bp, Homo sapiens
cggcggctccaccacagttgcaacctgcagaggcccggagaacacaaccctcccgagaagcccagttacgccccatggtgtccatcctgccagcagact

SEQ ID NO: 339 - DNA, 50 bp, Homo sapiens
ttcagggtttccaccgttcgttcaaggtagtgaagcgcgcagtggcgagc

SEQ ID NO: 340 - DNA, 97 bp, Homo sapiens
tccgcgagcccatccgtctcaagactgtgaaaccagttggaggacaacagcacacctgaaccaaaggaaaatggggaggaaggctgtcatcaaaatg

SEQ ID NO: 341 - DNA, 89 bp, Homo sapiens
ggatggggtcaacacttacaactgccgctgtcccccacaatggacagcaggggaacaggaacctgataaagaatcaggagcctcagtgg

SEQ ID NO: 342 - DNA, 100 bp, Homo sapiens
gaaaaggctttgagaaattttgagtcctcgagtgaatgggcggatctcatatcttcacttggcaaactcaacaagtcgtcctcttgagttctggcgcctt

SEQ ID NO: 343 - DNA, 101 bp, Homo sapiens
aggaggtggtagagggcatggatatctctactcgctccaaaggttggaaaagagactgttcaaaccactgaggatcagattttgaagagagatatgccacc

SEQ ID NO: 344 - DNA, 83 bp, Homo sapiens
aaagccggagtattttactaagcccctaaaatgtcgagatttgtacaagatggcagaagattttcaagtcccggctggtggag

SEQ ID NO: 345 - DNA, 100 bp, Homo sapiens
tatggaggcacagctgctgtcttcaatgctgttaactggattgagtccagctcttgggatggccctggatccaatggaactgaagggtgaaggtcttgtc

SEQ ID NO: 346 - DNA, 107 bp, Homo sapiens
ctgcctggtcgctggtgaagcccgcggcgcgcgcctctcccggaccctgcagggttttaaaatcaaagatgggaaaatcggagaaaattgcccttccccatggccag

SEQ ID NO: 347 - DNA, 82 bp, Homo sapiens
atttcaaccataaagacatcttaattgggcacgaaagagggaggagtctgctactagtcttatcagctcttaaaaacagaaa

SEQ ID NO: 348 - DNA, 75 bp, Homo sapiens
agtggaactattggaaaggccttcactgcacagctctcccggcagctgagcgggcgggagcaggagctggagcag

SEQ ID NO: 349 - DNA, 90 bp, Homo sapiens
tgaagcctctgctgcccccgctgccccctgactatggtgatggttacgtgatccccaactacgatgacaactactccaaaggattcggcg

SEQ ID NO: 350 - DNA, 100 bp, Homo sapiens
aaactgatgaagctgcagaaccaacgaggtggccgaatcttccttcaggatatcaaggacttaagtgagtttaaagagatgacaacatgtgttttcccca

SEQ ID NO: 351 - DNA, 101 bp, Homo sapiens
agatgacctgtcaggagttcattgcaaatctgcaaggggtaaatgagggtgttgatttctccaaggatctgctgaaaattgtgtcagcagctaaggtgtgt

SEQ ID NO: 352 - DNA, 100 bp, Homo sapiens
ctaactagctccaggttaggccgagctttgcgggaaagcagcgttactgtaaaatggggaaaggagaaatttgaaggtgtagaattgaatacagatgaac

SEQ ID NO: 353 - DNA, 97 bp, Homo sapiens
gtccatcttgtcgtcttcggaaatgttatgaagcagggatgactctgggagatctatttaggtccacctgaggaaagcgctgcaccgccagtgcctc

SEQ ID NO: 354 - DNA, 90 bp, Homo sapiens
ctggtccaaggacacctacagccccgacgaacatttctgggtgacactcaacaggattcccgtttttggctttcacccccaaccagtgac

SEQ ID NO: 355 - DNA, 75 bp, Homo sapiens
ctgaagacaaaaatccagaagtacaagcagtctgatattctctaagccgctttcatcatgggagaaatagagcag

SEQ ID NO: 356 - DNA, 75 bp, Homo sapiens
tggagcctcagttggaagcagccgatccagcctgcggagcctgtggggcagatacattccaccgttgatctgggg

SEQ ID NO: 357 - DNA, 98 bp, Homo sapiens
catcaacaaggagaaagctggccagacttccatggagtcactgattcatcactttaagttgtatactgagggctaccaagttcctccaggagccacat

SEQ ID NO: 358 - DNA, 101 bp, Homo sapiens
gcttggaccccggcttctgggacgcgtcaggcccctagcagtcttcttgatgctttggaacaacatttagcttccttggaaggaaagaaaatcaaagattc

SEQ ID NO: 359 - DNA, 82 bp, Homo sapiens
tatatgatgctcctcccaatattctgaaacatgtggttggacagttcagtaaggattttttatcaagcagaaatgcatcgaa

SEQ ID NO: 360 - DNA, 75 bp, Homo sapiens
cgaagagctgccgtcgctgcagagaccccgctatggcttttggtgccctggttgtcagatgttggaaagcagtag

SEQ ID NO: 361 - DNA, 98 bp, Homo sapiens
agatggtcttcacagcactcaaagaatgaggagaaacctgtgcaaatgatgtttaagcaatctacttttaagaagacctatataggagaaatatttac

SEQ ID NO: 362 - DNA, 90 bp, Homo sapiens
accgcatcctagccgccgactcacacaaggcaggtggtcataatgtcacaatctccttgcagtccaggactgggcatactcatatgcctt

SEQ ID NO: 363 - DNA, 103 bp, Homo sapiens
gttgtgtttgtgaaacagagaaagataggcggccatggtccaaccttgaaggtcatcatcagatttgaaatatttaaagtggatacaaaactatttcagcaat

SEQ ID NO: 364 - DNA, 75 bp, Homo sapiens
tgatcgactccagcatcatgattacctcccaggtaccatgaccagcaggacgtaactagtaactttctgggtgcc

SEQ ID NO: 365 - DNA, 96 bp, Homo sapiens
gtggggctcatcgtgatcccggcgacatactacctctggccccgagatcagaatgccggcctccccatggccacccatggaccagtcggcattcac

SEQ ID NO: 366 - DNA, 83 bp, Homo sapiens
ctgctggagggtgacaagctcctcgcacaggatgaagcctgctgggagcgtgaatgacatggccctggatgccttcgacttgg

SEQ ID NO: 367 - DNA, 49 bp, Homo sapiens
cccagcccctggagaggatgcaggatatgggcactgtggtcctgggaaa

SEQ ID NO: 368 - DNA, 75 bp, Homo sapiens
cgctcatgccaggagggaacaaagaagcgtgctgccccagagcacatcagctatgtgccccagctctcaaacgac

SEQ ID NO: 369 - DNA, 90 bp, Homo sapiens
cttaagaaacgcagctatgggactggaagaagaaacacatgctcattacatcgatgttgccagaaaatattttcagaacctggaagctta

SEQ ID NO: 370 - DNA, 51 bp, Homo sapiens
agctgaattatggcagcccagtcaaggtcccagcacacctggaaagttctg

SEQ ID NO: 371 - DNA, 98 bp, Homo sapiens
tgggctggaggacagagaagccttttccgttgccggtgccggcctagcgtcctggaattacttcaatcaagagacaaagcattatctaactgtgaacc

SEQ ID NO: 372 - DNA, 98 bp, Homo sapiens
gggattgctagtctcacagaccgtgcagacatgttgaagaagttttgcaaaaccagaggatgcttctggaaggtgtgactacacaggtggcacataag

SEQ ID NO: 373 - DNA, 82 bp, Homo sapiens
ccccaattcctcaaaagcaggaaatactggtggaaccagaaccattatttggtgcatacggaatggacagccgacctcccat

SEQ ID NO: 374 - DNA, 50 bp, Homo sapiens
ggagttcaaaacccacacatgaaggaccattacgacctgttcttgaatac

SEQ ID NO: 375 - DNA, 82 bp, Homo sapiens
gctcactttcggcggagggaccaaggtggagatcaaacaccagcatctcagacatgtcgaaaaagatgttttgatccctaaa

SEQ ID NO: 376 - DNA, 96 bp, Homo sapiens
cctgcctccctctccgctgtggtacccactgatggtaatgctggcctgctggctgaaccccagattgccatgttctgtggcagactgaacatgcac

SEQ ID NO: 377 - DNA, 83 bp, Homo sapiens
cttcggtggactccttcggcagtccacccaccgccgccgcctcccagtaggagctgtggcgcggggccttccaggagtctgag

SEQ ID NO: 378 - DNA, 51 bp, Homo sapiens
ggcggcgcccggatgggcagctgaggggctcacaacgaagtaagacagtag

SEQ ID NO: 379 - DNA, 75 bp, Homo sapiens
agatgctgtaaaaagattgaaagcttctcacaccattttgctggtacagcctaccaagaggccagaaggcagaac

SEQ ID NO: 380 - DNA, 100 bp, Homo sapiens
atggtctttgtgcacatttacatcaaggagaaggtacagattcagagacaaaaaatccggtctgactttaagaatctccagtgtttcctacatgaggaag

SEQ ID NO: 381 - DNA, 90 bp, Homo sapiens
ctccccagggcagaaatagcgaccatggcgaggtattgttgcagcatctggcagtgagactgaggatgaggacagcatggacattccctt

SEQ ID NO: 382 - DNA, 50 bp, Homo sapiens
aaaacagtgtcgctgataccaacaaggagccgtctacatctgcacggaag

SEQ ID NO: 383 - DNA, 75 bp, Homo sapiens
atataagagtctgactacttgacacactggctcgaaaatgtgatgttctgaatcgtggattttcaggttacaata

SEQ ID NO: 384 - DNA, 75 bp, Homo sapiens
ccagctgcagcacgtggaggactaccgccggcaccatggacctgctggactggagcagcctcatcgacagcagga

SEQ ID NO: 385 - DNA, 50 bp, Homo sapiens
gcccccgacaccagagttacctacaagccttttaggtgtccctattgcat

SEQ ID NO: 386 - DNA, 75 bp, Homo sapiens
gtcttcaatgtcttctgcttatatggcaatgtggagaaggtgggtgacatcaccatcctggtgaacaatgccgcc

SEQ ID NO: 387 - DNA, 97 bp, Homo sapiens
agaagaggagtcctttaggaaggtaaagattatagttcccaacagcacagcaggtctgataatagggaagggaggtgctactgtgaaggctgtaatg

SEQ ID NO: 388 - DNA, 74 bp, Homo sapiens
cgccgagaggccgtgcgggacgcgggcgccaggaccggccgaacgcagaggacttgatcatcttccctgacgac

SEQ ID NO: 389 - DNA, 50 bp, Homo sapiens
ctggattccatgtagagacccctggagcttcttccaggtcatagtgtctg

SEQ ID NO: 390 - DNA, 100 bp, Homo sapiens
cagcagcagcagtgatggtggcagcaacaaggagggaaaaaagagcaggtggaaaaggaaagatggctgagagctagcaaggaaaactcaggaccatgat

SEQ ID NO: 391 - DNA, 74 bp, Homo sapiens
agttctcccgccctcttggtgagggtgtgggccgaagatatgctcatgtggtgttgaggaaagcagacattgac

SEQ ID NO: 392 - DNA, 100 bp, Homo sapiens
cacgcaaagatattcaaactctaaaccatctgaattggctcaatgatgaggatgcagaaagtagatgacattccatccacactgtgtgagcaaattggag

SEQ ID NO: 393 - DNA, 82 bp, Homo sapiens
atctacactcaggacttcacggtgcccgcggggatctgacgagcttttctctacttgtgtcactaacggaccgtttatcatg

SEQ ID NO: 394 - DNA, 80 bp, Homo sapiens
ggatgttcttcttcgagtatttgtagaaggtgtgtaatgctgtgtcatggagctaaaatcggatttttccaaggagatat

SEQ ID NO: 395 - DNA, 98 bp, Homo sapiens
atatccacaccatccttctcgctgcaggctccaaagacaacaggccctccctctgccctcccgtctgtgagctccctgcccagcaccacctcctgcac

SEQ ID NO: 396 - DNA, 83 bp, Homo sapiens
gagcgagctgtcagagcccggggacggcgaggccctcatgtaccacacgaactctcagaaattgagcccaatgtattccttcg

SEQ ID NO: 397 - DNA, 82 bp, Homo sapiens
gtcaatgccattgaattctccaacaatggaggccagtggctggtctcagggaaatcctcattgacgattcaatttgttgaag

SEQ ID NO: 398 - DNA, 50 bp, Homo sapiens
caagccttcaaggagcccaggggtagctacagcaagctgggtagcaggca

SEQ ID NO: 399 - DNA, 104 bp, Homo sapiens
aagcagtcaaaaagatgcttgtggaagccacccgggagtttgaggaggttgtggacttgggaccctggaggactgacgctgctggcctgggcgtccccttccgc

SEQ ID NO: 400 - DNA, 75 bp, Homo sapiens
ttatcaaaatcacgttataatcagattttgaccaagcattttgtaagatatctaacagtgatacgccttcaccac

SEQ ID NO: 401 - DNA, 75 bp, Homo sapiens
gttgtgttgcccgccaccatgagctacacaggtgtcgtgaaaactacccctaaaagccaaaatgggaaaggaaaa

SEQ ID NO: 402 - DNA, 90 bp, Homo sapiens
caagaagcggctacaggttggagggtttgagcatgccagagctgcctttggccagtgtgaagcctcagtttaggtcatctggtggttcag

SEQ ID NO: 403 - DNA, 100 bp, Homo sapiens
cggcgacaagggtgttcccgaactagagtggtttgcgtgtgaacttggacatgggcaaagcggtgtatggatggatgatgatgaaagatgagaacatccc

SEQ ID NO: 404 - DNA, 90 bp, Homo sapiens
gtcggcaggaacttgctcgactgagagactcaggactgttaaagattcactccagtcagtccagtccgcagcaggccgtcctgacgattc

SEQ ID NO: 405 - DNA, 98 bp, Homo sapiens
caagaagttgagaccgagaatgtggaaacaggttttggctcccagtcagttcctcgtcacagtcccaataaaaggcctggccgggtacagggaggcca

SEQ ID NO: 406 - DNA, 95 bp, Homo sapiens
cgagcggttccttgtgggctagcatcctgaggttagcattacacttctcccagtggagcccatgacttctgatcaggacgctaaggttgtggctg

SEQ ID NO: 407 - DNA, 100 bp, Homo sapiens
gcgtctggccaagaatcagaggaagtggcttctcagatgaccaagatggtgctgcagatggtgctgaggatggagaacccaccaagccccgctaggagcc

SEQ ID NO: 408 - DNA, 75 bp, Homo sapiens
ttcgaagccattcagtcctcaatctccttttccttggctacccaattcgacaccaaattttggaacttaaaaaga

SEQ ID NO: 409 - DNA, 83 bp, Homo sapiens
gtgatttactggatttcagtgcggaactgtggctgcaccatctgtcttcatcttcccgccatctgatgagcagttgaaatctg

SEQ ID NO: 410 - DNA, 96 bp, Homo sapiens
cgtccgcgccgcgcgcgggcctcgcacagatcgcctgctttgggccttccatgtcgtcaggcgtcctgcctctgcggctctgccccctgcatcctg

SEQ ID NO: 411 - DNA, 101 bp, Homo sapiens
gggagccgtggccctttcgggggaccttcgagacaaggctgtcagcccctaggcggctggaagctgtggtccctgtggggcgaatgcacgcgggactgcgg

SEQ ID NO: 412 - DNA, 97 bp, Homo sapiens
cctctcatgtacttgtctgttgggggcttgtgttgatcaggagtgaattcacagtctaccatgaattggaagaaaaagcttgtggtgaaggggggca

SEQ ID NO: 413 - DNA, 75 bp, Homo sapiens
gcggcacctacggggacgtctataaggttttgatggacatgtttgatcaggatgacataggtttggtttctctct

SEQ ID NO: 414 - DNA, 75 bp, Homo sapiens
cgaaaattggatgtgaaaatgaagccagaccgagcgctggccgcgcgccgaacccgagtccggcggcaccgacga

SEQ ID NO: 415 - DNA, 73 bp, Homo sapiens
tttcctgtccgagatgggaaaatcaaactctcacctgaggaagaggatggagatgaagatgaggaagctgagt

SEQ ID NO: 416 - DNA, 83 bp, Homo sapiens
atgggctcttcctctagcagccagtatactttctgtcagccagaaactgcttcttctcagcctgttgataaccatgttagccc

SEQ ID NO: 417 - DNA, 98 bp, Homo sapiens
atggaacagcagatgatgaagatgagggtgttccaactgatcaagccatcagagcaggtcttgaactgcttaaggtcgaaatgagaaggggcagctgg

SEQ ID NO: 418 - DNA, 100 bp, Homo sapiens
gctcgggcaaggatggtggaggcgagaacactgaggaggtgaaatgacaatggatgctctgttggctcgattgaaacttctgaatccagatgaccttaga

SEQ ID NO: 419 - DNA, 75 bp, Homo sapiens
ccagccccggtcacagagtgcaccgtatcctgtcacttctggatgtgagtgagtgttgaaaagatagacctgaag

SEQ ID NO: 420 - DNA, 97 bp, Homo sapiens
ccaggactcagaggccgccatcaaccgccagatcaacctggagctctacgcctcctacgtttacctgtccatgggcttggattttgaggccaagcag

SEQ ID NO: 421 - DNA, 51 bp, Homo sapiens
attctcaaagactggtgctatgaagctctgtacctcccacaaggattaccc

SEQ ID NO: 422 - DNA, 83 bp, Homo sapiens
gtcaggagatcctagtatggaggaacatctgtctgtcatgtatgagagactgagacaagaggcggcttacagggagaacacag

SEQ ID NO: 423 - DNA, 90 bp, Homo sapiens
cttggactgagtcctgcaggacacagagagacaagagagacacctccaacttcgacaaagagttcaccagacagcctgtggaactgaccc

SEQ ID NO: 424 - DNA, 83 bp, Homo sapiens
gcctgcagagcgcgcagtacctccggtcagcccaaggccaaccccactgtcactctgttcccgccctcctctgaggagctcca

SEQ ID NO: 425 - DNA, 98 bp, Homo sapiens
caccactggacctccaaggaagccacgtgcagacatctacaaccttcgatctcctgacgagtgtcagcggtgcccactgtgctggccatgaagaatgg

SEQ ID NO: 426 - DNA, 74 bp, Homo sapiens
gaaactggatctacggccctttccatagccagagcagtacaagagctgaccggttccctgatgtgttacctgct

SEQ ID NO: 427 - DNA, 83 bp, Homo sapiens
acggcgatccgggcgctcgagacttaccagagccacaaggtgtggacactgccagcggctgcagccgacttggaatgacctgg

SEQ ID NO: 428 - DNA, 78 bp, Homo sapiens
acttacggtccacagatgagccagtatggaccacaagaaaatgcatccgatgcagatttatggctcctgaacagttgc

SEQ ID NO: 429 - DNA, 75 bp, Homo sapiens
tcctaaaagactgaaatgggggcgaccattcttaggtgcactaggccttccaatgagggggatgagcaacaatac

SEQ ID NO: 430 - DNA, 75 bp, Homo sapiens
aggattccaagtaactcttatttgacggaccagcaggctgaggccaggtcctacctcagcgaagagatgatcgct

SEQ ID NO: 431 - DNA, 74 bp, Homo sapiens
ttggatcgctgcaaccatctccgccagaacgacaaagaggaggtaatctgtaagtcagatgctccaacagggga

SEQ ID NO: 432 - DNA, 98 bp, Homo sapiens
gggcagcgaaccgggggagcgaggcacgagacagggcagggcattgttcatgcactgaccgacctcagcagccccggcatgacctcagggaacggaaa

SEQ ID NO: 433 - DNA, 100 bp, Homo sapiens
gcagcatggttcactccagcatgggggctccagctctgggagggtctcacggaactagtgacggcgacaggcaactatggcaactaccggcgtcggctgg

SEQ ID NO: 434 - DNA, 100 bp, Homo sapiens
ggagtactgcgccatgagagacgagataaatgagacgccgaagtcgcgggcgctcatggcgggcctggaggtactgttcgcatcggcagcgccggccatc

SEQ ID NO: 435 - DNA, 99 bp, Homo sapiens
gtggaactgaacttagctcgacggggctgaccgctctggcccagggtggcctcgaaaaagcccaagacagcagaagcagacacctccagtgaactagca

SEQ ID NO: 436 - DNA, 73 bp, Homo sapiens
atctgctccagcagagaatcacatcttacctgggcaaagggaacagatgctgcttgtgttgctcagagtcacg

SEQ ID NO: 437 - DNA, 100 bp, Homo sapiens
ccatttgatagcctagaagaaagcagggtgaccaagaatatggcccaggtgaccaaagccctggacaaggccctgagcaccatggacctgcagaaggtct

SEQ ID NO: 438 - DNA, 100 bp, Homo sapiens
tgcccggagttccgctcctgcgggcttagcaggaaagggtgcctaaggagccaagccgccatggcctaccacagcttcctggtggagcccatcagctgcc

SEQ ID NO: 439 - DNA, 100 bp, Homo sapiens
ctccctgctcggaggcggtggcgatcctgagagtgagaagcctgactgaccccgcctagacgccaggcccacttcacgccgtctaagtggagaagtgacg

SEQ ID NO: 440 - DNA, 82 bp, Homo sapiens
tttcaagaaaatggatttaaacatatttccctgtggaggtcaatgagtggtcattgaagataagaaaggaaatgagagttgt

SEQ ID NO: 441 - DNA, 51 bp, Homo sapiens
tcctgttctggggacagtttggtattaaaattattggcatgaagtgtgggg

SEQ ID NO: 442 - DNA, 100 bp, Homo sapiens
tcaccacaagaagggctgccaggttattcagcttctcaaggctggaaaagcgaaggaagtttcctacaatgcactagcctcacacataatctcagaggat

SEQ ID NO: 443 - DNA, 100 bp, Homo sapiens
gccgcagctggcgcagcccacgctcatgatcgacttcctcacccgcgcctgcgacctcggcccagtgacgagcaccatccggaagtgaaggctgatgggt

SEQ ID NO: 444 - DNA, 90 bp, Homo sapiens
ggcggatctggaggagcagttgtctgatgaagagaagggagccagcgccggcagccaccatggcgtcacgcatagggttgcgcatgcagc

SEQ ID NO: 445 - DNA, 105 bp, Homo sapiens
caacggcaaagttttgcagatcttcaacaagaggacccaggagaaattcgccctcaaaaacaccttccaccatgaccacctcagcaagttcccacttaaataaag

SEQ ID NO: 446 - DNA, 90 bp, Homo sapiens
gtggggcagattgcaaagctcaagatacatttgctgcaattccatggaaccaaatacgcggccattgacccatcaatggtcagtgccgag

SEQ ID NO: 447 - DNA, 100 bp, Homo sapiens
atcctaaacaccccttcagtaaatttgggacaggtgagttgggaatcagactcttgagttgacagctggcctatggtttctgcattttgttaagaagcac

SEQ ID NO: 448 - DNA, 83 bp, Homo sapiens
atcccgcaaccgaagcacaaaagttatcaaacccggtggaccatatgtagggaaatcctcattgacgattcaatttgttgaag

SEQ ID NO: 449 - DNA, 76 bp, Homo sapiens
caaagaagcagcccagtggaaccacaaaaaggccaatttcagatggtttggaataccttgtagcaggacatgagga

SEQ ID NO: 450 - DNA, 103 bp, Homo sapiens
acagcgcggcggggagcgacgaagactctgacctgtttttgttggacacccgtgtagtatgggcctcagaagaaggctggctggaatttgacatcacggccac

SEQ ID NO: 451 - DNA, 96 bp, Homo sapiens
gcccagagctcctggaccaatgcatcttcccaccaccttaaaccactggtgtcccgacccaggctaagcttgagcatggctgagcaggagcccaca

SEQ ID NO: 452 - DNA, 98 bp, Homo sapiens
tctcccctgtccacgactcctatggaaaacagagagatgcaggtcagctcctccagtaccacaacttctgagagtcaagatccgtcttctggggaccc

SEQ ID NO: 453 - DNA, 88 bp, Homo sapiens
cccagctctgcagccacatactatccgtttgttcaggaaccaccagtgacagagaacgaatgatcacacactttgaaaggtccaaaat

SEQ ID NO: 454 - DNA, 80 bp, Homo sapiens
atccagagcgccgcgcacttcgtcatgttcttcgcgccctgcggaaatgagaaagcagagggagttctatcacaaattgg

SEQ ID NO: 455 - DNA, 90 bp, Homo sapiens
gcggcctcggcctccccttggattcagacgccgattcgcccaggaaacaaagtgtccactcctggtgttcaggatccagaaagagaactc

SEQ ID NO: 456 - DNA, 75 bp, Homo sapiens
aaaagatggtgccattgaagatattatcacagactataatgtaactgcaaactccaagctggtcattatcacggc

SEQ ID NO: 457 - DNA, 90 bp, Homo sapiens
cgcccgcaagagcgagccgcctgccccggtgcgcagacagagctattccagcaccagcagaggctgtcagccagatgaaacagcaaaaat

SEQ ID NO: 458 - DNA, 50 bp, Homo sapiens
taattactcaaaatatgcagggaagactctccagaaagagcaacagtaat

SEQ ID NO: 459 - DNA, 75 bp, Homo sapiens
gtccagagctgaggactgcctgtttgcagcgccatcatgaccgggtcctataacaacttcttcaggatgtttgat

SEQ ID NO: 460 - DNA, 100 bp, Homo sapiens
cagcaagttgtggaacttctacaggaacggagggtctcgctgttggagttggatttggggctatagaaaagacggcatctgctacctttgagagtgccag

SEQ ID NO: 461 - DNA, 84 bp, Homo sapiens
ccggaccggagactttggggcctaactaggtgtggatgaggtcaccattgtcaacattttgaccaaccgcagcaatgcacagag

SEQ ID NO: 462 - DNA, 49 bp, Homo sapiens
cagaggacaacgaagtgttcgacttaattcagtgcacaaatgagatgaa

SEQ ID NO: 463 - DNA, 100 bp, Homo sapiens
atctgccccaaagtcttagaactggtggataattactgtaccttcctcatggaaaaagttttatttaaagtgttatttctcattgaatactatcaaaaag

SEQ ID NO: 464 - DNA, 98 bp, Homo sapiens
gggagccctgggtcactttcagtgagtcatcgctgacagctgaggaagtctgcatccacattgcacataaagttggaggccactgtctgcagctcccg

SEQ ID NO: 465 - DNA, 100 bp, Homo sapiens
cactcgccgatcctccaggcatgccccgctacgagctggctttaatcctgaaagccatgcagcggagcggttctggtgaggttggaaggatgcagccacc

SEQ ID NO: 466 - DNA, 98 bp, Homo sapiens
cgccacttgcgcctctccagcctccgcaggcccaaccgccgccagcaccatggccagcaccatttccgatgtaagttgaagctacagcagaagacgat

SEQ ID NO: 467 - DNA, 98 bp, Homo sapiens
gagcatcggcagctccggaggccggggtaactggcaggacctgaaggagaagaaggagaaggtggaggagaaggcaagccggaaagagcgaaagaaag

SEQ ID NO: 468 - DNA, 100 bp, Homo sapiens
aagcagcgtaccaagaaaaataaagaagaggctgcagaatatgctaaacttttggccaagagaatgaaggaggaggagaacggggctgaggaggaagaag

SEQ ID NO: 469 - DNA, 83 bp, Homo sapiens
atctggaatctggaatgaaatcttccaagtccaaggatgtgtggtccatgagttggaactttataacacaggatattatttag

SEQ ID NO: 470 - DNA, 50 bp, Homo sapiens
ctggtacagcagcttaagcagcagtgtaaaacctgttctgagccaaaaaa

SEQ ID NO: 471 - DNA, 101 bp, Homo sapiens
tttggatgaaggagcttcaaacccaaagaggtgctggagaatctggtaaaagcaccattgtgaagcagatgaggatcctgcatgttaatgggtttaatgga

SEQ ID NO: 472 - DNA, 83 bp, Homo sapiens
tagcaacgtggggctcatctgcctctctctgagcaggaagcccgcattgaacctggccacatcccaggtaccgtgaacatccc

SEQ ID NO: 473 - DNA, 100 bp, Homo sapiens
ccgcgctccctccgccgccgccgccttgctgctgctcaaagctgctgccgccccttgggctaaaaggtttacccaaggtccagcctagcccctaggcacc

SEQ ID NO: 474 - DNA, 75 bp, Homo sapiens
ggccatcaaagtgattccccggaatcgtgtgctgggctggtcccccttggttgttgatcattatgaaaatcctag

SEQ ID NO: 475 - DNA, 100 bp, Homo sapiens
tctgtccccagagcctcagtttgtgcaggacaccgacatggaacagggactcactggggagctgtgacttgtggtccctaggggtgattatctatgtgat

SEQ ID NO: 476 - DNA, 101 bp, Homo sapiens
agttgctcggactcaaacgtccagtcctcgtgcgaccgcgctgggtcggaagtgagcaggggtgtgtggaatgtaccatacatctcccaggcctatgtgat

SEQ ID NO: 477 - DNA, 50 bp, Homo sapiens
tactgatgactttgtaaaaatgttttcagtaggagagaagtttgctgagg

SEQ ID NO: 478 - DNA, 96 bp, Homo sapiens
tccccgcaggcggcgtgggcatgggcatgtacaacaccgacgaggatgaaaactttcggaagagaaagttgcctgtggtaagttcagttgttaaag

SEQ ID NO: 479 - DNA, 90 bp, Homo sapiens
cccagtactttgggaggccaaggtgatctcagccctcctccaggcttcgattataacttacaggattgtgattcacacatttcagtttcc

SEQ ID NO: 480 - DNA, 100 bp, Homo sapiens
gagatgtttggatggagctttgtctttgaggactttgtctctgatgagctgagaaacaaagccacccagccaatgaagtcccaggaatccccaaacctgg

SEQ ID NO: 481 - DNA, 100 bp, Homo sapiens
cgccgacctgcagcgcccggctgcctcgcactccgcctcccccggctcagcccccggccgcggcgggacccgagaaaggaagctgttgaagttattgaag

SEQ ID NO: 482 - DNA, 75 bp, Homo sapiens
ccaggaaacgaagtgaagctaaaactctacgcgctatataagcagcagcagtgggagtagtggagggagccaccc

SEQ ID NO: 483 - DNA, 82 bp, Homo sapiens
aagccgacgttcgagaggaagattcttacctctttgatctcgacaataagatgagcagcaccagcagtaagagggctccgac

SEQ ID NO: 484 - DNA, 137 bp, Homo sapiens
tatgcaaagccatgtggaagactttctgccatttttaacaaaccctaatacaggagatatgtatactccagatcatgactgagagattgttaataaaagcattgagtggtggtaaaaatacgaagatcattactttg

SEQ ID NO: 485 - DNA, 105 bp, Homo sapiens
ccaaaacttcccagtgtctgctcttttcgatccgggacggccggtcaggctcgccgccgagctgcttcggaaccaaaaagaagcttcccagagccggggccagga

SEQ ID NO: 486 - DNA, 100 bp, Homo sapiens
ctgagacatgagatcttcagcctccaggctctccagtttttcgtcgagagattcactatggaatcgctgatttccatagcagtggacacattgttgttaa

SEQ ID NO: 487 - DNA, 96 bp, Homo sapiens
gatgaaatgtataatcctgagtttttctatgaaaatgtgaagataccttcgattactttgagcagctgagtatgtcccagagaaggtgaagaaagc

SEQ ID NO: 488 - DNA, 90 bp, Homo sapiens
aaagatttggtttgaatgtctcttcaatctccagaaagtgtggcaaaggagcagagaactttgacaagttcttcacacgaggacagcccg

SEQ ID NO: 489 - DNA, 82 bp, Homo sapiens
caagccctggtgccaggtgtccatccccgtgctgagattgaagatggaaaatccccaagacattttctcaagtaatggtggc

SEQ ID NO: 490 - DNA, 110 bp, Homo sapiens
cccatggttgccggctcccctctcaggacaacccagatgtgcaacaaagtgcgatgcttatgttcctgaggaagaattgaaggcagcagaaatagatgaagagcacgtgg

SEQ ID NO: 491 - DNA, 90 bp, Homo sapiens
cgaagctggccgagcaggctgagcgatacgacgtgttctaagaacggaagcatctgggctggatggaatttagcatcaagcagagtcccc

SEQ ID NO: 492 - DNA, 75 bp, Homo sapiens
gagaaagaagtgataggagggctctgtagacaagtcattacgttttcatttctcacaactgggctgagcacaact

SEQ ID NO: 493 - DNA, 90 bp, Homo sapiens
gctatctgaagaaaagtagaaggaaaaacagaacgttgcaaactctggaaaaaaacttggtctccaaaaaaagttggtgatgacattgcc

SEQ ID NO: 494 - DNA, 75 bp, Homo sapiens
acaaattatgctgcagcatattgtactggcctgctgctggcccgcaggattatctgactccagaaaaagaacgcg

SEQ ID NO: 495 - DNA, 100 bp, Homo sapiens
gacggtgccccatagatggccagctttcccccgagggtcaacgagaaagagatcggtctcctctgagcctccggcctccataagacccaaaacagatgac

SEQ ID NO: 496 - DNA, 82 bp, Homo sapiens
agcctcagagcgggtgagcttggggacgcacggagaggtgcagctggttccaaagaactactggttcagattttagctcttc

SEQ ID NO: 497 - DNA, 100 bp, Homo sapiens
gcacggctacatcaagggcatcgtcaaggggcttcaagaagcgtgcacctcgggcactcaaagagattcggaaatttgccatgaaggagatgggaactcc

SEQ ID NO: 498 - DNA, 100 bp, Homo sapiens
gagttgccatctatgttaatggatacacagcacacccaggaggatttacagcaattgaggtcagacttggatgcagtttctatgaaatgtgacagctttc

SEQ ID NO: 499 - DNA, 100 bp, Homo sapiens
cgggaggccggagccaagccagcgacccaccatggagacccgctacaacctgaagagtccggtactatactggcaattgctggagaagattttgcaattg

SEQ ID NO: 500 - DNA, 82 bp, Homo sapiens
tcatgatattactgtaccgttagaagtttttgatactttaggaagaatcatcaaagtaactcaggaggtgattgactaccgg

SEQ ID NO: 501 - DNA, 95 bp, Homo sapiens
aatatgaaaaagaactacatattgctttagaaaaggtagtcaaaccacacactccattaataaggtttcctgacagaagagacaatcctaaaccc

SEQ ID NO: 502 - DNA, 98 bp, Homo sapiens
cgtggaaaaatacgagaaacagatcaagcactttggccttgctgtctctaactctgatctgatatcctgctttgagcaaataaaagagccctggaatg

SEQ ID NO: 503 - DNA, 100 bp, Homo sapiens
gagcgcttctttaagggctacgggaagatcctggaggtggatctgaagaacggcatctctggaagttgatggtagaagaatccgatttactgggtcagct

SEQ ID NO: 504 - DNA, 100 bp, Homo sapiens
tttatttttgcttcaggtggcttttaatcagattcaaaagggaatttagttttctagatattcttcgattatgggaggtgctatacttggtagatcagaa

SEQ ID NO: 505 - DNA, 100 bp, Homo sapiens
ctgtgaggcaccacgcccagtcagtgcactgctttttgcatggagaaagtcttgctgctactttaaaaagcttcagtatcagacacagcacagcagccat

SEQ ID NO: 506 - DNA, 100 bp, Homo sapiens
caacgcccggcacctggacttggcttccctcaagtctatccgagagtttgcagcaaagatcattgaaggtgaaatgacaatggatgctctgttggctcga

SEQ ID NO: 507 - DNA, 100 bp, Homo sapiens
cgtctggtttgatcacaagacgggcaagacaggtgctctagttcacagctataggggaacaggtggaatatttgaagtttgctggaatgcagcaggagac

SEQ ID NO: 508 - DNA, 51 bp, Homo sapiens
ctcacctatgtcatggaggaagagttttttgctccactcaagcctgttaga

SEQ ID NO: 509 - DNA, 114 bp, Homo sapiens
cccacagcagcagcacctgcttccagactcagagtgtgagaaaaaaataaactcctatttgtttatggcaaggttaatgcttttggaagaagaacatgccgatcctgaggcttt

SEQ ID NO: 510 - DNA, 74 bp, Homo sapiens
cagccgcggatctcaccgccgctcagggacgagcctgtggagtgggagacacctgacctttctcaagctgagat

SEQ ID NO: 511 - DNA, 98 bp, Homo sapiens
ggactggttccaacgcgaggagctcatcgggcagattagcgacatccgagtgcagaacctgcaagtttggagactgccagggaccatgttttgcccat

SEQ ID NO: 512 - DNA, 75 bp, Homo sapiens
actgccaccacggtcgcctgccacagctaccaccatctgtgacctggacacccagtttcgttgccaggagtctgg

SEQ ID NO: 513 - DNA, 74 bp, Homo sapiens
tgctcttttaccgatgctttaacatacagccactagattcatagtgaccacttagtagctagtgagaaacagca

SEQ ID NO: 514 - DNA, 100 bp, Homo sapiens
ctaaggacttcatgcccgccagcaaaggttttaaaatcaaagatgggaaaatcggagaaaattgcccttccccatggccagcttgttcatggtatacact

SEQ ID NO: 515 - DNA, 75 bp, Homo sapiens
catctgcaactccccaagcagcatccccgtcacaccgccaggccagggagccaccatgttggtgataccccccgg

SEQ ID NO: 516 - DNA, 126 bp, Homo sapiens
ccctgacgttctcttctacccactgagaccagagttagtggaatccacatatctcctctaccaggaagatgagaatgtgcctactgctcctgatcctccaagtcaacatttacgtgggcatgggac

SEQ ID NO: 517 - DNA, 101 bp, Homo sapiens
tgatttggtctttggtggccgcacaggaaatgaggatattatttccagattgcaggatgcggaagggagagctgtttgactatctcacagagaaggtggcc

SEQ ID NO: 518 - DNA, 75 bp, Homo sapiens
aagatgaagaaacccagcttgatatgttggtatattacagctaatactgacacagaagaacagagttttccagtc

SEQ ID NO: 519 - DNA, 100 bp, Homo sapiens
gggatcctctgctgcatagtttcggtcatctaaaggaggttttaaacagtataacagggaggtcctggccagtgaagccatccttaatgttcctgataag

SEQ ID NO: 520 - DNA, 100 bp, Homo sapiens
tgcgaaccgaacagaataacccgcccccagcgggatgtgaaggactccgggtgaggccggccacgccccgcacggtggggaagaaaacatgacagaaaca

SEQ ID NO: 521 - DNA, 100 bp, Homo sapiens
cgtacaggcagaagctttggccagcaccgtcactctcactgccattgccgagagtcctgttattgaggtcgtccctgatggcccctggaggcgaagctca

SEQ ID NO: 522 - DNA, 82 bp, Homo sapiens
ttgatacaaacacattagaatcaccatttagtgacttgaacaacctaccaagtgatgtgatgcaccagcaaggaatactgaa

SEQ ID NO: 523 - DNA, 100 bp, Homo sapiens
gtttacagctctaacaaaatagacgaacattaaccaggtggtatttgttggaaatttcttgagaattaatacgatcgccatgcggcttttggcatatgct

SEQ ID NO: 524 - DNA, 100 bp, Homo sapiens
gacagaggcaccccggacagagacgtgaagcactgaatccctgtatgatgagattcgtcagtttcgcaaggcctgtggggaggctcatcttaaaactata

SEQ ID NO: 525 - DNA, 82 bp, Homo sapiens
gcgagtttccgatttaaagctgagctgcgaggaaaatggcggcgggagactacgcgtttgttcacatggagaaggaagcaga

SEQ ID NO: 526 - DNA, 100 bp, Homo sapiens
tgccaatgttggagccgtctgcaaagtgtccccggcaagaaggaagaaggtagataatgactataatgcccttcgagaaagactcagcaccttgcctgat

SEQ ID NO: 527 - DNA, 82 bp, Homo sapiens
ccacgcaaccccagatccatttacactttacagtggattgtctcattgttagtgctgaatcttcttgcctacttgtatctgg

SEQ ID NO: 528 - DNA, 75 bp, Homo sapiens
actaggatgtcccgacatgaagattaacttcatctaccttgccaagagcacaaaaaaaaccatgctaactttaac

SEQ ID NO: 529 - DNA, 98 bp, Homo sapiens
ccggagcaagcggagctcccccaagagccggaaaggtggtttgaagtgtcctgtttgcagctttgtatatggcaccaaatgggagttcaataggcact

SEQ ID NO: 530 - DNA, 75 bp, Homo sapiens
atggcttttgtgctcattttggttctcagtttctacgagctggtgtcaggtgctgatattcgtggcttcagtgct

SEQ ID NO: 531 - DNA, 82 bp, Homo sapiens
gagtatgcggaggacagctctgatgaggaggttcgaccttgaaactacaagagtgaatctgaaagttagttcaaaaagtcaa

SEQ ID NO: 532 - DNA, 83 bp, Homo sapiens
ggaacagctacgcatagaagccgggattgagcgcatcaagccccgtgtgaccccagagggtgagtacatcccgctggaccacc

SEQ ID NO: 533 - DNA, 100 bp, Homo sapiens
ccagcagctccaaactgcaagtgtatattgttcttgaactgaagcgctgcggcatggcgcgcgcctgcctccaggccgtcaagtacctcatgttcgcctt

SEQ ID NO: 534 - DNA, 82 bp, Homo sapiens
ggagattggcaccaagaccacactgaggacctgaagacccttccagcatgccagaggaaagttcccccaggcggaccccgca

SEQ ID NO: 535 - DNA, 90 bp, Homo sapiens
ccctgcaaaggagtccctagagacacctagtaatggtaattaataatgcttgtgctactcaagccatagtgagtgtgttactgaactgta

SEQ ID NO: 536 - DNA, 100 bp, Homo sapiens
cgggagttacaccgccaccgccaggttctcccatgggcaggtggtctctctggatgagctgcgccccttccaggacccagacctgagctccctgcaggcc

SEQ ID NO: 537 - DNA, 83 bp, Homo sapiens
gataagggcgacagcaacagctctgccggctggaagggaggtggggaagacagggctccagctaccacaggacgggctctggg

SEQ ID NO: 538 - DNA, 75 bp, Homo sapiens
gggggatgtgagcgctgagcccttggcagggtcttgttctcttggccaggctggagtgctgtgggaaaatctggg

SEQ ID NO: 539 - DNA, 100 bp, Homo sapiens
cagtggttgtcccaatatccaagaagcagtagagggtgccatgcacattcaggttatggaggttttgatgactatggtggctataataattacggctatg

SEQ ID NO: 540 - DNA, 96 bp, Homo sapiens
gaatttcagattcatccctgtgctcttcccaaatgctaagaaggggagagaatgtagaagatgccttccttgaggctgccaagaaaatctatcaga

SEQ ID NO: 541 - DNA, 83 bp, Homo sapiens
ggcgacggcgccttcggcaaggtttacaagggggatatgagactttctactcggaatatcctgagtgttgcgtggatgtaaaa

SEQ ID NO: 542 - DNA, 100 bp, Homo sapiens
gttgctcactttcctgggtattgtagccgctgtgcttgtcaaggtccctgtccttcgaatggtggaaggtgataccatctatgattactgctggtattct

SEQ ID NO: 543 - DNA, 96 bp, Homo sapiens
cagctctcaggcattaacaccatcatgagtacaagcgcaagctagccagagtttccctggtgcgcaaagaactcaggtcccggatccagagcctgc

SEQ ID NO: 544 - DNA, 100 bp, Homo sapiens
gtggacgcccctgggagaggggaaggctcacgagcggccatgtcctggtacgaggagttccagcggctgtatgacacggtgccctgcgtggaggtgcaga

SEQ ID NO: 545 - DNA, 83 bp, Homo sapiens
cttctccagtcgacactctcgcgcccggagaaactaattctgaagcaagcccttatagttgtgctgcagtggtgtttcaatca

SEQ ID NO: 546 - DNA, 90 bp, Homo sapiens
gatcgtccaactgaacgtaggggggaccagtggatgtttccaaggattgtcttcagtcatggccttgggattaaagtgcttccgcatggt

SEQ ID NO: 547 - DNA, 83 bp, Homo sapiens
agaagatctgggtgcccgtggaccacaggccctcgttgcccagatatgtgaagttcatttccaatccgccctccatggtggca

SEQ ID NO: 548 - DNA, 101 bp, Homo sapiens
ccaagaaccattggtggagatagaagggtgctggaaatgtaaacaagaatagactgttcattcctgatggcttttagtctatactaacatattgtttgtca

SEQ ID NO: 549 - DNA, 100 bp, Homo sapiens
cgcgcctgcccagctttgcagcccccgaacgcggcctcgcacagcccttagagatttgtttgattccatggataaaacttcttccagtattccacctatt

SEQ ID NO: 550 - DNA, 74 bp, Homo sapiens
gcacccagtgtttctgtcagtctttcctgctcagccaggggggcttatttcaaaacctttgtccctcagttcca

SEQ ID NO: 551 - DNA, 80 bp, Homo sapiens
ccaagaagttgatgccctgtgcttcctgtacagctgcggaaccgctaatctagacgaaatccagatgagttcacctacat

SEQ ID NO: 552 - DNA, 96 bp, Homo sapiens
gtgacatcaaacctcctgttgggccatttccgagaactcccatcagtttctgtatagtgtaaaagcctgattacatcaaccccagagccgtgcagc

SEQ ID NO: 553 - DNA, 83 bp, Homo sapiens
ggatgagcatttggactttatccagtcacacctgcggaggttctgccttcagtatacacagtaaaggttcagcgagagctgga

SEQ ID NO: 554 - DNA, 51 bp, Homo sapiens
gaccttctgagcttctcactcaaggatgtgaaacaaagagtcctcttcgtg

SEQ ID NO: 555 - DNA, 73 bp, Homo sapiens
aggattccaagtaactcttatttgcaatgggtgacaagccggcagatgcgatttgaaggaggatttcagggcc

SEQ ID NO: 556 - DNA, 100 bp, Homo sapiens
cagaggctggggagtagctgctgaggccagctgcgggccgtccagcggctgtgccacttctacagcgccgtcatgcccagcgaggcccagtgtgtcatct

SEQ ID NO: 557 - DNA, 50 bp, Homo sapiens
tagcagtcacgacctccagcacagatatgtgcattactgaagtgtcaaac

SEQ ID NO: 558 - DNA, 90 bp, Homo sapiens
tccgccaacgcggtcatctcgcagaacgccatcaaccagcttgtctagtgaactagaaaatcacccaatgaatgaagaaggagaatcaga

SEQ ID NO: 559 - DNA, 100 bp, Homo sapiens
aagctagttactagagggcctacaaagctgccactgcagagccccgccatggaagacacgccgttggtgatatcgaagcagaagacggaggtggtgtgcg

SEQ ID NO: 560 - DNA, 90 bp, Homo sapiens
aaaaggctaagcaagcatctaaaaagactgcaatggctgctgctaaggattctagtataattgacttctatcctgaagattttgctattg

SEQ ID NO: 561 - DNA, 75 bp, Homo sapiens
actcacagggcttcaacaagctagctgagaagggagagaaggtacccaaagggaaaaagggaaaagctgatgctg

SEQ ID NO: 562 - DNA, 82 bp, Homo sapiens
ggagcagccgccgccgcagcgcgaacatggacgccgtcaacgccttcaaccaggagatataattggtgattacaactttcct

SEQ ID NO: 563 - DNA, 75 bp, Homo sapiens
cgaaccccgggacacgcaggaacggctccagcatcaagatccgtctgacaggggttctccaggacaaggacctct

SEQ ID NO: 564 - DNA, 50 bp, Homo sapiens
acaaaaccctggaactactgaaaacaactctgctcatggtgattacatgc

SEQ ID NO: 565 - DNA, 100 bp, Homo sapiens
gacaatggacttctggctttggccactttacttcctgccagaggtacttggaaggctccatcgcccctgaagacaaaggaagctgctcattgctgcctgg

SEQ ID NO: 566 - DNA, 75 bp, Homo sapiens
cagccctccatcttgcagcccagaagggacaagctgtggggggtctgtgtctccatcctggctctcttgcctcga

SEQ ID NO: 567 - DNA, 100 bp, Homo sapiens
gggaagtcggggtctccttcgccttctgtctttctgcgtcctactagcaggtgccttcgaaacatctgcaagtttttagtcttgctcatcccactcttcc

SEQ ID NO: 568 - DNA, 83 bp, Homo sapiens
gttatgtggttcgacgattccaaccaagggacctggctgcaggtgctggagaccatcggtgtgctggcggtcattgccaatgg

SEQ ID NO: 569 - DNA, 98 bp, Homo sapiens
cacctgcatggcatcagcagagcagcatctggctgccagctcaggcacaggctcttctgactttgagcagctggaacagatcctggaagctattcccc

SEQ ID NO: 570 - DNA, 88 bp, Homo sapiens
tttccactttgtaattccagcgagtcgacttcccatcctgagttggtaaaccagcaaatttggctcgataatatcgctggcctaagcg

SEQ ID NO: 571 - DNA, 74 bp, Homo sapiens
tggctggcggagcatgagcgccccaggtttctgctgatgtactccacggttctgtgcagctattacaattcagc

SEQ ID NO: 572 - DNA, 100 bp, Homo sapiens
tcgcgcgtcccctgcacagcacagaggggcagccggagagcctgggaaaggaggccccgtgtgggccgcggcccggccctcaccatggagtccatgttcg

SEQ ID NO: 573 - DNA, 101 bp, Homo sapiens
gcagaggatccagtgttcaccatcctggccccggaagctggattatcaccgaggcctcttggtggaccgtccctctgaaactaagacagaggagcagggaa

SEQ ID NO: 574 - DNA, 100 bp, Homo sapiens
ctttgtttttcctgggaactgcaggaggcgattatgcagccccttgatcataagaatctggatatggatgtgccatactttgcagatgtggtgaggtggg

SEQ ID NO: 575 - DNA, 98 bp, Homo sapiens
gcgaacacagtagtggaagatgtaaagcaatatttcgagcagtttggcaagcatgctcgaagacgaccttcagctcagtgacagtgaggacagtgaca

SEQ ID NO: 576 - DNA, 50 bp, Homo sapiens
tgagagacaaattgcttgttaaaggagcgatctctctttgagtcggcatg

SEQ ID NO: 577 - DNA, 50 bp, Homo sapiens
tttactactgtgacaacattaacggaaaccacccctactcctaatccccc

SEQ ID NO: 578 - DNA, 101 bp, Homo sapiens
gggaacaagccagagaagacctcaaagggctggaggagacagtgatatgccacacttctgcctgctgttggcaaccctcctggactaggctgctcttgtta

SEQ ID NO: 579 - DNA, 82 bp, Homo sapiens
tgcgacggcccaggagcgcgtctcggcgggagcctcaggtcttgccccagaagctgcgggcacatccacgcctgaaatgcgg

SEQ ID NO: 580 - DNA, 100 bp, Homo sapiens
cggaaaacacacgttcctccgaaaccggtttgcaagtccttgtagagacagatgtgctggtgctgagctgtgatctgataacagacgttgccttacatga

SEQ ID NO: 581 - DNA, 75 bp, Homo sapiens
aacacctcgccaaagcagagaaatatctcaaaccatgaattatgtgggacagctggctgggcaggtgattgtcac

SEQ ID NO: 582 - DNA, 100 bp, Homo sapiens
ggcggcggcggcggctgcggcccaatatagctctttcaccatgcctggatcacttcctttgaatgcagaagcttgctggccaaaagatgtgggaattgtt

SEQ ID NO: 583 - DNA, 83 bp, Homo sapiens
atatcaacactaccaaaaataatccagtgatgtcattgcaagatcaggatttacaaaaggtgcaggtatgagcaggtctgaag

SEQ ID NO: 584 - DNA, 100 bp, Homo sapiens
aggacatttccatcatcccgcctctgtttacagtcagcgtggaccatcgggctgatctttgctggaaaacagctggaagatgggcgcaccctgtctgact

SEQ ID NO: 585 - DNA, 98 bp, Homo sapiens
cttctccgcctggctgcactgcgtgtgtgtggtgggcttcgacctggagctgggccaggccgtggaggccgttgatgctcactgccatcagctgcatc

SEQ ID NO: 586 - DNA, 90 bp, Homo sapiens
cactttgtggcaccgtgagattctccagacaggcaaatgtacactggggaccaccatgttcacgtgacatcaagaggaagcggaaaccag

SEQ ID NO: 587 - DNA, 75 bp, Homo sapiens
tgctgaaacagctgcacactgacctgcagaagtggtctggaactgaaagtgatgcgtatttctgagttatgcctg

SEQ ID NO: 588 - DNA, 75 bp, Homo sapiens
agcatagagaatgagatagccgtcctgagaaagtgacttaagagattaaaattaatttggttgctgttggttctg

SEQ ID NO: 589 - DNA, 75 bp, Homo sapiens
atgttgggagtgttcgctttcgagtccaatggatgggaccccaatgaaatgttcaagttcaatgaggagaactac

SEQ ID NO: 590 - DNA, 82 bp, Homo sapiens
aaatgcagcatgccatcctgaacgtctctccctgtcctagctctgtaactgtttacacttaccctgaaagaagcagatccca

SEQ ID NO: 591 - DNA, 98 bp, Homo sapiens
cacaatgaagctgttagtcattacaagttgctgcttcagcaaaacaagaaatttcaaaacttgatcaaggctgcacatggtccgtctaatgctgttgg

SEQ ID NO: 592 - DNA, 75 bp, Homo sapiens
cgccgctgtccccaccactgcagccatgatctccttaacggacacgcagaaggagaaggcagagcccccccaggc

SEQ ID NO: 593 - DNA, 90 bp, Homo sapiens
gtgtttgtgcttccttctacagccaatatgaaaaggcctaacctcctgccccccgaggtctgcagtctcctgaacccagcagccatctac

SEQ ID NO: 594 - DNA, 82 bp, Homo sapiens
aggagatgcacacggcactcgagtgtgaggtttggtgcacctcgatttggaggaagtagggcagggcccttatctggaaaga

SEQ ID NO: 595 - DNA, 74 bp, Homo sapiens
ctggctcggagactcctgcctgctgagatttgggatgatgaaattgttgcagacttttacgtagctgttccaga

SEQ ID NO: 596 - DNA, 97 bp, Homo sapiens
ggacttggccgagcggatcctaataaggggaaaatgaggcggggtttcaccatgttgcccagactggtcttgaactcctgagcttaagcaatccacc

SEQ ID NO: 597 - DNA, 83 bp, Homo sapiens
cacctcacaggctgttgtgaggactaagggtgcggcagtgcctggtacatgtgagtgtgtccgcttgaaaccaactgacatac

SEQ ID NO: 598 - DNA, 100 bp, Homo sapiens
catagaaactcacatgagacaaatgcgctcagcttcaattgaacactggaactattttggggctgatgagaatcttggtccagtggctgtgagcattcga

SEQ ID NO: 599 - DNA, 100 bp, Homo sapiens
cctattcgcggctcttcccgcccgccttccgccgtctcttcgagttcttcgtgctgctcaaggtggtctttgggaagaagcttcctgcctttgccaccat

SEQ ID NO: 600 - DNA, 80 bp, Homo sapiens
actacaccagccagcccgaccaggccaagaagcttgagagaagaaaaatttcagaaaaattgtctcaatttgactagaat

SEQ ID NO: 601 - DNA, 80 bp, Homo sapiens
gccagcacagctcaggccagttcgtcggctgccagcaacaatcaccaggttcaaatggttgtcctgatcctgatttagta

SEQ ID NO: 602 - DNA, 100 bp, Homo sapiens
ctgctgggtccgctgagcggggcgacccgaggtccttttggaataaatcatgggattgagcttcattcagatgtggtggaatatgccaaggaaaaactgg

SEQ ID NO: 603 - DNA, 96 bp, Homo sapiens
gaggtacaggctcagtctgcggccaagactccgtcctgcaagtgagtctaattttcacaattacaccttggtctcattgaatgaagaatttaatcg

SEQ ID NO: 604 - DNA, 83 bp, Homo sapiens
caaacatttaatgccaacccaaattatacctggttctgttcttctcaccactaaatccaatacgagttcatattgatattgga

SEQ ID NO: 605 - DNA, 100 bp, Homo sapiens
ctcaagccgctcttccccacctgcccggtgcccgaggaggcagccaagctcgtagcctgccactccgtgcaggttggaaagaaccatgactgtattcagg

SEQ ID NO: 606 - DNA, 100 bp, Homo sapiens
ggggctggtgctggtgggcctgggcgtggccaccgtcaaggccaacatcacgcccttcggcgccgaccaggtgaggctattgggaaaatgcagcaacagg

SEQ ID NO: 607 - DNA, 100 bp, Homo sapiens
ttaagagttgcaggtagcggtagcgatggacactctggatcgagtagtggcattgacactgagaggcccattctgcaagtggacagctgtgtctttgctg

SEQ ID NO: 608 - DNA, 96 bp, Homo sapiens
caagaacaatgcctccactgactatgacctatctgacaagagcatcaaccctctgactcactccgaagccagcggcatggtgacccagctctgacc

SEQ ID NO: 609 - DNA, 100 bp, Homo sapiens
ccgccgcccatcgagtcgaagcaccgcagcctggtgcagatcatctacgacgagaaccgggtgattcgcaaggggtggctcaccatcagcaacattggca

SEQ ID NO: 610 - DNA, 100 bp, Homo sapiens
gcttctctcgtcaaaaatggtgcagaatttacgccaccttttgtggtgacattggatgaggtagagctgatccactttgagcgggtccagtttcacctga

SEQ ID NO: 611 - DNA, 87 bp, Homo sapiens
gggacctcctggaagccaaaaatggtgcggattgatgagtacgattactccaagcccatccaggggcaacagaagaagccctttgag

SEQ ID NO: 612 - DNA, 98 bp, Homo sapiens
ctttcttcccaatgatgcttcctacttcctttccgtgcataagaagccgaatgggggatatgagactttctactcggaatatcctgagtgttgcgtgg

SEQ ID NO: 613 - DNA, 74 bp, Homo sapiens
gccgagtccccgtacggccacccggcgggcgacattgactacagcaccgtgctcctcggcatgctggtgacgca

SEQ ID NO: 614 - DNA, 51 bp, Homo sapiens
ggtactggaaacccacaggcacacccaaccctcccaggcccaatacttcaa

SEQ ID NO: 615 - DNA, 90 bp, Homo sapiens
accatggacaagctggtgcagaacattgcgcggcaggccacatccacgtcctccgagcctacatcaagacccaagtgaacaaagagctgg

SEQ ID NO: 616 - DNA, 50 bp, Homo sapiens
ccgggagttcaagaagaacactccagagacaatgcagatcttcgtgaaga

SEQ ID NO: 617 - DNA, 96 bp, Homo sapiens
ctgcctccacgtctggaataatgggtactctttcctcgtggaatttgaagattctacagataaatcaggggcctttacaacaactaaacggacagg

SEQ ID NO: 618 - DNA, 73 bp, Homo sapiens
gcctcccaagtagctggattacagcggcctgccatttccccagagaacttcctctccgcatcctggacgccct

SEQ ID NO: 619 - DNA, 80 bp, Homo sapiens
gacgacctcggcgaggtgcccaccatcgagtccctgatagccatctcaatcagtgaccacactgcccttgctcaattctg

SEQ ID NO: 620 - DNA, 100 bp, Homo sapiens
attgaatgtaacaagaggcataaaacagttctcactgaactacaggttacttcctcagaatgttggcctcctgtatgttggaggttatgaaagacccttt

SEQ ID NO: 621 - DNA, 101 bp, Homo sapiens
agaaacacttggagagcactgagtttagtaataggtgactgccggaaaaaagggaactttgaatattgtcaagtttttgcctgtatacatgcacattcgag

SEQ ID NO: 622 - DNA, 90 bp, Homo sapiens
cctatggacagacgcacagacacctgcaggatgtacagttacccagcacgtgtacctcctcctcctcctattgctcgggctgtagtgccc

SEQ ID NO: 623 - DNA, 82 bp, Homo sapiens
tcaacctgcgtgaggtcaacctgcgcccccagatgtcccagtcactcaagactgcttgcaactgattgcagacagtgaaaca

SEQ ID NO: 624 - DNA, 75 bp, Homo sapiens
gcttactcacctggatgacctccagctgattgggtctcgccaactcctgggctcaagtgattctcctgcttccac

SEQ ID NO: 625 - DNA, 76 bp, Homo sapiens
agtaaagagtaccatattgatgaagaagtgggctttgctctgccaaatccacagattgagaggatccagaatccag

SEQ ID NO: 626 - DNA, 73 bp, Homo sapiens
ttggggaaacagctaattgagagggctacaggggaagaattgaaagtgaaggcatacctaccaacaggcaaac

SEQ ID NO: 627 - DNA, 50 bp, Homo sapiens
atgggtcctgctctttttgcaatgctggccctggctctacttgatagaat

SEQ ID NO: 628 - DNA, 83 bp, Homo sapiens
gtttaaggagctgaaagcgcgagagaagaagaaggaggttcctgctgtgccagaaacccttaagaaaaagcgaaggaatttcg

SEQ ID NO: 629 - DNA, 150 bp, Homo sapiens
atgcagaagctactcaaatgcagtcggcttgtcctggctcttgccctcatcctggttctggaatcctcagttcaagttttatcttcaagacactaaaagtagtaatggtacttttataaatagccagagattgagtcgaggctctgaaga

SEQ ID NO: 630 - DNA, 100 bp, Homo sapiens
cagagcgactttcattagaaggagagcgacagcccaagtcaccaggaggagatgttaaagtaacccatcttgcaggacgacattgaagattggtcttctg

SEQ ID NO: 631 - DNA, 90 bp, Homo sapiens
tctccccgctgcccgcagctgccaggcggcggcgcccaggtcgaaatgagaaggggcagctgggacatggtgacaccaagagagtagaag

SEQ ID NO: 632 - DNA, 82 bp, Homo sapiens
cccagccgctcgcaggcgccgcacggagttgcgtcccggggacttggggccgcagggagatgaggacggggacttggttgcc

SEQ ID NO: 633 - DNA, 83 bp, Homo sapiens
gggatgtgaccaagcgccttctcattcagaagaactgcctcctcttgctcagtttactttatcatcatcaagaaataagaagc

SEQ ID NO: 634 - DNA, 87 bp, Homo sapiens
ggcttggtgactccagtggcccaggtgacaatccttacccttccaaggaggacacccctaccagcagtctggactcactttcctccc

SEQ ID NO: 635 - DNA, 96 bp, Homo sapiens
aaaagtctggcctcggcgccaagatcccagtcacaattatcaccgggtatttagtatgaaaacccatggacaatcccgaatatgttgtcaatgacg

SEQ ID NO: 636 - DNA, 81 bp, Homo sapiens
gtagacgccccttcgccgggacctggcacccgaatccggcctgccgggtgtttgatatcagctgctaccaggaatccctgg

SEQ ID NO: 637 - DNA, 51 bp, Homo sapiens
cattcagagtgtaaaaggaaagggcacctttcacagccagcaggcattgga

SEQ ID NO: 638 - DNA, 75 bp, Homo sapiens
gagggggaagggcctcaaagccagaagggtaaaccagacttgaatacaacattgccaattagacaaacagcatca

SEQ ID NO: 639 - DNA, 87 bp, Homo sapiens
ggatctaacccaggagcagacagagaagctgctgcagtttcaggagaaagaattgtgccatgaaaaatggaaaactcctgagaagct

SEQ ID NO: 640 - DNA, 75 bp, Homo sapiens
ttttggcatcaaggacaaacccaccttcatcaaagggcataagcttaaatcgtctcagaaggacaaggtccgcca

SEQ ID NO: 641 - DNA, 83 bp, Homo sapiens
gtcagcactgactttcagctatggaatcggtcccccccgcctccagccagcctgtgcagacttgctgcctgctgtgtcaccgg

SEQ ID NO: 642 - DNA, 82 bp, Homo sapiens
gtctcgtgctctggctccccgcgtgcgtcgcggcccacgcgatgccctcctagctagccgtcacgggatggagggcttcatg

SEQ ID NO: 643 - DNA, 97 bp, Homo sapiens
accttcacctccatcactaccaataccatcaataccagctctgacaaaacagtgagaaagatcagtctaaagaaaaggagaagaaagtgaaaaaaac

SEQ ID NO: 644 - DNA, 75 bp, Homo sapiens
agccttcaatgtgtcctacaccaggcagcccccaaatcccggcccagacatcttcatttgattgtacaccatctc

SEQ ID NO: 645 - DNA, 49 bp, Homo sapiens
ccgggaccggagaggaagcggaggtgctacctttttacccacacttaag

SEQ ID NO: 646 - DNA, 100 bp, Homo sapiens
tattgccaatgatgccctacagcactgcaaaatgaagggcacggcctccggcagctcccggagcaagagcaaggacctcgtcatgtacagcaagtgccag

SEQ ID NO: 647 - DNA, 83 bp, Homo sapiens
ctgcggccgcgggcgatgccaaaaacggttcctgcacttggccatcatccatgaagaaaaggcactgaccatggaagtgatcc

SEQ ID NO: 648 - DNA, 75 bp, Homo sapiens
gaaagttcttgtcaataccaagccccaggaccaaattaccatcacagggtacgaaaagaacacagaagctgccag

SEQ ID NO: 649 - DNA, 100 bp, Homo sapiens
cggctccatggcgaccgggctcggggagccggtctatggactttccgaagacgagtaattcgccaaaatgacgaacacaaagggaaagaggagaggcacc

SEQ ID NO: 650 - DNA, 74 bp, Homo sapiens
ctcgccctccgacgctgctcaggctttttatggaaattctcaatgactgttctgatgtagatgagatcaaattc

SEQ ID NO: 651 - DNA, 98 bp, Homo sapiens
gtgatgcaccagctctgctcccaggcaaaatacatatctcagtgcattgatgagatcaagcaggagctgaagcaggacaacatagcggtgaaggcgaa

SEQ ID NO: 652 - DNA, 76 bp, Homo sapiens
atgcatgctgcttttgatgtctgacaacgtggatcgttgttttgaaacgatgtggggaaaagagaatttgtcgaag

SEQ ID NO: 653 - DNA, 83 bp, Homo sapiens
gtgaagatggcggcagccgaggccgcgaactgcatcatggaggtcaaaatgcagatcttcgtgaaaacccttaccggcaagac

SEQ ID NO: 654 - DNA, 82 bp, Homo sapiens
gggacagccccaggatgccgtgggccgcagccactcaggactgtcaaaggaaggtgctcgggtcttcggggcactgggtccc

SEQ ID NO: 655 - DNA, 50 bp, Homo sapiens
taagtacaatggtgggcttaattttagggacattagtcatgagtgccgag

SEQ ID NO: 656 - DNA, 98 bp, Homo sapiens
gctacccggtccagacctcccagcccaagctagagcttgtggggtgcagcccggaatcccgaggatgtggaccgggagcggcgagaacacgaacgcga

SEQ ID NO: 657 - DNA, 116 bp, Homo sapiens
atccacttctcacacttcagatttcaacccgaattctggttcagaccaaagagtagttaatggagcaatcagttaagctgcataacctcgtggaggaccacaacaaagtccaggtt

SEQ ID NO: 658 - DNA, 83 bp, Homo sapiens
ggctgcaggagcagctagcacagcagttggaattgatcacaccttttcagttgtacttcaatcctgaattaatctttaaacac

SEQ ID NO: 659 - DNA, 50 bp, Homo sapiens
caaaagacagctccagttttacagcccgagaccgaggacgagaagaagcg

SEQ ID NO: 660 - DNA, 82 bp, Homo sapiens
cgtggacaagagcgcggggcaagtggctcggaacacagggaaagcaggcaggatgggagagtcgccgatagaaccacctctt

SEQ ID NO: 661 - DNA, 50 bp, Homo sapiens
ccccagtcagtggagacttaaccaaagagatcatggaagggaagtggttg

SEQ ID NO: 662 - DNA, 75 bp, Homo sapiens
ttgaatgactggaaactgattggaaactctttgggaaagccactcgaaaaggaaataatgcaaaaggtgtcccaa

SEQ ID NO: 663 - DNA, 144 bp, Homo sapiens
caattgttgaagcattggtaactccagtctctaacgttttagaaaatcataacaagcggttctctaccctgtaaagtattttcatctcagcctagtgacgatgaatcaagtagtgatgaaaccagtaatcagcccagtcctgcc

SEQ ID NO: 664 - DNA, 100 bp, Homo sapiens
tcgggcaatttggatcgagtgcctgccaagtatgcctagccccgctgggagccaggagctcaggtgattcgcaaggggtggctcaccatcagcaacattg

SEQ ID NO: 665 - DNA, 74 bp, Homo sapiens
ttacaagaataaaggcaggaatcaatccattcaatggtgactctgacatcattagaagcatgccagaacagact

SEQ ID NO: 666 - DNA, 100 bp, Homo sapiens
tataacatctctaagcaagttcttgatcagtatctcactctgctggcagatgatccaagtggagctgggaaagcagctggctaagaaaatagagcctgag

SEQ ID NO: 667 - DNA, 90 bp, Homo sapiens
ccccattgctgagccagcggagctgcttggacttttcttggtagagatggaaatccaaataaacggaatgtgcacaatgaaacatctatg

SEQ ID NO: 668 - DNA, 100 bp, Homo sapiens
cagagataacggccagccctgggcgaagtacatcatctggctgccagtccataatctacataccccaggatgttgtcagagccaaggagatcatcgccca

SEQ ID NO: 669 - DNA, 129 bp, Homo sapiens
gatcccggaggcggcggcggcggggggagccggagccgcctgggatgttcaacaatgcagatcttcgtgaagactctgactggtaagaccatcaccctcgaggttgagcccagtgacaccatcgagaat

SEQ ID NO: 670 - DNA, 75 bp, Homo sapiens
acaccatggagaacaagcccatcgtcacctgagacttcctgtgatcagagtgaaggttctggttcttcagaagag

SEQ ID NO: 671 - DNA, 98 bp, Homo sapiens
ctctacagcattcctttccttgaagtcttcgtttttaccttagtctcggggttatatcctgtgttgtgacctcatggtttaagtgggaataaagatga

SEQ ID NO: 672 - DNA, 100 bp, Homo sapiens
gttagcgtgagtgatcactctcaatcccgggcatgaacaaccgggaggtgctggagcaggtggagcgaggctacaggatgccctgcccgcaggactgccc

SEQ ID NO: 673 - DNA, 90 bp, Homo sapiens
cggacgtgtccgcgaagatggcgggccggactgattcttgctattccaaatcctcttccacgttgacagcccttcagatatttcaacact

SEQ ID NO: 674 - DNA, 76 bp, Homo sapiens
cgagaagcctgaaaagtcgcagcgagctggagccgccggagatgttgctaaatttgcataagaagagttggatgga

SEQ ID NO: 675 - DNA, 75 bp, Homo sapiens
cctcttcttcggcgccctccaggcctgttggaggttgccacatttctccaaagtgagggcccacagagggccctc

SEQ ID NO: 676 - DNA, 78 bp, Homo sapiens
aaacatggggctgaaccccagctcgggatacccacccaccatcccagggtctacaacatccacagccggaccgtcacc

SEQ ID NO: 677 - DNA, 80 bp, Homo sapiens
caacgagctgcttacgcagctggagcagaaggtggagctggactccaggtatctgagtgagcggaaagaatgtcggagcg

SEQ ID NO: 678 - DNA, 78 bp, Homo sapiens
aaaatcaaaactgtagagctaagaggaaagaaaattagattacagatctgacgaacaggaggcattgaactcaatcat

SEQ ID NO: 679 - DNA, 82 bp, Homo sapiens
caacagtgacggaatgcctccatacatgcaccagaatttcctgagtttgccactaaagtccaggaagctatcaattccctcg

SEQ ID NO: 680 - DNA, 83 bp, Homo sapiens
cttttacctgagaaatgctacgaccaacttttcgttcagtgggacttgcttcacggctttatcctgtggataaacgcagagtg

SEQ ID NO: 681 - DNA, 90 bp, Homo sapiens
aaaaggcaaagtgtgttttgagatgaagggaagtttggttggcttagtggattatccagatgatgaagaggaagatgaagaagaagaatc

SEQ ID NO: 682 - DNA, 101 bp, Homo sapiens
caagagaaggagccctggatggtgaagcgagagctgacaggaagcctgttctcaggtcagaagagatcaattctacagaaatttccagtggttctgttgag

SEQ ID NO: 683 - DNA, 100 bp, Homo sapiens
taacagagcggggatgtgccctgactttcagttttgattaccagccgaatcctgaagagacacgtacgccgtcatgaaatacacaaatcgaagaatagag

SEQ ID NO: 684 - DNA, 100 bp, Homo sapiens
gtgagctatgattgcaccagtgcactccagcttggatgacagaggaactgggaattgaagctggagtgactgcagctacttatacacctggtgcattgca

SEQ ID NO: 685 - DNA, 100 bp, Homo sapiens
gaatttgtgacagctgcagttgctccccgcccccgagcagccgaggttttggaaggtgacaatgaaatgtgaagaagttacatttctcaaacttgaaagt

SEQ ID NO: 686 - DNA, 89 bp, Homo sapiens
aggagctggagacggtcgtagctgcggtcgcgccgagaaagctacgtgctgaccctcatcaccgacggcatgcgcagtgtccgagcgtt

SEQ ID NO: 687 - DNA, 100 bp, Homo sapiens
cccccacttcattgcagttgtgactgagtgtgctggtggaggggccttcctcgtcatccccctgcaccagcacaaacatttcactgaagatattcaaaca

SEQ ID NO: 688 - DNA, 75 bp, Homo sapiens
cagaattgtcctattgatgtcagacgtcctctctacaaggtcatactccctgtcacaaactccagctgaactaac

SEQ ID NO: 689 - DNA, 75 bp, Homo sapiens
aattaaaagaggcacgaagctgctttcagagattgttcgtgagttcaagtcgactaaccgcttgctcctaactgg

SEQ ID NO: 690 - DNA, 73 bp, Homo sapiens
ctggtgtcacctcccagggtgactcaactccaggttctctacttaaaagacaatgactactgatgaaggtgcc

SEQ ID NO: 691 - DNA, 100 bp, Homo sapiens
gcctccggaagtgctgggattacaggacgagtcatccaaccagcgagctgaggtagtcgtccaggtgccgtacctggaggcgggcgaggcggtggtctac

SEQ ID NO: 692 - DNA, 90 bp, Homo sapiens
ccccagcagaggccttatggatatgaccagaattaaacaaccaccatgtcgagcaaaaaggcaaagaccaagaccaccaagaagcgccct

SEQ ID NO: 693 - DNA, 73 bp, Homo sapiens
aatattttgtgccacacacaaaaagagagcacgttttcaatatcataggagcatttgatattccacgctttgt

SEQ ID NO: 694 - DNA, 100 bp, Homo sapiens
gtgctggaacgaacatcccggtgctaggggtgcaggaggaggacggcagcaaccgcagcagcagccttcaggcattgaatgccccagaggagcccgaaac

SEQ ID NO: 695 - DNA, 100 bp, Homo sapiens
ctgggaacctactgtggggccgcggccggaccgagcgcctcgacctcggtctgaggtaccagttcaacccagccttctttcagaccacggtcaccgccca

SEQ ID NO: 696 - DNA, 100 bp, Homo sapiens
tcgcccgccaccctgcgctgccgccgctctgaggagttaaagcactattcctgatcagagaactccagttgcttcaacacacagtatcagtagtgcagcc

SEQ ID NO: 697 - DNA, 74 bp, Homo sapiens
gatggccccaggtgtaagcgcagaaagcaggcgaacccgcggcgcaataacgggcagagcggcttgggtaaatc

SEQ ID NO: 698 - DNA, 110 bp, Homo sapiens
gtgattttgatagaagactttcgagagtgtatacaaatgacagtctcggagaaatctatgtgaagaggctttgttaaaaattaaaggtgttattagctttacttttcaaa

SEQ ID NO: 699 - DNA, 100 bp, Homo sapiens
ctttggccgccgcgccaccatctttcgggctgccgagggtgttcttgacgattaatcaacaggtgaaaatggcattacggacatcaggacatctcttact

SEQ ID NO: 700 - DNA, 146 bp, Homo sapiens
ctcttggtttgaatctggtcgcttccggagggactgcaaaagctctcagggatgctggtctggcagtcagtgggtaattccagaattgattggccataccattgtcactgtattactgctcatgtcattgcactggttcatcttcc

SEQ ID NO: 701 - DNA, 83 bp, Homo sapiens
acagggcagacgttagcgtgagtgatcactctcaatcccgggttcctaaagagaaagatgaaatggtagagcaagagtttaac

SEQ ID NO: 702 - DNA, 75 bp, Homo sapiens
tggcatcagggaggctttcagccggagaagcgagtttcagctgttatgccccgtggtgccctgcttgtcaaaatc

SEQ ID NO: 703 - DNA, 75 bp, Homo sapiens
agtgacaaagacctttgtgaaacgcaatgttgagccgtggtccttcagcatatctctgtgctgcagacaacacac

SEQ ID NO: 704 - DNA, 74 bp, Homo sapiens
agaataaaagagaatgtaacatcatgcttccgatggagtgaaggtacctgagcgcaggaaccatggtcttcatt

SEQ ID NO: 705 - DNA, 98 bp, Homo sapiens
tcgtgaacagaccacagtggaccacttctggggactccagaagacctttccagattcgtggttgagctgcagcagagggagcttgccttgaaggacaa

SEQ ID NO: 706 - DNA, 98 bp, Homo sapiens
caaggatcgaagtctgaagcctgtgaagatcgctgagagcgacactgacgcctcatggcggtccgagcttcgttcgagaacaactgtgagatcggctg

SEQ ID NO: 707 - DNA, 89 bp, Homo sapiens
gtaaagtggttggttgcagttgtgtagtagttaaggcgttcccacagctgtgcagaacttagcgccacgcgctgctgttgctgctgctg

SEQ ID NO: 708 - DNA, 74 bp, Homo sapiens
cagggcttctcctatgactacgtctttgactggaacatgctgaaattccttggttctacagccattgggatcca

SEQ ID NO: 709 - DNA, 100 bp, Homo sapiens
gtgatggaccaggaacttgcagacctcccgaaaacctacctgaggcgtcctgaagcatccagcccagccagcaagagtgagccatggagctacgtgtggg

SEQ ID NO: 710 - DNA, 101 bp, Homo sapiens
tgcagctagtaatttgccttctggattatcagtgctgagtccccgactggcttgccatcacacaaaggcgagttggtggtttcattgaaatacatcccagc

SEQ ID NO: 711 - DNA, 100 bp, Homo sapiens
ccggagcgtcccagctgcgaggaggaacactgccacggaaatgcaagaaggagctcctggccgtgaagctaaggaaccggccaagcaaacaggaactaga

SEQ ID NO: 712 - DNA, 98 bp, Homo sapiens
tcctacttcctctgtatagagcaactgttgaactcagctgcctgtaggaaccctaaggactctgcaatatgaataattccctagagaacaccatctcc

SEQ ID NO: 713 - DNA, 76 bp, Homo sapiens
atactcacagagttagagagagggatggtggatattaatgcacacgcctgtgttactggtaaacccatcagccaag

SEQ ID NO: 714 - DNA, 73 bp, Homo sapiens
cccaacttctgcgggatcttcaaccacctcgagcggctgctggacgaagaaataggaaggttgttgattactc

SEQ ID NO: 715 - DNA, 83 bp, Homo sapiens
tcagacgcagccgtagacaccagctccgaaatcaccaccaaggtaagtaaggaggtctctgtaccatggctcgtacaaagcag

SEQ ID NO: 716 - DNA, 100 bp, Homo sapiens
tgatttgctcttacgtatttgtgtgacttgactcttcaaacacaaaggtcctcagctgagtcgttctgctatattgcatcagatgtcagctggttctgca

SEQ ID NO: 717 - DNA, 100 bp, Homo sapiens
gcttgctgctttttctaactatttcaagatgatatttattcaccaaacaaggtgccagcgagatttcagattcctgtaaacctctaaagaaaaggagtcg

SEQ ID NO: 718 - DNA, 83 bp, Homo sapiens
ctgtatgccagcagcttgttgtacaataacgaaggaggcccaacttcattcaataaggagcctgacggatttatcccagacgg

SEQ ID NO: 719 - DNA, 75 bp, Homo sapiens
ggccgagttgctgttgccgggtgatagttggagcggagactgtccagggagtcggtagtaagggatggcgggacg

SEQ ID NO: 720 - DNA, 51 bp, Homo sapiens
aggatcttgagactcaaccccatatggcatgtaaagttgaagatctgggca

SEQ ID NO: 721 - DNA, 100 bp, Homo sapiens
aaggcctctctcctgatacagcaggcgctcaccatgttccctggaggaaactgctgcctctgttgaggtcggtgctgcgcttccgcctcgggggcctagc

SEQ ID NO: 722 - DNA, 100 bp, Homo sapiens
ggagaagctgagcctttctggacagaccaacctgtcagtgctgcaaggctacaccaagtccattgatatttggtctgtaggctgcattctggcagaaatg

SEQ ID NO: 723 - DNA, 100 bp, Homo sapiens
aaactttcactcaagaagatattgacgtgtggaatccatagcatgttccctttacatttagctgccctaaatgctcactctgactgctgcagaaagttgt

SEQ ID NO: 724 - DNA, 96 bp, Homo sapiens
agatgcagatgagaaggttcagttggcaaaccagatatatgacttgattacctctctagtgacccttcagctgttaaccctggttggccatgacga

SEQ ID NO: 725 - DNA, 92 bp, Homo sapiens
gaggaaacggagcgctgccctgcagcccgagcccatcaaggtgtacggacagtccaatggcacgcatatcatgtataaaaacacactctgga

SEQ ID NO: 726 - DNA, 98 bp, Homo sapiens
agctctccaggcttgcaagcgattaccaggtaaaacttccttttcctgtagatcaaatcacagatcttccaaggaacgatttccagatgatgattaaa

SEQ ID NO: 727 - DNA, 75 bp, Homo sapiens
gccacgacccacgagatcatggggcccaagaaaaagcacctggactgtaagaatgattgatgttggctgatattg

SEQ ID NO: 728 - DNA, 75 bp, Homo sapiens
tttgtcatgtgctcggcctttgctgcaggtcatttgattgcccgcctcagaacgatggatctgcatctcttcgac

SEQ ID NO: 729 - DNA, 75 bp, Homo sapiens
cttcgaggaggtcatgaaggacctgagcctgacgcgggccgcgcgggtgccctacgagacgctgaacaaacgctt

SEQ ID NO: 730 - DNA, 82 bp, Homo sapiens
aggcaacattggatattattgaggatttttacctcctataactccaccagaaaagttttttctttcccagctgatgctggca

SEQ ID NO: 731 - DNA, 75 bp, Homo sapiens
cccgggccccgagcgcccgaacaggtgctggagaatctggtaaaagcaccattgtgaagcagatgaggatcctgc

SEQ ID NO: 732 - DNA, 85 bp, Homo sapiens
attgacattgaaggatttcagctaccagttacttttacgtgtgatgaccatagtaacctgggaggaggagcacctggtgtgtgtg

SEQ ID NO: 733 - DNA, 83 bp, Homo sapiens
ggctccgtcgtggaagcaggactgcgccgcgtcttcctcaaggtcttcgccttgatcgtgttctcctgcatctatggtgaggg

SEQ ID NO: 734 - DNA, 100 bp, Homo sapiens
ggccatggcggacaacgagaaactggacaaccaacggctcaagaatttcaagaacaaaggccgcgacttggagagagcatcagtgatgtcacgtttggag

SEQ ID NO: 735 - DNA, 98 bp, Homo sapiens
cgtggaccacatagacatttacgcggatgtcggcgaagagttcaaccagtttcgagaggcccgtgccatgagaccgcctggggtgagcaaggcgacct

SEQ ID NO: 736 - DNA, 75 bp, Homo sapiens
cgcaggctcatgtacttcaaagaccccctgggcggcgactggcggcgcgatggacctgaccgggctcctgctgga

SEQ ID NO: 737 - DNA, 101 bp, Homo sapiens
gtggaaattcgccggctccttctactttgcgatcacggtcatcaccaccataggcatgtgaaactattgaaccttcctgctagcctccggccacacaaaat

SEQ ID NO: 738 - DNA, 100 bp, Homo sapiens
cgcgcctggctcaggtgtgggaccccatccttcctgtcttcgcagaggagtcctcgcgtgagctgcggtgcaaccctgggcagtttgcgtgtcgcagcgg

SEQ ID NO: 739 - DNA, 83 bp, Homo sapiens
cgcgcatcgtccgcagacgccgccaccgccatgggctcctgagacaatgcagatcttcgtgaagactctgactggtaagacca

SEQ ID NO: 740 - DNA, 101 bp, Homo sapiens
gtggatatctggctccgagtgcttgcctcaatcctggtcctctggatgctccaaggctcccaggcagctctctacatccagaagattccagagcagcctca

SEQ ID NO: 741 - DNA, 90 bp, Homo sapiens
tgtttgaatttgtatttaaaggatttgatgctctgcaatatcaggtgaaatgacaatggatgctctgttggctcgattgaaacttctgaa

SEQ ID NO: 742 - DNA, 74 bp, Homo sapiens
cagtggtcgcttcttctccttggttaaagctgaagctcaacaaagatatagtgatctctgtgggcatttataat

SEQ ID NO: 743 - DNA, 100 bp, Homo sapiens
ctctacagagaatgctgctcggtcctcctacccctcttcccgaggccctgctgccatgttgtatgccccagaagcaaagaatggccgagtggattctgag

SEQ ID NO: 744 - DNA, 96 bp, Homo sapiens
ccggggcccaaccacaagacgactcaataggaggaaggtgaagagtgcgacattgacataaatgaatgtgacagtaacccctgccaccatggtggg

SEQ ID NO: 745 - DNA, 82 bp, Homo sapiens
gcagcagcagacagcagtacagacagctcaggctgcccagatggtggctcccggagtccagaacaccttccaccatgaccac

SEQ ID NO: 746 - DNA, 100 bp, Homo sapiens
aggacatgctacgacagtgaagattcaggtaaactttggagtcggagtttaaaactagcttatactctacttaataaactgacaagtaagaatgaacctc

SEQ ID NO: 747 - DNA, 75 bp, Homo sapiens
ccttccatcggggcagcgacaagatgaaagcacacctgagctgctcttaatatcatctcttgaagatacaaatga

SEQ ID NO: 748 - DNA, 75 bp, Homo sapiens
aaaaatcttagctctctcaatctctgtctgaactggatcataaatgacagtgctacagctagaatgaagcacatc

SEQ ID NO: 749 - DNA, 75 bp, Homo sapiens
aacagaatgggccgccacaaaccccatttggccctcaaacagtgcaagtggtgacccaggatgaaagagagcagc

SEQ ID NO: 750 - DNA, 100 bp, Homo sapiens
gtgaccaatcagaaataatatccaatcagtacaacaatgagccttcaaacatatttgagactatgtcttcagcagtggtgcagttatatgcagcagatcg

SEQ ID NO: 751 - DNA, 90 bp, Homo sapiens
cggaacatctggaggctgggaaatggtccagcctgatgagtgaagaggctaagcgaggagcacccaacccttggctctttgaggagccag

SEQ ID NO: 752 - DNA, 96 bp, Homo sapiens
ggaagactgaggaggaagggatggctgtggatctgctgtctgctcaggatgggaaagcttgtttggaaccatagtttctaaagaagaaaatcagga

SEQ ID NO: 753 - DNA, 75 bp, Homo sapiens
ggagcagccctggtgtcacctatcagtaaaaggtgagtgctccagttgtaacatctaccactcaggaaaagccga

SEQ ID NO: 754 - DNA, 100 bp, Homo sapiens
aaaagagacctctacttagctcagcaattcttacctttgatgcagccaacacgaacggttgtcatgtgtaacacaactttcgatcaccgcgaaaacaccg

SEQ ID NO: 755 - DNA, 76 bp, Homo sapiens
tgttcaccatcctggccccggaaggtcggattgtttgtgctgaacgaactgtcctcttgcttcagaagcccctttt

SEQ ID NO: 756 - DNA, 95 bp, Homo sapiens
cgagacgcaggccaagctgcggcggctgctccagaaatctgatttataccgagtccactttcttctcggatggtgccatgacaatggtgtgaact

SEQ ID NO: 757 - DNA, 100 bp, Homo sapiens
gtggtgtttgtgaaaaaggacgatgccatcaccgcatataagaagtacaacaaccggtgtctggacgccaccaaaaccctcaacaggggcatctctgagt

SEQ ID NO: 758 - DNA, 100 bp, Homo sapiens
ttgaccatgctgtccggatggatttggagcaagaggtggtggtggccttcccccgaagaaatttggtaatcctggggagcgtttgcgtaaaaaaaagtgg

SEQ ID NO: 759 - DNA, 75 bp, Homo sapiens
ggcgacctcatccacgccatgccagattgtgcttgagaacagtagtcgagaagacaagcatgaatgtccctttgg

SEQ ID NO: 760 - DNA, 80 bp, Homo sapiens
gaggcggcgcggcagcggagggacggcagtctcgcgcgaataccctctaccatctgctttggtcagggtgccgctcgagg

SEQ ID NO: 761 - DNA, 101 bp, Homo sapiens
caagaacgggacaatcttggcatgttggtctggtcacccaatcaaaatctgtcagaagcaaagtggaactgtccaggtttattgctgccgggagactacac

SEQ ID NO: 762 - DNA, 83 bp, Homo sapiens
aaaagcagaaccttagcaaagaggagctgatagcggagctgcagtcagagcaccataacatggtgtgggaagtgaagacaaat

SEQ ID NO: 763 - DNA, 82 bp, Homo sapiens
ctgcggcctggcggcttccaggcgcactaccgcgtgcctccggagccagcgtggtggccatagacaacaagatcgaacaggc

SEQ ID NO: 764 - DNA, 115 bp, Homo sapiens
gcgctggccggatggaaatcctaatgacagtctccaaattcgcctccatctgtaccatgctgttgcagctaattgcaaaatcccagttaacttcattgagtggcgtggcacagaa

SEQ ID NO: 765 - DNA, 100 bp, Homo sapiens
agatctcctgaacctgtttctgctcagattgaggaaacaatggaagaggcatttggatttgatcccaaagtcgacagttatgttgagaaggcagttgctg

SEQ ID NO: 766 - DNA, 97 bp, Homo sapiens
tgtccctgatcgagcggcgggagcgaggcatcctagaatacgtttccacacgggtcttgtggatgcccacctctactgtttgaaaaaatacatcgtg

SEQ ID NO: 767 - DNA, 100 bp, Homo sapiens
tgcttgaagggaggcggcagaagaagacgaagaagcagaagcgtctgctcaggttgcagcaggagagaggctgctccagttacagcaccacccggccgct

SEQ ID NO: 768 - DNA, 74 bp, Homo sapiens
cgtcactctcaaggatctccgtgtagaactccttggagaggattatataagaaaactggtaaactggtatttct

SEQ ID NO: 769 - DNA, 97 bp, Homo sapiens
aggtggccccggatgctgcggcgcccgctggccgggctggctgcggccgccctgggccgggccccaccggacggctgtgacaaaccctgtgcccacg

SEQ ID NO: 770 - DNA, 100 bp, Homo sapiens
ggaattgaagcctgctattgcaacatgggattttcaggaaatggtgtcacaatttgtgaagtcacgtgaactggaaatttcagtttattggcgtgattgg

SEQ ID NO: 771 - DNA, 82 bp, Homo sapiens
agagatgtgattaatgtattccaccacctccgccagttaagaggaaaaaggtcctcatgctgataccgccagtggatgccag

SEQ ID NO: 772 - DNA, 90 bp, Homo sapiens
ctccaggttaaatcctgttttgaatatactgctaaccccgctggttataatccttcaatatttggtgcttcccgtgctgctgttgatgct

SEQ ID NO: 773 - DNA, 90 bp, Homo sapiens
gttccttcagccaaagaaacaagccgtggaataggtgtatcaagtaatggtgcaaagcctgaagaggttcaaaatggaagactgtttagg

SEQ ID NO: 774 - DNA, 98 bp, Homo sapiens
cgacccattcaggcacttatggccatttcagccacacaacagatttgttttggactgtaaagacaaagagcctgatgtactgttcgtgggagactcca

SEQ ID NO: 775 - DNA, 75 bp, Homo sapiens
ccatctgtaacgaggtgttgagacgaggattggatagctttagtcaaagcagctgctgcagctgcagccaagaac

SEQ ID NO: 776 - DNA, 75 bp, Homo sapiens
ggggcgctggcgggcgttggcgtaggaggttttgagaacagagtgctgttttagagctggcagcagcatctcagc

SEQ ID NO: 777 - DNA, 100 bp, Homo sapiens
gggccagcggctgcggtcgggccaaggttccgcgccgggcgtggacggtgtggggcggtcccggccccgcaggtgaccctggcaaagatgagagtgcaca

SEQ ID NO: 778 - DNA, 49 bp, Homo sapiens
tcctgagtagctgggattacagtttgcctgggagcttgaaaggagaaag

SEQ ID NO: 779 - DNA, 100 bp, Homo sapiens
aggaccaggagttcgacttcgagttcctcttcgagtttaaccagcgcgacgagggcgccgccgcggccgccccagctcaccatggatgatgatatcgccg

SEQ ID NO: 780 - DNA, 75 bp, Homo sapiens
gcaatagaagctgtggatgaatttgcttttctggaagtgtttgggaaatgggaagtaatgacagctggcacctga

SEQ ID NO: 781 - DNA, 114 bp, Homo sapiens
tgaccaggcccgccactacctcctggctgccgtgaataggcagcctaaagtcaacatctccatgaatttccactaatactcatttttggaatagccacatctcctattatcatc

SEQ ID NO: 782 - DNA, 100 bp, Homo sapiens
ctggcttctagtagatcacctattcaaatacgcctgtcaccagggtggcctcaggctcctcatccaggagtctgtgtgggatgaagccatgagacggctg

SEQ ID NO: 783 - DNA, 89 bp, Homo sapiens
cgccagcccgtgccgcgagcgcggcctgcaggagggcaagcccgacctgaacacggcgctgcccgtgcgccagacggcgtccatcttca

SEQ ID NO: 784 - DNA, 75 bp, Homo sapiens
agagattgttcctgtggagcaaagagctgcatcatgaattcaggagcatctacaagccagctgccatgttgtgag

SEQ ID NO: 785 - DNA, 100 bp, Homo sapiens
acaaggagtatatcatgaaaattctacttcaaaggtcagaagacatgtcttcatctacatggcatctttccttacctctatgtgccatacgatggttatg

SEQ ID NO: 786 - DNA, 100 bp, Homo sapiens
ggtgggcattgtggagataatcaacagtaaggatgtcaaagttcaggtattttgggagtcaacaggccgcacctattgggtgcactggcacatgctggag

SEQ ID NO: 787 - DNA, 75 bp, Homo sapiens
gtacgtcagacggcagtggtggaaaagatccatgccaagcacaacgtggaagttcttggaatactttccgatgat

SEQ ID NO: 788 - DNA, 51 bp, Homo sapiens
catgatttgcctttagaaggagctaaggtattctctactgccgctgatggt

SEQ ID NO: 789 - DNA, 100 bp, Homo sapiens
ttcctgaggttttcctaagccatcccctggcggaaccgcccccaggctcacagaacatttcctgcctgttgctcacactctgttgtccacagcatacccg

SEQ ID NO: 790 - DNA, 75 bp, Homo sapiens
gttaaggattccaagtaactcttatttgaggccatgtaccagccagcgctgtggtgaagcagcctgttcggggag

SEQ ID NO: 791 - DNA, 82 bp, Homo sapiens
cgcgggaggtgttcgagaacgaccccgagacgatgaggctgccagccttgagagcaccaccgttacctggttgaagagggga

SEQ ID NO: 792 - DNA, 100 bp, Homo sapiens
ggggacctgcatgtgtgtgcgcgcgaaggagcggaagaatggcagtgctcaaactcaccgaccagaataacaagcctttgtattcatttgaagataatgc

SEQ ID NO: 793 - DNA, 75 bp, Homo sapiens
cttcaagcacctggcctcagtagtgagtccattcttgcacaccgagaaaatatgcgacagatgataagaagtttt

SEQ ID NO: 794 - DNA, 100 bp, Homo sapiens
cctggccatgctctcagctctcccgccgcggtatgatcgggtacggcatggccaagggtgctgttcaccagctctgccagagcctggctgggaagaacag

SEQ ID NO: 795 - DNA, 123 bp, Homo sapiens
ggagaaaaaagatcagaacagaaattctattgagaacatagccaatgagactgtgaacgtgctgtggaatatatggtgctatgggcataaacaacagaggtgccatgccccctgctcctgtgc

SEQ ID NO: 796 - DNA, 96 bp, Homo sapiens
ccgagtcgcgcggaggcggaggcttggggccctcagtaccgcctggagaagcagagcgagcccaatgtcgccgttgacctggacagcactttggag

SEQ ID NO: 797 - DNA, 82 bp, Homo sapiens
agaccttgaaatgcatccgctggtcgctgccggaaatggccaggagccactggtgtttgcggagcagccctcggtgaagctg

SEQ ID NO: 798 - DNA, 50 bp, Homo sapiens
ctccaccatcctgggcaactggttggtccagaatgacagggtccagaaac

SEQ ID NO: 799 - DNA, 75 bp, Homo sapiens
cgcaatcaggagctgaagcaacaggtacccgcaagatggagtacaagggcagcagctggcatgagacctgcttca

SEQ ID NO: 800 - DNA, 82 bp, Homo sapiens
ggctggagagcctgttggagaaacacaaagagatgaggtttatataactttccaagacaaggaagttgtgcaaagcctcaca

SEQ ID NO: 801 - DNA, 75 bp, Homo sapiens
tccaagccctactgggaggcacggagggtggcgaggcaggtcacaaggcacttaaagcattgttgaggtcattgg

SEQ ID NO: 802 - DNA, 100 bp, Homo sapiens
tgaaaaggaaggtggctgaacaggaggagcggcagggcatgaaggtccaggcgctggccaggagaatgtactactcatcacctcccacctgtgaaagccc

SEQ ID NO: 803 - DNA, 76 bp, Homo sapiens
cggcagcctgctctggggactggtgaagcagggattaaagtgtgaaggacagtcattttgtttactcattcagccc

SEQ ID NO: 804 - DNA, 118 bp, Homo sapiens
aggctcctctaccgcaatgtgatgctggagaactttacacttctggcctctctggcctacattcattccaatcagataatgggctggggcgagaaagctattgagatccggtcagtgg

SEQ ID NO: 805 - DNA, 85 bp, Homo sapiens
cagggtcccgtggaggctgaggccaggcagctgaagagctgcatgaagccggtgaggcgcagttttccaagagataacttcacca

SEQ ID NO: 806 - DNA, 117 bp, Homo sapiens
aggacttccctttggatgtagcaaggaagaaattgttcagttcttctcaggtgtattccagagcaaatgaaaaagagccttgctgttggtggttagctaaagtgaggatgataaagg

SEQ ID NO: 807 - DNA, 100 bp, Homo sapiens
ggctgaggaaatcgcctcccgagaagaagttgaggcgctatgaagcatagtgagtgtgggcgatcctaagaagaaatatacacggtttgagaagattgga

SEQ ID NO: 808 - DNA, 84 bp, Homo sapiens
caccagcaccagcaagcggcattggctgcgcacctgaactcctggggggaccgtcagtcttcctcttccccccaaaacccaagg

SEQ ID NO: 809 - DNA, 83 bp, Homo sapiens
gtgaagatggcggcagccgaggccgcgaactgcatcatggagcccagctcaacattggcaatgtgctccctgtgggcaccatg

SEQ ID NO: 810 - DNA, 100 bp, Homo sapiens
ctcctgaatacctctcattatttattgatgataagctgaaaaagggagtcaaagggccccatgttatagtacattgtgcagcagagagaagaccagatgt

SEQ ID NO: 811 - DNA, 49 bp, Homo sapiens
agctgtcctaatcctcactgccgaaagatcttaccaatatatttgagtc

SEQ ID NO: 812 - DNA, 98 bp, Homo sapiens
gcggctgctgtcgcccagcgccgccccgtcgtcgtctgccttcgcttcacggcgccgagccgcggtccgagcacgcacagaggctgggctgcggtcca

SEQ ID NO: 813 - DNA, 76 bp, Homo sapiens
tgaggaagcagacagcgatactgatgacattgaccacagaggatactatttttgagacaacaaattaaggaacttg

SEQ ID NO: 814 - DNA, 82 bp, Homo sapiens
cgctgccgtcgccgccgccaccatgcccaagagaaagatcacacgccgctatgcagagttctcctccgctcttgtcagtatc

SEQ ID NO: 815 - DNA, 82 bp, Homo sapiens
tagaaaatgagcagatactgaatgtaaaccctgcaggcagactgccagattcacttacagccccagctaattccaccaaaca

SEQ ID NO: 816 - DNA, 82 bp, Homo sapiens
tcatcgtgatcccggcgacatactacctctggccccgagatcagaatgccggcttgggcactgtttaaaggaaagttccgag

SEQ ID NO: 817 - DNA, 144 bp, Homo sapiens
cgtgaaggcaatgatttataccatgaaatgattgaatctggtgttatcaacttaaaagatgccacctctaagatgagagtccctacactaaatccgccagccagacaaagccgcctgatggagcgttggctgtgaggagacaga

SEQ ID NO: 818 - DNA, 75 bp, Homo sapiens
ccctcaccatcctagaggtcaagatcagctctggctagagctgctgcccaaagggagcaaggaggaacagcggga

SEQ ID NO: 819 - DNA, 150 bp, Homo sapiens
gtgctcggaggtcgctcggctgacggagggcatgtcgggccgggagatcgctcagctggccgtgtcctggcagcaaacggggattcagcgtccgatcctttggaacagggactcacgtgaagcttccaggaccagctcccgacaagccca

SEQ ID NO: 820 - DNA, 100 bp, Homo sapiens
gtccccaggaaagcgcctggacgcagcggatgaggatgaggacaaggaggacgacttccgggctccgctgtacaagaacgtggatgtgcgaggtatccag

SEQ ID NO: 821 - DNA, 75 bp, Homo sapiens
ctatcagaatgggaagaacaatgtgccaaggctgaaattatcctacaaagctccagcccttctctgagacgggga

SEQ ID NO: 822 - DNA, 90 bp, Homo sapiens
caaacctcgcgaggagaagaggacggccctgagcaagttatttgctggtataaaggatggagaaagcctgcagctctttgaacaaagttc

SEQ ID NO: 823 - DNA, 75 bp, Homo sapiens
gtgggcggtgggccccagccccacagaccagcccagcattcagccttagccccgtgggccccacggagtgagcgg

SEQ ID NO: 824 - DNA, 90 bp, Homo sapiens
ggaaatggctgccgaaaacaagccggaagatctcacattcttgaaggtggcattgaagagcactaagatcggaagatgagtgagcttgac

SEQ ID NO: 825 - DNA, 100 bp, Homo sapiens
cagagcctgaggaagctgaagcagaggtttcccagttgtatatgaacacagatcaagattagagaaatccttgcaaaaagaaagacttgaacataaaaaa

SEQ ID NO: 826 - DNA, 112 bp, Homo sapiens
gcaaattgtggaagttggagaagaattaattaatgaatatgcttctaagctgggagatgatagttccagcaacagatagaaatgctttaagttcactctggggaaagctggc

SEQ ID NO: 827 - DNA, 116 bp, Homo sapiens
ctttggggagctcagattggagtaaggcattgctgtcccttgcaggattttcagctgaactctcatctctcaacactggcaaatattcataagatctaccacacccttaataagct

SEQ ID NO: 828 - DNA, 100 bp, Homo sapiens
ggaagacagcattggtactaatggccaactcaagtggtcatctccatcagaggcaactgaaagtttcttatcaaaagaaatttggttgccacccccacag

SEQ ID NO: 829 - DNA, 113 bp, Homo sapiens
catcctgccgtccttctccactttcgccagcccgtgccgcgagcgcggcctgcaggagccggcacagtcttcactaccgtagaagaccttggctccaagatactcctcacctg

SEQ ID NO: 830 - DNA, 100 bp, Homo sapiens
ttcacccttaaggggggtctggaacactgtgagccgctcacagtgtctaaggttaaacccatccagagtaatggctgcggccttacccaggaccctgggg

SEQ ID NO: 831 - DNA, 80 bp, Homo sapiens
aggaagctgtgattttcaaagctaattatgaaaacatttatcattggaatcagtggagacatttctaccagccaatctgg

SEQ ID NO: 832 - DNA, 74 bp, Homo sapiens
gctgatcatgggcattggtcaccgagtgaagtcggcccgccaagctgccccctgtgtgctattctttgatgagc

SEQ ID NO: 833 - DNA, 87 bp, Homo sapiens
aggtgagactttcacaataagagcagaggatggaacacttcagtgcattcaaggtgatctgtgaaaatggttcgctattcacttgac

SEQ ID NO: 834 - DNA, 113 bp, Homo sapiens
gcttcgtgtccaacctgttcagtcaatgaagcctgtgagtggacacccttttctcaaaaaggtcaccatcgtggtccttggcaacaagtgtgacttacaggagcagcggcgtg

SEQ ID NO: 835 - DNA, 50 bp, Homo sapiens
acttttgcctcatcctacaaattttggagatggcagcagaaaaggccaaa

SEQ ID NO: 836 - DNA, 98 bp, Homo sapiens
atgaataacattgaccgcctacgaatggaaatccataagaatgaggctacggaaacaggccgagaagaacgtggagaagaaaattgacaaatacacag

SEQ ID NO: 837 - DNA, 106 bp, Homo sapiens
aacacccccgggctccccaagatctacatccaccgagtcggccggacggcccgtgcagacggcaacgggggcctctactgcgcgctggaggaccacaagatcctgg

SEQ ID NO: 838 - DNA, 75 bp, Homo sapiens
ccgaggtagaggcagtggcgcttgagttggtcgggggcagcggcaggctggcctgctgtctgccttgggctccct

SEQ ID NO: 839 - DNA, 75 bp, Homo sapiens
tcattcagatgtctggaagcaccaccacagtggccggtgtccagctgcctactttctgcccggatctctggctcc

SEQ ID NO: 840 - DNA, 49 bp, Homo sapiens
ccgggatggagaaggaggaggaatcgaataacaagcctttgtattcatt

SEQ ID NO: 841 - DNA, 96 bp, Homo sapiens
ggaaatgctccaggttcaattttctgagatttctcatcaggcacaccaaccagcaggaccaggagccacacaggacagttgacccaacacttctgc

SEQ ID NO: 842 - DNA, 73 bp, Homo sapiens
gaaaatgtaatgaataccacttatgttttctccaggaagaatcttaaaaggctcacctccacctccagtaaaa

SEQ ID NO: 843 - DNA, 147 bp, Homo sapiens
ccccgccaggcgctctgaccactctccagcaccagcttccagttagtggatatagcacaccatccccagccaaagcaaggtctcgctgtgttaccctggctggagtgcagtggctacttacaggcatgatcatagcatactgcagcc

SEQ ID NO: 844 - DNA, 101 bp, Homo sapiens
tactcgggagctggctgaagatggctactctggagttgaggtctgaatttcctgctgctgttcacaaagatgctttttatctttaactttttgttttcccc

SEQ ID NO: 845 - DNA, 98 bp, Homo sapiens
cagaattggaaataacgggagggaggacctggtccagcttcccttcctcaaataaggaaattgacacctggcgtgctgaacatactgacttgtggagt

SEQ ID NO: 846 - DNA, 97 bp, Homo sapiens
agccttccaaaccccagcagccatcactgaatacaatgattcagcaacagacctcagagtttgaagaccccttagttggtgaagatacagaacgtgc

SEQ ID NO: 847 - DNA, 80 bp, Homo sapiens
atcatggtggccaaacccacaggaacagtacgtatttggcattcaagcacctaccggcttgagagcacactgaattatgg

SEQ ID NO: 848 - DNA, 100 bp, Homo sapiens
acgacagcgagtacacctgcaccatccagagtgttgcggagataggaacatgggagagaaacaatctgggtaacatgaaagtgatgctggttgctaaggg

SEQ ID NO: 849 - DNA, 112 bp, Homo sapiens
gcacctcgcagtctccccaggtccgcccagcagccgcgcttcagccagtaccttctccaggcaaattccgttcccctgcagcaccatctcctttggctcttcggcaaccagt

SEQ ID NO: 850 - DNA, 100 bp, Homo sapiens
tgacaccatggttagccacatgtcctctggagtgcccactcccaccaagagtcttattgccagcagttttgaagatgactcccgtgtagcctcaccgtta

SEQ ID NO: 851 - DNA, 97 bp, Homo sapiens
tggcagatgaagctcagtctctgaaagatgagatcgacgtgctgaggagatgcctacatagaagagtgacagcagctagactaaatgtttaactgct

SEQ ID NO: 852 - DNA, 96 bp, Homo sapiens
ggcccattaacaagcagctcttccggaagatcaactgcagactgtcctattgcatctcaagccataaacaggggtcacatgacgacagaagccaag

SEQ ID NO: 853 - DNA, 75 bp, Homo sapiens
agacgcctcacttaggacaagttataccttattggtgtggacgttgtctaaatttcggtagccatggcacaagaa

SEQ ID NO: 854 - DNA, 71 bp, Homo sapiens
aaaacaagcctggttcagttaaacctactcaaactattgcagtggtgttggcagatggagccacaattgtg

SEQ ID NO: 855 - DNA, 75 bp, Homo sapiens
gtgcgcgcgtgcgcggacatggcctcaaacggtgtggacactgccagcggctgcagccgacttggaatgacctgg

SEQ ID NO: 856 - DNA, 100 bp, Homo sapiens
cgccctgcgccccgctctgctgtgggcgctgctggcgctctggctgtgctgcgcgacccccgcgcatggtgtaccttgaaagacttttaacatacgcaga

SEQ ID NO: 857 - DNA, 96 bp, Homo sapiens
gagcagggagcagcgcagcgcgcgcagagcgtcgtccagagacacctatggctgccgatgaaggctcagcagagaaacaggcaggagaggcccaca

SEQ ID NO: 858 - DNA, 82 bp, Homo sapiens
ctgtgctcgcgctactctctctttctggcctggaggctatccagcgtggggaccaaggcatactgaacacattttttagcag

SEQ ID NO: 859 - DNA, 74 bp, Homo sapiens
cccctccgagctggggttggacgctgccagtttgcacagcagcagtggaatgcagtagccctctgggcctggga

SEQ ID NO: 860 - DNA, 100 bp, Homo sapiens
cacactgaaacagaagaagcttgaggaaatgactcggactgaacaagaggatacagatccacgggttttagaaaaacaagaattacagcagccaacctat

SEQ ID NO: 861 - DNA, 155 bp, Homo sapiens
cctttccccccagagggccccgcccagtgcagtcggtggtacctgagatggaggagtcgggagcacagctgctgctggtctgcctttccaaattggagctgtctctgaacttcagcttcctgaatccaacttcttgcagaacacctcctcttgac

SEQ ID NO: 862 - DNA, 75 bp, Homo sapiens
agacagagggttttcttttgaggggggacacagcgattgccacgcgccattggaatgtccctggccaaggagctc

SEQ ID NO: 863 - DNA, 90 bp, Homo sapiens
ctgccggcgctgctgagtttcttcatctacaacccgcgcttctggccgcgggaaggagagccgaaaatgagagcacacctattcagcaac

SEQ ID NO: 864 - DNA, 82 bp, Homo sapiens
tcggctcctgtcgtccgttctctcaggctcccgttcaggctggaggctctcaggtcatttttaccaacccattggagatagt

SEQ ID NO: 865 - DNA, 99 bp, Homo sapiens
agtttctggaagttataacgctacacgaagaactaagaatattattagcacaagagcaccatactttgaggcaaatggttatgagccttagagtttctg

SEQ ID NO: 866 - DNA, 100 bp, Homo sapiens
ggccgagcaggctgagcgatacgacgtgtgagccactgccccatgttgtgttgatgccaatctgccatgctagcctgtctaccagggccaggtgacctgt

SEQ ID NO: 867 - DNA, 82 bp, Homo sapiens
cctcccgcagcctgcctttccttccccctcggaaaatggttcccactgccgggcgagacggaagtgaaaatgtgacaggatt

SEQ ID NO: 868 - DNA, 75 bp, Homo sapiens
ctacgcgcgcttctcgccgtccccgctctccatgaagcagttcctggacttcggagccagtggggtgggtcgcag

SEQ ID NO: 869 - DNA, 50 bp, Homo sapiens
gaagatggtggccgcaaagaagacggtggctcacccagaaaggcgcccgg

SEQ ID NO: 870 - DNA, 75 bp, Homo sapiens
gaggatccagaaaccgccccagcgatggaagaggatcaggagctggagagggaaggaaactgaaaaggccaagga

SEQ ID NO: 871 - DNA, 101 bp, Homo sapiens
atatgtgatgccattccagcactggactcatggaggctgagcatttattcagaggaggcgctgtggacgactcgggccgatgggcgggtgcgcctgcgcat

SEQ ID NO: 872 - DNA, 82 bp, Homo sapiens
caagaacgtgagcaagcccaggcacagccgacgccgcggggagcatcagatccatgctgctgctgactcggagccccacagc

SEQ ID NO: 873 - DNA, 83 bp, Homo sapiens
gcggagtcgtccggagccgctgcgcggagccttcacgtaaatgggtccagtcatgcctcccagtaagaagccagaaagctcag

SEQ ID NO: 874 - DNA, 100 bp, Homo sapiens
cgcgcacgccatgggagccgtgactgacgacctgaaggaaaagattatgcccttcattggctagtgctggggactcatacgtctgatgagcagaatcatc

SEQ ID NO: 875 - DNA, 83 bp, Homo sapiens
tacgagcgggcactcaagctgctgccctgcaggggtgagcccctccagactccgaataggagatcaagagtttgattcattgc

SEQ ID NO: 876 - DNA, 100 bp, Homo sapiens
acactggaaacaaacagtatttctactggaaaaaccattttcagttaaagcaggtggcacatttagaacgaacagggcattacttaactgtgaaagataa

SEQ ID NO: 877 - DNA, 83 bp, Homo sapiens
ctcagttggaagcagccgatccagcctgcggagcctgtggggcaggattaggcagaatctgaaggaaaagcatgctcgacaca

SEQ ID NO: 878 - DNA, 124 bp, Homo sapiens
atcagttgttgcatgaagcaagacggtaccacatacttgggaatgaaatgatgtccccaaggactaggccacgcaggagaaaatatggagaagtcttgtgcaagcaaggaagaagtcaaagaag

SEQ ID NO: 879 - DNA, 88 bp, Homo sapiens
gagaggtgatgctggagaactacaggaacgtggtctccctggggcagctgcaatgactctccgcacggtattattgtcattgcaagca

SEQ ID NO: 880 - DNA, 100 bp, Homo sapiens
tacaatcgcttgtacaaaggagagtttaaacagccaaaacagttcattcatattcagcgccgtgacttggcgagcacgaccctccccgggtaccctccac

SEQ ID NO: 881 - DNA, 90 bp, Homo sapiens
attgacctcacaaccgagcaaattgaagagacgttaaaatacttccgtgaccaagaatatggcccaggtgaccaaagccctggacaaggc

SEQ ID NO: 882 - DNA, 97 bp, Homo sapiens
aggggcgggcgcggccaccgggaccggcgtgggagcgacgccagcgcctcaacaggagacccccttcccacagaaagccgactcatgaacagctgtc

SEQ ID NO: 883 - DNA, 75 bp, Homo sapiens
gtgaagaagaatttcgatctccgccctggggtcattgtcagttatgcaatgccaaccaaaaccatagaagtgttg

SEQ ID NO: 884 - DNA, 98 bp, Homo sapiens
aaaagtttaaacaaccctgccatgttgcaagttcttctacagccccagttatgtggacgagctgttaaaccaggagggaaaacccctgatcctaaaat

SEQ ID NO: 885 - DNA, 90 bp, Homo sapiens
aaagtggtacagaccaagtatgtggaagccaaggactgtctgaacgtgctgaacaagagcaacgaggtcagcgagatgatccgccacccg

SEQ ID NO: 886 - DNA, 82 bp, Homo sapiens
ggcactggtctaagccctttctacttatttcttcatttaaactccatcgcaaggttttcaagctagaaatgcccttcttcag

SEQ ID NO: 887 - DNA, 75 bp, Homo sapiens
gggtgtgctttctcataacaaaccagtggtgttcccactgatgaagagcaggcgactgggttggagagggagatc

SEQ ID NO: 888 - DNA, 97 bp, Homo sapiens
ctcgattcgttcctggatcttgcgaggtgcccctgagccgaggaacgcaggcggtggtcgtggggaagggaagaggagccccgggagacgacagcag

SEQ ID NO: 889 - DNA, 100 bp, Homo sapiens
aaggggcattatcccgctggatgcacactgctgcgtggagtgttgtacagtgttttgggcatgcacgtgatactcacacagtggcttctgctcaccaaca

SEQ ID NO: 890 - DNA, 100 bp, Homo sapiens
aaaggttgaggcctctgggtttgaattcaccagcttggtattttcagtctccttcccaccacaactatctgtaagagagactgcttttcaggaagccttg

SEQ ID NO: 891 - DNA, 82 bp, Homo sapiens
gctacccgccccacagcctttcctacccagtgcagatcgcccggacgcacacgctgtcgcctggttgggcccggaaatggga

SEQ ID NO: 892 - DNA, 100 bp, Homo sapiens
gcgatgcccaaatccaagcgcgacaagaaagaattcattaaatgaagagtggtacgtttcttatattacccgaccagaggcagaagctgctcttagaaag

SEQ ID NO: 893 - DNA, 75 bp, Homo sapiens
gcgggggagccccgggagccgcacgattctggaacttttcaaagcctgactctcttcttgaaacagtggagcatc

SEQ ID NO: 894 - DNA, 101 bp, Homo sapiens
tgaatcacgccctggagttgctggtgatccgcaattacggccccgaggtgtgggaagacatcaactctagaggacaaaatcccagtccttggcacaaactc

SEQ ID NO: 895 - DNA, 112 bp, Homo sapiens
tcgcgccccccactctgaactcaagtcaccgtggagctccgccgccccgaaactttcaccgcgagcgggcacggatgggcagaagcctttgcaggtatcagaagttcacata

SEQ ID NO: 896 - DNA, 75 bp, Homo sapiens
gccgatccgccgcccgtccacacccgccgccaggcaagcacgaggagcggcaggacgagcatggctacatctccc

SEQ ID NO: 897 - DNA, 100 bp, Homo sapiens
caaagacgctaaacgtgccctactctgccccgggggagaggttttaaaatcaaagatgggaaaatcggagaaaattgcccttccccatggccagcttgtt

SEQ ID NO: 898 - DNA, 51 bp, Homo sapiens
gctaaagcagcgtgcgttcagccctgggtttaaaattggtggtgaatggtg

SEQ ID NO: 899 - DNA, 74 bp, Homo sapiens
cttacaaacctgtgttttggtctccgtcatctaggtgggcctgggtcctccaggatgccctgggcatcgccttc

SEQ ID NO: 900 - DNA, 96 bp, Homo sapiens
caccacctcgcgcgcacgggcccttgtctttggcagcgaaatggcctcaggggacatccggaacctgctcatctggatcaagaagaatttgctaaa

SEQ ID NO: 901 - DNA, 75 bp, Homo sapiens
tatccagaatcatggacggacagaggatgcacttgtccaatcctcaatcctgacttaattcagtgcacaaatgag

SEQ ID NO: 902 - DNA, 75 bp, Homo sapiens
gggacccaaatccttcagaccttttggaggtactggtgtggcatactcggacagagaagcccaagatgaagcagg

SEQ ID NO: 903 - DNA, 100 bp, Homo sapiens
cgaggggtccaccgacctcccgttagcccctgagagccgggtggaccctgaggtccttcacagcctgcaggtggaggagaagatcaagcagacccaccgt

SEQ ID NO: 904 - DNA, 100 bp, Homo sapiens
ctgtgatgtggaggaagaagagctcagggtctcctatggacagaagtgcgggcaaggagctttgttcctccccgatgtcaccctcccacagcccacttgc

SEQ ID NO: 905 - DNA, 100 bp, Homo sapiens
tacgccatgcggctcatggagcagatgaagcacatcaatgagcactccttcaacaatttccagatgaagattgaggcggggtttcaccatgttgcccaga

SEQ ID NO: 906 - DNA, 82 bp, Homo sapiens
ctgtgtggttgcaacggagataaattcccggaaccgcgattcggcgtgtcagtgttatagttttgccgctggactcttccct

SEQ ID NO: 907 - DNA, 147 bp, Homo sapiens
ctggaccccaacgaggtgtgggagatcgtgggcgagctgggcgacggcgccttcggcaaggtttacaagtccgggaccatgtctggagaactaccaccaaacattaacatcaaggaacctcgatgggatcaaagcactttcattgga

SEQ ID NO: 908 - DNA, 100 bp, Homo sapiens
gcagctgcttctgtgtgatttcttccaaaatacattgtccccagttgtcctcatccagggtgctattcgagtccagcctgaagggccggctccctctcta

SEQ ID NO: 909 - DNA, 75 bp, Homo sapiens
cgcagacctggtggaggtgttaaatgaaaccttgagaaggaaaattatgacgtttgggctaaagtggtgaggctc

SEQ ID NO: 910 - DNA, 50 bp, Homo sapiens
cttcacctgggtctgcacgccctttctggactttgtgttttatgccccac

SEQ ID NO: 911 - DNA, 100 bp, Homo sapiens
ttacttttaattttgcaaagaatccaggacaaaaaggattagaccagcatctcagacatgtcgaaaaagatgttttgatccctaaaataatgagagaaaa

SEQ ID NO: 912 - DNA, 100 bp, Homo sapiens
tgaagaagatgcagttgccagaactgcccaaggacatcagatccccttgaaattagacacgcaaggacttcttcaaccagaaaaacccattgttctaaag

SEQ ID NO: 913 - DNA, 82 bp, Homo sapiens
tattcgagtgaccgagaccgcggccgggaccgaggtgtgacaacatctggggtgatggaaagtatgaagaaagtcaagaagg

SEQ ID NO: 914 - DNA, 75 bp, Homo sapiens
cgtcaaggagctggaagtgctgctgatgtgcaacaagatgaccagtgtcccagtgaaggaacgagtgaaggtgtc

SEQ ID NO: 915 - DNA, 82 bp, Homo sapiens
ctcatttgcaagagagacagttactggaacatagagattttataggcattttgaaagcgaagcagaagccgtagaatcagcg

SEQ ID NO: 916 - DNA, 82 bp, Homo sapiens
cacacaagcaccccaataacctcaagttgagccccatatgggggttggcaggcagcagagaggcccctttcaaggtgttcgg

SEQ ID NO: 917 - DNA, 85 bp, Homo sapiens
attccatgtacatctgtacgcatgtcagagtaaatctggcgcagttgtgtagcagttgagtaatgctggttagctgttaaggtgg

SEQ ID NO: 918 - DNA, 75 bp, Homo sapiens
cctcgtctccgctcctgggggaccgcagaatttacatagtacatgacgaagttaaggataaagcttttgaactag

SEQ ID NO: 919 - DNA, 90 bp, Homo sapiens
aaaagaaaggatctgaacaggggtcagatcattggtgaagggctttttccgtcggagcatccagcagaacatccagtacaaaaggtgtct

SEQ ID NO: 920 - DNA, 75 bp, Homo sapiens
aagcatgtcaccaacccggccttcaccaaactccctcttcctttgctccaataagctttgcaatcaaggccaaag

SEQ ID NO: 921 - DNA, 96 bp, Homo sapiens
ctgtgtttgttggaggtgttccaggtatgacaggtgcccaggtaatccagatgttggctcaaaactatagacttccgcaaccatccaactgtccac

SEQ ID NO: 922 - DNA, 82 bp, Homo sapiens
cgcggagctggaatgactggcaacccagggtgacccagagaagacagctaaagtggaatgtggggacttctacaacactggg

SEQ ID NO: 923 - DNA, 82 bp, Homo sapiens
cgaaggggagccatggcggctgacagtcgggaggagaaagttacagaatgtctgaaggggacagtgtgggagaatccgtcca

SEQ ID NO: 924 - DNA, 100 bp, Homo sapiens
ttcacatcctggagatgtacgaggggtgtggtgctgcagcaggacagctacattgaggaccagaaactggtgctgagcgagagggcgctcactcgcagct

SEQ ID NO: 925 - DNA, 100 bp, Homo sapiens
cgcagtgtcctaagcctggaaagggaccgcagatgttcatggactgcagcccacaggccctgcccatcgcatcagaggacaccacggggcagcatgacca

SEQ ID NO: 926 - DNA, 101 bp, Homo sapiens
cagcacccgagcaaaccccagcaagatgcggaggctgcctcggcggagcagaggaaccacacgctgatcatgcgctcctttaccctcatcgtggaggcctg

SEQ ID NO: 927 - DNA, 49 bp, Homo sapiens
gtttgctatcgggactcggcgaggacgctctctatcaatatcagctcac

SEQ ID NO: 928 - DNA, 74 bp, Homo sapiens
gtcgataagctggaactgatggcacgtctgagaatggtggatgtggtggagaaagaagatgtgaatgaagccat

SEQ ID NO: 929 - DNA, 100 bp, Homo sapiens
aacaccagcaccgcagatgttgtcaaggtggcctaccaggaggccaggggtgtcgccatgtgtgcaacttgctttggtgtttgctgttttattgccacag

SEQ ID NO: 930 - DNA, 74 bp, Homo sapiens
ggaaaaggaggataagcaagtcgaatttttgtcttacgatgtggcaccatttattgagtttctgaaggccatac

SEQ ID NO: 931 - DNA, 50 bp, Homo sapiens
aagatggacggtttcgccggcagtctcgatctattaatgagatgaagcgg

SEQ ID NO: 932 - DNA, 75 bp, Homo sapiens
ttgcctgtgtcccacttgttcgcggcctatagcagcgtcaccctttacaccagaaagctggcgggcactatgggg

SEQ ID NO: 933 - DNA, 100 bp, Homo sapiens
tcaagagtcataggattagatgatccaagtcaccaagaaattactgtctcaagtgatacggtgagaaaaaccgtagcctcagagagatcacggtaccctg

SEQ ID NO: 934 - DNA, 100 bp, Homo sapiens
gggaagtgttgaaaaaaagcagacaatctgaggatgatgttgacttggggatccaaaggcacagtcttacctatttgatgaagatgtcttttgaaaggtg

SEQ ID NO: 935 - DNA, 100 bp, Homo sapiens
caaaaaaagctatcaaatatcagagcaaggcaagaagggaagctgaatatggtgggcatgatcagatagatttgtatgacgatgtcatatctccatctgc

SEQ ID NO: 936 - DNA, 100 bp, Homo sapiens
atgacagagaagatctttttgcagaaattccagtgtagaagttggcataagtagccaggaaaagatgcaatctgtgcagaagatgtttaaatgccaccct

SEQ ID NO: 937 - DNA, 93 bp, Homo sapiens
tctaaggatcatgtctgcgagccaggattcccgggccgagaactactggtggcgtggccagaacacacggacgctgtgtgtggggcccttccc

SEQ ID NO: 938 - DNA, 75 bp, Homo sapiens
gaaaggataagcctcgacttagaagctaccgagttaccctaagaaagcggagctccctgggtcctcagcagtgag

SEQ ID NO: 939 - DNA, 100 bp, Homo sapiens
tttatctgaggacaagtatccattaattattgtgtcagaagaggacaaagtattttggacagatatcatcaacgaagccattttcagtgccaaccgcctc

SEQ ID NO: 940 - DNA, 90 bp, Homo sapiens
cacctagccgggacgtcgtgggatccggaacagattcctggtcgggtggcttccagtggtcttcagtctgtcgtgcaccgatgagaactc

SEQ ID NO: 941 - DNA, 100 bp, Homo sapiens
tgacgaccaatagctcagatcctttccttaacagagactctccaacatgtgccttctgaccatacaaatgaaacttccaacagtactgtgaaaccaccaa

SEQ ID NO: 942 - DNA, 50 bp, Homo sapiens
gtggtaatgctcctttatattatgaggtgtctgaacacacacaattaagt

SEQ ID NO: 943 - DNA, 100 bp, Homo sapiens
tcctgactgggctcctgagcttcatggtggagaagggccccaccctgggcagtatagagacgtcggacttcacgtacgcctgcctcacaccttgcgatgc

SEQ ID NO: 944 - DNA, 80 bp, Homo sapiens
cggcaacctctacaaggccaagttcatctcctccgtcaccagccacatctaccaggtccaaccgtgactgccagatcgac

SEQ ID NO: 945 - DNA, 83 bp, Homo sapiens
gggcactgggcgactctgtgcctcgctgagggatgccggctccaggagcagcagtggaggtcgggaacgcctcattgtggagc

SEQ ID NO: 946 - DNA, 98 bp, Homo sapiens
gtcatattccacccattactaagactaaatccggctacttgcagaaatataaagaaatacagcacatcttggacagcacccagaaatcacccttttgt

SEQ ID NO: 947 - DNA, 90 bp, Homo sapiens
aaaagaggggccacttctcagcgattcacatgtagctttcagggaaacccagcgtttgctggcagaaccagttcctggcatcaaagccga

SEQ ID NO: 948 - DNA, 82 bp, Homo sapiens
ctcagcaagaacgggaacaaaactctggtgtgtagctgggacggtgctggtctgagctggaccttgtctgatggcttcctcc

SEQ ID NO: 949 - DNA, 50 bp, Homo sapiens
aagatacgtgggacatacagtgagagaagccataggaaaaggatacagag

SEQ ID NO: 950 - DNA, 74 bp, Homo sapiens
tggaccaagatcgagcccagcgtcaacttcctcaagtcgcccaaaggccgagtatgaagtgaccccggatgaca

SEQ ID NO: 951 - DNA, 83 bp, Homo sapiens
cgcttcgagcgcccgggggcggaccagaggagcgagagcagcaagaaccacacccagcagcaatgtcagcggaagtggaaacc

SEQ ID NO: 952 - DNA, 83 bp, Homo sapiens
ggagatgaaagctttgtatgaacaaaaccagtctgatgtgatgcagaaaatgcgattgtgcatatgggcggtcagtggttggg

SEQ ID NO: 953 - DNA, 83 bp, Homo sapiens
gttacggtttacagcgaagtccacccagcgtttccgagtctaccctgatgggagagtctgcatttccatcctccacgcgccag

SEQ ID NO: 954 - DNA, 100 bp, Homo sapiens
tttgtccgtgttcggtgaccgcagcactggggaaacgatccgctcccaaaacgggtgtccgcaatgttgccagtgtctgtctgcagattggctacccaac

SEQ ID NO: 955 - DNA, 83 bp, Homo sapiens
ggcggatggccccaggtgtaagcgcagaaagcaggcgaacccgcggcgcaataacggtgaggtttatacatggggcgacaatg

SEQ ID NO: 956 - DNA, 74 bp, Homo sapiens
cagaactcggccaccgccgtggcccagctctacaaaggtcaaaatgcagatcttcgtgaaaacccttaccggca

SEQ ID NO: 957 - DNA, 83 bp, Homo sapiens
aataaaacagctccagtacaagcacctcctgctccagtaattgaatttagagatgcatgaccggatggaacacctgatagaaa

SEQ ID NO: 958 - DNA, 75 bp, Homo sapiens
tgtgttcgggtttttctagaacacggagttgcattaaaatcctcccctactgaaagaaacggaggccaggataac

SEQ ID NO: 959 - DNA, 80 bp, Homo sapiens
ggtctggagtgcgtgggggaccggctgttggcgggctccagggagttccacgctgtccagttctctctgccgtgataaac

SEQ ID NO: 960 - DNA, 74 bp, Homo sapiens
tgaagaagctgtggggtgacaggtatgaacatgctaatgatgataagagcagtttgaaatcagatcccgaaggg

SEQ ID NO: 961 - DNA, 76 bp, Homo sapiens
gatcagagaccagggctcctgtggctcctgctgggttggatggcaagcatgtggtgtttggcaaagtgaaagaagg

SEQ ID NO: 962 - DNA, 75 bp, Homo sapiens
ggcacagagagggcctgggagcttgctgcagcttcaggtggcctgtgagaagaccgtgtctaccttgcaccacgt

SEQ ID NO: 963 - DNA, 83 bp, Homo sapiens
gaaacattaagacctactaccagaacactctgctccagccaaggtggtgagggcagctgttcctaaacagcgcaaaggcagca

SEQ ID NO: 964 - DNA, 83 bp, Homo sapiens
gtgaagtggtgagcctttttgtcactggtacttaaacttcacccttgtttagcccctattaaggttgctttggatgtaggaag

SEQ ID NO: 965 - DNA, 101 bp, Homo sapiens
gcaacacggccactgtgtacaagatatgtgcctggatgcagctcacctccggattcctagatgaggttatgaagaagtatggcagtttggttccactcagt

SEQ ID NO: 966 - DNA, 88 bp, Homo sapiens
gtaccaagaaaaataaagaagaggctgcagaatatgctaaacttttggccaagagaatgaaggaggtccctggagaaggagaaaaaca

SEQ ID NO: 967 - DNA, 96 bp, Homo sapiens
ctttggtagatgagactaacatgtatgaaggtgtaggaagaatcgttacagtgtttctgccacctctgtacaaaagacaattttacttgtgtgaca

SEQ ID NO: 968 - DNA, 128 bp, Homo sapiens
gaaaagagccctggaatatgaagagacatgagatggtggtagccaaacattcagcacaagaagctggctgagggcagtgcctacgaggaggtgcctacatccatgatgtactctgagaacgacatcag

SEQ ID NO: 969 - DNA, 100 bp, Homo sapiens
cgagatcgatgtgagcaacccgcaaacggtgggggtcggccggggccgcttcaccacttacgaaatcagggtcaagcaactagaagccatttgtgtcaag

SEQ ID NO: 970 - DNA, 125 bp, Homo sapiens
aaacctggggtcacagagatggacatggaatcgagggcagaagatctgggtttgagtccagcagtgctttaggtactccaaagattcaggtttactcacgtcatccagcagagaatggaaagtca

SEQ ID NO: 971 - DNA, 75 bp, Homo sapiens
ccacatggaaatgaattctaaggatgcctttgtggaactgtacggccccagcatgcggcctctgtttgatttctc

SEQ ID NO: 972 - DNA, 90 bp, Homo sapiens
tgagcaacatccgcgagttcctgcgcggctgcggggcttccctgcggctggaggaatcattaaccaatggcaacaggaatccaaggataa

SEQ ID NO: 973 - DNA, 100 bp, Homo sapiens
gctgaggcgggtggatcacgagtgccgggccagcccatgaacctgcgggccgaggccaggtcggagaccagcatcacgctgtcctggagccccccgcggc

SEQ ID NO: 974 - DNA, 100 bp, Homo sapiens
atatcagattcagaggatgacagttgcaagtatactctggttacaggtttatcctcactgcctgggagaagaagctcccgattgcaatactgaacattgg

SEQ ID NO: 975 - DNA, 83 bp, Homo sapiens
gttctgcagccagtgcggagagaggctgcctcctgcagcccccatagcaggtgagccagccatgagagggtatcttgtggcca

SEQ ID NO: 976 - DNA, 82 bp, Homo sapiens
cccaatgaccggcagcttgcccttcgagccaaatttctgcgccaggagatgaggggcggtagagccctggaatggagatgtc

SEQ ID NO: 977 - DNA, 101 bp, Homo sapiens
ggcaacggccaacttcggcaagatccagatcgggatttacgtggagatcaagcgcagcgatggacttttttcaggagatattgcacctttaatgcaagaaa

SEQ ID NO: 978 - DNA, 100 bp, Homo sapiens
atgaccggtacgaaatggaagatgggaaagttattgaacggctgggccagagcgtggttgctgaccagttgaaagaaagcgtggatacccatcaacgaag

SEQ ID NO: 979 - DNA, 127 bp, Homo sapiens
ccaaggagcagctggaggagcagctgcgcccgctgccagcacacgactacttcgagttcttcgccgccgacctgaggttgagactgagctaaagttaatctgttgtgacattctggatgtactggac

SEQ ID NO: 980 - DNA, 75 bp, Homo sapiens
gttgacaccttttgacatgagcatccagcagttccagtttgtggaagtcccaggcaatcactgtgtccacatgag

SEQ ID NO: 981 - DNA, 75 bp, Homo sapiens
gcctgaacggagtgtgcgacggattgggagaaaatggacccaagtggggtcaaagtgctggaaacagcagaggac

SEQ ID NO: 982 - DNA, 100 bp, Homo sapiens
aatagagatggttctcgataaactcagaccagaaaatgtccgggtggagagattcaaccagttagcgtgaaagttggagataaagttcttctcccagaat

SEQ ID NO: 983 - DNA, 90 bp, Homo sapiens
gagggtccagatttttcaacagatttcaattacaaacccccacagaacataccagaaggccctgaagaggaaagtgaggatgactctcat

SEQ ID NO: 984 - DNA, 100 bp, Homo sapiens
accactctctaagtgaaggagtcttcatgttcacatcggagtctgtgggagagggacacccgggcccaagaggatgctgagaaacttcggtccgttgtga

SEQ ID NO: 985 - DNA, 100 bp, Homo sapiens
gcagtatttctttggcatcactgcagctagtaatttgccttctggattattggaaagagtcaacctaaagcccagaaccctgctcgattgagccgcaaag

SEQ ID NO: 986 - DNA, 100 bp, Homo sapiens
atgggagagtacatgagacgatgaagcaaagacaatgcagatcttcgtgaagactctgactggtaagaccatcaccctcgaggttgagcccagtgacacc

SEQ ID NO: 987 - DNA, 90 bp, Homo sapiens
tgaagataacagtgaaatatcagattcagaggatgacagttgcaatgacaacactgcagctgaaggaggagttgctggatggagaggatt

SEQ ID NO: 988 - DNA, 75 bp, Homo sapiens
gatgtcaacaaccgtggctcacaagatgaaagagcaccaaccccaaggtccaggtggaggccatcgaagggggag

SEQ ID NO: 989 - DNA, 100 bp, Homo sapiens
gtcgcgggagcctttggggcaccacagagatgcggtacctggagtagaacagaaaaattattatgtctgtgttcccttgggactcattggaaattgtaca

SEQ ID NO: 990 - DNA, 76 bp, Homo sapiens
aggtggagcaggtcctgagcctcgagccgcagcacgagctcaaattccgagagcagtcattatggcgaaccttggc

SEQ ID NO: 991 - DNA, 98 bp, Homo sapiens
gcctccttaccatgaagccagtaagtcgtcgcacgctggactggatttattcagtgaagcctggaatggtcccccctccgccgggagaagaaagccag

SEQ ID NO: 992 - DNA, 100 bp, Homo sapiens
cgcccaggcgcctttgcaggctgcggtgggatttcgttttgcctccggttggggctgctgtttctcttcgccgacgacaaaacccactggccagtggatg

SEQ ID NO: 993 - DNA, 96 bp, Homo sapiens
cgctgcgcaccgtgtcctcctccgtcatcgagcagctcttcttcgtccgtttgatgtcatccatactgtagggccaatagccaggggccatattaa

SEQ ID NO: 994 - DNA, 95 bp, Homo sapiens
ctcttacgtctgcggaagtgcagctgcctcagttcttagcgcaggtacgtacctgtgggcatcatgttccttgttggaagcaagatcgtggaaat

SEQ ID NO: 995 - DNA, 144 bp, Homo sapiens
aagagactccaaggacaactgcaagggggaagtagagagataacaaaagctgctcagagtctcaatgaacttgagcaatgctaagaagacgtttggtttaaagaattaaaaggaagaacaacttaagagcttcttcaaaggtaa

SEQ ID NO: 996 - DNA, 50 bp, Homo sapiens
gcaccaaaacatcagggctgtggtcagcccaaggccaaccccactgtcac

SEQ ID NO: 997 - DNA, 105 bp, Homo sapiens
tctgcctacctgtcagccgtgggcaccttcacctgggtctgcacgccctttctgataaagctgtacaccaagcatgggactttgaaataccagacagactgtgcc

SEQ ID NO: 998 - DNA, 101 bp, Homo sapiens
ttcgccaccacgcactgggtcgtcacggaggacgggaaaatccagcagcaggacccagatgatgtggtaccagttggccaaagaagagcctggtgttggtg

SEQ ID NO: 999 - DNA, 88 bp, Homo sapiens
cagcggcagcagcagcggcgggaggagcctccggggacttgtcttacaaggaccggcactggcatgaagcctgtttccactgctcgca

SEQ ID NO: 1000 - DNA, 82 bp, Homo sapiens
cccacggaggaagagtgggagtttgccgcccgagggggcttgaagggctgggcttggagcccacaggaccctagaagtcctt

SEQ ID NO: 1001 - DNA, 75 bp, Homo sapiens
gccggacggcgtcctcagctatcagtataaaagaacgtgtggatcactttgctgagtacatccaagatttgaaga

SEQ ID NO: 1002 - DNA, 101 bp, Homo sapiens
gagggaaaagtgtatgcgttaaaaggggaaaggctcgttggtggagctttgaaagaactcttaaaacgcctagatgacgtgtccaacgatgtgaggatggc

SEQ ID NO: 1003 - DNA, 83 bp, Homo sapiens
ggcaaagaaagaatgtcactaatttatttacagtgagggccccaaggctgttgcagctcctcgacctgatcggttggtcaatc

SEQ ID NO: 1004 - DNA, 87 bp, Homo sapiens
acagccaagcaccaacaccatggttcatgcatgggagatctcagaccagttgttacagatccggcaggatgtggagtcatgctattt

SEQ ID NO: 1005 - DNA, 99 bp, Homo sapiens
tgatctacaagaaaatccacaagaacgcactttcctcccaggaatccctttgcccacgtccagctgaagccgacagtgaccaacgacaggtctgccccc

SEQ ID NO: 1006 - DNA, 96 bp, Homo sapiens
cctctcctcttcgtctccgccatcagctcggcagtcgcgaagcagcaaccatggtgtcatggagaaactccagctgggcccagagattctgcagcg

SEQ ID NO: 1007 - DNA, 48 bp, Homo sapiens
tatggtagatggatatagagatggctcacacagtcgacaaaagaaaac

SEQ ID NO: 1008 - DNA, 75 bp, Homo sapiens
gcagccgagtcactactgcctgcctgcctgcctgctacgctggtggcgcggtggcgttctcccccggaaacctca

SEQ ID NO: 1009 - DNA, 75 bp, Homo sapiens
ccaggacctccactaatcaccagaacaaaatgtgcagtaatatttggtgaagatgttgcctttggtggagtcttt

SEQ ID NO: 1010 - DNA, 100 bp, Homo sapiens
cagaaagagtcaacagcagtggcaacagggatgcaagtattggaatggaatggaattcccttgacttctaaaacatatgaagaagttcagagtatcatta

SEQ ID NO: 1011 - DNA, 98 bp, Homo sapiens
tgacgcttgatgagaaggacccacggcgtctgttcgaagtttacaatgcactcagatcttggaaaaattattcagagtctgttggatgagttttggaa

SEQ ID NO: 1012 - DNA, 50 bp, Homo sapiens
ccagtatatacatcaagtcactgagatgaggagcttttctctggaatgta

SEQ ID NO: 1013 - DNA, 100 bp, Homo sapiens
aactgttgaactcagctgcctgtaggttgaattgaccaaagcaatggtgatggagaagcctagtcccctgctggtcgggcgggaatttgtgagacagtat

SEQ ID NO: 1014 - DNA, 80 bp, Homo sapiens
tcagatgcaattggaccaagagaacaatgggaaccagtctttcaaaatgtggtcgttctcgttaccggaccacttcttca

SEQ ID NO: 1015 - DNA, 100 bp, Homo sapiens
tcttccaggagctccagatcgtgcacgagaccggctacttctcggcgctgccgtctctggaggagtactggcaacagagtcatcttagtgggatttgggg

SEQ ID NO: 1016 - DNA, 83 bp, Homo sapiens
cgctaagttgctgatcgtggcggtgctcgcggtgaggatcgatgacctggaccacctcccggagaccaccaccatcgacgcct

SEQ ID NO: 1017 - DNA, 96 bp, Homo sapiens
atgcagatggggaggacgcctatgccatgaagcgggacctcactcagatggccgacgaggccgccgcccaccgcccgccgccatggggctgaaggc

SEQ ID NO: 1018 - DNA, 100 bp, Homo sapiens
cggccgcaccggcgcgaacaaagtgcgttcctcccggcgcggcggcgccagcccgcgcggggaccgccaccgagcgagtactatactggcaattgctgga

SEQ ID NO: 1019 - DNA, 75 bp, Homo sapiens
ggaagctgcagcagaagctgtaaaactgaactgcagaattttgggagtagattttggaaccagtactagcagtgg

SEQ ID NO: 1020 - DNA, 83 bp, Homo sapiens
tcctgctcctgaacttcctgcgctcgcactgatcctgaacccgccgccctccccggccacggacccctccctgtacaacatgg

SEQ ID NO: 1021 - DNA, 98 bp, Homo sapiens
gatcttccttggagaccctggaagatattgaggagaacgcccctctccggaggcagtgtgtgaagaaaccctgaaggtcgggcctcaagtaggtctct

SEQ ID NO: 1022 - DNA, 101 bp, Homo sapiens
gcgctgccgccgcgtcctcagccaccgctccctcttcccacggcatgaacaaccgggaggtgctggagcaggtggagcgaggctacaggatgccctgcccg

SEQ ID NO: 1023 - DNA, 75 bp, Homo sapiens
ctggagcctcagttggaagcagccgatccagcctgcggagcctgtggggcagagagctggcggtcaccatggcaa

SEQ ID NO: 1024 - DNA, 100 bp, Homo sapiens
ccgatggaatcccagaggaaactgacggagacgcagatgtggacttgaaagaagctgcagcggaggaaggcgagatggagcacctgaaagcctgtgcaga

SEQ ID NO: 1025 - DNA, 75 bp, Homo sapiens
gaggtggcggcacctacaccaagggcgccttccagcaagccgcggaggaggaagccaagaatctggtgagcgaag

SEQ ID NO: 1026 - DNA, 97 bp, Homo sapiens
ggcacctccgagcgcaaggacagcgcgaggtccgcgcagcccagcgcagccatgtgcgcgcggagccatggttatcatgtcggagttcagcgcggac

SEQ ID NO: 1027 - DNA, 100 bp, Homo sapiens
gtgaaacaccactgaagcattgccaagttttacagctcccagcacagtaggaaagagaaatttgagtcctagtcaagaggaagctggcctggaggacgga

SEQ ID NO: 1028 - DNA, 74 bp, Homo sapiens
ctcttcctgaggttttcctaagccatcccctggcggaaccgcccccagggtatcactgggatacatcagattgg

SEQ ID NO: 1029 - DNA, 100 bp, Homo sapiens
ttttttcttggagccagcaataattatcacaattactgatgggagcaagttgactaccaccagtggagtccaggatgagcaactggaacagatccagaag

SEQ ID NO: 1030 - DNA, 83 bp, Homo sapiens
tgaagatgtcggccttctgagccgactgcggtggtcaagaggtggtcaagtaccccctgcacgccatcatggagatcaaggag

SEQ ID NO: 1031 - DNA, 84 bp, Homo sapiens
actctaaacggactcatgtactttgtcaggaatactcccccagttgcaagaggcgcaggaccgtggaagacttcaacaaattct

SEQ ID NO: 1032 - DNA, 98 bp, Homo sapiens
gaagagaaaaagcccaggcataaaatcatctccatattctcaggcacagagaaagccgtgctggtatagaggactctaagaagtggggcatgctgttt

SEQ ID NO: 1033 - DNA, 100 bp, Homo sapiens
ttacactaaatctttggagaatcatgagaaatgaggttggtttcatcgactacattgtccatccattgtgggagacatgggcagatttggtacagcctga

SEQ ID NO: 1034 - DNA, 50 bp, Homo sapiens
ggagcccccagcgcagcggccgcgtgggagcgatgcagcctcaatccgga

SEQ ID NO: 1035 - DNA, 75 bp, Homo sapiens
cctccaggccggctctccatgatgtccttcatcctcaacgccctcacctgccaagctacatcagtgatgtgggac

SEQ ID NO: 1036 - DNA, 50 bp, Homo sapiens
tggtgcagctcaatcctttcccttcaggataccactacgtctgcctgcgg

SEQ ID NO: 1037 - DNA, 83 bp, Homo sapiens
cagtgacatcttcttgctggtcacagccagcgtctgctacctctggtttgggaaggcatgtcgggccccaggcctgtggtgct

SEQ ID NO: 1038 - DNA, 83 bp, Homo sapiens
cggggagacagcacgccagtgagggagatggagaccaatcacccacccagtgtgcggacatggatttgattgacatactttgg

SEQ ID NO: 1039 - DNA, 90 bp, Homo sapiens
ccctattgcttctgtgcctggatccactaatacgggtactgttccgggatcagagaaagacagcctatatatgcaaacagatttgcagta

SEQ ID NO: 1040 - DNA, 100 bp, Homo sapiens
ctcagtgaaagtgccaatcaggtctttctgattccaaatcctttatttgatctggctggaataacgtgtggacactttctggtacctttttggaccttct

SEQ ID NO: 1041 - DNA, 100 bp, Homo sapiens
cttcatcgacagggaccctacagtcttcgcccccatcctcaacttcctgcgcaccaaagagttggatcccagctcactgataaccttgttgagccggtcg

SEQ ID NO: 1042 - DNA, 80 bp, Homo sapiens
gcccgagtggatcggggacggagagaacacgagcccatcagtgggcgacagatgcgaaagaaacgagttccagtgccaag

SEQ ID NO: 1043 - DNA, 100 bp, Homo sapiens
atgtactccagttgctggatatccaagcctctcagcttcggagaatggagtcttccatcaatcatatctcacagctggtcctatagtacccctcctcagg

SEQ ID NO: 1044 - DNA, 83 bp, Homo sapiens
gtgaaaaaccggagaagagaaactaaaaggacagtagaaaaggcttttccagtttgcataatacctagaggatcaagacataa

SEQ ID NO: 1045 - DNA, 100 bp, Homo sapiens
caagaggaaagctgatgccacttcttcccaagacagtgaattagaagtgaaagacccctgacaaaagacaatcatcttctgggtacatttgatctgactg

SEQ ID NO: 1046 - DNA, 81 bp, Homo sapiens
cgcagcctcgcgcccgccgccgcccgtccccagtggttcagcactgagtcatgcttgcttctgctacgcactgatttgttc

SEQ ID NO: 1047 - DNA, 100 bp, Homo sapiens
cgtgtatatattgcatcttcctctggctctacagcggaacttttcacacctgagtgcaaattcaaagaatcagtgtttgaaaattattatgtgacatatt

SEQ ID NO: 1048 - DNA, 80 bp, Homo sapiens
ctcctgcacccgggaggactatgagtggattcagtggtcccaatttaaaggctattttattttcaaactggagaaagtga

SEQ ID NO: 1049 - DNA, 100 bp, Homo sapiens
cgagaggaatggaacttatcaactggacaggccagcctgtttctggaccagtacagagccagccttgttgatgcaataaagagattactccagcccaggg

SEQ ID NO: 1050 - DNA, 100 bp, Homo sapiens
ctcgaacggctcccacagccgggcgttgggggaaagtgtactaatggtcacttgatgtgcgctggctgttttatccacctactagcagatgcccggctga

SEQ ID NO: 1051 - DNA, 73 bp, Homo sapiens
ggagacctggagaccgttacgacggcatggaatctggaaaaccaggggctcatgtaactgtgaagaagctgtt

SEQ ID NO: 1052 - DNA, 100 bp, Homo sapiens
cgggagccctcgcgacgcgcccggcccggagcccccagcgcagcggccgcggttggaatcgggaggtagtaatcctacaaccagtgattcttacggtgac

SEQ ID NO: 1053 - DNA, 100 bp, Homo sapiens
agatcaccttgtggaagatttaattatttctgagttgcgagagaggtttccttcacacagcccatctgcacaggggaactgaggagaaacaggaatgaag

SEQ ID NO: 1054 - DNA, 101 bp, Homo sapiens
gggtgaatcatttgacaaactgctttcccatagagaatctgaattatccagaacagaaagttgtgactgttggacagttcaaaattggtctgatccatgga

SEQ ID NO: 1055 - DNA, 83 bp, Homo sapiens
ggtgggcaacttacccgagaacgtgcgggaagagaagatcatcgagcatttcaaacgttcaaatctgaacatcaatgatgtac

SEQ ID NO: 1056 - DNA, 90 bp, Homo sapiens
ggagcaccttgccagcaagatccgagtggatatcaaagtattgcagagtgccttagcagccatccgacatgcccgctggttcgaggaaaa

SEQ ID NO: 1057 - DNA, 112 bp, Homo sapiens
gttttctactgtaaagtcaccaacgagatcttccgccactacgattcaaagaggaaatctcccggaggtttaaggctcagcaggatcagctggtcctgatcttcgcaggcaa

SEQ ID NO: 1058 - DNA, 50 bp, Homo sapiens
agcaactcccccatcgtatgaatctagcgacaccacaggcaagctgggct

SEQ ID NO: 1059 - DNA, 100 bp, Homo sapiens
cacggcactgcatgctgctgcccgccagggcccagatgatacatgttataaagccagttttaccaaagctaaacaatctgtttgaatatgcggtgtcaga

SEQ ID NO: 1060 - DNA, 75 bp, Homo sapiens
tgcgggccccgctccgcttcgaatggaccctcaggcagtttgattgcatctacacaagataaacccaaccagcag

SEQ ID NO: 1061 - DNA, 100 bp, Homo sapiens
agtcaaaacaaataagttatgctatgaggatgacaaactctggagtaattggagccaagaaatgagtataggcgcagttgtgtagcagttgagtaatgct

SEQ ID NO: 1062 - DNA, 75 bp, Homo sapiens
cgtggccgctgtccaggagctctgctctcccctccaggcaaagcgaaggctggagctaggagaaagcggtcatca

SEQ ID NO: 1063 - DNA, 90 bp, Homo sapiens
caagaagaacgctctcatccggaggcaggaccagctgcagctgctggtctgttcctggtttcccagatgcataaaggaagacatatccct

SEQ ID NO: 1064 - DNA, 95 bp, Homo sapiens
cacttcctcagaatgtgaaggattatttactcgatgatggaactctggtggtttcaggaagtgagacggtttaagcggaagcatcttactgccat

SEQ ID NO: 1065 - DNA, 75 bp, Homo sapiens
cggcgcgggaggtgaagttgctgctgttgggtgccggggacacgggcggcaagccgtccacgcggggcggtgacc

SEQ ID NO: 1066 - DNA, 100 bp, Homo sapiens
ctctacgcctcctacgtttacctgtccatgtagactatgccagttactaccagggcctatgggattgccatggtgaccagccagatgaactgtccttcca

SEQ ID NO: 1067 - DNA, 52 bp, Homo sapiens
gccaagtccgccagcctcgctccaaggcactggatccagcatcctctccgcc

SEQ ID NO: 1068 - DNA, 98 bp, Homo sapiens
cgcccgccaccggctccctcgggagctcatcttcgtggggcgtgaggagtgtgagctcatgctacagatgctttcttcacatgtcgaaaaaatgtcct

SEQ ID NO: 1069 - DNA, 96 bp, Homo sapiens
ggccttggaccaggccaacaagaatcattgatcagcgattcgagaaggtttcctactttgtatttggtgatttcaacttccggctggattccaagt

SEQ ID NO: 1070 - DNA, 74 bp, Homo sapiens
gtcgcaagcagcttcattgacttcctgcccctaaaatgggttttgacctgtagcagagaaccaattctggagaa

SEQ ID NO: 1071 - DNA, 97 bp, Homo sapiens
cctgatatctatgctgccggtgacatctgtactacatcctggcagctgagcccagtctggcagcagcagcctgagggaactggcatgatagatgaag

SEQ ID NO: 1072 - DNA, 100 bp, Homo sapiens
ctgctaagtactccggttcccagcttctgcaaaagtttctgtagaaaatgtttcctgactgcaatgagggaaagcggagcacattgtcccctatgtcgtg

SEQ ID NO: 1073 - DNA, 96 bp, Homo sapiens
ggaagcagcaccaagttcacggccaacgccttggcactagggtggccagcatcgaaatgttcagccttttagtgatgaagatgcatcaattgaaac

SEQ ID NO: 1074 - DNA, 75 bp, Homo sapiens
gtccctctgaaaactgaggaatttgaagtgaccaaaacagcaggccgattctttgatgaaaatgaatcccctgtt

SEQ ID NO: 1075 - DNA, 75 bp, Homo sapiens
gatgattttaacctggaggatgcagtgaaagaaacttcctcagtaaagcctcgttttgacaggagccattcaagt

SEQ ID NO: 1076 - DNA, 98 bp, Homo sapiens
ccggacgcgccgcgccctggcggctctagggaccccccccgcgcctgcacttagccccgcgcccgagagagcatcagtgatgtcacgtttggagcagg

SEQ ID NO: 1077 - DNA, 75 bp, Homo sapiens
gcaagcatggagttggcaccccaaaagaaaggtttaatagcatacaggccctgtcagaaacctcatttgcaggac

SEQ ID NO: 1078 - DNA, 73 bp, Homo sapiens
gaaatttaaatttctgggacttgaaaggcagagtatccagtgatatggagaatgcagaaaacattctcacagt

SEQ ID NO: 1079 - DNA, 83 bp, Homo sapiens
gcaagattacaggaatttcagaattttgaacaaatctttgagcccaaacaaattcgaatatcttctaaaacaggaatacctct

SEQ ID NO: 1080 - DNA, 100 bp, Homo sapiens
gattctgcaagaccatgtctacacagacaacaccatcttctgaatgacagaggatcagatctggcaggggatcgacattgagaccaagatgcacgtccgc

SEQ ID NO: 1081 - DNA, 100 bp, Homo sapiens
gttcgcctcagacgcggtggagccgccggagtctgagaaggtgttcatgaagtctgtgaagctggagtgggtgcaagacaacatcagggcagcccaagat

SEQ ID NO: 1082 - DNA, 74 bp, Homo sapiens
tttctgggaatatggtagatggatatagagataataactgaagtgaagtgatggactccgatttggagagtagt

SEQ ID NO: 1083 - DNA, 100 bp, Homo sapiens
gacgggaactttgacaccgtggccatgctccgaggggagatgtttgtcttcaagttccgccatggagtcatagttgcagctgactccagggctacagcgg

SEQ ID NO: 1084 - DNA, 98 bp, Homo sapiens
tgaggttgcagttggcgtgaagatggaacttgctaaggaagaaaagtgtgaatttctgccattcctgtccccacggaaggttatagtaaaaggtggga

SEQ ID NO: 1085 - DNA, 82 bp, Homo sapiens
cggcagaggatccagtgttcaccatcctggccccggaaggatgaagctggaggcagattcgtcgctttctctggagaaggac

SEQ ID NO: 1086 - DNA, 50 bp, Homo sapiens
ggcaccaggaagcgaaggctgttgattatggaagattcccacaagagtac

SEQ ID NO: 1087 - DNA, 100 bp, Homo sapiens
cgcagatgtggacttgaaagaagctgcagcggaggaaggcgaggacaccattgcagtggctagatttattgtttttttagcttcttcatctacaagcaga

SEQ ID NO: 1088 - DNA, 75 bp, Homo sapiens
cgagagagatgtttgagaagctgactgaggaaggctctcccaagggacagacttctcgctctgtcgcccaggctg

SEQ ID NO: 1089 - DNA, 130 bp, Homo sapiens
ggaaatcccaaagcctcgaatggctgccactcagaaacttgttaaagacattattggattaaagcaaggagagccaatcatgactggcaaaacacagaccagcaacgtcaccaataagaatgaccccaag

SEQ ID NO: 1090 - DNA, 82 bp, Homo sapiens
gagtttctcggtgtgagctggaggcgagaaccactgtctctgatcaacgtgcggaagaggaacgtggaatctggggaagaag

SEQ ID NO: 1091 - DNA, 100 bp, Homo sapiens
atgtgcaggctggaagtcttacagctaaggtcacagcaccacagggcatcattgcagaatacaacaaaatcaatgatgtaaaggaagatgatgacacgga

SEQ ID NO: 1092 - DNA, 87 bp, Homo sapiens
agaatccgccatgggctactcagtttacagccactgcagtatcacagccaggtatgacagcagttatctgtacttaccctcttgaca

SEQ ID NO: 1093 - DNA, 83 bp, Homo sapiens
gcattcttattttactgtgcctgataccagagaacttcccagcatacctgagaatgaggaggaagccaagaatctggtgagcg

SEQ ID NO: 1094 - DNA, 82 bp, Homo sapiens
atggtctacaagactctcttcgctctttgcatcttaactgcagaagctccaccatgaggcgaggtggatggaggaagcgagc

SEQ ID NO: 1095 - DNA, 114 bp, Homo sapiens
cacataggcaaggaagctggtgcatgcagtgtctctgggcaaggttatgcaagccagaacacaaagcgtgaatccggaagaaaagttcaatctggaaacatcaatgctgccaag

SEQ ID NO: 1096 - DNA, 78 bp, Homo sapiens
tgggggtcgagcacataacggggttcgggtgtctcgtgtgtgaacatcacagatgggcttaggtcacgagcaaggatt

SEQ ID NO: 1097 - DNA, 132 bp, Homo sapiens
tgctggagcacttgagccacgtgcatgaaccaaacccacttcgttcaagacaggtgtttaagcgtatcgtgatttccgatacccacctggacacccccaggagtataaacacaacatctactattggcatgt

SEQ ID NO: 1098 - DNA, 105 bp, Homo sapiens
ctccacgtctggaataatgggtactctttcctcgtggaatttgaagattctacagataaatcagaattgccaagaagatgcttttagaagaaattaaagccaatc

SEQ ID NO: 1099 - DNA, 75 bp, Homo sapiens
agtacaagcttacgtctctgctcttcagtacaatcctctattgacctgaaaagtggttctggaaaagtgtaccaa

SEQ ID NO: 1100 - DNA, 90 bp, Homo sapiens
gaaattttcaaacttagactaggacatctcaaaaaggagaggagccaagagcaggcaaagaggaatctggagtttcagtctccaactctc

SEQ ID NO: 1101 - DNA, 75 bp, Homo sapiens
cggctgtcaagctggcgcgccagagcggcatcgaggtgatgtgtccaatctagatcccaacttctcatttgaagg

SEQ ID NO: 1102 - DNA, 90 bp, Homo sapiens
gtgcgggccccgctccgcttcgaatgggaatttgagcagtttaacaggaggctaaatgaagtttctaagagagttcgcatacccttgcct

SEQ ID NO: 1103 - DNA, 90 bp, Homo sapiens
tcatcatgaaggacgtgcccgactggaaggaagatgttaccgagtacttcagtgaattccttagtgcaggggaacggagtcttgaattcc

SEQ ID NO: 1104 - DNA, 82 bp, Homo sapiens
ctgctcctgggtgccgtggcatgtcgatttgtccttcactacagaatatattgtgaggataaacagaccttcttacaggatt

SEQ ID NO: 1105 - DNA, 74 bp, Homo sapiens
catcgactgtggaatcaattatgtcccaggaagcgaaatgtggtgattttaaagctgttatagtggaagtatca

SEQ ID NO: 1106 - DNA, 101 bp, Homo sapiens
tgtcatcagaagaaattcaacagagagctcaccagattactgatgaggtgaattcatcattggccgagttatcaaagccatgaataacagctggcatccgg

SEQ ID NO: 1107 - DNA, 113 bp, Homo sapiens
aggaggaccatccctttgagtatcggaaaaaggaaggagaaaagatccggaagaaatatccggacagggtcccctggaagatagatgataagcctgtaaaaattgacaagtgg

SEQ ID NO: 1108 - DNA, 124 bp, Homo sapiens
tttgacttggctgtcgaggtggagaaccagggtgtgttccagccactcccagccatgctgtgacctacaagcaaactaaatagccaacatttctgaacccctaagtctcctgtgccaagctgct

SEQ ID NO: 1109 - DNA, 90 bp, Homo sapiens
gtggggtgttccacgctatgttgggagtgttcgctttcgagtggatatcaaagtattgcagagtgccttagcagccatccgacatgcccg

SEQ ID NO: 1110 - DNA, 100 bp, Homo sapiens
atgggccagtgcggcatcacctcctccaagaccgtgctggtctttctcaacctcatcttctgggtgtacgaagccatcgacagcagagatggagcatctt

SEQ ID NO: 1111 - DNA, 83 bp, Homo sapiens
tatcaagaaccacaagtggtttgccacaactgactggattgccatctaccagaggaagttcctcgatgaccccggcctgagga

SEQ ID NO: 1112 - DNA, 90 bp, Homo sapiens
gttcaaggaggccttccagctgtttgaccgaacagagcaaatttttcagaacataaaacaagaatatagtcgttatcagaggtggagaca

SEQ ID NO: 1113 - DNA, 100 bp, Homo sapiens
gaagggaaggaaatcatgtcaagcgaagccttgaaaaagctgccctgagacggtgtcccgccgaaagaatttgttcctgttgaagagtggctcctcttct

SEQ ID NO: 1114 - DNA, 75 bp, Homo sapiens
tccgcctgcctgcgcacctgcgagatgaagccttatctaaatcagtgcctgtcacagtggatgatgatgatgacg

SEQ ID NO: 1115 - DNA, 82 bp, Homo sapiens
gaagctcctggcaaaactgcgctttctggctgaggaggatcccaaaatggctgggcgaaaacttgctctaaaaaccattgac

SEQ ID NO: 1116 - DNA, 95 bp, Homo sapiens
ttacaaagcatgggagtgcagctgcctgacaacaccgatcacagaccaacaagtctaattggtagctgcaccaattcaagctatgaagatatggg

SEQ ID NO: 1117 - DNA, 90 bp, Homo sapiens
cttgggaggctccgttgcctgctcccggagggagacgcgctgccgaggagaacccagcggcccctcttggagtctgtgccttatgaagaa

SEQ ID NO: 1118 - DNA, 98 bp, Homo sapiens
agctggcttctggagggcaccacatagaagtcttcccatgcacaagatgattaatacagatcttagcagaatcttgaaaagcccagagatccaaagag

SEQ ID NO: 1119 - DNA, 75 bp, Homo sapiens
gaggaggggaggagggccactgggctcccagcagcccaggttcagcctcgtggcaatacagcttcactgatagct

SEQ ID NO: 1120 - DNA, 88 bp, Homo sapiens
ttgttggacatgctaaacagagaatacaagaggattatcttagaattttaagatacttcagggtcctgggaagcctcctttctgctca

SEQ ID NO: 1121 - DNA, 74 bp, Homo sapiens
ttatgtgggtgccaaagtcttcctcatctacgaggttgactatagtcaatggggccaatggagccaagtgtatg

SEQ ID NO: 1122 - DNA, 96 bp, Homo sapiens
cgacgcggaggcggcagcggcgggcctgaggcgaaggagcggccgggagcccgccgcgctggtagcgacctctgtgagtgaaagccttcagaggga

SEQ ID NO: 1123 - DNA, 74 bp, Homo sapiens
gatgtacgatctcatgaatctgtgctggacatacgaaaattggattttgccaataatgtccagctgtccttgac

SEQ ID NO: 1124 - DNA, 100 bp, Homo sapiens
atgacacttttccagaatacaaggagaccactgaggaatcgatcaaggaaactgagagggtgataaaagaaaatgtggctgaagttacccgaagttcagc

SEQ ID NO: 1125 - DNA, 98 bp, Homo sapiens
cttgctctgcaaaaggccaaagaagtggctgaagtcagccccatgtctgccgcgaacatctccatcgccgcggcgaccattgacgaggtggagacgga

SEQ ID NO: 1126 - DNA, 75 bp, Homo sapiens
aaacaaccagaagaagtatttgatgtcttagagaaacttggagaaggaaactggcgatggaatatgagaggagcc

SEQ ID NO: 1127 - DNA, 82 bp, Homo sapiens
gacttcttactgtccagcatcctttagaagaatccaggatgcctaaatcaaaggaacttgtttcttcaagctcttctggcag

SEQ ID NO: 1128 - DNA, 74 bp, Homo sapiens
gtggagtatctggtgaaatggagaggctggtcgcccaaatgtgaagttcatttccaatccgccctccatggtgg

SEQ ID NO: 1129 - DNA, 82 bp, Homo sapiens
ctctcccaactggctggtctctgccgcacactgctacatcgatgacagaggattcagtcagagcaccataacatggtgtggg

SEQ ID NO: 1130 - DNA, 75 bp, Homo sapiens
cccagaagaacaattagggtgacgtgtgcattgagtaaacatcctgtttgaccaaactcagagatcaattaaggc

SEQ ID NO: 1131 - DNA, 82 bp, Homo sapiens
agaagtcgcgtgtctaggtgagtcgcggtgggtcctcgcttgcagttcagcgaccacgccccactgcaggccccaccatggc

SEQ ID NO: 1132 - DNA, 75 bp, Homo sapiens
aattgatcccaagttgtcgacgaccgacagggtggtgaaagatattgatgatgttaagaagttcaaaccgggtta

SEQ ID NO: 1133 - DNA, 100 bp, Homo sapiens
tacagacagctcaggctgcccagatggtggctcccggagtccagacaggtgatttggcttctgcacagttaggaggagcaccaaaccgatgggaggtttt

SEQ ID NO: 1134 - DNA, 75 bp, Homo sapiens
gttcaggctacggtgagccgaaggatcaacggccaccccgggaagtccacgcgcctggcgggcttgtggaagctg

SEQ ID NO: 1135 - DNA, 140 bp, Homo sapiens
gctctggatgctgccggacaccgtggcgcctcaggaactgaaccctcgcggccgcaacgtgtgccgtgctcccgggcgggcaaaactgttccgatttgcctctgagaacgatctcccagaatggaaggagcgaggcactg

SEQ ID NO: 1136 - DNA, 100 bp, Homo sapiens
cctacgtggcagctgtgaaaaaagccatttccgaaggactttgcctcccgggccaaactggcagttcaaaaactagtacagaaagttggattttttggaa

SEQ ID NO: 1137 - DNA, 98 bp, Homo sapiens
ccagatgacttcctgaacagtgtggatgagatggatacagtatttgattttcatcaagcagctgatggtatccaggaacaacagagacaagaacaagc

SEQ ID NO: 1138 - DNA, 74 bp, Homo sapiens
ctggattatgcaaagaaaaatgaacccaaacatagacttgcaagaggaagtttgcctggctagtgaaaggtcaa

SEQ ID NO: 1139 - DNA, 82 bp, Homo sapiens
gaatgaatccttctagagacgtccacgaacaagttgaaatcatcgcagaaggataaagttcgtcagtttatgatcttcacac

SEQ ID NO: 1140 - DNA, 74 bp, Homo sapiens
tggaacaagaagagtctaggacagtgcagagaggtgatttccaagatggagtctcactctgtcgcccaggctgg

SEQ ID NO: 1141 - DNA, 98 bp, Homo sapiens
ttcccttcgctccggcccggtgaaactgaacttataatcgtcactggattgtacttgaagaaacagaagctcaacatttatatcagtccatcttgcct

SEQ ID NO: 1142 - DNA, 87 bp, Homo sapiens
tgatcctgaaaacagaaggaaattgaaggaacttggagttaatggtctaatttatgatagttcaaatctgaacatcaatgatgtact

SEQ ID NO: 1143 - DNA, 88 bp, Homo sapiens
ctcccctgagtccggagctaccaaaaccatcctcctgagagaatggcttactacacctccaggatgcagttccccatggagatggcgg

SEQ ID NO: 1144 - DNA, 50 bp, Homo sapiens
gtgtaatacaagatgctttaaagaagttatgccccgtggtgccctgcttg

SEQ ID NO: 1145 - DNA, 50 bp, Homo sapiens
attatctaccacccgagatgccccaagaggaggctgcggaggaggaggag

SEQ ID NO: 1146 - DNA, 100 bp, Homo sapiens
ctcgatgctggcctggagcagaaactgagctggaccactggagcctcgcagaagaaggaggaggagtcggcgggcggcaccaagggcagcagcaagaagg

SEQ ID NO: 1147 - DNA, 100 bp, Homo sapiens
caatggccgctgagaacagcaagcagttttggaagaggagcgctaagctgccggggagatgccagaccagtttgaccaggcggttgtgctgaaccagctg

SEQ ID NO: 1148 - DNA, 82 bp, Homo sapiens
ctctagaccttgccaagatggcacagacatgggaaagcggaaccaccaaaaggagtgatgatcaacgatctcatgataaatc

SEQ ID NO: 1149 - DNA, 90 bp, Homo sapiens
agcgcgatgtggagcgcttctttaagggctacgggaagatcctggaggtggatctgaagaacgggcgagaaccactgtctctgatcaacg

SEQ ID NO: 1150 - DNA, 82 bp, Homo sapiens
tttatccatggatgacttgcttggaggtacttggaaggctccatcgcccctgaagacaaaggaagctgctcattgctgcctg

SEQ ID NO: 1151 - DNA, 74 bp, Homo sapiens
tggcacaccagcgcccgcaggatgcccagacaggtgatttggcttctgcacagttaggaggagcaccaaaccga

SEQ ID NO: 1152 - DNA, 102 bp, Homo sapiens
agcccgaggcggagcccggctccccacagaagctcatccgcaaggtgtccacgtcgggtcagatccgacagaagcaacatggccaacgccctggccagcgcc

SEQ ID NO: 1153 - DNA, 100 bp, Homo sapiens
gtcgtcactatgtggcccatgtgaagatggagctaacacccattatggagattaaccacttttcatcaggtttttaacttaagtcgtgaggaatacaacg

SEQ ID NO: 1154 - DNA, 100 bp, Homo sapiens
tatgttttcagaggcatagaatcttcaggaaaatactggagttcctgagatctcaaggaggaccatgacatcatggaagccgatctggacaaagacgaac

SEQ ID NO: 1155 - DNA, 88 bp, Homo sapiens
cagctgaacttcagtgcctaacagtggctggccattcaccggagatgtcagcgtctgttggactccgctcacatcgagacaagaccgc

SEQ ID NO: 1156 - DNA, 101 bp, Homo sapiens
aggggccgtgggggtcgtgggccggagcgcctccttcgcaggcttcagcagtgcacagagccggaggatcgcgctcactcagtaacttgatggattttgtg

SEQ ID NO: 1157 - DNA, 100 bp, Homo sapiens
agatggagacaccctctgggggtcctctctgagtcaaatccagtggtggtactggccatgccctacgatacgcccgtgcctggctatcgcaacaatgttg

SEQ ID NO: 1158 - DNA, 100 bp, Homo sapiens
agcatgtcggtggcggggctgaagaagcagttctacaaggcgagccaggtgacctggaactcccctcggtactgacatgatgacagtgtgcaggccggcc

SEQ ID NO: 1159 - DNA, 75 bp, Homo sapiens
gccaacccaaattaccttaattattttaccaaatgttgcaagaactctggagttcttatggtagtaaaatgccgg

SEQ ID NO: 1160 - DNA, 82 bp, Homo sapiens
ggccagccaggccgcgctcttcgagaagaacaagacaagaagctccgccacgcccgcagtggggcccccgctggagggccca

SEQ ID NO: 1161 - DNA, 75 bp, Homo sapiens
cacaaacggcgcacattggtatgatgtggaagctttgacagatccaaatgcttctgctgcccagcaggctgttct

SEQ ID NO: 1162 - DNA, 75 bp, Homo sapiens
ttcgtcttcatccagggcatcggtgtaccaacagtaccgttattgccaccacaagtaaaccagtccctcacttct

SEQ ID NO: 1163 - DNA, 95 bp, Homo sapiens
atatccacaacagtcgcttgaacagattggcacccgaattgccaaagttttggaaaaggtggtcaaacctgtcctgacacccagaggtctgcatg

SEQ ID NO: 1164 - DNA, 82 bp, Homo sapiens
ggagagcccatggcaggaccggcacggcgaaaccttcaccttcagatctattccagaggggagcttcaccacttcattgacg

SEQ ID NO: 1165 - DNA, 100 bp, Homo sapiens
atacaggatgcctctcagctgccacctgcctttgacctttttgaagcctttgcaaaactctggtagctgaagaacatctcacagtggacgccagggtcta

SEQ ID NO: 1166 - DNA, 75 bp, Homo sapiens
cctaggtatccgcactgctcagggggaaaactttcacttatctcttctttaacttatcgtggaaataaaacagct

SEQ ID NO: 1167 - DNA, 82 bp, Homo sapiens
gaaagctggtgaggctgggctgcggtggagcctcggcagagggaacggtgagaagccctaccactgcaactgggacggctgc

SEQ ID NO: 1168 - DNA, 74 bp, Homo sapiens
tggaaacggacattcgtgcaaagaagcgggttcttcggaaagccgcggcgagtcctttgcacatgttggcaaca

SEQ ID NO: 1169 - DNA, 50 bp, Homo sapiens
tccagccgaaggagaagggggatccaagtattttagaacatgctcaagag

SEQ ID NO: 1170 - DNA, 110 bp, Homo sapiens
tttgggttggccttaaaatttgaggctggcaagtctgcaggcgatacccatggacaggatctgaagttttcacttgagagtcagaaacaaaggaatcttcagctaaatct

SEQ ID NO: 1171 - DNA, 100 bp, Homo sapiens
agagactacgcgctctggaagacattgaacgggaaatcggcgccatccttcagaatgcaggtactaggttttgacaagcttgcatcatgcgtgagtataa

SEQ ID NO: 1172 - DNA, 107 bp, Homo sapiens
cctgccgcagctggcgcagcccacgctcatgatcgacttcctcacccgcgcctgcgacctcgatgctgtgggccctgagggaaaggatcacagaggcgctgagccgg

SEQ ID NO: 1173 - DNA, 75 bp, Homo sapiens
cgagtatgtgctgctcttcggcaccgccttgggctcccgcggccactcggagagaaaaacggtgcctttgtttcc

SEQ ID NO: 1174 - DNA, 75 bp, Homo sapiens
tgcacagagaagttcaagaccagcagagaccggaaggatcacatgattcttcaggagatgatgaaagagattgac

SEQ ID NO: 1175 - DNA, 100 bp, Homo sapiens
agaaaggagttggggcttgatgaaggcgtggatagcctgaaggcagccattcagcaagttgaagtcgattgccaacagtgtatgctcgaaatcctggata

SEQ ID NO: 1176 - DNA, 75 bp, Homo sapiens
attagtactttctggcctaacttttatcaggactacaaagctgatgaagacccagcattattccagtcagtcaag

SEQ ID NO: 1177 - DNA, 82 bp, Homo sapiens
aagaagatgaacccacagatttgtgcaagcagctaatgactcagtctgtagactccaacagagggaacaggaacgaaaaaag

SEQ ID NO: 1178 - DNA, 82 bp, Homo sapiens
ctgaatcgctgcaccccagaggggctgaaatctctttaatgatggagggaagcaggcagacgcgagtgtctcggccatacaa

SEQ ID NO: 1179 - DNA, 77 bp, Homo sapiens
ccttattttttctcatggatgttcttcttcgagtatttgtagaagggaaaacaatgaagagtcgttatatggaactc

SEQ ID NO: 1180 - DNA, 99 bp, Homo sapiens
gcagcccgagcccatcaaggtgtacggacaggccaaagatgaagaggaagcctttctggattggagtgatgatgatgatgatgatgatgatggatttga

SEQ ID NO: 1181 - DNA, 50 bp, Homo sapiens
gcttccccagctatgtggaacttcctaggacagaatatggatgctgaaaa

SEQ ID NO: 1182 - DNA, 100 bp, Homo sapiens
tgaactgctagtactgaaggctcatcatgatattgtacgatttctggtacagttagatgactacagggttatatcctgtgttgtgacctcatggtttaag

SEQ ID NO: 1183 - DNA, 75 bp, Homo sapiens
gtccaggtgtcccgcgggcctcgatttggggagcagctggccaactcagccaatccgcacatttagctctccaac

SEQ ID NO: 1184 - DNA, 82 bp, Homo sapiens
gccgctggcagccgcggatctcaccgccgctcaggttggaaaatggatataccttatttgattatgatgttggactgaatga

SEQ ID NO: 1185 - DNA, 88 bp, Homo sapiens
ttggcaagaagcagatgcgcattttgatgggttacacctatgtttgaggattggactactattgattggtatcgatttttctgtttat

SEQ ID NO: 1186 - DNA, 90 bp, Homo sapiens
gaacaaaaaacaccacagtactatcgtctatcattggatgaagtggctccggagatacgactgcaagaacattgccaacatcatgaagac

SEQ ID NO: 1187 - DNA, 100 bp, Homo sapiens
tggtcctgccgaaatctcatcgccttcaccatggacctgcgcagcgatgaccagggtggcggcggaagagctaagcaacgtggcttagtccatcagcatc

SEQ ID NO: 1188 - DNA, 96 bp, Homo sapiens
agacccgacacaaggcagcttcccacagcaggttggacagttcacaggtcacgagaagagaatgccttctagatgcaaaatcacctccaaaccaga

SEQ ID NO: 1189 - DNA, 75 bp, Homo sapiens
cgttccatctgtggaaggacctaccaaccagccgcctgtcttggttagatggctctggattaggattctcactgg

SEQ ID NO: 1190 - DNA, 75 bp, Homo sapiens
ggcaatcatcctgaatgaatttagagccaaactgtccaaggctttggcaggagaagagccacccctcagtgcctt

SEQ ID NO: 1191 - DNA, 122 bp, Homo sapiens
ggccgcctccggccaggacgctgggagctgcctgcgggaaggtgcggggagcggagccatggcctccggcatatggttgatgatatgctaagtgcagatgatgtcagttgtagtagctccca

SEQ ID NO: 1192 - DNA, 88 bp, Homo sapiens
ccacggcctcaggccagccctacattatcagagcaagagccggatagaggacaaggtgagagaacgccgagccgtcgccgcagcctcc

SEQ ID NO: 1193 - DNA, 100 bp, Homo sapiens
ctcttcaccctgccgtcatgtctaagtcagaggaagtttatctcgacaatgctagttgcagtctgtgtgaccctgaccaagttattttaatgtctgtgct

SEQ ID NO: 1194 - DNA, 100 bp, Homo sapiens
gctaagactacctttttcagaaatgcgcagagcaaacatctttcaaaggagccaaaaacctgtatatcatctccgtgaaggggatcaagggacggctgaa

SEQ ID NO: 1195 - DNA, 100 bp, Homo sapiens
attctcttcattctcttggactgaacttaaatactgataggagtccatagaggccactgtattctattgaagaacatgtctaacagtaacactactcaag

SEQ ID NO: 1196 - DNA, 76 bp, Homo sapiens
tgaaaaactctttggatgattctgccaaaaagctcgcaaaggatctccttcatccctctccagaagaggagaagag

SEQ ID NO: 1197 - DNA, 90 bp, Homo sapiens
ctggagtatactccaggagagcatgaatatggattatttccagcgcccattcatgttgatgtagaaatccctgaaaatcctgaggcatat

SEQ ID NO: 1198 - DNA, 100 bp, Homo sapiens
aaccccaagtcaccacaaaaacctatcgttagagtcttcctgcccaacaaacagaggacagtggtgactattatatggttaaaaagattttggaggaaaa

SEQ ID NO: 1199 - DNA, 83 bp, Homo sapiens
gccgccctcgagaaacccctcagccaccccatgcaggaaactcggggatctgacgagcttttctctacttgtgtcactaacgg

SEQ ID NO: 1200 - DNA, 100 bp, Homo sapiens
aaaagttcagtgggaagcatgtcgtctttatcgctcagttcttctcaccactaaatccaatacgagttcatattgatattggagctgatggcagagccac

SEQ ID NO: 1201 - DNA, 74 bp, Homo sapiens
gccgatccagcctgcggagcctgtggggcagacgtggatgagtgtgcactgggtacccacaactgttccgaggc

SEQ ID NO: 1202 - DNA, 97 bp, Homo sapiens
gtggcgcgcaggacgaagctcgcggcgcgggacccggaggacggtatcccgagcccaccgtgctacgcaggtggtccagctgctcacctgtgacctg

SEQ ID NO: 1203 - DNA, 82 bp, Homo sapiens
gtacgcggtgctgcgagggcagaacctggtggtctccatcgaagacccctttgaccaggatgactgggccacttggacctcc

SEQ ID NO: 1204 - DNA, 75 bp, Homo sapiens
cgtgggctgatggaagacaccacccaggtttctaaggtaaacggagtcactcgaatgtcatctctgggtgcaggt

SEQ ID NO: 1205 - DNA, 105 bp, Homo sapiens
accgcgcgcagggcctgcagcgggagctggacggcgagcgcgagcggcgcgagaaagcctcgggccagcggccaggagctgcctcccccagcccccgtcccgcgg

SEQ ID NO: 1206 - DNA, 88 bp, Homo sapiens
ccgcgctgcgcccttcggccgcctacttcgggaatactcccccagttgcaagaggcgcaggaccgtggaagacttcaacaaattctgc

SEQ ID NO: 1207 - DNA, 82 bp, Homo sapiens
cggcctgggctgctctgagacatgtctatcaatattatggaactgactttacagaaatatggaagttatgaaaaatttgaac

SEQ ID NO: 1208 - DNA, 100 bp, Homo sapiens
caccttctgtctccacagcaggacagccgaactggaatctggatgagcagctcaagcagggggacttgatctcatcttcatgccaggccttgggtttgac

SEQ ID NO: 1209 - DNA, 73 bp, Homo sapiens
tcaggataagaggaatctttatctaatcatggaatttctccctggaggtggcaattttggaggtagccccggt

SEQ ID NO: 1210 - DNA, 100 bp, Homo sapiens
ggaaacaggatgctgatagtctccagcgggcctggactgtgggctggtgtgtggaactggctggagtgaagtggcacgatctcggctcactgcaacctct

SEQ ID NO: 1211 - DNA, 51 bp, Homo sapiens
tggccgagcaggctgagcgatacgacggagcgagcccagggcgtggtgctg

SEQ ID NO: 1212 - DNA, 51 bp, Homo sapiens
gtttttccaacagaaccagacagaactagatgaacggcgcaaaaggaggca

SEQ ID NO: 1213 - DNA, 98 bp, Homo sapiens
gccgcggcaggatgattgcctcgcatctgcttgcctacttcttcacggagctcaaccatgaccaagtgcagaaggtttgtccgatatgtgcctcgatg

SEQ ID NO: 1214 - DNA, 50 bp, Homo sapiens
ccgagaagcgggtgtatctcaacaggttcttcattagaagctgtaaccac

SEQ ID NO: 1215 - DNA, 95 bp, Homo sapiens
cagttcagccaaatgggaaacaggcttcacatgtttcttgtacagttgagatgtgcagtgttacaactcctttgccattcaggaattctgagtgg

SEQ ID NO: 1216 - DNA, 50 bp, Homo sapiens
tcggggtgccagaaggaaagcatagctcaaccaaatcccgggagatgaga

SEQ ID NO: 1217 - DNA, 100 bp, Homo sapiens
agatctagaagtcactttggaagaagtatatgcaggaaattttgtggaaactctttttgatcagaacaatgctgcaaaaaaagaagagtcagaaactgcc

SEQ ID NO: 1218 - DNA, 82 bp, Homo sapiens
ctacacacgagtgagcggatgccgcgacgtgcccactctaacatggaactgtggctgcaccatctgtcttcatcttcccgcc

SEQ ID NO: 1219 - DNA, 83 bp, Homo sapiens
aaatgaagcgtgctaaagtgtctcaagcactgtttgcaaaggttgcagcaaccaaaagccagtcaccttcaggccattcagag

SEQ ID NO: 1220 - DNA, 100 bp, Homo sapiens
gctcccatcattgatgtggtgcgatcggtgctgttcaaccagttcaaatactttttcaacctctatttcttacttcttgcctgctctcagtttgttcccg

SEQ ID NO: 1221 - DNA, 99 bp, Homo sapiens
gcaacagtggcaatgagaccagtggaagcagcaccatcggggagacaagcaatggaatgcagtagccctctgggcctgggatattgtggttgataactg

SEQ ID NO: 1222 - DNA, 74 bp, Homo sapiens
caccttcagtcctggctctgacaagccctccaggagtggcaaaattctattcagaagaatgcaggccttgcttt

SEQ ID NO: 1223 - DNA, 83 bp, Homo sapiens
tgagctcagttggctgcaggagcagctagcacagtactgctgcgcacggccactgccaacggcttccagatggtcaccagcgg

SEQ ID NO: 1224 - DNA, 90 bp, Homo sapiens
gtcttcccgggtcccgagcactctgtgccggagttgacattttgctaaaggctgtgggagacactcctattatgaaaacaaagaagtggg

SEQ ID NO: 1225 - DNA, 74 bp, Homo sapiens
gcggcgggaggagcctgttcccctgagccagagactgctgctactttgaaacgtacgatagaggccctgatgga

SEQ ID NO: 1226 - DNA, 100 bp, Homo sapiens
tctgaacttccctggtcgaacagttttttctaatggctattcaagggatcaacgagcaagggctgtatcgaattgtgggtgtcaactccagagtgcagaa

SEQ ID NO: 1227 - DNA, 73 bp, Homo sapiens
cgctcagctcgagcttccctcgtggccgacggaacaatgaagaacgtgcgcatcgaccccagtagcctgtcct

SEQ ID NO: 1228 - DNA, 82 bp, Homo sapiens
aggaatatcgagagcgtcatgaacccgagctatagagaaaggagatgaggtatgtgaggagcagcgctgtgaggaggaagtc

SEQ ID NO: 1229 - DNA, 100 bp, Homo sapiens
gggaactgctgacgcttgatgagaaggacccacggcgtctgttcgaaggtatgtgcactgcgcgtgaccagccgggcccgcagccgcatcctcagggcag

SEQ ID NO: 1230 - DNA, 75 bp, Homo sapiens
atggaaccggccttctttcagccaacagacattcactcatggtacggacattgctgcaggagaagaggttgccat

SEQ ID NO: 1231 - DNA, 90 bp, Homo sapiens
gagcgagcgccgagccgggtcaggtatttctgggaaaagccagcttctgtttgcactggtcttcacaactcgttacctggatctttttac

SEQ ID NO: 1232 - DNA, 98 bp, Homo sapiens
gtgaaaagcatgagcaagctgatgaagatctgctctctcaatatgaaaatggtagctccacagtaggtgtaaacgtcctactttggggcaacttgcca

SEQ ID NO: 1233 - DNA, 123 bp, Homo sapiens
cattgacgccatgtcgggttattcgagtgaccgagaccgcggccgggaccgagggtcctgaacgaggctgtgggggccctgatgtaccacaccatcactctcaccagggaggacctggagaag

SEQ ID NO: 1234 - DNA, 101 bp, Homo sapiens
catataatgctttctcagcccaaggcatgccagaggtatccacaagtgaaaatccacaactctgaagagaaactaccaagactcctcctgccccaaacctc

SEQ ID NO: 1235 - DNA, 88 bp, Homo sapiens
agagccgctgggcgccggagccgaggcgagcgccgcgcgcaccactgtactatactggcaattgctggagaagattttgcaattgttg

SEQ ID NO: 1236 - DNA, 97 bp, Homo sapiens
agggaccatcatcctgacagctgtgtactttgccctcagcatctcccttcatgtctgggtcatggtatggcctcacaagtcttggtctacccaccat

SEQ ID NO: 1237 - DNA, 82 bp, Homo sapiens
cgggcggcgcgctgcccgaggggagcaaggacaggtggatgggctcgcgcttctggccgctgtgctccgacactggctggca

SEQ ID NO: 1238 - DNA, 75 bp, Homo sapiens
tggtaccctaaaattagggcatgattaaggtatgatctcgtgaaatcttgagagaaactgaatgacgaatgaaac

SEQ ID NO: 1239 - DNA, 100 bp, Homo sapiens
cacttcggccaagaaattagacaagaaacattggaaaagaaatcctgataagaactgctttggaatgaaagctactggttgattttaaagtgcctgggcc

SEQ ID NO: 1240 - DNA, 98 bp, Homo sapiens
cacacgcagaacagccggcagctgagcctggtggcctccgttctcttggcccagctcctggagcagaatggaggctacgggagcgccacactgtcccg

SEQ ID NO: 1241 - DNA, 75 bp, Homo sapiens
agcctctgggtcctcggtcggtacagtctctgcacctcgcgccccagcaggtttcagagaaaatccattgatgga

SEQ ID NO: 1242 - DNA, 87 bp, Homo sapiens
ggacatcagccccaaacaggacgaaggcgtgctgaaggtgtaatggataggtaacagagaagacctcgtcccttcctagtcagggca

SEQ ID NO: 1243 - DNA, 96 bp, Homo sapiens
gggatgtgtacatggcattgcgctgcccattctggatgcgctgcagggatttctccacctgagggggaattggggagacgagttgtactgctgtca

SEQ ID NO: 1244 - DNA, 101 bp, Homo sapiens
gcggcccggcccggctccggcccccgctggggcaatgctccccggggccgcgggatgagccaggagccggcatcatggattccttcaaagtagtgctggag

SEQ ID NO: 1245 - DNA, 50 bp, Homo sapiens
aagccgaaaaaggcagcagcgaaggtgactcctgcacctgcgccggctcc

SEQ ID NO: 1246 - DNA, 74 bp, Homo sapiens
gttatggcagagttagctaaagaactccctcaagtttcatttgtgaagggggacttgatctcatcttcatgcca

SEQ ID NO: 1247 - DNA, 98 bp, Homo sapiens
accaaaatttgaacaggttaatctgttggattctaatgcagttcatcacatcattcatgattttcagggattaatgaaaatcaagttccatcctcaga

SEQ ID NO: 1248 - DNA, 75 bp, Homo sapiens
tgaggcctccccagccacgtgaaactgcctgcactgcccaaagtcttggaaacttgctggatatgatgtaccggg

SEQ ID NO: 1249 - DNA, 75 bp, Homo sapiens
cattgagtttgtggcagacagacttatgctggaactgggttttagcaagactgacaatcacctgaaacattattt

SEQ ID NO: 1250 - DNA, 100 bp, Homo sapiens
gttctaccacagccctgcggacaacaagcgggggctaagtgatggatcttgtactccgtgttgcagattactatttttttacaccatacgtgtatccagc

SEQ ID NO: 1251 - DNA, 75 bp, Homo sapiens
gacgttggacaagatcatgatcctgttcaggtttatccacgggcaagtgtccagagaatggctgggatgaaagta

SEQ ID NO: 1252 - DNA, 100 bp, Homo sapiens
cggcacctcaaccagatgaggaagtacaactttgaggcctcgaaaaagcccaagacagcagaagcagacacctccagtgaactagcaaagaaaagcaaag

SEQ ID NO: 1253 - DNA, 98 bp, Homo sapiens
ggagaaagggagttctggcagcttctccgagaccccaacaccccactgttgcaagggtaactttttggaagagtactttgtaacaataaagtgctgtg

SEQ ID NO: 1254 - DNA, 90 bp, Homo sapiens
tctgtacccagaaagagtcatacctggagcagcaggaggaagccacagacagtgaaaaggagatcaatcggctctccatcctgcccttcc

SEQ ID NO: 1255 - DNA, 100 bp, Homo sapiens
gaacagaaacacctaggaagggagaactgggggatatgagactttctactcggaatatcctgagtgttgcgtggatgtaaaacccatttcacaagagaag

SEQ ID NO: 1256 - DNA, 100 bp, Homo sapiens
atcctccgctcctgaggcccccacaatgaagcagtcggacgcgtctccccaagaaaggttctactgggacttcaccatgctgctgttcatggtgggaaac

SEQ ID NO: 1257 - DNA, 90 bp, Homo sapiens
cccaagaaccttctggccaaggtgattcagattgcaacgtcatcctccacagctaaggaggaatacgcagttgagggcctggagtggtca

SEQ ID NO: 1258 - DNA, 75 bp, Homo sapiens
ctggttctggaatcctcagttcaagttggaatcgaagcctcttaaaatggcagatgacttggacttcgagacagg

SEQ ID NO: 1259 - DNA, 75 bp, Homo sapiens
ctgccccagctccgtctcggcggcggcgggtagagttggctttgtgggacacagctgggcaggaagattatgatc

SEQ ID NO: 1260 - DNA, 98 bp, Homo sapiens
ttcaatattggaagcgctttgatttacagcagctgcaggtctatcagccacagtctctgcaagtttccaagagcagcagaaaatgaacacattgcagg

SEQ ID NO: 1261 - DNA, 90 bp, Homo sapiens
gagtatggctgcagaggatccatctgtcttagcaaggctgtcatcacaatcactattatcttcaaagcccaccatgagtgtacagatcag

SEQ ID NO: 1262 - DNA, 100 bp, Homo sapiens
ccattgaaggtggccagaaggaccccaagcaaaggatcatccccttcctcccagagtccctgcaggaagcatcacccaggctggcagatcatggtagcag

SEQ ID NO: 1263 - DNA, 100 bp, Homo sapiens
tgaaagcattggaccttgtttcagatcctgaataagaaagcaaccagcgagatgaatactgctgaggactggggcctcattttggatatctgtgataaag

SEQ ID NO: 1264 - DNA, 50 bp, Homo sapiens
cagcctgcggagcctgtggggcagacagttaaatctcacacagaaacaga

SEQ ID NO: 1265 - DNA, 101 bp, Homo sapiens
ctggctgatcctccaggtcaatgccacggatgccttgggtctggagcccggcactgtggtcataacagagcaggcagtggatacctgcttcaaggcagagt

SEQ ID NO: 1266 - DNA, 75 bp, Homo sapiens
atcctcagacgcctcacttaggacaagcagacgcgtgccatgcctaccagatcattcaccgcaatgggattcctg

SEQ ID NO: 1267 - DNA, 89 bp, Homo sapiens
gggaacaaagcccacaagcaccggaaggagggagccccaggaacaggagtcccaccgaagaactgctctctgacagaacagagacctcc

SEQ ID NO: 1268 - DNA, 90 bp, Homo sapiens
gcgggggggagagccactgacgccgggaccgggaccgccgccgccgccgccaccatgtgttgttacagatcttataacagtcggtttaaa

SEQ ID NO: 1269 - DNA, 115 bp, Homo sapiens
gggagccagaacagggaagaacggattcacacaggatggcttgcagaagacgctattttgatcagggccaaagcggtcagtgagaaggaagtggactctggaaacgacatttatg

SEQ ID NO: 1270 - DNA, 100 bp, Homo sapiens
aaaaagttccagaaacaatttggggttaggcagaaatgggatcagaaatcacagagggaggaagaaggagacttcagagaaagaggccgtgtgatggaag

SEQ ID NO: 1271 - DNA, 83 bp, Homo sapiens
ctcctcgacaccatggtggacacttttcttcagaagctggtcgccgccggcaggtttgaggaactactggccaacctactaaa

SEQ ID NO: 1272 - DNA, 114 bp, Homo sapiens
cgccaggcaggacgacagcagcagcagcgcgtctccttcagcccctatgtcaccacagtgggaggcacatccttccaggaacctttcctcatcacaaatgaaattgttgactat

SEQ ID NO: 1273 - DNA, 98 bp, Homo sapiens
aaataccagtccccagtgagggtgtacaaatacccctttgaattaattatggctaaattggaatgggattaacaggatttggagtgtttttcctgttc

SEQ ID NO: 1274 - DNA, 82 bp, Homo sapiens
tatattgttacaattttttttcaagaactgccgtcttctttgcctgcactaatggtactccaaagattcaggtttactcacg

SEQ ID NO: 1275 - DNA, 100 bp, Homo sapiens
caaaccaacagagccatcgatagaaatgagctttttaattctctgcaggtcactagtttcccggtagttcagctgcacatgaatagaacagcaatgagag

SEQ ID NO: 1276 - DNA, 100 bp, Homo sapiens
aaaaggaagtttgtcctgtcctggatcagtttctttgtcatgtagccaagactggagaaacaattttcaaaactctgcttcagcaagatgtgaaaaaaag

SEQ ID NO: 1277 - DNA, 122 bp, Homo sapiens
gcccacccctcacctcacgcggattggggggtcctcacgccaggccggagctggacgccatgaccaggtggaggcggcccgcaaggccatccgcgccgctcaggtggagcgctatgtgcccg

SEQ ID NO: 1278 - DNA, 74 bp, Homo sapiens
gactccagtaacactcaagcaaagaagagttgagcacaatcaggttcttacaggagttgcaggagaagatgcag

SEQ ID NO: 1279 - DNA, 123 bp, Homo sapiens
gcggaagaccgcgcgcagggcctgcagcgggagctggacggcgagcgcgagcggcgcgagaaataccatggggcgcaagttggaccctacgaaggagaagcgggggccaggccgaaaggcccg

SEQ ID NO: 1280 - DNA, 75 bp, Homo sapiens
aggggacggccgccggagccgcgaggccaagtttacccaaggtccagcctagcccctaggcaccatgtcggacag

SEQ ID NO: 1281 - DNA, 120 bp, Homo sapiens
tatcatttttgtgattctctcttggattattgtgatcccgaccggaccaaggtcccccggcagagggcagtagagatggccggcccaaggcctcggtggcgcgaccagctgctgttcatg

SEQ ID NO: 1282 - DNA, 100 bp, Homo sapiens
agcccacataagagatgatgatgttataatcagaatcaacacagatggggccgaatataacatagaggatgaattaaaccttgctgattctgaagtggat

SEQ ID NO: 1283 - DNA, 98 bp, Homo sapiens
agggggcggctaccccgtggggtccagcctgatgagtgaagaggctaagcgaggagcacccaacccttggctctttgaggagccagaggagaccagag

SEQ ID NO: 1284 - DNA, 100 bp, Homo sapiens
attcttgtggatattgggcttgacagctgcaaggagttactgaagtcacagcccgttggagattgtgattttaatgttcgtctgcagtgtatagaacgag

SEQ ID NO: 1285 - DNA, 100 bp, Homo sapiens
gaaccggctccggagcgagaacgcgcttgtcgccgtgatcctgaaggcgctgacctacgacgagaagcggggtgcctgcagcgtgggcaccaacgtcagg

SEQ ID NO: 1286 - DNA, 83 bp, Homo sapiens
caacctggatcttcgaacttttgacacggctttggaaacgacgtcatgtgttagtagccggatcgagctgggagatgtgacac

SEQ ID NO: 1287 - DNA, 90 bp, Homo sapiens
ggccgcgctctgctgcttcctcgtcctagtgatccacgcgcagttcctcaaagaagtaagactttgaccccgacgcaggcttcagtgatt

SEQ ID NO: 1288 - DNA, 78 bp, Homo sapiens
tacggtctcacagacaacgttgagtggatccaaacttctacagcaaaaacttacttcttttaggaaagacatacttga

SEQ ID NO: 1289 - DNA, 90 bp, Homo sapiens
gctctcgaggctgctaagagactaaatgtcatttgtcagagtgaaccgctgtggtccccgagttggtgtaagaaagacaccgaaagtaaa

SEQ ID NO: 1290 - DNA, 75 bp, Homo sapiens
ccgacatggaacagggactcactggggatttccttgatagctgccgtgccagtactctattggctgagctcgatg

SEQ ID NO: 1291 - DNA, 50 bp, Homo sapiens
gcactgcctcaaacatgggctgaaagctctccctgatgaacgactggaag

SEQ ID NO: 1292 - DNA, 100 bp, Homo sapiens
gtagcccggcgctcggcatggctctcctggtgctcggttcgatacaagaggctgttttcctagcgtggcttgctgcctttggtaagaacatgtcgtccat

SEQ ID NO: 1293 - DNA, 75 bp, Homo sapiens
gaatcaggaaaaagcaccattgtgaagcagatgaaaaaaacacaccttgactttagtcagatacatcactgtctg

SEQ ID NO: 1294 - DNA, 83 bp, Homo sapiens
acagcggccttcgaccgccccccgaggtccagcaccatgtgctaggtcactcccagcgcgaggccacacctgggccgtcggag

SEQ ID NO: 1295 - DNA, 75 bp, Homo sapiens
caggcagagtgctgatgtgaaaaataccacgacaaaaccaccctagaagcttttgtccagtgatcgaaatccacc

SEQ ID NO: 1296 - DNA, 76 bp, Homo sapiens
gagggattacagaaaggagaacaccttatttcaggcgcttaaattcctagcgaagtgccgtaagaaaaagaaacta

SEQ ID NO: 1297 - DNA, 80 bp, Homo sapiens
ccactgcagagcctgtccgtcagtccctaggtatccgcactgctcagggattttgagaagagggggaaaaaggaagtttg

SEQ ID NO: 1298 - DNA, 100 bp, Homo sapiens
cccctactgcacagcagaagctctgaatcgtgttcctgaatgaaagaagtcagcaggtgtcttctgcggaggtgcgcatcgggcccatgagactgacgca

SEQ ID NO: 1299 - DNA, 100 bp, Homo sapiens
ccgcagtggtggaggtggttacggcaacagcagaggatttggtggaggttgatgataattagaagcatgctttccactgaacttcccgacaacatttgtt

SEQ ID NO: 1300 - DNA, 98 bp, Homo sapiens
caggagcaacacgtgatgtgtctacttatcaggacctattcaacgaattgcttgaaaactgaacaggcttttcccctgcaaaacaaaatcagaccaga

SEQ ID NO: 1301 - DNA, 100 bp, Homo sapiens
cacgatgagtgcgggcgacgcagtgtgcaccggctggctcgttaagtcgccccccgagaggaagctacagcgctacgtcttctttggcaatgtggattca

SEQ ID NO: 1302 - DNA, 90 bp, Homo sapiens
cggctgcggggcttccctgcggctggaggcggccttctgatctgtttaccacgtgagcaagcagctcggttctgtgcagagataaagtcc

SEQ ID NO: 1303 - DNA, 96 bp, Homo sapiens
agaagttgggctggtccaggaggaacgagtccgagaactggctgaagccgatgaacagcgccgggatccagttcctgctcattttccacaaggccg

SEQ ID NO: 1304 - DNA, 100 bp, Homo sapiens
cggggtggcgcccaggacgactccccgggctcagcttggctgcctgcctccttctcttctcacctggggcgggtgggttctgcaccaccctcccaccctc

SEQ ID NO: 1305 - DNA, 75 bp, Homo sapiens
caaggatagattgtgtttcaaaggctttggaagtgataaagcagttaaaagagaaaatgaagatagaacgtgctc

SEQ ID NO: 1306 - DNA, 100 bp, Homo sapiens
atggatttcatccattatgctggctgttatgtacgcaggagaagagctggcagggagcctggcccgggctattgcaggtggagacgagaagggggcagcc

SEQ ID NO: 1307 - DNA, 88 bp, Homo sapiens
cagtcatatgcggtggaatctgttcttcttttgcatcctacgtaaccagaccaagctgtgggagatgatattctacagagtctgacta

SEQ ID NO: 1308 - DNA, 78 bp, Homo sapiens
tgctgtggtgcagagctagttcctctccagctcagccgcgtagtggaagagaaagccaatacccacctcctcttgggc

SEQ ID NO: 1309 - DNA, 82 bp, Homo sapiens
agggccagctgacggagatggtgcagaagatggaggaggtaacgtgaagcacctggttctcttcctccatgaggctgtcctg

SEQ ID NO: 1310 - DNA, 75 bp, Homo sapiens
ggagcgcaaggtcgccctcaaggccatgatcaaaacatggggcattctcttctcccaccctcgggactttacccc

SEQ ID NO: 1311 - DNA, 83 bp, Homo sapiens
ccgcgagcacagagcctcgcctttgccgatccgccgcccgtccacacccgccgccagtgtgccgtgcaggtgaagctggagct

SEQ ID NO: 1312 - DNA, 90 bp, Homo sapiens
gtgccttacaactacaaccagctggaaggcagattcaagcagctgcaagctaatgggaatgacagcaagaaatttaaacgagatagacct

SEQ ID NO: 1313 - DNA, 100 bp, Homo sapiens
ttgcctgatgctgtgggacctattgttcagttacaagagaaactttatgtgcctgtaaaagaatacccagatatggaactttctgctctacagtccatga

SEQ ID NO: 1314 - DNA, 100 bp, Homo sapiens
agttgtgaacgccgcggactccggagccgcacaaaccagggctcgccatgaagccagtcaccaggagactaaagtccatcaaaaacatccagaaaattac

SEQ ID NO: 1315 - DNA, 101 bp, Homo sapiens
cggcttcctagtgagtcggcggctgatttagaaggaggttcaggctacggtgagccgaagtcaagctcatcctcccgggaacgtctccaccagcttccctt

SEQ ID NO: 1316 - DNA, 100 bp, Homo sapiens
gtgaagatcattaatgaagtaaagcccacagagatctacaaccttggagcccagagccacgtcaaagacgcacaagaccagccactgctaccgcatcacg

SEQ ID NO: 1317 - DNA, 83 bp, Homo sapiens
ctactgcagccacgcgggcgagcggctgtgtggatgtcggcgaagccgcgggcgagatctgccggaggcgctgggcaatgacc

SEQ ID NO: 1318 - DNA, 95 bp, Homo sapiens
gtttcggaaatgcccttacagcagcagctcttttaagagcctgtgccgatggaggtgccaaccgcttatatgatatcaccgaaggagagagagaa

SEQ ID NO: 1319 - DNA, 101 bp, Homo sapiens
cgccgagcggtgactccccgccgctcccgggggccgtgacggtgattcgcaaggggtggctcaccatcagcaacattggcatcatgaaaggcggctcgaag

SEQ ID NO: 1320 - DNA, 75 bp, Homo sapiens
ctactacatcagcaccttcaacttcgaccacgccctggtgagcacctgcggatctgtccccagggctacacctgc

SEQ ID NO: 1321 - DNA, 75 bp, Homo sapiens
actgccgtcaactcctgttctcctcagagcctgttttaattgataaagaccagagtccaaaatggaaaccagctg

SEQ ID NO: 1322 - DNA, 100 bp, Homo sapiens
gttccgcccggggctgggatcccatcaccctccacggccgtccgtccaggccacgtgctgctgggtctcagtcctccacttcccgtgtcctctggaagtt

SEQ ID NO: 1323 - DNA, 80 bp, Homo sapiens
gactacaagcatcactggcaaggaggagctcaagcacttcgaagccaaaatcgagaagcacaaccactaccagaagcagc

SEQ ID NO: 1324 - DNA, 100 bp, Homo sapiens
ctcgctccgtggccttagctgtgctcgcgctactctctctttctggcctggaggctatccagcgcacgggcgagagcgggaagagcacgttcatcaagca

SEQ ID NO: 1325 - DNA, 90 bp, Homo sapiens
ctcgtaacctggatcccagaaggtcgcgaaggcagtaccgtttcctcagcggcggtgcctagaaagagccatgaagtttgcctttgagga

SEQ ID NO: 1326 - DNA, 130 bp, Homo sapiens
tggctatattatttgcacccagtcctgcagcgccagcagctggactatggcatctatgttatcaaccagctaattatagagatttcttccgtgtcaccagaatctttaaactactgtaccacaagtggat

SEQ ID NO: 1327 - DNA, 100 bp, Homo sapiens
tgacgttttgaaggatgagcttcaactctatggaggtggctcaatcccttgtttaaaattggccataaacggagattagaggaagatgatatgtattcag

SEQ ID NO: 1328 - DNA, 90 bp, Homo sapiens
gactttgagccctaccttactggacagtcaaatcaggtgtggagtgaagttaaccaagctgtgctagattatgaaaatcgcgagtcaaca

SEQ ID NO: 1329 - DNA, 82 bp, Homo sapiens
gttcattgaagctatcactgtcagtgctgtgtaggaagaatgatgatggagacacagttgttgtggttgagaaagatcattt

SEQ ID NO: 1330 - DNA, 83 bp, Homo sapiens
gagaagagcagagcggagggagccccagacacgatctaaccatgagctaccctggctatcccccgcccccaggtggctaccca

SEQ ID NO: 1331 - DNA, 74 bp, Homo sapiens
cctatagtctggagctcttccaggagagatgccctgtatccaagcccaatatgggacaccagcaccgagtccgg

SEQ ID NO: 1332 - DNA, 99 bp, Homo sapiens
ccagctgcccagcccccattggcgagtttgagaaggtgtgcatgtggaagaggaagaaggagaaaaaacagaagatgaatctctggtagaaaataatga

SEQ ID NO: 1333 - DNA, 100 bp, Homo sapiens
cggaggcggcgggcggaggcggcgggtgagagggcctgctgctcttggtgagcctggaggtgttccggcattccgtgagggccctgctgcagagagtcag

SEQ ID NO: 1334 - DNA, 97 bp, Homo sapiens
ggcataaggaactctatcccaggaatacagctttgcattaggtttggtgcacctcgatttggaggaagtagggcagggcccttatctggaaagaagt

SEQ ID NO: 1335 - DNA, 80 bp, Homo sapiens
agccaaatgccagactgattgtcatgctcagggaccctgtggagaggtacaggtttgcagattccgccagcagcacagca

SEQ ID NO: 1336 - DNA, 85 bp, Homo sapiens
agcctggggtaactgcacaggagaaggtgaaccaaaaaacagccagatgtcaggcatcaccaccttcccaaaacaaagccattgc

SEQ ID NO: 1337 - DNA, 100 bp, Homo sapiens
tatgagtatgagctattatagaaaccatgctcctgttcgacacagtggagaccatgggaaaagactatttgtcatcagaccttctagattctatgacagg

SEQ ID NO: 1338 - DNA, 100 bp, Homo sapiens
ccgccacccttcagttccggccaggctatgacgggaaaacgtccatctccaggtggattgttgaggggcagtgggacacagcaggccaggaaagatttcg

SEQ ID NO: 1339 - DNA, 74 bp, Homo sapiens
ggatgaacactatgattaccaccaggagattgcaagataggtgatcttcagctttgcaaactggatgaactaga

SEQ ID NO: 1340 - DNA, 75 bp, Homo sapiens
acgatgagtttggtttccgtgtgtacaaggaagatcctcccaagaaggtgaccacagtgattcaaaaccccatgc

SEQ ID NO: 1341 - DNA, 76 bp, Homo sapiens
caagttcatgctgtccaggctttagtgcaggcgaacagctgcttggagaactacaagtgaagaaaagaaagcatta

SEQ ID NO: 1342 - DNA, 75 bp, Homo sapiens
agaccttcaagatagacattgaccccgaggagacggtgcaggccactgtcgtggggctcttggctgctgtggctg

SEQ ID NO: 1343 - DNA, 50 bp, Homo sapiens
ctgtcccaagcaggagaacattgcaggatgaaacaagtgaagatgctaac

SEQ ID NO: 1344 - DNA, 113 bp, Homo sapiens
ttcactcccttttctctaggatttgaattcaggccaggccgagaatatttctacatctgttctacatgaaacattttctcaacacacattcctcatgaatggtctcattcaag

SEQ ID NO: 1345 - DNA, 97 bp, Homo sapiens
ctgggcatctgtctactgctcagtactaccaagggtcagctgattagccaccttagttccatctgcaactttagttcccactggctgtgtaacctaa

SEQ ID NO: 1346 - DNA, 75 bp, Homo sapiens
caatcccaagcgccaggaccttgaagttgaggcagctgtgttactggagcaggaacgacagcaggagattgccaa

SEQ ID NO: 1347 - DNA, 98 bp, Homo sapiens
atcatgctggccaagaagatcatcattaaggacggaggcacgggcagaaatttagcatctggagaggttggattttttccaagtgatgcagtcaagcc

SEQ ID NO: 1348 - DNA, 75 bp, Homo sapiens
gtgaaagagaagggaatgctaagaactgctgggaggatgacagtgggacagtcacttcctcctccctccccaccc

SEQ ID NO: 1349 - DNA, 75 bp, Homo sapiens
cggcgtaactatcgcctgacagggtatctgaagtaaaagggggtttacccaaggtccagcctagcccctaggcac

SEQ ID NO: 1350 - DNA, 96 bp, Homo sapiens
agtcggaggagtactcggtgaaatcctgtcctgaagactgtaagcggagattctggagctggctggcaatgcagcgagagacaacaagaagggacg

SEQ ID NO: 1351 - DNA, 97 bp, Homo sapiens
aatgaattaaaacagaacttcagcaaaagctggcatgacatgcagactaccactgctgtggtgtaaaggaattcattagccatggatgtattcatga

SEQ ID NO: 1352 - DNA, 100 bp, Homo sapiens
gatgaagtgcagaggtttttttctggttcaagggcagcaggaaagacgagatcctgggcatcgccaacaaccgactgatccgcatcgacttggccgtggg

SEQ ID NO: 1353 - DNA, 99 bp, Homo sapiens
tattgtggctggagacatgagcaagaaaagcctctgggagcagaagggaggctccaagacctcatcaacaattaagatatgattctataacagactctt

SEQ ID NO: 1354 - DNA, 50 bp, Homo sapiens
agagcagcatccggatggaggtccgggacagccgctccgaccgctggtcc

SEQ ID NO: 1355 - DNA, 98 bp, Homo sapiens
gtgttggaccttccggagcttctcagaagacagagggttttcttttgaggtccatctgaactgtttactgtttgttcatcgattagcagaagagtcca

SEQ ID NO: 1356 - DNA, 80 bp, Homo sapiens
atcctgattttggctattctcaaggaaacccttgtattcttgtgaaaatgaacagagttggtttgacttccacaaatgca

SEQ ID NO: 1357 - DNA, 82 bp, Homo sapiens
cccagagactgctgagcccgtccgtccgccgccaccacccactccggacacaggaagttctactacatcaccctgctacgag

SEQ ID NO: 1358 - DNA, 100 bp, Homo sapiens
gcggagggtgctgctcaaccaaacaactcattaatgctgcaaactagcaaggagaatcatgctttaggtgctggagaatctggtaaaagcaccattgtga

SEQ ID NO: 1359 - DNA, 74 bp, Homo sapiens
cgagtccctccggaactcacactccaggctaatagctcgtcagcttgctaaaatccatgctattcatgcacaca

SEQ ID NO: 1360 - DNA, 83 bp, Homo sapiens
ctttacccgactctttgggccgttatctcacgctattgagggcacctacattgacaagaaatgccccttcactggtaatgtgt

SEQ ID NO: 1361 - DNA, 82 bp, Homo sapiens
cgcttgtgtaccatgaggacatgacggccacccggctgctctgggacgagatttttagactctgaggagcagttggagctaa

SEQ ID NO: 1362 - DNA, 100 bp, Homo sapiens
gaggtcgagtaccttccctgtcccatcgcaaacccaaagatccccgttcctggagattctgattgagatgccatggacaatattaccaggcagaaccaat

SEQ ID NO: 1363 - DNA, 100 bp, Homo sapiens
attccaaagaagcttctacaaaaagtttttaatgatacctgccgctcagatggtagttagtattgctgaagatcttttacgaactgctgcccaaaatagc

SEQ ID NO: 1364 - DNA, 82 bp, Homo sapiens
gacgaggggctccgggtcttccagagcgtgaagatcaagatcggtgtcgtgaaaactacccctaaaagccaaaatgggaaag

SEQ ID NO: 1365 - DNA, 82 bp, Homo sapiens
ctacggaggtggcagccatctccttctcggtgcagcctgatcttcctcttctcccttgccagccagcactctgccttctgta

SEQ ID NO: 1366 - DNA, 75 bp, Homo sapiens
cttctacccgacacttacatgccatggccttctacgttgtgaaaatgaccaagctccacgaagatctctgtgaga

SEQ ID NO: 1367 - DNA, 75 bp, Homo sapiens
cctggagtccctgaaagaggaagaagtaggttttaaggtaaaggccgaggggcaaagaaaaggaaagcatctggc

SEQ ID NO: 1368 - DNA, 90 bp, Homo sapiens
agatgcgcaaattcactccccagtacaaagctccctggtcagcaccaatgaacacctgctgcaggagctgagccaggtgcgggcgcagca

SEQ ID NO: 1369 - DNA, 99 bp, Homo sapiens
ccagaggtggaagtccaagtcaaacgcagaaggactgcctcactgagcaaccaagaaacattcctgatgtagatgaagaaggctacagtattaaaccag

SEQ ID NO: 1370 - DNA, 73 bp, Homo sapiens
tgagctttgcacagtttgaaaatctactgttttcggctttgtgagaaaccttaccatcaaacacgatggccag

SEQ ID NO: 1371 - DNA, 83 bp, Homo sapiens
tagaagtggcagcacggcaggtcgatgagagtccggagtgttgtcatgtgaagcctgccatccaggaacctccaatagttatt

SEQ ID NO: 1372 - DNA, 82 bp, Homo sapiens
ggagctggaggagctgcgctcggagaacgactatctcaagcaaacggggattcagcgtccgatcctttggaacagggactca

SEQ ID NO: 1373 - DNA, 90 bp, Homo sapiens
tggagaacttctcctcccaggttgtggaacgacacaacaagccggaagtggaagtcaggtctattacaatggctaccatggagacacctc

SEQ ID NO: 1374 - DNA, 75 bp, Homo sapiens
gtgtgggtttcaagagagactactacctaataagggatgggaaggccattgtgactatgtggtgattacagttgt

SEQ ID NO: 1375 - DNA, 76 bp, Homo sapiens
gtggggagaatatgtggacaacacaaacctggtccccaggctctgcatctactgccgaggatgttccaagccgctg

SEQ ID NO: 1376 - DNA, 90 bp, Homo sapiens
gaaattcttggctgaggcagctattcggtttgaaaccaacatcccgggtaaccgggtggctgaaggacaggtgacgtgtccctacctccc

SEQ ID NO: 1377 - DNA, 75 bp, Homo sapiens
tggagccacagatagaggacctgattagccggattaatgatcttcagcaaggtagaatgtaagaaagctcagccg

SEQ ID NO: 1378 - DNA, 86 bp, Homo sapiens
gggttcaggtgcaagcagatgctgactcagcctgttccattaaggaattgaatgatctggcacgggaccctccagcacagtgttca

SEQ ID NO: 1379 - DNA, 98 bp, Homo sapiens
acgaaggactggaaggtggcggtggtgaaggtgcaggccgttggggcggctcagaggcaggttgtttacattcagagctctatcaataagaggaatac

SEQ ID NO: 1380 - DNA, 73 bp, Homo sapiens
tttaaccaccaatgcgctggacttgaattcagtgcttgggaaggtatagctaggcacttccgttttggaaacc

SEQ ID NO: 1381 - DNA, 75 bp, Homo sapiens
acaagtatgctgcaagtgagaacatatttaacaggcctctcttctgtggaaactctgaagccgaccagttgggca

SEQ ID NO: 1382 - DNA, 100 bp, Homo sapiens
ccgatacttgacctacgcaagagacaatgtcatgtgattcagcctaatatctcagctttacaggaagtatggtgctggcatctgcttggcttctagagag

SEQ ID NO: 1383 - DNA, 90 bp, Homo sapiens
gaaaaacctgaaagatgtctcagaaacccagcgtttgctggcagaaccagttcctggcatcaaagccgaaccagatgagagcaacgcccg

SEQ ID NO: 1384 - DNA, 74 bp, Homo sapiens
ggccctggggcggcgccagggctggtgcccatacttccttgctcgatactcagcccgtgtcatcctggagaagg

SEQ ID NO: 1385 - DNA, 97 bp, Homo sapiens
tcatgtcagctgttctgcaggatcccatgagaagagtgaagttcccagaccctacgccccgctgtcaggcagcccgccgatcagatggaggagaacg

SEQ ID NO: 1386 - DNA, 50 bp, Homo sapiens
ttccgggaagccatagctctgcatgcctccaggggcttccagaacccgga

SEQ ID NO: 1387 - DNA, 101 bp, Homo sapiens
ctcctgagcagctgggactacagtaccaaaagaattggtggagctccatttgaagctgatgaggaaaattggcaaatctgttactgcagacagatgggaaa

SEQ ID NO: 1388 - DNA, 100 bp, Homo sapiens
cacagtgtcccaccatcaaagagatcagagaccagggctcctgtggctcctgctggctatcagttgagggatttgcagttgataaaatggctggagaggt

SEQ ID NO: 1389 - DNA, 82 bp, Homo sapiens
tagagaattaccttatcagtgcaggagaggattgtgtctgcttggtgtggagccatgaaggcccagctgagagccagcctgg

SEQ ID NO: 1390 - DNA, 75 bp, Homo sapiens
catttcctcgtcgagcgcaacccaaggtccagggcatgtccttcatagcagcagtgttgatcttgaacttagata

SEQ ID NO: 1391 - DNA, 80 bp, Homo sapiens
cctaagcctgcacagccgcggcggcagcagcagtgagaggctccccacaggtgcaggaagccgccgcccagccatggacg

SEQ ID NO: 1392 - DNA, 85 bp, Homo sapiens
cagggtctatggtgttttctccaacccctggcctatgagagctacaagaagaaggactacacccaggtggactacttaatcaacg

SEQ ID NO: 1393 - DNA, 75 bp, Homo sapiens
ttcccaatcccactgatgaggatcagcccatggacctggtcatcttccaaccacatgtcactatcctcttcctgc

SEQ ID NO: 1394 - DNA, 100 bp, Homo sapiens
tattggtgtcagcaaccagagggaaaccactgtagtctgggacaagataactggagagcctctctacaatgctgtgggaattgcctatctgtttgccaaa

SEQ ID NO: 1395 - DNA, 87 bp, Homo sapiens
cagaaagcaggtgctcctcctccttcagggtctgcagggaaatcctcattgacgattcaatttgttgaaggccaatttgtggactcc

SEQ ID NO: 1396 - DNA, 100 bp, Homo sapiens
cgccatgtcccgctacctgcgtccccccaacacgtctctgttcgtcaggaacgtggccgacgacaccaggtcttccgggctgcagggctccctcaggcag

SEQ ID NO: 1397 - DNA, 100 bp, Homo sapiens
tgcgcgcctgatgggtcgaggcggacgcgcggctgcgtcagtgggagctggtgaggtggccaacttcgctgcgtatgcgtttgcaccagccactctagtg

SEQ ID NO: 1398 - DNA, 98 bp, Homo sapiens
gacctcagttcccggcggctcttgcggggcacagggtgaggtggctttgaccccgggttgcccggccagcacgaccgaggaggtggctggacagctgg

SEQ ID NO: 1399 - DNA, 100 bp, Homo sapiens
cgggcgggcaagccagacagctgggccggagcagccgcgggcgcccgaggggccgagcgaggctcgtggtcccaagaagcatctgaagcgggtggcagct

SEQ ID NO: 1400 - DNA, 83 bp, Homo sapiens
cgcgcacgttggaaccgaagagagctctgttgttgcaaggccacaagaggaagctgaatgaagaggacgccgccagcgagtcc

SEQ ID NO: 1401 - DNA, 105 bp, Homo sapiens
ggtgtctacagagctgagtccattcacactggtttggaagttgcaatcaaaatggttccaatgattcttgttggtaataagtgtgacttggaagatgaaagagtt

SEQ ID NO: 1402 - DNA, 74 bp, Homo sapiens
ttgaagccgcctctgtattacttaccaggtttatttatgaaacagagcatcataatggcatagcagagttactg

SEQ ID NO: 1403 - DNA, 75 bp, Homo sapiens
cctcagttggaagcagccgatccagcctgcggagcctgtggggcaggcaccgggagcctggccgctgcagtggag

SEQ ID NO: 1404 - DNA, 50 bp, Homo sapiens
ggaacccaggccccgccgaggcggccagtgaaattaaatggtggcagaca

SEQ ID NO: 1405 - DNA, 96 bp, Homo sapiens
cgtcgttccgcgacggcctggctttctgcgccatcctgcaccgccaccggcccgacctcatgggccttcctgctgtgctggacgcccttcttcgtg

SEQ ID NO: 1406 - DNA, 83 bp, Homo sapiens
cgacgggccgagcctgccactacgcaaacatgcagatctttgtgaagaccctcactggcaaaaccatcacccttgaggtcgag

SEQ ID NO: 1407 - DNA, 97 bp, Homo sapiens
cgctgatgacacctggcagaaggcagccatggagggcgatggctcagattcgccgaaaaaagcagcaagcctcggcagcagtcaatcctccagaacc

SEQ ID NO: 1408 - DNA, 100 bp, Homo sapiens
tcctgggatcggcccaaggccagttctccgcaggtgactgcttagaaaactgcacagcatctgatgaaattagcgaataagaacatcaaccatgtcttac

SEQ ID NO: 1409 - DNA, 100 bp, Homo sapiens
ctgggtttgaacggaatgctggagtcagtggaagacggagctggtcggcccgaagggggatatgagactttctactcggaatatcctgagtgttgcgtgg

SEQ ID NO: 1410 - DNA, 75 bp, Homo sapiens
cagcagatattgtcataaatctgttactttcctacagagatatccagatccagtataaaatactcacgcagaagg

SEQ ID NO: 1411 - DNA, 83 bp, Homo sapiens
tgctgaggagtcatggaagagtttttaaaccaggagccaccggctgggaaagacggacatcccagagatccctcagcggtcag

SEQ ID NO: 1412 - DNA, 90 bp, Homo sapiens
ctgaggaagagatcaatcttaccagagggccctcagattcgattgaatagactattgaccattgatacagatttgttggagcaacaggac

SEQ ID NO: 1413 - DNA, 48 bp, Homo sapiens
agatcactggcagattttgaaaaggcatgaaaacagccctggaagtct

SEQ ID NO: 1414 - DNA, 90 bp, Homo sapiens
agagcaagcaaagagagtggaaatttacagctgccctatgtgaggcttgtaccattgttttgcgtggtgccactcaacaaattttagatg

SEQ ID NO: 1415 - DNA, 75 bp, Homo sapiens
gcctacccccatcactgcttccctcagccataacagagagctgtagtacacatggatgaacgacgagaagaacaa

SEQ ID NO: 1416 - DNA, 74 bp, Homo sapiens
atgcagtgggattggagataacccaggcactcaaagcttggattctgccgtgccactcacgaatggcgacacag

SEQ ID NO: 1417 - DNA, 82 bp, Homo sapiens
gaaatagagaaatatcgtatggaacgccccaaaatccaacagcagttctcagacctcaaggcactttgaggtgaatgaccgg

SEQ ID NO: 1418 - DNA, 51 bp, Homo sapiens
aaggaagattgtggatcaaataagagatgcgtattggatagcaatgaatag

SEQ ID NO: 1419 - DNA, 99 bp, Homo sapiens
gtctacgttcattcagggcctgctgtggaagaccagccccaaagctgcaagctttcttcctggtggcagatgacatcatggattcatcccttacccgcc

SEQ ID NO: 1420 - DNA, 75 bp, Homo sapiens
acaatatcctctgtggagaacacccccccatggaggcgagggaagaggaagaacgtctgagaaataaaattcgag

SEQ ID NO: 1421 - DNA, 100 bp, Homo sapiens
gtcctcgcttgcagttcagcgaccacgctcattgctatggacagtgctatcaccctgtggcagttccttcttcagctcctgcagaagcctcagaacaagc

SEQ ID NO: 1422 - DNA, 75 bp, Homo sapiens
ttcgcagtggtcgcttcttctccttggcgtgatgggaaggctctggagaggttcctgcaggattactttgatggc

SEQ ID NO: 1423 - DNA, 100 bp, Homo sapiens
tcaaagataaatacaagcagatcttcctgggtggtgtggtggctggaggtggccgaattgacaaacccatcttgaaggctggccgggcgtaccacaaata

SEQ ID NO: 1424 - DNA, 100 bp, Homo sapiens
tgatgtggaccgggccatctccgggggctccattcaggtgataacgtggtgctggaccagacctacctgtggcagggtgttcgagtggcggctggagcac

SEQ ID NO: 1425 - DNA, 109 bp, Homo sapiens
ggacaaccacaaggcagacatcagctcctggttcaacgaggccattgacttcataggctttatcctgtggataaacgcagagtgaacgagtttggggagtcctacgagg

SEQ ID NO: 1426 - DNA, 87 bp, Homo sapiens
ctgtatgacattccttacatgtttgaggcccgggaatttcttcgaaaaaagcttattgggaagaagacaccatccggaagatgaaga

SEQ ID NO: 1427 - DNA, 46 bp, Homo sapiens
atgaaagcctattgtgaacgacagggcttgtcaatgaggcagatca

SEQ ID NO: 1428 - DNA, 51 bp, Homo sapiens
ggatagctgttgtttcagagaaagaatcaggaaacccaggcccaacggcag

SEQ ID NO: 1429 - DNA, 71 bp, Homo sapiens
cagagagttaacttctgtttacatggaactcagacatctgcaaatcatgcatgcaatgatgctacctgttc

SEQ ID NO: 1430 - DNA, 76 bp, Homo sapiens
tggccatcttcggaccccccaacaccctctacgaaggcggctacttcaaggagccaaaaacctgtatatcatctcc

SEQ ID NO: 1431 - DNA, 100 bp, Homo sapiens
agcatgccagagctgcctttggccagaattcttccatctctatgacaacaagcccattttagctttctggagaatagcatctgagaaaagccaaagtgcc

SEQ ID NO: 1432 - DNA, 83 bp, Homo sapiens
gaacagcgcagtacgtttctccagagctgctcacggagaagtccgcctgtaagagaacactctgctccagccaaggtggtgag

SEQ ID NO: 1433 - DNA, 100 bp, Homo sapiens
gagtattttaacacaggatgattctgattttcaaggagacgcaggtcagaatggaaatgggctgcagaccgggcagctattgtcagccgctggaactggc

SEQ ID NO: 1434 - DNA, 150 bp, Homo sapiens
aactaatggaagagtgtaaaagacttcagggagaaatgatgaagctatcagaagaaaatcggcacctgagagacactggggttgggaaatcaagcatcgtgtgtcgatttgtccaggatcactttgaccacaacatcagccctactattg

SEQ ID NO: 1435 - DNA, 100 bp, Homo sapiens
aagggggcaacgaggaagctcttaagagcgcggccggaaagcaggtggttccatcaaggtcctaatccctacaatggagcacaggactggatttactctg

SEQ ID NO: 1436 - DNA, 75 bp, Homo sapiens
cctgtgtgcatggctttccaaaaggagttcgagaaatggctgctactaccttaagcggtctgctacagtgtaact

SEQ ID NO: 1437 - DNA, 97 bp, Homo sapiens
caaccccatcacataggggtttctgttaaggaactcgatttatatttggcatactttgtgcatgcagcagggtatgagctacagttccgattaggcc

SEQ ID NO: 1438 - DNA, 75 bp, Homo sapiens
cgagtcggaggaggacgaggacttggaaggatgtctcaattgattgaaaaagaaactgaagagtatcgtaaaggg

SEQ ID NO: 1439 - DNA, 74 bp, Homo sapiens
aggatgtggatgccctcaagtcctggctggccaagttactggagccgatgcatgtgctgataagttgaaaagag

SEQ ID NO: 1440 - DNA, 75 bp, Homo sapiens
tgggggttttcctctaggattctcgcgccgtttcctctgggcccagtaaatcctttagggccacctgtaccccat

SEQ ID NO: 1441 - DNA, 83 bp, Homo sapiens
gaccgtctggatccccgcccaggaagcccctctgaagcctcctcgccgccgtttctgagaagcgagacggtcatctgttccag

SEQ ID NO: 1442 - DNA, 75 bp, Homo sapiens
tggagacattcttgcgctgcatcgaagcctcagatggggaagggatccttcaagtatgcctgggtgctggacaag

SEQ ID NO: 1443 - DNA, 100 bp, Homo sapiens
agcgggacgaggaagggcagactggtgaaatcgcaaactgggcgtctgttccggcgccggacccctatttgcaaagtcctacaagattatcaattttgcc

SEQ ID NO: 1444 - DNA, 83 bp, Homo sapiens
catcaaaaatagtgatagctttgataaattcggtatatttcacaaacacagggtttgcctgctgaatatttattaagcgccgg

SEQ ID NO: 1445 - DNA, 82 bp, Homo sapiens
tctgctggtatacagctacatccaggagagaatgctgacagtcctgcagacatagatgcccttgtaggaggagaagttggag

SEQ ID NO: 1446 - DNA, 50 bp, Homo sapiens
ctccgcgggcggcccacggcgagtttgctaatccagactttacacaacct

SEQ ID NO: 1447 - DNA, 96 bp, Homo sapiens
tgctaactttgcacatttcaacagtcatgcagtgtgtacctgggcaatctgttttttaaccacctctgaagaagttcaaaaaaaattatatgaaga

SEQ ID NO: 1448 - DNA, 80 bp, Homo sapiens
caagttttgtgcagattgccagtctaaagatttggagcaagaggtggtggtggccttcccccgaagaaatttggtaatcc

SEQ ID NO: 1449 - DNA, 88 bp, Homo sapiens
ctcatgagctcagagcttgcccgccatagcaagcgagtccgcattgcccccaaggagcagctgacagacgaagaaaagtgctggacag

SEQ ID NO: 1450 - DNA, 90 bp, Homo sapiens
gtggctggctcctatgataatgaaggaaccctgtggaatctttcatcccatgactcaatcaaaatggagattgtggaccatgcactgcat

SEQ ID NO: 1451 - DNA, 100 bp, Homo sapiens
cttagagagagtctcaaaggagctgcagcttggtgtaaaaattgccaaagcagttgcctgccacaactttgtaaaagccaaaaaggaggttgaaaattca

SEQ ID NO: 1452 - DNA, 100 bp, Homo sapiens
tggacgccttcacccgcttcaccaaccagacccagggccgggaccgactcttcagatttggagtccaggaatgagactaagcatttatctgtaggaaaag

SEQ ID NO: 1453 - DNA, 90 bp, Homo sapiens
ccctgtggtggcttattactagctggactggccattatggaggaggagctgcagcattcccattgtgtgaattgtgtcagtagacggtgc

SEQ ID NO: 1454 - DNA, 82 bp, Homo sapiens
ttgcctgattgtttgcaggttgtcagagaagtacaggagattagcagaggcatttcatatcagtgaggattctgatcctttc

SEQ ID NO: 1455 - DNA, 100 bp, Homo sapiens
cctgcagccaaggaaggcttagaggaaggtgatcaaattctcagggttccatcaatggtgagcaccagcctgaatgcagaagcgctccagtatctccaag

SEQ ID NO: 1456 - DNA, 100 bp, Homo sapiens
gacaagaacagcgccgtcaccagcagagctcccagctcctccagcagccgacaggaggcccgtcaagatgcaggcaggcattgccaccccagggatgaag

SEQ ID NO: 1457 - DNA, 99 bp, Homo sapiens
cccagaacgcagatcagaggtagtcggacctttcccgctggcgcgcagcctcagctaggaaaatgttggggcttttcaggaagcataataagattccta

SEQ ID NO: 1458 - DNA, 90 bp, Homo sapiens
gcacttcattggccacctacagaaacaaaatgtcaacaaattgatggctgaaaatgtgtgtctgacatgcaagctcagtggggcagagac

SEQ ID NO: 1459 - DNA, 80 bp, Homo sapiens
agagatgtgatgttggagaactacagaaacctcgtctccctggtgccggtggcagatatcaaagccgtggtgacgggaaa

SEQ ID NO: 1460 - DNA, 100 bp, Homo sapiens
cgcctgcctgctccgccccagacctgtcggcgaaagggtgtccttgaatggccattttggacaaaactggttgtggtagccattggcttcacaggaggtc

SEQ ID NO: 1461 - DNA, 99 bp, Homo sapiens
atcaggagtgaagtcccagggatattctgtgctgccaagccctataccaagtcctgttttggggcgaaagccaaatgctagtcagtctttgcttgtatg

SEQ ID NO: 1462 - DNA, 90 bp, Homo sapiens
ctgcgtcaggtcacccagcagagatcagcaatccttggctcactgaggaggtttggacattcggaaattctttggagtaataccaagtgg

SEQ ID NO: 1463 - DNA, 100 bp, Homo sapiens
atgtcctggcagcattcagccagtattttagacaccatgaccacccttgatgataagttgctgggggagaaactgcagtactactatagcagcagtgagg

SEQ ID NO: 1464 - DNA, 75 bp, Homo sapiens
taagaccgaagaaatgccaaatgattcagtccttgaaaacaagagcacgaacttccaggagccggtgcagccgct

SEQ ID NO: 1465 - DNA, 75 bp, Homo sapiens
tgctggacggccagtgggagagcgaggcctgagcctctgcgtctaggaccatggccaacctggagcgcaccttca

SEQ ID NO: 1466 - DNA, 94 bp, Homo sapiens
gcgaggtggccggagccgtgtggaccaggaggagcgctacctgcctagagctggaacgttacctccagagcgagccctgctatgtttcagcctc

SEQ ID NO: 1467 - DNA, 82 bp, Homo sapiens
ggtgagcctcatcacacaggatccgcccctggacatggaggagaaggtccgcttcaaggagtgtttgccattgtggagatgg

SEQ ID NO: 1468 - DNA, 100 bp, Homo sapiens
ttgaatgacagcagcattaaacatatatgtgaagagtccccgatgtttgtagaccttatgtgtttgtaaaatgtatgaagaacatctgaaaagaatgaat

SEQ ID NO: 1469 - DNA, 75 bp, Homo sapiens
gattccaagtaactcttatttggttactcaaatgagtcgtccagacttgattctctttctgatgaaatacctgat

SEQ ID NO: 1470 - DNA, 101 bp, Homo sapiens
catactcacagagttagagagagggatggtggtttctgagtcccttcaacatgatcctgggaggaatcgtggtggtgctggtgttcacagggtttgtgtgg

SEQ ID NO: 1471 - DNA, 82 bp, Homo sapiens
tctccgcgcacatcactcccgagtggaggaagcaatacatccagtatgagagaaaaaatgatccctatgctcttgcatccct

SEQ ID NO: 1472 - DNA, 100 bp, Homo sapiens
gtggtgcggcctcaccatacaggaacagggcagacgttagcgtgagtgatcactctcaatcccggtactatactggcaattgctggagaagattttgcaa

SEQ ID NO: 1473 - DNA, 100 bp, Homo sapiens
tgaaactgctggtgcagcagttttccattctggagacgatgacagccttggacttcaatgacttcagtggtggatctgaaccttctaacagaggaggtaa

SEQ ID NO: 1474 - DNA, 100 bp, Homo sapiens
gccttctgggccctccccccatggccaatggaaaacctggcgaccctaagtcagacaaagtggtgaagaaagggaagaaggacaagaagatcaaaaaaac

SEQ ID NO: 1475 - DNA, 100 bp, Homo sapiens
agcttgccttctgagctttgtaccaaagacctgggaaaagtaccaggtcatcagtacaccatctgatattttcatggtgatggaatatgtctcaggagga

SEQ ID NO: 1476 - DNA, 101 bp, Homo sapiens
gctgatcgagcaggcggcgcagtacaccaacgcggtgcgcgaccgggagctggacctccgggtctgcgggccaggcatcgacatccgcaacgactatcagc

SEQ ID NO: 1477 - DNA, 104 bp, Homo sapiens
gctcatcaaggacgggaagtcactcataagcgcgctcaagaactatctgttatagtccctgggtcaagacaacaatttttataccttcgtcgtggttcagaaag

SEQ ID NO: 1478 - DNA, 83 bp, Homo sapiens
gacgttccctcagcctctgcccaaagaaagaaggagagtcctgtgtatggaaactcacatgagtcagctcagtctagaagggt

SEQ ID NO: 1479 - DNA, 83 bp, Homo sapiens
ccgacactctccaggctccggacacgatgcaggccatcaagtgtgtggtggtgggagatgggagccccagtggcaccagtgac

SEQ ID NO: 1480 - DNA, 83 bp, Homo sapiens
gggatggatcagctgtgaaaaactctttggatgattctgccaaaaaggttttaaaatcaaagatgggaaaatcggagaaaatt

SEQ ID NO: 1481 - DNA, 90 bp, Homo sapiens
gcttggtcactatggaggagataggcatcttggtggagaaggctcaggcttggtggggggcccagcgatgccaaggaggtcatggagcac

SEQ ID NO: 1482 - DNA, 82 bp, Homo sapiens
caccatgtccgacggctggaagttcgagcaggctgagcagtccaaagtcctgagcgccgtggaggaccgcatggacgagctg

SEQ ID NO: 1483 - DNA, 95 bp, Homo sapiens
gcgtctcggaaaccggtagcgcttgcagcatgcgggctgacgcacgaggcacacaggaaggaggtggagcaggtgtatctgcgctgtgcggcggg

SEQ ID NO: 1484 - DNA, 101 bp, Homo sapiens
tccaaataaattgcaagcattctatccaaatggtgctggagaatctggtaaaagcaccattgtgaagcagatgaggatcctgcatgttaatgggtttaatg

SEQ ID NO: 1485 - DNA, 90 bp, Homo sapiens
atttggctgattatttcaaccgaaactgttatcaggatgatattaacagtggcatggcagagagaaatgctaattttgaagcccttcctg

SEQ ID NO: 1486 - DNA, 95 bp, Homo sapiens
ctgaagagaagatgcccctgctgacactctacctgctcctcttctggctctcagggcccggcagagggcttgcatgtcagccagccccggaggag

SEQ ID NO: 1487 - DNA, 100 bp, Homo sapiens
aagaaggtggtggtcaacgggcgggtgctggagctgttccgggccgcgcagctgccgaacgacgtggtcctacagatccaaaaggaaagtcctcggccgt

SEQ ID NO: 1488 - DNA, 90 bp, Homo sapiens
ggaattacatagctggaaaggatcttacagcactggccccctcaccttttcctttccagctgtttggggctcagctaagtgaccacacag

SEQ ID NO: 1489 - DNA, 74 bp, Homo sapiens
gaaattggagatggaaccacaggagtggttgggtttttaatgaccacaacaagcaagcatgcagcttactgctt

SEQ ID NO: 1490 - DNA, 104 bp, Homo sapiens
gcagcccccggggcaagagcaggagcccggcaccccccgccgacaaggaggggggggccctcagcctcttggccttgaacgggctgttcatcttgattcacaaa

SEQ ID NO: 1491 - DNA, 90 bp, Homo sapiens
cgacctagagagatcccggctcccagcccactgagtggcttcagcctcgctggtgtgctgatgtatcgggactaccccctggaactattc

SEQ ID NO: 1492 - DNA, 75 bp, Homo sapiens
agctcctggtcgatgaagaggatgatgtttttggtgaagtgcccactgttgatgtctttcagatttccacaaaag

SEQ ID NO: 1493 - DNA, 78 bp, Homo sapiens
aaaaggcctaagaattttggcattgctccaaagacaacaggccctccctctgccctcccgtctgtgagctccctgccc

SEQ ID NO: 1494 - DNA, 75 bp, Homo sapiens
ctcatgaacagaaacacctaggaagggagaactgctggccctgaaggaccctgttcatacagtgtcactgcagca

SEQ ID NO: 1495 - DNA, 98 bp, Homo sapiens
ctgagcggagcccggtgacaggatggatggatagaatgacagaagatgctcttcgcttgaatctgttgaagcggagcttggacccagcagatgagcga

SEQ ID NO: 1496 - DNA, 80 bp, Homo sapiens
gacatgccccacactgcaggagcagtgcacagagctgtggggaccaggaactgtggctgcaccatctgtcttcatcttcc

SEQ ID NO: 1497 - DNA, 83 bp, Homo sapiens
ccggcgtgttcatgcccccggggccaagactaaggggctgcagagcggggtggacattggcgtcaagtactcggagaagcagg

SEQ ID NO: 1498 - DNA, 75 bp, Homo sapiens
acgcacaataccaggcttcctccttccaggaatcattgagagtctggaggcggctggtggaaatccaattccccg

SEQ ID NO: 1499 - DNA, 50 bp, Homo sapiens
gtcagcactcagcgcgggccgcaattctgtggtgttcttggtcacacatt

SEQ ID NO: 1500 - DNA, 58 bp, Homo sapiens
ctgcctcagcctcccgagtggctgggattacagactggaaagctacccttgaggagaa

SEQ ID NO: 1501 - DNA, 100 bp, Homo sapiens
gctggtcattgttggtgaaagctaaggagcaagtaggagttctcaagatgaaatggatggtgaacaaatagaagctgagggtgaaggacctacagctgtc

SEQ ID NO: 1502 - DNA, 100 bp, Homo sapiens
ggctttgctctgggctcctgttccctgtgagctgcctggtcctgctgcaggtggcaagctctgatccttctggagagtgcaacccagacttgcgtctccg

SEQ ID NO: 1503 - DNA, 100 bp, Homo sapiens
aagaatattaaaaaatctggagggactccaacttcaatgtttgcccagtatgcggagatcgtccacttcaccctcccagatgggactcagaggagcgggc

SEQ ID NO: 1504 - DNA, 98 bp, Homo sapiens
tactacacaaccgtctccagccttggtctgagtggactgtcctgcaggtgctggagaatctggtaaaagcaccattgtgaagcagatgaggatcctgc

SEQ ID NO: 1505 - DNA, 50 bp, Homo sapiens
gctgacgacctgctacaacagaagtagtaaacctattgatggcaattttg

SEQ ID NO: 1506 - DNA, 100 bp, Homo sapiens
aggaacctatgtgatcaacaagcagacgccaaacaagcaaatctggctatcttctccatccagggcgccaatgcttcggcattagagaaagagattggtc

SEQ ID NO: 1507 - DNA, 82 bp, Homo sapiens
gtggcgctgcgggtggggccgtcggcggcgctggtcactgcagccagaggggtccagaagagagaggaggcactgcctccac

SEQ ID NO: 1508 - DNA, 82 bp, Homo sapiens
ttccatctgtggaaggacctaccaaccagggacccttatgatcctcaagtctgcctgcagcaacaaccccagctacatagac

SEQ ID NO: 1509 - DNA, 75 bp, Homo sapiens
agcatttacatgacagaaatcacctatgtttacagcgacaggttgctgatcagctctgtgccaagtatagcaagg

SEQ ID NO: 1510 - DNA, 99 bp, Homo sapiens
ggcgctgggagcgctgtagcagctgagaaggggctgaggcaccgccgcttcgctgacagccggccaccaggttgtgcagcctgactctgaagaagctgg

SEQ ID NO: 1511 - DNA, 101 bp, Homo sapiens
cgcggaacggtcgtggagaagaagagctgctgatgaggactgggacaggatgatgcacgccaactctttgtgctagctggagctgctgaagaaggctttat

SEQ ID NO: 1512 - DNA, 100 bp, Homo sapiens
ctccagcccaagatgattccagcagtggtcttgctcttactccttttggttgaacaagcaggtaacctggatgaggacatcattgcagaagagaacatcg

SEQ ID NO: 1513 - DNA, 86 bp, Homo sapiens
gctctgcgtgagtgtggtctacgagctgtttctcatctttatactcttccagcacctggccacattcatcatggacaagagcgaag

SEQ ID NO: 1514 - DNA, 98 bp, Homo sapiens
tttgagacgcgggagaatgcaggctgcgtgctggtacgtgcttttcctcctgcagcccaccgtctacttgataggaaccaaggctttagccttctcaa

SEQ ID NO: 1515 - DNA, 76 bp, Homo sapiens
agctggacccggaccggttttggaagtattagaggaagctcttgtaggaaatgacagtgaaggcccactgtgtgaa

SEQ ID NO: 1516 - DNA, 96 bp, Homo sapiens
agctcttcttgaaaaatgcaaagatgtagatgagagaaatgaggtggataatattaatgcagctgtgatggatttgaaaaaaaagaagatccgcag

SEQ ID NO: 1517 - DNA, 101 bp, Homo sapiens
cagtggtcgcttcttctccttgcattcttgttatttaacacgggaaggaggtgacttcgcctgtgatggacttccagtgtgagcactggccagagtgacca

SEQ ID NO: 1518 - DNA, 100 bp, Homo sapiens
ttcgagcagtcgcacctggaggttcagctggctgaccggttccctgatgtgttacctgcttctgctactgatccaaactgcagaacttctcattcatccc

SEQ ID NO: 1519 - DNA, 95 bp, Homo sapiens
cttgttgatctgtttgatggcaccagccagtcaacaggtaagaaccttgatgctgtccatgatatcactgtggcgtatcctcacaacattcctca

SEQ ID NO: 1520 - DNA, 75 bp, Homo sapiens
ccggcgacatactacctctggccccgagatcagaatgccggtacatgatgttgattgatggcacaaatgaagttt

SEQ ID NO: 1521 - DNA, 100 bp, Homo sapiens
cgggaagacgcggggaagaggaggcggaaaaggacgcaaagttctccggcgaggactaccgaccagactcccggaaatcatgttggtaggatcccagtct

SEQ ID NO: 1522 - DNA, 98 bp, Homo sapiens
ggtggtggtgtcttcctgtctcaacgatacctattttctagtgctgagatcctgagacaatggatttgtaggtgaaaatgcccagccaatcctagaaa

SEQ ID NO: 1523 - DNA, 100 bp, Homo sapiens
gttgactggaagaacattgtttcctggtacagaccggcatgacgcgcctcctgctcaccaagattcccttcttcagagaaataatagtgagctccttttc

SEQ ID NO: 1524 - DNA, 75 bp, Homo sapiens
acaggaaggcatgcatgtgacacctcaggcatgctggaagatggactgccctccaatggtgtgccccgatctaca

SEQ ID NO: 1525 - DNA, 120 bp, Homo sapiens
gagacctcggtgggcagaaaggaaccgggttgtcttgggccgggcagggcgggtgtggacacctcaagatcgccagtgtgtcctgagtaccttagcacagttgcttttggataaggactg

SEQ ID NO: 1526 - DNA, 74 bp, Homo sapiens
ttccctaaggcagccatcaaaagggtcccacgtacctcggagatttatgtccaccgaagtggtcgaactgctcg

SEQ ID NO: 1527 - DNA, 90 bp, Homo sapiens
ctactcgcccgccaccctgcgctgccgccgctctgaggagttaaaggtgtcagctgtgatgcatgtttaaaaggaaattttcgaggtcgc

SEQ ID NO: 1528 - DNA, 99 bp, Homo sapiens
caaagaaggccagcaacgacgaatacgacagcaacgcttgatctctataggcaaatggattgctgataatcagccaagaggcatttcatccttcatgaa

SEQ ID NO: 1529 - DNA, 98 bp, Homo sapiens
tgctgctggggctgggctcgccagtcttggggacagtgtcagcgctgccagctgttggtatatccaggagcttttaatctgaccactggaccagccca

SEQ ID NO: 1530 - DNA, 99 bp, Homo sapiens
ccgaaattcagatcgatttgtctcaatgaaggttgatttcatcagactaaaaagttacagggaaaccctgatagattggtgtgatgaaaaggaacttaa

SEQ ID NO: 1531 - DNA, 98 bp, Homo sapiens
tgctgttataaccttccttcagtatcacacaggtgtgagcgccactttgaagggcatccaacccgcggctatccatgtggaatcgctttcagtccttg

SEQ ID NO: 1532 - DNA, 96 bp, Homo sapiens
agcatgagcgaaagctacacgctggaggttatcaatactctggctgaccatcatcatcgtgggactgactttggtggaagtccttggttacatgtc

SEQ ID NO: 1533 - DNA, 111 bp, Homo sapiens
cgagtgtaggcgacaggccgctgacggccggaaggaaaatggtatatgagtagaccagtgatgagtggcccaggactctatgaccctacaaccatcatgaatgcagatatt

SEQ ID NO: 1534 - DNA, 83 bp, Homo sapiens
cagcggcttcgagctctcctctgatggcaggacctgccaagcaaattgtggctactaatttgccccctgaagatcaagatggc

SEQ ID NO: 1535 - DNA, 104 bp, Homo sapiens
ccgagatgtctcgctccgtggccttagctgtgctcgcgctactctctctttctggcctggaggctatccagcaataccctctaccatctgctttggtcagggtg

SEQ ID NO: 1536 - DNA, 89 bp, Homo sapiens
tgctcccagcatctccagcaacaagctgtctctgccgatggcagaaacggtggacacaagcgaaatggtcaacggcgctacagaacaaa

SEQ ID NO: 1537 - DNA, 100 bp, Homo sapiens
ccagtgtggtgggaggcctgggagtcaccatgacaggctacatgtttggtaaagggatctatttcgctgacatggtctccaagagtgccaactactgcca

SEQ ID NO: 1538 - DNA, 101 bp, Homo sapiens
gggaatactttgagaggttggagaaggatctagtgaaaagccatttgatgtatgcggtcagagaagaagtggaggtcctcaaagagcaaatcaaagaacta

SEQ ID NO: 1539 - DNA, 90 bp, Homo sapiens
agatagccgtcttcagcttgagccccatcactaggttccaccccgatgcaggtggtcacgtgcttgacgcgggacagctacctgacgcac

SEQ ID NO: 1540 - DNA, 80 bp, Homo sapiens
cttgatgattcacaacttttagctgtgccagtgtgaagcctcagtttaggtcatctggtggttcagaacactcaacagag

SEQ ID NO: 1541 - DNA, 50 bp, Homo sapiens
gaagtgctcaaatctgaagataatttgaaagacatattggctgacctgat

SEQ ID NO: 1542 - DNA, 83 bp, Homo sapiens
gcctggagcggctggccatcgacaatgcagatcttcgtgaagactctgactggtaagaccatcaccctcgaggttgagcccag

SEQ ID NO: 1543 - DNA, 48 bp, Homo sapiens
tacaaccttcgatctcctgacgagccgctttgtagttcagaatgtttc

SEQ ID NO: 1544 - DNA, 75 bp, Homo sapiens
cttcccttcccaaggactcgacctgagaagattttatgggcagctgcagaagttctgtcccccacactaccccga

SEQ ID NO: 1545 - DNA, 83 bp, Homo sapiens
cccacgatgtttcagacagtccccgacacgtcgtcttacatcaagggtgactatgaccagagcaggaccaaagtgctgcacat

SEQ ID NO: 1546 - DNA, 97 bp, Homo sapiens
gggagtctccgcgtcccgctcgctgggagagaggtacctctccttttccctctccctttccctaagagttgcatgctgagaatttgaaaaatgaaga

SEQ ID NO: 1547 - DNA, 75 bp, Homo sapiens
gaagcccgggaccgtttaaaaaactgggcaacctcctggcttcaggggccagcgattctgaaatcttcatttggg

SEQ ID NO: 1548 - DNA, 75 bp, Homo sapiens
aggcttcgagtgacccgggtgccgaggagcgggaagagttgctgggagagctggcggtcaccatggcaatgcggg

SEQ ID NO: 1549 - DNA, 85 bp, Homo sapiens
accctgccaagttcaagatgaagtactggggcgtagcctcctttctccagaaaggaagcggccttctgatctgtttaccacgtga

SEQ ID NO: 1550 - DNA, 90 bp, Homo sapiens
acacagatgaaggtgggaaggatggtccagaattcacttttactaccccaaagtttggagttgtgaacagatgtgtgtacagcacaacca

SEQ ID NO: 1551 - DNA, 95 bp, Homo sapiens
tctgatatgatgggaaatacaaatgaaccaagcacacgtgtccgagtaaactgtcttgagccccaccctcacctgcctgtgctggcaaccagtgg

SEQ ID NO: 1552 - DNA, 82 bp, Homo sapiens
ggattccaagtaactcttatttggttagaacaattaatcctctctgacactggaatttcttctctacattttccggatgctg

SEQ ID NO: 1553 - DNA, 87 bp, Homo sapiens
gcgcgccgctgcccgcgccacagacgaagttatacggaagcgtctcctcattgatggagatggtgctggagatgatcggagaattaa

SEQ ID NO: 1554 - DNA, 87 bp, Homo sapiens
aactaggaatctatgatgctgatggtgatggagattttgatgtggatgatgccaaagttttattagtgtgttttatggaccatgtgc

SEQ ID NO: 1555 - DNA, 98 bp, Homo sapiens
acagggacccagcattaacacagcttacccccagccccacctacctattttaactgttgacttcgcatatcatttaagtggatggttcgagctttctc

SEQ ID NO: 1556 - DNA, 100 bp, Homo sapiens
gcagtgacacctcctggcttggcaagagaagactggaaaattataagagcactctctgaggatgtacgaagtaggtccaaagttgttgaccgtatttaca

SEQ ID NO: 1557 - DNA, 100 bp, Homo sapiens
ttggaccttccggagcttctcagaagacagagggttttcttttgaggttcatcaccttgctgggtctcatcctccctccggctggaacagtctgcgtggc

SEQ ID NO: 1558 - DNA, 100 bp, Homo sapiens
gtcatggcggtgtcggagagccagctcaagaaaatggtgtccaagacgagatgatgcctattggccagaaggaaagcgtgtggcaatggaggaccgatat

SEQ ID NO: 1559 - DNA, 82 bp, Homo sapiens
tgcaagagcacgctatgagagatacagtggcaatcaggttctcttttggttccccacattggcagacaaaattagaagcggc

SEQ ID NO: 1560 - DNA, 50 bp, Homo sapiens
ggcgaccggagcgaacgccacgccgttggttccagggtctccctccactg

SEQ ID NO: 1561 - DNA, 101 bp, Homo sapiens
gagttggaagggcaggatgaaaaccaagaaggagattttgaagatgcagatacccaggctgttgccaaaatggttcaacagtgctgtacttatgttgagga

SEQ ID NO: 1562 - DNA, 100 bp, Homo sapiens
tcaagtcgtaaaaacaggtcaagtgtttcagtgcctgtgtaatagaagggtctgtattgtaaaagaagtcaaaagcagccttgaataatcggaacccttt

SEQ ID NO: 1563 - DNA, 101 bp, Homo sapiens
ttatttggtctgagatctcttacctttcaaagtggtgggatattatagatattcagaagaaggatgctgttaaaagtgagatggaagattttcgaggtata

SEQ ID NO: 1564 - DNA, 88 bp, Homo sapiens
gccacagtgtcccaccatcaaagagatcagagaccagggctcctgtggctcctgctggttccaagatgagatgggattctccaacatg

SEQ ID NO: 1565 - DNA, 88 bp, Homo sapiens
caaaggccagacatggagtcctgggctttactcatcagtcttaagtatggttgttttatgtggcaattgggagatactgatacttgtt

SEQ ID NO: 1566 - DNA, 100 bp, Homo sapiens
attatgacagattacgccccctatcctatccgcaaacaggaactctaatgatccaggacaaagaagttaccctggagtatgtatcaagcctggatttttg

SEQ ID NO: 1567 - DNA, 100 bp, Homo sapiens
catgctgggagccatctgtgccatcatcgtggtagttattgtaatgtcgcgctcgagtcccgacgggccgctccaagcctcgacatgtcgtacaactacg

SEQ ID NO: 1568 - DNA, 100 bp, Homo sapiens
gtgccagtcagcagtttttgaactccatcaaaaaggggtttgatctgtggatgaaatgaatcatgattttcaagctcttgcattagaatctcggggaatg

SEQ ID NO: 1569 - DNA, 75 bp, Homo sapiens
cagattttgcattggatattcgcatgcctggggttacacctaaacaggtacgttgaagatggagaacaactgatg

SEQ ID NO: 1570 - DNA, 101 bp, Homo sapiens
cttcaatgcagatgggtctgaggacagtcattttgtttactcattcagccctgttgcaggtcccaataaactcttcataaggttgacagaagcaccctctg

SEQ ID NO: 1571 - DNA, 90 bp, Homo sapiens
cactggcctcgggatagccatgggcaagctgcaccttgcatgagggacaaagctacacagaataccctctaccatctgctttggtcaggg

SEQ ID NO: 1572 - DNA, 100 bp, Homo sapiens
tgaaactcaagatccccatggacaacaaggagaggcaccaagtctgaaggaggcagaagggaaagaacctgagctcttcctaagtagatccaggcctgtg

SEQ ID NO: 1573 - DNA, 75 bp, Homo sapiens
gctggctgctgtgggccctgctcctgcgcttggttaatttggagtggcccctggagtcagtttcctacaccatcc

SEQ ID NO: 1574 - DNA, 134 bp, Homo sapiens
ccagcacgtccaccaacctgaccatgacctttaacaaccagctgaccactgtccacaaccagatttccttgctgaaacagaatctggagatacagctttcccagtctcagacttctttgcaacaactgcaagcc

SEQ ID NO: 1575 - DNA, 100 bp, Homo sapiens
gaaagaaaaagtactaccttattgaaaggctttcttagaaatggcttctgaggaagctgccgttactatggtgaattattacactcctattactcctcac

SEQ ID NO: 1576 - DNA, 98 bp, Homo sapiens
ggatctgacagatgccagcgtagctgaatccagtaccaaaaacgtcaacaacagttttacggtggttggaggcaaagtaaagaagcccggtaaacgtg

SEQ ID NO: 1577 - DNA, 93 bp, Homo sapiens
gataacctgtctcaaaaccctcctcatcatctactccttcgtcttctgggtggtgatgatgtccagcaactctgtgaagcaggagaagaggag

SEQ ID NO: 1578 - DNA, 74 bp, Homo sapiens
gcctcgcctggatgtgagtttcagccaggcagtttggagcatgtgaacaccttgagccttgatgagttccagta

SEQ ID NO: 1579 - DNA, 100 bp, Homo sapiens
gcaagaagacggaaatccaaaggcagacagtacgggctcccttcgccaaactcttcattttctcttgatgtcttggcattgcccattttcaagcaggaag

SEQ ID NO: 1580 - DNA, 50 bp, Homo sapiens
aatcgagaagcacgactgcaatgcttaccccagagtgaagagaagggcat

SEQ ID NO: 1581 - DNA, 82 bp, Homo sapiens
ttttcccattgttcaaggacaaaggtggcccagaattttccagtgccctgaaaaatagttgcttttaactttgacagaggaa

SEQ ID NO: 1582 - DNA, 72 bp, Homo sapiens
tgctgcaaggctgagggacgagaacgagatcaacagtacaaattctgaagtttgtaaacttgctgatggtgg

SEQ ID NO: 1583 - DNA, 71 bp, Homo sapiens
ctgacggcgactgcgggaggccagattactctcgtggctttggtggccggtacggggtggagaaggataaa

SEQ ID NO: 1584 - DNA, 83 bp, Homo sapiens
ctgctgggggagatggaggcgaagacaagagagctcattgccccagtggaccacctgcatttgccgcccacccctccgagcag

SEQ ID NO: 1585 - DNA, 100 bp, Homo sapiens
tgatctaatccaaagtatcttataacttctggctggaattaaggcattttgttcccaacatcacctttggtcaccctgtggtagaaagccttcgaaagca

SEQ ID NO: 1586 - DNA, 82 bp, Homo sapiens
ccgcagctgcgatggccgtggccgtggggagaccgtctccctccagaatacccatcatatagcccctgaggtggcatggtga

SEQ ID NO: 1587 - DNA, 102 bp, Homo sapiens
atgaagaaaattaaaaaactggagaatgacaccatttctaagcaacttacattagaacagcagggagaaggttttaaggtgaaaacgaagaaagaaatccgg

SEQ ID NO: 1588 - DNA, 90 bp, Homo sapiens
acagtcttcagtaattacagtctacacaatgtatttgacatggtcagctatgaccaatgaaccagggttgcagataagctcccccggccc

SEQ ID NO: 1589 - DNA, 95 bp, Homo sapiens
gggaggtagagaggggacatctccttgcagaccgcccctccgcttggtggtcctgaggctcccgtgggcacaagagatggggttttgccgtgttg

SEQ ID NO: 1590 - DNA, 130 bp, Homo sapiens
tcgaagcagcagaacctgccgacggtgacttcacctgggaacctgatggtggtgcagccggaccgcattcgctgtggggacgagattgaggagctgcgggccgagatgctggagatgcgggacgtctata

SEQ ID NO: 1591 - DNA, 100 bp, Homo sapiens
ggaacatggcggatcggctcacgcagcttcaggacgctgtgaattcgagaagctcatagccaaactgaaaagcggaggagagataaaatgaataacctga

SEQ ID NO: 1592 - DNA, 100 bp, Homo sapiens
ccaccttccagcacaaggagctgatggccgctgacaggggacgcaggatcacagaagaactgcagcttcctggggagcagtttcacctccacaggcatcg

SEQ ID NO: 1593 - DNA, 100 bp, Homo sapiens
tagctcactgtagcctcgaaattctgggccgaaatgatccgcctgcctcagcctccaaagtagctgagactacaggtgtcatggagaaactccagctggg

SEQ ID NO: 1594 - DNA, 75 bp, Homo sapiens
aagaaagtagaggacatgatgaagaagctgtggggtgacaggtcatgcggaaatatgaactttgctcgaaggaat

SEQ ID NO: 1595 - DNA, 90 bp, Homo sapiens
ctatacatcctgacaaaattaggattgcaactggacagatagctggcgtggataaagatggaaggaaatatgagattacggagcagcgca

SEQ ID NO: 1596 - DNA, 100 bp, Homo sapiens
ccccacatcggggcagctgtatggcctggccagagaactctcggatgagatccaagtccaggttgcacactgggccacagaggatccagcaaggatgaag

SEQ ID NO: 1597 - DNA, 100 bp, Homo sapiens
cctgacttggaccctggaaaacctggccctcttcaatttctgacaaaaggtggattcatcattcctttccctttatgacagccacgtagcaaaggagatt

SEQ ID NO: 1598 - DNA, 100 bp, Homo sapiens
gcacgttataacttgactggctccaatgcagttatggctgcagcttcgattgccaatattgtaaaaagttctcttggtccagttggcttggataaaatgt

SEQ ID NO: 1599 - DNA, 74 bp, Homo sapiens
tagaattgtggatgaaatcctggatgcactctcacattgccatcataaactgaaaatccatcctctcagtattg

SEQ ID NO: 1600 - DNA, 50 bp, Homo sapiens
ttttaactactggaagtttgcgtggatattgctgcatatcgagctaaagg

SEQ ID NO: 1601 - DNA, 126 bp, Homo sapiens
gaagaagaaccatgggtgatggaggaagaagtattaaggagacactggcaagctggaggagcaccggaattcacagaagcagatgaagctcctacagaaaaagcagagccagctggtgcaagagaa

SEQ ID NO: 1602 - DNA, 75 bp, Homo sapiens
gggctccctcgtgaagaacctgaaggacacactaggacttccttcgctgggcatctggctgggattcttgttgga

SEQ ID NO: 1603 - DNA, 98 bp, Homo sapiens
gggcccttctgggcgagaaagggaggagcaactgaagtcacatgaaagtaagctgaagcagatcaccaccgagctggccgagcaccgctcatatcccc

SEQ ID NO: 1604 - DNA, 79 bp, Homo sapiens
gtggtggatggcatggggcgctttggcagggttcgggggtgattaaagctggctttgcaggagaccagattcccaaata

SEQ ID NO: 1605 - DNA, 90 bp, Homo sapiens
acctgtccaaaggcctggcccggcggctcagccccatcatgctggtgccggtggtggtgtgcacattgagccccggtatagacagttccc

SEQ ID NO: 1606 - DNA, 100 bp, Homo sapiens
acaataaaggtgctaagaaagagaatgtaagacaggaaaataattaaatattcttaccgagaatatggctcaagcctggaagatgacgtggtgggggaca

SEQ ID NO: 1607 - DNA, 100 bp, Homo sapiens
ggcgtccaggagtgacctggggctgtggagagcgacccgtggccttgtgtttcagtttctacagcagtataatcactacaaatccaatgtggagattttc

SEQ ID NO: 1608 - DNA, 75 bp, Homo sapiens
ccggagggggaaaaaatcccaaggtctgcaaagccaggcgggcaccacggcaggggctgagctaccctcatggaa

SEQ ID NO: 1609 - DNA, 90 bp, Homo sapiens
gacagaaaagacagtgttctgctttcatggagttcacagaagagtcgaggagaaaaatccagttacactcttaaaggaattgtcagtgat

SEQ ID NO: 1610 - DNA, 75 bp, Homo sapiens
cccctgggcatcaccaacatagccatcgacttcggggagcagggaggtatggaaacattggaacttcaaaaggac

SEQ ID NO: 1611 - DNA, 90 bp, Homo sapiens
gtccaagacttgcttgagtgtttcagtgaaaaggttttcctttggaatatggataaatacaccatgatacggaaactagaaggacatcac

SEQ ID NO: 1612 - DNA, 101 bp, Homo sapiens
ccacaataaaagagacctctacttagctcagcaattcttaccttaaaagaggcacagttagatgaagaaggacagtttcttgtcagaataatatatgatga

SEQ ID NO: 1613 - DNA, 96 bp, Homo sapiens
attttacaaaattacatctgaagcacttcttgttactcaacagcttgtcaaaggaccagcaggagagcagtacaccatccaaggactcaactctct

SEQ ID NO: 1614 - DNA, 75 bp, Homo sapiens
cctgtgcaggtgaggacaggccaggtatggcggctctgaatggaggacttggcgccacaggcttgacgaatggca

SEQ ID NO: 1615 - DNA, 100 bp, Homo sapiens
cgcaagtacagagagtacagccccccatatgcgccgacttcgtgaagatgcatcaactgtaaaatctgcctgggatgctcaaattgctcaactatctaag

SEQ ID NO: 1616 - DNA, 100 bp, Homo sapiens
atcggcttcggtgactttgtggccgtgcctacaccaactaatgttacaattgaatcctataacatgaaccctatcgtatattgggagtaccagatcatgc

SEQ ID NO: 1617 - DNA, 75 bp, Homo sapiens
cgggaagtgggagcttcaggctcgctccgtgcgggtatttgtggaaacattagacaaatgttttgaaaatgtctg

SEQ ID NO: 1618 - DNA, 118 bp, Homo sapiens
ggaactttgagcacggcttccgtgtgcatggaaagaactttcacctgatccaggccaacaagctccaccgggggacggctacgtgcaggcggacgcccggggccccccggaccacgag

SEQ ID NO: 1619 - DNA, 90 bp, Homo sapiens
aagaaaagggatatgtccagcgacttggagagagaccatcgccctcatatacgcatgagtcaactggaagttaaagaaaaagagctcaat

SEQ ID NO: 1620 - DNA, 100 bp, Homo sapiens
agaacattcctggaatcaccaggcaagaagaggattggagtgggttgtcttctggcctcagagtatcccttatcagaaccttgggcccctgggccccttc

SEQ ID NO: 1621 - DNA, 132 bp, Homo sapiens
ccaaggcgcgccactcctcccggaggcgacatggggcacccggtgtaccgcggcgagaagccccagctgcactacgcggagaagaggtaccgtttccagaaccaagtggacaaaatgaaggaaaaagtcaag

SEQ ID NO: 1622 - DNA, 100 bp, Homo sapiens
tcaagtggaaacaactgtctgtgctgggcctaaaggagataacatttatgaatggagatcaactatacttggtccaccgggttctgtatatgaaggtggt

SEQ ID NO: 1623 - DNA, 100 bp, Homo sapiens
tcagcatggctcatattctacttcattcagaagatcaggtacacaaatgcacgcgacaggaaccagccagtgcattatgaagaaaagaactggtgtgagg

SEQ ID NO: 1624 - DNA, 100 bp, Homo sapiens
ctggtgtacatagtgttgggctaacttggattcataaacttcacaaatttcttggatcagttgtcgagatgtccacagaaggaggatttggtggtactag

SEQ ID NO: 1625 - DNA, 100 bp, Homo sapiens
cgtattcgttgttctcggcgggctgtggggcctccgcgccgcggccgttagtcatgtcggaggtcctgctgtactagccaccaaagcagctgctggtact

SEQ ID NO: 1626 - DNA, 75 bp, Homo sapiens
agctttggtgaaaggagctaaaaggtggacctgtatgtctgtcttttatgtggcagtggcaatgatgaagaccgg

SEQ ID NO: 1627 - DNA, 101 bp, Homo sapiens
aaagcgagtcttcaagcgaaagaagcctcaacttcgtctggagaaaagtggtgacttattgaattagaagtgcgtctcaccaaccagccaagatgaacatg

SEQ ID NO: 1628 - DNA, 100 bp, Homo sapiens
gtcatccttgcagacctcaacctctcaggggctatcaacagcaggacgcccatgaattcatgcgctaccttttggaccacctacacttggaacttcaggg

SEQ ID NO: 1629 - DNA, 82 bp, Homo sapiens
aaagcgttggagaggtgttaccggaacggcggcgacaagggtgttcccgaactagagtggtccagaacacatattacataat

SEQ ID NO: 1630 - DNA, 83 bp, Homo sapiens
caaccagtttataagtgctgttaaatatgtggaactctaatgaatcattgattgaccagcactattttaccagttggaatgaa

SEQ ID NO: 1631 - DNA, 126 bp, Homo sapiens
ttgaaaattggttactgggtctcctctcaagaaatctcaagatattaaagttactgctgttaaaaagtggttacccaggctgtccttacccacctggtggtccatatcctgccacaacaagttctc

SEQ ID NO: 1632 - DNA, 82 bp, Homo sapiens
cggaggctgaggagaaggaggagcgggccgtggaggcttcgccgcctagttactatgcgagtcagaagaaaacatttgaaat

SEQ ID NO: 1633 - DNA, 100 bp, Homo sapiens
cttcgccgaggacctggacctggaaggggagactctgctgacacccatcacccacatctcacagagcaggccgggctctcgccatgggtcactgtcgcct

SEQ ID NO: 1634 - DNA, 100 bp, Homo sapiens
cccagtacgaggagattgcccagaggagcaaggctgaggctgaagccctgtaccagaccaaggaagcgtcagcccccgtagcacctctgttaccacgact

SEQ ID NO: 1635 - DNA, 98 bp, Homo sapiens
gggatcgctgtgaccgccacaaagtgaatcctttcggtgcggacagtcgccttcaaagccaggccccggattcagacggagtttccctcttgttgccc

SEQ ID NO: 1636 - DNA, 100 bp, Homo sapiens
cctgtgtctcctacccaaggacagggggacagggctctgtctcgcacttcccagggatgcttgaagatggaaagaaatttgattcctcccgggacagaaa

SEQ ID NO: 1637 - DNA, 122 bp, Homo sapiens
ccagttacaagcgtcttgccaccggcttccctttgtaaattgagctctgcacgctggggagtttgttgggggcttgtcaatgaggcagatcagattcaggttcgacgggcagccaatcaatg

SEQ ID NO: 1638 - DNA, 90 bp, Homo sapiens
ctctacgacctggtcacggagaaggttgccaacttggcctgttccatctcaaataatgaagaaggtgtaaagcttgttcgaatgtctgca

SEQ ID NO: 1639 - DNA, 100 bp, Homo sapiens
ggaacgtgtgttgatggcctgggtacctaccgctgcagctgccccctgggctacactgggaaaaactgtcagggcaattgaaggaacagactaaaaatcg

SEQ ID NO: 1640 - DNA, 75 bp, Homo sapiens
cggattatgaaagtgcagaagactcggaagagcagtttttgcaagaaaggatcaaagtgaacggaaaagctggga

SEQ ID NO: 1641 - DNA, 125 bp, Homo sapiens
tgtgaatcttgtagtcagaaacttgaaagagagaataaccgttgtaacatcagtcacagcatagaaagtctattcgtgtgaccaggagaggcagagtgccctggaagaggcccagcagaatcccc

SEQ ID NO: 1642 - DNA, 111 bp, Homo sapiens
ctgggcggctgttcagcagaagaactcactgcagagcgagtctggaaacctcccactgtggctgcataagacttgcaaccttatttctcgaaagagggcccaacaggatag

SEQ ID NO: 1643 - DNA, 90 bp, Homo sapiens
ggaaggggtcgctgtggagatcatggactatgaaggtcagaaggatcgtcgcccaactggcttcaagccctgaaactgaagaagaagaag

SEQ ID NO: 1644 - DNA, 100 bp, Homo sapiens
taaagagcaagcctaactcaagccattggcacacaggatgcccccgaggagcaactaaaggcgccactgagtgccctgccctctggtcaagtggtgaggc

SEQ ID NO: 1645 - DNA, 101 bp, Homo sapiens
gaaaagcgcaatactattgcttccattgctgctggtgtactagccagtccctgagacgaataggaccttgtccctggatgaggtgtaccttattgactcgg

SEQ ID NO: 1646 - DNA, 90 bp, Homo sapiens
cagaatacagaggaatttctccacttgccccaccgcttactcacagatatcatctcggatctttggatggattatatgaaagaagaattg

SEQ ID NO: 1647 - DNA, 90 bp, Homo sapiens
gagaacgcacgcctcttccacccgaagctgatcatcgcaggaagtggcggtgcgagggctgctgcacagcgagcggagccgcggtccgga

SEQ ID NO: 1648 - DNA, 74 bp, Homo sapiens
ggccagtcgcctccaggccaagagggatccttcacccgtgtctggaggtgcttcccaaggaccgtagatgcctc

SEQ ID NO: 1649 - DNA, 96 bp, Homo sapiens
tggactttgtttttcctgggaactgcaggtgatgggcagaatctgtttacgaaagacgtgacagtgatcgagggagaggttgcgaccatcagttgc

SEQ ID NO: 1650 - DNA, 90 bp, Homo sapiens
ttttcattgttccactggacgctcatcagagggaagatctttttcctcaattgcttcttctttaagtggaaacaaagattccatttatag

SEQ ID NO: 1651 - DNA, 83 bp, Homo sapiens
cttctaccggaggcgggacatctccagcaccctcatcgccctggccgacaagcacgcaactcaccatggatgatgatatcgcc

SEQ ID NO: 1652 - DNA, 75 bp, Homo sapiens
catttccatgggacgagattctgaactcattcgtcttcctccacttgatgaaggtggacccagactccacctggt

SEQ ID NO: 1653 - DNA, 75 bp, Homo sapiens
ggaatgttcttaacccagaagtagctgaatgtgttactccattgctgaggagtgagccatttcctgcttttaagt

SEQ ID NO: 1654 - DNA, 100 bp, Homo sapiens
gcggctcgggagattcagccgtgaagcaagtgcagatagatggccttcctttccgctgtgcccattgccattactcctgcaacatatctggctctctgaa

SEQ ID NO: 1655 - DNA, 100 bp, Homo sapiens
gacttgcttgagtgtttcagtgaaaaggttatcttgacgaatcagattacaacccatctgagtggagccctggcttctcaggcagacctggtgtctccag

SEQ ID NO: 1656 - DNA, 75 bp, Homo sapiens
gtttggtttccgtgtgtacaaggaagaatgatgccaatgggtggaatgatgccacctggaccaggaataccacct

SEQ ID NO: 1657 - DNA, 51 bp, Homo sapiens
ctagtctagcttcagatgaacaggacactcaatcacttgtcggaagtccct

SEQ ID NO: 1658 - DNA, 82 bp, Homo sapiens
ggaaaaggcgctccgtcatggggatccagacggagcttcgagaacaactggaacatttacaagctcctcgcccaccagaagc

SEQ ID NO: 1659 - DNA, 76 bp, Homo sapiens
cgagcccgtgccgcctgctgagcggggtctgtgggagctaggatccacccacttcagtttcccttggactgcgaat

SEQ ID NO: 1660 - DNA, 90 bp, Homo sapiens
tagagatgtttcgaaatatgcagaatgcagaaatcatcagaaaaatgactgaagaatttgatgaggtggagttggcatgaacttaacagc

SEQ ID NO: 1661 - DNA, 101 bp, Homo sapiens
gggagagataaaccaccgcttacagatattgggagtgagctgagtcgacagaaacttcatacccaagagctgctttctcagctggaaatggcaaatgaaaa

SEQ ID NO: 1662 - DNA, 100 bp, Homo sapiens
tagatttttccgtttggacttactcgcaaatgaaggatacttgaatccacaaaatgatacagtgattttaagagattgagacagtgaaattggcccgttc

SEQ ID NO: 1663 - DNA, 100 bp, Homo sapiens
ccaaacatgatcgtttactgcaaaaataatccagaatggctactctgatctatgttgataaggaaaatggagaaccaggcacccgtgtggttgctaagga

SEQ ID NO: 1664 - DNA, 100 bp, Homo sapiens
tacagcccttccagatacagctaccagggcggactactggaagtcacagccaaagaaattctgtgattactgcaagtgctggatagcagacaataggcct

SEQ ID NO: 1665 - DNA, 100 bp, Homo sapiens
tgtactgtgcttggctggaaaaccccaaaagtgtacataagcaatacgtttggtttaatattggcagtgtggacacctttgaacggaatctggaaacttt

SEQ ID NO: 1666 - DNA, 131 bp, Homo sapiens
aaaagaaggacagttgatggctagggacctactacagccacacaggctttactgctactattaccaagtactgcagcaccctcatcacatgtgtggattctgggattctcagagtctggcatgacaaggac

SEQ ID NO: 1667 - DNA, 75 bp, Homo sapiens
gaggccaactgcagaggaactggaacagaggaacattttgaaactgaaaatgcctcgtgtaaaagcagctcaagc

SEQ ID NO: 1668 - DNA, 74 bp, Homo sapiens
tttaagcctgatctaacccctagaaacaggtccttatacctttagcatctgtgacacctccaacttctccgact

SEQ ID NO: 1669 - DNA, 100 bp, Homo sapiens
cctgtccgtcgatgcaccgaaaaggtttctgggtggagcggacccctgtgcacgaggcagcccagcggggtgagagcctgcagctgcaacagctgatcga

SEQ ID NO: 1670 - DNA, 75 bp, Homo sapiens
cctgacagcatctattacctttgccttggaatacaggagagaaagtctgtgattgctgtgagcttcatagcagcg

SEQ ID NO: 1671 - DNA, 99 bp, Homo sapiens
catgtttctggacgcggatttttggcctcatactctgttatagataaacaagattttgtggtggatgcaacccgcaagggtaacaaaattcgttttgca

SEQ ID NO: 1672 - DNA, 90 bp, Homo sapiens
atttgttaaggattccaagtaactcttatttgctacaaaagaccccacagctgtagagagagcaaacttgttaaacatggctaaactgag

SEQ ID NO: 1673 - DNA, 97 bp, Homo sapiens
agtagttaggattcaggccaaactggtaaatgacgaaggggcttcttccagagccaaggaggaagggttgtccgggctcttcgtcagattgggcaga

SEQ ID NO: 1674 - DNA, 97 bp, Homo sapiens
cgtgtggatctggcagtcggtcatccacctgctgcagatggggcaggtgtggagtttctaataagtgaccgtgacccacagtgcaacctccactgct

SEQ ID NO: 1675 - DNA, 75 bp, Homo sapiens
cgaggcgggtggatcacttgaggttctgtttggattctgcaaagcagactcgtcagaaagttgctgtgaactgga

SEQ ID NO: 1676 - DNA, 75 bp, Homo sapiens
tgcaccttccacagatgacttggagctccgagtgcagcagatggtgtccatgggcattgggaataaacccttcct

SEQ ID NO: 1677 - DNA, 51 bp, Homo sapiens
tcgacctaaagcctgactggggcaagctggacacagagtatagaaaaaaat

SEQ ID NO: 1678 - DNA, 96 bp, Homo sapiens
gcagggaggatgtcgggacaccccggaagctgggaaatgtgttctaagaacggaagcatctgggctggatggaatttagcatcaagcagagtcccc

SEQ ID NO: 1679 - DNA, 100 bp, Homo sapiens
gatgccgttggaactgacgcagagccgagtgcagaagatctgggtgcccgtggaccacaggccctcgttgcccagatgccctgggcagtgacggggttcg

SEQ ID NO: 1680 - DNA, 75 bp, Homo sapiens
agacctgggaaattaagtttcttgcggaggacacagcattgttggttttgccatgtactattttacctatgaccc

SEQ ID NO: 1681 - DNA, 75 bp, Homo sapiens
catcactggctacacatttccagcaggctgcagatacgagtggacaacttcctgcctgacacagctcacttcaag

SEQ ID NO: 1682 - DNA, 100 bp, Homo sapiens
agcggatgattctggaactgggagaagatggctttaaagaatacacttcaacttcaaggttactgactttttatgatgtttggtggctatgagactatag

SEQ ID NO: 1683 - DNA, 100 bp, Homo sapiens
gtttcctgtacctgccttgggatccggagggaggaagctgggacacccgggagtcaggaaatgtcttggaggaggaactttttttggtctctgctgtctt

SEQ ID NO: 1684 - DNA, 90 bp, Homo sapiens
caccattgcatttgcatttgtttgccacccgtcagtcctgccaatttacagtgagcttaaagaactatcaaccattgatgaatctggttc

SEQ ID NO: 1685 - DNA, 83 bp, Homo sapiens
ggctcaacatgggaaaagacattccggcagatcggctttgaaagggctacagagttatagaagagaaacttccagttatcagg

SEQ ID NO: 1686 - DNA, 90 bp, Homo sapiens
caaaaatctacgaaggcgccgccagtactgcacaaaaccgaggactatttgaggcaagtgctatgtaaagccgccgagtctgtctacagc

SEQ ID NO: 1687 - DNA, 76 bp, Homo sapiens
cgaatcttcactcccgctgtctcagcagtctacagcacgaaaggcctaaagaatgtatttgacgaagcaatattgg

SEQ ID NO: 1688 - DNA, 100 bp, Homo sapiens
ctaagaaatgtatcaaatctgaaacctgtcccgctcattggtccaaaattgaagagaaggttggtgaaaattgcccctcaatattatgacatgagcaatt

SEQ ID NO: 1689 - DNA, 50 bp, Homo sapiens
gggcgacagggccgattccggagtggagagcacagtcagacgaactcgaa

SEQ ID NO: 1690 - DNA, 82 bp, Homo sapiens
ctgcacgcaagtgttaaacttctgttggaatcgaagcctcttaaaatggcagatgacttggacttcgagacaggagatgcag

SEQ ID NO: 1691 - DNA, 95 bp, Homo sapiens
gccaggagcgcagagccgcgatgtccatacttgccaaaatgggggactggcagcctccaggccctgccttctgcctgcacattctgccctgattt

SEQ ID NO: 1692 - DNA, 80 bp, Homo sapiens
ggatgttcagcagcgcggcagagtcatgggggtgggcaccatgtccttgaagcttcaggcaagcaatgtaaccaacaaga

SEQ ID NO: 1693 - DNA, 75 bp, Homo sapiens
ctgtggacagacggggtgagcctcttcttgtgtctggagattctgaaatccagcaactatcacaagaatactcct

SEQ ID NO: 1694 - DNA, 85 bp, Homo sapiens
ggagatcccaggcggtgacagagtggagccatggctagagatcatggaagggaagtggttgctgtgtatgttactggtgcttgga

SEQ ID NO: 1695 - DNA, 75 bp, Homo sapiens
cttcaatgctgttaactggattgagtccagctcttgggatgagcaaatttttcagaacataaaacaagaatatag

SEQ ID NO: 1696 - DNA, 100 bp, Homo sapiens
gttgctggagagtaaaggactcctactgaaaacaatgttagcatggcctcattgaaagaactagatcaaagactctttgaaaattacatcgagttgaaag

SEQ ID NO: 1697 - DNA, 100 bp, Homo sapiens
cagatgagccagtatggaccacaagtatgaagtgtaacagaacagactttaccacctgaaactgctgcttcaagttcagatcaggcaaggaacaaacctc

SEQ ID NO: 1698 - DNA, 100 bp, Homo sapiens
ctcaatatctgtcttcggtggactccttcggcagtccacccaccgccgccgcctcccagtggctgcaggtttcgtcctccgccagtgtggcagtgatggc

SEQ ID NO: 1699 - DNA, 100 bp, Homo sapiens
cgcgcccgggacgcgcggcggcaccgggaggccgggccgagcgctgaaccttagccggccgatcgaggagcagggccccctggacgtcatcatccacaag

SEQ ID NO: 1700 - DNA, 76 bp, Homo sapiens
gatgctcccgcatccaacttgacttccagactctcagactgtgtggaaaggcaagataacccctgtgacagaaggc

SEQ ID NO: 1701 - DNA, 83 bp, Homo sapiens
agaagacatacagaaagaagggtgaaaatgtggaggctttgagaacatttaaatcaaacggtattgagatggattgggttatg

SEQ ID NO: 1702 - DNA, 90 bp, Homo sapiens
gatccccaaggaggacggcgagagcacggacagactcatggggaagggccaggtccagtatcaggtggcccctgcccagctggtgacccg

SEQ ID NO: 1703 - DNA, 100 bp, Homo sapiens
tgggctggggagtggagaatggcacaccctactggctggttgccaactcctggaacactgactggggtgacaatgatttatcatagaatccccgactcag

SEQ ID NO: 1704 - DNA, 60 bp, Homo sapiens
cagatgcccaccgggatggagaaggaggaggaatcgggtactagatggaaacttgagaaa

SEQ ID NO: 1705 - DNA, 100 bp, Homo sapiens
tgactttgagccctaccttactggacagtcaaatcagggctctctactggcttctggccgcgctccgcgccgcgcctcctctggattgccccgaaacacc

SEQ ID NO: 1706 - DNA, 75 bp, Homo sapiens
tggacctccaaggaagccacgtgcagacatctacaaccttcgatctcctgacgactgtgagtacccaggaagctg

SEQ ID NO: 1707 - DNA, 100 bp, Homo sapiens
tttttcgacgctggcggtggacgcaggcagcatggaccacggttgctgggcggatggggagcgtctatggtcagaattgtattcccattggagagcagct

SEQ ID NO: 1708 - DNA, 100 bp, Homo sapiens
gcaccttcaagtgtccagtctgctttacaggagcaggacccgtggtaccattggccctggcaagtatggctatggtaaggccccatatatcttaccactg

SEQ ID NO: 1709 - DNA, 87 bp, Homo sapiens
ggtggccgcgcaggaggacggagccctaaccgcaacccgcgccgcgccgcgccgcgccggtgctggagaatctggtaaaagcaccat

SEQ ID NO: 1710 - DNA, 100 bp, Homo sapiens
tgctgacagagcagatggcctggagattcatgacaaaatcatggagccagccaagccagggacttgttgtcaaagatgctagtgattgacccagcaaaaa

SEQ ID NO: 1711 - DNA, 133 bp, Homo sapiens
cgacgggcgggtgaagatcggccactacattctgggtgacacgctgggggtcggcaccttcggcaaagtgaagggtcagcccaaggccaaccccactgtcactctgttcccgccctcctctgaggagctccaa

SEQ ID NO: 1712 - DNA, 90 bp, Homo sapiens
acccgaggtccctctttggggtggctctttgctaagtgctgctgttgcttcccgtgtagagatctgtctatggcagtgcagaaattttcc

SEQ ID NO: 1713 - DNA, 100 bp, Homo sapiens
gacagctgggccggagcagccgcgggcgcccgaggggccgagcgaggttatgaagacagtatggagtttccagaccatagtagacatttgctacagtgtc

SEQ ID NO: 1714 - DNA, 75 bp, Homo sapiens
tctttgtcatgtagccaagactggagaaacaataagcgccaagaaccagaaccagaacagccacccagaccagag

SEQ ID NO: 1715 - DNA, 75 bp, Homo sapiens
gaagaacgctgcggacccagctcgctcctggtagcaagacccgaactgaacctcggagtgatggtgtgttcctcc

SEQ ID NO: 1716 - DNA, 90 bp, Homo sapiens
cgcaggaggaggcggcggggacaccggcgagtccccagcagggcccctgggctcccggaagatcaggatcctcatgaccagccaaagaga

SEQ ID NO: 1717 - DNA, 108 bp, Homo sapiens
cgccgccgcggtttgtcgccagaaggaagatggcggatctggaggagcagttgtctgatgaagagaagatggctcccgcaaagaagggtggcgagaagaaaaagggcc

SEQ ID NO: 1718 - DNA, 97 bp, Homo sapiens
ttttacagcctttgcctgcttggcctatcaaggttttcctttggaatatggataaatacaccatgatacggaaactagaaggacatcaccatgatgt

SEQ ID NO: 1719 - DNA, 50 bp, Homo sapiens
ggcggatttcgaagagttgaggttggctggggaacagaccagggaattgg

SEQ ID NO: 1720 - DNA, 89 bp, Homo sapiens
gtcacctctatggcttcccacagccacgacttcctagattcaccaatgacccctaagtccagcctctgatgaagcaggagagaaagaag

SEQ ID NO: 1721 - DNA, 101 bp, Homo sapiens
ccactgaggagtccaacatcaccatgcagtggcctgaccaggaactactgcaggaatccagattctgggaaacaaccctggtgttacacaactgatccgtg

SEQ ID NO: 1722 - DNA, 97 bp, Homo sapiens
tcacagtttgctctgctcttccaacaccagtggaagatgatcacatcccaggttgtgcattatgtgtgactcttccaatgagtttattaaacttttt

SEQ ID NO: 1723 - DNA, 75 bp, Homo sapiens
ctcccggctcgacaagttcaagcagctgcttgccggccccaacacggaccttggatggaatacaggggggacagt

SEQ ID NO: 1724 - DNA, 80 bp, Homo sapiens
cttgatctccgccaccgtcttcaggccagaggacaagaattttgggcagatttgaatgccatgaacgtgtatgaaacaac

SEQ ID NO: 1725 - DNA, 75 bp, Homo sapiens
tactgaggcgactggaggcttttgagcatcccaatgttgtccgaatcgtcggggtagtgactccgagaaacgaag

SEQ ID NO: 1726 - DNA, 100 bp, Homo sapiens
ctgacttcgggcttgttcgctggtggcgtcggagccgagccggactggtcaggatcaagcgtgctttccttatcgaggagcagaaaatcgttgtgaaagt

SEQ ID NO: 1727 - DNA, 98 bp, Homo sapiens
gagagctattagagattgtgaagaagaatttcgatctccgccctggggtcattgtcagactttgagaatcactacaagaaaaactccttgtggtgaag

SEQ ID NO: 1728 - DNA, 76 bp, Homo sapiens
cgatggagtagatttgaagactcaaccaggtcagttaaatgaaagcatggaccatgggggagttggaccatatgaa

SEQ ID NO: 1729 - DNA, 101 bp, Homo sapiens
gcctccgtcgctgtcgctgagagcctcacgagtcgaggtcctgcaggtggagctccggcagccgccctggtggaatgaggtaccatctactgtctccagag

SEQ ID NO: 1730 - DNA, 51 bp, Homo sapiens
aggccaggttcccaagagctcaggagatctataaggacaggcagaaattct

SEQ ID NO: 1731 - DNA, 126 bp, Homo sapiens
gcagctcaacgagctgctggaggacgagggccagctgacggagatggtgcagaagatggaggagaatgtctccttcagcctgtcccccggcaaggtgacggccctggtggggccctcgggcagtgg

SEQ ID NO: 1732 - DNA, 83 bp, Homo sapiens
acgacttcgtcgtgggtcagcaagagggccccgctgaccaggtggctgcaggaaaaatgccagctgtgggacaaggagtgcag

SEQ ID NO: 1733 - DNA, 97 bp, Homo sapiens
aaaacatgaaaagtgatacttttcaagaggcctggggcgctgccaggagggtctccaaagatgactggctggaatggctgagacggctgagcctgga

SEQ ID NO: 1734 - DNA, 75 bp, Homo sapiens
aatcaggaagtccaagccacaatgatcctgccaagaatcctccaggctctccagcagaactatctcctactactc

SEQ ID NO: 1735 - DNA, 50 bp, Homo sapiens
gtttttgacttacatggaaacagggtaatactgaacaacctgtccaaact

SEQ ID NO: 1736 - DNA, 136 bp, Homo sapiens
caaaggagtggaagtttgagagaagtttaagagaagaaatggacatgattgcctaaatcagccaaacacaggctcctcagagaaattttgaaattgccttcaagatgtttgatttgaatggagatggagaagtaga

SEQ ID NO: 1737 - DNA, 90 bp, Homo sapiens
aagatgaggagcccctggcctgcccggacgagttcgatgacttcgtcacctatgaggaaatggaagttccagtattaccgaaaatctctc

SEQ ID NO: 1738 - DNA, 95 bp, Homo sapiens
acaagccaagatttcatctattgaatttgggtacatgacatttctcttgggaagttgtgcatctgacaggaatatagtactgtacgatatgaggc

SEQ ID NO: 1739 - DNA, 100 bp, Homo sapiens
caccagacttgggatcagttataaactctagagtggttttcctttggaatatggataaatacaccatgatacggaaactagaaggacatcaccatgatgt

SEQ ID NO: 1740 - DNA, 74 bp, Homo sapiens
tgacaaaggcattcatcatagaaagcttaaggttcaggaagatttgactgaagagaaaaaaagggaactggagc

SEQ ID NO: 1741 - DNA, 74 bp, Homo sapiens
agacagccccagctcggtgttcctcaggtttccacttgagcggcacagtgacagaacctgcaatacaatcggag

SEQ ID NO: 1742 - DNA, 100 bp, Homo sapiens
atcatccggcctctgacggtgtatggactggaagatgcaccaggtggccgacatgaaaaagaagatggaggacagtgtggggtgcctggaaactgctgag

SEQ ID NO: 1743 - DNA, 97 bp, Homo sapiens
cagatgttctgggcagtgagaatccaagcaaacatgacagcttctggaacttgacggtggagcatggcttcccgcaccagcccagcgccctcggcta

SEQ ID NO: 1744 - DNA, 95 bp, Homo sapiens
ctcccaaagtgctgggattgcaggaacccgtggcattggaagatgtcagagacatggcacatggatgtgatcttcaaaaactgttacagcctcat

SEQ ID NO: 1745 - DNA, 75 bp, Homo sapiens
cgagaagcagccgcgctgcgccttccacactgtgcgctaacaccaatcagggtcttcaggcctggaagattgaag

SEQ ID NO: 1746 - DNA, 50 bp, Homo sapiens
gcttaaccagtacaccaagacatttttaaacacagtgggaatatcacttt

SEQ ID NO: 1747 - DNA, 82 bp, Homo sapiens
tccgatggcaaagccgttgccaagatgtctgtgatcatgatctgcatgtttctggtggcatggtccccttattccatcgtgt

SEQ ID NO: 1748 - DNA, 75 bp, Homo sapiens
aagacagcagaggggttgccgagcggttggattgcagccctgtctacactggataatcattccctggccatatca

SEQ ID NO: 1749 - DNA, 91 bp, Homo sapiens
aaacttagtttcagcttggtcttgtggaaggtttaacaatgcatgcatcaattcttgcatatatgtttaatttggttgaagaaggaaaaat

SEQ ID NO: 1750 - DNA, 102 bp, Homo sapiens
ttgatgaaaagtggtcatacttctttaactataatcttcatagtagtgtatttatttggcgctgtgttacagacttggattctcacttgcatttatcttcag

SEQ ID NO: 1751 - DNA, 80 bp, Homo sapiens
gcctgcggtgcctgagctgagtgaggccgaggccgggaggccgtgcccggagttgcctcttgaagtggatttaactaaag

SEQ ID NO: 1752 - DNA, 52 bp, Homo sapiens
gcctgtaatcccagctactcgggaggctggggcaggagaatcgcttgaaccc

SEQ ID NO: 1753 - DNA, 96 bp, Homo sapiens
ggaaactaaaaacgcatctatctaacgtttaccctagcaaaccagttggtcttggacaactgcacctgcacggagggcgtggagtagaacagaatc

SEQ ID NO: 1754 - DNA, 99 bp, Homo sapiens
ctgcgctgttcgtgctgctgggattcgcgctgctgggcacccacggagcctccggggctggttacgggcaggacttgagtggcttcggacagggcttct

SEQ ID NO: 1755 - DNA, 111 bp, Homo sapiens
gaagtaggagtcgcaggagcagccgcagtagatctcgaagtatctcaaaaagtcgctcccgcgaccccctcacagcttcctggtcaatatgaagctggaggctgtggaccg

SEQ ID NO: 1756 - DNA, 73 bp, Homo sapiens
actggagctggtgcagcaggaattgggatcgtgtcgctgcggtcctggttccacaaggataaaacacatctgc

SEQ ID NO: 1757 - DNA, 90 bp, Homo sapiens
gacagttttgacaacacctatcagtttagcccgatggccaaaggctctcaaagatacatggtttccactggtgctgatgggacagtttgc

SEQ ID NO: 1758 - DNA, 98 bp, Homo sapiens
cgaactgcggtcgctggaatgtgtgtctcacgaggaaagaccacagcaagattctttcattcgtctcctcctagcctgggggaccaggctcgaactga

SEQ ID NO: 1759 - DNA, 100 bp, Homo sapiens
tgtttttcctgttctttggaatgattctcttttttgacaaagcactactggctattggaaatgagcggtttcaagtcaagaatccccccgcagcctacat

SEQ ID NO: 1760 - DNA, 76 bp, Homo sapiens
cctaccctctgatgcaccaccagatgccaccacctcatccaccccagccaggtcaccaaagtccatgagccccccc

SEQ ID NO: 1761 - DNA, 75 bp, Homo sapiens
taaagggtatctgatcaagccaacaacagtgacggaatgcctccatacatatcacctctgcagcctgcacagccg

SEQ ID NO: 1762 - DNA, 100 bp, Homo sapiens
gcaattgacctcacctcaagcacacccaatggacagcatgcctcaccaagtcacatgacaagcacgcttctctgaagtagctttggaaagtagagaagaa

SEQ ID NO: 1763 - DNA, 75 bp, Homo sapiens
gctggctgaagatggctactctggagttgagggatcctgaaactccgccacatctggaacctgaagttgatgcgt

SEQ ID NO: 1764 - DNA, 82 bp, Homo sapiens
accctgggaatcctcatctccactcagcgggcccaggttctgctccagacgagcccttaccacgttgactcactcctgcagc

SEQ ID NO: 1765 - DNA, 100 bp, Homo sapiens
aaaccctgcagagggaacctggtacatccagtcactttgccagagcctgagagagcgatgtcctcggattgcttctgcacttcaagaacacaagttgaat

SEQ ID NO: 1766 - DNA, 76 bp, Homo sapiens
gacatggaaggaaatgagggcaacttctgaagacttcaacaaggctcttgagatctgtcaacagagaaactttgta

SEQ ID NO: 1767 - DNA, 83 bp, Homo sapiens
atgaatatgaactggctcagtttatcacttcctgaaagacctgaagcgtgtgaaggcaaagaagaatgctgctccattcagaa

SEQ ID NO: 1768 - DNA, 82 bp, Homo sapiens
gaaggaacgaggcaaggagctaaagcagcgtgcgttcagccctggggagtgcgccggtctcggggaaatgcccggttccttc

SEQ ID NO: 1769 - DNA, 75 bp, Homo sapiens
cggagggcggtggcggcgggctcctgcgagaagcaagcggaacttcctgagctttctatgggaggattctcgtaa

SEQ ID NO: 1770 - DNA, 87 bp, Homo sapiens
aagacggccgtggttgtggggaccataactgatgatgtgcgggttcaggaggtacccaaactgaagaattttgagactgaagaagta

SEQ ID NO: 1771 - DNA, 100 bp, Homo sapiens
aaagtttggaaatccggacgctaacagtggaaaggctgttggagccacttgttacacaggaactaattctgaagcatcaaatgcttctgaaacagaatct

SEQ ID NO: 1772 - DNA, 94 bp, Homo sapiens
ccgcaccacctaacgctggccgacaacagcctggcgtccgccacggtaagaatgattgatgttggctgatattggagtgctcattcacatgaag

SEQ ID NO: 1773 - DNA, 74 bp, Homo sapiens
ctaccgctgacgacacccctggtggatggcgaggatgagagagagatcaatgtcttattgtgatgagtctcgac

SEQ ID NO: 1774 - DNA, 82 bp, Homo sapiens
catccttaccaaggaatctgcttttcaagtatgccaccaacagtgaagagatcaatgtccgagttaccaccatggatgcaga

SEQ ID NO: 1775 - DNA, 100 bp, Homo sapiens
caaaactgttcggacttccccgttagaactcgcgtttccacttcagagatctggtagaacgtcatgacatgaataccttaagcctgcccctgaacatacg

SEQ ID NO: 1776 - DNA, 90 bp, Homo sapiens
aataccttctattccaacaaggagattttccttcgggagttgatctctaatgcttctgatattgaagaattagggtctgaaggaaaagta

SEQ ID NO: 1777 - DNA, 101 bp, Homo sapiens
cagagttctatctccaggtggaccgcttcagcctgctgcccacggagcagccccggctacgggtgcctggttggaatggtggaaagcagcagacataattg

SEQ ID NO: 1778 - DNA, 90 bp, Homo sapiens
aatcggttggcaaacgtccgaaagaagcatcaagtgtacctgatttgtgaacctatcttgcttcagttggtttcctcctaaatattaggc

SEQ ID NO: 1779 - DNA, 50 bp, Homo sapiens
ggaacttttggcagagctcccactaagtcaactaattcatgaccgaaaat

SEQ ID NO: 1780 - DNA, 75 bp, Homo sapiens
gggacccagtgcgcccgcatcgtcgagaatttggcctcagtatgtcaaggatagaattcattccacctatatgta

SEQ ID NO: 1781 - DNA, 75 bp, Homo sapiens
cagcctccgcggaggagcagaaggttcccaaaggtgggggcctacccatgaccactgaagttctcaagagcttag

SEQ ID NO: 1782 - DNA, 80 bp, Homo sapiens
tccaggagagaaactcacgctctctcaccagaactcagagtcttcctaatattaccaggagtgttgtggtgcctgtaaag

SEQ ID NO: 1783 - DNA, 98 bp, Homo sapiens
tcctgactgtcagtcagtacaaagccgtgaagtcagaggcgaacgccactcagcttttgcggcacttggaggaggataagatcaatgccctcattaaa

SEQ ID NO: 1784 - DNA, 98 bp, Homo sapiens
catttggctttgattactgctactggtcagtcaacccagaggatccccagtatgcatctcaagattcggcagaaccaattgaaagaccaacagcaaca

SEQ ID NO: 1785 - DNA, 82 bp, Homo sapiens
aggagaggcggggtcggcgggagccagcgagccacgggagcgagccaggtgacagagctgaatgaacctctctccaatgaag

SEQ ID NO: 1786 - DNA, 90 bp, Homo sapiens
ccacgctcagcagcatcagacacatgatccgcaagaacaagtaccgccccgacctgcgcatggtgactcctgcacctgcgccggctcctg

SEQ ID NO: 1787 - DNA, 96 bp, Homo sapiens
cgaaagactcctgctgaaagaagacagcactctgaaagcagctggaatcgctattgacctgaaaagtggttctggaaaagtgtaccaaggccctgc

SEQ ID NO: 1788 - DNA, 100 bp, Homo sapiens
gggccaagcatcatgccatctctgctaaactgaacaagcccttcctgtttgacaccaagcctctcattgttcagtttgcagctaaaactgtgcacagtgg

SEQ ID NO: 1789 - DNA, 80 bp, Homo sapiens
cagccagcatcttctttattgagacttgctacatttgtgatgaacaaggaagagaaagcaaagcagccactggtgcttgc

SEQ ID NO: 1790 - DNA, 74 bp, Homo sapiens
catgcaaaagatgcctgtgttattagtcctgagaaatgccagtggcctgacagcagcagacattgcacaaaccc

SEQ ID NO: 1791 - DNA, 75 bp, Homo sapiens
tgagactccctcagatccagtgataattgacagggattcccaagagctttgaatgaagacatttaagattacttc

SEQ ID NO: 1792 - DNA, 75 bp, Homo sapiens
ctcgcggcggccggcggggcccgcgctgcagccggagacccggagaaaggactccaagaatgaaaaggctctggg

SEQ ID NO: 1793 - DNA, 90 bp, Homo sapiens
agggcagcagtagaatcacttgggttcattctattcagactctgaagaagaagctatggagactacaccagccaaaggaaagaaagctgc

SEQ ID NO: 1794 - DNA, 75 bp, Homo sapiens
tctgtgactgctgctactgtgagttcttcggccacaatgcggcccctcgggaggcattggcacagaccgtgctcg

SEQ ID NO: 1795 - DNA, 89 bp, Homo sapiens
cagcttggctctgggagacctgctgcacatcgtcattgacatccctatcaatgtctacaaggcagcagaagatgtcgttttcattggac

SEQ ID NO: 1796 - DNA, 75 bp, Homo sapiens
ccagcctcgctctccgccgcccgcaccgccgcccgcgccctcaccaggaaggtgctcgggtcttcggggcactgg

SEQ ID NO: 1797 - DNA, 87 bp, Homo sapiens
catctaccgctcactgtagaccatctcaagcaggtgggagacctacctgatgcagatattaaacctccagaaaatgtactgtttgtg

SEQ ID NO: 1798 - DNA, 100 bp, Homo sapiens
cttatacaagtcaacagtctagcagatcagccagtctctttcatcatcaagcagacatactcaaggtgcctcctttaattcctaagactgattcagaccc

SEQ ID NO: 1799 - DNA, 116 bp, Homo sapiens
tatcaccaaactggaggatgcctatgtattccctggggatggcgcatcacacaccaaaggactttccttatcccagttgattgtgcagaatacactgcctgtcgcttgtcttctat

SEQ ID NO: 1800 - DNA, 100 bp, Homo sapiens
gtttgtactatcctcggtgctgtggtgcagagctagttcctctccagctcagccgcgtagatccagtccttctgtggaacttctgaacatcttttattag

SEQ ID NO: 1801 - DNA, 90 bp, Homo sapiens
ggtgaatttccatgtcaacatagtccaggcctccagccagctgtcccggggttcggccacgacgccccgaggtgtcctgcacacgttcag

SEQ ID NO: 1802 - DNA, 75 bp, Homo sapiens
gtgcctctggcagtgacgaggacgaagtgtccgagattgagaggatccagaatccagatctctggaatagctacc

SEQ ID NO: 1803 - DNA, 74 bp, Homo sapiens
gccgggtttcggcttcggccacaggatatcccaacttcgtggcgacctatggccgtggctaccccggatttgct

SEQ ID NO: 1804 - DNA, 101 bp, Homo sapiens
agtctctgatgatacagtggaaatgcctcttccaaagaagttgaaaagtgtcacacctgtaggaactgaggaagagctaaggagcaaatccaagatctgtg

SEQ ID NO: 1805 - DNA, 83 bp, Homo sapiens
gctggttcctggtccagggaccacattttgaaatcactaatgtaaggttcaattcccatgaaagtgcagcacatgcaattgtt

SEQ ID NO: 1806 - DNA, 82 bp, Homo sapiens
ggcgccagcgtagagcggcggtttggaggaaagatgagacggcagttgcagtggtgcagaatggctgacctcagtcttgcag

SEQ ID NO: 1807 - DNA, 100 bp, Homo sapiens
tcccagacacactccaggagctgttcgccaggactcaggacggggagacagccctccagctggccatcagaaaccagcttccactcgtagttgatgccat

SEQ ID NO: 1808 - DNA, 75 bp, Homo sapiens
atcagatcctggaaggcagttttttgctgacagcctgcagcagaaaccacggacggagagcgaagtgcgaaaaag

SEQ ID NO: 1809 - DNA, 82 bp, Homo sapiens
ccaggaatgtccagccgtatgtggtgtacgaggaggtcaccaacgtctggatcaatctagacttcgggctccttgaggatat

SEQ ID NO: 1810 - DNA, 95 bp, Homo sapiens
ggacccttcgtgtccggtggttgctgttgcttggcctggtgggcccagtcctcggtgcggcgcggccaggagtatgctgctgctgttccgctttg

SEQ ID NO: 1811 - DNA, 100 bp, Homo sapiens
ggaattctaatttgaaccatgtttggattgaagccgcctctgtattacttaccaggtgaggcggaaccaaccctcctggccatgggaggggccgtggtgg

SEQ ID NO: 1812 - DNA, 82 bp, Homo sapiens
ccgaagccccctgcaggaactctacaacccaatccagggacccccatcaaccgaatccccatcatggccaaacagatcctgg

SEQ ID NO: 1813 - DNA, 82 bp, Homo sapiens
catgagggccctgtgggtgctgggcctctgctgcgtcctgctgaccttcgtgcacttacatttcaatcgaccaagttccaag

SEQ ID NO: 1814 - DNA, 100 bp, Homo sapiens
ctgcctcagcctccaaagtagctgagactacagacatgggaaagcggaaccaccaaaaggagtgatgatcaacgatctcatgataaatctggatgctagt

SEQ ID NO: 1815 - DNA, 100 bp, Homo sapiens
ctgagtgctaaactgtgtggggcgcggatgggatccagctgttagtcgggtaggcatagttgttgacctcctgtactggagagacattaagaagactgga

SEQ ID NO: 1816 - DNA, 50 bp, Homo sapiens
ggaacttcctgttctgatagcgtggaagtttcagtacaaaacggttcgat

SEQ ID NO: 1817 - DNA, 97 bp, Homo sapiens
gcctgctgctgctcgggcgccgggcgccgggcgccgcggccgccaggagcggctccgcgccgcagtccccagactggattatggacagaacttggaa

SEQ ID NO: 1818 - DNA, 75 bp, Homo sapiens
acccaagaccaggaactcctgctgcaaaaatggaacaagttccagcacaagtgaaggagctggcaaacagccctg

SEQ ID NO: 1819 - DNA, 75 bp, Homo sapiens
ttatttttgatgaggagcgttctccagaagagggtggttttcctgaagcagctggctagtggcttattacttgtg

SEQ ID NO: 1820 - DNA, 98 bp, Homo sapiens
agcagtagaatcacttgggttcattctattcaggctgaagccgacgtagcttctctgaacagacgcatccagctggttgaggaagagttggatcgtgc

SEQ ID NO: 1821 - DNA, 75 bp, Homo sapiens
ctggcagaaactggactacaactctccaaacgcaataccaagtttccaggcccgaagagcatcccagactattgg

SEQ ID NO: 1822 - DNA, 82 bp, Homo sapiens
acgggagtgtcctggacccagctgagcgggcggtcattcgcatcgcagagagcgcctgctcgctgtgcccccgggttatgac

SEQ ID NO: 1823 - DNA, 75 bp, Homo sapiens
atgccaacgaggtgaaacgtgtggtcagcagtgcacaggagaagggcaggaaggccaaacgtaccaagaaagtcg

SEQ ID NO: 1824 - DNA, 75 bp, Homo sapiens
tgacaatcaggacggtcttgtggtcagggccaaaactggaaccaaggatttaataactattatgatcaaggatat

SEQ ID NO: 1825 - DNA, 96 bp, Homo sapiens
gccagcctgtcatgagacctccaaacccctttggccctgtatcaggagcacaggagaaggaagccaacatccttttggagccatgaatattgtccg

SEQ ID NO: 1826 - DNA, 100 bp, Homo sapiens
ggggattgtgggagtctccgcgtcccgctcgctgggagagaggtacctctccttttccctctccctttccctaagatcttagcaaagcaatgtctcaaga

SEQ ID NO: 1827 - DNA, 101 bp, Homo sapiens
gtggtgctggctcagtacatattcaccttgaagaggaagacggggcggaagaccaagatcatcgagatggtactaggttttgacaagcttgcatcatgcgt

SEQ ID NO: 1828 - DNA, 74 bp, Homo sapiens
cagaacatgcagtccctgcttcctgccggacctcaggatggaaaccagcagcctgcaccgcccgagaaggtcgg

SEQ ID NO: 1829 - DNA, 82 bp, Homo sapiens
ctatgcagctatcgtggacgtcactggccctggtggggattgacagccacgggaagatccagagacaatggccccgatggga

SEQ ID NO: 1830 - DNA, 100 bp, Homo sapiens
gcgtgtgggggaagcggcggggtgctgttcacccactcccagatggctggcagcaggcaccagccgccatggcatcagatgaaggcaaactttttgttgg

SEQ ID NO: 1831 - DNA, 88 bp, Homo sapiens
cagagcccatttcagaacctgagaaagtagagactggcatccgtgtcattctggaccttactcccaactaccggggtgagaactcgtg

SEQ ID NO: 1832 - DNA, 49 bp, Homo sapiens
aaagtcctgaaacagttttgcagtcgactttgagaatcactacaagaaa

SEQ ID NO: 1833 - DNA, 100 bp, Homo sapiens
aactcttacaccacaccttcaaagtagaaaccattgaaggttttcagtgttctccctatcctgaagttgatcattttgttctttctttggtgaataaaga

SEQ ID NO: 1834 - DNA, 75 bp, Homo sapiens
cagggagtcgccgctggagaggggctcggcgcccggcggggactgcagcacgtttcctgtggcagcctaagaggg

SEQ ID NO: 1835 - DNA, 115 bp, Homo sapiens
cccagagagcgccctgagagaacagggtggccgcttggtccagcatatgggtgattttggaagcattcatagacccggaattgttgttgactatcaaaacaaatccaccaatgtg

SEQ ID NO: 1836 - DNA, 84 bp, Homo sapiens
gataaggaaattgttggtactcttctaggatttgatgactttgtcacacggatgataccatcggggaccttaagaagctgattg

SEQ ID NO: 1837 - DNA, 75 bp, Homo sapiens
tccgggctgagcttcctggagaagaggaagagacgagttgtactgctgtcacaggaaatggacgctggattacaa

SEQ ID NO: 1838 - DNA, 100 bp, Homo sapiens
aaacaagtgacttgctgagtccagataacactgactgtcagaggttactttgaaagttgcaatatacacagaaataggatagcaggctttgaagtaaaag

SEQ ID NO: 1839 - DNA, 75 bp, Homo sapiens
tggagaagggagactacaaggacagcagcgactttggggcccgtcaccctcagaaattatccagcaagctttcat

SEQ ID NO: 1840 - DNA, 101 bp, Homo sapiens
agaaaacatggtcaacgtcttgaaaggagtgcttatagaatggaactttatattgctgttggaatatctggagccatccaacatttagctgggatgaaaga

SEQ ID NO: 1841 - DNA, 100 bp, Homo sapiens
gctggtctacttctgtgtctggaagggggtcaaatccacgggaaagaaaatcactgtgctgatcgggaagcccttcagtgccctgcctgtactcgagcgg

SEQ ID NO: 1842 - DNA, 74 bp, Homo sapiens
cggacgcgtcttctttcaggctgaggacaagttggatggcttgaggactggtactaaaaggaaacgtgactggg

SEQ ID NO: 1843 - DNA, 98 bp, Homo sapiens
accctatgaacctgactctgtggtcatgcacatcccgctctgggctttaaacgtgacccctcgcctcgactcgccctgccctgtgaaaatgttggtgc

SEQ ID NO: 1844 - DNA, 100 bp, Homo sapiens
aacgccctgtgcttcagccctaaccgctactggctgtgtgctgccacaggccccagcatcaagatctggagcaatgataatgaggagcgcctacaagttg

SEQ ID NO: 1845 - DNA, 75 bp, Homo sapiens
tgaaggccctacgggagaaaaccgggcgcaagccggcacagtcttcactaccgtagaagaccttggctccaagat

SEQ ID NO: 1846 - DNA, 51 bp, Homo sapiens
ttcaaagacctgttcttaaaaaaaggtgctggagaatctggtaaaagcacc

SEQ ID NO: 1847 - DNA, 99 bp, Homo sapiens
tcgccgccgccaccatgcccaagagaaagatcatgatgctgccgccaccgccgccaccacggagcgagaagcccagatagacgccccggcggccccggg

SEQ ID NO: 1848 - DNA, 74 bp, Homo sapiens
ttttcacagcctgaaagtgatgagccagaatctggtgatttagaagagaagattgaacaaccaagatgaaaacc

SEQ ID NO: 1849 - DNA, 101 bp, Homo sapiens
ctacccctaggaggcggccgggaccggaaagtccgtgacttgcaagaggcagatctggaccttttgagagcagaaaaagtcctacctggagcgaagcgtta

SEQ ID NO: 1850 - DNA, 74 bp, Homo sapiens
ggagggcttcgcgtctgcttcggagaccgtaagggtgcaaatgtcaattgtcaagccttggacaaagctacacc

SEQ ID NO: 1851 - DNA, 97 bp, Homo sapiens
ctctcaccgcgcatgtttggagtgcacttacatttcaatcgaccaagttccaaggacctatgccataatgataagcagacccgcctggctctgggga

SEQ ID NO: 1852 - DNA, 74 bp, Homo sapiens
gatatccagtgccttatcccatgtgccattgaccaggcattttctctgtatgaagatgaaatcagcgattccaa

SEQ ID NO: 1853 - DNA, 100 bp, Homo sapiens
agtcaggacatattcgatgccatcgtgatggcggatgagagaaggaagaggcccagcagaagggactcgctgagccaccccccgccccactccatgttgg

SEQ ID NO: 1854 - DNA, 74 bp, Homo sapiens
gtggctggaggaattcagtttcttgggggttgtgcattatgtgtgactcttccaatgagtttattaaacttttt

SEQ ID NO: 1855 - DNA, 99 bp, Homo sapiens
ctcccacctcgtctgggctcgcggcgtctccggggaaagccgtggccccgagggcggatccgagaaactgaggcttcttgaagagcttgaagacacttg

SEQ ID NO: 1856 - DNA, 100 bp, Homo sapiens
gcttcggaggcaagtttggtgtccagatggacagagttgatcaggtctcctctgagcctccggcctccataagacccaaaacagatgacacctcttccca

SEQ ID NO: 1857 - DNA, 83 bp, Homo sapiens
gctgctgtcgcctaagaggctggcaggtggcctgacggagcaagagctgatggaacagctggaacactgtgagctggccccgc

SEQ ID NO: 1858 - DNA, 100 bp, Homo sapiens
tgggggtgtgcaaacccgagagaactgggagtacgagagggcctccaaagtggaccagtttgtgacgcgcttcctgctgcgggagacggtgagccagctg

SEQ ID NO: 1859 - DNA, 90 bp, Homo sapiens
cgcgtacttgctgaggcaactgcaacgcgcagcgtgattgatatgcccgagcacaaccctggcaatttgggaggaacaatgagactggga

SEQ ID NO: 1860 - DNA, 50 bp, Homo sapiens
gagcaaataaccgttttgaaattgcacagaccccacaggctcctcggaca

SEQ ID NO: 1861 - DNA, 76 bp, Homo sapiens
ggccagcctgggagaagagatgcccctctagcccctcagtggaagtagtggaggaagtggaagtcgagaaaacagt

SEQ ID NO: 1862 - DNA, 75 bp, Homo sapiens
gagaaaacaaaagttcttgagacttatgggtgcaggaaagaatgatggaaacttggtggaagccactggtcaacc

SEQ ID NO: 1863 - DNA, 82 bp, Homo sapiens
ctattgccttattttttctcatggatgttcttcttcgagtatttgtagaagggttccttgtaatggcttcagtgacattgag

SEQ ID NO: 1864 - DNA, 75 bp, Homo sapiens
atcaattctttgtgactcctcgatcttcagttgaggtcctctggatgtcagcatggcagccacaaacctggagaa

SEQ ID NO: 1865 - DNA, 85 bp, Homo sapiens
gaacttggaaggcctgcatcatgatggccaattctgccataagccctgtcctccagcttacgaggaaatatttcagtaaaagcag

SEQ ID NO: 1866 - DNA, 90 bp, Homo sapiens
ccggttccccggcccacagtgggggtgtgcaaacccgagagaactgggttgtacatcctggagacctgaagaattctgttgaagtcgcac

SEQ ID NO: 1867 - DNA, 83 bp, Homo sapiens
cctcgccatgccggcccggcggctgctgctgctgctgacgctgctgctgcccggcctcgggacatgggaaagcggaaccacca

SEQ ID NO: 1868 - DNA, 100 bp, Homo sapiens
ccttcgcttggtgtcctcctggcctcagcaacctgacaattctgtcgtgtcccgccgctgctttgatgggagcacccctgtccatgcagcagcattttcg

SEQ ID NO: 1869 - DNA, 100 bp, Homo sapiens
caaacgccaggtgcttattaggccgtgctccaaagtcatcgtccggtttctcactgtgatgatgaagcatggtcagaatggcggcagtggagcatcgtca

SEQ ID NO: 1870 - DNA, 118 bp, Homo sapiens
aacaagctgaaccccaaacccaaattcttcgttctgtgcggcgacctcatccacgccatgccagatcttacagactctttcagcacctacgaaaaatttagaacagcaggtgaatcac

SEQ ID NO: 1871 - DNA, 73 bp, Homo sapiens
gtgtcctcggagcgcggtccctgtattggtctcctgctcctagagatatcattgaaatggattccaagcgtgt

SEQ ID NO: 1872 - DNA, 82 bp, Homo sapiens
ctgagtacgacagcctcaaacaggagctggagcagctcaaagagcttacaacaggttgatgaacatagtaaacctcctcatc

SEQ ID NO: 1873 - DNA, 104 bp, Homo sapiens
agacggctcacctgtgcgggatggaacaaaagggaatcatcgcagaagagaacaagaacctgcagccccagggagacgaggaccccgggaagttcaaggaggct

SEQ ID NO: 1874 - DNA, 75 bp, Homo sapiens
agggcttttactcctacctgtgtaccgagccagaggagcaggagcggcttcgcttggagcaggagcgagagcagg

SEQ ID NO: 1875 - DNA, 116 bp, Homo sapiens
tcccgggaacagcgcttttacgagtccctccctcccgaaatgaaggagttcacccctgaatacaaaggctctgtgtgctccgggatggagcaggtgtgcagagggtgagaacccag

SEQ ID NO: 1876 - DNA, 88 bp, Homo sapiens
agcgggatgacagacagctagagattgcaaacaacattacctaatggtgtcctcagttgtgggcttctatagctctccactcttccgg

SEQ ID NO: 1877 - DNA, 100 bp, Homo sapiens
tacagaatgcagcagatatgcctgctaacatggataagcatgccctgaaaaagtatcgtcgagaagcctatcatcgaaatacatgctacaggatttaact

SEQ ID NO: 1878 - DNA, 98 bp, Homo sapiens
ggatctggacacccagcggtctgacatcgcgacgctgctcaaaacctcgctccggaaaggggacacctggccggagcctcaacagaaagctcctttag

SEQ ID NO: 1879 - DNA, 50 bp, Homo sapiens
cagaaacaaactacatctcaggaaacaggaccttgccctgtcactcagga

SEQ ID NO: 1880 - DNA, 100 bp, Homo sapiens
ctcactgacatacggaagggacacatgtgcaatgcaaagctcctgagaaacatgccaggtatggttccgaccggcgtttagccgagctctctgattaccg

SEQ ID NO: 1881 - DNA, 100 bp, Homo sapiens
ccctcggcgggacgtgacgcagcgcccggggcgcgggttcaaaccttgtactactcagctgatcacaagctgcttgatgggaacctactagatggacagg

SEQ ID NO: 1882 - DNA, 82 bp, Homo sapiens
gaaatacgacttggcgaatcaggaccatatgttggattggatgctgctggcaagacaaccattctgtataaactgaagttag

SEQ ID NO: 1883 - DNA, 100 bp, Homo sapiens
ctgaagcaaaagatcagcgaggagcagcagcagctccagcaggcgctggctcctgctcaggccagttggacaaatgcgagtaaaaagcaacgtgaaaagc

SEQ ID NO: 1884 - DNA, 100 bp, Homo sapiens
ctggcttcaggtttacgcacgagcccctgtgaaagacgagttgtactgctgtcacaggaaatggacgctggattacaagcatggcagctcaggcagcaga

SEQ ID NO: 1885 - DNA, 83 bp, Homo sapiens
cctcaggacacggcctacaacaccaagagatgctgtgggccctgagggaaaggatcacagaggcgctgagccgggatggctac

SEQ ID NO: 1886 - DNA, 100 bp, Homo sapiens
ttcacctggcccatcaaaattcaggagtgggaatagctttgcgaaaaatgggcgcaatggccaagccagattgtatcatcacttgtgatggtaaaaacct

SEQ ID NO: 1887 - DNA, 79 bp, Homo sapiens
ggccccgacgatagcgaggtcacctttgcattgcactcaggatacaatgtctctttgctatatgaccttgaaaatcttc

SEQ ID NO: 1888 - DNA, 114 bp, Homo sapiens
tgctattcctggtctacatcctgcgggtgcctttgaaaatcaacgacaacttgagcacaggatattagaaatggctactccccagtcaattttcatctttgcaatctgcatttt

SEQ ID NO: 1889 - DNA, 95 bp, Homo sapiens
tggaatggattcgtggctgctgctgaactgcccaggtggggaagctgaggcaggaagccctttagtcacttgccgaaggccacgctgttacccat

SEQ ID NO: 1890 - DNA, 98 bp, Homo sapiens
ctggacttctcaactgccattctggattccagaagatttaactacgtggtccgggtgatgtacagggtgatccaggtgtctgaggggcagctggatgg

SEQ ID NO: 1891 - DNA, 127 bp, Homo sapiens
tggacaagacacctccaggagcccagctcacagccaccggtaccttcttccaggcattttgttcccaacatcacctttggtcaccctgtggtagaaagccttcgaaagcagctaggccaggaccctt

SEQ ID NO: 1892 - DNA, 51 bp, Homo sapiens
cagaaattctggaacacctatatgtgcggttggtgagcagctcctgcccac

SEQ ID NO: 1893 - DNA, 100 bp, Homo sapiens
agccacatccccctggccttcgaccccacctccataccccgcggcatccctctggacgcagcgctcctgcccaactgggcctgctgaggaagatccgcct

SEQ ID NO: 1894 - DNA, 75 bp, Homo sapiens
ggctggcctggaattgacgatggttcaagggcagacggggtttttgaggaggattcgcaaattgacatagccaca

SEQ ID NO: 1895 - DNA, 75 bp, Homo sapiens
tgcagttcctgcagtaccccactctacgatcagcaccatatgaaggcggagtatggaaagttagagtggacctac

SEQ ID NO: 1896 - DNA, 114 bp, Homo sapiens
tgactccaatccagatgtattttggaactaggtagaatatgactggtgctggagaatctggtaaaagcaccattgtgaagcagatgaggatcctgcatgttaatgggtttaatg

SEQ ID NO: 1897 - DNA, 51 bp, Homo sapiens
gcacgagggcgcgctcgagacgctcctgagttggttaccacagagaagcgc

SEQ ID NO: 1898 - DNA, 90 bp, Homo sapiens
ggcctccccagccatgtggaactgcatgactccacagtttctgcaacaacagagccggggaaaggaggacgcagcaagcgctgaatatta

SEQ ID NO: 1899 - DNA, 98 bp, Homo sapiens
ctccaagtctctgacttgtgcttggcagcaacatgaagatcattttggctctaagggatggaaataagctggcacagatggaagaggctccacttttc

SEQ ID NO: 1900 - DNA, 114 bp, Homo sapiens
ggaaaaatggaccaacttctttggcaagtggacattttactggctcaagccccttcacagatgtagtcactacaaatcttaaattgcgaaatccatcggatagaaaagtgtgtt

SEQ ID NO: 1901 - DNA, 74 bp, Homo sapiens
ttgcctccgccgccaagagtgagcgagcggacccgcgatggatcatgagcgtcttgttgttcatcgagcactca

SEQ ID NO: 1902 - DNA, 76 bp, Homo sapiens
gcagacggattcatttagagctgcggaacaggacgccctctgatgcaatgaatcgctccctggctaatgtgattct

SEQ ID NO: 1903 - DNA, 90 bp, Homo sapiens
cgagtgtgaatttcctgaagaacgttggggagagtgtggcagctgcccttagccctctggcgggacgaccctgggacagtctccactggg

SEQ ID NO: 1904 - DNA, 83 bp, Homo sapiens
cttggctctcaacttattcccttcaattcaagtaacagatcacaagatttctgttgtgaaggatgtggctctgccatgaagga

SEQ ID NO: 1905 - DNA, 97 bp, Homo sapiens
tagcgacatcaggaagaacagggtcgaggatcgagcagcgtgcagggtcaaagacagccggccccccatgtcagtggtctaggatggccagtgaagg

SEQ ID NO: 1906 - DNA, 90 bp, Homo sapiens
aagaaacactttccagagttccctgcaacccgtgcttatgcagatagttactattatgaagatggaggatttgcctcaaagggcactgca

SEQ ID NO: 1907 - DNA, 90 bp, Homo sapiens
tgatgggaaatcagccctggacctggcagatccttcagcaaaagctgtccttacagcagatataatttctacagtagaatttaatcattc

SEQ ID NO: 1908 - DNA, 87 bp, Homo sapiens
tgaagcagctgctgtcccgggcctaccccctggactccctggagaagcagatggaaaaggaagcccgtgcctctactactggatcaa

SEQ ID NO: 1909 - DNA, 100 bp, Homo sapiens
gtttggctttccagagggcagtgtagagagtccgatgggtggtccttttattcctgctgctcctgtcaaaactgccttgcctgctggcccccagccccag

SEQ ID NO: 1910 - DNA, 101 bp, Homo sapiens
ctgatacagcaggcgctcaccatgttccctggagaatcagcttaaaatggctcgtttcaccattgtggatgggaagatggggaaaggagtcagcttcaaag

SEQ ID NO: 1911 - DNA, 97 bp, Homo sapiens
aatcttcgtgcggctgggctgtgtgtagaccaggccaagcacctggctagccagtactgggggtgcagccgcacaatggccggccgtcgggacccca

SEQ ID NO: 1912 - DNA, 98 bp, Homo sapiens
ggaagacccagtacagctggacgtttgccgtccactctgagttcacggaggagaaatttggccaggctgagaagactgagcttgatgcccactttgaa

SEQ ID NO: 1913 - DNA, 74 bp, Homo sapiens
ggaagccacgtgcagacatctacaaccttcgatctcctgacgagaaatgcaacctcaccacaagtacaaagacc

SEQ ID NO: 1914 - DNA, 90 bp, Homo sapiens
ctcagcgtcctgctgctgccgctgctgggcggtgccagtgacggggtggcccgtgagctgatgacgaggactggcttttaatccttggtg

SEQ ID NO: 1915 - DNA, 101 bp, Homo sapiens
attggactgacttttcttatgctgggatgtgccttagaggattatgggtgcttttgaagatgatgatatcacgcacgttgaaggaagtgtagatcctattc

SEQ ID NO: 1916 - DNA, 75 bp, Homo sapiens
caagttgcaaggatattcctcatgtatcatgcaaggatattcctcatatatcatacgagatgatgcctattggcc

SEQ ID NO: 1917 - DNA, 100 bp, Homo sapiens
cgctacaccactgcagccgcctcaggccgcaggcatggttttggtcaactgatgtttgcagatggtggcacctacctgggtcattttgagaatgggctct

SEQ ID NO: 1918 - DNA, 100 bp, Homo sapiens
ccgtcatgccgactctcatacaggcgggcgccagtgcatcttctagaccagaatccgtagaagctagccctgtggtagttgagaaatccaacagttatcc

SEQ ID NO: 1919 - DNA, 100 bp, Homo sapiens
gacaaagcagcgcccgtctgcttcgggcctctggaatttagcgctcgcccagctagccgcaggtccccggcaacttccacgtgtccacacacagtgccac

SEQ ID NO: 1920 - DNA, 75 bp, Homo sapiens
ctgagacaaccacttctggtggttgccactcacctgaggatcctcgagtttggaagaaaacaaggcagtagtaag

SEQ ID NO: 1921 - DNA, 100 bp, Homo sapiens
aggacttgcagtcatacagaggagctggccacgaaatacgagaggtgcccagggtggctccgtggcccgcacactcctggaagatgggacattcaaggtt

SEQ ID NO: 1922 - DNA, 83 bp, Homo sapiens
gtcagcactgactttcagctatggaatcgatttatttaattgcccaactaccactgatgaagatatattggagtgactgctga

SEQ ID NO: 1923 - DNA, 75 bp, Homo sapiens
gtcgcctctgtgctcgtgagtgcatggggtataaggttatatatgatgctctgcaaaacctggataagaagattg

SEQ ID NO: 1924 - DNA, 100 bp, Homo sapiens
cgccgtttgggaacgcaactttgaggagacagtgcggtgggtgctggttgccgaggagaacgtggacttccgcatccacgtggagaaccagacgcgggct

SEQ ID NO: 1925 - DNA, 75 bp, Homo sapiens
atgcaaagcgacctaaaattagctctttcgacgtgtagcagcagctttgccgggaatggaaagcacacaggacag

SEQ ID NO: 1926 - DNA, 100 bp, Homo sapiens
tgccatccttcggagagagaaaaccatgatagaagtagaagctccaatcacaggtggctttcctggaggacagatgccttctcagtatcctggaggacaa

SEQ ID NO: 1927 - DNA, 106 bp, Homo sapiens
ggaaagacaagtccttggtcaaatgatgcaaccctgcagcatgttttaatgagtgactggttgcttcagagaactttgtgctctgtgttggatgctgcatgtccgt

SEQ ID NO: 1928 - DNA, 74 bp, Homo sapiens
gtcagtgagtccagcgatgacgacgaggaggaagaagcaaaacaagctatcgatcagggaagatctccagttat

SEQ ID NO: 1929 - DNA, 74 bp, Homo sapiens
cggaggccagtagcaccaggatatgtcttgaaggatttgatgccctggatccctttattcccatcctggtttcc

SEQ ID NO: 1930 - DNA, 90 bp, Homo sapiens
cggccagctaccctcactccccaggaagtccttctgagccagagagtccctatcaacactcagattggaaccaaccagatggctgtgtgt

SEQ ID NO: 1931 - DNA, 90 bp, Homo sapiens
cggctcgaggcatccctgcagggcgctcctccgagtccctcggcgctctgagcccacaggaaacctggattaacaggacgaggcatgtat

SEQ ID NO: 1932 - DNA, 73 bp, Homo sapiens
tatgccatgaacttcaatcccatcatttccagaaaggacatcacaggcagtttgaagagaacacatgaagaag

SEQ ID NO: 1933 - DNA, 75 bp, Homo sapiens
ccgacttcgatgatcgtgtgtcggatgaggagaagtgctgggagctattaataataggagaggcctcgtggtgat

SEQ ID NO: 1934 - DNA, 101 bp, Homo sapiens
tccctgaagcccaccggtccccaacgcatcatgccagggagccaagcgtcctgcccggcctaagactttgaccccgacgcaggcttcagtgattgccgcgg

SEQ ID NO: 1935 - DNA, 87 bp, Homo sapiens
ttaaatactcatctactaggcaagcatggagttggcaccccaaaagaaaggtaaagtgcaagttaagagttcagacatacaagttgg

SEQ ID NO: 1936 - DNA, 50 bp, Homo sapiens
cctgaagagggaagacacgcggaaacagatggactcaccctgtcacccag

SEQ ID NO: 1937 - DNA, 87 bp, Homo sapiens
gaaggcaacagtctgcccacctgtggacaccagctgatcatcctggccaatggtgggccccaggccctcgtgcagatcatgcgtaac

SEQ ID NO: 1938 - DNA, 76 bp, Homo sapiens
aggcgtgcgcggacggtgtgcgggactatcctattaagtgtaatctcactgcttaatgagcccaacaccttctccc

SEQ ID NO: 1939 - DNA, 100 bp, Homo sapiens
tccttgaccagaagtttgaggtctccagtgttgccgactgcttggactctgcaggtgtaattagcatggtcaatgcgggagcgatgagtggctctggaaa

SEQ ID NO: 1940 - DNA, 74 bp, Homo sapiens
caacaaggttctggacaagatgaagtctttctgccagatcatgcatgcattttcagttgctccttttgaccaga

SEQ ID NO: 1941 - DNA, 100 bp, Homo sapiens
gtcaggattggcctggaggatatttggaatagcctctcttcagtgttcacagagatgcaaccagcctctgtctcttgctgcaagcagagaaacaacgtct

SEQ ID NO: 1942 - DNA, 100 bp, Homo sapiens
ccatattctgttggatgagcttcagtgcctaccagacagcctttatctgccttgacacctggatttcattagcatcatgacctacgattttcatggagcc

SEQ ID NO: 1943 - DNA, 100 bp, Homo sapiens
gagatttgaaactggacaatgtattactggactctgaaggccacattaaactcactgactacggcatgtgtaagacagatgcaccatcaggaatggaatt

SEQ ID NO: 1944 - DNA, 78 bp, Homo sapiens
gcgaccatggagcgccccgaagcggtgtgacaccatcgccacaacaggctcgggtctgtcctccccatatgttacctg

SEQ ID NO: 1945 - DNA, 76 bp, Homo sapiens
gagccgcctgccatgccccagccagtccccacagcataacagggtgttgatgatgccttctatacattagttcgag

SEQ ID NO: 1946 - DNA, 75 bp, Homo sapiens
gattatctcaacattctgttgacctgtcatttactccatcctttatagtgatgctacaggacgaagaggaatgga

SEQ ID NO: 1947 - DNA, 93 bp, Homo sapiens
ggggcctctccagggagtgctctgttcacggctccatcgctgttaaagctgaaacctatcaacactcttcaaaatgcaatggaatgtaccacg

SEQ ID NO: 1948 - DNA, 98 bp, Homo sapiens
aaacaagaaaacatcaaagaggtctagcaaaggagactacctaggtggagaagcgtactgggccggcggcctgcacctctacaccccattacctttcc

SEQ ID NO: 1949 - DNA, 82 bp, Homo sapiens
gccctcctctccggctttgccatgatcataggtatattgaactgttcctgaattcatgtccaaaaggaaaataagactctag

SEQ ID NO: 1950 - DNA, 131 bp, Homo sapiens
ccgagcccaaggcaattgatcccaagttgtcgacgaccgacagggtggtgaaaggttaatttggagtggcccctggagtcagtttcctacaccatccgaggccccacccagcacgagctacagcctccacc

SEQ ID NO: 1951 - DNA, 97 bp, Homo sapiens
tgatccagcccttcatcgacttgcggcaaaggatcatggtcatcaaagccaaaggcagctaagaaagagcatgcagctatcattctttggaacacta

SEQ ID NO: 1952 - DNA, 100 bp, Homo sapiens
gttaccaacatgaagctgctcgcagcaactgtgctactcctcaccatctgcagccttgaagatgcatcactgtaagcgataccgctcccctgaaccagac

SEQ ID NO: 1953 - DNA, 108 bp, Homo sapiens
ggctatcgtcgtgacatggcattgtctgatgttacagaagaatctgaaatcatttcgcaaagccttctagacaagctcagtggaatctgaagggcccaccccatggag

SEQ ID NO: 1954 - DNA, 95 bp, Homo sapiens
gcatgcaggccaccaacaactcggattacgccatcgcacaggaatcccagtcagaagttccagcctgccactgttctctgatgccatgccagcac

SEQ ID NO: 1955 - DNA, 100 bp, Homo sapiens
tggatatctctgcaacaaaggcagtccacataagtaatcctaaaacagctgaatttcaggccaaaattgtgcgcaatgccaaggacacagcacacacacg

SEQ ID NO: 1956 - DNA, 83 bp, Homo sapiens
ctcttcctcccttcgctcgcaccatgtgtggacgaatgtggaacctcgctctgtggctgtgttcccttggcactccttagtcc

SEQ ID NO: 1957 - DNA, 124 bp, Homo sapiens
ggggtgaatcagtatgttgtgcaagaggtactgtccatcaaacatcttccaccacagcttagagcggtcagatagcatcagacctgcattgaacagtcctgtggaaaggccaagcagtgaccag

SEQ ID NO: 1958 - DNA, 51 bp, Homo sapiens
gcgagggggtgttgttaatgcagctaaagtagctctataaatcagtcagca

SEQ ID NO: 1959 - DNA, 74 bp, Homo sapiens
gtggaagcaggactgcgccgcgtcttcctcaagttcaaatctgaacatcaatgatgtactagggaactactcat

SEQ ID NO: 1960 - DNA, 100 bp, Homo sapiens
cctgatggagagaagaaggcatatgttcgactggctcctgattacgatgctttggatgttgccaacaaacatcatggcagaacaggatgtggaaaacgat

SEQ ID NO: 1961 - DNA, 50 bp, Homo sapiens
cggcgatcgagaaagtgcgcaaatgacgagccaaactcaggctgtacctt

SEQ ID NO: 1962 - DNA, 100 bp, Homo sapiens
ttcgcgcaggctgacggctcggcctacattgagcagggcaacaccaaggcactggctgtggtctacggcccgcacgaggacctgaaggagaagaaggaga

SEQ ID NO: 1963 - DNA, 100 bp, Homo sapiens
agccaccacgcctggcctcactcaaacagtaaacgaggcagtataccttaaatggcaagaaggaaataaatcatctgacatcactcagattgaagaggag

SEQ ID NO: 1964 - DNA, 51 bp, Homo sapiens
gtgcagatcaatgacatttccctgcagttggatgaaaaatctgacaaacag

SEQ ID NO: 1965 - DNA, 75 bp, Homo sapiens
ttgcaagggaactggagacaatgaaaatcttgtcagacggtctggaaaatcccgaagcagaagcccgtattcatc

SEQ ID NO: 1966 - DNA, 74 bp, Homo sapiens
agctaactgtgtgccttagaaaccagaattgatgaattgcaagtttgtgccccatagctgcacaggtatgtata

SEQ ID NO: 1967 - DNA, 100 bp, Homo sapiens
aaacagatgagggcattgcctacagggcccagataaaggccactgtgaaacgcaaggtatatgaagattctggcatcccccttccagctgagtcacccaa

SEQ ID NO: 1968 - DNA, 100 bp, Homo sapiens
gtgtttcgtgtacacatcccacagcccagtggaaaagtcctttctctgcagatagcctctatacccgttgagtgctgtgccagcgagatttcagattcct

SEQ ID NO: 1969 - DNA, 82 bp, Homo sapiens
cggacggtacttctgccactgctgctccgtggagatcgtcccgcgcctgccgactccgtgggaaggaggcttgtttaaacta

SEQ ID NO: 1970 - DNA, 96 bp, Homo sapiens
aggagtgctaagcaatttgagagcaagatcataaaggtatatgagaaaatattgactcctatctggccttcatcaactgacctcgaaaagcctcat

SEQ ID NO: 1971 - DNA, 74 bp, Homo sapiens
cggaccccgcggtcaacgcgcagctggatgggatcatttcggacttcgaagggaggaggtacaggagaactgtg

SEQ ID NO: 1972 - DNA, 83 bp, Homo sapiens
cgcacatgcccgccgccgccctcaacgccgacaatgcagatcttcgtgaagactctgactggtaagaccatcaccctcgaggt

SEQ ID NO: 1973 - DNA, 100 bp, Homo sapiens
gctggacgccgccgccgccaccgccacctgcgcggcagtcatcaagatcagcttgaacgggtctttttacgacttggccatgctgaaacagatgaacaat

SEQ ID NO: 1974 - DNA, 100 bp, Homo sapiens
ccccttttaccactgcctggttgcagaagtgccgaaagagcactggactccggaagaaacgtgttcagttgatcatcaaatacttaaaggaccttgaaag

SEQ ID NO: 1975 - DNA, 87 bp, Homo sapiens
aaaatcgagcagaaagaatgtctttcaggcagctggctaagagtcttgggcaggctggtgaaattgagcctgaaacagaaggaatac

SEQ ID NO: 1976 - DNA, 87 bp, Homo sapiens
gcacagaaaaaggcggcggggggcacagagaagcacagagaagcgggggcagttgcacaggtgctgactgggttacttttttaaaca

SEQ ID NO: 1977 - DNA, 98 bp, Homo sapiens
accaaatctggcctgggggcccgagaagcttcctctcagtgtcagaaatttggagaatatcataaagatgacccaagttccttcagattttcagaaac

SEQ ID NO: 1978 - DNA, 97 bp, Homo sapiens
aaagcgaaatgggcacaccacagcttgtctccttcagatggagcccgtgaactacgaacgagtgagagaatatagtcagaaagtcctggaacgacag

SEQ ID NO: 1979 - DNA, 100 bp, Homo sapiens
gtgaccaaaaagtcatctacatttcaggatttgggggttctttcatggcgccttccccatctccagtgactccagctcagaataacctgctacagcccaa

SEQ ID NO: 1980 - DNA, 90 bp, Homo sapiens
ctgtccttccttctacagaccatgctggacttcttgtcggatcaggacaatggcgatgaccactcagaaggaggcctggtggagaaccac

SEQ ID NO: 1981 - DNA, 136 bp, Homo sapiens
gccagaggcccggcacccccgcacaggcgcctctgccctgcacgtggctgctgccaagggctacattgaggtgatgaggatgacgcggcatggcaagaactgcaccgcaggggccgtctacacctaccacgagaag

SEQ ID NO: 1982 - DNA, 110 bp, Homo sapiens
cagggctgagatgggcaccgcggatctggggccgtcctcaggttgaaaggattgttgacaaaaggaaaaataaaaaagggaagacagagtatttggttcggtggaaaggc

SEQ ID NO: 1983 - DNA, 100 bp, Homo sapiens
ttccagctgtttgaccgaacaggtatgagtgaaagttcatttttatcaaaacgtccttctacttctgaagtaaataatgttaatccaaagaagcctaaac

SEQ ID NO: 1984 - DNA, 49 bp, Homo sapiens
cagagacacaacccattgtttatggtgaatcaggtctaggaaaatcgac

SEQ ID NO: 1985 - DNA, 83 bp, Homo sapiens
gcggggcgctgggccgccagcctcggcaccgtcctttcctttctccctcgcgttagctccagctccagaaatcccagtacctg

SEQ ID NO: 1986 - DNA, 100 bp, Homo sapiens
gtattttcaatgtggagttctatgcagtggtattcatgggtagtttgaaatatccagatgagaatggatttgatgccttcctgaagaagcatgggggtag

SEQ ID NO: 1987 - DNA, 51 bp, Homo sapiens
cggaagcccaggaaacacaggcagcggatggagtctcgctctgtctcccag

SEQ ID NO: 1988 - DNA, 83 bp, Homo sapiens
caatttcagcagacagcgccatcatgaatccagctagcaaagtaattgcactgaaagagggactgaaactgggctgacccttt

SEQ ID NO: 1989 - DNA, 74 bp, Homo sapiens
tgtccctgcagcgaaggatcctgggaaattcaactactgaggaggttacggcacaaaaatgtcatccagctggt

SEQ ID NO: 1990 - DNA, 111 bp, Homo sapiens
atacgcctttctcatatccactgccaaagggaccaaggatgccagcccccatcagattgcgggagctgatccggaccatccggacagcccgaacccaagctgaagaacgag

SEQ ID NO: 1991 - DNA, 100 bp, Homo sapiens
tccccggcgagcagggagcggagtaccagcacttcatccagcagtgcacagaattcaattcgtcataatctgtccctacacagcaagttcattcgtgtgc

SEQ ID NO: 1992 - DNA, 155 bp, Homo sapiens
gagactctctttgaaactgtaggacaaggcccgccgcctagcaaagactattaccagttactggtcacccggtctcagtgaatggtagtgtctagaaagggtatgtcccttcaagagagaggtgccaatgtccaaccggcctaataacaatccag

SEQ ID NO: 1993 - DNA, 82 bp, Homo sapiens
actgtcggcttcaaagagaaaaggcaacatcctgtcacaggccatgctctggcaaaaacgtgtggactggatgaacaaggtg

SEQ ID NO: 1994 - DNA, 100 bp, Homo sapiens
tattccagaagataatgctgacatggccagacttgatttcaatcttataaggtataattgaaatcctcaaaggaatgcaagaattgggagtacatcctga

SEQ ID NO: 1995 - DNA, 75 bp, Homo sapiens
ggcctcttcggctgcggaccctgccattccggaggaggaatttatgcaaatattctcatgaggttctctcagaag

SEQ ID NO: 1996 - DNA, 100 bp, Homo sapiens
aataatacctaaatatggcagtataaatggagcaacaaggctgactataagaggggaaggtgatgcagaagatggggaagaatatgatgacccttttgct

SEQ ID NO: 1997 - DNA, 100 bp, Homo sapiens
ccccctagagaacaaatttgctgtgggaagtggagcacgactcatttctgtttgttactttgagtctgaaaatgactgatggaaaaagtggaggcagatc

SEQ ID NO: 1998 - DNA, 50 bp, Homo sapiens
gcgcaacgctgcgctctgggctgacagaaaaagcttgtggtgaagggggg

SEQ ID NO: 1999 - DNA, 100 bp, Homo sapiens
ttgccctgagttacataaataggtttctagagccatctgggctttccgggaacctggaccagactctggcccagtaggatgtccccgtgtcctccccagc

SEQ ID NO: 2000 - DNA, 82 bp, Homo sapiens
gacgatgcagctgcatcccgtggccgactcttctcctgcggggatgcactgcgcaactctggtggcgatgggctggggcaga

SEQ ID NO: 2001 - DNA, 110 bp, Homo sapiens
aggtgatccagcaaggtcggcagagcaaggggcttacgcagaaggacctggccacgcaactgaagcagcagcgggacaagctgaggcagtaccagaagaggatcgcccag

SEQ ID NO: 2002 - DNA, 115 bp, Homo sapiens
gggacatcttcaccctggaggaggagctgcccaagagggtccgctctcggctgctgcctgtggaggaaccgattgtgtccacagatgaggtcatcttcccactcaccgtttcact

SEQ ID NO: 2003 - DNA, 75 bp, Homo sapiens
ctgtaggttataataaagatataaatgaaagtgatgaagttgaggtgtggatggtattgcccaggcgtactcagc

SEQ ID NO: 2004 - DNA, 82 bp, Homo sapiens
tcgcagttcttgtttgtggatcgctgtgatcgtcacttgcgccactggcttcaccacgcggtcagacattgggcccgcccgt

SEQ ID NO: 2005 - DNA, 95 bp, Homo sapiens
atctatttaccttcgcttatggaaaagaaaccactgtaatcacagggactaccagaatatttcaagaaatggatgaaggatactagccgcaagaa

SEQ ID NO: 2006 - DNA, 75 bp, Homo sapiens
cctccttgaaaaactgggatacatggatctggcctcaagactggtggtaagaaataagacttgcatttgtgatat

SEQ ID NO: 2007 - DNA, 90 bp, Homo sapiens
gctcttcagtgcgagttcctccgagatgtggaaccctcaaaaatgcctccaccagatgagagtgaagctgaaaatcttgaagcacaaccc

SEQ ID NO: 2008 - DNA, 100 bp, Homo sapiens
gaagagtactgggaagatttagaggaagataaggctttcaagcagaaacaaaaagaggagcagaagaaactcgaggagctaaaagcgaaggccgcgggga

SEQ ID NO: 2009 - DNA, 75 bp, Homo sapiens
aagagaggcaccgctggaacactaatgaggtatgtgatagtggaatgtgaagatcaagatactcagcagagagat

SEQ ID NO: 2010 - DNA, 75 bp, Homo sapiens
ccggcggcggcacgatgccctttgacttcaggagtgccctctggtggtcagaagatgctgtgctgtctcgttagg

SEQ ID NO: 2011 - DNA, 110 bp, Homo sapiens
aaggagtcagtcagagagccttgggccagagttccaggggctctgggagtggctgccagttgtgaagatgacctctccgacgacagagaagagcttctgcatgggatttc

SEQ ID NO: 2012 - DNA, 94 bp, Homo sapiens
cttggatgatttgctgccgctgacgtttttagatttcatccagggacctccgaaacaatcttattagtagtatagatccaggtgccttctgggg

SEQ ID NO: 2013 - DNA, 75 bp, Homo sapiens
tggagatggagcgagctgtgccgctcgcggtgcctctgggtcaggaatatgttctgtctcacacggagatgccag

SEQ ID NO: 2014 - DNA, 74 bp, Homo sapiens
aactggcatattttcctacagaactgtttgtcacatttaaaggaggagatgttaaagtaacccatcttgcagga

SEQ ID NO: 2015 - DNA, 75 bp, Homo sapiens
tgcggggagctacggtaacgatcagtggctgcagctacagattctcgttgacactggaagcagtaactttgccgt

SEQ ID NO: 2016 - DNA, 73 bp, Homo sapiens
cagaagtccagagctgaggactgcctgtttgcaggactgtgaaggccttattgttcgctctgccaccaaggtg

SEQ ID NO: 2017 - DNA, 75 bp, Homo sapiens
ctggaaagaggctcctgaagcacaaatgcaggatgctctacccatggtaccccaggaccagaaggcaaccatatt

SEQ ID NO: 2018 - DNA, 98 bp, Homo sapiens
gtagaattgtagtggatgaaaaatcaggtcaggtgacactggaagataccaggtgaaatgacaatggatgctctgttggctcgattgaaacttctgaa

SEQ ID NO: 2019 - DNA, 75 bp, Homo sapiens
caggagctcgggaaccgggactgcgagcggggaaggtggccatccagaaggaggacttgcagaagtaccacaaca

SEQ ID NO: 2020 - DNA, 74 bp, Homo sapiens
gaaggagagaaaatggcgtccacggtatgaccctcaatttggcgatgccttctggaacagcagcaaatacggga

SEQ ID NO: 2021 - DNA, 75 bp, Homo sapiens
ttggacattagctcccgagcgctggccttctggacatatcaggctgatttggagcaatataaaaaagctttaact

SEQ ID NO: 2022 - DNA, 74 bp, Homo sapiens
attttaatgaagatattctgtgtccacatgggcaagaggattatgacagattacgaccgctgagttatccacaa

SEQ ID NO: 2023 - DNA, 82 bp, Homo sapiens
agcaaacacagttgtttacagctctaacaaaatagacgctgacacttcctccatggcccatctatcgccggcatcctctcaa

SEQ ID NO: 2024 - DNA, 98 bp, Homo sapiens
agcaatctcctcctccactgccactacagggaagtgcatcacatgtcagtttgaacgccatgaccctgtggatgggagaattactgagaggcagtttg

SEQ ID NO: 2025 - DNA, 100 bp, Homo sapiens
ttccaccagcccgaggctatcgaagagttccccgtgccggctcttcaccatcccgttttccagcaaggctcctgggtagaactgcacttcagcaataatg

SEQ ID NO: 2026 - DNA, 82 bp, Homo sapiens
tcatgcagttctccatcgtgccaggcagttgggtgagaagcagcttccatcttcaacctcggatgatcgggtaaaagacgag

SEQ ID NO: 2027 - DNA, 74 bp, Homo sapiens
gcttctacgacagatccgacatcgacgcagtctacgaatactcccccagttgcaagaggcgcaggaccgtggaa

SEQ ID NO: 2028 - DNA, 90 bp, Homo sapiens
gcccaggcgcggagggagcgagtccgccccgagaccatcatggagcagttcaaccctagcctccggaacttcatcgccatggggaagaat

SEQ ID NO: 2029 - DNA, 90 bp, Homo sapiens
cgcgagtgaggaaaggaggtactgtagatgttcgagcctgtgagctgcaccttcacgtacctgctgggtgacagagagtcccgggaggcc

SEQ ID NO: 2030 - DNA, 97 bp, Homo sapiens
ttggttaaagtcattgaggactttccagcaaaggattctggactctacttataatatccctaactgctggattctcctgttgcagcttttcttggac

SEQ ID NO: 2031 - DNA, 51 bp, Homo sapiens
acagattgcaaatcagactggaagatggaaagtggagaatgaggacatgaa

SEQ ID NO: 2032 - DNA, 50 bp, Homo sapiens
attctgagaggagacatgatgaggtatgcccaagaggacagagaacgaat

SEQ ID NO: 2033 - DNA, 75 bp, Homo sapiens
ctagatcagcattctctaacttgagttggaagctgtgaaatgtttcagcatggtgctattcactaatggtgtgaa

SEQ ID NO: 2034 - DNA, 105 bp, Homo sapiens
ggaaaatatataccatgatctacaggaacttggtagtagtcaatcagcaggtaaccccaagaaaggcatcagggttctggagtggttgtttgagtgacacagcac

SEQ ID NO: 2035 - DNA, 75 bp, Homo sapiens
caggagtcatttctgttccgcacaggcctgctgaactgggtgctttatataggccgccaccggcaactaacctat

SEQ ID NO: 2036 - DNA, 80 bp, Homo sapiens
aacagccccaatcaccgtccttacacggcctctgatttcatagaagccatcagagggttctcgcttcagcacaagatccg

SEQ ID NO: 2037 - DNA, 75 bp, Homo sapiens
aactaacctcactccaagattatgactgccactggagacaccattgtctcatccaagtccagtgcattagctgca

SEQ ID NO: 2038 - DNA, 100 bp, Homo sapiens
aggggagtcgtggcgtcgtctgcgaccgctgccttctcggaactcggttgcctttgaggatgtggctgtgaacttcacccaggaggagtgggctttgttg

SEQ ID NO: 2039 - DNA, 98 bp, Homo sapiens
agagtagaagatgtccgacttattcgagagcagcatccaaccaaaatcccgaaccactcacgaattcttgtttggtgcccttgctgaactggttgata

SEQ ID NO: 2040 - DNA, 74 bp, Homo sapiens
tcaccgtgacatccgaggtgcctttctccaaaagtttagatgcaaaatccacaagtattcaagtgattgttaaa

SEQ ID NO: 2041 - DNA, 83 bp, Homo sapiens
acgcatagaagccgggattgagcgcatcaaggaccaagaatcgccttcagccctgtctggtgcatccttggcagaaagtgagg

SEQ ID NO: 2042 - DNA, 97 bp, Homo sapiens
ggacatggccatgaatgcccaacaagataataattatatccagatcgagagacagaagattctgaaagggttcaatgaaatgagagtcatcttggac

SEQ ID NO: 2043 - DNA, 101 bp, Homo sapiens
aacaccaacaacagcaacagcaagaagaagagcccagctagcaccttcgccctctccagccaggtacctgttcatgcagcatcccaagaactttggcctga

SEQ ID NO: 2044 - DNA, 100 bp, Homo sapiens
gaccgtgggcagccagggtcggtgaaggacctcagcagccatgtcgaagccccatagtgaagccgggactgccttcattcagacccagcagctgcacgca

SEQ ID NO: 2045 - DNA, 82 bp, Homo sapiens
gccgctgctgtcctgcgaccccaagcagattggcggcagtaagcacacaatgaatgatcacctgcatgtcggcagccacgct

SEQ ID NO: 2046 - DNA, 101 bp, Homo sapiens
gaagatgaagataaatcagaatcatttatgcaaaaatatgagcaaaaaatcagacattttgtcctattttgtaacggattatgatccaaccattgaagatt

SEQ ID NO: 2047 - DNA, 98 bp, Homo sapiens
atcgttaaagtctctcttcaccctgccgtcatgtctaagtcagaggagctcttgtccctggcaaagcgaaagcgcagtgactctgaggagaaggagcc

SEQ ID NO: 2048 - DNA, 75 bp, Homo sapiens
aggtcatcaaaggtgtgctgtttagggagatgtcctttgcttctcagatgtaaatgcactttaagtttgttattc

SEQ ID NO: 2049 - DNA, 90 bp, Homo sapiens
gctgaaagagaaggatgaactcatttcccaacttcaggaagagctgagcccataggcagcatgtcatccatggaagtgaacgtggacatg

SEQ ID NO: 2050 - DNA, 80 bp, Homo sapiens
atctctaaaggatttaattacaaagatgcaactgcaaagagaagccgagtatccagaattatttgcaaacttgcccatac

SEQ ID NO: 2051 - DNA, 90 bp, Homo sapiens
gcagaatatatttgccctatctccaaaactggagccatgcagctgagtatgtcccagagaaggtgaagaaagcggaaaagaaattagaag

SEQ ID NO: 2052 - DNA, 75 bp, Homo sapiens
ctgcagatcctgacctctctgatgagatggatcggatgaagccccacccgcccttcaggatgccagccttggcaa

SEQ ID NO: 2053 - DNA, 80 bp, Homo sapiens
gttcttcttcgagtatttgtagaaggacctcctgccccccgaggtctgcagtctcctgaacccagcagccatctacgcca

SEQ ID NO: 2054 - DNA, 100 bp, Homo sapiens
tgacatcaagaggaagcggaaaccagtggccacagcatctttgtctagccccagtgcagtatatcctttcgggctctgatgacttcaacctgtacatgtg

SEQ ID NO: 2055 - DNA, 75 bp, Homo sapiens
aaaaggccaaagagaggtgttctgaacaagttcaagatcttggagaaattcattcaaggcttttggatcacagac

SEQ ID NO: 2056 - DNA, 100 bp, Homo sapiens
tggtttacctggcactcctggacaggatggattgccagggcttcctggcccgaaaggagagcctctttggacatcagacagtgcaggagaagaatgtgat

SEQ ID NO: 2057 - DNA, 75 bp, Homo sapiens
cgccgctgccgctgcgtgggggtgaggggatcaggtgccgctcagtggaattggatctcaaccaagcacatatgg

SEQ ID NO: 2058 - DNA, 90 bp, Homo sapiens
cagcgctcccatgatcgcccggtgccttttggctgtgcgaagcctccgcagctggccctgaaggaccctgttcatacagtgtcactgcag

SEQ ID NO: 2059 - DNA, 75 bp, Homo sapiens
accctggccgccccgagcggagcctggagggatcgcttacacctgagacgaactacagaacagcacgtaccagag

SEQ ID NO: 2060 - DNA, 51 bp, Homo sapiens
tcagtccttcacacagttccctggaaatgaattgaatgatctggcacggga

SEQ ID NO: 2061 - DNA, 85 bp, Homo sapiens
ggcacctcagcagcctatgccaacttcctcattgacacagagattgactggaaggcctacatggccgaggtagaaggcgtcatca

SEQ ID NO: 2062 - DNA, 101 bp, Homo sapiens
agggcccggctgcaggaagtggctttttatcagttgcaacaggactgtgacctgagctgtcagatcaccattcccaaagctctcgtggcattatccttcag

SEQ ID NO: 2063 - DNA, 88 bp, Homo sapiens
cgtgcagacatctacaaccttcgatctcctgacgacctcagggatttagagatactgttgttacttctgcatgttcattgcaaacaga

SEQ ID NO: 2064 - DNA, 75 bp, Homo sapiens
atccaaatgagacccttcctggagaaccgggcccagcagcactgggcaatggtggatgtgatctttgctgatgtg

SEQ ID NO: 2065 - DNA, 50 bp, Homo sapiens
cttcaagcagcgccgcaccttcggaagggaaaaggccgaggcatcagcgt

SEQ ID NO: 2066 - DNA, 115 bp, Homo sapiens
attttgccttttggtaatgctgtttctgcttaagttggcaagacactccaagtttggcatgaaagccctaccacttatgtcttggatgaagatgaacctcgattccttgaagaag

SEQ ID NO: 2067 - DNA, 102 bp, Homo sapiens
gaaggaggggtatgagccacacatccccgaccacttgcggcctgagtatggtttggtgcacctcgatttggaggaagtagggcagggcccttatctggaaag

SEQ ID NO: 2068 - DNA, 82 bp, Homo sapiens
accgcctcggttcgccctcagccgccccgcaggagcattggtttgaaaaggccctacgagacaagaagggcttcatcatcaa

SEQ ID NO: 2069 - DNA, 75 bp, Homo sapiens
gtggaagttcccgccccggagagcggcgaggcggcagccacaggtgctggagaatctggtaaaagcaccattgtg

SEQ ID NO: 2070 - DNA, 100 bp, Homo sapiens
ggaggggtgcttgcaggagcattgtgtaattctaatccagagctggtgagagcggtgactttggagggactgctgagatgtcctctattcttgaagagcg

SEQ ID NO: 2071 - DNA, 123 bp, Homo sapiens
tcgaggagaatggagaccaaacctgtgataacctgtctcaaaaccctcctcatcatctactccttcgtcttctggatcgtaaagctgaaaattgaaatcatgaaagtagacaggactaaactg

SEQ ID NO: 2072 - DNA, 83 bp, Homo sapiens
gcagagcacactgcaggccgagtgtgaccagtaccgcagcatcctggcggagacgaccaaatacacgctgatcgatgagcagg

SEQ ID NO: 2073 - DNA, 83 bp, Homo sapiens
tgtctgtcggccctgtctgaagtgaaggtgcagccgggcttcacggaggtcatgccctggcagagcgtgcccctggaggagag

SEQ ID NO: 2074 - DNA, 100 bp, Homo sapiens
ctggtggggtggcggagggggagactgtgccgtggagggcctcgccatgtcctgctgcccgaggctgtgacaacactgaaaacagtattggatcagcagc

SEQ ID NO: 2075 - DNA, 90 bp, Homo sapiens
aaggcccgcggaacagcggaggacgaagagcgggacccgagccctgagtgaattactggaactgaaacggcagcagcaagagcaagaaag

SEQ ID NO: 2076 - DNA, 100 bp, Homo sapiens
ctgaggtgtgagtagagcctgggggagagtggatccaggtgaagggggcagaggttccgaggcctcatcctgctgctgaccttcctaatttacgcctgct

SEQ ID NO: 2077 - DNA, 82 bp, Homo sapiens
gcgaacacagtagtggaagatgtaaagcaatatttcgagcagtttggcaaggttcattggcatggaaaaatgttcagtggga

SEQ ID NO: 2078 - DNA, 75 bp, Homo sapiens
ggactgtgggacccatcacttacgaaaaaccagggtgagcccatcactttctgtgaggagagttttgtaaagcac

SEQ ID NO: 2079 - DNA, 75 bp, Homo sapiens
ggctagacctgaaaatttcttccaaggttgatgcatctctctcagagggattaatgaaaatcaagttccatcctc

SEQ ID NO: 2080 - DNA, 98 bp, Homo sapiens
cccgcccggaaagctgcccagccaccagcaaccccccagatgcagacagacatgctgaactatctggaagtccactgaaaagcaaaagcactaggaag

SEQ ID NO: 2081 - DNA, 82 bp, Homo sapiens
gcagtcaagtatgtcccaaacgtctgctatgtccaaactgggtcttcggcaggttacaggagttactagagtcactatccgg

SEQ ID NO: 2082 - DNA, 137 bp, Homo sapiens
ccggcagaggcaggaagtggaaaaggagttggacgtcctgcagggtcgtgtggctgagctggagcacgagcgccgccaagatgatcaaagagacaatggacaagaagttcggctcctcctggcacgtggtgatcggc

SEQ ID NO: 2083 - DNA, 82 bp, Homo sapiens
atgtgatgccattccagcactggactcatggaggctgagcatttattcagaactgataaatttcaaacggaagagagtggca

SEQ ID NO: 2084 - DNA, 75 bp, Homo sapiens
atttctcctattgaggagtcaacgtgggatgatgacgttgtcttcaagaactgtgcaaaaggtgtagatgaccag

SEQ ID NO: 2085 - DNA, 82 bp, Homo sapiens
catgctgcttttgatgtctgacaacgtggatcgttgttttgaaacttctggagagtcttggcttctgggaggaagtcagagg

SEQ ID NO: 2086 - DNA, 97 bp, Homo sapiens
cttgtttctgctttttttctggctagaccgaagtgtactagccaaggagttgaagtttgtgactttggttggaagttaaagataagacagatgaagt

SEQ ID NO: 2087 - DNA, 87 bp, Homo sapiens
tcaaacttcactcgacatcagagaattcacacagttaatcagctgtgttcagcgaatacttatgaacagaaggctccagcagcagta

SEQ ID NO: 2088 - DNA, 100 bp, Homo sapiens
agctgggggcaccgcagctcaccttgctgtggttggtggtggcgatggagactacagagcaccagagcgacaatactgtcagagttcaagacacagattg

SEQ ID NO: 2089 - DNA, 101 bp, Homo sapiens
ctctgcagccagaagaacaagaagtaggcattgaccccttgtccagttactctaacaagtctggagcaatgtacaggaaagggaagcacagtttggaacaa

SEQ ID NO: 2090 - DNA, 75 bp, Homo sapiens
cctaaaggatcaaccctctgcatacagtaaaatctgtgaagtcctggaacgctcccactctccacccctgaagct

SEQ ID NO: 2091 - DNA, 100 bp, Homo sapiens
gagctggcatgacgtgcaggtctctagcgcttctcagagtacattcacgcccaggtggcatctggcaaagggaaactcgctcctggctttgatgctgagc

SEQ ID NO: 2092 - DNA, 74 bp, Homo sapiens
gctgaagccgctgcccctgctacaggctccatctatgagatctctgggaatgagtgctgcctctccacggggga

SEQ ID NO: 2093 - DNA, 148 bp, Homo sapiens
gaaggacacagccaagtttaaagatttttatcagtttaccttcaccttcgctaagaacccagggcagaaaggtttagactactggtgcctggatgatctgtaccgggagatggtgagatgctatgtggaaatcgttgagaagcttcca

SEQ ID NO: 2094 - DNA, 75 bp, Homo sapiens
aagcgcccgcgagccgccggccgggagggatccgggtcctgaaggtctacgacgttcctccatcggtgagcaagg

SEQ ID NO: 2095 - DNA, 97 bp, Homo sapiens
catggataaagctgccaatttcagctttagaaatacactggaagagtgtgaacatggctacgcctcttcattcccgtccatgccgagcccccgactg

SEQ ID NO: 2096 - DNA, 82 bp, Homo sapiens
tcatgttacgacagcaatttgaggtcaatgggcatttcttcaaaaagtggtggaggtggatacagcagtcggagaacatctg

SEQ ID NO: 2097 - DNA, 100 bp, Homo sapiens
aaattagtaagagaagacgacgttcacaattcatgtcaacaaagccccgaggaagggaagaacctaaatcacagccacagcagcttcatcagggacaata

SEQ ID NO: 2098 - DNA, 82 bp, Homo sapiens
tgcacagctgacaatggctttggtccccagcgcagtgaagtggtgagcctttttgtcactgtctctgctggatgaaccgaat

SEQ ID NO: 2099 - DNA, 124 bp, Homo sapiens
cgaaagcgttggagaggtgttaccggaacggcggcgacaagggtgttcccgaactagagtggacagatttgaccagttttgggccatcaatcggaaactcatggaatatcctgcagaagaaaat

SEQ ID NO: 2100 - DNA, 83 bp, Homo sapiens
agacggtggtgcctcaaaacacctacccagtggtctgcaagaagaatctggacagtaccactgtggccgtgcatggtgaggag

SEQ ID NO: 2101 - DNA, 100 bp, Homo sapiens
aaagcgaagagttgtctgtgtgatgatagtattggcatttataatactgaactatggacctatgagtgaaggcattggagtctttcagcaatcttctaaa

SEQ ID NO: 2102 - DNA, 101 bp, Homo sapiens
taataacacaacaagtttagggagtccatggccagaaaacttttgggagttggcgtggacctggatgaaaatctgaaggaggacccctcctcacaacacca

SEQ ID NO: 2103 - DNA, 75 bp, Homo sapiens
cagagttttgattaccactgacctgctggcctccggtgtggctgtctctgatggtgtcatcaaggtgttcaacga

SEQ ID NO: 2104 - DNA, 103 bp, Homo sapiens
ctcgcactgtgacatgtctgatcccttgctcccatccctgcagcatgaacaagctgaagtgagtagtgaatatagtatggacaaggcaatggttgaatttgct

SEQ ID NO: 2105 - DNA, 98 bp, Homo sapiens
tgctggtcagccagttccgctcctgtcagaccagcatctcagacatgtcgaaaaagatgttttgatccctaaaataatgagagaaaaggccaaagaga

SEQ ID NO: 2106 - DNA, 100 bp, Homo sapiens
ccccagccctgcctctccctgggctctggacacattcagctaacgtattttagcaggtggagtgaggttgaagattcctgtgacagcgatgccatagaga

SEQ ID NO: 2107 - DNA, 75 bp, Homo sapiens
cccgcctccgggcatcttcaactgcaagtgaaaattacatcctgtgtagtgataccaggtcacagctcaaatttc

SEQ ID NO: 2108 - DNA, 95 bp, Homo sapiens
tgctgccagcattagcctggctcaatatctaatcaatgtcaggtgctgggactctggtgcccccaaccctgggcatcctcaggctttgaggagaa

SEQ ID NO: 2109 - DNA, 100 bp, Homo sapiens
cttcacctgcgactgcaccatgacttcctatggaggccctgtctgcaatgatcggggggccctcagcctcttggccttgaacgggctgttcatcttgatt

SEQ ID NO: 2110 - DNA, 100 bp, Homo sapiens
tacaagatggccgcagtcggcaaggagagacgtcgctgaggggcttgcctgaagcgaggggtgtcatggagaaactccagctgggcccagagattctgca

SEQ ID NO: 2111 - DNA, 122 bp, Homo sapiens
tctgcgaaggccgggacccggttccccggcccacagtgggggtgtgcaaacccgagagaactggacgaagttatacggaagcgtctcctcattgatggagatggtgctggagatgatcggag

SEQ ID NO: 2112 - DNA, 90 bp, Homo sapiens
aacatccccgccgagagctacaccttcttcattgacatcctgctcgacactatcagatctgccatggagggatctggtgcctccagacat

SEQ ID NO: 2113 - DNA, 76 bp, Homo sapiens
aaactaggtcgatggtcggcggcgcccggatgggcagctgaggagagacagcgtctggagaccatcctcagtctct

SEQ ID NO: 2114 - DNA, 75 bp, Homo sapiens
aagactgcccagaagaagttaaagctcgtgcgcacgaggaggagaacggggctgaggaggaagaagaagaaactg

SEQ ID NO: 2115 - DNA, 51 bp, Homo sapiens
gctccgccccgtcgcctggaaagattgcagagggaatggcatacatcgagc

SEQ ID NO: 2116 - DNA, 98 bp, Homo sapiens
tcaccttgtcccgctgcagccgagatgccgggggagcggggccttccacaccccctccgtgggtgtgtgggttcccagtttgtcgagtgggcctcggc

SEQ ID NO: 2117 - DNA, 75 bp, Homo sapiens
cttggcgaggcctttcaccaagtccatggaggatggcagactgtcagtatcatacataacagaggaatgcctgaa

SEQ ID NO: 2118 - DNA, 80 bp, Homo sapiens
tcgtcgatgccagcttcttcttgaaatgagtctcgctctcagtcaaaatctccaacgggaactcctgctcgtgtaaaatc

SEQ ID NO: 2119 - DNA, 87 bp, Homo sapiens
cccttgcctgctattggacactgcaaagctatctacccttttgatgaattaaacaaccaccatgtcgagcaaaaaggcaaagaccaa

SEQ ID NO: 2120 - DNA, 100 bp, Homo sapiens
ctcgggcagtgacaccacctacttctccgtcaatgtttcagaagatgactcaagaccggcctctgcttgccgtgcaggaggcgctgaagaagtgcttccc

SEQ ID NO: 2121 - DNA, 100 bp, Homo sapiens
gacggcgtgaccgacccgagccggccatggttgcttgttatccgggcaatggaacgggttatgtacgtcatgttgataatccaaatggagatggaagatg

SEQ ID NO: 2122 - DNA, 80 bp, Homo sapiens
attggatttaaaagacagtcctcgtcagcactgactttcagctatggaatcgattgtgttcacctattgaaaattaaaaa

SEQ ID NO: 2123 - DNA, 82 bp, Homo sapiens
tggattcgtggcgccacaagctcattcactgtgtagggctgggttacgacccctacaaccctgagctgcccaagccccccgc

SEQ ID NO: 2124 - DNA, 90 bp, Homo sapiens
cgggggcggggagcagctggtggaccagctcatccgcgacctgtggttctatagatggtaataaccaacttgtaatcaaaggaagattcc

SEQ ID NO: 2125 - DNA, 83 bp, Homo sapiens
ccgagatcacagcgcgacaggagtgggggtggccgctggagcctgtgggccaaagctgaccaactcccccaccgtcatcgtca

SEQ ID NO: 2126 - DNA, 100 bp, Homo sapiens
ctccataaaggcagacgacaagggacatatttggagaagactgtgtaagtgtaaaggatgactctattcttagcgtcacagtggacgggaaaactgccaa

SEQ ID NO: 2127 - DNA, 74 bp, Homo sapiens
tggaagtcccacagaagctacagctgccaggaaactactttccagagaaaaacagccccccatagacaacataa

SEQ ID NO: 2128 - DNA, 97 bp, Homo sapiens
gatgcctgtaccgtgatgtgacgctggagaacctggcacttatgtcctccctggtttgctgctttgtggtgcacaagcggtgccatgaatttgtcac

SEQ ID NO: 2129 - DNA, 82 bp, Homo sapiens
tggcctgggcgctccggtggcggcggaggtgatggctggaccggcggaggaggcgggagcccattgtcccgagagcctgtgg

SEQ ID NO: 2130 - DNA, 80 bp, Homo sapiens
tgtcttcggtggactccttcggcagtccacccaccgccgccgcctcccaggaaggacatcaagaagggggagaagaacac

SEQ ID NO: 2131 - DNA, 74 bp, Homo sapiens
gaaggagctggagacggtcgtagctgcggtcgcgccgagaaaggtgtgatcccctgggcccgtttgttgtcggg

SEQ ID NO: 2132 - DNA, 51 bp, Homo sapiens
ccttacctttattggagacaaaaccgctgaacatatgcagaagaaaaggag

SEQ ID NO: 2133 - DNA, 97 bp, Homo sapiens
cggattgcccatgcacttgttgcagaaacagccaaggctctggcacgttttgggggaggtgcctgcaggacccaacatactcaatgagcttccagcg

SEQ ID NO: 2134 - DNA, 90 bp, Homo sapiens
gttaaaacctgacacttttaacaggcaatactgaacactgcgcagcttgcagaggtctcctggcagccctcattaggaattctgtctggc

SEQ ID NO: 2135 - DNA, 75 bp, Homo sapiens
cctcagctgtataatcaaacctccaatccacctggctctccgctatccagatagtgacacctcctgtagacaagg

SEQ ID NO: 2136 - DNA, 100 bp, Homo sapiens
aattatgcactatatgtaccagttatgtaagtccctggatcatattcacagagccatgtccattggagcccgttcccaatcagctcgtacttacttggag

SEQ ID NO: 2137 - DNA, 83 bp, Homo sapiens
aaggcgtgcgattcttccagcagatatgaagcagaaagatgaaggtcttagaatcattgattggaatgatccagaaattccct

SEQ ID NO: 2138 - DNA, 75 bp, Homo sapiens
aaaagattgaaggaaggtgatacaatgatggggcagcaagtggccaattgatcgaatctacagatgcagaaccca

SEQ ID NO: 2139 - DNA, 100 bp, Homo sapiens
ctgtcacacacgatcctcaccgagaagaactgacggggtctggctctgtcacccaggctggagtgcagtggcacgattatggctcattgcagcctcgact

SEQ ID NO: 2140 - DNA, 80 bp, Homo sapiens
tcgctagaactcagttgtgcgttgcggccagtcgccactgctgtgtcgtgaaaactacccctaaaagccaaaatgggaaa

SEQ ID NO: 2141 - DNA, 75 bp, Homo sapiens
caataagttgcggctgctcttcccttcttcccacttgcccaggatcaacttgcagcagacatgtacaactttatg

SEQ ID NO: 2142 - DNA, 90 bp, Homo sapiens
gccaggatgacagccatggacaatgccagcaagaatgcttgtctacagtgaatatagagccagtcttgcttttgaccttgttagcagccg

SEQ ID NO: 2143 - DNA, 90 bp, Homo sapiens
tcttaatgctgacaacaggacttgtagtggcccaagattcctaccaaactcctcagaatcctggaattgtaccccgtcctagtgaacttt

SEQ ID NO: 2144 - DNA, 98 bp, Homo sapiens
ggctacggactatgggcgaatagctctgaccacccggcgaagtggaaattaatctcactaatgactaccgtgtcagcggaggagtttcagaaatggtg

SEQ ID NO: 2145 - DNA, 90 bp, Homo sapiens
tagctcccgagcgctggccttctggacatatcagttctggatgcgggtacccttggtggcaccagaggacctgagagatgatataattga

SEQ ID NO: 2146 - DNA, 75 bp, Homo sapiens
ttgtggtccaaaacagtttacctcttatctaacagatggatcctgagcttgaaaaaaaactgaaagagaataaaa

SEQ ID NO: 2147 - DNA, 134 bp, Homo sapiens
cagtggcgtcctggagccctcctcaggtgagctggagctgcccggctcggcagcgggaaggatgtggtggatacccaccctggtctcacgttcctgaaagatgctccagaattccactcccgctacatcaccac

SEQ ID NO: 2148 - DNA, 88 bp, Homo sapiens
aactggagagcttcatcaaaaatagtgatagctttgataatttcccagcgaggtggtcattcagagcctacacatctgttctgtattt

SEQ ID NO: 2149 - DNA, 100 bp, Homo sapiens
ctagtagaaaaagttcttgggacaaacttcatttgaccagagtgaactccgagcaggaacacttcctcattgtcccttttgggcttctttacagtgaagt

SEQ ID NO: 2150 - DNA, 83 bp, Homo sapiens
aatcactcggagggcggcggagtgatcgtcaataacaccgagagcttcagctttagctgcagctgcctctgttcagccacttg

SEQ ID NO: 2151 - DNA, 98 bp, Homo sapiens
gaagcactaatggaggagggtgacgaatttgagaaagcatctaaactaacaggacctgggttattatcgtccccagtgctggtgttggtattgtcctc

SEQ ID NO: 2152 - DNA, 90 bp, Homo sapiens
tgtggaaagaagttgcaaaacactggccttaatacagatattggcagctgctgcagctgagcgagatgtggtttatttcacctttgggga

SEQ ID NO: 2153 - DNA, 100 bp, Homo sapiens
agagcgtgtggaccccaaacaagtctgcgcaaaatttgtcgaggaggtttgccgcggcagccatgaggagtggaaccagatgcagagccaggaggatgag

SEQ ID NO: 2154 - DNA, 100 bp, Homo sapiens
tcagcctcccgagtggctgggattacagattgaatttagtggaagcttttgtagaagatgcagaattgaggcagactttacaagaagatttacttcgtcg

SEQ ID NO: 2155 - DNA, 96 bp, Homo sapiens
ggcggcggacggctgcgtcgcccgaggcgaggaggagcgctggcggttacccctgtttcaggccagtgcttttgcatttttggcccctgctcgagc

SEQ ID NO: 2156 - DNA, 103 bp, Homo sapiens
aaggagaagagccgtgggtaggagatggagaaattccaagttcagattctccaggggtcagtgacattcagagatgtggccatagacttctcccaggaggagt

SEQ ID NO: 2157 - DNA, 100 bp, Homo sapiens
ttggaccaagagaacaatgggaaccagtctttcaaaatggtacaagttgaattctatatgaatgaaaatacatttaaagaaagactaaaattatttttca

SEQ ID NO: 2158 - DNA, 75 bp, Homo sapiens
gacaataccacgctgctgattgagctggaatattgtaatggcattgaacctggccacatcccaggtaccgtgaac

SEQ ID NO: 2159 - DNA, 100 bp, Homo sapiens
gccaggctcgggctccggaggacaggaccgcgcgactggccggccgatccctgggccggccgcgggagcaggtgtgggccatgtttgaggattgccccag

SEQ ID NO: 2160 - DNA, 74 bp, Homo sapiens
tagacgcacatcaggaagacagggcaccagaactagcacctctgaaaagtaaaatgatctatgcaagctccaag

SEQ ID NO: 2161 - DNA, 100 bp, Homo sapiens
gtccggcttggatatcttcggggacctgaagaagatgaacaagcgccaggtgcacattcaggttcccgagcacaaacatcaagataacgttcactgccct

SEQ ID NO: 2162 - DNA, 100 bp, Homo sapiens
gagctacagaggctgatggctgagatccaagacctgaagagcaggggtggcaaggatgtgctccgctagcaatcgcatcatcggtgccaaggaccacgca

SEQ ID NO: 2163 - DNA, 74 bp, Homo sapiens
acagctcgacagtacgcctacttctataaagtcatccagcctccatttgatggtgaagatgaagacgagctatt

SEQ ID NO: 2164 - DNA, 51 bp, Homo sapiens
gcagccctggtgtcacctatcagtaaaagtgttccttgcctgtatctcccc

SEQ ID NO: 2165 - DNA, 71 bp, Homo sapiens
agctttcacagtttgcgggactcagtcccatcactccaaggagagaagctggtaggtgagtgctgtcctcg

SEQ ID NO: 2166 - DNA, 75 bp, Homo sapiens
agagggagaatagaagcccaagactaagattctcaaaatgtatgccatcctgatgacgatggtgctcaccatctt

SEQ ID NO: 2167 - DNA, 75 bp, Homo sapiens
ttcgaccttcaatccagttccaaggactccacgggacgttgagaaagaagggccttaatggctgtgacagcccag

SEQ ID NO: 2168 - DNA, 90 bp, Homo sapiens
gcagctgctccgaggggtctggaagccagagaccaacgagatcctgcacatgtctttgtgttggagcgggccggagagaagtagagtggg

SEQ ID NO: 2169 - DNA, 101 bp, Homo sapiens
ccgcagctggccaacggggccctcaaagtctccgtctggagtaaggtgctgcggagcgacgcggcctgggaggataaggtgagcgagtgctgtgctttcat

SEQ ID NO: 2170 - DNA, 82 bp, Homo sapiens
aagccgcctcttggtttgcgtcctgcactgaaaggaaatgacggattttgcatgcttcggaaactggacatcaaaaacgaag

SEQ ID NO: 2171 - DNA, 99 bp, Homo sapiens
agcagcctcggcggcggcggccgaaccaaccgagtcggatcctgaccctaaaacctactgggatctagcaattgggaggcagcagacttgggtaatgaa

SEQ ID NO: 2172 - DNA, 100 bp, Homo sapiens
tggagagccctgagaatgcctttgggctgcctgaggatgagttcctggtggtgctgcgctgtgtgggacaatctctatgggaagcagaaggcaaggaccc

SEQ ID NO: 2173 - DNA, 100 bp, Homo sapiens
ccaggccgccgggggcctgctgcgcccggacctggccataagggacacctttgtgaatgcctctcggaccctgtacagcagcagccccagagtcctaagc

SEQ ID NO: 2174 - DNA, 103 bp, Homo sapiens
tttctagaagcctgtcgaaaaatgggggtgcctgaggctgcctgctgtttcccggggagatcatgaaacgaggtcgccttcccagcagcagtgaggattctga

SEQ ID NO: 2175 - DNA, 100 bp, Homo sapiens
agcgaggagtggccaacttccagctggcaagtatgtagaaaagctggaattgataggaatggatttcatttggaaaatagccatggaatcacctgatgaa

SEQ ID NO: 2176 - DNA, 98 bp, Homo sapiens
ggagagcacgccatgaaggcctcgggcacgggtgaggtggctttgaccccgggttgcccggccagcacgaccgaggaggtggctggacagctggagga

SEQ ID NO: 2177 - DNA, 100 bp, Homo sapiens
gatatagctctttggtccacttacggtgcaatgattccaacacagctgaaaccactgattgcttgtgtggagaaacagctattaggagaacatttaacag

SEQ ID NO: 2178 - DNA, 75 bp, Homo sapiens
tcagctcaccagcgccatcgtcagttatgccatacaacagtgcccaccactgcgttgtggaggtggaaaacttct

SEQ ID NO: 2179 - DNA, 99 bp, Homo sapiens
ctgaacttccctggtcgaacagttttttctaatggctattcaaggaaaacggacgatgtattactaagctggaaaacatggggtttcgagtgggacaag

SEQ ID NO: 2180 - DNA, 75 bp, Homo sapiens
ccacagccaagtgcgggagtccacggatcgaatcatcaatttagttgttggcagcttaacatccttattgattct

SEQ ID NO: 2181 - DNA, 90 bp, Homo sapiens
aaacaacactgacagccagtgcaggtcgggtcacaaatcttcgaagagtgacatatgttgttttagatgaagcagacagaatgtttgaca

SEQ ID NO: 2182 - DNA, 75 bp, Homo sapiens
agtaggcatatcttggcttacagttcagttatgcagccttttccaggtactccaaagattcaggtttactcacgt

SEQ ID NO: 2183 - DNA, 98 bp, Homo sapiens
ttttgaacacattaacaccgaagttctacgtggccctaacaggcacttcctcactaatatcagggcttattttgatgatgaggagtctgatgaggaag

SEQ ID NO: 2184 - DNA, 75 bp, Homo sapiens
ctcggccgacgccgccgccgccgccgccggcttcccgtcctacatgccagttctggtgactcagtccgcagctat

SEQ ID NO: 2185 - DNA, 75 bp, Homo sapiens
cttcagaggaacttccagctgatgcgagagctggaccagaggacggaagattgctgctaaaattgattcaattcc

SEQ ID NO: 2186 - DNA, 98 bp, Homo sapiens
ttacaagattcggaggtaacagtgaagggattcaggatatacggtgcaccttgacttccttgtgaaacctcctagtagaaaaagttcttgggacaaac

SEQ ID NO: 2187 - DNA, 101 bp, Homo sapiens
tttcagagcatcgatgaagctatagcctggctcaggaaggaactgaatttctctgcaaagaatgtccaaaaattcatattcacattgatcgtatcgacaaa

SEQ ID NO: 2188 - DNA, 83 bp, Homo sapiens
ccttcatcatcacctatcccctggagggcatcctggctgtttcacccgtggacttgaacttgccattggactgagctctttct

SEQ ID NO: 2189 - DNA, 100 bp, Homo sapiens
cagcactagactatggtcgggatgacttggcattgaaaattacttggggcacacagcaaaaaatgctgtgatcacagtcccagcttatttcaatgactcg

SEQ ID NO: 2190 - DNA, 50 bp, Homo sapiens
gataagacagtcccacagtccaggttaaaaagatcaagtggcatgagcag

SEQ ID NO: 2191 - DNA, 74 bp, Homo sapiens
cttggaattacatagctggaaaggatcttacaggagattacctggggcaattgatgttatcggtcagactataa

SEQ ID NO: 2192 - DNA, 74 bp, Homo sapiens
gtgagcgtgaggtgtgggtgttcgtttctcaggggaacttcaacatggagttacttttgatccctcagttttaa

SEQ ID NO: 2193 - DNA, 88 bp, Homo sapiens
tcctggcccccttcagcaaccctggtgatgggcagaggcttcagtgtccccttcgcctccgcaggagaggagaggcagcagcatggcg

SEQ ID NO: 2194 - DNA, 90 bp, Homo sapiens
gccaaagaaaaagtggatcttgtattgatgcactggagggataggatgggcattgctcaaaaagaggtgctgccatgcttactgagtccc

SEQ ID NO: 2195 - DNA, 100 bp, Homo sapiens
caggagtcatgagcgacagcggcgagcagaactacggcgagcggaagttccacctggtgccaagcatcaacaccatgagtggcagtcaggagctgcagtg

SEQ ID NO: 2196 - DNA, 75 bp, Homo sapiens
ctgcatgttgcaagccttgctgatgataagaattacatgaatgacagtcttcgaaccaatgtgtttgttcgattt

SEQ ID NO: 2197 - DNA, 98 bp, Homo sapiens
ctggctattggaaggaggagattctgaagataaggagaaaagtacatctgctatgctgagcagacccgcgcagtgttggccaaactggctgatcatgg

SEQ ID NO: 2198 - DNA, 97 bp, Homo sapiens
gctaataatgctggcaaagtggaaaaatgtgcgacaaccaggattggagttgctgttaatggggtccgcaagcactgctcagacaaggaggtggtgt

SEQ ID NO: 2199 - DNA, 100 bp, Homo sapiens
cttgcaggaactgcagaagaagctgtctctgctgatagactccttccagaataactcaaaggagttaacagagcagtttcataaagttgaatctcaactg

SEQ ID NO: 2200 - DNA, 100 bp, Homo sapiens
aaaaagctgcacgcaagtgttaaacttctgattccctcgttatgccacgaccagataagaatcaccagtgggtattcaataagaactgtttccctcttgt

SEQ ID NO: 2201 - DNA, 82 bp, Homo sapiens
agtacctgccagagaacgacctgaagacctgcctagagctggaacgttacctccagagcgagccctgctatgtttcagcctc

SEQ ID NO: 2202 - DNA, 88 bp, Homo sapiens
gcatggagccccgggcggcggacggctgcttcctgggcgacgtggggacaagaatccttcaagaaacaggaaaaaactcctaaaacac

SEQ ID NO: 2203 - DNA, 75 bp, Homo sapiens
ggggaaagcttacagactgtgtggttttcctttggaatatggataaatacaccatgatacggaaactagaaggac

SEQ ID NO: 2204 - DNA, 80 bp, Homo sapiens
gaagcagccgatccagcctgcggagcctgtggggcagccatgctgtgacctacaagcaaactaaatagccaacatttctg

SEQ ID NO: 2205 - DNA, 126 bp, Homo sapiens
ttatgacctccttcgccacttacagtatgcaacacattttcctatacctctggtctggctctgggagaggagtggacagcagctggttgagatacatccccatctggagacaggactgccactgac

SEQ ID NO: 2206 - DNA, 82 bp, Homo sapiens
atgaaaatagcttggcgttaccagttattacccaagatggaggaaaattgcctaagaattatgacccaaaagttaccccaga

SEQ ID NO: 2207 - DNA, 101 bp, Homo sapiens
atggctttgattctgctgatcctgtgcgtggggatggttgtcgggctggtggctctggggatttggtcacattagcagtagaaggcacaaagacagagctg

SEQ ID NO: 2208 - DNA, 88 bp, Homo sapiens
aagcggaggacctacgccggcctggatgtgatggaagacctctataactacataaatccacataatggcaaacactctcccatggtgg

SEQ ID NO: 2209 - DNA, 51 bp, Homo sapiens
aagatcatcgagcatttcaaacgacaccattcgcttttcacccaagatgat

SEQ ID NO: 2210 - DNA, 100 bp, Homo sapiens
tgaagagatgagtttgtttacagctgttgtcctggtatctgcaggatgaaacgaggaggaagagatagtgaccgtaattcatcagaagaaggaactgcag

SEQ ID NO: 2211 - DNA, 100 bp, Homo sapiens
ataaagtctgtaaaggaatctttgcaagaatcagtggaagattctctagcaacagatggaaatattggcatagttccagaggagttaaaggactcaccca

SEQ ID NO: 2212 - DNA, 98 bp, Homo sapiens
cctcatcccaggttgccttggaaaatgccaacgccgtgtctgaagcaaagcggaccgagagcacgcaccccagcagaaatcgggagagaatgccaaca

SEQ ID NO: 2213 - DNA, 100 bp, Homo sapiens
aagtattaattcttccactgatatctcaaaaggtgatctggacaaaggaacaggtatctcagagaaagcaaccagcgagatgaatactgctgaggactgg

SEQ ID NO: 2214 - DNA, 75 bp, Homo sapiens
caaaaacagaccagaagattaccaaggtgctggagaatctggtaaaagcaccattgtgaagcagatgaggatcct

SEQ ID NO: 2215 - DNA, 76 bp, Homo sapiens
tatcaaagtttgcaaggttcatttatgttcatggatgaatcctccatgttcttccagtttggcccatcaattgaac

SEQ ID NO: 2216 - DNA, 100 bp, Homo sapiens
gcggccagagggccgggcaccaaaggagtgacactgctgatcctgtaacatggaggattgtcttcatacctcatctgagaatctgtccaaattggtcagc

SEQ ID NO: 2217 - DNA, 100 bp, Homo sapiens
cagccaggaagggaggcagaagcatgctaagaacaacagtcaggccaagccttctgcctgtgatgggcttcctgaggctgcggtggtcacgcttcgcccg

SEQ ID NO: 2218 - DNA, 50 bp, Homo sapiens
agagcattcagctgtctcaaatgcagctgttccatttcctccaagtcacc

SEQ ID NO: 2219 - DNA, 90 bp, Homo sapiens
tgcccaccctccaactttgcgacggaaatgtgtcatcgaaagccagcgccgacaccatgtggatccaggttcggaccatggacgggaggc

SEQ ID NO: 2220 - DNA, 80 bp, Homo sapiens
ctgcagaagtagttcttgcattggatgcaatccattccatgggttttattcacaggttcaaaccttgtactactcagctg

SEQ ID NO: 2221 - DNA, 82 bp, Homo sapiens
agagcccggggacggcgaggccctcatgtaccacacgatatggctcgtggacagcagaaaattcagtctcagcagaaaaatg

SEQ ID NO: 2222 - DNA, 75 bp, Homo sapiens
gaactactatattcagtggctaaatggctccctgattcatgatggcttcccagttacgactcttcgatccccagc

SEQ ID NO: 2223 - DNA, 51 bp, Homo sapiens
ccaggacacgaggatgagtttcaggtacatggtgcagtggccgggagcacg

SEQ ID NO: 2224 - DNA, 75 bp, Homo sapiens
gccgctctccatcaaacaattcctggacttcgcgttgagaagattctgctccattttttctgattatggattctg

SEQ ID NO: 2225 - DNA, 101 bp, Homo sapiens
aagatggcctaccctcctgtacttgttccaactcaaaacactgatatttgcatttaatggggaacaaaagatgaagaaggaaaaggaatatattcactaag

SEQ ID NO: 2226 - DNA, 98 bp, Homo sapiens
tcttcggcaccgccttgggctcccgcggccactcggggtcctcactgagcagcgagtcgtcccccgtgtcctctccggccaccaaccacagctccccc

SEQ ID NO: 2227 - DNA, 100 bp, Homo sapiens
cggagtgagaagcaagaaggccctggacacagcaatatctctgggctttcacaggttattgaagagagggaaaaactaaagaatgaccgggaagcccgcc

SEQ ID NO: 2228 - DNA, 75 bp, Homo sapiens
gggctattggactctacactcttcatgttaccattgatggcattgaaatcggtgaatcagtggctaacctggtta

SEQ ID NO: 2229 - DNA, 50 bp, Homo sapiens
cctcaagatggagactttgactttccaaatgggcggactgttgaagtggc

SEQ ID NO: 2230 - DNA, 90 bp, Homo sapiens
ttggccacctacagaaacaaaatgtcaacaaattgatggctgtggaggaagatgcagagtcagaagatgaagaggaggaggatgtgaaac

SEQ ID NO: 2231 - DNA, 124 bp, Homo sapiens
cgaagagggggtcgaggagagccggagtcggggacccaggagtttcctgtgtccagcgctgccggagccgcctgaggtattgttgcagcatctggcagtgagactgaggatgaggacagcatgg

SEQ ID NO: 2232 - DNA, 50 bp, Homo sapiens
cagacccatttccagtcatgacatttgacattgtgcagcaaagaaatggt

SEQ ID NO: 2233 - DNA, 100 bp, Homo sapiens
gcaaccagccttctagggcggcggaggtagaattgggctatttgctgaagcttcttggtggcccttgctagcccaggaagaaacttacattttgattttt

SEQ ID NO: 2234 - DNA, 82 bp, Homo sapiens
cgcggggcagttcgggccggctgtcctggcgcgacctctcgggaactgaagattgcaggagccattggtccatgcgtatctc

SEQ ID NO: 2235 - DNA, 100 bp, Homo sapiens
ctctataaagttatccaggagccacaaagtgagctttcggaaaatgtgattgatcgaatgaaggaatcctctccatctggttcgaagtctcagcggtatt

SEQ ID NO: 2236 - DNA, 100 bp, Homo sapiens
cctttaagtgaaggaaaggctttgaagcaaaagtttgatgagattttttcagcaacaagcaggttggcaacattgtacaagtcacccagccagaaggaat

SEQ ID NO: 2237 - DNA, 101 bp, Homo sapiens
caaagtccatgctaacctactatgagggtcgagcagagcaaattcaacacccaacagcttccttaatagcaaaggtagcaacagcccaggatgatataact

SEQ ID NO: 2238 - DNA, 74 bp, Homo sapiens
agcccaaccgtgttgtatgtgagtggaggaaatacgcagtgggctcgggatgagtttgaaggcctcttcaagca

SEQ ID NO: 2239 - DNA, 98 bp, Homo sapiens
atgtacaatttggatcctcaggatggaggagagtgtgtcttaatcaaaacccacagattccaacatgccatgggaggagtacctgcctgggcagagac

SEQ ID NO: 2240 - DNA, 50 bp, Homo sapiens
aatcctcacagtgagcctttacagattctgaaggaagatttccattaggt

SEQ ID NO: 2241 - DNA, 90 bp, Homo sapiens
cgggccgtcatgctcatccaggcagggatctggacaactctcctctgtccccaccttcaccaaggaccaaaagcagaacgcatactcggg

SEQ ID NO: 2242 - DNA, 76 bp, Homo sapiens
cctgcggcgtgtggctggacgcggcggcgctgaagaggcggaaagtgcagagaaagatgctggtttcgagttttgg

SEQ ID NO: 2243 - DNA, 75 bp, Homo sapiens
ggactggtctgtctgagggagatggtgacaagctcaaggcctgcgagtctcactccgtcacccaggctggagtgc

SEQ ID NO: 2244 - DNA, 82 bp, Homo sapiens
tggaggattgtcactccaacctcttttcgctggattgtctcaaagcttgccaggagcagattgaggcggtgctcctcaatag

SEQ ID NO: 2245 - DNA, 96 bp, Homo sapiens
agccgcctccgtcgccgccgtcagagccgccctatcagatgaggaaactgaggccttggactagaacagaggtctcctgactcagtccaggactct

SEQ ID NO: 2246 - DNA, 75 bp, Homo sapiens
gccacctttgtgctcaacgggaccttggccagttacccgtcagatcactggtgtctttcctgaagactatcttcc

SEQ ID NO: 2247 - DNA, 100 bp, Homo sapiens
gtctgaaaaagctcaaaatgaggaaattctgtatgttcttcgccattatattcaggctggaggctcccaggtgattttcacaaatcctttagaaatcgtc

SEQ ID NO: 2248 - DNA, 75 bp, Homo sapiens
tgtcatgctgccttgtggggtgactgaggaaccccagcgactcttttatgggcctacaaagggagacatggaaat

SEQ ID NO: 2249 - DNA, 83 bp, Homo sapiens
ctcaagccgaagccttcagtgggactcccccagcagatacattctcagtcgcagcagttgtggtagaaatttctgggttagtg

SEQ ID NO: 2250 - DNA, 100 bp, Homo sapiens
attttctgccgctggacgcaaggggaaggtgtggctcattgactttaatccatttggtgaagtcacagattcactgctgttcacctgggaagaactgata

SEQ ID NO: 2251 - DNA, 83 bp, Homo sapiens
gggctctgaggatgagctggaggagggggagagcgacttgcagttgtggaggtacagtgtgaacggctgaggatgctctaccg

SEQ ID NO: 2252 - DNA, 75 bp, Homo sapiens
acaaggacatctttccaccgaatgccacctggtttataacaaaaggtatgtcacttaaagagcgctggagaaggc

SEQ ID NO: 2253 - DNA, 148 bp, Homo sapiens
cttcgccccggcggctcgccgcgcccacccgctccgcgccgagggctggaggatgcgttccctggggtccggtttccgttactatggcaatgacggcagggactacaacaacctttcctatgagcaaccatacccgggaaagagtgac

SEQ ID NO: 2254 - DNA, 82 bp, Homo sapiens
gttgttcagaatcctccaaaaccagtcatgaccactagacccacagctgttaaagcaacagaaagaagcttccggttctgag

SEQ ID NO: 2255 - DNA, 50 bp, Homo sapiens
agtgtatggcatgatgcccaggatatgtgcagcgggggctacagcgagtg

SEQ ID NO: 2256 - DNA, 82 bp, Homo sapiens
tgcgtgaggtcaacctgcgcccccagatgtcccagcgctgataaagcagtttgtgtccgacgtggcctggggggagctggac

SEQ ID NO: 2257 - DNA, 89 bp, Homo sapiens
ggacgtcctcctagtgctagcagcttagatgccatttctcctgttcagcagacatggccgcttaccaacaagaagggcagatgcagctt

SEQ ID NO: 2258 - DNA, 98 bp, Homo sapiens
gcattgactctgagtataatccctggagaaagctcacccagttagaagagatgaatccacagcaatttgaatcaacccatagaagtgacagcgctgta

SEQ ID NO: 2259 - DNA, 100 bp, Homo sapiens
aacttgtgattgagcagtttgaagacttgctagttaggattttattactggcagcatgtatatcttttcctgtgcctactacactggcacaagtggatag

SEQ ID NO: 2260 - DNA, 100 bp, Homo sapiens
tcatggggcaggatggcaccagccttgaatagctctccagacccccagctggccatgtggtgagttcagggcccaaatcaagtagtaccagcaatcaggg

SEQ ID NO: 2261 - DNA, 90 bp, Homo sapiens
gaggcagaggtggaggcgctttgaaagacctcctgccccccgaggtctgcagtctcctgaacccagcagccatctacgccaacaacgaga

SEQ ID NO: 2262 - DNA, 73 bp, Homo sapiens
atacctggcattgacctctcagatcccaaacaactggcagaatttgctagattacgtgtgaaaatgaacttgt

SEQ ID NO: 2263 - DNA, 82 bp, Homo sapiens
cgacaagccgctggcagccgcggatctcaccgccgctcagggctccactttgaggctctgatgaacattccagtgctggtgt

SEQ ID NO: 2264 - DNA, 90 bp, Homo sapiens
gaagaggggcttattaactcgtctgctgcaggtcatgaagaaggagccagcagagtcgtctttcagattatgtttgagaccttcaacacc

SEQ ID NO: 2265 - DNA, 97 bp, Homo sapiens
ttgccgatttcatgactaaccagtcatacttccacaggctgcactcgaggagatccacaaattctcaggaacctacacctgcatgaacactttcaaa

SEQ ID NO: 2266 - DNA, 143 bp, Homo sapiens
caggcatctctgggtgggcaacttacccgagaacgtgcgggaagagaagatcatcgagcatttcaaacggttctgcggggagtgtctccagccctgcctgcaggtgccatccccgctgtgcccactctgccgcctgcccttcg

SEQ ID NO: 2267 - DNA, 100 bp, Homo sapiens
atccagacggcagggagtgcatcaaaggtgtgaacacaggtagagtctcactttgtcacccaggctggagtgcagtggtgtgatcctggctcactgcaac

SEQ ID NO: 2268 - DNA, 88 bp, Homo sapiens
ccactcctccaagaaccaacccccaaattggctgggacagtgaacagcagagaatttcaaaggaccttgctaatatctgtaagacggc

SEQ ID NO: 2269 - DNA, 75 bp, Homo sapiens
gaaaaaaacaggcgtattctggtaatttcgaggaggctactgcagcactggggtgtcagttgttggtccgaccca

SEQ ID NO: 2270 - DNA, 75 bp, Homo sapiens
atgaaataaaggaatttcttcactttttaacggaccagttcaggaggctactcacagtcgaactacaactccccg

SEQ ID NO: 2271 - DNA, 82 bp, Homo sapiens
tccccagctctgcagccacatactatccgtttgttcaggaaccaccagtgacagaagcttccatatggctgggaaaaaatcg

SEQ ID NO: 2272 - DNA, 50 bp, Homo sapiens
ctcctgagtagccgggactacaggaaagcgtctctagcagctgatatccc

SEQ ID NO: 2273 - DNA, 101 bp, Homo sapiens
gagggcgtcatcagcgtctccgaggacaggttatacattggctcttcaaagacgttcacctcatcagagaaatccctgactcctttgcagtggtgtagaca

SEQ ID NO: 2274 - DNA, 75 bp, Homo sapiens
cccaaagtcgaatgattcagacttgcaagttagttgaatccatggacatgaaacccacagatatagagggttggc

SEQ ID NO: 2275 - DNA, 100 bp, Homo sapiens
gccggcctagcgtcctggaattacttcaatcaagtgtctgatgatttgtgagcctcaagtgactactctgtggaatcatctgtccttgcctttgaattag

SEQ ID NO: 2276 - DNA, 75 bp, Homo sapiens
tcaggagaccgtcgttgccttgtatttccagagaacagaagcatgttgtggagacattttttggatttgatgagg

SEQ ID NO: 2277 - DNA, 82 bp, Homo sapiens
cggaagccgctggacagccgggtcctgaacgctgtgaaattgtgctcatgggagcttagaagatcccaaaagtataacccat

SEQ ID NO: 2278 - DNA, 100 bp, Homo sapiens
actaaacatagttttggaactagcagatgctggcgacctatccagaatgatcaaggctgctggaaagtacagacaacaaggcagaaattatattgttgaa

SEQ ID NO: 2279 - DNA, 100 bp, Homo sapiens
ggttattcgagtgaccgagaccgcggccgggaccgaggattgaaaaggaagatcaggccaaccccaaagaagaagtgaccaaggaggagtttaaactgaa

SEQ ID NO: 2280 - DNA, 97 bp, Homo sapiens
atcacttcagtgcctcagagtgcagttcccaaggaggcttcaagacaaagggccccttacacaccagacaggacccgtccctgctcctgaccatcac

SEQ ID NO: 2281 - DNA, 76 bp, Homo sapiens
cacctggtgatgaccctcgtagtggctgcggcgcgggccgagaaggaagggccgcgatgggcctcttggaacattg

SEQ ID NO: 2282 - DNA, 75 bp, Homo sapiens
ccaggagcagaagtccttcttcgccaaatacctgcctgtggaggaaccgattgtgtccacagatgaggtcatctt

SEQ ID NO: 2283 - DNA, 89 bp, Homo sapiens
ccaccatggctgtggcccagcagctgcgggccgagaggttgcctgtggctggagaaaggaatgtgctcatcaccagtgccctcccttac

SEQ ID NO: 2284 - DNA, 96 bp, Homo sapiens
tgttaaagagaggatagaaattgaacagaactatgcgaaacaattgagagactctacaggggcaggtaattcactggtccacaagcggtctccttt

SEQ ID NO: 2285 - DNA, 100 bp, Homo sapiens
gaaccgaggaacgaagaaacagacattcaacatgattgcatttgaagagccaaatttagaaagtatgtgggccattctgcacatgtcacaaatgtccgct

SEQ ID NO: 2286 - DNA, 75 bp, Homo sapiens
tatcaatttaggaaatgtcttgaaagaggcacgcatttttgacagatccaacagttctctaagaaggagattgaa

SEQ ID NO: 2287 - DNA, 100 bp, Homo sapiens
gtcgctgttggatcgggttctaaaggaaagcacttttctgtagaaggtcagttggaattcagggcattgctatttattcctcgtcgggctccctttgacc

SEQ ID NO: 2288 - DNA, 100 bp, Homo sapiens
tcttgctggtggatgccctccttactccccaatatatacgtcttggatagactgttggtgcatgctacaaaaagagatgcctcatgaatcaacggtggag

SEQ ID NO: 2289 - DNA, 98 bp, Homo sapiens
gtcggactcccgcggcgggaggagcctgttcccctgagggagagctggtgacggcctccaaggccatcattgaaaaggagtaccagccccacgtcatt

SEQ ID NO: 2290 - DNA, 90 bp, Homo sapiens
gcaggataaaaggcaaactcttcacctgagatggagtcttgctgtactaaccaggctggtcttgaactcctggcctcaagggatcctctc

SEQ ID NO: 2291 - DNA, 82 bp, Homo sapiens
tgatgacaaaccctttctatgtactgcgcctggatgtggccaggagggtgcatctgcccggaagactcagactcctgcagcc

SEQ ID NO: 2292 - DNA, 90 bp, Homo sapiens
agcggatcgggtggagtgtaggtcatatcgccgcgggaaagcaggcaggatgggagagtcgccgatagaaccacctcttccctgcctcct

SEQ ID NO: 2293 - DNA, 99 bp, Homo sapiens
ggcaccgggatcgtgaccgagaccgtgaccgagagcgtgaccgagagcgcgaatatcgtcatcgttagaagcatgcagcagattggaataaatatgatg

SEQ ID NO: 2294 - DNA, 51 bp, Homo sapiens
ctccaccaaccccccagtcgtctgctgaggagccaaaggagaagtcctctc

SEQ ID NO: 2295 - DNA, 75 bp, Homo sapiens
gtgggagcactggaagtacgggcagttgcagtgttggagctaaaagaaactccagaaaatcttgccaaacttctg

SEQ ID NO: 2296 - DNA, 100 bp, Homo sapiens
ctgggtccccgtggcatggacaagcttattgtagatggcagaggtcctttggagtgctgctatgggaaatcttttctcttggatatatgccataccccag

SEQ ID NO: 2297 - DNA, 83 bp, Homo sapiens
gaagatatcaagtcatattatacagtgcgacagctagaattggaaaaccttacaaattaaacaaccaccatgtcgagcaaaaa

SEQ ID NO: 2298 - DNA, 50 bp, Homo sapiens
cccaggtcaagagcctctgcgagaaggctcagctcttgccaggccaaatt

SEQ ID NO: 2299 - DNA, 73 bp, Homo sapiens
ggactccatcgactcccccggctcttagactagatcccaaaatggctgggcgaaaacttgctctaaaaaccat

SEQ ID NO: 2300 - DNA, 100 bp, Homo sapiens
accaaagaacaaattccagccggcaaataaattcaacaagaagagaaaattccagccagatggtagaagcgatggatttcagaaagcaggtcaactatga

SEQ ID NO: 2301 - DNA, 83 bp, Homo sapiens
ccatgagggaaatcgtgcacatccaggctggtcagtgtggcaaccagatcggtgccaaggtgacactgatgataaaaatccat

SEQ ID NO: 2302 - DNA, 75 bp, Homo sapiens
cagtggcacagtggagcagctctgaagatgcaaagaaagccagcagcagtactgaaacctagtgactgggaaaaa

SEQ ID NO: 2303 - DNA, 127 bp, Homo sapiens
agcagagcaaagttaccggacagcaattaaacacagaaggaaatacccagactgttactacaacctcgggcgtctgacttaattcagtgcacaaatgagatgaatgtgaacatcccacagttggcag

SEQ ID NO: 2304 - DNA, 80 bp, Homo sapiens
gacagcagtgaagaagaggaggaggaaattgatgatgaggttctggaaggaaaacctatttatgttgattgttatggaaa

SEQ ID NO: 2305 - DNA, 100 bp, Homo sapiens
ttctctgtgttaaaccaatcagttgcgaccttctcttaacaggtagttacttttggtgacgctgtccagttcccacaatgtatcattccttatctgaaac

SEQ ID NO: 2306 - DNA, 74 bp, Homo sapiens
gaaaacaactttgtggatttgacagaagcaactccgaagtcaagcccgcactctgattacctttgctggaatga

SEQ ID NO: 2307 - DNA, 75 bp, Homo sapiens
ggaaaactagagctgaaacaatgggacccatgggttggtgatcaactgggagaacacgctccacattccagccca

SEQ ID NO: 2308 - DNA, 96 bp, Homo sapiens
cttgacgaggctgcggtgtctgctgctattctccgagcttcgcaatgcccaaagtggtcacagatacagatgagactgaacttgcgaggcagatgg

SEQ ID NO: 2309 - DNA, 75 bp, Homo sapiens
accgggaccgccgccgccgccgccaccatgtggccacagatgtctttaattccaaaaacctggccgttcaggcac

SEQ ID NO: 2310 - DNA, 99 bp, Homo sapiens
ggtctctactcctgggctcaagcagtcctcctgcctcagtctcccaaagtgctggaattacaggggttcagcagactgtacaggatctttttggcagag

SEQ ID NO: 2311 - DNA, 100 bp, Homo sapiens
gcagtatctcgctcacagagagctgggctacaggcctggaatcctgctgctgaagatcagtgctttgacagatgccatagacttggtcagaagcaagaag

SEQ ID NO: 2312 - DNA, 83 bp, Homo sapiens
agcgcgtggcgcggtgcgcagtgggtggctccacctcgactgcgaattactgtttatgagatccgggtcttcctccagcagct

SEQ ID NO: 2313 - DNA, 100 bp, Homo sapiens
cgggagtctgagctcaggttcataccctctttcccagctgcccgctcctcagcacccgaagattcgcctgtacaacgcagagcaggtcctgagttgggag

SEQ ID NO: 2314 - DNA, 74 bp, Homo sapiens
ggaacaccctggaagccgagaaatggacgagattgaggagctgcgggccgagatgctggagatgcgggacgtct

SEQ ID NO: 2315 - DNA, 50 bp, Homo sapiens
tgaacagcctttacaattgtttgtgagctttgaaaggagttttgcgagtg

SEQ ID NO: 2316 - DNA, 83 bp, Homo sapiens
gttcaatactgccatcagaaacggatcgtacatcgagacctcaaggtggctgtggacagaagctggagcccagtctgaacttg

SEQ ID NO: 2317 - DNA, 83 bp, Homo sapiens
tgtaacttacgtgtactttaccaacgagctgaagcagtcttcagccaatgacttgcttgcatcagacatctttgctcctcccg

SEQ ID NO: 2318 - DNA, 75 bp, Homo sapiens
cctcagcggcggcgccagctcctgtggcagtgaaaaagcagtctggctcccgaggtccaccccttataccccaag

SEQ ID NO: 2319 - DNA, 76 bp, Homo sapiens
ttcttcgaggtggagtcggagctgggacggttctgaatgatgactgacgcgggtttgggtgatacccctcacagcc

SEQ ID NO: 2320 - DNA, 108 bp, Homo sapiens
tgggattaggcttcgccggctacgattgcgacgcaaacatgcagatctttgtgaagaccctcactggcaaaaccatcacccttgaggtcgagcccagtgacaccattg

SEQ ID NO: 2321 - DNA, 101 bp, Homo sapiens
gtaccgcgagcaaggagcgcggaatcggggagcgtccggagctagctggatcctctaggcaggttgcagtgtaggattttggaagtcctccctccatcaca

SEQ ID NO: 2322 - DNA, 100 bp, Homo sapiens
gccagttggagttgcggcggcgggaacgattgggctgagcagaggacgacatgttgcttttcgtggagatatgagatcctgactccaaactccattccca

SEQ ID NO: 2323 - DNA, 98 bp, Homo sapiens
gcttagcttgcctgagattgtggaggaatttgagaagctgatggtccaacagagaatggatcttggagaatgtctgaaagtccatgacctggctttaa

SEQ ID NO: 2324 - DNA, 50 bp, Homo sapiens
ggcgggtgttgtgagcgggaaggtaaccctgtatcatttgctaaagctgt

SEQ ID NO: 2325 - DNA, 117 bp, Homo sapiens
aggaactgcccctgtatgcgcgccccatcttcctgcgcctcctgcctgagctgcacaaaacagaggtggtgcggagctcctgtttgacggtattaagaaacatcgagtcactttgcc

SEQ ID NO: 2326 - DNA, 89 bp, Homo sapiens
atcctagcccctttccttactggatcctcaaaccagaagaaaacctgaatctctgaggatattcaaggggttcgaacccatgaactgaa

SEQ ID NO: 2327 - DNA, 101 bp, Homo sapiens
aatgaagaatgaagagaagtagaaagcaagagtgaagtagaattaaaagaatctggaagaatgaatgggtcctagtactttgccagacgtttatcaaaatg

SEQ ID NO: 2328 - DNA, 100 bp, Homo sapiens
acgaggaccagtgggaggatggagcagaggacattctagagaaaggtgcagccgtcctcgtagcaaggagagggccgtggtggtggcctgggaaaggcgg

SEQ ID NO: 2329 - DNA, 80 bp, Homo sapiens
acgaagcttggaagttgcagaagcaacgcacctcttgctttttcctccaaagtatgttatgttaagtttcgtgatccatc

SEQ ID NO: 2330 - DNA, 74 bp, Homo sapiens
acgtcctgcaggaacccgaacagttccccctggtgcagggagtggccataattggccatctgcaagcttccctt

SEQ ID NO: 2331 - DNA, 100 bp, Homo sapiens
gaatatgaagcaacatgagatggtggatgaacccacagtatgaagtgtaacagaacagactttaccacctgaaactgctgcttcaagttcagatcaggca

SEQ ID NO: 2332 - DNA, 100 bp, Homo sapiens
ttggaccttccggagcttctcagaagacagagggttttcttttgaggaacgcctttttacccaagtcagccggtgtatcagtcagcacctatcatagtgc

SEQ ID NO: 2333 - DNA, 99 bp, Homo sapiens
ctccttggcgggcagcatcccggccaccaaggtggagatcaccgtgtcctgcaggaagcggctcagccccagggcagcacatcagagacaccatggaac

SEQ ID NO: 2334 - DNA, 75 bp, Homo sapiens
gtagcatccggaaacatgtggccctacatcaggaatttcatggcaaggcaaatcagccggcaccaggagcagttc

SEQ ID NO: 2335 - DNA, 100 bp, Homo sapiens
cagaactgtaagacgactgtttcataaagacctaacaagcctagaaaccacgtcagaaatggaagcaggaagtcctgtggacgatgccgtgatggacaac

SEQ ID NO: 2336 - DNA, 100 bp, Homo sapiens
cggccggcggcggcggcggcggcggcggcggcgcaggaatctgaacctgtgatgttaagaaatcagtaaatattaaaaagaagatggatgcaagaaggat

SEQ ID NO: 2337 - DNA, 100 bp, Homo sapiens
catggaactggcggacgtgggggcggcagccagctcgcaggcttataggctttatactgtggtgcctcgcctggtcaagtttgtagatattctgaccaat

SEQ ID NO: 2338 - DNA, 98 bp, Homo sapiens
tctccttttccctctccctttccctaaggaaaccacccctactcctaatcccccgactacagaagaggagaaaacggaatctaatcaggaggttgcta

SEQ ID NO: 2339 - DNA, 75 bp, Homo sapiens
tttgtgtatgaagctcaagatgtggggagtggcagagagtatgcattaaaggaactcttaacattcagggatgtg

SEQ ID NO: 2340 - DNA, 98 bp, Homo sapiens
cgccaggtgagcgcgctccctggcaccgttggcccccggagggtcgggcccagttgcggcgagcgggttgtccttctattcaggccactcttcgtttt

SEQ ID NO: 2341 - DNA, 82 bp, Homo sapiens
ctctcctctgatggcaggacctgccaagggcgaccattgacgaggtggagacggacgtggtggagattgaggccaaactgga

SEQ ID NO: 2342 - DNA, 50 bp, Homo sapiens
gtccagcccaggaaaatggagagttatcaggaactgttgccgttattaca

SEQ ID NO: 2343 - DNA, 86 bp, Homo sapiens
gcccggattggggatgagtatgcggaggacagctctgatgaggagggactggtgattgcagctggaagtgcccatgaccgagctgg

SEQ ID NO: 2344 - DNA, 98 bp, Homo sapiens
aagcacaaaaagggacagtcgtgaatctaacattataagcatttggaataatgggaaaggcattccagtagtagaacacaaggtagagaaagtttatg

SEQ ID NO: 2345 - DNA, 100 bp, Homo sapiens
gtatcaggaatttgaagagatgctggaacatgcagagtctgcacaaggtggtgacttcacacgccataatggcactggtggcaagtccatctatggggag

SEQ ID NO: 2346 - DNA, 100 bp, Homo sapiens
attatgggagggctggccaacttctgctacagacgactcagtggtcctggctctgccatatgacacccccgtgcccggctacatgaataacactgtcaac

SEQ ID NO: 2347 - DNA, 100 bp, Homo sapiens
ctgggtcccggcggcactcaccacacccggcatcagacctggcactacttgtccaagacgtactggtggcgaggcgaagctgctctcaggggagaaccca

SEQ ID NO: 2348 - DNA, 82 bp, Homo sapiens
gaaccccaggactgcgcccccgggagcgggcgcccagagttcaaaaggtgatgacctatcaacagccattctcaaacagaag

SEQ ID NO: 2349 - DNA, 100 bp, Homo sapiens
aaaaagatccatgcccagtggcagaaagaagtaactccagcttgtctggatggaaaaagcttgagagcaggcattacagaagtgaaggagcctagtgtca

SEQ ID NO: 2350 - DNA, 83 bp, Homo sapiens
cttctcttcccaagtatccactaggtcgacaggttttaaaatcaaagatgggaaaatcggagaaaattgcccttccccatggc

SEQ ID NO: 2351 - DNA, 82 bp, Homo sapiens
cggcggcggtggcggcttggacgactcggagagccgtttccccctttctagggtgaggatggttctacacagccacccggag

SEQ ID NO: 2352 - DNA, 83 bp, Homo sapiens
ctgaacgtcaccgaggagaagtaccaggaggcgttggccaaggcattttgaaagcgaagcagaagccgtagaatcagcggcga

SEQ ID NO: 2353 - DNA, 75 bp, Homo sapiens
gtacaagaaacttccaggactttgactgtcaggacgtagacaagtttggcaacgagatcacccagctggcccggc

SEQ ID NO: 2354 - DNA, 101 bp, Homo sapiens
cagcctacaccaccctggaatttgagaatgtgcaggtgttgacgatgggcaatgattgactaccactacatctcctcccagggcttccctatcgaaggctg

SEQ ID NO: 2355 - DNA, 89 bp, Homo sapiens
ataagcaaatgtaactcagcgaattgtaatggaaagcatatggacaggtctacgccacatcacttagattttaggtgatgggcaagtca

SEQ ID NO: 2356 - DNA, 100 bp, Homo sapiens
atgatgctggcctcatacaatgagttagcaatgtctgatcgtcaagagagtgctcttatagagctaatggtttgtacaattcgtcaagctgctgaggcac

SEQ ID NO: 2357 - DNA, 50 bp, Homo sapiens
tcctgtacagcctgcagaactagcatgtttgtcaacagacccgccctcgg

SEQ ID NO: 2358 - DNA, 82 bp, Homo sapiens
agagcttcatcaaaaatagtgatagctttgataattgagtggtgattttatgcaatggcttcaagccacagttcttcaccag

SEQ ID NO: 2359 - DNA, 75 bp, Homo sapiens
ctgttcacctacgggcctgatcaaacttgccttcctgttctccaagaccagccgctgctttgatgggagcacccc

SEQ ID NO: 2360 - DNA, 75 bp, Homo sapiens
tatctctgatttctggagttcagcactagatgtgagcctggcgggctgcccgctaacctgtcgctgaagccccag

SEQ ID NO: 2361 - DNA, 50 bp, Homo sapiens
taatcccagcacttggggaggctgagcggatcgcgggctcccagctctcc

SEQ ID NO: 2362 - DNA, 74 bp, Homo sapiens
tttggtgacagaagaagaacttagtagatgcattgaggatgtgtttaagagggcaaggagttggtgcacaccta

SEQ ID NO: 2363 - DNA, 98 bp, Homo sapiens
tggcggagtcggggctcctgacgacgagctcatctgcgcctttgtttagaacgcttaaaagttctgattccactaggaccagactgcacccggcacac

SEQ ID NO: 2364 - DNA, 75 bp, Homo sapiens
cgagagcgtgaccgagagcgcgaatatcgtcatcgttagaagcgcacgtaccgggtgccgaaggaggtccgcgtg

SEQ ID NO: 2365 - DNA, 51 bp, Homo sapiens
tttttcatccaaagccagttccgggtttccaggtagcctatgtggtgttcc

SEQ ID NO: 2366 - DNA, 74 bp, Homo sapiens
ctgaccactaaatctgtgtgcagatggccaccatgtctgggagatggaagcgaaaactgaccgggacctgtgca

SEQ ID NO: 2367 - DNA, 100 bp, Homo sapiens
gacggcccagtgcagggcatcatcaatttcgagcagaaggaaattagatcgactggagaagaaaaaaaagaaaaaagatagaaaaaagaaaaagtttcag

SEQ ID NO: 2368 - DNA, 75 bp, Homo sapiens
actggaatctggatgagcagctcaagcagaaccttttgcccagagtagcagccaaacttgaggttgccccgattt

SEQ ID NO: 2369 - DNA, 90 bp, Homo sapiens
ggggacaaggacaaagaacaggagctgatgttccagaaggagaaggcggtgctggacgagctgggccgacgcacggggacccggctgcag

SEQ ID NO: 2370 - DNA, 75 bp, Homo sapiens
atagatggccagctttcccccgagggtcaacgagaaagagatcggaagagagaagggcacagttacctaagtatc

SEQ ID NO: 2371 - DNA, 75 bp, Homo sapiens
aggagatggtgcagaacctcatggtgctgaggagtgcatcccctgacagtaggaaggtggtcaaatggaatgtgg

SEQ ID NO: 2372 - DNA, 100 bp, Homo sapiens
cgcttcacggcgccgagccgcggtccgaaatttctctgcaaagaatgtccaaaaattcatattcacattgatcgtatcgacaaaaaagatgtcccagaag

SEQ ID NO: 2373 - DNA, 98 bp, Homo sapiens
catggggctaactccagaatcccccattggtgtggatgaggtcaccattgtcaacattttgaccaaccgcagcaatgcacagagacaggatattgcct

SEQ ID NO: 2374 - DNA, 113 bp, Homo sapiens
ctgctgcggaccccgccgagtcctagcgcctggcctgcgcgccgctgcccgcgccacaggctggagcattggatttgctaaaggagcttaagaatattcctatgaccctggaa

SEQ ID NO: 2375 - DNA, 100 bp, Homo sapiens
ggatattgtcaagctgcaggtcatcaacctggcagccaagctctacctgaccaactctaaacaggtacttttagtgtttaccaaagaagataaccaatgt

SEQ ID NO: 2376 - DNA, 100 bp, Homo sapiens
ccatggtgaagtataggctgaggctacctgtgaacagtacgcagtgaatgttcggcccttctcagcattcctggctttgttgagcggctttgcaaactgg

SEQ ID NO: 2377 - DNA, 75 bp, Homo sapiens
cgtgggtttcttactaaggacgagctgatcaagtatatgactgaagaaggtagcagtagctgatgtgcagtttgg

SEQ ID NO: 2378 - DNA, 82 bp, Homo sapiens
cgccagcccgtgccgcgagcgcggcctgcaggagggacatcttcatcaccagcgtggacgccgccacgaccttcgaggagct

SEQ ID NO: 2379 - DNA, 83 bp, Homo sapiens
cagtgaccctgagcgaagccaagccgggcggcagggtggcccagttgaaatccttcccttcctctaccttggaagtgcctacc

SEQ ID NO: 2380 - DNA, 106 bp, Homo sapiens
ttgaagagagcagttgaagaagtgaagaaattattggtacctgcaacaattgcagcatgactttcccagggccctgattttcagcacggatgattttttcttcagg

SEQ ID NO: 2381 - DNA, 100 bp, Homo sapiens
tgtggggcagctcctggggcctggagtcaggtggcggtgcagaaggtcaacgccgcaggcacaggattttgtgtggatgagggctcggctacagcaagaa

SEQ ID NO: 2382 - DNA, 103 bp, Homo sapiens
gcaaaggcaagagtaacagcagcgccgtcccgtccgacagccaggcccgggagaagtttttagaacttcagccataaaaatgggcagaattttccttgatcat

SEQ ID NO: 2383 - DNA, 52 bp, Homo sapiens
gcagaggctgacaccttcatgtttgcaggccatgacaccacggccagtggcc

SEQ ID NO: 2384 - DNA, 75 bp, Homo sapiens
ggggacattattgcgcgtggaacggctgcttttggaaggagccttcacgtaaatgggtccagtcatgcctcccag

SEQ ID NO: 2385 - DNA, 80 bp, Homo sapiens
gcttttacgagtccctccctcccgaaatgaaggagttcacccctgaatacaaagggggtggcccgattctacaggtcacg

SEQ ID NO: 2386 - DNA, 90 bp, Homo sapiens
ccggatcactcctggcagcaacggagaaaaactccaggaagtgtttggatacaatgtctctttgctatatgaccttgaaaatcttccggc

SEQ ID NO: 2387 - DNA, 82 bp, Homo sapiens
aaataagtctccttccagataatcttctcaggacaccatccgttcaattggtacaaagctgtagagacagggtttcaccgtg

SEQ ID NO: 2388 - DNA, 74 bp, Homo sapiens
tgtcctttcttttctgactttccagttgactgaacctggaaaagagccgatatttgttcagtcgaatcaaggtg

SEQ ID NO: 2389 - DNA, 112 bp, Homo sapiens
ccgaggaaacgtcggaaactttagagaagttaagagaagaattagctatcaaatccggccagtatgccaccacgggctgttccctgaccctgcaccatacggagaaaccaga

SEQ ID NO: 2390 - DNA, 100 bp, Homo sapiens
tacagtcgagattatcgtagacggcacagccacagccattctcccatgtctactcgcaggcgtcatgttgggaatcgggaactaagcgtcttgtagaagg

SEQ ID NO: 2391 - DNA, 82 bp, Homo sapiens
aagagagctggcattcgcccaggtctacagccagccacctggacttctgccatgggcaagtgatgtggccacccctcagcgc

SEQ ID NO: 2392 - DNA, 100 bp, Homo sapiens
gcctggtccacgccgtggccggagccgtggtggggtggaagacaacccgtgagtattacaccttcatgtgggttactttgcccattgacctaaacaacaa

SEQ ID NO: 2393 - DNA, 80 bp, Homo sapiens
gcgaaggcggcggctcctgccctctcgctttccctctcgcgtctctggctgcaggattttttatcaagcagaaatgcatc

SEQ ID NO: 2394 - DNA, 88 bp, Homo sapiens
aaaaatgcaaagatgtagatgagagaaatgagagaagcttgattctttgctctcagactacgatattctctctttatctaatatccag

SEQ ID NO: 2395 - DNA, 75 bp, Homo sapiens
cgcatgtatcagctggagtctgggaagttacctcgaagtccctcttttccactgcaattctgtggtgttcttggt

SEQ ID NO: 2396 - DNA, 97 bp, Homo sapiens
gcgggaggtgttcgagaacgaccccgagacgattgatgaacagagtgagctgaaagccatcgagaaagagaagaaggtgacagccctgccccccaag

SEQ ID NO: 2397 - DNA, 75 bp, Homo sapiens
cctccccagccacgctttctgtacagcctgcagaactgaggaactaccctgccctgacagaggctggggatgaag

SEQ ID NO: 2398 - DNA, 75 bp, Homo sapiens
tcagcctcgcaagtagctgggattacagatgaggatgacgatgaaccagaagaggatgaccaggaaataaaagat

SEQ ID NO: 2399 - DNA, 90 bp, Homo sapiens
ggctcacggcgcctgccttggcgctggccggctacatcgagcagtccagagcgtgagtccattcacatcctgagtgttgatgagaagaac

SEQ ID NO: 2400 - DNA, 100 bp, Homo sapiens
cggcctgcagagcgctgccatcatgaggtactactgagcgagtgtgcttgatccagggaacggttgaagcactgaatgcagttcatggattcattgcaga

SEQ ID NO: 2401 - DNA, 98 bp, Homo sapiens
aggaggtccttgtcgctgtggagctgttgaagatgcagaggccaggatgtgggcccagccctgtgccaggaggctggctggaataaaggtacagatag

SEQ ID NO: 2402 - DNA, 100 bp, Homo sapiens
gaagagatcagtggtgtggcttttatattcaaccaaaaatttttccaggaactgagggaagccacagggaaggtgaagaaggagctggaccctgacgaca

SEQ ID NO: 2403 - DNA, 90 bp, Homo sapiens
ctttgtggctgtgtaactcactggcctacctcgtcaatacctatgcactggacagtgggggaaatgcaataccttatttccagatgactc

SEQ ID NO: 2404 - DNA, 89 bp, Homo sapiens
ggctcgccttgtatctcaacaccctgagtgcggatttctgctatgatgacagcaaagtgtgggatgctgtctcaggagatgaattgatg

SEQ ID NO: 2405 - DNA, 50 bp, Homo sapiens
agcaggactgcgccgcgtcttcctcaaggacgtggcccagtggaacatcg

SEQ ID NO: 2406 - DNA, 90 bp, Homo sapiens
agtggttgaatgccatggatgagattggattgcctaaggcatgttatttgaaagcaattgagacgcaaccgaactttgcagtagcttgga

SEQ ID NO: 2407 - DNA, 100 bp, Homo sapiens
cacccggcggctgatcaccaagccgcagaacctgaatgacgcctacggaccccccagcaacttcctcgagatcgatcgtatagcttctggcctgggcttg

SEQ ID NO: 2408 - DNA, 90 bp, Homo sapiens
tatcaggatacatctgatgctgatctgagtcttactgcttttacagtttaattggttggggtcagataagaagaggagtgacaatcaagc

SEQ ID NO: 2409 - DNA, 50 bp, Homo sapiens
ctggctgatactacgtattccagatgggtgaaggtacgctcgagcgtggt

SEQ ID NO: 2410 - DNA, 100 bp, Homo sapiens
acgcgtgcttcgtggcccggcaccgttccgcggacgtgctcggtttccctgtacttagagcgtggactgtgaacccccaagcagacggtgagtgtgagag

SEQ ID NO: 2411 - DNA, 83 bp, Homo sapiens
ctcgccggccgagggtggccctaggggcagcgagcaagacagcaagcaggtgtctcgtgcctctgctggaccctgactctggg

SEQ ID NO: 2412 - DNA, 103 bp, Homo sapiens
cgccccttcgccgggacctggcacccgaatccggcctgccgggtgctggagaatctggtaaaagcaccattgtgaagcagatgaggatcctgcatgttaatgg

SEQ ID NO: 2413 - DNA, 50 bp, Homo sapiens
cttagctcagcaattcttaccttttagatgagatcatgtgactggatccc

SEQ ID NO: 2414 - DNA, 50 bp, Homo sapiens
tgagtctcctcaagctgggatcagtgtcttcaataggccgtgtttaagag

SEQ ID NO: 2415 - DNA, 75 bp, Homo sapiens
tgaggaagtggagatagctgagctcactacagccgtcatggaaatgatgagtcagaagattcagcagctcacagc

SEQ ID NO: 2416 - DNA, 100 bp, Homo sapiens
actcataaacttggcttcctcgcttctgctcctcagcctttctgagaaaagtctacagcattctttctctgcaggttctcttaactacagtgacttcaac

SEQ ID NO: 2417 - DNA, 83 bp, Homo sapiens
ccatcttcacggtgatcatgtctcggatgattctgggggagtacacagggatagctgggagtatggccaccctgctccacgat

SEQ ID NO: 2418 - DNA, 101 bp, Homo sapiens
aggccggggaccttgccaaccctcccaagaagttcagagcaaactgaaaatatggtccactaaccagcagcatcagcatcacctgtgagattgtttgaaat

SEQ ID NO: 2419 - DNA, 51 bp, Homo sapiens
gcacgatgagctcaatcggcactgggtctggctcttgctgattgaattcct

SEQ ID NO: 2420 - DNA, 75 bp, Homo sapiens
gaagcgtctttgctcaaggatcccagttttctctggatgacgtggtctcctctgagcctccggcctccataagac

SEQ ID NO: 2421 - DNA, 97 bp, Homo sapiens
gcctcctgagaagctgggattacaggtctaagtctgagtctcctaaagagcctgaacagctgaggaagctcttcattggagagttaagctttgaaac

SEQ ID NO: 2422 - DNA, 75 bp, Homo sapiens
tggcatttcagtcactggtttgcagagtccaggcctggttggtttacacaacattggacagacctgctgccttaa

SEQ ID NO: 2423 - DNA, 75 bp, Homo sapiens
agacagaacagttaatcctcaatttaagcctgatctaacccctagaaacaggatgaatctggttatagatggaca

SEQ ID NO: 2424 - DNA, 100 bp, Homo sapiens
ggactacccgatttttcgcttctcttcagggatgagtcatgtggtggtgaaaaatgaccctgaactggaccagcagagagcgataattgtgaggatacac

SEQ ID NO: 2425 - DNA, 100 bp, Homo sapiens
tagataccagcctttcaaaccatgaatggtagtgtctagaaagggtatgtcccttcaagagagaggtgccaatgtccaaccggcctaataacaatccagg

SEQ ID NO: 2426 - DNA, 100 bp, Homo sapiens
gcggaatttgacccggaggaagatgaaccaacgttagaagcagcctggcctcatctacaggttatgtgggtcatgaatttattttggacacgagaccctt

SEQ ID NO: 2427 - DNA, 76 bp, Homo sapiens
gcttcaacaaaggacactacatcaaggactgcccccagaataccctctaccatctgctttggtcagggtgccgctc

SEQ ID NO: 2428 - DNA, 99 bp, Homo sapiens
agcctcccctcggaactcgggcatcatggcctcaggggtcaccagtcgttggcacaccaagaagctgccccgcaagacccaccgaggcctgcgcaaggt

SEQ ID NO: 2429 - DNA, 100 bp, Homo sapiens
gcatgaacttgggaatgttttcttaaaattcattgtgcttgagaacagtagtcgagaagacaagcatgaatgtccctttggccgcagtagtatagagctg

SEQ ID NO: 2430 - DNA, 51 bp, Homo sapiens
ttttcaatgtggagttctatgcaggacattatcccctttggcaacaacccc

SEQ ID NO: 2431 - DNA, 100 bp, Homo sapiens
cagtcatgtatcctgtgtttaatgaggaactgggaagtaacagccctccacagagaaactggaagggaattgctattgctctgctggtgattttagttgt

SEQ ID NO: 2432 - DNA, 75 bp, Homo sapiens
cacctggccccgctacagcaaaccagcacggggtcactctggtgcccattgaggagttcagcccggagttcgtgg

SEQ ID NO: 2433 - DNA, 98 bp, Homo sapiens
ctcaacaccagcaccgcagatgttgtcaaggtggcctaccaggaggccaggggtgtcgccatgccaagaaggatcaagaaggtggagaagaaaagaaa

SEQ ID NO: 2434 - DNA, 82 bp, Homo sapiens
caaagtcatcaagctagtggacatcacggacatccagaaggaaccaggtgcagatgggtctcttccttcctgcccccatctc

SEQ ID NO: 2435 - DNA, 90 bp, Homo sapiens
ctggacattgattcaccacccatcacagcccggaacactggcatcatctgtaccattgcttcagaaggagaggaagttcctcaagacaag

SEQ ID NO: 2436 - DNA, 90 bp, Homo sapiens
cgagagcgtgaccgagagcgcgaatatcgtcatcgttagaaggcatcagaacacaccatgatggctgtgacctaagaccctcaggaagcc

SEQ ID NO: 2437 - DNA, 51 bp, Homo sapiens
ggaatacacttatttatgaatggtgaaagtggtgctggaaaaacagtggct

SEQ ID NO: 2438 - DNA, 100 bp, Homo sapiens
tcccctctcccccctccccaccttccctcgccctaatcccccaacgaggaaggaaggagcagttggttcaatctctgggacagagcgggatgccaccagc

SEQ ID NO: 2439 - DNA, 106 bp, Homo sapiens
gggcgcttcgccccgggccccccagcatgaagaccccggcggacacagggggatatgagactttctactcggaatatcctgagtgttgcgtggatgtaaaacccat

SEQ ID NO: 2440 - DNA, 101 bp, Homo sapiens
tcgattacacagttctggatgatgtgggccatggtgtcaagagagacaagagagacacctccaacttcgacaaagagttcaccagacagcctgtggaactg

SEQ ID NO: 2441 - DNA, 100 bp, Homo sapiens
ggcgctgcagaaccagatccgggagcacgtcatctccatcgaggatcgccggggagtggcctgtacagcaacctccagcagtacgatctcccgtaccccg

SEQ ID NO: 2442 - DNA, 100 bp, Homo sapiens
ggagatgccaagacgaataccttctgtgggacacctgactacatcgccccagagtgccggtggtggtgtgcacattgagccccggtatagacagttcccc

SEQ ID NO: 2443 - DNA, 100 bp, Homo sapiens
gtttggagagggaaatatgtttgctgtttcacctgtatcgactttccaaaagtctttgcaggatgacagcaagaatgagaatctgcttgacctgaaccag

SEQ ID NO: 2444 - DNA, 100 bp, Homo sapiens
ctggccctgaaggtctttgtggctggcagaaaccgtctggagaatgatggcgccactgccttggcagaagcttttaggcaggagagcctgtcctgcctcc

SEQ ID NO: 2445 - DNA, 100 bp, Homo sapiens
ctcggggacattattgcgcgtggaacggctgcttttggaagagcagcccgacggccatggaggctgaagagacgatggaatgccttcaggagttccctga

SEQ ID NO: 2446 - DNA, 50 bp, Homo sapiens
aaacatcaaagaggtctagcaaaggccagaagcggactcctagaagaggg

SEQ ID NO: 2447 - DNA, 90 bp, Homo sapiens
gaaggagttcatgagtgctataagatgcgactgctacagggaccatgggacactattacgcaacaggaggactcagagagagtaatgata

SEQ ID NO: 2448 - DNA, 100 bp, Homo sapiens
gcggaaacctggagtggaaggcaggtcgagtcccgggcgctcaccatgttccgggacattgcccagcaactgcaggccacctgtacctccctggggtcca

SEQ ID NO: 2449 - DNA, 100 bp, Homo sapiens
tccagttgctggatatccaagcctctcagcttcggagaatggagtcttccatcaatcatatctcacagaactttatgaaatcttcctctcaagagcaaaa

SEQ ID NO: 2450 - DNA, 100 bp, Homo sapiens
gatgttggtgagcgtggggaatctggaagaggctggggagtctgtgtccttccagctgcagatacggaggtgggtttgcaagcacatcaagaagcccatc

SEQ ID NO: 2451 - DNA, 90 bp, Homo sapiens
aggcagaccttgcagtcaaactctggaggctgccatcgagaacctcaatgaagccaagaactattttgcaaaggttgactgcaaagagcg

SEQ ID NO: 2452 - DNA, 98 bp, Homo sapiens
cgggccggaacctcaagaaggaggtcagccgggtgctgtgcaagcggtgcggttctttcagagcacggcttcggccccatcactaccgacatccggga

SEQ ID NO: 2453 - DNA, 95 bp, Homo sapiens
tggcagcagctccgtcatgagtctagctagacttcgggctccttgaggatattcagttttgtatgtttgaatatcctctcaccatgttcagcata

SEQ ID NO: 2454 - DNA, 97 bp, Homo sapiens
tcctactatccatttcaactacagatactttgaagtagaagaagctgatggttaaataggattgcgaatcaggtggccattcagcggaagaagcagt

SEQ ID NO: 2455 - DNA, 100 bp, Homo sapiens
tcctccgcacccggccgtggctgcaggagctcagcatgggcagcccgggacctgtgaccaacaaggccaccaagggcgttttccactgcgccgtggagac

SEQ ID NO: 2456 - DNA, 75 bp, Homo sapiens
cagcagagatgataacatgtttcaggactttctgcagggcgactgcaccaaagcgaaacagaagctgaactggaa

SEQ ID NO: 2457 - DNA, 100 bp, Homo sapiens
ggggctcagccaggcctgcgcgggcccgaggccggaggaacccggactccggcgtagcggtgtcgtcccccaggaagtctcctgccctccctctctgcac

SEQ ID NO: 2458 - DNA, 50 bp, Homo sapiens
cagagaggggcagttttggagccatggaaggattacggccaggagataca

SEQ ID NO: 2459 - DNA, 49 bp, Homo sapiens
ctggtttgtcgcatgtgctgtatgggaactctaatgaatcattgattga

SEQ ID NO: 2460 - DNA, 97 bp, Homo sapiens
tcctgcctcccccgtcccaccactgaggctgttgggccaggccagtcatgctagaacccggccaagagccactgcacaatgaggagctggcaggagc

SEQ ID NO: 2461 - DNA, 75 bp, Homo sapiens
tttgctgagagtagtatctgttctgattaagcagttttacagtcttttggcatgggttggaattggagcctatcc

SEQ ID NO: 2462 - DNA, 75 bp, Homo sapiens
ctcggggcgtctgggcagcctacgctttccggactatctgctgccaaactcttgactgaatatggcgttagtgtt

SEQ ID NO: 2463 - DNA, 98 bp, Homo sapiens
ggggagcgaccgggagcggcggcagcggcggcgcggaggcggctgaggtgcgagccgttttagaaagagcgttttcgctacgtaaagcacattcgata

SEQ ID NO: 2464 - DNA, 90 bp, Homo sapiens
ggctctccgccgtccccagccctgcctctccctgggctctgtgagagtctgagaaaactgtgcgtcttcaagaaaattgagaggcattcc

SEQ ID NO: 2465 - DNA, 100 bp, Homo sapiens
ctcaatagcaaactacagcaacaacgagaacaaattttccggcgctttgagcaggaaatgatgttctcaaaagtctatggtcctgtgttcaccgtgtatt

SEQ ID NO: 2466 - DNA, 100 bp, Homo sapiens
acctctcagatcccaaacaactggcagaatttgctaggtctccatcatcaccagttccagtagtgaaaaacagaacccaacaaactcaaaatacattaca

SEQ ID NO: 2467 - DNA, 100 bp, Homo sapiens
gagcagtagatgaaatctatgtaacttgcgaatcagatcagagtgtggtcgaatgtaagggtaaaccagacttgaatacaacattgccaattagacaaac

SEQ ID NO: 2468 - DNA, 100 bp, Homo sapiens
gtctgggcttctctgaggcggcgagagatggtcaggtctggagctcgaccgggccaggttggaaaagagactgttcaaaccactgaggatcagattttga

SEQ ID NO: 2469 - DNA, 75 bp, Homo sapiens
ccggcccacagtgggggtgtgcaaacccgagagaactgggcatcagaacacaccatgatggctgtgacctaagac

SEQ ID NO: 2470 - DNA, 82 bp, Homo sapiens
caggagaagtttttatcaacaaaggcaaaggattcggatttattaagcttatgctctctgtgtgggtatgtgtgtagccatc

SEQ ID NO: 2471 - DNA, 82 bp, Homo sapiens
actccttcggcagtccacccaccgccgccgcctcccaggtgtcttcaaaaacaaacatatttaaaagattttacttctcatc

SEQ ID NO: 2472 - DNA, 100 bp, Homo sapiens
gcagaacattcggtacaagacatgcagcaatcataatatcagctgcatccagtgtccccagacgagaatacaagccaaggcctgtgaaaaggagttctag

SEQ ID NO: 2473 - DNA, 100 bp, Homo sapiens
gtcatgattgccacctggatgctgttctctctcttcacggatgttgcttcagagtgtgaagtcaaatgcatgccaacattccagttttttaagaagggac

SEQ ID NO: 2474 - DNA, 112 bp, Homo sapiens
gagagcaccgacaccgcctgtgtggggcccaccctccgggaaagaatcatgtgatgtacagctttatataaagagacaatctgaacactccatcttagcaggagatcccttt

SEQ ID NO: 2475 - DNA, 89 bp, Homo sapiens
gaggaactaaggcggaggaactgagacgtttcgaattccagctcaggcatttgaaaggatgatgagtccaactggttctaatcttaagt

SEQ ID NO: 2476 - DNA, 98 bp, Homo sapiens
tgttgtaccagtggcaccggaagcagtacgttggagcagcccatggcatggctggaatttactatatgttaatgcagatggagtgaggaaacccagca

SEQ ID NO: 2477 - DNA, 100 bp, Homo sapiens
gcggtggaggtctgcgttgctcttgcttttcctcgctggggtgtacgcacgtcagctaactgttcagatgatgcaaaatcctcagattcttgcagccctt

SEQ ID NO: 2478 - DNA, 101 bp, Homo sapiens
ctgccttccagcctgcttgactttgaaaatgatttaattgaatcaagctgcaaagtaactagaaattattcttgacagaagtattttaaaagaaaaatctt

SEQ ID NO: 2479 - DNA, 75 bp, Homo sapiens
acgcggcaccacctcaagaagcgggctacctttgtgttggatgaatttaagcgcaagtactccaatgaggacaca

SEQ ID NO: 2480 - DNA, 50 bp, Homo sapiens
gcaagagaaggcactcaagtttatgttgcagaggaaagtggtcgcttatg

SEQ ID NO: 2481 - DNA, 100 bp, Homo sapiens
gttccacatgatcattgtaataagatcgggcccagcacaggcagcgtcagtgcaaacttcccccaccccgccttccacccatgtgtgtcaaccctacccc

SEQ ID NO: 2482 - DNA, 99 bp, Homo sapiens
gaagctgctggcatatgccatggatttttggtccaaaggacaactgaaagctctgtttttggaacatgagacttcacatgtatcattctccgagcctga

SEQ ID NO: 2483 - DNA, 83 bp, Homo sapiens
ccgctggcgctagtctgaccctccgccaggcaaaaggaagcttatgttcctgaggaagaattgaaggcagcagaaatagatga

SEQ ID NO: 2484 - DNA, 75 bp, Homo sapiens
gaagacacgcttcttctggaagaccagccaacaggtacgtgccctggaggaggccaatgctgacctggaggtgaa

SEQ ID NO: 2485 - DNA, 88 bp, Homo sapiens
gcctttagtttcaaaaagttgctggatcagtgcgagaaccaggagctcgagttgcccagaagattgttgccacaaggaagaagcagca

SEQ ID NO: 2486 - DNA, 100 bp, Homo sapiens
gtttgactttgaaggatcactttcccctgtcattgcacccaaaaaagcaaggccttctgagactggatctgatgattgaatcagctgcacttcatccccg

SEQ ID NO: 2487 - DNA, 75 bp, Homo sapiens
ttttcttgaaaatctggataaatcccgaaaaggagaacttcttaagaagagtgtgtgccccctaccaccggagcc

SEQ ID NO: 2488 - DNA, 100 bp, Homo sapiens
taattttgcaaatagtgacagacctatgaagattctgccatgtaaatgtcagcttgagtggactccagctgagaagaaagagaagaaagacttaattatt

SEQ ID NO: 2489 - DNA, 100 bp, Homo sapiens
ccaatagaggtcatcattcctggtgccagaccagctacgatattaccatgcgtgtagcgttttacgctgtggaaaatctctgttctcacaaagtctcccc

SEQ ID NO: 2490 - DNA, 97 bp, Homo sapiens
ttagtggtggacctgtttgtgcgcacagtgctggtctgcctgacatttggaggacgagtaagtcgtgaattaaattatactcgccagaagattggag

SEQ ID NO: 2491 - DNA, 97 bp, Homo sapiens
gttgaaaagttccggcagagaattctggctccctgtaagttcacccatctcaggagcctggctggttggaggggactctgaacggaaagactggcct

SEQ ID NO: 2492 - DNA, 100 bp, Homo sapiens
attcagaaccatgtccgaaagcgagaagcgcctgctccagaagcagaaaggtggaatacatgttggtatcttttgatcatgaaaataaaaaagtccggtt

SEQ ID NO: 2493 - DNA, 100 bp, Homo sapiens
cgcagatcagaggtagtcggacctttcccgctggcgcgcagcctcagctagtgcctgatttgagatggggtcccaggtctcggtggaatcgggagctctg

SEQ ID NO: 2494 - DNA, 75 bp, Homo sapiens
tggctcttgccctcatcctggttctggaatcctcagttcaaggtaagaatgattgatgttggctgatattggagt

SEQ ID NO: 2495 - DNA, 74 bp, Homo sapiens
ccagaagattggtggagcttgatctgaagctccataatgggagaagtaaagaacaaagacttaaggaacagctt

SEQ ID NO: 2496 - DNA, 133 bp, Homo sapiens
gcatgtcaaagaaatgcacacatgcacagtggagggctgtaatgctacctttccctcccgcaggagcagagacagattgatgaactcccagagggcgctgtgaagcctccagcaaacaagtatcctatcttct

SEQ ID NO: 2497 - DNA, 98 bp, Homo sapiens
aaaaatccgatcacctcgaagatttattggcagcccacgaacacctgtcagcattgatgttgatgggacaatgacagtggactggaatgaatggagag

SEQ ID NO: 2498 - DNA, 100 bp, Homo sapiens
gaactgggctcttgacgggcatcatctcttaatcctcagaacatcccagggagtcactcaagactgcttgcaactgattgcagacagtgaaacaccaact

SEQ ID NO: 2499 - DNA, 50 bp, Homo sapiens
aatgaagccgcggaccctcgcgtccccaaagctccagagatagatccagt

SEQ ID NO: 2500 - DNA, 82 bp, Homo sapiens
cggggatagtgtcatcggttcggtaaagtttctgttctctggtttaactatagatcaacacatcatcttgcatctcatgggt

SEQ ID NO: 2501 - DNA, 82 bp, Homo sapiens
catcggggatgtggacgaaggggccgacctcctagaataccctctaccatctgctttggtcagggtgccgctcgaggattta

SEQ ID NO: 2502 - DNA, 75 bp, Homo sapiens
gtcgatactggtattacttgtatgatgataccatacttgcagagctccttcagatacataaagaacacattgtag

SEQ ID NO: 2503 - DNA, 75 bp, Homo sapiens
aggcctgcgtccgagtctccgccgctgcgggcccgctccgacgcggaaggaagctcttcgtgggcggtcttgact

SEQ ID NO: 2504 - DNA, 100 bp, Homo sapiens
ggaggaggtgcagaaggtggacagggtaaaagaaagagacttttttctaaagaatgtggtttagattagaatccaaacaaggaaaacgaatcaaaaacag

SEQ ID NO: 2505 - DNA, 95 bp, Homo sapiens
acagaattgagtgatttcctgcaggctatggaacacactgaagttcttcagcttctcagccccccagctttatcttcaagccaggatgaagggag

SEQ ID NO: 2506 - DNA, 80 bp, Homo sapiens
acaattggcattgactttttatcaaaaactatgtacttggaggatcgaacagattctcatcgctttggaaggcacctgaa

SEQ ID NO: 2507 - DNA, 76 bp, Homo sapiens
agaagttctcgaatcattctttgtacagaaattgaaaggcttcaaagctagcagactttacaccaaatctcagaag

SEQ ID NO: 2508 - DNA, 83 bp, Homo sapiens
gacaaaggtgcttcaaaggagaatgcaggaggcaaaaccttcaactgaggacttgggggataagaaggaaggtgaatatatta

SEQ ID NO: 2509 - DNA, 100 bp, Homo sapiens
tttctctcaggctttcctacaactcatgcccagcagcagcaagcaggtacatgtaaagtgcattttcctgatccaaacaagcttcattgttttcagctaa

SEQ ID NO: 2510 - DNA, 100 bp, Homo sapiens
aactcgacgacttaaaatggatgctgttccaaccatttttgatttttgtacccatataaagtctatggtggttgaacagggtatgtttgtaaagcactgc

SEQ ID NO: 2511 - DNA, 100 bp, Homo sapiens
ctaccatctaaaatacgaaggtttctggctggagccttccccaattgtaaatttgctgaaaaatgtttgtttgttcacccaaattgtaaatatgatgcaa

SEQ ID NO: 2512 - DNA, 75 bp, Homo sapiens
tggaaacaatggcatttacagaaagagtcaacagcagtggcaacaggcgtcgaccagaagattatgatattcata

SEQ ID NO: 2513 - DNA, 76 bp, Homo sapiens
cgggaggtggtggagtgacctggccccagtgctgcgtccttatcagccgagccgagcctggaaacctggccggcgt

SEQ ID NO: 2514 - DNA, 100 bp, Homo sapiens
cggcgagccggagcgcggagcccggctcccgcaccatggaggaggacgacagctacgccgattacacctcaacaagaaggcaactgacaaacagccttat

SEQ ID NO: 2515 - DNA, 140 bp, Homo sapiens
gaagtcagttccttgtggagccggagctgggcgcggattcgccgaggcaccgaggcactcagaggaggtgagaagccctaccactgcaactgggacggctgcggctggaagtttgcgcgctcagacgagctcacgcgcca

SEQ ID NO: 2516 - DNA, 101 bp, Homo sapiens
gcgagctcaaggaggacctcacgcccttcaaggatgaccgctactacagctctgggctctgaccctcacatcagtatgcaagttcaagagaatggagaaat

SEQ ID NO: 2517 - DNA, 90 bp, Homo sapiens
aatcacctttaagaagcccatgcctaccaaggttgagccggaccctgaggctgggagtgagcaagaggtattttctgctgtggaagggcc

SEQ ID NO: 2518 - DNA, 73 bp, Homo sapiens
gatgaagatctttctaaatataagttagatgaggtggttgtgtcaaaccgattggtgacatctccatgctgta

SEQ ID NO: 2519 - DNA, 119 bp, Homo sapiens
taagccaggtgtatatgcggtgtcagtcactggtcgcctgccccaaggatgctgaaaacgccattcaacagatgggtggccagtggcttggtggaagacaaatcagaactaactgggca

SEQ ID NO: 2520 - DNA, 100 bp, Homo sapiens
tggcataggtgcactcagcaacgggcatacataatcttgctgctatgcttcgaagctgtagtctgaatcaacctaagttttaaacagaaggtgaacctct

SEQ ID NO: 2521 - DNA, 97 bp, Homo sapiens
tcggaagagtcttcggcatcgggcgacagcaggtcacagtggacgaggtgttggcggaaggttgaaaggattgttgacaaaaggaaaaataaaaaag

SEQ ID NO: 2522 - DNA, 76 bp, Homo sapiens
gaaacctaagcatgccggatctggaaaacaggcagaaatccacaatggaggggaactctgtgactttatggaaaat

SEQ ID NO: 2523 - DNA, 90 bp, Homo sapiens
caacaccacaataatccacagccaagtgcagaatacagaaactgcagccatgaccacgcacgtcaccctggaagatgccctgtccaacgt

SEQ ID NO: 2524 - DNA, 128 bp, Homo sapiens
ggttcgttacatcagaaggatacagttcatgacaatgactttgagccctaccttactggacagtcaaatcagacaatgcagatcttcgtgaagactctgactggtaagaccatcaccctcgaggttga

SEQ ID NO: 2525 - DNA, 75 bp, Homo sapiens
ccaataaatacatcatgcaaccccacggtggctgccacactcaacaatttggctgtgctctatggcaaaaggggc

SEQ ID NO: 2526 - DNA, 51 bp, Homo sapiens
attggaccctcctcccaactgtagatgatcaagttccagatgatcctcagt

SEQ ID NO: 2527 - DNA, 86 bp, Homo sapiens
ccatcttggatccgcgggacaagaaaattcatgcggcagctcctttgggacccagatcatcgggggccgggaggtgatcccccact

SEQ ID NO: 2528 - DNA, 124 bp, Homo sapiens
aggagctggcctatcactacgcgcgtctgggctcccacctggtgctcactgcccacactgaggctctcctgcagaagggactcatttttgcctatctgccgggtgaatgactttgagactgctg

SEQ ID NO: 2529 - DNA, 82 bp, Homo sapiens
gcctgagcccgcccttgatcttcgctgtggcatggcggacgaggggaagtcgtacagcgcaaaatgatgcttcaacacccag

SEQ ID NO: 2530 - DNA, 98 bp, Homo sapiens
aggcactgcaggaggagaaccgcgacctgcgcaaagccagcgtgaccatcgtggtgcttcccacctttatcctggagaagcgatctttgctggagatg

SEQ ID NO: 2531 - DNA, 75 bp, Homo sapiens
cttcaggggaaatggcttcagcgcagtatattactgcagaatatgatgctttggcaaaagtgattcagcaccatc

SEQ ID NO: 2532 - DNA, 90 bp, Homo sapiens
atctgaagagctatggtgaaacaccactgaagcattgccaagagactgacttgcataccaaatgtgtggtggatgtggatgcaaacaagg

SEQ ID NO: 2533 - DNA, 100 bp, Homo sapiens
tcatccgcaaggaaataccagccaaaatcatttttgaggatgaccgggtgtatgtgctcaagaggccttatgtggatgagttcctgagacgcatggggga

SEQ ID NO: 2534 - DNA, 90 bp, Homo sapiens
ttcaacatcctgaaaccctatataaagatcttcaacaggagtgtgaacatcatgcacgtggtggagttgcccgtgacagagcgccagatt

SEQ ID NO: 2535 - DNA, 100 bp, Homo sapiens
gttaaactcctgctctgtttactgtggattggatattctcaaggaaccacacatgtattaagatttggaccagtcctgcctctgttgtagaagacatgtg

SEQ ID NO: 2536 - DNA, 95 bp, Homo sapiens
caaggtgttgatgccgccggacgtcaccaggagactaaagtccatcaaaaacatccagaaaattaccaagtctatgaaaatggtagcggcagcaa

SEQ ID NO: 2537 - DNA, 82 bp, Homo sapiens
tcgaacgagtgtgggcgcgaggcaggtgagaagccctaccactgcaactgggacggctgcggctggaagtttgcgcgctcag

SEQ ID NO: 2538 - DNA, 100 bp, Homo sapiens
aatttcaacagaagagtgagagatggaacccgaagaagaaaggattcgttacagccagagattgctccagaacctgggtatcaacccagcaaacattggc

SEQ ID NO: 2539 - DNA, 75 bp, Homo sapiens
ttcagctgtctcgagaagattgtttaaatcctcccagtgaagatctagtgaaaagccatttgatgtatgcggtca

SEQ ID NO: 2540 - DNA, 100 bp, Homo sapiens
ccgttggcggcgtcactgacgcttcgctccggtcctcggatcccgagcgcggggaggcagaccgctgcatatctatgtgagactgaattttcctcttaga

SEQ ID NO: 2541 - DNA, 80 bp, Homo sapiens
cccaaggtctctcgcgggcgggagaacggaaaactcccaacttcctgggcaaatccagacagaacctttgacttggtgtt

SEQ ID NO: 2542 - DNA, 100 bp, Homo sapiens
caggcaccatggacagcgtgcggtctgggccttttgggcagcttttccggcctgacaacttcatctttggctccaaccaggaatggagacgccattggat

SEQ ID NO: 2543 - DNA, 98 bp, Homo sapiens
acaggcagcagggatggtggctggctggctgataaattgttaccagggatagctgggagtatggccaccctgctccacgatgcggtaatgaatccagc

SEQ ID NO: 2544 - DNA, 96 bp, Homo sapiens
ggtctccgtgcagcccaacttccagcaggacaaggagcagagcccaggcagccaggcctcactggccacgatgccggaggcacctgatgtgctgga

SEQ ID NO: 2545 - DNA, 50 bp, Homo sapiens
gcgggaaggccgaccgactgccgcggaaatcaaggattggcgtggcattg

SEQ ID NO: 2546 - DNA, 75 bp, Homo sapiens
cccggatgagtacgataccgaagcgggctgtgtgccccttctccacccagagcttgacaaaagtaagctgaagcc

SEQ ID NO: 2547 - DNA, 82 bp, Homo sapiens
tgcaaatatatagagcacctggaagcagtaacatgcaaaaacattgaatgaggaggataaagcaaagattgctaaaagcaag

SEQ ID NO: 2548 - DNA, 74 bp, Homo sapiens
ttctggatggcacccgaggtcatcaaacagtcggcctatgactcgaagattgataggcagcagtttgaagaaac

SEQ ID NO: 2549 - DNA, 100 bp, Homo sapiens
ctttccccctcctctgatgattaaacaggaacccagagattttgcatatgactcagaaagcataacccctactgtagaactaaatgcactgtgcatgaaa

SEQ ID NO: 2550 - DNA, 98 bp, Homo sapiens
gcaagagagctctgcatcaatgcgccggccatagactacgtctactttgagaactcctccagcaacccatacctgatccggagaatcgaggagctcaa

SEQ ID NO: 2551 - DNA, 75 bp, Homo sapiens
caacatcctcctggccaccgactcctacaaggtagaggggaagagattgaactttgctgacctttgatgtgaggc

SEQ ID NO: 2552 - DNA, 80 bp, Homo sapiens
tacgcagagctcatcgtccttggctccaggaggccagagctctactgaagcggcggcggccccgggggccagggggccgg

SEQ ID NO: 2553 - DNA, 100 bp, Homo sapiens
ggagagtgacatgcagttggatggcggtgactgcgtggactcatgcccgttgcacagcagccggtttattgtgcttcaaagcatggcatagttggattca

SEQ ID NO: 2554 - DNA, 76 bp, Homo sapiens
ctgtgattggtggtcgcttggggtgatcatgtatgagatgctcatcgatttatcatagaatccccgactcagaccc

SEQ ID NO: 2555 - DNA, 98 bp, Homo sapiens
caggacggcgcggcagagtccccgtacgcctacagtaacgagagctgaaggtgttccgtggtcagtgagggctggcactggctctgcacgaagatctc

SEQ ID NO: 2556 - DNA, 82 bp, Homo sapiens
gacgtgggagtcacctgaaagccaggaaatggaaggcaacagcccccaggggagcaaccagggagtcaaaatcacaccggac

SEQ ID NO: 2557 - DNA, 74 bp, Homo sapiens
tggcgagagaaggaaaatgcgcgtcccgggcgcgggtagacaatgcagatcttcgtgaagactctgactggtaa

SEQ ID NO: 2558 - DNA, 101 bp, Homo sapiens
ggcaactcaaatctctgcaagagaaagtctccaagaaggagaagctagatgtggaagagccagacagcgccaactcatcgttctacagcacgcggtctgct

SEQ ID NO: 2559 - DNA, 75 bp, Homo sapiens
ctggagtttgatgaggagcgagcccagttccctgacatcgtggagttctgcgaggccatggccaacgccgggaag

SEQ ID NO: 2560 - DNA, 101 bp, Homo sapiens
gaggcctcaggtggaaaccaagatagatgtgtcctatgaataccgcttcctggagttcacgactctgagtgctggtcagcccaaggccaaccccactgtca

SEQ ID NO: 2561 - DNA, 75 bp, Homo sapiens
gcaggctgtggccatcttcaccgtgtacctgggctcgagcctgcacatgaaggaactgattcatttggaagaaag

SEQ ID NO: 2562 - DNA, 75 bp, Homo sapiens
gagcgccttgggacagggggatttggaaatgtcatccgatggcacaatcagttatgtttgcttatgaacagtgcc

SEQ ID NO: 2563 - DNA, 96 bp, Homo sapiens
actgctaggttaaaaccaacattcatcagcaaggtgtactttcggctccatgcttccatcctgaagctcctggggaagcccgattctggggttggt

SEQ ID NO: 2564 - DNA, 75 bp, Homo sapiens
aaggaatccatgtttcttccaagaagcagttaccgagctgatacccagacataccagccttataacaaagactgg

SEQ ID NO: 2565 - DNA, 100 bp, Homo sapiens
acttttgagtgcaactgccttccaggagagattaaacagattctagaaaatgaacttcagatacctgtgtccaaaatgctgttaaaaggctggaagacgg

SEQ ID NO: 2566 - DNA, 100 bp, Homo sapiens
aaacggagacttggatgaggtgaaagactatgtggccaagatgttccatttaagcagacctcttccatagctgtagctggagcggtaattggagctgttc

SEQ ID NO: 2567 - DNA, 99 bp, Homo sapiens
gatttggaatgcaccaacaatgcagatggtaatcctggcatgcgagtagtgagcggtttctggtaagactgaacaagaatggtgggccgaggaacccag

SEQ ID NO: 2568 - DNA, 50 bp, Homo sapiens
gatcgctcccactcaggtcacaggttatcagtgagctgaatggaaaaaac

SEQ ID NO: 2569 - DNA, 100 bp, Homo sapiens
gcgacggcaccatcatccacctcaagtacccgctgaactgctccgatcccactagtgagagattgaccgactcatcagtcacggggccgacatcctgaag

SEQ ID NO: 2570 - DNA, 100 bp, Homo sapiens
cgaaacgtgataagaagcacctggatgagacatttgctacagcatcccacattaagtcaacggactacgccgacacagagctcctgctttcccgagaaaa

SEQ ID NO: 2571 - DNA, 100 bp, Homo sapiens
tccagatgcctggacccagagtgtgggggaaatatctctggagaagccctcactccaaaggctgtccaggcgcaatatgaagacagtcagtgttgcctta

SEQ ID NO: 2572 - DNA, 107 bp, Homo sapiens
gatgggaatcctgccctaagcaaacggtgcttattttgggagaggccagccgccatgtcatgaagacactcaagaagccctgtgaagaggaagcaaggcctgccaac

SEQ ID NO: 2573 - DNA, 90 bp, Homo sapiens
aacgcggagcggacggattcgattcaacggggttccggaccgcgctgcgctatggagcagggcgccctgcgtccggcagaggaggcgagc

SEQ ID NO: 2574 - DNA, 82 bp, Homo sapiens
gtggattaactgtctggcaaaggcagctgcctttgccttcattgtggtgaaagatagtgcgggtgactcagatgtggtggtg

SEQ ID NO: 2575 - DNA, 74 bp, Homo sapiens
cgaacgcggagagcacgccatgaaggcctcgggcacgaaaaatggctacaaacttcctagcacatgagaagatc

SEQ ID NO: 2576 - DNA, 98 bp, Homo sapiens
tagctaccatcacccatcttttaccaagtacagaggcttcatcttatgaaatggacaagaggagtattgggaaagggtcgttgtggtgcatagaccca

SEQ ID NO: 2577 - DNA, 83 bp, Homo sapiens
agacgacaagcacacactatggcgctgaaacggattaataagattaacgtcttcaaggacccagttgctgatcccaacaaaag

SEQ ID NO: 2578 - DNA, 50 bp, Homo sapiens
ctgagatccatctgcaccacggtgctggaaaaatgccagctgtgggacaa

SEQ ID NO: 2579 - DNA, 100 bp, Homo sapiens
gtggaatattaccagtcagaggcggaaggactcctggaatgccacaaatgcaaatacttgtgcactgggagagccatccgggtgacctgcataggttcct

SEQ ID NO: 2580 - DNA, 138 bp, Homo sapiens
tggcgaccggcaactactttggattcacccacagcggggcggcggcggcggcggctgcggcccaatataggtaatctgtaagtcagatgctccaacaggggatgttcttcttgatgaagctctgaagcatgttaagga

SEQ ID NO: 2581 - DNA, 97 bp, Homo sapiens
gcctgagcccctcgcagctccagaagagatggtggccacacagcaggagatgatggacgcgcagctgaggctccagctgcgggactactgcgcccac

SEQ ID NO: 2582 - DNA, 90 bp, Homo sapiens
cagctgtgataaaaaaaaaattcatctgggcggtatctggaacttggggtctccccagccaggctttcgagtatatcctgtacaacaagg

SEQ ID NO: 2583 - DNA, 74 bp, Homo sapiens
ctgatgctgcagaattaaatccatttggagatcctgactcagaagtctattgcgtctgcagacatggatttcaa

SEQ ID NO: 2584 - DNA, 73 bp, Homo sapiens
gtcaggctggtctcgaactcccgacctcaggtgagccaccagctgggcagcatcatggacctcttcaccacca

SEQ ID NO: 2585 - DNA, 82 bp, Homo sapiens
agtagtcgctggagtccgcgcctccctggaaatcctgcaggacggactggactggtgggccgggggcttttggggcgatggg

SEQ ID NO: 2586 - DNA, 100 bp, Homo sapiens
gcatgttcgacaagaatctgcaggacttggtccgcggcatccgtaaccacaaggaggacgaggaagctcttcgtgggcggtcttgactggagcacgaccc

SEQ ID NO: 2587 - DNA, 75 bp, Homo sapiens
agccgtcccgttccgagatgccccatcgcaccaacgaagcaactgctgagcaggctgaatcttctccatttgttg

SEQ ID NO: 2588 - DNA, 83 bp, Homo sapiens
aagacagtgacgacaaaacaccagatgatgaccctgagcaaggaaaatctgaggcctttcatccgctgtagtttacaatgcag

SEQ ID NO: 2589 - DNA, 83 bp, Homo sapiens
cagaaaaagtgctcctgggactccaggataccagaacaaaatgtgcatgtcttcaactgacagcaaggaatgccaaaacttcc

SEQ ID NO: 2590 - DNA, 73 bp, Homo sapiens
tttcctcaatgtcagaaactggataatggtgttgtctccatctactggcaaagaagaaatatacacaagggtc

SEQ ID NO: 2591 - DNA, 100 bp, Homo sapiens
agatgaattgccattcttgcatgaggtgaccttgggaaaggtgttgaaagtgatcgtcgtcatgcggagcctgttcattgatcgaacaatagtaaaggga

SEQ ID NO: 2592 - DNA, 75 bp, Homo sapiens
cctctccattttcttccgttcatgagttgtatcacggactgattcaccgagcccaaccgtactcaactcacatat

SEQ ID NO: 2593 - DNA, 50 bp, Homo sapiens
ctcgtcgggagtgatcacctaccctacagcgccgcgcggtgaggttctct

SEQ ID NO: 2594 - DNA, 75 bp, Homo sapiens
ggcggaggtcgataagctggaactgatggaatgcttctagtcacaacagacacccttggccatgactttcatgtc

SEQ ID NO: 2595 - DNA, 98 bp, Homo sapiens
gcaaatcttgctgctttcctttgtagtgattatgcttcttggattaatggagcagagagccttgaacttaggaattcttcgagatcctggatcagaaa

SEQ ID NO: 2596 - DNA, 74 bp, Homo sapiens
cggtgcccgaggaggcagccaagctcgtggcctgcctctgcgtgcgttatggaaacaaaggacatgctttacat

SEQ ID NO: 2597 - DNA, 74 bp, Homo sapiens
gaagaacagctgtggaaagaagttgcaaaacactggatcaaatgatgccgtttggaaaaatttcccagcagttg

SEQ ID NO: 2598 - DNA, 82 bp, Homo sapiens
cagcaaagaagacgtcatcttcttctaaaagggccgtgactcaaggcttgggcactgtttaaaggaaagttccgagaaggca

SEQ ID NO: 2599 - DNA, 146 bp, Homo sapiens
gaaggacacaccagattccgggaaggagaatggaggcaaactgcccccatgatggcatccagctaataaaaggctgattgttgtgacattggccgtatgctggatgcccaaccagattcggaggatcatggctgcggccaaaccca

SEQ ID NO: 2600 - DNA, 127 bp, Homo sapiens
cgcgcacgagttcaccgtgtaccgcatgcagcagtacgacctgcagggccagccctacggcacgggcgagagcgggaagagcacgttcatcaagcagatgcgcatcatccacggcgccggctactcg

SEQ ID NO: 2601 - DNA, 83 bp, Homo sapiens
agagtaacagcagcgccgtcccgtccgacagccaggcccgggagaattgattatggaagattcccacaagagtaccacgtcag

SEQ ID NO: 2602 - DNA, 75 bp, Homo sapiens
gccagaaatttgaacaactttccgaatctgcaaaagaaggttccacacagtaggactgaaggtttaaagccaagg

SEQ ID NO: 2603 - DNA, 100 bp, Homo sapiens
ttaatgaaatcaaaaggcagaaccagtcccttgtgtatggcaaagtggatagcttctggaagagtggtggacatgacaacagagtcaactgcatacagtg

SEQ ID NO: 2604 - DNA, 98 bp, Homo sapiens
gggagatgaacccaacctagtgggtgtaatacatcatgaactgcaggttgcctttccccatcttcctggttctgctccttcgtggcctagtcttgtgg

SEQ ID NO: 2605 - DNA, 90 bp, Homo sapiens
gacctcaagcagcacgtgctcatccacactcactgtttgatgaagacaatccagtacacaagtctggaaccagatacatgttcacaacag

SEQ ID NO: 2606 - DNA, 98 bp, Homo sapiens
agacagttatagtcaacatggttgacgttgcaaaggcgcttaatcggcctccaacgtgtatgaaccctctcgtgagatgaaaagtcagtggacagctg

SEQ ID NO: 2607 - DNA, 75 bp, Homo sapiens
cagaagtttgttcaaaacaagtggctgattgagaaatgatggaagaattgcatagcctggacccacgacggcagg

SEQ ID NO: 2608 - DNA, 71 bp, Homo sapiens
ccgcggtcgctccgagcggcgggccgcagagattcttggtgccaccattgagaactccaggattgtcctgc

SEQ ID NO: 2609 - DNA, 82 bp, Homo sapiens
cactatggaattctaatttgaaccatgtttggattgaagccgcctctgtattacttaccagacaagtgggtttggactcgga

SEQ ID NO: 2610 - DNA, 80 bp, Homo sapiens
cggcccgcgcctgggctgccggcacttcgcggcagagtgaagacatttccacctggacacctgaccatgtgcctgccctg

SEQ ID NO: 2611 - DNA, 98 bp, Homo sapiens
ggggtttgactggcagagtacggctgctgttggagttttgaaagctgtacaatttggtgaatggacttggactaaagtctgatgaacttcccaatcag

SEQ ID NO: 2612 - DNA, 100 bp, Homo sapiens
aggctagaagaatcttagagctttctggatccagttcagaggattcagagaaggaaccaccaaactgttttccacagaggctgcatcaattgacattccc

SEQ ID NO: 2613 - DNA, 90 bp, Homo sapiens
gcctgcggcgaggatggagggcctggcagtgcggttgctgcgcggcagcaggctgctcctcagagaaattttgaaattgccttcaagatg

SEQ ID NO: 2614 - DNA, 95 bp, Homo sapiens
cggcgcctcctcggagtccttggggacggagcagcgcgtcgtggggcgagcggcagtgtgcaccggcacagacatgaagctgcggctccctgcca

SEQ ID NO: 2615 - DNA, 89 bp, Homo sapiens
ctgcccagtggcttccagatgtaaccagcagcagccagtaaggaggagaaggggagagagctcatttgatattaacaacattgtcatcc

SEQ ID NO: 2616 - DNA, 74 bp, Homo sapiens
cactcccagctgcgcagggcctgccaggtggcgctcgaaaaaagttgtctcaggtatagcaagtaaaccaaaac

SEQ ID NO: 2617 - DNA, 73 bp, Homo sapiens
tgggagccgttattggctgccgttaaggaccgttacgtttcccggttactccacaggatccgctgaacatagg

SEQ ID NO: 2618 - DNA, 100 bp, Homo sapiens
ctaaaaacttcatgtgtctggttgtttgaaatgtatttgcagtttcctgggactgctaggagaaaactgcccttcaattctaatctcacctcaaaaacag

SEQ ID NO: 2619 - DNA, 75 bp, Homo sapiens
agctagctcggaacctgcccatggacacattcactgtggcaagtttgcagaaaaaacttcagcatgtgccaggaa

SEQ ID NO: 2620 - DNA, 50 bp, Homo sapiens
ccgagactgacaacgcggtcccacaggcagaagctcctcctggggtagag

SEQ ID NO: 2621 - DNA, 100 bp, Homo sapiens
cgactcggtcctgtttcgacagcgaacatgtcgcggcctgtcagggcgatttgatgaaactgttatcgaagagagaagacaatgtgctgaagacctgcta

SEQ ID NO: 2622 - DNA, 82 bp, Homo sapiens
ggcacctggagaaaaggacctgaagcagattctgagtggagaagaggcccgccagagaaatctgttaccattgggatgataa

SEQ ID NO: 2623 - DNA, 100 bp, Homo sapiens
cttggccaatgaaggcaactaccgcgagctgcgctggttcaccccgtggtcgaggagtcgtatggtttgaagtggtgaacatggatttttctcggcttca

SEQ ID NO: 2624 - DNA, 74 bp, Homo sapiens
aaccttcccagaaagtccaagctcgtggaacttgctactaccagcaccatgccctaccaatatccagcactgac

SEQ ID NO: 2625 - DNA, 100 bp, Homo sapiens
tgacagatgaggcagagcccagcaaggatacgcagctccacctggatgatgccctccggggccaggaggacctgaaggagcagctggcgattgtggagcg

SEQ ID NO: 2626 - DNA, 101 bp, Homo sapiens
aaatagcagaagaataccatgaggtcaaaaaggaaatcaccctgcttgagcaaaggaagtgtaatggataggtaacagagaagacctcgtcccttcctagt

SEQ ID NO: 2627 - DNA, 100 bp, Homo sapiens
cgagaggtattaggcagtgctacaagggatcaagatcagctccaggcctgggaaagtgaaggaccctttagatcctacaagatcagtgattgtgatccgc

SEQ ID NO: 2628 - DNA, 90 bp, Homo sapiens
agacgatctgcacttcgcattttggcattgacatttaattttagggtcctttatatagaagggagacaaggaagatgtccgagcaactga

SEQ ID NO: 2629 - DNA, 97 bp, Homo sapiens
atgctcaaagtgaatatattaaggaaaatgtttataggaggccttagctgggacactacaaagaaagatctgaaggactacttttccaaatttggtg

SEQ ID NO: 2630 - DNA, 98 bp, Homo sapiens
cccagggctaccagcgggccatgtgcatcagtcgcaagaagctggagcacagagtcttccttaatcctatggaacaagaagctgccactgaatagggc

SEQ ID NO: 2631 - DNA, 75 bp, Homo sapiens
ctttgttgcttctaaacctctggaggaggagacgctctatgggatttactacaagtgtccctgtgagcgtggcct

SEQ ID NO: 2632 - DNA, 100 bp, Homo sapiens
caaagagcaaacagattcagtggcctgcattgaactttatgaaatcttcctctcaagagcaaaagaacggtggaaaagtttcagtgaaacaagttcagag

SEQ ID NO: 2633 - DNA, 100 bp, Homo sapiens
tgccagtgcagcttgtcagaatgaacctctcttgattaaggaaacatgatgaaagtattgagggggcatcagaattgggtgtacagctgtgcattctctc

SEQ ID NO: 2634 - DNA, 50 bp, Homo sapiens
ggacaaaggaacaggtatctcagattgtcattcttcagggatggcagccc

SEQ ID NO: 2635 - DNA, 100 bp, Homo sapiens
aagctggagtattttgagattggagaattaaggaccgcagctgaatgcacagctagaaggttggctttcacaagtacagtctacaaaaagacctgctaga

SEQ ID NO: 2636 - DNA, 100 bp, Homo sapiens
attttgctgaagcattcaaggccaagaatgttctgctccatctggacacaagcatctgacggtagaagagttatttggaacctctttgccaaaggaacaa

SEQ ID NO: 2637 - DNA, 98 bp, Homo sapiens
tactcgactctcagcctgtttgataagtataaaggaaaatcagtagacgcgattagatcctcaggtgtcagttgtacccgaggcgttctcagcagcag

SEQ ID NO: 2638 - DNA, 100 bp, Homo sapiens
ctacacgatgagatgcttcattggtttcgtgcagtagaatgttgtgtgagagtcggtatttcttcaatagatatatctcaaagcagaagctggctaacat

SEQ ID NO: 2639 - DNA, 82 bp, Homo sapiens
gcctgtgtcccacttgttcgcggcctatagagcgtttccgtgggacttgtggccctcctggcgtccaggaaccttcttcgcc

SEQ ID NO: 2640 - DNA, 74 bp, Homo sapiens
acttcgtctatgtggcgcccggcataggcatcatggccatccttttctcaggcatcgtgatgtcccactacacg

SEQ ID NO: 2641 - DNA, 98 bp, Homo sapiens
ctcctctgaggtctcctccatcaactccgacctggaggactttctgaagaccttttcccccgatgtcttccggttcttctgcctgcggagcagctacc

SEQ ID NO: 2642 - DNA, 82 bp, Homo sapiens
ttttaatctgaccactggaccagcccattgggagttacttcagcgaagccggcatccttcatcaaaaagccatttgaccgtg

SEQ ID NO: 2643 - DNA, 50 bp, Homo sapiens
ttgggagcgctacatgatctagccaacagcctcaactcaatacagttgtt

SEQ ID NO: 2644 - DNA, 95 bp, Homo sapiens
cgcgagcacagagcctcgcctttgccgatccgccgcccgtccacacccgccgccaggtgtggaaacaggaagagaactagaactggaagtaaagc

SEQ ID NO: 2645 - DNA, 74 bp, Homo sapiens
acaccatggctgcggcggcccagctctctctgacacagggtgtacagcaagctgtgattcctgggaaaactaaa

SEQ ID NO: 2646 - DNA, 75 bp, Homo sapiens
ctggaacttaaaactggcaaagaatcaaattctattgaacaccgtagtcaggtttcattgtttgcggaacttttc

SEQ ID NO: 2647 - DNA, 97 bp, Homo sapiens
gaggaggggccccagcagcccccgaaggccctatcaggacatggagtatgaaagacgagacagggcagggcattgttcatgcactgaccgacctcag

SEQ ID NO: 2648 - DNA, 76 bp, Homo sapiens
ctcaagtatatcaagcattcaaattgctcacagctgatcctaaggctatgaccagggccagagcactcagatctca

SEQ ID NO: 2649 - DNA, 75 bp, Homo sapiens
ctgctctagtaataagccggctattgtagaagctggtatctcagatgaagacatcatcaacattactcttcctac

SEQ ID NO: 2650 - DNA, 100 bp, Homo sapiens
ttggaaagatatgccaaatttgttaaagagaggatagaaattgaacagaactatgcgaaacaattgagtgttgctaaagattatgtgcgactgatgaagt

SEQ ID NO: 2651 - DNA, 83 bp, Homo sapiens
cgcagccttgggcctcgcgccggctatggccgtgccctggggctgagccctcagagggaagtcttgccggaccatcacctttg

SEQ ID NO: 2652 - DNA, 75 bp, Homo sapiens
atttgcagaaagaaatagcgtctgagatcataggattactgatgctggagcacaagctccgggtggataaggcag

SEQ ID NO: 2653 - DNA, 100 bp, Homo sapiens
gcattctccagggaaaggatgacatatttttggacctgaaacagaaattctggaacacctatatggaaagatgaatgggagggctgattttcgagagccg

SEQ ID NO: 2654 - DNA, 82 bp, Homo sapiens
tggctctgtgcaacggagactccaagaaaacctcggatcaattctcagctggtggcacaacaagtggcacaacagtatgcca

SEQ ID NO: 2655 - DNA, 100 bp, Homo sapiens
cttctcgtctcagtaacaataacaagaaaaacagcctagactagacgcacatcaggaagacagaaaaatggctacaaacttcctagcacatgagaagatc

SEQ ID NO: 2656 - DNA, 100 bp, Homo sapiens
gatcctgagatgtgggagttgctgcagagggagaaggacaggcagtgtcgtggcctggagctcattgcctcagagagctgagggcagcagtaaaatccag

SEQ ID NO: 2657 - DNA, 100 bp, Homo sapiens
ggtcattcctcacgtctaccccgtggctgctaagacacagcttggccggtgcttccaggaaaccattgggtcacaggctggagtacaatggcacgatctc

SEQ ID NO: 2658 - DNA, 82 bp, Homo sapiens
ggtcattgctgtgattgttattgccatagaggcatttcatccttcatgaagccattcaggattttgaattgcatatgagtgc

SEQ ID NO: 2659 - DNA, 82 bp, Homo sapiens
gcggatgccctgcagtacctgcagaaggtctctggagacatcttcagcaggtccctttgtggtacgtgctttccttcgtagt

SEQ ID NO: 2660 - DNA, 100 bp, Homo sapiens
gatgagattcagcaggaaatgaagcgtgctaaagtgtctcaagcactgtttgcaaaggttgcagcaaccaaaagccagatctgaaaaccatgagtgaacg

SEQ ID NO: 2661 - DNA, 100 bp, Homo sapiens
ccatgaagtcttgtcgacatttataccgtctgagggtagcagctcgaaagtagaagaagtgggtgtacacttaaagcgttctgggaatatgaatcccttc

SEQ ID NO: 2662 - DNA, 82 bp, Homo sapiens
ggcagatggactcggagcgccccgccgggggatatgagactttctactcggaatatcctgagtgttgcgtggatgtaaaacc

SEQ ID NO: 2663 - DNA, 87 bp, Homo sapiens
ggcacgcaccatctgttgccatcccggccggccgaggccattgcaggagtacaaaccaccaggaacccgtaaacttcataacattct

SEQ ID NO: 2664 - DNA, 50 bp, Homo sapiens
tatttcttctactccagtggtgagaagttgttgaatgttgggtcacgaag

SEQ ID NO: 2665 - DNA, 100 bp, Homo sapiens
cggagttctacgtgtcccccgaggatctggaggcacagctgcagtctgacgagaggggttcaaaatgagcctgtttggaacaacctcaggttttggaacc

SEQ ID NO: 2666 - DNA, 75 bp, Homo sapiens
acatgcacagcctggcgacggctgcgtccttgctggtgcagacgaagcggcgggctctggagaagattgacctta

SEQ ID NO: 2667 - DNA, 143 bp, Homo sapiens
atgagctcagctttgaacagttccatctcttctataaaaaacttatgtttgaacagcaaaaatcgatgtacgagatcttcagcatcatccgggacctgggggccttggcccaggtgcacgctgagaacggggacatcgtggag

SEQ ID NO: 2668 - DNA, 100 bp, Homo sapiens
tccggcccagccagcgcccgcgatgatatgaccacacgaggccctctgctgcagctggaggtgctgtgggcaccatggcccacagtgtgccctccccagc

SEQ ID NO: 2669 - DNA, 75 bp, Homo sapiens
atctagtctttccgcttcttgaatttctctctgtaaaggagatctttagcagttaaggagtttttttcaaagccc

SEQ ID NO: 2670 - DNA, 82 bp, Homo sapiens
ggacaccaaacatttcctgccgctcgggtggcccagttgaaatccttcccttcctctaccttggaagtgcctaccatgcatc

SEQ ID NO: 2671 - DNA, 75 bp, Homo sapiens
aggaggcagcctgtggaggaactgggtttcagtgttgactggtgggctcttggagtgctcatgtttgagatgatg

SEQ ID NO: 2672 - DNA, 82 bp, Homo sapiens
ggagagtgacggagtcggcgagcccccgcggcgacaggtcatcatcagatttgaaatatttaaagtggatacaaaactattt

SEQ ID NO: 2673 - DNA, 100 bp, Homo sapiens
aggaatttataccagctgtagcaaaagtgggaagccaagcctttcctcccggatgctgcagccgtccagcagcccgctctgggggaagcttcgtgtggac

SEQ ID NO: 2674 - DNA, 92 bp, Homo sapiens
gaaagaggaggaaaacaaaagctgctacttatggaagatacaaagggtcactcctggaagcaaggcggctctagctaatttatgtattggag

SEQ ID NO: 2675 - DNA, 101 bp, Homo sapiens
ctggaaccctggggactacgacgtccctcaaaccttgcttctaggagataaaaagtgtactaatggtcacttgatgtgcgctggctgttttatccacctac

SEQ ID NO: 2676 - DNA, 101 bp, Homo sapiens
gaaatttgggaccaagctgaacagctttccaaagagcaaaaagatttcagaaatggccaaagaatccataccatgcccaacagaaagtgtttacccaccat

SEQ ID NO: 2677 - DNA, 82 bp, Homo sapiens
tcggtgctgcagacggcgagacctcctgcacagtgtgtcccggcatggatatccggaacaacctcactaggttgcatgagct

SEQ ID NO: 2678 - DNA, 80 bp, Homo sapiens
agggaaccctggtcaccgtctcctcagaggctgggaggcggcagaatgcagccagaggagggcacaggctggctgctgga

SEQ ID NO: 2679 - DNA, 76 bp, Homo sapiens
cgcgtccaggcctgacagctctgcggctcgggccctgagccataaggatgagtttaccattattcctgtactggtt

SEQ ID NO: 2680 - DNA, 103 bp, Homo sapiens
tggagtctgcgaaggccgggacccggttccccggcccacagtgggggtgtgcaaacccgagagaactggggcagctgcaatgactctccgcacggtattattg

SEQ ID NO: 2681 - DNA, 100 bp, Homo sapiens
attgaattagatctaaaagccacccaggccttggtcctagcacccactcgagaattggctcagcaggcgcgggcggtgatgaactttgtggttcgctacc

SEQ ID NO: 2682 - DNA, 51 bp, Homo sapiens
acctggcagccgccgccgtggaaggatttttcaagccacattcaattgata

SEQ ID NO: 2683 - DNA, 100 bp, Homo sapiens
aacgtcaggccgtagccgaagcctcggaaggagcggcccacggcaaaggagctgtttgtggagccatttaatcgaaaagcacgccaagagaacctgaggt

SEQ ID NO: 2684 - DNA, 100 bp, Homo sapiens
tccagggggtcggctgccaggtacagcagcgatggattttgggtggggaagtcctccttgcggagttggcgccagctagctcttgaacagctggatgagc

SEQ ID NO: 2685 - DNA, 97 bp, Homo sapiens
gatcatggtgttctacttcaccagcagcagcgggcatccgcttcgatcctgaaattccgcaaacactacgactagagtttgctaaggcaaacacgaa

SEQ ID NO: 2686 - DNA, 98 bp, Homo sapiens
cgggaaggtgcgccgctaggggtccacctgccttttgtgggctactcctactcctgcatggccctcaggaggcagtgaccttcaaggatgtggctgtg

SEQ ID NO: 2687 - DNA, 125 bp, Homo sapiens
gacacaccaggccggcaggctgagaaaagcgagaccgcgtgcgaggaccgacaatgcagatcttcgtgaagactctgactggtaagaccatcaccctcgaggttgagcccagtgacaccatcgag

SEQ ID NO: 2688 - DNA, 100 bp, Homo sapiens
caccgtggccaccctgtgggcctggcgctggaggcagcggtgcacgtgcagggctacttctacaagtccgaacagccagtccagcaaaatgaacagcatt

SEQ ID NO: 2689 - DNA, 88 bp, Homo sapiens
aaaaaaaccacaaatgtttttctgttttgcctgaatacatgatttaaacaagagatttccacagaagccttcaacctggactactaca

SEQ ID NO: 2690 - DNA, 74 bp, Homo sapiens
agaccctcgaagtgcgcaaacttgacactcaccctgaccgccgattacacctcaacaagaaggcaactgacaaa

SEQ ID NO: 2691 - DNA, 82 bp, Homo sapiens
tcggtcaccatgtggtcctcagaaactatgttccaacttcctgtcaacaatcttggcagtttaagaaaagcccggaaaactg

SEQ ID NO: 2692 - DNA, 51 bp, Homo sapiens
gactggagtgagagggtcttctgttactccacaggatccgctgaacatagg

SEQ ID NO: 2693 - DNA, 75 bp, Homo sapiens
tggggagcgtcctggggctgtgctccatggcgagctggcgtcatcacgtagacataaccaagaaacttcacccaa

SEQ ID NO: 2694 - DNA, 80 bp, Homo sapiens
gagccccgaagctaagagcccccttcagtcgcagcctcactctagatgcgtccaccacctcccccgccggctaaagcccc

SEQ ID NO: 2695 - DNA, 96 bp, Homo sapiens
ccaccacacctggcgttgccatctttatgaccaggtctccaaggacaaagcccttcagagcatggcgtccatgtcctctgcccagatcgtctctgc

SEQ ID NO: 2696 - DNA, 101 bp, Homo sapiens
ggatctgaagagctatggtgaaacaccactgaagcattgccaagttttccaagagataacttcaccaagatgtccagtgataggcaaaggtccgatgatga

SEQ ID NO: 2697 - DNA, 100 bp, Homo sapiens
caagaggctgcagttcaaggtcgtggacctggagcagacaaacctggatgaagatgtggcctcagccccgagtccaagaagatcctgacacccgccctca

SEQ ID NO: 2698 - DNA, 82 bp, Homo sapiens
cgggcggtgagcgcccatatgggggttctggagagcggggtgtgggatcatggaagggaagtggttgctgtgtatgttactg

SEQ ID NO: 2699 - DNA, 100 bp, Homo sapiens
tcgggcagtgacaccacctacttctccgtcaatgtttcagactatgtgaaagggtttggaggaaaatttggtgtgcagacagacagacaagacaaatgtg

SEQ ID NO: 2700 - DNA, 75 bp, Homo sapiens
gcactggaggaagcacaccctgtcctatgtggacgttggcactgggaagggttacacatcattttggaatgactg

SEQ ID NO: 2701 - DNA, 82 bp, Homo sapiens
gccatgtccgcaccgggacgatcatcctggggacctggtacatggtcaaaatgcagatcttcgtgaaaacccttaccggcaa

SEQ ID NO: 2702 - DNA, 101 bp, Homo sapiens
aaaaacgagccatttctccgtcgattaaagagccatctgtggtgccaattgaaggaatccggtcagtgagtttctacgagcacatcatcactgtgggaaca

SEQ ID NO: 2703 - DNA, 99 bp, Homo sapiens
aaggaagtggaggagatcagtctgctgcagccgcagacctacattgccccaccagctgccattttttacccatcgggtgctcatgacacgtcgaatgcc

SEQ ID NO: 2704 - DNA, 97 bp, Homo sapiens
gtctcattccccatgtttagcaagattgcagtcaccggtactggtgcccatcctgccttcaagtacctggcccagatggggttttaccatgttgccc

SEQ ID NO: 2705 - DNA, 75 bp, Homo sapiens
atgatatgctaagaaagaatcttgtcactttagccactgctactacaggtattccaataactgtaccacctccag

SEQ ID NO: 2706 - DNA, 90 bp, Homo sapiens
agatactgctgcttgtcaaccacaccgactaccgctggtgggcagaagtgcagcagaccccgaagcccgataaaagtgaaggatgtaata

SEQ ID NO: 2707 - DNA, 98 bp, Homo sapiens
tgttcacagagtggcccttgcagaagcctgtagaaaacaggaagaatttgatgttgccaacaacggctcttctcaagatcccctaacaacagtgagag

SEQ ID NO: 2708 - DNA, 83 bp, Homo sapiens
cacattgagagcaaaatctacaagatgatgcagggaggaggtgtcccgacccaggctaagcttgagcatggctgagcaggagc

SEQ ID NO: 2709 - DNA, 114 bp, Homo sapiens
gggatacacgctgtaccagttcgctccgagccccggccgcctgtccgtcgatgcaccgaaaaggacttgtcttacaaggaccggcactggcatgaagcctgtttccactgctcg

SEQ ID NO: 2710 - DNA, 83 bp, Homo sapiens
cgagagcggcccggacgacaaggttcgagaacttgtcttggacaattgcaaatcaaatgatggaaaaattgagggcttaacag

SEQ ID NO: 2711 - DNA, 74 bp, Homo sapiens
ctctgtgtcccttgttgcaagaagaaaacatcagcggcagagggtccaggtgtctcaaaggctgttgagcacat

SEQ ID NO: 2712 - DNA, 100 bp, Homo sapiens
ctgcccttgttgcctctcagcaggtggctgcccaggcatctgcatctggaatgtttcctggacaaagaagatgaccttgaatgatgccatgaggaacaag

SEQ ID NO: 2713 - DNA, 83 bp, Homo sapiens
ataatggcaaataacttttccttggagagtcataacatatcactgactgggccgcgatgggcctcttggaacattggtgtgtt

SEQ ID NO: 2714 - DNA, 100 bp, Homo sapiens
ttaaatttgctgttcgtgaacgctatccacttgatcatgctagagctgctgaacctttgcttactttggaaagattttccgcagatttccagtggcccca

SEQ ID NO: 2715 - DNA, 74 bp, Homo sapiens
ttccaaccatttttgatttttgtacccatataaagtctatgtggaaggagaacatgaatctctcagaggcccaa

SEQ ID NO: 2716 - DNA, 96 bp, Homo sapiens
ttccccaacgggggtgccatggacacccactttgccaacatgcgctccctcatccagtgtccgcagcggctacctctatgtgaccctcatctacaa

SEQ ID NO: 2717 - DNA, 82 bp, Homo sapiens
cttcagccgcctccttgacagtcttcggcaggaagtctttgagagttcaggccctggtccgagaggattcaatcctgtgggt

SEQ ID NO: 2718 - DNA, 75 bp, Homo sapiens
ccagcaaaggcgtcaaactggtgtccatcggagccgaagccttcaaagaaaaacctcggtatccaccaagtcagg

SEQ ID NO: 2719 - DNA, 90 bp, Homo sapiens
ccaagatgaaagcagcagttttcatcatctaagtgaaagtactttacctcgtgtgggcctttattcctgaatcttggctaaactctttag

SEQ ID NO: 2720 - DNA, 100 bp, Homo sapiens
ccgggatcgtgaccgagaccgtgaccgagagcgtgaccgagagcgcgaatatcgtcatcgttagaagatgaagtggccattctgcctgcccctcagaacc

SEQ ID NO: 2721 - DNA, 100 bp, Homo sapiens
agtgatgtggaggaaaacaacttcgagggcagaacgctgcatccaggtagtacacaaactgctctgctaccagaagaagtgtcgggtacgcctgcattac

SEQ ID NO: 2722 - DNA, 73 bp, Homo sapiens
aaacacaaagccggctacgcgctgcgaggtttttggattcaaagcataaaaaccattacaagatatacaatct

SEQ ID NO: 2723 - DNA, 100 bp, Homo sapiens
cagttccattctcagttcttcctcccagagctgcagcggcgcctggacgactgggtgcagagcctccagctccaccatgagctgcacgccgcccacctcc

SEQ ID NO: 2724 - DNA, 74 bp, Homo sapiens
cctttggctgcaacaagtatgttgattactcaaggattaattagtaaagatccctgcatgtcactgagtccacc

SEQ ID NO: 2725 - DNA, 100 bp, Homo sapiens
gcaagaggtgtcggaggtctcatctttgaactactgccggagcttctgccaggaatactcccccagttgcaagaggcgcaggaccgtggaagacttcaac

SEQ ID NO: 2726 - DNA, 51 bp, Homo sapiens
caggccccagacatgctgcataggaggaagacaatgtgtggcaccctggac

SEQ ID NO: 2727 - DNA, 75 bp, Homo sapiens
ccgagcctcctcggccttggagagcagcggcggcggcggcaccccgggcgcgatcagtgtgcgtgtgaccaccat

SEQ ID NO: 2728 - DNA, 75 bp, Homo sapiens
gcaaaagcaatgcagcagaacgcagggggcctctgtaaggcacatggaggctcatcttggcagccaacagggatg

SEQ ID NO: 2729 - DNA, 137 bp, Homo sapiens
cagccagacctttgggaactcccagaacataggagaacagggctactcctccacaaactccagtgacagcaggagtttggatcataatacaagagaagcacagggcaaagacactgcataacctcaagaactaagaa

SEQ ID NO: 2730 - DNA, 74 bp, Homo sapiens
caattctgggttttacatcaccggtctgggcagttgtctttgaagcttggtgatgctggaaaccccagaagtct

SEQ ID NO: 2731 - DNA, 82 bp, Homo sapiens
acgcccccgagggtgtagaccgcgcccctggagaggccacaagaggaagctgaatgaagaggacgccgccagcgagtccagc

SEQ ID NO: 2732 - DNA, 100 bp, Homo sapiens
gtgactgtagtccacatggagctctcagcataccgtgcaacagggagtcgtcgcatggtggatgtcatggacgtgaacacacagaaaggcattgaaatga

SEQ ID NO: 2733 - DNA, 113 bp, Homo sapiens
tgcggcagaagccgagttcaacatcctcctggccaccgactcctacaagtttggtgccctggttgtcagatgttggaaagcagtaggacggaacatactcttcgtggttgtgt

SEQ ID NO: 2734 - DNA, 101 bp, Homo sapiens
ttagtgcactcttctccttcacagtaaagtggctggatggcttaaattccttggtccttgatttagattttcctgctttgaggaaaaacaagaacatagat

SEQ ID NO: 2735 - DNA, 82 bp, Homo sapiens
cctgaatgaccaggtgtaaagtgcaagagtaatatgctatgactgagaacaccaatcagggtcttcaggcctggaagattga

SEQ ID NO: 2736 - DNA, 82 bp, Homo sapiens
cgccggcggccaagcagccaaccatgctcaacttcggtgcctctctccagcagactgcgctcctcttttgacttggactatg

SEQ ID NO: 2737 - DNA, 75 bp, Homo sapiens
ctgacagtggtagatacccctggctatggtgacgctatcaactgcagagattgggatctggacaactctcctctg

SEQ ID NO: 2738 - DNA, 51 bp, Homo sapiens
actgggctcctgcaccactgcctgtcagtggctgcagctcagacgactcca

SEQ ID NO: 2739 - DNA, 75 bp, Homo sapiens
cgaagatccggactctgggtgttttgctaccgtgaccgtttaggtctcacagggatactgggtttgggcattgcg

SEQ ID NO: 2740 - DNA, 98 bp, Homo sapiens
tccgcgaagatggcgggccggagtacccaaaggcaagtggaacagctctaatggggttgaagaaaaggagacttgggtggaagaggatgaactgtttc

SEQ ID NO: 2741 - DNA, 73 bp, Homo sapiens
cggcctagcgtcctggaattacttcaatcaataagactttgaccccgacgcaggcttcagtgattgccgcgga

SEQ ID NO: 2742 - DNA, 97 bp, Homo sapiens
ggaggaggctggagtgggcgcggaggcgaccgccatggcgttcctcaaactccgtgaccaggaaatcatcgagttccccatcctaaagctaaatggc

SEQ ID NO: 2743 - DNA, 90 bp, Homo sapiens
gcgtcaacagcagcaccatgggtggagctgatcagaataatgttcagcatcaaccccctggagaacctgaaggtgtacatcagcagtcgg

SEQ ID NO: 2744 - DNA, 83 bp, Homo sapiens
ccgaggcgctagggaagatcgcaccgcggacgcccgctgagcttggcgcacgggccgaccagaggccacaagaggaagctgaa

SEQ ID NO: 2745 - DNA, 87 bp, Homo sapiens
aaggttccgcgccgggcgtggacggtgtggggcggtcccggccccgcaggtgcagaggccaagaccgttttgcccaagaaggagaaa

SEQ ID NO: 2746 - DNA, 97 bp, Homo sapiens
agtcagcctcagaggttgacttctacattgataagctcatgatggagcagtccaagaagtcctccctcatggtggcccgcagtattctcaacaacaa

SEQ ID NO: 2747 - DNA, 98 bp, Homo sapiens
cttggattacaggagatgagagtattgtaggccttatgaaggacattgtaggtagagatcttttcctagcaagctgttcacaagattgcctgataaga

SEQ ID NO: 2748 - DNA, 75 bp, Homo sapiens
acgccatgaccctggtactaaagaaagagcttgttgcggatgctttcattggatttggaggaaatgtgatcaggc

SEQ ID NO: 2749 - DNA, 50 bp, Homo sapiens
gacgaagaaaccgaagggaaagctcagacaaatttacatgtattggagac

SEQ ID NO: 2750 - DNA, 96 bp, Homo sapiens
ggttcgtcgcctccttgcccgtgaccgtcgctagaactcagttgtgcgttgcggccagtcgccactgctgagttgtaagacgttcatcgccgtgtt

SEQ ID NO: 2751 - DNA, 90 bp, Homo sapiens
atttctacctgagcccgctgcagctctccgtgagcaacctgcagctcctacagaagaagggaaaaaagagctgctgttcctaagtaacgc

SEQ ID NO: 2752 - DNA, 100 bp, Homo sapiens
ctgatggtgaatattttgctactgctggaaaggtgaagaagctaagtctcagaaagataactcacccaagaggacacaaggataaacctgatacccatgg

SEQ ID NO: 2753 - DNA, 74 bp, Homo sapiens
taacagtacttgggatcccccagttccaaagtgtcttaaaggtaaaaatgcatttgcaaagggagaaaatgaag

SEQ ID NO: 2754 - DNA, 90 bp, Homo sapiens
ccctacacggatgaggcccggcggtcgcgcctcaaccggctgtacggaatccaagggagcagctgcagatgacggccgattaaaacgagg

SEQ ID NO: 2755 - DNA, 100 bp, Homo sapiens
tgccctccacccatgccatgtccggcaccgccatccccatttctatggtcctcctcacctatggccgctggcagtcaagtaagggagaattgactacgct

SEQ ID NO: 2756 - DNA, 95 bp, Homo sapiens
agtgcttttgccacattcaaactatatcatcatgtacatagaaaaatccaaaggattctgcaaaaaagctactagaaccactgacttcatcaaga

SEQ ID NO: 2757 - DNA, 75 bp, Homo sapiens
atcatccacggggtgctgcagatcctgttccagggactttgaacatgtcggggatcgccctcagcagactcgccc

SEQ ID NO: 2758 - DNA, 88 bp, Homo sapiens
caatcttgaggagtgatccctgtcccagcccctggaaaggggcaggaacgacaaactcaaagtccagaggctgaggggatctggcggt

SEQ ID NO: 2759 - DNA, 82 bp, Homo sapiens
cgaagtttgtcggcccttgccttggcagagctgaggttcgagaacttgtcttggacaattgcaaatcaaatgatggaaaaat

SEQ ID NO: 2760 - DNA, 97 bp, Homo sapiens
cagaggccggggaccttgccaaccctcccaagaagttcagagaatcagcatgattcttcagaggctcttcaggttctcctctgtcattcggtcagcc

SEQ ID NO: 2761 - DNA, 74 bp, Homo sapiens
cttttcttaacctgggaagtggaaccggatatttaagtacaatgggagtaactattcccagtcagaggcgctat

SEQ ID NO: 2762 - DNA, 76 bp, Homo sapiens
agcgagccagcgagccgccgacccgccgagcaaaatggtcatcatcagatttgaaatatttaaagtggatacaaaa

SEQ ID NO: 2763 - DNA, 83 bp, Homo sapiens
cgggagccgggccggcctagccagtctctgctttctatccgtcaagatgataaagtcgtgtgcccgagaaccaaagaagtctt

SEQ ID NO: 2764 - DNA, 74 bp, Homo sapiens
cttctgccaggagatacttgactttgccagccagccgtcagacagcccagacatatctgaagagatggattaag

SEQ ID NO: 2765 - DNA, 96 bp, Homo sapiens
gaaagctgtgtggtgcgagtaactgtacagttcgcccaaaatgtgtggatgaagttgctttccaggaagaagtggttgcagtgctgaaaaaatctt

SEQ ID NO: 2766 - DNA, 75 bp, Homo sapiens
tccttaccagctttgacaatacaggaaatgtttgactactgttcgaagatttttggaagaatactgagaacggca

SEQ ID NO: 2767 - DNA, 75 bp, Homo sapiens
caacgtgctggccaaggtgaagcgcgagcgcgacgagtataagcggaggtcagccagagcagcctccccatgctg

SEQ ID NO: 2768 - DNA, 74 bp, Homo sapiens
tcgaacagcatcttcgactccttcccgacctactcgccgaccttcatccgcgagtctccctctgttgcccaggc

SEQ ID NO: 2769 - DNA, 98 bp, Homo sapiens
gccgcctgcgcacccggcagcaccatgacaggtgtcatggagaaactccagctgggcccagagattctgcagcgggaaaatccaaggcttatttatgc

SEQ ID NO: 2770 - DNA, 117 bp, Homo sapiens
ccgtggccttagctgtgctcgcgctactctctctttctggcctggaggctatccagcgtgcgcgcggagccatggttatcatgtcggagttcagcgcggaccccgcgggccagggtc

SEQ ID NO: 2771 - DNA, 100 bp, Homo sapiens
caaactgcaggctccgaatgcacctgggcttggtgattcccaaggaaggctgcaagattcgatgtgccaacgagaccaatgaaacaaagagtcctcttcg

SEQ ID NO: 2772 - DNA, 101 bp, Homo sapiens
cgggactctgaggaaaagctcgcaccagccaagaagtatgatgcgtttttggcctcagagtctctgatcaagcagattccacgaatcctcggcccaggttt

SEQ ID NO: 2773 - DNA, 100 bp, Homo sapiens
atccgcagaaggggagacacattttatgttgtgtcatttcgaaggcaagttgtccatcttaacttagcagaagattgcatgaataagttcaagcttaata

SEQ ID NO: 2774 - DNA, 95 bp, Homo sapiens
aattgcattggaaaagctgcgggaactcagctttagtggtaaatactggggctgcatgcagcgcctggcctcctgtccagactcctgggtgccta

SEQ ID NO: 2775 - DNA, 50 bp, Homo sapiens
ctcaggcgtgcgcggacggtgtgcgggaacactgacaggccggatgcctc

SEQ ID NO: 2776 - DNA, 90 bp, Homo sapiens
ctcagcagttccctctttcagaactcactgccaagagccctgaacaggcactacaaatactgtggcagcatataatttaacttggaaatc

SEQ ID NO: 2777 - DNA, 100 bp, Homo sapiens
ccccaccaccaccatctccatcacccaccaacaacaccacaataatccacagccaagccaccaaagtccttggcactgtcaaatggttcaacgtcagaaa

SEQ ID NO: 2778 - DNA, 71 bp, Homo sapiens
gtgcccgctgtgcgtgtggacttctacaatgcagacgagctcaagatgtatcggcaagcagtgtaaacgga

SEQ ID NO: 2779 - DNA, 114 bp, Homo sapiens
cgggcaccgcggtgctgctggtcacggccaacgtgggctcgctcttcgacgacggggatatgagactttctactcggaatatcctgagtgttgcgtggatgtaaaacccatttc

SEQ ID NO: 2780 - DNA, 99 bp, Homo sapiens
acggcaggcgtttcacctcctccagcctcccctactgtcctttgggagcctggaccggaagccggaaaaaacccttccctgccaaaggtgactgtgttt

SEQ ID NO: 2781 - DNA, 75 bp, Homo sapiens
caactcaagcacagccagatcttattaaacctcttcctcttcataaaagttgcagtccatgagctgggaaaggag

SEQ ID NO: 2782 - DNA, 100 bp, Homo sapiens
ggaaaagtcaggggagtgttgaagactctgcctcctacaaatatgaaccaacgtccaagaggcccagaagatactcaacaacagcggactccccattact

SEQ ID NO: 2783 - DNA, 75 bp, Homo sapiens
ccaaaatgaaaatttctccaaaaaggatgtcatgttcctggcctggtttacttcaaacagttttgcagaacttgt

SEQ ID NO: 2784 - DNA, 82 bp, Homo sapiens
tgccaccgaggctgaggatgatggtagattgccaggtgcccgtggttgacacgagctgtgtccccagctgttcccgtctaca

SEQ ID NO: 2785 - DNA, 100 bp, Homo sapiens
ccaccggcccagccggcacccaatgcctggcaggtcatcaaaggtgtgctgtttaggtactgcttctccgagatggccccagtgtgtgcggtggttggag

SEQ ID NO: 2786 - DNA, 51 bp, Homo sapiens
gaacaatctcacccaattactctgctcaggatctgtgccagttcagaagca

SEQ ID NO: 2787 - DNA, 101 bp, Homo sapiens
tgccctctgaatctttgtgtttggctgcccaggctcgcctcgactccaaatggttgaaaacagatatacagagctacagagacttctgaagtggagagtct

SEQ ID NO: 2788 - DNA, 75 bp, Homo sapiens
caccaagtagaacaaacagagcttcagcaagaacagcttcaaacagctgctgaaatgggttgcggattgaacaag

SEQ ID NO: 2789 - DNA, 100 bp, Homo sapiens
acagtgtcaatccatccacttctagtcattttacccgtactaccattaaagataccttcttctcagcaaatctatgataaaaaatataagtaacagaaga

SEQ ID NO: 2790 - DNA, 75 bp, Homo sapiens
tggtcatgagctttgtgaacctgggtctgctaccgctgccacggccccccctgctgccccggctggggagggtgg

SEQ ID NO: 2791 - DNA, 100 bp, Homo sapiens
gggagtcctgagatccaaagagaaagtgtggtagtcgctcttctaaaacttttaaaccaaagaagaacattccagagggttctcaccagtatgagctctt

SEQ ID NO: 2792 - DNA, 100 bp, Homo sapiens
cagcaggagggaaaatgaagaaggaacgatctcgtaagaaggattcagacaaggaagatggggagccaaagaccaagcatctcagagaagaggaggaaga

SEQ ID NO: 2793 - DNA, 118 bp, Homo sapiens
tcatcctagggaaaacactatcctctgagatcccagatcatgaggatctagtgaaaagccatttgatgtatgcggtcagagaagaagtggaggtcctcaaagagcaaatcaaagaact

SEQ ID NO: 2794 - DNA, 83 bp, Homo sapiens
gcccaagtccctctactcgcgaggtgctcttacagcctgttccaagtgtggcttaatccgtctccaccaccagatctttctcc

SEQ ID NO: 2795 - DNA, 101 bp, Homo sapiens
cagtgcagcagacttgtccatgctggtcctggagtccctggagaaggcggaagtggaggtggctgacgagctgctgggcgaggccttcttgggcagctttg

SEQ ID NO: 2796 - DNA, 100 bp, Homo sapiens
ctacaacctggtgcgcttccggatcgggggcaagcggaaggtgatgcccaagatggaccagattgcccccgaggaattagcacttgttcacaacttgagg

SEQ ID NO: 2797 - DNA, 100 bp, Homo sapiens
cttccaaaactgaaagatgtcaagagcagtgcaacagcattattgagaaaagcccttacagaagagtgtggccgtaggtcagctattcacagtagtgaat

SEQ ID NO: 2798 - DNA, 90 bp, Homo sapiens
cctttttgtgccaggtgtcccgttaacgtctctgttagttcagagtctgaagatgatgagaaactgaaaaagaggaaggagcgatttggg

SEQ ID NO: 2799 - DNA, 75 bp, Homo sapiens
gttgagaatttatcctcaagagtcagctggcagactcaaacggacatcaccaacagcctactgtgattgttggga

SEQ ID NO: 2800 - DNA, 83 bp, Homo sapiens
aggttttggctctgcgtgagtgtggtctacgagctgtttctcatctttatactcttccaggcgccatgtcagaaccggctggg

SEQ ID NO: 2801 - DNA, 50 bp, Homo sapiens
aggcactcagttggaagagtccagcaagcgcatgattgcaaatacggcca

SEQ ID NO: 2802 - DNA, 100 bp, Homo sapiens
gtccaggttcctcatgggcagtgctcggggtgacaaagaaggtggaacggccaccagacagagaggctttctgggctgcattcggtctctgcagttgaat

SEQ ID NO: 2803 - DNA, 50 bp, Homo sapiens
taaccctcagcctcagagtcagatgcaggactgcttctcggaggagtgcc

SEQ ID NO: 2804 - DNA, 50 bp, Homo sapiens
cacacccttgttttgagatcctctctaagatgtcaagccctccaacatcc

SEQ ID NO: 2805 - DNA, 123 bp, Homo sapiens
ggcttctcccgcgcggggggcgagtaagccagcggcaggaccagcgggcgggggcccacgaacaatgcagatcttcgtgaagactctgactggtaagaccatcaccctcgaggttgagcccag

SEQ ID NO: 2806 - DNA, 100 bp, Homo sapiens
tctgcaccactgcaccccacccattcaagtccacatccccagaaacgaggataatgcttggcacaaggcagcctgcttctgcaaagtggtacgatcgaag

SEQ ID NO: 2807 - DNA, 101 bp, Homo sapiens
ctaaactggagccgtccataggggtgaatggggatatggccgcgtggaaagtgtcaaaattcttcccaagaggggatctgaaggaggagtggctgcctttg

SEQ ID NO: 2808 - DNA, 101 bp, Homo sapiens
ccgcacacctgagccgcccggagaggagcctcggccccgtacccagggggatatgagactttctactcggaatatcctgagtgttgcgtggatgtaaaacc

SEQ ID NO: 2809 - DNA, 51 bp, Homo sapiens
acatgccgcccttcttcccctccgaaagaggattctctatgggaggatgca

SEQ ID NO: 2810 - DNA, 87 bp, Homo sapiens
gcactcgaccaggaccacagcggcaaggtctccaagtcccagctcaagtaagaagaggaggaggccaggcaggcaaaaggagtcatg

SEQ ID NO: 2811 - DNA, 100 bp, Homo sapiens
tgcagcagacagctccctgggcaccaggcagctaacagtgacatattcgatgccatgttccctgtcactcacatcgctggggagactgttatacagcaag

SEQ ID NO: 2812 - DNA, 100 bp, Homo sapiens
gagcgacggcggaacccgtgggcctgtggactgcagcctcggcggtcagcaggaaatcatcgagttccccatcctaaagctaaatggccggaccatggag

SEQ ID NO: 2813 - DNA, 100 bp, Homo sapiens
cgacaagaacttcacgcgggagcaggccctgctgctcctgggggccgccgccctggcctgcctcgccctggacctcctcttcctgctcttctactccttc

SEQ ID NO: 2814 - DNA, 75 bp, Homo sapiens
gtaagatggcggccccgcggcgagttctcctgtgcctcctgttggctctctttgcatctggcctcatccaccgag

SEQ ID NO: 2815 - DNA, 100 bp, Homo sapiens
tggctccctggctggtgccacagcccaaaccatcatttaccctatggaggaactttgtgaaggaagccgaggagatcagctccaaccgccggatgaatag

SEQ ID NO: 2816 - DNA, 98 bp, Homo sapiens
aaaacaaaattctgaactcaggacttggcaagcccagaagaatctgtatctgcatcaacaccagcagagctcaaataaatcctgatgcaatatgtatt

SEQ ID NO: 2817 - DNA, 98 bp, Homo sapiens
ctcgaccccccactgatcgcgctggataaagatgcgcctctgcgatttgcagaaacgcttcgttaagggactcaggcagtacgggaagaacttcttca

SEQ ID NO: 2818 - DNA, 100 bp, Homo sapiens
acaagtgccaagcagacattagacatatcctgaataagaatggaatctccagggttatgatgccaagtctgacatctacagtgtgggaatcacagcctgt

SEQ ID NO: 2819 - DNA, 98 bp, Homo sapiens
acatatctacacctctctaaaattgctgcctctggtggggaagtggaaggttttactgcaatcacagcaaccaaccccatttggcttataaagactcg

SEQ ID NO: 2820 - DNA, 143 bp, Homo sapiens
agactgttagattttgggatcttcgagtaccaagttgtgttcgtgttgttggcacaacatttcatggaactgtgctcgccagaaacccagagctaattatttagaagaccgaaaaaatgggtcaaagctgattgtttttgtaa

SEQ ID NO: 2821 - DNA, 100 bp, Homo sapiens
ggtgtttgtcattcccttgatgtacggtattatgactctgtccccctttgatcaaatgaagactgcctccaatataggtggatttaatgcagcaattaaa

SEQ ID NO: 2822 - DNA, 100 bp, Homo sapiens
ccacggccagagccctggatgtcatttggaaaaacactagagacagacggctggcaggagctccttcccttaacagagctgagagaggcatctggagctg

SEQ ID NO: 2823 - DNA, 95 bp, Homo sapiens
ctgtttctcttctgcagaaaaagaggctcttcctcctcctcccgcgacgggcattgctcccaaaatagagttttctacaaggacagccatcagag

SEQ ID NO: 2824 - DNA, 76 bp, Homo sapiens
cttgccattcctcatatgacctcagagaacacaggatggcccccgaggtggtcatgtgtgagaccatgaaagacac

SEQ ID NO: 2825 - DNA, 90 bp, Homo sapiens
tctagcccagccgaatccgcgtcgggctgtaactcgagtgccaggtaaattcaactggaagggaactattaaagcaattctgaaacaggc

SEQ ID NO: 2826 - DNA, 100 bp, Homo sapiens
cctcgcagggagccatccgattacctggagtagaacagaaaaattattatgtctgtgttcccttgggactcattggaaattgtacagtgacatcttctgg

SEQ ID NO: 2827 - DNA, 95 bp, Homo sapiens
tgtcagtttcctgaggcctccccagccacgctttctgtacagcctgcagaacttgttcatctgtagcttcatggtggctgcccccatcttcggct

SEQ ID NO: 2828 - DNA, 51 bp, Homo sapiens
gcctgggcggtgcggacaagcgcctgcgagcatgaagactttttaacagtt

SEQ ID NO: 2829 - DNA, 76 bp, Homo sapiens
gtggataggcctgtgacgaaggtgctaccatcgtgagagtaagtgcaccaccagcactgcatgcatgtgtgtctat

SEQ ID NO: 2830 - DNA, 74 bp, Homo sapiens
gtgcgtcatcctaaggaacatcgacgccagctgcgggccgtccagcggctgtgccacttctacagcgccgtcat

SEQ ID NO: 2831 - DNA, 78 bp, Homo sapiens
atggctataatgggtatggaggaggacctggaggtgccgaaagggccggttgagggatatgaggagaatgaggagttt

SEQ ID NO: 2832 - DNA, 51 bp, Homo sapiens
ctcttgagtagctgggacttcagggacccagcctccaacactgccccgctc

SEQ ID NO: 2833 - DNA, 98 bp, Homo sapiens
gtgaagtataaggatcagatcaagaagatgagagagggtcctgcaaaggaaaatttgctgtttgatgaatatcataaattaaagctgattgactttgg

SEQ ID NO: 2834 - DNA, 75 bp, Homo sapiens
gcaccagattggaaacacactgatccgattccacagtggtgtgtggagtacatgcgatcattaccaggacccaag

SEQ ID NO: 2835 - DNA, 100 bp, Homo sapiens
ttagaggagtatttcctgaactgtgtggtgaagctgtggtctaccaatctagacaactcagtggcaagcattgaggcaaaggctaatgtgtgctgtgtta

SEQ ID NO: 2836 - DNA, 100 bp, Homo sapiens
gacctgcccgagtgcgtccaggtgtactccatgggcggccccaaccgcttctacttcctcgagttgtccagtgtacagaagcttactggaaggagtggcc

SEQ ID NO: 2837 - DNA, 83 bp, Homo sapiens
cccggccgcagcgcaggcagcccagcagagtcctgtgtatggaaactcacatgagtcagctcagtctagaagggtagtaattt

SEQ ID NO: 2838 - DNA, 101 bp, Homo sapiens
aacagggatttggtgccaactggagtcttggtgacaaatggtacatttctggatttgggaatgagtgttcttcagaggatcctcgctgcccaggttccctg

SEQ ID NO: 2839 - DNA, 74 bp, Homo sapiens
cagcagttcccagaaggactcttctatgagggcccctgggtagacagacacagcttgatttcagagcagacata

SEQ ID NO: 2840 - DNA, 100 bp, Homo sapiens
atgaaacccttgtgcatagctcctttaagatttgaaagaagccaacactaaaccacaaatatacaacaaggccattttctcaaacgagagtcagccttta

SEQ ID NO: 2841 - DNA, 100 bp, Homo sapiens
tcttgagaactggctgccagtctcctatgtcccctattatctcccctgcccagagatcttgtatctcaggagattacatttcagcttgaaaaagggtcgg

SEQ ID NO: 2842 - DNA, 101 bp, Homo sapiens
aaggccaatgttggtgctggcaaaaagtacctttgtgttggatgaatttaagcgcaagtactccaatgaggacacactctctgtggcactgccatatttct

SEQ ID NO: 2843 - DNA, 98 bp, Homo sapiens
ctaaattaacaatggcgaaatgcaggcgaaatgtggaaaatttcctagaagcttgcagaaaaattggtgtacctcagcaaccatctttcctgtgaaaa

SEQ ID NO: 2844 - DNA, 100 bp, Homo sapiens
gatgatgattttggaaagaaagattgtccctggccttggtaaaaatgcatttgcaaagggagaaaatgaaggccaaacagaagcaggctccagcttctgc

SEQ ID NO: 2845 - DNA, 83 bp, Homo sapiens
ctatcagccactaatgaagttgggaactcagaccgtaccttgcaacaaggtctcccaacatttgattcgtcctctgatgggca

SEQ ID NO: 2846 - DNA, 75 bp, Homo sapiens
ccgcaacatccactccttggaccacctcaactactacccacagatggcatgatccgaaaacactctcatgtcaag

SEQ ID NO: 2847 - DNA, 100 bp, Homo sapiens
ccgctgtgcctgctgctgagcagcgccgcggctgggagtgtccactcgccttccaccagcatggcaacgtcttcacagtaccgccagctgctcagtgact

SEQ ID NO: 2848 - DNA, 107 bp, Homo sapiens
catcgtgtgcctgatgatcacgcagctggctggcttcagtggaccagtgatctttgacgagactctacagaagtgcctggactcctacctgcgctatgtcccccgca

SEQ ID NO: 2849 - DNA, 98 bp, Homo sapiens
gcctggaggctccgacttcctcatgaagagactccagaaagggaatcctcactatggatgggctcattgaggacattaagcatcggcggtattatgag

SEQ ID NO: 2850 - DNA, 51 bp, Homo sapiens
ctacaaaaacctggtcttcttggttggaagttcatgaggctaagcctgtgc

SEQ ID NO: 2851 - DNA, 99 bp, Homo sapiens
atactttctgtcagccagaaactgtgaactccggagacggcattgactacagccagcagaagagggagaacattggggacttgatccaggagacactgg

SEQ ID NO: 2852 - DNA, 83 bp, Homo sapiens
tggttaaatcagcagatggagtaatcgtttcaggagtaaagatgttgaaagtgtgatgaacagtgtggtatccctactcttga

SEQ ID NO: 2853 - DNA, 82 bp, Homo sapiens
gcgaacgagcgacggcggaacccgtgggcctgtggactgcagcctcggcggtcagcagcgcgagcccagcattgacctgctg

SEQ ID NO: 2854 - DNA, 100 bp, Homo sapiens
gatgaaacttattgaacaggatctgtgtcgagatatcagttttagagaatgtggcgtggagaaattctcaaggaaagagtaaaatgctggtgatgtgctg

SEQ ID NO: 2855 - DNA, 125 bp, Homo sapiens
cagttctgattctgcccacttactggctttgattttaaccaacttctcttgtcctcgacttatcagatgtagacttcctagatgattcttcaacggagagtttgcttctgagtggggatgaatac

SEQ ID NO: 2856 - DNA, 82 bp, Homo sapiens
caggaagtggaaagagagcaaggggaaggatcgggagtacacagacatcatccggcactatgtcgtccgaggcccagagatg

SEQ ID NO: 2857 - DNA, 100 bp, Homo sapiens
tggatttgatccctgtgaatgtgtttgctctcatgaacatgcaatgagaagactgatcaatctgccaggactaaaagaagtggtagaatcctgtcgagga

SEQ ID NO: 2858 - DNA, 98 bp, Homo sapiens
tcggagtctcccgcgcgcacctcagccgcctcctagcggcgcggcgctcgctcctacggaggaaaaggcttctcttttacatcgtactcaggaagaaa

SEQ ID NO: 2859 - DNA, 73 bp, Homo sapiens
gcagattgatgataatgtgacgtcagccgtagaaggcatcaacagagagaagaagaaggaggttcctgctgtg

SEQ ID NO: 2860 - DNA, 75 bp, Homo sapiens
agatgcttcagagagaggaagccgaaaacaccctgcaatctttcagacaggttatggaaacaaaggacatgcttt

SEQ ID NO: 2861 - DNA, 90 bp, Homo sapiens
agagaagtttggcaaattggctaagttcctacagctagaatcttttgggtgagttgtgaggctggcacctacattcggacattatgtgtg

SEQ ID NO: 2862 - DNA, 87 bp, Homo sapiens
agcaagtgcatgcgcgccatggtctcagtcagcatgtctatgagcagttcctgctgcagcttcagatgcaccagcaaggaatactga

SEQ ID NO: 2863 - DNA, 89 bp, Homo sapiens
cacctccattggatttaaaagacagtcctcgtcagcactgactttcagctatggaatcgatgtgatgactgaagcccaccacaaatatg

SEQ ID NO: 2864 - DNA, 100 bp, Homo sapiens
caaatggctgtcaccaactcagatctcttctataggattcaccttggctgataaagtggatggtccattcttcctggagatagattttattggcgtgttt

SEQ ID NO: 2865 - DNA, 75 bp, Homo sapiens
gacctagtgggcgttgcctttagacccagacccaacatgagtgaagtttcctgcaagaaacgggacgactatttg

SEQ ID NO: 2866 - DNA, 100 bp, Homo sapiens
gccggactggagggagacaaagcagcgcccgtctgcttcgggcctctggaatttagcgctcgcccagctagccgcagtgtatgtggtagaagaccaaaga

SEQ ID NO: 2867 - DNA, 100 bp, Homo sapiens
tgctggtggcagggcatgaggacagcaatggttgtatcaactatgaagcaagccagggctgagcaggaagaagaattcattagtaacactttattcaaga

SEQ ID NO: 2868 - DNA, 100 bp, Homo sapiens
ctttccacttcctaagggaagaaaagatttggatgatgaagacagcaatccaaagggaagggaattcaggagcggacatgataagcatacataatgaaga

SEQ ID NO: 2869 - DNA, 80 bp, Homo sapiens
ccgacaacagcctggcgtccgccacgaagaaaaagtcagcactttttgaagtgtctgaggttataccagtcatgacaaat

SEQ ID NO: 2870 - DNA, 82 bp, Homo sapiens
cccagcccaaaccaggagattgcgagggagcgatgcggtgcagcgcgagtcttctgaagaggagtctgatgatgaaatagca

SEQ ID NO: 2871 - DNA, 73 bp, Homo sapiens
cggagtgttagaatatgccatgaaacactttggagagctggtctttcatggtgctgattcagacatagaatgg

SEQ ID NO: 2872 - DNA, 75 bp, Homo sapiens
taccccagacccctcagcgtctggcatctggattctcgcaggagccacagctaacaaggcttctcataacaggac

SEQ ID NO: 2873 - DNA, 95 bp, Homo sapiens
aggagcgacttgacaatgtccctcacaccccttccagctacatcgaaacgattaaactgcaaatatctcatgaagctgctgcctgtatcactggt

SEQ ID NO: 2874 - DNA, 75 bp, Homo sapiens
attggattggcatctttagaatcactttgggaagcagtgacatccaacctgtatcaagtcttctaatctgtgaac

SEQ ID NO: 2875 - DNA, 98 bp, Homo sapiens
tgacctgaatcctgaattttccttgatggtcaaaagattaagaatcctcactatggatgggctcattgaggacattaagcatcggcggtattatgaga

SEQ ID NO: 2876 - DNA, 75 bp, Homo sapiens
caactggtcgtcttcagttaatggcaagacttgcagagggtttcagatcgacaaagctatcttgtcatatctttg

SEQ ID NO: 2877 - DNA, 50 bp, Homo sapiens
tccccatcaccggcacacattgtcgctcttgtcaggatggtgaagctgtt

SEQ ID NO: 2878 - DNA, 75 bp, Homo sapiens
ggccacgcagaatgtcccgcccccaccctaccaggacagcccacaggaagatgaagtcctcagtacattctgaag

SEQ ID NO: 2879 - DNA, 100 bp, Homo sapiens
ccatcttcggcatgtccttcgcctgccagtcggcagctggtggaatttttgaagaaaatggaatctcgaggccccctttcgtgcgacacggttctgaaga

SEQ ID NO: 2880 - DNA, 97 bp, Homo sapiens
acaagggcgcatatcttcaaagcacctagtacctcctaccattgtcaactggtgtcatggagaaactccagctgggcccagagattctgcagcggga

SEQ ID NO: 2881 - DNA, 90 bp, Homo sapiens
gttagtgctcaagagcctcattatctaccacccgagatgccccaagatgttggggatcagccaggtgaggtaggttattcaggctctcct

SEQ ID NO: 2882 - DNA, 83 bp, Homo sapiens
attttaagaaaaggcattgaggaactcaatcaaaccagtattcttttcacacaggaattacatgaatgacagtcttcgaacca

SEQ ID NO: 2883 - DNA, 98 bp, Homo sapiens
tcccgtttacaggtccttggctggaagaggctggataaaatactgcattgttgattcttcaccacactgaaaccattaggaaaaatccttgtggttaa

SEQ ID NO: 2884 - DNA, 50 bp, Homo sapiens
ctgagggcagagactctcccggtaactaggatttctacctcaaccgcgag

SEQ ID NO: 2885 - DNA, 75 bp, Homo sapiens
gtccatctcgcagtacagcggcaagatcaagcactggaaccgcttccgagactctttcccagggaactccgatga

SEQ ID NO: 2886 - DNA, 75 bp, Homo sapiens
agcgtgggtgaagataggatcaagatggccatgtggcaggatgatgaggagtctgatgaggaagctgtgaagaaa

SEQ ID NO: 2887 - DNA, 75 bp, Homo sapiens
aactgtgtgtatccttgggatgaaaatcactgtaaagagaagaggcaaggaccccacagaacacatacctgaaat

SEQ ID NO: 2888 - DNA, 101 bp, Homo sapiens
tggctacctcgtggacaagtttgcagatcgggagcgcaaggtcgccctcaaggccatgatcaaaacgcgtgaattacccttcactaagtcggctcatctca

SEQ ID NO: 2889 - DNA, 112 bp, Homo sapiens
cagaccctggagcctcagttggaagcagccgatccagcctgcggagcctgtggggcagaggtctgcggggtttccgagaggctcgccgggatttctggcggggggctgagag

SEQ ID NO: 2890 - DNA, 100 bp, Homo sapiens
tttaaatccggagggggaaaaaatcccaaggtctgcaaagactcggggtctaaatgtgagaccaagaagttacctccaaatcaatgcaacaaatctgggc

SEQ ID NO: 2891 - DNA, 102 bp, Homo sapiens
cccaagttgtcgacgaccgacagggtggtgaaaggttgctccgactgtgtgttccaggagtggtggctctgaggtgtgaccctgcccacgtttgggcccagc

SEQ ID NO: 2892 - DNA, 85 bp, Homo sapiens
atgatgaaatcaccccggatttgtggcaagaagcatgctggattgtaatcagggatgaggagaatttctgtgccactgtgcccaa

SEQ ID NO: 2893 - DNA, 75 bp, Homo sapiens
tgagaattgagagcctttcatcccagctttctaatctacagaaagagctagagatgatcgctatggaaaatcctg

SEQ ID NO: 2894 - DNA, 90 bp, Homo sapiens
aagagaagatcatcgagcatttcaaacggtattttgaaggtggcgtctcatctgtctacctctgggatctggatcatggctttgctggag

SEQ ID NO: 2895 - DNA, 99 bp, Homo sapiens
gttgcgggtcatggagtcccgaaccctcctcctgctgttctcgggagccgtggccctgatccagacctgggcaggtggagccgccaccaaaatgcagat

SEQ ID NO: 2896 - DNA, 90 bp, Homo sapiens
acaggccctatggggcatacctatggctttattgacctcgactcccatgcgcccagtggcacccgactcgctctcctctccctcaccgac

SEQ ID NO: 2897 - DNA, 90 bp, Homo sapiens
cgcaggcccgctccatagcgcacgtcgggacggtccgggcggggccggggggaagaaccctgccatcagcatcactgaaaacgtgctgca

SEQ ID NO: 2898 - DNA, 82 bp, Homo sapiens
cgacaagccgctggcagccgcggatctcaccgccgctcaggacggcgggcgctaacaccaccgacaaggagctagaggttct

SEQ ID NO: 2899 - DNA, 75 bp, Homo sapiens
cgcggcggcaccgggaggccgggccgagcggtgttacacataatattgcattacttcgagaggtgataatcaact

SEQ ID NO: 2900 - DNA, 100 bp, Homo sapiens
caaaaaatgatttggtggtcagcttgcctgaggagtggtctggaactgaaagtgatgcgtatttctgagttatgcctgtatttaagaagctgagtgaaac

SEQ ID NO: 2901 - DNA, 120 bp, Homo sapiens
cagacggccagaaagttccgccatgagctggggcacggagctgtgggtactaggttttgacaagcttgcatcatgcgtgagtataagctagtcgttcttggctcaggaggcgttggaaag

SEQ ID NO: 2902 - DNA, 100 bp, Homo sapiens
ggcccgacgaggaagttttctactgtaaagtcaccaacgagatcttccgccactacgaattgaccctaaggtggccttccctcggcgagcacagcccaag

SEQ ID NO: 2903 - DNA, 76 bp, Homo sapiens
tggctcactatgataacgttatctgtcagataacgaaggaggcccaacttcattcaataaggagcctgacggattt

SEQ ID NO: 2904 - DNA, 75 bp, Homo sapiens
cttgcctcggtggttgccatggcaccagggacggtgactgtggttaagcagcatacaagacagtatctggagtca

SEQ ID NO: 2905 - DNA, 90 bp, Homo sapiens
agcgagctgagtggttgtgtggtcgcgtctcggaaaccggtagcgcttgcagcatgcctgagacctcagatcattgttccctcccagagg

SEQ ID NO: 2906 - DNA, 50 bp, Homo sapiens
ctcaggcgtgcgcggacggtgtgcgggagagaggctgaggcggagctgag

SEQ ID NO: 2907 - DNA, 100 bp, Homo sapiens
cagaggtgatccctgggcctccatcagagagccctggcatgctgactaagctccagggaggcacctcccgaactaacaacttggagaccgggccctccac

SEQ ID NO: 2908 - DNA, 101 bp, Homo sapiens
gtgaagccacacagtgtccagatacgaggcaatctgcagagcgctgtgtaagcacattgcttgatctaatccagaccaaagtgaattatgtggtccaagaa

SEQ ID NO: 2909 - DNA, 100 bp, Homo sapiens
ggggcccggacagaagatggtgcagaagaaaccagccgaacttcagggtttccaccgttcgttcaagcctatggaggctccagtcatgctgtgggatgag

SEQ ID NO: 2910 - DNA, 100 bp, Homo sapiens
cttatcggatagggaaaaaaaatgtcgccaccttttatgcccagcagctgtcggaaaaggtaacagaagatggaactcgaaatcccaatgaaaaacctac

SEQ ID NO: 2911 - DNA, 90 bp, Homo sapiens
agaattcagaaggagctggcggacatcactttagaccctccacctaattgcaggttcactaagaatctttccccagacaaaatcaacctg

SEQ ID NO: 2912 - DNA, 50 bp, Homo sapiens
ctggcccggaaacaggaggactggtgctcatcggggactcaggcgtgggc

SEQ ID NO: 2913 - DNA, 82 bp, Homo sapiens
tggacctcttcaccaactacatctcactctacaacacgtgtatgaaggccatcatcaacagcactgtcactcccaacatgac

SEQ ID NO: 2914 - DNA, 95 bp, Homo sapiens
aaacagacattcaacatgattgcatttgaagctgtgggtgagcgtggaggatgctcagatgcacaccgtcaccatctggctcacagtgcgccctg

SEQ ID NO: 2915 - DNA, 100 bp, Homo sapiens
gaagcactctcacttattaaagatcttgggccgcgatgggcctcttggaacattggtgtgttcatctgcattcgatgtgctggaatccacaggaatctgg

SEQ ID NO: 2916 - DNA, 99 bp, Homo sapiens
ctagaaatctcaaagccatgtctcagcacaatcctggaggaagagaaggctcagcaagaagagcgcatgaggatggagtccagaagacaggccacagtg

SEQ ID NO: 2917 - DNA, 100 bp, Homo sapiens
cgggcctccatgttttccaaaggcagtgatgtgtggaggccctccctatcctgaagacattagctgagagtctggcaccttttaaaggtctgatcatcaa

SEQ ID NO: 2918 - DNA, 83 bp, Homo sapiens
ctatgacttgctaaacaatctgttggaatctaggtaaaaatggcttatctaacagtagcattttgttggataaatgtccacct

SEQ ID NO: 2919 - DNA, 83 bp, Homo sapiens
taatgcaatggtctcaatctctggaaaaacttcttgccaaccaaaacacgatgaggcgagtggtacgacagagcaagtttcgg

SEQ ID NO: 2920 - DNA, 75 bp, Homo sapiens
cctagggctactgttgattttgactatcttcttagtggccggaatttatcatggcatccagcattgaccactaca

SEQ ID NO: 2921 - DNA, 88 bp, Homo sapiens
gcttgagacagtgaatatgtgcgagcccttttacatctctcctgcgtcggtgactaagaatcatgtcaaccctgccatggacttcacg

SEQ ID NO: 2922 - DNA, 83 bp, Homo sapiens
gggtccggggagcccgactcggaccgcggagacctgcctagagctggaacgttacctccagagcgagccctgctatgtttcag

SEQ ID NO: 2923 - DNA, 83 bp, Homo sapiens
ggaggatgacggagctgcagtcggcactgctactgcgaagacagctggcaggatgatcggctgaatgtaacagaggaactaac

SEQ ID NO: 2924 - DNA, 96 bp, Homo sapiens
caaagatggcggcagggaccagcagttactgggaagttctttatagctccaagctctacagattcttcaaatatattgagaatagggatgttgcaa

SEQ ID NO: 2925 - DNA, 100 bp, Homo sapiens
gaggaagcaaccatttcagtctgcaggtcattaggaaccctcacccagaatgaaatgatatttaagcggctgcacctgggcaccgtgtcctatggcgccg

SEQ ID NO: 2926 - DNA, 96 bp, Homo sapiens
tagccctttgggagagttgtgtccaccagaggagaaggcagagcccccccaggctatgaatgccctgatgcggttgaaccagctgaagccagggct

SEQ ID NO: 2927 - DNA, 74 bp, Homo sapiens
agtcacccaagtgcattgcctttggaaacgagggtatagaacttgaccagttagacttacgaagagatattgcc

SEQ ID NO: 2928 - DNA, 75 bp, Homo sapiens
taaaattacgaactcactgagctggaagtcattcaacgggaattgaatagcgcatggatttaggagaatgtacca

SEQ ID NO: 2929 - DNA, 96 bp, Homo sapiens
gcagagagctattattccctgtattaaaggatcatcaaaattttttgagactcctcacagaaactgaagactggctgtatgaagaaggagaggacc

SEQ ID NO: 2930 - DNA, 98 bp, Homo sapiens
cccttgcaacaaaggcagactgagcgccagagaggacgtttccaactcaaagattggagacacaaaatcagaaattaagattctaagcataggcggag

SEQ ID NO: 2931 - DNA, 100 bp, Homo sapiens
atgtctcgctccgtggccttagctgtgctcgcgctactctctctttctggcctggaggctatccagcgattctgtttcactgaggccatctatccgattt

SEQ ID NO: 2932 - DNA, 100 bp, Homo sapiens
gccaaccagcagcaggtcctgcagcggaacctggagcaggagcaacagcaacgagggggtcccttggggaaaccaggccttccaggaatgcccggtgctg

SEQ ID NO: 2933 - DNA, 89 bp, Homo sapiens
gccaccgactcttgtatcatgagcattggatttgatcacatggatactcctgggcatggaagtggatgggctgagactcctcgaacaga

SEQ ID NO: 2934 - DNA, 100 bp, Homo sapiens
gtgttttcagctgcctactagacctcactacctggatggcccacagttttactgctcggattacagaattaatgcaagtactgaaggatttaaatcatgg

SEQ ID NO: 2935 - DNA, 75 bp, Homo sapiens
tctccgagtccctcaactctctacgctttgcctccaaggctggaagggagtggcgcaatcatggctcaaatgcag

SEQ ID NO: 2936 - DNA, 75 bp, Homo sapiens
tgctatcgccgcaaggatctctggaaggatgaagaccggattttcaccaacctgtacggccgccatgactggagg

SEQ ID NO: 2937 - DNA, 51 bp, Homo sapiens
caccgaggaccagctcaatgacaggggagatggaaccctgagcagcccatg

SEQ ID NO: 2938 - DNA, 51 bp, Homo sapiens
ccggctccgggatgagcgcacggacgggatcttaaatgtatttcggcattg

SEQ ID NO: 2939 - DNA, 82 bp, Homo sapiens
ctcggcagccttgcgctgctctaatggtccggacttccgtgtgttgctaggatactgggcgttaccaaggagatgcagaccc

SEQ ID NO: 2940 - DNA, 75 bp, Homo sapiens
aaaccacatggctatctaaagagcagtcctgcgttaactgcggccgggaggctatgagcgagtgcaccggctgcc

SEQ ID NO: 2941 - DNA, 100 bp, Homo sapiens
ctcctgctgccttcccgtcgccgctcccgaagcttttccaggggcgtttatgcaatgagcctttggatatgtacagttacttgcacaaccaagggattgg

SEQ ID NO: 2942 - DNA, 100 bp, Homo sapiens
tttactgaatgaacaaaggccggggctggaatcaggcagggcttgagcaagtcgtggctccacgtgctaggtgtcgtgaaaactacccctaaaagccaaa

SEQ ID NO: 2943 - DNA, 71 bp, Homo sapiens
cagcctcccgagtggctgggattacaggtcagttttagaattagcctgtctaagtcaggcatggtgccacg

SEQ ID NO: 2944 - DNA, 75 bp, Homo sapiens
attcatctgtccagcatgactcatccccgggagtgttgaaatgaagaacaaattttggtattttgagtttggcac

SEQ ID NO: 2945 - DNA, 75 bp, Homo sapiens
gacgaagcttggaagttgcagaagaattggcttggaaacgaaattgaggttatggtcagtactgaggaagccaaa

SEQ ID NO: 2946 - DNA, 100 bp, Homo sapiens
aatcggggagcttacccagcttaaagagctccacattcaggggaaccgcctcaccgttctgcccccagaactagtacctggagtagaacagaaaaattat

SEQ ID NO: 2947 - DNA, 83 bp, Homo sapiens
gccaaaggcaccccgattgtcgatgggctcgctccagaggacatgagcaaggagcaggtaggatccatgccaaaagagcttct

SEQ ID NO: 2948 - DNA, 96 bp, Homo sapiens
tgaataagtgggttcgttgtatttgtgacatctgtgggtttaatccaacagaagaagtggtggatctgaaccttctaacagaggaggtaagattat

SEQ ID NO: 2949 - DNA, 97 bp, Homo sapiens
ctgccgctcatcgccatcacccgcaacccggtgttcccgcgctttatcaagattatcgaggtgttcatgaagtctgtgaagctggagtgggtgcaag

SEQ ID NO: 2950 - DNA, 100 bp, Homo sapiens
aagcatcttcaatgtctgtgggctgttgcaaggaattgcagggcctcatctttgtggtggacagtaatgaccgggagcgggtccaagaatctgctgatga

SEQ ID NO: 2951 - DNA, 75 bp, Homo sapiens
agggaacaagaattgcaactgcatccgagaaagacacatgacggaagtgtgtatttttgggccactccacggcag

SEQ ID NO: 2952 - DNA, 75 bp, Homo sapiens
cctagaccttccagcagtactttggtggacgagttggagtcatctttcgaggccattacagccatgggcttcaag

SEQ ID NO: 2953 - DNA, 83 bp, Homo sapiens
aggagttcgagcagatcgacaagtccgggagctgggcggccatttaccaggttgactatagtcaatggggccaatggagccaa

SEQ ID NO: 2954 - DNA, 101 bp, Homo sapiens
aggagtcggaagaggtctcacgaggctgtcatcaccgccatgcccaagaataaaggtcctgactctagatcctacgttacacatgaagccaaagcagcaga

SEQ ID NO: 2955 - DNA, 150 bp, Homo sapiens
gtcgctggtgcagctcaacgagctgctggaggacgagggccagctgacggagatggtgcagaagatggaggaggccgaatacatcaagcaatggtaacatctttaaatgaagataatgaaagtgtaactgttgaatggatagaaaatgga

SEQ ID NO: 2956 - DNA, 100 bp, Homo sapiens
gggaaaacactatcctctgagatcccagatcatgaggttgaagatgacagcgatgcagagacctatggagaagagaatgatgaacagggaaattattcta

SEQ ID NO: 2957 - DNA, 88 bp, Homo sapiens
tatttgtggcttaaactcttggcatttggctttgcctttctggacacagaagtatttgtgacagtgctgcttttgacacaaaaacggg

SEQ ID NO: 2958 - DNA, 75 bp, Homo sapiens
tagaattggcaaagttattgccagcttcctggtgcatcatttctggcatggcttcaggaagcattgtgctatttt

SEQ ID NO: 2959 - DNA, 96 bp, Homo sapiens
cttgctcctctctccttggcctctcctgggatcggcccaaggccagttctccgcaggatagtccacatcacaagctgcatctgtttgagaacccag

SEQ ID NO: 2960 - DNA, 100 bp, Homo sapiens
gtagagaggaccccggtacatctgaaagccgggaaatggagcttgtacctccaggcccatacatccttccaaagctcccaactaccctacagagggaaac

SEQ ID NO: 2961 - DNA, 96 bp, Homo sapiens
catgccccagccagtccccacagcataacagggtatgcagaagttggctagtcaatacctgaagagagattggcctggagtaaaagctgatgatcg

SEQ ID NO: 2962 - DNA, 75 bp, Homo sapiens
ccgtgtccgggctacctgtttgaagagattgctacttcctgtccacttccaacgaagcggtctataagatctttg

SEQ ID NO: 2963 - DNA, 83 bp, Homo sapiens
cagacccctccagacatccaatcagagcattcaagggatggtgaaatggatgatagtcgagaatgaagaatccccacctgagg

SEQ ID NO: 2964 - DNA, 75 bp, Homo sapiens
gggttgttcacctgcccaaaaattgtgtcttgaggctcttgcagccaatgccggaacaggatttgctgttgctga

SEQ ID NO: 2965 - DNA, 100 bp, Homo sapiens
gtccttcactcacgccatgcagctgctgacggcagctgttctccatagtggtgttcggctccatcgtgaacgagggctacctcaacagcgcctccgaggg

SEQ ID NO: 2966 - DNA, 100 bp, Homo sapiens
cgaacactctttaatggaccagatcaggatttgagcggaagaacgaatgtaactttaagaatgagtccctggaacgccagatgcgtgaaatggaagagaa

SEQ ID NO: 2967 - DNA, 51 bp, Homo sapiens
gatgcacaagttccaaggttacgtttcagctctatcaaagaaagcaagaga

SEQ ID NO: 2968 - DNA, 98 bp, Homo sapiens
aacacagtggacgtcaataatgaaagctcttcagagatcgtactgagaagcactccacaatgccagactcacctgtggatgtgaagacgcaatctagg

SEQ ID NO: 2969 - DNA, 100 bp, Homo sapiens
tattgataaagtaacacgccctcaagagctggatttgacacatcaagggcagccaattactgaggcagatgatgttgagggcaaaattagacaaatcatt

SEQ ID NO: 2970 - DNA, 98 bp, Homo sapiens
cgccaaggccaccctctactgccgcgtcttcctgctcgacgggaccgaagtgagcgtggacctgccggctcttgcagccaatgccggaacaggatttg

SEQ ID NO: 2971 - DNA, 100 bp, Homo sapiens
ccgcgaggtggcggtgctgaggcacctggagaccttcgagcaccccaacgtggtcaggaacgccagcgcctggagaccatcctgaacctgtgtgccgaat

SEQ ID NO: 2972 - DNA, 100 bp, Homo sapiens
tgaaggatgaaggagccagtttggctgaaaataaaagggtttcccaaactctcgattgcctcttgcaagcagatgacctgggagcaaatgttatggcaga

SEQ ID NO: 2973 - DNA, 75 bp, Homo sapiens
tatgaactgcataaaaaagtttctccaaatgagctcatcctgggctggtctccagtccccagatttctgtgcatc

SEQ ID NO: 2974 - DNA, 100 bp, Homo sapiens
gtcacaaaacagcagatttcccaagagcagcggaaaatgatccagtcacaggagtaccagtaagtagccgggtgtcagcaaaaatccagcagcttgtcaa

SEQ ID NO: 2975 - DNA, 100 bp, Homo sapiens
ccaccgtttccccctgttgcagggttttgtttatataactcaagttgtttggctaaattcttcagaacttcatggaggaacacggagtgacccaaaccga

SEQ ID NO: 2976 - DNA, 90 bp, Homo sapiens
attcgggatgctctgagacccccattacaaaatataaactctgttcaggaaagtaatggaccagtgaaggtgtggggaagcattaaagga

SEQ ID NO: 2977 - DNA, 75 bp, Homo sapiens
catgagacaaatgcgctcagcttcaattgcttaaagcttttcaagccaggccaagaagctgtgaagtaccagggt

SEQ ID NO: 2978 - DNA, 100 bp, Homo sapiens
actgggaggagcgccggaacgccgaggcccagccccctctcccaacaactccgacacctgttccaagggaacctggccggaagcctctttctagctcccg

SEQ ID NO: 2979 - DNA, 75 bp, Homo sapiens
acctatatcagcaagaccatcgccctggtcaactgcggccccccactgaggtggagattctggacgcaaagacaa

SEQ ID NO: 2980 - DNA, 95 bp, Homo sapiens
tgagctgaaagcgaaaaactatgctgaccagaccttgtcagacccaagcagtagactttcaacttctcctcctcctccagcaattgcagttccct

SEQ ID NO: 2981 - DNA, 100 bp, Homo sapiens
gaagcatcgaaagcgttggagaggtgttaccggaacggcggcgacaagggtgttcccgaactagagtggaatttcgctaaggagtttgtgatcagtgatc

SEQ ID NO: 2982 - DNA, 74 bp, Homo sapiens
tgtgtatccatggagacaagagtcaaccagaaagagattgggtacttaatgggattgtcaatgaggcagatcag

SEQ ID NO: 2983 - DNA, 100 bp, Homo sapiens
gcggaacatccggaggctgggaaatggagtgccagcttctctcagggcaccagagcctcttttctcatgaggagtgacacagctgtacaaaaacttgccc

SEQ ID NO: 2984 - DNA, 50 bp, Homo sapiens
ccctaattaacacaacagagtctctcaggcgatcattatttcgaagttct

SEQ ID NO: 2985 - DNA, 75 bp, Homo sapiens
cagcgagctggagccgccggaggtattgcgcagcgatgcacggccatcaagtaccacttttctcagcccatccgc

SEQ ID NO: 2986 - DNA, 90 bp, Homo sapiens
gctttcatcttacccctgaacttcccttcctctgaaggcgccaggaactccgagagcttcggctgctccagaaagaagagcatcggaacc

SEQ ID NO: 2987 - DNA, 100 bp, Homo sapiens
aaaacaaaggggatttggtgatggaggctttgttagaaggaatacaaaatcgagggcatgctattgacctgaaaagtggttctggaaaagtgtaccaagg

SEQ ID NO: 2988 - DNA, 82 bp, Homo sapiens
cgcccccgggctcgcggcctgcagtgttctggacttggtgcctctttctgttatatgctttcctatttagttgggagaccag

SEQ ID NO: 2989 - DNA, 98 bp, Homo sapiens
ctaatcttacaacagcacaaattcatctaaccaggtcagtttaggggctggtgcaaaggatgagttgcacattgttgaagcagaggcaatgaattacg

SEQ ID NO: 2990 - DNA, 51 bp, Homo sapiens
ttcgcagtggtcgcttcttctccttgaggagtgaatgtcgttccttttcta

SEQ ID NO: 2991 - DNA, 75 bp, Homo sapiens
gccaccgcaaagcctacagcaccaccagtattgccagcgtcgctgacgcaaacatgcagatctttgtgaagaccc

SEQ ID NO: 2992 - DNA, 90 bp, Homo sapiens
tattaactccatctgtcaggagatggaggagatgtataagaaagctcatgctgctatacgagagaatccagtctatgaaaagaagcccaa

SEQ ID NO: 2993 - DNA, 100 bp, Homo sapiens
tgtggtttgctggtggcttcccactggcgaagagaagctacaaaatatgctcgatggatagcattcactggaaagtcacctaaggtcctgcgagtacaag

SEQ ID NO: 2994 - DNA, 100 bp, Homo sapiens
cgagggcatcctgggcaccatcaactccatcgtgatggcctttttaggagttcagtgggggaagaaggtagcctgtggctccagtgaaggtaccatctac

SEQ ID NO: 2995 - DNA, 90 bp, Homo sapiens
ctgaataccatctgggagcataaaggtgacctgaaggtctacgacgttcctccatcggtgagcaaggatgtgcccgatggcccactgctg

SEQ ID NO: 2996 - DNA, 128 bp, Homo sapiens
tgaggagccagacgacaagcacacactatggcgctgaaacggattaataagacaatgcagatcttcgtgaagactctgactggtaagaccatcaccctcgaggttgagcccagtgacaccatcgagaa

SEQ ID NO: 2997 - DNA, 100 bp, Homo sapiens
gagttctaggcttcaaacctaaggtcactgaactgatgcaggagcagtcatacctgaagtctgaattgggcctgggacttggagaaatgggatttgaaat

SEQ ID NO: 2998 - DNA, 75 bp, Homo sapiens
ccgcaattcgagaatcaaagggccgggagcgatgagaccatcatgcagacatcagagactgggtcggacacaggc

SEQ ID NO: 2999 - DNA, 113 bp, Homo sapiens
gggcagtagaacactctctccccagaaatccaacttctcaaggtgtcatggagaaactccagctgggcccagagattctgcagcgggaaaatccaaggcttatttatgccagg

SEQ ID NO: 3000 - DNA, 98 bp, Homo sapiens
atacaaaaacccttgggtgcagatcatgatgtttaagaacatgacgccgtcacccttcctgcgattctacttaggtcgcaatggaagaagagatcgcc

SEQ ID NO: 3001 - DNA, 100 bp, Homo sapiens
tgtgtgaagattgggaagtggttcctgaacctgttgccagatggtgcaatgttcaaagtactcaagatgaatttgagtgttcctctgaacaacagggaga

SEQ ID NO: 3002 - DNA, 75 bp, Homo sapiens
tagggaaggaacagaagagtgtcgtctcctagaaatctagcactggagaaacgaagcaggaagagctggtgcagc

SEQ ID NO: 3003 - DNA, 80 bp, Homo sapiens
tgcaactttataagatgcgaaatggtgttggggatgtcctttgcactgaccctgaactgccagattgacaaaaccagcca

SEQ ID NO: 3004 - DNA, 50 bp, Homo sapiens
acgagatgcatcccagtgttatgtaaagactgatgatgcttcggatgcac

SEQ ID NO: 3005 - DNA, 98 bp, Homo sapiens
tcgagcgatctggacccttcacacaccctgatttcgaaccgagcactgaaatgctgcagttggagaagaaacttgaacgtgaacttgaggatgatgca

SEQ ID NO: 3006 - DNA, 75 bp, Homo sapiens
tcgtgtctatcgttcacagtgtcttcgagttcctggccttcaagaatggccgccaggggagccagggctgagcca

SEQ ID NO: 3007 - DNA, 50 bp, Homo sapiens
cttctcattatgtacctcaggtcctattttgtaacggattatgatccaac

SEQ ID NO: 3008 - DNA, 98 bp, Homo sapiens
tttggagttggacaagaacagatagacgcttttcttaagacgctgcgcagaggaccaaaagcacagctgatgttgcggtatccagatggaaaaaggga

SEQ ID NO: 3009 - DNA, 99 bp, Homo sapiens
ccttagcattgttgcagcaaagaaggccaatgatgaggccaatcagagtgatacaagtgtctccttgtcagaacccaagagcaaaagcagccttcactt

SEQ ID NO: 3010 - DNA, 98 bp, Homo sapiens
gggactgcgaagctatacaggctgtgaaaagagatttgaatgcccggaatgttctaaaaggtttatgcggagtgatcatctctccaaacatgtcaaaa

SEQ ID NO: 3011 - DNA, 101 bp, Homo sapiens
gactacaatccaatctatgatatcgaggcgtgaattacccttcactaagtcggctcatctcaccaatccttggaatgaacataaaccagtaaagatcggac

SEQ ID NO: 3012 - DNA, 97 bp, Homo sapiens
tgttcctcgacatgtttctccagtgacacctcccagagaagttacagtacctgtaatgagaaacagtaaagaaaacagactaagaggaaacaaagcg

SEQ ID NO: 3013 - DNA, 83 bp, Homo sapiens
ctgtcaagacatttcttcggcattctgcaacagattcacaatgacatcctttcaagaagtcccattgcagacttccaactttg

SEQ ID NO: 3014 - DNA, 75 bp, Homo sapiens
ggcaaaatggcggaccgcttctcccgcttcaacgaagaccgagactttcagatcctctgtcgatgggtcctcaga

SEQ ID NO: 3015 - DNA, 100 bp, Homo sapiens
gagaactacagaaacctggtctccctaggggccaccaaggacatggggaagatgctggggggtgacgaggagaaggacccagacgccgccaagaaggagg

SEQ ID NO: 3016 - DNA, 100 bp, Homo sapiens
gcggaagtgaccgtggtggcttcaataaatttggtggaggaagaacgtgcaaaacgtgaggagctagagcgaatactggaagagaataaccgaaaaattg

SEQ ID NO: 3017 - DNA, 97 bp, Homo sapiens
tgactcaatcatcactgttttaacaggccactaaagatgctggccagatatctggactgaatgtgcttcgggtgattaatgagcccacagctgctgc

SEQ ID NO: 3018 - DNA, 90 bp, Homo sapiens
cctgcgtgaggtcaacctgcgcccccagatgtcccaggagttcaaagtagaagtttaccaacagcaaattgagatggagaagcttaatca

SEQ ID NO: 3019 - DNA, 100 bp, Homo sapiens
tcagaacctcaagcttttcaggcatcctcatataattaaactgtcttatcacaatggccatacttagaacatgagcaaggatttcaattgacttctgaag

SEQ ID NO: 3020 - DNA, 75 bp, Homo sapiens
ggacgcctcaggaatacctgaggcgggtccacactggccatgggcctctgtgtcgccatgatcgcctttgtccgc

SEQ ID NO: 3021 - DNA, 100 bp, Homo sapiens
gctcattcagactgcacttctcaacaaatttacacgaccccaaaacttgaagcttatccaacaaaagtattaacatatacattaacaacgtcgaaagtag

SEQ ID NO: 3022 - DNA, 82 bp, Homo sapiens
gttccgcatggagaagttgaaccagctgtgggagaaggcccagcgagagccttcacgtaaatgggtccagtcatgcctccca

SEQ ID NO: 3023 - DNA, 100 bp, Homo sapiens
gaacttttagaaacttgtatcattaacatcgatgttccaaataggatcagctgctgctctctgaaaagccacagttgtgtcagctatgccaggaagacgg

SEQ ID NO: 3024 - DNA, 71 bp, Homo sapiens
ttggcctctcctgggatcggcccaaggccagttctccgcagcctgttcctggtccgggagagtcagcggaa

SEQ ID NO: 3025 - DNA, 75 bp, Homo sapiens
cagacctctctcctcttcctgctcatggcttcagataaaccagtcgatcattttctgtaactcctctcagcgagt

SEQ ID NO: 3026 - DNA, 49 bp, Homo sapiens
gttcagagtcctacagtggcaggtgagctgcagaggaagattggcttga

SEQ ID NO: 3027 - DNA, 75 bp, Homo sapiens
tgccgatgggtgacgccagttaaagggattccagcagaagttcaccttccacagcaaggagattgtggccatcag

SEQ ID NO: 3028 - DNA, 75 bp, Homo sapiens
ctcggggacactgtgccgaatgaaactttatattcagagcaccaatcaaattaagcaagcctggggaacttcgtg

SEQ ID NO: 3029 - DNA, 74 bp, Homo sapiens
aaatctttaaaatttgccaagttttagggactcccaaaaaaggatggggaaagacaccatagtcataaaagaag

SEQ ID NO: 3030 - DNA, 74 bp, Homo sapiens
agggaaccctggtcaccgtctcctcagtccagaatgacagggtccagaaactggcgagccacgagggacatgtg

SEQ ID NO: 3031 - DNA, 82 bp, Homo sapiens
agtagcctgctgtcgcccagccgcgatggactcaccctgtcacccaggttggactgcactggcctcaacctcctgagttcaa

SEQ ID NO: 3032 - DNA, 100 bp, Homo sapiens
gcagaaggattagtagctaatgtgattacagcaggagattatgaccttaacatcagtggtgttggtaaatcatgcttattgctacagtttacagacaaga

SEQ ID NO: 3033 - DNA, 83 bp, Homo sapiens
acaccctcagctccacattgagagcaaaatctacaagatgatgcagggaggaggtttttagaacttcagccataaaaatgggc

SEQ ID NO: 3034 - DNA, 100 bp, Homo sapiens
gggctccgggtcttccagagcgtgaagatcaagatcgggctccacgtgttccccacgtttgtggcgtacgagctcacggtgctggtgttcctcaccttgt

SEQ ID NO: 3035 - DNA, 50 bp, Homo sapiens
ggccctccaggacctcctgggctgagagttgttcggaatcctataattga

SEQ ID NO: 3036 - DNA, 82 bp, Homo sapiens
tgaaataacccttgatcctcctcctaattgcaggttcttgagtcctgaattcattcctcgaaggggaagaacagatcctctg

SEQ ID NO: 3037 - DNA, 75 bp, Homo sapiens
gctggaacgagttataggaagatgtagtccaacccacatcagcagacatatctgaagagatggattaagaatgct

SEQ ID NO: 3038 - DNA, 90 bp, Homo sapiens
tccgagaaattatgggtacccctgaatatgtggaggcggggtttcaccatgttgcccagactggtcttgaactcctgagcttaagcaatc

SEQ ID NO: 3039 - DNA, 74 bp, Homo sapiens
tgcctgcgcctcttcccctgcagcgccgtgcagctcgccgcctaccgcaaaattatttcctaacggatgttcag

SEQ ID NO: 3040 - DNA, 75 bp, Homo sapiens
cgagtactgtgcaccggaagttctcatggggaatccatcacccggaagttcaggctgaattctgaaggcaaactt

SEQ ID NO: 3041 - DNA, 96 bp, Homo sapiens
gaaccatctcagaagccatgcccctcaggctggaacttgccctgtctcctcgcagatgaggtgagaagccttataagtgctcatgggagggatgtg

SEQ ID NO: 3042 - DNA, 71 bp, Homo sapiens
catacaggacactgtgagggaacaagaccagagtttcacggcaaaatcctgacagatgactttgcagacaa

SEQ ID NO: 3043 - DNA, 100 bp, Homo sapiens
agtttagggagtccatggccagaaaacttttggggacccagatgatgtggtaccagttggccaaagaagagcctggtgttggtgcatgtgctttggacta

SEQ ID NO: 3044 - DNA, 83 bp, Homo sapiens
ctcaatatctgtcttcggtggactccttcggcagtccacccaccgccgccgcctcccaggatgagaacaagttgagcagtgcc

SEQ ID NO: 3045 - DNA, 82 bp, Homo sapiens
cagagccatcagaaccgccaccatgccatgccagtgacggtaacccgcaccaccatcacaaccaccacgacgtcatcttcgg

SEQ ID NO: 3046 - DNA, 100 bp, Homo sapiens
ggtgctactgagcaatatcaagcccattcaaacagaggcatggattccagactccatcatttctcgtggtgttcaggtgctcccacgagacacagcctcc

SEQ ID NO: 3047 - DNA, 76 bp, Homo sapiens
gtatgcaacacattttcctatacctctgtctctagtgatccctgaaaagttccagcatattttgcgagtactcaac

SEQ ID NO: 3048 - DNA, 75 bp, Homo sapiens
ggacaaggacatctttccaccgaatgccacctggtttataacaaaagatacgatgaatggattaaagcagataaa

SEQ ID NO: 3049 - DNA, 100 bp, Homo sapiens
aagaggtgaagtttccaggaactaactttgatgaaataatcgatgtcatacaggaagataaggctttcaagcagaaacaaaaagaggagcagaagaaact

SEQ ID NO: 3050 - DNA, 101 bp, Homo sapiens
tgcttctcttctctcctccaagaggaatacccacacaccgaagttgggtgaggaagattcgttttgctcctggtaaaggaaatcaaaaattaatagcaatg

SEQ ID NO: 3051 - DNA, 83 bp, Homo sapiens
caaacaactcgagctggagcctcggccaggaccggcgcgagaggcggtgtcgtgaaaactacccctaaaagccaaaatgggaa

SEQ ID NO: 3052 - DNA, 99 bp, Homo sapiens
aaacttgggctgagtaccgcggcgggcgcgagcgaggcgccctagacatcttctccctcccttgcctcaggaactcgtgtccctgaagccttgtaaagc

SEQ ID NO: 3053 - DNA, 112 bp, Homo sapiens
cggcacctcgggggccacactgcaggcctccgcgctcagtggaggcaggtggaagtcatcataaagtttctgtttcacccgtcgtccatgttcgaggactctgtgaatctgt

SEQ ID NO: 3054 - DNA, 83 bp, Homo sapiens
ggcgttgcggcgaaaggaacggctgaaggccctacgggagaaaaccgggcgcaagcaaccatgtccaagggacctgcagttgg

SEQ ID NO: 3055 - DNA, 100 bp, Homo sapiens
gactgcctatgaatttgctaaacttaaaagcaagctggttctctgggatataaataagggtcgcggagcctcgccggccgccatgtggagctgcagctgg

SEQ ID NO: 3056 - DNA, 100 bp, Homo sapiens
cttggatctttatataggatttaatggttggtcagatgtaccaacagtaccagcaacaggccggctatggtgcacagcagccgcaggctccacctcagca

SEQ ID NO: 3057 - DNA, 74 bp, Homo sapiens
tgcctttgcaggggagcctgagagccacagcatgacctgcaggggaagctgcagctacgctaccaggagatctc

SEQ ID NO: 3058 - DNA, 75 bp, Homo sapiens
tccaaggacaaaatgatgagaggctctcgcagaggatgtgttagactcagagcgcagcccagcctcgaaatgcag

SEQ ID NO: 3059 - DNA, 83 bp, Homo sapiens
ggaaccccttcgtgcacgagctgcgcctcagcgccctgcagaaggcccaggaagctcttcgtgggcggtcttgactggagcac

SEQ ID NO: 3060 - DNA, 100 bp, Homo sapiens
ggcgcgagccccgtcctccttcgccgccgcgcacaaccgcacgtgcagaggcggggtttcaccatgttgcccagactggtcttgaactcctgagcttaag

SEQ ID NO: 3061 - DNA, 100 bp, Homo sapiens
cgatcctccaggcatgccccgctacgagctggctttaatcctgaaagccatgcagcgggggctgataacatccggaaatactggagccgctactaccaag

SEQ ID NO: 3062 - DNA, 90 bp, Homo sapiens
tagcgctatgcctgcggcggagactgcatcaggctctcggtcgcctgcgaggccgctggccaggcctgagcctctgccaccatggccatt

SEQ ID NO: 3063 - DNA, 100 bp, Homo sapiens
ctctcccggctccgcggcggctgcgaaggcggcggctcctgccctctcgctttccctctcgcgtctctggctgcagggcagctggtggaatttttgaaga

SEQ ID NO: 3064 - DNA, 76 bp, Homo sapiens
catgaagatggacgaggtcctgtacagcatcgccgagaaggaactttatattgctgttggaatatctggagccatc

SEQ ID NO: 3065 - DNA, 73 bp, Homo sapiens
gccgggaaaagtggcactgaggctctggaacttctgcccagctctccttgggaagacatgtaaggaatttgca

SEQ ID NO: 3066 - DNA, 90 bp, Homo sapiens
gtaatcccagcacattgggaggctgagagggcaaggagttggtgcacacctacaagggctgcatcaggtcccaggactgctactccggcg

SEQ ID NO: 3067 - DNA, 73 bp, Homo sapiens
tagagattgtgaagaagaatttcgatctccgccctggggtcattgtcagggagtgcctgcagggcaccatccg

SEQ ID NO: 3068 - DNA, 98 bp, Homo sapiens
cgacccggagcacccgacccctgaattctgaaaaagagttccacgtcctcccttatcgagtctttgttccccttcctggatccactgtaatgttgtgt

SEQ ID NO: 3069 - DNA, 74 bp, Homo sapiens
atgaagccgcagaccctcgtgagcacagcaatggaggaaacagctatatgggaacaacatacagtgacgcttca

SEQ ID NO: 3070 - DNA, 75 bp, Homo sapiens
ctggcaaacactggaatcctactttttctcactgtgctcacctggggtgctgcaaactgtgaaatggtttttaga

SEQ ID NO: 3071 - DNA, 78 bp, Homo sapiens
aggcacttcagggagtgcttttatattcccaaaatacaggatctgcctccaggatcaggtagacagagctgatacctt

SEQ ID NO: 3072 - DNA, 100 bp, Homo sapiens
ctgctgtggctgcgggaaagcctctctcttgcccaaaccacgatgggaatgcatatcacacctgaaaaattttatgtggaagcttgtgatgatggagcag

SEQ ID NO: 3073 - DNA, 75 bp, Homo sapiens
tgctcagtttgatgcgtcacactacgacagtgagaaaggagtgctgtccccggcataggtccatctctgcagaag

SEQ ID NO: 3074 - DNA, 100 bp, Homo sapiens
gcgagctgagtggttgtgtggtcgcgtctcggaaaccggtagcgcttgcagcatgacatccacgacagcgatggcagttccagcagcagccaccagagcc

SEQ ID NO: 3075 - DNA, 90 bp, Homo sapiens
ggggagcatgggtgccaaggagtcacggatcggattcctcagctacgaggaggcgctgaggagagttcaggagcatcccaggaggaacag

SEQ ID NO: 3076 - DNA, 96 bp, Homo sapiens
cgtgccccagatgcccaccgggatggagaaggaggaggaatcgagcacaaagttatcattgttgggctggataatgcagggaaaactaccattctt

SEQ ID NO: 3077 - DNA, 100 bp, Homo sapiens
aaaggagtcaggaatgcctcttaggattttttatcaagcagaaatgcatcgaacaacgagaatcaagatcactgagctaaatccccacctgatgtgtgtg

SEQ ID NO: 3078 - DNA, 50 bp, Homo sapiens
ctctgaggagtccactgcagcaggtgaatctggattgggaaagtcgacat

SEQ ID NO: 3079 - DNA, 82 bp, Homo sapiens
ctcagcctctcaagtagctgggactacagccccatggctgggggttatggagtgatgggtgacgatggttctattgattata

SEQ ID NO: 3080 - DNA, 88 bp, Homo sapiens
ggcattctgatgggaacttgtgtgttaaagtaacagatgatttagttacatcgctattgcggttccgaggcagtgggaagagatgcgg

SEQ ID NO: 3081 - DNA, 80 bp, Homo sapiens
ttcccgcaacccgataccatcggacaggatttctccgcctcagcccaacggggagattcttcgctgctgctgccttaccg

SEQ ID NO: 3082 - DNA, 100 bp, Homo sapiens
ctggcggccaccccctcttccccacttccctgcactctcatcgctctcggcctcggcctcggcctccgacacggctgtggatctttccattgatgagtcc

SEQ ID NO: 3083 - DNA, 99 bp, Homo sapiens
gtgccctgtcctcatagagctgacagccccagatagcaatgatgatgtgaaaacagaagctgtggctgtgtaatggataggtaacagagaagacctcgt

SEQ ID NO: 3084 - DNA, 74 bp, Homo sapiens
ctgtagccatcactgagaaatctggattttcaagttctgggattaccgccagcctcggaaatacctcaatattc

SEQ ID NO: 3085 - DNA, 83 bp, Homo sapiens
ccactacctacaacaagcacattaacatcagcttccacagaggtcctgtaataaagagggatccgaacaagctcagaaagaaa

SEQ ID NO: 3086 - DNA, 83 bp, Homo sapiens
cgccgaggcaccgaggcactcagaggagtgcgcgtcccgggacgactggcgctgtgcgcgctccatgcacgagttttccgcca

SEQ ID NO: 3087 - DNA, 90 bp, Homo sapiens
ggaagatggcggcgccgctcatccccctctcccagcaggccagaagcggactcctagaagaggggagcagcaaggatggaatgacagccg

SEQ ID NO: 3088 - DNA, 75 bp, Homo sapiens
ctgcatctattggctcccactgactgacagccagcaactagaagccatttgtgtcaaggtaacgtctggagaaac

SEQ ID NO: 3089 - DNA, 99 bp, Homo sapiens
gaaaaacagccaccttcagtatctcagtcctccagtgtttggatattcaggtgtagtgatggtttgtgtcgttctgcgttacatgaaatatcgatggac

SEQ ID NO: 3090 - DNA, 76 bp, Homo sapiens
gttcaacacttgagatctttaaaaggaaagaccacagcaagattctttcattcgtctcctcctagcctgggggacc

SEQ ID NO: 3091 - DNA, 75 bp, Homo sapiens
cattattgcgcgtggaacggctgcttttggaagcatctgcaaacatagagaattctgggcttccacacaactcca

SEQ ID NO: 3092 - DNA, 100 bp, Homo sapiens
aggcttgtctttaattgattcttttgtattctgggaaacatctaaaggacctgatcccaaccttgaagaaagtcctaaaagaaaaaatattacatatgag

SEQ ID NO: 3093 - DNA, 75 bp, Homo sapiens
tgtgctcttgtcctggcattgcatccacaggaggggcaggaaattctttgaagatttccatgaggacaacttaca

SEQ ID NO: 3094 - DNA, 100 bp, Homo sapiens
cagaaaccacccaccttcaccatgtctgacgaggaagtgccccccagggcccgtcagtggcctgaggagatggttggatcattccaaacattgtctcagt

SEQ ID NO: 3095 - DNA, 74 bp, Homo sapiens
tcgccctcggggtggcagttcccgttaaccttagccacaaagtcaaagaacctaaaggcagacccagaagagct

SEQ ID NO: 3096 - DNA, 75 bp, Homo sapiens
agaggtttagtgccctcctgagtgactgcgtcaggcatctcaatcatggccggaaggtggtggtcgtacgctgtg

SEQ ID NO: 3097 - DNA, 97 bp, Homo sapiens
gccaattgtacaggcctttgcacttgagggcattggaggggatggattttttaccatgaaatatgaggagatacaactcgtcaacgaatcaaattca

SEQ ID NO: 3098 - DNA, 75 bp, Homo sapiens
tgcagaaatcatcagaaaaatgactgaagaatttgatgaggttgaatataagctgggattccaagtggacaatgt

SEQ ID NO: 3099 - DNA, 75 bp, Homo sapiens
tgagccagagggacacgctggtgcatctgtttgccggaggtactatactggcaattgctggagaagattttgcaa

SEQ ID NO: 3100 - DNA, 80 bp, Homo sapiens
gggaacgtgaaagccttctatagacgagctctggctcataaaggactcaagatatgctgtgatagcatttggatgtgcca

SEQ ID NO: 3101 - DNA, 110 bp, Homo sapiens
gtttacaatgacccactaccatcttccaagatccatctgccttctgcataggccaaacagcagatggcagccgcggggagctttcccagcccaccctcacgatccagact

SEQ ID NO: 3102 - DNA, 50 bp, Homo sapiens
caggctttccttggacatctccatcaggttaatacaatctgttggaatga

SEQ ID NO: 3103 - DNA, 97 bp, Homo sapiens
agagctgaggactgcctgtttgcagccgctttggcagagatcacggagatggtggcacagctccacggtacgatgatcaagatggagaatttccaga

SEQ ID NO: 3104 - DNA, 75 bp, Homo sapiens
gctacttcatattttggaaagcagtttttaagacaagatcgaacagaggctgcaaatagaataatatgtactatc

SEQ ID NO: 3105 - DNA, 99 bp, Homo sapiens
caccgagaggcagcagaagcactgcctggccttcagacctttgcaggaaacatgaatgctgacagcgtggtgcaccacaagctattgcactcagtgaga

SEQ ID NO: 3106 - DNA, 74 bp, Homo sapiens
ctgaacgtcaccgaggagaagtaccaggaggcgttggccaaggaactgcatgaacttgcccccagacaaggtcc

SEQ ID NO: 3107 - DNA, 75 bp, Homo sapiens
tgtggatcgctgtgatcgtcacttgggacaggccttcagtatttggcatcacctttacatggagcacaaagatga

SEQ ID NO: 3108 - DNA, 100 bp, Homo sapiens
cgaggggccggagctcctggcggtgccggatcctgacggcggccttcccccggactgtgaatgaaagctggaatgccttagcaaccccatcagataagct

SEQ ID NO: 3109 - DNA, 50 bp, Homo sapiens
cattcttgcgctgcatcgaagcctcaggtaccatcacacaatccccgtca

SEQ ID NO: 3110 - DNA, 100 bp, Homo sapiens
caggacccactggaagcctagaaatggtgtttgtagccaatcctaacaagacgcagcccatcctagacatcctcctcaagaaccaggccaaactcataga

SEQ ID NO: 3111 - DNA, 98 bp, Homo sapiens
aagtgttcctataccactgcaacaagcaaggaccctctttgatgaagtgcaggtgaacctatgggtcgtggaacaaaagttatcctacacctgaaaga

SEQ ID NO: 3112 - DNA, 100 bp, Homo sapiens
cgcagagagaaagatgatgatgttgtaagccttagcagccttgatctgaagaaccttctgaggaaaggaggccatacagaaattgaacctcagcacttct

SEQ ID NO: 3113 - DNA, 100 bp, Homo sapiens
agctgcttctgtgtgatttcttccaaaatacatgaatgtaacaacccctgctgcaatgcctctaattgtaccctgaggccgggggcggagtgtgctcacg

SEQ ID NO: 3114 - DNA, 75 bp, Homo sapiens
gtattgatcttaaaacttgtaccacaacaagagatgaccttgaatgatgccatgaggaacaaggcaaggctgtca

SEQ ID NO: 3115 - DNA, 76 bp, Homo sapiens
gtcggtggttagcccacggcgatgcctctcccggcctcagacgtcgagcagagtatggggctgatgaacagcgggg

SEQ ID NO: 3116 - DNA, 82 bp, Homo sapiens
aaattcacccttgtagagtcattcctgcctttgagcggactcccttttaaggtggctgcagtccgagaagggatgtcctgga

SEQ ID NO: 3117 - DNA, 88 bp, Homo sapiens
tgccgcattcccactcgggctctccgctgactcagcaccgcccctgcgccaagccagccggccagctgctgcagaagaatattttgcc

SEQ ID NO: 3118 - DNA, 100 bp, Homo sapiens
aggaaaacccttcaggcaaccttgctacaaaaattctcagaattctgcaaatgcagattttgcaaactttgatgcatttggacagtctagtggttcgagt

SEQ ID NO: 3119 - DNA, 90 bp, Homo sapiens
agcagatgtggttggaatccttgctgtgctgaatcctggctgtgtgaccccaagagcctcctcaacaagcccaagagtgagatgacccca

SEQ ID NO: 3120 - DNA, 97 bp, Homo sapiens
ctcagtatgacaaggaagtcggacagtggaacaaattccgagacgtgtctgcttttggggcagagttttcatcggaggcatgcagagagttaggctt

SEQ ID NO: 3121 - DNA, 75 bp, Homo sapiens
acccctttgccaggttcaataagcaggttcaggagaagtggcacctggtggaggacctgtcgcgactgctgccgg

SEQ ID NO: 3122 - DNA, 74 bp, Homo sapiens
gttttctactgtaaagtcaccaacgagatcttccgccactacgacctgcttagacgcctggtgactctcatttc

SEQ ID NO: 3123 - DNA, 110 bp, Homo sapiens
caggcgggacccggcggggcgcaccacagagaccggcttcaatatcttcacccagcatggtttactcctggcttgggggcattaggaagcactggaggctcttcgggaac

SEQ ID NO: 3124 - DNA, 82 bp, Homo sapiens
tggtgaagcagatcgagagcaagaatgtgaaaacctttgcatcttctgatagtctagccaaggtccaagaagtagcaagctg

SEQ ID NO: 3125 - DNA, 90 bp, Homo sapiens
ttcatcaaaaatagtgatagctttgataaggcagagcggcttgggtaaatccaccttaatcaacaccctcttcaaatccaaaatcagccg

SEQ ID NO: 3126 - DNA, 50 bp, Homo sapiens
atttcattcagataagattgaggattgcagcaggcagtgttaagcagaca

SEQ ID NO: 3127 - DNA, 96 bp, Homo sapiens
cacaagttcagctggaactggaaccacagaggatacagagtgcaatgcgtgttttactatctaaattaccaagaccatggattgtggatgagaaga

SEQ ID NO: 3128 - DNA, 100 bp, Homo sapiens
cacagaatcagcatggctttcctttgctgagaaatcactgatgggaagtgagacttgttaaacttgaaagcggacaaggcaaaatctcagcaagttcgga

SEQ ID NO: 3129 - DNA, 101 bp, Homo sapiens
gccttccccaggcagtggaaccttcgggctcctatcacatattctacaaattccagccttctgtggtcgctgcggcctgtgttggggcctccaggatttgc

SEQ ID NO: 3130 - DNA, 50 bp, Homo sapiens
tttatctttctgtggatccttacatgtctctgaaagccactcggaatttc

SEQ ID NO: 3131 - DNA, 100 bp, Homo sapiens
ggatttggtctccacggtcaacgtggtatactcgcagacaacccaaccggtatacaatgtattggctggagttggcgatgactcagcagatcaaggctgg

SEQ ID NO: 3132 - DNA, 98 bp, Homo sapiens
ccagcaccttgcctggcccctccccaggctccctggacactgcgtcaagtcccctggccagcgccagccctgctgtgagccgtgagctttgaggcggt

SEQ ID NO: 3133 - DNA, 76 bp, Homo sapiens
tttttgtcagattatcaggatgagggacagaactgtaccgctctctttttggccagctccaccctcccgacgaagg

SEQ ID NO: 3134 - DNA, 75 bp, Homo sapiens
cgagacgtggcctgtggcgctaaccacacgtcattatcaccctttgatcctagcagattgtttggctggcagtct

SEQ ID NO: 3135 - DNA, 100 bp, Homo sapiens
ggagaatgaaaactgccctcctggcgtgggcaaggatgtttttgaggccttctataagaaagatttagccaagcgcctgttagtcggaaagagtgcatct

SEQ ID NO: 3136 - DNA, 100 bp, Homo sapiens
gcgacattgagaacaccagccttgcacctgaagaccccacctttcctggcactttggtgagccacgtgaccctgcgcctgctgaagccagagtgtgtcct

SEQ ID NO: 3137 - DNA, 89 bp, Homo sapiens
tgcctttgttcaccgccaaccccttcgagcaagacgtgggtgtcagcttcctctggtgcaaccagcaagtcttccagtatgaatcccac

SEQ ID NO: 3138 - DNA, 75 bp, Homo sapiens
aaataatgatcgattcagtagaaggtcaagcagttggcaggagctaacatgattgtgtctggcagtgctattatg

SEQ ID NO: 3139 - DNA, 88 bp, Homo sapiens
gagctctgaaaaagtgcccagaccaaggaaaaatccaagtgatggagcagcattttcaggtattatagctgcaaatgtccttgtattc

SEQ ID NO: 3140 - DNA, 75 bp, Homo sapiens
ttgcgcgctcatcttcctctcggtctacttcctctgtgacctgcctgctgcctccctcaacgaccagttgcccca

SEQ ID NO: 3141 - DNA, 75 bp, Homo sapiens
tgctgcggcgcggggaccgctgtgctctcggacatggatttgattgacatactttggaggcaagatatagatctt

SEQ ID NO: 3142 - DNA, 83 bp, Homo sapiens
ctttgaggatctggaggacggagaggacctgttcaccagcactgtctccaccctagagatgatatcatcaagttgaatcgaaa

SEQ ID NO: 3143 - DNA, 90 bp, Homo sapiens
aaacgtaaacttccttttactattagcccatcaagaaatgaagaacgagattcagacacaggacactttcttcatgagcaacaaacccca

SEQ ID NO: 3144 - DNA, 83 bp, Homo sapiens
ggagagctcctgggccacccctcctttcaggtcaagggtttccaggcctgaggtgcccgccctggccccaggagaatgaacca

SEQ ID NO: 3145 - DNA, 83 bp, Homo sapiens
aagaagaagaagatgagaacagtagacagtcgtgctgtccccggcataggtccatctctgcagaagccatttcaggagtacct

SEQ ID NO: 3146 - DNA, 101 bp, Homo sapiens
agtatgagaagtacagggagcgagagctggagaagctgggattggagattccacccaaacttgctggtcactgggaggaagggaaaaggccgaggcatcag

SEQ ID NO: 3147 - DNA, 100 bp, Homo sapiens
gaatcattatccaggagtccgccctggactaccgcctggatcctcagctccagctgcactgctcagacgagatggtgtcggacggcatgacaggcagcaa

SEQ ID NO: 3148 - DNA, 75 bp, Homo sapiens
cactcatcctcgaggacagaccagcgagatctataaggacaggcagaaattctcagaacaggttttcaaagtggc

SEQ ID NO: 3149 - DNA, 147 bp, Homo sapiens
ttccccttcaccttctgccatgattctaagtttcctgacgcctcccagccgtgcttcctgttaagcctgtgaaactgtcgctacccacaggagaacaagggaacctacatcccagtgcctatagtctcagagttacaaagtggaaag

SEQ ID NO: 3150 - DNA, 98 bp, Homo sapiens
acgacgagctgagcttcaaaaggggggacatcctcaagttttcggctttgtgagaaaccttaccatcaaacacgatggccagcaacgttaccaacaag

SEQ ID NO: 3151 - DNA, 95 bp, Homo sapiens
ggccatactgaatgatgaggtggtctaccctacctggctccatgaagatgccacagggatcctaaaatctacctagaggatcaagacataatggg

SEQ ID NO: 3152 - DNA, 126 bp, Homo sapiens
cgggcccggccacagcctgcagcggagcccacgagaggcagcgccatggcggagcagacctactcgtgacacgatgaggcgagtggtacgacagagcaagtttcggcatgtatttgggcaagcggt

SEQ ID NO: 3153 - DNA, 75 bp, Homo sapiens
gacggagctaagagatatctgcaatgatgtactgaagtccccacgagaagaagaagaagaggcggtcccggtcgc

SEQ ID NO: 3154 - DNA, 90 bp, Homo sapiens
atgatattgcttggatgaggtttgacagtgaaggtcaccatcagaaaagctaagtttgctgtatagtgaggatcaggagatctgatcctg

SEQ ID NO: 3155 - DNA, 90 bp, Homo sapiens
attgaatttagaagggctggtggcccacagggtagcagactggaaatagcaaaggctatgcatttgtggagtttgagtctgaggatgttg

SEQ ID NO: 3156 - DNA, 75 bp, Homo sapiens
cgaggcaaggagctaaagcagcgtgcgttcagccctgggaataccgtagcagtaggcaggacagttccaattcaa

SEQ ID NO: 3157 - DNA, 90 bp, Homo sapiens
cgatgctttgcatcctaaatcagcatatagcactttctacattgtgggtttaatattatcaatgcagataccttttgtgggattccagcc

SEQ ID NO: 3158 - DNA, 87 bp, Homo sapiens
gggctgaagcgactgagtccgcgatggaggccagaagccttttaaaaggtccctgcgaggttcagatgctttgagtgagaccagctc

SEQ ID NO: 3159 - DNA, 97 bp, Homo sapiens
gatcagaggcagtaatccacaggacaaggcattttccctgaagatgagatcccagagaaggcctgcaggcgcctgcttgaagggaggcggcagaaga

SEQ ID NO: 3160 - DNA, 83 bp, Homo sapiens
accagatcaacgccagcaagaacgaggaggacgcgggatgcctgaggaaacccagacccaagaccaaccgatggaggaggagg

SEQ ID NO: 3161 - DNA, 76 bp, Homo sapiens
ccctaaatcgaagttctttgagctaatccaggcacagaaaactgaatctgtagataacgagggagaatgaattgtc

SEQ ID NO: 3162 - DNA, 90 bp, Homo sapiens
cttacctaggaatgagagggacaggagtatctgaggatggagaactcagcagttgcatcataaatacaaaggactgaagttataaaagag

SEQ ID NO: 3163 - DNA, 101 bp, Homo sapiens
cggcatgcaccacgcgctgagagtggtgccaccgaacatcgcagaactgaagaatttggaggtgctcaacttttttaataaccaaatcgaggagctgccca

SEQ ID NO: 3164 - DNA, 100 bp, Homo sapiens
ggctgagcggagtcgtgcggttggtgggggagccctgccctcctggttcggcctccccgcgcactagaacgatttgctgctgcttccaggagaagtggag

SEQ ID NO: 3165 - DNA, 75 bp, Homo sapiens
ctgacccggatcgtgctcctgaaggccctagccttcgtgtactggactttgaacatgtcggggatcgccctcagc

SEQ ID NO: 3166 - DNA, 74 bp, Homo sapiens
tactttgcaataacaatggaaaggtcatttcaagcaaaataatcctatggtgaaaaaaatcaacaagataatct

SEQ ID NO: 3167 - DNA, 100 bp, Homo sapiens
cgccggcgacggaccagcgacccaagcgccgcggttaaccacgtctcgtccacgacctccctagagtctgagaagccaactggggccaaacaagttttag

SEQ ID NO: 3168 - DNA, 120 bp, Homo sapiens
cgagctgagtggttgtgtggtcgcgtctcggaaaccggtagcgcttgcagcatggatatgacagcgcgtgatctgctacagcagagatacacccttccaaatggagacactgcctggcgg

SEQ ID NO: 3169 - DNA, 75 bp, Homo sapiens
ggggaaatggctgcgagaccctagaggcctgcggcctgcggctcctctgctgaacagcccctgggcgggagactc

SEQ ID NO: 3170 - DNA, 75 bp, Homo sapiens
agctaaaaacggccacatcgacatcatcagggtgaggacgcttgagcggaagttagaagcaaaaatgatcaagga

SEQ ID NO: 3171 - DNA, 83 bp, Homo sapiens
cttctgatagcaactttaatgtgcagcagcagttgcaagctcagcatctttctcatggccacggacccccagttccccttacg

SEQ ID NO: 3172 - DNA, 100 bp, Homo sapiens
ctgacggttaatgaaggagaaatcatcacaatcacaaatccgggttctccaaaaaatgtggaatcctttgcatctatgctgagacattctcctcttacac

SEQ ID NO: 3173 - DNA, 48 bp, Homo sapiens
gccgcctcgatgcaggaggacgaacagatggagtctcactctgtagcc

SEQ ID NO: 3174 - DNA, 100 bp, Homo sapiens
cccatcaacaatgatgacaacttctgcaaggcggtttctagtgcaaatcccctgctcagggtcttcatccagaaacgagaaccgcatgcacgagtctctc

SEQ ID NO: 3175 - DNA, 99 bp, Homo sapiens
gacacagagactttatcaaaaacatgattacagggacatctcagaaatttgaagatgctaaacttgctgctgccatctctgaagtggtttcccaaaccc

SEQ ID NO: 3176 - DNA, 82 bp, Homo sapiens
aaacttttagactcaccctaagagctgtcaaattatgggcaaaacttgattgaagatcagcaaacattgaaaaaaagttaat

SEQ ID NO: 3177 - DNA, 100 bp, Homo sapiens
ggccgtggacatcggggcagctgacctcgcccacgcccagcagcagcagcaacagatataattgatcctgttgctttagaaattccattatccaaaaacc

SEQ ID NO: 3178 - DNA, 100 bp, Homo sapiens
cgagtaggaacgctggtcctttgtcttcatgattcagctgatgctcttctggaggcagaaatactcagtgtcctcagtcacagaaacatcatccagtttt

SEQ ID NO: 3179 - DNA, 96 bp, Homo sapiens
ggtagagtgaagtcctacagagttatcaggttccagaccctgccttctcttctgaaaggtggccagcatcgaaatgttcagccttttagtgatgaa

SEQ ID NO: 3180 - DNA, 82 bp, Homo sapiens
gaaaacctaaccatgaagacttgaacttaatacagcaagaaagaccatcaagtttaccaggttacacatcattttggaatga

SEQ ID NO: 3181 - DNA, 75 bp, Homo sapiens
ctgcccgggccgcgaggacgaggcggcgccgccgggctgtggaggtctcctctgagcctccggcctccataagac

SEQ ID NO: 3182 - DNA, 100 bp, Homo sapiens
cctgctccgtgccctcctcctgctgggtccgtgtcccgccacacgcccccaggagcgagaacccgagcagcgccatgagcaacactaccgtcgtccccag

SEQ ID NO: 3183 - DNA, 100 bp, Homo sapiens
gcgcgaagctggccaaagcctgcccagacggctcacctgtgcgggatggaacaaaagggacagagcagaatgggctgatatagatccggtgccgcagaat

SEQ ID NO: 3184 - DNA, 50 bp, Homo sapiens
tgtggatgccgtcaagctgaacctccctgagcagacaagatggagacaaa

SEQ ID NO: 3185 - DNA, 75 bp, Homo sapiens
ggagtattacaacgacagtaacgtaatctcaaaagtcctgctagtgatcaacaactaatggaagacaaaaccagc

SEQ ID NO: 3186 - DNA, 80 bp, Homo sapiens
atgcaccctttttgtcagattatcaggatgagggttccagcaacagatagaaatgctttaagttcactctggggaaagct

SEQ ID NO: 3187 - DNA, 100 bp, Homo sapiens
accccagcaagatgcggaggctgcctcggcggagcagaggaaccacacgctgatcatggttattcagcttctcaaggctggaaaagcgaaggaagtttcc

SEQ ID NO: 3188 - DNA, 74 bp, Homo sapiens
ggccctggacgtgctccaccgacactgcaaaggtggaagaagagcccgaagaagaacctgaagagacagcagaa

SEQ ID NO: 3189 - DNA, 100 bp, Homo sapiens
tcatgaccttccagaattacgggcaagcgctgttcaaacccatgaagcgaggattaaatccaccacacagggtgaaatctatctccatgacaacattcac

SEQ ID NO: 3190 - DNA, 90 bp, Homo sapiens
actatgtagaacacgctaaagaagaaacaaaaaaagctatcaaatatcagagcaaggcaagaagggtgtcccaccggccttccgggttcc

SEQ ID NO: 3191 - DNA, 75 bp, Homo sapiens
cagaaacataactgccatagtgaagcaacttaatcgggatatcgagatacactctgtgcagttttagagagagac

SEQ ID NO: 3192 - DNA, 125 bp, Homo sapiens
gcagaggagaagcacactcccgagtcctgctttattgaggcagctatccaggagctcaagccgtttccctggggagatggtaaccatactctattccataaccctcatgtgaatccacttccaac

SEQ ID NO: 3193 - DNA, 95 bp, Homo sapiens
cccaagatgtcgcagacggccatgtccgaaacctacggtttggtttaagaataaaagggccagatgtaggcgacatcagagagaattaatgctcg

SEQ ID NO: 3194 - DNA, 101 bp, Homo sapiens
acaaaagaagcacagctttatgctgcccaggcacatcttaaactcggagaagttagtgttgaatctggttccatcttagcccacatccagaagcaaaagca

SEQ ID NO: 3195 - DNA, 87 bp, Homo sapiens
ggtcccgcgggccaggccgtggaggccactggaagggaacacctgcctctcccagatgcacagctgggctccgctgaaggtgctgca

SEQ ID NO: 3196 - DNA, 50 bp, Homo sapiens
ctcttcctcaatgcttgtgtggtgtaaacaggaacatcgataagtagtgt

SEQ ID NO: 3197 - DNA, 50 bp, Homo sapiens
cgtggctgtacctgtgcaagagaggtttcggtctaagtaccacccagatg

SEQ ID NO: 3198 - DNA, 100 bp, Homo sapiens
agcgacagtacaaagaagactcttgtcacactaattgccaacaacaatggaacgtcaaggtcgtgggaaataaaaggcagttctacacagactgcagcaa

SEQ ID NO: 3199 - DNA, 87 bp, Homo sapiens
gagcgccgcccgggcatgcgaagccgtccctccccggtcctgtgcctcctgattgctgagtgttcacctggaccttctgactacctt

SEQ ID NO: 3200 - DNA, 76 bp, Homo sapiens
tctcctccaaaatccgcagctcccgggagcaccagttcaagtgactttcggatggtggttggagaagataaaacaa

SEQ ID NO: 3201 - DNA, 95 bp, Homo sapiens
attattcttttgatggactagaatatgactatatcagtgattgccaggtgtttttgataaagtaatagctcttcaagtctgcaataaaaaatggc

SEQ ID NO: 3202 - DNA, 75 bp, Homo sapiens
caaaaatacgcactaagtgtcatgatgaaggtacagcaatcatttgaaactccaagggccaaagctcaaatgccc

SEQ ID NO: 3203 - DNA, 123 bp, Homo sapiens
ccagctcctcttcctcaaaccattctgataactttttcaggatgggtagcagtcccctggaggtccccaaacccagttcggacggaccgaggtgattgataacacgctgaacccagacttcgt

SEQ ID NO: 3204 - DNA, 111 bp, Homo sapiens
ccagcacctacgtcccgctgccgtcgccgccgccaccatgcccaagagaaagctgcctgtggaggaaccgattgtgtccacagatgaggtcatcttcccactcaccgtttc

SEQ ID NO: 3205 - DNA, 80 bp, Homo sapiens
ctacttgaagatagccatcagccgctacgtgactcttttctccagatggtccagtagtctatgcagcatatttaaaaatg

SEQ ID NO: 3206 - DNA, 75 bp, Homo sapiens
cggggacttggggccgcagggagtagccacgatggaggtgatgaacctgatggagcagcctatcaaggtgactga

SEQ ID NO: 3207 - DNA, 73 bp, Homo sapiens
ggagcctcagcggtctgcgcctggcagcagttttctggatatgccgcagaaggatccgtgccagaagcaagcc

SEQ ID NO: 3208 - DNA, 74 bp, Homo sapiens
gagagatttttgggacctgaaatcttttttcatccagagtgcttttttaggaccaaaggatatatttccttact

SEQ ID NO: 3209 - DNA, 82 bp, Homo sapiens
cttcgaacttagacttccggaaggactttggcgaggggggggctgtcggggggctgttaggtgcctggatgacaagtggaca

SEQ ID NO: 3210 - DNA, 83 bp, Homo sapiens
ggcagacccggtttgctgatcgccccagggatcaggagtgtcccttttgatgagaagaataagcctcattctgattcaacagc

SEQ ID NO: 3211 - DNA, 116 bp, Homo sapiens
gaaccaagataaaaatgtgagagatgtaatatatgacattgccagtcaagcacacttgcacctaaagcatatcaaagccatcggccagacagagttgaatgcaagcaatccagaag

SEQ ID NO: 3212 - DNA, 75 bp, Homo sapiens
ctcagcctcccgagaagctgggattacaggttatggaattccactgaaagacggagatgagaaaacagatgaaga

SEQ ID NO: 3213 - DNA, 73 bp, Homo sapiens
cgggagcctccgtggaactcagcgctccgctcctcccagttcctaagatgggtaattccagaattgattggcc

SEQ ID NO: 3214 - DNA, 74 bp, Homo sapiens
tgaccgtcgctagaactcagttgtgcgttgcggccagtcgccactgctgttattctcgttcaagttaatccagg

SEQ ID NO: 3215 - DNA, 100 bp, Homo sapiens
tctcaacttggttattgtaaaaaaagggaaagaatatggcaaagctgatgcaagatgggtttattttgatccaaccattgtgtctgtggaaattctgacc

SEQ ID NO: 3216 - DNA, 80 bp, Homo sapiens
cacccatttctcgtctctcatctacatcgccttcatcctgggcaggtgcatctgcagacgcagcaggaggtgaagctgcg

SEQ ID NO: 3217 - DNA, 75 bp, Homo sapiens
gtggtggtctactctgatgtcaatcttgagggctaggtgctcatctgccggaactaccgtggcgacgtggacatg

SEQ ID NO: 3218 - DNA, 50 bp, Homo sapiens
cctgcaggcacagttgccgattacagatatgaggccccaggattcctggc

SEQ ID NO: 3219 - DNA, 80 bp, Homo sapiens
tcaagtgaagcaaaagcctttcatgattatggaaagcaggcaggatgggagagtcgccgatagaaccacctcttccctgc

SEQ ID NO: 3220 - DNA, 75 bp, Homo sapiens
tctgaagcgagcgtcttcgatggtgcagagaatgtagaaagagtgttggttactgttatccaaggagcagttgaa

SEQ ID NO: 3221 - DNA, 90 bp, Homo sapiens
ctggacatagactggtgcccacataacgatcaggtcattgccagcggttcagaggactgcacggtcatgatttgtaagactccagggcct

SEQ ID NO: 3222 - DNA, 75 bp, Homo sapiens
cagcatggacgtcttccacctggagggcatgactacatctgtcatggtggtgacagcaggagcaatcatcccttt

SEQ ID NO: 3223 - DNA, 100 bp, Homo sapiens
cagttcaaagcttgttgtctttgatactacattacaaaggcagtaatgaaccaggaaaaaagaagcagcatatctgtcatattgaaggatgtggtaaagt

SEQ ID NO: 3224 - DNA, 75 bp, Homo sapiens
ctggccgccccgagcggagcctggaggaacccaagacagaccaggatgaggagcattgccggaaagtcaacgagt

SEQ ID NO: 3225 - DNA, 100 bp, Homo sapiens
tacagcaggcgctcaccatgttccctggagctttccgggccctcctgcagatccgggcggtgcggaagaagccaggagccctgtcccccgtgtccttcag

SEQ ID NO: 3226 - DNA, 75 bp, Homo sapiens
gtggactctgccgacaccggagagagtgagaagattgctcacgtctggcatcgtgattcaggtgtttccactgca

SEQ ID NO: 3227 - DNA, 98 bp, Homo sapiens
cccaatcccccactctttccgccctaatggaggtctccagtttcggtagctacagcaagctgggtagcaggcagatccaaaggatatcatgaagtttc

SEQ ID NO: 3228 - DNA, 75 bp, Homo sapiens
ctcgcctgtctccgtcggaagggagcccaagctttgcagaggcttgaccactatgctatcatcaagtttccgctg

SEQ ID NO: 3229 - DNA, 51 bp, Homo sapiens
cggaccgctgagctatacaaagtgcaccaattccagctggacatcactgtg

SEQ ID NO: 3230 - DNA, 102 bp, Homo sapiens
cagaaagtagtttgggtggaagaatcagacaaacggtcatttctgcttgacctcctaaatgcaacagtggactctggttcaatttaattttttgaaatttaa

SEQ ID NO: 3231 - DNA, 82 bp, Homo sapiens
cgggttcagcagcagtcagagctggcgagagccctctccacctcggaagagctatggagtattcaaagcacaaagaaatgca

SEQ ID NO: 3232 - DNA, 96 bp, Homo sapiens
gcggcggcggcagcagcagcagcagcattagcagcagcagcttctctcaatgctgagtattggaggtccccctccccactaagtgcctctttgcat

SEQ ID NO: 3233 - DNA, 100 bp, Homo sapiens
gttgaatgagaaccctacttgcctaaatgaggaatgtctttcctaccatctaaaatacgaaggtttctggctggggagagaactttggaagaaagggcca

SEQ ID NO: 3234 - DNA, 75 bp, Homo sapiens
taaccccacaaccatcacatccaccatgaaagctaagctgctgaaggagagaaacctttcctttgtgaagcccaa

SEQ ID NO: 3235 - DNA, 99 bp, Homo sapiens
ctgggaggtggccatcttcggaccccccaacaccctctacgaaggcggctacttcaaggccaaccccttcaaggagcgaatctgcagggtcttctccac

SEQ ID NO: 3236 - DNA, 74 bp, Homo sapiens
catgatccaggaagagcagtaagggactgagctgctgggagaaaatcctccacctccgggtttcataatgcatg

SEQ ID NO: 3237 - DNA, 98 bp, Homo sapiens
acggacgacagaagcgactttggtgagactctgttcttcatcctgctgctgattatcctccttgctgaggtgaccttggccatcctgctctttgtata

SEQ ID NO: 3238 - DNA, 90 bp, Homo sapiens
cttttccgttgccggtgccggcctagcgtcctggaattacttcaatcaagtttaaaatgctacctgaagttctatatcgtatcttcacac

SEQ ID NO: 3239 - DNA, 75 bp, Homo sapiens
gctgcccgccctgcagtggaaggaaaggtagcgggaaggatgaccacgctcacacgacaagacctcaactttggc

SEQ ID NO: 3240 - DNA, 101 bp, Homo sapiens
gctgccatgtgcctctggctcaagcccaggctttggtcaccagtgagctggagaagttccaggctggaaagacagaccgaaaagaatttgtgaggaagaaa

SEQ ID NO: 3241 - DNA, 80 bp, Homo sapiens
gaaggggatataatcctggtgttatcaaaggtgcagtgtgccctgaaccgccctgccttctttgctgagaggctctacta

SEQ ID NO: 3242 - DNA, 100 bp, Homo sapiens
gaccacatataccacgaggatccatctcgtctgctccaggggcaggctgcctactcatgaaggttacttctcttgtttggatatctggacgctgtttttg

SEQ ID NO: 3243 - DNA, 100 bp, Homo sapiens
cacacctctgcctttgttgggaaatgttttgtcctatcgtcaggtacagcaaatcctaaagtcacttttaagatgtcagaaataatgattgatgctgaag

SEQ ID NO: 3244 - DNA, 80 bp, Homo sapiens
attttgaaaaaaagtggacagatactttcaaatctacatcagcatcagcatctgcgtcaccatttcaatctgcatggtat

SEQ ID NO: 3245 - DNA, 97 bp, Homo sapiens
aggccagagataagaacaccaaccaaattgtcgccattaagaaagtggagccgccaccaaaatgcagattttcgtgaaaacccttacggggaagacc

SEQ ID NO: 3246 - DNA, 75 bp, Homo sapiens
aggtagccctggacggcattcagtgttttggtcagaatggcggcagtggagcatcgtcattcttcaggattgccc

SEQ ID NO: 3247 - DNA, 80 bp, Homo sapiens
gggaggtctggtagggctgagcttgcaagaggatcaacatgccttttggtgccctggttgtcagatgttggaaagcagta

SEQ ID NO: 3248 - DNA, 100 bp, Homo sapiens
tgttggcaatatatcccatcacaccacaaaggccaatgatgaggccaatcagagtgatacaagtgtctccttgtcagaacccaagagcaaaagcagcctt

SEQ ID NO: 3249 - DNA, 83 bp, Homo sapiens
caaacccggggcaggcgggcagctgtgcccgggcggcacggccagggatcgtgggactttaccagatcggtttgtaataacac

SEQ ID NO: 3250 - DNA, 100 bp, Homo sapiens
aagattttgattatccatgagattacagttgtaacttcatagactcccaaagggaaattcttgactgaagttgctgaagatcctcaacaagtttcaactg

SEQ ID NO: 3251 - DNA, 75 bp, Homo sapiens
tggcgccacaagctcattcactgtgtagcctcttctgaaacagtctccctggagcaaccatcagagcagtggctg

SEQ ID NO: 3252 - DNA, 99 bp, Homo sapiens
tctctcctggacagaaggccgtgtcctgggacttctctgatggcgagaggctgcggctgtaccagtttgaaagatgatgacagtggggaccatgatcag

SEQ ID NO: 3253 - DNA, 100 bp, Homo sapiens
ctttggtgctgctggtgtcatggctattgagcatgcagattttgcaggtgtggaacgcctagctcttgtcacagggatgtgtttggccaaatgggagagt

SEQ ID NO: 3254 - DNA, 101 bp, Homo sapiens
ccagaatatacagaaccagatgctgcagaggaagaagccattagatggtggagaaagggtggctttgtccactatggtgaagtgaccaatgactttgtcat

SEQ ID NO: 3255 - DNA, 75 bp, Homo sapiens
ccagatcagaatgcttcaacccacacacctcagtcttcagttaagaaactaattctgaagcaagcccttatagtt

SEQ ID NO: 3256 - DNA, 100 bp, Homo sapiens
gccctggcgggtccggaccaaggaattcattgaagagttgctgtctcccccttttgggggtttagtggcatttgtgaaggaggctgaggctttgattgag

SEQ ID NO: 3257 - DNA, 83 bp, Homo sapiens
ctgagcttggcctcggcgtcctcgggacctgaagaagtacggggctaccactgtggtgcgtgtgtgtgaagtgacctatgaca

SEQ ID NO: 3258 - DNA, 76 bp, Homo sapiens
agcacagagcctcgcctttgccgatccgccgcccgtccacacccgccgccagttgtaatttagattcgagaagtgg

SEQ ID NO: 3259 - DNA, 75 bp, Homo sapiens
aaaccacgctcctcggaccaagcctcgggagctaagacctagaggatcaagacataatgggagcatttttagaca

SEQ ID NO: 3260 - DNA, 100 bp, Homo sapiens
ctttactcagctgagtgtgccacacaggtagccctggacggcattcagtgttttggacagagcgggatgccaccagcttgtccaaagggaagttccagga

SEQ ID NO: 3261 - DNA, 83 bp, Homo sapiens
ggttaatctgttggattctaatgcagttcatcacatcattcatgattttcagaagcactaccacaggaagagcaagaaggaag

SEQ ID NO: 3262 - DNA, 100 bp, Homo sapiens
ctccactccccagctgtgaaaggccatccgggtgacctgcataggttcctgcggggtctccaacaaggctaatgacacagcgtgggtagtggaggagggt

SEQ ID NO: 3263 - DNA, 96 bp, Homo sapiens
tggccgtgacccagctgcggccgccgcggagatgtgacccggcagtacggcaaatatggcggagatctcacattcttgaaggtggcattgaagagc

SEQ ID NO: 3264 - DNA, 96 bp, Homo sapiens
cgaaaacgctacgtgagctgggccctgggccagaggcagaaaacggacggaagaaaaggtctggccggagccaagccgccatggcctaccacagct

SEQ ID NO: 3265 - DNA, 82 bp, Homo sapiens
tacactgaagaagtagagtatttcaaccataaagacatcttaattgggcacgaaagaggagttgtaagacgttcatcgccgt

SEQ ID NO: 3266 - DNA, 100 bp, Homo sapiens
gcccacagtgggggtgtgcaaacccgagagaactggggaaagaatatggcaaagctgatgcaagatgggtttattttgatccaaccattgtgtctgtgga

SEQ ID NO: 3267 - DNA, 78 bp, Homo sapiens
ttgccgacgccatcaggctcaacgaggaactcaaagtggatgaggaaagcgccatgtcagaaccggctggggatgtcc

SEQ ID NO: 3268 - DNA, 82 bp, Homo sapiens
attgtcgtttttacccggccaaagtcactgctgttaacaaggatggtcctgggaggaatggagaggggtcccactgactaac

SEQ ID NO: 3269 - DNA, 97 bp, Homo sapiens
gagtgatagaattggcagtgaaatatacgaaccaccctcctgccctctgggttcacaatacgggttggggcgtgagacacatcacatttgtggacaa

SEQ ID NO: 3270 - DNA, 90 bp, Homo sapiens
cggggagctcggctccaagttctggaggcggggtttcaccatgttgcccagactggtcttgaactcctgagcttaagcaatccacctgcc

SEQ ID NO: 3271 - DNA, 74 bp, Homo sapiens
atagtctccagcgggcctggactgtgggctggtgtgtggaactgatgtggaaacaacttctgtgcatctcatcg

SEQ ID NO: 3272 - DNA, 82 bp, Homo sapiens
gtctactctgatgtcaatcttgagggctagattccaacatgccatgggaggagtacctgcctgggcagagactactaagcgg

SEQ ID NO: 3273 - DNA, 97 bp, Homo sapiens
gggcgacctgggcaccagcaggacccgaggccaggagccaggggcccagaaggctggtccagggaccctcatcatggccacaggagtccaggacttt

SEQ ID NO: 3274 - DNA, 135 bp, Homo sapiens
agcagtgggggttgctgacccagaggagagttctccaaacatgatcgtttactgcaaagtttttcgttggaatatacgttgcacatttatggcgattctgagtgtgagggcagacttctgccaggctcagcacag

SEQ ID NO: 3275 - DNA, 100 bp, Homo sapiens
cacgcaggtacctgtggactcagcagcagcaactgtgggactttttgactacaattctcaacaacagagcagcccgacggccatggaggctgaagagacg

SEQ ID NO: 3276 - DNA, 75 bp, Homo sapiens
gcgtcatgaataacatgcggaaacagctgttccaggagctctgagtcctttggccattccaaatgctgctgcagc

SEQ ID NO: 3277 - DNA, 75 bp, Homo sapiens
ttcctgttgagtacacgttcctgttcaaattgaagagttttctgatgttaatgaaggagagaaagaagtgatgaa

SEQ ID NO: 3278 - DNA, 109 bp, Homo sapiens
tgggtttcccgggagatcccaggcggtgacagagtggagccatggctagagacctgcctagagctggaacgttacctccagagcgagccctgctatgtttcagcctcag

SEQ ID NO: 3279 - DNA, 80 bp, Homo sapiens
agaccgaagcgttcgtatctggaagggcgaccattgacgaggtggagacggacgtggtggagattgaggccaaactggac

SEQ ID NO: 3280 - DNA, 50 bp, Homo sapiens
gtggaaaggccgagggcagcatgccaggtctggagcccccaactcccttg

SEQ ID NO: 3281 - DNA, 50 bp, Homo sapiens
cccgagttatcgggaccctgttgggacccgtccctgctcctgaccatcac

SEQ ID NO: 3282 - DNA, 50 bp, Homo sapiens
tcttctgatagcaactttaatgtgagacttgaggtttaacagaataagag

SEQ ID NO: 3283 - DNA, 83 bp, Homo sapiens
ggataacaagttttgtgcagattgccagtctaaagccctgggcgctgcctatggcacagccaagagcggtaccggcattgcgg

SEQ ID NO: 3284 - DNA, 80 bp, Homo sapiens
ggacaaagccgctccacctcccatgtcggcacagcattccttcctagtagcttctgtatgtacactacgttgatagccat

SEQ ID NO: 3285 - DNA, 74 bp, Homo sapiens
ctccgtacaccaaaaactcaggcttcgccacctgcgtgcaaagcaggtaacttgcagactcacttacgacggca

SEQ ID NO: 3286 - DNA, 100 bp, Homo sapiens
acacttgtattcagtcaccaagcaaagagtaccttccactggaagaatctcaaacagcgctacttactcaggatcagtggcaccagccaactcagctttg

SEQ ID NO: 3287 - DNA, 102 bp, Homo sapiens
ggagcgctgccctgcagcccgagcccatcaaggtgtacggacaggtggcagctgccaacaagaagcattagaacaaaccatgctgggttaataaattgcctc

SEQ ID NO: 3288 - DNA, 100 bp, Homo sapiens
gtgcgccggcagaggatccagtgttcaccatcctggccccggaagccagtgagctcctccgacagcgaggcccccgaggccaaccccgccgacggcagtg

SEQ ID NO: 3289 - DNA, 98 bp, Homo sapiens
tcggacgctcctgctcggctgggtcttcgcccaggtggccggcgcttcagtctggctcttgctgattgaattcctttggtgcagtttagcatgttcct

SEQ ID NO: 3290 - DNA, 96 bp, Homo sapiens
gtaagcgccagaatatgaatcgccgggaagctgggagaaagctccgggaaaccctgagcagccagaaactggcgatggaatatgagaggagccctc

SEQ ID NO: 3291 - DNA, 88 bp, Homo sapiens
gcgatcgggagacagccgggcgctgcaaggtggcagagcgagctctctattactggaataatgaatacatcatgagtttaatcagtga

SEQ ID NO: 3292 - DNA, 82 bp, Homo sapiens
acaacgtctccctaagcaacatgataaagcatataggcatgggcttgaggcgcatattaaatttcctattgactacccctat

SEQ ID NO: 3293 - DNA, 88 bp, Homo sapiens
cgctcgcggagggagaggctgcagagcgagggcaggaggtcgcaatggaagaagagatcgccgcgctggtcattgacaatggctccgg

SEQ ID NO: 3294 - DNA, 83 bp, Homo sapiens
ccagcaccggccggatggagcgtccgcaacccgacagggggcccgtctgggcagaaaccatgtggaagagctgctgcgctgcc

SEQ ID NO: 3295 - DNA, 83 bp, Homo sapiens
gaaactgggtcggcaggacggtggtggagcccgagagagtcctaccaggacctggtccagcgcttggagccagtgatcatgga

SEQ ID NO: 3296 - DNA, 100 bp, Homo sapiens
tctatgctgcctacattaacattcttcttggagttttctacactgtttgtcgagatttgaaagagctcagacatctgttctttctacaacttcaacaggc

SEQ ID NO: 3297 - DNA, 82 bp, Homo sapiens
gggacgcgtcctcagacgcagcgtctagtccctggccatagctccgccgctgcccggtgagaagccctaccactgcaactgg

SEQ ID NO: 3298 - DNA, 83 bp, Homo sapiens
taccgtgtcctccatgtcaagttcctattcctatgttgtctgcattcaaaagagcattctattaaagctaccttaatttggcg

SEQ ID NO: 3299 - DNA, 100 bp, Homo sapiens
ccacctcgcacctactgtcgagtccacgttgggcatgttgttcgctttggaggcagcacccggctctttatcctgcagagtggtggacatgacaacagag

SEQ ID NO: 3300 - DNA, 90 bp, Homo sapiens
gggaattcagtactctgtaacacccagctaccaggtggtctgtttttctggggggccaccaacacctcccgtgaatctaccatgtaccca

SEQ ID NO: 3301 - DNA, 100 bp, Homo sapiens
gaagcccaccggtccccaacgcatcatgccagggagccaagcgtcctgcccggcctgcactggtgattgctgcggtgtttgaccgagacataaactgcag

SEQ ID NO: 3302 - DNA, 50 bp, Homo sapiens
tctcaattcaccacttggatcacagagttcagcagtgcctaagacctggg

SEQ ID NO: 3303 - DNA, 100 bp, Homo sapiens
tatggaacccaagcagtggcgaagggaatcgcaaggctcttccctgaccattttctactgtccctgcgcgaggtttccctaggacttctgcatgcccatg

SEQ ID NO: 3304 - DNA, 51 bp, Homo sapiens
ctgctcaggaaattttccaagacaattcccagtgggaaaagctacagaaag

SEQ ID NO: 3305 - DNA, 98 bp, Homo sapiens
catggcctggactggcacccagacagcgagcacattcttgctacctccagtcaagacaattctgtgaagggccagatattcgaagcttacaacatggc

SEQ ID NO: 3306 - DNA, 82 bp, Homo sapiens
ggacttctgcaataagcccatcttgctgcaccaagtggaggcgctagccgcgtggtctggaactgaaagtgatgcgtatttc

SEQ ID NO: 3307 - DNA, 98 bp, Homo sapiens
ctccccagccatgtggaactgtagaatcactgtggactgagacccacctttctagacctgaagcccaggaggaggaagaggaggctggttggtaccat

SEQ ID NO: 3308 - DNA, 83 bp, Homo sapiens
cgaaaacaccctgcaatctttcagacagacctgcctagagctggaacgttacctccagagcgagccctgctatgtttcagcct

SEQ ID NO: 3309 - DNA, 100 bp, Homo sapiens
agagaccagaggtatcctcggaatgtcatcaacaatcagaagtacaatttcttcacctttcttcctggggtgaccatggaggaagaagatgagtctcgag

SEQ ID NO: 3310 - DNA, 82 bp, Homo sapiens
ggagagagcgcgggcctctaggaaggcaatactgaacactgcgcagcttgcagaggtctcctggcagccctcattaggaatt

SEQ ID NO: 3311 - DNA, 75 bp, Homo sapiens
tgacatggaaggggcagtacaagcttacgtctctgctcttcagtacaatcctgggacatcagcagccaccagcat

SEQ ID NO: 3312 - DNA, 97 bp, Homo sapiens
gtttccctggtgaaaggatcctacaagaccctcaggctggtagtgcgcagcccatctgcacaggggaactgaggagaaacaggaatgaagagtgggc

SEQ ID NO: 3313 - DNA, 100 bp, Homo sapiens
gggagctggagcccgcgcagcgccccgcagggcgatggacggccgaaccccgcgcccgcaggacgccccagccagacaggtgatttggcttctgcacagt

SEQ ID NO: 3314 - DNA, 71 bp, Homo sapiens
ggaacaacactggccactttgaaccagatgatgggacgaaggagaaggcagagcccccccaggctatgaat

SEQ ID NO: 3315 - DNA, 95 bp, Homo sapiens
cctgatcgagtccctccggaactcacactccaggctgtggaaaatctctgttctcacaaagtctccccaatgctctacaagcaactgcgtcaggc

SEQ ID NO: 3316 - DNA, 95 bp, Homo sapiens
aatgaaaaaattacagcatctttttgcctttctggcccatacacagggcattttgtcagtgatgctgatctttgccttcttccaggaacttgtaa

SEQ ID NO: 3317 - DNA, 98 bp, Homo sapiens
cagaattctctacatttgtgaaagtcagtttctgaggaatttcatcagagtttgccagatccggcccggtgcctgggttccaggaggacacgctgcag

SEQ ID NO: 3318 - DNA, 99 bp, Homo sapiens
aactgtgtggattgcaaagggggcatcattgtgagtggctccagggacaggacggccaagaggccacaagaggaagctgaatgaagaggacgccgccag

SEQ ID NO: 3319 - DNA, 90 bp, Homo sapiens
cgctatggcgcactggagtaccctgttcctggcagacagagcgggatgccaccagcttgtccaaagggaagttccaggagctcctggtgg

SEQ ID NO: 3320 - DNA, 126 bp, Homo sapiens
agttttccgagaggtgaccgtaaaaggaattgatgcttctgattaccagacagtccagggtggtgattccactgaagcaactgccaaaccaaagagaagtttttatgctgccagggatttgtacaa

SEQ ID NO: 3321 - DNA, 48 bp, Homo sapiens
ctcccagagaggatggcatctagaagattactccaaaggtttcggcgg

SEQ ID NO: 3322 - DNA, 75 bp, Homo sapiens
cagacggcgagacctcctgcacagcatttctggattaaaagtggtgggggagtccctttctccagcctttcacct

SEQ ID NO: 3323 - DNA, 132 bp, Homo sapiens
cggaggaggaggagaggatgatttttggatcctgagaattgatctatgttggatcagtacaccaggggttggaaaaaccacactaggcaaagaacttgcgtcaaaatcaggactgaaatacattaatgtggg

SEQ ID NO: 3324 - DNA, 98 bp, Homo sapiens
accggacagagtttgatcgactgaatgagatcaaaggtcacctggaaattgccttattggaaaaacatttcttacgctgaccccgcactacatctacc

SEQ ID NO: 3325 - DNA, 71 bp, Homo sapiens
gtgctttgcgtgctggtcagcatccggaacaacagacctgtcatttactccatcctttatagtgatgctac

SEQ ID NO: 3326 - DNA, 75 bp, Homo sapiens
aaggagatcatagcagagtacgatactcaggtcaaaggtctcctctgagcctccggcctccataagacccaaaac

SEQ ID NO: 3327 - DNA, 100 bp, Homo sapiens
ctcttcctctagcagccagtatactttctgtcagccagaaactgggaacgggaccattgacttcccggagttcctgaccatgatggccagaaagatgaag

SEQ ID NO: 3328 - DNA, 100 bp, Homo sapiens
ccctgggcaagtcgctccgtcatgcggacctcagttttctcatctgtccgacgaagctccacagcacctgttgccttcattagcagcttttcctcctctt

SEQ ID NO: 3329 - DNA, 83 bp, Homo sapiens
caaaatcagaggcatactttataggtatcatgaactgatcactaaatatgggaagttggagcctttggcagaagtggacctaa

SEQ ID NO: 3330 - DNA, 96 bp, Homo sapiens
actcctccaagaaccaacccccaaattggctgggacagggaaatcctcattgacgattcaatttgttgaaggccaatttgtggactcctacgatcc

SEQ ID NO: 3331 - DNA, 95 bp, Homo sapiens
atgtggggggattctcgacctgctaacagaactggaccttttcgggaggcacaacctcacggtgagagcagcaagcacccctcctcaggccacag

SEQ ID NO: 3332 - DNA, 90 bp, Homo sapiens
caacacgtctctgttcgtcaggaacgtggccgacgacaccagtggcagctctcgccgtcgggattactatgacagaggatatgatcgggg

SEQ ID NO: 3333 - DNA, 75 bp, Homo sapiens
agcagaggctcagagcttggagacagacggaagatgatccctatgatcttgaagatgtttctgcacagaaatgag

SEQ ID NO: 3334 - DNA, 98 bp, Homo sapiens
cttcctatcctgttttctctcctgtttctttggattatagcagtgaacaacttgtgttcaattcagtgaccaattgcttggggccgcgcaaatttctg

SEQ ID NO: 3335 - DNA, 100 bp, Homo sapiens
tttgaatttgctagtaacgtcatggaggatgaacgacagctcaaagcttggattctgccgtgccactcacgaatggcgacacagaagacgatgctgacaa

SEQ ID NO: 3336 - DNA, 75 bp, Homo sapiens
tgaagaagggctccctcgtgaagaacctgaaggacacactagggaggagatatcaccaaacatgatggaacaggc

SEQ ID NO: 3337 - DNA, 82 bp, Homo sapiens
gtcgcagcgccatgaagtccctgtctctgctcctcgctgtggctttgggtttggtgcacctcgatttggaggaagtagggca

SEQ ID NO: 3338 - DNA, 96 bp, Homo sapiens
ggagccgcagccactgccacacggccgggaggccgagggcgcagaaggttcaccaagttgaagagtcttaacctttccaataatcatttaggggac

SEQ ID NO: 3339 - DNA, 75 bp, Homo sapiens
ctaccagaaggggaggagacgttggaatcagatcatggaagggaagtggttgctgtgtatgttactggtgcttgg

SEQ ID NO: 3340 - DNA, 48 bp, Homo sapiens
aggaatctggaattttattaaacatggaaggatttttactgggagagg

SEQ ID NO: 3341 - DNA, 100 bp, Homo sapiens
aaacaaagcaaaaccagttaccactaatcttaagaaggggacagatgatttctgctgaagattgtgagtttattcagaggtttgaaatgaaacgaagccc

SEQ ID NO: 3342 - DNA, 50 bp, Homo sapiens
agaagattacctttgactcttgtcccaggatgaccagtgtcccagtgaag

SEQ ID NO: 3343 - DNA, 75 bp, Homo sapiens
aaacatccatatcataagtggaattttggagatattcaaagaaagtgaaattcgttattctacatggaagaaagc

SEQ ID NO: 3344 - DNA, 90 bp, Homo sapiens
gagagcctgcctgcacggaagagacgcctcctcggcaactactctaagagtgaggaaattagaagaaaacattgaagcagaaagagcagc

SEQ ID NO: 3345 - DNA, 82 bp, Homo sapiens
cagatgctgacttacctgaacttgaggcgcctgtgtctggcagagctggtgtgagacgagacaatcctgccccgccgccggg

SEQ ID NO: 3346 - DNA, 99 bp, Homo sapiens
cttcagacagcatatttgagtcatttccttcgtacccacagtgcttcatgagagaggacggagaggctgtgagcagctcctacgagtcctacgatgaag

SEQ ID NO: 3347 - DNA, 75 bp, Homo sapiens
taccgatgtcttcttttccttatatgacatgagggaaggcaagcagatcaggttctcctgaaaagaaagctgaac

SEQ ID NO: 3348 - DNA, 76 bp, Homo sapiens
atctgttgctgcagttaccggaacctttgccaggactagtacaggaccacggctctggattaatcgaattacagct

SEQ ID NO: 3349 - DNA, 98 bp, Homo sapiens
tacattcctagcctccaaaatcggcagacattccaaactatacctccatgagctcctagaaggcagtgaaatctatctcccagaggttgtgaagcctc

SEQ ID NO: 3350 - DNA, 100 bp, Homo sapiens
ggagcctagaatgcatcagtgcccttgtggcgaatggggctcacgtcgagatttctataattggcctgatgaatcctttgatgaaatggacagtacacta

SEQ ID NO: 3351 - DNA, 75 bp, Homo sapiens
cgcggcgccgcgctcggcggccgccattgcaggacttgattattcttagaaatgcacttgacctgcttttgccaa

SEQ ID NO: 3352 - DNA, 100 bp, Homo sapiens
acacacaaaggaacctatgcagatgactgcttagtacagagagtaactcaggaacagcagcagtattggtatcgacagcacttgcttagtttgcaacaga

SEQ ID NO: 3353 - DNA, 102 bp, Homo sapiens
cggccggagaccgtggggcccccggttgccgccccctcggttgaacagacacggtagaagactcgcccattttggaatgtgaccgtctgtccttcaggagag

SEQ ID NO: 3354 - DNA, 97 bp, Homo sapiens
gtccctgtgacctgcagatattgggagatccacagctaagacgccgggactccctggaaacctagaaatggctcccactccatgaggtatttcgaca

SEQ ID NO: 3355 - DNA, 115 bp, Homo sapiens
acagattctgttgcgaaggcagccatctttagttcgtctttcctagagagggaggtggggaagacagggctccagctaccacaggacgggctctgggtatagccgttccagtcag

SEQ ID NO: 3356 - DNA, 75 bp, Homo sapiens
gcaatagaagctgtggatgaatttgcttttctggaagcagcctcgtcttacagcgtgactgcaaagaaaaagact

SEQ ID NO: 3357 - DNA, 100 bp, Homo sapiens
ccgccgggcccggccacagcctgcagcggagcccacgagaggcagcgccatggcggagcagacctactcgtgtccacagatcctggtccctacaaataag

SEQ ID NO: 3358 - DNA, 97 bp, Homo sapiens
agaatacagagatatggaatcagtcatccgtccttggctcaggatttggagagcttgcaccaccaaaaatggcaaacatcaccagctcccagatttt

SEQ ID NO: 3359 - DNA, 50 bp, Homo sapiens
gttccctacacggtctcctgggtcaaggttgaaatcacaaagattagaca

SEQ ID NO: 3360 - DNA, 127 bp, Homo sapiens
gcttctcattatggaacttcttactaacctgctgtcaaaagaattcatagatttcagtgatacaggttataaacaacttgtgaaatgagtgatttggaagatgatgagacaccccagctttctgccc

SEQ ID NO: 3361 - DNA, 75 bp, Homo sapiens
ctttgacattctggtggctggtggaatgctgggcttttgatgaggccattgctgaacttgatacactgaatgaag

SEQ ID NO: 3362 - DNA, 75 bp, Homo sapiens
agtcagcaagcagcatcacaagctcagcctggacagcaacaggaactgtggctgcaccatctgtcttcatcttcc

SEQ ID NO: 3363 - DNA, 90 bp, Homo sapiens
ggcctggaggagttgtacggcctggcactgcgcttcttcaaagggcctgtcctcccaaagccaactctaaggagaggagaggaagagcag

SEQ ID NO: 3364 - DNA, 71 bp, Homo sapiens
gttccccggcccacagtgggggtgtgcaaacccgagagaactgggaggaatgccagctcctgagcaggcct

SEQ ID NO: 3365 - DNA, 143 bp, Homo sapiens
gggacccgctgtcactgcgcctcccgctgccgacgccgcctggacggccgcactctccctgcccgagacccggtacctggaatggaaacacaaaagtagccataaagactcttaaaccaggcacaatgtcccccgaatcattc

SEQ ID NO: 3366 - DNA, 100 bp, Homo sapiens
tttgagcattgaatgttttatgaatgatgttgatgtatctggaactatgaataggcctgatcaaccccgtataaccaaagatgtaatttgttttcatgct

SEQ ID NO: 3367 - DNA, 75 bp, Homo sapiens
agctttctctgtgtattcggacttcctgctctacaagtcagcctttgaagaagatggtggagagaattcgcaagt

SEQ ID NO: 3368 - DNA, 82 bp, Homo sapiens
gggccgcggagcgttcacctgcggccgggagggtggcccagttgaaatccttcccttcctctaccttggaagtgcctaccat

SEQ ID NO: 3369 - DNA, 98 bp, Homo sapiens
ccgagcccggtactcagccttttaaaaactggaggaactgcaagcacatgttgaccagataactgaaatggcagcagtaatgaggaaagccattgaaa

SEQ ID NO: 3370 - DNA, 50 bp, Homo sapiens
gaagtgtcagcgctactgccgcagatccacctccgacccttaagccagag

SEQ ID NO: 3371 - DNA, 73 bp, Homo sapiens
gatctgaatagtattaaaataaaatacctggatgaggaagatgaagagcttgctgatgaccgtatggcactgg

SEQ ID NO: 3372 - DNA, 75 bp, Homo sapiens
gtccggctgctggatggaggggattttgtcagcttgtcgtcaagagctgaagaagcaggtggagagtgccgagct

SEQ ID NO: 3373 - DNA, 74 bp, Homo sapiens
caccttctccatcaggtgcagaaggctcctgcttacattcgggagtgtgcgagattgcactatttgggatccag

SEQ ID NO: 3374 - DNA, 50 bp, Homo sapiens
ccaccttgatccagcggacttacggtatgaagtgtaacagaacagacttt

SEQ ID NO: 3375 - DNA, 96 bp, Homo sapiens
ctggctaagcaaaaccctgcagaacggctgcctaatttacagcaaccatgaggtgttcttctctatgggcctccaggctgtggtaaaacgttgatt

SEQ ID NO: 3376 - DNA, 50 bp, Homo sapiens
ggacaagatggtttacatctcgaacggaagagagaagggcacagttacct

SEQ ID NO: 3377 - DNA, 75 bp, Homo sapiens
gttcttgagccccttcacgaccgtcaccatggaagtgtcaccattgcaggtcgatgaaacaggtgtagaagttaa

SEQ ID NO: 3378 - DNA, 74 bp, Homo sapiens
tgtatttactcaagaaatcaagtacttcagtaagagatgggattcccaaatgctggaaaatcctctttgctaag

SEQ ID NO: 3379 - DNA, 100 bp, Homo sapiens
agcctggaaggtgcgtgtggggctgggtctcggagtgggagacgtggagtgcaggtatccatgtttctaaaggacaaagttcagaataataacggtcgct

SEQ ID NO: 3380 - DNA, 100 bp, Homo sapiens
ggattacaggcacgcgccaccactcccaggatggatgcaaccttgaaagaactgacaagcttagtaaaagaagtctacccagaagctagaaagaagggca

SEQ ID NO: 3381 - DNA, 75 bp, Homo sapiens
cacgcagaggacgccggaacaccctggaagccgagaaatgaattcagaaggagctggcggacatcactttagacc

SEQ ID NO: 3382 - DNA, 80 bp, Homo sapiens
aacttggaatactctactggacaaacatttcctccaagttggcctttaccagagtttgatccaagccagattcgactgat

SEQ ID NO: 3383 - DNA, 50 bp, Homo sapiens
ttgcgtgtggtgatgatcgaaaacatccgctgttgtaccaggggtctaat

SEQ ID NO: 3384 - DNA, 95 bp, Homo sapiens
tgtcgtaggacctggcttgggtagagatgatgcgcttctcagaaatgtccaggcactatgtcgtccgaggcccagagatgaccccttatgaaggt

SEQ ID NO: 3385 - DNA, 90 bp, Homo sapiens
ccggcatcgtctttccgtcctctgaggcgacggccgcggctgcacaggctgagtcatcactagagagtgggaagggcagcagcagcagag

SEQ ID NO: 3386 - DNA, 75 bp, Homo sapiens
ccccggggcacagaagccaaggcagcccctggaagtccaggccctcaaggatgatgatgctgaaactggattgac

SEQ ID NO: 3387 - DNA, 98 bp, Homo sapiens
tgaaactgaagaagataacaatcaagatgaatatgaccctatggaagcagaagaagctgaggatgaagaagatgattatggattggatatgtctactt

SEQ ID NO: 3388 - DNA, 82 bp, Homo sapiens
caaaagtttgatgagattttttcagcaacaaggtgtgagttcttgatacgaatgaaaggccaagagtttgttgatgagattc

SEQ ID NO: 3389 - DNA, 100 bp, Homo sapiens
gaaaactagagctgaaacaatgggacccatgggttgcatataatcaagtttcacagagcttctaaagcaaacaagaagccagttcagttacctcggggaa

SEQ ID NO: 3390 - DNA, 102 bp, Homo sapiens
catctttgtcagtgcacaaaatggcgccctacagcctactggtgactcggctgcagcatgcttttcacttccactgcatctctcgctggctcaaaacacgac

SEQ ID NO: 3391 - DNA, 75 bp, Homo sapiens
ccgtgcccagatgctcataaggattgtcctctttctacaaaagggggaagtcataaaatggtatgtctttttaat

SEQ ID NO: 3392 - DNA, 50 bp, Homo sapiens
ctttcagctaacttattctactccccgatcaaagtccagatctccatctc

SEQ ID NO: 3393 - DNA, 83 bp, Homo sapiens
tctcatgaagcagctgcagcagcagcagcacagcgacaagacgacccctctgccatgaaccagtccatcccagtggctcccac

SEQ ID NO: 3394 - DNA, 95 bp, Homo sapiens
agcaatacctccaaacctgacaggcattccaggaggaaaacctatcaaaggtgcagaatctgggacaagttgcatgaagagcatatcaatgcagg

SEQ ID NO: 3395 - DNA, 76 bp, Homo sapiens
tctgtgactcatcagagtgtgggggttgtgaaagggacagagcagaatgggctgatatagatccggtgccgcagaa

SEQ ID NO: 3396 - DNA, 75 bp, Homo sapiens
agacctgccaatttaccagagataattgataacaccctgtaacagctgagttatacattggctcttcaaagacgt

SEQ ID NO: 3397 - DNA, 88 bp, Homo sapiens
ccgctgggcctgcaggtctctgtcgagcagcggacgccggtctctgttccgcaggatgcatttaaatcaaacggtattgagatggatt

SEQ ID NO: 3398 - DNA, 83 bp, Homo sapiens
cgaccatctgaagcatctgcttacaagcgtttctctggaaacccccctggtaagtgtggaggaggcgggacactctgacccaa

SEQ ID NO: 3399 - DNA, 100 bp, Homo sapiens
ggcggcggcgccatggcagggcttgcaggcattatcctgcactgaaaactctggaacatctagagcatacctacctgcctcaagtaagccactatcgatt

SEQ ID NO: 3400 - DNA, 98 bp, Homo sapiens
acatgggctgtgttgaagtgctgcaatcaatgagatcactggattttggaatgagaacccaagttacaagcccgtggaacacagagcattcctaatga

SEQ ID NO: 3401 - DNA, 75 bp, Homo sapiens
tttctttgatgattatgttgcttgctgtgtgaagcttcgagcattgacagtttctctgcaggtggatattgttcc

SEQ ID NO: 3402 - DNA, 100 bp, Homo sapiens
gtccaggaccttaggaaagctgcctgcagagaggtggagaggaagctgatctggatgcagaattagaaaactgccatcattacatgcagtttgcagcagc

SEQ ID NO: 3403 - DNA, 100 bp, Homo sapiens
cagctgttccagatttatttcctctttatctagaaatgcatattgtggtggacaaaactttgggtcagtttgaaaaggaggatcgagctcactgtggagt

SEQ ID NO: 3404 - DNA, 82 bp, Homo sapiens
cgaccacttgcggcctgagtatgatgtccagctcgccgctgtccaagaaacgtcgcgtgtccgggcctgatccaaagccggg

SEQ ID NO: 3405 - DNA, 98 bp, Homo sapiens
acgccccccctccttcacgccacacacacgagtcattttggatttgggctgacctggtagacttctgaaagacagtgctctgggttcaagttgtcctc

SEQ ID NO: 3406 - DNA, 75 bp, Homo sapiens
gagcgtggagctctgcaagaaggatcatctctacaagtgggccggatgtatcccccgcgttctcccaagtctgct

SEQ ID NO: 3407 - DNA, 75 bp, Homo sapiens
aggatctggaagtggaatccttactgcatgttttgcacgtatggttgcccccaagtttcctggcagtgtgtgata

SEQ ID NO: 3408 - DNA, 82 bp, Homo sapiens
cgtccgacagccaggcccgggagaagtgactgccaacagccagcccaatgtcgaatccagaaatgcaccacggacttcgtgt

SEQ ID NO: 3409 - DNA, 82 bp, Homo sapiens
ccatgtgactttgtcacagcccaagatagttaagtggggtatcatccatgcccgggccctagtcagagagtgcctggcagag

SEQ ID NO: 3410 - DNA, 100 bp, Homo sapiens
tcaggcgcctcttcttagttgatgatttagttgattctctgaagaatgtgaaagatgttgcagaagtgttccagaagtggctgaagatagaaggaaaaaa

SEQ ID NO: 3411 - DNA, 76 bp, Homo sapiens
ccggtgtaacgttcgggctccgtctcaggggctgaagtttgtgaggtctgagaaagaaccccagtttaagtttatc

SEQ ID NO: 3412 - DNA, 100 bp, Homo sapiens
caagcggatactggtcttctcgtcggattgcccatgcacttgttgcagaaacagccaagtactatactggcaattgctggagaagattttgcaattgttg

SEQ ID NO: 3413 - DNA, 51 bp, Homo sapiens
ggttgcgtggatctccagtggaaagcatggcggacaccgacctgttcatgg

SEQ ID NO: 3414 - DNA, 100 bp, Homo sapiens
gaaatatttttctttaaagcctgaagaaaagggagctatgaagacatgattggtgaggaggtgccatcggatcaatactactgggctcctttggcccagc

SEQ ID NO: 3415 - DNA, 74 bp, Homo sapiens
ttctggagtactcttattttgaaaaggtctaaggcttcttggcataggaagaaaccagtatattgatcttatga

SEQ ID NO: 3416 - DNA, 98 bp, Homo sapiens
agtaacaggagactgcagcagacccaggcccaggtggatgaggtggtggatgtggccaagctcatgaaagcctacatcagcatgatcgtgaagaagcg

SEQ ID NO: 3417 - DNA, 51 bp, Homo sapiens
aacatcttccaccacagcttagaggaaggttgtgcaggaccagcgttccct

SEQ ID NO: 3418 - DNA, 82 bp, Homo sapiens
caaaaagtcatagtggtgtgacaagttgctatcaaacaaattaatttacagaaacagccaaagaaggaactgatcattaacg

SEQ ID NO: 3419 - DNA, 83 bp, Homo sapiens
gtcgtacgtgggacaggccacgctgtccgtccgcagtaccgacgcctgcagtgtttcacctgtctcggaaagtaacatctctg

SEQ ID NO: 3420 - DNA, 88 bp, Homo sapiens
gaggtggtcagaattatttgcaatgtttgggatgtgtttggccaaatgggagagtggttacaacacacgagctacaaactacaatgct

SEQ ID NO: 3421 - DNA, 100 bp, Homo sapiens
ggcccctatggcagatttgaaaattcacccttgtagagtcattcctgcctttgagcggactcccttttaaggttttagctaaagaagatactgaggcagc

SEQ ID NO: 3422 - DNA, 73 bp, Homo sapiens
aaaaagcccagtggaggaaagagctagatgttgaacgtcgacgcatttacgatatcgtgaacgtcctagagag

SEQ ID NO: 3423 - DNA, 75 bp, Homo sapiens
gaacactctctccccagaaatccaacttctcaagctaatcttccagtaccaacaattgcagcaatagatggactc

SEQ ID NO: 3424 - DNA, 75 bp, Homo sapiens
gtattgtaccgctgagggaaaggagcgggactccggacctccaggagcccaaagagtcgattgatccaattaaag

SEQ ID NO: 3425 - DNA, 100 bp, Homo sapiens
gcccttcctgcccctcgaggctcaggaactggtagtgggcagcagtcagtgacaggtgtaacctctgtggatgacagcaacagttactggaggatacggg

SEQ ID NO: 3426 - DNA, 82 bp, Homo sapiens
gcgacggggccaggaagcaattctggaagcgcagcaacagcaagctcccgggcagtgcccatgacgcttccggagacaaccc

SEQ ID NO: 3427 - DNA, 75 bp, Homo sapiens
catgcccctcctggagaatttaatgaggttttcaatggaactctaactccttgccactcaagaaatgtcctccct

SEQ ID NO: 3428 - DNA, 100 bp, Homo sapiens
aaggaaaagacagtgtagtcctgcaaaacattttgagatggaattaaattcacctgtctcggccttccaaaatgctgggataacaggcatgagccaccgc

SEQ ID NO: 3429 - DNA, 50 bp, Homo sapiens
cagaacggggtcgctttgacaagatgcagacatcaagtcttcagaaacag

SEQ ID NO: 3430 - DNA, 74 bp, Homo sapiens
tttgagaaacctggatctgcgatctgtttgtgatcctgctcacactaaaatatgaaccacaaacacacagagaa

SEQ ID NO: 3431 - DNA, 98 bp, Homo sapiens
agcaagccctactgagcgtgctcccctctgagactggagtgagagggtcttctgtggcagctagactgtcttgcttgcttgctgaagttaatatgcca

SEQ ID NO: 3432 - DNA, 99 bp, Homo sapiens
tagcatatctgataccaccaaagacgtcttgctgccctccaaaaaagaagagaacttcgagcagctggcatagaaattcagaagaaaagaaaaaggaag

SEQ ID NO: 3433 - DNA, 75 bp, Homo sapiens
cagcgccttcccacggagcagcactcttcaccctgcacagccttgttagacaaattggagacaatctgattgttc

SEQ ID NO: 3434 - DNA, 74 bp, Homo sapiens
agcacggtactggagaacacggatggtcccgcccagctgcagaccctccaggctggaggaccagccgccctcct

SEQ ID NO: 3435 - DNA, 83 bp, Homo sapiens
attttactgtcaagacatttcttcggcattctgcaacaggcatttttagatgaattcactaactggtcaagaataaatcccaa

SEQ ID NO: 3436 - DNA, 90 bp, Homo sapiens
ccaggcacagccgacgccgcgggcctacacgcttgaatgtgttcaagaatgatcaggatacttgggactacacaaaccccaatctcagtg

SEQ ID NO: 3437 - DNA, 117 bp, Homo sapiens
caatatctgtcttcggtggactccttcggcagtccacccaccgccgccgcctcccaggcgatcagtgggtgaccgcggctgcgagggactttgtcatccgtcctccaggatctgggg

SEQ ID NO: 3438 - DNA, 100 bp, Homo sapiens
gttgcccccatggcggccaccggacaggtgaggatggcgggggccatgcctgcccgtggaggaaagcggcgttccgggtcctgggaactccaacaaggga

SEQ ID NO: 3439 - DNA, 83 bp, Homo sapiens
cggagatcctgatgaagttcgagcactaatatttaagaaagaagatgttaactttcagatttttcatactgctccagacccaa

SEQ ID NO: 3440 - DNA, 100 bp, Homo sapiens
ctggaagagaaacatcctaaggcttctgctcagaggacacattcagctaacgtattttagcaggtggagtgaggttgaagattcctgtgacagcgatgcc

SEQ ID NO: 3441 - DNA, 75 bp, Homo sapiens
gatttgttaaggattccaagtaactcttatttggaggaagagctgcgcaaaggtggagaccccaaatatgcccac

SEQ ID NO: 3442 - DNA, 100 bp, Homo sapiens
gcaatatcgatagaaagcgagtttcttgaagagtcatctgctaaactccactagagtcatctctacagttgagcatcctgtcacagaatgcattactggc

SEQ ID NO: 3443 - DNA, 75 bp, Homo sapiens
ggcggggaccgtccagcccagcgattctcagtcagagcctgagcccttgtgaagccggcaatgacaagtctgtat

SEQ ID NO: 3444 - DNA, 106 bp, Homo sapiens
gggcgagagaaatttaatcatagatggtggggaggtcaaccggcataagattctcaacatgttgactaagaacccaccatttactaagaacatggagtctccctta

SEQ ID NO: 3445 - DNA, 98 bp, Homo sapiens
ggaggatgactcggatgtctggtggggcggagcagacacagactatgcagatgggaggaaaacgggccttactatacatcatatcccccatcaccaga

SEQ ID NO: 3446 - DNA, 100 bp, Homo sapiens
cccactgggttgccaagctcgcgccggatgcggagcgcggtgctgccggtggagcttcaggcttggagtcccgatttcagagcaagtctggctatctgag

SEQ ID NO: 3447 - DNA, 82 bp, Homo sapiens
aggcatccttaccaaggaatctgcttttcaagtatgccaccaacagtgaagagtacttggaccatgagactgtttcagccac

SEQ ID NO: 3448 - DNA, 83 bp, Homo sapiens
ggctgccattgtggatccggtgcagccccagaagctcccggagccctgcctgttccctgtccatccaggccagcagctgaagg

SEQ ID NO: 3449 - DNA, 100 bp, Homo sapiens
ccaacccacctttcacgagaggagtccttgagaagagcctctccagccagaaccagagcgatcgtcttctgatcaaaggaggtaaaattgttaatgatga

SEQ ID NO: 3450 - DNA, 88 bp, Homo sapiens
ttacaactttcggggcatgtacaatcagaggagccgggtgtgggctgagccctgcctgattgatgctgccaaggaggagtacaacggg

SEQ ID NO: 3451 - DNA, 101 bp, Homo sapiens
tttcacagtttgcgggactcagtcccatcactccaaggagagaaggtttaagaatgttacatttgatatcatagctactgaagatgtaggcattttcgatg

SEQ ID NO: 3452 - DNA, 144 bp, Homo sapiens
ggacaagtaagtggatcacacgcgccggctgctgctactactaccactttgggctgatggcaactggctgtggatgagatgaacggaaaggagctcaatggaaaacaaatttatgttggtcgagctcagaaaaaggtggaacgg

SEQ ID NO: 3453 - DNA, 104 bp, Homo sapiens
cagattcgcagtggtcgcttcttctccttggcagcacgctggctcttctcctgaacttcctcgcctgcctggccagcttctgtgtggaaaccaacaatggcgca

SEQ ID NO: 3454 - DNA, 50 bp, Homo sapiens
gagatgcgagaggccctgcaggagaaggtcttgggcgtctttggtactgg

SEQ ID NO: 3455 - DNA, 100 bp, Homo sapiens
ttggatctacactttctcaagcactgtgatcttcaaatgggagtaggttgcatctttgttgaaatgatccaaggagttgctgcttttccaggaatgaaag

SEQ ID NO: 3456 - DNA, 100 bp, Homo sapiens
tgaggatcttgacagcttgggaggaagagatacattagatgagtgtggtttgagatacttgttagctatgcgcctacacacatgccttttgacatcgctg

SEQ ID NO: 3457 - DNA, 100 bp, Homo sapiens
cggctgccccaatccccggcagctctctcagctattattcatggactatccagtctaacagcttgccagttgagaacgatatacatatgtcagtttttga

SEQ ID NO: 3458 - DNA, 90 bp, Homo sapiens
ggttctctctcgaccccttctgcccggcgcttcggcccgggccgctcaggtgcagtccggttccagttgttggcaaaggagaggaagagg

SEQ ID NO: 3459 - DNA, 90 bp, Homo sapiens
gcccgcgcgcctcccggcctcgcccgagggtgcctgggcaggcgaggaccccaggtcaaaatgcagatcttcgtgaaaacccttaccggc

SEQ ID NO: 3460 - DNA, 100 bp, Homo sapiens
ctggagctgcccggctcggcagcgggaaggtcttgatgcagaactttattatgtgagaaatgaccttattagtcactacgctctatcctttagtctgtta

SEQ ID NO: 3461 - DNA, 100 bp, Homo sapiens
atgaaggtggtaatcctgacgaaattgaaattacctccgagggaaacaagaaaacatcaaagaggtctagcaaaggctttcatgagaaggacaagaagcc

SEQ ID NO: 3462 - DNA, 75 bp, Homo sapiens
ccaaattccgaagcaatcttcctgctaaggccattggacacagaatccgagtgttccatgccattgcagtgtcaa

SEQ ID NO: 3463 - DNA, 74 bp, Homo sapiens
tccagaagaagactggtctctcccaccacacagaggttgtctgcattcaaaagagcattctattaaagctacct

SEQ ID NO: 3464 - DNA, 100 bp, Homo sapiens
aacaaattgtacatttgcccattctcaggaagagcttgaaaaggtaagagtaaagtctccaccagaagctggtacccagttaccaaagatcatcttcagc

SEQ ID NO: 3465 - DNA, 98 bp, Homo sapiens
ccggtatgtggagctgttcattgtcgtagacaaggaaaggatggttcccacagaactagtagaaaaggaattttggcggctggtaagcagcattgaag

SEQ ID NO: 3466 - DNA, 83 bp, Homo sapiens
cgccgaggcaccgaggcactcagaggagaattaaacaaccaccatgtcgagcaaaaaggcaaagaccaagaccaccaagaagc

SEQ ID NO: 3467 - DNA, 100 bp, Homo sapiens
agctcaaaagaatggttggagcccaagcccctttgttttatggaggataacttcaaactaatgtgtactaatgccatgatttacaataaaccagagacca

SEQ ID NO: 3468 - DNA, 75 bp, Homo sapiens
ctagtttctaaggatcatgtctgcgagccaggattcccgagcaccaagctatggatcatcatggagtacctgggc

SEQ ID NO: 3469 - DNA, 75 bp, Homo sapiens
gcgagaaagccgttgcctccagcaccacttctaatgtggcttttcatggcctgccactgaaaatcaagaaagaac

SEQ ID NO: 3470 - DNA, 75 bp, Homo sapiens
cgcctcccgtggaagcccaggcccgcttcgcagagaggtacagaaagcagtcaacactgcccagggattgtttca

SEQ ID NO: 3471 - DNA, 90 bp, Homo sapiens
atcttcatcgccctggctctgaatggctttggtgggatgtgtatgaccttcacctcattaacagcatccattctggacttgcactcaggg

SEQ ID NO: 3472 - DNA, 74 bp, Homo sapiens
atacctccaaagccggtacgcctgttcccagagttcgttgaaaacaccacacactgtgagtttgcctacctgcg

SEQ ID NO: 3473 - DNA, 50 bp, Homo sapiens
gaggattgtcactccaacctcttttcgctgatcatcaatgctgtggtact

SEQ ID NO: 3474 - DNA, 100 bp, Homo sapiens
attggagacagtcttctgataggtttcctcggcatcagaagtccttcaaccctgcagctcctctggtgcaagtgtggtagctattgacaacaaaatcgag

SEQ ID NO: 3475 - DNA, 98 bp, Homo sapiens
gcgcgcgggagttcgaggccctgcggagctgcttcgccgctgcgatacactgcctctaggactgggacagatagccactgagtacctgcttcaaatca

SEQ ID NO: 3476 - DNA, 75 bp, Homo sapiens
gcgcagcgacggcgtcgggagagcgcgcctagccggctcgcgaatatgggataaaaccagcctggaatgtttgaa

SEQ ID NO: 3477 - DNA, 101 bp, Homo sapiens
agggccgcgcatggcatccccgacctggcccaaaagctccatttctatgaccgctgggctccggactacgaccaggtccggggatcccgagctgtcctgca

SEQ ID NO: 3478 - DNA, 83 bp, Homo sapiens
gacgccagcatcatacaccggctgttcgaggccttgactgtagaacatccagtcatggataaaaatgagctggttcagaaggc

SEQ ID NO: 3479 - DNA, 100 bp, Homo sapiens
cagaactgcctgaagaatgcggggaatcccagagacatgcgccgcttccaggcaggagctgggaggaggcggcagcggcggcggcagaaacagcagcggc

SEQ ID NO: 3480 - DNA, 75 bp, Homo sapiens
cttgaaaaagctgccctgagacggtgtcccgccgaaagcataatgcaaggcaaggtccagccgttccacccggca

SEQ ID NO: 3481 - DNA, 75 bp, Homo sapiens
attttctcttcttctgaaaaagagatcttggtatgatctcgtgaaatcttgagagaaactgaatgacgaatgaaa

SEQ ID NO: 3482 - DNA, 100 bp, Homo sapiens
acgggaaagacctgctcgccttggatgccttttccagtgactccattccactctttgaaggcatgaagacaacagtgagcgaggcagaacatcccctctt

SEQ ID NO: 3483 - DNA, 74 bp, Homo sapiens
ggatcacagagttctgccaccgcttcctggagggcaaaatcaagccccagcatgagaccagatgtaagctctcc

SEQ ID NO: 3484 - DNA, 100 bp, Homo sapiens
cggcgcggcctctggctgctcctgggtgtggatgaggtcaccattgtcaacattttgaccaaccgcagcaatgcacagagacaggatattgccttcgcct

SEQ ID NO: 3485 - DNA, 99 bp, Homo sapiens
ctacaatgtggaagaattataaaggaagaatggatagaaattgaagcacggatcagattatcatttgcacattttcggctttgtgagaaaccttaccat

SEQ ID NO: 3486 - DNA, 75 bp, Homo sapiens
ccgcgctttatcaagattatcgaggttgtcggggccaaagtggtaacgaacgcccgcagcccgggggctcgatgc

SEQ ID NO: 3487 - DNA, 75 bp, Homo sapiens
tggtgactttgaacatgctggtgccgctagccaagctgtcctgcctgggaatgtttctccagtgggttctttgtg

SEQ ID NO: 3488 - DNA, 83 bp, Homo sapiens
ctcgtcagcccagcctcttatgagaacgtccgcgccaaggctgccttggagttttcataagaaattgtccctggaggtgttgg

SEQ ID NO: 3489 - DNA, 74 bp, Homo sapiens
attgaattttacaaagaatccaagcaacaggctctgtccaatatgatttatagtatgaccttgagattatctgc

SEQ ID NO: 3490 - DNA, 82 bp, Homo sapiens
cgatgtcttctctttgctacggttctgtcatatgttgaagaatccatacaccattaagaaacagcctctgcatcagtttgta

SEQ ID NO: 3491 - DNA, 98 bp, Homo sapiens
aaaattttggtggagaattatccaacaagaaaaagacctgtggctattaagatagctgcaaatcagaaggagcccatgaatcttaattttaaagtgaa

SEQ ID NO: 3492 - DNA, 75 bp, Homo sapiens
catgggcgtcatgaataacatgcggaaacaggttattaacacggggatcaaagtctggtgtagaaataacagcgg

SEQ ID NO: 3493 - DNA, 83 bp, Homo sapiens
cagctcggcagtcgcgaagcagcaaccatggtactccaaagattcaggtttactcacgtcatccagcagagaatggaaagtca

SEQ ID NO: 3494 - DNA, 100 bp, Homo sapiens
gacactgagagccgctttcatcaagggaagtcgagataacatgagtattgtactagtttgcttttcaaatgctcccaaggtctcagatgaagcggtgaaa

SEQ ID NO: 3495 - DNA, 48 bp, Homo sapiens
tactattcgtctgagagaatggctgctcctgcttcaggtgcagaaata

SEQ ID NO: 3496 - DNA, 75 bp, Homo sapiens
tgaagatactcaatcgacagaagattcggagccttgatgtgagagctggcggtcaccatggcaatgcgggagctg

SEQ ID NO: 3497 - DNA, 50 bp, Homo sapiens
cggaagcggagagcaacagcgcgccgattgctcgctgtaagcagctcatc

SEQ ID NO: 3498 - DNA, 75 bp, Homo sapiens
ccgctttctccaccagcatcaacgaggtacaaaatgaggccaagacacccttgaagaagttcttgttgaagctgg

SEQ ID NO: 3499 - DNA, 78 bp, Homo sapiens
tgccgagcaattgtgatgagatattctgctgagtggaagttggctggatctattattggcaaaggtggtcagcggatt

SEQ ID NO: 3500 - DNA, 100 bp, Homo sapiens
atcatcatctacttcacaggaattgccatttttgaccatgttgttcctgaacctgggtccagcctactgacctctttcgagaagtggcacgaagcagctg

SEQ ID NO: 3501 - DNA, 100 bp, Homo sapiens
actctagaatatacaaagacaaaaggagattctgatgaagaagttattcaagatgcaaatgcagccctgaggatttggctactgcatataacaacagggg

SEQ ID NO: 3502 - DNA, 97 bp, Homo sapiens
ccagaagaacaattagggtgacgtgtgcattgagtaaacatctgcaaagcagcttgccactctctttgtgaacctgtgtgtcactgcagagacccat

SEQ ID NO: 3503 - DNA, 95 bp, Homo sapiens
gcagcctcacatggtgtgggccgacatcaagagctgcgagatccaacagagatggagtttcactgtgtcagccaggatggtctcgatctcctgac

SEQ ID NO: 3504 - DNA, 90 bp, Homo sapiens
caggatcaaaagatacaacagttatcatatggcaagttgatccgacctgtgttgcgtggtgggtctgctgccgccacttctaatcctcat

SEQ ID NO: 3505 - DNA, 100 bp, Homo sapiens
aggccacgctgtccgtccgcagtaccgacgcctgcagggccaattcctgtccccccagcagcatggcatcgtgtgctgaaccctctgagccctctgcccc

SEQ ID NO: 3506 - DNA, 101 bp, Homo sapiens
ctgccactgacagctgtcccgccctacaggctgcgggtgatcgcagaagcctacgctaccaaagtatgacctgtcagcctctacattctctcctgacggaa

SEQ ID NO: 3507 - DNA, 82 bp, Homo sapiens
agcgagcccttcaccctggtggagcgagacggctctgaagggctccaagaagctggtgctgtctgtgtactcagcagggcgc

SEQ ID NO: 3508 - DNA, 100 bp, Homo sapiens
ctttggggcagctggagaaacaattgtcattgaagaacttcttgacggagaagaggtgtcggtgatggtggccccaaggccttgaaggggctgggctcca

SEQ ID NO: 3509 - DNA, 100 bp, Homo sapiens
ccattcttgaggtggcaggtggtcagctgcgaatcaaaccggtttgtttgaagagactgtaccagagggccagggaggaggagaaaggaattgagctggc

SEQ ID NO: 3510 - DNA, 99 bp, Homo sapiens
gtgagtgaagatcttgtaatcaggttacgtcgaccccctctaagatacccaagatatgctcctacagaagaagggaaaaaagagctgctgttcctaagt

SEQ ID NO: 3511 - DNA, 106 bp, Homo sapiens
ggccgctgggtgccctttgccgctgtggctgcggctaactgtgtcaatatccccatgatgcgacagcagataaggaagcctgtgtgggtaccaacaatcaaagcta

SEQ ID NO: 3512 - DNA, 50 bp, Homo sapiens
agccgactggagcaggcagcagcccagagacaaagcatggaggacacaag

SEQ ID NO: 3513 - DNA, 75 bp, Homo sapiens
gcccgtgccgcgagcgcggcctgcaggagtgtctccagaacgctatagctatggcacctccagctcttcaaagag

SEQ ID NO: 3514 - DNA, 100 bp, Homo sapiens
gtcatggcaaacgtcttaacattgaacttgtgcaacaggttacagaaattatctcagagattcgggcgcccattgttactgttggtgttaataacgatcc

SEQ ID NO: 3515 - DNA, 85 bp, Homo sapiens
tccaccagaggactgggaggagcatgtcaacagaaactatgttccaacttcctgtcaacaatcttggcagtttaagaaaagcccg

SEQ ID NO: 3516 - DNA, 73 bp, Homo sapiens
agcgcctcgtcgacatgagtgatgtggaggaaaacaacttcgagggcagagaagtgacctcacaatgactcaa

SEQ ID NO: 3517 - DNA, 83 bp, Homo sapiens
caaggagctaaagcagcgtgcgttcagccctgggggtcactttccgtatcctgatccttcccagtggacagatgaagaattag

SEQ ID NO: 3518 - DNA, 83 bp, Homo sapiens
cagggatgagtcatgtggcagtggaaaatgcgctcgggctggaccagcaggtgccagaaccctgtggagcatcatgaactggg

SEQ ID NO: 3519 - DNA, 101 bp, Homo sapiens
ccgcgctctgggcacagccttggaaagtcaggaccgcgacggcagcagagcaaaaccaaggtgtatgttggtaacctgggaactggcgctggcaaaggaga

SEQ ID NO: 3520 - DNA, 88 bp, Homo sapiens
ctctgctccacactgccaaccggccagaggacgagtgtgtgagagccacgagccaaggtgggcacttgatgtcggatctcttcaacaa

SEQ ID NO: 3521 - DNA, 100 bp, Homo sapiens
agaactcttttcgaggaactatccggtgtccccaggtgtcattgccaacccctttgcggcaggcatcggccaccggaacagcctggagagcatctcttcc

SEQ ID NO: 3522 - DNA, 83 bp, Homo sapiens
agaaggtggcagacccggtttgctgatcgccccagggatcaggagagaattttctctacatgtgcacccatttaaaggactcg

SEQ ID NO: 3523 - DNA, 50 bp, Homo sapiens
tatgcagtccattattgacaagggaatgatgacaacaatctcaattccat

SEQ ID NO: 3524 - DNA, 116 bp, Homo sapiens
ctcacattcaagctgataggctgcgctaccggaatgtcatccagcgagtgattaggttctgattggaactgattccatcccgaacctgcataagctggagcaggtgtccagtgatg

SEQ ID NO: 3525 - DNA, 82 bp, Homo sapiens
gcgttcccagcccgggtccccgcgttcacagccccagcgcaggggccaaaccagtgctcctgccacctctctggctgccccc

SEQ ID NO: 3526 - DNA, 83 bp, Homo sapiens
cgggccccggccccgcgcgccccggcccggccccgcgaggctgaaggtgatgtggccgccctcaaccgacgcatccagctcgt

SEQ ID NO: 3527 - DNA, 82 bp, Homo sapiens
ccagcctgacacatatggactgctcgacagacctgcctagagctggaacgttacctccagagcgagccctgctatgtttcag

SEQ ID NO: 3528 - DNA, 113 bp, Homo sapiens
cgtgcttcgtggcccggcaccgttccgcggacgtgctcggaatcagtgtcattcaaggacgtaactgtagacttcagtagggatgagtggcaacaattagaccttgctcagaa

SEQ ID NO: 3529 - DNA, 96 bp, Homo sapiens
gcttgctggatcattgtattactcatcacagatcggaacggaggcctgtggtggaaaaggattattcatacctgaaggagatatgtgatcaccaag

SEQ ID NO: 3530 - DNA, 83 bp, Homo sapiens
cttaagcaaacgggaattctcgcctgctgatgcaaggaatcccctgggctcccgtccactccactgctgaccagcccattcgc

SEQ ID NO: 3531 - DNA, 100 bp, Homo sapiens
gtacgaaacaacactaagaaatttggatgggttaaaaagtttgcagttacatgtgaatatgtgataatttgttcagtgttgctcactgacttccactacc

SEQ ID NO: 3532 - DNA, 100 bp, Homo sapiens
tgggtccatggcccgggtaggagccctgagtgagtgtccattccaaggggacgagtccatccacagtgcagtagaaacagggtttcgccatgttgaccag

SEQ ID NO: 3533 - DNA, 82 bp, Homo sapiens
gaacattggtctaaagtctttccaaaaggtcaaggttcacaaggtgtctcttctcacgtggaatcacagcattggatggact

SEQ ID NO: 3534 - DNA, 80 bp, Homo sapiens
gaaagcatgaaaaatcaaaaggagttcatgcttatgaatgctcgacttcagactgcctctgtcaccgggtccctccaccc

SEQ ID NO: 3535 - DNA, 82 bp, Homo sapiens
gccctgttccccgcgctgcggcctggcggcttccaggcgcactaccgcggccatgcggaccctcagttggaagcacaccctg

SEQ ID NO: 3536 - DNA, 75 bp, Homo sapiens
ctttcacagacttagaagctaatcagctctttgatcctatgacagatgtatggtctgctggctgtgtgttggctg

SEQ ID NO: 3537 - DNA, 75 bp, Homo sapiens
aggaacctccagagcaggagaccttctacgagcagcccccactggaccttaaagaagccaacttcgacatcaatc

SEQ ID NO: 3538 - DNA, 83 bp, Homo sapiens
gacctggagcgccacgccatcttcacagaggaacaagcacatcatgattgacttggggactggcaacaacaacaagattaact

SEQ ID NO: 3539 - DNA, 48 bp, Homo sapiens
gagaaagagcctccgtcaccacatattccaagatgagatgggattctc

SEQ ID NO: 3540 - DNA, 83 bp, Homo sapiens
cagtgacctcctggacttcagcatgttggaatcgaagcctcttaaaatggcagatgacttggacttcgagacaggagatgcag

SEQ ID NO: 3541 - DNA, 89 bp, Homo sapiens
atgggccccatctggtccagttactatggaaactgccgttctctcctgggcacgcggccccgagccgcatcgtgtgggagcacacacgc

SEQ ID NO: 3542 - DNA, 99 bp, Homo sapiens
ggttgaggcctctgggtttgaattcaccagcttggtattttcagtctccttcccaccacaactatctgtaagagaggatattggtgctggaaaaggcaa

SEQ ID NO: 3543 - DNA, 100 bp, Homo sapiens
ctgaatcctgaagatggaaatgtagcttaatgacctccttgtcctggagtctcccttaatacaggctccgagctctgtccagtggtgggagtattacatc

SEQ ID NO: 3544 - DNA, 100 bp, Homo sapiens
caactgccgcacccttgaaaggaggcccctgccgtgtggacccgtaaaataaaatggttagctgctatcaccaaattaagggcaaaaggccaggttctta

SEQ ID NO: 3545 - DNA, 51 bp, Homo sapiens
cacggcttcccccaaggaatatacagagcatattaaaaatcttcagactga

SEQ ID NO: 3546 - DNA, 100 bp, Homo sapiens
caagaccatcatgctgcgcggccttcccatcaccatcacagagagcgataaaatgtggacacagacttgccaggcagcctggggcagagtgaagagaagc

SEQ ID NO: 3547 - DNA, 117 bp, Homo sapiens
aggcgctcgcggcgcctgggattttctctgcgttctgctcctactgcttcgcgtccagacagggcaacatgcaggttctggtgacttacggtggcgatcccatccctaaaagccctt

SEQ ID NO: 3548 - DNA, 80 bp, Homo sapiens
aacgacacaagaaacacaacttcagacttgcagaaaaccagtgaaggggtcctgctcaatctggaattttgtcagatcgt

SEQ ID NO: 3549 - DNA, 50 bp, Homo sapiens
gattctataagcagttaggatctggaggctgctttgtaccgcctcagtgg

SEQ ID NO: 3550 - DNA, 97 bp, Homo sapiens
gacgtcggggccgagctaacccggcctctggacaagagctttaatgactgatgaaacaatatccaatgtgccaatccttatcttgggtaacaaaatt

SEQ ID NO: 3551 - DNA, 98 bp, Homo sapiens
gaacaaatcaagcacatccttgctaatttcaaaaactaccaggttattgcagctgactgcaaaagggtcacagtgctgaagtattttctggaagccct

SEQ ID NO: 3552 - DNA, 87 bp, Homo sapiens
ggaagtttaccctcagtgggggaaattggaacacagtttcagagacagccaaggccaggacgactggaatgggaccaggccgtcgct

SEQ ID NO: 3553 - DNA, 90 bp, Homo sapiens
gagcgatggttagaaaatgtggaactacactggaggacacccgagtactgttaaagcaatcctcatgtttgcctgagaatacagatcaac

SEQ ID NO: 3554 - DNA, 112 bp, Homo sapiens
gatgtcttcatccccaagccattcagggcctttgcctttgttacatttgcagatgatcaggcttggccttcgtgcctctgcagatctggtccaaagtcctggccatctcagg

SEQ ID NO: 3555 - DNA, 98 bp, Homo sapiens
gaatcttcactcccgctgtctcagcagtctacagcacgctacatgaatgtgtaagatcttggaggaagacagcagagagagagagagagatcagagat

SEQ ID NO: 3556 - DNA, 83 bp, Homo sapiens
ttggactacgctattacacgggagtaagagctgtagtacacatggatgaacgacgagaagaacaaattgtacagttactgaat

SEQ ID NO: 3557 - DNA, 100 bp, Homo sapiens
tcaacccctacaacttattcctgtccggagacagcctaagggttgggataattcttcactattccacccttgccacagtactatgggtaggagtgacagc

SEQ ID NO: 3558 - DNA, 100 bp, Homo sapiens
agaccaactgccccgccaccgtcatcaacgggcagtttgtcgaacgatgttggactcatagtcactgccagaaagtgaaaatgcctcgtgtaaaagcagc

SEQ ID NO: 3559 - DNA, 96 bp, Homo sapiens
aagtacgatatcctcaaatgctagtaaaccaccaaaaccctcaacaggggcatctctgagttcatcgtgatggctgcagacgccgagccactggag

SEQ ID NO: 3560 - DNA, 98 bp, Homo sapiens
ttcagacagagccaaggtgcagggcaacacctctacaaggatctgcagccatttatattgcttaggctactgacaaatttacatgtattggagaccag

SEQ ID NO: 3561 - DNA, 76 bp, Homo sapiens
tttttggcctaccctccaaagaaaaggttggaaaagagactgttcaaaccactgaggatcagattttgaagagaga

SEQ ID NO: 3562 - DNA, 115 bp, Homo sapiens
agggcaaggaaagcagcatagagaatgagatagccgtcctgagaaagggaaggtgtggctcattgactttaatccatttggtgaagtcacagattcactgctgttcacctgggaa

SEQ ID NO: 3563 - DNA, 82 bp, Homo sapiens
cttttgctgttgtggcaacgggttgatattcactgatggactccaaagaatcattaactcctggtagagaagaaaaccccag

SEQ ID NO: 3564 - DNA, 136 bp, Homo sapiens
ctccgaaccctgaggcagtgtgtgaagctgggacgccagccatgttccagaccgcttggcgccagccagttcctgttgcacgaaaactatctgctcgggaacagcgagattgtgaggttattgaacgactcattaa

SEQ ID NO: 3565 - DNA, 75 bp, Homo sapiens
gtcgagcagcggacgccggtctctgttccgcaggatgtgtccatgaaactgggaggcgaccgtgttagctgccag

SEQ ID NO: 3566 - DNA, 74 bp, Homo sapiens
gattcctgtctaagaaaaggaggatttgttaaacactttaagatgagaaaaattgatctctgtctgagctctga

SEQ ID NO: 3567 - DNA, 96 bp, Homo sapiens
caaagagttccgccttagtaattcagtcttatatccggggttggaagaacaggtgggattgttcctccagcagctcaacagcttcacagagaaaat

SEQ ID NO: 3568 - DNA, 109 bp, Homo sapiens
ggaggtggaggaagaagagagggaccggatcccaggccccgtttgcaaggcatggattccgtgaaggaacaacacctaaacccaagagggcagctgttgcagcatccag

SEQ ID NO: 3569 - DNA, 99 bp, Homo sapiens
ggacaaaaaaattcctggaaaaagaagtccaagaagcaaaaaagggactgctaagaagataccaccagagtgatccagagtttgtgcagtggaagaaag

SEQ ID NO: 3570 - DNA, 100 bp, Homo sapiens
gtcattgcaagatgtttcagatgaacaagtgctggttctctttgaacagatgctgggtggttctcttcccaaagtggaagccaaattcatcaattatgtg

SEQ ID NO: 3571 - DNA, 119 bp, Homo sapiens
ggaatgcagacctcctgaaaaccaagccgaggactgcggggtccggtgtccacgcagaatgccttcaattaagttgcagagttctgatggagagatatttgaagttgatgtggaaattg

SEQ ID NO: 3572 - DNA, 50 bp, Homo sapiens
gttggcactacccgtcttgaggaatggtacagctctgccggggggggaaa

SEQ ID NO: 3573 - DNA, 74 bp, Homo sapiens
tgcagcagagcgcggcgcagaaggttgatgataattagaagcatgctttccactgaacttcccgacaacatttg

SEQ ID NO: 3574 - DNA, 101 bp, Homo sapiens
ttctcttggagcagctggtcatcatggctatttttatgattcccacaaatccaccaccaacattcagaaagccagaactttggtccgatgatttcaccgat

SEQ ID NO: 3575 - DNA, 100 bp, Homo sapiens
ctggaaggcatctctactaagagctggggtctatcctgacaaatctgtaataacaacgaacttgatgcaagtgataggtttgccaaggtcagacctctca

SEQ ID NO: 3576 - DNA, 83 bp, Homo sapiens
ggacaggcatcgtggggatcttggcagcgctgcagggccctgaagaggaaagtgaggatgactctcatctcgaaggcagggat

SEQ ID NO: 3577 - DNA, 75 bp, Homo sapiens
gcgcctgctgctgttgctgcttctgggggtcaaaatgcagatcttcgtgaaaacccttaccggcaagaccatcac

SEQ ID NO: 3578 - DNA, 107 bp, Homo sapiens
acagcggcaccgccagacggccagaaagttccgccatgagctggggcacggagctgtggcctcaaggaataggttctcctagtgtctatcatgcagttatcgtcatc

SEQ ID NO: 3579 - DNA, 50 bp, Homo sapiens
agagccacacacaccatcatggtcctggcatcaagcatgatggaaccatg

SEQ ID NO: 3580 - DNA, 80 bp, Homo sapiens
actgccccgcatcaccggagcgtcccagctgcgaggagatgccatcattaatgagaactatgactacctgaaggggttct

SEQ ID NO: 3581 - DNA, 100 bp, Homo sapiens
acgtcagtcctggaggaggcgagggagatgttaaacatgtctaagaaaacagtttcttgttttgtgaacttcaccagactacagcagatcacaaatattc

SEQ ID NO: 3582 - DNA, 131 bp, Homo sapiens
tttgatttttcatcttgtgaaagcagtccttgttcctatggcctaatgaacaacttccagggctcaaaatctccttcgccaagaccaaacatgcctgttcgatacttcataatgaagagtagcaatttgag

SEQ ID NO: 3583 - DNA, 90 bp, Homo sapiens
ctgtggacaagctggtcaacatgacatcatttcccccgtttcccgaggggcatccagccgtgttgcctggggaggacccacccccctatt

SEQ ID NO: 3584 - DNA, 83 bp, Homo sapiens
cagcctcaaaaccgtcctgctgcttgctgaccaaatgcccgtggaccgggagcccgtggaccgggagccggtggtgtgccacc

SEQ ID NO: 3585 - DNA, 98 bp, Homo sapiens
caccgagccatcaaggtgaccgtggacggaccccgggagcccagacagatcctgaaggagctagacgagtgctacgagcgcttcagtcgcgagacaga

SEQ ID NO: 3586 - DNA, 82 bp, Homo sapiens
gcattgccgccggtcctgaccaccgtgaacggacagtcccccccaggctgaaggggatgctaagggagataaagcaaaggtg

SEQ ID NO: 3587 - DNA, 100 bp, Homo sapiens
ccagcggtccggccaaggacgctgaggtatctcgggggagctttgtgccttgatggatcaagttcatcatatgcagcactcaaaatggcagcatccttcg

SEQ ID NO: 3588 - DNA, 51 bp, Homo sapiens
ccagtgagctcctggattctgctggccagctggtctctggctccaggccca

SEQ ID NO: 3589 - DNA, 75 bp, Homo sapiens
ccctctagccccgctaccggactacatgtcggaggagaagctgcaggagaaagatggctgctgctggacacggag

SEQ ID NO: 3590 - DNA, 88 bp, Homo sapiens
gacgaaaacatgtactacagccagtcttctatgtttccacatcggtcagaaaaagatctatgctaagaaggaatctgatcttaatggc

SEQ ID NO: 3591 - DNA, 75 bp, Homo sapiens
tcagctacagactttcctgagtcaggaaccctaaggactctgcaatatgaataattccctagagaacaccatctc

SEQ ID NO: 3592 - DNA, 121 bp, Homo sapiens
caagcggtgccatgaatttgtcacattctcctgccctggcgctgacaagggtccagcctccgatgctcccctggccacactggctctacatccatgagcccatcagcagccttgtccacag

SEQ ID NO: 3593 - DNA, 101 bp, Homo sapiens
gaaaccaccgtgctggaccgcttttacaatgcagtcactgtgtgcccagtattctgcagacaaacgagaagatgagaagatgtgtgatcatttgataagag

SEQ ID NO: 3594 - DNA, 97 bp, Homo sapiens
aaaggaaaaacaaagcagtcaatggagcagagaatgatccctttgttagaccaaatttaccacaactatgcctgaggaagtgcaccatggagaggag

SEQ ID NO: 3595 - DNA, 75 bp, Homo sapiens
aaacaagctcagggcttccactgattctacattatggtgggtttgatctggacatcaaaggctggggcggagagg

SEQ ID NO: 3596 - DNA, 96 bp, Homo sapiens
caccaagacccacgttatcttgctcgcctgcggcagcttcaatcccatcaccaaagggcacattcagatgtttgcattgcagtgtcgagatggcta

SEQ ID NO: 3597 - DNA, 100 bp, Homo sapiens
tctgtgccaacaagctgcgtgtggccgtgccgctgctcagcagcgggggacaggtggctgtgcttgagcttgatccagctggaggccttcctgagccgcc

SEQ ID NO: 3598 - DNA, 98 bp, Homo sapiens
agcgcgaatatcgtcatcgttagaagggaactcaaaactgtatgatctaccagatgagccttttacaagacagttttactttgtccactcagctggtc

SEQ ID NO: 3599 - DNA, 90 bp, Homo sapiens
accccaacttccagctcgccctaaacttcgcctggtccaacttcagctatcatgagaagtttttctctcctacaagaagccataatcccc

SEQ ID NO: 3600 - DNA, 90 bp, Homo sapiens
cagaagcagacccgtgccggccagcgcaccaggttcaaggccgacacgctcaaggagcggtaccagaagatcggggacaccaaacgcgcc

SEQ ID NO: 3601 - DNA, 98 bp, Homo sapiens
gaataggaagcatgtaccctggacagagcacttcaaactagagctgcagagcctggagcaggagaaggggcgctggcgggtggagaaggcgcagttgg

SEQ ID NO: 3602 - DNA, 98 bp, Homo sapiens
attgacattctaactaagcgaaacaatgcacagcgtcaacagatcaaagcagcatatctccaggaaacaggaaagacagggtctcactctgtggccca

SEQ ID NO: 3603 - DNA, 75 bp, Homo sapiens
ggaaacaccatggctgcggcggcccagctctctctgacacaggcatgttatgttacccagagaactttccaaaca

SEQ ID NO: 3604 - DNA, 100 bp, Homo sapiens
ccggtgtaccgcggcgagaagccccagctgcactacgcgctcttcacagatggaatcacaaataaacttattggctgttacgtgggaaacaccatggagg

SEQ ID NO: 3605 - DNA, 82 bp, Homo sapiens
aggttctttccctttaagatatgtgcaggatcaagttgcggcaccttttcagcgggagccctggaagcttatgttcaatcag

SEQ ID NO: 3606 - DNA, 78 bp, Homo sapiens
cggaggctgaggagaaggaggagcgggccgtggaggcttcgccgcctagggacctgtcctatatcaagatcatggatg

SEQ ID NO: 3607 - DNA, 83 bp, Homo sapiens
catccttcccacccgttcgtttttagctcggctgccgaacttcattgcacagttgagccgcttacaaacacgcagatggcaag

SEQ ID NO: 3608 - DNA, 75 bp, Homo sapiens
agcctacctgctgcacaccacctgcctcccgctgaggctacgtgcgccaggggctgttgtcggccgtctcctccg

SEQ ID NO: 3609 - DNA, 98 bp, Homo sapiens
gagctatggacacagagaatttttccaagttacagctacctaggtgctgactgggttacttttttaaacactaggaatggtaatttctactcttctgg

SEQ ID NO: 3610 - DNA, 100 bp, Homo sapiens
gttggagaagtatccaatagggatattgtagaaactgtctttaacctgagaatggatcttggagaatgtctgaaagtccatgacctggctttaagagcgg

SEQ ID NO: 3611 - DNA, 100 bp, Homo sapiens
caaattcatcaaagacgtaatcaaagacggcaacgcgcttatcagcgctatgagaagaatgctgtctctgcaatttgagaggaggtgctcttaagcaaac

SEQ ID NO: 3612 - DNA, 87 bp, Homo sapiens
tgaagctatgcagtatttctttggcatcactgcagctagtaatttgccttctggattaaaccttctctatgtctacccacagaggct

SEQ ID NO: 3613 - DNA, 130 bp, Homo sapiens
ggcgccgctctccgagctcgatccgctgctcgcacgggagccagctgggtgatgtcaagccctccaacatcctagtcaactcccgtggggagatcaagctctgtgactttggggtcagcgggcagctcat

SEQ ID NO: 3614 - DNA, 96 bp, Homo sapiens
gaacccacccgagagcaacaaagcaggcgactacagccacgtgaaggaatcccagtcagaagttccagcctgccactgttctctgatgccatgcca

SEQ ID NO: 3615 - DNA, 100 bp, Homo sapiens
ggccaatgcgacttaccactgcaaaaaggtggcaggacaaattgcgcccatttagaggatgtggctgtaacctgctggatgggactccatagctccttcc

SEQ ID NO: 3616 - DNA, 83 bp, Homo sapiens
gacgcctcctaatttccaaattacaagatgaatttgaaaaccgaactagaaatgttgatggttgatgataattagaagcatgc

SEQ ID NO: 3617 - DNA, 50 bp, Homo sapiens
gaggaaccgcccaacatggcctcggagatctgcctccgctttcacagtcc

SEQ ID NO: 3618 - DNA, 50 bp, Homo sapiens
gagatgattgccaaacccccagatttggagtctcattctgtcacccaagc

SEQ ID NO: 3619 - DNA, 75 bp, Homo sapiens
tcagcctcctgaatagctgggattacagacaggccgacggtcgcaaggtcctacggtcaagcatccgggagtttc

SEQ ID NO: 3620 - DNA, 101 bp, Homo sapiens
gagagaggcaccgggatcgtgaccgagaccgtgaccgagagcgtgaccgagagcgcgaatatcgtcatcgttagaagggtgttgaaagcagcaggggccta

SEQ ID NO: 3621 - DNA, 75 bp, Homo sapiens
gttccgcacaggcctgctgaactgggtgctttatatagggtacaggtttgcagattccgccagcagcacagcaag

SEQ ID NO: 3622 - DNA, 80 bp, Homo sapiens
gaccctggagcctcagttggaagcagccgatccagcctgcggagcctgtggggcagggccaccagatgcctccacccaga

SEQ ID NO: 3623 - DNA, 98 bp, Homo sapiens
gagtctcattcagccattcttgaccagaaattaaatggtctcaatgaggaaattgctagagtaggacttaaccaccaccatgtcgagcaaaagaacaa

SEQ ID NO: 3624 - DNA, 100 bp, Homo sapiens
tgaactcatatcagaggaatttgtacagagatgtgatattagagaactatagcaacttggtgtcactggttgacatgaagacaatggagactgcagagaa

SEQ ID NO: 3625 - DNA, 157 bp, Homo sapiens
aaacagagcatggtcaacagtttgcccaccttccctacagatatcaagaatacttcagtcaccaacgtgccaaatatggatactggtatcgggatgacacaggaagagctggtgtccaacctggggacgattgccagatcggggtcaaaggtaagcg

SEQ ID NO: 3626 - DNA, 100 bp, Homo sapiens
gtttctatgcccctctatgcagtcatgtatcctgtgtttaatgagactctaaaatagagctcaagcttgagaagagagaaccactaaagggcagagcaaa

SEQ ID NO: 3627 - DNA, 100 bp, Homo sapiens
gactgtttggagtgaagaagtagaaattgaaagagaagtgctcttagaaaagaaagggactaaggctcctcaggctgcaggaaagattcacacagatttt

SEQ ID NO: 3628 - DNA, 75 bp, Homo sapiens
ccttgaagaatctacagatgagtctgaggaagatgagaatgtgcctactgctcctgatcctccaagtcaacattt

SEQ ID NO: 3629 - DNA, 100 bp, Homo sapiens
agtgacaatgtacttttgggaatggaaggatctgttaagctcacttcaaaagcagtggactgtcttttggattcaaagtgggcaaaggccaagaaaggag

SEQ ID NO: 3630 - DNA, 100 bp, Homo sapiens
gcctggagtacaacgaggtcaacgtcaccctggacctgggccagggtttcaaagacaacctccacgctgtgttctgcttggctgagaactcggtggggcc

SEQ ID NO: 3631 - DNA, 100 bp, Homo sapiens
gctgtttcttgggactgcgaagctatacaggctagggagacgtggtgggcggtccttcctgtgacacgacccttgagtgacagttctatttgattgcctc

SEQ ID NO: 3632 - DNA, 75 bp, Homo sapiens
ctttccttccagcagcctcagcttcagagagctcatgggacacatgtagctagtatagctgctggacactttcca

SEQ ID NO: 3633 - DNA, 119 bp, Homo sapiens
gtgaacaacccgttcttgcctcaggccagtcgcctccaggccaagagggatccttcacccgtgtctgaacatccagtcatggataaaaatgagctggttcagaaggccaaactggccga

SEQ ID NO: 3634 - DNA, 98 bp, Homo sapiens
ctactctcaggcagtgttctcagtagtccgaactctaatatgagcagcatggtagttacaggttgtgaactaaaggccgacaaagattatcactttaa

SEQ ID NO: 3635 - DNA, 130 bp, Homo sapiens
gggaggctgacggcccgcgggcgtaagcggactgcagccgcgagctcctggaggcggcgggatggaggcggcggccgggccatgaagcccccaggaggagaatcgagcaatctttttggaagtccagaag

SEQ ID NO: 3636 - DNA, 75 bp, Homo sapiens
tcttcatccgtcagatccacaaatttgaggagttggagaaggaggagcagatacacagtgtggacattgggaatg

SEQ ID NO: 3637 - DNA, 101 bp, Homo sapiens
tcaacaccctgagtgcggatttctgctatgatgacaggaaacccagcgtttgctggcagaaccagttcctggcatcaaagccgaaccagatgagagcaacg

SEQ ID NO: 3638 - DNA, 82 bp, Homo sapiens
gacgacgagatggtggaggaggcggtggaagccgtgcaggaggagcggcagcgtggcaaggaccggaacgagaatgaggtgg

SEQ ID NO: 3639 - DNA, 100 bp, Homo sapiens
cctggccaacctgctgctggaggaggataacaagttttgtgcagattgccagtctaaagccatacacactgctgctatggatatgctgggaggacctggt

SEQ ID NO: 3640 - DNA, 100 bp, Homo sapiens
caaggtcatgatgttggattctgttgcctgggtaccaccagagggaaagctggggcgtctcagaccagtatccttcaggggttctcttactctgatttgc

SEQ ID NO: 3641 - DNA, 82 bp, Homo sapiens
aatccgagaagagcagagcggagggagccccagacacggagggtgaggacaaaatcttcttaatcaacaagcttcactccat

SEQ ID NO: 3642 - DNA, 50 bp, Homo sapiens
tagacaccaaggcaggacccccagaggcctcaggcccaggcccaaggcca

SEQ ID NO: 3643 - DNA, 50 bp, Homo sapiens
ctaaatgggacctatgatgtgcaggacttggatgttgtgggtgatggtat

SEQ ID NO: 3644 - DNA, 75 bp, Homo sapiens
aacagttaatcctcaatttaagcctgatctaacccctagaaacagggctgatcccttatccaacatggttctaac

SEQ ID NO: 3645 - DNA, 87 bp, Homo sapiens
aagaagcagcgccgcctgctggaggaagagagaagaaagaaggagcaggccgtgcaggccctggccaacgtcaacattgggagcctc

SEQ ID NO: 3646 - DNA, 88 bp, Homo sapiens
tagacggccagccagtcatcaaacggatgctcccatttcccagtagcctccaggcctgcaggttcccatgacccacagccgggccacc

SEQ ID NO: 3647 - DNA, 101 bp, Homo sapiens
atcattcccgggttctcctatcagctatagaagtttgcagtgttgatgtgggtatttacctatgttggtgccttgtttaatggtctgacactactgatttt

SEQ ID NO: 3648 - DNA, 76 bp, Homo sapiens
gttaaaaccatatgaaagcgtgatgaagagaaagatgctggtttcgagttttggagatccttgttttttatggaac

SEQ ID NO: 3649 - DNA, 51 bp, Homo sapiens
cgccaggtgctggaggacttcccaacggatggcacatttcctagaggcaga

SEQ ID NO: 3650 - DNA, 90 bp, Homo sapiens
aaagcatatccgtctgtcagaaagagctgaacactctgtgcagcgagttacatgttgagccatttcaggccttgtcaatgctgctaaatg

SEQ ID NO: 3651 - DNA, 97 bp, Homo sapiens
gggaagatttaaactccatgaagtatgtggagctttacctcgtggctgattatttagaggtaatactgcattgcatgattgtgcagaatctggaagt

SEQ ID NO: 3652 - DNA, 83 bp, Homo sapiens
ctgcttatggcggcgctggagagggggcgctgagctgttggggaaaacgaagccccctcctgtattgacagctgggaattgtg

SEQ ID NO: 3653 - DNA, 100 bp, Homo sapiens
tactttgccaccactgaaagcagccccacagagcaggatggccgacagctctggttagagaaagtttcctacactactgaggtttaggggcactgtgaag

SEQ ID NO: 3654 - DNA, 100 bp, Homo sapiens
ctagcagggctgaagagaagatggaggagctggtggtggaagtgcggggctccaatggcgctttctacaagaaactcagccacctgtgacaaatttgagt

SEQ ID NO: 3655 - DNA, 75 bp, Homo sapiens
gcctgatacattcaattcatggtttcttataaccctactccacgtctgtgaataccagggcctggtgaagcacac

SEQ ID NO: 3656 - DNA, 83 bp, Homo sapiens
cctgcttccgcacccccttcgggcctctgtcctcaagggccgcgatgggcctcttggaacattggtgtgttcatctgcattcg

SEQ ID NO: 3657 - DNA, 101 bp, Homo sapiens
ttcttcctcaacaccagcaccgcagatgttgtcaaggtggcctaccaggaggccaggggtgtcgccatggtccgtaaaagccctgggctcagccagagcag

SEQ ID NO: 3658 - DNA, 79 bp, Homo sapiens
gctccatgcagaacaaatgcgttgcaagcaaattctgcccagctggttgtagagacgtagcaggagacatttctgggaa

SEQ ID NO: 3659 - DNA, 75 bp, Homo sapiens
gaagtgcaagagcagaggccttctctagaccttgccaagatggcacaggattttttatcaagcagaaatgcatcg

SEQ ID NO: 3660 - DNA, 92 bp, Homo sapiens
gtgcagcggcggcgagcgctcgcgagcggctgcgggacgcgaggtttccggccctgggcgctgcctatggcacagccaagagcggtaccggc

SEQ ID NO: 3661 - DNA, 100 bp, Homo sapiens
ccgacttcttgtatgcatactccacagcacctggtggagccgccaccaaaatgcagattttcgtgaaaacccttacggggaagaccatcaccctcgaggt

SEQ ID NO: 3662 - DNA, 87 bp, Homo sapiens
aagatccggactctgggtgttttgctaccgtgaccgtttagtcaccttcaggccattcagaggaggaaagagaggggaatatgaagt

SEQ ID NO: 3663 - DNA, 75 bp, Homo sapiens
gttgccagatggtgcaatgttcaaagtactcaagatgaatttgagggactggtgattgcagctggaagtgcccat

SEQ ID NO: 3664 - DNA, 101 bp, Homo sapiens
ccctacaagtacaacctgaagaatttcatggttatcaactcagtggcctttgaccatgcagatacgtactatcagccccgtgccctggagaaacatgctga

SEQ ID NO: 3665 - DNA, 75 bp, Homo sapiens
ggatgacgtacagaagagtactgggtgtgattttgcaggttacacatcattttggaatgactgtatatcatctgg

SEQ ID NO: 3666 - DNA, 100 bp, Homo sapiens
gaccgagagcgtgaccgagagcgcgaatatcgtcatcgttagaagattttggatttagtaaaggggacacattaccaggtagcctgtcaaaaatactttg

SEQ ID NO: 3667 - DNA, 90 bp, Homo sapiens
cgattcctcctccttggtcgccgcgtccttggctggcgtgccagcggaagcctgccacctcctatgtgcggaccaccatcaacaagaatg

SEQ ID NO: 3668 - DNA, 100 bp, Homo sapiens
ttctctactacgtcgaggagcttgactccagtcttatctccagcttccctctgctgaaggccctgctcatcaatgaggaaaacgagggtttctgtggtgg

SEQ ID NO: 3669 - DNA, 100 bp, Homo sapiens
cggggagctacggtaacgatcagtggctgcaggtggaattaagaaatctggcaaaaagtaagctgttccttgtgcctgaggagatggtgaccctttattt

SEQ ID NO: 3670 - DNA, 100 bp, Homo sapiens
ggcgcgagccgccagaggaagctggaggcgctgatccgagaccctcgctcccccatcaacgtggagagcttgctggcatgcttctgacggccaatgaaac

SEQ ID NO: 3671 - DNA, 75 bp, Homo sapiens
gagacacaaggagcccccgcaacaccattcgcttttcacccaagatgatttgatgtcttataaaactctgatgaa

SEQ ID NO: 3672 - DNA, 76 bp, Homo sapiens
tacatgatgaaagcgttcgacctcatcgtggaccgacccgtgaccctcgtgagagtgagcagcggttccatcgcag

SEQ ID NO: 3673 - DNA, 99 bp, Homo sapiens
cacagaggcagcgccacctcgcttggacctgctgaagttcccatgatgtcacccaatggatccattcctcccattcatgtgcctccaggttatatctca

SEQ ID NO: 3674 - DNA, 89 bp, Homo sapiens
caaggagctaaagcagcgtgcgttcagccctgggcgccgtgccgtccctgcagtgacaccgaggtgctcctagccgtctgcaccagcga

SEQ ID NO: 3675 - DNA, 100 bp, Homo sapiens
cgctggggaaatttcccacttcctctcctgagaccaggaactcagcagagaaactttgtgaagatgctgtggacaattatcgagatagactaacagaata

SEQ ID NO: 3676 - DNA, 101 bp, Homo sapiens
tcctgcccagcgtggtggggcagcagaagctccagagcccagacttgcagcctggatgtgtaaatacaactgaagtggacattaagaagtcatccagaatg

SEQ ID NO: 3677 - DNA, 51 bp, Homo sapiens
tgaggagccgagacctccaactcgagctctcccttcagcgctccagcagct

SEQ ID NO: 3678 - DNA, 98 bp, Homo sapiens
cttcctggcctcggtggcgctgctgctctggtcgctgtcgagcctgcgagagcagaagggtgctggagaatctggtaaaagcaccattgtgaagcaga

SEQ ID NO: 3679 - DNA, 75 bp, Homo sapiens
actcagacatcaccatcatgtttgagggaaagccctgagaaactaccagaacggggtccctggggccagtgttgg

SEQ ID NO: 3680 - DNA, 100 bp, Homo sapiens
tagaactcagttgtgcgttgcggccagtcgccactgctacaatgcagatcttcgtgaagactctgactggtaagaccatcaccctcgaggttgagcccag

SEQ ID NO: 3681 - DNA, 95 bp, Homo sapiens
taaaattcgaagaaaaaactgcccagcatgccgctatcgaaaatgtcttcaggctggaatgaacctggaagacattcaggttttgatgggaagcc

SEQ ID NO: 3682 - DNA, 82 bp, Homo sapiens
catttagagctgcggaacaggacgccctctgatccgcggcgagtcctttgcacatgttggcaacacacgcatccgcatcggc

SEQ ID NO: 3683 - DNA, 83 bp, Homo sapiens
gagtgatttcctgcaggctatggaacacactgaagttcttcagcttctcagccccccagccctgggcgctgcctatggcacag

SEQ ID NO: 3684 - DNA, 82 bp, Homo sapiens
gctgtgctgtgctctgtggccccctacctcccagatgagtcagatgaagccccatgtgtatgatctgccagtagaaggcaat

SEQ ID NO: 3685 - DNA, 100 bp, Homo sapiens
taaagaactcgatggtgttgtgagagatttctgcagtgaagattgctgtaaaaaatttcaggattggtactacaagagcttttgtgctgccttgcaccag

SEQ ID NO: 3686 - DNA, 100 bp, Homo sapiens
cggaggcggaggcagaggtggaggcgctttgaaagatcgcagcctgcagctgagcgcatgggagagcagcatcgtggatcgtctgatgacgcccactctc

SEQ ID NO: 3687 - DNA, 75 bp, Homo sapiens
gtgaaggaaaagcagctccgtccacaacgccgcttcggggctcctaggtcctgcagacattcgctttgtctggga

SEQ ID NO: 3688 - DNA, 100 bp, Homo sapiens
gtgttggtggattttgttcctgaaaatcaccagttccgtgctccattatgtcgtgtgcttccccgatcattatgtagaagttctggaatgcaaaatacag

SEQ ID NO: 3689 - DNA, 82 bp, Homo sapiens
gaccgagaccgcggccgggaccgaggaaatgcgtgtactgccggaagcggatgaagaaggtgtcaggtgcctgtatccagtg

SEQ ID NO: 3690 - DNA, 75 bp, Homo sapiens
atgtgtggtcttctcttcgactacccagtggagtgggaatagctttgcgaaaaatgggcgcaatggccaagccag

SEQ ID NO: 3691 - DNA, 74 bp, Homo sapiens
acggtggcaagcaagtttaatcagacctgctcacacttcagaatagagaagatctccctggtgagccaggagcc

SEQ ID NO: 3692 - DNA, 97 bp, Homo sapiens
gatcctcgcgtgagacagatcaagatcaagaccggcgtggtgaagcggttgacagatttgcaatggaattagaacaaagccgaaatttgagcaatac

SEQ ID NO: 3693 - DNA, 110 bp, Homo sapiens
ctctgcagagacgtccaacctcgtgcgcatgcgcagccaggccctgggccagtcggcgccctcgctcaccgccagcctgattacctctctagtgacccttcagctgttaa

SEQ ID NO: 3694 - DNA, 100 bp, Homo sapiens
cccaaggcccaaaagcgtcaaactcaccaaaaacaacatctttccagaaagaggaacctggcttctgtatttaccatgtacctggagcattggtttggca

SEQ ID NO: 3695 - DNA, 50 bp, Homo sapiens
aaaacaagtctcgtctggacgcccgcagggccccggaccccggcttccag

SEQ ID NO: 3696 - DNA, 100 bp, Homo sapiens
gtatcccttcgtcgaagatgtgggaacagagattgagacagcaatggtcacctctataggaatgcacctggttcctggtagagttacacagttgtgccgc

SEQ ID NO: 3697 - DNA, 74 bp, Homo sapiens
cagtcgctgcccccggaatcccagcaagtgcggtggcataatcaccagcaacacccgggacaataatacggggg

SEQ ID NO: 3698 - DNA, 73 bp, Homo sapiens
ccatggtggacacttttcttcagaagctggtcgccgccggcagaatggctgttgatggtgggtgtggggacac

SEQ ID NO: 3699 - DNA, 75 bp, Homo sapiens
tcgtgatccagaagtccagagctgaggactgcctgtttgcagcttcccagtgatcctgtccatcgaggagcactg

SEQ ID NO: 3700 - DNA, 50 bp, Homo sapiens
cgttaaagggaagcgggtcgttatgagtccaagtggtaagaagttcagaa

SEQ ID NO: 3701 - DNA, 75 bp, Homo sapiens
cgacctcatcagtgagctgtccctgctggaggagcgcttccggtgtgaaatggcctttccccgggtcaagccagc

SEQ ID NO: 3702 - DNA, 111 bp, Homo sapiens
gtcaaagacgccgtggtgcagcacagccagctcgccgcagccgtggagaacctcaagaacatcttctcaggacttcaaacaagtgtgaagaggctgtgtggcgagattgtg

SEQ ID NO: 3703 - DNA, 82 bp, Homo sapiens
ggaagatcgcaccgcggacgcccgctgagcttggcgcacgggccgaccagagacaagaggagcagcagcggcaccgcccctc

SEQ ID NO: 3704 - DNA, 50 bp, Homo sapiens
ggggactactggtgcctgcgctgaaaaagccgagcctcttgaagccattc

SEQ ID NO: 3705 - DNA, 82 bp, Homo sapiens
cgcggacgaagatggcgaccgccatgtacttggagcactatctggacacccgagcgggaagaagttccgcagcaagccgcag

SEQ ID NO: 3706 - DNA, 74 bp, Homo sapiens
ctggatccaggataacggaggctgggatcttagaaatgaagttgaaaaattacgcaatgaagtgaatgaaagag

SEQ ID NO: 3707 - DNA, 49 bp, Homo sapiens
cgacgcctttggcggtaaattcggaggcggagagacttcctccaaatgg

SEQ ID NO: 3708 - DNA, 100 bp, Homo sapiens
gccctggagcagctggggcaccaagcctttcgccctgggcaggagcgtgcagtcatgcggatcctgtctgggcccgcccttcatggagagcctgcccgag

SEQ ID NO: 3709 - DNA, 100 bp, Homo sapiens
gcctgtgagtcagcctgcagcctcgtcagactcggagacgtctgacagtgacgatgagggatgaataagagggaacccccacacggagacactgctggag

SEQ ID NO: 3710 - DNA, 95 bp, Homo sapiens
ggatgaagaagcgcggccttcacacatcccagccggtgactgcagtgagattagatcctgtgctgaaagagaaaccaagaaaaaagatgacattc

SEQ ID NO: 3711 - DNA, 82 bp, Homo sapiens
gatatccttctcaaccttgtgggatgtgaaaactctgttactgaaggcatcacgttgggtggtttccatttagaccgaggcc

SEQ ID NO: 3712 - DNA, 50 bp, Homo sapiens
ttccgatcatctgaggaacagcaggaggcgattatgcagccccttgatca

SEQ ID NO: 3713 - DNA, 95 bp, Homo sapiens
tttccaagcaggcctgcgaaggaaacttacccaaagggaagtcttttctcagcaggttgtgtggcgctgccagctttaattaacatcaaagccgt

SEQ ID NO: 3714 - DNA, 78 bp, Homo sapiens
gcactccattctgcctgggtgacaatgccttggtttcaacactatcggaatgatgccaattctcggaagcaagaagca

SEQ ID NO: 3715 - DNA, 100 bp, Homo sapiens
cctggacccagcacggagggacttctgcagagagagtgcgcagaaggattccgggagcacagttccgccgagaatattggtataatagcatatatgttgt

SEQ ID NO: 3716 - DNA, 97 bp, Homo sapiens
gtgcaacatggggcttgagaaaggacggaatcagtccccaatgcctggaaattcctcattggattactgtgttttaaacagaatttcgtgaacagcc

SEQ ID NO: 3717 - DNA, 75 bp, Homo sapiens
tgcctcaccaagtcacatgacaagcagagtggcagaagctcaactatgatatccataccctgcggcaggttcgaa

SEQ ID NO: 3718 - DNA, 100 bp, Homo sapiens
agggacgtgaacggagtgaccaagagcaggtttgagatgtgactccctgcatgtctcctctgccacatgacagtcctttaatagagaagccaggcttggg

SEQ ID NO: 3719 - DNA, 100 bp, Homo sapiens
atcagattcttggaccaacaagtagccgccttgcaaatccagaataactgtgtagaatacattgaggatgatgaggagcacgtggacattgagactgtag

SEQ ID NO: 3720 - DNA, 100 bp, Homo sapiens
ggccactcaccctgatgtccagcagaaactgcaaaaggagattgatgcagttttgcccaataagagtcacctaaggtcctgcgagtacaagggtcgaccc

SEQ ID NO: 3721 - DNA, 75 bp, Homo sapiens
ccacatggtcagcaccaccctgcctgtggacagcaggatgattgaggcgggtgccccggtgatgactggtgcggg

SEQ ID NO: 3722 - DNA, 80 bp, Homo sapiens
aaaagccttttgtgctgatcaacttgatgtctttttacaaaaaggtaccttgtgggtcaacgactcgtgaactacgaacg

SEQ ID NO: 3723 - DNA, 50 bp, Homo sapiens
tatgcaccacctgatatcaccaactgttcttatagaaaattggaacgata

SEQ ID NO: 3724 - DNA, 100 bp, Homo sapiens
ggcatgggcatgtacaacaccgacgaggatgggcaacactccagattcagcctcagacaacctcggtttccgctgtgctgcagacgcaggccggccgcca

SEQ ID NO: 3725 - DNA, 71 bp, Homo sapiens
caaactggtcacccctcatgacaggtctcctactccctccctccagtactgcgagaactgtgacacccact

SEQ ID NO: 3726 - DNA, 75 bp, Homo sapiens
gggggattctcgacctgctaacagaactggaccttttcgagaaaatattctctttggaatgggaaatcctctgct

SEQ ID NO: 3727 - DNA, 74 bp, Homo sapiens
tgattttttgcctttgttgattaactggacaaattcagaagttggtgagatggcaaagcagtatatagagaaaa

SEQ ID NO: 3728 - DNA, 113 bp, Homo sapiens
gcttcgcagtctggaaagctttaggagttcacagtgccataggaaaaggatacagagtagagtttcatgaacctgaaacttggtggaaatttgatcctgaagaattagaaaag

SEQ ID NO: 3729 - DNA, 100 bp, Homo sapiens
gatcaagaggaacccgtctacctggagagcgtggccagagtacctgctgaggatgagacccaggttgccaacttggcctgttccatctcaaataatgaag

SEQ ID NO: 3730 - DNA, 82 bp, Homo sapiens
gttaaggattccaagtaactcttatttgataacgaaggaggcccaacttcattcaataaggagcctgacggatttatcccag

SEQ ID NO: 3731 - DNA, 100 bp, Homo sapiens
cctccctgttaccttccaccatgattgtaagcttcctgaggcctccccagccatgcctgctgtatagcctgcagaacaggaacacgggtctggctgagag

SEQ ID NO: 3732 - DNA, 100 bp, Homo sapiens
cgtagtctacactttctgaattttccaggaatcaaacattttaagtccagtgcaggatggaacaaagaaacctcagattgacagcaacaagagcaataac

SEQ ID NO: 3733 - DNA, 82 bp, Homo sapiens
tgaagaatcataattcacttattccaaggaaagatacaggaggagttggatttgtcttctagttctcagatgtctccccttt

SEQ ID NO: 3734 - DNA, 75 bp, Homo sapiens
tggcatcttccgagtccatcagtttgagaaggtggcttcgtcctgttcatcgccaactaggggaagcgaatgagg

SEQ ID NO: 3735 - DNA, 88 bp, Homo sapiens
tttgaggacgatgtcatacagcgcaaggctcaaactgtccaggttgctgaagttgaaccacagtcacagccacagccttccccagaac

SEQ ID NO: 3736 - DNA, 75 bp, Homo sapiens
gtacttctcctagttgcagtcaggcttcatacgctattgtcctgcccggaaaccatctgccgtgtgactggtggg

SEQ ID NO: 3737 - DNA, 75 bp, Homo sapiens
gaggaggacagttcgctacacagcaatgcatcgaggtggatggaagcatgcctaggggaagatctgcctcccacc

SEQ ID NO: 3738 - DNA, 100 bp, Homo sapiens
gtgagaaaagggggaaaatgcccaggaggaagcaggagcagcccaagcgccttccctcacgtgaaaggtgtagcagtcactcggcctacacccacagcat

SEQ ID NO: 3739 - DNA, 100 bp, Homo sapiens
cccccaggaaaggaaaaacccacaaacatgttcacaacgggcatgaggctgcctaccacaaggactttagcttactttttaaagattgaagaaaaaaaag

SEQ ID NO: 3740 - DNA, 74 bp, Homo sapiens
tttttggcaatcacgtattttcaaaaccctacagcttggggcctgggctcctctgaccatcctcattgagaaag

SEQ ID NO: 3741 - DNA, 75 bp, Homo sapiens
caggaattaagtcaaccacgttctcataccagcctgaaggcatcctctggtatcacgattccaaaacccccaaag

SEQ ID NO: 3742 - DNA, 100 bp, Homo sapiens
cgcccgtctgcttcgggcctctggaatttagcgctcgcccagctagccgcagataacgaaggaggcccaacttcattcaataaggagcctgacggattta

SEQ ID NO: 3743 - DNA, 132 bp, Homo sapiens
cgggtagtgtcctaaacgtagtgtccacggcactcaacgacacggtagagttctaccgctggacctggtccatcgcagggctccttcactgaagtggtttccatcagtaacttgggaatggcaaagaccggc

SEQ ID NO: 3744 - DNA, 90 bp, Homo sapiens
cggccgggagggggcagtcctcgccggcgagttcagcgttttgggatttgagattgacgcggtgaactctgtccagttttcaaaccacac

SEQ ID NO: 3745 - DNA, 98 bp, Homo sapiens
aaagctgctgttatcatcatggctgtagagcatttaaatcaaacggtattgagatggattgggttatgaaacataatggtccaaatgacgctagtgat

SEQ ID NO: 3746 - DNA, 110 bp, Homo sapiens
agtacttcagaagttaatccacaaatgcttcaagacttgcaagctgctggatttgatgaggatatctatagagaaatggggtttggtcactatgaagaagaagaaagctg

SEQ ID NO: 3747 - DNA, 75 bp, Homo sapiens
ccgcgtccgaggctcgcgggcggcgggcccgggatctctctaggagctgacactcgaaccttcacgacccattcg

SEQ ID NO: 3748 - DNA, 100 bp, Homo sapiens
gcagcagcggcgggggctatggcgccagtaagaagaaaaaagcgtccgcttccagctttgcgcaggtgggcaatgggcactccaatgaggcagccttgat

SEQ ID NO: 3749 - DNA, 100 bp, Homo sapiens
ctgctgctgaaccaatgccaacagatcaatgagctgagcaatgttcctgttcctgtcatgctaatgccagatgacttcaaagcctacagcaagatcaagg

SEQ ID NO: 3750 - DNA, 97 bp, Homo sapiens
agggagaagcacttccattatctgaaaagaggccttcgacaactgacagatgcctatgagagcagttgaagacatctcttcatcgaggactaacccc

SEQ ID NO: 3751 - DNA, 98 bp, Homo sapiens
aaacattcagtggcccaatggcatcaccctaggacagtcattttgtttactcattcagccctgttgcaggtcccaataaactcttcataaggttgaca

SEQ ID NO: 3752 - DNA, 75 bp, Homo sapiens
cagaaggttcaagatgtaaagaagactattcagaaaaagatgattgacgctgaagctctgatcatggcaagtatg

SEQ ID NO: 3753 - DNA, 75 bp, Homo sapiens
caagctcagcctggacagcaacaggccaggagtggtggctcacacctgtaatcccagctctgggaggccaaggcc

SEQ ID NO: 3754 - DNA, 80 bp, Homo sapiens
ggactgagtcctgcaggacacagatgtgatggatgtagcatggtctccccacgatgcctggctagcctcatgcagcgtgg

SEQ ID NO: 3755 - DNA, 87 bp, Homo sapiens
cttttaccgatgctttaacatacagccactagtcgtgagatggagaataaagaaactctcaaagggttgcacaagatggatgatcgt

SEQ ID NO: 3756 - DNA, 75 bp, Homo sapiens
ggattgtcacctttgctgcaaaaaattacggagactaaggtgtcagtatgttcttcaagctgctctgctcctggg

SEQ ID NO: 3757 - DNA, 98 bp, Homo sapiens
gaggagcccacgtcgcctgtcacccaatatctccagccgcgcagtcccgaagagtaaggggaaactgaggcccaaggaaattgagtatctctgcaaag

SEQ ID NO: 3758 - DNA, 83 bp, Homo sapiens
gccgcccgtccccggcacacgcgcagccccggcctctcggcctctgccggagaaacagatggagaaggaggagacaacccggg

SEQ ID NO: 3759 - DNA, 83 bp, Homo sapiens
cttggactgagtcctgcaggacacagggttctctataaaggtgtcttaaaaaggttgattttgttatatgagcctttgtttgg

SEQ ID NO: 3760 - DNA, 98 bp, Homo sapiens
gaggtcatcgaaggctaccgggcccagcacagccagcaccgcacgccctgcaagggagacgaagttatacggaagcgtctcctcattgatggagatgg

SEQ ID NO: 3761 - DNA, 101 bp, Homo sapiens
gggcctggatgcttctctctgctctgccctggctgggccactacagtttcagctcctggcatcagctctattcaaatctggttcagattttacagctctgg

SEQ ID NO: 3762 - DNA, 98 bp, Homo sapiens
tcggccgaccagggacctgcccgcctgcggctgctccgggttgaaatcacaaagattagacacctttttagataggtgttcttcagcaccactgacaa

SEQ ID NO: 3763 - DNA, 75 bp, Homo sapiens
cgaagacttctctacgtcggaggaggacgaggactacgtgccgtcggacaatggcgatgaccactcagaaggagg

SEQ ID NO: 3764 - DNA, 100 bp, Homo sapiens
gaggaactcagccctgattgcgaagctgaaacctatcaacactcttcaaaatgcaatggaatgtaccacggactgtatctcgactggcacgcaggacatg

SEQ ID NO: 3765 - DNA, 100 bp, Homo sapiens
cctctccaaagcctgcgcgagaggagccgggacacgcctagcgcgggctccaggttcttcctcaagttcttcctcaaatgcaaccagaactgcctgaaga

SEQ ID NO: 3766 - DNA, 88 bp, Homo sapiens
cggaacccgtggtcctccgcttcatgttgctgcagcaactggtcacacagtagtgttggtagaccagacagaggacatcctggcaaaa

SEQ ID NO: 3767 - DNA, 100 bp, Homo sapiens
cagaatttcaaaatttctgcattcacggagaatgcaaatatatagagcacctggaagcagtaacatgcaagtactatgaagcatttccaccactttctga

SEQ ID NO: 3768 - DNA, 92 bp, Homo sapiens
agattggcccagttagcgtgtctctacaaaaaggtgcatataccactggattgaccttccacccacacataaaccacctcctctgtatgaag

SEQ ID NO: 3769 - DNA, 75 bp, Homo sapiens
atcatgctcatcctggtcggcctgggatttccctttatcatggtccctgcggatgtgatggcccagctatggctg

SEQ ID NO: 3770 - DNA, 83 bp, Homo sapiens
cagctatggagataggcagatgagtttcagcgttaaaaacaatggccagtcagggaggccccaagtatactctctcacagcag

SEQ ID NO: 3771 - DNA, 100 bp, Homo sapiens
atgaggagtttgatgctcgctgggtaacatacttcaacaagccagatatagatgcctgggaattgcgtaaagggagaaagagagagcgcgaaagagagag

SEQ ID NO: 3772 - DNA, 51 bp, Homo sapiens
aagctgcacggcagtctgtttatgaggaacattctggacgtgtgtttcggc

SEQ ID NO: 3773 - DNA, 75 bp, Homo sapiens
tccagtaatgtcccggcggatatgaaccaccaccacctaaaatccccaaaattgagaccactcatccaccgttgc

SEQ ID NO: 3774 - DNA, 135 bp, Homo sapiens
gactgcgttaactggagccaggctgagcgtcggcgccggggttcggtggcctctagtgagatctggaggttggtcaaagaaaaagtgatgtatgaaaaagaggcaaaacaacaagaagaaaagattgaaaaaatg

SEQ ID NO: 3775 - DNA, 90 bp, Homo sapiens
ccgagttcgctgccagccccaagaaggagaccctcatccagctgatgcccttcttcgtgtattggcatactccacacatctgtaccattc

SEQ ID NO: 3776 - DNA, 82 bp, Homo sapiens
tgcagatcccggctagggcacggaccgcctaggccgaggacagagcgggatgccaccagcttgtccaaagggaagttccagg

SEQ ID NO: 3777 - DNA, 100 bp, Homo sapiens
gcggagctgacggtggaggttcgcggctctaacggggctttctacaagggttttgacccaccacatcagagtgacacaagaaccatctacgtagccaaca

SEQ ID NO: 3778 - DNA, 74 bp, Homo sapiens
catatcctgctgtgggatttacaggaaagctcgagccaggctgtgaagctccaccatgaggcgaggtggatgga

SEQ ID NO: 3779 - DNA, 98 bp, Homo sapiens
acaagaccaagtttttggtcccggaccatgtcaacatgagcgagttggtcaagatcatccgctgaggaggatgaggacaaggaagatgatttccgagc

SEQ ID NO: 3780 - DNA, 52 bp, Homo sapiens
cttgtctgcagagtcatgacctcgtctgttcctcacacaccccgcccaagga

SEQ ID NO: 3781 - DNA, 50 bp, Homo sapiens
ctggaacatgcagagtctgcacaaatcaccatctggttcaaggacaccta

SEQ ID NO: 3782 - DNA, 83 bp, Homo sapiens
aaaatgaatgccaaatgggacacgtgaagaacagtccagactggcagcaagaaaatatgctagagttgtacagaagttgggtt

SEQ ID NO: 3783 - DNA, 50 bp, Homo sapiens
ccgagaccgcggccgggaccgagggtggctattatcatggaaaactaatt

SEQ ID NO: 3784 - DNA, 101 bp, Homo sapiens
ctcaaactcggtaccgggagaggtcgcgggctgggagccacatctcctccaatcgagcgtatgattttctgtacggacctgcaaatgcaactggttgatcc

SEQ ID NO: 3785 - DNA, 96 bp, Homo sapiens
tttatggcagcctcactcccagtagtttctgcatttagtgagataagattctgtttctggcgtctgcatacgcaagtccccaactcgctgaggaga

SEQ ID NO: 3786 - DNA, 74 bp, Homo sapiens
ctggatccacccagtgaccggacttctcacccccaggatgtcatcgaggtcactcagcctctgaagaagcttcg

SEQ ID NO: 3787 - DNA, 100 bp, Homo sapiens
ctgaatttgagaaaacccacctagagcatcaatttgcaaactttatggcctattttggccttaatctccatgtccagcatctggggaacaatgttttcct

SEQ ID NO: 3788 - DNA, 100 bp, Homo sapiens
ctgcgcaggataaaaggcaaactcttcacctgtggcggcacctgacttgctggatcctaaatctgccgctcagaactccaaaccgaggctctcgttttcc

SEQ ID NO: 3789 - DNA, 100 bp, Homo sapiens
gacctctctgatgagatggatcgggcttccaagtgttagtggagtctgactggctggattttgggcacaagtttggagatcgctgtggccaccaagagaa

SEQ ID NO: 3790 - DNA, 75 bp, Homo sapiens
gcaagaaagaaaattagagtgaatgtagttgcaccaggagttgttcctttggccacatatatgcgaatctataag

SEQ ID NO: 3791 - DNA, 75 bp, Homo sapiens
cgtaagcgcacgtttaaacatctcaaggaagatgagaagtttttgtctgaagtttttgcacaattaacagatgag

SEQ ID NO: 3792 - DNA, 82 bp, Homo sapiens
ggctcctcaccgttgtcctgctggccgccatggcatcagatgaaggcaaactttttgttggagggctgagttttgacaccaa

SEQ ID NO: 3793 - DNA, 83 bp, Homo sapiens
aggatgacgaacccaacctggtgcccggcccgcagtacctggagtagaacagaaaaattattatgtctgtgttcccttgggac

SEQ ID NO: 3794 - DNA, 75 bp, Homo sapiens
ctcaggcgtgcgcggacggtgtgcgggacctgagagtcagtatactaagactgcccaggagattgtgaacgtctg

SEQ ID NO: 3795 - DNA, 51 bp, Homo sapiens
gaaaaccttatcattaagaaactgtgtacgctgggagcggactcttggagc

SEQ ID NO: 3796 - DNA, 100 bp, Homo sapiens
cataccttgctctactaaccattccaatgagaaatcaagatgaacccacaagatcattgagtggtcttatcttgaagaataatgtgaaagcacactttca

SEQ ID NO: 3797 - DNA, 101 bp, Homo sapiens
actcttgcttatttattggcttaaggattaaggatccccaaagtctcagacttcagggtagaaatatttctgtcatggctcattcaaagactaggaccaat

SEQ ID NO: 3798 - DNA, 75 bp, Homo sapiens
gcaaagttccgaatagggatgaggcatacgtgtcgtccctggggatgagcccagggagaagatggacttggtcac

SEQ ID NO: 3799 - DNA, 110 bp, Homo sapiens
ctcccacagagaacaacacttctgtggggccagtgtccaacctttgctcattgggagccaaagatctgctccatgagagacaagagagacacctccaacttcgacaaaga

SEQ ID NO: 3800 - DNA, 100 bp, Homo sapiens
tgatgtggagctggctgacctgggctttgtgaagaatgccggcaggtgggagacgagcagctggagcgagtgttcgcgcacctgcggagagggctaccag

SEQ ID NO: 3801 - DNA, 83 bp, Homo sapiens
ctgcgttttgttttcccctcggcactaggcagcggaggagcccgaccgacccggtgtctgtgacctttgatgatgtggctgtg

SEQ ID NO: 3802 - DNA, 90 bp, Homo sapiens
cgtggtgacgggaaaggactgccctcatatgaaagagaaaggtgcccttaaacaaaacaaggtgaatgaaaactttgccattgatttgat

SEQ ID NO: 3803 - DNA, 100 bp, Homo sapiens
gaggaggccgtccagcagatggcggatgccctgcagtacctgcagaaggtctctggagacatcttcagcaggcgagaaccactgtctctgatcaacgtgc

SEQ ID NO: 3804 - DNA, 51 bp, Homo sapiens
ggcaagttcgcccaggatgtcagtcatacatggactggacctgcctggagc

SEQ ID NO: 3805 - DNA, 75 bp, Homo sapiens
ccggcacccagacaggtggcgacggcagaggaccaaggccacctttgatgccatttctaagacctacagctacct

SEQ ID NO: 3806 - DNA, 100 bp, Homo sapiens
gcggttcttctccagcgccctggcctccctcaccttggacacctcgcttggacggccaatgggaacgtggaggccaaagtggtgtgcttctaccggaggc

SEQ ID NO: 3807 - DNA, 100 bp, Homo sapiens
gaaaaagaaaacacctggtccaggcaaaaaattccgggtagatatgcctggctcaggcagtgcattcatccccaccatcaacgccatcacgaccagccag

SEQ ID NO: 3808 - DNA, 49 bp, Homo sapiens
gtagatattaataccttacaagaggccatttcataattctgaatcatgt

SEQ ID NO: 3809 - DNA, 83 bp, Homo sapiens
actctgagctccagaaggagctttccaggatagctttgaggataagctgcggatgagcgacttattcgtctaatggaagagat

SEQ ID NO: 3810 - DNA, 74 bp, Homo sapiens
tgcccctgtccgggggatgactgattctcctccgccagagagcgcctgctcgctgtgcccccgggttatgacga

SEQ ID NO: 3811 - DNA, 82 bp, Homo sapiens
aaacacaagaccttcgtggaaaaatacgagaaacagatcaagcactttggtgacttaagagattaaaattaatttggttgct

SEQ ID NO: 3812 - DNA, 101 bp, Homo sapiens
cagcacagcaaacccgccgggatcaaagtgtaccagtcggcagcatggcctctgaggagggctctgagtcggaggggagtgagtccagtggacgctcctgt

SEQ ID NO: 3813 - DNA, 100 bp, Homo sapiens
cagagcagcctccatcgccattgccaaaaagcaaagggttccgagtctgaggaagacataaccttgtgcctgcctgcccacctctctctctggtcctgtt

SEQ ID NO: 3814 - DNA, 87 bp, Homo sapiens
acgaccccgagtcgcagatggcctgccacgttttccgcgccacagaccccagccaggtttttggattcaaagcataaaaaccattac

SEQ ID NO: 3815 - DNA, 128 bp, Homo sapiens
ccggctgctcagatgcttgtgggagattcttttgccagacattactacttcctaggcagaatgcttggaaagatttctctatgaatcatcatcaagaactctgggagaacttttgaattcataaccaa

SEQ ID NO: 3816 - DNA, 50 bp, Homo sapiens
ggaagtagcaggcttgcaatcttcagcagcacaagccagcgaggaggcag

SEQ ID NO: 3817 - DNA, 100 bp, Homo sapiens
ccctggagagcgtggcctgcgaggagagcctggaagtgtgccgtgtctcccctgtcagtgaaaaccaggtggcatccagcgagggctacgtgctgttcta

SEQ ID NO: 3818 - DNA, 75 bp, Homo sapiens
ctgaactgcccccagcacttccgagccccgacccctgcagctgtgagagctgttgcgcagccattggtacctgta

SEQ ID NO: 3819 - DNA, 87 bp, Homo sapiens
tgagcttagaaagaaaaatgaagaacaaaatcaacttgtttgcaaaatgaacagtgccttagaaaatttacgtgtatacctgtgtga

SEQ ID NO: 3820 - DNA, 100 bp, Homo sapiens
ggaagcctctgcgccgccggcaccatgaggaggcaagtgaggcctatctggttggcctttttgaagacaccaacctgtgtgctatccatgccaaacgtgt

SEQ ID NO: 3821 - DNA, 83 bp, Homo sapiens
cttcaccaggtttcggtcggccgtcagagtatccattgcaatttccaggcctatatgaacccaatagcaatggcgagatcaag

SEQ ID NO: 3822 - DNA, 100 bp, Homo sapiens
gctgaggctggggccaggacccagacagagacacacggtcactgcagctgaagccgctgcccctgctacagccacagctccggagcaagccccagccccg

SEQ ID NO: 3823 - DNA, 100 bp, Homo sapiens
ggatcatccaggcgctgaagggcaccatcgacccgaagttgcggattgcagccgagaacgagctcaaccaggaactgcaagcacatgttgaccagataac

SEQ ID NO: 3824 - DNA, 96 bp, Homo sapiens
gctgaataaagctgttttggaactgtcaggtacctcaaagcgcctaccccaattatttactgggcaaaggaagatggaatgctacccaaaaacagg

SEQ ID NO: 3825 - DNA, 100 bp, Homo sapiens
ataatgggtatggaggaggacctggaggcatcgccgaatggaggctgtgcgactgcgaaaagagaaccagatctacagtgctgatgagaagagagccctt

SEQ ID NO: 3826 - DNA, 75 bp, Homo sapiens
gagggtggaagcggcccccgcagacgctcggcaggtctgccatcatggatgttctcgcagaagcaaatggcacct

SEQ ID NO: 3827 - DNA, 80 bp, Homo sapiens
ggcagtgacgggcatcctggtgcagctcctggtgcgtggcccagcctcagagttttacctcacaaaaactactacaagca

SEQ ID NO: 3828 - DNA, 90 bp, Homo sapiens
actcttcggcgaagctttacgttcatgtaaacagcatgacgtgaggccgtggatgcaggcattaagatggagtctagctctgtcgcccag

SEQ ID NO: 3829 - DNA, 100 bp, Homo sapiens
tctactgtgcagctccagagagacgtgaaacatgtgaacactcaagtgaagcaaaagccttccatgattacctctcggatacagccgacaccatgggttt

SEQ ID NO: 3830 - DNA, 90 bp, Homo sapiens
ttctatagaaactgggttggaagtcagagctgcacaaagggaaagggtatctagaagagcagaagacagagaatggaaaagataaggaac

SEQ ID NO: 3831 - DNA, 75 bp, Homo sapiens
gttcccttccctggaccatatgtgttcagactgcatcacagtgcttccgatacaagcgacaaaaatcgagttaaa

SEQ ID NO: 3832 - DNA, 100 bp, Homo sapiens
caggctccggaggcggcgggacagagcgcctgcgaccccagtcggtgctccggggaggtcacctgacgaggaggagctgtggctaaaggaagtggagggg

SEQ ID NO: 3833 - DNA, 90 bp, Homo sapiens
tttatggaattccactgagtggtaatggatgatgcagttcaaataactaagatgcagctgccatcttgctggatgagcagaacaagcggc

SEQ ID NO: 3834 - DNA, 51 bp, Homo sapiens
gaaggcagacagcgagtggcgacgatagttcagaaggaacagctggctgcc

SEQ ID NO: 3835 - DNA, 100 bp, Homo sapiens
cccgactcttcctggtgaagcatctgatgcacgttccatccggcgctcagctgggcttgaggtgagtgttgtgcaagattctgtcaacatttctggccag

SEQ ID NO: 3836 - DNA, 100 bp, Homo sapiens
gtggattaaaatctcccaagaggaatgacaaacaaccagctcttcagtttttgagacagtgtccttgagttcagactctctcttccagagggcagtttca

SEQ ID NO: 3837 - DNA, 102 bp, Homo sapiens
actatgacacgtacacagcaggactgagtgaagaagaacagctcgagagagcattacaagccagcctctgggaccgagaaactccccaacttttaaatcatt

SEQ ID NO: 3838 - DNA, 98 bp, Homo sapiens
gtcagatccttgagtgataaaggagtagagtgcccaccagaagtatgtccgacaagcctggcagaaggcagacatcaatacaaaatgggcagccacac

SEQ ID NO: 3839 - DNA, 76 bp, Homo sapiens
ggcggggactgttggtctcggccctgcggaagcgcgtacttgctttgtaagtgatctgaagcgaggactaaaaatc

SEQ ID NO: 3840 - DNA, 50 bp, Homo sapiens
ctttttggccctctgtgctacaggtggagtatggcccctgtgtggtagct

SEQ ID NO: 3841 - DNA, 100 bp, Homo sapiens
cccagttgccctgacaagggcttcacaggggacatccggaacctgctcatctggatcaagaagaatttgctaaaagagcggccagagttgttcatccagg

SEQ ID NO: 3842 - DNA, 82 bp, Homo sapiens
gctgcagatgacagcaaagaggttgagagcttccagcagctgctcaatgctcggacacaggatgaagcagcaaaggaatttc

SEQ ID NO: 3843 - DNA, 87 bp, Homo sapiens
tgattaagcagagaatggagaagaaggttgattccaggaaaatatatgcagatgatgaacattcttaagccaattgcctttgatgtt

SEQ ID NO: 3844 - DNA, 100 bp, Homo sapiens
ggctctttgtgttggagttgggagtttcgctgatccagatgacctgccggggctggcacactttttggagcacagtgttcctgatccaagcagaaccctg

SEQ ID NO: 3845 - DNA, 98 bp, Homo sapiens
ggtgatttctgcatttccatctgaggaccccaggagcaagcacaagttcaaaatccacacttacggaagccccaccttctgcgatcactgtgggtcac

SEQ ID NO: 3846 - DNA, 90 bp, Homo sapiens
gcagggggactctggccgcggctactacctggagatgctgatcgggacccccccgcagaaggaactgtctatcttgaccatgcaggtgcc

SEQ ID NO: 3847 - DNA, 100 bp, Homo sapiens
gacctatctgacaagagcatcaaccctctgatgaagactggcccatttgcagagcactccaaccagctgtggaacatcagcgccgtcccttcctggtcca

SEQ ID NO: 3848 - DNA, 100 bp, Homo sapiens
gaagctaaagaaatttctacacctacccattggtctaaacttgatccaaagacaatgaagaacattcagaagattctcggccttgccccttcacgagccg

SEQ ID NO: 3849 - DNA, 82 bp, Homo sapiens
gggagacgcacagccaggacatcctggaacctgggaaagggtgtccctggccagtgtccttccacctgtccacaagcatggg

SEQ ID NO: 3850 - DNA, 100 bp, Homo sapiens
gaaagagaagaaacgttttctcaggaatagccaggccagaagaaggaaggcctgtggtgagtgggacaggaaatgacatcaccaccccaccgaacaagga

SEQ ID NO: 3851 - DNA, 100 bp, Homo sapiens
cggccctcgcacgctcaactcctgctcctcctcttcgcaatgagtaaacgacgcagcaaaggcagctcgagcatctcatctgacgtgagttcaagtacag

SEQ ID NO: 3852 - DNA, 80 bp, Homo sapiens
gcttccaaaatcaccatttggaaggaacagtacagagttgtacaggaggaaaaccagcttcgagctggtccatttgatga

SEQ ID NO: 3853 - DNA, 100 bp, Homo sapiens
tgctaatccagtggaaatcaggagagttctaaatggagcccctggatttataaacttgtgcgatgctttgaacgcctggcagctggtgaaggaactcaag

SEQ ID NO: 3854 - DNA, 100 bp, Homo sapiens
ccttgagctccaggagttcgtctcttacgtctgcggaagtgcagctgcctcagttcttagcgcagagactcaccgcactgtgttaaaccagatcctacgg

SEQ ID NO: 3855 - DNA, 95 bp, Homo sapiens
ggactcaccttgcttgtaactactgatcttgagctcataaaatacctaaataatgtggtggaacaactgaaagcacacagcaagaaggaggccat

SEQ ID NO: 3856 - DNA, 83 bp, Homo sapiens
ccgggagccgggccggcctagccagttcagaggaatatccttgacttcccccagcatgtttccccctccaaggacatccggac

SEQ ID NO: 3857 - DNA, 50 bp, Homo sapiens
cctcgcggtaacagcctccgtggcctccgagatatgcagcccctactcag

SEQ ID NO: 3858 - DNA, 100 bp, Homo sapiens
ctcacctgtctgctccgaggactgccactgcccggggatgggggttgttggtatggagcaaaagacgagacaccttctaagcagaccctttctatacaac

SEQ ID NO: 3859 - DNA, 100 bp, Homo sapiens
cgtcttctgcggctctcggtgccctctccttttcgtttccggaaacatgtcaccttcaggccattcagaggaggaaagagaggggaatatgaagtcagcc

SEQ ID NO: 3860 - DNA, 75 bp, Homo sapiens
tgacaatagcagtgctatgttactgcaatggcatgaaaagagtatgaagagtgtaaagacctcataaaatttatg

SEQ ID NO: 3861 - DNA, 90 bp, Homo sapiens
aaggaaggggagcccgggacccccgggggcgcagggggccgtggagcccatgcagatcgacgtggacccccaggaagacccgcagaatgc

SEQ ID NO: 3862 - DNA, 75 bp, Homo sapiens
ttgggttggatgatgtgttcccgcgtctactacatggacttcatagacctcacgttgtcgaagactcaacgaaag

SEQ ID NO: 3863 - DNA, 95 bp, Homo sapiens
cattgttgtatcagtgggtgttgatgaagaaattgtttatgccaaatcaactgccttacaggcggtgtctcagggcagcagcgactctcagatcc

SEQ ID NO: 3864 - DNA, 87 bp, Homo sapiens
cagagcactgggactgcaaggtggtttcctgtaaaaactgcagcatccagcgtggacttaagaagttgctgaacctgtttgcatgag

SEQ ID NO: 3865 - DNA, 82 bp, Homo sapiens
gcgagcgcccggattggggatgagtatgcggaggacagctctgatgaggagcttttcctggatgattccaaaatgaagaatt

SEQ ID NO: 3866 - DNA, 100 bp, Homo sapiens
cttttctacaaactctgtgcctcaacaaccatttctaagtgtttcaccagtgatcattaaagaatgggcagcttacaaaggaaagtctcctcaaaccccg

SEQ ID NO: 3867 - DNA, 75 bp, Homo sapiens
cgagaatgggaattctcttcactagaatatggagactgttcaatcaccaggatggcttgttcaatcagtatatca

SEQ ID NO: 3868 - DNA, 100 bp, Homo sapiens
ctgtcctacaaatctaagcagttctgcaaaggaacaccaggcagattcatttatacagttgatattcactgatggactccaaagaatcattaactcctgg

SEQ ID NO: 3869 - DNA, 73 bp, Homo sapiens
ctgtgcacgagggtctcggcctcgcggtgcaggcattgtggtgtgacttcattatatcacaggataagtctga

SEQ ID NO: 3870 - DNA, 98 bp, Homo sapiens
tcacttttgagtgcaactgccttccagatgctattaacattctgaaggagatgaaagagaaggatgttcttatcaaagatacaacagccttgtccttt

SEQ ID NO: 3871 - DNA, 76 bp, Homo sapiens
tcggatttcaccacaagaagggctgccagtccagttacaacacagggatcacaacaaacacaaccgccacagaagc

SEQ ID NO: 3872 - DNA, 100 bp, Homo sapiens
ggcgatggcggcggcggcggccggagcttctctcagccggtgaaggaaatactcatgaccagccagatgtcttaaggaatgcttttgaaaagaacagagg

SEQ ID NO: 3873 - DNA, 75 bp, Homo sapiens
cttaacccctagaccggtttttagtccattgactatgcagcctaatgatttggagcaagaggtggtggtggcctt

SEQ ID NO: 3874 - DNA, 82 bp, Homo sapiens
caaggagctaaagcagcgtgcgttcagccctggggttagctttatacgtctacgaatatttactgcacgtaggagcacagaa

SEQ ID NO: 3875 - DNA, 75 bp, Homo sapiens
aaatcccatgaggagaaggcattctaatttagctcaaagcattcagcaaaccagggttccaaggtgaatgtatag

SEQ ID NO: 3876 - DNA, 102 bp, Homo sapiens
agccttgggcctcgcgccggctatggccgtgccctggggctgagccctcagaacatccagtcatggataaaaatgagctggttcagaaggccaaactggccg

SEQ ID NO: 3877 - DNA, 75 bp, Homo sapiens
ctgtgataaagttggtcagtctcgcactggctggaggagaaagctcgcctagaagcagaggccagggcccgggag

SEQ ID NO: 3878 - DNA, 90 bp, Homo sapiens
tgtcctagctgacaatcttttagaaccaacaagggtctcaatgcccacagaaaatattgatgttgatgttagtgaagattcacctcctcc

SEQ ID NO: 3879 - DNA, 99 bp, Homo sapiens
atcaaccctttgagaacacgacacaacgaactttatattttaccacttccttgaataggacgcagtcagccttcacctcaagcaggacttgcaggccca

SEQ ID NO: 3880 - DNA, 110 bp, Homo sapiens
catttgttggggagaagaggattggaggtgtcagtgttaaaggaacctctacaacgaaggtgaagccacggaagataaggctgatcagctgaccgaagaacagattgctg

SEQ ID NO: 3881 - DNA, 101 bp, Homo sapiens
cgcaaacttgacactcaccctgaccggctggccagctaaactatgtggatccagctactggctatgtggtgctcacacagattgcccacttgcaaagaggt

SEQ ID NO: 3882 - DNA, 75 bp, Homo sapiens
gcagcgcgccacagcccgcgaagccaacgagtgcgtgggaggtgctcctgtaccctggccacagcccaatcctgc

SEQ ID NO: 3883 - DNA, 96 bp, Homo sapiens
ggaacgccgtccacgtgaaggggcccttctcggtggaggccgacccatccaggctcacagaacatttcctgcctgttgctcacactctgttgtcca

SEQ ID NO: 3884 - DNA, 101 bp, Homo sapiens
gtggatattatggctaataacacaacaagtttagggagtccatggccagaaaacttttgggtggaatgcagtagccctctgggcctgggatattgtggttg

SEQ ID NO: 3885 - DNA, 101 bp, Homo sapiens
ccacagccagggcgccgcggagcccatgggccagcagtactaccccgacgatcttcagtgtctattggatttttccaagagaaagtttgtaaaattcctta

SEQ ID NO: 3886 - DNA, 108 bp, Homo sapiens
cctgagatcaaatggcacttcattggccacctacagaaacaaaatgtcaacaaattgatgggtgtatgcaacagcgttattgcaacaggctaacgaaaacagacaaaa

SEQ ID NO: 3887 - DNA, 100 bp, Homo sapiens
ggccgcccgggaccgccagctctgtccgctgcccacagcctagcagtcgggaccgtactgaggatccaaactactggatacaggtgcatcgcttggaaca

SEQ ID NO: 3888 - DNA, 82 bp, Homo sapiens
cgtgcgcctgggggcaccgctgccgttccgagggactttgaacatgtcggggatcgccctcagcagactcgcccaggagagg

SEQ ID NO: 3889 - DNA, 88 bp, Homo sapiens
aactgaacttataatcgtcactggattattaggtgacggagctaagacttcgagaccatctcgtcctttttgtatcgcggaaacctga

SEQ ID NO: 3890 - DNA, 100 bp, Homo sapiens
agcagagagctgtgaaatatctttggcttgcagccaacaatggggttttagtgccaaagaaccctgcgttcatggggaagatggttgaagtggacatcta

SEQ ID NO: 3891 - DNA, 113 bp, Homo sapiens
tgcaggttctgggagacgcacagctaagatgccaggacatcctggaagctgggaaaagtgagaaagatcagtctaaagaaaaggagaagaaagtgaaaaaaacaattccttcc

SEQ ID NO: 3892 - DNA, 133 bp, Homo sapiens
gatgatgatcatgctgggagccatctgtgccatcatcgtggtagttattgtaaggtctcactctgctcactctgtctcccaagctggagtgcagtggtacagtcacggctcactgcagcctccacttcctgga

SEQ ID NO: 3893 - DNA, 75 bp, Homo sapiens
gggctaactccagaatcccccattggcctgaggagcgatgcgacaggcatgatggaggtcgagtcctcctactcg

SEQ ID NO: 3894 - DNA, 82 bp, Homo sapiens
cagcctgcggagcctgtggggcagttggaggacgagtaagtcgtgaattaaattatactcgccagaagattggagaagaggc

SEQ ID NO: 3895 - DNA, 100 bp, Homo sapiens
aaattatactcagtggctgcaaaaagaactccaggatggcattgggcagcggcaaactgttgtcagaacattgaatgcaactggggaagaaataattcag

SEQ ID NO: 3896 - DNA, 89 bp, Homo sapiens
cagctggcctggtttgatactgacctgtaaatcatcctttagacttaattcagtgcacaaatgagatgaatgtgaacatcccacagttg

SEQ ID NO: 3897 - DNA, 72 bp, Homo sapiens
agagaaatgagatgatagccaaaccctcaggtttcagtgttgactggtgggctcttggagtgctcatgtttg

SEQ ID NO: 3898 - DNA, 75 bp, Homo sapiens
agccgaatctggactgtggatgattatcgattacggattggagcctccctctttgctagtaacattggaagtggc

SEQ ID NO: 3899 - DNA, 101 bp, Homo sapiens
ccatccagatgcgattttagtggaggactacagagccggtgatatgatctgtcctgaatgtggcttggttgtagtgttaaaagatcactgaagttggatgg

SEQ ID NO: 3900 - DNA, 83 bp, Homo sapiens
ctcagacgcagcgtctagtccctggccatagctccgccgctgcccgactttctgctgacccctctgtcacccactgccagtca

SEQ ID NO: 3901 - DNA, 100 bp, Homo sapiens
cgggttctgacaagatggccgggctgccccgcaggatcatcaagatgatatcatcaagttgaatcgaaaggaagggaagaagcagaattttccaagacta

SEQ ID NO: 3902 - DNA, 75 bp, Homo sapiens
caacgggctcatcaactcctacgaggacaaaagcaacgacttcgtatgatctgcttggctttgaggaagagtggc

SEQ ID NO: 3903 - DNA, 98 bp, Homo sapiens
tcacagtcaacctggactcacagaatttcaaccattgctccagtcctcctggatgccctgacggatccctccaggaagacccagaagtgcttgcagac

SEQ ID NO: 3904 - DNA, 100 bp, Homo sapiens
atcaatggtaggaactcctctgatgtcctggtttatgttaccagcaatgacactacggatgaagatgagctggattcccacaccatggtgaagactagtg

SEQ ID NO: 3905 - DNA, 51 bp, Homo sapiens
cacaatgcatcgctggaagtagccaaattcagaaggagctggcggacatca

SEQ ID NO: 3906 - DNA, 101 bp, Homo sapiens
cccaactttgaggccaataccaccgtcggccgcatccgtttccacgactttctgggagactcaacccttaggagaaatcttgagagtggacagcaattgtg

SEQ ID NO: 3907 - DNA, 96 bp, Homo sapiens
tccagggagtcacacttggagcagaaggcataattagtgaatttacacctttgccaaggtggtggcagcaatattggtgtgattgaggttatgctg

SEQ ID NO: 3908 - DNA, 83 bp, Homo sapiens
atctgagcgtgctgcggacggcgctgcggtacatccagcaggttacgggcaggacttgagtggcttcggacagggcttctcag

SEQ ID NO: 3909 - DNA, 50 bp, Homo sapiens
agcggccccgccgcaccagagcaggttgcttatggaaccacagagaacag

SEQ ID NO: 3910 - DNA, 100 bp, Homo sapiens
gtctgagacaatgccgctgtacactctttgtaaggaggatttagagagtatggacaaagaggagcgggacggtatgcgggccatcctggggtcctacgac

SEQ ID NO: 3911 - DNA, 100 bp, Homo sapiens
caggggctctccctgagtgccccacactcaccctactaccttctgtgcacatggaggatggaggcaacctgaaggtggcaacatgagtgagaatgaggaa

SEQ ID NO: 3912 - DNA, 100 bp, Homo sapiens
tggaaggtgcgtgtggggctgggtctcggagtgggagacgtggagtgcagaggtgctgatactcaaagaaggtttaagttgtctgatctctctataaatt

SEQ ID NO: 3913 - DNA, 98 bp, Homo sapiens
gatccccgctgacttcttcgtagacattgtctcccaagacaacttcctcaccagcaccttacaggttaagaatgtctgaggggtcaggcggtgctggc

SEQ ID NO: 3914 - DNA, 83 bp, Homo sapiens
tcactgacaaactctcacgctcacaccgggtcatctgattaatctgatgttccagcagaaatccaggtgttaaaagaacccct

SEQ ID NO: 3915 - DNA, 75 bp, Homo sapiens
gaacagaagaaaatgatccaggcccagcaatctgcacatcgtgctgccacacgaggcttcattcgttatggctgg

SEQ ID NO: 3916 - DNA, 82 bp, Homo sapiens
tggcaggcgaggtgtcgcgaccggtcccagcaaattgtggctactaatttgccccctgaagatcaagatggctctggggatg

SEQ ID NO: 3917 - DNA, 110 bp, Homo sapiens
caagaaggatattggttgccaggagatgagattgagaaaaatattctgacagcccagttacaggaaatgaagaaccagagtatgaatcttttccaaaggagagatgaaat

SEQ ID NO: 3918 - DNA, 74 bp, Homo sapiens
gccggctccgcggcgatggcgctctataacccctaccgccacgaattacacaaatggcggtgtcctgattatta

SEQ ID NO: 3919 - DNA, 90 bp, Homo sapiens
aatacaaggggtctggattattggatctaaatgcctcgctgcttggccgctgcctgctccccaggcccaagtcccttgcgggcagctgcc

SEQ ID NO: 3920 - DNA, 90 bp, Homo sapiens
ggagcacagcatcctcctcttgacccacggctcaccaaaaattgtcctgggaccaagacaaattcgcctaagataaggagttacgtagaa

SEQ ID NO: 3921 - DNA, 75 bp, Homo sapiens
gctgattcagcgcatcggcagcggcacctacggcgacgtctacaagaaacaagtgttgaaaatgttaaaggctgt

SEQ ID NO: 3922 - DNA, 50 bp, Homo sapiens
ctatggaaaagttgccaaattggttttgagagtattttagaagggcttta

SEQ ID NO: 3923 - DNA, 75 bp, Homo sapiens
gtgagggtgtacaaatacccctttgaattaattatggctgaagaggagcaggacttggatggtgagaaggggcca

SEQ ID NO: 3924 - DNA, 98 bp, Homo sapiens
ttgaagcatgtctttcagagcccggcaccacccatcttgagtatctgaaatctcctgcaaagaagctgagccatgcaattagtaaatctttggggtgt

SEQ ID NO: 3925 - DNA, 101 bp, Homo sapiens
tcagttagtgacagctaatcccagcataattcggcaaagaataagaccacagcttgccaaagagaagattgaaggatgccatatttgtacatctgtcacac

SEQ ID NO: 3926 - DNA, 75 bp, Homo sapiens
cagctctgattcgtagcacgcttgcttgcatcctggaatattctcaaccaggtactccaaagattcaggtttact

SEQ ID NO: 3927 - DNA, 75 bp, Homo sapiens
aggacgcgcagtccatctctctcagagctcttcagtatccccatcagccagtttccgaggtgctgagaagcacag

SEQ ID NO: 3928 - DNA, 50 bp, Homo sapiens
tcccaaggtgctgggattacaggagaagggagcactggctttgctttcat

SEQ ID NO: 3929 - DNA, 100 bp, Homo sapiens
ctcaagcagcgcatgctggagtacttccaggccacctgggcggtgaacaatggcatcgacaccaccgaggacgccaggaaagcatgtgcagatgcaactc

SEQ ID NO: 3930 - DNA, 75 bp, Homo sapiens
agagctgataatattgttaaggcagcggggtggaatggcagagcttgccaacacatatctctttatggtacaagc

SEQ ID NO: 3931 - DNA, 97 bp, Homo sapiens
agcggcctgagtcgccccccagcatcctcaccccgcccgtggtccccactgctgacaaggtctgggaagatccgaggtatctcctggagaagccatc

SEQ ID NO: 3932 - DNA, 107 bp, Homo sapiens
tcggccgccgctccccgcctagtccacggagctcaatggcggcagtcgcgctgagggactcggctcagactgggagactagacctgaaatgaaagagttggatccaa

SEQ ID NO: 3933 - DNA, 75 bp, Homo sapiens
tataggcgtgagccaccgtgcctggctgaaggcagtgaaatcaactgtgcagaccatcactgttggaggagtgag

SEQ ID NO: 3934 - DNA, 100 bp, Homo sapiens
taaggccattaacaccctggagactcggggtttggaatcacttgctaggagtcttgtctctctgccacccaggacatcatggcagctcacctggtaaagc

SEQ ID NO: 3935 - DNA, 82 bp, Homo sapiens
agagttggagcagacggtcagttctgttatctccagaagaagaagagaaaaggagaatccgaagggaaaggaataagatggc

SEQ ID NO: 3936 - DNA, 98 bp, Homo sapiens
cttaaaaccacgtggttcgatggctgccgcggctacgctgaggctctccgctcagctttcagcttatgtggagaagtcgctgtgaagccacctataaa

SEQ ID NO: 3937 - DNA, 89 bp, Homo sapiens
aacctttccaacacagatgtccaagctgccaactgaatgcaatatccatacatctccttctccgggaattcaagtaaggcatgtctaca

SEQ ID NO: 3938 - DNA, 100 bp, Homo sapiens
ggagttgtttcccattgcagcccaggtggataaggaacatctcttcccagcggctcagttgatggtggcatcacccttgagaaggaaatctccaaagaag

SEQ ID NO: 3939 - DNA, 100 bp, Homo sapiens
caagctataaagaggaagcatgctgtcctatgtcagcaaaaactggagcagaaattggaggctcagcataggttccaatacatatgaagaggcagctgcc

SEQ ID NO: 3940 - DNA, 82 bp, Homo sapiens
cccgacggggcgcgcgcgaagcgagcgagaaggcacggagtcgccgcggagcgcagatacctgaaaaaagcggcagtctgca

SEQ ID NO: 3941 - DNA, 103 bp, Homo sapiens
aagaaggacttcggaatgcactacaacaggaaaatcatattatagatggagtaaagatgtctttggtggacttgggaaagaggttgctagaagcagcaagaaa

SEQ ID NO: 3942 - DNA, 74 bp, Homo sapiens
ccttcctggcctcctgcttcttcccctaccgcctggtggggcttgccgtgggtgcgtgagcatctgctccctgg

SEQ ID NO: 3943 - DNA, 83 bp, Homo sapiens
ctaagagatatctgcaatgatgtactggttatggaggttttgatgactatggtggctataataattacggctatgggaatgat

SEQ ID NO: 3944 - DNA, 75 bp, Homo sapiens
aaatcatcaggaatccattatggtgtcattacatgtgaaggctgcaaggacttaaccaccaccatgtcgagcaaa

SEQ ID NO: 3945 - DNA, 100 bp, Homo sapiens
agccaccagccaatgatcttttcaatgctgcgaaagctgccaaaagtgacatgcagggccaccactgtacgttacaaagggcggaacctgcggatcaaag

SEQ ID NO: 3946 - DNA, 83 bp, Homo sapiens
ccgagaccgggaatgggctacctacacctgtgtgctgggctttcacgtctacgctggtaggtgagtgctgtcctcggctcact

SEQ ID NO: 3947 - DNA, 100 bp, Homo sapiens
gtggagatgtttaaggattacccgccagccataaaacacagacgcagtcttcagcaaggaagtgctgggaacgccctggagtgaacccaggaagatgcct

SEQ ID NO: 3948 - DNA, 88 bp, Homo sapiens
attaggccgtgctccaaagtcatcgtccggtttctcactgtgatgatgaagcatgggtcctcagaggagagggaggccttcacaaggg

SEQ ID NO: 3949 - DNA, 100 bp, Homo sapiens
tacatgccctttatgaagatattcttgaggaatctgtgaaggccttgctgttaaagggcaaagctcctgtggacccagagtgtacagccaaggtggggaa

SEQ ID NO: 3950 - DNA, 74 bp, Homo sapiens
accagttccgatacagcacaatgaagagtcaagtaccattggccaggatcaaacgcttatggaacgtgatacag

SEQ ID NO: 3951 - DNA, 90 bp, Homo sapiens
agcaatacgggccttttatatagaataaaggactctcagaatgctgggtcctatggcagcgtatacaaagctattcataaagagaccggc

SEQ ID NO: 3952 - DNA, 80 bp, Homo sapiens
ccgggggttgggccggagtccggaagatgtccatgaaggaggtgggtgatggcttacaggatcagatgaactgcatgatg

SEQ ID NO: 3953 - DNA, 75 bp, Homo sapiens
tttttgccatggtggattttgatgaaggctctgatgtatttcagatggtgatagaaattgaagatgcttcaccca

SEQ ID NO: 3954 - DNA, 86 bp, Homo sapiens
ctgtcctcctctgcaccatggctctctgcaaccagttctctgcatcacgcatccagggcattgtggatgcctaccgccaagccctg

SEQ ID NO: 3955 - DNA, 90 bp, Homo sapiens
ggtcgataagctggaactgatgcaggtcaatggccagcaaggaggggggtccgagccggcggcggcggcggcagtggtggcagcgggaga

SEQ ID NO: 3956 - DNA, 100 bp, Homo sapiens
gccatggccgcttccagaccatggaggagaagaaagcattcatggctcggatgaggtgcaggttggacagcagcgcacgttcatcagccccatcaagtgc

SEQ ID NO: 3957 - DNA, 75 bp, Homo sapiens
cgcacttcgtcatgttcttcgcgccctgaaacattgaatgaggaggataaagcaaagattgctaaaagcaagaag

SEQ ID NO: 3958 - DNA, 80 bp, Homo sapiens
gttctctcaatacataaagaacagcgtaactccagacatggtcacaagctacctaactaagaagtttgctgaactacgca

SEQ ID NO: 3959 - DNA, 100 bp, Homo sapiens
tgtggaaggctctggataaggaccagtacctgcccaggaaactgtcatccgtccttggctcaggatttggagagcttgcaccaccaaaaatggcaaacat

SEQ ID NO: 3960 - DNA, 75 bp, Homo sapiens
gggaactggagacaatgaaaatcttgtcagatgctagctaaacagttggaagctcttggtttagctgaaaagcct

SEQ ID NO: 3961 - DNA, 74 bp, Homo sapiens
ccctgggcagctcttcggccgcatccccatgcgcttctcggtgctggagcaggccgggctctcgccatgggtca

SEQ ID NO: 3962 - DNA, 100 bp, Homo sapiens
cttctacaacttccaagacagttactacatcagtgtcactgcaaagataaaagccattgaagcaaaactgaaaatgatggcggaaaatcctgatgcagag

SEQ ID NO: 3963 - DNA, 74 bp, Homo sapiens
atgccagctacactgactaacaggcactcttggaaagaacaggctacacacttgatgtgaccactggacagagg

SEQ ID NO: 3964 - DNA, 82 bp, Homo sapiens
gtcactaccttaagatgagcattgcccagtgcacatcctcccagtgagtgcgggcaaagtgtttcatggatttcaaagctgg

SEQ ID NO: 3965 - DNA, 98 bp, Homo sapiens
cgatcgagagagaccggagaggtggagaggtttacccaaggtccagcctagcccctaggcaccatgtcggacagtgatctaggtgaggacgaaggcct

SEQ ID NO: 3966 - DNA, 75 bp, Homo sapiens
atgcaattactgagagacaacttgacagtacaaacccgtagtgctgatgaaccaatgacaacatttgttgtctgt

SEQ ID NO: 3967 - DNA, 90 bp, Homo sapiens
ccgacagctgctgaccctctataaccccacaggaactgcgcttcgcttccgaggcctcgggccagcggccaggagctgcctcccccagcc

SEQ ID NO: 3968 - DNA, 100 bp, Homo sapiens
cgctcctgctcctccaggcgctgcccagccccttgtcagccagggctgaacccccgcagtatctccagatgaaatggccactgcttgatgtccaggcagg

SEQ ID NO: 3969 - DNA, 96 bp, Homo sapiens
gctcgagccctgagtgaccccaccacgcctctgtgacctggggctggagcagcttcaccactggagccagccggtttgcctcggcagccaaggagg

SEQ ID NO: 3970 - DNA, 100 bp, Homo sapiens
tctatagcaacagcttcaatcctgggaaaaacttcaaactggtcaaatgcactgtccagacggagatccgggcttcatagagcccagtgtgcaattaaac

SEQ ID NO: 3971 - DNA, 98 bp, Homo sapiens
gaatgagcctgtgccaagatccggacctaatatatatgaactcaggtcttaccaactccgaggattttgtcagggagaaaaagtatcggacagaagct

SEQ ID NO: 3972 - DNA, 100 bp, Homo sapiens
ctggactacaaggacgagttctcgggcagaggcgacctccccgcgttccatgcgcacagggacaggggaaggaatcgtgtctcctagtgacctggacctt

SEQ ID NO: 3973 - DNA, 83 bp, Homo sapiens
tcccagtcacaattatcaccgggtatttagggcagcagaagaagcctttgtaaatgacattgacgagtcgtccccaggcactg

SEQ ID NO: 3974 - DNA, 100 bp, Homo sapiens
aaaagttaaagatggagcaaaaccactttccctgaaatccgacactactgattctagtcaaggttcttttgaagtaaccagtgatcttttttgcttaccc

SEQ ID NO: 3975 - DNA, 76 bp, Homo sapiens
gcatctgcagtacaggatatgaagaaattgagggttcttgccatgctgagatctgtatctgtggacctgaatgttg

SEQ ID NO: 3976 - DNA, 96 bp, Homo sapiens
gcatctatctaacgtttaccctagcaaaccagtgatattatacccaacttctaatagctccaaatcagctgaattacaccgaatggtagttccaaa

SEQ ID NO: 3977 - DNA, 90 bp, Homo sapiens
cacgcagctggctggcttcagtggaccagagcaaacccgcatgttggaaatggggataactggcccagaaggccatgtactgagcaggcc

SEQ ID NO: 3978 - DNA, 100 bp, Homo sapiens
agaggtggagtggacaggagcattaccacctcagccaccctgaccactatcatcaccatggaaaaagtgacttgagcagtcctggaatcaagatgtgaga

SEQ ID NO: 3979 - DNA, 50 bp, Homo sapiens
ggaacctcaagccagacagaaaaggactcacaccacccggcaagaactgc

SEQ ID NO: 3980 - DNA, 88 bp, Homo sapiens
ggagagtgataagcttcgaatggacagagccatccctgacacccggcatgaccaattgaaagtggagctgtttggaaacaagtctacc

SEQ ID NO: 3981 - DNA, 80 bp, Homo sapiens
agttggaagcagccgatccagcctgcggagcctgtggggcaggataggatttttgggccttggtctcatgggaagtggaa

SEQ ID NO: 3982 - DNA, 83 bp, Homo sapiens
agaaatcagggagaggcgaattgtgaaagcccagcctccgtggttcttaatgcctcaggaggactattttcactaaagatgga

SEQ ID NO: 3983 - DNA, 100 bp, Homo sapiens
tctgcggaagtgcagctgcctcagttcttagcgcagacgaagggaacgtcatcgtttggaaagcgtcgcaataagacgcacacgttgtgccgccgctgtg

SEQ ID NO: 3984 - DNA, 90 bp, Homo sapiens
ccagggacacggtgcaggagagttatgagaatgtggactcactgggaaaaccaattctgtgtcctcggaggaccacagcccagttgggcc

SEQ ID NO: 3985 - DNA, 75 bp, Homo sapiens
aaattgtactttgaaagctgcccagatcccttagatgtgatagatgtggattggtctggtcttatgccaaagcat

SEQ ID NO: 3986 - DNA, 100 bp, Homo sapiens
tcagcttatagttcttttgtaaatctctttcgttttaacaaaggaattcctcctgatcagcagagactgatctttgctggcaagcagctggaagatggac

SEQ ID NO: 3987 - DNA, 100 bp, Homo sapiens
tgtcgcctgacaggagatgtattacaacccccaggaactagtggtcttgatgactgtttgcagcagtatattaagaactttgagagggagaagatcagtg

SEQ ID NO: 3988 - DNA, 106 bp, Homo sapiens
ccaaggccaggacctccctggatgccctgaagatcagcatccgccagctcaagtggaaggaggtgtttcagcgccgggaggacggctccgtgaacttcttccgggg

SEQ ID NO: 3989 - DNA, 98 bp, Homo sapiens
ccgtcaccgaggcgccgcgcacagtcaagaagaatgcgaggaacgtggcattggaggcctacctcatcaagccgcacagctacgtgggcctgacctgc

SEQ ID NO: 3990 - DNA, 75 bp, Homo sapiens
ttcttcaggtgctggtggatccctcaggatgctgtcaaagctcgaaaaacagcagcagaggaaagaaaagaccag

SEQ ID NO: 3991 - DNA, 74 bp, Homo sapiens
tccgtctgtgtgttcgagtggacaaaatggcgaagatcgccaagactcacgaagctttatgctgaaaaggtggc

SEQ ID NO: 3992 - DNA, 75 bp, Homo sapiens
tgactaatgagctgctggggaagtcaagccttctgttcgcgatgtacgtatcatctcagatcggaactcacgtcg

SEQ ID NO: 3993 - DNA, 75 bp, Homo sapiens
ctggccaaagcctgcccagacggctcacctgtgcgggatggaacaaaagcctccagggtcgtatagacctccccc

SEQ ID NO: 3994 - DNA, 87 bp, Homo sapiens
catgttgctggagaaggatgtgaaccctgggggcaaggaggagaccccagggcagaggccagcgatggcgtcgtgcgggcagggcag

SEQ ID NO: 3995 - DNA, 51 bp, Homo sapiens
gctctcttcgctggtggcaaactgctggcaaaaactcaggggaatgtgttt

SEQ ID NO: 3996 - DNA, 100 bp, Homo sapiens
caatttcctcttcaacccactgcttcctgactcgctctactccgtggaagcacgctcacaaaggaagcaatagaggcttttaatgctcctaatagtagca

SEQ ID NO: 3997 - DNA, 87 bp, Homo sapiens
gcatcgggctggcccagctgctgctcttcgcccagcagatctgcgaggtccagggagtcggtagtaagggatggcgggacgtcacca

SEQ ID NO: 3998 - DNA, 75 bp, Homo sapiens
accgagcgcctcgacctcggtctgaggcttgtggaatatacccgtgctgatggcacagttggccgaagagtgaag

SEQ ID NO: 3999 - DNA, 75 bp, Homo sapiens
cagcaagcggggcgctgtgtccccaagctccccgtcctcgggaagttccaggttaaaggcagcctcagctcacgg

SEQ ID NO: 4000 - DNA, 100 bp, Homo sapiens
ataacctgaggagccgggggaagctggccttggggttggtcaaagaaaaagtgatgtatgaaaaagaggcaaaacaacaagaagaaaagattgaaaaaat

SEQ ID NO: 4001 - DNA, 83 bp, Homo sapiens
atggcagagaggtgcagggcacccgctcccagccaggcaccacccctgcgtagacgagttgtactgctgtcacaggaaatgga

SEQ ID NO: 4002 - DNA, 98 bp, Homo sapiens
ggcgctggaggagcgaggcagctgtactaggactgggaacggatatgcaatatgatgaggatgatgatgaaatcaccccggatttgtggcaagaagca

SEQ ID NO: 4003 - DNA, 90 bp, Homo sapiens
ctgagctgaagaacaacgtggctgcttacctggacaatctgcagctgagtccacctcaggacgaggccagtgcctgaaacgcatccgcta

SEQ ID NO: 4004 - DNA, 96 bp, Homo sapiens
cgcaggaattttatcccctcaccggcctcacactagtatcgcatgtccactatccagaacctccaatctttcggtgttcaggcgcttcgtggaggt

SEQ ID NO: 4005 - DNA, 95 bp, Homo sapiens
tgttaccattgtgaaagaaggttgggttcagaagaggggacatggtccggcgaggagagatcatcgacaatgacaccgaggaggagttctacctc

SEQ ID NO: 4006 - DNA, 51 bp, Homo sapiens
caagcagtggattaatctgaaaaagggttgcaatattatctcatatctttg

SEQ ID NO: 4007 - DNA, 98 bp, Homo sapiens
gtttgaacaaactcgaagaacagctgtggaaagaagttgcaaaacactggatttgagttttgtcaccggctcccacgtcggagagctgatcatctggg

SEQ ID NO: 4008 - DNA, 95 bp, Homo sapiens
agagtcttgttatttcttctttgagaaaaacctgaaagatgtctcagaggagccgaggaaggtctgcttcacctacgacctgttcctgaacctgg

SEQ ID NO: 4009 - DNA, 73 bp, Homo sapiens
caccggggccaccaggagggagataaatttccgctgtaagccgtccttccgtgaatcaggctccaggaatgtc

SEQ ID NO: 4010 - DNA, 114 bp, Homo sapiens
gccagcccagctaaagcagacggctcgcactgcgacccgaagtatatttgccttccctccatgatctccaacactatccgataaagtagaagcaactgaggtaccgtgaaagag

SEQ ID NO: 4011 - DNA, 50 bp, Homo sapiens
agaactcagcgaggattctgagacgtcgagtgtggaggacaccctggagg

SEQ ID NO: 4012 - DNA, 82 bp, Homo sapiens
gggccgcggccggaccgagcgcctcgacctcggtctgaggaccatggccaacctggagcgcaccttcatcgccatcaagccg

SEQ ID NO: 4013 - DNA, 80 bp, Homo sapiens
ggctctgcagccatgaagccaaccgtcccgagggagtgcatccgccccaacccttttccccctcgtctcctgtgagaatt

SEQ ID NO: 4014 - DNA, 100 bp, Homo sapiens
tcagcagcactgtgcagcggcagctggagagcttcgacagccaccggagtctactcttcatcttgtgttgagacttcgtggtggtgctaagaaaaggaag

SEQ ID NO: 4015 - DNA, 100 bp, Homo sapiens
gcacgtaccagaggtggaagtccaagtcaaacgcagaaggactgcctcactgagcaaccaagacggagcgtgctttggacaccatgaattttgatgttat

SEQ ID NO: 4016 - DNA, 99 bp, Homo sapiens
ttaagcactgctgcactttatgaggtggattcaccaatgaacttgaagcatcctcatgacctagtcatattaatgagacaagaagcaacagttaactac

SEQ ID NO: 4017 - DNA, 83 bp, Homo sapiens
aaggcagctattctcaggatatgacaggggtaacacccttccagatgatttttgaggagtctccaagagcttttagattaccc

SEQ ID NO: 4018 - DNA, 51 bp, Homo sapiens
tgccaacgtcgagcggcgacggctggcagtgtcatcattaggctgtctttg

SEQ ID NO: 4019 - DNA, 100 bp, Homo sapiens
cagaagtagctctggctgtgatggggatcttactgggcctgctactcctggggcacctaacagtggacacttatgtatgcactggaacggctgaaggtca

SEQ ID NO: 4020 - DNA, 100 bp, Homo sapiens
agcacggcatggatgacgatggcacaggccagaaacaggtgtttgatgcgatcatgaatttcaagaaagaggagacagcaaaactgatagagaaactgga

SEQ ID NO: 4021 - DNA, 82 bp, Homo sapiens
acaaggttctggaaacaactgggcatatggctctctgatgtaaaggatggagtaaatcaagcagcacctgcatttggatttg

SEQ ID NO: 4022 - DNA, 100 bp, Homo sapiens
agttcgctacacagcaatgcatcgaggcgacactaacaggtgaagatctcgggagaccatgactaagaaaagaattgctgtgattgggggaggagtgagc

SEQ ID NO: 4023 - DNA, 117 bp, Homo sapiens
gtttgccaggagacggatgacacctacatccccctgaaccatatggacccaaatcagaaggggtttctagagtttgcagaaaaaacttcagcatgtgccaggaacacaacctcacct

SEQ ID NO: 4024 - DNA, 100 bp, Homo sapiens
ccatggtcaaccccaccgtgttcttcgacattgccgtcgacggcgagcccttgggccgcgtctcctttgagaacacacgcaggacttgaaagatgttact

SEQ ID NO: 4025 - DNA, 100 bp, Homo sapiens
cagccacatactatccgtttgttcaggaaccaccagtgacagaagttaaacatgaagtttctggagagacagtggtatttcaagggggagctcttggcaa

SEQ ID NO: 4026 - DNA, 90 bp, Homo sapiens
caaaatccagatgctggatgacacccaggaggcatttgaagttccacttgtactcccagagtacctcatccacgctttcttctgtgtcat

SEQ ID NO: 4027 - DNA, 98 bp, Homo sapiens
cggaacacagcatcatcccagtaagctccaaccagtgagatggaagattttcgaggtatagcagaagaatcatttccaagctttctcaccaattcatt

SEQ ID NO: 4028 - DNA, 101 bp, Homo sapiens
agactgggcctgaagggagagtttcagttcttcattgacggctaagaaatggcatttcaaaaggcagtgaaagggacgattcttgttggaggaggtgctct

SEQ ID NO: 4029 - DNA, 87 bp, Homo sapiens
agaagcataatgacattgtggacagtgacagcgatgctgaggatcgaggaacgttgtctggacttgaaaatactggaaatctgtccg

SEQ ID NO: 4030 - DNA, 98 bp, Homo sapiens
tcatccagcggggcgatgagtgtgggcatggggcagccgccagcccaaacaggcgtgtcacagctccagaaagcagtggggcctgagatcaccaagac

SEQ ID NO: 4031 - DNA, 90 bp, Homo sapiens
gtatcagcatagactgttttcctcagaccgtgtctcagcatgattgcttcccattttgtgcctctatttggcatgatcattactatcggc

SEQ ID NO: 4032 - DNA, 82 bp, Homo sapiens
gcgaacccgcggcgcaataacggactgttatgaacactatccaacaattaatgatgattttaaattcagcaagtgatcaacc

SEQ ID NO: 4033 - DNA, 100 bp, Homo sapiens
gttgccgcactgtgtgcacttggaggcttcaaagagacaatcaagataggatccgaggttcaggtgaagtcccgcttggcttttgggaagcccctggtgg

SEQ ID NO: 4034 - DNA, 90 bp, Homo sapiens
aagactcaggacggacaagcacagtcttcggaagcagctgatattgcccacctgtgtgccaggcactgcgctacaaagatgaaaagacgt

SEQ ID NO: 4035 - DNA, 50 bp, Homo sapiens
tcatcttgagttggaagcactggcacccaactcagtgatgtcctaattac

SEQ ID NO: 4036 - DNA, 100 bp, Homo sapiens
agccaagatccgagtaccatttttacgtcaggttgttcccattagtaaaaaggaatggaagttggatacactttgtgacttgtacgagacactgaccatt

SEQ ID NO: 4037 - DNA, 100 bp, Homo sapiens
ccaccatcaagctgtctaagtccaaagatttttacccagacctgtcatttactccatcctttatagtgatgctacaggacgaagaggaatggataaaaac

SEQ ID NO: 4038 - DNA, 96 bp, Homo sapiens
ccgccgtgcaggcggccgtcagcaacctcgtccgggatgctttggagtctgcaatgaagaatggcctgtggggtcacgctctgctacttgcaagta

SEQ ID NO: 4039 - DNA, 88 bp, Homo sapiens
ttgactttcaatatctttgactggttgggccggagcctcacagctgtattcatgtggatatctttagaggacattcaagcttttgaaa

SEQ ID NO: 4040 - DNA, 75 bp, Homo sapiens
gcggttcagccctttgatgaccgcagcaggtgatctgtgaaaatggttcgctattcacttgacccggagaacccc

SEQ ID NO: 4041 - DNA, 78 bp, Homo sapiens
gggatcgctacggaccttaaaatacccgcaacagccccttcgtcccaaaaatacccgcagcccaaagggcagaagaag

SEQ ID NO: 4042 - DNA, 83 bp, Homo sapiens
agcaaataaccgttttgaaattaaggcggtcaccttctccttactatagtcgtggaggatacagatcacgttccagatctcga

SEQ ID NO: 4043 - DNA, 100 bp, Homo sapiens
gaacaggcatcatggactgtgcgcccaagagtcctacagaatgcacttttgctttcagatagcagccttcacctcttcttacagagccatctgaattcag

SEQ ID NO: 4044 - DNA, 98 bp, Homo sapiens
agacctcatcacccatctggagcaaggaaaaaaaccttcgactatgcagagacatgagatggtagccaacccctcagtggcagatgcctggagagccc

SEQ ID NO: 4045 - DNA, 100 bp, Homo sapiens
acagtgtgcacagatgaacgaagttatggcagagttagctaaagaactccctcaagtttcatttgtgaaggatcatggggttgacagcagcattttccag

SEQ ID NO: 4046 - DNA, 98 bp, Homo sapiens
ctcggcactgtattctttacctgcttcccaatcccactgatgaggatcagcccatgacttcgagctggcttcttcgagcaccttgagaagtggtttga

SEQ ID NO: 4047 - DNA, 100 bp, Homo sapiens
ctgaatcactatcagataagagtgccgacttttcgctgtggcctgcagtttttaggcaacattgcctcacggaatgaagattcccagtctattgtttggg

SEQ ID NO: 4048 - DNA, 51 bp, Homo sapiens
gccccagcccgtgaaaagtgaggaatcggtgagtttcaaggatgtggctgt

SEQ ID NO: 4049 - DNA, 100 bp, Homo sapiens
agtaggacaaccatggagccttcctgtggcaggagagacaacaaagcgctattatcctaagacccttatagttgcctggatcaaagcaaacctaaatgtg

SEQ ID NO: 4050 - DNA, 75 bp, Homo sapiens
ccatctttctcttgccgcgtgctggtgttggaggaccctccctgcttcagtttttggctttcacccccaaccagt

SEQ ID NO: 4051 - DNA, 100 bp, Homo sapiens
attctgaaattatggtgatgctgggggaaaatggtttatgaaaaccccagatgaaatcatgagtggccgaacagaccgtctggagcacctagagtcccag

SEQ ID NO: 4052 - DNA, 82 bp, Homo sapiens
gctgcgcgggttcccccgaagttcaggtcaaaatgcagatcttcgtgaaaacccttaccggcaagaccatcacccttgaggt

SEQ ID NO: 4053 - DNA, 100 bp, Homo sapiens
ccggggcttgccctggtcttgctcggccgatgaagtgcagaggtttttttctgggttattttggagctgttggagcactccttgagctgttgaagatccc

SEQ ID NO: 4054 - DNA, 98 bp, Homo sapiens
ccgctgctgctgctgctgcttgcccggcccccgcctgcctccgccggctacagcgggaagagcggtccagccctgctgggagttttctgccacacaga

SEQ ID NO: 4055 - DNA, 100 bp, Homo sapiens
cgggagctgcggcaactgatggagaagacccccagggtggccagcggcagagccagcagacacagcatttctccttgagcgggtctccatctctgccccc

SEQ ID NO: 4056 - DNA, 100 bp, Homo sapiens
ccttaatgatggcgctgacatcatcttccacacagcagcggctggcatcgttcagaacctctccacagttgttgacctcctgtactggagagacattaag

SEQ ID NO: 4057 - DNA, 87 bp, Homo sapiens
ctgtaagaaatatgctgatcttagtccctgtgaagcaggaagagtgagggcaggttcactgcagctcagcagcatgtctgcagggaa

SEQ ID NO: 4058 - DNA, 100 bp, Homo sapiens
gtggatggcgtggagatatggcgcaactgcggcgcgtgtcgtgaaaactacccctaaaagccaaaatgggaaaggaaaagactcatatcaacattgtcgt

SEQ ID NO: 4059 - DNA, 83 bp, Homo sapiens
tccatcttcggcaccgagaaagacaagttatggaaacaaaggacatgctttacatcgtcactgaatttgctaaaaatggagaa

SEQ ID NO: 4060 - DNA, 83 bp, Homo sapiens
catggtttcccatcctcttccctattaaggagcttttgatgggaggccagcagactatttattcatgctcctctttaactgga

SEQ ID NO: 4061 - DNA, 75 bp, Homo sapiens
tggtcgaccagtccggacctcctcacgagcccaacaatctgcacatcgtgctgccacacgaggcttcattcgtta

SEQ ID NO: 4062 - DNA, 76 bp, Homo sapiens
cggagccagcgtgggaggccgctgccgtcgcgcgccttggtgccctctgccctcctgaccttctcgtgggacatgg

SEQ ID NO: 4063 - DNA, 83 bp, Homo sapiens
gtcaatctgatatgtttgatcagcgttatacgcagagcaatgggcgcaggccgtttggcatctctgccctcatcgtgggtttc

SEQ ID NO: 4064 - DNA, 95 bp, Homo sapiens
cctagaaattccccccgaagaagactcccccacatctgggatagtgacaacctctggtgggacgcctttgccactgaattttttgaagatgacgc

SEQ ID NO: 4065 - DNA, 100 bp, Homo sapiens
tatggctgtatttgacttggcaattcctgctgaacaaataatttttcatggcgggtggtccattatggctgacatgcaaaatctggtagaaagattggag

SEQ ID NO: 4066 - DNA, 100 bp, Homo sapiens
caagaatgactgtcaccgcatagcaaaactcatggctgactaaagcagcagcacacccttctgtacaaggtgaatggaatcctcacgctggccaccttcc

SEQ ID NO: 4067 - DNA, 75 bp, Homo sapiens
ccaaggcagttggtggaaatgaggctggagcattggatttgctaaaggagcttaagaatattcctatgaccctgg

SEQ ID NO: 4068 - DNA, 90 bp, Homo sapiens
gcgctcgtctggcggagctgggaagtgggaaaactcttgcctttgccatcccaatgattcatgcggtgttgcagtggcagaagaggaatg

SEQ ID NO: 4069 - DNA, 47 bp, Homo sapiens
gacctgggcggaggccgccaagacggactacaaagctgatgaagacc

SEQ ID NO: 4070 - DNA, 99 bp, Homo sapiens
atcaaagatgccaagaaaccctcaatgatgggacagaatttggaggatcaatttatcagaaagtttgtgaagatcttgacacttcagtaaaccttgctt

SEQ ID NO: 4071 - DNA, 101 bp, Homo sapiens
cagggaaggaaaccttggagagcgctctcatcgccctcgactcggaaaaaatggtcctagtgccagatcgtgtcataaaatgtgcattgatattcaacgga

SEQ ID NO: 4072 - DNA, 75 bp, Homo sapiens
tgtcagccagggctgaacccccgcaggtcccgcggcagtgctggtggccatggttcccgtagccagaaggagttg

SEQ ID NO: 4073 - DNA, 101 bp, Homo sapiens
aggcaacgtgttggaccttccggagcttctcagaagacagagggttttcttttgaggactcacggcagctgtgttctgatttcgtactactgctggggctg

SEQ ID NO: 4074 - DNA, 75 bp, Homo sapiens
ctcatcttttcagcatctcaaccctgtggaatcttttaactcccaagccagagactgctgctactttgaaacgta

SEQ ID NO: 4075 - DNA, 100 bp, Homo sapiens
acggaaacttcctctacgtgtgggggggctacgtgtgaagctattaagtacctcacagaagctcttcagtctatcagtgaattagagcttgaagataaac

SEQ ID NO: 4076 - DNA, 100 bp, Homo sapiens
ggcctcccaaagtgcttggattacagcatcgccctgagcaactggtggtttgtggcccacctgacagacctgctggaccactgcaagctcctccagtcac

SEQ ID NO: 4077 - DNA, 98 bp, Homo sapiens
gaatgaattggatgaacaaaatgaacatggtccaagacaattcctgggaaagttcagttcttctcaagtgagggttctgacacatctgtaccaattcc

SEQ ID NO: 4078 - DNA, 101 bp, Homo sapiens
tcaacatctggaacatgtgatggaaaattatactcagtggctgcaaaaagatctagtgaaaagccatttgatgtatgcggtcagagaagaagtggaggtcc

SEQ ID NO: 4079 - DNA, 85 bp, Homo sapiens
ggccatctccgggggctccattcagggcaatttttccaccccatcggttttgaagtgtctgacatccacccaggctctgacccca

SEQ ID NO: 4080 - DNA, 98 bp, Homo sapiens
gcttgatcaggtggaacagattcagaaggagcaggattaccaaaggaggttggaaagaaccatgactgtattcaggaaggcacatgaactgaagcttc

SEQ ID NO: 4081 - DNA, 90 bp, Homo sapiens
gatggaaagcattggtgggaatatgtggatcctacagttactctagaattattagatgatcttcccagacccgtcagattttgaccgctg

SEQ ID NO: 4082 - DNA, 74 bp, Homo sapiens
cctcagcaggcggggaagatgaaagggacccattccaacaatctcgtaaaacatggtggattactatgaagttc

SEQ ID NO: 4083 - DNA, 100 bp, Homo sapiens
gcccgaggaggtgtcgcaggagcacatcgagaccgcttaccgcatctggctggagccctgcattcgcggcgtgtgcagggtcccagccattccggtgctt

SEQ ID NO: 4084 - DNA, 81 bp, Homo sapiens
cagattcgcagtggtcgcttcttctccttggggaaggtgtggctcattgactttaatccatttggtgaagtcacagattca

SEQ ID NO: 4085 - DNA, 75 bp, Homo sapiens
ccccgggcagcccgggaaatctccaagtcagaaaggtgggagatgccatcccagcagtggaggtgtttgaagggg

SEQ ID NO: 4086 - DNA, 100 bp, Homo sapiens
gttaactctaacgtgaacgcggaccaggagggtgcaacaccggaggatttcagcaacctcccacctgaacaaagaaggaaaaagctgcagcagaaagtcg

SEQ ID NO: 4087 - DNA, 89 bp, Homo sapiens
ctttaaatgagccgaggtcatggtggttcggaggtttctgagtcccttcaacatgatcctgggaggaatcgtggtggtgctggtgttca

SEQ ID NO: 4088 - DNA, 73 bp, Homo sapiens
cgggccctgcgcgcctgatgggtcgaggcggacgcgcggctgcgtcagggtggactccattatgctggtggaa

SEQ ID NO: 4089 - DNA, 96 bp, Homo sapiens
cgggaccgacggtgtgtgcggaacatggcggagcgcggcaggaagcggccgtgcggcccggtatgagtcgtcatccgaggactccagcacagcaga

SEQ ID NO: 4090 - DNA, 90 bp, Homo sapiens
ttacctgtggaaatcagaagagagaatatagtaaaaatacgcagtacagtcccaggaagctgcacaagccttaatttatgctgagatggc

SEQ ID NO: 4091 - DNA, 83 bp, Homo sapiens
tgctgctgggattcgcgctgctgggcacccacggagcctccggggctggtgtgtgtctggggaagagacttacagaagtggag

SEQ ID NO: 4092 - DNA, 75 bp, Homo sapiens
aaaaaacaccacagtactatcgtctatcattggatgaagtggctccggagatgaaggatctgagtctctccctgc

SEQ ID NO: 4093 - DNA, 94 bp, Homo sapiens
ccctgctcagcttcaccatcgtcagcctcatgtacttcgcctttaccaggaagtgcacggctgtctataacgtgctgccgggtctcaggatgga

SEQ ID NO: 4094 - DNA, 82 bp, Homo sapiens
ccgacctcgacgtcttgcctgtgtcccacttgttcgcggcctataggagggatttgttcgtgttgaccgagattatgtgctg

SEQ ID NO: 4095 - DNA, 100 bp, Homo sapiens
gagatcaccgtcacctttaaccaattcacggaagaagcactggagtgcctcctggactgtgctggagggtggcgtcctgacattcttcaaggactcaaag

SEQ ID NO: 4096 - DNA, 101 bp, Homo sapiens
gctggctgctcagctgctctctgacatgaagctgcaaggaactagaagatcttctgccatctagaccggaagttcctaacataattggagaaacagaggag

SEQ ID NO: 4097 - DNA, 78 bp, Homo sapiens
tcagcaaggaatatgagcgcttttccaagtacatgcccagcgtcaaggctgaggccctgacgtggatgggcaaactgc

SEQ ID NO: 4098 - DNA, 100 bp, Homo sapiens
catatggggaagctggtacccctgaaggagaccatcaaaggattccagcagattttggcaggtatccaagcccaccaatgggatctgtctcagcacccaa

SEQ ID NO: 4099 - DNA, 100 bp, Homo sapiens
gtcggaagctccttttaatttggtacctcatgtggacaacattgagacagccaacagttttgctgtaacaaacgccttggcttttcatggcctgccactg

SEQ ID NO: 4100 - DNA, 100 bp, Homo sapiens
ccgccttcgtcctcaccaagtccttcctgccagtggtggtcaaggaggttaaaaagactttgtcgggcttggaagtcagcatggttactgcagttcccgg

SEQ ID NO: 4101 - DNA, 78 bp, Homo sapiens
gccggcctccggggagaaacgacttatgggagaacagctgggaaatgttgccagaggaataaacattgccattgtcaa

SEQ ID NO: 4102 - DNA, 90 bp, Homo sapiens
taaaatctcctccggtggcaaaaaggaaattttagccagtgtaatgattaagaacctggatactggagaagaaatacctttgagtcttgc

SEQ ID NO: 4103 - DNA, 90 bp, Homo sapiens
aaaaaacattgaagacgtcattgcccaggtcttggtgatgccttggacagcagcaactccatgcaaaccatccaaaagaccaccacccgc

SEQ ID NO: 4104 - DNA, 75 bp, Homo sapiens
caagattatttcagagcaaggtcgtgcggtgtgtgtagaagccctctctgggagatggttcaggatggcattgac

SEQ ID NO: 4105 - DNA, 95 bp, Homo sapiens
gaatttgatcataatagatttaaaaatatagaggaatcttggatccaaaaatatgacagattttctctgtgggcagttctttttgttttgggaag

SEQ ID NO: 4106 - DNA, 100 bp, Homo sapiens
tacagagatgtgatgcaggaaacattcaagaacctggcatctataggtctgcatgaatttgattccttgaaggatcctgaagtaaatgaatttcgaagaa

SEQ ID NO: 4107 - DNA, 74 bp, Homo sapiens
cttggacccagcgagagcaatgaccgcctgtcgcagggtttcacgcatgtgtgctgcagctcccatttcatcag

SEQ ID NO: 4108 - DNA, 83 bp, Homo sapiens
gcgttatcttccgactgatccagctggtggtcctggtctacgtcatcggggtgctttcttctgcgacctggtactcatctacc

SEQ ID NO: 4109 - DNA, 138 bp, Homo sapiens
agaacaccttgctgctggggaagaaggtggtccttgtaccctacacctcggagcatgtgcccagaactctcagaaattgagcccaatgtattccttcgaccttttctggaagtgattcgctctgaagataccactggc

SEQ ID NO: 4110 - DNA, 82 bp, Homo sapiens
ctcactattgatggtgtagcgctttaggggaagaatggcttattcagaagagcataaaggtatgccctgtggtttcatccgc

SEQ ID NO: 4111 - DNA, 51 bp, Homo sapiens
cttgaaagttggatgctgcagacccgggtgcaaatagctatgggcaacttg

SEQ ID NO: 4112 - DNA, 101 bp, Homo sapiens
ggacgtggacgggggcggcggcggggccccggactccgtcggcgcacatccccgtcccagcgcagagctatatcgagaagtttactgactttcttcggctc

SEQ ID NO: 4113 - DNA, 100 bp, Homo sapiens
tgaacaaagaaatcaagaaaactgcgaataaaattcgagccaagttaaagggtacatcaggaacgtctctatcaagaatacaatttcagcaaggctgagg

SEQ ID NO: 4114 - DNA, 100 bp, Homo sapiens
ttctcttcctgttaaagtcatggaagccctaacattggctgaagataacacagcaggcgtgtacgcccggcgtggagggttcagtcggcagaagcaggac

SEQ ID NO: 4115 - DNA, 50 bp, Homo sapiens
ctggggctgtgctccatggcgagctggctccaggacacgcgcgccccgag

SEQ ID NO: 4116 - DNA, 100 bp, Homo sapiens
gaggaggtgaaccggctcacggagagcacctaccggtatttgactacagtcattccttatgagaaaaaaaacggaccaccgtctgttgaagatcttcaaa

SEQ ID NO: 4117 - DNA, 102 bp, Homo sapiens
gctgctgctgcagtgggacaggtggcggcgaccggcggcgtccgaggaggatgacctcacaccacttttacttgcagtaagtggaaaaaagcagcaaatggt

SEQ ID NO: 4118 - DNA, 74 bp, Homo sapiens
ggcactcaagtcctggctcagcaagactctcgagcccatcaaaaccgctgagttcttgagcaaactgaacacag

SEQ ID NO: 4119 - DNA, 83 bp, Homo sapiens
gtgccatccgtggacacagtcgcgcggatgataccacgagtcaacccaaaagttgctggggagaagttgctctttaatgaatt

SEQ ID NO: 4120 - DNA, 75 bp, Homo sapiens
gtgaaactgaccacagtgctcaccacccaccaccactggactacagtattgacgaggaggccgccttccaggctg

SEQ ID NO: 4121 - DNA, 92 bp, Homo sapiens
cagctcgggcaaggatggtggaggcgagaacactgaggagtatggaggggctcccggagggcctgcgtttcccggacaaactcaggatccgc

SEQ ID NO: 4122 - DNA, 82 bp, Homo sapiens
gagcggccggaggagccatggactgcagcctcgtgcggacgctcgtgcacagatacacaatgcagatcttcgtgaagactct

SEQ ID NO: 4123 - DNA, 96 bp, Homo sapiens
cagttcgctagtcaaacctgtgagttcaacatgatagagcagagtggaccaccccatgaacctcggagagttcccaggagaaaaaagcaaaaggct

SEQ ID NO: 4124 - DNA, 100 bp, Homo sapiens
tctcttcgttgcactttatgattttgtagcaagtggtgataacacactcagcatcactaaaggctggctgttgctccaggcccctcggtgggtgttcaag

SEQ ID NO: 4125 - DNA, 75 bp, Homo sapiens
gaaaattgatcagttctaaaaaaccatgccccacttattcaagcggagaaatgttgctacagcagaagaagaaac

SEQ ID NO: 4126 - DNA, 78 bp, Homo sapiens
aaaaagtcccagatcagcgcagacagtggtgtgagcctgacgtctagttcccagaacatctaaatatattgctgtttg

SEQ ID NO: 4127 - DNA, 82 bp, Homo sapiens
tagaaactcacatgagacaaatgcgctcagcttcaattgaataccaagctgctattttacacttgaagagggagcacaaaga

SEQ ID NO: 4128 - DNA, 83 bp, Homo sapiens
agtccagataacactgactgtcagagaattcctcctgatcagcagagactgatctttgctggcaagcagctggaagatggacg

SEQ ID NO: 4129 - DNA, 75 bp, Homo sapiens
gaagtgcccgcctacatgagaaaaaggagcattctacagcaagttcttactgcagaggggtccaatgtgcttgct

SEQ ID NO: 4130 - DNA, 75 bp, Homo sapiens
ccaggtcggaaatgtagccagtggggccgccaggctccataaaaatacagactcaccagttcctgctttgatgtg

SEQ ID NO: 4131 - DNA, 87 bp, Homo sapiens
cgggtgctggagctgttccgggccgcgcagctgccgaacgacgtggtcctacaggttgtcaatagggtgactggaaatttcaagcat

SEQ ID NO: 4132 - DNA, 75 bp, Homo sapiens
ccgaggccaggagccaggggcccagaagatgccttcaattaagttgcagagttctgatggagagatatttgaagt

SEQ ID NO: 4133 - DNA, 100 bp, Homo sapiens
agtatagtgaagataaagccaggcaagggctgttcgggggtcttgtctggattttggttgcctcctccaatgttcctctacctctactacaaggatgggt

SEQ ID NO: 4134 - DNA, 98 bp, Homo sapiens
gagaaggcggcgcgggaggtgaagttgctgctgttggacctcctgccccccgaggtctgcagtctcctgaacccagcagccatctacgccaacaacga

SEQ ID NO: 4135 - DNA, 100 bp, Homo sapiens
acacagctcagaacagctggatcttgctcacactctttcaagagaagcttccttgacaacgactgaaagacctttcattcagaagctgtttcgtcctgtg

SEQ ID NO: 4136 - DNA, 100 bp, Homo sapiens
caacaagcaagcatgcagcttactgcttgaaaggcaatgttgtttaatgtagaaaatggaaccccagcttcacgtgaagccttgtggttgagtgaggagt

SEQ ID NO: 4137 - DNA, 101 bp, Homo sapiens
gcccctgttgcgatggcgcagaaaccccgttgacaaggcactgctttttcatgacggaactttatattgctgttggaatatctggagccatccaacattta

SEQ ID NO: 4138 - DNA, 80 bp, Homo sapiens
cagcatgctgtgtctagctcaaggaagcgagcagctgcaaagcatctaatagaacgctactaccaccagttaactgaggg

SEQ ID NO: 4139 - DNA, 100 bp, Homo sapiens
atcttcctcttgctgccagtggtagcgctcgtctggcggagctgggtcctcgatgggcttcctggaatattggtgtgtttatttgcatcagatgtgctgg

SEQ ID NO: 4140 - DNA, 100 bp, Homo sapiens
tttaagacttatgaatgacatgacagctggccggatcccagacagcctgaagaactgtgtcaacaaggaccatctgacagccgccacccactgggccagc

SEQ ID NO: 4141 - DNA, 98 bp, Homo sapiens
tcttcaaagctgaactgaatgagtttcttactcgggagctggctgaagatggctactctggagttgaggaggacccctcgctggaaaggcattttaag

SEQ ID NO: 4142 - DNA, 78 bp, Homo sapiens
ggccaagcagccaaccatgctcaacttcggtgcctctctccagcagactgcggaatcccagtcagaagttccagcctg

SEQ ID NO: 4143 - DNA, 82 bp, Homo sapiens
tgacatcgcgacgctgctcaaaacctcgctccggaaaggggacacctgtatgacctgtcagcctctacattctctcctgacg

SEQ ID NO: 4144 - DNA, 98 bp, Homo sapiens
gtggctctggccatagcagggaataatttcaatttgaaaacaagtggaatagtgctgtcttccttggttgatgctatgaaactgggagtaaaggaaat

SEQ ID NO: 4145 - DNA, 90 bp, Homo sapiens
gcagaagctggagctggacgtgaggagtgtcacttccgtcaggagagtaagactttgaccccgacgcaggcttcagtgattgccgcggat

SEQ ID NO: 4146 - DNA, 97 bp, Homo sapiens
tcgtagtcctgggagcacagcagaagtccttgaaaagatcttttgaggtcgaggaggtcgagacacccaactccaccccaccccggagggtccagac

SEQ ID NO: 4147 - DNA, 98 bp, Homo sapiens
gaactagaagcattttatactaatttacatgaagtgccttatcctgatgcaagaattgaatatccaagggactgagtgaaaagatatttgcaaaacct

SEQ ID NO: 4148 - DNA, 75 bp, Homo sapiens
aactggttaatagtggcatggaagatccatttgacacgttggtcgtcattgcctccgagcccactttagccctca

SEQ ID NO: 4149 - DNA, 83 bp, Homo sapiens
tgctcagaccttcattgctctgtgtgccaccggtgagaagccctaccactgcaactgggacggctgcggctggaagtttgcgc

SEQ ID NO: 4150 - DNA, 74 bp, Homo sapiens
tgagactgaagaaatcctttgagattttggaaaatctctaacttccaaggtcccaccaacagttcagaaaccta

SEQ ID NO: 4151 - DNA, 74 bp, Homo sapiens
ctgcacagagccgtgtcccagacacgctgtcagtgccttcaacacggagccgaatctgaatctgaagctgaaga

SEQ ID NO: 4152 - DNA, 51 bp, Homo sapiens
gggcggcggactggctcgcggtgcaggtgctggagaatctggtaaaagcac

SEQ ID NO: 4153 - DNA, 75 bp, Homo sapiens
ctggaaggagactggatgatagaattataaaccgagaaaactggtgtacaatagagccatgccctgatgcagcat

SEQ ID NO: 4154 - DNA, 132 bp, Homo sapiens
ccacaccggaatttccaggaagaaatagagtttcttaatgcaattttcccaaacatagggcctgattacattccaacagaggaagaaaggagagtcttcgcagaatgcaatgatgaaagcttctggttcaga

SEQ ID NO: 4155 - DNA, 75 bp, Homo sapiens
cgagaattccgcagcccacacggaatgagctcattctctatacatcactccgtaacttgttgtttttacctagta

SEQ ID NO: 4156 - DNA, 75 bp, Homo sapiens
tgcttggatgacagtcaccgacagaaggagacccatctattttggatagtttagatttgaatgaagatgaacggg

SEQ ID NO: 4157 - DNA, 74 bp, Homo sapiens
tttctgaagagactataaagcttctgaaaggctagttcaggggatacgataaaagatctccaaatgtgtcctgt

SEQ ID NO: 4158 - DNA, 86 bp, Homo sapiens
cgggtctggagtgcgtgggggaccggctgttggcgggttgagaacttgttgcttagtaaccaagggaccattaagctgtgtgactt

SEQ ID NO: 4159 - DNA, 99 bp, Homo sapiens
tcagcagtttcagccagcagggactgatcaggtggacgccctgcttcatctggcccgccagaatcgggctgtggcccgcacagcccagaatgaacggtc

SEQ ID NO: 4160 - DNA, 100 bp, Homo sapiens
cctgctctactgtgacctggaggtgagactgtggagatgagaaggtggtggacactcgtgatggaatggaaatcgtcctaccgtgcagccacaccctgcc

SEQ ID NO: 4161 - DNA, 76 bp, Homo sapiens
ggcagttgctgaccatctatttaagctgaagacaacatcatgggagatgacgggagagacggagttggcagtgaag

SEQ ID NO: 4162 - DNA, 74 bp, Homo sapiens
cgcttcgggagccagcgggtgctggtggagccggacgcgggcgcaggatgaaacaggcgcctatttaatcgaca

SEQ ID NO: 4163 - DNA, 90 bp, Homo sapiens
gaggaagagtagaagatgttgttgttagtgatgaatgcagaggaaagcagcttggcaaattagagcacgttttcaatatcataggagcat

SEQ ID NO: 4164 - DNA, 100 bp, Homo sapiens
ctttattgtggtggagtccaccccgctgtggtgctggagaatctggtaaaagcaccattgtgaagcagatgaggatcctgcatgttaatgggtttaatgg

SEQ ID NO: 4165 - DNA, 100 bp, Homo sapiens
aaaccacgcaggcaaacgagaattaaatgccgagaaggccagtacggagcacatgcagacacaccaggccggcccctctttgagctcccagaagccaaga

SEQ ID NO: 4166 - DNA, 82 bp, Homo sapiens
gccatgtctctcctctatgaatgtgtgaacaccgtgattgcaggattatatctgtccaagatgcgagtctggttttatcgag

SEQ ID NO: 4167 - DNA, 75 bp, Homo sapiens
atcaaccaccaaagtgggaaacattgaaatcaaggaatctgcaagcagaatatgaccgtctaaagcagcagcacg

SEQ ID NO: 4168 - DNA, 75 bp, Homo sapiens
gagactgcaaggcataatttgataattaatataatgtctgcagaagggaaatcctcattgacgattcaatttgtt

SEQ ID NO: 4169 - DNA, 100 bp, Homo sapiens
acctcaaatttctaatttcaccaacaactatttattgagggctagatatgtcttgtcgttcaagacttgcaacactaaacgagaaattgacagcccttga

SEQ ID NO: 4170 - DNA, 90 bp, Homo sapiens
gcttgatcaggtggaacagattcagaaggagcaggattaccaaaggcctccaccaggcggtgtgaagatgcctaatgtacccaatacaca

SEQ ID NO: 4171 - DNA, 75 bp, Homo sapiens
gaactcctttataagtgtcagctgtgaggccactaaagatgctggccagatatctggactgaatgtgcttcgggt

SEQ ID NO: 4172 - DNA, 73 bp, Homo sapiens
tccaaccttccagccccttttgaaaggtactaggttttgacaagcttgcatcatgcgtgagtataagctagtc

SEQ ID NO: 4173 - DNA, 75 bp, Homo sapiens
cccccctcccagtttgaacctctggacatgaagctcatgaggttacctccagccgctgccatgcccaactcagtg

SEQ ID NO: 4174 - DNA, 80 bp, Homo sapiens
ttctcctgccacccccagacctcctcagctccagcattgttgcaaaacataaggagttggaggggaccagccaggcttca

SEQ ID NO: 4175 - DNA, 88 bp, Homo sapiens
ccttgtccaggcgggcctcccgtttctggctccgggctgagcttcctggagaagaggaagaaccccgagatgcccctgtccttcacaa

SEQ ID NO: 4176 - DNA, 74 bp, Homo sapiens
tgtcgaatgtgactgactagcagcttcattttgaagctaaaacactgtcttatgaaccattatcttcagcaact

SEQ ID NO: 4177 - DNA, 100 bp, Homo sapiens
ccagtatctcgcagggtggtcatgaggagtaaaagagatcaagcatattaagtgctcagtccagtgcctgctaccactagagacggggtttcgccatgtt

SEQ ID NO: 4178 - DNA, 48 bp, Homo sapiens
ccacgggcggctgcagggtggaggctggagtgcagtgacataatctca

SEQ ID NO: 4179 - DNA, 50 bp, Homo sapiens
cgtgttctgatcactactgacttgttggaattgaatgatctggcacggga

SEQ ID NO: 4180 - DNA, 82 bp, Homo sapiens
tttacattctagtcctcctgcatctcctcaaggctcccctcacaaaggttagctccattcagaaccaaatgcagtccaaggg

SEQ ID NO: 4181 - DNA, 90 bp, Homo sapiens
gcgcggggctacatcgtgacagacagagactatgacagagactccactttcaatgtgtttgtgggaaaaggacagctgatcacagggatg

SEQ ID NO: 4182 - DNA, 100 bp, Homo sapiens
cggacgtggaagcagcaagaggcgcttggtcaagacacactgacgggaagagtgtatcacagccattgggaactttcttcacccatcaaagcctcagggc

SEQ ID NO: 4183 - DNA, 100 bp, Homo sapiens
aagcgtggccggcagcgtcccggacgaggaggcctccggtgtggctgtctctgatggtgtcatcaaggtgttcaacgacatgaaggtgcgtaagtcttca

SEQ ID NO: 4184 - DNA, 100 bp, Homo sapiens
ggaagagaagatgaaggaagactgtctgccgagttctcacgtgcccatcagtgacagcaagtccattcagaagatgttcccacaaaattggtggcaaaag

SEQ ID NO: 4185 - DNA, 83 bp, Homo sapiens
aaaaccatgtctattaaagaaagaattcagcggggtgccaagtcgttttctgtgtgggttgagagacaggctgtgcagcccac

SEQ ID NO: 4186 - DNA, 74 bp, Homo sapiens
acacgtcttagtccactagagctgatgtgtcatccccacaccagcgagcctctgccaagatgaaaccgatagaa

SEQ ID NO: 4187 - DNA, 73 bp, Homo sapiens
ttacccgtgacaaaatgtgttccatggtcaaaaaatggcaggtgacagttaacaccaacatggttgatttaaa

SEQ ID NO: 4188 - DNA, 82 bp, Homo sapiens
tgacgggtagtccggcgcccacagcagagccccccaaaattaaacgaggtcagttcagatgccaacagggaaaatgcagctg

SEQ ID NO: 4189 - DNA, 100 bp, Homo sapiens
ctggaacaaggccccaccgtaaagctctgtgtgtcccagggcacggccgagcagatgaggactgtgtggacgaccgggccagacaccgggaggaacggct

SEQ ID NO: 4190 - DNA, 100 bp, Homo sapiens
ttcgtggtgaaggtccggggcttgccctggtcttgctcggccgatgaagtgcagaggtttttttctgattcatgatgttgctatcaaaagttgagaaatt

SEQ ID NO: 4191 - DNA, 100 bp, Homo sapiens
cccaagagactcttccaaggcactaccaatatgttatctccagatgccgcgcaactgtctgatctcagttcatgttgtatcacggactgattcaccgagc

SEQ ID NO: 4192 - DNA, 95 bp, Homo sapiens
ggctcgacaagttcaagcagctgcttgccggccccaacacggaccttgatgctgcagttggagaagaaacttgaacgtgaacttgaggatgatgc

SEQ ID NO: 4193 - DNA, 95 bp, Homo sapiens
cggggacaggcccaagatcctgatggacagccccgaagacgccgacctcttccactccgaggaaatcaagaccttcatggagatggacatcgagt

SEQ ID NO: 4194 - DNA, 83 bp, Homo sapiens
ggagcacctgcaggaggagcctccattagtgatcatcaatgtatttgaccacaataagtttctctaatggtaccaagtgacag

SEQ ID NO: 4195 - DNA, 123 bp, Homo sapiens
cccgcctctgtgccactttgcatcccacgccggaggaggcattaacgagaccgggtaaggctaatagctcgtcagcttgctaaaatccatgctattcatgcacacaatggctggatccccaaa

SEQ ID NO: 4196 - DNA, 95 bp, Homo sapiens
cagccaccgattttgctatgtctctgagctgcgagagagaagatgcatcagtctgccatgtatgaactatgccaggggatgcaccaaatcagcct

SEQ ID NO: 4197 - DNA, 50 bp, Homo sapiens
caagtgtgtggtggtgggagatggtgggagagcccatcaccatccccaag

SEQ ID NO: 4198 - DNA, 100 bp, Homo sapiens
tctgctggaaggacaatgtgacactgattattggctgggggacttctgtcaaggttggtgactttggagatgcaatcaattggcccacacctggagagat

SEQ ID NO: 4199 - DNA, 95 bp, Homo sapiens
aggtggcctaccaggaggccaggggtgtcgccatggctcttgtcaggatggtgaagctgttcatcggaaacctgccccgggaggctacagagcag

SEQ ID NO: 4200 - DNA, 98 bp, Homo sapiens
cggaacccgagctggagctgaagcgcaggctgcggggcgcggagtcgggaggtatcaacttgaactgaaggatgactacatcattagaactaatcgac

SEQ ID NO: 4201 - DNA, 100 bp, Homo sapiens
gtatggcgaggctttgtgtccgttgcgctgagtgcctgatttgaaagttgagagcagcatgttttgcccactgaaactcatcctgctgccagtgttactg

SEQ ID NO: 4202 - DNA, 87 bp, Homo sapiens
cccgcctgcgcctccggggccggccctgcagacgcccactattgcttggttctacttcctttatcccgattggccgtcggacttatg

SEQ ID NO: 4203 - DNA, 55 bp, Homo sapiens
tccccggccccacccgatgcggcctccaagccccagtggacaggaaagctaaggc

SEQ ID NO: 4204 - DNA, 78 bp, Homo sapiens
agattactcagagattatagggagcatgggtttgcctccagatattacagtggatgaatttatacaacttatgtccaa

SEQ ID NO: 4205 - DNA, 75 bp, Homo sapiens
ggaagtggcaggatcgatatgggagggccgaatcacctgatctaagaaaaatatgtcgtaactgcaagtgtggcc

SEQ ID NO: 4206 - DNA, 98 bp, Homo sapiens
aaagtgcgaagagtatcgaagagcggaaagaacagacccggaatgccagggccgaggtgttgcgccagagacccactgctaaggagttattgaagcac

SEQ ID NO: 4207 - DNA, 90 bp, Homo sapiens
atctttttgtcacttcatcgtttgactggacagtaaagctttggacaactaaggctcatggatttgagatcttatgctccaaatgtagcc

SEQ ID NO: 4208 - DNA, 49 bp, Homo sapiens
attcgcttccagaagaatcatggcacagctggagtgaagtggcacgatc

SEQ ID NO: 4209 - DNA, 100 bp, Homo sapiens
ggttccctgcagactggcaggagcagattccaaaggcacaggaagaagcttgcaggagctctgtgtgtcgtctgagcagtcgcgagaagatttccctcca

SEQ ID NO: 4210 - DNA, 50 bp, Homo sapiens
ctcgcagccacgccgcaaacgctctggtttgaaaaggaaactaccctttc

SEQ ID NO: 4211 - DNA, 75 bp, Homo sapiens
cttagctgtgctcgcgctactctctctttctggcctggaggctatccagccccgagcgggaagaagttccgcagc

SEQ ID NO: 4212 - DNA, 100 bp, Homo sapiens
atgggccatgcccggtgaccacttttggaccaaaggcctgtgtgctgcagaacccccagaccatcatatggtcatcatgggccagtgctactacaacgag

SEQ ID NO: 4213 - DNA, 100 bp, Homo sapiens
aatatcctcggaagagcgctcccaggagaaacaagagtggacgcttctcttgtgagccagctggaggtcttacctctttgactgaaccacccaagggacc

SEQ ID NO: 4214 - DNA, 76 bp, Homo sapiens
catcggacaggatttctccgcctcagcccaacggggaggtctcggcgcggaagatggccggcggcgtggacggccc

SEQ ID NO: 4215 - DNA, 82 bp, Homo sapiens
gaaggaacgatctcgtaagaaggattcattggattggatgctgctggcaagacaaccattctgtataaactgaagttagggg

SEQ ID NO: 4216 - DNA, 90 bp, Homo sapiens
gtggagtttttcttgttgattctcagttcatggtggagtcattcaagtggtggacttgctttgtgaagagacagttcatgaacaagagtc

SEQ ID NO: 4217 - DNA, 128 bp, Homo sapiens
ctcgggggtaggcaagacctgcctcctgttccgcttctcagaggacgccttcaacaccaccttcatctccaccatcgtgtgccggtccaacaaaagcccttgggtctgtttgacttgttcaagtgtcc

SEQ ID NO: 4218 - DNA, 75 bp, Homo sapiens
tgggtgaaggcagaggctaacatggggttctcccatgggcaggtggtctctctggatgagctgcgccccttccag

SEQ ID NO: 4219 - DNA, 100 bp, Homo sapiens
agccgatccagcctgcggagcctgtggggcagatggttggcaatggctgataaatgacactttgagacatctccatctcatctcaagtcactcccgccag

SEQ ID NO: 4220 - DNA, 83 bp, Homo sapiens
cgcgctctgaggacctactggattatgggcctttcagagatgtgcctgcctatagtcagttccagggtcacccccgagaggac

SEQ ID NO: 4221 - DNA, 83 bp, Homo sapiens
gccgtgccctggggctgagccctcaggagctgacatggacccaaatcctcgggccgccctggagcgccagcagctccgccttc

SEQ ID NO: 4222 - DNA, 83 bp, Homo sapiens
aacgcatcatgccagggagccaagcgtcctgcccggccgtttttagaacttcagccataaaaatgggcagaattttccttgat

SEQ ID NO: 4223 - DNA, 100 bp, Homo sapiens
gcaggattggctgtctcaacccccagccagggtcaccatcaaaatggaatgtaaccctagccaggtgaatggctcaagggtttccagaaaggaagcaaag

SEQ ID NO: 4224 - DNA, 100 bp, Homo sapiens
gtctcggaaaccggtagcgcttgcagcatgcctagaacattccatattctgcttcacacacggtgactcactcactactgctttgtaccagtgtgcccac

SEQ ID NO: 4225 - DNA, 100 bp, Homo sapiens
ctctgggaaactcagcctgtgaccccagcgtgggtgaagataggatcaagatggccatgtggcagggtggttgaggagtgggcccagggcaccttcaaac

SEQ ID NO: 4226 - DNA, 100 bp, Homo sapiens
tgctcccatcattgatgtggtgcgatcggtctcctctgagcctccggcctccataagacccaaaacagatgacacctcttcccagtcccccgcgccttcc

SEQ ID NO: 4227 - DNA, 74 bp, Homo sapiens
ctccagaggtttaaccataggatagagaaaccagaggacgattatttatcatttctactaaagcaggatctcta

SEQ ID NO: 4228 - DNA, 75 bp, Homo sapiens
gatcgcgagcggctgcggaccatttataaccgcgacttcaagatcagtcttctcaagtcttaggattgcagcaac

SEQ ID NO: 4229 - DNA, 82 bp, Homo sapiens
gctgacacccatcacccacatctcacaatgatgccatggagagcagcaagcctggtccagtgcaggttgttttggttcagaa

SEQ ID NO: 4230 - DNA, 80 bp, Homo sapiens
ggcagcctttgcagtggaacctcaggggcccgcgttagacaatgcagatcttcgtgaagactctgactggtaagaccatc

SEQ ID NO: 4231 - DNA, 124 bp, Homo sapiens
tgtaccaaacgtggttgtacgagacgtggcctgtggcgctaaccacacgcctggtccgacccccagtggcactaacgtgggatcctcagggcgctctcccagcaaagcagtggccgcccgggcg

SEQ ID NO: 4232 - DNA, 83 bp, Homo sapiens
agacacgcttcttctggaagaccagccaacagcatgacgtatcccagactttactcaaggcaacactggacagtgttgtagaa

SEQ ID NO: 4233 - DNA, 100 bp, Homo sapiens
ctccaagccagatatggtacaggactgtcaacgaaacctggcacggctcttgcttccgttccaagattatcccctaaaactcatagacccaggtctccca

SEQ ID NO: 4234 - DNA, 83 bp, Homo sapiens
tgagtcctcgagtgaatgggcggatctcatatcttcacttggcaaactcaacaagggagtggagcttggtttcgggatctcgg

SEQ ID NO: 4235 - DNA, 82 bp, Homo sapiens
gtccaatctggaacttatttcttacagcccaagaagatgaaaggattgttcttgttgacaacaaatgtaagtgtgcccggat

SEQ ID NO: 4236 - DNA, 90 bp, Homo sapiens
gcgggcgcggccggagaccgtggggcccccggttgccgccccctcggcccgtgggtgctggctgccaagtcttcgaaggccgacccaagc

SEQ ID NO: 4237 - DNA, 76 bp, Homo sapiens
gaaacaaagttattttgctcggttcagcaaaaggatgtcactgaaattgatattttagttaagaaccggggagtac

SEQ ID NO: 4238 - DNA, 90 bp, Homo sapiens
ggaccacatagacatttacgcggatgtcggcgaagagttcaaccaggccatttcataattctgaatcatgtctgataacggagaactgga

SEQ ID NO: 4239 - DNA, 101 bp, Homo sapiens
cgccgaccccggcccaggccctacgccctgcgccgccatccccgcggcccgcggaaaggtgccatttggattgtactttagtggcacgatgtactctgagt

SEQ ID NO: 4240 - DNA, 102 bp, Homo sapiens
gacggtgcatcccgggcgcctggcagtgtgacgggctgcctgactgcttcgacaagagtgatgagaaggagtgccagcaaagactcaggtggactgaaggcc

SEQ ID NO: 4241 - DNA, 96 bp, Homo sapiens
ccagcatacccccacatcccggattgtcctgtggggcttccggtggctgatcttcaggatcatgcttggagcagtgaaggacttaactaagtactt

SEQ ID NO: 4242 - DNA, 83 bp, Homo sapiens
gccgagcacccaggcgactgcctcatcttcaaggtgctttgcaagatatcaccttgtcacagcagaccccctccacttggaag

SEQ ID NO: 4243 - DNA, 82 bp, Homo sapiens
gcggctcctcaacacccctcgaagatctgcgagtgaagagggacgagggaaaagaaacaaagccacagacgcaacttgagac

SEQ ID NO: 4244 - DNA, 75 bp, Homo sapiens
gacgagggggccgaaaccgagaggcgtccgagctgggccacagcctgaacgagaacgtcctcaagcctgcgcagg

SEQ ID NO: 4245 - DNA, 96 bp, Homo sapiens
cggcctgattgggaagaaactcttagcgcaatgtaatcgtgtggaagcgtggacaagagatgttgctttcttactcagacaagaaggcaggcccat

SEQ ID NO: 4246 - DNA, 100 bp, Homo sapiens
cgggcggctccgcagtgaccggactcgggggagaaaacatgtctcaacttagcgaggaagaacagaataaagattatcaagactgtagcaaaaccacttc

SEQ ID NO: 4247 - DNA, 75 bp, Homo sapiens
gtggcatggaagatccatttgctgtccctttccccccaacacatcgcttgacatctgaagaagtatttgatttgg

SEQ ID NO: 4248 - DNA, 75 bp, Homo sapiens
cccaccgctgccctcagctccgagtccagggcgaggctgaaggggatgctaagggagataaagcaaaggtgaagg

SEQ ID NO: 4249 - DNA, 100 bp, Homo sapiens
gagtgaccttggaagtggatccttcccccgaaagcccggctttcaggtctggaggcggctggtggaaatccaattccccgcggagcatggctggaaggag

SEQ ID NO: 4250 - DNA, 101 bp, Homo sapiens
agagcggtatccctgtctcagcgaagtggtgaaagagcatcaggtactccaaagattcaggtttactcacgtcatccagcagagaatggaaagtcaaattt

SEQ ID NO: 4251 - DNA, 83 bp, Homo sapiens
gcgagcaccagagtcggcgtaactatcgcctgacaggatcaatgtccgagttaccaccatggatgcagagctggagtttgcaa

SEQ ID NO: 4252 - DNA, 100 bp, Homo sapiens
agtgactgaattaaaaggtgtcaagaagctcagaatgagtcaaggaaacttttgagctatttacagcttgtagcaattatgtaaagtatactcctctgaa

SEQ ID NO: 4253 - DNA, 101 bp, Homo sapiens
agcctatggagttgtacttaaatgcagacacaagttgtttttcagaggcaccaaataatgtcatctgaaatgttgccagcatttattgaaacttctaatgt

SEQ ID NO: 4254 - DNA, 100 bp, Homo sapiens
gcaggaaagccagtgttgtggaccctagcacagagggagctgcagtccatggctgaccaggagcaggtgtcaccagccgccatcaagaagaccatcctgg

SEQ ID NO: 4255 - DNA, 100 bp, Homo sapiens
gatgaatgctgcttcgatgcaaatcaaccagagggaagaaaatgcaaactgaaacctgggaaacagtgcaggttcatctctaacaagtatttagtgaaac

SEQ ID NO: 4256 - DNA, 89 bp, Homo sapiens
ggagatgcctggaatacagtaagtattggtaaaggttttcaaggtgtcatgaaaagatggggatttaaaggccagcctgctacgcatgg

SEQ ID NO: 4257 - DNA, 101 bp, Homo sapiens
tgacccacaaattgctatctgtctagattgtttacgaaataatgggcaatcaggggacaatgtagtaaaggtcatggaaaatggaagatttgcaaaataca

SEQ ID NO: 4258 - DNA, 95 bp, Homo sapiens
tcagtaccagggcgtggtggtgtactccatggcagacatccctttgagacctgtcggccatggagcctaatgatagtaccagtaccgctgtggag

SEQ ID NO: 4259 - DNA, 90 bp, Homo sapiens
gaagatatgacctatgcagttcgaaaactggataacactaagtttagatctcatgaggttttttgcatgtctgacacccatgactccacc

SEQ ID NO: 4260 - DNA, 75 bp, Homo sapiens
aggcgtgagccaccacgcctggcctcactcaaacagtaaacgaggttatgatgtgattgctcaagcccaatctgg

SEQ ID NO: 4261 - DNA, 100 bp, Homo sapiens
gccgcctcggcctccgccgccgcctcgggaggtgaggacgaggaggaagcgagcagcccagacagcggccacctcaagatttgcctctgcaacttgactc

SEQ ID NO: 4262 - DNA, 83 bp, Homo sapiens
cagagccgcgccgtccgcgccgcccgttctgcaaaagctggcaggctgacagaggcggcctcaggacggaccttctggctact

SEQ ID NO: 4263 - DNA, 100 bp, Homo sapiens
tggatgccgagcgcctcaagcgcgaggcagcctggcatcctcgctacaacctcattgttgtgggccgatacccagatcctaatttcaaaagttgtacccc

SEQ ID NO: 4264 - DNA, 82 bp, Homo sapiens
gcaggcgctgcgccgcaacgccgagcgcaccgacatctgcctgctcaaagaaaagcacttggttctgcttcgagatggaagg

SEQ ID NO: 4265 - DNA, 98 bp, Homo sapiens
agaacaccctagaaaaatgtcagagagaaaatggatttatggtgaaggcaaatgtttgtcccaggagaaacccagggcctctggtctcttgaagtcac

SEQ ID NO: 4266 - DNA, 51 bp, Homo sapiens
ggaggggcaggaaattctttgaaggccggaaggtggtggtcgtacgctgtg

SEQ ID NO: 4267 - DNA, 75 bp, Homo sapiens
ccttggagcccagagccacgtcaaagaacagcgccttttgatagtcctaagtaattgctgctatctagaacgtca

SEQ ID NO: 4268 - DNA, 75 bp, Homo sapiens
cttactgaaggccgtcttaaagttacgttgttagaatgtagcaggtttttggattcaaagcataaaaaccattac

SEQ ID NO: 4269 - DNA, 95 bp, Homo sapiens
cttcacctcccagatgatcaaagactgcatgaagaaggtggtggctgtccacctccaccagacggtccaggtgaataagtctgatgacacagcag

SEQ ID NO: 4270 - DNA, 124 bp, Homo sapiens
gatgttgtcggctccgtgttgtgatgacaggagaatgtgtgtgtgtcccgggcccagacgaattggcacggatgggcagaagcctttgcaggtatcagaagttcacatatcaaatatatctgcc

SEQ ID NO: 4271 - DNA, 100 bp, Homo sapiens
ttcaaagcccacagagcagtgcttgctgctttttctaactatttcaagatgatatttattcaccaaacaagagttcctcagcagaagggcataccgatgc

SEQ ID NO: 4272 - DNA, 83 bp, Homo sapiens
gcggcggaggcggaggcggccggcccggactgcctctgtcaccgggtccctccacccttgtctcctgtgcggccagcgtcaga

SEQ ID NO: 4273 - DNA, 100 bp, Homo sapiens
ccgcgatggtgacccggttcctgggcccacgctaccgggagctggtcaagaactggtactctgtggatatccccttggacaaaactgtcgtcaataagga

SEQ ID NO: 4274 - DNA, 96 bp, Homo sapiens
tcttccatcctggagacagtcactgctgtggctgcgggaaagcctctctcttgcccaaaccacgatgggaatgaagatgagaatgtgcctactgct

SEQ ID NO: 4275 - DNA, 75 bp, Homo sapiens
gccggtgccttcatgggcaggactaggccgaaaactccccagctccatggctacatggaaaacaagcctctggga

SEQ ID NO: 4276 - DNA, 82 bp, Homo sapiens
caaagactattaccagttactggtcacccggtctcaggtgaaaggtgtagcagtcactcggcctacacccacagcatcgacc

SEQ ID NO: 4277 - DNA, 50 bp, Homo sapiens
cgctacaccactgcagccgcctcagctgtccctttccccccaacacatcg

SEQ ID NO: 4278 - DNA, 75 bp, Homo sapiens
ggggatacaaacacaccttgaaccagattgatgaagtaaaggtgtggcctcaggcaaacgaagcggatgctgtga

SEQ ID NO: 4279 - DNA, 100 bp, Homo sapiens
ctgttgtccaacagaacgacctagtatttgaatttgctagtaacgtcatggaggatgaacgacaggatctggggataccgaaagtgggtcatgtgaagcg

SEQ ID NO: 4280 - DNA, 75 bp, Homo sapiens
ctcggagacgagtggtgggagaaccagccgactggagcaggcagcagcccaggacagagaaaagtgacagtttca

SEQ ID NO: 4281 - DNA, 58 bp, Homo sapiens
gtcaaggccctcttcgccatctcctgtctggtgtcggcgcgcctgttatcggtgagat

SEQ ID NO: 4282 - DNA, 99 bp, Homo sapiens
atctctttagtgtgttacatatgcaaaattacaaaaatgtcatcagctaatgtctacctcgaatcaaagacagcatttttcatgggaatgaagaagcct

SEQ ID NO: 4283 - DNA, 100 bp, Homo sapiens
tatacccctgtttcttatatggcaaaataatcctatggtgaaaaaaatcaacaagataatctctgcttgagaaaaaggaccaaagacaagtgaattttct

SEQ ID NO: 4284 - DNA, 98 bp, Homo sapiens
aatatcacaggagtgatgctgtgttcttcactgcatgatttcaaaagtcttcccaagggattgttgaagaaacttctgaagagggaaactctgtacct

SEQ ID NO: 4285 - DNA, 96 bp, Homo sapiens
gccgcctggctccccatactagtcgccgggcgccctgcgtccggcagaggaggcgagcatcccgctcaggtgatgaggaacccctcgcgcacccag

SEQ ID NO: 4286 - DNA, 75 bp, Homo sapiens
gctcgagtgccgcgtgtgctgcagcctgggcagcttctatgcccaggtcaaggttccaattgtggacaagataag

SEQ ID NO: 4287 - DNA, 100 bp, Homo sapiens
gctgaagcgactgagtccgcgatggaggctgaccccgcactacatctacccaccagccatcgtgcagcccagcgtggtgatcccagccgcccctgtcccg

SEQ ID NO: 4288 - DNA, 100 bp, Homo sapiens
aattcttatagccattcttatagttgtaagtgtttctgaaagatctatccagcactccgatggccagcaacaacaccgccagcatagcacaagccaggaa

SEQ ID NO: 4289 - DNA, 100 bp, Homo sapiens
gtattgggtctgcaactcatccgatgcaagtatttcatacacctactgtggaaactactaaagttcctggggaagcaaagtagaatttcataagaacaaa

SEQ ID NO: 4290 - DNA, 80 bp, Homo sapiens
cgaagcccaggagaccaccgaggagtttaatcgagagatgttctggagaagactcagttctccccatgacaccacctgaa

SEQ ID NO: 4291 - DNA, 98 bp, Homo sapiens
ggccaagaggagcaattttcgtgccatcagcaaaaagctgaatttggttcccgttggtgaccaggggcaagaactgctctgttgcaagatggcactat

SEQ ID NO: 4292 - DNA, 76 bp, Homo sapiens
gtgccacattcttgcagctgcctacaaattcaagagtgaccagggatgcaactattggatgattatccgaaatgtt

SEQ ID NO: 4293 - DNA, 80 bp, Homo sapiens
ggacaagatcccgtccatgaatcaggctgagatcagttctatacgagaaaacaaagacagactaagtgacagtactacag

SEQ ID NO: 4294 - DNA, 95 bp, Homo sapiens
acactaagactgtgtccatgttagaactcatagaaggttctgcacttttaaaagaaaagcaaaggcatcgattacataagttcttgtgtctcaga

SEQ ID NO: 4295 - DNA, 95 bp, Homo sapiens
ggaagatggcgcctgttgtgacaggtaccgggaccctctggtgataatggcatcagtgttacaatgatcttggtagcctggatggttattgcatt

SEQ ID NO: 4296 - DNA, 50 bp, Homo sapiens
ttcttcgtgaggctgctcttcgagcgaccgtggctgagcatggagctgtc

SEQ ID NO: 4297 - DNA, 90 bp, Homo sapiens
cattgctgagccagcggagctgcttggctgtgaagcttcatggaggtatcgatatcctagtctccaatgctgctgtcaaccctttctttg

SEQ ID NO: 4298 - DNA, 97 bp, Homo sapiens
ctgccaatcactcccattggggtgacagcggccatgaggggcaagattcttgccaagagaattaatgtgcgtattgagcacattaagcactctaaga

SEQ ID NO: 4299 - DNA, 100 bp, Homo sapiens
caccaatgtttacatcaagaattttggagaagacatggatgatgagcgccttaaggatctctttggcaagtttggaagaattcctttggctaccggaaga

SEQ ID NO: 4300 - DNA, 80 bp, Homo sapiens
gtgttggaatattttacagcaaagcagtcgtgactgtaggacgaggatttggtgtcacataccaactggtatcaaaaatc

SEQ ID NO: 4301 - DNA, 97 bp, Homo sapiens
accacaggcttccagtacgagctggttaggaggcacagggcgtcggacctgcacgagctgtctggcgcggatcaagaagatcatgcagacggacgaa

SEQ ID NO: 4302 - DNA, 73 bp, Homo sapiens
ccctgcacgccctctatgacaatgtggagaaactctttccagtgctgccgtggtcaacgccattggcctgtac

SEQ ID NO: 4303 - DNA, 97 bp, Homo sapiens
acttcgcagctggacaaagcgtccatcatccgcctcaccacgagctacctgaagatgcgcgccgtcttccccgaagttgtcgccgtgatcctgaagg

SEQ ID NO: 4304 - DNA, 100 bp, Homo sapiens
caggaatttcaaagagataagcagcctaatgcacagcctcagtatctgcatggatccaagaaattttactgcaggataaaactccaggataaaactgtca

SEQ ID NO: 4305 - DNA, 101 bp, Homo sapiens
tactcaaaggcctcctcttccaccccgagtgggtggtcaaggagtcgggcatcctggtgctgggcgccattgctgaggtggaatcccccaaagaaggtaaa

SEQ ID NO: 4306 - DNA, 102 bp, Homo sapiens
gctgcggcctctgccgccgagtatggtttccgcaaagagagggcggcgctggaacagttgcagggtcacagaaacatcgaagttggtgagatggcaaagcag

SEQ ID NO: 4307 - DNA, 83 bp, Homo sapiens
caggaaccagaacccaggcccacggaggaagagccgggcagtccctggagcgggccagcacaggaagtcctggagaacctgaa

SEQ ID NO: 4308 - DNA, 100 bp, Homo sapiens
tgctttctctcgatgaggataacatccctccagaagatggttcagaaacagcatatttagaaaacagatctaattctagacctttagaaagcaaaagata

SEQ ID NO: 4309 - DNA, 100 bp, Homo sapiens
cccaggagaacacccgggtgatagtggagatgatccatttcaaggacttgctgctgcacgactatgtttccagtgtcctctgggtgtttccaagagcaac

SEQ ID NO: 4310 - DNA, 75 bp, Homo sapiens
aaaagaaccgcgcgggaagccccagcccgcagccctcggggtccagaatgacagggtccagaaactggcgagcca

SEQ ID NO: 4311 - DNA, 80 bp, Homo sapiens
caaacagcacttcctggcaatgatagatacatcagtgtgggaagccaagcagatacaaactatggaaatgatgttagaca

SEQ ID NO: 4312 - DNA, 50 bp, Homo sapiens
tcagtctctgtcagaggaagatcccttgaagttaccccccaagcgtccag

SEQ ID NO: 4313 - DNA, 82 bp, Homo sapiens
ggaagaccaagatcatcgagatgttgacgaaggatcagagattggtgtattcgggcagactgcttcccgatcatctgcagct

SEQ ID NO: 4314 - DNA, 82 bp, Homo sapiens
gagaccttattgtgggaggacctgggagtttctactggcaagggctccagtggtccagaatcttttactgtctaccactaca

SEQ ID NO: 4315 - DNA, 74 bp, Homo sapiens
aaaaacgtcaacaacagttttacggaaatagacagacggttggaaaaaaaactgaagatcacacaaaaagagag

SEQ ID NO: 4316 - DNA, 50 bp, Homo sapiens
agggacctcgcagggagccatccgatgatcacctgctgttaccagctacc

SEQ ID NO: 4317 - DNA, 82 bp, Homo sapiens
caaactgcggatgggcaggtccaccttccttcgggggtgagcggcctgaggtgagaagccctaccactgcaactgggacggc

SEQ ID NO: 4318 - DNA, 75 bp, Homo sapiens
tcccgtctgcgcgagtccacgcagctccccagattccgtcctatttcagtgttccgggaagccaatgaagatgag

SEQ ID NO: 4319 - DNA, 90 bp, Homo sapiens
ggggattctcgacctgctaacagaactggaccttttcgacaccatccagcacatgagagacagcaagcacatcgtcgtgtaccatcgagg

SEQ ID NO: 4320 - DNA, 82 bp, Homo sapiens
tcagaggccggaaaatgccctcaaacgcgccaacgcgcgagcttcggcctcggctctgtaccatgaagaagggccccagtgg

SEQ ID NO: 4321 - DNA, 75 bp, Homo sapiens
caggagtccctctccgcccagttacaaggctgccaggatatcgcagatgaattcagagcacaggagattgatgga

SEQ ID NO: 4322 - DNA, 100 bp, Homo sapiens
gaatttgacatctttacccgactctttcagggagtgacattaactgatcttcaagaagctgagaaaacaataggaagaagtcgttctacccgaaccagag

SEQ ID NO: 4323 - DNA, 75 bp, Homo sapiens
gaaggagcgaactgaagaggttctacacaattggacagtggtgattatcctcttaccatgcctggacctcagtgg

SEQ ID NO: 4324 - DNA, 90 bp, Homo sapiens
ggaggcggcaggacggccaagaccagcgcgagggccctgggcaaggcccgacaggtggtgaaggtgggtctggttgaagactctccctcc

SEQ ID NO: 4325 - DNA, 100 bp, Homo sapiens
cccaaagctattctgggggcaacagaggttcatctcagaagaagttgttggcacctgatatgtttacagaatctgatgatatgtttgctgcgtattttga

SEQ ID NO: 4326 - DNA, 82 bp, Homo sapiens
ggacctgtttgctgccatgctcctggcgtggacacacaagcaccccaataacctcaagtgttatagttttgccgctggactc

SEQ ID NO: 4327 - DNA, 96 bp, Homo sapiens
tggctcagcgggctctgaacacagcatcaatggcaggaggtttcctgttgagatgccacctcagtatggacagcaaggtgtgagtggttactgcca

SEQ ID NO: 4328 - DNA, 75 bp, Homo sapiens
acttggccaagctagatgtcaaggtctatgttaacaatgaatgggcaaccagtgttggggaaggagggagctttg

SEQ ID NO: 4329 - DNA, 75 bp, Homo sapiens
cagagctccgagaaaaggagacaggactgttcagtcttacactgaatgaacgtttcagtataaatggtggttatc

SEQ ID NO: 4330 - DNA, 100 bp, Homo sapiens
ggccaccatgggggcccagctcagcacggatcagtttgacaacttagaaaaacacacacagtggggaattgatattcttgagaaatatatcaagtttgtg

SEQ ID NO: 4331 - DNA, 75 bp, Homo sapiens
agagtacaagctgatcctgtccacaggccggaaggtggtggtcgtacgctgtgaaggcatcaacatttctggcaa

SEQ ID NO: 4332 - DNA, 75 bp, Homo sapiens
taacacgaaagataggatttgacccagagccggaattgaatgatctggcacgggaccctccagcacagtgttcag

SEQ ID NO: 4333 - DNA, 100 bp, Homo sapiens
ctctgcctcctcagtcttggcggagccatcgaaattcctatggatcgtcagttctcctcgggtctcggggacttgacatatcccacatctcccagcgatt

SEQ ID NO: 4334 - DNA, 75 bp, Homo sapiens
ggagcttctcagaagacagagggttttcttttgagctccagaaacatgacaaggaggactttcctgcctcttgga

SEQ ID NO: 4335 - DNA, 100 bp, Homo sapiens
ctctgcagacttcagattcgtttctgagatttccttcgtccctgacatcatctctgtgcactgataataaccctgcagggtctaaaattcccaggactcc

SEQ ID NO: 4336 - DNA, 83 bp, Homo sapiens
ggacagcagccccgagcactgtggccgaggcccacctgctgacatctacctgccaggtgagaagccctaccactgcaactggg

SEQ ID NO: 4337 - DNA, 80 bp, Homo sapiens
taagacaccgggacctcctggaagccaaaaatggagtctccccaggacagtgctatcacccgggatattaaccgaacatt

SEQ ID NO: 4338 - DNA, 100 bp, Homo sapiens
atgatatttccaaagtttgcagaaaagaatatgagtgaagcagagatggtttctgccatcaagcctcctcgtgaagagttcctcaacagccggatgctga

SEQ ID NO: 4339 - DNA, 74 bp, Homo sapiens
acaccccttcccccacccggccttcaggactgtttctttttccaaaagaggagctcaaaagagaaagttcatct

SEQ ID NO: 4340 - DNA, 90 bp, Homo sapiens
gaaaaaggaatcattgacccaacaaaggttatgaaactgagaaagttggcacagcaggttgctaattgccgccagtgtcttgaacggtca

SEQ ID NO: 4341 - DNA, 78 bp, Homo sapiens
gccactgctgctccgtggagatcgtcccgcgcctgccggcccactgctcagtggagcgtggaggacgaggaggaggcc

SEQ ID NO: 4342 - DNA, 80 bp, Homo sapiens
cttcgagagctaccgcgccagacaggctaccggctctctgaccagttccacgacatcctcattcgaaagtttgacaggca

SEQ ID NO: 4343 - DNA, 74 bp, Homo sapiens
agatgggcttgaattacaacaagagccaaactcattttttgatgcaacaggattgcctacagcgctcctttaag

SEQ ID NO: 4344 - DNA, 74 bp, Homo sapiens
ctctctgtggtgtttggaaccatggttggtggcatccttatccccaacggccctggccaacgtcaacattggga

SEQ ID NO: 4345 - DNA, 75 bp, Homo sapiens
ccgcagtgccaacttccccgtgcgtgtgccctttgaggccttcctggccagagctgcctggattgacaagtgccg

SEQ ID NO: 4346 - DNA, 75 bp, Homo sapiens
catgggcaagaactattcacacttttcaggttcttgattattacagacctctttctgaaaagcccggaattggta

SEQ ID NO: 4347 - DNA, 100 bp, Homo sapiens
ttcaggcgtctgagacttggtgggaacggaccttcctcttaggtctccggataactgtgctcctgacatccttccttatggttttgggaactggtctaag

SEQ ID NO: 4348 - DNA, 100 bp, Homo sapiens
ggtggaggagagcgccttggaacgccgacctgaaaccatctctgagcccaagacctagccggaaggtggtggtcgtacgctgtgaaggcatcaacatttc

SEQ ID NO: 4349 - DNA, 75 bp, Homo sapiens
cgctgatggtgcagcaccgcatgatggtacccaaagtcaggtacactgaggaggggacggctccgtcttcacatt

SEQ ID NO: 4350 - DNA, 75 bp, Homo sapiens
gaaactgcaccggaaatgtgcctaccagctcaaggatctaaatttacttgatcgctgtataaaagaaacattaag

SEQ ID NO: 4351 - DNA, 75 bp, Homo sapiens
atgcccagcaccattcctaggctgggagcaaaacgggagcccacctacgatgcagaattccagcacttcttgaga

SEQ ID NO: 4352 - DNA, 100 bp, Homo sapiens
tccaaacagtcctccaaacagaacaggaactaccaggttgtttttcaaagcagcggcactattttgcatttccaccagcagtgtgtgaaaattccaattt

SEQ ID NO: 4353 - DNA, 100 bp, Homo sapiens
tgaacagggacatgaagacgggcctgagccggtccttgcagacccttcccacagactcctccaccttcgacacaggcttctcagtgaatggacagctcat

SEQ ID NO: 4354 - DNA, 75 bp, Homo sapiens
agctccagccgaaggagaaggggggacgtcttcctcatctgcttctccctcgtcagcccagcctcttatgagaac

SEQ ID NO: 4355 - DNA, 82 bp, Homo sapiens
tgggcgagaacgtccactgcgggccggcgaaagctgttctgggaggtgatcagtgatgaacatggcatcgaccccaccggca

SEQ ID NO: 4356 - DNA, 51 bp, Homo sapiens
agcgagccatgatgatccaaacacctctatgtgttctcatttcacccaaga

SEQ ID NO: 4357 - DNA, 75 bp, Homo sapiens
aaatggcgtccaaagtcacagatgctatagtctggtatcaaaagaagatgttttctcccagatgtcagattccaa

SEQ ID NO: 4358 - DNA, 82 bp, Homo sapiens
ccatcttcggcatgtccttcgcctgccagtcctccttccgcttccagccgttcgagtcctatgactccaggccctgcctgcc

SEQ ID NO: 4359 - DNA, 82 bp, Homo sapiens
ccagcctgcggagcctgtggggcaggttcggctttccagtttggcagcagcactacaaatttcaacttcacaaacaacagtc

SEQ ID NO: 4360 - DNA, 75 bp, Homo sapiens
gaacagcttgtttgatgaagtgaggtggacaaggcaagcgtccggcatggcggagagaacgtggccgctgtgctg

SEQ ID NO: 4361 - DNA, 101 bp, Homo sapiens
cgctgcgccgcccgccgctgagggaccgcggggttagccactgctggctgcttccagtgttcgccgagagatgatatcatcaagttgaatcgaaaggaagg

SEQ ID NO: 4362 - DNA, 75 bp, Homo sapiens
attaaacttaacgtggaggctgtgaacacgcaccgtgacaagccaactgtactacttagtgggcgtgcaggagca

SEQ ID NO: 4363 - DNA, 90 bp, Homo sapiens
tattatttcccttctgtggaaactctctaaacaacaggatgaaacccataaattgaatcatttgctgtttcaaatagagaactgtgcgat

SEQ ID NO: 4364 - DNA, 100 bp, Homo sapiens
gtctataagctttgcaacagaattacagagtatgattgccggtggtggtgtgcacattgagccccggtatagacagttcccccagctgaccagatcccag

SEQ ID NO: 4365 - DNA, 99 bp, Homo sapiens
tcaggagaaagaagacagccatcatttgaaagttgtggaagaaggactctgggaaaatggcctttcctatgaatgtaggacgctgctcttcaaagcgat

SEQ ID NO: 4366 - DNA, 117 bp, Homo sapiens
aacatttatgggccttattgccagtgtgacaatttctcctgcgtgagacacaaagggctgctctgcggagcccccacagaacctttattgtgtaagtttgctgatggaggacagaaa

SEQ ID NO: 4367 - DNA, 101 bp, Homo sapiens
cttgccttgggactaatgacatgcttgtcaggtgacagagctgaatgaacctctctccaatgaagatcgaaatctcctctctgtggcctacaagaatgtgg

SEQ ID NO: 4368 - DNA, 98 bp, Homo sapiens
tgaactcaaagatgcccttaaaaggagttcatgatcaagtgttgcccacaccaaatgcttcatccagagtcatagtacatgtggatctggattgcttt

SEQ ID NO: 4369 - DNA, 98 bp, Homo sapiens
cgggagtcgcggaacagcaggcccgagcccaccgcgccgggccccggacgccgcgcggaaaaggtagctacagcaagctgggtagcaggcagatccaa

SEQ ID NO: 4370 - DNA, 76 bp, Homo sapiens
agccttcttcagcaccacctttttggggaagatttacctagctgccagattcaaccctatgaaaagataaaggcca

SEQ ID NO: 4371 - DNA, 83 bp, Homo sapiens
cttttgaagactggctgaatgatgacctcggctcctatcaaggacttcccaagtaagaagcggaagaggagccgctggaacca

SEQ ID NO: 4372 - DNA, 75 bp, Homo sapiens
gccagctgttcgcgcccggagacttgcctgagctcaccctcatcgattcctacgagtcttctagcttcatgttcc

SEQ ID NO: 4373 - DNA, 100 bp, Homo sapiens
cggagaattccccttcctagaaggaccaagatggcagcagtgactctgctggctttggcgtatacacagtttaatctccacctcacaggtgacatccatg

SEQ ID NO: 4374 - DNA, 90 bp, Homo sapiens
gcccctacctccccaacggatcgctctcgcccaccgcccgaaccataaaataccatgaggagtttgagaagagccgcatgggccctagcg

SEQ ID NO: 4375 - DNA, 115 bp, Homo sapiens
ctcaatatctgtcttcggtggactccttcggcagtccacccaccgccgccgcctcccaggtagctacagcaagctgggtagcaggcagatccaaaggatatcatgaagtttccag

SEQ ID NO: 4376 - DNA, 100 bp, Homo sapiens
ggctccggccgcgtttcccgggtaaaggggctgacttatccttgtataatgaattccgattgtggaaggatgagcccacaatggacaggacgtgtccttt

SEQ ID NO: 4377 - DNA, 100 bp, Homo sapiens
caaaaggacaagcagtttgttgccaagtgacgagtagcacagcccctctatggtttagatggcagtgctgcaaaggaggcaacagaggagcagtctgctc

SEQ ID NO: 4378 - DNA, 50 bp, Homo sapiens
aagccattgctccacaggttggcaatgagttccgttctggaaaggcaccc

SEQ ID NO: 4379 - DNA, 100 bp, Homo sapiens
ggggtcagcggggcctggaggaaagagccatccctacggaatccattaccgcacacacatgccctcttggttctgtttctttgaagaaccccaggaaaac

SEQ ID NO: 4380 - DNA, 97 bp, Homo sapiens
tttccttgggtcttccggtaggagctgtaatcaattgtgctgacaacacagtcaaagatgactcaaatcatacaataggagtggaatttggttcaaa

SEQ ID NO: 4381 - DNA, 98 bp, Homo sapiens
tgccatggacgacgaggaggagacgtaccggctctggaaaatccgcaagaccatcatgcaggagaccatctagctggctgcccccgacagtgagtgtg

SEQ ID NO: 4382 - DNA, 75 bp, Homo sapiens
actccgtgggccagcccctgacaggacaaggtgggggagtctgtgttccacacaacccgctgggtgccccccttg

SEQ ID NO: 4383 - DNA, 98 bp, Homo sapiens
gacatgagtgatgtggaggaaaacaacttcgagggcagagacctgaaggagaagaaggagaaggtggaggagaaggcaagccggaaagagcgaaagaa

SEQ ID NO: 4384 - DNA, 75 bp, Homo sapiens
ccggaatcccgcgcgctgcccacgattcgcttctgaggcccattgctagaagactgggacataatcagccccaaa

SEQ ID NO: 4385 - DNA, 127 bp, Homo sapiens
aggtgggcggctttgaccgagaggctgctggagctcgtgtttggacgccacaaccagtgtctctgaagaagatgtctcaagtagatattctcgaacagatagaagtgggttccctagatataacagg

SEQ ID NO: 4386 - DNA, 100 bp, Homo sapiens
gcggtcgctccgagcggcgggccgcagagggagtgaaatattagggccaacactctcagaaacaagaccggaagcccttccacctccatctagcaatgaa

SEQ ID NO: 4387 - DNA, 100 bp, Homo sapiens
attaggaaacatgctagaattacctggaacttcatcatcatctacttcacaggaattgccatttggtggtgatgaagagtaaatcaaagagtttagcaga

SEQ ID NO: 4388 - DNA, 80 bp, Homo sapiens
agcgctttgatttacagcagctgcagtgtactaatggtcacttgatgtgcgctggctgttttatccacctactagcagat

SEQ ID NO: 4389 - DNA, 82 bp, Homo sapiens
gatgaagttcgagcactaatatttaagaaagaagatgttaactttcagatggcattggagtcaagagagattataaacaggc

SEQ ID NO: 4390 - DNA, 90 bp, Homo sapiens
cgggcaatgcctcgcgggcgcaatgaatccgcggcaggtctggtccgagagcaggaggctgggctgctgcagttcctccgcctggacggc

SEQ ID NO: 4391 - DNA, 75 bp, Homo sapiens
ccgggttgtccgggtcctgtcaatgtcacgtagttagaaacaaacctgtggcaaggcaggctcctggcaaacgga

SEQ ID NO: 4392 - DNA, 90 bp, Homo sapiens
cgaagaggtacgattccggagaatcgcgaggcagagcgggagcgcgcagccagatctgtggctggactgtagttgcagcaggccccagag

SEQ ID NO: 4393 - DNA, 98 bp, Homo sapiens
taatggaggtctccagtttcggagcatctttccttgaagaagtacattattgacattgtggttgaaagtacagctccagcagaagctttgaaagatgg

SEQ ID NO: 4394 - DNA, 100 bp, Homo sapiens
ctgcccagacggctcacctgtgcgggatggaacaaaagggtggtgaaggaggagatctttgatgacaatgccaagcttccctgcttcaacggccgcgtgg

SEQ ID NO: 4395 - DNA, 51 bp, Homo sapiens
atgctcaaggaatgggctattaaggtatctggccaggaacagtcttcacgg

SEQ ID NO: 4396 - DNA, 98 bp, Homo sapiens
tgtaaataccgggaagccacatgcagccactgcaagagtcaggttccgatgatcgcgctgcagggccactgtttgtggaagatataatgacaatggtg

SEQ ID NO: 4397 - DNA, 75 bp, Homo sapiens
tcccgctcatcgcccgccacgactgccacagagatagttcaaggtgacaatggctcctctgcagcagcacatagc

SEQ ID NO: 4398 - DNA, 120 bp, Homo sapiens
gtcctgattattatgaagctgtttgtggcacagatgggaaaacatatgacaacagatgtgcactgtgtgctgagaatgctttcaggccctagacactggtggccaccacgtggaattatt

SEQ ID NO: 4399 - DNA, 97 bp, Homo sapiens
aatgatccgagacctccagaatgagaaaagccaggactctatttgaaaaaaatgctgccccgattttacatttatctggcatggatgtgactattgt

SEQ ID NO: 4400 - DNA, 100 bp, Homo sapiens
ctccagcgggcctggactgtgggctggtgtgtggaactgattttcatcgtggaatttgggggtaaacccttcagttgtacaagcctcagcctgtctcagt

SEQ ID NO: 4401 - DNA, 75 bp, Homo sapiens
tttgctgccaaaagggaagcaaagcatctcaaagccaagggaagagatggtgttgagtggaaaatacaaatctgg

SEQ ID NO: 4402 - DNA, 74 bp, Homo sapiens
ccaggacccactggaagcctagaaatgggaggtggggaagacagggctccagctaccacaggacgggctctggg

SEQ ID NO: 4403 - DNA, 82 bp, Homo sapiens
ctggaggaggcgttgccgtgagggataaagataaagtttctctaaccaagaccccaaaactggagcgtggcgatggcgggaa

SEQ ID NO: 4404 - DNA, 90 bp, Homo sapiens
ggaggcttccaggtgaaactctatgacattgagcaacagcagataaggaacgccctggaaaacatcagagttgtggaaagtaaaaatgta

SEQ ID NO: 4405 - DNA, 75 bp, Homo sapiens
cagcgggctccgtttcgtctccagaaccctggacagctcctccagcgtgagtgcatctccatccacgttggccag

SEQ ID NO: 4406 - DNA, 100 bp, Homo sapiens
gagtgaagcagctgagtgatgggcagcccccaccacccgcccaggccagccccagcagcaacagcagcacagtgagaagtgtaaggctagaggatttacc

SEQ ID NO: 4407 - DNA, 82 bp, Homo sapiens
gaggcagcgcgggatcccagcctcaggcgtgcgcggacggtgtgcgggtgtccaggaggctgtggtgagctgcttgaacaaa

SEQ ID NO: 4408 - DNA, 100 bp, Homo sapiens
aaccccttccaggagccacacctattatcaagaatgatctgtgggttaaccctctacgctactacctgagagaaaggggctccaggataaagagaaagaa

SEQ ID NO: 4409 - DNA, 82 bp, Homo sapiens
gcgcagtgaagtggtgagcctttttgtcactgaaaaatatggtgttatccctaagaaatgcttccctgaatcttatacaaca

SEQ ID NO: 4410 - DNA, 90 bp, Homo sapiens
cagtctgtccaccatcatccttttgggcttgatcatcgcctaccacacacgtgaagtccagggtgtcaaattgagaaccaggtagatccc

SEQ ID NO: 4411 - DNA, 100 bp, Homo sapiens
ccgagccccgacaggctatgacgtacaattctgtggtgttcttggtcacacatttatggagtttctgaagggcagtggagattactgccaggcacagcac

SEQ ID NO: 4412 - DNA, 80 bp, Homo sapiens
tcatctttattatctcattgaagcttggaattacatagctggaaaggatcttacagatgggttgtacctggccattggtt

SEQ ID NO: 4413 - DNA, 108 bp, Homo sapiens
tttgccaccagcttcagaaaaacatggcagctggggaagtggtttggacatgcacaccaaaccctgggttagagcaagcctgccgagtgcctgcgattgcaggcgcgc

SEQ ID NO: 4414 - DNA, 100 bp, Homo sapiens
acaacagcaacagcaagaagaagagcccagctagcaccttcgccctctccagccaggccgatttcactactagatctcaagtgactcttgaagaaaggca

SEQ ID NO: 4415 - DNA, 75 bp, Homo sapiens
tcgtaatcagcaggccaaagactcagagctgtgattgggttattatacccctgcattgacagacatctaggagaa

SEQ ID NO: 4416 - DNA, 100 bp, Homo sapiens
agtgggatttggatgtgggatccggttccttggtgtcatccagccttagcaaaccagagaattttgattctgacattagcagtgtgggaatagatggctg

SEQ ID NO: 4417 - DNA, 75 bp, Homo sapiens
cgccgccttcctgcagcagaggaactcctataaccaccaccaggaaatctggcattttttaaagtttgcgcccca

SEQ ID NO: 4418 - DNA, 100 bp, Homo sapiens
tctgctccctgccctgtgccctccacttgcagccagggactgggcatccacccggccaggttcccaggaaggcaaaacaacgagtggatgagaaacccag

SEQ ID NO: 4419 - DNA, 75 bp, Homo sapiens
ggaactttaccacatagcactgttcttggaatttaacatgcttgcacaagtgccgaaaacatttgaagagtcgga

SEQ ID NO: 4420 - DNA, 50 bp, Homo sapiens
ggctttaatcctgaaagccatgcagcggtggtatgtgtgcaacagagaga

SEQ ID NO: 4421 - DNA, 75 bp, Homo sapiens
ggaaaagaagaccatctcaccagagcatgtcatacaaggaaagcagatggtggagctgaatatgccacttaccag

SEQ ID NO: 4422 - DNA, 75 bp, Homo sapiens
caatcccaagaagcaggaatgaaagtggcgctttctccgccccaggttacgggtaaattccggggaggtgtgaac

SEQ ID NO: 4423 - DNA, 74 bp, Homo sapiens
gaaggccaaggctaaggcagtatctcgctcacagagagctgggctacaggagccaaggcaaagagggaccactg

SEQ ID NO: 4424 - DNA, 82 bp, Homo sapiens
ggagtttgagcatcagagggcccctagggtctctggtgaagttcatggatgtctatcagcgcagctactgccatccaatcga

SEQ ID NO: 4425 - DNA, 100 bp, Homo sapiens
ggggccttccacaccccctccgtgggtgtgtgggggagctgatcaccttctattactattggaagaagacccccgaagcagccagctcccgagcccatcg

SEQ ID NO: 4426 - DNA, 100 bp, Homo sapiens
cgctgcagtcgccgccgccgccgccgcaggccgggaggagccgcagcgccgggcgaccccgcccgggcctcggtgcttcagacaacatcccgaaggcaga

SEQ ID NO: 4427 - DNA, 75 bp, Homo sapiens
cccggacggtacttctgccactgctgctccgtggagatcgtcccgcgcctgccgagcgtgctcggcggccaggac

SEQ ID NO: 4428 - DNA, 83 bp, Homo sapiens
tgggtgattctgtccgacggcgacggcaccgtggagaaagggatcatagacggtatttctatgtaaacgaacagtcgggcgag

SEQ ID NO: 4429 - DNA, 83 bp, Homo sapiens
atcccagcagcggattcaccatctcaaaaccttctttcccagggaactccgatgaagtgttccaacaaaatgagcgagtgaac

SEQ ID NO: 4430 - DNA, 75 bp, Homo sapiens
ggccggtgaagcagtgcttcgtggtgactgaaaaagaaaatcctgagcgagcagctctgtactttgtttctggcg

SEQ ID NO: 4431 - DNA, 109 bp, Homo sapiens
cctggtcatacaccagtactaccaaggacagcttttttcctgcaaggtagtaaacctattgatggcaattttgctgactgtggaagtgactcatccaaactccatgcca

SEQ ID NO: 4432 - DNA, 75 bp, Homo sapiens
gggccatggccgccgccgatgccgagaccacaattagtcctctggagaatgccatagaaaccatgtccacggcca

SEQ ID NO: 4433 - DNA, 82 bp, Homo sapiens
cttggctctgggagacctgctgcacatcgtcattgacatccctatcaatgtctacaagcgagtaaccagctcataaatcaca

SEQ ID NO: 4434 - DNA, 80 bp, Homo sapiens
tcctgtaatatatctgtatcatcggagattattcagagctgggagagcttcccccacgatctcctttagaaccagtttgt

SEQ ID NO: 4435 - DNA, 100 bp, Homo sapiens
tcgccgtgcgatgcctggctaagaatctccttggagctgagaaccgagagctgaagctggtggctcccaagtttatgcgaattccatgtgtggatgctgg

SEQ ID NO: 4436 - DNA, 90 bp, Homo sapiens
caggcgcggggaacaccaatggcggggtggatctaggatccggcttccaacatgtggcagctctgggcctccctctgctgcctgctggtg

SEQ ID NO: 4437 - DNA, 95 bp, Homo sapiens
caagtcctgcgcttggggatcctctgtacgcccgttcactggagaatccagctttggcggttgcaattaaaacatgtaaaaactgtacttcggac

SEQ ID NO: 4438 - DNA, 90 bp, Homo sapiens
caaattccctcattactttggaaagtgctgcattcttacaaccctaaaatccatctgctcttaacacaccgtcaaaaagagggggaaatg

SEQ ID NO: 4439 - DNA, 98 bp, Homo sapiens
cccggctccgggccagcatccgagagcccggactggagacaggtgatttggcttctgcacagttaggaggagcaccaaaccgatgggaggttttgtca

SEQ ID NO: 4440 - DNA, 75 bp, Homo sapiens
ccagaccgtacagcacctggtgacctccgacaaccagctgtccccgccctactccggaccgccccaaagactcca

SEQ ID NO: 4441 - DNA, 76 bp, Homo sapiens
aagaccagttcattcttagtgtcttctgaaataaaattaggaggaatgcaggctcaggttggaatgccaggaagtg

SEQ ID NO: 4442 - DNA, 100 bp, Homo sapiens
atgaacaaagtcatcggagagtttctgtccaaccagcagccatacccccagttcatggccaccgtggtgtataagcaattctgtggtgttcttggtcaca

SEQ ID NO: 4443 - DNA, 82 bp, Homo sapiens
atcgcctgggtggttgttggcgtgtccctgcagcgaaggatcctgggctggaccccaatggagaacaggtggtgtggcaggc

SEQ ID NO: 4444 - DNA, 100 bp, Homo sapiens
aagcggatggtggttcctgctgccctcaaggtcgtgcgtctgaagcctacaagaaagatgaccaatttgcagatcaaggaagagaaagtcaaagcagata

SEQ ID NO: 4445 - DNA, 100 bp, Homo sapiens
cagatttcaggttcagtgacatcagaaaatgtgtccagagattacaaggcaacagcattattgagaaaagcccttacagaagagtgtggccgtaggtcag

SEQ ID NO: 4446 - DNA, 100 bp, Homo sapiens
gtgaaaccaacagccagtgatatgctatacatgggagagtcccgtattctcagagtaaaagttgtttctggaattgatctcgccaaaaaggacatctttg

SEQ ID NO: 4447 - DNA, 74 bp, Homo sapiens
cttcactgcactgaatgggaagatttactttcgaagctataaaaccgagctgaagctgccatggaattcttaca

SEQ ID NO: 4448 - DNA, 100 bp, Homo sapiens
ggagaccgagggggagccccgcgcgcggcgtcggtgtcatggagaaactccagctgggcccagagattctgcagcgggaaaatccaaggcttatttatgc

SEQ ID NO: 4449 - DNA, 100 bp, Homo sapiens
agacacaaaattccaaaagctgcaatataaggatctctgtacagtggatatcatccagtgaaaattggagacctcttcaatggccggtatcatgttatta

SEQ ID NO: 4450 - DNA, 75 bp, Homo sapiens
aagatctcggagatcgagaaggagatcgctcggacacagaagaacaagggtgtttgacaacgacatctcctacat

SEQ ID NO: 4451 - DNA, 74 bp, Homo sapiens
ctgcgctttcctgtccccaagccgttctagacgcgggagccagatgaccaagatgctccagatgaacatgagtc

SEQ ID NO: 4452 - DNA, 83 bp, Homo sapiens
aaaggaccagacaaatcaaattagtggttttggatttttagactctgaggagcagttggagctaatccacattatggaaatgg

SEQ ID NO: 4453 - DNA, 75 bp, Homo sapiens
tgccgctggtgatgacaagaaaggaatggtggttccttctaagaccaaaattgtgtgccacttttctactcttgt

SEQ ID NO: 4454 - DNA, 83 bp, Homo sapiens
catgcttagcattcgagagaacaaaattaaacaactacctgctgaaattgtttcccagctcatagggaagtgatgctctccat

SEQ ID NO: 4455 - DNA, 91 bp, Homo sapiens
ggaggaagtgctcctgctgggcctcaaggaccgcgaggttttaaaatcaaagatgggaaaatcggagaaaattgcccttccccatggccag

SEQ ID NO: 4456 - DNA, 75 bp, Homo sapiens
gcagaagtgagctggaaggtcttggagcgaagagctcggaccaagcgctcaggccctggccaacgtcaacattgg

SEQ ID NO: 4457 - DNA, 82 bp, Homo sapiens
cgtgcacttcctggtgggcaaggggctcagctcgcagcgcatccccgcgcacagcttccccgggcgctgcctggacaggcct

SEQ ID NO: 4458 - DNA, 101 bp, Homo sapiens
aatgtactccagttgctggatatccaagcctctcagcttcggagaatggagtcttccatcaatcatatctcacaggtctgccatcatggatgttctcgcag

SEQ ID NO: 4459 - DNA, 50 bp, Homo sapiens
cgacttggagtctttgtccaggacggtcatgcagaaggcttttgtatgat

SEQ ID NO: 4460 - DNA, 90 bp, Homo sapiens
gacacagcaggctgagcagctgcaaacccccgaaaaagcaagtgcagccgcggagccctgtacacaggcttttccatcctggtgactctg

SEQ ID NO: 4461 - DNA, 85 bp, Homo sapiens
ggtataaatgatctcgtcactcctttctttgtggtcttcatttgtgaatacatagcttttcgctgtggcctgcagtttttaggca

SEQ ID NO: 4462 - DNA, 83 bp, Homo sapiens
atggagcacatcctgaagccacttcagagcaaccacaggaagaagaagcagacgttgaaggcattcagtataaaacacttcga

SEQ ID NO: 4463 - DNA, 90 bp, Homo sapiens
ctctgatgacggcactgttagaatctgggactttcttcgttgccatgaggaaagaattctccgaggtgagcacctgcggatctgtcccca

SEQ ID NO: 4464 - DNA, 100 bp, Homo sapiens
acgagctgaccctgggagacatcgacgctgtgatgcagatccatccgccctagcaaaatatgttctggctttggtaaagaaagacaaaagtgaaaaagag

SEQ ID NO: 4465 - DNA, 75 bp, Homo sapiens
ggtaggcagcggtgctgggcatgctcagtgggcaggacccgttagagtggcgagagagaattgccaaaagccacg

SEQ ID NO: 4466 - DNA, 83 bp, Homo sapiens
tggagcttggtttcgggatctcggtgctgcagacggcgagacctcctgcacagcggagctggagtttgttcagatcatcatca

SEQ ID NO: 4467 - DNA, 82 bp, Homo sapiens
cagctcacggaggagatccagcggcatctggatttgtggtcagaaatgagaagacatgaaatgttgagggaggagctgcgac

SEQ ID NO: 4468 - DNA, 82 bp, Homo sapiens
tgactctccatcatgtcctggacgctggggatacagacgtgaatcagattttgaagatgtaactgagtttctggaagaggtc

SEQ ID NO: 4469 - DNA, 82 bp, Homo sapiens
ttatgccaataatacttttggatcagcaaatgtcacaacaaccttggaagtagtaggggacatcctgaagttcttgaaaaag

SEQ ID NO: 4470 - DNA, 98 bp, Homo sapiens
gctatagctatagcctcctgtattttgttaacaacatgaactatcttccatttcccatcatacagaaatatggctacacacacctttctgcaggagag

SEQ ID NO: 4471 - DNA, 100 bp, Homo sapiens
tggatgggctgcctccaggtgacagcaatcagctggcctggtttgatactgacctgtaaatcatcctttaggctattcaagatctctggcagtggaggaa

SEQ ID NO: 4472 - DNA, 73 bp, Homo sapiens
ccccggcgcgaagaggctggactcggattcgttgcctgaggttcccacatcccatccccctcaccactgtgca

SEQ ID NO: 4473 - DNA, 100 bp, Homo sapiens
gatccctcaagactggtccacggagtgtatgaccacaaacagccatcaagatgtgggcgctatctccaactgtctttgcacttctgagtaagaatctgat

SEQ ID NO: 4474 - DNA, 74 bp, Homo sapiens
agaagacattgcattgcctcttatgaaggttcattattatgaagatggtaatgttcagctagtgagtcataaag

SEQ ID NO: 4475 - DNA, 75 bp, Homo sapiens
ctgttttgcctgaatacatgatttaaacaagagatttccacagaagggttaatgcctcttggaagtcaggagtct

SEQ ID NO: 4476 - DNA, 75 bp, Homo sapiens
ggttctggaatcctcagttcaagaatagcctaacatggcagaccagagacagcgctcactgtctacctctgggga

SEQ ID NO: 4477 - DNA, 97 bp, Homo sapiens
tccatttggagcttttgcaacatgcaaagttctgcagaagaagggcgagaagggagagccgggtgccatcctgacagaggacattcctctggaaagg

SEQ ID NO: 4478 - DNA, 100 bp, Homo sapiens
cctcatcccaggttgccttggaaaatgccaacgccgtgtctgaaggtcaatgagctgaaggagaaaggcaacaaggccctgagcgtgggtaacatcgatg

SEQ ID NO: 4479 - DNA, 58 bp, Homo sapiens
aaggattccaagtaactcttatttggtcagtgctgacagttgcttgtgaacaaactga

SEQ ID NO: 4480 - DNA, 98 bp, Homo sapiens
ctgcaggccgagggacgtgccaagaagcgcaagagactcacgttgcgacatgttaacagtaaccaatgtctcgatgaaccttctgaagaagacaaaat

SEQ ID NO: 4481 - DNA, 112 bp, Homo sapiens
tcaaaataaaaactggagaatggttctatgaggaacgagccaagaaatttccaactggaggctggcgcccatgcggctctacacgctctccaagcgccactttgtcctcgtg

SEQ ID NO: 4482 - DNA, 75 bp, Homo sapiens
tcctagcggcgcggcgctcgctcctacgatcggcttcagctccccaggaatatgattgaaaacagcatgtttgag

SEQ ID NO: 4483 - DNA, 100 bp, Homo sapiens
gggggcaggagctgctttttcaatgagaagaatgaacagacctagtgggcgttgcctttagacccagtcaggatggctaaaggtgaccccaagaaaccaa

SEQ ID NO: 4484 - DNA, 90 bp, Homo sapiens
gatgctttcaaacagtgtcaatacaaagatactctccccaagacatcaactagtcaggcagtcttccgtctccagtctggcatctgccat

SEQ ID NO: 4485 - DNA, 50 bp, Homo sapiens
gctcgacaggcggcgcgggcggcggccaaagaggtgctgaaaaaatattt

SEQ ID NO: 4486 - DNA, 100 bp, Homo sapiens
tcctccggcagctggagatgtccgagcccaaggcaattgatcccaagttgtcgacgaccgacagggtggtgaaagctgcagaaccttggcctgaaaatgc

SEQ ID NO: 4487 - DNA, 82 bp, Homo sapiens
cgcccatatgggggttctggagagcggggtgtgggaacccagacctggactcagaggcgctgctagccctgcccctgcctca

SEQ ID NO: 4488 - DNA, 50 bp, Homo sapiens
ggagaactttgcacatgtaacatccctggtagagacgggggttcaccatg

SEQ ID NO: 4489 - DNA, 75 bp, Homo sapiens
ctgcagttcttttgtccccgggtagagctatcatggtgaacttacttcagattgtgcgggaccactgggttcatg

SEQ ID NO: 4490 - DNA, 80 bp, Homo sapiens
agccgcagccatgtctggggacgaggaatactcccccagttgcaagaggcgcaggaccgtggaagacttcaacaaattct

SEQ ID NO: 4491 - DNA, 75 bp, Homo sapiens
catccatccagatgaacgtggccgagggacaagaatccttcaagaaacaggaaaaaactcctaaaacaccaaaag

SEQ ID NO: 4492 - DNA, 50 bp, Homo sapiens
cagcgagccacgggagcgagccaggaccaagaatcgccttcagccctgtc

SEQ ID NO: 4493 - DNA, 101 bp, Homo sapiens
gaaagaatatcagacaatgcgagagagtcagctgcaacaggaagacccaatggatagatacaagagacgaggtcttgctacgttgcccaggtcggtcacga

SEQ ID NO: 4494 - DNA, 78 bp, Homo sapiens
caccacttaagagaaactgttttatccccaaaaggcctattcctaccatcaaggtttttcgttggaatatacgttgca

SEQ ID NO: 4495 - DNA, 100 bp, Homo sapiens
acctttgtccaggccttggtggaacatgtcaaggaggagtgtgaccgcctgggccctggcatggccgacatagtgaagatctttaagcaagaagttaaag

SEQ ID NO: 4496 - DNA, 72 bp, Homo sapiens
ggccacagacacttctgatagtgaagagaacgtttgtctgcctgatgagagccacttgggttaagaaactac

SEQ ID NO: 4497 - DNA, 100 bp, Homo sapiens
ggagtccaagactgagaaatggatggaacgaatacacctcaatgtctctgccatccgggtgacctgcataggttcctgcggggtctccaacaaggctaat

SEQ ID NO: 4498 - DNA, 82 bp, Homo sapiens
ctttgacgtgatggtgaacggcaagggcagctggtggaatttttgaagaaaatggaatctcgaggccccctttcgtgcgaca

SEQ ID NO: 4499 - DNA, 95 bp, Homo sapiens
cggcccaagaaatcaaaataaaggaaacacatttcatatactgcagatcaccacgcttattaatcataaagataataccaaaaagtctgataaaa

SEQ ID NO: 4500 - DNA, 73 bp, Homo sapiens
gcggggcccacctctctaagcctatggaaaagcttctggattagtgacaagagctggggttaggatccggttg

SEQ ID NO: 4501 - DNA, 50 bp, Homo sapiens
aacgctgctccctgtctgcaactgacttaatggagtctcgctttgttgcc

SEQ ID NO: 4502 - DNA, 100 bp, Homo sapiens
ctgacaaactacggcttctacggctgttactgcggctggggcggccgaggaacccccaaggatggcaccgattgggctctggaactgctgggaaaacagg

SEQ ID NO: 4503 - DNA, 83 bp, Homo sapiens
gttaaccaggatacaagattagacaacagagtcattgatcttagggaacgggattttccaacagaaaccattaaatttggtcc

SEQ ID NO: 4504 - DNA, 96 bp, Homo sapiens
ctttcacaaaactgttcctgtgaaagcatttcctgcttttcttcagacggaatggaagttggatacactttgtgacttgtacgagacactgaccat

SEQ ID NO: 4505 - DNA, 75 bp, Homo sapiens
ccggcccgccgagggccccagcgcaggagccgcgcccggacccagggctgtacatccttttgaaatcccagagat

SEQ ID NO: 4506 - DNA, 101 bp, Homo sapiens
aaactcttcaacactgttattgtaaacaaagatcccgtaccagctttggatctcggacagcaactccagctcaaagtgcagcgcctgcacgatattgaaac

SEQ ID NO: 4507 - DNA, 100 bp, Homo sapiens
atcagattattcacgaagctctagaaagtttcctattctgtgaaacagaagacattgtgatggagtggttcttcagctactggatggaaacatatgcctg

SEQ ID NO: 4508 - DNA, 98 bp, Homo sapiens
agacctcacagtgccaaatggagctggaagcagtccagtgggatctaaaatgtccactgaggcacaaagagttgatgacagtccaagcactagtggag

SEQ ID NO: 4509 - DNA, 50 bp, Homo sapiens
ctcacctgcatggacttccactatgagaagctggcagggcggagatgctg

SEQ ID NO: 4510 - DNA, 50 bp, Homo sapiens
cccgtcagcatcccagccgtgctcacggtgaggcggaaccaaccctcctg

SEQ ID NO: 4511 - DNA, 74 bp, Homo sapiens
ggctgctgctggccgaagcgaagggcgacgccaagccggaggggcggcgactggcggcgcgatggacctgaccg

SEQ ID NO: 4512 - DNA, 74 bp, Homo sapiens
ccactttgtgatcagagccgtgttcggggagtctttcaggatcctgatggtgaacatgccaggagagcaatgca

SEQ ID NO: 4513 - DNA, 75 bp, Homo sapiens
cttctccatggccacaggttgaagcagcccgaagactgcctggatgaactcatgatgccttcttctgtagagtgg

SEQ ID NO: 4514 - DNA, 100 bp, Homo sapiens
cagtttgtgatggaaggagtgaagaacctggttttgaaacagcaaggggaggcccccgctgagatgggggcgctgctgctggagaaggaaaccagaggag

SEQ ID NO: 4515 - DNA, 100 bp, Homo sapiens
cctcacagaagaccagaagttcaaaatgctactattgagtttatggctccttcagaatacatgcttccccgggcgctgcctggacaggcctgcctgcgtg

SEQ ID NO: 4516 - DNA, 51 bp, Homo sapiens
aaagagtttggcgttgaaagaagtggggatcatcgtcttgctcttctttta

SEQ ID NO: 4517 - DNA, 98 bp, Homo sapiens
agcagcccccgaaggccctatcaggacatggagtatgaaagacggcgagaaccactgtctctgatcaacgtgcggaagaggaacgtggaatctgggga

SEQ ID NO: 4518 - DNA, 90 bp, Homo sapiens
atgtactgggggattcgcagggaggatgtcgggacaccccggaagctgggaaatggaatgggacgcgagagataaagattctatccgacg

SEQ ID NO: 4519 - DNA, 83 bp, Homo sapiens
tccccgaacctacggacaagacctccaccacgcagagaatccagcctgaccattgacttcctgaacgacaacattcgaagagg

SEQ ID NO: 4520 - DNA, 75 bp, Homo sapiens
acccctttggccctgtatcaggagcacaggcaagactcggaaagctagcctcctatctgccaagtcatccaccga

SEQ ID NO: 4521 - DNA, 88 bp, Homo sapiens
gacacttttgcttgcagttaggtcaagtggaggtacaccaggggttggaaaaaccacactaggcaaagaacttgcgtcaaaatcagga

SEQ ID NO: 4522 - DNA, 100 bp, Homo sapiens
tggagttcagcgggagcctcttcccgcacgcaatctgcctcggagacgttgataacgatacggtacttcttgcaagggatatgcattagcacatactcaa

SEQ ID NO: 4523 - DNA, 50 bp, Homo sapiens
gttcaagaagaacactccagagggatacagcaggccaggagcgatttcac

SEQ ID NO: 4524 - DNA, 75 bp, Homo sapiens
aagcaggacatcttgaccatcttcaagcgcctccgctcggtgcccactaacaagacggagtttcactcttgtcgc

SEQ ID NO: 4525 - DNA, 82 bp, Homo sapiens
agcgagtttcagaatttacaccggaaactcagtgagggccgttgctccagggagaactgcaaatatcttcatccacccccac

SEQ ID NO: 4526 - DNA, 82 bp, Homo sapiens
ctacatcttcggcctgggccttaccatcttcatcatgcacatcttcaagcatgctcagatcttcagtgtctattggattttt

SEQ ID NO: 4527 - DNA, 95 bp, Homo sapiens
tgcacttcgcattttggcattgacatttaattttagggtcctttatatagaagggagagtactatttcttgatcatccaaaaaagaagattcggg

SEQ ID NO: 4528 - DNA, 73 bp, Homo sapiens
tggtgggtgggtggggcagcctttcaggcaggtgggtcatgataactgggtacgtggagttctgttccattct

SEQ ID NO: 4529 - DNA, 83 bp, Homo sapiens
accaggaggttttccgagacaacaacggcaccgcgctgcatcttcctcccgtgaggctggccgagctccacgctgatctgaag

SEQ ID NO: 4530 - DNA, 83 bp, Homo sapiens
caggagcaagtgaccaggagcaggactggggacagtcctcctgcaaggagaatccttttaaccggaagccatcacctgcagcg

SEQ ID NO: 4531 - DNA, 95 bp, Homo sapiens
cacgtctcgtccacgacctccctaggtgctatacttggtagatcagaaactcaggagtgtcttttctttaatgctaattgggaaaaagacagaac

SEQ ID NO: 4532 - DNA, 74 bp, Homo sapiens
cggcagagttgttatttttcagcgtgaacaagaggaacgtcaaggtcgtgggaaataaaaggcagttctacaca

SEQ ID NO: 4533 - DNA, 80 bp, Homo sapiens
gtttctctgggtttgcccctctgcaaccacaggtttgaagatgccgcatttggattggatgaattccaaattctgcttgc

SEQ ID NO: 4534 - DNA, 75 bp, Homo sapiens
gctggcatcagcacagacaccgctttgccgatagagccatcgcctgtgacactgggtcgaaggagttctggccga

SEQ ID NO: 4535 - DNA, 90 bp, Homo sapiens
ctacggatgaggaaactgaggcctggagaggttaaagagacccgttcagagtcctacagtggcaggattacaaggcagaggaagacccag

SEQ ID NO: 4536 - DNA, 98 bp, Homo sapiens
aatggcggcgcctgaggagcgggatctaacccaggagcagacagagaagctgctgcagtttcagacaaaaggatgccacggagaaagaaaaaagttaa

SEQ ID NO: 4537 - DNA, 90 bp, Homo sapiens
ccctcctcctgcctcactgccagaagctctttgtgtatgaccttcacgcagtcaagaacgacttccagatccctgcatgtcactgagtcc

SEQ ID NO: 4538 - DNA, 137 bp, Homo sapiens
agcaaacttaccttgtctgtctttgtacatcatcaccaaatggaaagttaatcgaagagcaattctgtggtgttcttggtcacacatttatggagtttctgaagggcagtggagattactgccaggcacagcacgac

SEQ ID NO: 4539 - DNA, 74 bp, Homo sapiens
acttggttccccctccctcagcttccgccccaaaaggtaacacaagtggcaagacagccgggaacccctacccc

SEQ ID NO: 4540 - DNA, 101 bp, Homo sapiens
cttgggcaccgagagggactacgtgggcaccttgcgcttcttgcagtcggaaagaaaccttgactggttccccaggatgagagccatgtcattggtcagca

SEQ ID NO: 4541 - DNA, 75 bp, Homo sapiens
tttgcagaacagagatgacatgccagcccagactttcattcaatctgttgccgaggctggaatgtagtggtgcga

SEQ ID NO: 4542 - DNA, 100 bp, Homo sapiens
aaaaatcgtgacaccagaagaatattataatgtcacagttcatttgtcccgctggctggaagcctggcagtgacacgattaagcccaacgtggatgacag

SEQ ID NO: 4543 - DNA, 74 bp, Homo sapiens
ttcgagcagctcatgaccgacctcaccctgtcgcggggtcggcactcttcaccctcccgagccctgcccgtctc

SEQ ID NO: 4544 - DNA, 87 bp, Homo sapiens
tgatggcttctaagacaaatgctaaattcttgtcagattacgcagtgttggtaaatcatgcttattgctacagtttacagacaagag

SEQ ID NO: 4545 - DNA, 75 bp, Homo sapiens
ccaggggcagagggaccactctgacagtggatatcaaagtattgcagagtgccttagcagccatccgacatgccc

SEQ ID NO: 4546 - DNA, 80 bp, Homo sapiens
gttgaacttgtaaaatcttggaataattctcttcttatgaagtgtgttatccaggattttcaagcttcggtacttcaagt

SEQ ID NO: 4547 - DNA, 75 bp, Homo sapiens
cagctgccatgccgcattcctccagcgccaagctttgtgtccctggtgatgttggaacattaatgatggaacatg

SEQ ID NO: 4548 - DNA, 100 bp, Homo sapiens
ctcaatgtcagctttatcaactttccttcagcattcgagtttaatgagctattcttgattacaattttggatcacctttatagctgtctttttgggacct

SEQ ID NO: 4549 - DNA, 83 bp, Homo sapiens
ggcggctgggcagctatgtcatcaacgggcgcaccaagcagtggtctcggaaagagggtcgtggtcccgcacggatgcgcttg

SEQ ID NO: 4550 - DNA, 108 bp, Homo sapiens
cggcggcgcggtgtaccctgggatagggagcgatctccgagcgaggcggcaagatggacgcgggatttttccgcatgaagactcttaagatgacagaaggtgattttt

SEQ ID NO: 4551 - DNA, 49 bp, Homo sapiens
ccgaggtgttgcggacgctggccggggctaaactgcacggtcaagaata

SEQ ID NO: 4552 - DNA, 82 bp, Homo sapiens
acaagatggccgggctgccccgcaggatcatcaaggattttttatcaagcagaaatgcatcgaacaacgagaatcaagatca

SEQ ID NO: 4553 - DNA, 89 bp, Homo sapiens
tccactctgcgagaatgggctgtcatctggcgaaagctctacgtggtggttgctgtatatggaactttatctgatttgctttctgtggc

SEQ ID NO: 4554 - DNA, 88 bp, Homo sapiens
attgcctgcggaaagatcgtgtcgcacacgcacctcggagtgttttgggatttgagattgacgcggtgaactctgtccagttttcaaa

SEQ ID NO: 4555 - DNA, 75 bp, Homo sapiens
agaaaatacaaatcacacgcataatggatgaaaggaaccgacagaactcttcatcttggcttatacctatactgc

SEQ ID NO: 4556 - DNA, 98 bp, Homo sapiens
taatgaaaagagacatgaagaattggtatttcaaatgaccaccatgttgcaaaagattctactgaagaaaggtagccatggaagagaatatggaagag

SEQ ID NO: 4557 - DNA, 75 bp, Homo sapiens
cctgatagtaagaaggtggaggaagacttaaagattcgggcaagtccaccactactggccatctgatctataaat

SEQ ID NO: 4558 - DNA, 121 bp, Homo sapiens
aactgactgataaaactggaaatgttgctcgggctgttaactggcaggaaagatttcagcatctgaatgagtacgcagattttctgaggcattcttttgttttgagcatccaagagaagct

SEQ ID NO: 4559 - DNA, 83 bp, Homo sapiens
caagggaccaaggtggaaatcaaacgcatatatggtgctggttgtctcattacggaaggatgtcgtggagagggaggcattct

SEQ ID NO: 4560 - DNA, 76 bp, Homo sapiens
tcgtgctctggtcctactatgcctacgtctttgaactctgcctgggtgtcatcaatcttacagaagaagtgctgtg

SEQ ID NO: 4561 - DNA, 82 bp, Homo sapiens
cctcatcgccctggccgacaagcacgcaagtgcccgtggttgacacgagctgtgtccccagctgttcccgtctacaatggca

SEQ ID NO: 4562 - DNA, 75 bp, Homo sapiens
tggcattgacctctcagatcccaaacaactggcagaatttgctaggagactataaatattcaggaagagatagtt

SEQ ID NO: 4563 - DNA, 50 bp, Homo sapiens
cagtcgacactctcgcgcccggagaatttgaatatggaggctacaggaac

SEQ ID NO: 4564 - DNA, 50 bp, Homo sapiens
aggccttgactacggaggggttgccagcttcgtagatcagaagtcggttg

SEQ ID NO: 4565 - DNA, 100 bp, Homo sapiens
gaagaagcctgttgccttcagtgactacattcaccctgtgtgtctgcccgacagggagacggcagccaggtccattcaactgcaattgaatattggagtt

SEQ ID NO: 4566 - DNA, 75 bp, Homo sapiens
ccagcaggccgggatggcctccatccttgccaccgcagtgatcaacaaaggccggggtcagaaagaaaaaagagg

SEQ ID NO: 4567 - DNA, 82 bp, Homo sapiens
tgcccggccaagaggcaaaggggaggttacgcagcaaaccatccagaaggctgaaggggatgctaagggagataaagcaaag

SEQ ID NO: 4568 - DNA, 75 bp, Homo sapiens
ctcatcatgaccttccagaattacgggcaagcgctgttcaaacccatgaaggtacctgctcttccgagacttctg

SEQ ID NO: 4569 - DNA, 96 bp, Homo sapiens
aagtcccctttgtgttcacataatgctgtcaggaactgtgaccaaggatgtgatggtggcaggtgggatggagagcatgtccaatgttccatatgt

SEQ ID NO: 4570 - DNA, 75 bp, Homo sapiens
ctcctctccgcgcgttcttgggagctcctgaaggaagcactaaacatggaaaggaacaaccggtaccagccactg

SEQ ID NO: 4571 - DNA, 98 bp, Homo sapiens
gcggagtcccaatgaaacgggcagccatggccctccacagcccgcagaaatgagccgtcagactgctacagcattacctaccggtacctcgaagtgtc

SEQ ID NO: 4572 - DNA, 95 bp, Homo sapiens
accaacctctcctctggatgctctaggtcccgaagatggcatattcataaagacatcttctgatgattgtgaacatctttacctctgggtgccag

SEQ ID NO: 4573 - DNA, 100 bp, Homo sapiens
caacaagatataaataaagatgtgggtgtgaagcaaatggttatgagccttagagtttctgaactccaagtactgttgggctacgccgggagaaacaagc

SEQ ID NO: 4574 - DNA, 96 bp, Homo sapiens
cttacttgaagcatgtctttcagagcccggcaccacccatcttgagtatctggtgtcatggagaaactccagctgggcccagagattctgcagcgg

SEQ ID NO: 4575 - DNA, 116 bp, Homo sapiens
gttccctcagcctccggccttgtgtgtccgactcggcagcagtgaggacagttatgggatggatgggaaggttaatcagccccgtctcactgcagacatcaactggcaaggcctag

SEQ ID NO: 4576 - DNA, 80 bp, Homo sapiens
cgagggaagtcgtgcacgaacaccaagcggcgtcttcgacatcttcggaacattgctgcccggaacattgttaatagaaa

SEQ ID NO: 4577 - DNA, 82 bp, Homo sapiens
ccaagtatgcgcccagcggattctacattgcctccggaggtgtcgtgaaaactacccctaaaagccaaaatgggaaaggaaa

SEQ ID NO: 4578 - DNA, 100 bp, Homo sapiens
tgggaggctccgttgcctgctcccggagggagacgcgctgccgaggagaacccagcgggatcagttacagttgtggattcgaggcaacgtgagtgcctgt

SEQ ID NO: 4579 - DNA, 98 bp, Homo sapiens
tgacacacaaacaacttacagacttccacaagcaagtcactaggaaattgggatggcggttcttgttaagctcccctatgccgcccagcaggaaacca

SEQ ID NO: 4580 - DNA, 50 bp, Homo sapiens
ccaagcagccttagccctagtgtagagatgaagactggcccatttgcaga

SEQ ID NO: 4581 - DNA, 83 bp, Homo sapiens
ctcgtcgacatgagtgatgtggaggaaaacaacttcgagggcagagtagccaatctgaattctaaggacctctcatatacctt

SEQ ID NO: 4582 - DNA, 100 bp, Homo sapiens
ctgttctcgggctgtttggcgggtcagaagacatgtcttcatctacatggcatctttccttacctctatgtgccatacgatggttatggacagcagccag

SEQ ID NO: 4583 - DNA, 75 bp, Homo sapiens
gccggccaccgccgagacccagcacatcgccgaccagaagcagcgatcggagatggatgtctctctttgcccagc

SEQ ID NO: 4584 - DNA, 75 bp, Homo sapiens
caggagcggccgggtggcgggaggaaccgttacgggaactgaagttgcggggccatcgatgacaagtacagccgg

SEQ ID NO: 4585 - DNA, 100 bp, Homo sapiens
ctcaggtgatactgtcatttgggataatgaaacacctatttgtgacaggcacacgtgtttcacgttgacaggtttgcttgggacgctagtaaccatgggc

SEQ ID NO: 4586 - DNA, 100 bp, Homo sapiens
agcccttcctcaactcagcgatgacatccctttccgagtcaactggcccggcaccgagttctctctggaattttcaacgtccggttcatctaatacagac

SEQ ID NO: 4587 - DNA, 99 bp, Homo sapiens
aaaagtaaacagctgaaggatgaaggagccagtttggctgaaaataaaaggttttgctgttactgctcagtgtagtcacaccttgaataagaaatggaa

SEQ ID NO: 4588 - DNA, 50 bp, Homo sapiens
gcgttatggatcatgtaaaaagggcggggtcttcacacctggagcagctt

SEQ ID NO: 4589 - DNA, 82 bp, Homo sapiens
ggagggtgccgcggccctgcgcagctgccccatgtgccagaaggagttcgcccccagtgcctccggagccagcgtggtggcc

SEQ ID NO: 4590 - DNA, 75 bp, Homo sapiens
gttcattgttcggtcgaggacattattttcacatgatgatgatgatgattttgatgatgaggaagctgaagaaaa

SEQ ID NO: 4591 - DNA, 100 bp, Homo sapiens
attatttcacggctcttcactgaggtgctggatcacaatgaatgtctaattatcacaggagacgagtttcctaagggcacgagtccagcaaattcaggtt

SEQ ID NO: 4592 - DNA, 85 bp, Homo sapiens
acttcacctcggcaacaattacttacctggcccaggaggatgggcccgttgtgttattagaggaagtaacacaaggggatatgag

SEQ ID NO: 4593 - DNA, 101 bp, Homo sapiens
gtccgagggccaccaggccgccgggggcctgctgcgcccgggaacctagaaagattgtacaatgaatggtgattctcgtgctgcggtggtgacctcaccac

SEQ ID NO: 4594 - DNA, 100 bp, Homo sapiens
cccacttggcaccagtggtcagcagcactgtttcctatgatcctaggaaacccactgtgaagactgtccgcaggcttgtccaaaaggaaacatcggaatg

SEQ ID NO: 4595 - DNA, 75 bp, Homo sapiens
ctggagcctcagttggaagcagccgatccagcctgcggagcctgtggggcaggtgacaaacagcatgtttggtgc

SEQ ID NO: 4596 - DNA, 100 bp, Homo sapiens
gcctggtgtcagtcatgactgtgaacaatgagattggagtgaagcagcctattgcagaaataggcgtttagagaaaatggcagacgatattgatattgaa

SEQ ID NO: 4597 - DNA, 90 bp, Homo sapiens
atctactcccagaggaattccagactcttactactttgaccgcgatgatgtggctttgaagaactttgccaaatactttcttcaccaatc

SEQ ID NO: 4598 - DNA, 90 bp, Homo sapiens
tcctaagaatcgttcaattggagcagcagctaaaagccaggtccttatgtcgtcagaagatcgagaagctcaggaggatgaattgctggc

SEQ ID NO: 4599 - DNA, 52 bp, Homo sapiens
gctctgatgtgtccctcacagcttgtaaagtgtgagacagcttccttgtgtg

SEQ ID NO: 4600 - DNA, 83 bp, Homo sapiens
ggcctacgcagagctcatcgtccttgatgaggacggggacttggttgccttttccagtgacgaggaattgacaatggccatgt

SEQ ID NO: 4601 - DNA, 98 bp, Homo sapiens
cgccatggcctctgtctccgagctcgcctgcatctactcggccctcattctgcacgacgatgaggtgacagtcacgggggccgaaggccagagaccag

SEQ ID NO: 4602 - DNA, 82 bp, Homo sapiens
tggggcccgacaagaacttcacgcgggagcaggtgaccctggcaaagatgagagtgcacatttcgtcctgcctgaaggtcca

SEQ ID NO: 4603 - DNA, 100 bp, Homo sapiens
ctccccccattggacaagtggaaggagcactacggcgggactgccaccttctacctctctcaagcagccgatggagccaaggtgctgtgcttgtgaggca

SEQ ID NO: 4604 - DNA, 100 bp, Homo sapiens
gtagtgcccgccccacccgcatgctctttgtcactccccggcggcagcacgaaagtaccatgcggcttcaatgatccatcctaaagaggtgccccctgag

SEQ ID NO: 4605 - DNA, 74 bp, Homo sapiens
gggagcctgcaagagaggatttcaggtgtatgcaacagcgttattgcaacaggctaacgaaaacagacaaaatt

SEQ ID NO: 4606 - DNA, 113 bp, Homo sapiens
aggaaacacctctacctcctgcgaggcctcccgggctccgggaaaactacactggccaggtcaaaatgcagatcttcgtgaaaacccttaccggcaagaccatcacccttgag

SEQ ID NO: 4607 - DNA, 82 bp, Homo sapiens
gctcaccatctacggcatccggtggggatatgagactttctactcggaatatcctgagtgttgcgtggatgtaaaacccatt

SEQ ID NO: 4608 - DNA, 75 bp, Homo sapiens
ggggtcctcatggatctgtccaaaagggcagctgcaatgactctccgcacggtattattgtcattgcaagcacta

SEQ ID NO: 4609 - DNA, 101 bp, Homo sapiens
ggcttacacccgaggtccctctttggggtggctctttgctaagtgctgctgttgcttcccgtgtagaggtactccaaagattcaggtttactcacgtcatc

SEQ ID NO: 4610 - DNA, 100 bp, Homo sapiens
ataccattgatgaaggaaatgctaaagcgattccaagtgcccttggtttctagaatatgcccaaatgatgtctgtcgcatctggaaaagtggtgccaaac

SEQ ID NO: 4611 - DNA, 107 bp, Homo sapiens
agaggtgtaaagcaccacagtggaggtgaaaaacctttccaagctcaaaaacaaggatgtcacatgtacttcagtttgaggataaaagcagaaaagtgaaagatgca

SEQ ID NO: 4612 - DNA, 75 bp, Homo sapiens
aagccggctgttaccctgcacagccgtcaccctcaactttcccttcaggcgccatgtcagaaccggctggggatg

SEQ ID NO: 4613 - DNA, 100 bp, Homo sapiens
acgaccctgccaccaactcctgggcatacgtggccccactcaagagggaggtaactaggatttctacctcaaccgcgagacctatgcaaggacggtgtgg

SEQ ID NO: 4614 - DNA, 100 bp, Homo sapiens
cccggagtggggtgtcggcgcctcattcgggtggagctgagccggagacagctgagctgactgctgcccactttggaggaggcggtgggctccttcacaa

SEQ ID NO: 4615 - DNA, 101 bp, Homo sapiens
tatgtgtgttgtcagaatgctcttaatgaggtggcacaagatctctgtaaagtagcaggcatagcaaaagttctggtggctcagcatgatgtgtacaaagg

SEQ ID NO: 4616 - DNA, 100 bp, Homo sapiens
cggaaatgcagcctttgccaccagcctggacacacccgtcccttttgtcctcagaacagatgagctcagggcagatcgggagcggtgccgagaaaaattt

SEQ ID NO: 4617 - DNA, 49 bp, Homo sapiens
tatagatggagagacctataaaggacatggaggagtgaatcagcttggg

SEQ ID NO: 4618 - DNA, 100 bp, Homo sapiens
cgcagcatgagcgaaagctacacgctggagagacggtctcgccacattgcccagactggtctgaaagtcttgggctcaagagatcctcccgcttccgcct

SEQ ID NO: 4619 - DNA, 82 bp, Homo sapiens
tcagcttctctcattttctttccctgcaccaactagcaggttgtttcccagggggagtgcattgggtttcagttgggaaaca

SEQ ID NO: 4620 - DNA, 88 bp, Homo sapiens
gagcggacgtcggcttctccccgcgggagcccccagcatggcttggattccttagcaccaccacagctcagccagaacagaaggcctc

SEQ ID NO: 4621 - DNA, 98 bp, Homo sapiens
gccaccagtacgtcattcacaacaacaagtgcatccctgagtgtccctccgggtacacgatgaattccagcaaacttggagctgatgtctgtgctgtc

SEQ ID NO: 4622 - DNA, 98 bp, Homo sapiens
ttatcttcttttatgaatggagcgtcaaactaaactggacagacgccatggagttggtgctggtcttcctctgcagcctgctggcccccatggtcctg

SEQ ID NO: 4623 - DNA, 74 bp, Homo sapiens
gtaggatggtgaagacctacgagaaacgcttcgttaagggactcaggcagtacgggaagaacttcttcagaatt

SEQ ID NO: 4624 - DNA, 100 bp, Homo sapiens
cccgtctgagaagtgaggagcccctccgcccggcagctgccccgtctgagaagttttgacacaagggcgcatatcttcaaagcacctagtacctcctacc

SEQ ID NO: 4625 - DNA, 98 bp, Homo sapiens
ttggaagtccgagatcaaggagctgcatctgatttaaggaccatagtacagctatggatactgaaccaaacccgggaacatcttctgtgtcaacaaca

SEQ ID NO: 4626 - DNA, 83 bp, Homo sapiens
gaggacggcgtgatcacggccagcgaggacagggtttccaggcctgaggtgcccgccctggccccaggagaatgaaccagccg

SEQ ID NO: 4627 - DNA, 100 bp, Homo sapiens
ttttattaaaagttaaaactgaaattgaagaagagctaaaatctctggacaaagaaatttctgaagcccgaccattttgttcaggaccctgcagtgctga

SEQ ID NO: 4628 - DNA, 100 bp, Homo sapiens
ggccgggcactatgcttggtgtaatggtgaatgagacagaagtggtatttgtcctcgtagtgcataaaggtgagccagccatgagagggtatcttgtggc

SEQ ID NO: 4629 - DNA, 100 bp, Homo sapiens
tggcgctagtctgaccctccgccaggcaaaaggaaggtggcttttcctcggggcaaccgaggaaggccccaagaggacaatggattctggaactcgccca

SEQ ID NO: 4630 - DNA, 75 bp, Homo sapiens
cacaaatgcaaatacttgtgcactgggagaggttttctgtctcaactggtctctgacaagcctctgactgaatgt

SEQ ID NO: 4631 - DNA, 80 bp, Homo sapiens
atcgtgggcgccggctcccagtttgggcgtccgagctgggccacagcctgaacgagaacgtcctcaagcctgcgcaggag

SEQ ID NO: 4632 - DNA, 90 bp, Homo sapiens
cgctcctgtggggatgaaggccgagggcttcgtggatgccctgcaccgggtccggcagagcctgtcatagggaactgcatggatagaagt

SEQ ID NO: 4633 - DNA, 100 bp, Homo sapiens
gatgtgtggcgactgtgtggagaaggaatatcccaaccgggcatcccgggcccaaatcctagacaaagccacagaatatatccagtatatgcgaaggaaa

SEQ ID NO: 4634 - DNA, 100 bp, Homo sapiens
gaagccttttccgttgccggtgccggcctagcgtcctggaattacttcaatcaagaaagagtaggaaactttttggcagacttttacctggtgaatggac

SEQ ID NO: 4635 - DNA, 100 bp, Homo sapiens
ccgcttctatgtcctgtacacaatcttcatgaaagctttctgaaacaaaggtcttcactgcctcatctgctccagcagagaatcacatcttacctgggca

SEQ ID NO: 4636 - DNA, 90 bp, Homo sapiens
ctgaaggacttactgaaagatatgaatcagagttcattggccaaggagtgccccctttcacaggtggttaccctaacagctaatgataag

SEQ ID NO: 4637 - DNA, 98 bp, Homo sapiens
acaacagtgatgaggaaagctgtgaaagttctcaaggattttttatcaagcagaaatgcatcgaacaacgagaatcaagatcactgagctaaatcccc

SEQ ID NO: 4638 - DNA, 75 bp, Homo sapiens
gccgcttttgagaggacaagcccagattccaaaacttatgtcaacagtgtttggccagcgcttggatgagactgt

SEQ ID NO: 4639 - DNA, 83 bp, Homo sapiens
cctcacagtctacgtcaggctcaagcaagcttccgggatggttcgggatgagtatcggcaggactacgatgctgggagaggag

SEQ ID NO: 4640 - DNA, 100 bp, Homo sapiens
ctgctcactatggaaatatcaatgtagccacgttgctgttaaaccgagcggctgctgtggatttcaccgcaagggctggtgtttggaatgctttatcctg

SEQ ID NO: 4641 - DNA, 75 bp, Homo sapiens
accatataaaggctggaagctttatttctctgaagaaaacggtccggatgtaccccttccagattcacagcatcg

SEQ ID NO: 4642 - DNA, 90 bp, Homo sapiens
ctttccgccctaatggaggtctccagtttcgacttatgaaaatatgcatcagtttaatactgtcttggaattcatgagatggaagcatag

SEQ ID NO: 4643 - DNA, 75 bp, Homo sapiens
agtcggcccaggcgccgcggcgaggagcgagcgctgcgaggtggcggcctgaggatgttgagaaagagaaggaaa

SEQ ID NO: 4644 - DNA, 75 bp, Homo sapiens
ctttactttgcctcatttgaggagtgggaacaggcttcggcgaacacaaaggaatgccatatggcagccgagaga

SEQ ID NO: 4645 - DNA, 100 bp, Homo sapiens
gaggagtcattcttctccatcacagattcctaaaaagattctcaggaaggtgtcttgctgcaggtaactaatgaagaagtggtcaaccacagagtcttca

SEQ ID NO: 4646 - DNA, 96 bp, Homo sapiens
aggaaggaagcctggttcagcccagttcacacataccctcttcttgccaccaggggcggcgaagaggacccgcaggctgcaaggagcaacagcgat

SEQ ID NO: 4647 - DNA, 100 bp, Homo sapiens
aaaaggccgaacatggagatcaagattatatctggttggatggcaagcatgtggtgtttggcaaagtgaaagaaggcatgaatattgtggaggccatgga

SEQ ID NO: 4648 - DNA, 100 bp, Homo sapiens
agaagactgcgggcgcgcgcaagcggcggcgtggaagctgtgagcgcccccatcccggaggtctccgccggctcccggatcacagattctgctggccata

SEQ ID NO: 4649 - DNA, 127 bp, Homo sapiens
ggacactttgttattggagaaacatgcagattatatcgcatcctatggctcaaagaaagatgattatggccgttgctccagggagaactgcaaatatcttcatccacccccacatttaaaaacgcag

SEQ ID NO: 4650 - DNA, 124 bp, Homo sapiens
ccaccctcaaccgcggcccctgtaggccaaggcgccaggcaggacgacagcagcagcagcacgtctccttcaggacatgaacagagaagtggtgaagactgactctgctgccacaaggattcct

SEQ ID NO: 4651 - DNA, 100 bp, Homo sapiens
ccggagtcggggacccaggagtttcctgtgtccagcgctgccggagccgcctgagcaattctgtggtgttcttggtcacacatttatggagtttctgaag

SEQ ID NO: 4652 - DNA, 100 bp, Homo sapiens
ccactggctgctggagcttgtcaccaccagcctggagatttgaaaaagagaattgaatctctgatagacagagactatatggagagagacaaagacaatc

SEQ ID NO: 4653 - DNA, 75 bp, Homo sapiens
cctcagataccagcaactcccccatcgtatgaatctgtgcggcggcagcacatggagcgttgtaccagcttcctg

SEQ ID NO: 4654 - DNA, 82 bp, Homo sapiens
gctgtgcagccgcgaggaggcgcgggaggtgttcgagaacgaccccgagacggaccccaatgaggatgagccaaacatccga

SEQ ID NO: 4655 - DNA, 50 bp, Homo sapiens
ctccatcaccactgacatcatcggaaagagccagacttctcagaggtcag

SEQ ID NO: 4656 - DNA, 100 bp, Homo sapiens
tcctcatcatctactccttcgtcttctggatcagtgtgcgtgtgaccaccatggatgcagagctggagtttgccatccagcccaacaccaccgggaagca

SEQ ID NO: 4657 - DNA, 100 bp, Homo sapiens
ggaatgttccctgacaatttcgttaagggtgtgaacaaagactcctatctgatcctggagacgctgcccacagagtatgactcgcgggtgaaggccatgg

SEQ ID NO: 4658 - DNA, 95 bp, Homo sapiens
cgagtcaacaaccgcttcgagctggtacagcgtggagaatgccttcttcgatgagaaggaagacacctgtgctgccgtgggggagatctctgtga

SEQ ID NO: 4659 - DNA, 73 bp, Homo sapiens
aacaaggttccggctgaggaccttacattgacattcagcttgtattgaaaatagatgacatatttgaatctaa

SEQ ID NO: 4660 - DNA, 82 bp, Homo sapiens
cctggagcccccatgatccctaagaagacagcttgaacctaggtgaaagaaaatggcccgaaccaagcagactgctcgtaag

SEQ ID NO: 4661 - DNA, 100 bp, Homo sapiens
cctgtgatccctcaagactggtccacggagtgtatgaccacaaacagccatcaagggggacttgatctcatcttcatgccaggccttgggtttgacaaac

SEQ ID NO: 4662 - DNA, 99 bp, Homo sapiens
ctgactctctgaggctcattttgcagttgttgaaattgtccccgcagttttcaatcatggacacattcagctaacgtattttagcaggtggagtgaggt

SEQ ID NO: 4663 - DNA, 83 bp, Homo sapiens
cgcggatctcaccgccgctcaggattctgaaggaagatttccattaggtaatttgtttaatcagtgcaagcgaaattaaggga

SEQ ID NO: 4664 - DNA, 101 bp, Homo sapiens
tgcgcgtgggcattgccgacggccacaggatgctcgccatctatgatggctttgacggcttcgccaagggccagcatccccagtttcccgcgggcctggag

SEQ ID NO: 4665 - DNA, 101 bp, Homo sapiens
ttctgttggttttatgcatctttatccaatcaagtgcccttggacaaagcctgaaaccaggaatactctgaagatagtaactccgagccaaatgtggattt

SEQ ID NO: 4666 - DNA, 97 bp, Homo sapiens
atctgtacatcaaaaggatggattaaacgatgatgattttgaaccttacttgagtccacaggtcaaaatgcagatcttcgtgaaaacccttaccggc

SEQ ID NO: 4667 - DNA, 103 bp, Homo sapiens
acgcaatcaagcccaatctcatgcagacactggagatggtggatgcttccaaaagcatcgaagctgtccatgaggacatccgcgtgctctctgaggacgccat

SEQ ID NO: 4668 - DNA, 74 bp, Homo sapiens
aagtgatttgtcggatgaagataagacactttctcagttacagagagactctcagcgttctcatctctcttcct

SEQ ID NO: 4669 - DNA, 100 bp, Homo sapiens
cgagctgagctgggagcactccattctgcctgggtgacaatgccttggtttcaacactatcggaatgctccaaatgagaagatgaagcaagtgttaaaga

SEQ ID NO: 4670 - DNA, 75 bp, Homo sapiens
aaccgagcgctcagagctgctccggccgcggccctgggagctggaggaaccgcgctagagaccgttggatggcag

SEQ ID NO: 4671 - DNA, 88 bp, Homo sapiens
caagatggcggcggagctggtggaggccaaaacacgatgaggcgagtggtacgacagagcaagtttcggcatgtatttgggcaagcgg

SEQ ID NO: 4672 - DNA, 90 bp, Homo sapiens
gaaacagctctactccaacaaccctggggtgccccgcaccgtcctctggctgaccatcgagctagccattgtgggctccgacatgcagga

SEQ ID NO: 4673 - DNA, 100 bp, Homo sapiens
gaggactggatgacatcaaggacttgaaggtcaaaatgcagatcttcgtgaaaacccttaccggcaagaccatcacccttgaggtggagcccagtgacac

SEQ ID NO: 4674 - DNA, 76 bp, Homo sapiens
gttacctatgtacctgttaccactttcaaaacaaggacacccaggcccattattttcctccagcctccatggacca

SEQ ID NO: 4675 - DNA, 97 bp, Homo sapiens
gcgtgtggcctctgggcaccttttgaaggttgcccccaagtttcctggcagtgtgtgatactgaggaggtgagcttgtttctggagctgtgctttaa

SEQ ID NO: 4676 - DNA, 75 bp, Homo sapiens
tgggattcagaggagtatgcatcagtcttgcagctgctgaggtatacactgaatatcctcgaagaaattggtggt

SEQ ID NO: 4677 - DNA, 85 bp, Homo sapiens
ttgacatttaattttagggtcctttatatagaagggagagtagcaatgactcagatgcatataaagatcaaatatcagtactgcc

SEQ ID NO: 4678 - DNA, 100 bp, Homo sapiens
ttggggatggagtgcctccaaaggttgctgagagtttagtgtccacacctagactggaattgaaagacaccagcagaagtgatgaaagtccaaaaccagg

SEQ ID NO: 4679 - DNA, 100 bp, Homo sapiens
tttgctgagctggttggccctgtgatccctcaagactggtccacggagtgtatgaccacaaacagccatcaagattcttggatctcccagtcagcttcat

SEQ ID NO: 4680 - DNA, 100 bp, Homo sapiens
cctggacttgggcattgggcagatcatcaccatcaggatagaatttttgcggcatttgaagagctttttccagattatgtttaaaattgaaaccaagcca

SEQ ID NO: 4681 - DNA, 99 bp, Homo sapiens
cgttgctggaccctgcccaaaggacactgtacagggatgtgatgctggagaactgcaggaacctggcctcactagatcagtcgcatcgaatacattcat

SEQ ID NO: 4682 - DNA, 90 bp, Homo sapiens
atcgagacatgcaaaattatggttgacatgctagatgatggcaagatattctgccgacggacagcttgtgattgccagaatccaagtgct

SEQ ID NO: 4683 - DNA, 83 bp, Homo sapiens
gacagcggcccggaggacctgcctctcgtcagatcttcgtgaagactctgactggtaagaccatcaccctcgaggttgagccc

SEQ ID NO: 4684 - DNA, 117 bp, Homo sapiens
ctgctgctgaggaggccaccgaagctcggggacgcgaggagccggcgtggccctgggtgagaagccctaccactgcaactgggacggctgcggctggaagtttgcgcgctcagacga

SEQ ID NO: 4685 - DNA, 82 bp, Homo sapiens
tctccagcgccggcctcctcagtgcgaagaagctgcagccgcacctggccaaggtaaaatgtttattggaggcttgagctgg

SEQ ID NO: 4686 - DNA, 83 bp, Homo sapiens
catcaaagaccaggttcaagggtctctccagaaaatcttgtggacaaatccaggggaagtaaatggggagcaggagaaccgag

SEQ ID NO: 4687 - DNA, 88 bp, Homo sapiens
ggagagccaggattcatgctctacatccccatagagggaagaaggagaaagggccaacccctgaagaagcaatacagaaactgaagga

SEQ ID NO: 4688 - DNA, 75 bp, Homo sapiens
gaaagatttatcttttctccactcatataaaatacaatgcagatcttcgtgaagactctgactggtaagaccatc

SEQ ID NO: 4689 - DNA, 90 bp, Homo sapiens
caaaagaattcttcgaaaattgggtatgataagtattatcagcaacataatagttctgggcatcttcattaagtacaaggaacttcggac

SEQ ID NO: 4690 - DNA, 100 bp, Homo sapiens
ttttgatgtggatgatgccaaagttttattagccttatttagtgtctctgacaaaaccggccttgtggaatttgcaagaaacctgaccgctcttggtttg

SEQ ID NO: 4691 - DNA, 100 bp, Homo sapiens
ggaaagacccaggagaagccgcccaaagaactgtactatactggcaattgctggagaagattttgcaattgttgcttctgatactcgattgagtgaaggg

SEQ ID NO: 4692 - DNA, 96 bp, Homo sapiens
cgagcggctgtgtggatgtcggcgaagccgcgggcgaggccacaataagccagctaaggagtgaacttgccaaaggcccccaggaagttgctgtat

SEQ ID NO: 4693 - DNA, 100 bp, Homo sapiens
tctgaatctttgtgtttggctgcccaggctcgcctcgactccaaatggttgaaaacagatatacagggcagcaggatgggtgtggaagcagtgatggcac

SEQ ID NO: 4694 - DNA, 83 bp, Homo sapiens
gcgaccggctccgcagcaagatggcggacgagaaggacagggaaggaattacttgaatttcgtcacagaggaaatgatcaacc

SEQ ID NO: 4695 - DNA, 82 bp, Homo sapiens
gcagcatctggaggaaagcgtgatcccaggaacagccccgtgccccccacaaagaaaggtactccaaagattcaggtttact

SEQ ID NO: 4696 - DNA, 75 bp, Homo sapiens
gactatttccccaaggcccttgcacccctgctgctggcgttcgtgaccaagtctcggcgcggaagatggccggcg

SEQ ID NO: 4697 - DNA, 100 bp, Homo sapiens
cgggagtggcaccatggacctgcccttccagcatttgaagacatgctggagaacccactgaacagcacccagtggatgaatgatccagaaacggggcctg

SEQ ID NO: 4698 - DNA, 100 bp, Homo sapiens
tctggatcccggactcgcgcgggatgccccacgtcatccggatcgcacgcactcctggctttaaagtttatacttgcatttgccatacctgataagccac

SEQ ID NO: 4699 - DNA, 90 bp, Homo sapiens
tgttcctcgaagggactacgcttcaggttcctcagtggtgtgctgaatattgtctttccatccactaccagcacgggggcgtgatatgca

SEQ ID NO: 4700 - DNA, 98 bp, Homo sapiens
gcatggtgctggagtgggaccacattgaaatgaatttccggagctatgacaacattacagatgaacgagaagctgtgcagaagaaaaccttcaccaag

SEQ ID NO: 4701 - DNA, 82 bp, Homo sapiens
gagacccaggaggaagagactaactcaggagaggtacacggtcctcttctcgcacggcaatgccgtggacctgggccagatg

SEQ ID NO: 4702 - DNA, 82 bp, Homo sapiens
ccgcgagcacagagcctcgcctttgccgatccgccgcccgtccacacccgccgccaggtatcatgatattagctggtttgac

SEQ ID NO: 4703 - DNA, 74 bp, Homo sapiens
gagatctccacaaggggtacatcagattgaaactgcttctgccttggctagaggccagaattcatgagggctgt

SEQ ID NO: 4704 - DNA, 50 bp, Homo sapiens
caacgatcggaactcggacacgcgagacggtcatctgttccagccgggcc

SEQ ID NO: 4705 - DNA, 119 bp, Homo sapiens
cttcttttcttcattcatgaaaatgcagatccactgagaaagggaataagatttgtcccatcagatgaaaagaagaaacaaggttgtcaacgagaaaatgaaactctaatacaaagaag

SEQ ID NO: 4706 - DNA, 100 bp, Homo sapiens
gggggtaaaagagatcaccgacaagatcaccacggacgagatgatcaaacgcctgaaggtcctcatgctgataccgccagtggatgccagaatttgcagt

SEQ ID NO: 4707 - DNA, 100 bp, Homo sapiens
tcagaaaacaaggtgtctgcaggaccaacctctcctctggatgctctagggagttaaatacctgtgcatcccagcagcggattcaccatctcaaaacctg

SEQ ID NO: 4708 - DNA, 99 bp, Homo sapiens
agggcgtgttcgtgctgaataagaagaacaaactgacgcagagtaaggccatgttacaggagctgaattttggtgcatatttgggtcttccagctttcc

SEQ ID NO: 4709 - DNA, 111 bp, Homo sapiens
cggatccaacccagttagttacttcctgtctagagttgtagcttccacctgtttttaacgatggcagttccagggaactaatgaacctcactggaacaatccctgtgcctt

SEQ ID NO: 4710 - DNA, 75 bp, Homo sapiens
ctgatcttccagctcccctcacccaacgtcgtgcctccggtgtggctgtctctgatggtgtcatcaaggtgttca

SEQ ID NO: 4711 - DNA, 98 bp, Homo sapiens
gccacgagcaacggccgcatcaagcagctgcgttcagtttgcccagtatgcggagatcgtccacttcaccctcccagatgggactcagaggagcgggc

SEQ ID NO: 4712 - DNA, 100 bp, Homo sapiens
ttatagtattaacaaaagatatacaagaaggagatacattaaatgcaatagcccttcagtactgttgtacgaatgaaggcaggagaccttttaaaattga

SEQ ID NO: 4713 - DNA, 98 bp, Homo sapiens
gaaagttgactgaaaatggggcggaagaaaatacaaatcacacgcataatggatgaaaggaaccgacaggatgataatgaagataattcaaatgatgg

SEQ ID NO: 4714 - DNA, 100 bp, Homo sapiens
acctggaccaggaggaggttttcaggaccaaaattgtggaaaagtcactctggctgtggaaaatctctgttctcacaaagtctccccaatgctctacaag

SEQ ID NO: 4715 - DNA, 75 bp, Homo sapiens
gtggtggaattccagttcatgctgcccacatctcatccaaacagtggtggtgaccgcggtggcttcaaaaatttt

SEQ ID NO: 4716 - DNA, 75 bp, Homo sapiens
tttgaagcaagtaaaggctggacaccaggttaatttggagtggcccctggagtcagtttcctacaccatccgagg

SEQ ID NO: 4717 - DNA, 90 bp, Homo sapiens
agcaattaccttaccgactaatatccagaggagaataatttggaagactgttgtgggtggcgtcatcacctacattggctccagtggctc

SEQ ID NO: 4718 - DNA, 75 bp, Homo sapiens
tttattggagcgcagactgatggcgcaaagggcctgagacctgggaggaagctggagaaaagatgccctctgaat

SEQ ID NO: 4719 - DNA, 100 bp, Homo sapiens
gaagaagtgctgaaaagtgaattaaataataactgaagtgaagtgatggactccgatttggagagtagtaagacgtgaaaggaatacacttgtgtttaag

SEQ ID NO: 4720 - DNA, 100 bp, Homo sapiens
gaagggtgtgcaacaggctgcttctgttcttgtgaaagatgctaaatttattatgactgtggaacagaaacagaggctttggaatcaggatgatgctggc

SEQ ID NO: 4721 - DNA, 82 bp, Homo sapiens
gacgagctgagcttcaaaaggggggacatcctcaagttgaagactgggatagtttccaagctattttggatcatacctacaa

SEQ ID NO: 4722 - DNA, 51 bp, Homo sapiens
tcatcgaggcccaaaccgccaagcatgaagcgtgccagctctctgaatgtc

SEQ ID NO: 4723 - DNA, 75 bp, Homo sapiens
gacagagccaggatttgaaaccaggttcaagcactgtcttcctgttggccctgacaatcatagccagcacctggg

SEQ ID NO: 4724 - DNA, 51 bp, Homo sapiens
ctggagatggatctgctgaccgagccctatgagtttgtctctctggaatgg

SEQ ID NO: 4725 - DNA, 83 bp, Homo sapiens
cggcgcctcattcgggtggagctgagccggagacagcagcctcccgcgacgatgcccctcaacgttagcttcaccaacaggaa

SEQ ID NO: 4726 - DNA, 83 bp, Homo sapiens
caaggaatccatgtttcttccaagaagcaggagacagatcagttggaggaagaaaaagcagagctggagtcggagatcgccga

SEQ ID NO: 4727 - DNA, 75 bp, Homo sapiens
ggcgggcagccgggcacctgcaagtactggatcctcgacctaggaatcttctgcggcttgtccatagtgtgaata

SEQ ID NO: 4728 - DNA, 98 bp, Homo sapiens
cttactttgctgacctgataatgaagaattattttgcaccactggatgttgtttactgacccaacatgagtgaagtttcctgcaagaaacgggacgac

SEQ ID NO: 4729 - DNA, 100 bp, Homo sapiens
cccaaacaacatctcctgctattccttgggctgcctttcctgcagcttcaggatgagttagagaaaggtgaacgggacaatgcagaactgcaggagtttg

SEQ ID NO: 4730 - DNA, 111 bp, Homo sapiens
gaaatttgaagaaaattgaacatgaaacagggaccaagataacaatctcatcagatgtgaagcctgataacatgctgctggataaatctggacatttgaagttagcagatt

SEQ ID NO: 4731 - DNA, 83 bp, Homo sapiens
cgggagtgttcgttgtgccagcgactaaaaagagagatgtggtatggtgtattcctgtgggcactggtgtcttctctcttctt

SEQ ID NO: 4732 - DNA, 100 bp, Homo sapiens
ccaggatcctgagatccggagcagccggggtcggagcgggttctgtcagtgtgtgtggaagaagaaaacataattccttacatcaccaatgttctacaaa

SEQ ID NO: 4733 - DNA, 101 bp, Homo sapiens
cgcaggacagagaccatggtggagaaactgctcaccaactggctgtccatctgcctgtacgccttcctgagggaggagatgttaaagtaacccatcttgca

SEQ ID NO: 4734 - DNA, 100 bp, Homo sapiens
agcaacactcctgaccaagcccctgagcacatcagcaaaagtgaaagcagcagcagtagcaacatctccaccatgttggtgacacacgattacacggcag

SEQ ID NO: 4735 - DNA, 100 bp, Homo sapiens
ccgcgtggctggaagacatggccactccagtcggtgttgagcacggcgagcagtctcaggcctttagtgatgatggtttgcccttgcatctcatttcctc

SEQ ID NO: 4736 - DNA, 90 bp, Homo sapiens
gaggaggagaggatgagaatggcagaaggaggagttactagtgaagattatcgcacgtttttacagagattggtacaagcgcaattttgc

SEQ ID NO: 4737 - DNA, 100 bp, Homo sapiens
ggaatggtgagaccaacatccgtgacacctggactctttcaggttctgaagaaccagcagcacaaacactgttggggcaacagtgaacagccaagccgcc

SEQ ID NO: 4738 - DNA, 74 bp, Homo sapiens
attacagcttcatatgcaccagaaggagatgaaggcctttgcccagtttgatgctgagggtgatgggacagttg

SEQ ID NO: 4739 - DNA, 74 bp, Homo sapiens
aaggcagaaggagggagaccccaaaaagagacaattgcagcatgactttcccagggccctgattttcagcacgg

SEQ ID NO: 4740 - DNA, 89 bp, Homo sapiens
ccagttcaccaccaccgtgcaggtcgtcatcttcataggctcgctgctcggttggaagtactccatgacacacactcggagaaagtccc

SEQ ID NO: 4741 - DNA, 75 bp, Homo sapiens
aagctcaccgacagtgccctgagggccttcgagagctaccgcgccagacaggcaccgaccgtcacgagctaactt

SEQ ID NO: 4742 - DNA, 51 bp, Homo sapiens
acgggtttgccgccagaacacaggtcgtagttcccccgctccctgggaaag

SEQ ID NO: 4743 - DNA, 96 bp, Homo sapiens
caggagagcgccccagggcaagccccgctccggccaacaaacccaacatgagtgaagtttcctgcaagaaacgggacgactatttggaatggccag

SEQ ID NO: 4744 - DNA, 100 bp, Homo sapiens
tggaccctgccaagaagtcgcccatcgcagcagctcgagatagggtctcactctgtcgcccaggctggagtgcggtggcgcgatcacggctcactgcagc

SEQ ID NO: 4745 - DNA, 90 bp, Homo sapiens
gctttcaaagctattttctacagaaggattttgcctaccattttacagtatttgtcttctattttggagcctttttattggaagcagcag

SEQ ID NO: 4746 - DNA, 96 bp, Homo sapiens
ctcaacacggatatcagcatcctgtccttgcaggttgtggaacttttagcaagtgctcttatggacttggtacaaggagtatatcatgaaaattct

SEQ ID NO: 4747 - DNA, 82 bp, Homo sapiens
gtgggagcaaaaccaacgcctggctcggagcagcagcctctgagatcaggatcctcatgaccagccaaagagaagaagaatt

SEQ ID NO: 4748 - DNA, 98 bp, Homo sapiens
aagaaatagagatcggtgtgtagggggagtggcagaagtcaattcatctggaaagactatctctgagtcagacttaaaccactctttttcactaactg

SEQ ID NO: 4749 - DNA, 74 bp, Homo sapiens
cacgcagctggctggcttcagtggaccaaacccagcttagactagaaagtctagaagacacacacataatgaag

SEQ ID NO: 4750 - DNA, 98 bp, Homo sapiens
ctagtccaaagcgaagagttgtctgtgtgatgatagtattggcatttataatactgaactatggacctatgagattttcagctgaactctcatctctc

SEQ ID NO: 4751 - DNA, 75 bp, Homo sapiens
gttcatgacaatgactttgagccctaccttactggacagtcaaatcagagacagggtttctccactttggtgagg

SEQ ID NO: 4752 - DNA, 75 bp, Homo sapiens
gtagaggatcctttccccattattgatgaagaccctagccttgttccagaggcaattcaaggcggaacatttggt

SEQ ID NO: 4753 - DNA, 100 bp, Homo sapiens
gcttctctgaggcggcgagagatggtcaggtctggagctcgaccgggccaggtgtcttctctttagggatggtgaggttggaaaaaggctcctgtaaccc

SEQ ID NO: 4754 - DNA, 90 bp, Homo sapiens
attttatatcttactatgtttctcagcagtgtaggaaggtggagttaaaagaccaaacgaaacctacaccactgatcctggatgagcaag

SEQ ID NO: 4755 - DNA, 74 bp, Homo sapiens
gcggagcgcgcagcgggggctgcaggaaggaagcagccaccctcgccatggcctccccgcccgcctgcccctcg

SEQ ID NO: 4756 - DNA, 75 bp, Homo sapiens
ccaaacttattaataggaataccactattccaaccaagaagagccagggtgtccgcaatgttgccagtgtctgtc

SEQ ID NO: 4757 - DNA, 75 bp, Homo sapiens
ctgtgggctgtgttccacaagttcaaagcaattaccagctctggctgggtcgccacaacttgtttgacgacgaaa

SEQ ID NO: 4758 - DNA, 49 bp, Homo sapiens
ctgacggcgtgaccgacccgagccggctggagcattggatttgctaaag

SEQ ID NO: 4759 - DNA, 125 bp, Homo sapiens
ctgacccgcggaagccagcggacccacttgtgcggcggtcggcgcggggcgcgagatgggagaagaagttgtccatgttcacactgggtgaaggaagctgaaaccacagacatgactgagtcctc

SEQ ID NO: 4760 - DNA, 90 bp, Homo sapiens
gctcttctccctgcttaacgagaaccatagggcagagcggcttgggtaaatccaccttaatcaacaccctcttcaaatccaaaatcagcc

SEQ ID NO: 4761 - DNA, 96 bp, Homo sapiens
gaaatgaaaatggagagttctacctacgagcatgtccatttgtcattgatatctatgcagaaaaatgcaagccaaaaattaaagctgtccatatgg

SEQ ID NO: 4762 - DNA, 75 bp, Homo sapiens
gcgatgatgggacccatgacaaggggctgaaaatatgccggacagtcactcagtggcgtctggcagaaaagctcc

SEQ ID NO: 4763 - DNA, 73 bp, Homo sapiens
agagatcaaacaattgtagatcccttcagttcaaaacataatgtgattgggaaggggatgctgaggaaagcct

SEQ ID NO: 4764 - DNA, 110 bp, Homo sapiens
ggaggatttctggggcaaacactgccggatcaggatcgtagttctcaggcacggaatggacagacccacgaagtcaagcatgcggagtgcagccaagccctggaacccag

SEQ ID NO: 4765 - DNA, 90 bp, Homo sapiens
cctttccagcccgtggtccttctccatattcgagttatgtgtctcggtaccacgtgaaagactcctcacgccacgtcatcctaggcaccc

SEQ ID NO: 4766 - DNA, 80 bp, Homo sapiens
aaaatacatgtcagttatcaagagactcaacagatgcagatgaagatgagccctcgctgtgctaatctggccctcaagca

SEQ ID NO: 4767 - DNA, 100 bp, Homo sapiens
catcactcatgtccataaggagggaaaaattgaggaagcagtgaatgcatttaaagaactagtacgcaaataccctcagagtccacgagcaagatatggg

SEQ ID NO: 4768 - DNA, 100 bp, Homo sapiens
tccaaacaggccctccagaatgagctggagagactgaaagagggttcttttcctatgactccatcaattccagctaatcctcccatggctttcaatcctt

SEQ ID NO: 4769 - DNA, 96 bp, Homo sapiens
tggcggctcagaagataaacgaggggctggaacacctcgccaaagcagagaaatacatcctgaggttagcattacacttctcccagtggagcccat

SEQ ID NO: 4770 - DNA, 82 bp, Homo sapiens
cttcatccagaaactgggggagggatggcagaaacggtggacacaagcgaaatggtcaacggcgctacagaacaaaggacga

SEQ ID NO: 4771 - DNA, 100 bp, Homo sapiens
gacaacctggacaagttgcaggcgcaaaccagtccagctacgggggcccagccagccagcagctgagtgggggttacggaggcggctacggtggccagag

SEQ ID NO: 4772 - DNA, 50 bp, Homo sapiens
ggaacatctggaggctgggaaatggtcttcaaagcttcacctttctccaa

SEQ ID NO: 4773 - DNA, 100 bp, Homo sapiens
cataattggagaaacaccaaaaggaatccgcaggtatggcgtgagtcccgagaacattatcctctatggtcagagcattgggactgtccccacggtagac

SEQ ID NO: 4774 - DNA, 51 bp, Homo sapiens
acttagctctacaatcaacccatgtggtcggatccgcacaagacggcaaag

SEQ ID NO: 4775 - DNA, 82 bp, Homo sapiens
tggaccccgcgagcaccagagtcggcgtaactatcgcctgacagggtgacttaagagattaaaattaatttggttgctgttg

SEQ ID NO: 4776 - DNA, 75 bp, Homo sapiens
attaaacaggcctttcaaggagctgtgcaaaagccagagactgctgctactttgaaacgtacgatagaggccctg

SEQ ID NO: 4777 - DNA, 100 bp, Homo sapiens
caaaaaaaatacagagttaattcaactattggaacttcatcaacagtttgaaacatttattccatattctcagatattggggcaaatattctgaaaaaag

SEQ ID NO: 4778 - DNA, 74 bp, Homo sapiens
cactggggctgcagctcttcgtgaaggacccgaggaatgttacggcatccggagtcatccctcagatttctctg

SEQ ID NO: 4779 - DNA, 75 bp, Homo sapiens
agcggagcagtggtcggagatgtggcgaccgagacctgtcggccatggagcctaatgatagtaccagtaccgctg

SEQ ID NO: 4780 - DNA, 76 bp, Homo sapiens
gaacgaggcaaggagctaaagcagcgtgcgttcagccctgggatcagtgtgcgtgtgaccaccatggatgcagagc

SEQ ID NO: 4781 - DNA, 100 bp, Homo sapiens
aacgctgattaaaagaagcacggaacccagaatgggggcttcgggacacagccctcctggaggacctgggaaaggccagtggcctgctcctggagaggat

SEQ ID NO: 4782 - DNA, 75 bp, Homo sapiens
acagcaggttggacagttcacagatactgcttctaaactaggacccatagaagctatccagaagtcagtccgatt

SEQ ID NO: 4783 - DNA, 50 bp, Homo sapiens
cattggaacatgacatgagattaaggttcagttccggaaggtgtcttaga

SEQ ID NO: 4784 - DNA, 90 bp, Homo sapiens
aattggcaatgcagcagcagctggcaaacagcttcttcccagatacagatatttgtcaggatacgaatcaggttctcttcaagtgctgcc

SEQ ID NO: 4785 - DNA, 100 bp, Homo sapiens
caacattggagttttgccggaggagcccagtttcctccaattgcagcacaagaccttccttttgttctaaaggctggctaccttgaaaaacgcagaaaag

SEQ ID NO: 4786 - DNA, 100 bp, Homo sapiens
ggcatttacagaaagagtcaacagcagtggcaacagaccagatgatgtgcttctgcatcgcactcatgatgagattgtcctcctgcattgcttcctctgg

SEQ ID NO: 4787 - DNA, 100 bp, Homo sapiens
gaagcagccgatccagcctgcggagcctgtggggcaggtaggcgaaaaccaagagtacatcggcctcgttctcctatattggaagaaaaagacatcccgc

SEQ ID NO: 4788 - DNA, 90 bp, Homo sapiens
cagtgaagataatgaatgtcgaatgtgactgactagcagcttcattttgaatgcatgcaagatatgggaaatactaaagcaagactactc

SEQ ID NO: 4789 - DNA, 100 bp, Homo sapiens
gtgtacaaatacccctttgaattaattatggctctttctaatggaatccctatagaaagttggtttatggataaaaatgacaatgaactcctaaaattga

SEQ ID NO: 4790 - DNA, 89 bp, Homo sapiens
ctagtctttccgcttcttgaatttctctctgtaaaggaggtgattgatatgcccgagcacaaccctggcaatttgggaggaacaatgag

SEQ ID NO: 4791 - DNA, 50 bp, Homo sapiens
ctggggccctggtggatcccaaggtaacagttgacaaatgggaacctttg

SEQ ID NO: 4792 - DNA, 98 bp, Homo sapiens
agggacatgtctaacctcggaggccgtaggaacgggcctgtcgaagtgcgcctgacagggcggcgactggcggcgcgatggacctgaccgggctcctg

SEQ ID NO: 4793 - DNA, 90 bp, Homo sapiens
aagaacaagatgatcaagatggctcttcatggaaatgcattgtcagccgcctgtcttggttagatggctctggattaggattctcactgg

SEQ ID NO: 4794 - DNA, 101 bp, Homo sapiens
gcttcccccagcgcttgccgccctgggcgcggccctgctcctgtcttccattgaggcagaaggtttttcttcccccagtccctcagctgctgctgctgctc

SEQ ID NO: 4795 - DNA, 102 bp, Homo sapiens
cacccaatggatccattcctcccattcatgtgcctccaggttatatctcacagctctaagcgaaagacatgaggcctcagcctgaaatgaggttgttttgag

SEQ ID NO: 4796 - DNA, 100 bp, Homo sapiens
ctgggcacacaccggcagccacagctccgaagctggcaagaaggctcctgttctggatgtcagatatgcatctgcctcctgagaaactggtggctttgaa

SEQ ID NO: 4797 - DNA, 101 bp, Homo sapiens
atttttggacctgaaacagaaattctggaacacctatatgatgtcaagccctccaacatcctagtcaactcccgtggggagatcaagctctgtgactttgg

SEQ ID NO: 4798 - DNA, 74 bp, Homo sapiens
gcctctacaggggcctcccgcgccccccgggacccccacgccgccgccagcctgaactctttgcttccggaatc

SEQ ID NO: 4799 - DNA, 100 bp, Homo sapiens
cacaagaaaccattccaaatagtggttctgaaagaacagtaccttggctacaggaaaatgttcttgggagatgctgttgatgtgtttgaaacaaggcgag

SEQ ID NO: 4800 - DNA, 100 bp, Homo sapiens
caggagtcctgaccagagagcagatggcccctgagttctgcagcctcgaggaaggcctgccctatctggacatggtgattgcagagacgctgaggatgta

SEQ ID NO: 4801 - DNA, 85 bp, Homo sapiens
acctgcacgacacatggaaattggactaaattaccagaatgcagggccagtagacaagatttgactctggaggtgacgtctgagc

SEQ ID NO: 4802 - DNA, 100 bp, Homo sapiens
tctggcggtggcggcctggggcggcgcgacggctggtgcgcagaacaactcgatcgtgtcgaagaaggcatgaaccatatcaaccaagacatgaaggagg

SEQ ID NO: 4803 - DNA, 75 bp, Homo sapiens
caagatttgatgctcttgtgctcagtgacatcattcagaggagaaggcagagcccccccaggctatgaatgccct

SEQ ID NO: 4804 - DNA, 87 bp, Homo sapiens
ctttgggtcctgaatcttctgggagctgaggaaccagatatcttgaaaagctgccagaaagggagtgcatccgccccaacccttttc

SEQ ID NO: 4805 - DNA, 82 bp, Homo sapiens
cggccttcacagcctcctcccagctcaaggaagccgtgttagatctccagatcacactaagtttgtgggaagcttcaaaacc

SEQ ID NO: 4806 - DNA, 83 bp, Homo sapiens
caaactggagagagaccagacctgcaagctctttgacacacagcagttcttgtcaggtcacagttacctggagaggctcctga

SEQ ID NO: 4807 - DNA, 82 bp, Homo sapiens
gagctggctgaagccacaaaaacattgctgcatagtcttgggactctggcccaggagctatggattacagccaccaagcaag

SEQ ID NO: 4808 - DNA, 101 bp, Homo sapiens
agctcatgaattcgagcggctctcataaagatctggctggcaagtggattcttgctctgtcacccaggctggagcgtaatggcacaatcttcgctcacttc

SEQ ID NO: 4809 - DNA, 50 bp, Homo sapiens
ggaacgggcaatgaggcagacacagaatcccaaggactgcagcaaagcca

SEQ ID NO: 4810 - DNA, 75 bp, Homo sapiens
ggccctgggacttcttcatcaacctgagtgcggccgactaccccatcagacatatcaagtggatttgaagcccaa

SEQ ID NO: 4811 - DNA, 100 bp, Homo sapiens
gccgtgactacaggacctgtctgacgatagtccaaaaactgaagaagatggtggataagcccacccagtggagtccattgatgattacgtgaacgttccg

SEQ ID NO: 4812 - DNA, 100 bp, Homo sapiens
caaggacaacaatgagatcgtggacaagatcatgggcaaaggacagatccaggtgggatgtgtgtgggctgaaattccgagctgcggttgtgcatgagaa

SEQ ID NO: 4813 - DNA, 83 bp, Homo sapiens
gacgaactgtgaggagagtaaaccaagaagaaatccacagatttagttcttttggtgccctggttgtcagatgttggaaagca

SEQ ID NO: 4814 - DNA, 97 bp, Homo sapiens
aagacactccctgctccggaagcctcagaaatacatgctacaggatttaactatcagaatgaagatgaaaaagtcaccttgtctttccctagtactc

SEQ ID NO: 4815 - DNA, 50 bp, Homo sapiens
gggcggtgccccaggacctagcgcttccaccaacactttcttccaaatat

SEQ ID NO: 4816 - DNA, 89 bp, Homo sapiens
cgaggttgcggcggaagcggagaccatgttccgagcggcggctccggggcagctccggcgggcgcttcgatgtttttgaagcaggcatt

SEQ ID NO: 4817 - DNA, 82 bp, Homo sapiens
ctccgagcgcaaggacagcgcgaggtccgcgcagcccagcgcagccatgtagtgaagcgcgcagtggcgagccagccagact

SEQ ID NO: 4818 - DNA, 75 bp, Homo sapiens
ctggctattggaaggaggagattctgaagataaggagtatcaagtggggcagctgtattctgtggctgaggccag

SEQ ID NO: 4819 - DNA, 100 bp, Homo sapiens
taagaggagtttcacttcatcccttttcattttgaagaattcccgtactgattagtcaacagtggaaaatctgaagagatgcaagcaggaaaaagaaatt

SEQ ID NO: 4820 - DNA, 95 bp, Homo sapiens
ctggttagtgtgctctgagggagggtccgagccagccgctgttttgccggaggagcccctcaggccagaaaaaatgatccctatgctcttgcatc

SEQ ID NO: 4821 - DNA, 100 bp, Homo sapiens
cttacctgcctcttcatgcagttctccatcgtgccagaccgtataatagacgctggccccaaaggaaactactctcgatttatgaatcacagctgccagc

SEQ ID NO: 4822 - DNA, 98 bp, Homo sapiens
caaggagagcaacctcttcaaacgcatcttggtgcagattcactttataggaacagcttcagcttcagtgatgaaaaactgaattctccaacagactc

SEQ ID NO: 4823 - DNA, 95 bp, Homo sapiens
agactgagaatggcctgtttgtaagcgggctacattgagagacctcagctgattcgagcaaaagtgccaattgtgaagttcagggataaagtcag

SEQ ID NO: 4824 - DNA, 105 bp, Homo sapiens
taatgtccaccccgagccgattcaagaaggacaaagagatcatagccgagtatgaaagtcaagtcaaagaacagtccactttggaaagtgaagaatggaatcctt

SEQ ID NO: 4825 - DNA, 74 bp, Homo sapiens
cctacatttggagcctggacacgcagtacagcaaggttcggctcctggctgatcccactggggcctttgggaag

SEQ ID NO: 4826 - DNA, 82 bp, Homo sapiens
aggagcgccctggcggagaagactcgaacggctcccacagccgggcgttgggggaaaggggataaaaacattcagatggcag

SEQ ID NO: 4827 - DNA, 51 bp, Homo sapiens
cagattcgcagtggtcgcttcttctccttgcacctgtggaatcctctcaag

SEQ ID NO: 4828 - DNA, 82 bp, Homo sapiens
gccgccggtcctgaccaccgtgaacggacagtcccccccagtttgtttcgacgccggaccgcgtaagagacgatgatgttgg

SEQ ID NO: 4829 - DNA, 80 bp, Homo sapiens
tgtgtggccatctaccactttgaagcaaaacaagctatcgatcagggaagatctccagttataatagataacactaatat

SEQ ID NO: 4830 - DNA, 99 bp, Homo sapiens
gtaccaagtacaccattacaccagtgaagatgaggaagtctgggggccgagaccacacagatgggttgttgttgtcccagagtcgccaacgcattgtct

SEQ ID NO: 4831 - DNA, 75 bp, Homo sapiens
gaaacatgcagattatatcgcatcctatggctcaaagaaagatgattatgtggtaccatagaaacattaccagaa

SEQ ID NO: 4832 - DNA, 98 bp, Homo sapiens
cgcagcaccgctactcggagggcgagcggacctccctggagaaggttggccttcattccacgatgtgatcaattctgaggcaatcacattcacagatg

SEQ ID NO: 4833 - DNA, 96 bp, Homo sapiens
agcatcgccaacccggactggatcaacaccggggagtctgcgggaccaacttggaggccttgcagaagaagctggaggagctagagcttgatgagc

SEQ ID NO: 4834 - DNA, 83 bp, Homo sapiens
ccgccagatcaacctggagctctacgcctcctacgtttacctgtccatggaccgtataattgatgccggcccaaaaggaaatt

SEQ ID NO: 4835 - DNA, 100 bp, Homo sapiens
ccgcggggcagccgccgctcctccgggaaaatggacccaagtggggtcaaagtgctggaaacagcagaggacatccaggagaggcggcagcaggtcctag

SEQ ID NO: 4836 - DNA, 100 bp, Homo sapiens
tcagcgctgagcgaaagagaggcctcccggctcgacaagttcaagcagctgcttgccggccccaacacggaccttgaacatgcccaatgtccgtgatcat

SEQ ID NO: 4837 - DNA, 100 bp, Homo sapiens
ggttagcggtggcaggggctgactgagagcgtctgcttgcctatatatgcaaacagatttgcagtaccaacctatgcagccaagcaacctcagcagttcc

SEQ ID NO: 4838 - DNA, 138 bp, Homo sapiens
cggcccctgcctgaagtgggtaaatatacaatggtcttccacactagagacaaaggcaatgaggtgaacgcagaacgacccagaaagaagagggcagcacacctcagggccagcaggaggaaggggagtcatccagga

SEQ ID NO: 4839 - DNA, 75 bp, Homo sapiens
atagaggacaacgcagatatagaacatttcttttatcacacttgtaacacttcaagaagcaaaactgctgctaaa

SEQ ID NO: 4840 - DNA, 90 bp, Homo sapiens
gacagacgtatttgcaatccccttatgccataattgtgctggagaatctggtaaaagcaccattgtgaagcagatgaggatcctgcatgt

SEQ ID NO: 4841 - DNA, 83 bp, Homo sapiens
aggttctttacaatgacctgggcgcacaggacagtcattttgtttactcattcagccctgttgcaggtcccaataaactcttc

SEQ ID NO: 4842 - DNA, 90 bp, Homo sapiens
cagcactcccagctgcgcagggcctgccaggtggcgctcgtttgaaggatgacctctaggaagaaagtgttgctgaaggttatcatcctg

SEQ ID NO: 4843 - DNA, 75 bp, Homo sapiens
ctcgcgtttccacttcagagatctgaaatgagccgtcagactgctacagcattacctaccggtacctcgaagtgt

SEQ ID NO: 4844 - DNA, 100 bp, Homo sapiens
ggacaggcgacagcgacctgcggcagggctaggggcaaggtaaagcattgtcgcatcaaccgggacggccggcactttgtgctggggacctccgcctatt

SEQ ID NO: 4845 - DNA, 98 bp, Homo sapiens
aaggagtttttaaaacttacagtccgaaggggtgtctccacctcctggagcagtcctggtgttacattccctgcccctggagttcccactggctatgg

SEQ ID NO: 4846 - DNA, 75 bp, Homo sapiens
ggccgccgccgccgcgagcgctcccgttacagaatgtctgaaggggacagtgtgggagaatccgtccatgggaaa

SEQ ID NO: 4847 - DNA, 102 bp, Homo sapiens
cgccagagaggcccgcccaccagttcgcccgtccccctgccccgttcacaatggagtgcatccgccccaacccttttccccctcgtctcctgtgagaattcc

SEQ ID NO: 4848 - DNA, 95 bp, Homo sapiens
ggcgctgggtcggtggcggaggctgaggagaaggaggagcgggccgtggaggcttcgccgcctagtgcctccggagccagcgtggtggccataga

SEQ ID NO: 4849 - DNA, 75 bp, Homo sapiens
acacggtgaaggtgacgccgagcaccgtgctgcttcaggtttgaacggtgtccccgggagcatctgggactttgt

SEQ ID NO: 4850 - DNA, 73 bp, Homo sapiens
agacacagtgtcagaattacaagatttttgatgaaattgagtcatgaaactgtaaccattgaattgaagaacg

SEQ ID NO: 4851 - DNA, 75 bp, Homo sapiens
cccccttccccacgcaaccccagatccatttacactttacatatttgtttaccagcaacttcagttggtcaagat

SEQ ID NO: 4852 - DNA, 83 bp, Homo sapiens
agaccgagacctacgtggaggcaaacatggggctgaaccccagctcgatgtgaagttcatttccaatccgccctccatggtgg

SEQ ID NO: 4853 - DNA, 100 bp, Homo sapiens
cccagcgtttgcagaatctgtcacagagggagatgtcaggtgggagaaaggtcacagatgtgacattgatgtgtccactgaagccatgtatgctgcaacc

SEQ ID NO: 4854 - DNA, 90 bp, Homo sapiens
ccaatggccacctttcctgtgccatatgatttgcctccagaactgtatggaagtaaagatatgcaaaagttataagggagagggtcggca

SEQ ID NO: 4855 - DNA, 97 bp, Homo sapiens
tcatctggaattttgccgatttcatgactaaccagttgccctgcaggagtcattaaatcaaaacttcatgctgatcatcacccaccgagaagtccag

SEQ ID NO: 4856 - DNA, 95 bp, Homo sapiens
caagatgcagtctcatgggcagtggtttgaggaaattcagttcatgaagataagaagtttcttgacaaatacatgccccagttcatgaaacatct

SEQ ID NO: 4857 - DNA, 90 bp, Homo sapiens
cgacagcgagcgggagaagcggggtcaataatagttatgcacgagtgcgagctgtggtgatgacccgagatgactcaagtggtggatggt

SEQ ID NO: 4858 - DNA, 60 bp, Homo sapiens
tccgggaccggagtcagaaccctccgcagagtaaaggcataatcaccagcaacacccggg

SEQ ID NO: 4859 - DNA, 75 bp, Homo sapiens
gaacaccattcttcgccaggccaggaatgatgaggatgaagaagtatacaagagagatttcagcgctcctaccct

SEQ ID NO: 4860 - DNA, 100 bp, Homo sapiens
ctgcgaaggccgggacccggttccccggcccacagtgggggtgtgcaaacccgagagaactgggctttcatgttactctgtgatcttctgatgattttca

SEQ ID NO: 4861 - DNA, 82 bp, Homo sapiens
caagactctcttcgctctttgcatcttaactgcagtggaagcatcagttcacagcagtaatgcacactgtacagataagaca

SEQ ID NO: 4862 - DNA, 73 bp, Homo sapiens
ggaagatgaggaggtcgctgagagctgggaagaggcggcagacagcggggtgctggagaatctggtaaaagca

SEQ ID NO: 4863 - DNA, 75 bp, Homo sapiens
agatcccagaatatctgatccattttaatggttggaacagaagggaaccatggaagataagatttatgatcggca

SEQ ID NO: 4864 - DNA, 100 bp, Homo sapiens
cgtggctccacgacttactctctacccttggcagtatgaaaacaaagttgcagtacgtgacagagtggcatttgcttgtaaattccttagtgatactcag

SEQ ID NO: 4865 - DNA, 75 bp, Homo sapiens
aaatcatgtgaaatgtgtaaagatgctcttagatttcgatggggtcctctatcatatttcaaatcctaatggaga

SEQ ID NO: 4866 - DNA, 75 bp, Homo sapiens
attacaccatctgaattgcctgcaaacccaggcatcattaagcaagctaatggaaacacttggtcaagcagaacc

SEQ ID NO: 4867 - DNA, 90 bp, Homo sapiens
cgctatggcggcaattcccccagattcctggcagccacccaacgtttacttggagaccagcaaacatgtctgacaaagagctaaagaagc

SEQ ID NO: 4868 - DNA, 74 bp, Homo sapiens
tgatattcatgtgctgggtgggggacgtgtaccctgtctaccagcctgtggttcagcttgttggtttagatgag

SEQ ID NO: 4869 - DNA, 98 bp, Homo sapiens
gaggagcagcatggcatttcagtcactggtttgcagagtccagactataatgtaactgcaaactccaagctggtcattatcacggctggggcacgtca

SEQ ID NO: 4870 - DNA, 75 bp, Homo sapiens
tgcagaccctggtctatgagaactacaacaagttcatctcagccacagacagaccccgtgcggctgacacagctg

SEQ ID NO: 4871 - DNA, 75 bp, Homo sapiens
cccggacttcctctcagaagaggaccgcggaatgtctttggtggacttgggaaagaggttgctagaagcagcaag

SEQ ID NO: 4872 - DNA, 74 bp, Homo sapiens
ctcagatgctcccttctgctcctgatcttcagtgtctattggatttttccaagagaaagtttgtaaaattcctt

SEQ ID NO: 4873 - DNA, 87 bp, Homo sapiens
caaattgaaacaacagcaagctgcagagctgcatgctgtttcccttgaacaacatcttctagatcaaattcgaatagtttttccaaa

SEQ ID NO: 4874 - DNA, 83 bp, Homo sapiens
cgagataaaaccatcaagctatggaataccctgggtgtgtgcaaatacactgtccagcattgatatgaaccatggacaagtat

SEQ ID NO: 4875 - DNA, 100 bp, Homo sapiens
tgatgctgaaaggaataacaaggcttatctctaggatccataaggtcatggaactaaaggagtgtttgagcttctgtccggatggcggagaaccaaagag

SEQ ID NO: 4876 - DNA, 50 bp, Homo sapiens
ccctacgggagaaaaccgggcgcaaggccctggccaacgtcaacattggg

SEQ ID NO: 4877 - DNA, 75 bp, Homo sapiens
ggaaaacttacctattgaagctgtttatcacaggagaagctaaaacttacttatgaggaaaagtgtgaaattgag

SEQ ID NO: 4878 - DNA, 97 bp, Homo sapiens
ttcctggcagcaagctgctctggaggatcaacacccggccccccaactctgcccagctccctgtgctgtcaggaatctacaggacttggctcgtatt

SEQ ID NO: 4879 - DNA, 89 bp, Homo sapiens
agttttctggaagaggcaattccccaatatctcaaagaattactaaaggacttggggaccctactgtgtttggaaacctgcctacagac

SEQ ID NO: 4880 - DNA, 100 bp, Homo sapiens
tcttaggaaacaggagcaccggtctgggaaactgctggcctggcctaacacctggcgctgtggtgcaggcaagatgataatgaagataattcaaatgatg

SEQ ID NO: 4881 - DNA, 75 bp, Homo sapiens
gcccctggctcctgctcctgggtcatacttacctggttgcttgcgcatctagtaatgttggatcatattctggat

SEQ ID NO: 4882 - DNA, 73 bp, Homo sapiens
tgcaagcaggcaacctgaatacaggtgttggagcgggccggagagaagtagagtgggctgcgaggagaaggaa

SEQ ID NO: 4883 - DNA, 101 bp, Homo sapiens
cggcgccgagtcgaacggggagccgagctggagctgccgcggcgcagccagcacgaggtagaactaacattgaacttagagagaaattcatcctaccagag

SEQ ID NO: 4884 - DNA, 73 bp, Homo sapiens
gtctctccacagagccatccagcgagcctctgctgcgagaagttctggagaagcagccagtgctaagccagac

SEQ ID NO: 4885 - DNA, 96 bp, Homo sapiens
tcacacttcagatgctgaagcgagtccctgagctcccgccctcttggaacagagatcatgatgacacggcatctactcgttcaggaggaaccccag

SEQ ID NO: 4886 - DNA, 75 bp, Homo sapiens
tgggcacggccctgctgctctggaacaaggagccttcacgtaaatgggtccagtcatgcctcccagtaagaagcc

SEQ ID NO: 4887 - DNA, 75 bp, Homo sapiens
cactgattagcaatttaaagatcctctccaagggtgcaaaaatgcagagtaataaaacttttaacttggagaagc

SEQ ID NO: 4888 - DNA, 98 bp, Homo sapiens
cgggaagccatagctctgcatggaaaagcttttgacatcacctatgtgcgtctcaagttccacaccagccgcccggagagctttgccatttacaagcg

SEQ ID NO: 4889 - DNA, 82 bp, Homo sapiens
gcagcgccagcggccgagcgggcggcttcctggcctgggcgctccggtggcggcggagcaagagtgagccatggagctacgt

SEQ ID NO: 4890 - DNA, 100 bp, Homo sapiens
cggctcgcggggatcgcccccgagcgctgcgtcctgcgggtgggccccctcagaccgtgccatgggtgacagtgatgacgagtacgatcgaaggcgcagg

SEQ ID NO: 4891 - DNA, 101 bp, Homo sapiens
cacggctctcctagggacagggaaactgagtcatatcaaggtggaaggcagctgaaggacccagatgatgtggtaccagttggccaaagaagagcctggtg

SEQ ID NO: 4892 - DNA, 98 bp, Homo sapiens
ggaaggaacgaggcaaggagctaaagcagcgtgcgttcagccctggggttatggaaacaaaggacatgctttacatcgtcactgaatttgctaaaaat

SEQ ID NO: 4893 - DNA, 75 bp, Homo sapiens
tgctttctcttgctgcagcttgcttcctccctcagaggccccacagtatcaaatatccgcctggctggattagag

SEQ ID NO: 4894 - DNA, 80 bp, Homo sapiens
aacaataaagaccggaagctgagtttttatccaaacttctcctttcagaagaacaaagagtagactatgtccaagtggat

SEQ ID NO: 4895 - DNA, 100 bp, Homo sapiens
cagatgtccaatttgatgaatcaagcgagactcaaagtcctcagagcaagagatgaccttatcacagtgagacgtggtcttgtaacacagtggttaagaa

SEQ ID NO: 4896 - DNA, 85 bp, Homo sapiens
gcaagactatgaatctctgttccaaatgctttgctgagaattcggtcaacagtggatgaaaaagaacaaaaacaacttcttatgg

SEQ ID NO: 4897 - DNA, 74 bp, Homo sapiens
agggagccgcagctgatgtcaggtggacttagtagttttaagcagaaccatgaaaacctctgtgacaactccct

SEQ ID NO: 4898 - DNA, 75 bp, Homo sapiens
aggattgagacccggaaggcttcaaaggctgtcgcaaggaggaagcttctccaaacaggctggtgtacagggagc

SEQ ID NO: 4899 - DNA, 82 bp, Homo sapiens
caagagctccgagcccggtcgtcggggcggtagaacctggaagcgggagagtggtctggcattcctagccgagtgtgacaca

SEQ ID NO: 4900 - DNA, 76 bp, Homo sapiens
agagcgcgccgccctctcgtcccactttccagcgcgttccttcacctcgggcagaataactttgcagaagcccaca

SEQ ID NO: 4901 - DNA, 82 bp, Homo sapiens
acagtgcctctgaccagcatcgtctgtaaaggaatcctgttcacgatgctggtatttggaccagcctgcgggtttatcctgg

SEQ ID NO: 4902 - DNA, 98 bp, Homo sapiens
acggggctgccctcccctgcgcactcccctcgctgcccgggcccggagcgcagcgcggccgcacagatgagaactggactgatgaccaactgcttggt

SEQ ID NO: 4903 - DNA, 100 bp, Homo sapiens
gcccccctgtgctcacgccgggttctttacctccgagccaggccgccgcaaagcagatggacggggagtccgaggaggagcaggagtccgtggacaccgg

SEQ ID NO: 4904 - DNA, 75 bp, Homo sapiens
tgaaagtgcaatatttgagtatcactgcgaggaatggtttgcagtgtatgtggaacttaatcagcaaattgcagc

SEQ ID NO: 4905 - DNA, 100 bp, Homo sapiens
ggtggcgagcgcggccagaactgcggtcacttaagttttccgtgtgcgggttgcaaggagcgtgcgtgcgtctggcgaacagctgcttggagaactacaa

SEQ ID NO: 4906 - DNA, 75 bp, Homo sapiens
ctggtagctcatatccccctcacatgcaggtaaatcttacaaaccattgtggttttatgggaggactacaaaaaa

SEQ ID NO: 4907 - DNA, 100 bp, Homo sapiens
gcggtccgtgcgagaggaccaacggagcgctgaggcgggcgttttcttggatgaattgcttgctttggaggaccatggccaacctggagcgcaccttcat

SEQ ID NO: 4908 - DNA, 85 bp, Homo sapiens
agcagaagggaggctccaagacctcatcaacaattaaggacagtcattttgtttactcattcagccctgttgcaggtcccaataa

SEQ ID NO: 4909 - DNA, 101 bp, Homo sapiens
agcattttttgtagaaaacaggatttcaatatgtacagaattcatggatgcagagagagatcatcattgcctgaatttagctttgtgactgcaagagcaag

SEQ ID NO: 4910 - DNA, 75 bp, Homo sapiens
gtccctgtgacctgtggagacacggccagatctgccctccagagtatgctgctgctgttccgctttgcgtcctcg

SEQ ID NO: 4911 - DNA, 75 bp, Homo sapiens
ctgacagccccggattattctgcctttgaatttgaaggatgacctctaggaagaaagtgttgctgaaggttatca

SEQ ID NO: 4912 - DNA, 83 bp, Homo sapiens
gaacccgcggtggagcgggacacgaacgtgaaagggctattgcaagacacgaagtccgagaaattgagcagcgacatacaatg

SEQ ID NO: 4913 - DNA, 100 bp, Homo sapiens
cacttctttacttggtgcaggaaggcagtctttgctacgtacagcaaaagaaattgggtgtttgtaccagaatggaattttgcttctcggttatcctgtg

SEQ ID NO: 4914 - DNA, 90 bp, Homo sapiens
gttctgcagaaggttgtgactttagtatacatcggatatgttgcggtcactatctaacacaaaacctacagtcaatgaacatgacttgtt

SEQ ID NO: 4915 - DNA, 96 bp, Homo sapiens
cggcgaggatggagggcctggcagtgcggttgctgcgcggcagcaggctgcaaaagctggcaggctgacagaggcggcctcaggacggaccttctg

SEQ ID NO: 4916 - DNA, 75 bp, Homo sapiens
gcgccgctgctcccggaccgggccgcgcacgccgcctcagaggttggaaagaaccatgactgtattcaggaaggc

SEQ ID NO: 4917 - DNA, 82 bp, Homo sapiens
gggcggcgcgccgcagctgcccaggccggaccgggccgggcgcccgcagacaatgcagatcttcgtgaagactctgactggt

SEQ ID NO: 4918 - DNA, 100 bp, Homo sapiens
caaatttaagaattctctggcactctttggcattatcaagagtcaatgtttgtcgggtcacaaatcttcgaagagtgacatatgttgttttagatgaagc

SEQ ID NO: 4919 - DNA, 98 bp, Homo sapiens
cgggccgcgccgcgcctcagctctggttgtggcagcactgcctgaaggtatgagaccagattctaatctttatggttttccatgggaattggtgatat

SEQ ID NO: 4920 - DNA, 101 bp, Homo sapiens
gatcaataaaaactgctggaggatcaagaagggcttcgtgcccaacatgcagggccgttgctccagggagaactgcaaatatcttcatccacccccacatt

SEQ ID NO: 4921 - DNA, 100 bp, Homo sapiens
ggatgaagttgattgactatggtctctccggctaccagatcagtgtgcgtgtgaccaccatggatgcagagctggagtttgccatccagcccaacaccac

SEQ ID NO: 4922 - DNA, 97 bp, Homo sapiens
tctgatagtgaaattgagaccaactctgccacaagcaccatctttacaactcgagagatgatcgctcgttctgctgctaccctcatcacacatccct

SEQ ID NO: 4923 - DNA, 89 bp, Homo sapiens
tgaaacagacttcaaagttatggcaagagatgagttaattctaagcttcctcggttatgtggacatgcttggtgtagcctatgaagccc

SEQ ID NO: 4924 - DNA, 50 bp, Homo sapiens
tcacctggagatcacggagggaaggttactataacaacagtaccaaggtg

SEQ ID NO: 4925 - DNA, 100 bp, Homo sapiens
ttgagctccaggagttcgtctcttacgtctgcggaagtgcagctgcctcagttcttagcgcaggtcagccatgtcatctgagcctcccccaccaccacag

SEQ ID NO: 4926 - DNA, 100 bp, Homo sapiens
ctacttcatggatgtgaaatgcccaggcatctatcctttctctggtgacaaaaataaacaatgtgattgataatctgattgtggctccagggacatttga

SEQ ID NO: 4927 - DNA, 100 bp, Homo sapiens
gcgcgggctgcggggccgaaccccgggcatgagccatgagcccaagtccccttcgctagggatgctttccaccgcgaccaggaccaccgccaccgtcaac

SEQ ID NO: 4928 - DNA, 100 bp, Homo sapiens
caaaggaattgaaaggaaccactcattcacttctagacgacaaaatgcaaaaaaggaggccaaagactttttttctcataagattcaccttgaaactatg

SEQ ID NO: 4929 - DNA, 71 bp, Homo sapiens
caggaggttttccgagacaacaacggcaccgcggtgtacgtgaacggagagtgggtgaccaacatcagcga

SEQ ID NO: 4930 - DNA, 90 bp, Homo sapiens
ctgcataagtggcaggtgctagtggacagcatcacaggcaaggagcaaactttcccagctgcatgaaagccgccaggaggcccacaggag

SEQ ID NO: 4931 - DNA, 100 bp, Homo sapiens
atggcggaccgcttctcccgcttcaacgaagaccgagactttcaggcctgaccgccgctgcctacagagtcacactcaatcctccgggcaccttccttga

SEQ ID NO: 4932 - DNA, 75 bp, Homo sapiens
cagagcccaccctcctgcagcacagggtggaggtgatcgaggagttctacaaccagacatgggtccaccgctatg

SEQ ID NO: 4933 - DNA, 101 bp, Homo sapiens
cgccgccaagagtgagcgagcggacccgcgatggagagagctatccaaaatcacgaatgcctagggctcagagctacccagataatcatcaggaattttca

SEQ ID NO: 4934 - DNA, 98 bp, Homo sapiens
gtcagcagaggggccactgctgggccctgaggctgcaccaagtggcgaaggagccggctccaagtacctcagcaaacccctgctccagctgtggaaga

SEQ ID NO: 4935 - DNA, 99 bp, Homo sapiens
cctcgatgtgctctgcgtgttgctgggaaccatctctttttgctgttgccaaattgttagaaactggtttagttaatatgcaccgaatagaaattctgt

SEQ ID NO: 4936 - DNA, 80 bp, Homo sapiens
ccagacttaagggacctggtcaccacgctcgtgatgcagccaacacgaacggttgtcatgtgtaacacaactttcgatca

SEQ ID NO: 4937 - DNA, 100 bp, Homo sapiens
ctcgagtcctgccgcctcccgggagtgccgtgcgccgcagcccgggcccaggccccggcagcgcctgggacaagaatacctcctctgaaaaatggcagaa

SEQ ID NO: 4938 - DNA, 109 bp, Homo sapiens
atggactaggagaaatatttcctattgagaacatctatagtgctaccaaaattgacgaggccaccctggccctgatgaaaaccccacgctgctccctgccagacctccc

SEQ ID NO: 4939 - DNA, 100 bp, Homo sapiens
tggatgatatttgttcaatatgtcaagctgaatttcagaagccaattcttctcatttgtcagaatgcccagtgtttacatggggacattgcacagtcaca

SEQ ID NO: 4940 - DNA, 75 bp, Homo sapiens
cgaaaaacagttacaaggaattcagattcaggaggctgaaacgagagaccaggaagagagaagggcacagttacc

SEQ ID NO: 4941 - DNA, 75 bp, Homo sapiens
tgggattttgttgaagccacacaaagaacaaattgcagttgtttgagcgcaaatctgtccaaggctgcctgggga

SEQ ID NO: 4942 - DNA, 51 bp, Homo sapiens
ggagaccagcagaactccaccagggcaagcgacttggtaatgaaggtggat

SEQ ID NO: 4943 - DNA, 98 bp, Homo sapiens
gcaagcctggctatgcttcagccttgatgacggccatcttcccccggaaatgcttccagactgcacacttttacttagaggacagtacatcccctaga

SEQ ID NO: 4944 - DNA, 99 bp, Homo sapiens
gttcgtgaaagctttctgcccagagctcctggaccaatgcatcttcccaccaccttaaaccactggcttaaatgataatcccagcccctggatctatcg

SEQ ID NO: 4945 - DNA, 98 bp, Homo sapiens
ttcgggtgtctcgtgtgtgaacatcacagagctgagctcaatgtgcagcaatggatgacgacagcctggatgagcttgtggcccggagcccagggccg

SEQ ID NO: 4946 - DNA, 74 bp, Homo sapiens
ccgccgcgccgcgctccaaccgcctcctcctcctcagtaacgcggcaaatcagccggcaccaggagcagttcat

SEQ ID NO: 4947 - DNA, 87 bp, Homo sapiens
ctgctgcagccgccgcctccgacctgggcgctcagcccccggatcagcctgcctctgggttcaatttcagaagcttcagcaactgcg

SEQ ID NO: 4948 - DNA, 74 bp, Homo sapiens
tcgtgtggtggcctgttttgattctctaaaggaaaaggccaaagttgttgagcccctggactatgagaatgtta

SEQ ID NO: 4949 - DNA, 90 bp, Homo sapiens
ggcctctcaatattgcctggacgattgcttagaggagtatttcctgaactgtgtgggtaaagtgttgagagaggagaaccagtgcattgc

SEQ ID NO: 4950 - DNA, 83 bp, Homo sapiens
gtgattctgaggcctccccaaccatgtgcaattgtccctgtgcgttttattgcgacctgccggtgggaactttgtctccgagt

SEQ ID NO: 4951 - DNA, 78 bp, Homo sapiens
aaactagcagcattatgcagaaactgaagaaaatgagaagccgcatggatgaaaaattgcgcagtctctttgtggaga

SEQ ID NO: 4952 - DNA, 98 bp, Homo sapiens
tgcgctgagcaggtgcagccgccacgctcacctgcaactgtggagctgtgagccgtgagctttgaggcggtgggatgtgtcagcagaatgtctcctgc

SEQ ID NO: 4953 - DNA, 74 bp, Homo sapiens
gtgcccggcgaggagaaccaactggtcccgaaagagggggctagagagctgaaggagagccagtttccccaaaa

SEQ ID NO: 4954 - DNA, 100 bp, Homo sapiens
taattacttgagaatttataatggaattggagtcagcagaactgaaataggttatcttcattgtaatgaatatgatagtctgagattgaggtggctaagg

SEQ ID NO: 4955 - DNA, 73 bp, Homo sapiens
ccggcacctcaaccagatgaggaagtacaactttgagtacctggttgactgtgatgaagtgatcttcatgaaa

SEQ ID NO: 4956 - DNA, 75 bp, Homo sapiens
gtcatgaagaaactcaatgatcgtgtcatgagaatgctgacggatctgaacacgtacctcaacaaagccatcccg

SEQ ID NO: 4957 - DNA, 100 bp, Homo sapiens
gggaccaccggggtgcctgatatgagagcgggagtgtagagactcggaggccgaggtgtcatggagaaactccagctgggcccagagattctgcagcggg

SEQ ID NO: 4958 - DNA, 97 bp, Homo sapiens
agctcggccctggggccagcatgactgtcaccaccgcgaggacgccggggccgtgtgtgacgctctggattaatcgaattacagctgctagccagga

SEQ ID NO: 4959 - DNA, 75 bp, Homo sapiens
tggaagaagagacgaagagacagctggatgaagccatcatgcagaagggggatacaaacataaagcccatcctcc

SEQ ID NO: 4960 - DNA, 75 bp, Homo sapiens
ctggcagtgattcaacattttataggcagtcagaaggaaggaaattgacagaactttcataaagccaaagactgg

SEQ ID NO: 4961 - DNA, 76 bp, Homo sapiens
tcaggactggccgctgccatagctggggccaagctgagaagagtccaacggttccagggtcacccccgagaggaca

SEQ ID NO: 4962 - DNA, 76 bp, Homo sapiens
ttcatattggcgatcctgttgtgatccagtttgtgtgttctctgtgcaaataccggaccttctatgaggacgagat

SEQ ID NO: 4963 - DNA, 50 bp, Homo sapiens
gcgaacctcacctttccagggcgcaagaaactgctctttgagcgcgggaa

SEQ ID NO: 4964 - DNA, 101 bp, Homo sapiens
taccacggcccggcgcctgcactcgtttcctgcaggagaggaggatttgacagctaaggatattgaagaaattattgatgagctcaaggctggcaaaatcc

SEQ ID NO: 4965 - DNA, 78 bp, Homo sapiens
aacagtttctgtgtcccacttcatctttaataagtcaccattactttaagtactgcaaaatctcagcattggctctgc

SEQ ID NO: 4966 - DNA, 100 bp, Homo sapiens
ctgcgctatcttccctggatttttcttcaccttttccttactcatgagccaggtgcctatggttcatgcttgaagttttaatgacaaagaatgaaaacaa

SEQ ID NO: 4967 - DNA, 74 bp, Homo sapiens
tgaacacagactatgagtctagtttaaaggctgaccggttccctgatgtgttacctgcttctgctactgatcca

SEQ ID NO: 4968 - DNA, 100 bp, Homo sapiens
ccttcgacgcaaaacagactttttcattggaggagaagaagggatggcagagaaggctgaaggggatgctaagggagataaagcaaaggtgaaggacgaa

SEQ ID NO: 4969 - DNA, 82 bp, Homo sapiens
cctcgctgtacgccgagcacccaggcgactgcctcatcttcaaggtaaggctggcctctctgcagtcagaggtctgagctct

SEQ ID NO: 4970 - DNA, 100 bp, Homo sapiens
ttaagggactcccaggaatatcaggtgtgtgtgtgcaggccacagcagcatgcccttggtgtagtcagtgccgaaaggggtctgttccttcttgagcctg

SEQ ID NO: 4971 - DNA, 101 bp, Homo sapiens
gattcagagcgactgggcgcaagccctcagatgttaactcattccagcaaactacaaagtggattgatgatgtcagaacagaaagaggaagtgatgttatc

SEQ ID NO: 4972 - DNA, 50 bp, Homo sapiens
catcattgatgtggtgcgatcggccaggagtggtggctcacacctgtaat

SEQ ID NO: 4973 - DNA, 82 bp, Homo sapiens
tgctttccagccgcgagctgtcaggccgagtgtcaggccgggcagcaaattgtggctactaatttgccccctgaagatcaag

SEQ ID NO: 4974 - DNA, 100 bp, Homo sapiens
ggagatggtgcagaagatggaggagacactacaacaacaggagtgcaaacttctctacagccgaaaagagggtcaaaggcaagaaaacaaaaacaaaaat

SEQ ID NO: 4975 - DNA, 90 bp, Homo sapiens
gcagctgaagagcacggactctggagccaaagatcttgccgtggaccttattgaaaaatgtcagacatggctgtgatgccacatgctggg

SEQ ID NO: 4976 - DNA, 51 bp, Homo sapiens
aacttcgcccgggacttcatggtttaactatagatcaacacatcatcttgc

SEQ ID NO: 4977 - DNA, 100 bp, Homo sapiens
gttcggaaatggcaacttgcgcggtggaggtgttcgggctcctggaggacgaggcccaggctgcaagcacaaaggaagtttgctcagtctcagccgaata

SEQ ID NO: 4978 - DNA, 89 bp, Homo sapiens
acctaccgcaagctgctggagggcgaggagagccgtgtggcaaaggagcagagaactttgacaagttcttcacacgaggacagcccgtc

SEQ ID NO: 4979 - DNA, 97 bp, Homo sapiens
tccggggtcctggtcggggtggtctgtctgctcctggcatgccctgccacagccactgctggcagagaggctgatgacatcgtgaactggctgaaga

SEQ ID NO: 4980 - DNA, 90 bp, Homo sapiens
ggagaatatgctggagaggttttgagatttgttggtggcattggcctgttcttcagttttacagaggcctggcatgcgtgggcagtgatg

SEQ ID NO: 4981 - DNA, 100 bp, Homo sapiens
ttccgggacccgcgagcggagcggcgcgtgggtcggttgcggtcggccccggcagccgggaagatttccagaggattccagaacttgccatcaacccact

SEQ ID NO: 4982 - DNA, 98 bp, Homo sapiens
tggttcgaagtctcagcggtattctggtgcttatggtgcctcaggaattttggagagtaaaaggctgaaccttgttaaagagaaaaccattaatcaga

SEQ ID NO: 4983 - DNA, 83 bp, Homo sapiens
acctgcgctgtgatgcctgcagagctgtggcttaccagttggtagctggcagtgttgtgatggcttttgaagaagtatgcccg

SEQ ID NO: 4984 - DNA, 75 bp, Homo sapiens
aatggttctatgaggaacgagccaagaaatttccaactggagattttatcatgtgggcaacctgctgcaactggt

SEQ ID NO: 4985 - DNA, 78 bp, Homo sapiens
ggaggaaagatggaagactaccaggctgcggaggagtaagactttgaccccgacgcaggcttcagtgattgccgcgga

SEQ ID NO: 4986 - DNA, 103 bp, Homo sapiens
gttgaagagttcaactttcccagaagttgttctaacgctgcctttgctttaaaacagtattacttgcgaccatcaccggcctcctgcaagagtttgatgtcca

SEQ ID NO: 4987 - DNA, 98 bp, Homo sapiens
aaaccccagcaagatgcggaggctgcctcggcggagcagaggaaccacacgctgatcatggtgccagtgacggggtggcccgtgagctgatgacgagg

SEQ ID NO: 4988 - DNA, 90 bp, Homo sapiens
aacttcctgtagctcagataatacaccagcggatattcaactcctttgtttacactgagaaaatctcaaatggagaaagtgaagtacagc

SEQ ID NO: 4989 - DNA, 100 bp, Homo sapiens
gagagaaaaaaaagtgtgggaagagcatgaaagtccatcagcttgataatggaggagaacaatgactccacggagaacccccaacaaggccaagggcggc

SEQ ID NO: 4990 - DNA, 74 bp, Homo sapiens
catggcgcaagctctgtctgaggaggagtttcagcggatgcaggtcaaaatgcagatcttcgtgaaaaccctta

SEQ ID NO: 4991 - DNA, 74 bp, Homo sapiens
attacaccatctgaattgcctgcaaacccagaactgataaatttcaaacggaagagagtggcagcatttagaaa

SEQ ID NO: 4992 - DNA, 73 bp, Homo sapiens
tctgatatacccactttacagaggagggcactgcggctcagaggctgggctactgggaacgttatttggaaac

SEQ ID NO: 4993 - DNA, 100 bp, Homo sapiens
cttgaccaagatggaagaagaatttaggtctccagtgagatgtattgcaacaactagaagctttttgacaactacatgcaacaagatgcccatgaattct

SEQ ID NO: 4994 - DNA, 132 bp, Homo sapiens
tgtccgtgcgcgttgctgcggccgtggtccgcgcccttcctcggcgggccggactgggcagcaattgaagagaggtatggcaaagatctgctcaacctctctaggaagaagccgtgtggacagtctgaaatc

SEQ ID NO: 4995 - DNA, 100 bp, Homo sapiens
ccagcgtacatactgaatgatctctacatctcagactactgtgtgtggattcagaaagtcaaggaactctaatgatccaggacaaagaagttaccctgga

SEQ ID NO: 4996 - DNA, 75 bp, Homo sapiens
cccgaccagtccaagagccggcggcatgacgagagccaaggcaaagagggaccactgtgctcatggacccatcgc

SEQ ID NO: 4997 - DNA, 82 bp, Homo sapiens
ctggcctgggcgctccggtggcggcggagcgtctgcttctgcgctttgcctgggagaggccctggtggcctcgttcctggcg

SEQ ID NO: 4998 - DNA, 101 bp, Homo sapiens
agctctatgccaatatgtttgagaggctggctgaggaggagaacaagggcaacgggcatgaggaggtagttgcatgcgcctgggatggacagacatatatc

SEQ ID NO: 4999 - DNA, 74 bp, Homo sapiens
caccaagatgaaagcagcagttttcatcatctaagtgaaagaaactatccaactctggccaatattgaaaggaa

SEQ ID NO: 5000 - DNA, 89 bp, Homo sapiens
ctgaaatacatccaggaaagacatggagattctcttaaaaaggttaccacattctcatctggagccaggaggaagccaggacacggaag

SEQ ID NO: 5001 - DNA, 100 bp, Homo sapiens
agcctatttacccagaagtagtccatatgaaaaagcttgagtctccacccccatctaccaatcccttcctggaagatgagccaacaccagagatggagga

SEQ ID NO: 5002 - DNA, 75 bp, Homo sapiens
ctacggtccgcggctggggttccctcctccgtttctgtatccccacgagattcttcaaacttcatgagagaaagt

SEQ ID NO: 5003 - DNA, 100 bp, Homo sapiens
gctgaagaataagcttataacactgatggcttcttggacacttaatgattgttggcaagaaatgtgctgctgatctgggcctgaataagggttatcgaat

SEQ ID NO: 5004 - DNA, 98 bp, Homo sapiens
ttggcaactgtgttgctcttgtccttcggcagcgtggccgctagtcatatcgagaatgaaactagtgatcgagaagatggcctccccaaaggacatca

SEQ ID NO: 5005 - DNA, 75 bp, Homo sapiens
caggatttgaaaagctaccacaatcagaccattagagacgaggtctcacctatgttgcccagactggtctccaac

SEQ ID NO: 5006 - DNA, 100 bp, Homo sapiens
cccggagtccgactcgctacgcgggtcttgcgagatatctggccgcctctgccgcagctggagattcccaggactccggctctctctgcttctgtttccg

SEQ ID NO: 5007 - DNA, 75 bp, Homo sapiens
tggggctgggtctcggagtgggagacgtggagtgcaggaattgaatgatctggcacgggaccctccagcacagtg

SEQ ID NO: 5008 - DNA, 80 bp, Homo sapiens
ctcaccatacacctgaaggaaggccggaacctggttgtccgagatcgctgtggatgaaggtttaaggctcagaaaggtag

SEQ ID NO: 5009 - DNA, 96 bp, Homo sapiens
aaaaagcagggaggttatgaggcttaataaagaagggcttcaagatgggctgcgctccagttccaacagccgcagcgggagccgggagcggcgaga

SEQ ID NO: 5010 - DNA, 145 bp, Homo sapiens
tgttgccgaagatttagtggaaaagctgagaaagtttcgttttcgcaaagaaacgaacaacgctgctattataaagcaacttatgactctcatctctgctgcacgagaatatgagatagagttcatctatgcgatctcacctgga

SEQ ID NO: 5011 - DNA, 75 bp, Homo sapiens
acgcagacctgatggatttcaaggtctgcgttggacacggcattgtacatgggattagctctggtctgacctagg

SEQ ID NO: 5012 - DNA, 83 bp, Homo sapiens
gcgctgccgtctctggaggagtactggcaacagatggtgataagaagcctaggaagcgaacttatgaacagataaaggtggat

SEQ ID NO: 5013 - DNA, 100 bp, Homo sapiens
ggaaccagactgggggcgagctgagcacctgtagtcaatcacacgcagaattcccgtactgattagtcaacagtggaaaatctgaagagatgcaagcagg

SEQ ID NO: 5014 - DNA, 51 bp, Homo sapiens
cttctcagcccaaagtcagcatccaattctggtacagcagttgcgccggac

SEQ ID NO: 5015 - DNA, 100 bp, Homo sapiens
ggctgctgtggaggctgaggaggcggcggcggagatctggaccccatatcatgtgaacctcctcctggctggctatgatgagcatgaagggccagcgctg

SEQ ID NO: 5016 - DNA, 80 bp, Homo sapiens
gcttgggatcctttatcctggtcatcttctatttccaaagtatggagagtgcaatcacgctgtggcagttcctgttgcag

SEQ ID NO: 5017 - DNA, 100 bp, Homo sapiens
attggttcggggacttctcctccttccgtgccctcctagagccggagctgcggcccgaggaccgtatccttgtgctagagggtctcgctgttggagttgg

SEQ ID NO: 5018 - DNA, 101 bp, Homo sapiens
gaggtatttggtggaggctctttgaagttgggttcaggagtgtagaattggcaaagttattgccagcttcctggtggctgtgaaaaacaatatcgatgtct

SEQ ID NO: 5019 - DNA, 87 bp, Homo sapiens
gaggaacttggaaatcaaactcagcaagaagctcttctggctgccattagtgaaaaagacgccaatatagctctcttggagctttcg

SEQ ID NO: 5020 - DNA, 74 bp, Homo sapiens
gtacctgaaccggcacctgcacacctggatccaggataacggaggctgggatggtgattgctcacaccaaagcc

SEQ ID NO: 5021 - DNA, 75 bp, Homo sapiens
aaatttcggtagccatggcacaagaatatagttcttgctgtgttgcccaggctggtcttgaatcctgaactcttg

SEQ ID NO: 5022 - DNA, 82 bp, Homo sapiens
cagctgcagcacgtggacgctgactcggaagtgcaggtgagaagccctaccactgcaactgggacggctgcggctggaagtt

SEQ ID NO: 5023 - DNA, 75 bp, Homo sapiens
tcaaaaaggctctgactgatgcagataactcgggagccagatgaccaggatgccccagatgagcatgagccctct

SEQ ID NO: 5024 - DNA, 82 bp, Homo sapiens
agcgtcacggcgtacgccctcatggggaaaatctccccggtgactttcaggtctcctttacagaaaggggcttggataagga

SEQ ID NO: 5025 - DNA, 100 bp, Homo sapiens
gccagagttgtgggccgccgtcggcagcaagaacagagagagaggtggacagatctgagagatactgaggcagagaaaatcctgaaggagcaagagcggc

SEQ ID NO: 5026 - DNA, 97 bp, Homo sapiens
ccaggaggcgctggagcaacagctccccacactgcaccatgagctcagttggctgcaggagcagctagcacaggtccacgctgcttttatgagctgt

SEQ ID NO: 5027 - DNA, 83 bp, Homo sapiens
ttttttccagtctgatccttttgttggcacatctatattggaaagcgactgagcacaccctctgccagcacctactgagggaa

SEQ ID NO: 5028 - DNA, 51 bp, Homo sapiens
tcctgcggcatgcggctctgcagcacccagtcagcttgaagagtttcaaat

SEQ ID NO: 5029 - DNA, 100 bp, Homo sapiens
cagatggaagctccccacatcatcgtgggtacccctggccgtgtgtttgatatgcttaaccggagatacctgtggtgtctgatgccatcaagtgttgcag

SEQ ID NO: 5030 - DNA, 75 bp, Homo sapiens
tctcagcaagaacgggaacaaaactctggaaaatggttctcctgaagaacatgcaatctatgtttgggatcattt

SEQ ID NO: 5031 - DNA, 82 bp, Homo sapiens
gtcccactatcaaggataagccatgcctccagaaaaacctaaaaatttgagttgcattgtgaacgaggggaagaaaatgagg

SEQ ID NO: 5032 - DNA, 75 bp, Homo sapiens
gcacggaggagctctttgacttcttgcatgcgagggaccattgctggtggacttgctttgtgaagagacagttca

SEQ ID NO: 5033 - DNA, 59 bp, Homo sapiens
aatggagaaagtgctgtagtgcaattactgtttcctgaggttataggcgggtgtttgag

SEQ ID NO: 5034 - DNA, 75 bp, Homo sapiens
gcgcccgggagcttccattcaggagacctgcatctggtgtgggccgaagatatgctcatgtggtgttgaggaaag

SEQ ID NO: 5035 - DNA, 83 bp, Homo sapiens
gctgcggagcggcgagggacctcgcagggagccatccgatatggtgcacacgcttgccagcaacggggccaactccatctggg

SEQ ID NO: 5036 - DNA, 90 bp, Homo sapiens
gccatggatgatggcggtggagcctttatatcatgggaagcactctcacttattaaagatcttggtccgttcactcgacctcatccagcc

SEQ ID NO: 5037 - DNA, 51 bp, Homo sapiens
acaggcgctgacggccacccctccagtgtcagagatggctttggattcccc

SEQ ID NO: 5038 - DNA, 83 bp, Homo sapiens
agcagcagcagcacagcgacaagacggttattcagcttctcaaggctggaaaagcgaaggaagtttcctacaatgcactagcc

SEQ ID NO: 5039 - DNA, 140 bp, Homo sapiens
atcttcaggctggaacaaggagaagaaccatggagactggaggaagaattcccaagccagagctttccagatctccgcaaatgacttcattgccaagaagagaagaaaatgcatttaagtggaaatcggacctctaatcc

SEQ ID NO: 5040 - DNA, 100 bp, Homo sapiens
gcgatcgtggggcccgcgaggcgggcagccggggcgtccagtgtgtttcctgtaacaaatcgttcaagaaactctggtcccttcatgaacatatcaagat

SEQ ID NO: 5041 - DNA, 75 bp, Homo sapiens
ccgggaggagcactggcgtctgtttccttcgtgaagccttctccttccaaaaagtttcggtctggctcatctttc

SEQ ID NO: 5042 - DNA, 74 bp, Homo sapiens
attcaaacttcaacagaatgtggcaaccaggaagcaattttggaggtggtggaagctacaatgattttgggaat

SEQ ID NO: 5043 - DNA, 75 bp, Homo sapiens
cgcaggcccacggtagcgcagccgctctgaggctctctatgagaacatgctggtggagctgccctttgcaggctt

SEQ ID NO: 5044 - DNA, 75 bp, Homo sapiens
caggcctccaggagccgctgggagctgccgccaggagctgtcaccatgacggtgttcaaagctgaaacaggagag

SEQ ID NO: 5045 - DNA, 82 bp, Homo sapiens
tgggctgccggcacttcgcggcagattttctggcatccttaaatcttgtgtcaaggattggttataatataaccagaaacca

SEQ ID NO: 5046 - DNA, 50 bp, Homo sapiens
tggaagcccgggaccgtttaaaaaactgatcttgagccagatgattgtgc

SEQ ID NO: 5047 - DNA, 98 bp, Homo sapiens
tcagccattttccacagatcaggccaacgaggtgacggacagcgcgtacatgggctccgagagcacctacagtgagtgtgagaccttcacggacgagg

SEQ ID NO: 5048 - DNA, 100 bp, Homo sapiens
ggaagatggcggcgccgctcatccccctctcccagcagctgcctgtggaggaaccgattgtgtccacagatgaggtcatcttcccactcaccgtttcact

SEQ ID NO: 5049 - DNA, 95 bp, Homo sapiens
cagtcagcaaaggttcagccctccaaggcgacattgactacagcaccgtgctcctcggcatgctggtgacgcaggacgtgcagctcgggctcttc

SEQ ID NO: 5050 - DNA, 74 bp, Homo sapiens
aaaaagtggactcagctccctggcgggagccccttctttaaaagactctgagatgaatgagagccacaagtctg

SEQ ID NO: 5051 - DNA, 100 bp, Homo sapiens
ggacgaagccggagtgtaggcggcagaggattcgctcccagagcagctgcggccaggctgcttcacaacggaggtgacagatttcgcaggacagtatgtg

SEQ ID NO: 5052 - DNA, 100 bp, Homo sapiens
gaaccatggaccaggccctcaagtccctgatggcctcagaggaggagcccaaagaaactgtggtgtctcgttggcgtgctgatccctgggctcggggctc

SEQ ID NO: 5053 - DNA, 76 bp, Homo sapiens
ctggccaagaagatcatcattaaggacggaggcacgggggattcccgaagtcttccgttttctgagaatgtgagtg

SEQ ID NO: 5054 - DNA, 82 bp, Homo sapiens
gaatggttggcaagtcgaacaaagtcagctttctccaatctttctacatcccagatccaatatcagatggaaatgatgcgga

SEQ ID NO: 5055 - DNA, 75 bp, Homo sapiens
cacacgccagtacggggatgagtccactctggccttccagcaggtcgcccaagtccagccccacgacgcagtgcc

SEQ ID NO: 5056 - DNA, 90 bp, Homo sapiens
gttgatttttaaagcttcaaaatcctaagactcagcactgttgcggggaacttagtgatttggcccgtgaccctccagcacaatgttctg

SEQ ID NO: 5057 - DNA, 75 bp, Homo sapiens
tcctttcctgcttttggtttccctggcaggggttgaactgtggagtgtgtgggttgattcttcaccacactgaaa

SEQ ID NO: 5058 - DNA, 73 bp, Homo sapiens
gaaaatggagatgccaaaacagaccagggtttttaatgaccacaacaagcaagcatgcagcttactgcttgaa

SEQ ID NO: 5059 - DNA, 90 bp, Homo sapiens
ctctgccagtcacactggggtccccaaagaagtcaaggggaattttcaggctactaataaaataccagctggacaaccaggataaccctt

SEQ ID NO: 5060 - DNA, 101 bp, Homo sapiens
tgctgttgaaaaagaaacaagcccgctgtcagggagtagtttgtgccatgaaggaggaattaattccaatgagtgtgaaaatgtatcaagaaaaaagaaaa

SEQ ID NO: 5061 - DNA, 100 bp, Homo sapiens
gaccgtcaccaactggttcaaattactgacagccctgtcctaggagcacaacgtccgagaaatgctcagcttgactgctccaaattggagaccttgggca

SEQ ID NO: 5062 - DNA, 100 bp, Homo sapiens
cacaactgagattgtcatgctgaatcctgccaatacccgcagcatttccaacatggcagtgaaatcaactgtgcagaccatcactgttggaggagtgagc

SEQ ID NO: 5063 - DNA, 83 bp, Homo sapiens
tactgtggagaatgccttttcgctattctctgctgcagtcagatatgatgcagagaaagaatcttcaagagggagacataggg

SEQ ID NO: 5064 - DNA, 97 bp, Homo sapiens
aagaaacttttgcccttatcagtaacacctgagatgaggcctgcctgtgttaatacacctagtgaggagtggagctgaatttgaatgcaagccttgg

SEQ ID NO: 5065 - DNA, 100 bp, Homo sapiens
cagaggacataccacctccaggatcaggatgcagagtaattcgccaaaatgacgaacacaaagggaaagaggagaggcacccgatatatgttctctaggc

SEQ ID NO: 5066 - DNA, 100 bp, Homo sapiens
gtaaaggatcctgtagaaattcaaaccctagtgaataaagccaagagagaccttggagtaattcgtcgacaggagagaagaccaagaggtcggagaagag

SEQ ID NO: 5067 - DNA, 50 bp, Homo sapiens
cggcccgcgggcaggcgtcgggtccatggcttacatggtgagtgctaaca

SEQ ID NO: 5068 - DNA, 100 bp, Homo sapiens
gtgaaggaccccaatggcaggacagtgcccagcgatgatgtctccccgttcaatgttgtggcctggcacgggaattatacaccctacaagtacaacctga

SEQ ID NO: 5069 - DNA, 100 bp, Homo sapiens
aatttctcagattattacaaaatgaacaatttgagttggatatggaagaggccattcaaaagttaattggccttggtcctcacagctccaaaaagaaaca

SEQ ID NO: 5070 - DNA, 145 bp, Homo sapiens
agaactacaaccttgtaacagagaaccttgctctgacagagtacaccttgtacttgggatttcacaggtgtgctacattgagggtcatcgggtaattaatctggccaatgagatgtttggttacaatggctgggcacactccatc

SEQ ID NO: 5071 - DNA, 82 bp, Homo sapiens
ctgtgctccaggactccctcaataatgaacttgaacaagagtatggggaaccctttctggctgccatggaaaagctgctttt

SEQ ID NO: 5072 - DNA, 82 bp, Homo sapiens
accaacccagccgaccccccagaccggccagaatttagcttcacttgagagagatctggaatggtcgccatgattgaaacca

SEQ ID NO: 5073 - DNA, 124 bp, Homo sapiens
acaccccacatcgacaatttggaggtggcaaacagcttcgcagtcactaatgcttgactatagagttaacatcttcctgagacaaaaatggaatgaccccaggctgaagctccccagtgatttt

SEQ ID NO: 5074 - DNA, 83 bp, Homo sapiens
tagggaagctctgagagaatggctgtggaagatggtgatgctcatggaccccagcgaggaccccgaggacgtggcgcgaacac

SEQ ID NO: 5075 - DNA, 90 bp, Homo sapiens
tgactgtctaggagagcatttgtatgttatggtgaatgccaaatttgaaggtgcaaacagctgcacagcaagtggcagaggataaatttg

SEQ ID NO: 5076 - DNA, 100 bp, Homo sapiens
cgggtgaaggcccttttggaggagttccctgacaaaggcttcttctttgcctttggagctgtatctggagtccatctttcaccatcttctcctgagattg

SEQ ID NO: 5077 - DNA, 51 bp, Homo sapiens
gtcaagacgctgggcgcgtcgaggactggttttttacaggctggtggataa

SEQ ID NO: 5078 - DNA, 80 bp, Homo sapiens
gctgctattaaagggaagatcgatgtgtgcattgttgacttagatgccatcccaagtgctaaagtacgagagcaaagaat

SEQ ID NO: 5079 - DNA, 75 bp, Homo sapiens
agaaactccttcacatctggaagaacttgaagttgctctaggtcgtaaccagcctttgaaaaaggagaaaccaaa

SEQ ID NO: 5080 - DNA, 78 bp, Homo sapiens
tccagcaaggtcggcagagcaaggggcttacgcagaaggacctggccacgctgactttggtgtgtctgccaagaatct

SEQ ID NO: 5081 - DNA, 75 bp, Homo sapiens
gaaacagaaaggctaaagagggctggagtcaggggacttctcttccaccagaaccgcctctatcaggccattcag

SEQ ID NO: 5082 - DNA, 83 bp, Homo sapiens
gtggtcggcagcatggagggccccgacgatagcgaggtcacctttgcattgcactcagctatcatggtgaacttacttcagat

SEQ ID NO: 5083 - DNA, 76 bp, Homo sapiens
tctacttttgggttacaaaaatccagaccaggaaactgttgtgactgaatatctaaatagtggaaatgcaaatgag

SEQ ID NO: 5084 - DNA, 94 bp, Homo sapiens
tggagcctcagttggaagcagccgatccagcctgcggagcctgtggggcaggtgccccacctcaaccagaatgcctggaacaacctggagaaat

SEQ ID NO: 5085 - DNA, 100 bp, Homo sapiens
agccgaagtctcatctcagtgtggccacgggcttcggctgtgcaaccatcttctggcttttgaaatatcggtcggagctcttaggcctgctgaaaaccta

SEQ ID NO: 5086 - DNA, 92 bp, Homo sapiens
ctgagtggttgtgtggtcgcgtctcggaaaccggtagcgcttgcagcatgtaccatggggcgcaagttggaccctacgaaggagaagcgggg

SEQ ID NO: 5087 - DNA, 78 bp, Homo sapiens
gtagcatagaagatgtggactacaatggaaaccttccaggcaaagaacagagcagttcaccatttgcattatatagaa

SEQ ID NO: 5088 - DNA, 101 bp, Homo sapiens
gcgcagggtcgcgatgctgcccggtttggcactgctcctgctggccgcctggacggctcgggcgctggaggtgagactgctgctcctcgggccattttgac

SEQ ID NO: 5089 - DNA, 100 bp, Homo sapiens
agtaaaagtagcagtggttcagcacactttggcacttaagtattcatcgaagagtcaccccagtagcggtgatcacagacatgaaaagatgcgagacgcc

SEQ ID NO: 5090 - DNA, 98 bp, Homo sapiens
gtcctgggggaagtacaacctttggcagtcatcatcttccaaatagtgtttgaaagatgtatggtgatcttgaaacctccagacacaagaaaacttct

SEQ ID NO: 5091 - DNA, 100 bp, Homo sapiens
accacgtagatcacttggattcctccaatagtttttccgtgacaaatgcttgttgaagctccattcataccaaagtttagaggctctggagataccagca

SEQ ID NO: 5092 - DNA, 100 bp, Homo sapiens
gaggacaggggcggggggcgggaggcttgccaccttcagcccccccgcgaacgcccaagagttttgccgaattgacaagcccctgtgtcacagtgaggat

SEQ ID NO: 5093 - DNA, 100 bp, Homo sapiens
ttctacatcaatggatagagatataaatgtggagaggactataaactgcacttcatcttccgacacaaaaaccccaaaacgggtatctatgaagaaaaac

SEQ ID NO: 5094 - DNA, 96 bp, Homo sapiens
tgaagacctattttactgataagaaaacacatctttacacactaatggaaattgatgacttgaaaaaaattaccaattcactgactgtgctttgca

SEQ ID NO: 5095 - DNA, 96 bp, Homo sapiens
gcaaggctggcgcgtctccatggaggatcatgcggccagatgatgccaacgtggccggcaatgtccacggggggaccatcctgaagatgatcgagg

SEQ ID NO: 5096 - DNA, 75 bp, Homo sapiens
tcaccataggagacatggacgaagccttcaaatccatcaagctcatcaaaagggggatatgagactttctactcg

SEQ ID NO: 5097 - DNA, 75 bp, Homo sapiens
cgcttcccatctaacctggaggttgaagcttcaccacaggcttcaagatcttgtgctgtgaagacatttcccaag

SEQ ID NO: 5098 - DNA, 83 bp, Homo sapiens
ctccgacgtgtgctccgcccagggggtgcgaggataccccacgcatgttatttgaaagcaattgagacgcaaccgaactttgc

SEQ ID NO: 5099 - DNA, 50 bp, Homo sapiens
cagctccactgaacagataaggtgctgaggaatgtaaacaagtttgctgg

SEQ ID NO: 5100 - DNA, 90 bp, Homo sapiens
cacgtcttatttaatccacatcatagtgagcctttgaatacatctttatcaatgaccagtgcagtacagaactccacatatacaacttcc

SEQ ID NO: 5101 - DNA, 100 bp, Homo sapiens
atcatgacagaataagacaggaagacctgcggaaactcgtgacgtatttggccagcgtgccaagaataactgaagtgaagtgatggactccgatttggag

SEQ ID NO: 5102 - DNA, 100 bp, Homo sapiens
aggaacaccgtcacgctgctggaggagcctctgacagtgacggcaccatccctaaccattgcggagaatatggctgacctaatagatgggtactgccggc

SEQ ID NO: 5103 - DNA, 80 bp, Homo sapiens
acgttccatctgtggaaggacctaccaaccagcatgctacaagtgaaaactgatgagaaactgaatgtgtctgatgagaa

SEQ ID NO: 5104 - DNA, 100 bp, Homo sapiens
gacttggcccagtgtttcttctgcttcaaggagctggaaggctgggagccagatgacgaccccatgtgcagtcagcctcagtttccaaagccggaaaagg

SEQ ID NO: 5105 - DNA, 82 bp, Homo sapiens
ggaactggtgctgcagcgagaggccatgggtgccttcttctccggcatcttttggagcagctttgtcggtgggggtgtctta

SEQ ID NO: 5106 - DNA, 76 bp, Homo sapiens
gcagcaagtcccatcggaggacctccctgccctgtataccgagggaacaggatgaactggacctcacagacaaaca

SEQ ID NO: 5107 - DNA, 74 bp, Homo sapiens
ataccgcttcctggagttcacgactctgagtgctggactcatcaagcagttctcagagaacatttatgaggcct

SEQ ID NO: 5108 - DNA, 100 bp, Homo sapiens
gccagagtttgtagcctattggaggaaaacacaccaaggtcaatccaaactggagctcaactttcagaagagaaagacgccccagcaagcctctttcggg

SEQ ID NO: 5109 - DNA, 75 bp, Homo sapiens
ctccagtaacactcaagcaaagaagagttgagcacaatcagggaattcggcaccggttgagaggtagtgccaatg

SEQ ID NO: 5110 - DNA, 100 bp, Homo sapiens
cttcattcagatgtggtggaatatgccaaggaaaaactggagagcttcatcaaaaatagtgatagctttgataaaatgattgtctgtaaccaggtgatga

SEQ ID NO: 5111 - DNA, 100 bp, Homo sapiens
gccagggttgaggcgattccagagagcggcggaaaggataagcctcgacttagaagctaccgagttaccctaagaaagcaattcacagaagctgtgagtc

SEQ ID NO: 5112 - DNA, 78 bp, Homo sapiens
ggcatcaccgacacactatgctccctccaaagccagaaatctgacagaatattttgtggctgtggatgttaacaacat

SEQ ID NO: 5113 - DNA, 49 bp, Homo sapiens
atcgttgctgccttcttcgtcaagatgtccagaaggcttcttgggggaa

SEQ ID NO: 5114 - DNA, 100 bp, Homo sapiens
ctcagcgcagccgccgcccgcggagccagcacgaacgagcccagcaccggccggatggagcgtccgcaacccgacaggtatctgcgggatggtggccatc

SEQ ID NO: 5115 - DNA, 88 bp, Homo sapiens
ggctcaaagaaagatgattatgcttgaccactatgctatcatcaagtttccgctgaccactgagtctgccatgaagaagatagaagac

SEQ ID NO: 5116 - DNA, 75 bp, Homo sapiens
gcatcctagcagccttctccaaagccacatcaaaccgtggggaactgtgggtcagagactctccagcatccttgg

SEQ ID NO: 5117 - DNA, 98 bp, Homo sapiens
gaggagagaccccggggagtagagagagagaaactcactccccgagtccccgaccctccccaagcaagcggacaaggcaaaatctcagcaagttcgga

SEQ ID NO: 5118 - DNA, 50 bp, Homo sapiens
agtgccgctttaaggagaactgcagctttaccgatttgttacaactcaag

SEQ ID NO: 5119 - DNA, 132 bp, Homo sapiens
cgtagccagccacagcggggtcgtgaggattaagtgaggggacagcagtgtctggcacggtgaatctggattgggaaagtcgacattaatcaactcattattcctcacagatttgtattctccagagtatcc

SEQ ID NO: 5120 - DNA, 101 bp, Homo sapiens
ccgagcacctctccgcgcacatcactcccgagtggaggaagcaatacatccagtatgaggtgcctgtggtagccatattgggttcaggtgggggtttccga

SEQ ID NO: 5121 - DNA, 99 bp, Homo sapiens
accatgcaacagtcaaccttctgagctttcttcagagacctcaggtacctgcacatgttgttctttgtcagtgctgtcaagtgtgtgccagggtgatcc

SEQ ID NO: 5122 - DNA, 82 bp, Homo sapiens
agggcattttggaatatctgctgcaactggaggtcttgcagacaagccatctatgatgcatttgaccgcttcctccataaat

SEQ ID NO: 5123 - DNA, 75 bp, Homo sapiens
ccgggttctttacctccgagccaggccgccgcaaagcagctgtcgcctggttgggcccggaaatgggacgtcgcg

SEQ ID NO: 5124 - DNA, 97 bp, Homo sapiens
gagttctcggtactcttcagggatgagtcatgtggcagtggaaaatgcgctcgggctggaccagcagccccatggctgggggttatggagtgatggg

SEQ ID NO: 5125 - DNA, 97 bp, Homo sapiens
agaaatcccactgggcagagcttgaaataagtggtgtcatggagaaactccagctgggcccagagattctgcagcgggaaaatccaaggcttattta

SEQ ID NO: 5126 - DNA, 50 bp, Homo sapiens
cactgtacaagctttcaaagtcaatgtgactgtatctgaattttgcagct

SEQ ID NO: 5127 - DNA, 75 bp, Homo sapiens
ccagcgtctcactgccagtggaggcctctcacatccgccagcagaaaactgagcttccggtcacagagaacgtgc

SEQ ID NO: 5128 - DNA, 83 bp, Homo sapiens
ccagaccctggagcctcagttggaagcagccgatccagcctgcggagcctgtggggcagtctgttctctggggaggcagtaag

SEQ ID NO: 5129 - DNA, 71 bp, Homo sapiens
cgctagaactcagttgtgcgttgcggccagtcgccactgctacgtgaagccctccaatatgctagtaaaca

SEQ ID NO: 5130 - DNA, 100 bp, Homo sapiens
ttgtcattgcaagcactattggcagctgcagagccagatgatccacaggatgctgtagtagcaaatcagagtctcactgtgttgcccaggctgaagcagc

SEQ ID NO: 5131 - DNA, 75 bp, Homo sapiens
cggccacagagttagctgggagtctaccaaggggagccttctcggtggtgcgaaggtgtgtgaaggtgctggctg

SEQ ID NO: 5132 - DNA, 75 bp, Homo sapiens
ttttcatgcagacagcttgtcaagctgtgcagcatcaaagaggcaggagttttcggctttgtgagaaaccttacc

SEQ ID NO: 5133 - DNA, 75 bp, Homo sapiens
attacactgtgatacgactgacttgcactggtgattgctgcggtgtttgaccgagacataaactgcagaagagca

SEQ ID NO: 5134 - DNA, 100 bp, Homo sapiens
cagccggggagctgcaggaaccagactgggggcgagctgagcacctgtagtcaatcacacgcaggacatgctctggagtcagaagacagcgaaaagagaa

SEQ ID NO: 5135 - DNA, 90 bp, Homo sapiens
tgacacgttgaattcgccataatcaaggaaaccttttccgggtggggatctctgaaattactcaggaaggacttttgactagatctgctc

SEQ ID NO: 5136 - DNA, 80 bp, Homo sapiens
cgaaacgtgaccatgtggattcaacagcttttaggactcagtctgcgctcctcagaccaccggcaggtgaacagcctgat

SEQ ID NO: 5137 - DNA, 100 bp, Homo sapiens
taccattgtgaaagaaggttgggttcagaagagggattatgaagcaattgtgaagctttcggatggctttaatggagcagatctgagaaatgtttgtact

SEQ ID NO: 5138 - DNA, 83 bp, Homo sapiens
ctacgaagaagtgcttcagcgggccaggaagcgcatccaggaggctcaggatatcaaaaaactccccaggaatgggccccaca

SEQ ID NO: 5139 - DNA, 100 bp, Homo sapiens
cgagtcaagccgccgcctcgacccagggcccgcgggccaggagagcgctcggcggtctctgctttctatccgtcaagatgataaagtcgtgtgcccgaga

SEQ ID NO: 5140 - DNA, 100 bp, Homo sapiens
tgatatcagacaccgagcttcagcaagctctctccaacggaaggttgtgcaggaccagcgttccctgtgcaggcgccactgcgtttcctgcagattccga

SEQ ID NO: 5141 - DNA, 75 bp, Homo sapiens
tgcctgaatacatgatttaaacaagagatttccacagaagaggacgggaggggcaagctgcggccaaccaaggcc

SEQ ID NO: 5142 - DNA, 100 bp, Homo sapiens
gacttttggggggaaactaggtcgatggtcggcggcgcccggatgggcagctgaggaccccgcagggatctttgaattggtggaacttgttggaaatgga

SEQ ID NO: 5143 - DNA, 98 bp, Homo sapiens
gactagggtcgccggggaagcggacctttccaaagtgaaactgatgagatttgatgatccactgttggggcctcgacgagttcctgtcctgggaaagg

SEQ ID NO: 5144 - DNA, 74 bp, Homo sapiens
cctgcccggtgcccgaggaggcagccaagctcgtggcctgcctctgcgtgcgattcaagatgaccaacgaagaa

SEQ ID NO: 5145 - DNA, 100 bp, Homo sapiens
ccttccccctgccctacgcccagccctctcaccctggtactgcatgcacgcaatgctagctgcccctttcccgtcctgggcaccccgagtctcccccgac

SEQ ID NO: 5146 - DNA, 90 bp, Homo sapiens
cgcgaggggaacggaggccagagctgcgctcatgatggagcagtccaagaagtcctccctcatggtggcccgcagtattctcaacaacaa

SEQ ID NO: 5147 - DNA, 100 bp, Homo sapiens
ggatcatggccgcagccgctctggggcagaagccagctgaagatgagtggggtaaaaccccagacgccatgaaagctgccatggccctggagaaaaagct

SEQ ID NO: 5148 - DNA, 114 bp, Homo sapiens
ccgctgcagccaccaccgccaccatgtcctaccaaggcaagaagaacatcccgcggatcacggtgtgatgaatgcagactctgctaccattttggctgtttggatcctcctttg

SEQ ID NO: 5149 - DNA, 90 bp, Homo sapiens
tgccctgcagtacctgcagaaggtctctggagacatcttcagcaggatcgacccgtacggattcgagcggcctgaggacttcgacgacgc

SEQ ID NO: 5150 - DNA, 82 bp, Homo sapiens
gaacagaaggcgatcaaggccaagtatccgccagtcaataggaagtacgagtgtgagcctgtagtggtggagacacgcccag

SEQ ID NO: 5151 - DNA, 99 bp, Homo sapiens
agaattaaaagatgatgagaaataaggacaaaagccaagaggaggacagttcgctacacagcaatgcatcgaggaggacaagtccttgaatgaccttgg

SEQ ID NO: 5152 - DNA, 101 bp, Homo sapiens
ccggcggagtggagatcctattcagaggggccggtctctctaaatatgccccaggtatcgagaaccttccctgcgaacttcagaggaacttccagctgatg

SEQ ID NO: 5153 - DNA, 75 bp, Homo sapiens
gccacttcgacatcgagatcaaccgggagccggttgggacccctgattttagcaggatggcccaatggaatcagc

SEQ ID NO: 5154 - DNA, 100 bp, Homo sapiens
ggggtcattctctatggtccacctggcacaggctaccacatactgttgattgtgatgaaatgccagttgaagcacctgtcctgcgagcttaggggtgcta

SEQ ID NO: 5155 - DNA, 100 bp, Homo sapiens
gacgcccgcccggctccgggaccgcgggagttccctgacatcgtggagttctgcgaggccatggccaacgccgggaagaccgtaattgtggctgcactgg

SEQ ID NO: 5156 - DNA, 100 bp, Homo sapiens
ccagactgacacccataccttttgggcttcagaatgcagtgttttcgaaaactgcatcagcagtttgaaatgtataaagagcaggtaaagaagatgggag

SEQ ID NO: 5157 - DNA, 82 bp, Homo sapiens
ctgcacatcgtggtggtcggatttcaccacaagaagggctgccagtatggtttgaagtggtgaacatggatttttctcggct

SEQ ID NO: 5158 - DNA, 100 bp, Homo sapiens
ctggaggaggaggccatcatcatgaaggacgtgcccgactggaagccttatttagtgtctctgacaaaaccggccttgtggaatttgcaagaaacctgac

SEQ ID NO: 5159 - DNA, 100 bp, Homo sapiens
agatcctcaaactagctgctcggaacacttcagcacaagaacgctaccttttcttaagtatgcccagctttttgcagcactgattgcacgaacagcaaaa

SEQ ID NO: 5160 - DNA, 98 bp, Homo sapiens
aacttacaaccaccaccaccactaccacctccaccttattcctgtgatccaagcggcagtgatttgcctcaaggcttctccagggaaagtgaccgagg

SEQ ID NO: 5161 - DNA, 83 bp, Homo sapiens
acggacctgtctgggtctcagccgccaaagaccccgtccgatcttgcttctgaaatatctacctgggatggagtgatagtaac

SEQ ID NO: 5162 - DNA, 82 bp, Homo sapiens
gccccgcgcagccgccggcgtcgccgccatggacctagtttaagctatgaagaaggacatccctcacactctgaaacagatc

SEQ ID NO: 5163 - DNA, 75 bp, Homo sapiens
gggagccgccgcagccgccggcgctgtggagatttctccacccaggtgaactcctccctcacctccccgacgggg

SEQ ID NO: 5164 - DNA, 75 bp, Homo sapiens
acgagatagcagtgaatctggatctcactgaaagacagacccgtcgcagcatggtgtttgccaggcacctgcggg

SEQ ID NO: 5165 - DNA, 100 bp, Homo sapiens
ccatcacccaccaacaacaccacaataatccacagccaagatgtggacgagtgctcactagcagaaaaaacctgtgtgaggaaaaacgaaaactgctaca

SEQ ID NO: 5166 - DNA, 75 bp, Homo sapiens
catgtattgaaaatggagccagttgtatcgacatcagtggagaacctcagttccagaccccctgagccacagaaa

SEQ ID NO: 5167 - DNA, 82 bp, Homo sapiens
caaaagttcatctccttctgcatccttaactgagaatgaggttgttacactctggtaccgagctcccgaagttcttctgcag

SEQ ID NO: 5168 - DNA, 100 bp, Homo sapiens
gcgagccaagctgcacgatgtggagcgtgcacatgaacttgaacagatgcagctgattttagaatctattcctgttgtacatgaggaagatcgtcaggag

SEQ ID NO: 5169 - DNA, 90 bp, Homo sapiens
aaagcggcgacggcgtcctcaggagctgtggggtcccctgctagaagtgggggactcggcgggctggaccaagcaacactctccctggcc

SEQ ID NO: 5170 - DNA, 83 bp, Homo sapiens
gcagcgggagctggacggcgagcgcgagcggcgcgagaaactctacgaactcgacggggaccccaagaggaaggaattcctgg

SEQ ID NO: 5171 - DNA, 98 bp, Homo sapiens
attaagtgaagagtcatacaaagacagcacgctaataatgcaattactgagagacaacttgacaatatggctcgtggacagcagaaaattcagtctca

SEQ ID NO: 5172 - DNA, 100 bp, Homo sapiens
gaaaaatggcaaccctgtctgtaggaggaaaaactgtatcacgttttcgtgtctgtgtatgatgaccaaccaaatgcgcacaagaagtttatggaaaagt

SEQ ID NO: 5173 - DNA, 90 bp, Homo sapiens
gggaaaagaagcccaaagttttaaagtggctggatctctgctctggtggtgccgaagggcaacacagcagtatccgtgctcatgctgctg

SEQ ID NO: 5174 - DNA, 101 bp, Homo sapiens
cgggaccacacagacaggctgaggacgactttatgaccaagagctgaacaaggtcccgagcgcgagcggagacgatgcagcggagactggttcagcagtgg

SEQ ID NO: 5175 - DNA, 80 bp, Homo sapiens
gttgcgaaggatccccaacggggaggccaacgtgaagaagggcactatggcagacaaagttaggaggcagaggccgagga

SEQ ID NO: 5176 - DNA, 75 bp, Homo sapiens
tagcacctttagtttcacgaaggtcgacgtgggccagcaggagttgtatcccgcattttgtattcacaacggagg

SEQ ID NO: 5177 - DNA, 83 bp, Homo sapiens
gaccatggctgactacctgctgtacaccctcaacaaacaccagcgctttgggtgacttaagagattaaaattaatttggttgc

SEQ ID NO: 5178 - DNA, 100 bp, Homo sapiens
cgcaccgcggcttaaatgatgtattttgtgatcgcagcgatgaaagaacccagcgggtgccgcttctccacccgaggcttccacctccaacgagccatgt

SEQ ID NO: 5179 - DNA, 97 bp, Homo sapiens
gaggaagggaaccaacccactttctcggcgccgcggctcttttctaaaagtattagcctgaggcctgctcagtcgttcctaatgaataaaaatcaag

SEQ ID NO: 5180 - DNA, 74 bp, Homo sapiens
ataccagctcgacaaagatggggttgtcctctttaagaagctgaactttgacctggaccggggcgtgtttccag

SEQ ID NO: 5181 - DNA, 100 bp, Homo sapiens
tgcttctctcgttacctgccttacatcttcagacctccgaacaccatcctttcttccagctgccacacagaagaatcttatggcaagggccttatatgac

SEQ ID NO: 5182 - DNA, 100 bp, Homo sapiens
cagcatccaaccaaaatcccggaattgcgaaagcccagctacgcagagatttgtcagagaacgagtaaagagcctccttcttccccattgcaaccccaaa

SEQ ID NO: 5183 - DNA, 51 bp, Homo sapiens
ggatagccaattgcagtttgaggctcttattcagctgattctgaatcatct

SEQ ID NO: 5184 - DNA, 51 bp, Homo sapiens
ggagaggcctggaggacaccaacatgtttgtgaagtgtggatatgcaggct

SEQ ID NO: 5185 - DNA, 100 bp, Homo sapiens
ctcagaagcagttcaattacacacacatctgtgctggagcatctgccttcggaaaggtacctggcaaagaattctgcaactttgttcagtgccagcgatt

SEQ ID NO: 5186 - DNA, 100 bp, Homo sapiens
gtggatttcgaggagtgtctgaaggactcgccccgcttcaggaaaagcttttgacatcacctatgtgcgtctcaagttccacaccagccgcccggagagc

SEQ ID NO: 5187 - DNA, 82 bp, Homo sapiens
cagaacccaggcccacggaggaagagccgggcagtccctggagcgggccaggaatcttgtcgattggcctggctgctgccta

SEQ ID NO: 5188 - DNA, 98 bp, Homo sapiens
tggctggagacatgagcaagaaaagcctctgggagcagaagggaggctccaagacctcatcaacaattaagaaaaaagcttggccagaccacaagcgg

SEQ ID NO: 5189 - DNA, 103 bp, Homo sapiens
cctttcttggcccttgttcccccaaatgtctgactctgactctcggactgagaaacgcaagaggctgggaggcggcagaatgcagccagaggagggcacaggc

SEQ ID NO: 5190 - DNA, 100 bp, Homo sapiens
tgaaggcagagcgtgtggcatctccacctcaaggacggagttttgctctgtcgcccaggctggagtgaagtggtgtgatcttgcctcactgcaacctctg

SEQ ID NO: 5191 - DNA, 100 bp, Homo sapiens
tccaaatattctacgacttatttatcaaggacgatttctacatggaaatgtcacattaggaggttcagaaaatggtcttgcacagaagcatcgaacacct

SEQ ID NO: 5192 - DNA, 74 bp, Homo sapiens
cgttgtaccatccgcctgtgggacacctaccaggaatcagagatcattgatttcttcctgggggcctctctcaa

SEQ ID NO: 5193 - DNA, 50 bp, Homo sapiens
gcctgttctcgggctgtttggcggcttgatcctctcccagaaaaggtttt

SEQ ID NO: 5194 - DNA, 51 bp, Homo sapiens
acgggagctgagcgtggaggcctcatggcagtagtaatgttggggacacac

SEQ ID NO: 5195 - DNA, 83 bp, Homo sapiens
tctcggcgctgccgtctctggaggagtactggcaacagatgggaaactcttgtctagtgatgtgactcattacgtgatcccag

SEQ ID NO: 5196 - DNA, 83 bp, Homo sapiens
cgggagtgttcgttgtgccagcgactaaaaagagggtgctgataagactgtgaaaggcccagatggactgaccgcctttgaag

SEQ ID NO: 5197 - DNA, 74 bp, Homo sapiens
gaacttcagggtttccaccgttcgttcaagttggttgaatctggcgatgtggaacccatggatatggagggctg

SEQ ID NO: 5198 - DNA, 83 bp, Homo sapiens
tgccctcctgaggcttctgtgctcctggcttcttacgccgtccaggccaagatttggagcaagaggtggtggtggccttcccc

SEQ ID NO: 5199 - DNA, 83 bp, Homo sapiens
cagatcttcacagcacagttcctgggaaggtggagccaccagcctctccttgtcccttcagtctgaatatgttcattactaag

SEQ ID NO: 5200 - DNA, 87 bp, Homo sapiens
ctggccgggggcgcgggcggcggcgccggcaggaaggcaagtgaaccggagcaaacgacttccgatccagtctgcgctgttgcggct

SEQ ID NO: 5201 - DNA, 100 bp, Homo sapiens
cagcatgtcggtggcggggctgaagaagcagttctacaaggcgagccaggaaggtgctcgggtcttcggggcactgggtcccatcggtccctcctcacct

SEQ ID NO: 5202 - DNA, 89 bp, Homo sapiens
tgggcaaacatgaaatccaatcctgctatccaggctgccattgacctcacagcgggggctgcaggcatcagtgtttttctgaccgaagt

SEQ ID NO: 5203 - DNA, 100 bp, Homo sapiens
ggccacggaggcaccatgaagaagtcttactcaggaattgaaagatgttggccatcgtgatcagatggctgcagctagaggaatcctgcagaagaacgtt

SEQ ID NO: 5204 - DNA, 58 bp, Homo sapiens
tggagatgaagcctaagaatatgatcagggttttgacccaccacatcagagtgacaca

SEQ ID NO: 5205 - DNA, 82 bp, Homo sapiens
cagggttcaggcaatgcaaataagggacatcgatggagtgttgcagcgagcaaatagtacagagtatggtttggcctcaggg

SEQ ID NO: 5206 - DNA, 83 bp, Homo sapiens
cagacggattcatttagagctgcggaacaggacgccctctgatgtgcagaggccaagaccgttttgcccaagaaggagaaaat

SEQ ID NO: 5207 - DNA, 74 bp, Homo sapiens
gtgtccagcgacagcttctgggagccctgactataatgtggaatttttccgacagtttatactggttatgaatg

SEQ ID NO: 5208 - DNA, 51 bp, Homo sapiens
aaacattccaagtactctttgagcccccattcactggggagaatagaaaga

SEQ ID NO: 5209 - DNA, 100 bp, Homo sapiens
atatcaggaccgagtggccccgccagaatcctcactatggatgggctcattgaggacattaagcatcggcggtattatgagaagccatgccgccggcgac

SEQ ID NO: 5210 - DNA, 82 bp, Homo sapiens
cccgctcttccctgggtggactggaggaggccgcgccgatgaacctgaccgaggcttctcctacgctggctcggtggccatc

SEQ ID NO: 5211 - DNA, 100 bp, Homo sapiens
tcctatttgaagtatttgacgaaaatagactgggaatgaccctgcataaaaaggcagctgaagatagactggcaagcacaggctcagggcagtcatttct

SEQ ID NO: 5212 - DNA, 102 bp, Homo sapiens
aaaaatttggcagataatcattgggcaaaaacttgtgagggcgaaggtcgtattgaatggtgttgtagggaaaaagacctcgatgaagttctgcagacccac

SEQ ID NO: 5213 - DNA, 82 bp, Homo sapiens
catgtccagcatgaatcccgaataatgaggagcgggaaggcctcctgcaccctggagaccgtgtgggaagacaagcacaagt

SEQ ID NO: 5214 - DNA, 90 bp, Homo sapiens
gctctttgtatcagaaaactggatttgttttcattccaaagtctttggaaaagacacaaagccacaagtatatggttatgatgacttgca

SEQ ID NO: 5215 - DNA, 100 bp, Homo sapiens
aggctggaagttcaacagaaggcaaatacgaagacgaggcaaagcacccagctttcttcactcttccggctgagtcatcactagagagtgggaagggcag

SEQ ID NO: 5216 - DNA, 75 bp, Homo sapiens
gtggtttttcggatcatgtctggtggctccgcggattataacagttacagaatgtctgaaggggacagtgtggga

SEQ ID NO: 5217 - DNA, 90 bp, Homo sapiens
caaagtcaagccagtcctcatgaactcaaagctgcctcttgatgtcctgggcagggaaaaagctgctggcaatcttggagcaaggctttg

SEQ ID NO: 5218 - DNA, 98 bp, Homo sapiens
cagctatctcgggagaaacaacaactgctacatctgttggaggagccaactagcatggaagtgcagatggatgatgcttggaagtataatggagatgt

SEQ ID NO: 5219 - DNA, 76 bp, Homo sapiens
gtgagagcaaccgtgaaccggaaccggatctccacggccaggagggtccaggggccttcctgctgtgctggacgcc

SEQ ID NO: 5220 - DNA, 90 bp, Homo sapiens
agtgccccaaatgctgcagcatcaagcccgaccgagcccaccactgcaggcgcttgaagaggctcagaaagctatccaacaactctttgg

SEQ ID NO: 5221 - DNA, 100 bp, Homo sapiens
cgcagggttacatatattttcacaaggctggacggcagtctggaaacgaccaatgagatcttggactctgcctctcacgactgccccttagtcactcaga

SEQ ID NO: 5222 - DNA, 48 bp, Homo sapiens
aaaacttcacgtagcggtgaagttttatcttcaagacactaaaagtag

SEQ ID NO: 5223 - DNA, 100 bp, Homo sapiens
gctatgtacgccctcttcctcctggccagcctcctgggcgcgggatactgaggaagatgaggaggaagatgagaaggacaaaggaaaactgaagcccaac

SEQ ID NO: 5224 - DNA, 75 bp, Homo sapiens
cagagagagaggtggacagatctgagagatactgagtgtactaatggtcacttgatgtgcgctggctgttttatc

SEQ ID NO: 5225 - DNA, 90 bp, Homo sapiens
ctcgatgaaattttaagacttgcccaggaaaatgaagaataactcaagtcacctgtactggaaatcagtttgctgaaattaatcaacgat

SEQ ID NO: 5226 - DNA, 98 bp, Homo sapiens
gcaaccatgtgtggtggaaaaatgctggacaaattgagatgagcttgatcctggatagtgtttgtatgatgtgcacacgtctctgcaaatgcttgttt

SEQ ID NO: 5227 - DNA, 82 bp, Homo sapiens
acgccgcctggcaggccctgcgcaccaggtatcagaagcatgtgcacacgtatcgcattctgcctgatggagaagatttctt

SEQ ID NO: 5228 - DNA, 100 bp, Homo sapiens
agagagagcagagacagctcgtctgcaatggctgccatccggaagaaactggtgattgttggtgatggagcctgtggaaagacatgcttgctcatagtct

SEQ ID NO: 5229 - DNA, 90 bp, Homo sapiens
cgagaaggtgtgcatggatctgccaaattttatatttcagatttgtggaaggagcctgcagacagggggatttgcctgggaaggagaagt

SEQ ID NO: 5230 - DNA, 100 bp, Homo sapiens
gtctacctttgtggggcttacaggagttgatccctgaattttattatctccctgagatgtttgtcaacttcaataattataatcttggagtgatggatga

SEQ ID NO: 5231 - DNA, 131 bp, Homo sapiens
cgcttgatccccggccgcggggccaggaagtcggagtttgagccccggaggcagagcggctgccatgccttgccaacattccactaacccccgagactcagcgggaccaggagcggcggattcggcgggag

SEQ ID NO: 5232 - DNA, 88 bp, Homo sapiens
gatgatgcaatcaaagctcgacttctcaatcccaagtggccaaagggatgatcatggtgattttactgctgcttgtggctatcgtggt

SEQ ID NO: 5233 - DNA, 90 bp, Homo sapiens
cttgaatcccttgaccttactgatgagaaaaagggcactgtgtttagtcttgagtcagaggaggaggaataccctggaatcactgcagaa

SEQ ID NO: 5234 - DNA, 97 bp, Homo sapiens
tagaagaaggaatcatatatggctcacatgtttatgttctgacttcgtattaggccggaaggtggtggtcgtacgctgtgaaggcatcaacatttct

SEQ ID NO: 5235 - DNA, 154 bp, Homo sapiens
cgggccctggacctactccggggcctgccgcgtgtgagcctggccaacttaaagccgaatcccggctccaagaaaccggacaaagcaggacctcataaggaaatctacccctatgtcatccaggaacttagaccaactttaaatgaactgggaa

SEQ ID NO: 5236 - DNA, 73 bp, Homo sapiens
cggcacagcacgctcgacttcatgctcggcgccaaagactgtgccctgtccacggtgcctcctgcatgtcctg

SEQ ID NO: 5237 - DNA, 100 bp, Homo sapiens
gtcagtgtagcttcagctccaccatcgtccatgtgggagacaagaagcccccggagtcgggttgcccccaagtttcctggcagtgtgtgatactgaggag

SEQ ID NO: 5238 - DNA, 80 bp, Homo sapiens
gcaagcgggagtcggggatagtgtcatcggttctgatggtcctttggctaccagcaaaccagtccctgcagaaaagtcag

SEQ ID NO: 5239 - DNA, 50 bp, Homo sapiens
gttgggggcaaggagaagatcctggagttggcctgggccctgccctggag

SEQ ID NO: 5240 - DNA, 83 bp, Homo sapiens
tgaagagtcagatacatgaaccagagaacttaatgcccacacagatcattcctggaaaagcacagaagctgtaatgttattaa

SEQ ID NO: 5241 - DNA, 83 bp, Homo sapiens
tggagagttgaatgccagccaccagccatgggtgaaagtgggagatacattggatcttctcattggagaggataaagaagcag

SEQ ID NO: 5242 - DNA, 89 bp, Homo sapiens
agtactctatatgaacaatccgtctggatcacggatgtaggaagtggacactctgttcctgcagttttgcagagcacatttcatgccca

SEQ ID NO: 5243 - DNA, 80 bp, Homo sapiens
gttggccccggcggcgggagcgcccccgatccggacaaagaaacgagcgctcggttatcagtgagctgaatggaaaaaac

SEQ ID NO: 5244 - DNA, 75 bp, Homo sapiens
cgtcttcccgccgtccccggctccaggagaccccacgatgaagtggccattctgcctgcccctcagaacctctct

SEQ ID NO: 5245 - DNA, 100 bp, Homo sapiens
ggacgagcaatggctgtcgtccatctcgcagtacagcggcaagatcaagcactggaaccgcttccgagacaggctgtggccaggccagctgggctcgggg

SEQ ID NO: 5246 - DNA, 74 bp, Homo sapiens
cgactccatggccaactccttcgtgggcacgcgctcctacatggctctggtgccgacaagaaagccgaggctgg

SEQ ID NO: 5247 - DNA, 50 bp, Homo sapiens
ttggagcgtccgccatgaggagaagaatgaagactattctcagcaatcag

SEQ ID NO: 5248 - DNA, 50 bp, Homo sapiens
gagaaatctcaacaggagcccactcagatcttcgggggcctggtgtggat

SEQ ID NO: 5249 - DNA, 100 bp, Homo sapiens
tgcaggccccatcaggtgcagagctgtgggtctggttccaagacactgtcactgaggcttttgccaagaggcagcagcagctgaccgccatgaaggtgat

SEQ ID NO: 5250 - DNA, 110 bp, Homo sapiens
tcaccgcttacctgccggctatgtcggaagacgacgaggactgctatggcaatacaatgcagatcttcgtgaagactctgactggtaagaccatcaccctcgaggttgag

SEQ ID NO: 5251 - DNA, 76 bp, Homo sapiens
cagcaagatgcggaggctgcctcggcggagcagaggaaccacacgctgatcatgcaacttgagttggtggaaccaa

SEQ ID NO: 5252 - DNA, 100 bp, Homo sapiens
caagaaggccctggacacagcaatatctctgggctttcacagctttggagtttaacccttctgccaatccagaggcaagcacaatattccagaggaactc

SEQ ID NO: 5253 - DNA, 100 bp, Homo sapiens
caaggagctaaagcagcgtgcgttcagccctgggagcccacccacctttgggttcctgttggacatcgatggagtgcttgtgcggggccacagagtgatc

SEQ ID NO: 5254 - DNA, 76 bp, Homo sapiens
cggttacaggaccctgactgtggccctcttcaccctgatctgctgtccagcaagaggtggaaacatacagaagaag

SEQ ID NO: 5255 - DNA, 51 bp, Homo sapiens
agcctccagagtagctgggattacagaggaagaattctcctgcttgtggca

SEQ ID NO: 5256 - DNA, 75 bp, Homo sapiens
cgcctctaagatggcgacgcctttggcggtaaattcgggaagaagaatttggtgttgatgattcttattctgaac

SEQ ID NO: 5257 - DNA, 97 bp, Homo sapiens
tgaccctaatggtctttttgttcaagataaagtgattttttgcctttgttgattaactggacaaattcaggtgagaaataagaaaggctgctgactt

SEQ ID NO: 5258 - DNA, 100 bp, Homo sapiens
gtcagactctgcgaaaggccgagagaagctggtcctgctcacgagagaaaaaggaggtgctggagaatctggtaaaagcaccattgtgaagcagatgagg

SEQ ID NO: 5259 - DNA, 90 bp, Homo sapiens
agcgcgtccaggcctgacagctctgcggctcgggccctgaggtctgccatcatggatgttctcgcagaagcaaatggcacctttgcctta

SEQ ID NO: 5260 - DNA, 100 bp, Homo sapiens
gactcgaaggaggagaaagcgcagtcctgaaagtcaggtcacgattatgggcccacaccttcctccagggtttgtgtttagtgaatcagagggatctgca

SEQ ID NO: 5261 - DNA, 100 bp, Homo sapiens
ggcgactagcggcggcgggagcggcgccgagaggccgtgcgggacgcgggcgccaggaccggccgaacgcagagactccgtgggaaggaggcttgtttaa

SEQ ID NO: 5262 - DNA, 50 bp, Homo sapiens
catggacgcgtccctggagaaggaccgccgggagagcctgcccacctccc

SEQ ID NO: 5263 - DNA, 90 bp, Homo sapiens
gtcctctgctgccagtcccctgccccgggcaaagcccatctggtccgccgagcaggtgtggtggctcacgtctgtaatcccagcactttg

SEQ ID NO: 5264 - DNA, 83 bp, Homo sapiens
gtcccacttgttcgcggcctataggtcaacaacggttccagcctcagggatgagtgcatcacaaacctactggtgtttggctt

SEQ ID NO: 5265 - DNA, 98 bp, Homo sapiens
ggttattcttaatcctgtaaatacgaatctttccaaaggagatgcccgcattatggatccaagcctgttgagagaaagggagctgttcaaaaaacgag

SEQ ID NO: 5266 - DNA, 98 bp, Homo sapiens
cggggggctggcagctacaccattatggtcctctttgctgaccaggccattgcccactacgagcagtctgcagactactacaaaggcgaggagtccaa

SEQ ID NO: 5267 - DNA, 80 bp, Homo sapiens
tgaaagactcccttccatgaacaatggtacttggactcagctctggttggtgtcagattatcatgagcatggatcccttt

SEQ ID NO: 5268 - DNA, 89 bp, Homo sapiens
gcattatggatttggtggagaaacctggccaagagcgacctgcgggttgggctgagtctgtccttgaggaagatgcatcggagcttgag

SEQ ID NO: 5269 - DNA, 50 bp, Homo sapiens
cccctcggacggccacgagactcgggaaaaattccggaactgttggcttc

SEQ ID NO: 5270 - DNA, 82 bp, Homo sapiens
cactgatcacctgcacgggcagtgatgtgctgccgaaaagaaccaacttccctgggatcagctccacagaccgcgggggcct

SEQ ID NO: 5271 - DNA, 101 bp, Homo sapiens
gacaagggaaatgcagctctagctgaggcaccattcaggaagattacctaagagagctgctgacaaccatgggggatcggtttacagatgaggaagtggat

SEQ ID NO: 5272 - DNA, 101 bp, Homo sapiens
accgcggcgagaagccccagctgcactacgcgatggactagaggcttttaccagatttcttaaaactgaattcagtgaagaaaatattgaattttggatag

SEQ ID NO: 5273 - DNA, 80 bp, Homo sapiens
ggacatcgtctcctgtgtggcgatggtcttcctgctggggctcatgtttgagcagcctcccgcgacgatgcccctcaacg

SEQ ID NO: 5274 - DNA, 82 bp, Homo sapiens
cctgcaggtcccggaaggtccttagggaggaccccagacaccggagactgggaaatggaggagcatattatttaatatctag

SEQ ID NO: 5275 - DNA, 100 bp, Homo sapiens
aaaagtggaagcgaagccgaaaaaggcagcagcgaagaaaggaagctgttgaagttattgaagtacctgttgctatattctaagaaattaaaatgtccag

SEQ ID NO: 5276 - DNA, 100 bp, Homo sapiens
cccagtgagggtgtacaaatacccctttgaattaattatggctacggaagtgaaaatgtgacaggattggacctttcagatttcccagcattagcagacc

SEQ ID NO: 5277 - DNA, 100 bp, Homo sapiens
ggagtcatggggtgtggaggggaggaaaggaaagcaaatgaagaaacacccctgccgccagtgtgacaagtctttcagctcgtcccacagcctgtgccgg

SEQ ID NO: 5278 - DNA, 99 bp, Homo sapiens
acctcgggctgcgggagcgcgggcgccctggggtcctcggattgcagcatgagaaagccgaactagaacagcatcttgaacaagagcaggaatttcagg

SEQ ID NO: 5279 - DNA, 99 bp, Homo sapiens
cccagactgccctccacttgtgcagaagggtgaatgccatgtcaactttgttcggaaggttacaaaagtggatgaaaccagagggatcgcacatgttta

SEQ ID NO: 5280 - DNA, 83 bp, Homo sapiens
tctgcttggaggggatgtggtttccgttaagctggacaacagggactggtgattgcagctggaagtgcccatgaccgagctgg

SEQ ID NO: 5281 - DNA, 100 bp, Homo sapiens
ttcagttgaagtcagtggcacatctgccctggaaggccttcacctacaagatacttctgggaaccccaggcgtcagtctcctcatctgtaaaggagagag

SEQ ID NO: 5282 - DNA, 74 bp, Homo sapiens
gttggacattagctcccgagcgctggccttctggacatatcaggagaagatttacaaatctctgcctggatgct

SEQ ID NO: 5283 - DNA, 87 bp, Homo sapiens
cagctacggtccgcggctggggttccctcctccgtttctgtatccccacgaggataaaagaatcagagtgtctcaacccttgacaag

SEQ ID NO: 5284 - DNA, 100 bp, Homo sapiens
gagagcaagcagggaaagagagcgccaggtgcttagcaggcaaccactgagaaaacggaaccgaatagtcaagaggacaagaatgatggtggaaaatcaa

SEQ ID NO: 5285 - DNA, 75 bp, Homo sapiens
caccgcgcactcggagatgcagccgctggctactgcagcactggggtgtcagttgttggtccgacccagaacgct

SEQ ID NO: 5286 - DNA, 50 bp, Homo sapiens
cgcgaaggagaggccctagaaccgaatggaaactgaaagtggaaatcagg

SEQ ID NO: 5287 - DNA, 88 bp, Homo sapiens
tggaatccaatcctctgcttccaggacaagtcctgcgcttggggatcctctgtacgcccgttcactgcttataggctttatactgtgg

SEQ ID NO: 5288 - DNA, 112 bp, Homo sapiens
cccagaatccaccgtcaggcataaattgattattcctcgcccacatctgtgccagtgctcaattacctgtggcaaaggaatgcagtcccgtgtaatccaatgcatgcataag

SEQ ID NO: 5289 - DNA, 98 bp, Homo sapiens
cgcccggccgcgggagcctcgtggctgcgtcaccgccgcccccccagacaagatggacaccgcggaggaagtggtatgtgtgcaacagagagaaatta

SEQ ID NO: 5290 - DNA, 82 bp, Homo sapiens
cgagggatttattcccaagaactacatccgcgtcaagccccatccgaaggtgctcgggtcttcggggcactgggtcccatcg

SEQ ID NO: 5291 - DNA, 80 bp, Homo sapiens
ctggtcgatgaagaggatgatgtttttggtgaagacaggtgatttggcttctgcacagttaggaggagcaccaaaccgat

SEQ ID NO: 5292 - DNA, 60 bp, Homo sapiens
aagtttctaggaaaggccggacaccagaacaccttccaccatgaccacctcagcaagttc

SEQ ID NO: 5293 - DNA, 100 bp, Homo sapiens
ctggaggagctctccagcccggtggcagatggaagaactggagcaaggcctgttgatgcagccatgggcgtggctacagcttgcagagaactccctcttg

SEQ ID NO: 5294 - DNA, 90 bp, Homo sapiens
cccaagaagaccattcagatgggatctttccggatcaatccagatggcagccagtcagtggtggagtgttctcaggcgctgtggtctcac

SEQ ID NO: 5295 - DNA, 100 bp, Homo sapiens
gcgaaattggtcattctcgctaacaactgcccagctttgagaatggctattcaagtggacaagttcaactttgagagtttcccggagtcccctggggaga

SEQ ID NO: 5296 - DNA, 100 bp, Homo sapiens
tggctgcccccaccgtctccaagccacacccactcgcccgggtctatggccacggtcggagagtggtcctgtgtgcgctgcaccttcctgaacccggccg

SEQ ID NO: 5297 - DNA, 87 bp, Homo sapiens
gaggttcgagtgttgcagagcctgcggggcaagatctgttcttcacacacccccattcggcgtagtacccagagagctcaagatgtg

SEQ ID NO: 5298 - DNA, 100 bp, Homo sapiens
cagatcttttcaaattccctttctttgaagccatatgttggtttgtagccaaaaacttgctggaaaccctgaaagctcctcaaccaaaagcagccccgag

SEQ ID NO: 5299 - DNA, 100 bp, Homo sapiens
gcatccagtaccaagagttggtgggagacgggtgaggtacaggctcagtctgcggccaagactccgtcctgcaaggatatcaatgcttacaattgtgaag

SEQ ID NO: 5300 - DNA, 51 bp, Homo sapiens
gacgagtacatcgcaaggatggttcaaccaggatggagcagagcccagcgc

SEQ ID NO: 5301 - DNA, 101 bp, Homo sapiens
tccgctggatgaacaacctgctgatgagggaggtgcccctgcgttgtaccatccgcctgtgggacacctaccagggttgagttccagaataaattctacag

SEQ ID NO: 5302 - DNA, 96 bp, Homo sapiens
gtggacaaagcagtacctgaaacagaagatgtgcagggatccttcaaaccaaaaatgtggtggaagaaagaaaaccgtgtctttcagcagcatgcc

SEQ ID NO: 5303 - DNA, 98 bp, Homo sapiens
tcaagatgtggatttaccttatcccctcaacaacttttcagtggcaagaatacggggtgctttgcattcaggaatacagaaaaaacagcaaagtggag

SEQ ID NO: 5304 - DNA, 97 bp, Homo sapiens
gggcgccgagccggaggaaggagaaagggctattgcaagacacgaagtccgagaaattgagcagcgacatacaatggatggccctcggcaagatgcc

SEQ ID NO: 5305 - DNA, 83 bp, Homo sapiens
cccttggccacctccccaggtgatgcctgaagctcaagggactgtgtccaccctcagcactccttgctcaagacccctcccca

SEQ ID NO: 5306 - DNA, 82 bp, Homo sapiens
gacaggaattgagagtcacagaggaaggacagtggagtctggcatcttattgtttggtgccctggttgtcagatgttggaaa

SEQ ID NO: 5307 - DNA, 76 bp, Homo sapiens
gggtccctgaagagggaagacacgcggaaacagattgactggggcgactttggggtagaggcagtgtctgagggga

SEQ ID NO: 5308 - DNA, 86 bp, Homo sapiens
aaatgtctgactctgactctcggactgagaaacgcaaggtcactatcatatgacaaaggctttgccgcagttcatcttcctccctg

SEQ ID NO: 5309 - DNA, 83 bp, Homo sapiens
cttcgccttcgtgcgcttcgaggacccccggttagctttatacgtctacgaatatttactgcacgtaggagcacagaaatctg

SEQ ID NO: 5310 - DNA, 80 bp, Homo sapiens
aaagaagcccccatactcccggtgaaaaagacttaattcagtgcacaaatgagatgaatgtgaacatcccacagttggca

SEQ ID NO: 5311 - DNA, 110 bp, Homo sapiens
gacatgttcacgcacgggatccagagcgccgcgcacttcgtcatgttcttcgcgccctgggcgccctgcgtccggcagaggaggcgagcatcccgctcaggtgatgagga

SEQ ID NO: 5312 - DNA, 50 bp, Homo sapiens
gaaatgtgtcatcgaaagccagactgggctggcttagatgaagatgaaga

SEQ ID NO: 5313 - DNA, 97 bp, Homo sapiens
cccagggccgggaccgactcttcaggttatcactgtgaatataagatgcggacaggaaggaaacctgatggctgtgctatttgcttcaaacattcca

SEQ ID NO: 5314 - DNA, 98 bp, Homo sapiens
tctgcagaagacgcagggctcaagatgactctataagcatgcccagcgtggtaagtgaacaagaagcttacctcctgagtgccattggaaggaggcga

SEQ ID NO: 5315 - DNA, 50 bp, Homo sapiens
tgtggcagtccatggcctggggactgacctcctgccccccgaggtctgca

SEQ ID NO: 5316 - DNA, 100 bp, Homo sapiens
acatactgaatgatctctacatctcagactactgtgtgtggattcagaaagtcaaacactcctagaatatgcagagaaatggaaaacttcagaagatcct

SEQ ID NO: 5317 - DNA, 74 bp, Homo sapiens
aataagattttaattgaagctggaaagcttggacttcttgaactcagtgaaaatagaatctttggaggtctgga

SEQ ID NO: 5318 - DNA, 100 bp, Homo sapiens
atttttatatgatgaaactcaatacggaacagagactctttggtcaaaagatatggcgccatatcagggtagagatcttttcctagcaagctgttcacaa

SEQ ID NO: 5319 - DNA, 82 bp, Homo sapiens
accatccatgcctacgtgggcttcaccatggacaagctggtgcagaacattgcgcggcagaggactacgggcactacgaaga

SEQ ID NO: 5320 - DNA, 80 bp, Homo sapiens
gtcttcggtggactccttcggcagtccacccaccgccgccgcctcccagatgtgccggtgacttcagcgccagtcaccgc

SEQ ID NO: 5321 - DNA, 100 bp, Homo sapiens
tgaagagagagaagagggcagagccgtgcatggggctgctccccaggacctgagcaggaacctggagttttcagatgatgataattccgaagaaggcttc

SEQ ID NO: 5322 - DNA, 83 bp, Homo sapiens
gtgcccaccgcgcactcggagatgcagccgctggttttaaaatcaaagatgggaaaatcggagaaaattgcccttccccatgg

SEQ ID NO: 5323 - DNA, 111 bp, Homo sapiens
ggccggcccctctgggcggcctgcgggggcggcgcagttgcgaaactgagaatcaaacattttaagtccagtgcaggatggaacaaagaaacctcagattgacagcaacaa

SEQ ID NO: 5324 - DNA, 75 bp, Homo sapiens
tgaaccaggtcatgctccaaatgtcaaggtgttgaaatgcatctcagaggtgcaggccaacaatgtggtcctggg

SEQ ID NO: 5325 - DNA, 50 bp, Homo sapiens
cacctcccggtgaagatcctgcagccaggctgatcagctgaccgaagaac

SEQ ID NO: 5326 - DNA, 75 bp, Homo sapiens
agccgcttgctagaggttgaggacgctcagtgactagcatgcagatacccatgctctgactttctgcccctccac

SEQ ID NO: 5327 - DNA, 75 bp, Homo sapiens
gtctgtctgtccgtggtggatctaagcagaattacctgattctaggacaaaggaaattgaagccattcatgcaat

SEQ ID NO: 5328 - DNA, 100 bp, Homo sapiens
tgcctctcttggagcaaatgatgaagacatccggaagaaggccctgggaggagcggggacactgaggacctctctccaaattggcctctcaactcacagg

SEQ ID NO: 5329 - DNA, 100 bp, Homo sapiens
gtaaataccaagcccgagaagacggaggaggactcagaggaggttaacgtccctaaaacccgccggactttctgtaagaagtgtggcaagcaccaacccc

SEQ ID NO: 5330 - DNA, 100 bp, Homo sapiens
aaatgaacagctgaccctacatgatgagaggtttgagaaggaatccatgtcagtgaacgcctcacatggaaaaggattttcccgacctgctagaccagca

SEQ ID NO: 5331 - DNA, 101 bp, Homo sapiens
gacccaccaatggaagcagctggcttcactgctcaggtcacgcatgaagggagcaccgtggagaagacagtggcccctacagaatgttcataggttctcaa

SEQ ID NO: 5332 - DNA, 100 bp, Homo sapiens
gacttctaggagcctggggttcggcgctatggaggagctcgatggcgagccaacagtcactatcttggaaggagaccaagccatcctgcagagaataaag

SEQ ID NO: 5333 - DNA, 74 bp, Homo sapiens
gggagacctgctgcacatcgtcattgacatccctatcaatgtctacaaggcacaatcattagcggcatcacttt

SEQ ID NO: 5334 - DNA, 96 bp, Homo sapiens
tttagagtggactgtgcccccagcagcccccaagttctcagtagtcttcagtctcctgttgaccggaactcccatccagaacagcctccaagagct

SEQ ID NO: 5335 - DNA, 90 bp, Homo sapiens
ggattttttgtacgtcctgatctaggacccaggttgtgcagtgcctatggggatgatgctcagttcgagatggacatctgactctcctgc

SEQ ID NO: 5336 - DNA, 82 bp, Homo sapiens
atggaacaccatatggttacagcacagctgcccctgcctatggttccagcaacagatagaaatgctttaagttcactctggg

SEQ ID NO: 5337 - DNA, 99 bp, Homo sapiens
gcaaggacttcgagcagcctctcgccatttcccgggtcaaaatgcagatcttcgtgaaaacccttaccggcaagaccatcacccttgaggtggagccca

SEQ ID NO: 5338 - DNA, 82 bp, Homo sapiens
tcaaaggaattctgtcttcacaagcagaaggtttaagaattgtttaagctgcatcaatggagcacatacagggagcttggaa

SEQ ID NO: 5339 - DNA, 100 bp, Homo sapiens
ggttgacatccggaatagtgaagaacactatgataccctggcaactggaataatttattttcatcgcttctatatgtttcattccttcaagcaattccca

SEQ ID NO: 5340 - DNA, 50 bp, Homo sapiens
agcctcctgagtagctgagactacaggtaatgagaggccctaagatccca

SEQ ID NO: 5341 - DNA, 100 bp, Homo sapiens
aaagtggtgggatattatagatattcagaagaaggatgctgttaaaagacctttccaaagtgaaactgatgagatttgatgatccactgttggggcctcg

SEQ ID NO: 5342 - DNA, 90 bp, Homo sapiens
ctgcccagcagaatttgtatagagatgtgatgttggagaactacagaaacctggtctccctaggaggcatacaccatacatggtacagcc

SEQ ID NO: 5343 - DNA, 100 bp, Homo sapiens
ctatgaggctatccgcagcgagatggagcagctcaaggaggaagaaatgttggctatttggcgatgagaggtggtgaacagtgaccatactggtatacaa

SEQ ID NO: 5344 - DNA, 74 bp, Homo sapiens
aggcaagcaggacttccgggaggaccaggatgctgccttcttcaaggttatagatgtggctcccgagcttctgc

SEQ ID NO: 5345 - DNA, 74 bp, Homo sapiens
gacccctgtgccttgtatgcatctgaggactcatctgatgatgtgagaagagttcagaggagggagaaaaatcg

SEQ ID NO: 5346 - DNA, 75 bp, Homo sapiens
cactttcaacaggcaaaaatgatattggaaaatattcctaacccggaccatgagtgtaaggcaaacattggtggg

SEQ ID NO: 5347 - DNA, 74 bp, Homo sapiens
cccaggtgtaagcgcagaaagcaggcgaacccgcggcgcaataacggtccgcgggagagctgtggggcttggtg

SEQ ID NO: 5348 - DNA, 100 bp, Homo sapiens
agctaacaggatcctgacatttaattgtctctgcctgagcattctgtcaactttggaacttgtatgagtacaaggtgaatatcttaaccagacttgccgc

SEQ ID NO: 5349 - DNA, 75 bp, Homo sapiens
cgagcggtgactccccgccgctcccgggggccgtgacgatgatgattattctccaccgtctaagagaccaaaggc

SEQ ID NO: 5350 - DNA, 100 bp, Homo sapiens
ctgaggacacacccaggaaaagactcaggacggacaagcacagtcttcggaagttctgggaggtgatcagtgatgaacatggcatcgaccccaccggcac

SEQ ID NO: 5351 - DNA, 76 bp, Homo sapiens
ccggtgcccatccagtccggtgccatctgaagcccccttcccagttatttgctggtataaaggatggagaaagcct

SEQ ID NO: 5352 - DNA, 74 bp, Homo sapiens
ccaaattgcagaagtcgaagagggcccagtatggttggtctgtaaacatgttggcagataaattgaacatgact

SEQ ID NO: 5353 - DNA, 75 bp, Homo sapiens
gccgatccagcctgcggagcctgtggggcagggaatggcatttactttacaagaacgacaaatgcttggtcttca

SEQ ID NO: 5354 - DNA, 100 bp, Homo sapiens
gcagcagggaaaggcaaaggcaaaggcggctcgggagattcagccgtgaagcaagtgcagatagatggccttgacctgaacccgcggcgggacatctcct

SEQ ID NO: 5355 - DNA, 113 bp, Homo sapiens
cctcgctctgagctgcgcctggacctggttctgccttctggacaatctttccgggctatggaacacacctgatgaatcatttgaaagaatatcacataaagcatgacatcctg

SEQ ID NO: 5356 - DNA, 75 bp, Homo sapiens
gccatattgtgtcttccccggccggtccctcgcctcccggccgagctgacgattctcgctgaagtctgttaattc

SEQ ID NO: 5357 - DNA, 100 bp, Homo sapiens
ggccggtcagcaagcagctctaccgccgcctcaactgccgcctcgcctactcactctggagccatccgagtgaagcctgacaggaccggtgtggtcacgg

SEQ ID NO: 5358 - DNA, 98 bp, Homo sapiens
cctggatcctgtgcaggacaaaactcctctctatagtcaactccttcaagcatataagtggtcaaacaaggtcccattgatcggaagcctccccgaag

SEQ ID NO: 5359 - DNA, 100 bp, Homo sapiens
gcaccttcccctgccttggaaagctggaacagtgaaccatggagctgtatttcggtgaatatcaacatgtgcagcaggaatatggggtccatctgagact

SEQ ID NO: 5360 - DNA, 74 bp, Homo sapiens
tgcgcgcgatgctggaccagttgatgggcacctcccgggacggcagaatccagagaccacatttgaagtatatg

SEQ ID NO: 5361 - DNA, 98 bp, Homo sapiens
ctcaaaccacttctcagacaagttccatcccacctttgagtcaggtgatttgaagatattaaagctagaaattggaactagaaaatcaaaagaattca

SEQ ID NO: 5362 - DNA, 108 bp, Homo sapiens
tatgcaaggccacgacccacgagatcatggggcccaagaaaaagcacctggactctgtgtaaatgagtatggaagattatgatttcctgttcaaaattgttttaattg

SEQ ID NO: 5363 - DNA, 82 bp, Homo sapiens
agcaggcgctcaccatgttccctggaggtgtcgtgaaaactacccctaaaagccaaaatgggaaaggaaaagactcatatca

SEQ ID NO: 5364 - DNA, 100 bp, Homo sapiens
cagagccattggagggcgcggggactgcaaccctaatcaggcagcctgcttctgcaaagtggtacgatcgaagggactatgtcttcattgaattttgtgt

SEQ ID NO: 5365 - DNA, 75 bp, Homo sapiens
atttgctcttacgtatttgtgtgacttgactcttcaaacacaaaggcatgtgaaactattgaaccttcctgctag

SEQ ID NO: 5366 - DNA, 101 bp, Homo sapiens
tggtcctgggagccttttccttcggagcagcagccctgtccggcatctgtcttgagctcccagcaaggcagttgcagtggtgcagaatggctgacctcagt

SEQ ID NO: 5367 - DNA, 75 bp, Homo sapiens
attattcagcgactagtaagcctatgtcatttcatccaccacattacttagactaccatggctgcaggagtcttg

SEQ ID NO: 5368 - DNA, 100 bp, Homo sapiens
ctgacctggagatgctgcctggtggggatcagacagagattggagagaaggtggggtggaagacaacccgtgagtattacaccttcatgtgggttacttt

SEQ ID NO: 5369 - DNA, 90 bp, Homo sapiens
acctataacattttttatgagaaccagaaaaatctgcatattttatatggagagggcttccgttacaagatgaggtctgtgtatgctcac

SEQ ID NO: 5370 - DNA, 100 bp, Homo sapiens
aggcgattccgcagtccccccgttccctggaggtcctgtggaatggtcactggtgcagtcacgacagtaggtgtggcagcaggcctgctggctgccgcaa

SEQ ID NO: 5371 - DNA, 90 bp, Homo sapiens
cgacctgcagggactggcagacccgtagctaagacgccaggatttcctggaagcagagaaatgagaatgtaactggtcactacatttccc

SEQ ID NO: 5372 - DNA, 90 bp, Homo sapiens
cggacgtgcagtaccaagtgtcggcacaactctaaggtgaacaggagagagacaggccaaactaggagcccatcacctaaaaaagaggtc

SEQ ID NO: 5373 - DNA, 51 bp, Homo sapiens
cctctctttgcagagccatacaaagtttgttccattggcaagctacaataa

SEQ ID NO: 5374 - DNA, 76 bp, Homo sapiens
cgacaacagcctggcgtccgccacggcagaagctcctcctggggtagagacagatcttattgatgttggattcaca

SEQ ID NO: 5375 - DNA, 75 bp, Homo sapiens
aagggaggaaatagtggcaggtgacagtctgcatgtgcagttttcaggttgatgacaacaagaaactaggagaat

SEQ ID NO: 5376 - DNA, 74 bp, Homo sapiens
ggagttggagctgcagcggctttttgaggaattccgggactcagatgggtccgcaagcaggtggtgaacatccc

SEQ ID NO: 5377 - DNA, 75 bp, Homo sapiens
ctatcgaaggacatgaagactaccacatgatgaaactggcgatggaatatgagaggagccctctggaaagaaaag

SEQ ID NO: 5378 - DNA, 90 bp, Homo sapiens
gcccctgggcatcaccaacatagccatcgacttcggggagcaggtcgttgaggacttccacatggagattggcacaggaccagactcaag

SEQ ID NO: 5379 - DNA, 100 bp, Homo sapiens
cagggatcaaaactcattcgaaaagctaaagaggcaccattcgtacccgttggcatagaatgtcaagctaaccaggcgtccgctacttcagaagagtgta

SEQ ID NO: 5380 - DNA, 99 bp, Homo sapiens
cactatttgaaaattcatgctgaaaaactgagtgaatatgatcagatttctccaccaaattctcagcctgataaggctcaaattgaaattattccatgc

SEQ ID NO: 5381 - DNA, 75 bp, Homo sapiens
cagcagggagacacatgtttgtctttcagcctactttggggataaaggattatttggtcttctggatttggaggc

SEQ ID NO: 5382 - DNA, 98 bp, Homo sapiens
tggcgtggttgacaagaaagaggagacgcagccgcccgtggcgcttaagaaagaaggtggcgggacaggcttcattgggacagccctaacccagctgc

SEQ ID NO: 5383 - DNA, 82 bp, Homo sapiens
gttccccgcgctgcggcctggcggcttccaggcgcactaccgcgcttctaagtgccagatgatggaggagcgtgccaacctg

SEQ ID NO: 5384 - DNA, 100 bp, Homo sapiens
cgcgagttcctgcgcggctgcggggcttccctgcggctggaggtacttggaaaaatggacaaggattgtgaaatgaaacgcaccacactggacagccctt

SEQ ID NO: 5385 - DNA, 100 bp, Homo sapiens
aggagcacagagagttcagagcaaaaactaacagggatcttgaaattaaagatcaggttataccttattggtgtggacgttgtctaaatttcggtagcca

SEQ ID NO: 5386 - DNA, 82 bp, Homo sapiens
tgtctgcgagccaggattcccggtcagccatgtcatctgagcctcccccaccaccacagccccccacccatcaagcttcagt

SEQ ID NO: 5387 - DNA, 96 bp, Homo sapiens
aaaaagaaaggggaagaatcatgtgtctaatgttgtaagatatgagatcctgactccaaactccattcccaagggtttcatggacgggaagcaggc

SEQ ID NO: 5388 - DNA, 100 bp, Homo sapiens
ggaagatcttcaaatgggcattcacaagggttcagtttggcaaagacttggtgcagatgtgacagcagttgaatttttaggtcatgtaggtggagttgga

SEQ ID NO: 5389 - DNA, 75 bp, Homo sapiens
ataaatatgggaatatcgatgcagttcacctcaaggccatgcctccagggtcgtatagacctccccctcctatgg

SEQ ID NO: 5390 - DNA, 50 bp, Homo sapiens
tcccagagtgctgggattacaggaccctgctgggatctttgagcttgtgg

SEQ ID NO: 5391 - DNA, 100 bp, Homo sapiens
cgttggcgattgaggagttttgcaaatctctaggtcacgcctgcataaggttgatgacaacaagaaactaggagaatgggtaggcctttgtaaaattgac

SEQ ID NO: 5392 - DNA, 139 bp, Homo sapiens
ctcggagcggagacggcaaatggcggacttcgacacctacgacgatcgggcctacagcagcttcggcggcggcagaggacaatgcagatcttcgtgaagactctgactggtaagaccatcaccctcgaggttgagccca

SEQ ID NO: 5393 - DNA, 104 bp, Homo sapiens
tgttgcagtgctttcattgaagtgttcttcgttccctcagcaatatgattggaaatgtttcaacgtgcgcaagcgttgcggcggcgggcagaggactactacag

SEQ ID NO: 5394 - DNA, 53 bp, Homo sapiens
ggtccacgtggcgcgaaagtaggaggtgaacagggatattgtgtcaggcctga

SEQ ID NO: 5395 - DNA, 100 bp, Homo sapiens
ctcctcggtggaggcgtacatcactgtcgtctcatgggagaaagacactgtttcacttgtctcagaaatacactttcgggaaatggcctctaaatcctgg

SEQ ID NO: 5396 - DNA, 98 bp, Homo sapiens
cggcgcagcgcagcccgcaccctccccgcccgacctgcgagcgccgcccgggcatgcgaagccgtccctccccggagccctaatttgtttagaactgt

SEQ ID NO: 5397 - DNA, 90 bp, Homo sapiens
cattctccagggaaaggatgacatatttttggacctgaaacagaaattctggaacacctatatgggcaaacttgaagataaatcttttga

SEQ ID NO: 5398 - DNA, 96 bp, Homo sapiens
tttagataaatttgaccatggctgtagaacccagcagctcagaatccattaaaaggagagctgggaggaggtccccagcctgggtaaagatggccc

SEQ ID NO: 5399 - DNA, 74 bp, Homo sapiens
ggagcccgcgggcggccggtcgggcggggcggcggcgctgacagaccgggaagcagccctgtgggagatggaag

SEQ ID NO: 5400 - DNA, 100 bp, Homo sapiens
gaaggcattgtggaaacaactgataacaacgaacttgatgcaagtgataggtttgccaaggtcagacctctcatcatccggatgaactgcaatttccaga

SEQ ID NO: 5401 - DNA, 75 bp, Homo sapiens
gttagactctgaaggaattgagttgataacaaaatttcttcaggtggtcactcaccctttcaaaaccatcgagct

SEQ ID NO: 5402 - DNA, 100 bp, Homo sapiens
aaaatttaaagaaagatttgaagcactacaaacaagcagctgagtttggaaatatcttgggatggagacagttttgtagaagtcatggctgcgccgcatc

SEQ ID NO: 5403 - DNA, 75 bp, Homo sapiens
tcattaccgtcgccagcggagcgaacccgagagcgtggagcgggctgggccagttacagaatgtctgaaggggac

SEQ ID NO: 5404 - DNA, 78 bp, Homo sapiens
agagcagggccccttagcctctgggtttgcgctagcagcgtaaggtgcagtagacattgttgcaatcatgatcggcaa

SEQ ID NO: 5405 - DNA, 98 bp, Homo sapiens
gagaacacgggctacacgtatgcgctcaggatgaaacaggcgcctatttaatcgacagagaccccacctactttgggcctgtgctgaactacctgaga

SEQ ID NO: 5406 - DNA, 75 bp, Homo sapiens
gcgagcgagcggccggcaggttgggaggagcggccgaagtcagaagaggcagaagtggatgtgagagaaagagag

SEQ ID NO: 5407 - DNA, 98 bp, Homo sapiens
aaattcagaagctcagaacgctggactctccctttgcagtgtgtcaggaagctgtctgggaagccttcaggactttttgggatcgacttcctgggcgt

SEQ ID NO: 5408 - DNA, 75 bp, Homo sapiens
cagtgagaacttgaacaatgaggtcatgatgaaggttactataacaacagtaccaaggtggctgtgaaaaccctg

SEQ ID NO: 5409 - DNA, 100 bp, Homo sapiens
gggagataagatgtgtccaggcgtcattgtgaaaattggaagacacttatataaactttggcattgtgtttagcacacaaaagaccctgttaaatgtgag

SEQ ID NO: 5410 - DNA, 73 bp, Homo sapiens
cgggccggggtcaccacgcctgccccagggaaccgcacaggttctggaggacacgtgccggcggcaggacttc

SEQ ID NO: 5411 - DNA, 80 bp, Homo sapiens
gacagggcacaccaaactccatctggaaccaggtgcagatgggtctcttccttcctgcccccatctctctcactcctggc

SEQ ID NO: 5412 - DNA, 100 bp, Homo sapiens
ccctgctggaggagcgcttccggaaatgtgatacctcaaagcacaaagtgctggtagtgtctgtgtgtcctcaatctttgccttattttgctgctaaatt

SEQ ID NO: 5413 - DNA, 100 bp, Homo sapiens
gagttcactggatgttgctgaagaagaaatcatagacgatgatgatgatgacatcacccttacaggacccagatgatgtggtaccagttggccaaagaag

SEQ ID NO: 5414 - DNA, 87 bp, Homo sapiens
caggagagtggcagtccttggatgtgccaagatgcataatcttcatggagactctgaagtaggagaattctcaccaaatgttcccaa

SEQ ID NO: 5415 - DNA, 100 bp, Homo sapiens
ccctcctttggaagcagagtgaagaacacaatatgttgagatgtgctattttgacaacacttattcatcttgttcagccttttatgtcacctcggtaccc

SEQ ID NO: 5416 - DNA, 135 bp, Homo sapiens
cgatgccctcggacttcatctcattgctcagcgcggacctagacctggaatcgcccaagtccctctactcgcgagcgggacgaccctgggacagtctccactggggcagatccagctgaccatccggcacagctc

SEQ ID NO: 5417 - DNA, 50 bp, Homo sapiens
ctgggagtaagaaatgaccagggtccgggatagatcactgcgaccagagg

SEQ ID NO: 5418 - DNA, 50 bp, Homo sapiens
tgatacctgtcaagcagtatcccaagaatgcagactataccactggtcag

SEQ ID NO: 5419 - DNA, 100 bp, Homo sapiens
atccggaaatatggcctcaatatgtgccgccagtgtttccgtcagtacgcgaaggatatcggtttcattaagctggtgccgacaagaaagccgaggctgg

SEQ ID NO: 5420 - DNA, 75 bp, Homo sapiens
cagagatgattactctcgggatgattataggcgtgatgatagagaatgcagtaatagtggccttgtcttcaaaat

SEQ ID NO: 5421 - DNA, 75 bp, Homo sapiens
gttgtctgcaccctgttgtggctctataagcagcttctgcgcaacgtctgagcacaggagcccatccttggctct

SEQ ID NO: 5422 - DNA, 100 bp, Homo sapiens
gaaccccaaacagttctacagaatccacccaaagttatcatggaactttttgacaatgaccaagtgggcccaccagctctgagcagatcatgaagacagg

SEQ ID NO: 5423 - DNA, 98 bp, Homo sapiens
cacaaactagagacagaaaactggaataaagtatctgaagtctttcagagccttgaagaccaccatttggaagtggtggcgtttttcagggaaaatgg

SEQ ID NO: 5424 - DNA, 96 bp, Homo sapiens
caagagtccacaaagggacctgatgaagcgaagatcaaggttataacccgttgtctggtgaaggaggcggagcttgctcctggagacctggacgca

SEQ ID NO: 5425 - DNA, 88 bp, Homo sapiens
gagccccgcccggcccgggccatgtcggtgggcgagctctacagccaggttgtctgcattcaaaagagcattctattaaagctacctt

SEQ ID NO: 5426 - DNA, 103 bp, Homo sapiens
ccctgccctccttcaagattgacttctcggaatggaaggatgacgagcactctcgagtggaccctgaggagctcttcaccaagctcgaccgcattggcaaggg

SEQ ID NO: 5427 - DNA, 117 bp, Homo sapiens
gcgctcggagcccgagtccgcgggaagatggcggcgccgctcatccccctctcccagcagctcatgatggagcagtccaagaagtcctccctcatggtggcccgcagtattctcaac

SEQ ID NO: 5428 - DNA, 100 bp, Homo sapiens
taggaggaacttgagtcataatttgatgttgaatcagagagaacaactgtttgggcttatttgcctcagaggtttacacagtaaacaatgtgaatgtgat

SEQ ID NO: 5429 - DNA, 82 bp, Homo sapiens
gcgagcccatccgtctcaagactgtgaaaccaggagtccatagaggccactgtattctattgaagaacatgtctaacagtaa

SEQ ID NO: 5430 - DNA, 90 bp, Homo sapiens
cccgaggaggaagacgaatcgttaaacatctgaaagggtcagttggctgattgcaattctggcccaactcaaccctctctttggaccgca

SEQ ID NO: 5431 - DNA, 49 bp, Homo sapiens
agaaatcagagagccacgttatacagagaaaatattctctttggaatgg

SEQ ID NO: 5432 - DNA, 73 bp, Homo sapiens
actgtcgacctaaagcctgactggggcaagaaccaaaaacttttgctagaaaatcagcttttacgagagaaaa

SEQ ID NO: 5433 - DNA, 96 bp, Homo sapiens
cgcgtagacctccgctcccccaggtcctcttcctgactatactcctccagaaattttctcttttgaaagtactactggatttacattgtatgggat

SEQ ID NO: 5434 - DNA, 50 bp, Homo sapiens
cgagtcagtgcgttcgcgcgaggtgtccctggccagtgtccttccacctg

SEQ ID NO: 5435 - DNA, 100 bp, Homo sapiens
gtcagcggggtcacccctcagcacatggtgggggccacaccatttgccgtggccaggctagaggagcgtcaggaagcagagaaaatgttcaagggcaaac

SEQ ID NO: 5436 - DNA, 75 bp, Homo sapiens
aaagcagatgctgctgaattctggagaaagttttttggagacaaaactgataaatttcaaacggaagagagtggc

SEQ ID NO: 5437 - DNA, 97 bp, Homo sapiens
ttgtcaggaagctctggatataagtttggtgttcttgctaagattgtgaattacatgaagaacccagtgacttgattgtaaaaatttacagagcgga

SEQ ID NO: 5438 - DNA, 96 bp, Homo sapiens
gtgaagcggccccagcactcccagctgcgcagggcctgccaggtggcgctcgctccagaacctgggtatcaacccagcaaacattggcttcagtac

SEQ ID NO: 5439 - DNA, 100 bp, Homo sapiens
cttctgtcacggccatgctgatcgctgcgcacccaagcctggggcctctgcaggcccctccaccgctgtgcaggtatgttgagtctaaaaaggacagagt

SEQ ID NO: 5440 - DNA, 82 bp, Homo sapiens
tgtagtgcggcgtgggagccccaggttctttagtggaagaacgcgaagcgaggatgaggtctctaattaacagaagatggca

SEQ ID NO: 5441 - DNA, 74 bp, Homo sapiens
gggaagatggcggcgccgctcatccccctctcccagcaggttttaaaatcaaagatgggaaaatcggagaaaat

SEQ ID NO: 5442 - DNA, 100 bp, Homo sapiens
ggaggacctctcgccaagggccccaatgagtggcacacagtctactatcaccgacaggctctcctagcaggcatgcggaaccgtgagaacagctcgccct

SEQ ID NO: 5443 - DNA, 99 bp, Homo sapiens
cggcgagacgcgcagcgccggcgcccgggagacccaggaggagcccgcaggtccctgtgcgttttattgcgacctgccggtgggaactttgtctccgag

SEQ ID NO: 5444 - DNA, 100 bp, Homo sapiens
ctcccaaagtgctgggattgcagtgctggacccaaaggagacaacatttatgaatggaggtcaactatattgggacccccaggatctgtctatgaaggag

SEQ ID NO: 5445 - DNA, 83 bp, Homo sapiens
gctgggaaaactgtttcagttgcagactttaggcctgaaagccgaagcctgtggaggtccaggtggtcacgcatcacatgcag

SEQ ID NO: 5446 - DNA, 96 bp, Homo sapiens
atatccaggaaggcgatcttattgaagtggtcttgtcagggttcattgaaaaaatccttagtgatattgacatgtctcaagtgacataaattagcc

SEQ ID NO: 5447 - DNA, 75 bp, Homo sapiens
aaaccttattaatctcagggaactggatgtcagcaagaatgatgtcatttgtcagagtgaaccgctgtggtcccc

SEQ ID NO: 5448 - DNA, 100 bp, Homo sapiens
ttgaagaggacatgtcagcttctgacagtgatgactgtattattccaggtcctatctccaagaatatcaaacaggtgaccaagaatatggcccaggtgac

SEQ ID NO: 5449 - DNA, 100 bp, Homo sapiens
atgatggtcagaaaaggggacacggcggtgcttaggttcttccaggggacccagccccctaaccatgggagctcaggacactctccctgttgcagcagca

SEQ ID NO: 5450 - DNA, 51 bp, Homo sapiens
cgggagatggagcatttgagacagacagatgcaccatcaggaatggaatta

SEQ ID NO: 5451 - DNA, 90 bp, Homo sapiens
ggccgagcaggaggcgccatcatgatacacatggtctacagtaagcggtcaggaaagccccgtggctatgccttcatcgagtacgaacac

SEQ ID NO: 5452 - DNA, 82 bp, Homo sapiens
gccgatccagcctgcggagcctgtggggcagacctcccagtgccaagtgtataagcgtgtccagaattggtgggtctcactg

SEQ ID NO: 5453 - DNA, 100 bp, Homo sapiens
ttctggggaggagccaagatgcatggacccagctcagcgggacgcgccgctggagaatgaagattttcagctgaactctcatctctcaacactggcaaat

SEQ ID NO: 5454 - DNA, 88 bp, Homo sapiens
gatctggactccgtttcctgccttgctctttggaccacattgtcaattcacaccgattactttctatgaagacaaaaattttcaaggc

SEQ ID NO: 5455 - DNA, 90 bp, Homo sapiens
gtttgcagtggagaaacggcctcgacccctcacagagtctttaggcccagtgggatttatgaaaagtgccatctctttagctgaggatga

SEQ ID NO: 5456 - DNA, 75 bp, Homo sapiens
ggctgctctgtgtctcttccaagatattgatgagtgtgcagctaagatgcattactgtcatgccaatactgtgtg

SEQ ID NO: 5457 - DNA, 98 bp, Homo sapiens
gaggagtcatggaagagtttttaaaccagatacattccaccgttgatctgggggaaaagtggacacatccagacagccttgtatgggaagatgggaag

SEQ ID NO: 5458 - DNA, 76 bp, Homo sapiens
tctgctcttggtgcaggatctgcagctactgctgcatcagaagaaatggttgtctgcattcaaaagagcattctat

SEQ ID NO: 5459 - DNA, 73 bp, Homo sapiens
aggattgactgctgctggggctgggctcgccagtcttggggacagtgtcagcacaagttggatggcttgagga

SEQ ID NO: 5460 - DNA, 75 bp, Homo sapiens
ttccgccagagcagcgtggggaacatcttcttgtctgctgatttttggggacatcaggacagaacgtgagtgaca

SEQ ID NO: 5461 - DNA, 100 bp, Homo sapiens
gagcgcgagagggggaaaagcgagcgatcgagcgagcgcgcgcgcgaaaactccgggcaggacctcagcagccatgtcgaagccccatagtgaagccggg

SEQ ID NO: 5462 - DNA, 75 bp, Homo sapiens
gttgttgctctaggagctgaaaccagtgggtagatgtcgttctgaaacgcagctctctctcccacagattcgatt

SEQ ID NO: 5463 - DNA, 100 bp, Homo sapiens
actgggaggagcgccggaacgccgaggcccagtgatccgggccaaggtggtggggaagaagctggtaaaggaggggcccttcggcacgctggtctacacc

SEQ ID NO: 5464 - DNA, 100 bp, Homo sapiens
tggccaatgaggagtcagagcacaatcaaggtctgataactttggaggaactacatcaacaggtgttgaagggaaggggcaagttcgcccaggatgtcag

SEQ ID NO: 5465 - DNA, 80 bp, Homo sapiens
atactgcccctgcattgttggtattgaaagttaacgttagcagaataccatgaacaagaagaaatcttcaaactcagatt

SEQ ID NO: 5466 - DNA, 100 bp, Homo sapiens
gaaaatattaaaaagttagcagaccagtttttagaggaacaaaaggataactgggatgacgatgatgatgaaaaaaaagaggaagcagaagtaaaaccag

SEQ ID NO: 5467 - DNA, 96 bp, Homo sapiens
gtccgtgtggccaacgagctcaacgccaggcgccgctcctttacagtctgaagatgatgagaaactgaaaaagaggaaggagcgatttgggattgt

SEQ ID NO: 5468 - DNA, 90 bp, Homo sapiens
cctcgcagaagctcgggctcggttttgtgtttcagcggcacatacccgggagatgttagacacgatcattgctcctcctgagcgcaagta

SEQ ID NO: 5469 - DNA, 97 bp, Homo sapiens
gcccctggccctgtacgccttctccaacagcagccagtcagctgtcggccacgaatatcagtcgaaactttccaagcactgctcgcaggtggactcg

SEQ ID NO: 5470 - DNA, 80 bp, Homo sapiens
acatgctcctggacctcagcgacctgctccagtgcctccggagccagcgtggtggccatagacaacaagatcgaacaggc

SEQ ID NO: 5471 - DNA, 75 bp, Homo sapiens
ctagcaccccgagaaccgtcagtttgagccagatggaaaaatgaggaagctgtgagtaccagtggaaggaacgag

SEQ ID NO: 5472 - DNA, 97 bp, Homo sapiens
gggatcgtgaccgagaccgtgaccgagagcgtgaccgagagcgcgaatatcgtcatcgttagaagcagcctgagggaactggcatgatagatgaaga

SEQ ID NO: 5473 - DNA, 109 bp, Homo sapiens
cccttgctgtcctcctctgcaccatggctctctgcaaccagttctctgcatcacggtccgcaagcaggtggtgaacatcccgtccttcattgtccgcctggattcccag

SEQ ID NO: 5474 - DNA, 83 bp, Homo sapiens
gctgaccgcgctctgcctcagcgacggctatgactttgcagccgtcctggagtggttcgcggagcgtgtggaccgcatcatcc

SEQ ID NO: 5475 - DNA, 74 bp, Homo sapiens
atttgaacagttgaaacaggagagaattagtcgatatcagggtgttaatctttatgtgaaaaatcttgatgatg

SEQ ID NO: 5476 - DNA, 101 bp, Homo sapiens
gcatggccgagaagcggcacacacgggactccgaagcccagcggctccccgactccttcaagggaatgatgagaagacagcagctgattacaagattttag

SEQ ID NO: 5477 - DNA, 80 bp, Homo sapiens
caatgtgggatcgatgtttcaatattggaagcgctttgatttacagcagctgcaggtccctgtgcgttttattgcgacct

SEQ ID NO: 5478 - DNA, 90 bp, Homo sapiens
gttgcaaaaagaaactggagccaccatcaagctgtctaagtccaaagatttttacccagtgcccaaaaccgagaacgaggtgccctcgcc

SEQ ID NO: 5479 - DNA, 100 bp, Homo sapiens
ggatattctttactaacatggttacctgcagccaggtgcatttcaagtgaagtgtgctgatgaagtcctctataagaatctccgccacctccctactctc

SEQ ID NO: 5480 - DNA, 98 bp, Homo sapiens
gactgtgaacctgctggccgagtggctcattcagacagctcctgggcaacgtgctggtctgtgtgctggcccatcactttggcaaagaattcacccca

SEQ ID NO: 5481 - DNA, 51 bp, Homo sapiens
actgatttcatcctcaagtttccgcacagatgtctatacctgagatccgac

SEQ ID NO: 5482 - DNA, 75 bp, Homo sapiens
gaaaatttcaaagtaaaggatattattagaattctgccatgcaagatgctttgttcttcctgaaggatttcttca

SEQ ID NO: 5483 - DNA, 100 bp, Homo sapiens
tgagtgctgaccgtcttggggacctggccttgttactagagaccctgaatggcagccaggtctataagaaggagaaagctcgagtcatcactgaggaaga

SEQ ID NO: 5484 - DNA, 101 bp, Homo sapiens
gccgctatggatgatcgagaggatctggtgtaccaggcgaagctggccgagcaggctgagcgatacgacggttccaatgattcttgttggtaataagtgtg

SEQ ID NO: 5485 - DNA, 100 bp, Homo sapiens
tggctcctcggcccttttctcccctgttgcagctgggagcggacgaagcgcgaagctggggccaatggaagcactgttgtgaagaacttatgaaaattga

SEQ ID NO: 5486 - DNA, 82 bp, Homo sapiens
cctgcagtacctgcagaaggtctctggagacatcttcagcaggacttggcgatgtacatcaatgaagttaaacgggacaagg

SEQ ID NO: 5487 - DNA, 101 bp, Homo sapiens
agtggagatcctattcagaggggccggtctctctaaatatgccccagaaggtgcctaccagtaacacagagggaggctggtcctgctctctcgctgagtac

SEQ ID NO: 5488 - DNA, 51 bp, Homo sapiens
agcagcagctccactgaacagataaggcagcctgagggaactggcatgata

SEQ ID NO: 5489 - DNA, 78 bp, Homo sapiens
gaggtactttcataattcagaagggaaaagtgaagtctcacattatggtcaccagtgaaaagttgtgcagagcccaac

SEQ ID NO: 5490 - DNA, 100 bp, Homo sapiens
aaagacccagtgaacaaatccgggggcaaggccaaaaagaaggtactggtcttcttggacattaatctttgaatacttgctgactgctaagaaatgacca

SEQ ID NO: 5491 - DNA, 100 bp, Homo sapiens
ggcgtgtatgggatcttcaactcagtcctgtttgacaacatctgccctacccccatcctgcagaaggagtctcaggagcaggggctgcggcagaggctgc

SEQ ID NO: 5492 - DNA, 75 bp, Homo sapiens
gttttagaagtccgaaatgaacatttttggaccctaggttttggctcattgtacgaggatgtcgtccaggaaaga

SEQ ID NO: 5493 - DNA, 80 bp, Homo sapiens
ctgatggaggcggtggccgtgctcgtcgggcccccttcgggaggcacttccgttccggcgcccctccggtcatcaacccg

SEQ ID NO: 5494 - DNA, 75 bp, Homo sapiens
gatgttcagcagcgcggcagagtcatggggatattgatgatgttaagaagttcaaaccgggttacctggaagcta

SEQ ID NO: 5495 - DNA, 82 bp, Homo sapiens
gtaatacatcatgaactgcaggacagacagtctagcagtgcttccttggagaccctgttagcacttcttcaggcagaagggg

SEQ ID NO: 5496 - DNA, 101 bp, Homo sapiens
caagaacaacgacggccgcattgacttcgacgcaaaagagggagaatgccctccccataagaacccatgcaaagagctgtgccagggtgatgaattgtgtc

SEQ ID NO: 5497 - DNA, 100 bp, Homo sapiens
ttggaaaaattgccacccaactactccatgcattctgctgagatgtcaccgggtgcgcatcaatgtacctccacacagagggcttctctgggccctctcc

SEQ ID NO: 5498 - DNA, 132 bp, Homo sapiens
caagtaccagcaacagaacgttttcgcctgatgcccctctgctgatcccactctgaaggccggggccctccagaatacccatcatatagcccctgaggtggcatggtgatgtctccatgagggaaccccttc

SEQ ID NO: 5499 - DNA, 102 bp, Homo sapiens
gcttcagatacttacatagtttttggggaagccaagatgggtgcatacaagtacatccaggagctatggagaaagaagcagtctgatgtcatgcgctttctt

SEQ ID NO: 5500 - DNA, 75 bp, Homo sapiens
acgcctacttctataaagtcatccagattgatgagcaaattgaaagcatgtttaattcaaagaagagagtaaagg

SEQ ID NO: 5501 - DNA, 74 bp, Homo sapiens
agtcttccatcaatcatatctcacagtatgggaagactctctatgataactaccagcgggctgtggcaaaggct

SEQ ID NO: 5502 - DNA, 100 bp, Homo sapiens
tccagttctacaacaacctgttggagcacatgcagtcccatgcagatcagcttgaacgggtctttttacgacttggccatgctgaaacagatgaacaatt

SEQ ID NO: 5503 - DNA, 100 bp, Homo sapiens
cgtgggcgagctgggcgacggcgccttcggcaaggtttacaaggccaatggaagcactgttgtgaagaacttatgaaaattgagattatgtcaccacgga

SEQ ID NO: 5504 - DNA, 90 bp, Homo sapiens
gcggagagcggcctgcgggcgatcgggccgagactttggaatgaccagagacatctatgaaacggattactaccggaaagggggcaaggg

SEQ ID NO: 5505 - DNA, 100 bp, Homo sapiens
gagtcttccgcacccagcgcgtcgacctttaccagcaggtaatgactccacagggaagaggcactgtagcagctgctgctgttgctgcgactgccagtat

SEQ ID NO: 5506 - DNA, 100 bp, Homo sapiens
ccgagaaattgaggccgttgtacaaccatccagcagtgaacagagtatctgtcaggcaagagctgctgtgatggtttatgatgatgccaataagaagtgg

SEQ ID NO: 5507 - DNA, 75 bp, Homo sapiens
gaaccatgtgcagaggagaaaattccatccttggacagttaaaagcagagcttggccacggacagagcgaagggg

SEQ ID NO: 5508 - DNA, 83 bp, Homo sapiens
cctggagcctcagttggaagcagccgatccagcctgcggagcctgtggggcagggctcggatgctactagatcagtaccgaaa

SEQ ID NO: 5509 - DNA, 75 bp, Homo sapiens
gtgccctttccacccacctgggctgaggaccctgggccagcctatggagatggcccgggtcctttttgtgctgat

SEQ ID NO: 5510 - DNA, 108 bp, Homo sapiens
aaaacatatccgagggtgtcctgttacttccaagtcatcaccagaaagtaatggaggggaaagttccagtcgcagcgctgagaagcgatcagctgaagaagaagctgc

SEQ ID NO: 5511 - DNA, 98 bp, Homo sapiens
cgagctgaggtggaggcaggctgcggcagacggcgacagtggcggcggcgccatggcagggcttgcagtttcttggcagtacagaagtggaacagcca

SEQ ID NO: 5512 - DNA, 111 bp, Homo sapiens
gaccctggagcctcagttggaagcagccgatccagcctgcggagcctgtggggcagttttcggctttgtgagaaaccttaccatcaaacacgatggccagcaacgttacca

SEQ ID NO: 5513 - DNA, 48 bp, Homo sapiens
gcaaatggtgctgaccccactgagagatctcatagatcagaatatact

SEQ ID NO: 5514 - DNA, 100 bp, Homo sapiens
acattgacaagatcctgctggagatgggcggaggaatatgccagcttcctgcaggaggcgcaggtaccgttcctctccctggagcgctgctcagccccgg

SEQ ID NO: 5515 - DNA, 100 bp, Homo sapiens
tcaggagccacctgtaacctgggggcaccaccacgaggcgatttgtgggccataccaaggatgtgctgagtgtggccttctcctctgacaaccggcagat

SEQ ID NO: 5516 - DNA, 88 bp, Homo sapiens
cttattcatcagtttgttgtgcttgtcaagatcaggtaaaataccatgaagattttgaaaaaacaaaggggagaggctttactcccgt

SEQ ID NO: 5517 - DNA, 109 bp, Homo sapiens
ggacagacctcgtcccgggctgaattctctctccactcttcgagattggcacacccaggtagaaaatctttatcctcaaattggctgggtagaaattgatcctgatgtt

SEQ ID NO: 5518 - DNA, 100 bp, Homo sapiens
ctgcggtcgttccctcggctgtggaccgggcggcacgcacgcggtgcagggtaacatggcggatgcggaagatggtgtcggacggcatgacaggcagcaa

SEQ ID NO: 5519 - DNA, 100 bp, Homo sapiens
ccacgtctgtggcgaacgcggcatccatctcaggacatgttctgactgagcgggacgtgagcgtgcggcagcgggccgtggacctcctctacgccatgtg

SEQ ID NO: 5520 - DNA, 97 bp, Homo sapiens
taagactccaggacacccctgaagccgagaaatgctattgacctgaaaagtggttctggaaaagtgtaccaaggccctgcaaaaggtgctgctgata

SEQ ID NO: 5521 - DNA, 82 bp, Homo sapiens
gttctcactaaaatgaaagaaaccgctgaggcttatttgggaaagaaggttgttgatcattatgaaaatcctagaaacgtgg

SEQ ID NO: 5522 - DNA, 100 bp, Homo sapiens
gactcaacaagcggcgcttcccggggctgcggctcttcgggcacaggccaagactaaggggctgcagagcggggtggacattggcgtcaagtactcggag

SEQ ID NO: 5523 - DNA, 101 bp, Homo sapiens
ggaggaaggagggacttcttggcttctcccagcatagccccagatggggacattggttttggacctttacaacagaggatgtctgaagaagtttctttcca

SEQ ID NO: 5524 - DNA, 100 bp, Homo sapiens
gctggcccaggtgcgccacgagttccaggagaccaaggaccagctcaccacggagaacatcatccttgggaaatgtttcaacgtgcgcaagcgttgcggc

SEQ ID NO: 5525 - DNA, 90 bp, Homo sapiens
ggattacctttccaagccaatgcccaagacattataaacgaacgggttaacttgtttggtttctggagccgattcaacggatctaacagt

SEQ ID NO: 5526 - DNA, 112 bp, Homo sapiens
aaggctagtttggatgtggaggggaatagactccatctatccatatgagttggcaaacatgaattgactgggcataaagtagctgtgaagatactcaatcgacagaagattc

SEQ ID NO: 5527 - DNA, 51 bp, Homo sapiens
tggcctcccaaagtgccgggattacagctccagaaattgtgaactacgagc

SEQ ID NO: 5528 - DNA, 100 bp, Homo sapiens
tggagggtcagcctggaagaccacagcagccaagggtctgttcctggtttcccagatgcataaaggaagacatatccctcccctgggcagcaaggctaca

SEQ ID NO: 5529 - DNA, 100 bp, Homo sapiens
cttttagctgaactaaggagaaagtcctacaacagtttggcgtgcaacatggggcttgagaaagggagaaccaggtgcatcagcgcattgcggagctgag

SEQ ID NO: 5530 - DNA, 82 bp, Homo sapiens
cctggtggggattgacagccacgggaaggagaactacgatgacccgcacaaaacccctgcctccccagttgtccacatcagg

SEQ ID NO: 5531 - DNA, 100 bp, Homo sapiens
acagcgcagccggcccagagctcgggtctccggggaccgaggtgactgcagcaacaaggagtgttccttcctccatgtgaagccagctttcaagtcccag

SEQ ID NO: 5532 - DNA, 123 bp, Homo sapiens
tctcgatgctggcctggagcagaaactgagctggaccactggagcctcggagatctataaggacaggcagaaattctcagaacaggttttcaaagtggcctcctcagacctggtcaacatggg

SEQ ID NO: 5533 - DNA, 143 bp, Homo sapiens
cctcaccaagaagctactggacctcgttcagcagtcatgtaactataagcagcttcggaaaggagccaatgagggagagaagatgactgaggaggaggtggagaccgttctggcaggacacgaggacagcaacggctgcatca

SEQ ID NO: 5534 - DNA, 133 bp, Homo sapiens
tggagtctgcgaaggccgggacccggttccccggcccacagtgggggtgtgcaaacccgagagaactgggtctcctctgagcctccggcctccataagacccaaaacagatgacacctcttcccagtcccccg

SEQ ID NO: 5535 - DNA, 75 bp, Homo sapiens
tacagcttctgataatcaaccaactgttacaatcaaggtctatgaagaccgaatccgggataccttgatccatga

SEQ ID NO: 5536 - DNA, 96 bp, Homo sapiens
cagaagagccaaggaataaacatgcaatgaacccaaaagggcctaccttctggctggatactattacactgccaccggcaactacgatatcaagtg

SEQ ID NO: 5537 - DNA, 96 bp, Homo sapiens
caagctggaacccaggagcagttgggagttttaaagaatgccagcctttttaaagggctgtcagaaatcccgatgatcttgaagcaaggtctcata

SEQ ID NO: 5538 - DNA, 82 bp, Homo sapiens
gggcaagctctccctgccgtggctgctcaacaaggagctgggctgcatcaactcggtgagaagccctaccactgcaactggg

SEQ ID NO: 5539 - DNA, 98 bp, Homo sapiens
tgcacgtgagtcgaatgatgctagccttcttggttctcagcactggcatgttttgctcatcatcagatcagacactcctctaatttacaaagcagtgc

SEQ ID NO: 5540 - DNA, 101 bp, Homo sapiens
aagatttggccacctccagacgctaccacactctgggacagtgggagatttggaacagctttgagaagagcaagctatctcccctggttcgaggtatttta

SEQ ID NO: 5541 - DNA, 100 bp, Homo sapiens
gactcatggaggctgagcatttattcaggtagtaagcattaataatgtctttcatctttgagtggatctacaatggcttcagcagtgtgctccagttcct

SEQ ID NO: 5542 - DNA, 83 bp, Homo sapiens
aattttgcattgtttgtttgaaattgcattgacgactggacattctgagcatgtgagacctgaggactgcaaacagctataag

SEQ ID NO: 5543 - DNA, 100 bp, Homo sapiens
gggaagctcccggcccggcgaactaactggagcacggagctgcagccggttgggccggtgtactttcccgtgtccccagatggtgaactctacatccttg

SEQ ID NO: 5544 - DNA, 50 bp, Homo sapiens
caggcttgtctcctccccaggagagaaaatctggccagccaggagaagga

SEQ ID NO: 5545 - DNA, 80 bp, Homo sapiens
cgaggcctcctgcactccgcccggacccccggccccgccgtgggtcctatggccgggctccgaagatgattcacctagag

SEQ ID NO: 5546 - DNA, 74 bp, Homo sapiens
aacgccccggtggagaagctgagtataaccccgttttcacacgaatggccccttcacatatttgaagactaccg

SEQ ID NO: 5547 - DNA, 98 bp, Homo sapiens
cttcctcagtcatgaggagaaatgaacagctgaccctacatgatgagaggtttgagaagactatttggagttttcctggtcttactggatgtcactct

SEQ ID NO: 5548 - DNA, 100 bp, Homo sapiens
ccacgtgcggtgctcgtcgggagtgatcacctaccctacaggggataaattccaaaactgccagtgaatggctgaaaccacagatactactgaacccaag

SEQ ID NO: 5549 - DNA, 75 bp, Homo sapiens
ggtccggcgacagggtctacaagaacgagtgcgccttctcctacgactctcccgcaaagccaaagctaattgagc

SEQ ID NO: 5550 - DNA, 82 bp, Homo sapiens
tcccgcgctgcgcatccccgcggacgccacagcgctgtggacgacatccttggagaaggcagcgacgacagcgacagcgaga

SEQ ID NO: 5551 - DNA, 83 bp, Homo sapiens
cagggcctgcagcgggagctggacggcgagcgcgagcggcgcgagaaagacggcggctccctggaccaggtgctgaaagaggc

SEQ ID NO: 5552 - DNA, 100 bp, Homo sapiens
caaggatggagctgggttgctggacgcagttggggctcacttttcttcagctccttctcatctcgtccttgccaagagattccctgtctcctctggaaga

SEQ ID NO: 5553 - DNA, 89 bp, Homo sapiens
tcgacgtcgtgatccagaagtccagagctgaggactgcctgtttgcaggagctaatttcgttactcgaaaaattagccggtcagtagct

SEQ ID NO: 5554 - DNA, 85 bp, Homo sapiens
gataaaaacagtcctttctactatggtgacctcacaaagttcggccgtggggatgcctcctccccagccccggccacaaccttgg

SEQ ID NO: 5555 - DNA, 75 bp, Homo sapiens
gccatcgttgctgccttcttcgtcaagccacccacacagaatatgcctatgggtcctggagggatgaatcagagc

SEQ ID NO: 5556 - DNA, 100 bp, Homo sapiens
ggccacgcctgaaaggcgactctcctggtgggctttgacagcgagaatcccggggacgacgggcagatgcacaaggggctgtcagaacggagccaggcag

SEQ ID NO: 5557 - DNA, 100 bp, Homo sapiens
taatgggccgtagggcaggtttgagtcgtgccaccctggagcagaaggtggagggtagggataagtggatcaatcttcctgtcctacaactgacaaagga

SEQ ID NO: 5558 - DNA, 111 bp, Homo sapiens
caggaagaaaattttccttgacctttaggtgcttttatattcatctcaaaaacaaaattctgaactcaggacttggcaaaaaaccagtctatccaagaccaggcacctatg

SEQ ID NO: 5559 - DNA, 82 bp, Homo sapiens
atggattttttcagggatataaccgactgacctggatagtagttgttcttcagttaagtgggcagaccaacatccacctcag

SEQ ID NO: 5560 - DNA, 83 bp, Homo sapiens
gaaaactctacctttgtgtatcaagtcccactatcaaggataagccacattggggctttccagctctcacagaaccttcagca

SEQ ID NO: 5561 - DNA, 88 bp, Homo sapiens
ggctggagcgcgctcatgcaggcggccaggtagatttcgggcagacaacttgaacaagctgaagaacctatgcagcaagacaatcgga

SEQ ID NO: 5562 - DNA, 75 bp, Homo sapiens
aactatggcatccccccagatgaaatggatgagttcggtctctgcaagattacaggctgtgccagccctggaaaa

SEQ ID NO: 5563 - DNA, 80 bp, Homo sapiens
acctacggggtgtacttgggaacgaggggtgaagcggcccaggtgaggactgattcttgctattccaaatcctcttccac

SEQ ID NO: 5564 - DNA, 97 bp, Homo sapiens
ccgcgacggtcgccgcccacggcgagaaaaagcttgtggtgaaggggggcaaaaaaaagaagcaagttctgaagttcactcttgattgcacccaccc

SEQ ID NO: 5565 - DNA, 125 bp, Homo sapiens
cagcatcccaggcgagaggagcacagataccaccaagacccaccccaccatcaaggtgacagagattggcaaagatgtgattggtttaaggatcagtcctctgcagtttcgctaaggcccccttt

SEQ ID NO: 5566 - DNA, 82 bp, Homo sapiens
gcgggagttcgaagagttggatactcagcgtcgctggcagccgctgtacttggttagctttatacgtctacgaatatttact

SEQ ID NO: 5567 - DNA, 49 bp, Homo sapiens
gaacaatattgatgatgtagtaaggctggagtgcaatggcgcaatctcg

SEQ ID NO: 5568 - DNA, 96 bp, Homo sapiens
ctaattcaacaaatcataacttggtcagtcatcgctagagggttattattgacatttactcatcataaaatgtgatgtcagcctaccagctcggag

SEQ ID NO: 5569 - DNA, 76 bp, Homo sapiens
attcatttcatgaaagccttccagaaaatagtggtgcttttttataaagggctggggagcagaataccaccgccag

SEQ ID NO: 5570 - DNA, 82 bp, Homo sapiens
tgcttcagcgggccaggaagcgcatccaggagttgatattcactgatggactccaaagaatcattaactcctggtagagaag

SEQ ID NO: 5571 - DNA, 75 bp, Homo sapiens
cccacatctgtttcaactctccgccgagggcgagcaggagcgagagtgtgtcgaccctgaccctctattctgcac

SEQ ID NO: 5572 - DNA, 75 bp, Homo sapiens
atcactattaccgcaacaatagcaggcgcggggcgaaggagctgctagaacaatgctgaggcgggtgaggtgagg

SEQ ID NO: 5573 - DNA, 97 bp, Homo sapiens
ctgagtgtggacgagtagccagtgaagataatgaatgtcgaatgtgactgactagcagcttcattttgaagggcaccaccacgaggcgatttgtggg

SEQ ID NO: 5574 - DNA, 80 bp, Homo sapiens
ccaccagaggactgggaggagcatgtcaacagtgacagaggccaagcaagaattaataacctaccctcagcctcagaaaa

SEQ ID NO: 5575 - DNA, 82 bp, Homo sapiens
gggaggtgaccaaggaggagtacaaggacatcctgcgcaaggccgtgcagaaggtgacttaagagattaaaattaatttggt

SEQ ID NO: 5576 - DNA, 100 bp, Homo sapiens
cacttgcacagaagtactttgaacttttccctcaggagcgaagccccctttggcagtttgcagacctgacagacgctgctgcccgcaacgcggagctgct

SEQ ID NO: 5577 - DNA, 88 bp, Homo sapiens
cctccatgttttataagtattgacattacacagtgttaacaatgcatccacagagagttaaacatgaagtttctggagagacagtggt

SEQ ID NO: 5578 - DNA, 76 bp, Homo sapiens
cggggagaccagggagctcgggaccatctggagacgagggagagtttgtgtccatgggtgttatctctgatggcaa

SEQ ID NO: 5579 - DNA, 90 bp, Homo sapiens
gtgtgatgaaatgtgcctctcgccttacccgtgtgagaatacctgtggtgtggcagcgagtattttgggtgatcagcccatgacctaaac

SEQ ID NO: 5580 - DNA, 100 bp, Homo sapiens
tccacgccccaggacatcgcattgatggatgcacacaagggtgctgagatgtttcgcagagtccacgtgcccggacagaagatgagcctgtcggtcctgg

SEQ ID NO: 5581 - DNA, 100 bp, Homo sapiens
tgatgaagaggtttgctctggaacagcagcttcttggacacttaatgattgttggcaagaaatgtgctgctgatctgggcctgaataagggttatcgaat

SEQ ID NO: 5582 - DNA, 82 bp, Homo sapiens
aggaaagtggctgcagtgacacaggatcaccattaacaaggacaccaaggtacccaatgcctgtttattcaccatcaacaaa

SEQ ID NO: 5583 - DNA, 100 bp, Homo sapiens
ggcgggagacgagaagcctgaaaagtcgcagcgagctggagccgccggagaactctcttgatagagcccaagcagccaagaataaaggcaataaatattt

SEQ ID NO: 5584 - DNA, 100 bp, Homo sapiens
agctacagctgcgggagagccgggtaccggccgtggaagcggccaccgactactgtcagcagctgtgccaggtacctagtcgatagtcgctggttcaaac

SEQ ID NO: 5585 - DNA, 50 bp, Homo sapiens
ctgacttctctctcctagtgaatatacgtaggtaacctttccagagatgt

SEQ ID NO: 5586 - DNA, 90 bp, Homo sapiens
atacatgacaaaatgtggccacagcttttgctcctccgcctctgatgcagaatttgatgctgtggttggatatttagaggacattatcat

SEQ ID NO: 5587 - DNA, 75 bp, Homo sapiens
aaggccctgcggcagcgcatcgcggagaccaggtggatattccatctattataaccaagaaactattaaaagcag

SEQ ID NO: 5588 - DNA, 90 bp, Homo sapiens
cagacatggggaaggttctggaaagttctctgtggcgtgtgctggaattgatgttcgtctgtgtgatgttggtgaggccatccaagaagt

SEQ ID NO: 5589 - DNA, 122 bp, Homo sapiens
tcctcctcggcgggagccctcgcgacgcgcccggcccggagcccccagcgcagcggccgcggccagggagctggagagcagagaggcagagctaagacgccgtgacaccttctacaaggagc

SEQ ID NO: 5590 - DNA, 90 bp, Homo sapiens
tgggggccccggagccgggccggcgtggcccgagttccggtgagcggacggcggcgcgcgcagggatccacaaatgctaaagagctgtct

SEQ ID NO: 5591 - DNA, 100 bp, Homo sapiens
ccgtatggcgtggctctcaacagcctcaccacaggaaccacggctttcccgcttcgctcctcgccacctgctcggctgatcagacgtgcaagatctggag

SEQ ID NO: 5592 - DNA, 100 bp, Homo sapiens
tgacagaactaaagcgggcaaagttagaccttccagaacctggtattagaaaactactcggatgctccaatgacaccaaaacagattctgcaggtcatag

SEQ ID NO: 5593 - DNA, 99 bp, Homo sapiens
cgcagccgcgccgccgcgcagcgccccagccacacgccggcgggcagaagccgcccgctctccggaatagcattcctttcgaacaccacggcaagtagc

SEQ ID NO: 5594 - DNA, 51 bp, Homo sapiens
ctggcggacgcggcgccatcgcagtcaggaacaagatcactcaaggtgaag

SEQ ID NO: 5595 - DNA, 50 bp, Homo sapiens
ggcacagctgcagtctgacgagagggacacgatgaggcgagtggtacgac

SEQ ID NO: 5596 - DNA, 95 bp, Homo sapiens
tgggatttgagattgacgcggtgaactctgtccagttttcaaaccacacaggttggtaggaggagaggattggagctgttttctccttgatgcca

SEQ ID NO: 5597 - DNA, 75 bp, Homo sapiens
gagcgttctgcacaccgaggaaatgcgcttcctgagggagtgggtggagagcgtctgaccaaacacaccaagttc

SEQ ID NO: 5598 - DNA, 110 bp, Homo sapiens
gccggcaggaccatgctgctgaaagagtaccggatctgcatgccgctcaccgtagacgagagagaagaagaaggaggttcctgctgtgccagaaacccttaagaaaaagc

SEQ ID NO: 5599 - DNA, 90 bp, Homo sapiens
gctgggagccgcaccacctaacgctggccgacaacagcctggcgtccgccacggaggaggaagccaagaatctggtgagcgaagccatcg

SEQ ID NO: 5600 - DNA, 100 bp, Homo sapiens
actctagggggacagccggggcgctcctcttccctgacaggagtgtctcggctcgcgggaggcagctgcaccaagaagattgatatcagtaaatgccatt

SEQ ID NO: 5601 - DNA, 75 bp, Homo sapiens
ctgcaaactcatctacgactccatggccctcggcaacccaggattttttatcaagcagaaatgcatcgaacaacg

SEQ ID NO: 5602 - DNA, 50 bp, Homo sapiens
ggcctccccagccatgcagaactctttctaaaaccaatttttccaacaac

SEQ ID NO: 5603 - DNA, 50 bp, Homo sapiens
cattcccttggctgttaatttctcagagagtattgggaaagggtcgttgt

SEQ ID NO: 5604 - DNA, 82 bp, Homo sapiens
ttacagtctttgagcatatagatatcaacactccttcattactgtttgtatctgttcaaactaggaatagcaccccagatcc

SEQ ID NO: 5605 - DNA, 75 bp, Homo sapiens
gacaaacgtacctgtggtccctggatccagtgctactgctacaaataagatgccttcaattaagttgcagagttc

SEQ ID NO: 5606 - DNA, 75 bp, Homo sapiens
ctttgaagtgggaatgtccaaagaatttgctctaggtcgtaaccagcctttgaaaaaggagaaaccaaaatggaa

SEQ ID NO: 5607 - DNA, 101 bp, Homo sapiens
ttctttgatatttggtgatctcttgaaaaaagttaagggttacacatcattttggaatgactgtatatcatctggattacgtggctgtatgttaattgaat

SEQ ID NO: 5608 - DNA, 100 bp, Homo sapiens
cggcagcagtcccttgggggcttctttaaaggcctggcttctctacagtttagcctttaatgccaggtttctgagacatctttggtttctaatatcttcc

SEQ ID NO: 5609 - DNA, 80 bp, Homo sapiens
gcaggtggcatggctggtgcggagcttcctccctgggaaccaagaggacccacacagtggcatttctgttaacatccagg

SEQ ID NO: 5610 - DNA, 75 bp, Homo sapiens
atctggactgtgtcaaagtgctgctcaatgcaggtttggtgcacctcgatttggaggaagtagggcagggccctt

SEQ ID NO: 5611 - DNA, 101 bp, Homo sapiens
cattcatgaagcatctgaaaaagctgtggaaggctctggataaggaccagtacctgcccaggaaactggtacaggtttgcagattccgccagcagcacagc

SEQ ID NO: 5612 - DNA, 76 bp, Homo sapiens
tgagggaaaagcgaggcaaggcaggcgggtggatggaagtttgcttagttgaagaattgccaccaaccactgaatt

SEQ ID NO: 5613 - DNA, 100 bp, Homo sapiens
cccacttccagagatccccaacggtgaatggctctgtccccgttgtacggtcccattttcagtgcccaagatccccctggtattccgaggacacacccag

SEQ ID NO: 5614 - DNA, 100 bp, Homo sapiens
cgcgtcaccactgtgaggcctacagctctgccggggaggaggaggaggaggaagaggaggagaaggtgaggaagaggatggagatgaagatgaggaagct

SEQ ID NO: 5615 - DNA, 100 bp, Homo sapiens
aaaaagtctgaagctctgaatatcagagtggcacaaatacaattatgcccacctccacctcagattcccaattctcacaatatgacaaccacactgaatt

SEQ ID NO: 5616 - DNA, 74 bp, Homo sapiens
tcctcccgccccgggtctgacgggggagtgcccgtggctcgggttttaagaagaggagaggtcactcaattggg

SEQ ID NO: 5617 - DNA, 98 bp, Homo sapiens
ctgcggggctccagggccgccccgcccgcaggtgctatgctgtgggccccgctcagacctttccagctcacccccagggccttatggtcaagaaatgt

SEQ ID NO: 5618 - DNA, 99 bp, Homo sapiens
ccggcgtctccgcagcagatcagggaccggctgctgcaggccatcgacccccagagcaacctttcagaaaaccaacgccaagatccctcccagcgtcca

SEQ ID NO: 5619 - DNA, 74 bp, Homo sapiens
gtatctggctcagaactatgatggcagcttttggcaaggagtctgaagttcttattgggaacctgggtgataaa

SEQ ID NO: 5620 - DNA, 100 bp, Homo sapiens
gggctgcagccgcgtctgatcgccgagcgcgccgcgtagacctccgctcccccagcaagatggaaagttgccttttgttcctccggaggaagaatttatt

SEQ ID NO: 5621 - DNA, 100 bp, Homo sapiens
tgggaaggagctggaaaatttggattatttagccttcaaacgtcagcaggaacggaaaacagttcttccttcaaagcatgcagtacctgaagtaatagaa

SEQ ID NO: 5622 - DNA, 96 bp, Homo sapiens
gatgaatcctgcggcagaagccgagttcaacatcctcctggccaccgactcctacaagttacagaatgtctgaaggggacagtgtgggagaatccg

SEQ ID NO: 5623 - DNA, 100 bp, Homo sapiens
ccactggctcatggcggccttggccttcaccaagagcatctctctcctcttccacagcccctctcaccctggtactgcatgcacgcaatgctagctgccc

SEQ ID NO: 5624 - DNA, 100 bp, Homo sapiens
gacatctgggggccacaaatgctccttctcctggagacgcaactcaagagctgatctcccgtccctcgcccccgaccatgcgctggttcctgccggactt

SEQ ID NO: 5625 - DNA, 103 bp, Homo sapiens
cccttcaaaaatttaaacaagaatccactgttgctactgaaaggtgcatacatagagacgtgaagccagaaaatatcctcatcacgaaacattccgtgattaa

SEQ ID NO: 5626 - DNA, 75 bp, Homo sapiens
cagccttggtgctcaggtgccagatgcaaaggagaagtgtgcccagtactggccatctgatggactggtgtccta

SEQ ID NO: 5627 - DNA, 100 bp, Homo sapiens
gactgtttccaaaacagcaagcatagggagagccgccggaagtattgacggaaagcttgaattacctacatgagtgaagttcccagaccctacgccccgc

SEQ ID NO: 5628 - DNA, 90 bp, Homo sapiens
aacatggctagcaggaatgcttactgttgcgtggttcgttattaacagatactgatttggtccttgtaattggagctaatgacactgtta

SEQ ID NO: 5629 - DNA, 90 bp, Homo sapiens
ttggctgcctcatccgcttctatgcagggtttagatgtagattctctggtcattgagcatatccaagtgaacaaagcacctaagatgcgc

SEQ ID NO: 5630 - DNA, 100 bp, Homo sapiens
aagctactgcagacgacgagctgagcttcaaaaggggggacatcctcaagcaccctggaggagaagaggttctgctggaacaagctggtgtagatgcaag

SEQ ID NO: 5631 - DNA, 90 bp, Homo sapiens
ctgctgcaagagagaaaaatagggatcgtccaacccgagaaataagcgggttttgaaaacaaaaaaaagaaggagtggaagagggggcca

SEQ ID NO: 5632 - DNA, 83 bp, Homo sapiens
ccagagactgctgagcccgtccgtccgccgccaccacccactccggacacaggagcaggacatcgagactttacatggctctg

SEQ ID NO: 5633 - DNA, 100 bp, Homo sapiens
ccaggataatgttatcaaagtatgtgcttcagtaacattcaaaaactatattaaaaggaactggagaattgtttatttcacagagcagtgtacattcttg

SEQ ID NO: 5634 - DNA, 147 bp, Homo sapiens
gcagtccgggggttgctcggctcctgtgtgcagctaatggtcgtcgtcggcatcctcctggcctacctggcagtactgccttccccaggccctgcccttccccaagaggaaaacacaggagaggaaggaatggctgctggtctcctc

SEQ ID NO: 5635 - DNA, 75 bp, Homo sapiens
atgatggggctcttccccagaactacaggggctctggccatcttcgtggaagaaatgcagagtaacgtggaagtg

SEQ ID NO: 5636 - DNA, 75 bp, Homo sapiens
tcctgctcaagatctcagagaaggaggaggtgaccacgcgcgaggacggggaggtttactgcatcgacgcgcggt

SEQ ID NO: 5637 - DNA, 83 bp, Homo sapiens
attcgaaggctcccagagtttaaattttggaaggtgctcgggtcttcggggcactgggtcccatcggtccctcctcacctggg

SEQ ID NO: 5638 - DNA, 100 bp, Homo sapiens
aatctgaacatcaatgatgtactagggaactactcattgactcttgttgatgcattggatacacttgcaatctgggacataggaggacaaccccgatttc

SEQ ID NO: 5639 - DNA, 75 bp, Homo sapiens
ctgtgcacgagggtctcggcctcgcggtgcagttccctgacatcgtggagttctgcgaggccatggccaacgccg

SEQ ID NO: 5640 - DNA, 60 bp, Homo sapiens
tgtaatcccagcactttcggaggccgaggttgacaaggtcacaggcaggtttaatggcca

SEQ ID NO: 5641 - DNA, 100 bp, Homo sapiens
ggtctacgagctgtttctcatctttatactcttccaggggccttcctgctgtgctggacgcccttcttcgtggtgcacatcacgcaggcgctgtgtcctg

SEQ ID NO: 5642 - DNA, 50 bp, Homo sapiens
catgactctggagatccgagaaggaagtactgagatgatgaggaacgtgg

SEQ ID NO: 5643 - DNA, 90 bp, Homo sapiens
gaccgtcttcattgtggagatctccctgacatgcaagaacagggtccagtggagacctttggcgacttggcctttggcgacatcttcctc

SEQ ID NO: 5644 - DNA, 75 bp, Homo sapiens
agaacaagcgctgcaaatacaatcactctaaaatgtgtgatagtctctctgccttctggggaaaagataactttt

SEQ ID NO: 5645 - DNA, 100 bp, Homo sapiens
tgtgtaccgtgcaagacggaagcagtttgctgacattgcctacaactaccgccagtttgacgcagaaggacaagccttagatggtgtttccatctctgat

SEQ ID NO: 5646 - DNA, 74 bp, Homo sapiens
cgaagtacaagatctaaggctcttgtctgaacccctgaacagtgcccaagtgttgtctctttgttgtcagagag

SEQ ID NO: 5647 - DNA, 100 bp, Homo sapiens
ggagcggctgcgggcggacagtctggactcctcaggcctctcctctgagcgctcagactcagaccaagggaaactctatggagacgcagactacttggaa

SEQ ID NO: 5648 - DNA, 100 bp, Homo sapiens
aggcaagaaacattctgaccctcacttgcttgaaaggaatgcatgcagcagaactgattaaaacagtggcatctcgctatgatgaatatgttaatgtgaa

SEQ ID NO: 5649 - DNA, 100 bp, Homo sapiens
cattcatctgggcatgcctgcagtactcttggcccatggacctgaaggagaagcacctggatttccactggacaaagcggttgcctatgcaaaactcagg

SEQ ID NO: 5650 - DNA, 83 bp, Homo sapiens
acgcgccgtggacacagacggggtggagcccatggaatcggtcctggaggacaggatttttagactctgaggagcagttggag

SEQ ID NO: 5651 - DNA, 100 bp, Homo sapiens
ctggacactgtcacactcaacatcacctctcagattgtccccttggggcggaaagaagccaaggccaaggagctggtgcggcagctgcagctggaggccg

SEQ ID NO: 5652 - DNA, 100 bp, Homo sapiens
cttcattcagatgtggtggaatatgccaaggaaaaactggagagcttcatcaaaaatagtgatagctttgataaggtcttactacatattgcaacagaag

SEQ ID NO: 5653 - DNA, 78 bp, Homo sapiens
attattacagcttcatatgcaccagaaggagatgaaggtggaacggcacatgtgtgatggggacattgttatcttcaa

SEQ ID NO: 5654 - DNA, 50 bp, Homo sapiens
atcgatctctcagggtcgtcgggtgaaggcgatgacccaggatgcagcca

SEQ ID NO: 5655 - DNA, 100 bp, Homo sapiens
ggaaaaacccagttcttcttaaaattctgtctcaacagccagtagaaacggaggaaggatatttggatgtttcgagctcgacttgtgaaaggagaaagaa

SEQ ID NO: 5656 - DNA, 82 bp, Homo sapiens
cagagagagacacactgagagggagatgattattagttgcgttgagtcatcaggcaaagtcgcaatggaagaagagatcgcc

SEQ ID NO: 5657 - DNA, 98 bp, Homo sapiens
gatatcatcgaccctcgcacactctttgtcactgagacacctggatttcattagcatcatgacctacgattttcatggagcctggcgtgggaccacag

SEQ ID NO: 5658 - DNA, 100 bp, Homo sapiens
ctcgcttcacggaggcaatagctagccgccctgtatgatgagattcgtcagtttcgcaaggcctgtggggaggctcatcttaaaactatattagcgacag

SEQ ID NO: 5659 - DNA, 50 bp, Homo sapiens
gctgaacctccacatcagaatgcatttcagatctgctcggtagacctggt

SEQ ID NO: 5660 - DNA, 100 bp, Homo sapiens
cgctcagctgaggaggacccccaaaggacccagatgatgtggtaccagttggccaaagaagagcctggtgttggtgcatgtgctttggactagcatttat

SEQ ID NO: 5661 - DNA, 82 bp, Homo sapiens
gaggagccagacgacaagcacacactatggcgctgaaacggattaataagtaagactttgaccccgacgcaggcttcagtga

SEQ ID NO: 5662 - DNA, 90 bp, Homo sapiens
ggcgtgcgcggacggtgtgcgggccataaaattttgagtagaaaaatccagaaatttgaaaatcagtatcgtggtagagagctgccaggc

SEQ ID NO: 5663 - DNA, 100 bp, Homo sapiens
ccgccgccgcccctgttgcgatggcgcagaaaccccgttgacaaggcactgctttttcatgacgggatgtcctttaactccattgcctccagttagtatt

SEQ ID NO: 5664 - DNA, 75 bp, Homo sapiens
atactacaggaaaatcctcaagtggtgtataaaagccagcaaggctggctggagagacagggttttgccgtgttg

SEQ ID NO: 5665 - DNA, 107 bp, Homo sapiens
caacaagccattcatgggccggttttatgagtgggaaccatttgcagaaggtgcagattcactttataggaacagcttcagcttcagtgatgaaaaactgaattctc

SEQ ID NO: 5666 - DNA, 75 bp, Homo sapiens
gacaacagcctggtggcagcggctcaggggagagagaaagcccagaaagaaagctactccagggtcctatggata

SEQ ID NO: 5667 - DNA, 105 bp, Homo sapiens
tttctgactcggtccggaacactgaaaccagtcatcactgcatctttttggcaaaccagctgataggaagatgtcttcaggaaatgctaaaattgggcaccctgc

SEQ ID NO: 5668 - DNA, 90 bp, Homo sapiens
gtcggagtttgagccccggaggcagagcggctgccatgagggctgtgctgaagtttgctgctgccactggagccactccaattgctggcc

SEQ ID NO: 5669 - DNA, 95 bp, Homo sapiens
ctatcaaccagattcttggcagaaggccttcctacagcaacttcccactccaggtggccagacgggagttccagaccagtgttgtctcccgggac

SEQ ID NO: 5670 - DNA, 101 bp, Homo sapiens
aaagacgaacggtaaccaagcccaacccaagcttcatgagacaactggaagagtatcaggggatcttgctggcaagatttccacaagacggcaccctatgt

SEQ ID NO: 5671 - DNA, 100 bp, Homo sapiens
gaccccgtacccatggctctgataatggaaccggtgagcaaatggtctccgagtcaagtagtggactggatgaaagtggcactatcacaacagagtgaca

SEQ ID NO: 5672 - DNA, 75 bp, Homo sapiens
gatatttagaggacattatcatgggctatgttggaggacccacatgtagtgtcattgctcatatgtgtcctgaaa

SEQ ID NO: 5673 - DNA, 49 bp, Homo sapiens
gaacttcttggaaggcagagaaaaggcatccgtgtcattctggacctta

SEQ ID NO: 5674 - DNA, 88 bp, Homo sapiens
cctttgtgtcatcctccacagctccagggaaggcactcaaaagtggggggcaggaaaggaggaggaagccaagaatctggtgagcgaa

SEQ ID NO: 5675 - DNA, 113 bp, Homo sapiens
cgccccggacatgaagcgctacctgtgggagcgctaccgggaggcgaagagaagcacagaagacacgatgaggcgagtggtacgacagagcaagtttcggcatgtatttgggc

SEQ ID NO: 5676 - DNA, 90 bp, Homo sapiens
ctcgataaatcagacagaacagttaatcctcaatttaagcctgatctaacccctagaaacagtgctgggcctaaaggagataacatttat

SEQ ID NO: 5677 - DNA, 99 bp, Homo sapiens
aattacaacacaaagaattggagtcacaggaacagataatcgcttatcagccgtatggaaaatctgtggactggtgggcctatggcgtcctgttgtatg

SEQ ID NO: 5678 - DNA, 118 bp, Homo sapiens
gggcggaagatcattgtgtttagtgcctgtcgaatgccccccagccaccagctcgaccacagcaagctcctgggctctgtctcccactccgtgctgtctgagatgcaggtgattgagc

SEQ ID NO: 5679 - DNA, 89 bp, Homo sapiens
aggcaccttctccatgcattgcaaggtggtgtaaattggtccaatgtaacttgccaggcaactcagaaaaaaccttggatggaaaaaaa

SEQ ID NO: 5680 - DNA, 90 bp, Homo sapiens
attgcctggcaggacgtgaaggggaagaggcccaccctggagtaaccctcactggagaatccagagatgcgtttagcccagcccctgctg

SEQ ID NO: 5681 - DNA, 96 bp, Homo sapiens
cctacttgcctaaatgaggaatgtctttcctaccatctaaaatacgaaggtttctggctggggagatgcacttatttacatggaaccagagaaaca

SEQ ID NO: 5682 - DNA, 75 bp, Homo sapiens
tctctatcagcctctatttgataaggcattgagtattctgaaacatttgaagtcatacagaagaatttctcctcc

SEQ ID NO: 5683 - DNA, 83 bp, Homo sapiens
gaaagacagatggaagtctttaaggtggaatccatagagctccccatggacaacaagaccaataagaggcgtgggttctgctt

SEQ ID NO: 5684 - DNA, 120 bp, Homo sapiens
cgcaaccggcagcagcgctgccgccgcgtcctcagccaccgctccctcttcccacgtcgcagatatggccagtacactatgaaccaggaaagcaccaccatcaaagttatggagaagcct

SEQ ID NO: 5685 - DNA, 82 bp, Homo sapiens
tgggagatccacagctaagacgccgggactccctggaaacctagaaatgtgcccgaaggaggaaacagtgacagacctggag

SEQ ID NO: 5686 - DNA, 83 bp, Homo sapiens
ccgcagccttgggcctcgcgccggctatggccgtgccctggggctgagccctcaggctactgcagcactggggtgtcagttgt

SEQ ID NO: 5687 - DNA, 100 bp, Homo sapiens
caacgattacatgcagccagaagaggactgggaccgggacctgctcctggacccggcctgggagaagcagcagagaaagatggatcctgagcttgaaaaa

SEQ ID NO: 5688 - DNA, 113 bp, Homo sapiens
ttgagctccaggagttcgtctcttacgtctgcggaagtgcagctgcctcagttcttagcgcagccaatgttttcagttgcaccaagcttagccaccaatgcatcagcagccgc

SEQ ID NO: 5689 - DNA, 100 bp, Homo sapiens
ccaagctcggggtccggcagcagctccagcagcagctccacctcccacctggcctccccgccgattttgggaaccagtaggacattgacatacatccgag

SEQ ID NO: 5690 - DNA, 90 bp, Homo sapiens
atttggctgttttcttacaccatgtagtttcacaatttgaccctgcgactttgctccgggttgacaaatggtggggtaacagaaaggaac

SEQ ID NO: 5691 - DNA, 75 bp, Homo sapiens
cgggaaccacgcgagctgcagccaggtggcgacatgtctaagaatgtgagccagtcacagatggcaaaattgaac

SEQ ID NO: 5692 - DNA, 50 bp, Homo sapiens
gcaaactactttcaggagaaagttggatggcaagcatgtggtgtttggca

SEQ ID NO: 5693 - DNA, 58 bp, Homo sapiens
tgagccctgtttttgccaccacactccagcttggatgtctttggtggacttgggaaag

SEQ ID NO: 5694 - DNA, 100 bp, Homo sapiens
gactgccgccgcggcctcggacgactcgccttcagaaggcaatataaagtcctggttcactctcaggaacgagagctgacccagttaagggagaagttac

SEQ ID NO: 5695 - DNA, 96 bp, Homo sapiens
cctcccgagtagctgggaccacaggatgagatgaacacttttaacaagagaacaggactctatataaatcgctgtgggctcaccacctctaaggag

SEQ ID NO: 5696 - DNA, 75 bp, Homo sapiens
cccaagcgccgcggttaaccacgtctcgtccacgacctccctaggtcatcatcagatttgaaatatttaaagtgg

SEQ ID NO: 5697 - DNA, 51 bp, Homo sapiens
actggtaggagcaattgtctactatgacgcttgcccaacagaaggtggaaa

SEQ ID NO: 5698 - DNA, 83 bp, Homo sapiens
agctcggatccctgaatttgatccagcacttgcacctcctgcgccgccgccccccatccaaggatatgccttcaagcctccac

SEQ ID NO: 5699 - DNA, 75 bp, Homo sapiens
ccccggctgcctcctccctgagatcagatccagactgtgaagacatgaaaagataatagttggaaacctcagcaa

SEQ ID NO: 5700 - DNA, 100 bp, Homo sapiens
atatggagaccccgggagcctcttcggcttctcgctggccatgcactggcaactgcagcccgaggacaagcggctacttgtgtatgcggatacctgcttc

SEQ ID NO: 5701 - DNA, 74 bp, Homo sapiens
aagccaggagcacccggcgtcccagacaatagagatggtttcagcatgttggccagtctggtctcagactcctg

SEQ ID NO: 5702 - DNA, 83 bp, Homo sapiens
ggtggctccagcatgtatcagccgaggtggagctgcggggccctggcatgaaagatgaggagcgggaaggcctcctgcaccct

SEQ ID NO: 5703 - DNA, 83 bp, Homo sapiens
caaagctggggattggccagctgactgctcaggaagtaaaatcgttgccattgccccaaatggagccttacagttggcaagtc

SEQ ID NO: 5704 - DNA, 90 bp, Homo sapiens
gcctcctggaaccacagagtcggttcagtctgtggattactactgtgatagaattcctcctgatcagcagagactgatctttgctggcaa

SEQ ID NO: 5705 - DNA, 82 bp, Homo sapiens
cggggaccaggacagtcgcgaggttcgagtgttgcagagcctgcggggcaagatctcaaattgtggctactaatttgccccc

SEQ ID NO: 5706 - DNA, 75 bp, Homo sapiens
ggcaggactttaagtggttgaaatacatcgtctacaaggagagagtgatagcagaatcctatttccaggaggagg

SEQ ID NO: 5707 - DNA, 82 bp, Homo sapiens
gggccccatcgagaaatggccgcgtcggcagcggaaaaaaacacctctggaatgataagccgccctgctccagggaggatgg

SEQ ID NO: 5708 - DNA, 74 bp, Homo sapiens
gagcagacggttgacagtgttgagtttgattgaagattctgaggttgggaccaagaaggaactatctattttaa

SEQ ID NO: 5709 - DNA, 135 bp, Homo sapiens
cagtatttgtacctgttggtctcagatctcctgaacctgtttctgctcagattgaggaaacaatggaagagacgttccagaagtagagagagagacagaagccgagagcgaagaagatctcgaagtagagacagg

SEQ ID NO: 5710 - DNA, 78 bp, Homo sapiens
agctgaattgggctgtggcagctggagccgaggatccagggtatcagctctgtgataacagcgtgggggtgctcttca

SEQ ID NO: 5711 - DNA, 83 bp, Homo sapiens
cggcggctggcgcttcctgcgcatcgtctgcaagaccgcgaggcgagacctcttgttgaatttttaggagaagaaggaactgg

SEQ ID NO: 5712 - DNA, 83 bp, Homo sapiens
ggtttgcgtcctgcactgaaaggaaatgacggattttgattattacaaaaccggtatcatcaattgtcctgatggcatctcta

SEQ ID NO: 5713 - DNA, 49 bp, Homo sapiens
gcagttttgtgtccatgtgaacaactatgccatggacaatattaccagg

SEQ ID NO: 5714 - DNA, 83 bp, Homo sapiens
cgaagaagcatcgttaaagtctctcttcaccctgccgtcatgtctaagtcagagctcagtgattgtgggaaacactcatgggc

SEQ ID NO: 5715 - DNA, 75 bp, Homo sapiens
tccaggcccgcgaccgtccgccagtcgtcccgagtgtactaatggtcacttgatgtgcgctggctgttttatcca

SEQ ID NO: 5716 - DNA, 83 bp, Homo sapiens
caattgtaaagtcatcgttggaacatacatatgatagttgagaaagacacatattctgatcatgaagaaataaacacaagtta

SEQ ID NO: 5717 - DNA, 90 bp, Homo sapiens
cagattcgcagtggtcgcttcttctccttgagccgatgatgagcaccccacctcctgccagcgagctcccgcagccacagccgcagccgc

SEQ ID NO: 5718 - DNA, 100 bp, Homo sapiens
atcattctgggtgacctgaatacagcccaccgccccattgaccactgggatgcagtcaacctgggctctaattcggccacttccaagtcaacaaatgttt

SEQ ID NO: 5719 - DNA, 100 bp, Homo sapiens
gtcggcggctcagttgtccatgaccctgaaggtccaggagtacccgaccctcaaggaattcacagacctcgggcaccgcctcgactgtctggacctgaaa

SEQ ID NO: 5720 - DNA, 75 bp, Homo sapiens
aggttatcatggattcccagcgcgggacagccagcggccctccaggcactgaagcgtaagaagaggtatgagaag

SEQ ID NO: 5721 - DNA, 90 bp, Homo sapiens
ctgcacatcgtggtggtcggatttcaccacaagaagggctgccaggacctgaaggagaagaaggagaaggtggaggagaaggcaagccgg

SEQ ID NO: 5722 - DNA, 74 bp, Homo sapiens
catggtcatgagctttgtgaacctgggtgtttcccattaaacactaccaggacaaaatcaggccttacatccag

SEQ ID NO: 5723 - DNA, 75 bp, Homo sapiens
aaacagatctgcgcttccagagcgcagctatcggtgctttgcaggatcagttcttaagagcagccccggtaactg

SEQ ID NO: 5724 - DNA, 75 bp, Homo sapiens
cgctgtcttcagtggcacagtggagcagctctgaagatgcaaaggagcgggacggtatgcgggccatcctggggt

SEQ ID NO: 5725 - DNA, 75 bp, Homo sapiens
gacctcatctttcacaaaggccttcacaacgtgacaatctccaatagacttgtgtcttcaccttgctgcattgtg

SEQ ID NO: 5726 - DNA, 75 bp, Homo sapiens
aagattactcagagattatagggagcatggctatcatgagaagtttttctctcctacaagaagccataatcccct

SEQ ID NO: 5727 - DNA, 74 bp, Homo sapiens
tggatatcaggggtcacagacatttcatggggctccactaacagtggtcccaggctgcacccatggcagaagga

SEQ ID NO: 5728 - DNA, 74 bp, Homo sapiens
actacagctgttcccagcttggttgcacttgagaaaattaatgtggcagctcaactgagaagtcatttccttgg

SEQ ID NO: 5729 - DNA, 82 bp, Homo sapiens
cgcgcgtgcgcggacatggcctcaaacgggatcgtgggactttaccagatcggtttgtaataacacctcgaagacgctatcc

SEQ ID NO: 5730 - DNA, 74 bp, Homo sapiens
cggaggcagaggtggaggcgctttgaaagatgcaaacagctataattttgcaaaaaaggaaaataactctcctg

SEQ ID NO: 5731 - DNA, 51 bp, Homo sapiens
aaactcaggctatacttttggagatgcaactacatgcgattatagcagcat

SEQ ID NO: 5732 - DNA, 51 bp, Homo sapiens
cggcggcggcggcgcggggaccgagtgaagacctaggaaaggacgttgaat

SEQ ID NO: 5733 - DNA, 83 bp, Homo sapiens
aaagctgaaattgagaagctttgtgagaagggcagaagggagactcatgcatctgtatgccgtgtgcgtggactgcctggaag

SEQ ID NO: 5734 - DNA, 95 bp, Homo sapiens
ctggatctcttgttggaagagaaaatgagtatgaaaacaaagttgcagtacgtgacagagtggcatttgcttgtaaattccttagtgatactcag

SEQ ID NO: 5735 - DNA, 50 bp, Homo sapiens
aacagtattgacgctgtaagagcatcagactgggaccattggtgatgaga

SEQ ID NO: 5736 - DNA, 75 bp, Homo sapiens
agctgtttgacccctttgacctcttcgatgtgcgagactttggaaagaagaggcaattcggacataaagagaaac

SEQ ID NO: 5737 - DNA, 50 bp, Homo sapiens
catggaaccagcaaggatttaagtgggaacatccagttgcaggaaaacaa

SEQ ID NO: 5738 - DNA, 96 bp, Homo sapiens
cagcgacagtacaaagaagactcttgtcacactaattgccaacaacaatgagttgagtccacgctccatgagaatgctgaacaccatccaaagcag

SEQ ID NO: 5739 - DNA, 100 bp, Homo sapiens
ggcagctgcgaggctcggagaaacaggcgccgcgggctccgcgcccggccggacccgggcccgaggttatgaagacagtatggagtttccagaccatagt

SEQ ID NO: 5740 - DNA, 100 bp, Homo sapiens
tgttcttttgctgcaaatgaagttgatggaattacactgtgatacgactgactgttgtctgcattcaaaagagcattctattaaagctaccttaatttgg

SEQ ID NO: 5741 - DNA, 90 bp, Homo sapiens
cggagaaccattaatcatctctaaggtgagccctattcccagaggcaggtggtgctgaccctgtaacccaaaggaggaaacagctggcta

SEQ ID NO: 5742 - DNA, 100 bp, Homo sapiens
tcttgaccagaaattaaatggtctcaatgaggaaattgctagagtagcccttagagatttgtttgattccatggataaaacttcttccagtattccacct

SEQ ID NO: 5743 - DNA, 82 bp, Homo sapiens
ggtgttcgactgctagagccgagcgaagctaaaatgtttattggaggcttgagctgggatacaagcaaaaaagatctgacag

SEQ ID NO: 5744 - DNA, 75 bp, Homo sapiens
cagagacctgggttgatatatcttccaacactgccgggaaggtggtgaaggtgggtctggttgaagactctccct

SEQ ID NO: 5745 - DNA, 50 bp, Homo sapiens
ggtgccaccgtggaaggacagaatgagtaaaggtgggattctatccaaag

SEQ ID NO: 5746 - DNA, 75 bp, Homo sapiens
accaacgtgggctccattcgcatctactttgaccggcgacattcaaatgcatcacaatcactttgtgaaattgtt

SEQ ID NO: 5747 - DNA, 100 bp, Homo sapiens
cgctctggggctcagccaggcctgcgcgggcccgaggccggaggaacccggactccggcgtagcggatgacagtgatgggattccgtggtcagaagaacg

SEQ ID NO: 5748 - DNA, 88 bp, Homo sapiens
attttagggtcctttatatagaagggagagtgctccatctcgaaaagcgagaaaggcctccagaccaccaacactcagctcaagtcaa

SEQ ID NO: 5749 - DNA, 90 bp, Homo sapiens
gcaacttgtgattggcggtgaccggatattcagttgcacatccccacatcaatgcactgccaatgctgatgactatcagccagttcgtct

SEQ ID NO: 5750 - DNA, 100 bp, Homo sapiens
catgaaggacctgagcctgacgcgggccgcgcggtgctgctcacggccgtgaactgctacagcgtgaaggccgccacccgggtccaggatgcctttgccg

SEQ ID NO: 5751 - DNA, 50 bp, Homo sapiens
aagattactctgcaacagctaaaggacatgttcccgatttgaggtgaaac

SEQ ID NO: 5752 - DNA, 100 bp, Homo sapiens
agaagagaagcagaattatacctagaagtctactaatggacagttagtcacccacctacatgttgaggttactataacaacagtaccaaggtggctgtga

SEQ ID NO: 5753 - DNA, 126 bp, Homo sapiens
tggatgaccagcgcgaccttatctccaacaatgagcaactgcccatgctgggccggcgccctggggccccggagagggtgaagttgaacaaattgctatgatgaaaccaaaaggccagactgaaca

SEQ ID NO: 5754 - DNA, 100 bp, Homo sapiens
gcgaagctggccgagcaggctgagcgatacgacggtttttagaacttcagccataaaaatgggcagaattttccttgatcatatcggtggtacccgtctg

SEQ ID NO: 5755 - DNA, 100 bp, Homo sapiens
gaggatgcagtggaggccatcaggggccttgacaacacagagtttcaagggtttccaggcctgaggtgcccgccctggccccaggagaatgaaccagccg

SEQ ID NO: 5756 - DNA, 91 bp, Homo sapiens
gtgtccgcgaagatggcgggccgggtgctggagaatctggtaaaagcaccattgtgaagcagatgaggatcctgcatgttaatgggtttaa

SEQ ID NO: 5757 - DNA, 74 bp, Homo sapiens
ggcggatgccctgcagtacctgcagaaggtctctggagacatcttcagcaggtaagaatgattgatgttggctg

SEQ ID NO: 5758 - DNA, 83 bp, Homo sapiens
ccaacaacccactcaggcacttccgtttggtgccctggttgtcagatgttggaaagcagtaggacggaacatactcttcgtgg

SEQ ID NO: 5759 - DNA, 75 bp, Homo sapiens
cgattctcctgtctcagcctctcaagtacctggaattacagtgtttgatatcctgtccacttacttagagactca

SEQ ID NO: 5760 - DNA, 90 bp, Homo sapiens
ctcagagatgcctgtaccgtgatgtgacgctggagaacctggcacttatatcctccctggggtcatgtggtttttgaagacgtggccata

SEQ ID NO: 5761 - DNA, 100 bp, Homo sapiens
acttctgccacagctactccatctggactcagtggcttttgaggatgtgtctgtgagcttcagccaggaggagtgggctctgctggctccttcacagaag

SEQ ID NO: 5762 - DNA, 75 bp, Homo sapiens
cgaggacggggcgccggcgccgccgcccccgggctcgcggcctgcaggtgcctttcctgaagactatcttctggt

SEQ ID NO: 5763 - DNA, 100 bp, Homo sapiens
agggtgtcaggactaagagaagtcacaaaacagcagatttcccaagagcagcggaaaatgatccagtcacaggccacgtgcgagcgagggtttgcagcaa

SEQ ID NO: 5764 - DNA, 100 bp, Homo sapiens
cgcgcctgagaaggtcaaggtggaggtgaagaagtttgtgaagatcggccgcccgggctacaaagaggaagaagaggtggataagatgatggaacagaag

SEQ ID NO: 5765 - DNA, 125 bp, Homo sapiens
ggctctgaaagctagaagaaaaggtgtacttgcaagaaacctcaggacttgagtaacagcaacatgaggacaagtcgtacaatggtggaggaataggttcttcaaataggatcatggacttcttg

SEQ ID NO: 5766 - DNA, 74 bp, Homo sapiens
tggtttagaaatggaaaaatgtgttggtgttcgaggaagagacattgttgttcttggtgtggagaagaagtcag

SEQ ID NO: 5767 - DNA, 100 bp, Homo sapiens
cagcagtccaggaatgcagtcagtctgttgatgaaactatgtggatgagcttttagaaaagtacatggactcttatgatattgttttagtacaagatgaa

SEQ ID NO: 5768 - DNA, 75 bp, Homo sapiens
aatgagtcaccggatgatggagaggtcaatgaggttggactcttcacagaaattgggcccatgtcttgcttcatc

SEQ ID NO: 5769 - DNA, 75 bp, Homo sapiens
ttggacgtcatcgagtctgtcaacctcttgttgctgctgacacgccgaccgcctgctgcttcagctacacctccc

SEQ ID NO: 5770 - DNA, 90 bp, Homo sapiens
cagtggctccatgtactctctgcaagggatccacggggacatgaatgtcattctctggccaattcagactctggctcctcctcctcctca

SEQ ID NO: 5771 - DNA, 101 bp, Homo sapiens
cagctctgaaaaactcttcaacactgttattgtaaacaaaggaaccactgacatttaaagatgtcgccatagaattctctctggaggagtggcaatgcctg

SEQ ID NO: 5772 - DNA, 50 bp, Homo sapiens
atcagagggacggccccagaatggcatgaatgaatctcgctgtgttgtcc

SEQ ID NO: 5773 - DNA, 82 bp, Homo sapiens
gtggctccagggacaggacggccaagaattcctcagagagagaagactgtaataatggcgaaccccctaggaagataatacc

SEQ ID NO: 5774 - DNA, 100 bp, Homo sapiens
cgtccagcctcatataagaagaaatctatgttaggagattacctggggcaattgatgttatcggtcagactataactatcagccgagtagaaggcaggcg

SEQ ID NO: 5775 - DNA, 100 bp, Homo sapiens
tcccggttctgccgcgcgggccctgcatgtggagctgccgtctcagcagaactaggacgcacgtgtctatcccggtctctggtctcttgtccagcgatag

SEQ ID NO: 5776 - DNA, 78 bp, Homo sapiens
caccaccaagatgtctctaaatgagcgaggagaggagacgccgtgagcgggacgaccagatgtaccgagagcggctgc

SEQ ID NO: 5777 - DNA, 49 bp, Homo sapiens
caaatttggtgcctggagtaggaggcaatgaatcgctccctggctaatg

SEQ ID NO: 5778 - DNA, 49 bp, Homo sapiens
gcctcaagtgcttctgcattacaggaatagtgcctaccgatcagctgca

SEQ ID NO: 5779 - DNA, 51 bp, Homo sapiens
gagggagaaaggcgggcccgggaacaggtgtaattgaaaagtgatcctctc

SEQ ID NO: 5780 - DNA, 90 bp, Homo sapiens
ggagactggattgtttcctggtagcaatgccactttcaggatactagaggttcaaaccttgtactactcagctgatcacaagctgcttga

SEQ ID NO: 5781 - DNA, 99 bp, Homo sapiens
cactgtgggaggaagatcctggagccaaagatgttgtccaccttgacagtgaaaaggtagatgctggctggattggattttggtccatagttggaggct

SEQ ID NO: 5782 - DNA, 100 bp, Homo sapiens
tgttggcgggtttcatgggcgtcatgaataacatgcggaaacaggtgaatctggattgggaaagtcgacattaatcaactcattattcctcacagatttg

SEQ ID NO: 5783 - DNA, 96 bp, Homo sapiens
ccaaattgggcgagggcacaaaataaccacttaccccttctcaccgaggaagagcgggagaaagggtggagatacactacgccttgacacacttat

SEQ ID NO: 5784 - DNA, 75 bp, Homo sapiens
gagcagcatctcctggaaagatgtaaatctcccaagtccaaagggtcgccttcgtcagacgtcagaatgattcct

SEQ ID NO: 5785 - DNA, 75 bp, Homo sapiens
aatggatttaaaaacaagtagagaattatgtagccgtttagagacattttaaatccaaaggatgtgattagtgtc

SEQ ID NO: 5786 - DNA, 100 bp, Homo sapiens
atttaatgccactctctcgaggatccagagatgcttcctgggaattagaggaaaacgcttatcaagagcttctgcagcactatgagcgttgtgatgttcg

SEQ ID NO: 5787 - DNA, 100 bp, Homo sapiens
ggaatgggtctgggaccttaacagggagccatgggaaaaattgaggaagcagtgaatgcatttaaagaactagtacgcaaataccctcagagtccacgag

SEQ ID NO: 5788 - DNA, 98 bp, Homo sapiens
aggacttcacggagctctggagaaacatgaagttcgggactatcttctgagtttacccttacctgtgtcgggccttgaaaacattcgtcaaagaccgt

SEQ ID NO: 5789 - DNA, 98 bp, Homo sapiens
gtgactccccgcagcctggacaggcatccgtgtcattctggaccttactcccaactaccggggtgagaactcgtggttctccactcaggttgacactg

SEQ ID NO: 5790 - DNA, 75 bp, Homo sapiens
ttgattgactatggtctctccggctaccaggtttggtgcacctcgatttggaggaagtagggcagggcccttatc

SEQ ID NO: 5791 - DNA, 100 bp, Homo sapiens
tggaagagattcctgagaatgacaggtgtcatggagaaactccagctgggcccagagattctgcagcgggaaaatccaaggcttatttatgccaggctga

SEQ ID NO: 5792 - DNA, 96 bp, Homo sapiens
gaaaggaggcccctgccgtgtggacccgtaaaataaaatggatgtcaatagtgatggattcctggatgaacaagaattagaagccctatttactaa

SEQ ID NO: 5793 - DNA, 90 bp, Homo sapiens
cagcgcggccgcagcagccctgttcttcacacacccccattcggcgtagtacccagagagctcaagatgtgtggcagttttcggatggaa

SEQ ID NO: 5794 - DNA, 100 bp, Homo sapiens
ggggactgcgggcggcgctgtgtccgtcgccatgacagagaccatggtgagagcaccagcaagctggccagtgtgacccgcagcgtggacaaggaccctg

SEQ ID NO: 5795 - DNA, 76 bp, Homo sapiens
gcgctatggagtcgcccgcagtgaccaggtgaaaaaactacagctgatgctaaggcaagctaatgaccagttagag

SEQ ID NO: 5796 - DNA, 95 bp, Homo sapiens
ggacctcattcagacagaatctattaccttggtctggtgtggcagatgtggatagctggaccctcctgggtgcctctgcgttatgtcgtttggtt

SEQ ID NO: 5797 - DNA, 75 bp, Homo sapiens
gtttgaacaaactcgaagaacagctgtggaaagaagttgcaaaacactggtctttcccagggaactccgatgaag

SEQ ID NO: 5798 - DNA, 100 bp, Homo sapiens
aaagtgctcctgggactccaggataccaggtgctggcccagcagggggagtacagtgaggccatccccatcctgagggcagccctgaagctggaaccttc

SEQ ID NO: 5799 - DNA, 90 bp, Homo sapiens
cgccaagagtgagcgagcggacccgcgatgggttaaaaagatcaagtggcatgagcagccttttggggaaaattggtgccaagaagcaga

SEQ ID NO: 5800 - DNA, 100 bp, Homo sapiens
ctgaggaggcgagctagccgggagttacaccgccaccgccaggagtctccccaggacagtgctatcacccgggatattaaccgaacattcccagcccatg

SEQ ID NO: 5801 - DNA, 82 bp, Homo sapiens
agaagagcacctgtggataccctgaggcctcggcagacatgccgccaccggcacggccaggccagcatggtggaccacttac

SEQ ID NO: 5802 - DNA, 93 bp, Homo sapiens
taggatattgtggaacggtgaaaagaaatctgttgcttcttgcatgggcttgcacagaaatctggaggcagtatcacctaacggtgagtagaa

SEQ ID NO: 5803 - DNA, 83 bp, Homo sapiens
ccaagctgtcatcacaaaagagttgattgaaattatctctggtgctgcagctctatacttggtgcttgaaaaactgaagaagg

SEQ ID NO: 5804 - DNA, 51 bp, Homo sapiens
tggcggacagtgcggaactaaaggagcttgaagaaatccgcaaatgtggga

SEQ ID NO: 5805 - DNA, 95 bp, Homo sapiens
ctgtcgcgagaagtggcggcatcgagaccatcgccaatgagtacagcgacaggtgtacccctgatcttgagcctgaatggctggacagtgtgcag

SEQ ID NO: 5806 - DNA, 51 bp, Homo sapiens
aaaattatttatccaacagctcctcccaggaagtgtttggattgtgagcta

SEQ ID NO: 5807 - DNA, 108 bp, Homo sapiens
ctttatgaagaaggttccaacaaaagactttttaatgttgatcggcatgttggaatgtggcacctatcactctcgagatgagagtacagacagtggactaagcatgag

SEQ ID NO: 5808 - DNA, 91 bp, Homo sapiens
aacctacggggtgtacttgggaacgaggggtgaagcggcccaggtgagggttgctgcttttgctcagaggacatccatgaccctaatggtc

SEQ ID NO: 5809 - DNA, 100 bp, Homo sapiens
tctgacatttaagagaaaaaactgtggctgttggtttgtggaacagacagctccttctttattgaaaaggaagatggcgccatttctaccatagtacttc

SEQ ID NO: 5810 - DNA, 75 bp, Homo sapiens
gaaagaccttgatggaccagcaatacaagcgttggagaccagggccagccctggccacaccccaggctgtgtcac

SEQ ID NO: 5811 - DNA, 88 bp, Homo sapiens
gaggctctgagccccggcggcgcccgggcccacgcggaacgacggggcgagatgaggaaactgagacccagaaaggtggaagcacttg

SEQ ID NO: 5812 - DNA, 50 bp, Homo sapiens
cccagcacttttggaggccgagctcaaactttggaacaaataccgaattt

SEQ ID NO: 5813 - DNA, 98 bp, Homo sapiens
gacggcatcatcaacccagacaagccagggctctgccagcagacagccttggcacacaggcacaagggctggagcccagagatgagagtgcccaaggg

SEQ ID NO: 5814 - DNA, 74 bp, Homo sapiens
ggcgcggggaccgctgtgctctcggctgcagagactgcaagtctggaagaacagctgcaaggatggggagaagt

SEQ ID NO: 5815 - DNA, 82 bp, Homo sapiens
caaccctctgcattccatctctatgagccaccatatccaaacgatcaaagatgttgctggagataaataggcagaaggaaga

SEQ ID NO: 5816 - DNA, 75 bp, Homo sapiens
gttgcacatccccacatcaatgcactgccaatgcatgcagcagattggaataaatatgatgaccgattgatgaaa

SEQ ID NO: 5817 - DNA, 97 bp, Homo sapiens
gagccccttgcagaagacgccgtacgaggtgatggctgtggacacctagtgacttatcaggatagtggcacaatgacatctaagaattatcccggga

SEQ ID NO: 5818 - DNA, 75 bp, Homo sapiens
tgtgaacatgctgcacgtgtttgttctgggcgaatggcagcccatcgagactccccatccccaggatgtcaacct

SEQ ID NO: 5819 - DNA, 82 bp, Homo sapiens
cgcccttccccctgtctctgccctcctggcgggcccggcggctctcactatccaggttaatttggagtggcccctggagtca

SEQ ID NO: 5820 - DNA, 100 bp, Homo sapiens
ccagaacgacctgatgggcacggccgaggacttcgccgaccaggtgctggagaatctggtaaaagcaccattgtgaagcagatgaggatcctgcatgtta

SEQ ID NO: 5821 - DNA, 98 bp, Homo sapiens
aggctgttccctaagaaggtctgcccaggactcaggtggggaagctgaggcaggaagccctttagtcacttgccgaaggccacgctgttacccatggg

SEQ ID NO: 5822 - DNA, 88 bp, Homo sapiens
ggaaggacgaggctgaggcgagaaacgagctttcaggatgccaacccgcccctgaaggttattccccaacacttcaatggcaacagca

SEQ ID NO: 5823 - DNA, 97 bp, Homo sapiens
tttaattgccatgctggccattacttctgctacataaaaaatagcctaacatggcagaccagagacagcgctcactgtctacctctggggagtcatt

SEQ ID NO: 5824 - DNA, 100 bp, Homo sapiens
cagacgcagggcacccggaggaaagtctgttactactacgacggtactggcacacggatgaggagtcgtagaagaggggcctgcagattgtgctctcagc

SEQ ID NO: 5825 - DNA, 83 bp, Homo sapiens
ccccaccttgatccagcggacttacggggacaagaatccttcaagaaacaggaaaaaactcctaaaacaccaaaaggacctag

SEQ ID NO: 5826 - DNA, 100 bp, Homo sapiens
ggctcagggtatccaagtatttgatcctggggagtctgattcagatgacaactgtacagatgtcactgcaaaacgtcatattatttcacaaaaagcccag

SEQ ID NO: 5827 - DNA, 82 bp, Homo sapiens
ggcagtgctcccggaacacaagctgtgaaacactaggtacagcatcctgctgcaaaaatgattgtaatggcttctcatatgc

SEQ ID NO: 5828 - DNA, 100 bp, Homo sapiens
cttggaaagctgaacaaaatgagtgaaaactctataccgtcatcctcgtcgaactgaggtcctgtcttcggggagaaacattctaaatcacctgccctct

SEQ ID NO: 5829 - DNA, 100 bp, Homo sapiens
gaggcggaggcagcggctggaggagcgcgagcggcggtttccttgcccggggccgcgggaaggccgaccgactgccgcgttggttgaatctggcgatgtg

SEQ ID NO: 5830 - DNA, 100 bp, Homo sapiens
cccaccaggcaagcctgggccttctggtcaacctggccgtccggggcccccaggccccccacctgcagactctgaagaagaagctatggagactacacca

SEQ ID NO: 5831 - DNA, 100 bp, Homo sapiens
tatggagtgattcctactcttcactgggtttggctcaatggaggaattggtgctcctattgtacaggatggccaggccatgttatgggatctcaacgaag

SEQ ID NO: 5832 - DNA, 101 bp, Homo sapiens
cgagcaacacagtcacggcagcccacatcaagaagttcaccttcgtctgcatggctctgtcactcacgcgacatcatattggagatcgcagtctttcctta

SEQ ID NO: 5833 - DNA, 82 bp, Homo sapiens
ctttaaaggagactacctacactgaacagagccatgaagaacttggagaggttttcaataaactgctaagtctggctagtac

SEQ ID NO: 5834 - DNA, 83 bp, Homo sapiens
ggcttatcgaacagagccgggagttcaagaagaacactccagagcggagctggagtttgttcagatcatcatcatcgtggtgg

SEQ ID NO: 5835 - DNA, 74 bp, Homo sapiens
cgtgcacatccaggctggtcagtgtggcaaccagatcggtgccaagagacgagttgtactgctgtcacaggaaa

SEQ ID NO: 5836 - DNA, 51 bp, Homo sapiens
cctttgggacgagtgctgtgactgtgttggggtccacgcggggcctgtccg

SEQ ID NO: 5837 - DNA, 83 bp, Homo sapiens
caacaaccagacagggcagcacgccgtcattgacatcaatgccttcccagggcccggcctgccccgcacctgagctgccctcg

SEQ ID NO: 5838 - DNA, 100 bp, Homo sapiens
ttctgaatcagccatcaactcagtaacaaatgtggcaattattttggatctatcacctgtcatcataactggcttctgcttgtcatccacacaacaccag

SEQ ID NO: 5839 - DNA, 97 bp, Homo sapiens
atggcacttcattggccacctacagaaacaaaatgtcaacaaattgatgggagaaactcccatgtatggaatcccactgtatgatttataaacagac

SEQ ID NO: 5840 - DNA, 100 bp, Homo sapiens
ggatcctgagatccggagcagccggggtcggagcggtatatgatcttccccaacgacctaatgatgttcagctcttttatggaagcatgtgtaaaattat

SEQ ID NO: 5841 - DNA, 100 bp, Homo sapiens
ccagcagtggggattgcaaagcgaactacatatggaggagtgtctgtgccctgcaggagtcattaaatcaaaacttcatgctgatcatcacccaccgaga

SEQ ID NO: 5842 - DNA, 96 bp, Homo sapiens
ccgccgcccgccgccgctggagctagagggcgtgatggtgggcatgggtcagaaggattcctatgtgggcgacgaggcccagagcaagagaggcat

SEQ ID NO: 5843 - DNA, 75 bp, Homo sapiens
cagaattctctacatttgtgaaagtcagtttctgaggaatttcatcagcccctctggctgtacattctggggcaa

SEQ ID NO: 5844 - DNA, 74 bp, Homo sapiens
ccgcagttcccgggccagcctggggcggccggccaggaaccacccgttaagcaatggctgccatccggaagaaa

SEQ ID NO: 5845 - DNA, 100 bp, Homo sapiens
ccgatgagtggccgcgcggaaggagctggagacggtcgtagctgcggtcgcgccgagaaagggagtggagcttggtttcgggatctcggtgctgcagacg

SEQ ID NO: 5846 - DNA, 100 bp, Homo sapiens
acatctgtcctccacagaggctttttgtgtgttttatcatctaaaatccaatccctcgggtgaagttgaacaaattgctatgatgaaaccaaaaggccag

SEQ ID NO: 5847 - DNA, 80 bp, Homo sapiens
tggaaagagagcaaggggaaggatcgggagtacacagacatcatccggccccttcccagctgcctgcctgccctagccag

SEQ ID NO: 5848 - DNA, 100 bp, Homo sapiens
aatcagtctttgacaagtgatgagaagctgtcggagcttcccaaggtttttcttcccccagtccctcagctgctgctgctgctcaggaggtcagatctgc

SEQ ID NO: 5849 - DNA, 100 bp, Homo sapiens
gtggcagcccagcgaagcccagataagaagacgtgccccatgaagacaatgcagatcttcgtgaagactctgactggtaagaccatcaccctcgaggttg

SEQ ID NO: 5850 - DNA, 75 bp, Homo sapiens
gaaaaagcccaaattggaatctaagccatctaatggagataggttgcagatatcaagaaagtcaacaacttcatc

SEQ ID NO: 5851 - DNA, 85 bp, Homo sapiens
tgaagaagatcgtaacaacttatgacatgacggatgtcttaaaatgggatctcatcgtctgcgcagtggttgctgtcctctcatt

SEQ ID NO: 5852 - DNA, 100 bp, Homo sapiens
tgccaccctgagtgtcagccccagaatggctcagtgacctgttttggaccggatgctggtggactgtgtgcccctggtggaggtggacgacatgatgatc

SEQ ID NO: 5853 - DNA, 82 bp, Homo sapiens
ccagaggccggggaccttgccaaccctcccaagaagttcagagattgattataccggaacagagccttccagtccctgtaat

SEQ ID NO: 5854 - DNA, 74 bp, Homo sapiens
cggcccacagtgggggtgtgcaaacccgagagaactggtggcctgattccaccaagagaaggcccaggaggaag

SEQ ID NO: 5855 - DNA, 90 bp, Homo sapiens
ggcctgttgtctaccaagtgcagtttaaataagcttttgtgctgccttgcaccaggaactcagagaatactatcgattgctctctgtttt

SEQ ID NO: 5856 - DNA, 100 bp, Homo sapiens
ttgccatcactagaagatttggataatacagtatttggagcagagaggaaaaaacggctatctataatagggcgagatgtgtgacagaggtggcatcaag

SEQ ID NO: 5857 - DNA, 99 bp, Homo sapiens
gtcaaccccaaccttcagaacctggaggagacaattgaatacaacgagatcctagagaaaaacctctgccctgctctcatcgtgatcttggggaatcca

SEQ ID NO: 5858 - DNA, 100 bp, Homo sapiens
gtacaggctcagtctgcggccaagactccatcctgcaaggaaacctggacaagcatgaagaactagaggagcttgtagcaaggttcttaggagtagaagc

SEQ ID NO: 5859 - DNA, 100 bp, Homo sapiens
ggggacctgaagctgcttcgggagtggccataaaatgcagtaaaaacaaatccagttcccaagaagctgtacaaatgctttcttctgttcgactcaattt

SEQ ID NO: 5860 - DNA, 75 bp, Homo sapiens
tcgccaggaagagcctttgcctgactcagggcagctcagagtgtggggtgcccacagtttgtgtgctgcggagat

SEQ ID NO: 5861 - DNA, 100 bp, Homo sapiens
ggtgaaggctgtgctgctgggagccacattcctcattgtacggttcctggagcagcagaacaagatgctggagaccaagtggagcctcctgcagcagcag

SEQ ID NO: 5862 - DNA, 100 bp, Homo sapiens
tagtgtctgtgccgcctaccaggcagagcctgaggaagctgaagcagaggtttcccagacatatgtagagtgtgtcggtcagaaggaacacctgagaaac

SEQ ID NO: 5863 - DNA, 82 bp, Homo sapiens
ctggctccgggggtggcgggcgcagctgctgtgacagggggatatgagactttctactcggaatatcctgagtgttgcgtgg

SEQ ID NO: 5864 - DNA, 82 bp, Homo sapiens
gagacgagaagcctgaaaagtcgcagcgagctggagccgccggaggtatcatgatattagctggtttgacatcaagtcattt

SEQ ID NO: 5865 - DNA, 82 bp, Homo sapiens
gtctctcgccacagcggcctcggcctccccttggattcagacgccgattcgcccagagtgcctggaagagctgggatgtctg

SEQ ID NO: 5866 - DNA, 100 bp, Homo sapiens
acagacattaacagtatttactgagagctcatcagttgtggacatcggatacccaaggagacgaagctgaagcaggagaaggaggggaaaattaaccggc

SEQ ID NO: 5867 - DNA, 74 bp, Homo sapiens
cagatggataccgtatcgacgtggggcctccggaatatgatgaagaatgggctaagaaaattcagagtgaaaag

SEQ ID NO: 5868 - DNA, 90 bp, Homo sapiens
gaggggcaaatcagagtgaagaggaagccagaagatgggagagacatttttgaatcaactgcttggaccagcatgttcggaagtcccccg

SEQ ID NO: 5869 - DNA, 49 bp, Homo sapiens
aggaactcagccctgattgcgcttcctgcctgacacagctcacttcaag

SEQ ID NO: 5870 - DNA, 90 bp, Homo sapiens
agaatttccaaaacatgctccattggaaattgcctcaccagttctaaggctggtggacgaagccattgataccaaatctctgttggatgc

SEQ ID NO: 5871 - DNA, 87 bp, Homo sapiens
tgctgcatcaagaaacccaagctgctgagatcaccagaaactagaacgtgaggctcggatatgtcgacttctgaaacatccaaacat

SEQ ID NO: 5872 - DNA, 82 bp, Homo sapiens
caagcaggtctaccgggccacgcaccgcctgctgctgctggacctcctgccccccgaggtctgcagtctcctgaacccagca

SEQ ID NO: 5873 - DNA, 74 bp, Homo sapiens
atgtttgtaaatgtgagtggaagccatgaggccaaaggcagttgtattgacatgtccatcttcgggcactgccc

SEQ ID NO: 5874 - DNA, 90 bp, Homo sapiens
catcaggtgctggaggcccctggtgtctacgtgtttggagaactgctggacatgcccaatgttagagagccccacacatgcgccctggct

SEQ ID NO: 5875 - DNA, 83 bp, Homo sapiens
cgacaagccgctggcagccgcggatctcaccgccgctcagggggtttgattcaggagatgagcggcgatgcttctgtgtgccc

SEQ ID NO: 5876 - DNA, 71 bp, Homo sapiens
gccacagagacagctcaggaagcaactttgatatgtcttgtcgttcaagacttgcaacactaaacgagaaa

SEQ ID NO: 5877 - DNA, 100 bp, Homo sapiens
cctcattccaagttccaggattaattctgaattaaacaaccaccatgtcgagcaaaaaggcaaagaccaagaccaccaagaagcgccctcagcgtgcaac

SEQ ID NO: 5878 - DNA, 100 bp, Homo sapiens
gaagatgagagagggtcctgcaaaggacagtcattttgtttactcattcagccctgttgcaggtcccaataaactcttcataaggttgacagaagcaccc

SEQ ID NO: 5879 - DNA, 80 bp, Homo sapiens
tggataatggagaaagaaataccaaggaagactatttttggcttaacagcattgcgcagtgatgaagtgattgatttaat

SEQ ID NO: 5880 - DNA, 98 bp, Homo sapiens
agccgaagccagactgggcacacaccggcagccacagctccgaagctggcaagaagggtgattctgggggcccacttgtctgtaatggtgtgcttcaa

SEQ ID NO: 5881 - DNA, 100 bp, Homo sapiens
ccgctgcgcgcatgggcctgttcctggcccgcagccgccacctacccagtgaccatgataggtggtttcagacaccctcacaggttttctaccatgcagc

SEQ ID NO: 5882 - DNA, 98 bp, Homo sapiens
gcctggatttataccggttcagcaagtatgttctcagaagctatacactcattatctgatacttgtaatcagatctttgatgatgcgtacaaatccca

SEQ ID NO: 5883 - DNA, 97 bp, Homo sapiens
tgacagtaacagtacttgggatcccccagttccaaagtgtcttaaaggaactgtggctgcaccatctgtcttcatcttcccgccatctgatgagcag

SEQ ID NO: 5884 - DNA, 89 bp, Homo sapiens
aacaggcacacaagtgtgaggagttgctaaatgctcagctgctctgttaaaagcgaaaatgaaacaattgcctgcggcaacagttcgac

SEQ ID NO: 5885 - DNA, 100 bp, Homo sapiens
aagaaaaggtgtacttgcaagaaacctcaggacttgagtaacagcaacatgacgaggacctattaaacttggaatggctaaaatcacgcaagtcgacttt

SEQ ID NO: 5886 - DNA, 99 bp, Homo sapiens
ggcgccagcctgcgaaggtggcggcgctgctgctcgggctgctcttggagcaattctgtggtgttcttggtcacacatttatggagtttctgaagggca

SEQ ID NO: 5887 - DNA, 101 bp, Homo sapiens
ttttgaacaatatttctcagaggatagcctttcacttattcatctgtccagcatgactcatccccgggagtgttgagtacagagccagatggactccttcg

SEQ ID NO: 5888 - DNA, 75 bp, Homo sapiens
attacccttgaccctttgggtgcttatatctgtaagcactgcagaacctgcacttgttgccaagtcttccatctt

SEQ ID NO: 5889 - DNA, 75 bp, Homo sapiens
tttacccaagaaccattggtggagatagaagctcatgatggagcagtccaagaagtcctccctcatggtggcccg

SEQ ID NO: 5890 - DNA, 100 bp, Homo sapiens
cctgccgcagatcgctgtagtgggcggccagagcgccggcaagagctcggtgctggagaacttcgtgggccgagcccgaacccagccctcaccttctgcg

SEQ ID NO: 5891 - DNA, 80 bp, Homo sapiens
ccactgtcttgttccgaggcggccccagagattcctgacattcagacaactgacttgtaactgacttataactgacttgt

SEQ ID NO: 5892 - DNA, 107 bp, Homo sapiens
aacctatgtgatcaacaagcagacgccaaacaagcaaatctggctatcttctccatccaggccccaggcatggaagagctgatatgggaacagtacactgtgaccct

SEQ ID NO: 5893 - DNA, 156 bp, Homo sapiens
ttttggaccttttttcatttccatttctaccttgtatgcctcaatttgctggatttaagcactgctgcactttatgaggaatacatgcaccacctgctcgccctggagcatcgcgctgaggagcagttcctggagcactggctgaaccctcactgc

SEQ ID NO: 5894 - DNA, 51 bp, Homo sapiens
tggctaggtgtaaaaaggcagccgaactctaagaaggagctgatgtggagg

SEQ ID NO: 5895 - DNA, 75 bp, Homo sapiens
ttaaaaacattgacatttaagttgacttcgacccccaccacttctggcagtggagcagcttctcggactacgtgc

SEQ ID NO: 5896 - DNA, 75 bp, Homo sapiens
gggctgtgacgctgctgctggggtcagtcccaaagacacctgtcgagatccccaggaattgtgtctaccaaccta

SEQ ID NO: 5897 - DNA, 100 bp, Homo sapiens
taaaagatatattacatgctgcaaagcagatagaattaactcctgaggagagagcccaaaagattgccaaagccatgcgcaaacagtcttctgaagtcaa

SEQ ID NO: 5898 - DNA, 75 bp, Homo sapiens
tccaacaccctggggatttccaccaggaaggtgtacgcatgatcagcctctcctattcccgaatctccttggctg

SEQ ID NO: 5899 - DNA, 121 bp, Homo sapiens
gctgcagaagtgtcagagactgaggacttaaatgaagccactgattagcaatttaaagatcctctccaaggaaacccgaaccctagcggagattgccaaagtggagctggacaatatgcca

SEQ ID NO: 5900 - DNA, 83 bp, Homo sapiens
tggaagggaggagactcctgaccctcagaatggtctctttttcagtcatgcaggagtcagtcgaagtgtggccataataactg

SEQ ID NO: 5901 - DNA, 71 bp, Homo sapiens
cccttctctattacctcaccttggcatcgacaggcctgggctctaacatcttccgcctgctagacagcctg

SEQ ID NO: 5902 - DNA, 97 bp, Homo sapiens
atcatcaaaaagctgaatgcacgttataacttgactggctccaatgcagaaaaggatgcgcctccacttagcaaggctgggcaggatgtggttctgc

SEQ ID NO: 5903 - DNA, 83 bp, Homo sapiens
ctcaattacacttcgactctcaaagcaataccaggatagctgttgtttcagagaaaggtatccacggaagaagttctgggttg

SEQ ID NO: 5904 - DNA, 75 bp, Homo sapiens
gatatctgggatgacagcagcctttttggtatagatatgcagataatcaccagaatgggagtgaatgacttgtgg

SEQ ID NO: 5905 - DNA, 75 bp, Homo sapiens
cgcttcgctccggtcctcggatcccgagcgcggggaggcagaccgattcttcccctggtggccatgggacccagg

SEQ ID NO: 5906 - DNA, 100 bp, Homo sapiens
acgtccctcaaaccttgcttctaggagataaaaagaacccagtgacttgattgtaaaaatttacagagcggaatcatatgctggtctccaagagtttaaa

SEQ ID NO: 5907 - DNA, 101 bp, Homo sapiens
agcagggccttctgcagcaaggccgggaactgctgcaccattgaatcattgatcagcgattcgagaaggtttcctactttgtatttggtgatttcaacttc

SEQ ID NO: 5908 - DNA, 51 bp, Homo sapiens
gtcaccaggacccaaggaaccagtgattcgttggaaaaattcattgtctct

SEQ ID NO: 5909 - DNA, 75 bp, Homo sapiens
ttttttggaactcatgagacgattatattccatcacaacaagatattctgcttgccagaagacccaccaaaggca

SEQ ID NO: 5910 - DNA, 90 bp, Homo sapiens
gtcgtttgcagcaagtcagctcaggacgcacaagaccagccactgctaccgcatcacgtaccgccacatggaacggactctgtcccagag

SEQ ID NO: 5911 - DNA, 89 bp, Homo sapiens
tggaggcggcggcgatgcactaggcctcgctcagggcggctgccccgggacccgcagttgatgcggatgaaattaaaaggctaggaaag

SEQ ID NO: 5912 - DNA, 50 bp, Homo sapiens
gccaagtgtccggagctgcttccaatttaaggagctcaaaaagtgggatg

SEQ ID NO: 5913 - DNA, 83 bp, Homo sapiens
gctggcggctctgcgtacgctggttggcatttgctctgagcatcagtcacggggtaattaaaaccatggaggcgatcagcgag

SEQ ID NO: 5914 - DNA, 100 bp, Homo sapiens
cttgtttgtggatcgctgtgatcgtcacttgggctgttttgctgcagcttctgaagtgttaaagcacttgaaggaacgatttccgcctaatagtcagcac

SEQ ID NO: 5915 - DNA, 51 bp, Homo sapiens
ccttccagctgtttgaccgaacagctgaagaaacacttaaattctggaaat

SEQ ID NO: 5916 - DNA, 100 bp, Homo sapiens
ccaggacctccttcttcaggagagcgccccagggcaagccccgctccggccaacaaaaatcatgttgttgatgtcagtgttgcggtcagtactcctgcag

SEQ ID NO: 5917 - DNA, 98 bp, Homo sapiens
gtcagccatgaacggatggatgtgatgcctgctagccaaaaggagtctttggaacaaattcttccaagataaagaacttcgatcaatgattgaacaag

SEQ ID NO: 5918 - DNA, 50 bp, Homo sapiens
ctcgttttgaaaatcttggagtaagaaaacggtccggatgtaccccttcc

SEQ ID NO: 5919 - DNA, 88 bp, Homo sapiens
cgagtggtgggagaaccagccgactggagcaggcagcagcccaggacagaactgtaccgctctctttttggccagctccaccctcccg

SEQ ID NO: 5920 - DNA, 100 bp, Homo sapiens
cttgaacagctatgcatgctgcttttgatgtctgacaacgtggatcgttgttttgaaacctggattccaatggggaattactaatccgaaatgcgcagct

SEQ ID NO: 5921 - DNA, 100 bp, Homo sapiens
cggctgggcgttcatctaccacgctttcgtacactcctagaatatgcagagaaatggaaaacttcagaagatcctttacctttattggaggtatacacag

SEQ ID NO: 5922 - DNA, 82 bp, Homo sapiens
ggccgggtccgggagccccagggcagccgccccgccgagtcgcaggtgacttaagagattaaaattaatttggttgctgttg

SEQ ID NO: 5923 - DNA, 100 bp, Homo sapiens
cagcattggttttccaaaaaatgtgagactttttcttggacgaattcaggaatagctattcagtcagacagaaccacttatcacgttttgcagtatctcc

SEQ ID NO: 5924 - DNA, 96 bp, Homo sapiens
ccgcgcctgtcctggatcgacaccctctacagcatatgaaaacaaagttgcagtacgtgacagagtggcatttgcttgtaaattccttagtgatac

SEQ ID NO: 5925 - DNA, 74 bp, Homo sapiens
ctgctattgaaagagagtatgcacagggcacttgatgacattagtgaaagcatcaaagagcttcagttttaccg

SEQ ID NO: 5926 - DNA, 90 bp, Homo sapiens
ggagctcagagcgttgcttcggtttccctccagacaggaggacatagcaaagctgctgcgctacgagtcctcggcgctgccctccgggca

SEQ ID NO: 5927 - DNA, 75 bp, Homo sapiens
gaagctcaagaaactggagtccagtgtgagcactggtcgtaaatgaaaatcctgccttgcttcgttgggcctatg

SEQ ID NO: 5928 - DNA, 80 bp, Homo sapiens
ttggaaggtcgctgggaggtggcattcaaagttatgcaaagggtgacctggacatatcttacatcacatccagaattgca

SEQ ID NO: 5929 - DNA, 100 bp, Homo sapiens
ttacaatgacagatacgatgagctggtcccagattcgctgctggagtgctggatggagcctttctctgccctctgtgacatttccaattttagataatgc

SEQ ID NO: 5930 - DNA, 95 bp, Homo sapiens
cctgagatcagaccctacattaatatcaccatcctgaaggatgtggaagatgtcaagtttgtgatcaactatgactatccaaacagctcagagga

SEQ ID NO: 5931 - DNA, 82 bp, Homo sapiens
tcacctttgccactgacattgcagagctgtgggctgtgttccacaagttcaaagatggtcctagaacaattggagattcata

SEQ ID NO: 5932 - DNA, 98 bp, Homo sapiens
cggcactgtattctttacctgcttcccaatcccactgatgaggatcagcccatgcacccagaggcctccattcaggctgttttttcagatgcccaaat

SEQ ID NO: 5933 - DNA, 96 bp, Homo sapiens
gtcaaaaggtcaactaaaagcattgtttctagaacatgaggtgaccaagaatatggcccaggtgaccaaagccctggacaaggccctgagcaccat

SEQ ID NO: 5934 - DNA, 97 bp, Homo sapiens
gactataagcatgggaccctgcgcccgggggtcaccaatgaacaggctccgagctctgtccagtggtgggagtattacatcccctcctctttctcca

SEQ ID NO: 5935 - DNA, 82 bp, Homo sapiens
atggaagggaggagactcctgaccctcagaatggcacttggactagtaccctgcatgaaagttcatttcaaggcaaacagaa

SEQ ID NO: 5936 - DNA, 50 bp, Homo sapiens
ggctggtgcagacagcagagctcacaaagccccttggatctcccttcgtg

SEQ ID NO: 5937 - DNA, 83 bp, Homo sapiens
ctcagggactaagaaacaagccttgtatagttctaaggacatatggaattggctatggataattcatatgctttcaatcaacg

SEQ ID NO: 5938 - DNA, 100 bp, Homo sapiens
cgggaaagatgccagaatctggtttcaagcgattatccagtacacattgataagggtctaaaattcccaggactccacagctttgcaccagataagcctg

SEQ ID NO: 5939 - DNA, 50 bp, Homo sapiens
tctgtgctgtttccaaattgggaccagaacctatctacaagacctcttgt

SEQ ID NO: 5940 - DNA, 50 bp, Homo sapiens
atcaaagatgccaagaaaccctgaggaagttaacatccctaataggaggg

SEQ ID NO: 5941 - DNA, 83 bp, Homo sapiens
ctgtggacatcagcgccatccccgagcagcggtggaagctgggactggtgattgcagctggaagtgcccatgaccgagctggc

SEQ ID NO: 5942 - DNA, 100 bp, Homo sapiens
ggttccatcatggcgtcaatgcaggtgtcatggagaaactccagctgggcccagagattctgcagcgggaaaatccaaggcttatttatgccaggctgag

SEQ ID NO: 5943 - DNA, 89 bp, Homo sapiens
tacagatactttgaagtagaagaagctgatgagtcacctaaggtcctgcgagtacaagggtcgacccccaaaggcaggggcagagccag

SEQ ID NO: 5944 - DNA, 101 bp, Homo sapiens
aatactataccaaggaaagctctttgtatcagaaaactggatttgttttcattccaaagtctttggaaaagacacaaagagggacccaataattgcaaaac

SEQ ID NO: 5945 - DNA, 75 bp, Homo sapiens
ctattgatggtccccccatagtgattgtgtccaggggggggcgctttctggaagcccccgtctcagggaatcagc

SEQ ID NO: 5946 - DNA, 100 bp, Homo sapiens
taacgtttgcaccatttaaaatttcttgtattacataccggttacggcacctccttcgtgcaaggtgtgatgcatccccagtgaccaacaacaccatcca

SEQ ID NO: 5947 - DNA, 51 bp, Homo sapiens
ccgcgcgtgccctctgagggccccaagagagtgtgacgcaggaaaggaggc

SEQ ID NO: 5948 - DNA, 98 bp, Homo sapiens
cgcgagttcgaccagaaggcgctgctggagttccgcgacaccatcttcgacaacatcctcaaggtggatgctctccgattgcgtttggaagagaagga

SEQ ID NO: 5949 - DNA, 122 bp, Homo sapiens
ggagaattactagcaacaggagataaaggtggtagagttgtcatctttcaacaggagcaggaggttcctgggtggagctacccatgaacagcagcaatggcaatgataatggcaatgggaaa

SEQ ID NO: 5950 - DNA, 82 bp, Homo sapiens
catcttctcataaaaggggaaagcttcatagcctcaaccatgaaggaaaccatttggtgccctggttgtcagatgttggaaa

SEQ ID NO: 5951 - DNA, 50 bp, Homo sapiens
ctcagcctcagagtcagatgcaggatcctaaatgcccaggagatgttgat

SEQ ID NO: 5952 - DNA, 73 bp, Homo sapiens
gaggccgcggagcgccagctcaatgaaacttaattcagtgcacaaatgagatgaatgtgaacatcccacagtt

SEQ ID NO: 5953 - DNA, 75 bp, Homo sapiens
ccctacatttagcgcatcatgtgatccggggaaagaatatggcaaagctgatgcaagatgggtttattttgatcc

SEQ ID NO: 5954 - DNA, 75 bp, Homo sapiens
gccaccttctatgggttaaggcaacagatggctctgagagattcctctgcgaatctgtttttagctatcaagtgg

SEQ ID NO: 5955 - DNA, 101 bp, Homo sapiens
cgagaggagccacaatggagacgccgccgctgcctcccgcgtttgacagatgaaaaagtgaaggcatatctttctcttcacccccaggtattagatgaatt

SEQ ID NO: 5956 - DNA, 74 bp, Homo sapiens
tttgttgctacatcttctgggtccatagcggctattgagggcacctacattgacaagaaatgccccttcactgg

SEQ ID NO: 5957 - DNA, 74 bp, Homo sapiens
tttcggcgcgggcccgggccccgagcgcccgaacaggagcaggggagagaagacagaagaggttggagaggtca

SEQ ID NO: 5958 - DNA, 82 bp, Homo sapiens
gaaagcaagaccccgagtggaagcatgcagcagaactgattaaaacagtggcatctcgctatgatgaatatgttaatgtgaa

SEQ ID NO: 5959 - DNA, 100 bp, Homo sapiens
cagaaacatcaggaatttgataaccatatcaactcctatgatcatgcacacaagcagttttctggatatgccgcagaaggatccgtgccagaagcaagcc

SEQ ID NO: 5960 - DNA, 82 bp, Homo sapiens
agtacaacggcgtccctctggatggcagcgtctatcccagactaccggggccctaatggagtgtggacactgcttcagaaag

SEQ ID NO: 5961 - DNA, 75 bp, Homo sapiens
ctcatcccgcagcagctgctgctgctgctgatggagcgaaagctgcaggaggtgcacccgctgctgaccctctgc

SEQ ID NO: 5962 - DNA, 75 bp, Homo sapiens
ttgacttggtgttgaaagtgaaatgtcatgcctctgaaaatgaagaacattcagaagattctcggccttgcccct

SEQ ID NO: 5963 - DNA, 75 bp, Homo sapiens
catccaatacttggctcacattacaggaaattatggaagtggaaattacaatgattttggaaattataaccagca

SEQ ID NO: 5964 - DNA, 90 bp, Homo sapiens
agtagcttggatccttgtgggcatgatccataatcggtttcaagggctgagccacaaagccagggaaatagccaggtgctactggacgcc

SEQ ID NO: 5965 - DNA, 74 bp, Homo sapiens
gagatgttcaggcacagtcgtacaccaaagtgtcagagaccgtctggcgtgcggccaggatgggcagctgaagg

SEQ ID NO: 5966 - DNA, 100 bp, Homo sapiens
agttcaagtggccctcagggcatccccgttttcggatcagggagcttccaaggcatttgatacctttttgatgggaagaagggctctgaggagctccaag

SEQ ID NO: 5967 - DNA, 95 bp, Homo sapiens
ggatcggacgctgcacaagatcaagtatgctcaggcttcagaagaggctcgcctctagtgtcctccgctgtggcaagaagaaggtctggttagac

SEQ ID NO: 5968 - DNA, 74 bp, Homo sapiens
atgttgtctacaatcatactgggtgatgatgatgcttatctgtgtattcatgaagatcagactgtgtacatcca

SEQ ID NO: 5969 - DNA, 75 bp, Homo sapiens
cagagaccaggatctgacccagggatctgacatgaagaatcaaattgaacagttaggcaagaaatataatattaa

SEQ ID NO: 5970 - DNA, 88 bp, Homo sapiens
cctgtttgagagtgggaacatgacgcaggtgcaggtgtctcttctcgccctggcggggaagggctcggagcccagctacctggaccgc

SEQ ID NO: 5971 - DNA, 90 bp, Homo sapiens
gctgaagatggtgaaggagctggagaagcacggagttcgggggatggcacagaatggggtgctgtgattgtctccacgccccaggacatc

SEQ ID NO: 5972 - DNA, 80 bp, Homo sapiens
gttgagtatatcaataccctgttcccaaccgagcaactctctgcgcccttgttgccaccatctggttccctgtgtgcgcc

SEQ ID NO: 5973 - DNA, 100 bp, Homo sapiens
tgaggccaaaccattgcctggaaagctaccaaaaggaaactttgaaaagcaccccaaagaactgatcagggggcccatatggcttcgaggttggaaaggg

SEQ ID NO: 5974 - DNA, 98 bp, Homo sapiens
cccacggatagcaagagtgtgcaaggtgcatagcagcctggttggaagcattctgagtgctctgtctgccctggtgggtttcattatcctgtctgtca

SEQ ID NO: 5975 - DNA, 82 bp, Homo sapiens
ccggatcctgaggaggcagctgcggtggcagctgctgagttctcggtgaagattctcattcagattgtggatgcctcgtcag

SEQ ID NO: 5976 - DNA, 51 bp, Homo sapiens
cttctcctggagacgcaactcaaggatgtggatgctgcctacatgagcaag

SEQ ID NO: 5977 - DNA, 97 bp, Homo sapiens
agagcaaagctacttccattccagaaagatggcatcatttttgccctcaaaagaaatggcagacctgtcatttactccatcctttatagtgatgcta

SEQ ID NO: 5978 - DNA, 83 bp, Homo sapiens
gaaggatgagaagaaccaccatgaactcgatcacagaggtggatcagtacaagggaaagcgggatttggagtcactgagggag

SEQ ID NO: 5979 - DNA, 75 bp, Homo sapiens
cattctggacacccaggctaactgcctcctctggtatatggacaacccccaggcatccagggcattgtggatgcc

SEQ ID NO: 5980 - DNA, 100 bp, Homo sapiens
atcgacggtcagtgcgcacgttgtaatcagctgaggccatgtcaggagacggagccacggagcagagcacagcaatggaggaaacagctatatgggaaca

SEQ ID NO: 5981 - DNA, 50 bp, Homo sapiens
cttccgtgacatctactatcgagcctgatctagttgaatctgaagatgtg

SEQ ID NO: 5982 - DNA, 102 bp, Homo sapiens
ggaaatctggatgccaaacgagattggggccatgccaaggactatgtggagctgcccacaaagaatccagctttgacattattttgtcaggtttagtcccag

SEQ ID NO: 5983 - DNA, 100 bp, Homo sapiens
aaacctttgccctctgttccagaagagaaaaagcccaggcataaaatcatctccatattctcaggcacagagaaaggaatgatgacaggcacaatagaaa

SEQ ID NO: 5984 - DNA, 74 bp, Homo sapiens
cagtgccctggatgcaaacagccagttacaggccaatgagtgccaggagcgccctgttgagtgtaagttctgca

SEQ ID NO: 5985 - DNA, 100 bp, Homo sapiens
gagttcctcaaacgaaaagagaattgtacactgcaggtgcttacactccagagcccctcagcagtttccggtgggctcttctctcaactggcctcatgtt

SEQ ID NO: 5986 - DNA, 96 bp, Homo sapiens
aaggagggccaagaagccacttgctcacgaccccagattgtaccaggatcttctggatgacctgaaatcagaactaactggaaaatttgaaaaatt

SEQ ID NO: 5987 - DNA, 96 bp, Homo sapiens
gtggagggggtgtcagcttccgggagcgcccctgctactcccagaggtcctgtatggtggaagagtcggggaccctcgaatcccagcttgaagcta

SEQ ID NO: 5988 - DNA, 90 bp, Homo sapiens
tgcggttccaacatggcggagctgacggtggaggttcgcggctctaacggggctttctacaaggaagacaactgttagttttgtggctta

SEQ ID NO: 5989 - DNA, 109 bp, Homo sapiens
ggctttcaaagataattcgcagtgatgtgaaactggcctcccaagccctgataactaaaccaggtggacaggtgaaatgtcagtatatctctgctgtggataaagttat

SEQ ID NO: 5990 - DNA, 135 bp, Homo sapiens
agacacgggtgaatgctgctaaaaacaagactggggctgctcccatcattgatgtggtgcgatcggtgtgtcaaggatgccacaatgccatcgacccagaagtgcagcgggtgacctataacaatttcagctggc

SEQ ID NO: 5991 - DNA, 100 bp, Homo sapiens
ccgagaagtccccgaccgactggtggcgacctgcacatgacccagtttttccgaggcaatctggctggcttaactctccgttccgggaaactcgcggata

SEQ ID NO: 5992 - DNA, 100 bp, Homo sapiens
ccggtttggtgttgcggcgcccaccttcgggaggatcagagcagtctgaatgccagaatggataaccgttttgctacagcatttgtaattgcttgtgtgc

SEQ ID NO: 5993 - DNA, 100 bp, Homo sapiens
cgggatctcaggtcctcgggggcggcggccacgccaaggacggggacttgagtgagaacgccatccaggccatccccaggaaagcttttcggggagctac

SEQ ID NO: 5994 - DNA, 100 bp, Homo sapiens
cccgggcaggggcgctcaacccaaccggctccagggcactggtcaacggcagagacttatccagagcaactcatgaccaggctgtggaagctttcaagac

SEQ ID NO: 5995 - DNA, 75 bp, Homo sapiens
cactgcccttgccttctcccctgatggcaagtacttggtcactggagagaagaacatgtgatcatccaggccgag

SEQ ID NO: 5996 - DNA, 75 bp, Homo sapiens
gaggggcgagagggagccgcagctgatgtcagcggcaacctttggcactgcatccatgagcatgcccacaggatt

SEQ ID NO: 5997 - DNA, 100 bp, Homo sapiens
gcaaactgggactgttggtcaccctacctggcagccagtgataagactgcaaaattcaaaatggggctcaaggtattcgtttcatctacaccagagaagg

SEQ ID NO: 5998 - DNA, 98 bp, Homo sapiens
ggcgggcggcgggcgcgctgctgctggcgctgctgctgcacgggcggctgctggcggttgatgccacagcatctagcatcccagagctagagcgccag

SEQ ID NO: 5999 - DNA, 106 bp, Homo sapiens
cctgctattccggcgcctccactccgtcccccgcgggtctgctctgtgtgccatggacgggtcttgaggaccggcccagctcaggctcctggggcagcggcgacca

SEQ ID NO: 6000 - DNA, 100 bp, Homo sapiens
aagaacaaatatgaatgtgaaattcaagcttctcgccagcattgtgagaaatcatgttgttgatgtcagtgttgcggtcagtactcctgcaggactcatc

SEQ ID NO: 6001 - DNA, 138 bp, Homo sapiens
gcccatcctggcctatagtctactggaacagcacatcaacattgacactctgacctcagatccccgattgtatatgtacacttgctgaaggaccagttggctgctgaggctgcggcgcggctggaggcccaggctcgc

SEQ ID NO: 6002 - DNA, 80 bp, Homo sapiens
ggagacactgcgaaagcaaaccgaggagggagtgcatccgccccaacccttttccccctcgtctcctgtgagaattcccc

SEQ ID NO: 6003 - DNA, 75 bp, Homo sapiens
gaagcgaagccgaaaaaggcagcagcgaagtgataatatgcagcatgcatactgggaactgaagagagaaatgtc

SEQ ID NO: 6004 - DNA, 88 bp, Homo sapiens
cgacacaaggcagcttcccacagcaggttggacagttcacagatggtgtggtcgctcgattctcccagtgcctggctgagtttcggac

SEQ ID NO: 6005 - DNA, 83 bp, Homo sapiens
tttggttcacaacatcatcaaatgcattactctactgactggcagagacaggagaggtagatgtccacgcccacagaccctgg

SEQ ID NO: 6006 - DNA, 100 bp, Homo sapiens
gggtgacggccgggcaggagcaggcatgataacccaacattcaagctgaaggaattgaagaatctgcagcagcaatacttacagattaatcaagagatca

SEQ ID NO: 6007 - DNA, 98 bp, Homo sapiens
agcctttccgcgcgggactccggggcgccacgggggccatgtaagcaggttgtatcagagtaagatggacggtagctttgattgtgattgtggtgagc

SEQ ID NO: 6008 - DNA, 82 bp, Homo sapiens
gattcaggtggccagcagggagcagctcttgtacctgtatgccaggtacaaacagaggctgaggggatctggcggtggagcg

SEQ ID NO: 6009 - DNA, 100 bp, Homo sapiens
gaggatgcctatgtattccctggggatggcgcatcacacaccaaaggtgagggagattctgggccgctgcacctgccctgaccagtttcccatgatcaag

SEQ ID NO: 6010 - DNA, 74 bp, Homo sapiens
tcgagaagtaccaacccagtgaccttcatgtccaacatgctctatgcctgcagaaccaacatcccgggtaaccg

SEQ ID NO: 6011 - DNA, 110 bp, Homo sapiens
aaagcatggaatgaaggttgtccttatcagcagatcaaaggataaacttgaccaggtttccagtgaaataagagaccaagacacattccaccccagtggggggtcccata

SEQ ID NO: 6012 - DNA, 100 bp, Homo sapiens
aaaactaattagctgtttgggggccttcagacagttttggggtggtctttctcagaaattgcatctgatggtctcaagggtcgtgtgtttgaagtgagtc

SEQ ID NO: 6013 - DNA, 100 bp, Homo sapiens
cgcaacgggatctgcagaacctgaactcggaagggaatttgaaggagaagaagaatatctggagatccttggcatcaccagggagcagtcaggcaaatat

SEQ ID NO: 6014 - DNA, 96 bp, Homo sapiens
ggcggcggcggatcacccgaacagccttcagggagagtcccgtattctcagagtaaaagttgtttctggaattgatctcgccaaaaaggacatctt

SEQ ID NO: 6015 - DNA, 100 bp, Homo sapiens
tcctcctgggtggtatacgggaccaattaccgcaaagccatcttcatcttcatcaggtcccaagctctttaaggagcccagtagtaaatcaaacaagccg

SEQ ID NO: 6016 - DNA, 82 bp, Homo sapiens
gaagacatggaccagggctacggagccaagacaatgcaaactccagtgaacattcccgtgcctgtgctccggctgccccggg

SEQ ID NO: 6017 - DNA, 100 bp, Homo sapiens
tggacaaaggaacaggtatctcaggtgttacagaacatcctggacactgaaaaagaatatgctaaagaacttcagtctcttcttgttacttacttaagac

SEQ ID NO: 6018 - DNA, 80 bp, Homo sapiens
ctgggggattcgcagggaggatgtcgggacaccccggaagctgggaaatgattatgatgcatcattatcacagaagaaat

SEQ ID NO: 6019 - DNA, 50 bp, Homo sapiens
agccaccccgcgggatacgcctcagcgcgtcactcagcctctgaagaagc

SEQ ID NO: 6020 - DNA, 73 bp, Homo sapiens
ggggagagaggtattctagtggcctccgattcagatcaccggcgtaatcaacccagcgttggacaaatacttt

SEQ ID NO: 6021 - DNA, 100 bp, Homo sapiens
gcctccccagcagcactttgaagaggccagctgggccccttgtactcccagtcaccttcaggccattcagaggaggaaagagaggggaatatgaagtcag

SEQ ID NO: 6022 - DNA, 100 bp, Homo sapiens
aacaaattggatacagctttataataaatatgcttttgtcaccatcagctaaaatgcagtatgttggaatatttgagttaacagaccatcaaaagcatcc

SEQ ID NO: 6023 - DNA, 98 bp, Homo sapiens
gttgagttttcggtagagctacataaattttataatgtggatctctttcagagaggggagaaccaggagaaagaggggaagatggtctgcctggaaaa

SEQ ID NO: 6024 - DNA, 75 bp, Homo sapiens
gcgggcgcgcaggccgcggggagcacctgggctccactttgaggctctgatgaacattccagtgctggtgttgga

SEQ ID NO: 6025 - DNA, 50 bp, Homo sapiens
ggggcattcgtcttggtaaacttggtatgggcacctgctggagccagatg

SEQ ID NO: 6026 - DNA, 73 bp, Homo sapiens
ccgcctggcaggccctgcgcaccagatccatgagatgatcagacaagaaattttggagcaggtcctcaacagg

SEQ ID NO: 6027 - DNA, 82 bp, Homo sapiens
aagaagaagaagagcatgatcggcatgtccaccaagacctcctgccccccgaggtctgcagtctcctgaacccagcagccat

SEQ ID NO: 6028 - DNA, 51 bp, Homo sapiens
gtccaagctttcagtgttggagcagctttgtttttgggaggctgaggaagg

SEQ ID NO: 6029 - DNA, 101 bp, Homo sapiens
aaactgaagatgtgaatactctgtttcagatacaccacctccaccgccacctgtggaagaaccagtctttgatgagtctcccccacctcctcctcctccag

SEQ ID NO: 6030 - DNA, 130 bp, Homo sapiens
cgggtcgctggcggcgtggacacctgagtcccggggtaggggtctcccgcgaggtactccaaagattcaggtttactcacgtcatccagcagagaatggaaagtcaaatttcctgaattgctatgtgtct

SEQ ID NO: 6031 - DNA, 73 bp, Homo sapiens
gaacaacaaataaaccctcaggaagtcttagtgcaggtgatctgtgaaaatggttcgctattcacttgacccg

SEQ ID NO: 6032 - DNA, 85 bp, Homo sapiens
agtgctcctgcagtctctctgtgtggctgtaacttacgtgtactttaccaacgagctgaagcagagtaacctgatccactacctg

SEQ ID NO: 6033 - DNA, 74 bp, Homo sapiens
tctgctacaccatttttgatttgggcttccgctttgatgtggcatggtgaggaagaggatggagatgaagatga

SEQ ID NO: 6034 - DNA, 75 bp, Homo sapiens
gctccaaaacctaagtacaacccatacaaacaacctggaggtgaggccactacttccttcattggactgcaaggt

SEQ ID NO: 6035 - DNA, 75 bp, Homo sapiens
tcattttgctctcagtcatccttacccctaaagaaggagagtccagggatgtggaaaacgtccctttggtgtttc

SEQ ID NO: 6036 - DNA, 83 bp, Homo sapiens
cagaagtcgcgtgtctaggtgagtcgcggtgggtcctcgcttgcagttcagcgaccacggccaccagcttgggctccccacgg

SEQ ID NO: 6037 - DNA, 100 bp, Homo sapiens
gtgctcctcattaagtgctgtctcccccagcgaatcggtggccatgatctctaggctgcagttcatggagctcgtttcaaagggcaagatctaaaactgg

SEQ ID NO: 6038 - DNA, 100 bp, Homo sapiens
gtggccaacacggtcttgctgaaagccagggaaggacaatcctccaaacacagactgtttgacttagaatcttcccttttttactccattcaagagcagc

SEQ ID NO: 6039 - DNA, 100 bp, Homo sapiens
ccgccgagcacaggctgacctggcctatcagcttcagggttatacaaacaagggtatgaagattgcctgcacccaaccccggagagtggctgccatgagt

SEQ ID NO: 6040 - DNA, 100 bp, Homo sapiens
accaggtgtcctacttctcatttaagctactcaagaaagagtgcccaattccaaatgtacaggtgagacgtggtcttgtaacacagtggttaagaatgtg

SEQ ID NO: 6041 - DNA, 80 bp, Homo sapiens
cgacgacgacgaggaagaggaggtttctgaggaagccagttgagggaagttctccatgaatgtacgtcacaatgatgatg

SEQ ID NO: 6042 - DNA, 83 bp, Homo sapiens
gccgccggagccgcaatgcctaaaggagggtttgtggatgcacttagatgtttgcaatgagcactgtggctggcatgccccag

SEQ ID NO: 6043 - DNA, 88 bp, Homo sapiens
caagcaacaagtgaaattgaggtcacaccttcagtccttcgagcaagtatgactacgtggaagtcttcgatggagaaaatgaaaatgg

SEQ ID NO: 6044 - DNA, 100 bp, Homo sapiens
tggcggagctccacgacgagctggaaaaggactgtcctttcattgtatgtatgacctatgccttccataccccagataaactctgcttcatcctggatct

SEQ ID NO: 6045 - DNA, 83 bp, Homo sapiens
tctcaatatctgtcttcggtggactccttcggcagtccacccaccgccgccgcctcccaggaagatgctggagacgtgtggag

SEQ ID NO: 6046 - DNA, 98 bp, Homo sapiens
aggctgtagtgagctatgattgcaccagtgcactccagcttggatgacagaagactaaggtgtcagtatgttcttcaagctgctctgctcctgggccc

SEQ ID NO: 6047 - DNA, 98 bp, Homo sapiens
ttcagatgtggtggaatatgccaaggaaaaactggagagcttcatcaaaaatagtgatagctttgataaacagcccacctgaggatattgaccataag

SEQ ID NO: 6048 - DNA, 100 bp, Homo sapiens
acttctactgacgaagcttggaagttgcagaagatctttaaatggatgagatggctaccactcagatttccaaagatgagcttgatgaactcaaagaggc

SEQ ID NO: 6049 - DNA, 75 bp, Homo sapiens
ctgtacaccctcgtcagcggctccctgcccttcgacgggcacaacctcaagatctacgcagaccccaccaagagg

SEQ ID NO: 6050 - DNA, 75 bp, Homo sapiens
ctgctgcggcgcggggaccgctgtgctctcggcagccctgaagcagcttcctaggaacaaggtccccaacatggc

SEQ ID NO: 6051 - DNA, 100 bp, Homo sapiens
aagcattgattcctgcatttctgaagatctcaagatctggactactgttgaaaaaatttccagtgagggttggattgagattgttggatgtgctgatcgt

SEQ ID NO: 6052 - DNA, 100 bp, Homo sapiens
ctctcgtccgatgctcaggagagcttggaaggtgctggagaatctggtaaaagcaccattgtgaagcagatgaggatcctgcatgttaatgggtttaatg

SEQ ID NO: 6053 - DNA, 87 bp, Homo sapiens
gcaccaccaccaccactgtttccacgacagcagcaggagtccttcaataatgttaaacagtggctgcaggaaatagatcgttatgcc

SEQ ID NO: 6054 - DNA, 75 bp, Homo sapiens
cacttctagacgacaaaatgcaaaaaaggaggccaaagactttaactgccattggatgtccagaatcccctgtag

SEQ ID NO: 6055 - DNA, 75 bp, Homo sapiens
catctccatattctcaggcacagagaaaggcttttgaacacttgcagcaattagaattaataaagcccatggaaa

SEQ ID NO: 6056 - DNA, 100 bp, Homo sapiens
ggaagcagcgtgagcagccggaggatcgcggagtcccaatgaaacgggcagccatggccctccacagcccgcagcttcgcctcaacagcatcaagaagct

SEQ ID NO: 6057 - DNA, 90 bp, Homo sapiens
ggctgggcaccaggccctgactaccaggtgtggaaacaggaagagaactagaactggaagtaaagcattgaagatgtgactgaattgctg

SEQ ID NO: 6058 - DNA, 100 bp, Homo sapiens
aggcaagtgggactttgccttctcagcccaaagtcagcgaactggcgctgaagaccctggggacagatggcctttttctcttttcctccttggacactga

SEQ ID NO: 6059 - DNA, 101 bp, Homo sapiens
cgtgtcccccgaggatctggaggcacagctgcagtctgacgagaggggccaaagcacccctacgcagaaaggagtaggcattgctggagctgtgtgtgttt

SEQ ID NO: 6060 - DNA, 100 bp, Homo sapiens
gatgtggatggtacagtagaagaggatctgggtaaaagtagagaaggatcaaggacggatgatgaagtagtacagagttagtgtgactctggatccagat

SEQ ID NO: 6061 - DNA, 98 bp, Homo sapiens
ctcgtggaaggtgactattttggcctcgagtttcctgatcacaaaaagatcacgactactgtcagaggatgtaggaatggacatcccctttgaagagg

SEQ ID NO: 6062 - DNA, 96 bp, Homo sapiens
cctccccttcccaagttcaagcaattttcatgccgcagcctcctagctgggattacagcacttcactacgcttagcagatgtcctctggaattccc

SEQ ID NO: 6063 - DNA, 100 bp, Homo sapiens
gattccaagtaactcttatttgggaacaacctatcttcagcactcgagctcatgtcttccaaattgacccaaacacaaagaagaactgggtacccaccag

SEQ ID NO: 6064 - DNA, 97 bp, Homo sapiens
aacacattaacaccgaagttctacgtggccctaacaggcacttcctcactaatatcagggcttattttgattctgaaaaagagttccacgtcctccc

SEQ ID NO: 6065 - DNA, 74 bp, Homo sapiens
ttcacctgtccagcatccgaccaccgaggctggagggggagaacacccaggtgcgcggcccccgccatcccgcc

SEQ ID NO: 6066 - DNA, 90 bp, Homo sapiens
ctcgcaggctgaatcccaggagaggaaatccatttttgaaaggtgccgtgagcgatgtggagatgcaggaacactatgatgagttttttg

SEQ ID NO: 6067 - DNA, 98 bp, Homo sapiens
gctacagcatcccacattaagtcaacgttggttgtcgaatatcatcaatgaaagccttttattctatcttgagatgcaaacagatatcaatggaggtt

SEQ ID NO: 6068 - DNA, 90 bp, Homo sapiens
catgccctggttgccctctcctggaatagggcagaatttcgctaaggagtttgtgatcagtgatcggaaggagctggaggaagatttcat

SEQ ID NO: 6069 - DNA, 90 bp, Homo sapiens
tgaaagggccattcaggaaacagcacaggacaggctgctttggtttgtgacctccaggcaggacggccatcctctccagaatgaagatct

SEQ ID NO: 6070 - DNA, 100 bp, Homo sapiens
acagattcagaaggagcaggattaccaaagggtgaagatcccggatctgttttgtggcctagagattgtccccgcgttgctccacggggatctctggtcg

SEQ ID NO: 6071 - DNA, 75 bp, Homo sapiens
aaggataagtctcatgacaccttcttcaggagagaataccatgggtaccacctgaatgcattgaaaatcctaaaa

SEQ ID NO: 6072 - DNA, 75 bp, Homo sapiens
gggtgccgagacctgccccctgcctagtttccaggtccatggaaagaaattattccttagatttgatctagatga

SEQ ID NO: 6073 - DNA, 100 bp, Homo sapiens
caatggcctatccaaggacatgagcagtttacacatctcacccaattcagctgctctgttaaaagcgaaaatgaaacaattgcctgcggcaacagttcga

SEQ ID NO: 6074 - DNA, 100 bp, Homo sapiens
gatacccagacaacaggatcgtctcgtccaaggttggagcaaaacgtcccactcactggaggcacctgaggacgacgggggctggtcaagtgcagaggag

SEQ ID NO: 6075 - DNA, 75 bp, Homo sapiens
tagacctgaactcttcagataatcagagtggaggaagtacagccagcagtgtggcagagaagacacagcttctga

SEQ ID NO: 6076 - DNA, 98 bp, Homo sapiens
ccgttgaccgctcctccaactaaccagttaagaatgtctgaggggtcaggcggtgctggcaagatggctgcacttgagaagatgacgtttcccaagaa

SEQ ID NO: 6077 - DNA, 88 bp, Homo sapiens
tctcttctcgccctggcggggaaggatgctttcattggatttggaggaaatgtgatcaggcaacaagtcaaggataacgccaaatggt

SEQ ID NO: 6078 - DNA, 75 bp, Homo sapiens
tggcagtagagggtgctctttctctagaggagaaacttgagtcgatagcagcagttggtgacgagatggcactca

SEQ ID NO: 6079 - DNA, 50 bp, Homo sapiens
actttgtgaaggatcctaagaggctgtttgcagacaaggtcccaaagaca

SEQ ID NO: 6080 - DNA, 75 bp, Homo sapiens
ggccaccaccaatctactggtggatgctggtgggaaaacacagggcttgcagtgggtgcagctctcagcagagga

SEQ ID NO: 6081 - DNA, 95 bp, Homo sapiens
ggcactggattccacccatacacactctatactgtgaagaggcaaggacctagcaacacttatgaagatcctcgaatgaactgtggtttccagtc

SEQ ID NO: 6082 - DNA, 100 bp, Homo sapiens
gtcagcagattcagcggtactggtgtataatagctcaatgtcaattgctgcaagcttagtgagtgaagatacaaagaccaagtttttgaacaaaatgggc

SEQ ID NO: 6083 - DNA, 51 bp, Homo sapiens
tgccacctttccctttatttccggaggtttatggctacaaatgatttgatg

SEQ ID NO: 6084 - DNA, 96 bp, Homo sapiens
gctgatgttaatgcccaggacaagggtggtttaattcctcttcataatgcggcatcttatgggggtctcctatggacagaagtgcgggcaaggagc

SEQ ID NO: 6085 - DNA, 75 bp, Homo sapiens
tcagccttcccagtagctgggaccacagtcctcctgcccctgctcgagtcttgcagtgtgcggcccgacgccagc

SEQ ID NO: 6086 - DNA, 100 bp, Homo sapiens
gggatagtggagctgcccactctagaggagctgaaagtagatgagtggatgtttccaaggattgtcttcagtcatggccttgggattaaagtgcttccgc

SEQ ID NO: 6087 - DNA, 82 bp, Homo sapiens
ccgcagcatccaagtcggccctggaatggtcctcgtccgaagtgagaatgggcagttgttaatgattcctcagcaggccttg

SEQ ID NO: 6088 - DNA, 82 bp, Homo sapiens
ttataatcagattttgaccaagcattttgtaagggtctcactctgtcacctgagctagagtgcagtggtgcgatcacagctt

SEQ ID NO: 6089 - DNA, 82 bp, Homo sapiens
caaaagggaatttcctacaagcagtgtggcaaggtgagcactgtgggctatgggatggatgaggtggagcaggaccagcatg

SEQ ID NO: 6090 - DNA, 100 bp, Homo sapiens
gcttcctggggctagtggtcctctggtcttccctgaccccgcggccggacgacccaagcccgctgagcaggatgagggcgcctgtgtctggcagagctgg

SEQ ID NO: 6091 - DNA, 98 bp, Homo sapiens
gtcgtggaggagtactttgtggcccccccagaccaagctccacgaagatctctgtgagaagaggacggctgccacccttgccacccacgagctccgtg

SEQ ID NO: 6092 - DNA, 51 bp, Homo sapiens
acaactttttgcactctttgacaggggactgttgacattcagggatgtggc

SEQ ID NO: 6093 - DNA, 100 bp, Homo sapiens
gtggttggatatttagaggacattatcatgggctgtcattatttgtatcaaaaacaaagaatttgaaaaggcttcaaaaattttgaaaaaacatatgtcc

SEQ ID NO: 6094 - DNA, 75 bp, Homo sapiens
aatatttaatccagaagtatttcaaccacagatggcactgccaacaggaacgtgttgtgggctttcacgtactgg

SEQ ID NO: 6095 - DNA, 100 bp, Homo sapiens
tcagtagatgagagacttatatacaaaccacatcctcaggatccagaaaagttgggagccacgtgtaccagtgtgtgttgatcttggcttgattcagtct

SEQ ID NO: 6096 - DNA, 101 bp, Homo sapiens
agatggcggatgccctgcagtacctgcagaaggtctctggagacatcttcagcagggaatagcatttcaaggttcagtggaggagaaccccaagagcacca

SEQ ID NO: 6097 - DNA, 90 bp, Homo sapiens
tttgggcagcttttccggcctgacaacttcatctttgatctctcaaaggccttggttctgacagaaattggccccaaacgtgaccctgcg

SEQ ID NO: 6098 - DNA, 134 bp, Homo sapiens
cggcgtctggctgctgcggaccccgccgagtcctagcgcctggcctgcgcgccgctgcccgcgccacagattaatactgaggaacacgtggatgcagctgatcaggaggttatcttgtgggatcataagattcc

SEQ ID NO: 6099 - DNA, 83 bp, Homo sapiens
ccacggccgttttcatggctgcttaaaatggtctatggtctgtctctgattttttatcaagcagaaatgcatcgaacaacgag

SEQ ID NO: 6100 - DNA, 100 bp, Homo sapiens
gtgttctcagtagtccgaactctaatatgagcagcatggtagttacaggggttgtggaaaccagaacttcgcctggagaacagagtgcaaccagtgtaag

SEQ ID NO: 6101 - DNA, 100 bp, Homo sapiens
gaattcgccgtgcccgagaatagctccgtccagcaggtgaagccggcccaggaggtgaagcttcgcttcctggaacagctgagcatccttcagacctggc

SEQ ID NO: 6102 - DNA, 75 bp, Homo sapiens
accgtccccacacacgcccctctgaagaacccggcgcgaggagatccctcatccacctacatcaggcaactggag

SEQ ID NO: 6103 - DNA, 98 bp, Homo sapiens
ctgggactgaagagggacgggtcccgcggcgagcgagctcctgaggtacggcgtcgggccactgaggcggctcccagctgcgttggcgacatggccga

SEQ ID NO: 6104 - DNA, 50 bp, Homo sapiens
tttggtaatatcgcatcaattgggaggagctgctaagccgcacatctctt

SEQ ID NO: 6105 - DNA, 50 bp, Homo sapiens
gagatctcagcgctcaccgacttctctgagccagtcttggtgctctgtgt

SEQ ID NO: 6106 - DNA, 100 bp, Homo sapiens
aaaatggcggacgggaaggcgggagacgagaagcctgaaaagtcgcagcgagctggagccgccggagattgctgagctgagagaaatagaatacattaaa

SEQ ID NO: 6107 - DNA, 99 bp, Homo sapiens
tagaccctgcccaacagaatttatatagagatgtgatgttggagaactacagaaacctcgtctccctgggtcctagcagaagatgtgactcagactgcc

SEQ ID NO: 6108 - DNA, 98 bp, Homo sapiens
tgagcttggccttggagcgaggctatcacaagctgcaccagcttctaaccgacatatagcactttctacattgtgggtttaatattatcaatgcagat

SEQ ID NO: 6109 - DNA, 80 bp, Homo sapiens
ccctcagcttccgccccaaaagcacgcactcctggctttaaagtttatacttgcatttgccatacctgataagccacggc

SEQ ID NO: 6110 - DNA, 98 bp, Homo sapiens
cgcccaggcgcagatgcgggccctgctggaccagctcatgggcacggctcgggacggtttggtgcacctcgatttggaggaagtagggcagggccctt

SEQ ID NO: 6111 - DNA, 100 bp, Homo sapiens
atgagcgcagttacatgcatagagatgttatcacccatgtggtatgcaccaacggattttggagtatcagctaaaaacacgaggacaattcaaagaagag

SEQ ID NO: 6112 - DNA, 100 bp, Homo sapiens
agctcaggggagctgctccacatcaccgacatgaagggaacaggcatcatggactgtgcgcccaaggtgagccctattcccagaggcaggtggtgctgac

SEQ ID NO: 6113 - DNA, 100 bp, Homo sapiens
caagttcaagatgaagtactggggcgtagcctcctttctccagaaaggaagtattgacctgatggacatggcttcggacatcctgcagcccaaaggagat

SEQ ID NO: 6114 - DNA, 80 bp, Homo sapiens
actcatagtcactgccagaaaggtagctacagcaagctgggtagcaggcagatccaaaggatatcatgaagtttccaggg

SEQ ID NO: 6115 - DNA, 75 bp, Homo sapiens
taacagcctccgtggcctccggtaccagctggaggatgagtctgcgcatttggatgaaatgccactaatgatgtc

SEQ ID NO: 6116 - DNA, 82 bp, Homo sapiens
cccagatgtcctcatcatcccgtcagagctgaggtacttcgtgaaggcaacaggacctgtaccgaatcctgaaggcctacac

SEQ ID NO: 6117 - DNA, 74 bp, Homo sapiens
aagaacgtcaaacactccaacgattgagagcatttaaagatgtacttaaacttcacccttgtttagcccctatt

SEQ ID NO: 6118 - DNA, 130 bp, Homo sapiens
gaggatttgcttttgtaacttttgatgatcatgatacagttgataaaattgttgatcacaagatttctgttgtgaaggatgtggctctgccatgaaggatgtcctgttgcctttaaaatctggaagcgat

SEQ ID NO: 6119 - DNA, 90 bp, Homo sapiens
gcggcggacgggccggagggaggatgttaaagccccgcgacgctgagcagcgagctgtcccaggcccgagatgagaataagaggacccac

SEQ ID NO: 6120 - DNA, 74 bp, Homo sapiens
tcgcaagctcctacgaaagaaagctcatcgagatatgcacccaatgtccagggagcgtgcaaaatttgtcaaaa

SEQ ID NO: 6121 - DNA, 87 bp, Homo sapiens
ccgcctcatttgcgccttgcagcactgctggaccagcaatggctgccatccggaagaaactggtgattgttggtgatggagcctgtg

SEQ ID NO: 6122 - DNA, 131 bp, Homo sapiens
ctgaaagccttactgatacttgaaggaggccagaaagttgttttcaaacctaagcgaaaggggatgtttgggctgaaggtgaagaagaagagaaataaggcagagaaggggttaatcctagccaacaaggc

SEQ ID NO: 6123 - DNA, 90 bp, Homo sapiens
ttactcgcccccacctgtggactctgaccgcaaacaaggagagcctactgagcagcctgagtgggtgccgtgagcgatgtggagatgcag

SEQ ID NO: 6124 - DNA, 103 bp, Homo sapiens
agaagaggattggaggtgtcagtgttaaaggaacctctacaacgaaggtgaagccacggaagataagaatcgacggactgtagcttctattaagaatgaccct

SEQ ID NO: 6125 - DNA, 74 bp, Homo sapiens
catgtccagcatgaatcccgaataattgaaaaggccaaacctattaaatgtggaacatttggtgcaacatcttt

SEQ ID NO: 6126 - DNA, 99 bp, Homo sapiens
gacggagatggtgcagaagatggaggaggttttggcttggtttgaagaaggtgaagaaacaattacagcctttgtagaaccttttgtaattttactcat

SEQ ID NO: 6127 - DNA, 75 bp, Homo sapiens
gaccgtgaccgagagcgtgaccgagagcgcgaatatcgtcatcgttagaagcaaatgcagccctgaggatttggc

SEQ ID NO: 6128 - DNA, 82 bp, Homo sapiens
ctgggcgcgggggcggcgtgtcaggtggttgcggagctggtaagcggagctggagtttgttcagatcatcatcatcgtggtg

SEQ ID NO: 6129 - DNA, 101 bp, Homo sapiens
ctgtcagcgcggccgtcggagacatgggagacccggggtcggaggaatgaatctgaagtctgctgcagtaaaacacagaaggctttaaaatgttttcttgc

SEQ ID NO: 6130 - DNA, 122 bp, Homo sapiens
gaaggaagcaaagcaaatggagaatggcatgctggtgacggacagtgcagggaagcaactgcagagggaaatgtttcaacgtgcgcaagcgttgcggcggcgggcagaggactactacagat

SEQ ID NO: 6131 - DNA, 89 bp, Homo sapiens
gccgaggagacgcgggccttcgagcagctcatgaccgacctcaccctgtcgcggccctgccaaggtaaccctgctggggtcagttatct

SEQ ID NO: 6132 - DNA, 51 bp, Homo sapiens
ctgggacagccatggtttcagacgtgccatcagacaagatcagttgatcag

SEQ ID NO: 6133 - DNA, 100 bp, Homo sapiens
tccggaggtagaaggcgtagaacaggtaaagaacgtgtgtgagagcaagagcaagctcattgctctcttctggaaggcacatatgaatgctaagcgctgt

SEQ ID NO: 6134 - DNA, 98 bp, Homo sapiens
caggacccgaggccaggagccaggggcccagaagaattaaacaaccaccatgtcgagcaaaaaggcaaagaccaagaccaccaagaagcgccctcagc

SEQ ID NO: 6135 - DNA, 83 bp, Homo sapiens
agcgacgactatgacctcgagtctgacatgaaaactacccctgagtgtggtcccacaggatatgtagagaaaatcacatgcag

SEQ ID NO: 6136 - DNA, 83 bp, Homo sapiens
cgaagacagcggagaggagagcggtgcggaggactgaggtactccaaagattcaggtttactcacgtcatccagcagagaatg

SEQ ID NO: 6137 - DNA, 83 bp, Homo sapiens
cggaactcgaccggatccaacccagttagttacttcctgtctagagttgtagcttccacctgatcaatgtccgagttaccacc

SEQ ID NO: 6138 - DNA, 139 bp, Homo sapiens
aacctcgtggtcaactactgctcagagctgtcggatatgaagatcatgtcccaagatgccatgatgatcacggatgaggtcaagtgggtgggaggacgctactcgctgtggtcggccatcggactctccattgccctgc

SEQ ID NO: 6139 - DNA, 75 bp, Homo sapiens
acctcggaccagctctgtaaaagccccgcctctgccttcggatagtaatcctaaattggagagtcagagagtaaa

SEQ ID NO: 6140 - DNA, 152 bp, Homo sapiens
ggtacatcaaggcactggcagaagaaaacaggaatgtggtggatgggccatacgctggagtcatgacagcttatggtgatgatgaacagtctacacagatggctgcaagttgggaagatgataaagttacagaagcatcttcaaacagtttt

SEQ ID NO: 6141 - DNA, 76 bp, Homo sapiens
cctccctcagcttccgccccaaaagagacaaagcatggaggacacaagaatgggaggaaaggcggactctcaggaa

SEQ ID NO: 6142 - DNA, 83 bp, Homo sapiens
cgcgcggcgccgccacaagttgcgctgctcgcgacgagaaaattgtacaagctggagataaggaccttgatgggcagctagac

SEQ ID NO: 6143 - DNA, 98 bp, Homo sapiens
ctgtcaatctgaattcaataactgatcctgtgttgagagagtcaagagaatccatcccattaaatgacctgaagtcagaagtatcaccacggatttca

SEQ ID NO: 6144 - DNA, 90 bp, Homo sapiens
gtccactggttttagccgagcagtacaaacacacagggcctgctccgtttggttccagttgggtcaaacactattgcatgtatcgaaaag

SEQ ID NO: 6145 - DNA, 89 bp, Homo sapiens
gctggagctggccatggtgccccactatggtggcatcaaccgagttcggggagtggacatccgccataacaaggaccgaaaggttcggc

SEQ ID NO: 6146 - DNA, 51 bp, Homo sapiens
gggctacgctcctccatcacgtgtgaatggataccacgcatcagggacccc

SEQ ID NO: 6147 - DNA, 100 bp, Homo sapiens
gggcagaacgaattcagtgatatcattaagtccagatctggtctgtaatatagtggcaggacagcgatgtatcaagaagctcacagacaatcagacttcc

SEQ ID NO: 6148 - DNA, 75 bp, Homo sapiens
cgccagggctctatcaaggggctggtgtactccagcaacttccagccccacaggaagccccaagtcagccgcccg

SEQ ID NO: 6149 - DNA, 75 bp, Homo sapiens
tggatacggaagagtatacaagatctccagtctatgtgctgaagaagcagcagcccaagagcagacaggtcaggt

SEQ ID NO: 6150 - DNA, 83 bp, Homo sapiens
caagggtgtgatccaagctatccagaaatcagatgaaggccacccattcagcttcctgcagatttcacaaaactgcatcttac

SEQ ID NO: 6151 - DNA, 88 bp, Homo sapiens
agcgcgggggcggctcctgctcttcctggactcctgagcagagtgccggtggtggtgtgcacattgagccccggtatagacagttccc

SEQ ID NO: 6152 - DNA, 75 bp, Homo sapiens
tggaagaccacctgagtcaccagttaactatggtagcccacccagcattgggattaatgaaaatcaagttccatc

SEQ ID NO: 6153 - DNA, 102 bp, Homo sapiens
ggaggcggcagaagaagacgaagaagcagaagcgtctgctcaggttgcagcaggagagagatgtgaagttcatttccaatccgccctccatggtggcagcgg

SEQ ID NO: 6154 - DNA, 101 bp, Homo sapiens
ccgaagaaagcgagaaaggaacaggcgccttcaaaagcccacttggcgatgggttacagtaagagacagaagccctgcagcagctgcagaaggactctgag

SEQ ID NO: 6155 - DNA, 78 bp, Homo sapiens
ttaccactgcctggttgcagaagtgccgaaagagcactggactccggaaggattacagatgctttcctcaaagcagat

SEQ ID NO: 6156 - DNA, 75 bp, Homo sapiens
gtcaaatgcatgccaacattccagttttttaagaagggacaaaaggtggatgagaatggcaaaattagtcgcctt

SEQ ID NO: 6157 - DNA, 125 bp, Homo sapiens
ccgggcagagctgcgtctgctgaggctcaagttaaaagtggagcagcacgtggagctgtaccagaaggtggtcttctgccctgttaaagaagccctggaggtggactggagcagtgagaaagcaa

SEQ ID NO: 6158 - DNA, 100 bp, Homo sapiens
tgtgggccattggtactggcaagactgcaacaccccaacaggatgatgactttgagttcactggcagccacctgacagtaaggaatggctactcgtgtgt

SEQ ID NO: 6159 - DNA, 100 bp, Homo sapiens
gctccgcatggcggcagcggcctgcacaccaagggcgcccttcccctggatacggtcactttctacaagctggagaatgctggaggagaccttaaggatg

SEQ ID NO: 6160 - DNA, 100 bp, Homo sapiens
ccggcccctggaggagctgagcattccaggggcctccttccagggggctgccctctcgaaggcaccaggatcatctacgaccgaaagttcctgctggagt

SEQ ID NO: 6161 - DNA, 74 bp, Homo sapiens
gtgggggtgtgcaaacccgagagaactgggtcttccccagggaggtcctgaactacacagctgagaacatctgt

SEQ ID NO: 6162 - DNA, 100 bp, Homo sapiens
agcggccccagcactcccagctgcgcagggcctgccaggtggcgctcggtgagccctattcccagaggcaggtggtgctgaccctgtaacccaaaggagg

SEQ ID NO: 6163 - DNA, 100 bp, Homo sapiens
ccccaagcagcggatcatcccctttctgccaggtccttatgtcgtcagaagatcgagaagctcaggaggatgaattgctggccctggcaagtatttacga

SEQ ID NO: 6164 - DNA, 82 bp, Homo sapiens
cggcggatcccggagagccccggagtgagcggagtagcgagtcggcaacccggaggtctataatgacggatctatactacct

SEQ ID NO: 6165 - DNA, 137 bp, Homo sapiens
aaagagcaaagatgtgaatggacccgaaccactcaacagccgaagcaacaaactgcactttattaccccattcaagttgacaactgaggcaacgcagactccagtctccaataagaaaccagtgtttgatcttaaag

SEQ ID NO: 6166 - DNA, 86 bp, Homo sapiens
caaacagcccgcccgaccccgtcccgaccctggccgccccgagcggagcctggaggaagctcttcgtgggcggtcttgactggagc

SEQ ID NO: 6167 - DNA, 100 bp, Homo sapiens
ccgagactctggcctgcagtcgccgccgccgccgccaggtactccaaagattcaggtttactcacgtcatccagcagagaatggaaagtcaaatttcctg

SEQ ID NO: 6168 - DNA, 75 bp, Homo sapiens
cctcaatgagcacatgaccagcttagcttctgtcctaaaggtgacttaagagattaaaattaatttggttgctgt

SEQ ID NO: 6169 - DNA, 95 bp, Homo sapiens
actgcgatcagacgcgcgtgcccagctgaaccaggtaaactgtcttgagccccaccctcacctgcctgtgctggcaaccagtggcctagaccatg

SEQ ID NO: 6170 - DNA, 100 bp, Homo sapiens
ctcctagaccgacttctgcagtacgagaacgtggatgaagactcttcggaggagaggagacgccgtgagcgggacgaccagatgtaccgagagcggctgc

SEQ ID NO: 6171 - DNA, 101 bp, Homo sapiens
aaaagcaaatgagacaagtcaagaatccttttggcttagagatcactaatccatcttcagcttcaattacaaaacaaggtggtgactgtggatggcgtgag

SEQ ID NO: 6172 - DNA, 101 bp, Homo sapiens
cgtcagccagcactgcacagacagctgcgaccagagactggaggcaagatcctcatcattggaggcagcatcgcaaacttcaccaacgtggctgccacgtt

SEQ ID NO: 6173 - DNA, 74 bp, Homo sapiens
ggcatctaaaccaaggaacatttatttggggctttcaagggaaatgtttcaacgtgcgcaagcgttgcggcggc

SEQ ID NO: 6174 - DNA, 90 bp, Homo sapiens
ctcgacaccatggtggacacttttcttcagaagctggtcgccgccggcagattggaccagaccctgaattcttctagctcctccaatccc

SEQ ID NO: 6175 - DNA, 87 bp, Homo sapiens
tgataaatctttacaagcttgtaaaatctcaggcctatatgaacccaatagcaatggcgagatcaaggggtccaatccagtcttcag

SEQ ID NO: 6176 - DNA, 75 bp, Homo sapiens
catctccaggacagtgggaagagtggctggaggaattcagtttcttgggggactaaaaacagcccttgtagaaag

SEQ ID NO: 6177 - DNA, 100 bp, Homo sapiens
ctcgcgggaagcgcagcagtgcctccaagggttcttaaagcagagtatggaccaatatttacagtctttgctatgggaaaccgaatgacctttgttactg

SEQ ID NO: 6178 - DNA, 100 bp, Homo sapiens
attcattgccaggagctggtgatttcctaagcagaggtcgctaactacaagaaatgttacactcgccgccctggagggagggccagcgtggacaccaagg

SEQ ID NO: 6179 - DNA, 83 bp, Homo sapiens
ctggccgccgccgccgcgagcgctcccggggaggctcagaagcaagaagaagatgaaagttgtgccgctgctgaggcgttgac

SEQ ID NO: 6180 - DNA, 74 bp, Homo sapiens
ggccagcaactcccagctcaatgcaatgatagccttggataccagttactggactttcattaatcacgtcttca

SEQ ID NO: 6181 - DNA, 100 bp, Homo sapiens
ccgggccctctgcgacctggggccctgggtgaagtgctccgccgcccttgcctccagatcactttgggaagcagtgacatccaacctgtatcaagtcttc

SEQ ID NO: 6182 - DNA, 102 bp, Homo sapiens
aaagatttacctataaatttaacttcaacaagctggtgatgcccaactacccattcatcaacattcggtcaagtggacttttccagatttctcagaataaag

SEQ ID NO: 6183 - DNA, 96 bp, Homo sapiens
gtggtggtgtcttcctgtctcaacgatacctattttctagtgctgagatcctgagacaatggtgcacacatcttgaccaactcagcagcaaggtgg

SEQ ID NO: 6184 - DNA, 75 bp, Homo sapiens
gaggacatctgggggccacaaatgctccttctcctggagacgcaactcaagaagctccaccatgaggcgaggtgg

SEQ ID NO: 6185 - DNA, 101 bp, Homo sapiens
aagaggcgcaaacaagccaatcccaggaggaaaaacgcatgacgtatcccagactttactcaaggcaacactggacagtgttgtagaagaatgtgtcagct

SEQ ID NO: 6186 - DNA, 88 bp, Homo sapiens
gtgctgttttctgccggctgtaaagtcatcacctcctgggatcagatgtgcattgagcagcccctgtcaaagggaacaggaagcagtc

SEQ ID NO: 6187 - DNA, 82 bp, Homo sapiens
gaatcctcctccaggagaacggccatatttatgtgtgtgggaaagatgaatgggagggctgattttcgagagccgaatgcag

SEQ ID NO: 6188 - DNA, 82 bp, Homo sapiens
atcgaagtgttgtgtaaaggctacccttgcttggccttcgtgcctctgcagatctggtccaaagtcctggccatctcaggaa

SEQ ID NO: 6189 - DNA, 90 bp, Homo sapiens
gctttcactatccaggcaattggaacccaagccagaccgtctccttgtattgaaagtactatggaatgatttcctgatgtgctactcctc

SEQ ID NO: 6190 - DNA, 75 bp, Homo sapiens
gcggcagcaacacgatcggcgcccgcctgaaccgagtagaagacaagagtcaagggtccagagaaggaggagaag

SEQ ID NO: 6191 - DNA, 75 bp, Homo sapiens
cctcgccccccggggaagcggtggatgacaatgcagatcttcgtgaagactctgactggtaagaccatcaccctc

SEQ ID NO: 6192 - DNA, 76 bp, Homo sapiens
catctcaccagagcatgtcatacaaggtattcaagagacgatatttttacttgacccaacttcctgacggttcata

SEQ ID NO: 6193 - DNA, 100 bp, Homo sapiens
ttttatacaacagatcgtgtaatgacggtatcattccataaatatggggaatactttcctggcacaggagacttgagggagttggtggtgaccccgccca

SEQ ID NO: 6194 - DNA, 76 bp, Homo sapiens
caactttgtagtaagcttcgaaatttgctacatgacaatgagctgtcagcgagtaaccagctcataaatcacatcg

SEQ ID NO: 6195 - DNA, 100 bp, Homo sapiens
ctggattataaggatgtcatccccatggctgatgcagcaggcatcatccgctatgcaattgggccaagcgcccggcgccagcccggcccaccatgccgcc

SEQ ID NO: 6196 - DNA, 98 bp, Homo sapiens
ggatggatagctactccggaccttacggggacatgcggaggctttcgagctacccttggatgattgtgaagtgattgaaactgcagcagcgtccgaag

SEQ ID NO: 6197 - DNA, 98 bp, Homo sapiens
gacttcagcagcaacgacccctatccttaccctcggtacacagatgactggtttaacagaagctggcaaaatctgtggtggccccatcctgcggagca

SEQ ID NO: 6198 - DNA, 78 bp, Homo sapiens
ctgttgagaccagctgaaatggaacagatgttgttattgtaaagaatggaagaagaatatgtggaacaggaggttgtt

SEQ ID NO: 6199 - DNA, 73 bp, Homo sapiens
caaacatattcatgtcaaagctttttccaaagatcagctatcagttgagggatttgcagttgataaaatggct

SEQ ID NO: 6200 - DNA, 100 bp, Homo sapiens
cggggactcccccaaagacaagggtgtccgcaatgttgccagtgtctgtctgcagattggctacccaactgttgcatcagtaccccattctatcatcaac

SEQ ID NO: 6201 - DNA, 50 bp, Homo sapiens
gtcttagcggactggccccaaaagctcgcctgattaatctctctgagctg

SEQ ID NO: 6202 - DNA, 96 bp, Homo sapiens
acccatacttcatcctgcagcggaggaagggccacgccggcgatggaggcggcggcggcggactggcgggaccgcagctgaatgcacagctagaag

SEQ ID NO: 6203 - DNA, 100 bp, Homo sapiens
gcccaggcccagggaccaggcggaggcgtcgcgggagcctttggggcaccacagagatgcggtccctgaagaggaaggagaaggaatatgagcatgaaat

SEQ ID NO: 6204 - DNA, 78 bp, Homo sapiens
gcggctcttcccgcccgccttccgccgtctcttcgagttcttcgtgctgctcaagagtgcctggtgaagaatgtgatg

SEQ ID NO: 6205 - DNA, 100 bp, Homo sapiens
catgggggtccacactgcaatgtttttgtggaacatgcgatggcaagccggcaggtggatattgcaactcagggctggttcattggtctgatgtgtgctg

SEQ ID NO: 6206 - DNA, 73 bp, Homo sapiens
gcgggtggaggttcgagcgctgttctcgctccggagccgctgcacatttcgaaatgagccgtcagactgctac

SEQ ID NO: 6207 - DNA, 98 bp, Homo sapiens
agtgggaaatgaataaaagagtattgataaatttttgaaaattgttgaagctgagtaatgggtggttggaggcaaagtaaagaagcccggtaaacgtg

SEQ ID NO: 6208 - DNA, 75 bp, Homo sapiens
gtcactttccagcagtccagcacggccaagtcagccacctggacgatcaagactggtgccccttgccgatctgag

SEQ ID NO: 6209 - DNA, 90 bp, Homo sapiens
gcctccgtaatgagagcccggaaccactctttgtgccgcagcttcgcaggaccgtataatagacgctggccccaaaggaaactactctcg

SEQ ID NO: 6210 - DNA, 51 bp, Homo sapiens
gccgtaattcaagagtatatgttggatgctgctgagaactagccctagacc

SEQ ID NO: 6211 - DNA, 100 bp, Homo sapiens
gcccgggagatttgaccgagaggttgctgaagcagaagattgttataatacagctctccgtctgtgtcccacccatgcagactctctgaataacctagcc

SEQ ID NO: 6212 - DNA, 75 bp, Homo sapiens
ccagcagtcagtaatacagaagctattgacctgaaaagtggttctggaaaagtgtaccaaggccctgcaaaaggt

SEQ ID NO: 6213 - DNA, 98 bp, Homo sapiens
caaagatctcgtacaagatccttctttatctttctctggaatcaaaggactccagctgaaagttaacctccaacccaatgataactactttttctatg

SEQ ID NO: 6214 - DNA, 100 bp, Homo sapiens
tactgattccttcaacactgtagcagagatcactgggagcaaatatccagaacaggaagtttggggctcaagggtcacgacttactggagcaggatgggg

SEQ ID NO: 6215 - DNA, 82 bp, Homo sapiens
gggtccgtgcgcccagcgtcccagggcccaggccgagcaggaggctattcctggggcctgggcccagctcctctactatccc

SEQ ID NO: 6216 - DNA, 101 bp, Homo sapiens
agcccgagtggatcggggacggagagaacacgagcccatcaggagaacttgcgcctgtcaggggctggatccagaaacctgtggtgcctccttctcttttg

SEQ ID NO: 6217 - DNA, 100 bp, Homo sapiens
atggacagggccccacagagacagcaccgagcctcacgggcaccctcatcacatgtgtggattctgggattctcagagtctggcatgacaaggacaagga

SEQ ID NO: 6218 - DNA, 100 bp, Homo sapiens
tgacaaccaagggcctccgtctggatttccaaggaagaatttcctctgaagcaccgaggctgacccgcggctgattgagtccctctcccagatgctgtcc

SEQ ID NO: 6219 - DNA, 82 bp, Homo sapiens
ggcgaagctggccgagcaggctgagcgatacgacgcaggggaaatgctgtctgtagctgagcacttcctggagcagcagatg

SEQ ID NO: 6220 - DNA, 50 bp, Homo sapiens
cttttgccctggtgggattattgtctcataacaacaaactgcagtctaca

SEQ ID NO: 6221 - DNA, 96 bp, Homo sapiens
gagtgtttgatcttcctctgacttggtactattctctctcccagaaggatgccctgcagtggtctcgccatccagctacagtggagggagaggagc

SEQ ID NO: 6222 - DNA, 89 bp, Homo sapiens
ccgccgagtcctagcgcctggcctgcgcgccgctgcccgcgccacagctggagaatgctggaggagaccttaaggatggccaccaccac

SEQ ID NO: 6223 - DNA, 98 bp, Homo sapiens
gtcgatgggctcgctccagaggacatgagcaaggagcaggaaagaccacagcaagattctttcattcgtctcctcctagcctgggggaccaggctcga

SEQ ID NO: 6224 - DNA, 75 bp, Homo sapiens
gatgactcctgtgaaaaactatcaagaacatttttctgcacattgtggacttgtctgatcccaagcaaatctgga

SEQ ID NO: 6225 - DNA, 97 bp, Homo sapiens
ggacctgcatgtgtgtgcgcgcgaaggagcggaagaatggcagtgctcaaactcaccgaccaggagtagctcggagaggaggaaggagaagtcccgg

SEQ ID NO: 6226 - DNA, 100 bp, Homo sapiens
ttccaagctagactcagtcgccttcatggaatgtcttcaaagaatattaaaaaatctggagggactccaacttcaatggaattgaaagatgttggccatc

SEQ ID NO: 6227 - DNA, 75 bp, Homo sapiens
ggaaagtgtgatcgctgggtccattccaaatgtgagaatctttcaggaatgtcggattgcacatcctattgtaaa

SEQ ID NO: 6228 - DNA, 100 bp, Homo sapiens
tgcgtccccccaacacgtctctgttcgtcaggaacgtggccgacgacaccagcctaccgtatgtgaacgggagctgtgtgtgtttgcttttcaaaccctg

SEQ ID NO: 6229 - DNA, 100 bp, Homo sapiens
agagaactcttctcaaagaggaccctgcttactggttatgatgtgattgctcaagcccaatctgggactgggaaaacggccacatttgccatatcgattc

SEQ ID NO: 6230 - DNA, 100 bp, Homo sapiens
gcgaacgagagactacgcgctctggaagacattgaacgggaaatcggcgccatccttcagaatgcaggcagacctgttatcctaaactaggtgagtcagc

SEQ ID NO: 6231 - DNA, 89 bp, Homo sapiens
tttaatgacctcaggtttgtcggtcgaagtggaagaggttggaagaagtggcaatatcccagctggaacaacagttgatacagacatta

SEQ ID NO: 6232 - DNA, 82 bp, Homo sapiens
caacaaggagaacctggagctcaacggcagcatcctgagtgtgaccaaagacttgaccactcaaagtccagctccccagaac

SEQ ID NO: 6233 - DNA, 90 bp, Homo sapiens
cgcaaatcgacagcctgaagccctctggaagcccaagactgctggagaaggagaggacttgggtgaggagctgctgccacccgggctggg

SEQ ID NO: 6234 - DNA, 98 bp, Homo sapiens
gacagtcacctggatcccagagtaaagatctactgagaagccatgcagtgacacccgctaagacttgttggtagccatgtcggagccccacagggtcc

SEQ ID NO: 6235 - DNA, 50 bp, Homo sapiens
cctgctaatttgcagcttcctccagcccttagagatttgtttgattccat

SEQ ID NO: 6236 - DNA, 104 bp, Homo sapiens
gcggaaaggataggggggaggaagacttaacactgcaacaacaggaactttatattgctgttggaatatctggagccatccaacatttagctgggatgaaagac

SEQ ID NO: 6237 - DNA, 74 bp, Homo sapiens
ctggggttttgcttatataatcccaaaattacctcagaattatcaggaatgtgccataccgaatccgtgtgcgg

SEQ ID NO: 6238 - DNA, 74 bp, Homo sapiens
gggacggaggacgcgctagtagtgttttctgcctacattaaagaagtggatgaaaagccagccagcacgccctg

SEQ ID NO: 6239 - DNA, 72 bp, Homo sapiens
ataagcacggccatgcgagggcgctctacgtacttgtggtctacggtcgagtcaccaggacaacctgtggcc

SEQ ID NO: 6240 - DNA, 108 bp, Homo sapiens
gaatgatcatcaaacagctatggtgatgattagagacatactaatgtacatgcaagtctggaaaagtttgaaattccagtaaaaattcgtttgagtcctgaaccgtgg

SEQ ID NO: 6241 - DNA, 100 bp, Homo sapiens
tgcaacacctgcggcctcactgggacccccaggaggtgaccctgcaggaggcggttcctttggctcccggtcgtgaccttgattgggatgaagagatggc

SEQ ID NO: 6242 - DNA, 100 bp, Homo sapiens
gtgatcggcgatatcggtacagagagtcagctgagggccgtgcgggcccaccttgaacaaggtaagccgcgtagcagatacgctgccagcaacacgggcg

SEQ ID NO: 6243 - DNA, 75 bp, Homo sapiens
gcaccgtatcctgtcacttctggatgtgagcatcttttcctggaatcaggacatctctgggcttcaggaccatga

SEQ ID NO: 6244 - DNA, 90 bp, Homo sapiens
gtgttcactgctggacgcctctgggcaatcttaccctcctgggaactgagagagggtgtcaaattgagaaccaggtagatccccaccacc

SEQ ID NO: 6245 - DNA, 75 bp, Homo sapiens
tgtgtggccatctaccactttgaagatatggatcagaaactttcgaagttggtagaagagctcacaacttcagga

SEQ ID NO: 6246 - DNA, 75 bp, Homo sapiens
ccgcggcggcgtgtgcgcccctcaggttaagaaggcttttttgctctgtagcctggacgtactttgaagcccctc

SEQ ID NO: 6247 - DNA, 100 bp, Homo sapiens
gcaacatggacgcgctcagcgagtgggactggatggagttcgtttcccacagtcaaatcactcgcctctacagccggttcaccagcctggacaaaggaga

SEQ ID NO: 6248 - DNA, 140 bp, Homo sapiens
agacaccagctatgcccccgtggccaccgcctccagcttgccaccaaagacctgcgactttgctcagctctacgaactcgacggggaccccaagaggaaggaattcctggatgacttgttcagcttcatgcagaagcgag

SEQ ID NO: 6249 - DNA, 74 bp, Homo sapiens
tttggagttcttacaacatggcagacattgacaagtggttgtgggaagagaagtttgcagaactgaaatggagg

SEQ ID NO: 6250 - DNA, 98 bp, Homo sapiens
ggaatttccaggaagaaatagagtttcttaatgcaattttcccaaagtactttgagcataacagttttgaacaattttgcatcaactattgcaatgaa

SEQ ID NO: 6251 - DNA, 86 bp, Homo sapiens
gccaagtatgcgcccagcggattctacattgcctccggaggttttaaaatcaaagatgggaaaatcggagaaaattgcccttcccc

SEQ ID NO: 6252 - DNA, 100 bp, Homo sapiens
aggagggatgagggagcctgccctcgcatggtggccagggcacgtcactgcaggccaggtctcaccaacggctttgggggtgcgaggagcgagcaggagc

SEQ ID NO: 6253 - DNA, 82 bp, Homo sapiens
agctcagagtcaggaagtcagagcgcagataacgaaggaggcccaacttcattcaataaggagcctgacggatttatcccag

SEQ ID NO: 6254 - DNA, 87 bp, Homo sapiens
ccaacttctttggcaagtggacattttactggctcaatcctctttgatacgcaacctacggctctctgagtccttgaaaaagaacca

SEQ ID NO: 6255 - DNA, 88 bp, Homo sapiens
cttttccttggagagtcataacatatcactgactggctcagtagatgaaggcgtttctgagggcttgcctacacttcaaagcacgtct

SEQ ID NO: 6256 - DNA, 83 bp, Homo sapiens
catgaagctacccgaggcaatgcagcagctcagacctaccagggctcagatactgacatctttgcatttggaaaccccctgaa

SEQ ID NO: 6257 - DNA, 75 bp, Homo sapiens
ccgctactcggagggcgagcggacctccctggagaaggctcctgctccagcccagcccccagagagcagacccca

SEQ ID NO: 6258 - DNA, 50 bp, Homo sapiens
aaagcacaccagcggacgcacacagggggtaactacggggatgatcgtcg

SEQ ID NO: 6259 - DNA, 105 bp, Homo sapiens
gagaagcctgaaaagtcgcagcgagctggagccgccggaggaaagaccacagcaagattctttcattcgtctcctcctagcctgggggaccaggctcgaactgac

SEQ ID NO: 6260 - DNA, 100 bp, Homo sapiens
acttcactgctctgctgtctcctgcaagaactggctcaagaaatttgcctcgaaaaccaagtgtccctggccagtgtccttccacctgtccacaagcatg

SEQ ID NO: 6261 - DNA, 75 bp, Homo sapiens
agcacaagagaaagaaggttaagctggctgtcctgaaatattataaggtggagtttgtccatatgctcaatgcta

SEQ ID NO: 6262 - DNA, 75 bp, Homo sapiens
gatactgaagattactacacattactgggatgtgatgaactatcttcgctcttgaatgtcgtctctcaactagcc

SEQ ID NO: 6263 - DNA, 96 bp, Homo sapiens
gaagagtgtagttgagagctcggccccaggagccaataacctgcagacgccaaggacttattgttgtgctaacactgaagacttggagacagttat

SEQ ID NO: 6264 - DNA, 82 bp, Homo sapiens
ggtacttctgccactgctgctccgtggagatcgtcccgcgcctgccggtttggtgcacctcgatttggaggaagtagggcag

SEQ ID NO: 6265 - DNA, 90 bp, Homo sapiens
aacagccatctggccctggtgaggtgaaggaagctgccctctgtcgacagctccccatggaagctgagactcttgccccagttcaggctg

SEQ ID NO: 6266 - DNA, 100 bp, Homo sapiens
ttaaacacgacaacatcatcgccatcaaggacatcctgaggcccaccgtgccctatggcgaattcaaatctgtcgcacaactacgggattggcgccgccg

SEQ ID NO: 6267 - DNA, 82 bp, Homo sapiens
cggaggtctccgccggctcccgggctcttttccacaatggcccccctgaccagcgcgtcgaccgcggccgcgctcctgagac

SEQ ID NO: 6268 - DNA, 48 bp, Homo sapiens
aagagcacattgcctggtaagatgatatccctttaaggaccaacctgc

SEQ ID NO: 6269 - DNA, 100 bp, Homo sapiens
ctgtgagttcaacatgatagagcagagtggaccaccccatgaacctcggtggaagatgcaatgctgatgtttgataaaactaccaacaggcacagaggta

SEQ ID NO: 6270 - DNA, 73 bp, Homo sapiens
ttacttgtgaatgaagattcattatgaggcttatcaggagggcagacttcaaaagctactaaaaatgaacggc

SEQ ID NO: 6271 - DNA, 82 bp, Homo sapiens
cgcggagccgcgcagccctcggagcacggtatcatgatattagctggtttgacatcaagtcatttgtgagtcatcagatctt

SEQ ID NO: 6272 - DNA, 75 bp, Homo sapiens
ttactactgaaaacatcgagagagttctgtcttgcattcctggacctatgcaggaatgttttaaaggaagttggg

SEQ ID NO: 6273 - DNA, 82 bp, Homo sapiens
gggccggtgcaactattcgcagtccgagcgaaactatgttccaacttcctgtcaacaatcttggcagtttaagaaaagcccg

SEQ ID NO: 6274 - DNA, 90 bp, Homo sapiens
cgaacagatggcactgtggaaatttataacttgtcagcaaactactttcaggagaaagcttttgatgaggccattgctgaacttgataca

SEQ ID NO: 6275 - DNA, 88 bp, Homo sapiens
ctcactccctttcctctgctgccgctcggtcacgcttgtgccggtggtggtgtgcacattgagccccggtatagacagttcccccagc

SEQ ID NO: 6276 - DNA, 96 bp, Homo sapiens
gacagctttcaaaccgcaatttctgagaacagaataatcggagccatggccatattttttcaaggttttctagtcttgaactactggctacgtggc

SEQ ID NO: 6277 - DNA, 89 bp, Homo sapiens
cgacaagccgctggcagccgcggatctcaccgccgctcaggcaaccatgtccaagggacctgcagttggtattgatcttggcaccacct

SEQ ID NO: 6278 - DNA, 74 bp, Homo sapiens
atgactttgcctctttcagagtggaccgaatcgagagagttgcaagagtgcaatatggcttttgtaaggcaaca

SEQ ID NO: 6279 - DNA, 51 bp, Homo sapiens
atcataaagaaatccaacttaccttgtcatttgaaaatctgaacacagttg

SEQ ID NO: 6280 - DNA, 98 bp, Homo sapiens
atgtatttgtggcttaaactcttggcatttggctttgcctttctggacacagaagtatttgtgacagacgacaggatctgctcgccacccttcatgga

SEQ ID NO: 6281 - DNA, 90 bp, Homo sapiens
cgagacttctgcagaggtggctgacctcaagaagcagtgtgatcagtttgtggcagagtacgagcccgtgctgatcgagatcctggtgga

SEQ ID NO: 6282 - DNA, 101 bp, Homo sapiens
tgctcaggactttaaaacagatctgcgcttccagagcgcagctatcggtgctttgcaggctggattctagtgacatttataacgaattgaaagaaacatat

SEQ ID NO: 6283 - DNA, 90 bp, Homo sapiens
aaacaaatgaagttcaaggatttctctttgggaaactaaagggtagaaatatttctgtcatggctcattcaaagactaggaccaatgatg

SEQ ID NO: 6284 - DNA, 51 bp, Homo sapiens
catcacctacactacaccagccgccagctgattgggcagaaagtggcccat

SEQ ID NO: 6285 - DNA, 97 bp, Homo sapiens
acctcacctcaagcacacccaatggacagcatgcctcaccaagtcacatgacaagcagctaattcacctaaataagattgatcctcatgctccaaat

SEQ ID NO: 6286 - DNA, 75 bp, Homo sapiens
agaaactattaaacttctcaaagcatcagaagagctaacaattgctggaatgacctttacaacttttgatcttgg

SEQ ID NO: 6287 - DNA, 50 bp, Homo sapiens
actcaaaagtggggggcaggaaaggatcgccccaggacattcgacatgca

SEQ ID NO: 6288 - DNA, 100 bp, Homo sapiens
gccagcgagtcaccgagccaccggccctcggggtgtgatgaatgcagactctgctaccattttggctgtttggatcctcctttgaaaaagtctcctaaac

SEQ ID NO: 6289 - DNA, 100 bp, Homo sapiens
atttgaagatattagcctaacaagatggaagcaggtttaaaattttacataagaagttacctttttcaggaatacaggagtttccagaaaatataaaaaa

SEQ ID NO: 6290 - DNA, 96 bp, Homo sapiens
aagtcgcgtgtctaggtgagtcgcggtgggtcctcgcttgcagttcagcgaccacgcatcccagccatcactcttccacctgctccttagagaagg

SEQ ID NO: 6291 - DNA, 80 bp, Homo sapiens
gtagcttcttgcagcagtttctgaagttgcagaaggcacagaccagcacaggtaatctgtaagtcagatgctccaacagg

SEQ ID NO: 6292 - DNA, 101 bp, Homo sapiens
tccgaaaatgtcagcagagcacatctgcagtcattggtgtgcgtgtgtgtggcatgcaggattctgatgagatggaggatgggcctggggttcaggattag

SEQ ID NO: 6293 - DNA, 100 bp, Homo sapiens
cgggacggaggacgcgctagtgtgctgaaggtcgccatcctggctgagaagtacgcggtggactacacctggtatgtggataccatcttgaacttgatcc

SEQ ID NO: 6294 - DNA, 88 bp, Homo sapiens
ggtctggggagtggggaatgaggcgggggtcggcccggggctcggagaatgggcagaagactgtaactacagcttctatgattaccac

SEQ ID NO: 6295 - DNA, 80 bp, Homo sapiens
cttctgtagaccagctccaacaggattccatggtagctgggatgttagggctcagcgattattggagccggaattggtgg

SEQ ID NO: 6296 - DNA, 71 bp, Homo sapiens
acagttcgctacacagcaatgcatcgagtttttggtgttgagccagacttgaccagggaaggcggcagtat

SEQ ID NO: 6297 - DNA, 100 bp, Homo sapiens
cttcaatgacctccccaactcgttgtttgcgtgcaatgttcaccagtcagtgtttgaaggagaagagagcaagtaatctatgccagcaattatgacaatg

SEQ ID NO: 6298 - DNA, 96 bp, Homo sapiens
cgggaggaaggaacgaggcaaggagctaaagcagcgtgcgttcagccctggggttaattatagaaaatgccaagtaggaaatttgccgatggtgaa

SEQ ID NO: 6299 - DNA, 51 bp, Homo sapiens
actttccatagctgtaggactgctggaggaccctgatgctcccataagaca

SEQ ID NO: 6300 - DNA, 82 bp, Homo sapiens
cttgcgcgccttgtcactggagtgcaagaagaaattcccacctgtcaaagaggtggtgaaattgcctctacctttgatcacc

SEQ ID NO: 6301 - DNA, 80 bp, Homo sapiens
tgtgctatcctagaatcaaggatttcagcaacaatgcctctgttcaaactcccagaaatgcactcggtgatggaaagaga

SEQ ID NO: 6302 - DNA, 82 bp, Homo sapiens
ctcgtggcgtgcgacaacgcggcgcagaagccgttggcatccactgtgaatgataagctggagctgcaggagtgtctggagc

SEQ ID NO: 6303 - DNA, 82 bp, Homo sapiens
ccaaagcctgccgggagctagaactcaaggtgcccctggtggtccggcttgaagaactgaaggcagaagctagtctaatgga

SEQ ID NO: 6304 - DNA, 75 bp, Homo sapiens
ggcgaggcctcgacttcttccagtcgcccagtttttgccccaacccggagcatgcaagttgtccccttggacaaa

SEQ ID NO: 6305 - DNA, 98 bp, Homo sapiens
caagctcctcgtgttctttagaactgaagccattctcaaagcctcctggccccagagacaggtgctcttacagcctgttccaagtgtggcttaatccg

SEQ ID NO: 6306 - DNA, 111 bp, Homo sapiens
aagccttggaaatggaggaagaagaaaagcgaaaagttcaaacacacgtcagcagcaatgccaagtgagtacacctatgtgaaactgagaagtgattgctcgaggccttcc

SEQ ID NO: 6307 - DNA, 51 bp, Homo sapiens
ttgtcagggctgagagcgacggctggtttacaacaaaacatccagggccac

SEQ ID NO: 6308 - DNA, 101 bp, Homo sapiens
cttgaggtgttacaccagcctgtccggacccgctgtggccacgtgtattgttgcagcatctggcagtgagactgaggatgaggacagcatggacattccct

SEQ ID NO: 6309 - DNA, 75 bp, Homo sapiens
agcctatgtgaaagaccattattccaacggcttctgtactttctgggaggtgatcagtgatgaacatggcatcga

SEQ ID NO: 6310 - DNA, 90 bp, Homo sapiens
gctgcgggtccgggattcccagccatggcagattcctccgggcagcagggtcactgcagccagaggggtccagaagagagaggaggcact

SEQ ID NO: 6311 - DNA, 100 bp, Homo sapiens
tcacacagctgcttccattggccagtatgaagtggtgaaggagtgtgtgcagcggccactgctgctgctgtcgttttccacaaaaagaggctcggccaga

SEQ ID NO: 6312 - DNA, 132 bp, Homo sapiens
ctcccccatcgccctgccgcctctccgggccagcaacgctgccgccgcagcccacacgtctgaagatgatgagaaactgaaaaagaggaaggagcgatttgggattgtcacaagttcagctggaactggaac

SEQ ID NO: 6313 - DNA, 123 bp, Homo sapiens
ccggccacagcctgcagcggagcccacgagaggcagcgccatggcggagcagacctactcgtgacaatgcagatcttcgtgaagactctgactggtaagaccatcaccctcgaggttgagccc

SEQ ID NO: 6314 - DNA, 100 bp, Homo sapiens
ttggccagacagcagctaagctggttcatcccatcagcctggattggtgaaactgaatcacaggagatatttccagctcctcaagagttactgatctatg

SEQ ID NO: 6315 - DNA, 100 bp, Homo sapiens
atttccataaattgaagcaaagaaagtttctgttaatgctgcagtctgtcaaacgagcttttgccattaacagtaataacccatggttacatgaatgttt

SEQ ID NO: 6316 - DNA, 75 bp, Homo sapiens
ccagctttgacaatacaggaaatgtttgtgccaagctctcctgatgaaatgtgttctgccccactgggctccagg

SEQ ID NO: 6317 - DNA, 100 bp, Homo sapiens
atgggatgctggaggacatctgggggccacaaatgctccttctcctggagacgcaactcaagccagctgaggtgggtgtcctggttggcaaagaccggtc

SEQ ID NO: 6318 - DNA, 96 bp, Homo sapiens
gtggaacgggccaagcaggtgaccatggcagaactgaacgccatcattggggaatccagatcttacataagatggaagtctctcacactagatact

SEQ ID NO: 6319 - DNA, 100 bp, Homo sapiens
ttcggacacctactctccgtacatccatgtaccagaagtgtaccactgtggatgaagcagtgattgccttcatgttgtggagcccatgcctgtgcggggg

SEQ ID NO: 6320 - DNA, 82 bp, Homo sapiens
agatgttcagtttgcaaaatggtctggagcccggcactgtggtcataacagagcaggcagtggatacctgcttcaaggcaga

SEQ ID NO: 6321 - DNA, 96 bp, Homo sapiens
tgcttctttggagaatgatatcaaaccaggctctctaaatacgtacagattctgcgataatgtgtggacttttgtactgaatgatgttgaattcag

SEQ ID NO: 6322 - DNA, 82 bp, Homo sapiens
gaatgcactgcacaatattaaaactttacctgggatgatcacagtcgtgttaaactgcaaaatgctgagaatgattatatta

SEQ ID NO: 6323 - DNA, 82 bp, Homo sapiens
ctcaccccgcggccgcaccttcccgccttctcagggaaagcaggcaggatgggagagtcgccgatagaaccacctcttccct

SEQ ID NO: 6324 - DNA, 74 bp, Homo sapiens
ggtaatgcatgaaagcacatgtttcagtgccactcacataagaagtgcccggccctcgggaccaaggatcacgt

SEQ ID NO: 6325 - DNA, 90 bp, Homo sapiens
tggattcccgagatgctggcatttgcctgcaaccccttcaggtatgacattcttcagtcctgctggcggccacctgcccagcgcccttca

SEQ ID NO: 6326 - DNA, 75 bp, Homo sapiens
cctgggaatttggaggtgggttcgaaaaagtttttagaacttcagccataaaaatgggcagaattttccttgatc

SEQ ID NO: 6327 - DNA, 101 bp, Homo sapiens
aaaacttcaaaaattaccattttatgatttactggatgaactgataaaacccaccagtctaggtgctggagaatctggtaaaagcaccattgtgaagcaga

SEQ ID NO: 6328 - DNA, 98 bp, Homo sapiens
tcacgagtacaatgacatcaaggatgtggggcagatgctgatgggcaaactaggagcaggccatagaggtgctgacccgctccagcctagaagttgag

SEQ ID NO: 6329 - DNA, 83 bp, Homo sapiens
aagtattgctgtgggtgctgggacttcccgtccgcggcgtggaggactctgaacaggaagtgcctcctggaaccacagagtcg

SEQ ID NO: 6330 - DNA, 100 bp, Homo sapiens
agcctcaggcgtgcgcggacggtgtgcggtgggaggatacccttgacaaatactgtgaccgggagtatgctgtgaagacccaccaccacttgtgttgccg

SEQ ID NO: 6331 - DNA, 100 bp, Homo sapiens
ccagatgcagctcgtggatacgaaggcgggatagccctggtcctttctccaaactggtccctaggaaagaccttcttgtagaaaatgtgccatattgtga

SEQ ID NO: 6332 - DNA, 50 bp, Homo sapiens
cggagggcgagcggacctccctggagaagcctgagaagccaggccccggc

SEQ ID NO: 6333 - DNA, 101 bp, Homo sapiens
gtttgttatctgcttctatttggaggctggggacctctcaaagaatagctgtatttcagaagaagaaagagatgcttatgaagaactgctgacacaagcag

SEQ ID NO: 6334 - DNA, 98 bp, Homo sapiens
ctcgggatccttctgtcatagaaactcacatgagacaaatgcgctcagcttcaattggacacagcattgttggttttgccatgtactattttacctat

SEQ ID NO: 6335 - DNA, 100 bp, Homo sapiens
caaatctactactgttcatggcaggaactaagcgtcttgtagaaggaactattaatccaggagaaacctgtttaatcattgaagatgttgtcaccagtgg

SEQ ID NO: 6336 - DNA, 100 bp, Homo sapiens
acgccctgctgggtcctacctgtcagagccccaagcttgccaacacttggtgtcacatgtgagcctcccacatgtattcactctccattccagctctgtg

SEQ ID NO: 6337 - DNA, 75 bp, Homo sapiens
ttggactgagtcctgcaggacacagatatgaaaaacagtagctccgtatcgaatacattgacaaatggatgtgtc

SEQ ID NO: 6338 - DNA, 95 bp, Homo sapiens
atgagtcttcaagctctgtaagacatgaggagagacttcagcatgcaaaccttcatctgttcggcttgcaccgtcattttcattccatgctgctg

SEQ ID NO: 6339 - DNA, 75 bp, Homo sapiens
gcaatttgaagatacatgagacagcagccaaacccccagcttcctttgctccaataagctttgcaatcaaggcca

SEQ ID NO: 6340 - DNA, 75 bp, Homo sapiens
tcctggagcagttgtatgtgtagaaagtgaaatcagaggagatgtaactatcgatccgatgcagtccatattaaa

SEQ ID NO: 6341 - DNA, 100 bp, Homo sapiens
ctggggcaggggccagggccaggctgggctaagcagttccaagctttccatgtccaaggccctccctctcaccaaagtggttcagaatgatgcatacaca

SEQ ID NO: 6342 - DNA, 82 bp, Homo sapiens
cttcctgatccgggagagtgagagctccccaggggagttctctgtgtctgtgaattcaaatctgaacatcaatgatgtacta

SEQ ID NO: 6343 - DNA, 98 bp, Homo sapiens
gcgcactcccgcccgacggaagaggaagacaaaacctatctacaagacctcttgtgctttgactattcatgctattggacgatacagccctgatgtat

SEQ ID NO: 6344 - DNA, 90 bp, Homo sapiens
agatctcccacaaacaaattttcgtcgtttaccttttgaccactgcagattctacaagggggttgctcctctctggatgagacagatacc

SEQ ID NO: 6345 - DNA, 74 bp, Homo sapiens
gccagggaaccctggtcaccgtctcctcagcgaccgtggcagccatgtattacagctactacatgctaccggac

SEQ ID NO: 6346 - DNA, 96 bp, Homo sapiens
ggttagtgtctatgctcagaatccaagcggagagagtcagcctctggttcagactgcagtaaccaatggccgccaagaacgagtcatgtttgacaa

SEQ ID NO: 6347 - DNA, 82 bp, Homo sapiens
cgggccccccagcatgaagaccccggcggacacaggatgaccgagtgggagacagcagcaccagcggtggcagagaccccag

SEQ ID NO: 6348 - DNA, 98 bp, Homo sapiens
gttgagtgcctcgttggagaatcgcccagaaaaacaatcaaccatgacgaccgaatctggatcagactcggaatccaagccggaccaggaggccgagc

SEQ ID NO: 6349 - DNA, 90 bp, Homo sapiens
gttttgcatgtcctttcttgtgtgatcgaaagagtcaacatgcaggtattgttgcagcatctggcagtgagactgaggatgaggacagca

SEQ ID NO: 6350 - DNA, 97 bp, Homo sapiens
ggggccggagaggagcatgaatggagcaaaatggcggatcatgtgcaggtatggcctcacaagtcttggtctacccaccatatgtttatcaaactca

SEQ ID NO: 6351 - DNA, 98 bp, Homo sapiens
attcgttacagccagagattggtgatttggattgtgaaacctgtaccataacacggagtggactgactggtcttgttattggtggtctataccctgtt

SEQ ID NO: 6352 - DNA, 90 bp, Homo sapiens
attactacctcagttacattgaggaatggaaaaagcagttgatcctaagacacgtttacttatgtataaaatggtcaactctggaatgtt

SEQ ID NO: 6353 - DNA, 98 bp, Homo sapiens
aggaggaggaggaggaggaggtggcagtggaggagtgtgacagggatgatgaagaagacctgctggatggtgggatgtgtgtgggctgaaattccgag

SEQ ID NO: 6354 - DNA, 108 bp, Homo sapiens
aataattattattaacatttattaacgatcaataaacttgatcgcattatggccagcactattaagaggcggatgccccaaaccttccgtgacccagcaactgctccc

SEQ ID NO: 6355 - DNA, 100 bp, Homo sapiens
atctggtcttgatttaatgtctgaatctggagaaggggaaatctccccacaaagagaagtctcaagatcccagatcagcatctcatggaatacttccggg

SEQ ID NO: 6356 - DNA, 75 bp, Homo sapiens
tttggcagctgagtattggagccaggagcctgccatgaggctgaggccaccatggagcagtgtgcgtgcgtggag

SEQ ID NO: 6357 - DNA, 96 bp, Homo sapiens
gctatgtcagaaatgctaagacatcctaggatatcgggaaagcctatattggtctatgacttcacacctatggattcttctgcagtttatgtgtta

SEQ ID NO: 6358 - DNA, 82 bp, Homo sapiens
cgggaccggctgtatgattaggccacaatcttcaatgagtaaacatattcctggactttgaacatgtcggggatcgccctca

SEQ ID NO: 6359 - DNA, 73 bp, Homo sapiens
gaaacgcaagacggtgccgagaagcagctgcgaggagtgacgaccgtgttatcaatgaccacactgatgatcg

SEQ ID NO: 6360 - DNA, 75 bp, Homo sapiens
ggtcaccctggaagagtcgctggccgaagcaagaaccagttgagtcatctctggggcttagtaatggagtaagtg

SEQ ID NO: 6361 - DNA, 98 bp, Homo sapiens
cgatacctttttcttggcgattatgtggacagaggttattttagtatagagaatgagtccctggaacgccagatgcgtgaaatggaagagaactttgc

SEQ ID NO: 6362 - DNA, 101 bp, Homo sapiens
aacccctgaagggatcaccagagagacaaggtctagctctgtgatgcaggccggaggacagtggtgtgatcacagctcactgcagccttgaactcctgggt

SEQ ID NO: 6363 - DNA, 90 bp, Homo sapiens
ctgtgctagcagcgtggccacagccttcattgcctccctggtactggggcaggagcgcttcacctctatgacacgattgtattatcggga

SEQ ID NO: 6364 - DNA, 50 bp, Homo sapiens
aatccagaagatagtactttccctgatgcagttcgaacattaagcaatgc

SEQ ID NO: 6365 - DNA, 83 bp, Homo sapiens
gtggcaggaggaggaggaggggctccggctggtctgtggtgaggctgaaggtgatgtggccgccctcaaccgacgcatccagc

SEQ ID NO: 6366 - DNA, 100 bp, Homo sapiens
cccgaagccccctgcaggaactctacaacccaatccagagtcctcgaatgccaccttgctgaccaatgcagagaagattgccaccatcaccaccacacac

SEQ ID NO: 6367 - DNA, 88 bp, Homo sapiens
ccctcaatggattggtttacataggtcaatttatcatctggacttcaagctgcaggcagttctgtttttccaggccttttgtccctcc

SEQ ID NO: 6368 - DNA, 100 bp, Homo sapiens
cgagccataaaaggtctaggaccgcttcccccgagccagcaggttaatttggagtggcccctggagtcagtttcctacaccatccgaggccccacccagc

SEQ ID NO: 6369 - DNA, 82 bp, Homo sapiens
ggtggactccttcggcagtccacccaccgccgccgcctcccagctgttcctgggcatgtacccagaagagcattttatcgag

SEQ ID NO: 6370 - DNA, 75 bp, Homo sapiens
cgcggaccccgcgtgcgccttgctcgcccgcagccccgagaccgcaggaataactcaagtcacctgtactggaaa

SEQ ID NO: 6371 - DNA, 75 bp, Homo sapiens
cgtgagtcccgtgggaaagctaacctcaccaagtccctttctagagataggagaagagagagatcgctgtctcgg

SEQ ID NO: 6372 - DNA, 74 bp, Homo sapiens
cgagaatgaagccatccaatggatgcaggaaaactgaagcatcaagtgtacctgatttgtgaacctatcttgct

SEQ ID NO: 6373 - DNA, 90 bp, Homo sapiens
gtccaaggctctcctggaggaatacaacaagacttttgatacaaccaagtcggatgggcagtttaagaagacagccagtaacagcaagct

SEQ ID NO: 6374 - DNA, 75 bp, Homo sapiens
gtgaatccccctaaacaggagcacctgctggcgctaaaaggaactgtggctgcaccatctgtcttcatcttcccg

SEQ ID NO: 6375 - DNA, 100 bp, Homo sapiens
tcgctgcctgtgccccagctggtggtggctgttgacatggaatttgctaagaatatgtatgaactgcataaaaaagtttctccaaatgagctcatcctgg

SEQ ID NO: 6376 - DNA, 75 bp, Homo sapiens
gccaaccatggaaatggataaatggtactgaatggacaagacagacaagagatggccacgtccagttctggacag

SEQ ID NO: 6377 - DNA, 50 bp, Homo sapiens
gcaggacctgcagcatcccagaggagcccatgaaatcaagagcaccacag

SEQ ID NO: 6378 - DNA, 100 bp, Homo sapiens
ggccgctgcgctcctggcccgcgaggcgtgacactgtctcggctacagacccagaggtgggtgacatcaccatcctggtgaacaatgccgccgtggtcca

SEQ ID NO: 6379 - DNA, 101 bp, Homo sapiens
cccagattgccagcgcaggttggaagccgcatatttggatcttcaacggatactagtgaccaagaatatggcccaggtgaccaaagccctggacaaggccc

SEQ ID NO: 6380 - DNA, 82 bp, Homo sapiens
cagagagggaatggtgcaggcaggcgctgagaaggacgcgcagtccatctctctcagactgttcgtgatatttcgtgtgttt

SEQ ID NO: 6381 - DNA, 82 bp, Homo sapiens
ctgtgcagtcctgttggaatttgtgactgccaacagccagcccaatgtcgaatccagaaatgcaccacggacttcgtgtccc

SEQ ID NO: 6382 - DNA, 100 bp, Homo sapiens
agctggaggacagaaacaagagatgcaaaatccacaagtattcaagtgattgttaaagagggaggcctgaagttgattcagatccaagacaatggcaccg

SEQ ID NO: 6383 - DNA, 100 bp, Homo sapiens
gctggagcccaatgcccaggcccagaaatcttcccaaggctgcagacaccgacggatttgctttgggagccagagtagctgccgccaccagagtccggag

SEQ ID NO: 6384 - DNA, 83 bp, Homo sapiens
acctattatcagatcaaccaccaaagtgggaaacattgaaatcaaggaactgtggctgcaccatctgtcttcatcttcccgcc

SEQ ID NO: 6385 - DNA, 100 bp, Homo sapiens
ggctgatcatctccatcttcctggccaggcatggtggtgtgttcctgtagtcccagctactcgggaggctgagcaggagaatcgctggaacctggcaggc

SEQ ID NO: 6386 - DNA, 75 bp, Homo sapiens
atcctccttgaagtatttggctgaggagttttcaatcccaagaaaagaaaccttgtttattccctgtgaaaatga

SEQ ID NO: 6387 - DNA, 100 bp, Homo sapiens
gaaggagatcttctcttcctgtttcacagacaatggccagatcatcttcccagagtcagactaccagattttctcctaccccaacccactcccaacaggc

SEQ ID NO: 6388 - DNA, 100 bp, Homo sapiens
atccccaaatactgctttccaaactaacaccaaacacctttgctgtctgcacaaagcaccgtggggtccttttgcaggccctcaatgacaaagacatgaa

SEQ ID NO: 6389 - DNA, 96 bp, Homo sapiens
cggacggtcgcgcggcggcaggcacagaccacagtcccaggcagaagaaacaatgtaatactgcagcccctgcaacctgacactccatataaaatt

SEQ ID NO: 6390 - DNA, 150 bp, Homo sapiens
cactgctcgcaggtggactcggtccgtggcttcggaggcaagtttggtgtccagatggacagagttgatcagcaaagaacagtctgaacttgatcaagatttggatgatgttgaagaagtagaagaagaggaaactggtgaagaaacaaa

SEQ ID NO: 6391 - DNA, 75 bp, Homo sapiens
acgttgtctaaatttcggtagccatggcacaagaatatagtgttggagagcacaatggctgaacaagtccttcct

SEQ ID NO: 6392 - DNA, 75 bp, Homo sapiens
ctttcgccttctgccatgattgggaggcctccccagccacatggaactggttactttgaaagttgcaatatacac

SEQ ID NO: 6393 - DNA, 98 bp, Homo sapiens
ggtggtgctggtggcggcggcgctttcggcgcgggcccgggccccgagcgcccgaacagacaattgtggcaattaataaagacccagaagctccaatt

SEQ ID NO: 6394 - DNA, 50 bp, Homo sapiens
caacacacctgcacgcaacagaagaaggctgtcatcaaccggccattcaa

SEQ ID NO: 6395 - DNA, 90 bp, Homo sapiens
cgccagcgccccatcctgagccggtgctggagaatctggtaaaagcaccattgtgaagcagatgaggatcctgcatgttaatgggtttaa

SEQ ID NO: 6396 - DNA, 75 bp, Homo sapiens
ggctctcatgttcctccatgataaaggaatcatctataggattgacttggcctctacttcttgttaaggaaattc

SEQ ID NO: 6397 - DNA, 97 bp, Homo sapiens
ccatttctttgtggagtatcatctcaaaagttaggattgaagcctgcatgtggggggtgagtggtgcactgacagtgcttatgaaggacgcaatcaa

SEQ ID NO: 6398 - DNA, 100 bp, Homo sapiens
ctgaggaactgcggctgcggttccgagcggggtctggggctgttaccattgagtgaccagaaaggacaatgcagatcttcgtgaagactctgactggtaa

SEQ ID NO: 6399 - DNA, 75 bp, Homo sapiens
gctcagagtagtcaagtttcctgaccttgacagaaatgtacctcgaaaggttggcatcactctcttcactgtgtc

SEQ ID NO: 6400 - DNA, 90 bp, Homo sapiens
cacaaaatgtgctggttgatggtgttaagaaactctcagtttgtgtttctgagaaaggagctctgtctgaatggctggctgaccaccccg

SEQ ID NO: 6401 - DNA, 80 bp, Homo sapiens
aaatatcccaaggactaatctgatcgggtcttccttcatcttcgcagaatcaagaacggctatgtgcgtttaaagatccg

SEQ ID NO: 6402 - DNA, 75 bp, Homo sapiens
aatatcatgcaagtgtggcaaatggcacccagattggctgaaaacttctgtgtctgccatttagctactggggac

SEQ ID NO: 6403 - DNA, 75 bp, Homo sapiens
aggcagcatggaccacggttgctgggcggatggggagcgtctatggtcagtgtaatgttcaagctcagaaatgcc

SEQ ID NO: 6404 - DNA, 82 bp, Homo sapiens
cttggactgagtcctgcaggacacagctccctgtgctgtcaggaatctacaggacttggctcgtatttacattcgacgcaca

SEQ ID NO: 6405 - DNA, 88 bp, Homo sapiens
atgaagaagacagttcctccattgatcatctgtctctgaatcaggacctgaaggagaagaaggagaaggtggaggagaaggcaagccg

SEQ ID NO: 6406 - DNA, 74 bp, Homo sapiens
ggccgaggacttcgccgaccaggttgacatcatggacatatgtgagtccatcctggagaggaagcggcatgaca

SEQ ID NO: 6407 - DNA, 98 bp, Homo sapiens
cgcgcattcggccccggacgaaggtactcgcagcacttggagcgcagaaccggccgcgcccgttcctggtccagaactttacacagaaaaggtgctca

SEQ ID NO: 6408 - DNA, 59 bp, Homo sapiens
aaacaagccaatcccaggaggaaaaacggaacatggcaacccgtgtgtgtctcatccca

SEQ ID NO: 6409 - DNA, 100 bp, Homo sapiens
taagtgttggcggccatcgtggttttcgcatcctggggacgaatcctgagcttgccagagacgggcggcgcaagtatgccgagattttgctgtcctggag

SEQ ID NO: 6410 - DNA, 80 bp, Homo sapiens
aaacgcccccaatttcccagctgctaaaggaagaggaaggtggtagctgagcacccagatgcttcaggtgaggagattga

SEQ ID NO: 6411 - DNA, 95 bp, Homo sapiens
aaataaaagagccctgcaatttgaagatacatgagacagcagccaaacccccagaaattagtgaatttccatcagaatgttgtagtgtgatggca

SEQ ID NO: 6412 - DNA, 96 bp, Homo sapiens
agggctctagctaaaaatgagcaagttaaaggcaagatcgacaccatgaaggcaaccattgggattgacttcttgtcaaaaaccatgtacttggag

SEQ ID NO: 6413 - DNA, 85 bp, Homo sapiens
gcaaatagtctctcaggggacttctcagcctccattaattgctggccagtttgccatcgtgaagaagtgccgggagaagagcacg

SEQ ID NO: 6414 - DNA, 100 bp, Homo sapiens
acttgtttcttatatgtgatgccattccagcactggactcatggaggctgagcatttattcaggttgaccccctgtttacagtgccagcgccaccaccgc

SEQ ID NO: 6415 - DNA, 100 bp, Homo sapiens
cagtctgtcaagtccatctctaattcagtaccgctccatcaaccaccgggtggatgccagctcgatgtggctttaccgacggtattactcgaacgtatgc

SEQ ID NO: 6416 - DNA, 90 bp, Homo sapiens
aggcagccgccgggagccgggaggctggggcgcaggggccagcgcgccgagagctgcttttgcacattttcctgaactctatgattttgc

SEQ ID NO: 6417 - DNA, 75 bp, Homo sapiens
cgtagattaaacttgagaaacaaaccataaaagtggaaggccctctttaacagtttgtgttgctagttaagctag

SEQ ID NO: 6418 - DNA, 74 bp, Homo sapiens
gagcaaaaggcctttgagaagaacattttcaacaagacccatcggactgacaaccttgaagctgatgatgttaa

SEQ ID NO: 6419 - DNA, 75 bp, Homo sapiens
ctatcctggccgagggccttcacttcaggaaagtatgtgatggtgatgggagtggttcaggcctgcagccctgag

SEQ ID NO: 6420 - DNA, 75 bp, Homo sapiens
ccaaaattgtggaaaagtcactctggaccggccagccttgcagctgtatgatccaggagctcgcttccgagcgcg

SEQ ID NO: 6421 - DNA, 75 bp, Homo sapiens
ggagatgcctggcagccccgctctctgcagctgtgggtgagcgtggaggatgctcagatgcacaccgtcaccatc

SEQ ID NO: 6422 - DNA, 98 bp, Homo sapiens
gtgggaaggtgtgtccggaggtttgcaggggtgcagtgtgtctggtcttatgaggtacttaagagattatggcatcagaaacccacaatgttaaaaaa

SEQ ID NO: 6423 - DNA, 100 bp, Homo sapiens
accctggcttttctcatccctgcagttgaactcattgttaagttaaggttcatgcccaggaatgttcagaaataccacactattaatgggcataattgtg

SEQ ID NO: 6424 - DNA, 74 bp, Homo sapiens
ccaccgctgccctcagctccgagtccagggcgagcctcccgcgacgatgcccctcaacgttagcttcaccaaca

SEQ ID NO: 6425 - DNA, 97 bp, Homo sapiens
gggatgacttcctgtgcttagaaggcaaagaattcaaccggctcatccgcaacgagaaaggcgagctctggattaatcgaattacagctgctagcca

SEQ ID NO: 6426 - DNA, 74 bp, Homo sapiens
aatattatggtctttgtgcacatttacatcaaggtgcaatggatgagcttcatagtctggatccaagaaggcaa

SEQ ID NO: 6427 - DNA, 100 bp, Homo sapiens
ccagccacacatccagattaaaagccaggaagcacagcaaacgtcgagtgagaggcaccagtctgctgagtggcggtcgtgaatctgtacttgtagagtg

SEQ ID NO: 6428 - DNA, 75 bp, Homo sapiens
ggcagcgagcaagacagcaagcagagctccacgcaggagatcggtgaggagctgatcaacggagtcatctactcc

SEQ ID NO: 6429 - DNA, 74 bp, Homo sapiens
caacccccaaattggctgggacaggagaaggcacaatccctgtggaatccagtgacattgtgcctacgtgggat

SEQ ID NO: 6430 - DNA, 100 bp, Homo sapiens
cttcctgctggtgtggtattactgcaccctgaccattcgggagagcattctcatcagcaacggctcaaggttgggttaacggcatggagaacagtcaccc

SEQ ID NO: 6431 - DNA, 82 bp, Homo sapiens
attcttctgtacaggatgcagtttctcagctggattctgagctgatggacataactaaggatcagttccatgacaagacccc

SEQ ID NO: 6432 - DNA, 73 bp, Homo sapiens
ttggggccgtcttcctcatccttccttttctcggggctcccgtgggttgaggaacaggttagcaccactgaga

SEQ ID NO: 6433 - DNA, 103 bp, Homo sapiens
aagctgccttaagttctcttcattacacgccaacagagattttgagaaacacattgaaggatctgttaacacttgatatacccaataaaagcagtggttgtgc

SEQ ID NO: 6434 - DNA, 75 bp, Homo sapiens
gggcggcgacggcgcagtgcgaagcgaaacaggatgtgatcttcgtggtggaaagctaaattttaaaaccacccc

SEQ ID NO: 6435 - DNA, 100 bp, Homo sapiens
ggagcttcaggttgtccgagcatctgggaaaccagtgtgcttttcttggagaaagaagaaaagaagaaagaaggaagaagaagaagaaagaaaggaggaa

SEQ ID NO: 6436 - DNA, 82 bp, Homo sapiens
agccgatccagcctgcggagcctgtggggcaggcgtgcaatggaattgagttttgccctggtaaatgggaataatatccgag

SEQ ID NO: 6437 - DNA, 100 bp, Homo sapiens
aggcggaaggcggtggctccgagatagacaaagatcattccactcagcctgggacgatggggaggaaaaaaatccagatctcccgcatcctggaccaaag

SEQ ID NO: 6438 - DNA, 75 bp, Homo sapiens
aagaagttgaaaaacgcttttcacgtcacctggagagatgcacagattgattctctaaaagatgcctttgcaagc

SEQ ID NO: 6439 - DNA, 82 bp, Homo sapiens
atgccggcctattttcagaggccggaaaatgccctcaaacgcgccaacggattttttatcaagcagaaatgcatcgaacaac

SEQ ID NO: 6440 - DNA, 74 bp, Homo sapiens
gattgaactcagctatgcaaagcaactcagtatcatccaaaaggtgctaggatagatgtttctatcaatgagtg

SEQ ID NO: 6441 - DNA, 97 bp, Homo sapiens
caagaattcaaggccagaggctaatgaagtgatcagggccaaagcggtcagtgagaaggaagtggactctggaaacgacatttatggcaaccctatc

SEQ ID NO: 6442 - DNA, 100 bp, Homo sapiens
acaccaacttcctctcgaatatcaagaaatgcagtaaccagcatgtcaataaggggtcataggtggaaaagacatgcggacaaggcaaaatctcagcaag

SEQ ID NO: 6443 - DNA, 90 bp, Homo sapiens
tatgctgtggaaaagaaagcatactgcgagccctgctacattgaattgacagaagaaggactgccttttctcatactctttcacatgaaa

SEQ ID NO: 6444 - DNA, 101 bp, Homo sapiens
tccagctgcctcaaatcgtcgtagtgggaacgcaggtgtgtgggaatgccctcatgaagcaataccaggttcagttctggaagatgctaattctcatcaaa

SEQ ID NO: 6445 - DNA, 100 bp, Homo sapiens
agactttgcccttctccaggaagagcactcaggagaccaggaaaatggccacagggctcctgagagccaaaaaagagcatcagcagcaggtgctccaggc

SEQ ID NO: 6446 - DNA, 73 bp, Homo sapiens
ctgtatgatgcctccagccaccaggtcagtttaggggctggtgcaaaggatgagttgcacattgttgaagcag

SEQ ID NO: 6447 - DNA, 87 bp, Homo sapiens
gcagcgcccgcggagacgtgaagaggcactgccgccctgcactgtagcagatgcctaaataaagtgtggagcctgaagcagaagttt

SEQ ID NO: 6448 - DNA, 82 bp, Homo sapiens
ccctgtcttgggaaaaggagaactcctgactgattagcattcacaccagttttcggctttgtgagaaaccttaccatcaaac

SEQ ID NO: 6449 - DNA, 75 bp, Homo sapiens
gcggaaccggacccagtccctgagccgcccctacacccacaggtgagcgagtgctgtgctttcatgggcctcttc

SEQ ID NO: 6450 - DNA, 76 bp, Homo sapiens
ttaaaaagcagtctaaacctgtgaccacccctgaagaaattgcacagggtctgtttcacccagcccggaaagtcag

SEQ ID NO: 6451 - DNA, 100 bp, Homo sapiens
ctctcagaaaatgacaatgttgtagttacaggttggggaacactttatatgaatggtctctgtgtagaaaaaagagcattctacagacttatatctggcc

SEQ ID NO: 6452 - DNA, 100 bp, Homo sapiens
aggagccagacttcctgtgttaactccttcctctgccactttttaccttggggacctcagggaggagctttatctttatatactgcccttaccacacagc

SEQ ID NO: 6453 - DNA, 73 bp, Homo sapiens
taagggctgggagaactcaggaagcctggaaggcggagcgtgaagtaaaagcattggcaaaacttgatcatgt

SEQ ID NO: 6454 - DNA, 100 bp, Homo sapiens
gtggacgtcaataatgaaagctcttcagagctgttcctcctcccactgacctgcgattcaccaacattggtccagacaccatgcgtgtcacctgggctcc

SEQ ID NO: 6455 - DNA, 100 bp, Homo sapiens
ggagatcctagtatggaggaacatctgtctgtcatgtatgagagactgagacaagaggttcagtggtcacctcacaatgagactattttagcttccagtg

SEQ ID NO: 6456 - DNA, 100 bp, Homo sapiens
gtcgcacctgcggacgcacacaggccctgtttgtgctcttcgtcctggcctacatccacatcgtcttctcccgctcgcccatcaactgcctggagcatgt

SEQ ID NO: 6457 - DNA, 76 bp, Homo sapiens
gccggagaagcgagtttcagctggtgacctaccagttgaagattccgtgtactgctttatgcactgttttaatgtt

SEQ ID NO: 6458 - DNA, 83 bp, Homo sapiens
acagtcgggggtgtaggttatggggataacggcaaaagcttctatcatttttgttactcttcagtacaatgtcaccctcccag

SEQ ID NO: 6459 - DNA, 100 bp, Homo sapiens
tctgcatgaacatctccagccaggcccagtgtgccatcataatgtttgatgtaacatcgagagttacttacaagaatgtgcctaactggcatagagatct

SEQ ID NO: 6460 - DNA, 82 bp, Homo sapiens
tcggcggctgaggaaagcaggaggaggtggcggcggcgggaagatctgccgcagcgggaaccgcaagagcttggtggtagga

SEQ ID NO: 6461 - DNA, 75 bp, Homo sapiens
ccattttgctcagcgactgtttgatgacgtcccgcaggccaacgcagacccgtcagtgataaactgtctgcataa

SEQ ID NO: 6462 - DNA, 75 bp, Homo sapiens
cgacagaggatgccgaaccactccaatgtaggtgcaaaaaactacagacatctctgtgctgtttattacaacaag

SEQ ID NO: 6463 - DNA, 51 bp, Homo sapiens
accgtttattaaaagagctgtggctgaatgtcgttgtctgctgggtcttcc

SEQ ID NO: 6464 - DNA, 90 bp, Homo sapiens
attatctgtggctgctcttgcctgggagtcatggctctggtgtttgccatcaagccaagagtcgaagctaaaccagaagttcaatctcag

SEQ ID NO: 6465 - DNA, 74 bp, Homo sapiens
gtgacttcccggacgctgggaaatggggccaactcaccctatgcagcacagcccaccagctacgactatgatgc

SEQ ID NO: 6466 - DNA, 90 bp, Homo sapiens
tgtcttcaaaagcagcttggaaaacattatttctaaagatcaactttacttagatttcctgttccccatcgatatttccttggtcaagag

SEQ ID NO: 6467 - DNA, 112 bp, Homo sapiens
gaattctgtcacccgttgtgccagtgccccaagtgtgccccagctcagaaggtgatgaaaagactcttcctcctgctccagttctcatgttactttcaacagatggtgtgct

SEQ ID NO: 6468 - DNA, 50 bp, Homo sapiens
gttagaaacagtagtggagaatcaagggtgatgaattagaagacaatgga

SEQ ID NO: 6469 - DNA, 100 bp, Homo sapiens
ccgaggactccagcacaccgaggaccaaggaagtgcagaaagccatggatgacaagaggtttgacgaggccacccagctccgtggtgggtaagccccctc

SEQ ID NO: 6470 - DNA, 75 bp, Homo sapiens
ggtttatcaatggagaggaagaaactcttccagcattacatatagagcttgatgtgcttatgaggtgatcaaact

SEQ ID NO: 6471 - DNA, 100 bp, Homo sapiens
aaagaccgaccattcttccctgggctggtgaagtacatgaactcagggccggttgtggccatgttaattggccttggtcctcacagctccaaaaagaaac

SEQ ID NO: 6472 - DNA, 98 bp, Homo sapiens
ttattggtccacttgatatgaaacaattaagtgggcagaccaacatccacctcagcaaaaacttcttcctgacgaatcgcgccagggagcgctcagac

SEQ ID NO: 6473 - DNA, 132 bp, Homo sapiens
ttgagatgaaaagcattggttctccagttaaggttggaaagatggatgctacttcctattctacactgctcagcacgcaggcatgtgaggaagctgggcttaaaggagactccagcaaatggagagacagac

SEQ ID NO: 6474 - DNA, 82 bp, Homo sapiens
cgtggcggcggggaccgtccagcccagcgattctcagtcaggagggaaaacccctgatcctaaaatgaatgctaggacttac

SEQ ID NO: 6475 - DNA, 90 bp, Homo sapiens
ctcatgcgggcagaaagtatctctagtctttatgggaaacctcagcttgatgatgtatctcagctgtatttaaacttgaaacagatagaa

SEQ ID NO: 6476 - DNA, 75 bp, Homo sapiens
gctgcgttcacggcaggattcggttagaagaagccattgaagatgttgaaggacccagtgaaacagctgctgatc

SEQ ID NO: 6477 - DNA, 100 bp, Homo sapiens
cccagacctgcagggttcgtggataataaactcaagcagcgagtcatccagactatagggtatgaccccatcatttccccagaggtctcggcctcctttg

SEQ ID NO: 6478 - DNA, 129 bp, Homo sapiens
ccgaccacggggtctgtggagtggctggaggaggatgaacactatgattaccaccaggagattgcaagttgactaagataacacgcacaggtccttcagcttgggaaaccaaaaagattcttgctgttt

SEQ ID NO: 6479 - DNA, 90 bp, Homo sapiens
gcgcagtcatgagtcgcttcaagtttatcgacagcaactctggaaagtggcttctaactcggcgcattttcttagtggatgcagtaagtg

SEQ ID NO: 6480 - DNA, 75 bp, Homo sapiens
agcatccccaccatcaacatggagaacaagaccacgtgggaagttttattcagtgtatgggtctggtcaaagagc

SEQ ID NO: 6481 - DNA, 102 bp, Homo sapiens
cttggggccatagattccagtatcgtcagttgtagagatgacaaaggcagggatgatccaccaacacattctcagccagacagtgatgatgaagcagaagaa

SEQ ID NO: 6482 - DNA, 50 bp, Homo sapiens
tgttgatcctctcacaagattctgtcatgactctcacagaaggaggaaga

SEQ ID NO: 6483 - DNA, 75 bp, Homo sapiens
ccggggatcagcggctgtccttccacctgcacgtggcaggtgtccctggccagtgtccttccacctgtccacaag

SEQ ID NO: 6484 - DNA, 98 bp, Homo sapiens
gcacctacttcagcgcttccttcagccatagcatggacttcttcctgctcaagtgcgaagaaaacatgtctcaacttagcgaggaagaacagaataaa

SEQ ID NO: 6485 - DNA, 82 bp, Homo sapiens
agaattctctacatttgtgaaagtcagtttctgaggaatttcatcagatgatatcatcaagttgaatcgaaaggaagggaag

SEQ ID NO: 6486 - DNA, 100 bp, Homo sapiens
gtgtgattagcttcgcagtctggaaagctttaggagttcacagtgggcggccacactggcggaagaggaatattgaaggcaaacagtacctcagcaacat

SEQ ID NO: 6487 - DNA, 100 bp, Homo sapiens
cacctatttctacgtgacagactattagtccgccatggagagggaccgctacatgagccccatggaggcccaggagtttggcatcttagacaaggttctg

SEQ ID NO: 6488 - DNA, 83 bp, Homo sapiens
ccgagctttgcgggaaagcagcgagaacctgtggagtacgtacgcgcacgcgggggcgtttgtggagaagaaaggtgtgccct

SEQ ID NO: 6489 - DNA, 51 bp, Homo sapiens
aagaattcgaagggagttggtaaacgctgatagggccagatttgagtgtgt

SEQ ID NO: 6490 - DNA, 87 bp, Homo sapiens
ggattccagatttgtattcgatagaccactgcctgtgtctcgtcttgtatctctaattggaagcatatgggattcctttctacctac

SEQ ID NO: 6491 - DNA, 51 bp, Homo sapiens
gaggttacattgcacaatatttgaataagaaaatgatgcatcctgttgcca

SEQ ID NO: 6492 - DNA, 98 bp, Homo sapiens
cgggagaagctggcctgggccaagaccatgctcgacagctgaccaaggccatgatgcgaaaggccacggccagccgcctggtcacgcagcgcgatgcg

SEQ ID NO: 6493 - DNA, 75 bp, Homo sapiens
agcctcactgctcccagcagcacctcaggtggaaaaggattattcatacctgaaggagatatgtgatcaccaagc

SEQ ID NO: 6494 - DNA, 100 bp, Homo sapiens
aaggaaagcacttaaaagtggaaagatgacggatgaaaagaatgaacactgtccttcaaaacgatccctggctatcttcttcagtgactgctccatccat

SEQ ID NO: 6495 - DNA, 73 bp, Homo sapiens
gaagttcttcgatgtatctaaacttggcaccaagtatgggagttctgggaaatcgttcattcatttacagatg

SEQ ID NO: 6496 - DNA, 75 bp, Homo sapiens
aggagggtcacttcccgtgaaaaggtatacagaccagggcggcgaggaggaggaggactatgaaagtgaggagca

SEQ ID NO: 6497 - DNA, 75 bp, Homo sapiens
cgactccctgcagcatcaaaccatcagaatcggcaaggttggaaaccagaagcgtgttgttggtgtgcttttggg

SEQ ID NO: 6498 - DNA, 100 bp, Homo sapiens
tgacagagtggagccatggctagagtggtagtcgctcttctaaaacttttaaaccaaagaagaacattccagagggttctcaccagtatgagctcttaaa

SEQ ID NO: 6499 - DNA, 75 bp, Homo sapiens
tctgccagaatcagaaagaattcatcacactgtctctggatggacaaggaaaaagaggaaagcatgaaagaaacc

SEQ ID NO: 6500 - DNA, 96 bp, Homo sapiens
aaagaaaaagacaaatacaagtgaaaaaaatagactaatggattaacgtccctgtcgtgtgacattttctggtctagatgttgatggaatatatcg

SEQ ID NO: 6501 - DNA, 82 bp, Homo sapiens
gtgtcggagatccgctcgcgcgccgaaggtagctacagcaagctgggtagcaggcagatccaaaggatatcatgaagtttcc

SEQ ID NO: 6502 - DNA, 97 bp, Homo sapiens
gtgcattgcagttgcgtgttgttcagaaagcctaaaatgaccaatgtgtgatttcagtggaataaatggcgtccaaagtcacagatgctatagtctg

SEQ ID NO: 6503 - DNA, 83 bp, Homo sapiens
caagagcctctggtgtccggggtgctttcggagcccgaagttttgctcccgggcgtgatggtgggcatgggtcagaaggattc

SEQ ID NO: 6504 - DNA, 83 bp, Homo sapiens
cgttgctgcgggggattgtgggagtctccgcgtcccgctcgctgggagagaggttaaacccatccagagtaatggctgcggcc

SEQ ID NO: 6505 - DNA, 73 bp, Homo sapiens
tctcctaggtgccggccgggagggcggccgcagcaggtgctggagaatctggtaaaagcaccattgtgaagca

SEQ ID NO: 6506 - DNA, 100 bp, Homo sapiens
gccggtgggtgagcggcggccacggcatcctgtgctgtgggggctacgaggaaagaatattgaaggatgtttgttccaagatctctaaaaatcaagagga

SEQ ID NO: 6507 - DNA, 75 bp, Homo sapiens
cgacaccgagggggaggacattttcaccggcgccgcggtggtcgtttttcgttggaatatacgttgcacatttat

SEQ ID NO: 6508 - DNA, 83 bp, Homo sapiens
tgtatggacaggcttgtccatctgtaacttcattaagggacacagcgggtcaggaaagattccgaacaatcacgacagcgtac

SEQ ID NO: 6509 - DNA, 82 bp, Homo sapiens
caggcagctaataaagatgtcaacggtcaggagtccactcctggaattgttccagatgttcagaaataccacactattaatg

SEQ ID NO: 6510 - DNA, 76 bp, Homo sapiens
caactttatggataccattctcctactaatagtgctggactctgtgaagctgagcaggagcagatgcggaagatcc

SEQ ID NO: 6511 - DNA, 100 bp, Homo sapiens
ggggtgaggtgagcaggcccggggagggtggttaccgctgaggagctgcagtctctgtcaaggtgttggagcgggccggagagaagtagagtgggctgcg

SEQ ID NO: 6512 - DNA, 75 bp, Homo sapiens
ggaggatgagcctgcagagcgcgcagtacctccgctgtgatgcagatccatccgccctagcaaaatatgttctgg

SEQ ID NO: 6513 - DNA, 82 bp, Homo sapiens
gaggaagcagaaagtgaaggaggcaagattaccttatgctggctactttggatgagaatgaggaagtgatagatggaggcaa

SEQ ID NO: 6514 - DNA, 100 bp, Homo sapiens
cctgccggaaggctccctcggtcgcgagtatctccgtttcctggatgtgaacgccaaggcgaacctagacaagaataagcagacgctggagaaagagaac

SEQ ID NO: 6515 - DNA, 100 bp, Homo sapiens
agcagccagcagaggtcagagagagacagctcacgttccgggaaaagaatacttgagatccatttgtaaggaaagaaaaggaagcaacaacataatgccc

SEQ ID NO: 6516 - DNA, 75 bp, Homo sapiens
tctcagacggcagctattactacaaaggacaacgtctgacatgagccgagtgttctgctcacactgtgggaacaa

SEQ ID NO: 6517 - DNA, 100 bp, Homo sapiens
ccggggacccttccgtatctgcctaggcattttgctgtctcctcctaatacgttttacatgtggcacccataaaagatgaggctgagaacacggaaagct

SEQ ID NO: 6518 - DNA, 100 bp, Homo sapiens
ggacccgaaaccatgcctcactgtcctaggcaaggtatgcccaagaggacagagaacgaatgcacagaaatattgtcagccttgcacagaatctcctgaa

SEQ ID NO: 6519 - DNA, 120 bp, Homo sapiens
attttacctcagccaccgagaaggctacggcaccatgtacatgaagacacggcttttccaggtgagcacctgcggatctgtccccagggctacacctgctgcaccagcgagatggaggag

SEQ ID NO: 6520 - DNA, 96 bp, Homo sapiens
ccctggaaacttgctaaagagctgtggtgtcaaggagcagaagcttttgaaatccagcattctggattggcaaatggaatctttatgaaattttta

SEQ ID NO: 6521 - DNA, 83 bp, Homo sapiens
cgcaaacccaaagatccccgttcctggagattctgattgaggttcgatacaagaggctgttttcctagcgtggcttgctgcct

SEQ ID NO: 6522 - DNA, 100 bp, Homo sapiens
gtataagcgagggaagtcgtgcacgaacaccaagccaggcggcactccagggtccggcccaaggtgactgtcctgaactatgcctccccgataaccgcag

SEQ ID NO: 6523 - DNA, 99 bp, Homo sapiens
agattcgcagtggtcgcttcttctccttggtcttcgccttgatcgtgttctcctgcatctatggtgagggctacagcaatgcccacgagtctaagcaga

SEQ ID NO: 6524 - DNA, 83 bp, Homo sapiens
gtccaaacccccatcctcctgcatgttctctggcagctgaaaaagttggatgaagatagtttaaccaaacaaccagaagaagt

SEQ ID NO: 6525 - DNA, 50 bp, Homo sapiens
agacagaatccttacgtgccctgcctcctgacaaggtgatccgggcgggc

SEQ ID NO: 6526 - DNA, 51 bp, Homo sapiens
ggagcataggaggaaaattcatcatctgtgtttcctgaggttataggcggg

SEQ ID NO: 6527 - DNA, 88 bp, Homo sapiens
cgtgtctggccacgtgaagacccagctgatcgcccatgacaaagagagagctcagaagaggaagacgcaccatccttcgcaccttcca

SEQ ID NO: 6528 - DNA, 101 bp, Homo sapiens
acagacttcggagtacctgcgctatgaagacacgcttcttctggaagaccagccaacaggagtgggctttgccaccaggaaagtggctggcatggccaaac

SEQ ID NO: 6529 - DNA, 100 bp, Homo sapiens
tcagagttctctaaaaaaactggctgtgaataatatagctggtattgaagaggcgttcggatgggcagcctggggctgttcctgcagtgcgccatctccc

SEQ ID NO: 6530 - DNA, 101 bp, Homo sapiens
ggactcttctaaaaggatatgtgttgctaatacccatctttactggcatcctaaaggagtgcccgtgcgcagcggagatgccaccttccccaaagctatgg

SEQ ID NO: 6531 - DNA, 90 bp, Homo sapiens
aatgctgcgtatagtggaaccttatgtgacctggggcatccaggatattgcagtcctcttcaacatcatcatcattttcctcatgttctt

SEQ ID NO: 6532 - DNA, 75 bp, Homo sapiens
gtcgtgcgcctgggggtgcgcgcctgcgacctgcccgcctgggaaatacaactggagcacgcaaagcaagccttt

SEQ ID NO: 6533 - DNA, 100 bp, Homo sapiens
ttgggacccgctccaaccctcgccttatgtttgatcatcggccaaggtcctggcgagaactgcctctgcggctagctgattttggggtacttcataggaa

SEQ ID NO: 6534 - DNA, 49 bp, Homo sapiens
catccgctacatacaccagtgggaggagtcctgcacttcttcctcgata

SEQ ID NO: 6535 - DNA, 89 bp, Homo sapiens
tgcaaatggacaaagtacttgatatgagggaagttgctgactcatatgcacagaatgccaaagtgattgaaaaacagctggagcgcaaa

SEQ ID NO: 6536 - DNA, 100 bp, Homo sapiens
caatttggagaaaatctatcgtgaggttcagctgatgaagcttctgaaccatccacacatcataaagctttaccaggaggatcagctgatttattcggag

SEQ ID NO: 6537 - DNA, 100 bp, Homo sapiens
aataatttcaatttgaaaacaagtggaatagtgctgtcttccttgtgccaaccgaaccatcactcgtgtacgaagcagtgtgcaacaggcagaaccggcc

SEQ ID NO: 6538 - DNA, 82 bp, Homo sapiens
cgcagcaccgagtccgaggtctacgacgacggcaccaacaccttcttctggtgtcgtgaaaactacccctaaaagccaaaat

SEQ ID NO: 6539 - DNA, 75 bp, Homo sapiens
ggcacgatgttgaacatgtggaaggtgcgcgagctggtggacaaagccctctcaacattgcctacagccacatct

SEQ ID NO: 6540 - DNA, 80 bp, Homo sapiens
ctttggatcttgtggaaagtcagaaatgaggacctaatttgcttcaaagatatcaaaccagcagcaactcatcattatct

SEQ ID NO: 6541 - DNA, 50 bp, Homo sapiens
taaccctcactggagaatccagagggaagtgctcagcggctgcactggac

SEQ ID NO: 6542 - DNA, 82 bp, Homo sapiens
ctacaccaggcagcccccaaatcccggcccagatggagcctcgctctgtcgccaagactggagttcagcggcacgatctcgg

SEQ ID NO: 6543 - DNA, 100 bp, Homo sapiens
ccgattgcgttatttcttctactccagtggtgagaagcaacagccaactcagtttataaatccagaaacacctggctatgttggatttgcaaacctcccc

SEQ ID NO: 6544 - DNA, 87 bp, Homo sapiens
agtcaagagacagcgattggacagaatttgtgaaggttcttgtcacaatctatgctgattatattgcccctttatttgacaaattca

SEQ ID NO: 6545 - DNA, 75 bp, Homo sapiens
gtttcttcatttgtttctttggacacagattctggaaaacagatgactgtccaagtgcctccaaagtgtacaaag

SEQ ID NO: 6546 - DNA, 83 bp, Homo sapiens
ggtccacaagaccttcaagtttgtcgtcgtcggggtcctgctgcaggtcagcccaaggccaaccccactgtcactctgttccc

SEQ ID NO: 6547 - DNA, 75 bp, Homo sapiens
cgcagccgggaggccgaggactcggagttcacctgcaggagcgggacggtatgcgggccatcctggggtcctacg

SEQ ID NO: 6548 - DNA, 75 bp, Homo sapiens
ctgactcacaagatcactcacctgtccacactgcagggcgtgatggtgggcatgggtcagaaggattcctatgtg

SEQ ID NO: 6549 - DNA, 75 bp, Homo sapiens
ctgtttatgaaaggaactcctcaagaaccacgctgtggctttcatgagaaggacaagaagccatattgccgaaag

SEQ ID NO: 6550 - DNA, 85 bp, Homo sapiens
aggagtgccagctggcaagcggtcctgcagacacagaattagacctttacgagaagcacagttttgtcttcagtttcctctcccc

SEQ ID NO: 6551 - DNA, 75 bp, Homo sapiens
tattggctgccgttaaggaccgttacgtttcccggagttcaagctgaagaagatgtggaaaagtcccaatggaac

SEQ ID NO: 6552 - DNA, 100 bp, Homo sapiens
tgggaggataattgggatgatgacaatgtagaggatgacttctctaatcagttacgtgccggtggtggtgtgcacattgagccccggtatagacagttcc

SEQ ID NO: 6553 - DNA, 82 bp, Homo sapiens
agcaaatggcttagaaacatagatgaggtgagccagtggtacgagctggtggtgtttacagcaagcatggagatctatggct

SEQ ID NO: 6554 - DNA, 100 bp, Homo sapiens
tctgaatcgtgttcctgaatgaaagaagtcagggaccagttactctccacaagaaaattcacacaaccacagtgctcttcatagttcaaattcacattct

SEQ ID NO: 6555 - DNA, 100 bp, Homo sapiens
aaggaatccaccttcttacgctatggcagtggatcaatcttcctgtcctacaactgacaaaggatcccctaaagacccctggaaggctggaccatggcac

SEQ ID NO: 6556 - DNA, 87 bp, Homo sapiens
atgcggtcccagtggccctcggcgcggcagcgctccagctcgctctccaccttcagagttacatccatatgggagaatagtctccag

SEQ ID NO: 6557 - DNA, 98 bp, Homo sapiens
gggggctatggcgccagtaagaagaaaaaagcgtccgcttccagctttgcgcagaacatctgctcaaattaatgaccatgggggatatgaagacccca

SEQ ID NO: 6558 - DNA, 101 bp, Homo sapiens
aaggtggaccaacaatttcagaggcgcagttgtgtagcagttgagtaatgctggttagctgttaaggtggcgtgttgcagtgcagagtgcttggctgtttc

SEQ ID NO: 6559 - DNA, 97 bp, Homo sapiens
catggttggctctttctacatccctgggggctatttcagctcagaataatccagaatggctactctgatctatgttgataaggaaaatggagaacca

SEQ ID NO: 6560 - DNA, 75 bp, Homo sapiens
ttctggacacagaagtatttgtgacagactgttggcaagagtagcaagatgctgcagcacattgactatagaatg

SEQ ID NO: 6561 - DNA, 100 bp, Homo sapiens
agatgcagctcacatcagcaaaatggctttctgtctctggtcgtgatgagaacagtgtggagttaaccatggctgagggaccctacaagatcatcttgac

SEQ ID NO: 6562 - DNA, 100 bp, Homo sapiens
atacactgctcccaatgtgagaatagtggccatcctttgtgaagctggaacactggctggagaccctccgcatgcacctggccggccacctgccactggg

SEQ ID NO: 6563 - DNA, 75 bp, Homo sapiens
agagcagagcggagggagccccagacacggtgctggagaatctggtaaaagcaccattgtgaagcagatgaggat

SEQ ID NO: 6564 - DNA, 51 bp, Homo sapiens
atactgcacctccggaagagggccttccagctcgaaaatggcagcaattgc

SEQ ID NO: 6565 - DNA, 100 bp, Homo sapiens
tttattgtggtggagtccaccccgctgtgtgaaggagaacgacctgctcagaatgagaagaggaaggagaaaaacataaaaagaggaggcaatcgctttg

SEQ ID NO: 6566 - DNA, 100 bp, Homo sapiens
cagactgagaaaatcacattttcagtgacgtttgttgatggcaacaaccctttccaagcagttcaagaagtggtctggaactgaaagtgatgcgtatttc

SEQ ID NO: 6567 - DNA, 102 bp, Homo sapiens
atgaagttcaatgcactggaactggatgacagtgatatctccctttttgtggctgctatcatttgctgtggagaaggagatccggttggcagctaaaccgcg

SEQ ID NO: 6568 - DNA, 80 bp, Homo sapiens
aaggtcgccctcaaggccatgatcaaaacgatctcgaggacctggaagaagcagaggagccagacatggaggaagacgat

SEQ ID NO: 6569 - DNA, 101 bp, Homo sapiens
gctgtccacttcagagctaggagagatggaactgacttggcaggagatcatgtccatcaccgagctgcaggagatcctgctgggccgtggcttcacctttt

SEQ ID NO: 6570 - DNA, 74 bp, Homo sapiens
cagggcctggcactggccaaggagattgtccacaggtcctggctaccctgggaagagacaagaagtaaatgaag

SEQ ID NO: 6571 - DNA, 51 bp, Homo sapiens
caatattaaaactttacctgggatgaacgactttcgaagtaaaatgcaatc

SEQ ID NO: 6572 - DNA, 97 bp, Homo sapiens
tttatggtggaagtgacagcagatttgctggatacgtgacatcaattgctgcaactgaacttgaagatacttcattagaggggtggtagactcggag

SEQ ID NO: 6573 - DNA, 73 bp, Homo sapiens
ttgcagctgcttagacgctggatttttttcgggtagtggaaaaccagggatggtaggatgctctttgactacc

SEQ ID NO: 6574 - DNA, 82 bp, Homo sapiens
aagcagatgctccagtttgagaaacctggatctgcgatctgtttgtggaaattccattcttcttctgacagccagacggtta

SEQ ID NO: 6575 - DNA, 101 bp, Homo sapiens
ctgtctccttgaaggttctccctgttggttctgattaggagccggcatcatggattccttcaaagtagtgctggaggggccagcaccttggggcttccggc

SEQ ID NO: 6576 - DNA, 74 bp, Homo sapiens
gtgatgttggagaactacagaaacctcgtctccctggggaccaagacaaagcatgggacatgaaattaagagtg

SEQ ID NO: 6577 - DNA, 75 bp, Homo sapiens
gcaagaacgggaacaaaactctggcaatccagcatccagcagatgagaagttgcaagagaaggcatggggtgcag

SEQ ID NO: 6578 - DNA, 95 bp, Homo sapiens
ggcttcctcggtggcgggcatggaggcttcgcgctgccggctcagtcccagcggcgacaggccatttcataattctgaatcatgtctgataacgg

SEQ ID NO: 6579 - DNA, 100 bp, Homo sapiens
agctccctaatgatgatgctcagtttgatgcgtcacactacgacagtgagaaaggagaatcctcactatggatgggctcattgaggacattaagcatcgg

SEQ ID NO: 6580 - DNA, 95 bp, Homo sapiens
gagctgtggggatctggcactgtggttcctgcatgaagacagtggctggcggtgcctggacgtacaactcgccctcccctacctgcggaagagtc

SEQ ID NO: 6581 - DNA, 100 bp, Homo sapiens
ccgtggccttcgcgtctgcccggccaagaggcaaaggggaggttacgcagcaaaccatccagaaggaggtgcttcccaaggaccgtagatgcctctctag

SEQ ID NO: 6582 - DNA, 83 bp, Homo sapiens
caggaatccaggtgcacccaattcaaggcctgccgttggctatagcaaatgccccaggtgaaatgacaatggatgctctgttg

SEQ ID NO: 6583 - DNA, 90 bp, Homo sapiens
gtagcatccgttggatatccacaccatccttctcgctgcaggattcttggtgccaccattgagaactccaggattgtcctgcagatcgac

SEQ ID NO: 6584 - DNA, 100 bp, Homo sapiens
ggaagagggaagccttgagaatgccgacagcacagccatgaggaactgcctgagcaagatcaaggccatcggcgaggccatctggctgctgtgcacaggc

SEQ ID NO: 6585 - DNA, 82 bp, Homo sapiens
cagcgggagctggacggcgagcgcgagcggcgcgagaaagttgtgcagcctgactctgaagaagctggtggtcttcaaggag

SEQ ID NO: 6586 - DNA, 90 bp, Homo sapiens
acagggctccccgcgccccgcgcagctgagcgctgccgccgccgcagcaggataaaagaatcagagtgtctcaacccttgacaagaggac

SEQ ID NO: 6587 - DNA, 83 bp, Homo sapiens
caccccgaagctgttacacttaattaaccctcaaactgcccagtgagtttcatgatcaacatgggagactcccacgtggacac

SEQ ID NO: 6588 - DNA, 79 bp, Homo sapiens
ctcctctgggagctcatcaggactatgggggattgggcagaggtatcctgaaggacacagccctgcagaaagtgaagcg

SEQ ID NO: 6589 - DNA, 100 bp, Homo sapiens
aaaagtacagcagagctggaggctgaggagctcgagaaattgcaacatcccacagtgttttgttcgccccacggaggccaagaaagccgcagatgaggcc

SEQ ID NO: 6590 - DNA, 100 bp, Homo sapiens
gcaatgataatacctcagtgttcacataacttttctgatgaagaattgaaaagaagagtagctgaggagctggcattggagcaagccaagaaagaatccg

SEQ ID NO: 6591 - DNA, 100 bp, Homo sapiens
ttgttacttttatggaaggaaaaggctcaggcagctgtccaaggacctgttggtacagatttcaaacccttaaatagtacccctgcaacaactacagaac

SEQ ID NO: 6592 - DNA, 50 bp, Homo sapiens
gatgaatcccagtccctgttacgggtgtggcttacattctaaagcttttg

SEQ ID NO: 6593 - DNA, 76 bp, Homo sapiens
ggaaacctatggttatctgcagagggagtcatgctttcaaggacctcatatatctcccggggccaattcagcatct

SEQ ID NO: 6594 - DNA, 74 bp, Homo sapiens
gtgattccagtgactggggatagtgaaggtgctacggtgcaggacaggtacagcacaggcagcgacagtgcgag

SEQ ID NO: 6595 - DNA, 100 bp, Homo sapiens
atactgcataaatggaagcagggtaccgcacaaaattgcttacccagtacatattaaatctcggcaagtatgatcaaaactacgacatcagagaccgtac

SEQ ID NO: 6596 - DNA, 74 bp, Homo sapiens
acgtccacatgtgggtactgcattcctaccggtgtgacagctgacctcgtgcgtccacgcgtcctgcgcgctcc

SEQ ID NO: 6597 - DNA, 96 bp, Homo sapiens
gccccaccaccgccctcaccatggaattgaagccattttttatgaaggaagttggcagtcactttgatgattttgtgaccaatctcattgaaaagt

SEQ ID NO: 6598 - DNA, 100 bp, Homo sapiens
aatgacagccttcatttctctgaacatactgccttatgggacagatcaattcaactagagagaaattgagaagaagcatccactgaagtatcacatggct

SEQ ID NO: 6599 - DNA, 135 bp, Homo sapiens
gggtaatggtgtgaaggaaggcccggtgcgattgcatgaggatgctgaggctgtcctgtcctcgtccgtctcatcaaagctcaggagcatctatcggctgcacgccaacatcaacacaggcgaagatggtctcca

SEQ ID NO: 6600 - DNA, 96 bp, Homo sapiens
gcgagacgcgcagcgccggcgcccgggagacccaggaggagcccgcagcatggacaaggacagcccggaggtccaccaggacctgaacgccctcaa

SEQ ID NO: 6601 - DNA, 95 bp, Homo sapiens
tgaaagctagaggcattgaggagcctgaagattctcagtatgctcaggcttcagaagaggctcgcctctagtgtcctccgctgtggcaagaagaa

SEQ ID NO: 6602 - DNA, 100 bp, Homo sapiens
cgggaacggtgatcggggaagcatggggatccgggagaagcacccacaaaactagcatcctcctggaggagctcgggttcaagcactgtcttcctgttgg

SEQ ID NO: 6603 - DNA, 88 bp, Homo sapiens
tgcggaccgcggcggaggacgcgcccggcgcccctgagccggccgagcggcgacggaccgcgaggaatgctgtctctgcaatttgaga

SEQ ID NO: 6604 - DNA, 75 bp, Homo sapiens
cggggctgcggagtcgtccggagccgctgcgcgtattcttgccatgagaaaaagaatgtgataagttattcaact

SEQ ID NO: 6605 - DNA, 82 bp, Homo sapiens
gactttaatttgtgatgtacattcaataacaagtgataaccacaaatggacccaggaggaattttgttgtcagagaataaaa

SEQ ID NO: 6606 - DNA, 76 bp, Homo sapiens
gggagaggggcgaaccggccccccacagccactgcagtttgcctgagaatacagatcaacccacagaacaaagcgg

SEQ ID NO: 6607 - DNA, 76 bp, Homo sapiens
ggcggatctggaggagcagttgtctgatgaagagaagggccgttgctccagggagaactgcaaatatcttcatcca

SEQ ID NO: 6608 - DNA, 100 bp, Homo sapiens
aaaaaagacctttagaagatggagggaactgtccaggtttattgctgccgggagactacactgcaaaatagataaagtgaatgaaatagtagaaaccaac

SEQ ID NO: 6609 - DNA, 75 bp, Homo sapiens
cattcctggcctatggcgagaaaggctatgatcgggcccgggacacccagacagatgagattgtcgcactgaaga

SEQ ID NO: 6610 - DNA, 75 bp, Homo sapiens
acagaaggactgggatgatacaccttttccacagggaattgagttggggccaccaaggacatggggaagatgctg

SEQ ID NO: 6611 - DNA, 98 bp, Homo sapiens
gatttctcttggatttggctacacacttatagatcttctgcactgtttacaggcacagaaactccccaacttttaaatcatttgaagaaaaggtcgaa

SEQ ID NO: 6612 - DNA, 88 bp, Homo sapiens
ggccagggaaccctggtcaccgtctcctcagcccaagaagatgaaaggattgttcttgttgacaacaaatgtaagtgtgcccggatta

SEQ ID NO: 6613 - DNA, 50 bp, Homo sapiens
tactcgctggccagacatacttaatgtagaagcgaggcctggaggtgaag

SEQ ID NO: 6614 - DNA, 100 bp, Homo sapiens
cacggatcggattcctcagctacgaggaggcgctgaggagaggaagaacctctctatccagggcctccgctggtggctacagtggctgggcatcaacttc

SEQ ID NO: 6615 - DNA, 75 bp, Homo sapiens
ccgcgccatgtggctgctggggccgctgtgcctgctgctgagcagcgccgcggttgtggaagctgatcgaggaag

SEQ ID NO: 6616 - DNA, 100 bp, Homo sapiens
cattactgtgacggctatcaaacagggcttcttccgtcgtacgatccgcatgaagctggagtacgagaagtgtgagcgcagctgcaagattcagaagaag

SEQ ID NO: 6617 - DNA, 75 bp, Homo sapiens
cgcctgctcgccccgaaccatgggaagatgagacagccaacaagtcccaaatttggaaaagctgactcatatgaa

SEQ ID NO: 6618 - DNA, 100 bp, Homo sapiens
tacgtgcgcttcctgtgggagtgacccgccgcccccgacccaggtgctgatgggaagggtgcctgacaggggaggccggccgaatgaaattgaaccacca

SEQ ID NO: 6619 - DNA, 74 bp, Homo sapiens
cgcgctgcagggaacagcggggcaaacagcctgcaggacaagctgaacaagagggacaaagaggtgacagcctt

SEQ ID NO: 6620 - DNA, 75 bp, Homo sapiens
gttccaggggctctgggagtggctgccagatatggtccggaaaaagaacccccctctgagaaacgttgcaagtga

SEQ ID NO: 6621 - DNA, 100 bp, Homo sapiens
ctcagatcagcaggaactggaatgtgttcaagtcttggcagagccaggttgttggaagaggagcctttggagttgtttgcaaagctaagtggagagcaaa

SEQ ID NO: 6622 - DNA, 121 bp, Homo sapiens
cgagagatggagatgggcagacggattcatttagagctgcggaacaggacgccctctgattgtgccggtccaacaaaagcccttgggtctgtttgacttgttcaagtgtccactgtggaag

SEQ ID NO: 6623 - DNA, 90 bp, Homo sapiens
gaatatttccctcgggaaactccgttagtattttggaattaagatctctcgtggaagaggaagaccaacacatgaaattgtcccttggag

SEQ ID NO: 6624 - DNA, 95 bp, Homo sapiens
tggagatagaaatttgagttttgatgaaaggtgtctgctttttcaacgtgggagaaggagttgcacaagatagtttttgatccccggtacttact

SEQ ID NO: 6625 - DNA, 89 bp, Homo sapiens
tttacatgcacttgaacagactagaaattgcaccacagatatatgggtttttataggcaagcaataaacagcaagatgtttgaggtgga

SEQ ID NO: 6626 - DNA, 50 bp, Homo sapiens
ccaggcccagccgggccctggacagatcttatgccttcattcatccggca

SEQ ID NO: 6627 - DNA, 100 bp, Homo sapiens
acgagatgctgatggggccttcacctgctgcaccaatgacaaggccacccaggtcaaaatgcagatcttcgtgaaaacccttaccggcaagaccatcacc

SEQ ID NO: 6628 - DNA, 90 bp, Homo sapiens
gtttactgtaataccagcaagaagtggttctgcaacggacgtggaaatacttctggcagaaaagcacttggttctgcttcgagatggaag

SEQ ID NO: 6629 - DNA, 100 bp, Homo sapiens
aagcaacaagattgcttgcaacaattgttatgcttggcagcaggatgggtgtggaagcagtgatggcacttttggaggggaccccagataccccagcctg

SEQ ID NO: 6630 - DNA, 83 bp, Homo sapiens
tgcggctctgcgcggtccccgccagcgccccatcctgagccgacaatgcagatcttcgtgaagactctgactggtaagaccat

SEQ ID NO: 6631 - DNA, 75 bp, Homo sapiens
gctaaatccaaatgctgattcagactttagacaaagggcctggttgcagtatgcttgaaatctgggatgtggaag

SEQ ID NO: 6632 - DNA, 75 bp, Homo sapiens
aaacagttctcatgatagctatacaactgcagacaatatgaaacaccctttgaaggcaacttaattaatcaagag

SEQ ID NO: 6633 - DNA, 114 bp, Homo sapiens
agaccatgttccgagcggcggctccggggcagctccggcgggcgcttagaccatgctcagcctccaagcagccttgtcatcgacaaagaatctgaagtttacaagatgcttcag

SEQ ID NO: 6634 - DNA, 74 bp, Homo sapiens
gccgccgaggccgcgtgtcccaaaggccaggtacctcatggcagggccaggttccagcagtgaggaggatgagg

SEQ ID NO: 6635 - DNA, 100 bp, Homo sapiens
gtccgactcgctacgcgggtcttgcgagatatctggccgcctctgccgcagctggagatggtacctgcggatgctgcaatgttaccggtgcaggcagtgg

SEQ ID NO: 6636 - DNA, 110 bp, Homo sapiens
cccagttataaaggagcactctgaatacacagaaacctttcaacgaagtctaaaaataggaagcttccagaaccaccagacaatgaggatgaagatgaagatgtcaaagc

SEQ ID NO: 6637 - DNA, 83 bp, Homo sapiens
cgccaaacacaccaactttgtggagcgaccagatggggaacaaagcctcctacatccacctccagggctctgacctacggcct

SEQ ID NO: 6638 - DNA, 75 bp, Homo sapiens
gcggagatggctgcgacgcgtgcgcaggcactcaaggagttgcccctggtcctgtaattggacttcaggcaccat

SEQ ID NO: 6639 - DNA, 75 bp, Homo sapiens
catctagcccagaggatcggaatgacagatataattctgaaataatcagcagaaacggaatggaatgccaagaat

SEQ ID NO: 6640 - DNA, 49 bp, Homo sapiens
ccgggccctcgagacggggacggttttgggatttgagattgacgcggtg

SEQ ID NO: 6641 - DNA, 90 bp, Homo sapiens
tcagaaacataactgccatagtgaagcaacttaatcgggatatcgagagtgatcagcagctggactgtgccttggacctaatgaggcgcc

SEQ ID NO: 6642 - DNA, 75 bp, Homo sapiens
tgctgtcccgggcctaccccctggactccctggagaagcagatggaaaagggtcccagtcctatgaggatatgag

SEQ ID NO: 6643 - DNA, 80 bp, Homo sapiens
ggcggaggctgaggagaaggaggagcgggccgtggaggcttcgccgcctagacagcccacctgaggatattgaccataag

SEQ ID NO: 6644 - DNA, 83 bp, Homo sapiens
ctgttcctcacggcctgtgagacaagagcatcttggatgtaggacaatggaagagttagatagcattacaactctgccagatc

SEQ ID NO: 6645 - DNA, 98 bp, Homo sapiens
atggagtcaccttttagcccgggactctttcacaggctggatgaagattgggttaatgtgttaagagccattgacatttgaagatcatcagaagtgaa

SEQ ID NO: 6646 - DNA, 100 bp, Homo sapiens
tatgctaatgaatttttgcggtcaaaacgattctgcactatgtcatgtgccaaaagggggcagtgcccaaaggaaatgccactaaagaattcatcgagag

SEQ ID NO: 6647 - DNA, 100 bp, Homo sapiens
atgtttcctactgacgacaggtgattacacgtgtgcttctgatggagggatcaggaaaggatttaagtgccctgtatgctcaaaatttgtatcctcagat

SEQ ID NO: 6648 - DNA, 50 bp, Homo sapiens
gagagcttcacagtgcagcggcgaggttatcaatactctggctgaccatc

SEQ ID NO: 6649 - DNA, 98 bp, Homo sapiens
ttatttctccagcagccatgaagatctatgccctcaacagagtcatgacagaactggagcagcagcagtttgatgagttctgtaaacagatgcagcct

SEQ ID NO: 6650 - DNA, 75 bp, Homo sapiens
ccggaacccagagactgcatcagagccactgtctgagtttaaagttcctgctgcaacaagtgcaattattaccaa

SEQ ID NO: 6651 - DNA, 100 bp, Homo sapiens
cagtttgaagatggagagaaaattgtggtccagggagagcctggggacgacttttacatcatcacggaggccaccagcccctcgggttccaagatgcagc

SEQ ID NO: 6652 - DNA, 51 bp, Homo sapiens
gtcagattctgaagaaccttgcagtaatgctacagccctttgactatgatc

SEQ ID NO: 6653 - DNA, 100 bp, Homo sapiens
ccaagagacatgttagaaggacaagtttcattgtttgcggaacttttcaacgaaatgcttcaaagagattttggtgtccgtatatacaaatcattactgt

SEQ ID NO: 6654 - DNA, 90 bp, Homo sapiens
cagcgggagaggagtctccaccaggactgaccgctgccgcccagcacgtccagaaggactccatgaaagatgacagaagaagttattgtg

SEQ ID NO: 6655 - DNA, 51 bp, Homo sapiens
gcatcggcgccttcccggcgggactgtgccctgtccacggtgcctcctgca

SEQ ID NO: 6656 - DNA, 100 bp, Homo sapiens
cttataaatgcgtggacagctgcagaaaatgacagatggccgtggattcaggcctccccatggccacccatggaccagtcggcattcacttcctcccttc

SEQ ID NO: 6657 - DNA, 100 bp, Homo sapiens
cagctcccaacctcagaagccgtggtgtctgctgtgagcgaggcgggggcgtctggaataacagaggcggagatctataaggacaggcagaaattctcag

SEQ ID NO: 6658 - DNA, 50 bp, Homo sapiens
ctgtgtgccccttctccacccagaggcagttgtgaaaaacttcaggacaa

SEQ ID NO: 6659 - DNA, 129 bp, Homo sapiens
gtgccatcttcggctaggtcgtcacaggctccggctcatggcatcaagtggcatccatcataagctggcgctacgtacatctttgggaaaagtggtgggcttatcctctacacctggccagccaatgac

SEQ ID NO: 6660 - DNA, 75 bp, Homo sapiens
agataatcgcagcaccaacctgctggccctggccaacgtcaacattgggagcctcatctgcaatgtaggggccgg

SEQ ID NO: 6661 - DNA, 83 bp, Homo sapiens
agaagaggcggtggaggacacgacgcgcttaaagggtaagtaaggaggtctctgtaccatggctcgtacaaagcagactgccc

SEQ ID NO: 6662 - DNA, 75 bp, Homo sapiens
ctacaaccttcgatctcctgacgactagccacagtgcagcctggccagaatttccacatgttcacaaaggaagaa

SEQ ID NO: 6663 - DNA, 80 bp, Homo sapiens
ctgggccattggtgaaatctgcatgcagatgggccatctgtcctggacagctttgccttgctttctggacagctgaacac

SEQ ID NO: 6664 - DNA, 87 bp, Homo sapiens
agatgcttagaataaaatgtcactgtaagatcacaagcctgtatgtggaatgtagggttttgactctgggaggagggctgccttatt

SEQ ID NO: 6665 - DNA, 100 bp, Homo sapiens
acaaatcagagagccagtagacttacagaaaaagaagaagcggaaacaacgttctcccgcaaaacctatcagcttatcactgtggtgatcgcagccgcgg

SEQ ID NO: 6666 - DNA, 82 bp, Homo sapiens
cacagcggcagctccagcccggcccggcagcgacatggaaggagatggcagcagaaaaggccaaagcagcagccggggaggc

SEQ ID NO: 6667 - DNA, 100 bp, Homo sapiens
cggattcctcagctacgaggaggcgctgaggagaggtatttaacatgaagtcgctccagattgtgttacctgcccgagcagaccccgaaagccccatcct

SEQ ID NO: 6668 - DNA, 100 bp, Homo sapiens
cagcctcgcttgatgaaatggctaaacaggcaacagttgtcctcaattgcgtaggaccaagaatgtgatcaatgggcaggactacgaagtgatgatgcag

SEQ ID NO: 6669 - DNA, 130 bp, Homo sapiens
cagtgaacatactcacaatgggctactggccaacatacacgcccatggaagtgcacttaaccccagaaagcccaggctaccagagcacctgtccctcggccgcctggtacagctcccactctcagcaggt

SEQ ID NO: 6670 - DNA, 100 bp, Homo sapiens
gaatgagcattgaactacaatcagtttctaatccagttcacagaaaggtgttggggatgtcctttgcactgaccctgaactgccagattgacaaaaccag

SEQ ID NO: 6671 - DNA, 100 bp, Homo sapiens
acactctccgcctgcttccctccgtgtcctgaaaagtgcgaccgttctcccaaggaatttccacgtattctaccttgtaaatactgttatttgtatatac

SEQ ID NO: 6672 - DNA, 75 bp, Homo sapiens
cttgctccgagagggagtcctcgcggacgtcagccaaggccatgtagggcaggaccgggtggactttggccagac

SEQ ID NO: 6673 - DNA, 100 bp, Homo sapiens
tctgtcccaagaagaactctgaagatgattcagccttctgcatctggatctcttgttggaagagaaaatgaggaagctgcagtaaaggaagatgaagaag

SEQ ID NO: 6674 - DNA, 111 bp, Homo sapiens
cgcttatcagcattatctagtcctttccaccccgaaattcgccccgattaaagactgtgttgcattatcaggtctctaattaacagaagatggcaaagcccagccacagca

SEQ ID NO: 6675 - DNA, 98 bp, Homo sapiens
cggggacttcggcggcggcgcctcaggcacctcggcccggtttggaccccaatgaccagaagtctctagaggggatgcagaagatggagaaggaggag

SEQ ID NO: 6676 - DNA, 88 bp, Homo sapiens
cgtctggagcagctgaaggccgtaacttcaacatctccgctgatgagcctataactgtgacacctcctgactcacaatcatatatctc

SEQ ID NO: 6677 - DNA, 90 bp, Homo sapiens
ctatgctgtgtctctgagagtgcagcacagggaaataatgcaaaaggtgtcccaaggctcctgaccagtgaacaaagatttgagaaagac

SEQ ID NO: 6678 - DNA, 100 bp, Homo sapiens
gcctgatgctgcaggagaaacattaggtagattttcgttccgtcacccaggctggagtgcagtggtgtgaccttggcttgctgcaaccctttgcctcctg

SEQ ID NO: 6679 - DNA, 51 bp, Homo sapiens
agcgactgagtccgcgatggagcggacaaggcaaaatctcagcaagttcgg

SEQ ID NO: 6680 - DNA, 100 bp, Homo sapiens
accaggatctcgggctcggaacgagactgcacggtgtaatggataggtaacagagaagacctcgtcccttcctagtcagggcatcagcatgactgagtgc

SEQ ID NO: 6681 - DNA, 115 bp, Homo sapiens
caggactgcgccgcgtcttcctcaaggtggggttcggggggccaccgaatcgctgtcacgccggcagtaagactttgaccccgacgcaggcttcagtgattgccgcggatcagaa

SEQ ID NO: 6682 - DNA, 100 bp, Homo sapiens
tgcgaggaagtaagccatgccacatccaggctgtagaccccagtggccctgcagccgcagcaggaatgaaggtggctgctacaccccatgtaaaaagcgg

SEQ ID NO: 6683 - DNA, 100 bp, Homo sapiens
cgatcagatcgatctaagatggcgactgtcgaaccggtgtccctggccagtgtccttccacctgtccacaagcatggggaacatcttcgccaacctcttc

SEQ ID NO: 6684 - DNA, 75 bp, Homo sapiens
cgaatacacctcaatgtctctgatgtcggtctcgaaacgagcccgaaaggcctccagcgacctggatcaggccag

SEQ ID NO: 6685 - DNA, 50 bp, Homo sapiens
attaatgccttccgctactacggggctggtggactaggcctcaattttgt

SEQ ID NO: 6686 - DNA, 100 bp, Homo sapiens
cagtgatgctgtccttgatgcccaccttcagcaggatcctgatgccaaagtagcttgtggccccttcacagatgtagtcactacaaatcttaaattgcga

SEQ ID NO: 6687 - DNA, 100 bp, Homo sapiens
gcagatgttgtcaaggtggcctaccaggaggccaggggtgtcgccatggtggtggagctattgttagctcgaggggcaaataaagagcacaggaatgttt

SEQ ID NO: 6688 - DNA, 101 bp, Homo sapiens
agatcaaatggcacttcattggccacctacagaaacaaaatgtcaacaaattgatgggtgtcatggagaaactccagctgggcccagagattctgcagcgg

SEQ ID NO: 6689 - DNA, 129 bp, Homo sapiens
acagaaatagtccagaatgtcacaggtccagggcagaggaccaacatgggcattttgtttatgagcaaggtatgtgcaagaggtgaaataattggcgtgaaagttctaggcatattggctatgattgac

SEQ ID NO: 6690 - DNA, 83 bp, Homo sapiens
gttttgaggattcattatgaacaaagaagtctcccagagtccgtgtgagaaccgggacacctgtcctgttgaaaagggggacg

SEQ ID NO: 6691 - DNA, 75 bp, Homo sapiens
acggacccctgtctcccggaggagcgcgcacccagcagccgctcttctaaaacattcaaaccaaagaagaatatc

SEQ ID NO: 6692 - DNA, 73 bp, Homo sapiens
ctactacaaccagagcgaggccgacctcctgcccgaaccgcggatcctgcagaaactcgctgtgcccatcatc

SEQ ID NO: 6693 - DNA, 82 bp, Homo sapiens
agccatgatgccccacttggtgaatggagatgcagctcagcaggtgactctgacatcattagaagcatgccagaacagactg

SEQ ID NO: 6694 - DNA, 99 bp, Homo sapiens
ccgctggacctggatgtgagggtgaaggctgtgctgctgggagccacattcctcattaaagttcaggagccctggaaaggagaaggaataagacggcag

SEQ ID NO: 6695 - DNA, 75 bp, Homo sapiens
ggatgttagtaaactctctgctgaaaaaggtacctggcaaagaattctgcaactttgttcagtgccagcgattat

SEQ ID NO: 6696 - DNA, 78 bp, Homo sapiens
ctactaacgtcctgtgtcactgagactttgaatcctcctcttccaccaccccctctcctggctgccactgtccttgcc

SEQ ID NO: 6697 - DNA, 98 bp, Homo sapiens
gaaaagtggcactgaggctctggaacttctgcccagctctccttgagttatggtgaatggttgcatggatttgaaaaaaaggcaaaagaatgtatggc

SEQ ID NO: 6698 - DNA, 90 bp, Homo sapiens
ttgtttgcagaaggatgaaaaggctttattgccaaactatacctatatcatggcaatactaatccagaattggcttttgaaagtgccaag

SEQ ID NO: 6699 - DNA, 83 bp, Homo sapiens
ccaggcccttgttggggcacaaggtggcaggagacagaggcctgaagcaaagacatctgggtcagagaaaaagtatttaaggg

SEQ ID NO: 6700 - DNA, 100 bp, Homo sapiens
tgctcccaggcgggctccagggcctcatcctcaaccccattttccgccagaacctccgcattgcccttctgggtggacaaatttacatgtattggagacc

SEQ ID NO: 6701 - DNA, 82 bp, Homo sapiens
tccccgctcagctcctggggctcctgctgctctggctcccaggttatggaggttttgatgactatggtggctataataatta

SEQ ID NO: 6702 - DNA, 83 bp, Homo sapiens
agcccgttgacactgacctcatctgggccaaaatgctgagttctaaggaggctggagcctggagacacaggccccatccttcc

SEQ ID NO: 6703 - DNA, 100 bp, Homo sapiens
ctgccacccgatgaatggagtcgccttctgcctggtcgggatcccgccccgcccggagccccggcccccacagagaagaagaagttggatgggataccga

SEQ ID NO: 6704 - DNA, 75 bp, Homo sapiens
actacagttcatcaacatcaactacgtccctctgaagagcgacaccacaggcaagctgggctttgaggaattcaa

SEQ ID NO: 6705 - DNA, 99 bp, Homo sapiens
gtcaggatgttagtgctgggtctttgcaggaattggctctgctgacaggaattataagtaaagcagcacttcctgctccgctccatcccagtcaagggg

SEQ ID NO: 6706 - DNA, 100 bp, Homo sapiens
ctttggaagaccaggcactttatgcagtattgagctcaggaggcagtgagtgttaaggaatgggtgtaaaagttcactattatgaagatggcaatgttca

SEQ ID NO: 6707 - DNA, 115 bp, Homo sapiens
ccgtacttgcaagaaagcagccccagagtttctacagataaagtgatctgaaataacgcatgatgccacaaagcagaaaagagaaactgtgacaacccccagaaatgtgaaagga

SEQ ID NO: 6708 - DNA, 100 bp, Homo sapiens
gcgaaggccgggacccggttccccggcccacagtgggggtgtgcaaacccgagagaactggaatttatccagttggcgaaggactttgaggatttccgta

SEQ ID NO: 6709 - DNA, 82 bp, Homo sapiens
ccgcccccgccggttcgcgtctctctgctgcggcgcggggaccgctgtgctctcggcgccggctctgcagcagtaccgcact

SEQ ID NO: 6710 - DNA, 100 bp, Homo sapiens
ttaaatatcttcgagctgaacctgaggaccattattttttaatggtaaacattataccagtgattgccaaagcagatacggtttctaaaactgaattaca

SEQ ID NO: 6711 - DNA, 80 bp, Homo sapiens
cggagctgtgcgagagcctcctcacttgggtttttagaacttcagccataaaaatgggcagaattttccttgatcatatc

SEQ ID NO: 6712 - DNA, 100 bp, Homo sapiens
attctgacgccctcaaggtcgccaaggaggtggacccccagggaaaaccgtcttcagatacagtccctaagcccaagagagccccaaaacagaagaaagt

SEQ ID NO: 6713 - DNA, 50 bp, Homo sapiens
tcactgctggctcagaagatcgagcactgctcagcacgcaggcatgtgag

SEQ ID NO: 6714 - DNA, 100 bp, Homo sapiens
cttgcagccagtgacctcaaaggatttcagccacagtactatactggcaattgctggagaagattttgcaattgttgcttctgatactcgattgagtgaa

SEQ ID NO: 6715 - DNA, 80 bp, Homo sapiens
tatggatgcacttttgaacaacagcctgcccccaccccacccagctggagttggccacggccaagaacgacatgaaccgg

SEQ ID NO: 6716 - DNA, 110 bp, Homo sapiens
caaaccctagtgaataaagccaagagagaccttggagtaattcgtcgacagacaatgcagatcttcgtgaagactctgactggtaagaccatcaccctcgaggttgagcc

SEQ ID NO: 6717 - DNA, 100 bp, Homo sapiens
ggaggcagtagccaaacacccagggatcgatttgcttagtggtataatacctgaactctgtcagaaatatccagatttaaatttcataattggaggagag

SEQ ID NO: 6718 - DNA, 82 bp, Homo sapiens
agaagtcgcgtgtctaggtgagtcgcggtgggtcctcgcttgcagttcagcgaccacggtgatggctggaccggcggaggag

SEQ ID NO: 6719 - DNA, 50 bp, Homo sapiens
agaagctatcaaagcccttgaagtcaggtttccatggatctcaatagtgc

SEQ ID NO: 6720 - DNA, 99 bp, Homo sapiens
gtcagctacaaccagaacctcaccagaggcaagaaatggtcttcagcagagaagccgtcaggagacttctcgccagtaaatgtcgatgctacagcaatg

SEQ ID NO: 6721 - DNA, 100 bp, Homo sapiens
cccgccgagccgccaccgcaggtcgaggacggtcggactcccgcggcgggaggagcctgttcccctgaggaccttttttctatcagtgcttatgtttatg

SEQ ID NO: 6722 - DNA, 99 bp, Homo sapiens
cgatgccctcggacttcatctcattgctcagcgcggacctagacctggaatcgcccaagtccctctactcgcgaggacaccatgtaaaattgaacctag

SEQ ID NO: 6723 - DNA, 98 bp, Homo sapiens
cagtgcacagaagctggtgacatctgcgccatctgtcaggccgagttccgagagcctctgattctcctgtgccaggcctagccgcccgtgactctcac

SEQ ID NO: 6724 - DNA, 80 bp, Homo sapiens
ctcctgtgtgcatggctttccaaaaggagctgctctttggcgtaaattgcaatcgattagggatcgtttctcagaatcaa

SEQ ID NO: 6725 - DNA, 100 bp, Homo sapiens
cgggggccgctctgggatcccggccaccagcaattgtccgcgatgccctcctagctagccgtcacgggatggagggcttcatggactcagggacacagac

SEQ ID NO: 6726 - DNA, 100 bp, Homo sapiens
ggaatttgtgcaatgtttagccaacccaaattaccttaattcattttgaaagcgaagcagaagccgtagaatcagcggcgagcctgttgaaagaacccac

SEQ ID NO: 6727 - DNA, 83 bp, Homo sapiens
agccctttgggagagttgtgtccaccagatatgaggccccaggattcctggcgaggtcctcctccccttttccagcagcaaag

SEQ ID NO: 6728 - DNA, 86 bp, Homo sapiens
gcggcgtgtgcgcgcccgccagctgctccggagatacggacctcagcagccatgtcgaagccccatagtgaagccgggactgcctt

SEQ ID NO: 6729 - DNA, 75 bp, Homo sapiens
gctgcctttatgtctgctgtgatcctcacagctgttgctgttattacagtccaggagaaaatcctccacctccgg

SEQ ID NO: 6730 - DNA, 87 bp, Homo sapiens
tgcaggcccacagctgcctacagaaccgtcccaaaatatggcaaagaaacctattctgagatcacctcagccagttctcagacactt

SEQ ID NO: 6731 - DNA, 75 bp, Homo sapiens
gcagaacagaggcttcgcatttgtgcagctgtcctctgcaatggacatctctgggcttcaggaccatgagtttca

SEQ ID NO: 6732 - DNA, 85 bp, Homo sapiens
aggaggagtgggggaggcgaacagtctcgttgctgcctctgtgtacgctgaggggggaggtcaaaatgcagatcttcgtgaaaac

SEQ ID NO: 6733 - DNA, 100 bp, Homo sapiens
ccggacctttgagcatacaccgagagagtgaggagccagacgacaagcacacactatggcgctgaaacggattaataagagaccctcctggatgacttcc

SEQ ID NO: 6734 - DNA, 98 bp, Homo sapiens
ttcttcggaacctttcttcccctggatgggaaaacatctcaagtacgacaggacagaaaccgcgatcaacaacctcaaccccgccttctccaagaagt

SEQ ID NO: 6735 - DNA, 100 bp, Homo sapiens
aaggagcaaggctgaagaaccagacctggactttcttaggtattcaaactcgtgtccttgatgtcacaaagaagaaacaaattgatcagtttgccaatga

SEQ ID NO: 6736 - DNA, 100 bp, Homo sapiens
tatgtacctgttaccactttcaaaagttggaaaggtactttgttgggtgttgctatggctacagtgaatgctatgatagcagaatatggctgcagtttgg

SEQ ID NO: 6737 - DNA, 74 bp, Homo sapiens
aagacactcaaggacagacatttttggcagagaaaaatggctacaaacttcctagcacatgagaagatctggtt

SEQ ID NO: 6738 - DNA, 83 bp, Homo sapiens
cctcttctacggaggaaggaacgggcacagcaggatttaccgaggagcattatggatcctgggagaatactgtagtaccaagg

SEQ ID NO: 6739 - DNA, 51 bp, Homo sapiens
atatgaagttcatcatcaaaaattgatatgggacacagcaggacaggaacg

SEQ ID NO: 6740 - DNA, 75 bp, Homo sapiens
ttaatcctcaatttaagcctgatctaacccctagaaacagcaagcaggcagctggtgtggaagaatggcggtgag

SEQ ID NO: 6741 - DNA, 100 bp, Homo sapiens
ctcggccacccagccgtctcctgtgaaggccatatttgataaacaggaacttgagaacctccagtgggcccgcgacgtgttgctaggcagcagtatcccg

SEQ ID NO: 6742 - DNA, 100 bp, Homo sapiens
gcagcctggggactctgcctcgtgccgctgagcctggcgcagatcgcggccgtggtgtgtgtcaccctcctgaaccgcctggaaggggaccagatcagca

SEQ ID NO: 6743 - DNA, 74 bp, Homo sapiens
tggaggtagccgcagcgccagcaccagtgaagctattaagtacctcacagaagctcttcagtctatcagtgaat

SEQ ID NO: 6744 - DNA, 104 bp, Homo sapiens
gtatcacagaagttataaagttattgctaagtgtgggaattttagctaagtacatgatgttgattgatggcacaaatgaagtttttatgattgatagagacaat

SEQ ID NO: 6745 - DNA, 75 bp, Homo sapiens
aacccctctgcaaagcttttattgtcacagatgaagacatcagcatcacagaacacatagattttgccaccccta

SEQ ID NO: 6746 - DNA, 74 bp, Homo sapiens
ccagctcggcccgcgggggagccccgggagccgcacgaatgaaacggctggtttgtgtgctcttggtgtgctcc

SEQ ID NO: 6747 - DNA, 100 bp, Homo sapiens
tgcggccaactccaatgggcctttccagcccgtggtccttctccatattcgaggctccaccgaggacaccgcgtccagcttgtgtggcgaggaggacaca

SEQ ID NO: 6748 - DNA, 100 bp, Homo sapiens
tgatgggaattcctcagagaaccaggatttctgtattatgaagaccttgtcagctgtgtgaccagggcagaagcagaggccgtcagtgtgctggttaaag

SEQ ID NO: 6749 - DNA, 50 bp, Homo sapiens
atccggacaaagaaacgagcgctcggatgttttagaagaatgtatgtctc

SEQ ID NO: 6750 - DNA, 90 bp, Homo sapiens
tgcaggcaatgaaggccttggtggtatagatttcagtagctcctcagataaaaagatgagggtcgctgtctgcccattgatagaggccag

SEQ ID NO: 6751 - DNA, 100 bp, Homo sapiens
tcgactttggagaaaccaccgtgctggaccgcttttacaatgcagagtcttcctgcgagcaattaatcagtatgcagatatgctgaacaaaaaatttctg

SEQ ID NO: 6752 - DNA, 101 bp, Homo sapiens
gccgccgccgccgccgccattcctggcgcccgaactcgcccggccgggagccgccgcgggcaggacgcgcgctgcagcgggaatgcatatcagtccacgtg

SEQ ID NO: 6753 - DNA, 75 bp, Homo sapiens
ctcttggcaggagtagctgatcaaaccaaggatggaaagctgtatgtgatggcttctgtgtttgtctgtctactc

SEQ ID NO: 6754 - DNA, 100 bp, Homo sapiens
attggtttcatagtaaggattctttctttaaggtgatatggagcaactgctttcacaggggcaccagatgtgtgcaacagcaccgatcttccggaagtcg

SEQ ID NO: 6755 - DNA, 100 bp, Homo sapiens
aaagacaaatatgaaagtctggttgaaaagttggcactacgagatgcacttttgaaaaagagaaaaagaatgaagtaacttcctggcaagttttccattc

SEQ ID NO: 6756 - DNA, 100 bp, Homo sapiens
tgtgacctgcaggtattgggagatccacagctaagactccaggaccctctggaagcctagaaatgaccaagatcactccatggatgaaatgacagctgtg

SEQ ID NO: 6757 - DNA, 75 bp, Homo sapiens
cggccgcctccgcgagggcaccatggaggtgaatgcagctgaactagatgcagagcacgcccagaaggtcctgga

SEQ ID NO: 6758 - DNA, 101 bp, Homo sapiens
aaaagatcttcaaaaggagcagaaaactttacagttatgccatcggcaccgtactggatcctggccaccgactatgagaactatgccctcgtgtattcctg

SEQ ID NO: 6759 - DNA, 100 bp, Homo sapiens
tcaaaaccccatctttgaagggcttgatggaagctatggactagaggcttttaccagatttcttaaaactgaattcagtgaagaaaatattgaattttgg

SEQ ID NO: 6760 - DNA, 51 bp, Homo sapiens
gtggtgagcctttttgtcactggaactgactcagcgcaagaagacagcttc

SEQ ID NO: 6761 - DNA, 96 bp, Homo sapiens
gtcctcgctgtggggcaatccgggcttgcagacgaggctttacaggaagtatggtgctggcatctgcttggcttctagagagtcttacaatcgtgg

SEQ ID NO: 6762 - DNA, 83 bp, Homo sapiens
gctcgcgctactctctctttctggcctggaggctatccagcggttacctgttcgggtgggcccatttccagaaaaacctttgg

SEQ ID NO: 6763 - DNA, 75 bp, Homo sapiens
tggaaagaccgctttccatggagagtaaaggccggctggaaagtccccaagcggatggatagaatgacagaagat

SEQ ID NO: 6764 - DNA, 98 bp, Homo sapiens
gatcatcgaggtcgtcgacgccatcatgaccacggcccagaggttgagttgttacaacaaaagttgagagaaaagttggatgaatttaatgaattggc

SEQ ID NO: 6765 - DNA, 100 bp, Homo sapiens
tctggtctcctggatcatgtgggcttcctcagccgccgcctcaagggctccatcaagcgcaccaagagccagcccaagctggaccgcaaccacagcttcc

SEQ ID NO: 6766 - DNA, 50 bp, Homo sapiens
ggcagagatcaatggaaccatgaacgtgtaatcgaatcctggaccggaaa

SEQ ID NO: 6767 - DNA, 100 bp, Homo sapiens
gataatggaaatgagacaattgaagctcaagcagagcttacagtgcaagtcctcccgagagctggatgacagcagcagtgagtccagtgacctccagctg

SEQ ID NO: 6768 - DNA, 99 bp, Homo sapiens
gaacatgccaggagagcaatgcaaaaggagctggaagctatcaaagctcgagtcagggagatggaggaagaagctgagaagctaaaggagctacagaac

SEQ ID NO: 6769 - DNA, 75 bp, Homo sapiens
gaactctatcccaggaatacagctttgcattagatgcttttactgactctgctatcagtgctaaagtgaatggcg

SEQ ID NO: 6770 - DNA, 100 bp, Homo sapiens
tcaagaacagaacaggccctatggggcatacctatggctttattgacctcgactcccatgcgtcttctcacaagactttcaggattaagcgattcctggc

SEQ ID NO: 6771 - DNA, 111 bp, Homo sapiens
caattgttcagttgcaaaaagaaactggagccaccatcaagctgtctaagtccaaagatttttacccagacggaagtgaaaatgtgacaggattggacctttcagatttcc

SEQ ID NO: 6772 - DNA, 100 bp, Homo sapiens
cccagctaccatgccagagccagtttattttcactgtgcagctgttacaccaaagcagctgacacaggatgatgatactgatgcggttgagattgctatc

SEQ ID NO: 6773 - DNA, 82 bp, Homo sapiens
ggcggatggccccaggtgtaagcgcagaaagcaggcgaacccgcggcgcaataacgatgatcaagcggtgctgattcacgag

SEQ ID NO: 6774 - DNA, 100 bp, Homo sapiens
ctgcgggcccagcggcttggtgcgggagctggaggagctgcgctcggagaacgactatctcaagaacgagcctctgactccaggttatcatggattccca

SEQ ID NO: 6775 - DNA, 50 bp, Homo sapiens
cccccaaggagtctcgctgcttttgtgtccaatatcagatggaaatgatg

SEQ ID NO: 6776 - DNA, 90 bp, Homo sapiens
ttgaaaatctgtgacattgcaagggaaaaagtaaataaagctgctgtttttgaagaggtgaaaattagttctgctgtgcttaaagctgcg

SEQ ID NO: 6777 - DNA, 50 bp, Homo sapiens
gaagcccttccgcggaccgaaaggttcctaggagaatgttaacagtccag

SEQ ID NO: 6778 - DNA, 100 bp, Homo sapiens
ctaaatgatgcaaactttgataattttgtggctgacaaagacacagtgctgctggagttttatgctccatggtgtggtggctggaggtggccgaattgac

SEQ ID NO: 6779 - DNA, 121 bp, Homo sapiens
gcttgtccactgtccgccagacctgctgctgcttcaatgtccgcatcgcaaccaccgccctggccatctaccatgtgtgtactaatggtcacttgatgtgcgctggctgttttatccacct

SEQ ID NO: 6780 - DNA, 90 bp, Homo sapiens
atttcttaatcagcgcttgcaaagatgtcatctgggtgattctcagtgtggaggtgggtggacttttaggagtaacgcagcagctgtcat

SEQ ID NO: 6781 - DNA, 50 bp, Homo sapiens
aaggcatttccagcccgcccacccaggtacaatgactcttcttgcttttc

SEQ ID NO: 6782 - DNA, 100 bp, Homo sapiens
ccgggatcgtgaccgagaccgtgaccgagagcgtgaccgagagcgcgaatatcgtcatcgttagaaggtgcaatgtagcaggacaactcatggagccccc

SEQ ID NO: 6783 - DNA, 82 bp, Homo sapiens
ctgacagctctgcggctcgggccctgaggattttttatcaagcagaaatgcatcgaacaacgagaatcaagatcactgagct

SEQ ID NO: 6784 - DNA, 134 bp, Homo sapiens
gggtgaaggagcagctggccttccaggtggagcaggtgaagcgggagtcggagttgaagctagatgaggaagaggagcgaaggaaaaggcgccgggagaagaacaaagtcgcagcagcccgatgccggaacaag

SEQ ID NO: 6785 - DNA, 103 bp, Homo sapiens
catctataatgaggataatggtatcatcaaggccttcagaaacatccctggccctggccaacgtcaacattgggagcctcatctgcaatgtaggggccggtgg

SEQ ID NO: 6786 - DNA, 75 bp, Homo sapiens
aggaagaccgtgatgggagctgcagcacagtcgggggtgtaggttatgggggagcagcatttctttctattacta

SEQ ID NO: 6787 - DNA, 100 bp, Homo sapiens
attttcctgcacagcagctgttacagtcccattctcacctggcccctgggccagttcggaagcctctgagcaggggccagtgtcattcaaagatgtggct

SEQ ID NO: 6788 - DNA, 75 bp, Homo sapiens
agctctgctcaaagccagacgcaggggaaatgctgtctgtagctgagcacttcctggagcagcagatgcacccaa

SEQ ID NO: 6789 - DNA, 100 bp, Homo sapiens
aaacaaatgaagcagcgctttgaaaggaccacattttaaccccagcgctattcataacttttatgacaatattggatttgtaggtcctgtgccaccaaaa

SEQ ID NO: 6790 - DNA, 82 bp, Homo sapiens
ccgatttaaagctgagctgcgaggaaaatggcggcgggagcctcttctgaaacagtctccctggagcaaccatcagagcagt

SEQ ID NO: 6791 - DNA, 100 bp, Homo sapiens
ttcttttttggaactcatgagacttacagaatgtctgaaggggacagtgtgggagaatccgtccatgggaaaccttcggtggtgtacagatttttcacaa

SEQ ID NO: 6792 - DNA, 100 bp, Homo sapiens
gccaagcagctgtggggaaacgttgtctggaaatgattcagtggtggctggtggcggggccattgagatggaactctccaagtacctgcgggattactca

SEQ ID NO: 6793 - DNA, 122 bp, Homo sapiens
agaaccatgcctggtggatccagacatgatcaaagccatcaaccagggcaactatgggtgctgtggctgtagctgacctctttggaccgggatgtgggtatcctgggctcctggcctgtggc

SEQ ID NO: 6794 - DNA, 87 bp, Homo sapiens
cagctctgtccgctgcccacagcctagcagtcgggaccgtactgagtgaggaaaccatttattacagtagtttcaccaaagtctcct

SEQ ID NO: 6795 - DNA, 51 bp, Homo sapiens
gaaatggatacagagccttgatgggacctaaccaagggagactagttccac

SEQ ID NO: 6796 - DNA, 74 bp, Homo sapiens
cttgactgagaatggtgccacgtgtggtctgtaagtagaaaatggtggctgtccagccaacagaagtggtcaat

SEQ ID NO: 6797 - DNA, 112 bp, Homo sapiens
gcacagcatctgaggagggttatgaccatctggcagatgcagaaacaggcccagagagtgtactaatggtcacttgatgtgcgctggctgttttatccacctactagcagat

SEQ ID NO: 6798 - DNA, 85 bp, Homo sapiens
gtggcgcctaaagtctgagagagggaagtcgcctctgtgctcgtgagtgcatggggtataagggtttctatgttgcactgagact

SEQ ID NO: 6799 - DNA, 95 bp, Homo sapiens
taccatagtgattggggaattccagtttaaagctcataggaatgtgctggcctcctttagatggtgcgatactggtctttctgccaggctgggac

SEQ ID NO: 6800 - DNA, 100 bp, Homo sapiens
ccttgaggacctccctggacccaagcctggagatctggcttggcaactcttgtgaaatttcatagatctcgtcgcttactgggagtctgctatattgttg

SEQ ID NO: 6801 - DNA, 80 bp, Homo sapiens
tgacatccacctgctggagtcggaggccaacagtgctgcatacatccattgtccatggggcaagaaacatgaggatgaaa

SEQ ID NO: 6802 - DNA, 73 bp, Homo sapiens
agtgatccaccttacatggaaatgaagcaagggcaagtattttgtaaccttcccatatccatatatgaatgga

SEQ ID NO: 6803 - DNA, 100 bp, Homo sapiens
tttgaaagcctgagttacgatgtattgagcgcgtcgtatgcggccagcactaagggtgaggtggctttgaccccgggttgcccggccagcacgaccgagg

SEQ ID NO: 6804 - DNA, 95 bp, Homo sapiens
cgcagccaccactgccgtctatgaggccatgactgcagctatttcaagaagcccctgaatatctactttggatttattcctgaaataatcttcat

SEQ ID NO: 6805 - DNA, 100 bp, Homo sapiens
gctgggtttcccgggagatcccaggcggtgacagagtggagccatggctagagggtgaatcctggttctttcgttggctacctggaaagaaaaagacaga

SEQ ID NO: 6806 - DNA, 50 bp, Homo sapiens
tggcgagggccagtttggggagcctcagtaccacgggctgcaggtggccg

SEQ ID NO: 6807 - DNA, 50 bp, Homo sapiens
gagacctggacttttgggtcaaaagacatggatgggtgcaaaaaagagct

SEQ ID NO: 6808 - DNA, 82 bp, Homo sapiens
ataaactgaaagatatcagcaccttggaacctttgcctcctgacaaggtgatccgggcgggccccgcaggaattttatcccc

SEQ ID NO: 6809 - DNA, 141 bp, Homo sapiens
gggggtggtgctggctcagtacatattcaccttgaagaggaagacggggcggaagaccaagatcatcgagatggtactccaaagattcaggtttactcacgtcatccagcagagaatggaaagtcaaatttcctgaattgc

SEQ ID NO: 6810 - DNA, 100 bp, Homo sapiens
ccagggagagatacgtttggatcaggagttagtgataacagctggtgtctggcctagaggtggtgggacgagtccagatgcggacgcggcggacgttaag

SEQ ID NO: 6811 - DNA, 90 bp, Homo sapiens
agccgggatctcaggtcctcgggggcggcggccacgccaaggacggttactatgcgagtcagaagaaaacatttgaaattaatcccagac

SEQ ID NO: 6812 - DNA, 75 bp, Homo sapiens
gaacagacgcatcactggccgagcccactggggctcacaccacgcaggtcacagggattatggacccagaacaga

SEQ ID NO: 6813 - DNA, 82 bp, Homo sapiens
ttccttgaagaaacaagcttacagatctgaacagaattaagacgaacgagctttcacaattgcagcagatgaagatccattg

SEQ ID NO: 6814 - DNA, 100 bp, Homo sapiens
gtggtttctcctttcctcggcatcagcggggaccgtagcttctcaggccccacgtacacgctgggatgagctttctgatgttagccaaggcggatctaaa

SEQ ID NO: 6815 - DNA, 82 bp, Homo sapiens
ctcttacgtctgcggaagtgcagctgcctcagttcttagcgcagagataattgacgaccttgccaacctagtggagaacaca

SEQ ID NO: 6816 - DNA, 60 bp, Homo sapiens
tactcagatatggctgctggatcagaaaactgcatgttttcctgttccaagaagtgcttg

SEQ ID NO: 6817 - DNA, 51 bp, Homo sapiens
catattttgaagtgtttacgggggaaagcaagatagtttcatttggatttg

SEQ ID NO: 6818 - DNA, 100 bp, Homo sapiens
tgatttccgcatttccaactgaggcagcggcaaaagtagtagaaagcaaaaggacaagaacaataacttctcaagataaacctagtggtaatgatgttga

SEQ ID NO: 6819 - DNA, 100 bp, Homo sapiens
tgaattcagtggaaccatcacacaaaagcacacaaagacctcctcctccacaggggagacagaggtagaaaatctggtgtattaactgtgaaaattttag

SEQ ID NO: 6820 - DNA, 100 bp, Homo sapiens
caggaacctgggcgagcagcggcgggggcccgaggggaactctaatgaatcattgattgaccagcactattttaccagttggaatgaatgatcagaaatg

SEQ ID NO: 6821 - DNA, 100 bp, Homo sapiens
agaaaagcccacggtcatagacagcaccatacaatcagccattgcctagaatacttcaagtctttcaattttaacacactgcttggagaagagtggaaac

SEQ ID NO: 6822 - DNA, 97 bp, Homo sapiens
gttgtccttgaaagaagccttacaaaaggctcgagaatggaccgctaaagtggaagctattcagcctctgcctcggtgcaccctctcattgaccccc

SEQ ID NO: 6823 - DNA, 50 bp, Homo sapiens
ttggacacagaccattgcaatggaaatggccaagctataacatcagaaat

SEQ ID NO: 6824 - DNA, 82 bp, Homo sapiens
tatttgagatgagttacatcttggaggccctgggctgcatcttgtacctgctgtgcttccggcagcacccttttgaggatgg

SEQ ID NO: 6825 - DNA, 103 bp, Homo sapiens
cgagctgagtggttgtgtggtcgcgtctcggaaaccggtagcgcttgcagcatggacctgaaggagaagaaggagaaggtggaggagaaggcaagccggaaag

SEQ ID NO: 6826 - DNA, 131 bp, Homo sapiens
gcggggcgctgactgccggctgcttccctgggctgggcgtcagccgccaccggcagcagcagcaccaccggacgctcctcagagaaattttgaaattgccttcaagatgtttgatttgaatggagatggag

SEQ ID NO: 6827 - DNA, 80 bp, Homo sapiens
gcgacagtacaaagaagactcttgtcacactaattgccaacaacaatgtatgcttcagaagatgcagagcttctcttagt

SEQ ID NO: 6828 - DNA, 82 bp, Homo sapiens
gacagctcaggagagggcttcaccatttctgcgtgaggccgtgggaacatgacagcacagaattacacgtatgcaatccgct

SEQ ID NO: 6829 - DNA, 83 bp, Homo sapiens
aggcagccaagctcgtagcctgccactccgtgcatttggagcaagaggtggtggtggccttcccccgaagaaatttggtaatc

SEQ ID NO: 6830 - DNA, 83 bp, Homo sapiens
gcagtggacgcggttctgccgagagccgcggagctggagtttgttcagatcatcatcatcgtggtggtgatgatggtgatggt

SEQ ID NO: 6831 - DNA, 100 bp, Homo sapiens
atccccctggtgctgttctttatcctgctggggctgcgacagaagaagcccaccatctccgtgaaggaagacggtgagcgtgatcgtgcaggacgaggga

SEQ ID NO: 6832 - DNA, 75 bp, Homo sapiens
aaaagcctggaggttcagatttcttaaggaaacggttgcagaaagggggttttgactctgggaggagggctgcct

SEQ ID NO: 6833 - DNA, 97 bp, Homo sapiens
agggaactcaaacagcagatgcagatgggcttaggtcacgagcaaggatttggagccccttgtttaaaatgcaaagaaaaatgtgaaggattcgaac

SEQ ID NO: 6834 - DNA, 88 bp, Homo sapiens
cttgcagcatattacctatcaggagaggaggtgaaagaactcttttcttctttgggagtcgaatgtaatgtcttggaacttgatcaag

SEQ ID NO: 6835 - DNA, 75 bp, Homo sapiens
gcgtagggcccatgacagttgcaatgctcatgcaggaggaagaggtggtggacaagatggatgatgatgtcttcc

SEQ ID NO: 6836 - DNA, 50 bp, Homo sapiens
aacggagtgtgcgacggattgggagggcgtctctggccgagcctcttttt

SEQ ID NO: 6837 - DNA, 96 bp, Homo sapiens
tcctctcgcggccctcagggcacagcccaaggctgtcagcctcccggcccaggattttgcaggttaattcctcacacacgttcaccaggtacttgg

SEQ ID NO: 6838 - DNA, 74 bp, Homo sapiens
aaccttcgatctcctgacgagttcctgcgtgaagaccagctgggagcccactgcctgctgccacctccaactcc

SEQ ID NO: 6839 - DNA, 100 bp, Homo sapiens
cacggcgctggccatcctgctgctgcagggcctggtagtgtggagcttcagcggcctggaggaggacgaggcgggcgagtggcaacatgaagatctactt

SEQ ID NO: 6840 - DNA, 100 bp, Homo sapiens
aggccaagccttctgcctgtgatgcggatgtgatgctggtacaacccagagtagaatttattctgtctttcattgaccacattgctggagatgaggatca

SEQ ID NO: 6841 - DNA, 74 bp, Homo sapiens
tctgtctcccagcagtcacgcaaacaacttatcagtagtgacttacagtaaggaaatcatcgagttccccatcc

SEQ ID NO: 6842 - DNA, 75 bp, Homo sapiens
gtttccaagaacaactcctactccttagctttcctggcaggataaactcaagccatggagggattactgcattac

SEQ ID NO: 6843 - DNA, 93 bp, Homo sapiens
agcggccccctggagggggcagtcccgggagaacctgcggcggccggagcgatattgaagcacagattcgagaaattcaaggcaagaaggcag

SEQ ID NO: 6844 - DNA, 83 bp, Homo sapiens
catgtgaagctcaccgagacggcgatccgggcgctcgagacttaccagagccacaaggattttttatcaagcagaaatgcatc

SEQ ID NO: 6845 - DNA, 90 bp, Homo sapiens
atactatccgtttgttcaggaaccaccagtgacagagtgtgttccagagaacaagccttcagacatttgctatattgacgctgagctgtc

SEQ ID NO: 6846 - DNA, 99 bp, Homo sapiens
agggggtgctgtacaagtggaccaactatctgagcggtggttgtactacaatcccagagtcagacctagaagaaagatcagtagaacaagactctacag

SEQ ID NO: 6847 - DNA, 100 bp, Homo sapiens
actatggggcctttatcaaaatcccaggctgtcggaagcaaggagttgatccctgaattttattatctccctgagatgtttgtcaacttcaataattata

SEQ ID NO: 6848 - DNA, 96 bp, Homo sapiens
gccactgctgctccgtggagatcgtcccgcgcctgccggggttcagtcggctgccgtcaatgtcatctgcgagctggccagacgcaaccctaagaa

SEQ ID NO: 6849 - DNA, 50 bp, Homo sapiens
ctactcaagagtggaagttttcacaggttatatcttaagtgtggtgctgc

SEQ ID NO: 6850 - DNA, 100 bp, Homo sapiens
ccagcctgctcaggtgaagatcagaagccgtctcatcccctttgtgcccaaagaaaggcgtctctggccgagcctctttttgtggaaaacgacagcagca

SEQ ID NO: 6851 - DNA, 96 bp, Homo sapiens
aagaaaggaatgaacatgtatttaaccaagttccaacaaaagaatgctgccgcagaaaccagcctggacaccaagtctgtgtcagaaggccacctc

SEQ ID NO: 6852 - DNA, 101 bp, Homo sapiens
gcgctcgttttctgtctagctccgaccggctgaggcggcgcggcagcggagggacggcagtctcgcgcgactgtgccctgtccacggtgcctcctgcatgt

SEQ ID NO: 6853 - DNA, 98 bp, Homo sapiens
tttgagtgacaagatgggggtgttccaaagagaccatggcagcctgcagctaggactttaataacgctagccctaattaaaccagatgcaatatcaaa

SEQ ID NO: 6854 - DNA, 82 bp, Homo sapiens
tagcaggcatttatctttctttgagtctaaagaatcccttgaagaaagtattggcaaggttcttgcacgcattgcaaatgcc

SEQ ID NO: 6855 - DNA, 97 bp, Homo sapiens
tataatcagaaagtctatggtctatctgaagctgttgccgattccacgactcttctttgcgggagaacatacgatccgtaactacccagccacagtg

SEQ ID NO: 6856 - DNA, 82 bp, Homo sapiens
ctgtcagccagcactaggaggcgctatgaaactcaggctcacagaacatttcctgcctgttgctcacactctgttgtccaca

SEQ ID NO: 6857 - DNA, 75 bp, Homo sapiens
gaggagacagagcctgcttcgcaaaatgatgcttcaacacccaggccaggtctctgcctcggaagtgagtgcttc

SEQ ID NO: 6858 - DNA, 71 bp, Homo sapiens
tagggcggcggatggaggtcagcggtggtgctcgctgcacgcaaacatgcagatctttgtgaagaccctca

SEQ ID NO: 6859 - DNA, 90 bp, Homo sapiens
ttcagaatgctgcggttttccaagaatgtccctcttccagtggaaagcccaaccatgcagacatcttgctcataaacttacagtatgttt

SEQ ID NO: 6860 - DNA, 74 bp, Homo sapiens
gcgagccccgagccccgagcccggcgcctggctgagtaatagcagaccccacgttagctgaaatgggaaaaaac

SEQ ID NO: 6861 - DNA, 75 bp, Homo sapiens
agtacgagttgaatcattgttcaaataagatgccttcaattaagttgcagagttctgatggagagatatttgaag

SEQ ID NO: 6862 - DNA, 88 bp, Homo sapiens
cagcagcgactggcccaagttctttgaaaaggtctacataattgctgtgcaaagacataaaaaccacagacaacctttgaagactacc

SEQ ID NO: 6863 - DNA, 100 bp, Homo sapiens
acttatggtctccacaagtatctgaagatgggaaagcccatcctttcaaaatcaacttagaatcagaaccacagcaaatgaagaaacacccctgccgcca

SEQ ID NO: 6864 - DNA, 88 bp, Homo sapiens
gtatctccgctacttcactcgcactatccttgatgctagacaatgcagatcttcgtgaagactctgactggtaagaccatcaccctcg

SEQ ID NO: 6865 - DNA, 82 bp, Homo sapiens
gactccctggctgctggagagttgaatgccagccaccagccatgggaggaacgatgatgaatgtcgggcatttgtgaagaga

SEQ ID NO: 6866 - DNA, 50 bp, Homo sapiens
cttgtgctgaccaagctgctcacctcgggggcttggtactgtgaaatgag

SEQ ID NO: 6867 - DNA, 90 bp, Homo sapiens
cgagaccccgctgctgctggaggcaagaattcctggaaaactcaagcaattcgtatttgacttacattctggaaaactgcacagagaatt

SEQ ID NO: 6868 - DNA, 90 bp, Homo sapiens
tggccaagatcggtgagattgccactgggtcccccgtgtcaactgaactggtctgcagatgtggatcccgaatcctgcgagaagtagccc

SEQ ID NO: 6869 - DNA, 100 bp, Homo sapiens
tactactgcacagctgacaatggctttggtccccagcgcagtgaagtggtgagcctttttgtcactgactcagattgatggacaacttttcttaattaag

SEQ ID NO: 6870 - DNA, 100 bp, Homo sapiens
gcacattaccattaaccagtacctgcagcaggatcttagtaagagccctaagaccatgaaaaagctgctgcccaagcgcaaacctgaacggaagccttca

SEQ ID NO: 6871 - DNA, 100 bp, Homo sapiens
gaagaaagctatctagggacgagatctagaatcaactgagagagatgcttaaaaatcaccagttactttaatgagtactaggttttgacaagcttgcatc

SEQ ID NO: 6872 - DNA, 50 bp, Homo sapiens
cttattgaacacatcagaatccacacaggctcttgggatgctcttctggc

SEQ ID NO: 6873 - DNA, 90 bp, Homo sapiens
attacacgcaaagatattcaaactctaaaccatctgaattggctcaatgatgaggtctttcatggtgctgattcagacatagaatggcta

SEQ ID NO: 6874 - DNA, 100 bp, Homo sapiens
ctggtcctgtggctcagctctacagcttacctcctgaaggtgtgcaactgaggaacatggctcaagaaactaatcacagccaagtgcctatgctttgttc

SEQ ID NO: 6875 - DNA, 100 bp, Homo sapiens
aaatggccgaggggccggagccacaggtgagaagccctaccactgcaactgggacggctgcggctggaagtttgcgcgctcagacgagctcacgcgccac

SEQ ID NO: 6876 - DNA, 98 bp, Homo sapiens
ggcggggggcctctgggagcatcttcagcaagttcacctccaagtttgtacgcaggtgccggaagctgcgaaggtgacacatggcttttcagactcag

SEQ ID NO: 6877 - DNA, 75 bp, Homo sapiens
actgacctggggacagcagatgttggtataaagatggctgtgaccacatcggggagcaccgagatgatgaaagag

SEQ ID NO: 6878 - DNA, 90 bp, Homo sapiens
ggctgcccactttatcggtgacaagttaaacgaggaagcaagatttccagatgtagcaaatgggtttattgaggaaataattcattttaa

SEQ ID NO: 6879 - DNA, 75 bp, Homo sapiens
ccagagcaacagctttcagcaacacagaaattcaggaagctgctttcaaaaggagaccaagacacattccacccc

SEQ ID NO: 6880 - DNA, 89 bp, Homo sapiens
tgatgattttaacctggaggatgcagtgaaagaaacttcctcagtaaagcgaattgtcttagaagaaagaaggcaagccaccattttac

SEQ ID NO: 6881 - DNA, 100 bp, Homo sapiens
gagaaacaaaggcaaatacagccccactgtgcagacccggaggctgagtcatcactagagagtgggaagggcagcagcagcagagaatccaaaccctaaa

SEQ ID NO: 6882 - DNA, 100 bp, Homo sapiens
tgcctaaatcagccaaacacaggggtgcatgtagtctttggactggttatttctggttttgaagtaatcgaacaaattgaaaatctgaagaccgatgctg

SEQ ID NO: 6883 - DNA, 97 bp, Homo sapiens
cccagtgggtcctcacagctgcccactgcatcaggaagtcccgggtggattctaagaccctgacccgtaacacgaggatcattgcagaggccctgac

SEQ ID NO: 6884 - DNA, 110 bp, Homo sapiens
cgtctcttacgtctgcggaagtgcagctgcctcagttcttagcgcaggctaaaacactgtcttatgaaccattatcttcagcaactgtttccactgggagccttttaagt

SEQ ID NO: 6885 - DNA, 100 bp, Homo sapiens
ctgatttagaaggaggttcaggctacggtgagccgaaggaccctgatgcttggtgtgacctgagtaaatttgacctccctgaggaaccatctgcagagga

SEQ ID NO: 6886 - DNA, 83 bp, Homo sapiens
cacgctgccgttcggcgatgtggagcgcagttgtgtagcagttgagtaatgctggttagctgttaaggtggcgtgttgcagtg

SEQ ID NO: 6887 - DNA, 97 bp, Homo sapiens
cggcgacagtggcggcggcgccatggcagggcttgcaggtgctacctttttacccacacttaagtgacgcaaaatgcccttcaatggcgagaagcag

SEQ ID NO: 6888 - DNA, 82 bp, Homo sapiens
cgcagccgtagacaccagctccgaaatcaccaccaaggcataatcaccagcaacacccgggacaataatacgggggccacct

SEQ ID NO: 6889 - DNA, 100 bp, Homo sapiens
gttttaggggccagcagatgcaggaaaatttcgatattgaagtgtcaaaatccatagatggaaaagatggaactgatgaggagtttcaacagagacaggc

SEQ ID NO: 6890 - DNA, 43 bp, Homo sapiens
gaagctcaaagagtccgtgggcagtggtctcggaaagagggtc

SEQ ID NO: 6891 - DNA, 98 bp, Homo sapiens
gggaagtgactgggcggtgccggcgccggagacgatgccgttgctccgtccatgccacatcggtagcagcctcaagagtggagcaggcactgtcggaa

SEQ ID NO: 6892 - DNA, 75 bp, Homo sapiens
agatgacaccacctttgatgagtttcgctattcaaattggcttgacaagttgtatatggtggtgggaactttggc

SEQ ID NO: 6893 - DNA, 82 bp, Homo sapiens
aaaagcagcgaacctcgagaccaacgtggaggagctgtgggtggaaggctactgcagcactggggtgtcagttgttggtccg

SEQ ID NO: 6894 - DNA, 115 bp, Homo sapiens
gtaatagccagacatgagtatacattcagtatcatggatgaatttcagttggttagtctgctgctaattggaattgctgcgtggggcattggcttcgggctgatttccagtctcc

SEQ ID NO: 6895 - DNA, 100 bp, Homo sapiens
caaggccttccagtttggaactcctcccgaggaaccagtggtgacagctgaggccatgtgagtaggatcctgaatgaggctttatctctggctgttcgtc

SEQ ID NO: 6896 - DNA, 75 bp, Homo sapiens
atccgctgctcgcacgggagccagctgggtggattgaaagaaggtggcaagaggaagaagcagaagcagagagag

SEQ ID NO: 6897 - DNA, 50 bp, Homo sapiens
aagaactacaggaatttctactgaagtcctggaaagacaagcatcatgcc

SEQ ID NO: 6898 - DNA, 101 bp, Homo sapiens
tggctgttgagtgaagaaaaagagcaggaagtcattacatggtttaagaattgtttaagctgcatcaatggagcacatacagggagcttggaagacgatca

SEQ ID NO: 6899 - DNA, 75 bp, Homo sapiens
cttcagttgaaatcgtctccaggttgacatcatggacatatgtgagtccatcctggagaggaagcggcatgacag

SEQ ID NO: 6900 - DNA, 74 bp, Homo sapiens
ccagaaaacctgcagaagaactggcttcgggaattttaccagaacactatggctatgcatcctccaacgtcagc

SEQ ID NO: 6901 - DNA, 87 bp, Homo sapiens
gagcctagatcctgtgctttactctgaagactcgaatcccagtcagaagttccagcctgccactgttctctgatgccatgccagcac

SEQ ID NO: 6902 - DNA, 83 bp, Homo sapiens
ctggaatgatgatgtctcatatgtctcaggcttccatgcagcctgccttaccgaatttacatagtacatgacgaagttaagga

SEQ ID NO: 6903 - DNA, 98 bp, Homo sapiens
ccaaggcctcaagattgacctagagtctattatcctcccagtccacaacgctgaaccgtggctggacgaatgtttgaggtctgttttgcaacaggact

SEQ ID NO: 6904 - DNA, 74 bp, Homo sapiens
gcctgcagaggtgccgacatggggcttaagatgtcctgcctgaaaggcaatagccctctggaacaagacaattc

SEQ ID NO: 6905 - DNA, 48 bp, Homo sapiens
gccctcaacctgctttacaccgtggcagtagagaagagcatcacagaa

SEQ ID NO: 6906 - DNA, 50 bp, Homo sapiens
caggagcccggccccggagccaccggacatggtccggcgaggagagatca

SEQ ID NO: 6907 - DNA, 101 bp, Homo sapiens
gcagatacggccaacaggccaaagcctatggtggacccttcatgcatcacacccatccagctggctcctatgaaggtccagagccaaacccgtcactgacc

SEQ ID NO: 6908 - DNA, 102 bp, Homo sapiens
ctcgaattcccagagttcgaggtggtgggactcaccgctctggccagggtgcttttggaaacatcttcatcataaaagaggagaaacagataaaagacaaat

SEQ ID NO: 6909 - DNA, 51 bp, Homo sapiens
cagcttttggcagcatgaaagttagcaattcacaatgacatcctttcaaga

SEQ ID NO: 6910 - DNA, 100 bp, Homo sapiens
ccgattggttcacgtggaccagagggccctcctggtaaacctggggaagatggtgaacctggtctcagaggtgaaattggtaaccctggcagagatggtg

SEQ ID NO: 6911 - DNA, 100 bp, Homo sapiens
tgttgctgccgccatacgcgctctccctgtttaggtccagggagtcggtagtaagggatggcgggacgtcaccacctttttttcggggaaagcagagggc

SEQ ID NO: 6912 - DNA, 101 bp, Homo sapiens
ggagggcaagaagggcaagaagaaatgggacgtcggtcatcagatactgaagaagaaagcagaagcaagagaaaaaagaaacaccgtagacggtcctcctc

SEQ ID NO: 6913 - DNA, 98 bp, Homo sapiens
ctaagactcagcactgttgcgggatgatagtgtggatcctttctggccagcgttacactgttttatggtgattctggatcgccttggatctaaggtct

SEQ ID NO: 6914 - DNA, 75 bp, Homo sapiens
attttgatgaacaatattgaacgctatcttaaggcatgtctgactcagggaatgaccttatatagctacggcatg

SEQ ID NO: 6915 - DNA, 96 bp, Homo sapiens
cctctgccctgcacgtggctgctgccaagggctacattgaggtgatgaggacccttgaacatctgtgaagaaatgactattctgcatggaggcttc

SEQ ID NO: 6916 - DNA, 51 bp, Homo sapiens
tcttaggctccaaccaaggctctggttgtgggcatttttgcaggatttggg

SEQ ID NO: 6917 - DNA, 52 bp, Homo sapiens
ctgggaacaaatgctggatccaacaagtggaaggtgatatcaagaagcctct

SEQ ID NO: 6918 - DNA, 74 bp, Homo sapiens
gagaattggccaacaccaagtgaattagtgaacactggaatctccagtctatgtgctgaagaagcagcagccca

SEQ ID NO: 6919 - DNA, 85 bp, Homo sapiens
cttcttgcatgcgagggaccattgcgttcaacagagtttggaaaagatttctaaactggagcaggaaaaagaacattggatgttg

SEQ ID NO: 6920 - DNA, 100 bp, Homo sapiens
ccttttctctctctcctctggcaggatgaggcgtgcaggcctgggtgattcgcaaggggtggctcaccatcagcaacattggcatcatgaaaggcggctc

SEQ ID NO: 6921 - DNA, 142 bp, Homo sapiens
cactcctcccggaggcgacatggggcacccggtgtaccgcggcgagaagccccagctgcactacgcggcttgcagaaggggaacaaatcttatctggtggagtgtttaataagcagaaaagccatgatgatattgttactga

SEQ ID NO: 6922 - DNA, 100 bp, Homo sapiens
cagtgatagtgggatttgaacacctgaagctccccatcaagggaatgaacttcacagcatgcccaagagaatcgtaaatgcaaaaattgcttgccttgac

SEQ ID NO: 6923 - DNA, 83 bp, Homo sapiens
agcaccgcagcaaccactccagaaactttccctccttcaggcatatcacacctgaaaaattttatgtggaagcttgtgatgat

SEQ ID NO: 6924 - DNA, 90 bp, Homo sapiens
gaaggtggtggacctgctggcgcaggacgccgacatcgtgtgccgctgccagatcggtcgcttggttatcggacagaatggaatcctctc

SEQ ID NO: 6925 - DNA, 87 bp, Homo sapiens
tcaccaggaagtttgtgcatgaagacagcagccacatcattgctttatgtgaaaactttagaaactgttcctttggagaggaaaaag

SEQ ID NO: 6926 - DNA, 75 bp, Homo sapiens
gctcatctggaattttgccgatttcatgactaaccagtgtgctgcgacaagagactttggacaaaaattgacttg

SEQ ID NO: 6927 - DNA, 90 bp, Homo sapiens
gagcccgtcattagcgtgaaaaccacaagcaggtccaaagagagacctcagaaggggaagtttactcccagtcccgtggacttcacgatt

SEQ ID NO: 6928 - DNA, 82 bp, Homo sapiens
agagcctcgcctttgccgatccgccgcccgtccacacccgccgccaggatttttagactctgaggagcagttggagctaatc

SEQ ID NO: 6929 - DNA, 80 bp, Homo sapiens
atgctgtcaacaagaagagcagttcccaggatctgcataaaggtgaacacacagtgttcatcccctcaggaggacacagc

SEQ ID NO: 6930 - DNA, 100 bp, Homo sapiens
gcgagaagctgccgccgaacgacaggacgttggggcggcctggctccctcaggaacaagactgccaatggagactgccgcagagacccccgggagcggag

SEQ ID NO: 6931 - DNA, 96 bp, Homo sapiens
gactggtgacttcacttttgagtgcaactgccttccagccaagcaaccgacataatggaaacatcagggtggaagtccatgattcagtctcaccct

SEQ ID NO: 6932 - DNA, 100 bp, Homo sapiens
gctcttgaggttcacagatgatacctttgatccagaacttgcagcaacaatagacacggcatcagcgaggagatacgcatcctctaaccttagatgaaat

SEQ ID NO: 6933 - DNA, 100 bp, Homo sapiens
cagacccggaggctgcagaaagacatgaagaagagcaccgacgcagacctggggcgaactttctgaccaagtatacaactacccagagggcctaggagaa

SEQ ID NO: 6934 - DNA, 124 bp, Homo sapiens
cgggactttgccgagaaggagttgtttcccattgcagcccaggtggataaggaacatctcttcccagcggctcaggtaatcacagacctggaggagcagctaaaccagctgaccgaggacaacg

SEQ ID NO: 6935 - DNA, 100 bp, Homo sapiens
gcaggatgtgagtttgaatctatggaatgtctacagcaagatggatcctatgtctctggagagtttgctttcagattgcaagtgcgcccagtactggcca

SEQ ID NO: 6936 - DNA, 100 bp, Homo sapiens
actcgccctcctatgtcctgtacaggagccagcaccgctctttgaccttgccatgcttgccttagatagtccagagagtggctggacagaggaagatggt

SEQ ID NO: 6937 - DNA, 105 bp, Homo sapiens
gccggctggatgggaagttaatgtttacggcgaagtctactcaacgtttccaagaaacgggtatgcaggagattagaagccagtgggcatgagcgtggctgccac

SEQ ID NO: 6938 - DNA, 102 bp, Homo sapiens
gtccgaagcaaggatttccgggactacctcatgagtgcttttatgggaccaacgctgggtggatttctgtatgagaaaattggttttgaatgggcagcagct

SEQ ID NO: 6939 - DNA, 90 bp, Homo sapiens
gtccttgtggacgtggagaggggccgaaccgtgaagggctggaggccccggcggctagtctgcagatctccaggggagcccaccagccta

SEQ ID NO: 6940 - DNA, 100 bp, Homo sapiens
agctggccaaggagttctcgattaaagaggaaggggcagtgctcacatttctgggcagcaagccctggatgaaaacatggacctcttggaaggtataact

SEQ ID NO: 6941 - DNA, 83 bp, Homo sapiens
ggctcgatgttaccctcatattttcagcactaattttagggacaacataacgatgcacggatgaaccttgccattgctctgac

SEQ ID NO: 6942 - DNA, 50 bp, Homo sapiens
ggagagggcaatgcctgcccaggaatgtatcctgtcaggtataatgtcag

SEQ ID NO: 6943 - DNA, 90 bp, Homo sapiens
atgaattcaacctccagaagatgatggtgatggtaacagcctcaggcaagtgggtaaaggaagaagccccagatatactgtgccttcaag

SEQ ID NO: 6944 - DNA, 100 bp, Homo sapiens
aactatccaggcctactcctccatcattggactgcagtcccaccagggtggagagattcaaccagttagcgtgaaagttggagataaagttcttctccca

SEQ ID NO: 6945 - DNA, 83 bp, Homo sapiens
gttacctctcatcattgtgttaatggtgaagcacagcgattcccgggtattccctcagcggatactacacccatccatttcaa

SEQ ID NO: 6946 - DNA, 100 bp, Homo sapiens
tcacatcctgcccaagtgcaagctggccagggacctcaaggaagcttatgacagtttaattggttggggtcagataagaagaggagtgacaatcaagcca

SEQ ID NO: 6947 - DNA, 98 bp, Homo sapiens
gacaaagccaaccgatacttttctccaaattttaagctcatccgaatatggaggctggaccacctgagtcaggagaatctacagatgccctcaagctt

SEQ ID NO: 6948 - DNA, 83 bp, Homo sapiens
ctacaccctcatgagggtctgcaagcagatgataaagaaatctcctgcaaagaagctgagccatgcaattagtaaatctttgg

SEQ ID NO: 6949 - DNA, 110 bp, Homo sapiens
acgaacaccatcgtttgctgaacacttgaaacatgatgaaagagccacagagttggcagaactgtttgaaaatgctgtgtcagcttcctctggtgcaaccagcaagtctt

SEQ ID NO: 6950 - DNA, 82 bp, Homo sapiens
ctctggatgatgcagaagaggagtcctttaggaaggagcatctttccttgaagaagtacattattgacattgtggttgaaag

SEQ ID NO: 6951 - DNA, 100 bp, Homo sapiens
cttccccccgcgcctctcttcgcctcgcctcgggacccgcggtccccgctcttgctggagggagcctgcgagcaaacgaggtggaaactggagtgcacaa

SEQ ID NO: 6952 - DNA, 100 bp, Homo sapiens
acagaattacggttctctaagtatttgcttgcagggggatatgagactttctactcggaatatcctgagtgttgcgtggatgtaaaacccatttcacaag

SEQ ID NO: 6953 - DNA, 89 bp, Homo sapiens
ctaagaacctggaacaccctattcagtggctgtacatcacctgcagtctgcgaaacttgtatctgttttaaagaaggcacttgaaatta

SEQ ID NO: 6954 - DNA, 82 bp, Homo sapiens
gggattatcagcatagaaagaaagccttgtaaccatcaggtagatacagcaccaacgcctgcttgaatttcttgaaactgtg

SEQ ID NO: 6955 - DNA, 99 bp, Homo sapiens
gtgtcttccccagctctgcagccacatactatccgtttgttcaggaaccaccagtgacagaggcccaatgtaaaggctgttgctactgctgtggaacag

SEQ ID NO: 6956 - DNA, 80 bp, Homo sapiens
ggctggaccctgagccctgggacctctgaagtgaacactgcagggccatttggtcagcccaaggccaaccccactgtcac

SEQ ID NO: 6957 - DNA, 71 bp, Homo sapiens
gcttttctgtggactcctcttctacatcaacttggctgaccattggaaagtaagcactatcctttgtactc

SEQ ID NO: 6958 - DNA, 75 bp, Homo sapiens
gaaagattgaaaagtagttaatggcagtggtggtatgaaggtccacgctgcttttatgagctgtaacactcaccg

SEQ ID NO: 6959 - DNA, 75 bp, Homo sapiens
ctctaacatgtcagcgttattgtaatgcaagtgttctgaagacgcagatcccgatattaacttaccaaggtggat

SEQ ID NO: 6960 - DNA, 100 bp, Homo sapiens
cggatggtgagtgtgtcggggggcttggcggcttttctcctcagttttctggagtgctttggaggagagttttatgagcaatatgatgatgatgaaattg

SEQ ID NO: 6961 - DNA, 51 bp, Homo sapiens
ggattccaagtaactcttatttgcaagtgaacgtgatactcgcaaactgtg

SEQ ID NO: 6962 - DNA, 88 bp, Homo sapiens
tcatcctacagggcccctgtactgcccagaggagaaggaggcttgacacaactctcatagactttactgacatgaagtgccaacgagg

SEQ ID NO: 6963 - DNA, 51 bp, Homo sapiens
aaacccagagctcctgtcaaccagccaggatacattaattgtttggtcaga

SEQ ID NO: 6964 - DNA, 100 bp, Homo sapiens
tgatattgatattattacagcttcatatgcaccagaaggagatgaagatattcttgtgactactccaaatcgactaatctatttattaaagcaagatccc

SEQ ID NO: 6965 - DNA, 73 bp, Homo sapiens
ggagagaaaatggcgtccacggatgaagcgccctcagttcagcaagccgccaggaggccaccacaagacccag

SEQ ID NO: 6966 - DNA, 125 bp, Homo sapiens
ttcagatcagtagaagcagatttcttttggatagtgatgggaaaagcaggttcaggagaagtggcacctggtggaggacctgtcgcgactgctgccggagccaggcccgagcgactctccgggcc

SEQ ID NO: 6967 - DNA, 73 bp, Homo sapiens
cactgggccatggaccctccccaggtggtggaagatggatatgaattttttgctaaacgacagttggtaacct

SEQ ID NO: 6968 - DNA, 90 bp, Homo sapiens
cagccttggtgctcaggtgccagatgcaaagagcactctgctatttggtcctgaagcagtacacagaagcagtgaaggactgcacagaag

SEQ ID NO: 6969 - DNA, 82 bp, Homo sapiens
tggaatggcaagcgcagcaacaacagagagcacgtgggtcccctggaagtgacgctgactcagccagtgaggagcgggcctg

SEQ ID NO: 6970 - DNA, 100 bp, Homo sapiens
gccctgagctcccattaggagccgctggctgcggcagcaggggactagcgtgagagttggtagctggcagtgttgtgatggcttttgaagaagtatgccc

SEQ ID NO: 6971 - DNA, 100 bp, Homo sapiens
ggacgctctcagctctcggcgcacggcccagtgaggtcaccaagaattccctggagaaaatccttccacagctgaaatgccatttcacctggaacttatt

SEQ ID NO: 6972 - DNA, 87 bp, Homo sapiens
ggcagagaagatgctaactaactggttcaccttcctcttgtataagttcctcaagtctgaagttgcagccggagtgaagaagagcgg

SEQ ID NO: 6973 - DNA, 75 bp, Homo sapiens
gcagggcattgagcggcgttttctgaaagctccacttggactctgcacttgtccaagagaagaatccagagaaat

SEQ ID NO: 6974 - DNA, 100 bp, Homo sapiens
ttctgctctcagtgtcccggacttcagatttctccacccaggtgaactcctccctcacctccccgacggggcgaggctccatggctgccccctcgctgca

SEQ ID NO: 6975 - DNA, 101 bp, Homo sapiens
ccgacctgcagcgcccggctgcctcgcactccgcctcccccggctcagcccccggccgcggcgggacccgaggttcatgaaccatcgagctccagccaatg

SEQ ID NO: 6976 - DNA, 100 bp, Homo sapiens
tggtccctgttcaacaccctcttcttgaactggtgctgtctgggcttcatagcattcgcctactccgtgaaggtctcctctgagcctccggcctccataa

SEQ ID NO: 6977 - DNA, 75 bp, Homo sapiens
ataccacccagacagactgctataacaatctagctgttcgatcctttggtacagaagacagaccgacagatcgtc

SEQ ID NO: 6978 - DNA, 50 bp, Homo sapiens
gggcaccgagggctaccacgttctgcggctctgcttatgataatgtcaac

SEQ ID NO: 6979 - DNA, 100 bp, Homo sapiens
cttcacacagggttctggggaaaacaaggaagaggcttcgtgacggagttatcagagacattgagaggcaaattcggaaaaaagaaaacattcgtctttt

SEQ ID NO: 6980 - DNA, 100 bp, Homo sapiens
catctggatggagaagaggcaccgaggcccagtaaagtcatcacctggccttggtcctgtggaactggcagctgtcattgctggaccagtgtgcttcgtc

SEQ ID NO: 6981 - DNA, 82 bp, Homo sapiens
cccaggtgtaagcgcagaaagcaggcgaacccgcggcgcaataacgctgagcgggctttggacaccatgaactttgatgtga

SEQ ID NO: 6982 - DNA, 100 bp, Homo sapiens
caactatttatgccaacaccatcaatacttttcggattaaatctggaaatgaaaatggagagttctacctacgagaacgaatgatcacacactttgaaag

SEQ ID NO: 6983 - DNA, 98 bp, Homo sapiens
ctggcgcaggacgccgacatcgtgtgccgctgccaggccaaagaggtgctgaaaaaatatttggagtccaaggaggatgtggctgatgcacttctaca

SEQ ID NO: 6984 - DNA, 82 bp, Homo sapiens
gcaagaagttaaccaagtaaaacagcatcggaacaccaggtgagaagccctaccactgcaactgggacggctgcggctggaa

SEQ ID NO: 6985 - DNA, 75 bp, Homo sapiens
gccaaagctgaccatccatggggacctgtactatgaggtcctggacccaagccagaagcctctgcaaagcttcct

SEQ ID NO: 6986 - DNA, 50 bp, Homo sapiens
aaaagcgagaccgcgtgcgaggaccgtgaatgagttcacggtgatcagga

SEQ ID NO: 6987 - DNA, 100 bp, Homo sapiens
acgggtaacttggcaatgaatgacagcactgtagaacagctttatgaaacagcttgcttcctacagagatctgagtagaaacctgatacatgaaattcac

SEQ ID NO: 6988 - DNA, 96 bp, Homo sapiens
ctgaagcggaggcggccgctgctcgagggagaatgaagttgaagaggtaaaagaggagggtccaaaagagatgactttggatgagtggaaggctat

SEQ ID NO: 6989 - DNA, 74 bp, Homo sapiens
agtcaaggcttggttcaagccagatagcacctgaggacagaacatatcagcaattaccagctctggctgggtcg

SEQ ID NO: 6990 - DNA, 101 bp, Homo sapiens
cgcagtggtcgcttcttctccttggtggtttttccccatcatcggccacatgggcatctgcacatccacaggagtcattcgggacttcgcgggcccctact

SEQ ID NO: 6991 - DNA, 100 bp, Homo sapiens
ctgacaaaaacaatcaaatcattacttgatgtgaaaatgattaaccatgattcagaaaaggatatgtgaacttttgcaaagcggagccataatgaataaa

SEQ ID NO: 6992 - DNA, 83 bp, Homo sapiens
ctttggagaaaccaccgtgctggaccgcttttacaatgcagcaattctgtggtgttcttggtcacacatttatggagtttctg

SEQ ID NO: 6993 - DNA, 76 bp, Homo sapiens
cagacccacttctacctgggcagtgccaacatggactggcgttcactgacccaggctccagggagcagtgtcaggg

SEQ ID NO: 6994 - DNA, 75 bp, Homo sapiens
tgcacccattccagtggtgtaacgcaaccatgtccaagggacctgcagttggtattgatcttggcaccacctact

SEQ ID NO: 6995 - DNA, 74 bp, Homo sapiens
gtgttctgctgtcttcatcagcgtgggccgcgggaggctgtaggagtgcaattggaacctgagcgcttggtcaa

SEQ ID NO: 6996 - DNA, 96 bp, Homo sapiens
attttttctcatggatgttcttcttcgagtatttgtagaaggcccttacgtcgtcctgactcatctgatgaccgttatgtaatgacaaaacatgcc

SEQ ID NO: 6997 - DNA, 121 bp, Homo sapiens
agcaggacttcatccaggcctacgaggaggtgcgcgagaagtacaaaggttaatttggagtggcccctggagtcagtttcctacaccatccgaggccccacccagcacgagctacagcctc

SEQ ID NO: 6998 - DNA, 100 bp, Homo sapiens
ggtttgtatggacaggcttgtccatctgtaacttcattaaggaaaagctgtttttctggcaagagataaacatcacctctctgacatctgccatctgatc

SEQ ID NO: 6999 - DNA, 50 bp, Homo sapiens
ccctgcttggagacggacttgcttccgacaccattcgcttttcacccaag

SEQ ID NO: 7000 - DNA, 90 bp, Homo sapiens
tggctttgtagctcgctcaagatggcggcgcagccaccccgcgggatacgcctcagcgcgcagggagagcaacaagccccggccctcaga

SEQ ID NO: 7001 - DNA, 126 bp, Homo sapiens
tgctgcaccgcggcgccgacatcaattacgccaatgtggacggactcactgccctgcaccaggtactaggttttgacaagcttgcatcatgcgtgagtataagctagtcgttcttggctcaggagg

SEQ ID NO: 7002 - DNA, 100 bp, Homo sapiens
gagaaagccaagatccactaccggaagaagaaacagctcatggttctacaagctgcacgagcggaggtgtgagcccattgccatgacagtgcctcgaaag

SEQ ID NO: 7003 - DNA, 100 bp, Homo sapiens
gctgatcttcgccaaactgtggagcctcttctgtaaccaagcaattctgtggtgttcttggtcacacatttatggagtttctgaagggcagtggagatta

SEQ ID NO: 7004 - DNA, 100 bp, Homo sapiens
gcagttggaaatgatggacttcaagaaagagacagaatggtccgagcatgcattgccattatctgtgaactaggttccaatattgaaaaatctgtaaaag

SEQ ID NO: 7005 - DNA, 100 bp, Homo sapiens
atcggatccttctggagtccgtgtgccagcaacagagctgggtccgggtgtacggttcctacaaacttgatgacttttgagtagaagcctgagaaaaaaa

SEQ ID NO: 7006 - DNA, 102 bp, Homo sapiens
cacgcagtccgagcgggagccgagccgggcggggcgagggcagctccgtctacaaataagaaacctcgaaaatctccaggtgagaagagcagaattgaagct

SEQ ID NO: 7007 - DNA, 89 bp, Homo sapiens
gttacctgcaggtattgggagatccacagctaagacgccaggacccactggaagcctagaaatggctgttttggagtcagcggaagatc

SEQ ID NO: 7008 - DNA, 82 bp, Homo sapiens
actacctgcagccgcagctggactggcaggcccgagggcgagaagaagaaaggagggcgcgggctaatgaccgagaatacaa

SEQ ID NO: 7009 - DNA, 88 bp, Homo sapiens
aggagggaggggaaacacaaagccggctacgcgctgcgagctgctcagccaggaactgagatctttaatctgccagcagttactacgt

SEQ ID NO: 7010 - DNA, 83 bp, Homo sapiens
gcctgggggcccgagaagcttcctctcaggctaagtgctatttatggaggtacctatatgctgaataaacccattgaagaaat

SEQ ID NO: 7011 - DNA, 96 bp, Homo sapiens
gaccaccgaagccacgctccggatggaaaacgtggacgtgaaggaggaatggcaggacgaagatcttcccagaatcagcatgattcttcagaggct

SEQ ID NO: 7012 - DNA, 116 bp, Homo sapiens
ttcagtgtgttgacaataatcagtctgttctagtatctgcacatacctcagcgggaaaaacagtatgcgccgagcctccccatggccacccatggaccagtcggcattcacttcct

SEQ ID NO: 7013 - DNA, 100 bp, Homo sapiens
gggacgttggggagggggctgtgccgggcggagagaactcagcgaggattctgagattgcagagggaatggcatacatcgagcggaagaactacattcac

SEQ ID NO: 7014 - DNA, 73 bp, Homo sapiens
ggctctatcaaggggctggtgtactccagcaacttccagacttaattcagtgcacaaatgagatgaatgtgaa

SEQ ID NO: 7015 - DNA, 104 bp, Homo sapiens
aaggccacaactctgcagtggaccacagcattcctgaaatacatccaggaaagacatggagattctcttaaaaaggctattcaagatctctggcagtggaggaa

SEQ ID NO: 7016 - DNA, 100 bp, Homo sapiens
ctcagcagagaacccagtcaagtgtgtccagacgtccaacctacagaactgattctgagtaacaataagatatccgagctgaagaatggctcattttctg

SEQ ID NO: 7017 - DNA, 90 bp, Homo sapiens
cgagcagctctgcagttaatgcacgtattttaaactcccgggcctgcggacgctatgcacaggtaacagttgacaaatgggaacctttgt

SEQ ID NO: 7018 - DNA, 83 bp, Homo sapiens
cctcgcgccggctatggccgtgccctggggctgagccctcagatgcttcaggactgccccaaggcccgcagggaggtggagct

SEQ ID NO: 7019 - DNA, 82 bp, Homo sapiens
gctgtgcgagagcctcctcacttggggagtgcatccgccccaacccttttccccctcgtctcctgtgagaattccccgtcgg

SEQ ID NO: 7020 - DNA, 98 bp, Homo sapiens
ggagacgagaccagaggccgaactcgggttctgacaagatggccgggctgccccgcaggatcatcaagagcgtgcagcatgagaacacctaccgggac

SEQ ID NO: 7021 - DNA, 90 bp, Homo sapiens
aggtgatgcaagcaacagccactagtgggtttgccagtggaactgataccccaatgtccttctttgactttgtggttgatcctcattctt

SEQ ID NO: 7022 - DNA, 83 bp, Homo sapiens
agcagaagctggtggaccagaacatcttctccttctacctgagcaggttatcagtgagctgaatggaaaaaacattgaagacg

SEQ ID NO: 7023 - DNA, 82 bp, Homo sapiens
aggaatgtgatgctggaaaactttaggaacctgaattcattgcgtaaagctgtagtgatcctgtgcagcgaattgagcagtg

SEQ ID NO: 7024 - DNA, 82 bp, Homo sapiens
cgcgcgctgagggtctcggggcgggcgccgcgggacctctccgggccatgggtgtgatcccagcagcccctacatccaccca

SEQ ID NO: 7025 - DNA, 82 bp, Homo sapiens
ctggggcggccggccaggaaccacccgttaagcaaaatgatgcttcaacacccaggccaggtctctgcctcggaagtgagtg

SEQ ID NO: 7026 - DNA, 100 bp, Homo sapiens
atgctggtggctctacccagaattcaattaaagtggctcaggaaagaccacagcaagattctttcattcgtctcctcctagcctgggggaccaggctcga

SEQ ID NO: 7027 - DNA, 100 bp, Homo sapiens
actccccagaatacaccttgcttctgtagaccagctccaacaggattccatggtagctgggatgttagggctcaggcaccttggaagttgttttcaacca

SEQ ID NO: 7028 - DNA, 101 bp, Homo sapiens
ggcaggaggacgtggaggaccattatgagatgggggaggagctgggcagctggcgtgcggccaggatgggcagctgaagggcttcgcggtgctggagtatg

SEQ ID NO: 7029 - DNA, 87 bp, Homo sapiens
cggcgcctgccttggcgctggccggctacatcgagctacagagggccggagctggagatgtggtctctgggagtcactctgtacacg

SEQ ID NO: 7030 - DNA, 109 bp, Homo sapiens
gacgtgttggacacgctgactttgtaggctccgccaagaggcgccgcaggagaaaaacgtttcttcatttcaactcaaacttgctgctaaagcgcctaaatctgaaaag

SEQ ID NO: 7031 - DNA, 75 bp, Homo sapiens
ggcggagtagcaagtggccatggggagcctcagcggtctgcgcctggcagcaggacccatccattttcacagtat

SEQ ID NO: 7032 - DNA, 75 bp, Homo sapiens
cggagaccactgttcaaggccacaggaatcatttccagcaatggaaagagatggaaggagatccggcgtttctcc

SEQ ID NO: 7033 - DNA, 75 bp, Homo sapiens
ctctgggggattcgtgcgcggtaagaagctgcgcggtagcgcggtgaggtgaaatccttaaccctgtttgtcacc

SEQ ID NO: 7034 - DNA, 100 bp, Homo sapiens
ggttattctgacattgacccgaagggagcaagaatgtttctcaggagatatcctctgagagccaagcaaagaacattaaggaaggaaggaggaatgaggc

SEQ ID NO: 7035 - DNA, 87 bp, Homo sapiens
gcacttcttttttgagaaaggaaggaatatatcctgactgattattccagttcttcagacaaacaatggtccaagtctaacaggatt

SEQ ID NO: 7036 - DNA, 100 bp, Homo sapiens
gtccaggccttccagtacacagacgagcatggggaagtacgtaggaagcctggacgtgccaaggcccaacagcagggtggagatcgtggctgccatgcgc

SEQ ID NO: 7037 - DNA, 108 bp, Homo sapiens
gtcaccgtccagagccaaggtccagggggcaaggtcgtggatgaaaactttcggaagagaaagttgcctgtggtaagttcagttgttaaagtaaaaaaattcaatcat

SEQ ID NO: 7038 - DNA, 100 bp, Homo sapiens
gcagaatgcagagattttgttttgaattgtgaaatacttccacctcttttagagatatgtgaacttttgcaaagcggagccataatgaataaattttacc

SEQ ID NO: 7039 - DNA, 100 bp, Homo sapiens
gggaagtaaaaggtgaagccaagaacagcattactgattcccaaatggatgatgttgaagttgtttatacaattggcagagtctcgctctgttgcccagg

SEQ ID NO: 7040 - DNA, 83 bp, Homo sapiens
ccgcatcgtggagaacctgcagtcctttaacgagatcactgctatgagccagacccagggccctccagattaccccaggtttg

SEQ ID NO: 7041 - DNA, 96 bp, Homo sapiens
cagcggggtcacccctcagcacatggtgggggccacaccatttgccgtggccaggctagaggtgaaagaacttgtcctggacaacagtcggtcgaa

SEQ ID NO: 7042 - DNA, 98 bp, Homo sapiens
tctgctgcggcgcggggaccgctgtgctctcggccggctgcgtgcacttttcctacaaagcatcgtgtgagatccgcgtgcttatgctcctgtactct

SEQ ID NO: 7043 - DNA, 51 bp, Homo sapiens
caaagatgaccgtcttaacaaagaccggggatgttcgtctaaccccagaag

SEQ ID NO: 7044 - DNA, 90 bp, Homo sapiens
gtgatgtgtggaagcagctaaaagaggagaagaaagtccggttggatcagttccatgacaagaccccttatacgattatgtttggtccag

SEQ ID NO: 7045 - DNA, 100 bp, Homo sapiens
gaaagatgatgcctagtaaattacagaagaacaaacagagactgcgaaacgatcctctcaatcaaaataaggctgatatccccaataggtttgaaatgaa

SEQ ID NO: 7046 - DNA, 88 bp, Homo sapiens
tgtttcctaccaggtcacacactgttgcagcacaggagattcctgtcaacgtccgattctgcctcgaaggcatggaggagtcaggctc

SEQ ID NO: 7047 - DNA, 75 bp, Homo sapiens
tgccgtcgccgccgccaccatgcccaagagaaaggtcctcctcgactggattaatgacgtgctggtggaggagag

SEQ ID NO: 7048 - DNA, 75 bp, Homo sapiens
tccctgggaatttggaggtgggttcgaaaaagacaagaggaccctgccttggtgtgagagtgagggaagaggaag

SEQ ID NO: 7049 - DNA, 117 bp, Homo sapiens
caccagcaggagtgctgccagaaatttgaacaactttccgaatctgcaaaagaagacgcaaacatgcagatctttgtgaagaccctcactggcaaaaccatcacccttgaggtcgag

SEQ ID NO: 7050 - DNA, 50 bp, Homo sapiens
gactccctggaaacctagaaatggttctgatctacaatggccaactggac

SEQ ID NO: 7051 - DNA, 73 bp, Homo sapiens
gatttgttaaggattccaagtaactcttatttgattcttacgctgtatgacagtattaatgttattgacgtaa

SEQ ID NO: 7052 - DNA, 100 bp, Homo sapiens
tagcctgggctgtctggaaatctgaggatgtgatcttcgtggtggaaagctaaattttaaaaccaccccaatggatgcagacagtgatgttgcattggac

SEQ ID NO: 7053 - DNA, 88 bp, Homo sapiens
ctcatatagaagacccagaggacactaaccaaggtgaccattgtgaggtagatattttgttctaattttccagatgaggaagctgaga

SEQ ID NO: 7054 - DNA, 83 bp, Homo sapiens
cctccctcagcttccgccccaaaagcaagatgatgaagtgacgactgttcaggttaaagagcaagaccagagcgtcctggtgc

SEQ ID NO: 7055 - DNA, 100 bp, Homo sapiens
aggatatagaccaacacagcctggaccaccacagccaccccagcagaggccttatggatatgaccaggcggcagcagagacctccggggggcaacaagcc

SEQ ID NO: 7056 - DNA, 51 bp, Homo sapiens
ctagaactcactgaagcagggctcaaggcagctgcagagactgcttatgat

SEQ ID NO: 7057 - DNA, 98 bp, Homo sapiens
gacaacgcgtacgagttcaacctcagcgctctgaacttacctgttgattcggtggtaattacagaatctgatgcacagagaacaatgtaccctggaag

SEQ ID NO: 7058 - DNA, 82 bp, Homo sapiens
gaggtgtcacggctgcggatgctgctcaaggccaagatggacgccgagcaggatcccagggaccctcacaatgatcccaatg

SEQ ID NO: 7059 - DNA, 82 bp, Homo sapiens
cccacctgtggactctgaccgcaaacaaggagagcctactgagcagcctgagtgggtgtattttgacctacgaattggagat

SEQ ID NO: 7060 - DNA, 50 bp, Homo sapiens
caagaatgaagccacggaccttcacggctggaatgcagtggcgcgatctc

SEQ ID NO: 7061 - DNA, 100 bp, Homo sapiens
cgtaaaaacaacaactactagtcggccgaactccaagcgtgaccagctttctgttgggaacactcaaaggtggaggaggaactgcaggagcaagacttct

SEQ ID NO: 7062 - DNA, 100 bp, Homo sapiens
cgcgggacggctctgtaggaaggaacttggttccccctccctcagcttccgccccaaaagatttgggccaggcttagtcatctattggtatggatttatc

SEQ ID NO: 7063 - DNA, 74 bp, Homo sapiens
tacagaggagtttcatggcactaagtcaagatgaagacagaatctatgattcaaaaaaatgttgctatacatgt

SEQ ID NO: 7064 - DNA, 121 bp, Homo sapiens
ctggaacttgtcaaatgagtctatttgcttctcccacaagttctgaagagcaaaagcacagaaatggactatcaaatgccccatctgctttgatatgattgaagaagcatacatgacaaaa

SEQ ID NO: 7065 - DNA, 83 bp, Homo sapiens
tgcctgtggctacagcgacccggaggatgagagcaaggttgtggcagcactgcctgaaggtatgagaccagattctaatcttt

SEQ ID NO: 7066 - DNA, 101 bp, Homo sapiens
taagaagatggccaagcaaggccagatgttgtggcaatttatgactatacaaaagacaaggaagatgagctgtcctttcaggaaggagccattatttatgt

SEQ ID NO: 7067 - DNA, 75 bp, Homo sapiens
gagaaattccagtccaagtatgagccccggagccacatgatggacgtccagggcttctaccactgctgatgcaaa

SEQ ID NO: 7068 - DNA, 83 bp, Homo sapiens
attatggatcagatccaaatcactcttccttcaaaagttcctgccttttccgacaaggacagcctgggggatgagatgttggc

SEQ ID NO: 7069 - DNA, 75 bp, Homo sapiens
gcgcgcagggcctgcagcgggagctggacggcgagcgcgagcggcgcgagaaaatatcagttttagagaatgtgg

SEQ ID NO: 7070 - DNA, 90 bp, Homo sapiens
tcagacctctcatctgccagaatcagaaagaattcatcacactgtaaatacatgctacaggatttaactatcagaatgaagatgaaaaag

SEQ ID NO: 7071 - DNA, 102 bp, Homo sapiens
aaaagaatgccaaaatcagcagtctcctggaggagcagttccagcagggcaagcttcttgtctgcagatgcctccaaggagtccgaaaccaagtccgaagtc

SEQ ID NO: 7072 - DNA, 100 bp, Homo sapiens
aagagccaaggaataaacatgcaatgaacccaaaagggctccttctcctgaaaaagccgaggaggagagtgagaggcttctgagggaactctatttgttt

SEQ ID NO: 7073 - DNA, 75 bp, Homo sapiens
aggggaaaatgtctcagtcgaaaggacttggaccctctgtggaacacccgagtacctagcccccgaagtcattca

SEQ ID NO: 7074 - DNA, 50 bp, Homo sapiens
aaaacaacttcgagggcagaagtatgtattcccgtgtgccagagtgccag

SEQ ID NO: 7075 - DNA, 100 bp, Homo sapiens
cactgccgccgactgcagtgacatactgcggctgatcaaggagcatggcggcatttgcaggaatgtgtgatggaggctctacagaggacggctgtgtcgc

SEQ ID NO: 7076 - DNA, 83 bp, Homo sapiens
gatttccccatggcagatctgctgctcatccttgggacctccctggagatgccagagacgcggaacaattgagcaagaacaag

SEQ ID NO: 7077 - DNA, 75 bp, Homo sapiens
aaccgcagcagggacgtcggtttgctatcgggactcggcgaggacgggccctccagaatttccacagcatacacc

SEQ ID NO: 7078 - DNA, 82 bp, Homo sapiens
ggctggtcctactacgcctacgccatccagctgtgcatagcaaattgtggctactaatttgccccctgaagatcaagatggc

SEQ ID NO: 7079 - DNA, 102 bp, Homo sapiens
ttctacccactgagaccagagttagtggaatccacatatctcctctaccaggtgtggaaacaggaagagaactagaactggaagtaaagcattgaagatgtg

SEQ ID NO: 7080 - DNA, 90 bp, Homo sapiens
catttctgtgcaaaacaggactggctgatactacatattccagatggatgcggaagggagagctgtttgactatctcacagagaaggtgg

SEQ ID NO: 7081 - DNA, 89 bp, Homo sapiens
tgccgggttgcgctccgtgcacctcttgcgggctacccacctttctgttctgagacccctcaagagacatataagaaggtgatgaactg

SEQ ID NO: 7082 - DNA, 120 bp, Homo sapiens
aaagtttattcttttcagaatagaaaacactctgaaaagatggctaaattagacatggcccatgaacatggacatgagcatggacatcataaaatggaacttccagattatagacaatgg

SEQ ID NO: 7083 - DNA, 75 bp, Homo sapiens
ttatcagggagacggcttccgttgcgtgcccggaggatggtgccatgacaatggtgtgaactacaagattggaga

SEQ ID NO: 7084 - DNA, 100 bp, Homo sapiens
aggcaaacaagtgtaatcgtttatacatacccacagggcctactgcagtgcatgaaggtggtatggactcagaactctgaagtctgaggagacaaataca

SEQ ID NO: 7085 - DNA, 100 bp, Homo sapiens
gccgcgcccgccgcgcggagcgccccttcgcgtcccctgcaccatgagctggggcaccgagctctggcaatgtctcaggctgtgcagacaaacggaactc

SEQ ID NO: 7086 - DNA, 82 bp, Homo sapiens
ccccatccgccgccgagaggaggcctatgagaatcagcccaagccagtgacctggaaaaaatccacctggatgagaagtctt

SEQ ID NO: 7087 - DNA, 98 bp, Homo sapiens
agggcatccttcacccatctgaagggaggaaatagtggcaggtgacagtctgcatgtgcagttttcaggcctccggtgtggctgtctctgatggtgtc

SEQ ID NO: 7088 - DNA, 90 bp, Homo sapiens
accatcttcaggtcctactccaggggcgctcagaaatgtatcttctgtaagaagcggaggaaaagaactgctggctgctgtgtgcagtgt

SEQ ID NO: 7089 - DNA, 100 bp, Homo sapiens
gcttcgtggcgtgtgcggtttcgacccggtcacacaaagcttcagcatgtcatgtgatgtgtatatctcatgattgatatggagaaactagtcatgggcc

SEQ ID NO: 7090 - DNA, 95 bp, Homo sapiens
catggcgaagcacgagcagatcctggtcctcgatccgcccacagacctcaaattcaaaggttttaaaatcaaagatgggaaaatcggagaaaatt

SEQ ID NO: 7091 - DNA, 75 bp, Homo sapiens
attgaaatgcatttgccttatacagctaaagccatggaaagattgtagaaggcatgaaacaaaaaatgtggagta

SEQ ID NO: 7092 - DNA, 88 bp, Homo sapiens
gctggcacggggctggtgggcatagtggctgccctgctgggagccaaaaacctgtatatcatctccgtgaaggggatcaagggacggc

SEQ ID NO: 7093 - DNA, 97 bp, Homo sapiens
tgcgggcgctgaagaagatgggaaaatatatgcagatgatgaacattcttaagccaattgcctttgatgttattcatttcatgtctcaactatttga

SEQ ID NO: 7094 - DNA, 100 bp, Homo sapiens
gtccttgcttgctggtctgattgtcgtttttacccggccaaagtcactgctgttaacaaggatggttcaagcactgtcttcctgttggccctgacaatca

SEQ ID NO: 7095 - DNA, 100 bp, Homo sapiens
ttcattaatcacatgaagaatttctctgaatctcctaaatttcgtagtctacactttctgaattttccaggcttctaaccctcctttatgtgactcagag

SEQ ID NO: 7096 - DNA, 75 bp, Homo sapiens
atatacactccttggaatgaagaaagatttagcatgtagactgctggggcaatcaatggatgaaagtggattacc

SEQ ID NO: 7097 - DNA, 98 bp, Homo sapiens
ttcgattgagtgaaacagacttcaaagttatggcaagagatgagttaattctaaggtgctggagaatctggtaaaagcaccattgtgaagcagatgag

SEQ ID NO: 7098 - DNA, 82 bp, Homo sapiens
ctgcgctgccgccgctctgaggagttaaaggtgttggagcgggccggagagaagtagagtgggctgcgaggagaaggaaaca

SEQ ID NO: 7099 - DNA, 82 bp, Homo sapiens
cccacctcatctttgacatggacggacttcttctggggttacacatcattttggaatgactgtatatcatctggattacgtg

SEQ ID NO: 7100 - DNA, 82 bp, Homo sapiens
tttggcatggcccatcccctaatttctgaccagaagccctccctctaccctaaggaagcggggagaggtggtgagagatgac

SEQ ID NO: 7101 - DNA, 90 bp, Homo sapiens
gtcgtctggaacatggacgtggagaggcaggaggagctcatggaggccttgcacctgcacctggtgaaggagtacatcatccaactcagc

SEQ ID NO: 7102 - DNA, 100 bp, Homo sapiens
cagaaagcctccggaatctaaaaagccctcagtaccagagacagaagcagatggattcgtccttttaggagtccaatgtgctgattgctgctaacagtca

SEQ ID NO: 7103 - DNA, 83 bp, Homo sapiens
cagaaacttcataaatatatgcagagtcagcaagccgcttacagatgattctgaatgagattcagcctcgagatactaatgat

SEQ ID NO: 7104 - DNA, 85 bp, Homo sapiens
gtgagtgtgcccacctgcgtaagggggcagagacaggaaagcggagggaaaggccacttccaccactgagctgccccccgagtac

SEQ ID NO: 7105 - DNA, 100 bp, Homo sapiens
cctccctgttcgctttcaggagcacttccaggccgacttaacattacctatcccatgctgttcaaactgaccaataagaattcggaccgcatgacgcatt

SEQ ID NO: 7106 - DNA, 100 bp, Homo sapiens
cagcaccgcagatgttgtcaaggtggcctaccaggaggccaggggtgtcgccatggtgagccgttctccaaccctttggcccccgatggccacgatgtgg

SEQ ID NO: 7107 - DNA, 75 bp, Homo sapiens
gagtaatcgcctgctttgattcattgaaaatagggccagatttgagtgtgtgaatttttgagtgaaacctggaac

SEQ ID NO: 7108 - DNA, 113 bp, Homo sapiens
gtttaaatgatacctatcactcaagagactcttcatttagattggattctgaatatcaggcccgacaacaagctcaaatacgtcaccaaatggcagaggacagcaaagcagat

SEQ ID NO: 7109 - DNA, 72 bp, Homo sapiens
agacccaggccatcctcaccaagctcaagtgtgccgcaggttctagagccttctttccgccaggcctttccc

SEQ ID NO: 7110 - DNA, 87 bp, Homo sapiens
acatgacagaggaccatgtgatgcacctgctccagtccacccgagtcgggatgtctgtcaacgcccttcggaagcagagctcggatg

SEQ ID NO: 7111 - DNA, 51 bp, Homo sapiens
ctctcctcacagaaatttaactgattccctttgccaaagattgtggaaata

SEQ ID NO: 7112 - DNA, 90 bp, Homo sapiens
cgcctaccagccggcagctccggagctgcccgcgccatgtccgcgcacaatcggggcaccgagctcgctgttcgggggtcttgtctggat

SEQ ID NO: 7113 - DNA, 73 bp, Homo sapiens
agatggccagtcacgagaacccaggtatgtgcactgcgcgtgaccagccgggcccgcagccgcatcctcaggg

SEQ ID NO: 7114 - DNA, 100 bp, Homo sapiens
ctgtcgcctgcgctatgccctgctgtagtcacaggagctgtagagaggaccccggtacatctgaaagccgggaaatgcaaattgtggctactaatttgcc

SEQ ID NO: 7115 - DNA, 99 bp, Homo sapiens
ggatctttgctcctgcgccgcgttctagagcaaggttcagcttgttggtttagatgaggagagttcagagtttatttgcagaaacacctttgaccaccc

SEQ ID NO: 7116 - DNA, 51 bp, Homo sapiens
gctccggggaggtcacctgacgaggaggctgaaaatacctcctgattgcac

SEQ ID NO: 7117 - DNA, 73 bp, Homo sapiens
agatcaacctggagctctacgcctcctacgtttacctgtccatggtgttggagagcacaatggctgaacaagt

SEQ ID NO: 7118 - DNA, 101 bp, Homo sapiens
tatgatgtcaaggataagtctcatgacaccggtgcaaaaatgcagagtaataaaacttttaacttggagaagcaaaaccatactccaagaaagcatcatca

SEQ ID NO: 7119 - DNA, 149 bp, Homo sapiens
agaggttagacttgtttcttatatgtgatgccattccagcactggactcatggaggctgagcatttattcaggtttctagagccatctgggctttccgggaacctggaccagactctggcccagtaggatgtccccgtgtcctccccag

SEQ ID NO: 7120 - DNA, 51 bp, Homo sapiens
aagccagaatcctgaccttgctgcacagaatgctggggcagtgattggaaa

SEQ ID NO: 7121 - DNA, 100 bp, Homo sapiens
gtgaaacggagccagcggctgaggaggggccccagcagcccccgaaggccctatcaggacatggagtatgaaagacgcaaaacagagcgtgacactccca

SEQ ID NO: 7122 - DNA, 83 bp, Homo sapiens
cttcagagcgtcacggcgtacgccctcatggggaaaatctccccggtgactttcagcttggttctacagccattgggatccag

SEQ ID NO: 7123 - DNA, 87 bp, Homo sapiens
ccgcagttgtgccgccatcatagcctacctcatgcatagtaacgagcagaccttgcaggcatttcagaagatggacacaaagaagaa

SEQ ID NO: 7124 - DNA, 51 bp, Homo sapiens
gtcctgaatgtggcttggttgtagattgcttcacctgtggtatcagacatc

SEQ ID NO: 7125 - DNA, 50 bp, Homo sapiens
cgagggtcccacgactcccgcctgatcctgataacttaagtgactctctc

SEQ ID NO: 7126 - DNA, 100 bp, Homo sapiens
agccctgggtcgcttggaagaagccaagttctttattggtgaaaacatgaatccagatggcatggttgctctattggactaccgtgaggatggtgtgacc

SEQ ID NO: 7127 - DNA, 75 bp, Homo sapiens
cgacattcagagttgtttcctccatttgctaaaggaatagtgtttgacacgatgaggcgagtggtacgacagagc

SEQ ID NO: 7128 - DNA, 50 bp, Homo sapiens
ctcgggcgacggccatcttcatccggaaaatctacttcctcatcaagcac

SEQ ID NO: 7129 - DNA, 100 bp, Homo sapiens
tttaaccttatggccagtgatttgattgcccttaatagaagtctgccagatgtaagattagaagggggcagacgtgactggggggaccatggccgaagag

SEQ ID NO: 7130 - DNA, 97 bp, Homo sapiens
ctcacagtcatggatctggaagctgagggcacgtgtttgcggttcagccctttgatgaccgcagcagctattgcattaatgaccacagcggtcatct

SEQ ID NO: 7131 - DNA, 80 bp, Homo sapiens
ggagcagcaagacattctgtctaagtttgtttctccttggaccaagatgactgatggaaaactctccacctctacaaatg

SEQ ID NO: 7132 - DNA, 98 bp, Homo sapiens
ctacaatgtactggatcgaaatgtccatgagaaaaagcttggagataaagttgctttttactggctgaccggttccctgatgtgttacctgcttctgc

SEQ ID NO: 7133 - DNA, 75 bp, Homo sapiens
cacctgtgaagtggatgcccttaaaggaaccgaggtagatgacttctttgagcaagagaagaacttccttattaa

SEQ ID NO: 7134 - DNA, 75 bp, Homo sapiens
tggccacagcatctttgtctagccccagtgcaggcatactccaaatgcttcttccagttcatttttcagccatca

SEQ ID NO: 7135 - DNA, 100 bp, Homo sapiens
gacaacagaacaatattggaatggtgataaaaaatctcaaccgtggttttgccagattgaaggcacttgtgccatttcttccccaaagcaggaagcccag

SEQ ID NO: 7136 - DNA, 99 bp, Homo sapiens
gttcacgcacgggatccagagcgccgcgcacttcgtcatgttcttcgcgccctgaaggaagaggcccagcagaagggactcgctgagccaccccccgcc

SEQ ID NO: 7137 - DNA, 51 bp, Homo sapiens
acaagattgaccacattgatcacagtgatgctgaacaggagcttggccccc

SEQ ID NO: 7138 - DNA, 96 bp, Homo sapiens
gcatgtgatcactctgggactcgtggggctgcagcaccgagcatcttcaagaaagcaatggacatttgatttctaagaccaaagaccttggtaaac

SEQ ID NO: 7139 - DNA, 95 bp, Homo sapiens
gataaactggactgtcctctacagaaggaagcacaaaaagggacagtcggcccgtgtatttaatgaaactcccatcaaccctcggaaatgtgccc

SEQ ID NO: 7140 - DNA, 90 bp, Homo sapiens
ggattccaagtaactcttatttggaacatcaggagagcattctgggtaataccatgcaaagtgtgattgcattactcagcaatctagttg

SEQ ID NO: 7141 - DNA, 100 bp, Homo sapiens
taagatgaccttcagtgtgctgctcaaaaacaggagttttttgagaaccctgcttttcgtcccgatgggctgaaactctatcctaccctggtgattcgtg

SEQ ID NO: 7142 - DNA, 75 bp, Homo sapiens
cctagagaagaggctgtgcttcggcgctccggctcctcagagagcctcggctagaattctccctctgaagcacag

SEQ ID NO: 7143 - DNA, 83 bp, Homo sapiens
ccggatcgtggcctctcgagagcaaggtgatggctgtggacacctagtgacttatcaggatagtggcacaatgacatctaaga

SEQ ID NO: 7144 - DNA, 74 bp, Homo sapiens
gcactgactttcagctatggaatcgaacccttaggagaaatcttgagagtggacagcaattgtgaagatcgcca

SEQ ID NO: 7145 - DNA, 51 bp, Homo sapiens
tcagacacattcatttttacaccccaggtggcagtgctccttttggacttt

SEQ ID NO: 7146 - DNA, 50 bp, Homo sapiens
ttccccttctactacatgctgaaggtagatgacattaatgctgataagaa

SEQ ID NO: 7147 - DNA, 89 bp, Homo sapiens
tattgaaaacgaacttataaagttctgccgggaagcaagaggcaaagagaatcggttggttatccaggtacctcaagggaagtacaaag

SEQ ID NO: 7148 - DNA, 83 bp, Homo sapiens
agacaccagctccgaaatcaccaccaaggaatagtgtgcaccctcaattcagaaaataaagtggatctcaccaatccacagta

SEQ ID NO: 7149 - DNA, 100 bp, Homo sapiens
ttacagcacatgaaggccgtgcaggcagatcaggagcgggagaggcagcggcggctggaagtagaacgtggtgctggagaatctggtaaaagcaccattg

SEQ ID NO: 7150 - DNA, 83 bp, Homo sapiens
agtggccacgctgcagagcctcgctttgtgtccctggtgatgttggaacattaatgatggaacatggccaaacttcagtcatg

SEQ ID NO: 7151 - DNA, 90 bp, Homo sapiens
cgcagatgatgccccctatgggagggccaccaatgggacaagggatcatggaagctgataaagatgacacacaacaaattcttaaggagc

SEQ ID NO: 7152 - DNA, 98 bp, Homo sapiens
tacaagtggaaatccacaaggattcttttcaatacatcctaaaacagttgtaggacagtcccatctggacagcaacattgagaatcaagagattgtca

SEQ ID NO: 7153 - DNA, 75 bp, Homo sapiens
cgtgcgtctgcccaccaaggactttgaggtggacctgctagaaaccaagcttcttgaaaggcctgtctacacttg

SEQ ID NO: 7154 - DNA, 76 bp, Homo sapiens
ataggagtctggtcaggcgtcaggctagtccgacgaagagtggagaagctgatcgtcgaagggcatctaaccaaag

SEQ ID NO: 7155 - DNA, 75 bp, Homo sapiens
tccgctctgcctatgacagcaccatggagaccatgaactatgcccaggctgaattgcatcatcagcagatggcgg

SEQ ID NO: 7156 - DNA, 100 bp, Homo sapiens
tcaaccactcatctcccaggaatctacatgacctgctattttcagatttctgaaatgtcaccttatcaagattatggagaagtctggcgaggaaggaatg

SEQ ID NO: 7157 - DNA, 50 bp, Homo sapiens
ctccaagaccatccctggctgctggaaatctggcattttttaaagtttgc

SEQ ID NO: 7158 - DNA, 74 bp, Homo sapiens
cggaacttgccgcgtcgaggactgtcggactgacttccttttggtagtactgcgtgatgttgttcaggcttatc

SEQ ID NO: 7159 - DNA, 50 bp, Homo sapiens
tactggttccatcgtatggctcatggtgactattatatggttaaaaagat

SEQ ID NO: 7160 - DNA, 48 bp, Homo sapiens
ttctagaaggggaaaagctacttcaagaatcctgctgcatcacagaag

SEQ ID NO: 7161 - DNA, 80 bp, Homo sapiens
gagaggaccccgggacatctgaaagccaggaaatggaatcattgcaatttagagatgtggctgtagaattctctctggag

SEQ ID NO: 7162 - DNA, 74 bp, Homo sapiens
ctgtttgcaaagcacctgaactggttgtaagccaatgttgtgaggcttcaagttcagacatcactgagaaatca

SEQ ID NO: 7163 - DNA, 83 bp, Homo sapiens
gtgccgcttcggccgaaggcccgagcgcccgaggcgtctgggatggtgtgggaccgggttgtgaactaaaggccgacaaagat

SEQ ID NO: 7164 - DNA, 83 bp, Homo sapiens
gaggtcagagcttcattacagaaggcatcacgttgggtggtttccatttagaccgaggccggttcagaacttcccaaatgatg

SEQ ID NO: 7165 - DNA, 122 bp, Homo sapiens
ccgggcgcccgagcctcctcggccttggagagcagcggcggcggcggcaccccgggcgcggtgtggaggcacagttggtgctattttcacttgtccactagaagtcattaagacacggttgc

SEQ ID NO: 7166 - DNA, 82 bp, Homo sapiens
aaagatccaaaacaagtggctgcggccgtcgcccaggagtcatcggacgccagaatctgagacaagaggagcagcagcggca

SEQ ID NO: 7167 - DNA, 98 bp, Homo sapiens
tcggcctattgcctccattctagaggaagtgaagaagctttctgagcagacgagatgatgcctattggccagaaggaaagcgtgtggcaatggaggac

SEQ ID NO: 7168 - DNA, 115 bp, Homo sapiens
tctgctgcaccgacctcgacgtcttgcctgtgtcccacttgttcgcggcctatagacctgcctagagctggaacgttacctccagagcgagccctgctatgtttcagcctcagaa

SEQ ID NO: 7169 - DNA, 75 bp, Homo sapiens
tgcaacatggggcttgagaaagggaagagagagaaaatccttcaaaacggagtagaattgaacgtgatatagata

SEQ ID NO: 7170 - DNA, 74 bp, Homo sapiens
ccgtgtggacccgtaaaataaaatgggtaaagtgaatgccgaagacagaagatttggatgatacaccactgact

SEQ ID NO: 7171 - DNA, 175 bp, Homo sapiens
actgactcggcagcaggattcgtgcatgggaatcggagaccatggcagtgcagctggtgcccgactcagctctcggcctgctgatggtaagaagagttcctgggtcaagtggtcaccttcataaaaccgaagacggggactgggagtggagtgacgacgagatggatgagaagag

SEQ ID NO: 7172 - DNA, 100 bp, Homo sapiens
cgactggagggattaagaagaactcttaggagcagcttggcctaaagggaacaagctgaaagctggatacctaatgtcagtggagtcttctgagtgtttc

SEQ ID NO: 7173 - DNA, 97 bp, Homo sapiens
ccctgctgcagcccctcagcaacgccgtgcagctgcccatcgaccagattaagatgttctacgaggagcatttgcacttggacgatgagatccgcta

SEQ ID NO: 7174 - DNA, 96 bp, Homo sapiens
ctatgaacgattaaaagaagaactcgcaaaagctcagagggagatcatgaatcagacagataaaaatcaacaagaaatcccatcataccttaatga

SEQ ID NO: 7175 - DNA, 87 bp, Homo sapiens
atgaggcaaatataggggcatcagcaccctcatcatttgtctttgaaagaagaggcttctgatgtggttcgtcaaaagaagaagtac

SEQ ID NO: 7176 - DNA, 82 bp, Homo sapiens
gctgcgtatagtggaaccttatgtgacctggggtttaattggttggggtcagataagaagaggagtgacaatcaagccaaca

SEQ ID NO: 7177 - DNA, 75 bp, Homo sapiens
gcattaaagcattaaaggatagttcttcaggaacagaacgaacagatcctgataacttaagtgactctctctttt

SEQ ID NO: 7178 - DNA, 100 bp, Homo sapiens
ctcaaactcccaggctcaagcaatcctaccatgtcagccttcccagtagctggaactacagctttttttctcaaggtgcaatgaaagccttccacacttt

SEQ ID NO: 7179 - DNA, 51 bp, Homo sapiens
aaccgagtctgtgcaaagcctcctgcttgtctagggagtgagaacgtgatt

SEQ ID NO: 7180 - DNA, 75 bp, Homo sapiens
atctctctcgctgtgagacatgtctgagactcctgctcagtgtagcattaagagacagcctggagctgttgccca

SEQ ID NO: 7181 - DNA, 111 bp, Homo sapiens
ccgccttggacctcctgggaggcgaggacggtctctgccagtataaatgcagtgacgcacgaaagcaagagattatcaaagtcactgaacaactgatcgaagctatcaaca

SEQ ID NO: 7182 - DNA, 82 bp, Homo sapiens
cgagattcaagattatttgcaacagctcacgggagcaagaacgggaatgctggcctgctggccttggcagatgttttctcag

SEQ ID NO: 7183 - DNA, 100 bp, Homo sapiens
attctgcaaccaagcacctgaaacagcaggtccaggagagcctcagattattttttgtagaagtgaagctgcacatcaaggagtaattacctggaatccc

SEQ ID NO: 7184 - DNA, 82 bp, Homo sapiens
aatttctctgaatctcctaaatttcgtagtctacactttctgaattttccaggtcctgtgggaagagcagcgtggaggtggg

SEQ ID NO: 7185 - DNA, 119 bp, Homo sapiens
gcgggtccaggagtcagggatcgtgaaggacgccagcatcatacaccggctgttcgaggccttgactgtagcacttgcacctcctgcgccgccgccccccatccaaggatatgccttca

SEQ ID NO: 7186 - DNA, 100 bp, Homo sapiens
gggagattactaccagggccggaggattaccatcaccggaatctatccagaagttaaaggagagattgctcgtaaagatgaaaagctgctgtcgtttcta

SEQ ID NO: 7187 - DNA, 83 bp, Homo sapiens
ccatggcatgcatgatccattagggaggaccgtctgcacaaaggaaagtcgtggaaggcgctgacgctgtcccagaagaggcc

SEQ ID NO: 7188 - DNA, 75 bp, Homo sapiens
ccggacgccgcccgaacatggactccgccggccaaggagggcatcctggctgtttcacccgtggacttgaacttg

SEQ ID NO: 7189 - DNA, 100 bp, Homo sapiens
cggcggcaccaaggcccccaagccctccttcgtgtcgtacgtacgccctgagaacatatgctgtcaggaggataagagatgccttcagagaaaataaaaa

SEQ ID NO: 7190 - DNA, 100 bp, Homo sapiens
ggccaccgcccctgggaagcccttttggaaagacacgatgaggcgagtggtacgacagagcaagtttcggcatgtatttgggcaagcggtgaaaaatgac

SEQ ID NO: 7191 - DNA, 98 bp, Homo sapiens
ggcgacgaaccttggagagaggagaacgaacatcttctggacctttgtccaggtctcagcggcggtggcagccgaggtgcaggatgcaagaaggcgcc

SEQ ID NO: 7192 - DNA, 78 bp, Homo sapiens
agtaatctacatttccattggtgaaatcatcaacacccacactgatttaccgaggagcattatggatcctgggagaat

SEQ ID NO: 7193 - DNA, 91 bp, Homo sapiens
caatgccatccagagctgtgcctcccagcaccacagtccttctgcagtccctcgtccagccacccccagatgaggagcgggaaggcctcct

SEQ ID NO: 7194 - DNA, 101 bp, Homo sapiens
cgagcctgctagtgcgccacggctcggctggtgaagctgtgcagtggcatggtggaagccggtaaggcctacgtcagcaccagcaggcttttcgtgagcgg

SEQ ID NO: 7195 - DNA, 49 bp, Homo sapiens
ttctgaacaaggccaacacctatgcagaaatacagcccctcggaccctg

SEQ ID NO: 7196 - DNA, 80 bp, Homo sapiens
ccaacaacaccacaataatccacagccaaggtatcatgatattagctggtttgacatcaagtcatttgtgagtcatcaga

SEQ ID NO: 7197 - DNA, 100 bp, Homo sapiens
ctcgactccaaatggttgaaaacagatatacaggaagcgagcagctgcaaagcatctaatagaacgctactaccaccagttaactgagggctgtggaaat

SEQ ID NO: 7198 - DNA, 51 bp, Homo sapiens
tgtacaagtaccgacaccagtacccagaataggaggccttcaagattttgt

SEQ ID NO: 7199 - DNA, 80 bp, Homo sapiens
gtatttgactgagagaaacccactgaagacgtctgcgtgagaatagagaccaccgagggaagatcagttttcctgccatc

SEQ ID NO: 7200 - DNA, 75 bp, Homo sapiens
gcgacgctatggcgcactggagtaccctgttcctggcatgcatttgcccagtataacatggatcagttcacgcct

SEQ ID NO: 7201 - DNA, 141 bp, Homo sapiens
aagcgagatggtgacgaccggcggccgaggctcgttcttagcttcgacgaggagaagaggcgatgaagtggaaagggaaggacctctttgatttggtgtgccggactctggggctccgagaaacctggttctttggactgc

SEQ ID NO: 7202 - DNA, 100 bp, Homo sapiens
tgtagatgccctattcaccacaaaggctccttctcctgaaaaagccgaggaggagagtgagaggcttctgagggaactctatttgtttgatgttctccgc

SEQ ID NO: 7203 - DNA, 75 bp, Homo sapiens
cggcgcggcccagctcgttccaggaggccccgtgtgggccgcggcccggccctcaccatggagtccatgttcgag

SEQ ID NO: 7204 - DNA, 80 bp, Homo sapiens
gaggccaggtttactggagtaggtgttagtaagtcatcagtgagttctgcctcagtcagctcccaagtgaggacgcagtc

SEQ ID NO: 7205 - DNA, 50 bp, Homo sapiens
gctccggctggtctgtggtgagtggtcctacggcttctacctaattcacc

SEQ ID NO: 7206 - DNA, 95 bp, Homo sapiens
ccgtggcgccgcagacctccatcctgtttggtgcacctcgatttggaggaagtagggcagggcccttatctggaaagaagtttggaaaccctggg

SEQ ID NO: 7207 - DNA, 100 bp, Homo sapiens
cttgcctactgatcagttacacaaccaatgcatttcctggagaatatatccctactgtattgatcagggaccatgaaaagaaacttgtgcttcaccgaag

SEQ ID NO: 7208 - DNA, 132 bp, Homo sapiens
ttggtgtctgggaaagaggaagcaaatataataatggcagcacagagctacattcgagtgcttttttaggaccaaaggatatatttccttactcagaaaataaggaaaagtatggcaaaccaaataaaagaa

SEQ ID NO: 7209 - DNA, 82 bp, Homo sapiens
cagcacttgacccagacatgatccaggccctggaggacacgcatgactgtgccctgtccacggtgcctcctgcatgtcctgc

SEQ ID NO: 7210 - DNA, 88 bp, Homo sapiens
cgccgccgctgccgccgccgcgcgcgggtgaaaggtgtagcagtcactcggcctacacccacagcatcgaccttgtgaacccagcgac

SEQ ID NO: 7211 - DNA, 90 bp, Homo sapiens
gttcaagtttaccaaaagagaggcaccgctggaacactaatgagattctctcgggcctagccgtccttggaacccgatattcgggctggg

SEQ ID NO: 7212 - DNA, 90 bp, Homo sapiens
gtcaccaacgagatcttccgccactacgagttagggcttgacccaaaactactggctaaaatcctaaatatgagctcaggacggtgttgg

SEQ ID NO: 7213 - DNA, 100 bp, Homo sapiens
ggcctggatgtgtcggtgaccatctcgcaggatgccggcagtgtgccacctgggcttgaaggcatgaaggaacaggacctgtgcaacaagataatggcta

SEQ ID NO: 7214 - DNA, 75 bp, Homo sapiens
acctcagaggacaacgaagtgttcgatgatcacagtcgtgttaaactgcaaaatgctgagaatgattatattaat

SEQ ID NO: 7215 - DNA, 100 bp, Homo sapiens
tccttccaaccgccaggaggactgggaatacataattggcttctgtgatcagatcaacaaggagctggaaggactatcaagaaatccaagtggtaatggg

SEQ ID NO: 7216 - DNA, 101 bp, Homo sapiens
tgtcaacatgcagggcgagcccacggccacactggcacctgagctgacctttgatttccccatcgagactgtgggtccccttcccctgagcccatctacaa

SEQ ID NO: 7217 - DNA, 51 bp, Homo sapiens
agtgctccaagccaggtgtcatcctcctaaccaagagaggccggcagatct

SEQ ID NO: 7218 - DNA, 80 bp, Homo sapiens
cgccggagccgcgaggccaacccgtggaccgggagcccgtggaccgggagccggtggtgtgccaccccgacctggaggag

SEQ ID NO: 7219 - DNA, 87 bp, Homo sapiens
cgtggatttatcgctgccacggtctgcgtagctccagaggtttaaccataggatagagaaaccagttacagaatgtctgaaggggac

SEQ ID NO: 7220 - DNA, 75 bp, Homo sapiens
cagaagtgcctgcagttcagacccttctctcccctccactttctcccggaggagcaggagcggcttcgcttggag

SEQ ID NO: 7221 - DNA, 51 bp, Homo sapiens
gtggccgtgggggacatcgtctggggtcagcaaagtggaacgcgagaagaa

SEQ ID NO: 7222 - DNA, 100 bp, Homo sapiens
tgatgactctcgtgaacatagctttaatagggtgattgaaatctctgaatatcgaacccagctctatgaatatctacaaaatcgaatgatggccattgca

SEQ ID NO: 7223 - DNA, 82 bp, Homo sapiens
gtcatcaaccagcaggaggactccagcgagaactgggcacctccgggctgtgaaaagttagggaagtgtctgacacctccag

SEQ ID NO: 7224 - DNA, 48 bp, Homo sapiens
aaagcagcgtgcgttcagccctgggcaagtaactggcagaagttttgg

SEQ ID NO: 7225 - DNA, 75 bp, Homo sapiens
aagcccgggagacacagtgtcagaattacaagactcagcccgcctgcacccaggtgaaatatacagccttgttgc

SEQ ID NO: 7226 - DNA, 82 bp, Homo sapiens
ggccgatgaagtgcagaggtttttttctgatatgatggacgtggtcacctgcatgacctttctgagtacgatgctgagtatt

SEQ ID NO: 7227 - DNA, 100 bp, Homo sapiens
ctcttcagtcctcggcctctccagccaacgatgaccagtccaggcccagcctctcgaatgggcacacctgtgtaggacacaactcagatgggaagttcat

SEQ ID NO: 7228 - DNA, 75 bp, Homo sapiens
tccgtgtctctggattcaagtcccaggagtcctgaccagagagcagggaagatcagttttcctgccatccaggct

SEQ ID NO: 7229 - DNA, 92 bp, Homo sapiens
aggtgagaagacaatctctagcatcaaagcatggatcagacatcacacgatttttggtgcttttgaagatgatgatatcacgcacgttgaag

SEQ ID NO: 7230 - DNA, 50 bp, Homo sapiens
ctttgcagtctcgacataagtggccacccagtgctcctgcagaagatcgt

SEQ ID NO: 7231 - DNA, 100 bp, Homo sapiens
ataatgaagaagaatctttttggctgttagatgctcttgttggaagaatactaccagaaacgcttcgttaagggactcaggcagtacgggaagaacttct

SEQ ID NO: 7232 - DNA, 74 bp, Homo sapiens
tttgagagctacccggagctccaagacaggggactcctcctattttgaggacttctccaacatctccatcttct

SEQ ID NO: 7233 - DNA, 75 bp, Homo sapiens
caaaatatggcaaagaaacctattctgaggacatttcatatatatggatttcacagctacactcgatccacgccc

SEQ ID NO: 7234 - DNA, 75 bp, Homo sapiens
gacggaggaacgcaggtctgctgccagatcttagcaaagcaatgtctcaagatggtgcttctcagttccaagaag

SEQ ID NO: 7235 - DNA, 82 bp, Homo sapiens
gaggccattaccatgtatatattaaagatgttgatcatttgggaaactggcagtttcaagcagctggctaagagtcttgggc

SEQ ID NO: 7236 - DNA, 138 bp, Homo sapiens
gctgctgccgctgccgccctgagtcactgcctgcgcagctccggccgcctggctccccatactagtcgccgtatgacgccgtgcccatccagtccagcgtggtgttatgttcctgcccatccccatcaatggtgagga

SEQ ID NO: 7237 - DNA, 75 bp, Homo sapiens
ctatcagcaggctccgggctgaagattgcttctcttctctcctccaaggtcctccgcgacatcctcaaggaggtt

SEQ ID NO: 7238 - DNA, 134 bp, Homo sapiens
tcggtgtaagaccaccaaatatcggaacccctccttgaagctgatggtgaatgtgtgcggacacactctacctagaggatcaagacataatgggagcatttttagacaagccaaagatggaaaagcataatgcc

SEQ ID NO: 7239 - DNA, 50 bp, Homo sapiens
gaagtgttgtgtaaaggctacccttcgaaaacagtgttacaccagaagag

SEQ ID NO: 7240 - DNA, 80 bp, Homo sapiens
ccgtaacctgcgggagaggtttggaattgatgatcaagatttccagaatgaagaaggagccccacaggaaggaattctgg

SEQ ID NO: 7241 - DNA, 50 bp, Homo sapiens
gttcattctggacgtgcttctgcccgagccgcttgatggcattgaaacga

SEQ ID NO: 7242 - DNA, 111 bp, Homo sapiens
ctgcttttcggttccgggtcttggccccgtccttacctcacagaatccagcaactatcacaagaatactccttagccacttcaattgggataaagagaagctaatggaaag

SEQ ID NO: 7243 - DNA, 76 bp, Homo sapiens
ttccggaagcacacagtgcgcggggagcgttcctacagaatcgcctaccatttggtgcaagcaaaaagcaatcagc

SEQ ID NO: 7244 - DNA, 83 bp, Homo sapiens
atcccctatgagagtcccatcttcagcagagacctgcctagagctggaacgttacctccagagcgagccctgctatgtttcag

SEQ ID NO: 7245 - DNA, 75 bp, Homo sapiens
ctctcggcgtccgccagcgatggcacagattgagaggatccagaatccagatctctggaatagctaccaggcaaa

SEQ ID NO: 7246 - DNA, 89 bp, Homo sapiens
gcggcgtttggatgattgtctctcggcggcggagtcggttgagcaatgtttaaagcgtttgaaaaacatgaatttggagggctcaattc

SEQ ID NO: 7247 - DNA, 100 bp, Homo sapiens
gaaaagctgagaaagtttcgttttcgcaaagaaacgaacaacgctgctattataagcttcccagctggcgtgtatgttgtaaagagagttcttcagcttc

SEQ ID NO: 7248 - DNA, 87 bp, Homo sapiens
agctccataggggaggagagccacgcaggatctcacagctgcagtctaatagtaacacagagccttatttagtgtctctgacaaaac

SEQ ID NO: 7249 - DNA, 101 bp, Homo sapiens
gaagtaggtgcagttggtccccctggcttcgctggtgagaagggtccctctggagaggctggtactgctggtgctcgtggaaatgatggtgctactggtgc

SEQ ID NO: 7250 - DNA, 87 bp, Homo sapiens
aaagcctatggcttcagctgcgacggggaaggctctaatcaatcgtggggttaacctggatcccctgggcaagtggtcaaagactgg

SEQ ID NO: 7251 - DNA, 96 bp, Homo sapiens
gcggggaactcagcaacggtttcttcatccaggaccagattgctctggtggagaggggagccagcatctccctatgttgcccaggctggactcgaa

SEQ ID NO: 7252 - DNA, 76 bp, Homo sapiens
aacagatgccactgtaagtggggagagaagctgctcagctgccaaggggccaagggatgagctggggccctccttc

SEQ ID NO: 7253 - DNA, 75 bp, Homo sapiens
aatgctgtggctcttcttccagagaatgacacaggtgaaaggtgaaaggaaagcaagccaggatggatatttacg

SEQ ID NO: 7254 - DNA, 90 bp, Homo sapiens
tgaacccgggaggcggaggttgcggctttttcctggtgagtggggtctttgacctggagcccatcgtgtatacttcacagaacgttgctc

SEQ ID NO: 7255 - DNA, 51 bp, Homo sapiens
gctgaggatcgaggaacgttgtctgcttcatggcggctgaagagatgcatt

SEQ ID NO: 7256 - DNA, 101 bp, Homo sapiens
ggcatgagtatctgggatgtgaagaaaaagtttggaaaccttcatctagaaagtggtctagcaaagtgtggtccatggatgagtttgatctgcaaactgct

SEQ ID NO: 7257 - DNA, 50 bp, Homo sapiens
gaaaccagtccccgaaccaaaatcacggagaaataaagtgtagtccttct

SEQ ID NO: 7258 - DNA, 76 bp, Homo sapiens
ggcggcggcacagcgacgagaacgacggtctcccgtgatggccggtggactgttcgccgtggatcggaagtggttc

SEQ ID NO: 7259 - DNA, 100 bp, Homo sapiens
ttgagcagcagatccagacctaccagcgcaggtggctatggaccgccccctgcaggaagaggagcccccccgccacccccaccgttcacctcctacatcg

SEQ ID NO: 7260 - DNA, 73 bp, Homo sapiens
ctgtctctgcggcttctggttctcacttgtcggttaatccctatatcctgaagaagaacatgatcctcatgac

SEQ ID NO: 7261 - DNA, 78 bp, Homo sapiens
gatctggcactgtggttcctgcatgaagacagtggctggcggtgcctggacgtacaactatgatttaggcatagagaa

SEQ ID NO: 7262 - DNA, 100 bp, Homo sapiens
cggcgctggagagggggcgctgagctgttggggtagcacaggcggagtgcagcggaggcccctgccgctgccgtcatgccgttcccgtttgggaagtctc

SEQ ID NO: 7263 - DNA, 100 bp, Homo sapiens
caacattcaaggaaacaaatcaactaaaaacaaaattgccagaaaatctttcctctaaagtcaaactggtttctttacctccagaaagaagaatattggc

SEQ ID NO: 7264 - DNA, 98 bp, Homo sapiens
cgggtccgggattcccagccatggcagattcctccgggcagcaggagctgagctcaatgtgcagcaatggatgacgacagcctggatgagcttgtggc

SEQ ID NO: 7265 - DNA, 75 bp, Homo sapiens
aatcattcatctcctagtgcagaggaacttgaacatcagagaggagcccttatgaatgaaatccaagctgcgaaa

SEQ ID NO: 7266 - DNA, 100 bp, Homo sapiens
gacatcaagattgggaacaagccggctggccgcatccagatgctcctgcgttctgatgtcgtgcccatgacagcagaacatgaacgattggatgcccatc

SEQ ID NO: 7267 - DNA, 75 bp, Homo sapiens
attggcaactgggatcgctcttttgggggaggaatgataatgccatgtacctcctggtggtgaaccatccagatg

SEQ ID NO: 7268 - DNA, 50 bp, Homo sapiens
gttcgagaccagcctgactaacatggagtttcgctcttgttgcccaggct

SEQ ID NO: 7269 - DNA, 90 bp, Homo sapiens
ccggccggtcggtttccggatgaaacgaggagccagggctggtgaattaccatatctccgtcaagtgcagtaaccagttcaagttggaag

SEQ ID NO: 7270 - DNA, 82 bp, Homo sapiens
cctcgaccagctgctggacatgtcctaaaaggacccaggagcgataacagtaaatcaaataagatatttgtcggtggaattc

SEQ ID NO: 7271 - DNA, 75 bp, Homo sapiens
cagcaaggtcggcagagcaaggggcttacgcagaaggacctggccacggactggccgtttgacgatggggcgccc

SEQ ID NO: 7272 - DNA, 80 bp, Homo sapiens
tggattgaaatctaatgaaccgaaactttgggattcagaatccatggctggaagaggtagtaaggccattgggagggcat

SEQ ID NO: 7273 - DNA, 100 bp, Homo sapiens
acttgctcgtgcactttacacacatgagtgggtgaatttgtaagtgatgtcctgctagttccagaaaagtgccagtttttccacaaagagcggatggagg

SEQ ID NO: 7274 - DNA, 101 bp, Homo sapiens
tccatcaaacatcttccaccacagcttagaggtctctgctgctgatgaagctgtgaccaaacgcacccaacccttggcagccatctgtccctgcagccata

SEQ ID NO: 7275 - DNA, 82 bp, Homo sapiens
cggcgactctcggcgtgcggtgatagccaagccatgggagacaagaagagccccaccagggaacggcaggagcagctgatgg

SEQ ID NO: 7276 - DNA, 100 bp, Homo sapiens
tcatcaaaactctcagaaaacacagttattgttggtgtagtacgcagggtggagggtccggggaggagcaactctatgctgactttccagaacttgacct

SEQ ID NO: 7277 - DNA, 100 bp, Homo sapiens
gaggagggggatcccagcaaagggtgtgctgatctgcaaaccctggacacaatgcagccaattgagaggaaaagacagggctatattcatgagctgattc

SEQ ID NO: 7278 - DNA, 100 bp, Homo sapiens
gacagattgctgaccaggggcttgagagctgggttctattttccctcctcaaactgactttgcagccacggagaggtagctacagcaagctgggtagcag

SEQ ID NO: 7279 - DNA, 97 bp, Homo sapiens
ctcagcctcccaagtagcttggattacaggttatcaagttatacccaaccagcagcaaaactaccaaggaatagttggagttcagcaaccccagagt

SEQ ID NO: 7280 - DNA, 98 bp, Homo sapiens
cgcgcccggcccggagcccccagcgcagcggccgcgaaagaagttttcccatttccagaagttagccaagatgaacttaatgaaatcaatcagttctt

SEQ ID NO: 7281 - DNA, 87 bp, Homo sapiens
gaacaggaggtggtagagggcatggatatctctactcgctccaaagaatatgatatgcttcgggagatgttcagtgattctagaagt

SEQ ID NO: 7282 - DNA, 97 bp, Homo sapiens
ccctggaatatgaagagacacagtatggtagccacacccccaggtatcacagatgtcgtaagaatctgaatcctccaaaagacagatgatgcggagg

SEQ ID NO: 7283 - DNA, 100 bp, Homo sapiens
gatgtacagaatgggccaagctccactgttcagatgcaaaggaagcccgaaagatgagatcaatacaggaaaccctgggagagtctgggagtttacttcc

SEQ ID NO: 7284 - DNA, 117 bp, Homo sapiens
ggcatatgacctgctctccaaggcctcggtgcagtttgtggacttcctgtccacttccaacgaagcggtctataagatctttgatgacagcccctgcccatttactgcgaaaacctg

SEQ ID NO: 7285 - DNA, 75 bp, Homo sapiens
gcaaggcagagccaccagaaagattcagagcattcttcactccagaataatgagcaaccctctttggccaccagc

SEQ ID NO: 7286 - DNA, 50 bp, Homo sapiens
gcagaaagtttttgaacatgacagattggcttggatacttcttattggac

SEQ ID NO: 7287 - DNA, 100 bp, Homo sapiens
agaaggagctgagtctccccagaagaggaagtttttctaggcctgattcttcactacctgagacgtctaaaaaggagcacatctcagctgaaaacatgtc

SEQ ID NO: 7288 - DNA, 82 bp, Homo sapiens
ccgtgatcctgttagatatcgaaggtaccacaaccccgattgctttcgtgaagggcaggctgtccctgcaggatcccacgta

SEQ ID NO: 7289 - DNA, 101 bp, Homo sapiens
catcagtggcatcgttggggatcggttgaatttgcgatgggttctgtcttttggcatgtgctcttctgcattagtgaattctcaatcacaatcctctgaca

SEQ ID NO: 7290 - DNA, 96 bp, Homo sapiens
cgctgttttgccggaggagcccctcaggccgctttgaaatttctgaaaaccagaagaggcaggctgcaatgactgtgagaaaagtccctaagcaaa

SEQ ID NO: 7291 - DNA, 96 bp, Homo sapiens
agcgcttgatgtgcgcggagagcaatcgccgggacagctgcaagaccaagatcactccatggatgaaatgacagctgtggtgaaaattgaaaaagg

SEQ ID NO: 7292 - DNA, 100 bp, Homo sapiens
caacctgcgcattgggaggccgaagggtccccgggacccgcctgctgagtggacccgggtatattaaagccatgacagcaaacagcccctttctcctaag

SEQ ID NO: 7293 - DNA, 75 bp, Homo sapiens
gcaacttcttggccttagctcgggagtgtgtactggccacatatggaagcattgcattgattgtcttatatttca

SEQ ID NO: 7294 - DNA, 90 bp, Homo sapiens
cgacggcaaaggtgtcgtggtggtcattaagcggagatccggtgtgatggtcggctcccacgcggacatggcgccggcctctactgcgga

SEQ ID NO: 7295 - DNA, 75 bp, Homo sapiens
caacctggaccccaaaattaccgatacactcagaagaagccttgtttttactggcaacctgttattaccgctcag

SEQ ID NO: 7296 - DNA, 75 bp, Homo sapiens
aagagtggacatttgtcatagaaaatgtgcaaacagctgcacagcaagtggcagaggataaatttgtttttgact

SEQ ID NO: 7297 - DNA, 75 bp, Homo sapiens
ttctacttaataacgtgcacctttctcatcctgtttatgtccgacgtgcagcttctaccctgacatttgcactat

SEQ ID NO: 7298 - DNA, 100 bp, Homo sapiens
cacgagagcggctgctgtctgcgcttgaggacttggaggtcctgtctagacagatttgaccagttttgggccatcaatcggaaactcatggaatatcctg

SEQ ID NO: 7299 - DNA, 75 bp, Homo sapiens
gaagccagttctaaatttttatgaagccaatttccctggtttgtttctgcgtcacatgatcttggcctacagtaa

SEQ ID NO: 7300 - DNA, 100 bp, Homo sapiens
aagtctatctttctgatgctccatcccactactctcaagatacgccaatgcgctcaaaggcaaaaaggcagtacagccgcctcaattcctccagccagac

SEQ ID NO: 7301 - DNA, 80 bp, Homo sapiens
ccttctgcacgggcatccgcgtggcccatgcccttccatactttgaccggctagactatgtgtccatgatgtgtaacgaa

SEQ ID NO: 7302 - DNA, 90 bp, Homo sapiens
tgacacccgagatgggcctgaagaaggtgctgaagaagagccccctcaggtgttggaggaagctgtgccagccacagagcactggcagcc

SEQ ID NO: 7303 - DNA, 88 bp, Homo sapiens
cggaaatgttgtccaaagttcttccagtcctcctaggcatcttattgatcctccagtcgaggaagctcttcgtgggcggtcttgactg

SEQ ID NO: 7304 - DNA, 75 bp, Homo sapiens
cgaagaggtacgattccggagaatcgcgaggcagagcgggagcgcgcagccagttgcttctgcaggaagcctttt

SEQ ID NO: 7305 - DNA, 90 bp, Homo sapiens
tgccctgcagtacctgcagaaggtctctggagacatcttcagcagggattaaagcctgtggtttccacagaagcaccacctatcatattt

SEQ ID NO: 7306 - DNA, 75 bp, Homo sapiens
gaggggctccgggtcttccagagcgtgaagatcaagatcgtgcctgagattgtgagggagacccaggacctaatt

SEQ ID NO: 7307 - DNA, 50 bp, Homo sapiens
gtggactgcagtgctgcagtgccaggcctcccagtagcattggatgcagg

SEQ ID NO: 7308 - DNA, 51 bp, Homo sapiens
ttcaagatgatatttattcaccaaacaagtctgcgctcctcagaccaccgg

SEQ ID NO: 7309 - DNA, 90 bp, Homo sapiens
tgacatttaattttagggtcctttatatagaagggagagtagcccctggaggaacgcgcatagatgatggtgacaagaccaagatgacca

SEQ ID NO: 7310 - DNA, 90 bp, Homo sapiens
cgccttggaccccgctcacgggtccccttcccctgagcccatctacaatagcgaggggaagcggcttaacacccgagagttccgcacccg

SEQ ID NO: 7311 - DNA, 102 bp, Homo sapiens
agaccagctagagaccatacagacctaccggtctgtcagtgagatggcttctaacaagacaatgcagatcttcgtgaagactctgactggtaagaccatcac

SEQ ID NO: 7312 - DNA, 74 bp, Homo sapiens
atgcccgttccatctatgttggcaatgggagtgatgctgaagaaggggattcagagtctgaaattgaagatgag

SEQ ID NO: 7313 - DNA, 90 bp, Homo sapiens
cgccaggcttcgggcccgggaatcgccgccgccgccgccgcagagctgcagctcggggccgagggccaggtggtggatgtggaacagggg

SEQ ID NO: 7314 - DNA, 90 bp, Homo sapiens
cccagacgaatgcagcttcgtttgatcttcagtatcagacacagcacagcagccatctgaagagcaaagcaagtctcttgaaaaaccgaa

SEQ ID NO: 7315 - DNA, 100 bp, Homo sapiens
cttcaaaacgcactcattcagtttgctactaggaagatgagaatgtgcctactgctcctgatcctccaagtcaacatttacgtgggcatgggacaggctt

SEQ ID NO: 7316 - DNA, 74 bp, Homo sapiens
tccgacgagcgctgcactaacgcaggatccggctgccgaaggtcctcgccagggtcttactgaagtaacacaaa

SEQ ID NO: 7317 - DNA, 83 bp, Homo sapiens
cgccgcccggccggtgctccctggcgcagccacgcaggcgcaccgcagacagggggatatgagactttctactcggaatatcc

SEQ ID NO: 7318 - DNA, 75 bp, Homo sapiens
ggtgctcgagtgcctgcaggatgtgagggagaccattgtgatgaatgactgtattatccgaggggatctggcaaa

SEQ ID NO: 7319 - DNA, 100 bp, Homo sapiens
ggcgctgacggactgggggcgccgcccgcgcccgggaccgacccctctgctcgcggccgcgcctttgagatttccacatggaagaggcactggattggcc

SEQ ID NO: 7320 - DNA, 100 bp, Homo sapiens
agatatcatcatagagtcttctgctcttcctcaactaccaaagagtgatagcagctacgacttcctgtccactgaagagaaggagtgtctgctcttcctg

SEQ ID NO: 7321 - DNA, 98 bp, Homo sapiens
ctcactggagatgacacgtgcgtggggtgttgggctaaagaattacctccaaagccattgtcaagaccacagcagtcatctgcaccagtccagctgaa

SEQ ID NO: 7322 - DNA, 78 bp, Homo sapiens
ttcaagcttggtgtgctaggctggggatgtcatgaccgggccgtcctgctctatgagtacgtgggcaagcggatcgtg

SEQ ID NO: 7323 - DNA, 100 bp, Homo sapiens
ctgggcgacctgcaggcagcaccggaggcccaggtctccgtgcagcccaacttccagcaggacaagggagatggagggggtcccaagcactgccatcagg

SEQ ID NO: 7324 - DNA, 85 bp, Homo sapiens
agcatcccggctggagcagagccagccatcaggtttgggcggatgccacaggccgagaaggagaagctgttggcggagatctcca

SEQ ID NO: 7325 - DNA, 100 bp, Homo sapiens
aaacggagagcagcagccgcccgcttcaaccccaggggaccagaggaactcagccctgattgcggtcaacgtggagcacatgacggagaagatgaagaca

SEQ ID NO: 7326 - DNA, 50 bp, Homo sapiens
aaattagtgaaggagatgaagtagaggtccagagggggcaaacctcttta

SEQ ID NO: 7327 - DNA, 100 bp, Homo sapiens
caggccctgaggttgctcctcccggggcccttcccgggcaagccattccacagattttgaagtacaccgaaactggcttgctatcactcacagtttgcca

SEQ ID NO: 7328 - DNA, 103 bp, Homo sapiens
tctttctcacacgcagatgaacactggacttcagaaatgttgaaggcatgtggactgacttctgattgctgtgaggcactctccttggccctttcctgcaacc

SEQ ID NO: 7329 - DNA, 95 bp, Homo sapiens
ggagaagcagctgggggccttggctgtaaggacccctaaggagactctgacctgtttttgttggacacccgtgtagtatgggcctcagaagaagg

SEQ ID NO: 7330 - DNA, 82 bp, Homo sapiens
ctgaaacaaatgcaagtattacatccagcagccagaatggttgactacagacaaaaagctgctgcagcaggtagaattccca

SEQ ID NO: 7331 - DNA, 73 bp, Homo sapiens
aagccaatgaccgtgaatataatgaaaagttccagtatgcggcttcctgacaatgtcacctttgaggaaggcg

SEQ ID NO: 7332 - DNA, 83 bp, Homo sapiens
tctatgccaaagtggaccggctagaggaaagtaatggaccagtgaaggtgtggggaagcattaaaggactgactgaaggcctg

SEQ ID NO: 7333 - DNA, 83 bp, Homo sapiens
cgtgaactcattttatctgccacgacccagaaggcgagaaccactgtctctgatcaacgtgcggaagaggaacgtggaatctg

SEQ ID NO: 7334 - DNA, 83 bp, Homo sapiens
gtgaagctgccgttctttaatatgctggatgagctgctgaagcccaccgaattagcggaaggagagttttacatggaagtggc

SEQ ID NO: 7335 - DNA, 51 bp, Homo sapiens
caggccaccactgcggcgggctctggacattccagctgcagctcttgtctc

SEQ ID NO: 7336 - DNA, 101 bp, Homo sapiens
ctggaagcgattaatgataaaatttcatggagaagaaggccttgactacggaggggttgccagactagacgcttgaagcaaagctgccatcccagaagacg

SEQ ID NO: 7337 - DNA, 51 bp, Homo sapiens
cgcttatgacccttctttgtcttcgcacctagagaccgttggatggcagct

SEQ ID NO: 7338 - DNA, 100 bp, Homo sapiens
cctgtctggggagctctgcacgcgcaattccgcagtctctcccagattgtgcaagaaccatgggaggggcgtcagctgctgtattaaagtatgaaaataa

SEQ ID NO: 7339 - DNA, 75 bp, Homo sapiens
gccctcagccccgtcctcttgtcctcctcagcctcggtaaatattgcagattttcaagagaatcagtgggtgact

SEQ ID NO: 7340 - DNA, 51 bp, Homo sapiens
agggaaactgaggaccagagaggtatatttgccttccctccatgatctcca

SEQ ID NO: 7341 - DNA, 100 bp, Homo sapiens
gccaccagtgcactggtaaaggctgcgtcggctgcccagagagaactagtggcccaagggaagccgtactctgacagctgtgcacgatgccatccttgag

SEQ ID NO: 7342 - DNA, 74 bp, Homo sapiens
ccgatctgagcgcttggccaagtacaaccagctcctcagggccaattcctgtccccccagcagcatggcatcgt

SEQ ID NO: 7343 - DNA, 50 bp, Homo sapiens
cttgctccggctgctggatcgaggaatgccgtcttggaagccgattttgc

SEQ ID NO: 7344 - DNA, 83 bp, Homo sapiens
aggagaagcatttacaataagaagagaagatggacagtttcagtgcattacagggaaatgatcttcattggttagcatgtgcc

SEQ ID NO: 7345 - DNA, 98 bp, Homo sapiens
acaatctgtcacctaagtcttatcgaactgccaagtttcacagccgggttaagtatacccaaggtggacttgaaaacctcgaactttcaagaaagtat

SEQ ID NO: 7346 - DNA, 83 bp, Homo sapiens
caaagggtcccgcctccctgccgtgcattccatctgcagccccgagcctcagactgcttttcaggaagccttggacgctgcag

SEQ ID NO: 7347 - DNA, 87 bp, Homo sapiens
gggatcctctgaccctctagactttcagcatcacaattacaaggccatgaggaagggaaggtgctgagctactggtgcttcagtccc

SEQ ID NO: 7348 - DNA, 100 bp, Homo sapiens
agtgtgtgctttaactcaagaagaatcttcagcccagttatcaaatgaagaggaacaggagtacagctgtgtagtaaagatgccttctggtgaatttgca

SEQ ID NO: 7349 - DNA, 76 bp, Homo sapiens
atgtattccctggggatggcgcatcacacaccaaagaccctggtgggcagcagtgggaccattctgaccacaatgc

SEQ ID NO: 7350 - DNA, 100 bp, Homo sapiens
ctcttgttggaagagaaaatgagggcactccacagaaggatgttattatcaagtcagatgcaccggacactttgttattggagaaacatgcagattatat

SEQ ID NO: 7351 - DNA, 87 bp, Homo sapiens
tccatggtttctatgcccctctatgcagtcatgtatcctgtgtttaatgaggtttccaatacttatctacaggaatcgccatgaccc

SEQ ID NO: 7352 - DNA, 76 bp, Homo sapiens
agaacatgcatatttgggtccaactgtgaagccagatgataaggcccaagaggatgctgagaaacttcggtccgtt

SEQ ID NO: 7353 - DNA, 100 bp, Homo sapiens
cttcaaagaagatccagagaagctcttcacagatctcagagaaattggccatggaagctttggagcagtgtattttagtctcgctcttttgcccaggctg

SEQ ID NO: 7354 - DNA, 75 bp, Homo sapiens
cacaatggagacgccgccgctgcctcccgcataatgagtgtgtatatggcaactaccctgaaatacctttggaag

SEQ ID NO: 7355 - DNA, 82 bp, Homo sapiens
cttcacctgcagaagcgtgtcgttctgcaccagcgccttgatcgagtacttgaggaccaagaatcgccttcagccctgtctg

SEQ ID NO: 7356 - DNA, 101 bp, Homo sapiens
aggacagggctgaggaaccatgtctccatccccgaccgccctcttctgtcttggggcagtggaagccgttggagggcctcaggcaggaacacaaggtgtcg

SEQ ID NO: 7357 - DNA, 100 bp, Homo sapiens
cccggagtttgaaaatgaagaattgatttcctcctctgatgctcctcttcagcctttggtatcctctccttctctgcaagctgctgttgacaaaaataaa

SEQ ID NO: 7358 - DNA, 50 bp, Homo sapiens
gtatactacatggcaaaatgggaaagggaagacatgtaaggaatttgcat

SEQ ID NO: 7359 - DNA, 75 bp, Homo sapiens
acgatgaccagtccaggcccagcctctcgaatgggcacacctgtgtagcaaaagatacagatattgtggatgaag

SEQ ID NO: 7360 - DNA, 51 bp, Homo sapiens
accgagtccagcccaggaaaatggagagatccaggtccagagagcatcgca

SEQ ID NO: 7361 - DNA, 50 bp, Homo sapiens
ggctcctctatgataatggcagataagaatgtttggaatggttttggaaa

SEQ ID NO: 7362 - DNA, 75 bp, Homo sapiens
cgagcgcagcaaagcgcccagcctgccgcctcgctgtccctgcggcttctggggcttcaaggttactgacttttt

SEQ ID NO: 7363 - DNA, 82 bp, Homo sapiens
aaaaaaactccagctgtgaaagcaacataaatgaacatgaacgattggatgcccatcgccaaggagtatgatccactcaaag

SEQ ID NO: 7364 - DNA, 96 bp, Homo sapiens
ggaacatccccaacgtggatgacaagaagacgtccaatctgagcgtgctgcggacggcgctgcggtacatccagctccaccgggggacggctacgt

SEQ ID NO: 7365 - DNA, 75 bp, Homo sapiens
aaatcgtcttatagttgagaatttatcctcaagagtcagctggcaggaaaacctatttgattctttgacaggcca

SEQ ID NO: 7366 - DNA, 100 bp, Homo sapiens
gttgggaagtggcaggatcgatatgggagggccgaatcacctgatctaagtttgggacccactctggaacctgaggaagtggtaaacaggctgatgcatg

SEQ ID NO: 7367 - DNA, 75 bp, Homo sapiens
ctcaaaacacgacaggtgtgtccattggacaacagagagtgggaattccaaaagatttgttaaggattccaagta

SEQ ID NO: 7368 - DNA, 50 bp, Homo sapiens
tagaggatgacttctctaatcagttacgtataaccccgttttcacacgaa

SEQ ID NO: 7369 - DNA, 75 bp, Homo sapiens
gagacgcacagctaagatgtcaggacatcctggaagctgggaaagggccaaggtgatccgtgacaagcgcacagg

SEQ ID NO: 7370 - DNA, 51 bp, Homo sapiens
ggattccacagtgtcctctggaaaatgattattcagagctgggagagcttc

SEQ ID NO: 7371 - DNA, 90 bp, Homo sapiens
ttgcgtttccaccccaagcccagtgaccttcacctgcagaccggctataagacccaggacccgcctgccacaatggagctggccgtggct

SEQ ID NO: 7372 - DNA, 82 bp, Homo sapiens
gcagcgagctggagccgccggagcttttggacttcttggatcagcatcctttttcatttactcctctaattcagagatcact

SEQ ID NO: 7373 - DNA, 75 bp, Homo sapiens
acggagcatgaagacagagcgggtgactggaggtggctccccaggtgttggaaatcaatagctcttctagccttt

SEQ ID NO: 7374 - DNA, 100 bp, Homo sapiens
atgaggaaaaaggataagcaatctatcagggatgtcagagacatttttggagtcagtgaatctcctgatgagttagatgaactccgtgctgagatggaag

SEQ ID NO: 7375 - DNA, 58 bp, Homo sapiens
ggatgggatccagctgttagtcgggtaggcatagattcaaccctatgaaaagataaag

SEQ ID NO: 7376 - DNA, 82 bp, Homo sapiens
tgacatttaattttagggtcctttatatagaagggagagtagaaccaagagccactgagagaggaagactctgatttcatcc

SEQ ID NO: 7377 - DNA, 98 bp, Homo sapiens
ggcggcggtggggactgcacgtagcccggcgctcggcatggctctcctggtgctcgaaataggaaggttgttgattactcacagtttcaggaatctga

SEQ ID NO: 7378 - DNA, 82 bp, Homo sapiens
cggaacttagacatcaccggagtcaagaccgtgctcatctcccgactcaagcagtattacatcattgaagtgaatgccaggc

SEQ ID NO: 7379 - DNA, 100 bp, Homo sapiens
cgctctgagaggcccctcttctcctccaacccagaactggacaatctgattgtgaataagtggaatacagctctcattggccttatgacatactttcggg

SEQ ID NO: 7380 - DNA, 74 bp, Homo sapiens
gcagggccagcagcaggcgggaggcatgtcgggccccaggcctgtggtgctgagcgggccttcgggagctggga

SEQ ID NO: 7381 - DNA, 75 bp, Homo sapiens
cgcgctgctgggcacccacggagcctccggggctgggcgaactttctgaccaagtatacaactacccagagggcc

SEQ ID NO: 7382 - DNA, 83 bp, Homo sapiens
gttaaggattccaagtaactcttatttggtgctactcgtgagcagtagtcgccatccagacagatggattgtccctggaggag

SEQ ID NO: 7383 - DNA, 100 bp, Homo sapiens
ctggggactcgcgccgggtccgtggagctctgcgagctggctgcttttcgcctcccttgcggtagcctcctagagacggggtttcgccatgttggccagg

SEQ ID NO: 7384 - DNA, 100 bp, Homo sapiens
ctggcctgcacctacggccacgaggacctacttcagaatcttggttcagcaatttgaggtacagcttcagcagtacaggcagcagattgaagaactagaa

SEQ ID NO: 7385 - DNA, 100 bp, Homo sapiens
ccgggctagagttcattcgtttcgagctggatctggtatgatgccgggcgggacggcttcatcgacctgatggagctaaaactcatgatggagaaacttg

SEQ ID NO: 7386 - DNA, 75 bp, Homo sapiens
cggtggttccccagcagaaccactctgcatcggtaatgcaggtggtgaaggagcaggttatgagagcacttacaa

SEQ ID NO: 7387 - DNA, 125 bp, Homo sapiens
catgtatttgtggcttaaactcttggcatttggctttgcctttctggacacagaagtatttgtgacaggaggcaagtgaggcctatctggttggcctttttgaagacaccaacctgtgtgctatc

SEQ ID NO: 7388 - DNA, 101 bp, Homo sapiens
tctccgcggtggaggtctgcgttgctcttgcttttcctcgctggggtgtacggtctctgaaagaagatgaatttggctgagatttgtgataatgcaaagaa

SEQ ID NO: 7389 - DNA, 74 bp, Homo sapiens
caagaatataagacttctgtcttggtgcagcaggctgggctggcgcccccggtccctgagaagcggccccctga

SEQ ID NO: 7390 - DNA, 100 bp, Homo sapiens
tgcggcccgaatgccagcgcctcttctaccggggcaagcaggtgattcctcctaaggagtggaagccaagacagtgctatgatgacattgataatttgct

SEQ ID NO: 7391 - DNA, 96 bp, Homo sapiens
gcctgggcccggcgcgggccgggagcagaggccgagaccctgcagctggttatattctgggcactaaatgaaggcgtttctaggcaatttgattcg

SEQ ID NO: 7392 - DNA, 83 bp, Homo sapiens
agttctttctcacatgctgcttagctttcagcattctccagaggcgttccatttgatctctgtggtaagaagtgctactttag

SEQ ID NO: 7393 - DNA, 100 bp, Homo sapiens
tctcagagctcggagctggacccccccatcgagtcgctgatccctgaagaccaaatagatatgaggaaagcactttccagggatactgagaagaaatcca

SEQ ID NO: 7394 - DNA, 140 bp, Homo sapiens
ggggccagcaccttggggcttccggctgcaagggggcaaggacttcaatgtgcccctctccatttcccggaccgccgacagtggtgtgccatcgccgtgctagtgggggtgcttctcctcgttctcatcttactattctc

SEQ ID NO: 7395 - DNA, 75 bp, Homo sapiens
ctgcagcatgttttaatgagtgactggtacagtgaaggtgaaattcgatttaatttaatggccattgtgtctgac

SEQ ID NO: 7396 - DNA, 100 bp, Homo sapiens
ggacagcgggctggagcctgacgagctggcggaaagaaggggatcaacctgaaagagtccaaccaatcgcatcatctaccttgatccattccgacctgac

SEQ ID NO: 7397 - DNA, 99 bp, Homo sapiens
aatgccatcagccagcaggcccctgccattatctgtgacttctatctgtggctcattggaaggaaacccagtcctgtgcctcctgattgctgagtgttc

SEQ ID NO: 7398 - DNA, 75 bp, Homo sapiens
cctcgtcgaaaggattggattggcatctttagagcatgctcagtccctggctgcgctgcaggcttactctcactg

SEQ ID NO: 7399 - DNA, 100 bp, Homo sapiens
acaaagacagcctgtctacatcattatggaactggtttcagcggggccttttccgaagtggttttagctgaagagaaggcaactggcaagctctttgctg

SEQ ID NO: 7400 - DNA, 85 bp, Homo sapiens
actcgcctcggatttgggggcttcctcactcgtggctttccgaaggctgctgaccagcatctcagacatgtcgaaaaagatgttt

SEQ ID NO: 7401 - DNA, 100 bp, Homo sapiens
cccgttaatggaaccgcgactcacagggcgaagctgtgctcaggcccgggctggacgcagagccagagctgtccccagaggagcagagggtcctggaaag

SEQ ID NO: 7402 - DNA, 96 bp, Homo sapiens
gttgaaagcgacaagtggaggcgccgctctagcggccgggactctgaactatggcgtgtacgttcctgatgagtgggaggtggctcgggagaagat

SEQ ID NO: 7403 - DNA, 75 bp, Homo sapiens
gcctcgccccgccggttcctcaccctcggggagcaacatgggcttgagtttgaagaaacagaagaacctgatttt

SEQ ID NO: 7404 - DNA, 89 bp, Homo sapiens
gttagacttgtttcttatatgtgatgccattccagcactggactcatggaggctgagcatttattcagatggagtctcgctctgttgcc

SEQ ID NO: 7405 - DNA, 89 bp, Homo sapiens
gaaactacatgaatgctggctcccggaatgctcaaaccttcggatttaaccttagctctctctgtaaaccaaatttgtatcctactgtg

SEQ ID NO: 7406 - DNA, 98 bp, Homo sapiens
ggattccaagtaactcttatttggtgctgctgctgcctccactgtactcagacccaggtagcacaggattgtccatcctccagcagctcagtgcaacg

SEQ ID NO: 7407 - DNA, 100 bp, Homo sapiens
tttgtcagctacctgatattaacattgctccacgttcaaacagcagtgttagcaagacctgggggagagacctggaatggccaaatatcaaggtgaagtt

SEQ ID NO: 7408 - DNA, 100 bp, Homo sapiens
gaaaattatcagacagtggtgattgttggtgaaacaggatgtgggaagagcacacagattcctcagtgggcctttggagtgacgctgtgggaactcatga

SEQ ID NO: 7409 - DNA, 97 bp, Homo sapiens
cagagtgtgaagtcaaatgcatgccaacattccagttttttaagaagggacaaaaggtgagagaacgccgagccgtcgccgcagcctccgccgccga

SEQ ID NO: 7410 - DNA, 75 bp, Homo sapiens
aaaatttgctggatattgatgcgccagtcactgggcttccgttacaagatgaggtctgtgtatgctcacttcccc

SEQ ID NO: 7411 - DNA, 97 bp, Homo sapiens
tgagttgatggaagatattgtggatttggcaaagaaagttgctgctcggcatggctgcccggggccacagctggccctgcctgcagcagacgccaac

SEQ ID NO: 7412 - DNA, 100 bp, Homo sapiens
cgagagaggctgcagggggagcacagccagaatggggaggaggagcctgagggagaggagcggaagaccttctggtgtgggctgggcagcaattcacttg

SEQ ID NO: 7413 - DNA, 82 bp, Homo sapiens
cgtgctgctcgacgtgctgtgcttactggtcggtggccagacaagcacaaacctctcaggagccctaccacgacaaggccag

SEQ ID NO: 7414 - DNA, 96 bp, Homo sapiens
cctccaattcctgatcctggcaagatttttaaagaaatgtttggagaccagaatgatgatactctgaatggacagcaaattatggatgaacctatg

SEQ ID NO: 7415 - DNA, 50 bp, Homo sapiens
tcgcccacgcccagcagcagcagcaacagaatgctacactgcaagcagag

SEQ ID NO: 7416 - DNA, 80 bp, Homo sapiens
gcgactggacttacgaggagcagtttaagcaggatgatcggctgaatgtaacagaggaactaacgtccaacgacaagacg

SEQ ID NO: 7417 - DNA, 83 bp, Homo sapiens
actggaacaagcccaaaatgaactgagtgcctggaagtttacgcctgatagtgagattttcgtccatggagatttgaagtggg

SEQ ID NO: 7418 - DNA, 100 bp, Homo sapiens
agacagactcacctccaaccttgctctaggtcgtaaccagcctttgaaaaaggagaaaccaaaatggaaaagcgattatcctatgacagatggacaacta

SEQ ID NO: 7419 - DNA, 99 bp, Homo sapiens
aaattcaaaaaggataaggagatcatagcagagtacgatactcaggtcaaagcattttgaaagcgaagcagaagccgtagaatcagcggcgagcctgtt

SEQ ID NO: 7420 - DNA, 50 bp, Homo sapiens
aagacgatggaaaaggaaactttagatgtcaatgaagagcttccagccag

SEQ ID NO: 7421 - DNA, 83 bp, Homo sapiens
cggagagactcgccggccgagggtggccctaggggcagcgagcaagacagcaagcagggtcggcactcttcaccctcccgagc

SEQ ID NO: 7422 - DNA, 96 bp, Homo sapiens
aaggagcctacagatgggcagtagatcatggaataccctcttgccctcctaacatcatgaccacaactgttcgggggtcttgtctggattttggtt

SEQ ID NO: 7423 - DNA, 145 bp, Homo sapiens
ggagccaggggcccgagggcggggaccggcggcgctggaggagcgaggcagctgtactaggactgggaacgggtactccaaagattcaggtttactcacgtcatccagcagagaatggaaagtcaaatttcctgaattgctatgt

SEQ ID NO: 7424 - DNA, 90 bp, Homo sapiens
cggcgcgccctcctgctgcctccccggagctcccgggccagtagggcttacctgttgctttagacaaacatattcttggttttgacacag

SEQ ID NO: 7425 - DNA, 95 bp, Homo sapiens
gggagctggacggcgagcgcgagcggcgcgagaaaagctccacgcaggagatcggtgaggagctgatcaacggagtcatctactccatctccctg

SEQ ID NO: 7426 - DNA, 100 bp, Homo sapiens
ccaccatcgcctgtcacctggacccgcgcgtgttcgtggacggcctgtgccgggaagtgctctctggcgtggtggtcatatcgagtaaggattcagtcca

SEQ ID NO: 7427 - DNA, 100 bp, Homo sapiens
caaagagctggtgcgaaaagatctgcaaaattttctcaagatcctgaccgccaccattgaaaacaaccgggtcatcctggagattgacaatgccaggctg

SEQ ID NO: 7428 - DNA, 75 bp, Homo sapiens
ctggcgcagatggtgttgctggtcccaagggtagtcctggttctcgtggtcttcctggagctgatggcagagctg

SEQ ID NO: 7429 - DNA, 82 bp, Homo sapiens
gcggctcggacgccagcggacacgcgggcgaggtgtcgtgaaaactacccctaaaagccaaaatgggaaaggaaaagactca

SEQ ID NO: 7430 - DNA, 116 bp, Homo sapiens
ctatattctaactgtagcccttcctgtgttcctggttatcctcttctgctgttctggaaaggcgcagttgtgtagcagttgagtaatgctggttagctgttaaggtggcgtgttgc

SEQ ID NO: 7431 - DNA, 82 bp, Homo sapiens
cgcgtcctcagacgcagcgtctagtccctggccatagctccgccgctgcccgagtccctgtgaagcaggaagagtgagggca

SEQ ID NO: 7432 - DNA, 100 bp, Homo sapiens
ggctccctgtatgcatggtgtggggttggtgtgattagcttcgcagtctggaaagctttaggagttcacagtgcaaatcctgatcctaactgttgtcttg

SEQ ID NO: 7433 - DNA, 100 bp, Homo sapiens
cttgcgacaagttgccggagccgcggggcgcgggcggcggacagattgaccttcagagcgagggcgccctgcgtccggcagaggaggcgagcatcccgct

SEQ ID NO: 7434 - DNA, 83 bp, Homo sapiens
aagccactgaagacaggcttaagcatgatactgatggaacgtcgaattagaccatggattaataagaaaatcatagaatatat

SEQ ID NO: 7435 - DNA, 100 bp, Homo sapiens
cgtcggccgcatccgtttccacgactttctgggagactctatttttcagtgctgtacaagcgtcttgaattactctggtagcttttccagaaagacccat

SEQ ID NO: 7436 - DNA, 97 bp, Homo sapiens
aaaaaaccttggaggaactctatttagatgctaatcagattgaagagcttccaaagaattctggtacagctcaagttttcagtttagtagcagaacg

SEQ ID NO: 7437 - DNA, 73 bp, Homo sapiens
cttcatctcttgtgtggggagtttcatcctagcgggatgtgtttcacatggtagttgaagtaccacgctggtc

SEQ ID NO: 7438 - DNA, 50 bp, Homo sapiens
catgaagatcgaaagccttcagaggatcttcaagatgaagttcaaaggga

SEQ ID NO: 7439 - DNA, 116 bp, Homo sapiens
cccggacggcccctgtccccgctggcgggcttccctgtcgccgttcgctgcgctgccggacaatgcagatcttcgtgaagactctgactggtaagaccatcaccctcgaggttgag

SEQ ID NO: 7440 - DNA, 85 bp, Homo sapiens
cttggacagctcaatattgatatttccaacataaaagataacgaaggaggcccaacttcattcaataaggagcctgacggattta

SEQ ID NO: 7441 - DNA, 137 bp, Homo sapiens
taacaatcaagatgaatatgaccctatggaagcagaagaagctgaggatgaagaagatggttgtggccgatatgctggtggacaaggttacaatagcattgggcatttttgtggaggatgggctggtaactgtggtg

SEQ ID NO: 7442 - DNA, 83 bp, Homo sapiens
ttctcaattttctttctcagaaagcagaggctcagagcttggagacagacgggcaaacctggtggacctgcagaagaagctgg

SEQ ID NO: 7443 - DNA, 82 bp, Homo sapiens
gtctggaattggcaacatctctgagagggcagctgcaatgactctccgcacggtattattgtcattgcaagcactattggca

SEQ ID NO: 7444 - DNA, 100 bp, Homo sapiens
ctctcacctgcttcctcctgggcgtgggctgccgtaacaaatgtggcaattattttggatctatcacctgtcatcataactggcttctgcttgtcatcca

SEQ ID NO: 7445 - DNA, 76 bp, Homo sapiens
ctttaatgagtgtattcttctcttctccgatttaccagatattgatgatgttaagaagttcaaaccgggttacctg

SEQ ID NO: 7446 - DNA, 73 bp, Homo sapiens
gaaaacatatattggagctacatggatgaagctgaatatggtgggcatgatcagatagatttgtatgacgatg

SEQ ID NO: 7447 - DNA, 98 bp, Homo sapiens
ggacacctgtgaagcccaccgccctaacaggcatctatcgagctgtgcctattcgagtcaatccaagagtgagtaatgtgaagtctgtctacaaaacc

SEQ ID NO: 7448 - DNA, 90 bp, Homo sapiens
ctgttcagtactgtgggtgatatttgcctttagtgcactcttctccttcacagtaaagtggctgtgtggaagccagctctccaggccacg

SEQ ID NO: 7449 - DNA, 89 bp, Homo sapiens
agccccctcagtggactggggggagaagaaccacatttgaatttgggagattccattaggagggattatgaagacctgtggaatgttgt

SEQ ID NO: 7450 - DNA, 75 bp, Homo sapiens
acggcgccctggactccttcctgcgggggagtgaatgcccaaaccaagaacggtgccacgcccctgtacctggcg

SEQ ID NO: 7451 - DNA, 100 bp, Homo sapiens
tcagcctccgcctggtctctggtgtctgatgatttgtgagcctcaagtgactactctgtggaatcatctgtccttgcctttgaattagctttccctaggc

SEQ ID NO: 7452 - DNA, 106 bp, Homo sapiens
gtgaatcagatcatcaaggacttggcctccatggtgtcagagcaaggagaagctgttgggagtgcatccgccccaacccttttccccctcgtctcctgtgagaatt

SEQ ID NO: 7453 - DNA, 96 bp, Homo sapiens
tcaataaagatgcagtgcctgcaagaacatcgttggtaccttctccaggcaaattccgttcccctgcagcaccatctcctttggctcttcggcaac

SEQ ID NO: 7454 - DNA, 100 bp, Homo sapiens
gtttgtttacagctgttgtcctggtatctgcagcatatagcactttctacattgtgggtttaatattatcaatgcagataccttttgtgggattccagcc

SEQ ID NO: 7455 - DNA, 90 bp, Homo sapiens
tacccgttaagtcccccaaagatgagatttacctgtgagatgtttcatcccaacagcatcaagcatgatggaaccatgtgtgatacctgc

SEQ ID NO: 7456 - DNA, 90 bp, Homo sapiens
agcgcgatctctaccgggacacgtgggtgcgatacctgggaattagaaggtgacgaggagggagaagacgaggatgatgcggaaattaac

SEQ ID NO: 7457 - DNA, 101 bp, Homo sapiens
cattctttctgtgagaaaatactggtgtgaaatatctcagcaacagtggttaggttccaatatcatttgtggatcgtgtttatggtgaatccaagttggga

SEQ ID NO: 7458 - DNA, 98 bp, Homo sapiens
gaaggcagaggctgcgcagagaatggagagctgtgtctgaggagccttggaacattcacccaggtgttcttcagatgatgcagacgagaattggggct

SEQ ID NO: 7459 - DNA, 100 bp, Homo sapiens
cgggtgcctttgaaaatcaacgacaacttgagcacagaaaaatatgtcgtaactgcaagtgtggccaagaagagcatgatgtcctcttgagcaatgaaga

SEQ ID NO: 7460 - DNA, 100 bp, Homo sapiens
ggaagttgttgaattcttgaaaaatccacaaaaatttactattcttggaggtaaacttccaaaaggtatcccatgtataaccgattgtgtaatggctgaa

SEQ ID NO: 7461 - DNA, 75 bp, Homo sapiens
agctttttcgtttcatttcctcactttgcgttgtagtcgtctcaaagggcaagattaccttatgctggctacttt

SEQ ID NO: 7462 - DNA, 100 bp, Homo sapiens
ccctcctcctgaggcaccacgtctctaccgagcacaaactccacgaagccaacgcccagagagcagagctgacatctgataaagacatgtaccttgacaa

SEQ ID NO: 7463 - DNA, 49 bp, Homo sapiens
gtgacttgactcttcaaacacaaagattatggattggatatgtctactt

SEQ ID NO: 7464 - DNA, 75 bp, Homo sapiens
ggcagaggaggcgggagagtgagagaaaggctggaagacgaggttgctatcaagatcatagataagacccagctg

SEQ ID NO: 7465 - DNA, 102 bp, Homo sapiens
tggaagaggccgagtctccagacatcactgcccaccagaagtatgtccgacaagcctggcagaaggcagacatcaatacaaaatgggcagccacacgatggg

SEQ ID NO: 7466 - DNA, 99 bp, Homo sapiens
atgagtcctgaggctctgaaacaccaaggctatgacacaaagtcggacatctggctgtggatctttccattgatgagtccagcttgacaggtgagacaa

SEQ ID NO: 7467 - DNA, 83 bp, Homo sapiens
cgagaggaacctctatgccgacatcgacgccgcctggcaggccctgcgcaccaggtgcccgtggttgacacgagctgtgtccc

SEQ ID NO: 7468 - DNA, 98 bp, Homo sapiens
aagaggaacatcgtggtgaagaccgtggagatgcgggatggagaggcccgctacaacttcatccgaagcatggccgcctacagcctcctgctgttcct

SEQ ID NO: 7469 - DNA, 90 bp, Homo sapiens
gtgatcttggcctgcaggaacatggcaagggcgagtgaagcagtgtcacgcattttagaagaatgggtacagcagggaagaactggaaac

SEQ ID NO: 7470 - DNA, 96 bp, Homo sapiens
cagactactgaaggacttgaggattcgttttcctggctttgagcccctcacaccctggatccttgacctactaccacaagtatatggttatgatga

SEQ ID NO: 7471 - DNA, 75 bp, Homo sapiens
tctttcttgacattaccttttcaccagactatccgtttaaaccccctaagggccgttgctccagggagaactgca

SEQ ID NO: 7472 - DNA, 89 bp, Homo sapiens
ctgatccgggagagtgagagctccccaggggagttctctgtgtctgtgaatacctcctaaatggctctactttgaacctgctgggcaag

SEQ ID NO: 7473 - DNA, 98 bp, Homo sapiens
ggaggtgaaggacaagctcctacaaggcaggcagtattgggtgcagtctttagtagctttcccaaaactcaaacggcaagttttgttgtatgaacctc

SEQ ID NO: 7474 - DNA, 101 bp, Homo sapiens
tcccaaaatgaaaatttctccaaaaaggatgtcatgttcctggcctgaggaggagacccacccggtggacttgagctcgctctccagtaagctactcccag

SEQ ID NO: 7475 - DNA, 122 bp, Homo sapiens
gaagaaactgaggttcagagaggttaagagactccactgaggtcacacagccggagtatgctgctgctgttccgctttgcgtcctcgctacaaacgcctggtggacaacatattccctgaag

SEQ ID NO: 7476 - DNA, 75 bp, Homo sapiens
gccagcaactcccagctcaatgcaatgatggatgatgatgacgacgacgatgacgtaggagatcatgacgatgac

SEQ ID NO: 7477 - DNA, 100 bp, Homo sapiens
atcagtcaaggaagacccactggagagaagcatagtggagagaagccatatgtctgtgataggtgtggacagagatttgctcaagccagcacactgacct

SEQ ID NO: 7478 - DNA, 90 bp, Homo sapiens
actcagaatcgaatctcttctccctccccttcttggagaaaatatggagaagtcttgtgcaagcaaggaagaagtcaaagaagtcagtat

SEQ ID NO: 7479 - DNA, 80 bp, Homo sapiens
atgggccaaggaaaaatcgagcagaaagaatgtctttcagatcacaaaatttgtccaggatagacatagagctagaagaa

SEQ ID NO: 7480 - DNA, 83 bp, Homo sapiens
cagcgggagctggacggcgagcgcgagcggcgcgagaaagggtgagcccctccagactccgaataggagatcaagagtttgat

SEQ ID NO: 7481 - DNA, 101 bp, Homo sapiens
catcctggccctcagcatcgtgctctggaggcagagggtccgtggggctccaggcagaggtgtcccgcatgagatgtctgcagaatgagacttacagtgcg

SEQ ID NO: 7482 - DNA, 90 bp, Homo sapiens
accggaagaaactgtccgagaagcccaaatcctaccctggtccaagcctggaaagtgaagacttcaacattccaccaattactcctcctt

SEQ ID NO: 7483 - DNA, 101 bp, Homo sapiens
acgggcaagcgggcagctgaagatgatgaggaagaggacgaaccggtagtgataaaagctcaacctgtgccacattatggggtgccttttaagccccaaat

SEQ ID NO: 7484 - DNA, 74 bp, Homo sapiens
gaaaattacctaaatgcactctttcgaaagaaagatccctgcatgtcactgagtccaccatgctttacagaaga

SEQ ID NO: 7485 - DNA, 51 bp, Homo sapiens
gatggatagcattcactggaaagagacaagagagacacctccaacttcgac

SEQ ID NO: 7486 - DNA, 100 bp, Homo sapiens
gagaagctgcatgactcggtggtcatggtcacccaggagagtgacagcagctttctggtcaagacatttgtccgactccataaccagaagactggccagg

SEQ ID NO: 7487 - DNA, 100 bp, Homo sapiens
gccgccgccgccgccgcagcttgggaggtgctgccaccacaggcctggaggaggcagaggccaggagggagaggtcccaagagcctgtgaaatgggtctg

SEQ ID NO: 7488 - DNA, 100 bp, Homo sapiens
ggcccaagaaaaagcacctggactaattctgcttggtcagaatcgtgatggcattgtgttcagcactgatgactattttcaccatcaagatgggtacagg

SEQ ID NO: 7489 - DNA, 87 bp, Homo sapiens
ctgcaagcgttagacttctttgggaatgggccaccagttaactacaaggtgtacatgtaccagctcttccgcagcttggcctacatc

SEQ ID NO: 7490 - DNA, 80 bp, Homo sapiens
ggaggttcctacagagattcatatgagagttatggaaaatttctaccttgaaccgtatctgaaagaggttattcgggaaa

SEQ ID NO: 7491 - DNA, 100 bp, Homo sapiens
cggcccccaacaaggacggagacgccggcgtgggcagcggccactgggagctgagggaggcttctacagagcacaactgcatgaggacaaagagtcgaga

SEQ ID NO: 7492 - DNA, 80 bp, Homo sapiens
gaagatggccaccaaatcatgccccgagtgcgaccaacagacaatgcagatcttcgtgaagactctgactggtaagacca

SEQ ID NO: 7493 - DNA, 100 bp, Homo sapiens
cctcctccttggtcgccgcgtccttggctggcgtcttccacagcgcggcacctgtacctccggggtggcgctggggttggctccatgaccaagatctatg

SEQ ID NO: 7494 - DNA, 75 bp, Homo sapiens
acacacctggttgctcagacaggtgtatgcaacagcgttattgcaacaggctaacgaaaacagacaaaattcaac

SEQ ID NO: 7495 - DNA, 75 bp, Homo sapiens
cttttacctacgttggcggccccagaagattcgccttttacaagtccacctctcagagaagaaataatggcaaat

SEQ ID NO: 7496 - DNA, 90 bp, Homo sapiens
tgccagttaattactttgaatgtgatttgaagatattaaagctagaaattggaactagaaaatcaaaagaattcaaggcatcttaacgtg

SEQ ID NO: 7497 - DNA, 75 bp, Homo sapiens
attcccggaccctggaagagaagagggtggctaatgattaaggatgaatttacaggaattgaacccttgagcgag

SEQ ID NO: 7498 - DNA, 83 bp, Homo sapiens
cgtggacctcctcaccctgccgcagctgtgcttcccagtaatagctcttcaagtctgcaataaaaaatggcctccaacaaaac

SEQ ID NO: 7499 - DNA, 89 bp, Homo sapiens
tctggaggatggggtggatgggaggtactccaaagattcaggtttactcacgtcatccagcagagaatggaaagtcaaatttcctgaat

SEQ ID NO: 7500 - DNA, 98 bp, Homo sapiens
cgaggatgccagtttttagggccagattgtagggaatggaagtgaacagcagctgcaaaaagagctagcagatgtactgatggatcctccaatggacg

SEQ ID NO: 7501 - DNA, 100 bp, Homo sapiens
cctgaagcagctgctgtcccgggcctaccccctggactccctggagaagcagatggaaaagatgagtcctgccggcggtgaccatcttccaacataggga

SEQ ID NO: 7502 - DNA, 96 bp, Homo sapiens
ctgtggcctcgttacctgcaggtattgggagatccacagctaagacgccaggacccactggaagcctagaaatgaatgttggctaccagggtattt

SEQ ID NO: 7503 - DNA, 74 bp, Homo sapiens
tcacgccgttctcagcctctcgagcagctggaactacagctgtccctttccccccaacacatcgcttgacatct

SEQ ID NO: 7504 - DNA, 83 bp, Homo sapiens
gcttgatcttctagactccatggcaccgggctgagcggacaatgcagatcttcgtgaagactctgactggtaagaccatcacc

SEQ ID NO: 7505 - DNA, 49 bp, Homo sapiens
tttcctgaactggaaaccaatggttcagaagtttacctaaggagagaac

SEQ ID NO: 7506 - DNA, 100 bp, Homo sapiens
gtaattggaggaagaatgatagcacagaaaatctctgtcagaactgcatttgacattgtgcagcaaagaaatggttatggagaagcccagtccgctgctt

SEQ ID NO: 7507 - DNA, 82 bp, Homo sapiens
gctacgccaaggagtctagcagtgagcagtacgtgcctgatgtgttttataagttaagtgggcagaccaacatccacctcag

SEQ ID NO: 7508 - DNA, 100 bp, Homo sapiens
ctgtgggacttcgaaggagggctctcctgtctgccaccatcctgggttgacaattctacacaaggagtgttgacctaaccaatgaagaaacaactgattc

SEQ ID NO: 7509 - DNA, 90 bp, Homo sapiens
tccatcgcccactggacgccgcccgcggccggaccggtcatctcgatgcactcctgaggggcttggttctgggaaaactaggaaaagcag

SEQ ID NO: 7510 - DNA, 100 bp, Homo sapiens
gtggaatcgggggatttgcagaaagaaatagcgtctgagatcataggattactgatgctggaggtgcagtggcgtgcagggccctggaggcggactcagg

SEQ ID NO: 7511 - DNA, 74 bp, Homo sapiens
ccctcttccaccattacgaccccttagttctacaggtttaaaaacctcacagcttgtataatgtaaccatttgg

SEQ ID NO: 7512 - DNA, 128 bp, Homo sapiens
cagaccctggagcctcagttggaagcagccgatccagcctgcggagcctgtggggcagcagccagactgccttccgggtcactgccatggaggagccgcagtcagatcctagcgtcgagccccctctg

SEQ ID NO: 7513 - DNA, 120 bp, Homo sapiens
gactcatggaggccagattttctccaattaaccagatcttgccctggtgcagacaagacttaacaatgcagatcttcgtgaagactctgactggtaagaccatcaccctcgaggttgagc

SEQ ID NO: 7514 - DNA, 100 bp, Homo sapiens
cccgctgcccagcgccagatgcaagcaaagccccgctctttcattgcattgatatgaaccatggacaagtatattctgctgccacaaagactgtaaagtg

SEQ ID NO: 7515 - DNA, 50 bp, Homo sapiens
gctccaaagacatccagtatctcaagggagaagatagcattcttcacaag

SEQ ID NO: 7516 - DNA, 75 bp, Homo sapiens
tcaatgacagggaccaggggggcggcagcgctggacacccagcctccaggccccttcacagatgtagtcactaca

SEQ ID NO: 7517 - DNA, 90 bp, Homo sapiens
gtgcctgtgaaccagattttcatgatggctttttacttgaagtacacagagaaagcttgggtgacagtcatggcgtctctgcgaaggccc

SEQ ID NO: 7518 - DNA, 98 bp, Homo sapiens
gcgccggcctccggggagaaacggctgacaaacgggctcatcataatgcactggaacgaaaacgtagggaccacatcaaagacagctttcacagtttg

SEQ ID NO: 7519 - DNA, 74 bp, Homo sapiens
agcctcccgagtggctgggactacagatggtgaggtctacagctttgggactcttccctggagaagtggaccag

SEQ ID NO: 7520 - DNA, 98 bp, Homo sapiens
acctctcacacctgcttctgacccatgtggctgacgcctggggcgtggagctgcccaagcgtggctatccccctggtctccatcatcaccagttccag

SEQ ID NO: 7521 - DNA, 78 bp, Homo sapiens
ccggctgcatgccgcctcctatctgcccgccgctcgcgccgggcccgtggccgggaaagtgatgaagcattgggccca

SEQ ID NO: 7522 - DNA, 96 bp, Homo sapiens
ttccggccaacttccattgaacttcccagcactcgaaagggaccgaaatggagagcaaagtgatagactggagtgatgttagaaaacacaaatatg

SEQ ID NO: 7523 - DNA, 101 bp, Homo sapiens
actttgtggctgcctttgttgctgctgcacattaggttgcagtatgtggccagttatttgcctcagtaaaagagcgcctccttggcattataacaaaaaaa

SEQ ID NO: 7524 - DNA, 101 bp, Homo sapiens
aggcctggctgagctgtcatcccccagatggagtctcgccctgtcacccaggctggagtgcaatggcgtgatctcggcgcacttcaacctcgcctcccagg

SEQ ID NO: 7525 - DNA, 83 bp, Homo sapiens
gaggacacgaggcggcgggctggagacatggaccgcggcgagcaaggtttggtgcacctcgatttggaggaagtagggcaggg

SEQ ID NO: 7526 - DNA, 100 bp, Homo sapiens
ggcgacgagctgaccctgggagacatcgacggtggtgcagcggctgacgcggatggtggggaagaacgtgaagctgtacgacatggtgctgcagtttctg

SEQ ID NO: 7527 - DNA, 78 bp, Homo sapiens
gttgcaaaggcgcttaatcggcctccaacgttctgcagatctccaggggagcccaccagcctagtcaacatggcctcg

SEQ ID NO: 7528 - DNA, 75 bp, Homo sapiens
ctgaggctcagagatgggtggagtgtcttcaataggccgtgtttaagaggcgtcttacactccctgttgccagtg

SEQ ID NO: 7529 - DNA, 87 bp, Homo sapiens
cccaaggtgctgaacccccgcggcctccggctatcaagcccagagagagacgtggagagggacgtcttcctgtatagagcgtacctg

SEQ ID NO: 7530 - DNA, 80 bp, Homo sapiens
gtcagagcaggctgtaaaaaatgtggctaccaatgacagaagccacattcgatactctgcgactctggttaataatcctg

SEQ ID NO: 7531 - DNA, 90 bp, Homo sapiens
gtggagaacctgcagtcctttaacgagatcactgctatggcccagagacggaaagtacaaagactagtaaaatacatccttgcccttaag

SEQ ID NO: 7532 - DNA, 101 bp, Homo sapiens
gtcatgctgccgacaccctgacggccacgaacttccgagtgggtctcggacagcccgggagacgagccctcggagtccccatacgaaagtgcagacgaaac

SEQ ID NO: 7533 - DNA, 82 bp, Homo sapiens
ggggggcgagtaagccagcggcaggaccagcgggcgggggcccacgaatgtgaagttcatttccaatccgccctccatggtg

SEQ ID NO: 7534 - DNA, 99 bp, Homo sapiens
tgccaagggagccatgtccacccaacagatcaagaaggctgaagagattgctaatgagatgattgaggcagccaagggcagtcagggcgacagcaagaa

SEQ ID NO: 7535 - DNA, 85 bp, Homo sapiens
ctcagacttgagggtcaactttaccagctgaaggtcactctgtgagactgctgggtcagaaaaaggataatggaaggcggcttgg

SEQ ID NO: 7536 - DNA, 100 bp, Homo sapiens
agaggaggggcaacctgagttatcagaaagtgacttcctggccttcccttctttactgatcaggtagacgttacatccaagaggaaataatccaggcaag

SEQ ID NO: 7537 - DNA, 87 bp, Homo sapiens
ggatgatgcagaagaggagtcctttaggaagaatccagactccaaaatgatgcaaatcaacctgactggatttttgaatggaaaaaa

SEQ ID NO: 7538 - DNA, 89 bp, Homo sapiens
gaactagggagcgtctccggctgcacagcgctcaggtttggaattcacccagttgcaggccgaatgcctggtcagcttaatgtgctgct

SEQ ID NO: 7539 - DNA, 83 bp, Homo sapiens
caactggttcaagaaccgccggcagcgcgacaggaacccctccgagacccagtccaaaaggcataatcaccagcaacacccgg

SEQ ID NO: 7540 - DNA, 104 bp, Homo sapiens
tctaacagggcaaaaaaagggctggaaacttcgctatcatggagatcagattctagactttggctacccacagaattccgagacaggcgcgctgaaaaccttca

SEQ ID NO: 7541 - DNA, 93 bp, Homo sapiens
cttcacctacaaggtctatgctgacaagaggctggacgcacaagacaatgcagatcttcgtgaagactctgactggtaagaccatcaccctcg

SEQ ID NO: 7542 - DNA, 98 bp, Homo sapiens
gcagcccaaagtcgaatgattcagacttgcaagaccagcatctcagacatgtcgaaaaagatgttttgatccctaaaataatgagagaaaaggccaaa

SEQ ID NO: 7543 - DNA, 100 bp, Homo sapiens
acctgcttcatccttgtttaatgactttggtgccctcaacatctctcagagacgaaaggtgggagaaggagagaaattggtgagggctctttttgctgtg

SEQ ID NO: 7544 - DNA, 100 bp, Homo sapiens
tcattacaatagcaacttctgttgataagttggtggaaagagtggaacgagaaaacctttcagactattgtgttctgggccagcgtccaatgcatttacc

SEQ ID NO: 7545 - DNA, 100 bp, Homo sapiens
gcccgcgggggagccccgggagccgcacgctttttgacagattgagagatgaaaatccagattttagagagaaaattatagcaatcaacagcgaactcac

SEQ ID NO: 7546 - DNA, 100 bp, Homo sapiens
cgaaaaccgtgtatgagggattcatctcggctcagagtctcattctgttaccaggctggaatgcagtggcgtgacctcagctcactgcaacctccacctc

SEQ ID NO: 7547 - DNA, 75 bp, Homo sapiens
cagtggaatcctgtatcagaactttggctgaagtggcttcaaaagcagtggactgtcttttggattcaaagtggg

SEQ ID NO: 7548 - DNA, 99 bp, Homo sapiens
tgctggaccgcttttacaatgcagttgactatattgtggagtatgactatgatgctgtacatgatgatgaattaactattcgagttggagaaatcatca

SEQ ID NO: 7549 - DNA, 75 bp, Homo sapiens
ttaacatgcttcaaataaatcagatgtgttcagagcaacattgttttgttgacacaagcatttagaagaaagttt

SEQ ID NO: 7550 - DNA, 50 bp, Homo sapiens
gcaaaatggcggatcatgtgcaggttaattatagaaaatgccaagtagga

SEQ ID NO: 7551 - DNA, 74 bp, Homo sapiens
tgaagtatttggctgaggagttttcaatcccaagtaaaggtgggattctatccaaagcttgtgattatatccag

SEQ ID NO: 7552 - DNA, 75 bp, Homo sapiens
cagttggaagaggccgagtctccagacatcacgtctccatcatcaccagttccagtagtgaaaaacagaacccaa

SEQ ID NO: 7553 - DNA, 89 bp, Homo sapiens
actcacatcccaggccggggctgttttccagagctttgccaagttcagcaaatttggagatgggagtggttttcagagacatttcagaa

SEQ ID NO: 7554 - DNA, 75 bp, Homo sapiens
ccggcgcgcggcgctttacgtacacaaattgatgcttcagatgaatgctaagcacaaagcagaagaagttgaaga

SEQ ID NO: 7555 - DNA, 110 bp, Homo sapiens
gcttggcggggaaaacgactgcccacggaggaagagtgggagtttgccgcccgagggggcttgaagggtactggtgtggcatactcggacagagaagcccaagatgaagc

SEQ ID NO: 7556 - DNA, 75 bp, Homo sapiens
ggggatagtgaaggtgctacggtgcagtgaaagctggtggaatgcgaattgtgcagaaacacccacatacaggag

SEQ ID NO: 7557 - DNA, 101 bp, Homo sapiens
cggggctgggcaacgggggcctgggccggctggcaggtttgccatgcagaacttgaattggggacttgttttcaagcagtaaatagcagaattcagttaca

SEQ ID NO: 7558 - DNA, 100 bp, Homo sapiens
cacacctgtagacgttcgccaggtaaaggccttggatggtatactgtaaattcagcatatggagataccattatcataccttgccgacttgacgtacctc

SEQ ID NO: 7559 - DNA, 74 bp, Homo sapiens
caaagccaggcacaaaatctgggtttaaagggcttttttccagacttcaagctcccattccaacagtaagagct

SEQ ID NO: 7560 - DNA, 100 bp, Homo sapiens
ggtatggaagatcaaacaaacttgttgggcttctcgacggagagagacaaacatcatatctgaactaagtaaatggagacttaattttattgactggcac

SEQ ID NO: 7561 - DNA, 82 bp, Homo sapiens
attgtgtctggtggctatgggggctctggtgatggactcatccccacaggtaatttcatctgtgccaaagcctccagaggac

SEQ ID NO: 7562 - DNA, 100 bp, Homo sapiens
cctcaaggttgaagcagaagaataaggagaaggataagtcgaaggggaaggcgcctgaagaggacgaagggtctccgtctctccaccgggggcttcatcc

SEQ ID NO: 7563 - DNA, 76 bp, Homo sapiens
gttaacttctgtttacatggaactcagacatctgcaaatcatgcaagccagggctgagcaggaagaagaattcatt

SEQ ID NO: 7564 - DNA, 90 bp, Homo sapiens
cgcgtctctctgctgcggcgcggggaccgctgtgctctcggagcctcctcaacaagcccaagagtgagatgaccccagaggagctgcaga

SEQ ID NO: 7565 - DNA, 80 bp, Homo sapiens
atttcaaccataaagacatcttaattgggcacgaaagaggaggaagaacgtgcaaaacgtgaggagctagagcgaatact

SEQ ID NO: 7566 - DNA, 100 bp, Homo sapiens
tcgccaccaatggagccgtgcaggggggcggagcctactctggcaaactgatacaactcagaaactgctcaatgtcaggaaaaccggaacttgttgatga

SEQ ID NO: 7567 - DNA, 100 bp, Homo sapiens
ccagaggactttcttccagcttctgctgtccttctttgtggagagcaaggtaaaaaagagtgtcaagtggacatgcaaagcttgtggagagaagcagtcc

SEQ ID NO: 7568 - DNA, 78 bp, Homo sapiens
aggcgctggaattacatgaacataccaccctagtaaagatttgcctgaggttgactgtacatacaaatattgagcatt

SEQ ID NO: 7569 - DNA, 90 bp, Homo sapiens
ggagaagaaactgaggcctggaatttgattaactcattcaaggttacccagttgactcgtcctcccactgacttgagctttaactttgat

SEQ ID NO: 7570 - DNA, 75 bp, Homo sapiens
gttggacgctgccagtttgcacagcagcagagtcgtgtcccaaatgcgaacatcctcgtgcttacttcatgcagc

SEQ ID NO: 7571 - DNA, 50 bp, Homo sapiens
ctgtcattcacaaccccctgaaagctgtaaacaggaacatcgataagtag

SEQ ID NO: 7572 - DNA, 80 bp, Homo sapiens
gccatcttggctcctccctcgtaataaaagactagtggccttagtgcccatgcccagtgaccctccattcaatacccgaa

SEQ ID NO: 7573 - DNA, 87 bp, Homo sapiens
tttggttaaacgaatcaaagagggaactctaatgatccaggacaaagaagttaccctggagtatgtatcaagcctggatttttggta

SEQ ID NO: 7574 - DNA, 100 bp, Homo sapiens
tgaggatgctacaggcagcagcagggctggcaccctgtgtcacagattccctcccaggctgtccctcgccgccttgctacagcccccaagactgaaaaac

SEQ ID NO: 7575 - DNA, 83 bp, Homo sapiens
gcgggcccgggctgcggcgtgtgcgcgcccgccagctgctccggagatacgattgtcctgggtcacataatgccagctgagcg

SEQ ID NO: 7576 - DNA, 96 bp, Homo sapiens
gctacttttactcagagtttgaaggttgtgaccaaaagaggctccggggacatcacccagaagggctatgaaaagaaaaggtccaaactcctatct

SEQ ID NO: 7577 - DNA, 121 bp, Homo sapiens
gaggaccacattacccagcttcacgagtacaatgacatcaaggatgtggggcagatgctgatgggcaaactagaaatgcccctccgggctaggagcgacggcgccggcccgctatactcgc

SEQ ID NO: 7578 - DNA, 90 bp, Homo sapiens
ctcgctcacgggtcgttgaggccggtgacatgtctgtgagctgcggaggctgcggcccccaggaaatcaatgtgttgacagttgcattag

SEQ ID NO: 7579 - DNA, 78 bp, Homo sapiens
atgggggacgtgctgtccacgcacctggacgacgcccggcgccagcacatcgcagcaataagagctaactgccatcaa

SEQ ID NO: 7580 - DNA, 71 bp, Homo sapiens
tcccagcccaagctagagcttgtggatggagacctcacagacacggtcagtggtccccgctccacagcctc

SEQ ID NO: 7581 - DNA, 82 bp, Homo sapiens
cctggtgcagcctcaggaccgccaagtgtatgttttaactggaaaaagtcttccatgaaaacgtcacttttaaaaaataagt

SEQ ID NO: 7582 - DNA, 100 bp, Homo sapiens
gactcaagcgatcctcccaccacctcagcctcctgagtagctggaaccatcatatgcaccagcacgcctggctaactatcagttgagggatttgcagttg

SEQ ID NO: 7583 - DNA, 50 bp, Homo sapiens
cgcatctgggacctgaataaacacgggggggctgtcggggggctgttagg

SEQ ID NO: 7584 - DNA, 90 bp, Homo sapiens
cacacactgggaaacatcattaaatcaaatgtagacaaccaatttcctgggcaagctgctccacctggattcccagtgtatcccgcgttt

SEQ ID NO: 7585 - DNA, 100 bp, Homo sapiens
aagtcagtctatgacaacgtctctctgccgtgaatcattcctgcagatgaaaaagtgtgacttggcagctgatggcccactgcgtgaccttggttcagct

SEQ ID NO: 7586 - DNA, 83 bp, Homo sapiens
ggaatgtgctcttgtcctggcattgcatccacaggaggggcaggaaattctttgaaggtaattatgaggaattagaaaactca

SEQ ID NO: 7587 - DNA, 100 bp, Homo sapiens
gttcccactggctctgctgaccttgtgccttggataccgaagtgtataaagctacagtaaaagatgacctcaccaagtggcagaatgttctgaaggctca

SEQ ID NO: 7588 - DNA, 100 bp, Homo sapiens
gtattgagaacaatatagatttgcaggttacaatggccaacattggaataaatggaaatcattctctggaaacctgtgaaacaacactttttgctctccg

SEQ ID NO: 7589 - DNA, 95 bp, Homo sapiens
ggtgtttgacaaaacataccaattcttgaatgacatccgagcgaaagagaaagaggagaaattgacacaagattctctttttgtgcggtggcaac

SEQ ID NO: 7590 - DNA, 76 bp, Homo sapiens
cggatatttaagtacaatggtgggcttaattttagttgtctgggttcatgtctaagcttgttccagctatccagaa

SEQ ID NO: 7591 - DNA, 100 bp, Homo sapiens
gtttctatatgacctggttatgacccatgctcttcagtggcccagtcttaccgttcagtggcttcctgaagtgactaagggttgatagttcttggggagg

SEQ ID NO: 7592 - DNA, 82 bp, Homo sapiens
gagaagagcgaccagctcactaagaacatggccgctacctgtctgaggaacccgagccctacctggcagtctacctgcactc

SEQ ID NO: 7593 - DNA, 132 bp, Homo sapiens
cagaagctgactctgcaggcaagaccgacgttattttcctggtggctgtgttcaaaaccacccaaagataaacattgacgatcttgaggatgaccctgtggtgaacggggagaggtctggctgtgcgctcac

SEQ ID NO: 7594 - DNA, 83 bp, Homo sapiens
cttcctcagggctcccgtgtctgctcgccctccgacgctgctcagaggctgggaggcggcagaatgcagccagaggagggcac

SEQ ID NO: 7595 - DNA, 100 bp, Homo sapiens
ggtggccatcttcggaccccccaacaccctctacgaaggcggctacttcaaggatgttgagaaagagaaggaaacccacagttacctcagcaaagaggag

SEQ ID NO: 7596 - DNA, 100 bp, Homo sapiens
ttcgtgcagtttgcctcgcaggagttagctgagaaggctctagggaaacacaaggagaggatagggcacagggtctacatcaactattacgacatgaacg

SEQ ID NO: 7597 - DNA, 74 bp, Homo sapiens
ggcctagcacgtggaattcgcgaagctgccaaagccttagacaagaatttggagtagtttcaaatacaagattg

SEQ ID NO: 7598 - DNA, 88 bp, Homo sapiens
gttctccggcgggaaggaaaaccgcgcagagaggtccatctgaactgtttactgtttgttcatcgattagcagaagagtccaggacaa

SEQ ID NO: 7599 - DNA, 75 bp, Homo sapiens
tcagttggcaaaccagatatatgacttggcatggaggagtgacggcaggaactttctgtgctctgacaaccctta

SEQ ID NO: 7600 - DNA, 88 bp, Homo sapiens
cgtgatgggaggcagcagagagcacagactatggaaagaccacagcaagattctttcattcgtctcctcctagcctgggggaccaggc

SEQ ID NO: 7601 - DNA, 50 bp, Homo sapiens
ccacagtgtcctctggaaaatggaagggaaaaggccgaggcatcagcgtg

SEQ ID NO: 7602 - DNA, 76 bp, Homo sapiens
tcacttaaaggagtggacattgctagcaatgagctcccaaagccatccagcggcaacctttggcactgcatccatg

SEQ ID NO: 7603 - DNA, 90 bp, Homo sapiens
gaaaatcgtcttatagttgagaatttatcctcaagagtcagctggcaggtaattcagtaccaaactgttcgatatgatatcctcccctta

SEQ ID NO: 7604 - DNA, 100 bp, Homo sapiens
gacagcaacagctcggcgggctggaaggtcttgaggaccggcccagctcaggctcctggggcagcggcgaccagagcagctcctcctttgaccccagccg

SEQ ID NO: 7605 - DNA, 75 bp, Homo sapiens
agttgcaggaaaacaagttcagggctcccactgattctacattatggcttttgacctttatgaacaaagatatgc

SEQ ID NO: 7606 - DNA, 75 bp, Homo sapiens
gtctgagactcctgctcagtgtagcattaagcggcccctttgttgctttatgcaaacagacgggacttgcgattg

SEQ ID NO: 7607 - DNA, 80 bp, Homo sapiens
ggcgagcgcgagcggcgcgagaaagtcagcgccaacggcaatgtcctgcgcagcgagatcgtgggctccatcaagatgcg

SEQ ID NO: 7608 - DNA, 98 bp, Homo sapiens
gccatggaggacgagatgcccaagactctggggaacacacctgaaactagaggaacagcttatgtggtctatgaggacatctttgatgccaagaatgc

SEQ ID NO: 7609 - DNA, 98 bp, Homo sapiens
cagcatgtgggacctggttctctccatcgccttgtctgtggggtgcactgccctctgcccgaggagatgctcagctacgcccgggatgacacccatta

SEQ ID NO: 7610 - DNA, 100 bp, Homo sapiens
ttcaagcataccacctcaatctttgatgactttgcacattatgaaaagcgtcaagaagaggaggaagccatgcgtaggggcattctacttggacaagtca

SEQ ID NO: 7611 - DNA, 75 bp, Homo sapiens
tttgttatctcaattaccaccatcattgtcattttccttaacaggtgtgggccatgtttgaggattgccccagca

SEQ ID NO: 7612 - DNA, 90 bp, Homo sapiens
ccaacatcttcatcatcaaatgcagccgagagacagagaagaacactatgtggctgccgtgtaagagtggaactgtcgaatggtgaaaaa

SEQ ID NO: 7613 - DNA, 50 bp, Homo sapiens
ccctaccttactggacagtcaaatcagttacttcagacttttagaagttc

SEQ ID NO: 7614 - DNA, 101 bp, Homo sapiens
ctgccgccgccgccgcctcggccgaccagggacctgcccgcctgcggctgctccggttttcggctttgtgagaaaccttaccatcaaacacgatggccagc

SEQ ID NO: 7615 - DNA, 100 bp, Homo sapiens
ccggtctctgttccgcaggatggcagacatctggtccctgggcataacagctattgaacttgcaagaggggaaccacctcattccgagctgcaccccatg

SEQ ID NO: 7616 - DNA, 75 bp, Homo sapiens
aaagctaaagacatagttcctggtgatattgtagaaattgctggtggaagtttagctgatgctataagtgaaaac

SEQ ID NO: 7617 - DNA, 75 bp, Homo sapiens
ttacagctttgatcgatttctgggataagattctctcgggcctagccgtccttggaacccgatattcgggctggg

SEQ ID NO: 7618 - DNA, 100 bp, Homo sapiens
atgttaaaagagaagagaggatagaagaacaacagcatagaaacagagaagagagtgacaggaaggtcagcttatttcggatcaagtggcagaaatcgta

SEQ ID NO: 7619 - DNA, 73 bp, Homo sapiens
ctcttctggcattgctgtttcctgtggtaaacactcggctggagtggtgaaaggacataggaaggagtctggg

SEQ ID NO: 7620 - DNA, 89 bp, Homo sapiens
gcgcgatgcgtcaagtacactgaaattcatcctgagatgaggtttgtgaaatggctgctgacatttctgaatccagcggggctgactgc

SEQ ID NO: 7621 - DNA, 83 bp, Homo sapiens
cgccagtgctgcagcccctactctttcagagttgggagccctgggacccaggatccctggagttgcagctaccagacatggtg

SEQ ID NO: 7622 - DNA, 75 bp, Homo sapiens
aactggctaggcaaataagctttaaggagaatgacatcttcctgggctgggaaaaaggagcttataagaaatggg

SEQ ID NO: 7623 - DNA, 100 bp, Homo sapiens
aattatgccaactttgagctggatcttggcaagaaagtcctaaacctgctgaaggctgtgatgcgccgctggctgcctgccggagacgccttgttgcaga

SEQ ID NO: 7624 - DNA, 83 bp, Homo sapiens
agagacagaagcagatggattcgtccttttaggtcatgcaagacaagataatctgccttccgaaaagagtgcagcctgctcag

SEQ ID NO: 7625 - DNA, 100 bp, Homo sapiens
gtggcgaagggaatcgcaaggctcttccctgaccattttctactgtccctgcgcgagaagacaatagatgtgcatcttcaaatgcagcatcctgtgccag

SEQ ID NO: 7626 - DNA, 74 bp, Homo sapiens
gcaagatggcggacagtgcggaactaaaggttgcatcataaatacaaaggactgaagttataaaagagaaaaga

SEQ ID NO: 7627 - DNA, 75 bp, Homo sapiens
cggtttgggcggatcatcaactcgcgggtcctcgtggatcagactacagagagacacccgattacaaatgctatt

SEQ ID NO: 7628 - DNA, 50 bp, Homo sapiens
gggacagtttggtattaaaagtgtgagttcttgatacgaatgaaaggcca

SEQ ID NO: 7629 - DNA, 101 bp, Homo sapiens
tggtcggcaaactcggcctcatcagcccggcctacctcttcctctggcccgaagccttcctttatcgctttcagtggatgattcaacagccacacaaagca

SEQ ID NO: 7630 - DNA, 90 bp, Homo sapiens
acagtagaaccgatctcagccttgctgatcatctcgtacagcagcagaaaatgaccatgttacaggattgacatgtacgtggaggggaca

SEQ ID NO: 7631 - DNA, 88 bp, Homo sapiens
tgtgatgaaacttatcacttctgatgtattagaggagtccttcaataatgttaaacagtggctgcaggaaatagatcgttatgccagt

SEQ ID NO: 7632 - DNA, 100 bp, Homo sapiens
tgtgcattctttaataaatcttcctgccaattcaacaatcaaaaagaaagctgctgttatcatcatggctgtagagtacgaggatgtcgtccaggaaaga

SEQ ID NO: 7633 - DNA, 82 bp, Homo sapiens
tcggagagctccagtgagtccagctcctctgacagcgaagactccgaaacaggctttatcctgtggataaacgcagagtgaa

SEQ ID NO: 7634 - DNA, 83 bp, Homo sapiens
ttccatttggggaccagagatggacggtcactcagcctatggaggttcaaggtgtttgcagactatgaagcctacatgcagtg

SEQ ID NO: 7635 - DNA, 100 bp, Homo sapiens
cggctcacggcggaggacgacgcgctcaaccagatcgcgcgggaggtggcccgggagagtggcccaccccacatgaagaactttgtgaccaaggtttcgg

SEQ ID NO: 7636 - DNA, 82 bp, Homo sapiens
cgggaacatcattacaagacagacagtctccagggaggacggtaccgagcccctgaactgctgttgggaaccaccacgcaga

SEQ ID NO: 7637 - DNA, 82 bp, Homo sapiens
agaggaagcacattgatgcggccatggttttggaagagtgtgcccagcacctgaactcctggggggaccgtcagtcttcctc

SEQ ID NO: 7638 - DNA, 75 bp, Homo sapiens
atctccatcacccaccaacaacaccacaataatccacagccaaggaccaaactcttacccaggatctactggagc

SEQ ID NO: 7639 - DNA, 50 bp, Homo sapiens
ctgtgctgcgcgacccccgcgcatggtgtttcagtcacctccagtaacac

SEQ ID NO: 7640 - DNA, 96 bp, Homo sapiens
gaaacactgatgagatggttgaattacgcattctgcttcagagcaagtttctcccgtacatcccagtccagccccagcctctggagttatctttct

SEQ ID NO: 7641 - DNA, 97 bp, Homo sapiens
aacgagggttcccgggattggaccgacgcagccatggcatacctccattaatgccaggtgttcctcctctgatgccaggaatgccaccagttatgcc

SEQ ID NO: 7642 - DNA, 100 bp, Homo sapiens
caggccgtgcttctgcctaagaagaccgagagtcaccacaaggccaagggcaagtgatttgacaggctatggacagaccccctaagccgaaagtctccca

SEQ ID NO: 7643 - DNA, 82 bp, Homo sapiens
ccaacatggcggaacgcaggagacacaagaagcggatccaggctgctgagaactagccctagacctctgcgtgagggttctt

SEQ ID NO: 7644 - DNA, 100 bp, Homo sapiens
ggggtttctgttaaggaactcgatttatatttggcatactttgtgcatgcagcagtttctctgcaggtggatattgttcccagccagggggagatcagcg

SEQ ID NO: 7645 - DNA, 74 bp, Homo sapiens
tcagccggccgggatggctaccacggccgagctcttcgaggagttccccttggccattctcaggggctgggaat

SEQ ID NO: 7646 - DNA, 51 bp, Homo sapiens
ggcaacccccagcggcttaagccatggctaagactttgaccccgacgcagg

SEQ ID NO: 7647 - DNA, 75 bp, Homo sapiens
tgggacttctcagcctccataattgagtgagccaattccctggattcaagttcgaaatatggcaactttgaaaga

SEQ ID NO: 7648 - DNA, 100 bp, Homo sapiens
actcacggtcttaatgaagaacaaagaaaacagttacaggacatagcaactctggctgatcaaagaagagcagcccatgagagaagttgcagctaacagc

SEQ ID NO: 7649 - DNA, 80 bp, Homo sapiens
tggcggtgttccagaagcagatggacagcctgcgcaccaatcaccaggcgccatgtcagaaccggctggggatgtccgtc

SEQ ID NO: 7650 - DNA, 76 bp, Homo sapiens
gatgaatcagcccatggcttacgctgcacttccatcccacggtcaggcactgtggtggtccagcagttgatgtcag

SEQ ID NO: 7651 - DNA, 96 bp, Homo sapiens
ccggcgtcttcgtttgggacgaggagaggatccaggaggaggagttgcagaggtatccaaaccttgaaacctttgctctagatgtcaggcttgttt

SEQ ID NO: 7652 - DNA, 90 bp, Homo sapiens
caccatgaaatggatagatgaggaagtgtggcaaaggagcagagaactttgacaagttcttcacacgaggacagcccgtcttaacaccac

SEQ ID NO: 7653 - DNA, 100 bp, Homo sapiens
ggggccccagcagcccccgaaggccctatcaggacatggagtatgaaagacggtctggtccatcgaactcatatgtcatcctgtcgggtggataagccct

SEQ ID NO: 7654 - DNA, 75 bp, Homo sapiens
gttcatttcaacagccagggagaaagcctggatgctcaaggttaatgttgaagaaggaaaatgcggaagtcgtca

SEQ ID NO: 7655 - DNA, 75 bp, Homo sapiens
actccaaggcggagcaggccaaagtgaagaaggagattcacagagagacgagcccaggaggctgactgagctcaa

SEQ ID NO: 7656 - DNA, 75 bp, Homo sapiens
gccacatcaagtcgatcatctccctgttggataagcacgggcggaatcacaaggaaacctatgagaatatcccag

SEQ ID NO: 7657 - DNA, 89 bp, Homo sapiens
ggaaataggttattcatgagatttgctacaaaagagcaccagcctccctacatcattgcagtgttgcctcgatatgttgagatccgaac

SEQ ID NO: 7658 - DNA, 100 bp, Homo sapiens
ccaatcttggacctaccacttgaaaccattagtgagctgctctcaaaggtctatggccctgtgttcactctgtattttggcctgaaacccatagtggtgc

SEQ ID NO: 7659 - DNA, 100 bp, Homo sapiens
aaaagtgattaagcagagaatggagaagaaggttgattccagggcacagtcttttgctgagcgcctgcgcctgggaattgcagtgattcatggagaggcg

SEQ ID NO: 7660 - DNA, 100 bp, Homo sapiens
tcatcctcacctgtacgcttggctatgtgacgctgctggaggaaacacctcaggacacggcctacaacaccaagagttgtctgagggaagtcaaaagcat

SEQ ID NO: 7661 - DNA, 74 bp, Homo sapiens
tggcacttcattggccacctacagaaacaaaatgtcaacaaattgatgggaccgtcctccttctaatatttgga

SEQ ID NO: 7662 - DNA, 100 bp, Homo sapiens
caacaggatcgtctcgtccaagtggatcaatcttcctgtcctacaactgacaaaggatcccctaaagacccctggaaggctggaccatggcacaagaact

SEQ ID NO: 7663 - DNA, 101 bp, Homo sapiens
aacgttcgaagaatgacagcaagccctactgagcgtgctcccctctgagactggagtgagagggtcttctgcattattcaaccaagaagttcaaattccct

SEQ ID NO: 7664 - DNA, 74 bp, Homo sapiens
tcaagcgaagccttgaaaaagctgccctgagacggtgtcccgccgaaagtctgttctctggggaggcagtaagg

SEQ ID NO: 7665 - DNA, 74 bp, Homo sapiens
ctcagtgccattgtgatgatgaagaaccgcagatccagttcccaaaagcctttgccagtatgcccacccgggcc

SEQ ID NO: 7666 - DNA, 100 bp, Homo sapiens
ctcatccctgcagctgtgtttgaacaggagtccaaaactacttacctggaagaccttccaccaccccctgagtatgaattggccccgtccaagttagaag

SEQ ID NO: 7667 - DNA, 98 bp, Homo sapiens
gttacagccctcaacagtgaaagtaactttgcccgagcatatgcacagggtatcagccgaaccaagtactgggagcacgctgccaatgatgtttcatt

SEQ ID NO: 7668 - DNA, 105 bp, Homo sapiens
tcagatcatctccctcttctgtgtcagggaatgctcctggctggtgcggacacaacccaataggagattacctggggcaattgatgttatcggtcagactataac

SEQ ID NO: 7669 - DNA, 83 bp, Homo sapiens
ctaagaactacctgagctacctgacagccccggattattctgcctttgaattgattatggaagattcccacaagagtaccacg

SEQ ID NO: 7670 - DNA, 83 bp, Homo sapiens
tgtgcagcgagcagttccctcctgactatgaccagcaggtgtttgaaagcggatctgaaaagaacaattgctgtccttctgga

SEQ ID NO: 7671 - DNA, 96 bp, Homo sapiens
aagatgagtgagcttgaccagttacggcaggaggccgagcaacttaagaaccagattcgagtgaaatgacaatggatgctctgttggctcgattga

SEQ ID NO: 7672 - DNA, 97 bp, Homo sapiens
cactggctactatggctaccagccctgggcagcgagctgcaaaactcggggacctgcttcacaagttacagttcgtcctgacatatgtggctccttg

SEQ ID NO: 7673 - DNA, 87 bp, Homo sapiens
caaattgtcgccattaagaaatgggagctggtgaggtggccaacttcgctgcgtatgcgtttgcaccagccactctagtgactccac

SEQ ID NO: 7674 - DNA, 89 bp, Homo sapiens
tatatgtatgacttttaaaagagagagcttgtgaaactgagggaatagcttgcagaacacagagaagtacggcatacctacagcctgga

SEQ ID NO: 7675 - DNA, 74 bp, Homo sapiens
actacagctggagcgcccagaggcgagccctggtggaggaagagcaggttcaggagaagtggcacctggtggag

SEQ ID NO: 7676 - DNA, 98 bp, Homo sapiens
atctttaagtgaaaagcaaggcatgacacaagaatcctttgctgtccagcagaaggagatcacacagagcccatccacgtccaccatcaccctggtga

SEQ ID NO: 7677 - DNA, 126 bp, Homo sapiens
actgagggtgaagtggcaggaggaggaggaggggctccggctggtctgtggtgagggccaagaccagcttcaagtctccatggtaccagaaaacaacaacctcacagcacctgaacctcaagaaga

SEQ ID NO: 7678 - DNA, 100 bp, Homo sapiens
agaaagtgaacatcatggatcagaacaacagcctgccaccttacgctcagggcttggcctcccctcagtacgaattggagcaatgttggcttatacacct

SEQ ID NO: 7679 - DNA, 98 bp, Homo sapiens
caggccctgcaggacctgctttcggagtacatgggcaatctttggggccatttggatcacacgatgttttttcaagattttagaccctttctaagtag

SEQ ID NO: 7680 - DNA, 83 bp, Homo sapiens
cgtgaagcccagttcccctgccagcaagcctgatggaatatatacagccctgctctgggacacacctccattggatttaaaag

SEQ ID NO: 7681 - DNA, 74 bp, Homo sapiens
catctatatcctttggcagctcacagtgtgttaacagggcacaaccattatgtgatgtgtgctcagttccaccc

SEQ ID NO: 7682 - DNA, 75 bp, Homo sapiens
aaagaaccattgaagcttgagagaaaagcccccaaaagcagctattcagacgaagttatacggaagcgtctcctc

SEQ ID NO: 7683 - DNA, 98 bp, Homo sapiens
aagtgatttcttccaaagcacaggaatctcactctgttaaagctggtctgttctaactgagcagacaactaaactggtaggtggcagcagaggaagga

SEQ ID NO: 7684 - DNA, 90 bp, Homo sapiens
gcggggcggcggcggcggcggctgcggcccaatataggtgttagtaaaatggcctttcgccatttaattgagttcacatatacagcaaaa

SEQ ID NO: 7685 - DNA, 101 bp, Homo sapiens
cttgaactccctggctccagcagtcttcccgcttcagcctcctgcctgagcctcccaagtagctaggactagagtgaagcagccgacacgagtcgttgttc

SEQ ID NO: 7686 - DNA, 132 bp, Homo sapiens
gaggaggaggaggctggagtgggcgcggaggcgaccgccatggcgttcctcaaactccgtgaccagttcctgctcattttccacaaggccgcggcaggggagctgcaggaggacagtgggctgatggcgctg

SEQ ID NO: 7687 - DNA, 90 bp, Homo sapiens
aaaagatgcaccgaatggatctgtctgagagagcaaaggatgaagtcagagacagggtttcaccaagttggccaggctgttctcgagctc

SEQ ID NO: 7688 - DNA, 83 bp, Homo sapiens
acactgtccacctttaatttcctcgaaaacgcctgtaactcggctgaaggagattacctggggcaattgatgttatcggtcag

SEQ ID NO: 7689 - DNA, 87 bp, Homo sapiens
gaggaagaatgccggtcacagcccaggaggttggctatacagtgcgctttgatgatgtcacctcagaagacaccaggatcaagtttc

SEQ ID NO: 7690 - DNA, 100 bp, Homo sapiens
taacttgctaccaggactggtggtcaaagctcaggtacagaagtttcttaaacaattaggtctacatcctaactggcaattcgttgatgtatatggaatg

SEQ ID NO: 7691 - DNA, 75 bp, Homo sapiens
cactgactcactgtgaccttggtgcaaacatgcttagacagagaagagattaacttcagtggcttcccactaatt

SEQ ID NO: 7692 - DNA, 100 bp, Homo sapiens
gggagtctgaggccaatgtcagagaaatctttgacaaggaatccctgggccactggagtcaaggcttgaagatttctatgcaggaccccaaaatgcaggt

SEQ ID NO: 7693 - DNA, 82 bp, Homo sapiens
caacttcctcgagcgtcccaccggctggaaatgcttcgtttaccacttcgccgtgtctcctctgagcctccggcctccataa

SEQ ID NO: 7694 - DNA, 82 bp, Homo sapiens
gactctgcgccgccgctgcctccatcctgggcaaacctgcggacatggagttttaacattgaatgcggagaacactaattat

SEQ ID NO: 7695 - DNA, 75 bp, Homo sapiens
ccagcagggcgttggctatgtgcccatcacagtcttcccgaggctgctgtccatgacactgagtccagatcttca

SEQ ID NO: 7696 - DNA, 98 bp, Homo sapiens
gcacgtgcagcttgagcagtaacggcacaaaccaaaccagaggacagatcccacagatactctactatagcagcctcgtcttacagcgtgactgcaaa

SEQ ID NO: 7697 - DNA, 88 bp, Homo sapiens
ccggccggctgcgaagacgcggtgggccgcccctccggaatggaagttggatacactttgtgacttgtacgagacactgaccattaca

SEQ ID NO: 7698 - DNA, 106 bp, Homo sapiens
gtatgaggcaagcgcagggggacggggaccagcagctgtcgccgccgctctcagtgtgctcatgggagcttagaagatcccaaaagtataacccatcataaattaa

SEQ ID NO: 7699 - DNA, 100 bp, Homo sapiens
gttcacagaaaactaaagacattcatggaaattactttggaagaggatagcattgaaaggaggctattctgcagaccatcctgttattaaggtcttctgg

SEQ ID NO: 7700 - DNA, 83 bp, Homo sapiens
acagaattactccctctaataaaaccccaagacacaacatttgcctgcaacaaggacagcggccagtggcactactttgatga

SEQ ID NO: 7701 - DNA, 74 bp, Homo sapiens
aaaaacctgtatgtggaaccacctctcatctttgggtgaaaaattgtcgggatcttctgcagtccagctacaac

SEQ ID NO: 7702 - DNA, 100 bp, Homo sapiens
gaagaggtgcttttggtgaagtgcagttggaagggaaaaggccgaggcatcagcgtgtgaagaccgcaaagacgatcccgagtacagttgtgaacagcat

SEQ ID NO: 7703 - DNA, 101 bp, Homo sapiens
ttccacgcgggccgcggctccggcatggccgggatcattaagaagcagatcctgaaacacctgtcccgtttgaacgccatgaccctgtggatgggagaatt

SEQ ID NO: 7704 - DNA, 82 bp, Homo sapiens
ggggaagtaatggtatccggccaattgagattcggagttaaaacaggtcaaaatgcagatcttcgtgaaaacccttaccggc

SEQ ID NO: 7705 - DNA, 100 bp, Homo sapiens
agcagccgccacgccctggcctcagcctgcgggatgacccgttggcttcctgaccacctggccgcccactgctatgcgtgcgacagtgccttctggcttg

SEQ ID NO: 7706 - DNA, 101 bp, Homo sapiens
ggcagggctggcacaggtgtggacaatgtggatctggaggccgcaacaaggaagggcatcttggttatgaagaaaatgtttcaacgtgcgcaagagttgcg

SEQ ID NO: 7707 - DNA, 107 bp, Homo sapiens
aaacatgctagaattacctggaacttcatcatcatctacttcacaggaattgccatttgaatgaatctgaagtctgctgcagtaaaacacagaaggctttaaaatgt

SEQ ID NO: 7708 - DNA, 100 bp, Homo sapiens
ctacattgacctgaaagaccgaccattcttccctgggctggtgaagtacatgaactcagggccggttgtggccatggtgttacagcacatgaaggccgtg

SEQ ID NO: 7709 - DNA, 90 bp, Homo sapiens
atcgtttttccacttattctttcgagtcagtgcaatcatcgtctatcttctctgattcttctcatcgcagtgctccaggcagccactacc

SEQ ID NO: 7710 - DNA, 51 bp, Homo sapiens
cagttttacactccgtttggtgaggagaactgtgtttatgaaactgtagtt

SEQ ID NO: 7711 - DNA, 74 bp, Homo sapiens
ctgaaatttacagaaacaaactacatctcaggctattttgaagatgaggaagaagattctagcaacgttgattt

SEQ ID NO: 7712 - DNA, 82 bp, Homo sapiens
ccggatcgtggcctctcgagagcaagttcgtgccctcgtgaggctggcatgcaggatggcaggacagcccggccacatgccc

SEQ ID NO: 7713 - DNA, 100 bp, Homo sapiens
atgtggtccccgtggaagataatgatgaaaactatattcatcccacagaaagcagttcacctccacctgaaaaagtttttgcagaaaaaagtcaagagcg

SEQ ID NO: 7714 - DNA, 90 bp, Homo sapiens
aaattatttatccaacagctcctcccagtctgcgctcctcagaccaccggcaggtgaacagcctgatgcagaccgaggagtgcccaccta

SEQ ID NO: 7715 - DNA, 82 bp, Homo sapiens
caaggtacattgagcaggctacagtccactccagcatgggcttccgagtggacctgccaatcaagtcggcccgctaccgtgg

SEQ ID NO: 7716 - DNA, 82 bp, Homo sapiens
ctccgcatggtcagtgccatttcgcctttatcgtggtggagtccaccctggctgtggtaactaggatttctacctcaaccgc

SEQ ID NO: 7717 - DNA, 87 bp, Homo sapiens
acagcagggatgctggaccaacctggctttcccgactgctccatcgaggcagccatggtgaaggttggatggcaagcatgtggtgtt

SEQ ID NO: 7718 - DNA, 50 bp, Homo sapiens
cctcccgagtatctgggattacaggtcgaggcttgaagagtggagagaac

SEQ ID NO: 7719 - DNA, 83 bp, Homo sapiens
tactgttgattcacagaaagactgtagaaaatttccagttccacagaaggtgaaaaatttacgttctggagtttctcgtgctg

SEQ ID NO: 7720 - DNA, 82 bp, Homo sapiens
tgcagctgtgtgttttccagcaggacgttcagcagttaaacgagaagattcatcaccgctttgatggctgcctcacaaactt

SEQ ID NO: 7721 - DNA, 74 bp, Homo sapiens
cccggggctaatgttgacaacaggctcgaggtgagaagccctaccactgcaactgggacggctgcggctggaag

SEQ ID NO: 7722 - DNA, 130 bp, Homo sapiens
aaagatgtcagaagattcagaaaaggaagactattcagacagaacaatcagtgatgaagatgaatcgggaagtgttcgccagttactacatgaaaagataagagatgcttatactcacccacaatttgtg

SEQ ID NO: 7723 - DNA, 98 bp, Homo sapiens
tcggatttcaccacaagaagggctgccagggttggattgagattgttggatgtgctgatcgttcctgttatgacctctcctgtcatgcacgagccacc

SEQ ID NO: 7724 - DNA, 90 bp, Homo sapiens
gggcttcctggccctctaccaaaccgtgggcaaaatcctgacagatgactttgcagacaaggagggtctggaaatgggtgatgagtactt

SEQ ID NO: 7725 - DNA, 99 bp, Homo sapiens
gctgcagtacggaggcgcagtgggcaccgtgggccgactgaacatcacggtggtacagatggcccactgcgtgaccttggttcagctgtccatttcctg

SEQ ID NO: 7726 - DNA, 90 bp, Homo sapiens
tctgtgttcatggtggtgagattactcaacttctagttccacctgaaaactgtagtaagacttgcactatctgccagatgctgcttccta

SEQ ID NO: 7727 - DNA, 101 bp, Homo sapiens
cataacccccgacagcgccatggcccagattctgccaattcgttttcaggagcatctccaggatgtgatcttcgtggtggaaagctaaattttaaaaccac

SEQ ID NO: 7728 - DNA, 100 bp, Homo sapiens
cttgaagtcaaccatctcacacctttccaaaggacgcgaccataactctaaaagaacttaaagcagcagtattacacaggatacacagagaatgaagtat

SEQ ID NO: 7729 - DNA, 75 bp, Homo sapiens
cgtggaagcaggactgcgccgcgtcttcctcaagatgagcgggatcgtgtgcagaagaaaaccttcaccaagtgg

SEQ ID NO: 7730 - DNA, 73 bp, Homo sapiens
ttcattctcttgaccatgcgtgtgtcaacggaggaggaattaaaggtggtgtctgtgaacaggcctaggggtt

SEQ ID NO: 7731 - DNA, 75 bp, Homo sapiens
cttgaagacttgaattagattacagcgatggggacacagaagatgaagactggcccatttgcagagcactccaac

SEQ ID NO: 7732 - DNA, 75 bp, Homo sapiens
ggcaccgccatccccatttctatggtcctcctcacctatggccgctggcagagttcacatgagactctgaatata

SEQ ID NO: 7733 - DNA, 88 bp, Homo sapiens
aaagatctggttaaacaatttcatcagattaaaggccattcctgtgtttctcactttgcataatgtagctgaagttatcatctgtggg

SEQ ID NO: 7734 - DNA, 80 bp, Homo sapiens
ttctggcctggaggctatccagctcttccgtgtgtgctaagatcgtgcagctcctggggcagaatgaggtggactatcgc

SEQ ID NO: 7735 - DNA, 83 bp, Homo sapiens
aaaacttcgaggcactcaagtcctggctcagcaagactctcgagcccatctctaagcgaaagacatgaggcctcagcctgaaa

SEQ ID NO: 7736 - DNA, 90 bp, Homo sapiens
cctgtgatggcatctttcatctaacactggtgaactatgacaatgtagtggacacaggttctgaaacagatgaggaagacaagcttcata

SEQ ID NO: 7737 - DNA, 100 bp, Homo sapiens
ggggggaagtgactgggcggtgccggcgccggagacgatgccgttaatgatatggaacctagcaaagctgttccactgaatgcatctaagcaagatggac

SEQ ID NO: 7738 - DNA, 83 bp, Homo sapiens
ccggaagtcaccattggagctcatcagactgaccgtgtcttacatcagttcagagaggagaacgtatttaccgggcagtcaaa

SEQ ID NO: 7739 - DNA, 100 bp, Homo sapiens
aaggctgatggatttcagaaactgttggagtttatatacacaggaactttaaatcttgacaggtttttctatatgagtggagaagacagctgttaccagg

SEQ ID NO: 7740 - DNA, 95 bp, Homo sapiens
ctgtaacgggaagctgggcagctacaaaatcaatggccggacgaaagctgaagccgacgtagcttctctgaacagacgcatccagctggttgagg

SEQ ID NO: 7741 - DNA, 83 bp, Homo sapiens
ggggaacatggacatgaagaggaggatccacctggagctgaggaaccggaccccggcagctggtttggcaaatggattctgca

SEQ ID NO: 7742 - DNA, 101 bp, Homo sapiens
aaatgcttttggaaaaactcaaaggaattccccagttagaaggccagaaggacatgataacgtggatacttcagtgccaggccgggcacctggtgtgtaac

SEQ ID NO: 7743 - DNA, 90 bp, Homo sapiens
tgtttgtctttgttctctgcctcttgtattctagcttcagataaaccagtcgatcattttctgtaactcctctcagcgagttgaattgct

SEQ ID NO: 7744 - DNA, 100 bp, Homo sapiens
tggtgtccactcagctggggacagcagcctcaccaacacagcaccaacagcttccaagatagtaacagggatctcctaccagagactggtgagggctgag

SEQ ID NO: 7745 - DNA, 82 bp, Homo sapiens
gctcgctgggagagaggtacctctccttttccctctccctttccctaagtttcactgttacatgccttgaagtgatgaggag

SEQ ID NO: 7746 - DNA, 98 bp, Homo sapiens
agaacaccaggacatcccagagtctgggaaatgcccgagcgggaagaagttccgcagcaagccgcagctggcgcgctacctgggcggctccatggacc

SEQ ID NO: 7747 - DNA, 80 bp, Homo sapiens
cgcgagtgggagcaccaggatctcgggctcggaacgagactgcacgagtctgtagaagaggcgacaccagggcttccaaa

SEQ ID NO: 7748 - DNA, 100 bp, Homo sapiens
aagtattcaccagttaatagcaccagtcaggtcaattcagtgaagatatgatacccacagtgggcttcaacatgaggaaggtaactaaaggtaacgtcac

SEQ ID NO: 7749 - DNA, 100 bp, Homo sapiens
agttcgctagtcaaacctgtgagttcaacatgatagagcagagtggaccaccccatgaacctcgaatgaactctggaagcccagccagggacaatgcacc

SEQ ID NO: 7750 - DNA, 75 bp, Homo sapiens
actggatgcagcaaggaaataggatttaaccgctctctgcctcccaggtacagcccacgcttgatggaaaaaatt

SEQ ID NO: 7751 - DNA, 97 bp, Homo sapiens
ctctactccgtggaagcacgctcacaaagaaacttgacagaagtcctcttaaatacacagcacttggagttcttcagggagttcctcaaggaacgga

SEQ ID NO: 7752 - DNA, 75 bp, Homo sapiens
cgctggcagccgcggatctcaccgccgctcaggtgagaagcgccaccttcaagtgaacgtcaccaacccagtaca

SEQ ID NO: 7753 - DNA, 75 bp, Homo sapiens
gcttgccctggtcttgctcggccgatgaagtgcagaggtttttttctggaaactctgatgaggaagaaagtgctt

SEQ ID NO: 7754 - DNA, 76 bp, Homo sapiens
cctctccttttccctctccctttccctaaggtgggagagataaacgtggaggtcccattttaacgtttccggcccg

SEQ ID NO: 7755 - DNA, 100 bp, Homo sapiens
ttagcacttactgggattggtcagatagcgagtttgaatggcagctataatgatccagccttttatgaagaatgcaaaatggaatacctgaaggaaaggg

SEQ ID NO: 7756 - DNA, 75 bp, Homo sapiens
gtgaggcctccccagccacgtggaactggtttccaaggcaagaccggccctccaggcccccccggcgtggtcggc

SEQ ID NO: 7757 - DNA, 100 bp, Homo sapiens
ttaggaataacagatgacaaccacgttctagagacgttcatgacaaaaataaatgcactcggtgatggaaagagagccactattctgaagaacacttggc

SEQ ID NO: 7758 - DNA, 100 bp, Homo sapiens
acgaggaccttaaaggatacaatatagaggcagaaggccttttttcaaagacaaatcttcctattttcaagctgaaagaatctactgttagaagaagata

SEQ ID NO: 7759 - DNA, 96 bp, Homo sapiens
cttgtttaaaatgcaaagaaaaatgtgaaggattcgaactgcacttctggagtgcagtcattggagaaatcgatgaagaaacagattctgcgcttg

SEQ ID NO: 7760 - DNA, 97 bp, Homo sapiens
tgtccagatgtccctagaactccagtgggcaaatttcttggtgattctgcaaacctaagcattttgtctgggaattgaatgatctggcacgggaccc

SEQ ID NO: 7761 - DNA, 51 bp, Homo sapiens
agattcatcggttcaataaatctcagcagattctctgcaatgactgtaatg

SEQ ID NO: 7762 - DNA, 83 bp, Homo sapiens
ccctgctcagctcctggggctgctaatgctctgggtctctgccccctgtgctgtttgaggcgtgaaactcacctcaggaaatg

SEQ ID NO: 7763 - DNA, 87 bp, Homo sapiens
acagtttaaaagccttggcagtcaagttgaaaccaagactgaagactgaacctgaagaagtttccatagaagacagtgcccagagtg

SEQ ID NO: 7764 - DNA, 50 bp, Homo sapiens
atggaatcttggccaaaatcgtggtgagacacagtaacctggttgaactc

SEQ ID NO: 7765 - DNA, 82 bp, Homo sapiens
ggaagattcgatggacatggacatgagccccctgaggccccagaactatcttttcgcatgcttttcacttccactgcatctc

SEQ ID NO: 7766 - DNA, 50 bp, Homo sapiens
caagggctgctgcgaggaccaagctcgagcccagaaaactatcctctaag

SEQ ID NO: 7767 - DNA, 100 bp, Homo sapiens
acaccaaagactgagctggtccagaagttccacgtgcagtacttgggcatgttacctgtagacaaaccagtcggttgcataccctgtcctgagggcgcgg

SEQ ID NO: 7768 - DNA, 114 bp, Homo sapiens
gagaccccgcggctgggcgttcatctaccacgctttcgtgcctatggcatgtctgcgttacctttaaatctgataaaaggcactagaagcgctgcttatgaacgtttggaaaac

SEQ ID NO: 7769 - DNA, 100 bp, Homo sapiens
atttcagcctgcccttgccagtgcctgggccgctgggagccgttattggctgccgttaaggaccgttacgtttcccggcactttgttagtgaacgtaaat

SEQ ID NO: 7770 - DNA, 83 bp, Homo sapiens
ccggagtcagtcattttactgtcaagacatttcttcggcattctgcaacagacagaaccaagttgtattgttagacacactgg

SEQ ID NO: 7771 - DNA, 87 bp, Homo sapiens
ccactccgtcccccgcgggtctgctctgtgtgccatggacggtgtttgaagatactgtggaggagcgtgtcatcaatgaagaatata

SEQ ID NO: 7772 - DNA, 75 bp, Homo sapiens
tgcagctccgcctcctccgccgcgcagtttcatcgcaaaccagaaaaggttagaaatcatcaacgaagatgatgt

SEQ ID NO: 7773 - DNA, 100 bp, Homo sapiens
aaggagcaaagcaacagaagtttatcaaggctgtcacacatcaagttaaatttggtcaacaaaatccacgtcagatatcgcaggcaccagtgacaagtgg

SEQ ID NO: 7774 - DNA, 114 bp, Homo sapiens
ctgagatcaaatggcacttcattggccacctacagaaacaaaatgtcaacaaattgatggggaaatgtttcaacgtgcgcaagcgttgcggcggcgggcagaggactactacag

SEQ ID NO: 7775 - DNA, 82 bp, Homo sapiens
agggcatgagccgagcttgaggaatccgtgctccaaactctacactcaagacaatgcagatcttcgtgaagactctgactgg

SEQ ID NO: 7776 - DNA, 90 bp, Homo sapiens
actcaaaagtggggggcaggaaaggctctcgaacagtgtggcctgatgaaactatgggaccctttggacctcaagatcagaggttccagc

SEQ ID NO: 7777 - DNA, 100 bp, Homo sapiens
cctccgccgccgccgccttgctgctgctcaaagctgctgccgccccttgggctaaaagagttttatggacgaggagccccctacaatgccttgacgggga

SEQ ID NO: 7778 - DNA, 82 bp, Homo sapiens
gggaaccctggtcaccgtctcctcaggaaactcccagtacagccagcagcaggccgggtaccagcagggtgccgcgcagcag

SEQ ID NO: 7779 - DNA, 74 bp, Homo sapiens
tcaagctaagcgcctactagagcagggtttggagactcagctgccccagagcacatcagctatgtgccccagct

SEQ ID NO: 7780 - DNA, 100 bp, Homo sapiens
aagcggccgcggctggggcctcccgatgtttaccctcaggaccccaaacagaaggaggtcacccctcctaatttctcagtgtcacaagtgcccaacatgc

SEQ ID NO: 7781 - DNA, 82 bp, Homo sapiens
cgctcgtcagactccagcagccaagatggtgaagcagatcgagagcaaggtattatagctgcaaatgtccttgtattctgtt

SEQ ID NO: 7782 - DNA, 100 bp, Homo sapiens
gcatcatctgaggacggctcaggagcatgacaagcgagaccctgtggtggcttattactgtgaaaaaccatacaagtgtcaaatttgcaatcagtctttt

SEQ ID NO: 7783 - DNA, 82 bp, Homo sapiens
ctcagttggaagcagccgatccagcctgcggagcctgtggggcagggctccaacaaaagaatcctctgaagaggagtatgac

SEQ ID NO: 7784 - DNA, 100 bp, Homo sapiens
aattgatgaatttcggcgttttcagcgtgacaaggaagtgaattcacaactatatagcaagcttacagtaagaggctgaactcacgggaatcaaatggcg

SEQ ID NO: 7785 - DNA, 90 bp, Homo sapiens
ctgcactgagcgggacctgcgagcagcgcgggcggcagcccgggggaagcgaatgagatgctggaggaaggacatgagtatgcggtcatg

SEQ ID NO: 7786 - DNA, 75 bp, Homo sapiens
gatggatccatttctcctattgaggagtcaacgtggaaccgtcccaaaatgtcccttgctcagaagaaggatcgg

SEQ ID NO: 7787 - DNA, 50 bp, Homo sapiens
ccaagataaaaagaacatgctgttttctatggtttcacccaaatatcact

SEQ ID NO: 7788 - DNA, 100 bp, Homo sapiens
aatacatcctcactgacatacggaagggacacatgtgcaatgcaaagctcctgagaaacatgccaggctgtggaaaatctctgttctcacaaagtctccc

SEQ ID NO: 7789 - DNA, 155 bp, Homo sapiens
ctcaacagccccaccagcccctgtgaggaggtgatcaaaaacctcagcctggaggccattcagctgtgcgaccgggacgatttatacctaaaactggaagatgtgacccataaatttaataagccctgtataatggatgtaaagatagggcaaaa

SEQ ID NO: 7790 - DNA, 100 bp, Homo sapiens
gaatggccgtcttcgggttcgtcctcttcttggtgctgtggctgatgcatttcatggctatcatctacaccctagtgtgttaattgtaacctacaaggag

SEQ ID NO: 7791 - DNA, 75 bp, Homo sapiens
gcctataaaatgcttcaagtagtcctgtgctcaacattgcttatcggaactaagcgtcttgtagaaggaactatt

SEQ ID NO: 7792 - DNA, 100 bp, Homo sapiens
cttgcaggttattcaagaaaaagaaaagaaaggcaaagaaaatgatatggaaatggaaattaaatgggttccagtccagtcaacctgcaaccaaaacgag

SEQ ID NO: 7793 - DNA, 100 bp, Homo sapiens
atttgacttggaagcaatgtttgaacaaactcgaagaacagctgtggaaagaagttgcaaaacactgggtaagaatgattgatgttggctgatattggag

SEQ ID NO: 7794 - DNA, 74 bp, Homo sapiens
ggagaatatatggctggacagctagctgcttatggctataaaattacagtggcagaaatctgaagctatcatgg

SEQ ID NO: 7795 - DNA, 87 bp, Homo sapiens
gcagcagcattttgtggctcactacctaagggcccagcagctgtgactgtacaaacttcctgctccaagaatgtggcaagcaggggc

SEQ ID NO: 7796 - DNA, 90 bp, Homo sapiens
aagggggatcagctctattatttcaaagatgaagatgaaaccaagcccttgatcttggcatatacagaagggctgcatggaaaatggctg

SEQ ID NO: 7797 - DNA, 51 bp, Homo sapiens
catccgaggtgcctttctccaaaaggatcatgcggccagatgatgccaacg

SEQ ID NO: 7798 - DNA, 100 bp, Homo sapiens
cgggggtgctgcagaggacacgaggcggcgggctggagacatggaccgcggcgagcaaggttgggggccgtcccgctcctaaggcaggaagatggtggcc

SEQ ID NO: 7799 - DNA, 96 bp, Homo sapiens
aagataaggagaaagacagtaatagttcttctgggtctttcaatggcaacagcaccaataatactcaagactgcagtgcagatgacgacaacttcc

SEQ ID NO: 7800 - DNA, 124 bp, Homo sapiens
accttgctttggattttatgtgctacagtctgcggaacggagcagtatttcaatgtggagtgtgcaccggcacagacatgaagctgcggctccctgccagtcccgagacccacctggacatgct

SEQ ID NO: 7801 - DNA, 73 bp, Homo sapiens
ccaagtaaagaactgagggtcagattggtttctatcttactaaaggatatttcagaaaatctatattcactga

SEQ ID NO: 7802 - DNA, 89 bp, Homo sapiens
gggccgcgaacacctcactattgatggtgtagcgctttaggggaagtggtatgtgtgcaacagagagaaattatgcgaatcactccagg

SEQ ID NO: 7803 - DNA, 95 bp, Homo sapiens
gaacatgacgcaggtgcaggtgtctcttctcgccctggcggggaaggttgtcggggccaaagtggtaacgaacgcccgcagcccgggggctcgat

SEQ ID NO: 7804 - DNA, 75 bp, Homo sapiens
tgaatggagcaaaatggcggatcatgtgcaggtttattcagtcaccatgaagctgctgctgctgcacccggcctt

SEQ ID NO: 7805 - DNA, 75 bp, Homo sapiens
cgccctcaaggccatgatcaaaacggagaaggccagtggctttgaggaatctatgaagtggaagaagctaactaa

SEQ ID NO: 7806 - DNA, 82 bp, Homo sapiens
tgtctcttctaagctgaataaagctgttttggaactgtcaggtacctcaaagcgtaagttcttcacacacccccattcggcg

SEQ ID NO: 7807 - DNA, 97 bp, Homo sapiens
caatagaagaactgcttaaggaggcaaaacgtgggaaaactagagctgaaacaatgggacccatgggttgggaatagcatttcaaggttcagtggag

SEQ ID NO: 7808 - DNA, 75 bp, Homo sapiens
agttttgtcaataaccctctctttggatatacaatcagcaggcaagatggcagacttgaccccttatttgggatg

SEQ ID NO: 7809 - DNA, 83 bp, Homo sapiens
gcaagctcatgaaagaaatcttagataagaaggttgagaagttgaacagacacggtagaagactcgcccattttggaatgtga

SEQ ID NO: 7810 - DNA, 74 bp, Homo sapiens
tggaaggtgcgtgtggggctgggtctcggagtgggagacgtggagtgcagctgcaaaccacccaaggtgaagtc

SEQ ID NO: 7811 - DNA, 97 bp, Homo sapiens
gcctcagcctcccgagtggctgggactacaggaaaacaccagtgggacttagatacctgcaagggcctcttgccccggtatgaacatgctagcttca

SEQ ID NO: 7812 - DNA, 82 bp, Homo sapiens
cgggagctggacggcgagcgcgagcggcgcgagaaactgcggttggatttctcacgatgtccagtgttatctccatgtctgc

SEQ ID NO: 7813 - DNA, 82 bp, Homo sapiens
ttcgctgcccagaagaagggaaggcgcgagtgaggaaaggaggtactgtaggaacccaagccagaccgtctccttgtattga

SEQ ID NO: 7814 - DNA, 100 bp, Homo sapiens
cgtccgcggagatctctctcatctcgctcggctgcgggaaatcgggctgaagcgactgagtccgcgatggagggccaattcctgtccccccagcagcatg

SEQ ID NO: 7815 - DNA, 99 bp, Homo sapiens
gacaagtcctgcgcttggggatcctctgtacgcccgttcactgttaacaagcacaagccctggctggagcccacctaccacggcatagtcacagagaac

SEQ ID NO: 7816 - DNA, 75 bp, Homo sapiens
aaatccttaaaagagtcttaacgatttttcggacgccgcccgatactacattccctgagcccacctgcctgtcag

SEQ ID NO: 7817 - DNA, 75 bp, Homo sapiens
cgggtcttgcgagatatctggccgcctctgccgcagctggagggctgcaagtggaattcatcaaccccatcttcg

SEQ ID NO: 7818 - DNA, 75 bp, Homo sapiens
tcgccacgcatgttcacctatgtttttcagaagaagtgaagtcaagatgaagaaccatttgcttttctggggagt

SEQ ID NO: 7819 - DNA, 90 bp, Homo sapiens
cacaggctctccgacatgtctatgctggctgaacctctaagcgaaagacatgaggcctcagcctgaaatgaggttgttttgaggtcatct

SEQ ID NO: 7820 - DNA, 100 bp, Homo sapiens
tgacatacaagtgtgcagtggttggtctggagctgggcccccagccacagggtgtgctgcgggctgacattttctcaaggatgaggaccctggtggccac

SEQ ID NO: 7821 - DNA, 82 bp, Homo sapiens
agcactgtggataacacctctgtttttggcagggtgatgcagatagatgttggggatcagccaggtgaggtaggttattcag

SEQ ID NO: 7822 - DNA, 82 bp, Homo sapiens
ccgacggcagccccggcgcctcccgaggacgcagaggctggggagtagctgctgaggagaactacgatgacccgcacaaaac

SEQ ID NO: 7823 - DNA, 75 bp, Homo sapiens
gcgttttccggccagaggacatggtgaagaacaaattggttttgagctagtggagaaattatttcaaggtcagct

SEQ ID NO: 7824 - DNA, 88 bp, Homo sapiens
tggtggagaaagcaatggatgaaatcaaatcccaagttgtatcacggactgattcaccgagcccaaccgtactcaactcacatatttc

SEQ ID NO: 7825 - DNA, 80 bp, Homo sapiens
agaacaagaagaagaagaagtctggaggcttccagtccatggaatgtcagcatctcattagatggtgcttggccctgaga

SEQ ID NO: 7826 - DNA, 75 bp, Homo sapiens
gtggccctcagaatttaaacttaaggaaagagtgggaaagtgaggattttccacagaatgagcctcagatcaaga

SEQ ID NO: 7827 - DNA, 82 bp, Homo sapiens
cgtcgttgtcgccccctcctcgtcgggaagaatcgtttggtctcctgccgtgcccgggtggcccagttgaaatccttccctt

SEQ ID NO: 7828 - DNA, 100 bp, Homo sapiens
gtccccggctgaggcagcgcggccgcagcagcccttttctgtagaaaatgtttcctgactgcaatgagggaaagcggagcacattgtcccctatgtcgtg

SEQ ID NO: 7829 - DNA, 97 bp, Homo sapiens
aattggagacaaattcagcagtcgtcatgggcaaaaagattgctgactttgggctttccaacctgtaccagaaggataagttcttacaaacgttttg

SEQ ID NO: 7830 - DNA, 98 bp, Homo sapiens
tagctcagacgccaggacatcccggaagctgggaaatgctttgtgacaacaaactgtgctctgcagttttcatcccgtggaatccgacccggcctgac

SEQ ID NO: 7831 - DNA, 98 bp, Homo sapiens
ggaaaccccgtaaagtggttggttgcagttgtgtagtagttaagggccgttgctccagggagaactgcaaatatcttcatccacccccacatttaaaa

SEQ ID NO: 7832 - DNA, 96 bp, Homo sapiens
acaagatggcggacggggagctgaacgtggacagcctcatcacccggctgctggagggagcatattaatgaaaagtgccataaactgaaaaaccaa

SEQ ID NO: 7833 - DNA, 98 bp, Homo sapiens
acccgccgccgccgttggctggaggtgtcatggagaaactccagctgggcccagagattctgcagcgggaaaatccaaggcttatttatgccaggctg

SEQ ID NO: 7834 - DNA, 100 bp, Homo sapiens
ggtgacaaaatcagaggcatactttatagtatctggagtccatctttcaccatcttctcctgagattgtactggaccgtgaccactcttcttccattggc

SEQ ID NO: 7835 - DNA, 100 bp, Homo sapiens
gccaaggaaaaactggagagcttcatcaaaaatagtgatagctttgataaatatggagtctggagaacggttaccatcctcagcagcctcctctactaca

SEQ ID NO: 7836 - DNA, 109 bp, Homo sapiens
cgagctcaacggcggcctgcctccgggcacacccggctccccggacgcctcgacaatgcagatcttcgtgaagactctgactggtaagaccatcaccctcgaggttgag

SEQ ID NO: 7837 - DNA, 73 bp, Homo sapiens
gcggacggcgcacgacgagtactggcatgcgcacgtggacaaggagatcctgctgggccgtggcttcaccttt

SEQ ID NO: 7838 - DNA, 98 bp, Homo sapiens
gacatcttcatttacagagcaacttgatgaaggtacacccaatagagaggcgatggatgactacagtgtgatcggccgctccctgttcaaaaaggaaa

SEQ ID NO: 7839 - DNA, 101 bp, Homo sapiens
tggcagctgcagagccagatgatccacaggatgctgtagtagcaaatcaggaatgcaaatcattgcatggagagtatgttggacgggcctgtggccatgat

SEQ ID NO: 7840 - DNA, 100 bp, Homo sapiens
atcccggacgccaagaagaggggcaagaagaagaagcgcggccgggccaccgacagcttctcgggcaggtttgaagacctgcctagagctggaacgttac

SEQ ID NO: 7841 - DNA, 75 bp, Homo sapiens
gagttgtatttagtgtgacgactgttgacctgaaaaggtcgctttgctgttcgtgatatgagacagacagttgcg

SEQ ID NO: 7842 - DNA, 100 bp, Homo sapiens
ggagtaccctgttcctggcagagtccccagagccaggcagggggatgaaccgcgagggagctcccgggaagagtccggaggagatgtacattcagcagaa

SEQ ID NO: 7843 - DNA, 100 bp, Homo sapiens
aggcgagggcatgtgagaatcgtttccttccttttaagaagaaatgctaatgtcaacctcaaaaaccaggtgaaccagaacagcacctcctcccacttag

SEQ ID NO: 7844 - DNA, 50 bp, Homo sapiens
atgtgatgcctgctagccaaaaggttgaggctgtgaagctgggcagggtt

SEQ ID NO: 7845 - DNA, 75 bp, Homo sapiens
ctggaatgtcattatcagacacaatgcacgcactcctggctttaaagtttatacttgcatttgccatacctgata

SEQ ID NO: 7846 - DNA, 98 bp, Homo sapiens
ccggggcgaagctggatcccctagctttgttttccggaaagttcgaagcttgctagggggaaatattcgtctcctgttgtgtggtggcgctccacttt

SEQ ID NO: 7847 - DNA, 71 bp, Homo sapiens
ccggttggcccgggacgagtggaatgatagcagaccccacgttagctgaaatgggaaaaaacttgaaggag

SEQ ID NO: 7848 - DNA, 101 bp, Homo sapiens
agctctccaagactagtctcttccaaggaagatcttgcagaacatgaaaggctcccggagcagcgctgactcctccaggaaacactgaggcagacgtgtcg

SEQ ID NO: 7849 - DNA, 113 bp, Homo sapiens
aaacgcggagcacggaggacggggccgggcgacctgggcaccagcaggacccgaggccaggagccaggggcccagaagatcactggggtgatcctgctggctgttggagtctg

SEQ ID NO: 7850 - DNA, 100 bp, Homo sapiens
gcttctcaacgtgctgggattataggggatgtggtggatacccaccctggtctcacgttcctgaaagatgctccagaattccactcccgctacatcacca

SEQ ID NO: 7851 - DNA, 76 bp, Homo sapiens
ccacagccgggcgttgggggaaagctccaccctgaatgaagtcaacacctcctcaaccatctcctgtgacagcccc

SEQ ID NO: 7852 - DNA, 96 bp, Homo sapiens
tacatattccagtaatggtggatgaagttgttcattgtttgtcaccacaaaaaggacaggtaatttcatctgtgccaaagcctccagaggacaagc

SEQ ID NO: 7853 - DNA, 75 bp, Homo sapiens
gtttaacagcatataccatcttcctatgcatggaaactcattatgagaagggacagagcagaatgggctgatata

SEQ ID NO: 7854 - DNA, 82 bp, Homo sapiens
ctcgcgctactctctctttctggcctggaggctatccagcagttcaaggcccaagctacaagcagcttgctccagcatccag

SEQ ID NO: 7855 - DNA, 100 bp, Homo sapiens
taaaacagacccacttaaattcaggagttattctctcaattcaccacttggatcacaggtgtgataaagcggaattgggaatatatatgtagccatgata

SEQ ID NO: 7856 - DNA, 85 bp, Homo sapiens
cggcggcagcgctggactaggtggcagacaatgcagatcttcgtgaagactctgactggtaagaccatcaccctcgaggttgagc

SEQ ID NO: 7857 - DNA, 101 bp, Homo sapiens
tttgagtccaaagtaccctccttctactaccggcccacgccctccgactgccaaaaagacccgacgacacagctttccaaatagtggaacttcggattttt

SEQ ID NO: 7858 - DNA, 83 bp, Homo sapiens
agccatagtacctacagcagcactccaggaaattgagaggctgactgagcgactagaagaaaaagagagggagatgcagcagc

SEQ ID NO: 7859 - DNA, 75 bp, Homo sapiens
tcgcagtggtcgcttcttctccttggcattatggagaggctattcttggaggaagaaaaatgattgtacaaaaat

SEQ ID NO: 7860 - DNA, 90 bp, Homo sapiens
gggaactagaggatgtcagggagggggacccagattttagtaaagaagggtgctgctgcgttttcgcaggccatctttagggactggctt

SEQ ID NO: 7861 - DNA, 100 bp, Homo sapiens
atcgtgcttagcgtctgcctgtctgcaacaccgggaggcaaggagcacctggtctggcagagagaatagtaatctgcatcaccaagtggaagagatgctt

SEQ ID NO: 7862 - DNA, 75 bp, Homo sapiens
aatgatgggatagcgttgcaaatccttaaaagagtcttaacggaattttctacttctggtcatgcttacactgat

SEQ ID NO: 7863 - DNA, 101 bp, Homo sapiens
gcgggatcgacgcggacagcgggctggagcctgacgagctggcggcctagactcaagtctgggtttcagctgccgccagccctattgctgctgttgctgtt

SEQ ID NO: 7864 - DNA, 97 bp, Homo sapiens
gagctggctgtgtgatggggaccctgactgccctgatgattcagacgagtctttagatacctgtgccgtgagcgatgtggagatgcaggaacactat

SEQ ID NO: 7865 - DNA, 100 bp, Homo sapiens
ggcggatctggaggagcagttgtctgatgaagagaagaaagccaaacttggccctgctggcaacaaagtcatcagtccctctgaagacaggaaacaacct

SEQ ID NO: 7866 - DNA, 75 bp, Homo sapiens
agacagctggcaagaggcagcctgggggccacagctgcttcagccaaacgtaccaagaaagtcgggatcgtcggt

SEQ ID NO: 7867 - DNA, 78 bp, Homo sapiens
gttggtcatctgctgtgctgcaggaatgaatgtagctactgtggccatggccatgcagaaaatctttgcccgggaaat

SEQ ID NO: 7868 - DNA, 93 bp, Homo sapiens
gtctcgccgagcgcacgccttgccgccgccccgcagcccatgacagacctggacacaaagatccaagaaaaggccatgaaggtggacatggac

SEQ ID NO: 7869 - DNA, 106 bp, Homo sapiens
aaagcggcgagtaagatggaagatgaggaggtcgctgagagctgggaagaggcggcagacagcgggagagaagaagaaggaggttcctgctgtgccagaaaccctt

SEQ ID NO: 7870 - DNA, 90 bp, Homo sapiens
gcgcgtgtggtccttgcgccgctgacttctccactggttcctgggcaccgaaagccatattttctgctcttaagaatcttcaagataaga

SEQ ID NO: 7871 - DNA, 83 bp, Homo sapiens
cctgagacccggacagtggcagtgaaacaggaatttgctgacacaatatcttccgcctggtgctgggcatatcctaagaactt

SEQ ID NO: 7872 - DNA, 74 bp, Homo sapiens
gaagaagctgcggccgcacctggccaagaaacgctatgtattagaggaagctgagcaactggagcctcgagtta

SEQ ID NO: 7873 - DNA, 100 bp, Homo sapiens
aagaggctgtgcttcggcgctccggctcctcagagagcctcggctagcaagaaggccctcaccagatgccagcaccttgacattggactttccagcctcc

SEQ ID NO: 7874 - DNA, 100 bp, Homo sapiens
ctggtgcgctccctgcgtttcgggtggggccgcgcaggcaaggacaaggccacagagtcggggtcttcacggtggaagcagggaaaggcctggagatgag

SEQ ID NO: 7875 - DNA, 75 bp, Homo sapiens
gctcttcttcttcgagaattacaccggggtccaggttgtggcagcactgcctgaaggtatgagaccagattctaa

SEQ ID NO: 7876 - DNA, 100 bp, Homo sapiens
cttcctcactcagttgttctgctgctttcagaccccccgtttagtgggctacagatggcatggcatctaaaaccttacaatgcttgattttcatacagaa

SEQ ID NO: 7877 - DNA, 100 bp, Homo sapiens
ctccacctcctgggttcaagcgattctcctgtctcagcctctcaagtacctggaattacagacggagccggtgggagaggagagcatctccgacgcagag

SEQ ID NO: 7878 - DNA, 75 bp, Homo sapiens
ccgggcccacctccccaccaaggaagtgttgcaaacaggaacccgaggtgttcacttcactgttgaaggaacgag

SEQ ID NO: 7879 - DNA, 100 bp, Homo sapiens
atgtgatgcagatgctcctgaagatctcaaggacatgtcccagatgatcctgcggaccaaaggccccgaccgcctccccgccggatacgagatagttctg

SEQ ID NO: 7880 - DNA, 50 bp, Homo sapiens
atctgatcctccacttcagagaacagggcactgccagtgaaagatgtaga

SEQ ID NO: 7881 - DNA, 83 bp, Homo sapiens
gtcaccggtactggtgcccatcctgccttcaagtacctggccctaaaagaagccttgagccctataaaatttaacagatgggg

SEQ ID NO: 7882 - DNA, 98 bp, Homo sapiens
tcaaaaatagtgatagctttgataaatatcagttttagagaatgtggcgtggagaaattctcaaggaaagagtaaaatgctggtgatgtgctgaggga

SEQ ID NO: 7883 - DNA, 74 bp, Homo sapiens
gaagacctgcgaagtccctctccaggtgctgatcgtccacacgaatcacctcacttccctgcttcccaaatcct

SEQ ID NO: 7884 - DNA, 74 bp, Homo sapiens
cagcagcagtcagagcccgccagaccttcctctgaaggcaaagtgacctgtgaaataagaatgtctaagcccct

SEQ ID NO: 7885 - DNA, 96 bp, Homo sapiens
ctggcccccaacttcactgctaacaacagaatactagttgatcagcaagtttggaaaatagaagatgtcttcacattacaagttgtgatgaagtgt

SEQ ID NO: 7886 - DNA, 82 bp, Homo sapiens
caaaaaaggaggccaaagactttatgtgagatctgtggatttacttgtcgacaaaaggcatctcttaattggcacatgaaga

SEQ ID NO: 7887 - DNA, 96 bp, Homo sapiens
caaccccagggtggtggatgacgacggcatgaccagtctgcataaggacccatacaatgtactggccccaaagggagcttcaggcaccagggaaga

SEQ ID NO: 7888 - DNA, 83 bp, Homo sapiens
gaagaaatccgcagaagcttattaaagttaagttaagtgggcagaccaacatccacctcagcaaaaacttcttcctgacgaat

SEQ ID NO: 7889 - DNA, 100 bp, Homo sapiens
ggatcttataaaacaaatgctgctgctatgaatatgggtcgaccattccaaaaaaatcgggtcttactacatattgcaacagaagataatattggaggtg

SEQ ID NO: 7890 - DNA, 100 bp, Homo sapiens
atgcagtggccccatagtcctggatttgaagaccagccctgctacttaccaggacttttccagatttctcagaataaagtagcagttcttcttctagctg

SEQ ID NO: 7891 - DNA, 100 bp, Homo sapiens
ctagagatgctttcaattcagctgaaagtttcagagtggcagaatcacaccaccccgaagagccccttcaccagatggcttctcaccatatagccctgag

SEQ ID NO: 7892 - DNA, 90 bp, Homo sapiens
gccatgtggatacctacggagcacgagaaatacggcgtggaaattgaaaaggctattacccattgaagaaaagaaagaaaaatttaagaa

SEQ ID NO: 7893 - DNA, 100 bp, Homo sapiens
tccgtgcccaccacggcctctttcaggtaagaacaagagagttggaaagcagttagcctcacagaagatccttcagctgctgcacccacatgtcaagaac

SEQ ID NO: 7894 - DNA, 75 bp, Homo sapiens
ggcagagagacgacgcattcaggagaagaaggatgaggtggtccagcatgacccatgtcggggcggagcagggta

SEQ ID NO: 7895 - DNA, 80 bp, Homo sapiens
ctgtatcttatctatggaagataaagcatggagttggctaatggatgctgattgatccaaatcctgatcagtcagcagat

SEQ ID NO: 7896 - DNA, 89 bp, Homo sapiens
ctgaaatctcttttaggggattctgcaccaacactgcacttaaataagggcacacctagtcaggttcgggatgagtatcggcaggacta

SEQ ID NO: 7897 - DNA, 75 bp, Homo sapiens
taatggaaaatttattaagacaccaccaggagtttctgggagatgcagttaaagacttgatgcttcgctttctgg

SEQ ID NO: 7898 - DNA, 100 bp, Homo sapiens
gtgaaagatgccaatggcaacagctttgccactcgactttccaacatttttgttattggcaagggcaccaagaagagatcccagttagatctggaacttg

SEQ ID NO: 7899 - DNA, 74 bp, Homo sapiens
tggagtgtaggtcatatcgccgcgttcctctgtgacgagggtgcaggtatctctggggactacatcgatcgcgt

SEQ ID NO: 7900 - DNA, 100 bp, Homo sapiens
cttttcccctggccttctgtatcttcatggtgcggctcatcttcgagagtggctgctaatttacagaagattgtagatgatcccaaagctttaaaaacat

SEQ ID NO: 7901 - DNA, 88 bp, Homo sapiens
ttagggtcctttatatagaagggagagtaggtcctggaccggatcaaaggctcactgctgccccggcctggccacaactttgtgcggc

SEQ ID NO: 7902 - DNA, 90 bp, Homo sapiens
ccacttcggccaagaaattagacaagaaacattggaaaagaaatcctgataagaactgctttggcaggagcgatttggcaacatgacccg

SEQ ID NO: 7903 - DNA, 75 bp, Homo sapiens
cgaaggggagccatggcggctgacagtcgggaggagaaagattcccaaatgctggaaaatcctctttgctaagtt

SEQ ID NO: 7904 - DNA, 83 bp, Homo sapiens
agagctttcacgaaggcaccgacgtcatcatgctgaccaccaatcagatccgtaagagcaccagccacatcctcaatgggcag

SEQ ID NO: 7905 - DNA, 98 bp, Homo sapiens
cagtcttctatgtttccacatcggtcagaaaaagattatccggctgctttgatgaacctgggagccattctgcacctcaatggcagactccagaaggc

SEQ ID NO: 7906 - DNA, 50 bp, Homo sapiens
ccatctcgtctgctccaggggcaggctggccacgtgctgctgggtctcag

SEQ ID NO: 7907 - DNA, 100 bp, Homo sapiens
ccggagtgtatgtctttggagaacttctggagctggccaacgtgcaggaggtgggaatgactgttcactgccgcatcatgaagattgacattgagaagtt

SEQ ID NO: 7908 - DNA, 83 bp, Homo sapiens
ttgtcccagatatagccgttggtacaaaggccgccatggcatcagatgaaggcaaactttttgttggagggctgagttttgac

SEQ ID NO: 7909 - DNA, 100 bp, Homo sapiens
gctcggatctgccttgctctgggagggcaggaggatgcattagcacaacaggcctttgaagaggctcggagaaggacacgcgaatttgaagatagagaca

SEQ ID NO: 7910 - DNA, 75 bp, Homo sapiens
gcgcagaaggattccgggagcacagttccgccgagtggtgaaaacaggaatgagaacgaggagtcaacctcaaag

SEQ ID NO: 7911 - DNA, 97 bp, Homo sapiens
gaagaagatggagaagaaatagttacctatgatcgcaacctcccgacttctagtaaattacccagagccctatcgttctcagatattggattatctc

SEQ ID NO: 7912 - DNA, 75 bp, Homo sapiens
ccgactgccatcgcccggcccggccgcgcccgcggaaccagaccagcatatgcaggaagcggcaggaataaggaa

SEQ ID NO: 7913 - DNA, 75 bp, Homo sapiens
ctacaacacccccagcggccgccggctcccccacgagtcgtggcattcctggtggctttccatcagaacaagcag

SEQ ID NO: 7914 - DNA, 74 bp, Homo sapiens
ggaatacagattagcaactctttaaaacagtattgccaagagaaacagggactttgaacatgtcggggatcgcc

SEQ ID NO: 7915 - DNA, 100 bp, Homo sapiens
cagccactgccgccgactgcagtgacatactgcggctgatcaaggaactggtgaaaactcttttcgaagcctgacttggccaccttcgggttccccatct

SEQ ID NO: 7916 - DNA, 95 bp, Homo sapiens
tgcaaactctggaaaaaaacttggtgttatccaagataaattctgtgggattataaacatttcagtagaaggcctgcatgatgtcatgacggaag

SEQ ID NO: 7917 - DNA, 141 bp, Homo sapiens
gtctgcagagggagcactatgtctgcggaagtccccgaggcagcctccgcggaggagcagaagcattttgaaagcgaagcagaagccgtagaatcagcggcgagcctgttgaaagaacccacaggtgcatttcacagcact

SEQ ID NO: 7918 - DNA, 75 bp, Homo sapiens
gagcccggctcccgcaccatggaggaggacgacagctacgggaacggcaggagcagctgatgggatatcggaaga

SEQ ID NO: 7919 - DNA, 124 bp, Homo sapiens
ttttgctgcgcagtacagcaacagtggatgttcaagattaagattagagtcaagttgtgtgattaagacaggtgtgagagggttgctgttgtattgcaatcatggtgcagaaataccagtcccc

SEQ ID NO: 7920 - DNA, 80 bp, Homo sapiens
agccgtagacaccagctccgaaatcaccaccaaggggttggctgtgttccggccgcagagcaccgtctgcgtgaggagat

SEQ ID NO: 7921 - DNA, 100 bp, Homo sapiens
agtcgctttgtggtggcagcagcttagaatcagtatttgtggttgggaaagatggacttacgggagcttggctgacgccaagatggtgtgtgatgtggtg

SEQ ID NO: 7922 - DNA, 99 bp, Homo sapiens
gccagaatggcatccagagagaggctctttgaactttggatgctttattgtacaaagagccaaatggagaagggtatatttaatgagcgaacaggtcac

SEQ ID NO: 7923 - DNA, 74 bp, Homo sapiens
gcctcagttggaagcagccgatccagcctgcggagcctgtggggcagcccgtggaccgggagcccgtggaccgg

SEQ ID NO: 7924 - DNA, 82 bp, Homo sapiens
cagcatcatacaccggctgttcgaggccttgactgtagatgtgaagttcatttccaatccgccctccatggtggcagcgggg

SEQ ID NO: 7925 - DNA, 100 bp, Homo sapiens
tgacatcagagctacttttcaacagccttctcaattttctttctcagaaagcagaggctcagagcttggagacagacggaacttggcattagaattcctc

SEQ ID NO: 7926 - DNA, 83 bp, Homo sapiens
gtcgggttattcgagtgaccgagaccgcggccgggaccgaggattgcagccaaaattggaggcgatgctgccacgacagtgaa

SEQ ID NO: 7927 - DNA, 93 bp, Homo sapiens
cgaaggatccccaacggggaggccaacgtgaagaagccagctgcgggccgtccagcggctgtgccacttctacagcgccgtcatgcccagcga

SEQ ID NO: 7928 - DNA, 80 bp, Homo sapiens
agcctgcggagcctgtggggcagctctttcagtctcacatggcaacgaaaacaacttgtatgtcttcacaaggatcagat

SEQ ID NO: 7929 - DNA, 100 bp, Homo sapiens
ccgtcacccttcctgcgattctacttaggacacaggttgaacatcacggcggagaacgactgccggcggctgcactgctccctgagagacttgagctccc

SEQ ID NO: 7930 - DNA, 100 bp, Homo sapiens
gttaccattgtgaaagaaggttgggttcagaagaggggagagtcaagccctacccgtcgagaagctgtgaagagaagaacagccgagtacctcatgcggg

SEQ ID NO: 7931 - DNA, 75 bp, Homo sapiens
acaaaactaggatatgctggaaatacagaaccacagtttatcatcccttcctgacagagcgggatgccaccagct

SEQ ID NO: 7932 - DNA, 78 bp, Homo sapiens
cagaggctcagcggctcccaggtgcgggagagagactaatagggatgccaaaggaaaaatatgatcctccagatcctc

SEQ ID NO: 7933 - DNA, 90 bp, Homo sapiens
gatcctcagattccatcttttccaactccaaggtgctgggtaggccaggtttcagcatcgcagacaagaagcgcaggacaggctgcattg

SEQ ID NO: 7934 - DNA, 100 bp, Homo sapiens
actacaagaaaaccctcctcctgaggcaccacgtctctaccgagcacaaactccacgaagccaacgcccagcttttcatgcaacacccaacacttataag

SEQ ID NO: 7935 - DNA, 100 bp, Homo sapiens
catgaacgagtattcagctcttcacagggggtagaacaagtggtactaggattatacattgtaagaggtgacaacgtggcatcttctctgcattcagttt

SEQ ID NO: 7936 - DNA, 100 bp, Homo sapiens
ggagagattatggttcttgatatggccagagtgtcaatccatatctacaaggacagagactggataatgttgttgcaaagaagtctgtcccccatttttc

SEQ ID NO: 7937 - DNA, 87 bp, Homo sapiens
agccgctgttttgccggaggagcccctcaggcctaatggaacggcggtatcccaaggaggtccaggacctgtatgaaacaatgaggc

SEQ ID NO: 7938 - DNA, 101 bp, Homo sapiens
tgaggactcaagctgggctaccttatcccagggcagcccctcctatggctccccagaggacacaggttacttcttgctgcagattctgcgcaggatcggag

SEQ ID NO: 7939 - DNA, 100 bp, Homo sapiens
ccttggaacacaatccggatcagctggaagatgagctggtgtcactgcaaaagaaactcaagggcaccgaagatgaactggacaaatactctgaggctct

SEQ ID NO: 7940 - DNA, 100 bp, Homo sapiens
ctgcttttgtggcgctcttgctcctctctccttggcctctcctgggatcggcccaaggccagttctccgcaggtaagaatgattgatgttggctgatatt

SEQ ID NO: 7941 - DNA, 92 bp, Homo sapiens
cgatggctctgccacgctgagcggcatccagcttgccaccaggagtgcacagtctgcgggtggaccggggaaagaaggtgggtgaagccgag

SEQ ID NO: 7942 - DNA, 98 bp, Homo sapiens
gctggcccagctgctgctcttcgcccagcagatctgcgaggtgttgaaagacagagaagcgaagacagagacgtggaaagacagggagagagacacgg

SEQ ID NO: 7943 - DNA, 50 bp, Homo sapiens
gatcctaagtcctgacctttcatgagactgtgagtcgacacttcaggaac

SEQ ID NO: 7944 - DNA, 98 bp, Homo sapiens
tcagagcgcatcacccgcgaggaggtggagggcgaaagcctggacctgtgcctgcagcagctctacaaatattcccagtgacctgacagcagaggagc

SEQ ID NO: 7945 - DNA, 99 bp, Homo sapiens
cccgggtggcttacagacgctgccagcatcgccgccgccaggtttggtgcacctcgatttggaggaagtagggcagggcccttatctggaaagaagttt

SEQ ID NO: 7946 - DNA, 82 bp, Homo sapiens
agagctgccgagcaaggatgcctgagaatgccatggacaatattaccaggcagaaccaattctacgatacccaagtcatcaa

SEQ ID NO: 7947 - DNA, 100 bp, Homo sapiens
gttactgcaacatggagctgatgtccatgctaaagataaagggttagtcatattgatgtgatcacagcagagatggccaaagactttgtagaagatgata

SEQ ID NO: 7948 - DNA, 75 bp, Homo sapiens
tgcagcaccatcaacagatgcccctgataaaggatacgttgagatggggtgatgattatgatgaagaaggtgaag

SEQ ID NO: 7949 - DNA, 100 bp, Homo sapiens
tctcctgcagaccttcccaggaagccagagccacacacaccatcatggtcctgaatctggtgggccctttattgaccaggtttacgtcctgcaaagttac

SEQ ID NO: 7950 - DNA, 100 bp, Homo sapiens
gactcggcaacagtggcaaccagccaaccccttgcagagtggcagctttgcaaggcatccgtgtccagaggcagaaaaatatggctcaggagactaacca

SEQ ID NO: 7951 - DNA, 74 bp, Homo sapiens
ttcagtgcagagtccttggctgggaggatcaatgatgctacatctggtaccttggctggcattatgggaatgag

SEQ ID NO: 7952 - DNA, 82 bp, Homo sapiens
ggaggaattaacaatgtgcttgtgcctcatcaaagcaacatggccaatctttcctaagctgctcagcttacaagaaaaggaa

SEQ ID NO: 7953 - DNA, 50 bp, Homo sapiens
gacttgatttcaatcttataaggtgccaatgaactggctgtgcagaaagc

SEQ ID NO: 7954 - DNA, 82 bp, Homo sapiens
ccatctgtggaaggacctaccaaccagtgacaaagcataaatcatggacaccagagaataaggtggacctcaggaatccgga

SEQ ID NO: 7955 - DNA, 90 bp, Homo sapiens
tgaactgctcaaggaaaatggcttcacacaacacgtctaccataagtatcgtaggcgctgccttaatggccgcatctacaagtgcttgtt

SEQ ID NO: 7956 - DNA, 83 bp, Homo sapiens
agaatggcagtgctcaaactcaccgaccaggaagggaaaaggccgaggcatcagcgtgtgaagaccgcaaagacgatcccgag

SEQ ID NO: 7957 - DNA, 100 bp, Homo sapiens
ggactctgatttcttcacagaacacactcaagatccaatgatgccattgctccagacttcccagctcaggtgctaggcacaagagatgatgacctctcag

SEQ ID NO: 7958 - DNA, 98 bp, Homo sapiens
cagctgcctgctatgctgaaaacccctggaaacttgctaaagagctgtgtatcagaggttctggtgatagcagtcattcacaatctcaaggggaaaga

SEQ ID NO: 7959 - DNA, 51 bp, Homo sapiens
ttgagaccgagaatgtggaaacagaaacgccacctcctggatatatcagtg

SEQ ID NO: 7960 - DNA, 46 bp, Homo sapiens
acttccagctgcacacacatgtttatgtgaaatcctagctaaagaa

SEQ ID NO: 7961 - DNA, 90 bp, Homo sapiens
tgatcacgcagctggctggcttcagtggaccagcagccttaagtgccttgaaacaattttctgaacaaggactggatccaatcgatggag

SEQ ID NO: 7962 - DNA, 100 bp, Homo sapiens
tgcctggaccctgcccagcagaatttgtatagagatgtgatgttggagaactacagaaacctggtctccctaggaatcaacagtgagacaattatgaaac

SEQ ID NO: 7963 - DNA, 75 bp, Homo sapiens
ctacctggtaaccccaacgctgtctggacagtgcgtcgacacattgaagaaagtctttatctcttgcaaggttca

SEQ ID NO: 7964 - DNA, 82 bp, Homo sapiens
aagaaagcaaagcgcagaaatgttggatttgaacccaccttgggacaccttgactccaagcccagcagtaagtccaacatga

SEQ ID NO: 7965 - DNA, 50 bp, Homo sapiens
tgtaatcccagctactccagaggctgaggttgcagtgagctgagatcacg

SEQ ID NO: 7966 - DNA, 75 bp, Homo sapiens
cggagaggtagccatgatgccccacttggtgaatggagatgcagctcagcaggatcagctcagctactatttaat

SEQ ID NO: 7967 - DNA, 100 bp, Homo sapiens
taagaaaggacagcattcctgtgacctctgcctaccatccataaaatactcattcccctctcagatgtttctttctcagcaaaatagaggagaagcttac

SEQ ID NO: 7968 - DNA, 101 bp, Homo sapiens
cggaagtgtcttcaccaattcagagaggagatgtgacaatagaccgcagacacagggcccatcaccctaagattttgactaaaggagaagttcaagtatca

SEQ ID NO: 7969 - DNA, 100 bp, Homo sapiens
atgacctcaagcttgcagcatcaggagaggcatttcatccttcatgaagccattcaggattttgaattgcatatgagtgcttggctcttccttctgttct

SEQ ID NO: 7970 - DNA, 75 bp, Homo sapiens
cattcagttggatgccagcatccctgtcacttttacaaagctatcattgttaattatgcaagtaaaatgtttaac

SEQ ID NO: 7971 - DNA, 100 bp, Homo sapiens
gatgggattgaacagctaaaggatgtgaccattttggcagctactaaccgtccagataggatagacaagcttagcagtgtctgcaaaaacgaatcttttc

SEQ ID NO: 7972 - DNA, 98 bp, Homo sapiens
gagacctggagccgacagacgacaagcatgagacgaagctgaagggagtcatctatttccaggccattgaggaagtgtactacgaccacctgcgcagt

SEQ ID NO: 7973 - DNA, 98 bp, Homo sapiens
aggaggggccccagcagcccccgaaggccctatcaggacatggagtatgaaagacgctatcatggtgaacttacttcagattgtgcgggaccactggg

SEQ ID NO: 7974 - DNA, 75 bp, Homo sapiens
ccgccctggggcttctgctctgctcagaggctgggaggcggcagaatgcagccagaggagggcacaggctggctg

SEQ ID NO: 7975 - DNA, 75 bp, Homo sapiens
ggcgaaaggagctggtgcctgtgcaagttgttgagtgctgcttttgacacaaaaacggggttacgtgtggcagtg

SEQ ID NO: 7976 - DNA, 90 bp, Homo sapiens
tttggagagagcgtcctaaatgatgctgttgccattgtactgtcctcgattatagctgagaaggtaaaggacgttctgtttatccgaccc

SEQ ID NO: 7977 - DNA, 82 bp, Homo sapiens
gagaagaaaaagaaggaccgattttaccgatccattttacctggagataaaagcaggtaaagtgaggaaacatgcaactgaa

SEQ ID NO: 7978 - DNA, 100 bp, Homo sapiens
accagtgatgacacaaaatcccagatctacctgacgggcctgcgagggttgaagattgtgaagcaatagcctaaggattactacagcatcccatttccca

SEQ ID NO: 7979 - DNA, 75 bp, Homo sapiens
gcccttccggagtccgccccgtgaggagaatggaattacatgaacgacagccttcgcaccgacgtcttcgtgcgg

SEQ ID NO: 7980 - DNA, 75 bp, Homo sapiens
ccgagaagtccccgaccgactgtgccggtggtggtgtgcacattgagccccggtatagacagttcccccagctga

SEQ ID NO: 7981 - DNA, 50 bp, Homo sapiens
ccaggagtcatcggacgccagaatctgggtttccaggcctgaggtgcccg

SEQ ID NO: 7982 - DNA, 75 bp, Homo sapiens
atgagaactgtggcatctgcaggatggcatttaacggatgctgccctgactgacagtcattttgtttactcattc

SEQ ID NO: 7983 - DNA, 82 bp, Homo sapiens
cgtgagcaagcccaggcacagccgacgccgcggggaatcccttggcaccatgtcctgtgtgcattataaattttcctctaaa

SEQ ID NO: 7984 - DNA, 100 bp, Homo sapiens
tgtgaaagaaggctgtaccgttagccctgagattcgttatttcacccaccatagtgtaaaatatttctggaatgataccattcacaattttgatttctta

SEQ ID NO: 7985 - DNA, 50 bp, Homo sapiens
gagcgaagtacagcttatggatggtcttgctggaatgagtacctgacaac

SEQ ID NO: 7986 - DNA, 75 bp, Homo sapiens
atttcgatattgaagtgtcaaaatccatagatggaaaagatggcacatctactatgcttcttactagaataaact

SEQ ID NO: 7987 - DNA, 100 bp, Homo sapiens
gccgcggtttgtcgccagaaggaagatggcggatctggaggagcagttgtctgatgaagagaaggccagtgaagaagcaaaggaagacatgaaaattgac

SEQ ID NO: 7988 - DNA, 75 bp, Homo sapiens
tggcaaaagaaattaacagcagccaccccaggaccagtttgacatggtgagtgatgctgaccttcaagtcctaga

SEQ ID NO: 7989 - DNA, 101 bp, Homo sapiens
aaggaaaccccggagagcgagagcgcgaaggaaatctggccgccgccgccgcgagcgctcccggggtcaggagagtgctggtattgtgactagtgatggga

SEQ ID NO: 7990 - DNA, 51 bp, Homo sapiens
ggcctacccgggatacggaggagggtgttctacgcagaaatagaagagctg

SEQ ID NO: 7991 - DNA, 75 bp, Homo sapiens
cggcatttaacaaggcggtgtggtttactccatgcagttgtcaggaggccaatggaagcactgttgtgaagaact

SEQ ID NO: 7992 - DNA, 101 bp, Homo sapiens
caatagagtcactgtatttgaccttaaaaagtgccattgagaaacagaaattggtgtatattttgaacagagatgctgcagcccgacttaccatttcatct

SEQ ID NO: 7993 - DNA, 75 bp, Homo sapiens
tggggaggtcctccatgcgcagtcatgagtcgcttcaagtttatcgggcagcccaatggatccaatggtgatgaa

SEQ ID NO: 7994 - DNA, 100 bp, Homo sapiens
tggctttcctggatctgaggatgtgaaacttaaatttgaagaggcttaaggaggcttcgggctcctgggatttctgtccgcgctcctggccctcgtcctt

SEQ ID NO: 7995 - DNA, 100 bp, Homo sapiens
atcgcagaccttctatgaggtcatgtttgatgatggctcctttagcagagacacatttcctgaggatatcgtgaagatcaaattcccaggggcttcccta

SEQ ID NO: 7996 - DNA, 82 bp, Homo sapiens
catcaacctgcgtgaggtcaacctgcgcccccagatgtcccagatggagaaggaggagacaacccgggagctgctgctgccc

SEQ ID NO: 7997 - DNA, 119 bp, Homo sapiens
agcgggggcagcgcgatgaggcgggtgaccctgttcctgaacggcagccccaagaacggaaagattctggatgaaattgaagaacataacatcaaaatctatcacttacctgatgcaga

SEQ ID NO: 7998 - DNA, 101 bp, Homo sapiens
ggacgaagagcaggccagcccggacctctggagtgcccccagcccagagcccggtactccaaagattcaggtttactcacgtcatccagcagagaatggaa

SEQ ID NO: 7999 - DNA, 90 bp, Homo sapiens
gttatttcaacttcacctcggcaacaattacttacctggcccaggaggatgggcccgttgtgcctgaacccccgccaacaaacaaatggc

SEQ ID NO: 8000 - DNA, 90 bp, Homo sapiens
agatgtcaacagagctatcaatgttcttctggaaggaaacccagacacgatcctcaccaagacaggggagctgcccaggcagcccaccac

SEQ ID NO: 8001 - DNA, 90 bp, Homo sapiens
tccgcgaggacgagttccacatcagtgtcatcaggttcatggcgaacacagagtcctatctgaaaaatgtcgccttgaagcacatgcccc

SEQ ID NO: 8002 - DNA, 82 bp, Homo sapiens
ggaagttatgacaccatggatctcttcaggcacactacagaactaaatatgcatgagtcgatagcagcagttggtgacgaga

SEQ ID NO: 8003 - DNA, 74 bp, Homo sapiens
caggtcacacactgttgcagcgcaggccaagtcaaattcctgcagagctttggcaactgggatgagaagaaagc

SEQ ID NO: 8004 - DNA, 99 bp, Homo sapiens
aagcgatttcctccgcctcttccaaagcgccacatgaaatgaagatcacctctgcctatctacaggacattgagaatgcctataagaaaacctttctcc

SEQ ID NO: 8005 - DNA, 100 bp, Homo sapiens
tttagggtcctttatatagaagggagagactctgcctgccctggtgtggcaccgacaggactggaccatccttcactcttacgtgcacctcaacgccgat

SEQ ID NO: 8006 - DNA, 87 bp, Homo sapiens
ggacacagaagtatttgtgacaggtttgtgtctggagaaaagagtcttctataagcttatatcgggacttcatgctagcatcaattt

SEQ ID NO: 8007 - DNA, 100 bp, Homo sapiens
tggtggaaaggttgaagttcaagagctcagaccctaaagacatgggcaagttttgcctcacatacgaggcctccatgacccggctcttccgagaggggag

SEQ ID NO: 8008 - DNA, 100 bp, Homo sapiens
aacaacaacttgcagctcatctctattgatgactgtcttctgaagattgatgtctatttccttgagctctttaattttgttgccaatttggataaacatg

SEQ ID NO: 8009 - DNA, 122 bp, Homo sapiens
ctgccattggaaatggaagcccagtcctctcctgttcttatttgctttatatatcatgtgtgttcctcactcaggggatgttcgtctaaccccagaagactttgctagagctcagaagtact

SEQ ID NO: 8010 - DNA, 96 bp, Homo sapiens
gcacgagggcgcgctcgagacgctcctgagctctttcgacgtgtagcagcagctttgccgggaatggaaagcacacaggacagaagcagagaagat

SEQ ID NO: 8011 - DNA, 75 bp, Homo sapiens
gattccaagtaactcttatttgaatgaacactccatgagagcagggacctgctttgccttgttcaccactttatt

SEQ ID NO: 8012 - DNA, 98 bp, Homo sapiens
acagttgccgctgactcgggaggaggacctgatcaagactgatgatgtcctggatctgaatgactcctcctctgagagtggcagcggcaatggctcct

SEQ ID NO: 8013 - DNA, 75 bp, Homo sapiens
gaagacgaggactgggtcctttcacatccggcggggggaagtggtgcgggcaggtgggcctgggaccggtgctgg

SEQ ID NO: 8014 - DNA, 75 bp, Homo sapiens
atgcaccagcacgcctggctaagtgccaagtctagtggtggcagggaagacttggagtcatctggactgcagaga

SEQ ID NO: 8015 - DNA, 97 bp, Homo sapiens
acacagagagcacacactgacacacacgtacacaaagatctgagccaggttgtgggaggttggagtcagttagctgctatgcactgtgttatgctgc

SEQ ID NO: 8016 - DNA, 75 bp, Homo sapiens
cgaataaagtttatcacgccggggccttcctggatgctctgcagaaccaggctgaggccagcagcaagatcatcg

SEQ ID NO: 8017 - DNA, 46 bp, Homo sapiens
tagctgaagctgttgtagctatatctcccggggccaattcagcatc

SEQ ID NO: 8018 - DNA, 98 bp, Homo sapiens
ctccccaaaagccgtcaaaggatttgaaactgctccacttaccaagaattattatactgtgagcaaaggcacaacaccacttgctccaccacctaaac

SEQ ID NO: 8019 - DNA, 75 bp, Homo sapiens
gtcctggctcttgccctcatcctggttctggaatcctcagttcaagcctctgaaaatgatttgctgaacaagcgc

SEQ ID NO: 8020 - DNA, 90 bp, Homo sapiens
catgtctcctgatatcctacacaacaaacaaatttccatcggaatatgtaccgactgtggcagggcccagccccgaaccagacaagggac

SEQ ID NO: 8021 - DNA, 75 bp, Homo sapiens
ctcctggggagatggaggggccggggctgggctcgcagttttccaagagataacttcaccaagatgtccagtgat

SEQ ID NO: 8022 - DNA, 96 bp, Homo sapiens
gaaactgaggcttagagaagtttggcaaattggctaagttcctacagctagatgaaaactttcggaagagaaagttgcctgtggtaagttcagttg

SEQ ID NO: 8023 - DNA, 100 bp, Homo sapiens
caggctctttcacgtgccagtgcaaacctggttatcagggagacggcttccgttgcgtgcccggagagatctcgttccgcgtgtggcagtgtggtggcag

SEQ ID NO: 8024 - DNA, 90 bp, Homo sapiens
ctggatgcctacgtgggaagggacctcgaatgtgggaccccagcccctctccagctcgaaatcgtgatggcagttttggatcagtttacc

SEQ ID NO: 8025 - DNA, 50 bp, Homo sapiens
gacgaggaggaaaaggcccctgtgacctgacctggtgggcaagccttact

SEQ ID NO: 8026 - DNA, 98 bp, Homo sapiens
gtgttcgtgaaagtgaaccccaaggcggaggagactgacaaggcgtggcatgggggatgtctggcgctggcagagctgggcaggagaggcctgttgct

SEQ ID NO: 8027 - DNA, 74 bp, Homo sapiens
ggccagtgactaccaacgtttggaccagaaggaagacaactgttagttttgtggcttactgctgctccacccag

SEQ ID NO: 8028 - DNA, 104 bp, Homo sapiens
gcggtacttcggttcaggcggaggcatccttaccaaggaatctgcttttcaagtatgccaccaacagtgaagaggctgtgttggaaagcaagtggccgtctggc

SEQ ID NO: 8029 - DNA, 113 bp, Homo sapiens
tacacggccagttttgaaatcgacacacaaagaatagagttgagcctgtgggacacttcggacctgcctagagctggaacgttacctccagagcgagccctgctatgtttcag

SEQ ID NO: 8030 - DNA, 75 bp, Homo sapiens
cctgaaacatacggagattgacaatcaatgggccatcttggacgggcggcgactggcggcgcgatggacctgacc

SEQ ID NO: 8031 - DNA, 100 bp, Homo sapiens
atatgtgaccatggatataaaatcacagggagagaagaccaagaggtcggagaagaggtagaaaatgtggcagaggccataaaggagaaaggcaaagagg

SEQ ID NO: 8032 - DNA, 74 bp, Homo sapiens
ttcccagcgatgtcccactgacaactacagacctggcagctttgctccctgagacgctggttggggaggctgga

SEQ ID NO: 8033 - DNA, 95 bp, Homo sapiens
agtatggagctgcagaagaatccattgggatatctggagagggaactgctcgcagaaagaagaaggtggttcatagaacagccacagcagatgac

SEQ ID NO: 8034 - DNA, 100 bp, Homo sapiens
gagagatcctggccacaggcagtacggcatggtgctcgtctgtgaatttctggtacgtgctggtgatgaatgatgagcacacagagaggcgatatctgct

SEQ ID NO: 8035 - DNA, 101 bp, Homo sapiens
ggaaatcgcctcccgagaagaagttgaggcgctatgagccttcacgtaaatgggtccagtcatgcctcccagtaagaagccagaaagctcaggaattagtg

SEQ ID NO: 8036 - DNA, 83 bp, Homo sapiens
gccgcccgtccccggcacacgcgcagccccggcctctcggcctctgccggagaaacagatcccagatgcagtgactggttact

SEQ ID NO: 8037 - DNA, 50 bp, Homo sapiens
gtcagccttcccagtagctggaactacagaatccacctcattgcctggag

SEQ ID NO: 8038 - DNA, 100 bp, Homo sapiens
cgtaccagaggtggaagtccaagtcaaacgcagaaggactgcctcactgagcaaccaagagtgcgtctaatgctagtgttggcacctgttatgtgcattc

SEQ ID NO: 8039 - DNA, 97 bp, Homo sapiens
gtctcggaaaccccgcctcttacagtcacgagatatgagggaaggcaccattggagatatggctatcctgggtataacagaaagttttcaagtgaag

SEQ ID NO: 8040 - DNA, 100 bp, Homo sapiens
ctcacacatcagtctatcagtgttcggctccagcctgtgaagaagttaactggtggtttagattagaatccaaacaaggaaaacgaatcaaaaacagggg

SEQ ID NO: 8041 - DNA, 75 bp, Homo sapiens
tttgataacaataaagctgagtgaaatgcgactatacagttggaaaatggatataccttatttgattatgatgtt

SEQ ID NO: 8042 - DNA, 100 bp, Homo sapiens
gcacgggatggcggaggcgcctcctgtctcaggtttgagcaggaagttctgggggctccagtacctggaatcccaactgctgtgcctgcggtgcccactg

SEQ ID NO: 8043 - DNA, 83 bp, Homo sapiens
ttgctcaggactttaaaacagatctgcgcttccagagcgcagctatcggtgctttgcaggccaactgtgatttgagacggcag

SEQ ID NO: 8044 - DNA, 50 bp, Homo sapiens
acatgaaggtgtctatagagaactgatgttcccacaagcctgcatttcca

SEQ ID NO: 8045 - DNA, 100 bp, Homo sapiens
agctggtgacagagtagaagcttccactccctcctgcccagatccggccaaggacctcagcagaccagagtgaactccgagcaggaacacttcctcattg

SEQ ID NO: 8046 - DNA, 90 bp, Homo sapiens
aacacgtcaggagtttatcgatggcattttagcatccagttatcactgtgaatataagatgcggacaggaaggaaacctgatggctgtgc

SEQ ID NO: 8047 - DNA, 82 bp, Homo sapiens
cgctggtgcagccaccctcgctccctctgctcttcctcccttcgctcgcaccatgactgattcttgctattccaaatcctct

SEQ ID NO: 8048 - DNA, 75 bp, Homo sapiens
ccagaggtcaacaaggttctggacaagatgaagtctttctgccaggatctcaaagatttcatgagacaagctggg

SEQ ID NO: 8049 - DNA, 75 bp, Homo sapiens
cgccgcgctgcgcaagctcgccaaacaggcggaggagcccagagtgaactttgaggcgctgatcatcaccatgtc

SEQ ID NO: 8050 - DNA, 119 bp, Homo sapiens
actttctgggcgttcatgatcctggccagcctgctcatcgcctactgcacgggaatgcatatcagtccacgtgggccaagcgggagttcagattggcaatgcctgctgggagctcttct

SEQ ID NO: 8051 - DNA, 117 bp, Homo sapiens
gcttttatattcatctcaaaaacaaaattctgaactcaggacttggcaagccaacgaggtgacggacagcgcgtacatgggctccgagagcacctacagtgagtgtgagaccttcac

SEQ ID NO: 8052 - DNA, 101 bp, Homo sapiens
ggacagacgcacagacacctgcaggagaaacaattgcagcacttacagacataaccaacttgaaccatctggaatctgatgggcagatcacaatttttaca

SEQ ID NO: 8053 - DNA, 88 bp, Homo sapiens
agggaggctactgagaagcccggcgacggaggaacgcaggtctgctgccagtattgctgacagacagaacgccttggaggctgagtgg

SEQ ID NO: 8054 - DNA, 96 bp, Homo sapiens
gaacaactctcattattaccatatggcccatggaaaagattttgcatctagaggaattgaaagtcagaagaggccaagtgatggaaatagtggatt

SEQ ID NO: 8055 - DNA, 82 bp, Homo sapiens
aaatggagaccaagacgatcgtgtacgacttggacacatcaggggggctgatggaggagaacatttcaggataggaataggc

SEQ ID NO: 8056 - DNA, 100 bp, Homo sapiens
gaaggggacaaatccgcgatcccagtcatgcatgtctcggcgcggaagatggccggcggcgtggacggccccatcgggatcccgttccccgaccacagca

SEQ ID NO: 8057 - DNA, 60 bp, Homo sapiens
aagaaaatgagcccctagaaaccccagctccggagtttgccgggaggactcatatcactc

SEQ ID NO: 8058 - DNA, 100 bp, Homo sapiens
cgagacttttctcagatgttggatatttgcttggaaaaacgtgtgggtacgaccttgtaacagatcaactcctagcaatcatgatcggatacagcgtctg

SEQ ID NO: 8059 - DNA, 74 bp, Homo sapiens
cagaaatggtatcaagaaaccccgatcacaaagatacgaatctcttaaggggaagaagttggattccatgggtt

SEQ ID NO: 8060 - DNA, 90 bp, Homo sapiens
tcattgtgggccggcccaccaagaagtaccaaacccagtgccagatgcggacctgtccgtcaccgaagccagcagctccgacagccgagg

SEQ ID NO: 8061 - DNA, 109 bp, Homo sapiens
ccgccactacctcctggctgccgtgaataggcagcctaaagagccgacagttagaatcagaaactgggaccacagaggagcacagtctaaataaggaagctcgaaaatg

SEQ ID NO: 8062 - DNA, 51 bp, Homo sapiens
cccgagtgagcgcgggcgccgagattgtaaaccatggctgtgtggatacaa

SEQ ID NO: 8063 - DNA, 100 bp, Homo sapiens
gcttccccacgtcgcttgggggccacggcgcggacgccatggtttattttcttgaaaaggctccaggcttcggcttggaaaatcccaccgccaaaattga

SEQ ID NO: 8064 - DNA, 76 bp, Homo sapiens
caggtattgggagatccacagctaagacaccgggacctcctggaagccaaaaatgacttgtgtatgcggatacctg

SEQ ID NO: 8065 - DNA, 75 bp, Homo sapiens
cacgaacctcaccccaagatcttcacattctggatctcagctgctcttgaaggcactatgtcgtccgaggcccag

SEQ ID NO: 8066 - DNA, 75 bp, Homo sapiens
cacccctacctgcccatcaacagcgcggccatcaaggccgagtctggtgtatccgaacgacttccggctcacaga

SEQ ID NO: 8067 - DNA, 83 bp, Homo sapiens
ctactctctctttctggcctggaggctatccagcagtcggatggcagagagcttgcgcctctttgactccatctgcaacaaca

SEQ ID NO: 8068 - DNA, 76 bp, Homo sapiens
tctagcatcacctctcagcacgattttcccgagagttcacagggaccaacgagcaggctatcatcgatgtgctcac

SEQ ID NO: 8069 - DNA, 88 bp, Homo sapiens
cgatgaggagctgaaggtgtggctcattgaggtcaacggtgcccctgcatgtgctcagctgcggaaacgggactgcggccactacttc

SEQ ID NO: 8070 - DNA, 100 bp, Homo sapiens
gtttattcctttctcgagtgatgtcacgcatgagatgaagcataaggtctgtcgatactgcatgcaccagcacctcaagaaattacagaagacatccccg

SEQ ID NO: 8071 - DNA, 83 bp, Homo sapiens
caacttcgcggtggtcaagcgggccacgcacctcgtcaccaaggccaagggtcaagaaagtgactcatcagagacctctgtgc

SEQ ID NO: 8072 - DNA, 103 bp, Homo sapiens
ggccggctgaggagcgccgctgcctcgcctcggtacgccgcgcggcgcggacggcgcgagcatcagatccatgctgctgctgactcggagccccacagcttgg

SEQ ID NO: 8073 - DNA, 82 bp, Homo sapiens
tcggctcactgcaacctccgcctcccaggcctgcgggatacaacgggaatacaaaaatgcgctagagcggtccgcaacgctg

SEQ ID NO: 8074 - DNA, 96 bp, Homo sapiens
tgggttgcagcctatggcctgttatttgtctcaacaaaagaattgatgccaagaaggaacagctagcagatgcccggagagacctgaaaagtgcta

SEQ ID NO: 8075 - DNA, 75 bp, Homo sapiens
ctggttttgatggatactccccgttcaggaattgcagcattcaggtaaaggcgacacaggaggagaaccgggagc

SEQ ID NO: 8076 - DNA, 100 bp, Homo sapiens
gtggggaaccagggagggccccctctgtgatgaattgagtgagatcattggccgagacctgagtggcttccctgcacctcctggagaagagcctcctgcc

SEQ ID NO: 8077 - DNA, 82 bp, Homo sapiens
cgcagatgttgtcaaggtggcctaccaggaggccaggggtgtcgccatggaacgtcaaggtcgtgggaaataaaaggcagtt

SEQ ID NO: 8078 - DNA, 106 bp, Homo sapiens
caagattcatctttttcactaattgtggcattcacaagtcactttgtggcatgtatgacagccatcttaaaccagatgggtgaccagcactactccttctacattg

SEQ ID NO: 8079 - DNA, 74 bp, Homo sapiens
gtctctgttagagacagatggtgatgggggattcatgttccttcctgtgtacagcccttctgaggaggagaaga

SEQ ID NO: 8080 - DNA, 98 bp, Homo sapiens
gctctgaaagctcttcttgaaaaatgcaaagatgtagatgagagaaatgaggttacagattatgccattgccaggcgcatagtagatttgcattcaag

SEQ ID NO: 8081 - DNA, 50 bp, Homo sapiens
ctggactgtgggctggtgtgtggaactgatcgaagagctggagctccagt

SEQ ID NO: 8082 - DNA, 82 bp, Homo sapiens
actggattcctccatgactcaaggcacagactctccaggacacagcattgttggttttgccatgtactattttacctatgac

SEQ ID NO: 8083 - DNA, 101 bp, Homo sapiens
acctgggcttcccttactacctgaagatcaactactcctgcgaggaaaagtgtacagacaggcaaacaatataaatatgctaaaggagggaatgaaaattg

SEQ ID NO: 8084 - DNA, 87 bp, Homo sapiens
gcagcggagagcgagagaggggagcagggcatggtgctgatgtgaaatgtgtagactggcatccaaccaaagggttagttgtttcag

SEQ ID NO: 8085 - DNA, 131 bp, Homo sapiens
ggccgcccggctgctgctggccgggctgctgtgcggcggcggggtctgggccgcgcgagacaacaagggaggtgtcacagttttccatttagatcaacaacttcaagttcttaccatggaaaattccgaga

SEQ ID NO: 8086 - DNA, 74 bp, Homo sapiens
tgccgccggttgccggaggccatcgaggaagtgaagaagacagtcattttgtttactcattcagccctgttgca

SEQ ID NO: 8087 - DNA, 75 bp, Homo sapiens
gcaggagaacgagtccctcttcactttcctcggcaagaaatgtgtgtgtatgcagagaatatttccaaaatggtg

SEQ ID NO: 8088 - DNA, 87 bp, Homo sapiens
tgatacagcagagacgtcatacttggaaatggctgcaggttcagacaaatgcagccctgaggatttggctactgcatataacaacag

SEQ ID NO: 8089 - DNA, 100 bp, Homo sapiens
gacggtgtcctaatggaactgcaagactgtgcccttcccctcctgaaagatcttagcaaagcaatgtctcaagatggtgcttctcagttccaagaagtca

SEQ ID NO: 8090 - DNA, 100 bp, Homo sapiens
caacattgtttacaaaatagatgacatgacagctgcacccatggacgttcgccagtgggttgacacagatgtgctgcttacaactgataacagacagacc

SEQ ID NO: 8091 - DNA, 100 bp, Homo sapiens
gcaagaggaaaaacaaagcagccgaaacacacccagacgcacacttctgccaagcatagccaccacggcactggagatattattgctgtcatgataacag

SEQ ID NO: 8092 - DNA, 83 bp, Homo sapiens
cgggcatgaccggaaaggccaagggggatatgagactttctactcggaatatcctgagtgttgcgtggatgtaaaacccattt

SEQ ID NO: 8093 - DNA, 50 bp, Homo sapiens
tggggatcttcgcactatcccaaggctgccgcgggcggacacgccagagg

SEQ ID NO: 8094 - DNA, 95 bp, Homo sapiens
tccacttgatgtcatcacgcagaaggggtgaaagagactcggtgacagatacaggtaatatttgaagctgaagtctcaggagggagaagtggtta

SEQ ID NO: 8095 - DNA, 76 bp, Homo sapiens
cctgaatcttctgggagctgaggaaccagatatcttgaaaagctgccagaaagggactttgaacatgtcggggatc

SEQ ID NO: 8096 - DNA, 98 bp, Homo sapiens
gacactccaggaagagcggccccgcggggggcgatgaccgtgcgctgaccctgactcactccagaaatgatgatgcacgtgcaacagctgtctcttgc

SEQ ID NO: 8097 - DNA, 100 bp, Homo sapiens
atatgggtacaggtacatttggaccagtgggtgtagttgctgctaaagatcatgatataggaacaacaaatctccatattgaagtttctgatgttgtaaa

SEQ ID NO: 8098 - DNA, 73 bp, Homo sapiens
atccgcactgccctttttgcaccccagggagctgctgctgtccctggccccacctcttctgccacaaacgtca

SEQ ID NO: 8099 - DNA, 90 bp, Homo sapiens
cacagaaggaaatacccagactgttactacaacctcgggcgtctggttttttgcatgtctgacacccatgactccacctggaccttatgg

SEQ ID NO: 8100 - DNA, 90 bp, Homo sapiens
cgcggatcgccgcgctcagcgacaaacaacaaaaagatggcacctttgcagcagggggctacatgccccctctccggtttaaagcactta

SEQ ID NO: 8101 - DNA, 82 bp, Homo sapiens
gatggaagaggctccacttttcccaggagaatcaattaaagccattgtttgcatttatgtcggatcctcagtgaaaataaaa

SEQ ID NO: 8102 - DNA, 75 bp, Homo sapiens
tatgtatgacttttaaaagagagagcttgtgaaactgagggaatagcattgcagtgtcgagatggctatgaaccc

SEQ ID NO: 8103 - DNA, 78 bp, Homo sapiens
actatgattaccaccaggagattgcaagatggacgacctcagtgggaggtagaagggaagataatcagggaaaaatgt

SEQ ID NO: 8104 - DNA, 74 bp, Homo sapiens
gcgcgggagagctcggggcgcctgatacaagaaacccactgactttaaaagaaagaaattgcaattattgacca

SEQ ID NO: 8105 - DNA, 97 bp, Homo sapiens
tgtgttgctgctgatgaagacgttatttaccatatccagtatgatgaggtgtggatgaatggaacatagctcgcctcaatacagtcttggatgtggt

SEQ ID NO: 8106 - DNA, 83 bp, Homo sapiens
cgacgaggaggagacgtaccggctctggaaaatccgcaagaccatcatgcagatccagagacaatggccccgatgggatggag

SEQ ID NO: 8107 - DNA, 100 bp, Homo sapiens
caaatataggcattctgatgggaacttgtgtgttaaagtaacagatgatttagttattctccccgaggagaggcggagagctgagcttgactaccgaaaa

SEQ ID NO: 8108 - DNA, 82 bp, Homo sapiens
acacaccagagaccagaatgaaagtcggggaagtccttatgcgaatcgtcagggcattagtgaagtaagaactctgctagag

SEQ ID NO: 8109 - DNA, 100 bp, Homo sapiens
agcgagtaaaggagaaagaagccatattgaaagaagctgagagagaggatggaggtttgcttctgaataacccttcggcattagctatgcatgagtgtaa

SEQ ID NO: 8110 - DNA, 60 bp, Homo sapiens
tcgcagcacttggagcgcagaaccggccgcgcccgggattgtttccattgccaccctaac

SEQ ID NO: 8111 - DNA, 75 bp, Homo sapiens
acaaggctgtggtggatgcaggaatcactaccaagcttctgaccaaactccccaacttttaaatcatttgaagaa

SEQ ID NO: 8112 - DNA, 96 bp, Homo sapiens
gcggtgttgaaagccaacaagcagaatgacatcttcgagtggtccagggaccaccgagcccaccacaagtactcagagacggatgctgacccccac

SEQ ID NO: 8113 - DNA, 85 bp, Homo sapiens
ccattccagcactggactcatggaggctgagcatttattcaggtttcaggcacagaactgtatatccaataatagtgaaatggat

SEQ ID NO: 8114 - DNA, 74 bp, Homo sapiens
ggcattgactttttatcaaaaactatgtacttggaggatcgaacatgggaatgtaagacggacttagatattgc

SEQ ID NO: 8115 - DNA, 75 bp, Homo sapiens
gaagatcggcagcaggagtttcggagaggtgatgcagacagaaagcattgtaaatttaagcctgatcccaatatc

SEQ ID NO: 8116 - DNA, 97 bp, Homo sapiens
cacctgtctggagcaaggaagaaaacctttgaccatgaagagaaatgagatgatagccaaaccctcaggtagtgggcagcagtcagtgacaggtgta

SEQ ID NO: 8117 - DNA, 75 bp, Homo sapiens
ggcaaatctgttactgcagacagatgggaaaaatatttgatcaagcatccaggatattgcagtcctcttcaacat

SEQ ID NO: 8118 - DNA, 100 bp, Homo sapiens
gggactttattaccgctttaccaggtgtgccacgtcatcaccgaggtgaaatctggaaatttctagctgagcaattccaccttaaacaccagtttcccag

SEQ ID NO: 8119 - DNA, 74 bp, Homo sapiens
agccgtcttcgaactcaggagaaggaaatcaaggactttctgttcacagcccaatgaaaggatgctgaatctgt

SEQ ID NO: 8120 - DNA, 127 bp, Homo sapiens
gcccaggaccttctggagcccctacctcggagcccgagggaggagaaagcggcagccgctggaggtactataagatctccgtggtgctcatgtgctttgtggtccccacgctggtgccctggtacat

SEQ ID NO: 8121 - DNA, 100 bp, Homo sapiens
cggagaggcaggactactgcgagcagttttaccgcgacctccggaggccggcgtgacaggctctgtcactaaaataggaaaatgtttataggaggcctta

SEQ ID NO: 8122 - DNA, 83 bp, Homo sapiens
cgcagccctgaagttgcctcttctggtgtcaaagcttttggacattcctgggaaatacggggttgtagaaggcaaagcgctaa

SEQ ID NO: 8123 - DNA, 75 bp, Homo sapiens
ctgagtggttgtgtggtcgcgtctcggaaaccggtagcgcttgcagcatggagtagagaattgaactgtgaaaaa

SEQ ID NO: 8124 - DNA, 74 bp, Homo sapiens
atgcggatgctcgataatctggccctggccaacgtcaacattgggagcctcatctgcaatgtaggggccggtgg

SEQ ID NO: 8125 - DNA, 100 bp, Homo sapiens
ccgccatccgggaggcccagggaagggccaattcctgtccccccagcagcatggcatcgtgtgctgaaccctctgagccctctgccccactgcccgccgg

SEQ ID NO: 8126 - DNA, 50 bp, Homo sapiens
ccgccagatccacgccaaccacgagctcagttcctacccccggttgcgag

SEQ ID NO: 8127 - DNA, 75 bp, Homo sapiens
caactaagaccaagtcctcgctggactgctcagggtgccagacctcatcgcggggagacaaccccttccccaaga

SEQ ID NO: 8128 - DNA, 82 bp, Homo sapiens
ctacgttcactcttccatcgtccccacattccatcggcgctgctactggctgctccaggaattacatgaacgacagccttcg

SEQ ID NO: 8129 - DNA, 76 bp, Homo sapiens
ccacccaaacttgctggtcactgggagaaatttcagcagatttcaaggagccgccatccctgccagggaaggagaa

SEQ ID NO: 8130 - DNA, 95 bp, Homo sapiens
gccgggagctctgaccgaggcgcctcgctggggcggggaccttgccttgcccgggggcaatgcaatcggccttcatgggcttggtcttctttact

SEQ ID NO: 8131 - DNA, 82 bp, Homo sapiens
ccacttgcagcatggagtcgcccgcctcgagccagcccgccagcatgccccagtccaaagggatccaggtccggcacgatca

SEQ ID NO: 8132 - DNA, 74 bp, Homo sapiens
cggagcgcttgaaggagctgcggccgagtgtttaagacggatatggagctggaggttctgcgctataccaataa

SEQ ID NO: 8133 - DNA, 100 bp, Homo sapiens
aacacgctgcttcacctcttcgccggcgggaaatgaggcaacatgatgtgcaggaactgaatcgaatcctcttcagcgctttggaaacttctttagttgg

SEQ ID NO: 8134 - DNA, 102 bp, Homo sapiens
cggtgcccgaggaggcagccaagctcatggcctgccactgcgtgcgagccttcacgtaaatgggtccagtcatgcctcccagtaagaagccagaaagctcag

SEQ ID NO: 8135 - DNA, 83 bp, Homo sapiens
cgagtatctggtgaagtggaaaggatggcccccaaatcttctcaagtcttaggattgcagcaacacgctcggctgcccaaacc

SEQ ID NO: 8136 - DNA, 100 bp, Homo sapiens
ccgcccccagcgggatgtgaaggactccgggtgaggccggccacgccccgcacggtgaatccgccatactacatcccgctggttgagctggtcccccacc

SEQ ID NO: 8137 - DNA, 90 bp, Homo sapiens
gcttcctggcccgaaaggagagcctgacagtcattttgtttactcattcagccctgttgcaggtcccaataaactcttcataaggttgac

SEQ ID NO: 8138 - DNA, 100 bp, Homo sapiens
ttaccactctgggtgatccagccaaagttccaaaagctgagacaagatcttgaaatggtactgtccactaaggagtcaaagaatgaaaagttaaaggaag

SEQ ID NO: 8139 - DNA, 74 bp, Homo sapiens
ctgaacggagtgtgcgacggattgggagtttgtgaagtgtggatatgcaggctctaactttccagaacacatct

SEQ ID NO: 8140 - DNA, 97 bp, Homo sapiens
ggagcagatttacaaactggccaagaagggccttactccttcacagatcggctcctacccagagattctacccagtgaaactcccacagcaacgcag

SEQ ID NO: 8141 - DNA, 100 bp, Homo sapiens
ctgaattttccttgatggtcaaaagattaaggttgccaacttggcctgttccatctcaaataatgaagaaggtgtaaagcttgttcgaatgtctgcaagc

SEQ ID NO: 8142 - DNA, 101 bp, Homo sapiens
ccagtggaagatgatcacatcccaggtaagagcttctgttcgtgtgcagggaaagcagctcacagacgccgttaaaaccagcttcatctttccttcaggat

SEQ ID NO: 8143 - DNA, 100 bp, Homo sapiens
tggccaatccctaaggacagcttttgatttattaaatttaaatagattagtaactggcatagacaactatgggcaggacaacaccatcgacttcctggag

SEQ ID NO: 8144 - DNA, 105 bp, Homo sapiens
ttgtcttttcttaacctgggaagtggaaccggatatttaagtacaatggtgggcttaattttaggtaacacaagtggcaagacagccgggaacccctaccccatc

SEQ ID NO: 8145 - DNA, 50 bp, Homo sapiens
tggagagaagcagcggatcagcagagccctgggcgctgcctatggcacag

SEQ ID NO: 8146 - DNA, 96 bp, Homo sapiens
agctttaatggaggaaaatctgtcatttcaggatcattaattgtcacagccacagaatgtgcatccagtaccctgctgactctgacatgcccccag

SEQ ID NO: 8147 - DNA, 100 bp, Homo sapiens
ctccagagcaagcacgacgcagccacctgctttgtggacgctggcaacgcattcaagaaagccgacccccaaggctccccttccctgcgggcatatccgc

SEQ ID NO: 8148 - DNA, 90 bp, Homo sapiens
atttgatcccgcctcctatatcatagaatcttgctctgtcgcccaggctggagtacagtgatgtgatcttggttcactgcaacctctgcc

SEQ ID NO: 8149 - DNA, 100 bp, Homo sapiens
aagaaaattcttttgggagccaaacccacggatgagagagacctagagaaagatgatgaactggaactgaaaagaagtcttttatgtagagactctgcct

SEQ ID NO: 8150 - DNA, 74 bp, Homo sapiens
cgaggaggaacgcgctaaggcaaagcacctggccatcatctctcagcaaggtgacatatttgtttttgacctgg

SEQ ID NO: 8151 - DNA, 100 bp, Homo sapiens
gacttgggattatgcctctgaccatggggaaaagaaacttatttctgttgacacgcgtttacagtccctaattaaaaatattacacttagaagaacaaag

SEQ ID NO: 8152 - DNA, 83 bp, Homo sapiens
ctttgttctgaattactccaaagcgtttggtgcacctcgatttggaggaagtagggcagggcccttatctggaaagaagtttg

SEQ ID NO: 8153 - DNA, 100 bp, Homo sapiens
gaacaagactgcccacctccacaagggcttcctggccctctaccaaaccgtgggtcgcagcagttgtggtagaaatttctgggttagtggactctcttct

SEQ ID NO: 8154 - DNA, 100 bp, Homo sapiens
ccactgcagccggtcctcttggggaaggctgtgtgggccagcccagccatgagaagtacaacttcctgggtatctccattgttggccagagcaatgagcg

SEQ ID NO: 8155 - DNA, 75 bp, Homo sapiens
gtggtgaatcccctgtttgagaaaaggcctaagaattttggcattggactcagaattcatgattgaagaaatgca

SEQ ID NO: 8156 - DNA, 75 bp, Homo sapiens
taagctgaaggagaagtttatgaatgagttgcataaaattccatgtgctggagaatctggtaaaagcaccattgt

SEQ ID NO: 8157 - DNA, 51 bp, Homo sapiens
aatcgcctgctttgattcattgaaagtttgactttacacataaaaaacaat

SEQ ID NO: 8158 - DNA, 90 bp, Homo sapiens
aggagcagcccccggagacagcggcacagaggtgcttctgccaggacccctgcagctgcagacatctgcttcaccaaggagctacactcc

SEQ ID NO: 8159 - DNA, 51 bp, Homo sapiens
cgccgccctctcgtcccactttccagaacagatctcggcccctttccaaac

SEQ ID NO: 8160 - DNA, 103 bp, Homo sapiens
ccacagcttgtgtgggaaggaaatttgacatgtgatgcaagcggacgtttgtgtaaactgctgggagattaacaaattaaacaaccaccatgtcgagcaaaaa

SEQ ID NO: 8161 - DNA, 100 bp, Homo sapiens
ccgagccagcgagccagcgagccgccgacccgccgagcaaaatggtagtaaacctattgatggcaattttgctgactgtggaagtgactcatccaaactc

SEQ ID NO: 8162 - DNA, 100 bp, Homo sapiens
cttacatctatcagaaacgatgggtgagactggatactgatcacctgcgatactttgacagtaacaaggctggcatgactcacatcgtgcgggaagtcga

SEQ ID NO: 8163 - DNA, 100 bp, Homo sapiens
ctctgcctgtgcccagcctgctgccccgtctcagggcctggaggacgggcaaaacgggttgtccccccggcacgctccacagctggtgacccgacagttc

SEQ ID NO: 8164 - DNA, 96 bp, Homo sapiens
cagactggctctgggaagacgttggcgataattttccccagatggcccatcagaagcggttcatcgaacggaagtacagacaagagttaaaagaaa

SEQ ID NO: 8165 - DNA, 75 bp, Homo sapiens
gggaaaatggctgcgtcttcgagtgtattgtgtatggatgcaaagatcaattttgactctaattcagcctatcgc

SEQ ID NO: 8166 - DNA, 97 bp, Homo sapiens
ctgcatttctgctgtttcagttgtactactacaagcactatttatcaacaaaggagaaatatggggagttgatgagcatcagaaaaaccaggacaga

SEQ ID NO: 8167 - DNA, 82 bp, Homo sapiens
cccgtcagtccctgctctgtgcgcgcctccatctgggccatggatgggtaccggcggacgtcgagaaatgtcaggatcggat

SEQ ID NO: 8168 - DNA, 100 bp, Homo sapiens
ctaatatggtgcttatgttgtctaattaacaaagaaccacagaattctggacaatcaaaacttaactcctggatacaggcacgtctgagaatggtggatg

SEQ ID NO: 8169 - DNA, 83 bp, Homo sapiens
cggccgagtcgcggaggcgcctccgctgcagtcgctgcgtctccaaggtgagaagccctaccactgcaactgggacggctgcg

SEQ ID NO: 8170 - DNA, 82 bp, Homo sapiens
aggatatcgacgtcgtgatccagaagtccagagctgaggactgcctgtttgcagaaaactctcccaccatgtcgcagaatgg

SEQ ID NO: 8171 - DNA, 100 bp, Homo sapiens
agacaggtggagaaggtggtagacaagttcatcaagcaaagggactaccaccagcagacaggtgcagttcaggagcagatgagatccaagggaaaccgag

SEQ ID NO: 8172 - DNA, 90 bp, Homo sapiens
gcgtgtgggacgggtttagcggcagcctcttcgacgacctagctgcccagccagatctctcccagggagaggagaatgagccacgcgttc

SEQ ID NO: 8173 - DNA, 90 bp, Homo sapiens
ctctgactcacttctgactttagaggcggtgccctgctgacttcgaccagcggccctggtttccatctcatgctccctttcatcacatca

SEQ ID NO: 8174 - DNA, 102 bp, Homo sapiens
gcggttggcaccactgaagtgaccgaatgagttgtaggacagtcccatctggacagcaacattgagaatcaagagattgtcaccaatccgccagacatttgc

SEQ ID NO: 8175 - DNA, 80 bp, Homo sapiens
gttattttcttaggagttaagttgctttccaaaaattccagtgtctcgccccatcctcaccctcagggttcccagggccc

SEQ ID NO: 8176 - DNA, 82 bp, Homo sapiens
ggaacagctacgcatagaagccgggattgagcgcatcaagggtgagaactctgtctcagtcgacgggaagtgcagtgactcc

SEQ ID NO: 8177 - DNA, 50 bp, Homo sapiens
agttgaatcaaagtatggacacagataacagcgacttgattgcatgtaca

SEQ ID NO: 8178 - DNA, 75 bp, Homo sapiens
ggaagtcctgatgaattttcaaatgctacctggcctatcgaaactttatgattgacacttaccgactgaaccccc

SEQ ID NO: 8179 - DNA, 101 bp, Homo sapiens
ggaacctctacaacgaaggtgaagccacggaagataaggaatactcccccagttgcaagaggcgcaggaccgtggaagacttcaacaaattctgcaccttt

SEQ ID NO: 8180 - DNA, 82 bp, Homo sapiens
ttgcgtgccctacttcaaggataagggcgacagcaacagctctgccggctggaaggttgtactggtcagtggacatctggac

SEQ ID NO: 8181 - DNA, 112 bp, Homo sapiens
gcgctgggagcaacgggagtgtcctggacccagctgagcgggcggtcattcgcatcgcagaacatccagtcatggataaaaatgagctggttcagaaggccaaactggccga

SEQ ID NO: 8182 - DNA, 75 bp, Homo sapiens
cgtgggggaccggctgttggcggtaatagctcttcaagtctgcaataaaaaatggcctccaacaaaactacattg

SEQ ID NO: 8183 - DNA, 82 bp, Homo sapiens
tcttcatctttacagaggaatagtctacaaaggaagacttgtaacctggagaagagaaccaaaaacttttgctagaaaatca

SEQ ID NO: 8184 - DNA, 99 bp, Homo sapiens
ccttgaaatgcatccgctggtcgctgccggaaatggccagacttcccaagtaagaagcggaagaggagccgctggaaccaagacacaatggaacagaag

SEQ ID NO: 8185 - DNA, 98 bp, Homo sapiens
caaaataaaactaacagtctatgatgtcaaggataagtctcatgacaccattgttcctcatgtggttaatttggttcattctttcaaaaatgatggtc

SEQ ID NO: 8186 - DNA, 98 bp, Homo sapiens
gaccaagggacggggcgttcccaggtgggagcctggagggcaaagcgtggtgcgagcagtctgcgctcctcagaccaccggcaggtgaacagcctgat

SEQ ID NO: 8187 - DNA, 75 bp, Homo sapiens
cacgtgcgaggggcatttcaggagtttcctgtctgtcagatgaggatgtggatgttcttccctccactgtagaag

SEQ ID NO: 8188 - DNA, 73 bp, Homo sapiens
agagagccaatcttggacctaccacttgaaaccattagtgagctggccatcgaggagggcacgctggaggaga

SEQ ID NO: 8189 - DNA, 101 bp, Homo sapiens
agcgcgcgggcgcgcaggccgcggggagcacctggaaagtgactgagaccgaagatgatagtgatagtgacagcgatgatgatgaagatgatgttcatgtc

SEQ ID NO: 8190 - DNA, 90 bp, Homo sapiens
accatcgcagttggaagcccatggggcaggtaacctccgaggctatggcatggcatccccaggcctcgcagcccccagcctcacaccccc

SEQ ID NO: 8191 - DNA, 73 bp, Homo sapiens
ccccttctccttggccgtctttgaggaactcttcatttttgactctgctggcaaggagctgttttcggaaatg

SEQ ID NO: 8192 - DNA, 100 bp, Homo sapiens
aaacctttgaagaggaatttattatatcctacaactgggttatatgacagaaagaatttactttcaggttttcttacctaaagggagcaaagagaagagc

SEQ ID NO: 8193 - DNA, 51 bp, Homo sapiens
caagaaaatcttcgaagacttttcaatctgcaactatgtgggaccagcaaa

SEQ ID NO: 8194 - DNA, 90 bp, Homo sapiens
cgcggcgaccaagatcaggaacctgccctgtcggtcaactatcttcgtgcgtctccacaccaacgggagccaggagctgcagtaccagcc

SEQ ID NO: 8195 - DNA, 106 bp, Homo sapiens
tgagaacttcctgatctctctcgctgtgagacatgtctgagactcctgctcagtgtagcattaaggtgccacttgaagaatggatgatgatgattttggtggtttt

SEQ ID NO: 8196 - DNA, 101 bp, Homo sapiens
ccggacactttgttattggagaaacatgcagattatatcgcatcctatggctcaaagaaagatgattatgaagatgagaatgtgcctactgctcctgatcc

SEQ ID NO: 8197 - DNA, 100 bp, Homo sapiens
cagcagccaggcagagtgccgactccttcacagccgtgaggaactcttcaggctccagaaatttggagtccaggaatgagactaagcatttatctgtagg

SEQ ID NO: 8198 - DNA, 100 bp, Homo sapiens
ctcaatgaaaccagcattgtgtctggtggctatgggggctctggtgatggactcatccccacagagggccgtctgtgcttcaatcccaggtggaccctcg

SEQ ID NO: 8199 - DNA, 100 bp, Homo sapiens
caggatctcctttaacctgggggcagatgttggggatcagccaggtgaggtaggttattcaggctctcctgctgaagctcctccaagcaagtcaccatcg

SEQ ID NO: 8200 - DNA, 98 bp, Homo sapiens
tttacccgactctttgggccgttatctcacgcgtttgcaatggctgctactgtgaacttggaacttgatcccatttttttgaaagcactaggtttctt

SEQ ID NO: 8201 - DNA, 75 bp, Homo sapiens
cgagcgcccctccgagctggggttggacgctgccagtttgcacagcagcagatggctcagcgacttcttctgagg

SEQ ID NO: 8202 - DNA, 82 bp, Homo sapiens
cttgcctgtgtcccacttgttcgcggcctatagtgatgtccttgcattgcccatttttaagcaagaagagtcgagtttgcct

SEQ ID NO: 8203 - DNA, 80 bp, Homo sapiens
aacacagactatgagtctagtttaaagttaactgaactaaaggcagactttcagtaccaagagtcaaatttgagaacaaa

SEQ ID NO: 8204 - DNA, 74 bp, Homo sapiens
cccagcatgaagaccccggcggacacagagggcccaggtcagcggtcaagactggcctcaatgcttgactcaga

SEQ ID NO: 8205 - DNA, 51 bp, Homo sapiens
ctttgtacatcttctgcaattactcggaaaccactatcagcggcctgaccc

SEQ ID NO: 8206 - DNA, 75 bp, Homo sapiens
ctcacggcttttgatgggccatactgcaaccacggagagaagatgactgaggaggaggtggagaccgttctggca

SEQ ID NO: 8207 - DNA, 100 bp, Homo sapiens
ggttcacagatgatacctttgatccagaacttgcagcaacaataggtgttcaatatgaatgccccagttcctcctgttaatgaaccagaaactttaaaac

SEQ ID NO: 8208 - DNA, 50 bp, Homo sapiens
ggaagaacaaagacttagactcgacctttgaaactcacaactctacgaca

SEQ ID NO: 8209 - DNA, 100 bp, Homo sapiens
caggtcgaggacggtcggactcccgcggcgggaggagcctgttcccctgagtatggatgagaaaaccctgtatctagctttgggggctgtgaagaacatc

SEQ ID NO: 8210 - DNA, 99 bp, Homo sapiens
tcccgcaaagcctcgcctagctcctgctaccagttacgatggcaaaacagcagtgaccgagatcgtcaacaggatcaagcagtgcacacgggtcacgat

SEQ ID NO: 8211 - DNA, 92 bp, Homo sapiens
ctgtcttcggtggactccttcggcagtccacccaccgccgccgcctcccagaacccagcttagactagaaagtctagaagacacacacataa

SEQ ID NO: 8212 - DNA, 82 bp, Homo sapiens
aaaaaactggctgtgaataatatagctggtattgaagagtggtttactttgtagagtgagtgcaggaaacgatatggcatgt

SEQ ID NO: 8213 - DNA, 83 bp, Homo sapiens
gctacatccaggagagaatgctgacagtcctgcaggtcaggcagttcctgctccgactggggctcctccaggtggtcagccag

SEQ ID NO: 8214 - DNA, 100 bp, Homo sapiens
gctgaggagcgccgctgcctcgcctcggagcggttggttccccgaggcgtacgtgaaggctctggaggaggggcccgtgaatcccatgacccccgtgacc

SEQ ID NO: 8215 - DNA, 82 bp, Homo sapiens
ctggagccgaggcgcaggtggcgctggattggtttatcttggaagctaaagggcattgctcatcctgaagatcagctgacca

SEQ ID NO: 8216 - DNA, 100 bp, Homo sapiens
acccgttcttgcctcaggccagtcgcctccaggccaagagggatccttcacccgtgtctgactggggcagcacctactccgtgtcagtggtggagaccga

SEQ ID NO: 8217 - DNA, 100 bp, Homo sapiens
ggcgatgaagaagcagaggaagaacaagaagagaaccttgaagcaagtgggtattgttggaattcagcaaagcccaggtaaactctgtgccaaccaacgg

SEQ ID NO: 8218 - DNA, 75 bp, Homo sapiens
taataagttactgggtaacattgaggaaacctagccctgtctattcatttggttcaaatctgaacatcaatgatg

SEQ ID NO: 8219 - DNA, 89 bp, Homo sapiens
catatccaggatccgatagctctctgcttattaatggcagcaagccaatcactgaggtgatgcgttttgcaagggagaaaagatgttat

SEQ ID NO: 8220 - DNA, 74 bp, Homo sapiens
gacaagcgggcagaaggctggtgacaaggagggctctgagagatttcatttctgtcctgctgatgaagtctacg

SEQ ID NO: 8221 - DNA, 88 bp, Homo sapiens
tcgcagtgacctggggaacctgctcaaagccctgggtcgcttggaagaagccaagttgttgaatgttgggtcacgaagatctcaacct

SEQ ID NO: 8222 - DNA, 75 bp, Homo sapiens
ttggcagcaaggaggtgaccctgaacctctacgacacggccggtgcaaacgccatgccagtcgggaggaggcgga

SEQ ID NO: 8223 - DNA, 90 bp, Homo sapiens
tgccacaagacaaagaatactataaagtaaaagaacctggtgaaagtcccatattctgtagacccaaatgatttgtacattgtagaaccc

SEQ ID NO: 8224 - DNA, 74 bp, Homo sapiens
tgttaaggattccaagtaactcttatttgctcttttaaggaagaaaaagatataaagccaatcattaaagatga

SEQ ID NO: 8225 - DNA, 115 bp, Homo sapiens
cagcggccgagcccggggagaagcgggcgcccgccgccgagccgtctcctgcagcggcccccgccggatatttaacaccgtgcccgatatgcctctcaccaatgcccagctgcac

SEQ ID NO: 8226 - DNA, 100 bp, Homo sapiens
caaatgcagaaactccctctggtgatgatttcagggaaggcccggcgactgaagcaggcaaaggaggaggcacagatggaggtggagcaataccgcagag

SEQ ID NO: 8227 - DNA, 104 bp, Homo sapiens
agccggagctgggcgcggattcgccgaggcaccgaggcactcagaggagcccgcggcgccatggctcacgtcggctcccgcaagcgctcgaggagtcgcagccg

SEQ ID NO: 8228 - DNA, 74 bp, Homo sapiens
ggatttgttaaggattccaagtaactcttatttggacaaccgatgcaagctgtttgactccccttccctgtgta

SEQ ID NO: 8229 - DNA, 75 bp, Homo sapiens
ccgcatgcaggactcggacctgagtgaccccatgtgggagacaaggagaaggccttaggatctactgggggagtc

SEQ ID NO: 8230 - DNA, 75 bp, Homo sapiens
gacgccggtctctgttccgcaggatggaacagatggagtcggataactgttcaggaggagatgatgactggaccc

SEQ ID NO: 8231 - DNA, 98 bp, Homo sapiens
gccgaatcactgactggcacaggtgttggggtttgagtgtgaaaagctgattcttgttggggatcccaaacagctacctcctactattcagggttctg

SEQ ID NO: 8232 - DNA, 82 bp, Homo sapiens
gaccacttgcggcctgagtatggcattggaatggatacttgtgtcattcctttgaggcacggtgggctttccttggttcaaa

SEQ ID NO: 8233 - DNA, 100 bp, Homo sapiens
ccaccgtggagttattgttcatgtcatcgaccccaaatcaggcacagtcatccattctgaccgaattggcagagggggtcgatttgggaggaaaggtgtg

SEQ ID NO: 8234 - DNA, 101 bp, Homo sapiens
cctgagcccggcgcaggtgaccggcgcgcgggagcgctacggccccaacgataagtgggcggaaaaaccagcctttgggactcccctagaagaacacctga

SEQ ID NO: 8235 - DNA, 90 bp, Homo sapiens
ctctttctttgtgggccggatgggtccttgagtaaatccctcactttaaggaggttatcatcatggctaccaactgcgagaactgtgggc

SEQ ID NO: 8236 - DNA, 50 bp, Homo sapiens
atagaccagaaccttagtcccgggaaagatttaatccagagactgacttc

SEQ ID NO: 8237 - DNA, 74 bp, Homo sapiens
cgccatacgcgctctccctgtttaggtgcagattttaatttcagtgactgaattaaaaggtgtcaagaagctca

SEQ ID NO: 8238 - DNA, 90 bp, Homo sapiens
cgatgatctggcagacctcagctgcctggtccttcaagatggtcagcaaggccagcagtccacagcccaggtcaaagtccagtcccgccc

SEQ ID NO: 8239 - DNA, 88 bp, Homo sapiens
gtgctggtgcctatagcatgaggtacgtcagcctgtcatatgcatcaacaaccatgtattttgttcgatttgtattgatttgtggttg

SEQ ID NO: 8240 - DNA, 50 bp, Homo sapiens
ccaggctggacctctcccagctagctgtgaagtcgatcaagaagcagcac

SEQ ID NO: 8241 - DNA, 75 bp, Homo sapiens
gtgaacactctgaaagacggaaggcaatggatcacttggagtcctttattgctgaatgtgatcggagaactgagc

SEQ ID NO: 8242 - DNA, 73 bp, Homo sapiens
tgggggattcgcagggaggatgtcgggacaccccggaagctgggaaatgatgttggatgacaataaccatctt

SEQ ID NO: 8243 - DNA, 98 bp, Homo sapiens
tcagggatcaaagagcaaacagattcagtggcctgcattgggaagtcttctgaccaactggccctccgtccctcctaccataaaggaggaggaaaaca

SEQ ID NO: 8244 - DNA, 101 bp, Homo sapiens
tgtgccacaggaatcctcattcatctggccaagttttatggttatgacaatgttaaggaatatctggagaggcggggaagctggctgtggagcgaggctgg

SEQ ID NO: 8245 - DNA, 100 bp, Homo sapiens
tctccaacctcggtgttgtcctggccgctggggcccagactgtatagagcctattgtgaagaatggcaggcctccaacgtctcacagtatgcattccttc

SEQ ID NO: 8246 - DNA, 74 bp, Homo sapiens
ctactcctggcagtgcgtcaatcagagcgtcctgtgcgaggctgggaggcggcagaatgcagccagaggagggc

SEQ ID NO: 8247 - DNA, 100 bp, Homo sapiens
cctgagctccagcgtctgcattgctccggactcagccaagttccccaacggctccccgtcgtcctggtgctgcagcggtactaggttttgacaagcttgc

SEQ ID NO: 8248 - DNA, 100 bp, Homo sapiens
tgtactccaacattcatcgcagctggtgggtgtacacactgctgtttaccttggcgaggcctttcaccaagtccatggttgaaaggattgttgacaaaag

SEQ ID NO: 8249 - DNA, 88 bp, Homo sapiens
tggataagcacaaagtcaagagacagcgattggacagaatttgtgaagttaatatgatcctctgttgaagcaagaagacaaactgtat

SEQ ID NO: 8250 - DNA, 83 bp, Homo sapiens
cggagagaaccgggacccccctgcggggacccggaactggtccacctgggcttgcgaaggcacagattccccgtccacagctc

SEQ ID NO: 8251 - DNA, 101 bp, Homo sapiens
ctgacaatggctttggtccccagcgcagtgaagtggtgagcctttttgtcactgatgtaggtgcaaaaaactacagacatctctgtgctgtttattacaac

SEQ ID NO: 8252 - DNA, 100 bp, Homo sapiens
tgggtgcagatgcagtgtggctctggatagcaccttatggacaggggactttgtgcaactgcctgtgcccgtcatccagcagctctaccactgggactgt

SEQ ID NO: 8253 - DNA, 75 bp, Homo sapiens
agatactgaatgtaaaccctgcaggctgcctttaatattggttgggaacaaatctgatctggtggaatatagtag

SEQ ID NO: 8254 - DNA, 51 bp, Homo sapiens
gacatcttctggtcagagatacttcttaaactgtgaaagttgtgtagattt

SEQ ID NO: 8255 - DNA, 80 bp, Homo sapiens
agatcaagtgcttcctcaacggggtgaagatcccccacgtggtgcggctcaagctgaataccactagaaacatacctgta

SEQ ID NO: 8256 - DNA, 75 bp, Homo sapiens
gaattcagaaggagctagctgaaataacccttgatcctcctcctaattgcaggtcacggtctagatcacattctc

SEQ ID NO: 8257 - DNA, 103 bp, Homo sapiens
ctgctggccgcgccgggagcggcgctggccccaaggcgctgccctgcgcagggtatcgagaaccttccctgcgaacttcagaggaacttccagctgatgcgag

SEQ ID NO: 8258 - DNA, 100 bp, Homo sapiens
gcccatttctgttgctattgatgcaggtcatgagtccttcctgttctataaagaaggcgcagttgtgtagcagttgagtaatgctggttagctgttaagg

SEQ ID NO: 8259 - DNA, 83 bp, Homo sapiens
ccttcggcagtccacccaccgccgccgcctcccaggtctcgaagtgctgcagctaaaactcatacaactgccttggctgggcg

SEQ ID NO: 8260 - DNA, 74 bp, Homo sapiens
cgccgaggaggccttcttccgtggggttagccaggccaatgagtgccaggagcgccctgttgagtgtaagttct

SEQ ID NO: 8261 - DNA, 100 bp, Homo sapiens
aagccgcacttacctatgaggccagcaagcggaggtgctgggagcgagttggctgaggcagaggaggtggacacggtggacgtctccggcgtgcccgcag

SEQ ID NO: 8262 - DNA, 83 bp, Homo sapiens
gttggaagcagccgatccagcctgcggagcctgtggggcagccgctgtacaaccagccctccgacacccggcagtatcatgag

SEQ ID NO: 8263 - DNA, 96 bp, Homo sapiens
ctgaccccaggtgctcctggagagaccccagcgagtaaccagctcataaatcacatcgaacagtttttggatactaatgaaacaccgtattttatg

SEQ ID NO: 8264 - DNA, 51 bp, Homo sapiens
gaagagaaaaatggcacctgtcaagaatctttggctgctcctgacctcagc

SEQ ID NO: 8265 - DNA, 73 bp, Homo sapiens
gaagaagaggagctcttgaggaaagccattgctgaaagcctgaatgatgatgactttgagttcactggcagcc

SEQ ID NO: 8266 - DNA, 100 bp, Homo sapiens
cggccagcagctccaagatgatttgatgaaggtcctgaacgagctctactcgatggcttgttcaatcagtatatcagtcaacaggaatataagccacgat

SEQ ID NO: 8267 - DNA, 100 bp, Homo sapiens
tgagcgcgtccaggcctgacagctctgcggctcgggccctgaggtgcttaatttacccatttctgatgcgaggaggaaagcctatgccactgttggcgtg

SEQ ID NO: 8268 - DNA, 96 bp, Homo sapiens
gcgtggagatatggcgcaactgcggcgcatgccatggacaatattaccaggcagaaccaattctacgatacccaagtcatcaaacaagaaaacgag

SEQ ID NO: 8269 - DNA, 49 bp, Homo sapiens
ctttgacatggacggacttcttctggagggtggttcccacttcatcaac

SEQ ID NO: 8270 - DNA, 75 bp, Homo sapiens
ctgtagcgtccctccctctcaaccacaataacaggcggagggtcggcgtaggcccctccagccagcgtcaggtgc

SEQ ID NO: 8271 - DNA, 80 bp, Homo sapiens
ctcgcctatgccttcagacatcaccagccaggacaaggagcatccaagatacctgatcccagaactttgcaaacagtttt

SEQ ID NO: 8272 - DNA, 75 bp, Homo sapiens
gttacccatttgtgcaggaaaaccagtccaataggtgtattgtacgagcattgaaagatccaaatgcatttcttt

SEQ ID NO: 8273 - DNA, 101 bp, Homo sapiens
tggagctctacgcctcctacgtttacctgtccatgggaagcagtgcgttatatcaatgaaaacctaattgttaacacagatgaactgggaagagattgcct

SEQ ID NO: 8274 - DNA, 100 bp, Homo sapiens
tcccgctgcagccgagatgccgggggagcggggccttccacaccccctccgtgggtgtgtgacatttatgcagtgtgtgattctttctaaaacaactccc

SEQ ID NO: 8275 - DNA, 100 bp, Homo sapiens
ccccacaccaccgaccaggacctggtgaagctctgtcaacctttggaaattttagcattcaggtgccaggaatgcagatgggacagccagtgccagaaac

SEQ ID NO: 8276 - DNA, 82 bp, Homo sapiens
tggaattctaatttgaaccatgtttggattgaagccgcctctgtattacttaccagatttggtcgtattgggcgcctggtca

SEQ ID NO: 8277 - DNA, 75 bp, Homo sapiens
tgtcttattgtaatgtttcttccagaaaagaaaggtcagcttttgccaactgttttcaaatcacatgcatggggg

SEQ ID NO: 8278 - DNA, 98 bp, Homo sapiens
ctcccggaccgggccgcgcacgccgcctcaggcacgggcgagagcgggaagagcacgttcatcaagcagatgcgcatcatccacggcgccggctactc

SEQ ID NO: 8279 - DNA, 100 bp, Homo sapiens
tggccaaagcctgcccagacggctcacctgtgcgggatggaacaaaaggctgaggcagatgtggcctccctgaaccgccgcattcagctggttgaggagg

SEQ ID NO: 8280 - DNA, 50 bp, Homo sapiens
aaactgcttcccgaggagcattggaagatttcaaggccagagaatggcag

SEQ ID NO: 8281 - DNA, 100 bp, Homo sapiens
cgagccgccaccgcaggtcgaggacggtcggactcccgcggcgggaggagcctgttcccctgaggagcttactccacgggaacagcctctagataatctg

SEQ ID NO: 8282 - DNA, 82 bp, Homo sapiens
ctccgcaaaccaacctcctggctccaaagctgcagttccaggccaaacgtaccaagaaagtcgggatcgtcggtaaatacgg

SEQ ID NO: 8283 - DNA, 75 bp, Homo sapiens
caaagatcctgcccttgtggaccttatgtgccagagttatgatatgactctgacaaatgcttgtattgccttaag

SEQ ID NO: 8284 - DNA, 73 bp, Homo sapiens
agaaccattgttagtgaacgtggacaaagctgttgtctcagggagcacagaattttttgtagcatcagatcca

SEQ ID NO: 8285 - DNA, 100 bp, Homo sapiens
ggacgttcttatgatagtagcatggagtcacgtcctgaatggggagcttacaggaggggccttccgaaatgggcgtcgagcatgcctgccagctccttgt

SEQ ID NO: 8286 - DNA, 98 bp, Homo sapiens
ggcattacctgtacccattcaccggcggctaccggcggcggcgcgcagcgtgtcaggcggagagacccgccgccaggcacagtatgaaaacccaccac

SEQ ID NO: 8287 - DNA, 100 bp, Homo sapiens
gagcagattctacaacacatggtggaatgtatccgggaggtcaacgaggtcatccagcatgcagcagattggaataaatatgatgaccgattgatgaaag

SEQ ID NO: 8288 - DNA, 75 bp, Homo sapiens
ctctgcagcctctctgacaagtggattgtggataatatgcctgtaacgtggtgttacgatgttgaagatggtcag

SEQ ID NO: 8289 - DNA, 75 bp, Homo sapiens
ttggagagctcatctggaattttgccgatttcatgactaaccagtaccgcaggatggaaacaagcccactgagac

SEQ ID NO: 8290 - DNA, 141 bp, Homo sapiens
ttctctctttcgctctttggactaatgggagttgcttttggaatgaatttggaatcttcccttgaagagaagaaaaagtcagcactttttgaagtgtctgaggttataccagtcatgacaaataattatgaagaaaatatc

SEQ ID NO: 8291 - DNA, 75 bp, Homo sapiens
ctgatctaacccctagaaacagaggcggcgatgtattgctttagttgtggaaatggtcctcacatttctgtttag

SEQ ID NO: 8292 - DNA, 100 bp, Homo sapiens
cgaaggccaaggaatcactgaagatcggcgagggaggacagggggttcatcatgggcagtccttgatggagatgcagagtcgtcatggggcgagaacaag

SEQ ID NO: 8293 - DNA, 100 bp, Homo sapiens
aaacggggaccccaggatgagtctgccggcagcatatataagaaagcctgatctttgaccagatggcagtaacatttgaagatgtgactattatttttac

SEQ ID NO: 8294 - DNA, 49 bp, Homo sapiens
ccgttgcatcggtgcagggcaaggttgggcccgaaggcatcctgcagaa

SEQ ID NO: 8295 - DNA, 90 bp, Homo sapiens
cccggcgcgaagaggctggactcggattcgttgcctgaggttcgccatcggtggtgtgaactcattgttaagcacaagttcacgaaagcc

SEQ ID NO: 8296 - DNA, 89 bp, Homo sapiens
cgagaagctccagatggcgtcttccgtgggcaacgtggccgacagcacagagacacctatggctgccgatgaaggctcagcagagaaac

SEQ ID NO: 8297 - DNA, 75 bp, Homo sapiens
gtcggtcaccctctggacacggtcaagaaatccccggcttcctgactgatgaagagtgtcggctcatcatccatc

SEQ ID NO: 8298 - DNA, 83 bp, Homo sapiens
gccattttcttctgcacttctgtctggagaggccccttcccagctgcctgcctgccctagccagctcccaggtgaagagactc

SEQ ID NO: 8299 - DNA, 75 bp, Homo sapiens
aactctttaaaacagtattgccaagagaaacagcaaaagatacagatattgtggatgaagccatctattacttca

SEQ ID NO: 8300 - DNA, 100 bp, Homo sapiens
ggaatctacatgacctgctattttcagatttctgaaatgtcaccttatcagtaaatcaacagactgggaagatgatggttggggagcatgggaagaaaat

SEQ ID NO: 8301 - DNA, 100 bp, Homo sapiens
cctgggcaggtgtcttcctcgagaggcaggcaggggatcccggacgtgagtccgtgcagttggtgcagccttcatattcatgcttcctacagcatctccc

SEQ ID NO: 8302 - DNA, 96 bp, Homo sapiens
tcatgttctgcacctcaggagggaattcagcctcagtgatgtccatgagccccagtggaccacctgcatttgccgcccacccctccgagcagtcac

SEQ ID NO: 8303 - DNA, 100 bp, Homo sapiens
cttttttcttgctgaaacattaaagctgacaaaccaagaggatttgccagaggtcttgatcctgaaagaataattggtgccacagacagcagtggagaat

SEQ ID NO: 8304 - DNA, 51 bp, Homo sapiens
tatggcggccggcgctggcaaggaagtaatggctgaacacaatccccagta

SEQ ID NO: 8305 - DNA, 100 bp, Homo sapiens
gtagaagccagaagtttgaaagtccccaaagctccagagatagatccagtagagtgtttggtggcagataactctgtaacagtggcttggagaatgccag

SEQ ID NO: 8306 - DNA, 51 bp, Homo sapiens
aaaaggcctaagaattttggcattggaaaatgtttataggaggccttagct

SEQ ID NO: 8307 - DNA, 75 bp, Homo sapiens
gtggcaatttcttagagatcaagaataaatttctagctcgaaggtttaagggttatgagagaatttacaatgaaa

SEQ ID NO: 8308 - DNA, 50 bp, Homo sapiens
ctgcaggagaagatggcggtctccacaggggatcctttcagatgatcatg

SEQ ID NO: 8309 - DNA, 100 bp, Homo sapiens
tacaaggtgttcttgccccatgcacctggttctacttcaagatgagctatcatgtggagaaacctccacagctgttgagaaaaaggagaaacctcttcca

SEQ ID NO: 8310 - DNA, 97 bp, Homo sapiens
gaaaagacagtgttctgctttcatggagttcacagaagagtcgaggaggaatgtatcctgtcaggtataatgtcagtgaatggcaagaaagttcttc

SEQ ID NO: 8311 - DNA, 102 bp, Homo sapiens
agagcgacaagccgctggcagccgcggatctcaccgccgctcaggcccgtggaccgggagcccgtggaccgggagccggtggtgtgccaccccgacctggag

SEQ ID NO: 8312 - DNA, 75 bp, Homo sapiens
tggggcatacctatggctttattgacctcgactcccatgcgagttatgcccagccaagtcttcagtatatccagg

SEQ ID NO: 8313 - DNA, 90 bp, Homo sapiens
ccccggcgcgaagaggctggactcggattcgttgcctgaggttacttcctcagaatgttggcctcctgtatgttggaggttatgaaagac

SEQ ID NO: 8314 - DNA, 100 bp, Homo sapiens
gcaggtctgaagactaacattttgtgaagttgtaaaacagagtctggctttggctttccaaagtgcccagattacaggcgtgagccaccgcacccggccg

SEQ ID NO: 8315 - DNA, 108 bp, Homo sapiens
tgtctttgggtgggggaacctcacctgcccaatctgcaaaggtctattcaccgccatcaacctcgggctgaaggatgatcggctgaatgtaacagaggaactaacgtc

SEQ ID NO: 8316 - DNA, 53 bp, Homo sapiens
attcgcagtggtcgcttcttctccttgacagccacaaccaaagtcccggagat

SEQ ID NO: 8317 - DNA, 99 bp, Homo sapiens
ccgcgctgctggcccccggcggctcttcggggcgcgatgcccaggccgcgccgccacgaggtgctggagaatctggtaaaagcaccattgtgaagcaga

SEQ ID NO: 8318 - DNA, 50 bp, Homo sapiens
ctcacccttctccctctcttgaacagatggagtctcggtctttcacccag

SEQ ID NO: 8319 - DNA, 100 bp, Homo sapiens
ccgctgagctggtcgccacctggcgacccttcccctccagtcacctggaatctccctggggtgccctccccaggcagcaatgccaggatgcctgtgtcca

SEQ ID NO: 8320 - DNA, 75 bp, Homo sapiens
ccgaggccccctcttcgcctcctccaggtcccatctgatgccgaggctgaaggagtctcgctcccacgagtccct

SEQ ID NO: 8321 - DNA, 90 bp, Homo sapiens
agtctgcgccccttaagagcaaaatgatttatgccagctccaaggacgccatcaagaagaagctgacagtctcatctttggactcatcac

SEQ ID NO: 8322 - DNA, 100 bp, Homo sapiens
gcggcttgtggggccgaggacagacacgtttattcttcagtccaaggaagcaattcacagtcagctgttagagaagcagaaaatagcagaagaaaaaatt

SEQ ID NO: 8323 - DNA, 98 bp, Homo sapiens
aaaaacactatctcttctatgacggagaatccgtttcaggaaagttcttctcaccactaaatccaatacgagttcatattgatattggagctgatggc

SEQ ID NO: 8324 - DNA, 82 bp, Homo sapiens
gctgttgcagcacttgttccccaaacaagtgctcctacattctggtgtacttctctgaagtaagatgatttgtcaaaaattc

SEQ ID NO: 8325 - DNA, 100 bp, Homo sapiens
tactttatagtcctgattcaagtgttggcggatggaagggaggagactcctgaccctcagaatgattcatgatgttgctatcaaaagttgagaaattgtc

SEQ ID NO: 8326 - DNA, 74 bp, Homo sapiens
gacccaggccatcctcaccaagctcaagtgtgccgcagcgctgataaagcagtttgtgtccgacgtggcctggg

SEQ ID NO: 8327 - DNA, 100 bp, Homo sapiens
gctctcggtgaagctcctgcggctgctgcagtgctacccgcctccaggccccgagtccccgtacacgcactggaagcagacggtgttctacatggaggac

SEQ ID NO: 8328 - DNA, 100 bp, Homo sapiens
gcgcgcaggacagcgccttcctcaacgacgcggacatggtcatgagctttgtgaacctgggaaagcgttataatgttgcagatgtgtctgctgccatatg

SEQ ID NO: 8329 - DNA, 75 bp, Homo sapiens
cgagaatggcttgtgaaatcatgcctctgcaaagttcacttcttcaactgagatggacatgatataatctccatt

SEQ ID NO: 8330 - DNA, 100 bp, Homo sapiens
ccaaagcctgaacaggcagggccagacccagccagccagctctgtgtcagggtcggggggtgcagaaagtcaggacagaatgagggatagctcggccccc

SEQ ID NO: 8331 - DNA, 75 bp, Homo sapiens
acttttgtggtagaccgtctaagagaagcgtcacactgctcagctccgcgaagagttgctgaaacttccctgccc

SEQ ID NO: 8332 - DNA, 90 bp, Homo sapiens
ggagcagatattccacctgcagatgaaacttattgaacaggatctgtgtcgaggcaacttcgggctcgctggagaacaactaaggggcac

SEQ ID NO: 8333 - DNA, 98 bp, Homo sapiens
gatgaaccaagcactccttaccatagattgaaactgcttctgccttggctagaggccagaattcatgagggctgtgaggagcctgctactcacaatgc

SEQ ID NO: 8334 - DNA, 82 bp, Homo sapiens
cttcaccgccgacttcaagaaggagcaggacatcgagactttacatggctctgttcacgtcacgctgtgtgggactcccaag

SEQ ID NO: 8335 - DNA, 100 bp, Homo sapiens
ctccatttcgaattctgcttcaagttcccggctcccaggtttattctcccatagcatgtggtcacagaacagaaagtgctggtggacatctcttcttgcc

SEQ ID NO: 8336 - DNA, 51 bp, Homo sapiens
caccaagtcacatgacaagcaggatttccacaagatcaaattcgattgtgg

SEQ ID NO: 8337 - DNA, 97 bp, Homo sapiens
tcattggtcgcttccggtgcaatgggtttgaggactgtcccgatggcagcgatgaagagaactgcattcacacaaaagatgttggacaatttctaca

SEQ ID NO: 8338 - DNA, 83 bp, Homo sapiens
ccatggctctctgcaaccagttctctgcatcacttatctccagaagaagaagagaaaaggagaatccgaagggaaaggaataa

SEQ ID NO: 8339 - DNA, 100 bp, Homo sapiens
ttcagatcttcatgtgtctcttctaagctgaataaagctgttttggaactgtcaggtacctcaaagcattttccagcaaataacattgtgaagttcctgg

SEQ ID NO: 8340 - DNA, 90 bp, Homo sapiens
atgggaacaggccagcaaaacactcagctgcaagtccaaagccacaaggagtatgtctacgaagatgtcgatgggcagacagaagtcatg

SEQ ID NO: 8341 - DNA, 51 bp, Homo sapiens
tgaaaatcaaagctgatattatatatccagcctccgctgctgatacccagg

SEQ ID NO: 8342 - DNA, 100 bp, Homo sapiens
gtcttgtcacctttcaacttcgaggactggaattccgagggctgctgataagctcaggctgtgccttataccctttaggatggaatagcccggagataat

SEQ ID NO: 8343 - DNA, 75 bp, Homo sapiens
gattgaccccaaagttgcatttcctcgtcgagcgcaacccaagtggccaacagtgttgcaaacaggaacccgagg

SEQ ID NO: 8344 - DNA, 100 bp, Homo sapiens
tgcgacgttcacagaggaacactgccggggcccaaccacaagacgactcaataggaggaaggctccgagctctgtccagtggtgggagtattacatcccc

SEQ ID NO: 8345 - DNA, 80 bp, Homo sapiens
gtggccacctctgcagtgtcttccacaacctggaatagcctaacatggcagaccagagacagcgctcactgtctacctct

SEQ ID NO: 8346 - DNA, 50 bp, Homo sapiens
ggaaaaccccgaaaacgcaagaagcgtgagtctggtgagggcggccggcc

SEQ ID NO: 8347 - DNA, 82 bp, Homo sapiens
gcgccgctgcccatggagggagtggacatcagccccaaacaggacgaaggcgtgctgaagggcgaccattgacgaggtggag

SEQ ID NO: 8348 - DNA, 100 bp, Homo sapiens
gtttccgttgtcggcctcccactgcagtgaacagcagagctgaaatggaaattggcaggtaccactggatgtacccaggctcaaagaaccaccagtacca

SEQ ID NO: 8349 - DNA, 76 bp, Homo sapiens
gccgaggccgcctccgagcgccaggcatcagtgtcattcaaggacgtgactatagaattcacccaggaggagtggc

SEQ ID NO: 8350 - DNA, 50 bp, Homo sapiens
cacaggctgagctccctgaaccagatctttgtagaatttgatggctgtaa

SEQ ID NO: 8351 - DNA, 82 bp, Homo sapiens
gcagttcccggacatgatcctctccgcctctcgaggtacggactaagacctgcctagagctggaacgttacctccagagcga

SEQ ID NO: 8352 - DNA, 80 bp, Homo sapiens
gggcgcatccctgccccggcgccgtccgtgcccgcgggacctgacagccgggtcagagggaaattcaactactgaggagg

SEQ ID NO: 8353 - DNA, 100 bp, Homo sapiens
ggtgcaggaattcacacagaaaagtggaggccaaggcgtgagaattcctcaatgactgccctctaaaggaagagataattttgctcatcgagctgaagtt

SEQ ID NO: 8354 - DNA, 82 bp, Homo sapiens
gtgggggaccggctgttggcgggcaccgtctgcgtcctgctgtccttccccttcatcttcagcccctgcctgggctgtgggg

SEQ ID NO: 8355 - DNA, 73 bp, Homo sapiens
gcagtccctcgtccagccacccccaggatttggacgtggcagagggagaggggcaggaaggttctcaacccaa

SEQ ID NO: 8356 - DNA, 100 bp, Homo sapiens
cgggcaccgaggaccagctcaatgacagaaagaagagattttatcgacatcgaaagtaaatttgccctaaggacccctgaagacacagctgaggacactt

SEQ ID NO: 8357 - DNA, 51 bp, Homo sapiens
cccagagggttctattgcccacacaaaaaggatgaattgtaaaagcaacat

SEQ ID NO: 8358 - DNA, 101 bp, Homo sapiens
ctcagttggaagcagccgatccagcctgcggagcctgtggggcaggactgaaaactggatatttggtccccatggactttctggtcaccctgtgaagtgga

SEQ ID NO: 8359 - DNA, 98 bp, Homo sapiens
gacagctccctgaccctccgcgagttctacatggccttccatcccccaattattgaaggaaatatggaggcagcaagagcagtggacttaatcccatg

SEQ ID NO: 8360 - DNA, 75 bp, Homo sapiens
ggtacctctccttttccctctccctttccctaagaaaatgatgcatcctgttgccagcagtaatccagctttctg

SEQ ID NO: 8361 - DNA, 100 bp, Homo sapiens
gccaagagggatccttcacccgtgtctggccaagtcctgtatctgccatgtctgtggcgtccacctcaacaggctgcattcctgcctctactgtgtcttc

SEQ ID NO: 8362 - DNA, 90 bp, Homo sapiens
gtcttcagcgcattgctacctaccggctagccggtggagctcacgtttattcaacaatgtccaacatcacagtcacatacagagatggcc

SEQ ID NO: 8363 - DNA, 75 bp, Homo sapiens
tatgctgccgcctatgggcacaggcagtgtctggaattggatttacttaaatccattgtttcaagaatgaaaaag

SEQ ID NO: 8364 - DNA, 75 bp, Homo sapiens
gaaggaggatgccctggagacacacaggcagacccatactggtctacagtgaatatagagccagtcttgcttttg

SEQ ID NO: 8365 - DNA, 100 bp, Homo sapiens
ctgccagagccaaggccaagctctccaagttcagcatccccaagcagggggagtctgcgggccaggcatcgacatccgcaacgactatcagcagctgaag

SEQ ID NO: 8366 - DNA, 50 bp, Homo sapiens
acagagatcatcctcttcagaaacaacaggatcttcctgtgtcacccagg

SEQ ID NO: 8367 - DNA, 75 bp, Homo sapiens
ggagctacagtggacaggcatttgtgacagcatgttggcagataaattgaacatgactccagaagaagctgaaag

SEQ ID NO: 8368 - DNA, 82 bp, Homo sapiens
ctcccttcgccttcgccctttccacctcgcggcagttcggtactccaaagattcaggtttactcacgtcatccagcagagaa

SEQ ID NO: 8369 - DNA, 100 bp, Homo sapiens
acgaatttaggagacataagaccgttggttctgacgaggcacagcgtttcttgcaagaatgggaggtgtgctgggcatcaaggtgaagatcatgctgccc

SEQ ID NO: 8370 - DNA, 113 bp, Homo sapiens
tcatcacttagagcaactcaaccaagtgaaaatgataaacttcagaaagaactcaatgtacttaaatcagaacaggacttgattagagaccaaggatttcgtggtgatggagg

SEQ ID NO: 8371 - DNA, 100 bp, Homo sapiens
ttgtagcagacactgcaaatgaagctctcgaggctgctaagagactaaggccgttgctccagggagaactgcaaatatcttcatccacccccacatttaa

SEQ ID NO: 8372 - DNA, 74 bp, Homo sapiens
aggaaagcaaaggagtcagggatggctcttcctcagggcctcctcccaaggagaacatgagaccacttcatatc

SEQ ID NO: 8373 - DNA, 100 bp, Homo sapiens
tgtggatttaccttatcccctcaacaacttttcagtggcaatgatggaatggggagaagatattaaagcagtttcaaaagatgaagcagtgatgttggtg

SEQ ID NO: 8374 - DNA, 51 bp, Homo sapiens
ccccaggaagctgtttatggccaaaatgctcatccaaaatacttgagttgt

SEQ ID NO: 8375 - DNA, 74 bp, Homo sapiens
ggagagtggcaagttgttctccgtaaccagaaacaggttcattcattgtttggtgaggattcatcaacctccag

SEQ ID NO: 8376 - DNA, 82 bp, Homo sapiens
atttgctcttacgtatttgtgtgacttgactcttcaaacacaaaggttaattaccatgctcagcattaccatctcactccat

SEQ ID NO: 8377 - DNA, 98 bp, Homo sapiens
tcggcactggtaccctttacatcgctgagagtaaaaccaggggcagatgtgaggtggtgatcatggaagacgcccctgactattatgcagtggaagac

SEQ ID NO: 8378 - DNA, 74 bp, Homo sapiens
caagccgactgatgactggagaggatggctactatttcaccaatctgctttttggagaccacggcatatttctt

SEQ ID NO: 8379 - DNA, 84 bp, Homo sapiens
cgcagctgcgatggccgtggccgtggggagaccgtctgaaaatgtttataggaggccttagctgggacactacaaagaaagatc

SEQ ID NO: 8380 - DNA, 51 bp, Homo sapiens
tcgcagtggtcgcttcttctccttgcctgtggtcagctgttagatgaggca

SEQ ID NO: 8381 - DNA, 100 bp, Homo sapiens
cgggccccgcgctccgccccggcctagggccttgccccgggagcccgcgagggagagatggagccatctcagtgtgtggaggagctggaggatgatgtgt

SEQ ID NO: 8382 - DNA, 98 bp, Homo sapiens
caacaccgagctgcccttcttcaccctgggacacaatgtaggaagtcttttccacatggcagatgatttgggcagagcgatggagtccttagtatcag

SEQ ID NO: 8383 - DNA, 100 bp, Homo sapiens
atttacgttttggaacctcgtctttttattgacggtgtcttgtgtgaaaggtgaaaggtgtagcagtcactcggcctacacccacagcatcgaccttgtg

SEQ ID NO: 8384 - DNA, 75 bp, Homo sapiens
gacccgaagttgcggattgcagccgagaacgagctcaaccaggtgggtgcgggaatttctgaatgatgaaaacaa

SEQ ID NO: 8385 - DNA, 100 bp, Homo sapiens
caacatctacaagacagtgtggtggtatccaccttcccacccaccctcccacacctccctggtatccacaagtgaaaatccacaactctgaagagaaact

SEQ ID NO: 8386 - DNA, 74 bp, Homo sapiens
atcaactaccttttgtaggatttacatattatagcaatcgtaggttatttgttatcaaagcgtgaaggccaagc

SEQ ID NO: 8387 - DNA, 100 bp, Homo sapiens
agcctcctggaccgtccaagaaggagctcactcagtgggtttgatgtggtggatgctggctcgggaagttctgcgcatgcgtggcaccatttcccgtgaa

SEQ ID NO: 8388 - DNA, 95 bp, Homo sapiens
ggacgttggaggaaagaaggaatatctcattgcaggagcaagagcagctctacctgaggtcaggtgtggtgtcctctgccaccttcgagcagccg

SEQ ID NO: 8389 - DNA, 100 bp, Homo sapiens
atcaaccctctgctgttcagctacgtggaggagctggtggagattcgcgttggtgaactcttgaaagattggcgacgtcttaatgttgctataaccagag

SEQ ID NO: 8390 - DNA, 50 bp, Homo sapiens
tactcagtctctaaaaagctaagaaatggctgcaagcaactgacctcact

SEQ ID NO: 8391 - DNA, 132 bp, Homo sapiens
gaagatttagtggaaaagctgagaaagtttcgttttcgcaaagaaacgaacaacgctgctattataagtatatgagtagaccagtgatgagtggcccaggactctatgaccctacaaccatcatgaatgcag

SEQ ID NO: 8392 - DNA, 88 bp, Homo sapiens
tagatcttgccctgagcacccttcagattaagcgtcagcttcctgttttatagtgtatgctgatggtagcatatgtttagatatcctt

SEQ ID NO: 8393 - DNA, 98 bp, Homo sapiens
tgtggtgggtccctcagcccttctgagctctgtgctgaacaaggctcttgatggaaatgtgtatgatcatctcaaggattatttaatagccttcagcc

SEQ ID NO: 8394 - DNA, 99 bp, Homo sapiens
atttgatgatgataatgtaatggctttatacaagaagattatgctgtcggaaaaggtaacagaagatggaactcgaaatcccaatgaaaaacctaccca

SEQ ID NO: 8395 - DNA, 98 bp, Homo sapiens
ccgcactgtcgctgcccgcctgccctgaggagtccccgctgcttggtggagccccctgagctgcccgctgatctgcagcactggatctcctacaacga

SEQ ID NO: 8396 - DNA, 98 bp, Homo sapiens
cccttgcgctaaaggctggattgactgggcagcttccaaagaattgaatgatctggcacgggaccctccagcacagtgttcagcaggtcctgttggag

SEQ ID NO: 8397 - DNA, 100 bp, Homo sapiens
tccacaaatgcagaagtaagaggatttatagatcagaatctcagtccaacaaaaggtgaccattgtgaggtagatattttgttctaattttccagatgag

SEQ ID NO: 8398 - DNA, 80 bp, Homo sapiens
gagcgtcatgaacccgagctatagagaaaggagatgaggttcccagaccagaggactgttgttaggtgattggctgtgaa

SEQ ID NO: 8399 - DNA, 82 bp, Homo sapiens
tgatgcttctcaagccctaaaaacaaaccctgaaaaaacagaagacgctctgcaaaagaggtgcctgatgctgttaattcct

SEQ ID NO: 8400 - DNA, 82 bp, Homo sapiens
cttgatgaccccaaccagcgtttttgagaaggcaacagctgaacagatgcgtctcgctcaagtgatctttgataagaatgat

SEQ ID NO: 8401 - DNA, 75 bp, Homo sapiens
ttggaaggaacagtacagagttgtacaggaggaaaaccagatttatcagcaagactgttgaacgcataactgccc

SEQ ID NO: 8402 - DNA, 87 bp, Homo sapiens
tttcaaaaacacaggaagcaaaattgaagaggattttccacacatcagatcaaatgtgtgttctgcgaatgactcgagctagacgtt

SEQ ID NO: 8403 - DNA, 90 bp, Homo sapiens
ctaaactagcagtttagggtgtcagtgattcgcctttgccagtctcatctcgtgtctgctttgttaagttccatgatccagactcagcag

SEQ ID NO: 8404 - DNA, 98 bp, Homo sapiens
cgtggacaaagctgttgtctcagggagcacagaaagctaaagttgcagacaagatccagctcatcaataatatgctggacaaagtcaatgagatgatt

SEQ ID NO: 8405 - DNA, 88 bp, Homo sapiens
agagggcctgagggccctgcagaaggatctcagcctctctgctctggatggacaaggaaaaagaggaaagcatgaaagaaaccctgcg

SEQ ID NO: 8406 - DNA, 51 bp, Homo sapiens
gacccagagaagtgggagatcaaacagaatgagtccctggaacgccagatg

SEQ ID NO: 8407 - DNA, 75 bp, Homo sapiens
tgttaactacaacagaccatctggggatggtgactttcgaggacacggctgtgtctctaacctgggaggagtggg

SEQ ID NO: 8408 - DNA, 101 bp, Homo sapiens
aatagggatattgtagaaactgtctttaacctggttcgagaacttgtcttggacaattgcaaatcaaatgatggaaaaattgagggcttaacagctgaatt

SEQ ID NO: 8409 - DNA, 125 bp, Homo sapiens
ggctttagtggcagcatgaagcgcaccccgactgccgaggaacgagagcgcgaagctaagtgatgatgacagcctcttcatctatgactgcagtgctgcagaaaagaagtcacaagaaaataaag

SEQ ID NO: 8410 - DNA, 100 bp, Homo sapiens
ctcctgtgaaggccatatttgataaacaggaacttgagtccctggtacgtgagcccctttcccggcgccggcagctgctccgggagaactttgtggagac

SEQ ID NO: 8411 - DNA, 90 bp, Homo sapiens
cctactctgtggatgagcgcgtggactccgacagcaagaagtcatcaatgggcagcatgttccggcaacagtccatcgaggacaaggagg

SEQ ID NO: 8412 - DNA, 51 bp, Homo sapiens
ctatgctgctgtaacacagtttgagtttgttgacatcggaatagtaacaag

SEQ ID NO: 8413 - DNA, 75 bp, Homo sapiens
agtcatcagatccaccatctgcttcaacggggcgagaggtcaatgatcttaaaagaaaatctccttcagatcttt

SEQ ID NO: 8414 - DNA, 82 bp, Homo sapiens
attcatttagagctgcggaacaggacgccctctgataaaaatggctacaaacttcctagcacatgagaagatctggttcgac

SEQ ID NO: 8415 - DNA, 100 bp, Homo sapiens
gtttgacgacactgatggtttgctctaagcgaaagacatgaggcctcagcctgaaatgaggttgttttgaggtcatctgatttctgactagaaggtgagc

SEQ ID NO: 8416 - DNA, 90 bp, Homo sapiens
ccgccgccgggctcggggcctccgcagcgacaacatggaggccgtgaagaccttcaatagcgaggtgaactactgagttcttcattatgt

SEQ ID NO: 8417 - DNA, 90 bp, Homo sapiens
ttcgtgtccggtggttgctgttgcttggcctggtgggcccagtcctcggtgcggcgcggccagtgtcgacttcttccactacaaaatctc

SEQ ID NO: 8418 - DNA, 85 bp, Homo sapiens
caaatacctgccagggcacaagttgcccccaaatgtggtgaaaacaggagtcataatgaacataattggagtcttctgtgtgttt

SEQ ID NO: 8419 - DNA, 83 bp, Homo sapiens
atgaggccagtgagtgatcaagtgtcaactgtcccggcccccaactttgccatgcctgtcacggtgcccgtgtccaatcagag

SEQ ID NO: 8420 - DNA, 100 bp, Homo sapiens
tcgctggcaaaggaggaaaaaccaaattcaccatagagaatgtgacacggacaaggatagttttggctgatgtcacaacctccaagagggaaaacatttc

SEQ ID NO: 8421 - DNA, 90 bp, Homo sapiens
gaacgcgctgcacctctacctgtggctctttctgctgggcctgcccttcaccctctacatggatggttcctacctggctgagttcctgct

SEQ ID NO: 8422 - DNA, 100 bp, Homo sapiens
aaataagtaaagaagagagtaaaattcttaaaaaggctcagaaagatggatttttgcatgagacgcttctggacaggtattgttgcagcatctggcagtg

SEQ ID NO: 8423 - DNA, 75 bp, Homo sapiens
tgtctttaatgaaaagggatggaactacattcttgagacctgcctagagctggaacgttacctccagagcgagcc

SEQ ID NO: 8424 - DNA, 75 bp, Homo sapiens
agaaggactgggggcatctgaagcagtggccgacatcaagttttcctctgcagccacgctccagaacagcatcag

SEQ ID NO: 8425 - DNA, 50 bp, Homo sapiens
cggcctgcagagcgctgccatcatgagggagttgaccacatttggccatt

SEQ ID NO: 8426 - DNA, 75 bp, Homo sapiens
ctggcatctgccggctgctccgcaccccggggtcccaggaagggcggcccaggtgaccaaaagccagccccactg

SEQ ID NO: 8427 - DNA, 100 bp, Homo sapiens
atgaaatcccggaggcccaagagctctcttcctcccgtgctaggaactgagaacctgtgaccgcatcaagcagtcagcagctggcaccaagcgtcgggtg

SEQ ID NO: 8428 - DNA, 75 bp, Homo sapiens
tttcactgcctgagctgaagggctgcctgggtgttagcaaagaagggagtgcatccgccccaacccttttccccc

SEQ ID NO: 8429 - DNA, 100 bp, Homo sapiens
cgaagagcggcctcctgaaggaggggaagggacgtgggggcggccacggcagagcaacttatgactctcatctctgctgcacgagaatatgagatagagt

SEQ ID NO: 8430 - DNA, 90 bp, Homo sapiens
ccagcagatggcggatgccctgcagtacctgcagaaggtctctggagacatcttcagcagccagagcagctgagttccagataaaaactg

SEQ ID NO: 8431 - DNA, 75 bp, Homo sapiens
ccaagttgtcgacgaccgacagggtggtgaaagggccgcgatgggcctcttggaacattggtgtgttcatctgca

SEQ ID NO: 8432 - DNA, 87 bp, Homo sapiens
gaaacaccatggctgcggcggcccagctctctctgacacaggctgacttcaaaatttctgaggagtgcatcgcacagtggaagcaaa

SEQ ID NO: 8433 - DNA, 100 bp, Homo sapiens
gggagcgcgaacgagcgacggcggaacccgtgggcctgtggactgcagcctcggcggtcagcagatacgtaggtaacctttccagagatgtgacagaagt

SEQ ID NO: 8434 - DNA, 83 bp, Homo sapiens
ctctttctggcctggaggctatccagctaatagttatgcacgagtgcgagctgtggtgatgacccgagatgactcaagtggtg

SEQ ID NO: 8435 - DNA, 74 bp, Homo sapiens
cgcacttcgtcatgttcttcgcgccctggttgtggcagcactgcctgaaggtatgagaccagattctaatcttt

SEQ ID NO: 8436 - DNA, 99 bp, Homo sapiens
agaaaagcgaaggattgtggtcccgcctcacctggggtatggagaggaaggaagaggagcaactttcagccagaggcatggatgcttctctgtctcatc

SEQ ID NO: 8437 - DNA, 82 bp, Homo sapiens
cggtaaccgggacccggtgtctgctcctgtcgccttcgcctcctaatccctagccactatgactgattcttgctattccaaa

SEQ ID NO: 8438 - DNA, 50 bp, Homo sapiens
acagacaagacacttttcagaaagacaggagaatcttatttatactgctg

SEQ ID NO: 8439 - DNA, 83 bp, Homo sapiens
ctcaaactggattgcctcttctttcaagccctacagccgctcaggaagcaatcttgcatgcgtctggaaatggcacaaccaag

SEQ ID NO: 8440 - DNA, 98 bp, Homo sapiens
agcagtggccctgaagaagaaaaccaagaattatctcttcaggaaggcacttcagaatccagaggtggtggcccttcgaggtggactaaacaccatct

SEQ ID NO: 8441 - DNA, 134 bp, Homo sapiens
aaccgtccggacctgtgatcgcttctggcagaccgaaccggcgctcctgcccccggggtgacgcgcagctcccagccggcgtggtgaccaagatgaagatgcagaggaccattgtcatccgccgagactatctg

SEQ ID NO: 8442 - DNA, 75 bp, Homo sapiens
tgtaactcggccctagttacctggccagggtacgcgacaattggcggaggggataaaaacattcagatggcagat

SEQ ID NO: 8443 - DNA, 106 bp, Homo sapiens
agagcagcaggcctgtagccacggctgctggagccagcccgcggagcctgagccggagcagaagcacggccgacaagaacggggccctcaagtgcaccttctcggc

SEQ ID NO: 8444 - DNA, 75 bp, Homo sapiens
tccaagaacgtgctcttcgctcacctggatgacaacgagaggagatgctgtgggccctgagggaaaggatcacag

SEQ ID NO: 8445 - DNA, 82 bp, Homo sapiens
gatgcagcaaggaaataggatttaaccgctctctgcctcccaggattggtggtgatcctcaggaaatgggggaagaggcaga

SEQ ID NO: 8446 - DNA, 100 bp, Homo sapiens
attgctatcaatgcgaatgatcctgaagcctcaaagtttcatgtgattcgcctttgccagtctcatctcgtgtctgctttgttaagttccatgatccaga

SEQ ID NO: 8447 - DNA, 83 bp, Homo sapiens
tatgagcattcaagaagaggacgttcttatgatagtagcatggagtcacggccaaagaagctaaacgactaaaagaattctta

SEQ ID NO: 8448 - DNA, 75 bp, Homo sapiens
agttttttagtgagggctggaaagccatatgatttacagactcctttctacgaaaccgttcaagttctgaccatg

SEQ ID NO: 8449 - DNA, 75 bp, Homo sapiens
gccagggtccctgaagagggaagacacgcggaaacaggtacctgcacatgttgttctttgtcagtgctgtcaagt

SEQ ID NO: 8450 - DNA, 75 bp, Homo sapiens
agaacacggccgaaggaaggatgggtccccaggatcggctgagagccctggtggtgatccccatcatcttcggga

SEQ ID NO: 8451 - DNA, 75 bp, Homo sapiens
cagcgacagtgaggaccagctgaagccgaagctggttcttgctggtgtgaaatgactgagtacaaactggtggtg

SEQ ID NO: 8452 - DNA, 119 bp, Homo sapiens
tctgcggctctccgccgtccccagccctgcctctccctgggctctggatttctctctgatcaaacggacagttcaggactcagaatctaaggatgaatgttcaccgtggcagtgacagt

SEQ ID NO: 8453 - DNA, 112 bp, Homo sapiens
agaccctggagcctcagttggaagcagccgatccagcctgcggagcctgtggggcaggctggctacagcaaacatcattcaagatgtccagcaaagggagcagcacagatgg

SEQ ID NO: 8454 - DNA, 105 bp, Homo sapiens
ctctagcacaattacttggactagtttatatgaaatttgtgggcctccccatggccacccatggaccagtcggcattcacttcctcccttctgcggcccataaaa

SEQ ID NO: 8455 - DNA, 100 bp, Homo sapiens
tgactggggctggataggaatgccttcgtgtttcccaagacccccgggcctgctccacaaagtttgaaggtgagaaggcaaccaaagtgcaggacatcaa

SEQ ID NO: 8456 - DNA, 98 bp, Homo sapiens
taagccgtattgcagaaaacctacccaaacagcttgctgttattaatgctgcactggctttagcagcaaaaccacagagtaaactggcccaagagaac

SEQ ID NO: 8457 - DNA, 50 bp, Homo sapiens
ttttgccctggtgggattatttaaaggaccttcctctgccaagatttgtt

SEQ ID NO: 8458 - DNA, 90 bp, Homo sapiens
cccagtactacccctcctactccggcagctcccggcggagagcggcagacggcagcctaggtgggaacatccagttgcaggaaaacaagc

SEQ ID NO: 8459 - DNA, 98 bp, Homo sapiens
ttcctgataacgaggctgtggagcagcacagcttcgagagctgtgcccaggagtgaacaaccagccctacctctgtgagagtggtcactgctgcgggg

SEQ ID NO: 8460 - DNA, 82 bp, Homo sapiens
ggagctggacggcgagcgcgagcggcgcgagaaagaggaaattatcactgtttcaggaggagagttacttcaggaaccctgc

SEQ ID NO: 8461 - DNA, 88 bp, Homo sapiens
cagcccgtggtccttctccatattcgagttttcggctttgtgagaaaccttaccatcaaacacgatggccagcaacgttaccaacaag

SEQ ID NO: 8462 - DNA, 98 bp, Homo sapiens
atgaactgaaacggattgccagagaattggcagaaggtgtctggaaatgaagtatggaaatgaaatcatgaataaagacccagttttcagaatctctc

SEQ ID NO: 8463 - DNA, 89 bp, Homo sapiens
gaccgggagctggacctccggggtatctgctgtgcgtttcagtcaacaatacagcttgtgttcgacaatattccttgatgacagcacag

SEQ ID NO: 8464 - DNA, 96 bp, Homo sapiens
tcgtatccagttcaaatattctggtcctgaagatgatgctgctatcagcctggtatctagagatcaggttctggacaatgctgcagttcaattctg

SEQ ID NO: 8465 - DNA, 80 bp, Homo sapiens
gactttttcattggcaagccaactctgagagagtgagaaggcaaccaaagtgcaggacatcaaaaacaacctgaaagagg

SEQ ID NO: 8466 - DNA, 100 bp, Homo sapiens
gccctgcgcgcgcctgctggagcaagcgctggagctgctgcccggggagaagagcgggcactgtgtcttgtggacgtgaagaaagtgaaacagtccctgg

SEQ ID NO: 8467 - DNA, 88 bp, Homo sapiens
ctcctccccagggcccagtgcggactcgcctccgtgaagaaaaagcggatggtggttcctgctgccctcaaggtcgtgcgtctgaagc

SEQ ID NO: 8468 - DNA, 83 bp, Homo sapiens
cttgaaaagactgggcttgtccttgctggtgcatgcgtcgtcggcctctgggcagcaggcatattctcaagatgcctacctga

SEQ ID NO: 8469 - DNA, 82 bp, Homo sapiens
aggaaacaagatggtccttaaaaccgaagaggaggacggttgagactgagctaaagttaatctgttgtgacattctggatgt

SEQ ID NO: 8470 - DNA, 100 bp, Homo sapiens
ttcttgggacaaacttcatttggagtggaggcagcacagacagtgaggacgaagaagaggaggacgaggaggaggaggaagacgaggagggcattggctg

SEQ ID NO: 8471 - DNA, 51 bp, Homo sapiens
aaagagtaaagttgtgctcaacggtgctagaagcccatggattgaaaccag

SEQ ID NO: 8472 - DNA, 90 bp, Homo sapiens
tctcatttctccagatgccaacattgacctcacaaccgagcaaattgaagagacgttaaaatacttccgatagtgacaacctctggtggg

SEQ ID NO: 8473 - DNA, 89 bp, Homo sapiens
cagagactgctgagcccgtccgtccgccgccaccacccactccggacacagcaaaatgatgcttcaacacccaggccaggtctctgcct

SEQ ID NO: 8474 - DNA, 100 bp, Homo sapiens
cccactggaatttccaggaagagacgctgaaggccaaaatgagtccctggaacgccagatgcgtgaaatggaagagaactttgccgttgaagctgctaac

SEQ ID NO: 8475 - DNA, 100 bp, Homo sapiens
ggacttggggaaacatcagcatatgcatgaccgagatgacctctatgctgagcagatcctacaagcaatggggaagtcctatcatccaggctgtttccga

SEQ ID NO: 8476 - DNA, 100 bp, Homo sapiens
cttttatacactcttagtgctgtccagaaagggactaaggctcctcaggctgcaggaaagattcacacagattttgaaaagggattcattatggctgaag

SEQ ID NO: 8477 - DNA, 100 bp, Homo sapiens
ctcaaccatgaccaagtgcagaagcccacaccagttatcctattgaaagaggggactgatagctcccaaggcatcccccagcttgtgagtaacatcagtg

SEQ ID NO: 8478 - DNA, 82 bp, Homo sapiens
tctggagcctgggcatcaccatgttgctgatgattcctctgatcatgtcagtactttatgtctgggcccagctgaacagaga

SEQ ID NO: 8479 - DNA, 101 bp, Homo sapiens
ctgtggtttgtcagctgggccgagggcaccagcacacgtctcatcagtggccacaggagcaagatgagtgatgtagaagctggtggtgccaccgtcttccc

SEQ ID NO: 8480 - DNA, 100 bp, Homo sapiens
ctggtgcagctcctggtgcgtggcccagcctcagattacagaatgtctgaaggggacagtgtgggagaatccgtccatgggaaaccttcggtggtgtaca

SEQ ID NO: 8481 - DNA, 74 bp, Homo sapiens
ccctcagtatcggggagtaagagcagcggagtttaagagagctgtgaaagtagcaacaggacaagaactctcaa

SEQ ID NO: 8482 - DNA, 96 bp, Homo sapiens
catcttcagcaaaagcctctcattcgtagccccccccagctggaaaatggtctgctctgcgaatcggctggctacagcaaacatcattcaagatgt

SEQ ID NO: 8483 - DNA, 90 bp, Homo sapiens
ggagccatagtacctacagcagcactccaggttttacagacatttcaccagaggaattgaggcttgaataccataacttcttaaccagca

SEQ ID NO: 8484 - DNA, 101 bp, Homo sapiens
ggaaatatcaagaacatgaagatgttcctatttgtattcattgcagagagaagtggagatcctgatgtttctcagtgccattgtgatgatgaagaaccgca

SEQ ID NO: 8485 - DNA, 50 bp, Homo sapiens
aaaatcaccagttactttaatgaatgagatcgtggggctcaccagcgtcc

SEQ ID NO: 8486 - DNA, 50 bp, Homo sapiens
ttcaagaacaaaggccgcgacttggaggatggcacatttcctagaggcag

SEQ ID NO: 8487 - DNA, 100 bp, Homo sapiens
gatgaagaaatctgccaggagggtgcctcccgccagtatctgatgaaggtaagagttctggacatggcaagacatgtgccactctatcgggcactgctgg

SEQ ID NO: 8488 - DNA, 88 bp, Homo sapiens
cgcaggccgagaatcacctcaatggcaagaattcctctttgactctgactggagaggtgctggagaatctggtaaaagcaccattgtg

SEQ ID NO: 8489 - DNA, 100 bp, Homo sapiens
acaaatgtcagcaccaacaagttaatgagagtgaacctgtgtacctggaagtcttcagtgaatcaggaaacccaggcccaacggcaggtggatgcaagaa

SEQ ID NO: 8490 - DNA, 96 bp, Homo sapiens
tcgctgccatggatgccaccaagctgaaaccagcctggacaccaagtctgtgtcagaaggccacctcaagaggaacatcgtggtgaagaccgtgga

SEQ ID NO: 8491 - DNA, 100 bp, Homo sapiens
acgtgttggacacgctgactttgtaggctccgccaagaggcgccgcaggaggttcttccaggggacccagccccctaaccatgggagctcaggacactct

SEQ ID NO: 8492 - DNA, 90 bp, Homo sapiens
gaagtatgacaacagcctcaagatcatcagcgatttgaaattattaatgcaatttatgaacctacggaagaagaatgtgaatggaaacca

SEQ ID NO: 8493 - DNA, 90 bp, Homo sapiens
agaagctggacttcagccgtccaagtgactgtgaagtgctgaccacactcaccccagacactggccgtatcctgtccaagctacatactg

SEQ ID NO: 8494 - DNA, 76 bp, Homo sapiens
gaggagattctggggcagtatcaacggagtctccgggctgtgattgggttattatacccctgcattgacagacatc

SEQ ID NO: 8495 - DNA, 82 bp, Homo sapiens
cagccaggaggaagccttgcgggagggtgtgaagacagagaatgaccacatcaacctgaaggtggccgggcaggacggctcc

SEQ ID NO: 8496 - DNA, 88 bp, Homo sapiens
gggttcctctgaggattggaattctagacctgttaccctccaaatcttctgtgaccaagatttgcagagacccacagactcctgtact

SEQ ID NO: 8497 - DNA, 75 bp, Homo sapiens
gagatgctgaaaatgttgcttcatatgaatgtacaggcagcatgtgactttccgggtctcctttcgactccagag

SEQ ID NO: 8498 - DNA, 75 bp, Homo sapiens
cggagatgtaccactaccagcaccaacggcaacagatgctgtgcctggagcggatcccagtgtgactgataagag

SEQ ID NO: 8499 - DNA, 49 bp, Homo sapiens
caggcgaacccgcggcgcaataacgacaagcaaagtggatcagcaaagg

SEQ ID NO: 8500 - DNA, 100 bp, Homo sapiens
taacgagctggcgaagatgggcgacccggatctcctggaagtgttggcggaggaaggaattgaaacctgacatagtaactaaatctgctcttggtgatga

SEQ ID NO: 8501 - DNA, 82 bp, Homo sapiens
gaagcttacaagcaaatggccagatgatggaccatttggattgtgcaacaaatgaagaaaaccctgtgatatctggtgaaca

SEQ ID NO: 8502 - DNA, 50 bp, Homo sapiens
ggaaggtgcgcgagctggtggacaaagcgcatgtgaaactattgaacctt

SEQ ID NO: 8503 - DNA, 100 bp, Homo sapiens
cctaaccagtcagtgtttctcttcattgacagacagcacttgcaggtcgacaaagatgctgaattagtggcccaatggaactattgtactctaagtcagg

SEQ ID NO: 8504 - DNA, 98 bp, Homo sapiens
ggagatgtggcccctggtagcggcgctgttgctgggctcggcgtgctgcgcacttttccagccattaactccaggctctcgagaatttgaagatgttg

SEQ ID NO: 8505 - DNA, 101 bp, Homo sapiens
gcgggacggctgccggcctgtgtggtggactgtggcacggggtggttctgctgggcatggacatcctgtccgccctggtgacccggctgcaggatcggttc

SEQ ID NO: 8506 - DNA, 72 bp, Homo sapiens
ggaatgtcgacgaggagctgagattttggtttcagtaacctcttcactcctgggcagctgctgaagacctgg

SEQ ID NO: 8507 - DNA, 101 bp, Homo sapiens
ttgtcgcctccgaccgggtggccgccagcaatattgtccagatgaaggacgggaaaaagaccttgatgaagttctgcagacccactcagtgtttgtaaatg

SEQ ID NO: 8508 - DNA, 75 bp, Homo sapiens
aggacttgagtaacagcaacatggttggacccaatgatctgcttttaatgaatagaatatagcagatgtgacagt

SEQ ID NO: 8509 - DNA, 100 bp, Homo sapiens
cgtgggctcagaagtgtgagctagcgggcagtgtgggtcccttcactggattttggcaaactcgtcaagggggaagacgttttcatcccgctaatcttgg

SEQ ID NO: 8510 - DNA, 100 bp, Homo sapiens
ggaagactcactagtaatatggtctgcaaacactgtgaacaccaggtgaggaattttaaattggaacaagagcaagaaaaaaacaaaatcttgtcagaag

SEQ ID NO: 8511 - DNA, 98 bp, Homo sapiens
agaagaaaagtggctgtcgtgaagacatctgcgtgtgcggggtgcgtgggtgcctggagatgaagctggaaaggttcacctggaccaccagaaaatgt

SEQ ID NO: 8512 - DNA, 76 bp, Homo sapiens
tgtaaatgtcagtggaaaggagagctaccatcactaaggagctccaaatggaccagcaggcaaagaaacatctgca

SEQ ID NO: 8513 - DNA, 100 bp, Homo sapiens
aactggtagaccagagcctacggttacttggagacacatctctcccaaaggtcctgatgaagttgtagggccagaaggaatggaaaaattttgtgaagac

SEQ ID NO: 8514 - DNA, 104 bp, Homo sapiens
agtggttgtgtggtcgcgtctcggaaaccggtagcgcttgcagcatgccttatgccagcctggaccatcttggaggcagtgtaggatcatggaagaactttgaa

SEQ ID NO: 8515 - DNA, 100 bp, Homo sapiens
atggaaccaaagcggatcagagagggctaccttgtgaagaaggaaagttcacatccttggctccttccaaaatatcaagatggcaagaactgccatttgc

SEQ ID NO: 8516 - DNA, 75 bp, Homo sapiens
acctggtgttttagaggataccttggtcccagagtcatcatgaaggatacatccagcggcggctgatcaagtcca

SEQ ID NO: 8517 - DNA, 101 bp, Homo sapiens
taacagacaagacacttttcagaaagacaggttaacattcaagatggtacatgctgaagccttttctcgtcctttgagtcggaatgaagttgttggtttaa

SEQ ID NO: 8518 - DNA, 100 bp, Homo sapiens
ggtttcagctcgctggcggaaggctacatgcggttagatgacagtgggattggtgaccaagaatatggcccaggtgaccaaagccctggacaaggccctg

SEQ ID NO: 8519 - DNA, 89 bp, Homo sapiens
ggagctaggagctggcggcgacggccacaggggcggcgacggcgcagtgcgaagcgaaacagcttattcagctgattctgaatcatctt

SEQ ID NO: 8520 - DNA, 75 bp, Homo sapiens
ccgtccgacagccaggcccgggagaactatgctaagaaggaatctgatcttaatggcgcccagatcaagcttcga

SEQ ID NO: 8521 - DNA, 100 bp, Homo sapiens
aatgaacttcacgcctcagcgtccagtctcgtttcctctcagtccatccacccttcatggggccagagccctctctccagaatctgagcagcaatgccgt

SEQ ID NO: 8522 - DNA, 97 bp, Homo sapiens
tggacttccagagccggaacgtcatccctgatatccctgaccacttcctgtgtctgtgggagcactgtgaggttcgccatcggtggtgtgaactcat

SEQ ID NO: 8523 - DNA, 97 bp, Homo sapiens
cctgggacctagctcgggaccggcctggagatggagttcgactgcgagggcctgagacggctgcttggcaagatagggatgaggaagaaatgaccaa

SEQ ID NO: 8524 - DNA, 97 bp, Homo sapiens
gtgggaggcggtcccgggatttcaggggtctaccggctctcttatggcgaatgcaacccgaagagagagtgaggttatgaacagtatcagagattgc

SEQ ID NO: 8525 - DNA, 75 bp, Homo sapiens
gtcgaaggggaaggcgcctgaagaggacgaagatattcaagagaagcttatgtggagttagttcaccatattaga

SEQ ID NO: 8526 - DNA, 75 bp, Homo sapiens
gcctggcaggggaaggatcgagagacacctatggctgccgatgaaggctcagcagagaaacaggcaggagaggcc

SEQ ID NO: 8527 - DNA, 98 bp, Homo sapiens
ccaactaccccaatgaagatgggtttagccccaacaatgatttcagatcagaaccacagctacccaagaaaacccatctccaaattgtgtatggattc

SEQ ID NO: 8528 - DNA, 100 bp, Homo sapiens
ctggagtctgcgaaggccgggacccggttccccggcccacagtgggggtgtgcaaacccgagagaactgggtcctcagaatggttggaatgaccctccag

SEQ ID NO: 8529 - DNA, 80 bp, Homo sapiens
agacatttatgaaagcccaaatcacctgtacttggtcatgcagctgagtccaatgtgctgattgctgctaacagtcaggg

SEQ ID NO: 8530 - DNA, 49 bp, Homo sapiens
ggagagtctgccggcggagaatataaggatgaccgagtgggagacagca

SEQ ID NO: 8531 - DNA, 83 bp, Homo sapiens
ctcaatcaaaccagtattcttttcacacaggtgattgaattactcagatatgaagatcatcatctaggttttgtgtaaaaggc

SEQ ID NO: 8532 - DNA, 98 bp, Homo sapiens
ttttgttgcatcgcttacaaaggatggcagtttcttctcctcggtatcagaagctctgtaagagctggactggccattatggaggaggagctgcagca

SEQ ID NO: 8533 - DNA, 74 bp, Homo sapiens
cgcgggcaggccgcccccgccgctccggacgccgttccgccacgctgccgctgatgatgaagtgcgtggaggag

SEQ ID NO: 8534 - DNA, 100 bp, Homo sapiens
ctggctgactggatccacagcagtgggggctggaaaccccgagactcttcagttgaagttcgtagtgattgggaagtgaaagaggaaatggattttcctc

SEQ ID NO: 8535 - DNA, 100 bp, Homo sapiens
atctagagtatctcctcgaggaagtacaactgtgtaatgtgtacaattctggccaacggcggaagctattgctgttcaagaccttctctcggaaagtggt

SEQ ID NO: 8536 - DNA, 75 bp, Homo sapiens
ggaggagcagttgtctgatgaagagaaggtatgctgccccacaaaaccaagcgaggccaggccgctctggaccgt

SEQ ID NO: 8537 - DNA, 73 bp, Homo sapiens
tgaagaagaagattaacctggagttaaggaacagatccccggaggagatatgtcacagatctaagcagcaggg

SEQ ID NO: 8538 - DNA, 87 bp, Homo sapiens
atggaggacgaggagagacagaagaagctggaggccggcaaagccaaggatccaaggagctggttctgctggttggaccaaacctcg

SEQ ID NO: 8539 - DNA, 75 bp, Homo sapiens
cagacagtccgggagtgcagtcatcacgtttgtggagattggaggtgaactgtcacccctacaactcagcttgca

SEQ ID NO: 8540 - DNA, 90 bp, Homo sapiens
cagcagaatttgctttgaacaccactgaccgaatttatgatgacattttctacattgaaaaccaaaaggaatatgaaaataaaaaagctg

SEQ ID NO: 8541 - DNA, 74 bp, Homo sapiens
aggattcagggaataggagctggggagcccttctgcgccacagctggtggatagcgaggtggtcatgctttctg

SEQ ID NO: 8542 - DNA, 95 bp, Homo sapiens
gagccggagccgcagaggctcccgggctggactcaggcttctcaggtactccaaagattcaggtttactcacgtcatccagcagagaatggaaag

SEQ ID NO: 8543 - DNA, 99 bp, Homo sapiens
tgcagttgagctaatggtggagccaaaatgctattgccctgtcttcatcaacatttaatcatatctcagagatgttaactgtcctttcaagattcaaga

SEQ ID NO: 8544 - DNA, 96 bp, Homo sapiens
cccgctaggatgccggtggccccagcgccctcagccgacggagttgacgatggtcgtacttctccatgttctgagaccagtttaaacaaaaacaaa

SEQ ID NO: 8545 - DNA, 83 bp, Homo sapiens
agacaccaagtgagaggccaaccaggaacgaatgcaggaatttgggaactgagctgtgcaagtgctgaagaaggagatttgtt

SEQ ID NO: 8546 - DNA, 100 bp, Homo sapiens
ttagaagccgtggctgctgggtttgaacggaatgctggagtcagtggaagacggagctggtcggcccgaagggcgtctctggccgagcctctttttgtgg

SEQ ID NO: 8547 - DNA, 98 bp, Homo sapiens
ggattatagtctctcgccacagcggcctcggcctccccttggattcagacgccgattcgcccaggaacatgttccctccaaatctggtagaagcctgc

SEQ ID NO: 8548 - DNA, 98 bp, Homo sapiens
tggcctatctgcgaagtgtgctggctgtcatcgcctttatcaccctggtcctcactctgtgacctgcctgctgcctccctcaacgaccagttgcccca

SEQ ID NO: 8549 - DNA, 100 bp, Homo sapiens
gtcggattgcccatgcacttgttgcagaaacagccaagccagaaaacattatgttgttagacaagaatattcccattccacacatcaagctgattgactt

SEQ ID NO: 8550 - DNA, 75 bp, Homo sapiens
ctggaacccgctgaaacccacagggaaatcctcattgacgattcaatttgttgaaggccaatttgtggactccta

SEQ ID NO: 8551 - DNA, 96 bp, Homo sapiens
gggctcgcggcgtctccggggaaagccgtggccccgagggcggatccgaggtgcaatggatgagcttcatagtctggatccaagaaggcaagagtt

SEQ ID NO: 8552 - DNA, 100 bp, Homo sapiens
ggagaagcacaagatcatgcacagagatgttggctgaacaggcgtcagatcgatgggtctttgaatagaactcccaccgggttctatgaccgagtgtggc

SEQ ID NO: 8553 - DNA, 100 bp, Homo sapiens
cttgggggcacggatgtccagatctacatctgcaaacaatggacggagattcttcactttacagggtctactgctgagccagtttctcagtctaccactt

SEQ ID NO: 8554 - DNA, 100 bp, Homo sapiens
agaacgagtccctcttcactttcctcggcaagaaatgtgtggtcaatgtgacggtggactacattagaccagccagcccagccacagagacagtgcctgc

SEQ ID NO: 8555 - DNA, 80 bp, Homo sapiens
ccctagactactgagggacagcgacagcatgaaggctccggtctcctactccctccctccagtactgcgagaactgtgac

SEQ ID NO: 8556 - DNA, 50 bp, Homo sapiens
cgtcgggtcagatccgacagaaggtttccaatacttatctacaggaatcg

SEQ ID NO: 8557 - DNA, 71 bp, Homo sapiens
cgtgtgggagcgggagctgcggaaagttttcggctttgtgagaaaccttaccatcaaacacgatggccagc

SEQ ID NO: 8558 - DNA, 100 bp, Homo sapiens
ggcgctgttccagccttccttcctggatgtggaagatgtgaaatttgtcatcaattatgactaccctaactcctcagaggattatattcatcgaattgga

SEQ ID NO: 8559 - DNA, 129 bp, Homo sapiens
aagaattttggctcctaaagattttgcagaacagagatgacatgccagcccagactttcatccatcagtggcctatgtacataccacgccgggtctgccttcaggctgggaagaaagaaaagatgctaa

SEQ ID NO: 8560 - DNA, 100 bp, Homo sapiens
gtcacctctcaactgtgtgccaaagtgttcagactgcatcacagtgcttccgatacaagcgacaaaaatcgagttaaaagcagattaaagaagtttatta

SEQ ID NO: 8561 - DNA, 83 bp, Homo sapiens
agataaccctcccgactaccagaagtactaccgccagatgcgcaagtgcctccggagccagcgtggtggccatagacaacaag

SEQ ID NO: 8562 - DNA, 51 bp, Homo sapiens
caaagactctgcttgcctcagcttgtaagggatggagcctatagaggtgcc

SEQ ID NO: 8563 - DNA, 75 bp, Homo sapiens
gtggagacgctccgtgcctgcgaggagtatctgcggcagcatgacaagaaggaaggggagttcaccctgcacggc

SEQ ID NO: 8564 - DNA, 87 bp, Homo sapiens
ggtggaatgggtccaggccgtggtcagccgcttcgacgagcaggttcctgatgctataaaatctcagtaccagtttccaccccctct

SEQ ID NO: 8565 - DNA, 73 bp, Homo sapiens
caatttcctggccatccaagctggccaagtcatcaaggcatgggacattggggtggctaccatgaagaaagga

SEQ ID NO: 8566 - DNA, 98 bp, Homo sapiens
caaatccaagatggcggccagcaggaggctgatgaaggttggtgttcgaggaagagacattgttgttcttggtgtggagaagaagtcagtggccaaac

SEQ ID NO: 8567 - DNA, 49 bp, Homo sapiens
tgacgccctcctcttctggctcagcagggttccaaaaggtcccaggtgt

SEQ ID NO: 8568 - DNA, 100 bp, Homo sapiens
ccagcacctttcggcttctgagacggcggcagcagcggcattcagcaaactgtgaagtcatccaaaggtggtcccggatcagcggtgagcccctatccta

SEQ ID NO: 8569 - DNA, 100 bp, Homo sapiens
tccctcaaaccttgcttctaggagataaaaaggtttatttcacagagcagtgtacattcttgtcttccaggggaacttcaacatggagttacttttgatc

SEQ ID NO: 8570 - DNA, 51 bp, Homo sapiens
tgtcgatcgaaatcgaatcttcggatactatactggcaattgctggagaag

SEQ ID NO: 8571 - DNA, 75 bp, Homo sapiens
gtggagatcaggaaactgcaaagactgggaagttcttaaaaagccaggagtaaatagtatggatgtagcagcagg

SEQ ID NO: 8572 - DNA, 100 bp, Homo sapiens
aagaccctggtgaaggaggtcgtacagaattcctagaggacctgtgcaacaacctcttgaggatcgaatcttcactcccgctgtctcagcagtctacagc

SEQ ID NO: 8573 - DNA, 83 bp, Homo sapiens
aatagatccatcccatactcaaggctacagaactgtacaactcgtgtggaagcagccatggcaatgacaggctcaacaccttg

SEQ ID NO: 8574 - DNA, 100 bp, Homo sapiens
cgccgtccacttaaaggctatgcagctatcgtggacgtcactggccctggtggggattgacagccacgggaagcacatggattaattgatgtatgttgag

SEQ ID NO: 8575 - DNA, 100 bp, Homo sapiens
ctgctgtctgcctccccggctgattggattcgttactgctttgcaacgcgcacctaactccaggtcttcaaagcttcacctttctccaaaggcagatgtg

SEQ ID NO: 8576 - DNA, 100 bp, Homo sapiens
ctttaccaacgagctgaagcagcctgcccgcccacgatggatgaagtgcgtggaggagacaggcacgttcttcgagcccacgctggcggctttgtttgtt

SEQ ID NO: 8577 - DNA, 100 bp, Homo sapiens
gctggaggagcgaggcagctgtactaggactgggaacgggaacttagtgatttggcccgtgaccctccagcacaatgttctgcaggtccagttggggatg

SEQ ID NO: 8578 - DNA, 124 bp, Homo sapiens
tgagaaccagctctcccgaagccgcgggtctccggccggcggcggcggcggcggcggcggcggcgcagttgtcgagatgtccacagaaggaggatttggtggtactagcagcagtgatgcccag

SEQ ID NO: 8579 - DNA, 100 bp, Homo sapiens
agggtgttctgcgagctcaagtggagaaaagagggacctcaatcggaacaggattcggctgatagagggcctcaccttccaggggctcaacagcttggag

SEQ ID NO: 8580 - DNA, 89 bp, Homo sapiens
ctggaagcacgcgggcaagcaggactacaaccgcgaggaggacgccgcgctcttcaagatctgacaggatggcatctgatgactttgac

SEQ ID NO: 8581 - DNA, 133 bp, Homo sapiens
ctgtgagcttggccttggagcgaggctatcacaagctgcaccagcttctaaccgagtgtgcaactgaggaacatggctcaagaaactaatcacagccaagtgcctatgctttgttccactggctgtggatttt

SEQ ID NO: 8582 - DNA, 101 bp, Homo sapiens
ggacagaattggacgaaagtttcaaggagtttgggaaaaaccgcgaagtcatggggctctgtcgggaagtgtttcctgaggttataggcgggtgtttgagg

SEQ ID NO: 8583 - DNA, 75 bp, Homo sapiens
gcacgtcatccgcttcccgctcaatggctactgccggctcaactcggtacaggtattgttgcagcatctggcagt

SEQ ID NO: 8584 - DNA, 95 bp, Homo sapiens
acagcagtaccagtcccttccccacctccacgcccctccgcagagtgaggcaggcgactaatcagattgtgatgaattgtgctgatattgatatt

SEQ ID NO: 8585 - DNA, 74 bp, Homo sapiens
agaacttgtggaactcatctatcaacagaacattctagtatgccagtagaaaaaaatatcactttagaaaggcc

SEQ ID NO: 8586 - DNA, 75 bp, Homo sapiens
ctccttcacgccacacacacgtgaccgggctggtccacaagtgggcatggaccaaagacgacgtgatcctccacg

SEQ ID NO: 8587 - DNA, 90 bp, Homo sapiens
ctgtagactggagctgtagacaggagctgttcctattcgggcatcttggctcctccttgagcaaagcagagagcagaggttcttcagtcc

SEQ ID NO: 8588 - DNA, 98 bp, Homo sapiens
ggacagctaaacaagtgtgtagccgccttggacaatacagaatgcccttcgcttgggctgccagggttccagctgagccatcttccctcctgtcacta

SEQ ID NO: 8589 - DNA, 100 bp, Homo sapiens
gagcacgctacaacaccaagtttgccctggtggcccctgtccaggctgaagaagactctggtggacaagagcaaggaccaagtgtggaaggtcttaatgt

SEQ ID NO: 8590 - DNA, 82 bp, Homo sapiens
tgatgtgtttcctctacatcttaaagagcatgtctgatggtcacggtctagatcacattctcgatccagaggaaggcgatac

SEQ ID NO: 8591 - DNA, 101 bp, Homo sapiens
cgtgccgccacccgatggaagattcgatggacatggacatgagccccctgaggccccagaactatcttttcggtctcctctgagcctccggcctccataag

SEQ ID NO: 8592 - DNA, 99 bp, Homo sapiens
aaataagctatatactttggttacctatgtacctgttaccactttcaaaaaaatgcactcggtgatggaaagagagccactattctgaagaacacttgg

SEQ ID NO: 8593 - DNA, 51 bp, Homo sapiens
ctctgcagaccccgaaaacagaaagaccacagcaagattctttcattcgtc

SEQ ID NO: 8594 - DNA, 90 bp, Homo sapiens
agtgcctggaagtttacgcctgataggagtcaaattgactttatcagctttaatcgatgggaagaacttcagtgcaggaggtcacaaggt

SEQ ID NO: 8595 - DNA, 101 bp, Homo sapiens
gtcgccgagtggggctggaaacagacccggcgcccagcggtagccctccttgcgcctccgattcccagaaaaaagcttggccagaccacaagcgggaatgc

SEQ ID NO: 8596 - DNA, 75 bp, Homo sapiens
tggctcctggctccctactcttctaaggatcgctgtcctgacagaagaggataagttctgaacgtcgaaaagaaa

SEQ ID NO: 8597 - DNA, 74 bp, Homo sapiens
gcagtgtcgacaattgcaggatgcacagattctgcctcgtcacgtgttcaatatgctaaagaagtatgtccgcg

SEQ ID NO: 8598 - DNA, 75 bp, Homo sapiens
tcttacgtctgcggaagtgcagctgcctcagttcttagcgcagatgtgaatttcttcggagtaagaaatcctcag

SEQ ID NO: 8599 - DNA, 100 bp, Homo sapiens
cccgtgggctgggattccacctgtgcccaccctggcagcatcccacctcctgagtcctctcggcacccagcaagacacgtaagcagcacagtgaggccac

SEQ ID NO: 8600 - DNA, 101 bp, Homo sapiens
aatcaagtcacctgacacatttgtgagaactatttatgcagacaagcctgtgccggaggagtcggagggccctggcagccctcccccctacaagatgatcc

SEQ ID NO: 8601 - DNA, 98 bp, Homo sapiens
aaatcaattgcaaaggtacttctttagaaaatctcatcatggaaatcacagcacctgattcccaaggcaagacagacagagtcaagcggaacatcctg

SEQ ID NO: 8602 - DNA, 100 bp, Homo sapiens
aaacttacactgctgcataatggagaacctctctacattccagtaacccaggtagagaatggagccgaatacatcttggagaccatcgactctctgcaga

SEQ ID NO: 8603 - DNA, 100 bp, Homo sapiens
ggacatcgggaactacagctgcgctgcccagggcactcagaccggctccaagaaaatacagattctgttcatcttgctctgaaattaaataattctgaac

SEQ ID NO: 8604 - DNA, 100 bp, Homo sapiens
tgacaccaagttggatgccatgctggaggagttcaagaagggctcaaagtgctgacaaataaagcttctgtgatgctctttatgaaaggaaacaaacagg

SEQ ID NO: 8605 - DNA, 100 bp, Homo sapiens
tgcagggacccggtgacagcgtgagaggttcgcagatagccggatcgagctgggagatgtgacaccacacaatattaaacagttgaaaagattgaatcag

SEQ ID NO: 8606 - DNA, 74 bp, Homo sapiens
tttattgaagctcacctttgtctaaataagctcctacccagagattctacccagtgaaactcccacagcaacgc

SEQ ID NO: 8607 - DNA, 141 bp, Homo sapiens
accttcagaaacagtgctgaagcctttaaatgcagcatctgcgatgtgaggaaaggcacctccaccagataccagatgacaattttagcatcccagaaggtgaagaagatctggcaaaagcaattcagatggcccaagaac

SEQ ID NO: 8608 - DNA, 101 bp, Homo sapiens
agatgatgatcatcttgggagtgatttgcgccatcatcctcatcatcatcataggtcatcatcagatttgaaatatttaaagtggatacaaaactatttca

SEQ ID NO: 8609 - DNA, 93 bp, Homo sapiens
gaggcgcctcgctggggcggggaccttgccttgcccgggggctgcccttgagatggagttgctgcctctttggctctgcctgggttttcactt

SEQ ID NO: 8610 - DNA, 100 bp, Homo sapiens
ggtgacggtgttttccttgtggaagtcggcagggagaagaggcgctcgaggactgtgcccaggagcagatgcggctcagagcccaggtgcgcctgcttga

SEQ ID NO: 8611 - DNA, 118 bp, Homo sapiens
aggctcgcctcgactccaaatggttgaaaacagatatacagctctagaggacaaaatcccagtccttggcacaaactcaggaaatggaagccggagtctgttttttgtggggctgcta

SEQ ID NO: 8612 - DNA, 50 bp, Homo sapiens
gtggccgaatcttccttcaggatatcaagatgatgctggagggtcttgaa

SEQ ID NO: 8613 - DNA, 74 bp, Homo sapiens
tggtacatccagtcactttgccagagcctgagagagcgatgtcctcggaacatcatttacagcgagcaatttca

SEQ ID NO: 8614 - DNA, 100 bp, Homo sapiens
gggcccgggtgtcttccggcagctcctctgaggtctcctccatcaactccgacctggagagaaagcagcagctgccaacatagatgaagtgcagaagtca

SEQ ID NO: 8615 - DNA, 74 bp, Homo sapiens
aagggtatctgatcaagccaacaacagtgacggaatgcctccatacatgtctgaaggggcgtctcgattacctg

SEQ ID NO: 8616 - DNA, 100 bp, Homo sapiens
tgaacaggctgcaggtgatgctcctccaccttacagcagcatttctgcagagagcgcagccgagtcgtccggaaatccattgcccgtgttctcacagtta

SEQ ID NO: 8617 - DNA, 98 bp, Homo sapiens
ctcatggtcctgcactccatggactaaattccacttccggctcctgcgtcgctccggaagcctgcgagttccggaagccttggtaatccagattcggc

SEQ ID NO: 8618 - DNA, 90 bp, Homo sapiens
gcagtccttttgcagattgctcagcacaggacatgataattttcatctcggattttggaggaattcacggatgataccatcggggacctt

SEQ ID NO: 8619 - DNA, 50 bp, Homo sapiens
gcggccaccaagacttcaccacagtcaatgggacagaaattgaatatgaa

SEQ ID NO: 8620 - DNA, 75 bp, Homo sapiens
gactccattgccgaggagctgaacaagaagttggccaacaaggggacagagcacaggaaagggacccccacagtc

SEQ ID NO: 8621 - DNA, 100 bp, Homo sapiens
cctgcttcctctgctcgcggttagcccgtcagtccctgctctgtgcgcgcctccatctgggccatggatggcaacaaaggagagagcgggaagctagaag

SEQ ID NO: 8622 - DNA, 75 bp, Homo sapiens
ccctgccgccgtcctcgccgcttccccggcggtagcagcctgcagccacggtttgcatcgccagcttctatatat

SEQ ID NO: 8623 - DNA, 90 bp, Homo sapiens
atccagcaaggatatggagagccatgttttcctgaaggccaagacccgggtaactgcatcctgcccagcatgacggccccctgcccgccg

SEQ ID NO: 8624 - DNA, 100 bp, Homo sapiens
aaaaaccatattttcctatctgcatgcgtttgctgagagtagtatctgttctgattaagcagttttacagtcttttgtttcctgctctacgaaacgcact

SEQ ID NO: 8625 - DNA, 100 bp, Homo sapiens
ctggatgatgagaccttggcaaagatcttcataaacaatgaatggcatgattcagtgagtggcaagaaatttcctgtctttaatcctgcaactgaggagg

SEQ ID NO: 8626 - DNA, 75 bp, Homo sapiens
tgctgtattcagctcaggaccaggcaccttctgtggaagactcaagaatgaacaatccgtcagaaaccagtaaac

SEQ ID NO: 8627 - DNA, 75 bp, Homo sapiens
tctggctcgaaaggtggagcccccctttaaacctctgttgcaggatcaggtgagctgtgtccagaaaaccaacga

SEQ ID NO: 8628 - DNA, 100 bp, Homo sapiens
ttcacctgaatgacatctacctccatcaggaccccagatgtctgacagccctgtgtgacaccaagataagtaacggctccgctgatcctctaaatagtgc

SEQ ID NO: 8629 - DNA, 75 bp, Homo sapiens
aaagtcacagatgctatagtctggtatcaaaagaagcgctcaacgaacccaccatcgattatggtttccagaggt

SEQ ID NO: 8630 - DNA, 75 bp, Homo sapiens
ttggaacaaaaaaaggagatgcctggcagccccgctctctgcacttctacctaagcactgtgccactacaatcag

SEQ ID NO: 8631 - DNA, 75 bp, Homo sapiens
agcactcgaaagggaccgaaatggagagcaaaggtatgatctcgtgaaaccttgagagaaactgaatgacgaatg

SEQ ID NO: 8632 - DNA, 100 bp, Homo sapiens
tgacttctctggggactctgaacttccctggtcgaacagttttttctaatggctattcaagatgggcttaggtcacgagcaaggatttggagccccttgt

SEQ ID NO: 8633 - DNA, 101 bp, Homo sapiens
gaggcgttgcggcgaaaggaacggctgaaggccctacgggagaaaaccgggcgcaagcaatggctgccatccggaagaaactggtgattgttggtgatgga

SEQ ID NO: 8634 - DNA, 90 bp, Homo sapiens
gcctgagaggctgctgttctaactcgctcccaggtacctgcacatgttgttctttgtcagtgctgtcaagtgtgtgccagggtgatccat

SEQ ID NO: 8635 - DNA, 78 bp, Homo sapiens
ttcacttgaaataccggatgattttggagtttcgagaggcccgtgccatgagaccgcctggggtgagcaaggcgacct

SEQ ID NO: 8636 - DNA, 90 bp, Homo sapiens
gtcccgtcggcgctggggacccgcgagcagggcgacagccagttttgtagtcaaaaagcagtcatctattcattgaattttacagcaaac

SEQ ID NO: 8637 - DNA, 100 bp, Homo sapiens
ctgcacatccccaactgtgacaagcatggcctgtacaacctcaaacaggatgaggatgggacagaagaggataacagtcgtgttgaacctgttggacatg

SEQ ID NO: 8638 - DNA, 121 bp, Homo sapiens
gcatcaatgcccagtacctggaagtcaagtgcggtgctatgatccttaagctgagaaaagcacttggttctgcttcgagatggaaggacacttataggctttttaagaagcattgatcaat

SEQ ID NO: 8639 - DNA, 50 bp, Homo sapiens
gtttctgtacatggattatctggtgttgaaaagtctcctctagagctttg

SEQ ID NO: 8640 - DNA, 75 bp, Homo sapiens
cagaatatagaatggaacccttttgatcaagatgcggtgaacatgcatcctggtggggaagaagttttaagggaa

SEQ ID NO: 8641 - DNA, 82 bp, Homo sapiens
tccagcctgcggagcctgtggggcagttgtccgaacagacagcctgaaggggcggcggggccggctaccttcaaaacccaag

SEQ ID NO: 8642 - DNA, 100 bp, Homo sapiens
ctcggaccatggagccatacagacacggcatcagcgaggagatacgcatcctctaaccttagatgaaattttggatgaaacacaacatttagatattgga

SEQ ID NO: 8643 - DNA, 82 bp, Homo sapiens
ctggacgccggaagccgggaaatgccgccgccatgtctgcgcatctgcaatggatggtcgtgcggaactgctccagtttcct

SEQ ID NO: 8644 - DNA, 76 bp, Homo sapiens
aaggaaaaaaacgaagacagtgaaaatgattggagtattaacattggaggtgcaagcgaagatgcagtgctacctt

SEQ ID NO: 8645 - DNA, 98 bp, Homo sapiens
aacaccctgatctggcatggacatctctctgcgcccttgttgccaccatctggttccctgtgtgcgcccaccgtgagaccaccatcgtgagctttggc

SEQ ID NO: 8646 - DNA, 83 bp, Homo sapiens
cctggtgcacacaccctcgtattctcctgcccttccccagatcaatgtccgagttaccaccatggatgcagagctggagtttg

SEQ ID NO: 8647 - DNA, 100 bp, Homo sapiens
ccgcggcgagcgagctcctgaggtacggcgtcgggttcaaaaggtgatgacctatcaacagccattctcaaacagaagaaccgtcccaatcggttaattg

SEQ ID NO: 8648 - DNA, 75 bp, Homo sapiens
acaagttcaagcagctgcttgccggccccaacacggaccttgaaacgcttcgttaagggactcaggcagtacggg

SEQ ID NO: 8649 - DNA, 50 bp, Homo sapiens
ccgctgcgtgggggtgaggggatcagggtgagcttgtcggccacagactg

SEQ ID NO: 8650 - DNA, 50 bp, Homo sapiens
cgcggcatgagatgaagctgtgacagttactccacaggatccgctgaaca

SEQ ID NO: 8651 - DNA, 83 bp, Homo sapiens
ggccgagttgctgttgccgggtgatagttggagcggagactgacaaccctccatatgataagggagccttcagaatcgaaatc

SEQ ID NO: 8652 - DNA, 74 bp, Homo sapiens
aaaggagaaggataaagggaaggacaaggaattacataacatcaaacgtggagagggagccggcatcagaaaac

SEQ ID NO: 8653 - DNA, 100 bp, Homo sapiens
ctcttcagcctcagcggcagtgttctgtgtgcagggttgcttttgtaatgaagaagcacttaaatactcatctactaggcaagcatggagttggcacccc

SEQ ID NO: 8654 - DNA, 82 bp, Homo sapiens
ccagggcaagccccgctccggccaacaaaaggcgtccagctcagcgcatgaaggtcgcctcagtgacccacagctcagtggt

SEQ ID NO: 8655 - DNA, 135 bp, Homo sapiens
tctacgagtggatggtgcgttgcgtgccctacttcaaggataagggcgacagcaacagctctgccggctggaagattgtcaaaagagtggggaatggtgaggaaacgccgatgattggagacaaagtttatgtcc

SEQ ID NO: 8656 - DNA, 100 bp, Homo sapiens
gtggacagaaactgaaggggtgaaagaaaacccaagggccagctctcaatgttgcaagaaaaaatagaccatttggagcgtttgctagctgagaataatg

SEQ ID NO: 8657 - DNA, 100 bp, Homo sapiens
ccaacgcaatgttcggtgcgggggacgaggacgacaccgatttcctctcgccgagcggcggtctggatactcaaaaagcttgtcattcactttggagttg

SEQ ID NO: 8658 - DNA, 95 bp, Homo sapiens
cggcgaccggggcctgggtccacgccgagggcaggacgaacttcaccagggatcgcttacacctgagacgaactacagaacagcacgtaccagag

SEQ ID NO: 8659 - DNA, 82 bp, Homo sapiens
gaagaccgcgcgcagggcctgcagcgggagctggacggcgagcgcgagcggcgcgagaaactcagctcacctatgaaccccg

SEQ ID NO: 8660 - DNA, 100 bp, Homo sapiens
caggactcattattttaacatttgggagaaacacagccagaagattgtgcttcaagaagaccatagggaagaacgcattttcatcttgctgcaaaagttg

SEQ ID NO: 8661 - DNA, 98 bp, Homo sapiens
cacgaaagcctacaaaagtgtggagaggttccttcaggaggatcagagggtgttaatgcagatagcatcaaacaagcctcagaacaactgaacagccg

SEQ ID NO: 8662 - DNA, 75 bp, Homo sapiens
gaggcttttcattatatttttaatgtgcaactagcctgtgagattcaggtctttcatggtgctgattcagacata

SEQ ID NO: 8663 - DNA, 100 bp, Homo sapiens
tccatcgtgggactcagcagccttggtgctcaggtgccagatgcaaagattcgcaggctgaggatcgagatagagaagctccagtggctgcaccagcaag

SEQ ID NO: 8664 - DNA, 89 bp, Homo sapiens
cccaggcgtgcaggttctctttgaggggatgtgtttggccaaatgggagagtggttacaacacacgagctacaaactacaatgctggag

SEQ ID NO: 8665 - DNA, 100 bp, Homo sapiens
ggatgtgtcccccctgcgccgtgtgaaccagctactccagaccaccggaggcatccaagggacattgccactgactgtccagaaggtgttggcatcccaa

SEQ ID NO: 8666 - DNA, 100 bp, Homo sapiens
cgccgcagaggaaaagcaggtgccggtgcctgtccccgggggcgccatggcgaccggagcgaacgccacgccgttgggttcgagaacttgtcttggacaa

SEQ ID NO: 8667 - DNA, 129 bp, Homo sapiens
agcccgtgcctgtcttcagatcttcacagcacagttcctgggaaggtggagccaccagcctctccctgattcaaccctatgaaaagataaaggccaggggcttgcctgataatatatcttccgtgttga

SEQ ID NO: 8668 - DNA, 83 bp, Homo sapiens
gactggagcagaaccccaggactgcgcccccgggagcgggcgcccagaggctcctgctccagcccagcccccagagagcagac

SEQ ID NO: 8669 - DNA, 96 bp, Homo sapiens
tttacctcagagaaagcaaaccaggaggaggacatccctgtgaagcttgcaagtagaagtctcaggcaacagattaaaccagcagtgactataaag

SEQ ID NO: 8670 - DNA, 75 bp, Homo sapiens
accgcctcctcctcctcagtaacgcgggtggtgatgatgtccagcaactctgtgaagcaggagaagaggagtttt

SEQ ID NO: 8671 - DNA, 100 bp, Homo sapiens
ttgagatcacggacttcaccactgcctcggaatgggaaagaatgaaactagtgatcgagaagatggcctccccaaaggacatcatgtgacagactctgag

SEQ ID NO: 8672 - DNA, 78 bp, Homo sapiens
gaacacccgactcggtgattatagattcacatccagtcctggatgagccaatagctgaagctgtctgtattatcgcag

SEQ ID NO: 8673 - DNA, 75 bp, Homo sapiens
ccgggggtggaggtggtgcctctggcagtgacgaggacgaagtgtccgagcccctgaagaagatggccgaccgga

SEQ ID NO: 8674 - DNA, 100 bp, Homo sapiens
aagcggctcaatgaccatggcaagaactggcgtcacgtttacaaggaaaccactatcagcggcctgaccccggagaccacctactccgttactgttgctg

SEQ ID NO: 8675 - DNA, 100 bp, Homo sapiens
tcaagggactgtgtccaccctcaggccgacggtcgcaaggtcctacggtcaagcatccgggagtttctatgcagcgaagccatgttccacctgggagtcc

SEQ ID NO: 8676 - DNA, 89 bp, Homo sapiens
ttatttccgaaccgtgggatttgaggagcaagctagtgcttttcaggaacaggagatgcctacatagaagagtgacagcagctagacta

SEQ ID NO: 8677 - DNA, 51 bp, Homo sapiens
gtggaggaaaacaacttcgagggcagagtgtacgtgaacggagagtgggtg

SEQ ID NO: 8678 - DNA, 96 bp, Homo sapiens
ctttcgaagacgggatactgctcagcaaggtgttgtgaatttcccatatgatgattgcatcttcagtgcccagcaacatccacctaggagtggccc

SEQ ID NO: 8679 - DNA, 75 bp, Homo sapiens
catagctcttcttgccttgccaactggaggaaagcaggaatgttcagaggcaaatgaagattctgcagaataagc

SEQ ID NO: 8680 - DNA, 107 bp, Homo sapiens
agaccctggagcctcagttggaagcagccgatccagcctgcggagcctgtggggcagctcaagaggtttggatatggaccttcttcaattcctggccttcctctttg

SEQ ID NO: 8681 - DNA, 75 bp, Homo sapiens
ggaggaggagtgcggcgcggcggccccgggaccaaggaggtctgcgaggaacagaagtgcgaggaggaggtcttc

SEQ ID NO: 8682 - DNA, 50 bp, Homo sapiens
ttatacaaagctctccaccaaaggaggataagatcaatgccctcattaaa

SEQ ID NO: 8683 - DNA, 96 bp, Homo sapiens
agagaaacccggagggcgccggggtgtgaccatgaagctcatggatgaggtcgccgggatcgtggctgcacgccactgcaagaccaacatcgtcac

SEQ ID NO: 8684 - DNA, 90 bp, Homo sapiens
tgacagagaatgggcaagacctcaggaggaccctgactcatatcaaggaccagaaaggaggaactcaacagaggcaattattatcccgac

SEQ ID NO: 8685 - DNA, 83 bp, Homo sapiens
ctcagggcggggctcctccggcccctgccccaggcccgccgacaaggagagacggtatatttgcgtgctctcgtgagaaatct

SEQ ID NO: 8686 - DNA, 100 bp, Homo sapiens
tcctcaatgtggacgccctgagctcccattaggagccgctggctgcggcagcaggggactagcgtgagaggtttggacatatttgactcttttcccccca

SEQ ID NO: 8687 - DNA, 100 bp, Homo sapiens
cggcagctgttagccgagcaatgggcctttggagtgacgctgtgggaactcatgactctgggccagactccctacgtggacattgaccccttcgagatgg

SEQ ID NO: 8688 - DNA, 75 bp, Homo sapiens
aaagagaagatgtacggcaagcagaagatctattttgcggatcagcgtgtccggagcggtgactggaaggggtac

SEQ ID NO: 8689 - DNA, 98 bp, Homo sapiens
ctggctcttgccctcatcctggttctggaatcctcagttcaaggtatggcctcacaagtcttggtctacccaccatatgtttatcaaactcagtcaag

SEQ ID NO: 8690 - DNA, 96 bp, Homo sapiens
cggcgtctggcgtccccggtgcccagcattctgcggggcaggcgaaaatgcatccgatgcagatttatggctcctgaacagttgcactgtaaaaaa

SEQ ID NO: 8691 - DNA, 99 bp, Homo sapiens
gagacggcgagggctcccggggcgcaggtactccaaagattcaggtttactcacgtcatccagcagagaatggaaagtcaaatttcctgaattgctatg

SEQ ID NO: 8692 - DNA, 90 bp, Homo sapiens
gggaaatcgtgcacatccaggctggtcagtgtggcaaccagatcggtgccaagcttccccgggcgctgcctggacaggcctgcctgcgtg

SEQ ID NO: 8693 - DNA, 104 bp, Homo sapiens
ctgcactgctgaacaggctcttcagtgcgagttcctccgagatgtggaaccctcaaaaatgcctccaccagatgacaacactgcagctgaaggaggagttgctg

SEQ ID NO: 8694 - DNA, 101 bp, Homo sapiens
cggcagaccgcccgctgtgcgtgtagaaaggggcagatcgccggcaccacgagagcccggcccgcctgtgtggacgggccaattcctgtccccccagcagc

SEQ ID NO: 8695 - DNA, 83 bp, Homo sapiens
ccgcgttcccagcccgggtccccgcgttcacagccccagcgcagtgtttgtggagaaggtgctgcagagactttttcctcctg

SEQ ID NO: 8696 - DNA, 100 bp, Homo sapiens
gcgacccccatggaaactggaatagcagagactccggaggggcgtcggaccagccggcgcaagcgggcgaaggaggcctcagcggggcaacagtcattga

SEQ ID NO: 8697 - DNA, 100 bp, Homo sapiens
caaccacatctactggacagacgtcagcctgaaggtcaatgagctgaaggagaaaggcaacaaggccctgagcgtgggtaacatcgatgatgccttacag

SEQ ID NO: 8698 - DNA, 100 bp, Homo sapiens
aaaaaagagaggatttgcttttgtaacttttgatgatcatgatacagttgataaaattgttgaaatcaatgtggactgaacataaatcacctgatggaag

SEQ ID NO: 8699 - DNA, 50 bp, Homo sapiens
caggatccggaggcgccagctcaaccgacacaactcagatgggaagttca

SEQ ID NO: 8700 - DNA, 100 bp, Homo sapiens
cccgccgggagctctgaccgaggcgcctcgctggggcggggaccttgccttgcccgggtttgaaggatgacctctaggaagaaagtgttgctgaaggtta

SEQ ID NO: 8701 - DNA, 96 bp, Homo sapiens
ggagctttgaagccaccccggtcaaaggatgctgagtccggagcgcctagccctaccggactacgagtatctggggatgaagaaccaggaggccag

SEQ ID NO: 8702 - DNA, 51 bp, Homo sapiens
ggatcgctgtcctgacagaagagagtgcacatttggccatgatcgataccc

SEQ ID NO: 8703 - DNA, 88 bp, Homo sapiens
actatgataagctgagcagagccctgcgatactattatgacaagaggcggggtttcaccatgttgcccagactggtcttgaactcctg

SEQ ID NO: 8704 - DNA, 98 bp, Homo sapiens
tttatggatgtcttcacgtggtctttaccgtttgttggagaaaaaggaggagatgttaaagtaacccatcttgcaggacgacattgaagattggtctt

SEQ ID NO: 8705 - DNA, 75 bp, Homo sapiens
ccggggccccgctgtccgccgcccgccgccgctggagctagagggggggccctcagcctcttggccttgaacggg

SEQ ID NO: 8706 - DNA, 100 bp, Homo sapiens
tagtcattatcctcatggaatcaacacagctatttaccaccctggtcacagacccgtgaccaaggtgtagactaagaagtggagtcatgcttcacacggc

SEQ ID NO: 8707 - DNA, 88 bp, Homo sapiens
tatgataccttacttaatactgatgaatgctatcaagtaagacaagtgtttgcccagaaacttcacaaaggcctttcccgtttacggc

SEQ ID NO: 8708 - DNA, 84 bp, Homo sapiens
ggacaatgaagactattactcgttgctgaacgtgcgcagggagagcgtttcccaaagtgtattctgcggaactagcacctactg

SEQ ID NO: 8709 - DNA, 75 bp, Homo sapiens
ttatatgatgccagatgaagaaactccattagcagtgcagctctgcgtacgtgtcctatgggggcctgctcatga

SEQ ID NO: 8710 - DNA, 100 bp, Homo sapiens
gcaatcccagctaaccatggagttatgggccagcaggagaaacactcatctgctcccagttttcgagaggagtctatgctatttttggattttatgacaa

SEQ ID NO: 8711 - DNA, 75 bp, Homo sapiens
aactgccggaaagtgctgcggaagaataccctctaccatctgctttggtcagggtgccgctcgaggatttaaaag

SEQ ID NO: 8712 - DNA, 95 bp, Homo sapiens
ctcggagaggcagcggagacacctccatctccatcgacaccgaggcatccatcagggaaatcaaggaggaggttcgagtgaagatcaaagacttg

SEQ ID NO: 8713 - DNA, 98 bp, Homo sapiens
ggagggagacgcgctgccgaggagaacccagcggtgtccatgaaactgggaggcgaccgtgttagctgccagttcctgacagccacctctcaccagtg

SEQ ID NO: 8714 - DNA, 98 bp, Homo sapiens
acataggccaaggagccagacttcctgtgttaactccttcctctgccactttttaccttggggacctcagcaccacaccccactctggccggagcacg

SEQ ID NO: 8715 - DNA, 75 bp, Homo sapiens
atgatcggcgtgtttggatgtactttacagattgaagataaaactttccaagtccttggtaatctttacagcgag

SEQ ID NO: 8716 - DNA, 74 bp, Homo sapiens
gggcatccagggctcgtacttctgctcgcagatgggcactctggttttttaaaaatgataaaagcaaaacttgg

SEQ ID NO: 8717 - DNA, 112 bp, Homo sapiens
aaaatggaacagatttatccggggctggtgatccgtggaatttttgtgattcacttttacagagacaatctgatgaatattcctatcctgaactagtgaaaatggtttggta

SEQ ID NO: 8718 - DNA, 75 bp, Homo sapiens
catttggggaccagagatggacggtcactcagcctatggagatgggtgttcctgataaagaagggttaccaagac

SEQ ID NO: 8719 - DNA, 50 bp, Homo sapiens
gcccgcccaactcccagcggagagcaaggatcacctgctgttaccagcta

SEQ ID NO: 8720 - DNA, 75 bp, Homo sapiens
tccgtctgcgacccgaggcctccgctgcgcgacaatgcagatcttcgtgaagactctgactggtaagaccatcac

SEQ ID NO: 8721 - DNA, 109 bp, Homo sapiens
catcaccagcaccgctgtgtcatgctgataacttgaggacaggcaggacaagacaatgcagatcttcgtgaagactctgactggtaagaccatcaccctcgaggttgag

SEQ ID NO: 8722 - DNA, 73 bp, Homo sapiens
actgtctgcagttgcaccgcagatcctcctgcccggctggcccgacccaacttcctcttcaaattcctggtga

SEQ ID NO: 8723 - DNA, 100 bp, Homo sapiens
ttcaggtggatattttatccaacaatgttccttctgatgatgtggcacgtgtggttctcaaatataggcattctgatgggaacttgtgtgttaaagtaac

SEQ ID NO: 8724 - DNA, 100 bp, Homo sapiens
acttgttgcagttgctgtaggattctaaatccaggaaccctaaggactctgcaatatgaataattccctagagaacaccatctcctttgaagagtacatc

SEQ ID NO: 8725 - DNA, 100 bp, Homo sapiens
cctagaccggtttttagtccattgactatgcagcctaatgattactacaagggaagacataaattcaaagcaggttgctacagtgaaagcagacctggag

SEQ ID NO: 8726 - DNA, 75 bp, Homo sapiens
cccaggcggacgaggccgtgttaggttgttcggaatcctataattgaaaaacagtaaagatggaaaaccagttat

SEQ ID NO: 8727 - DNA, 75 bp, Homo sapiens
ttgtgtccattgatctcttggagcagctggggatcatgtgcctgatttgagatggggtcccaggtctcggtggaa

SEQ ID NO: 8728 - DNA, 97 bp, Homo sapiens
gcaccacagtccttctgcagtccctcgtccagccacccccagggttttgctgtgttggccgggctggtctccagctcctaaccgcgagtgatccgcc

SEQ ID NO: 8729 - DNA, 82 bp, Homo sapiens
tacctgcgctatgaagacacgcttcttctggaagaccagccaacagataccacgaggaacccgaggcccggcgaggagaacg

SEQ ID NO: 8730 - DNA, 83 bp, Homo sapiens
cggacggcgacgacgggggaatgtggcgctggatccggcagcagctgaactctcttgatagagcccaagcagccaagaataaa

SEQ ID NO: 8731 - DNA, 100 bp, Homo sapiens
cagctgggtatggggcaagcaaccaggaattcctttcctacaagaaacctaaaatgagagagttttttattggactgtcagaccaggttgtcgagggtca

SEQ ID NO: 8732 - DNA, 101 bp, Homo sapiens
gaggtgctaagtggatcctctggccagctgactgcacttcttttttgagaaaggaaggaatatatcctgactgattggtacaggcatccttcacctgctat

SEQ ID NO: 8733 - DNA, 100 bp, Homo sapiens
atagatgtttatgtcagccaactggggaaagtggaattgaaatcccataaaggaatccaaggcattgtagaggcgtatcggtcttgtcttcctcagataa

SEQ ID NO: 8734 - DNA, 75 bp, Homo sapiens
atccatctgtcttagcaaggctgtcatcacacaggtgtcttctgcggaggtgcgcatcgggcccatgagactgac

SEQ ID NO: 8735 - DNA, 80 bp, Homo sapiens
tgatattcagagccttggaagtcaacactgtcataacaaatgtggcaattattttggatctatcacctgtcatcataact

SEQ ID NO: 8736 - DNA, 73 bp, Homo sapiens
aaagtcacgattaggactgacaataaggtgcccctgggcgctgggattgctctagcctgtaagtataatggaa

SEQ ID NO: 8737 - DNA, 100 bp, Homo sapiens
ttcctttgagctccggaaagttgcacccgacagctacaaagtgcaagataagaaaaatgcctccagccgccctgcctctgcaatttcaggacaaaataac

SEQ ID NO: 8738 - DNA, 96 bp, Homo sapiens
gaatggggctaagcgaggcggaggcgatcggtgctgattcggcgcgatttgaggagctgctgctgcagggctgtgggacagatgatgtctaccatg

SEQ ID NO: 8739 - DNA, 76 bp, Homo sapiens
ttttacattgaccacaacacgcgccagacgtcgtggatcgacccccgcgaccgcaagaaaagcctaggcttctcga

SEQ ID NO: 8740 - DNA, 82 bp, Homo sapiens
aagtttccgcaggactacttccccgagcgtgagtgcatctccatccacgttggccaggctggtgtccagattggcaatgcct

SEQ ID NO: 8741 - DNA, 144 bp, Homo sapiens
tgcaataccaacatgtctgtacctactgatggtgctgtaaccacctcacagattccagcttcggaacaagagaccctgacgtgaacgatcaagagagagggaccatagtagatcacgagaaaagagtcgacgtcataaatcccg

SEQ ID NO: 8742 - DNA, 73 bp, Homo sapiens
cataagattgtcatagctgatgtcaagttggttgctgatttccaaagggtcattatcgttattgtgatgctct

SEQ ID NO: 8743 - DNA, 98 bp, Homo sapiens
tggcacaagaatctgcctgtaacaatactcttcagcagcagaaacgaaatctcttagaactggaggtacaaaaagagcagacccttgctcaaatagac

SEQ ID NO: 8744 - DNA, 75 bp, Homo sapiens
gcagacacagcaggctgagcagctgcaaacccccgaaaaagcggagattctggagctggctggcaatgcagcgag

SEQ ID NO: 8745 - DNA, 75 bp, Homo sapiens
tgatgtgggccatggtgtcaaggatcatggggttgacagcagcattttccagaatcctaaaaagcttcatctaac

SEQ ID NO: 8746 - DNA, 74 bp, Homo sapiens
accaattccggacacataacaagcagcagtgaggacaccaaaggtggtcaaggtgaagccccatgacaaggatg

SEQ ID NO: 8747 - DNA, 75 bp, Homo sapiens
tacgtctagtgccagccaagtgattgctcctactcaagtgacaggccataggaaaaggatacagagtagagtttc

SEQ ID NO: 8748 - DNA, 83 bp, Homo sapiens
aaggattagcgagaagaaaatgtccacccccatcgaagtgttgtgtaaaggctacccttgaaacccctcctggagtttcccca

SEQ ID NO: 8749 - DNA, 75 bp, Homo sapiens
ggaagtgggacaagatggtttacatctcgaacggtcctcagaatggttggaatgaccctccagctttgaacagag

SEQ ID NO: 8750 - DNA, 100 bp, Homo sapiens
gggaccaaggacgaaaacagcgactacaacaagttggatggcttgaggactggtactaaaaggaaacgtgactgggaggccattgccagcagaatggagg

SEQ ID NO: 8751 - DNA, 75 bp, Homo sapiens
ccttcacgcacgccctgcgcctggtgaaccaagatccagacatttaatgtggatgcaccatgccagaccgtggaa

SEQ ID NO: 8752 - DNA, 51 bp, Homo sapiens
tgctcacacagaagaagccgtttgcagtctctagtgatccctgaaaagttc

SEQ ID NO: 8753 - DNA, 83 bp, Homo sapiens
tttaaaggcaaatcaagtctggaaatgcattttcgaacgcattcaggtaatgtaatccagggaagtggaaaagaagaaatctg

SEQ ID NO: 8754 - DNA, 100 bp, Homo sapiens
atgacccacaaacttaaacatactgagaatactttcagtcttcccatgcacaagatgattaatacagatcttagcagaatcttgaaaagcccagagatcc

SEQ ID NO: 8755 - DNA, 87 bp, Homo sapiens
gtggacattttactggctcaagaattccgatgctgaagatcgtgtttgcaggccatgagcatctctctttaatatctgtacccttgc

SEQ ID NO: 8756 - DNA, 83 bp, Homo sapiens
cgtcaatctctttcgaagccattcagtcctcaatctccttttccttggctacccgtttcccggtcctctggcgaggatcctcc

SEQ ID NO: 8757 - DNA, 83 bp, Homo sapiens
ctcacaccccagctgtgcatggtgcaagcaactgatctgactgcagccatgagcagcaatgagtgcttcaagtgtggacgatc

SEQ ID NO: 8758 - DNA, 90 bp, Homo sapiens
gtatttgaagattacgtgcactccagtgagaggagggtctcctgggcaaagaaagaatacctcctctgaaaaatggcagaagcagttttc

SEQ ID NO: 8759 - DNA, 83 bp, Homo sapiens
gaggccacccggatcctcttcttcaacacacccaaaaagatgacagactacgccaagaagacctcctgccccccgaggtctgc

SEQ ID NO: 8760 - DNA, 100 bp, Homo sapiens
atttcacatccagcagaggaggcgggggcagccgctgagacggtttttcacaaggagaatctgataatcggaaccagcagaagatggagatgaaggtctg

SEQ ID NO: 8761 - DNA, 100 bp, Homo sapiens
gaaattggaggaggtgcagaaggtggacagggtaaaagaaagagacttttttctaaagaatatgaatggctatcaaagaaggatcaaaaatgcaactgag

SEQ ID NO: 8762 - DNA, 49 bp, Homo sapiens
gtcaggaacagagtcaatttcaggacttaattcagtgcacaaatgagat

SEQ ID NO: 8763 - DNA, 75 bp, Homo sapiens
gacggttataagaccatttatttctttggagacaaaactatgccaacaatgcagatcttcgtgaagactctgact

SEQ ID NO: 8764 - DNA, 101 bp, Homo sapiens
gtggatcaagcaggttttaaatcaagatttaacattccaacacataaaaattatttatccaacagctcctcccaggtctggctctgggagaggagtggaca

SEQ ID NO: 8765 - DNA, 100 bp, Homo sapiens
aatgaattctatggacaggcacatccagcagaccaatgaccgactgcagtgcatcaagcagatctcactgatgaaaaggcctccaggtttttcacctttc

SEQ ID NO: 8766 - DNA, 80 bp, Homo sapiens
agtacaactaccgctgctggaccacaaaccgctgccagaaaagttgaggaaacgtcccatgcagtcaactgttgctactt

SEQ ID NO: 8767 - DNA, 100 bp, Homo sapiens
ggagggagactgttgttcccggagatgcggcgcgcaggctactccagagcaaataagcatggacctcaagaatgaattgatgtaccagttggaacaggat

SEQ ID NO: 8768 - DNA, 83 bp, Homo sapiens
atgcagtgcccggccgagcagccgatacaaagcaggggaaaaggagccagatcccaagacgtggaaggccaactttcgctgtg

SEQ ID NO: 8769 - DNA, 54 bp, Homo sapiens
aggcctccctttttgtcgaagacgggtgtagaagacatcgtggccataatgatt

SEQ ID NO: 8770 - DNA, 75 bp, Homo sapiens
gcttgggatcctttatcctggtcatcttctatttccaaaatcgccaaactgaggcagcaactacaacgcagtaaa

SEQ ID NO: 8771 - DNA, 50 bp, Homo sapiens
tggagaccagcagaactccaccagggtggattacggaacaacaacgagaa

SEQ ID NO: 8772 - DNA, 50 bp, Homo sapiens
agcttggcgtcctgagaaatgagagatgcaggtcagctcctccagtacca

SEQ ID NO: 8773 - DNA, 96 bp, Homo sapiens
cagaggcagtggcaagaggaggtggcggcggtggtagtggtgggctcctgcatgaccgacctggtcagagactctccaacatgtgccttctgacca

SEQ ID NO: 8774 - DNA, 100 bp, Homo sapiens
agcgaatcaagcgggagttcaaggaggtgctgaagagcgaggaggttatcaatactctggctgaccatcatcatcgtgggactgactttggtggaagtcc

SEQ ID NO: 8775 - DNA, 82 bp, Homo sapiens
tccccgccgctctgtctacaacccgagttacagaatgtctgaaggggacagtgtgggagaatccgtccatgggaaaccttcg

SEQ ID NO: 8776 - DNA, 100 bp, Homo sapiens
tggacagtggagatgaagcctaagaatatgatcaggtgttggagcgggccggagagaagtagagtgggctgcgaggagaaggaaacaggcctttcggagg

SEQ ID NO: 8777 - DNA, 100 bp, Homo sapiens
tgccggcgcctcctccgcgggcgtgaaggcggcgctcctactccctccccggactccgcggggcgaagaaaccaaaagtctgactcttgtcctgcatcgg

SEQ ID NO: 8778 - DNA, 75 bp, Homo sapiens
gaagaatttggacttgatgaagaagatgaagatgaggatgaggatgaaggctggagtacagtggcacaatctcag

SEQ ID NO: 8779 - DNA, 75 bp, Homo sapiens
gctgtgaaaaaagccatttccgaaggtgaaagaacttgtcctggacaacagtcggtcgaatgaaggcaaactcga

SEQ ID NO: 8780 - DNA, 82 bp, Homo sapiens
ctccatcgacctcaaggacatcaacttccggccgcagatgtcccagcagcccctgtcaaagggaacaggaagcagtccacgg

SEQ ID NO: 8781 - DNA, 82 bp, Homo sapiens
ttgctggtcctcctggctgtgggaagactctgctggcgaagaacattcagaagattctcggccttgccccttcacgagccgc

SEQ ID NO: 8782 - DNA, 50 bp, Homo sapiens
ctctgaggggcttagaaattaacagggttgttggaagaggagcctttgga

SEQ ID NO: 8783 - DNA, 105 bp, Homo sapiens
gagacttccaccttaggatagtgttgcctgaagatttacaactgaagaatgcaagtgatgcagccaacacgaacggttgtcatgtgtaacacaactttcgatcac

SEQ ID NO: 8784 - DNA, 75 bp, Homo sapiens
gtgcgattgcatgaggatgctgaggctgtcctgtcctcgtccgtctcatcaaagtcccctgcagagcaaaaaaac

SEQ ID NO: 8785 - DNA, 75 bp, Homo sapiens
ctgcagtacctgcagaaggtctctggagacatcttcagcagatggggcattctcttctcccaccctcgggacttt

SEQ ID NO: 8786 - DNA, 75 bp, Homo sapiens
gatccgcccatctcggcctcttgaagtgctaggattacagtgggatcatgaaacctggtctcaacgccatcctgg

SEQ ID NO: 8787 - DNA, 100 bp, Homo sapiens
gaaggaataagtcctgaattagaaaaggtattcattaaagaaaataatgggaaggaagaagtatccaaggtggtattaaagataatcaaacattatcaag

SEQ ID NO: 8788 - DNA, 82 bp, Homo sapiens
cccggtactgtcttcgtgatgaataaaaacatttcaactccctacagttgtgccatgcgcaacaagattgacctggctgaaa

SEQ ID NO: 8789 - DNA, 101 bp, Homo sapiens
cagatgtcagcacttcactattcagctggggtggagacctattacatgcctccttggcgcccagactcaggacaggccggatcacctcaacagtcacgtca

SEQ ID NO: 8790 - DNA, 97 bp, Homo sapiens
tgctaagtggatcctctggccagctgactgcacttcttttttgagaaaggaaggaatatatcctgactgattggcggcgactggcggcgcgatggac

SEQ ID NO: 8791 - DNA, 75 bp, Homo sapiens
aaaaagagaaggaaaaaaaggaggaaacaaccacatatgtcacctttccaagggtctcgctctgtcgcccaggct

SEQ ID NO: 8792 - DNA, 90 bp, Homo sapiens
gattaaagaatgagagaactgtgtttgttgggaatttgcctgttacatgtaataagaagtcaacgaaacggaatattccaatgctctttg

SEQ ID NO: 8793 - DNA, 100 bp, Homo sapiens
agccaggagcagcagcctttctagctgaaaccaccaatgggtgaggtcgtcacccctacggccccccaggagcctcctgagtctgtgaggccatccgctc

SEQ ID NO: 8794 - DNA, 75 bp, Homo sapiens
tttccatgctctgaaagacatccttgggcccccgatgtatgaaatggaggtttcccttgggggctttgaaataac

SEQ ID NO: 8795 - DNA, 100 bp, Homo sapiens
tcggctcactgcaacctctgcctcccaggtgttctgttcctgctcctacgatgccaccacacactttgagacaacctgcaacgacatcaaagacatctac

SEQ ID NO: 8796 - DNA, 97 bp, Homo sapiens
gttcccccaaatgtctgactctgactctcggactgagaaacgcaagttccagggtctccctccactgctgtagtaacccgggtccggggcctcggtg

SEQ ID NO: 8797 - DNA, 88 bp, Homo sapiens
gaaagcattaatggctgcagaggataaggtgccctttcccaccatggtggctctgctgtgcatgtggttcgggatctccctgcccctc

SEQ ID NO: 8798 - DNA, 98 bp, Homo sapiens
atcatcagcatggttgtgggccagcttaaggagctcattaccatgatgctgttggtcgatgtagatcagcgattttctgctgttcaagtacttgagca

SEQ ID NO: 8799 - DNA, 95 bp, Homo sapiens
gcgggctgcggggccgaaccccgggtttgtttgtaaaaacaatggtgtgttgtttgaaaaccagctgcttcaaattggacttaagtctgaatttc

SEQ ID NO: 8800 - DNA, 98 bp, Homo sapiens
tggaggctgagtacgacagcctcaaacaggagctggagcagctcaaagaggtggagccgccaccaaaatgcagattttcgtgaaaacccttacgggga

SEQ ID NO: 8801 - DNA, 98 bp, Homo sapiens
gcgggccggcgagcgcgtcgccaccatgagacacggggtcttgccatgttgcccaggctggtcttgaactcctaggctcaagtgatgatcctgccttg

SEQ ID NO: 8802 - DNA, 88 bp, Homo sapiens
gcagcaccaggagtccctctccgcccagttacaaggtacttgctacagccaagagacaatggaaacaagtcatccaaaactgatgacc

SEQ ID NO: 8803 - DNA, 74 bp, Homo sapiens
gagagtttatcttccttcggcttaatgttcttcgtgagcctttcagcaatggattggtgactgtgatggttccc

SEQ ID NO: 8804 - DNA, 102 bp, Homo sapiens
cggggagatgctcttcggcctagtgcgccagggcctcaagtgcgatggaagaaaaaatgctgggcatcttggtgcagcacaaagtccggagtggcgtctcgg

SEQ ID NO: 8805 - DNA, 73 bp, Homo sapiens
ggagatccagttcaattatgaatctcaggaacaccaccttctgtcagttttccaagagataacttcaccaaga

SEQ ID NO: 8806 - DNA, 75 bp, Homo sapiens
tcaacttacctgttgccacttggaatatatatcggaggcagttcccatgttatacgcagcagatacttacggagc

SEQ ID NO: 8807 - DNA, 73 bp, Homo sapiens
tcactctgggaaaaggcactgaagttggtaggcgaaaaccaagagtacatcggcctcgttctcctatattgga

SEQ ID NO: 8808 - DNA, 96 bp, Homo sapiens
aaaagatgatagctttagttgctcttttggttgaacagtctcgatcagaaaggttgcaaaagcttctcatttcagagagatgccaggatcctaagt

SEQ ID NO: 8809 - DNA, 75 bp, Homo sapiens
cagaataattaccgcatcgatgccaaccaggagctgctggccatcggccataaaattttgagtagaaaaatccag

SEQ ID NO: 8810 - DNA, 96 bp, Homo sapiens
ctgaagagaattgaatgctacaaagttacctaccgacctcttgacccagacaactatgacaaaattctgcttggtcagaatcgtgatggcattgtg

SEQ ID NO: 8811 - DNA, 75 bp, Homo sapiens
tcagcaatatccccacataccttctcaagaaattccgggtagatatgcctggctcaggcagtgcattcatcccca

SEQ ID NO: 8812 - DNA, 100 bp, Homo sapiens
gtcgggcccctcggaatcctgggaccttcgggactcccgttccagcgctgcagccatttcttccagatgaagaacatctccttctgcggctgccatcccc

SEQ ID NO: 8813 - DNA, 74 bp, Homo sapiens
gaggatgcagtggaggccatcaggggccttgataacacagagtttcaagaccagagtctcactgtcgcccaggc

SEQ ID NO: 8814 - DNA, 85 bp, Homo sapiens
aggggaaggaaacctctctgaaatctgacacctgctctcccggcaaggaaacttcgcaggctggaacttagtgatttggcccgtg

SEQ ID NO: 8815 - DNA, 82 bp, Homo sapiens
aggaattcgccgtgcccgagaatagctccgtccagcaggacggaaagacggcagaagatcttgctagatcggaacagcacga

SEQ ID NO: 8816 - DNA, 80 bp, Homo sapiens
tcccgggcggcgcgctgcccgaggggagcaaggacaggttaatttggagtggcccctggagtcagtttcctacaccatcc

SEQ ID NO: 8817 - DNA, 100 bp, Homo sapiens
tgaaagtaaagcagatcctgggcagaagtttcactcttgttgtccaggctggagtgcaatggtgcggtctcagctcactgcaacctcctcctcacgggtt

SEQ ID NO: 8818 - DNA, 77 bp, Homo sapiens
caagaaatctcaagcttccgtcagtgtgtgctgtgctttacacgacaatcagtggtcaaagaagacttcggattcac

SEQ ID NO: 8819 - DNA, 98 bp, Homo sapiens
gaaggaggagaaagcgcagtcctgaaagtcaggtcacgattatgggcccacaccttcctccagatgtcaagccctccaacatcctagtcaactcccgt

SEQ ID NO: 8820 - DNA, 100 bp, Homo sapiens
ttgacccctttgacctcttcgatgtgcgagactttggaaagctccaggccatgcccgcagccggaggtgtgctctaccagccctcgggaccagccagctt

SEQ ID NO: 8821 - DNA, 82 bp, Homo sapiens
tggcggacagtgcggaactaaagcctctaaagagagcaatcactacacttatggctgggattttgcgcttagtagttcaatg

SEQ ID NO: 8822 - DNA, 75 bp, Homo sapiens
gagctggtggcctcaggtgaaaaggacagaatgatgctgctgaaattggaacaagaaattttagatttcattggt

SEQ ID NO: 8823 - DNA, 98 bp, Homo sapiens
ctcgcgatggagggaggaggagagagctggcggtcaccatggcaatgcgggagctggtggaggccgaatgcgggggtgccaacccgctcatgaagctc

SEQ ID NO: 8824 - DNA, 100 bp, Homo sapiens
gcttccgccaggcggtgatgaagaatccccccgaaaggaccccccaggatcagttcgacagcttagacaagcatacacaatggggaattgacttcttgga

SEQ ID NO: 8825 - DNA, 88 bp, Homo sapiens
ctgcacagccgcggcggcagcagcagtgagagtctgcgctcctcagaccaccggcaggtgaacagcctgatgcagaccgaggagtgcc

SEQ ID NO: 8826 - DNA, 75 bp, Homo sapiens
tgtgcggctgcgtggggctcggccgcgcggactgaaggagactgaaggacaagggcacacaactggttccgttaa

SEQ ID NO: 8827 - DNA, 100 bp, Homo sapiens
gccatgcgaccgacgctgctgtggtcgctgctgctgctgctcggagtcttcgccgccgccgccgcggccccgccagatgctgctgcagcttcagcaatgg

SEQ ID NO: 8828 - DNA, 111 bp, Homo sapiens
gtggatttgtgtggagcacacattgaatgggccaaggaaaaatcgagcagaaagaatgtctttcaggctgtgccaagaccttgtaccactcggtccatgaaaagatcttca

SEQ ID NO: 8829 - DNA, 75 bp, Homo sapiens
ttttgatcatgcctagtcacaggcccagcttcccgatcagtggagacgttgaaggagatgattaagtctggaatg

SEQ ID NO: 8830 - DNA, 100 bp, Homo sapiens
agaagcgccgggacgccgagtatggcgccagcccggagcaggttgcagcaaattgtggctactaatttgccccctgaagatcaagatggctctggggatg

SEQ ID NO: 8831 - DNA, 90 bp, Homo sapiens
ccacaataaaagagacctctacttagctcagcaattcttaccttgtgatctgtgaaaatggttcgctattcacttgacccggagaacccc

SEQ ID NO: 8832 - DNA, 82 bp, Homo sapiens
gcttgctgctggtaacagggccttgcctagtgggccttccttcccagaattagtaagctgtgtgggctggactactgctgaa

SEQ ID NO: 8833 - DNA, 75 bp, Homo sapiens
cagaaccaggcccccaactcagccatctgcggaggtcaagatgccttcaattaagttgcagagttctgatggaga

SEQ ID NO: 8834 - DNA, 75 bp, Homo sapiens
gtggttgcccatctctgctatgaacaagattgcagaactaaatctagaagcactagctaatcaccaagaaataca

SEQ ID NO: 8835 - DNA, 100 bp, Homo sapiens
gttcttttgctgcaaatgaagttgatggaattacactgtgatacgactgactctgtggaaatacaaagaactctgaatcaacttggaacacctcaagatt

SEQ ID NO: 8836 - DNA, 100 bp, Homo sapiens
gacttgaacaaacctgaagcagatatggctcgtggacagcagaaaattcagtctcagcagaaaaatgccaaaaagcaagctggacaaaagaagaaacaag

SEQ ID NO: 8837 - DNA, 90 bp, Homo sapiens
gccaaagatgatgcctgaaaaccagtatccatcagaacagagtacgactttactccgtgacataaaagaaggactacagaaagctgtaat

SEQ ID NO: 8838 - DNA, 88 bp, Homo sapiens
caacaagttcatcaaggagctcattaaggacggctctctgctcattggggcgttgaggaacttaattcagtgcacaaatgagatgaat

SEQ ID NO: 8839 - DNA, 98 bp, Homo sapiens
caagaggaatcagaaacctgaagttagaaaggctcaacgagaacaagctatcagtgagaaagatcagtctaaagaaaaggagaagaaagtgaaaaaaa

SEQ ID NO: 8840 - DNA, 100 bp, Homo sapiens
ttgtggctcagttttcttggaaactacttggtccacatatagcctcagttacattagctgcttatgaatgcaattcagttaattttcccgaaccacccta

SEQ ID NO: 8841 - DNA, 82 bp, Homo sapiens
ggcagcaccgaggaagcatttatgaccttctacagtgagctgcttccagctgccatggtgatgccaccccagcccgtggtcc

SEQ ID NO: 8842 - DNA, 75 bp, Homo sapiens
aggaaaaactggagagcttcatcaaaaatagtgatagctttgataacggacaaggcaaaatctcagcaagttcgg

SEQ ID NO: 8843 - DNA, 100 bp, Homo sapiens
ctcgctagctccgcctgcggtacgtgctcccgcctccgactcaagttatcaggacaccccatgggagagacttcgatgactctttagaaaaatgtgaaga

SEQ ID NO: 8844 - DNA, 100 bp, Homo sapiens
cggcgctgggctggaggcggcggagcgcgagagcttcgagcggactcaggttgcctaagtactcttgccagttcattgagatgtgtctgatggtgacagc

SEQ ID NO: 8845 - DNA, 96 bp, Homo sapiens
ggaagagctggcgaccaagagattcaaggggaagagcaaggaggaggacctgctgcagctgggaggggagctggcccggacatcacgagctgtcca

SEQ ID NO: 8846 - DNA, 88 bp, Homo sapiens
cggtgcggacccagcacgcctgggccgggggctgcagcatggttgaaatcacaaagattagacacctttttagataggtgttcttcag

SEQ ID NO: 8847 - DNA, 83 bp, Homo sapiens
ccgggtgccgaggagcgggaagagttgctgggagaggaggttcagatgagcccctgctgacttgagagagacagagagaccac

SEQ ID NO: 8848 - DNA, 50 bp, Homo sapiens
gagtgagcgagcggacccgcgatggagagcccgagcccagcacattgtgc

SEQ ID NO: 8849 - DNA, 90 bp, Homo sapiens
ctatactccaagcaagatctcagtcagagtaggaaataattttcacaaccttcaagaaattcgggtggatgaaaatactaggaaaagttt

SEQ ID NO: 8850 - DNA, 50 bp, Homo sapiens
atgggaaggacaggcagagctaaacaagcttatttgcactaatcttgatg

SEQ ID NO: 8851 - DNA, 75 bp, Homo sapiens
aatgaaaggagagcaagaatctcatagctagagttgggaagacatcactgattatgtctctggtcagtgaagaat

SEQ ID NO: 8852 - DNA, 82 bp, Homo sapiens
cggggagccccgcctgaggtgccctaaacacactatgaccggtgagaagccctaccactgcaactgggacggctgcggctgg

SEQ ID NO: 8853 - DNA, 82 bp, Homo sapiens
cgcgccgcccggcagcctcggcaggaggctactcacagtcgaactacaactccccggggtccggccagaactacagtggccc

SEQ ID NO: 8854 - DNA, 75 bp, Homo sapiens
tggcccgttacaaaattgacggcaaatgatatatatgcagaattctgggctgagtgtacctgaagtggaagcact

SEQ ID NO: 8855 - DNA, 80 bp, Homo sapiens
ccatggtgacggtggccctgtcagtggctctcttggccctcctgaaatgatgaaaggttgtatcaaagttcttaaggacc

SEQ ID NO: 8856 - DNA, 98 bp, Homo sapiens
tcctgtgatgtaaatgactgtgtccagcaagttgtggaacttctacaggaacggaaataagcgggttttgaaaacaaaaaaaagaaggagtggaagag

SEQ ID NO: 8857 - DNA, 97 bp, Homo sapiens
gagtctggcttggcatcctcttgggcatattctctgctcaggctcaaatgaccatactagacttgtgtatgcggatacctgcttcagtaccatcaag

SEQ ID NO: 8858 - DNA, 90 bp, Homo sapiens
ttagtagattctatagacttgtcactgtgtgcccagtattctgcagacaaacgagaagatgagaagatgtgtgatcatttgataagagca

SEQ ID NO: 8859 - DNA, 76 bp, Homo sapiens
ttggtgtccagatggacagagttgatcaggatcaagttgtcaaagaagataatattgaagctgtagggaaaaaatt

SEQ ID NO: 8860 - DNA, 95 bp, Homo sapiens
ggcagcgacgcgagcgcggcgatggggagcggcggcgccctgggcgctgcctatggcacagccaagagcggtaccggcattgcggccatgtctgt

SEQ ID NO: 8861 - DNA, 78 bp, Homo sapiens
aaagtcctacaacagtttggcgtgcaacatggggcttgagaaagggtctgagctctttctactcggagctgatgaaag

SEQ ID NO: 8862 - DNA, 100 bp, Homo sapiens
ggcgacgctgacacctcccaccatggacagcttcgacttagccctgctccaggaatgggacctcgagtcactgtgatctttgatgatgcgtacaaatccc

SEQ ID NO: 8863 - DNA, 75 bp, Homo sapiens
cctgcaccctgtctctctaaccaccacaagtggaaaggagactatggaaccaggatccagcagtacttcccatcc

SEQ ID NO: 8864 - DNA, 133 bp, Homo sapiens
cttttctggtgggcgaacgagtgacattggctgacatcacagttgtctgcaccctgttgtggctctataagcagtcttactactttgaccgcgatgatgtggctttgaagaactttgccaaatactttcttca

SEQ ID NO: 8865 - DNA, 51 bp, Homo sapiens
atgaactcagggccggttgtggccatggacaatctctatgggaagcagaag

SEQ ID NO: 8866 - DNA, 74 bp, Homo sapiens
aagagttaaatgccctcaagtcgacaggggatgggaccctagaaatatacagcctctgcagacactgcttctga

SEQ ID NO: 8867 - DNA, 82 bp, Homo sapiens
gtcagggatcgtgaaggacgccagcatcatacaccggctgttcgaggccttgactgtagacctgcctagagctggaacgtta

SEQ ID NO: 8868 - DNA, 75 bp, Homo sapiens
agaatacaccatcaacattcacaagcgcatccatggagtgaccgcctggcccggtgcaccatgcattgcaacgac

SEQ ID NO: 8869 - DNA, 74 bp, Homo sapiens
ctacgtggacatgtcaacagtggacgctgacaccgtcactgagctggcccagttggctaagtggaagacagctg

SEQ ID NO: 8870 - DNA, 83 bp, Homo sapiens
tgacctgaagctctgttacgaagattactacaagggaagacataaattcaaagcaggttgctacagtgaaagcagacctggag

SEQ ID NO: 8871 - DNA, 74 bp, Homo sapiens
ggaaattacaaagaggccaagaagatcattgagggcgcactgtgtgaggagaacatgcggggtgtgcgcttcga

SEQ ID NO: 8872 - DNA, 85 bp, Homo sapiens
agaagaagctgaggatgaagaagatggtacaggtgaacaaaggcagagtaaactgtcaccccagatgcaggtacatcaagacaaa

SEQ ID NO: 8873 - DNA, 75 bp, Homo sapiens
ccggaaggcttcaaaggctgtcgcaaggaggaaggagccaaggcaaagagggaccactgtgctcatggacccatc

SEQ ID NO: 8874 - DNA, 50 bp, Homo sapiens
gaacagatgagaaacccggcaatgaaatgaaacccagggccccaggaaac

SEQ ID NO: 8875 - DNA, 100 bp, Homo sapiens
ctgcgttgcactgtggaagaccacctgagtcaccagttaactatggtagcccacccagcattgctggtgggcacggaggatgctcttctgcagcagctgg

SEQ ID NO: 8876 - DNA, 98 bp, Homo sapiens
cggacgggaaggcgggagacgagaagcctgaaaagtcgcagcgagctggagccgccggagtgcctccacttctcattcagagaattcagtgcatacaa

SEQ ID NO: 8877 - DNA, 75 bp, Homo sapiens
atttctggatatgtgcatggatctgaaagttcatcctgaacaggaaaaggttatcaatactctggctgaccatca

SEQ ID NO: 8878 - DNA, 83 bp, Homo sapiens
gctgtaccccatcgcggtgctcatagacgaactccgcaatgaggacgttcaggattttttatcaagcagaaatgcatcgaaca

SEQ ID NO: 8879 - DNA, 90 bp, Homo sapiens
gtgacctgcatgtactgggggattcgcagggaggatgtcgggacaccccggaagctgggaaatgttgtgattccaaagaatccctatcct

SEQ ID NO: 8880 - DNA, 75 bp, Homo sapiens
gacatggaacagggactcactgggggatgaatttcacccattcatcgaggcacttcttccacatgtccgtgcaat

SEQ ID NO: 8881 - DNA, 75 bp, Homo sapiens
gccgagaccattccgtatggagagccgggtggcgctgcaggaggcggctactcccaggtcattcctatggaagag

SEQ ID NO: 8882 - DNA, 73 bp, Homo sapiens
ggcggcgcagtacaccaacgcggtgcgcgaccgggagctggacctccgggatatgttgatgatgtgatcagcc

SEQ ID NO: 8883 - DNA, 75 bp, Homo sapiens
aagagattgagatggaaatgaaagaatggaggctccagagtgaaattaatgacactttgtcgatgaagatcttga

SEQ ID NO: 8884 - DNA, 100 bp, Homo sapiens
caaggctgtgtccatcagcacagagccccccacctacctcaggaacttgtaatagctggcatcgttgagaatgaatggaaaagaacgtgctccagaccca

SEQ ID NO: 8885 - DNA, 90 bp, Homo sapiens
atcctcgagttggagaaacactgaaaaatttagctgtgcttagcatataggttgctgtagatgaatgttcttagctgtcatgtttaaaaa

SEQ ID NO: 8886 - DNA, 100 bp, Homo sapiens
gccgtcttttgaagcaccctaatattggtgctggagaatctggtaaaagcaccattgtgaagcagatgaggatcctgcatgttaatgggtttaatggaga

SEQ ID NO: 8887 - DNA, 75 bp, Homo sapiens
taccgggactgtgctcggcccccaccacctcctttgcaggctgaccgaagacagttacagccaagttctacttct

SEQ ID NO: 8888 - DNA, 58 bp, Homo sapiens
cgttgcaaatccttaaaagagtcttaacgggaagacatgtaaggaatttgcataagac

SEQ ID NO: 8889 - DNA, 100 bp, Homo sapiens
gccctgtataccgagggaacagatgcctgaaatgtgcagatgccccgtgtcagaagagctgtccaactaatcttgatattaaatcattcatcacaagtat

SEQ ID NO: 8890 - DNA, 82 bp, Homo sapiens
atggcttggagcacttcctattccactggattgggaaagaccatggcaggttcactactgtgatagacaaagtggcaaagag

SEQ ID NO: 8891 - DNA, 83 bp, Homo sapiens
gaaccggtacctggatggcatggtgagaagccctaccactgcaactgggacggctgcggctggaagtttgcgcgctcagacga

SEQ ID NO: 8892 - DNA, 73 bp, Homo sapiens
tgcaatccaggacttcaataaagttgtgaacaatgtctcccttttgcagagctgtattgacttgttcaagaat

SEQ ID NO: 8893 - DNA, 51 bp, Homo sapiens
taagagatatctgcaatgatgtactgcaccgaacaagatttgtgatgaaat

SEQ ID NO: 8894 - DNA, 76 bp, Homo sapiens
tccggcagaagctggtcagtcaaatatgcctgctctgtgcctgtatctgagatcatcgccgttgaggaaacagacg

SEQ ID NO: 8895 - DNA, 74 bp, Homo sapiens
cagctcacccactgccagcagagttctttatagctccaagctctacagattcttcaaatatattgagaataggg

SEQ ID NO: 8896 - DNA, 99 bp, Homo sapiens
cctcaggccagtcgcctccaggccaagagggatccttcacccgtgtctgtactgtaagattgatgttaaaggcatggtgttcaccccacttcatcagcg

SEQ ID NO: 8897 - DNA, 82 bp, Homo sapiens
agacgccaggacccactggaagcctagaaatgttacagaatgtctgaaggggacagtgtgggagaatccgtccatgggaaac

SEQ ID NO: 8898 - DNA, 96 bp, Homo sapiens
ctcagacttctttcccagatgtttataatgagggcacacaggtattaatgctccctggaaatgctttctacgtcgatagctcagctcctagccctt

SEQ ID NO: 8899 - DNA, 75 bp, Homo sapiens
cgctggcgctagtctgaccctccgccaggcaaaaggaaggaaagtatgtgatggtgatgggagtggttcaggcct

SEQ ID NO: 8900 - DNA, 82 bp, Homo sapiens
tccaggccgtgcgcatgtttgctgactacctcgcccacgagagtcggaggccacggcatatgcctccaaggacggggtcctc

SEQ ID NO: 8901 - DNA, 100 bp, Homo sapiens
ccttcgctcgtggatcgatacttcactcgctggtacaaaccggccaaaattgcctggaaaagagcagtgagaggagtccgggagatgtgtgatgcatgtg

SEQ ID NO: 8902 - DNA, 83 bp, Homo sapiens
gaggatgatttttggatcctgagaattgatctatgttggatcaaattcggttccctcaaaattataaaggcaggaaagctcaa

SEQ ID NO: 8903 - DNA, 87 bp, Homo sapiens
gggacaatcccctcgccggggcaccgtcatgtatgtagcacctgaactcctggggggaccgtcagtcttcctcttccccccaaaacc

SEQ ID NO: 8904 - DNA, 131 bp, Homo sapiens
agggaaagaggcctggagtatgaagagacatgagatcatggtggccaaacccacagactgttcgccatggatttccctatcaaccctcagccctggcctttgatcctgtacagaagatcctggcagtggga

SEQ ID NO: 8905 - DNA, 90 bp, Homo sapiens
atccgcggaggccgacaggattcgttggctgccgtccccgctgctgtgcattgggtactcgaaaagattccattccacaagtcctactcc

SEQ ID NO: 8906 - DNA, 75 bp, Homo sapiens
gatgcagtggaggccatcaggggccttgataacacagagtttcaaggggcccagatcattgatctgatgatgctg

SEQ ID NO: 8907 - DNA, 100 bp, Homo sapiens
attggagaatatgatgtcaagtatccagccttgatacccattaccactgcctcctttattgcagcaggaatttgatggggaataaacggtggaattcctt

SEQ ID NO: 8908 - DNA, 101 bp, Homo sapiens
ttgatacctctaatgaatcagctgagccaaaggcagagggcttcatcaagatgaagagctaccccagcagcaccaatgtggagaccgtcaacgatggtgct

SEQ ID NO: 8909 - DNA, 74 bp, Homo sapiens
tcctatcattcacaaagggaaaactacagccaccacacacaagctttgtcacccgaaagaaccgccaagtgtgt

SEQ ID NO: 8910 - DNA, 75 bp, Homo sapiens
gatgacctcacatggtgtggtgaattcaacacttccagtatgcctgcagcatctttagtgacccctgctgatgtt

SEQ ID NO: 8911 - DNA, 51 bp, Homo sapiens
ccaagagggatccttcacccgtgtctgccggcacagtcttcactaccgtag

SEQ ID NO: 8912 - DNA, 94 bp, Homo sapiens
aaaagcatttattgatgccaatgggatgaaaattctgtataatacttcgcaagtttactcctggcttgggggcattaggaagcactggaggctc

SEQ ID NO: 8913 - DNA, 75 bp, Homo sapiens
acctgcgctgtgatgcctgcagagctgtggcttaccagttgctgggctttgccatcagctaacaaatgcacttgt

SEQ ID NO: 8914 - DNA, 71 bp, Homo sapiens
tgaaaaaatggttgacctcacccaggtattggcatactccacacatctgtaccattcttgagtgatcgctt

SEQ ID NO: 8915 - DNA, 100 bp, Homo sapiens
ggaacccgtgaccaagtggagccccaaacaagtggtggactggactagaggtacctttgacaggagcgtgaccctgctggaggtgtgcgggagctggcct

SEQ ID NO: 8916 - DNA, 50 bp, Homo sapiens
gcctgctccgacctggcctcccaaagagtaacagctatccaccaatgtca

SEQ ID NO: 8917 - DNA, 75 bp, Homo sapiens
ctcagaaatcagctcaaacatttttatcagagatgggagacctttaactctgaaggacatatgggaaggagttca

SEQ ID NO: 8918 - DNA, 101 bp, Homo sapiens
ggggaaggcgcctgaagaggacgaagggacacttaacattcagggacgtggccatagaattctctcaggcggagtggaaatgcctggaccctgcacagagg

SEQ ID NO: 8919 - DNA, 99 bp, Homo sapiens
attcaggactctgcaaattccctaaagtaggaggaaaaatgaccatgtccaagttattaccccattcaagttgacaactgaggcaacgcagactccagt

SEQ ID NO: 8920 - DNA, 101 bp, Homo sapiens
cgacccttggcgcctgcccctgcaacgggagacagtctccattctggagcagcggttgacactgacagaagacaagctgaagcagtgtctggagaaccagc

SEQ ID NO: 8921 - DNA, 100 bp, Homo sapiens
attctttgtacagaaattgaaaggcttcaaagctagcaggctttatcctgtggataaacgcagagtgaacgagtttggggagtcctacgaggagaaggcc

SEQ ID NO: 8922 - DNA, 100 bp, Homo sapiens
gggggtcgagcacataacggggttcgggtgtctcgtgtgtgaacatcacagtgacgagtagcacagcccctctatggtttagatggcagtgctgcaaagg

SEQ ID NO: 8923 - DNA, 100 bp, Homo sapiens
gaaatgagcagctttggataatgacgacagcaacccgaagacagggaaatttagagcaaaatatgctgtgaattccatcaagaagaaagtcaacgacaag

SEQ ID NO: 8924 - DNA, 90 bp, Homo sapiens
ccgaggcctgggttacaagcagcaagtgcgcggttggggccactgcgaggccgttttaggtggcttcgtcctgttcatcgccaactaggg

SEQ ID NO: 8925 - DNA, 82 bp, Homo sapiens
tgcagatcgagctgggcaagtgcaaggcggaacacgaccagctgctcctcaatgcaggtcgtaatctgaaggagtggctgag

SEQ ID NO: 8926 - DNA, 50 bp, Homo sapiens
catcagaacatgattaagcagtttaaaggctaggcagctggaagagaaag

SEQ ID NO: 8927 - DNA, 98 bp, Homo sapiens
cgaggacttcctggaggaggacgagtaccacgccaccaccgagaccgtcattagcatggcccaggagagaagtggagagactgattttggacctcagc

SEQ ID NO: 8928 - DNA, 100 bp, Homo sapiens
tattgaaccaccaaaagtccattatgaaactggccgctgtgctcgctgtggagaaaacgtagttggggaaggtacaggatgcactgccatggatcaggtc

SEQ ID NO: 8929 - DNA, 83 bp, Homo sapiens
ataaaagctcaacatgagtatgttggtccaactactaacttcagacccaagcaacaaatggtcattcagaatgcttacggcta

SEQ ID NO: 8930 - DNA, 88 bp, Homo sapiens
gactactgactggcatcattttgggactgggcatctggaggattgtgatcaggatccaaagagatggagatcttataacaatttttga

SEQ ID NO: 8931 - DNA, 104 bp, Homo sapiens
gctgtatgattaggccacaatcttcaatgagtaaacatattcctgtgcgcgcggagccatggttatcatgtcggagttcagcgcggaccccgcgggccagggtc

SEQ ID NO: 8932 - DNA, 101 bp, Homo sapiens
caaatatgaatttttatttggcagatctgaagggaaagctccagatactagcgttcgtggcattcagggatgtggctgtgtacttcacccaggaggagtgg

SEQ ID NO: 8933 - DNA, 101 bp, Homo sapiens
agcaacgacgtcttcttcagcctgcacgcggttgtcctcacgctgatcatcatcgtgcagtgctgcctgtatgagaggctgccattcgctgcaaggttgaa

SEQ ID NO: 8934 - DNA, 74 bp, Homo sapiens
gaaggcgcgagtgaggaaaggaggtactgtagtctcagagaaagatgtcacatctgctaaagcactgtatgaac

SEQ ID NO: 8935 - DNA, 100 bp, Homo sapiens
gtcttggtttccaaagatctacatttgcttgaggaaattgctctcacactcagagcttttgaggatggcactggatctttaaaacgcagtggttccttta

SEQ ID NO: 8936 - DNA, 83 bp, Homo sapiens
ccaccgagccgggcccacctccccaccaaggaagcatcaagatggtgctcatgtggaccagtggtgacgccttcaagacggcc

SEQ ID NO: 8937 - DNA, 71 bp, Homo sapiens
tatggcgctgaaacggattaataaggctgcaataggatctgtggctttggacacagcaaggtcacatggag

SEQ ID NO: 8938 - DNA, 90 bp, Homo sapiens
ggcggcgcctgaggagcgggatctaacccaggagcagacagagaagctgctgcagtttcagacaccattcgcttttcacccaagatgatt

SEQ ID NO: 8939 - DNA, 100 bp, Homo sapiens
cagcattcctgaaatacatccaggaaagacatggagattctcttaaaaagggtgttttgaatgctgtatcaaatgcctggggggcattccctatgcctct

SEQ ID NO: 8940 - DNA, 50 bp, Homo sapiens
cgccgccaccatgcccaagagaaagaattcagcggggtgccaagtcgttt

SEQ ID NO: 8941 - DNA, 90 bp, Homo sapiens
aaagggacagatggcctacatcaagctggaggacaggacgtcaggtcttgtcaacggaaaggggtccctatccagaccccaagagagcat

SEQ ID NO: 8942 - DNA, 100 bp, Homo sapiens
cttagctgaccatgggcaactttctgggatccagcgagcgacatgttcacagtgtgcctgcgtcgggaagggcagactgtgtaccagcaagtcctgtccc

SEQ ID NO: 8943 - DNA, 83 bp, Homo sapiens
caacgcctggctcggagcagcagcctctgagcagggagagcaacaagccccggccctcagagctcagccggatgagcgcagcc

SEQ ID NO: 8944 - DNA, 75 bp, Homo sapiens
tgcagaacagaacactttctcatgtccagggtcagattacaaggtcttgatgcagaactttattatgtgagaaat

SEQ ID NO: 8945 - DNA, 87 bp, Homo sapiens
actacaatacctcttgggactgggctcgatttgaggtcattgattacaacggggaacgcacgctggatggttttaagaaattcctgg

SEQ ID NO: 8946 - DNA, 99 bp, Homo sapiens
gaaaatcataccatatcagatgcctcgcagagcaccaggcccaccgtgaaagtcttatgatgtaatcagcgcgatttcacttcctgaatttcgatgaat

SEQ ID NO: 8947 - DNA, 98 bp, Homo sapiens
ggctccggcggcagccgcgcctctcgcttgcttccctcggccgggccgtcctcggcggcagtgtcaggatggcccactgcgtgaccttggttcagctg

SEQ ID NO: 8948 - DNA, 81 bp, Homo sapiens
gcaacttacccgagaacgtgcgggaagagaagatcatcgagcatttcaaacgatcatgagcgtcttgttgttcatcgagca

SEQ ID NO: 8949 - DNA, 98 bp, Homo sapiens
aagtgtcacagcctggttggaaaacccaagatatttatcattcaggtgccacgggtcggagacagcacggaaggagagacaagccttacagagacaac

SEQ ID NO: 8950 - DNA, 75 bp, Homo sapiens
gggtctctgggggatccagtgacgtgcccaaccacagagaccagcaaattgtggctactaatttgccccctgaag

SEQ ID NO: 8951 - DNA, 75 bp, Homo sapiens
gcctccattaaactgtccacctggattagaatatttaagtcaggagtggagtcaacatatcaatggagcaagtca

SEQ ID NO: 8952 - DNA, 90 bp, Homo sapiens
ctctcatcgctctcggcctcggcctcggcctccgacacggaggtgttgcccatggcccccggggccccacaagttactactacatgctgc

SEQ ID NO: 8953 - DNA, 95 bp, Homo sapiens
tcgtgcggccagtccggcgctggcgccgcgtggcagtggggatgtcatggcgtacaataaattgaacgtgttccactggcatctggtagatgatc

SEQ ID NO: 8954 - DNA, 87 bp, Homo sapiens
tcgggataacgcctgcaacgacatgggattctcaaagttggattggtggaaacaatgaaccattgacaggctttacatggcgaggtg

SEQ ID NO: 8955 - DNA, 74 bp, Homo sapiens
aaggagccccgcgagtggcgcgccggggatcaagagtgagccatggagctacgtgtggggaacaagtaccgcct

SEQ ID NO: 8956 - DNA, 74 bp, Homo sapiens
gccagctaggagcgctctgtggtgcctggggctgaacgcggctttctggaatcaagagagacccggccaaggct

SEQ ID NO: 8957 - DNA, 87 bp, Homo sapiens
gaaaagtttgaatgttcaaaaggcatctactgaaaggattctataccagactgttacaggattgaagaaagatttgtcaggagttca

SEQ ID NO: 8958 - DNA, 75 bp, Homo sapiens
gggacagcccctgccttctaccagctggcagccaggaggcaggagcagcgggcgacagtgcgggccctgtggttc

SEQ ID NO: 8959 - DNA, 83 bp, Homo sapiens
tgggaatcctggccctgtcccacaccatcagtgagaaggcaaccaaagtgcaggacatcaaaaacaacctgaaagaggcgatt

SEQ ID NO: 8960 - DNA, 101 bp, Homo sapiens
tcagtgcttccagcagttcccagaaggactcttctatgagatggactagaggcttttaccagatttcttaaaactgaattcagtgaagaaaatattgaatt

SEQ ID NO: 8961 - DNA, 100 bp, Homo sapiens
gggaaatcaagtcgtaaaaacaggtcaagtggaccggagcagggccccaagcccccgggcctggtgggggacgcgcttcttcccacactgtgagcctcag

SEQ ID NO: 8962 - DNA, 75 bp, Homo sapiens
tggttgtgtggtcgcgtctcggaaaccggtagcgcttgcagcatgccgcggcgagtcctttgcacatgttggcaa

SEQ ID NO: 8963 - DNA, 105 bp, Homo sapiens
ctggctctggctgtgcgcgctggcgctgagcctgcagccggccctgccgataacgaaggaggcccaacttcattcaataaggagcctgacggatttatcccagac

SEQ ID NO: 8964 - DNA, 101 bp, Homo sapiens
tttgatcccaaccttggcattcgacaggccatgacaagtatttggaatgcgttggtcactgacaaatccatgcatcaagcattgcacagttctctccaata

SEQ ID NO: 8965 - DNA, 100 bp, Homo sapiens
ggagaataacggctgcacctggagattgacgcagagtgggcggcggtggtggctgaagaaaatcttggtatggtgatgatttttactctagtgacagctg

SEQ ID NO: 8966 - DNA, 99 bp, Homo sapiens
ccccgacctcgctgtgggggctcctgtttctctccgccgcgctctcgctctggccgacgagtggagaaaagactctccaacatgtgccttctgaccata

SEQ ID NO: 8967 - DNA, 90 bp, Homo sapiens
ggtgcagccgaggtcttcgggaattccagcgaggggagaagatgtcaaccggacactagaaggtggaaggaaacctcttcattatgcagc

SEQ ID NO: 8968 - DNA, 83 bp, Homo sapiens
gcagagaagggccaggagaggagcactttgaggacatggcctccgacgaggacatggtcggcactcttcaccctcccgagccc

SEQ ID NO: 8969 - DNA, 97 bp, Homo sapiens
acggcaaggcgcccatggtggacgagaaggtcattgtgggctcgctctctgtgcaggacctgctgcagcggctgctttgtaaggatcctaagaagcg

SEQ ID NO: 8970 - DNA, 98 bp, Homo sapiens
gaggccggcgcgggctggagcgcagcgctgcgggaccgcccgcccccgcgcttcgaggataccggcgctatggagtgctgctgtgggaactgctcacc

SEQ ID NO: 8971 - DNA, 82 bp, Homo sapiens
aaggagctaaagcagcgtgcgttcagccctggggttctccttactatgacaatgtccgccccctctcttaccctgattcgga

SEQ ID NO: 8972 - DNA, 100 bp, Homo sapiens
gtcttcctgctggggctcatgtttgaggacctctgcgtgttctgaagataaagttagccctacatttcaagttaaggctatccaggaagaatgtctttgg

SEQ ID NO: 8973 - DNA, 85 bp, Homo sapiens
aacaacgtgttattgatcttcgctgtaacccaagaacaagttcatttatatgagaaatagccaggcaagcagcacaaataaagct

SEQ ID NO: 8974 - DNA, 87 bp, Homo sapiens
ttgtaaaaacatggcggatccagaattctgctactgatctacttcttgcctggaatcccatttgtttggggttggtagaaggtgtta

SEQ ID NO: 8975 - DNA, 122 bp, Homo sapiens
gctgcttatggcggcgctggagagggggcgctgagctgttggggacattcactgaacaatgccagggatacaagtgccatggatactctaccgctaaatggtaattttaacaacagctactc

SEQ ID NO: 8976 - DNA, 82 bp, Homo sapiens
ggataaactgttacgcatatatgacttgaacaaacctgaagcaggcaaatccagatcccaacacttgccttggagtgtttgg

SEQ ID NO: 8977 - DNA, 75 bp, Homo sapiens
ggatgacccgggcttcggcccccaccagagactcgactgttctgcgatgaccacaacaaggtaccggcccacctg

SEQ ID NO: 8978 - DNA, 100 bp, Homo sapiens
catccgatacagcgctgtgaggcaccagtctgaaatcaagccagggtatgttgagtctaaaaaggacagagtcacagtagtcttcagcacagtgtttaag

SEQ ID NO: 8979 - DNA, 76 bp, Homo sapiens
gcggcggacgggccggagggaggatgttaaagccccgcggtacccactgatggtaatgctggcctgctggctgaac

SEQ ID NO: 8980 - DNA, 100 bp, Homo sapiens
gaaaaacaatcgcttcaatgatgggaaggtggatcccgccgggaggtactttgctgttgggacccctgattttagcaggatggcccaatggaatcagcta

SEQ ID NO: 8981 - DNA, 50 bp, Homo sapiens
tggagggcactaccagatggggtagttgaattcagtgaattggacaaacc

SEQ ID NO: 8982 - DNA, 83 bp, Homo sapiens
ctccgaggggacgtgttccagaaattcattgagaggaactgtggctgcaccatctgtcttcatcttcccgccatctgatgagc

SEQ ID NO: 8983 - DNA, 100 bp, Homo sapiens
caggatcgtggagagagatttccagtggacggacaacaccgggctggattgggactcttctttggtgaagactttcaaactgaagaagagagaaaagagg

SEQ ID NO: 8984 - DNA, 101 bp, Homo sapiens
ggcagaggcacttatgcttgtcagaccacactgcccacgtttcagagcccagagttttctgttacaaggcaacatgaagactttgtgtggctacatgacac

SEQ ID NO: 8985 - DNA, 80 bp, Homo sapiens
ctcagctcttgccaaacagacccgagacccatgtcagccccactggatgccctggaaaaggattttggtctgagatgctg

SEQ ID NO: 8986 - DNA, 100 bp, Homo sapiens
gctcaagcaatcctcctgcgtcgactttccaaagcgctggaattatgggcgtgagccactgtgcccagtactaaggctcgtacgtctgcatcgattatct

SEQ ID NO: 8987 - DNA, 74 bp, Homo sapiens
cttaagagccacatctcaggaatcttccgccccaagttctcggaggataagatcaatgccctcattaaagcagc

SEQ ID NO: 8988 - DNA, 100 bp, Homo sapiens
gtggtacaaaccattacagcacctcttcctgtacgcctcctgccaacgggacagacagtataatgggtgttgacttcaaaatcaaaactgtagagctaag

SEQ ID NO: 8989 - DNA, 74 bp, Homo sapiens
ggggctagtggccacgctgcagagcctcggagccgtgtaaagccagtggaatatagtcagatgtacagttatag

SEQ ID NO: 8990 - DNA, 100 bp, Homo sapiens
ccaaggtttgaaaagcagctggcctgcaaggtaaaatttatgaagaccattcctggtacagcactggtagaaatgggtgatgagtatgctgtagaaagag

SEQ ID NO: 8991 - DNA, 100 bp, Homo sapiens
ggacgccgactcggaggtgggtccggggagcccgactcggaccgcggagatgaacacaatgacgtacagaagaaaacctttaccaaatggataaatgctc

SEQ ID NO: 8992 - DNA, 88 bp, Homo sapiens
ttcgctgcgcgtgcacattccggttactcactataaacaatatccacccaacacaagcaaagtttattcctactttgaatgccgtgaa

SEQ ID NO: 8993 - DNA, 74 bp, Homo sapiens
gcctcttctgtttccaatgggatctaatgaggcgtcaagaagaactcagacgcttggaagaactcagaaaccaa

SEQ ID NO: 8994 - DNA, 50 bp, Homo sapiens
gaagaaattgagaagctcaaggagtcagaatggcggcagcggagcatcgt

SEQ ID NO: 8995 - DNA, 100 bp, Homo sapiens
tatgtcaataacctgaacactgaccagctctcagttgcacttctcaaagccacatgaaatgaagatcacctctgcctatctacaggacattgagaatgcc

SEQ ID NO: 8996 - DNA, 82 bp, Homo sapiens
cgagttccctcggattaaacgccggagagagcgtgaatttgcctcggggacgcctctccagcaggagcattggtttgaaaag

SEQ ID NO: 8997 - DNA, 50 bp, Homo sapiens
gaaaagcgaggcaaggcaggcggaaaccaatagagccatggcgactccct

SEQ ID NO: 8998 - DNA, 85 bp, Homo sapiens
cgccttccggcagaagctggtcagtcaaatgaatactcccccagttgcaagaggcgcaggaccgtggaagacttcaacaaattct

SEQ ID NO: 8999 - DNA, 74 bp, Homo sapiens
gtcagcggtatattagttcagttaccactaccagaagatttgtctacaagtatctctgtatctaattgtcagat

SEQ ID NO: 9000 - DNA, 101 bp, Homo sapiens
cgaaggcggagcagagttcttctcaggcctcccagacctgtaaccagcatgaacgacaccctgttctcccactctgttccctcctcaggaagtccttttat

SEQ ID NO: 9001 - DNA, 100 bp, Homo sapiens
catggtggtgtcccacctttttgggaaggatgaaaactttcggaagagaaagttgcctgtggtaagttcagttgttaaagtaaaaaaattcaatcatgat

SEQ ID NO: 9002 - DNA, 50 bp, Homo sapiens
caaagaagtgctatctggaaagagagtgcagctgtctgcttcagaaagtg

SEQ ID NO: 9003 - DNA, 114 bp, Homo sapiens
gtttctctccctctgcccccccttccccacgcaaccccagatccatttacactttacagttgtggcagcactgcctgaaggtatgagaccagattctaatctttatggttttcc

SEQ ID NO: 9004 - DNA, 76 bp, Homo sapiens
atttgttgagaaatgtgtggaatttattgaagatacagatggtgaccctgataactatattgcttattatcggagg

SEQ ID NO: 9005 - DNA, 73 bp, Homo sapiens
ttttacagctgttttaaaaaagaagggataatgaatccagagaatgttggctcaattaagaaacatcagggag

SEQ ID NO: 9006 - DNA, 50 bp, Homo sapiens
ctcttctcgccctggcggggaaggaaacccctcctggagtttccccaaag

SEQ ID NO: 9007 - DNA, 100 bp, Homo sapiens
atgtgttgtgttcctggcttccctctggatgctgacagaaacaagggactcctcctatttatggagcaggcacccaacatggctgagccccggggccccg

SEQ ID NO: 9008 - DNA, 83 bp, Homo sapiens
cggaacacaagctgtgaaacactaggtacaagaatattccacagatgtcctttgatgatacagaaagggagccagatcagacc

SEQ ID NO: 9009 - DNA, 75 bp, Homo sapiens
cagcgacggcgtcgggagagcgcgcctagccggctcgcgagtgagaagccctaccactgcaactgggacggctgc

SEQ ID NO: 9010 - DNA, 74 bp, Homo sapiens
agccacgagtgtggctggtgtggcaatgaggacaaccccacactgggacgctgtgcctttgccaacacccccaa

SEQ ID NO: 9011 - DNA, 74 bp, Homo sapiens
ttcggcaagtaccgggatggggactttgagacagtcattttgtttactcattcagccctgttgcaggtcccaat

SEQ ID NO: 9012 - DNA, 75 bp, Homo sapiens
gaggagagccggcggcgggaggccaaggagatcgtcatggagacgctgcagcggctgagtcccgctcatgcccac

SEQ ID NO: 9013 - DNA, 49 bp, Homo sapiens
atgatgaaatttctgtaaatggaatctgagaaaaaggggttgattgaaa

SEQ ID NO: 9014 - DNA, 73 bp, Homo sapiens
gacttgatagacgacctgaagtcagaactgagtggcaacttcgagcagggtgtcaaattgagaaccaggtaga

SEQ ID NO: 9015 - DNA, 98 bp, Homo sapiens
tgctggtgatgctgtggctgagctgctccaccctggtgaccgcgcctggccagcacctcaagttccagaaaccagcctggacaccaagtctgtgtcag

SEQ ID NO: 9016 - DNA, 101 bp, Homo sapiens
cgtggcgggggtcgcggaggtggcagggggcctggctccgggcagtgcggcctcccctggtgaagacacaaactgtcaccatctcagataatgccaatgct

SEQ ID NO: 9017 - DNA, 100 bp, Homo sapiens
agcagccaggaaccaagaaaacttggcagaagctcctcctggggtagagacagatcttattgatgttggattcacagatgatgtgaagaaaggaggccct

SEQ ID NO: 9018 - DNA, 82 bp, Homo sapiens
aatgggcaagacctcaggaggaccctgactcatatcaaggaccagaaaggagttagtgattggcaactttggcctcagctgg

SEQ ID NO: 9019 - DNA, 115 bp, Homo sapiens
gcagcttcagatagctgaagacaatcttcgggccctcctcatttatgccatttcagctacagtgttcacagactatgatttaatctccaaagaaccaaagccttttgtatttgag

SEQ ID NO: 9020 - DNA, 90 bp, Homo sapiens
cagaagggaggctccaagacctcatcaacaattaagagacaagtggaggtaaacgtccgtaacaagatcctgtacctgatccaggcctgg

SEQ ID NO: 9021 - DNA, 100 bp, Homo sapiens
gaacagaagctccaggatattatgaagttataaggttccccatgggctcagctggaagctcagaaagccacgcaggacttccagagggccacagaggtgc

SEQ ID NO: 9022 - DNA, 90 bp, Homo sapiens
tattaattcactcaggaagaataccattttgccaaaaattcttcagatgatgaggagtctgatgaggaagctgtgaagaaaaccaacaaa

SEQ ID NO: 9023 - DNA, 83 bp, Homo sapiens
aaagacaaggagaaagcacatttggcatcacaagtagagctatgctaagaaggaatctgatcttaatggcgcccagatcaagc

SEQ ID NO: 9024 - DNA, 120 bp, Homo sapiens
tccttgaccagcatcttggctgaccttgagtgcagctccccctataagcctcggcctccacagggccgttgctccagggagaactgcaaatatcttcatccacccccacatttaaaaacg

SEQ ID NO: 9025 - DNA, 50 bp, Homo sapiens
aaagcgcatacaggaccctaaacagaaactctcagcgtaggcatcgggaa

SEQ ID NO: 9026 - DNA, 74 bp, Homo sapiens
gggtggcggctcgggacggaggacgcgctagtgagtggagtcaacatatcaatggagcaagtcacagtcgtcga

SEQ ID NO: 9027 - DNA, 75 bp, Homo sapiens
ctgggaccaaagtggatatcaaacaccaagatcactccatggatgaaatgacagctgtggtgaaaattgaaaaag

SEQ ID NO: 9028 - DNA, 100 bp, Homo sapiens
aagcctcatctagcccagaggatcggaatgacagatgcccctggccccaacatggcccgtcgctctcagagctcctcgcagggggacaacccactggcac

SEQ ID NO: 9029 - DNA, 112 bp, Homo sapiens
gtttgaagctacccttggggcatctgatcctaattcccttgctgatgatattggatatggtggtggttttaatgaaagagaaaatgttgaatatatagaaagagaagaatct

SEQ ID NO: 9030 - DNA, 88 bp, Homo sapiens
ccagtcagaggcggaaggactcctggaatgccacaaatgcaaatacttgtgcactgggagaggtgactctgacatcattagaagcatg

SEQ ID NO: 9031 - DNA, 75 bp, Homo sapiens
atgtgataaaaacaaggtggaagattcttccaaggaaccagtgcgaaggtcctaggcctacttacaagcctccag

SEQ ID NO: 9032 - DNA, 74 bp, Homo sapiens
cgaccttcctgcccttcacgctccaggagctaggaaaactcctccttaacttggtagatcatactgaagtggtc

SEQ ID NO: 9033 - DNA, 100 bp, Homo sapiens
cgcgactcgggctgagggagctcgggccaatcagagggacggccccagaatggcatgttgtcacaggtagtactgatggaattggaaaatcatatgcaga

SEQ ID NO: 9034 - DNA, 83 bp, Homo sapiens
ccccgccgcccgcctgcgcctccggggccggccctgcaggtatcacctcttctgggctcaagatggacaacaagaagcgcctg

SEQ ID NO: 9035 - DNA, 83 bp, Homo sapiens
ccctgcccccaagaaggaagtcatcatgggccggcctggaacaggctccctggggaagggaatgcagggttgctggggctggg

SEQ ID NO: 9036 - DNA, 90 bp, Homo sapiens
atgttcctgagcttgagatgctaggaagacttggactctgtttgctggctacacggacaacctggtgcgagtgtggcaggtgaccattgg

SEQ ID NO: 9037 - DNA, 90 bp, Homo sapiens
gccatgttcgcccagcagatgcagcttatgctccaaaacgctcaaatgtcatcacttgcagcacgctggctcttctcctgaacttcctcg

SEQ ID NO: 9038 - DNA, 51 bp, Homo sapiens
tcctgcaaaccagggtatcagaggcttggagaaccccctgcctgagcgtcc

SEQ ID NO: 9039 - DNA, 148 bp, Homo sapiens
gtctcaagatggcggccaatgtgggatcgatgtttcaatattggaagcgctttgatttacagcagctgcaggcctatatgaacccaatagcaatggcgagatcaaggggtccaatccagtcttcagggccaacaatacaggattatct

SEQ ID NO: 9040 - DNA, 82 bp, Homo sapiens
aaatggcggagtatctggcctccatcttcggcaccgagaaagacaaggcgtctctggccgagcctctttttgtggaaaacga

SEQ ID NO: 9041 - DNA, 98 bp, Homo sapiens
tgggagacgcacagctaagatgcccggacatcctggaagctgggaaatggaggagaaggagaagcggcgcctcgaccagctggaacgtaagaaggaga

SEQ ID NO: 9042 - DNA, 90 bp, Homo sapiens
ccacatctcctccaatcgagcgtatgattttctgtacggtacattcctctcattgaaaggagctgtgctaacattctcctgtatggaccg

SEQ ID NO: 9043 - DNA, 100 bp, Homo sapiens
cccccgggttccgccggcactctcgccaccaccgcgtggggaaaaccagaaataccgggtatatgtcgtgataccacttctgccagggttcgaaggagac

SEQ ID NO: 9044 - DNA, 76 bp, Homo sapiens
gcggaaaatgccttcaaatcagaaggccaatgatgaggccaatcagagtgatacaagtgtctccttgtcagaaccc

SEQ ID NO: 9045 - DNA, 100 bp, Homo sapiens
tctctgagaactactctgacaaatcagatattgaaaatgctgatgaatccagcagcagcatcctaaaacctctcagttgggccatgcaggctgctgccta

SEQ ID NO: 9046 - DNA, 100 bp, Homo sapiens
tgcaaatgaagctctcgaggctgctaagagactaagtttccacttgagcggcacagtgacagaacctgcaatacaatcggagccagaaactgtttgcaac

SEQ ID NO: 9047 - DNA, 90 bp, Homo sapiens
gagctgcagctcctcctgtgcggtggttggcacttaccatggttccccagaccagtcccatcaagtgactggtaaccaccagcagcctcc

SEQ ID NO: 9048 - DNA, 100 bp, Homo sapiens
ataatgtgaggcgacaagcaacaacaatcatagctgatcacacacccagctggctgcatgtctcagtttataaagttctttggagaacagatcctcatcc

SEQ ID NO: 9049 - DNA, 71 bp, Homo sapiens
gatgagaagtgcttagattctggatacattttgaaggatgccggctccaggagcagcagtggaggtcggga

SEQ ID NO: 9050 - DNA, 100 bp, Homo sapiens
tgcaaatcttccaagtctaatagacctaaagccacagtcttcaagagcccacggacaccacctcaacgctctgcctgcagttgaacacaaagacctggag

SEQ ID NO: 9051 - DNA, 82 bp, Homo sapiens
tggggtgtcggcgcctcattcgggtggagctgagccggagacaggttttaaaatcaaagatgggaaaatcggagaaaattgc

SEQ ID NO: 9052 - DNA, 100 bp, Homo sapiens
cagcaaggtcggcagagcaaggggcttacgcagaaggacctggccacggattttttatcaagcagaaatgcatcgaacaacgagaatcaagatcactgag

SEQ ID NO: 9053 - DNA, 100 bp, Homo sapiens
atacagaaggcagtaaacagcgaagtgcctctcagagtagtttagataagttagatcaggaacttaagagctggctttatgtgctggggcagaagagatc

SEQ ID NO: 9054 - DNA, 100 bp, Homo sapiens
tatttatgtcatcaagaagaatgacgatggcttacggagttcctatgctagtcagcatagtcagcttgggcaagaccttcgttctgccgtgtctcccgac

SEQ ID NO: 9055 - DNA, 88 bp, Homo sapiens
caacctcttcaaacgcatcttggagtcggagaggatggcaggggccggaggccagcaccaccctccgggcgccgctggaggagcggcc

SEQ ID NO: 9056 - DNA, 74 bp, Homo sapiens
gggagacataagtcccatgaggatcccagagttgtggcagctgaactgataaatttcaaacggaagagagtggc

SEQ ID NO: 9057 - DNA, 50 bp, Homo sapiens
caaacatgttttatcaatgcagctaaggtctggctctgggagaggagtgg

SEQ ID NO: 9058 - DNA, 95 bp, Homo sapiens
tggggagatgaacccaacctagtgggtgtaatacatcatgaactgcaggagacggtaaagaacaggtccaagaaaagctcaaagaaagcaaatac

SEQ ID NO: 9059 - DNA, 83 bp, Homo sapiens
gaaccttcagcatccccagctgccggtcttggcatcttcgaagtaaggagaggtaggagtcaatcccaccagcattgactcag

SEQ ID NO: 9060 - DNA, 75 bp, Homo sapiens
aagaggagaaggaaattgtcccgaatccctgcagtttcaagaccaacagaaaggggtgacaaaggttatgttcct

SEQ ID NO: 9061 - DNA, 75 bp, Homo sapiens
agcgcctcggccgaacccctccgcagcaggatttcagatgcatgccaggtttccactgattgccagaactcgaga

SEQ ID NO: 9062 - DNA, 100 bp, Homo sapiens
cgggtcaagtgcagtacctggatctcatcaaaaaggacaccagcaagctgttcaatgaggagtattggtaaaggttttcaaggtgtcatgaaaagatggg

SEQ ID NO: 9063 - DNA, 98 bp, Homo sapiens
cggcgcgctcggccgcctcaaggtcgcccaagtgaggactaccccaatggcacctggctgggcgacgagaacaaccccgagatgcgggtacgctgcgc

SEQ ID NO: 9064 - DNA, 90 bp, Homo sapiens
gcccaggtgagaaaggcccacctgtgtcctggttgagggtctccagggttctttggggcccgagacacattcctgaaggcgctaaaagac

SEQ ID NO: 9065 - DNA, 95 bp, Homo sapiens
caatggaagaaattgggaacattatcacaaagctatcatcctgccaaactccaggctcagatgtcacaggttttgactacaagacttgtaacgtg

SEQ ID NO: 9066 - DNA, 50 bp, Homo sapiens
ccagccctgggcagcgagctgcaaaaatttctctatgaatcatcatcaag

SEQ ID NO: 9067 - DNA, 75 bp, Homo sapiens
tgcaaacttaattaaagaactggccaggaccttaaaggctttgatccaggagagaaatactttcataacacatca

SEQ ID NO: 9068 - DNA, 90 bp, Homo sapiens
tgcccagtcagcaaaggttcagccctccaagattcgtgttcttctacaggaacgtggtgcccaggacaggcggatccaggatctggaaac

SEQ ID NO: 9069 - DNA, 100 bp, Homo sapiens
acggaagtaccgcgagcaaggagcgcggaatcggggagcgtccggagctagctggatcctctaggcagatgatagcaagttttcagaggctatcacagtg

SEQ ID NO: 9070 - DNA, 100 bp, Homo sapiens
atcatcatcatcgtcaaagaagaagaaaacaaaggtagaacatggaggatcgtcaggctctaaacaaaattctggcatcctctggtatcacgattccaaa

SEQ ID NO: 9071 - DNA, 83 bp, Homo sapiens
ggccttagctgtgctcgcgctactctctctttctggcctggaggctatccagcctcttttgtgacagggacggcttgttgcgg

SEQ ID NO: 9072 - DNA, 100 bp, Homo sapiens
tgcgagaaattgctcaggactttaaaacagatctgcgcttccagagcgcagctatcggtgctttgcaggagaaagtgatttctgagttccaaagtaaggt

SEQ ID NO: 9073 - DNA, 75 bp, Homo sapiens
atgattgaggtagatcctggaaatattgtcagcagcctcccgcgacgatgcccctcaacgttagcttcaccaaca

SEQ ID NO: 9074 - DNA, 74 bp, Homo sapiens
ttgcagagcctgcggggcaagatctggcgatgccagtccctccactccagaggagaacgaaaccacgacaacca

SEQ ID NO: 9075 - DNA, 108 bp, Homo sapiens
ctacgcttcccaaaccagttcagaagccacccaaaagtaatgttaacaataacccaggaaatctgaaatagagtactatgctatgttggctaaaactggtgtccatca

SEQ ID NO: 9076 - DNA, 100 bp, Homo sapiens
ggtcttctccttccttttagtgattgcttcagggaaccgtgtaatcagaatgcccagacgaatgcagcttcgtttgatctggcagagaggctgatgacat

SEQ ID NO: 9077 - DNA, 50 bp, Homo sapiens
caccaagatgcctacatccgggtattggcaagcttgccagtgtacctgct

SEQ ID NO: 9078 - DNA, 90 bp, Homo sapiens
ccttttggaagctcagataagatggaggaaaatctcttttgtgagccacataaaaggggactaatgaaaacacctctgaaagaatccacc

SEQ ID NO: 9079 - DNA, 100 bp, Homo sapiens
ccaacagcagccccgcggccggcccggcagcgcccggcccccggctcagcccccggagtgcggagccgaccagttacgagagaagcaagcatatgttgag

SEQ ID NO: 9080 - DNA, 74 bp, Homo sapiens
gtcagccgatgcaccgagtccagcccaggaaaatggagagcaacggcagcctttaacagttgagcacatgtatg

SEQ ID NO: 9081 - DNA, 100 bp, Homo sapiens
ttggctgatgctttggatgatcaagatgatggccgcaggaaaccgggtataggaggaagaggtttaccgacaagactgtgaaactttcgggatggtggtg

SEQ ID NO: 9082 - DNA, 82 bp, Homo sapiens
gctgagggaccgcggggttagccactgctggctgcttccagtgttcgccgagaggagccttcacgtaaatgggtccagtcat

SEQ ID NO: 9083 - DNA, 100 bp, Homo sapiens
cagctccgtctcggcggcggcgggcttttgtggccacaggaaccaatctgtctctccagttttttccggccagctggcagggagaacagcgacaaacacc

SEQ ID NO: 9084 - DNA, 75 bp, Homo sapiens
cagcttttcagaactgcagggaaacagccatcatgagttttacagctcccagcacagtaggaaagagaaatttga

SEQ ID NO: 9085 - DNA, 75 bp, Homo sapiens
tggacataaagaagttggatgcctggtcccaagcctcttttgccatggttgactatagtcaatggggccaatgga

SEQ ID NO: 9086 - DNA, 100 bp, Homo sapiens
ggccaccgcctcagcgggagaggagtctccaccaggactgaccgctgccgcccagcacgtccagacaagcaaagtggatcagcaaaggctgcagtcacca

SEQ ID NO: 9087 - DNA, 98 bp, Homo sapiens
taattttagggtcctttatatagaagggagagaactactataatgtctccagggatcctgtggtcatcaacaaagtcttcaaggactggaagcctggg

SEQ ID NO: 9088 - DNA, 83 bp, Homo sapiens
gggtctgacccggctagtcgtccccgagcttcatggcggctgaagagatgcattggcctgtccctatgaaggccattggtgcc

SEQ ID NO: 9089 - DNA, 75 bp, Homo sapiens
ctcagttgtccatgaccctgaaggtccaggagtacccgaccctcaagaacacgatgatgaacgcgttaatttccc

SEQ ID NO: 9090 - DNA, 83 bp, Homo sapiens
atcgaagctctagaaatgaatgtttccatctcttcagagatgaaccaggatgacgacctcaggcgcgctctttccaagcctgg

SEQ ID NO: 9091 - DNA, 75 bp, Homo sapiens
caacgagaggaacgtgtccacgcgccagggtgagcgagtgctgtgctttcatgggcctcttctttatgaagcaaa

SEQ ID NO: 9092 - DNA, 78 bp, Homo sapiens
agagtacgatctgaaggaggggcttctggttagcccaggcctctctctggaacgcctacccaactccatcgcctcccg

SEQ ID NO: 9093 - DNA, 82 bp, Homo sapiens
ggatgagtatgcggaggacagctctgatgaggagatggagtctcgctgtcgcccaggctggagtgcagtggcgcgatctcgg

SEQ ID NO: 9094 - DNA, 83 bp, Homo sapiens
ctgtgcctgaggagctggtgaagccagaagagctcagcaaataccggcaggtggcagtgctccttttggacttttctctaggt

SEQ ID NO: 9095 - DNA, 48 bp, Homo sapiens
cggggcagccgccgctcctccgggatgatatcatcaagttgaatcgaa

SEQ ID NO: 9096 - DNA, 75 bp, Homo sapiens
ccgagacaccttgcagctgccgccgccgccaccgagccgccgcgtgctggagaatctggtaaaagcaccattgtg

SEQ ID NO: 9097 - DNA, 100 bp, Homo sapiens
gctgctggtagttccatgctgtctgttcagacttcagcttggtgacctgctgaagttcccatgatgtcacccaatggatccattcctcccattcatgtgc

SEQ ID NO: 9098 - DNA, 100 bp, Homo sapiens
gcattgggggaaccagtgggccccacgtgggtaaaaagaaaatgcatccgatgcagatttatggctcctgaacagttgcactgtaaaaaacccagctgaa

SEQ ID NO: 9099 - DNA, 117 bp, Homo sapiens
tctaatggaatcaggcagttttgtgtccatgtgaacaactggagacttgcagctcctctgctgaaacgtttaagcctctccacatccaaattgaacagcctggccatcggtctgcga

SEQ ID NO: 9100 - DNA, 50 bp, Homo sapiens
gttcgacaagctgctgatgactgtgctttgtgtccctggtgatgttggaa

SEQ ID NO: 9101 - DNA, 83 bp, Homo sapiens
gagttcatgcaaagcgctgagaacaggaccccccgcccccatatgtaactggttcatcaatgcccggcggcggcttctcccag

SEQ ID NO: 9102 - DNA, 50 bp, Homo sapiens
gtgaaggaggatcctttgtagatgcatgaataactgaagtgaagtgatgg

SEQ ID NO: 9103 - DNA, 82 bp, Homo sapiens
ggttctgcagaaggttgtgactttagtatacaaagttgattcaagtcagttgagacgccagttgtgtggaggaagtcaggcc

SEQ ID NO: 9104 - DNA, 90 bp, Homo sapiens
cagaagcccttgtccttgaagctgcaaaccaacgcgtggcggctgagcgaggtgaacgaggacttcagcttgtgccccagatacccccgt

SEQ ID NO: 9105 - DNA, 50 bp, Homo sapiens
ggaaaacatatccattaaatggggaaaagctcaagactgttattttatga

SEQ ID NO: 9106 - DNA, 75 bp, Homo sapiens
ccaggaactcacagagtggattccgaaaacttggaatataacgtggagcctcaagaaatctcacaccctgacgtg

SEQ ID NO: 9107 - DNA, 75 bp, Homo sapiens
gtcaactgcatggacaacgcggaagcccagttcaccacggccctgcgggtcaaaatgcagatcttcgtgaaaacc

SEQ ID NO: 9108 - DNA, 75 bp, Homo sapiens
acccagagccctggaacaaactgggtcccaatgatcaatacaagacggtctggaaaatcccgaagcagaagcccg

SEQ ID NO: 9109 - DNA, 100 bp, Homo sapiens
agagttctgcgttttgccagtcacctctcaactgtgtgccaaagttgatgcggatgaaattaaaaggctaggaaagagatttaagaagcttgatttggac

SEQ ID NO: 9110 - DNA, 50 bp, Homo sapiens
ctggaacaacctcttggaaatgagcagaggcatgaccattcggcccctgg

SEQ ID NO: 9111 - DNA, 121 bp, Homo sapiens
tggccgctatcatcccagcagtggagttcagcccactactctgaaccaggtgagaagccctaccactgcaactgggacggctgcggctggaagtttgcgcgctcagacgagctcacgcgcc

SEQ ID NO: 9112 - DNA, 100 bp, Homo sapiens
gaagccctttctcctcggcactgtattctttacctgcttcccaatcccactgatgaggatcagcccatggccaaagcttacttgaggattgctgtggaag

SEQ ID NO: 9113 - DNA, 100 bp, Homo sapiens
ggctgcggtggcttcgtcaagtcggacgtggagatcaactactcgctcatcgaggaggccactgtctgcagctcccgtgaagatgtccactccagaccca

SEQ ID NO: 9114 - DNA, 75 bp, Homo sapiens
cagtgcttttgccacattcaagaaaacctatttgattctttgacaggccagccacatcctgaagatgtactactg

SEQ ID NO: 9115 - DNA, 82 bp, Homo sapiens
cgctggcagccgcggatctcaccgccgctcaggaacccagcgggtgccgcttctccacccgaggcttccacctccaacgagc

SEQ ID NO: 9116 - DNA, 98 bp, Homo sapiens
ggacccatcggcgcgctgcccacacctccaggcgaccggttggaagctgaaggtgttcctgaagtatctgaaaaatatgaaattagctctgttcccac

SEQ ID NO: 9117 - DNA, 74 bp, Homo sapiens
ccaaggtgtacttcatctacgagggtgtccggtggagagctgtttgaccggatagtggagaaggggttttatac

SEQ ID NO: 9118 - DNA, 80 bp, Homo sapiens
cggagacgatgcgccccgcgcagccgcctgcgcctgcgggagccgtttggtgcacctcgatttggaggaagtagggcagg

SEQ ID NO: 9119 - DNA, 75 bp, Homo sapiens
tacatgcatgcaccaaaacgaggacaggaattaagtagactggctggacagattcgaaggttgtatggttcaaac

SEQ ID NO: 9120 - DNA, 75 bp, Homo sapiens
gtgttgtgtggaagccagaacatcgttctcaatggcaagatgaggaaaatgaagctcgggctggttaactgactt

SEQ ID NO: 9121 - DNA, 96 bp, Homo sapiens
taggattaacaacttggaaaaggcctatgatactcctgcttcttccagaccagctggtcttgcttctggagcatctcttggagcagaagactctga

SEQ ID NO: 9122 - DNA, 75 bp, Homo sapiens
gaacaatacgagcagatccttgcatttgtccaagagatgtggtctcactatgttgctcaggctaatctcaaactc

SEQ ID NO: 9123 - DNA, 90 bp, Homo sapiens
tcagtatatggatacggagtacaaaaacggcccttggatgatggagaactgacatctcagttgttagctgcagaaaataaatgcaatcta

SEQ ID NO: 9124 - DNA, 101 bp, Homo sapiens
tgtttcgtatgaatccttcaagaagcaggagaggagaggtgaccacctgagaaaggccaagctggagcttgactcagggacgtgacgtggttgagttaggg

SEQ ID NO: 9125 - DNA, 75 bp, Homo sapiens
attgactaccacaaaaccttggccgttgggccggagcactagcctcacggagaaggatctgaaagaagccaaggc

SEQ ID NO: 9126 - DNA, 82 bp, Homo sapiens
ccaatgtgggatcgatgtttcaatattggaagcgctttgatttacagcagctgcagttggaatcgaagcctcttaaaatggc

SEQ ID NO: 9127 - DNA, 48 bp, Homo sapiens
cccgggaattactgcaaaaatggtgacttcatggtcatgacgattttc

SEQ ID NO: 9128 - DNA, 100 bp, Homo sapiens
tgataatactcagaatcaggagaaggaaatgctgcttagattaaatgcgttgttggtgtccggctttgctggcccagcaagcctgataagcatgaagctc

SEQ ID NO: 9129 - DNA, 87 bp, Homo sapiens
actggctaccgttcggactatttgtagtcatgtacagaacatgatcaagggtgttacactgaggatattcctcaaagcagaaagtga

SEQ ID NO: 9130 - DNA, 137 bp, Homo sapiens
ccaagatggcggaagcggaggagtctccaggagacccggggacagcatcgcccaggcccctgaagacgtgcgatgggacacatttcccctaggccgaatgccaggtcagaccgaggacccagcagagctcatgctgg

SEQ ID NO: 9131 - DNA, 90 bp, Homo sapiens
agcttcgccagcaagcggcggagctgcgcctcggcccgctcttctccctgcttaacgagaaccataggcgggcagggctgggcagcggcc

SEQ ID NO: 9132 - DNA, 74 bp, Homo sapiens
catggacaggacaactatgaccagctccgggttgacaaatggtggggtaacagaaaggaactggctaccgttcg

SEQ ID NO: 9133 - DNA, 100 bp, Homo sapiens
gctcgaagggatactggttcgtccttactgcggaaagcttgtcctggtataaagatgatgaggaggcaagtgaggcctatctggttggcctttttgaaga

SEQ ID NO: 9134 - DNA, 100 bp, Homo sapiens
ctgggggctgcaggcgcgctagaggcatggctattgcaccttgggagaagcctttaatcggttagacttctcaagtgcaattcaagatatccgaaggttc

SEQ ID NO: 9135 - DNA, 76 bp, Homo sapiens
agtggaaccttatgtgacctgggggtgcccgaaatcaggtggtgataagagcagagccccaactctgtgccttgtg

SEQ ID NO: 9136 - DNA, 98 bp, Homo sapiens
atctgtagatgctgaaaaatcaatgctgtccaaacttaaacatgacttcccagactcccggccagccatcgaggacctcaagtactgcctggagagga

SEQ ID NO: 9137 - DNA, 75 bp, Homo sapiens
agctcaccatggctcaacttactcagttaacacagggccacatgcaaataatacggcactccgaacagacactaa

SEQ ID NO: 9138 - DNA, 99 bp, Homo sapiens
aagcagcagagtttctacaaatgctagaagctatcaaagcccttgaagtcaggtttgttgataagccggggcccttcgtgggaccctgcggtcactgga

SEQ ID NO: 9139 - DNA, 75 bp, Homo sapiens
gagtgaccatgcagcaaaagaaggagggtcctctcagtgattaaggtaagaatgattgatgttggctgatattgg

SEQ ID NO: 9140 - DNA, 87 bp, Homo sapiens
tgtatgagcttctaactcattgtattcctcctgagataataatgaaggtggagtacatcctgctgcttcaagggtagaagactcctc

SEQ ID NO: 9141 - DNA, 143 bp, Homo sapiens
gggttttggccaaattgggcgagggcacaaaataaccacttaccccttctcaccgaggaagagcgggagaaagggttagccaatatacctttgctatgtgcagttatagagaaaagaagtctgaaccacaagaattaatgcag

SEQ ID NO: 9142 - DNA, 83 bp, Homo sapiens
ccttcgggcaaacaggattccacagtgtcctctggaaaatgacatagggcctgattacattccaacagaggaagaaaggagag

SEQ ID NO: 9143 - DNA, 100 bp, Homo sapiens
caggaagttgcccagggaggaagaagaagaggaggaggacgatgacgaggaggaaaaggcccctgtgacctgtactccaaagattcaggtttactcacgt

SEQ ID NO: 9144 - DNA, 83 bp, Homo sapiens
cttaaggtcttcagcggggcgctccaggaggcactcacagtttgacaagtatgcgcccaagctggacagcccctacttccgac

SEQ ID NO: 9145 - DNA, 100 bp, Homo sapiens
agggacataccactatatcagataagcttgacattacagccaagatggtgctgtcccagagacaacgagatgaactcttaatcctgattatcgagatgcc

SEQ ID NO: 9146 - DNA, 98 bp, Homo sapiens
cgaggggcttcataccagctgaagagcgacaagccgctggcagccgcggatctcaccgccgctcagggttaacacagaaatctgcctcctgggccatg

SEQ ID NO: 9147 - DNA, 88 bp, Homo sapiens
cgtcgcggggctcccgggagcggcccttagcgaccccgcccgggccccctcagacaccatgaccacccttgatgataagttgctgggg

SEQ ID NO: 9148 - DNA, 74 bp, Homo sapiens
gtgcaggcgcttcaccacagacggattgacgtgtctcagaatgaccttccttgggaatttatggtcgatcgtct

SEQ ID NO: 9149 - DNA, 51 bp, Homo sapiens
tacgcttgtgtgataaaactgggactgacaatcacctgaaacattatttac

SEQ ID NO: 9150 - DNA, 100 bp, Homo sapiens
gaaaatggactccctggctgctggagagttgaatgccagccaccagccatggtgtgcaggatgacagaattcgagtcgaaaggatggataacatttattt

SEQ ID NO: 9151 - DNA, 74 bp, Homo sapiens
aaatttcggtagccatggcacaagaatatagttgctgcttttgctcagaggacatccatgaccctaatggtctt

SEQ ID NO: 9152 - DNA, 60 bp, Homo sapiens
atatatgttctctaggccttttagaaaacatggtttggagaaaattgaagttttacagca

SEQ ID NO: 9153 - DNA, 74 bp, Homo sapiens
ctcctactcatctattttgaataaatcagaaactgggaataaccagcaagtacctgtcaagaatgaagtagatc

SEQ ID NO: 9154 - DNA, 50 bp, Homo sapiens
aaatgtgccacatattcatgcaaggtggttatcactaggctaaaactgga

SEQ ID NO: 9155 - DNA, 88 bp, Homo sapiens
ggccgacttcgatgatcgtgtgtcggatgaggagaagtggggtgccgaggctcaggcagcatgacgacggagacctttgtgaaggata

SEQ ID NO: 9156 - DNA, 85 bp, Homo sapiens
cggcctcaccatacaggaacagggcagacgttagcgtgagtgatcactctcaatcccggctctacgtgtcatctgacttggggaa

SEQ ID NO: 9157 - DNA, 58 bp, Homo sapiens
cacagtgggggtgtgcaaacccgagagaactggacagcaaggccatcgtggacgggaa

SEQ ID NO: 9158 - DNA, 97 bp, Homo sapiens
gccattctatgctgtggaaaagaaagcatactgcgagccctgctacattcagggagaaggttttaaggtgaaaacgaagaaagaaatccggcatgtg

SEQ ID NO: 9159 - DNA, 100 bp, Homo sapiens
taatggaaaatcgcttggttaaaacctgacacttttaacagaatgacctggatgaccctgaaagaggaatgatttttgtctgctctgcaacccataaaac

SEQ ID NO: 9160 - DNA, 100 bp, Homo sapiens
ccttacttcctgcttaagccagcacagaagtgtctggagtggttgattcacaggcccagcagcaaagaaacctggataacatcgtcttgcaacaacccag

SEQ ID NO: 9161 - DNA, 100 bp, Homo sapiens
ctcccattcacaaggcagctcgctctgggagcctagaatgcatcagtgcccttgtggcgaatggggctcacgtcgaatggttacgccccaaagtctgttt

SEQ ID NO: 9162 - DNA, 100 bp, Homo sapiens
acctacactagtcgcgggagccacgcagaggacgccggaacaccctggaagccgagaaatggtctcggcgcggaagatggccggcggcgtggacggcccc

SEQ ID NO: 9163 - DNA, 117 bp, Homo sapiens
gtgagaggctccaggcctagcctgtttgctgtgaggacactgaggaatagtgaggctttttcagccaaccaagtgccggagaagctggatgtggtggtaattggcagtggctttggg

SEQ ID NO: 9164 - DNA, 100 bp, Homo sapiens
gtggcgctggatccggcagcagctgattgaagataaaactttccaagtccttggtaatctttacagcgagggagactgcacttacctgaaatgttctgtt

SEQ ID NO: 9165 - DNA, 98 bp, Homo sapiens
ggcattggagcaagccaagaaagaatccgaagatcagaaacgcttctcacctggggcgggtgggttctgcaccaccctcccaccctccttcctccgtg

SEQ ID NO: 9166 - DNA, 50 bp, Homo sapiens
ctgtgccgaggcgcccaactcagttcatcagagaagatatgaaatataaa

SEQ ID NO: 9167 - DNA, 50 bp, Homo sapiens
ggctagcactgaaactgcttttcaagatcctgaggtgcagaggcaattcc

SEQ ID NO: 9168 - DNA, 100 bp, Homo sapiens
taggcagcttagggctgtttcgaaagctgactgccaaggatgcctcttgcctctttcgggccatttcggagcaggtgtcctgtgatgctggtggtaggag

SEQ ID NO: 9169 - DNA, 75 bp, Homo sapiens
agactgaaatacattggaaactgattccaattacaggagcgaatccgtttagctcgacagattgagaaatctgag

SEQ ID NO: 9170 - DNA, 75 bp, Homo sapiens
gggaagatttacacagatggaaccagaaaagatacgaggctctaggagagatgccttcaattaagttgcagagtt

SEQ ID NO: 9171 - DNA, 90 bp, Homo sapiens
caaatccgggggcaaggccaaaaagaagctggtgggccagccggccgtacacttgaagcgtgacttcttcctggccaatgcgtctcgggc

SEQ ID NO: 9172 - DNA, 89 bp, Homo sapiens
aggagtcttctggtgcagtcttattttgaaaagagtgcctggtgaagaatgtgatgggatcactagcatgtctgcggagagcggccctg

SEQ ID NO: 9173 - DNA, 90 bp, Homo sapiens
gcccgacgaggaagttttctactgtaaagtcaccaacgagatcttccgccactacgactcttgaatgtcgtctctcaactagccaaacgg

SEQ ID NO: 9174 - DNA, 98 bp, Homo sapiens
ttgaatggcaactgatacataataagacacaatctattctgctgattcacaattatggagactgtatagagccacgaaccccctgaacaaggagctcg

SEQ ID NO: 9175 - DNA, 75 bp, Homo sapiens
agcgcgggatcccagcctcaggcgtgcgcggacggtgtgcgggcctgagacctgggaggaagctggagaaaagat

SEQ ID NO: 9176 - DNA, 117 bp, Homo sapiens
aactctaacaaggggagcttttgttggggcgacagctgctcctggctacatagctccagattagtcagaagaagttgaaaaaatacgagaaagaatatcacaccatgagggaacagc

SEQ ID NO: 9177 - DNA, 90 bp, Homo sapiens
ctttctacatgagggataatgaagatggccctcagcacacgccccattgacaaaccttcagattctctcagtatagggaacggtgataat

SEQ ID NO: 9178 - DNA, 97 bp, Homo sapiens
tcaacaccacctgcaagcacctgccggctgtcgacttcttcagcggggacgtcatgatccacccggtgaccaaccgcccggccgacaagcgcagctt

SEQ ID NO: 9179 - DNA, 100 bp, Homo sapiens
aagaggacgaggacgacgaggaggaggaggaggaggaaaaagaaatgtgaacataatttgagcaagccagaatttaacccaacgtcaatcaaattcaaaa

SEQ ID NO: 9180 - DNA, 100 bp, Homo sapiens
atgaggtgggggtggccattcaggagaagctcagggagcaggtggtgaagcgtgaggagctcttcatcgtcagcaaggactgcaagatggaggaaggcgg

SEQ ID NO: 9181 - DNA, 82 bp, Homo sapiens
gcagccttctacttgtcccatgagggtctccgtctctccaccgggggcttcatccttccagggaggagaagagggactccag

SEQ ID NO: 9182 - DNA, 100 bp, Homo sapiens
tcgacatgtttctccagtgacacctcccagagaagttgagcacatggatgaagtatgctcctcgcagcttctaacttcagtaaggcgcatggttttgacc

SEQ ID NO: 9183 - DNA, 51 bp, Homo sapiens
ctccctagtagctgggactacagggctgcaagtggaattcatcaaccccat

SEQ ID NO: 9184 - DNA, 50 bp, Homo sapiens
ggagccatgggagctgcggctgcagtaaccccccgcggcctagcctggag

SEQ ID NO: 9185 - DNA, 100 bp, Homo sapiens
ccgcggcggggaaaatggcggacgggaaggcgggagacgagaagcctgaaaagtcgcagcgagctggagccgccggaggaacatcaggagagcattctgg

SEQ ID NO: 9186 - DNA, 76 bp, Homo sapiens
gcataggcccgagtccctgtcacccgagctgtgttggggtggaagaggaggaggcgcccgacatcgacatatacca

SEQ ID NO: 9187 - DNA, 100 bp, Homo sapiens
cggctactgccgcttcagttctcccggtgtggccacgagtcgggccgagacgcatccagagctttcgtgaccggggactgttctgaagcaggcctcgtgg

SEQ ID NO: 9188 - DNA, 100 bp, Homo sapiens
ttggcagctgcagagccagatgatccacaggatgctgtagtagcaaatcagtctgacagcaatgcaagcttcctccgtgctgccagagcaggcaacctgg

SEQ ID NO: 9189 - DNA, 90 bp, Homo sapiens
gctgggtgtgaccaagcaggatctgggcccagccctaaccagagttaccagggcagcagcggctacaacttccggcccacagatgcccgc

SEQ ID NO: 9190 - DNA, 75 bp, Homo sapiens
agcagttcaacgagaatgaagccatccaatggatgcaggaaaactggcgccatgtcagaaccggctggggatgtc

SEQ ID NO: 9191 - DNA, 50 bp, Homo sapiens
ctcctccgtttctgtatccccacgagatttggagcaagaggtggtggtgg

SEQ ID NO: 9192 - DNA, 82 bp, Homo sapiens
tgcttgggatcctttatcctggtcatcttctatttccaaagtatcatgatattagctggtttgacatcaagtcatttgtgag

SEQ ID NO: 9193 - DNA, 78 bp, Homo sapiens
atcatgtgtgtcagcatgagaggctgacttgacaggaattaagtggaaaaaatatgtatggcaaggcccaacttctgc

SEQ ID NO: 9194 - DNA, 88 bp, Homo sapiens
acaatggaagatatagataagaatgctgatggtttcattgatctagaagagtatattgacggcaccgaaagcgaaggaagctcctgct

SEQ ID NO: 9195 - DNA, 75 bp, Homo sapiens
tttgccctcagcatctcccttcatgtctgggtcatgttgattatggaagattcccacaagagtaccacgtcagag

SEQ ID NO: 9196 - DNA, 75 bp, Homo sapiens
agtatttgttggccaaacaactagcaaaacccaaagagaaaattcccatcattgacgctgccaaggtctgcagag

SEQ ID NO: 9197 - DNA, 83 bp, Homo sapiens
cgctagtctgaccctccgccaggcaaaaggaagaaaccaaggtgtatgttggtaacctgggaactggcgctggcaaaggagag

SEQ ID NO: 9198 - DNA, 74 bp, Homo sapiens
tcagcaggagcttcatcaacgatatatgtcagatctaaaggattttctgccgtctcttggcaaaaatggcaaat

SEQ ID NO: 9199 - DNA, 100 bp, Homo sapiens
tttcagcctgcccttgccagtgcctgggccgctgggagccgttattggctgccgttaaggaccgttacgtttcccgggctggagtgcagtggcacagtct

SEQ ID NO: 9200 - DNA, 74 bp, Homo sapiens
gtatttcatgggaagctcttagatgcacacaagtgtggagagtgaggcgaatctccattcttcctccagcactt

SEQ ID NO: 9201 - DNA, 100 bp, Homo sapiens
ccccaacattgacctcgagggcaacgtctgcctcaacatcctcagctgtgccataagtaacgtgaagaaggtgtccctggaactgggcgggaagtcaccc

SEQ ID NO: 9202 - DNA, 50 bp, Homo sapiens
gtcgggctctggaggaaaagaaagtgttatgtgccaagaaccttgcaaag

SEQ ID NO: 9203 - DNA, 75 bp, Homo sapiens
ttggaggaactggcccggaaacaggaggaccctctgaagagccaatccattcaggatgggaaaccacgcaggcaa

SEQ ID NO: 9204 - DNA, 100 bp, Homo sapiens
cagcaggctccgggctgaagattgcttctcttctctcctccaaggcttgtaattccacatctgaagtcaaagatctattggaacagaaaagcaagttgac

SEQ ID NO: 9205 - DNA, 100 bp, Homo sapiens
tggaaagtcttgacttgactggatagagggaggaatcagcagcttggaaattcaagcacgtgatctggcgggatgggcgtttgcctaacgtatttaatgg

SEQ ID NO: 9206 - DNA, 51 bp, Homo sapiens
ggccacattcctgtccagtgaggcgaaaaagggtgcagacgtctggttcaa

SEQ ID NO: 9207 - DNA, 85 bp, Homo sapiens
tccaatgagacagggcacaccaaactccatctgactgattcttgctattccaaatcctcttccacgttgacagcccttcagatat

SEQ ID NO: 9208 - DNA, 80 bp, Homo sapiens
caggactaaggacaagcaggagctgggagccccagattgcctgtgccgctgttgactgtgtcaaagacaagaaccaagac

SEQ ID NO: 9209 - DNA, 98 bp, Homo sapiens
cactaatgccatcttcaaagcctttgctatgatcattgacaaactggaagagatggcctgatatgaaggagtcacgcctcccgcctcccggagctgcc

SEQ ID NO: 9210 - DNA, 135 bp, Homo sapiens
aacttttacaatttccactggaactgtgttcagattcacttccttctcatccttttccaccagctaaagcaacacagtcactcctggcggcaaaccaaacaaaaccagagtcatctggggaaaagtaactcgggc

SEQ ID NO: 9211 - DNA, 80 bp, Homo sapiens
aagagaatgctgcagaatttttgaagcaacataattcagagtggagtcaacatatcaatggagcaagtcacagtcgtcga

SEQ ID NO: 9212 - DNA, 100 bp, Homo sapiens
cctcaatgacgtccaggaccggtttgaagttaatgtggcagaacttccagaggaaatcgacatctccacatacagccggccttccagcatgtacttccag

SEQ ID NO: 9213 - DNA, 50 bp, Homo sapiens
caagcagcacgtgctcatccacactcagctggagtgcaatggcgtgatct

SEQ ID NO: 9214 - DNA, 90 bp, Homo sapiens
gtcaaagctgtttggagaaaatcagaagtacagttttatctagccacatcttggaggaattgaatgatctggcacgggaccctccagcac

SEQ ID NO: 9215 - DNA, 75 bp, Homo sapiens
acgacagcaagagggacgttgtgaagattagtcagaagaagttgaaaaaatacgagaaagaatatcacaccatga

SEQ ID NO: 9216 - DNA, 112 bp, Homo sapiens
aatttcgatcgttttcggaataattctttatcaaaaccagatgattcaactgagatttgccagtgatgggaagagttagaaacaggatgcccagcccttctcgcctcaagag

SEQ ID NO: 9217 - DNA, 51 bp, Homo sapiens
tcccacttgttcgcggcctataggttgcacagagcattgaggatcaccatc

SEQ ID NO: 9218 - DNA, 100 bp, Homo sapiens
gatctgatcacctgtctggagcaaggaaaagatccctggaatatgaagagacacagtatggtagccacacccccaggtcggattgtttgtgctgaacgaa

SEQ ID NO: 9219 - DNA, 100 bp, Homo sapiens
caaaattggagagactgccatgaagcaagagatgagtatgatgtatgtgccatttgtttggatgagtatgaagatggagacaaactcagaatccttccct

SEQ ID NO: 9220 - DNA, 104 bp, Homo sapiens
agagcgccgagcggtggcgtcgttgtcgccccctcctcgtcgggaagaatcgtttggtctcctgccgtgcccggtgctggagaatctggtaaaagcaccattgt

SEQ ID NO: 9221 - DNA, 50 bp, Homo sapiens
gccgccgccgctgccgcttccaccacaggctacagaagaagtttccaaaa

SEQ ID NO: 9222 - DNA, 112 bp, Homo sapiens
tcggctcatgttctgggacttaggagggcaggaagagctgcagtctttgtgggacaaggaatccctttgcccacgtccagctgaagccgacagtgaccaacgacaggtctgc

SEQ ID NO: 9223 - DNA, 50 bp, Homo sapiens
cgccgcggctgcccccaccgggaccgaggggacatcacccagaagggcta

SEQ ID NO: 9224 - DNA, 101 bp, Homo sapiens
cgggatgtagcgcgggggaccgcggcccccagcagagcccgcctgcccggctggccgttgctccagggagaactgcaaatatcttcatccacccccacatt

SEQ ID NO: 9225 - DNA, 100 bp, Homo sapiens
agcagccctggtgtcacctatcagtaaaaggaccgccgggagagcctgcccacctccccaccctggacgccgggcgcgtcccggccccccagcagcctag

SEQ ID NO: 9226 - DNA, 75 bp, Homo sapiens
cgcagtgagatggtgacactgaaagttgcaggtggcgacatgtctaagaatgtgagccagtcacagatggcaaaa

SEQ ID NO: 9227 - DNA, 50 bp, Homo sapiens
gacgaagcttggaagttgcagaagattagatacacaacactctgaagaca

SEQ ID NO: 9228 - DNA, 82 bp, Homo sapiens
gaaaggatcatgaactagtgacctggaaaggtgtcccgacccaggctaagcttgagcatggctgagcaggagcccacagccg

SEQ ID NO: 9229 - DNA, 100 bp, Homo sapiens
agctccacgctcagcctcagaagaaagacgttcaacgacttactggggagagaaagaaaaggaacgggagctgagagggaggaataagtttttttcatct

SEQ ID NO: 9230 - DNA, 92 bp, Homo sapiens
ggatattatagatattcagaagaaggatgctgttaaaagttctgaatgcagtgatggggaatggtctgcttctttgcctcatcgattttctg

SEQ ID NO: 9231 - DNA, 83 bp, Homo sapiens
gttggacgtggggaatttctcctggggctcagagtattactgacagccctgtcctaggagcacaacgtccgagaaatgctcag

SEQ ID NO: 9232 - DNA, 101 bp, Homo sapiens
tacaaagacaaaaggagattctgatgaagaagttattcaagatgaccaaccctggaatggtccccagccatggattcagtcccagatcttatttctttgac

SEQ ID NO: 9233 - DNA, 74 bp, Homo sapiens
tagaagccgtgacccagggccatggcgcttacctgatgagtcaggatgctccgaattctccctctgaagcacag

SEQ ID NO: 9234 - DNA, 75 bp, Homo sapiens
caagaactggctcaagaaatttgcctcgaaaaccaagcacaattctgctttcccaggaactgcatcactcaggac

SEQ ID NO: 9235 - DNA, 100 bp, Homo sapiens
tccgaagatcctaatgaggacattgtggagagaaacatccgaattatgcatcttgacagcagtagcaatgagcgtccagacatcagttccatccagagac

SEQ ID NO: 9236 - DNA, 100 bp, Homo sapiens
gcagccttcagggagcgtggagacagcatgatgccttcttctgtagagtgggcgctttgcagaatacgtgttgaatgaaatcactgatctaggaaaagta

SEQ ID NO: 9237 - DNA, 100 bp, Homo sapiens
tctggagagataacacataccctgtcctgcctcagcttatcagatgaccttgaatgatgccatgaggaacaaggcaaggctgtcaattacaggaagtact

SEQ ID NO: 9238 - DNA, 82 bp, Homo sapiens
ttcgcattttggcattgacatttaattttagggtcctttatatagaagggagagtagatgatgacacagacatgtataatac

SEQ ID NO: 9239 - DNA, 90 bp, Homo sapiens
cacaaagaatgaacttgttcaatacaatcaaagttatgatggttaacggtgatcacaggataggtatttttgccaagagagccatccaga

SEQ ID NO: 9240 - DNA, 88 bp, Homo sapiens
cccgcggccggagaagggctgcgggttagggggccggcgcccgcggttcaggtactcagaccccacgcagtggacggccttcctgggc

SEQ ID NO: 9241 - DNA, 100 bp, Homo sapiens
tgtctttcatgcatatggagggagatctcatgttcttgtgtggcttcctgcttcagtgctgtttgtgggtataatctatgctgggtccagagcattgtcc

SEQ ID NO: 9242 - DNA, 50 bp, Homo sapiens
gttggttcccctctttgacctgactgcacagcaggcatcttcatcctcac

SEQ ID NO: 9243 - DNA, 104 bp, Homo sapiens
gccccaggtgtaagcgcagaaagcaggcgaacccgcggcgcaataacgactaatagggatgccaaaggaaaaatatgatcctccagatcctcgcagaatttata

SEQ ID NO: 9244 - DNA, 100 bp, Homo sapiens
tatcaagttagcatttacagatatggctgaggagaatatccattattatgaacaggtattacatgaaacctttcctaaacatacatttctgatgaacggc

SEQ ID NO: 9245 - DNA, 74 bp, Homo sapiens
gtcgtcggggacctaattacacctccggttatgccctactgccaataaagggaaaataagagatgctcatcgac

SEQ ID NO: 9246 - DNA, 75 bp, Homo sapiens
tttactccatgcagttgtcaggagtgtaatgttcaagctcagaaatgccttatgtggatcgtcagaatcgcattt

SEQ ID NO: 9247 - DNA, 82 bp, Homo sapiens
aagtcccacgcgttcttccgcagcatagactgggacttgatgatgtctaccgtagaaaagcctcagaaagacagtatcagag

SEQ ID NO: 9248 - DNA, 100 bp, Homo sapiens
gccgctgctacctgcagcgccgtgtggcacgacacaaaaatcaggaaggggaacagtttgtgaagaaaatcggtggtatttttgccttcaaggtgaaaga

SEQ ID NO: 9249 - DNA, 82 bp, Homo sapiens
ggctgcggcgtgtgcgcgcccgccagctgctccggagatacgatggagaacttaatgttctggatgatattttaactgaagt

SEQ ID NO: 9250 - DNA, 98 bp, Homo sapiens
gataagccctatgcctgtgacaccaccttctgggtgaaccctcagttcaagatccggctggatgagacggatgacccggacgactacggggaccgcga

SEQ ID NO: 9251 - DNA, 83 bp, Homo sapiens
ctccactttcgccagcccgtgccgcgagcgcggcctgcaggaggggctttgttatgcacctaaagccatattggaagctccag

SEQ ID NO: 9252 - DNA, 100 bp, Homo sapiens
gtcggagctcggcaggaagtgggaccggtgtctggcggatgcggtcgtgaagatagggtatttgaagtataccatacaactgttttgaaaatccagcgtg

SEQ ID NO: 9253 - DNA, 100 bp, Homo sapiens
aaaaatataataaggctgagtgcggagccaagagatctgaaactggacaatgtcctgttggaccacgagggtcactgtaaactggcagacttcggaatgt

SEQ ID NO: 9254 - DNA, 101 bp, Homo sapiens
gacaagtaacatggacaaactattgccacattcctcagtgctcacttggaatacagacttaaccaccaccatgtcgagcaaaagaacaaagaccaagacca

SEQ ID NO: 9255 - DNA, 96 bp, Homo sapiens
tttatggcaaagtgaatattcactcaattggttttagcttcagctcgggaattatgcaggtcgagggactactggaatggttgcccgttttattcc

SEQ ID NO: 9256 - DNA, 75 bp, Homo sapiens
ccgacaccatctggaggaggcgttgccgtgaggaagatggcagtgaacgtatactcaacgtcagtgaccagtgat

SEQ ID NO: 9257 - DNA, 133 bp, Homo sapiens
ccgccagaacccggcccggaccgtgtcgccgacgccaaaggggacagcgagtcggaggaggacgaggacttggaaggaggtatctttaaaatagcttcctgggcagatctagtaaatgctcacgtggtgccag

SEQ ID NO: 9258 - DNA, 85 bp, Homo sapiens
acccatccccactttgtgattccctaccgctgcttaggacatctggaggacctgttgatgctagttcagagtatcagcaagagct

SEQ ID NO: 9259 - DNA, 100 bp, Homo sapiens
aactatgtggcagatatcgaggtggatggaaagcagatagtgtttttagaagaagcatctcaacaggaaaaactggccaaagaatggtgcttcaagccgt

SEQ ID NO: 9260 - DNA, 100 bp, Homo sapiens
agttccttgtggagccggagctgggcgcggattcgccgaggcaccgaggcactcagaggagtgtgaagattgctcctggagcagttgtatgtgtagaaag

SEQ ID NO: 9261 - DNA, 100 bp, Homo sapiens
aggaaaacgccagcagagccaaggtgagcctgatgctgaacacgtggcctgtcatctcagcctttgccaatgatcctgacgtgacccgggaggcagccac

SEQ ID NO: 9262 - DNA, 75 bp, Homo sapiens
tgacagcttcaacttttagaccacaggcaaatgctttaaaacacgagatttttctcctatttcagcagttggcca

SEQ ID NO: 9263 - DNA, 74 bp, Homo sapiens
acccacctcttacagcttatcatagtctcctatgtgcatatgtgaaaaatgccagctgtgggacaaggagtgca

SEQ ID NO: 9264 - DNA, 101 bp, Homo sapiens
agaaccccgtatgtgaagtgtccaactacctctttccagattgcagggtgatttcaggacaccaagaggaaaatcaggaaaatgtttccaacctggtgatt

SEQ ID NO: 9265 - DNA, 96 bp, Homo sapiens
agtggatcatagacctggccatgtgagtaaccacactggccgcatcaaggtggtctttactccgagcatctgtaaagtgacctgcaccaagggcag

SEQ ID NO: 9266 - DNA, 74 bp, Homo sapiens
ctgcccggacgtggaagcagcaagaggcgcttggtcaagacacactgacggtgctggagaatctggtaaaagca

SEQ ID NO: 9267 - DNA, 74 bp, Homo sapiens
tttgctgagcacatcagtgatgaatgcaagaggcgtttctataagaattgtcatctggggacctggagaatgat

SEQ ID NO: 9268 - DNA, 98 bp, Homo sapiens
tcggcccaaaaagcggcggccgttggaggtggctgcggcagctgtaagactttgaccccgacgcaggcttcagtgattgccgcggatcagaagcctga

SEQ ID NO: 9269 - DNA, 83 bp, Homo sapiens
ggccgcgtggacccgaaagccgctgggaaaagcctctccttccgatgaaaagagaaaggaagaatggactacagccaccaaac

SEQ ID NO: 9270 - DNA, 50 bp, Homo sapiens
caactggcatgcttacaggagtgaagttccgccatggagtcatagttgca

SEQ ID NO: 9271 - DNA, 98 bp, Homo sapiens
tttgtgtcaaaaagaaataactcagctgaagcatcaggctcacctccacctccagtaaaagtttcttctgaacctcccacacaagccactccaaactc

SEQ ID NO: 9272 - DNA, 83 bp, Homo sapiens
tgcctcagcctcccgagtggctgggactacaggccactgaagtttgaatgcagagaaaacgctgcaagatagaaaaatgagac

SEQ ID NO: 9273 - DNA, 74 bp, Homo sapiens
ctactgtggagaaaggaagattgccagaggttttaccgagagcatgaagatggagtgaaggtacctgagcgcag

SEQ ID NO: 9274 - DNA, 100 bp, Homo sapiens
tggactaccaaggagaagctatagactacttctactccaccaggaagggtgttccctcaggtcaatgtcacgaagatgggcagttggggccactttaact

SEQ ID NO: 9275 - DNA, 89 bp, Homo sapiens
tgagctccaggagttcgtctcttacgtctgcggaagtgcagctgcctcagttcttagcgcaggagaagatggtataaactggtccatca

SEQ ID NO: 9276 - DNA, 110 bp, Homo sapiens
gcagggaaggagctgaggaatgactggactgtgcagactgggactcttcaattaatctgacatttcacaaatccaaaattgccgtggatgaactctttacttcacttcgg

SEQ ID NO: 9277 - DNA, 98 bp, Homo sapiens
ctgctaaaaacaagactggggctgctcccatcattgatgtggtgcgatcgggtcagttaaatgaaagcatggaccatgggggagttggaccatatgaa

SEQ ID NO: 9278 - DNA, 82 bp, Homo sapiens
cctcatcgagctcttcgtcaagtgtcttctgtggcttcagcgtcacctagtgcaggctgccattcaacaaacgcattgtcaa

SEQ ID NO: 9279 - DNA, 73 bp, Homo sapiens
caaagaatgcaaaaaccagcagcaatgatggctgatcactgggaaactgcacctcgtcacatgatgcgtctag

SEQ ID NO: 9280 - DNA, 50 bp, Homo sapiens
atttaaacaggttcattttggaaaagagtcctgttcgatttgataccttt

SEQ ID NO: 9281 - DNA, 106 bp, Homo sapiens
cggtgcctgtccccgggggcgccatggcgaccggagcgaacgccacgccgttgggattttttatcaagcagaaatgcatcgaacaacgagaatcaagatcactgag

SEQ ID NO: 9282 - DNA, 75 bp, Homo sapiens
ccagccatttcggtgtagaagtggcagcacggcagggtccacttcctaacacatgctgccatttctggcttatgg

SEQ ID NO: 9283 - DNA, 82 bp, Homo sapiens
ccggcggcccggagtggggcggcggacaatgcagatcttcgtgaagactctgactggtaagaccatcaccctcgaggttgag

SEQ ID NO: 9284 - DNA, 83 bp, Homo sapiens
ccctacgatgagaactggttctacacgcgagctgatcatgtttgagaccttcaacaccccagccatgtacgttgctatccagg

SEQ ID NO: 9285 - DNA, 80 bp, Homo sapiens
cgacagagccaaaatcagagctggaacctgaggagagagaatgccagcagttactctgcagagatgacggagcccaagtc

SEQ ID NO: 9286 - DNA, 100 bp, Homo sapiens
cacatttgtttctgtgatttactgttctggcacagacaggctgtgtgcatgcaccaaaggtgtcagctgtgatgcatgtttaaaaggaaattttcgaggt

SEQ ID NO: 9287 - DNA, 130 bp, Homo sapiens
taattttaggaatcctgatgacatccttctttttagagatcgttttgatggatatatcttccttgacagcaaagctgaaaatgtgtgtctgacatgcaagctcagtggggcagagacccgtggattgctg

SEQ ID NO: 9288 - DNA, 100 bp, Homo sapiens
gcagctgaagctcatcatgaccttccagaattacgggcaagcgctgttcaaacccatgaatagcaggacccagtgctccataaaggataatagtttccag

SEQ ID NO: 9289 - DNA, 128 bp, Homo sapiens
agcagcatggacgacctgatacgccactgtaacgggaagctgggcagctacaaaatcaatggccggacgaaaggctgaagcagtgcctactcgacagaaccggtcatcgtacaaagaaatgccacgtg

SEQ ID NO: 9290 - DNA, 74 bp, Homo sapiens
tatccttgtgaagtccaaggccttccagtatttcatgtgccaagatatcaagtcagatggcttcagcatcgaga

SEQ ID NO: 9291 - DNA, 90 bp, Homo sapiens
ctccctcaggatcagaccgtagcccttccggaaacctccatggttatgatgtgattgctcaagcccaatctgggactgggaaaacggcca

SEQ ID NO: 9292 - DNA, 74 bp, Homo sapiens
tgaagctggggtctggaccttgtacctgtggaaaagtgaaaagccactctactactcatttgtcgacaaaccag

SEQ ID NO: 9293 - DNA, 50 bp, Homo sapiens
gagaggccggtttcccccaccatctcacattcttgaaggtggcattgaag

SEQ ID NO: 9294 - DNA, 80 bp, Homo sapiens
ctgtgtgccccttctccacccagagtgggtaattccagaattgattggccataccattgtcactgtattactgctcatgt

SEQ ID NO: 9295 - DNA, 75 bp, Homo sapiens
tggtggttggacagtcagcatttgcagactttgggaaaagcttcactctgaccatcactgtcttcacaaacccac

SEQ ID NO: 9296 - DNA, 101 bp, Homo sapiens
tagattttagcataactcaattcgtaaggaatcttggacttgagcacctaatggatatatttgagagagaacaggtatatgttgtcggtggctatgatggg

SEQ ID NO: 9297 - DNA, 98 bp, Homo sapiens
aggggcgtggctgtggagaaggcgctccggggcgaagcagacaatgcagatcttcgtgaagactctgactggtaagaccatcaccctcgaggttgagc

SEQ ID NO: 9298 - DNA, 90 bp, Homo sapiens
gctgcggtcactgaagcctttccctaaacttgtgatactttctcactacatggtgcaaacagctgagtcaagttgtccctgagagtagcc

SEQ ID NO: 9299 - DNA, 100 bp, Homo sapiens
gaagacgatctgcacttcgcattttggcattgacatttaattttagggtcctttatatagaagggagagtaggaggaagacaatgtgtggcaccctggac

SEQ ID NO: 9300 - DNA, 83 bp, Homo sapiens
ccgaactccaggacagcatccaggcctcattggacagcattcgagatgcgtctgttactagagtggagagtctaccttcgtct

SEQ ID NO: 9301 - DNA, 80 bp, Homo sapiens
ggacccgcggtccccaccgtgcagcggggcatcatcaagatgtttatatcctggaacctggagatcctcctttgttacag

SEQ ID NO: 9302 - DNA, 96 bp, Homo sapiens
cggcagtttcgtgagcgacctcagcaggaccagtcctgcctctgttgtagaagacatgtggtgtatataaagtttgtgatcgttggcggacatttt

SEQ ID NO: 9303 - DNA, 97 bp, Homo sapiens
gaaactgctttctaaaacaccagaactcaacctggttacccatgcagttgttactgtaccagcctattttaatgatgcccaacgccaagcaaccaaa

SEQ ID NO: 9304 - DNA, 83 bp, Homo sapiens
cagcgccatccccgagcagcggtggaagctggctttatcctgtggataaacgcagagtgaacgagtttggggagtcctacgag

SEQ ID NO: 9305 - DNA, 83 bp, Homo sapiens
aaccacactaacgagattcaagattatttgcaacagctcacgggagcaagaacgatcctggagccacgcttcactggggacac

SEQ ID NO: 9306 - DNA, 83 bp, Homo sapiens
catagtggctcaagttttcaaatgtatctggtgagaaagatcagtctaaagaaaaggagaagaaagtgaaaaaaacaattcct

SEQ ID NO: 9307 - DNA, 100 bp, Homo sapiens
gtagaggcggcggacgggccggagggaggatgttaaagccccgcggtagaaaatctggtgtattaactgtgaaaattttagagctgcatgaggaatgtgc

SEQ ID NO: 9308 - DNA, 100 bp, Homo sapiens
atggagcacgtccaggctgaccacgagcttttcctccaggcctttgagagtgctggagaatctggtaaaagcaccattgtgaagcagatgaggatcctgc

SEQ ID NO: 9309 - DNA, 83 bp, Homo sapiens
aaataccaggctaccatggtctacaagactctcttcgctctttgcatcttaactgcagatgtgaagttcatttccaatccgcc

SEQ ID NO: 9310 - DNA, 100 bp, Homo sapiens
agtacctgcagaaggtctctggagacatcttcagcagataccatgctgtgaagtccaggccacatggaggtgtcctgtgtagatgctccagctgaaatcc

SEQ ID NO: 9311 - DNA, 83 bp, Homo sapiens
tcccttccccgcgcagccccgcacggcccgggcccacattgtgcttcaagaagaccatagggaagaacgcattttcatcttgc

SEQ ID NO: 9312 - DNA, 75 bp, Homo sapiens
gggaccccagcttttcagaactgcagggaaacagccatcatgagagtgcagacatcctcagcaccatcggctatg

SEQ ID NO: 9313 - DNA, 101 bp, Homo sapiens
tgggggaggaaccagttggtggcctgggcagcctgctggaccctgccaagaagtcgcccatcgcagcagctcgggcctcggcttcacaggatggggctgcc

SEQ ID NO: 9314 - DNA, 89 bp, Homo sapiens
ggagcagtccctctctgtccgggcgctgcaggagatgctggctaacaccgtggagaaatcagaagggacccggcactacgtgggctcag

SEQ ID NO: 9315 - DNA, 101 bp, Homo sapiens
ccgcggagcggacccagcaatgacgcaaccatccgggagcggccaagctcggccatctacccctccgacagcttccggcagtccctcctgggctcccgccg

SEQ ID NO: 9316 - DNA, 75 bp, Homo sapiens
gtgagtgatcactctcaatcccggcccctcatatggaaaatttgaaatgcagaggggaaacagtagcaaaggaga

SEQ ID NO: 9317 - DNA, 80 bp, Homo sapiens
gcgaatcgtgatcttcacccaagggagagatgacactataatggctacagtggccacagatgtctttaattccaaaaacc

SEQ ID NO: 9318 - DNA, 90 bp, Homo sapiens
gacgctggtgtggaggatgcggcagatgctaataacggagcccaggattttgaagatgtaactgagtttctggaagaggtcattgaagcc

SEQ ID NO: 9319 - DNA, 100 bp, Homo sapiens
ctcccatgacccccatcactcctgccacgccagcttcggagagttctgggattgtaccgcagctgcaattagtgatgatgaaccaggttatgaccttgat

SEQ ID NO: 9320 - DNA, 74 bp, Homo sapiens
gtcggcgcctagcgacgcccaacacctgtccaaacaattagcctgaggcctgctcagtcgttcctaatgaataa

SEQ ID NO: 9321 - DNA, 75 bp, Homo sapiens
aaaatgaaagaaaccgctgaggcttatttgggaaagaaggttatcaatactctggctgaccatcatcatcgtggg

SEQ ID NO: 9322 - DNA, 98 bp, Homo sapiens
gggcaagggcgagatcctggagagcctgcaggacggcgcggcagagtccccgtacgcctacagtaacggaccttttaccaatttgaggctgcgtggga

SEQ ID NO: 9323 - DNA, 95 bp, Homo sapiens
tgccccttagcgggtgggggaagctggtaggcacgggcggctccgcagtgaccggactcgggggagttgaaagaattcagaatcagtgggatgaa

SEQ ID NO: 9324 - DNA, 100 bp, Homo sapiens
cagctccgggaccggccgaaaggcgaggaaccgtaattttgcacgatggcagtcaaatgagagcaaaagcatttccagaaaccagagattattctcaacc

SEQ ID NO: 9325 - DNA, 51 bp, Homo sapiens
gaagagcaaccgaggtttcaatctgcgatggaaagcccgtgtctctgtcac

SEQ ID NO: 9326 - DNA, 80 bp, Homo sapiens
gcaagatccagatcgggatttacgtggagatcaagcgcagcgatgatggaagatggtaccccaaagcatatcatccagat

SEQ ID NO: 9327 - DNA, 80 bp, Homo sapiens
agtgacagctggagtctggctaacttgtcttccactaaagagttggacctgtcaggtcattagtaattatcagcacttta

SEQ ID NO: 9328 - DNA, 100 bp, Homo sapiens
gccacttgagaaagctgtgcagtccagactcacgggagaggaagtcaacagctgtgtggagcagtcctgcgttaactgcggccgggaggctatgagcgag

SEQ ID NO: 9329 - DNA, 100 bp, Homo sapiens
gacagtttaaaagccttggcagtcaagagtgcagcagctgccccgagccccgtgcttggcaacattccccccaacgatgggatgccgggaggccccatcc

SEQ ID NO: 9330 - DNA, 100 bp, Homo sapiens
ggttgaaaagatccgatggcagcaccacttcgaccagcttcatcctcagacagcctcccaaagtgaaatgcctgaccaagatctggcaccccaacatcac

SEQ ID NO: 9331 - DNA, 83 bp, Homo sapiens
ctcctcttgatgccaacactctggggaaggtggccagtggcatctgtgacaacttgcttgaatgggccttgacgaaggagaag

SEQ ID NO: 9332 - DNA, 51 bp, Homo sapiens
cctggtgtcacctatcagtaaaaggtgtagaatgagccaaggagactcaaa

SEQ ID NO: 9333 - DNA, 99 bp, Homo sapiens
aggacacctacagccccgacgaacatttctgggtgacactcaacaggattcccgtcttaggaaaagtcctcagtgctgtgggcagtgcccagctactga

SEQ ID NO: 9334 - DNA, 75 bp, Homo sapiens
agtctccaaattcgcctccatctgtaccatggttttcgaaacactacaacatccacaaggatactgcagtagatt

SEQ ID NO: 9335 - DNA, 90 bp, Homo sapiens
tccatttctaccttgtatgcctcaatttgctggatttaagcactgctgcactttatgaggtgctgtaccctgtgtgccatgtgcgtaacc

SEQ ID NO: 9336 - DNA, 75 bp, Homo sapiens
cagatggggttggccgccgtgagaaaggatttcagatgcagtggtttgtttacgctctctgtcctagggcctggc

SEQ ID NO: 9337 - DNA, 100 bp, Homo sapiens
ctcccctgcagcgactcggaagattcgaggcggcgggggacaagtcggcgccccagagcggacgagttgactggattgttgctgacatcttggccatcag

SEQ ID NO: 9338 - DNA, 100 bp, Homo sapiens
ctgacggtggaggttcgcggctctaacggggctttctacaaggtgggtaaagcaggaatctgagatttccaaggaatctcaagaaatggatgctcgtcct

SEQ ID NO: 9339 - DNA, 82 bp, Homo sapiens
agccggcggcgggaggagctagggctggagcctctccagcctcccgcgaaggaggttgtggctcactggattgctgaaagcc

SEQ ID NO: 9340 - DNA, 101 bp, Homo sapiens
gggcaccaaggaggccaaagagaagaggagctgcactgactctgcagccaggacgaagtccaggaaggccagggactgatgacggagcccaggaggtggtg

SEQ ID NO: 9341 - DNA, 90 bp, Homo sapiens
gtcaagaacaagatcagcaagagcagcttccgcgagatgctccagaaagagctgaaccacatgctgtcgtgcattgctaaggaactgatt

SEQ ID NO: 9342 - DNA, 98 bp, Homo sapiens
atgctgcgcggccttcccatcaccatcacagagagcgatctgggatggaaattctatgatgctgatgattatcacccggaggaaaatcgaaggaagat

SEQ ID NO: 9343 - DNA, 98 bp, Homo sapiens
gtacatcgcaggggccaactgtgcccaccagctccccatcgcagaggccatgctgacctacaagcagaagagatgacctactccctgactcggttcgc

SEQ ID NO: 9344 - DNA, 89 bp, Homo sapiens
aagacggcaacgcgcttatcagcgctatgagaatataaggatgcatttatgaaagcaaatcctggctacaaatggtgtcctaccacaaa

SEQ ID NO: 9345 - DNA, 87 bp, Homo sapiens
agatggctactctggagttgaggcaacacccaggacacctactgtgtgaaagaatactagaagatcttcctattcaaggacctaagg

SEQ ID NO: 9346 - DNA, 98 bp, Homo sapiens
gccgagttctcacgtgcccatcagtgacagcaagtccattcagaaggatcacacggctgcagcgctggtgtcgggccaagcagatgggcttggagcct

SEQ ID NO: 9347 - DNA, 118 bp, Homo sapiens
acctttcagtttttctccattgattatgatagcagtgggcttttcacagtgggctttactgtgttgaggcaatctttggcagccagacactacctaactccaatttatggacaatgaa

SEQ ID NO: 9348 - DNA, 90 bp, Homo sapiens
caggtgacagcaatcagctggcctggtttgatactgacctgtaaatcatcctttagaaaggagaatcacttgaacccaggaggaggaggt

SEQ ID NO: 9349 - DNA, 82 bp, Homo sapiens
atgacctagcaaaagttgatgatcttccccctgatggcagtcttgggcacgtccatctgtaaacctgctgagagctctggtg

SEQ ID NO: 9350 - DNA, 75 bp, Homo sapiens
tgtttgtatgattcagacccacctactctgctggaaacaagcagcgttgtagaatgaatgaagacactggcactg

SEQ ID NO: 9351 - DNA, 75 bp, Homo sapiens
tatattaatcagtatgtcatatggatgatgatgattattccccaccttctaagagacaaagaccaacgagccacc

SEQ ID NO: 9352 - DNA, 75 bp, Homo sapiens
ctggacggccgcactctccctgcccgagacccggctttgaagacaagattcccaaaaggagattctctgagatgc

SEQ ID NO: 9353 - DNA, 74 bp, Homo sapiens
ggcacccgccaccagcatggacgctcgccgcgtgccgttttcggctttgtgagaaaccttaccatcaaacacga

SEQ ID NO: 9354 - DNA, 120 bp, Homo sapiens
gagtctacctggatgaaaactacaaatcccaggagcacttcacgaataccctctaccatctgctttggtcagggtgccgctcgaggatttaaaagcaacaagaagaaaaccaaacaatgc

SEQ ID NO: 9355 - DNA, 75 bp, Homo sapiens
agggcatcaccgtgaagcagaagagagctcgtccgcatggtgctgaatggctgaggaccttcccagtctccccag

SEQ ID NO: 9356 - DNA, 82 bp, Homo sapiens
caaagctcaagatggcggacaaaacgccaggcggatctcagaaggccagttcaaagagcctggagacacaggccccatcctt

SEQ ID NO: 9357 - DNA, 82 bp, Homo sapiens
gagcgtctggccaagaatcagaggaagtggaggcgtggagctatttcctatgacagttctgatcagactgcattatacattc

SEQ ID NO: 9358 - DNA, 100 bp, Homo sapiens
tctatccgggacaaggaaggttacaatagcatacattatgctgccgcctatgggcacaggcagtgtctggaattggttccctctcccagcctgtgctgac

SEQ ID NO: 9359 - DNA, 75 bp, Homo sapiens
ctttggaggaatcaaaatctttgatgagaagacagggtttgtgaagcctggagctgagaattcaagagactaccc

SEQ ID NO: 9360 - DNA, 90 bp, Homo sapiens
ccacaccccccgccgcagcagcaccggcgacagcttggccatttactacctgaactcagtttccaaaagcctttcccgagctaatgccca

SEQ ID NO: 9361 - DNA, 75 bp, Homo sapiens
acccagatgtgcaacaaagtgcgatggagcttactccacgggaacagcctctagataatctgagttgttgaaaat

SEQ ID NO: 9362 - DNA, 74 bp, Homo sapiens
ggaggtgaatacacctctgattttaatcagttctgcgtttgaaaggaaacccgaggtcctgggcctatgtcaag

SEQ ID NO: 9363 - DNA, 74 bp, Homo sapiens
ccgcagggacctctgcctaggaaagccagggagaaggctgtagttagcttggagaccacacccagccagaaagc

SEQ ID NO: 9364 - DNA, 82 bp, Homo sapiens
cttcgcattcagaatttgaccatcttggtgagaaacattaagacctactaccaggtgacttaagagattaaaattaatttgg

SEQ ID NO: 9365 - DNA, 90 bp, Homo sapiens
ccaccatctgtatactcttcacaggggagaaactgaagccaaagtagcagaaggtcaagaaatttgtgtgattgaagccatgaaaatgca

SEQ ID NO: 9366 - DNA, 75 bp, Homo sapiens
cctggagcgcgggccctggggccgcaacccgcgccgggcgaggaaaaccaattctgtgtcctcggaggaccacag

SEQ ID NO: 9367 - DNA, 100 bp, Homo sapiens
tcggctggtcttagccctcagctgttgttggtcaaagttgctcagcggagcccagtagattcaggcaccatcctccgagaacccaccacgaaatccgtcc

SEQ ID NO: 9368 - DNA, 97 bp, Homo sapiens
aagaaacttcctcagtaaagcgatttcaaatatgcgtgcattagagaatgattttttcaattctcccccaagaaaaactgttcggtttggtggaact

SEQ ID NO: 9369 - DNA, 100 bp, Homo sapiens
ctcataaggattgtcctctttctacaaaaggcagaagctcctcctggggtagagacagatcttattgatgttggattcacagatgatgtgaagaaaggag

SEQ ID NO: 9370 - DNA, 98 bp, Homo sapiens
tcgaggccgcagtggagaaggcgcctgtggaacatcgctattttgaagatgaggaagaagattctagcaacgttgatttaccttacattcctgctgaa

SEQ ID NO: 9371 - DNA, 82 bp, Homo sapiens
taagagcccatagcagtctgccagacaatagagcatatggttttctggatatgccgcagaaggatccgtgccagaagcaagc

SEQ ID NO: 9372 - DNA, 96 bp, Homo sapiens
agagcgtgaccgagagcgcgaatatcgtcatcgttagaagccaagaaaaccatgtgggaaaggctgacagcccctgaagatgtatttagcaaatta

SEQ ID NO: 9373 - DNA, 98 bp, Homo sapiens
gagaggggagggtgagcagaggacaggccgggagttttccgggaacggaggaagagcagtggagggcgggggccggccccagcccagactggaagatg

SEQ ID NO: 9374 - DNA, 51 bp, Homo sapiens
cttcacagagagtccagttgccaaggtacttcaaaggctcatcaagtcccg

SEQ ID NO: 9375 - DNA, 90 bp, Homo sapiens
accggaatttggcccgagccctcagcacggcaactggggcattatactcccgaagcttaacgcctgatgatgatgtttttcaatatcttg

SEQ ID NO: 9376 - DNA, 51 bp, Homo sapiens
aggaaatgtgcccaacatcatcattgcgattgccagtagaaagccaacaga

SEQ ID NO: 9377 - DNA, 100 bp, Homo sapiens
gtggccacagcatctttgtctagccccagtgcagactaccatgccggggatgaagcgagactgcgggggtgctgcggccgtcctgggggccttcagagcc

SEQ ID NO: 9378 - DNA, 82 bp, Homo sapiens
gagcattggatttgatcacatggatgatgaagaacgagagcttcaaatggatcctgcagactatggaaagcaacatttcaat

SEQ ID NO: 9379 - DNA, 87 bp, Homo sapiens
ctgccaagcagccttagccctagtgtagagatttctctatgaatcatcatcaagaactctgggagaacttttgaattcataaccaag

SEQ ID NO: 9380 - DNA, 100 bp, Homo sapiens
gctctgacacccaggcagggcctagggtgggacgatggcaggtgggggcagcgacctgagcaccaggtttccgccagctgtggatgcctttgacattatg

SEQ ID NO: 9381 - DNA, 87 bp, Homo sapiens
agatgtccttggatcctgcagacctcacccatgacactcatgaatgtcagcatcatcattcaaagaacaagaaacattctaagaaat

SEQ ID NO: 9382 - DNA, 95 bp, Homo sapiens
ctcctcgccagcagccgtccggagccagccaacgagcggctaccggctctctgaccagttccacgacatcctcattcgaaagtttgacaggcagg

SEQ ID NO: 9383 - DNA, 100 bp, Homo sapiens
caaagaatagagttgagcctgtgggacacttcggacgaagttatacggaagcgtctcctcattgatggagatggtgctggagatgatcggagaattaatc

SEQ ID NO: 9384 - DNA, 75 bp, Homo sapiens
ctgtgacgaggacgaggaggcagccacggggcccctgggacccacgaggaggaaccaggctactttccccagtac

SEQ ID NO: 9385 - DNA, 100 bp, Homo sapiens
ccaaaccaccggcacagagcaagaataaatactgactttgagtaacggccttgagattgctagtgcaactactgctccatcgatcccttcacatttgtct

SEQ ID NO: 9386 - DNA, 90 bp, Homo sapiens
cttgtggcgaatggggctcacgtcgaaccctgcacttgatggaccagctggcaccacccagatcaataaactggcttatttgaatttgcg

SEQ ID NO: 9387 - DNA, 75 bp, Homo sapiens
gaaggagaacctcttcatcctggaggaggagcagcggatcaggctggtcttctcagtacagcatggtggctgggg

SEQ ID NO: 9388 - DNA, 80 bp, Homo sapiens
tttcaggagaaagattacacaggagctgcagtgctgtactctaagacaagtgatggagcagcaccagcagcagcgtcagg

SEQ ID NO: 9389 - DNA, 100 bp, Homo sapiens
cccgcgggcaccgaggactccgctcctgcccaggccaaagaactgccaactctgaaagataatgatttcattaatgagggccaaaagatttatattgatg

SEQ ID NO: 9390 - DNA, 100 bp, Homo sapiens
ggagatctgcctgaagctggtgggctgcaaatccaagaaggggctgtcctcgtcctccagctgttatctggaaggaaaatatgcccaggttaccaacaat

SEQ ID NO: 9391 - DNA, 76 bp, Homo sapiens
ggaccccctgacggcttacctgaagtagcaggccagagaggactcgaagatccttagaaggagccatagacggaac

SEQ ID NO: 9392 - DNA, 101 bp, Homo sapiens
tggagggggacacctatgaccggggttgtggagttgctcagtgcttgaagattgtctgccaagttgggagattagacagaggaaagagtgcaatcttgtac

SEQ ID NO: 9393 - DNA, 49 bp, Homo sapiens
ggtgggtcggggatcggtcgcctgagagcggggatctgacgagcttttc

SEQ ID NO: 9394 - DNA, 110 bp, Homo sapiens
tgggacccctgctagaagagaagggcaaacgggtaatcgccaacccacccaaaatgtgggcgctatctccaactgtctttgcacttctgagtaagaatctgatgattgtg

SEQ ID NO: 9395 - DNA, 100 bp, Homo sapiens
ggaggaggaagtaggggtgcacctcagcactatcccaagactgctggcaacagagattcagttgtggaaattctttttgaacaagataatgaagagcaat

SEQ ID NO: 9396 - DNA, 100 bp, Homo sapiens
agccggagctcttgtatatgaggtggtgatctttgtgaagtctgtgcagcggtgcattgccttggcccagctactagtggagcagaacttcccagccatt

SEQ ID NO: 9397 - DNA, 98 bp, Homo sapiens
gcggggttcctggagcctcccgccgcgctccctccgccgccgcgcaacgatcacaatgaggacctagggcatctgtctgctgacgccccctggcctgc

SEQ ID NO: 9398 - DNA, 75 bp, Homo sapiens
tatttcttagacaagaagatggtcacgaagcaagaggctactatgagcagactggagttggacctctgcccgttg

SEQ ID NO: 9399 - DNA, 100 bp, Homo sapiens
gcgagccccgcactctctcgatgagtcggagaagtcccgtctgagcgggaaagttccgaagaataggagtggctgagttagctacggagttcatttgggg

SEQ ID NO: 9400 - DNA, 100 bp, Homo sapiens
ggacattgctgctacttctggcaggtgtggcctgcctccgagtttaacttacatgtgtagagctggagcaattcggacagatgataactgtattgtatta

SEQ ID NO: 9401 - DNA, 75 bp, Homo sapiens
gtacgggcggccgtgcgcgaggcgaggtatctgggctcatggcgactactgcagaatcaaccccaagaccggggg

SEQ ID NO: 9402 - DNA, 100 bp, Homo sapiens
tgtgcggccgtcctccaccgtttcctccaggacagcacctagtcgtggccggaggagtctcagagctgtcagaaaggtgccagcgagatttcagattcct

SEQ ID NO: 9403 - DNA, 87 bp, Homo sapiens
ctgaactcaagtcaccgtggagctccgccgccccgaaactttcaccgcgagcggttctaaggacatatggaattggctatggataat

SEQ ID NO: 9404 - DNA, 119 bp, Homo sapiens
gaggaggggccccagcagcccccgaaggccctatcaggacatggagtatgaaagacgaaccttgtgaaacatcttcctgagcagaagatactcaacgaattagcagagcttaagaatga

SEQ ID NO: 9405 - DNA, 75 bp, Homo sapiens
cccggggcaagagcaggagcccggcaccccccgccgacaaggagggtgtggacactgccagcggctgcagccgac

SEQ ID NO: 9406 - DNA, 100 bp, Homo sapiens
atgcgaccgatccccttctcccggaccccaggagccggcgcccccgccctgtaggaatttagataatgggctgtgtgcaatgtaaggataaagaagcaac

SEQ ID NO: 9407 - DNA, 73 bp, Homo sapiens
cacttcaaggagacaacggccacacactgtggggctgacttcaaaatttctgaggagtgcatcgcacagtgga

SEQ ID NO: 9408 - DNA, 88 bp, Homo sapiens
aagagtggattatttggtcactgaggaagagatcaatcttaccagagggccctcagggcagctcagttctggcaccaaaccaaatccc

SEQ ID NO: 9409 - DNA, 90 bp, Homo sapiens
agccaagaacagcattactgattcccaaatggatgatgttgaagttgtttatacaattgcacagacgcagtcttcagcaaggaagtgctg

SEQ ID NO: 9410 - DNA, 83 bp, Homo sapiens
gccctgaggagtccccgctgcttgctcttacaaacttaaggaaaggatacctgtttatgtataatcttgtgcaattcttggga

SEQ ID NO: 9411 - DNA, 101 bp, Homo sapiens
gtttatagaagtttcagttctgaagtttaagaggagtttcacttcatcccttttcattttgaaggtgatggcttggacaacagtgtagcttcccccagcac

SEQ ID NO: 9412 - DNA, 82 bp, Homo sapiens
ggagcaacaggatcagagcatgaaggaaggggtgagaagccctaccactgcaactgggacggctgcggctggaagtttgcgc

SEQ ID NO: 9413 - DNA, 49 bp, Homo sapiens
atccggcctggatctttctctccaggtacctgcacatgttgttctttgt

SEQ ID NO: 9414 - DNA, 100 bp, Homo sapiens
aaccagtgggccccacgtgggtaaaaaggacagacccacgaagtcaagcatgcggagtgcagccaagccctggaacccagccatcagagcagggggccac

SEQ ID NO: 9415 - DNA, 75 bp, Homo sapiens
ccgcttcaccgacaacgagttccactcctcgcacatctccaccatcgatgtgttcagagcaacattgttttgttg

SEQ ID NO: 9416 - DNA, 80 bp, Homo sapiens
ggcaggggcagcgggagccggccgggtatcatgatattagctggtttgacatcaagtcatttgtgagtcatcagatcttc

SEQ ID NO: 9417 - DNA, 82 bp, Homo sapiens
ttgacagtaaagagaaccggccaatcagattttcatctacatcttgggaatattgaaacaaagtaagattctgctcttccag

SEQ ID NO: 9418 - DNA, 100 bp, Homo sapiens
ggggctaatggtaaccgaaactcaaagttaatggagccaaatttaataaagtgattcgcctttgccagtctcatctcgtgtctgctttgttaagttccat

SEQ ID NO: 9419 - DNA, 74 bp, Homo sapiens
cgcagctccattaatgcaactaccattacactaagacttaattcagtgcacaaatgagatgaatgtgaacatcc

SEQ ID NO: 9420 - DNA, 71 bp, Homo sapiens
agaaggtgtgcatggatctgccaaattttatatttcagatttgtggaagtccacctaaacccactgtgttc

SEQ ID NO: 9421 - DNA, 82 bp, Homo sapiens
tgcgccaccacgtcacgcacacgctcggcgctgcgatccgcgcatataacgctaggacttctctcaaacttgtgtgctgagg

SEQ ID NO: 9422 - DNA, 100 bp, Homo sapiens
tagtaaaggtgtctactgtttacagtacgatgatgaaaaaattatcagtggcctacgagataattctattaagaggcttcgtgacggagttatcagagac

SEQ ID NO: 9423 - DNA, 75 bp, Homo sapiens
gtccaattttgctcaacttattgtgagaggaataagacgagttggaagaagacctgatcaacaacttcagggtga

SEQ ID NO: 9424 - DNA, 75 bp, Homo sapiens
agtgaagctgcagaccttcgcggaaaatggctttgtaaagaagtttgaacctaaatctggctggatgacttttct

SEQ ID NO: 9425 - DNA, 100 bp, Homo sapiens
tctgctttcttattgtcttcatactgcctctggatgttagtacggtagcagaaattttcgtgaaagcatttccctatcctgaggacgtgagggttccttt

SEQ ID NO: 9426 - DNA, 74 bp, Homo sapiens
acctagagctctgccgtgcccacattgagagactccagcaggagccagggagtaacgaagagatcaaagagttc

SEQ ID NO: 9427 - DNA, 140 bp, Homo sapiens
ctcggataccttagagagcacgcccatgctggagaaggagaagtttccgcaggactacttccccgagtttcagtggcgattctccagagaagaaatgcacaacaggcagatgaggaaatcaaaaggtaaactcagtgcca

SEQ ID NO: 9428 - DNA, 51 bp, Homo sapiens
caagatcggccccctgggtctggaagaggggatggagcgccagctggtggc

SEQ ID NO: 9429 - DNA, 74 bp, Homo sapiens
accggtcccccagcggcagccgagcccgcccgcgcgccggtgctggagaatctggtaaaagcaccattgtgaag

SEQ ID NO: 9430 - DNA, 101 bp, Homo sapiens
attaattttaggaatcctgatgacatccttctttttagagatcgttttgatggatatatcttccttgacagcaaagacagccagctaaaggtgtggatgag

SEQ ID NO: 9431 - DNA, 96 bp, Homo sapiens
atcttcaatgagtaaacatattcctgtacggattttcaaatatgcgctatatttcttcgctaattagtggtgttggtattttcatgatgggtgcag

SEQ ID NO: 9432 - DNA, 75 bp, Homo sapiens
aacgattgaacaccagattgcagttcagattgacaagtatctctatgccatgcggctctccgatgaaactctcat

SEQ ID NO: 9433 - DNA, 98 bp, Homo sapiens
agaagaaccactgtcgcatccactgagtgataactcttctgatagcagcttatttaaaactcagtgtatcccttactcacctaaaggggagaaaagaa

SEQ ID NO: 9434 - DNA, 100 bp, Homo sapiens
cggatctacagctttcactatggggtggagacgtggtactcagcaagctcgagttaaagttggatgtgctggaacagctaggtcttgactccactaacgg

SEQ ID NO: 9435 - DNA, 51 bp, Homo sapiens
tctgtggctgctgctgctgatcctgaggaggagtctgctactagtcttatc

SEQ ID NO: 9436 - DNA, 75 bp, Homo sapiens
ggtcgaaacctaccaccaaagaggcgatgcagagattatgatggtatccttagtctgttggagcatggagaagag

SEQ ID NO: 9437 - DNA, 75 bp, Homo sapiens
caacaccagtggaagatgatcacatcccaggccgatttcactactagatctcaagtgactcttgaagaaaggcaa

SEQ ID NO: 9438 - DNA, 100 bp, Homo sapiens
agcaactgctcccctgagaaaactttctgttgacttgatcaaaacatacaagcatattaatgaggtacgtgccctggaggaggccaatgctgacctggag

SEQ ID NO: 9439 - DNA, 75 bp, Homo sapiens
atatggcggaggcggaaggggaaagcctggagtcctggctcagtctcagccttagatccaaggacagtccaagga

SEQ ID NO: 9440 - DNA, 100 bp, Homo sapiens
ctcgacctgctaacagaactggaccttttcgggccccgtggttatgaatgtgcttcagtttcataatgcctcctgctatggcagacatccttgacatctg

SEQ ID NO: 9441 - DNA, 140 bp, Homo sapiens
tcaccggcgtgccccaccatgtcagacgcagccgtagacaccagctccgaaatcaccaccaagacaatgcagatcttcgtgaagactctgactggtaagaccatcaccctcgaggttgagcccagtgacaccatcgagaa

SEQ ID NO: 9442 - DNA, 96 bp, Homo sapiens
aaagttgcagctactttgcaagtgccagtaaatgatttaaatgcagtacaaatggtgatgatcatcaggtcaaggatagtctggagcaattgagat

SEQ ID NO: 9443 - DNA, 90 bp, Homo sapiens
ggttcctcaagccagcagatggacgacctgtttgacattctcattcagagcggaggccataaaattttgagtagaaaaatccagaaattt

SEQ ID NO: 9444 - DNA, 100 bp, Homo sapiens
catgaatgccatcgccagcttggcagcaacaggactgcatcctggtggcaaggacggagagaaatgcttcggttacccacagtctttcgccagatgagac

SEQ ID NO: 9445 - DNA, 95 bp, Homo sapiens
ccgtgtacgtgcctgtgcctaaacgttttaccaacgaggatcatttggctgtccataaacataaacatgagatgacactgaaatttggtccagca

SEQ ID NO: 9446 - DNA, 100 bp, Homo sapiens
cctgggggaccgcttgcagcggggacgcgaggacccgggctgggctttcctcacccggaaagggctattgcaagacacgaagtccgagaaattgagcagc

SEQ ID NO: 9447 - DNA, 82 bp, Homo sapiens
ggagacacaagaagcggatccaggattttttatcaagcagaaatgcatcgaacaacgagaatcaagatcactgagctaaatc

SEQ ID NO: 9448 - DNA, 100 bp, Homo sapiens
gagatgaagaagtcgcactcggccaacgacagcgaggagttcttccgggaggacgacggtggagggactggtgattgcagctggaagtgcccatgaccga

SEQ ID NO: 9449 - DNA, 96 bp, Homo sapiens
cagcaagctctacagatgagtggctctttggcatttggtgctgtggcagggacttcctggtgaccgagggcctcctggacctccagggatacgtgg

SEQ ID NO: 9450 - DNA, 97 bp, Homo sapiens
gtacaacttaaccttgcagagagccactggcatcagctttgccattcatggaaacttttctggaggcaagtgaggcctatctggttggcctttttga

SEQ ID NO: 9451 - DNA, 100 bp, Homo sapiens
ggaactacgagtacctgatccgcctcttccaggagtgggaggatgccggctccaggagcagcagtggaggtcgggaacgcctcattgtggagcccccgct

SEQ ID NO: 9452 - DNA, 100 bp, Homo sapiens
ataaagctttggaagatgcagatgagaaggttcagttggcaaaccagatatatgacttggtcgttccaggggtagaggaggcatgaaggatgaccgtcgg

SEQ ID NO: 9453 - DNA, 98 bp, Homo sapiens
cagctgggtcacccgcactgagtcaacagactgagcgcgtccaggcctgacagctctgcggctcgggccctgaggccatttcataattctgaatcatg

SEQ ID NO: 9454 - DNA, 76 bp, Homo sapiens
agtaacacacctggaacaggaacccagcaacaattcttctgccagtctattatcctcccagtccacaacgctgaac

SEQ ID NO: 9455 - DNA, 90 bp, Homo sapiens
gtccctgtactattatatccagatgtcctgtgaagtcaacgagtgccgaaaaattgagagtcttgaaaacttgtatttggattttgatga

SEQ ID NO: 9456 - DNA, 82 bp, Homo sapiens
aggacttcggcgcgggactcaagtacaactcccggcacgaggaaacttcctcctggccaaccctgtgtctggcagccccatc

SEQ ID NO: 9457 - DNA, 75 bp, Homo sapiens
cgcagatatagaacatttcttttatcacagtgtggtcattgtaagactctggctcctacttgggaggaactctct

SEQ ID NO: 9458 - DNA, 82 bp, Homo sapiens
gtggactagggtcgccggggaagcgggtatcatgatattagctggtttgacatcaagtcatttgtgagtcatcagatcttct

SEQ ID NO: 9459 - DNA, 116 bp, Homo sapiens
tgatgttggtccactatgaaggctacttagaaaaggacggctccttatttcactccacgcttggtttagaaagaggggaaacagctaaagaagccttagatgtcattgtctccttg

SEQ ID NO: 9460 - DNA, 101 bp, Homo sapiens
catggaggctgagcatttattcaggagcagaaagtttaataggcaagaaagaaggaagaagctcccccatacagagacagagggaaagtcaagaggaaacc

SEQ ID NO: 9461 - DNA, 80 bp, Homo sapiens
ctcctccataaaaacaagtgtgtgcatctggctgttagaagaattcatgctcatccggtataaaagaagcctgtattgtt

SEQ ID NO: 9462 - DNA, 99 bp, Homo sapiens
atcgacgccgcctggcaggccctgcgcaccagtttctcttcagcaacgggtagcagaattggaaaaaattaatgcagaatttttacgtgcacaacagca

SEQ ID NO: 9463 - DNA, 100 bp, Homo sapiens
gtccctgccagcaagccggagcctgccagagccaaggccaagctctccaagttcagcatccccaagcagggggagtcccggctgagacaacaggacatcg

SEQ ID NO: 9464 - DNA, 100 bp, Homo sapiens
catttgtgaattcacatcccaagagttggataatcttcccctccatcgagatgctggctatgagtttgacatctgcttcacctcagtgcagaagagagcg

SEQ ID NO: 9465 - DNA, 50 bp, Homo sapiens
ggcagccgggggacagctgtagtgaagacttaattcagtgcacaaatgag

SEQ ID NO: 9466 - DNA, 100 bp, Homo sapiens
taggagatttgtttggcgtgccaagcttctctgtgaaagagcacaggttttactcaagtgaacatgaatacagtggattaaatatagttcgaccttcaac

SEQ ID NO: 9467 - DNA, 88 bp, Homo sapiens
agcggcgctcccggcggggcggccccggggggacccggcttccgcgcctatgccatggacaatattaccaggcagaaccaattctacg

SEQ ID NO: 9468 - DNA, 75 bp, Homo sapiens
caaaacgccaggcggatctcagaaggccagttcaaagcatgttggcagataaattgaacatgactccagaagaag

SEQ ID NO: 9469 - DNA, 82 bp, Homo sapiens
cctgatgaaagcctacgggatccgctttgacgtgatggtgaacggcaagactgattcttgctattccaaatcctcttccacg

SEQ ID NO: 9470 - DNA, 90 bp, Homo sapiens
ggtgcagatgcagtgtggctctggatagcaccttatggacagcctggaatatgatgagaatacttccatcatctttagacctaactcaaa

SEQ ID NO: 9471 - DNA, 100 bp, Homo sapiens
caaaggactcgccctctgggaggcttaccgagagtttgaaagtgcgattgtggaagctgctcggatgcgagaagatgaccgtgtggcaatccacgaagcc

SEQ ID NO: 9472 - DNA, 90 bp, Homo sapiens
ccccagaaggcagcggtgcgcaagctcaacgacctcatcaagcgagcgaggctggccaaggatcccaaaatggctgggcgaaaacttgct

SEQ ID NO: 9473 - DNA, 100 bp, Homo sapiens
tatgggagacgacagaccgtttgtgtgcaatgccccgggctgtggacaggttgctggtcaaattccctgagttgaattatcagcttaaaattaaagtgtg

SEQ ID NO: 9474 - DNA, 75 bp, Homo sapiens
tgagagttacgtggcagaaatgatcaagcgcgttccttcacctcgggcagaataactttgcagaagcccacaggt

SEQ ID NO: 9475 - DNA, 100 bp, Homo sapiens
tgagaccgggcggccacagtccgcagggatgaacctcgagttgctggattcatgatgttgctatcaaaagttgagaaattgtcagaagaaatcatggaga

SEQ ID NO: 9476 - DNA, 75 bp, Homo sapiens
ttttcttccttctgtcacatcacacccaatggtcctgaggcacgtgaatggccaggatcagattgtgcccggcct

SEQ ID NO: 9477 - DNA, 75 bp, Homo sapiens
ctggccaggggggcccgtctgggccagccacctggtgtccggtacatgtcccagagcaagcacacggaggcccgg

SEQ ID NO: 9478 - DNA, 51 bp, Homo sapiens
cccccgagggtcaacgagaaagagatcgataaagagaggcctgtccagtct

SEQ ID NO: 9479 - DNA, 100 bp, Homo sapiens
cacatttactgccatcgtcccaagatggaggctgtcccagaaggagattggttctgtactgtctgtttggctcagagtctcactctgtcacccaggctgg

SEQ ID NO: 9480 - DNA, 100 bp, Homo sapiens
aaaacctgacttttatcatcatattgataatctcaggagaactctatgcagaagggctacttctacaagtccgaacagccagtccagcaaaatgaacagc

SEQ ID NO: 9481 - DNA, 101 bp, Homo sapiens
gggaagaaaagcatttattgatgccaatgggatgaaaattctgtataatacttcgcaagtggttatcactaggctaaaactggacaaagaccgcaaaaaga

SEQ ID NO: 9482 - DNA, 103 bp, Homo sapiens
tgcaggatggagaaccatggagggatgtccccaacaaccctgagcgatttgacacatggccctgcatcctggtagagacggggtttcaccctgttagccagga

SEQ ID NO: 9483 - DNA, 76 bp, Homo sapiens
ggactgcgcaacgctgcgctctgggctgacaggaacagattatcagtctggtcaatcagatctgcggcaaagtgtc

SEQ ID NO: 9484 - DNA, 90 bp, Homo sapiens
aaccacctggcggcccagcatgaggatcgcttacacctgagacgaactacagaacagcacgtaccagaggtggaagtccaagtcaaacgc

SEQ ID NO: 9485 - DNA, 100 bp, Homo sapiens
atttctggctctgaaggcgaacgcttcgctggccatttaggagctctgctcaaagccagacggtggcagtagagaagagcatcacagaagttgctcagga

SEQ ID NO: 9486 - DNA, 82 bp, Homo sapiens
ggataacatggagtcgggcaagatggcgcctcccaagaacgctccgagagatgccttgtacacagtgtatagtcaagccagc

SEQ ID NO: 9487 - DNA, 100 bp, Homo sapiens
accccgccctccgtctcctcttcctcctcctcttcctcttcgcttgcagatacccccgagatcggtacagctggataacttgccaggaatgagtctcgtg

SEQ ID NO: 9488 - DNA, 83 bp, Homo sapiens
ctcgcctttgccgatccgccgcccgtccacacccgccgccagggccctcctccccagttcagaatgcagcccacagccaccat

SEQ ID NO: 9489 - DNA, 87 bp, Homo sapiens
cagcaaggtcggcagagcaaggggcttacgcagaaggacctggccacgacctcctgccccccgaggtctgcagtctcctgaacccag

SEQ ID NO: 9490 - DNA, 100 bp, Homo sapiens
ctagaatcaaggatttcagcaacaatgcctctgttcaaactcccaggtacaccaggggttggaaaaaccacactaggcaaagaacttgcgtcaaaatcag

SEQ ID NO: 9491 - DNA, 89 bp, Homo sapiens
agagtacagtgcggggaggctgagaggggcgcatgcaacaacaacttttggaaggtcgttgcagttcgataaggagcagatggtcgcgg

SEQ ID NO: 9492 - DNA, 74 bp, Homo sapiens
gacttgtggagcagtctgtcaaattgaagcagccgacacgagtcgttgttcataaaacagcttttgaaagttga

SEQ ID NO: 9493 - DNA, 90 bp, Homo sapiens
ccccggctctgcctgatccagcccttcatcgacttgcggcaaaggatcatggtcatcaaagccaaaggaggagatgttaaagtaacccat

SEQ ID NO: 9494 - DNA, 90 bp, Homo sapiens
ccaaacgtatggactacctccttttggtttattacccagaactctttgtctgggtcagtcaagaaccatttccaaacaaggacatggagg

SEQ ID NO: 9495 - DNA, 75 bp, Homo sapiens
cggagtcggcggtgttgtaggtagcggtaccttgagtggcaacagaactgataaatttcaaacggaagagagtgg

SEQ ID NO: 9496 - DNA, 100 bp, Homo sapiens
ggcggcgccggcagcggacagctcggacagcgcccagggccggagcccgagcccttggagtcctggcataaggcctgctttcgatgtgccaagtgtggca

SEQ ID NO: 9497 - DNA, 97 bp, Homo sapiens
caaacaatgggtcagtgttctcggttgctggtgttgtcggccgtgcagacctcctgtgtgccctgttcttcttgttatctttccttggctactgtaa

SEQ ID NO: 9498 - DNA, 75 bp, Homo sapiens
gacggattcatttagagctgcggaacaggacgccctctgatggtatttgaagtataccatacaactgttttgaaa

SEQ ID NO: 9499 - DNA, 83 bp, Homo sapiens
aagctgcccggagcaggattctgtctattcagaaagacctgttgctggatttgtgcgactcggtgaaggatgatgcccggagg

SEQ ID NO: 9500 - DNA, 101 bp, Homo sapiens
ctaaaattaaacatcggggacctacaggttacaaagaaggaacccagccagccggcggaatgcaagcagcagtaggaagcggaggcgggtgcctggcagac

SEQ ID NO: 9501 - DNA, 76 bp, Homo sapiens
tgaaattgaaggaagaggacatggccatgaatgcccaacaagataatgaattcctcctgatcagcagagactgatc

SEQ ID NO: 9502 - DNA, 75 bp, Homo sapiens
catctcctccgtcaccagccacatctaccaggcaaagccaaagctaattgagccactcgactatgaaaatgtcat

SEQ ID NO: 9503 - DNA, 100 bp, Homo sapiens
cctggaggattgtcactccaacctcttttcgctgggcagtccagatgaaaagagtaccaatgaatctgcctccagctgaataaaccatggagaggaaaaa

SEQ ID NO: 9504 - DNA, 100 bp, Homo sapiens
agaaaagtagtcggagaaggagcggcgactcagggtcgcccgcccctcctcaccgaggaaggccggaaaattgcctaagaattatgacccaaaagttacc

SEQ ID NO: 9505 - DNA, 75 bp, Homo sapiens
gatggaaggcatctgtgtgaaggagcagatcccagtgactgcagcgccaagcggcatccaccaagcatcaagttg

SEQ ID NO: 9506 - DNA, 83 bp, Homo sapiens
gtcggcagatctgagctttcttcttggacacctaatacccagggtcctccaggagccattccgtagtgccatcccgagcaacg

SEQ ID NO: 9507 - DNA, 75 bp, Homo sapiens
atgaagatgatgacgatgatgatgaagaggatgatgatgaagaggtgaggtggctttgaccccgggttgcccggc

SEQ ID NO: 9508 - DNA, 100 bp, Homo sapiens
caatgctttaaaacaacatgcctactcagaagaacgtcgaagtgcccgcctacatgagaaaaaggagcattctacagcacagagctctgttacagatatg

SEQ ID NO: 9509 - DNA, 89 bp, Homo sapiens
ctcgtggccgacggaacaatgaaggttatcaatactctggctgaccatcatcatcgtgggactgactttggtggaagtccttggttaca

SEQ ID NO: 9510 - DNA, 100 bp, Homo sapiens
gcctttgcctgatcatgcagacatctccaactgtgggaactctttccagcttgtgtctggtttttctattgggaaagctactgatcggatggatgctttc

SEQ ID NO: 9511 - DNA, 90 bp, Homo sapiens
cactcctgcccgctgattttctccagctgtgcaaatgtcaattgtcaagccttggacaaagctacacccttgttcattgctgctcaagag

SEQ ID NO: 9512 - DNA, 74 bp, Homo sapiens
gatggctggaggcctctgttgtaggcaagatcaacaaagctcccgtggaagtcgctgaccagcatcattgagta

SEQ ID NO: 9513 - DNA, 105 bp, Homo sapiens
gcttctcctcatcaactggggatgattacagttcttcctaaaaaaggcccccccggcctgccacttcagtcaactccactgaggagactgccactacagttgttg

SEQ ID NO: 9514 - DNA, 97 bp, Homo sapiens
cctgaagctccttacacatcccctgataaactaaaggaaattgatgtggaagtgaggaaggagattgaggatgctgcccagtttgccacggccgatc

SEQ ID NO: 9515 - DNA, 98 bp, Homo sapiens
gaagggacttgggatatttaattggataatagaagattgaagggcaccgcatgcgtggggagaccaccctgtggaaccctggctgtgaccatgcaggt

SEQ ID NO: 9516 - DNA, 50 bp, Homo sapiens
cctgggtcgcttggaagaagccaagaatcccacgtggcgaagtctcgatt

SEQ ID NO: 9517 - DNA, 82 bp, Homo sapiens
gtgtggggctgtccgaggaggaggcagtggctcgccacgggcaggagcatgttgagctgtccccgccctactccggaccgcc

SEQ ID NO: 9518 - DNA, 75 bp, Homo sapiens
taaggagaaagtcctacaacagtttggcgtgcaacatggggcttgagaaaggtctgcgctcctcagaccaccggc

SEQ ID NO: 9519 - DNA, 75 bp, Homo sapiens
gaaacagaaattctggaacacctatatgcattactctactgactggcagagacaggagaggtagatgtccacgcc

SEQ ID NO: 9520 - DNA, 149 bp, Homo sapiens
tcaatttctgaagaagtggctgtagggagcatagctgctacactgaagatgaagcaaggcccaatgacccaggcggttgcaaaagcttctcatttcagagagatgccaggatcctaagtgcctgccaaacttaccaattctaaggaata

SEQ ID NO: 9521 - DNA, 90 bp, Homo sapiens
ggcacccagaagattattggaagggtacatctagatttgggaatggatgatgaaggagatgatgacccagttcctctaccaaatgtgaat

SEQ ID NO: 9522 - DNA, 96 bp, Homo sapiens
agaccacatttgaggatcttattcagcgctgcctttcttcagcaacagaccctcctacttctgcttcctcctggccgctctgggtgtgacagctgg

SEQ ID NO: 9523 - DNA, 75 bp, Homo sapiens
ggagatcccctcagttctgcgctgctcccgttccccctccccagagcaagatgaggaagccaaggcccagcagag

SEQ ID NO: 9524 - DNA, 82 bp, Homo sapiens
cccgtcaaagaggtgggcatgtatgggaagattgcggtcatggagcttttcaggcccaagactcaagaacgtgaagctaagg

SEQ ID NO: 9525 - DNA, 73 bp, Homo sapiens
gcttggttaaaacctgacacttttaacagctgcagtgagaagaggagtttgttactttaaacagaggctgaag

SEQ ID NO: 9526 - DNA, 100 bp, Homo sapiens
caaggctgaagaagcagttggtaactaacagtacatctttttctaaggtgctccttgtcttctgagatgttgggcccctcttgggatggagatgaagcag

SEQ ID NO: 9527 - DNA, 100 bp, Homo sapiens
ggaggtggtggtggagctgcagatccgggcggattgcctacagcgctcctttaaggcacaggttttctcctgccctgcttgccggcatgatcttggccag

SEQ ID NO: 9528 - DNA, 103 bp, Homo sapiens
aatatgacccaagcattggtatctacggcctggacttctatgtgacattcacggcatggtgtaactcccacctccggaaggcggggacacagatcgagaacat

SEQ ID NO: 9529 - DNA, 98 bp, Homo sapiens
tgcctcccgagactctccttgcttggaattctgcccactctgcggagttagcagtcacgacctccagcacagggcctcggcttcacaggatggggctg

SEQ ID NO: 9530 - DNA, 98 bp, Homo sapiens
tctgcacttcgcattttggcattgacatttaattttagggtcctttatatagaagggagagtaggttcccacatcccatccccctcaccactgtgcag

SEQ ID NO: 9531 - DNA, 100 bp, Homo sapiens
tgcaaacttaattaaagaactggccagaattaaacaaccaccatgtcgagcaaaaaggcaaagaccaagaccaccaagaagcgccctcagcgtgcaacat

SEQ ID NO: 9532 - DNA, 73 bp, Homo sapiens
cgcgaaccaacggttagcggtggcaggggctgactgagagcgtctgcttgagagtttcattctgtcgcccagg

SEQ ID NO: 9533 - DNA, 98 bp, Homo sapiens
ctgccttctccagcgacagccggttcgatacaagaggctgttttcctagcgtggcttgctgcctttggtaagaacatgtcgtccatcttgccattcac

SEQ ID NO: 9534 - DNA, 100 bp, Homo sapiens
aaagaaacgaggaccaaagccttcagttaacgaagcccttgtcatttgctgattgtgttggggatgagctgccgtggggatgggaagcagggtttgaccc

SEQ ID NO: 9535 - DNA, 100 bp, Homo sapiens
aacgcccccgggacatgcatcgtcccctggactctctcaattgatgctgatgtaacagttataggttctggtcctggaggatatgttgctgctattaaag

SEQ ID NO: 9536 - DNA, 100 bp, Homo sapiens
ctgtctgccattccattcgccatctatcacgcacacagaaccctggccaggatcatgaagggcgattgaaaagacaagttggatggcttgaggactggta

SEQ ID NO: 9537 - DNA, 100 bp, Homo sapiens
gctggggacagtgaccgtggggttcctcgcccagagcgtcttggcgatttctgacttacacaagagcctagaacagaaagaaagtaaaatccagcagcta

SEQ ID NO: 9538 - DNA, 92 bp, Homo sapiens
atccttgtttaatgactttggtgccctcaacatctctcagagacgaaagctcctctggtgcaagtgtggtagctattgacaacaaaatcgag

SEQ ID NO: 9539 - DNA, 82 bp, Homo sapiens
gtggacttgaaagaagctgcagcggaggaaggcgaggttcggctttccagtttggcagcagcactacaaatttcaacttcac

SEQ ID NO: 9540 - DNA, 83 bp, Homo sapiens
caagactctcttcgctctttgcatcttaactgcagaattaaatgtgagggagtctgacgtaagagtttgtgatgagtcatcat

SEQ ID NO: 9541 - DNA, 51 bp, Homo sapiens
ggacactctgtctacggacccttgtgtgggtaattccagaattgattggcc

SEQ ID NO: 9542 - DNA, 96 bp, Homo sapiens
caggaatcaggaatacttgacccacaggattattctacaggtgaaactcggactgacctggaagaagaccctgaggagaacccgggcacacagcag

SEQ ID NO: 9543 - DNA, 74 bp, Homo sapiens
aaatgtgagtggaagccatgaggccaaaggcagttgtattgattatgccaagggctttggtggccagtatggaa

SEQ ID NO: 9544 - DNA, 82 bp, Homo sapiens
catatcataagtggaattttggagatattcaaagattacaccaccaccttcactgtcagatccacttaaagagctttttcga

SEQ ID NO: 9545 - DNA, 90 bp, Homo sapiens
agatcaaatggcacttcattggccacctacagaaacaaaatgtcaacaaattgatgggggttgtggaaaccagaacttcgcctggagaac

SEQ ID NO: 9546 - DNA, 90 bp, Homo sapiens
tttcaggacttaaggctctgggagaggctggtggcatgttgtcctcaatctcgacactactatcgccatcacccaaaattttgccagcag

SEQ ID NO: 9547 - DNA, 90 bp, Homo sapiens
aatctcttctccctccccttcttgaagtctcaggggatccagaactgcagccagtccttgctgggctgttcctgtccatgtgcctggtca

SEQ ID NO: 9548 - DNA, 83 bp, Homo sapiens
accagatcgaatctgggccaaatagaaagatgatgccaccagtccccatttctcaacacgtcatgaagggtccttccaagttc

SEQ ID NO: 9549 - DNA, 100 bp, Homo sapiens
aagggagagtttcagttcttcattgacgtgaagtacatgcgagaagccacgccctatgtgaagaaaggatccccagtatccgagattgggtgggaaacac

SEQ ID NO: 9550 - DNA, 98 bp, Homo sapiens
ccgggatgccgcccgcttccccatcatcgccagctgcacactcttggggctctacctctttttcaaaaaccaagcgcctccaggtctctacacgaaga

SEQ ID NO: 9551 - DNA, 100 bp, Homo sapiens
caaacctggcaaggatggtgcagattttggcagattatggctttgtccccacccagcactgatgatattataaaactcactgccacaacgacattgtcaa

SEQ ID NO: 9552 - DNA, 75 bp, Homo sapiens
cttccccagccatgtggaacttcaggtcaattcagtgaagatatgatacccacagtgggcttcaacatgaggaag

SEQ ID NO: 9553 - DNA, 103 bp, Homo sapiens
gactctgggattaatgctaaatttgtgaatgctgtgtatgataccttacttaatactacatatctgaagagatggattaagaatgctttggattaaggattgt

SEQ ID NO: 9554 - DNA, 112 bp, Homo sapiens
tgaccatgatggaatgcttgacagagatgagtttgcagttgatgaacgtgaagccagagaaaatgtgaagagagagcaagatgaggcctatcgcctttcacttgaggctgac

SEQ ID NO: 9555 - DNA, 83 bp, Homo sapiens
gatgtgaaaatgaagccagaccgagcttcatggcggctgaagagatgcattggcctgtccctatgaaggccattggtgcccag

SEQ ID NO: 9556 - DNA, 82 bp, Homo sapiens
ccctgagggccttcgagagctaccgcgccagacagtgcctccggagccagcgtggtggccatagacaacaagatcgaacagg

SEQ ID NO: 9557 - DNA, 51 bp, Homo sapiens
ccgtggtgacattgtatcattggtgagccagatgccagcagtgccccccag

SEQ ID NO: 9558 - DNA, 90 bp, Homo sapiens
ccgtgaccgagagcgtgaccgagagcgcgaatatcgtcatcgttagaagaagaatcccagacttcttagagaacccagtgactttttgca

SEQ ID NO: 9559 - DNA, 98 bp, Homo sapiens
cactcttgaacaaagcagctgctttttaaaagcgatgatctcaatgccacccaccaacactgtgttttggccggttcacaacctcggtttagttccac

SEQ ID NO: 9560 - DNA, 75 bp, Homo sapiens
cgcgcctctcgcttgcttccctcggccgggccgtcctcggcggcagtgtcaggacgcaaacatgcagatctttgt

SEQ ID NO: 9561 - DNA, 82 bp, Homo sapiens
gccgatccagcctgcggagcctgtggggcagcaggaaggagcgccccacctccctgaacgtgttccccctggctgacggcac

SEQ ID NO: 9562 - DNA, 80 bp, Homo sapiens
gcggccttcccatcaccatcacagagagcgatgtggggtggaagacaacccgtgagtattacaccttcatgtgggttact

SEQ ID NO: 9563 - DNA, 85 bp, Homo sapiens
cagctttaaaggagatgcaggagaaaatacggcattgctagcttcctgcctgacacagctcacttcaagaagtgcacaatgtcag

SEQ ID NO: 9564 - DNA, 75 bp, Homo sapiens
catttgtaaaacaagaattgtcagttgaaaacaatcctcgaacaggaaatcttggtgcactaattaaggtcttcc

SEQ ID NO: 9565 - DNA, 75 bp, Homo sapiens
ggtagctacccggatgcagtcctttgggatgaagcctttgaagaagatggtggagagaattcgcaagttccagat

SEQ ID NO: 9566 - DNA, 74 bp, Homo sapiens
ctaaatcaacagtatgaaaaattatttcataaatggatgctgcaattacacctgtctcgatatagattgaagtt

SEQ ID NO: 9567 - DNA, 100 bp, Homo sapiens
gggctatctggtatctgtagatggctacatgaacatgcaggtacaactccaaaaggagacattggagaagaaccaagctgggtctataaggaattgcaca

SEQ ID NO: 9568 - DNA, 74 bp, Homo sapiens
tgaagaccacaataaaagagacctctacttagctcagcaattcttaccttgatgctgaaaacgccattcaacag

SEQ ID NO: 9569 - DNA, 50 bp, Homo sapiens
ctcgatttcagacttttgtgcaaagtaatcaagtcagaggattatatgac

SEQ ID NO: 9570 - DNA, 88 bp, Homo sapiens
gaagatgaagaaacccagcttgatatgttggtgatggatgtggacacactgtactaggccctgagagtggaacccttacatccataaa

SEQ ID NO: 9571 - DNA, 101 bp, Homo sapiens
gacttgaaccaacagttgagactcttcattacccggcacctagctcacttctcctcagaggtcaaaggtactccaaagattcaggtttactcacgtcatcc

SEQ ID NO: 9572 - DNA, 75 bp, Homo sapiens
agacgtgaaactgaaggctgaagattttatagtggattctgatgaccgggattccaagcgggattcccttgagga

SEQ ID NO: 9573 - DNA, 100 bp, Homo sapiens
cagctgtgggagccccgagaacgcctccagcggggatgacacagaaggggctttgaccacgacctttgaagagcttcattttgagatcaagccccacgat

SEQ ID NO: 9574 - DNA, 82 bp, Homo sapiens
ggaggagcggcggatcaatcacacggctttatcctgtggataaacgcagagtgaacgagtttggggagtcctacgaggagaa

SEQ ID NO: 9575 - DNA, 75 bp, Homo sapiens
ggcgtgtgcgcgcccgccagctgctccggagatacggtcccctcttgctgttggctgcacatcaggaaggctgtg

SEQ ID NO: 9576 - DNA, 75 bp, Homo sapiens
ccaaatgaattatgtcagcaacgtatccaaggagggcaagatgtccaggcaaaaccttgtttaaatgttcatcac

SEQ ID NO: 9577 - DNA, 75 bp, Homo sapiens
ctcaaacaagacaacttgagctgaaagcgaaaaactatgctgaccagagtcagtcatatgaaattcggatgctgg

SEQ ID NO: 9578 - DNA, 80 bp, Homo sapiens
cgggccggcgcgggagggctgtgtgatggcctcggagcgcccggagccggaggactccatgttttcgttggccctgaaat

SEQ ID NO: 9579 - DNA, 96 bp, Homo sapiens
tctccagccaacgatgaccagtccaggcccagcctctcgaatgggcacacctgtgtagttggattggatgctgctggcaagacaaccattctgtat

SEQ ID NO: 9580 - DNA, 74 bp, Homo sapiens
ttcccttacagtttctttgagcagtttgtggaagcgatcactttccccacaaataaaccagagaaagatgcaag

SEQ ID NO: 9581 - DNA, 100 bp, Homo sapiens
gtggggtcggagctgggcgcggagcccctcacagtgcagacagtgacaataccctcccctcccttgggctggacccctctctacagctaggagccaatgg

SEQ ID NO: 9582 - DNA, 50 bp, Homo sapiens
ttctctgcttcctttgaacagagctctagtatcaaatcatgggtggataa

SEQ ID NO: 9583 - DNA, 100 bp, Homo sapiens
ctttagtacgatggtcaagacaagaaccgtggagtcagaatgcctgcatgcagatctcatcaccatggccaggctatgatgaccttaatcctgattggag

SEQ ID NO: 9584 - DNA, 100 bp, Homo sapiens
ggtggaccccatcacacacgacctcatcatcagcctggcacgctacatccactgtcccaagccggccatcgaggagggcacgctggaggagatcgaagag

SEQ ID NO: 9585 - DNA, 75 bp, Homo sapiens
gagaaatgaacttcaactggttgatcttccaacaggagctcagtctgaatattcttggagaaagatgctgagtgg

SEQ ID NO: 9586 - DNA, 99 bp, Homo sapiens
gttctaacgtgcctgatctactgagaccaaggatgaccaatgactcagaagggaaaatgggatttaaacacccaaagaagcatcagatggtgaaggaga

SEQ ID NO: 9587 - DNA, 100 bp, Homo sapiens
accagctcgagtctcaagtggacaatggcaaactaggcgtggcaactgctggctgcgtgaatgaagttacagagatggagtgcggtcgctctgaaatcga

SEQ ID NO: 9588 - DNA, 100 bp, Homo sapiens
gcgggactcttggcctgtccctcacatccgatgcaccctttttgtcagattatcaggatgaggtcattctgacagatgaggaagtgcagaggaagcggga

SEQ ID NO: 9589 - DNA, 96 bp, Homo sapiens
gcagaagtcgcgtgtctaggtgagtcgcggtgggtcctcgcttgcagttcagcgaccacgaaaactttagaaactgttcctttggagaggaaaaag

SEQ ID NO: 9590 - DNA, 51 bp, Homo sapiens
ggaacccggactccggcgtagcgtcaggtcaattcagtgaagatatgatac

SEQ ID NO: 9591 - DNA, 100 bp, Homo sapiens
cggagggactgcaaaagctctcagggatgctggtctggcagtcaggagcagccagggcttcctgcatctgaagttcgcgcggacccgtgagaaccaggtg

SEQ ID NO: 9592 - DNA, 82 bp, Homo sapiens
caagctcgtagcctgccactccagcagcccgacggccatggaggctgaagagacgatggaatgccttcaggagttccctgaa

SEQ ID NO: 9593 - DNA, 86 bp, Homo sapiens
ccaccactttgaggtcactttccagcagtccagcacggccaagtcagccacctggacgaaacgcttcgttaagggactcaggcagt

SEQ ID NO: 9594 - DNA, 74 bp, Homo sapiens
tgccgtgctggagggaaggctgctgttggagtgcacagagaacacccctagcatgaacagtgtgaggattccac

SEQ ID NO: 9595 - DNA, 82 bp, Homo sapiens
gagcgacaagccgctggcagccgcggatctcaccgccgctcaggtaatagttatgcacgagtgcgagctgtggtgatgaccc

SEQ ID NO: 9596 - DNA, 75 bp, Homo sapiens
cagctctgcggctcgggccctgaggccactgtgagcatgcatttcaggttgttggcgcagctctgctccatgatg

SEQ ID NO: 9597 - DNA, 90 bp, Homo sapiens
aaacaacattcaactccctactttgtccatcaggtggtgacaatgtaccatgctaaggccaaagatcaactcacctgtaataaattcgac

SEQ ID NO: 9598 - DNA, 100 bp, Homo sapiens
cgacaaggaagtgaagaaggcgcatcactcccagctgcgcaaagcttgcgaggtggcgttaggattgcacctctgcctccacctcccctactaccacctt

SEQ ID NO: 9599 - DNA, 90 bp, Homo sapiens
ggaggaagagaatttgtccaaatacaaagacaggtctgaaggggcgtctcgattacctgagctctctgaaggtgaagggccttgtgctgg

SEQ ID NO: 9600 - DNA, 74 bp, Homo sapiens
ccagcggaagaccccagctggatatcagagctgggagaacagagagccaatggagatcttcgtggatgatgaga

SEQ ID NO: 9601 - DNA, 111 bp, Homo sapiens
tctgatttgctgtcagccatgaacggatggatgtgatgcctgctagccaaaaggaaaacctcggatcaattctcagctggtggcacaacaagtggcacaacagtatgccac

SEQ ID NO: 9602 - DNA, 100 bp, Homo sapiens
ttcaggtgtggtagccggcgccgcgcccatagccggacggggatctgagctggcagatggagtgaaggtacctgagcgcaggaaccatggtcttcattgc

SEQ ID NO: 9603 - DNA, 98 bp, Homo sapiens
gttggcgagtagtagcgaggagacgaagcctcatctagttgaatctgaagatgtggacctgctgatgaagagggctgattgtatctaacttagggtct

SEQ ID NO: 9604 - DNA, 101 bp, Homo sapiens
cttggtatactacatggcaaaatgggaaagcctcccaaagtgaaatgcctgaccaagatctggcaccccaacatcacagagacaggggaaatatgtctgag

SEQ ID NO: 9605 - DNA, 100 bp, Homo sapiens
tgctgcccagcccctggggagaagacaccagcagcatgcccagccagggcagggtggagagctgcagctgcagttaattggccttggtcctcacagctcc

SEQ ID NO: 9606 - DNA, 80 bp, Homo sapiens
aagtccagagctgaggactgcctgtttgcagagacggtctcgccacattgcccagactggtctgaaagtcttgggctcaa

SEQ ID NO: 9607 - DNA, 98 bp, Homo sapiens
tagaatgcttgaggcctggaatttaaacctgagccactatctgaaggtttggcaaacatcgaaaagatgacaagattgagaaaacgggtaaaataaaa

SEQ ID NO: 9608 - DNA, 98 bp, Homo sapiens
gatcgccgcggggcagttcgggccggctgtcctggcgcggagatcctgctgggccgtggcttcaccttttggcagtggtttgatggtgtcctggacct

SEQ ID NO: 9609 - DNA, 100 bp, Homo sapiens
ggactgtgaccgccggatacttgcttttcactgttacatgccttgaagtgatgaggaggtttctgttactatatgctacacagcagggacaggcaaaggc

SEQ ID NO: 9610 - DNA, 80 bp, Homo sapiens
tgttggctgggtcctctccgaaatcgacagcctcaaccttcataaacagatgccgacaaaaggatcaaggtggcgaagcc

SEQ ID NO: 9611 - DNA, 75 bp, Homo sapiens
cgtggctgcaaccttagcgacatcaggaagaacagggtcgaggatcgagccacaagtatatggttatgatgactt

SEQ ID NO: 9612 - DNA, 75 bp, Homo sapiens
cgctggagagagacaagatgtccgccagagctgcggccgccaaggtaactgaagcaatacaagctgttctcttgg

SEQ ID NO: 9613 - DNA, 75 bp, Homo sapiens
cagggactttctgcagtgcctctgagaacttacgcagatcagccgaatttcctctacatgacaaagaaagactgg

SEQ ID NO: 9614 - DNA, 75 bp, Homo sapiens
ccagcaacgtgtttgacgggctcctcaccgttgtcctgctgatactatcaaatcagcctgggaagcatcttttcg

SEQ ID NO: 9615 - DNA, 50 bp, Homo sapiens
tggcagtgctcaaactcaccgaccagctttgaagtttaaatccaatggag

SEQ ID NO: 9616 - DNA, 139 bp, Homo sapiens
cgtcgccgctatgaagaaagtggttcaacagctccggctggaggccggactcaaccgcgtaaaagaaacccagcgtttgctggcagaaccagttcctggcatcaaagccgaaccagatgagagcaacgcccgttatttt

SEQ ID NO: 9617 - DNA, 100 bp, Homo sapiens
ctgaagatgagttgtcccagactcttctcagtgattggaaacttaggtggtggagctaaagactggattatggacagaacttggaaatattgagaataat

SEQ ID NO: 9618 - DNA, 100 bp, Homo sapiens
aacgagtacagcaatatagaggaattcgcagagggatccaagatcaacgcgagcaagaatcagcaggatgacgggtcaaaatgcagatcttcgtgaaaac

SEQ ID NO: 9619 - DNA, 75 bp, Homo sapiens
ggagactggattgtttcctggtagcaatgccactttcaggatactagagtagagacggggtttcacgatgttggc

SEQ ID NO: 9620 - DNA, 74 bp, Homo sapiens
ctgaagagggaagacacgcggaaacagtgtgaagagtgccagtgctggcagcatggggtctgcatgggattact

SEQ ID NO: 9621 - DNA, 104 bp, Homo sapiens
cttcgatcccttctctgatttgctgtcagccatgaacggatggatgtgatgcctgctagccaaaagggagtgatgggtgaatatgagcccaaaatagaagtgca

SEQ ID NO: 9622 - DNA, 75 bp, Homo sapiens
agagggtttgaaaaccttgtaccttatacttcaactgttagtgaaattggagcgatttgaaattccaatcaaggt

SEQ ID NO: 9623 - DNA, 76 bp, Homo sapiens
tattcattattacatgaagtatcatgtttctagcaatggtggaacaaagcggcaaaagatatcccatcaaaattat

SEQ ID NO: 9624 - DNA, 98 bp, Homo sapiens
tgggacaaaagcctggaggttcagatttcttaaggaaacggttgcagaaaggggtatgtgacgcattcccagactcttcagccaactgagcatcagct

SEQ ID NO: 9625 - DNA, 74 bp, Homo sapiens
ggaaagaaaccatgtgctgaaatgtttgacgacactgatggtttgactgcctgcgctgctgacttaaggcccca

SEQ ID NO: 9626 - DNA, 100 bp, Homo sapiens
cttcttcttttcttaactggtcaagagccctaccacttatgtcttggatgaagatgaacctcgattccttgaagaagttgattacagtgcagaaagtaat

SEQ ID NO: 9627 - DNA, 75 bp, Homo sapiens
acagatgtctgaggacaaccacctgagcaatactgtacgtagccagaatttctctgcaaagaatgtccaaaaatt

SEQ ID NO: 9628 - DNA, 79 bp, Homo sapiens
ggctatggaccagaaaatgttttgtttgtaaaatgtatacagccagtttgtgtattgccaagtctgttgtgagcccttc

SEQ ID NO: 9629 - DNA, 96 bp, Homo sapiens
tcttgacaaagcaaataaagacaaagccaaccgatacttttctccaaattttaagggaaactgaacagccaagactcctataacaattttaccaac

SEQ ID NO: 9630 - DNA, 99 bp, Homo sapiens
gcttccagctggtggatacagcgcgcacacagaagacggcctaccagcggaatcgaatgagatttgcccaggacgtcttcctcatctgcttctccctcg

SEQ ID NO: 9631 - DNA, 90 bp, Homo sapiens
cttggtggtggcttccctggcacagaaggggccaaagtgagatttgaagagactcaccccacacagaccgcgtttctctccagtgtcgac

SEQ ID NO: 9632 - DNA, 90 bp, Homo sapiens
ataacaatcagtgccgagcaattgtgatgagatattctgctgagtggaaggaggagacatcacagctttcccagatcgggaggaaaaata

SEQ ID NO: 9633 - DNA, 90 bp, Homo sapiens
cagccagtagcttggatccttgtgggcatgatccataatcggtttcaaggccgctacctgtctgaggaacccgagccctacctggcagtc

SEQ ID NO: 9634 - DNA, 78 bp, Homo sapiens
tgaaggagtttgtgcagtttgtgtgctcggatggctcgggccaggccaccggacagggtggactccgacgaccagtgg

SEQ ID NO: 9635 - DNA, 75 bp, Homo sapiens
gaagccgaaaccgccaaagccagaacagattatggcctttgcaagcaaatgagtactcctctcctaaagaaagat

SEQ ID NO: 9636 - DNA, 100 bp, Homo sapiens
ctgcgaacatgatgcacgtgaataattttccctttagaaggcattcctggatatggcttggtggcatgcatgtttagtcccagctacacagcagggaggc

SEQ ID NO: 9637 - DNA, 100 bp, Homo sapiens
gtaccaaggaatgattgagattgtggaggagggaaaagctgttactagaaccaatgtttgaagtccctaattctgatatcgtatgtgtggaggttgacaa

SEQ ID NO: 9638 - DNA, 75 bp, Homo sapiens
taggtgaaggagcttttggaaaagttgtggagtgcatcgatcataaagcctttgtgtccctggtgatgttggaac

SEQ ID NO: 9639 - DNA, 96 bp, Homo sapiens
ggcggcggtcgacatgttccaggtcccggatagcgagggcggccgcgccggctccagaggtccagttccggccgtaccgcacagacgacttcatca

SEQ ID NO: 9640 - DNA, 96 bp, Homo sapiens
cattgacctgcttcaaaagaacaggaccccgtacgtcactaccactgtctctgctcacagtgccaaggtccatccagaaccacccactgcatgcag

SEQ ID NO: 9641 - DNA, 51 bp, Homo sapiens
gccaaggggtccttctactcctaattggctgattgcaattctggcccaact

SEQ ID NO: 9642 - DNA, 75 bp, Homo sapiens
tccaggaacctctgttgccatcagcaactgtgatggtctgatccggacaaaggacagagtctttgacagtatcag

SEQ ID NO: 9643 - DNA, 100 bp, Homo sapiens
gggaaccacagctgacccataatggacattaagggtgcgcctggctgggatgaagatctctcggccccccacatctgtaggacactataagatggtgaag

SEQ ID NO: 9644 - DNA, 74 bp, Homo sapiens
ctgcgttacaaactcctaggagggcttgctgtgcggagtacatcatccggtgctcagaaatcccaaagctcccc

SEQ ID NO: 9645 - DNA, 96 bp, Homo sapiens
aggaaaatcaagatgaaatagaaaatatgatgaatgcaatatttaaaggagtgtttgtacatagataccgagtactgatgaaatctccatctccag

SEQ ID NO: 9646 - DNA, 88 bp, Homo sapiens
ttcaacttgtagacacagccgggcaaggagaagatgtcaaccggacactagaaggtggaaggaaacctcttcattatgcagcagattg

SEQ ID NO: 9647 - DNA, 75 bp, Homo sapiens
acgtttgccacctagtgaccaaactgagaaatgaatgttccattgaacagatggaacatgttcggggaatgcagg

SEQ ID NO: 9648 - DNA, 117 bp, Homo sapiens
agagagagcttggttaacttgggagaaagtttcatctgtggatggagtattgaaacttacagcctatttagatcttaacctggataagtgctatgtgatccctctgaacacttccat

SEQ ID NO: 9649 - DNA, 83 bp, Homo sapiens
aggatgggtctgaacgactttattcagaagattgccaataactcctatgcatgcaaacatcatttacccttcgtggtgaccac

SEQ ID NO: 9650 - DNA, 100 bp, Homo sapiens
gacgcggaggccggggacgcggaggccgaggacgcggaggacgcggctctgccaggtgtcatggagaaactccagctgggcccagagattctgcagcggg

SEQ ID NO: 9651 - DNA, 82 bp, Homo sapiens
tgcgcgcgggaagatggcggaacaggctaccaagtccgtgctgtttgtgtgtctggcggagctggagtttgttcagatcatc

SEQ ID NO: 9652 - DNA, 83 bp, Homo sapiens
ccgcccggaaagctgcccagccaccagcaaccccccagctttgaaggcttcaccgtctaagaaacggtgcaattcaatcgccg

SEQ ID NO: 9653 - DNA, 50 bp, Homo sapiens
gaagtttctaggaaaggccggacaccagacctgcctagagctggaacgtt

SEQ ID NO: 9654 - DNA, 100 bp, Homo sapiens
agaacttcacatctctcaggctacatgttgcaaaggttaaattccagtggaaagttcgacgaactctagcattctccatccacgagcttgcagttattct

SEQ ID NO: 9655 - DNA, 90 bp, Homo sapiens
agaacacccctaaactcccataatcggaaggtgggagtcaatcattttgacaagtctcctgaaaggaacagctagcaggaactgaaacct

SEQ ID NO: 9656 - DNA, 75 bp, Homo sapiens
gtggaattcgcgaagctgccaaagccttagacaagtggtaggcagctccctcctcttcgtgcacgaccacaccgg

SEQ ID NO: 9657 - DNA, 50 bp, Homo sapiens
gggaaaacttgctgcggttgctcaaggtacaccaggggttggaaaaacca

SEQ ID NO: 9658 - DNA, 50 bp, Homo sapiens
caaaacaagaccaagtcattcagaaggtgagagtccatacatggagctcc

SEQ ID NO: 9659 - DNA, 98 bp, Homo sapiens
tgaagaatcagcatcatgtttggcagctgagtattggagccaggagcctgccatgagactccccatccccaggatgtcaacctcagtccctcaaggcc

SEQ ID NO: 9660 - DNA, 75 bp, Homo sapiens
ccaaacccgccactccagaaatccaggagattgttgataaggattttatcctggaacattacagtgaagatggct

SEQ ID NO: 9661 - DNA, 75 bp, Homo sapiens
ccaggaagccaggatgtaccacctttctggcaatgaggtccttgaattcctttgtagtcctgacgatgactcccg

SEQ ID NO: 9662 - DNA, 99 bp, Homo sapiens
ccccagacctgtcggcgaaaggagctattctcaagctggaataactgagactgaatggacaagtggatcttcaaaaggcggacctctgcaggcattaac

SEQ ID NO: 9663 - DNA, 75 bp, Homo sapiens
cagggtccaggattttattcccaacgcatggcagctacgagtcctcggcggaaatcctgcctcataccccgaggc

SEQ ID NO: 9664 - DNA, 100 bp, Homo sapiens
tcatggaaggaggagatgaagggcaagggccaaaatgatggtgatgatgaacagtctacacagatggctgcaagttgggaagatgataaagttacagaag

SEQ ID NO: 9665 - DNA, 83 bp, Homo sapiens
tccggacccactggctgctggagcttgtcaccaccagctacgagttccagggagctctgtcctggtgaccgtgcccgggttat

SEQ ID NO: 9666 - DNA, 123 bp, Homo sapiens
tcttccaaagcacaggaatctcactctgttaaagctggtctgttctaactgagatgtggtggtacagtgggagctattctgacatgtccactggaagttgtaaaaacacgactgcagtcatct

SEQ ID NO: 9667 - DNA, 48 bp, Homo sapiens
ctgctcatggaagatccaaatccgtcaccaggagactaaagtccatca

SEQ ID NO: 9668 - DNA, 73 bp, Homo sapiens
tatttctgcttggagaagaagttgcccagtatgatggggcatacaagggacatcgcggtggaggaagatctca

SEQ ID NO: 9669 - DNA, 51 bp, Homo sapiens
tgctttggcgtcctgtacgtgaagctcgggattgtcagtggcttcgccccg

SEQ ID NO: 9670 - DNA, 74 bp, Homo sapiens
gagccgcgccgtccgcgccgcccgttctgttcctgacggagctgaccagacttttccagaagtgccggacgtcg

SEQ ID NO: 9671 - DNA, 100 bp, Homo sapiens
gccgagcaacagtgtagtggcgtattccacatagcaaacaggttgaagaaatatggagatcaacacaaaactgctcatcagtgttacctgtatcagcttt

SEQ ID NO: 9672 - DNA, 100 bp, Homo sapiens
tgaagaggggggaagaggggaacatggacatgaagaggaggatccacctggagctgaggaaccggaccccggcagctgtcccgtttccctctgtgcggcg

SEQ ID NO: 9673 - DNA, 75 bp, Homo sapiens
aaaagtgctcctgggactccaggataccagcctcctgacaaggtgatccgggcgggccccgcaggaattttatcc

SEQ ID NO: 9674 - DNA, 100 bp, Homo sapiens
ttcccgctgcacactgccctccgaagtcggggacgcgggctcgtactggagaaaatgaaactgggattgacccatcaagatgcttggctcaataagaaaa

SEQ ID NO: 9675 - DNA, 100 bp, Homo sapiens
ctcaacgtgaagatgatgaggatgaagacctttatgatgatccacttctacttattaaatattttgcagagggcaagcaggtccacagagctcctcacgc

SEQ ID NO: 9676 - DNA, 101 bp, Homo sapiens
ctgaggttgtggaaaaggaagattactcagagattatagggagcatggagattgagaatttatcacaagttgatggtcctcaagtggaagagcaacttctt

SEQ ID NO: 9677 - DNA, 80 bp, Homo sapiens
ttgcagatcttcaacaagaggacccaggagaaattcgccctcaaaggagtctccggtggactgcagcgttagcaaatgca

SEQ ID NO: 9678 - DNA, 82 bp, Homo sapiens
gtaaatgtagagggcactaaaacattgccagatgatcagataaattcctggaagtggaattgctgggttaaatgtgtggaat

SEQ ID NO: 9679 - DNA, 75 bp, Homo sapiens
ggaacagttctctatggactccggagtaacaactgtcctaacaatgacaactctaagcatcagtgctcggaattc

SEQ ID NO: 9680 - DNA, 83 bp, Homo sapiens
cttgctactgctcaaaatctggaagtcccgctcgtgcgccgtgatcccggccgctgatctgtcgcagcagatctccactgcag

SEQ ID NO: 9681 - DNA, 101 bp, Homo sapiens
ctgagtcactgcctgcgcagctccggccgcctggctccccatactagtcgccgcagcgtcaccctttacaccagaaagctggcgggcactatggggaaaaa

SEQ ID NO: 9682 - DNA, 147 bp, Homo sapiens
ggagaatgcagttgaaactaattttgtggatagagaaactgttggaactgctttacaaagtattttaaaaaaacactggacttggcatcagttgacctgcggaagatgagagtggcagagctgaagcagatcctgcatagctggggg

SEQ ID NO: 9683 - DNA, 83 bp, Homo sapiens
gggccaagggacaatggtcaccgtctcttcaggaacgaatgcaggaatttgggaactgagctgtgcaagtgctgaagaaggag

SEQ ID NO: 9684 - DNA, 90 bp, Homo sapiens
gctacaccctctcggttttctctgctctgccaacactagtggaatatgatcacatcccagtgagtaaaattggcctggatacagaaggag

SEQ ID NO: 9685 - DNA, 98 bp, Homo sapiens
gggagcgatgcggtgcagcgcgccatccgggtgacctgcataggttcctgcggggtctccaacaaggctaatgacacagcgtgggtagtggaggaggg

SEQ ID NO: 9686 - DNA, 100 bp, Homo sapiens
tggcagtgggtcaacctttagcagtccagcctcaagggacagtaatgcttcttggacacttaatgattgttggcaagaaatgtgctgctgatctgggcct

SEQ ID NO: 9687 - DNA, 100 bp, Homo sapiens
gcagacagcgagtggcgacgatgccaagaagcttgagagaagaaaaatttcagaaaaattgtctcaatttgactagaatatcaatgaaccaggaaaactg

SEQ ID NO: 9688 - DNA, 75 bp, Homo sapiens
ggggaacggaggccagagctgcgctgagatctgtatctgtggacctgaatgttgatccctcgcttcagattgaca

SEQ ID NO: 9689 - DNA, 100 bp, Homo sapiens
gagatggggagcgtcctggggctgtgctccatggcgagctgggattactacagcatcccatttcccacacccactactccgctgactgggagggatggta

SEQ ID NO: 9690 - DNA, 51 bp, Homo sapiens
cgcagggttcggatgagaccagctatcatggtgaacttacttcagattgtg

SEQ ID NO: 9691 - DNA, 98 bp, Homo sapiens
ctctcctggtccagctctcaggacaagaacaaagtgtgctgatcaatgaactgagccatgttcaaatccctgttatgttgatgccagatgacttcaaa

SEQ ID NO: 9692 - DNA, 75 bp, Homo sapiens
cacagctgtcacagcctggagaggggactgcccatctgcaaagtcacctactgccaccttcgaaaaacacggaga

SEQ ID NO: 9693 - DNA, 75 bp, Homo sapiens
aaagaaagaaattgaaatgcactctattaatgacaaacaggtatcgtacttgttgccattaatccttatgaacag

SEQ ID NO: 9694 - DNA, 95 bp, Homo sapiens
tccagaagcaaacattcatatcccaacattcctgtgtcaattcgacggagctggatgaactcattcagatttagtacctcaagacaaactcttat

SEQ ID NO: 9695 - DNA, 100 bp, Homo sapiens
gaagagcgagccagcgcccggagcaagcggagctcccccaagagccggaaagatgatgattattccccaccttctaagagacaaagaccaacgagccacc

SEQ ID NO: 9696 - DNA, 99 bp, Homo sapiens
ctctgccctgggaacttcgactgggcctactgctaagcggcgagactgctgaccagaccctgtctctgatggagcagctccggggggaggcccttaagt

SEQ ID NO: 9697 - DNA, 95 bp, Homo sapiens
ctgtagtgccggcgccgccgcgtcttcccggtctcctttcccggccgcacaggaccccctggttgtggaatacgaggcattgctggtacaactac

SEQ ID NO: 9698 - DNA, 75 bp, Homo sapiens
actcttctggacagcagagttatggagcttttcttcacaaaattgtatgctgctatgcatgaacctgatggagtg

SEQ ID NO: 9699 - DNA, 88 bp, Homo sapiens
aggacctcaaagtgggacaatatcctctgtggagaacacccccccatggaggcgagctctggtagctgaagaacatctcacagtggac

SEQ ID NO: 9700 - DNA, 90 bp, Homo sapiens
gtgaagggcagatttttactattgatggccccctgtgcttgaagaatgtacagtctatgtttgggagtttatacagagaaatactatttc

SEQ ID NO: 9701 - DNA, 100 bp, Homo sapiens
tcgccccgggccccccagcatgaagaccccggcggacacagaggctgggaggcggcagaatgcagccagaggagggcacaggctggctgctggagctgct

SEQ ID NO: 9702 - DNA, 100 bp, Homo sapiens
gcacagagatctgtaattacagctactccagcaacatcttgtccataaggctgaaccggcaagatttacaagaccagctagaggatatgatggaagatgc

SEQ ID NO: 9703 - DNA, 100 bp, Homo sapiens
acagtccgtatagtgtagtgtgcaagtattttcagcgagggtactgtatttatggagaccgctgcagaaaaagcttgtggtgaaggggggcaaaaaaaag

SEQ ID NO: 9704 - DNA, 101 bp, Homo sapiens
ccggggtaggggtctcccgcgagctcctcagagaaattttgaaattgccttcaagatgtttgatttgaatggagatggagaagtagatatggaagaatttg

SEQ ID NO: 9705 - DNA, 100 bp, Homo sapiens
cgaggaccttcaggctgcaaaccggttaatcaagaatttggtcaaggagggagagcctggagttggtctaccgggactcaaaggtttgccaggtcttccc

SEQ ID NO: 9706 - DNA, 75 bp, Homo sapiens
tcgggagattcagccgtgaagcaagtgcagatagatggccttatctcccttgagtttagaaatctggctgagaaa

SEQ ID NO: 9707 - DNA, 100 bp, Homo sapiens
aggctctggcttgggacgaaagtgtcaaggcattacggctcccattgaggagatcatttggcatttagctgtgatgttgctaaagaacatgatgttcaaa

SEQ ID NO: 9708 - DNA, 100 bp, Homo sapiens
tcagagttctctaaaaaaactggctgtgaataatatagctggtattgaagagaagcaatatccaaggcagtgtcatctgcaacaatgctgtgatcgagaa

SEQ ID NO: 9709 - DNA, 83 bp, Homo sapiens
caggggactttgaagaatggacaagaatcaccattgttattccaaggtctcttgcatccagacagagatttgggattagaatc

SEQ ID NO: 9710 - DNA, 100 bp, Homo sapiens
cgcagagctaccggcgggagctgggtcaccggcttgaggggctgcgtgaggcgcggaggcaggaaaacatttaaagttgatgatatgttatcaaaagtag

SEQ ID NO: 9711 - DNA, 100 bp, Homo sapiens
gaggaattaaactttggccctgcgcctcgtccagcctaggttccacccttttctgggaacaggccatgtggaagtgttacatcaccttttgcttggaaag

SEQ ID NO: 9712 - DNA, 80 bp, Homo sapiens
tgccgcgagcgcggcctgcaggagaaagttggatccttttctgataacttaatcgactgcgtactactccagtagaggcc

SEQ ID NO: 9713 - DNA, 50 bp, Homo sapiens
tgtgtgacaccaagataagtaacgggatcttctctggatcaagcaatggt

SEQ ID NO: 9714 - DNA, 50 bp, Homo sapiens
ggcgactgtggcagagttgaaggctgtcaccaggagactaaagtccatca

SEQ ID NO: 9715 - DNA, 100 bp, Homo sapiens
ggcggatctggacacccagcggtctgacatcgcgacgctgctcaaaacctcgctccggaaaggggacacctggacctcagcagccatgtcgaagccccat

SEQ ID NO: 9716 - DNA, 50 bp, Homo sapiens
cttgccctgtctcctcgcagatgaggatgagggagtggtgggtccaggtg

SEQ ID NO: 9717 - DNA, 100 bp, Homo sapiens
ggactgtgctgtcaaaccatgtcaatctatggctctgagtaaatcaatgcatgcaagaaatagatacaaggacaaacctcctgactttgcatatctggca

SEQ ID NO: 9718 - DNA, 75 bp, Homo sapiens
tctgaatgtcctacactttttgtggatgccgagactgtgctaaaatgatgtattttctggacaagtcaaggcagg

SEQ ID NO: 9719 - DNA, 75 bp, Homo sapiens
ttatgcactcgatgttccaaatacagcatttggcagaggtgaatcagctcccggccgactttaggattcttctgg

SEQ ID NO: 9720 - DNA, 75 bp, Homo sapiens
tccaaactgttgagactgcttttaaaaggaaccttagtcttttaaaggttaatttggagtggcccctggagtcag

SEQ ID NO: 9721 - DNA, 50 bp, Homo sapiens
ccttatgcgaatcgtcagggcattaggtgttggagcgggccggagagaag

SEQ ID NO: 9722 - DNA, 51 bp, Homo sapiens
accgggacacccgcgaggccggaaaatggccataaaattttgagtagaaaa

SEQ ID NO: 9723 - DNA, 106 bp, Homo sapiens
atcatctgacaattagcccacagagtggcaacttccgccaattgctacttcaaagctctttcaccatgcctggatcacttcctttgaatgcagaagcttgctggcc

SEQ ID NO: 9724 - DNA, 90 bp, Homo sapiens
atctggtgtaccaggcgaagctggccgagcaggctgagcgatacgacgctttggtgtcatccccagcactcctctggccatccatacacc

SEQ ID NO: 9725 - DNA, 50 bp, Homo sapiens
gttggcaaaccagatatatgacttggaggagatgttaaagtaacccatct

SEQ ID NO: 9726 - DNA, 75 bp, Homo sapiens
atcgcctggactgtgcagtatttccagtctgtctcagccgaggcctgcctggagccccagatcaccccttcctac

SEQ ID NO: 9727 - DNA, 90 bp, Homo sapiens
ctccagccagagcccccccacgatctgatgggcatgtttgagaaacggcgcttccgcaagttcctggtgtttgtggcaaacttcgatgag

SEQ ID NO: 9728 - DNA, 99 bp, Homo sapiens
gcgatggcttcagacagcatatttgagtcatttccttcgtacccacagtgcttcatgagaggtgcttctcagaatgatgatggctccagatccaaggat

SEQ ID NO: 9729 - DNA, 74 bp, Homo sapiens
aagtctggaaagcgtcacttggggaaaacaaggtggacccgggaagaggaactgtggctgcaccatctgtcttc

SEQ ID NO: 9730 - DNA, 100 bp, Homo sapiens
gcgcgaagagccgttagtcatgccggtgtggtggcggcggcggagactgcgggcccgtagctgggctctgcgagatgaaggagcttctatgcacccttgt

SEQ ID NO: 9731 - DNA, 90 bp, Homo sapiens
ttgtgcgctaccactacaacggcacttttgaagatggcaagaagtttgattcaaggtctcggtccagctcgacttccagctcaggctcca

SEQ ID NO: 9732 - DNA, 100 bp, Homo sapiens
aacagcacgtaccagaggtggaagtccaagtcaaacgcagaaggactgcctcactgagcaaccaagagcagaggtggaggagacactgaagcgactgcag

SEQ ID NO: 9733 - DNA, 90 bp, Homo sapiens
gcagaggtcaatctttatgtacagagctttcagcagaggccaaggcagcattgcttgaatttgaagaaagggagcgacagcataaacaag

SEQ ID NO: 9734 - DNA, 82 bp, Homo sapiens
gtcccactgcagccctccaagcaggacactcatgaggaccatgatacttccactgagaatacagacgagtccaaccatgacc

SEQ ID NO: 9735 - DNA, 101 bp, Homo sapiens
gcctcccaaagtgttgggattacagtgatgtcttggcattgcccattttcaagcaggaagattccagccttccattggatggtgaaacagagcacccaccc

SEQ ID NO: 9736 - DNA, 100 bp, Homo sapiens
gcagtggtcgcttcttctccttgctactgtgtgaagacattcacaggacacagagaatgggtacgtatggtacggccaaatcaagatggcactctgatag

SEQ ID NO: 9737 - DNA, 100 bp, Homo sapiens
cgcggctgggcgttcatctaccacgctttcgtcagcagccgctcttctaaaacattcaaaccaaagaagaatatccctgaaggatctcatcagtatgaac

SEQ ID NO: 9738 - DNA, 82 bp, Homo sapiens
gggtaaaagacgagttcagtgacctttctgagggactgcaaaattcaaaatggggctcaaggtattcgtttcatctacacca

SEQ ID NO: 9739 - DNA, 100 bp, Homo sapiens
caagagtgtacctggtccactgaaaaattcttcagattggaaaataccacaggatggagactacgagtttaatccagactccaaaatgatgcaaatcaac

SEQ ID NO: 9740 - DNA, 75 bp, Homo sapiens
atggagcatatattatggaacacaagcaatacttcaagtcagctgcaatgaccctaaacgagcggttcacttcgt

SEQ ID NO: 9741 - DNA, 98 bp, Homo sapiens
cggctgtggcgactcacctacccgcgggctgtggtttccagtctcatcagattttccatgtcctggtggtggcagcagcctttgtccacttctatgga

SEQ ID NO: 9742 - DNA, 99 bp, Homo sapiens
atcgaccgctacctgcagcgccacgtgaagctcatccacacagtgcggaccctgcggatcatctgtgtctgtgcggaagactactgccccaccccagag

SEQ ID NO: 9743 - DNA, 100 bp, Homo sapiens
ttgtattcagtcaccaagcaaagagatgcaatggatcaactagaacaaagagtcagtgaattctttatgaatgcaaagaaaaataaacctgagtggaggg

SEQ ID NO: 9744 - DNA, 82 bp, Homo sapiens
atctgctatggcgagctgcgcaagaagattgggggctgtggtataagttgaaatccaaaccaggaaagaaggacaaggagcg

SEQ ID NO: 9745 - DNA, 100 bp, Homo sapiens
cgagcatgcacaacgccatcaagttccttaacaaggaaatcaccagtgtgggcagttccaagcgggaagaggaggccctcaggaaagcagagagcttgaa

SEQ ID NO: 9746 - DNA, 75 bp, Homo sapiens
tgaatacctccctctccactcccatcttcagggtgaccattgtgaggtagatattttgttctaattttccagatg

SEQ ID NO: 9747 - DNA, 82 bp, Homo sapiens
ggccatcgtccagtgctcgtgctcagttcacaactacatgatgccacccctcgaccgaagctggagggactacgtcccggat

SEQ ID NO: 9748 - DNA, 83 bp, Homo sapiens
ctcaactggtgtcgagaagtccggaagcttgtggcgctgaaaacgaacgaaccacgaagctgccctgagacgctcactcacgc

SEQ ID NO: 9749 - DNA, 100 bp, Homo sapiens
ggactgttaggaggtgctatggaaaatcaagacattgctgccaactatagagatgaaaattcacagctgatgatgtgcgaggtgatgccgaccatcagcg

SEQ ID NO: 9750 - DNA, 100 bp, Homo sapiens
ggtataccatcgtcaccatgacaacactagggtcagcttttgccaactgttttcaaatcacatgcatgggggatcttacacacactccttgagatgttta

SEQ ID NO: 9751 - DNA, 100 bp, Homo sapiens
gcagtgttcaccttcaccctgcccccttcggtaccggggggagactccgatatcatcatgagacccagctgtgctcctggatggttttaccacaagtcca

SEQ ID NO: 9752 - DNA, 50 bp, Homo sapiens
cggtgccggactgcgcctgctgctacataccgagcatcaaatattaaggc

SEQ ID NO: 9753 - DNA, 75 bp, Homo sapiens
cgagtctacgatgtcacccgcttcctcaacgagcttcacggtgatgatatggcatctgccagctctagccgggca

SEQ ID NO: 9754 - DNA, 98 bp, Homo sapiens
atttggctctgagctatgacaagagaggaaacaaaaagttaaacaagcaagcctgccataagtgagaagattcgcttcaagctcagcttatcaatatg

SEQ ID NO: 9755 - DNA, 100 bp, Homo sapiens
aatcctttgagtgtatgccattggtgagccgatgagcatggaccatagaagggctcaatgtagaagttactccacaggatccgctgaacataggatgttg

SEQ ID NO: 9756 - DNA, 83 bp, Homo sapiens
caagatggagacggcggcggctgtagcggcgtgacagacaatgcagatcttcgtgaagactctgactggtaagaccatcaccc

SEQ ID NO: 9757 - DNA, 100 bp, Homo sapiens
gttaccggaacggcggcgacaagggtgttcccgaactagagtgggaatttagataatgggctgtgtgcaatgtaaggataaagaagcaacaaaactgacg

SEQ ID NO: 9758 - DNA, 100 bp, Homo sapiens
gctttctgtattctgaagacagcgccccagcatttgccatcttcaagtttgttcaggctttttgtcctgggcatcggcttcttcactctctgcttcctga

SEQ ID NO: 9759 - DNA, 83 bp, Homo sapiens
ggaaactccctgtgtgacaccttccgagaccagtccacctacatcagattacgtctattttgagaactcttccagcaatcctt

SEQ ID NO: 9760 - DNA, 90 bp, Homo sapiens
gggcggcacgcacgcggtgcagggtaacatggcggatgcggaagtcccacagaacaacgagaagcttcaggagagcccgtgcatcttcgc

SEQ ID NO: 9761 - DNA, 100 bp, Homo sapiens
gtgcggggccgtctcggagaccccgcgccgacggctgctcaaacatcagggttacgaagtgacagtgctggtgcgggactcctccaggctgccatcagag

SEQ ID NO: 9762 - DNA, 74 bp, Homo sapiens
ccctcttcctcctggccagcctcctgggcgcgggtgtgtgatcctgtaaaattaaatcttccaagatgatctgg

SEQ ID NO: 9763 - DNA, 75 bp, Homo sapiens
ccgagcatctgggccgagaccattccgtatggagagccggggaagaaggagaaagggccaacccctgaagaagca

SEQ ID NO: 9764 - DNA, 78 bp, Homo sapiens
tcaacctggcctcttgtgcggctgatggctctgtgaagctttggagtctcgacagggagtcagtgctgcagatgatgc

SEQ ID NO: 9765 - DNA, 87 bp, Homo sapiens
tctctacgcagaacccgggagtaggagactcagaatcgaatctcttctccctccccttcttgatttccatggtgtcagtgattcata

SEQ ID NO: 9766 - DNA, 100 bp, Homo sapiens
taaagttgatctgtaatgttcaggccatggaagaaatgatgatggaaatgaagtataataccaagaaagccccacttggactcagaattcatgattgaag

SEQ ID NO: 9767 - DNA, 100 bp, Homo sapiens
aaggaatctatgctggagtctgtatttctgtcttggtgcttcttgctcttttgggtgtcatcattgccaaaagcttttattgagatggagacaagagaag

SEQ ID NO: 9768 - DNA, 51 bp, Homo sapiens
agcggcttagggcctcaccgcgacctggtctctgcgatatgataccagcta

SEQ ID NO: 9769 - DNA, 100 bp, Homo sapiens
cggcaggagacgaagagcccgggcggcgctcgtacttctggccactgggcgagcgtctggcaggctactgcagcactggggtgtcagttgttggtccgac

SEQ ID NO: 9770 - DNA, 98 bp, Homo sapiens
gcgcggcctccgctcccgccgactggcctgagaacgagggagaccctgcagcgtcatggtgctggagctggtggcacccgcaacatctcaggcaccag

SEQ ID NO: 9771 - DNA, 74 bp, Homo sapiens
ggaaaatggatgtagaaaatgagcagatactgaatgtaaaccctgcagaaaatttgaagccattacttccagct

SEQ ID NO: 9772 - DNA, 75 bp, Homo sapiens
ctccatcggccccgacttccagaagggcctgaaggatggaactatcttatgcaccctgatctagttgaatctgaa

SEQ ID NO: 9773 - DNA, 74 bp, Homo sapiens
atgagattttgccagagaaaggacgagcagcaagtcagggagcttaaggctttgataaaattcaagagttattt

SEQ ID NO: 9774 - DNA, 100 bp, Homo sapiens
tctctactcagcctggagcaagtgttctaagaacggaagcatctgggctggatggaatttagcatcaagcagagtcccctttctgttcagagtgttgtaa

SEQ ID NO: 9775 - DNA, 100 bp, Homo sapiens
ccgagaagtccagcgggagtacaacctgaacttctcaggaagcagtactattcaagaggaggcaagtgaggcctatctggttggcctttttgaagacacc

SEQ ID NO: 9776 - DNA, 75 bp, Homo sapiens
cgctgccgtcgccgccgccaccatgcccaagagaaagggtctcccttgatctgagaatggctacctctcgatatg

SEQ ID NO: 9777 - DNA, 74 bp, Homo sapiens
ttctttgtggatggacttgattctgatgagagattgctggactcgctgaagagagactacgcaggaaagcccca

SEQ ID NO: 9778 - DNA, 89 bp, Homo sapiens
ggcggcggccacgccaaggacggctgatgtagcccagcagttccagtatgctgtgcgggtgattggcagcaacttcgccccaactgttg

SEQ ID NO: 9779 - DNA, 80 bp, Homo sapiens
ggggactctgtgtgagggaaagaaaacaatttctcctgctctgcagcttctgttcagagatgcggtcttgctgtgttgcc

SEQ ID NO: 9780 - DNA, 87 bp, Homo sapiens
attctgtgttgctgttggagcagatttcttctctgtgtagcaaggaacacctcatcaaaatgcagaagcagaaactgcagatgcccc

SEQ ID NO: 9781 - DNA, 82 bp, Homo sapiens
ggtgtcaccgctttcgcttctgcttgaggcacacgtgtttcacgttgacaggtttgcttgggacgctagtaaccatgggctt

SEQ ID NO: 9782 - DNA, 87 bp, Homo sapiens
ggagagccaggtatcggagcagccggccacggaagcagcagaagaaggaggaggagtcggcgggcggcaccaagggcagcagcaaga

SEQ ID NO: 9783 - DNA, 74 bp, Homo sapiens
cggcatcagcactgcctctggcatccccgacttcagagcactgcagtttcctcctgaaggctggctccggctct

SEQ ID NO: 9784 - DNA, 83 bp, Homo sapiens
tagaaagtgaaatcagaggagatgtaactatcgacttctccattgtggttggggtgctgttcccaatggcggtcatttttgtg

SEQ ID NO: 9785 - DNA, 98 bp, Homo sapiens
aaagtttgagaatgctttcttgtctcatgtcgtcagccagcaccaagccttgttgggcactatcagggctcgaccacttactggatgagaacagagtg

SEQ ID NO: 9786 - DNA, 100 bp, Homo sapiens
aggagatcttcggcaccatcggcatgcggcccaacgccaagaacaacgtgctggagaatctggtaaaagcaccattgtgaagcagatgaggatcctgcat

SEQ ID NO: 9787 - DNA, 90 bp, Homo sapiens
gaaaaattcttcagattggaaaataccacaggatggagactacgagtttgagctgacatggacccaaatcctcgggccgccctggagcgc

SEQ ID NO: 9788 - DNA, 50 bp, Homo sapiens
ggcggagccggagcgcggccatggcgggccccagcatgagaccagatgta

SEQ ID NO: 9789 - DNA, 100 bp, Homo sapiens
ggggagcggcgttggaggccaccgtttccagtcactgtatatatgccttatttcctgggtccatgggaagcatgagtctgttgggacttgggacaagaag

SEQ ID NO: 9790 - DNA, 50 bp, Homo sapiens
cagaaacaaaatgtcaacaaattgatgggccactactacgtgcccctcct

SEQ ID NO: 9791 - DNA, 98 bp, Homo sapiens
agtccggataagccgggcgggagcccctcggccaggattatatgcgtcaggcaggagaagtgacttatgcagatgctcacaagggacgcaaaaatgaa

SEQ ID NO: 9792 - DNA, 98 bp, Homo sapiens
ctcctagcaaaattgggaacaatcaatgagaggccggagaagatgagaatgtgcctactgctcctgatcctccaagtcaacatttacgtgggcatggg

SEQ ID NO: 9793 - DNA, 100 bp, Homo sapiens
tctcaggtcctcgggggcggcggccacgccaaggacggagcccgcagcttcatctcccagctcaaacaacacagcggccacaacagcagctattgtcccg

SEQ ID NO: 9794 - DNA, 100 bp, Homo sapiens
caaatcatgcgctttgcaatgaaatctcgaaggggacctcatgtccctgtgggacacaatgcccccaagtgagaaagatcagtctaaagaaaaggagaag

SEQ ID NO: 9795 - DNA, 87 bp, Homo sapiens
aagaagcccaggatagaagagtcaataactgaagacttaaggccgaatacatcaagcaatggtaacatctttaaatgaagataatga

SEQ ID NO: 9796 - DNA, 97 bp, Homo sapiens
ccgaggcctgggttacaagcagcaagtgcgcggttggggccactgcgaggccgttttagtttttcccctacatcctgctgctctttgcgatcctcct

SEQ ID NO: 9797 - DNA, 100 bp, Homo sapiens
ccgacgcgctcatctgctggagcccgagctggtcttagagaggtgtgatctggagctggagaccaatggccgagaccaccacacggccgacctgtgccgg

SEQ ID NO: 9798 - DNA, 99 bp, Homo sapiens
caagtgcgcgccctggcgggtccggaccaaggtgcttgtgagtgaggattctgacagtgatggcattgtggcccacttccctgcccatgagaagccagt

SEQ ID NO: 9799 - DNA, 75 bp, Homo sapiens
tttcttgtgacaatctcgtcctggaaatcaactctctcaatcattgcctgaagatgaaggccatactaggacact

SEQ ID NO: 9800 - DNA, 110 bp, Homo sapiens
gtcttgtcagtgaatcatcaccaggctgcttactggaaactggatgcagcaaggaaataggatttaaccgctctctgcctcccaggctcttctcaaccatctgtgagtcc

SEQ ID NO: 9801 - DNA, 105 bp, Homo sapiens
actcttcagactggtttatcatcagggtggatgtgacaatagtcaacaaacactcgggtcctatacttcagcatcttttcaatgttctgtctcattggactagct

SEQ ID NO: 9802 - DNA, 100 bp, Homo sapiens
tcagcttcagctccagctccgctctcttcggctgccccaatccccggcagctctctcaggttagtggatgacagatgtgtggtgcacccagaggccgggg

SEQ ID NO: 9803 - DNA, 100 bp, Homo sapiens
cgttgctcttgcttttcctcgctggggtgtacgtgtttgaaagatgtatggtgatcttgaaacctccagacacaagaaaacttctagcaaattcagggga

SEQ ID NO: 9804 - DNA, 75 bp, Homo sapiens
gagtacaacgaggtcaacgtcaccctggacctgggccagcatccgtacccttccgaagagcagaagaaacagtta

SEQ ID NO: 9805 - DNA, 75 bp, Homo sapiens
ggagaagctgagcctttctggacagaccaacctgtcagtgctgcaagtattagaaaactactcggatgctccaat

SEQ ID NO: 9806 - DNA, 83 bp, Homo sapiens
gcagccggctgtacgcacacaccatcgcaggacaatgaaaagcgaaccccattgcacgccgcagcttaccttggagatgcaga

SEQ ID NO: 9807 - DNA, 95 bp, Homo sapiens
ctgaagaagcagttctacaaggcgagccaggtccgcgggagagctgtggggcttggtgagtgtttcgtggcctctcgggttggtcagcaccccca

SEQ ID NO: 9808 - DNA, 83 bp, Homo sapiens
cgggcccaggccccggcagcgcctgggacaagcaagaaggccctcaccagatgccagcaccttgacattggactttccagcct

SEQ ID NO: 9809 - DNA, 100 bp, Homo sapiens
ccactacctcctggctgccgtgaataggcagcctaaaggtgtgatggatgtcagatgtttcctatcaatggatccagattcaaatgcagaaactgtgatg

SEQ ID NO: 9810 - DNA, 83 bp, Homo sapiens
taagaaaaggcattgaggaactcaatcaaaccagtattcttttcacacagatgacgatttaattcaagatttcttgtggatgg

SEQ ID NO: 9811 - DNA, 95 bp, Homo sapiens
cgggtgaaaagagacatttccatatcaccagaccacaaacgtggggaataccttggcaagcagctccagtccgagcagccccagaccgctgccgc

SEQ ID NO: 9812 - DNA, 100 bp, Homo sapiens
aagcgctgcggagattgggctagaggcggaggcctgggccacggcggaggcgctggcagttggaattgatcacaccttttcagttgtacttcaatcctga

SEQ ID NO: 9813 - DNA, 100 bp, Homo sapiens
taccgtggttgatgatgcagacactgttgaactctgtggtgcgcttaaggaagcgttgttgacgaccatggacatcatccacgatggatttggattcatg

SEQ ID NO: 9814 - DNA, 83 bp, Homo sapiens
cagggagaggagctgtggataacgggaggtgaatttccatgtcaacatagtcctggtaatctgtaagtcagatgctccaacag

SEQ ID NO: 9815 - DNA, 99 bp, Homo sapiens
tctgatgcagaatttgatgctgtggttggatatttagaggacattatcatgggagccatgtctgaccaggacgtttggaagatcatatccatgccagag

SEQ ID NO: 9816 - DNA, 75 bp, Homo sapiens
gtgggcgggacagaagcgtttggggcaggccggatcacctcaacagtcacgtcagacaagtgcactcaacagaac

SEQ ID NO: 9817 - DNA, 98 bp, Homo sapiens
gggaaactcagcctgtgaccccagcgtgggtgaagataggatcaagatggccatgtggcaggggtctctggccctgttcttgccccagcatgactttt

SEQ ID NO: 9818 - DNA, 100 bp, Homo sapiens
gttttgccggaggagcccctcaggccacaatgcagatcttcgtgaagactctgactggtaagaccatcaccctcgaggttgagcccagtgacaccatcga

SEQ ID NO: 9819 - DNA, 124 bp, Homo sapiens
ttggttcccgtcgtcgtacacgaagttgctggaagaaaatgagacagaagcagtgaccgtgcccacgccaaggtattcccaacgccagcccagcagccagtggccacaccactaatgaccccta

SEQ ID NO: 9820 - DNA, 75 bp, Homo sapiens
ctgattccgcagccttccaatgaaggctttgatgaactaggtggacttctcaaaccaacagtggcctctcagaac

SEQ ID NO: 9821 - DNA, 98 bp, Homo sapiens
gctccacgccccctaccacaccggggaccctcagctggacacggccatcgggcagtggctccgctgggataaggatgagaacaagttgagcagtgcca

SEQ ID NO: 9822 - DNA, 82 bp, Homo sapiens
ggcctactcgcccgccaccctgcgctgccgccgctctgaggagttaaagccatggccatgcagaaaatctttgcccgggaaa

SEQ ID NO: 9823 - DNA, 97 bp, Homo sapiens
agggaaggaaatcatgtcaagcgaagccttgaaaaagctgccctgagacggtgtcccgccgaaaggtcttgatagactttctgtaaagaaggaatga

SEQ ID NO: 9824 - DNA, 87 bp, Homo sapiens
gcccacagtgggggtgtgcaaacccgagagaactgggagccaccggctgggaaagacggacatcccagagatccctcagcggtcagc

SEQ ID NO: 9825 - DNA, 90 bp, Homo sapiens
acctgtacccactgccccgtggggagaaatactgcaacaaccgggacttcccagactggggaatgggtaccacagaccatgtcatcgtcc

SEQ ID NO: 9826 - DNA, 125 bp, Homo sapiens
atttccttgaggaaagaatgcaacaggaatttcatggccccactgaacatatctacaaaactgaagtggagcgagaaatctcattcagaacagagtgtggcctgtattactcctactacaagcag

SEQ ID NO: 9827 - DNA, 82 bp, Homo sapiens
tcccgccggccccaaagacgctaaacgtgccctactctgccccgggggagagatcctggtggacctctcaaaccccggtggc

SEQ ID NO: 9828 - DNA, 100 bp, Homo sapiens
ccaagaatcctcatgctcctactatccatttcaactacagatactttgaagtagaagaagctgatgcacctggccacattcatcatggacaagagcgaag

SEQ ID NO: 9829 - DNA, 80 bp, Homo sapiens
aaggacaaaagccaagaggaggacagttcgctacacagcaatgcatcgaggtggttgtgagacaacttcaacaagaagtg

SEQ ID NO: 9830 - DNA, 83 bp, Homo sapiens
cgacgaccgccccgcgtcatgcggctcctcggctggtgtaagactttgaccccgacgcaggcttcagtgattgccgcggatca

SEQ ID NO: 9831 - DNA, 74 bp, Homo sapiens
gttctgtatcagaagacaatatcatgcaagtgtggcaaatggttctccgtggaggagccagccaacgtcctttg

SEQ ID NO: 9832 - DNA, 98 bp, Homo sapiens
gcggggcaacgtgtgtggggacagcaagtctgacccgccgcaggaggctgctcagttcacctcccagttctgttccgaaacaccaatgtggaagatgt

SEQ ID NO: 9833 - DNA, 82 bp, Homo sapiens
aagcacacactatggcgctgaaacggattaataagtttcagaatggcttcggttattgcctttccttggtgtactcgcactt

SEQ ID NO: 9834 - DNA, 82 bp, Homo sapiens
cggctgcgaaggcggcggctcctgccctctcgctttccctctcgcgtctctggctgcaggtgtttccccccgggccggcctg

SEQ ID NO: 9835 - DNA, 98 bp, Homo sapiens
cccgtgggctcgctggggagccacggcggagacccccgccctcaactgagctgcaggtggagctggagcaagaataccaagacaaattcaaaagactg

SEQ ID NO: 9836 - DNA, 75 bp, Homo sapiens
gaagatccatatgagtatataaggatgaaatttgattctgatgctcacagtaccacctcaagtgcctccccagct

SEQ ID NO: 9837 - DNA, 110 bp, Homo sapiens
ttgtggagccggagctgggcgcggattcgccgaggcaccgaggcactcagaggagcgcgagcccagcattgacctgctgcaggccttcgtggagcactggaagggcatca

SEQ ID NO: 9838 - DNA, 90 bp, Homo sapiens
ttgttttggcctaggatcatccaggcaatccaccttccaaagaggtgcctgctgggaagtacccattcatagtcacttctgatgatgggc

SEQ ID NO: 9839 - DNA, 100 bp, Homo sapiens
ttattaccatatggcccatggaaaagattttgcatctagaggaattgaaagagatctttccagcatctcgggatcagaagactcagactcagccagtgag

SEQ ID NO: 9840 - DNA, 96 bp, Homo sapiens
caccgggatcgtgaccgagaccgtgaccgagagcgtgaccgagagcgcgaatatcgtcatcgttagaagactctaaaatagagctcaagcttgaga

SEQ ID NO: 9841 - DNA, 90 bp, Homo sapiens
atcttttacatgttccacaagaagtgcagcttataatccaagctattactcaggtataatgggtctctcccaaatggcgatagaggaagg

SEQ ID NO: 9842 - DNA, 51 bp, Homo sapiens
ctttgagcagtttgtggaagcgatcactgcagaaccttggcctgaaaatgc

SEQ ID NO: 9843 - DNA, 83 bp, Homo sapiens
tggaaactgaacagccagaagaaaccttccctaacactgaaaccaatggtgaatttgccaggaagaaagctcaggcccattag

SEQ ID NO: 9844 - DNA, 82 bp, Homo sapiens
tttaaggaagactgaaaaggcattcctgaagcatgtacaatgactcttcttgcttttcacctaagttgaataagcaccctgt

SEQ ID NO: 9845 - DNA, 99 bp, Homo sapiens
cctcacctatgcaaagaaagggaagctattgctgggattttgaggagtcaggtagcattggtgctgcagatagtcctgagaactgggagaaagtctggg

SEQ ID NO: 9846 - DNA, 111 bp, Homo sapiens
acgtcccgctgccgtcgccgccgccaccatgcccaagagaaaggtgctggagaatctggtaaaagcaccattgtgaagcagatgaggatcctgcatgttaatgggtttaat

SEQ ID NO: 9847 - DNA, 106 bp, Homo sapiens
gagctcctcaagaatctcgtgctcaccggtttctcccacatcgacctgatgttcctcctgctgatcaagagaagctttttatccagaagttacgtcagtgttgcgt

SEQ ID NO: 9848 - DNA, 80 bp, Homo sapiens
ccgaccctggccgccccgagcggagcctggagggcgaactttctgaccaagtatacaactacccagagggcctaggagaa

SEQ ID NO: 9849 - DNA, 76 bp, Homo sapiens
aaaataccatcttcaactgtacaagaagctttacacaatttccttaagacatatctgaagagatggattaagaatg

SEQ ID NO: 9850 - DNA, 75 bp, Homo sapiens
cgagaaatcattcttgcacattggaaaaaccattgtgaagacaactgttagttttgtggcttactgctgctccac

SEQ ID NO: 9851 - DNA, 75 bp, Homo sapiens
cggcttgtcctggctcttgccctcatcctggttctggaatcctcagttcaagggcaaagcccaacaccttccccc

SEQ ID NO: 9852 - DNA, 76 bp, Homo sapiens
gcttaaatgatgtattttgtgatcgcagcgatgaaaggtggaagttgatgggtcgaaactaaatgtgaccagcacg

SEQ ID NO: 9853 - DNA, 100 bp, Homo sapiens
gagcgacgcccctcagcagcctggcagcagcccccggggcaagagcaggagcccggcaccccccgccgacaaggagggcagccacctcccgcccctgtac

SEQ ID NO: 9854 - DNA, 90 bp, Homo sapiens
agctgaactaaggagaaagtcctacaacagtttggcgtgcaacatggggcttgagaaaggatcagtggaagcctctaaacctagaggaga

SEQ ID NO: 9855 - DNA, 55 bp, Homo sapiens
cacaggcgccacctcagggctgggcaaagggtgagcttgtcggccacagactgct

SEQ ID NO: 9856 - DNA, 50 bp, Homo sapiens
gccagcccctgcccaggagccagcgatccccgtcgaggtcaagatcaaga

SEQ ID NO: 9857 - DNA, 50 bp, Homo sapiens
tctacatcatggctgggacagtggatgctttgatgtatgatctgaaggtt

SEQ ID NO: 9858 - DNA, 144 bp, Homo sapiens
taaagttcaccttgaattaaaactgaatgaactgataacggagaatggaactgtatgccagcagcttgttgtacaatgacagtcatgtccctttccagggacctcaaggacgactttcacagtgacacggtactctccatctta

SEQ ID NO: 9859 - DNA, 97 bp, Homo sapiens
aaacggccaagaggcagacctaggaaatggagccaaatgaggagcagagtctgagatctaataacattgcagagctgagtccaggagcaatcaattc

SEQ ID NO: 9860 - DNA, 100 bp, Homo sapiens
gcatttggctttgcctttctggacacagaagtatttgtgacagctctgcttatgataatgtcaacaaagttcgagtagctatcaagaaaatcagcccctt

SEQ ID NO: 9861 - DNA, 100 bp, Homo sapiens
aaagctgcctatgaaagtctaatattagatgggtcaaaatgcggatcttcgtgaaaacccttaccggcaagatcatcacccttgaagtggagcccagtgc

SEQ ID NO: 9862 - DNA, 122 bp, Homo sapiens
gcgagagcagctcctcctggaaaaagcaagctgaagacatcaagaagatcttcgagttcaaagagaccctcggaacggtgtcaaattgagaaccaggtagatccccaccacctacagtaaaa

SEQ ID NO: 9863 - DNA, 51 bp, Homo sapiens
gagctgtgctacagccatcgccaagctaccggctctcccgggtcattgagc

SEQ ID NO: 9864 - DNA, 100 bp, Homo sapiens
ccaacaacacctgttgcttttgttggtgctgttgttgcagctgctcctgaactctgcggccgatgccatcaacccctggcccgggcgcagccagccgtcc

SEQ ID NO: 9865 - DNA, 75 bp, Homo sapiens
ggcccgggctgcggcgtgtgcgcgcccgccagctgctccggagatacgctgtttgcagacaaggtcccaaagaca

SEQ ID NO: 9866 - DNA, 90 bp, Homo sapiens
tcaaagataaatccaaatactgcatatcagaaacaacagatggaccagcttttgggaaatatgattgaaatgtgggttgatcgaatggac

SEQ ID NO: 9867 - DNA, 100 bp, Homo sapiens
atgctgaaaaccttgagtgatgccacaacaaaatttgtatcagagcaatcccacagagtattgatgaggaaactgaagtttggagcgatcacatcatttt

SEQ ID NO: 9868 - DNA, 87 bp, Homo sapiens
agcaaggagaagagccgtgggtaggagatggagaaattccaagttcagattctccagacaagttggatggcttgaggactggtacta

SEQ ID NO: 9869 - DNA, 98 bp, Homo sapiens
gagcgagagctggagaagctgggattggagattccacccaaacttgctggtcactgggagtattctaccttgtaaatactgttatttgtatatactgt

SEQ ID NO: 9870 - DNA, 98 bp, Homo sapiens
gaatcatacaatatttcagaggtcatgtcaaaagagatctcttccgttccctgctggcagttcatcagctggatcagccacatggtggccttactgga

SEQ ID NO: 9871 - DNA, 101 bp, Homo sapiens
ctggaaactgattggaaactctttgggaaagccactcgaaaagatatgattctataacagactcttccagaaatgatatgaagaggaaatttgccctgaca

SEQ ID NO: 9872 - DNA, 83 bp, Homo sapiens
ctgcaactcatccgatgcaagtatttcatacacctactgtgatgtggttgccctgcttggctttccttatgcctccagtggag

SEQ ID NO: 9873 - DNA, 90 bp, Homo sapiens
cgtttgatccagaacttgcagcaacaatagagtgtttaatggggacagtgggcactctcctgcttgaaaacccacttgggcagaatggac

SEQ ID NO: 9874 - DNA, 75 bp, Homo sapiens
tggagaatattattgatcagtgtttgcaaaagccagcaggcaacgggcatgaggaggtagttgcatgcgcctggg

SEQ ID NO: 9875 - DNA, 75 bp, Homo sapiens
tgaacaaggagctgccctgcatcaacaccgaagtgctggactccctggtcagcaatgtcaacattgagctgctca

SEQ ID NO: 9876 - DNA, 75 bp, Homo sapiens
cgaggctcggagcagcccagggtcgcaggtagaggcagctaatacttgatggtcaatgggatgaagttcttcagt

SEQ ID NO: 9877 - DNA, 88 bp, Homo sapiens
aggaatatttccaatttcatatgttgaggttaaagtattgcacaatcagctggtccttttccacaatgccattgccgcttactttgct

SEQ ID NO: 9878 - DNA, 96 bp, Homo sapiens
tccatattggggagatgaagcaggtgtggcctttggcctcaggccggctggggcagtgcttacacaccatccagactgaagaccgagtctggtcca

SEQ ID NO: 9879 - DNA, 96 bp, Homo sapiens
ctgacctggacgccctgcagcagaacccccagcccctcatcttccacatggagatgctgaaggtggtggctttgagtgggatgatgacttctcccc

SEQ ID NO: 9880 - DNA, 74 bp, Homo sapiens
gggagacgagaagcctgaaaagtcgcagcgagctggagccgccggaggtgatctgcaactctttcaccatctgt

SEQ ID NO: 9881 - DNA, 90 bp, Homo sapiens
agtgtatgcactttactacaaagatggacttctctgtacaggttcttgggtgtctctggggagtccctgggccagaccttcctccagact

SEQ ID NO: 9882 - DNA, 75 bp, Homo sapiens
gtcaccattaacggagatgatgccgaaaacgcaaggccgaagccaaagccagtggctgacaagattttgaaaaag

SEQ ID NO: 9883 - DNA, 100 bp, Homo sapiens
ccgccaatgctggggaacggaaaatgagggagttcaactctggatatgggccctcacattttccaaacctgtccatctgctaactattttgactgcagag

SEQ ID NO: 9884 - DNA, 99 bp, Homo sapiens
cagaagaaggctgctattgaaagagagtatgcacagaaatgcacagcggtattgatgagtagatccttggattcagaggttggctgaaacgcaccatgc

SEQ ID NO: 9885 - DNA, 88 bp, Homo sapiens
acagtgctggtgtcgccaggctctggagcagttccatcagctcagccaggtcttaagcagcgtcccctctcacagtatgtcctcccga

SEQ ID NO: 9886 - DNA, 50 bp, Homo sapiens
cctggcctcactcaaacagtaaacgaggttggtaacaaggaagatgctga

SEQ ID NO: 9887 - DNA, 100 bp, Homo sapiens
gtgaagcaacttaatcgggatatcgagatgcttgggatggaagaagtttgagtgacctatcctgtgtttatcctccttgccgtagctgagttgatctttt

SEQ ID NO: 9888 - DNA, 100 bp, Homo sapiens
ccggaggaggatgggctgcagacacagcaggctgagcagctgcaaacccccgaaaaaggccagaacacaaagcgtgaatccggaagaaaagttcaatctg

SEQ ID NO: 9889 - DNA, 74 bp, Homo sapiens
cgagaacaccagccacaagtcctaccggccgctctgcgtcctcaccttcaagtacctagtcgatagtcgctggt

SEQ ID NO: 9890 - DNA, 100 bp, Homo sapiens
gcagcacgtgttggaatggacttcggaccctggcctcttgggatgcaaagggccatgaagcccccaggaggagaatcgagcaatctttttggaagtccag

SEQ ID NO: 9891 - DNA, 75 bp, Homo sapiens
cgcctcctctctcctctcccagttccgcagtccttcctggcaaacagggagctgcagtccatggctgaccaggag

SEQ ID NO: 9892 - DNA, 90 bp, Homo sapiens
ggcagatattcctccccagcatgtcagcatgaccaagcgcctctactacctctggatgtaaagacgcttctggggccagcttatggttcc

SEQ ID NO: 9893 - DNA, 75 bp, Homo sapiens
cagcagtgagggggccacggctcaagggtatcatagcaacgatttatatcatccctggtgacataaactcgttag

SEQ ID NO: 9894 - DNA, 90 bp, Homo sapiens
ttagccaacatttacttggagtccaaggaagagagaagggcacagttacctaagtatcaacgtaatcttcctcggccaggacaggccccc

SEQ ID NO: 9895 - DNA, 98 bp, Homo sapiens
gcggagaggagatgcacacggcactcgagtgtgaggaaagaccacagcaagattctttcattcgtctcctcctagcctgggggaccaggctcgaactg

SEQ ID NO: 9896 - DNA, 96 bp, Homo sapiens
gcaggaactttgagcacggcttccgtgtgcatggaaagaactttcacctgatccaggccaacaaggattatatctgtccaagatgcgagtctggtt

SEQ ID NO: 9897 - DNA, 80 bp, Homo sapiens
ggcagagcgcctcaaaaccgaagattcgcaggctgaggatcgagatagagaagctccagtggctgcaccagcaagagctc

SEQ ID NO: 9898 - DNA, 100 bp, Homo sapiens
aattctatctcttgggcaatcttcacggggctggctgctctgtgtctcttccaagaacgctttggataaacaagaagaattgacacctcttggagtccac

SEQ ID NO: 9899 - DNA, 83 bp, Homo sapiens
gccgcgagaagcagcgggggggcaggcgatcgaagagctagagccggtgcaggccacgcagaacaagacagggaagtatgtgc

SEQ ID NO: 9900 - DNA, 88 bp, Homo sapiens
gccggggtccgcaaggccggagaaggccgccgggcccgggcatggtggtctggggcaacgcggaaggccgactgcagcagtggcccag

SEQ ID NO: 9901 - DNA, 100 bp, Homo sapiens
gaacccatcgggcagctacacatcttgaaagagaagctcttcctgtgagagatttaccgcattgtttctcagaagcaaatgtcagacagacgcgaaaatg

SEQ ID NO: 9902 - DNA, 139 bp, Homo sapiens
gcctctctcaatgaaactgccaccacaataactgtattgttgagaccagcacaagccaaaggtgctcctatcagcttaggaaggaaggttggcggcggtgaagagggaagaggatgatctagtaatgggctcttccaaa

SEQ ID NO: 9903 - DNA, 105 bp, Homo sapiens
gcctggtcttgtggaactgaacttagctcgacggggctgaccgctctggcccagggtggccgaactgatgagcagtctcattgagtactgcatcgaactgagcca

SEQ ID NO: 9904 - DNA, 82 bp, Homo sapiens
tctaacatgtttaaccctcaaacaaactagaagctgatagtcttgaagttaaagcaagcaaggagcaggctttgcaagatct

SEQ ID NO: 9905 - DNA, 97 bp, Homo sapiens
acgtccatccatttcgtggttcacccgctgccgggcaccgaggaccagctcaatgacaggaaccactcgttttgactattattttatcactctttgt

SEQ ID NO: 9906 - DNA, 83 bp, Homo sapiens
cgtgcctgaaggagtacatgccctttatgaagatattcttgaggggaagtctgttagaactgctgtgctgatcaacgggacgc

SEQ ID NO: 9907 - DNA, 95 bp, Homo sapiens
ccttccagatcgcttcctctcgcaacaaactatttgtcgcagatgaggagactgtccttcctgtttcgcagatgaggaaactgaggcttagagaa

SEQ ID NO: 9908 - DNA, 75 bp, Homo sapiens
aaacactctccttctgccacatttgttttgagctaaatattgagggctttatcctgtggataaacgcagagtgaa

SEQ ID NO: 9909 - DNA, 76 bp, Homo sapiens
gaatgggcattacatcatcccacagatggctgacaggcccagaaggatgtcggtctgctaccgtcccccagggaac

SEQ ID NO: 9910 - DNA, 98 bp, Homo sapiens
ggcctttttccatctgcaggactatgaccaggcccgccactacctcctggctgccgtgaataggcagcctaaagatttcgatggggtcctctatcata

SEQ ID NO: 9911 - DNA, 75 bp, Homo sapiens
caccaaagttccaagatgcacacttcgagttttatcaatcaaagggtatacctcagttaccatgtgccaaagcat

SEQ ID NO: 9912 - DNA, 74 bp, Homo sapiens
agtcttgggatcagacatgaagaccccagaggatcctgcagtgcaggaatctgagaattgctctcacacaccaa

SEQ ID NO: 9913 - DNA, 100 bp, Homo sapiens
tattagtttgggcataccaaaaggagagatgcctttgagtaatggacagatgggccagcctctcaggcctcaggcaaattatagtcaaatacatcacccc

SEQ ID NO: 9914 - DNA, 97 bp, Homo sapiens
gacattggaaaccagctgcacatgctaaccaacaggcacgacaagtttctggacactctccgagaggtgaagatggcgggtgaaaaagttgagaagc

SEQ ID NO: 9915 - DNA, 95 bp, Homo sapiens
gggacccggcccgggaccggcggcgcgcggcggccgaggccagtgcaccgtccaggtgaggttagagctggggcatcgcgcccaactgcgcaaga

SEQ ID NO: 9916 - DNA, 100 bp, Homo sapiens
cgagagcgtgaccgagagcgcgaatatcgtcatcgttagaaggtgatggcatcagctgagaagggaaggaagcccatgtgaggacactgaagaaggagtg

SEQ ID NO: 9917 - DNA, 50 bp, Homo sapiens
cccagctctctctgggcatctggaaagataagcatggattcctggttcat

SEQ ID NO: 9918 - DNA, 100 bp, Homo sapiens
gcggaggttgggaaggagggcaagccaccttctgggtgaaccctcagttcaagatccggctggatgagacggatgacccggacgactacggggaccgcga

SEQ ID NO: 9919 - DNA, 83 bp, Homo sapiens
tttgactacaattctcaacaacagaataatcatgggccagactgggaagaaatctgagaagggaccagtttgttggcggaagc

SEQ ID NO: 9920 - DNA, 99 bp, Homo sapiens
ttggagagctcatctggaattttgccgatttcatgactaaccagtgctcaaactgtccaggttgctgaagttgaaccacagtcacagccacagccttcc

SEQ ID NO: 9921 - DNA, 83 bp, Homo sapiens
ccccgggcggggttgagtcggcgctcagctgcttctctttcaaccaggactgcacgcagaggtggaggagacactgaagcgac

SEQ ID NO: 9922 - DNA, 74 bp, Homo sapiens
atcaaaacctggaccttctggattacaggccaaattagcaagagccccctggtgaaggccatcttccatgcctg

SEQ ID NO: 9923 - DNA, 88 bp, Homo sapiens
gggttacagactgtggtgcctacccccatcactgcttccctcagccataacaggctgattccaacaaaaccagaattgatgaggccaa

SEQ ID NO: 9924 - DNA, 100 bp, Homo sapiens
ttggacatgggatttgctctctatagaaggttctttgttcctgaagatgggtctccggtaatcaatattatcaatgctgcccaggaaagtagtcccatgc

SEQ ID NO: 9925 - DNA, 100 bp, Homo sapiens
ggcagtctcacaggtcaaagtccatgaaaatttccaactcctcagagttttctgctaaggagaacaaggtctctaattaacagaagatggcaaagcccag

SEQ ID NO: 9926 - DNA, 82 bp, Homo sapiens
agaagctgggattggagattccacccaaacttgctggtcactgggaggatggtactggggaagtatgactgttaatgaagcc

SEQ ID NO: 9927 - DNA, 88 bp, Homo sapiens
agactctgaggctgatatgcaatgtcacttacaacattaatcagatactgcatttaaggtacagtgaaggtgaaattcgatttaattt

SEQ ID NO: 9928 - DNA, 90 bp, Homo sapiens
gtgacggaatgcctccatacattgctgttccctcgtcacaccaatgccagtgctcgagacaacaccatcaacctgatccacacgttccgg

SEQ ID NO: 9929 - DNA, 100 bp, Homo sapiens
cccccttccccacgcaaccccagatccatttacactttacaaactggtcatgctgctggagtggtggtcctgcacggagtgtacactgttcacggaccag

SEQ ID NO: 9930 - DNA, 137 bp, Homo sapiens
ctcgcgtcgcgcccgggaggaaggaacgaggcaaggagctaaagcagcgtgcgttcagccctggggtcaaaatgcagatcttcgtgaaaacccttaccggcaagaccatcacccttgaggtggagcccagtgacacc

SEQ ID NO: 9931 - DNA, 90 bp, Homo sapiens
cggggagtcagtgctggggctggtgcacatggacgtcgtggagctgctgctgaagaccgagacatgggtgcccggcaccgcgcccgagcc

SEQ ID NO: 9932 - DNA, 100 bp, Homo sapiens
aatgaaggaagaaaacacaggagccggagcagaagcaaagaggttaaagatcgaggtccggaagccactaggagattttttaattggttttattggagca

SEQ ID NO: 9933 - DNA, 76 bp, Homo sapiens
gcaggatttcgtacttactcacagacaagacagggtattaacgtgtcagggctgagtgttctgggatttctctaga

SEQ ID NO: 9934 - DNA, 75 bp, Homo sapiens
tagaacgatgtgaacatcgaatcatggaatcccttgcatggctctcaatgcagtggcagaacgtggagcacgttg

SEQ ID NO: 9935 - DNA, 100 bp, Homo sapiens
ctggcagcgacctgtgattgacaaccccaattataaaggcaaatggaagcctcctatgattgacaatcccagttaccagatccatccttttacaatccct

SEQ ID NO: 9936 - DNA, 76 bp, Homo sapiens
catttttctacatattaggatataaccctgagacaagaaaggcctaaagaatgtatttgacgaagcaatattggct

SEQ ID NO: 9937 - DNA, 96 bp, Homo sapiens
tcagcaccctctgcttaccacagccagcccaccaagaaaacacattgtggagcgctatacagagttttatcatgtacccactcacagtgatgccag

SEQ ID NO: 9938 - DNA, 90 bp, Homo sapiens
tgggtatcagggaacctctgtgggacgcctggaggagaggaacctttgcttctatggaagattcgccacttgagagagagaggcctggag

SEQ ID NO: 9939 - DNA, 83 bp, Homo sapiens
tgactattcagatcatccaagtggaggttcctacagagattcatatgagagttatggcaaccggtgaccaaaaacactttcag

SEQ ID NO: 9940 - DNA, 89 bp, Homo sapiens
gaagatggcgactgaggcacagagtgaaggggaggtgccagcccgcgaatccggccggagagcccaccttcggcattttcctgccctac

SEQ ID NO: 9941 - DNA, 74 bp, Homo sapiens
gctcagagatccaagtgcgcgccctggcgggtccggaccaaggtatctacgagaccccagcaggcaccatcctt

SEQ ID NO: 9942 - DNA, 80 bp, Homo sapiens
gtcaggcagatgtttgtcgactggaatggatatgtgtcacaaagatgtctacacggaactgccagggaatggactcagtg

SEQ ID NO: 9943 - DNA, 120 bp, Homo sapiens
gtgatctggggtataccgttttagtcttgggggtagagtgactgcttgcgaaccagttcagcagtgcctcagcatgccaatgaagatgtggaaagaatgttactaggaaacaagtgtgat

SEQ ID NO: 9944 - DNA, 97 bp, Homo sapiens
cggccggcaggttgggaggagcggccgaagcaggcaggctccggagagttccgcacgctgcggaaaggcttctcgccctaccactcggagtcccagc

SEQ ID NO: 9945 - DNA, 100 bp, Homo sapiens
cttggataccacagtatcataaaattcctctaaatgcagtttgatgaacttgtgaaaaaattcaaagtcgaatatcatgctggtggctctacccagaatt

SEQ ID NO: 9946 - DNA, 74 bp, Homo sapiens
gcgaaggaggcagaggcacttatgcttgtcagggcgccaatgcttcggcattagagaaagagattggtccagaa

SEQ ID NO: 9947 - DNA, 90 bp, Homo sapiens
agaggaactgcttttgagtgagatggtcccagaggcctggaggagcggactgatgaagatctccttcaacgacaaaagcctgcagaccac

SEQ ID NO: 9948 - DNA, 108 bp, Homo sapiens
cagagcgttcctcaaggcccaggctgctttcttcggtagctaccgaaacgctctgaaaatcgagccggaccagtccaccatgcctgaagtcaaagacctctcagaagc

SEQ ID NO: 9949 - DNA, 100 bp, Homo sapiens
gatcgcactctctttgtgggcaaccttgaaacgaaagtgaccgaggagctccttttcgagcttttccaccagggtggttctcttcccaaagtggaagcca

SEQ ID NO: 9950 - DNA, 75 bp, Homo sapiens
agcagccgatccagcctgcggagcctgtggggcagctctacaagtttcacgctgtttaagtcatgaacctacaaa

SEQ ID NO: 9951 - DNA, 137 bp, Homo sapiens
ttcaggaggaagcgatggcttcagacagcatatttgagtcatttccttcgtacccacagtgcttcatgagaggtgctggagaatctggtaaaagcaccattgtgaagcagatgaggatcctgcatgttaatgggttt

SEQ ID NO: 9952 - DNA, 74 bp, Homo sapiens
aagcactctgtgctagtgatgtgagcaaatgcctcattcaggatgaaaatttacaggaattcggaggaaaatat

SEQ ID NO: 9953 - DNA, 100 bp, Homo sapiens
aaaccactgaggatcagattttgaagagagatatgccaccagcatttattaattaccttatcccatatcacacaactggtcctcagccataacaagctaa

SEQ ID NO: 9954 - DNA, 50 bp, Homo sapiens
gtgccaggtgtccatccccgtgctgaggtcctcatgctgataccgccagt

SEQ ID NO: 9955 - DNA, 120 bp, Homo sapiens
gtccttttggatttctttttaataatgtgtgacccttcacctttgatcccctgacctgcattaccttgatgcaggccctgacttcctgtgagtgcaccatctgtcctgactgcttccgcc

SEQ ID NO: 9956 - DNA, 83 bp, Homo sapiens
cggaaaattggtcgcgattgtagatgttattgatcagaacagggtggcacaagaatggctcaactctccaaatagagagaatt

SEQ ID NO: 9957 - DNA, 100 bp, Homo sapiens
gacccacctgcagcccccagcccttgccaggaaagataagaccatcatcatgtggaaactgaccagggatgagaccaactatggaattccacagcgtgct

SEQ ID NO: 9958 - DNA, 74 bp, Homo sapiens
ctccagtgtaatgattattgacaacagtgtttggtgtataaaacagaccaagctcaagatgtaaagaagattga

SEQ ID NO: 9959 - DNA, 100 bp, Homo sapiens
acctcaagtacgatgcggagcgcgacctgcgggacatcgaagccacgggcatcgcggtgcacgcgctcagcaagatccccaggaagactgtgtatgacca

SEQ ID NO: 9960 - DNA, 130 bp, Homo sapiens
tcgttccccgccaaccgcaaccattgacgccatgtcgggttattcgagtgaccgagaccgcggccgggaccgagggtactccaaagattcaggtttactcacgtcatccagcagagaatggaaagtcaaa

SEQ ID NO: 9961 - DNA, 82 bp, Homo sapiens
gaacagctgctgcagcggattcctgagttcaacatggcagccttcaccacaacattacagctaacagagaccctgatgctgg

SEQ ID NO: 9962 - DNA, 90 bp, Homo sapiens
ctggaaccgggatggcgacgtctacactgagtcggaggcgaagagccgtgccctccagaagcagccgcgtgtctgctgggtggctccaag

SEQ ID NO: 9963 - DNA, 90 bp, Homo sapiens
acacccttgagcctgagcccgacattattcctgaggagttttgagagcaaaatgacaacacccagaaattcagtaaatgggactttcccg

SEQ ID NO: 9964 - DNA, 100 bp, Homo sapiens
aggtcggacgcgtcttctttcaggctgaggaatgctatcttctttgagaagtcaaattgtcaggatcaggaatgtatgttttcttccatctggattctag

SEQ ID NO: 9965 - DNA, 74 bp, Homo sapiens
ttgaacttaatacagcaagaaagaccatcaagtttaccagtactacctttcccaagccaggtggtgtacaacag

SEQ ID NO: 9966 - DNA, 90 bp, Homo sapiens
gaaagagtcaacagcagtggcaacagcaagctatagtcagcagactggacctcaacaacctcagcagttccagggatatggccagcaacc

SEQ ID NO: 9967 - DNA, 100 bp, Homo sapiens
ttctgttgtgtgaaggagcgggatatgacataattcttattgaaaccgttgtcattatttagaagcaaggtccttgaatgagcgagattatcgggaccgg

SEQ ID NO: 9968 - DNA, 101 bp, Homo sapiens
taccccaggcagcccctgctcaggagaacgtgtctctggctgacatcctctccctgcgggaccgcggcctcagcgagcaggaagcctgggccgtgtgcctg

SEQ ID NO: 9969 - DNA, 83 bp, Homo sapiens
tctcagggtcttcagccgagaggagggcagcccagagccggaaatcgaatttcaaaagaatccggcaaagtttttgaagatgt

SEQ ID NO: 9970 - DNA, 101 bp, Homo sapiens
caatgtgtgatttcagtggaataaatggcgtccaaagtcacagatgctatagtctggtatcaaaagaaggaagatgagaatgtgcctactgctcctgatcc

SEQ ID NO: 9971 - DNA, 90 bp, Homo sapiens
cggggaagcagcagcggccaggatgaatcccaggtgctctggagctggatggtgaagaaaaccagtagattcccagacatcgcgaagtga

SEQ ID NO: 9972 - DNA, 100 bp, Homo sapiens
ctggatgaaggccgtcaccttaccttaaaccttttaagcaaggaaattgaactaagaaatggagagattgttcagtttggcatgaatgaaaaggttgggc

SEQ ID NO: 9973 - DNA, 83 bp, Homo sapiens
ctgaccaagaagccaaagaactggctaggcaaataagctttaagattctgctgaagtgatccagtctcgagtgaacgaccagg

SEQ ID NO: 9974 - DNA, 100 bp, Homo sapiens
ggggcagaggaggcggccaaggacctggccgacatcgcggccttcttccgatccggtgggaccagggagattggatctgctctcaccaggatgtgcatga

SEQ ID NO: 9975 - DNA, 103 bp, Homo sapiens
acttctatatctacaagggggtccgcaaggtcgcccggctcatggagatgggattttccagaggtgatgctttggaagccctgagagcttcaaacaatgacct

SEQ ID NO: 9976 - DNA, 80 bp, Homo sapiens
aggagtcatcggacgccagaatctggttgaaatcacaaagattagacacctttttagataggtgttcttcagcaccactg

SEQ ID NO: 9977 - DNA, 83 bp, Homo sapiens
cgggctcggggagccggtctatggactttccgaagacgaggaaccgttttgattaaaagtaacagtggtccgttgatgttggt

SEQ ID NO: 9978 - DNA, 100 bp, Homo sapiens
gattccaagtaactcttatttggtggctttcctgggggaatgcctggtaattttcccggaggaatgcctggaatgggagggggcatgcctggaatggctg

SEQ ID NO: 9979 - DNA, 100 bp, Homo sapiens
gaacaacagctctagcctgatgaacacgcaggcgccgccctacagcatggcgcccgccatggtgaacagctcggcaggctggcgcccatgcggctctaca

SEQ ID NO: 9980 - DNA, 78 bp, Homo sapiens
acaggccctcgttgcccagatatttaaggaacagtgacaccccaccccagtcccgtggagggggtctgggcccaccct

SEQ ID NO: 9981 - DNA, 100 bp, Homo sapiens
tgtactcactgctgcaggcagccctgctctgcgtcaacgccatcgcagtgctgcacgaggagcgattcctcaagaacagccttgccccgggccagctgta

SEQ ID NO: 9982 - DNA, 74 bp, Homo sapiens
aaaaggagaaatttgaagagatgattcaacaagtacaatgactcttcttgcttttcacctaagttgaataagca

SEQ ID NO: 9983 - DNA, 98 bp, Homo sapiens
cagaatgaacaaccatattctaccttggtgaataacagcgagtgtgttgcaaacatgaaagggctttgcaatttgctgatgtaattgtgttatttggt

SEQ ID NO: 9984 - DNA, 74 bp, Homo sapiens
gaacatggacgccgtcaacgccttcaaccaggagatcatggaagggaagtggttgctgtgtatgttactggtgc

SEQ ID NO: 9985 - DNA, 89 bp, Homo sapiens
aattggaccaagagaacaatgggaaccagtctttcaaaattggcctgaagcacgaggacaaacgtggaggtagcggatctcacaactgg

SEQ ID NO: 9986 - DNA, 98 bp, Homo sapiens
cgaacagctctctgtaatgcgatactcaccagcaagatggattctggatatactctgagtattgtaacaaccacctggatgcttgcatggagctctcc

SEQ ID NO: 9987 - DNA, 98 bp, Homo sapiens
aagaaccttctggactaatgatgatccagtgcctacaccaactaatgttacaattgaatcctataacatgaaccctatcgtatattgggagtaccaga

SEQ ID NO: 9988 - DNA, 82 bp, Homo sapiens
gccgggcagcgccgccaccatgttcctgggcaccggggagccggccttggacacggccaccgtgaacgcccggccgcagcgc

SEQ ID NO: 9989 - DNA, 141 bp, Homo sapiens
cctgccaccccaattattgagtccagagccaggttttgcctgtcagcagctcataccaaagaaatacttgatactatcacaaaatttgtccaggatagacatagagctagaagaaacagacttcgtaaagatcaacttaag

SEQ ID NO: 9990 - DNA, 100 bp, Homo sapiens
ttatatactcatatggatttgccaccatagccagtgctattcctgcttactctaaaagaggggacattgtttttgtcttagcagtgtctgcaaaaacgaa

SEQ ID NO: 9991 - DNA, 101 bp, Homo sapiens
aggagttgtacggcctggcactgcgcttcttcaaagaaaagttgccagacggccagcattgccactgccagtgcatccgcccaggccaggaatcatgtgga

SEQ ID NO: 9992 - DNA, 102 bp, Homo sapiens
ctgggagctggatacctgccctggcagcatggctcagactgcatgacaggtcaaaatgcagatcttcgtgaaaacccttaccggcaagaccatcacccttga

SEQ ID NO: 9993 - DNA, 100 bp, Homo sapiens
ttcaggtgttatttccaattttgtcagttacgtgggtaaagttgccacaggaagatatggaccatcacttggtgcaatcttcagtttagatcttggaggc

SEQ ID NO: 9994 - DNA, 51 bp, Homo sapiens
cacgaggcgctatcttaatgagctcaagacaccattcgcttttcacccaag

SEQ ID NO: 9995 - DNA, 50 bp, Homo sapiens
ctcctcttccagaatgcctttgcgcagggtttcctatcgctgaagtgttc

SEQ ID NO: 9996 - DNA, 75 bp, Homo sapiens
gagattcagtatcactcgctcccttgatgatcttgagaacttcagtgaagatttcatacattggcctcatgaccc

SEQ ID NO: 9997 - DNA, 50 bp, Homo sapiens
ctgcgatctctgtggtaggcccagtttcacctgtgattccctggatggtt

SEQ ID NO: 9998 - DNA, 100 bp, Homo sapiens
tgaatactcagaaatctgttctacaggaagatgctgagaaactgcggaaagaattgcatgaagggaagaaggagaaagggccaacccctgaagaagcaat

SEQ ID NO: 9999 - DNA, 100 bp, Homo sapiens
caccatcaagctgtctaagtccaaagatttttacccaggctctgcctgaggttgtccgaaggatgccgaggaaaaggatatcaggactggaatggctctt

SEQ ID NO: 10000 - DNA, 90 bp, Homo sapiens
ctggctgagaacctcaacaacccacatgacattgtcatcttccatgagctgaagcagccaagagatctgcaaatgagaaattcacaagcg

SEQ ID NO: 10001 - DNA, 97 bp, Homo sapiens
gctgaggaatccttggaggaggaggaggcgctggaccctctgggcattatgcggtccgtgcaagacagcggccagggcggccgggagaagctggagc

SEQ ID NO: 10002 - DNA, 100 bp, Homo sapiens
cgagggcacctcggaccagtctgtaactggctgcggctttatggctacctgcctcagcccagccgccatatgtccaccatgcgttccgcccagatcttgg

SEQ ID NO: 10003 - DNA, 90 bp, Homo sapiens
ccggtcacacaaagcttcagcatgtcatgtggaactgtggaaggtgcatcagtgaagaaatggaccaatgtgtataatcatggaatctcc

SEQ ID NO: 10004 - DNA, 50 bp, Homo sapiens
cttggagcgtccgccatgaggagaagcattttctgcattagcaaatatcg

SEQ ID NO: 10005 - DNA, 89 bp, Homo sapiens
gttacaggtgcagcttcaagcttaggaccacccaccatgcctatccaggtgtggtcactgtcaaagattaacaccagaatggaagaaag

SEQ ID NO: 10006 - DNA, 100 bp, Homo sapiens
acttctggggatggggcatcgtctgtttgtgcctcggcttctggcggagttcaaagaaggacgcagagccagccacacagccccacaggtcctctttagc

SEQ ID NO: 10007 - DNA, 80 bp, Homo sapiens
gattccccggaatcgtgtgctgggctggtcccccttgcccctgcagatcaagtcagtagtggcaccagagcatgtgaagg

SEQ ID NO: 10008 - DNA, 88 bp, Homo sapiens
tgacatttaattttagggtcctttatatagaagggagagtaggattccccagctttccgttgcacaaacagtgaagtgacagtccagc

SEQ ID NO: 10009 - DNA, 74 bp, Homo sapiens
cttgtgacagaatatgccaaaaatggagaaatttttggcagtggaccaatccagctatggcagtttcttctgga

SEQ ID NO: 10010 - DNA, 75 bp, Homo sapiens
atggtcttgaaacacaaatggtttttggattttctgccgtctcttggcaaaaatggcaaataatgatgctgttct

SEQ ID NO: 10011 - DNA, 98 bp, Homo sapiens
cttcagatcttcacagcacagttcctgggaaggtggagccaccagcctctccctgagttggaatggaaactgtctgaatctggagcaattatgacaga

SEQ ID NO: 10012 - DNA, 90 bp, Homo sapiens
cttttccaaaattctggaaatgaagagtctaacctgtctctgcaagctcttgagtcccgccaagatgatattttaaaacgtctgtatgag

SEQ ID NO: 10013 - DNA, 75 bp, Homo sapiens
atggaaaatcgcttggttaaaacctgacacttttaacagtaatagttatgcacgagtgcgagctgtggtgatgac

SEQ ID NO: 10014 - DNA, 98 bp, Homo sapiens
gcggggcgacgctggctgcagggacccggtgacagcgtgagaggttggtcaaagaaaaagtgatgtatgaaaaagaggcaaaacaacaagaagaaaag

SEQ ID NO: 10015 - DNA, 98 bp, Homo sapiens
cgcgcggcggggcagaccgctggggactgcgggcggcgctgtgtccgtcgccatgacagattctcttcctggacattctgttgccctctgtttagctg

SEQ ID NO: 10016 - DNA, 105 bp, Homo sapiens
aagaccgcgcgcagggcctgcagcgggagctggacggcgagcgcgagcggcgcgagaaaagttgcatgctgagaatttgaaaaatgaagatgatgtagacactgg

SEQ ID NO: 10017 - DNA, 74 bp, Homo sapiens
ccattcgggttggagtaattgtttctccttggaccaagatgactgatggaaaactctccacctctacaaatggc

SEQ ID NO: 10018 - DNA, 87 bp, Homo sapiens
gccatattggagtagcgaggaatctgattccaagcaaaaaccaggtatgaatttcagccctttatttccttctaattttggagattt

SEQ ID NO: 10019 - DNA, 90 bp, Homo sapiens
tcggggtccgcgcggcctccgcggagccaggtgacgccttctgggccccatctgtccttcctcacagcaccctcagcaccttaagccacc

SEQ ID NO: 10020 - DNA, 75 bp, Homo sapiens
aggacccctacttcatccagtcgtgcctcagtgaaggagccctctctcctgatgggactgtgctggctactgcga

SEQ ID NO: 10021 - DNA, 98 bp, Homo sapiens
gagagccttctggacaggaaggtgcaggccctgaaggttttttgcatgtctgacacccatgactccacctggaccttatggctccacccagaagcaat

SEQ ID NO: 10022 - DNA, 100 bp, Homo sapiens
atggagacactcaatgccactacccctcactatgtgcgctgtatcaagcctaatgacttcaagttcccattcacggcccagtcctatgcggagagactgc

SEQ ID NO: 10023 - DNA, 100 bp, Homo sapiens
acagggatgataattgggcctccaagaccggacccagcaggacgggatatctccatccgccctctcctggagcactgtgagaacacccatatgaccatct

SEQ ID NO: 10024 - DNA, 73 bp, Homo sapiens
agagggttctattgcccacacaaaaagaacaggatctggacttggcacatttcttttaaaggtgcttgaagac

SEQ ID NO: 10025 - DNA, 100 bp, Homo sapiens
tccagatgaggtgatggcaacggccaacttcggcaagatccagatcgggatttacgtggagatcaagcgcagcgatgtacatagtggaatgtcatgggat

SEQ ID NO: 10026 - DNA, 83 bp, Homo sapiens
cgcggaaggagctggagacggtcgtagctgcggtcgcgccgagaaagattggccggtcgactgaaagccccattgattttgta

SEQ ID NO: 10027 - DNA, 100 bp, Homo sapiens
cctgatctcacaccaaagcaagttgacatgtggcaaacacgtcttagtacacatttgagttcttggagtctctgcggagtccctgggccagatctcacag

SEQ ID NO: 10028 - DNA, 100 bp, Homo sapiens
cgctgcgcggcgcggcggccgggccctcgagacggggacggttggatttggtctagggagtcccagaaagaagtagaaaaagagagagaagcctaccgtc

SEQ ID NO: 10029 - DNA, 100 bp, Homo sapiens
ggtaggcaagacctgcctcctgttccgcttctcagaggacgccttcaacaccaccttcatctccaccatcgacgtgaagccctccaatatgctagtaaac

SEQ ID NO: 10030 - DNA, 75 bp, Homo sapiens
aagccttgtgcagctttgtcaccgaggacgaggtcgagtggatgagacaagctgggagtgtccactcgccttcca

SEQ ID NO: 10031 - DNA, 50 bp, Homo sapiens
caaacttgacactcaccctgaccgggaaaaagacctcgatgaagttctgc

SEQ ID NO: 10032 - DNA, 122 bp, Homo sapiens
ccacctcttctgcaacagttaataatccattccttccatctgaagatcaggtatccaaaacaagtgaatttcataaaggacaatagccgagcccttattcaaagaatgggaatgactgttat

SEQ ID NO: 10033 - DNA, 100 bp, Homo sapiens
tcaacccagaatggaaatggaggaggttccattaactttgcgctcagacgagtaacttcggcaaagggatggggagaggaaatggccagtgatgaactga

SEQ ID NO: 10034 - DNA, 100 bp, Homo sapiens
tcctgcctttgagcggactcccttttaagtgcaactgcagatagaagacctgactcgtaaactgcgcacaggagacctgggcatcccccctaaccctgag

SEQ ID NO: 10035 - DNA, 75 bp, Homo sapiens
cggaaaagagcaaatgcagcatttttgataggtgcctatgcagtggagccgccaccaaaatgcagattttcgtga

SEQ ID NO: 10036 - DNA, 95 bp, Homo sapiens
aaaaatcaaaggcgaagagttcatatgactttagaattaccttggagcgctgatagagcaattcaacagttcgcacaagctccgggtggataagg

SEQ ID NO: 10037 - DNA, 107 bp, Homo sapiens
aaaggaagggctctgctctacacactggtgtctcctgcggaagggcagctgggcacgccttccagaccgaggaaaccacaatctcactgaaaatatacactattcag

SEQ ID NO: 10038 - DNA, 100 bp, Homo sapiens
ctcattgtagcctcaaactcccaggctcaagcagtcctaccatgtcagccttcccagtagctgggaccacaggtgtgttgtgctctccgaccccttgaag

SEQ ID NO: 10039 - DNA, 100 bp, Homo sapiens
actgtttccctcaaattttgtgaaagaattagaggtaacagatgatggtgaaactcatgaagcccaggacgattcagaaaaggatgcgcctccacttagc

SEQ ID NO: 10040 - DNA, 90 bp, Homo sapiens
gtgcgagagcctcctcacttggctgagatctgtatctgtggacctgaatgttgatccctcgcttcagattgacatacctgatgcgctcag

SEQ ID NO: 10041 - DNA, 122 bp, Homo sapiens
ggggctactcgactgctctggaggtagcggccgcggtgaggagagccatgggacgggcagtcaaggtgtattacctgactgcttaaccgatggctctgatgtggtcagtgaccttgaacacg

SEQ ID NO: 10042 - DNA, 96 bp, Homo sapiens
ccagaaatggctgcaggccaagcgcctcacgccggacctggtgcaggttgctgatcagctctgtgccaagtatagcaaggaatatggcaagctatg

SEQ ID NO: 10043 - DNA, 100 bp, Homo sapiens
gggaagataaatgaaggggtctagatgtaaatgtcagtggaaaggagagctaccatcactaagtctagggaacctgatgcaactactcgtgtatgtgaac

SEQ ID NO: 10044 - DNA, 133 bp, Homo sapiens
tccttagatgactctgagattgaagacagccttacagaagctttggagcaaattaagataattagctcatcttcaaccaagccaccctggtagaacaagtaaaaagagtaaaagaaattgaagctattgaaag

SEQ ID NO: 10045 - DNA, 90 bp, Homo sapiens
ggcgaaggagctgtggccgggtccccttcttatccagcccgagacactgcgctccgacaaaaagccttggcatccacgggaggaagaagt

SEQ ID NO: 10046 - DNA, 100 bp, Homo sapiens
cggggatggcgtcccccgggggcccgtactgcacatcgtggtggtcggatttcaccacaagaagggctgccagcctggaattgtctcgccatttaaacga

SEQ ID NO: 10047 - DNA, 75 bp, Homo sapiens
aggagtgggagaaatcaacatggcaacttctggtaatggtcagtggccacagatgtctttaattccaaaaacctg

SEQ ID NO: 10048 - DNA, 75 bp, Homo sapiens
aaaggaagtaccaggacttgcacaggtgctggagaatctggtaaaagcaccattgtgaagcagatgaggatcctg

SEQ ID NO: 10049 - DNA, 83 bp, Homo sapiens
attgaactaaactctcctttgaagactgcccgatgagagaaagggaaagttaaggatgctggagcagaacaatggatttctct

SEQ ID NO: 10050 - DNA, 100 bp, Homo sapiens
cagaactgttccttcagccaaagaaacaagccgtggaataggtgtatcaagtaatggtgcaaagcctgaagccccatcacaggtatatggaggagtgacc

SEQ ID NO: 10051 - DNA, 100 bp, Homo sapiens
gaaaatggtgaagaaaattgaaatcagccagcacgccaagtacacttgctctttctgtggcaaaaacaccttccaccatgaccacctcagcaagttccca

SEQ ID NO: 10052 - DNA, 80 bp, Homo sapiens
ccctaatggaggtctccagtttaggacagtactgcttttaaagagacagtgttagggatcttggaagcacagccaacatg

SEQ ID NO: 10053 - DNA, 82 bp, Homo sapiens
atgtgatcagaagctgcgtcccaacatccccaactggtggcagagttatgaggcttgggcactgtttaaaggaaagttccga

SEQ ID NO: 10054 - DNA, 101 bp, Homo sapiens
gaaaacatccttggatttattgctgctgacaataaagggcaattgaaggaacagactaaaaatcgtgtcctggaaggaaactacaggtactaccagggatt

SEQ ID NO: 10055 - DNA, 74 bp, Homo sapiens
gcgattggcatcctcagccgcttttctgccttcaggatcctccgctcccgaggaaggaaaatcacctcggcagt

SEQ ID NO: 10056 - DNA, 82 bp, Homo sapiens
ctgagctgttcctcccagctacgagctgccccagcttcctgcctgacacagctcacttcaagaagtgcacaatgtcagaacg

SEQ ID NO: 10057 - DNA, 108 bp, Homo sapiens
ccgcctgcaatatgcaatcatcagcgaggcctggcggctagtggaggttcagattcagaacaagaaagtggacatctctaaggtctcctccaagtgtgggtctaaggc

SEQ ID NO: 10058 - DNA, 98 bp, Homo sapiens
aaggtgtacttgcaagaaacctcaggacttgagtaacagcaacatggtctcatcatccatgaaggaccctcggtgtaccgcatctttaaacggtggca

SEQ ID NO: 10059 - DNA, 98 bp, Homo sapiens
ccgccgctcgcatgagcacctcatacggctgcttctggagaaggtacttcttgcaagggatatgcattagcacatactcaagaaggggaagaaaagaa

SEQ ID NO: 10060 - DNA, 98 bp, Homo sapiens
ctgctgtacaccctcaacaaacaccagcgctttgggagaccagcagcagagcatgaagctgggcacaggggtctctctgagcccagggccctgtgtga

SEQ ID NO: 10061 - DNA, 74 bp, Homo sapiens
agctgcagcagctcaagcgcctggagtccttgactccagaagacctttccagattcgtggttgagctgcagcag

SEQ ID NO: 10062 - DNA, 100 bp, Homo sapiens
tcaaagattctttgtagcagacactgcaaatgaagctctcgaggctgctaagagactaagattcagcaatggtgatggacccactagtgaaaacgacatt

SEQ ID NO: 10063 - DNA, 150 bp, Homo sapiens
ctagcagctattgacttagtgaactttatgttcattctcttcccagtctgtggatccaaattcaagtctaattcaggaggactggtgtttccattacaactttgactagaaatgattggagggttgcctctgaattgattaatattctgg

SEQ ID NO: 10064 - DNA, 100 bp, Homo sapiens
actccgggcatggagggcgcgggtgttgtgatcgcagtgggcgagggagtcagcgaccgcaagtccctgaagaggaaggagaaggaatatgagcatgaaa

SEQ ID NO: 10065 - DNA, 75 bp, Homo sapiens
gaaagcatatggacaggtctacgccacatcacttaggtactccaaagattcaggtttactcacgtcatccagcag

SEQ ID NO: 10066 - DNA, 75 bp, Homo sapiens
ggaaaggtttacaagcaggccacgattgaatctctgaagaagctgagtatctatggtgacttggagtttatgaat

SEQ ID NO: 10067 - DNA, 101 bp, Homo sapiens
gctccaggcagtgtaatctcattccatcttcattcatgactccagacagaacactgatatttgcatttaatggggaacaaaagatgaagaaggaaaaggaa

SEQ ID NO: 10068 - DNA, 83 bp, Homo sapiens
tgcaaatgaagagtccagaaaagaagcgaaggaagtcaaatactcagtgtgcaacttgctttggtgtttgctgttttattgcc

SEQ ID NO: 10069 - DNA, 75 bp, Homo sapiens
caacctcagaggacaacgaagtgttcgatggacctccagttgtagctcattatgatatgtctgacaccaactctg

SEQ ID NO: 10070 - DNA, 75 bp, Homo sapiens
ccagggaaccctggtcaccgtctcctcagatgtccagctcgccgctgtccaagaaacgtcgcgtgtccgggcctg

SEQ ID NO: 10071 - DNA, 75 bp, Homo sapiens
cagcctcccgggtagctgggactacagggctgcaagtggaattcatcaaccccatcttcgagttctccagggcca

SEQ ID NO: 10072 - DNA, 83 bp, Homo sapiens
ctgaggcgccgcggtaccatgaggcgccgagcgtttcccaaagtgtattctgcggaactagcacctactgtgttctcaacacc

SEQ ID NO: 10073 - DNA, 51 bp, Homo sapiens
caaaaatagtgatagctttgataatgtgaagcagtattctggaaagttttt

SEQ ID NO: 10074 - DNA, 116 bp, Homo sapiens
cgctgggcctgcaggtctctgtcgagcagcggacgccggtctctgttccgcaggatggcttttgatgaggccattgctgaacttgatacactgaatgaagactcatacaaagacag

SEQ ID NO: 10075 - DNA, 75 bp, Homo sapiens
ggtccgcggcatccgtaaccacaaggaggacgagtttgatgaaggccggaacaactttgaaggggaggtcaccaa

SEQ ID NO: 10076 - DNA, 107 bp, Homo sapiens
atcgtgaccgagaccgtgaccgagagcgtgaccgagagcgcgaatatcgtcatcgttagaagtgagaaagatcagtctaaagaaaaggagaagaaagtgaaaaaaac

SEQ ID NO: 10077 - DNA, 100 bp, Homo sapiens
taaacgaggcgcagcgggtgaaggtatgggcttattttgccaaagaaaacacagcagttgcaccctgttttgcaaaaaccatcagtgtttgggaatgatt

SEQ ID NO: 10078 - DNA, 85 bp, Homo sapiens
gggcggcagccagctcgcaggatccagtttgctgaccagaagcaagaattcaacaaacgtcccaccaaaattggacgtcgctctt

SEQ ID NO: 10079 - DNA, 75 bp, Homo sapiens
gctggaaaatctcaggaatctggtctcattgggttgtctgcattcaaaagagcattctattaaagctaccttaat

SEQ ID NO: 10080 - DNA, 75 bp, Homo sapiens
gcacctacgtcctgatcgacatggttctcaacaagatggccaaaggggcataaggaaatggtggcaggcacttcc

SEQ ID NO: 10081 - DNA, 82 bp, Homo sapiens
ctgagccatgcccatcgcagccgccccgaaggagccaggaagatgatccctatgatcttgaagatgtttctgcacagaaatg

SEQ ID NO: 10082 - DNA, 75 bp, Homo sapiens
cagaaggcgatcaaggccaagtatccgccagtcaataggaagtacgagtgtgagccaaacgtaccaagaaagtcg

SEQ ID NO: 10083 - DNA, 50 bp, Homo sapiens
atgcacagctttacacagaggggaagcatccaggatgtgggaacattgtg

SEQ ID NO: 10084 - DNA, 83 bp, Homo sapiens
tgtcaaagccttcttaattatgtctgagaaaagctcctgaattcagaccacagatccacagccacagtccagatatgtagcgg

SEQ ID NO: 10085 - DNA, 76 bp, Homo sapiens
agatgcctttgttcaccgccaaccccttcgagcaagacgtggggagaaacaaaggcagcgctgccctcgggggagc

SEQ ID NO: 10086 - DNA, 96 bp, Homo sapiens
cagtggaattcacacaagaaaatcccttttgccgatttaaggtatatccgcaccatgtacctggggattcagagccagcggcggaaggaacaccag

SEQ ID NO: 10087 - DNA, 100 bp, Homo sapiens
ggacaagcacgagggcgcgctcgagacgctcctgaggcagaggtggaggagacactgaagcgactgcagagccagaagggagtgcagggaatcatcgtcg

SEQ ID NO: 10088 - DNA, 100 bp, Homo sapiens
gtggataccgtcaagctggccaagcacaaagagcttgctccctacgatgagaactggttctacacgcgagctgcatctggaacttctcctggtctctcag

SEQ ID NO: 10089 - DNA, 100 bp, Homo sapiens
ctatggagagtggagatggcaacacaggttaatacaatctgttggaatgacactggagaatatattttatctggctcagatgacaccaaattagtaatta

SEQ ID NO: 10090 - DNA, 83 bp, Homo sapiens
acaccaggccggcaggctgagaaaagcgagaccgcgtgcgaggaccggttgacatcatggacatatgtgagtccatcctggag

SEQ ID NO: 10091 - DNA, 97 bp, Homo sapiens
ctagcttcaccttcacgatgtttcccttggtcaaaagcgcactaaatcgtctccaagcgttacagtgtttctgccacctctgtacaaaagacaattt

SEQ ID NO: 10092 - DNA, 100 bp, Homo sapiens
gctctacgaaatctttcgctccctacacaccctggttggacaggatttccatttaaacagggttaatttggaagaatcttcaggagtggaaaactctcca

SEQ ID NO: 10093 - DNA, 98 bp, Homo sapiens
tatctgtacagcagtttcctcatccctgcagctgtgtttgaacagatgcacccactgggcctatgtaataacaatgacgaagaggacttgtatgaata

SEQ ID NO: 10094 - DNA, 100 bp, Homo sapiens
ctggagtctctgacagacaaatctaaggttcgagaaatggctgctactaccttaagcggtctgctacagtgtaactttcttaccatggacagtcctatgc

SEQ ID NO: 10095 - DNA, 76 bp, Homo sapiens
gagatgctggtcctgctggtcctaagggtgaacctggtctcagaggtgaaattggtaaccctggcagagatggtgc

SEQ ID NO: 10096 - DNA, 71 bp, Homo sapiens
aggaaccaattgatcagattcaggtaattatcagcaggaaattttctgagaagctggtagaatttccattg

SEQ ID NO: 10097 - DNA, 75 bp, Homo sapiens
tgaggacttaaatgaagccactgattagcaatttaaagatcctctccaagattgtgaagatggaaagggtccaac

SEQ ID NO: 10098 - DNA, 80 bp, Homo sapiens
caggcccacggaggaagagccgggcagtccctggagcgggccagagtgtgaacatggctacgcctcttcattcccgtcca

SEQ ID NO: 10099 - DNA, 100 bp, Homo sapiens
agcaggcggacgaggcggaagaccgcgcgcagggcctgcagcgggagctggacggcgagcgcgagcggcgcgagaaaatcgcccaggaccacaccgcagc

SEQ ID NO: 10100 - DNA, 87 bp, Homo sapiens
accaggagctctgccggctcaacacgatggacttactgctggtccaaaagcttctttgcatgtgtccagtggatttccatgggatct

SEQ ID NO: 10101 - DNA, 90 bp, Homo sapiens
cacatcaatgcactgccaatgatttcaatgggacagatgttacaagattttggaaaatttcttgggatgtttcttcttgttttgttttct

SEQ ID NO: 10102 - DNA, 100 bp, Homo sapiens
ttacagttcattttttgcttggtttggaaaaatttcattagagggccgcctgctgaaccttagctgctccacagtgcctacatttgtgctctcaatcact

SEQ ID NO: 10103 - DNA, 75 bp, Homo sapiens
ccaacttcagagatttgtccaagagtcctgtgtatggaaactcacatgagtcagctcagtctagaagggtagtaa

SEQ ID NO: 10104 - DNA, 88 bp, Homo sapiens
tggtatggatgtaaccaagaaaaacaaacgagatggaactgaagtcactgagagaagcaccaggatcatctacgaccgaaagttcctg

SEQ ID NO: 10105 - DNA, 86 bp, Homo sapiens
ccctattgtaagtgcagatggaacacaacaggctgcctctaagaatcaaacttcactcttgggagaaccaccaaaagaaattcggc

SEQ ID NO: 10106 - DNA, 75 bp, Homo sapiens
ccggcggcattttgaggcggtcctcctagcggcctgccatcccaggcctcaggacctgagttctccgacgcccac

SEQ ID NO: 10107 - DNA, 75 bp, Homo sapiens
gttggagttttggcgagagtttgtggaagatggcgcctgttgtgacaggatgaggctgccagccttgagagcacc

SEQ ID NO: 10108 - DNA, 90 bp, Homo sapiens
caggcggtgacagagtggagccatggctagagcaccccgagcagaaggcagaccggtattttgtgttatacaaaccgccccctaaagaca

SEQ ID NO: 10109 - DNA, 90 bp, Homo sapiens
ggcgatgggaagccatgaccctggtttctcccagatactattacctctgtttagaagccaagcccacagagactttgtgagagatgcgac

SEQ ID NO: 10110 - DNA, 100 bp, Homo sapiens
gggtggatgcagcatctatcagttaccagtgctacagctagaatgaagcacatcaacctatcatttgcagcgtgtggatttctgggcatttaccacttgg

SEQ ID NO: 10111 - DNA, 75 bp, Homo sapiens
tggagagcttcatcaaaaatagtgatagctttgataaatggggagtaggaggcaatgaggaagtcaagaggaagg

SEQ ID NO: 10112 - DNA, 76 bp, Homo sapiens
gcgtttggctgtgacctgacggagtatctggaaagctcgggacaggatggagtctcgctgtgtcacccaggctgga

SEQ ID NO: 10113 - DNA, 101 bp, Homo sapiens
ggcgggacgggacgtgcggcccagcgagttggtcggtcccggggtcacccgctacgggaagcaggcctcgccacaggtgctgctacccccgtatgatgatg

SEQ ID NO: 10114 - DNA, 100 bp, Homo sapiens
agtctggcctggcagccttccccaggtgagcagcaacaaggtgagagaatgcagagctgcagcattgttggaaactgttactacatttttactggaaata

SEQ ID NO: 10115 - DNA, 97 bp, Homo sapiens
gcgtcccactcctcaggccggggcgcacgtcggctcccacgcttagccagctcccgtcacatcgatcagacaacaacatggcaggaccccaggaagg

SEQ ID NO: 10116 - DNA, 101 bp, Homo sapiens
ggcaccgccagacggccagaaagttccgccatgagctggggcacggagctgtgggtaagtaaggaggtctctgtaccatggctcgtacaaagcagactgcc

SEQ ID NO: 10117 - DNA, 83 bp, Homo sapiens
tgtgcctgcaacctgtccggggatcccagggaggccgagacgcatccagagctttcgtgaccggggactgttctgaagcaggc

SEQ ID NO: 10118 - DNA, 75 bp, Homo sapiens
aaaagctgccctgagacggtgtcccgccgaaaggtgatctgcaactctttcaccatctgtaatgcggagatgcag

SEQ ID NO: 10119 - DNA, 98 bp, Homo sapiens
ttgctgtgctgcgcgctcgtgatggctcccgcaaagaagggtggcgagaagaaaaagggccgttctgccatcaacgaagtggtaacccgagaatacac

SEQ ID NO: 10120 - DNA, 100 bp, Homo sapiens
ccctccgccgcccagtggccccgaggagcctggggagaagcgccccaagtttgaggaagaaggcacctacgatcaaactctggagttccgtaggggaggt

SEQ ID NO: 10121 - DNA, 110 bp, Homo sapiens
gctattgacttagtgaactttatgttcattctcttcccagtctgtggatccaaattcaagtctaattcagagtattccagaggagcttgtatcaatggctgagaggttta

SEQ ID NO: 10122 - DNA, 50 bp, Homo sapiens
ctcttcatgcagttctccatcgtgccaacttcagctacgggacggacgag

SEQ ID NO: 10123 - DNA, 90 bp, Homo sapiens
gcattctccagggaaaggatgacatatttttggacctgaaacagaaattctggaacacctatatggatcgtgtgggtggacgagttgcca

SEQ ID NO: 10124 - DNA, 100 bp, Homo sapiens
catcgtgtccgaggtgcagttcgtggagagcagcggcggcggctcctcggccgtgggccagttcgtgtccctggacgaaatggtggagtcaatgaagaaa

SEQ ID NO: 10125 - DNA, 100 bp, Homo sapiens
aagccctggacgactttactgccatccgaggcaactacagcctagagtcaccaggagactaaagtccatcaaaaacatccagaaaattaccaagtctatg

SEQ ID NO: 10126 - DNA, 74 bp, Homo sapiens
gcgtttgcagaatctgtcacagagggagatgtcaggtgggagaaaggaaatcagtagctctgatgagatcacca

SEQ ID NO: 10127 - DNA, 110 bp, Homo sapiens
ccacgcagaaggtggacgccatgcggcaggaaatgcggagagctgagaagctcaggaaagagaggctggccggaagccctgggagcggagcaactcggtggagaagcctg

SEQ ID NO: 10128 - DNA, 100 bp, Homo sapiens
gtgctgtggtgtaattcagggagcccagaagctggtatttggccaaggaaccaggctgactatcaacccaagcccgatgagagaaagggaaagttaagga

SEQ ID NO: 10129 - DNA, 100 bp, Homo sapiens
ccagaatgtcccaaggaacacctgggcaacagaatattggtcaagttgctgaccttgaagaggcaagtgaggcctatctggttggcctttttgaagacac

SEQ ID NO: 10130 - DNA, 101 bp, Homo sapiens
tccaattttccaagtggcagattatggaatagttgcagatttatttaaggcttcattccagcgctccaatagtcatgacaaagtaaggagaatagttgcag

SEQ ID NO: 10131 - DNA, 75 bp, Homo sapiens
cgggagtgttcgttgtgccagcgactaaaaagaggcagaagctcctcctggggtagagacagatcttattgatgt

SEQ ID NO: 10132 - DNA, 98 bp, Homo sapiens
aaacatgacgtctccagccaaattcaaaaaggataaggagatcatagcagagtacgatactcaggtcaaaggcagcaaatatgaagtctatggaccct

SEQ ID NO: 10133 - DNA, 50 bp, Homo sapiens
gaggagccagttaccatgactcatccagactctcttgagcctgagggatc

SEQ ID NO: 10134 - DNA, 98 bp, Homo sapiens
ttgcaggcgccgagagggcgggccagggccgcactccggagactcgcggttgctacgcgcaccatggctggagaattcagaaggagctggcggacatc

SEQ ID NO: 10135 - DNA, 82 bp, Homo sapiens
gatcttcctgagcagagctctccgggttccccggctcgcggggcccggcgaagggcaggaagctcttcgtgggcggtcttga

SEQ ID NO: 10136 - DNA, 75 bp, Homo sapiens
cattggtctaaagtctttccaaaaggtcaaggttcacaaggtattgacctgatggacatggcttcggacatcctg

SEQ ID NO: 10137 - DNA, 100 bp, Homo sapiens
gacttgggaggctccgttgcctgctcccggagggagacgcgctgccgaggagaacccagcggtttcagctgtgagttcaacatggaggcaaatcagtgcc

SEQ ID NO: 10138 - DNA, 83 bp, Homo sapiens
cgacccggtgtgtggcgcgcccagagccccgcgtttcagccctagggaagggggacagccgcgccgctgctgcttttccgaag

SEQ ID NO: 10139 - DNA, 74 bp, Homo sapiens
agggtgtggccgttttacattggctgttttcctcacattcctcaagcagtcacaatatggagcttccgtttctg

SEQ ID NO: 10140 - DNA, 78 bp, Homo sapiens
ggactgcagtacttggagagactctatatgaaaaggaactccctgacatccttgaaccacgaagctgccctgagacgc

SEQ ID NO: 10141 - DNA, 83 bp, Homo sapiens
ggccgccgcagcaccgagtccgaggtctacgacgacggcaccaacaccttcttctggtgagaagccctaccactgcaactggg

SEQ ID NO: 10142 - DNA, 75 bp, Homo sapiens
ggtgacaagaacggcggtacccgggtggttaaacttcgcaaaatgatgatgtctaccgtagaaaagcctcagaaa

SEQ ID NO: 10143 - DNA, 92 bp, Homo sapiens
taaaaatgccagcagttctgacattttgccttctgattctaactgcaaagatgcacttttgtcttcctggccagtgttttactacaatgagg

SEQ ID NO: 10144 - DNA, 97 bp, Homo sapiens
aacatagagaattctgggcttccacacaactccagtgctaactcaacaggtcagtcattggcaccatgaactggaataaaggtggtcctggcactaa

SEQ ID NO: 10145 - DNA, 51 bp, Homo sapiens
attgaagctcacctttgtctaaataagattttgtgaaaatggaaaattatg

SEQ ID NO: 10146 - DNA, 90 bp, Homo sapiens
caaccacgacctgacggacaccacccgggcggcttcttctcagcctgttgataaccatgttagcccatcttccttcttgggccagacacc

SEQ ID NO: 10147 - DNA, 98 bp, Homo sapiens
gctggcccaggcccgagtgcctctgggtgacgagatgactgtgtgccagacattcactactttcactgcctaagaatcctggaccttctcaaaggcac

SEQ ID NO: 10148 - DNA, 89 bp, Homo sapiens
aactgacagtgggagtcttcgaagaggatcaggtcatccagctgatgaacgcgatcttcagcaagaagaactttgagtccctctccgaa

SEQ ID NO: 10149 - DNA, 100 bp, Homo sapiens
gtcatccacaaccatgcggacatcggcttctgcctggtgctctgcgtcctcatcgggcttatgttcgaggggtctaatgtgatggaagagcaggacctgc

SEQ ID NO: 10150 - DNA, 112 bp, Homo sapiens
cctgcagccgcggaccgaggcagcggcggcacctgccggccgaggtgttgagagagaaaagaattcctccctggatggaagtggtccttatacccatgacaggaaaaccaag

SEQ ID NO: 10151 - DNA, 101 bp, Homo sapiens
tccctcctcagtatcgcaaggtcttgatgcccaagttaaaggcgaaacccatcagaactgctagtgggggctgcttcgaacacatcggccacgccatcgac

SEQ ID NO: 10152 - DNA, 100 bp, Homo sapiens
gccgccgggctcggggcctccgcagcgacaacatggaggccgtgaagaccttcaatagcgaggtgaaagatgtcatgaaggatgtcatgtcggacctgca

SEQ ID NO: 10153 - DNA, 75 bp, Homo sapiens
cttgtgctcagtgacatcattcagggtgtccgcaatgttgccagtgtctgtctgcagattggctacccaactgtt

SEQ ID NO: 10154 - DNA, 90 bp, Homo sapiens
gccatgggtacgtgacagtaaaggacaaccctccatatgataagggagccttcagaatcgaaatcaactttccagcagagtacccattca

SEQ ID NO: 10155 - DNA, 82 bp, Homo sapiens
tcctgcagcgagagctcacggaattcctctcggaactgtggctgcaccatctgtcttcatcttcccgccatctgatgagcag

SEQ ID NO: 10156 - DNA, 74 bp, Homo sapiens
acgaccttcctgcccttcacgctccaggagctaggcatctctgggaaaggacctggggctggtgaggggcccgg

SEQ ID NO: 10157 - DNA, 75 bp, Homo sapiens
gtgttcggtgaccgcagcactggggaaacgatccgctcccaaaacggtttaggaatgtatgaaacacccctgttc

SEQ ID NO: 10158 - DNA, 75 bp, Homo sapiens
ggagcactccaagctgtactgatctgactgcagccatgagcagcaatgagtgcttcaagtgtggacgatctggcc

SEQ ID NO: 10159 - DNA, 96 bp, Homo sapiens
taactggaactatacacctctgcatgaagctgctattaaagggaagatcgatgtgtgcattgcatctccatcctctcctgagcacttgcctgcaac

SEQ ID NO: 10160 - DNA, 101 bp, Homo sapiens
atggtggatgaagttgttcattgtttgtcaccacaaaaaggacagatccagacatttaatgtggatgcaccatgccagaccgtggaagatttaacgaatgg

SEQ ID NO: 10161 - DNA, 75 bp, Homo sapiens
agaaagagtgcccaattccaaatgtacaggagtctactcttcatcttgtgttgagacttcgtggtggtgctaaga

SEQ ID NO: 10162 - DNA, 83 bp, Homo sapiens
agccataatgtcgacctgccggagtcgaggattccagggtcgaacactcggtgatgtgtccaatctagatcccaacttctcat

SEQ ID NO: 10163 - DNA, 74 bp, Homo sapiens
ccagcccgtggtccttctccatattcgagttgtcgccgtgatcctgaaggcgctgacctacgacgagaagcggg

SEQ ID NO: 10164 - DNA, 82 bp, Homo sapiens
gcttatactcctcccagtgacgggtctggagtgcgtgggggaccggctgttggcggccttgccaacattccactaacccccg

SEQ ID NO: 10165 - DNA, 82 bp, Homo sapiens
gcccagagactgctgagcccgtccgtccgccgccaccacccactccggacacagacctcctgccccccgaggtctgcagtct

SEQ ID NO: 10166 - DNA, 114 bp, Homo sapiens
aatatgtagtagaacaactggctatcaaatacttacacttgaaaaggatcagcatcaacaaagagagcattgtggatgtagaaggtgttgtgagaaaagtgaatcagaaaattg

SEQ ID NO: 10167 - DNA, 137 bp, Homo sapiens
gctgagccccggcactgcctggctgcgagcacatgatggcgatacgggagctcaaagtgtgccttctcgggacggaatcagtccccaatgcctggaaattcctcattggattactgtgttttaaacagaatttcgtg

SEQ ID NO: 10168 - DNA, 74 bp, Homo sapiens
ttgcaaagagcaaagaagaggcctgcaaagctgtacaagagatcatgcagattgctgcagcaaaaccaactcca

SEQ ID NO: 10169 - DNA, 80 bp, Homo sapiens
aatcaaagataaatccaaatactgcatatcagaaacaacagggggcagctggcattttatgctatgtgggagcctatgtc

SEQ ID NO: 10170 - DNA, 100 bp, Homo sapiens
ggtgaattgggatgttcagagacaagtttgggattacctttttggaaaagaaatgtatcaggtgcaacacgcaggactacatctggcacaaggggatgcg

SEQ ID NO: 10171 - DNA, 73 bp, Homo sapiens
ttgtgagataccacccacttctgatacaaagtcagatactgcaacagataatatcgtctactgcattattttt

SEQ ID NO: 10172 - DNA, 90 bp, Homo sapiens
atcaaagacggcaacgcgcttatcagcgctatgagaaaggaattcagaaaagcagctcagcaacaggaagaacaagaagaaaaggaggaa

SEQ ID NO: 10173 - DNA, 101 bp, Homo sapiens
tgaatttgctgacttggttttagaagaatttagtgagaattttgatttgttaccagctgaaaaggacgccaggaaagcatgtgcagatgcaactctctctc

SEQ ID NO: 10174 - DNA, 80 bp, Homo sapiens
tgcacggatggtcttgaaacacaaatggtttttgttaattcatgggagcctcttctactgccacacaatctcagttcctg

SEQ ID NO: 10175 - DNA, 88 bp, Homo sapiens
gggattggagattccacccaaacttgctggtcactgggaggatgccggaccagatctctgtctcggagttcatcgccgagaccaccga

SEQ ID NO: 10176 - DNA, 90 bp, Homo sapiens
tttttaaatttatgaactcgaaatgaagcggaaagcagatatgcgcgtcagcatactttggcgggttgggggccgtcccgctcctaaggc

SEQ ID NO: 10177 - DNA, 120 bp, Homo sapiens
tccatcaggaccccagatgtctgacagccctgtgtgacaccaagataagtaacgctggacgtaaagaaagaagtgatgcactcaattctgcaatagataaaatgaccaagaagaccaggg

SEQ ID NO: 10178 - DNA, 100 bp, Homo sapiens
tgggttctggactttgggcgtcccattgccatggaactctttccagttaacagacagagtgtggatcattttgctaaatacttcactgacgcaggtctta

SEQ ID NO: 10179 - DNA, 88 bp, Homo sapiens
agcctcaggcgtgcgcggacggtgtgcggcatatagcactttctacattgtgggtttaatattatcaatgcagataccttttgtggga

SEQ ID NO: 10180 - DNA, 82 bp, Homo sapiens
ccgtcaagtacctgacgcggggcaagattctgctgtgcacaggtttttagaacttcagccataaaaatgggcagaattttcc

SEQ ID NO: 10181 - DNA, 75 bp, Homo sapiens
tggcacccccagagccctcctgcacccgcttctccaggaccccgcagagcagcaacttatgactctcatctctgc

SEQ ID NO: 10182 - DNA, 50 bp, Homo sapiens
tgcaagcaggcaacctgaatacaggtcccgttcaagaagttcttccagtt

SEQ ID NO: 10183 - DNA, 100 bp, Homo sapiens
gcggctggctcacgcgcgtcgcgcgggccgggatgagggactgtggcggcgcggcccgcgcgcagccggccggcggcttggatgtgaagtctcaggaagc

SEQ ID NO: 10184 - DNA, 75 bp, Homo sapiens
gtgcgccgcgcgggacccggaggaccgtatccccagcccactgggctacgcaggagataccctcttggccatccg

SEQ ID NO: 10185 - DNA, 104 bp, Homo sapiens
cccagaccctggagcctcagttggaagcagccgatccagcctgcggagcctgtggggcagatgatatcatcaagttgaatcgaaaggaagggaagaagcagaat

SEQ ID NO: 10186 - DNA, 76 bp, Homo sapiens
gtctcttacgtctgcggaagtgcagctgcctcagttcttagcgcagggcaaatgacacagctttgtgaactgatca

SEQ ID NO: 10187 - DNA, 83 bp, Homo sapiens
cggacggggagctgaacgtggacagcctcatcacccggctgctggaggcatttaaatcaaacggtattgagatggattgggtt

SEQ ID NO: 10188 - DNA, 97 bp, Homo sapiens
gtttgtccttctgctattgatcctgaagatgtgtcatccccacaccagcgagcctctgccaagatgaaaccgatagaagaaggagcagaagatgatg

SEQ ID NO: 10189 - DNA, 75 bp, Homo sapiens
cctcggtgggggcttagcgcactggaggagcggcgggcttcagacaggtgaccatcttggtgctgcagggccggc

SEQ ID NO: 10190 - DNA, 100 bp, Homo sapiens
cactgaccctcctcggaggacctaacagtgtgaaagcagctgtagacaacaaggaagtgaatgaatgttgccgtgctccaattggcccataggccgaagt

SEQ ID NO: 10191 - DNA, 75 bp, Homo sapiens
gaaatcaacttttattttaagcttccacgtgtgagtgagaacatcacagtgaagctgtggtctaccaatctagac

SEQ ID NO: 10192 - DNA, 82 bp, Homo sapiens
agatccactccttcacagctataccaaacttaaaggatgctttcattggatttggaggaaatgtgatcaggcaacaagtcaa

SEQ ID NO: 10193 - DNA, 96 bp, Homo sapiens
ttcagttccaggaagatgcctttgggaagcatgtcaccaacccggccttcaccaaactccctttaatggaacccctggtagtcagctctctactcc

SEQ ID NO: 10194 - DNA, 100 bp, Homo sapiens
ctactgtcacctgtatggataccagcagccccggaccccccgattcaccaacgagccctaggaggaagttttattttgtcttcatcaggaagccaactaa

SEQ ID NO: 10195 - DNA, 74 bp, Homo sapiens
ttacgtggagatcaagcgcagcgatggtcgcaatggaagaagagatcgccgcgctggtcattgacaatggctcc

SEQ ID NO: 10196 - DNA, 83 bp, Homo sapiens
agacaccaagtgagaggccaaccagcttttcaggatgtccagcaaagaatcctgtgggaaaaaagagacatctcagaggaaag

SEQ ID NO: 10197 - DNA, 100 bp, Homo sapiens
gtgctgtggtgtctccttccgcagacgggctatgtgcacccagatgagttcttccagtcccctgaggtgatggcaggtgtccaaggcagctgcagatttg

SEQ ID NO: 10198 - DNA, 80 bp, Homo sapiens
cgaggaggagataacgcggccttgggctctgctcctgtccaaatatgacccccagaaggaggcagagctccgcacctgga

SEQ ID NO: 10199 - DNA, 100 bp, Homo sapiens
aaagaacatccacagaatagacctgaagacaaaaatccagaagtacaagcagtctggttcgagaacttgtcttggacaattgcaaatcaaatgatggaaa

SEQ ID NO: 10200 - DNA, 80 bp, Homo sapiens
caaggaataaacatgcaatgaacccaaaagggactgtggtctggagctcaatgatgaagatggccaccgctgttatccgc

SEQ ID NO: 10201 - DNA, 75 bp, Homo sapiens
agaaggtctggtacgacatgttccgaggtgacaccggaaactggtactcaagtgatgaggatgagggtggaagca

SEQ ID NO: 10202 - DNA, 116 bp, Homo sapiens
ctcagaggaggtgagggagcagaaacacaagaccttcgtggaaaaatacgagaaacagatcaagcactttggttacttttcacatagaaccatatagcaatcgagatgatcaaaac

SEQ ID NO: 10203 - DNA, 100 bp, Homo sapiens
gaaaagccataatcagcgcctggtggagcaggtgggatcccttcaagatgcgctagaagttttaacttctagtcatggcgaatgatcgcaggagagcaca

SEQ ID NO: 10204 - DNA, 132 bp, Homo sapiens
cggcgaagccacagaaaccgtccctgctacagagcaggagttgccgcagccccaggctgagacaggcattactgaaacttcagttcccatcatctcaacatctggaaatgcaggcatgacaggagtagtgag

SEQ ID NO: 10205 - DNA, 100 bp, Homo sapiens
ctttggggccgaacgtgaggctacgctgaccattgcccagtacaggtttgagcacaaaatgaacataattagggaaaataaggatctggcatgtttctac

SEQ ID NO: 10206 - DNA, 100 bp, Homo sapiens
aaaaacacaaatgaattctataagaccattccccggttttattatagggaagatgatccctatgatcttgaagatgtttctgcacagaaatgagggaaat

SEQ ID NO: 10207 - DNA, 101 bp, Homo sapiens
cttcaagtgctttctaactttgagaggaagaaattgaccacctggactatggaactcttttcttagtgacactaaagatcgaggccctccagtgcagtcac

SEQ ID NO: 10208 - DNA, 83 bp, Homo sapiens
gccgcgcagggagctctcgaggcaacgccggggcgcccgaggtctggaaggcgcagatgccgctcctacgaggactgctgtgg

SEQ ID NO: 10209 - DNA, 100 bp, Homo sapiens
actgtggacttttgagttaatgctgatattaggacctagcaccgtgccaggcccctagaagacccagtaaagatctgttgaataaactgtaagaatgaac

SEQ ID NO: 10210 - DNA, 82 bp, Homo sapiens
cggagcgcggagcccggctcccgcaccatggaggaggacgacagctacggaactgtggctgcaccatctgtcttcatcttcc

SEQ ID NO: 10211 - DNA, 82 bp, Homo sapiens
gctggacagccgggtcctgaacgctgtgaaatagctccacgcaggagatcggtgaggagctgatcaacggagtcatctactc

SEQ ID NO: 10212 - DNA, 74 bp, Homo sapiens
agatcagctgcagacaactgaggaatcctttgcaaagcaagcagatctgatatcattaggaaaagttgtgttgg

SEQ ID NO: 10213 - DNA, 75 bp, Homo sapiens
atgggctttcactagaccaaacacacatggtggagaggagtgtggccatctggggccgtgtggtatttgccactc

SEQ ID NO: 10214 - DNA, 100 bp, Homo sapiens
gcaagactttaaaggcaacattctacgagtttttgccagctcagacaccatcaaagagtccgttttacgtcctcatcgagacttcaggctccaacgcagg

SEQ ID NO: 10215 - DNA, 82 bp, Homo sapiens
gagatgcttaaaaatcaccagttactttaatgagagatgggtctcactctgtcacccagactggagtgcagtgagtggtgcg

SEQ ID NO: 10216 - DNA, 50 bp, Homo sapiens
tactgcattcctaccggtgtgacagggaaaaagacctcgatgaagttctg

SEQ ID NO: 10217 - DNA, 82 bp, Homo sapiens
ggaagaatgaatgcaagagaaagaggaagattgatgtatagatttttattgaacgaacaagcaataacaagcatttgaatac

SEQ ID NO: 10218 - DNA, 83 bp, Homo sapiens
ctctgggccaggacgccgaggaggttaccctgaagagacttacccaatttatgacctttcagactgtatcaagcgtaggcaag

SEQ ID NO: 10219 - DNA, 98 bp, Homo sapiens
ctgaaggaatgctggcagacaaaataggaatatttccaatttcatatgttgagctttttacctttggatggagagaagatattcgacccggtgagcca

SEQ ID NO: 10220 - DNA, 75 bp, Homo sapiens
tcggcatctagtctttccgcttcttgaatttctctctgtaaaggaggattgccaaggatccaagatttgaacgat

SEQ ID NO: 10221 - DNA, 100 bp, Homo sapiens
tgtaagaagcaacaacctctcctcttcgtctccgccatcagctcggcagtcgcgaagcagcaaccatgccctgggcgctgcctatggcacagccaagagc

SEQ ID NO: 10222 - DNA, 75 bp, Homo sapiens
ctcctcttcgtctccgccatcagctcggcagtcgcgaagcagcaaccatgcagaatggaagtgaggaaaggcaac

SEQ ID NO: 10223 - DNA, 74 bp, Homo sapiens
tgagtactgcaatgctcagaacactgctctgtgggaactgcatgctctgcggtggagagcatcccagtgtttgg

SEQ ID NO: 10224 - DNA, 112 bp, Homo sapiens
gttcggtccttccgaggaagctaaggccgcgttggggtgagaccctcacttcatccgacaatgcagatcttcgtgaagactctgactggtaagaccatcaccctcgaggttg

SEQ ID NO: 10225 - DNA, 75 bp, Homo sapiens
aaaagagccgagtggactaagattcaacaaactatttttgaatgaagatgacggagtttccctcttgttgcccag

SEQ ID NO: 10226 - DNA, 100 bp, Homo sapiens
ttcctcaagcccctgctaatgctcatctgaaggacttggatgaagaaatctttgatgatgatgacttttaccaccagactttggctgagcaaaacactaa

SEQ ID NO: 10227 - DNA, 76 bp, Homo sapiens
ccagtaatggcactttacactcggtctctgttctaggatgtcccgacccagtggtgcatgagatcgcctatcagta

SEQ ID NO: 10228 - DNA, 75 bp, Homo sapiens
gcccactccgcggcgttcggggaaatggctgcgagaccctagaggcctgcgatggcccactgcgtgaccttggtt

SEQ ID NO: 10229 - DNA, 74 bp, Homo sapiens
ctatgccctcaactacagcctccggcagcgcatggacatcctggatggcaattgaaggaacagactaaaaatcg

SEQ ID NO: 10230 - DNA, 100 bp, Homo sapiens
gataggactaaaagtgagaatggcctacagaatgaaagtttaagttccacacatcatacagaacaggccgcccgcctgaagaaactacaagagcaagaga

SEQ ID NO: 10231 - DNA, 75 bp, Homo sapiens
aagagatgagacaagaggaatggttacacagggaggtggggaagacagggctccagctaccacaggacgggctct

SEQ ID NO: 10232 - DNA, 100 bp, Homo sapiens
ttatagctcactgtagcctcgaaattctgggccgaaatgatccgcctgcctcagcctccaaagtagctgagactacagtttcgctcttgttgcccaggct

SEQ ID NO: 10233 - DNA, 100 bp, Homo sapiens
gccatgcaccatgcctatgtcgtcaccgagcgcatcgaggggattcagagttgtggaaagtaaaaatgtagccctaccaaaaggaactattgtactggct

SEQ ID NO: 10234 - DNA, 82 bp, Homo sapiens
ccaggcattcttcatgagcatagacagtctgtgtaagaagtactccagggaaacctcccagccacccgcgagtcggccttcg

SEQ ID NO: 10235 - DNA, 115 bp, Homo sapiens
agccagtggtcacagctggatgtttgcgacatcccagagagcttccagaatacagaagtttacggtgagttttatcccgtgccacctccctatagcgttgctacctctcttccta

SEQ ID NO: 10236 - DNA, 95 bp, Homo sapiens
cccgcagcaagccccagccaaaggtgtatggaagggactgtttgcccgtatcatcatgattggtaccctgactgcactacagtggtttatctatg

SEQ ID NO: 10237 - DNA, 75 bp, Homo sapiens
ttgtcatcatcagctccctgaacaggcctgagtctggatccactataagaacaagcacatcatgattgacttggg

SEQ ID NO: 10238 - DNA, 100 bp, Homo sapiens
tcgagggaaacccaccttgcgtacaagaggtgtaccagccccagcaataaccagattgtagctgtctgcagagaggcagctcttctggctctggaagaag

SEQ ID NO: 10239 - DNA, 50 bp, Homo sapiens
gcggagccctgggctggggcaggagccgagacagggcagggcattgttca

SEQ ID NO: 10240 - DNA, 95 bp, Homo sapiens
acaagcttcaccgaccctgggatcctgccccgggccactgtctgtgaagcagccgccctggagaaacagatcgggagaagtctgttggaacttgg

SEQ ID NO: 10241 - DNA, 83 bp, Homo sapiens
ggggattggagaattcaaggaaataagtttcacacctaagaaattgagaggctgactgagcgactagaagaaaaagagaggga

SEQ ID NO: 10242 - DNA, 151 bp, Homo sapiens
cgggaagatcgcttaccctccgggggtaaaagagatcaccgacaagatcaccacggacgagatgatcaaacgcctgaagcccgagtctgtggcttcgtccccacagttcagcgatcctcatctgtacgtgtggaacgccactggcaacaga

SEQ ID NO: 10243 - DNA, 97 bp, Homo sapiens
gcgcctggcctacagcgaggctggcgcagatcaggcctctataaccgccaggaatcacattcagctggtgaaactgcaggtggaagaggtgcaccag

SEQ ID NO: 10244 - DNA, 82 bp, Homo sapiens
cagttcatcacatcattcatgattttcagtcagataaaagccagtggcagacttgggacgaattggttgagcatctgcagtt

SEQ ID NO: 10245 - DNA, 90 bp, Homo sapiens
tgtgatggacttccagtgtgagcactggccagagtgaccaggctgaccagcaccagccctgatccagaacctcaaccagaaccctcggac

SEQ ID NO: 10246 - DNA, 90 bp, Homo sapiens
tccagaacatctgggagaatatttaatggaaaatcgcttggttaaaacctgacacttttaacagggtttttaatgaccacaacaagcaag

SEQ ID NO: 10247 - DNA, 100 bp, Homo sapiens
agcctatggaccttaatcgtgtcatcaaactcctcgaagagactgataaagatattcttggtgatcttggaagtgtccgtatcatggaatcaatctctat

SEQ ID NO: 10248 - DNA, 74 bp, Homo sapiens
cgcagcctcagcaccgcagagcggagagcggagcccggagcccgccgccccagctcaccatggatgatgatatc

SEQ ID NO: 10249 - DNA, 90 bp, Homo sapiens
gcttcctccacctgccgcggcgtctcgtggcccagctgcatctgctgcaggtattatagctgcaaatgtccttgtattctgtttatggag

SEQ ID NO: 10250 - DNA, 73 bp, Homo sapiens
tgtgattgagtttatattcaaccagctggaagtgaaggatgaagattctctttgcaataaactctgcactttt

SEQ ID NO: 10251 - DNA, 51 bp, Homo sapiens
ggggaatctgcccagccacctgaggacagtttggagtttgagaatcagaag

SEQ ID NO: 10252 - DNA, 97 bp, Homo sapiens
cactgtcatccacgtggttcaccctgacctgtttgaacagcatcacacacctacctttaaccacagtgcactgacaggcagaactcaccagtcacat

SEQ ID NO: 10253 - DNA, 83 bp, Homo sapiens
cgcgagcagtgggaggagcaatgagaggcaatcctccttatgccagcctggaccatcttggaggcagtgtaggatcatggaag

SEQ ID NO: 10254 - DNA, 90 bp, Homo sapiens
gatcctgatggacagccccgaagacgccgacctcttccactccgaggaaatcaaggttatcaatactctggctgaccatcatcatcgtgg

SEQ ID NO: 10255 - DNA, 100 bp, Homo sapiens
gaagaacttcggaggatggaagagctgcacaaccaagaggtgcaaaaacgaaagcaactggagctcaggaaggcgcaatggcgaggaagttatctgtaat

SEQ ID NO: 10256 - DNA, 99 bp, Homo sapiens
acctcactgcagaggtgctggagctggcagattgaaaaggctgtggtgtctcagcgcctgacagaatctccgtgtgctttggtggccagccagtacgga

SEQ ID NO: 10257 - DNA, 75 bp, Homo sapiens
gggttctggtgccgcgcagctttccccggttaatgatgaaatggcaggtaattcacacttttggacagagcgcac

SEQ ID NO: 10258 - DNA, 100 bp, Homo sapiens
tctgtgatggtcttacagatgcatttcacaactgtcatatgggtattacaggtgcccagtcccctggaaggcagtgaaggggacggagacactgactgag

SEQ ID NO: 10259 - DNA, 90 bp, Homo sapiens
ccgagagccgcgagcgcccggccgaacccgcgatggaataatgcccagcggcccgccaggtcccggtcaaaatgcagatcttcgtgaaaa

SEQ ID NO: 10260 - DNA, 99 bp, Homo sapiens
aaaaaaaaaagtctcaagtgcgcccgaggcgcagggggcagaaaacccgctatgaaatgtatgtcagcattctcaaggaaggaggcaaagagctactga

SEQ ID NO: 10261 - DNA, 75 bp, Homo sapiens
aaactggacaaatccttgtggagcaaatgggaaaagaaaagtacgaagatctgagctcttctgacgagtcctgcc

SEQ ID NO: 10262 - DNA, 100 bp, Homo sapiens
gcagaattaattacagggctcgtccaactggtccctcagtcacacatgccagagattgctcaggaagcaatggaggtggcagggcccagccccgaaccag

SEQ ID NO: 10263 - DNA, 90 bp, Homo sapiens
tggagagccccagacagtcgcttgaagagaggagtttgaaattcttgcttcaggccatatggagtggatattccttccagaaggaaatta

SEQ ID NO: 10264 - DNA, 101 bp, Homo sapiens
gtcgtaaaaacaggtcaagtggcatgaacaaccgggaggtgctggagcaggtggagcgaggctacaggatgccctgcccgcaggactgccccatctctctg

SEQ ID NO: 10265 - DNA, 82 bp, Homo sapiens
cgacaagccgctggcagccgcggatctcaccgccgctcagggctttagaagatgccttcttggctattgacgccaaattgac

SEQ ID NO: 10266 - DNA, 97 bp, Homo sapiens
gaggccgagccgggatctcaggtcctcgggggcggcggccacgccaaggacgggtgtcatggagaaactccagctgggcccagagattctgcagcgg

SEQ ID NO: 10267 - DNA, 98 bp, Homo sapiens
gggaatgctagctggatttattacaacattatcattggctaaaaagaaaagccctgaatggttcaataagaacacttcctcgtgggtactgtataaca

SEQ ID NO: 10268 - DNA, 110 bp, Homo sapiens
ggccgcaaggacgaggacgcctttctgggagaccccgacaccgaatgtccagaggaggtttatgaccctcgatctctatatgaaaggctacaggaacagaaggacaggaa

SEQ ID NO: 10269 - DNA, 90 bp, Homo sapiens
aaggctatatctgaagctcaagaatccgtaacaaaaacaactaactactctacagaccggccaggcctcatgaacgttccacgggtggag

SEQ ID NO: 10270 - DNA, 100 bp, Homo sapiens
ctaccatggctcagccgggaactctgaacctcaataacgagatctctggaaacatggctacagaacatgttaatggaaatggtactgaagagcccatgga

SEQ ID NO: 10271 - DNA, 75 bp, Homo sapiens
ggcagctccagcccggcccggcagcgacatggaaggacactcatgaggaccatgatacttccactgagaatacag

SEQ ID NO: 10272 - DNA, 98 bp, Homo sapiens
ccgatcctaccactttggcatcgtcggcctcaacatgaatggctactttcactggaatcccccaaagaaggtaaagggagcaagccttccccactgtc

SEQ ID NO: 10273 - DNA, 100 bp, Homo sapiens
gcgtctctctgctgcggcgcggggaccgctgtgctctcgactagacgcttgaagcaaagctgccatcccagaagacgacatgctctcagcaacccccctg

SEQ ID NO: 10274 - DNA, 100 bp, Homo sapiens
gatccacagcatccgggacctccagcgactcctggagatagactccgtaggtgctggagaatctggtaaaagcaccattgtgaagcagatgaggatcctg

SEQ ID NO: 10275 - DNA, 100 bp, Homo sapiens
gcggaacaggctaccaagtccgtgctgtttgtgtgtctggttgatgcggatgaaattaaaaggctaggaaagagatttaagaagcttgatttggacaatt

SEQ ID NO: 10276 - DNA, 99 bp, Homo sapiens
caacccatagtcaacgattacatgccaaaagaggcagaagcttttcttctgagtctttcagaagaaattcaaagaagactagaagccactggcatgaag

SEQ ID NO: 10277 - DNA, 74 bp, Homo sapiens
gagaagcctgaaaagtcgcagcgagctggagccgccggagggcaagaatatcacggcatgggcatgagtagctt

SEQ ID NO: 10278 - DNA, 98 bp, Homo sapiens
attgacctcatggcacctcagccaggggtgtagccaagtaggagtgtccatcaggacagcttcacctccttgaggattaaagcctaacagtactgagc

SEQ ID NO: 10279 - DNA, 96 bp, Homo sapiens
ggaaagtggagaatgaggacatgaataaagaccagatcttgctggaaaaagaagctgaggtgttccatgtacccctggaggagagaaaatacaagg

SEQ ID NO: 10280 - DNA, 75 bp, Homo sapiens
gcccgagaaattgaggccgttgtacaaccatccagcagttaagatccttctattctacgtaatattttatggctg

SEQ ID NO: 10281 - DNA, 50 bp, Homo sapiens
ccagttatgccaggcatgccacctgggttgaaagtaacggaagcctacag

SEQ ID NO: 10282 - DNA, 101 bp, Homo sapiens
tttgaagaacgggacacctttagagaagcttgatcttggaggcctcaccgtgagaccttacaaagccgggacccatggatgaaggaccagatcttgatcta

SEQ ID NO: 10283 - DNA, 100 bp, Homo sapiens
cagttttcaggataagaggaatctttatctaatcatggaatttctccctggaggtggccaagcacttcaaacctcatgggttctccagcgacaaggctaa

SEQ ID NO: 10284 - DNA, 75 bp, Homo sapiens
aaaagaaatagcaagaactgaggagcaccaggagacgcaactcatcggatgatgataattccgaagaaggcttcc

SEQ ID NO: 10285 - DNA, 90 bp, Homo sapiens
gtactctgccctggccacgccagagaatgggcagccagactgccttccgggtcactgccatggaggagccgcagtcagatcctagcgtcg

SEQ ID NO: 10286 - DNA, 75 bp, Homo sapiens
ccccggtgcgcagacagagctattccagcaccagcagagttggcaaacatgaattgactgggcataaagtagctg

SEQ ID NO: 10287 - DNA, 90 bp, Homo sapiens
gaagagtatttgaagtctgtgtcaaacatccatatcataagtggaattttggagatattcaaaggttttcgtggtgacatgggagatccg

SEQ ID NO: 10288 - DNA, 83 bp, Homo sapiens
gagcaccaggagacgcaactcatcggccatgccagtgacggtaacccgcaccaccatcacaaccaccacgacgtcatcttcgg

SEQ ID NO: 10289 - DNA, 100 bp, Homo sapiens
ccggcagtgaccgtgtgtcagaacaatcttgaatcatgaagctactaaccagagccggctctttctcggtaatctcagccaggaaaggagagtttgaaac

SEQ ID NO: 10290 - DNA, 100 bp, Homo sapiens
ctcgagttgtcctgactcctctgaaggtaaacggggcccacgtggaatctgcatcaggtggtggaggtggatacagcagtcggagaacatctggcagaga

SEQ ID NO: 10291 - DNA, 82 bp, Homo sapiens
aagagttggatactcagcgtcgctggcagccgctgtacttggagccttcacgtaaatgggtccagtcatgcctcccagtaag

SEQ ID NO: 10292 - DNA, 75 bp, Homo sapiens
tctcaacaccacagtcagctaagaatggagaatggtgtgttgggaaacgccttggaaggtgtgcatgtggaagag

SEQ ID NO: 10293 - DNA, 83 bp, Homo sapiens
tgggaaactggaatcctcaaaatgctgtggctcttcttccagagaatgacacaggtgaaaggactgagcagggggaggaacat

SEQ ID NO: 10294 - DNA, 80 bp, Homo sapiens
ggagtgcaccatccaggagaaggacgacctgaagaagtacggggctaccactgtggtgcgtgtgtgtgaagtgacctatg

SEQ ID NO: 10295 - DNA, 75 bp, Homo sapiens
gtacttctgggtaaactggagaagagcttcaactctgttcacctgcttgcagcctttccgctgtgcccattgcca

SEQ ID NO: 10296 - DNA, 97 bp, Homo sapiens
tcgggggcggcggccacgccaaggacgggttctcaggaatcagatagctcgcagtcggccaagaaggacatgctggctgccttgaagtccaggcagg

SEQ ID NO: 10297 - DNA, 75 bp, Homo sapiens
caaccaggcactactgaccaagatcttgtcaagctgtgtcagccggccaattcctgtccccccagcagcatggca

SEQ ID NO: 10298 - DNA, 100 bp, Homo sapiens
aactccagcgagatccgggccgtgaacgaaagcagtgacggaggagcttgtaccaccgatattgaagcacagattcgagaaattcaaggcaagaaggcag

SEQ ID NO: 10299 - DNA, 99 bp, Homo sapiens
ctatggtgctgagtttcctggtagagccggccgagctgaggcggtcgcggccatgaagattgactcttttcgccgacaccttgtatttcgtctggcaac

SEQ ID NO: 10300 - DNA, 75 bp, Homo sapiens
ctgaacatgcacccccagcagccaccagcaggttttaaaatcaaagatgggaaaatcggagaaaattgcccttcc

SEQ ID NO: 10301 - DNA, 83 bp, Homo sapiens
ccgctgaatgggctgaaggaggaggacaaagagcccctcatcgagctcttcgtcaagacaaatttacatgtattggagaccag

SEQ ID NO: 10302 - DNA, 100 bp, Homo sapiens
ggtgaagttccatgcccatccagagaggagaatacttatctctggcgcacatcactatatttggctgcctctgccagtgctgaattctttgctgacattg

SEQ ID NO: 10303 - DNA, 75 bp, Homo sapiens
cttccccatctgtaacgaggtgttgagacgagaatcagcatgattcttcagaggctcttcaggttctcctctgtc

SEQ ID NO: 10304 - DNA, 90 bp, Homo sapiens
gccttggaccccgcggcgcccctcggcctcggagcaacgagcgcagcgccgcctacaacacagcagtcccctcaggatgagcaggaaaag

SEQ ID NO: 10305 - DNA, 75 bp, Homo sapiens
atacttccaacaatatttacgaggcagtcaacagatataatttctacagtagaatttaatcattctggagaatta

SEQ ID NO: 10306 - DNA, 74 bp, Homo sapiens
agaggatcgcccaatccacatgcttttccagttgactggattgttgctgacatcttggccatcaggcagaatgc

SEQ ID NO: 10307 - DNA, 98 bp, Homo sapiens
cagttcctccccgggcccctgagccatgcccatcgcagccgccccgaaggagccagacaagttggatggcttgaggactggtactaaaaggaaacgtg

SEQ ID NO: 10308 - DNA, 82 bp, Homo sapiens
gagactttgtcagctcccgcacagtaactttttcagaagaagtgaagtcaagatgaagaaccatttgcttttctggggagtc

SEQ ID NO: 10309 - DNA, 100 bp, Homo sapiens
ccgggcggcgcgaagcgctggtggcgggcccgggctgcggcgtgtgcgcgcccgccagctgctccggagatacgggtcatctagtagcaggcacccaaat

SEQ ID NO: 10310 - DNA, 83 bp, Homo sapiens
cggagaggaagaattctttgatgccgtcacagggtctccctcttttgtccaaggctggagtgtggtagtgctatcacagctga

SEQ ID NO: 10311 - DNA, 99 bp, Homo sapiens
gtggaaagcagtttttaagagagcgtcagttgcgactgcacaatgatatgcacaaaggcatggccagcagttgggattacgattagggatgtggtactg

SEQ ID NO: 10312 - DNA, 75 bp, Homo sapiens
tggtagagtgcagcctggagcggcagctcagcttggagcaggaggtccaggtttctgacgtagaagagcttaccc

SEQ ID NO: 10313 - DNA, 75 bp, Homo sapiens
ttgcaaccattggtctgcaggacatcactttagatgatgttattcattttggacctggagaaagttcttcagaag

SEQ ID NO: 10314 - DNA, 76 bp, Homo sapiens
ccggcgccgccgcgtcttcccggtctcctttcccggccgcacaggcctgccacagtgactcaggtcactcaaggaa

SEQ ID NO: 10315 - DNA, 83 bp, Homo sapiens
aacaggcctgcgtggaaattgaatgagattctgtttgatgaagacaatccagtacacaagtctggaaccagatacatgttcac

SEQ ID NO: 10316 - DNA, 75 bp, Homo sapiens
ctagtgtgataaaaagagctgggatgcctaagccagcctctgggtgacatccatgagacaccctctgccacccac

SEQ ID NO: 10317 - DNA, 75 bp, Homo sapiens
tcttgatgagtctgctccctctggctcgattcttggtgccaccattgagaactccaggattgtcctgcagatcga

SEQ ID NO: 10318 - DNA, 74 bp, Homo sapiens
tcagttggaagcagccgatccagcctgcggagcctgtggggcaggccaagatgctgaattatcagggacacttt

SEQ ID NO: 10319 - DNA, 97 bp, Homo sapiens
ccatcttcttcaattaatgcaacctaagactgcaataagctcttttacaggcacaacagttggcccaggaattggcttggtgtgtggagcaactgga

SEQ ID NO: 10320 - DNA, 89 bp, Homo sapiens
aagttcattggatcaaacatgtcacaagagtcggacaaggcggtggccagtttgaatactcccttcataccagcaaatcccaacatgtc

SEQ ID NO: 10321 - DNA, 121 bp, Homo sapiens
cgcccgcttcctcctgcttcccatcgaagctctagaaatgaatgtttccatctcttcagagatgaaccagagcaaacgaggcccctgagagctccacctagttcacaggataaaatcccac

SEQ ID NO: 10322 - DNA, 100 bp, Homo sapiens
gtggagcgtgtgtggtgtgtggctgcggcctgggcaagagccgccgcggaccatgagtcctggttcctctgataagatcgacaaaagaaacaacaaaatg

SEQ ID NO: 10323 - DNA, 98 bp, Homo sapiens
gcacttgtggaatgagagaaccgaggaacgaagaaacagacattcaacatgattgcatttgaaatgaagattatggaagagattcgggccctcccact

SEQ ID NO: 10324 - DNA, 90 bp, Homo sapiens
gaatacagacagttcctgctctaagaggccatctgtgaggctcagtctcccaacacctctggtaagtaaggaggtctctgtaccatggct

SEQ ID NO: 10325 - DNA, 98 bp, Homo sapiens
cgtctacattcacaggcctagcagcagttggtggcaatgccttcgggggacttggaaatccttccgttagtaactcacgtagtgctccacctacacga

SEQ ID NO: 10326 - DNA, 100 bp, Homo sapiens
cccatcattgatgtggtgcgatcggaggataagatcaatgccctcattaaagcagccggtgtaaatgttgagcctttttggcctggcttgtttgcaaagg

SEQ ID NO: 10327 - DNA, 100 bp, Homo sapiens
caagaccaacaaattcatcaaggagctcatcaaggacgggaagtcactcataagcgcgctcaagagtagtaaacctattgatggcaattttgctgactgt

SEQ ID NO: 10328 - DNA, 90 bp, Homo sapiens
tttgagacctgaggttgaaaactatcttaaggaaggctttatgaataaggagttaccttatcccatatcacacaactggtcctcagccat

SEQ ID NO: 10329 - DNA, 85 bp, Homo sapiens
tcaatcattttcaaaaagattccatttatagacacccttcattgcaagttcttatttgtaagatcagtgtgcgtgtgaccaccat

SEQ ID NO: 10330 - DNA, 76 bp, Homo sapiens
caaaaatattgtcaaattatttgctattgaagaggaggaaccactcgttttgactattattttatcactctttgtg

SEQ ID NO: 10331 - DNA, 100 bp, Homo sapiens
gggatgttggcagccacttcaaaatcagacctctgtggcagcattttttccagaacacaaaaggttatgaagacagtatggagtttccagaccatagtag

SEQ ID NO: 10332 - DNA, 83 bp, Homo sapiens
ccgccttctctgtcagctctttccccgtcagcatcccagccgtgctcacgagactggctccagctttccttgaaatcctgcag

SEQ ID NO: 10333 - DNA, 75 bp, Homo sapiens
ggcgcgggcggcggcgccggcaggaaggtgcagctgaacctggtgttttagaggataccttggtcccagagtcat

SEQ ID NO: 10334 - DNA, 96 bp, Homo sapiens
ggcggcgctgccgcctgaagtgcgggcgcagctggcggagctggagctggagctctcggaggccaaacatcatgtcaatggcaacagaacagtcga

SEQ ID NO: 10335 - DNA, 75 bp, Homo sapiens
ctggcccagtgagagccttggatgtgaacattttccaggcataaacttggaggaggcagtggagagagcatcctg

SEQ ID NO: 10336 - DNA, 82 bp, Homo sapiens
tctgagggcctgcaaacaactcgagctggagcctcggccaggaccggcgcgagaggcggtttacccaaggtccagcctagcc

SEQ ID NO: 10337 - DNA, 96 bp, Homo sapiens
ttacaactttcggggcatgtacaatcagagatatgattctataacagactcttccagaaatgatatgaagaggaaatttgccctgacaatggaatt

SEQ ID NO: 10338 - DNA, 100 bp, Homo sapiens
gctcgatccagcaccatggggaagcgggacaatcgggtggttggtgttcgaggaagagacattgttgttcttggtgtggagaagaagtcagtggccaaac

SEQ ID NO: 10339 - DNA, 108 bp, Homo sapiens
gatcatggctcaccgcagtctcgactttcctgggctcagggcttcacttacgttctgcatgaaggcgagtgctgtggaaggtgcctgccatctgcctgtgaggtggtg

SEQ ID NO: 10340 - DNA, 83 bp, Homo sapiens
gcgtggaggagctgtgcagccgcgaggaggcgcgggaggtgttcgagaacgaccccgagacgaagaagaaaggagggcgcggg

SEQ ID NO: 10341 - DNA, 75 bp, Homo sapiens
tgtaccctggaagagggatactggacctgtgatagaccaatgatgcgagctcagagtcaatagcatccttctcta

SEQ ID NO: 10342 - DNA, 100 bp, Homo sapiens
cccaaggggattgcctggcaggacgtgaaggggaagaggcccaccctggagtaaccctcactggagaatccagagatatctcttccaaatgcatgatgaa

SEQ ID NO: 10343 - DNA, 100 bp, Homo sapiens
gtttgttttacgtctaaattcgcgtcggttcttatttctctccctggcaaggtctgaagacgggtaggagaataacgaactatcgtgagcataggtgacc

SEQ ID NO: 10344 - DNA, 75 bp, Homo sapiens
aatatatctactcccagaggaattccagacgttgcccccaagtttcctggcagtgtgtgatactgaggaggtgag

SEQ ID NO: 10345 - DNA, 74 bp, Homo sapiens
aaatggtgtaaaagttcctggtgaatatcgaagaaaggagaacggtgaggaccccgttctggagcgttatttca

SEQ ID NO: 10346 - DNA, 80 bp, Homo sapiens
aggctttacttttgtggtagaccgtctaagagaaggttatgaagacagtatggagtttccagaccatagtagacatttgc

SEQ ID NO: 10347 - DNA, 88 bp, Homo sapiens
gccagaaggacctggatgcagtgtccagtcaacctgcaaccaaaacgagactttttagcacgcttgatcctgagctcatgttaaaccc

SEQ ID NO: 10348 - DNA, 80 bp, Homo sapiens
cttcagctgctcggacagatgaagctccccaaggagctgcagcttggattccttagcaccaccacagctcagccagaaca

SEQ ID NO: 10349 - DNA, 50 bp, Homo sapiens
ctgaccgagagagctcactcagccagggcctattccctggtggattccag

SEQ ID NO: 10350 - DNA, 98 bp, Homo sapiens
ccctgcagtacttgaagatttgcataaagccaacattcgcaccgtcatggtcacaggcaactccccatcagatgagtctgaggagcgggaaagagacc

SEQ ID NO: 10351 - DNA, 75 bp, Homo sapiens
cttggatatgtggaagaaacatcagaatttgaagcccggggcattttgtcagtgatgctgatctttgccttcttc

SEQ ID NO: 10352 - DNA, 88 bp, Homo sapiens
gggcctagctgcagccggagcctgggagacggtgctccatacttgcttgcagtgcctacgtggctctggctttgggtgataacctcat

SEQ ID NO: 10353 - DNA, 75 bp, Homo sapiens
ttcaccaatgccgtccagctgctgctgacgctgaagaccatcaagtgcctgctgatccaccctaaccccgagtct

SEQ ID NO: 10354 - DNA, 78 bp, Homo sapiens
tcaacttcaatttttctgcagtggctctgggtccagccccttacttaaaggccatcgaagacggcaatttggaggaaa

SEQ ID NO: 10355 - DNA, 75 bp, Homo sapiens
cacgcggcggcgccgcctgtttacgactgattcttgctattccaaatcctcttccacgttgacagcccttcagat

SEQ ID NO: 10356 - DNA, 83 bp, Homo sapiens
gacgaggagcgcgtcgtgcgcctgggggtgcgcgcctgcgacctgcccgcctggatgaaggatttgggggcagagcacttggc

SEQ ID NO: 10357 - DNA, 100 bp, Homo sapiens
caggaggaagagagagagaggggtgtgggccgaagatatgctcatgtggtgttgaggaaagcagacattgacctcaccaagagggcgggagaactcactg

SEQ ID NO: 10358 - DNA, 76 bp, Homo sapiens
cagaaagtgcgtcaccgcatgaacgatgactgggcttacgggaatggtgctggagaatctggtaaaagcaccattg

SEQ ID NO: 10359 - DNA, 83 bp, Homo sapiens
tgctattagatgggcttgctgctcccgcccatctaattggctttggtctaggtatgatgccgggcgggacggcttcatcgacc

SEQ ID NO: 10360 - DNA, 100 bp, Homo sapiens
atttacagaaacaaactacatctcagggtctcataacaacaaactgcagtctacagcttcttaaagttcagcgtgttaacctaacataaaacacagcaag

SEQ ID NO: 10361 - DNA, 75 bp, Homo sapiens
gttcttcttcgagtatttgtagaaggctcgagcccagaaaactatcctctaagaccagacgtgacaaggagaagc

SEQ ID NO: 10362 - DNA, 88 bp, Homo sapiens
ggccgcccccacagcaccccgggctggcgtgaggtcatcatcagatttgaaatatttaaagtggatacaaaactatttcagcaatgca

SEQ ID NO: 10363 - DNA, 100 bp, Homo sapiens
cgccgagggcccggaccccgaatatgacgtggtatgtgtgcaacagagagaaattatgcgaatcactccaggctgtctttgttcagagttaccttgatca

SEQ ID NO: 10364 - DNA, 90 bp, Homo sapiens
gaaaaggacatcaatacttcggaattgagtctaacaaagtgccagtggtgcagcaccctcaccatgtccaccccctcacgcctcttatca

SEQ ID NO: 10365 - DNA, 76 bp, Homo sapiens
tcctgtcaatatattcttgggttgcctgacctggtaccccagctggggacactctaccagttaatggaaagcagag

SEQ ID NO: 10366 - DNA, 100 bp, Homo sapiens
tgtatcttcttggggtctccaccgcaggagtatccgattttaatcttcgtgttgcattgcaaacacttctgaaagagtactgtgaagtatgcaaatctcc

SEQ ID NO: 10367 - DNA, 100 bp, Homo sapiens
cgaaaggcatctgtcccaagcaggagaacattgcaggaatactcccccagttgcaagaggcgcaggaccgtggaagacttcaacaaattctgcacctttg

SEQ ID NO: 10368 - DNA, 83 bp, Homo sapiens
cgggaagcggcggcggcggctccagcgtcctaagagccttatgccagcctggaccatcttggaggcagtgtaggatcatggaa

SEQ ID NO: 10369 - DNA, 82 bp, Homo sapiens
gcgcccacagcagcaaccttggagcaggcaggaaggatgcctgtggccctcggagagcacagtgtcaggcaacggaatccca

SEQ ID NO: 10370 - DNA, 98 bp, Homo sapiens
tgcaagatatctttggaaaagaataccacctgctataaaatctcctcccaaagtgaaatgcctgaccaagatctggcaccccaacatcacagagacag

SEQ ID NO: 10371 - DNA, 98 bp, Homo sapiens
agaccataacccccgacagcgccatggcccagattctgccaattcgttttcaggagcatctccaggaatacaggagtttccagaaaatataaaaaatt

SEQ ID NO: 10372 - DNA, 97 bp, Homo sapiens
aatagtagctggccatcacaactggattgtagctgcatatgcccattttgctgtgtgttacagttccaagatgagatgggattctccaacatggaag

SEQ ID NO: 10373 - DNA, 75 bp, Homo sapiens
gcgaaccaacggttagcggtggcaggggctgactgagagcgtctgcttgttataaaccggtggaccataagctta

SEQ ID NO: 10374 - DNA, 100 bp, Homo sapiens
cggaaggtacactataggctcggggagtggacatttgggagcaataaaaataagaagaaaggaaaagccagaaaaatagagaagaaaggaaccatgaaga

SEQ ID NO: 10375 - DNA, 83 bp, Homo sapiens
ccagcacagaagtggaattgaatctgctctaaaggagaccaagggtgaagactgtctccttctgttgaagtctttgcctcctg

SEQ ID NO: 10376 - DNA, 100 bp, Homo sapiens
gcagcggcggcacctgccggccgagatgagagtccggagtgttgtcatgtgaagcctgccatccaggaacctccaatagttattagtgatgatgacaatg

SEQ ID NO: 10377 - DNA, 76 bp, Homo sapiens
agtggagcaagctgcagccaacggaaaagcagcctagagtcctggggagcttctgtccacctgtcctgcagaggag

SEQ ID NO: 10378 - DNA, 96 bp, Homo sapiens
gaaaataaaggagctgctgtctggaattggcaacatctctgagagtgacttttttgaacgaaccattctgtgcaacagccttgtgtggagttgtgc

SEQ ID NO: 10379 - DNA, 75 bp, Homo sapiens
attcgtaatgcgactcaaagctgcacggcagtctgtttatgagggtgttaatctttatgtgaaaaatcttgatga

SEQ ID NO: 10380 - DNA, 80 bp, Homo sapiens
ctcgcctgcgccccgcacccctccgagcagcccggggatccagcacgcagaagcctaaagaaactgttccaactcttgct

SEQ ID NO: 10381 - DNA, 51 bp, Homo sapiens
agccggagaagcgagtttcagctggtattgttgcagcatctggcagtgaga

SEQ ID NO: 10382 - DNA, 75 bp, Homo sapiens
tgaggcctccccagccatgcagaactgtccaagcagctcagtctgaggctaaggttgtatctcagtatcatgagc

SEQ ID NO: 10383 - DNA, 99 bp, Homo sapiens
ttcagtgatagtggctggaactggaaacaatatcgccaagaggacagcatctgggtcactcagctctatgtgccagcatccagacatgtgtggaggttc

SEQ ID NO: 10384 - DNA, 75 bp, Homo sapiens
ccaggaggaggttttcaggaccaaaattgtggaaaagtcactctggactggaatgtcacgtggaataccagcaac

SEQ ID NO: 10385 - DNA, 90 bp, Homo sapiens
tggagagcttcatcaaaaatagtgatagctttgataaggaaatcctcattgacgattcaatttgttgaaggccaatttgtggactcctac

SEQ ID NO: 10386 - DNA, 100 bp, Homo sapiens
gtttagagagtgcttccccttgccgagcactgggttctacacatgttttaacacccaaaaagctgttggatgatataaagatgctgaataaacccaagga

SEQ ID NO: 10387 - DNA, 83 bp, Homo sapiens
ggagagtccgacgagcgctgcactaacgcaggatccggctgccgaaggtcctcgccaggctttcagtccagtgtaaagctgtt

SEQ ID NO: 10388 - DNA, 74 bp, Homo sapiens
cctcgtttacctcagagaagtaaatttatgcagcaaatattttggtgatgggtgtggaaaattctgcaaaagaa

SEQ ID NO: 10389 - DNA, 75 bp, Homo sapiens
gtggttccaatgagacagggcacaccaaactccatctgactgcctcttcaaggtgtgccccatgaaccgctactc

SEQ ID NO: 10390 - DNA, 151 bp, Homo sapiens
gaaggtgactctctggatggaccagaatacgaggaggaagaggtggccataccgttgaccgctcctccaactaaccagattgtgcagactggtgcttaaaatggaagtcgatattaatggagagtctagaagtaccctgaccaccttgccc

SEQ ID NO: 10391 - DNA, 90 bp, Homo sapiens
gggatcgacgcggacagcgggctggagcctgacgagctggcgggaaacaatgtgatgagaaccattcatggggtgggagagatgatgacc

SEQ ID NO: 10392 - DNA, 90 bp, Homo sapiens
gcccggagcaagcggagctcccccaagagccggaaaggaaatccaaatctcctcccaaagtgcccattgtgattcaggacgatagccttc

SEQ ID NO: 10393 - DNA, 100 bp, Homo sapiens
agatcacacgcccactaaagcccagaagaatgtggctaccagcgaagctttagatccagctaaggatccatgcttaaagatgaaatgtagtcgccataaa

SEQ ID NO: 10394 - DNA, 118 bp, Homo sapiens
atgcccacagcctggtacggcaaactgaggagtgtgctgaaggcttccgccaaggtcagaatggcggcagtggagcatcgtcattcttcaggattgccctactggccctacctcacag

SEQ ID NO: 10395 - DNA, 50 bp, Homo sapiens
tggacgtcagagaatgtgaaccgggagaggacctgctggccccaccgcac

SEQ ID NO: 10396 - DNA, 100 bp, Homo sapiens
cagcaagcagctctaccgccgcctcaactgccgcctcgcctactcactctggagcccccgttttacggagaagacttttactgtgaaattcctcggagct

SEQ ID NO: 10397 - DNA, 90 bp, Homo sapiens
cggaactgcggagttgctgggtccaccgacccttaccctcagcgagagaagtaaccaccctacagcttggggcctgggctcctctgacca

SEQ ID NO: 10398 - DNA, 100 bp, Homo sapiens
ggcgccggcgccgccgcccccgggctcgcggcctgcaggtggaagtttagctgatgctataagtgaaaactacagaatcatgagttactttaaagaagca

SEQ ID NO: 10399 - DNA, 90 bp, Homo sapiens
tccagaagatgattgacgtggcggagccaggccagcggaagatcgtcatgcataagggtcttgatgaagaacagagtgtgcagttactcc

SEQ ID NO: 10400 - DNA, 50 bp, Homo sapiens
tatgatcatgcgcaccttggccatgcttgaaacagcttcatgagtttgcc

SEQ ID NO: 10401 - DNA, 50 bp, Homo sapiens
ctctcccaagctgagagcagccacacagctatcatggtgaacttacttca

SEQ ID NO: 10402 - DNA, 50 bp, Homo sapiens
gtgtccagattgtcatcgagatgcaggagtgaagtgcaaccagtggtctg

SEQ ID NO: 10403 - DNA, 83 bp, Homo sapiens
gccactgctggctgcttccagtgttcgccgagagggtttgccttcccggattgggcctacaagccagagtcgtcccctggctc

SEQ ID NO: 10404 - DNA, 100 bp, Homo sapiens
ggctcggaagcacgttcagtctggatacctccatggtggagcccccagaaccatgtgccgagcccgctgcttttggagacacgcttcacatacactacac

SEQ ID NO: 10405 - DNA, 98 bp, Homo sapiens
catcagtatgcagtggtttagagaatgggaaagttttgtgaagggtaaagatggaggttctgtcatatgttgaagaatccatacaccattaagaaaca

SEQ ID NO: 10406 - DNA, 101 bp, Homo sapiens
ggaattttccattggtggcattcttcaccaacagccagatgacgtgtactactgtggaataaagtacatcaaagatgatgtcatcttaaatgagccctctg

SEQ ID NO: 10407 - DNA, 100 bp, Homo sapiens
ccagacggctcacctgtgcgggatggaacaaaagacaggggcaagtgtccgagtggtgaatcagctacttacagagatggatggtctggaagcacgccag

SEQ ID NO: 10408 - DNA, 100 bp, Homo sapiens
cttcgtgtgcgcttgggcgaggccgggcggcgcttctgtcctcctactcggacccgcaggttccatcctggttctcagtccacatggaagaatatccatg

SEQ ID NO: 10409 - DNA, 75 bp, Homo sapiens
tgggcctcccggtccgcaagcagtgcctggagaagttccctgtgatccagcacttcaagttcgggagcctgctgc

SEQ ID NO: 10410 - DNA, 100 bp, Homo sapiens
tttggtccctcggggcgtctgggcagcctacgctttccggtctatagtaaagagatgtggcatctgatgaaaaggaagacaagaagatgcggcagcccta

SEQ ID NO: 10411 - DNA, 93 bp, Homo sapiens
gacgggatattctcttctgtgctgtcaagggtgctggagaatctggtaaaagcaccattgtgaagcagatgaggatcctgcatgttaatgggt

SEQ ID NO: 10412 - DNA, 95 bp, Homo sapiens
acctctgaacttcagaataaacagtagaaacttgagtgacagagctgctgcctcggtgtggggaagtagagtctgtgggaaaggtggtacaggaa

SEQ ID NO: 10413 - DNA, 90 bp, Homo sapiens
gaggaaaacgagggcgtgtataatggaagctggggaggccggggagagaggaattaaggaatttgcaagagcaaatgaaggccttacaag

SEQ ID NO: 10414 - DNA, 51 bp, Homo sapiens
ccctcgtattctcctgcccttccccaggtacaggtttgcagattccgccag

SEQ ID NO: 10415 - DNA, 100 bp, Homo sapiens
agaaaacaagaccggttcctttctaatcagagaaagtgaaagccaaaaaggagaattctctctttcagccaacaaatggaattttcttgagcatgtttct

SEQ ID NO: 10416 - DNA, 51 bp, Homo sapiens
tgtcacaggttctgtgaaaagtgaaagggccaccccagcagacatgtttgc

SEQ ID NO: 10417 - DNA, 115 bp, Homo sapiens
aacaatttcacctttgaattcagccagtggtcacagctggatgtttgcgacatcccagagagcttccagaatctggataatgtagagggcattgctgtggactggattggaaata

SEQ ID NO: 10418 - DNA, 88 bp, Homo sapiens
acttgtaagtgaaaaaggggaagaaagagaatattgttcagttgattatgccagccagatgcagtactcccctgccctcaacaagatg

SEQ ID NO: 10419 - DNA, 95 bp, Homo sapiens
cccatccctgcagcatgaacaagcggacaaggcaaaatctcagcaagttcggacctctagtacaataaggcgaacctcctctttggatacaataa

SEQ ID NO: 10420 - DNA, 96 bp, Homo sapiens
ccgctacgagctggctttaatcctgaaagccatgcagcgggacatttgtgaagatatttctgatcatgttgagcaaatccatgccctccttgaaac

SEQ ID NO: 10421 - DNA, 75 bp, Homo sapiens
gttcaagatggcggagctcgaccagttgcctgacgagagcaaaggccaggatggaattggtagcaaggcagagaa

SEQ ID NO: 10422 - DNA, 109 bp, Homo sapiens
gcccgcaagagcgagccgcctgccccggtgcgcagacagagctattccagcaccagcagaggctgaccggttccctgatgtgttacctgcttctgctactgatccaaac

SEQ ID NO: 10423 - DNA, 50 bp, Homo sapiens
ttgccttattggaaaaacatttcttacgaatactcccccagttgcaagag

SEQ ID NO: 10424 - DNA, 76 bp, Homo sapiens
gtgaaggtgatgaggttgaagatctctatgagcttttgaaacttgttaagttctgtgcacccttacgaagtggccg

SEQ ID NO: 10425 - DNA, 50 bp, Homo sapiens
gagtgactgcgtcaggcatctcaatcatgctccagggcccacaacggcag

SEQ ID NO: 10426 - DNA, 75 bp, Homo sapiens
gaatatttcaagacaccgaaaggaagagagaagggcacagttacctaagtatcaacgtaatcttcctcggccagg

SEQ ID NO: 10427 - DNA, 83 bp, Homo sapiens
ggaattctcggctggagagcagaagaccgaaaggttacccatgcagttgttactgtaccagcctattttaatgatgcccaacg

SEQ ID NO: 10428 - DNA, 83 bp, Homo sapiens
ctgggtttcccgggagatcccaggcggtgacagagtggagccatggctagagggtttccaggcctgaggtgcccgccctggcc

SEQ ID NO: 10429 - DNA, 82 bp, Homo sapiens
gccagcaggccagccggcctctcgcccacactgaccccgggggagcggcagcaggtgcgtgggactcatgaactcaccaatc

SEQ ID NO: 10430 - DNA, 100 bp, Homo sapiens
tttactcagctgagtgtgccacacaggtagccctggacggcattcagtgttttggtcacagagatgcggcggaccctgacgcctgccagctccccagtgt

SEQ ID NO: 10431 - DNA, 83 bp, Homo sapiens
ccaatttgtccgtaaccttgtggagaagaccccggcgctggtgaacggactgatcctttgaaatactccagccatgactaaaa

SEQ ID NO: 10432 - DNA, 98 bp, Homo sapiens
ggaaggcagtctttgctacgtacagcaaaaggtttcatcttcaaaaccagaagaaaataaaattcgtcaggaagatttaacaaaaattataagtagtg

SEQ ID NO: 10433 - DNA, 75 bp, Homo sapiens
cagaatcttgaatcagaaattgagaagctgtttcctccagcttatggaggcatatctgaggtgaatcaacctgcc

SEQ ID NO: 10434 - DNA, 105 bp, Homo sapiens
ccacctctgtattcagcatagctattcctgttgatggtgatgaagacagttcctggccattttctatccaagatgtggtacaacctcttaccctgcaagttcaga

SEQ ID NO: 10435 - DNA, 83 bp, Homo sapiens
tgaagtgcttgatatcacagaggaaactctgcattctcgcttcctggaggtggtgatctttgtgaagtctgtgcagcggtgca

SEQ ID NO: 10436 - DNA, 82 bp, Homo sapiens
aggtccgacccgcgaacccctctgggatccccgccgctctgtctacaacccgaggtgaaaggtgtagcagtcactcggccta

SEQ ID NO: 10437 - DNA, 75 bp, Homo sapiens
aaagtgcccggacccaaaacaggaagctttgatgaactaggtggacttctcaaaccaacagtggcctctcagaac

SEQ ID NO: 10438 - DNA, 100 bp, Homo sapiens
gggaaaggctcggctcatgttctgggacttaggagggcaggaagagctgcagtctttgtgggacaagatgaagatctccttcaacgacaaaagcctgcag

SEQ ID NO: 10439 - DNA, 90 bp, Homo sapiens
cgcaggaccgtggagaaggaggagaggcatggcggccttgaccagccagtgaccagagtgaactccgagcaggaacacttcctcattgtc

SEQ ID NO: 10440 - DNA, 127 bp, Homo sapiens
ccagtcccaagtcgtccccctctccgccccccaggaggggcgagagggagccgcagctgatgtcagcggacaaggcaaaatctcagcaagttcggacctctagtacaataaggcgaacctcctcttt

SEQ ID NO: 10441 - DNA, 100 bp, Homo sapiens
acacgggcgagaagccctacgagtgcaacatctgcaaggtccgcttcaccagggttgccattaggggactcctgaggtcctatctccaggctgcggtgac

SEQ ID NO: 10442 - DNA, 82 bp, Homo sapiens
ttcgctattctctgctgcagtcagatatgatgcagagcttaaagcttttcaagccaggccaagaagctgtgaagtaccaggg

SEQ ID NO: 10443 - DNA, 74 bp, Homo sapiens
ggattttttaccattgtttcatcaacgtctaagaaacttggagaactccagctctttcgacgtgtagcagcagc

SEQ ID NO: 10444 - DNA, 100 bp, Homo sapiens
gagcaacatctttcctcaccccaagtgcctgtatggagtggaatgaatgttgctggtgtctctctgaagactctgcacccagatttagggactgataaag

SEQ ID NO: 10445 - DNA, 75 bp, Homo sapiens
cggcgcggcgagagagcggctgacagaggggatgcgaggctgttcgctgctatgaatctctaatcttaaaagctg

SEQ ID NO: 10446 - DNA, 73 bp, Homo sapiens
ggaggcgttcagctgcttcaagatgaaggtcgcagaacttgaaaagcgcctgacagagctggagacagctgta

SEQ ID NO: 10447 - DNA, 118 bp, Homo sapiens
gaagatggcagctgctgaggaggagccgaagcccaaaaagctgaaggtggaggcgccgcaagcgctgagatttacatgagcccagaggtcatcctgtgcaggggccattcaaccaaag

SEQ ID NO: 10448 - DNA, 100 bp, Homo sapiens
tcatggccaccgtcaccaaggcgcccaagaaggtgtacgccccaagttgggacgccggcatagtatggaaaatatggaacttatgaagttaacaccagaa

SEQ ID NO: 10449 - DNA, 98 bp, Homo sapiens
cctgaccactatcatcaccatggaaaaagtgacttgagcaggatttccagactgtattaccatcatttgagctcttctcaaagtatggaaaattatat

SEQ ID NO: 10450 - DNA, 90 bp, Homo sapiens
ttgaagatgagaactcaagtgatgtagaggctttgattctgataactcttctggggaattttcagaggcaaatcagaaagtcacgggaat

SEQ ID NO: 10451 - DNA, 100 bp, Homo sapiens
cgagaggatctggtgtaccaggcgaagctggccgagcaggctgagcgatacgacgtcaccttcaggccattcagaggaggaaagagaggggaatatgaag

SEQ ID NO: 10452 - DNA, 74 bp, Homo sapiens
accatgaagacttgaacttaatacagcaagaaagaccatcaagtttaccaattcctgcaagctggacaaatccc

SEQ ID NO: 10453 - DNA, 90 bp, Homo sapiens
tcggccgatgaagtgcagaggtttttttctggacaacaacaggctggagttgttgcccatcctcctgcagtgcctccaagaccacagccc

SEQ ID NO: 10454 - DNA, 82 bp, Homo sapiens
cagcggcttcctcggcctcccggcgcccttcagcgaggaagagccttcacgaagtcagtaaaagtgatctcggccggaaaat

SEQ ID NO: 10455 - DNA, 98 bp, Homo sapiens
gtgcagctcctgaaaggagagacacttgtgaacattcaagtgaagcaaaagcctttcatgattatgggcataaggaaatggtggcaggcacttcctcc

SEQ ID NO: 10456 - DNA, 100 bp, Homo sapiens
ccagagactgctgagcccgtccgtccgccgccaccacccactccggacacaggagtcagaaataccatcagaggaggggtactgtgactttaatagtagg

SEQ ID NO: 10457 - DNA, 100 bp, Homo sapiens
cgggaagcgtcgggattaggtgaaagtgggctttgggctggagcatgtgtcccgcgagcagatccgggaagtggaagaggacttggatgaattgtatgac

SEQ ID NO: 10458 - DNA, 83 bp, Homo sapiens
cagatgctgaaaagagaaggtcaaacagctgaagggggatatgagactttctactcggaatatcctgagtgttgcgtggatgt

SEQ ID NO: 10459 - DNA, 100 bp, Homo sapiens
gccctggtcaagacgctgcagcgggactgcctggaacttgctactaccagcaccatgccctaccaatatccagcactgaccccggagcagaagaaggagc

SEQ ID NO: 10460 - DNA, 100 bp, Homo sapiens
gaatgttcttttgttagtgacaaagatgcaagcctggcattttttgatgattgtgtagataaagagatgacctggcttccaccactttctgctattcaag

SEQ ID NO: 10461 - DNA, 74 bp, Homo sapiens
tggggccagggaaccctggtcaccgtctcctcaggggaggagccccagccccgcgacgaggaggaagcggagct

SEQ ID NO: 10462 - DNA, 100 bp, Homo sapiens
ttggtataccttgctacaatagcagattctaatcaaaatatgcagtctcttttaccagcatactggagaaaatgaaactgggattgacccatcaagatgc

SEQ ID NO: 10463 - DNA, 108 bp, Homo sapiens
gagccatggaccaggaaggaagacctctcccaaggcacctgtccaggtgacagcacaaaacctgagaccgtagagcctatcccttctcatctggccttgcctgaggaa

SEQ ID NO: 10464 - DNA, 83 bp, Homo sapiens
gcctccaggatgcgctgagccctacaacacccccagcggccgccggctcccccacgaggctttacaggaagtatggtgctggc

SEQ ID NO: 10465 - DNA, 100 bp, Homo sapiens
caccagttagaagtatatatgatgacatttctagcccaggacttggatcaacacctttaacttcaagaagacaggtcacgagaagagaatgccttctaga

SEQ ID NO: 10466 - DNA, 100 bp, Homo sapiens
ccctccagagcctgtgggaagtctccatggtgaagtataggctgaggctacctgtgaacagtacgcagtgaatgttagaaagcatgggattatggcaacc

SEQ ID NO: 10467 - DNA, 82 bp, Homo sapiens
ccgagagtcaccacaaggccaagggcaagtgatttgacaggtggatcatccatgccatggagtatgaacttcagatccgtgg

SEQ ID NO: 10468 - DNA, 50 bp, Homo sapiens
cgtcaccagcaagcttgcggggtgctgtcatctatatgatctcagtattt

SEQ ID NO: 10469 - DNA, 75 bp, Homo sapiens
ccagcgttttcgcgccccaagagcaggaataccagcaggatgctggtggactgtgtgcccctggtggaggtggac

SEQ ID NO: 10470 - DNA, 100 bp, Homo sapiens
gccaggacacctggaagccgggaaatgattgcttccaagtatgatcatcaggcagaagaagatcttcgcaattggatagaagaggtgacaggcatgagca

SEQ ID NO: 10471 - DNA, 115 bp, Homo sapiens
ggtgccgacatggggcttaagatgtcctgcctgaaagtgctgctcacggccgtgaactgctacagcgtgaaggccgccacccgggtccaggatgcctttgccgccgccaagctcc

SEQ ID NO: 10472 - DNA, 97 bp, Homo sapiens
tatggttactggaaaaagtatgcagaccttgaaaagcggcacgacaacattaaaccatcagatgaggagctgactaaggctttggaacagaaaccag

SEQ ID NO: 10473 - DNA, 100 bp, Homo sapiens
aagttcaagatcaaagtgccagcagattcagtgtcatgtgaggacgtgcttcctgcttcatagataagagggtgtccgcaatgttgccagtgtctgtctg

SEQ ID NO: 10474 - DNA, 100 bp, Homo sapiens
actgttgaaagcgacaagtggaggcgccgctctagcggccgggactctgaactatggcggtggtgaaattgcctctacctttgatcacccagaactggtg

SEQ ID NO: 10475 - DNA, 74 bp, Homo sapiens
ctcccgaggagtgcaggcgcttcaccacagacgaagagtcaagtaccattggccaggatcaaacgcttatggaa

SEQ ID NO: 10476 - DNA, 75 bp, Homo sapiens
cagctgctcgcctgtctccgtcggaagggagcccaagctttgcagagatccctggttaattagaaaagaccacaa

SEQ ID NO: 10477 - DNA, 100 bp, Homo sapiens
ggatagggtcttgctgaggtggatttctctcttctggctaacagcctacttctgcttcctcctggccgctctgggtgtgacagctggtgcccatcgcttg

SEQ ID NO: 10478 - DNA, 96 bp, Homo sapiens
tgacaactcaagagcaatcagtaccatctggtctgtagcatctctgtctgttggagaaggcacaggtgtcagagcaccagtcagaacagcaacaga

SEQ ID NO: 10479 - DNA, 100 bp, Homo sapiens
cgttgggcctccccggcccgcccggcccatggcccagacccccgacggcatctcctgtgagctccgaggttctgatggtcctttggctaccagcaaacca

SEQ ID NO: 10480 - DNA, 51 bp, Homo sapiens
gcttctcagccattttccacagatcaggcagcgtctatcccagactaccgg

SEQ ID NO: 10481 - DNA, 98 bp, Homo sapiens
cgagatctgccgccagtacccgctgttctgcttcctgctgctctgtctcagcgccgcctccctgcttcttaacagacttgtcagcttgtgggaaagtg

SEQ ID NO: 10482 - DNA, 100 bp, Homo sapiens
tcttcctgcccctcgttgatgagagcattcgaagtgacctcagcagggcatccagcctcctctattggcccaggaagcccacccagccccgccacgcaga

SEQ ID NO: 10483 - DNA, 80 bp, Homo sapiens
taattacattctctcggccagcgcctccgcgaaaatgtggtgacctggaagaagaactcaagaatgttactaacaatctg

SEQ ID NO: 10484 - DNA, 100 bp, Homo sapiens
ggcgagagatggtcaggtctggagctcgaccgggccaggttgggcacaataaacaaccaagtataaggagctcagaagatttccatctaaatagtttcaa

SEQ ID NO: 10485 - DNA, 82 bp, Homo sapiens
gggaatgccacagcatcctccagcacctcagtggaagatagatgataagcctgtaaaaattgacaagtgggatggatcagct

SEQ ID NO: 10486 - DNA, 98 bp, Homo sapiens
gactgtgcaggtgtgattctttactcagctgagtgtgccacacaggtagccctggacggcattcagtgttttgctatcatggtgaacttacttcagat

SEQ ID NO: 10487 - DNA, 76 bp, Homo sapiens
ttcggggaggttgcgggccgagacaggtgtcgtgaaaactacccctaaaagccaaaatgggaaaggaaaagactca

SEQ ID NO: 10488 - DNA, 88 bp, Homo sapiens
aaagaaagagacttttttctaaagaatgagtcagtggatcggtggggaaaatgctgcttaccctgggccctgggctgtagaaagaaga

SEQ ID NO: 10489 - DNA, 75 bp, Homo sapiens
gcttcttcctatttgccatgggtctgtgcagacttttgcagacaaatcaaaacaagaagctctgaagaatgacct

SEQ ID NO: 10490 - DNA, 100 bp, Homo sapiens
tcccagtcggctttaccctatcgacgcagcgtccccactgttgaaggggcccggccaggactcggggaagggtggcctgagagcagcgatgacctctggg

SEQ ID NO: 10491 - DNA, 100 bp, Homo sapiens
gactccttagatgactctgtggtgggtccctcagcccttctgagctctgtgctgaacaagaccattcctcaagaattttgtatccaaggcccaaaagttt

SEQ ID NO: 10492 - DNA, 100 bp, Homo sapiens
ccagactcctttacatgatagtcttcctatcacgggcactagtgtggctctcctgttccagcaattggcaccttctagccaccatggcaacctcatctga

SEQ ID NO: 10493 - DNA, 87 bp, Homo sapiens
aggacaaagagcccctcatcgagctcttcgtcaagggagtgcatccgccccaacccttttccccctcgtctcctgtgagaattcccc

SEQ ID NO: 10494 - DNA, 100 bp, Homo sapiens
aaaacaaaggtagaacatggaggatcgtcaggctctaaacaaaattctgtttctctgcaggtggatattgttcccagccagggggagatcagcgttggag

SEQ ID NO: 10495 - DNA, 83 bp, Homo sapiens
aaggcggacaccgaccctgagaacttacctgagatttcgtcacaggtgacgcggcgcacggcgcggatggtggccgagtggca

SEQ ID NO: 10496 - DNA, 98 bp, Homo sapiens
gagacttaaatgccgtccatggagccatgcgtgtgctgacagcttactggaggttttggctctgcgtgagtgtggtctacgagctgtttctcatcttt

SEQ ID NO: 10497 - DNA, 90 bp, Homo sapiens
acggctcacctgtgcgggatggaacaaaaggattttttatcaagcagaaatgcatcgaacaacgagaatcaagatcactgagctaaatcc

SEQ ID NO: 10498 - DNA, 100 bp, Homo sapiens
aaacactgcctcagtatctgaacacaagtttgccagggtttggatacctgatccagaggaagtctggaagtcagcagagctgctcaaagattataagcca

SEQ ID NO: 10499 - DNA, 90 bp, Homo sapiens
ggagccagggctgtagcagagaggctagtccatctaggctttcagtggttaccaccaccctgtgaatctgcctgcacagtaccaacagac

SEQ ID NO: 10500 - DNA, 98 bp, Homo sapiens
actgcagctcgcggtttcctggcttctaggtattgaagcccctgggtgataatttgatggaggaaaacataaggcagtctgtaacaaactctatcaaa

SEQ ID NO: 10501 - DNA, 75 bp, Homo sapiens
gagtctgctggacgcccaggcggacgaggccgtgttagtggtattattcagcacgacttgattttctcccttcaa

SEQ ID NO: 10502 - DNA, 75 bp, Homo sapiens
tatcaagtggccatacaccaggatccacccgatgaatgtgggaagactgagctcctggcgcctgcgatagcggca

SEQ ID NO: 10503 - DNA, 100 bp, Homo sapiens
caagcgctgcccgcgagctgagccgccggaggaggagccgcgggcaacgaggctcagcttgtcaatcggaaacagaaattagagtctgtggaactttcta

SEQ ID NO: 10504 - DNA, 75 bp, Homo sapiens
gaccgcccgcgtcctactgcgccaagctctgcgagccgcaggattaaaagtaagttggatcaaggaggagtgatt

SEQ ID NO: 10505 - DNA, 100 bp, Homo sapiens
catgctaaatacaaatggtatcttaaggcttcagaagaagtgtctaaatcactgcaagcaatgaaagaaattctgtgtggtacaaacgagaaagaacccc

SEQ ID NO: 10506 - DNA, 98 bp, Homo sapiens
cagcaaccggcccgtgcacgcctacaaattcttctttaagtccatggaccaggacttcggtaagactttgaccccgacgcaggcttcagtgattgccg

SEQ ID NO: 10507 - DNA, 92 bp, Homo sapiens
ggatgacagagctgaggcagagggtggcccatgagccggttgcgccacccgaggacaagaacccagtgacttgattgtaaaaatttacagag

SEQ ID NO: 10508 - DNA, 82 bp, Homo sapiens
cacccctcctgtaacccagcctgtttcacttcttgcggacaaggcaaaatctcagcaagttcggacctctagtacaataagg

SEQ ID NO: 10509 - DNA, 101 bp, Homo sapiens
gcgtcggaaagcgacaccgaggaattctatgatgcccctgaagatgtgcacctagggggcggctaccccgtggggatctggggactttgatgattttaacc

SEQ ID NO: 10510 - DNA, 100 bp, Homo sapiens
tacaaccatcttaatgaacttcctgtacctgctgggagaagttctgaacaactatatctgggatacacagaaaagtgatcagcgagtttgaggcctctcc

SEQ ID NO: 10511 - DNA, 50 bp, Homo sapiens
gcccccagaagcccgggaacaaacgaccttatggattttctgaacccaaa

SEQ ID NO: 10512 - DNA, 75 bp, Homo sapiens
ttcattgctttcctctggacttggaaacagtgcttcttagtcctacgtcagcagcagtttaatgtccaggctctt

SEQ ID NO: 10513 - DNA, 83 bp, Homo sapiens
cacgcgctcctcgccgtgctcagtgcctgttacttgggcaccccgaggaagaggcagaaatccaggcagaacttgaacgtttg

SEQ ID NO: 10514 - DNA, 75 bp, Homo sapiens
aacaacactgatcatctgtccgctttctgtgttaagcaactggattgatatcaatgcttacaattgtgaagagcc

SEQ ID NO: 10515 - DNA, 100 bp, Homo sapiens
acggtggccaagaagtcactagtattttgaaggtggcgtctcatctgtctacctctgggatctggatcatggctttgctggagtgatcctcataaagaag

SEQ ID NO: 10516 - DNA, 73 bp, Homo sapiens
ctttgtgcttgtctccaatcttatggctgtcaacaactgtgggtttgtccagaggggttgcgtttatccggtt

SEQ ID NO: 10517 - DNA, 97 bp, Homo sapiens
cgacctggacaggacggagcgcaggcagctccaaaaggaattcttcatttgtctcctgatgtttatcaagagatggaagccagccgccacaaagtaa

SEQ ID NO: 10518 - DNA, 75 bp, Homo sapiens
ctcagctaactataaaagacttctacatgacagacgccacaggtcatcatctggatcatcccattctggttcccg

SEQ ID NO: 10519 - DNA, 75 bp, Homo sapiens
tcgtaagcgcacgtttaaacatctcaaggctaataataagccagagatcgaagcggccctcttcctagactggat

SEQ ID NO: 10520 - DNA, 75 bp, Homo sapiens
ccttttctgggaacgtgagtatcaaccaagattatgagcctcaaacaatttgtgagcatctccagtacttgtttg

SEQ ID NO: 10521 - DNA, 100 bp, Homo sapiens
cgctgtttcagagcgtttgggtcctctgaggccccttgaccagatgatatcatcaagttgaatcgaaaggaagggaagaagcagaattttccaagactaa

SEQ ID NO: 10522 - DNA, 96 bp, Homo sapiens
ctatcatttgaagacgttccttgaggaggtttgaaaaagaactcttggtgtaataacagaagctacaataaaaatcagaccagtccctgaatacca

SEQ ID NO: 10523 - DNA, 75 bp, Homo sapiens
tggactgtttcactcattgccttatagttaagtgtacagcagatattttggggctaagccagctctaccataacc

SEQ ID NO: 10524 - DNA, 98 bp, Homo sapiens
atctgtggcaaggccttctccaggccctggttactgcagggccatgtccgcacccacacaggtaaaataccatgaagattttgaaaaaacaaagggga

SEQ ID NO: 10525 - DNA, 80 bp, Homo sapiens
tatccttgccatcctgaccacctcctttgtttatattgatcagtggaataaagttattgaacagcttggaacaccatgtc

SEQ ID NO: 10526 - DNA, 74 bp, Homo sapiens
cgaacttataaagttctgccgggaagcaagaggcaaagagaatcggttggggaatgtgaccctgaaggagctga

SEQ ID NO: 10527 - DNA, 80 bp, Homo sapiens
gggaagagatacagggatgctgtggaagaggtcgtcatacctcagaagaaaggcaagaaggctgctgcaacctcagcaaa

SEQ ID NO: 10528 - DNA, 83 bp, Homo sapiens
cgcgcgtgcgcggacatggcctcaaacgacttcccaagtaagaagcggaagaggagccgctggaaccaagacacaatggaaca

SEQ ID NO: 10529 - DNA, 75 bp, Homo sapiens
tggagtgggctgctggaggagctggccaggaacgggtgtccgcaatgttgccagtgtctgtctgcagattggcta

SEQ ID NO: 10530 - DNA, 96 bp, Homo sapiens
gactgccaggtgatcgacggcaggaacgtgaccgtcactgacgtggacatcgtcttcagcaagatcaagtaaggaaacaagtgggagaagatgcca

SEQ ID NO: 10531 - DNA, 74 bp, Homo sapiens
gcaccatcgagccagaagcagtatttgtcctggtgtggccgacgacgatgccctcgctgaggagcgcatgcgga

SEQ ID NO: 10532 - DNA, 89 bp, Homo sapiens
cagggttcaggcaatgcaaataagatcagccatgcagaagctggggacagaagtatttgaagaggtctataattacctcaagagagcaa

SEQ ID NO: 10533 - DNA, 83 bp, Homo sapiens
ctggcctggaggctatccagcccacccgcgagtcggccttcgttcacgccatcgcctcggccggcgtggccttcgccgtcacc

SEQ ID NO: 10534 - DNA, 83 bp, Homo sapiens
cgggagccgccgcgggcaggacgcgcgctgcagggtttccaggcctgaggtgcccgccctggccccaggagaatgaaccagcc

SEQ ID NO: 10535 - DNA, 75 bp, Homo sapiens
gcaacttacccgagaacgtgcgggaagagaagatcatcgagcatttcaaacggactcacggcagctgtgttctga

SEQ ID NO: 10536 - DNA, 51 bp, Homo sapiens
ggcttcctcatcgtggccgagatcatgcagccgtctgatgaggccacaacc

SEQ ID NO: 10537 - DNA, 50 bp, Homo sapiens
gctccagcgatcagagcgttaaggaatgggtaccacagaccatgtcatcg

SEQ ID NO: 10538 - DNA, 75 bp, Homo sapiens
actgtacagggatgtgatgctggagaactgcaggaacctggcctcactagggaaatgatcttcattggttagcat

SEQ ID NO: 10539 - DNA, 90 bp, Homo sapiens
cttctcccagactgtgtccatcctccaggcagaaggagaagacagcctgaagaagatgcagctgatggagcttgcgattctgaatggcac

SEQ ID NO: 10540 - DNA, 98 bp, Homo sapiens
tgtcggtggcggggctgaagaagcagttctacaaggcgagccagaaccacaccttcatcaagcggtccgaggtggaagaagtggattttgccggctgg

SEQ ID NO: 10541 - DNA, 82 bp, Homo sapiens
cggtgtctacagtgttctcgacttcgtcgctgcagaaagatgaaggtcttagaatcattgattggaatgatccagaaattcc

SEQ ID NO: 10542 - DNA, 75 bp, Homo sapiens
gcattagtgcagcagcttatcaaagaaaatcccgttttgtcaacctaatgaagcattcaaagaagacatatgact

SEQ ID NO: 10543 - DNA, 73 bp, Homo sapiens
ccttcagtagtgcttcacttgacaaggtcctgctaagtttgaagctgcatgggcattaacaaatatagcatct

SEQ ID NO: 10544 - DNA, 83 bp, Homo sapiens
gcactctctcgatgagtcggagaagtcccacaacagtgattgactacgtgaagccctcggatctcaagaaggacatgaacgag

SEQ ID NO: 10545 - DNA, 100 bp, Homo sapiens
gcaggtttccaaatatggtgacctggctaactggatgatacctaaggccaatgatgaggccaatcagagtgatacaagtgtctccttgtcagaacccaag

SEQ ID NO: 10546 - DNA, 82 bp, Homo sapiens
cctgttgctgctatacctcatcggggcggtgattgccggatgatcatgacgcagtcctgaggtttaatggggcacccacagc

SEQ ID NO: 10547 - DNA, 101 bp, Homo sapiens
acaaagatttctacctccggggagctgttggcttatcagttgttctaccatctccagagggaacgctgcttcctggaaccacgggctcgtttctatgctgc

SEQ ID NO: 10548 - DNA, 101 bp, Homo sapiens
cccacatcgacaatttggaggtggcaaacagcttcgcagtcactaatgcttatgatgatgtgcctgcagatatggttgcagaagaatcaggtcctggtgca

SEQ ID NO: 10549 - DNA, 101 bp, Homo sapiens
tgaaggccctacgggagaaaaccgggcgcaagcagagcatcctggccagaacaagccaaggagccaagacgagagggacacacggacaaacaacagacaga

SEQ ID NO: 10550 - DNA, 100 bp, Homo sapiens
tataacgttgacatgctcaaatatcaggtgtctgtactggtgatgtgtcacactcgggagttggcttttcagatcagcaaggaatatgagcgcttctcta

SEQ ID NO: 10551 - DNA, 100 bp, Homo sapiens
agtcaaccatctcacacctttccaaaggacgcgaccataactctaaaaggagacatatactgcctggactgcctggctgatgtgagctagtttgtctggt

SEQ ID NO: 10552 - DNA, 75 bp, Homo sapiens
cttacgctgcgggaccccgggcactgttgctgctgcgggagacatggcccatgaacatggacatgagcatggaca

SEQ ID NO: 10553 - DNA, 100 bp, Homo sapiens
gaagcaaaagaacaaattcagtcccttctccatgaaatggtacacgcagaacatgagattgatcaacaagctgaagaaagtgaccctgcccagcaggcac

SEQ ID NO: 10554 - DNA, 99 bp, Homo sapiens
gatcgaggacacgctatgtccttttggcttcgaggtttaccccttccaggtgatgtacagttcattgattatgaatattctggatacaactacctggca

SEQ ID NO: 10555 - DNA, 83 bp, Homo sapiens
gcacagttcctgggaaggtggagccaccagcctctccctggtgcgtatagcagcaaaattcatcattcatgcccctcctggag

SEQ ID NO: 10556 - DNA, 76 bp, Homo sapiens
cagctgcctcagttcttagcgcaggttctctacttttagagtcgaaaataaatcctaacactgcataccagaaaca

SEQ ID NO: 10557 - DNA, 74 bp, Homo sapiens
ggaacagccacagcagcctcccaaggagtctgcaagttgctgaatgccaagggaacagaagcacccgcagtagt

SEQ ID NO: 10558 - DNA, 100 bp, Homo sapiens
aggatgaggacctgaagaagaggagggtgccccaggccaaaccggttgcagtgattcatggagaggcgcaggatgccgagtcggacttggtggatggacg

SEQ ID NO: 10559 - DNA, 82 bp, Homo sapiens
aagctttagagcctggctactcacagttgaagcctgattgcagcccttagtgggacataatatgatgatggacctgctgcac

SEQ ID NO: 10560 - DNA, 83 bp, Homo sapiens
attttcaagtgccaaacggaggaatacctcgtatgcaacctcaggcttcagccagtgaaaaattagacgatttcaagaattgg

SEQ ID NO: 10561 - DNA, 90 bp, Homo sapiens
cttccagttagtggatatagcacaccatccccagccacttcggaaccaaaaagaagcttcccagagccggggccaggagccccaagcgcc

SEQ ID NO: 10562 - DNA, 75 bp, Homo sapiens
cctggagggaccacctctagaggccagcattgaaacaggggaccgtgtctggaggatgcctctcttcgaacatta

SEQ ID NO: 10563 - DNA, 78 bp, Homo sapiens
ccaggacctccttcttcaggagagcgccccagggcaagccccgctccggccaacaaacaaatttacatgtattggaga

SEQ ID NO: 10564 - DNA, 50 bp, Homo sapiens
cccagatcctcaaactatcgaagggtcttactgaagtaacacaaagctta

SEQ ID NO: 10565 - DNA, 82 bp, Homo sapiens
ccagttctggcagattctggaaactgtacattgaagcagagataccccatgtttccccatcactcgaggagtctgggcagag

SEQ ID NO: 10566 - DNA, 100 bp, Homo sapiens
acttcaattgggagcaagtgaacaccttgactaaaccgacttctgatccatggatgccatcaggtgggtttggaggatttgggacaacatctacaactgc

SEQ ID NO: 10567 - DNA, 105 bp, Homo sapiens
ggtagccaaggaagccctcgtgtcccagatgaggcaggagctcatcgatctccggggaccgaatttctctgcaaagaatgtccaaaaattcatattcacattgat

SEQ ID NO: 10568 - DNA, 82 bp, Homo sapiens
cttcccccgcagagaagagctgctcagtctggcatgcaggcagccagataagctggtggtggtatggacccgtcggaaccga

SEQ ID NO: 10569 - DNA, 90 bp, Homo sapiens
aagatatctcagtgttctccgctctcataggtcagggaagatcagttttcctgccatccaggctgctccctccttcagcaactcattccc

SEQ ID NO: 10570 - DNA, 75 bp, Homo sapiens
tgacgcttgatgagaaggacccacggcgtctgttcgaaggaatgatgagaagacagcagctgattacaagatttt

SEQ ID NO: 10571 - DNA, 96 bp, Homo sapiens
taaaggggacttaaaatttcccctgaagatatttcagcattccaaaccagattctccaaacgtccacaactatcccgatatggaagccgttcccct

SEQ ID NO: 10572 - DNA, 50 bp, Homo sapiens
aagtcggcgccccagagcggacgagcttaacaaacaacagttgcagttac

SEQ ID NO: 10573 - DNA, 89 bp, Homo sapiens
gcgtccccggcgcgaagaggctggactcggattcgttgcctgaggtcagtcatatgaaattcggatgctggataatcggaaaatgggtg

SEQ ID NO: 10574 - DNA, 88 bp, Homo sapiens
acactgaccggtgctgggggcccctgcgccgagtggacgcctaccgcatctacttgggcaaactctttgattctacaatagctgatga

SEQ ID NO: 10575 - DNA, 100 bp, Homo sapiens
agttcctggatggggatgagctgaccctggctgactgcaatctgttgcccaagctccatgtggtcaaggtggacactcactgacctgtcacaaggttgcc

SEQ ID NO: 10576 - DNA, 100 bp, Homo sapiens
ttgttgtggaaaaacatcatccagtcacagtgtgcatacatagagacgtgaagccagaaaatatcctcatcacgaaacattccgtgattaagctttgtga

SEQ ID NO: 10577 - DNA, 100 bp, Homo sapiens
ggaaagcacttaaaagtggaaagatgacggatgaaaagaatgaacactgtccttcaaaacgaatgaagcagatgatgatgatgatccagaatataatttc

SEQ ID NO: 10578 - DNA, 75 bp, Homo sapiens
cgactgagtactcaacatattgactgtatttgggctgcagcacaggttgctccttgagggcaggacagttcttat

SEQ ID NO: 10579 - DNA, 118 bp, Homo sapiens
gagagaggcaccgggatcgtgaccgagaccgtgaccgagagcgtgaccgagagcgcgaatatcgtcatcgttagaaggcatccggagactctggcagcgggctcggggacgcccggga

SEQ ID NO: 10580 - DNA, 73 bp, Homo sapiens
ctcgtggcggcggggaccgtccagcccagcgattctcagtcagggtgataaaagaaaatgtggctgaagttac

SEQ ID NO: 10581 - DNA, 97 bp, Homo sapiens
acttgacaaccagcatgccgagatggtgaaaggtgtagcagtcactcggcctacacccacagcatcgaccttgtgaacccagcgacctgactgcctt

SEQ ID NO: 10582 - DNA, 97 bp, Homo sapiens
ttgtggagtcactgaagtcacaacttgccaggaggttgtcatagccttagctcaagcaataggtgtcatggagaaactccagctgggcccagagatt

SEQ ID NO: 10583 - DNA, 51 bp, Homo sapiens
gggcactcttcatagttcctagacaaaggcttaccactcttctctcatgga

SEQ ID NO: 10584 - DNA, 110 bp, Homo sapiens
ttcttcaactgcataccttcaatctaagcctgatgaccgtggtacaatcaatgacatctctgtgctgagagtgactcgccgtggggaacaggctgatcatttcacccaga

SEQ ID NO: 10585 - DNA, 100 bp, Homo sapiens
aggaagaaagctatctagggacgagatctagaatcaactgagagagatgcttaaaaatcaccagttactttaatgagctgaaagtttagaagagaagaat

SEQ ID NO: 10586 - DNA, 73 bp, Homo sapiens
ggatgttcatgggcagcaccatcgagccagaagcagtatttgtcctgctgtcgcctggttgggcccggaaatg

SEQ ID NO: 10587 - DNA, 83 bp, Homo sapiens
ggttcagctgatgaagcttctgaaccatccacacatcataaagctttaccaggctgatcagctgaccgaagaacagattgctg

SEQ ID NO: 10588 - DNA, 100 bp, Homo sapiens
tcgcggtggttccgggctggtcccgggtctcgggcatcccctcccggcgccactggccggtgccctacaagtgttacacataatattgcattacttcgag

SEQ ID NO: 10589 - DNA, 83 bp, Homo sapiens
ccgtggccgagcgcgcggccgtaagaccgcggccacgccgcaatgaagagcttcttacagtgaaagcaaagtaggtcgagtcc

SEQ ID NO: 10590 - DNA, 100 bp, Homo sapiens
gagctgaccctaggcctccaccctggcaggaatcccaatttgcctccacttagtgagcggaagaatgaataccctgaagatgtagctcctactgttggat

SEQ ID NO: 10591 - DNA, 50 bp, Homo sapiens
gtcaagagcatcacagtctctggcatcatggaccgatctaaagaaaactg

SEQ ID NO: 10592 - DNA, 96 bp, Homo sapiens
cctgttgaagagagacactggccccatggaggctgctgaagacaccctaagcccccagggacagtgatccccccacaggcctcgctggtctttcac

SEQ ID NO: 10593 - DNA, 76 bp, Homo sapiens
atttactggacagagtgctgtgaggcaagtgaggcctatctggttggcctttttgaagacaccaacctgtgtgcta

SEQ ID NO: 10594 - DNA, 101 bp, Homo sapiens
ggccttccagcgctatcgtgacctgcttttcggttccgggtcttggccccgtccttacctcacagccattttgcagactttgatcacagtgaaacgttcca

SEQ ID NO: 10595 - DNA, 76 bp, Homo sapiens
tgacaggaaggagaactatgggagtattacttccatgggtagaagatgtgttacaacgttgtcgagaatatttaat

SEQ ID NO: 10596 - DNA, 75 bp, Homo sapiens
caccaggaaaccctcagattggaggctggtgtcccggagcagtgcaaggaggagacatcacagctttcccagatc

SEQ ID NO: 10597 - DNA, 82 bp, Homo sapiens
cggggttagccactgctggctgcttccagtgttcgccgagagtgtactaatggtcacttgatgtgcgctggctgttttatcc

SEQ ID NO: 10598 - DNA, 50 bp, Homo sapiens
cgttagccaatagtaacactagtcctaggcctacttacaagcctccagtc

SEQ ID NO: 10599 - DNA, 90 bp, Homo sapiens
ggctaaattacatattccagtaatggtggatgaagttgttcattgtttgtcaccacaaaaaggacagatggagtctggctctgtcgccca

SEQ ID NO: 10600 - DNA, 141 bp, Homo sapiens
cggaccccggcgccgcggcgacctcggaggaaccggctccttgcgtcccgcctccctgggagctccgcacgggagaatgccgtgaatggagaacacctgtggctggagaccaacgtctcgggagacctctgctaccttgga

SEQ ID NO: 10601 - DNA, 100 bp, Homo sapiens
tggagttcctggtcgttcccacagccattctggcgttcctggtcaatcatgacttcacccctctggagggctccaaggtgggcaaactgaccctcaagac

SEQ ID NO: 10602 - DNA, 100 bp, Homo sapiens
tcctgctcacgagagaaaaaggagatcccaagcactgcaagtccagatgcaacgggagcctggctcaagggacgacaagatccagccggaaagtgtagaa

SEQ ID NO: 10603 - DNA, 114 bp, Homo sapiens
cggcgctggaagggatgtcgtctcagcagtgctcgggcgcaggagctgtgccgccagcgtatggccacgcggccaccagaccgacctgagggcccgcacacgtcacgcatcagc

SEQ ID NO: 10604 - DNA, 100 bp, Homo sapiens
tcccggcagcccagcgtggagaccctggacagggtgtgggccgaagatatgctcatgtggtgttgaggaaagcagacattgacctcaccaagagggcggg

SEQ ID NO: 10605 - DNA, 90 bp, Homo sapiens
gctgaacgtcttgcaacagtggccgcacgcataggaatgtatcctgtcaggtataatgtcagtgaatggcaagaaagttcttcatatgga

SEQ ID NO: 10606 - DNA, 96 bp, Homo sapiens
ccagaatcagttgttggagaaaattaaaggtggtgaagcagtattttccaatttgaagattcatttgaaggtggctcctgccacctgctaatagca

SEQ ID NO: 10607 - DNA, 95 bp, Homo sapiens
cacgacaacattaaaccatcagatgaggtccatccagaaccacccactgcatgcagagaaaaacagtacctaataaacagtcagtgctgttcttt

SEQ ID NO: 10608 - DNA, 100 bp, Homo sapiens
ggctggctgactacttcatcgtggtaggctatgaccacgagaagccaggctaacctctgctttgtggacattgacaaccacttcattgagttgccagagg

SEQ ID NO: 10609 - DNA, 90 bp, Homo sapiens
ggaaggaggaagcgcagtgcgttcggctccgcgcccgccgcgccgggagcagcaccgcggggccagtgatgggcccccgacatgaaactg

SEQ ID NO: 10610 - DNA, 100 bp, Homo sapiens
tttcacatagccagccaaaaaaactttaaggctaaaaacaaagcaaaaccagttaccactaatcttaagaagagacgaagtttcatcatgttgtccaggc

SEQ ID NO: 10611 - DNA, 91 bp, Homo sapiens
ccacgtctccaaaatgagtcgcatcttcaacccccatctacaagttggatggcttgaggactggtactaaaaggaaacgtgactgggaggc

SEQ ID NO: 10612 - DNA, 75 bp, Homo sapiens
aagtgatgagaagctgtcggagcttcccaaggtagaacgtcatgacatgaataccttaagcctgcccctgaacat

SEQ ID NO: 10613 - DNA, 100 bp, Homo sapiens
cgtgaggccgtggatgcaggcattaaggaactgaaattaccattcacttttttaagtggacatattcatgaattgaggattcatgtaccatggacaaaac

SEQ ID NO: 10614 - DNA, 100 bp, Homo sapiens
ctgctgtcctgttggtcagggatacgggctcactgaatctgctggggctggaacaatttccgaagagcgagatgcgagaacacttttggctaaaaatctc

SEQ ID NO: 10615 - DNA, 100 bp, Homo sapiens
gcagaaggccatccagccccaggctgcacagggcccggcagccgtccagcagaagggggggccctcagcctcttggccttgaacgggctgttcatcttga

SEQ ID NO: 10616 - DNA, 100 bp, Homo sapiens
gaaggtggatcccgccgggaggtactttgctgatggcctgatatgaaggagtcacgcctcccgcctcccggagctgcccagtggctgccttgtccttcaa

SEQ ID NO: 10617 - DNA, 90 bp, Homo sapiens
ttgaatgatgtatttgatcctgattctacccaagtacatatgatttcagctgcaatggcagcggacaaggcaaaatctcagcaagttcgg

SEQ ID NO: 10618 - DNA, 75 bp, Homo sapiens
gtagatgttgtgcctcggcagctgggagatcccttttgagaagaactgtggggaggacaagaagtgtgaggcaaa

SEQ ID NO: 10619 - DNA, 74 bp, Homo sapiens
gccggtcaacatcgcggtcatcaagtactgagcaggccgggctctcgccatgggtcactgtcgcctctgccacg

SEQ ID NO: 10620 - DNA, 100 bp, Homo sapiens
gtaattacatcattggagcaaggaaaagagccctggatgattgtaagggaagaaaaaggaagatggtgtacaggtccagtccaggtgcagcagcaaggag

SEQ ID NO: 10621 - DNA, 83 bp, Homo sapiens
gccaagggaccaaggtggaaatcaaacctctttcgacgtgtagcagcagctttgccgggaatggaaagcacacaggacagaag

SEQ ID NO: 10622 - DNA, 80 bp, Homo sapiens
aagaggaggaaggagggacttcttggcttctcccagcatagccccaggttcgttccaccagtcataaaccagatgaaatc

SEQ ID NO: 10623 - DNA, 82 bp, Homo sapiens
tgatttctgcatttccaactgaggtaacaaatatactctggagactagaccaaaccaagaaggcattgatgtaagacaagag

SEQ ID NO: 10624 - DNA, 100 bp, Homo sapiens
ggagccaggctggtttcggaaatgcccttacagcagcaggatatgaacgagactgccaaacaagaagatattttggaatccacaacagatgctgcagaat

SEQ ID NO: 10625 - DNA, 102 bp, Homo sapiens
tcagctgggggagatgtccctggaagaacacagccagtgtgaatgcaggtactggtgtggcatactcggacagagaagcccaagatgaagcaggaggagcag

SEQ ID NO: 10626 - DNA, 115 bp, Homo sapiens
gcagcacccgagcaaaccccagcaagatgcggaggctgcctcggcggagcagaggaaccacacgctgatcatggcatggaagaggagatggttcgtgttacgcagtggccgttta

SEQ ID NO: 10627 - DNA, 88 bp, Homo sapiens
gcttcatcaaaaatagtgatagctttgataatcttgccacttgcctagtgaggcttttccgaacctggaaggagacgtctagaaatcc

SEQ ID NO: 10628 - DNA, 101 bp, Homo sapiens
tgcgccgggcactggaggagggctcgccgtttccctggggagatggtaaccatactctattccataaccctcatgtgaatccacttccaactggctacgaa

SEQ ID NO: 10629 - DNA, 100 bp, Homo sapiens
tagtccctcttacttgaagcatgtctttcagagcccggcaccacccatcttgagtatctgcaattctgtggtgttcttggtcacacatttatggagtttc

SEQ ID NO: 10630 - DNA, 83 bp, Homo sapiens
cggactgcagcgaggacggcgaggcgctcaacggcgagccagagctggacctcaccagcaagcctcctccagctggtgatctc

SEQ ID NO: 10631 - DNA, 75 bp, Homo sapiens
gtgaatacaacaatatcattctccttcaagggaataaaattttctaaggtgcatgaatacctcagaagtaaactc

SEQ ID NO: 10632 - DNA, 74 bp, Homo sapiens
ttcgcccgtccccctgccccgttcacaataatgggttgaatggcttgcatctggcttctaaggaaggccatgtg

SEQ ID NO: 10633 - DNA, 102 bp, Homo sapiens
ccgcgcgcagggcctgcagcgggagctggacggcgagcgcgagcggcgcgagaaagtgtccctacctgcaccggacgacgggggacacagaacgcaagtacc

SEQ ID NO: 10634 - DNA, 100 bp, Homo sapiens
atcgcctactacatgtactcggggggcggctctgcgctggccgggggcgcgggcggcggcgccggcaggaagtcccctaggttaaagagcaagtgtacag

SEQ ID NO: 10635 - DNA, 50 bp, Homo sapiens
tatccaccgacagcattccaagttgaggtactaaagaaaattgacattcc

SEQ ID NO: 10636 - DNA, 90 bp, Homo sapiens
acctgcttcagagacatgagaagattcatactgagatcctgcagatcattcagctggacctagacctgaagtttaagaccaacatccggg

SEQ ID NO: 10637 - DNA, 82 bp, Homo sapiens
ggagctggacggcgagcgcgagcggcgcgagaaaaagaagaaaggagggcgcgggctaatgaccgagaatacaatgagaaat

SEQ ID NO: 10638 - DNA, 100 bp, Homo sapiens
gcccaggaggacgactgggaccgggacctgctgctggacccggcctgggagaagcagcagcgcaaggagctcttgtccctggcaaagcgaaagcgcagtg

SEQ ID NO: 10639 - DNA, 98 bp, Homo sapiens
cacgaggcggcgggctggagacatggaccgcggcgagcaagggtaagcttgatgattaccaggaacgaatgaacaaaggggaaaggcttaatcaagat

SEQ ID NO: 10640 - DNA, 82 bp, Homo sapiens
aaaaaatcgactcctatgatgtaataataagcccttgccagcatccagccatgggggatatgaaaaccccagattttgatga

SEQ ID NO: 10641 - DNA, 51 bp, Homo sapiens
tatttggctgaggagttttcaatcccagaattgaatgatctggcacgggac

SEQ ID NO: 10642 - DNA, 101 bp, Homo sapiens
aggctcgcgagcctccttcgccgcgccccacttgctcgtgcactttacacacatgagattgaggaacttcagcaggctttaatagtaaagcaaaatgaaga

SEQ ID NO: 10643 - DNA, 100 bp, Homo sapiens
ccgcagagttgtcgctactggagaagtccctgggactgagtaaggggaataaatacagtgctcagggcgagcgacagacaaatttacatgtattggagac

SEQ ID NO: 10644 - DNA, 75 bp, Homo sapiens
tcctttatatagaagggagagtaggtccaggccatcaacgtgtccagccgcttcgaggaggagatcaaggcagag

SEQ ID NO: 10645 - DNA, 100 bp, Homo sapiens
ggtgcggagtccataccggagcgcaatggcgtccaaccccgaacggggggagattctgctcacggaactgcaggtgtctgcttttggggcagagttttca

SEQ ID NO: 10646 - DNA, 100 bp, Homo sapiens
aagcgttggagaggtgttaccggaacggcggcgacaagggtgttcccgaactagagtgggaaccctcttcataaatcaaactcagaagacagctctgtag

SEQ ID NO: 10647 - DNA, 76 bp, Homo sapiens
gcaccggaaaatgtagcttcccggttaaggacagcctcgggggtaacagcaagaccgccatggtggctactgtgag

SEQ ID NO: 10648 - DNA, 97 bp, Homo sapiens
tcatgaccgagcggagcgtgccccacctccagaaagttggactcagagttaacagcccgacatgagctacaggtggaaatgaaaaagatggaaagtg

SEQ ID NO: 10649 - DNA, 142 bp, Homo sapiens
tcacatagccagccaaaaaaactttaaggctaaaaacaaagcaaaaccagttaccactaatcttaagaagatcttgtagaaaatttcagctgtagcccttggactagaagctgaaataacagaagctgtgtacgatgcatta

SEQ ID NO: 10650 - DNA, 75 bp, Homo sapiens
catcaggaaatacctcactgcctttggtgctcaaaaagctgagatatggggagcctacactccggagggctgtac

SEQ ID NO: 10651 - DNA, 89 bp, Homo sapiens
gccagatgactttaaggccagctccaagatcaaggtcaacaatcaccttttccacaggcagcctgcttctgcaaagtggtacgatcgaa

SEQ ID NO: 10652 - DNA, 100 bp, Homo sapiens
cagcggcgcagctgatagcaggaacagccgggcccctcagatgagagctgcacccaggccagcaccagtcgctcagccaccagcagcggcacccccatct

SEQ ID NO: 10653 - DNA, 82 bp, Homo sapiens
ttggatctaagcgggccaactttgatgaagaaaatgcgttattggagtgatgagtaaagaatacataccaaagggcacacgt

SEQ ID NO: 10654 - DNA, 75 bp, Homo sapiens
ctttctaaacaactctgtaatgattctcacctatgccctcatgaacggtgagacatggaatccattaaaattgca

SEQ ID NO: 10655 - DNA, 89 bp, Homo sapiens
ctgtaatcaataaaaaacttcccaaagaactcctgttacgtaacatctttaccagcaatgactgatcgtttggagtccatagcaagaca

SEQ ID NO: 10656 - DNA, 75 bp, Homo sapiens
gtgggagaagcacagtccacagcaaattgaaccatctttgtatcctaagttgtttcagaaaaatctggatccaga

SEQ ID NO: 10657 - DNA, 80 bp, Homo sapiens
acgctgccaacaacgggcactacaagggagtgcatccgccccaacccttttccccctcgtctcctgtgagaattccccgt

SEQ ID NO: 10658 - DNA, 100 bp, Homo sapiens
ctcctgggaggtcgcaacattccaatcacaggccctctccggaccagtcaacgaaacggaatattccaatgctctttgtccggggagatggcgttgtcct

SEQ ID NO: 10659 - DNA, 76 bp, Homo sapiens
accagtactaccaaggacagcttttttcctgcaaggaaaattctcagtctcccttgaagaagtgaagcctccttct

SEQ ID NO: 10660 - DNA, 75 bp, Homo sapiens
acacccaggaggcatttgaagttccagaatggaagttggatacactttgtgacttgtacgagacactgaccatta

SEQ ID NO: 10661 - DNA, 82 bp, Homo sapiens
aaggcaacgacgttccatctgtggaaggacctaccaaccaggtgtggacactgccagcggctgcagccgacttggaatgacc

SEQ ID NO: 10662 - DNA, 75 bp, Homo sapiens
tgctttggatgttgccaacaaaatatgaagagcattttaagaggtgcagcctctggaagtggatcaaactagaac

SEQ ID NO: 10663 - DNA, 100 bp, Homo sapiens
tagaatcaactgagagagatgcttaaaaatcaccagttactttaatgaggtgcagtgtctgggtcagtgcaagcttcagatagacttatgaaagagctca

SEQ ID NO: 10664 - DNA, 96 bp, Homo sapiens
acctccccaaagatgatgtgaaagggatccaggcattatacggtgccaaagatgtacaatgggaatttgtacatggtttacttgaaaatgctattt

SEQ ID NO: 10665 - DNA, 82 bp, Homo sapiens
gcgagtttccgatttaaagctgagctgcgaggaaaatggcggcgggagttcttcctgtccaagatccggtcccacgtggcta

SEQ ID NO: 10666 - DNA, 100 bp, Homo sapiens
gtgtgacagtaactgaacattggtctaaagtctttccaaaaggtcaaggttcacaagtttcttaaacaattaggtctacatcctaactggcaattcgttg

SEQ ID NO: 10667 - DNA, 104 bp, Homo sapiens
gaaggcggcggctcctgccctctcgctttccctctcgcgtctctggctgcagatctggtggctggacccagagctgacctatggctgcgccaagcccttcgtct

SEQ ID NO: 10668 - DNA, 99 bp, Homo sapiens
gggccgcaaggacgaggacgcctttctgggagaccccgacaccgacataaccagtgcggtgcaatccaagcgaagaaaatccaagtaaacaagcaggac

SEQ ID NO: 10669 - DNA, 100 bp, Homo sapiens
attgatgccccaggacacagagactttatcaaaaacatgattacagggacatctcaggtgaaaccgcagccccctctgagtgatgcctacctcagtggta

SEQ ID NO: 10670 - DNA, 100 bp, Homo sapiens
tggatccacagcagtgggggctggattgctgaagggatggcatacattgagcgcatgaattccatccaccgcgacctgcgggcggccaacatcctggtgt

SEQ ID NO: 10671 - DNA, 137 bp, Homo sapiens
cacaccctgcgctgccctgtcctgcgcgagtggagctctgaagaagctctgagcggagttgtgttcttccccaggtgccactgattaatgaacttgaatcagcaatacatcagctgtacaaacagcgagcttcccgc

SEQ ID NO: 10672 - DNA, 100 bp, Homo sapiens
cctaggaatcattttactggaaatgttctcaggaatgaaactgaaacatacagtcagatctcaggaatggaagggtccagtgtataaagtgacatggaat

SEQ ID NO: 10673 - DNA, 75 bp, Homo sapiens
gccgacctcttccactccgaggaaatcaaggatatccaggaggtgcagggctacgtgctcatcgctcacaaccaa

SEQ ID NO: 10674 - DNA, 100 bp, Homo sapiens
cctccctcttggggtcgtcgccctcgagatgattatcgtaggaggagtcctccacctcgtcgcagagagaatagtaatctgcatcaccaagtggaagaga

SEQ ID NO: 10675 - DNA, 83 bp, Homo sapiens
cgcggagccctcatccctaacggtgaaagagattggaaaggtgtatgagcattgtgacatcgatgactgctggtgtctcggag

SEQ ID NO: 10676 - DNA, 90 bp, Homo sapiens
tgcctctcgcccatcagcgcggcgctggccgagagccgcggctccgtgtttctggaaagtgacagcaggcacgtgtggttctcaaatata

SEQ ID NO: 10677 - DNA, 74 bp, Homo sapiens
accccttctcccaggaggggaggttatgaagacagtatggagtttccagaccatagtagacatttgctacagtg

SEQ ID NO: 10678 - DNA, 124 bp, Homo sapiens
atttccttcaagccaatgatcagaaagatatgaaggactgggttgaagccctgaaccaagccagcaagatcaccggaccagaagcgcaggcccgctcaggaggaattacaacttcatcgccgcg

SEQ ID NO: 10679 - DNA, 82 bp, Homo sapiens
gggggccacaaatgctccttctcctggagacgcaactcaagcaaaatgatgcttcaacacccaggccaggtctctgcctcgg

SEQ ID NO: 10680 - DNA, 82 bp, Homo sapiens
ctggactcggattcgttgcctgagaacaccaagctgaaaggttatcagaaaagagacgtgaagcttggaggcctcggacctg

SEQ ID NO: 10681 - DNA, 75 bp, Homo sapiens
gagagaggacaccccctccaccccagacataggaaagcaggccaggtcagagcagcccaccatgggatggggagg

SEQ ID NO: 10682 - DNA, 90 bp, Homo sapiens
ctcccggctctcgtcagcctcccgccggccgtctccttaacaccgaacaccgttttagctaaagaagatactgaggcagctattcaatca

SEQ ID NO: 10683 - DNA, 90 bp, Homo sapiens
aagacgcggcccaaggtgtcccttggcggcgcgagcaggaagatggggcgcctacccttcttcagcaagatgggaacagctgagtctgaa

SEQ ID NO: 10684 - DNA, 75 bp, Homo sapiens
gcgcggcagagtccccgtacgcctacagtaacggtggcctgtgagtacggcatggtgcacgtggtctcccaggcc

SEQ ID NO: 10685 - DNA, 75 bp, Homo sapiens
acaaatgcaaatacttgtgcactgggagagctatcatggtgaacttacttcagattgtgcgggaccactgggttc

SEQ ID NO: 10686 - DNA, 74 bp, Homo sapiens
gtacaacgtgcgatccatgcccatccgaaaggatgatgaagttcaggttttgagaacagagtgctgttttagag

SEQ ID NO: 10687 - DNA, 75 bp, Homo sapiens
gcgcccgccgacccgcgccctgctccctctcagcacctgggcggacggaaacctcgacctgtctcccagttggtt

SEQ ID NO: 10688 - DNA, 49 bp, Homo sapiens
ctcctctcttagacctttcctcatggcttgccgtgatggaggtggcccc

SEQ ID NO: 10689 - DNA, 74 bp, Homo sapiens
agatttgcattgaaggccggtctaatgtagtgagaaagatcagtctaaagaaaaggagaagaaagtgaaaaaaa

SEQ ID NO: 10690 - DNA, 80 bp, Homo sapiens
gaggagcggacgggccccgcggggcccgagggcaaggagcagccgcctgccttggcctcccaaagagccgagattgcagc

SEQ ID NO: 10691 - DNA, 95 bp, Homo sapiens
taaacacagaaatagtccagaatgtcacaggtccagggcagaggaccaacatgggcattttgtttatgagcaagatgtgggcaatcgggattact

SEQ ID NO: 10692 - DNA, 98 bp, Homo sapiens
cccactggcggcggtggcggaggtggcagtggcggtaccagaatgcgagaagaggactgtcagaaggacgtagaaggcacggttttactgtgaggagc

SEQ ID NO: 10693 - DNA, 80 bp, Homo sapiens
ggataagtcgaaggggaaggcgcctgaagaggacgaagataacaacgaacttgatgcaagtgataggtttgccaaggtca

SEQ ID NO: 10694 - DNA, 82 bp, Homo sapiens
atgtggacgaaggggccgacctcctaggtactggctgtgatcgaacttctcaaccctcagagacttagatcttccacctcac

SEQ ID NO: 10695 - DNA, 97 bp, Homo sapiens
gccagcgcgcattcggccccggacgaaggtactcgcagcacttggagcgcagaaccggccgcgcccggtatggaatcttgcggcatccacgagacca

SEQ ID NO: 10696 - DNA, 98 bp, Homo sapiens
ggaggaatcctgatactgagcggtcttccactttcgccttggtgcctgtcttcgcccacctgagcatcctccagagcctcgtgccagctgctggtgca

SEQ ID NO: 10697 - DNA, 75 bp, Homo sapiens
catacagatctgggaccgaaatttgactggagaagttatagcactggataaaatcttcaacaaagtagaaaaaat

SEQ ID NO: 10698 - DNA, 74 bp, Homo sapiens
cagatagaagtcaagttgaaccagcaatcagaccaaacattgtctggcttgcactgtaaaactagttagctgaa

SEQ ID NO: 10699 - DNA, 82 bp, Homo sapiens
gctttttctaactatttcaagatgatatttattcaccaaacaagttgcaagaatgtagtaactctgatcagctacaaggaaa

SEQ ID NO: 10700 - DNA, 100 bp, Homo sapiens
gaggtgcagaagatgaccttaacacagtagcagctggaaccatgacaggcatgttgtataaatgtacagggtgtcaaattgagaaccaggtagatcccca

SEQ ID NO: 10701 - DNA, 101 bp, Homo sapiens
cggcggcggctgcgggctgagcggcgagtttccgatttaaagctgagctgcgaggaaaatggcggcgggagggtcctgatgaagaagctgttgtggatctt

SEQ ID NO: 10702 - DNA, 100 bp, Homo sapiens
gcttgatggtcgaggccatctcctgggccgcctggcggccatcgtggctaaacaggtactgctgggtctctctcctcctgggcgagccgttcttcactac

SEQ ID NO: 10703 - DNA, 73 bp, Homo sapiens
atctgaatctggcgaaagtgattcatgagaaatggaaagaatctgtaatggtaaaaatgcatttgcaaaggga

SEQ ID NO: 10704 - DNA, 82 bp, Homo sapiens
gctttacgtcatcttcgattagctaataaccaactgcaattcctacctccagcaggaacgaatgcaggaatttgggaactga

SEQ ID NO: 10705 - DNA, 99 bp, Homo sapiens
gcactttccaaagtggatgcctccggggaggcacgtgtggttctcaaatataggcattctgatgggaacttgtgtgttaaagtaacagatgatttagtt

SEQ ID NO: 10706 - DNA, 118 bp, Homo sapiens
gatcactaggtgccaacattatgcgaagaactttacgtggacatcccatttaattctcagaagccgatcacaaggtgcgtatagcagcaaaattcatcattcatgcccctcctggaga

SEQ ID NO: 10707 - DNA, 98 bp, Homo sapiens
gatagaatgaagaccacaataaaagagacctctacttagctcagcaattcttacctttgacttatcagatgccctggtcatcttccagctctatgaaa

SEQ ID NO: 10708 - DNA, 100 bp, Homo sapiens
gacacccgcggcgaaggcggctcgggctcgggctccggcatgctcagtccctggctgcgctgcaggcttactctcactggttagcacagtattgcagtga

SEQ ID NO: 10709 - DNA, 82 bp, Homo sapiens
gccgagggcaactttggaggccccctggaaggctttaggatccaggatgagacctgcacgcagtggctcacagcagcacgat

SEQ ID NO: 10710 - DNA, 101 bp, Homo sapiens
tgaatgagttgcataaaattccataattctccactttaccaatacttacaggatctgggacacacagactttgaaatatgttcttctttgtcaccaaaaac

SEQ ID NO: 10711 - DNA, 75 bp, Homo sapiens
gccagaacatcgttctcaatggcaaggtgggaatggaagtggccccacatctcaaagaaaccctaaataagaact

SEQ ID NO: 10712 - DNA, 100 bp, Homo sapiens
gaggaggttcttcagtgtatgcctggtttccgcagacatgcagctccagttacaagaaggcagttcccacacggtgcacacaggatggattacctgcact

SEQ ID NO: 10713 - DNA, 83 bp, Homo sapiens
gcatcaacggcaaagttttgcagatcttcaacaagaggacccaggagaaattcgccctcaaaaaagaagcttccggttctgag

SEQ ID NO: 10714 - DNA, 75 bp, Homo sapiens
ccccagaaggacaagcgcttctcgggcaccgtcagggtccctctctgtcctgctcgatgacctgcaggacctgag

SEQ ID NO: 10715 - DNA, 104 bp, Homo sapiens
aagatgataaagcatgtcagggaacttgctgagcaactattcaaaaataaactggaggaagcagcatctcgtgcagcagaagaggaaaagaaacgccttcagac

SEQ ID NO: 10716 - DNA, 100 bp, Homo sapiens
tcgggagaagcagcgcctgttcccggggcagatccaggttcagttccagggtcacccccgagaggacaacaggcatctggaagtgctctctcgccactct

SEQ ID NO: 10717 - DNA, 100 bp, Homo sapiens
gtgggccgacatcaagagctgcgagatccaacagagccctaaataagtcacacagcaccctgaaagtgattccctggtctacttgaatttgacacaagag

SEQ ID NO: 10718 - DNA, 94 bp, Homo sapiens
aaaccacgcaggcaaacgagaattaaatgccgagaaggccagtacgcttttctgggagaagaggctacaaggacttagtgcatcagatgtaaca

SEQ ID NO: 10719 - DNA, 75 bp, Homo sapiens
taaggattccaagtaactcttatttggtctcgcatgaatttgccttgaatttcaaccccagtaacccctactgtg

SEQ ID NO: 10720 - DNA, 87 bp, Homo sapiens
ttgattggcgcctttctcattattataggctccctcctgctgtcaggctacatcagcaaaggggcagtccgttgccactgggcagta

SEQ ID NO: 10721 - DNA, 90 bp, Homo sapiens
cggaggccggcccgcacgctgggactcctgctgctggtcgtcttgggcttcctggtgctccgcaggatgattgccgccgtggacacagac

SEQ ID NO: 10722 - DNA, 50 bp, Homo sapiens
gactatcacctatcgccaagtggatcgaggccatcaagctacagatggtc

SEQ ID NO: 10723 - DNA, 50 bp, Homo sapiens
cgagaaccgtcagtttgagccagatgtgctcctgcgggaagaagtgtcgc

SEQ ID NO: 10724 - DNA, 74 bp, Homo sapiens
acctctcttcagcatctactttcaggacactgcccatctctaagataagaacctggaaaggggactctgttggc

SEQ ID NO: 10725 - DNA, 75 bp, Homo sapiens
cggccagaagcgggcggcgcgggggagatgtactatactggcaattgctggagaagattttgcaattgttgcttc

SEQ ID NO: 10726 - DNA, 150 bp, Homo sapiens
gattgaatgcaacttggaccaagaactcaaactttttgtatctcgacactctgcaagattctctcctgaagtcccaggtatgtttctataaaacctgataaccgaaaattggccaacggaacaaatgtcctcggcttactgattgacact

SEQ ID NO: 10727 - DNA, 84 bp, Homo sapiens
agaagtcgcgtgtctaggtgagtcgcggtgggtcctcgcttgcagttcagcgaccacgtgcctccggagccagcgtggtggcca

SEQ ID NO: 10728 - DNA, 75 bp, Homo sapiens
gccacatcgttcggttcccacaacagcctgacatggatgggtgcaaaaaagagctgccccgcttgcaagagccgg

SEQ ID NO: 10729 - DNA, 75 bp, Homo sapiens
ccactgccgcggccgtgggcccgaccgcggggacccaagacacagtctgtccagcacaaagttacttagtcccca

SEQ ID NO: 10730 - DNA, 80 bp, Homo sapiens
tttgccgaagattaggaagaatccactgatagaaatcatttccatcaataccgggtcatgaagaaggatatttcacagct

SEQ ID NO: 10731 - DNA, 50 bp, Homo sapiens
ccgacggctgctcaaacatcaggaaagtgttgtgaagagcgaagactttt

SEQ ID NO: 10732 - DNA, 95 bp, Homo sapiens
ctagctcttctccttcttccccatcaagagcaaaagatggcaggatggtggctggcaaagtgttgatggcaaagcaagaaattgttgaatgtgta

SEQ ID NO: 10733 - DNA, 74 bp, Homo sapiens
agccaatgaagatgaagacataggaggtgttgggatggccaccaactgggggagcctcttgcaggataaacagc

SEQ ID NO: 10734 - DNA, 83 bp, Homo sapiens
aggacggcgcggcagagtccccgtacgcctacagtaacgcatgatgccttcttctgtagagtgggcgctttgcagaatacgtg

SEQ ID NO: 10735 - DNA, 149 bp, Homo sapiens
acccctgggccaggagccaccccgagtgtcactcagccagcctcgtaccctgccagccacctctcggccatctgcagacatccagctctgtcacccaagctgcagtgtggtggcatgattgtagctcactgtaactttgaactcctgag

SEQ ID NO: 10736 - DNA, 97 bp, Homo sapiens
caaccaaagacgctggaactattgctggcctaaatgttatgaggatcatcaacgagccacgcagtaaaacgcaggactcttcccgcttggattcgcg

SEQ ID NO: 10737 - DNA, 75 bp, Homo sapiens
cttccccggccggtccctcgcctcccggccgagctgacgactggtcaaacaaatggattttacagaggcttacgc

SEQ ID NO: 10738 - DNA, 84 bp, Homo sapiens
ctgcaggagagccccagggccagagccgaagctgtgcttctccatgagatggtactttgaactcaagtaaacaaaagggaagat

SEQ ID NO: 10739 - DNA, 98 bp, Homo sapiens
gaccaagaatcgccttcagccctgtctggtgcatccttggcagaaagtgaggaggaaaacacccccattggcctgctttcttccccgggcgatgtgca

SEQ ID NO: 10740 - DNA, 82 bp, Homo sapiens
tcaccagtgcgcatgcgtggctctccggcaccggtccgtactccagcgagggacagaagatgagcctgtcggtcctggaggg

SEQ ID NO: 10741 - DNA, 73 bp, Homo sapiens
taacacacttcaagaaaatgtaaacaagtatcagcaagtggtggtgatctttgtgaagtctgtgcagcggtgc

SEQ ID NO: 10742 - DNA, 76 bp, Homo sapiens
gtcctgtacagcatcgccgagaaggtggccaaacaggagaagaagaagaagaagacaggtcgggctaagcggcgga

SEQ ID NO: 10743 - DNA, 90 bp, Homo sapiens
ccctgcgctgccgccgctctgaggagttaaagtgagatggaagattttcgaggtatagcagaagaatcatttccaagctttctcaccaat

SEQ ID NO: 10744 - DNA, 75 bp, Homo sapiens
gagaacggtgcttctatggcaggatatgatctcaggaaacaggctcgacagctggaaaatgaacttgacctgaaa

SEQ ID NO: 10745 - DNA, 83 bp, Homo sapiens
agccggggcccgagccccgcccggcccgggccatgtcggtgggcgagctctacagccagacctgcctagagctggaacgttac

SEQ ID NO: 10746 - DNA, 83 bp, Homo sapiens
aaagatgactacaaacataggatgttttggcgagagatgtattcagtggaggaagctggttattggagtgatgagtaaagaat

SEQ ID NO: 10747 - DNA, 75 bp, Homo sapiens
ctctcccacaaggatgtcaatttctcagaggaggagttccagaagcatgaagtaccatctgccagcatgactcgg

SEQ ID NO: 10748 - DNA, 83 bp, Homo sapiens
gaaccactcattcacttctagacgacaaaatgcaaaaaaggaggccaaagactttgtgactttggcaggctatggcttcgcct

SEQ ID NO: 10749 - DNA, 50 bp, Homo sapiens
cggaaggcctcagaaaaagccttaaagaatgtttcatccatttgtggacc

SEQ ID NO: 10750 - DNA, 50 bp, Homo sapiens
ccactttccggggtgcacagcaagtgaacaaaatccagtctcatagcaga

SEQ ID NO: 10751 - DNA, 90 bp, Homo sapiens
ccactcagctatctgtttatcaaggcgccaagcccatctttgtgtgcttgcatccaactgtgatgagcctatgtatgtcaagttggtgga

SEQ ID NO: 10752 - DNA, 100 bp, Homo sapiens
gccaaattgctcaactaagaccaagtcctcgctggactgctcagggtgccagacctcatcgaaatgtaccttctccgaatgcacctttaaagcgggtatt

SEQ ID NO: 10753 - DNA, 100 bp, Homo sapiens
cttgtggcgaatggggctcacgtcgaggaaaccaggaacaactggtaactgtcatggaggaacgaatgatagaagttgaacagaaactgaaactagtgaa

SEQ ID NO: 10754 - DNA, 90 bp, Homo sapiens
tgtgtccctcgactgtgaccagggcagcatggtgacccagcatggcaagcccatgttcacccaggtgaaggaatctctctccagttactg

SEQ ID NO: 10755 - DNA, 101 bp, Homo sapiens
ccagcttggtcttgctctctgcctcgtcccaatccccggctcttaccaaatgcagatacattggctagaaatgactgaattggaagaattctctgtattct

SEQ ID NO: 10756 - DNA, 83 bp, Homo sapiens
atgacatatttttggacctgaaacagaaattctggaacacctatatggttcctagaaggtgagcgcggacggtatgcaaagtt

SEQ ID NO: 10757 - DNA, 100 bp, Homo sapiens
gaggtccacgtcccgcaggtgcgtgcagcagcacccgccaggaggcgcctgagccgctgccatggcccagacactgcagatggagatcccgaacttcggc

SEQ ID NO: 10758 - DNA, 90 bp, Homo sapiens
ccactctggagtctctgtgtctgagcatgacagaacacgccttgggtggtggatccataaagaacccagccaacccgcagagggagggga

SEQ ID NO: 10759 - DNA, 50 bp, Homo sapiens
gggcgtccctgagagaaattaagaccttttaatcaaagtgaagtttgggg

SEQ ID NO: 10760 - DNA, 100 bp, Homo sapiens
aggaccctcagggagagcgggcagccttccaggtggacagtgctgattcccctttgctgtggataaggatagacccagatatgtcagtattgaggaaggt

SEQ ID NO: 10761 - DNA, 82 bp, Homo sapiens
cagtacacacacaagatctaccacctgcagagggtcaaagaattgactgtagatccaactgctgctggtgatgttcgtccaa

SEQ ID NO: 10762 - DNA, 100 bp, Homo sapiens
aaagacaggagtggagtgatatcagacaccgagcttcagcaagctctctccaacggtggctgtatctgacagacccaggccttccagctccgacagatcc

SEQ ID NO: 10763 - DNA, 100 bp, Homo sapiens
atgtccctgggactcctgtctacagagaaaaagaagatatgtatgacgagattattgagttaaagaaggttaccttgaggatagttttgtaaaatctgga

SEQ ID NO: 10764 - DNA, 75 bp, Homo sapiens
cggccagcctgagcaagcggaggacctacgccggcctggctgctgatgcaaggaatcccctgggctcccgtccac

SEQ ID NO: 10765 - DNA, 51 bp, Homo sapiens
ccgaatcgctgtcacgccggcagggatcgcttacacctgagacgaactaca

SEQ ID NO: 10766 - DNA, 82 bp, Homo sapiens
ggcagccaccccatctgggaatatcgtcgtcctccccgcagtcaggctgcccatcacccaccattccagcaggtaaagtcat

SEQ ID NO: 10767 - DNA, 134 bp, Homo sapiens
aacaagactctacagaactgtttaccaaccacagacatctcactgcagagacacccaggcctgatattgatgatgttaagaagttcaaaccgggttacctggaagctactcttaattggtttagattatataag

SEQ ID NO: 10768 - DNA, 75 bp, Homo sapiens
ccttgtgacagaatatgccaaaaatggagaaatttttgatatggaatgtgcagatgtcccactattaactccaag

SEQ ID NO: 10769 - DNA, 90 bp, Homo sapiens
accaaagaaaagaaagagaaaaagcagaaagtagatgaagatgagattcagaagatgcaggtcccgggattcttgagctgtgcccagctg

SEQ ID NO: 10770 - DNA, 100 bp, Homo sapiens
ttttactgcaaggcctgtcatgatgacatcacagatcccaaaagaataaaaaaatgtggctgcaaacggcgcaaaagtcaacaactctagcttaattgga

SEQ ID NO: 10771 - DNA, 100 bp, Homo sapiens
ctcttaactaattgttacattatggttcagggaaacacagtttcagccattggaccttttagtggcttaaaagagtttattaaccttgcaagaactcttc

SEQ ID NO: 10772 - DNA, 117 bp, Homo sapiens
gaggagccagacgacaagcacacactatggcgctgaaacggattaataaggtctcgtctacagaggactggtctttcaatagcaagttttcacttcatcgacaacatcacgaaggtg

SEQ ID NO: 10773 - DNA, 82 bp, Homo sapiens
gtggctactctgcctcggggacgaaagcaggtaggatgaattggacaaggatgagactcgtgtaggtgaggacagttggaag

SEQ ID NO: 10774 - DNA, 90 bp, Homo sapiens
ctggtttgcaaagtgctcagcaaagcaggctgtaggtttagttgagcaccggaaagaacgtgctggagaatctggtaaaagcaccattgt

SEQ ID NO: 10775 - DNA, 75 bp, Homo sapiens
ggcactgattttcagttctgggaaaatggtgtgcacaggagccaagaggaatggaagttggatacactttgtgac

SEQ ID NO: 10776 - DNA, 100 bp, Homo sapiens
cgtaaaatgaagtcatctgtactcccaaaggcgtccactctttcaaagtcatcagctgtcattgagcaagccacttccggctcctgcgtcgctccggaag

SEQ ID NO: 10777 - DNA, 82 bp, Homo sapiens
ccagcatgaagaccccggcggacacaggatccctccccgcggcggcgatggcccgagccatgagagtgaggactttccgcgc

SEQ ID NO: 10778 - DNA, 103 bp, Homo sapiens
gtctgggataaaagtgaaagtggtgattggcattgtactgctagctggaagggtgactgtgaagatcacgctaaccttctgtgcagccttcttcttggatatg

SEQ ID NO: 10779 - DNA, 51 bp, Homo sapiens
ggagaatgttgactctactgcaggtttccctagaaagagaacgacaacatg

SEQ ID NO: 10780 - DNA, 100 bp, Homo sapiens
gactaataaaggccatggcgccagcagaaatcctgaacgggaaggagatctccgcggaattgcaacccagtgaagaagttacctggaagtaaagactggc

SEQ ID NO: 10781 - DNA, 90 bp, Homo sapiens
cttactaccaaacagcacttcctggcaatgatagatacatcagtgtgggaagccaagcagatacaaactggtcgaattgacaaatcttac

SEQ ID NO: 10782 - DNA, 100 bp, Homo sapiens
gagggacgagccagtggcaatgacccagacccggacgacccccattgctgagccagcggagctgcttgcttggaactgcagttggctttttgctaccacc

SEQ ID NO: 10783 - DNA, 100 bp, Homo sapiens
aattccttcccttcaaagaaaatacatttgacctggtggttagcagtttaagtgtatcggatctgtcgttctggaaagaagacccttctatttagagtag

SEQ ID NO: 10784 - DNA, 82 bp, Homo sapiens
ctggccctggccctgatcatcctgctgggcttcgtccagatcgggaagggtatcgagaaccttccctgcgaacttcagagga

SEQ ID NO: 10785 - DNA, 75 bp, Homo sapiens
gccgatgtcactcatccacctgctggtgatggaaagaagccttctattgctgctaccatttgggatgaacatgac

SEQ ID NO: 10786 - DNA, 76 bp, Homo sapiens
cttgaggcgaatggccgaatctctccggcattgaatgccccagaggagcccgaaacctcccaggcttggtgcagga

SEQ ID NO: 10787 - DNA, 83 bp, Homo sapiens
catggattcggtagaactttgccttcctgaatctttttccctgcactacgaggaagagtcattagtaattatcagcactttag

SEQ ID NO: 10788 - DNA, 80 bp, Homo sapiens
cggaagcgtctttgctcaaggatcccagttttctctggatgacgtggtatagtcgtctccccctccaccacggcaagtcc

SEQ ID NO: 10789 - DNA, 100 bp, Homo sapiens
gttggttactccattcgatttgaagactgcagtagtgcaaaaaccattcttaacacaaacgtgcagatatctgatagccctttccgttgcactcaagagg

SEQ ID NO: 10790 - DNA, 75 bp, Homo sapiens
ccgagaccgcggccgggaccgagggtggaagcagggaaaggcctggagatgaggaagctggttctctcggggttc

SEQ ID NO: 10791 - DNA, 75 bp, Homo sapiens
tgcaaatccggaatgtcaatgtggaggacagtcattttgtttactcattcagccctgttgcaggtcccaataaac

SEQ ID NO: 10792 - DNA, 75 bp, Homo sapiens
cgcacctcgtcaccaaggccaagtgtcctctcgcatggcagagcaagtgggaaggcccagaagatcccttacaat

SEQ ID NO: 10793 - DNA, 100 bp, Homo sapiens
ccacctcggtcgcgatgggggcgcaggaccggccgcagtgccacttcgacatcgagatcaaccgggagccggcgaccgtggcagccatgtattacagcta

SEQ ID NO: 10794 - DNA, 82 bp, Homo sapiens
ggacaagctggtgcagaacattgcgcggcagggctgggaagaggctaggcgacgtggtttcagatacgaaaaggactattgc

SEQ ID NO: 10795 - DNA, 75 bp, Homo sapiens
caagatgatgagggcgcggcagtatccttggggcactgtgcaggatgtttactgaactgcaacagatgaggcaac

SEQ ID NO: 10796 - DNA, 51 bp, Homo sapiens
aactgtccacactgctgaaaaatctgactaccatgccggggatgaagcgag

SEQ ID NO: 10797 - DNA, 82 bp, Homo sapiens
gcatgagcaaaaactccaaactcctctccaccagcgccaagagcgcttctctgaagtagctttggaaagtagagaagaaaat

SEQ ID NO: 10798 - DNA, 83 bp, Homo sapiens
ccaagaggcaaaggggaggttacgcagcaaaccatccagaagatgatatcatcaagttgaatcgaaaggaagggaagaagcag

SEQ ID NO: 10799 - DNA, 75 bp, Homo sapiens
attaatgcgaacagacagacttgagaactcagcagtaggccttgcctcagatccaaggtcactcggaagaggcca

SEQ ID NO: 10800 - DNA, 97 bp, Homo sapiens
tttttgttggtaaatggcttccaaactgcaagtcaatacagatttgtatgtgaagctattttgaaagtttatgaagaaggctttgttaaacccttaa

SEQ ID NO: 10801 - DNA, 76 bp, Homo sapiens
acagttcaactatacatgaaagttccagggagcagaacaccagggaccagttactctccacaagaaaattcacaca

SEQ ID NO: 10802 - DNA, 90 bp, Homo sapiens
agcctgcagcccatcaccacgctggccacacccactcgcccgggtctatggccacggtcggagagtggtcctgtgtgcgctgcaccttcc

SEQ ID NO: 10803 - DNA, 101 bp, Homo sapiens
tcctgctcttcctggactcctgagcagaggttcacgcaaagaatctgctccacaagttttgcttccagaagaagagaaaattatagtggaagaaactaaaa

SEQ ID NO: 10804 - DNA, 50 bp, Homo sapiens
ggaagaatttcctctgaagcaccgatcacctctgcagcctgcacagccgg

SEQ ID NO: 10805 - DNA, 100 bp, Homo sapiens
cctgtcactgcagctagcgaccagaagcaagaaatggaccaattttgacaagatatagtgctgcagcgtgcctgatgggatatattcagtcatggcgtcc

SEQ ID NO: 10806 - DNA, 98 bp, Homo sapiens
gaagccttcaaagggaccaagaaaggcactgtctaccttaccccttaccgggcatgaggagctcgaccgtctggccagggagaaggatgcagtgctgg

SEQ ID NO: 10807 - DNA, 83 bp, Homo sapiens
gatcgatgtttcaatattggaagcgctttgatttacagcagctgcagtgttctaagaacggaagcatctgggctggatggaat

SEQ ID NO: 10808 - DNA, 100 bp, Homo sapiens
ttcctgcgcgcccgggatttcgatctggacctggcctggcggttaactgcctgtatccatggatcagctgctcttctatacccaatgtattggcaacaca

SEQ ID NO: 10809 - DNA, 82 bp, Homo sapiens
tccgacgcccgaggagaaggaggagtggattaagtgcattaagccttagcagtaggaggactaggctccattataagagttc

SEQ ID NO: 10810 - DNA, 113 bp, Homo sapiens
ctggccaagcacgccgtgtccgagggcaccaaggcggtcaccaagtacaccagctcgaagttttaaaatcaaagatgggaaaatcggagaaaattgcccttccccatggccag

SEQ ID NO: 10811 - DNA, 101 bp, Homo sapiens
ggagagttgaagagagcaatggacatcttttcagcaggttgcacgttttcaaaaaatacctaatggtgaaaatgagacaatgattcctgtattgacatcaa

SEQ ID NO: 10812 - DNA, 100 bp, Homo sapiens
gtgaaaatattcctcaagaaaaggatattccagattgcccctgtggtgccaagagaatattggaattccagataacaacgaacttgatgcaagtgatagg

SEQ ID NO: 10813 - DNA, 100 bp, Homo sapiens
ccgagaccgcggccgggaccgaggtggtctaccatcacggcaacagtgcgacgggcggccattacactacagacgtcttccagatcggtctgaatggctg

SEQ ID NO: 10814 - DNA, 88 bp, Homo sapiens
ggggccggacacgctctgcttcgacaaggacgagttcatgaaggttcctgatgttattagcagcataaggcaattatctaaagcggcc

SEQ ID NO: 10815 - DNA, 82 bp, Homo sapiens
ggtctgtcagtgagatggcttctaacaaggtaaagagaaatgtgtatgaccttacaagtatccccgttcgccaccaattatg

SEQ ID NO: 10816 - DNA, 76 bp, Homo sapiens
agggcacgtatagcattggtaaagaacgatcgtccagtggaggaacggaaaacagttcttccttcaaagcatgcag

SEQ ID NO: 10817 - DNA, 89 bp, Homo sapiens
ggcagcggcggcgcggaggcggctgaggtgcgagccgaatatgcttttaaggctattaaccagggtggccttacatcagtagctgtcag

SEQ ID NO: 10818 - DNA, 82 bp, Homo sapiens
cctcacctcgctactcgcttgcctacccgccggcccgcgggtctacttcctcaaaggaggcatacacggaatacctgaggag

SEQ ID NO: 10819 - DNA, 110 bp, Homo sapiens
cccagaccctggagcctcagttggaagcagccgatccagcctgcggagcctgtggggcagggggatatgagactttctactcggaatatcctgagtgttgcgtggatgta

SEQ ID NO: 10820 - DNA, 100 bp, Homo sapiens
ctgaaaagccctcaagaaagcctcagtgatcttggtgccatagagagtctccgggtccctggaaagccaacaagtcccaaatttggaaaagctgactcat

SEQ ID NO: 10821 - DNA, 106 bp, Homo sapiens
cagcactggactcatggaggctgagcatttattcaggtgtcatggagaaactccagctgggcccagagattctgcagcgggaaaatccaaggcttatttatgccag

SEQ ID NO: 10822 - DNA, 75 bp, Homo sapiens
cttcaaaggcacttcgtggggtcacagggtgctgataagactgtgaaaggcccagatggactgaccgcctttgaa

SEQ ID NO: 10823 - DNA, 100 bp, Homo sapiens
cgccgctccaccgagggccgcgcgtcggccgccgccgggcctggatgcttgcattgggcaatcaagttggcaaactttatgtttgggatttagaagtaga

SEQ ID NO: 10824 - DNA, 100 bp, Homo sapiens
tgtaccagaatcagttgttggagaaaattaaaggtgaatttccaatcatcagcccaggtcgggtatatgaatacacaagctgtaccacattctctacaac

SEQ ID NO: 10825 - DNA, 100 bp, Homo sapiens
gcgcagtatatctacaagagcgcacctgcccgttcctatgtcctgcggaatactcccccagttgcaagaggcgcaggaccgtggaagacttcaacaaatt

SEQ ID NO: 10826 - DNA, 75 bp, Homo sapiens
ggcggaggcagaggtggaggcgctttgaaaggggcataaggaaatggtggcaggcacttcctcctaacaagaagg

SEQ ID NO: 10827 - DNA, 75 bp, Homo sapiens
tgcagacacactcttcgatatcctggtggctggcagtatgcttggtgctcttacagcctgttccaagtgtggctt

SEQ ID NO: 10828 - DNA, 78 bp, Homo sapiens
tatggtcaacattgatggaaaacaaatcaaactgcaaatctgggatacgttttcggctttgtgagaaaccttaccatc

SEQ ID NO: 10829 - DNA, 75 bp, Homo sapiens
gcgcgccgccctctcgtcccactttccagctgtctgtggaagcccgtaaagagatgactagaaaggctattaaga

SEQ ID NO: 10830 - DNA, 100 bp, Homo sapiens
ggatcctacagccaagctccaagtcaatatagccaacagagcagcagctacgggcagcagagatggtgccatgacaatggtgtgaactacaagattggag

SEQ ID NO: 10831 - DNA, 96 bp, Homo sapiens
cttgtccaagtacatcgacaagacgatccgggtaaagttccagggaggccgcgaagagatggacagagacgtatgtgcgttggtctcctaagggca

SEQ ID NO: 10832 - DNA, 82 bp, Homo sapiens
gggagtggagcttggtttcgggatctcggtgctgcagacggcgagacctcctgcacagaggccattaactgtttgatgcgag

SEQ ID NO: 10833 - DNA, 51 bp, Homo sapiens
caggaatatcgatacaacaccaacaggtccacaactcccaggcctgttgca

SEQ ID NO: 10834 - DNA, 90 bp, Homo sapiens
agaagactggcccagcagatggagaatagaccctctgtccaggcagcattaaaacttaagcagcttggaagctcgaagtctggctgtggc

SEQ ID NO: 10835 - DNA, 98 bp, Homo sapiens
ggtgatgcagggacatcactgaattcaaatgactatggttatgggggacaaaaaagacctttagaagatggaggtggagttggcatgaacttaacagc

SEQ ID NO: 10836 - DNA, 74 bp, Homo sapiens
gcagaaagcaagtgaatacgagtcagaagtgtgaagcctcagtttaggtcatctggtggttcagaacactcaac

SEQ ID NO: 10837 - DNA, 100 bp, Homo sapiens
cagctcgctgctcatgtctgtgggactctgcacactcttcggcctgacgcccaccctcaatggcgggtgttggtaaatcatgcttattgctacagtttac

SEQ ID NO: 10838 - DNA, 100 bp, Homo sapiens
gtttgtcttctgctttggcccaggtgtgttccagagaacaagccttcagacatttgctatattgacgctgagctgtcaggggactcaggcttatgaggag

SEQ ID NO: 10839 - DNA, 76 bp, Homo sapiens
aaaagcctcttctgaaggaaaagacagtgtagtcctgcaaaacattttgaggttcgtgctgtaagacctaaagttc

SEQ ID NO: 10840 - DNA, 90 bp, Homo sapiens
gataaacgaggggctggaacacctcgccaaagcagagaaatagaattgaatgatctggcacgggaccctccagcacagtgttcagcaggt

SEQ ID NO: 10841 - DNA, 50 bp, Homo sapiens
agatggtggataagcccacccagctactacccacagatggcatgatccga

SEQ ID NO: 10842 - DNA, 90 bp, Homo sapiens
gaaacatgcagattatatcgcatcctatggctcaaagaaagatgattatccgaaaactaaatgtgacccttacgtacttgagcatggaga

SEQ ID NO: 10843 - DNA, 51 bp, Homo sapiens
gctgcgcgaggagcaggaaaaggttggagtgcaatggtgtgatctcggctc

SEQ ID NO: 10844 - DNA, 75 bp, Homo sapiens
tgccaatactgtcgactccagaagtgctttgaagtgggaatgtccaaagaatgccccttcccagctgcctgcctg

SEQ ID NO: 10845 - DNA, 83 bp, Homo sapiens
gggccaggagagcgctcggcggccctgggcgctgcctatggcacagccaagagcggtaccggcattgcggccatgtctgtcat

SEQ ID NO: 10846 - DNA, 75 bp, Homo sapiens
agcctcagttggaagcagccgatccagcctgcggagcctgtggggcagatgcctgaaaacttcatgcctcctgtt

SEQ ID NO: 10847 - DNA, 90 bp, Homo sapiens
ggaggagcgggtggccccgcgctgcgcccgccctcgcctcacctggcgcaggttctggctccttggcagcaatggctgtatttgaagata

SEQ ID NO: 10848 - DNA, 100 bp, Homo sapiens
cggaagaatggcagtgctcaaactcaccgaccagacgaagttatacggaagcgtctcctcattgatggagatggtgctggagatgatcggagaattaatc

SEQ ID NO: 10849 - DNA, 82 bp, Homo sapiens
gacgccgatgccgatgatggctgggcagggtgactgacgaagtcttcaacttcctgctggtgtggtattactgcaccctgac

SEQ ID NO: 10850 - DNA, 100 bp, Homo sapiens
gcgaccatgttcgttccctgcggggagtcggcccccgaccttgccggcttcaccctcctaatggttgttggaggaagagtcttccaagagggctgaacta

SEQ ID NO: 10851 - DNA, 51 bp, Homo sapiens
gcgcgagtgaggaaaggaggtactgtaggtcccctcttgctgttggctgca

SEQ ID NO: 10852 - DNA, 74 bp, Homo sapiens
tctgcagccatgaagccaaccgtcccgaggttagctttatacgtctacgaatatttactgcacgtaggagcaca

SEQ ID NO: 10853 - DNA, 75 bp, Homo sapiens
gaagaggatgatgtttttggtgaagtcaaataaagtgcccgtggtgcagccatcccatgcggtccatcctctcac

SEQ ID NO: 10854 - DNA, 100 bp, Homo sapiens
agcagcatggcatttcagtcactggtttgcagagtccagaacctatctacaagacctcttgtgctttgactattcatgctattggacgatacagccctga

SEQ ID NO: 10855 - DNA, 75 bp, Homo sapiens
ccggttccttgcggtcaagatgctgcaaaacgtgactccccacaataaaaagtttcctacactactgaggtttag

SEQ ID NO: 10856 - DNA, 90 bp, Homo sapiens
catttggtttggtcatcaatctgaactacaaagatttgaacgtcatacttacctggttgcttgcgcatctagtaatgttggatcatattc

SEQ ID NO: 10857 - DNA, 100 bp, Homo sapiens
gaactgggtgtgaggcacacagcctaaagtcagcacagcagaggaggcccaggcagtgccaggagtcaaggagttgtaagacgttcatcgccgtgttatc

SEQ ID NO: 10858 - DNA, 100 bp, Homo sapiens
ccaaagcagtcgtaagaagaggtcccaatcccccactctttccgccctaatggaggtctccagtttcggaagccagcagacctgcagaacttggctcccg

SEQ ID NO: 10859 - DNA, 104 bp, Homo sapiens
ctgacctccagctggagtatctggacctgtacctgatgcactggccttatgcctttgaggttccaaaaggtcccaggtgtcctctccgtgcagtcggaaaaagc

SEQ ID NO: 10860 - DNA, 50 bp, Homo sapiens
aaattagtgaaggagatgaagtagagtatgccaccacgggctgttccctg

SEQ ID NO: 10861 - DNA, 100 bp, Homo sapiens
cgtcgtggtgagcctcatgttacacggcgcaccccagactacttcctataaatttctcctgggaaacctgcctttcaatgcaggcggggaccttataact

SEQ ID NO: 10862 - DNA, 83 bp, Homo sapiens
ctgggatattttcctactgatctatttgcctggtgtgagttcttgatacgaatgaaaggccaagagtttgttgatgagattca

SEQ ID NO: 10863 - DNA, 99 bp, Homo sapiens
gaagctcagcttgcgaggctgcattggtgttggggattcctccttgaagcatgctggaagatggactgccctccaatggtgtgccccgatctacagccc

SEQ ID NO: 10864 - DNA, 75 bp, Homo sapiens
ggaccccagtaccaggcggtggtgcccgacttcgaccccgcccgccggggtcagcttggtcagcgtccattccag

SEQ ID NO: 10865 - DNA, 75 bp, Homo sapiens
gactccaaaatcgttatagctgtcataaaggatttctctctgatcaaacggacagttcaggactcagaatctaag

SEQ ID NO: 10866 - DNA, 76 bp, Homo sapiens
cttaggacccccagctccgacgcccgcaccgccgccatgatgtgcgaggtgatgcccaccatcagcgaggatggcc

SEQ ID NO: 10867 - DNA, 100 bp, Homo sapiens
ctcttcccggcgctctcctggctcccttctgccccagctccgtctcggcggcggcggatgaagagcatgatctagaagaggatgagagtggcactcgacg

SEQ ID NO: 10868 - DNA, 82 bp, Homo sapiens
tgggccgaggacagggcggcaggggtgacagtggggtccaggagagtctcaaaatcctaagctatccaacttgataaagtca

SEQ ID NO: 10869 - DNA, 100 bp, Homo sapiens
agtaaggatgcgttgaataagttttcagaataattctgtagctcgtgcagtaatgcagtcccaaaagccacccaaaaattgtagagaagcttttactgct

SEQ ID NO: 10870 - DNA, 96 bp, Homo sapiens
gtcgacgactgggacaatgagaacagctctgcgcggctttttgagcggtcccgcatcaaggctctggcaggatacattaattgtttggtcagaagc

SEQ ID NO: 10871 - DNA, 100 bp, Homo sapiens
gtgcactgctacaggactctactatggaggtactccaaagattcaggtttactcacgtcatccagcagagaatggaaagtcaaatttcctgaattgctat

SEQ ID NO: 10872 - DNA, 75 bp, Homo sapiens
aaacatcagcaaatggcttagaaacatagatgagcatgttagccgcttgcaagacccttcaagaagtaacacagc

SEQ ID NO: 10873 - DNA, 100 bp, Homo sapiens
gcgcccggcggcggcgggagcccaggagcctgccccgccctggggacgaagagctgcagctcctcctgtgcggaaatgcagacgctgcgtgaggttttgg

SEQ ID NO: 10874 - DNA, 50 bp, Homo sapiens
gggacccgccagcggatccctcttacaggcgtccgacctccgatcatgaa

SEQ ID NO: 10875 - DNA, 100 bp, Homo sapiens
gttgtggaaaaacagtgatcgctaagaactttgccgataccttaggatacaacatagaacctattatgctctatcagggtgatctggaccctctggcatc

SEQ ID NO: 10876 - DNA, 75 bp, Homo sapiens
ggctgagctggcccagagaattgcagccctcaccaaggtcaccatcagaaaagctaagtttgctgtatagtgagg

SEQ ID NO: 10877 - DNA, 101 bp, Homo sapiens
gctggacgagctggagaaggccatcaccacgcagaacgtcaacaccaagtgcatcaccatccccaggaaagattctgaagcttggcggagaggggtgtgtg

SEQ ID NO: 10878 - DNA, 83 bp, Homo sapiens
gtaccaatgaagccagagagggcttggtggatgacaaggaggcctgagtagaccgcagggactgttgacatttagggatgtgg

SEQ ID NO: 10879 - DNA, 87 bp, Homo sapiens
tttggctgtgataggagtatttttaaagatgttcacgtaaacataatttcccaacatccagtcctacccttcttattaagagcatgt

SEQ ID NO: 10880 - DNA, 75 bp, Homo sapiens
gagaagttcagtgcccagctctactgagaagaatgctgtggccttggataagggctgctcccaattccgcctggc

SEQ ID NO: 10881 - DNA, 100 bp, Homo sapiens
cattgcggagcctcatctcctcggactaagaatgccaacattctaggattctgctggactagttcaactgaaattgtcttcataacagatcaaggaatcg

SEQ ID NO: 10882 - DNA, 100 bp, Homo sapiens
tgggggcagcctggggacttagtttcctgcttgccttcccccaggagctaatgacagtttttcaactgctacactggaatggcagccttaaggccatgag

SEQ ID NO: 10883 - DNA, 100 bp, Homo sapiens
cgtctgggcagcctacgctttccggattgacatctttaagtatgtgatctacggcatcgcagctgcgttctttgtgtatggcattttgctgatggtggaa

SEQ ID NO: 10884 - DNA, 100 bp, Homo sapiens
cagaaaggtccgaatctgtctttatcgaactactcaactctactttagtagcgaaagtacagagtcgttcaagttagcactctacgtatatgaatatctg

SEQ ID NO: 10885 - DNA, 83 bp, Homo sapiens
ggggaccacaagatcctcatcgacaggtacggacattgctgcaggagaagaggttgccatcaagcttgaatgtgtcaaaacca

SEQ ID NO: 10886 - DNA, 83 bp, Homo sapiens
ggaggacaaagagcccctcatcgagctcttcgtcaagatgtgaagttcatttccaatccgccctccatggtggcagcggggag

SEQ ID NO: 10887 - DNA, 100 bp, Homo sapiens
gaagaaattcatctggaactcagagaagaaggagtttctgggcaggaccggtggcagttggtccatcaggtttgggcggatgccacaggccgagaaggag

SEQ ID NO: 10888 - DNA, 100 bp, Homo sapiens
tgaacgcacaggccgtcgctatgagcgggaccaccctgggcacagcaggcatcggaggttggcgctgtacgtttatgagtacctgctgcacatcggtgcc

SEQ ID NO: 10889 - DNA, 82 bp, Homo sapiens
gcgggggagattgttggggaggtccgcctcctgacaaggtgatccgggcgggccccgcaggaattttatcccctcaccggcc

SEQ ID NO: 10890 - DNA, 75 bp, Homo sapiens
tctagaagatgggaacttccttaaacttgcaaataatggcactgttctcaggcctagccgcccgtgactctcaca

SEQ ID NO: 10891 - DNA, 74 bp, Homo sapiens
gaatcgttaaacatcttaggtcaggttctggcctataggaacaagacattttcagtaatggaagaaggagcttc

SEQ ID NO: 10892 - DNA, 102 bp, Homo sapiens
ttcaggaggccaccaacttccctctgcggccgtttgtcattcccttcctgaagatgagcagcaccagcagtaagagggctccgaccacggcaacccagaggc

SEQ ID NO: 10893 - DNA, 50 bp, Homo sapiens
ctcggccgcgggctcccggaggactgcagatggagtctcactctgtcgcc

SEQ ID NO: 10894 - DNA, 74 bp, Homo sapiens
tttgatgatcatgatacagttgataaaattgttggggaacgctgccttgatgatgacacttacatgaaggattt

SEQ ID NO: 10895 - DNA, 98 bp, Homo sapiens
cccggcccggccgccccgccgcccccgcggccccggccggaggagacagtactatactggcaattgctggagaagattttgcaattgttgcttctgat

SEQ ID NO: 10896 - DNA, 97 bp, Homo sapiens
gcagttgtatgtgtagaaagtgaaatcagaggagatgtaactatcgatgccctccaaatccttggttatggaatatttggctcatcccagtacactc

SEQ ID NO: 10897 - DNA, 100 bp, Homo sapiens
ggttttatgagtgggaaccatttgcagaagacgaacaggaggcattgaactcaatcatgaacgatctggtggccctccagatgaaccgacgtcaccggat

SEQ ID NO: 10898 - DNA, 96 bp, Homo sapiens
tgctgcgaagaagattcctggaatctcatcaactgtgctctgccctacctaaccttgccctttggagcagcctcgctgcaggaggtcactgagcaa

SEQ ID NO: 10899 - DNA, 75 bp, Homo sapiens
gggaaaagatgcttctgggaacaagttcgaagcattcagcaaacaatggcaaggcagagccaccagaaacgtaca

SEQ ID NO: 10900 - DNA, 75 bp, Homo sapiens
ccaccatcctgaatggtttaacgtgtacaacaaggtagacaagggcgtggtccccctggcagggacaaatggcga

SEQ ID NO: 10901 - DNA, 100 bp, Homo sapiens
caccacccccggagcccccctcaacacggaccgcgcccgccgggcacacaagaatggtcactgtattgttgcagcatctggcagtgagactgaggatgag

SEQ ID NO: 10902 - DNA, 75 bp, Homo sapiens
tgacggagctgcagtcggcactgctactgcgaagacagctggcaggaagctcttcgtgggcggtcttgactggag

SEQ ID NO: 10903 - DNA, 100 bp, Homo sapiens
ccgatactgagcttcttcctatttgccatgggtggcttcccacacttctgactcggacgttccttccggtgtcactgaggtggtcgtgaagctctttgac

SEQ ID NO: 10904 - DNA, 75 bp, Homo sapiens
ctaaacctctgcacatccattcttcgactgtgagatggaagattttcgaggtatagcagaagaatcatttccaag

SEQ ID NO: 10905 - DNA, 74 bp, Homo sapiens
gctgggctacgcgcacgggctcggccgccgcccctgccggtactccaaagattcaggtttactcacgtcatcca

SEQ ID NO: 10906 - DNA, 75 bp, Homo sapiens
gcacagcttggagtccaagcatttgctgatgcattgctcattattcccaagggaccattgcaatttagagatgtg

SEQ ID NO: 10907 - DNA, 75 bp, Homo sapiens
cggccgcgaccccggccccggcctcggccgtggcgagcggggtaatcctgggaatggtgacgcttgggaacatgc

SEQ ID NO: 10908 - DNA, 101 bp, Homo sapiens
cgccgcccgcagcctgccgcccgccgcagggcgctgacggtcccgcacgtctgccgctgccaccggcgcgcccgagtcccttcaccgatgttgtcaccacc

SEQ ID NO: 10909 - DNA, 97 bp, Homo sapiens
tcgtcgtctgccttcgcttcacggcgccgagccgcggtccgaaactgcatggtgatggccgaccagaaccaggtgtgggttggctcggaagactccg

SEQ ID NO: 10910 - DNA, 101 bp, Homo sapiens
gtggagatagtgatgcaggcagttatgattcttcgaggcaacgagcccacatgggcagaggccaagaggcagctagagactgaattcccttcaggagcttc

SEQ ID NO: 10911 - DNA, 75 bp, Homo sapiens
gagctggggcaccgagctctggcgtgagtgcatctccatccacgttggccaggctggtgtccagattggcaatgc

SEQ ID NO: 10912 - DNA, 75 bp, Homo sapiens
tatgaccaggtgctccacgaagacgaaaccacgccctaccacttatgtcttggatgaagatgaacctcgattcct

SEQ ID NO: 10913 - DNA, 90 bp, Homo sapiens
atgttgacgatgagtatgaggacgaggaccagtgggaggatggagcagaggacattctagagaaaggatcatgaggatgagaatgaagaa

SEQ ID NO: 10914 - DNA, 112 bp, Homo sapiens
agaaattacaacagaagatatcaaatcagcatttgccccctttggtaaaatatcgaaatgcttccagactgcacacttttacttagaggacagtacatcccctagagttata

SEQ ID NO: 10915 - DNA, 98 bp, Homo sapiens
gtctccccagcacccactctctgggggcaggtgggcccggtgacagtccagttacaacacagggatcacaacaaacacaaccgccacagaagcactat

SEQ ID NO: 10916 - DNA, 75 bp, Homo sapiens
catgaacaggcatctaatgttcttagtgacattagtttacttgaagaaatctgtaatcttggaagggaccccaaa

SEQ ID NO: 10917 - DNA, 75 bp, Homo sapiens
atgaattcctagatgggcaaagatggattgaagacaaccttgatttcagtgtggatcggaaactccatggtacag

SEQ ID NO: 10918 - DNA, 90 bp, Homo sapiens
tcgaggacggtcggactcccgcggcgggaggagcctgttcccctgaggcgagtatagtgttggaaacaagcaccgtgatccctttgaagc

SEQ ID NO: 10919 - DNA, 50 bp, Homo sapiens
ctgatgacactcactttgtttccagaaaggaatggagtctgtttagagac

SEQ ID NO: 10920 - DNA, 82 bp, Homo sapiens
caacgtctgggatgcactcaaagccgaccgggcagttgagaagctgatgtctcctcgacttccaactggaaccttgaacccc

SEQ ID NO: 10921 - DNA, 100 bp, Homo sapiens
cagatggctggaaaaccacccacctgctctttagcctgggagctgtgtgtctggacaggacagagcgggatgccaccagcttgtccaaagggaagttcca

SEQ ID NO: 10922 - DNA, 75 bp, Homo sapiens
tctgtctctgccacctggtctgtaccatgcggagaccatcaagaatgtgcgcacagccacggaaagctttgcttc

SEQ ID NO: 10923 - DNA, 100 bp, Homo sapiens
accatggaccaggccctcaagtccctgatggcctcagaggaggagggagaagccggagacccagggccccctggactacctgcctactcccctcaccctt

SEQ ID NO: 10924 - DNA, 74 bp, Homo sapiens
aaagttcataaatacaacttagcagtcacagacaagttgaagatgaccttggagtacttgattcttcagaaaac

SEQ ID NO: 10925 - DNA, 50 bp, Homo sapiens
gcctcctgagtagttgggactacaggtgcatgccaccacacccagctaat

SEQ ID NO: 10926 - DNA, 50 bp, Homo sapiens
ccacggagaaggtgaactgtctggataagacgcaaacatgcagatctttg

SEQ ID NO: 10927 - DNA, 82 bp, Homo sapiens
ggtggactccttcggcagtccacccaccgccgccgcctcccagtgcagggctcgcggcctggcaagaatgtacagctgacag

SEQ ID NO: 10928 - DNA, 75 bp, Homo sapiens
gtggacgtcaataatgaaagctcttcagaggacctgcgcgaagtctggctcaattatcctctccacccactccaa

SEQ ID NO: 10929 - DNA, 51 bp, Homo sapiens
cctcggaagagcgctcccaggagaaacaaggtctatccatgttagttcagc

SEQ ID NO: 10930 - DNA, 83 bp, Homo sapiens
gggaagagaagatcatcgagcatttcaaacgctaaaccatttacacagctggtgaaagaaatgcagcttcatcgagaagactt

SEQ ID NO: 10931 - DNA, 75 bp, Homo sapiens
ctccgccactgccaggctctggaccctggactctgcagaagggtccgcaaggccgccatgaccagtctgatggat

SEQ ID NO: 10932 - DNA, 83 bp, Homo sapiens
cgcggattcgccgaggcaccgaggcactcagaggaggatggatagaatgacagaagatgctcttcgcttgaatctgttgaagc

SEQ ID NO: 10933 - DNA, 83 bp, Homo sapiens
ggttagcggagcacgggcaaggcggagagtgacggagtcggcgagcccccgcggcgacagacaatgcagatcttcgtgaagac

SEQ ID NO: 10934 - DNA, 95 bp, Homo sapiens
cattttctgacccaacaccagatggcccgatgagagaaagggaaagttaaggatgctggagcagaacaatggatttctctttctctttcatgcaa

SEQ ID NO: 10935 - DNA, 83 bp, Homo sapiens
ctttccaggaggctttggagcggctaaaaacctgttttgggatttgagattgacgcggtgaactctgtccagttttcaaacca

SEQ ID NO: 10936 - DNA, 75 bp, Homo sapiens
tccagctttgcctgtgagaggaacaagcgtccctgatccagaaggtgggttcagagatgggcagtgagaaggagc

SEQ ID NO: 10937 - DNA, 100 bp, Homo sapiens
gtcaccacaaaaacctatcgttagagtcttcctgcccaacaaacagaggacagtggtgaccaagaatatggcccaggtgaccaaagccctggacaaggcc

SEQ ID NO: 10938 - DNA, 75 bp, Homo sapiens
ttccagcagcctggcttcacctcggggactgcttcaaggttactgactttttatgatgtttggtggctatgagac

SEQ ID NO: 10939 - DNA, 75 bp, Homo sapiens
tgacccaccaatggaagcagctggcttcactgctcaggtcttcgatgccaagaacatgatggctgcctgtgaccc

SEQ ID NO: 10940 - DNA, 75 bp, Homo sapiens
tgtgaagttcctttacactggcttcaagtggaaataaagagattatttcgcatattagtcaacatggaggaaaat

SEQ ID NO: 10941 - DNA, 100 bp, Homo sapiens
cctgccatgggtatccatggtgacaagagtcaacaagagcgtgactgggttctaaatgatgatgataattccgaagaaggcttccacactattcattcag

SEQ ID NO: 10942 - DNA, 100 bp, Homo sapiens
cccagggaggatgacgaacccaacctggtgcccggcccgcaggagctggccaagaggactcccggcaagcacccagaccaccccgcggtccagagtgccc

SEQ ID NO: 10943 - DNA, 73 bp, Homo sapiens
ccactccaagactgcccatctggatgaggaggaaattatggaagtggaaattacaatgattttggaaattata

SEQ ID NO: 10944 - DNA, 100 bp, Homo sapiens
agttctacgtgtcccccgaggatctggaggcacagctgcagtctgacgagaggggcagtttcatccggtgatgagaaagaggggttgaaacaccctgggc

SEQ ID NO: 10945 - DNA, 50 bp, Homo sapiens
gtgggtgcttgtgcatatatgctaggttattgaagcaaacctagatggag

SEQ ID NO: 10946 - DNA, 101 bp, Homo sapiens
caaggaacaaaatgtttgtaaattctccttttaccaaggatcagctcagctactatttaataaaacaaaatctgtagaattcacgttttgtaatgacactg

SEQ ID NO: 10947 - DNA, 100 bp, Homo sapiens
cttcttcagaaagcctccggaatctaaaaagccctcagtaccagagacagaagcagatggattcgtccttttaggttgaaggtttagaacagatgtggaa

SEQ ID NO: 10948 - DNA, 89 bp, Homo sapiens
cggcagtggcggtgtgccaaacagtttgaaaacccaatcattaaaaaaggcgacggcggattgacagaagtatgattggagagcccaca

SEQ ID NO: 10949 - DNA, 82 bp, Homo sapiens
tgcccagggggccggagggccagggtctcccggaggttgaccagtatctctaccacatgcgcctctctgatgagaccctctt

SEQ ID NO: 10950 - DNA, 74 bp, Homo sapiens
cggcgcccccaccccatccccgggagagtcaacctatttgatttcttgacaagaccacaatctgatcccaaaga

SEQ ID NO: 10951 - DNA, 90 bp, Homo sapiens
ttagaatctgggactttcttcgttgccatgaggaaagaattctccgagatgttgctatcggagctccacaagaagatgacttgcaaggtg

SEQ ID NO: 10952 - DNA, 80 bp, Homo sapiens
attgacgccatgtcgggttattcgagtgaccgagaccgcggccgggaccgaggttgaggctgtgaagctgggcagggttt

SEQ ID NO: 10953 - DNA, 127 bp, Homo sapiens
gacggctacgccgaagcactcgttccgggggtgaagcctcctgcgccggccttgcctcgggatgagttagatgaactccgtgctgagatggaagagatgagagacagttatttagaggaagatgttt

SEQ ID NO: 10954 - DNA, 100 bp, Homo sapiens
ccttgagcgcgtccgacagtctgtctgttcgcgatcctgccggagccccgccgccgccggcttggacgtagacaagtttggcaacgagatcacccagctg

SEQ ID NO: 10955 - DNA, 90 bp, Homo sapiens
gggaaccgtgtccagccagggtcctgggccgcgacctggttctcccggagtctacaagacacctatggctgccgatgaaggctcagcaga

SEQ ID NO: 10956 - DNA, 75 bp, Homo sapiens
cggtactggagccggcggctgcggccggcagccggcagctttgcagcgggaaatacaactggagcacgcaaagca

SEQ ID NO: 10957 - DNA, 50 bp, Homo sapiens
agggagcccaagctttgcagaggtttagcttcttctcccgagataagaag

SEQ ID NO: 10958 - DNA, 102 bp, Homo sapiens
taagcaactggattttttaactgaagatagtgcctttcagccctaccagggcggcgactggcggcgcgatggacctgaccgggctcctgctggacgaagaag

SEQ ID NO: 10959 - DNA, 99 bp, Homo sapiens
gaggcggcgagaggcgggctgaggcggcccagcggcggcagcgggctgacgcacgaggcacacaggaaggaggtggagcaggtgtatctgcgctgtgcg

SEQ ID NO: 10960 - DNA, 98 bp, Homo sapiens
aacaacgacgccgagctctggggcgtcttgcagccctatgagcatctcatctgcggcaagaacgccaatggggtattccctcagcggatactacaccc

SEQ ID NO: 10961 - DNA, 95 bp, Homo sapiens
cggaaggacaccaagatgcggatccgggcctttccgttggtggaccaactgggtgatccctgccatctctgcagtggccgtcgccttgatgtatc

SEQ ID NO: 10962 - DNA, 100 bp, Homo sapiens
aataaattgcaagcattctatccaaatggaagaaggtagataatgactataatgcccttcgagaaagactcagcaccttgcctgataaattgtcttataa

SEQ ID NO: 10963 - DNA, 74 bp, Homo sapiens
ggaaggccagagccctccacagagcctgccttcaacccccaaagcaggtcctcaagtatgttccacataatgaa

SEQ ID NO: 10964 - DNA, 100 bp, Homo sapiens
gtgatcacctatatacttggagttggagacaggcacctggataaccttttgctaacaaaaacagatggagttttaacattgaatgcggagaacactaatt

SEQ ID NO: 10965 - DNA, 51 bp, Homo sapiens
gccactgtgtgctgccatacacagcttccaatcagaagactatacaacctc

SEQ ID NO: 10966 - DNA, 74 bp, Homo sapiens
ggagaggagctgaaggggccgtgggggatcaggattggcacagctgcactggccgttcaggttgtgggcagtaa

SEQ ID NO: 10967 - DNA, 83 bp, Homo sapiens
accattgacgccatgtcgggttattcgagtgaccgagaccgcggccgggaccgaggaacccttaggagaaatcttgagagtgg

SEQ ID NO: 10968 - DNA, 100 bp, Homo sapiens
cggccgcgaccgagtcatggctgagacctacgttttttgctccactcaagcctgttagaatcaccatggaatacagctccagtgggaaggccactggaga

SEQ ID NO: 10969 - DNA, 82 bp, Homo sapiens
atccagggcctaacatgggacagccgcaaccaggaatgacttctaagtatgtattcccgtgtgccagagtgccaggtcacca

SEQ ID NO: 10970 - DNA, 98 bp, Homo sapiens
ctcggccacctcctccgcggacgccggggagaacccaggtggagtgtgttactcttggggctggaatgagcatggcatgtgcggagatggcactgaag

SEQ ID NO: 10971 - DNA, 75 bp, Homo sapiens
ctcatcaagaagcatgatggacaggatgtttgccctcgaggtatatgctcgtatgtcagaagtcttaggaataac

SEQ ID NO: 10972 - DNA, 100 bp, Homo sapiens
aagaggactcaggagcaaatcagtaatgctgacggggtacgggatccaccactgctttgccaggagcatgatgggccacgaggtgaaggtgccgctcctg

SEQ ID NO: 10973 - DNA, 75 bp, Homo sapiens
ttcgcgtctctctgctgcggcgcggggaccgctgtgctctcggagatcatgcacgccctgaagatgacctggcac

SEQ ID NO: 10974 - DNA, 82 bp, Homo sapiens
cccgttcttgcctcaggccagtcgcctccaggccaagagggatccttcacccgtgtctggttttgggatttgagattgacgc

SEQ ID NO: 10975 - DNA, 90 bp, Homo sapiens
gtgctgagggacattgtgcacaagcctggaatctcacaaactatgatctctgcagcatttttcttggaacctctacgctcttggtttggg

SEQ ID NO: 10976 - DNA, 82 bp, Homo sapiens
gctctgctgtccagctgggctcagcttctgacagacgccaactcctggtgggggacttaggagccattgatgaaaaatacga

SEQ ID NO: 10977 - DNA, 115 bp, Homo sapiens
ttgcatgtatttggaacaaaaaaaggagatgcctggcagccccgctctctgcaatcatggaagggaagtggttgctgtgtatgttactggtgcttggaactgctattgttgaggc

SEQ ID NO: 10978 - DNA, 100 bp, Homo sapiens
acttctgcccagccacagccctcccctcacagttgagcacctgtttgcctgaagttaatttccagaagcaggtaaaataccatgaagattttgaaaaaac

SEQ ID NO: 10979 - DNA, 100 bp, Homo sapiens
tgtacaacttaaccttgcagagagccactggcatcagctttgccattcatggaaacttttctgtcttagagtttgaaagagtctatcttgataatctccc

SEQ ID NO: 10980 - DNA, 97 bp, Homo sapiens
gtgggggccggccccggcctggtcctggccccggagctgttgctggacccctggcagggactccctggaggaaaagcggaagcggcagcggtctgaa

SEQ ID NO: 10981 - DNA, 111 bp, Homo sapiens
ccggagcgcctccttcgcaggcttcagcagtgcacagagccggaggatcgcttctgtggctcctgatggatctgagaagatggacgtggaggatgaaaatctgtctgatta

SEQ ID NO: 10982 - DNA, 90 bp, Homo sapiens
ctttcctggcccttttgaagaggaaatgaagggtattgccgctgttactgatatacctttagatcccagcatggtgagtgcctacatgta

SEQ ID NO: 10983 - DNA, 100 bp, Homo sapiens
cgactgctgcctggtctgcaaagaagtcctttcaagtctctaggactggactcttcctaagcaagtccgggcagctgcaatgactctccgcacggtatta

SEQ ID NO: 10984 - DNA, 100 bp, Homo sapiens
gcagatttgtttgtcatccttgtacagcaatctcctcctccactgccactacagggaagtgcatcacatgtcagggtctcgccctgtcacccaggctgga

SEQ ID NO: 10985 - DNA, 90 bp, Homo sapiens
tgatgaggagcaagaggaccctgcggactactgcaaagttctgctaagccaatattctctagaatgagcacaaaacaaatcgaataacag

SEQ ID NO: 10986 - DNA, 99 bp, Homo sapiens
acctgttgggctcaagcaattctcccatctcagcttcctgagtagctggaccacagatctcagtggttcaatagcatccccagatgtcaaattaaatct

SEQ ID NO: 10987 - DNA, 82 bp, Homo sapiens
aagagcaggcggaggaacaaaggcgacccaagacacccagagagggacaggagctgcccaatggggaccccaaggaggggcc

SEQ ID NO: 10988 - DNA, 100 bp, Homo sapiens
cggggagccagaagatggaggaagctgtaccgtgccaacggccacctcttccaagccaagcgctttaacagggtgttccgaataaaggccatcaggctgg

SEQ ID NO: 10989 - DNA, 100 bp, Homo sapiens
ctgggttctattttccctcctcaaactgactttgcagccacggagaggttcactattatgaagatggcaatgttcagttggttagtcataaagatgtaca

SEQ ID NO: 10990 - DNA, 98 bp, Homo sapiens
ctactgtcctgtcctgaagggagttcctcctagatctggtcggacctttgtatggggaaggggaggagttacagcccggccagttggagttgtagtac

SEQ ID NO: 10991 - DNA, 98 bp, Homo sapiens
ctggcctccatttcttcaacccagtgcctgtcatgaaacttgtggaggctgccttcgaccagcgcatgaagacatggcagcgctggcaggatgcccaa

SEQ ID NO: 10992 - DNA, 90 bp, Homo sapiens
ctccctcgtgagttgggcttggtaccgtgctgcccagaatgcccttcgggaggcaggaaatgatggggagcctggagttggggcctgagg

SEQ ID NO: 10993 - DNA, 100 bp, Homo sapiens
cctgggctccctagccggctgcggtgtgagaatggagtgggcaggaaagcagcgggactttcaggtcttaattacagagcacggtgacctgggtaatagc

SEQ ID NO: 10994 - DNA, 83 bp, Homo sapiens
actagctccaggttaggccgagctttgcgggaaagcagcgggaaatcctcattgacgattcaatttgttgaaggccaatttgt

SEQ ID NO: 10995 - DNA, 51 bp, Homo sapiens
ttcaagggaaccttccctgatgcggccatccgggatggtgtcattgaggcc

SEQ ID NO: 10996 - DNA, 100 bp, Homo sapiens
cacttaaaagtggaaagatgacggatgaaaagaatgaacactgtccttcaaaacgagaaaaaggcctgtgtcatatcaacacttatctaacagcatggca

SEQ ID NO: 10997 - DNA, 76 bp, Homo sapiens
gtcattggctttgctaagatgataccaggattcagacaccactcaccaacagcgaggagtccctggatttcagcga

SEQ ID NO: 10998 - DNA, 100 bp, Homo sapiens
tatttggggccttcgcggtgggattaaaagcagcgaacctcgagaccaacgtggaggagctgtgggtggaagaaagctgtatacctgcacaagtggtggc

SEQ ID NO: 10999 - DNA, 151 bp, Homo sapiens
gcgcggtggccagcgcgcagaggcgggcgcggaggcggctagaaggtgaccgcggatcccagcttcctgcagccaggagaacaaggggtctgtggaaatcatgagaaaggacttgaatgacgcccgggacctgcatggccaggcagagtca

SEQ ID NO: 11000 - DNA, 98 bp, Homo sapiens
caaacagtcagcggggcccaattcccccactggcggcggtggcggaggtggcagtggcggtaccagaatgcgagacattgccaatctagctgatgaat

SEQ ID NO: 11001 - DNA, 100 bp, Homo sapiens
caccattaagaggaaagcgatggaggagctgagcgctgatgagatatacctgtgtttcccacaatcacagccactgtgacttttcaggagtttcgatacg

SEQ ID NO: 11002 - DNA, 75 bp, Homo sapiens
agaagcacaagaaggaccttcacccattgtttgatgagacctttgaattaggcggggtttcaccatgttgcccag

SEQ ID NO: 11003 - DNA, 75 bp, Homo sapiens
aagggaacctcagctctctctgccctgttggagatggaggccagtcagaagtgacagagctgaatgaacctctct

SEQ ID NO: 11004 - DNA, 100 bp, Homo sapiens
cttccagctcactgtggagatgtttgattacatggattgtgagctgaagctttctgaatcaggcggcagaactacatcggggccaccaaatcaccactct

SEQ ID NO: 11005 - DNA, 96 bp, Homo sapiens
tttcccctgagcctcagcacctgcttgtttggaagatgttccatttaagcagacctcttccatagctgtagctggagcggtaattggagctgttct

SEQ ID NO: 11006 - DNA, 82 bp, Homo sapiens
cgacgccggcgagttcgtggacctgtacgtgccgcggaaatggctgaccccgcactacatctacccaccagccatcgtgcag

SEQ ID NO: 11007 - DNA, 90 bp, Homo sapiens
ggaaaatgcaagaagactgatggagcaggcttgcaatattaaagttaacgtccctaaaacccgccggactttctgtaagaagtgtggcaa

SEQ ID NO: 11008 - DNA, 81 bp, Homo sapiens
gatgatgtgcgggttcaggaggtacccaaactgaaggatcttttgccagaaatgagggcatactggcctgacgtaattcac

SEQ ID NO: 11009 - DNA, 100 bp, Homo sapiens
cgctgtaagaagcaacaacctctcctcttcgtctccgccatcagctcggcagtcgcgaagcagcaaccatggatcaagtcttccataccagggaccaggc

SEQ ID NO: 11010 - DNA, 75 bp, Homo sapiens
gcaccacgacatcatcttcccctttgagtttgacaccacagtcaggagatcgtcaacttcaactgccggaagctg

SEQ ID NO: 11011 - DNA, 100 bp, Homo sapiens
cccggacggaagtgcctctccgacagcagatccaggctcggagctccagacgctgggacagacatatctgaagagatggattaagaatgctttggattaa

SEQ ID NO: 11012 - DNA, 83 bp, Homo sapiens
cagatgaagtgtgagcactgcacgcgcaagagatgttcgacaagcagcaggcgaacaccatcttctggagcccccaaggacag

SEQ ID NO: 11013 - DNA, 96 bp, Homo sapiens
ttcaaaatgaatggttacatatccaatgcaaactactcagtgaagaagtgcatcttcttactcttcatcaaccattctggaacttttcaaagcctg

SEQ ID NO: 11014 - DNA, 75 bp, Homo sapiens
taagctggagtctattcctggattcaatgtcatccagagcccagagcagctggcatactgtgtggtgcagttcct

SEQ ID NO: 11015 - DNA, 96 bp, Homo sapiens
atttggagttcttacaacatggcagacattgacaaagtatctgactgtcttctctcagatgattgcatttcatgatccagagctgagtaatcatct

SEQ ID NO: 11016 - DNA, 100 bp, Homo sapiens
ccgtggccaccctgtgggcctggcgctggaggcagcggtgcacgtgcaggaaactcccagtacagccagcagcaggccgggtaccagcagggtgccgcgc

SEQ ID NO: 11017 - DNA, 98 bp, Homo sapiens
cgtgtgcattacaggagtcctccacttgccactgggaatgtgccataccgaatccgtgtgcggctgtccagaaaacgtaatgaggatgaagattcacc

SEQ ID NO: 11018 - DNA, 90 bp, Homo sapiens
ttatcctccgttgcagacatggttcaaaggatgttgcttcagagtgtgaagtcaaatgcatgccaacattccagttttttaagaagggac

SEQ ID NO: 11019 - DNA, 90 bp, Homo sapiens
aaaggagcggggtcgacggtccccactttcccctgagcctcagcacctgcttgtttggaaggtacatgtcccagagcaagcacacggagg

SEQ ID NO: 11020 - DNA, 98 bp, Homo sapiens
gagcgcgggcaggcgggaggcaacggagctaccagccgtttcgaccacttggcacagtaacgatgacgatgtgtatagggcgcctccaattgaccgtt

SEQ ID NO: 11021 - DNA, 74 bp, Homo sapiens
ttaaggattccaagtaactcttatttggcagaagtcaattcatctggaaagactatctctgagtcagacttaaa

SEQ ID NO: 11022 - DNA, 100 bp, Homo sapiens
attggcaaagttattgccagcttcctggatatagacctgcagctaactggatttgatttataagagagaaatctgcagtcaatgcccactcttgccacac

SEQ ID NO: 11023 - DNA, 75 bp, Homo sapiens
cggaagagtgacagcatcctgattgattttgtagcccatgatgatattccttattcatctgctggcagtgatgat

SEQ ID NO: 11024 - DNA, 100 bp, Homo sapiens
gccaccccggtcaaaggatgctgagtccggagcgcctagccctaccggactacgagtatctggagagttggaaactcaactattggaacaatgtactgtt

SEQ ID NO: 11025 - DNA, 90 bp, Homo sapiens
agaagaagggaaggcgcgagtgaggaaaggaggtactgtaggaaattgacaatggcccttcagctatgctaggtctataatgggaagtgt

SEQ ID NO: 11026 - DNA, 96 bp, Homo sapiens
gaatgagcctgtgccaagatccggacctaatatatatgaactcaggtcttaccaactccgagtcatttcattagagaaattgaaggattttggtga

SEQ ID NO: 11027 - DNA, 82 bp, Homo sapiens
tgccgccggtcctgaccaccgtgaacggacagtcccccccagaaatgagccgtcagactgctacagcattacctaccggtac

SEQ ID NO: 11028 - DNA, 100 bp, Homo sapiens
ttgggcctttggacttgttttgtgggaagtggccaggcggatggtgagcaatggccagaagcggactcctagaagaggggagcagcaaggatggaatgac

SEQ ID NO: 11029 - DNA, 135 bp, Homo sapiens
ggaaacttgcagagaatgaaatcactttgtgtcaaaaagaaataactcagctgaagcatcaggttgccaagacattgaaaaagaacgaaagcctcaaagcctgtattcgctgtaattcacctgcaaaatatgatt

SEQ ID NO: 11030 - DNA, 75 bp, Homo sapiens
cgagatcttccgcaacctggagaacgccaagcgcttcgccatcgacatagatgagcagcaccagcagtaagaggg

SEQ ID NO: 11031 - DNA, 96 bp, Homo sapiens
cttcatcaggggctctgaggacggctgccccaacaatgagctggagaacccaccctacgtgcctggtgggcctttgcagaacgggcagccctcagc

SEQ ID NO: 11032 - DNA, 75 bp, Homo sapiens
ccacattcaggggaaccgcctcaccgttctgcccccagaactagtgtttcaggctgcatgtaccaagtagttcag

SEQ ID NO: 11033 - DNA, 90 bp, Homo sapiens
ttcatgaaatacttcagaaagacagagattttactgctgaagattatgaaaaggtgactatgaaaggcttatatttccaacagagttcca

SEQ ID NO: 11034 - DNA, 75 bp, Homo sapiens
gaggtggcagcgcgagctgggaccagcgtctcggaggcgccgcagcttccacagcgcggcacctgtacctccggg

SEQ ID NO: 11035 - DNA, 82 bp, Homo sapiens
gccacggccgtctctggagagcagcaggattcctaccggaagcaggtggtcattgatggggagacgtgcctgttggacatcc

SEQ ID NO: 11036 - DNA, 75 bp, Homo sapiens
agcgacctacccactacaatacctcttgggactgggctcgatttgagggggcaatggcggcttcctgtgttctac

SEQ ID NO: 11037 - DNA, 100 bp, Homo sapiens
gctttcttaaatattatgctacagaatttgagtttgcagctaaaactgtgcacagtgggtcattgatgctagtcacagtggaactgaaggaaggctctac

SEQ ID NO: 11038 - DNA, 71 bp, Homo sapiens
gagccggggcgaagctggatcccctagtgctgttccctcgtcacaccaatgccagtgctcgagacaacacc

SEQ ID NO: 11039 - DNA, 96 bp, Homo sapiens
aaaccattgccctggcagagggaacctacccagtccattgctgcctgctacaagtgtcacaccatgtctgaccggaaggcagtgatcaagaacgca

SEQ ID NO: 11040 - DNA, 74 bp, Homo sapiens
cggcggccttcgaggaggtcatgaaggacctgagcctgacgcgggccgcgcggacctcctgccccccgaggtct

SEQ ID NO: 11041 - DNA, 83 bp, Homo sapiens
ttatcctttggaaatgtgctcacactataaagagaggcctgtccagtctttgaaaacatcaagagatacttcaccctcaagtg

SEQ ID NO: 11042 - DNA, 75 bp, Homo sapiens
ctggcggacaggcgacagcgacctgcggcaggtaaaatgtcggttccaggaccttaccaggcggccactgggcct

SEQ ID NO: 11043 - DNA, 50 bp, Homo sapiens
tcttcgagttcttcgtgctgctcaaggcctgacctctcgggacacaccca

SEQ ID NO: 11044 - DNA, 96 bp, Homo sapiens
ggccttccagtacacagacgagcatggggaaggcattctcatcaccaccatcgcttccaagggtgagctgcagatgtggcccgagctgctgcccca

SEQ ID NO: 11045 - DNA, 100 bp, Homo sapiens
gaaccagatccgggagcacgtcatcgccatcgaaggttcatatttggtgcttagacaaattcaaaatgaggaaacatcggcacttgcccttagtggccgt

SEQ ID NO: 11046 - DNA, 100 bp, Homo sapiens
tgaccctgtcataaagaaaattgcccttcgggaaatccgaatgctcaagttaaacacagtgggaatatcacttttgatgagattgtcaacattgctcgac

SEQ ID NO: 11047 - DNA, 98 bp, Homo sapiens
attaaaacagaatatcctgagaaagagtttgaacgccatgaccctgtggatgggagaattactgagaggcagtttggtggcatgctacttgcctacag

SEQ ID NO: 11048 - DNA, 142 bp, Homo sapiens
acttagtccgccccctcctggccccctcgagctgctcttgcacccctgggaggccagtcccagattgtactggtgagcccgtggtagcagcagaagcaggcattatgggataacgattgtgtaaagaaacagcttcttcatt

SEQ ID NO: 11049 - DNA, 55 bp, Homo sapiens
cagggaaccctggtcaccgtctcctcagccgctccgggaattctgaagttctggg

SEQ ID NO: 11050 - DNA, 50 bp, Homo sapiens
tgctgccccccgacaccgctatcctaatgctgcttctaaattacttgggc

SEQ ID NO: 11051 - DNA, 100 bp, Homo sapiens
ggcccaaattgaggcgcaatgatgagaggatgtggtggtctactctgatgtcaatcttgagggctagggctggagcggctctgggctccggaatcgcccg

SEQ ID NO: 11052 - DNA, 83 bp, Homo sapiens
ccggaaggacaccaagatgcggatccgggcctttccggtgagcgagtgctgtgctttcatgggcctcttctttatgaagcaaa

SEQ ID NO: 11053 - DNA, 50 bp, Homo sapiens
gagtgttcaaaattcaattacacaattgcagagggaatggcatacatcga

SEQ ID NO: 11054 - DNA, 83 bp, Homo sapiens
caaacccaagaatgccttcttggcacctgcctgccttccaggtctcctcagtccccagaggaaggaagcactgcagagattaa

SEQ ID NO: 11055 - DNA, 100 bp, Homo sapiens
ccttcccaacatcgactccgagacctccgaaaagcgtttccgcagacagaagtggggagaagcggaggacctgaaggagaagaaggagaaggtggaggag

SEQ ID NO: 11056 - DNA, 51 bp, Homo sapiens
cggcgctcttcctcccggagtatgagtgatggtgatgattttaattacatc

SEQ ID NO: 11057 - DNA, 83 bp, Homo sapiens
ctaaaggccccatacaatgaagtagacattggtggaaacatttatggtattggaaggaactggccctgggcctctggaggcag

SEQ ID NO: 11058 - DNA, 89 bp, Homo sapiens
tgcttctgtctcgactgcactttgagaaggtcagcccaaggccaaccccactgtcactctgttcccgccctcctctgaggagctccaag

SEQ ID NO: 11059 - DNA, 86 bp, Homo sapiens
ggcgcgggaggtgaagttgctgctgttggggggatatgagactttctactcggaatatcctgagtgttgcgtggatgtaaaaccca

SEQ ID NO: 11060 - DNA, 88 bp, Homo sapiens
aagagggctgcaaggtgggaagtgaagtcagtgcctcagttgctggtttctgctttgggacaaccatacatctaattccttaaagtag

SEQ ID NO: 11061 - DNA, 101 bp, Homo sapiens
agaggaaatgaggcatgctccattcattcggaggcggatgaggcgtcttgccaacacggccccggcctggtaaccagcccatcagcacacggctcccacgg

SEQ ID NO: 11062 - DNA, 75 bp, Homo sapiens
ctcagaccttcatgagctgcaatctcatcactgagtggacccagagggacctggaacgcatggagaacattcgat

SEQ ID NO: 11063 - DNA, 100 bp, Homo sapiens
ctgacgtgtgatctcgagagacctgcgtacattcggggtgccagaaggaaagcatagccactgtgtcgaactcccagcaggcttaccaggaagcatttga

SEQ ID NO: 11064 - DNA, 114 bp, Homo sapiens
gaggcgaattctacagttactacaagtgcaagctggcgctggagcagcagcagcgctgttcggctcttgaatcccagcgatgaaaccaggaactcactttcccgggatgccgag

SEQ ID NO: 11065 - DNA, 100 bp, Homo sapiens
tactgggcaaagccacaagtcatacgcaggcagtgcttcaaaaaactatggaacaaaacagatccttggagaagattccaactccacagagtgaccagag

SEQ ID NO: 11066 - DNA, 100 bp, Homo sapiens
atacaattccactggaaaaactccaaccagataaagattctgggaaatcagggctccttcttaactaaaggtacaggtttgcagattccgccagcagcac

SEQ ID NO: 11067 - DNA, 83 bp, Homo sapiens
accgattttctgcagaagatgaagctttgagtaacattgccagagagcatttgacattgtgcagcaaagaaatggttatggag

SEQ ID NO: 11068 - DNA, 100 bp, Homo sapiens
ggaagtcggagtttgagccccggaggcagagcggctgccatgccataaggatgagtttaccattattcctgtactggttggagctctgagtgagtcaaaa

SEQ ID NO: 11069 - DNA, 75 bp, Homo sapiens
aaagaatttgccagatgtttgtccaagtggtaagaagttcagaagcaagcctcagttggcaaggtacctgggaaa

SEQ ID NO: 11070 - DNA, 82 bp, Homo sapiens
ggaggaacaaaggcgacccaagacacccagagagggacagcggagcgtgctttggacaccatgaattttgatgttataaagg

SEQ ID NO: 11071 - DNA, 75 bp, Homo sapiens
gcctcagccgccgccgccgccgttttcgcctgcagctgctcaccggtaagaatgattgatgttggctgatattgg

SEQ ID NO: 11072 - DNA, 114 bp, Homo sapiens
gtggatgtactcattaatcagggagcctcaatcttagtaaaagattacattttgaagaggacacctattcatgcagcagaaagcgaaattattattgacgatggacaatttgga

SEQ ID NO: 11073 - DNA, 83 bp, Homo sapiens
gatgtccaacttcaagcctttgattttgaagatgaccactttggaaatggaactgtggctgcaccatctgtcttcatcttccc

SEQ ID NO: 11074 - DNA, 101 bp, Homo sapiens
ccccatgtccacttcagtcatgacattcttccgggcagcaatgggatgtcagcatttcagatctgctcggtagacctggtgcaccaccaccatgttggctg

SEQ ID NO: 11075 - DNA, 75 bp, Homo sapiens
gctgtgacctgacggagtatctggaaagctcgggacaggatggtcttccgaccccgaactccaccggaggcaatt

SEQ ID NO: 11076 - DNA, 100 bp, Homo sapiens
ctgcaggctgagccacttccaaggctttctgttaaaaagttattagaaggaggaaaaggtactactgagcgagtgtgcttgatccagggaacggttgaag

SEQ ID NO: 11077 - DNA, 75 bp, Homo sapiens
ggaacagcagaaagtccttcatgaaaccattaaagttttagaagatcgagacagggtcttgctctgttgcccagg

SEQ ID NO: 11078 - DNA, 83 bp, Homo sapiens
cgtcgtgatccagaagtccagagctgaggactgcctgtttgcagtaaaggcatgacttcctggcaccacagggaaaatcgggt

SEQ ID NO: 11079 - DNA, 50 bp, Homo sapiens
ggatggcttgcagaagacgctatttgaagctcttcgtgggcggtcttgac

SEQ ID NO: 11080 - DNA, 100 bp, Homo sapiens
tcaggtggaggtaggacctgtgctggccgcgggagaggtaaacagaacaccaggacatcccagagtctgggaaatggatgtacagttacccagcacgtgt

SEQ ID NO: 11081 - DNA, 130 bp, Homo sapiens
aaagtcaccgtgaagaccccgaaggaaaaggaggaattcgccgtgcccgagaatagctccgtccagcaggaatccagatcttacataagatggaagtctctcacactagatactgaacattaaatagaaa

SEQ ID NO: 11082 - DNA, 100 bp, Homo sapiens
ctttatatcctgacactatgaatgctacttggatgcctcttaagatttgagttctgtgaacctgcatttgttgttggtaattgcctccagatagcttctg

SEQ ID NO: 11083 - DNA, 50 bp, Homo sapiens
gccactcagagtcgcccgagaagagcccacgtccccagctcacttctccc

SEQ ID NO: 11084 - DNA, 75 bp, Homo sapiens
cccaacatcctgctcctgctcatggacgacgaggcccctggctcaatgatgccacctgcagctgcccaaccctcc

SEQ ID NO: 11085 - DNA, 101 bp, Homo sapiens
cggagataaattcccggaaccgcgattcggcgtgtcaggttttatggcaggcacacaaagaaaccctcagatggctcagtatggacctcaacagacaggac

SEQ ID NO: 11086 - DNA, 75 bp, Homo sapiens
aacgagaatgaagccatccaatggatgcaggaaaactggtttggtgcacctcgatttggaggaagtagggcaggg

SEQ ID NO: 11087 - DNA, 82 bp, Homo sapiens
cactttgttttcaatgacaccaagttggacgctatgctggaagaatttaagaaaggtcctcgatgggcttcctggaatattg

SEQ ID NO: 11088 - DNA, 100 bp, Homo sapiens
gtctctgattgatttaggatctagtagcagcacctgctgaacagtatcttcaggagaaactgccagatgaagtggttctaaaaatcttctcttacttgct

SEQ ID NO: 11089 - DNA, 75 bp, Homo sapiens
ccgctcaccaaccgcgtgtgggaggacaggccctcgtccgcagcacatgattaagtaccggtacatcccgttcac

SEQ ID NO: 11090 - DNA, 100 bp, Homo sapiens
ggatcgatattttgtcgaagaaactgtggaagtcattaggaacaatggtgcaagacaaaacttacctggggtccctacttatggttttacatgcttcggg

SEQ ID NO: 11091 - DNA, 96 bp, Homo sapiens
ttcctccatcctggtattttttggagcttccatcctggttcttccaaagtgcccggacccaaaacaggaattgttgaatgttgggtcacgaagatc

SEQ ID NO: 11092 - DNA, 100 bp, Homo sapiens
tcccgcaagcccagacaatgccggtggaggaatttgtggctggctggatctctgttccaagatgagatgggattctccaacatggaagatgatggcccag

SEQ ID NO: 11093 - DNA, 82 bp, Homo sapiens
ctcttactactgctagtcgctgcaacactcctctacagtttgagattgagaggatccagaatccagatctctggaatagcta

SEQ ID NO: 11094 - DNA, 100 bp, Homo sapiens
cgacctgcagcgcccggctgcctcgcactccgcctcccccggctcagcccccggccgcggcgggacccgagggcaatgacatcattgcagcagccaagcg

SEQ ID NO: 11095 - DNA, 96 bp, Homo sapiens
gaagcggagaggcggtcgggatccgctgcgcgagctgtctcggtcccacgtgtgcgatggtttccacggtgatgtgtacctaacagtgaagctgct

SEQ ID NO: 11096 - DNA, 100 bp, Homo sapiens
ggccggtgagattggaagtggcggcggcggcaggcggcagaggggagaactctaagaaggagctgatgtggaggagcagctgagacagttcaagatgacg

SEQ ID NO: 11097 - DNA, 98 bp, Homo sapiens
tgaatatcctcttataattaatgcaataaaacgcttccatctttatccagaggtctcggcgcggaagatggccggcggcgtggacggccccatcggga

SEQ ID NO: 11098 - DNA, 83 bp, Homo sapiens
cgggcaccatgagcgacgtggctattgtgaaggagggttggctgcacaaacgaggctgatcagctgaccgaagaacagattgc

SEQ ID NO: 11099 - DNA, 98 bp, Homo sapiens
gcgtccctgtgacctggccgatgaggaagtactgagcctgttggaggaactggcccggaaacaggaggacgtggccggactgtgccatgctgctccag

SEQ ID NO: 11100 - DNA, 75 bp, Homo sapiens
cgaggccgtggctgaggtgaagagcttgtgaacctgggcccaaacaaaatggtggttgacctgacagatcccaac

SEQ ID NO: 11101 - DNA, 73 bp, Homo sapiens
ggaaggaaatagcaacagtggtgaagaacattgggtgctttctgcttgaagttaccaccaaagatccttccct

SEQ ID NO: 11102 - DNA, 82 bp, Homo sapiens
aatagagttgagcctgtgggacacttcggaagctggcagggcggagatgctggaccacgccgtcctgcttcaggtgatcaaa

SEQ ID NO: 11103 - DNA, 75 bp, Homo sapiens
gttgccactcacctgaggatggatgctgagaacttgctggagtcacagccactgggatcctttctcatcagggtc

SEQ ID NO: 11104 - DNA, 83 bp, Homo sapiens
cgcaagcacgcgggacccatcgtctccgtgtggcaccgcgagctccgcaaagacaatgcagatcttcgtgaagactctgactg

SEQ ID NO: 11105 - DNA, 74 bp, Homo sapiens
atttgtacctgcaggcctcctacacctacctctctctggccgctacctgtctgaggaacccgagccctacctgg

SEQ ID NO: 11106 - DNA, 100 bp, Homo sapiens
ggcgggaagtgtgaagcggccaatggcacggaggcctgcgtgtgtcgtgaaaactacccctaaaagccaaaatgggaaaggaaaagactcatatcaacat

SEQ ID NO: 11107 - DNA, 95 bp, Homo sapiens
gtctacatttctgatttccattcttcttatagtctatggtagtttcaggtatcgagaaccttccctgcgaacttcagaggaacttccagctgatg

SEQ ID NO: 11108 - DNA, 89 bp, Homo sapiens
ctttcctctgctgccgctcggtcacgcttgagaatagtgacagtggtacaggaaagaaagaaaaagaaaagaaaaacagaaagggcaaa

SEQ ID NO: 11109 - DNA, 100 bp, Homo sapiens
atgcagagaaaagagatggaaacttacttgaagaaggttcgtgtaaattcattagtgtgcttaggaaagattttggaatacttggataagtggtttgtac

SEQ ID NO: 11110 - DNA, 100 bp, Homo sapiens
ctacatcctgcgggtgcctttgaaaatcaacgacaacttgagcacagagtgtcaatccatatctacaaggacagagactggataatgttgttgcaaagaa

SEQ ID NO: 11111 - DNA, 80 bp, Homo sapiens
cagaaactagcaccagccccaaatttcgtcaaaatgcagatcttcgtgaaaacccttaccggcaagaccatcacccttga

SEQ ID NO: 11112 - DNA, 76 bp, Homo sapiens
actctcggactgagaaacgcaaggtgctggagaatctggtaaaagcaccattgtgaagcagatgaggatcctgcat

SEQ ID NO: 11113 - DNA, 74 bp, Homo sapiens
ttttggacctgaaacagaaattctggaacacctatatgttctgtgatatgagcaacaatggaccagaagatttt

SEQ ID NO: 11114 - DNA, 75 bp, Homo sapiens
cctgaaccggcacctgcacacctggatccaggataacggaggctggccaagttctatagaaattttagagtattc

SEQ ID NO: 11115 - DNA, 74 bp, Homo sapiens
gggcttggtggagaaggctatctcaatttcatggattccttcgcctcagaaaccaatctagattttagaagtgg

SEQ ID NO: 11116 - DNA, 100 bp, Homo sapiens
cctgagcagggccaagctgaaggcctccagcaggacctccgccctcctctccggctttgccatgagagacaagagagacacctccaacttcgacaaagag

SEQ ID NO: 11117 - DNA, 74 bp, Homo sapiens
ctcgcgctcttcctgacccccgagcctggggccgaggtcagccatgtcatctgagcctcccccaccaccacagc

SEQ ID NO: 11118 - DNA, 75 bp, Homo sapiens
agaagattgctggatgttatgaaaagaatcttttatggggggctattcctgacattcagacaactgacttgtaac

SEQ ID NO: 11119 - DNA, 100 bp, Homo sapiens
tccgcgggaagatggcggcgccgctcatccccctctcccagcagctacgagttccagggagctctgtcctggtgaccgtgcccgggttatgacgactaat

SEQ ID NO: 11120 - DNA, 100 bp, Homo sapiens
acttgagactcaggagctagagcctaaatttaacctgatgcagattcttcaagataatggcaatcttaggtcccgttcaagaagttcttccagttcgcag

SEQ ID NO: 11121 - DNA, 83 bp, Homo sapiens
ccgactaggcgaattcacttactgaccggcctgggctgctctgagacatgacaaattcctgtcccttgtgccgctatgagctg

SEQ ID NO: 11122 - DNA, 82 bp, Homo sapiens
cgacgcaaaccaaggatctggggatcttcgcactatcccaaggagttaaagaggattgcactgcctccatggaaccttcagc

SEQ ID NO: 11123 - DNA, 75 bp, Homo sapiens
tatgagagtggataatataatcaactcctctgcctggccatcatctctcagcaaggtgacatatttgtttttgac

SEQ ID NO: 11124 - DNA, 99 bp, Homo sapiens
aggacaagaacaccttcttcgaggggctgtacgaggtccagccctgctgggagttttctgccacacagatttgcggaagaacctgaccgtggacgaggg

SEQ ID NO: 11125 - DNA, 100 bp, Homo sapiens
aacaacctggcggtgctcgagtgcctgcaggatgtgagggaggaatcccgttctgcttccagaagtggaagtgctcacggatcggggaaatctgcaaggc

SEQ ID NO: 11126 - DNA, 100 bp, Homo sapiens
ggcaagcccatgtgtgttgagagcttctcagactatccacctttgggtggacatggaaggcaacgaacaggatcaggaccagtggatgatctaggtagac

SEQ ID NO: 11127 - DNA, 121 bp, Homo sapiens
gtatgaacaggtgcatcctgatgacgtggagaagctgagagagcaactgtgcacctcagaaaactcaatgacagcttcagtatcagacacagcacagcagccatctgaagagcaaagcaag

SEQ ID NO: 11128 - DNA, 96 bp, Homo sapiens
tggtgcacccccagtgggtcctcacagctgcccactgcatcaggaactgcccccactaggccttcctgccctgcagtggctgaaataccattgagg

SEQ ID NO: 11129 - DNA, 99 bp, Homo sapiens
tccagcaacatcttgtccataaggctgaaccggcaaatgagctttgagaaaggccagggcgtgctcattgggaattggactggggactacgaaggtggc

SEQ ID NO: 11130 - DNA, 50 bp, Homo sapiens
agtggagcaaatggtggctttcattggatgacagcatattaaagtgagtg

SEQ ID NO: 11131 - DNA, 100 bp, Homo sapiens
cgtttctctgttgtctcggtagaaggccagagtcacacacggtcctaagagctgggcaccaggaagcgaaggctggaatagcgggttttgcagcaattgt

SEQ ID NO: 11132 - DNA, 101 bp, Homo sapiens
caagcaactttttgagtccggaaaaacaggcagcggaggaggagaaagagatggacctcccggactcggcctcgagggtcttctgcggccgcatcctgagc

SEQ ID NO: 11133 - DNA, 100 bp, Homo sapiens
gaaagtcctaggctaatgttcagacgatcggagcttggccagtgctggcaacacctttatctcagcggacaaggcaaaatctcagcaagttcggacctct

SEQ ID NO: 11134 - DNA, 75 bp, Homo sapiens
gagtccctgatggaattatgcagtttattaaggtgggagatgagggagcaggccacttcgtgaagatggtgcaca

SEQ ID NO: 11135 - DNA, 100 bp, Homo sapiens
ctctgcagcctctctgacaagtgtgcgtttgcttctgaggatctccagtgtcacaacaaacacatgccagccctgttttacagggagccctggaggagtt

SEQ ID NO: 11136 - DNA, 116 bp, Homo sapiens
gcctggaaagctacagcaatgggaaagaactatgtgaatgggaagactttccttgagaaaagaacaacatagacgtttgtcctgaatgtggtcacctgaaacagaaacatgtcctt

SEQ ID NO: 11137 - DNA, 90 bp, Homo sapiens
agcagaggctgtttgacagagcagacttaccctgaagtagttagaatgatccatgtaaaagctcattttgactatgacccctcagatgac

SEQ ID NO: 11138 - DNA, 83 bp, Homo sapiens
ctggttttatcgaggagcttccggaagagaccagcccgagcgggaagaagttccgcagcaagccgcagctggcgcgctacctg

SEQ ID NO: 11139 - DNA, 90 bp, Homo sapiens
atgaaaacaaaatagcagagaaacctgactgggaggcagaaaagaccactgaatctagaaatgagctctggttgaagaagtgtattttgc

SEQ ID NO: 11140 - DNA, 100 bp, Homo sapiens
ttgcaggatttggatgttgccttaaagaagaaagagcgtgccgaacgaaggatgggagcaaagtgtttacggcatcgtgtgataaaactgccaaaatgtg

SEQ ID NO: 11141 - DNA, 100 bp, Homo sapiens
ccgagacgatggcggagggagataatcgcagcaccaacctgctgaatgtttctccatcccagagagatgaagtaattcaatggctggccaaactcaagta

SEQ ID NO: 11142 - DNA, 96 bp, Homo sapiens
gaaaagtaacaggagcaaatactgggaaaatatttgccatgaaggtgcttaaaaagccaatggagatcttcgtggatgatgagacgaagttgacgc

SEQ ID NO: 11143 - DNA, 83 bp, Homo sapiens
gtccgcccaggcgcagatgcgggccctgctggaccagctcatgggcacggctcgggacgatcctgataacttaagtgactctc

SEQ ID NO: 11144 - DNA, 51 bp, Homo sapiens
acagacacaaggccagaccacagcccaattgcagaggttacacatcgatac

SEQ ID NO: 11145 - DNA, 100 bp, Homo sapiens
aagaattagaaactccaatgagagaacgttttaggaatctagatgaagtgacttatgtcagaaacacatcttctgagcaagaagaagtagtagaagcact

SEQ ID NO: 11146 - DNA, 100 bp, Homo sapiens
tgcatgtctggctacctcgtggacaagtttgcagatcgggagcgcaaggtcgccctcaaggccatgatcaaaacgctggatccagacccctttgtgcggc

SEQ ID NO: 11147 - DNA, 74 bp, Homo sapiens
gagttctcgggcagaggcgacctccccgcgttccatgcgcacagggacaggggccaccagcccctcgggttcca

SEQ ID NO: 11148 - DNA, 80 bp, Homo sapiens
tcaaggtgctctacaagctacaccttcccccagcatcttcatgatacagttaagaggaatcttgacagcgccacttcccc

SEQ ID NO: 11149 - DNA, 90 bp, Homo sapiens
gaaaaggtcactgccatctggagtggatggacacacctggttgctcagacagtcacagttgcagattatatttctagagctgagtctcag

SEQ ID NO: 11150 - DNA, 100 bp, Homo sapiens
accccgagtattctcccgatcccagtatctatgcctatgataactttggcgtgctgggcctggacctctggcaggtattcgtggacaccgtagggatgcc

SEQ ID NO: 11151 - DNA, 101 bp, Homo sapiens
gaagtggccgcacagtatagtgaagataaagccaggcaaggggagcccatggaggagaggcaccaacaggtataaaggactccagtgacacattttggctt

SEQ ID NO: 11152 - DNA, 100 bp, Homo sapiens
gtcctttatatagaagggagagtaggggaggaagttgccttgtactgtgccaaatatcttcctgatatcatcaaagatcagaaggcctacaaggaaggca

SEQ ID NO: 11153 - DNA, 90 bp, Homo sapiens
aactatcagaatgggaagaacaatgtgccaaggctgaaattatcctacaaaggcatgacagcaagcgctgtggcggctttgatcctcatg

SEQ ID NO: 11154 - DNA, 90 bp, Homo sapiens
ctgctcatccattctcctgccacccccagacctcctcagctccaggaagtattacttaattcacctctacaggaggaacataacttcccc

SEQ ID NO: 11155 - DNA, 101 bp, Homo sapiens
ggaccctggaggtgcagagcgactactccaggcagcctggcatcctcgctacaacctcattgttgtgggccgatacccagatcctaatttcaaaagttgta

SEQ ID NO: 11156 - DNA, 76 bp, Homo sapiens
cactcaggaaattgcaaggatttttgaagatctatgccaggaaaggcctccaggcccaaggtcagcatcccactgt

SEQ ID NO: 11157 - DNA, 100 bp, Homo sapiens
taccccatgccatcaacctgcgtgaggtcaacctgcgcccccagatgtcccagctccaattaaggaacagctatatcctgcttccttctgtaagcagcat

SEQ ID NO: 11158 - DNA, 75 bp, Homo sapiens
acccctttttatccactcattggcagagaagctgatggtcttgttaatgtaggatggatggactgtgccacccag

SEQ ID NO: 11159 - DNA, 90 bp, Homo sapiens
ctacagcaggacttccagaacatccaggtgtggcggctgatgctgagtctagggctacagccgagccgggacagctacaacctgctgttg

SEQ ID NO: 11160 - DNA, 100 bp, Homo sapiens
cctcatgtggggggtaaaccactcgcatgaacaggctgaacactttgccacgaggcttcggctccctgccagctcttgaggttctggacttgacgtacaa

SEQ ID NO: 11161 - DNA, 95 bp, Homo sapiens
ggacgtggtagtttattactgaggattgtgcagactggtgcttaaaatggaagtcgatattaatggagagtctagaagtaccctgaccaccttgc

SEQ ID NO: 11162 - DNA, 100 bp, Homo sapiens
ggcggttctgcgtacccctctcccgtggggtagagcagcggctgccatgctcttctgtggcttcatcatcctggtgatctgtttcatcctctccttcttc

SEQ ID NO: 11163 - DNA, 83 bp, Homo sapiens
cgagagcaagctctataagattcttcaaggtggggttggcatcccccacatacggtatcagaagcatgtgcacacgtatcgca

SEQ ID NO: 11164 - DNA, 83 bp, Homo sapiens
gtgcccatcccggggggcagcaacggcgacatccagcaaggggtgagcccctccagactccgaataggagatcaagagtttga

SEQ ID NO: 11165 - DNA, 50 bp, Homo sapiens
atccagccctatcagatccccatcacagtgaaaaaacagggttccaggaa

SEQ ID NO: 11166 - DNA, 75 bp, Homo sapiens
ctggcgagcctgcaggatggcgcggccgagtccccgtacggccacccggcggaggctgaggggatctggcggtgg

SEQ ID NO: 11167 - DNA, 100 bp, Homo sapiens
ctcaggaattgagaacaatgacgaccaatagctcagatcctttccttaacagaacacacatgcaggacttgaaagatgttactaataatgtccactatga

SEQ ID NO: 11168 - DNA, 88 bp, Homo sapiens
gtgggagcggccagctaggagcgctctgtggtgcctggggctgaacgcggctttctggtgaaaggaaagcaagccaggatggatattt

SEQ ID NO: 11169 - DNA, 75 bp, Homo sapiens
gcttcccgtacatgacgccggtgcagtatacgctcaacggcaagaaagtggaagttgccgtcaaacagatcatcg

SEQ ID NO: 11170 - DNA, 83 bp, Homo sapiens
ccagaagtgacacacaccaaacctggctcccgtcttcgtcaggaagattttccacctcgcattgttgaacacccttcagacct

SEQ ID NO: 11171 - DNA, 98 bp, Homo sapiens
aaccaggcatctctgggtgggcaacttacccgagaacgtgcgggaagagaagatcatcgagcatttcaaacgccattgttaaccccaaacagcccaag

SEQ ID NO: 11172 - DNA, 97 bp, Homo sapiens
ggaaggggaaggaaacctctctgaaatctgacacctgctctcccggcaaggaaacttcgcaggctggtgctccatatgtttgagatccattttgtcc

SEQ ID NO: 11173 - DNA, 75 bp, Homo sapiens
ctgggtgagaacagcgaagtcttgaagagtggccgggtccaccttcatccgaagaggctgaatcataaatataac

SEQ ID NO: 11174 - DNA, 100 bp, Homo sapiens
cccgaagctacttcaccgtcccacggggagttcgtctgcacttccacaatctggtgaagggtctgaccgatctgtcagcttgtaaagcacagctggggct

SEQ ID NO: 11175 - DNA, 75 bp, Homo sapiens
ccggggatcgacaagctgcccatcgaggagacgctggaggacagcccgcaggatttttagactctgaggagcagt

SEQ ID NO: 11176 - DNA, 90 bp, Homo sapiens
cgctctgggagcctagaatgcatcagtgcccttgtggcgaatggggctcacgtcgagtgtgctccatcctctggtctccccattacaagg

SEQ ID NO: 11177 - DNA, 100 bp, Homo sapiens
ggcaagtggacattttactggctcaaatatgatgcttcctggtgtgtttagtggttggtgccattccaattttctgtgctgaaatcattctgaaaactca

SEQ ID NO: 11178 - DNA, 89 bp, Homo sapiens
cacaaagatacgaatctcttaaggggacacagggctgggtgactccgtatgctccagccccagtatctccagcaccaccagccccaagc

SEQ ID NO: 11179 - DNA, 98 bp, Homo sapiens
agagggatgcttctgagcggaaggctactctgaacgcccggacgtccattttggcagcagcaaacccaatcagtggacactatgacagatcaaaatca

SEQ ID NO: 11180 - DNA, 80 bp, Homo sapiens
caggactcggggctctcacgctttctgctcaagtcctgtcctcttctgaccaaagagtttgaattttgggaagattttga

SEQ ID NO: 11181 - DNA, 101 bp, Homo sapiens
gctgaaccacgctgaggggctgggagccgcgcacaccaccatcacatgtggcccggccagataagatttcaggagctgatattaactccatctgtcaggag

SEQ ID NO: 11182 - DNA, 100 bp, Homo sapiens
tagacggacatctgaaacctccatctcaccccctggatccagcattgggtcacccaaccgagtcatctgccattaaatgagatggaagacatcgtccaag

SEQ ID NO: 11183 - DNA, 83 bp, Homo sapiens
atgcaggcaggccctgagcacgctgctgtgtgagcagcaggaccaagaatcgccttcagccctgtctggtgcatccttggcag

SEQ ID NO: 11184 - DNA, 90 bp, Homo sapiens
cctcccaaagtgctggtattacagctactctcggaaccgcacgtttgacacgtacattgggcagggctacgtgattcctgggatggatga

SEQ ID NO: 11185 - DNA, 75 bp, Homo sapiens
gtaaccgctataatgaggatgatgcaaaggcagcaagagatgcacaggaggtcccagctagtccacagggaccag

SEQ ID NO: 11186 - DNA, 116 bp, Homo sapiens
acaggtagaagatctagaaaggagagttgcatcagcaagtttgcaagtgaagtgacaacactgcagctgaaggaggagttgctggatggagaggattataatttccttcaaggagc

SEQ ID NO: 11187 - DNA, 75 bp, Homo sapiens
gcaaaacgtgactccccacaataaaatgtggccccgtcccagagcaccacccgagacatcaggagcccatcgtgg

SEQ ID NO: 11188 - DNA, 75 bp, Homo sapiens
acagtatcataaaattcctctaaatgcattttcatatgagtccaacaagcaatgaagacctcaggaaaatcccgg

SEQ ID NO: 11189 - DNA, 78 bp, Homo sapiens
tggccttgaggaagaagacatgctctacagtgctcagtctttgaggaacccttctctgaagcaacagctcttctccta

SEQ ID NO: 11190 - DNA, 99 bp, Homo sapiens
agttattccagtttaggaggaagatgcaagcggtttgggaccttgaacaaggcaaatatggttttgatatcagttttagagaatgtggcgtggagaaat

SEQ ID NO: 11191 - DNA, 75 bp, Homo sapiens
agattatatcgcatcctatggctcaaagaaagatgattatggacaggccttcagtatttggcatcacctttacat

SEQ ID NO: 11192 - DNA, 100 bp, Homo sapiens
gagagcgcctgccgcccctgcgccgccgagccagctgccaggtgaatccgccatactacatcccgctggttgagctggtcccccacccggagacggcccc

SEQ ID NO: 11193 - DNA, 75 bp, Homo sapiens
cgacggaaatgtgtcatcgaaagccagccaggcccagacatgtccgtccttgtaagttaaaagcttccatgggag

SEQ ID NO: 11194 - DNA, 82 bp, Homo sapiens
aagacgtccaatctgagcgtgctgcggacggcgctgcggtacatccaggcagggaagttcagcatcattcccaccatcatca

SEQ ID NO: 11195 - DNA, 75 bp, Homo sapiens
cagatcgggatttacgtggagatcaagcgcagcgatgcagttggaattgatcacaccttttcagttgtacttcaa

SEQ ID NO: 11196 - DNA, 73 bp, Homo sapiens
tttccacctgggggccgaggagatcagtaggttaatccctatatcctgaagaagaacatgatcctcatgacaa

SEQ ID NO: 11197 - DNA, 100 bp, Homo sapiens
cccagatgccagtagtgcccgccccacccgcatgctctttgtcactccccggcggcagcacgaaagtaccatatgtgaactatgaagactttactttcac

SEQ ID NO: 11198 - DNA, 100 bp, Homo sapiens
cggattttgttcagactccaatcaccggcatttttggtggacacatcaggtacagtgaaggtgaaattcgatttaatttaatggccattgtgtctgacag

SEQ ID NO: 11199 - DNA, 75 bp, Homo sapiens
ggaaaatatcagtgcttcaccattaactagtaaagcagtacaagagtgttccttgcctgtatctccccttggttc

SEQ ID NO: 11200 - DNA, 83 bp, Homo sapiens
caaggcactgctttttcatgacgttagtacagaagaaactccaagcctcccagcccagcgagagtctcattcagctaatgacc

SEQ ID NO: 11201 - DNA, 93 bp, Homo sapiens
ctggccaaagcctgcccagacggctcacctgtgcgggatggaacaaaagaggctgacccgcggctgattgagtccctctcccagatgctgtcc

SEQ ID NO: 11202 - DNA, 96 bp, Homo sapiens
tgctgtatgggaagaaatagtaggagaatcaaatgataaactgcgaggacagagccactggctcctggatctcccaggtatcattgaaggtgccaa

SEQ ID NO: 11203 - DNA, 126 bp, Homo sapiens
gtgcagcccagaactgtcttctgaggaagaggtgctctcctgggcccccactgtccccaggcctcaggtgccagatgtgacatccagatgacccagtctccatcctccctgtctgcatctgtagga

SEQ ID NO: 11204 - DNA, 100 bp, Homo sapiens
ttcttaatgagacaactggtcccaaggcaaatgtggagttcatggatgtctggctctgggagaggagtggacagcagctggttgagatacatccccatct

SEQ ID NO: 11205 - DNA, 100 bp, Homo sapiens
ccagcatctggctgtcaggcggaagctgcattcatggaagaagagtgtgtggacactccaaaggaggtgttggaattggccttctccatcctgtatgacc

SEQ ID NO: 11206 - DNA, 90 bp, Homo sapiens
ctctgaccatgtggaattcccagtacgacaggcaggttgggcccatgagatgtgtgctctgtatattccggaggtacaatttgccagtgt

SEQ ID NO: 11207 - DNA, 100 bp, Homo sapiens
caggccttcaaccactatctcagtgcaatggccggaggcagtttgggcccaaaaccaaggaagaggtgaagatcattgagcaccaaacacagaccctgcg

SEQ ID NO: 11208 - DNA, 50 bp, Homo sapiens
gcctgagcatcgttgggaaacgatttgtattgaacgatgtcttgagaggg

SEQ ID NO: 11209 - DNA, 83 bp, Homo sapiens
agtgggatgtgtagactgttcaatgcaacaaggcaaggaagatgatccctatgatcttgaagatgtttctgcacagaaatgag

SEQ ID NO: 11210 - DNA, 100 bp, Homo sapiens
tgactcacaccccagaagcatcctccttgcctcctaattactgccccttcactcctttctaaagtctccctttcctggtgatgatgaagaggaagttttt

SEQ ID NO: 11211 - DNA, 100 bp, Homo sapiens
agccaacctatgttgccctgagttacataaatagataatacatatgtgtcaagttcagagaatgatgaagatgtgctagttactacagagccaataccag

SEQ ID NO: 11212 - DNA, 75 bp, Homo sapiens
attactcggaggcagcaaaggtggctgctaatgcaccaaagcttcttggacacttaatgattgttggcaagaaat

SEQ ID NO: 11213 - DNA, 51 bp, Homo sapiens
ccgccgccaccacccactccggacacaggttacagcacggtcaccttcgac

SEQ ID NO: 11214 - DNA, 76 bp, Homo sapiens
gagaaagtttagaggatgaagtgacccctggactcccgacagcagaatcccagttgtccctcatatcacagatgca

SEQ ID NO: 11215 - DNA, 101 bp, Homo sapiens
gcttgtccttgctggtgcatgcgtcgtcggcctctgggcagcagctttccccagacatggccaacaagggtccttcctatggcatgagccgcgaagtgcag

SEQ ID NO: 11216 - DNA, 90 bp, Homo sapiens
aatagtgatagctttgataagatgtgggggctcaaggttctgctgctacctgtggtgagctttgctctgtaccctgaggagatactggac

SEQ ID NO: 11217 - DNA, 75 bp, Homo sapiens
ccgaaccggcgctcctgcccccggggtgacgcgcagctcccagccgagcattgaatgaaatgtggaaatgtcaaa

SEQ ID NO: 11218 - DNA, 75 bp, Homo sapiens
ccgtgggagccagcgagcctctctccctgatcttacgtgctcaagataatttctgctgctgaaacattgacattg

SEQ ID NO: 11219 - DNA, 50 bp, Homo sapiens
gatgaactgataaaacccaccagtctagatgtgaactatgaagactttac

SEQ ID NO: 11220 - DNA, 98 bp, Homo sapiens
agcgctgaaggcgcagcccggaggccgcgcggggctggagcggctctgggctccggaatcgcccgcagccggtactgcgggacccactgcggatatgg

SEQ ID NO: 11221 - DNA, 75 bp, Homo sapiens
gcagggctccccgtcggagtgcactgcgccggacacttcaattcgaagcattcagcaaacaatggcaaggcagag

SEQ ID NO: 11222 - DNA, 97 bp, Homo sapiens
gagacttggttccaggtgatacagtttgcctttctgttggggatagagttcctgctgacttacgcttgtttgaggttcttagactctgtgagtaaag

SEQ ID NO: 11223 - DNA, 100 bp, Homo sapiens
tgctaataaagttgcagcgaggagaagcgcagcgacggcgtcgggagagcgcgcctagccggctcgcgagagaaatccagcggtcgcaccgcccattaca

SEQ ID NO: 11224 - DNA, 82 bp, Homo sapiens
aatgttgcattcagccataaattctcaaaaggtatattaagtcagagtcaggataaatcacttcggagaatagcagaattaa

SEQ ID NO: 11225 - DNA, 87 bp, Homo sapiens
cggcttctgcctggtgctctgcgtcctcatcgggcttatgttcgagatcctgataacttaagtgactctctcttttccggtgatgaa

SEQ ID NO: 11226 - DNA, 89 bp, Homo sapiens
aaaaacactccaacgattgagatcatttaaagatgcgcctgtgtctggcagagctggtgtgagacgagacaatcctgccccgccgccgg

SEQ ID NO: 11227 - DNA, 98 bp, Homo sapiens
tgtctgaatcaggctttaaactgttgtgccagtgcttaggctttggaagtggtcatttcagatgtgattcatctaaactttccatgactggatcacag

SEQ ID NO: 11228 - DNA, 100 bp, Homo sapiens
aataaaatcaccagttgtatttttcagttattacaggaagcaggcccaagaggatgctgagaaacttcggtccgttgtgatgccaatggaaaaggaaatt

SEQ ID NO: 11229 - DNA, 83 bp, Homo sapiens
gtgctgggacttcccgtccgcggcgtggaggggacaagaatccttcaagaaacaggaaaaaactcctaaaacaccaaaaggac

SEQ ID NO: 11230 - DNA, 100 bp, Homo sapiens
gctgctggcgctctggctgtgctgcgcgacccccgcgcatggctgctgatactttggctgtgaggcaaaaaaggagaatttatgatatcaccaatgtctt

SEQ ID NO: 11231 - DNA, 126 bp, Homo sapiens
ctgggaccgccgaggggcccgcagccagggcaaaggtcgccgggcccggcccacctcccctgagctcgaggtacagccccgtggtggaggccggctcggacatggtcttccggtggaccatcaacg

SEQ ID NO: 11232 - DNA, 100 bp, Homo sapiens
gtcctggtggtgtcggccaagttcgaggggaaaccgctgcttcagagacacagtgatcagggccaaagcggtcagtgagaaggaagtggactctggaaac

SEQ ID NO: 11233 - DNA, 82 bp, Homo sapiens
cgacaagccgctggcagccgcggatctcaccgccgctcaggcgagcatgacctgggggaggacatctacgactgcgtcccgt

SEQ ID NO: 11234 - DNA, 100 bp, Homo sapiens
agagcttgctccctacgatgagaactggttctacacgcgagctggattatcattggcaatggcgttcattccttacgagtggctttactgcagtttattt

SEQ ID NO: 11235 - DNA, 75 bp, Homo sapiens
attgatgttttgccacaaattatttgttgttcagaggacaatcatctatctctccttggtgtatgtgcttggcca

SEQ ID NO: 11236 - DNA, 90 bp, Homo sapiens
ctttagcagacagcgtccacaatgtgaatcctacagtttccagggttgtggtctctccatgctgcccaggtcggactcctaggctcaagc

SEQ ID NO: 11237 - DNA, 98 bp, Homo sapiens
cggagacatggccaacatcgcggtgcagcgaatcaagcgggagttcaaggaggtgctgaagagcgaggagacctcgaagtagggggaaaactgcagtg

SEQ ID NO: 11238 - DNA, 75 bp, Homo sapiens
ggatcttgctcagtctctgtcagaggaagatcccttgatggcccactgcgtgaccttggttcagctgtccatttc

SEQ ID NO: 11239 - DNA, 82 bp, Homo sapiens
tcccagagggccggctggaacagtacatcccaattctggaggaagccgaccaccattgttgccaccgggaggaagatccaca

SEQ ID NO: 11240 - DNA, 90 bp, Homo sapiens
gtgccagacaaacctctccaccctcagtgacccggtgcagctagaagtccatatcgggtcagcagcctctggacccgtgaaagagctggt

SEQ ID NO: 11241 - DNA, 100 bp, Homo sapiens
tgttatcaacttaaaagatgccacctctaagggtctccttggcagctgtattctggagtctggatgttgctctctaaagacctttaataaaattttgtac

SEQ ID NO: 11242 - DNA, 75 bp, Homo sapiens
cctatgccgggggtgccgctcaggtgttcagcctgccaccgtcggtgctttggtgctctgcccaggagctggtgg

SEQ ID NO: 11243 - DNA, 82 bp, Homo sapiens
gccattgaaaaccatcagaacatgattaagcagtttaaagattcagaccaggatgtagcactcaaacttgcccaggagcgag

SEQ ID NO: 11244 - DNA, 100 bp, Homo sapiens
agccatctactcgtccgttaccggcattttgaaagcgaagcagaagccgtagaatcagcggcgagcctgttgaaagaacccacaggtgcatttcacagca

SEQ ID NO: 11245 - DNA, 98 bp, Homo sapiens
gcctggcgtgcactccgcacctcggggacattattgcgcgtggaacggctgcttttggaaggatgctgacaaaagtatcatcaggactttgaaggaac

SEQ ID NO: 11246 - DNA, 83 bp, Homo sapiens
agcagcgtgcgttcagccctgggcaggagcattggtttgaaaaggccctacgagacaagaagggcttcatcatcaagcagatg

SEQ ID NO: 11247 - DNA, 82 bp, Homo sapiens
ccctagtcccccgcgcggccccttattcgctccgacaagtgcctccggagccagcgtggtggccatagacaacaagatcgaa

SEQ ID NO: 11248 - DNA, 50 bp, Homo sapiens
cgacgaggaagaggaggtttctgaggtcaaaatgcagatcttcgtgaaaa

SEQ ID NO: 11249 - DNA, 82 bp, Homo sapiens
gcggcggcaagaaaaatgccagccagaagaggcgttcgctgcgcgtgcacattccggccgatacaaagcaggggaaaaggag

SEQ ID NO: 11250 - DNA, 75 bp, Homo sapiens
atgattcgtatctaagactctgggacactcctgaagtcgggaaatgcttcgagagctgtgcccaggagtgaacaa

SEQ ID NO: 11251 - DNA, 89 bp, Homo sapiens
acaataataaatccaaagaggagccagttaccatgactcatccagagacgatctgccgaccctctgggagaaaatccagcaagatgcaa

SEQ ID NO: 11252 - DNA, 75 bp, Homo sapiens
ggttgcagtatgtggccagttatttgcctcagtaaaagagtggggacccaaactgtatgcattgttccagatgcg

SEQ ID NO: 11253 - DNA, 83 bp, Homo sapiens
tggctgcggcggctggggccatatgatgggtgatgagggttcaggtaaggctggcctctctgcagtcagaggtctgagctctg

SEQ ID NO: 11254 - DNA, 100 bp, Homo sapiens
gaagggccaggagaggagcactttgaggacatggcctccgacgaggacatgagcacgtgaattgcctctgcttacgttcaggccctgtcctaaacccagc

SEQ ID NO: 11255 - DNA, 75 bp, Homo sapiens
gacctttcccgctggcgcgcagcctcagctaggagctcgaggccatgagcagatataccagcccagtgaacccag

SEQ ID NO: 11256 - DNA, 75 bp, Homo sapiens
gcccaaggagaatgcgctcttcaagcggatcttggaatgtatcctgtcaggtataatgtcagtgaatggcaagaa

SEQ ID NO: 11257 - DNA, 100 bp, Homo sapiens
aaaagagcttattgaaaactccttggatgctggtgccacaagcgtagatgttaaactgcaagatgagaagatgaagtgaatttatggattctggtttttc

SEQ ID NO: 11258 - DNA, 100 bp, Homo sapiens
gtacagaagagtattttgaaaaagcattacaaatatgaagaggcattatttatgaccttttctatggaaagcgtgaccagctaccagctctctgctggtt

SEQ ID NO: 11259 - DNA, 50 bp, Homo sapiens
tgtgtgcggaactcctcggaaccatggtactttgggttcatcaccaagca

SEQ ID NO: 11260 - DNA, 75 bp, Homo sapiens
tgaaccctgaagtcggtgtctgctgcgttcacggcaggattcggttaggacctaaagtgatccagacttctgcgg

SEQ ID NO: 11261 - DNA, 100 bp, Homo sapiens
ctcgcctcgactccaaatggttgaaaacagatatacaggcctccccatggccacccatggaccagtcggcattcacttcctcccttctgcggcccataaa

SEQ ID NO: 11262 - DNA, 82 bp, Homo sapiens
ttggaacaaccttctttccagtgctaaaggatctctgatctggttgtatcacggactgattcaccgagcccaaccgtactca

SEQ ID NO: 11263 - DNA, 80 bp, Homo sapiens
caggttgggaggagcggccgaagggctgcccttgagatggagttgctgcctctttggctctgcctgggttttcacttcct

SEQ ID NO: 11264 - DNA, 80 bp, Homo sapiens
ggagtggacttgattgatatatatgctgacgaggagttcaaccagtgcacgatctgattttctggagagatgtgaagaag

SEQ ID NO: 11265 - DNA, 50 bp, Homo sapiens
tgggctccggagcctcagcgccgcgcagcgtccagaggaccagaggttaa

SEQ ID NO: 11266 - DNA, 77 bp, Homo sapiens
tcccggccacctggggaccaccgcaggtggccgggatgcagtacctgcacggcgtcctgggccccatcatcaacaag

SEQ ID NO: 11267 - DNA, 101 bp, Homo sapiens
ttatttatgtcatcaagaagaatgacgatggaatagccaggccagaagaaggaaggcctgtggtgagtgggacaggaaatgacatcaccaccccaccgaac

SEQ ID NO: 11268 - DNA, 100 bp, Homo sapiens
aaggtggggcggcctgggaggaagcgcaagcaccccccggtcttgtccaataagcatgtggctcctgatcatcttttgcaaatctgccagcgcatcggtc

SEQ ID NO: 11269 - DNA, 74 bp, Homo sapiens
attccaagtaactcttatttgcctccgaaagccgccaggactctgctgtgaacctgacgggcaccaacggcagc

SEQ ID NO: 11270 - DNA, 97 bp, Homo sapiens
atataaaaaaagaaattagtgaaggagatgaagtagagccaactcacagccccgaaaaaatcttgaagttaccaaaagaagaagacagtgccaacct

SEQ ID NO: 11271 - DNA, 102 bp, Homo sapiens
ctctctgtggatcattgctgcctggaccgtccgtgtctgtgaaaggattttttatcaagcagaaatgcatcgaacaacgagaatcaagatcactgagctaaa

SEQ ID NO: 11272 - DNA, 100 bp, Homo sapiens
cggggactcccccaaagacaaggcctgcgtaagtgaggaaacagctgatcctgctcctgtggcctccagcctcagcgaccgaccagtgacaatgacagga

SEQ ID NO: 11273 - DNA, 51 bp, Homo sapiens
gtcagcactgactttcagctatggaatcgtgaaatcccattctctggctgg

SEQ ID NO: 11274 - DNA, 87 bp, Homo sapiens
ggacagtggcacacagataccgtttattaaaagagctgtggctgtggtatcacggaaaacttgacagaacgatagcagaagaacgcc

SEQ ID NO: 11275 - DNA, 100 bp, Homo sapiens
aggagaaggtgtcatctgtgtgggtgcggagtggcatgtgtacaaagataatcaatgctgattcggaggacccaaaatacattatcaacgtaaagcagtt

SEQ ID NO: 11276 - DNA, 75 bp, Homo sapiens
cagcatcttcgactccttcccgacctactcgccgaccttcatccgcggttgaaatcacaaagattagacaccttt

SEQ ID NO: 11277 - DNA, 100 bp, Homo sapiens
tctacagaagaaaccatcaggaataagctatattccccaggtcatacaacaattccctggcaaggcctgggttgccaactatgagagaccccgaatgaac

SEQ ID NO: 11278 - DNA, 100 bp, Homo sapiens
gccgagccggagctgcagcccgagcgcggtggtgccctcagccccgtcctcttgtcctcctcagcctcggcgggcaaaactgttccgatttgcctctgag

SEQ ID NO: 11279 - DNA, 98 bp, Homo sapiens
gtaatgtcaactttactgagaattttccacctcctgacacaacaccactcagactggtaatgaggaacaaacacggattaatctgaattgtactcaga

SEQ ID NO: 11280 - DNA, 100 bp, Homo sapiens
cagtgggggtgtgcaaacccgagagaactgggagagctcaaaggatggctactgacatgcagaggaagagaagcagcgaatgccttgatggcacattgac

SEQ ID NO: 11281 - DNA, 96 bp, Homo sapiens
ggaacagccacagcagcctcccaaggagtctgcaagttgagtctcattctgttaccaggctggaatgcagtggcgtgacctcagctcactgcaacc

SEQ ID NO: 11282 - DNA, 75 bp, Homo sapiens
cccagattaactctccgagtcggtgctggccaagacaagatatttggagcaagaggtggtggtggccttcccccg

SEQ ID NO: 11283 - DNA, 96 bp, Homo sapiens
tgtgaggcctccccagccacgtgaaactgccatcccaccacactcgtcccacctggcttgtgtcaatgttccattactgttcaccggctgcccacg

SEQ ID NO: 11284 - DNA, 78 bp, Homo sapiens
ctgtaccaaacgtggttgtacgagacgtggcctgtggcgctaaccacacgattatgatgacatttccaatcagataga

SEQ ID NO: 11285 - DNA, 90 bp, Homo sapiens
gacggaggagcttgtaccaccggcatgtggagaccccaaggcaaaaccatcctatcttatcgacaaaaacctggaatctgctgtgaaatt

SEQ ID NO: 11286 - DNA, 75 bp, Homo sapiens
ggatgatgacaatgtagaggatgacttctctaatcagttacgggttctcggaccagcagtgaccttcaaagtgag

SEQ ID NO: 11287 - DNA, 74 bp, Homo sapiens
tgcttcctgagtgcttctttcttggagctgaccatgtacgaattggagcaatgttggcttatacacctctggat

SEQ ID NO: 11288 - DNA, 112 bp, Homo sapiens
gccgcgaggaggcgcgggaggtgttcgagaacgaccccgagacggagcaggccgggctctcgccatgggtcactgtcgcctctgccacgggaagttttcctcgagaagcctg

SEQ ID NO: 11289 - DNA, 83 bp, Homo sapiens
cccagtatgggaaagatctaccttctggaagctactactacgtggtgcttggaaaggttcaaggtgtttgcagactatgaagc

SEQ ID NO: 11290 - DNA, 50 bp, Homo sapiens
aaagggaagcagaaccatactatagtacagttgtgaatttggctccgcga

SEQ ID NO: 11291 - DNA, 100 bp, Homo sapiens
gacagaggggagcacagagaaagagaatgatgaagagaaaggcccggagactgttcgagaaatggctgctactaccttaagcggtctgctacagtgtaac

SEQ ID NO: 11292 - DNA, 50 bp, Homo sapiens
atacagtcgcctctgacaagccagccgtttccctggggagatggtaacca

SEQ ID NO: 11293 - DNA, 75 bp, Homo sapiens
aggaggtggtagagggcatggatatctctactcgctccaaagccctgaccctctattctgcaccctgtgagccac

SEQ ID NO: 11294 - DNA, 83 bp, Homo sapiens
gtaactgaagtatctgcccctgtcaaatcattccagatcatatctgaagatattagtgagctacaaaagaatcaaactacatc

SEQ ID NO: 11295 - DNA, 101 bp, Homo sapiens
tgcgagtcttcggagcgaccccggcaggttttgtcaggttcttagaaggctattatattgtgttaataactaaaaggaggaagatggcggatattggaggt

SEQ ID NO: 11296 - DNA, 75 bp, Homo sapiens
cgcgcctttgtgcgcgcgccgagtcctcctgcatatgcccaagaggattgggagtggaatggacaccagcagaag

SEQ ID NO: 11297 - DNA, 83 bp, Homo sapiens
caggccctcgttgcccagatcgggctgacgcacgaggcacacaggaaggaggtggagcaggtgtatctgcgctgtgcggcggg

SEQ ID NO: 11298 - DNA, 83 bp, Homo sapiens
ccagatgttcttcctcttgcttgccagagtctcaggcctcaaggccggaacagtccgtgatgcaagctctcgagagtctcacg

SEQ ID NO: 11299 - DNA, 106 bp, Homo sapiens
gactggaccaagatcgagcccagcgtcaacttcctcaagtcgcccaaaggaagcggggagaggtggtgagagatgacccctgttgaggatttcattggtgtctgcc

SEQ ID NO: 11300 - DNA, 100 bp, Homo sapiens
ccccctggatcttcacacagctgcttccattggccagtatgaagtggtgaaggagtgtgtgcagcgggttatgtaccgaaggactctaccgtgtcagcgg

SEQ ID NO: 11301 - DNA, 100 bp, Homo sapiens
ccggacggaggcatcggaggcggctgcgagagtggcagaggagctggcggagagcggcctgcgggcgatcgggccgagggctgaagctgccctcgaggac

SEQ ID NO: 11302 - DNA, 100 bp, Homo sapiens
ggggaactgatggcgttcctgttacctctcatcattgtgttaatggtgaagcacagcgattcccaatggcttattcagaagagcataaaggtatgccctg

SEQ ID NO: 11303 - DNA, 83 bp, Homo sapiens
gcccttctctgccgtccctgggagaaaattgtacaagctggagataaggaccttgatgggcagctagactttgaagaatttgt

SEQ ID NO: 11304 - DNA, 83 bp, Homo sapiens
ccgagttcctgcagaagctgctccctggctactacatggacttgagcagccccagccagtacgacacaggtgttgcactgacg

SEQ ID NO: 11305 - DNA, 75 bp, Homo sapiens
ccgatcccagcaggacattgaaagatatgtcttgtcgttcaagacttgcaacactaaacgagaaattgacagccc

SEQ ID NO: 11306 - DNA, 100 bp, Homo sapiens
tgtgtggccccgtgtcctgcaggtattgggagatccacagctaagacaccgggacctcctggaagccaaaaatgggtgtgggccgaagatatgctcatgt

SEQ ID NO: 11307 - DNA, 97 bp, Homo sapiens
caagagtctgggtctccgggccaacctgaggggctaccctgagaggaatctacatgcagagaagttcaggagactgaactaacggaacgtcaggaag

SEQ ID NO: 11308 - DNA, 74 bp, Homo sapiens
ccagtcatcctcctgcctcagccacccaagaagctgggaccacaggtggaataacactcccatggatgaagcac

SEQ ID NO: 11309 - DNA, 98 bp, Homo sapiens
tttagcactgcaattcactcagcaaactgggactgttggtcaccctacctggcagccagtgataagatccaagacatcagtgtggagacagaagacaa

SEQ ID NO: 11310 - DNA, 82 bp, Homo sapiens
cttggactgagtcctgcaggacacagagttgaagtattgataacaccaaggaactctatcacaatttgaaaagataagcaaa

SEQ ID NO: 11311 - DNA, 100 bp, Homo sapiens
ccaggtggccgtgaagcacctgcacatccacactccgctgctcgacagcctatatatgcaaacagatttgcagtaccaacctatgcagccaagcaacctc

SEQ ID NO: 11312 - DNA, 99 bp, Homo sapiens
tgaacttggaccctacatgaaggatcttggtgcacagcatcaacaacagcaacttgtgattggcggtgaccggatattcagttgcacatccccacatca

SEQ ID NO: 11313 - DNA, 100 bp, Homo sapiens
atggaagcaccctctctgcattcccagaggaaacaggggcggcgactggcggcgcgatggacctgaccgggctcctgctggacgaagaaggcaccttctc

SEQ ID NO: 11314 - DNA, 74 bp, Homo sapiens
gattcctcctccttggtcgccgcgtccttggctggcgtatccagacatttaatgtggatgcaccatgccagacc

SEQ ID NO: 11315 - DNA, 118 bp, Homo sapiens
ctcacctttgtctccccgatctacggggctgacatcagcggctctttgtatgatgacgcctgggttctgaggaaaacgcaatggtggccatggacttgggctctccctcgctccctaa

SEQ ID NO: 11316 - DNA, 96 bp, Homo sapiens
gataccctttaactatatcccagctacaggcatttattaatacagcaaaagaaatttatgaaaaaattcaagaaggagtctttgacattaataatg

SEQ ID NO: 11317 - DNA, 100 bp, Homo sapiens
caggacccctatttcttagaagacccacttcctacatcagatgatggagatgggcaccaggacagcacagacaactgccccaccgtcattaacagtgccc

SEQ ID NO: 11318 - DNA, 75 bp, Homo sapiens
caaagttgtatggattgtatagagtgggcttaaaattgaattcagtggatccaacaatgagcattgatcttaaat

SEQ ID NO: 11319 - DNA, 90 bp, Homo sapiens
gggaaaatcacctttgcagaaaaggaggagtatttgaagacttctgagcggaggagtcgcatgtcagagctgtccttcagaaagataaat

SEQ ID NO: 11320 - DNA, 90 bp, Homo sapiens
cgggaagactcatcggagcgtgtggatttgagccgccgcattttttaaccctagatctcgatccagaagcagcaaggtctagcaattcca

SEQ ID NO: 11321 - DNA, 50 bp, Homo sapiens
gagccagttaccatgactcatccagggatagctgggagtatggccaccct

SEQ ID NO: 11322 - DNA, 100 bp, Homo sapiens
cctgaagtcagttgttgcatcaaatacttcatatttggcttcaatgtcatattttggatcactggggtgatcctgctggctgttggagtctggggcaaac

SEQ ID NO: 11323 - DNA, 99 bp, Homo sapiens
cacggccagagccctggatgtcatttggaaaaacactagagacagacggctggcagagaccttttgcctgaagattttgtggtttatacttacaacaag

SEQ ID NO: 11324 - DNA, 75 bp, Homo sapiens
ctgaggaccagcttcctctggactatgccaagatcgaagatttatcccagcaagcacaactagcagctgctgaga

SEQ ID NO: 11325 - DNA, 83 bp, Homo sapiens
atttggaagagtttttctctacagtaggaaaggttatgaagacagtatggagtttccagaccatagtagacatttgctacagt

SEQ ID NO: 11326 - DNA, 100 bp, Homo sapiens
gttcctgctgccctcaaggtcgtgcgtctgaagcctacaagaaaggtgctggacgtcattgctcctccttatacctctgacttcgtgcaacttttcctcc

SEQ ID NO: 11327 - DNA, 74 bp, Homo sapiens
cggcatcgtctttccgtcctctgaggcgacggccgcggctgcacagtaaaatgtttatcggtggactgagctgg

SEQ ID NO: 11328 - DNA, 97 bp, Homo sapiens
gaaagagtggatttcagcctgcacggatggtcttgaaacacaaatggtttttgtcattgaaattatgagactatcattcaaatggaagcattatagt

SEQ ID NO: 11329 - DNA, 75 bp, Homo sapiens
gatggtggtggtgctggtcatcaatgttactcaggtagaggtgatggatgtggacacactgtactaggccctgag

SEQ ID NO: 11330 - DNA, 82 bp, Homo sapiens
gccgccaaagaccccgtccggtagagatcctgaaggagctagacgagtgctacgagcgcttcagtcgcgagacagacggggc

SEQ ID NO: 11331 - DNA, 100 bp, Homo sapiens
gtgggaatgtgtcgccaccaacgtggtcacgagcatcactgccagcacccacctcaccgtcatcgaactctactacgatcgcgggaaccaccatgagttt

SEQ ID NO: 11332 - DNA, 83 bp, Homo sapiens
catctgcagtacaggatatgaagaaattgagggttcttgccatgtatatttaaagttggagttcgttgctaaagatggcagac

SEQ ID NO: 11333 - DNA, 75 bp, Homo sapiens
agtaggaaaccggtaccaggcagacatcaccgacttgttaaaagaaggccagctgcgggccgtccagcggctgtg

SEQ ID NO: 11334 - DNA, 50 bp, Homo sapiens
tgtgttactgaagtgaaatatcaaaatcaggaaacccaggcccaacggca

SEQ ID NO: 11335 - DNA, 76 bp, Homo sapiens
aagaagagagggacctggtgaaccgactgaaggtccagtgcacgtgccaacattacactgtcagggaagaagcgca

SEQ ID NO: 11336 - DNA, 75 bp, Homo sapiens
aactgatttcagaaatgcatagttttatccaggaaactacattctgaattacgtggcatcacagcccaagctggc

SEQ ID NO: 11337 - DNA, 75 bp, Homo sapiens
ttgaattactttgttatgcagaaagtgaatgtatcctgtcaggtataatgtcagtgaatggcaagaaagttcttc

SEQ ID NO: 11338 - DNA, 51 bp, Homo sapiens
cacgatgccctttgacttcaggaggtaaccaccatgatcccctgggtgctc

SEQ ID NO: 11339 - DNA, 97 bp, Homo sapiens
ttcgccacagttcctaccttatgagctcggttttcttatgcttataagagtggaacagatgaggacggggacttggttgccttttccagtgacgagg

SEQ ID NO: 11340 - DNA, 82 bp, Homo sapiens
cggccaatgtgggatcgatgtttcaatattggaagcgctttgatttacagcagctgcaggattctgaaaccttccttgtatc

SEQ ID NO: 11341 - DNA, 108 bp, Homo sapiens
gagagcagctgcattgcaggcacagggcccgatgagccagagaagcttggaaacagtactgctggagcaccctttcagtgctgtgaaacaagaactgcaaagaaaatg

SEQ ID NO: 11342 - DNA, 98 bp, Homo sapiens
ggaaacacctctacctcctgcgaggcctcccgggctccgggaaaactacactggccagtctgcgggccaggcatcgacatccgcaacgactatcagca

SEQ ID NO: 11343 - DNA, 100 bp, Homo sapiens
gaagcacacctgtaaaattaatgagattaaaaagctgctgaagaaagctgcttcaagatggagtcgggtggtacagttttgagtaccaactggtctgatg

SEQ ID NO: 11344 - DNA, 98 bp, Homo sapiens
atacctctgacccctccagggcagagacaagaaagcgcaaggaatgtcctgaccaacttggacccaggtgatggcccgctccctctccccacccccgg

SEQ ID NO: 11345 - DNA, 100 bp, Homo sapiens
ggagggtgatggcgagagcgagaggacccagtcccacatctcccagctctattaccaggttttaaacttcgccatgatcgtgtcttctgcactcatgata

SEQ ID NO: 11346 - DNA, 82 bp, Homo sapiens
gcggggccttgtgggagggcttaaggaagtaaaatggcggacctggcgaacgaagggggatatgagactttctactcggaat

SEQ ID NO: 11347 - DNA, 108 bp, Homo sapiens
gtggtccaccatcggtgacctcaccgcctcggttcgccctcagccgccccgacaatgcagatcttcgtgaagactctgactggtaagaccatcaccctcgaggttgag

SEQ ID NO: 11348 - DNA, 100 bp, Homo sapiens
aggccacacggcagccacgggggcagccgtcgcagtcgccgtcccacacgggctgcggacaccaagggttgctaataaaagcttcgatgatgaagaatca

SEQ ID NO: 11349 - DNA, 50 bp, Homo sapiens
ctagggcccggccgacccgcggcccggagagtaacaacatggtggtgcct

SEQ ID NO: 11350 - DNA, 102 bp, Homo sapiens
ttccccagctctgcagccacatactatccgtttgttcaggaaccaccagtgacagaaaaatggtgtgaatggaacattaacttcaaatgtagcagactctcc

SEQ ID NO: 11351 - DNA, 100 bp, Homo sapiens
gaagacttccttctggatgctttgtctgaggacttctctggtccacaaaatgcttcatctcttcttgctaagtactgtgacaacttactgaagaagtcag

SEQ ID NO: 11352 - DNA, 74 bp, Homo sapiens
gtggaaataaactgaaagatatcagcaccttggaacctttgctaatgggaatgacagcaagaaatttaaacgag

SEQ ID NO: 11353 - DNA, 50 bp, Homo sapiens
gccgccgccaccatgcccaagagaaagttgcagatctgatctcttctgaa

SEQ ID NO: 11354 - DNA, 97 bp, Homo sapiens
gacaaagaagatggctgcttctatttcagaggtctcttcataattgaccccaatggagtcatcaagcatttgagcgtcaacgatctcccagtgggcc

SEQ ID NO: 11355 - DNA, 87 bp, Homo sapiens
ggcaatcatcctgaatgaatttagagccaaactgtccaaggctttggcagtacatctccgttcatggatgcattaacagccaatggg

SEQ ID NO: 11356 - DNA, 90 bp, Homo sapiens
tgcgccccctgctggttgtgcgaaccccgggcagcccgggaaatctccaagtcagaaagaccatgctcgacagctgaccaaggccatgat

SEQ ID NO: 11357 - DNA, 90 bp, Homo sapiens
ggcctcatctcagagctgggtgccaggctgaaggatcactgaggaaggggaagtgggcaaagcaggatggcacagtgttcgacggccgcc

SEQ ID NO: 11358 - DNA, 75 bp, Homo sapiens
ggtgtacaggtggtcattacagaccctgaaaaactggaccaaattagacagaggctgcatttgatgccagaaggc

SEQ ID NO: 11359 - DNA, 74 bp, Homo sapiens
acccggcaactcagaaacatcaggtccaaggtcaagtctggcaccatctttgacaacttcctcatcaccaacga

SEQ ID NO: 11360 - DNA, 80 bp, Homo sapiens
cccggcgcaacatggctgcggccgccgcctccgcctcccaggatgagctgaggcgccctgcgtccggcagaggaggcgag

SEQ ID NO: 11361 - DNA, 96 bp, Homo sapiens
ctctgtattcagatcttcatgtgtctcttctaagctgaataaagctgttttggaactgtcaggtacctcaaagcgctggagtgcaatggcgcgatc

SEQ ID NO: 11362 - DNA, 98 bp, Homo sapiens
cgcgggcaccatgagcagccgagtcggggacctgagcccccagcagcaggaagcgctggccagggtgccactgcagccaggcgagagcctgccctacc

SEQ ID NO: 11363 - DNA, 101 bp, Homo sapiens
aaagatagttgcttattcctctattgctgcaaaaaatgcagaactagaacaggagcttatggaatttaaactttgggataatgagctgcagtatgtggacc

SEQ ID NO: 11364 - DNA, 100 bp, Homo sapiens
tgagcgccagagaggacgtttccaactcaaaaagaagctcattcacacagaagacccatttaatgatgaacatcaggagaggcaagaggtggaaatgttg

SEQ ID NO: 11365 - DNA, 101 bp, Homo sapiens
aagaggcgttgcggcgaaaggaacggctgaaggccctacgggagaaaaccgggcgcaagctctggcaggctgccctgagcacgctcaaccccaaccccacg

SEQ ID NO: 11366 - DNA, 100 bp, Homo sapiens
atcaaaataaaggaaacacatttcatatactgcagactctccagaaagagcaacagtaatggagtacatgagcactggaagtgacaataaagaagagatt

SEQ ID NO: 11367 - DNA, 75 bp, Homo sapiens
tccccaccacctgcctggagagtgctgaagatgctgcaagcaccaaatcatagctcataaaatcaggtcctgaga

SEQ ID NO: 11368 - DNA, 78 bp, Homo sapiens
aggccatggaccctgtctcagtgggaaaggaaaacctcttcagcgcaaggtgaaaccacctaagaagcaagaggaaaa

SEQ ID NO: 11369 - DNA, 80 bp, Homo sapiens
atgagatcaaaggtcacctggaaattgccttattggaaaaacatttcttacacatttatgcagtgtgtgattctttctaa

SEQ ID NO: 11370 - DNA, 100 bp, Homo sapiens
acacaaaggatcggatgcagccaggcttcagcaaccaggagggattgactgagatcttaacaacagcagcaacgatacatcagcaaatccttattatcca

SEQ ID NO: 11371 - DNA, 100 bp, Homo sapiens
gaagcgtggccggcagcgtcccggacgaggaggctacagcaactggacgaggagaacagtgaactccggtcctgcacgccctgtctgaaggccaacattg

SEQ ID NO: 11372 - DNA, 97 bp, Homo sapiens
cagaagcggcccctgtggctgtgtaagatctgcagtgagcaaagagaggtgaaagaaatcacccgtgatattaagcaattagatcacgccaaacgcc

SEQ ID NO: 11373 - DNA, 94 bp, Homo sapiens
gaggctcagttcaaagacctgttcttaaaaaaagcacacacacatccctaggttaatacctgtcataacaagcaactgtacctctaagtctgtc

SEQ ID NO: 11374 - DNA, 75 bp, Homo sapiens
ttgatctcttggagcagctggggatcatgatccctgggtatcagtatgtgtcacctgaaggcaattgtatagaac

SEQ ID NO: 11375 - DNA, 100 bp, Homo sapiens
caaagtgaagaagccagaaggctcctggggtttggtgcaagtgccaaagttgtgcatttcctgggacgagtcaaaccatggaattatacttatgatccca

SEQ ID NO: 11376 - DNA, 82 bp, Homo sapiens
gccatccattcttgggtcctttggagtttttcagaagaagtgaagtcaagatgaagaaccatttgcttttctggggagtcct

SEQ ID NO: 11377 - DNA, 74 bp, Homo sapiens
cggcttggatatcttcggggacctgaagaagatgaacaagcgccagggaacctcagaacctgttctggatccac

SEQ ID NO: 11378 - DNA, 83 bp, Homo sapiens
aggactccttcaccagaaggagcatcacatctcacatatgaaagcacacctgagctgctcttaatatcatctcttgaagatac

SEQ ID NO: 11379 - DNA, 75 bp, Homo sapiens
ggagtgagggagcagctggaggacaggcgggcagcggccgagccaggaattccagagacgctgtaacactctgat

SEQ ID NO: 11380 - DNA, 100 bp, Homo sapiens
tccagcaggcggtgacccgctaccggaaggccatcgccaaggacccttgaacatctgtgaagaaatgactattctgcatggaggcttcttgctggccgag

SEQ ID NO: 11381 - DNA, 102 bp, Homo sapiens
ggcgtgtgcgcgcccgccagctgctccggagatacgaggttggcgatttgaaggagctgcagacactagacatttctaccaatcgtttgctaactttacccg

SEQ ID NO: 11382 - DNA, 75 bp, Homo sapiens
cttttaccgatgctttaacatacagccactaggcggagtacgtccagcttgttactgaacttcgaatgacaagag

SEQ ID NO: 11383 - DNA, 74 bp, Homo sapiens
gggtaaagtcgagtatctggtgaagtggaaaggatggcccccaaagctgaccccgcactacatctacccaccag

SEQ ID NO: 11384 - DNA, 90 bp, Homo sapiens
gtcaacagactgagcgcgtccaggcctgacagctctgcggctcgggccctgagctcgccgcgcatggccgggaacgcggagccgccgccc

SEQ ID NO: 11385 - DNA, 75 bp, Homo sapiens
ctgggacagccatggtttcagacgctattcctgcaccaactgacctgaagttcactcaggtcacacccacaagcc

SEQ ID NO: 11386 - DNA, 101 bp, Homo sapiens
ctcggggacattattgcgcgtggaacggctgcttttggaagccattgtttgatgtcctgtgactgagaaaccaggctttaaactttatgcctttggagatg

SEQ ID NO: 11387 - DNA, 83 bp, Homo sapiens
ccgggacctgggctgggaacccgcggtggagcgggacacgaacgtggttgtgaccgagattcccgacgagagagactgagggg

SEQ ID NO: 11388 - DNA, 75 bp, Homo sapiens
ccaaaattcaactgaatgcactgatgcccagcaggtatttcaagaaatgtaagcactaatgtgttcttcaagcaa

SEQ ID NO: 11389 - DNA, 83 bp, Homo sapiens
ctctgatgtcaatcttgagggctagggttatgtaccgaaggactctaccgtgtcagcgggaataaaactgaccaagacaatat

SEQ ID NO: 11390 - DNA, 78 bp, Homo sapiens
tggagatatggcgcaactgcggcgcatatctcttccaaatgcttgatgaaaaaggtgggaggatcacttgagccaggg

SEQ ID NO: 11391 - DNA, 76 bp, Homo sapiens
aaggcaaagcgaaattggtcattctcgctaacaactgcccagctttgaggtaaagtcagtgataaatcttttgttt

SEQ ID NO: 11392 - DNA, 100 bp, Homo sapiens
cggttgcatcttctacacactacagctattgttaggaaggtgctcgggtcttcggggcactgggtcccatcggtccctcctcacctgggctcaccctcgg

SEQ ID NO: 11393 - DNA, 83 bp, Homo sapiens
cccgtccccctgccccgttcacaatgccaagtcctgtatctgccatgtctgtggcgtccacctcaacaggctgcattcctgcc

SEQ ID NO: 11394 - DNA, 82 bp, Homo sapiens
cgagagccacactttcaagtaaaccaggtggtctttgggaagaagcttcctgcctttgccaccatccccatccaccagctgc

SEQ ID NO: 11395 - DNA, 74 bp, Homo sapiens
agaagaagcaaaaagagatggatgaagctgctacgcttgacaaaagtaagctgaagccaggaacaagagttgct

SEQ ID NO: 11396 - DNA, 100 bp, Homo sapiens
ggtcaaggtatttcatgccgaggtctccaattgagaaacatggcactgtttttcctgcactctacccacctattgctggacttctgttgtacaagttggc

SEQ ID NO: 11397 - DNA, 75 bp, Homo sapiens
gtcctatcattcacaaagggaaaactacagccaccacacacaagtggaatcccccaaagaaggtaaagggagcaa

SEQ ID NO: 11398 - DNA, 76 bp, Homo sapiens
gggacctgcagcagctgagaaaggagctcggggactcccccaaagacaagattgtgttcacctattgaaaattaaa

SEQ ID NO: 11399 - DNA, 82 bp, Homo sapiens
gagattggaagtggcggcggcggcaggcggcagaggggaggtgctgaaggtcgccatcctggctgagaagtacgcggtggac

SEQ ID NO: 11400 - DNA, 82 bp, Homo sapiens
gcaattgccacacggtggggcccaacgaggcgctggtggtttcaggtttggtgcacctcgatttggaggaagtagggcaggg

SEQ ID NO: 11401 - DNA, 100 bp, Homo sapiens
aaccttctccaccagaatccagctcacgctgacgtgaacgatcaagagagagggaccatagtagatcacgagaaaagagtcgacgtcataaatcccgtag

SEQ ID NO: 11402 - DNA, 75 bp, Homo sapiens
gctcagaaagatggatttttgcatgagacgcttctggacagtcatccgtccttggctcaggatttggagagcttg

SEQ ID NO: 11403 - DNA, 76 bp, Homo sapiens
aagaacaagaagtcttaccctcaggtcaaagatcctcagtcttccacaatgaaccctgtttacagccccgtgcagc

SEQ ID NO: 11404 - DNA, 100 bp, Homo sapiens
acgcatgtcaaccaaacatcagaggaataatgtggggaggccagccagtcggtctaatttgaaagaatgtccctcttccagtggaaagcccaaccatgca

SEQ ID NO: 11405 - DNA, 100 bp, Homo sapiens
ctgaacaagtcccagctgaagctgggcatctggggcgatacagtctcgctgtgatgcccaggctggagtgcaatggcgtgattttggctcactgcaacct

SEQ ID NO: 11406 - DNA, 75 bp, Homo sapiens
tagacaagctgctgaaacgttcccagccaacattcagatgtcagtattgaatatggtggtgaggcgtgaccctgg

SEQ ID NO: 11407 - DNA, 100 bp, Homo sapiens
tggcacactttttggagcacactgcccgaggatttccacttagaaccttaaatgactggttcagctctatgggaatttatgtaattactggggaagggaa

SEQ ID NO: 11408 - DNA, 51 bp, Homo sapiens
tactattcgtctgagagaatggctggtttgatctgtggatgaaatgaatca

SEQ ID NO: 11409 - DNA, 75 bp, Homo sapiens
cggggaggcagcgcgggatcccagcctcaggcgtgcgcggacggtgtgcggtttgtgaagtgtggatatgcaggc

SEQ ID NO: 11410 - DNA, 100 bp, Homo sapiens
accgtgctggtctttctcaacctcatcttctgggaacggaaaacagttcttccttcaaagcatgcagtacctgaagtaatagaagactttctctgcaatt

SEQ ID NO: 11411 - DNA, 89 bp, Homo sapiens
gccctgtgatccctcaagactggtccacggagtgtatgaccacaaacagccatcaagcatttgatgaatacagaaatatcagccaaaag

SEQ ID NO: 11412 - DNA, 83 bp, Homo sapiens
gtgcaagaactgtgggaagaaattcccagttaagcaggctttgcaaagacaagcttccttctcctacatctgcttgctgctgg

SEQ ID NO: 11413 - DNA, 101 bp, Homo sapiens
agagctgtttaatattccacggctggtttaccatgacttcttcagagaccctctcaactggtcaaaaactgaggaggcctttcctggggggccgctgggag

SEQ ID NO: 11414 - DNA, 50 bp, Homo sapiens
cctcatcgagctcttcgtcaagggaactctaatgatccaggacaaagaag

SEQ ID NO: 11415 - DNA, 80 bp, Homo sapiens
atcagggcatacatctttcttcgacaaagggattatttttacccaagatacttaggtaagtctcaattacttctctactc

SEQ ID NO: 11416 - DNA, 101 bp, Homo sapiens
ccacaacctgcaccaggttcacggacgagtatcagcttttcgaggagcttggaaatatcagcagcgtcgccagcaggagaatatgcagcgccagagccgag

SEQ ID NO: 11417 - DNA, 100 bp, Homo sapiens
tatacccagaaaaatgatggaaaggaaaaggaacatgaattacatctggatcagtcccttgaaatcaggtattctctactgccgctgatggtcaaacgca

SEQ ID NO: 11418 - DNA, 100 bp, Homo sapiens
gctgaaataacccttgatcctcctcctaattgcagttttagagaacaacttgtaatggagccttcatctcttgagctgccggctgacacagtgcagcgca

SEQ ID NO: 11419 - DNA, 99 bp, Homo sapiens
ccccggcgccgcgggctggtgttgtctcgtgctctggctccccgcgtgcgtcgcggcccacgttgacatgaagacaatggagactgcagagaaactggc

SEQ ID NO: 11420 - DNA, 95 bp, Homo sapiens
ggagctaggagctggcggcgacggccacaggggcggcgacggcgcagtgcgaagcgaaacagatcggacagctggcttttaaaggaatgaagaga

SEQ ID NO: 11421 - DNA, 82 bp, Homo sapiens
ccgggaggaaggaacgaggcaaggagctaaagcagcgtgcgttcagccctgggtgacagcctcatcaagggtaagaaatgag

SEQ ID NO: 11422 - DNA, 75 bp, Homo sapiens
gcactctgcgctttgagctactgggctgtgagctgaacgtgttcaagaaggaagtgtatcttcatacatcaccac

SEQ ID NO: 11423 - DNA, 75 bp, Homo sapiens
aagcagggattccagtgccaagaatgaactgacagatacacgtgcaaaattccacgtactttttcttttctttgt

SEQ ID NO: 11424 - DNA, 98 bp, Homo sapiens
gcgctgggcaccgcggccggagctgtgggctggcccccccggcctgccacttcagtcaactccactgaggagactgccactacagttgttgctgctgc

SEQ ID NO: 11425 - DNA, 100 bp, Homo sapiens
ctcttcccggcgctctcctggctcccttctgccccagctccgtctcggcggcggcggttctccgggagatgttgcataaccactccttcgtgggctgtgt

SEQ ID NO: 11426 - DNA, 98 bp, Homo sapiens
ctagtggcattttcggagcgtttcaaagagcaagtctggaaaagtttgaaattccagtaaaaattcgtttgagtcctgaaccgtggacccctgaaact

SEQ ID NO: 11427 - DNA, 75 bp, Homo sapiens
tttatatagagatgtgatgttggagaactacagaaacctcgtctccctgggtcttctggctggcttgcactccag

SEQ ID NO: 11428 - DNA, 100 bp, Homo sapiens
ctgtttacagaccccggccaggtagcttatgtccaacaggatgctacagctcagcagtgggtgaatttgtaagtgatgtcctgctagttccagaaaagtg

SEQ ID NO: 11429 - DNA, 119 bp, Homo sapiens
taacatggacaactctgcacagaaaaatgaacgcactggcaaacatcccagacgtgccagtgaagtacagaaagatcttggaaggagaccaagccatcctgcagagaataaagaaggct

SEQ ID NO: 11430 - DNA, 100 bp, Homo sapiens
tttcaatattggaagcgctttgatttacagcagctgcaggacaaagcagttccaattccagagaaaatgagtgaatgggcacctcgacctcccccagaat

SEQ ID NO: 11431 - DNA, 98 bp, Homo sapiens
aacagcagtatgatgaactggaggctgagtacgacagcctcaaacaggagctggagcagctcaaagagaaggttgagtgctgcaggaagagctgcttc

SEQ ID NO: 11432 - DNA, 100 bp, Homo sapiens
tgatgatccacaagcccaggagaaattccaggatctgggtgctgcttatgaggacctgctgaagttcccatgatgtcacccaatggatccattcctccca

SEQ ID NO: 11433 - DNA, 83 bp, Homo sapiens
aacagaggggcaaatcagagtgaagaggaagccagaagatgggagagacatttttgaaatgacaagagcacctcaaaggcagc

SEQ ID NO: 11434 - DNA, 95 bp, Homo sapiens
tttcagaggggaatgctaagagatgtgaatgaactgaaggagtgtctttctgtgctggttaaagagcagcaggccctggccgtccagtcagccac

SEQ ID NO: 11435 - DNA, 100 bp, Homo sapiens
ctgaggctcattttgcagttgttgaaattgtccccgcagttttcaatcatggttaaagctgaagctcaacaaagatatagtgatctctgtgggcatttat

SEQ ID NO: 11436 - DNA, 83 bp, Homo sapiens
ctctcgaccccttctgcccggcgcttcggcccgggccgctcaggtgcaggtgtgatgaatgcagactctgctaccattttggc

SEQ ID NO: 11437 - DNA, 90 bp, Homo sapiens
gcagaagctggaggaggccgagaaggcggctgatgagagcgagagaggagaagatgaggctgctgaaggagaaagagaaaaagatggagg

SEQ ID NO: 11438 - DNA, 75 bp, Homo sapiens
ccttcaatccgctctactggaatgtggctggtgtgtgacagctctgtgctgctgtgcctcaagaagagatttcac

SEQ ID NO: 11439 - DNA, 100 bp, Homo sapiens
gtgggacacgcggttcttctccagcgccctggcctccctcaccttggacacctcgcttggtgaacagcagagaatttcaaaggaccttgctaatatctgt

SEQ ID NO: 11440 - DNA, 98 bp, Homo sapiens
ttggccgccttggagtattgtttacacccggagccgcagtctcagcatgaacttgggaatgttttcttaaaattcgtatggcagatcccagaaaatgg

SEQ ID NO: 11441 - DNA, 96 bp, Homo sapiens
tcaaaccgccaggttaccatgaggaggatttctggccttcgagttttggacatagtgaaaacaagtattcgtacagttcttccacgcatctggaag

SEQ ID NO: 11442 - DNA, 75 bp, Homo sapiens
gatcgatctaagatggcgactgtcgaaccgcacgaaagcaagagattatcaaagtcactgaacaactgatcgaag

SEQ ID NO: 11443 - DNA, 82 bp, Homo sapiens
ggagcggcgcccccgccgctgccgccgcgacccttggcgcctgcccctgcaacgggagacctcctgccccccgaggtctgca

SEQ ID NO: 11444 - DNA, 82 bp, Homo sapiens
cagagctttcacgaaggcaccgacgtcatcatgctgaccaccaatcagatccgtaaggaggaggagggggccagtgggggag

SEQ ID NO: 11445 - DNA, 100 bp, Homo sapiens
ttcagcgtcctcacagaactcctgaagaagctctgtagtggccccgaaggaggactgaggaagctcgccctcccctacctgcggaagagtcaagggaatg

SEQ ID NO: 11446 - DNA, 83 bp, Homo sapiens
gtcactcctggtgaccagcattcaaggaaatctactttcttcaatgtgttaaccaatagtcaggcttcagcagaaaacttccc

SEQ ID NO: 11447 - DNA, 76 bp, Homo sapiens
atgagagcagcaggatcagatggtactgaactttttgatcaggtggatattccatctattataaccaagaaactat

SEQ ID NO: 11448 - DNA, 100 bp, Homo sapiens
ggcgtccgcggagcagcttccccccgcgcctctcttcgcctcgcctcgggacccgcggtccccgctcttgctgatgccatggacaatattaccaggcaga

SEQ ID NO: 11449 - DNA, 90 bp, Homo sapiens
agaaaagttgccgaagatgagactgcccacgcgctcagacatgatatgcggctatgcctgcctcaaagcctatgtgcttcccaagctgta

SEQ ID NO: 11450 - DNA, 88 bp, Homo sapiens
tgcatccacattgcacataaagttgaccctctttcccagctgcccgctcctcagcacccgaagattcgcctgtacaacgcagagcagg

SEQ ID NO: 11451 - DNA, 98 bp, Homo sapiens
cgatcttttctgctaagacatcgacctgtaccagagattccagggtcaacaaaaggagtttctgggagatgcctgaaatgtgcagatgccccgtgtca

SEQ ID NO: 11452 - DNA, 100 bp, Homo sapiens
gcattttattggatatggctaccagaatctcaggatccactccgactcagacgagggtgacggggccatcaagtacaccatctcaggcgagggtgctggg

SEQ ID NO: 11453 - DNA, 97 bp, Homo sapiens
gtttgaaaacaagcggaacgccgtccacgtgaaggggcccttctcggtggaggccgacccatccagggccaggaaggaatactgggagaatcttcgg

SEQ ID NO: 11454 - DNA, 75 bp, Homo sapiens
cgcaaacccggaagcggatcgcatggagtgatggtcccaccgcagcgaaagatccccagcaggccctcaaggagc

SEQ ID NO: 11455 - DNA, 75 bp, Homo sapiens
gaagaggcccggactcatacagagattgaaatgttccttagaaaggagcagcagatgatcatgacgcagtcctga

SEQ ID NO: 11456 - DNA, 100 bp, Homo sapiens
gtattgagcgaatccatttcagaaagtcgtccatcaatgaacagtttgtggataccaggcagtccagaggggtctggttgctgcttacagtggtgacagt

SEQ ID NO: 11457 - DNA, 75 bp, Homo sapiens
ttctctcagcctcccacagcagcccaactcctgagagttcaggacctcaaggggctcggctatgagaaggggaag

SEQ ID NO: 11458 - DNA, 83 bp, Homo sapiens
aacgccgagcgcaccgacatctgcctgctcaaagccctgcgcttgctccacatcaggccccaggagctgccagcatgtaccag

SEQ ID NO: 11459 - DNA, 90 bp, Homo sapiens
gcagcaggagcaggggacgaagtttcttcatgatctctccaaccgaccagcaggtccactgttgggcctggcttaagaaacacatgccga

SEQ ID NO: 11460 - DNA, 90 bp, Homo sapiens
ccttggagtcctgaggaacttggctaggctggccccgagcggaaccagagaatgctgagggatgtggcagataaccagatagactctggg

SEQ ID NO: 11461 - DNA, 76 bp, Homo sapiens
tgtgtaaaagcctcggttcttacgccttattaccacaaagtaggccaatagcttcaccgtctcctctgtcgccgcc

SEQ ID NO: 11462 - DNA, 100 bp, Homo sapiens
actttaacccactagaagccaagctctatcaacagaccatttactgcgacattttagtgtactaatggtcacttgatgtgcgctggctgttttatccacc

SEQ ID NO: 11463 - DNA, 100 bp, Homo sapiens
gcacagagacgtgatgctggagaagcagtcatctggttactttagtttaattggttggggtcagataagaagaggagtgacaatcaagccaacagtagat

SEQ ID NO: 11464 - DNA, 50 bp, Homo sapiens
agccagtggaccaagcgagccttccagaattcagaaggagctggcggaca

SEQ ID NO: 11465 - DNA, 100 bp, Homo sapiens
aactacgttaagatgacgacagactcagatccaagtcaacagtagtgaagttcccagaccctacgccccgctgtcaggcagcccgccgatcagatggagg

SEQ ID NO: 11466 - DNA, 50 bp, Homo sapiens
ccggctgctcctcccctccccgccgacacagggaatatggaggttctgca

SEQ ID NO: 11467 - DNA, 71 bp, Homo sapiens
gggagcgagctcaaggcggcgcggcggccactgggcgcagcacccaggaagttctactacatcaccctgct

SEQ ID NO: 11468 - DNA, 98 bp, Homo sapiens
acagcctgaaccctctgctctcccacggctccccccaccaccagcccagctcctctcctccaaacaagctgtcagtagagacggggttttaccgtgtt

SEQ ID NO: 11469 - DNA, 76 bp, Homo sapiens
catttcttcggcattctgcaacagatgatctttgggtggtttcaaaaaccctagactttgagctggatacttttat

SEQ ID NO: 11470 - DNA, 92 bp, Homo sapiens
ggacagcagccccgagcactgtggccgaggcccacctgctgacatctacctgccagacaatgcagatcttcgtgaagactctgactggtaag

SEQ ID NO: 11471 - DNA, 96 bp, Homo sapiens
cgaggggctcggagaggtgctcggattctcgtagctgtgccgggtgctggagaatctggtaaaagcaccattgtgaagcagatgaggatcctgcat

SEQ ID NO: 11472 - DNA, 51 bp, Homo sapiens
ctcctcaacagcaacattacaggaaaatatgcccaggttaccaacaatcct

SEQ ID NO: 11473 - DNA, 50 bp, Homo sapiens
aatactttgcacaggaagctataagtggttttacaagatgaattagaaaa

SEQ ID NO: 11474 - DNA, 75 bp, Homo sapiens
catcgggcactacgctggagaagatgcaacgtctcagaccagtatccttcaggggttctcttactctgatttgcg

SEQ ID NO: 11475 - DNA, 98 bp, Homo sapiens
cggcgatgcaggtcttccacagctaagtttcactgttacatgccttgaagtgatgaggaggtttctgttactatatgctacacagcagggacaggcaa

SEQ ID NO: 11476 - DNA, 83 bp, Homo sapiens
gaccaagaacgtgagcaagcccaggcacagccgacgccgcgggatgaccctggccatcacattattgaggacatgtggcttgg

SEQ ID NO: 11477 - DNA, 100 bp, Homo sapiens
gatctgggtatcaaatatgacccaagcattggtatctacggcctggacttctatgtgataagtaatggaacatcatctgtgatcgtctccagaaagaggc

SEQ ID NO: 11478 - DNA, 50 bp, Homo sapiens
tgcagccgcacctggccaagggtgtgagctaccacgccttgcctgagttg

SEQ ID NO: 11479 - DNA, 90 bp, Homo sapiens
aaacaccccatcaccgtggagatcaatggaatcaacccaggcaagactgtgatctaattaatgactgctgctgcaaacactacacaggcc

SEQ ID NO: 11480 - DNA, 83 bp, Homo sapiens
tgctgctgctcaaagctgctgccgccccttgggctaaaagtgcatgcaagatatgggaaatactaaagcaagactactctatg

SEQ ID NO: 11481 - DNA, 100 bp, Homo sapiens
tgactcggtccggaacactgaaaccagtcatcactgcatctttttggcaaaccagggttcatcatttacaacccaacagcctcaggcttataaccttttc

SEQ ID NO: 11482 - DNA, 85 bp, Homo sapiens
gcgcagggcctgcagcgggagctggacggcgagcgcgagcggcgcgagaaagtgccagaaccctgtggagcatcatgaactggga

SEQ ID NO: 11483 - DNA, 82 bp, Homo sapiens
cgaggctcggagaaacaggcgccgcgggctccgcgcccggccggacccgggcccgaggggatcctgctaaagcggagcggca

SEQ ID NO: 11484 - DNA, 100 bp, Homo sapiens
aaacttttggcatatgcactggattactggtcaaaaggtcaactaaaagcattgtttctagaacatgagccccccgaatccaagcccaacttcacccctc

SEQ ID NO: 11485 - DNA, 75 bp, Homo sapiens
aagcacaaagagcttgctccctacgatgagaactggttctacacgcgagctggacccatggatgaaggaccagat

SEQ ID NO: 11486 - DNA, 90 bp, Homo sapiens
cacagtctccgggccgcctgacctccgcacgggtatatgggatggaagcgggaccctcgggagcagctgtggtcgccaggacccccccag

SEQ ID NO: 11487 - DNA, 82 bp, Homo sapiens
cccgcggcgggaggagcctgttcccctgagatcatgcatgcattttcagttgctccttttgaccagaatttgtcaattgatg

SEQ ID NO: 11488 - DNA, 142 bp, Homo sapiens
caggtggggaaagatgctgttccaggcgcacactagtctacaaggccagagctttctggaagggggcacctcgaagcggaggatccctgtgtcccagccgggcatggccgacccccaccagcttttcgatgacacaagttca

SEQ ID NO: 11489 - DNA, 83 bp, Homo sapiens
ttcggcagtccacccaccgccgccgcctcccagcagtcctgcgttaactgcggccgggaggctatgagcgagtgcaccggctg

SEQ ID NO: 11490 - DNA, 135 bp, Homo sapiens
gtcggaccaagaagccccggacgcaggcctggtatggagaacgagaggaaagaagtcccttatcacgagaaaatattctctttggaatgggaaatcctctgcttgacatctctgctgtagtggacaaagatttcc

SEQ ID NO: 11491 - DNA, 100 bp, Homo sapiens
gaaagtattgcaggacaagagatttaagctttggggccatttggatcacacgatgttttttcaagattttagaccctttctaagtagcagtccactggac

SEQ ID NO: 11492 - DNA, 98 bp, Homo sapiens
agccgcgtcccctccagtccgctccgggcagggcgccctgcgtccggcagaggaggcgagcatcccgctcaggtgatgaggaacccctcgcgcaccca

SEQ ID NO: 11493 - DNA, 105 bp, Homo sapiens
aatccactcgccagcccgccgccctctgccgccgcaccctgcacacccgcccctctcctgtgccaggtccaatcacatgtgtgggtgcgaggaggctgtgagtcc

SEQ ID NO: 11494 - DNA, 100 bp, Homo sapiens
cggcgcccggagcccgctctggccgtcaggtgacacacagtcttttgcacagaagctccagctccgggtgccctccgtggagtctttgtttcgaagtccg

SEQ ID NO: 11495 - DNA, 100 bp, Homo sapiens
ctaatgcatgctatggaggcacagctgctgtcttcaatgctgttaactggattgagtccagctcttgggatgctactctcctctgcaaggcctaccgtgg

SEQ ID NO: 11496 - DNA, 50 bp, Homo sapiens
aagaagtcgcccatcgcagcagctcgagacctgaaccttgctaaatgttc

SEQ ID NO: 11497 - DNA, 50 bp, Homo sapiens
aggaactgcaggagcaagtggcgctgatgtggacgagtgcagctccgggc

SEQ ID NO: 11498 - DNA, 50 bp, Homo sapiens
atgcaccagaattatccgcaaatcagccaatggagatcttcgtggatgat

SEQ ID NO: 11499 - DNA, 82 bp, Homo sapiens
cccgaagccccctgcaggaactctacaacccaatccaggtgaaaggtgtagcagtcactcggcctacacccacagcatcgac

SEQ ID NO: 11500 - DNA, 90 bp, Homo sapiens
cggtgctccggggaggtcacctgacgaggaggtcatcatcagatttgaaatatttaaagtggatacaaaactatttcagcaatgcagaca

SEQ ID NO: 11501 - DNA, 76 bp, Homo sapiens
ccttgctctgggctgctccaggccaggccatgcggatggtgttatctgaaaaggttagtcagctgatggaatggac

SEQ ID NO: 11502 - DNA, 96 bp, Homo sapiens
tgttgctttgctgcatttccaagattaaggactattgtacagaaaatgccaatgaaactaacagttaacagttgacacagcattgttggttttgcc

SEQ ID NO: 11503 - DNA, 100 bp, Homo sapiens
acccctactcggagtgccagaatgcggcccagatctaccgcaaggtcacctgtagtacatccaagccattatgatgatggaggaatctgttcaacatgtt

SEQ ID NO: 11504 - DNA, 75 bp, Homo sapiens
accgggcagggctccccgtcggagtgcactgcgccggacacttcaatcaagtctctatttatgaggtggacaagc

SEQ ID NO: 11505 - DNA, 75 bp, Homo sapiens
gcaaagaagtgaagggcaagcgcatcaacgtggaactctccaccaaggacttcccaagtaagaagcggaagagga

SEQ ID NO: 11506 - DNA, 101 bp, Homo sapiens
gccaaatagcagaagaataccatgaggtcaaaaaggaaatcaccctgcttgagcaaaggaacctcaaggaataggttctcctagtgtctatcatgcagtta

SEQ ID NO: 11507 - DNA, 100 bp, Homo sapiens
tgatgaacacccagcccatggaggagatcggcctcagcccccgcaaggatggcctttcctaccagaaaccaaggtgtatgttggtaacctgggaactggc

SEQ ID NO: 11508 - DNA, 95 bp, Homo sapiens
gtgtgcccactgaggagtccaacatcaccatgcagctgggtggtctgcagtttgacaaggagctgaggtcgctcattgcctaccttaccacggtg

SEQ ID NO: 11509 - DNA, 73 bp, Homo sapiens
accacaagcatctgaagagagttttcctgatagatctcaacagtaatcatgatgctgcgattaatagatatag

SEQ ID NO: 11510 - DNA, 100 bp, Homo sapiens
gtgcgcggagccgtctgcctgcatctgctgctgaccctcgtgatgaaggtcaccgtgtccaaagggggcgaccgggacagtgacgacgacagcgtcctcg

SEQ ID NO: 11511 - DNA, 106 bp, Homo sapiens
tggggcccaagcccccgtgaagatggtgtcctggatgatctccagagccgtggttgcctccggagccagcgtggtggccatagacaacaagatcgaacaggccatg

SEQ ID NO: 11512 - DNA, 82 bp, Homo sapiens
tcgtacttacttggagagacatatgtctgaatttatggagtgacagagcgggatgccaccagcttgtccaaagggaagttcc

SEQ ID NO: 11513 - DNA, 100 bp, Homo sapiens
tcgggtgctaccaaggttttgcttttgcatggaaatgtctactgcacagttgcaccactgagaaggacaggactcagaattcatgattgaagaaatgcag

SEQ ID NO: 11514 - DNA, 75 bp, Homo sapiens
tggggactcgaacccccgcttcgcagctcaggagcctgaggtccgaaaggttctccttactatgacaatgtccgc

SEQ ID NO: 11515 - DNA, 90 bp, Homo sapiens
gagggacccaccgtagagactaaggacagagcgggatgccaccagcttgtccaaagggaagttccaggagctcctggtgggcatcgttgt

SEQ ID NO: 11516 - DNA, 96 bp, Homo sapiens
gtctttctcaacctcatcttctgggaaacaatgtgatgagaaccattcatggggtgggagagatgatgacccagatggtactcagtagaggctcca

SEQ ID NO: 11517 - DNA, 82 bp, Homo sapiens
ggaaactatgaagaggtgctactgagcaatatcaagcccattcaaacagaggcatggataccctcaaaaagttatggataaa

SEQ ID NO: 11518 - DNA, 85 bp, Homo sapiens
ctggggccagggaaccctggtcaccgtctcctcaggagtgtggccatctggggccgtgtggtatttgccactcaggagacatgtc

SEQ ID NO: 11519 - DNA, 97 bp, Homo sapiens
gggctcaccagggccaccaactctccaccctagacgaagcctttgaagaattaagaggtgatcagcccatgacctaaacctccagacaaaataaaac

SEQ ID NO: 11520 - DNA, 100 bp, Homo sapiens
aaggagatacattaaatgcaatagcccttcagtactgttgtacggctgaattcggtcagaagagaatccatctgaatagccagtttccaggcacccagcg

SEQ ID NO: 11521 - DNA, 100 bp, Homo sapiens
ccggtcctgaccaccgtgaacggacagtcccccccagatgggagacctttaactctgaaggacatatgggaaggagttcatgagtgctataagatgcgac

SEQ ID NO: 11522 - DNA, 75 bp, Homo sapiens
cccaggccccgccgaggcggccagaacgacaccgtaactatccgcactagaaagttcatgaccaaccgactactt

SEQ ID NO: 11523 - DNA, 76 bp, Homo sapiens
ccggggcttgccctggtcttgctcggccgatgaagtgcagaggtttttttctgaccagcgccaccgcctccgacag

SEQ ID NO: 11524 - DNA, 75 bp, Homo sapiens
tatatgtgatgccattccagcactggactcatggaggctgagcatttattcagtgtggaaaagccactggcagtg

SEQ ID NO: 11525 - DNA, 96 bp, Homo sapiens
agaaacctcagacagatcgccggggaggcagcgcgggatcccagcctcaggcgtgcgcggacggtgtgcgggactctctgggtggctcagcccaca

SEQ ID NO: 11526 - DNA, 90 bp, Homo sapiens
ggactgacgaatcttctggatgtccctggattgaatgagaaagatcagtctaaagaaaaggagaagaaagtgaaaaaaacaattccttcc

SEQ ID NO: 11527 - DNA, 74 bp, Homo sapiens
cagattatatcgcatcctatggctcaaagaaagatgattatgtcaagagcaatctgaatccaaatgcaaaggag

SEQ ID NO: 11528 - DNA, 98 bp, Homo sapiens
actccaagaaaaaaaccacaaatgtttttctgttttgcctgaatacatgatttaaacaagagatttccacagaaggttccagcagcactgatgtgaag

SEQ ID NO: 11529 - DNA, 100 bp, Homo sapiens
caagctcagcttcaggagtttggtcaaagcaaccgaaaaggagagtttcctggagcgtgaggatcatccccggagaggacgggaggatcggcagcacagg

SEQ ID NO: 11530 - DNA, 75 bp, Homo sapiens
aggggttcctggtcatacaccagtactaccaaggacagcttttttcctgcaagcctcgagctgtggcaggttttc

SEQ ID NO: 11531 - DNA, 100 bp, Homo sapiens
atgttcagccagtatcaacaccagtaacagtgtgtggagatatccatggacaggttacccatgcagttgttactgtaccagcctattttaatgatgccca

SEQ ID NO: 11532 - DNA, 100 bp, Homo sapiens
ggctgtcctcgtcctccagctgttatctggaagtattgcctaagtgtaatcttgaacatgggcggtgctgtgagtgctggtgaagacaatgatgagctga

SEQ ID NO: 11533 - DNA, 90 bp, Homo sapiens
cgtttcctgccttgctctttggaccacattgtcaattcacaccgaggccagtcaccactgcacattttgggacaatatggcaaggagaat

SEQ ID NO: 11534 - DNA, 82 bp, Homo sapiens
ggagaatggaactgtatgccagcagcttgttgtacactattcaggattatgaaactgctcaggaacacaatgaaaatgatca

SEQ ID NO: 11535 - DNA, 99 bp, Homo sapiens
accacaatggggaggacaacttcgcccgggacttcatgatctatgaggctcagccggagatttcccgggcatttcagaccagagagtttatacccttgc

SEQ ID NO: 11536 - DNA, 116 bp, Homo sapiens
tcgccctcatggaagccagcctcacctatcccagccattgctgtgcctttgcaaactggagacggcaaatatcacttgcctacctccctgtcaaagtgatcccatctcaagctttc

SEQ ID NO: 11537 - DNA, 83 bp, Homo sapiens
attccggcgcctccactccgtcccccgcgggtctgctctgtgtgccatggacggatgcatcactgtaagcgataccgctcccc

SEQ ID NO: 11538 - DNA, 98 bp, Homo sapiens
agcactttgtggagaaagtcgtcttccacttgcacgaaagctttcctaggccaaaaagaggaccactatgagacctcagtccttctatgatggaagtc

SEQ ID NO: 11539 - DNA, 100 bp, Homo sapiens
cttgaaggcttcttcctgcacttaaaggaattctacctcactcccaactctcctgcagaaatggtcccccggcagagggcagtagagatggccggcccaa

SEQ ID NO: 11540 - DNA, 98 bp, Homo sapiens
cattgacctccgcgccgtactcgcggagctgaatgctagggtctcagcttcttggaagtgaaagaccagctgctgctcatgtaccttatggatttgac

SEQ ID NO: 11541 - DNA, 75 bp, Homo sapiens
gctgaatccgcccgggctacgctcctccatcacgtgagagcatcagtgatgtcacgtttggagcaggggtcagtt

SEQ ID NO: 11542 - DNA, 98 bp, Homo sapiens
tgatgaggatgaaaacctttgtgatgatccacttccacttaatgaatggtcatcatcagatttgaaatatttaaagtggatacaaaactatttcagca

SEQ ID NO: 11543 - DNA, 98 bp, Homo sapiens
gctgatgatgcgtctttggttaatgcctcaatttccagctctgtgtgaacagcagagaatttcaaaggaccttgctaatatctgtaagacggcagcta

SEQ ID NO: 11544 - DNA, 100 bp, Homo sapiens
cacctcaccaagaagctactggacctcgttcagcagtcatgtaactataagcagcttcggaaaggagccaatgagggacacattcagctaacgtatttta

SEQ ID NO: 11545 - DNA, 100 bp, Homo sapiens
tctcggcatagttctggaccccggcggaatcgggataccatgatgagtcttctgaagactgtggtcattgtgcttggagatatgtcagtattgaattctc

SEQ ID NO: 11546 - DNA, 74 bp, Homo sapiens
gtgacggtgccaccgcggcgcgtgcttttgaagatgatgatatcacgcacgttgaaggaagtgtagatcctatt

SEQ ID NO: 11547 - DNA, 100 bp, Homo sapiens
tggtggcataggttatgaagctaatcctggcgttccaccagcaaccatgagtggttccatgatgggaagtgacatggaatacaaacagaagcttgcacga

SEQ ID NO: 11548 - DNA, 98 bp, Homo sapiens
ttgatttcacacattgtgcaatgatggtgccatgacaatggtgtgaactacaagattggagagaagtgggaccgtcagggagaaaatggccagatgat

SEQ ID NO: 11549 - DNA, 100 bp, Homo sapiens
gccacgacgcgcccgagaacacgctggcggccattcggcaggttcgctgtgatcctgagattcaagaactgcgtcagtggcagaagaaacttcgcgaggc

SEQ ID NO: 11550 - DNA, 100 bp, Homo sapiens
gcttcttaggaggaggaggaagaggaggaaggagggcgagcgaggaggatggcggagtcggggctcctgacgatcgcaccccctccctccctggcggagc

SEQ ID NO: 11551 - DNA, 50 bp, Homo sapiens
cgcggggaccgctgtgctctcgatgaagcgccctcagttcagcaagccgc

SEQ ID NO: 11552 - DNA, 74 bp, Homo sapiens
cgcagcgttgtggaggggcgggccggacgctgagcggagcagctgcgccacgatgctgaaattttcttctaagg

SEQ ID NO: 11553 - DNA, 97 bp, Homo sapiens
ggcctggactgtgggctggtgtgtggaactgtggaacgttacaatcctcaggaaaacagatggcacactatagcccctatggggacccggaggaaac

SEQ ID NO: 11554 - DNA, 113 bp, Homo sapiens
cgaagaggtgccgaccaccagtcacaggctgtccagacacgataaagccgtccagcggttgactatagtcaatggggccaatggagccaagtgtatggaaacccacaacagta

SEQ ID NO: 11555 - DNA, 131 bp, Homo sapiens
ggccgctgtgtggttgcaacggagataaattcccggaaccgcgattcggcgtgtcagacaatgcagatcttcgtgaagactctgactggtaagaccatcaccctcgaggttgagcccagtgacaccatcga

SEQ ID NO: 11556 - DNA, 50 bp, Homo sapiens
tcggaaaccggtagcgcttgcagcatgcggttaagaagattgtctaccaa

SEQ ID NO: 11557 - DNA, 100 bp, Homo sapiens
ttcctacttcatggatgtgaaatgcccagaaaattttcgtgctctgagcactggagagaaaggatttggttataagggttcctgctttcacagaattatt

SEQ ID NO: 11558 - DNA, 75 bp, Homo sapiens
caagaagttagtgaaaattttgagggcttccgttacaagatgaggtctgtgtatgctcacttccccatcaacgtt

SEQ ID NO: 11559 - DNA, 83 bp, Homo sapiens
ggcaaggatgtgatgccagaggtcaacaaggttctggacaagatgaagtctttctgccagataacggcaaaagcttctatcat

SEQ ID NO: 11560 - DNA, 75 bp, Homo sapiens
cctcttcgatgtgcgagactttggaaagaaaaaggagaagcgggctctagggaactggaagttgctggccaaagg

SEQ ID NO: 11561 - DNA, 100 bp, Homo sapiens
ccatgacaggcatgttgtataaatgtacaggatgcagctggggctggagccaggtctggctatcgtggtcgccgctcccctcacaccccccatgaacgct

SEQ ID NO: 11562 - DNA, 75 bp, Homo sapiens
gatttacgcgcacgttggaaccgaagagagctctgttgttgcaagatgatttacacaatgaagaaagtacatgca

SEQ ID NO: 11563 - DNA, 100 bp, Homo sapiens
ggctggtgcccattgggcagtgcctgtgccaggcaggctacgagaaggtggaggatgcctgccaggccaagacaatgcaaactccagtgaacattcccgt

SEQ ID NO: 11564 - DNA, 96 bp, Homo sapiens
gctcagcatggtcagtgccgtttaacctttattgtggtggagtccaccccgctgtggacaccagcagtgaaaacactgtggttcctccagaaacat

SEQ ID NO: 11565 - DNA, 50 bp, Homo sapiens
cagaagtcgcacaagacccgcaaccagggcaagtgtccagagaatggctg

SEQ ID NO: 11566 - DNA, 99 bp, Homo sapiens
ccgcaggagagacacgctgggccgaccccagagcggcgctggacagtgaagcgtgacattcaggaaaacgatgaagaggcagtgcaagtcaaagagcag

SEQ ID NO: 11567 - DNA, 90 bp, Homo sapiens
ttgtcctgtcctggatcagtttctttgtcatgtagccaagactggagaaacaatgtataagcagtttagccaaattttgaagaacattgg

SEQ ID NO: 11568 - DNA, 100 bp, Homo sapiens
ccaacgtgggctcgctcttcgacgacgtccttccatagtgacgccccccaaggacatctggaatgtcactggtgcccaggtgtacttgagctgtgaggtc

SEQ ID NO: 11569 - DNA, 82 bp, Homo sapiens
ttgtcggcgccgcggccgctgcggacggacgctcgcctgccggctgagtatgccaccacgggctgttccctgaccctgcacc

SEQ ID NO: 11570 - DNA, 50 bp, Homo sapiens
cgaagaactcctaaacaggtggatccagtgtcagtatgtctacctacatc

SEQ ID NO: 11571 - DNA, 75 bp, Homo sapiens
aatcttggacctaccacttgaaaccattagtgagctgaattatatccagatcgagagacagaagattctgaaagg

SEQ ID NO: 11572 - DNA, 75 bp, Homo sapiens
gaggactccagcacaccgaggggggggccctcagcctcttggccttgaacgggctgttcatcttgattcacaaac

SEQ ID NO: 11573 - DNA, 97 bp, Homo sapiens
ggagaagaatggaaagagaagactgatagagacttcgttaagacactggcttcatgtcctattgaccgtaaaccttttcaggcagtgtttaaattca

SEQ ID NO: 11574 - DNA, 75 bp, Homo sapiens
agcggcgcagcggcggcagcggagagcgagagaggggagcaggtcctgaatctgtgcctccttcccttcttaaag

SEQ ID NO: 11575 - DNA, 100 bp, Homo sapiens
ggaacaagaagagccatgtatgttggatggtgagatccccagtcagagccgtccagaaactgaataacctcaccttcctctacttggaccataatgccct

SEQ ID NO: 11576 - DNA, 90 bp, Homo sapiens
cttgaggactcaggagggtgtttgctgcgttgacaacagagtggtcttcgagggatagcacgaggtggtctgacaggactaacacttacc

SEQ ID NO: 11577 - DNA, 83 bp, Homo sapiens
gtatacaccatgagcaaagctcaccctcccgagttgaaaaaggggaaatttgcagtggtgagaaaatgtataaagaaagattc

SEQ ID NO: 11578 - DNA, 83 bp, Homo sapiens
cctttcacggttacagctgctaaaggaacaactgttaagatggaatgctttgcacttggcaaaccctacagcttggggcctgg

SEQ ID NO: 11579 - DNA, 90 bp, Homo sapiens
aactaaacatagttttggaactagcagatgctggcgacctatccagaatgatcaagctcctcagtgggtagtgcacttccacgaagacgc

SEQ ID NO: 11580 - DNA, 50 bp, Homo sapiens
tggattctacagcaacatattgatggcagaaacggtggacacaagcgaaa

SEQ ID NO: 11581 - DNA, 83 bp, Homo sapiens
caaggatatgctgtattcagctcaggaccaggcaccttctgtggaagcaggctcctgctccagcccagcccccagagagcaga

SEQ ID NO: 11582 - DNA, 76 bp, Homo sapiens
gtgggcaatagagtcactgtatttgaccttaaaaatgatcagaatcatccagataatcaacagctgaagaatgaac

SEQ ID NO: 11583 - DNA, 100 bp, Homo sapiens
ctcggcggagcagaggaaccacacgctgatcatggagcttactccacgggaacagcctctagataatctgagttgttgaaaatacgaagcctgttactcg

SEQ ID NO: 11584 - DNA, 100 bp, Homo sapiens
atactgtgacactgaccaccaggccaacttaacatcagcagatatcctgtctcagatgaagaggaagctggcgttctctgcaagccatggtatgctggag

SEQ ID NO: 11585 - DNA, 100 bp, Homo sapiens
accgtggggggcaagcagtacctcctaggactctatgacacggccggacaggctgcagtttgaaaagtttggatcttgatagctgcactctttcagaaat

SEQ ID NO: 11586 - DNA, 90 bp, Homo sapiens
cacaagaacgcactttcctcccagcttcgagagctgtgcccaggagtgaacaaccagccctacctctgtgagagtggtcactgctgcggg

SEQ ID NO: 11587 - DNA, 75 bp, Homo sapiens
ccgacgaggaacgaatgggacaagatcccgtccatgaatcaggtcaccacctcccacagccctgctgcaccaggg

SEQ ID NO: 11588 - DNA, 90 bp, Homo sapiens
ctggccagactgacacccataccttttgggcttcagaatgcagtgttttcgatatgatgcttcctggtgtgtttagtggttggtgccatt

SEQ ID NO: 11589 - DNA, 82 bp, Homo sapiens
cattgacccggcctacagcaaggcctacggcaggatggggtgagaagccctaccactgcaactgggacggctgcggctggaa

SEQ ID NO: 11590 - DNA, 74 bp, Homo sapiens
gcagtggtcgcttcttctccttggtgcacatgaacttgaacagatgcagctgattttagaatctattcctgttg

SEQ ID NO: 11591 - DNA, 82 bp, Homo sapiens
gccggaggagcccctcaggccaggccggtagaggactgtgaaccaaaagttgtcccccaggatggacttcaccgcgcagccc

SEQ ID NO: 11592 - DNA, 102 bp, Homo sapiens
agaacagtgaagagctccgagaaattatgggtacccctgaatatgtggcctcttagcaatgcataccacgagttagcacaagtgtattcaaccaacaacccc

SEQ ID NO: 11593 - DNA, 90 bp, Homo sapiens
actgaagtggtttgcaacatccttcttctggataacactgtacaagctttcaaagtcaataaatctcctgcaaagaagctgagccatgca

SEQ ID NO: 11594 - DNA, 50 bp, Homo sapiens
tttggagtgtgcgtgcgcgccgagcgggtccccgcactcccggtgaagaa

SEQ ID NO: 11595 - DNA, 88 bp, Homo sapiens
ggtgtttgacaaaacataccaattcttgaatgacatccgagcgaaagagaaagagctgactgccgtccacctcgtggattctcactac

SEQ ID NO: 11596 - DNA, 90 bp, Homo sapiens
gttaaggattccaagtaactcttatttgcatttcagatcccccagaccagatgacctatcttccttccagctctgagtcacttcccattg

SEQ ID NO: 11597 - DNA, 98 bp, Homo sapiens
ccaggactacagtaaggctgaaatcattgaagtgcttggagtgcagaactgaaagaggagtctcaggagcaggggctgcggcagaggctgctggacga

SEQ ID NO: 11598 - DNA, 80 bp, Homo sapiens
agcagttggtaactaacagtacatctttttctaagggacttacccttttgtaacctcttcaaattgtactgttggaggtg

SEQ ID NO: 11599 - DNA, 104 bp, Homo sapiens
cggaaagcggcggactatgtccgaagcaaggatttccgggactacctcatgaggtaatgggaataattgtggaaagcagtttcttcatttatttcttgtggaag

SEQ ID NO: 11600 - DNA, 83 bp, Homo sapiens
agcagctccgtccacaacgccgcttcggggctcctaggaatcccttggcaccatgtcctgtgtgcattataaattttcctcta

SEQ ID NO: 11601 - DNA, 48 bp, Homo sapiens
gacccggctttaccttatatcagggcaatccctacatgtgcaataatg

SEQ ID NO: 11602 - DNA, 95 bp, Homo sapiens
tcgtgtgcaacgcgctactggcccagctttggtgtcatccccagcactcctctggccatccatacaccactgatgccaaaccagagcattgatgt

SEQ ID NO: 11603 - DNA, 74 bp, Homo sapiens
ctacaaccttcgatctcctgacgacttgacccatcttatcaccgtcttctctggcactcagtatttggagtaat

SEQ ID NO: 11604 - DNA, 51 bp, Homo sapiens
ttaccaccaatgggaacatgcacaggtatgaggatacatgggctgcacttc

SEQ ID NO: 11605 - DNA, 100 bp, Homo sapiens
tgcaagctgccaggaagactcctttgctgatggccgccaaagttggagttcgtatgttgatgacatctgattagcagaagtcatgttccagcttggactc

SEQ ID NO: 11606 - DNA, 105 bp, Homo sapiens
tcatcgcagctggtgggtgtacacactgctgtttaccttggcgaggcctttcaccaagtccatgaaactgaggcttcttgaagagcttgaagacacttggctccc

SEQ ID NO: 11607 - DNA, 75 bp, Homo sapiens
ccggcaccccctccagtggatgactcctggatacagcactctcgcagttggttgaatctggcgatgtggaaccca

SEQ ID NO: 11608 - DNA, 75 bp, Homo sapiens
ccgttcagtttacagttcattttttgcttggtttggaaaaatttcattagagccagctgaggtgggtgtcctggt

SEQ ID NO: 11609 - DNA, 101 bp, Homo sapiens
atgatgactttgaatgggtgcatgttagtgctcaagagcctcattatctaccacccgagatgccccaagagtgtgaacatggctacgcctcttcattcccg

SEQ ID NO: 11610 - DNA, 90 bp, Homo sapiens
attatcaacaccaaaaagctttctgctagggataagagtgcccaggagtggaatctggaaatagagtctacatttgatgttgtcagctca

SEQ ID NO: 11611 - DNA, 100 bp, Homo sapiens
ctgtacccagcgaattgtgtttacatctcttgaatgtcgtctctcaactagccaaacggaatctgcgactgctggtcctaggccggaagcacatgctaag

SEQ ID NO: 11612 - DNA, 100 bp, Homo sapiens
ttcctcaacaccagcaccgcagatgttgtcaaggtggcctaccaggaggccaggggtgtcgccatgagctattctcaagctggaataactgagactgaat

SEQ ID NO: 11613 - DNA, 100 bp, Homo sapiens
atggccgtgggcatctcctacattagcgtctacgaccaccaaggggatggagaagtttatgtttgggatgtgaactcaaggaagtgccttaacagatttg

SEQ ID NO: 11614 - DNA, 100 bp, Homo sapiens
atatacatgaagtacaagaattgatagacataagaaatgattatatcaactgggtccaacagcaggcctatggaatgttcttctcaccactaaatccaat

SEQ ID NO: 11615 - DNA, 88 bp, Homo sapiens
ctggaggagctccccagctggtggctggagcgaccccttgttctttggtggcgctgtactatactggcaattgctggagaagattttg

SEQ ID NO: 11616 - DNA, 100 bp, Homo sapiens
cttggtcgccgcgtccttggctggcgtgtgctgaaggtcgccatcctggctgagaagtacgcggtggactacacctggtatgtggataccatcttgaact

SEQ ID NO: 11617 - DNA, 100 bp, Homo sapiens
cccgccgctgccgcctccgagcagcccgccaggagcccaggatgtgcgagttcaagtgctacccgaggtgcgaggccagctcgggggcaccgtggagctg

SEQ ID NO: 11618 - DNA, 75 bp, Homo sapiens
agaccttcaagatagacattgaccccgaggagacgcttggcgagccggccaggggcatcacagccctttcattcc

SEQ ID NO: 11619 - DNA, 155 bp, Homo sapiens
ctggtctgcctcatcttcagcgtgctgtccaccatcgagcagtatgccgccctggccacggggactctcttctggatgagttttgccgaattgacaagcccctgtgtcacagtgaggatgagaaactcagcttcgaggcagtccgtaacatccac

SEQ ID NO: 11620 - DNA, 83 bp, Homo sapiens
catcctgtcacaggccatgctctggcaaaaactcaaacgcttcagagaaccaaagcatgaaagacgtccgtggaggatatggt

SEQ ID NO: 11621 - DNA, 100 bp, Homo sapiens
ggcaagctgtgcgacctcttctgcggccggcctgggcaggtgtcttcctcgagaggcaggcaggggatcccggacgaatttatcatggcatccagcattg

SEQ ID NO: 11622 - DNA, 98 bp, Homo sapiens
cggtgccaggagaggcggggtcggcgggagccagcgagccacgggagcgagccagctgatccaccttgagatcaagccggccatccggaaccagatca

SEQ ID NO: 11623 - DNA, 95 bp, Homo sapiens
gccgtctggagcaaagacaggagccctggaatgtgaagagacatgagaccatagccaaacccccagcgaatgacaacagagctgctcaaggcggg

SEQ ID NO: 11624 - DNA, 90 bp, Homo sapiens
cttgtccgtgcctctgtccatggctcgcatctcaaggtacaaagccggaacggaaaaattaagtttgcacagcagatcactgggatgcgg

SEQ ID NO: 11625 - DNA, 75 bp, Homo sapiens
gcgggcggacccgggggcgccctccggacgcggcagtgccggtggtggtgtgcacattgagccccggtatagaca

SEQ ID NO: 11626 - DNA, 100 bp, Homo sapiens
ctcgctgttggagttggatttggggctatagaaaagacggcatctgctacctttgagagtgccagctgctactaaatatgaacctggatcctatatagct

SEQ ID NO: 11627 - DNA, 82 bp, Homo sapiens
ccctcatcgagctcttcgtcaagcatttgacattgtgcagcaaagaaatggttatggagaagcccagtccgctgcttgtagg

SEQ ID NO: 11628 - DNA, 74 bp, Homo sapiens
aattctttgcgttgctggaggatgggccgggggcaatgccaaatccaagttagagacggggtttcgccatgttg

SEQ ID NO: 11629 - DNA, 100 bp, Homo sapiens
agtaccaactgcccagtgtgggaggaagcgttccggttcttcctacaagaccctcaaagccaggagctcgatgtgcaaatgtcagtattgaatatggtgg

SEQ ID NO: 11630 - DNA, 82 bp, Homo sapiens
cgccgaggccttcaagtgcatgatgtgcgatgtgcggaagggcacctccacccgcagccattgtttgatgtcctgtgactga

SEQ ID NO: 11631 - DNA, 82 bp, Homo sapiens
gaacacagtagtggaagatgtaaagcaatatttcgagcagtttggcaagcggagctggagtttgttcagatcatcatcatcg

SEQ ID NO: 11632 - DNA, 100 bp, Homo sapiens
aggcatggagcccgaggaggagccaagtgtggcagcagttcgtgaagtctgtgaggaggcagaactggggctcccttgcatcttccagttacaaattcag

SEQ ID NO: 11633 - DNA, 74 bp, Homo sapiens
agaatatggaaaacatatattggagctacatggatgcgtcgaccagaagattatgatattcataacagcagaaa

SEQ ID NO: 11634 - DNA, 100 bp, Homo sapiens
accaccctgcctgtggacagcaggatgattgaggtacagccatagtgctgaagttcaagttcgtcttcaattcttgacttgtgtattttcaactctggga

SEQ ID NO: 11635 - DNA, 50 bp, Homo sapiens
gcgctcaccatgttccctggagggttgtgagtcccggcccagcccctcca

SEQ ID NO: 11636 - DNA, 100 bp, Homo sapiens
taccttaagggactgagtatcattggggagaggagttcattacttcggaagtggtacaatttaatgatacaaaataaggatgaccttgccagaataatca

SEQ ID NO: 11637 - DNA, 104 bp, Homo sapiens
cgcctaatgatgtccgagttggagaacaggcgtggccagcactggctccttgatgatcggtcgcttggttatcggacagaatggaatcctctccacccctgctg

SEQ ID NO: 11638 - DNA, 105 bp, Homo sapiens
aagaactattcggttctctacttccaacagaaggttcatgtcagggctggtctttttcatggtactgagctcctgtgtaaaaccatcgtaagctcagaggtatca

SEQ ID NO: 11639 - DNA, 98 bp, Homo sapiens
ggaggagccttagtgtgtccacaaagggactcctgaaactgactgagagccagtggatttgccagcagtctgtcttccccagggtgctgctgcagacc

SEQ ID NO: 11640 - DNA, 51 bp, Homo sapiens
ctttgaaaggcatgaagatgcacagaaagagaagtttttgcgatatgtgga

SEQ ID NO: 11641 - DNA, 100 bp, Homo sapiens
gcggctgtgtggatgtcggcgaagccgcgggcgagccgcagggccgtaggcagccatggcgcccagccggaatggcatggtcttgaagccccacttccac

SEQ ID NO: 11642 - DNA, 100 bp, Homo sapiens
agatttttctcctatttcagcagttggccacaacttcattgctgggaaaaggtgactgtaatcaatgagagactgaagacagatcaacatacatcttacc

SEQ ID NO: 11643 - DNA, 98 bp, Homo sapiens
caggatctcgggctcggaacgagactgcacggttgaaatcacaaagattagacacctttttagataggtgttcttcagcaccactgacaacacggttc

SEQ ID NO: 11644 - DNA, 51 bp, Homo sapiens
acagcaacccgaagacagggaaatttagacttaattcagtgcacaaatgag

SEQ ID NO: 11645 - DNA, 100 bp, Homo sapiens
gatgaggactacccatgctcactcgtgggcaactggaacacgtggtatggggagcaggaccaggcaggttattagaacttgcaagaagatgggcattaag

SEQ ID NO: 11646 - DNA, 50 bp, Homo sapiens
ctgggggagtctgtccaaaagcaaggttcaagaagaatagcatcccctgc

SEQ ID NO: 11647 - DNA, 73 bp, Homo sapiens
acgtttccaaagctgtgtgctcaacctacttacagtcacgttactacagttggtgtaatacggtgcccagtat

SEQ ID NO: 11648 - DNA, 91 bp, Homo sapiens
atccgatgcaccctttttgtcagattatcaggatgaggacttcagattttcctgtccttgatcccagctggactgctcaagaagaaatggc

SEQ ID NO: 11649 - DNA, 74 bp, Homo sapiens
gggaatcgcaaggctcttccctgaccattttctactgtccctgcgcgaggtccttcaagggttagattacttac

SEQ ID NO: 11650 - DNA, 75 bp, Homo sapiens
attttggcattgacatttaattttagggtcctttatatagaagggagagtagtggctatgattttggctatatgg

SEQ ID NO: 11651 - DNA, 83 bp, Homo sapiens
gactactggggccagggaaccctggtcaccgtctcctcaggaacgatggcactgaatttggaggttctatctaccagaaggtg

SEQ ID NO: 11652 - DNA, 75 bp, Homo sapiens
ggcttttccagtttgcataatttatcatgtgatgtaaaacttgatcctcgtccagaataccatcggtgtatacta

SEQ ID NO: 11653 - DNA, 101 bp, Homo sapiens
cactgccctggggcagctgaactgagcgtatgtgccacgccgcccaggagacccctctgctgcaccacttcatgacattcactactttcactgcctaagaa

SEQ ID NO: 11654 - DNA, 75 bp, Homo sapiens
gtccagagacagagcactaattaggtggataagattgtggaccagctgcagcagttaatgcaggtgtatgacttg

SEQ ID NO: 11655 - DNA, 100 bp, Homo sapiens
ctggacctggctgggaacaacatccctggagacgtcctcagagccgtggggaagggcaagcccaagtcccaagcctgtgagccgagcgagccagagatag

SEQ ID NO: 11656 - DNA, 97 bp, Homo sapiens
gaagaaccttttccctaatacgtacctcattgtgggagaatcttgtggaagaagaatgaagttgctgattatgaagctacaacattttccatcttct

SEQ ID NO: 11657 - DNA, 98 bp, Homo sapiens
tctactggccttgcccagcgcctagagctggagaaagagctttcccggaggcccaagaaggtctgcatcgtgaaggtggtggggacacggaacctgtg

SEQ ID NO: 11658 - DNA, 101 bp, Homo sapiens
tcagcgggagaggagtctccaccaggactgaccgctgccgcccagcacgtccagagctccttaataagcatttatagtcagtttttggcagcaatagaatc

SEQ ID NO: 11659 - DNA, 90 bp, Homo sapiens
cattgccgccggtcctgaccaccgtgaacggacagtcccccccaggtttcaagtgccccatttgctccaagtctgtggcttctgacgaga

SEQ ID NO: 11660 - DNA, 100 bp, Homo sapiens
acgtgctcacggtcaacgagcggggcaaccactgcgagtactgcttcaccaggtacccattcctggcccagtgggtaacaagagaatggttcatttttcc

SEQ ID NO: 11661 - DNA, 100 bp, Homo sapiens
ctggcagtgcgtcaatcagagcgtcctgtgcgggctaagttctaaaaacatcagttcatctccaagcgttgagagtttgcctggaggaagagaattcact

SEQ ID NO: 11662 - DNA, 101 bp, Homo sapiens
tggtatcaaagaatggattttttcagggatataaccgactgacctggatagtagttgttcttcagatatcagttttagagaatgtggcgtggagaaattct

SEQ ID NO: 11663 - DNA, 87 bp, Homo sapiens
tgaagccatgagcatgttaaatagagctcaggaaagggaactcatgtcgtgtcccattttgtaaactgggagacacctcaaggatgt

SEQ ID NO: 11664 - DNA, 100 bp, Homo sapiens
taaagaccacatttgaggatcttattcagcgctgcctttcttcagcaacagaccctttgcaagaatgtagtaactctgatcagctacaaggaaaggagga

SEQ ID NO: 11665 - DNA, 76 bp, Homo sapiens
aaaaccaggacgaaaagatgtaggagcaagagcagctctacctgaggtcaggtgtggtgtcctctgccaccttcga

SEQ ID NO: 11666 - DNA, 73 bp, Homo sapiens
tgacggagacgcagatgtggacttgaaagaagctgcagcggaggaaggcgagagtctggtccagaatctgttc

SEQ ID NO: 11667 - DNA, 98 bp, Homo sapiens
cgcgatgctggaccagttgatgggcacctcccgggacgggctcctgtatcaggaataccgagataaatcgactctccaagaaatcgaaaccaggaggc

SEQ ID NO: 11668 - DNA, 98 bp, Homo sapiens
ggcggcatcggctgcgagctcctcaagaatctcgtgctcaccggtttctcccacatcgacctgagagcagtcatgatggcctgcactccacacaatgc

SEQ ID NO: 11669 - DNA, 100 bp, Homo sapiens
ccgcagacacgggacccgcttcgaggccgctttggcgccaaatcctgagtggactcccgaaaaattgaccaggaagggaaaatcccagatgaaactttgg

SEQ ID NO: 11670 - DNA, 100 bp, Homo sapiens
gccgcgcgccgaggacctcagcctgggagtgggcaaaggtgaagaaaggcgtgaacatcatcggcgtgcgagccagcagcccttccatttgggatgtcaa

SEQ ID NO: 11671 - DNA, 75 bp, Homo sapiens
cgttcacggcaggattcggttaggcttgggcactgtttaaaggaaagttccgagaaggcatcgacaagccggacc

SEQ ID NO: 11672 - DNA, 100 bp, Homo sapiens
gactgggggctgaagagcgcgccgccctctcgtcccactttccaggcttgggcactgtttaaaggaaagttccgagaaggcatcgacaagccggaccctc

SEQ ID NO: 11673 - DNA, 101 bp, Homo sapiens
ggagagtcgtgcggacagcattgggagcggccgagccatcccaattaaacaggagtgaaagggaagcaatgcagaaatcagagggctctggaggtacacag

SEQ ID NO: 11674 - DNA, 97 bp, Homo sapiens
gaagcaagatggctgaactcaatactcatgtgaatgtcaaggaaaagcatctttacagttcaagtggatgaaaacagaagatacatgcaaaacctga

SEQ ID NO: 11675 - DNA, 75 bp, Homo sapiens
ggctgaggaggccgaaggcatcggggacaagccactatgagaagattataggaaaaacaccaagactagaggact

SEQ ID NO: 11676 - DNA, 101 bp, Homo sapiens
gggacggggaccagcagctgtcgccgccgctctcaggctgacaaacgggctcatcataatgcactggaacgaaaacgtagggaccacatcaaagacagctt

SEQ ID NO: 11677 - DNA, 80 bp, Homo sapiens
gcgggctcctgcgagaagcaagcggaacttcctgaggagccttcacgtaaatgggtccagtcatgcctcccagtaagaag

SEQ ID NO: 11678 - DNA, 100 bp, Homo sapiens
agagaatgaagccatgtccaagattgtggaactggaaaagcaactcatgcagaggaacaaggagctggatgtcgttcggccaaaacctattgatgtacaa

SEQ ID NO: 11679 - DNA, 83 bp, Homo sapiens
aaccccagatccatttacactttacagatcaaacagagcatactgaatcagcaggactggctggtggtgcagcagacatcatg

SEQ ID NO: 11680 - DNA, 74 bp, Homo sapiens
cttggtaaggggtcggggaggggcacaagctcttctttactagagaatatactgatgataatgctctgattcct

SEQ ID NO: 11681 - DNA, 90 bp, Homo sapiens
cttggaaaaaaatcgattctgctcctctagagaggaagaagctattcagttggatggattaaatgcatcacaaataagagaacttagaga

SEQ ID NO: 11682 - DNA, 74 bp, Homo sapiens
tgggaagtgaagtcagtgcctcagttgctgttcagacttggttccttcaacctagagaaagttgaaaacccagc

SEQ ID NO: 11683 - DNA, 90 bp, Homo sapiens
tggaggcattttggggcagaatacagagatatggaatcagcaggaggatgcattagcacaacaggcctttgaagaggctcggagaaggac

SEQ ID NO: 11684 - DNA, 83 bp, Homo sapiens
gatgggcagacggattcatttagagctgcggaacaggacgccctctgatgctgctctttggcgtaaattgcaatcgattaggg

SEQ ID NO: 11685 - DNA, 100 bp, Homo sapiens
gacgttctgcacaagctccttaggagaaactaacaagaggaacacggtagatctaatacaaggcagatccaaccatccccaccgtggtcctacgatcagt

SEQ ID NO: 11686 - DNA, 89 bp, Homo sapiens
ttgggagttgagtgatattgaccatgatggaatgcttgacagagatgagtttgcagttgtgtcagttgtacccgaggcgttctcagcag

SEQ ID NO: 11687 - DNA, 50 bp, Homo sapiens
cggggaacttgtgagcctgcggtgaaagcttggatttacactgggcaacg

SEQ ID NO: 11688 - DNA, 98 bp, Homo sapiens
ggggacctgccgtggctatatggggggctacatgtgtgaggcatcatgacggtgatgtcagctctgtcggtggccccctccaaggcccgcgagtactc

SEQ ID NO: 11689 - DNA, 100 bp, Homo sapiens
caagcagttctgcaaattctcagcagggtcagtgggagacaggacatacagcagctcctccagctccagcagctggtgcttgtgccaggccaccacctcc

SEQ ID NO: 11690 - DNA, 75 bp, Homo sapiens
gtactcgcagttgcctcatcacatcctagccgatgtctctctgaagatccaggtgattgagaatgatagagccag

SEQ ID NO: 11691 - DNA, 75 bp, Homo sapiens
aagagattcagccagcacactcctcgcgagcaagatcctgaggaggatgaaggggctggccctggaggccgagag

SEQ ID NO: 11692 - DNA, 98 bp, Homo sapiens
actggctgagggactcacagctgatgacctgctgctcgtgctgatctcaggtgccttggaatttgtgtcgctgagtcagcaagcctttcagatttgcc

SEQ ID NO: 11693 - DNA, 100 bp, Homo sapiens
agacaagttcagagaatatcatgcttccagtctactgtaaaggttcctgttgctagagcaagtattctttggctaattggagaaaactgtgaacgagttc

SEQ ID NO: 11694 - DNA, 75 bp, Homo sapiens
ctcggcctcggggctccgcagggggcacccggcaggtggtctgtttttctggggggccaccaacacctcccgtga

SEQ ID NO: 11695 - DNA, 80 bp, Homo sapiens
gtcttttgactctccagaaaggaaacggattaagtactccagggaaactgacagtgtgaaatggcctttccccgggtcaa

SEQ ID NO: 11696 - DNA, 133 bp, Homo sapiens
ccgagcggggtccgcggtgaccgcgccgcccgggcgatgcccgcggggacgccgccggccagcagagcgagggggggccctcagcctcttggccttgaacgggctgttcatcttgattcacaaacacaacctg

SEQ ID NO: 11697 - DNA, 100 bp, Homo sapiens
ttatttgtggcaatagtgatcacattcattttaattttgccggaatatttcaagacaccgaaaggtactgatgctttgggttggaaaaaattgtacacag

SEQ ID NO: 11698 - DNA, 100 bp, Homo sapiens
agtccaccagatcatccatgtgagtgaccatgcagcaaaagaaggagggtcctctcagtgattaaggtggttaaataaacttggatcggctgtaatccat

SEQ ID NO: 11699 - DNA, 76 bp, Homo sapiens
ttcagcttcaaagttccccaagaagaactggaaaatgccagcctagtgtttacagatgacaacggcaacacgacaa

SEQ ID NO: 11700 - DNA, 50 bp, Homo sapiens
ggggccggggctgggctcgcagacagttaaatctcacacagaaacagatg

SEQ ID NO: 11701 - DNA, 90 bp, Homo sapiens
tcttcaagttagcagcgtttattttacagtttcaccagtgatcattaaagaatgggcagcttacaaaggaaagtctcctcaaaccccgga

SEQ ID NO: 11702 - DNA, 99 bp, Homo sapiens
caggcacgcgccactacactcggacatctgacccagatgtgatcctctgcaattctgtagagttgatccgtgagcgattgactgtgtctgaggatggac

SEQ ID NO: 11703 - DNA, 80 bp, Homo sapiens
cgtcttccacttgcacgaaagctttcctaggccaaaaagagaggatgtactgagtaaagatgctggggaatgtgcaatat

SEQ ID NO: 11704 - DNA, 87 bp, Homo sapiens
ttaataggaataccactattccaaccaagaagagccagggtatttctcaagctgccagatacgtttaccaacgactcatcaacgacg

SEQ ID NO: 11705 - DNA, 98 bp, Homo sapiens
cgccccgctgcctcgccgccacactttcctgggagcggcggccacggaggcaccatgaagaagtcttactcagcgctgtgcttcgccgtgagccgctc

SEQ ID NO: 11706 - DNA, 75 bp, Homo sapiens
ttgctgcccgacactaatgtgttactgcaccagatgacaggattggacattgagaaggaccagattattgagatg

SEQ ID NO: 11707 - DNA, 83 bp, Homo sapiens
cttttgcctcagatactattttgaaggtctctaattaacagaagatggcaaagcccagccacagcagctatgtccttcagcag

SEQ ID NO: 11708 - DNA, 100 bp, Homo sapiens
agtttgttagaggttgtcatcttggagtatttccatcatactatgaaccctggggttatactccagtataaaggtgcacatgtaaagccaggatttgctg

SEQ ID NO: 11709 - DNA, 51 bp, Homo sapiens
ggcgcctcggacaccttcgagggttggaactcccccactggaaaggattct

SEQ ID NO: 11710 - DNA, 90 bp, Homo sapiens
ttgctgtgaaaataatagacaaaactcagctaaatcctaccagtctacaaaaggacttgcaattgtgaccaaatatattacaaagggctg

SEQ ID NO: 11711 - DNA, 50 bp, Homo sapiens
ccacttacgaaatcagggtcaagatcgccatggatcggatgaagaagatc

SEQ ID NO: 11712 - DNA, 139 bp, Homo sapiens
ccgaagcgactttcggtccccgacccgctccgcctgacccctatgatgaagagggcgtccactggagacatcgctattgcggttccgaggcagtgggaagagatgcggcccctggacatcgtcgagctggcggaaccgg

SEQ ID NO: 11713 - DNA, 74 bp, Homo sapiens
ccaagacccagcaggcgtctgaggggctgaagaagatgcagagcagcctgaagctggtggactgtatcatcgag

SEQ ID NO: 11714 - DNA, 75 bp, Homo sapiens
cagcaactcccccatcgtatgaatctggcaagtgtccagagaatggctgggatgaaagtacacttgaactctttt

SEQ ID NO: 11715 - DNA, 51 bp, Homo sapiens
cccaggtccaccacctgctccatttgcaaatattaacctggctgcagagcc

SEQ ID NO: 11716 - DNA, 75 bp, Homo sapiens
agctaaatgggggcctctccagggagtgctctgttcacggctccatcgctgttaattcccaaatgctggaaaatc

SEQ ID NO: 11717 - DNA, 74 bp, Homo sapiens
gcctactcgcccgccaccctgcgctgccgccgctctgaggagttaaaggatggcatcaggcagggcacgctgca

SEQ ID NO: 11718 - DNA, 74 bp, Homo sapiens
agggaacttttggcagagctcccactagaatgggtaccacagaccatgtcatcgtcctggcgtccacgaaccga

SEQ ID NO: 11719 - DNA, 83 bp, Homo sapiens
cgtaattccagagcggggcaaactgcttggcacctcttcaataggtgacattcaatgagtgaccctggcagcaaccccaacaa

SEQ ID NO: 11720 - DNA, 100 bp, Homo sapiens
cgctacttctggggtaaccttcccggtatgaacagacctgcaggctgggacaatgaaaagaaaatagctattttacatgaaaattttacaaccgtgaagc

SEQ ID NO: 11721 - DNA, 98 bp, Homo sapiens
ctcacagtttgctctgctcttccaacaccagtggaagatgatcacatcccagtgatgcagccaacacgaacggttgtcatgtgtaacacaactttcga

SEQ ID NO: 11722 - DNA, 100 bp, Homo sapiens
gactgatccaggctggacccacgtctgtctggtgataccaggggcagagggaccactctgacaggctttggtgttaagatgttgagtactgccaacatga

SEQ ID NO: 11723 - DNA, 96 bp, Homo sapiens
cggaggcgctgcagcgcttcttcgaagataaatactgcaacaactgtagctgacttaaagtcaataataaatgaatgctataactaccttgagtta

SEQ ID NO: 11724 - DNA, 90 bp, Homo sapiens
gaaattttgagtcctcgagtgaatgggcggatctcatatcttcacttggcaaactcaacaaggaggagatgttaaagtaacccatcttgc

SEQ ID NO: 11725 - DNA, 100 bp, Homo sapiens
ccttcctgggtctgtctctgccacctggtctgcaaaagcgaaagcttcggatctacatttccaatacgttcagtcccagcaaggcggaaggcgatagtgc

SEQ ID NO: 11726 - DNA, 51 bp, Homo sapiens
ctagaaatctagcactggagaaacgaaatggacaggctactagcatggtcc

SEQ ID NO: 11727 - DNA, 90 bp, Homo sapiens
cccctcagccctgtggctgggggcagagctcagatcagttggccttatttcctcagtggaaatctactcactatgatgtggtagttggcg

SEQ ID NO: 11728 - DNA, 75 bp, Homo sapiens
gcaaaggggacgtcccaacgaagagaccacctgtccttcgagcagtctatcaggtgtttgaaagtgtggctaaga

SEQ ID NO: 11729 - DNA, 101 bp, Homo sapiens
gcgactgagtactcaacatattgactgtatttgggctgcagcacagttgttcagcacttctggtctcttcagttctgatatgattttaggattgcttcttt

SEQ ID NO: 11730 - DNA, 100 bp, Homo sapiens
gaagatctcaatgaatgggttgcagttaacagtacaaattctgagctgtctaacccctctgaaacggaatctgagcgtaaagacgagctgagtgattggt

SEQ ID NO: 11731 - DNA, 82 bp, Homo sapiens
ggcaaggagctaaagcagcgtgcgttcagccctgggatgaagttggagcccttgtttttgacattggatcctatactgtgag

SEQ ID NO: 11732 - DNA, 98 bp, Homo sapiens
gaaggcgagtgccaggagggagagatcctggccacaggcagtacggcatggtgctcgagctccaaacgagaatggaagccgctggaggaccgtagctg

SEQ ID NO: 11733 - DNA, 83 bp, Homo sapiens
cagtgacaagaagcggccagagacggccgctacctgtctgaggaacccgagccctacctggcagtctacctgcactcggagcc

SEQ ID NO: 11734 - DNA, 97 bp, Homo sapiens
gagaaggaggaggtgaccacgcgcgagggtcccgacggcctacacatggggcgctgtgggcgccgtggggctggtgtgggccaccgattggcggctg

SEQ ID NO: 11735 - DNA, 49 bp, Homo sapiens
agctgcagtctaatagtaacacagaggcaggatgacgcaaaacacggtg

SEQ ID NO: 11736 - DNA, 50 bp, Homo sapiens
tcagatttgaaaatgaaagtggagaccagtgtaaatttgatcatgatgca

SEQ ID NO: 11737 - DNA, 83 bp, Homo sapiens
ctcggcctcgcggcgacggcggcggtggcggcttggacgactcggagagccggcctccaggcccaaggtcagcatcccactgt

SEQ ID NO: 11738 - DNA, 100 bp, Homo sapiens
gaggagaaagagaaagaggataaggaggcggtggggctggagaacccgaagcacctcccggcgccgggacgcttcttctacatgctgctgctgaagaaac

SEQ ID NO: 11739 - DNA, 100 bp, Homo sapiens
ggagaagggcgagaagaagaaggaggctgccctgaggatctgtgtttggtgaaaaggagccaaattcacctgcagggcaggcggctctagcagcttcaga

SEQ ID NO: 11740 - DNA, 101 bp, Homo sapiens
cgggatctcaggtcctcgggggcggcggccacgccaaggacgggtctgggaagatccgaggtatctcctggagaagccatctatgatgtcattggggaaat

SEQ ID NO: 11741 - DNA, 82 bp, Homo sapiens
ttcagtggtgttaaggattccaacaacaattccgatggcaaagccgttgccaaggtaaatctcacctggctatcgtgcagcg

SEQ ID NO: 11742 - DNA, 96 bp, Homo sapiens
ctgcgcctcgggagtcggcgtccaggctcggagcgcgacacggagactaggtggcagatcaaggctctcatcaagaagtacatccagaggcagcag

SEQ ID NO: 11743 - DNA, 100 bp, Homo sapiens
gaaaccttgatagaaaagtggatgaattcattgtctcctgagaaagtgccaatacctgcaagtaagcgtgcatcttctgaccttagtatcgccagctctg

SEQ ID NO: 11744 - DNA, 100 bp, Homo sapiens
gacactgtgaggcgcaaaaaatgtcccttccagagctggccagaagcctagctctgcgtgcctcttgctgtgccctacctggacaaacccccaactccgc

SEQ ID NO: 11745 - DNA, 89 bp, Homo sapiens
cgcgctactctctctttctggcctggaggctatccagctgctcgtcgacctgcgggaagggcctgcagtcccgggtggtgcagtgcatg

SEQ ID NO: 11746 - DNA, 100 bp, Homo sapiens
gagcggccggggcctggggctgcctgccgggcggccgggcgcggcgagcccagttcagcttcttaggactctgcacttccccagaaggaagaattaaaaa

SEQ ID NO: 11747 - DNA, 75 bp, Homo sapiens
gaggaaattcaacaggagctgatcaaccaagagggatttcggaatgccaagaagggcacaggcatcgcagcacag

SEQ ID NO: 11748 - DNA, 83 bp, Homo sapiens
gatgaggagggctctgatccccccctgccggggagggcccagcgcatccgacagacaatgcagatcttcgtgaagactctgac

SEQ ID NO: 11749 - DNA, 87 bp, Homo sapiens
gggtttccgggtggttcgcgctccttctgaattggcagcgaggtcgcggcaggttcgagatgtcagtattgaatatggtggtgaggc

SEQ ID NO: 11750 - DNA, 75 bp, Homo sapiens
gatcgtcttcctcttcagccatccaggaatactcccccagttgcaagaggcgcaggaccgtggaagacttcaaca

SEQ ID NO: 11751 - DNA, 82 bp, Homo sapiens
caaggagctaaagcagcgtgcgttcagccctggggaattacatgaatgacagtcttcgaaccaatgtgtttgttcgatttca

SEQ ID NO: 11752 - DNA, 100 bp, Homo sapiens
gccgcgccgcagtcggtcgtccgctggacaagcacgagggcgcgctcgagacgctcctgagatatctccacaggaccttcttggttaaatcagggactac

SEQ ID NO: 11753 - DNA, 100 bp, Homo sapiens
gacgacgctgctgggtccgctgagcggggcgacccgaggtttcacaccaggaccacagcagctactcggagatccattccaaggcatgcgcaaacccatg

SEQ ID NO: 11754 - DNA, 58 bp, Homo sapiens
caaagtgggaaacattgaaatcaaggtacttcatagacagcagtctcagccagccaag

SEQ ID NO: 11755 - DNA, 101 bp, Homo sapiens
gtggtgctggctcagtacatattcaccttgaagaggaagacggggcggaagaccaagatcatcgagatggtgtggccgacgacgatgccctcgctgaggag

SEQ ID NO: 11756 - DNA, 117 bp, Homo sapiens
aattttctggctccctcgactggttgatcagcagattggaaagactggaagcttcttcagctgtcccctttcctccaacccaacggcttactttcaaggaagtatttgagaatggga

SEQ ID NO: 11757 - DNA, 82 bp, Homo sapiens
tccctgaccatggctccctgcagtaccctttaacggaattacatgaacgacagccttcgcaccgacgtcttcgtgcggttcc

SEQ ID NO: 11758 - DNA, 98 bp, Homo sapiens
ccatggccgcggttcccgagttgctgcagcagcaggaggaggaccgcagcaagattgacaagtatctctatgccatgcggctctccgatgaaactctc

SEQ ID NO: 11759 - DNA, 98 bp, Homo sapiens
tttgcatagcttcaacatccctatgcagttaaaaatatacaacattgaagatcggacacgggagcatggggaagtgattgactgtgtgcaggagctga

SEQ ID NO: 11760 - DNA, 101 bp, Homo sapiens
tctgctaacaccagatagtggaaagaaaccatgtgctgaaatgtttgacgacactgatggtttgatcttttatgacctagtgcggcaaattaacagaaaaa

SEQ ID NO: 11761 - DNA, 100 bp, Homo sapiens
gccgccccgcgggggagggcggagctggcgcggcccctagctttctccttctggtgtggggcccgagatcacccggaagttcaggctgaattctgaaggc

SEQ ID NO: 11762 - DNA, 100 bp, Homo sapiens
agatgtctgacatggaggatgatttcatgtgcgatgatgaggaggactacgacctgccgagggccctgtggtgacagcccagtacgactgcctcggctgt

SEQ ID NO: 11763 - DNA, 80 bp, Homo sapiens
gaaagaggtcaagcagtctcaggcttgaagtagaaaatgccatgatgagaaaaactattaaaaaacaggatgaccaaatt

SEQ ID NO: 11764 - DNA, 74 bp, Homo sapiens
tggccggccttggtgcggcgagccgagcgaggcagctctgagccgcgcgagctggaagtcgagtgtgctactca

SEQ ID NO: 11765 - DNA, 100 bp, Homo sapiens
cggatttcgacagtaacccgtttgccgacccggatctcaacaatcccttcaagccccagcatgagaccagatgtaagctctcctccatccagctcctcaa

SEQ ID NO: 11766 - DNA, 100 bp, Homo sapiens
cttctgtcaaaaacacagggatgagcgcccataacccagggaactggagtcaacttcccaattggagaaatcccaagccaaccatactatcatgacatga

SEQ ID NO: 11767 - DNA, 90 bp, Homo sapiens
gttacatctttggcaaagtctctcatcaaatcctggaaaaaattattagtggagatggctatttcgaaaacagcccactgatgtcccagc

SEQ ID NO: 11768 - DNA, 100 bp, Homo sapiens
tgggctcgcggcgtctccggggaaagccgtggccccgagggcggatccgagtataaaagaacgtgtggatcactttgctgagtacatccaagatttgaag

SEQ ID NO: 11769 - DNA, 75 bp, Homo sapiens
tggcgctctggctgtgctgcgcgacccccgcgcatggtggaatatgtgatcaagtgtgacatgtcagctctgcag

SEQ ID NO: 11770 - DNA, 100 bp, Homo sapiens
gagaaaatgggagcagttttcatggatgcccctgtttctggtggaatttttgagagatatcttcaatctcctgtttttgttgccaagtctaaaggaccga

SEQ ID NO: 11771 - DNA, 98 bp, Homo sapiens
agaagatccgcagctccacgcagcaagacccgcgccgccgggacccccaggacgacgtgtacctggacatcaccgagcggactacagggaggagtgtg

SEQ ID NO: 11772 - DNA, 100 bp, Homo sapiens
cttcactgtggctcatacatgcaggatgaagttaaaggaagtagatcgtacagccatgcaggcatggagccctgcccagaatcaccccatttacctagca

SEQ ID NO: 11773 - DNA, 100 bp, Homo sapiens
ctaacgataaggagcggtttgccaggaatgaatctgaagtctgctgcagtaaaacacagaaggctttaaaatgttttcttgcataaaattcaaaactttt

SEQ ID NO: 11774 - DNA, 83 bp, Homo sapiens
atttgaagtctgtgtcaaacatccatatcataagtggaattttggagatattcaaaggccaatggtggcagagtctacataga

SEQ ID NO: 11775 - DNA, 83 bp, Homo sapiens
tggagcggcagcgcgtcatggccgcccaggtggcgctccggaggcagcaggccaccgaggggaaaggccatacaaatgtcaga

SEQ ID NO: 11776 - DNA, 50 bp, Homo sapiens
aagcaacaacaatcatagctggagccaggtgagaatttcaaggattatcg

SEQ ID NO: 11777 - DNA, 138 bp, Homo sapiens
ctggaggccaaggagctgtgggaccagttccacaagctaggcacggagatggtcatcaccaagtccgggagtctttcttctgagaacacccgatgtgtgtggatcggaagctcagtgggcttattcgtatttaacctg

SEQ ID NO: 11778 - DNA, 100 bp, Homo sapiens
cagcagcaccagctcatccaggaggccctcatcttcgacaacaagcacaccaactataccatggagcaacagcggcgggagcgggagcagcggaagctgc

SEQ ID NO: 11779 - DNA, 100 bp, Homo sapiens
caaatacatcagcttgtaggagacagagtactaaggctcgtacgtctgcatcgattatcttacgtggggcaaatgatttcatgtgtgatgagatggagcg

SEQ ID NO: 11780 - DNA, 75 bp, Homo sapiens
agctcttgcagaaaatccaggacttgtaaacaaatcttgttatgaagatggttgcactgctgtgatccatcctca

SEQ ID NO: 11781 - DNA, 75 bp, Homo sapiens
gatctggtgtaccaggcgaagctggccgagcaggctgagcgatacgacggacccttgaacatctgtgaagaaatg

SEQ ID NO: 11782 - DNA, 100 bp, Homo sapiens
cccaacctagtgggtgtaatacatcatgaactgcagggcagcaggtatattgtgatgggccacatctaccataagagacggcagctccctacagctctgc

SEQ ID NO: 11783 - DNA, 100 bp, Homo sapiens
ctatgggagaaggaaggcaggcagcaggcaggcagcttgaaatccactctccagatgctaagcacacggtgatcctaaggagcaaggactcagccacggc

SEQ ID NO: 11784 - DNA, 99 bp, Homo sapiens
attctctacagcacagagtgaaaaaccgagtgtggcagactctgctggtacttttccctagacttgaccaggacctggcgtattgtagtaccaatgaca

SEQ ID NO: 11785 - DNA, 100 bp, Homo sapiens
tggagcctcagttggaagcagccgatccagcctgcggagcctgtggggcaggtctgtagcatctctgtctgttggagaaggcacaggtgtcagagcacca

SEQ ID NO: 11786 - DNA, 74 bp, Homo sapiens
atggagggccccgacgatagcgaggtcacctttgcattgcactcaggttgtgagaactgctttattggatgctg

SEQ ID NO: 11787 - DNA, 100 bp, Homo sapiens
cagagttttcatcatggataactgtgaggagctaatccctgaatatctgagctaaaggttggtcttcaggttgtggcagtcaaggctccagggtttggtg

SEQ ID NO: 11788 - DNA, 100 bp, Homo sapiens
aaacagtccttccactcataggtcatacagggcagctgcaatgactctccgcacggtattattgtcattgcaagcactattggcagctgcagagccagat

SEQ ID NO: 11789 - DNA, 100 bp, Homo sapiens
cgcagcgacgcggctggcaagactgtttgtgttgcgggggccggacttcaagcatcaacaacagcaacttgtgattggcggtgaccggatattcagttgc

SEQ ID NO: 11790 - DNA, 96 bp, Homo sapiens
acgaggaggaagaggtggccataccgttgaccgctcctccaactaaccagtatgatctcgtgaaaccttgagagaaactgaatgacgaatgaaact

SEQ ID NO: 11791 - DNA, 88 bp, Homo sapiens
caaatactatgaagacaacaagcaattttttgagggagacgtggtgggcggtccttcctgtgacacgacccttgagtgacagttctat

SEQ ID NO: 11792 - DNA, 98 bp, Homo sapiens
gaggggtagggccaacggcctggacgccccaagggcgggcgcagatcgcggagccatggattgcactttcgaagagatggacagagacgtatgtgcgt

SEQ ID NO: 11793 - DNA, 100 bp, Homo sapiens
acactatggatttcctacttatggtgggattactttccatcctggaactactaaatctaatgctgggatgaagcatgaatgacagcccatatcaaggcgg

SEQ ID NO: 11794 - DNA, 107 bp, Homo sapiens
cacttatgtttgtaaatgtgagtggaagccatgaggccaaaggcagttgtattgattcctgaatttgacaacttgtacctggatatgaatggaattatacatcagtg

SEQ ID NO: 11795 - DNA, 98 bp, Homo sapiens
ctgattccttcattaatgtccagaaggcggagcgtgaagtaaaagcattggcaaaacttgatcatgtaaatattgttcactacaatggctgttgggat

SEQ ID NO: 11796 - DNA, 82 bp, Homo sapiens
ttgcctccggttggggctgctgtttctcttcgccgacggctcgtggtcccaagaagcatctgaagcgggtggcagctccaaa

SEQ ID NO: 11797 - DNA, 100 bp, Homo sapiens
tcacattagcccccagtttccagcttcaggtgtgaaccagacccccgtggtagacgaaaaggatcgtgagcttgaaattaaaaacatctatagtcatcga

SEQ ID NO: 11798 - DNA, 89 bp, Homo sapiens
cggctttggaatccaccagctacatccagctccctgagtgtgtcccggcatggatatccggaacaacctcactaggttgcatgagctgg

SEQ ID NO: 11799 - DNA, 87 bp, Homo sapiens
cttattctcttgtactggctggtggatttgcggatgaagtcaaggctgaggagaatgcagagggtggggagtctgccctgggaccgg

SEQ ID NO: 11800 - DNA, 100 bp, Homo sapiens
cccagcaagaccacaaatttattcaagtcaattaccatcctttaccagggagcatattaatgaaaagtgccataaactgaaaaaccaaacatgagggtag

SEQ ID NO: 11801 - DNA, 118 bp, Homo sapiens
cgggtcccgcggcgagcgagctcctgaggtacggcgtcgggaacatacatatgatagttgagaaagacacatattctgatcatgaagaaataaacacaagttaaatatgactaagcag

SEQ ID NO: 11802 - DNA, 100 bp, Homo sapiens
ccaccgcatcaagagcttcaagaacaagggccgcgatgtggaagtaaaacttccttttcctgtagatcaaatcacagatcttccaaggaacgatttccag

SEQ ID NO: 11803 - DNA, 75 bp, Homo sapiens
cccagctatgtactccccgtactgcctcacccaggtgctggagaatctggtaaaagcaccattgtgaagcagatg

SEQ ID NO: 11804 - DNA, 98 bp, Homo sapiens
caccatgaagatctggacttcggagcacgtctttgagagcctgactacggggccctgtatgagggacgcaaccctggcttctatgtagaggcaaaccc

SEQ ID NO: 11805 - DNA, 106 bp, Homo sapiens
cgccaactctgacctggccaattctgacgccctcaaggtcgccaaggaggtggacccccagggtgaggtccagagatatatccagagaggagtggaagggctcgga

SEQ ID NO: 11806 - DNA, 100 bp, Homo sapiens
cggcagtccatgacggtgaagaagggagaggacctgggcgtgaccaaggtgggccacatgaagaggatcctgtgtggcatcaaggagctgagccgcagcg

SEQ ID NO: 11807 - DNA, 74 bp, Homo sapiens
ggaatcagatttgaaaatgaaagtgcaaatcctgatcctaactgttgtcttggagtatttgggctgagcttgta

SEQ ID NO: 11808 - DNA, 97 bp, Homo sapiens
actttaaaataaaggacttccctgaaaaagctaaggatatctttattgaagctcacctttgtctaaataagatgaagtgatcaaagtccgaacagat

SEQ ID NO: 11809 - DNA, 89 bp, Homo sapiens
cattatcccgctggatgcacactgctgcgtggagggtcgggaccctgagttaggcctgaagtctgtgcagaagctactggatgctgtgg

SEQ ID NO: 11810 - DNA, 100 bp, Homo sapiens
aacggcgagagtgggcgagaacgtccactgcgggccggcgaaagctgactgtgagctgcttgtccccatcctgcggccgtcctggggacacagagccctc

SEQ ID NO: 11811 - DNA, 100 bp, Homo sapiens
tgaaaacagcctcaagaaaccagtaacagattgtgttatttcagtggagtgttatgattatgacaatgatgggtcacatgatctcattggaacatttcag

SEQ ID NO: 11812 - DNA, 123 bp, Homo sapiens
aagaactatgtcatggatcaaggaaggagagctgtcactttgggagcggttctgtgccaacatcataaagctgccaccacctgtgaccccgtggtggaggagcatttccgcaggagcctgggc

SEQ ID NO: 11813 - DNA, 75 bp, Homo sapiens
tggagaaggattttgacaccctgaaggtcttattagtaggtaagaaacagctgctcctccacctccaccccagcc

SEQ ID NO: 11814 - DNA, 100 bp, Homo sapiens
gtggcttattacttgtgactgcttcttggacacttaatgattgttggcaagaaatgtgctgctgatctgggcctgaataagggttatcgaatggtggtga

SEQ ID NO: 11815 - DNA, 100 bp, Homo sapiens
aaaaaagtggctcagattcagaatggggatcatcgtcttgctcttcttttatctcagtttgtgggtagccagtcagtccgggagctgctcaccatgcagt

SEQ ID NO: 11816 - DNA, 90 bp, Homo sapiens
cagttagtcacccacctacatgttgaggcagcagtacctgtccaaagatcgctttagttccaccttgctccacaagcagcacaaccacac

SEQ ID NO: 11817 - DNA, 74 bp, Homo sapiens
caagaagacgccgcttcctccagagggctaacatcatggcagaacaggatgtggaaaacgatcttttggattac

SEQ ID NO: 11818 - DNA, 100 bp, Homo sapiens
aaagtattgcagagtgccttagcagccatccgacatgcccgctggttcgaggaaaatgcttctcagtccacgtacactcacgtggaagctgagtgtcctt

SEQ ID NO: 11819 - DNA, 90 bp, Homo sapiens
ccccacctgaacagaaaactgcatttgacaagatggaacagattaaaagggccaataaactgtttaccaatgattgtatatttctgaaga

SEQ ID NO: 11820 - DNA, 75 bp, Homo sapiens
gacccagagaagaggaaaactctaccggtgcagatagccgcaatggctgaaaatggtgataatgaaaagatggct

SEQ ID NO: 11821 - DNA, 99 bp, Homo sapiens
aggaaggcccccagcggtccccgggtccgcagcttctggcggttcgggcggtcggcgaagcggccggcaggttgtacatcctggagacctgaagaattc

SEQ ID NO: 11822 - DNA, 83 bp, Homo sapiens
ataagtcagaattattccagaaagccaagggaatgacagaggaagaggaagacaaacttctggcactgaaagacttcatgatg

SEQ ID NO: 11823 - DNA, 100 bp, Homo sapiens
aaagttaaagacccaacagaatacactggacctgaaagttatgtggctcaaatgattgtggacacagccagtgtgaagtcctctagtagtcttgaaccca

SEQ ID NO: 11824 - DNA, 100 bp, Homo sapiens
aactgcacgtgtcctatgccccggacttcggcaccatgacgcacctgctggagaacctcagaggcagcatctgtccagccttcaaagctggagtctgtcc

SEQ ID NO: 11825 - DNA, 50 bp, Homo sapiens
cccgcatcccccccggagccgggtgattgatatgcccgagcacaaccctg

SEQ ID NO: 11826 - DNA, 50 bp, Homo sapiens
ggaccctggtggaggaagaaaggtactccaaagattcaggtttactcacg

SEQ ID NO: 11827 - DNA, 50 bp, Homo sapiens
gaggcctgcagtgggagagcagggtcgcctgcgaggccgctggccaggcc

SEQ ID NO: 11828 - DNA, 131 bp, Homo sapiens
gccacctctgagaagggagacgacgctgctgggtccgctgagcggggcgacccgagactgctggagttaataccaccgacaaagagatggaggtgcttcacttaagaaatgtctcctttgaggacgcaggg

SEQ ID NO: 11829 - DNA, 98 bp, Homo sapiens
gtatagagaacaaaaaacaccacagtactatcgtctatcattggatgaagtggctccggagatcagcatctggaatcaagagacccatggcatctgag

SEQ ID NO: 11830 - DNA, 99 bp, Homo sapiens
ccgggagctgacacacctctcagagatgagccgatcagggaaccaggtgtctgaatacatttcaaatactttcttagggccagatgcagatggctggag

SEQ ID NO: 11831 - DNA, 100 bp, Homo sapiens
gctcaacttcttgaaacagttcatagatactacactgaatttcctacagttcttgatattacagttatcaggaactgttgccgttattacatcagatggg

SEQ ID NO: 11832 - DNA, 75 bp, Homo sapiens
atgccgcaaagaatcaagttgcaatgaaccccaccaacacagtttttggccgtggtggtggaggcagtggaggtt

SEQ ID NO: 11833 - DNA, 98 bp, Homo sapiens
gggagtcgtggcgtcgtctgcgaccgctgccttctcgggttatgaagacagtatggagtttccagaccatagtagacatttgctacagtgtctgagcg

SEQ ID NO: 11834 - DNA, 98 bp, Homo sapiens
aggaaggaaaatttttgtacatttccgaaacagtctccatctacctaggcctctcacaagcagagatcctacaagaatccaggatgatgatcccagat

SEQ ID NO: 11835 - DNA, 82 bp, Homo sapiens
aaagagtcaacagcagtggcaacagctccgctgcccagaagagagcctgcaacactgccacctgtgtgactcatcggctggc

SEQ ID NO: 11836 - DNA, 98 bp, Homo sapiens
cgatctcttgtatcaggagttcttgcctctccttccaaacctcctgcaagatatcaatgatgtcaaacggctgaaacctggctacttagaagctactg

SEQ ID NO: 11837 - DNA, 101 bp, Homo sapiens
tcttcagtccctgatcagatcagaggagcagctgcagctactggaggttctgttctcaatgttgctgccctgttggcatcaggaacacaagtaacacctca

SEQ ID NO: 11838 - DNA, 100 bp, Homo sapiens
attgaggaccgtgttcaagaggaagcccgctgccttgtggaggagttgagaaaaaccaagggtgatgagacaaaccatgcttctgccacatcaacacagg

SEQ ID NO: 11839 - DNA, 75 bp, Homo sapiens
gaaccagtcagtaaagcaaaacagagtcggagtgaaaagaaggcacggaaggttctctccataaatgaagaaggg

SEQ ID NO: 11840 - DNA, 87 bp, Homo sapiens
gctaccccactcctgggccgtccctgaaggtcagaagaggccaagtgatggaaatagtggattaatggcaaaaaagcaaaagcgtac

SEQ ID NO: 11841 - DNA, 98 bp, Homo sapiens
catcaaacatgattgaacgatctgtggtggaagcagcagtccaggaatgcagtcagtctgttgatgaaactatgttggcaaaagcagcttttgatgat

SEQ ID NO: 11842 - DNA, 100 bp, Homo sapiens
ctcctaaggaagaagcctagaagaggaggaagaggaaagaaaaggagtcaggaatgcctcttaggcttctccagggaaagtgaccgaggcagtgaaagag

SEQ ID NO: 11843 - DNA, 75 bp, Homo sapiens
ggacacagtcacagaggctgggatggccatagcaatggcggactccctggaggaaaagcggaagcggcagcggtc

SEQ ID NO: 11844 - DNA, 75 bp, Homo sapiens
acagccttcctgtgtggttttaccgcccagagagcgtcatggacctggccgcttacaaacacgcagatggcaaga

SEQ ID NO: 11845 - DNA, 96 bp, Homo sapiens
ccgcacgcagtatgaggcaatggcgtccagcaacatgcatgaagccgaagagtggtaccgctccaaggtgaaaggtgtagcagtcactcggcctac

SEQ ID NO: 11846 - DNA, 82 bp, Homo sapiens
ttaaggaagtaaaatggcggacctggcgaacgaaggagatacaactcgtcaacgaatcaaattcagtgatgacagagtatgc

SEQ ID NO: 11847 - DNA, 97 bp, Homo sapiens
tgctttccaggcccagcgggctttccttctgatggcctctcagtaccaacaaccccacgaggtaatcttcagcaagtactgcaactccagcgacatc

SEQ ID NO: 11848 - DNA, 75 bp, Homo sapiens
caggacttgagtaacagcaacatggtactctttgagcacatcaaattcttccattgccgctcttctctgtgccct

SEQ ID NO: 11849 - DNA, 98 bp, Homo sapiens
tcagttgttgcatcaaatacttcatatttggcttcaatgtcatattttggttttgattacgaagatgcaggctaccagactgcagaacttgtaaaaat

SEQ ID NO: 11850 - DNA, 75 bp, Homo sapiens
ctcaccgttctgcccccagaactagggtctcttgcaacgtgtgagctgcctcttgccaagagtgagtggcaaaag

SEQ ID NO: 11851 - DNA, 82 bp, Homo sapiens
tcgtggccaggctcattatccattttcgagacattcgatgatggcttggaaaaaagtccaatgaaaaaaaaacagaagaaga

SEQ ID NO: 11852 - DNA, 100 bp, Homo sapiens
aggaacctgctttctctcgatgaggataacatccctccagaagatggcaagctgtggacaagaagtatgaaggtcgcttacagcattctacacaaattag

SEQ ID NO: 11853 - DNA, 100 bp, Homo sapiens
gggctggaggcggcggagcgcgagagcttcgagcggactcagggcctgacacatttagggaagggcacccttaccctctgcccctaccacagcgaccggc

SEQ ID NO: 11854 - DNA, 75 bp, Homo sapiens
aagaacaatatcgacttccccggccacaactacaccacgccaccaccacctatcatgacagatggtgaagatgcg

SEQ ID NO: 11855 - DNA, 106 bp, Homo sapiens
cctgcccggtgcccgaggaggcagccaagctcgtggcctgcctctgcgtgcgtgtggacactgccagcggctgcagccgacttggaatgacctgggagacaaatac

SEQ ID NO: 11856 - DNA, 76 bp, Homo sapiens
gcgaagctggccgagcaggctgagcgatacgacggcttgcagccaatttactggagcagggatgacgtagcccagt

SEQ ID NO: 11857 - DNA, 90 bp, Homo sapiens
gttgatgcaaatgggaagatatatcttccttatctacatgaatggaaacacgctgagggtaaaaagctgggattggtaggctgggtccag

SEQ ID NO: 11858 - DNA, 90 bp, Homo sapiens
ctgagccagaaaattctagggaatttgcagcagctgcaaggacccttcccaggcatccgtgtcattctggaccttactcccaactaccgg

SEQ ID NO: 11859 - DNA, 74 bp, Homo sapiens
gggagtgctctgttcacggctccatcgctgttaaaaacaatcttcagtactggcacgccagtggctgcagccac

SEQ ID NO: 11860 - DNA, 100 bp, Homo sapiens
gtttttagccttttaacattcaaggattagcctcgcagtcacctctgtgccctgctggttgtcttcccagcgctgctgtagttgccttccatggatctat

SEQ ID NO: 11861 - DNA, 48 bp, Homo sapiens
aatgtgcccccatactgcacagagtgggctcgggatgagtttgaaggc

SEQ ID NO: 11862 - DNA, 100 bp, Homo sapiens
gaccctgactcaatgatgatacatggctgaagcattgcatggaaaaccccttagagatttgtttgattccatggataaaacttcttccagtattccacct

SEQ ID NO: 11863 - DNA, 100 bp, Homo sapiens
cggaattaagtgagagagatgccatctacaaagaattctccttccacaattttaatcagctgtctgcttttctgtggagactgcgggttgcagacaccag

SEQ ID NO: 11864 - DNA, 100 bp, Homo sapiens
tggccagagaagacacgaataatctgttcagtgtactaatggtcacttgatgtgcgctggctgttttatccacctactagcagatgcccggctgaaggag

SEQ ID NO: 11865 - DNA, 100 bp, Homo sapiens
gaggaagctcaccttcgacgaggaagcttataaaaatgtgattgctgctaaaattgattcaattcctcacttgaataattccacacctctagtggacccc

SEQ ID NO: 11866 - DNA, 80 bp, Homo sapiens
ccccgctcccggggtccccggccggccaagcagtgtttacgaaaatggggttacagaagatgtgaagatatttgttggat

SEQ ID NO: 11867 - DNA, 90 bp, Homo sapiens
ggcgttcgaggagatcatcctgcagtgatgcacagacaattagaacattaactctcatctcaaaaactatacaaactttgggaagctggg

SEQ ID NO: 11868 - DNA, 80 bp, Homo sapiens
cctgtcgcggcgcgagacctctggtcatcatcagatttgaaatatttaaagtggatacaaaactatttcagcaatgcaga

SEQ ID NO: 11869 - DNA, 100 bp, Homo sapiens
tggggctgcggcgcctgggactgcaccgcaccgagggcgagctccaggcatcataggcgagtattagtggaatggctaagagatccatctcaggagcttg

SEQ ID NO: 11870 - DNA, 82 bp, Homo sapiens
atcatgtctgcgagccaggattcccggctccccatcaacccgggcagccgggatttaaattcacggtggctgagtcttgtga

SEQ ID NO: 11871 - DNA, 90 bp, Homo sapiens
caagatgggcatctattacattccagcctcaggagtgcaagtagctgatgaagtatgtcgcattttttatgacatgaaagttcgtaaatg

SEQ ID NO: 11872 - DNA, 49 bp, Homo sapiens
ctggacaaaggaacaggtatctcaggtggccaccgagtactaaattcac

SEQ ID NO: 11873 - DNA, 104 bp, Homo sapiens
agtgaagtttaatgttgccaatggaggcaccatgactcctgtgaggatgcagcactccctggcaggtcagacctatgccgtgcccctcatccagccagacctgc

SEQ ID NO: 11874 - DNA, 100 bp, Homo sapiens
ccgggagggcgcgcggcgccggagacatgtccaggcggaaacagagcaacccccggcagatcaagcgaccaagaatcgccttcagccctgtctggtgcat

SEQ ID NO: 11875 - DNA, 102 bp, Homo sapiens
taatgaggatgaagattcaccaaataagctatatactttggttacctatgtacctgttaccactttcaaaagaattgaatgatctggcacgggaccctccag

SEQ ID NO: 11876 - DNA, 101 bp, Homo sapiens
ttggattctaccctgaggaggaggcgcgtggtgagaggagaggattgtcagtggcttcgccccgaggagagctgactgccctgggctgctgcctccggcag

SEQ ID NO: 11877 - DNA, 100 bp, Homo sapiens
gaggtgatcttcaggctggaacaaggagaagaaccatggagactggaggaagaattcccaagccagagctttccagggatgaattgtaaaagcaacatca

SEQ ID NO: 11878 - DNA, 98 bp, Homo sapiens
gggggagcggggccttccacaccccctccgtgggtgtgtgacccaacatgagtgaagtttcctgcaagaaacgggacgactatttggaatggccagag

SEQ ID NO: 11879 - DNA, 100 bp, Homo sapiens
tgttccaccttcagagcgtcacggcgtacgccctcatggggaaaatctccccggtgactttcaggtttttctatatgagtggagaagacagctgttacca

SEQ ID NO: 11880 - DNA, 74 bp, Homo sapiens
gaagatggctactctggagttgaggaccaagaatcgccttcagccctgtctggtgcatccttggcagaaagtga

SEQ ID NO: 11881 - DNA, 97 bp, Homo sapiens
aggaatctgattccaagcaaaaaccagatcttgtagaaaatttcagctgtagcccttggactagaagctgaaataacagaagctgtgtacgatgcat

SEQ ID NO: 11882 - DNA, 100 bp, Homo sapiens
tacaagatgaaaaatattaccagatctgtgaaagaatgactgaccctgttccttgaggctgtggaggattctcagtgattccactggtcaaatgatgtga

SEQ ID NO: 11883 - DNA, 75 bp, Homo sapiens
gatgttaccgaattagccaagaaacacaaaccacagatcctcatgatggaagtggaaaagcattgtcgctgtgga

SEQ ID NO: 11884 - DNA, 90 bp, Homo sapiens
gcgcatcactcccagctgcgcaaagcttgcgaggtggcgttagacccagtcatggcagcctccagcatcagttcaccatggggaaagcat

SEQ ID NO: 11885 - DNA, 75 bp, Homo sapiens
actttgaaatgaatctgcaatcagtatttcaaagcttttctggaacttgtaatagctggcatcgttgagaatgaa

SEQ ID NO: 11886 - DNA, 75 bp, Homo sapiens
caagaaggacctgtgtaactttaacgaacagcttgaaaatgatcactgatgtatagtgaagctaacagacgggag

SEQ ID NO: 11887 - DNA, 100 bp, Homo sapiens
ccgaaaccaattttcactgagggcaagaaccagctggagattcagaatctacaggaagactgggatcactttgaccacttccagcacctgctgaacgact

SEQ ID NO: 11888 - DNA, 75 bp, Homo sapiens
ggaggagcagttgtctgatgaagagaagtgtgaagcctcagtttaggtcatctggtggttcagaacactcaacag

SEQ ID NO: 11889 - DNA, 82 bp, Homo sapiens
ggggagttaaagctggcagatttcgatgaccttcctgaacttcaggcagttcaaagtgatcctacccaatctggcatgtacc

SEQ ID NO: 11890 - DNA, 80 bp, Homo sapiens
ccttccaaacaactgaaaagctttattttgttctggattttgttaatggaggggagaaaactgtgagagtagtgattaat

SEQ ID NO: 11891 - DNA, 100 bp, Homo sapiens
tgcctatgtattccctggggatggcgcatcacacaccaaagcaagagtgagccatggagctacgtgtggggaacaagtaccgcctgggacggaagatcgg

SEQ ID NO: 11892 - DNA, 101 bp, Homo sapiens
atacaaggagaagcactggatccaaagcatgtctgcaacccagccattttcagtatctggagtccatctttcaccatcttctcctgagattgtactggacc

SEQ ID NO: 11893 - DNA, 100 bp, Homo sapiens
cgggagttacaccgccaccgccaggaatcaccccaatgctacagctgatccgggccatcctgaaagtccctgaagatccaacccagtgctttctgctttt

SEQ ID NO: 11894 - DNA, 97 bp, Homo sapiens
gaagtgctccgtcgcccttgcctccagtgggtaattccagaattgattggccataccattgtcactgtattactgctcatgtcattgcactggttca

SEQ ID NO: 11895 - DNA, 82 bp, Homo sapiens
ccggagcccctcggcggcgccaccatgtactcgggagccggccccggtggaagttaaacgagctgagcctcgggacagcaag

SEQ ID NO: 11896 - DNA, 100 bp, Homo sapiens
tgacagcggctttcaacccccacctcagcccagcaattcgaagaactgatgaccaccccaattttacagcccactgaggccctgtccccagaagatggag

SEQ ID NO: 11897 - DNA, 97 bp, Homo sapiens
aagttgagaccgagaatgtggaaacaggtgttgacagctcttctaccacaagcagtgcttctccaatgcccaacagttatgatgccctggaaggagg

SEQ ID NO: 11898 - DNA, 98 bp, Homo sapiens
gctctgctcttccaacaccagtggaagatgatcacatcccagcgccatcatgaccgggtcctataacaacttcttcaggatgtttgatagagacacgc

SEQ ID NO: 11899 - DNA, 82 bp, Homo sapiens
ggagctaagagatatctgcaatgatgtactgatatgatgcttcctggtgtgtttagtggttggtgccattccaattttctgt

SEQ ID NO: 11900 - DNA, 76 bp, Homo sapiens
caactaactgatgctgacaccaaagaactgatagtgcatcagctgacccaggtaatttaaaatattcttcatccag

SEQ ID NO: 11901 - DNA, 98 bp, Homo sapiens
tgaatgccaagcagaaaattacctaaatgcactctttcgaaagaaagcagtccagagcgtgagtccattcacatcctgagtgttgatgagaagaacaa

SEQ ID NO: 11902 - DNA, 76 bp, Homo sapiens
cacaaatgttcttaatggcatctagaatggggctagtgacatttgaagatgtagctgtggatttcacccaggagga

SEQ ID NO: 11903 - DNA, 98 bp, Homo sapiens
ccaaacccaccatcttctggtttcattggaaaaccagtagattcccagacatcgcgaagtgaatctgaaattgtgccaaaagttgctaaaatgactgt

SEQ ID NO: 11904 - DNA, 75 bp, Homo sapiens
ggtctttatcccaccattagagagagctgatttagaagaaagttttaatgaacatgaactggagccctcatcacc

SEQ ID NO: 11905 - DNA, 75 bp, Homo sapiens
taccgtgcatcgcacctatttaagaggaatggaagttggatacactttgtgacttgtacgagacactgaccatta

SEQ ID NO: 11906 - DNA, 82 bp, Homo sapiens
cgagaccgcggccgggaccgaggatgtccagggtgctgcagaaggacgcggagcaggagtcacagatgagagcggagatcca

SEQ ID NO: 11907 - DNA, 75 bp, Homo sapiens
agaatcttggctctaagtgccacaccaggtagtgatataaagcttgtagaccctggagttaaggcatggacaccc

SEQ ID NO: 11908 - DNA, 90 bp, Homo sapiens
tgctcactcccttaatctgtccgtctagaggtttggcttctacaaaccaagctccttcgagaactcatagaacggaagaccagctccttg

SEQ ID NO: 11909 - DNA, 75 bp, Homo sapiens
cagctggtacatccagggcgaccgtggtgacatgattaccatcaggcccatcttgacgattccaagaccaccccc

SEQ ID NO: 11910 - DNA, 74 bp, Homo sapiens
gtgccaggtgtcccgttaacgtctctgttagttcagagcaaattgaagagttttctgatgttaatgaaggagag

SEQ ID NO: 11911 - DNA, 96 bp, Homo sapiens
ggaagtaagaataagctagtccagacagctgaactaaccaaggctgacaccaacagagatcgtattgatattgccaatgccagagcaaagaaactc

SEQ ID NO: 11912 - DNA, 82 bp, Homo sapiens
gctgcgggaaatcgggctgaagcgactgagtccgcgatggaggttcgagaacttgtcttggacaattgcaaatcaaatgatg

SEQ ID NO: 11913 - DNA, 50 bp, Homo sapiens
atggagaaaatcagctgcaagatgactctcaaattgcagacatactgtca

SEQ ID NO: 11914 - DNA, 83 bp, Homo sapiens
cccatcccggaggtctccgccggctcccggatggatcctgagcttgaaaaaaaactgaaagagaataaaatatctttagagtc

SEQ ID NO: 11915 - DNA, 98 bp, Homo sapiens
tcctgacagcttcagccccagcagctcaggtctgcgcaggcatggcactaagtgtcccatggcacatttggccctcatggaggcctcaaaagggcagg

SEQ ID NO: 11916 - DNA, 75 bp, Homo sapiens
gtcaaaacagagcttttggaatctgaacaaggggaggaagaaggcacctacgatcaaactctggagttccgtagg

SEQ ID NO: 11917 - DNA, 100 bp, Homo sapiens
agcaaggggcaggagctggcgcactggatgtgtgtgagaagtggggagaaatgccaccactacaacccaaacatatgagggaagccgttagaaggttaaa

SEQ ID NO: 11918 - DNA, 74 bp, Homo sapiens
ttacattctctatctgcgcaccttggagtccaagcttgtgctctttggctggagtgcaatggtgcaatctcggc

SEQ ID NO: 11919 - DNA, 50 bp, Homo sapiens
ccgacagccaggcccgggagaagaagggaaaaggccgaggcatcagcgtg

SEQ ID NO: 11920 - DNA, 100 bp, Homo sapiens
ccagcgtctgcattgctccggactcagccaagttccccaacggctccccgtcgtcctggtgctgcagcgaattcagcttagagaactatcaacacaggac

SEQ ID NO: 11921 - DNA, 100 bp, Homo sapiens
gcactgcatggttgctgctggatgtgttgtgttcctggcttccctctggatgctgacagaaacaaggatagtaaagctgttacttcgtcacggtggaaat

SEQ ID NO: 11922 - DNA, 55 bp, Homo sapiens
agtccctgagccgcccctacacccacagatgatgtctgtcctcatgaacaccatt

SEQ ID NO: 11923 - DNA, 75 bp, Homo sapiens
gacaccgccgccacaccgccgccacaccgccgctgcctcagtcatgccgctgagatctgtatctgtggacctgaa

SEQ ID NO: 11924 - DNA, 83 bp, Homo sapiens
ctgtcagtgggtggcggtcacctagacaatgcagatcttcgtgaagactctgactggtaagaccatcaccctcgaggttgagc

SEQ ID NO: 11925 - DNA, 90 bp, Homo sapiens
ccattctcacaatgatttcctcctggccattctcacgcgttgtcagattttggtttctacaccagtttcaggtttagctgtgcctcccag

SEQ ID NO: 11926 - DNA, 98 bp, Homo sapiens
caaccgccagatcaacctggagctctacgcctcctacgtttacctgtccatggctttccttaaagtttcccatgtctcaatggactcctgaatataac

SEQ ID NO: 11927 - DNA, 96 bp, Homo sapiens
tgacctgaagatactgggaaatccatagctaagatgccaggaccccctgaaagcctagacatggcagggcaagaatcctttcgttccatcacaagg

SEQ ID NO: 11928 - DNA, 75 bp, Homo sapiens
aactattcaacatggaggcggaggtcgataagctggaactgatgaggtgttatgaacataaacagtatagaaatg

SEQ ID NO: 11929 - DNA, 82 bp, Homo sapiens
gggaacaatgaggcctacgcagagctcatcgtccttgattctgctgaagtgatccagtctcgagtgaacgaccaggagggcc

SEQ ID NO: 11930 - DNA, 75 bp, Homo sapiens
cttggagcatgaggaggtccgggcagcttgttggggagttcctggaagtgacttgcatcaatcctacattcatct

SEQ ID NO: 11931 - DNA, 100 bp, Homo sapiens
ttccgaggaagccggtgttgccgagctgatttagaagaaagttttaatgaacatgaactggagccctcatcacctaaaagtaaaaagaaaagtcgcaaag

SEQ ID NO: 11932 - DNA, 75 bp, Homo sapiens
gcctcccaacgtgctgggattacagagagccaggaccatcttggagtttgagaaaatgttaccagaatggctgag

SEQ ID NO: 11933 - DNA, 89 bp, Homo sapiens
ctctcaatgaggagaccttcatcaacaacctcaagaagcgctttgaccacagtgaaatatacggcttccatccggcaacgctccaagtc

SEQ ID NO: 11934 - DNA, 100 bp, Homo sapiens
ggggactccaaagtgaaagtggcggtgcggatacgacccatgaaccggcgagataattgtatggaagagatacagtgattttaagaaactacacaaagaa

SEQ ID NO: 11935 - DNA, 99 bp, Homo sapiens
cagccgccgccagagaggcccgcccaccagttcgcccgtccccctgccccgttcacaataaacattgaatgaggaggataaagcaaagattgctaaaag

SEQ ID NO: 11936 - DNA, 75 bp, Homo sapiens
gagtccagcccaggaaaatggagagagatggagtctcactctgtcacccaagctagagtgcagtggtgtgatcat

SEQ ID NO: 11937 - DNA, 100 bp, Homo sapiens
tatcaccattccggacctgcggggcaaagaaggccacttctactacaacatctctgacttgcttggctcaggaacaacagaagagaataaagaaaatgac

SEQ ID NO: 11938 - DNA, 100 bp, Homo sapiens
agagtggatttgattttaggagacagccattcggagctacatccagtgaataagagtgatcagcagctggactgtgccttggacctaatgaggcgcctgc

SEQ ID NO: 11939 - DNA, 82 bp, Homo sapiens
cagttccgggagctgctggaggctcgcggcgccggctgctctagcgagcagttcgaggaggatgaccgagtgggagacagca

SEQ ID NO: 11940 - DNA, 82 bp, Homo sapiens
gctggagctgggtcagtccgccgctcaccccgcggccgcaccttcccgccttctcaggtacatgtcccagagcaagcacacg

SEQ ID NO: 11941 - DNA, 101 bp, Homo sapiens
ctcctgactctgggagccgtgctgagcgctgcagccaccgtgagggaggcccagggcctcatggcagggccaaaacagagtggagtacgagaaaagggtcc

SEQ ID NO: 11942 - DNA, 100 bp, Homo sapiens
atgatttggctctgagttttcaggagaaagctggctgtgatgagatctgggaaaaaatttgtcaggatgccattggaggagaatctatgcctattccaac

SEQ ID NO: 11943 - DNA, 95 bp, Homo sapiens
ggagacacagtgtcagaattacaaggtgagatcagccgcccggccaagctatcttctcgctagcaggttgtggaaaatgcccttaaagtgaaccc

SEQ ID NO: 11944 - DNA, 50 bp, Homo sapiens
ctcgcttgcagttcagcgaccacgggtaacaagatgctcaactatagtgc

SEQ ID NO: 11945 - DNA, 101 bp, Homo sapiens
agaggagcaggtgtccaagaacctctttgggccgcccctggagtcagcctttgaccacgaagattttacaggatcctctacaccacatactacgagtccat

SEQ ID NO: 11946 - DNA, 50 bp, Homo sapiens
ccagaacatccactagcctcactaaagtcatcagcagtgaggactctgaa

SEQ ID NO: 11947 - DNA, 74 bp, Homo sapiens
cttgaagagcttttcatggcagttaagtttgtgaagcctggagctgagaattcaagagactaccctgacttggc

SEQ ID NO: 11948 - DNA, 75 bp, Homo sapiens
gtccacccaccgccgccgcctcccagagctagggccatgagtaccttgtttttgactggaaggagctgtggggtg

SEQ ID NO: 11949 - DNA, 50 bp, Homo sapiens
ctcattaccagtctgaaggagcaaggaaatctggcattttttaaagtttg

SEQ ID NO: 11950 - DNA, 75 bp, Homo sapiens
gccagtatgaagtggtgaaggagtgtgtgcagcgatggtgtcggacggcatgacaggcagcaatcctgtgtcccc

SEQ ID NO: 11951 - DNA, 100 bp, Homo sapiens
gtcaagtgcggtgctatgatccttaagctgaggttatgaagacagtatggagtttccagaccatagtagacatttgctacagtgtctgagcgagcagaga

SEQ ID NO: 11952 - DNA, 80 bp, Homo sapiens
tccacttgcagccagggactgggcatccacccggccaggttcccaggaaggactccctggaggaaaagcggaagcggcag

SEQ ID NO: 11953 - DNA, 51 bp, Homo sapiens
gagaaggaggaggtgaccacgcgcgagacgcatcttctctccagactgccg

SEQ ID NO: 11954 - DNA, 88 bp, Homo sapiens
tgaagaattgcttccggatgactgaccaagagcccgatggcaccagcaaggagtgtgtgttcatcgagaaggttctggagaacaacta

SEQ ID NO: 11955 - DNA, 98 bp, Homo sapiens
ccagagcctggagtctgcgaaggccgggacccggttccccggcccacagtgggggtgtgcaaacccgagagaactggtgaatggtagtgtctagaaag

SEQ ID NO: 11956 - DNA, 75 bp, Homo sapiens
acctctgccacaccctggggcctgtgcatcctcctgacccacaggctgagtcatcactagagagtgggaagggca

SEQ ID NO: 11957 - DNA, 96 bp, Homo sapiens
ggggaaaagaaactacagtcatcacaatggtctggatggttctcttattcaagtaccttccgttgagagggggaaacttagtaaagttcgcctggg

SEQ ID NO: 11958 - DNA, 75 bp, Homo sapiens
cctgcacagccgcggcggcagcagcagtgagagatggaaatcatattatgtagaatacttgggtgacatctgcct

SEQ ID NO: 11959 - DNA, 99 bp, Homo sapiens
atctccttcatgaaaaagtaccattttgctgcttaagattagacaaggatttggatgtagctttgcccattattgagaattataaggatcggttgttgg

SEQ ID NO: 11960 - DNA, 50 bp, Homo sapiens
tggagtactgcaagctcatcctgaggaatagctattcagtcagacagaac

SEQ ID NO: 11961 - DNA, 82 bp, Homo sapiens
ggagatcgtcccgcgcctgccggattattgtgcaacaaagtggtccattttgcgggaacgctttgaccgaggactgtacgcc

SEQ ID NO: 11962 - DNA, 100 bp, Homo sapiens
catacagcacaattctggacacattgtattggtttgatgctcctacctggaacagccaaaattgaccaagaggcagaggaaaattcactgacagagactc

SEQ ID NO: 11963 - DNA, 97 bp, Homo sapiens
caaactggtcacccctcatgacaggctaaagaattacctccaaagccattgtcaagaccacagcagtcatctgcaccagtccagctgaactctggct

SEQ ID NO: 11964 - DNA, 75 bp, Homo sapiens
gctcctcccgctgccgctgccgctccaggagacaggtctctaattaacagaagatggcaaagcccagccacagca

SEQ ID NO: 11965 - DNA, 75 bp, Homo sapiens
caccgtgacatccgaggtgcctttctccaaaagggactttgaacatgtcggggatcgccctcagcagactcgccc

SEQ ID NO: 11966 - DNA, 75 bp, Homo sapiens
agggggaagggcctcaaagccagaaggcactactgcagtcttcagttaagcaacaagtagaagctattgaaaaac

SEQ ID NO: 11967 - DNA, 74 bp, Homo sapiens
agtgattttttgcctttgttgattaactggacaaattcagtgaaaaatgtgaggttttacaatattctgcaagg

SEQ ID NO: 11968 - DNA, 87 bp, Homo sapiens
gtggacaagatcatgggcaaaggacagatccagcgtttagtgggctacagatggcatggcatctaaaaccttacaatgcttgatttt

SEQ ID NO: 11969 - DNA, 100 bp, Homo sapiens
tccagaagtccagagctgaggactgcctgtttgcagatgccttattggaggaactggaacgctccacccttcaggacagtgatgaatattccaacccagc

SEQ ID NO: 11970 - DNA, 100 bp, Homo sapiens
gccgacacctctgagataaaagggcccctttcgactagcctctgctgaaagcaagcccttgtgattcgaaatggtgagaaaatgagcataaatgcggagg

SEQ ID NO: 11971 - DNA, 75 bp, Homo sapiens
attcatttagagctgcggaacaggacgccctctgatgggaacgcccttttgcttgtgactggcagggctgcgaca

SEQ ID NO: 11972 - DNA, 83 bp, Homo sapiens
ggcactgtggggacagggcgacgtgtgtccaggcgtttgccgccgcttacaaacacgcagatggcaagaagattgatggcagg

SEQ ID NO: 11973 - DNA, 82 bp, Homo sapiens
gcggaggtgctgggagcgagttggctggcgaggaggatggccgagaccagtccaggttggagacccaggtgtgggaggcgca

SEQ ID NO: 11974 - DNA, 95 bp, Homo sapiens
cttcacagagagtccagttgccaagagagatggctgcccaaagattgtcaatctggggagctctaagacagacctcttctatgaacgcaaaaaat

SEQ ID NO: 11975 - DNA, 90 bp, Homo sapiens
atttgaagactaccgtcgtgtccgtgctgaccctttctccctgccacacatggtcctcagaatggttggaatgaccctccagctttgaac

SEQ ID NO: 11976 - DNA, 49 bp, Homo sapiens
cgaaactttcaccgcgagcgggatgacgtcatgatgccccagcgggtga

SEQ ID NO: 11977 - DNA, 75 bp, Homo sapiens
ccaccacggagttccggtacaagctcctgcgggccggcgggtttcagaagctatctcctgagcagtgtgtaattc

SEQ ID NO: 11978 - DNA, 90 bp, Homo sapiens
caccatcaagcatggatcggcgctggacgtgctcctctccatggggttccccagagcccgcgcgtgggcattcacgctgatcatcatctc

SEQ ID NO: 11979 - DNA, 98 bp, Homo sapiens
tggaccacggcgcagacgcgggcgagctgcggctcggacgccagcggacacgcgggcgagacgctgaccggaaaggagattgagattgacattgaacc

SEQ ID NO: 11980 - DNA, 74 bp, Homo sapiens
tcaactgccgcaacaataagaaactcctgggccgcgtgaaggccttcgatagtggtatgttcaagccacttgtg

SEQ ID NO: 11981 - DNA, 100 bp, Homo sapiens
agctcctgggccacccctcctttcaggtcaaggtgtcccaccggccttccgggttccagcgccaggcctggtgcctgccccaggaggatgagcatttgca

SEQ ID NO: 11982 - DNA, 50 bp, Homo sapiens
caaactcctggacagtatcactttttctggatatgccgcagaaggatccg

SEQ ID NO: 11983 - DNA, 82 bp, Homo sapiens
ccaggatctcgggctcggaacgagactgcacgacctgcctagagctggaacgttacctccagagcgagccctgctatgtttc

SEQ ID NO: 11984 - DNA, 82 bp, Homo sapiens
caacaacgaggacctcttccccaccaacgttgcctgagacagctgtcttgtgagggactgagatgcaggatttcttcacgcc

SEQ ID NO: 11985 - DNA, 83 bp, Homo sapiens
ccccgagctgctggagaactgaaggcggacagtctcctgcgaaaccagatcgcaccccctccctccctggcggagcccctgaa

SEQ ID NO: 11986 - DNA, 100 bp, Homo sapiens
caagaagccctgcctgatgagacagaggtggtggaagaaactgtggcagaggtgactgaggtgatctgtgaaaatggttcgctattcacttgacccggag

SEQ ID NO: 11987 - DNA, 98 bp, Homo sapiens
gatgtgtctggtgtgggtttcccaagcaaggttccttggaagaagatgtctgcagaggaaagatcctacaggaatggatcctgatgatatttggcagc

SEQ ID NO: 11988 - DNA, 49 bp, Homo sapiens
caaggcaggcctcttccgaccaagcttttgcctgcctcctcctttcccc

SEQ ID NO: 11989 - DNA, 105 bp, Homo sapiens
tggtcatacaccagtactaccaaggacagcttttttcctgcaagttctttattggtgaaaacatgaatccagatggcatggttgctctattggactaccgtgagg

SEQ ID NO: 11990 - DNA, 97 bp, Homo sapiens
tactgggtgtgaagggggatggcaaatccaagaagaagcaagcaggccggcctaaaggatcaaaagggaccagttactctccacaagaaaattcaca

SEQ ID NO: 11991 - DNA, 101 bp, Homo sapiens
ctggggcttcctgctccagctgatacactctgtgcagttttagagagagacacactcagtattcgagaaagtcgactttttggagctgttgtacgctgggc

SEQ ID NO: 11992 - DNA, 83 bp, Homo sapiens
acctggcacaccagcgcccgcaggatgcccaggtacctgcaccagtcaggggccctgaccatggaggccctggaggacccttc

SEQ ID NO: 11993 - DNA, 100 bp, Homo sapiens
aacaagcgctgcaaggacaagaagaaatccattctcatgaagcagctgcagcagcagcagcacagcgacaagacgggaaccctactctggaaactgtcag

SEQ ID NO: 11994 - DNA, 75 bp, Homo sapiens
tccagaaacaacctgaaggtgtttccagatccctgggcctgccctttgcttaacagagcgttccaaaaagaggac

SEQ ID NO: 11995 - DNA, 75 bp, Homo sapiens
ccctcacccccaccagctgtagctgaacgtctggatggtggagaagagcaggtatggacctgtctgccaatcagg

SEQ ID NO: 11996 - DNA, 74 bp, Homo sapiens
ggcaggtccacgggaagcctacacgcccaagagaagagtttagtgactgaggccgaaaattcacagcaccaaca

SEQ ID NO: 11997 - DNA, 116 bp, Homo sapiens
cacctgcccggtgcccgaggaggcagccaagctcgtagcctgccactccgtgcgccagcactccttgcccgaggacagagatggcgagcgcccggattggggatgagtatgcggag

SEQ ID NO: 11998 - DNA, 51 bp, Homo sapiens
ccaccactctcctggaaggtggcttccgagtaccctcgccccagagacacc

SEQ ID NO: 11999 - DNA, 82 bp, Homo sapiens
ggcgcgactcgcttctttcggttctacctgggagaatccaccgccatccgccaccatggattttttatcaagcagaaatgca

SEQ ID NO: 12000 - DNA, 87 bp, Homo sapiens
gccagtgcggagagaggctgcctcctgcagcccccatagcaggtccggccgtagcacctccgcgccgtcgccatgtcgcggtttttc

SEQ ID NO: 12001 - DNA, 90 bp, Homo sapiens
cctctgagaagggagacgacgctgctgggtccgctgagcggggcgacccgagtggatgaaagcagaagactcatctaaagttagtggtgg

SEQ ID NO: 12002 - DNA, 90 bp, Homo sapiens
aataccagctcgacaaagatggggttgtcctctttaagaaggatctcccagccatccagccccggctagtggcggtcagcaaaaccaaac

SEQ ID NO: 12003 - DNA, 74 bp, Homo sapiens
gaactcttctggggagaccccgacgtggagtgccgagtggaaggactaaaagtggtggagattgagaaatgcaa

SEQ ID NO: 12004 - DNA, 82 bp, Homo sapiens
gtcaacacagacagcatctttttgatctcaactgcaaaatctgcatagggtggtgattccactgaagcaactgccaaaccaa

SEQ ID NO: 12005 - DNA, 75 bp, Homo sapiens
attatgcaggtggtctgtgaagccacacagtgtccagatacgaggtgcaacaggtgatcgagaaccacatcctca

SEQ ID NO: 12006 - DNA, 100 bp, Homo sapiens
tgggccgctcccgggccagcgagggctgcgaaagaagttgtagtttcgccatgttccacaaggtcagagttcctcgccagagccttctgaaccggatggg

SEQ ID NO: 12007 - DNA, 50 bp, Homo sapiens
ggacagagcccgtggtcgcgcagatcctgataacttaagtgactctctct

SEQ ID NO: 12008 - DNA, 83 bp, Homo sapiens
cctaactccagatatctacctaattgattggatgggagtcccagcttctggagacggggttcctggggatcttcctgtgccct

SEQ ID NO: 12009 - DNA, 75 bp, Homo sapiens
tgtcatttggaagaagcgaagaggcctccccatggccacccatggaccagtcggcattcacttcctcccttctgc

SEQ ID NO: 12010 - DNA, 100 bp, Homo sapiens
ccctgtctgctctgtggactcaacagtttgtggcaagacaagctcagaactgagaagctgtcaccacaggttatcctgaatacatgtctaacaattttcc

SEQ ID NO: 12011 - DNA, 100 bp, Homo sapiens
tttaagcctgatctaacccctagaaacaggtcattatccagctcaggaaaacctgatgttccttgttctctgtacatgaaggagctacaaggtttcattg

SEQ ID NO: 12012 - DNA, 74 bp, Homo sapiens
ctgccgtcatgtctaagtcagagagctgggatgtttgtgtctaagttctttgggggctatgtgcctgagatggt

SEQ ID NO: 12013 - DNA, 98 bp, Homo sapiens
gcgttttgttttcccctcggcactaggcagcggaggagcccgaccgacccggacctgggaggaaggcaaggtgctcatctttgatgactcctttgagc

SEQ ID NO: 12014 - DNA, 90 bp, Homo sapiens
atcgaatagttgatgccctaaatgaattcagttgcagaatgaagaagagtctggagaacctgaacaggctgcaggtgatgctcctccacc

SEQ ID NO: 12015 - DNA, 83 bp, Homo sapiens
tgctgtaaccacctcacagattccagcttcggaacaagagaccctggtagctacagcaagctgggtagcaggcagatccaaag

SEQ ID NO: 12016 - DNA, 50 bp, Homo sapiens
aggagtcaccgcagctccaccgtgcatctgggtcacaggccccagttcca

SEQ ID NO: 12017 - DNA, 128 bp, Homo sapiens
aacgtgttcgctgcccagaagaagggaaggcgcgagtgaggaaaggaggtactgtaggtgcccacggtctgcagatgatgagcgaaagcatcctgtcctctgccttttctgtggggctatactatgtt

SEQ ID NO: 12018 - DNA, 50 bp, Homo sapiens
ctggattgggaaagaccatggcagtccatccagcccacagctaacctgga

SEQ ID NO: 12019 - DNA, 75 bp, Homo sapiens
attttgaaccttacttgagtccacaggcaaggcccttccagggtcacccccgagaggacaacaggcatctggaag

SEQ ID NO: 12020 - DNA, 50 bp, Homo sapiens
cccggcggagcccgcagcttccctgccgatcaatgtccgagttaccacca

SEQ ID NO: 12021 - DNA, 75 bp, Homo sapiens
tgaggctgagtctcagtgttgccctgttcagtctgaggtatgctatacctccggagcatggaaaacgacttgaaa

SEQ ID NO: 12022 - DNA, 75 bp, Homo sapiens
catcaccatggaaaaagtgacttgagcagtaggttcagctgcagcccggaaagaaatcataagaaacaaaattcg

SEQ ID NO: 12023 - DNA, 83 bp, Homo sapiens
ccccaccgccgccccctccggcgtgttcatgcccccgggggactttgaacatgtcggggatcgccctcagcagactcgcccag

SEQ ID NO: 12024 - DNA, 98 bp, Homo sapiens
aaaacttgaaactaatcctgatattaagccatcaaatgtggaacctatggaaaaggctcccagccccattgccaataccttcctccactatcgaacca

SEQ ID NO: 12025 - DNA, 100 bp, Homo sapiens
gcagaaggcctctctcctgatacagcaggcgctcaccatgttccctggagattgtaaaccatggctgtgtggatacaagctcagcagctccaaggagaag

SEQ ID NO: 12026 - DNA, 83 bp, Homo sapiens
gggatggttccatcatggcgtcaatgcagcttcgagagctgtgcccaggagtgaacaaccagccctacctctgtgagagtggt

SEQ ID NO: 12027 - DNA, 100 bp, Homo sapiens
gctaaagcaggaaaataaaactcttttgaaagttgtgggtcagctgaccagctgcagaaccttggcctgaaaatgctacattatatcagcaattgaaagg

SEQ ID NO: 12028 - DNA, 82 bp, Homo sapiens
cctggggatcgctacggaccttaaaatacccgcaacagccccttcgtcccaacgggagatacagatgacccaccaagaatta

SEQ ID NO: 12029 - DNA, 97 bp, Homo sapiens
cctcctcggcgggagccctcgcgacgcgcccggcccggagcccccagcgcagcggccgcggtgtcatggagaaactccagctgggcccagagattct

SEQ ID NO: 12030 - DNA, 115 bp, Homo sapiens
ggtcctggagaagcggccgcggccagggaacggggcatcgcggttccaacgcaatggcaccagcatgatatcattgatcattcctcccaaagaccagatttcacgagtggcaaaa

SEQ ID NO: 12031 - DNA, 101 bp, Homo sapiens
tggtctcaaggacactgcatcgtcaaactgatcccctggccgttggaggagcagttggttgaaaaataccggccacagaccctgaatgatctcatttctca

SEQ ID NO: 12032 - DNA, 75 bp, Homo sapiens
gtaaaagtagagaaggatcaaggacggatgatgaagtagtacagagatttctggtgttcagcaaattcagttttc

SEQ ID NO: 12033 - DNA, 82 bp, Homo sapiens
ctgggatcttgctgggtgagatggcagtgtgtgcaaaaaagcgccccccaggtagccaatctgaattctaaggacctctcat

SEQ ID NO: 12034 - DNA, 95 bp, Homo sapiens
attaaagtgaaattttctgaccctggacagcctatgtacggcaagaagaagctgaaatacctgccctacaatcaccagcacgaatacttcttcct

SEQ ID NO: 12035 - DNA, 98 bp, Homo sapiens
tcctccttggtcgccgcgtccttggctggcgtgccctgggcagtgacggggttcgggtgaccatggagagtgcgctcaccgcccgtgaccgggtgggg

SEQ ID NO: 12036 - DNA, 83 bp, Homo sapiens
gtacacgcgagattataagaagcttgggttcatttcaagctgcagtttcagctcaggccacatcaaatgtcaacccaacccag

SEQ ID NO: 12037 - DNA, 90 bp, Homo sapiens
ggtgcaggtgaggggcgcgcgcctgcccagctttgcagcccccgaacgcggcctcgcacaggagtccaaaactacttacctggaagacct

SEQ ID NO: 12038 - DNA, 82 bp, Homo sapiens
gatattcctccccagcatgtcagcatgaccaagcgcctctactacctctggatgtgtgagaagccctaccactgcaactggg

SEQ ID NO: 12039 - DNA, 87 bp, Homo sapiens
gggcggtgctacaactgggctggcggccaggatggttcttagccaaaactggacaagccaaggcatctgtagccaaagtaaacaaat

SEQ ID NO: 12040 - DNA, 74 bp, Homo sapiens
agatcatcgagcatttcaaacgatggagaaggatgaaactgtgagtgactgctccccacacatagccaacatcg

SEQ ID NO: 12041 - DNA, 85 bp, Homo sapiens
tttagagctatagaagcactcctgcaatattggtctctagtgatccctgaaaagttccagcatattttgcgagtactcaacacca

SEQ ID NO: 12042 - DNA, 100 bp, Homo sapiens
tgatgaggagaaactggcatccacgtcatgtggtcagaaatcagctggtgccgaggtgaaaggaattgaaagatgttggccatcgtgatcagatggctgc

SEQ ID NO: 12043 - DNA, 100 bp, Homo sapiens
attttcgaagtctcggtcccgaagccgatctctctctcgttcaaggaagcgcaggctgaggtgctggacgtcattgctcctccttatacctctgacttcg

SEQ ID NO: 12044 - DNA, 98 bp, Homo sapiens
gtggacaaaagaggggaaactatgggagttcccaattaacaatgaagcagagttctccggggtgctgcaccagtgtcacattttggcctctgagatgg

SEQ ID NO: 12045 - DNA, 75 bp, Homo sapiens
gtcctcggtgtcggtggccggcagtcatctcgcggccgttcagggcaacacaactatttatgtgctggaagaaat

SEQ ID NO: 12046 - DNA, 75 bp, Homo sapiens
gcagtgacagccggcggcggagcggccggtccacggaggagatacaaggcagatccaaccatccccaccgtggtc

SEQ ID NO: 12047 - DNA, 80 bp, Homo sapiens
tgggtcattatgaccagagtattgccgcggtggaaatggaggtcatgtaatgtttgcagaaataaaaatggagaatggaa

SEQ ID NO: 12048 - DNA, 100 bp, Homo sapiens
tgctggcactgctgctctgctgggacccgaggctgagccaagcaggaaccccagtagtgagaaagggtcgctgttcctgcatcagcaccaaccaagggac

SEQ ID NO: 12049 - DNA, 80 bp, Homo sapiens
cggcctccccttggattcagacgccgattcgcccaggggacggcaaaacagaacagaaaggcggagataaaaagaggggt

SEQ ID NO: 12050 - DNA, 97 bp, Homo sapiens
tttgatcgactgaatgagatcaaaggtcacctggaaattgccttattggaaaaacatttcttacatggcatccacagcgtcacggccttctgcaccc

SEQ ID NO: 12051 - DNA, 100 bp, Homo sapiens
gagatgtgattaatgtattccaccacctccgccagttaagaggaaaaagttatgagttgcagaaacgaattgctgaaatggaaactcaaaaggaaaaaat

SEQ ID NO: 12052 - DNA, 80 bp, Homo sapiens
tggccctggccctgatcatcctgctgggcttcgtccagatcgggaagggtccggcctctttggcctacccccgttggctc

SEQ ID NO: 12053 - DNA, 100 bp, Homo sapiens
taagagcattttggaacacatccaggaaaagataactttcgacacacctgtagacgttcgccaggtaaaggttgttctgagcctctgggtatgaaatcag

SEQ ID NO: 12054 - DNA, 75 bp, Homo sapiens
actggagacaacctgcagcctcctggcaccaaagaaatcttctctacatataccctcagagtcttaattttgcca

SEQ ID NO: 12055 - DNA, 100 bp, Homo sapiens
agcccgactcggtgattgaggacaagaccatcgagctcatgtgtgctcactgatccgcctccagggccaccgccatgtcgagccgcggtgggaagaagaa

SEQ ID NO: 12056 - DNA, 50 bp, Homo sapiens
agtattccaaatttgatggcaaggaatactctgaagatagtaactccgag

SEQ ID NO: 12057 - DNA, 100 bp, Homo sapiens
gatcctgtagaaattcaaaccctagtgaataaagccaagagagaccttggagtaattcgtcgacaggcagtactacgagatgctttacaacacagctgac

SEQ ID NO: 12058 - DNA, 101 bp, Homo sapiens
ctccggatctcttcgtctttgcagcgtagcccgagtcggtcagcgccggaggaccttgtaaagtcaaaaatgtcagaaacttccaggaccgcctttggagg

SEQ ID NO: 12059 - DNA, 82 bp, Homo sapiens
ccggggcgctgactgcgtgttaacatcagtctattatcctcccagtccacaacgctgaaccgtggctggacgaatgtttgag

SEQ ID NO: 12060 - DNA, 51 bp, Homo sapiens
tgcaaggactggttccacggcaggacttgggaccctggaggactgacgctg

SEQ ID NO: 12061 - DNA, 90 bp, Homo sapiens
ccctggccctgccctgcaaactcaccatcccacagagagcttcttggacacttaatgattgttggcaagaaatgtgctgctgatctgggc

SEQ ID NO: 12062 - DNA, 100 bp, Homo sapiens
cttcggccttgtccgagcaaacagaggcgctcatccacagagccacatctgttagtgaaagaaaggatgtcttaagagaagctgaaattttacacaaagc

SEQ ID NO: 12063 - DNA, 90 bp, Homo sapiens
ggaaaatttcaggctgaaggtttagcgggtgccggaccctatgtactcggaactgggcttatcttgtacgctttatccaaagaaatatat

SEQ ID NO: 12064 - DNA, 85 bp, Homo sapiens
ccatcgttgctgccttcttcgtcaaggggttgcagatggtgtaggaggctggagagactatggagttgatccatctcaattctca

SEQ ID NO: 12065 - DNA, 100 bp, Homo sapiens
atgaaaatgaatatgttcatggtgatataaaagcagcaaatctacttttgggttacaaaaatccagaccagtgtgctggaattgatgttcgtctgtgtga

SEQ ID NO: 12066 - DNA, 82 bp, Homo sapiens
cgggggacgagctcggagcagcagccaggtagctacagcaagctgggtagcaggcagatccaaaggatatcatgaagtttcc

SEQ ID NO: 12067 - DNA, 83 bp, Homo sapiens
gacgcggtcacatgcacgcccgtccacacacacccagagacaaagcagttccaattccagagaaaatgagtgaatgggcacct

SEQ ID NO: 12068 - DNA, 75 bp, Homo sapiens
ttcatgccgccgcccccccccacgcgccgcgtgcccggccgcgcccagcaggggaacgcccttttgcttgtgact

SEQ ID NO: 12069 - DNA, 100 bp, Homo sapiens
cgcacacccattcaagcggcaggacgcacttgtcttagcagttctcgctgaccgcgctagctggtatatgacgatcagtgacgagtgggatattccagag

SEQ ID NO: 12070 - DNA, 100 bp, Homo sapiens
tctcagtgtatgttctgtctatgtcgttcatgatagtctctttggcagcggcgttgacattccccaggagaagaggcccctagaccggttacaagcccca

SEQ ID NO: 12071 - DNA, 100 bp, Homo sapiens
ctcgatctgaagaggcagaaggagcaggctctgcgggaggtggagcacctgaagagatgccagcaggtgaccagaagtcagcagcttcccagaagccccg

SEQ ID NO: 12072 - DNA, 76 bp, Homo sapiens
agcacccttgcctactccccgcgggacgaggaggacagcatgagctgtccgtggcacagtgcacgcagcggcccgt

SEQ ID NO: 12073 - DNA, 110 bp, Homo sapiens
cggctcagtgcgtgaggttggcgcggcgcagtcttcctgctttggcgttgtctctcaggtttttcgttggaatatacgttgcacatttatggcgattctgagtgtgaggg

SEQ ID NO: 12074 - DNA, 95 bp, Homo sapiens
acaactggattttatatttacttctgtttatattggtaaaataaaaggagcttctaaaggttgtgttacaccacataaagaagatccctaatagt

SEQ ID NO: 12075 - DNA, 83 bp, Homo sapiens
gtgacaacgaccacgtctccaaaatgagtcgcatcttcaacccccatctgctgtctgtccccagaccccagagcacgtccggc

SEQ ID NO: 12076 - DNA, 82 bp, Homo sapiens
cagtgggaagcatagcatgaggacacggcggagtcggggctcggtatgcggtgctttgtggtcagctggctgagcatgagag

SEQ ID NO: 12077 - DNA, 83 bp, Homo sapiens
aaaaggaggccaaagactttgtgcccattctgcatttattccaccaaccgccccgctgccatggagtgccacctcaagaccca

SEQ ID NO: 12078 - DNA, 100 bp, Homo sapiens
cctgccctgtataccgagggaacaggtggatgatgaagacttacaagatgaacctttacagatcacagttcttgaccatgatacttacagtgcaaatgat

SEQ ID NO: 12079 - DNA, 82 bp, Homo sapiens
gatgaacgaagttatggcagagttagctaaagaactccctcaagtttcatttgtgaaggaggtcgagttgtgtcgtgttagc

SEQ ID NO: 12080 - DNA, 74 bp, Homo sapiens
ccatgttaaggcgctggtttgtggaagtggaaggaacagtgaaggcctccccatggccacccatggaccagtcg

SEQ ID NO: 12081 - DNA, 101 bp, Homo sapiens
tgacacccttggactggaaaactcacacccggtctggacacagaaagagaaacacgaagatcgattgagaagttattagaatgggaaaacaataggttata

SEQ ID NO: 12082 - DNA, 82 bp, Homo sapiens
cgctacgggaccgcctgagctttctacaccgggatgatcggctgaatgtaacagaggaactaacgtccaacgacaagacgag

SEQ ID NO: 12083 - DNA, 111 bp, Homo sapiens
cagcgccttcctcaacgacgcggacatggtcatgagctttgtgaacctgggcttgggcactgtttaaaggaaagttccgagaaggcatcgacaagccggaccctcccacct

SEQ ID NO: 12084 - DNA, 100 bp, Homo sapiens
agcaagagatggaaaattgttgcctgaagaataccaaggaggatcttttagacttaattcagtgcacaaatgagatgaatgtgaacatcccacagttggc

SEQ ID NO: 12085 - DNA, 97 bp, Homo sapiens
ccgggccggaccgaccccaggcggcgggaaacactactatgaagtatcctgtcatgaccaagggttatgcagggtcgggtggtctaccatgcaggcc

SEQ ID NO: 12086 - DNA, 75 bp, Homo sapiens
aggagctgtagagaggaccccggtacatctgaaagccgggaaatgctattgacctgaaaagtggttctggaaaag

SEQ ID NO: 12087 - DNA, 100 bp, Homo sapiens
cccgaaggccgacacgctggccctgaggcaacggctcatcagctcggagtgaggatgccaggtcatctccctctcagagacgtagaggcgaggattccac

SEQ ID NO: 12088 - DNA, 95 bp, Homo sapiens
gccccaccgtacttgcaagaaagcagccccagaggttctcctgaaaagaaagctgaacattcatctataaatcaagaaaatggcactgcaaaccc

SEQ ID NO: 12089 - DNA, 74 bp, Homo sapiens
ctcggccctggagggcagggccgacaccacaacgggcagtgattcgcctttgccagtctcatctcgtgtctgct

SEQ ID NO: 12090 - DNA, 83 bp, Homo sapiens
cgactgggggctgaagagcgcgccgccctctcgtcccactttccaggtccatctctgcagaagccatttcaggagtacctgga

SEQ ID NO: 12091 - DNA, 75 bp, Homo sapiens
aaaaaatgtacccttgaccaagctttcagaggtattctagaagaagaaattgaattacatgaatgacagtcttcg

SEQ ID NO: 12092 - DNA, 100 bp, Homo sapiens
ggtggctggtgcagccgaggtcttcgggaattccagcgaggagaagctcatagccaaactgaaaagcggaggagagataaaatgaataacctgattgaag

SEQ ID NO: 12093 - DNA, 110 bp, Homo sapiens
cgtcaaggtgacagcaccagaagcccaagcaaagcccaataggggcacaaaacgtccccgggatgatgaagaggaggagcagaagatgcgtcggaaacaaactggtactc

SEQ ID NO: 12094 - DNA, 102 bp, Homo sapiens
agaaagtggacaaagagaggagtcagacaatgcagatcttcgtgaagactctgactggtaagaccatcaccctcgaggttgagcccagtgacaccatcgaga

SEQ ID NO: 12095 - DNA, 98 bp, Homo sapiens
cagggaggatgtcgggacaccccggaagctgggaaatgaagtgcctgtttcccattctgcccgattttaagtttcctgaggcacccccagccatgcag

SEQ ID NO: 12096 - DNA, 82 bp, Homo sapiens
gtccttcctgccgacgtcggggtggccgttcagcagccgagactcaagaatggtcctcgtccgaagtgagaatgggcagttg

SEQ ID NO: 12097 - DNA, 75 bp, Homo sapiens
gagctgggcttggagatccccgcctatagcaggacaaggtggagcagacacctcgcagtcaacaagacccggcag

SEQ ID NO: 12098 - DNA, 74 bp, Homo sapiens
gcaaagaagaggcctgcaaagctgtacaagagatcatgcaggattgatattgctgatgatattattaatgccag

SEQ ID NO: 12099 - DNA, 82 bp, Homo sapiens
ctgaccgtgtcaacgaatcatccacgcacctgcagctctgctgagagagtgcaagccgtgggattttaacattatggcaggg

SEQ ID NO: 12100 - DNA, 51 bp, Homo sapiens
acggccaacgccttggcactagggtacatcaggaacgtctctatcaagaat

SEQ ID NO: 12101 - DNA, 95 bp, Homo sapiens
cacgcgcagcggcagcttgaagaaggccccggagaggcccctggtgggtgtcaatgggctggatgtgaccagcctgaggccctttgaccttgtca

SEQ ID NO: 12102 - DNA, 89 bp, Homo sapiens
agtggaacatggctagcaggaatgcttactgttgcgtggttcgttattaacagctctggattaatcgaattacagctgctagccaggaa

SEQ ID NO: 12103 - DNA, 90 bp, Homo sapiens
gctgctcagccagctcctgcgaccgccctgcgcttcgtgcaccggggcggtccgttgccaaagccagccacttctgccccaccaacgttg

SEQ ID NO: 12104 - DNA, 98 bp, Homo sapiens
ctggttctgccttctggacaatctttccggatggaaaaattcgagtcaccattcttgcacggagcacagaataccggaaaatccttaaccaaaatgag

SEQ ID NO: 12105 - DNA, 88 bp, Homo sapiens
cggagctggcgcggcccctagctttctccttctggtgtggggcccgaggtaaaatgtcggttccaggaccttaccaggcggccactgg

SEQ ID NO: 12106 - DNA, 100 bp, Homo sapiens
gcaaacttgacactcaccctgaccgattgcttccaagtatgatcatcaggcagaagaagatcttcgcaattggatagaagaggtgacaggcatgagcatt

SEQ ID NO: 12107 - DNA, 100 bp, Homo sapiens
gctgcggcggctcggggtgctctactggaaggaagcacaagcctatgcagacgacaacagtttgctgttcatggagacatcagcaaagactgcaatgaac

SEQ ID NO: 12108 - DNA, 85 bp, Homo sapiens
ggaggagagctctgagtgggaagcggagccgggggcctgggacccgtcgcgtcagagccagcttggacgaaccttgacaggatgg

SEQ ID NO: 12109 - DNA, 74 bp, Homo sapiens
gagccaacatggcagcggggttcgggcgatgctgcaggatatatagatcaaggtcgaaatccccagctctacac

SEQ ID NO: 12110 - DNA, 50 bp, Homo sapiens
cagtacccccttgccatggcagcaaaaaagtttcctacactactgaggtt

SEQ ID NO: 12111 - DNA, 75 bp, Homo sapiens
aagaactacaggctttacttttgtggtagaccgtctaagagaagtgagatacatgtttattcaaacacaagatac

SEQ ID NO: 12112 - DNA, 100 bp, Homo sapiens
cagcccccatggcttcagaagagagtgaagtcaccctgctgagaaatgaagtggcacagctgaaacagcttcttctggctcataaagattgccctgtaac

SEQ ID NO: 12113 - DNA, 87 bp, Homo sapiens
tgaagtcttgagagatgaccctccaaaaaaagaacatctacgggatacaaagtctacatttgctggttctaaggacatatggaattg

SEQ ID NO: 12114 - DNA, 100 bp, Homo sapiens
tggaaagatgacggatgaaaagaatgaacactgtccttcaaaacgagttcatgtgaaatggattttggacactgatattttcaatgaatggatgaatgag

SEQ ID NO: 12115 - DNA, 75 bp, Homo sapiens
aatgaagaccacaataaaagagacctctacttagctcagcaattcttaccttgtggaaccgtcccaaaatgtccc

SEQ ID NO: 12116 - DNA, 100 bp, Homo sapiens
cgggaagtggacagactgggcgtcatgacccttgtacaggtttgcagattccgccagcagcacagcaagctctacagatgagtggctctttggcatttgg

SEQ ID NO: 12117 - DNA, 100 bp, Homo sapiens
ctagaccgaagtgtactagccaaggagttgaagtttgtgactttggcaccaagtatagatgagaaagtagatcttcattttattgcattagttcatgtag

SEQ ID NO: 12118 - DNA, 90 bp, Homo sapiens
caaaacaagtctgcttcttcaaaattctgctggtgaatgaaaactttgccattgatttgatagcagagcagcccgtgagcgaggtggaga

SEQ ID NO: 12119 - DNA, 51 bp, Homo sapiens
gcttatctacaatcatatcacagtagagttggctttgtgggacacagctgg

SEQ ID NO: 12120 - DNA, 75 bp, Homo sapiens
cccggagggagagtcccgcctgaagaaacctggatctttgctagaaagagagtggccaacagtgttgcaaacagg

SEQ ID NO: 12121 - DNA, 109 bp, Homo sapiens
gtcacatatatgcctaaatgcacagtcatgtgcctacgtcctgcctcgcaatgagggagcatgtaccccaggcccggcagccatggcggtggaaggaggaatgaaatgt

SEQ ID NO: 12122 - DNA, 144 bp, Homo sapiens
cagcaggactgtgttcatgaagctgaggaggggagtaaattgaaaatattggggccatttagtaacttctttgcaagttggtcatgttcggagtttgacctgaatgagattcgcctgatagtttaccaggactgtgacaggaga

SEQ ID NO: 12123 - DNA, 50 bp, Homo sapiens
caaaaatcagcatttcagggaaaaggagttgaaattgtcctacaggagcc

SEQ ID NO: 12124 - DNA, 74 bp, Homo sapiens
aaatggatgcaagccttcccagaacaacagttttcagataactattatcgtgcagaaatgattgatgccctggc

SEQ ID NO: 12125 - DNA, 100 bp, Homo sapiens
tataagagaagaactctaacctccccagggtgtcttttatgaataatcaaaagcagcaaaagccaacgctatcaggccagcgttttaaaactagaaaaag

SEQ ID NO: 12126 - DNA, 74 bp, Homo sapiens
cagtttctctggaatgcactttatcgctaccgaggaaagactaatatctcttgtatttggacttttaaaacaaa

SEQ ID NO: 12127 - DNA, 82 bp, Homo sapiens
tggggcagccagcacaatcgggcggaggtggcgctgccccttcagatgtgacaagccgaggcggtgagccgggcaggaggaa

SEQ ID NO: 12128 - DNA, 90 bp, Homo sapiens
ctcacgtatccggctcatgggaccgagacatgggtgcccggcaccgcgcccgagcccactccattcagatcatgaaggtggaggagatcg

SEQ ID NO: 12129 - DNA, 50 bp, Homo sapiens
cgtgccagtgaagtacagaaaggtgaccctggcagcaaccccaacaaacg

SEQ ID NO: 12130 - DNA, 109 bp, Homo sapiens
tgcccgcgtccgaggctcgcgggcggcgggcccggacacgatgaggcgagtggtacgacagagcaagtttcggcatgtatttgggcaagcggtgaaaaatgaccagtgc

SEQ ID NO: 12131 - DNA, 100 bp, Homo sapiens
cagatctcatcccatggtggctccaggcgtcaggaagcccaaaggctagggcgggtgcttcgagctaaaaaaggtggaatgaggtaccatctactgtctc

SEQ ID NO: 12132 - DNA, 74 bp, Homo sapiens
ggctccagccccagctgcgtgcccagcgctcctggttgcagccagaatgcatgacttcaggaggactgtgaagg

SEQ ID NO: 12133 - DNA, 98 bp, Homo sapiens
aaaattcagtgagatctccaagaaaatcacctcgtttaatggcacaaggtttcgtttataatgtcagcccttatatggagtatcatcctggtggagaa

SEQ ID NO: 12134 - DNA, 100 bp, Homo sapiens
gctctgtcaccttgacaacacagcccatggcaacatggcctggtgaaaggtgtagcagtcactcggcctacacccacagcatcgaccttgtgaacccagc

SEQ ID NO: 12135 - DNA, 72 bp, Homo sapiens
ggcgaaggaggaggcgttgccgggtgaacagtgagtccaaagcaaacatcacctgtcttgtgtacagccacg

SEQ ID NO: 12136 - DNA, 82 bp, Homo sapiens
tatgacagattacgccccctatcctatccgcaaacagtctgcagcccagagggcaccttctgcaaacatgtctgtggatccc

SEQ ID NO: 12137 - DNA, 98 bp, Homo sapiens
agttctctttccaatgtcctggtcgcatgtatgcacctgcctgggtagcccccgaagctcttatgaagtaccacatcttaaatactctccagtgttct

SEQ ID NO: 12138 - DNA, 100 bp, Homo sapiens
ttcagaatcctccaaaaccagtcatgaccactagacccacagctgttaaagcaacaggtggtgctccaaattactaccccaacagctttggtgctccgga

SEQ ID NO: 12139 - DNA, 97 bp, Homo sapiens
tggatagagaagaaactggagcaagagtttcaggcagttcaattaacctccagaagatggctgaacctgcaggaataccagagcaagaaactgatgt

SEQ ID NO: 12140 - DNA, 99 bp, Homo sapiens
ggacccttgcatggtgtttcaaagggtggtgaagaactaagtcactcagcctctgaagaagcttcgggttcagactcaggcagtcagtcggaaagtgag

SEQ ID NO: 12141 - DNA, 100 bp, Homo sapiens
gataatctctacttgagaaccattccatgctttctccattgacattattcgacacaaagattcaatggatgaactcttcagtcaccgtagtgaaatcttt

SEQ ID NO: 12142 - DNA, 100 bp, Homo sapiens
catcagtggagccttctcagacccacaggttctccagcatttggctcaaggccccaagggcacatgtgacaagaaggcgccagctttttaaacattggaa

SEQ ID NO: 12143 - DNA, 50 bp, Homo sapiens
ccgcgagcgactgcggcgccgagccgtcctcatcaccgggggcatcgtgg

SEQ ID NO: 12144 - DNA, 100 bp, Homo sapiens
agtttccatcctcaacaattccaaatcctgaggttggcttgaagcctgtgtggtatagtcccaaagttttcattgaaggtgctgatgcagagactttttc

SEQ ID NO: 12145 - DNA, 99 bp, Homo sapiens
agttcatcgcctacccccatctccgcatcaggaccaagatcatacctcactcctgttagggatgaagagtctgaatcccaaagaaaagcaagatctaga

SEQ ID NO: 12146 - DNA, 100 bp, Homo sapiens
ttatggatttttctaccatatcagagatgacagggctgacgcgccactatgtagcgggtttcgggcgggccacgcgtgcgggacaggaacccaaccccag

SEQ ID NO: 12147 - DNA, 121 bp, Homo sapiens
cctgacatggcagtcccgaacacaggatgaacatccgaagacaatgttctccaaagataagatattctgcctccatggtggcctctctccatccatagacacactggatcatataagagcc

SEQ ID NO: 12148 - DNA, 100 bp, Homo sapiens
ctccagcgctccttgctcgcaaggcgggggaggcggcggcccagccacgatgttacagctggcggatgctgccaagcggggagcgtttggccatgagcgc

SEQ ID NO: 12149 - DNA, 75 bp, Homo sapiens
ctcccatcattgatgtggtgcgatcgtgttttccaagcagtgaagcacttgccgtgttgaactgaatgcactact

SEQ ID NO: 12150 - DNA, 100 bp, Homo sapiens
atagaccctctgtccaggcagcattaaaacttaagcagaatcctcactatggatgggctcattgaggacattaagcatcggcggtattatgagaagccat

SEQ ID NO: 12151 - DNA, 100 bp, Homo sapiens
aaccgcgggctctgccaggagagaagactggtccctgtgcgttttattgcgacctgccggtgggaactttgtctccgagtcggagcagcatggagcggcg

SEQ ID NO: 12152 - DNA, 75 bp, Homo sapiens
ctccatctgggccatggatggatcttagcaaagcaatgtctcaagatggtgcttctcagttccaagaagtcattc

SEQ ID NO: 12153 - DNA, 83 bp, Homo sapiens
ggcaggaccccgggacaccctggaagccaggaaatggtgtggacactgccagcggctgcagccgacttggaatgacctgggag

SEQ ID NO: 12154 - DNA, 100 bp, Homo sapiens
gggaaggcgaggacgaggacgaggacgtcaagaccagccttctggccaactgccaggcgccgcgccggccctggctggcctcacacatgagcaccgtctt

SEQ ID NO: 12155 - DNA, 100 bp, Homo sapiens
gggacccttccgtatctgcctaggcattttgctgtctcctcctaatacgtgtttaactgttcttcagagactagatgtttggctttctggtgggaatgac

SEQ ID NO: 12156 - DNA, 100 bp, Homo sapiens
ccttaggcatccagggacgcaggattcacaaggccttcccttcttcttggtggtgttcttgagtaagataatctggactggcccccgtctttgcttccct

SEQ ID NO: 12157 - DNA, 80 bp, Homo sapiens
cccagccctgcgtgaggccgcggagcgccagctcaatgaagtactccaaagattcaggtttactcacgtcatccagcaga

SEQ ID NO: 12158 - DNA, 50 bp, Homo sapiens
aactgtggagcctcttctgtaaccaagacagcgtggaagatgaactggag

SEQ ID NO: 12159 - DNA, 51 bp, Homo sapiens
gtctggccaagaatcagaggaagtgggaccttaaaggctttgatccaggag

SEQ ID NO: 12160 - DNA, 48 bp, Homo sapiens
acatgaagagtggcttcaggactgagcattggggagtcagcaatgtcc

SEQ ID NO: 12161 - DNA, 85 bp, Homo sapiens
tctgactctcggactgagaaacgcaaggatttttagactctgaggagcagttggagctaatccacattatggaaatggaaaccac

SEQ ID NO: 12162 - DNA, 99 bp, Homo sapiens
gacagcggcgaggagaacgtcccgctggatctgacccgagggccagctctcaatgttgcaagaaaaaatagaccatttggagcgtttgctagctgagaa

SEQ ID NO: 12163 - DNA, 75 bp, Homo sapiens
tgatttgcctcagcttgtactacccttcttatgactcagtcagaagaggagcttggggcaataacatgaattctg

SEQ ID NO: 12164 - DNA, 90 bp, Homo sapiens
aggaaattgaagcgtcgaaaaggtcttgattctgagaatgaatttgaggaatgcagtagcatggatagttgatggtgaatttggagcaga

SEQ ID NO: 12165 - DNA, 98 bp, Homo sapiens
ggagattgagattgcagagcaaggccctgaaagcagcagatctcacctgcattggaggatgagacgccacatgaagaagaaagaagacgccacagaca

SEQ ID NO: 12166 - DNA, 98 bp, Homo sapiens
gtgatatcttcagcgaaagtgaaaccaggatggctgatcactgggaaactgcacctcgtcacatgatgcgtctagatattcgttctttgctgcaagat

SEQ ID NO: 12167 - DNA, 74 bp, Homo sapiens
gggaagaacttcttcagaattagaaaggagctgcttcccaataaggaaacaattttaccaaatgttgcaagaac

SEQ ID NO: 12168 - DNA, 98 bp, Homo sapiens
gggctgtcctcgtcctccagctgttatctggaaggggccttcaagctctacgacttggacaatgatggctacatcaccaggaatgagatgctggacat

SEQ ID NO: 12169 - DNA, 74 bp, Homo sapiens
accccagtgcacctccctggcctggtctgctgatggccagggctcggccctccagaagcctttccatgccagca

SEQ ID NO: 12170 - DNA, 51 bp, Homo sapiens
gatccccagtatgcatctcaagatgtggagtcttgctctgtcatccaggct

SEQ ID NO: 12171 - DNA, 98 bp, Homo sapiens
acaccttcagtccttcgagcaaggtgaaaatcctatttataagagtgccgtaacaactgtggtcaatccgaagtatgagggaaaatgagtactgcccg

SEQ ID NO: 12172 - DNA, 98 bp, Homo sapiens
ctgctccctcgtgcttctgggccacatcttctatgtgctgggaaaccacaggtattgtccttgtgaacttccttgaagatggcagcatgtctgtgacc

SEQ ID NO: 12173 - DNA, 75 bp, Homo sapiens
cagaaacaaaatgtcaacaaattgatgggagcagcatggacctgtcagcaactaaggaacaaaagtaatgaagat

SEQ ID NO: 12174 - DNA, 83 bp, Homo sapiens
tggaaggatcataggtggcactcatgtctcactgccccactcagccagagagatgacacgggggaaattcctcaatattctag

SEQ ID NO: 12175 - DNA, 75 bp, Homo sapiens
ccatgtgtgaaaaaagaatatagagatgacccttttcatcaggttactggtaaaaagctactagaaaggggggaa

SEQ ID NO: 12176 - DNA, 76 bp, Homo sapiens
tcatattggttcatggagaattgcgaatagagaccatctgcctgtgggacatcagtgccgttccaaaggagggaaa

SEQ ID NO: 12177 - DNA, 100 bp, Homo sapiens
tgcagagcagctgaagcaagctgaggagctcagggcacagtcgtagtgccaactctggactctgttttgtatgacaaccaagaatttcctgatccagaaa

SEQ ID NO: 12178 - DNA, 51 bp, Homo sapiens
ctggcagacggatatttactgaacttgtaatagctggcatcgttgagaatg

SEQ ID NO: 12179 - DNA, 90 bp, Homo sapiens
gcgaacggggcgagcctggaggattgtcactccaacctcttttcgctgagctgacatcgcgctgatcggattggccgtcatgggccagaa

SEQ ID NO: 12180 - DNA, 75 bp, Homo sapiens
ggacaccaagatgcggatccgggcctttccgtactatgagatgtcctatggcttgaacattgaaatgcacaagca

SEQ ID NO: 12181 - DNA, 76 bp, Homo sapiens
aaatttagccttgttcaaaaagagaatttctctgcaaagaatgtccaaaaattcatattcacattgatcgtatcga

SEQ ID NO: 12182 - DNA, 51 bp, Homo sapiens
ggtttggacgccggcggagacgcgggcgagactgctcactagaagctcagc

SEQ ID NO: 12183 - DNA, 82 bp, Homo sapiens
cccgctctgctgtgggcgctgctggcgctctggctgtgctgcgcggcccccgcgcatgggaaatcctcattgacgattcaat

SEQ ID NO: 12184 - DNA, 50 bp, Homo sapiens
gagcacgctgctgtgtgagcagcaggagggtgaggacaaaatcttcttaa

SEQ ID NO: 12185 - DNA, 100 bp, Homo sapiens
agcatagagaatgagatagccgtcctgagaaacgcacgtaccgggtgccgaaggaggtccgcgtggagcctcagaagttcgcggaggagctcatccaccg

SEQ ID NO: 12186 - DNA, 90 bp, Homo sapiens
cagaatttatatagagatgtgatgttggagaactacagaaacctcgtctccctgggccaagattgacagacacctaatattcatgacttg

SEQ ID NO: 12187 - DNA, 80 bp, Homo sapiens
cagttcctgacacgggagacagtgtgcactctcgagtggaccctgaggagctcttcaccaagctcgaccgcattggcaag

SEQ ID NO: 12188 - DNA, 98 bp, Homo sapiens
ggaaggtggcaagatggtgttggaaagcactatggtgtggaaacccctcctggagtttccccaaagccatggacagccctagtcttcgtgagcttcaa

SEQ ID NO: 12189 - DNA, 90 bp, Homo sapiens
gaagatgtcttttgaaaggtgtactgcaaggaacaaaatgtttgtaaattctccttttaccaagtgcacagccagagaacaacacatcac

SEQ ID NO: 12190 - DNA, 105 bp, Homo sapiens
atggcatccagagagaggctctttgaactttggatgctttattgtacaaaggttttgacacaagggcgcatatcttcaaagcacctagtacctcctaccattgtc

SEQ ID NO: 12191 - DNA, 80 bp, Homo sapiens
gcagccgatgcccgcggccggagagctggaggagaggttcaaccgcgccctggccaccagcttgggctccccacggaggg

SEQ ID NO: 12192 - DNA, 50 bp, Homo sapiens
caccgtgagaccttacaaagccgggtcaaaatgcagatcttcgtgaaaac

SEQ ID NO: 12193 - DNA, 96 bp, Homo sapiens
ttagaaagagatcacatctttcgacttgaaaaagaatcagagaagatcattgctgagttgaatgaaacttgggaagagaagcttcgtaaaacagag

SEQ ID NO: 12194 - DNA, 83 bp, Homo sapiens
cgagacttttctcagatgttggatatttgcttggaaaaacgtgtgggtacgaccttggttggtcaaagaaaaagtgatgtatg

SEQ ID NO: 12195 - DNA, 82 bp, Homo sapiens
tgcggaagtgcagctgcctcagttcttagcgcaggaggaggacttcatccaacccagcagccgagaagaggcccagcagctg

SEQ ID NO: 12196 - DNA, 75 bp, Homo sapiens
ggcagctgtgaaaaaagccatttccgaagggtatttcttgtaaagtcgatagtgaagaaaatactttgaattcac

SEQ ID NO: 12197 - DNA, 83 bp, Homo sapiens
cacccggctccccggacgcctcggctgaaggtgatgtggccgccctcaaccgacgcatccagctcgttgaggaggagttggac

SEQ ID NO: 12198 - DNA, 97 bp, Homo sapiens
aagaacttcgagatggattccaacatcctgctagacttgttaagaacgagatgctggaggagggccaagaatatgctgtcatgctgtacacctggag

SEQ ID NO: 12199 - DNA, 104 bp, Homo sapiens
ctactacaacacggctgtcaagctggcgcgccagagcggcatcgagtgtactaatggtcacttgatgtgcgctggctgttttatccacctactagcagatgccc

SEQ ID NO: 12200 - DNA, 97 bp, Homo sapiens
agggaaagaggagaggcacccgatatatgttctctaggccttttagaaaacatgtttgacaagtatgcgcccaagctggacagcccctacttccgac

SEQ ID NO: 12201 - DNA, 89 bp, Homo sapiens
gcgcgccctggcgggtccggaccaaggaccctttgaggatgccctgaagttgcatgagtgctcagtggcggcaggcgtgacagcagccc

SEQ ID NO: 12202 - DNA, 90 bp, Homo sapiens
agactcagaatcgaatctcttctccctccccttcttgatccagaaccgtgcccagattctgacttcctcctctggatccttgcagcagtt

SEQ ID NO: 12203 - DNA, 80 bp, Homo sapiens
gatctgcagagttcgggcgagaggaggcgagaggcgcaaaggaacaagatcactcaaggtgaaggataatctactaatac

SEQ ID NO: 12204 - DNA, 97 bp, Homo sapiens
agatgatacctttgatccagaacttgcagcaacaataggggtgagcccctccagactccgaataggagatcaagagtttgattcattgcctgcttta

SEQ ID NO: 12205 - DNA, 75 bp, Homo sapiens
gaaaatttgagtgtaccgtttactgtgtacagtgccctgggcctgagggatgcctgccgctccctgccgcagtcc

SEQ ID NO: 12206 - DNA, 96 bp, Homo sapiens
cctgcagtctctctgtgtggctgtaacttacgtgtactttaccaacgagctgaagcagaattgtctatttcacagcaatattaccagtgacttgaa

SEQ ID NO: 12207 - DNA, 82 bp, Homo sapiens
tggccccatccgtcttcaaagccagcagtggccaggaagcggggagaggtggtgagagatgacccctgttgaggatttcatt

SEQ ID NO: 12208 - DNA, 80 bp, Homo sapiens
ggcgtgagtcgctgcggggctgacggggtggcagtgcggcgggttacggcctggtcagtatacgctcaacggcaagaaag

SEQ ID NO: 12209 - DNA, 85 bp, Homo sapiens
ggagcagccaaccagcagcagccatcatggaggtctctaaggacatctccatgcggctgcataaggagctcgaggtggtggagaa

SEQ ID NO: 12210 - DNA, 96 bp, Homo sapiens
gaggacagctgacatgtgctgctcggggatgtgggaagagactgcagacatgcgtcgggatgtccaggaaatttttcgcatgaccccccacgagaa

SEQ ID NO: 12211 - DNA, 75 bp, Homo sapiens
tgaagatgcagagcacaaggcagaaaatttactggttaaggaggaacggaaaacagttcttccttcaaagcatgc

SEQ ID NO: 12212 - DNA, 82 bp, Homo sapiens
cgcagactgagaagccgacccactacagattttgcaagaacgaggctcaaggatgtgagggacacagtattgacagctgaag

SEQ ID NO: 12213 - DNA, 75 bp, Homo sapiens
aaacatcaaaacggcgatccaaaaattcagtggaaggagctacagggagctggccgactgcacctggcacatggc

SEQ ID NO: 12214 - DNA, 100 bp, Homo sapiens
gaattacataagtgcggccagcccacagccgggctcgggcttcggccacggcatagctgtgtattttgacctacgaattggagatgaagatgtaggccgg

SEQ ID NO: 12215 - DNA, 100 bp, Homo sapiens
agggacccggtgacagcgtgagaggttcgcagatactatactggcaattgctggagaagattttgcaattgttgcttctgatactcgattgagtgaaggg

SEQ ID NO: 12216 - DNA, 82 bp, Homo sapiens
ggggcacatgatcatctcagctgctggccctaagcaagagtgagccatggagctacgtgtggggaacaagtaccgcctggga

SEQ ID NO: 12217 - DNA, 100 bp, Homo sapiens
gaccttccggagcttctcagaagacagagggttttcttttgaggtaaaatgtcggttccaggaccttaccaggcggccactgggccttcctcagcaccat

SEQ ID NO: 12218 - DNA, 80 bp, Homo sapiens
cgtatcaagccaagaacagcccaatctcctttctgggcaaacgttccaaggaggagatgttaaagtaacccatcttgcag

SEQ ID NO: 12219 - DNA, 98 bp, Homo sapiens
aacggcttccgacatgcccgcaacgtggacagggtcctctgcagcttcaagatcaatgactcggtcacactcaagcaacaagatatggatttggatat

SEQ ID NO: 12220 - DNA, 90 bp, Homo sapiens
cttgggtgtgacttgcaaattctgggaacactttgcagaaatgacgagaagcccctcggagcaggcctggtttccaggcctgaggtgccc

SEQ ID NO: 12221 - DNA, 75 bp, Homo sapiens
ctttcggcgcgggcccgggccccgagcgcccgaacaggtcttgaggaccggcccagctcaggctcctggggcagc

SEQ ID NO: 12222 - DNA, 100 bp, Homo sapiens
gccaaggaaaaggagatcgaggagctgaagtcagagagagacacggtatatgaatgacctaaaggtacaaataaagacggagagagaacagtgccaactg

SEQ ID NO: 12223 - DNA, 100 bp, Homo sapiens
gctggaattttcaacacatgatgatgttttcagaatccagggcctgaaaacccagaatgaacttgtgtccatcccagagatcactgcagatgtcatgagg

SEQ ID NO: 12224 - DNA, 95 bp, Homo sapiens
cggatttccttgggtcttccggtaggagctgtaatcaattgtgctgacaacacagctgatggatttacaactgagtgacagtaactttcgtcgac

SEQ ID NO: 12225 - DNA, 139 bp, Homo sapiens
gaatattaaacagacaaacagtgctctcaaagaaaaacttgatggtggaatagaaccatatcgacttccagagttggttgaatctggcgatgtggaacccatggatatggagggctgactatatacaccatgttttttc

SEQ ID NO: 12226 - DNA, 100 bp, Homo sapiens
cgacaccaatttgatgtggtgaatgagagcacaggagaagccttcaggctgcaccacgtggaggccaacaggactctcagcgttctcatctctcttcctt

SEQ ID NO: 12227 - DNA, 96 bp, Homo sapiens
aagcagcttcttgcctgtggtaataccaagtttgaggcattgacagttgtgattcagcacctgctgtctgaggtgctgctagctgaggaggggata

SEQ ID NO: 12228 - DNA, 74 bp, Homo sapiens
atgtcgggttattcgagtgaccgagaccgcggccgggaccgaggacccctttgctgatgcaagtaagggtgatg

SEQ ID NO: 12229 - DNA, 100 bp, Homo sapiens
tgtactaccgcaactgaaagtcacgattaggactgacaataagccagatgaaaactcgctggatttttcctcctgtatgttacggcctgggattaaaaat

SEQ ID NO: 12230 - DNA, 100 bp, Homo sapiens
gcaagtttacgacaaggaggttcagtggacccttggagccatcctctacaggacccgctttctaccattaagagccagtggcagccccagctgcagcagc

SEQ ID NO: 12231 - DNA, 75 bp, Homo sapiens
gaggcagcggtggaggaggcaactaccgaggaggtctccatgaagcatgtaggcaaccagcaatacaacgtcaca

SEQ ID NO: 12232 - DNA, 98 bp, Homo sapiens
ggccgaggcggaccgcgtggcggcggcgcacgggtacctcaacttgggccaggttctggcctataggaacaagacattttcagtaatggaagaaggag

SEQ ID NO: 12233 - DNA, 100 bp, Homo sapiens
aggatattcagagaagttcttgggtaattccagaattgattggccataccattgtcactgtattactgctcatgtcattgcactggttcatcttccttct

SEQ ID NO: 12234 - DNA, 82 bp, Homo sapiens
tcgaagcaccgcagcctggtgcagatcatctacgacgagaaccgggctgtattcatctgcggtttttggtgacttcgagcag

SEQ ID NO: 12235 - DNA, 100 bp, Homo sapiens
cggctacgctgaggctctccgctcagggaaagaaacagtagctccactcctgccggtccctcccctaggggagagggaagcagaggagaaaacagcagca

SEQ ID NO: 12236 - DNA, 97 bp, Homo sapiens
aaaccatgtgtctgaactgaagaagcttgggctcacttccacaaatgtacccactgatggtaatgctggcctgctggctgaaccccagattgccatg

SEQ ID NO: 12237 - DNA, 82 bp, Homo sapiens
ctgccgtggacagcgaagctgctgcggttcctgagccggagtgtctttggtgcaacactaacaaggcttgtctggactaccc

SEQ ID NO: 12238 - DNA, 90 bp, Homo sapiens
tttgccagaacaggagatattccagatgagaggtggtgggcccagaatattcagaaaaggttctgcttcctaacctgtgatgcagccagt

SEQ ID NO: 12239 - DNA, 82 bp, Homo sapiens
gcttcctggcctgggcgctccggtggcggcggaggccccttcccagctgcctgcctgccctagccagctcccaggtgaagag

SEQ ID NO: 12240 - DNA, 83 bp, Homo sapiens
cgggcactgagcaccgccaccatggggaaggggaatagcctaacatggcagaccagagacagcgctcactgtctacctctggg

SEQ ID NO: 12241 - DNA, 100 bp, Homo sapiens
ccctgcactgcgctagtcctaaagaggaaatgtctctacgctgcggggatgcagcccgcaccctggggccccggtctgcgctcctcagaccaccggcagg

SEQ ID NO: 12242 - DNA, 90 bp, Homo sapiens
gatcactgcagggacgcctgcctggatccttcaccttagtgaatacgagccatcatgggaagagcagccaatgcctgagactccaaaatg

SEQ ID NO: 12243 - DNA, 74 bp, Homo sapiens
ggtgctgcgcaagaagggccctacggccgcccaggccaaatccaagcaggaattaaggataacctagacgacat

SEQ ID NO: 12244 - DNA, 100 bp, Homo sapiens
gtggagaatgaatacgggtccatcaatcacacgtaccacctggatgttgtgggaatcatcctatgaccatagggagaaccatccttaatatgaagccaac

SEQ ID NO: 12245 - DNA, 100 bp, Homo sapiens
ctcttccccgtcttcgacctcagttacttcatcgtctccatcctctacctcaagtatgagccagggtcagccagcagccggcccggggtgtcagccaccc

SEQ ID NO: 12246 - DNA, 74 bp, Homo sapiens
tttgtgtatgacgccgagggacctcacatcaacttctaccagctgtagagacgggggttcaccatgttagccag

SEQ ID NO: 12247 - DNA, 82 bp, Homo sapiens
cttgtttgtggatcgctgtgatcgtcacttggaaaaccaattctgtgtcctcggaggaccacagcccagttgggccccaggc

SEQ ID NO: 12248 - DNA, 75 bp, Homo sapiens
gaagaaagaagaggagaaggagcagtccgtgctcaacacccacaacacaagatcagaccccaagttctgctgttt

SEQ ID NO: 12249 - DNA, 100 bp, Homo sapiens
gtgacctggaccacggcgcagacgcgggcgagctgcggctcggacgccagcggacacgcgggcgaggttcgtgctggccgtgggcagcgccgtctttgat

SEQ ID NO: 12250 - DNA, 75 bp, Homo sapiens
gggaacatgacgcaggtgcaggtgtctcttctcgccctggcggggaaggtgcagctctgtcatttccactctgct

SEQ ID NO: 12251 - DNA, 82 bp, Homo sapiens
ctcagagaccaataaaaataaactgcttgaacatcctttgactggttagccagtttcagctgtgagttcaacatggaggcaa

SEQ ID NO: 12252 - DNA, 108 bp, Homo sapiens
aagaagtcttacaccactcccaagaagaataagcacaagagaaagaaggttaagctggctgtcctgaaatattataaggtcagcaaaaggttgaggggtgaggtgggt

SEQ ID NO: 12253 - DNA, 100 bp, Homo sapiens
gtcagaagagaggaaagtggaggtcacctactatcacaaaaatggcttgaagatgcagtggacgccagagcatgcccagtggccagaacagcactttgac

SEQ ID NO: 12254 - DNA, 75 bp, Homo sapiens
agattcgcagtggtcgcttcttctccttggcacctgaatggacagaagaggacctcagccaactgacaagaagta

SEQ ID NO: 12255 - DNA, 100 bp, Homo sapiens
cgcaaagcggggacccagaccctggagcctcagttggaagcagccgatccagcctgcggagcctgtggggcagctttttatgcagattgaagctctcttt

SEQ ID NO: 12256 - DNA, 50 bp, Homo sapiens
caagggtgcacagcccctggctacggaagaagtttcttgcccaaatgcct

SEQ ID NO: 12257 - DNA, 90 bp, Homo sapiens
ggacatctgctgccggaaggggtcccgaagccccctgcaggaactctacaacccaatccagggaagacgagggaaaacaggacctcccgg

SEQ ID NO: 12258 - DNA, 74 bp, Homo sapiens
tggctgtgtcgcgcctgagccggaatggagatttacagacagtcatctgggtggaggacacccttttgggatca

SEQ ID NO: 12259 - DNA, 98 bp, Homo sapiens
ggccacccacgaccaggccgtgcaggcgctgaagcgcgcgggcaaggaggtgctgctggaggtttgagttcctgagatctagttggtgagagacatga

SEQ ID NO: 12260 - DNA, 98 bp, Homo sapiens
tctgacatcgcgacgctgctcaaaacctcgctccggaaaggggacacctggagaaggagaggaacgcgcggaggaagaagaagaaagcgccggcggcg

SEQ ID NO: 12261 - DNA, 51 bp, Homo sapiens
cccggtgagcccgaggagaggaaggtatttaccttgctgtggattgctgac

SEQ ID NO: 12262 - DNA, 76 bp, Homo sapiens
ccaaataccagctcgacaaagatggggttgtcctctttaagaaggacgccaagagtgccgaggatgaggctccttc

SEQ ID NO: 12263 - DNA, 50 bp, Homo sapiens
cggcgatcgagaaagtgcgcaaatgcctcggaatgctgctcgaataagtg

SEQ ID NO: 12264 - DNA, 100 bp, Homo sapiens
cctggcgctggaggcagcggtgcacgtgcaggctgcagcgctggtggaggaggaaactcgcagataccgacctactaagaactacctgagctacctgaca

SEQ ID NO: 12265 - DNA, 82 bp, Homo sapiens
tggtggagtgtagagatatagttggcaacctcactgagttagaatcagaggatgaagctggaggcagattcgtcgctttctc

SEQ ID NO: 12266 - DNA, 51 bp, Homo sapiens
gcggcggaagccggtgcagaaaacaggatgccagcccccatcagattgcgg

SEQ ID NO: 12267 - DNA, 100 bp, Homo sapiens
ggtggggtggcgtggcaagccggactaaggaccggggacttcttgattgaggttgggcccgaaggcatcctgcagaacggggctgtggacgacagtgtag

SEQ ID NO: 12268 - DNA, 90 bp, Homo sapiens
aggaaaccatgcaacagtcaaccttctgagctttcttcagagacctcagcgggccaatccgagcctacatccttgcccacaaggatgcca

SEQ ID NO: 12269 - DNA, 75 bp, Homo sapiens
ttcctgtgtggttttaccgcccagagagcgtcatggacctggagtcaactactggattttctgtctggcaaacag

SEQ ID NO: 12270 - DNA, 50 bp, Homo sapiens
cggctgccttccacctccagtgctgcacaacattctgaaattttttggtt

SEQ ID NO: 12271 - DNA, 100 bp, Homo sapiens
gtggagagggattcgtggtgaaggtccggggcttgccctggtcttgctcggccgatgaagtgcagaggtttttttctggccaacagagcacttatggcaa

SEQ ID NO: 12272 - DNA, 75 bp, Homo sapiens
ccttccagctgtttgaccgaacagctgagatctgtatctgtggacctgaatgttgatccctcgcttcagattgac

SEQ ID NO: 12273 - DNA, 74 bp, Homo sapiens
agcacattgcctggtaagatgggtgataaaagaaaatgtggctgaagttacccgaagttcagcttgcagtgtaa

SEQ ID NO: 12274 - DNA, 89 bp, Homo sapiens
ccaattcctgtgtttcatcataagaccaaggatgaatacttgatcaacagtattgaatttgaccgggattgtgactattttgcgattgc

SEQ ID NO: 12275 - DNA, 100 bp, Homo sapiens
cgacgcttcacgacagccagtgacgtctggatgttcggtgatgttgcgacaggtccagaacagagccatcactctgcgcagagaagccgatgtcaagaag

SEQ ID NO: 12276 - DNA, 83 bp, Homo sapiens
ggaacatggactctgactcttgcgccgccgccttccacccggaggaataatgtatttgtggccttggacatgaggcagtcagt

SEQ ID NO: 12277 - DNA, 83 bp, Homo sapiens
gaatctaccaacttcgccaccctgcggtggattgactacggcaaagtggccactcaggtgccagaaccctgtggagcatcatg

SEQ ID NO: 12278 - DNA, 82 bp, Homo sapiens
ccctactggaacaccttctcgctgccgccataccctgccttctccagcgacagccggggaacgcccttttgcttgtgactgg

SEQ ID NO: 12279 - DNA, 88 bp, Homo sapiens
aagcatgggaaggaggccgagccgggatctcaggtcctcgggggcggcggccacgccaaggacggatgaggaaaatgaggcccaaaga

SEQ ID NO: 12280 - DNA, 75 bp, Homo sapiens
gaagaacttgccaaaggctggacccagtgggaagaagatttcttagttgtctcttcaactggaatatcaacttca

SEQ ID NO: 12281 - DNA, 80 bp, Homo sapiens
cagatgttcctggggttactgtaaatgggaaggacaggcagagctaaacaagatggtgaccctgataactatattgctta

SEQ ID NO: 12282 - DNA, 93 bp, Homo sapiens
aggaacatggcgaaggtggagcaggtcctgagcctcgagccgcagcacgagctcaaattccgagttgatcaagtgtgaagaagatctccccac

SEQ ID NO: 12283 - DNA, 83 bp, Homo sapiens
aagaaagacaaagacccagtgaacaaatccgggggcaaggccaaaaagaagggcctaggaaagactcttcaaacaatttctct

SEQ ID NO: 12284 - DNA, 73 bp, Homo sapiens
gaaattgaacaagcgtcacttgacaagcctatagaatcggctgttgctgtcatggttgccaccagagaaggat

SEQ ID NO: 12285 - DNA, 100 bp, Homo sapiens
caccagacaggccccattgtgtggggggagccagggaccaatggccagcatgctttttaccagctcatccaccaaggttgccaaggaaagtgtactgcag

SEQ ID NO: 12286 - DNA, 50 bp, Homo sapiens
gtggagatcaagcgcagcgatgaacatgaaaggctcccggagcagcgctg

SEQ ID NO: 12287 - DNA, 100 bp, Homo sapiens
atgatgctaatgagtctgaccattttgagtctctggctgatgaacttgctcttgtggatgttttggaagataagcttaaaggagaaatgatggatctgca

SEQ ID NO: 12288 - DNA, 101 bp, Homo sapiens
ggatctccggcgccaactgccaggttcaaaccttgtactactcagctgatcacaagctgcttgatgggaacctactagatggacaggctgaggtgtttggc

SEQ ID NO: 12289 - DNA, 100 bp, Homo sapiens
tcaagctcaagagtcgcctttcaggtaatctgtaagtcagatgctccaacaggggatgttcttcttgatgaagctctgaagcatgttaaggaaactcagc

SEQ ID NO: 12290 - DNA, 75 bp, Homo sapiens
tgtgaaaactctgttactgaagggtgatacaattctggagactggagaagtaattccaccaatgaaagaatttcc

SEQ ID NO: 12291 - DNA, 48 bp, Homo sapiens
ggaagatggtgctgatcaaggaattgggttgtggaaaccagaacttcg

SEQ ID NO: 12292 - DNA, 82 bp, Homo sapiens
cccggggctaatgttgacaacaggctcgaggtgtcgtgaaaactacccctaaaagccaaaatgggaaaggaaaagactcata

SEQ ID NO: 12293 - DNA, 83 bp, Homo sapiens
gcggcttcagcaccgaggagcgcgccgcgcccttctccctggagtaccgagtcttcctcatttggtgccctggttgtcagatg

SEQ ID NO: 12294 - DNA, 83 bp, Homo sapiens
aagcgggagtcggggatagtgtcatcggttcggtaaagtttctgttctctggttaaagatcgaggtccggaagccactaggag

SEQ ID NO: 12295 - DNA, 75 bp, Homo sapiens
acgggggtcggtgcctggggatcctgtccgcatccactgcaacatcacgaatttcgctaaggagtttgtgatcag

SEQ ID NO: 12296 - DNA, 75 bp, Homo sapiens
agcaagtgcagatagatggccttgtgttggtaaatcatgcttattgctacagtttacagacaagaggtttcagcc

SEQ ID NO: 12297 - DNA, 74 bp, Homo sapiens
ctgccctcaaggtcgtgcgtctgaagcctacaagaaagcctagtatcagaaggccaggcgagactgcaacactg

SEQ ID NO: 12298 - DNA, 83 bp, Homo sapiens
aatttctttctcgctgatcgcctaacttctactgacgaagcttggaagttgcagaaggaatgtcgttgtctgctgggtcttcc

SEQ ID NO: 12299 - DNA, 82 bp, Homo sapiens
ctggcctgggcgctccggtggcggcggagcctcgccgctcctgctatttgccaaccgccgggacgtacggctggtggacgcc

SEQ ID NO: 12300 - DNA, 82 bp, Homo sapiens
ctgggagcttgctgcagcttcaggttacgggcaggacttgagtggcttcggacagggcttctcagaccccagccagcagcct

SEQ ID NO: 12301 - DNA, 82 bp, Homo sapiens
ctctttcagcgatatgaagttaaaaccaggtgtccctggtggtgaatgtggccagcgagtgcggcttcacagaccagcacta

SEQ ID NO: 12302 - DNA, 101 bp, Homo sapiens
ctcaagttaaattatactactgaagaatgtgacatgaaaaaaatgcattatgtggaccctgaccatgtaaagggtccaaattccaagcctgtagtgtcctt

SEQ ID NO: 12303 - DNA, 75 bp, Homo sapiens
caactattcgcggagctggaatgactggcaacccagagaacaccttctgcagtggggaccatgtgtcctggcaca

SEQ ID NO: 12304 - DNA, 133 bp, Homo sapiens
ttccccgaacctctattgtggacaaaataagaaatgatttttgtaataaacagagtgacagtgattcgcctttgccagtctcatctcgtgtctgctttgttaagttccatgatccagactcagcagttgtggc

SEQ ID NO: 12305 - DNA, 96 bp, Homo sapiens
ccctcaagactggtccacggagtgtatgaccacaaacagccatcaagtttccaggagactgacaaggcgtggcatgggggatgtctggcgctggca

SEQ ID NO: 12306 - DNA, 78 bp, Homo sapiens
aggaacaagaagagaaactgtatatgatgctgccagtgtttaacagggaagaggagcaggacttggatggtgagaagg

SEQ ID NO: 12307 - DNA, 83 bp, Homo sapiens
ccagccgcaccatgccgctcctaagcctgcacagccgcggcggcagcagcagtgagaggaagcaggtcctggggaccaaggtg

SEQ ID NO: 12308 - DNA, 83 bp, Homo sapiens
acgcaactgttgctttttcatggctccttgccagaggcctccactcactccagacccctatagcccgtcgctgtcagctgtca

SEQ ID NO: 12309 - DNA, 100 bp, Homo sapiens
ttggagatgtacatcaaggcatttatatgagtccaaattgtgatctgtctgggtgtgatcttcaagaagccaacctgagagggtccaacgtgaagggagc

SEQ ID NO: 12310 - DNA, 100 bp, Homo sapiens
ctcaggtgactgctcggagttctcccagacaatgcagatcttcgtgaagactctgactggtaagaccatcaccctcgaggttgagcccagtgacaccatc

SEQ ID NO: 12311 - DNA, 75 bp, Homo sapiens
ttgtctcgatattctaagatcacagtggtcgcctgctttaacaatttctaaaggctcagcttgtcaatcggaaac

SEQ ID NO: 12312 - DNA, 50 bp, Homo sapiens
gaaagagtcaacagcagtggcaacagaattctccactttaccaatactta

SEQ ID NO: 12313 - DNA, 100 bp, Homo sapiens
gctagttcctctccagctcagccgcatggagttttaacattgaatgcggagaacactaattatgcctatcaagttccaaacttccataaatgtgaaatct

SEQ ID NO: 12314 - DNA, 82 bp, Homo sapiens
cggcgctggagagggggcgctgagctgttggggtgtggatgaggtcaccattgtcaacattttgaccaaccgcagcaatgca

SEQ ID NO: 12315 - DNA, 98 bp, Homo sapiens
ggaaatataacattcttggcacaaatactattatggataagatgatggtggacccaagtggagagattgtggaactggcgaaaggtgcatgtccctgg

SEQ ID NO: 12316 - DNA, 100 bp, Homo sapiens
caagaacctggacaaatctatagataacaaggcactttatgatactttttctgcttttggaaacatactgtcctgcaagatactacttgggggagggcag

SEQ ID NO: 12317 - DNA, 83 bp, Homo sapiens
gaacgcattgccgccggtcctgaccaccgtgaacggacagtcccccccagtgtcaacagcatctccaccctggagcctgtgag

SEQ ID NO: 12318 - DNA, 100 bp, Homo sapiens
gctttgcaaaatgacccacctcctggaatgaccttaaatgagaagagtgttcaaaattcaattacacaagtttccaggatggcttctgcatcaacttcta

SEQ ID NO: 12319 - DNA, 100 bp, Homo sapiens
ttgacaaaaggaccattgagaagttcgagaaggaggcggctgagttccagaaacgccgctggactgcgaggtctccctgtggtcgtcctggggactgtgc

SEQ ID NO: 12320 - DNA, 90 bp, Homo sapiens
tacttgctggctcggcgtctctctcggcagtcaccggagtgcccgagggggaagcacgatttacggaagaggagaaggcagagccccccc

SEQ ID NO: 12321 - DNA, 97 bp, Homo sapiens
cagaagcattaccatgacgctctgaacatcatcgacatggccctgagtgaatacccagaaaatttcatttacatggacacagaacagtatgaagaag

SEQ ID NO: 12322 - DNA, 83 bp, Homo sapiens
gccctgcagtacctgcagaaggtctctggagacatcttcagcagctgaagaaacacttaaattctggaaatagcgactcagta

SEQ ID NO: 12323 - DNA, 50 bp, Homo sapiens
aaaagaaaagcagtctgtggaaagaaaccaagtatcttcaagaccttctc

SEQ ID NO: 12324 - DNA, 90 bp, Homo sapiens
ctgaatgctggggcgtactccaaagttgttcaggaacgctcagctcacctatgaaccccgtcagcagcagcgaggacatcaagccccccc

SEQ ID NO: 12325 - DNA, 106 bp, Homo sapiens
gaataggtgtatcaagtaatggtgcaaagcctgaatatgatccatttgctgagcacagacctccaaagattgcagaccgggaagatgaatacaaaaagcataggcg

SEQ ID NO: 12326 - DNA, 100 bp, Homo sapiens
tggggagcagaaggactcggacacagatctgactgcagccatgagcagcaatgagtgcttcaagtgtggacgatctggccactgggcccgggaatgtcct

SEQ ID NO: 12327 - DNA, 98 bp, Homo sapiens
agaaggcatatgttcgactggctcctgattacgatgctttggatgttgccaacaaaatacctcaaatcagctatgcatccacagccccagagctaagt

SEQ ID NO: 12328 - DNA, 87 bp, Homo sapiens
tacaaatcatggagccgctggggtcccttttgcctcagatactattttgaagattgtcagcagcctgctgcctccgtaccgccacag

SEQ ID NO: 12329 - DNA, 100 bp, Homo sapiens
gggcctgtgccggagtggcgccctgaaggagctcagcaagaggtgcggctggaagtatttcgggcagaggagctgatggcatgtgcaggattgacctcac

SEQ ID NO: 12330 - DNA, 83 bp, Homo sapiens
gactccttcggcagtccacccaccgccgccgcctcccaggggctttgaccacgacctttgaagagcttcattttgagatcaag

SEQ ID NO: 12331 - DNA, 90 bp, Homo sapiens
tgccctcaggggttccccaggaatatcgatacaacaccaacagtcgtgatgagaggagatggattgaaaagcagaacagagcaacaagag

SEQ ID NO: 12332 - DNA, 96 bp, Homo sapiens
gatggggccctggatgagggggaagggcctcaaagccagaaggaaggcgcaatggcgaggaagttatctgtaatcttgatcctgacctttgccctc

SEQ ID NO: 12333 - DNA, 74 bp, Homo sapiens
cagtccctgagccgcccctacacccacaggaggctgctggaatcttccctcatttcattatcccgttatgatgg

SEQ ID NO: 12334 - DNA, 82 bp, Homo sapiens
agccagaaaccggggaccttaacaatccacctaagaaattcagaggattctttctactaatccagatacttgttgaagtgct

SEQ ID NO: 12335 - DNA, 100 bp, Homo sapiens
cgtcaacgccgtatccagcgactacgcggccgcggagacctacctgcggcgtcggcagctgctgctccgagggacagcatcgtggccgagctggaccgag

SEQ ID NO: 12336 - DNA, 98 bp, Homo sapiens
gcgggaactgcagtcatggatcatattacggtacccaagcaagatggattctggatatactctgagtattgtaacaaccacctggatgcttgcatgga

SEQ ID NO: 12337 - DNA, 50 bp, Homo sapiens
gccagccgagcaccctccaagcagagtacacctccagcatgagagccaaa

SEQ ID NO: 12338 - DNA, 78 bp, Homo sapiens
caagaacagagagagaggtggacagatctgagagatactgagaatcgcctaccatttggtgcaagcaaaaagcaatca

SEQ ID NO: 12339 - DNA, 100 bp, Homo sapiens
gggaatccaaagttaatgccaagaagcagccgccagttgggatcaaatgtgagcctatggatcaagtctggatgtggatagtgaagctaagaaactattg

SEQ ID NO: 12340 - DNA, 100 bp, Homo sapiens
ccgcggccgggcagggaggagaccggcacccagacaggtggcgacggcagaggatgaaagatgtcatgtatatctgcccatttatgggagcagtgagtgg

SEQ ID NO: 12341 - DNA, 82 bp, Homo sapiens
gggcctgcccttcaccctctacatgggtggcccagttgaaatccttcccttcctctaccttggaagtgcctaccatgcatcc

SEQ ID NO: 12342 - DNA, 98 bp, Homo sapiens
cgcacgatgaggatgctggggtcatctgcaaagaccagcgcctccctggcttctcggactccaatgtcattgagtctcgtccctgcagagctcccctg

SEQ ID NO: 12343 - DNA, 75 bp, Homo sapiens
tctgggagcagaagggaggctccaagacctcatcaacaattaaggacaggcgacactaacaggtgaagatctcgg

SEQ ID NO: 12344 - DNA, 75 bp, Homo sapiens
ggaactcaggcgcctcttcttagttgatgatttagttgattctctgaagatgtgtcttgctgaatcagggctctc

SEQ ID NO: 12345 - DNA, 100 bp, Homo sapiens
cgcatgttggaaatggggataactggcccagaaggccatgtactgagcaggccagaagagaatgagtccctggaacgccagatgcgtgaaatggaagaga

SEQ ID NO: 12346 - DNA, 100 bp, Homo sapiens
gagggctaggagggggtctgctaaatctgaatgatgcttccagcagtgtctggtttcagaccccggcatggcttggagacagcgttggtgtgtatgaagg

SEQ ID NO: 12347 - DNA, 100 bp, Homo sapiens
ccgtgggggacatcgtctgggcgtgtccatgggcccagtgcctggcgtgtcctccctgggagcttgctggacgcatgaccaggattctgggagggcagag

SEQ ID NO: 12348 - DNA, 51 bp, Homo sapiens
agattataagaagcttgggttcattgttacaactgatggaaaaccaaaaat

SEQ ID NO: 12349 - DNA, 96 bp, Homo sapiens
gggtatgacgaaggagtacattgtcaggaaatggtggagtcaatgaagaaagtagcagggatggatgtggagctgacagttgaagaaagaaacctc

SEQ ID NO: 12350 - DNA, 98 bp, Homo sapiens
ggtactggttttggattaggaattgttttctcacttaccttctttaaaagtgtttcagtcacctccagtaacacgggcgtgccagatatctcgggttc

SEQ ID NO: 12351 - DNA, 100 bp, Homo sapiens
ccaggaacagccccgtgccccccacaaagaaagtacttccaggcgcgactggccggggccggcaacagcacagccaggatcctgagcaccaaccacacgg

SEQ ID NO: 12352 - DNA, 100 bp, Homo sapiens
ctcgacttcttcagcgactccttcttcaactcagcagtgcagaaggcggcgcccggctcccagagttcttacagcagctgtgacacaagcctcactgcag

SEQ ID NO: 12353 - DNA, 89 bp, Homo sapiens
gaggagaaactcgctcgccttcagaagacagccaaaagaatgcaatggtgtaaagattccagttgatgccagtaaacctaatccaaatg

SEQ ID NO: 12354 - DNA, 100 bp, Homo sapiens
gcaaccaagcacctgaaacagcaggccatccggctgtccttagagcaagccctgcctcctgagccaaaggaagaaaatgctgagcctgtgagcaaactgc

SEQ ID NO: 12355 - DNA, 100 bp, Homo sapiens
accacaggctaatgttccttcagctctgccatcactccctgccgggtcaggtggccacagatgtctttaattccaaaaacctggccgttcaggcacaaaa

SEQ ID NO: 12356 - DNA, 100 bp, Homo sapiens
cattgagaccgtcagaagcctcatagacagaacgattgatgaagtagttgagaatgatgagaagacagcagctgattacaagattttaggtggttcagtc

SEQ ID NO: 12357 - DNA, 75 bp, Homo sapiens
cttttttggaactcatgagactgccggtggtggtgtgcacattgagccccggtatagacagttcccccagctgac

SEQ ID NO: 12358 - DNA, 100 bp, Homo sapiens
acagactaagagcaaagctacttccattccagaaagatggcatcatttttgccctcaaaagaaatggcagctgcactgacaccctggtcctgacttccct

SEQ ID NO: 12359 - DNA, 100 bp, Homo sapiens
aggaaacagccagaccgagagcagcctgccggggcggaggaggtgcttcccaaggaccgtagatgcctctctagagcatgagctcaggcaagagtgcccg

SEQ ID NO: 12360 - DNA, 50 bp, Homo sapiens
gcggaggtcgataagctggaactgatgattttcgacaatgaagccaaaga

SEQ ID NO: 12361 - DNA, 51 bp, Homo sapiens
gccttcccagtagctgggaccacagttgcatttgctggtctggcctttgcg

SEQ ID NO: 12362 - DNA, 100 bp, Homo sapiens
gaccgccgcccgactgccatcgcccggcccggccgcgcccgcggaaccagaccagttcctccgtgtcacaaagcagtacctgccccacgtggcgcgcctc

SEQ ID NO: 12363 - DNA, 90 bp, Homo sapiens
caagccttggaaatggaggaagaagaaaagcgaaaagttcaaacacacgtcagcagatgatatcatcaagttgaatcgaaaggaagggaa

SEQ ID NO: 12364 - DNA, 74 bp, Homo sapiens
cgagttgccgccggagaggagtggcctcgcccgcttgatgccactgccgccaggagccctgtaacatcagccat

SEQ ID NO: 12365 - DNA, 100 bp, Homo sapiens
ctgcaccagaagaatggcttcacatgtatgctcatcggggagatctttgagctcatccagcctctgggtgacatccatgagacaccctctgccacccacc

SEQ ID NO: 12366 - DNA, 98 bp, Homo sapiens
ctgtttgcacattatggcaagaagggcgctgttttcgacaggtgtgcaggtttcggcacatggagattgatgtgttgacttcaaaatcaaaactgtag

SEQ ID NO: 12367 - DNA, 100 bp, Homo sapiens
agagagagcgcgagagatggagatgggcagacggattcatttagagctgcggaacaggacgccctctgatctcgttccgctgtgacgggaagctgtgtca

SEQ ID NO: 12368 - DNA, 82 bp, Homo sapiens
ctcagttggaagcagccgatccagcctgcggagcctgtggggcaggcgtggaagacattttggtgaagccaaaggcagatgt

SEQ ID NO: 12369 - DNA, 144 bp, Homo sapiens
caaaagggagagaacaaaagctataccaaaagggccatgtttcaagaaaatggatttaaacatatttccctgtggagatcagccagcattactaacctgtcactggatagatctggttctcctatggtaccttcatatgagaca

SEQ ID NO: 12370 - DNA, 75 bp, Homo sapiens
acgaagaggtacgattccggagaatcgcgaggcagagcgggagcgcgcagccagccctggaagaaagcgggactt

SEQ ID NO: 12371 - DNA, 100 bp, Homo sapiens
tcaagactggtccacggagtgtatgaccacaaacagccatcaagttggtcgcattatgtttcagctcttctcagacatatgtccaaaaacatgcaaaaac

SEQ ID NO: 12372 - DNA, 50 bp, Homo sapiens
gaggagattctgaagataaggaggtagctgaagctgttgccactttcctg

SEQ ID NO: 12373 - DNA, 100 bp, Homo sapiens
gtttggaatgaggaaaagtgaacttttcgaggcatttgacttgtttgatgttcgtgactttggaaagctcttgaagtcctattggctggataattttgca

SEQ ID NO: 12374 - DNA, 98 bp, Homo sapiens
aaggaggcccctgccgtgtggacccgtaaaataaaatgggaactgtggctgcaccatctgtcttcatcttcccgccatctgatgagcagttgaaatct

SEQ ID NO: 12375 - DNA, 100 bp, Homo sapiens
aagcacagatttgcttttacaccaagcagatcaacagttggtaaagaaaggaaaaagcaaagttggggacatgttggaaaaagcagcagagttactgatg

SEQ ID NO: 12376 - DNA, 82 bp, Homo sapiens
agaccgcggccgggaccgagggttgataaggaaaccaacacggaagatctctttctggaagaagcagccagcctcgtgaagg

SEQ ID NO: 12377 - DNA, 101 bp, Homo sapiens
ccctgagcccgaggtgctgacgtcgcaaaaaaattggatagcaagaaactatattcagtctttgactcagatgccgaagatgaactttgcgaatgtattta

SEQ ID NO: 12378 - DNA, 75 bp, Homo sapiens
ggccgtgaacgaaagcagtgacggaggagcttgtaccaccgctgccactgcagagccccgccatggaagacacgc

SEQ ID NO: 12379 - DNA, 104 bp, Homo sapiens
caccaacagttgctggacagtttgaggatgcagatgttgatcactgaaaatgatttatgcaagtttaagcatcaattcctgaagattgccaagcccctctccag

SEQ ID NO: 12380 - DNA, 100 bp, Homo sapiens
gttttggctgcttgtagtaagttcttctacaaattctttcaggagtttacccaagaaccattggtggagatagaagtgcagctcgtttctcagagccggc

SEQ ID NO: 12381 - DNA, 100 bp, Homo sapiens
cagcgcgtcccctttgctccagccctgcggccgtccctttcggccggcggcatggccctgtcgtccgaacccggtggctagaggtgcaggtagctaattt

SEQ ID NO: 12382 - DNA, 74 bp, Homo sapiens
ctgggacactaagccagagaagtccaacgtggagcacctgacggagaaaatgaagaccaccatccagagaggcc

SEQ ID NO: 12383 - DNA, 101 bp, Homo sapiens
ccgcaccgccctccgcggccgccccctggggatccagcgagcgcgaaaaacacaccttgactttagtcagatacatcactgtctgttaaaggaaaccaagc

SEQ ID NO: 12384 - DNA, 100 bp, Homo sapiens
cttccccggccggtccctcgcctcccggccgagctgacgtctaaagcatcacaaggtagtgaccttgaacaaaatgaagcctcaagaaagaataagaaaa

SEQ ID NO: 12385 - DNA, 82 bp, Homo sapiens
ccgcgaggtgtgcagagtgctgagaccggtggaacctgaaaatgctgcagtgccggagctgcctgcagtggttccatgaggc

SEQ ID NO: 12386 - DNA, 100 bp, Homo sapiens
ccgggacggccggtcaggctcgccgccgagctgtgtggacgaatgtggaacctcgctctgtggctgtgttcccttggcactccttagtccccttcctggc

SEQ ID NO: 12387 - DNA, 130 bp, Homo sapiens
gacgtccctgggcgcgtcagaacaggcgctgcggctgatcatctccatcttcctggtgttgatgggaaccattttcagcatcctgctggtgactgtcatccttatggcattttgtgtctacaagcccatt

SEQ ID NO: 12388 - DNA, 75 bp, Homo sapiens
ctgcagccacatactatccgtttgttcaggaaccaccagtgacagatggccttgttcccagtgtaccagatgacc

SEQ ID NO: 12389 - DNA, 74 bp, Homo sapiens
ggagaggagagacgagcagaatgtacaggtggatcatctgaatctcctgaaacagtttgaacacctggaccctc

SEQ ID NO: 12390 - DNA, 76 bp, Homo sapiens
tgccaagcagccttagccctagtgtagagagccctaatttgtttagaactgtaatatgcacagttaaaacaacttg

SEQ ID NO: 12391 - DNA, 87 bp, Homo sapiens
ccgtcaccaaggcgcccaagaaggctggagtgagacagctctacgtacagattgactttgcagccatgtagtgaatggaaagaaatt

SEQ ID NO: 12392 - DNA, 71 bp, Homo sapiens
ggcacaagccagcgtcacccatggagcacatggagatgaggagaaggcagagcccccccaggctatgaatg

SEQ ID NO: 12393 - DNA, 50 bp, Homo sapiens
gttctttagtgtaaattcctggaccccgatacctgcactcaaataacata

SEQ ID NO: 12394 - DNA, 100 bp, Homo sapiens
aataacacaacaagtttagggagtccatggccagaaaacttttggggtcctggatgcctcatcccttagtttcaacaccagattgaaatggtttgccatc

SEQ ID NO: 12395 - DNA, 100 bp, Homo sapiens
gatggactttggagaaccgtggaaaatgaacccaggagatggagcattttatggccctaaagtgttaaagaaatcttactccaaggccttcacgctgacc

SEQ ID NO: 12396 - DNA, 96 bp, Homo sapiens
ctccctccgggttacccccactccagagcgcttctctgaagtagctttggaaagtagagaagaaaatccagtttgcttcttggagaacactggaca

SEQ ID NO: 12397 - DNA, 100 bp, Homo sapiens
ggtggcccacttgttgaagacaaaatcgctttccctttccatcttaaaggctgagtcatcactagagagtgggaagggcagcagcagcagagaatccaaa

SEQ ID NO: 12398 - DNA, 100 bp, Homo sapiens
tctgaaatctgacacctgctctcccggcaaggaaacttcgcaggctgtgtgaagcttattcatgaagagacctctgcctgaacatacagcaaatttaaga

SEQ ID NO: 12399 - DNA, 100 bp, Homo sapiens
gcagatggagagacaagaggctgtcctggtagcatccaatgctccctaccctcacctcaagacgaccatggccaccatcccagactggaagctacagctg

SEQ ID NO: 12400 - DNA, 98 bp, Homo sapiens
gtggctgcatagtcttggcggaggacatgtctcaggaaggctatggaactagatctcaacctcctctggcccccggaaaacctaaccatgaagacttg

SEQ ID NO: 12401 - DNA, 82 bp, Homo sapiens
ctgaatgggggtcggggtcatgcgtcacggcgaccagaccgacaggctgccccgggagacgctggccttcagggaggagctg

SEQ ID NO: 12402 - DNA, 73 bp, Homo sapiens
aaaacatgcagctcctgtcgagatcaaggcaaaaatgcggatacagttgatatattagttggatggcatatag

SEQ ID NO: 12403 - DNA, 83 bp, Homo sapiens
atggctttggtccccagcgcagtgaagtggtgagcctttttgtcactgggaaatgtttcaacgtgcgcaagcgttgcggcggc

SEQ ID NO: 12404 - DNA, 51 bp, Homo sapiens
gtggatcttgaagctttggaaagattgcaacacctgctcggtataccgtga

SEQ ID NO: 12405 - DNA, 74 bp, Homo sapiens
ccaatgccgctggtgcttattatcagagtttccctacgtataccctggtggttcaagctgctgaccttcaaggt

SEQ ID NO: 12406 - DNA, 100 bp, Homo sapiens
cggctgcggggcttccctgcggctggagctctgcccggatggccctagtcttcgtgtacggcaccctgaagcggggtcagcccaaccacagggtcctgcg

SEQ ID NO: 12407 - DNA, 97 bp, Homo sapiens
aagcatctactcctgcagggctgaattccacagctaaaaagatgatgatgcagctcaaggagttatctctgccagtgcatcaaatttggatgatttc

SEQ ID NO: 12408 - DNA, 82 bp, Homo sapiens
gccccctacccgcttctcgtagtcctgggagcacagcagaagttgatgtcttggcattgcccattttcaagcaggaagattc

SEQ ID NO: 12409 - DNA, 99 bp, Homo sapiens
ccagaagaccaagtacctgcagatcctgacctctctgatgagatggatcggcaagatcgtggacgccgtgattcaggagcaccagccctccgtgctgct

SEQ ID NO: 12410 - DNA, 80 bp, Homo sapiens
cccctaccagcgagggcgcctccgagtggggctgcgggacgttaatgactacgtgtcctatgcctgggtcggggacagca

SEQ ID NO: 12411 - DNA, 74 bp, Homo sapiens
ggtggctcacgttgaccaactctttgatgatgcatccaggctgcgggcctctcgggtgcttcttgtcggcttga

SEQ ID NO: 12412 - DNA, 75 bp, Homo sapiens
caaagatgcaagcctggcattttttgatgattgtgtagataaaccagatgaaaactcgctggatttttcctcctg

SEQ ID NO: 12413 - DNA, 82 bp, Homo sapiens
tcaatcagagcgtcctgtgcggtttgaagactgcttcattctgcctctagtaccagcggtttctctgttctgtgatcaatgt

SEQ ID NO: 12414 - DNA, 98 bp, Homo sapiens
aggctgcgaccgagacacctactcagagaagtccctccaccggctctgtgatccaggtccagagagcatcgcagacatcgatctcgctccatgtcacg

SEQ ID NO: 12415 - DNA, 98 bp, Homo sapiens
tgcaatcttaaaagaaactgtgaagcaaattcgtcagatcaaagaacaagtaatagctcttcaagtctgcaataaaaaatggcctccaacaaaactac

SEQ ID NO: 12416 - DNA, 119 bp, Homo sapiens
actgctctccatggagagagtaactctgtccttattatcggaccccgaggatcaggaaaaactatgagagaagaggtactcccttatagggactcgtaaagacatagagcatctggaaa

SEQ ID NO: 12417 - DNA, 50 bp, Homo sapiens
ctgtcccctacgtcctacatgagaagtcacctgcaccggtgcccgtgacg

SEQ ID NO: 12418 - DNA, 51 bp, Homo sapiens
tttgttcaggaaccaccagtgacagaactggcacagcctccaggttggcgg

SEQ ID NO: 12419 - DNA, 90 bp, Homo sapiens
ctgaagcagcgacggcacagcgggaagaatggccaacagagcacttatggcaaggcatctcgagggggtggcaatcaccaaaacaattac

SEQ ID NO: 12420 - DNA, 100 bp, Homo sapiens
gcagtactcgggcaagaccaccttcgtcaatgtcatcgcgagagcagaatgtgtgtgtgatgaatccggatctgactggacaaacgatggggaagccact

SEQ ID NO: 12421 - DNA, 88 bp, Homo sapiens
gaccacaccgctgatgaagacaaggactcacagtggctgcaagacccaccgtgcggaggtcgtttgaattccaaagatgctggctata

SEQ ID NO: 12422 - DNA, 75 bp, Homo sapiens
gttcaagattcaacttcacccgtaacccaccgccatggccgaggaaggtggccataaaatgcagtaaaaacaaat

SEQ ID NO: 12423 - DNA, 82 bp, Homo sapiens
cagccgatccagcctgcggagcctgtggggcagtggctgcttcaacccccaactccactgctggtgcagccatgaactcctt

SEQ ID NO: 12424 - DNA, 75 bp, Homo sapiens
ctaaatactactctgaggggcttagaaattaacaggagttcagcagtgcctaagacctgggtctcaacagaccac

SEQ ID NO: 12425 - DNA, 100 bp, Homo sapiens
gctgtttggaaagacccaggagaagccgcccaaagaactgaaggaagaggcccagcagaagggactcgctgagccaccccccgccccactccatgttggc

SEQ ID NO: 12426 - DNA, 74 bp, Homo sapiens
ttctaattcaggcaatttgcaaaagtgttccttgcctgtatctccccttggttcaatagctaccagatttttgg

SEQ ID NO: 12427 - DNA, 75 bp, Homo sapiens
atgcattgtcagaccctaaaggatcaaccctctgcatacagtaaagttgtttgatgtgtgcacagtgtcacgaac

SEQ ID NO: 12428 - DNA, 100 bp, Homo sapiens
gccttggagagaaaacttgcaaggaaaggaacatgtttgaatttcagatgtgttcctcaatgaatcacgatgatgagagcctgaagtacctcacccatga

SEQ ID NO: 12429 - DNA, 101 bp, Homo sapiens
acgtggacgctgactcggaagtgcagtttgagttcatgatcgagtccatcctgtatgcccgggatgcctggctgaaggaggacggggtcatttggcccacc

SEQ ID NO: 12430 - DNA, 100 bp, Homo sapiens
ggcgggatgcggcgcgccgcgcgcccttagagatttgtttgattccatggataaaacttcttccagtattccacctattattctactgcagtttttgcac

SEQ ID NO: 12431 - DNA, 75 bp, Homo sapiens
gtgctggccctcagcagtcccggcctctggcagcacttgccccaaaggtgaaacctcacctgctatccagctgcc

SEQ ID NO: 12432 - DNA, 100 bp, Homo sapiens
gccctgtgctgtggtcctggcccagtacctttggtttcacagaagatctctgccaggcaaggccatcttagaggacaaggagactggctttcacagaggt

SEQ ID NO: 12433 - DNA, 111 bp, Homo sapiens
aatcctgcggcagaagccgagttcaacatcctcctggccaccgactcctacaaggaggctctgtcggtggtgagcgacgaccagtccctctttgactcagcgtacggagcg

SEQ ID NO: 12434 - DNA, 98 bp, Homo sapiens
gtatttcctggacttagctttgtcatgcaaagctgtcatttgctgtcggtactacctctgcttgcagttgcgagatgacatcgtgtccggaaggctgc

SEQ ID NO: 12435 - DNA, 75 bp, Homo sapiens
atgatagcagtgggcttttcacagtgggctttactgtgttgagctatgtgatgatgatgccatttaaacgacagg

SEQ ID NO: 12436 - DNA, 80 bp, Homo sapiens
agtggctccacaaatacctggagaaggggaaggagacgctgcttcacctggacccccccaagacacatatgacccaccac

SEQ ID NO: 12437 - DNA, 83 bp, Homo sapiens
ctccaggaaattcagcctcaaaaccgtcctgctgcttgctgaccaaatgctgactggaaataccggcatgcaggattgatggc

SEQ ID NO: 12438 - DNA, 51 bp, Homo sapiens
gattccaagtaactcttatttgggaaccctgagcagaacacatgcacaaac

SEQ ID NO: 12439 - DNA, 51 bp, Homo sapiens
acccagacaggtggcgacggcagaggattgctggatttgtgcgactcggtg

SEQ ID NO: 12440 - DNA, 80 bp, Homo sapiens
acgcctggctcggagcagcagcctctgagatgcgtctgttactagagtggagagtctaccttcgtctcacatgtgccaca

SEQ ID NO: 12441 - DNA, 82 bp, Homo sapiens
attgattagttcatactacaatgtgacatactggcccctctggtatattgaccgatttgggatgttgcccctggatgagcct

SEQ ID NO: 12442 - DNA, 75 bp, Homo sapiens
gacagaacctacaccatccgtgagattatcaacgaggacattgccaagaggacgtgtgaggagcaccagctctgt

SEQ ID NO: 12443 - DNA, 100 bp, Homo sapiens
gggaacccaaaaggtgcgatgctcacccatgggaacgtggtggctgatttctcaggctttctgaaagtgacagaggagggagccatggatttgctgcggg

SEQ ID NO: 12444 - DNA, 75 bp, Homo sapiens
gctgtggaaggctctggataaggaccagtacctgcccaggaaactggctgaacttcctgtactgatgctgggaag

SEQ ID NO: 12445 - DNA, 100 bp, Homo sapiens
aatttgattttgatgatgagccagtgacaccaaaggactccctgattgaccggagacgcaccccaggggaattttcaggctactaataaaataccagctg

SEQ ID NO: 12446 - DNA, 100 bp, Homo sapiens
agttgcagcctcccgacttataccctggtacttctagtctaaaacaggatttgactctactaatccaggcagagtggcatgattccgactggatactctc

SEQ ID NO: 12447 - DNA, 90 bp, Homo sapiens
ccgaacccgggaaaagaggaactaaggcggaggaactgagacgtttcgaattccagcacagttcatgaatggcaacatccacattccagt

SEQ ID NO: 12448 - DNA, 98 bp, Homo sapiens
gttgctgctaacactccaagtatgtactctcaggaactattccagctttctcagtatctacagatctttaggttcctgaaactggtggcaacatgacc

SEQ ID NO: 12449 - DNA, 101 bp, Homo sapiens
atggcggccaatgtgggatcgatgtttcaatattggaagcgctttgatttacagcagctgcaggtgagcgagtgctgtgctttcatgggcctcttctttat

SEQ ID NO: 12450 - DNA, 74 bp, Homo sapiens
agaacataaagacagggctccatgcagtggaccgatgggcctctacagactggacacctctgcactgggctgca

SEQ ID NO: 12451 - DNA, 100 bp, Homo sapiens
tcggggtggtctgtctgctcctggcatgccctgccacagccactgcccccaccatcctcacggacgtggacccccagtccccggtgatgcaagaggagat

SEQ ID NO: 12452 - DNA, 75 bp, Homo sapiens
cggcgcaggcaccggcccggggagaggcaccatgagcggtaaaatgtcggttccaggaccttaccaggcggccac

SEQ ID NO: 12453 - DNA, 99 bp, Homo sapiens
ccctgtttgagaaaaggcctaagaattttggcattgatatctaacagtgatacgccttcaccaccacctggtttgtcaaaatccaatccagtcatcccc

SEQ ID NO: 12454 - DNA, 82 bp, Homo sapiens
caagaggcaaaggggaggttacgcagcaaaccatccagaagcgccgtgccgtccctgcagtgacaccgaggtgctcctagcc

SEQ ID NO: 12455 - DNA, 83 bp, Homo sapiens
aggaccccggtacatctgaaagccgggaaatgaggctgaggctgcagtggccacccaggagacatccaccgtcaggctaaagg

SEQ ID NO: 12456 - DNA, 82 bp, Homo sapiens
ggagacaaagttgaaaacaaagtgctggtggatctccttacgtagcagccaaaataaatgaagcaaaagacttgctagaaac

SEQ ID NO: 12457 - DNA, 73 bp, Homo sapiens
ggtgacgtgacttagaaggtggtgcagaggagcgagctggacgccactgtggggctctgagagtcctgaattc

SEQ ID NO: 12458 - DNA, 98 bp, Homo sapiens
gtgaggcctccccagccatgtggaacttgttggaggtcggcgccggcccccgccttccgcgccccccacgggaaggaagcacccccggtattaaaacg

SEQ ID NO: 12459 - DNA, 82 bp, Homo sapiens
cgcttcagggtgtccaagttccggcacaccgaggctcggccgccccgccgcgaggaagcaggtcctggggaccaaggtggac

SEQ ID NO: 12460 - DNA, 100 bp, Homo sapiens
caaacctgtcgccacagagcagctgttgagcaccttcctaactgtagatcactgtgtccactactatgatcttcgtaacactaaacagccaatcatggta

SEQ ID NO: 12461 - DNA, 51 bp, Homo sapiens
gtggatggcatggggcgctttggcaggtttttcttcccccagtccctcagc

SEQ ID NO: 12462 - DNA, 82 bp, Homo sapiens
gaagaaacacttcctataaatctcgcccaaacaggaaagaaacgccacctcctggatatatcagtgaagatggagaaacaag

SEQ ID NO: 12463 - DNA, 100 bp, Homo sapiens
atgaccacgtcgttccgcgacggcctggctttctgcgccatcctgcaccgccaccggcccgacctcatgtctgtgcagacttttgcagacaaatcaaaac

SEQ ID NO: 12464 - DNA, 75 bp, Homo sapiens
ccgcgcgctaccggcccactgcgctggacaccttctctggtgctggagaatctggtaaaagcaccattgtgaagc

SEQ ID NO: 12465 - DNA, 100 bp, Homo sapiens
cagagatgcctgtaccgtgatgtgacgctggagaacctggcacttatgtcctccctggaatgtccttctcctccaacctcaaccactatggcatgaccca

SEQ ID NO: 12466 - DNA, 100 bp, Homo sapiens
aaaagagacctctacttagctcagcaattcttaccttgtgtcttctctttagggatggtgaggttggaaaaaggctcctgtaaccctcctccaggatgaa

SEQ ID NO: 12467 - DNA, 75 bp, Homo sapiens
gcatgagagtcaccatgctcaaagtgaatatattaagatcactccaagaactgaggcccctgtcagcagtgtcag

SEQ ID NO: 12468 - DNA, 83 bp, Homo sapiens
tcccagcctcaggcctgcacggacggtgttggttgggtacctggagtagaacagaaaaattattatgtctgtgttcccttggg

SEQ ID NO: 12469 - DNA, 75 bp, Homo sapiens
agcgccgtcccgtccgacagccaggcccgggagaaattacatgaagcagatgacatttgaagcccaagccttttt

SEQ ID NO: 12470 - DNA, 83 bp, Homo sapiens
gaaactcttccagcattacatatagagcttgatggtactccaaagattcaggtttactcacgtcatccagcagagaatggaaa

SEQ ID NO: 12471 - DNA, 75 bp, Homo sapiens
gtctgacagccctgtgtgacaccaagataagtaacctttcctgctctgggaccctaccaaggtgcccccacgact

SEQ ID NO: 12472 - DNA, 74 bp, Homo sapiens
tgtgggctcctggggagatggaggggccggggctgggctcgcaggagggactgaccttcaaggatgtggctgtg

SEQ ID NO: 12473 - DNA, 75 bp, Homo sapiens
gcacggatcagattatcatttgcacagatttttgtccctgagtcatggaagacagaagagctgaaaagtcatgtg

SEQ ID NO: 12474 - DNA, 132 bp, Homo sapiens
cgctgtggtggaaatgctcccaagagggcggcggcagcgggtcctacgaggagggctgtcagagcctcatggagtacgattctggaacttttcaaagcctgactctcttcttgaaacagtggagcatcatac

SEQ ID NO: 12475 - DNA, 99 bp, Homo sapiens
tacctggacgaggagctggactaccggaaacaggccttggaccaggccaacaaggtgggagaacaaggacatctacgcggcagccatccggagcctgcg

SEQ ID NO: 12476 - DNA, 100 bp, Homo sapiens
cagaaagttccgccatgagctggggcacggagctgtggatgccttcaattaagttgcagagttctgatggagagatatttgaagttgatgtggaaattgc

SEQ ID NO: 12477 - DNA, 100 bp, Homo sapiens
gaaacaatggcatttacagaaagagtcaacagcagtggcaacagagttcttggagtctctgcggagtccctgggccagatctcacagtgaaagctgcagg

SEQ ID NO: 12478 - DNA, 51 bp, Homo sapiens
agacatgagaccatagccaaacccccaggtgtgatgaatgcagactctgct

SEQ ID NO: 12479 - DNA, 100 bp, Homo sapiens
gcgaagtccacccagcgtttccgagagtgcttgtgatttcacgtatttttgctgaactcgtaaaagagacacttggatggtggattaaccagaacactaa

SEQ ID NO: 12480 - DNA, 75 bp, Homo sapiens
tacaaccttggagcccagagccacgtcaaacctcttagcaaatatccggctgtgatcaatgatatttcattctgg

SEQ ID NO: 12481 - DNA, 138 bp, Homo sapiens
acctggcagcagaggatgatgagggcttcagtgcagacgcagtggtggccctggagcagtatgccagcaaggtgacatttgctctgaactggatgatacgaatgatgtcagatttggaatctaacatcgtggctgtgg

SEQ ID NO: 12482 - DNA, 98 bp, Homo sapiens
ccaaagaaatgtagccttggaccgagacatgatgaagaaaggtgcataagctggagcctgaggcgtggaaacacgtggaagccgtatatatagacatt

SEQ ID NO: 12483 - DNA, 100 bp, Homo sapiens
taaaaaggctcagaaagatggatttttgcatgagacgcttctggacaggagacatggaaatttacactacagaaggcaagacaaattgtcaagaagtccc

SEQ ID NO: 12484 - DNA, 51 bp, Homo sapiens
tccaaagtagctgagactacagtcacccacaaaagctgtatataatgccag

SEQ ID NO: 12485 - DNA, 75 bp, Homo sapiens
cgcagtggtcgcttcttctccttgcattaacaacagtgtcttcagtgttcgctttttcagaactacagctgtatg

SEQ ID NO: 12486 - DNA, 75 bp, Homo sapiens
tcctgtcacaggccatgctctggcaaaaaccgctggccgcgcgccgaacccgagtccggcggcaccgacgacgac

SEQ ID NO: 12487 - DNA, 96 bp, Homo sapiens
cggcagcagccagacactgaggctgtgctgaacgggaagggcctcggcactggtaccctttacatcgctgagagagacggaacctcactatgttgc

SEQ ID NO: 12488 - DNA, 75 bp, Homo sapiens
aggcaacatcctgtcacaggccatgctctggcaaaaacggaactctaatgatccaggacaaagaagttaccctgg

SEQ ID NO: 12489 - DNA, 97 bp, Homo sapiens
gaactgcagaggttcctctacagcaagcccggggagtcccaggcagtgctgtgctgctgtttgaggtggagctggtgtcccgggaggatgggctgcc

SEQ ID NO: 12490 - DNA, 122 bp, Homo sapiens
gcgggcccaaggcgtgaggcgccgcccgggtgtccccgcggcgcaggaggcggtggagcgcagagcgggcgagcgcgtaacagatcaactcctagcaatcatgatcggatacagcgtctgag

SEQ ID NO: 12491 - DNA, 100 bp, Homo sapiens
aagcgagcctcttctgataactcaggatttacttgaaacaaaaggagaccctaatcttcagataacccagcagccaactggcttcatgcgcgctccactc

SEQ ID NO: 12492 - DNA, 74 bp, Homo sapiens
gctggcagccgcggatctcaccgccgctcaggactgtgtcagggaaaagggaggcaaggtcctggtccactgtg

SEQ ID NO: 12493 - DNA, 97 bp, Homo sapiens
ttaaaaagcagtgggctctggaacaacacggtgttcatcttttctacaggacaaaagatccttcatcaccgaagtgacgttttagaaacagtggtcc

SEQ ID NO: 12494 - DNA, 51 bp, Homo sapiens
agatatgatgaaacttcgtagatttttaggcaacagatcccctaatttgtg

SEQ ID NO: 12495 - DNA, 98 bp, Homo sapiens
agagaagacgatctgcacttcgcattttggcattgacatttaattttagggtcctttatatagaagggagagtagtggtggtgaccgcggtggcttca

SEQ ID NO: 12496 - DNA, 100 bp, Homo sapiens
gagattgaaaatcaagcagtgcctgcttttcaagggccaaatatcataaactgaagtttgggacagacctgaaccagggggagaagaaagcagatgtgtc

SEQ ID NO: 12497 - DNA, 75 bp, Homo sapiens
tttcatattgcagccagcatcaacccagccacaggctcctggtcaccagccccagaaccaagaggacaccagggc

SEQ ID NO: 12498 - DNA, 100 bp, Homo sapiens
cagcctgagttgggagaagagctccagagaaaacattgctgaggctcttgtcagcaaaggtctagccacagtgatcagataccggcaggatgatgaccag

SEQ ID NO: 12499 - DNA, 74 bp, Homo sapiens
cggcagcgagcggcgccttccaactccggctgatgaacttattagtcctaaagacattgatcctgtccagcgct

SEQ ID NO: 12500 - DNA, 87 bp, Homo sapiens
gacgccggaacaccctggaagccgagaaatgaattaaacaaccaccatgtcgagcaaaaaggcaaagaccaagaccaccaagaagcg

SEQ ID NO: 12501 - DNA, 83 bp, Homo sapiens
cggaggagagcagctcctcactgtcaagcacgagctgcggactgatgctctctgtgtgggtatgtgtgtagccatcctccttc

SEQ ID NO: 12502 - DNA, 75 bp, Homo sapiens
ttggagcgaagagctcggaccaagcgctcagtgagggccccaaggctgttgcagctcctcgacctgatcggttgg

SEQ ID NO: 12503 - DNA, 75 bp, Homo sapiens
atttattgcccttccatcaatcttgcaaagaatcttacaggtacttctcccagcagctggtctcttacagttaca

SEQ ID NO: 12504 - DNA, 100 bp, Homo sapiens
atggaatgtgcgagaacacggtgtctttggtgcaacactaacaaggcttgtctggactacccagttacaagcgtcttgccaccggcttccctttgtaaat

SEQ ID NO: 12505 - DNA, 50 bp, Homo sapiens
gtcattgctaaaagtctgacccctgatttcaacagcatgatcctttactg

SEQ ID NO: 12506 - DNA, 82 bp, Homo sapiens
gaagaaagcgatttcctccgcctcttccaaagcgggagtgcatccgccccaacccttttccccctcgtctcctgtgagaatt

SEQ ID NO: 12507 - DNA, 100 bp, Homo sapiens
ctataccagtgccagtctatacagatactttggttagtgaccacatcgcagcatgttgagtcaagtttaccgctgtgggttccagcccttcaaccaacat

SEQ ID NO: 12508 - DNA, 83 bp, Homo sapiens
ctttgactactggggccagggaaccctggtcaccgtctcctcaggaattacatgaatgacagtcttcgaaccaatgtgtttgt

SEQ ID NO: 12509 - DNA, 107 bp, Homo sapiens
gccctggagacagaggacggagaggggctacagcagagcctaagggacctggcacaggccgtcctgtctgacgctgagagcggcagcctgcgtccaacagcgtccga

SEQ ID NO: 12510 - DNA, 100 bp, Homo sapiens
ttggcagccttcctgatttctgcagctctgtgtgaagagccccccaagatgaacccagtggtggagccactgtcctggatgctgggcacctggctgtcgg

SEQ ID NO: 12511 - DNA, 82 bp, Homo sapiens
caccttctccagtcgacactctcgcgcccggagaccatggtgaatccgggcagcagctcgcagccgcccccggtgacggccg

SEQ ID NO: 12512 - DNA, 88 bp, Homo sapiens
cggatcaatccagatggcagccagtcagtggtggaggcagcccagctggaggcaccccggcctccccggctccgctacctgctggtag

SEQ ID NO: 12513 - DNA, 100 bp, Homo sapiens
ggaccagcagctgtcgccgccgctctcagagtgctgatggcagagattggtgaggatttggataaatctgatgtgtcctcattaattttcctcatgaagg

SEQ ID NO: 12514 - DNA, 100 bp, Homo sapiens
attcatcctgttcagcacatctactcattcaagtggaaatttatgccaactcttctctgacccataatgcctcagatagcaaagccattgtggatgggaa

SEQ ID NO: 12515 - DNA, 103 bp, Homo sapiens
gtctcaatgtccacaacatgaccccagctacctccccaataggtgcatcaggtgagatttgtggatttaaaattcacgggcagaatgtcccctttgatgcagt

SEQ ID NO: 12516 - DNA, 90 bp, Homo sapiens
gatggtgggactctccggccctgtgcagtgaacattttagtggacaaaccaaatgaccaatcttcaagatggtcttcagagagcaactat

SEQ ID NO: 12517 - DNA, 75 bp, Homo sapiens
tttccagcaggctgcagatacgagtggacaagtgtgggccatgtttgaggattgccccagcattcagttctatga

SEQ ID NO: 12518 - DNA, 83 bp, Homo sapiens
cttcgacatcgaggatgacatcatctacactcaggacttcacggtgcccggtttggtgcacctcgatttggaggaagtagggc

SEQ ID NO: 12519 - DNA, 100 bp, Homo sapiens
acctgttgccattatagagctggaattaggcaaatatggacagattttccatgatgtagcttataaagcaaaagacagaaatgacctcttatctggaatt

SEQ ID NO: 12520 - DNA, 51 bp, Homo sapiens
aaagaagtgaagctgctgctactcgcaaaatgatgcttcaacacccaggcc

SEQ ID NO: 12521 - DNA, 72 bp, Homo sapiens
attgcatgtcccctggaaggaggtcctgctcacagctcctcctccctatatgccaccacagccctcttaccc

SEQ ID NO: 12522 - DNA, 75 bp, Homo sapiens
tgaccaaagcattcctcttctatgtttcttaaacaattaggtctacatcctaactggcaattcgttgatgtatat

SEQ ID NO: 12523 - DNA, 101 bp, Homo sapiens
agaagagtaactcattctgagccagtgggaactcagggccaatctatatctaacaagattttctctgtgggcagttctttttgttttgggaagacttctga

SEQ ID NO: 12524 - DNA, 100 bp, Homo sapiens
ccagcctaggttccacccttttctgggaacgttcaacagaatccctcaatcctagaccacagaccacaatttctccagcagatcttcatggaatgtggta

SEQ ID NO: 12525 - DNA, 88 bp, Homo sapiens
gactacgggagttgggaggacccgggacaccgcacagccgggaaatggtttgccaagatggtggataagaatatttacatcattcaag

SEQ ID NO: 12526 - DNA, 100 bp, Homo sapiens
gcaccgccacaacctcaggaccttgagctggaaactgacaaactagctctcccgatgagccccagcccgcttagcccgagccccatccccagccccaacg

SEQ ID NO: 12527 - DNA, 74 bp, Homo sapiens
ccctcatggggaaaatctccccggtgactttcagtttcaggtatgtcccaaaagtctgtgtgtgtctactcctg

SEQ ID NO: 12528 - DNA, 50 bp, Homo sapiens
agaatgctgacccttgtagaagggccagcgtcatcagcacccgatgttct

SEQ ID NO: 12529 - DNA, 76 bp, Homo sapiens
gggctcccactgattctacattatgaaggacagaataacgggctcccagattcacaagccccaccaagaggatcac

SEQ ID NO: 12530 - DNA, 82 bp, Homo sapiens
tcagctgaaaaatgaaattcttacaagtggaaatatacccccaaattatcaatacattcaaaaggtgatgacctatcaacag

SEQ ID NO: 12531 - DNA, 75 bp, Homo sapiens
tgagcctgtcccaagccctggtgccaggtgtccatccccgtgctgagattactttctatgaagacaaaaattttc

SEQ ID NO: 12532 - DNA, 82 bp, Homo sapiens
cacagtctccgtgccggtggaggggcggccccacggcgagcatgcaagagtgagccatggagctacgtgtggggaacaagta

SEQ ID NO: 12533 - DNA, 50 bp, Homo sapiens
agagcccctcaccctgagatggggtgtcttcatctgctgctggttcacca

SEQ ID NO: 12534 - DNA, 125 bp, Homo sapiens
gaaactgatgaagctgcagaaccaacgaggtggccgaatcttccttcaggatatcaagggtcaatgcaaccaacttcatggaggcaggagccccagttatgtggaatgggcacagagcaaggctg

SEQ ID NO: 12535 - DNA, 90 bp, Homo sapiens
tgcgggaactccaccgccaccagcgcgggcgcgggccaagggaagaggaagaacgtctgagaaataaaattcgagctgatcatgagaagg

SEQ ID NO: 12536 - DNA, 100 bp, Homo sapiens
tgtacaccagttggcctttctcgtatgttcacagtgatgggtcagttgctagtgaagccaacagtgcaaaaacttcaagctattctaaagccaatgatgt

SEQ ID NO: 12537 - DNA, 128 bp, Homo sapiens
cgtggccttcgcgtctgcccggccaagaggcaaaggggaggttacgcagcaaaccatccagaagcctgacatttaccccggtaactgctgggcatttaaaggctcccaggggtacctggtggtgaggc

SEQ ID NO: 12538 - DNA, 60 bp, Homo sapiens
ggctaaggacctcaacccaggagttaaaaagggaagaaggagaaagggccaacccctgaa

SEQ ID NO: 12539 - DNA, 51 bp, Homo sapiens
acctgaaagaccccagttatggatgggagtttctccacagacactacccaa

SEQ ID NO: 12540 - DNA, 75 bp, Homo sapiens
taagaagtccaaggatggttctgaggacaagttctacagccacaagaaaacgagtaaccagctcataaatcacat

SEQ ID NO: 12541 - DNA, 98 bp, Homo sapiens
gagtgcaggagccataatgtcgacctgccggagtcgaggattccagggtcgaacactcgcctgattacatcaaccccagagccgtgcagctgggctcc

SEQ ID NO: 12542 - DNA, 100 bp, Homo sapiens
tgcattttgttaagaagcacctcatgcaagcgagggacctgggactgctcacagccaggtgtccaacacgctctcttgggctctgtatgagctctcccgg

SEQ ID NO: 12543 - DNA, 89 bp, Homo sapiens
tggagatcgtcccgcgcctgccggttcgagattgaaattgagcccatctttgggatcttggctctgtatgatgtgcgggagaaaaagaa

SEQ ID NO: 12544 - DNA, 89 bp, Homo sapiens
aagagaagcagtgaaggagtgcagaggcatcacctgaaaggtcagcacctcatctatgggcactttaccaaagcgggtgaaaattgtgg

SEQ ID NO: 12545 - DNA, 50 bp, Homo sapiens
acccttcaccatgttttaaagaggccttcctcatcaggctgctaagggac

SEQ ID NO: 12546 - DNA, 75 bp, Homo sapiens
ctgctcttcctcccttcgctcgcaccatggacgagcctgtggagtgggagacacctgacctttctcaagctgaga

SEQ ID NO: 12547 - DNA, 90 bp, Homo sapiens
gctgcctcatctgcagtccggactcatctagcctcgggtggtgaatgacaagattgtggccagcaacctcgtgacaggtctacccaagca

SEQ ID NO: 12548 - DNA, 75 bp, Homo sapiens
cgctcgcgaggagggttgctagtggagaagcgagacggtcatctgttccagccgggccactgtgatgctttatga

SEQ ID NO: 12549 - DNA, 100 bp, Homo sapiens
gaccagggacctgcccgcctgcggctgctccggagccagtcttggtgctctgtgttcacctggttcatctgaggagctgcatctaccctgcccatgccat

SEQ ID NO: 12550 - DNA, 90 bp, Homo sapiens
ctagtttggatgtggaggggaatagactccatctatccatatgaggatcagattttattaagacctctactggaaaagaaacagtaaatg

SEQ ID NO: 12551 - DNA, 82 bp, Homo sapiens
gatgaagttgattgactatggtctctccggctaccagggccggagttaagatgagtccagcgaagtgcctagagtaccaaat

SEQ ID NO: 12552 - DNA, 100 bp, Homo sapiens
atatgaccctatggaagcagaagaagctgaggatgaagaagatgccatcatctgccctccaccatccatacctacgtttgcaacacttcgtgtttataag

SEQ ID NO: 12553 - DNA, 74 bp, Homo sapiens
gaagttactgccgcgccaccgagtccggaccggagactttggggcctaactagaactcccccactggaaaggat

SEQ ID NO: 12554 - DNA, 50 bp, Homo sapiens
caagaacctgaccgagagggagtcaccgttacttcatccccaatccgagg

SEQ ID NO: 12555 - DNA, 82 bp, Homo sapiens
cctgtacagcctgcagaactgcgtggtgtccctcgtggccgttcacccctccaccgtcaacccgctcgggaagcagctcttg

SEQ ID NO: 12556 - DNA, 75 bp, Homo sapiens
gtttttctgttttgcctgaatacatgatttaaacaagagatttccacagaagctcaacagacagtcagctaaaac

SEQ ID NO: 12557 - DNA, 51 bp, Homo sapiens
ctgggacagccatggtttcagacggcattgaatgccccagaggagcccgaa

SEQ ID NO: 12558 - DNA, 100 bp, Homo sapiens
gaaaggatgcaaattctccagaatttcaagcacaaccccaaaattaacaccatcttcatatccaaggagttgtaagacgttcatcgccgtgttatccttg

SEQ ID NO: 12559 - DNA, 101 bp, Homo sapiens
agaatgtgatttgcttgaagatatgagtcatcagtgagttctgcctcagtcagctcccaagtgaggacgcagtcacctttgaagactccggaggctgagtt

SEQ ID NO: 12560 - DNA, 51 bp, Homo sapiens
taaggattccaagtaactcttatttgtacaaccttggaaaagcttgaagtt

SEQ ID NO: 12561 - DNA, 80 bp, Homo sapiens
agcctggaaggtgcgtgtggggctgggtctcggagtgggagacgtggagtgcagggagtgcatccgccccaacccttttc

SEQ ID NO: 12562 - DNA, 90 bp, Homo sapiens
ctttatctgtggcatgcaactggtaattaataatgcttgtgctactcaagccatagtgagtgtgttactgaactgtacccaccaggatgt

SEQ ID NO: 12563 - DNA, 75 bp, Homo sapiens
cggccaaagaagtgaagctgctgctactcgcatgtgtttgatgatctcagaggctcagtatccttgtcctgggtt

SEQ ID NO: 12564 - DNA, 100 bp, Homo sapiens
aagatggacaaaagagaacatcgttagttgaattcctgggcaaactggtctgaagattgacttggaaggagtggagagctccaaacgagaatggaagccg

SEQ ID NO: 12565 - DNA, 80 bp, Homo sapiens
agcctctcagcttcggagaatggagtcttccatcaatcatatctcacagattgggaaaatgaggtacgttagtgttcgcg

SEQ ID NO: 12566 - DNA, 101 bp, Homo sapiens
ttcactggacttccacaaggacagccatgggagggaactgggaacagccaggtgccccaaagcaaatacgcggagctgctggccatcattgaagagctggg

SEQ ID NO: 12567 - DNA, 75 bp, Homo sapiens
attggcaaagttattgccagcttcctgtagccggatcgagctgggagatgtgacaccacacaatattaaacagtt

SEQ ID NO: 12568 - DNA, 75 bp, Homo sapiens
ccgagccggtgcagtacacacactggaacacacaccagccgcgaagagaggatggtgatgcaccggttacaaaag

SEQ ID NO: 12569 - DNA, 90 bp, Homo sapiens
gcgggactttattaccgctttaccaggctgaccggttccctgatgtgttacctgcttctgctactgatccaaactgcagaacttctcatt

SEQ ID NO: 12570 - DNA, 87 bp, Homo sapiens
gatttcttctctgtgtagcaagagttaggaagtaacatggtagtacctcaggcaaaaatggcattagtcctaagctccccactgtgg

SEQ ID NO: 12571 - DNA, 100 bp, Homo sapiens
agcctgcagagcgcgcagtacctccgctcatgcccagacctacgatttagtatggctctgtgtgatcaggagaagactttcagacaacagagaaaagaac

SEQ ID NO: 12572 - DNA, 82 bp, Homo sapiens
ttctcaggatatgacaggggtaacacccttccagatgatttttgaggagaagatggtataaactggtccatcagtgacaaag

SEQ ID NO: 12573 - DNA, 100 bp, Homo sapiens
aaatcccctctcactctccaattctgttgttgcctccatgcgccaatccaaaccgaaagccagaaggttcaggaagatttgactgaagagaaaaaaaggg

SEQ ID NO: 12574 - DNA, 100 bp, Homo sapiens
cagataatgcctttatgttacttactcagaccaaggaattcatcttcttggagctgctatccaacctgtactcgcatggggaccagaacacgctgatgga

SEQ ID NO: 12575 - DNA, 75 bp, Homo sapiens
cgccgctctccatcaaacaattcctggacttcgaattaaacaaccaccatgtcgagcaaaaaggcaaagaccaag

SEQ ID NO: 12576 - DNA, 82 bp, Homo sapiens
cctgacaaattatgctgcagcatattgtactggcctgctgctggcccgcaggctgccactgcagagccccgccatggaagac

SEQ ID NO: 12577 - DNA, 100 bp, Homo sapiens
gtcgactacaagaagagggcggagcggagacgggagtattatgaaaagatcatcccaagtgtccttcaagatatcactgtactcatgaagctggtgtaca

SEQ ID NO: 12578 - DNA, 76 bp, Homo sapiens
ggccagtcgcctccaggccaagagggatccttcacccgtgtctggaagcggggagaggtggtgagagatgacccct

SEQ ID NO: 12579 - DNA, 75 bp, Homo sapiens
ctcagcctcccaagtagctaggaggtgtgtaccaccacacacagacaaatcccaatctgctgaaatatgggaaaa

SEQ ID NO: 12580 - DNA, 75 bp, Homo sapiens
gaggtatttagccttgcatacggacttgcttgaggaggaggcaaggcaaggggtggcctatgtatgcacagctac

SEQ ID NO: 12581 - DNA, 97 bp, Homo sapiens
agccagtacccagatacgctgggaaccttccccagccatggcttccctggggcagatcctcttctggaggtttctgctttgggacaaccatacatct

SEQ ID NO: 12582 - DNA, 100 bp, Homo sapiens
catcccgttctctgatttgcagcagcccacagaattcttccagtccctgggtggggacggagaaaggaacgttcagattgagatggcccatggcaccacc

SEQ ID NO: 12583 - DNA, 82 bp, Homo sapiens
tcctgccgtccttctccactttcgccagcccgtgccgcgagcgcggcctgcaggaggtcccgcgcggccccgggtgaggcac

SEQ ID NO: 12584 - DNA, 90 bp, Homo sapiens
gctaagagatatctgcaatgatgtactggattttgcctaccattttacagtatttgtcttctattttggagcctttttattggaagcagc

SEQ ID NO: 12585 - DNA, 100 bp, Homo sapiens
atggcggggaaggcggccgccccgggcaccgcggtgctgctggtcacggccaacgtgggctcgctcttcgacgactatctccagatgaaatggccactgc

SEQ ID NO: 12586 - DNA, 99 bp, Homo sapiens
ggagaccccggggccacccgcccgggcccccgacgcccggcccgcaggtgctaaaatgatgtattttctggacaagtcaaggcaggagaaagcaattgc

SEQ ID NO: 12587 - DNA, 100 bp, Homo sapiens
gctgtgaggtcatcggaatcccgacacctgtcctcatctggaacaagatttgggatgatgaaattgttgcagacttttacgtagctgttccagaaataat

SEQ ID NO: 12588 - DNA, 131 bp, Homo sapiens
gatgaggttgacaaactgggaaaaagtctacagggtgatccagcagcagctctgcttgaggagtacaaaccaccaggaacccgtaaacttcataacattcttggagtggaaacaggaggacctggtgggcg

SEQ ID NO: 12589 - DNA, 101 bp, Homo sapiens
ccggcacactgtgagttcctggacatcaagggctggacccagatgatgtggtaccagttggccaaagaagagcctggtgttggtgcatgtgctttggacta

SEQ ID NO: 12590 - DNA, 75 bp, Homo sapiens
aggggccactcagagtcgcccgagaattttcagatgcttcaagtgttgtgaacagagacttgtttggattatgca

SEQ ID NO: 12591 - DNA, 96 bp, Homo sapiens
ggaacatgcagagtctgcacaacaaaccagtccagctacgggggcccagccagccagcagctgagtgggggttacggaggcggctacggtggccag

SEQ ID NO: 12592 - DNA, 100 bp, Homo sapiens
gctttttcaagggagctgataaagaacttcttcccaaaatggaattcagtttgcctgttctgtatgcaagttccgtagctttgatgacgaagagatccag

SEQ ID NO: 12593 - DNA, 50 bp, Homo sapiens
gattaactcattcaaggttacccagttggactggggttttaaggggtgtg

SEQ ID NO: 12594 - DNA, 100 bp, Homo sapiens
ctgaacatcatgaattcccaagaaggaggcccacctgccgtttgctgtcattggcagcacagaagaactgaagataggcaacaagatgatgagggcgcgg

SEQ ID NO: 12595 - DNA, 100 bp, Homo sapiens
gtttgacccctttgacctcttcgatgtgcgagactttggaaaggaatataaatagtttctggaaaggacactgacaacttcaaagcaaaatgaagttctt

SEQ ID NO: 12596 - DNA, 100 bp, Homo sapiens
ttttctttatgatttggtgatgacccatgctctggagtggcccagcctaactgcccagtggcttccagatgtaaccagcgtgggagatgctatctgtacc

SEQ ID NO: 12597 - DNA, 50 bp, Homo sapiens
gcagttaccttgcagagatgatgggccatgggtctggatttccaagaaag

SEQ ID NO: 12598 - DNA, 100 bp, Homo sapiens
ggatgccttgctgtacgtgatccagtctgcgctggggagcagtgagatcgatagcaaggacttgagaccaggagacgtatccagcaagcggaacctctgg

SEQ ID NO: 12599 - DNA, 100 bp, Homo sapiens
aatgatacaagtttatttcccaaaagaaggtcgtaaaattttgacaccaataattttcaaggaagaaaatcttaggattcacttgttttcagaaccacag

SEQ ID NO: 12600 - DNA, 100 bp, Homo sapiens
cgtggcgctgggcaatgacatctacgtgacggaactgccattggatgtccagaatcccctgtagttgataatgttgggaataagctctgcaactttcttt

SEQ ID NO: 12601 - DNA, 96 bp, Homo sapiens
atctttcgggctgccgagggtgttcttgacgattaatcaacagaattccatgaaggtgatgttcaaatgcctctggaaaaactgtgggaaggtgct

SEQ ID NO: 12602 - DNA, 98 bp, Homo sapiens
ataccctgccttctccagcgacagccgggccgccttcaacaacaacgtgagcgtggcctacgagtgcctgagcgccggcgggcgcaggaagaggccgg

SEQ ID NO: 12603 - DNA, 90 bp, Homo sapiens
ccccaagattccagatgttcctgtggaccccagtccaggtctgccaaaatgtctgaaagatcagatctccttcacttcaagtttgaaaat

SEQ ID NO: 12604 - DNA, 82 bp, Homo sapiens
tcgtggcagagaaaaccagctgagacagggcgccacttactagaagcaaggtctcgctgtgttaccctggctggagtgcagt

SEQ ID NO: 12605 - DNA, 100 bp, Homo sapiens
cggtcgcctgggtccgcgccgagtatatttaaagttggagttcgttgctaaagatggcagacccagatgtcctcactgaagttccagcagcattgaagcg

SEQ ID NO: 12606 - DNA, 100 bp, Homo sapiens
cccttcatgcatgcgcggaggccgcctgctagcaagtctgaaccaatcagagtccttgtgactggagcagctggtcaaattgcatattcactgctgtaca

SEQ ID NO: 12607 - DNA, 50 bp, Homo sapiens
gaaacctggcacggctcttgcttccggcagcagtgaggatgccagagttc

SEQ ID NO: 12608 - DNA, 101 bp, Homo sapiens
cctatattgggttggatctattattatgagtgttgttgtttttgtgccaggaaacattgtagattcgggaactggagcctctcctctgtcacagtgacaat

SEQ ID NO: 12609 - DNA, 96 bp, Homo sapiens
cagcatcgcacagaaaacggccatctggaggctgtatggccgcagaggtcctgggcctatgtcaagaagtgcaaaaacaacatgtgtccaaatcgg

SEQ ID NO: 12610 - DNA, 100 bp, Homo sapiens
atgcctggaccctgcccagcagaatttgtatagagatgtgatgttggagaactacagaaacctggtctccctaggaggctggcaggatgtacagttttta

SEQ ID NO: 12611 - DNA, 74 bp, Homo sapiens
tctgcaaagacctacgctccttcatctaatccatggaaagctggccaaatttcgcagtctcctgtgcacagcgg

SEQ ID NO: 12612 - DNA, 90 bp, Homo sapiens
gcggcggcggtggcggcgaaggccgaggcgacccgtttgatggagctgcaccgccagtgggaattacttttggagaagatgcgagaaaaa

SEQ ID NO: 12613 - DNA, 50 bp, Homo sapiens
agcccaggatcagcctgtgaagagcagcccgacggccatggaggctgaag

SEQ ID NO: 12614 - DNA, 75 bp, Homo sapiens
ggctctggtgggtaggattgctgtcaaagtgcctggtgaagaatgtgatgggatcactagcatgtctgcggagag

SEQ ID NO: 12615 - DNA, 82 bp, Homo sapiens
ctgcggccgccctgggccgggccccaccggacggtccggcctctttggcctacccccgttggctccgctgccccaggtcgat

SEQ ID NO: 12616 - DNA, 60 bp, Homo sapiens
gcttcgtgcaactctccgggcggccgcacctgccagatcacagattctgctggccatatt

SEQ ID NO: 12617 - DNA, 83 bp, Homo sapiens
ctggagctgaggaaccggaccccggcagctgttgatgccggcccaggatggatcagacctgtgaactacccagaagaaattgt

SEQ ID NO: 12618 - DNA, 88 bp, Homo sapiens
gaagaaactggagcaagagtttcaggcatccttctttaaaagagaaatccacgttagctctccttgaggtctcgagttccctcggctg

SEQ ID NO: 12619 - DNA, 98 bp, Homo sapiens
aaccgcttcgtgcaactctccgggcggccgcacctgccagctcttttaagagcctgtgccgatggaggtgccaaccgcttatatgatatcaccgaagg

SEQ ID NO: 12620 - DNA, 98 bp, Homo sapiens
acatcactggctacacatttccagcaggctgcagatacgagtggacaagtggtcaaggtggtgggcagcaacatctcccacaagctgcgcctgtcccg

SEQ ID NO: 12621 - DNA, 75 bp, Homo sapiens
ccctgccagatagctcttattttgagatgtcatttgtcagagtgaaccgctgtggtccccgagttggtgtaagaa

SEQ ID NO: 12622 - DNA, 50 bp, Homo sapiens
aagctgcggccgcacctggccaagatttcaggtatgctgctgaaagtggg

SEQ ID NO: 12623 - DNA, 90 bp, Homo sapiens
gggcgaccgtggtgacatgattaccatcagcatacgtgagaaggctgttcgagagctgcttacccggcactgccagctgttggagacccc

SEQ ID NO: 12624 - DNA, 100 bp, Homo sapiens
caggccatggaagaaatgatgatggaaatgaagtataataccaagaaagccccacttgacccagtggcttattggctcaggaacgcaagctttgccgaga

SEQ ID NO: 12625 - DNA, 81 bp, Homo sapiens
cgccatggagcccgactcggtgattgaggacaagaccatcgagctcatgtgaggaggacatgtaccgtgctgcagatgaaa

SEQ ID NO: 12626 - DNA, 75 bp, Homo sapiens
agcggattaaagctaaagacatagttcctggtgatattgtagaaattgctggagtcagagtattcatcgaaaaga

SEQ ID NO: 12627 - DNA, 50 bp, Homo sapiens
attttgtctctctaaaagacattaagtagagacggggttttaccatgttg

SEQ ID NO: 12628 - DNA, 87 bp, Homo sapiens
agactgcttcttcactgctaagactacctttttcagaaatgcgcagagcaaacatctttcaaaggagtctgatgacttttcacagta

SEQ ID NO: 12629 - DNA, 102 bp, Homo sapiens
aagcctattacctggcatgtggattttgtcgctggacgtctagagatgtgggcatggcagacaaatctgtaggatcttacacatttgttccatggcttctca

SEQ ID NO: 12630 - DNA, 100 bp, Homo sapiens
gcaaaggagaaaagagaaatggagcaaaaacattccaccattcaacaaaagattccctataaggagcccctgctggtgcaccagaactaccgggggccat

SEQ ID NO: 12631 - DNA, 95 bp, Homo sapiens
gatgtgccgtgtggaggaagagattgcagtgggggctgccagtgctaccctgagaaaggtggacgtttctcaaaagtctatggccctgtgttcac

SEQ ID NO: 12632 - DNA, 82 bp, Homo sapiens
tgccgctcctaagcctgcacagccgcggcggcagcagcagtgagagttatcaggaactgttgccgttattacatcagatggg

SEQ ID NO: 12633 - DNA, 101 bp, Homo sapiens
tggaactgaaaagatctcaaaatctggacttgaaaagtttcggagcaacatcccctgtcacctggttgatatctcttgcggattaccctgcagtgccacgc

SEQ ID NO: 12634 - DNA, 83 bp, Homo sapiens
caccaggccatcttttctgttgccctcaccaaataagatagaagatgctcaaggaaatactgattacctaggaacagtacgat

SEQ ID NO: 12635 - DNA, 98 bp, Homo sapiens
gctctcgtccctgcttgccgggaaggtgcagccgtcagaccaagttggcaaagtcatctacaagcagttcaaacagggtgattctgggggtccacttg

SEQ ID NO: 12636 - DNA, 51 bp, Homo sapiens
ctcccgcgccgcacggtggacgagaggtgttatgaacataaacagtataga

SEQ ID NO: 12637 - DNA, 100 bp, Homo sapiens
tacagccagtcttctatgtttccacatcggtcagaaaaagatctgtatgcaggagctattcttgaagtttgtggatgaaaattgggaaggttccctcaag

SEQ ID NO: 12638 - DNA, 74 bp, Homo sapiens
agccgagtcactactgcctgcctgcctgcctgctacggtcagccctgacaaaggtcagctagccccttgaggac

SEQ ID NO: 12639 - DNA, 95 bp, Homo sapiens
ctcacgtgcccatcagtgacagcaagtccattcagaaaccattgacttcctgaacgacaacattcgaagaggaattgagaactactatgatgatc

SEQ ID NO: 12640 - DNA, 85 bp, Homo sapiens
cttcacggagctctggagaaacatgaagttcgggactatcttctgggtgttgaaagcagcaggggcctagaagacattaaaccga

SEQ ID NO: 12641 - DNA, 97 bp, Homo sapiens
cgcagtggtcgcttcttctccttgcaagtcatttcccttatttaaccgatgtgtccctcaaacacctgagtgctactccctatttgcatctgttttg

SEQ ID NO: 12642 - DNA, 101 bp, Homo sapiens
agaatttcaagaacaaaggccgcgacttggaggaaaaccagtagattcccagacatcgcgaagtgaatctgaaattgtgccaaaagttgctaaaatgactg

SEQ ID NO: 12643 - DNA, 100 bp, Homo sapiens
aaagaatttccttaagagctggactggtaactctcaggagccttctccgcagttggcttcctcggtagcttccacacggagcatgcccgagagcctggac

SEQ ID NO: 12644 - DNA, 90 bp, Homo sapiens
ctttgactgtgaggaccgaactgatgaagccaactgccgaagctccgtgtgcccagctggggcacagccccagctgatgccccagagggg

SEQ ID NO: 12645 - DNA, 80 bp, Homo sapiens
aggaccaaaattgtggaaaagtcactctggacttgaaaatactggaaatctgtccggatccaaattattttgcaagccag

SEQ ID NO: 12646 - DNA, 83 bp, Homo sapiens
tgattataggcgtgatgatagagatcctacagatgtttatacttggggcgataatacaaattttaccctgggtcatggaagcc

SEQ ID NO: 12647 - DNA, 80 bp, Homo sapiens
gctttgaagtggatcctaccagcctgaagcaggacattctaaatgaaaagactgaattggaagcaacacttaaggaagcg

SEQ ID NO: 12648 - DNA, 95 bp, Homo sapiens
ctcaagatggcggacaaaacgccaggcggatctcagaaggccagttcaaaggccatttcataattctgaatcatgtctgataacggagaactgga

SEQ ID NO: 12649 - DNA, 76 bp, Homo sapiens
gccagggtccctgaagagggaagacacgcggaaacagatgcaaatagtacggtattccgaacagacactaaaaata

SEQ ID NO: 12650 - DNA, 75 bp, Homo sapiens
gttgtcagaatgctcttaatgagaaaatatttacaccagcagctccagttcataccaataaagaagatcctgcta

SEQ ID NO: 12651 - DNA, 97 bp, Homo sapiens
attgaggcggttgctcagatcacggtgaaatccatcgcgctcctcaaggaccaggagccgggggccttcatcatccgcgacagtcactccttccgag

SEQ ID NO: 12652 - DNA, 75 bp, Homo sapiens
gcagaaggtctctggagacatcttcagcaggctcctggcgacctccctgctgcagggggccctcccagcggggcc

SEQ ID NO: 12653 - DNA, 100 bp, Homo sapiens
cactccaattgctggccgcttcactcctggaaccttcactaaccagatccaggctttcttctagtcaagatgagtgataaaccagacttgtcggaagtgg

SEQ ID NO: 12654 - DNA, 100 bp, Homo sapiens
gtcgagtttcaaaaggaggtggcgcaggttcgcaagcgcataacccaggcaggtaaaaatcaaggtgaccccaagaaaatggctcctcctccaaaggagg

SEQ ID NO: 12655 - DNA, 83 bp, Homo sapiens
ggcccactcgcttttgcccgtggacgatgcaatcaatgggctaagcgaggagcagaggcaggactgactgctgtttcagtcca

SEQ ID NO: 12656 - DNA, 90 bp, Homo sapiens
tgaggcttatgctcttatggcccatgccatggaggaagtcaagaaatttctagtaccggatatgggccctcacattttccaaacctgtcc

SEQ ID NO: 12657 - DNA, 83 bp, Homo sapiens
caggtgagccctggctgcgcgcgcggcccctcctccccggcgcctcccagttgttgacctcctgtactggagagacattaaga

SEQ ID NO: 12658 - DNA, 100 bp, Homo sapiens
tttgccgaagattaggaagaatccactgatagaaatcatttccatcaataccgggtatatgactgatgggatgttacttcgtgaagctatgaatgatccc

SEQ ID NO: 12659 - DNA, 80 bp, Homo sapiens
gctggagcaagaagaggacctgtgcagggcagagcaggaggccccccgagcatgcttttcacttccactgcatctctcgc

SEQ ID NO: 12660 - DNA, 100 bp, Homo sapiens
tacaacgaaggtgaagccacggaagataaggttagcactctacgtatatgaatatctgctccatgtaggagctcagaaatcagctcaaacatttttatca

SEQ ID NO: 12661 - DNA, 100 bp, Homo sapiens
aactttcacggacaacctcagaggacaacgaagtgttcggcgaggattaaatccaccacacagggtgaaatctatctccatgacaacattcacacaacag

SEQ ID NO: 12662 - DNA, 98 bp, Homo sapiens
cttgtgctcattggccattcaataggcagctatttcacacttcagatgctgaagcgagtccctgagctcccgggcaagttaaagtcttcagagccctg

SEQ ID NO: 12663 - DNA, 50 bp, Homo sapiens
aatagcagccaggaaccaagaaaacttgagaccccactggcttttgccag

SEQ ID NO: 12664 - DNA, 100 bp, Homo sapiens
acgggagtattatgaaaagatctggaatcccccaaagaaggtaaagggagcaagccttccccactgtctgtgaagaacaccaagaggaggctggagggcg

SEQ ID NO: 12665 - DNA, 100 bp, Homo sapiens
atggagttgagctgcagcgaagcacctctttactcctcctgcatatgcccaagaggattgggagtggaatggacaccagcagaagcaccacagttattcc

SEQ ID NO: 12666 - DNA, 100 bp, Homo sapiens
cttcattcagatgtggtggaatatgccaaggaaaaactggagagcttcatcaaaaatagtgatagctttgataagactcagaattcatgattgaagaaat

SEQ ID NO: 12667 - DNA, 51 bp, Homo sapiens
aggatccaagcaatgccatgccggtagcagaaggtcaagaaatttgtgtga

SEQ ID NO: 12668 - DNA, 100 bp, Homo sapiens
cgcagagtgtatcatctcctgaagcaacatctggttctacaggtaaatattgcagattttcaagagaatcagtgggtgacttgtttccaggagtctgctg

SEQ ID NO: 12669 - DNA, 88 bp, Homo sapiens
agttggaagtgtctcttagcagcgcgcggagaagaacggggagccagtttgtttcgacgccggaccgcgtaagagacgatgatgttgg

SEQ ID NO: 12670 - DNA, 89 bp, Homo sapiens
attcgcagtggtcgcttcttctccttgggggtccctcccttctctctgagcccatgaagacttgcttcactgggggcaatgtgacgctt

SEQ ID NO: 12671 - DNA, 75 bp, Homo sapiens
gattcagaaggagcaggattaccaaaggggtttttaatgaccacaacaagcaagcatgcagcttactgcttgaaa

SEQ ID NO: 12672 - DNA, 82 bp, Homo sapiens
agatccttaagaaggggcaggctgtagactacgagggctccagaacccaggaaggctggaggacacacctaaacatgtggaa

SEQ ID NO: 12673 - DNA, 107 bp, Homo sapiens
ggagtaattacctggaatccccctcaaagatcatttcataattttaccctctgttatataaaagagacaggtttctaagcatgaattgaggaacagaagaagcagag

SEQ ID NO: 12674 - DNA, 60 bp, Homo sapiens
gaggggcgagcaggagcgattccgtcgccaaacaggtgtcagcagttgagtctttggagg

SEQ ID NO: 12675 - DNA, 100 bp, Homo sapiens
ctggccgagagccgcggctccgtgtttctggaaagtgacagcagacaccaatgggaatcccaatggggaagtcgatgctggtgcttctcaccttcttggc

SEQ ID NO: 12676 - DNA, 96 bp, Homo sapiens
gcggccaatggcacggaggcctgcgtatgaaggatttgggggcagagcacttggcaggtcatgaaggggtccaacttctcgggttgttgaacgtct

SEQ ID NO: 12677 - DNA, 74 bp, Homo sapiens
ttccattagctgctgtcatcaagccctttgccaccattccttcaaatgaggatccaggtggacccagaaatgga

SEQ ID NO: 12678 - DNA, 75 bp, Homo sapiens
agaaaggattcgttacagccagagattggatggagggtacagagtctgcctacatcagctcctttgtctgtttct

SEQ ID NO: 12679 - DNA, 75 bp, Homo sapiens
gtcgacatgagtgatgtggaggaaaacaacttcgagggcagagtgattgtaagtcaggagactttccttcggttt

SEQ ID NO: 12680 - DNA, 90 bp, Homo sapiens
ctcctgggctcaagtgatcctcctgcctcagcctcccgagtacctgagattagcccagggtttggacagaggagccaaaggccaaatttc

SEQ ID NO: 12681 - DNA, 87 bp, Homo sapiens
taggccacaatcttcaatgagtaaacatattccttgcctccggagccagcgtggtggccatagacaacaagatcgaacaggccatgg

SEQ ID NO: 12682 - DNA, 78 bp, Homo sapiens
ctgtcaacgaaacctggcacggctcttgcttccgggaggcaagatgacttctctgccccaagcttggaacagctaaag

SEQ ID NO: 12683 - DNA, 100 bp, Homo sapiens
ccaatgtcaacattgcccagcaagtggatcttagtaagagccctaagaccatgaaaaagctgctgcccaagcgcaaacctgaacggaagccttcagatga

SEQ ID NO: 12684 - DNA, 142 bp, Homo sapiens
atttcgaagtcggggaggagtttcatgaagagcccaaaacctattacgaactcaaaagtcaaccgctgaagagcaggtgctggagaatctggtaaaagcaccattgtgaagcagatgaggatcctgcatgttaatgggttta

SEQ ID NO: 12685 - DNA, 97 bp, Homo sapiens
ggagtatacaccatgagcaaagctcaccctcccgagttgaaaaaatacgtcggtaacctttccagagatgtgacagaagctctaattctgcaactct

SEQ ID NO: 12686 - DNA, 94 bp, Homo sapiens
ctctggaactgaaccagaggttcacaaaacaagtgtagtaggctggatccagacccctttgtgcggcacaccttctggaccttggccttcgggg

SEQ ID NO: 12687 - DNA, 75 bp, Homo sapiens
ggtgccctcaatgagcacatgaccagcttagcttctgtcctaaagatgcctgaggaagtgcaccatggagaggag

SEQ ID NO: 12688 - DNA, 75 bp, Homo sapiens
gagaggagggaactgcggagcgggcctatatgaacccaatagcaatggcgagatcaaggggtccaatccagtctt

SEQ ID NO: 12689 - DNA, 116 bp, Homo sapiens
ccatcctgccgtccttctccactttcgccagcccgtgccgcgagcgcggcctgcaggagagaggtggagaagagcgagtacttgagaaagaagaggaagaagatgatgatgaagat

SEQ ID NO: 12690 - DNA, 100 bp, Homo sapiens
tcattaaggacggctctctgctcattggggcgttgaggagtcaaaatgcagatcttcgtgaaaacccttaccggcaagaccatcacccttgaggtggagc

SEQ ID NO: 12691 - DNA, 95 bp, Homo sapiens
cccagcgtggtggggcagcagaagctccagagcccagacttgcagcctgagaagccaggccccggcagcaaggaccccaaggccgacagcgtgcg

SEQ ID NO: 12692 - DNA, 98 bp, Homo sapiens
gctcgctcaagatggcggcgcagccaccccgcgggatacgcctcagcgcgcttcttccagaccagctggtcttgcttctggagcatctcttggagcag

SEQ ID NO: 12693 - DNA, 98 bp, Homo sapiens
cttgttattggaggaggagcaacaggaagtggctgtgcgctagatgctgtcaccagaggtttaaacttacacgaatcgctttctggaggaggagggga

SEQ ID NO: 12694 - DNA, 106 bp, Homo sapiens
gctactcgcgcttttcgccgtcgccgctctccatcaaacaattcctggacttcgggcagctttggaagaagtagaaggtgatgtggcagaattggaactaaaactt

SEQ ID NO: 12695 - DNA, 50 bp, Homo sapiens
gtcagagctgcacaaagggaaaggaatagctgaaacctttggacttcaag

SEQ ID NO: 12696 - DNA, 91 bp, Homo sapiens
ggaacgaggcaaggagctaaagcagcgtgcgttcagccctggggtaaggggcctggataccaagaagtgactgctcatctaatccataaag

SEQ ID NO: 12697 - DNA, 100 bp, Homo sapiens
tttccttcccaacgatgaatctctgaacatcatcataaatacaaagggtggaggatatgaaagtgaaagtgcttacccaaatgcagaacttgtgttcttg

SEQ ID NO: 12698 - DNA, 74 bp, Homo sapiens
cttaagagatgcccccttgaccttgggcttcccagcctccacaactattgagaggatccagaatccagatctct

SEQ ID NO: 12699 - DNA, 90 bp, Homo sapiens
tccgtgctggctgaccagatgaggctcaacaaacagtttgctctgggtcctgagtttgtgcgcaaacatatcttcaacaagcatgcagag

SEQ ID NO: 12700 - DNA, 75 bp, Homo sapiens
ggaagaccgtgatgggagctgcagcacagtcgggggtgtaggttatgggggcatcaagcatgatggaaccatgtg

SEQ ID NO: 12701 - DNA, 101 bp, Homo sapiens
aagaggcctggagtatgaagagacatgagatcatggtggccaaacccacagccaagtatcttcaagaccttctcatggagagtgtgaatttttcccccgcc

SEQ ID NO: 12702 - DNA, 90 bp, Homo sapiens
ggatctgcagaagacgcagggctcaaggggtcaccagtcgttggcacaccaagaagctgccccgcaagacccaccgaggcctgcgcaagg

SEQ ID NO: 12703 - DNA, 100 bp, Homo sapiens
cagaaccggtacctggatggcatggctttacaggaagtatggtgctggcatctgcttggcttctagagagtcttacaatcgtggaggaaggtgaatggag

SEQ ID NO: 12704 - DNA, 74 bp, Homo sapiens
gcagagttagctaaagaactccctcaagtttcatttgtgaagggttctcatgtatcagccatcttctgtaaggg

SEQ ID NO: 12705 - DNA, 80 bp, Homo sapiens
cgccctcctgctgcctccccggagctcccgggccagtagatgcaggacagctggagcacacattgatgaatcattgttcc

SEQ ID NO: 12706 - DNA, 50 bp, Homo sapiens
ggggatgattacagttcttcctaaaaaagtattcaagtcaaacaacgttg

SEQ ID NO: 12707 - DNA, 97 bp, Homo sapiens
agccgcccgcttcaaccccaggggaccagaggaactcagccctgattgcgttggaaatggaggatgaagatacaattgatgtgttccaacagcagac

SEQ ID NO: 12708 - DNA, 80 bp, Homo sapiens
tcaaaagaaaattcactgagtaatctttttaccaaggaatggcttcttgtgggaaccaaacaaggacatcttcttctcta

SEQ ID NO: 12709 - DNA, 100 bp, Homo sapiens
aggcggtggagcgcagagcgggcgagcgcggtaaagcttcagcgactgaaggagtgtggactttttgaatttcaagaacagtaaagttggaacacagcag

SEQ ID NO: 12710 - DNA, 50 bp, Homo sapiens
acgtgcggtgggaccacgagagctgccggtggtggtgtgcacattgagcc

SEQ ID NO: 12711 - DNA, 101 bp, Homo sapiens
cctcctggggaacccgttcagcacaccagtggggcagtgcctcggctgaaaatgatgagaatggacaagcagaaaacttttccatggacccacaattggag

SEQ ID NO: 12712 - DNA, 83 bp, Homo sapiens
ctggaggcctgggaagccaacgaccacacgcagctgaaggtgatgtggccgccctcaaccgacgcatccagctcgttgaggag

SEQ ID NO: 12713 - DNA, 74 bp, Homo sapiens
gggaggacaggccctcgtccgcaggattttttatcaagcagaaatgcatcgaacaacgagaatcaagatcactg

SEQ ID NO: 12714 - DNA, 98 bp, Homo sapiens
aggaaccagactgggggcgagctgagcacctgtagtcaatcacacgcaggaattgcattttgtgaaaaaagaacaagaattttctgcaaggatcatat

SEQ ID NO: 12715 - DNA, 75 bp, Homo sapiens
gtccaagcggcttttcttctggatgcagagccgagtccgtgtgaggcgggcaagcatctctgaacccagtgatac

SEQ ID NO: 12716 - DNA, 74 bp, Homo sapiens
gcctactcgcccgccaccctgcgctgccgccgctctgaggagttaaaggctcaactcagtttccttataaccct

SEQ ID NO: 12717 - DNA, 75 bp, Homo sapiens
aggattccaagtaactcttatttggttcagccgtctgtatatctccccagatacctgaaactgaccacctgagta

SEQ ID NO: 12718 - DNA, 50 bp, Homo sapiens
gccagcgcccatccccaataacaatccaacttccaatcagaagactatac

SEQ ID NO: 12719 - DNA, 100 bp, Homo sapiens
cttccaagcagtttacactgccggggtggtactaccaaagcccgttggcacctgcagagtaaaggtgggattctatccaaagcttgtgattatatccagg

SEQ ID NO: 12720 - DNA, 101 bp, Homo sapiens
ccggccatctcgctgcccgacgatgtccgcaggcgactggacttgaacactaagtcttcaatagctgagattctccatcttaatctacttggaggcaagag

SEQ ID NO: 12721 - DNA, 75 bp, Homo sapiens
ctgcctttcttctgtgggctgtgattttcagaggggaatgctaagagattgagaggatccagaatccagatctct

SEQ ID NO: 12722 - DNA, 100 bp, Homo sapiens
cccggagcaagcggagctcccccaagagccggaaaggtacgcatagctgctaaattcatcactcatgcacccccaggggaatttaatgaagtattcaatg

SEQ ID NO: 12723 - DNA, 74 bp, Homo sapiens
atgggattagtgagaaatgaacttcaactggttgatcttccaacaggtatagcctgtcgtacatcccatatgca

SEQ ID NO: 12724 - DNA, 75 bp, Homo sapiens
cagtgtgtgccggagaacacgggctacacgtatgcgctcaggatagaatcacttgaattcctggatgaaatggag

SEQ ID NO: 12725 - DNA, 80 bp, Homo sapiens
tcgagatcgacaccttcatcaagtgatgattcctgcgtattccaagaaccgggcctatgccatcttcttcatagtcttca

SEQ ID NO: 12726 - DNA, 75 bp, Homo sapiens
atttgttaaggattccaagtaactcttatttgcaaaagactgttgaagtagagagcattttgcccagctcactcg

SEQ ID NO: 12727 - DNA, 83 bp, Homo sapiens
ctttggtccccagcgcagtgaagtggtgagcctttttgtcactggaattctcaagaaatttgaggaagaagatttggatgaca

SEQ ID NO: 12728 - DNA, 102 bp, Homo sapiens
cccgggggccgggacagccaagcacccgccgccggcagcttcgctggaagggactgccaaaaagagcaagatcctgtccaaggaagaacagaaagtggttgc

SEQ ID NO: 12729 - DNA, 75 bp, Homo sapiens
agaagcacagcaagaacatcacccagcgcggcaacgtcgccaagacctcgaggttgacggatatattcagacgtt

SEQ ID NO: 12730 - DNA, 76 bp, Homo sapiens
agagacacaatgcgggacagcctcagccaggttctccagagatgtggaggtttagccgttggaacagttcttctaa

SEQ ID NO: 12731 - DNA, 98 bp, Homo sapiens
tgaggagcgggcacagggcaaggcggcggacggctgcgtcgcccgaggcgaggaggagcgctggcgctcagagtcaagatctccactgaagttggcat

SEQ ID NO: 12732 - DNA, 98 bp, Homo sapiens
gaagactaacattttgtgaagttgtaaaacagggacgtgtcatcagtggaggtgctcatgaactaccaccagggcctgaagactgagctggaggcgcg

SEQ ID NO: 12733 - DNA, 101 bp, Homo sapiens
gtcgggaacagccatgcaaaggcaggggaggaagccacctcgaggtttttcgttggaatatacgttgcacatttatggcgattctgagtgtgagggcagac

SEQ ID NO: 12734 - DNA, 114 bp, Homo sapiens
tctcgcttcctgacgctcctggcgcatctggtggtcgtcatcaccttattctggtcccgggtggtggacatcatgagggtgaacgtggacaaggtcctggagcgagaccagaag

SEQ ID NO: 12735 - DNA, 74 bp, Homo sapiens
acttacgctgcgggaccccgggcactgttgctgctgcgggagttgatcatggccttgccaggttggtgacagta

SEQ ID NO: 12736 - DNA, 83 bp, Homo sapiens
ctctttcaacagatagaaaggcaggagcagcttctggatgaaatacatcgtgagaagagaggagttcatctgttgtctgctct

SEQ ID NO: 12737 - DNA, 100 bp, Homo sapiens
ctacacacccttctcatggcaatcgagttgagtacttggatagacttatacctcaggtcctatctgactcctgtacgggatgaggaagcagagtctttac

SEQ ID NO: 12738 - DNA, 100 bp, Homo sapiens
gcaaatactactgaaagtgcaatatttgagtatcactgcgagaatgcgtaatcctggatctcttgttcgcaaatcgacagcctgaagccctctggaagcc

SEQ ID NO: 12739 - DNA, 83 bp, Homo sapiens
ggatccacctggagctgaggaaccggaccccggcagctatcctgcggaccccacaccctgcccctgctggactcagttggctg

SEQ ID NO: 12740 - DNA, 100 bp, Homo sapiens
cgtgcatggggctgctccccaggacctgagcaggaacctggagttttcaggtcgtttggactgggagactcttgtgcacgaaaatctgcccgggctaatg

SEQ ID NO: 12741 - DNA, 100 bp, Homo sapiens
ctggccttcgcgcaggagatctcgattgtttctctgcaggtggatattgttcccagccagggggagatcagcgttggagagtccaaattcttcttatgcc

SEQ ID NO: 12742 - DNA, 75 bp, Homo sapiens
tatgccctgttggttccaatgctgggattggctgcttttcatcctcctggccaacttcttggcccagacagaggc

SEQ ID NO: 12743 - DNA, 74 bp, Homo sapiens
gaggaatctggattgtcacctttgctgcaaaaaattacgggttcgatacaagaggctgttttcctagcgtggct

SEQ ID NO: 12744 - DNA, 100 bp, Homo sapiens
gcggggtgcgccggcagaggatccagtgttcaccatcctggccccggaagtggacgtgactctggacccagacacggcctaccccagcctgatcctctct

SEQ ID NO: 12745 - DNA, 99 bp, Homo sapiens
ctggacagggccctcctggtcccatcctccggcttcatctaccagcaaatcagccggcaccaggagcagttcatccagatgctgaacgagccccctggg

SEQ ID NO: 12746 - DNA, 130 bp, Homo sapiens
gagctacacgttcacggtgccccggcgccacctggagagaggccgcgtcctgggcagaggtgaaatgacaatggatgctctgttggctcgattgaaacttctgaatccagatgaccttagagaagaaatc

SEQ ID NO: 12747 - DNA, 82 bp, Homo sapiens
ctcctcttgccacgcatcagtctgaaggaaaagcttttgacatcacctatgtgcgtctcaagttccacaccagccgcccgga

SEQ ID NO: 12748 - DNA, 89 bp, Homo sapiens
tgactgcaccacacaaaacagtcttcaccaggagactaaagtccatcaaaaacatccagaaaattaccaagtctatgaaaatggtagcg

SEQ ID NO: 12749 - DNA, 75 bp, Homo sapiens
ccgagagcgtgaccgagagcgcgaatatcgtcatcgttagaaggtgtggtggacacaggcctattcatcaacatg

SEQ ID NO: 12750 - DNA, 74 bp, Homo sapiens
cgcaccctgcacacccgcccctctcctgtgccaggaacttgtaatagctggcatcgttgagaatgaatggaaaa

SEQ ID NO: 12751 - DNA, 98 bp, Homo sapiens
tactccttttggccatggtagtaaccaggaagctgaatatggtgggcatgatcagatagatttgtatgacgatgtcatatctccatctgcaaataatg

SEQ ID NO: 12752 - DNA, 74 bp, Homo sapiens
tgtgggcagagaagttgcaaaccgagtttccaaggttcaacagagtttggaaaagatttctaaactggagcagg

SEQ ID NO: 12753 - DNA, 100 bp, Homo sapiens
acgccccccaacccctcacctggccagcgggacagcaggttcaacttcccagggctatactccttatgtttctcatgtgggattgcagcaacacacaggc

SEQ ID NO: 12754 - DNA, 83 bp, Homo sapiens
agtttcctggcatcaactacccagtcctgaccccaaatttgaaaggcttcgaggcagcgcaaacggggattcagcgtccgatc

SEQ ID NO: 12755 - DNA, 50 bp, Homo sapiens
ccgcaccccaggatggatcccccagagggtctgccaatttccatgtatgg

SEQ ID NO: 12756 - DNA, 100 bp, Homo sapiens
gtgtgctgctgctgcgggtgcgagtgcttggaggagcgcgccctgcctgagaaggagcccctcgtcaggttggtcaaagaaaaagtgatgtatgaaaaag

SEQ ID NO: 12757 - DNA, 85 bp, Homo sapiens
catgctggccaagaagatcatcattaaggacggaggcacgggaaccctactctggaaactgtcagtcccagggcactggggaggg

SEQ ID NO: 12758 - DNA, 78 bp, Homo sapiens
tggtcaccagcttttcggaacagcagagacacagagggcagtcatgaggtggatgaaaatactaggaaaagtttattt

SEQ ID NO: 12759 - DNA, 98 bp, Homo sapiens
cagcgagccaacatgagccaagtgctgttccaccaactagtcccgttgcaggtgaaatgcaaagactgtgaggagagttggttgaatctggcgatgtg

SEQ ID NO: 12760 - DNA, 101 bp, Homo sapiens
ctgacttggcaggagatcatgtccatcaccgagctgcaggtgttccatcttaacataagtcaccaacttctaaacctggcactgggcatttgaagaatagg

SEQ ID NO: 12761 - DNA, 82 bp, Homo sapiens
ctgagccgcccctacacccacaggaacaagatcactcaaggtgaaggataatctactaataccagcactttgaatgaaaatt

SEQ ID NO: 12762 - DNA, 85 bp, Homo sapiens
ggaagatggcggctgggttcaagtaacctggatgaggacatcattgcagaagagaacatcgtttcccgaagtgagttcccagaga

SEQ ID NO: 12763 - DNA, 74 bp, Homo sapiens
ggccgtgtctctgcccacgtcgagcgtgcccgagacccgagtttgacaagtatgcgcccaagctggacagcccc

SEQ ID NO: 12764 - DNA, 90 bp, Homo sapiens
aaggcactgctttttcatgacggtccggcctctttggcctacccccgttggctccgctgccccaggtcgatgagtcccctgtcaacgaca

SEQ ID NO: 12765 - DNA, 74 bp, Homo sapiens
ggttgtctgtgtccatggcctggatggagctcgcccgtcagcgaggagtcctggagcgcacagagaagatggtg

SEQ ID NO: 12766 - DNA, 98 bp, Homo sapiens
gttcaatgggccccacctcttactgcgagcagtccgagacatcgaggtgggagaggagtgttatagttttgccgctggactcttccctcccttccccc

SEQ ID NO: 12767 - DNA, 83 bp, Homo sapiens
agccggtgtaaatgttgagcctttttggcctggcttgtttgcaaaggcctcgaaggagctccagcaagcccagacaaccagac

SEQ ID NO: 12768 - DNA, 97 bp, Homo sapiens
ggagagctccctcctagaaaagaggaggaaggaagagacttgagctgttgtgtagcttctcttgttcaagtgatgctggatccctattttaggacaa

SEQ ID NO: 12769 - DNA, 100 bp, Homo sapiens
cggaggagtcagctgtgtgtccagaacgtgccatggagacgcttaacgttccaaaggatggcctcaaaagccaggctgcatttgaagaaatgaggacaaa

SEQ ID NO: 12770 - DNA, 100 bp, Homo sapiens
tgaagaaaactttattgatctcaacgttttaaaggcccagacatatcacttggcttgttttcctgctcagaacaaagtgacttccctgaacacatcttca

SEQ ID NO: 12771 - DNA, 98 bp, Homo sapiens
tgacttgctcccagttatgtgtgacagagcaggatttattcaagatactagccttatcctctatgagactggaacgtgagaaacgagcccgcatcaaa

SEQ ID NO: 12772 - DNA, 100 bp, Homo sapiens
ttagcctcagaacgatatgataaagacgatgaagccccctctgatggctacgtgtgccgcctggccattcaaactgtcaattttaggtccagaagtgtcc

SEQ ID NO: 12773 - DNA, 74 bp, Homo sapiens
ccatgaaatgattgaatctggtgttatcaacttaaaagatgccacctctaaggagcttgaaattgtaattggag

SEQ ID NO: 12774 - DNA, 100 bp, Homo sapiens
tccctccaagaccttgtccatcacaggactcaaatggatgctaaaaagccaaggaaatgtgatttgactcccttcctggttttgaaagcaagaaagaaac

SEQ ID NO: 12775 - DNA, 100 bp, Homo sapiens
agactggacttctcaactgccattctggattccagaagatttaactacgtggtccgggttgccaggatacatccaggcaacaaagactgcggttcctgtt

SEQ ID NO: 12776 - DNA, 50 bp, Homo sapiens
cttcaaggtgacatcaccacctgagaaccagcagaaatccaccaatgtag

SEQ ID NO: 12777 - DNA, 75 bp, Homo sapiens
gcggagcgccccttcgcgtcccctgcaccatgagctggggcaccgagctctggggtctcagcttcttggaagtga

SEQ ID NO: 12778 - DNA, 98 bp, Homo sapiens
gtttccggaagacatcaagattcgagacgcttatcagatgctgaagaaacaaggttcgggaagaataccggaagtgggcctgcctagttgctgggggg

SEQ ID NO: 12779 - DNA, 75 bp, Homo sapiens
aaggtagaacatggaggatcgtcaggctctaaacaaaattctggtacaaacccgtagtgctgatgaaccaatgac

SEQ ID NO: 12780 - DNA, 100 bp, Homo sapiens
gcactaacgcaggatccggctgccgaaggtcctcgccagagatggacagagacgtatgtgcgttggtctcctaagggcacctacctggctacctttcatc

SEQ ID NO: 12781 - DNA, 135 bp, Homo sapiens
ccggtggtaccgagtctaagcactgcggtgaaggagttagtagaaaacagtctggatgctggtgccactaatattgagacgagttgtactgctgtcacaggaaatggacgctggattacaagcatggcagctcag

SEQ ID NO: 12782 - DNA, 99 bp, Homo sapiens
cctagataccggaggaggatcttctgcggattgttggaatctaccggctgttttgctgcagcttctgaagtgttaaagcacttgaaggaacgatttccg

SEQ ID NO: 12783 - DNA, 82 bp, Homo sapiens
ccgatttaaagctgagctgcgaggaaaatggcggcgggagttggaatcgaagcctcttaaaatggcagatgacttggacttc

SEQ ID NO: 12784 - DNA, 100 bp, Homo sapiens
aatgaactgggtgttctctactatcttcaaaataacctggagaagaaaaaatgctgggcatcttggtgcagcacaaagtccggagtggcgtctcgggcat

SEQ ID NO: 12785 - DNA, 105 bp, Homo sapiens
ctcaatttaagcctgatctaacccctagaaacaggtaaaataccatgaagattttgaaaaaacaaaggggagaggctttactcccgtcgtggacgatcctgtgac

SEQ ID NO: 12786 - DNA, 90 bp, Homo sapiens
tgaaggaagaagacgcagaagcaggacgaccctgaaagattcagcctcttcatcctcaaacagcccaccttgggacaccttgactccaag

SEQ ID NO: 12787 - DNA, 96 bp, Homo sapiens
ccgagagcgtgaccgagagcgcgaatatcgtcatcgttagaagggccatgttcaccggcggcatgcgggaggcaagccaggacgtcatcgagctga

SEQ ID NO: 12788 - DNA, 87 bp, Homo sapiens
actcttcaaccaggagctggtgtctggctctgagctcctgcagctcgtcagcccatttctgggaatggcttctgcaaggaaagccag

SEQ ID NO: 12789 - DNA, 80 bp, Homo sapiens
ctctcatctcgctcggctgcgggaaatcgggctgaagcgactgagtccgcgatggaggtctgggataaaagtgaaagtgg

SEQ ID NO: 12790 - DNA, 74 bp, Homo sapiens
cttgatatatataactctctacatttctgaatgtctgaagaaactgcaaaagccgtctttgtggcaattctaca

SEQ ID NO: 12791 - DNA, 74 bp, Homo sapiens
aggaaacaatccttctgtttctttaaaactggaagaaaacatcttcatttgattgtacaccatctcccagcaag

SEQ ID NO: 12792 - DNA, 101 bp, Homo sapiens
taaagacaagctttccatcattggtgaggtgctatctcggagacacatgaaggtggcattttttggcagtgatgatgatgatgattttgatgatgaggaag

SEQ ID NO: 12793 - DNA, 82 bp, Homo sapiens
cgcagaaaccccgttgacaaggcactgctttttcatgacgaacatccagtcatggataaaaatgagctggttcagaaggcca

SEQ ID NO: 12794 - DNA, 82 bp, Homo sapiens
acgtgtactgctccaagtacaacgaagccaccggcgtgtgccccgacggcgacgaccaatggagatcttcgtggatgatgag

SEQ ID NO: 12795 - DNA, 83 bp, Homo sapiens
cttattcagagaaggaaggatcttctcatgcacagaggcaacaaatggcaactttctgacattttgaaagcgaagcagaagcc

SEQ ID NO: 12796 - DNA, 73 bp, Homo sapiens
caaacatagagaattctgggcttccacacaactccagtgctaactcaacaggccctggccaacgtcaacattg

SEQ ID NO: 12797 - DNA, 83 bp, Homo sapiens
tgaaccttcgaccttggacttctcagcctccagaatgccagaagatcagctgccatgttacttgactcacaccaaccctagag

SEQ ID NO: 12798 - DNA, 100 bp, Homo sapiens
catcggccacatccgcccgcagaggaccattctggcttttgtctctggcatcttcttcatactatcgggtgtcctctccctccccgcatacttcagcccc

SEQ ID NO: 12799 - DNA, 75 bp, Homo sapiens
cagcttcccttacctgcattatgataagctcagcatgtcagccagatgaaccatggaaactggagaggaacacag

SEQ ID NO: 12800 - DNA, 100 bp, Homo sapiens
ccacgcgcgcgcgctcgcgcaccacgcgccccgcgcggcccgcccggatcgtggcctctcgagagcaagaaattgtatgctgctatgcatgaacctgatg

SEQ ID NO: 12801 - DNA, 100 bp, Homo sapiens
gatgttcaccatccatgcctacgtgggcttcaccatggacaagctggtgcagaacattgcgcggcagctggagaagaagcaggcgctccctccattccag

SEQ ID NO: 12802 - DNA, 90 bp, Homo sapiens
gctaagttttgaaaaacttgaccgtgcctcaccagatctttggccagaacaatatactagagtaaaaggatggtttcttctggacaatta

SEQ ID NO: 12803 - DNA, 75 bp, Homo sapiens
acttaccccttctcaccgaggaagagcgggagaaaggggccgttgctccagggagaactgcaaatatcttcatcc

SEQ ID NO: 12804 - DNA, 74 bp, Homo sapiens
caagcgggaacacctggctgaagtgacgttatcagtcaaaggtaatagcctgcagctggtgttttgagaagccc

SEQ ID NO: 12805 - DNA, 75 bp, Homo sapiens
cagaaacagaaacgattgtggaaacagccctactgccaataaagggaaaataagagatgctcatcgacgaattat

SEQ ID NO: 12806 - DNA, 99 bp, Homo sapiens
ttccagaagatttaactacgtggtccgggtggttcgagatcagatctctcactgcacagtgaaattgcgccagaccacaggtctcatggagtactgctt

SEQ ID NO: 12807 - DNA, 100 bp, Homo sapiens
gccactccagtcggtgttgagcacggcgagcagtctcaggcctttagtgatgatggtgccgacgccaccgccgagcccatgatcctggaacagtacgtgg

SEQ ID NO: 12808 - DNA, 97 bp, Homo sapiens
ggccctgtctgcaatacacctgcaggaagagctcgatcaggttcaggcagctgacacacaagagttcaggaccaaactgcacaaagtatttcgtgag

SEQ ID NO: 12809 - DNA, 100 bp, Homo sapiens
gctgctgctgctgccccggacccgggcggacgagcacgaacacacgggagtaactattcccagtcagaggcgctatgtgtattattatagctacctgtta

SEQ ID NO: 12810 - DNA, 83 bp, Homo sapiens
gtactttcgaagtctgggaccaagaatacatgctttaccagaaacctatgtgcttcccaagctgtatgtgaagctacattact

SEQ ID NO: 12811 - DNA, 89 bp, Homo sapiens
tggccatcttcggaccccccaacaccctctacgaaggcggctacttcaaggcaacagctgaacagatgcgtctcgctcaagtgatcttt

SEQ ID NO: 12812 - DNA, 75 bp, Homo sapiens
gttgcaaacaaatgtcagatcccaggttgattcacaaaaggctgcaacaaagcaagtcaacaaggcacacaatag

SEQ ID NO: 12813 - DNA, 100 bp, Homo sapiens
cctcattcatgaccgaagagacatttttggcaatgagatgaccctgatgatctgcaatgtaagcggggagaacatgttgcgctggctaactggcagaacc

SEQ ID NO: 12814 - DNA, 116 bp, Homo sapiens
ttggataccaaggacctactctatactctcagtggcttagggtatgttagagcccaccaaggaaccactgaaaccactttctgctgcagaaaaaatagcttccatcggtcagacag

SEQ ID NO: 12815 - DNA, 83 bp, Homo sapiens
tggacctgattgggtaactgtgattcccaggagaataaaaggttggtgaaaaccctgtgtccttggagaaagctggttcccgt

SEQ ID NO: 12816 - DNA, 98 bp, Homo sapiens
tggaagacttgaacacttccttctctccacaccatgttaccatatgtgcctcttccaggcatggaagctacatataacaccagcggcagtcagacgag

SEQ ID NO: 12817 - DNA, 98 bp, Homo sapiens
ataaacagtcactactaggaaaactcaaatctttggcaaccaagagttcattgtcgaaatgctggacctgtagctgtagctgagaagagcattaccca

SEQ ID NO: 12818 - DNA, 83 bp, Homo sapiens
cttggtttcgggatctcggtgctgcagacggcgagacctcctgcacagatgagcgggatcgtgtgcagaagaaaaccttcacc

SEQ ID NO: 12819 - DNA, 96 bp, Homo sapiens
cctggttatttcagtgaacgtggaagtggatcaaggggaagatggtcagtaggacagaaggtaacattgatgactcgctcattggtggaaatgcct

SEQ ID NO: 12820 - DNA, 75 bp, Homo sapiens
gaacatatcactcttgcttattctgagcatgcaatgatgctacctgttctgacccatcatatccgctaccaccaa

SEQ ID NO: 12821 - DNA, 100 bp, Homo sapiens
tgctgtccctggctgactgccatcttccgtctgcaaacattactactggatggaaatccattccgagttcctcgagcagccatattaatgaaaggaacag

SEQ ID NO: 12822 - DNA, 83 bp, Homo sapiens
gcgctggaacagttgcagggtcacagaaacatcgagagcctccttttcacctgaccagaagaggctggggtgagtttcccgtc

SEQ ID NO: 12823 - DNA, 82 bp, Homo sapiens
caccggcagcagcagcaccaccggacgaatgaagaagcagtacgacgtctcatctgggaaaagaatctaaagtttgtgatgc

SEQ ID NO: 12824 - DNA, 96 bp, Homo sapiens
gaagctttagagcgcttggaacagagcaaggaattgaggaagctcagataggaaaacgaggatacttaacacccaccagtgcccgcgaacaccttt

SEQ ID NO: 12825 - DNA, 100 bp, Homo sapiens
aacagaaattatatttgttttaaaagcagtcagtactcttattgattcacttaagaaaactcagcctgagaatgctcttgaatgtcgtctctcaactagc

SEQ ID NO: 12826 - DNA, 90 bp, Homo sapiens
gaagaacccatcgggcagctacacatcttgaaagagaagctcttcctgtgaggctaaactgctcttttcagatggagaaaaagtaatacc

SEQ ID NO: 12827 - DNA, 75 bp, Homo sapiens
ctaagtaacgatctggatgcccagggcttccgagtggacctgccaatcaagtcggcccgctaccgtggccagtac

SEQ ID NO: 12828 - DNA, 98 bp, Homo sapiens
tcaccatcatcgatgcccccggccaccgcgacttcatcaagaacatgatcacgggtacatcccagaccacagcaccgggaagtccagtcagcggcaga

SEQ ID NO: 12829 - DNA, 75 bp, Homo sapiens
gtcttggttaacaacattctacagaatgctcaggagaaagtggatgaggaggggctgaagaagctgatgggcagc

SEQ ID NO: 12830 - DNA, 90 bp, Homo sapiens
cttgattatgatagttcagatgacagtgattttaaagttggagatgcctcaggaaatgaagtgtctgatgaagagtgcttgaagagagtg

SEQ ID NO: 12831 - DNA, 100 bp, Homo sapiens
cggcgccttgcggagggaccccaattattcagctgattgaaggcaaagcctctgcttatgtatttgcaagtcctggttgtaagaagtgggatacttgtgc

SEQ ID NO: 12832 - DNA, 50 bp, Homo sapiens
caggcgttggttcccctctttgacctggagaagtgccagaaagcccggaa

SEQ ID NO: 12833 - DNA, 75 bp, Homo sapiens
atttatcaccttctgtggaaaggaagctgcacaggaagccgtgaaactggttcctaaagagaaagatgaaatggt

SEQ ID NO: 12834 - DNA, 89 bp, Homo sapiens
ggaaggagaactaaatgggagaagaggaatgttccctgacaatttcgttaaggcaacagcattattgagaaaagcccttacagaagagt

SEQ ID NO: 12835 - DNA, 50 bp, Homo sapiens
actccctggagaagcagatggaaaaggtcttgggcgtctttggtactggc

SEQ ID NO: 12836 - DNA, 75 bp, Homo sapiens
ctcgagcttccctcgtggccgacggaacaatgaagggccctcatctttgtgtcccatggagccggagagcacagt

SEQ ID NO: 12837 - DNA, 74 bp, Homo sapiens
tgttcagtggaagcccctgcttggatgcctgtccaccactgtactgtactttaattatcggactaccaggttcc

SEQ ID NO: 12838 - DNA, 82 bp, Homo sapiens
atgaaatgcctgactccagaaaagcccagtttactgtcgtggggccagctaatcccatcctggccatggtgggagaaaacac

SEQ ID NO: 12839 - DNA, 105 bp, Homo sapiens
aggacaccagcaagctgttcaatgaggaggcactgcaacatggtgctggagaacgtgaaggagatgtggactgaggtacccaagagtggcaagggcaagaagaag

SEQ ID NO: 12840 - DNA, 82 bp, Homo sapiens
cggcgccatcaccgagcgcttgatgtgcgcggagagcaatcgccgggacagctgcaaggaatgtgggtgccggcaggacagg

SEQ ID NO: 12841 - DNA, 98 bp, Homo sapiens
tggttcctgcatgaagacagtggctggcggtgcctggacgtacaagatctgcaatcagaactattgaacttctccattcagaccgccactcacaccta

SEQ ID NO: 12842 - DNA, 108 bp, Homo sapiens
cggagcggccggggcctggggctgcctgccgggcggccgggcgcggcgagcccaggctttggccaaagagttgcaaaatgatgtccatgtggtaaggcgacaaataag

SEQ ID NO: 12843 - DNA, 100 bp, Homo sapiens
ctggagacggcctgggtgctggcgaagcggaggccggaggagttctgtgctgagccgaagttcatctgtgaagacatgagccgcacagacgtgtgtcagg

SEQ ID NO: 12844 - DNA, 98 bp, Homo sapiens
gccgggatcaaagtgtaccagtcggcagcatggtgcccagcgggcctccgcggaaggtggaggtggagccactgaactccactgctgtgcatgtctac

SEQ ID NO: 12845 - DNA, 100 bp, Homo sapiens
ccgcggcgtggacctcgaccagctgctggacatgtcctagtccatcttgagtggcctcttcccacccagtggtggctctgccttcatcctgggccacgac

SEQ ID NO: 12846 - DNA, 82 bp, Homo sapiens
cgggcgggccgcgggagccgcacgcggcgatatggaagaggagggcaagaagggcaagaagctgtttgcagacaaggtccca

SEQ ID NO: 12847 - DNA, 100 bp, Homo sapiens
cttgtggtgcggcctcaccatacaggaacagggcagacgttagcgtgagtgatcactctcaatcccggatcttggatgaggtggaaaaaagacgaggcat

SEQ ID NO: 12848 - DNA, 101 bp, Homo sapiens
cttggaatgatcatcaaacagctatggtgatgattagagacatactaatgtacatgcacccttacccttctgaagaacagaaaaagcagttggcacaagac

SEQ ID NO: 12849 - DNA, 75 bp, Homo sapiens
ggacaccgcagtatgaggcagaggcttgggcactgtttaaaggaaagttccgagaaggcatcgacaagccggacc

SEQ ID NO: 12850 - DNA, 101 bp, Homo sapiens
ctggaccactgtgggaacctcatgagcatgcacaacgtcaagggctgaaaaactgggtggtagctgaagacgtggtgtttaaacctgtggctgccccctgg

SEQ ID NO: 12851 - DNA, 76 bp, Homo sapiens
aggtgaaatttcagacatacacaccaaattgttgagagaaatggtgttcacactggccctgaatcaagggaacacc

SEQ ID NO: 12852 - DNA, 97 bp, Homo sapiens
ggatgtgaagtagatgataaagatgatgatatccttctcaaccttgtgggatgtgaaaactctgttactgaagttttcggctttgtgagaaacctta

SEQ ID NO: 12853 - DNA, 100 bp, Homo sapiens
cccagttctggcagattctggaaactgtacattgaagcagagatttctggttcagtaagggtgagagccaggctccagactatagtgaattttccgagga

SEQ ID NO: 12854 - DNA, 75 bp, Homo sapiens
gaatacacctctggctcaagtgtttgtccctttggagtctgttaagcccaagctccagcattgactttctagcaa

SEQ ID NO: 12855 - DNA, 101 bp, Homo sapiens
cgcccccgcaggcgcccgcggcagcgaacggtcaccatggagtaacaagtatgaccctcccttggaggatggggccatgccgtcagctcggctgagaaagc

SEQ ID NO: 12856 - DNA, 75 bp, Homo sapiens
gcacctcgtaggaggagaaagagaccccatggaggagcagcccccacaacatcgatccaagagggggggctcagt

SEQ ID NO: 12857 - DNA, 100 bp, Homo sapiens
atttgtctgtttgatatcaccaaactggaggatgcctatgtattccctggggatggcgcatcacacaccaaaggagcagcagccaagctggacagatgac

SEQ ID NO: 12858 - DNA, 96 bp, Homo sapiens
ccaggactcagaggccgccatcaaccgccagatcaacctggagctctacgcctcctacgtttacctgtccatgggctgcgagacaaccatccgtgt

SEQ ID NO: 12859 - DNA, 95 bp, Homo sapiens
cttatatgatgcaagatgtggcagaagaacaagaagttgagaccgagaatgtggaaacagaatacaaatcatattcccctgaagccctctggaga

SEQ ID NO: 12860 - DNA, 74 bp, Homo sapiens
gtggccaccgtcaaggccaacatcacgcccttcggcgccgaccagttgcagagtgggcaggatcttaagacccg

SEQ ID NO: 12861 - DNA, 90 bp, Homo sapiens
taaatatatctatggagcacaggtggaaccgtcccaaaatgtcccttgctcagaagaaggatcgggtagctcaaaagaaggcaagcttcc

SEQ ID NO: 12862 - DNA, 75 bp, Homo sapiens
ctcagctcgtggtgggggcttgctggcaagcatttgaagacatgctggagaacccactgaacagcacccagtgga

SEQ ID NO: 12863 - DNA, 75 bp, Homo sapiens
caatttatcattgaataagtgttttaagaaagtggacaaagagaggagtcaggagtcattgcagttttcagtaga

SEQ ID NO: 12864 - DNA, 75 bp, Homo sapiens
ccgagcggcaccaacagcggcgcgggcaagaagcgctttgaagtgaaaaaggtctggagcccggcactgtggtca

SEQ ID NO: 12865 - DNA, 75 bp, Homo sapiens
tggtaacaattttggagtggctgtccaggatgagagccactcagagtgggtgtcttgtgtccgcttctcgcccaa

SEQ ID NO: 12866 - DNA, 94 bp, Homo sapiens
ttttcatgagtgttcctgtggtctctgcacctcctttctgagcatattaatgaaaagtgccataaactgaaaaaccaaacatgagggtagcagg

SEQ ID NO: 12867 - DNA, 153 bp, Homo sapiens
atgtggaaacaccaaggtgttgcgagccgtccacagccttctctcgcgcctgatgagcattttcccaacagagccgaggactgctgagatgtcctctattcttgaagagcgtattcttggagctgatacctctgttgatcttgaagaaactgg

SEQ ID NO: 12868 - DNA, 104 bp, Homo sapiens
gttggagcgcggaaatctggaaccgggatggcgacgtctacactgagtcggaggcgaaggttttaaaatcaaagatgggaaaatcggagaaaattgcccttccc

SEQ ID NO: 12869 - DNA, 87 bp, Homo sapiens
gttggggatccttccgcacactgaagagtacgtcttcgggtctacccctaatcacgtataatttggcttcctgagattctgccttag

SEQ ID NO: 12870 - DNA, 100 bp, Homo sapiens
ggtttagcggcagcctcttcggctgggtctcttctgcgtcagtcgccccagccaaggcacacattttatgctgggccccgtctgtctgcctcggcctcca

SEQ ID NO: 12871 - DNA, 99 bp, Homo sapiens
aaaaaatttattaaaggaagcacacctaagggagaagagaagtttacctttattgagaaatgtaacaaccctcgttctgtcacattattgatcaaagga

SEQ ID NO: 12872 - DNA, 80 bp, Homo sapiens
gcacggagcgtcccttccatcaggagagatgaaggatttgggggcagagcacttggcaggtcatgaaggggtccaacttc

SEQ ID NO: 12873 - DNA, 88 bp, Homo sapiens
gttgagggagaaaggcgggcccgggaacaggacttgaaagaggagattgatattcgactctccagggttcaggatatcaagtatgagc

SEQ ID NO: 12874 - DNA, 90 bp, Homo sapiens
ggcggtgatgcggctgtgaagccctagtcgattttaggtgatgggcaagtcagaaagtcagatggatataactgatatcaacactccaaa

SEQ ID NO: 12875 - DNA, 75 bp, Homo sapiens
gaagtgcagctgcctcagttcttagcgcaggggctatcaacagcaggacgcccatgaattcatgcgctacctttt

SEQ ID NO: 12876 - DNA, 83 bp, Homo sapiens
gtatgaggcaagcgcagggggacggggaccagcagctgtcgccgccgctctcagcagcccctgtcaaagggaacaggaagcag

SEQ ID NO: 12877 - DNA, 82 bp, Homo sapiens
ctcgcggcgacggcggcggtggcggcttggacgactcggagagccgacctcctgccccccgaggtctgcagtctcctgaacc

SEQ ID NO: 12878 - DNA, 99 bp, Homo sapiens
aagcctgtaaccattttcgcctttacaatggcagagcagctgagaagaagctcattcacacagaagacccatttaatgatgaacatcaggagaggcaag

SEQ ID NO: 12879 - DNA, 88 bp, Homo sapiens
caagatcttccggcctccccgggcctcccattgcagcatctgtgacaactgtgtgggtgtgcaactgaggaacatggctcaagaaact

SEQ ID NO: 12880 - DNA, 88 bp, Homo sapiens
tttgttgatgtcatccattccgacactgatgtgggagctggtgaggtggccaacttcgctgcgtatgcgtttgcaccagccactctag

SEQ ID NO: 12881 - DNA, 100 bp, Homo sapiens
ttggaaacctcgcctctgctgagaagaacgtcaaggtcgtgggaaataaaaggcagttctacacagactgcagcaacggttgcatctgcatatcctaaga

SEQ ID NO: 12882 - DNA, 99 bp, Homo sapiens
atccccgttgccacgggccggatggccgggagaataccacactcctgcacagccctgggaccttgcatgccgcagccaagaccttctctccccgggtcc

SEQ ID NO: 12883 - DNA, 101 bp, Homo sapiens
atgagtgtggcgaaaagggacattatgcttatgattgtcatcgttacagccggcgaagaagaagcaggatgtacagttacccagcacgtgtacctcctcct

SEQ ID NO: 12884 - DNA, 99 bp, Homo sapiens
ttgaccatgatggaatgcttgacagagatgagtttgcagttatctgaaaaccatgagtgaacgcctcaagaataggtactacgtgtctaagaaattatt

SEQ ID NO: 12885 - DNA, 83 bp, Homo sapiens
gacgagtgagtggatcctgggaagcgctgtgaaatgggctggagcgagactcctccagtacctcccccaccaccctatctggc

SEQ ID NO: 12886 - DNA, 114 bp, Homo sapiens
cacagttcgaggggccaaggcagaagaaatcttggagaagggtctaaaggtgcgcttggtaattgctgaaaaggcattgaagtgcgaggaacatgatgtaagtctgcccttgag

SEQ ID NO: 12887 - DNA, 100 bp, Homo sapiens
accatgaaagacttgtgaatccaggaagagagactgactgggcaacatgttattcagaccgttacctggcacactggcctcactcttgtcggagactgag

SEQ ID NO: 12888 - DNA, 98 bp, Homo sapiens
tggaaagtacgaggagaatcctgggtttagccattgagagagacaagagagacacctccaacttcgacaaagagttcaccagacagcctgtggaactg

SEQ ID NO: 12889 - DNA, 83 bp, Homo sapiens
aagacgtccaatctgagcgtgctgcggacggcgctgcggtacatccagggtttgccttcccggattgggcctacaagccagag

SEQ ID NO: 12890 - DNA, 114 bp, Homo sapiens
tccgcgctggaccagctcaagcagttcaccaccgtggtggccgacacgggcgacttccacggtactccaaagattcaggtttactcacgtcatccagcagagaatggaaagtca

SEQ ID NO: 12891 - DNA, 75 bp, Homo sapiens
gaacacctcactattgatggtgtagcgctttaggggaagaagaagaagaggacagtgctccagtgaaagtggaag

SEQ ID NO: 12892 - DNA, 74 bp, Homo sapiens
cgagggcctggagtgtgtgcccactgaggagtccaacatcaccatgcaggaaactggctccacctccatccagg

SEQ ID NO: 12893 - DNA, 98 bp, Homo sapiens
tatcgccttcgccgaccggctacgcgccgtggacacagacggggtggagcccatggaatcggtcctggaggacaggagttggtaaaatattaaagaag

SEQ ID NO: 12894 - DNA, 75 bp, Homo sapiens
gaaagagagggaccaagccaaagatcagattgcttatgtcacagggagatgctgtttttccagcagctcagttaa

SEQ ID NO: 12895 - DNA, 75 bp, Homo sapiens
cagaggctcgagttacccctcttaccaccgtcatggcagtcccaggaatacaggagtttccagaaaatataaaaa

SEQ ID NO: 12896 - DNA, 98 bp, Homo sapiens
agcggtttccaagtggtgctggaagacacagtgcttttccctgagggcgggggacagctggaatgttctgaagaactgggtgatcttgtgaaatctgt

SEQ ID NO: 12897 - DNA, 100 bp, Homo sapiens
gaaaagcatccggtggcctcagggagccctgaagaaaccgaagcagaatgtaccagggacacatgcaggctacgtgcaggcctgccgcgccctgatgatt

SEQ ID NO: 12898 - DNA, 75 bp, Homo sapiens
tgacctggggctgtggagagcgacccgtggccttgtgtttcagatggcccactgcgtgaccttggttcagctgtc

SEQ ID NO: 12899 - DNA, 102 bp, Homo sapiens
ctgggagctactgatgcttcttcctacatgtcctaatatgttgatggcattccagaatatctcagatgagcagtgctcaagtaaagctctttgtgacagggc

SEQ ID NO: 12900 - DNA, 82 bp, Homo sapiens
actctgactctcggactgagaaacgcaagcggaaggagagttttacatggaagtggcttacagaaacttggcgctgaggtgc

SEQ ID NO: 12901 - DNA, 90 bp, Homo sapiens
cactgcgttccctcgtgccacgctcccctcctcttccaacctcctgacaaggtgatccgggcgggccccgcaggaattttatcccctcac

SEQ ID NO: 12902 - DNA, 101 bp, Homo sapiens
caaatcccggaaactccagcgtgtctccagccgtgggactttgaacatgtcggggatcgccctcagcagactcgcccaggagaggaaagcatggaggaaag

SEQ ID NO: 12903 - DNA, 100 bp, Homo sapiens
ttggaaggatgcttcagctcatcttaggctgtgctgtgaactgtgaacagaagcaaggggccatgcacccactgcgcagcggcttgctcaactccacctc

SEQ ID NO: 12904 - DNA, 100 bp, Homo sapiens
aaatttaaatagattagtaactggcatagacaactatgggcaggcccaagtctgttttggtggtctgagaggaaaaaagatgagcttctaaagttttggg

SEQ ID NO: 12905 - DNA, 100 bp, Homo sapiens
gcagcccccgcgctggtgcagccaccctcgctccctctgctcttcctcccttcgctcgcaccatgcagggtttccaggcctgaggtgcccgccctggccc

SEQ ID NO: 12906 - DNA, 74 bp, Homo sapiens
gcggcagctgaggagactccggcgctcgccatggccgacgaaaagcccaaggtagaggaaggatggtgggaagg

SEQ ID NO: 12907 - DNA, 100 bp, Homo sapiens
tctccaggtgaagtagatttttatttttctcttcagcaacgggtagcagaattggaaaaaattaatgcagaatttttacgtgcacaacagcagcttgaac

SEQ ID NO: 12908 - DNA, 100 bp, Homo sapiens
gtcacggaagaccctgcagatgtcagtggataagtggttccatcaccagaaaaactaatgagatttctctggaatacaagctgatattgctacatcgtgt

SEQ ID NO: 12909 - DNA, 83 bp, Homo sapiens
gtcagaaaagagtagcctgggctgtctggaaatctgaggaccgtagcctgacgggcaagctggaaccggtgtctccccccagc

SEQ ID NO: 12910 - DNA, 73 bp, Homo sapiens
ggaatgccacagcatcctccagcacctcagctgaaggaagaggatcaccttccaagacaaaacagtcttcatg

SEQ ID NO: 12911 - DNA, 98 bp, Homo sapiens
gccagtctctttcatcatcaagcagacatactcaaggtctcggccttgaaaaataaactgaagaagcagtctacagctacgggtgatggagtagctag

SEQ ID NO: 12912 - DNA, 93 bp, Homo sapiens
cttcactgcccaaacaggaagtctatgatgagtacaagtatagacacgtgtggccgtttacgctgtaggatcctcattcccactggctttgaa

SEQ ID NO: 12913 - DNA, 101 bp, Homo sapiens
tttgaccagttactggagtttgttactgaaggatcacattttgttgaaggtatgtcttactgaaagaaagaaacatgcttctaaccctagagcaggaggcc

SEQ ID NO: 12914 - DNA, 90 bp, Homo sapiens
gccagttagaagccctctgtcctcagggcatggatttcattggtcgcgacgccctcctgcagcagaagcagaatggagtgtataaacgcc

SEQ ID NO: 12915 - DNA, 100 bp, Homo sapiens
acacctactatgactttgatgctgaagctgcagaccacaagcaggaggaggacatgaagcggaagcagcagcggaccactcctgcccctcctaaagctga

SEQ ID NO: 12916 - DNA, 74 bp, Homo sapiens
gcaagaaggccctggacacagcaatatctctgggctttcacaggtcattcctgtcccaatcagctgctctacta

SEQ ID NO: 12917 - DNA, 100 bp, Homo sapiens
ctgggggctgctgggcaagaaacatttcttacgtgataatgtgaagcgtcagaggtccctgtttgataggtcctcaaaggcttcccttccctactggtta

SEQ ID NO: 12918 - DNA, 101 bp, Homo sapiens
ccaccaaaacccaacagaccaccaaatgttgacctgacgaaattccacaaaacctcttctggaaacaggtcacctgtctgtgtgcccagtttgaagccgtc

SEQ ID NO: 12919 - DNA, 74 bp, Homo sapiens
ctgaacctgaccattggggtcacggtgtttgccgtggggaataagactttgaccccgacgcaggcttcagtgat

SEQ ID NO: 12920 - DNA, 100 bp, Homo sapiens
agatgaagatgcacatgtctgggaggataattgggatgatgacaatgtagaggatgacttctctaatcagttacgggggcttggagtacccataatacag

SEQ ID NO: 12921 - DNA, 75 bp, Homo sapiens
gagaggcacccgatatatgttctctaggccttttagaaaacatgatgctatctgtgagcagcagttgataatgtg

SEQ ID NO: 12922 - DNA, 98 bp, Homo sapiens
cacgagaggcagcgccatggcggagcagacctactcgtggtgctggagaatctggtaaaagcaccattgtgaagcagatgaggatcctgcatgttaat

SEQ ID NO: 12923 - DNA, 100 bp, Homo sapiens
ctttgttttgcttcgagatggctgcggggatgtatttggaacattatctggacagtgcccctgggcgctgggattgctctagcctgtaagtataatggaa

SEQ ID NO: 12924 - DNA, 100 bp, Homo sapiens
cgtggacacagtatgcatccatgaaggaagagtctgtcttccgggaaagtatggaaaacccaaattgatggagtctcgctctgtcacccaggctggagtg

SEQ ID NO: 12925 - DNA, 82 bp, Homo sapiens
ttaaaacatttttcagggacgtagccatccagaggtggatatcatccagtgaaaattggagacctcttcaatggccggtatc

SEQ ID NO: 12926 - DNA, 101 bp, Homo sapiens
ctcagatcttttctacagcttctgataatcaaccaactgttacaatcaaggtctatgaagttaaacacagtgggaatatcacttttgatgagattgtcaac

SEQ ID NO: 12927 - DNA, 82 bp, Homo sapiens
ggagtccttggggacggagcagcgcgtcgtggggcgagcggcagagaaaacactcattgatcttcaaaatgaaatgagattt

SEQ ID NO: 12928 - DNA, 100 bp, Homo sapiens
cagcgcatccaccagctgcaggctgagcgcgcgcagggcttccgccgactggaggaatgccatggacaatattaccaggcagaaccaattctacgatacc

SEQ ID NO: 12929 - DNA, 50 bp, Homo sapiens
ctggaataggatcttcatacaagctccacggtcaggcttggctgcaaaac

SEQ ID NO: 12930 - DNA, 75 bp, Homo sapiens
tcaaggacacgaggtcaccatctccagcacacttggtgtttgactttacgatgcaaattatactttgacaactta

SEQ ID NO: 12931 - DNA, 95 bp, Homo sapiens
atgtcagatttatctcatgctgtgcaggttttacagctctttaaaacactgcacaggaccagacaacaagtttttaaaaatgatgccagagcatt

SEQ ID NO: 12932 - DNA, 98 bp, Homo sapiens
gtccagccccctcacctcatatctcagccatacaacagagtcttgctctattgcccaggctgcaactggtgtgatctcggctcactacaacctctgcc

SEQ ID NO: 12933 - DNA, 75 bp, Homo sapiens
ctgaagaatctgaagagctggatcagaagacattcagcattgacctgcgcgaagtctggctcaattatcctctcc

SEQ ID NO: 12934 - DNA, 75 bp, Homo sapiens
ggcccacctgtgtcctggttgagggtctccagggttctttggggcccgaggaacttccagcaccattacttgatg

SEQ ID NO: 12935 - DNA, 90 bp, Homo sapiens
cacccttacaccgacgacacctccaccagtggcacagtgaagataccaggaacaccatgaagaagacttctttctctacattgcctacag

SEQ ID NO: 12936 - DNA, 98 bp, Homo sapiens
tttgctcccaaaggcgcaccaatgaccaacatttgccccccggaggaaagaactggaaccagctctacgaactcgacggggaccccaagaggaaggaa

SEQ ID NO: 12937 - DNA, 101 bp, Homo sapiens
gaaaggctatctgaagaaaagtagaaggaaaaacagaacgttgcaaactctggaaaaaaacttggggaaggagacttggtctgaaagatgccacattcctg

SEQ ID NO: 12938 - DNA, 99 bp, Homo sapiens
gtaggctgcgttgaggatctttgctcttccatccgcctttgatcgtcttcctcttcagccatccaggaagggcctgtcccagtcggctttaccctatcg

SEQ ID NO: 12939 - DNA, 75 bp, Homo sapiens
tctgagaactttgagagaccgaaaaagaaggacgtatgctctacaagctaaaagatggcggcaaggcagcccagg

SEQ ID NO: 12940 - DNA, 82 bp, Homo sapiens
caacattcccaacagccaccaccaccaccagatgaaccgggcggcccgagtacgcgtaagcaagggggacaagccggtgacc

SEQ ID NO: 12941 - DNA, 117 bp, Homo sapiens
ttgaagggaggcggcagaagaagacgaagaagcagaagcgtctgctcaggttgcagcaggagagagaactggtcatgctgctggagtggtggtcctgcacggagtgtacactgttca

SEQ ID NO: 12942 - DNA, 97 bp, Homo sapiens
ctacgcctgacagtggtagatacccctggctatggtgacgctatcaactgcagagattgccaagacaatgcaaactccagtgaacattcccgtgcct

SEQ ID NO: 12943 - DNA, 75 bp, Homo sapiens
ctgacggtggaggttcgcggctctaacggggctttctacaagatctagaaatggccattgcctactggaacttag

SEQ ID NO: 12944 - DNA, 124 bp, Homo sapiens
tggaagctatgggtacggaggcaactcggcgacagcaggctacagtgaccaagaatatggcccaggtgaccaaagccctggacaaggccctgagcaccatggacctgcagaaggtctcctcagt

SEQ ID NO: 12945 - DNA, 100 bp, Homo sapiens
aggagaatgaagaagcagtcaaaaagatgcttgtggaagccacccgggagtttgaggaggttgtggtgctgagcgccgtcctcaaggatctctaccacct

SEQ ID NO: 12946 - DNA, 100 bp, Homo sapiens
ttcatgtgacagactggatagagaagaaactggagcaagagtttcagagctgcagagagacaaggcggcggcggctgctgtgctgggtgcagtgaggaag

SEQ ID NO: 12947 - DNA, 82 bp, Homo sapiens
ctttcatgcagtgacatgttgataaaaaatgatggaagcttgctgtcttcgatacgtggagctccttggcggtccacattgc

SEQ ID NO: 12948 - DNA, 82 bp, Homo sapiens
ggcagccgggatgcgctggtctcgggagccctggagtccactaaagcgaaactacatctgaccagagtgatattgaaggtag

SEQ ID NO: 12949 - DNA, 100 bp, Homo sapiens
ttgagccagtccagaccctgctgctgtcttcaaagaaggtctcctctgagcctccggcctccataagacccaaaacagatgacacctcttcccagtcccc

SEQ ID NO: 12950 - DNA, 83 bp, Homo sapiens
ccgcgcagcccccggccgcagcgcaggcagcccagcagacccctctgccatgaaccagtccatcccagtggctcccaccccac

SEQ ID NO: 12951 - DNA, 82 bp, Homo sapiens
gcctcttcggctgcggaccctgccattccggaggaggggttgtagaaggtgatttagctgccatagaagcatacaagtcatc

SEQ ID NO: 12952 - DNA, 75 bp, Homo sapiens
agcgtgaccgagagcgcgaatatcgtcatcgttagaagacttcagtgccctgaacggttagagaaattaatgaag

SEQ ID NO: 12953 - DNA, 75 bp, Homo sapiens
cttggcacctgccatccgtgacaaactggacatccttggggctgctgagacagagacagggtctccctctgtcac

SEQ ID NO: 12954 - DNA, 50 bp, Homo sapiens
gccgagtccccgtacggccacccggcgggatgcagcagtctcggccctgg

SEQ ID NO: 12955 - DNA, 82 bp, Homo sapiens
tcgacgtcgtgatccagaagtccagagctgaggactgcctgtttgcagattccgtctctagagcctttgaggtcactcctga

SEQ ID NO: 12956 - DNA, 82 bp, Homo sapiens
ctgtcttcggtggactccttcggcagtccacccaccgccgccgcctcccagacgtccggacaaccacagccctggagatgcc

SEQ ID NO: 12957 - DNA, 50 bp, Homo sapiens
agcacttggagaagaagggaccccaggtgctcccggattttgctctccag

SEQ ID NO: 12958 - DNA, 83 bp, Homo sapiens
acccggagttcctgcagcagcctgaggttgtccagatggcagttctgcacctgtgattacagaggaaaccacccttcaactgg

SEQ ID NO: 12959 - DNA, 82 bp, Homo sapiens
ggatcttcgacgggcacgggggagaggtgccaggaccattgacaccagaaatggaggcacggcaggctacacggaaaaggga

SEQ ID NO: 12960 - DNA, 100 bp, Homo sapiens
ttttgaagagattcggaaaattgaggataatgaatttcattaccaagaacaggtgtccctggtggtgaatgtggccagcgagtgcggcttcacagaccag

SEQ ID NO: 12961 - DNA, 82 bp, Homo sapiens
cactgctactgcgaagacagctggcagatccagacatttaatgtggatgcaccatgccagaccgtggaagatttaacgaatg

SEQ ID NO: 12962 - DNA, 90 bp, Homo sapiens
gctggacccgcggcggctcggccggctatgactttgcagccgtcctggagtggttcgcggagcgtgtggaccgcatcatcctgctcttcg

SEQ ID NO: 12963 - DNA, 75 bp, Homo sapiens
ggagcggagaggagagaagcaccttgcctttgctggtgtttttcccgcagcagcaatggccaatgtacatggtgg

SEQ ID NO: 12964 - DNA, 102 bp, Homo sapiens
ccgaactcgatctgggggagccagggatgaacgatatcgatcagctacaaaagaccccacagctgtagagagagcaaacttgttaaacatggctaaactgag

SEQ ID NO: 12965 - DNA, 90 bp, Homo sapiens
cccacaccggaatttccaggaagaaatagagtttcttaatgcaattttcccaaaagcctaaagaaactgttccaactcttgctccaaaaa

SEQ ID NO: 12966 - DNA, 100 bp, Homo sapiens
ggccacctctgcggcgtacgtgggagtggggggggcctggatgcttctctctgctctgccctggctgggccactacagatattgatgaatgtgtaaacaa

SEQ ID NO: 12967 - DNA, 110 bp, Homo sapiens
ttcacagggaagtcgcctggaaaaaccaatagtgtgtttaaaattatccaactgccatagagctaaattcttttttggaaaattgaaccgaacttctactgaatacaaga

SEQ ID NO: 12968 - DNA, 75 bp, Homo sapiens
gtccctctgaaaactgaggaatttgaagtgaccaaaacagcagcgagaattagaactgcagcgtcagcgtgactt

SEQ ID NO: 12969 - DNA, 87 bp, Homo sapiens
gccttctcgctgccgcgcgcccaagctcggcggacggcagtgccccaggttttacacatccataagtagacctttttggagcctcac

SEQ ID NO: 12970 - DNA, 90 bp, Homo sapiens
caaatttccttttccaactaaggttgccaacttggcctgttccatctcaaataatgaagaaggtgtaaagcttgttcgaatgtctgcaag

SEQ ID NO: 12971 - DNA, 100 bp, Homo sapiens
atgggttcccccttttgggggacccaggcctgccacatcacctatgccatgtcccgggtggcctggtcaccagtgaaaagttgtgcagagcccaacatga

SEQ ID NO: 12972 - DNA, 112 bp, Homo sapiens
ccggcggcgggcgccgagggacgccgaggcctcgggcgggggctggcccggggttccaggaccccaggagcaagcacaagttcaaaatccacacttacggaagccccacctt

SEQ ID NO: 12973 - DNA, 75 bp, Homo sapiens
gatactggaggagatggtcaagaatcgctctataagatctgcaaggtctctaattaacagaagatggcaaagccc

SEQ ID NO: 12974 - DNA, 96 bp, Homo sapiens
ctactccatgatctcctcggtcctgggtgggcagacgggaggcaccatcgggctgctctatgtgtttggacagacacaaagaccatcaccaccatg

SEQ ID NO: 12975 - DNA, 82 bp, Homo sapiens
tggacggcgagcgcgagcggcgcgagaaagaacgcggcaggcaaagatggcaaagagcgcttgggcggctcagtgctggggc

SEQ ID NO: 12976 - DNA, 75 bp, Homo sapiens
aaagacaacattgttcctggaacgccctctttttaaaaaagcggagcgggcactggacacaatgaactttgagat

SEQ ID NO: 12977 - DNA, 83 bp, Homo sapiens
agatcctggacctatgaatatccagtttgagccatcggatctaagatccaaaagggctacttctacaagtccgaacagccagt

SEQ ID NO: 12978 - DNA, 82 bp, Homo sapiens
gaaatgtgccagtgatattttccaggaagatattcctcgtcagcttgtctacattggtctttacctcttccacattgctgga

SEQ ID NO: 12979 - DNA, 104 bp, Homo sapiens
gcagaaggacagacgcctgccattgggccggatggcgagctctgggcgacgttgctggcagaggaaatgagaagaagcccagtagcgtgagggctctgtccatt

SEQ ID NO: 12980 - DNA, 98 bp, Homo sapiens
tctgtttgatatcaccaaactggaggatgcctatgtattccctggggatggcgcatcacacaccaaaggtatcgagaaccttccctgcgaacttcaga

SEQ ID NO: 12981 - DNA, 51 bp, Homo sapiens
cggcactggtaccctttacatcgctgagagatgcgtctgttactagagtgg

SEQ ID NO: 12982 - DNA, 100 bp, Homo sapiens
cgcagtggtcgcttcttctccttggtgctacgcatgatggtcggagtaaatatctcagatgagcagctgggcagcatcgcagacaggaccattcaggagg

SEQ ID NO: 12983 - DNA, 100 bp, Homo sapiens
agagaaagatagcctggatccatcttttgtgcatgcgtcgcgccttttggcagaagatacaaccgaaggaagtactcagagatcatggctgaaaaagcag

SEQ ID NO: 12984 - DNA, 143 bp, Homo sapiens
cttacgtccccgagtgcggcagtaccgcctccttcccagccgcgcggcttcctccagacctctcggcgcgggtgctggagaatctggtaaaagcaccattgtgaagcagatgaggatcctgcatgttaatgggtttaatggag

SEQ ID NO: 12985 - DNA, 96 bp, Homo sapiens
atggaaaagataaagtgttttggttttgatatggattatacccttgctggctgagtcatcactagagagtgggaagggcagcagcagcagagaatc

SEQ ID NO: 12986 - DNA, 50 bp, Homo sapiens
ggaaaagctggcacagaccgccacggcatgtccggcatgatttcgggtgg

SEQ ID NO: 12987 - DNA, 76 bp, Homo sapiens
tatcaagtaatggtgcaaagcctgaaatttccatggtgtcagtgattcatattcctgataggacttataaactatc

SEQ ID NO: 12988 - DNA, 88 bp, Homo sapiens
ccttgaacaaggcaaatatggttttgctgggagtgtccactcgccttccaccagcatggcaacgtcttcacagtaccgccagctgctc

SEQ ID NO: 12989 - DNA, 75 bp, Homo sapiens
aacctgacagaacttcacaggagaactctcctgcccttttaggagtgcaaaaagaagagtcaagtaccattggcc

SEQ ID NO: 12990 - DNA, 50 bp, Homo sapiens
cagggacgtcctcattgtcctcgggatttagtgcaagaagaagaacagtt

SEQ ID NO: 12991 - DNA, 74 bp, Homo sapiens
aagaaacttcctcagtaaagccgagtgggccatggtaatgacaaccatgcggatgctgaccgatctcccatatt

SEQ ID NO: 12992 - DNA, 96 bp, Homo sapiens
ggagacccaaagatgaccaagtgtttgaagccgtgggaactacagatgaattaagttcagctattggaccattgtgatgaatgactgtattatccg

SEQ ID NO: 12993 - DNA, 100 bp, Homo sapiens
ttactcaggcactttcttctcaatttcatatggcaacaaactatgtaggtgcaaaaaactacagacatctctgtgctgtttattacaacaagaatcctgg

SEQ ID NO: 12994 - DNA, 89 bp, Homo sapiens
ttatttgcacccagtcctgcagcgccagcagctggactatggcatctatgttatcaaccagtttggaaattttagcattcaggtgccag

SEQ ID NO: 12995 - DNA, 75 bp, Homo sapiens
ggcgaccactcctgtgatcgttgcggctggggctggaggggaggaagagagtttcattctgtcgcccaggctgga

SEQ ID NO: 12996 - DNA, 100 bp, Homo sapiens
cctgaaccgcgcggccgaaccctccggtgaatggaagagaatccgaagaagaaaatctcaataaatctgaaataagtcaagtgtttgagattgcacttaa

SEQ ID NO: 12997 - DNA, 82 bp, Homo sapiens
acatgagaactgcgactcagcatgcagaagctcttgaagtcctattggctggataattttgcaaaagattctgtaaaccctg

SEQ ID NO: 12998 - DNA, 80 bp, Homo sapiens
gaagaagtttagcagggcccaggagaagtgagacggtttaagcggaagcatcttactgccattgactgccagcatttggc

SEQ ID NO: 12999 - DNA, 82 bp, Homo sapiens
ggagagttgcccaggcccagaaagctctcagtgatccatcagagggttctcgcttcagcacaagatccggagttttgaagaa

SEQ ID NO: 13000 - DNA, 98 bp, Homo sapiens
gctttcatgatattcatgtgctgggtgggggacgtgtaccctgtctaccagcctgtgtctgagggaaaaggccataccaatgctggagatgcaatata

SEQ ID NO: 13001 - DNA, 100 bp, Homo sapiens
aaggatgttcgtcgtggcaacgttgctggtgacagcaaaaatgacccaccaatggaagcagctggcttcactgctcagatacagatgtcatcatgaagag

SEQ ID NO: 13002 - DNA, 51 bp, Homo sapiens
ctgtgtgggcccatctcaccaagaccatgttccgtgctccccaccttgcac

SEQ ID NO: 13003 - DNA, 100 bp, Homo sapiens
tttactcctacctgtgtaccgagccaggttattgcagctgactgcaaaagggtcacagtgctgaagtattttctggaagccctttgtggacaagaagagc

SEQ ID NO: 13004 - DNA, 75 bp, Homo sapiens
cttcaaccatactgtgacccgcaacaggaagttcaccatgtctattctcaagatccatgccagggagatctttga

SEQ ID NO: 13005 - DNA, 98 bp, Homo sapiens
ggcagtgtgtgaggcgcctttcaaaccggagggattggcaaggccaagctataacatcagaaatggtgaatgaatacaagaaaattcttttgctgaaa

SEQ ID NO: 13006 - DNA, 75 bp, Homo sapiens
tggaagcggcccccgcagacgctcggcagatctctgttgaggagctggcgcggaatctggtcatcaaggtcaaca

SEQ ID NO: 13007 - DNA, 97 bp, Homo sapiens
agatgggatctttccggatcaatccagatggcagccagtcagtggtggaggggctgggaaccgacgaggactctctcattgagatcatctgctccag

SEQ ID NO: 13008 - DNA, 106 bp, Homo sapiens
ccccggagcccctttagccatgtggatacctacggagcacgagaaatacggcgtgggtgatgcagaagatggggaagaatatgatgacccttttgctgggcctcca

SEQ ID NO: 13009 - DNA, 95 bp, Homo sapiens
ctggagccgaggcgcaggtggcgctgggtccggcctctttggcctacccccgttggctccgctgccccaggtcgatgagtcccctgtcaacgaca

SEQ ID NO: 13010 - DNA, 100 bp, Homo sapiens
aagaaatggacaaagatcttaactcagtggtcatcgctgtgaagctgcaggatcaggagaaggtctggggaaaataatccagagatttccacagaaggac

SEQ ID NO: 13011 - DNA, 83 bp, Homo sapiens
tggacaagctggaatgcatccaagagaatccctcaacatgctggtgctggagaatctggtaaaagcaccattgtgaagcagat

SEQ ID NO: 13012 - DNA, 100 bp, Homo sapiens
ggtaactctcactctgcgggggaagactcagccctatccagggagctcccacactttcaatggggaggcccacccaggccatctggctgctgtgcacagg

SEQ ID NO: 13013 - DNA, 75 bp, Homo sapiens
gagaagctgggattggagattccacccaaacttgctggtcactgggaggccagaagcggactcctagaagagggg

SEQ ID NO: 13014 - DNA, 82 bp, Homo sapiens
tgaggcggccgcggggcccgagcgcagacgggaggcgtgggcagcttcgacatcgccggcctgctgaacaaccctggcttca

SEQ ID NO: 13015 - DNA, 75 bp, Homo sapiens
tggggagccacagaagtcgtactcccttaaaccatgttcccgctgcctgtcaccaacgggaagggccggcccgcc

SEQ ID NO: 13016 - DNA, 75 bp, Homo sapiens
agttggaacctctgacaagaccaagtactaccttcaaggtgctggagaatctggtaaaagcaccattgtgaagca

SEQ ID NO: 13017 - DNA, 90 bp, Homo sapiens
agataatcgagaaataccagctaagactcaatgggtaaaccagacttgaatacaacattgccaattagacaaacagcatcaattttcaaa

SEQ ID NO: 13018 - DNA, 100 bp, Homo sapiens
gtatcagaagacaatatcatgcaagtgtggcaaatggaaactagcagagttgttcacatcatggattttcaacgagggaaaaacttgagataccagctat

SEQ ID NO: 13019 - DNA, 98 bp, Homo sapiens
gaatatctggttttgtctctgctgggcctgtgtgcctggaaaggaattgttttggcctaggatcatccaggaaaggaaacagattcattgtctgtctg

SEQ ID NO: 13020 - DNA, 75 bp, Homo sapiens
caatggccccactctcagagccgaatgccgtaggcattgtcattgctcatgctcttctgttagaaatagtatctt

SEQ ID NO: 13021 - DNA, 87 bp, Homo sapiens
aaagttgaaaaacgcaagactaggaccacatggtgacaatgcatgatgtgcttgatgctcagtggctgtatgataaccacaaggatg

SEQ ID NO: 13022 - DNA, 73 bp, Homo sapiens
tgggcaccgaccgcacgggcttcaccttcaaatacagggtaattgggatacttctggcagcgaactgagtgaa

SEQ ID NO: 13023 - DNA, 100 bp, Homo sapiens
ggggtcggcgctgggctggaggcggcggagcgcgagagcttcgagcggactcagtgccggtggtggtgtgcacattgagccccggtatagacagttcccc

SEQ ID NO: 13024 - DNA, 61 bp, Homo sapiens
gatatccagctggctctcgaggaagcagagcttgaagtacatctggattccttatgtgtgc

SEQ ID NO: 13025 - DNA, 82 bp, Homo sapiens
ccagaggacagcctgaggtgttggagtggggcctcccaaaggatcaggaaatggaagttccagtattaccgaaaatctctct

SEQ ID NO: 13026 - DNA, 119 bp, Homo sapiens
gggcttcccaacaccatgccgtccgccttctctgtcagctctttccccgtcagcatcccagccgtgctcacgatgccatggacaatattaccaggcagaaccaattctacgatacccaa

SEQ ID NO: 13027 - DNA, 98 bp, Homo sapiens
aagtacagggtcatcaagggcaccatggctatgcacggtggcaggacatccagaatgatgctcaatttgccattatcaacgagccatttaaaactgaa

SEQ ID NO: 13028 - DNA, 127 bp, Homo sapiens
gcgccggctccatggcgaccgggctcggggagccggtctatggactttccgaagacgaggccaagatcaaggctcgagatcttcgcgggaagaagaaggaggagctgctgaaacagctggacgacct

SEQ ID NO: 13029 - DNA, 89 bp, Homo sapiens
gcgaaaagtgctttttgagtatatgatgggtcgtgagactaagttaaaaacttcttcagagtcagtttcaaaaatggatcccaaagtca

SEQ ID NO: 13030 - DNA, 82 bp, Homo sapiens
aaggcctggaccgagttccacaagaaggactgcggggacctggtggccatcggcgtccgagctgggccacagcctgaacgag

SEQ ID NO: 13031 - DNA, 80 bp, Homo sapiens
gagcagatcgacaagtccgggagctgggcggccatttaccaggtgtccctggccagtgtccttccacctgtccacaagca

SEQ ID NO: 13032 - DNA, 85 bp, Homo sapiens
gccagcctggggcggccggccaggaaccacccgttaagggctcaagggttcttgttgatgcacgagataagcttggcattccttg

SEQ ID NO: 13033 - DNA, 75 bp, Homo sapiens
ggaaactgattggaaactctttgggaaagccactcgaaaagcaatgccaagtgagtacacctatgtgaaactgag

SEQ ID NO: 13034 - DNA, 74 bp, Homo sapiens
aaacatcctggaatcaaatagtgttacggcaacaagactaatagggatgccaaaggaaaaatatgatcctccag

SEQ ID NO: 13035 - DNA, 87 bp, Homo sapiens
caagcagggcaagccccgcctgaagccccccttccccgcagacgtggtcttggtgatgccttggacagcagcaactccatgcaaacc

SEQ ID NO: 13036 - DNA, 100 bp, Homo sapiens
ggctgtgaaccctggcgaccactgcttctccgtgggcagcattggcgaccagcgcttcacgagaatggatcttggagaatgtctgaaagtccatgacctg

SEQ ID NO: 13037 - DNA, 74 bp, Homo sapiens
gccacagtctaaggtgctgtacattacctcaaatccgtgtgctcatggataacatgaaacacctattagagcta

SEQ ID NO: 13038 - DNA, 50 bp, Homo sapiens
ccaggaagttcagagagaacaggattgtctcaaagcttgccaggagcaga

SEQ ID NO: 13039 - DNA, 83 bp, Homo sapiens
agcagttctacaaggcgagccagacattccacttcttccatctattacatctctgagtctaaatgaaaatgaagagaagaccg

SEQ ID NO: 13040 - DNA, 75 bp, Homo sapiens
ctagaggcttgatgaatggataccggggccctgccaatggattcagaggacctgggaagagccaacagacggaag

SEQ ID NO: 13041 - DNA, 100 bp, Homo sapiens
gggatgtgtatgaccttcacctcattaacagtgcagtggaggcttgcctcttgcatcagctgagacgccgtgccgctggcttcctgcgcagtgacaagat

SEQ ID NO: 13042 - DNA, 50 bp, Homo sapiens
gttcctcgtgcccatcgccacgatgctttggagtctgcaatgaagaatgg

SEQ ID NO: 13043 - DNA, 90 bp, Homo sapiens
gcccacggaggaagagtgggagtttgccgcccgagggggcttgaaggagcagataaaatccccccatctctgtactccacctactgccag

SEQ ID NO: 13044 - DNA, 74 bp, Homo sapiens
cacctctaggcttaagaccttcaacttgatcccggctgttggtactggtgtggcatactcggacagagaagccc

SEQ ID NO: 13045 - DNA, 87 bp, Homo sapiens
gattttagtggaggactacagagccggtgatatgatctgtcctgaatgtggcttggttgtagagaatgtaactggtcactacatttc

SEQ ID NO: 13046 - DNA, 101 bp, Homo sapiens
gaggagctggcgggcaaatacgcagagctgggggactggtgcgcccggaggattctgcagcacgtgcaggaatcagagatcattgatttcttcctgggggc

SEQ ID NO: 13047 - DNA, 100 bp, Homo sapiens
gccattctatgctgtggaaaagaaagcatactgcgagccctgctacattagattctacattgcattgactgggattccagtagcaattttcataactctg

SEQ ID NO: 13048 - DNA, 99 bp, Homo sapiens
ggctcatgcgggatttcaagcggtgctactcgtgagcagtagtcgccatccagacagatggattgtccctggaggaggcatggagcccgaggaggagcc

SEQ ID NO: 13049 - DNA, 100 bp, Homo sapiens
aataaagccagtgagaaaggagcttaccaaaggcagtgtacgaagaaggttcctgggagactgtcagaaatgggtttgaaagtattcttgaagggctgtt

SEQ ID NO: 13050 - DNA, 96 bp, Homo sapiens
acggaggaatacctcgtatgcaacctcaggcttcagccaagcattggggagtcagcaatgtccgttgtgttaaatcagctgctgcccatgattaag

SEQ ID NO: 13051 - DNA, 88 bp, Homo sapiens
cctgccgctcctgccggcagctccaaccatgggaggccgcgtctttctcgacaatgcagatcttcgtgaagactctgactggtaagac

SEQ ID NO: 13052 - DNA, 100 bp, Homo sapiens
tactcaagagtggaagttttcacagtgtggaaaagccactggcagtgattcaagtggtgtcattgatctcacaatggatgatgaagagagtggagcttca

SEQ ID NO: 13053 - DNA, 100 bp, Homo sapiens
aaattcgtttcagaattgagcagaaaacaacactgacagccagtgcaggaacacatgattctgtgcagatttgcagaccagacagctgtccagctcccac

SEQ ID NO: 13054 - DNA, 98 bp, Homo sapiens
gtatttgtgtgacttgactcttcaaacacaaagggatatggttttaagcctaaatatgatggagaagatcttgcttacacagtgaaaaatctcagacg

SEQ ID NO: 13055 - DNA, 120 bp, Homo sapiens
gagcttaccaggctggcttgctctgagctgcggttactgtgtccaggccccgggttctcagactattgcccagaagaaaagatgtttggttttcacaagccaaagatgtaccgaagtata

SEQ ID NO: 13056 - DNA, 99 bp, Homo sapiens
ccaagctccctgcggggaagaacgtgctactgctggatgttggggatcagccaggtgaggtaggttattcaggctctcctgctgaagctcctccaagca

SEQ ID NO: 13057 - DNA, 100 bp, Homo sapiens
gcacatcaacaagtgcccagaacacgtgctgaggcacacccagggccggcggtaccagcgagctctgtgtaaatgttgaaggggcccggccaggactcgg

SEQ ID NO: 13058 - DNA, 147 bp, Homo sapiens
cgcgggagctgcaccgccgcgcagacggggacaccgggagccacgggctgggaggccagacctgcttcagcctggagagcttctttgaagggcagtctgcaccatgggactcggctaagaaagatgagaacagaatgaagaacagat

SEQ ID NO: 13059 - DNA, 75 bp, Homo sapiens
ggctgctgagtggtgacagtagcccagcccgccggccaggcatggattccgtgaaggaacaacacctaaacccaa

SEQ ID NO: 13060 - DNA, 86 bp, Homo sapiens
actccttcggcagtccacccaccgccgccgcctcccagtcatcttagtctactgtgctgaatacatcaatgaggcggctgcgatga

SEQ ID NO: 13061 - DNA, 75 bp, Homo sapiens
tggcatttggctttgcctttctggacacagaagtatttgtgacagcacgttcacgtccatgttcttcccaggaag

SEQ ID NO: 13062 - DNA, 75 bp, Homo sapiens
ctgcctcagtatctgaacacaaggccaccccagcagacatgtttgccaaggcctttcgggtcaagtccaacacgg

SEQ ID NO: 13063 - DNA, 73 bp, Homo sapiens
gacgtcagaacgtggcttatgagtacctttgtcatttggaagaagcgaagagtcactcagcctctgaagaagc

SEQ ID NO: 13064 - DNA, 82 bp, Homo sapiens
ggaggtcagaggggaggaggactctggagctgacagcgcgcacttcacccgcagttgataacgaaggaggcccaacttcatt

SEQ ID NO: 13065 - DNA, 100 bp, Homo sapiens
cggcactgggacttctcgatctctggaggcacctgttgcaagtgacaggagaaaatgcagaagtctccatggacgtttccctggcttaccgtgatgacgc

SEQ ID NO: 13066 - DNA, 98 bp, Homo sapiens
cccgtggccgctgccgcctccgccccaggttcaaaatcaaaggaagcccagaagggaggtcatttttacagtgcaaagcctgaaatactgagagcaat

SEQ ID NO: 13067 - DNA, 74 bp, Homo sapiens
cactaatccatcttcagcttcaattacaagtacctaaaacagatccaggacctgcccccaactggcctccctga

SEQ ID NO: 13068 - DNA, 98 bp, Homo sapiens
agcttatactcctcccagtgacgggtctggagtgcgtgggggaccggctgttggcgggaggccactgtctgcagctcccgtgaagatgtccactccag

SEQ ID NO: 13069 - DNA, 96 bp, Homo sapiens
aaagagacttaattagaaccaatgagagactatctcaagaacttgaatacttaacaggatcagtggacgggcctctacctcatcctcgatggtcag

SEQ ID NO: 13070 - DNA, 75 bp, Homo sapiens
gctgctgctgctgctgcccgcgtccgaggctcgcgggcggcgggcccgggaataagacgagttggaagaagacct

SEQ ID NO: 13071 - DNA, 98 bp, Homo sapiens
cagctctatcagagtgaccctagtggaaattacgggggatggaaggccacatgcattggaaataatagcgctgccctagactggagctggttacagac

SEQ ID NO: 13072 - DNA, 75 bp, Homo sapiens
ttctggacttccaaatctcaagtgataagaccagcagaagcagattttaggtgatgggcaagtcagaaagtcaga

SEQ ID NO: 13073 - DNA, 87 bp, Homo sapiens
aggttcaattttctgagatttctcatcaggcacaccaaccagcaggaccaggtggtcagaatggcttcaacattcctcaagtcaccc

SEQ ID NO: 13074 - DNA, 90 bp, Homo sapiens
gctcggcagcatggcgtccgtgacgctgagcgaggcggagaaggtgtacatcgtgcatggcgtccagtattcatgtgattgaacggcgtg

SEQ ID NO: 13075 - DNA, 99 bp, Homo sapiens
ggccgggcctgcgtagtgaaactgcgtaggaacctgggaagaaggcatcagcaggactcagacctctcagcagcgtgctctgacgctgacctccacaga

SEQ ID NO: 13076 - DNA, 101 bp, Homo sapiens
cgcggccagccctgctcgcagaattaccgcctcttctttagtggaaaacgaagctcattcccaacgtgcaaagccaaggcagcgaccccaggacctcttct

SEQ ID NO: 13077 - DNA, 100 bp, Homo sapiens
cctggtccactgaaaaattcttcagattggaaaataccacaggatggagactacgagtttatcgcgctagcgagcttttatgaggacggaggggatgaag

SEQ ID NO: 13078 - DNA, 100 bp, Homo sapiens
aggatccagaaaccgccccagcgatggaagaggatcaggagctggagaggttaaaatctggtttcagaaccgcagagcaaaggagaggaaaatcaacaag

SEQ ID NO: 13079 - DNA, 100 bp, Homo sapiens
ggaatatgaagagacacagtatggtagccacacccccagatgccatggacaatattaccaggcagaaccaattctacgatacccaagtcatcaaacaaga

SEQ ID NO: 13080 - DNA, 74 bp, Homo sapiens
cggatgagtacgataccgaagcgggctgtgtgccccttctccacccagaggcccttgagggaaagctacttgat

SEQ ID NO: 13081 - DNA, 90 bp, Homo sapiens
atggtgtgtatgatggcctggcgacccattcaggcacttatggccatttcagccagtagcaacacaagtcggaatagaatggaacctgtc

SEQ ID NO: 13082 - DNA, 75 bp, Homo sapiens
gttcggaagaatttcagatacatgttttctcctgtgaaattaaagaggcagttgttcttttgggccacatctaag

SEQ ID NO: 13083 - DNA, 74 bp, Homo sapiens
cgggcaatgcctcgcgggcgcaatgaatccgcggcagctttccccagacatggccaacaagggtccttcctatg

SEQ ID NO: 13084 - DNA, 80 bp, Homo sapiens
gcgttggctatgtgcccatcacaggtgtgtcggcccagtccttcctccactgtttcacgatggccagcaccgccttcaac

SEQ ID NO: 13085 - DNA, 97 bp, Homo sapiens
tctgcagctccaaacaggcagaatggagctctaaaacctcctaccagcggagatataccacaatggtgtcctagaattctgcatcattacaactgat

SEQ ID NO: 13086 - DNA, 73 bp, Homo sapiens
aacgaccgtctggggaagaaggtccgcgttaaatgaatgggtaccacagaccatgtcatcgtcctggcgtcca

SEQ ID NO: 13087 - DNA, 137 bp, Homo sapiens
gtgtggtaaaataccgaggtgtaaggatcggtggaatctctggtatctttaaatctcatgactatcgaaaagtgcagtcattggagaaatcgatgaagaaacagattctgcgcttgatttggggaatattcgagcag

SEQ ID NO: 13088 - DNA, 75 bp, Homo sapiens
tcggccttcttcggcgtcactgtccaaggtgggcccatctggggcagggaagagcacaattttgcgcctgctgtt

SEQ ID NO: 13089 - DNA, 100 bp, Homo sapiens
ggacagaggaagtatggtggtcctccaccagacagtgtgtactctggcgtgcaacctggaattggaacggagaaatatggctacacacacctttctgcag

SEQ ID NO: 13090 - DNA, 101 bp, Homo sapiens
cttgataaggtggaacctgccgtcattgaggcccagaatgatggagactattttacctttacaagacatgaacccattggagtgtgtggacagatcatccc

SEQ ID NO: 13091 - DNA, 75 bp, Homo sapiens
attggtctaaacttgatccaaagacaatgaaggttgctgcttttgctcagaggacatccatgaccctaatggtct

SEQ ID NO: 13092 - DNA, 82 bp, Homo sapiens
cgttgtgtttgtgaaacagagaaagataggcggccatggtccaaccttgaaggtttggtgcacctcgatttggaggaagtag

SEQ ID NO: 13093 - DNA, 98 bp, Homo sapiens
ttgctgccgttctgtacttgcttttcatgattggagaacttgtagcagacatggccgcttaccaacaagaagggcagatgcagcttccccgagctgat

SEQ ID NO: 13094 - DNA, 100 bp, Homo sapiens
ttctaaaggtctttgcagcaagagatgatgagggcgacataccttctgttgaataccttttacaaaatggaagtgatccaaatgttaaagaccatgctgg

SEQ ID NO: 13095 - DNA, 75 bp, Homo sapiens
ctgagaaaggagacattgtcactgttgtgtcacctgcgctgctggaccgagaggaccgtataatagacgctggcc

SEQ ID NO: 13096 - DNA, 100 bp, Homo sapiens
aagaacaaggaatttgctttggctgattggcgcagatcaggcctctataaccgccaggaatcacattcagctggtgaaactgcaggtggaagaggtgcac

SEQ ID NO: 13097 - DNA, 98 bp, Homo sapiens
acagctggcagcatcacccccggacagcaagtaaaattggttctccacccaagactcctgtaagtaatgtagcagctacctcagctgggccctctaat

SEQ ID NO: 13098 - DNA, 90 bp, Homo sapiens
gccggagtggtgcgagccggcggggctgcggagggccagtggactcagggtgttctgagaatcagccatgtcatccctgtacccatctct

SEQ ID NO: 13099 - DNA, 82 bp, Homo sapiens
tgcggcggggccggcgggtgcagcggaggcggcggcggcggcggcagtgacgtcgccggcaatggctgccatccggaagaaa

SEQ ID NO: 13100 - DNA, 83 bp, Homo sapiens
ggcaacttacccgagaacgtgcgggaagagaagatcatcgagcatttcaaacggtccgcgggagagctgtggggcttggtgag

SEQ ID NO: 13101 - DNA, 90 bp, Homo sapiens
tgcgacaccaggaaggaaggtaccattacgagcctcattctgtccacggtgtgcacggcattcgttcagtcagagagcataatagaagta

SEQ ID NO: 13102 - DNA, 75 bp, Homo sapiens
gggaggcgtcgctgattccagagagctaaagccgatggggagtttggagaagtgtacaaggggcgtttgaaactg

SEQ ID NO: 13103 - DNA, 97 bp, Homo sapiens
aagattatttacaatgctaccctgctttttctggtgtcctgaacctggaagttgtgctttttaagatcactggggtgatcctgctggctgttggagt

SEQ ID NO: 13104 - DNA, 76 bp, Homo sapiens
tctcgacctgctaacagaactggaccttttcgctcagcctcacaggccaaagcatcagcaccagaacgcacaccca

SEQ ID NO: 13105 - DNA, 75 bp, Homo sapiens
aaacctcaagatgtggatttaccttatcccctcaacaacttttcagtggcaactcagaccatgaccgacttcata

SEQ ID NO: 13106 - DNA, 50 bp, Homo sapiens
tacacaaacccttcacagactgctctgagttttgctcttgttgcccaggc

SEQ ID NO: 13107 - DNA, 100 bp, Homo sapiens
gatcctattgatgtttgcgaaataggctcaaagggatgaaaaaatcccgttctctggagaatgagaaccttcaaaggctttcattattaagtagaaccca

SEQ ID NO: 13108 - DNA, 88 bp, Homo sapiens
tgagcagcccgtacctctccaacggacccctgtctcccggaggagcgcgcacccttcgagagctgtgcccaggagtgaacaaccagcc

SEQ ID NO: 13109 - DNA, 75 bp, Homo sapiens
ggcacagagagggcctgggagcttgctgcagcttcagatacgggacgtgcaggaaacactgatgccccaggtcct

SEQ ID NO: 13110 - DNA, 50 bp, Homo sapiens
cgcaaggcctgaggcccagcacagagagaacgaggtgctcaaagtccaac

SEQ ID NO: 13111 - DNA, 75 bp, Homo sapiens
tttatatttctctcagaccattcccatcagtgagcattacaggggccacctacagatgctcctgcagtggacaca

SEQ ID NO: 13112 - DNA, 107 bp, Homo sapiens
gcgagagagatgaaagacgtcgaggggacgattggaatgacagcttcgtgctctgtctgatgatggagtatctgatcttgaagacccaaccttgactcccctgaaag

SEQ ID NO: 13113 - DNA, 75 bp, Homo sapiens
cctgtatgaagcggttggcaccactgaagtgaccgaatgagacccaacatgagtgaagtttcctgcaagaaacgg

SEQ ID NO: 13114 - DNA, 90 bp, Homo sapiens
tgcattcagaacaagcccctgtattttgctgatcggctgtatgactccatgaaggggaaggagttcgagacacgactgaaggagaagaag

SEQ ID NO: 13115 - DNA, 100 bp, Homo sapiens
gagaggaggcagtggccctggtggaagacttgcagaaagaacctggaagacagaggctggagtgggctcgggatgagtttgaaggcctcttcaagcagcc

SEQ ID NO: 13116 - DNA, 83 bp, Homo sapiens
agagatgtgatcactggtttcgtggcctgaccaaggacctccaaggtctatcagccacagtctctgcaagtttccaagagcag

SEQ ID NO: 13117 - DNA, 75 bp, Homo sapiens
aaaatgaatcagattatttggccttatggaactggtgagggagaaaactggttgtcctggatgtttgaaaagttg

SEQ ID NO: 13118 - DNA, 82 bp, Homo sapiens
gccagtccctggagctggtgcacaggttccagtaatctcaggggcgatataatcaatgaggtggtcctaaagttgctcaagg

SEQ ID NO: 13119 - DNA, 98 bp, Homo sapiens
ggggcacccgtgtacatggccgccgtcctggaatacctgacaggtgctggagaatctggtaaaagcaccattgtgaagcagatgaggatcctgcatgt

SEQ ID NO: 13120 - DNA, 82 bp, Homo sapiens
gatggacagtttcagtgcattacagaaagaatcttcaagagggagacatagggaaaaggaagacataaaaatcactaaggaa

SEQ ID NO: 13121 - DNA, 83 bp, Homo sapiens
aagcctgcgaaagtgctcgggaagagggagagcaaacttggctcagcccattggcaaacatgaattgactgggcataaagtag

SEQ ID NO: 13122 - DNA, 100 bp, Homo sapiens
tggtgccaaagtgcagctgactcttcccacgacagccctgcccttcccatgaggcaggctcttcaatgaggagcgggaaggcctcctgcaccctggagac

SEQ ID NO: 13123 - DNA, 90 bp, Homo sapiens
tttttttctccagccgagaggacgcggctgtgatatacgaaggaggaagtggtgaagttgactgagaaatgccttaataatgtcattgag

SEQ ID NO: 13124 - DNA, 83 bp, Homo sapiens
gaattcggccatgagccgctacatactcatcatggggctcctgtacaagattactgatctctcattacccaactatctgatgg

SEQ ID NO: 13125 - DNA, 82 bp, Homo sapiens
agctagctcggaacctgcccatggacacattcactgtggcaaggttcacccatcatcagaataacaccatcacgctcaagag

SEQ ID NO: 13126 - DNA, 75 bp, Homo sapiens
gtttagcagaacagcctccgcggctccggggagaaggcagctgcagttgcactttcctccctgattcatgctttg

SEQ ID NO: 13127 - DNA, 83 bp, Homo sapiens
gaaaaacttcagacagaccaggccgaagcctcaaggccacaaaacattgctgaggctcttgtcagcaaaggtctagccacagt

SEQ ID NO: 13128 - DNA, 82 bp, Homo sapiens
gcagcacctcctcgccagcagccgtccggagccagccaacgagcgttgtccgaacagacagcctgaaggggcggcggggccg

SEQ ID NO: 13129 - DNA, 103 bp, Homo sapiens
tattgacctgattgaagcaaaaatgggaattctggagttactggatgaagaatgtttgatactccgtgagcacaaagcagtcatcattcagaagcgagtccgg

SEQ ID NO: 13130 - DNA, 75 bp, Homo sapiens
gccctcaagtccctgatggcctcagaggaggagctcgggttcatgacgctctcgatattcctgtgcagaaacctg

SEQ ID NO: 13131 - DNA, 76 bp, Homo sapiens
ccagctgagacagggcgccacttactaggtaactaggatttctacctcaaccgcgagacctatgcaaggacggtgt

SEQ ID NO: 13132 - DNA, 75 bp, Homo sapiens
ggagtttactagatttgttcctaaatttaaggggatcttctctggatcaagcaatggtggtgaaaaatgtttcgc

SEQ ID NO: 13133 - DNA, 90 bp, Homo sapiens
caggcctcgaacgggatggcagaggagttatgtgtctcggtaccacgtgaaagactcctcacgccacgtcatcctaggcacccagcagtt

SEQ ID NO: 13134 - DNA, 74 bp, Homo sapiens
tgaagtataataccaagaaagccccacttgatcacccggaagttcaggctgaattctgaaggcaaacttgagca

SEQ ID NO: 13135 - DNA, 100 bp, Homo sapiens
aaccagaccaccttcataattggagaaacaccaaaaggaatccgcaggtaacttgggtttttactcctgtaacaactgaaataacaagtcttgatacaga

SEQ ID NO: 13136 - DNA, 100 bp, Homo sapiens
tgggataccacctcatgttgttaaagtaccagcttcacaggttggtgttcgaggaagagacattgttgttcttggtgtggagaagaagtcagtggccaaa

SEQ ID NO: 13137 - DNA, 75 bp, Homo sapiens
acagctttttctcaacagcccaatggtgagacgtggtcttgtaacacagtggttaagaatgtgactttggagcca

SEQ ID NO: 13138 - DNA, 80 bp, Homo sapiens
tgaatcagactccgactgcgtccctgcagaggctggccaggcctagacagtttgcagaaaaaacttcagcatgtgccagg

SEQ ID NO: 13139 - DNA, 74 bp, Homo sapiens
ctggctggccaagttactggagccgatggagatgcacttatttacatggaaccagagaaacaagtgatgtccag

SEQ ID NO: 13140 - DNA, 100 bp, Homo sapiens
agggcaaaccgtgcattattataaagctcaaccgagttctaggcttcaaacctaagccttggaatggatggctttggccaaccagttggcattcttggac

SEQ ID NO: 13141 - DNA, 89 bp, Homo sapiens
agaaggactgctcgctgccatatgctacggaatccaaagaatgcaggactatcctattaagtgtaatctcactgcttaatgagcccaac

SEQ ID NO: 13142 - DNA, 100 bp, Homo sapiens
cctgtggttagtgaccgcctctgcctcctccactacccgaaaaccagtagattcccagacatcgcgaagtgaatctgaaattgtgccaaaagttgctaaa

SEQ ID NO: 13143 - DNA, 88 bp, Homo sapiens
aaaactatcagtttttgcagacggacaaaaaagaacaggagaagtctgaacacattgtgcttgagaacagtagtcgagaagacaagca

SEQ ID NO: 13144 - DNA, 108 bp, Homo sapiens
tgcatgcacgagccaggaactgcgcagcctcttcgagcgccgcggacgcgtcatcgagtgtgacgtggtgaaagacgcaaacatgcagatctttgtgaagaccctcac

SEQ ID NO: 13145 - DNA, 75 bp, Homo sapiens
ttcaaggataagggcgacagcaacagctctgccggctggaagggagccggcacagatgaaaaggctcttattgaa

SEQ ID NO: 13146 - DNA, 75 bp, Homo sapiens
cttgccctggtcttgctcggccgatgaagtgcagaggtttttttctggacttcaaacaagtgtgaagaggctgtg

SEQ ID NO: 13147 - DNA, 100 bp, Homo sapiens
tgggattgctgccacagtgccagcagctccagatgttcttcctcttgcttgccagaggaggaatgggctctttccatgccatgataaactcttccgtgca

SEQ ID NO: 13148 - DNA, 50 bp, Homo sapiens
ccggaaaatgccctcaaacgcgccaacggctgatcagctgaccgaagaac

SEQ ID NO: 13149 - DNA, 96 bp, Homo sapiens
ctgctgactaatgttacttgcggctctcctggtgaaaaaagcagagcccctggaaaactcacatatgtgtcaacaatagtccttgatgcccctgta

SEQ ID NO: 13150 - DNA, 90 bp, Homo sapiens
ccaagaacgtgctcttcgctcacctggatgacaacgagaggagaaacttcagtgctctcaagaaggaaaatatttatgaaaacaataaac

SEQ ID NO: 13151 - DNA, 96 bp, Homo sapiens
agtcacacaagcttatcatctttgatgctcgacaaaacagtgtcgctgataccaacaaggtatggcagatcccagaaaatggactcaccctttccc

SEQ ID NO: 13152 - DNA, 100 bp, Homo sapiens
tacagacccttcctcctgtcccacttgcacagaagtactttgaacttttccctcaggagcgaagccccctttggcagactctgttccagcctcagacagg

SEQ ID NO: 13153 - DNA, 101 bp, Homo sapiens
gtcgcccaaagttccgtgagttgatcatcgaattctccaaaatggcccgagacccccagcgctaccttgtcattcagtagagatggggtttcaccgtgtta

SEQ ID NO: 13154 - DNA, 100 bp, Homo sapiens
gcttatttgaagaggcactggaaaaatatggcaaagacttcaatgacatacggcaagattttgttctatgcgcaatagatggaaaccaaacagcagcaag

SEQ ID NO: 13155 - DNA, 100 bp, Homo sapiens
ccgcagctggcgcagcccacgctcatgatcgacttcctcacccgcgcctgcgacctcggtcgagtcccagacaccagaagtctgaatttggagaaggctg

SEQ ID NO: 13156 - DNA, 50 bp, Homo sapiens
gagatgacttcagggtcttgaccgcggtggtcttcaagctgacagagaag

SEQ ID NO: 13157 - DNA, 75 bp, Homo sapiens
cagacgcagccgtagacaccagctccgaaatcaccaccaagcccttcctggatctggagagagcagctgctgctg

SEQ ID NO: 13158 - DNA, 98 bp, Homo sapiens
cactgtcatggacaaggacaagctcagccgcaatgacgtcatcggcaagtacaacagggtctggattcccgatcctgaagaagtttggaagtctgctg

SEQ ID NO: 13159 - DNA, 75 bp, Homo sapiens
agactaaagctggacacccgcccgccgagttatggtgaatggttgcatggatttgaaaaaaaggcaaaagaatgt

SEQ ID NO: 13160 - DNA, 100 bp, Homo sapiens
tcgtcctgagaggagtgaaggcggcaaaatggcggaccgcttctcccgcttcaacgaagaccgagactttcaggttcctggtagagttacacagttgtgc

SEQ ID NO: 13161 - DNA, 75 bp, Homo sapiens
gcaaaccaaggatctggggatcttcgcactatcccaaggaacgaatgcaggaatttgggaactgagctgtgcaag

SEQ ID NO: 13162 - DNA, 90 bp, Homo sapiens
aaaaagcttggatttcctgaaattgttgaactggattgtggacgaatgtggaacctcgctctgtggctgtgttcccttggcactccttag

SEQ ID NO: 13163 - DNA, 75 bp, Homo sapiens
agcactgaaaattctggataatggtgaatggggctccaaggtgggcaaactgaccctcaagaccacagagatgga

SEQ ID NO: 13164 - DNA, 98 bp, Homo sapiens
gcggcgggagcccaggagcctgccccgccctggggacgaagagctgcagctcctcctgtgcggactcatgaaatggccacagatgataagacgtcccc

SEQ ID NO: 13165 - DNA, 100 bp, Homo sapiens
cttcatgtgtctcttctaagctgaataaagctgttttggaactgtcaggtacctcaaagcgtcactctgtgagactgctgggtcagaaaaaggataatgg

SEQ ID NO: 13166 - DNA, 100 bp, Homo sapiens
ctttcctaccatctaaaatacgaaggtttctggctgggcatgatgacctgaaggagatgctggacaccaacaaggattctctcaagctggaggccatgaa

SEQ ID NO: 13167 - DNA, 75 bp, Homo sapiens
agcttttgattaacaccttaataaccagcggagctgacacagccaaatgcatcatcccattcagatgaaacctgc

SEQ ID NO: 13168 - DNA, 82 bp, Homo sapiens
cgtcgtggaagcaggactgcgccgcgtcttcctcaaggcatgtgggcacattccatgacagtacaggattatcaggatctca

SEQ ID NO: 13169 - DNA, 75 bp, Homo sapiens
gaactggttctacacgcgagctgagagcccgagcccagcacattgtgccctgtactatatctcagctgctttctg

SEQ ID NO: 13170 - DNA, 100 bp, Homo sapiens
atgtcattgctgccaatattctgcgtccagaggaccagaggttaatttattctgggaagctgttgttggatcaccaatgtctcagggacttgcttccaaa

SEQ ID NO: 13171 - DNA, 75 bp, Homo sapiens
aattgttgtgacttcactaataaagctcctgtcttcgttcctggctagaacaagacacctcctgtccaacatgca

SEQ ID NO: 13172 - DNA, 86 bp, Homo sapiens
tttctacaggggaagtgtggatgtcatttccatgagattctgaagggagtggtaatggaagtgaagatgcttcaaaggacagtgga

SEQ ID NO: 13173 - DNA, 82 bp, Homo sapiens
gcttgatgggcgacaacccttttcaaccaaaaagcgtccaggtgatcccccaaacagcatgtgctcagccccagacctgccg

SEQ ID NO: 13174 - DNA, 97 bp, Homo sapiens
ggaccaaaacctgcattgataccaaggaaggcatcctgcagtattgccaagaagcctgtttaaagaagaaaacccgtatgctagatttgaaaacaac

SEQ ID NO: 13175 - DNA, 100 bp, Homo sapiens
atatagatggttttgaaaagttcatgctgtcccttcattgaattttagattgccaacactcctgatagctgaatgtgtgctggtttacatgactccagag

SEQ ID NO: 13176 - DNA, 80 bp, Homo sapiens
cctgcagactcgggccgtggccgcctacaggtggaatatgtgatcaagtgtgacatgtcagctctgcagaagattctgta

SEQ ID NO: 13177 - DNA, 74 bp, Homo sapiens
cagccccggcctctcggcctctgccggagaaacaggatggaggatgaagctgtcctggacagaggggcttcctt

SEQ ID NO: 13178 - DNA, 99 bp, Homo sapiens
atcgactacaaacggaacttgccgcgtcgaggactgtcggtcaatgcagaccctgcaggacttgctcactgatcttcatgcactccaggtcaccatcac

SEQ ID NO: 13179 - DNA, 100 bp, Homo sapiens
ccaggatcctcaacaggcactgcagcatttcagcagcgtgcaatgttgccccacgtggcgtgtatgtttgtggtaacaccacgaccacctctggtctgac

SEQ ID NO: 13180 - DNA, 82 bp, Homo sapiens
cggatctcagctccgacgcccgaggagaaggaggagtggattaagtgcattaagagaaggagaggaacgcgcggaggaagaa

SEQ ID NO: 13181 - DNA, 75 bp, Homo sapiens
gataacaccttaaacctcctctggattcaagttaaagtaacaaatgtggcaattattttggatctatcacctgtc

SEQ ID NO: 13182 - DNA, 90 bp, Homo sapiens
gaccgaacagaaacccctcctcccctagcttcactcaatgttagtaaggacttgtttacactgggcatgtaaacgaaaccatggtcaggt

SEQ ID NO: 13183 - DNA, 82 bp, Homo sapiens
agccgagttcaacatcctcctggccaccgactcctacaaggaaccctaaggactctgcaatatgaataattccctagagaac

SEQ ID NO: 13184 - DNA, 100 bp, Homo sapiens
tgtcagtggctctcttggccctcctgaaatggaggcaagtgaggcctatctggttggcctttttgaagacaccaacctgtgtgctatccatgccaaacgt

SEQ ID NO: 13185 - DNA, 89 bp, Homo sapiens
tcaattacaagttctaatgtgcatgttccagctgcagtcccaaatgcaatgagagccactatggaacaccatgccaacagaggtgttta

SEQ ID NO: 13186 - DNA, 82 bp, Homo sapiens
tctctcggacaccattttctgccgctggacgcaagcactgtgacttctgccgtgttcaccgtgggagacaacgtggtttcag

SEQ ID NO: 13187 - DNA, 75 bp, Homo sapiens
cactgataagaaatgttctcgacagcaagctgttgcttttaaaaatgccaaacagtttgagcaagcaaaagatgc

SEQ ID NO: 13188 - DNA, 75 bp, Homo sapiens
gaaactgtacattgaagcagagggtctccatcacccaactccatgcttcgagtcctgctctctgctcagacctcc

SEQ ID NO: 13189 - DNA, 100 bp, Homo sapiens
gaagagcagccagtgtttcggcttgtgccctgtatacttgaagctgccaaacaagtacggccttgctattttggaagctacaagaaaaaaatagaggaag

SEQ ID NO: 13190 - DNA, 98 bp, Homo sapiens
tggggttggtgtgattagcttcgcagtctggaaagctttaggagttcacagtggaaatgtttcaacgtgcgcaagcgttgcggcggcgggcagaggac

SEQ ID NO: 13191 - DNA, 97 bp, Homo sapiens
tcacagaaaggagtcactgccttctaacgaaagggcagtacagactttggcagaaaagacttgatggaatctacatggatgcagcctgaaagattga

SEQ ID NO: 13192 - DNA, 83 bp, Homo sapiens
ctcttcctcccttcgctcgcaccatgcgggagatacagatgacccaccaagaattactcagaaccctgtgatcaatgggaatg

SEQ ID NO: 13193 - DNA, 100 bp, Homo sapiens
attcagcctcagtgatgtccatgagtcagagcaccataacatggtgtgggaagtgaagacaaatcagatgcctaatgcagtacagaaactcctgttggtg

SEQ ID NO: 13194 - DNA, 107 bp, Homo sapiens
ccaggaatgagccagatgtttatgaaactagcgacctacctgaggatgatcaagcggagttcgatgcgttcctctgtgacgagggtgcaggtatctctggggactac

SEQ ID NO: 13195 - DNA, 99 bp, Homo sapiens
tggggctacaggcgtgtgtcactgcgcccagatctaattatcatggacctgcgacagtttcttatgtgcctgtccctgtgcacagcctttgccttgagc

SEQ ID NO: 13196 - DNA, 100 bp, Homo sapiens
tcagcctcccgccggccgtctccttaacaccgaacaccagttgtctgctggttctcagcttgaagaagattctgcagtccttattgatcctttttcttgg

SEQ ID NO: 13197 - DNA, 97 bp, Homo sapiens
ggcagcagcagcggcgggaggagcctccggggtctataacttgacccaggagttcttccggcacgataaaccagtcaatgctgaaagtcaaaatagc

SEQ ID NO: 13198 - DNA, 100 bp, Homo sapiens
atgaaataccacgacatcccggcgtgactgagcaggcttgctagctatccatgtgatgtcttctaccatgagatgacccttcccagatgctagcaccatg

SEQ ID NO: 13199 - DNA, 49 bp, Homo sapiens
aagcagcggatcatcccctttctgccagatgctgttgatggagtaatga

SEQ ID NO: 13200 - DNA, 91 bp, Homo sapiens
gcgcggcggggctgaggcggccgcggggcccgagcgcaggtactccaaagattcaggtttactcacgtcatccagcagagaatggaaagtc

SEQ ID NO: 13201 - DNA, 100 bp, Homo sapiens
ggactgtgctgtgcctctctcgcccacattttccccaagcactctcaggaacctggcaacaggtcagccctgacaaaggtcagctagccccttgaggaca

SEQ ID NO: 13202 - DNA, 75 bp, Homo sapiens
gaagaaatccaggaacaactgtgtcagcagctagcccttttcctcaaggcggcggcggcggcgcccgggagccgg

SEQ ID NO: 13203 - DNA, 100 bp, Homo sapiens
cgggacgtgcggcccagcgagttggtcggtcccggggtcacccgctacgggaagcaggcctcgccacagcctcctgcctgccctatgtcccagagaaagg

SEQ ID NO: 13204 - DNA, 75 bp, Homo sapiens
ggaacacccatatctctttagtcagtgccaggccatctggctgctgtgcacaggcgctcgtgaggctgccttccg

SEQ ID NO: 13205 - DNA, 100 bp, Homo sapiens
tggaaagtgaggaattttgaagtacaccgtggtgacattgtatcattggtggaaatcctcattgacgattcaatttgttgaaggccaatttgtggactcc

SEQ ID NO: 13206 - DNA, 100 bp, Homo sapiens
gaagaaacatctacacgcagaaatcaaagttattgggaacagtgctcggcatggcagggattccagggctcctcttccttctcttctttctgctctgtgc

SEQ ID NO: 13207 - DNA, 75 bp, Homo sapiens
aaataatatgggaaaaacatcaaattcttgaccaatctaggagaaccacacagtgtagtatatgatacaagcaat

SEQ ID NO: 13208 - DNA, 80 bp, Homo sapiens
ctggtttcggaaatgcccttacagcagcagatgccatggctagtccagggaaagataactatagaatgaaaagttataag

SEQ ID NO: 13209 - DNA, 90 bp, Homo sapiens
agaaaatagcacacttttactctacgcaactgttgctttttcatggaggaagaaggcacctacgatcaaactctggagttccgtagggga

SEQ ID NO: 13210 - DNA, 100 bp, Homo sapiens
gtgctatgtggcagagcacgaggatggtgtctactggaagtactgtgagatacctgcttgccagagttttctgtctcaactggtctctgacaagcctctg

SEQ ID NO: 13211 - DNA, 50 bp, Homo sapiens
ttcctggacccattccgactcagacctgtcatttactccatcctttatag

SEQ ID NO: 13212 - DNA, 100 bp, Homo sapiens
gccccggctctctggaccttgtctcgctcgggagcggaaacagcggcagccagagattttagtccatggagaacagaatgaaatggccagattgaaagca

SEQ ID NO: 13213 - DNA, 49 bp, Homo sapiens
gccgttttcgcctgcagctgctcaccggagtggttaatgtgttgctaac

SEQ ID NO: 13214 - DNA, 100 bp, Homo sapiens
gactcggtggtcatggtcacccaggagagtgacagcagctttctggtcaagggtgacatccagcagctgctctttgtctcggaccaccgggcagcttatg

SEQ ID NO: 13215 - DNA, 83 bp, Homo sapiens
ctgatacagcaggcgctcaccatgttccctggaggtcttgccccagaagctgcgggcacatccacgcctgaaatgcggcgctc

SEQ ID NO: 13216 - DNA, 74 bp, Homo sapiens
gaatgactggaaactgattggaaactctttgggaaagccactcgaaaagacatcaaaatttacaagctcttcgg

SEQ ID NO: 13217 - DNA, 101 bp, Homo sapiens
ctctgccgccggcgcggctcatgggcagagtcggccgggcgggccgggaattttctacttctggtcatgcttacactgatacagggaaagcatcaggcaac

SEQ ID NO: 13218 - DNA, 146 bp, Homo sapiens
tgcggcagcgaactgggtggcgaacggggcgagcctggaggattgtcactccaacctcttttcgctgctttgggatttgaatcaaaaagaatgtcgaaataccatgtttggtcatacaaattcagtcaatcactgcagattttcac

SEQ ID NO: 13219 - DNA, 75 bp, Homo sapiens
cctggcggggcctccgcgaggacgagttccacatcagtgtcatcaggcctcagctgttgaagaacgctctgcaga

SEQ ID NO: 13220 - DNA, 100 bp, Homo sapiens
gaaaagttcgttcgcaagacccgcgagaacccggtggtacccatagatgtggatgccctgctgaagaagtctgaggcccagcatgaacagccggaagatg

SEQ ID NO: 13221 - DNA, 75 bp, Homo sapiens
gcggaaaccagtggccacagcatctttgtctagccccagtgcagatgttccatttaagcagacctcttccatagc

SEQ ID NO: 13222 - DNA, 101 bp, Homo sapiens
aggtgcacttttatctttgcaatggcaagaggaaaaaaagccagtctcaacgttttacttatacaccaggacgaaaaggaggttgtgctaaagggaaagga

SEQ ID NO: 13223 - DNA, 75 bp, Homo sapiens
ccagagacgacaacccgggcctccgaggtgccttggcatctcccaatggggtggctttgctctgggctcctgttc

SEQ ID NO: 13224 - DNA, 90 bp, Homo sapiens
atcaaaacctggaccttctggattacaggccaaattagcaaaacccctgaacagtgcccaagtgttgtctctttgttgtcagagagttac

SEQ ID NO: 13225 - DNA, 95 bp, Homo sapiens
aagcctcaggtcctgggtccagagaagcaggatggatcttgcgaggttctgcggcatgaggaatttgaagaaggctgcaaagctgcctgtaatgg

SEQ ID NO: 13226 - DNA, 100 bp, Homo sapiens
ccatcccaccttcccgcaccctgggaccggcagaacgagatcttgtggcgggaggtggtgacacttcggcagagccacggtcagcagcaccgggtcattg

SEQ ID NO: 13227 - DNA, 100 bp, Homo sapiens
attttagaagtgggctggctatagtgagccaacatgatttagaccagggagaagatgtcaaccggacactagaaggtggaaggaaacctcttcattatgc

SEQ ID NO: 13228 - DNA, 90 bp, Homo sapiens
gccaaagataacacctgtgacagttaaagctcagactaaagcccctcccaaaccagatgagctccttcaggagcagcgtgcagatatgga

SEQ ID NO: 13229 - DNA, 75 bp, Homo sapiens
cctcggacgtccactgcaccctgcgcgagaaggtaaattaaaagatcttgggaacttggttctccgaccttttgg

SEQ ID NO: 13230 - DNA, 75 bp, Homo sapiens
gcgggagcggcggtgatggacgggtccggggagcagcccagaggcgggggccacccgggaccttgcccagtacga

SEQ ID NO: 13231 - DNA, 75 bp, Homo sapiens
cgctagccaagctgtcctgcctggcattccaagaatcaagcactacaaagtgatgagcgtaggacaaaactacac

SEQ ID NO: 13232 - DNA, 51 bp, Homo sapiens
agctcatgaagactgtgtaaataatatcagtgttcaagagacctatgaagc

SEQ ID NO: 13233 - DNA, 75 bp, Homo sapiens
ccagttagtggatatagcacaccatccccagccaatggagaaggaggagacaacccgggagctgctgctgcccaa

SEQ ID NO: 13234 - DNA, 99 bp, Homo sapiens
aggctttatgggagcatgggttaccagcgacgcaccctgtctgctgacatttgtgaactgtgcctatgtcaagtggggcacacgtgtgcaggacacgtt

SEQ ID NO: 13235 - DNA, 75 bp, Homo sapiens
ttgaatatttcagaaaagatccaagaccattcttcaagtttgcaaagactgggagtcttggtgtgaaattgagga

SEQ ID NO: 13236 - DNA, 75 bp, Homo sapiens
ggactcacagctgatgacctgctgctcgtgctgatctcaggtgtgaacccacatccctgcccccagggccacctg

SEQ ID NO: 13237 - DNA, 75 bp, Homo sapiens
gtttgccgtggtttttatcaccacacgactgggtatatttcctctctggtatgttccagaacaaaaagaacacag

SEQ ID NO: 13238 - DNA, 88 bp, Homo sapiens
tctccaaattgactcaactccaggtaacaaacctgaatttggcaactggcatcataaacagaagcagtgcttcagctcccccaaccct

SEQ ID NO: 13239 - DNA, 100 bp, Homo sapiens
gcagaaaatagcacacttttactctacgcaactgttgctttttcatggttgcccgaagctcagcagagagtcggaggctgctttttaaacctgatgccac

SEQ ID NO: 13240 - DNA, 74 bp, Homo sapiens
tagaagaccagaagtggatggagatcgactcctttacatctagcagcgggctacaacagagttcgaatagttca

SEQ ID NO: 13241 - DNA, 97 bp, Homo sapiens
ctcaggaggtctggcagctgctaagagcaaatttttcagaacataaaacaagaatatagtcgttatcagaggtggagacatttagaagttgttctta

SEQ ID NO: 13242 - DNA, 75 bp, Homo sapiens
ccgcctctggcacagcccatcagggagaaagagcagattcttctaacagagaaaatgccattgaggatgaagagg

SEQ ID NO: 13243 - DNA, 50 bp, Homo sapiens
tcgaagggacagagaaggacgcaccatttttcagtggcgattctccagag

SEQ ID NO: 13244 - DNA, 139 bp, Homo sapiens
gatccttggaaaaaatctgaaagtgataaaataatatgggaaaaacatcaaattcttgaccaatctaggcacttttccagccattaactccaggctctcgagaatttgaagatgttgtaaatattctccattcttctta

SEQ ID NO: 13245 - DNA, 75 bp, Homo sapiens
ccgagggggaagcacgatttacggaagtggcttacagaagagacgaaatgtggtctgagggacgatatgaatatg

SEQ ID NO: 13246 - DNA, 50 bp, Homo sapiens
cagaaacagaaacgattgtggaaacagatctgactgcagccatgagcagc

SEQ ID NO: 13247 - DNA, 75 bp, Homo sapiens
tggctggcagtcaggacatattcgatgccatcgtgatggcggatgagagatgcagagcaaagcggcagtccccgg

SEQ ID NO: 13248 - DNA, 50 bp, Homo sapiens
ggggaaagcctggagtcctggctcaggcaaaataacatggcagccagacg

SEQ ID NO: 13249 - DNA, 89 bp, Homo sapiens
tcggggctccagtggagagttcttacgatggactcaccctgtcacccaggttggactgcactggcctcaacctcctgagttcaagtgat

SEQ ID NO: 13250 - DNA, 100 bp, Homo sapiens
ggactatgctgaccgagaggcacgagaactctggtcccggctacaggatgaagatgcatcagggggcgatcaagatcaggaagaaagaagatggaacaaa

SEQ ID NO: 13251 - DNA, 74 bp, Homo sapiens
ttgaagatacatgagacagcagccaaacccccaggtggttgtgtcaaaccgattggtgacatctccatgctgta

SEQ ID NO: 13252 - DNA, 50 bp, Homo sapiens
gatacttctatttcagttacgaggtgtgatgaatgcagactctgctacca

SEQ ID NO: 13253 - DNA, 127 bp, Homo sapiens
gccggctatggagcttaccgtgtctccaatgacaaacgagatgtaaaagtgtcactgtgtcttgggcgtctttggtactggcttttttaggggtctgcctggggattacccttgctgtggatagaag

SEQ ID NO: 13254 - DNA, 109 bp, Homo sapiens
agttataacgctacacgaagaactaagaatattattagcacaagagcaccatactttgaggagtttgctctccaaagctcggggaattgattccagctctgttaaactc

SEQ ID NO: 13255 - DNA, 80 bp, Homo sapiens
ttgggagatccaagagattcagtatcactcgctcccttgatgatcttgaggtggtattaaagataatcaaacattatcaa

SEQ ID NO: 13256 - DNA, 75 bp, Homo sapiens
agcgaatttttggagcatctccacccaggaacctcgccatccagaagttgggcccgaaggcatcctgcagaacgg

SEQ ID NO: 13257 - DNA, 100 bp, Homo sapiens
gaaggtggagccaccagcctctccttgatcatggaagggaagtggttgctgtgtatgttactggtgcttggaactgctattgttgaggctcatgatggac

SEQ ID NO: 13258 - DNA, 78 bp, Homo sapiens
ctcaccctcatctatatcctttggcagctcacaggaacagctggacgtagctctttccaaaatctgcaagaattttga

SEQ ID NO: 13259 - DNA, 83 bp, Homo sapiens
ttcaaaaaggataaggagatcatagcagagtacgatactcaggtcaaagacaatgcagatcttcgtgaagactctgactggta

SEQ ID NO: 13260 - DNA, 75 bp, Homo sapiens
gggtggttttcctgaagcagctggctagtggcttattacttgtgactgatcatacatctgtcggtggcctgggag

SEQ ID NO: 13261 - DNA, 87 bp, Homo sapiens
gaacattgcagtctgtgtggaattccgggattcagatgaaagtgacgctagtgccctaaagagtcgacttcaatgttcctatgaaga

SEQ ID NO: 13262 - DNA, 74 bp, Homo sapiens
cggtgaagaaggaagggggtgctctgagggatcgcttacacctgagacgaactacagaacagcacgtaccagag

SEQ ID NO: 13263 - DNA, 100 bp, Homo sapiens
actgcagccggagcccgggaggggccgcgccgccaccgtctgaactaggatgtcccgacatgaagtcgcagatatggccagtacactatgaaccaggaaa

SEQ ID NO: 13264 - DNA, 82 bp, Homo sapiens
acagtcaaagcaacagaaacaaaagcaggcaaatggagtcgttgggaatgttaaagcagtaaagttgggtcatattctggta

SEQ ID NO: 13265 - DNA, 90 bp, Homo sapiens
cctggtgatcggctccttaccagctcacctctcaccgcgcatgtttggagtgttaaaagatcactgaagttggatggtctgttagaagaa

SEQ ID NO: 13266 - DNA, 100 bp, Homo sapiens
gaaaaattcaagaagttgaaaaacgcttttcacgtcacctggagagatgcacagggccaattcctgtccccccagcagcatggcatcgtgtgctgaaccc

SEQ ID NO: 13267 - DNA, 80 bp, Homo sapiens
cagaccaagttccctgcggagctggagaaccggcggagtttaagagagctgtgaaagtagcaacaggacaagaactctca

SEQ ID NO: 13268 - DNA, 82 bp, Homo sapiens
ccccgccgctgagccgtcgcggagccgcgcagccctcggagcacggcaccatgactcctgtgaggatgcagcactccctggc

SEQ ID NO: 13269 - DNA, 78 bp, Homo sapiens
aaagagtaaagttgtgctcaacgtggaaattgatgacttgaaaaaaattaccaattcactgactgtgctttgcagtga

SEQ ID NO: 13270 - DNA, 111 bp, Homo sapiens
caacggccaacttcggcaagatccagatcgggatttacgtggagatcaagcgcagcgatgatgagcagcaccagcagtaagagggctccgaccacggcaacccagaggctg

SEQ ID NO: 13271 - DNA, 96 bp, Homo sapiens
gaaaaaggagggaaaaatatccagcaaaaccgctgctaaattgtcaactagtgctaaaagcacttttcaggattagaagaggctgtgtatagaaac

SEQ ID NO: 13272 - DNA, 90 bp, Homo sapiens
cgacttcaacaagaacctgaacgaggacacgaccttcctgcccttcacgctccaggagctaggtgctaagtgtggtggctcacacctgta

SEQ ID NO: 13273 - DNA, 100 bp, Homo sapiens
cgctgatcagagacatgcttcgacgaattaaggcatccaggctggagaagcagaacagcacacctgagagtgactacgacaacactcccaacgacatgga

SEQ ID NO: 13274 - DNA, 82 bp, Homo sapiens
ctggtggctctacccagaattcaattaaagtggctcagacttaattcagtgcacaaatgagatgaatgtgaacatcccacag

SEQ ID NO: 13275 - DNA, 90 bp, Homo sapiens
ctatgacttactcaccattgctcttggaagaagaggccagtatgagatgctgtcagaggcctcccgaggagcccagacagctgcagccac

SEQ ID NO: 13276 - DNA, 100 bp, Homo sapiens
cagaggagtttcggctcagtggggaggccttcgactggctgcttggggagattgagtccaagttcaaccaagccattggtgtggatggcgtcataaaaag

SEQ ID NO: 13277 - DNA, 100 bp, Homo sapiens
aagggaaggcgcgagtgaggaaaggaggtactgtagatggaacgctgagcttatcctgtgtggcctgcagccgcttccccaacttcagcatcctctactg

SEQ ID NO: 13278 - DNA, 95 bp, Homo sapiens
aggagttgtttgaagtgacatcctgttatttccctatcgattttacccctgtgcaccttcgctctgccaggcgtctctgtgagctctgctgtgcc

SEQ ID NO: 13279 - DNA, 89 bp, Homo sapiens
ggaaaagagccctggatgattttgagggaagaaacacagttcacaggaaagagacggctttggaggcctggcagcagccagaggaagag

SEQ ID NO: 13280 - DNA, 100 bp, Homo sapiens
cagcccaagaaacatctcaccaatttcaaatccggctactgctgcttcaagacagtgacgtttctctccggtcagctgtcaggagcgctggtgagcttcc

SEQ ID NO: 13281 - DNA, 74 bp, Homo sapiens
tccatcaggtacaacctcgaggagctctaccagggccagtggggagtgacggcagcagaggaagaggaggaaaa

SEQ ID NO: 13282 - DNA, 74 bp, Homo sapiens
cagatggattaaaagaaaaaataagaagtggctccaaacatgttgggggccgtcccgctcctaaggcaggaaga

SEQ ID NO: 13283 - DNA, 50 bp, Homo sapiens
gagaaaatgaatgccaaatgggacacggaactgcaagcacatgttgacca

SEQ ID NO: 13284 - DNA, 82 bp, Homo sapiens
aaactgcaggcacaagtgcgcattggtgggaaacagcagtgttgtactgctacttctataaacggacagccgtaagactagg

SEQ ID NO: 13285 - DNA, 100 bp, Homo sapiens
cagcggctggagaagtatccagatgagaagtcggtgtgcctccggggctgccccaagagggagcactatgtctgcggaagtccccgaggcagcctccgcg

SEQ ID NO: 13286 - DNA, 83 bp, Homo sapiens
attcaagattatttgcaacagctcacgggagcaagaacgatgtgtatatctcatgattgatatggagaaactagtcatgggcc

SEQ ID NO: 13287 - DNA, 96 bp, Homo sapiens
aaaagagtgaggaactgagaaacatggatggccttgggaacgtggaaaagaaaatatttacaccagcagctccagttcataccaataaagaagatc

SEQ ID NO: 13288 - DNA, 87 bp, Homo sapiens
caatcttcaggaaagtaagagggtgaaatgacaatggatgctctgttggctcgattgaaacttctgaatccagatgaccttagagaa

SEQ ID NO: 13289 - DNA, 96 bp, Homo sapiens
gggagtaaaccacagactacgagggagtttgacagctattaaaaccagggctccacagttaggaggtgattaaaaattctggccatctcccaagag

SEQ ID NO: 13290 - DNA, 100 bp, Homo sapiens
gacatggatgatgagcgccttaaggatctctttggcaagtttggtgcttttgaagatgatgatatcacgcacgttgaaggaagtgtagatcctattcgag

SEQ ID NO: 13291 - DNA, 110 bp, Homo sapiens
actatcggggccgcactgtggtattcgccggcacgcgaagtggccgcatccgcaagctcctgaggaagcggcacattggaaatgatatcgtaacaattgttttccaagag

SEQ ID NO: 13292 - DNA, 80 bp, Homo sapiens
tttatttttccccaattcagcagagaatattttcaaggggggaatgtatcctgtcaggtataatgtcagtgaatggcaag

SEQ ID NO: 13293 - DNA, 83 bp, Homo sapiens
cactatggaattctaatttgaaccatgtttggattgaagccgcctctgtattacttaccagtaacctttggaaacatcagaag

SEQ ID NO: 13294 - DNA, 100 bp, Homo sapiens
tattttgcaccactggatgttgtttactgatttgtgacattatttccaaatgggaacaggcttccaaagaacagcagcctggaaaatgtgaaggtacaag

SEQ ID NO: 13295 - DNA, 75 bp, Homo sapiens
agagagaccataattatgaatcaaattctgccttatataaaggggcaactacatcacgtacaaagacggggaggt

SEQ ID NO: 13296 - DNA, 82 bp, Homo sapiens
cctagtgtaccttctactcatctgccggcagggccagacctgcctagagctggaacgttacctccagagcgagccctgctat

SEQ ID NO: 13297 - DNA, 73 bp, Homo sapiens
gaaagaagacaagcccacacttccagaaatttcagcctccagggtcgtatagacctccccctcctatgggcaa

SEQ ID NO: 13298 - DNA, 75 bp, Homo sapiens
ggaggtgaagaagtttgtgaagatcggccgcccgggctacaaagagcccagaacgcttcctccagcttggcgcca

SEQ ID NO: 13299 - DNA, 50 bp, Homo sapiens
cacaaatgcacgcgacaggaaccaggtatgcaaccactcatgtattcggt

SEQ ID NO: 13300 - DNA, 50 bp, Homo sapiens
cccacccaaggctaaaggcagagccaggacaaccctccatatgataaggg

SEQ ID NO: 13301 - DNA, 83 bp, Homo sapiens
gccaattctgcgcttctcagtaactacgagttttgaatcaggaaattgaagcgttcagtctgtccgaagacacttcatcgggg

SEQ ID NO: 13302 - DNA, 75 bp, Homo sapiens
ctatccccagtggagccggagtgcgggcgcgccccaccaccgccctcaccatgctgaagaaatcaggggagaaac

SEQ ID NO: 13303 - DNA, 100 bp, Homo sapiens
ccatcactctgcatggttgaccgttctggaagggtcaaaagcggctggtgctttccgaaagctgctcccgggactccatgagcagtcagcctagttgtac

SEQ ID NO: 13304 - DNA, 104 bp, Homo sapiens
gctacacctcccgatggtatcatctctcctgtggggaacatttctgtaatgaatgctttgaccattactacagaagcctgaactctttgcttccggaatccggg

SEQ ID NO: 13305 - DNA, 100 bp, Homo sapiens
aagctgtggaaggctctggataaggaccagtacctgcccaggaaactggttcatgccagaacccaacctgcctcccctggtgctctacgacgccacatct

SEQ ID NO: 13306 - DNA, 74 bp, Homo sapiens
accgaagcatcactcgagaccccaaacctccaggccttcacccaggccagctccctcatcgcccacgtgcgcca

SEQ ID NO: 13307 - DNA, 82 bp, Homo sapiens
ccagagactgctgagcccgtccgtccgccgccaccacccactccggacacaggtaagtaaggaggtctctgtaccatggctc

SEQ ID NO: 13308 - DNA, 99 bp, Homo sapiens
gggctccccccttactccccagtgttcaaatcctggattcactgctggaagtacctgagtgtgcaggttggaaagggcaaagaaattacaagaacagcg

SEQ ID NO: 13309 - DNA, 100 bp, Homo sapiens
gtccgattgcgttatttcttctactccagtggtgagaaggaaaatcctgccttgcttcgttgggcctatgcaagaacaataaatgtctatcctaatttca

SEQ ID NO: 13310 - DNA, 101 bp, Homo sapiens
ttccagaaaggtcctgtatgttaactggaacacctgaatctgtccatgaacagcagagaatttcaaaggaccttgctaatatctgtaagacggcagctaca

SEQ ID NO: 13311 - DNA, 73 bp, Homo sapiens
ttggggtcacggtgtttgccgtggggaagtacccaagatattgtatttggagaagtagatcggtgagcagggg

SEQ ID NO: 13312 - DNA, 100 bp, Homo sapiens
ctcgatgaggataacatccctccagaagatggtgctgccgcatgatagcaaagctcgacgactttttgtaacaagtggtggccttaaaaaagttcaagag

SEQ ID NO: 13313 - DNA, 83 bp, Homo sapiens
tggagcggctgcagctacagtccgggaacttctgcaggacgggacatcgatggagtgttgcagcgagcaaatagtacagagta

SEQ ID NO: 13314 - DNA, 83 bp, Homo sapiens
tcaatttcaacaaactggtgctggtcaattacccattcattgatgtggggttggctgatcaagttgagaattgccatcttgac

SEQ ID NO: 13315 - DNA, 74 bp, Homo sapiens
gaatcgtatcgtatgtccgctatccagaacctccactctttcgtgcgcaggaccattgtcaagatcccttctac

SEQ ID NO: 13316 - DNA, 98 bp, Homo sapiens
caagatgctatgtgagatcttgaaagtgggcgagttgcgcctatatgaacccaatagcaatggcgagatcaaggggtccaatccagtcttcagggcca

SEQ ID NO: 13317 - DNA, 111 bp, Homo sapiens
tgcggtcgggccaaggttccgcgccgggcgtggacggtgtggggcggtcccggccccgcagggcatgacgtccttgatgaaggccgcgctggacctcacctaccccatcac

SEQ ID NO: 13318 - DNA, 100 bp, Homo sapiens
cctgaggcctccccagccacgctttctgtacagcctgcagaacttttctgtagaaaatgtttcctgactgcaatgagggaaagcggagcacattgtcccc

SEQ ID NO: 13319 - DNA, 98 bp, Homo sapiens
tgttgtgcctcggcagctgggagctgctcccggaactgaccaaccctgatgagctactgtcctacttgggcccacccgacctccctacgaacaacaat

SEQ ID NO: 13320 - DNA, 83 bp, Homo sapiens
gtccgcaccgggaccggagaggaagcggagctacccgtacagtgaggacgcccgccagggtgagcagtacatgaacacccggt

SEQ ID NO: 13321 - DNA, 50 bp, Homo sapiens
cgacccgtccaccgtgcgccctgtggcaatgcccgtgctgaagcagctgg

SEQ ID NO: 13322 - DNA, 95 bp, Homo sapiens
gagggagagagacagcgatcgagagagaccggagaggtggagaggagtcagtgaccttcaaggatgtgtccatagatttctcttgggaagagtgg

SEQ ID NO: 13323 - DNA, 98 bp, Homo sapiens
ggctgaggagttttcaatcccagttgtaggaagtgtcctgtattttactaatttttgccttgataaattggggcaaccgcttctaaatgaaaaccctc

SEQ ID NO: 13324 - DNA, 98 bp, Homo sapiens
agaagatcgaaaattaaacctcaggcaatggtggcttgctatccgggaaatggaacaggttatgttcgccacgtggacaaccccaacggtgatggtcg

SEQ ID NO: 13325 - DNA, 97 bp, Homo sapiens
aaattttcaagtgccaaacggaggaatacctcgtatgcaacctcaggcttcagccagtgtcatggagaaactccagctgggcccagagattctgcag

SEQ ID NO: 13326 - DNA, 98 bp, Homo sapiens
ctcaccctcgcccgacccctcaaggagccctcagatatgctttcttcatcagcaagcagtcctgctcctgatcccgcccctgaacctgatcctgcttc

SEQ ID NO: 13327 - DNA, 100 bp, Homo sapiens
gctgggcaagggcaacttcgctgtggtgaagctggggcggcaccggatcaccaagacggaggttttacaagatgaattagaaaaccgttctaatcaggtg

SEQ ID NO: 13328 - DNA, 54 bp, Homo sapiens
agcaactgggattgagtcgttggaagattttgcaagaatttatcaggatcaagg

SEQ ID NO: 13329 - DNA, 99 bp, Homo sapiens
cttgaagctgccgctgtcgctgctgctcgttcgagtcgcagtgttccttgcctgtatctccccttggttcaatagctaccagatttttggaagaggagg

SEQ ID NO: 13330 - DNA, 76 bp, Homo sapiens
acctgccttatgattgggcagaaactcccacccatggaagctgaaactaggattgaaccagctgccctttgaccct

SEQ ID NO: 13331 - DNA, 90 bp, Homo sapiens
tgagaacaactacacgttacgctattcgttgtggtccaaaacagtttacctcttatctaacagcatcaattcctgaagattgccaagccc

SEQ ID NO: 13332 - DNA, 75 bp, Homo sapiens
atcaaagatgccttgccatcgcatttgaaaactttgcttttagaaagaaatcctatcaaaatgttacctgtggag

SEQ ID NO: 13333 - DNA, 82 bp, Homo sapiens
gtcgacccggcctggcgccggactagcccagtggttcccagacacaggtaatcttgggcacctccaagagcaaagtttagga

SEQ ID NO: 13334 - DNA, 74 bp, Homo sapiens
caaagaaattcaacggcagatatatctattgggtggcagtagagaagagcatcacagaagttgctcaggagctg

SEQ ID NO: 13335 - DNA, 88 bp, Homo sapiens
atattttcatccctgaggttaacaattaccatcaaaatgttttgtggagactatgttactctaggcacaatcggtgtcaatcgctctc

SEQ ID NO: 13336 - DNA, 75 bp, Homo sapiens
tggtatttcgaaggactctatccaacctattatatgaacctcgagccagttactcagctgtatgtcagtgtggat

SEQ ID NO: 13337 - DNA, 75 bp, Homo sapiens
aacgcgagtgggagcaccaggatctcgggctcggaacgagactgcacgtggaggcaatgttcactgcaatgtgcg

SEQ ID NO: 13338 - DNA, 101 bp, Homo sapiens
gggagatccacagctaagacgccgggactccctggaaacctagaaatggcaccaagtatagatgagaaagtagatcttcattttattgcattagttcatgt

SEQ ID NO: 13339 - DNA, 75 bp, Homo sapiens
gtcctgaccaccgtgaacggacagtcccccccagttggaggctggcagcgaagaagatcgaaaattaaacctcag

SEQ ID NO: 13340 - DNA, 120 bp, Homo sapiens
gaagtcgcaccctcctcctccggagaagtagagaaataaatttctcccaccctaaaccaggtcctgcaaccctggttccagtctggcaagcattgtagacctggctgctgaagactgacg

SEQ ID NO: 13341 - DNA, 100 bp, Homo sapiens
cctgggtccgcttcgtgttcctcgctcgccccacaggacttcgcaggtgagcagtaacggaaatcagccccgtttattcctcccagcacctgccttatcc

SEQ ID NO: 13342 - DNA, 98 bp, Homo sapiens
ggggatggggcagaggacgaggagtggctggctctgaagcaccgacaaggcaagaatcacaagatgcgcatcattgcctttgtgggaagcccagtgga

SEQ ID NO: 13343 - DNA, 49 bp, Homo sapiens
ttcagaagcacatgtattataacagaaagatcaactgaaatcggcaaac

SEQ ID NO: 13344 - DNA, 95 bp, Homo sapiens
agatgaagattcattgaagacgcttcgttatgggaagataatgattatgacagatcaggcaccaagagctgctttgaaacaaaagaagaagttct

SEQ ID NO: 13345 - DNA, 100 bp, Homo sapiens
ctctcaccgcgcatgtttggagagcctcattcattcagatataagaacaggaggaaagagtccattgacgtgaaatcgatatcatctcgaggcagtgatg

SEQ ID NO: 13346 - DNA, 100 bp, Homo sapiens
ccagcctggataatgattgagccacctgtccagcagtatcctggtgtgaaccagctatcctccagtataggaggattgagtcttcagagttctccacaac

SEQ ID NO: 13347 - DNA, 82 bp, Homo sapiens
cgcgtcccgctcgctgggagagagggttttggccaaattgggcgagggcacaaaataaccacttaccccttctcaccgagga

SEQ ID NO: 13348 - DNA, 100 bp, Homo sapiens
agcaggtcaaccccgaggagatccagctgggcgaggacgaggacgaggacgagatggacctggagcccaacggccaaagcctcactgtttcaattgtggt

SEQ ID NO: 13349 - DNA, 100 bp, Homo sapiens
caggaagagggactggaaccatctcagaagccatgcccctcaggctggaacttgccctgtctcctcgcagatgagtttggtgaggattcatcaacctcca

SEQ ID NO: 13350 - DNA, 97 bp, Homo sapiens
ccccggcccaagggcgacttctccagccgggcccgcgaagtggcggtggagtacaacatcttcgagggtatggagtgccacggctccccactagtgg

SEQ ID NO: 13351 - DNA, 74 bp, Homo sapiens
aaggtctctcgcgggcgggagaacggaaaactcccaacttcctgttaactgcctgtatccatggatcagctgct

SEQ ID NO: 13352 - DNA, 99 bp, Homo sapiens
aaaactgaaggagacagaagcagccatggaaaaattaatcaacagagtgggacctaatggtgagaggcccaagttgttttacaaggcaaatccagaagt

SEQ ID NO: 13353 - DNA, 99 bp, Homo sapiens
agacgaacctggcggcctatgtgcccctgctgacccagggctgggcggagatcctggtccggaggcccacagtgggtcctggccttcgagatcttcatc

SEQ ID NO: 13354 - DNA, 50 bp, Homo sapiens
cttcaaggacgcagccacagaggatcaggagaaggtctggggaaaataat

SEQ ID NO: 13355 - DNA, 100 bp, Homo sapiens
gcgcaactccttgaaggaactgtggcttgtgatccatgggcgagtctacgatgtcacccgcttcctcaacgagaacactgagctgaaggttgaagtggag

SEQ ID NO: 13356 - DNA, 100 bp, Homo sapiens
ctggatcctcactctctccgatactttctcccaagtgccggtggtggtgtgcacattgagccccggtatagacagttcccccagctgaccagatcccagg

SEQ ID NO: 13357 - DNA, 83 bp, Homo sapiens
tgtttcatcgttttttctactccaaatctttcgtcaaacacagtttcgaggtgtgagccatgcaatgggagggagaggaggaa

SEQ ID NO: 13358 - DNA, 100 bp, Homo sapiens
aacaagatgtatcacctatagaaagaaatgagcagctttggataatgacgacagcaacccgaagacagggaaatttagacacatcatctcagagttggag

SEQ ID NO: 13359 - DNA, 90 bp, Homo sapiens
acagctgctggtatcaaccgggctcccagccctagaccagctcttagttcatcagagaagatatgaaatataaagatgctactaataaac

SEQ ID NO: 13360 - DNA, 75 bp, Homo sapiens
cagacaacaatagtaatacactcttacccttacagggagctcactcagtgggtttgatgtggtggatgctggctc

SEQ ID NO: 13361 - DNA, 100 bp, Homo sapiens
cgaagttcttgctgagctggtattggcggaaggcggtttggatggtgcaagcggcgcgccgggacaccaggcggtggaagcagggcagagccgaagcagc

SEQ ID NO: 13362 - DNA, 75 bp, Homo sapiens
gaagatgaagaaacccagcttgatatgttggacacattcagctaacgtattttagcaggtggagtgaggttgaag

SEQ ID NO: 13363 - DNA, 98 bp, Homo sapiens
tatagcctcaaactcccaggctcaagcaatcctaccatgtcagccttcccagtagctggaactacaggttattgttcaaaactacaactccattttga

SEQ ID NO: 13364 - DNA, 96 bp, Homo sapiens
ctgggagtgttgactgctgcaaggaccaaggtgggaattgctgtgctaccatctggaaacagtgttgacagctcttctaccacaagcagtgcttct

SEQ ID NO: 13365 - DNA, 90 bp, Homo sapiens
ggggcaagtttatacgggcaacaaagtttatgaaggcgagcgtgccatgacaaaggataacaacctgcttggcaagtttgaactcacagg

SEQ ID NO: 13366 - DNA, 100 bp, Homo sapiens
ctgcaaagttttttcagccagtataagaaacccatctgtcagggtgcagttctacctcaagaaataagccaagtaaatcaacatcataaatctggcttta

SEQ ID NO: 13367 - DNA, 82 bp, Homo sapiens
ggcttctttcctgccaccgtgcagccccacaaggatgccggctccaggagcagcagtggaggtcgggaacgcctcattgtgg

SEQ ID NO: 13368 - DNA, 100 bp, Homo sapiens
gccggcgggaccagcacaggcggcgttttctccttcggaacgggagcgtctagtagaacttcatggaggaacacggagtgacccaaaccgaacatatggc

SEQ ID NO: 13369 - DNA, 83 bp, Homo sapiens
ttcagtggccctgtacgacatccggactggaaaatgtcagcttttggaaagaacaaacagtggatttgaagaatcagattctg

SEQ ID NO: 13370 - DNA, 50 bp, Homo sapiens
actcaccactccatggccacacaggtacggttgacatttagggatgtggc

SEQ ID NO: 13371 - DNA, 100 bp, Homo sapiens
ttagaaaggagacccgactgcaactgctggattgctgcaaggctgagggacgagaacgagggcaacacaactatttatgtgctggaagaaatgattgcat

SEQ ID NO: 13372 - DNA, 83 bp, Homo sapiens
aaaaccgacctgaggtttcagagcgcagccatcggtgcgctgcaggatggggaatttagcatggatcttcgtaccaagagcac

SEQ ID NO: 13373 - DNA, 82 bp, Homo sapiens
cagccctcagtttctggagctgttccgagataacgaaggaggcccaacttcattcaataaggagcctgacggatttatccca

SEQ ID NO: 13374 - DNA, 80 bp, Homo sapiens
actgttcacttacacagtatttaaatggcccaggtcaacaggacatactgctgtggcacctaccgagcaggtcctatgcg

SEQ ID NO: 13375 - DNA, 88 bp, Homo sapiens
gacttcgcctttcccgagccctggaggtggggagaaaaggggccaaaccagtgctcctgccacctctctggctgccccctagagcctg

SEQ ID NO: 13376 - DNA, 100 bp, Homo sapiens
ctgcctacctgtcagccgtgggcaccttcacctgggtctgcacgccctttctgatcagcggtttgagtgctacgtttgcagaaattttcttggaaataat

SEQ ID NO: 13377 - DNA, 100 bp, Homo sapiens
gtggcccagagattctcacgttccctaggtttgtggagtcccagaaggatcccgagaacagccctgtggtgctttggctcaatgggggtcccggctgcag

SEQ ID NO: 13378 - DNA, 76 bp, Homo sapiens
aaattcccagaggactttggagaccagccgggaagatttccagaggattccagaacttgccatcaacccactgggg

SEQ ID NO: 13379 - DNA, 90 bp, Homo sapiens
tggagtccccactgcgcgctgggctggctgcaggctgagctagaagaggcggagcaggaggcagagttttatgacgagacagaagcccgg

SEQ ID NO: 13380 - DNA, 100 bp, Homo sapiens
cttcttcgcagaccagcccatccagatctatgagaagatcgtctctgggaaggatgaatttgacaagctgaggcctctctgctacaccaacacagacatc

SEQ ID NO: 13381 - DNA, 80 bp, Homo sapiens
ccgtgattctgaggcctccccaaccatgtgcaattccaacacaagccatcagccccatgctcagctcccagcaggcagag

SEQ ID NO: 13382 - DNA, 100 bp, Homo sapiens
tcaagagtggaagttttcacaggttggattatctcaagatgcccaggatcaaatgagaaagatgctttgccaaaaagaatctaattacatccgtcttaaa

SEQ ID NO: 13383 - DNA, 100 bp, Homo sapiens
gaagaaaatgggtttctagtaatcaaaaatcttgtacctgatgccgatattcaacgctttcgattgatgtggacatcttcgagccccaggggatcagcaa

SEQ ID NO: 13384 - DNA, 83 bp, Homo sapiens
cgacagagctgagccaagcgtttactgggcagctgttacgtttggtgccctggttgtcagatgttggaaagcagtaggacgga

SEQ ID NO: 13385 - DNA, 51 bp, Homo sapiens
cctgtgagatgtttcatcccaacagtgaccattgtgaggtagatattttgt

SEQ ID NO: 13386 - DNA, 100 bp, Homo sapiens
ctcgggcaaggatggtggaggcgagaacactgaggaggcccagaaataccgggacttccagcacctgctaaaccgcacactggaagtggccctcttgctg

SEQ ID NO: 13387 - DNA, 99 bp, Homo sapiens
tatctatattttttgactgctctgctcctctatgctggacatcaaatttccagatgtccctggtagatttgggaaagaagcttttagaagcggcacgag

SEQ ID NO: 13388 - DNA, 75 bp, Homo sapiens
cgcctatgtgaaaaacctgaagaaggggctgcaggagaaagctgcagacaccatcgaggccctgcagaaggccgg

SEQ ID NO: 13389 - DNA, 49 bp, Homo sapiens
cagcctcccgagtaactgggactacagagtaaagacaagattgcatcct

SEQ ID NO: 13390 - DNA, 74 bp, Homo sapiens
tgcagatcccggaatgcctgaaccaactgttttgaggtgctggatagtttactagtccagtatggagtggtgga

SEQ ID NO: 13391 - DNA, 99 bp, Homo sapiens
tgaagattttgtggtttatacttacaacaaggaagggactttaatcactgaccatcccaatatacagacatatctgaagagatggattaagaatgcttt

SEQ ID NO: 13392 - DNA, 101 bp, Homo sapiens
tcttgggaatcacttctttgccatctgttagcaatgcagtcaactggagagagttccgatttgtccagtatggaggggctcccggagggcctgcgtttccc

SEQ ID NO: 13393 - DNA, 50 bp, Homo sapiens
atcagataaagagccaggagcagctggctggatctccagaactgttctct

SEQ ID NO: 13394 - DNA, 98 bp, Homo sapiens
tcccgaggagctgggattacaggacttggatgttgtgggtgatggtatgcagtgtcctccttcacctttgctttttgatccttcactaacccttgaag

SEQ ID NO: 13395 - DNA, 100 bp, Homo sapiens
tggaaatcgacttcggtttcagttggagttggaatttgtgcaatgtttagccaacccaaattaccttaattatggactcaccctgtcacccaggttggac

SEQ ID NO: 13396 - DNA, 83 bp, Homo sapiens
ctccctctgcccccccttccccacgcaaccccagatccatttacactttacaggcagtctgaagatggccaattacacgctgg

SEQ ID NO: 13397 - DNA, 82 bp, Homo sapiens
tggggactacgacgtccctcaaaccttgcttctaggagataaaaagccgaggaggagctggtggaggctgacgaggcgggca

SEQ ID NO: 13398 - DNA, 98 bp, Homo sapiens
caccatgagccatggccatgtccgtgagcgccgaggacgacgactatgaatcggagccggaccaggttatgaagacagtatggagtttccagaccata

SEQ ID NO: 13399 - DNA, 76 bp, Homo sapiens
ccggcaccgcgcctgctgccgggttgcgctccgtgcacctcttgcggacttgtggaagaaagcaaactgatcccac

SEQ ID NO: 13400 - DNA, 101 bp, Homo sapiens
aaattgctatgatgaaaccaaaaggccagactgaacacgatgagggtggggcaagtccgtgggcatcatgttgaccgagctggagaaagccttgaactcta

SEQ ID NO: 13401 - DNA, 83 bp, Homo sapiens
tatggcatggacaatcacagtggtggtggtgggggtagcagcaattctgtggtgttcttggtcacacatttatggagtttctg

SEQ ID NO: 13402 - DNA, 71 bp, Homo sapiens
ctacagtgccacagacacaaggccagaccacagtcttactactttgaccgcgatgatgtggctttgaagaa

SEQ ID NO: 13403 - DNA, 100 bp, Homo sapiens
cagccggctgggctcggtattccccttcctgctagtcctggtggatctgcagtacgaagcctcctgacaaggtgatccgggcgggccccgcaggaatttt

SEQ ID NO: 13404 - DNA, 97 bp, Homo sapiens
gaagaagttgcggagaactttgtcggagagtttcagtcgcattggttacttgtctgcaagacttttttggtgatgacgatgtttttattgcatgtgg

SEQ ID NO: 13405 - DNA, 100 bp, Homo sapiens
agttccactcactcagcaccatcccagatgattacctctgccccttccagtgcccgagataatcagcaactgctgtgatgagatgctgcctttaatgctg

SEQ ID NO: 13406 - DNA, 76 bp, Homo sapiens
cttcaagacgacagttctggagggtatggagacggccaagcatcaggtggaggaggagctgacgcacctccagaag

SEQ ID NO: 13407 - DNA, 100 bp, Homo sapiens
tcattgggcagctgggcctggccaaggaccccctggagggcttgcagggtggcccccgctccgacttcgacatggcctatgagcgtggccggatctccgt

SEQ ID NO: 13408 - DNA, 75 bp, Homo sapiens
atgaaggaaagaatactgaaaattgtcactggatttaatgggtctgcaattaaggccttacgtcctggagggata

SEQ ID NO: 13409 - DNA, 75 bp, Homo sapiens
tagaagtactgcgttttgatgatggagggctactacaggatgctttggagtctgcaatgaagaatggcctgtggg

SEQ ID NO: 13410 - DNA, 149 bp, Homo sapiens
aacttttatccagctctaaactttatttcctcccagaagacactccccagggcagaaatagcgaccatggcgagacactgccctaaccatcatggaggtggccgaggtggaaagtcctctgaaccccagctgtaagataatgaccttca

SEQ ID NO: 13411 - DNA, 75 bp, Homo sapiens
aaaaacaagtgtgtgcatctggctgttagaagaattcatgctcatccggttgttgacctcctgtactggagagac

SEQ ID NO: 13412 - DNA, 80 bp, Homo sapiens
gcgacaagccgctggcagccgcggatctcaccgccgctcagggggtctaatgtgatggaagagcaggacctgcgggacat

SEQ ID NO: 13413 - DNA, 82 bp, Homo sapiens
aggagttcatctacccggagaagcaggagccctactcggcagaacactctgctccagccaaggtggtgagggcagctgttcc

SEQ ID NO: 13414 - DNA, 82 bp, Homo sapiens
cttctcagaacttatgcatacctcgtgagatggagaataaagaaactctcaaagggttgcacaagatggatgatcgtccaga

SEQ ID NO: 13415 - DNA, 49 bp, Homo sapiens
cggaggcgccgctccgggcgtgcgtctctctaggcttcttcgatgacat

SEQ ID NO: 13416 - DNA, 75 bp, Homo sapiens
gagccctgggtgatggaggaagaaatgtttgggaggcactgtccagtgctacagttgaaactccagcagcgccgg

SEQ ID NO: 13417 - DNA, 100 bp, Homo sapiens
tctacgaaatctttcgctccctacacaccctggttggacaggttcgatacaagaggctgttttcctagcgtggcttgctgcctttggtaagaacatgtcg

SEQ ID NO: 13418 - DNA, 75 bp, Homo sapiens
aggcgaccgccatggcgttcctcaaactccgtgaccaggtttaactatagatcaacacatcatcttgcatctcat

SEQ ID NO: 13419 - DNA, 82 bp, Homo sapiens
actgtcgctgcccgcctgccctgaggagtccccgctgcttgatgagattgtggggaacctgggtgaaggcacctttggcaag

SEQ ID NO: 13420 - DNA, 50 bp, Homo sapiens
gaaacagaccactctttaaaagaccattaaaaatctcaagtgacgacttt

SEQ ID NO: 13421 - DNA, 90 bp, Homo sapiens
ctgggatccacataatggagacattctgatggaatttggctccccctcatgagctgactgaagaagaaaagcaacaaatcttgcactctg

SEQ ID NO: 13422 - DNA, 82 bp, Homo sapiens
ccgaggaacagggcggagtagcggccgagctgcgaaagagacaatgcagatcttcgtgaagactctgactggtaagaccatc

SEQ ID NO: 13423 - DNA, 75 bp, Homo sapiens
gttaattgaagagtcttgtccacagctggcaaattcagtgcagatcaggaagcccatgaaacctttaatgagtgg

SEQ ID NO: 13424 - DNA, 100 bp, Homo sapiens
atttgcgctcgcacctgaggcagtccctgctgtgcacctgggggtacagagttacactgttagaccttatgatagccaagataacgagtgatgagccact

SEQ ID NO: 13425 - DNA, 101 bp, Homo sapiens
aaaaggctatgaagcgtttacgtgtcccccctttgggagctgctcagggaaacaaaggacccatcgcaaatgttttccatgctgatctccaaagtggtgag

SEQ ID NO: 13426 - DNA, 100 bp, Homo sapiens
caagaagcagctggagaaggacttcagcagcatgaagaagtactgccaagtcatccgtgtcattgcccacacccagggaaaatgggaagtccctctgcct

SEQ ID NO: 13427 - DNA, 83 bp, Homo sapiens
cctaccatcgccgagggcccatcccctaccagcgagggcgcctccgaacaatgcagatcttcgtgaagactctgactggtaag

SEQ ID NO: 13428 - DNA, 75 bp, Homo sapiens
acatgagaccatagccaaacccccagaaatgcactcggtgatggaaagagagccactattctgaagaacacttgg

SEQ ID NO: 13429 - DNA, 100 bp, Homo sapiens
gcataggccaaaaataggactaagtcttaaactggaccagcatgttttggaaatttgatcttcactcatcatcccacatagacacacttctagaaagaga

SEQ ID NO: 13430 - DNA, 50 bp, Homo sapiens
ggcgtgcggaggacactcctgcgaccagcccccaaatacatcaagatgtt

SEQ ID NO: 13431 - DNA, 83 bp, Homo sapiens
agttccttgtggagccggagctgggcgcggattcgccgaggcaccgaggcactcagaggagagatgccctgtatccaagccca

SEQ ID NO: 13432 - DNA, 75 bp, Homo sapiens
cgaggagttcgtggaccagctgcagcagggattgtgtgcacactctgcattccagggacacgtggctgaagaaag

SEQ ID NO: 13433 - DNA, 100 bp, Homo sapiens
cagaaagaggcctccctcgtgagttgggcttggtaccgtgctgcccagaatgcccttcgggagaaccgcatgcacgagtctctcatgctcttcgactcca

SEQ ID NO: 13434 - DNA, 98 bp, Homo sapiens
tgaaattatgcgtgcacttaaagctgccagcaaggatgactcaatcatcactgttttaacagaaatctcctgcaaagaagctgagccatgcaattagt

SEQ ID NO: 13435 - DNA, 48 bp, Homo sapiens
aatgaccgctttgtgctctccaagatcgtcaacacctgcagtggccca

SEQ ID NO: 13436 - DNA, 75 bp, Homo sapiens
gccccatgcccctgtcaggacccccagcctcagccctgtggagaaacagtatggggacaccacacacaccctggt

SEQ ID NO: 13437 - DNA, 135 bp, Homo sapiens
agagtgactcagacatctcctctacaagtacctaacccatcctggatgcaccaccattcatacctcatgcagccttcagcctaccctctgaagaggtccaagcaacggaagtactactacgaagctgcctttctg

SEQ ID NO: 13438 - DNA, 50 bp, Homo sapiens
cgaatcttccttcaggatatcaaggcatttctcattgcaattgtggtacc

SEQ ID NO: 13439 - DNA, 100 bp, Homo sapiens
ccagcttgaggccactggcgtcacctgctatgcagcccacccagttggaactgataatgggagagaagcaattgaaagtggggctgcatttctcttcatg

SEQ ID NO: 13440 - DNA, 101 bp, Homo sapiens
agccccggacgagaagcgcagcaacgtgcggtgggaccacgagagcgtgaggcaggcgactaatcagattgtgatgaattgtgctgatattgatattatta

SEQ ID NO: 13441 - DNA, 96 bp, Homo sapiens
agcatggcatttcagtcactggtttgcagagtccaggatcgtgtgatgatcaataggttggacagtatttgtcaaacagttctgaaaggaaagtgg

SEQ ID NO: 13442 - DNA, 83 bp, Homo sapiens
gtgcgtggctacggtcctcacggccggcgcttacctctgctacaggagaacatcaccaccctgaagccagagactaacactgc

SEQ ID NO: 13443 - DNA, 95 bp, Homo sapiens
ctgagacctcgggcaacctcagcagtgcgcagggctgcactgtctccgtctgcggcctgcagtaagcggccaacagaatcctggatttgagtctg

SEQ ID NO: 13444 - DNA, 85 bp, Homo sapiens
cggtgtctggcggatgcggtcgtgaagataggtcctactgctctgttggctcatgaaataggttttggaagtaaagttacaacac

SEQ ID NO: 13445 - DNA, 100 bp, Homo sapiens
tggagagagacctaaacatcgttgtccacgtccagcattatgagaacatggacacgagaacccccataaataatcttccacccgacagctacaaagtgca

SEQ ID NO: 13446 - DNA, 83 bp, Homo sapiens
caacaagaacctgctttaaatttccatggcaatttacaacccccatactgtaccaggcaagaagccctacaggtggcaactac

SEQ ID NO: 13447 - DNA, 83 bp, Homo sapiens
acttcactccagtgcctccgacgcctcctgatggtttggtgcacctcgatttggaggaagtagggcagggcccttatctggaa

SEQ ID NO: 13448 - DNA, 82 bp, Homo sapiens
cagcccgacgcaaaccaaggatctggggatcttcgcactatcccaagtgaagttattgccagtggactgtgagagaaaaaca

SEQ ID NO: 13449 - DNA, 100 bp, Homo sapiens
caggggccactcagagtcgcccgagaaaatgttgtaccatctttgggtaggcagacttccctgacgacatcagtgatacccaaagctgagcagagcgtgg

SEQ ID NO: 13450 - DNA, 100 bp, Homo sapiens
ttcaactcctaccagccagatcaacacaattgataccttggcaaatgcaacattatgtattcttgaacctattatggctgtggaagttgtagctccaaat

SEQ ID NO: 13451 - DNA, 74 bp, Homo sapiens
ctgcttcctggtgcagagctcagatttcaaggcccaaggagaggccatgagggcagtgctgatcccaattcgag

SEQ ID NO: 13452 - DNA, 83 bp, Homo sapiens
ctgcagccaccgccggctccgcccacccagcccatgggctccctgaggcccgcccagccgaccggagctggagtttgttcaga

SEQ ID NO: 13453 - DNA, 100 bp, Homo sapiens
ggttggggactcgaacccccgcttcgcagctcaggagcctgaggtccgaaaggtgccgtggccagcacagaagtgaagatgaagttacaagaatttgtcc

SEQ ID NO: 13454 - DNA, 100 bp, Homo sapiens
ccagatctctatccttttgggaccatgcgcggaggaggctttggggaccgggaccgggatcgtgaccgtggaggggctgaaaaactgggtggtagctgaa

SEQ ID NO: 13455 - DNA, 75 bp, Homo sapiens
aaagaattacgatgccgctctccgaaaaatcacctttccccacgtgcagcggaactgctgcctgacgctctgcaa

SEQ ID NO: 13456 - DNA, 82 bp, Homo sapiens
caaggataagggcgacagcaacagctctgccggctggaaggttatggaaacaaaggacatgctttacatcgtcactgaattt

SEQ ID NO: 13457 - DNA, 80 bp, Homo sapiens
cctgcagaaggtctctggagacatcttcagcaggccttttaaacctagagaagctgctccggcaattccttatctccaag

SEQ ID NO: 13458 - DNA, 100 bp, Homo sapiens
gcggcctccagcgacgagagtcccgggagacacagggaatatggaggttctgcacctgtatggaagtgaggaacagaagaaacagtggcttgagcctctt

SEQ ID NO: 13459 - DNA, 83 bp, Homo sapiens
ccaagttccagttcgtggcctgttaccacgagctagtgttggagtgcaccaagaaatgatgatcacagtcgtgttaaactgca

SEQ ID NO: 13460 - DNA, 101 bp, Homo sapiens
atccagatcgggatttacgtggagatcaagcgcagcgatggaaggtgctcgggtcttcggggcactgggtcccatcggtccctcctcacctgggctcaccc

SEQ ID NO: 13461 - DNA, 100 bp, Homo sapiens
agagaagtcacaaaacagcagatttcccaagagcagcggaaaatgatccagtcacaggcacaccattgagttctttgggatgcccgaaagtgtctggttg

SEQ ID NO: 13462 - DNA, 75 bp, Homo sapiens
ggaatttggagtagtttcaaatacaagattgattgctgctgctacttctgtatggacagatatggcttttctaaa

SEQ ID NO: 13463 - DNA, 75 bp, Homo sapiens
attgtggttgaacaatggacagtcctggaagccgaggagtcttgtaaatgtaatggctggaaaaaccctaacccc

SEQ ID NO: 13464 - DNA, 90 bp, Homo sapiens
catctgttccagggaggtgggattgaattccagaggggtgactaccatattgatgtctgtatcaatgactacctggatgttttctgccct

SEQ ID NO: 13465 - DNA, 100 bp, Homo sapiens
ttgcacgacagactgcacagggcatggaattattgctcagttgtaactattgtggaccagacaaatgtaaaactaacttgcctgctctttagtggaaact

SEQ ID NO: 13466 - DNA, 98 bp, Homo sapiens
gtacagcttttcgctgactacattcagatgcgtttagcccagcccctgctggtaaccaaggtcctcctccaatgatgggtatgaatatgaacaacaga

SEQ ID NO: 13467 - DNA, 115 bp, Homo sapiens
ctcctcggcttgcatttgtttctgctgaccgcgggccctgccctgggctggaacgaccctgcaaattgtggctactaatttgccccctgaagatcaagatggctctggggatgac

SEQ ID NO: 13468 - DNA, 75 bp, Homo sapiens
tttgtgtccattgatctcttggagcagctggggatcatggaagccagcagacctgcagaacttggctcccgggac

SEQ ID NO: 13469 - DNA, 100 bp, Homo sapiens
cgccggtcttggggggatggttccatcatggcgtcaatgcagcatcatcggctggttcgtgcgaagcttcaagtacttttacgggctccgcttcgaggtg

SEQ ID NO: 13470 - DNA, 100 bp, Homo sapiens
gcgccgtccagcccggagggacctgctctccactgtggtttgaatccacggggtattgatcaccctgcccatgctgaaggtattaaactgcaaattgaag

SEQ ID NO: 13471 - DNA, 89 bp, Homo sapiens
gggcaccaggaagcgaaggctgtgaataccagggcctggtgaagcacacaggaggctgccactgtggagcagttcgttttgaagtttgg

SEQ ID NO: 13472 - DNA, 100 bp, Homo sapiens
cttcgagcttctggagctcgccgcggtgcacctgtacctgctgccctggaggaaggagttcaccaccatcaaggtgaccaagaatatggcccaggtgacc

SEQ ID NO: 13473 - DNA, 96 bp, Homo sapiens
tggaccagatgcttggacgataccgagaatacagtaatggacaggcgggtgcgatagaacatttccaaagaactactggttcagattttagctctt

SEQ ID NO: 13474 - DNA, 50 bp, Homo sapiens
cccaggagtcatcggacgccagaatctggagcaggccgggctctcgccat

SEQ ID NO: 13475 - DNA, 90 bp, Homo sapiens
tcctgtttgacggtattaagaaacatcgagtcactttgcctggacaggaggaaccctacatggtcgcagttctaggggagaccacaggac

SEQ ID NO: 13476 - DNA, 90 bp, Homo sapiens
gcgggctttccttctgatggcctctcagtaccaacaaccccacgagacagttgaaccaactggaaaacgtttcttactagctgttgatgt

SEQ ID NO: 13477 - DNA, 103 bp, Homo sapiens
caggcggcggccgagggcgtcgcggactctccccgcgatgatgccgggaggcgccacatccaccacctggggaaccagctgcagctgaaccagcactgcctgg

SEQ ID NO: 13478 - DNA, 75 bp, Homo sapiens
gacaggcacctggataaccttttgctaacaaaaacagttcatcatcaaccaaggtggatctcaagagtggcctcg

SEQ ID NO: 13479 - DNA, 83 bp, Homo sapiens
gtcttacgcaagctgacagtggatgtgcaattcttaaagaatgggcaggtatataatgtttacatggcagggaggcagctgtg

SEQ ID NO: 13480 - DNA, 76 bp, Homo sapiens
gtcacagtgttgctgcaacatagagctgacattaactgtcaggcacgtgtggttctcaaatataggcattctgatg

SEQ ID NO: 13481 - DNA, 97 bp, Homo sapiens
tcaatatctgtcttcggtggactccttcggcagtccacccaccgccgccgcctcccaggtctcaccaacggctttgggggtgcgaggagcgagcagg

SEQ ID NO: 13482 - DNA, 75 bp, Homo sapiens
attatggaaaattccaagtaaagaactgagggtcagattgatcaggtctcctgggcatggctaacattgacctgg

SEQ ID NO: 13483 - DNA, 120 bp, Homo sapiens
cgtggacaagtttgcagatcgggagcgcaaggtcgccctcaaggccatgatcaaaacgctactgctgcttcaagacagtgacgtttctctccggtcagctgtcaggagcgctggtgagct

SEQ ID NO: 13484 - DNA, 82 bp, Homo sapiens
gccgcgcgctatggcaccttcgcctggcccaccactcccagagtggacatcctcatcatggatgatgacgacgtccccagct

SEQ ID NO: 13485 - DNA, 75 bp, Homo sapiens
gcaggtggtctgtgaagccacacagtgtccagatacgagggtgttacagcacatgaaggccgtgcaggcagatca

SEQ ID NO: 13486 - DNA, 49 bp, Homo sapiens
aataccttgtctcagctgctgaagctgctgttacacatctgtattgaag

SEQ ID NO: 13487 - DNA, 75 bp, Homo sapiens
aagccgatccccatttttattgaaagatgtattgagtacattgaagccacaggagtcagagtcagaagcaaaggt

SEQ ID NO: 13488 - DNA, 88 bp, Homo sapiens
cgcaggagctcatgtggcctgcggctcctgtcgcctgtagtggacggcctgttcatcatcgggtggatgtacctgcctccccatgacc

SEQ ID NO: 13489 - DNA, 75 bp, Homo sapiens
tgtgaaacctcctagtagaaaaagttcttgggacaaacttcatttgggacaatggtgacagatccaggcaccgag

SEQ ID NO: 13490 - DNA, 100 bp, Homo sapiens
gaagatgaattttatgatgctgatgaattccatcaaagtggctcatccccaaagcgcttaatagaaattaaacaaccaccatgtcgagcaaaaaggcaaa

SEQ ID NO: 13491 - DNA, 122 bp, Homo sapiens
cctggatttcctggttctgtgggctccgtggcaatgaattcttctgtgaatggaagacctggagcggaacaacggctccctggaccggccctactacatgtccaagagccttctaaagattc

SEQ ID NO: 13492 - DNA, 59 bp, Homo sapiens
acatatattcaaaagatcttcaggatggagatatacatctatgacgggaagactgggga

SEQ ID NO: 13493 - DNA, 98 bp, Homo sapiens
actggctctcctggtccagctctcaggacaagaacaaagtgtgctgattccgagtccgaaaggtccctgagtagattggaagcagtgacagcacgctc

SEQ ID NO: 13494 - DNA, 74 bp, Homo sapiens
tggaaaatatctgttaacagactgcttttacacctacgatagcactataatatgcagaaatctacaaattctga

SEQ ID NO: 13495 - DNA, 98 bp, Homo sapiens
gacaagggtgttcccgaactagagtggatccaacttagaaataatgtttcattcaagataaggctcgtggcttaggagattgtgacctggcttgcatc

SEQ ID NO: 13496 - DNA, 100 bp, Homo sapiens
gtacaaccaaaatcggagatgcgattgttcttggaatgataacgcagttaaaagaggagtctactcttcatcttgtgttgagacttcgtggtggtgctaa

SEQ ID NO: 13497 - DNA, 80 bp, Homo sapiens
acaggatttctccgcctcagcccaacggggagtgagtgtgtccgcttgaaaccaactgacatacagcccgacatcttcag

SEQ ID NO: 13498 - DNA, 98 bp, Homo sapiens
aaaagccggacccaaacatcaaaagtctctttaatgtggggaacaagctgctggtaagcctggacttgctttttgcaatcagaaatcagatcaagctc

SEQ ID NO: 13499 - DNA, 130 bp, Homo sapiens
cagtgagttcctatccaaatacttttgaatggcaatgtaaacttccagccatcaagcccaagactgaatttcaattggaataactgaagtgaagtgatggactccgatttggagagtagtaagacgtgaa

SEQ ID NO: 13500 - DNA, 50 bp, Homo sapiens
caagaagtggtccagccggcgaaggcctgaagggaccccgtttgaggatg

SEQ ID NO: 13501 - DNA, 50 bp, Homo sapiens
aaggagtgcaccatccaggagaaggacatctgtgactttggcctggcccg

SEQ ID NO: 13502 - DNA, 100 bp, Homo sapiens
gaaaagctggatgtgctctccttgctaagtttggtgcgaacgccattctgggggtgtcccttgccgtctgcaaagctggtgccgttgagaagggggtccc

SEQ ID NO: 13503 - DNA, 75 bp, Homo sapiens
cttgactgacaggcggcggcggcgcagttgcgagtgcaggtcatcatcagatttgaaatatttaaagtggataca

SEQ ID NO: 13504 - DNA, 104 bp, Homo sapiens
tccgcggagatctctctcatctcgctcggctgcgggaaatcgggctgaagcgactgagtccgcgatggaggtactaggttttgacaagcttgcatcatgcgtga

SEQ ID NO: 13505 - DNA, 88 bp, Homo sapiens
tctactccaccgctccttgcagagcatccaggttgcccatcgtctttactggacactgcccatctctaagataagaacctggaaaggg

SEQ ID NO: 13506 - DNA, 98 bp, Homo sapiens
gttccctttgccgctcctggagttcactggtgtttgtaaaatgtatgaagaacatctgaaaagaatgaatcccaacagtccctctatcacatatgaca

SEQ ID NO: 13507 - DNA, 100 bp, Homo sapiens
tggaccctgctcagaggactctatacagggacgtgatgctggagaattataggaacctggtctccctgggttgaagaagaggatgaacttgaatctggag

SEQ ID NO: 13508 - DNA, 75 bp, Homo sapiens
agccggcggcccggagtggggcggcggatgcaatgctcttggtggcagagcgactggaggggccattcaacattg

SEQ ID NO: 13509 - DNA, 100 bp, Homo sapiens
atgacactcatggaggaaatgctgagagaagcattcagatgcatgacacaagaaacgtgttcagttgatcatcaaatacttaaaggaccttgaaagcttg

SEQ ID NO: 13510 - DNA, 50 bp, Homo sapiens
aagaagaagtgttagaccagggggtctagagatgatctaagcaccaatgg

SEQ ID NO: 13511 - DNA, 82 bp, Homo sapiens
ccttagctgtgctcgcgctactctctctttctggcctggaggctatccagcgggactcattctcacagttccggtttgctga

SEQ ID NO: 13512 - DNA, 100 bp, Homo sapiens
agaaaaagtacagcatatccagcttctgcagaaaaatgttagagctcagttggttgatatgaaacgactggaggacgacttcaaagagggctacctggag

SEQ ID NO: 13513 - DNA, 100 bp, Homo sapiens
gaaccagtcactcctactagtggagggggtccaatgtcaccccaggatgatgaagcagaagaggattcgaagcttcttgagcctgggactgtatcttgat

SEQ ID NO: 13514 - DNA, 98 bp, Homo sapiens
gtcaaggcctcccactccttcctccgagggctgtttgggttgaaggtcgaggagctggaaggcgagcggagtcggctggaggaggaaaagaggatgct

SEQ ID NO: 13515 - DNA, 74 bp, Homo sapiens
gctccgggagccgggcccggggtcccgccaccaccgcgcgcgggtgtgatcagcactggaaaagatgcctgccc

SEQ ID NO: 13516 - DNA, 90 bp, Homo sapiens
ctgagctgaaggcacttagtgcccacaaccgcaccaagaagcacgacctgctgaggagtttgacttacaaggaatctggagtagatatcg

SEQ ID NO: 13517 - DNA, 101 bp, Homo sapiens
tgcgttgctcttgcttttcctcgctggggtgtacgggccggtgcataaacttctcccgagttccatctcagtaaaagggaagcaggaagaccaagaaggta

SEQ ID NO: 13518 - DNA, 75 bp, Homo sapiens
gtcatacccaggctatcccccaacaggctacccacctttccctggatatcctgctagagtgcagtggtgcgatct

SEQ ID NO: 13519 - DNA, 100 bp, Homo sapiens
cgggccccctcgccgctgccccgggaaggaggtgagaagccctaccactgcaactgggacggctgcggctggaagtttgcgcgctcagacgagctcacgc

SEQ ID NO: 13520 - DNA, 82 bp, Homo sapiens
tgcaccagttgaaccagtgctatactcagctaacatggcaacagaataatgttcagagatcatacatctgtcggtggcctgg

SEQ ID NO: 13521 - DNA, 90 bp, Homo sapiens
ctgtagctgcctctatgatctggagacggcctcctgttccaccttcacttcctgtccacttccaacgaagcggtctataagatctttgat

SEQ ID NO: 13522 - DNA, 75 bp, Homo sapiens
atatgaaccagatttggatatcgaaatagattttcccagagcttcttggacacttaatgattgttggcaagaaat

SEQ ID NO: 13523 - DNA, 75 bp, Homo sapiens
aaacgagccaaacttcgtgaaattgaggtccttatgtcgtcagaagatcgagaagctcaggaggatgaattgctg

SEQ ID NO: 13524 - DNA, 100 bp, Homo sapiens
ccccgcccagccccatggaccagcactcccaagggcagccccgagaaccacaggtgtacaccctgcccccatcccgggatgagctgaccaagaaccaggt

SEQ ID NO: 13525 - DNA, 75 bp, Homo sapiens
gccgtgggtccgcgctgcttccacccaacttcctgttaggggagttgctgagtcagcccagaccggaaggagtgg

SEQ ID NO: 13526 - DNA, 50 bp, Homo sapiens
ggggacctaattacacctccggttatgagaagcggtcagcaattttctca

SEQ ID NO: 13527 - DNA, 51 bp, Homo sapiens
ccaatgaagatgaagacataggaggagtcagtggatcggtggggaaaatgc

SEQ ID NO: 13528 - DNA, 100 bp, Homo sapiens
ggcgccgcgtagcttccatccgccagctgccatgagcgagcgcctccgtcccagctgtttgatgaagacaatccagtacacaagtctggaaccagataca

SEQ ID NO: 13529 - DNA, 86 bp, Homo sapiens
aaggaggaattcgccgtgcccgagaatagctccgtccagcaggactggagactgatgcatgagggggctacggaggcgcaggagcg

SEQ ID NO: 13530 - DNA, 100 bp, Homo sapiens
acggactccttgaacaccctcgtggcactccaccagctctaccaatacacgcagaagtactatgacgaggaagcagaacatcagagagccatgcagagac

SEQ ID NO: 13531 - DNA, 95 bp, Homo sapiens
agatgaccttctcaatttgctaagagaaagccgctctactttacgaagtgtttctactggatcttcaagaccttcaaaaatatgtttggtgtgtg

SEQ ID NO: 13532 - DNA, 50 bp, Homo sapiens
ccctccctcagcttccgccccaaaagagttcgcagtatgtgcagtgcgtg

SEQ ID NO: 13533 - DNA, 99 bp, Homo sapiens
gaagtactgagcctgttggaggaactggcccggaaacaggaggacttacagaatgtctgaaggggacagtgtgggagaatccgtccatgggaaaccttc

SEQ ID NO: 13534 - DNA, 90 bp, Homo sapiens
aaaggcagggcaaggaaactggccacaaacagctcagctctctcaagccagcggaatagtttcccaacttccttttggaccagctcttac

SEQ ID NO: 13535 - DNA, 90 bp, Homo sapiens
ctcacatctctgtccccccgggaccccctggagcccccatgatccctaagaagacagcttgaacctagaacaccttccaccatgaccacc

SEQ ID NO: 13536 - DNA, 100 bp, Homo sapiens
tctgtctctggcccaggccctctactttctgaataattctacgtcactgctcaagtgtcaggtggaggaaggagaggccagtctaccctcccctgccatg

SEQ ID NO: 13537 - DNA, 100 bp, Homo sapiens
gcaaagacttcaggatgtcatctatgaccgagactcactccagagacagctcaattcagccctgccacagaggtgacattgtgattgcaaaaagcccaag

SEQ ID NO: 13538 - DNA, 95 bp, Homo sapiens
gtaaaataaaaggagcttctaaaggttgtgttacagcatcaagcatgatggaaccatgtgtgatacctgccgccagcaaccaatcattggcattc

SEQ ID NO: 13539 - DNA, 100 bp, Homo sapiens
ggacgtgatggctcaccaggccagaggaagtggcaatgcattgaggatacatctggcaagcttcgaattcacaagtgtaaaggacccagtgacctgctca

SEQ ID NO: 13540 - DNA, 98 bp, Homo sapiens
ccctcggtcgcgagtatctccgtttcctggatgtgaacgcccctgtaaagatagctgtcattttcaagcagctgagagttctcattgattcagtttta

SEQ ID NO: 13541 - DNA, 100 bp, Homo sapiens
caatgcaggccagtggaaggaagcagctagcaaggtgacccatgcattggttaatatcagataacaatgaagatggtgccaaaactgctttctcctttgg

SEQ ID NO: 13542 - DNA, 108 bp, Homo sapiens
tggaaagatatgccaaatttgttaaagagaggatagaaattgaacagaactatgcgaaacaattgaggaatggatcgtgattatggccctggatcttatggaggtctg

SEQ ID NO: 13543 - DNA, 75 bp, Homo sapiens
gaaggcccgcggcgccccgtgctgcaggtaagaatgattgatgttggctgatattggagtgctcattcacatgaa

SEQ ID NO: 13544 - DNA, 82 bp, Homo sapiens
gaaccgggaggacccactcccccaggactcctttgaaggcgtggacgaggacgagtggagatggctccgaagtcaaaaaaga

SEQ ID NO: 13545 - DNA, 100 bp, Homo sapiens
ttgaaccaggagcaggtggcagatctcaacaaacaggccacgacttatggcatggccgacggtgacttcgtcagctatcaagcccagagagagacgtgga

SEQ ID NO: 13546 - DNA, 98 bp, Homo sapiens
tgcgatggcgcagaaaccccgttgacaaggcactgctttttcatgacggtttacccaaggtccagcctagcccctaggcaccatgtcggacagtgatc

SEQ ID NO: 13547 - DNA, 88 bp, Homo sapiens
aggactccaaaatggcgtcagttggttctgaagccagacacaagatgaaaaagctaactccaaaacagaaattttctgaagatttaga

SEQ ID NO: 13548 - DNA, 80 bp, Homo sapiens
agccagcatcccggtcaacacgcggtacctgaacctgcaagagaacggcatccagaccctctttcccagctgcccgctcc

SEQ ID NO: 13549 - DNA, 121 bp, Homo sapiens
cgggaaggcgggagacgagaagcctgaaaagtcgcagcgagctggagccgccggaggtccatctgggaagcgggatttgggttgatgaggagaaatggcaccagctacaagtaacccaagg

SEQ ID NO: 13550 - DNA, 100 bp, Homo sapiens
cctcattgcgcccagacgggccggcccagagctcccgggtcgtctttcgtgtggccgcgaggagatgttacagcccagatagctcttcagcctgcactga

SEQ ID NO: 13551 - DNA, 82 bp, Homo sapiens
gcagcagctggagcattaccacgacccttgcaaagccgggggatatgagactttctactcggaatatcctgagtgttgcgtg

SEQ ID NO: 13552 - DNA, 99 bp, Homo sapiens
ctgcagtaaaatgggtgatgtcaaagagaactatcttgaaacatttatttccagtccaaaacgtgctatgggaagagggcaaggcagccttggagcagc

SEQ ID NO: 13553 - DNA, 82 bp, Homo sapiens
cagcagctgattgtaatgaatttgcccaatgttttgatgattggcagagacccactgtctgaacccgaaagtttgtaagagg

SEQ ID NO: 13554 - DNA, 90 bp, Homo sapiens
cgtcgggggtttggtgggcggcccaccgggactcgccgttggcttatgccaaattttctggtgcacccttgaaagtcaatgtgatagata

SEQ ID NO: 13555 - DNA, 75 bp, Homo sapiens
cccagctcctcctgaccctcggctgtcccagctatgcccagacagctgaggatgccaaggacttcttcaagagga

SEQ ID NO: 13556 - DNA, 78 bp, Homo sapiens
agcaacaacagagagcacgtggccagctgcgggccgtccagcggctgtgccacttctacagcgccgtcatgcccagcg

SEQ ID NO: 13557 - DNA, 90 bp, Homo sapiens
ggccaatgttggtgctggcaaaaagaggagaattctgcctaagccaactcgaaaaagccgtacaaaaaataagcaaaagcgtcccaggag

SEQ ID NO: 13558 - DNA, 100 bp, Homo sapiens
cggcggtgtagacgccccttcgccgggacctggcacccgaatccggcctgccggacatccacgacagcgatggcagttccagcagcagccaccagagcct

SEQ ID NO: 13559 - DNA, 95 bp, Homo sapiens
gaatccaggatgatgatcccagattgccagcgcaggttggaagccgcatatttggatcttcaacggatactagtggtcttcgagggatagcacga

SEQ ID NO: 13560 - DNA, 74 bp, Homo sapiens
gctgagcctgccacgccgaggacgtgggtttggtgcacctcgatttggaggaagtagggcagggcccttatctg

SEQ ID NO: 13561 - DNA, 98 bp, Homo sapiens
aaattgtatttaaccaactccaaacaggtcaagagcaatctgaatccaaatgcaaaggagtttgttcctggggtgaagtacggaaatatttgagtaga

SEQ ID NO: 13562 - DNA, 50 bp, Homo sapiens
tgtcgcgttacgggcggtacggaggaggagctctttgttcaatgcctagc

SEQ ID NO: 13563 - DNA, 97 bp, Homo sapiens
gcggcccccgggagagagcggccaggtggaggaggagcgcggaggcgaccgcaggcagtggccagatccagctttggcagttcctcctggagctcct

SEQ ID NO: 13564 - DNA, 71 bp, Homo sapiens
tcgtctcttacgtctgcggaagtgcagctgcctcagttcttagcgcagcaatgacctcctttggctgcaca

SEQ ID NO: 13565 - DNA, 91 bp, Homo sapiens
ctcagttggaagcagccgatccagcctgcggagcctgtggggcagattgtgggattagtgatatgcttttctaaagagtagaaaagtcgaa

SEQ ID NO: 13566 - DNA, 48 bp, Homo sapiens
ccggtgccaggttcttggagctgtgagatgccggtggccgtgggtccc

SEQ ID NO: 13567 - DNA, 95 bp, Homo sapiens
tcagatccttgagtgataaaggagtagaggtgtcacgtcttgaaattttaaatgtcctcagtgactctctacctctggcagatgatgttgacctt

SEQ ID NO: 13568 - DNA, 75 bp, Homo sapiens
acagcccaggagatgaaaatgcagagtcatcaatggcacctatcactctcgagatgagagtacagacagtggact

SEQ ID NO: 13569 - DNA, 100 bp, Homo sapiens
caattgccacacggtggggcccaacgaggcgctggtggtttcaggttcaacagagtttggaaaagatttctaaactggagcaggaaaaagaacattggat

SEQ ID NO: 13570 - DNA, 100 bp, Homo sapiens
cttgaacaaggcaaatatggttttggtagacagattggaagtcgtcaacaagcgttttgttcgagtgacctttacaccaggaaaaactcctgttgatggg

SEQ ID NO: 13571 - DNA, 75 bp, Homo sapiens
tcaggacagctgttccttggccatcccaaagctattctgggggcaacagagtggctgtcgctgggcgcggactcc

SEQ ID NO: 13572 - DNA, 100 bp, Homo sapiens
taatctcctcagaaatcactaaatactactctgaggggcttagaaattaacagggaaatgattcttgaagactatctttccagcttgtcacatatgcaag

SEQ ID NO: 13573 - DNA, 74 bp, Homo sapiens
gaatcagctgtgaatgcagaaagaggaggcttatgtacataaaagcgtgatggaggaactgaagagaataattg

SEQ ID NO: 13574 - DNA, 50 bp, Homo sapiens
gcccccaacgtccatgcctgagtctcgtctacagaggactggtctttcaa

SEQ ID NO: 13575 - DNA, 97 bp, Homo sapiens
acctaagagactatattcccctgaacagcattctatcatggaaggaggagatgaagggcaagggccaaaatgatgatttgtcaaagatgaaagtgac

SEQ ID NO: 13576 - DNA, 87 bp, Homo sapiens
tcgctagaactcagttgtgcgttgcggccagtcgccactgctgaggactcagagagagtaatgataattaccggaccaaacatgggt

SEQ ID NO: 13577 - DNA, 50 bp, Homo sapiens
acaatatcggcattctgtgctacgaaggatttttagactctgaggagcag

SEQ ID NO: 13578 - DNA, 50 bp, Homo sapiens
ccagcatccactggagctacaagagccacagttgtaagggatcttgtggc

SEQ ID NO: 13579 - DNA, 76 bp, Homo sapiens
gtcggtgttctgcaaagactgcaggaagagttcggaatccagcattaagaagaaatttctcaagaggaaaggaaag

SEQ ID NO: 13580 - DNA, 82 bp, Homo sapiens
caggcgactacaattagcagctttccccaactgaagaggcacaaaggtagctcagattgtcaagaatgaaatggaaagtgct

SEQ ID NO: 13581 - DNA, 100 bp, Homo sapiens
gccggaattgtcctttccaacatccagagctgcatcattccttggggcaaaatgtggacaaggctcattgctatggacagtgctatcaccctgtggcagt

SEQ ID NO: 13582 - DNA, 101 bp, Homo sapiens
ccagtgagggtgtacaaatacccctttgaattaattatggctaataactgaagtgaagtgatggactccgatttggagagtagtaagacgtgaaaggaata

SEQ ID NO: 13583 - DNA, 74 bp, Homo sapiens
ctgttcgacgtgcggcccgaatgccagcgcctcttctaccggggcaagcagtggttctgtgcaggtctatacaa

SEQ ID NO: 13584 - DNA, 90 bp, Homo sapiens
ggagcctctccgcccggcagccaccccatctgggaaatattgtcagcatgtgctttgtgaaactgttcgaactgccaaactgactccagt

SEQ ID NO: 13585 - DNA, 74 bp, Homo sapiens
taagacctctgagctgttcctcccagctacgagctgccccaggaatactcccccagttgcaagaggcgcaggac

SEQ ID NO: 13586 - DNA, 59 bp, Homo sapiens
ctgcccctgatgtttgagatcctgaaagcgagcaaggtgtggtcactcacctgtctacc

SEQ ID NO: 13587 - DNA, 75 bp, Homo sapiens
ggttttggctcatggctctcaccttgctcacgattagtgggatggtttggccatgaactcagcaccagatttaag

SEQ ID NO: 13588 - DNA, 75 bp, Homo sapiens
atctacaatttttagtggagttgccatctatgttaatggatacacagtggccataaaatgcagtaaaaacaaatc

SEQ ID NO: 13589 - DNA, 100 bp, Homo sapiens
agtttgtaccaggccaagccttttgctcacatacaggaaatgctgaatgttcatgatcattatcagaacatgaaacatgtaatttcagttgataagtcca

SEQ ID NO: 13590 - DNA, 91 bp, Homo sapiens
agaagacgaagaagcagaagcgtctgctcaggttgcagcaggagagagggcgtgatggtgggcatgggtcagaaggattcctatgtgggcg

SEQ ID NO: 13591 - DNA, 100 bp, Homo sapiens
acatgcctgacagatgtgccttggaagagtctgagagtccagctttactaatatgctgaagaacaaacagccgacgccagtgaatattcgggcttcgatg

SEQ ID NO: 13592 - DNA, 100 bp, Homo sapiens
gcccaaatggatgagcaagacctaaatgagcctcttgccaaagtgtcccttttaaaaggagaaaagccttacagatgctcatgggaagggtgtgagtggc

SEQ ID NO: 13593 - DNA, 100 bp, Homo sapiens
cttgaatctgcagaaagcagctccgagccccagaccagctctcaggatgactttgatgggactgaggaagacccacaggcagaactggccatcattcatg

SEQ ID NO: 13594 - DNA, 100 bp, Homo sapiens
gcaccagcacgcctggctaagaacctacaagcagcaattggcgcctattatgactttgagagcccaaacatcagtgtgccctctatgtcctttgttgaag

SEQ ID NO: 13595 - DNA, 100 bp, Homo sapiens
gctgggaatccgaatctccatgtcccatgaagaggagcctttggggacaggtaactaggatttctacctcaaccgcgagacctatgcaaggacggtgtgg

SEQ ID NO: 13596 - DNA, 100 bp, Homo sapiens
catgaaagaagcagaaaagaatttgacggacctaggaaaattctgcgggctttgtgtgtgtccctgtaacaagtgccttggaacactatgttaattgcct

SEQ ID NO: 13597 - DNA, 100 bp, Homo sapiens
cctgctgatgacagggccttttatggcctctttgcacctccacgtgccttcagtgcaatctgacgagctgcttcacagtaaacactcccacccacttgac

SEQ ID NO: 13598 - DNA, 97 bp, Homo sapiens
gcactggagtaccctgttcctggcagaagatgagaatgtgcctactgctcctgatcctccaagtcaacatttacgtgggcatgggacaggcttttgc

SEQ ID NO: 13599 - DNA, 76 bp, Homo sapiens
gccggcgggaccataagggcttaactcatatatttaacccccctccaaaaatgcctccagtccctgtgtgacctgc

SEQ ID NO: 13600 - DNA, 99 bp, Homo sapiens
cattatccttagcaaagtaacgcaggaacagaaaaccaaacaccacatgttgtctcttagaagtgggagctgaacggggatcctgctaaagcggagcgg

SEQ ID NO: 13601 - DNA, 80 bp, Homo sapiens
gcagagcaaggaatgtgacttccagaccaaatttgcactcagcctctctccaggtgcccaacagcccccttctcctcctt

SEQ ID NO: 13602 - DNA, 50 bp, Homo sapiens
gggcttccaccccttgacagcagggtgttctaaggatacattttattgaa

SEQ ID NO: 13603 - DNA, 98 bp, Homo sapiens
gaccttacgacgggttggggatggcgtgcagcgcaaccacgagacggccttccaagatgtgaagttcatttccaatccgccctccatggtggcagcgg

SEQ ID NO: 13604 - DNA, 75 bp, Homo sapiens
ctaaggagctgcagcagcatgtaaagtcagtgacagccccatataccttccgatactcctccaaagaactctcgg

SEQ ID NO: 13605 - DNA, 96 bp, Homo sapiens
gaaatggcttcgatgttagccgggacccgactcagaattaaagctatagagagtcccaacaaagaagatgatacccagtggctgacctactgggta

SEQ ID NO: 13606 - DNA, 83 bp, Homo sapiens
cacaaagatagctggcttctggtgtctctggagaatggttcgactgttgcctgataccatcaatagcattaacctagacagaa

SEQ ID NO: 13607 - DNA, 78 bp, Homo sapiens
atgggaaggagcacccaggagctgaagaataagtcgcgctttcttcctcaaacttggcgaacttggagggagcttgtc

SEQ ID NO: 13608 - DNA, 75 bp, Homo sapiens
gttacactctgaggatattaaatcactgtgtccactactatgatcttcgtaacactaaacagccaatcatggtat

SEQ ID NO: 13609 - DNA, 90 bp, Homo sapiens
gccgaggatgcgacgcaccgcaggttaatttggagtggcccctggagtcagtttcctacaccatccgaggccccacccagcacgagctac

SEQ ID NO: 13610 - DNA, 100 bp, Homo sapiens
gtaacagattccctggataccctttcagaaatttcttcaaataaacagaaccattcttatcctgattgtgttcacctattgaaaattaaaaagacatttt

SEQ ID NO: 13611 - DNA, 100 bp, Homo sapiens
tgctgggggccttcccgccggccgccgccgcccgaggagcaggccgggctctcgccatgggtcactgtcgcctctgccacgggaagttttcctcgagaag

SEQ ID NO: 13612 - DNA, 100 bp, Homo sapiens
cagggatgataattgggcctccaagagagctggccaagaggactcccggcaagcacccagaccaccccgcggtccagagtgccctgcaggccatgaagac

SEQ ID NO: 13613 - DNA, 94 bp, Homo sapiens
aaagatggcggcttcctagtgagtcggcggctgatttagaaggaggttcaggctacggtgagccgaaggagaccagtatgatgtctgtgccatt

SEQ ID NO: 13614 - DNA, 103 bp, Homo sapiens
cgaggcagggccagcagcaggcgggagaaaccaaggtgtatgttggtaacctgggaactggcgctggcaaaggagagttagaaagggctttcagttattatgg

SEQ ID NO: 13615 - DNA, 100 bp, Homo sapiens
gctgtagtgggagtgttccaggattcgccttggtgttagacaaacccagtaggctaactgaaaaggaacttgctgaggctgcaagcaagtgggctgctga

SEQ ID NO: 13616 - DNA, 96 bp, Homo sapiens
tcacagctggatgtttgcgacatcccagagagcttccagagtcttaacttgcagagtcagtttaatctggaaaatgtcactgttttcaatacaaat

SEQ ID NO: 13617 - DNA, 80 bp, Homo sapiens
agaacatcgtagcgaacacggtgctactcaaggcccgggaagaattttccagttcatatgaagaggtgatctctcaaata

SEQ ID NO: 13618 - DNA, 130 bp, Homo sapiens
gctgctgggctccggggacactttgcgttcgggctgggagcgtgctttccacgacggtgacacgcttccctggattgggagctagccgaattcgaaaaactctcggatcaggtgaagatcagtgaagaag

SEQ ID NO: 13619 - DNA, 97 bp, Homo sapiens
ttgacacttatatcctccctggacttcccaagtaagaagcggaagaggagccgctggaaccaagacacaatggaacagaagacagtgattccaggaa

SEQ ID NO: 13620 - DNA, 83 bp, Homo sapiens
ttgtgggatgtgaaaactctgttactgaaggtcagcccaaggccaaccccactgtcactctgttcccgccctcctctgaggag

SEQ ID NO: 13621 - DNA, 82 bp, Homo sapiens
gcggacatcgtctcctgtgtggcgatggtcttcctgctggggctcatgtttgaggcagaacgcagagctggccaagcttcgg

SEQ ID NO: 13622 - DNA, 75 bp, Homo sapiens
tctacatcctgcgggtgcctttgaaaatcaacgacaacttgagcacaggcctgggcagtttttaaagggaagttt

SEQ ID NO: 13623 - DNA, 100 bp, Homo sapiens
cacaggaggaaagcagtgacaaagaaagaagttgtcattctttgcacgatggagtttcactcttgtctcccaggctggagtacaatggcatgatctcagc

SEQ ID NO: 13624 - DNA, 46 bp, Homo sapiens
tcctatcagaggaggacctccagacgctgaccggaaaggagattga

SEQ ID NO: 13625 - DNA, 98 bp, Homo sapiens
gcgcgtttcagcgaagtcgcacgtgaaggatagcagtggcctgagaaaggttggaaaagagactgttcaaaccactgaggatcagattttgaagagag

SEQ ID NO: 13626 - DNA, 75 bp, Homo sapiens
cggggacctgctccgggacaacatgctgcggggcacagatggctcacactgctgagataactcacgagatcattg

SEQ ID NO: 13627 - DNA, 96 bp, Homo sapiens
aagttcgaaaagttcctccaggtttgccatcttcagtgttgacttcaaaatcaaaactgtagagctaagaggaaagaaaattagattacagatctg

SEQ ID NO: 13628 - DNA, 75 bp, Homo sapiens
gaagagggaagacacgcggaaacagaaaaagttggtgattcaaggaaagcacattgcaatgcattatagcaatcc

SEQ ID NO: 13629 - DNA, 100 bp, Homo sapiens
tgttccagcagggcctgatccaggctggaggctcccaggtgattttcacaaatcctttagaaatcgtcaagatccgtttgcaagtggcaggagaaatcac

SEQ ID NO: 13630 - DNA, 101 bp, Homo sapiens
gccatatctatgcaatgaagatattgagaaagtctgatatgcttgaaaaagagcagaaccccgagatgcccctgtccttcacaataagccgaggattctgg

SEQ ID NO: 13631 - DNA, 75 bp, Homo sapiens
cccgtgttctactttctgcacgtcagctcagaacctgaggacgcagccatggagcggtcggccttcatggagctg

SEQ ID NO: 13632 - DNA, 100 bp, Homo sapiens
gatcgctgtgatcgtcacttggcgcctgtgtctggcagagctggtgtgagacgagacaatcctgccccgccgccgggataatcaagagttttggccggac

SEQ ID NO: 13633 - DNA, 80 bp, Homo sapiens
cgcgagtctgccatcgtccaaggaggtggcaggccaccagcttgggctccccacggagggcagcaagtgggacttgggga

SEQ ID NO: 13634 - DNA, 100 bp, Homo sapiens
cgtgtcaactctgcttaattaagcactttgatgatttaagaaatcttgctgtgttccagatcatctccctggtaatttaccccgtgaagtacacccagac

SEQ ID NO: 13635 - DNA, 100 bp, Homo sapiens
gcgcgggctggttcgggatgagcgatggcatcggtcaaggtggccgtgagggtccggcccatgaatcgcagtcctggtatctgggatagcaaaggtcttc

SEQ ID NO: 13636 - DNA, 100 bp, Homo sapiens
acatttcaagatcatcaaatcaaattccacagggattggtgaccaaccagaaggctcagacatctgattgctgaccttgccggtggtggtgtgcacattg

SEQ ID NO: 13637 - DNA, 73 bp, Homo sapiens
aacttacagggatgtgatgctggagaactacagcaatctagtttctgtgggaaattatggaagtggaaattac

SEQ ID NO: 13638 - DNA, 100 bp, Homo sapiens
ggcgctggagaaatacaacatagagaaggacattgcggctcatatcaagaagatctcattcgtcggttcggatccaagccagttctgtggtcagcaaggc

SEQ ID NO: 13639 - DNA, 89 bp, Homo sapiens
cacggagctgggcgacgagctgaccctgggagacatcgacgtttgcctgagaatacagatcaacccacagaacaaagcggatttccaag

SEQ ID NO: 13640 - DNA, 88 bp, Homo sapiens
gcccaagcacaattccaggaaggttcttggatgaaatttcatctactgaaactaaagagtccagtggtacgagtgagcctgtgcacct

SEQ ID NO: 13641 - DNA, 75 bp, Homo sapiens
atggacaaatagaatctgtacgatttcgttctctgtagtgagttgaaactcttggaggaagcaaccatttcagtc

SEQ ID NO: 13642 - DNA, 75 bp, Homo sapiens
tccctctgcccccccttccccacgcaaccccagatccatttacactttacacttccttcaaaatgtctactgttc

SEQ ID NO: 13643 - DNA, 98 bp, Homo sapiens
acctacggtctggagagcagctgcattgcaggcacagggcccgatgagccagagaagcttggcgggattaaggacactgcatgacattgggccagaaa

SEQ ID NO: 13644 - DNA, 83 bp, Homo sapiens
aaagtgccgaaacaagaagaaggagaagacggagtgcctgcagaaaaatgaggaaaatggggagcaggaggctgacaatgagg

SEQ ID NO: 13645 - DNA, 75 bp, Homo sapiens
cctgccttaagctgggtgatctgcaagctttcttcctggtggcagatgacatcatggattcatcccttacccgcc

SEQ ID NO: 13646 - DNA, 75 bp, Homo sapiens
gaagcggagagcaacagcgcgccgtcacccacaaaagctgtatataatgccagacattggaatcatccagattca

SEQ ID NO: 13647 - DNA, 75 bp, Homo sapiens
cgcctcctacgtttacctgtccatgggggccccactgcacccaggtcatccctgtgcagggccgggtcacctccc

SEQ ID NO: 13648 - DNA, 100 bp, Homo sapiens
ctggagcccggacgggcgccacattctcaacaccacggaattccatgtgaatgaaaactttgccattgatttgatagcagagcagcccgtgagcgaggtg

SEQ ID NO: 13649 - DNA, 83 bp, Homo sapiens
cttctccactttcgccagcccgtgccgcgagcgcggcctgcaggagtgggtaattccagaattgattggccataccattgtca

SEQ ID NO: 13650 - DNA, 100 bp, Homo sapiens
ctgatcaattgaatatggacccaagagtcagcggtatattagttcagttaccactaccagatattgatgatgttaagaagttcaaaccgggttacctgga

SEQ ID NO: 13651 - DNA, 100 bp, Homo sapiens
tcaaccttgaaggcatcgtgtggcaggaaacagaagatggctttctgtgaagaattggaatcaatgatacaggagcaatttaagaaggggaagaacccca

SEQ ID NO: 13652 - DNA, 75 bp, Homo sapiens
aaaaacttcaaactggtcaaatgcactgtccagacggagatccgggaaggatacttaacaaacccaagaagcctc

SEQ ID NO: 13653 - DNA, 89 bp, Homo sapiens
aggattccaagtaactcttatttgttgtatcacggactgattcaccgagcccaaccgtactcaactcacatatttctaccccaaatgtg

SEQ ID NO: 13654 - DNA, 100 bp, Homo sapiens
gcgcgccgcagctgcccaggccggaccgggccgggcgcccgcagaacctcccggtggccagcctcctccgaggtcagtttctcgctgtgtcctggtccgt

SEQ ID NO: 13655 - DNA, 100 bp, Homo sapiens
aactggatgccaactctgcccttatggaattggacaaagaaaatgtgccagaggaacttcaagaaccattttacacagatcagtatgaccaggaacacat

SEQ ID NO: 13656 - DNA, 100 bp, Homo sapiens
gtcctgctccaaggactgcactgtgaaggccctgaaggccctacaggacatgagctccacagcacccccagctccgcagccatccacacgtaaggccaag

SEQ ID NO: 13657 - DNA, 101 bp, Homo sapiens
agactctacagaattcccagtttcttttaacaagagtcttttatgacatcaagagaaatgatcccagaaagaaaaaatcaagaaaaagaatctgatgatgc

SEQ ID NO: 13658 - DNA, 99 bp, Homo sapiens
accaacgcctggctcggagcagcagcctctgaggaatactcccccagttgcaagaggcgcaggaccgtggaagacttcaacaaattctgcacctttgtc

SEQ ID NO: 13659 - DNA, 75 bp, Homo sapiens
agggattctggcatcagggaggctttcagccggagaagcgagtttcagctggaacgcttggattttgcaatgaaa

SEQ ID NO: 13660 - DNA, 103 bp, Homo sapiens
ttcttttcctcttgggcatcatcttgctggttctgattggagtgcaagatttaccaacagcatgaatcaagaaaagttagccaaacttcaggctcaggtccgg

SEQ ID NO: 13661 - DNA, 96 bp, Homo sapiens
ggcgggggccatggcgctgccatcccgaatcctgctttggaaacttgtgcttctgcagaacctgtgaccgcatcaagcagtcagcagctggcacca

SEQ ID NO: 13662 - DNA, 87 bp, Homo sapiens
acatcccccgcatcctggtggccggggagtgcatccgccccaacccttttccccctcgtctcctgtgagaattccccgtcggatacg

SEQ ID NO: 13663 - DNA, 99 bp, Homo sapiens
cttatgggacttgaggccctcaagggtggttctcttcccaaagtggaagccaaattcatcaattatgtgaagaattgcttccggatgactgaccaagag

SEQ ID NO: 13664 - DNA, 100 bp, Homo sapiens
tggcattacttctatagaaatggctgaaggaaaacctccttatgctgatatacatccaatgagggtcatgctaaatgtgtagaagttgtaaaaactttta

SEQ ID NO: 13665 - DNA, 82 bp, Homo sapiens
tggagtgtgtgtgcgtggtcaccttcgacctggagctgggccaggcgctggagattctgaaagtcaagaagacatcatccgg

SEQ ID NO: 13666 - DNA, 75 bp, Homo sapiens
tggccatggcataaggaactctatcccaggaatacagctttgcattagttccaacaaacttggctatctggtttc

SEQ ID NO: 13667 - DNA, 100 bp, Homo sapiens
tggccgccttagcggtagtaactttgtgttatgataacgaaggaggcccaacttcattcaataaggagcctgacggatttatcccagacggtagaacaaa

SEQ ID NO: 13668 - DNA, 90 bp, Homo sapiens
gtcatggcagaggcacgggagaagaggaggatgcggctcgtggtggatggcatggggcgctttggcaggattactacagcatcccatttc

SEQ ID NO: 13669 - DNA, 100 bp, Homo sapiens
ctctgatttgctgtcagccatgaacggatggatgtgatgcctgctagccaaaaggcatgcttttcacttccactgcatctctcgctggctcaaaacacga

SEQ ID NO: 13670 - DNA, 75 bp, Homo sapiens
aggccaagtatccgccagtcaataggaagtacgagtagcaatggtggaacaaagcggcaaaagatatcccatcaa

SEQ ID NO: 13671 - DNA, 75 bp, Homo sapiens
ctgggcaagcagaagtatttcctggcgcctgtgtctggcagagctggtgtgagacgagacaatcctgccccgccg

SEQ ID NO: 13672 - DNA, 100 bp, Homo sapiens
tccatggcagaggacctctgccggaagagcgccatcattgagacctacgtcatggacagccggatcggtcagagtgtccccatccgtctccgagttcctg

SEQ ID NO: 13673 - DNA, 96 bp, Homo sapiens
gagtgttgactttaatttgatggatcctaaactcttggcttcaggttctgatgatgcaaaagcgtatggaccagtttgctgactgctgggcaggag

SEQ ID NO: 13674 - DNA, 100 bp, Homo sapiens
ccagaatatgccaagtatctaaaattttcaacccatgaaagtgcagcccatgccattgtttcggtgaacggtactacgattgaaggacatgtggttaaat

SEQ ID NO: 13675 - DNA, 73 bp, Homo sapiens
acgcgagcaaactgtccctttgtggggaggagagcttcgggaccggtattttaacagcagtgataacaattta

SEQ ID NO: 13676 - DNA, 100 bp, Homo sapiens
ttgttagtgctgtgtgctggagggcactaccagatgggatctgcttggctttgaggaagagtggcagtactgcctcactgcataagggatgggatcagag

SEQ ID NO: 13677 - DNA, 74 bp, Homo sapiens
tcattcaccccccaggagaagctgtggcagcagctcagaagaggacggtcaaaatgcagatcttcgtgaaaacc

SEQ ID NO: 13678 - DNA, 51 bp, Homo sapiens
agtgaagcaaaagccttccatgattacgccctgtctcagcgggaccctcct

SEQ ID NO: 13679 - DNA, 50 bp, Homo sapiens
cggccttcaccaaactccctgaaccaggctgtgcgcatccaggagggccg

SEQ ID NO: 13680 - DNA, 100 bp, Homo sapiens
tgaacatcaagatatagatgtagcaatacttactgcactgctaaaagggcaagtgtccagagaatggctgggatgaaagtacacttgaactctttttaca

SEQ ID NO: 13681 - DNA, 100 bp, Homo sapiens
aagccgggagatcgactgtttgagcccggaagcgcagaagctgccaatgaagagtattaccagctgctgatgtccagcgagggtcacccctgtggagcag

SEQ ID NO: 13682 - DNA, 50 bp, Homo sapiens
cctgtattggtctcctgctcctagagatataagagttcggaccgcccagc

SEQ ID NO: 13683 - DNA, 83 bp, Homo sapiens
aaggcgtcggccggaggacaccccatcgtgcaggtggacgacatccttggagaaggcagcgacgacagcgacagcgagaagag

SEQ ID NO: 13684 - DNA, 100 bp, Homo sapiens
ggacacgaggcggcgggctggagacatggaccgcggcgagcaaggtgtgactgcacagaaaagttacaaaacaaatttgactttttgcgctcacagttga

SEQ ID NO: 13685 - DNA, 74 bp, Homo sapiens
ccagaatggagagcagcagttcacgcagcagcggctcccctgttgtatggacattctgcacccgaaactgatag

SEQ ID NO: 13686 - DNA, 75 bp, Homo sapiens
cgtgggggaccggctgttggcggggactttgaacatgtcggggatcgccctcagcagactcgcccaggagaggaa

SEQ ID NO: 13687 - DNA, 74 bp, Homo sapiens
cctccccggctgattggattcgttactgctttgcaacgcgcacctaactccagagttttgctcttgtcgcccag

SEQ ID NO: 13688 - DNA, 75 bp, Homo sapiens
gagagggaaggaaacaagccaggctacctccgggatgtgacaggcaactacacggcttcttttgtggtggctggg

SEQ ID NO: 13689 - DNA, 100 bp, Homo sapiens
gatgttcgtcgtggcaacgttgctggtgacagcaaaaatgacccaccaatggaagcagctggcttcactgctcagagggattttatcatacaaactggcg

SEQ ID NO: 13690 - DNA, 131 bp, Homo sapiens
cggttcagcgttcaacaacaagcttccaagatgccgcccaaaggaaaaagtggttctggaaaagcggggaaaggttttatggcaattggatatattccgacgaagcttgcgggttttgactggacatgttt

SEQ ID NO: 13691 - DNA, 83 bp, Homo sapiens
ccatcctgccgtccttctccactttcgccagcccgtgccgcgagcgcggcctgcaggagcgggagatacagatgacccaccaa

SEQ ID NO: 13692 - DNA, 83 bp, Homo sapiens
ctattccggccacccattgatttgatgcataaaggcagctttgaaacagttgatccaaggattagttttggatcatggtgccc

SEQ ID NO: 13693 - DNA, 114 bp, Homo sapiens
ccctggagcctcagttggaagcagccgatccagcctgcggagcctgtggggcagatacttggtgcttgaaaaactgaagaaggaagacgctgaccgaattcatatattcagttc

SEQ ID NO: 13694 - DNA, 73 bp, Homo sapiens
actgcttggcacctcttcaataggtgacattcaatgatgtcagagatggctttggattccccgttctgtgtgc

SEQ ID NO: 13695 - DNA, 98 bp, Homo sapiens
agctggggagcccttctgcgccacaggacactcctgggtttattgtgaaccgcctcctggttccatacctcatggaagcaatcaggctgtatgaacga

SEQ ID NO: 13696 - DNA, 100 bp, Homo sapiens
tggccaaagcctgcccagacggctcacctgtgcgggatggaacaaaagacactacaacaacaggagtgcaaacttctctacagccgaaaagagggtcaaa

SEQ ID NO: 13697 - DNA, 100 bp, Homo sapiens
tcacctacctcaactccttcctgcatcagagtaaatgtggggacctagaggaggagctgaaaattgttaccaacaacttgaaatccctggaggcccaggc

SEQ ID NO: 13698 - DNA, 75 bp, Homo sapiens
agccaagaacagcccaatctcctttctgggcaaacgttccaaggcgttgaccctgcactatcagatcctgtgttg

SEQ ID NO: 13699 - DNA, 81 bp, Homo sapiens
tagcgcgaccctgagccggcgcccgtggtccggccatggacgacctcggtttggtgcacctcgatttggaggaagtagggc

SEQ ID NO: 13700 - DNA, 100 bp, Homo sapiens
tattcatgtccataaagctgttttgaaaatcagaacaaaatgtgcatgtcttcaactgacagcaaggaatgccaaaacttcccccttgtcaagtgacaaa

SEQ ID NO: 13701 - DNA, 83 bp, Homo sapiens
ggaagttccacgtcagtcagtctgacggtcagtggatcgacctgcctagagctggaacgttacctccagagcgagccctgcta

SEQ ID NO: 13702 - DNA, 75 bp, Homo sapiens
gcaaaattaaaacgactcctgaaggataacgaggaaatattctgaaatggatcccaaatatttcatcttaatttt

SEQ ID NO: 13703 - DNA, 90 bp, Homo sapiens
gcgctccgccccggcctagggccttgccccgggagcccgcgaggggatccatctgtctctaagtctgtagaacgaatctttaaaatctgg

SEQ ID NO: 13704 - DNA, 98 bp, Homo sapiens
gtctgaacttctctcatggaactcatgaggtccagagggagccaacctgttcatctaccacctgccccaggagtttggtgatcaggacctgctgcaga

SEQ ID NO: 13705 - DNA, 75 bp, Homo sapiens
agaaaaccccgaggagccctgttccaaagcctcctggaccgtccaagaaaaactggcgatggaatatgagaggag

SEQ ID NO: 13706 - DNA, 100 bp, Homo sapiens
cagcatctgggaccgcagcacaggcatcaagttctactccattcagcaggtcctggtgcttgatggtcgaggccatctcctgggccgcctggcggccatc

SEQ ID NO: 13707 - DNA, 82 bp, Homo sapiens
agtgcccggacccaaaacaggaagtttctaagcatgaattgaggaacagaagaagcagagcagatgatcggagcagcatttg

SEQ ID NO: 13708 - DNA, 75 bp, Homo sapiens
agagcggagggagccccagacacggcttgggcactgtttaaaggaaagttccgagaaggcatcgacaagccggac

SEQ ID NO: 13709 - DNA, 75 bp, Homo sapiens
tcacctcgacggtgatttgcaggtggtggtgatgatgtccagcaactctgtgaagcaggagaagaggagtttttg

SEQ ID NO: 13710 - DNA, 101 bp, Homo sapiens
accctctcagatgatgatttcgtgaatgtagcttcagaggaattgttgataaagaccttcgtcactacctcaacttacgatttcaaaagggttctgtggac

SEQ ID NO: 13711 - DNA, 82 bp, Homo sapiens
tgggctgaaggaggaggacaaagagcccctcatcgagctcttcgtcaaggatgaacgtgaagccagagaaaatgtgaagaga

SEQ ID NO: 13712 - DNA, 100 bp, Homo sapiens
ccacaccaggctggagaatatggtgcagaggccctccacgcgtccagaggaccagaggttaatttattctgggaagctgttgttggatcaccaatgtctc

SEQ ID NO: 13713 - DNA, 83 bp, Homo sapiens
tgaggactgactggggttctgagactccctgtcccggaccgcaggtgtcgtgaaaactacccctaaaagccaaaatgggaaag

SEQ ID NO: 13714 - DNA, 82 bp, Homo sapiens
gctttcttcgccgtgctggccgcggcccgcctcagcatctggtacagccgagtatgttgagtcgatgggatgatagccagag

SEQ ID NO: 13715 - DNA, 50 bp, Homo sapiens
gcaccttgcgcttcttgcagtcgtttcacctgtgattccctggatggtta

SEQ ID NO: 13716 - DNA, 51 bp, Homo sapiens
caggcatgttgtataaatgtacagactttcaaacctctggttgaaagaaat

SEQ ID NO: 13717 - DNA, 97 bp, Homo sapiens
tggtggctattatagaggtgggtttgaacccaaaatgacaaaacgggaagcagcattaatactaggtgtaaggcataaacttggaggaggcagtgga

SEQ ID NO: 13718 - DNA, 83 bp, Homo sapiens
cacgggggagtcgggggagtcgtaaacaaccctgaagagaacagccaggcctgtgcccctctcagctgaggaggaaccgagag

SEQ ID NO: 13719 - DNA, 96 bp, Homo sapiens
ctactacctggtgcagggcctgattgaggactgccagctggcgctgcagatcgattgaagacagaaccatttgaagaaaattccttcttggaacaa

SEQ ID NO: 13720 - DNA, 83 bp, Homo sapiens
gattcgttggctgccgtccccgctgctgtgcattgggtagctacagcaagctgggtagcaggcagatccaaaggatatcatga

SEQ ID NO: 13721 - DNA, 120 bp, Homo sapiens
ccactgtccaaattcagaagctcagaacgctggactctccctttgcagggctgttgataatcaggtgtatgtggccacagcctctcctgcccgggatgacaaagcctcctatgttgcctg

SEQ ID NO: 13722 - DNA, 82 bp, Homo sapiens
tttgccgatccgccgcccgtccacacccgccgccagattttgcaagaacgaggctcaaggatgtgagggacacagtattgac

SEQ ID NO: 13723 - DNA, 100 bp, Homo sapiens
tgaccgagaccgtgaccgagagcgtgaccgagagcgcgaatatcgtcatcgttagaagataatgttaattcaagactctcgaagagaagcttcagtgcag

SEQ ID NO: 13724 - DNA, 76 bp, Homo sapiens
agaaggttaagctggctgtcctgaaatattataaggtgcaagaaagcctttgaggtgaaggtgtatgaaagtcatc

SEQ ID NO: 13725 - DNA, 104 bp, Homo sapiens
caagctgaagacatcaagaagatcttcgagttcaaagagaccctcggaacctggtaggtgagtgctgtcctcggctcactttcctcaagctctccggctgccac

SEQ ID NO: 13726 - DNA, 100 bp, Homo sapiens
aaaatcctctgccggaagcagaagctgggaaaattgaggagagtcctttcagtgtcgagggatttcatgcatcaccctgacagccagtggaagttgcctg

SEQ ID NO: 13727 - DNA, 100 bp, Homo sapiens
ctggagtcagctgtacacagaggcagaagctcctcctggggtagagacagatcttattgatgttggattcacagatgatgtgaagaaaggaggccctgga

SEQ ID NO: 13728 - DNA, 82 bp, Homo sapiens
ttacgatcaggagtgttgcaacggttacaggatagtggccaaagcctccaagaacctcatgtccacgcaaagcttggggatt

SEQ ID NO: 13729 - DNA, 83 bp, Homo sapiens
tttgcaagagagacagttactggaacatagagattttataggggccgttgctccagggagaactgcaaatatcttcatccacc

SEQ ID NO: 13730 - DNA, 100 bp, Homo sapiens
agcaagccgcacctggagaagctgaccctgggcatcacgcgcatcctaggtggttgtctggggtgagtgcgactccactgatgactgtattgagcacaac

SEQ ID NO: 13731 - DNA, 80 bp, Homo sapiens
agaagaagattaacctggagttaaggaacagatccccggaggaggccaagactaaggggctgcagagcggggtggacatt

SEQ ID NO: 13732 - DNA, 74 bp, Homo sapiens
cttggagccagaagctacatgacccctaaacggtgccaagtaatgattagagaaatgagttgttggggtcatat

SEQ ID NO: 13733 - DNA, 133 bp, Homo sapiens
gctcagaccactgcaacctatgggcagaccgcctatgcaacttcttatggacagcctcccactggtgctggagaatctggtaaaagcaccattgtgaagcagatgaggatcctgcatgttaatgggtttaatg

SEQ ID NO: 13734 - DNA, 82 bp, Homo sapiens
ctaatgtggattactatccagatgtggtgaagcagtattttccaatttgaagattcatttgaaggtggctcctgccacctgc

SEQ ID NO: 13735 - DNA, 75 bp, Homo sapiens
agaaaatacaaatcacacgcataatggatgaaaggaaccgacagtggattgtattacacagagcatgaatatact

SEQ ID NO: 13736 - DNA, 100 bp, Homo sapiens
aaggaaaatggctctgtcggtgtaaaaaaaacaactctgctcatggtgattacatgcaaaataacgagagcagcttaatagagcaagctccaatacctca

SEQ ID NO: 13737 - DNA, 75 bp, Homo sapiens
gttaccagcaatgacactacgatactctctaagtggtggaggaacttcatcccactgaaattcctttggcatttg

SEQ ID NO: 13738 - DNA, 100 bp, Homo sapiens
ctctttgtagcgtggtgcttctgttgctcacaggccctccctatcctgaagacattagctgagagtctggcaccttttaaaggtctgatcatcaattgtc

SEQ ID NO: 13739 - DNA, 98 bp, Homo sapiens
aactgagtcaaccagcttccttgaaaaaaaagtgaagaagaaatttgattggacatttgaacagacagtggaatgggatgaagctctcttgactatga

SEQ ID NO: 13740 - DNA, 83 bp, Homo sapiens
cctaccccaaactcatggaaattgatcagggccgttgctccagggagaactgcaaatatcttcatccacccccacatttaaaa

SEQ ID NO: 13741 - DNA, 75 bp, Homo sapiens
cccggccccgcccgcgccggaagagccacgccggttgtgaccgagattcccgacgagagagactgaggggaagag

SEQ ID NO: 13742 - DNA, 91 bp, Homo sapiens
cggcaccatggagtcaccttttagcccgggactctttcacaggctggatgaagattgggatcttgcttctgaaatatctacctgggatgga

SEQ ID NO: 13743 - DNA, 100 bp, Homo sapiens
tgggggtagtagaatgcttgaggcctggaatttaaacctgagccactatctgaaggggcgccgatgtgtgttgaaagactgctgcaaaattcttgacaac

SEQ ID NO: 13744 - DNA, 128 bp, Homo sapiens
gcggccgggacaaaacccgaaagaggcgcagcgcttccagtggtagcagcagtaccagttaagtgggcagaccaacatccacctcagcaaaaacttcttcctgacgaatcgcgccagggagcgctcag

SEQ ID NO: 13745 - DNA, 113 bp, Homo sapiens
aaagatctgcagagctcccagggcggacagcagcctcgggtgcaatcctggagccccccagtgaggttggtggctaaaggagttaagagttctgatgtttctccacctttggg

SEQ ID NO: 13746 - DNA, 100 bp, Homo sapiens
caggtctggagctcgaccgggccaggatgggatgctgttatggactggaaagatgtcctgtcaggaggggaaaagcaaagaatgggcatggctcgtatgt

SEQ ID NO: 13747 - DNA, 75 bp, Homo sapiens
aataagcttcgggcgctgtagtacctgccagctttcgccacaggagacatgcccactgttgctacgggtcttcac

SEQ ID NO: 13748 - DNA, 99 bp, Homo sapiens
acgaaccgcaccaccagctggatcgacccgcgggacagattggaaacctccacctgcacaaactggatgaacttgactgccttgtaaagggcttgctgt

SEQ ID NO: 13749 - DNA, 90 bp, Homo sapiens
ttccaggggctctgggagtggctgccagtggacatttgggagcaataaaaataagaagaaaggaaaagccagaaaaatagagaagaaagg

SEQ ID NO: 13750 - DNA, 75 bp, Homo sapiens
cgggagctgggtcaccggcttgaggggctgcgtgaggcgcggaggcagctatcagttgagggatttgcagttgat

SEQ ID NO: 13751 - DNA, 90 bp, Homo sapiens
cggaaaactcccaacttcctggtagcttttaaatattgccagaaatatggaagtgacaaagtacgtgtgataaccctggtgaagaatcgt

SEQ ID NO: 13752 - DNA, 75 bp, Homo sapiens
ccctgcgttgtaccatccgcctgtgggacacctaccaggtatgtcactggctggttcagcccctaccaccgccag

SEQ ID NO: 13753 - DNA, 51 bp, Homo sapiens
gaagacggccgctcactttcacgtgctcctgcgggaagaagtgtcgcggct

SEQ ID NO: 13754 - DNA, 82 bp, Homo sapiens
caaaaagcagctgatcctgtccctagttttgatgaaagcaggtgaaatcgccatgcttggtggtgtgggagaagagaatgag

SEQ ID NO: 13755 - DNA, 75 bp, Homo sapiens
agctgaggctaatgaaaaacaggccatttggatatggttcgctttctacttgaagctggtgcagatcaagagcac

SEQ ID NO: 13756 - DNA, 98 bp, Homo sapiens
ccccatcgagaaaaccatctccaaagccaaaggtcatccccttctaaatgcccatcattagatgataggtggtacatgcacagttgctctgggagtct

SEQ ID NO: 13757 - DNA, 80 bp, Homo sapiens
tggaattctaatttgaaccatgtttggattgaagccgcctctgtattacttaccagggtgtacagcaagctgtgattcct

SEQ ID NO: 13758 - DNA, 100 bp, Homo sapiens
aaccatcgtcgttacgtgaaatctcgagatgatagtcaactaaatggagattctagtgctttgcttgaacagcatatgccatatatgagctggctgtggc

SEQ ID NO: 13759 - DNA, 100 bp, Homo sapiens
tcaaaacagcagcgcgggcaaccggggaccccggccactggagcaggtcacctgttacaagtgcaagaactatatcagccagtattctgaaattgctatc

SEQ ID NO: 13760 - DNA, 100 bp, Homo sapiens
cccaccacccgcccaggccagccccagcagcaacagcagcacagcctccttttagaggactcagaagaagaagaaggtgacttatgtagaatttgtcaaa

SEQ ID NO: 13761 - DNA, 94 bp, Homo sapiens
aaggcaacatcctgtcacaggccatgctctggcaaaaaccggaaggagagttttacatggaagtggcttacagaaacttggcgctgaggtgcag

SEQ ID NO: 13762 - DNA, 100 bp, Homo sapiens
gggatcgactgggctcttacagcggccccacctcggtctcccgccagcgcgtcgaaagcctgaggaaaaagcggccgcatgctgaagagtttctggcaga

SEQ ID NO: 13763 - DNA, 50 bp, Homo sapiens
ctgcgttatagcggccgtgagcaaggatatcctgaaggatactatagttc

SEQ ID NO: 13764 - DNA, 76 bp, Homo sapiens
catgggcggcctctcttatacacagcagatccggggatttctttcacggtttgataatgtccttcccgtcagcctg

SEQ ID NO: 13765 - DNA, 88 bp, Homo sapiens
gcccggccaggttcggcgttccgtgagtgaacggtgtacacttaaagcgttctgggaatatgaatcccttctgcaccctggaatcacc

SEQ ID NO: 13766 - DNA, 74 bp, Homo sapiens
aggctcaagcaatcctaccatgtcagccttcccagtagctggaactacaggaccctgatgctcccataagacag

SEQ ID NO: 13767 - DNA, 98 bp, Homo sapiens
gagtagctgaggagctggcattggagcaagccaagaaagaatccgaagatcagaaacggttacctagggtatgaattaatacagacttggaaactctg

SEQ ID NO: 13768 - DNA, 83 bp, Homo sapiens
cccgaacgggttgcttcccccgctgcgagcaaaatgatgcttcaacacccaggccaggtctctgcctcggaagtgagtgcttc

SEQ ID NO: 13769 - DNA, 101 bp, Homo sapiens
aaattagaagaactacatcacaagctgcaggaattaaatgcacatattgttgtatcagatccagaagatattacagatggactagaggcttttaccagatt

SEQ ID NO: 13770 - DNA, 82 bp, Homo sapiens
ccggatcaatccagatggcagccagtcagtggtggaggccataggaaaaggatacagagtagagtttcatgaacctgaaact

SEQ ID NO: 13771 - DNA, 100 bp, Homo sapiens
gccacagcgacgccggcgccgagggacaccgcagtatgaggcagagggcagctttggaagaagtagaaggtgatgtggcagaattggaactaaaacttga

SEQ ID NO: 13772 - DNA, 80 bp, Homo sapiens
ttgccaaccccagagctgccgagcaaggatgcctgagaactctgttgacgttcagggatgtggccatagaattctccctg

SEQ ID NO: 13773 - DNA, 100 bp, Homo sapiens
tcggcagtggctgaaggaagaatatggagagagccctttgcaggatgcagaagaagccaaaaacattctgggtcagaatggcggcagtggagcatcgtca

SEQ ID NO: 13774 - DNA, 83 bp, Homo sapiens
ctacctggggatattatcaaatctactactgttcatggcaggtacatggactatatcgcacaacaggtgctagttttgagaag

SEQ ID NO: 13775 - DNA, 95 bp, Homo sapiens
cagtgactaccaacgtttggaccagaagggtgtgggccgaagatatgctcatgtggtgttgaggaaagcagacattgacctcaccaagagggcgg

SEQ ID NO: 13776 - DNA, 82 bp, Homo sapiens
aaacccggggcaggcgggcagctgtgcccgggcggcacggccagaaatacactttcgggaaatggcctctaaatcctggctg

SEQ ID NO: 13777 - DNA, 74 bp, Homo sapiens
gatgacgagggccacagtgggattaaaaagaccactgaggagcaggtgcagtttccctgaaacctgggctcttg

SEQ ID NO: 13778 - DNA, 83 bp, Homo sapiens
gcaaggagcacgtggcagcgcaggaaacagacctgcctgaccagtgcacgcccaacccctgcgataggaaggggacccaagcc

SEQ ID NO: 13779 - DNA, 82 bp, Homo sapiens
aagtaggccgtctcgctctgggtctccaggcccgcgaccgtccgccagtcgtcccgagatggagaaggaggagacaacccgg

SEQ ID NO: 13780 - DNA, 100 bp, Homo sapiens
cgcggtccccgccagcgccccatcctgagccgggcacaggcaggatggccgatgctgacaggaaccagcggtgactctggggcccctggcagcagctctg

SEQ ID NO: 13781 - DNA, 98 bp, Homo sapiens
ttctttacagtaatttcaacagaagagtgagagatggaacccgaagaagaaaggattcgttacagccagagattggtgtctgacttccagcaactgct

SEQ ID NO: 13782 - DNA, 101 bp, Homo sapiens
gggggactgcaaaggccaatgttggtgctggcaaaaaggtcacacatcccgggtcctgagtctgaccatgagcccagatggggccacagtggcatccgcag

SEQ ID NO: 13783 - DNA, 100 bp, Homo sapiens
tgcacttccttagcaccttgccccgaccccatgctctggggacagacattgctagcgtcaccgaggccaggacagtaataccccacttttattcgctata

SEQ ID NO: 13784 - DNA, 100 bp, Homo sapiens
ctttgacctttttgaagcctttgcaaaagatctatcttgggatcccatggctttctttactgggctctggggccccttcacctgtgtaagcagagtgctg

SEQ ID NO: 13785 - DNA, 50 bp, Homo sapiens
gcccaagaaaaagcacctggactctgttccatttcctccaagtcaccggc

SEQ ID NO: 13786 - DNA, 83 bp, Homo sapiens
gttctcgggatccttctgtcatagaaactcacatgagacaaatgcgctcagcttcaattgattctccttccagaactcctgtc

SEQ ID NO: 13787 - DNA, 75 bp, Homo sapiens
ctgccggagcccgagtggatcggggacggagagaacacgagcccatcaggctcttgcagccaatgccggaacagg

SEQ ID NO: 13788 - DNA, 75 bp, Homo sapiens
cctgaagagggaagacacgcggaaacagacacatcatctcagagttggagcacctgacgtttgtcaacacggatg

SEQ ID NO: 13789 - DNA, 75 bp, Homo sapiens
ggagatcgattgcaccatgctcacccctgagccagttttaaaaatctacctgttactcgtattttggacaatctt

SEQ ID NO: 13790 - DNA, 102 bp, Homo sapiens
caggagctgttggagctttgcagctgacctacatctcgaagggtcgagctgtgcagttttagcgggtacaagatctaccccggacacgggaggcgctacgcc

SEQ ID NO: 13791 - DNA, 90 bp, Homo sapiens
ctgcgagcgagccgcgaaccgagcgggcggcgggcgcgcgcaccatgggggagaaacccgggaccagaacctttcagctcttggggcatt

SEQ ID NO: 13792 - DNA, 75 bp, Homo sapiens
gaacatgcatatttgggtccaactgtgaagccagatgataaggaatggaagttggatacactttgtgacttgtac

SEQ ID NO: 13793 - DNA, 98 bp, Homo sapiens
ccccattaacccaaagggcctggaggtgctgggtaggccaggtttcagcatcgcagacaagaagcgcaggacaggctgcattggggccaaacacagaa

SEQ ID NO: 13794 - DNA, 75 bp, Homo sapiens
ggacgagtgagtggatcctgggaagcgctgtgaaatgggctgggccatgatgggtcagctctccgcagcctgcag

SEQ ID NO: 13795 - DNA, 74 bp, Homo sapiens
ctgcagttacaggaacatcgtctgcttcatgactatcaagaaatccaagtggtaatgggcgaagtttattcagc

SEQ ID NO: 13796 - DNA, 90 bp, Homo sapiens
caaaaaacaagggaccttccaaggcagcttctgatgatggcagcttaaagagttccagattgcttatgcccgtatagagggggatatgat

SEQ ID NO: 13797 - DNA, 100 bp, Homo sapiens
tccgccgagcccaccgccttcgacatccaggatctcagccatgtgaccctgcccttctaccccaagagcccacagcaacagaccctgatgctggaataaa

SEQ ID NO: 13798 - DNA, 100 bp, Homo sapiens
ttgacactcagcactttgcgccaccttactctaaccaggagcctttaacgatagtgaagctctggaaagctttcactgtagttcagcccacgttcagaac

SEQ ID NO: 13799 - DNA, 83 bp, Homo sapiens
cgctgcccgacgagcaggacttcatccaggcctacgaggaggtgcgcgagaagtacaaaggtgatgtgtccaatctagatccc

SEQ ID NO: 13800 - DNA, 99 bp, Homo sapiens
gagcctcagttggaagcagccgatccagcctgcggagcctgtggggcaggcatcaagcatgatggaaccatgtgtgatacctgccgccagcaaccaatc

SEQ ID NO: 13801 - DNA, 75 bp, Homo sapiens
ctgggatttggaacaaaggttgcagattctgaattatggtattgaagcccctgggtgataatttgatggaggaaa

SEQ ID NO: 13802 - DNA, 75 bp, Homo sapiens
caaaaggcctttgagaagaacattttcaacaagacccatcggactgacagatcatgtatatgaacttctcaacac

SEQ ID NO: 13803 - DNA, 116 bp, Homo sapiens
ccgcaaccattgacgccatgtcgggttattcgagtgaccgagaccgcggccgggaccgaggggcgtgatggtgggcatgggtcagaaggattcctatgtgggcgacgaggcccaga

SEQ ID NO: 13804 - DNA, 75 bp, Homo sapiens
gccagacacgacgtctggcaggaacctcggcctcagagagatgacctgatcagagccatcaagaaactaaaggca

SEQ ID NO: 13805 - DNA, 83 bp, Homo sapiens
gctactcgcaggaggtcttcgacaatgcagatcttcgtgaagactctgactggtaagaccatcaccctcgaggttgagcccag

SEQ ID NO: 13806 - DNA, 74 bp, Homo sapiens
agcacgagctgtgaggggattcacttgtgtgcggaactcctcggaaccatgcactattcctgatcagagaactc

SEQ ID NO: 13807 - DNA, 87 bp, Homo sapiens
ccctgaggagatccgttggctcctggaagtttgcagttaacatgtttcgaacattaccaccttcctccaatcctacgggagcggaat

SEQ ID NO: 13808 - DNA, 83 bp, Homo sapiens
gtcccggccttcatcgacatcagtgaagaagatcagccttatgccagcctggaccatcttggaggcagtgtaggatcatggaa

SEQ ID NO: 13809 - DNA, 75 bp, Homo sapiens
gtggatattgggcttgacagctgcaaggagttactgaaggcaccttttgatgtcccagcagaccctgaggaatgt

SEQ ID NO: 13810 - DNA, 80 bp, Homo sapiens
gccgccgccgcctcggccgaccagggacctgcccgcctgcggctgctccggatatgggaaaatagtctccacaaaggcaa

SEQ ID NO: 13811 - DNA, 95 bp, Homo sapiens
ggaaaggtgccacagcagagacgcgaaggagaggccctagaaccgtcataaataaagttcatcttaaggcaaatcatgtggtcaagagagatgtt

SEQ ID NO: 13812 - DNA, 75 bp, Homo sapiens
ggaactgttctgccggaatttgaaaagtgcctgggatcatcgtcttgctcttcttttatctcagtttgtgggtag

SEQ ID NO: 13813 - DNA, 75 bp, Homo sapiens
aagctactggtgccagaacacagagacagcagcccagtgcaatgagtgaaacacaaatcttttctaacggctgag

SEQ ID NO: 13814 - DNA, 74 bp, Homo sapiens
gcccgcctcatttgcgccttgcagcactgctggaccaggacagagcgggatgccaccagcttgtccaaagggaa

SEQ ID NO: 13815 - DNA, 74 bp, Homo sapiens
cgggacctgacagccgggtcagaggccaccagcccctcgggttccaagatgcagctactggagacagagttctc

SEQ ID NO: 13816 - DNA, 101 bp, Homo sapiens
ccggaggaaggaagaagaggacgccgggcgcgcagaaactgccagaggcatgcagcattggtgatggaaagccctttgtcatgaatctgcaggatctgtat

SEQ ID NO: 13817 - DNA, 100 bp, Homo sapiens
gacatggcacagcgcaggaaagaagcagctgatatgctaaagctgtcggaaaaggtaacagaagatggaactcgaaatcccaatgaaaaacctacccagc

SEQ ID NO: 13818 - DNA, 98 bp, Homo sapiens
tacaggcatactttggagatgttacgggtttggttccacatcactgcaataaaatgctgctgcagattgctgatgattttatcgagagtgtggtgaca

SEQ ID NO: 13819 - DNA, 75 bp, Homo sapiens
accctggagcatgtgcaggatcctcagaacactgttaaggtccagggccatgaagcccccaggaggagaatcgag

SEQ ID NO: 13820 - DNA, 97 bp, Homo sapiens
aatcaggttgtcaaaccgcaggcatttcaatcacattatgaacccagtgacttgattgtaaaaatttacagagcggaatcatatgctggtctccaag

SEQ ID NO: 13821 - DNA, 115 bp, Homo sapiens
agcagctaagctaacctctgaccccactgatattcctgtggtgtgtctagaatcagataatgggtatccttgagacggtcagtcagattatttctggatgggttgctgatcaaaa

SEQ ID NO: 13822 - DNA, 100 bp, Homo sapiens
gctcggcccgcgggggagccccgggagccgcacgagtacagttgtgaatttggctccgcgaagtattatgcactgtgtggctttggtggggtcttaagtt

SEQ ID NO: 13823 - DNA, 100 bp, Homo sapiens
tcacctcccgtgtcatcggcttcactgtcctcacagaggcagaccctgcagccaagacggggtctgactgtgttacccaggctggtcttcaactcttggc

SEQ ID NO: 13824 - DNA, 99 bp, Homo sapiens
atctcagttcctcaaatatgcagcaaagattacaccaagatctgtgctgaccacaggaattggatctactagtgcagttgtctggcgccgggagtgaga

SEQ ID NO: 13825 - DNA, 50 bp, Homo sapiens
cgaggaggcggatcccccggcgtcaggctgaccccgcactacatctaccc

SEQ ID NO: 13826 - DNA, 100 bp, Homo sapiens
cgggactgcccgtcgaggtgcgcggctccaacggggccttctacaagcgatctagggcagccctgcagaggtacctgttctactgtaatcgctatatgaa

SEQ ID NO: 13827 - DNA, 75 bp, Homo sapiens
gcagaagagaagcagtgaaggagtgcagaggcatcacctgaaaggcctgtatccggtgtccgaggcgaactcagt

SEQ ID NO: 13828 - DNA, 76 bp, Homo sapiens
gcatctattgtgaaaaacctaaaggataccttagtgcactgacaggcagaactcaccagtcacatcaccaggatcc

SEQ ID NO: 13829 - DNA, 75 bp, Homo sapiens
gctctgaagtggggtctctggatccagctccaggtcccacaggggctcttcttccccacgaaaaagatcttattc

SEQ ID NO: 13830 - DNA, 90 bp, Homo sapiens
gaaatgatgatggaaatgaagtataataccaagaaagccccacttgagaggattccggtcactgtgctgccacctgaggccatcacgatc

SEQ ID NO: 13831 - DNA, 101 bp, Homo sapiens
gcgactgcgcacgcgcggctgacggatgtttccagtcctaaagattagtgtcacagggttggaccccaatgccatgtactccctcctgctggactttgtcc

SEQ ID NO: 13832 - DNA, 100 bp, Homo sapiens
gtttcccattgcagcccaggtggataaggaacatctcttcccagcggctcagacagcacccaagaaaacctcatttggctcgctgaaggatgaagaccgg

SEQ ID NO: 13833 - DNA, 82 bp, Homo sapiens
caagtcaaacgcagaaggactgcctcactgagcaaccaagagagcgtgaggatcatccccggagaggacgggaggatcggca

SEQ ID NO: 13834 - DNA, 50 bp, Homo sapiens
aatcaagctgcaaagtaactaggtctctcaggcagctgcagagcttcaac

SEQ ID NO: 13835 - DNA, 101 bp, Homo sapiens
gaagtagctgaatgtgttactccattgctgaggagtggatccatcagttacacaagtgacaagaaatgttccaccaggacttgatgaatataatccattct

SEQ ID NO: 13836 - DNA, 100 bp, Homo sapiens
gaagctgaagcattgcttcaaagcatggggctaactccagaatcccccattgcatgttggaacaggattccaggagaatgaaccctagtgtgagccctgc

SEQ ID NO: 13837 - DNA, 74 bp, Homo sapiens
tgatattgatgcttttgaatttcatgaagctttctcggatattaatatgattctctcaatgatggatatcaacc

SEQ ID NO: 13838 - DNA, 101 bp, Homo sapiens
cgccggatcccgaagacgagggcctggaggaaacagggagaccaaattttgaggaaggtggaccaacatcagtagggagaaagcatgaatttatacgctca

SEQ ID NO: 13839 - DNA, 75 bp, Homo sapiens
ccgcgtccccagagagcgccctgagagaacagggtggccgcttggtccagtctcctttagcattggaaacaccaa

SEQ ID NO: 13840 - DNA, 75 bp, Homo sapiens
cattgacgccatgtcgggttattcgagtgaccgagaccgcggccgggaccgaggtaaggtacctgccgtgggcag

SEQ ID NO: 13841 - DNA, 78 bp, Homo sapiens
ctgtgctcgcgctactctctctttctggcctggaggctatccagcgaggcatacacggaatacctgaggagcatccac

SEQ ID NO: 13842 - DNA, 87 bp, Homo sapiens
atgatccaagtcaccaagaaattactgtctcaagtgatacggtgccagcgagatttcagattcctgtaaacctctaaagaaaaggag

SEQ ID NO: 13843 - DNA, 90 bp, Homo sapiens
cgtgtcctgaaggagttccaccaggccgggaagcccatcggccaaaacagagtggagtacgagaaaagggtccgagcacaagccaagaag

SEQ ID NO: 13844 - DNA, 100 bp, Homo sapiens
acctacctgaggatgatcaagcggagttcgatgcgaaaaagcttgtggtgaaggggggcaaaaaaaagaagcaagttctgaagttcactcttgattgcac

SEQ ID NO: 13845 - DNA, 100 bp, Homo sapiens
ctcacctcaagaagtcacttaggcatggctgtaatatttcttttcactcccaggcccttccttctaccatgattatagtagcagtttattgtcctgtgat

SEQ ID NO: 13846 - DNA, 74 bp, Homo sapiens
aaaacaaacgtcacacatgaagaacacacagcggtggaaaagaaggagaacttatggattgtgatggaaaatca

SEQ ID NO: 13847 - DNA, 95 bp, Homo sapiens
aacagcggcgtttcacggtggcacatacatggtgtgttctactccctcttctgggaatgaagcctccccagcaaagcctatacctgcttgttgat

SEQ ID NO: 13848 - DNA, 88 bp, Homo sapiens
ctcgggtaggggggctggagagcccccaggtggaccatggcggtgagattccagacccgaccgcatgtctgtcatggacctcgccaat

SEQ ID NO: 13849 - DNA, 75 bp, Homo sapiens
ggatgttctagagaacaaactgttgcctcttcgcagggggttctatggcctggatgagtctgacctcgacaaggt

SEQ ID NO: 13850 - DNA, 51 bp, Homo sapiens
catctgcggcaagaacgccaatggaagtgcattttcagctgagcacctcaa

SEQ ID NO: 13851 - DNA, 75 bp, Homo sapiens
ccggaactcctctaccaagtcggggaaggtcctggtgaacgccatcatcaacagtggtccccgggaggactccac

SEQ ID NO: 13852 - DNA, 100 bp, Homo sapiens
gcacttcgcattttggcattgacatttaattttagggtcctttatatagaagggagagtagcctttgaagaagatggtggagagaattcgcaagttccag

SEQ ID NO: 13853 - DNA, 75 bp, Homo sapiens
cattcccgggaggggggagcggcgttggaggccaccgtttccaggcgaagctgctctcaggggagaacccagaat

SEQ ID NO: 13854 - DNA, 90 bp, Homo sapiens
gttcgggcctagcggagccgggactggagacggatgtttccagtcctaaagattagtgtcacagggttggaccccaatgccatgtactcc

SEQ ID NO: 13855 - DNA, 100 bp, Homo sapiens
gaggatgatcttgcggccaaaggggacctcggcgcagtaatgtcaacatatacttgccagaactaatacagctgatgaaatacctgaccttttctgctcc

SEQ ID NO: 13856 - DNA, 100 bp, Homo sapiens
cgggaactgtatcaacagcatttggtggtgtgactttgacaacgactgtggagacatgagcgatgagagaaactgccgacacagcattgttggttttgcc

SEQ ID NO: 13857 - DNA, 82 bp, Homo sapiens
cggctgccggctgacgtctccttgcgatggagcatatccggacgaccaagtggaatcccccaaagaaggtaaagggagcaag

SEQ ID NO: 13858 - DNA, 83 bp, Homo sapiens
ggttgagctgcagcagagggagcttgccttgaaggacaagaacagcgccgtcaccagcagatggcaggaaagggacacagccg

SEQ ID NO: 13859 - DNA, 50 bp, Homo sapiens
gagctccagccgaaggagaagggggccctgaaggatggctgccatattgg

SEQ ID NO: 13860 - DNA, 100 bp, Homo sapiens
tggcatttggctttgcctttctggacacagaagtatttgtgacagatatttgatttaatggatgccaaagcacgtgctgattgcatcaaagaaatagatc

SEQ ID NO: 13861 - DNA, 75 bp, Homo sapiens
cactcccctcgctgcccgggcccggagcgcagcgcggccgcacaggaattcctcctgatcagcagagactgatct

SEQ ID NO: 13862 - DNA, 83 bp, Homo sapiens
atcaccgagcgcttgatgtgcgcggagagcaatcgccgggacagctgcaaggagtgcgccggtctcggggaaatgcccggttc

SEQ ID NO: 13863 - DNA, 100 bp, Homo sapiens
ggaaaagcaagtacaagatcctggatgccacggatcaggaaagcctggagctgaagccaacctcccgagcaggtctgaaaaagattttggaagtgggggg

SEQ ID NO: 13864 - DNA, 105 bp, Homo sapiens
atcatctctggcaccttccaccagtggagagagggcaccaccaaaagtgaggtcttctacccagatgtggacgagtgctcactagcagaaaaaacctgtgtgagg

SEQ ID NO: 13865 - DNA, 95 bp, Homo sapiens
aaccgaagttggaagtgtctcttagcagcgcgcggagaagaacggggagccagtctgaaatggttgtgacaaataatctcttggatctgccgccc

SEQ ID NO: 13866 - DNA, 100 bp, Homo sapiens
gccacagccagggcctctgctctgtacacaggtgacaaagtaattccactttatgcacctctatgtagaaaatgcaagttttgtctgagtccactcacaa

SEQ ID NO: 13867 - DNA, 80 bp, Homo sapiens
cctgtcacccaccaactagcacaacctgttgtattgcagagggaatggcatacatcgagcggaagaactacattcaccgg

SEQ ID NO: 13868 - DNA, 100 bp, Homo sapiens
tataagtagcaggataccagtttcttcaggattcatggtgcaaatgttaacagggatttattttgccttgttcaggaagatttgactgaagagaaaaaaa

SEQ ID NO: 13869 - DNA, 96 bp, Homo sapiens
gagattgccacctacaggaagctgctggaaggcgaggagagcagaaaaaggcattgctggctctgaagaagcaaagtagcagcagcacaaccagcc

SEQ ID NO: 13870 - DNA, 51 bp, Homo sapiens
gagcctgacccactggaagataaacaggaatactcccccagttgcaagagg

SEQ ID NO: 13871 - DNA, 90 bp, Homo sapiens
agccggaaggaggagccatagcttggagtagggtacaggattatcatggtcataaaatttgtgacccttacgcctggcttgaagaccccg

SEQ ID NO: 13872 - DNA, 75 bp, Homo sapiens
ccttgttgttcatgtctgaagggaaaccttacctgttagagctacaccaaaattgcattgagccaaacttgccac

SEQ ID NO: 13873 - DNA, 98 bp, Homo sapiens
tcagacgttgacagtgagtcctcagacattagacctcccacagcccagtgtgccaggacgtgctgaaattcatcagtcagtggtgtggagggctcccc

SEQ ID NO: 13874 - DNA, 74 bp, Homo sapiens
caccagcactgtctccaccctagaggtgccaatgggtcatgtttggttagaaggtgacaatctacagaattcta

SEQ ID NO: 13875 - DNA, 83 bp, Homo sapiens
actcgtcagattcttgcctgcaggaaatctgaaatagagtactatgctatgttggctaaaactggtgtccatcactacagtgg

SEQ ID NO: 13876 - DNA, 100 bp, Homo sapiens
tgatcctgcaacacgagcatggcatggccccgcaggtcttcacccaggccctggagtgcatgcgcagcaatcatcctcttccagtggtagcgtgtttggg

SEQ ID NO: 13877 - DNA, 100 bp, Homo sapiens
cggcgagcggacggctgcatttacggggtctcccggagggccagagtcggatggatagaatgacagaagatgctcttcgcttgaatctgttgaagcggag

SEQ ID NO: 13878 - DNA, 101 bp, Homo sapiens
gccagaccgtggaagatttaacgaatggggttgtgatggcccaggttcttcaaaagatgagcctccagaagatgatgcaaacatcattgagaagatcctgg

SEQ ID NO: 13879 - DNA, 100 bp, Homo sapiens
cagacttgcagaaaaccagtgaagggaaggtagaagatagcaccatgccgattcgtcgaactgtgaattctacccgggaaactcctcccaaaagcaagct

SEQ ID NO: 13880 - DNA, 83 bp, Homo sapiens
ggagtgacggtgccaccgcggcgccctcacttttaactttctggaacgcacccaccactgcctggctctttattgcatcagcg

SEQ ID NO: 13881 - DNA, 95 bp, Homo sapiens
tggaggagaatcaagagctccgaggttgatgccggcccaggatggatcagacctgtgaactacccagaagaaattgtctgctgcccttttccaat

SEQ ID NO: 13882 - DNA, 100 bp, Homo sapiens
ttccgaaagtggctctacaaacccaagccattgagacccagagcagcagttctgaagagatagtgcccagccctccctcgccaccccctctaccccgcat

SEQ ID NO: 13883 - DNA, 50 bp, Homo sapiens
gcgcgaatatcgtcatcgttagaaggagaatacttatctctggcgcacat

SEQ ID NO: 13884 - DNA, 89 bp, Homo sapiens
ttcacgagaagaaaattggcaagagtggagacaaagagatgagcagtttaaggaagaaatctctaaacgttttaaatcacatactgacc

SEQ ID NO: 13885 - DNA, 75 bp, Homo sapiens
tattggacgagtcttggattcgtgaacagaccacagtggaccacttctgggatattgtgaataacaagatggtgc

SEQ ID NO: 13886 - DNA, 74 bp, Homo sapiens
gagcaacaggaaatgaacacattgcagatcttgtgcctcaagcagccattgagtatggcaggatcctgacccgc

SEQ ID NO: 13887 - DNA, 78 bp, Homo sapiens
gttattcgagtgaccgagaccgcggccgggaccgaggtcgagtaatcctgcctgtgtctgtagatgaggtaagtcctt

SEQ ID NO: 13888 - DNA, 74 bp, Homo sapiens
ccacaacaagcaagcatgcagcttactgcttgaaaggtgtaccaacattcgaccaggagagactggaatggatg

SEQ ID NO: 13889 - DNA, 75 bp, Homo sapiens
aaggaacttggttccccctccctcagcttccgccccaaaagggcatttgcacgccaaaggcaaagaagaaaaaat

SEQ ID NO: 13890 - DNA, 101 bp, Homo sapiens
tatggatggctatccagacgctctggtcatactaaagaacacatctggaagctcagaagagcccacagagaaggaacctccagggcagttacaggtgaagg

SEQ ID NO: 13891 - DNA, 76 bp, Homo sapiens
tatgttgacttctttaaaacccttaaagaaaacttccacactagcaggcctacaatgggcaccatcaagccttgga

SEQ ID NO: 13892 - DNA, 83 bp, Homo sapiens
caaccacaaggcagacatcagctcctggttcaacgaggccattgacttcataggtcatgcaagacaagataatctgccttccg

SEQ ID NO: 13893 - DNA, 101 bp, Homo sapiens
cggagagacgccggccgtggacatcggggcagctgacctcgcccacgcccagcagcagcagcaacagatctgaacagaattaagacgaacgagctttcaca

SEQ ID NO: 13894 - DNA, 100 bp, Homo sapiens
gccgttttcgcctgcagctgctcaccgttccttcctgtgtacagcccttctgaggaggagaagaggaaccccgcgctgtatgccagcaacgtgcggcgag

SEQ ID NO: 13895 - DNA, 74 bp, Homo sapiens
acaacaatgagatcgtggacaagatcatgggcaaaggacagatccaggttcatgatcaagagggcccaaggacg

SEQ ID NO: 13896 - DNA, 80 bp, Homo sapiens
aacatttcagattttctctaacatcttatatgaagagttgtcactcagcccagtccatcagtttctcagcccagtacttc

SEQ ID NO: 13897 - DNA, 101 bp, Homo sapiens
gtcaagagcgtgccctacttcaaggataagggtgacagcaacagctcggcgggctggaagctcctctggtgcaagtgtggtagctattgacaacaaaatcg

SEQ ID NO: 13898 - DNA, 75 bp, Homo sapiens
ctgtaatgtcgcaaggtggccgttactgatcttacttcatccagtctaataggacagaactgtaccgctctcttt

SEQ ID NO: 13899 - DNA, 100 bp, Homo sapiens
agagatcaaggtcctttccgacaagctgaaggaggaaggtgtcttgctgcaggtaactaatgaagaagtggtcaaccacagagtcttcaagaaataagaa

SEQ ID NO: 13900 - DNA, 100 bp, Homo sapiens
gtctaaaaatgaaccaagaaaaacaaacgtcacacatgaagaacacacagcggtggaaaagagcaaatttttcagaacataaaacaagaatatagtcgtt

SEQ ID NO: 13901 - DNA, 75 bp, Homo sapiens
cgccgcctcagccgccgccgccgccgttttcgcctgcagctgctcaccgatgttaactcattccagcaaactaca

SEQ ID NO: 13902 - DNA, 90 bp, Homo sapiens
gatccagtgttcaccatcctggccccggaagctctttcgacgtgtagcagcagctttgccgggaatggaaagcacacaggacagaagcag

SEQ ID NO: 13903 - DNA, 76 bp, Homo sapiens
ggggagtcgtggcgtcgtctgcgaccgctgccttctcggacccaacatgagtgaagtttcctgcaagaaacgggac

SEQ ID NO: 13904 - DNA, 90 bp, Homo sapiens
aggtattcttgtggatattgggcttgacagctgcaaggagttactgaagatctcaaagacggaattagattggttccttcaagatttgga

SEQ ID NO: 13905 - DNA, 118 bp, Homo sapiens
tcgctcggctgcgggaaatcgggctgaagcgactgagtccgcgatggaggaaccacgtgaatgttgagggggcgacacacaagcaggtggtggacctgattcgagcaggcgagaagga

SEQ ID NO: 13906 - DNA, 51 bp, Homo sapiens
aaccaggaggaggacatccctgtgaagaaatgacagactttttcattgaat

SEQ ID NO: 13907 - DNA, 82 bp, Homo sapiens
atcctgaagctcacggctgacgccaagtttggctggatccagacccctttgtgcggcacaccttctggaccttggccttcgg

SEQ ID NO: 13908 - DNA, 82 bp, Homo sapiens
taatgtcaactttactgagaattttccacctcctgacacaacaccactcatgatgatgaatgtcttgaacaaaaaccagctc

SEQ ID NO: 13909 - DNA, 100 bp, Homo sapiens
aaactaaacacgccagaggaaatttggccagttatccaattgatgaactagtagatagagccaaacaatcttttcaagcccggaagctgaagaaacttgg

SEQ ID NO: 13910 - DNA, 100 bp, Homo sapiens
gtggggttggtgtgattagcttcgcagtctggaaagctttaggagttcacagtttggtgacaaagttcctgctgatataaggttaacttccatcaaatct

SEQ ID NO: 13911 - DNA, 100 bp, Homo sapiens
ggaaggacaccaagatgcggatccgggcctttccggttattcttggacagtataattggctttcctatgaagatgtctttgttcgagcctttaattttgg

SEQ ID NO: 13912 - DNA, 75 bp, Homo sapiens
gcggagggaagacgccctggtgctcaccaagcaaggaccagctgtactggcgctacgatgaccacacgaggcaca

SEQ ID NO: 13913 - DNA, 99 bp, Homo sapiens
gccgtcgcctcgtcgctatggcgcccaccatccagacccaggcccagcgggaggatggccacaggaggagatgttaaagtaacccatcttgcaggacga

SEQ ID NO: 13914 - DNA, 95 bp, Homo sapiens
tgtgtcaaacatccatatcataagtggaattttggagatattcaaagttccttccaggaggtactttatgccgaggaaaaaccagtgagtgtgat

SEQ ID NO: 13915 - DNA, 100 bp, Homo sapiens
ctgaggacggttgacggctcccccatgatgaaggcagctccaccgggggacggctacgtgcaggcggacgcccggggccccccggaccacgaggagcacc

SEQ ID NO: 13916 - DNA, 82 bp, Homo sapiens
ccccgagctgctggagaactgaaggcggacagtctcctgcgaaaccaggcaatggcaattctgtggtgttcttggtcacaca

SEQ ID NO: 13917 - DNA, 75 bp, Homo sapiens
cacggacgagatgatcaaacgcctgaaggaggaggtgcgccagtctgtaactcctgccgagccagtccagtacta

SEQ ID NO: 13918 - DNA, 101 bp, Homo sapiens
atggctcatattctacttcattcagaagatcaggtacacaaatgcacgcgacaggaaccaggaaaatggcaaatgcacgacagcggcctcctgaacatcac

SEQ ID NO: 13919 - DNA, 100 bp, Homo sapiens
agcaggatcagcaagacccaaagagttctgggaagtcatcagtgatgagcatggcatcgaccccagcggcaactacgtgggcgactcggacttgcagctg

SEQ ID NO: 13920 - DNA, 90 bp, Homo sapiens
tcaagaacaagggccgcgatgtggaagtgaaaggtgtagcagtcactcggcctacacccacagcatcgaccttgtgaacccagcgacctg

SEQ ID NO: 13921 - DNA, 74 bp, Homo sapiens
gcagctggagcctcaggcggcagcgcttctaggccatctacgtgattgacttcttctggaacgaaacctggtac

SEQ ID NO: 13922 - DNA, 97 bp, Homo sapiens
atggaaacacatgaaagacttcctcaaggactacagtatgcacttaatgtccctaaatgggacgtcggtcatcagatactgaagaagaaagcagaag

SEQ ID NO: 13923 - DNA, 75 bp, Homo sapiens
ccggacccgccacgccaggaggcggcagatatgagagatagcacagatggaccaaaggttatgcacaggtgggag

SEQ ID NO: 13924 - DNA, 99 bp, Homo sapiens
ggaggtggtggcgcttggtggccactggcggccgaggtagaggcagtggcgcttgagttggtcgggggcagcggcagctgccactgcagagccccgcca

SEQ ID NO: 13925 - DNA, 100 bp, Homo sapiens
atatcagatgcctcgcagagcaccaggcccaccgtgaaaggttgtggttcaccttgaaactattctaggagcctcagttcaacatgttaaactgaagaaa

SEQ ID NO: 13926 - DNA, 82 bp, Homo sapiens
ccaggcacagccgacgccgcgggatataacacgtgggaaccggaggagaacatcctggaccccaggctgctgatcgccttcc

SEQ ID NO: 13927 - DNA, 78 bp, Homo sapiens
atttcgccgcccgctttcaggcccgtattttgaagatgtaactgagtttctggaagaggtcattgaagccttgatatt

SEQ ID NO: 13928 - DNA, 126 bp, Homo sapiens
aaataaaggagcaagaaatgttcaaaggaacaacatctttaccatctcatctcaagaatggagggatgactttgacaacgatgtggatgctctgctggaagaaggcctttgtgcccccaaaaagag

SEQ ID NO: 13929 - DNA, 136 bp, Homo sapiens
gggaacattccttatgaagctactgaagagcagttgaaggacatcttttctgaggttggacctgttgttagtttcaggctttaccaagttttggagggagagaataagaaaaaagaattgtttctaactcatggaa

SEQ ID NO: 13930 - DNA, 100 bp, Homo sapiens
gcaaactcgctcaactggagggagttcagcttcgttcaggatgaccggaaagaagggatgaccgcgtttgtggaaaagagaaaggccaacttcaaagacc

SEQ ID NO: 13931 - DNA, 49 bp, Homo sapiens
aacggaacttgcctgtgaatttcgaggccctggccaacgtcaacattgg

SEQ ID NO: 13932 - DNA, 100 bp, Homo sapiens
tgctctccatggagagagtaactctgtccttattatcggaccccgaggatcaggaaaaactatgactttcatagtattgaacaaagggaaaacaatcttc

SEQ ID NO: 13933 - DNA, 75 bp, Homo sapiens
tttaattttagggtcctttatatagaagggagagtaggagaaatccagcggtcgcaccgcccattacaagttgac

SEQ ID NO: 13934 - DNA, 80 bp, Homo sapiens
gcggtttgctgggaacggagggctgcagcgcccaccctgcgccagagaccagataaaggctcaggattccgctggaagaa

SEQ ID NO: 13935 - DNA, 83 bp, Homo sapiens
cgaaaacaaactctggtttctcttcagcgttcacctctctgcgcccaaacggatctagtaacagttacccctcaatgagcgac

SEQ ID NO: 13936 - DNA, 98 bp, Homo sapiens
gccgccacgcgtcctgcctgccgccccttcgtccgtcccccgcggccggcagctcccggggcgtctggggctttgttcgcgggggtcacagctctcat

SEQ ID NO: 13937 - DNA, 96 bp, Homo sapiens
gacggcccaggagcgcgtctcggcgggagcctcaggaccaagaatcgccttcagccctgtctggtgcatccttggcagaaagtgaggaggaaaaca

SEQ ID NO: 13938 - DNA, 100 bp, Homo sapiens
ttgaaattgccttcaagatgtttgatttgaatggagatggagaagtagatatggaagaatttgaacaggctgcagctcggatccgagagggcatggccgc

SEQ ID NO: 13939 - DNA, 100 bp, Homo sapiens
agccgggtccccaaccgacgatggagggagacgtgctggacacactggaggcgctggggcatgttatgttacccagagaactttccaaacaagtacctaa

SEQ ID NO: 13940 - DNA, 82 bp, Homo sapiens
tgaaacagacttcaaagttatggcaagagatgagttaattctaagggatcatagacggtatttctatgtaaacgaacagtcg

SEQ ID NO: 13941 - DNA, 90 bp, Homo sapiens
ggacagcatccaaacattatcactctaaaggatctgctggccaccctgctgatacagtatgagcggctgcagggcgtacagtcttcgggg

SEQ ID NO: 13942 - DNA, 83 bp, Homo sapiens
agccgatccagcctgcggagcctgtggggcagtaacaaatgtggcaattattttggatctatcacctgtcatcataactggct

SEQ ID NO: 13943 - DNA, 101 bp, Homo sapiens
tctgtagagactgatttgcaacccttccgggaagccatagctctgcatgattgatccaaatcctgatcagtcagcagatgatagaccatcctgcccctctc

SEQ ID NO: 13944 - DNA, 82 bp, Homo sapiens
ctatgccatcatggcggatggcgtgtcctgtgaaggccaccagcttgggctccccacggagggcagcaagtgggacttgggg

SEQ ID NO: 13945 - DNA, 90 bp, Homo sapiens
atcttgcagcagcacaagctgaagatggggtctaatgtgatggaagagcaggacctgcgggacatcggcatcagcgacccacagcaccgg

SEQ ID NO: 13946 - DNA, 75 bp, Homo sapiens
ttccgccaggcggtgatgaagaatccccccgaaaggaccccccaggtgaaaagcaataaggatgtttaagtgctg

SEQ ID NO: 13947 - DNA, 100 bp, Homo sapiens
aatttctacagcagagaccttgagggatatctttcttcactcctcttcacttcttcactgctgctggacacccactcgctgaagatggtcctgctcgatc

SEQ ID NO: 13948 - DNA, 75 bp, Homo sapiens
acaaagcctttgaactgatgcattctggaaagaggtgtgtgtccaagagatgcaagccactttccagagcccgac

SEQ ID NO: 13949 - DNA, 129 bp, Homo sapiens
agagaataaaactccagcgagatccgggccgtgaacgaaagcagtgacggaggagcttgtaccaccggtgcaatggatgagcttcatagtctggatccaagaaggcaagagttattggaagctagattt

SEQ ID NO: 13950 - DNA, 75 bp, Homo sapiens
gagcgcgttggtggcgacggccgagtcagttcaaactggaaacaagatggatgatgtgtcaagaagactaacagc

SEQ ID NO: 13951 - DNA, 76 bp, Homo sapiens
ggacaacctcagaggacaacgaagtgttcgatccataatgagatggcatcaacatcagataaaggtgcccaaggaa

SEQ ID NO: 13952 - DNA, 83 bp, Homo sapiens
tgtgcatctggctgttagaagaattcatgctcatccggtcggctcctccctgaagaagaggttcaagcggcgggagatcgaag

SEQ ID NO: 13953 - DNA, 100 bp, Homo sapiens
ctcagagtggaaaaagtaccatcatttgaaacaggggagccttagcatcatcaaatctaaaattccaacatactgctccatatgctgttgaagaagggag

SEQ ID NO: 13954 - DNA, 75 bp, Homo sapiens
cccaggccgcggggcggcgcgggacggcgggcgccggcgccgggcatggtgctgatgtgaaatgtgtagactggc

SEQ ID NO: 13955 - DNA, 82 bp, Homo sapiens
tccattggatttaaaagacagtcctcgtcagcactgactttcagctatggaatcggacctagaagaatcccttaggatgaag

SEQ ID NO: 13956 - DNA, 75 bp, Homo sapiens
tggcagcaggcaataccttagtgctcaagccagcacagaatccttgagtccttgatgtgtaatgagagcagtatg

SEQ ID NO: 13957 - DNA, 75 bp, Homo sapiens
gagctcatctggaattttgccgatttcatgactaaccagtgccgttaattaaggaaaagttgagccagggcgtga

SEQ ID NO: 13958 - DNA, 98 bp, Homo sapiens
tatctcttcttgagaagctgggatttgaaggagctatcctgagatctgtactgctaatcactgtgtccactactatgatcttcgtaacactaaacagc

SEQ ID NO: 13959 - DNA, 101 bp, Homo sapiens
gggagaacgttactgtggagaaccaaccaaggtggataattactgtaccttcctcatggaaaaagttttatttaaagtgttatttctcattgaatactatc

SEQ ID NO: 13960 - DNA, 129 bp, Homo sapiens
ccgacgtacagcgggccgggaaaagtggcactgaggctctggaacttctgcccagctctccttgatagtcagaacattatgcctttttctgactccagcagagagaaaatgctccaggttatgtgaagc

SEQ ID NO: 13961 - DNA, 51 bp, Homo sapiens
gactgatttccccattaaaaatgcagacccctacgtgaaggtatggctgat

SEQ ID NO: 13962 - DNA, 75 bp, Homo sapiens
cgacaagtgggaagaccgatgggaatggttaagactgattgctcgataatgtggaaaataagatgaaaggcacct

SEQ ID NO: 13963 - DNA, 75 bp, Homo sapiens
gaagcaacttgcccagctatgagagacagagccaggatttgaaaccagctgtgattgggttattatacccctgca

SEQ ID NO: 13964 - DNA, 98 bp, Homo sapiens
aagaggagaaatagcaggacctccagacacaccatatgaaggtttaacagtctctgcccaagaccgttttctgataatggctgcagaaatggaacagt

SEQ ID NO: 13965 - DNA, 74 bp, Homo sapiens
gaagggaagacttccagtagctccaaggaggttaagatatgagggaaggcaccattggagatatggctatcctg

SEQ ID NO: 13966 - DNA, 100 bp, Homo sapiens
tacgtgggcaaccgggcggccacgttcccgctgcagggcagctggtggaatttttgaagaaaatggaatctcgaggccccctttcgtgcgacacggttct

SEQ ID NO: 13967 - DNA, 50 bp, Homo sapiens
gaatgagatagccgtcctgagaaagagaaactaattcgagatgttgctca

SEQ ID NO: 13968 - DNA, 75 bp, Homo sapiens
gcggaagtgcagctgcctcagttcttagcgcaggttcgatacaagaggctgttttcctagcgtggcttgctgcct

SEQ ID NO: 13969 - DNA, 100 bp, Homo sapiens
ggagtaggagactcagaatcgaatctcttctccctccccttcttgagacagtgcgcacggccacccccttccccatggtcagcctcttcctcgtgttcac

SEQ ID NO: 13970 - DNA, 82 bp, Homo sapiens
ctactctgcctcggggacgaaagcaggaactgcaagcacatgttgaccagataactgaaatggcagcagtaatgaggaaagc

SEQ ID NO: 13971 - DNA, 75 bp, Homo sapiens
gtgacagtggtggcaccacaatctcctaccttccaagacctaatctgggagcctgcaagtgacaacagcctttgc

SEQ ID NO: 13972 - DNA, 74 bp, Homo sapiens
cttgggccaggcctggcagggctggtccctgatgggcctgggtgacattatctcacagcagctggtggagaggc

SEQ ID NO: 13973 - DNA, 82 bp, Homo sapiens
ccggttcttggtgggatctgagcagttggaatcgaagcctcttaaaatggcagatgacttggacttcgagacaggagatgca

SEQ ID NO: 13974 - DNA, 75 bp, Homo sapiens
gcgctttccgtgctgctgctggcgcagctgtcagacgccgccaagcgctacgtggatggtggcatttcagacaac

SEQ ID NO: 13975 - DNA, 100 bp, Homo sapiens
cattatcgctgggcatttttcatggccagtggcccatgtttagatgacattgcagaactggtggatgcgggaaagggggcacacagtatgatcaaaatca

SEQ ID NO: 13976 - DNA, 90 bp, Homo sapiens
aaattaattgctatcaatgcgaatgatcctgaagcctcaaagtttcatgctctcatttcactcttcagtgttcctgttatttatgaacgg

SEQ ID NO: 13977 - DNA, 100 bp, Homo sapiens
tcataacagggatcatgaaagacagtggtaacctggatgaggacatcattgcagaagagaacatcgtttcccgaagtgagttcccagagagctggctgtg

SEQ ID NO: 13978 - DNA, 76 bp, Homo sapiens
caggcgcccaccgccggcggtgatgcggctgtgaagccctagtcgctcctttagcggcagagttttccgagtgacc

SEQ ID NO: 13979 - DNA, 74 bp, Homo sapiens
acagatctcagccccgggctcccagctgcccacctcataggtcgcgtggggcaggcagtggcgctgcgggccaa

SEQ ID NO: 13980 - DNA, 88 bp, Homo sapiens
cccgttcttgcctcaggccagtcgcctccaggccaagagggatccttcacccgtgtctggcagcacgctggctcttctcctgaacttc

SEQ ID NO: 13981 - DNA, 82 bp, Homo sapiens
acatccgagtgcccaacagacattttgctgctgctacaaagagagcctgacaaggagctgaatcctaagaagaagatttggg

SEQ ID NO: 13982 - DNA, 100 bp, Homo sapiens
caaactctcttaacggtgatgctctgacattcactactacatttactctgaagttattccaacttttgacatggctgtcaatgaaatcttctttgaccgt

SEQ ID NO: 13983 - DNA, 90 bp, Homo sapiens
ggatgctttagaaaaacacgatcagctcttagacagatgttccatttaagcagacctcttccatagctgtagctggagcggtaattggag

SEQ ID NO: 13984 - DNA, 74 bp, Homo sapiens
acctgtggccagtgttgtcatggacaaggacaaggtctcagccttagatccaaggacagtccaaggaagtccta

SEQ ID NO: 13985 - DNA, 50 bp, Homo sapiens
ggccgggactggtgcgcgagggggagaagaaatgggtgaccgttggtgac

SEQ ID NO: 13986 - DNA, 98 bp, Homo sapiens
caggagaaaatacggcattgctagttttcaagccggtgtgaagcccctgatgctaaccagcagttacagcaggccatggaggagcgggcacagctgga

SEQ ID NO: 13987 - DNA, 75 bp, Homo sapiens
gcgaggaggcgcgggaggtgttcgagaacgaccccgagacggttgattcttcaccacactgaaaccattaggaaa

SEQ ID NO: 13988 - DNA, 100 bp, Homo sapiens
tccacattcaggggaaccgcctcaccgttctgcccccagaactagccatgctgtgacctacaagcaaactaaatagccaacatttctgaacccctaagtc

SEQ ID NO: 13989 - DNA, 110 bp, Homo sapiens
gtcgccccgccgcgccgcgctccaaccgcctcctcctcctcagtaacgcgggacagagcgggatgccaccagcttgtccaaagggaagttccaggagctcctggtgggca

SEQ ID NO: 13990 - DNA, 121 bp, Homo sapiens
cagcagtgaccttcaaagtgagcgccaatgtccaaaacgtgaccactgaggatgtggagaaggccacaggtgtcatggagaaactccagctgggcccagagattctgcagcgggaaaatcc

SEQ ID NO: 13991 - DNA, 100 bp, Homo sapiens
cagtgagaggcccaagtccctagacccagcctccggctgtgacccccagcctcacacctgcctctggttcccgcctggtcctccagcttcaggaccccac

SEQ ID NO: 13992 - DNA, 100 bp, Homo sapiens
gcctcccattctcccagacatggggaacagggtcacagctctcacccaggatctatcttgggatcccatggctttctttactgggctctggggccccttc

SEQ ID NO: 13993 - DNA, 97 bp, Homo sapiens
gctggatgtttgcgacatcccagagagcttccagagtctgtaaactgcagcaaaaagttcaaaactcaaagatgagtgaagcttcaggtattcagca

SEQ ID NO: 13994 - DNA, 98 bp, Homo sapiens
agagatccaagtgcgcgccctggcgggtccggaccaaggatgaagtaggtgttccaggtagcaattcagctgacctattgcgctggaccactgctacc

SEQ ID NO: 13995 - DNA, 100 bp, Homo sapiens
cgggagaaggagggccaagatggcggaagcggaggagtctccaggagacccggggacagcatcgcccaggcccctggtgggaatgatggttagatgctgc

SEQ ID NO: 13996 - DNA, 100 bp, Homo sapiens
gatgcagagatacagcaaaagagtctacatagggtttcccaaactctcgattgcctcttgcaagcagatgacctgggagcaaatgttatggcagaacgat

SEQ ID NO: 13997 - DNA, 100 bp, Homo sapiens
taaagcttcggcacaagggcccaactggaattccacttacggttgttgacctcctgtactggagagacattaagaagactggagtggtgtttggtgccag

SEQ ID NO: 13998 - DNA, 100 bp, Homo sapiens
cgcatgctgcagcttatgaccatcaatatgtttgcagtacacaactcccagctgaaaggcgcggatcaagaagatcatgcagacggacgaagagattggg

SEQ ID NO: 13999 - DNA, 100 bp, Homo sapiens
tgtattttttgggttttgaagcacccgaaaaaatcgcagaacttgaaagccacactatcaaacagatgatggaggcagcaacacgacaaatcgaggagag

SEQ ID NO: 14000 - DNA, 75 bp, Homo sapiens
gcgcaccctgccgcgcctacagaagctggacaaccagggttgcactccaggacttgcagacgaactccaagattg

SEQ ID NO: 14001 - DNA, 75 bp, Homo sapiens
ccgtgaccgtcgctagaactcagttgtgcgttgcggccagtcgccactgctgtcgctcctgtggttggtccagcc

SEQ ID NO: 14002 - DNA, 51 bp, Homo sapiens
gcggcggcggctgcggcccaatataggctttcttcgagagtcacccagctc

SEQ ID NO: 14003 - DNA, 80 bp, Homo sapiens
aggctgacggccgaggtggagaatgccaagtgccagaattccaagctggaggctgcggtggctcagtctgagcagcaggg

SEQ ID NO: 14004 - DNA, 108 bp, Homo sapiens
ctcgttttggcattgcagctaaatatcagttggatcccactgcttccatttctgacttgaaagaggagattgatattcgactctccagggttcaggatatcaagtatg

SEQ ID NO: 14005 - DNA, 73 bp, Homo sapiens
tgatttgctctttacccaggactctgaagtgagtctgccaaaaaagaggtggttgctgaagtggtaaaagccc

SEQ ID NO: 14006 - DNA, 96 bp, Homo sapiens
gcgctggagctgggtcagtccgccgctcaccccgcggccgcaccttcccgccttctcagggactggtgattgcagctggaagtgcccatgaccgag

SEQ ID NO: 14007 - DNA, 75 bp, Homo sapiens
ctagccaagctgtcctgcctgggcactgaaggatagcacagaagtagaaattgtggatgagaaaatgagaaaaaa

SEQ ID NO: 14008 - DNA, 100 bp, Homo sapiens
attcagttgcacatccccacatcaatgcactgccaatggaatgtatcctgtcaggtataatgtcagtgaatggcaagaaagttcttcatatggatcgaaa

SEQ ID NO: 14009 - DNA, 99 bp, Homo sapiens
aggctacatagccagtacaaagaatcggctggggactgctacctctgagaagacacaaggtgatttcagactgcagaggggaaagacttccatctagtc

SEQ ID NO: 14010 - DNA, 90 bp, Homo sapiens
cccctcaccgccttcgccctggagctggagcatgccctcagcgccatcgagacacctatggctgccgatgaaggctcagcagagaaacag

SEQ ID NO: 14011 - DNA, 83 bp, Homo sapiens
cctccctctgctccagcagtgccaagtggtcagggtacctgctcttccgagacttctgcctgaaccacctggaggaggccagg

SEQ ID NO: 14012 - DNA, 100 bp, Homo sapiens
gcgcgaagtgtgggagagccctgcgcctcgcccgcccggaccagcctgccccggcgccgagatcacctctcggatcttcagggccgggcagagggtgatc

SEQ ID NO: 14013 - DNA, 78 bp, Homo sapiens
aaacatggacagatatcaacaaaagaactagcagattttgtaagggaacggtcgaatgagtgatttgagtgtaattgg

SEQ ID NO: 14014 - DNA, 50 bp, Homo sapiens
gctgtccctgcggcttctgggggatgtacagttacccagcacgtgtacct

SEQ ID NO: 14015 - DNA, 50 bp, Homo sapiens
ccagtacctgcccaggaaactggcctttgctttgggtgagaagcatcctg

SEQ ID NO: 14016 - DNA, 100 bp, Homo sapiens
gacagtggcctcgttcctgtctgatagaattgtggatgaaatcctggatgcactctcacattgccatcataaactgaaattgcatctgatggtctcaagg

SEQ ID NO: 14017 - DNA, 75 bp, Homo sapiens
cgtctggagccgagatggagccctggtgggcacggcgtgcaaggagaatggggtactaagagaaaagcacgaagc

SEQ ID NO: 14018 - DNA, 88 bp, Homo sapiens
cattctccagggaaaggatgacatatttttggacctgaaacagaaattctggaacacctatatggcgccccagcgggatcccagagaa

SEQ ID NO: 14019 - DNA, 75 bp, Homo sapiens
agccagagccaccagcgcagcgctgccatggagcccagcagcaaggggaatgagtttcagaatattccaggggag

SEQ ID NO: 14020 - DNA, 100 bp, Homo sapiens
ctcctactcccagatgcatccgtgtcagttggaaaggtactttgttgggtgttgctatggctacagtgaatgctatgatagcagaatatggctgcagttt

SEQ ID NO: 14021 - DNA, 100 bp, Homo sapiens
tgaaggacaagaacagcgccgtcaccagcaggacctgtgccgccagcacatggccacgaagtccttgttcaaccgggcagagggtccaccggagccttca

SEQ ID NO: 14022 - DNA, 75 bp, Homo sapiens
ccgtcatccgcttcgaaagcatcatccacgagttcgacccgtggtagttacttttggtgacgctgtccagttccc

SEQ ID NO: 14023 - DNA, 82 bp, Homo sapiens
agctgcctcccagggtgaatacaggcatagcgcgctggctaggactccagtaccgtgaagggaggcagtgagagcagacatc

SEQ ID NO: 14024 - DNA, 100 bp, Homo sapiens
agccgccagttgggatcaaatgtgagcctatggatcaagttactccacaggatccgctgaacataggatgttgccacaaaatctacctcgtgtatttttc

SEQ ID NO: 14025 - DNA, 100 bp, Homo sapiens
tctcctcctctggcccattaacaagcagctcttccggaagatcaactgcagactgtcctattgcatctcaagccggcagcccaatggatccaatggtgat

SEQ ID NO: 14026 - DNA, 100 bp, Homo sapiens
tccttctttgttcaagactgggcttccaccgagcagaataccacttgggtcgctcgaggaggaagagtgtcccaggggggaagcagtacagcatggaggg

SEQ ID NO: 14027 - DNA, 75 bp, Homo sapiens
cgcgcccggcgcccctgagccggccgagcggcgacggaccgcgagatggcccactgcgtgaccttggttcagctg

SEQ ID NO: 14028 - DNA, 100 bp, Homo sapiens
gcaagtcaataataatatgaatcataatatgaacaaaaatgtctttagggtgttttcacagtcctgtgtttggtatggagagtgtggaattgcatatggg

SEQ ID NO: 14029 - DNA, 90 bp, Homo sapiens
gcaggcctccgggcccggcgccgccgcccgcagatgagctccttcaggagcagcgtgcagatatggaccagttcactgcctcaatctcag

SEQ ID NO: 14030 - DNA, 83 bp, Homo sapiens
acagctgctgcaatcgcttgggagagctcctgggccacccctcctttcaggtcaagcgtccgtctccaagagagtatgaagag

SEQ ID NO: 14031 - DNA, 75 bp, Homo sapiens
cagcacaaactgctttggtggaagatcccgcacttctggggcccagtagccaactggggtcttcccattgctgcc

SEQ ID NO: 14032 - DNA, 75 bp, Homo sapiens
tcaatccagttccaaggactccacggggttcatcctaagttccactataaacaggctcatgactcgggcacagac

SEQ ID NO: 14033 - DNA, 100 bp, Homo sapiens
cttggatatgacccatatgccaacccacctaactacggaaaacctgatcccaaaattattgaaaacactcgaaggcaggtgtcttctgcggaggtgcgca

SEQ ID NO: 14034 - DNA, 90 bp, Homo sapiens
ggatgtagcaaggaagaaattgttcagttcttctcaggtgaatcaggtctaggaaaatcgactctcataaacagcctattcctaactgat

SEQ ID NO: 14035 - DNA, 75 bp, Homo sapiens
cggcagccgaggccgcgaactgcatcatggagacctgcctagagctggaacgttacctccagagcgagccctgct

SEQ ID NO: 14036 - DNA, 90 bp, Homo sapiens
ctttgacctggaccggggcgtgtttccagtagtcatccaggctgtggtggacgaaggagatgcctactggatcgcacaccaagcagtgaa

SEQ ID NO: 14037 - DNA, 100 bp, Homo sapiens
gtggccaagtccttcgaggcaccaataaaatgaactgtggctgcaccatctgtcttcatcttcccgccatctgatgagcagttgaaatctggaactgcct

SEQ ID NO: 14038 - DNA, 100 bp, Homo sapiens
attttggaaagcagtttttaagacaagcttgtgagaaggttggcatgcagatccctcgattctgttatcatgaaaggttgtctgttgctggaaactgcag

SEQ ID NO: 14039 - DNA, 98 bp, Homo sapiens
aacacgctgcttcacctcttcgccggcggaaacgcttcgttaagggactcaggcagtacgggaagaacttcttcagaattagaaaggagctgcttccc

SEQ ID NO: 14040 - DNA, 80 bp, Homo sapiens
ggggtccggaaccagacgatgagacagagttgcgaccgcgcggcaggtttttagaacttcagccataaaaatgggcagaa

SEQ ID NO: 14041 - DNA, 80 bp, Homo sapiens
caggctttgacccttctttaaaaggagtgaacatggaaaggtttgcagaagaagcagatgttgtaatagttggtgcaggc

SEQ ID NO: 14042 - DNA, 83 bp, Homo sapiens
gcctcgggtctcgggggccgctctgggatcccggccaccagcaattgtccggtaatagcctgcagctggtgttttgagaagcc

SEQ ID NO: 14043 - DNA, 75 bp, Homo sapiens
tgtacagcatcaactacctgcactttggggagcctaagtcctgggtgctgacggagcttgtgtccaagatgcggg

SEQ ID NO: 14044 - DNA, 83 bp, Homo sapiens
ccgctacatactcatcatggggctcctgtacaagcggagctggagtttgttcagatcatcatcatcgtggtggtgatgatggt

SEQ ID NO: 14045 - DNA, 95 bp, Homo sapiens
tgggactcgcagtagggaggaacaattcagagagagctggctctgaagcaccgacaaggcaagaatcacaagatgcgcatcattgcctttgtggg

SEQ ID NO: 14046 - DNA, 75 bp, Homo sapiens
gtgaaattttttggaacagaagatcagaagatgagaatgtgcctactgctcctgatcctccaagtcaacatttac

SEQ ID NO: 14047 - DNA, 82 bp, Homo sapiens
gtgacatgggttggaagatggcgtctcccacagacggtgccagaaccctgtggagcatcatgaactgggaagagtagctgag

SEQ ID NO: 14048 - DNA, 75 bp, Homo sapiens
ccaagtgcggacgctgtgcgagaagacaaatcttcctattttcaagctgaaagaatctactgttagaagaagata

SEQ ID NO: 14049 - DNA, 74 bp, Homo sapiens
acaagccgtggaataggtgtatcaagtaatggtgcaaagcctgaaattctgatgatggtgggcctgcctgctgc

SEQ ID NO: 14050 - DNA, 100 bp, Homo sapiens
cccccctcccactgcaagtccaggatactctttcttatctcagtcatcactatggtgcttctgacgttgatgactgtcacactggatcctcctcagaaac

SEQ ID NO: 14051 - DNA, 83 bp, Homo sapiens
accgtttacttccagaagattggtggagcttgatctgaagaggctgaggctgcagtggccacccaggagacatccaccgtcag

SEQ ID NO: 14052 - DNA, 100 bp, Homo sapiens
actatgcagctacatcagacacagatggcaaaccttacacataggaagctcacacctggctccgccaaatccagacaagcagtttctgatctcccctccc

SEQ ID NO: 14053 - DNA, 100 bp, Homo sapiens
tcaccttcaaggccgtcagacaagatatggtgtaagatacttcttcaagattggacagctggggaccttcttctgattaaccttaaaccaacttgtagcc

SEQ ID NO: 14054 - DNA, 101 bp, Homo sapiens
ctgcagcctctacctccccggcccaggtatctgcgggatggtggccatctcctggtacgccttcaacatcacccgggacttcttcgaccccttgtaccccg

SEQ ID NO: 14055 - DNA, 100 bp, Homo sapiens
accagtgggtgcccttccatggggaaatttgcccttggccattgggatttctatgccaattgtgacgctcatctacatcctgaccaatgtggcctattac

SEQ ID NO: 14056 - DNA, 100 bp, Homo sapiens
gtataatccagcaggcaaccaaagttggctgatcaagatgacactgagtaacccttcagaactagatgaacttatgagtgaagaagcatatgagaaatac

SEQ ID NO: 14057 - DNA, 90 bp, Homo sapiens
ttttctcatctaaaagcttgaaaatcctgcatgtttgtggagtggtcaagcaggtggtgaagaggaggaagttaacatccctaataggag

SEQ ID NO: 14058 - DNA, 82 bp, Homo sapiens
cgcgcacttcgtcatgttcttcgcgccctgcgggagatacagatgacccaccaagaattactcagaaccctgtgatcaatgg

SEQ ID NO: 14059 - DNA, 82 bp, Homo sapiens
tccgagccagccgctgttttgccggaggagcccctcaggccaagcatgcaacagttactggattatccagaagatgacatag

SEQ ID NO: 14060 - DNA, 90 bp, Homo sapiens
ggaaagtctggactggctccccgtgtggatcaggagaagtgggcccagcgttcattcaggtcaaaatgcagatcttcgtgaaaaccctta

SEQ ID NO: 14061 - DNA, 82 bp, Homo sapiens
cccctacctggtgatcgtggaacagcctaagcagactgcaaaattcaaaatggggctcaaggtattcgtttcatctacacca

SEQ ID NO: 14062 - DNA, 75 bp, Homo sapiens
cactcatgtctcactgccccactcaggattactacagcatcccatttcccacacccactactccgctgactggga

SEQ ID NO: 14063 - DNA, 82 bp, Homo sapiens
cggagaggagcatgaatggagcaaaatggcggatcatgtgcaggtgacttaagagattaaaattaatttggttgctgttggt

SEQ ID NO: 14064 - DNA, 83 bp, Homo sapiens
ccgctggcgagcgccaccgcatggaggtggggctggtgtccgagcacttctcgcaggccccgcagaggctgtccttctacagc

SEQ ID NO: 14065 - DNA, 125 bp, Homo sapiens
ggccctctccctgctgaagaaggaatttgaactgagcaagctgcagcagcgcctggggcgggaggaggaggaagccaagaatctggtgagcgaagccatcgcagctggcatcttcaacgacctgg

SEQ ID NO: 14066 - DNA, 78 bp, Homo sapiens
aggaccagcatgggaatcctatactctgagacatggagattaagtagcttgcccaagatcacccagccagtaaagtgg

SEQ ID NO: 14067 - DNA, 99 bp, Homo sapiens
agatgattcagccttctgcatctggatctcttgttggaagagaaaatgagatggaggagatgtataagaaagctcatgctgctatacgagagaatccag

SEQ ID NO: 14068 - DNA, 100 bp, Homo sapiens
tcctttgcctagaggctatcacacggtcaactgatgagacattcagcttggctgaagaaacctgtagctctaatccagctatggttaggaggaagaaaat

SEQ ID NO: 14069 - DNA, 75 bp, Homo sapiens
aaaaagagacgaagagctcaagaataaaggctgaagaaaaagaggtgcactctgatctacaaatttggaagaacc

SEQ ID NO: 14070 - DNA, 100 bp, Homo sapiens
gttacctggagcttaaaaagctgcacgcaagtgttaaacttctggttttagctaaagaagatactgaggcagctattcaatcaatattatacaaagaaaa

SEQ ID NO: 14071 - DNA, 100 bp, Homo sapiens
ccaagttcggggccaggacgtcgggaggacctgttgagtggtgattttatgcaatggcttcaagccacagttcttcaccagtgcctcaaggaagcagcag

SEQ ID NO: 14072 - DNA, 90 bp, Homo sapiens
gaggttcgaagctgagtatgtgacaggtatcgagaaccttccctgcgaacttcagaggaacttccagctgatgcgagagctggaccagag

SEQ ID NO: 14073 - DNA, 51 bp, Homo sapiens
aggagccagcagagtcgtctttcagctgctcccggaactgaccaaccctga

SEQ ID NO: 14074 - DNA, 75 bp, Homo sapiens
tcctgctcatggttgtgatatcttagtggatgacaacacagttatggccatcactgtgcatgtccccatgccctc

SEQ ID NO: 14075 - DNA, 96 bp, Homo sapiens
agggggcgctgagctgttgggttggcacttggcaatgtaataagtgccttgggagacaagagcaagagggccacacatgtcccctatagagattcc

SEQ ID NO: 14076 - DNA, 83 bp, Homo sapiens
ctctcgggagccgcaaggcgagagctgcaaagtaagactttgaccccgacgcaggcttcagtgattgccgcggatcagaagcc

SEQ ID NO: 14077 - DNA, 83 bp, Homo sapiens
ctgcggcccgcgtcggcgctggggacaaagcttgccaattctgtaactccttgggatatcttgctgagcttaattgcagctgc

SEQ ID NO: 14078 - DNA, 98 bp, Homo sapiens
ggggataacattcatgcagaacatcagggaaaacttgttattggacacaatatgctcttggacgtcatgcacacagttcatcagttctactgccctct

SEQ ID NO: 14079 - DNA, 75 bp, Homo sapiens
ctcgatcttgggacccaccgctgccctcagctccgagtccagggcgagagatgggggtcttgctctgtcactcca

SEQ ID NO: 14080 - DNA, 101 bp, Homo sapiens
aggtagccctggacggcattcagtgttttgttcaggacctcaaggggctcggctatgagaaggggaagcctgtgggtctagtgggcgtcacagagctttca

SEQ ID NO: 14081 - DNA, 100 bp, Homo sapiens
tcttccccgtcttcgacctcagttacttcatcgtctccatcctctacctcaagtatgagccaggctgcggggtccccgccatccaccctgtgctcagcgg

SEQ ID NO: 14082 - DNA, 100 bp, Homo sapiens
tctttgtcctggccaacttcagcatggccactttcatggaccctggtgttttcccccgaggagttcgaggtgatcgcccagatcaagctgctgcagtcgg

SEQ ID NO: 14083 - DNA, 101 bp, Homo sapiens
atcctcaccctgtataagtggctgtgtttgtgctccaggagaaaaaatgatccctatgctcttgcatccctggtgtcctttgaagttaagaagatgcctta

SEQ ID NO: 14084 - DNA, 100 bp, Homo sapiens
atgcaggctgtatgaagtgggcaggcagcgtctggcagaggatgaggatgaagaggaggaccaggttctgaagaaagtctccaaatacattcaagagcag

SEQ ID NO: 14085 - DNA, 75 bp, Homo sapiens
ctagtacagtagtatctctattggtcctggaacaacctgtactgtgtgctcaggaacagtgagctaaccttctac

SEQ ID NO: 14086 - DNA, 50 bp, Homo sapiens
aagaaggctggctccacaagcgtgattcccagcggcatcgggtcacagat

SEQ ID NO: 14087 - DNA, 75 bp, Homo sapiens
ggaacccaagatgggccaagtggtgtatgtgccggtcaagacgggctcgtgaccaaagacttgaccactcaaagt

SEQ ID NO: 14088 - DNA, 53 bp, Homo sapiens
gggccaaaggacagttagaagacagtagactctgtggtggctggagggggcag

SEQ ID NO: 14089 - DNA, 100 bp, Homo sapiens
cagtaatggcagcatttgtcttgatattctacgatcacagtggtctccagcactaactatttcaaaaggtgctggagaatgccgaaggtgccagaaccac

SEQ ID NO: 14090 - DNA, 100 bp, Homo sapiens
ggaaggctctggataaggaccagtacctgcccaggaaactgatggttccaatccctatacattgaagctttgcttttctacatcatcccatttataagaa

SEQ ID NO: 14091 - DNA, 101 bp, Homo sapiens
gcaaactggccgtgattcagtataacctagaccagtcctgtttgcctcatgatatcagaccatgtctgcaaaggagaagtcgaagtttgaagatatggcaa

SEQ ID NO: 14092 - DNA, 100 bp, Homo sapiens
caggaagctgtgtttgtcccagagtgtggcgaggatggctcctttacccagggcgagctgaggatcagtgtcctgcctgcctacctgtcctatgatgccc

SEQ ID NO: 14093 - DNA, 82 bp, Homo sapiens
ggcatagtacaatgaggcagccagcggatcttgggtgcaatgattctggactgagacgcgcttgggcagaggctatgtaatc

SEQ ID NO: 14094 - DNA, 97 bp, Homo sapiens
agttgaagaagtgaagaaattattggtacctgcaccatgaaccagagaatcagtcagagtgctccagtgaaacagccaccacccctggctccccaga

SEQ ID NO: 14095 - DNA, 51 bp, Homo sapiens
ctttcaaaggacccatttacaataggaattgaatgatctggcacgggaccc

SEQ ID NO: 14096 - DNA, 74 bp, Homo sapiens
cgacttcgtcgtgggtcagcaagagggccccgctgaccaggtggctgcagttactaaaccaaggagatttaact

SEQ ID NO: 14097 - DNA, 97 bp, Homo sapiens
aggaagctggtagagcagcttaagatggaagccaatatcgacaggataaagttgacatgtggtcagtagggtgcatcatgggagaaatgataaaagg

SEQ ID NO: 14098 - DNA, 75 bp, Homo sapiens
gaggatgcaccttcccctgccttggaaagtggctgtgtggagtggtgtgaatgtggcaggtgtttctctccagga

SEQ ID NO: 14099 - DNA, 50 bp, Homo sapiens
caagagggtcatcgactacgccgtgaagggcagctgcaatgactctccgc

SEQ ID NO: 14100 - DNA, 100 bp, Homo sapiens
ccgacctcccggctgacctattcacctcctgcctcaccacccccatcaagatcgccctgcgctgagccccacagtcttcgttataacctcacggtgctgt

SEQ ID NO: 14101 - DNA, 75 bp, Homo sapiens
ttgcactgtaaaaaacccagctgaagaccactttagaaactcaattaaggcggcgactggcggcgcgatggacct

SEQ ID NO: 14102 - DNA, 82 bp, Homo sapiens
tgcggaagatcgtcgccacctggatgctggagacatgcaagaaagcacttcagccaagcagaagggagccagctggacgagg

SEQ ID NO: 14103 - DNA, 101 bp, Homo sapiens
agctctgaagggtccgaagtgattttagctacatcaagtgatgaaaaacacccacctgaaaatatcattgatggagatgcagaggatgctatttatggaag

SEQ ID NO: 14104 - DNA, 50 bp, Homo sapiens
tcccacctttccaagcaaggccaggagagtacatccaagccattatgatg

SEQ ID NO: 14105 - DNA, 100 bp, Homo sapiens
acaggggtaacacccttccagatgatttttgaggaccatgaaacctccttccccagggctctctcagcacagaggctctctcctcggtggtgcttcctag

SEQ ID NO: 14106 - DNA, 83 bp, Homo sapiens
cgcgcagggcctgcagcgggagctggacggcgagcgcgagcggcgcgagaaaggaaggaacgtcccagggatggaagtgcttg

SEQ ID NO: 14107 - DNA, 50 bp, Homo sapiens
tcccaaggtgctgggattacagctacttgaaggaaattttgccaaagaag

SEQ ID NO: 14108 - DNA, 82 bp, Homo sapiens
gtggctcataagccacgaaccgggaactccactttgtggcaccgtgagattctccaggagccttttgtggcagatgaatata

SEQ ID NO: 14109 - DNA, 82 bp, Homo sapiens
caagcaactattattttgccattaactggagacagtctctccatttcaaggactaaaacagtcttgcgttaagtaaaaacct

SEQ ID NO: 14110 - DNA, 83 bp, Homo sapiens
tgcctactgaagagcttatcagagctctacttgggaaagtagcccctgaagaagatgaaaggaaaaagaggcgacgagaaaga

SEQ ID NO: 14111 - DNA, 74 bp, Homo sapiens
ctcctatgtcccctattatctcccctgcccagagatcttgaacactgtaacaacctctatgatgatgatgggac

SEQ ID NO: 14112 - DNA, 90 bp, Homo sapiens
gtagaagttgatgaatcaagaggaatgcacatctgtgaagatgctgtaaaaagattgaaagctgtactgatgctttgggttggaaaaaat

SEQ ID NO: 14113 - DNA, 100 bp, Homo sapiens
tgcggttctgtgctcccggagccgggcccacctggtagcaggacatttcattaccatccagaagtgtctcccactgaaggcatccgtggttgtttttaag

SEQ ID NO: 14114 - DNA, 88 bp, Homo sapiens
gtttgtggcctcctaccaggagctcatggttgagtgtacgaagaaatgactggtcaaacaaatggattttacagaggcttacgcggac

SEQ ID NO: 14115 - DNA, 82 bp, Homo sapiens
cgcgaatggctggtgtcctggggaccgcatgggcccagctgagagccagcctggaggttacccagcagcaggccacccaggc

SEQ ID NO: 14116 - DNA, 98 bp, Homo sapiens
gggcagggctctaggaaacatatgttacgatagccatgtggttgccctgcttggctttccttatgcctccagtggagaaaacacaggcattgtcaaga

SEQ ID NO: 14117 - DNA, 102 bp, Homo sapiens
ccgaggacatggacctgtacagcatcaactacctgcactttggggagcctaagtcctgatcctggtggacctctcaaaccccggtggccggcctgccctggc

SEQ ID NO: 14118 - DNA, 75 bp, Homo sapiens
gatggtacaggaagggaacgtggaaagcgcatacaggaccctaaacagaggaaggaacagagccacagagaaaaa

SEQ ID NO: 14119 - DNA, 101 bp, Homo sapiens
gctgcggcgagcggagcttcgcggggatcctgctggactgcacgaaaaaggggatatgagactttctactcggaatatcctgagtgttgcgtggatgtaaa

SEQ ID NO: 14120 - DNA, 90 bp, Homo sapiens
aacggagataaattcccggaaccgcgattcggcgtgtcagcaaccatgtccaagggacctgcagttggtattgatcttggcaccacctac

SEQ ID NO: 14121 - DNA, 98 bp, Homo sapiens
ggagagtctgtgccgacaagatggcggacggggagctgaacgtggacagcctcatcacccggctgctggaggtttgaacgccatgaccctgtggatgg

SEQ ID NO: 14122 - DNA, 74 bp, Homo sapiens
agaaaacctttctccctgagatgaggcgggaggcagcaccgggctcttgatggacttggcagccaatgaaaagg

SEQ ID NO: 14123 - DNA, 80 bp, Homo sapiens
atcttttccaataaggaggctggcatttacatcctgtaccacggaaaccccgttgtgagttactccacaggatccgctga

SEQ ID NO: 14124 - DNA, 82 bp, Homo sapiens
gactgttccaaaaacagtggataattttgtggccttagctacaggagagtttgatgaaggccggaacaactttgaaggggag

SEQ ID NO: 14125 - DNA, 100 bp, Homo sapiens
ggagctgaacaagatccctaccgtgcgcgccttccttttgatgatgattattctccaccgtctaagagaccaaaggccaatgagctaccgcagccaccag

SEQ ID NO: 14126 - DNA, 100 bp, Homo sapiens
cacggatcggattcctcagctacgaggaggcgctgaggagagatcgtcagtatttaaacagatcacatcatgcgtgagtacaagctagtggtccttggtt

SEQ ID NO: 14127 - DNA, 82 bp, Homo sapiens
cccttccatctcgaaaaagaaccgcgcgggaagccccagcccgcagccctcgggggacacctgctccacttcaccttttgcc

SEQ ID NO: 14128 - DNA, 90 bp, Homo sapiens
gcgcgcgcccgccccgctctgggaggaccgcgagaatatgacagatacctagcatctagcaaaataatggcagctgcttaccttgacccc

SEQ ID NO: 14129 - DNA, 75 bp, Homo sapiens
tatttctaaagttctcctctccatctgctcacttcttacagattgcaaccctgtttgtgcaaaaccatctgtgac

SEQ ID NO: 14130 - DNA, 82 bp, Homo sapiens
ttctgccatgattgtgaggcctccccagccacgtgaaactgagtacgaccccagcaaagcgacctttgtgaaggtggtgcca

SEQ ID NO: 14131 - DNA, 102 bp, Homo sapiens
ctgttttctgccggctgtaaagtcatcacctcctgggatcagatgtgcattgagatatgatgcttcctggtgtgtttagtggttggtgccattccaattttc

SEQ ID NO: 14132 - DNA, 122 bp, Homo sapiens
catctgctcaaggagatcattctggtggatgacaacagcagtaacggtttttcgttggaatatacgttgcacatttatggcgattctgagtgtgagggcagacttctgccaggctcagcaca

SEQ ID NO: 14133 - DNA, 73 bp, Homo sapiens
agacagatcaagatcaagaccggcgtggtgaagcggattttcctgttgaactggtcataattggaatagcttt

SEQ ID NO: 14134 - DNA, 100 bp, Homo sapiens
gccgtggagggcctcgccatgtcctgctgcccggagtaaaagtccctcgcaatttccgactgttggaagaactcgaagaaggccagaaaggagtaggaga

SEQ ID NO: 14135 - DNA, 81 bp, Homo sapiens
tattctgagattggagggctatcagaacagatccgggaattaagagagaaatttccatcgtgaagcctttaatcatcttac

SEQ ID NO: 14136 - DNA, 100 bp, Homo sapiens
gctgtgacacgcaagtttgtccacgaagacagcagccacatcatctccttctgtgggtttgagaaatactttaagaggagtggaaggaacacaaactgag

SEQ ID NO: 14137 - DNA, 50 bp, Homo sapiens
gaatccccccgaaaggaccccccagcagcagcgtgcagggtcaaagacag

SEQ ID NO: 14138 - DNA, 73 bp, Homo sapiens
gatgactgacaccagcttcaaggacttctctctcgtggagatcaacggggtgtctagccagaacctgtcactg

SEQ ID NO: 14139 - DNA, 75 bp, Homo sapiens
gggaattctcttcactagaatatggagactgttcaatcaccaggctttgtgacaacaaactgtgctctgcagttt

SEQ ID NO: 14140 - DNA, 82 bp, Homo sapiens
ggcgagtttccgatttaaagctgagctgcgaggaaaatggcggcgggagccgccgccatgtctgcgcatctgcaatggatgg

SEQ ID NO: 14141 - DNA, 96 bp, Homo sapiens
aaggttttggaacagactcccgtttacaggtccttggctggaagaggctggataaaatactgcatttgtctgcacatcaccgaacgatgagagagg

SEQ ID NO: 14142 - DNA, 75 bp, Homo sapiens
aagaagacctgtggaaataagaggcgatcagtgtcgatgagacgaagaggcagaccctcctgaaggacaagctcc

SEQ ID NO: 14143 - DNA, 100 bp, Homo sapiens
ggaaatcctaatgacagtctccaaattcgcctccatctgtaccatggggcaagattcttgccaagagaattaatgtgcgtattgagcacattaagcactc

SEQ ID NO: 14144 - DNA, 90 bp, Homo sapiens
gtccacgacaccggctacttctcagctttaccatccctggaggagacctggcagcaggtgctggagaatctggtaaaagcaccattgtga

SEQ ID NO: 14145 - DNA, 74 bp, Homo sapiens
ttacagttcattttttgcttggtttggaaaaatttcattagaggagcatctttccttgaagaagtacattattg

SEQ ID NO: 14146 - DNA, 87 bp, Homo sapiens
gtccaggcagacctttggggacaactaaagctgcgggatacaaagtcagcccaggcagacctccagagagatggaaccatgtaacca

SEQ ID NO: 14147 - DNA, 50 bp, Homo sapiens
ctccattccctaaggcactgtgcgggtccatatggaatatttgctggtag

SEQ ID NO: 14148 - DNA, 100 bp, Homo sapiens
gcggcaaggtctccaagtcccagctcaagtactatactggcaattgctggagaagattttgcaattgttgcttctgatactcgattgagtgaagggtttt

SEQ ID NO: 14149 - DNA, 51 bp, Homo sapiens
ctctggccccgagatcagaatgccgaacactggaactattttggggctgat

SEQ ID NO: 14150 - DNA, 98 bp, Homo sapiens
aaaagaaggagacttcagaaaggaggtgacacgctgttgcaggccctggacttactgcccttgctcatccagacagtggagaaggcagcctcccaaag

SEQ ID NO: 14151 - DNA, 90 bp, Homo sapiens
gtgctgccacgtccccagccgtgaagctgcatgaagagacgctgacctacctcaaccaagagccccccaagatgaacccagtggtggagc

SEQ ID NO: 14152 - DNA, 75 bp, Homo sapiens
tggctggtgcagccgaggtcttcgggaattccagcgagggcttatcaggagggcagacttcaaaagctactaaaa

SEQ ID NO: 14153 - DNA, 100 bp, Homo sapiens
agcagaccataagggataacctttaccgccatgctgtgccttgtgggccaagagaagggaaactgctctttccagaaaaacccaactccctgcatcatcc

SEQ ID NO: 14154 - DNA, 98 bp, Homo sapiens
actaccgctgctggaccacaaaccgctgccagaaaagtctgctgagaacagacccagtccctgaggaaggagaagatgttgctgccacgatcagtgcc

SEQ ID NO: 14155 - DNA, 100 bp, Homo sapiens
agacgggatactgctcagcaagatctttgtagaatttgatggctgtaactggaagcaacactcctgggtaaaagttcatgctgaggaagttatcgtgctt

SEQ ID NO: 14156 - DNA, 98 bp, Homo sapiens
gctcaggcccgggagctgcggaccgaggttggctcgatgctgttcccaggttggttacatcacttgctgagttgtatgacggccacctaggaggcagt

SEQ ID NO: 14157 - DNA, 100 bp, Homo sapiens
gccgggacacctggaagccgagaaatgcagcagtggacgtcagctcagcgaggtcttcatccagctgccctcgcgaaaggagctgcccgagtactacgag

SEQ ID NO: 14158 - DNA, 83 bp, Homo sapiens
ctggtcttggtagcggaggcacccgaatgctgcccgggtgagctacagatctgggacacagcaggtcaagagagatttcggtc

SEQ ID NO: 14159 - DNA, 50 bp, Homo sapiens
gccacgcatctgaccttgttgggtacctgctcttccgagacttctgcctg

SEQ ID NO: 14160 - DNA, 97 bp, Homo sapiens
ggggggagcgcggggcgacgctggctgcagggacccggtgacagcgtgagaggttcgcagagaagctgaatatggtgggcatgatcagatagatttg

SEQ ID NO: 14161 - DNA, 97 bp, Homo sapiens
agaggaggaggccggggaatggccgcggtgtggcagcaagtcttagcagtggacgcgagcagcagcagtgagcggggttcccggagaggccagcgtg

SEQ ID NO: 14162 - DNA, 75 bp, Homo sapiens
acctgcctcattcccaacctgcctctccagggccaagaccagcttcaagtctccatggtaccagaaaacaacaac

SEQ ID NO: 14163 - DNA, 80 bp, Homo sapiens
gccttttccgttgccggtgccggcctagcgtcctggaattacttcaatcaattgacgaaggatcagagattggtgtattc

SEQ ID NO: 14164 - DNA, 83 bp, Homo sapiens
cagctctgtccagtggagtgacccgttgccagagtgcagaggaactgtggctgcaccatctgtcttcatcttcccgccatctg

SEQ ID NO: 14165 - DNA, 74 bp, Homo sapiens
tcagccttacaagtggcgggggaaagcacacagtggattgtattacacagagcatgaatatacttctttaggtt

SEQ ID NO: 14166 - DNA, 50 bp, Homo sapiens
gcggctgcggggcttccctgcggctggagtaatttgccatcttccatgta

SEQ ID NO: 14167 - DNA, 100 bp, Homo sapiens
gtgggcgctgctggcgctctggctgtgctgcgcgacccccgcgcatggagaactgcgacacatcaccaagctgaagccctggagcctctttgatgtactt

SEQ ID NO: 14168 - DNA, 82 bp, Homo sapiens
gccatggcgaccggagcgaacgccacgccgttgggtctggccgtgggcctgggcttcggggcactggcagaggtcgccaaga

SEQ ID NO: 14169 - DNA, 100 bp, Homo sapiens
ggcctggacagccagtggcgccagatagaaaacggcgagagtgggcgagaacgtccactgcgggccggcgaaagctgacatggatgggtgcaaaaaagag

SEQ ID NO: 14170 - DNA, 83 bp, Homo sapiens
gaagaagcgggtctcgggtctccctgacaccagagaagcctatgatgacaagcaggtggtcacagagatcatggcaagatgtt

SEQ ID NO: 14171 - DNA, 100 bp, Homo sapiens
agagaagatccagaccaaggcaggtgaggcgatacagaagatcattgagacactgacacagcagcttcaggcaaagggaaaagaactaaatgaattccgg

SEQ ID NO: 14172 - DNA, 83 bp, Homo sapiens
gggtggggccgtcggcggcgctgtctgatcatcggatatcatggagtctggcaagacggcttctcccaagagcatgccgaaag

SEQ ID NO: 14173 - DNA, 90 bp, Homo sapiens
ccagtttccatatgttgagattctacttattcatcagtttgttgtgcttgtcaagatcaggaaatggaatgagctccttccagttaaatg

SEQ ID NO: 14174 - DNA, 83 bp, Homo sapiens
ctggggttggacgctgccagtttgcacagcagcaggaacccaagacagaccaggatgaggagcattgccggaaagtcaacgag

SEQ ID NO: 14175 - DNA, 90 bp, Homo sapiens
ggatagcccgggcctcgctcaactccggcttcacgcggctcggcaccgacctacgctgcatccaggtagtacacaaactgctctgctacc

SEQ ID NO: 14176 - DNA, 100 bp, Homo sapiens
caaaaccagcagtcctatcattcacaaagggaaaactacagccaccacacacaagcgaccgtggcagccatgtattacagctactacatgctaccggacg

SEQ ID NO: 14177 - DNA, 83 bp, Homo sapiens
ccagcaccacggcacggaaggtggggcggcctgggaggaagcgcaagcaccccccggaggactgacaaatggtagtggtcgat

SEQ ID NO: 14178 - DNA, 90 bp, Homo sapiens
tgcccaagtgcaagctggccagggacctcaaggaagcttatgacaggtcaaaatgcagatcttcgtgaaaacccttaccggcaagaccat

SEQ ID NO: 14179 - DNA, 74 bp, Homo sapiens
aacaatggtcatgctttcaacgtggagtttgatgactctcaggacaaagcaggctgagggtaaaaagctgggat

SEQ ID NO: 14180 - DNA, 74 bp, Homo sapiens
tctagcccagtggaccttctgaaggttgtctgcattcaaaagagcattctattaaagctaccttaatttggcgc

SEQ ID NO: 14181 - DNA, 51 bp, Homo sapiens
gtcccatcactccaaggagagaaggtattatggtcgaaagatgctgttctt

SEQ ID NO: 14182 - DNA, 101 bp, Homo sapiens
ctggccgacgagtggagaaaattggaaacctggaagattactaccatttttatcacagcaaaacctttaaaagatcaaccttgagtagcagaggccctcac

SEQ ID NO: 14183 - DNA, 75 bp, Homo sapiens
atattattggattttgttacgattatcttcatattttgaaacaggtgaccaagtcagccatcggggtgctctaac

SEQ ID NO: 14184 - DNA, 75 bp, Homo sapiens
agtctctgtactcgttcatcaagggccatgaaatgacaagcattggactgctacttggtgtttctgctgcaaaac

SEQ ID NO: 14185 - DNA, 74 bp, Homo sapiens
agagccctacaatgtgaagatacataagatcgtagccagacccccagatacatcgagatatttccaagcagaag

SEQ ID NO: 14186 - DNA, 73 bp, Homo sapiens
cgacacgacgcgcagcagctgcagcagctcaagcacctggagtccttcctcccctggtgaagacacaaactgt

SEQ ID NO: 14187 - DNA, 75 bp, Homo sapiens
catcttgttactccctagcagtgtggtaaggagtgggaatagctttgcgaaaaatgggcgcaatggccaagccag

SEQ ID NO: 14188 - DNA, 83 bp, Homo sapiens
agccctctacttttcaagacaccaagtgagaggccaaccagttacatgggaattggtctttctgctcaaggtgtgaacatgaa

SEQ ID NO: 14189 - DNA, 100 bp, Homo sapiens
tggcccgtgctggaaaagtgagaggtcagactcctaaggttccagaagtgacaactgtccaaaataaaaaaccagtaataccggttttaagtagtacaat

SEQ ID NO: 14190 - DNA, 82 bp, Homo sapiens
tgggagcaaatatccagaacaggcaagcagagtgctggtagcatcccgtaattttgcaaatgatgctacatttgaaattaag

SEQ ID NO: 14191 - DNA, 98 bp, Homo sapiens
tcatggtcctcactactctcattctcatattagtgtgtgcttggcactggagaaacagggagatactaacatctccatcatgctggcaatatgctgtc

SEQ ID NO: 14192 - DNA, 100 bp, Homo sapiens
ggatggaggagagtgtgtcttaatcaaaacccacagacacctggatttcattagcatcatgacctacgattttcatggagcctggcgtgggaccacaggc

SEQ ID NO: 14193 - DNA, 82 bp, Homo sapiens
cttggaggagcgcgccctgcctgagaaggagcccctcgtcagcaattctgtggtgttcttggtcacacatttatggagtttc

SEQ ID NO: 14194 - DNA, 83 bp, Homo sapiens
ggcggagccggaggaagctgatggtcatcttttccaagagcaggccgggctctcgccatgggtcactgtcgcctctgccacgg

SEQ ID NO: 14195 - DNA, 75 bp, Homo sapiens
gggctgcgtgtgggacgggtttagcggcagcctcttcggttatgaagacagtatggagtttccagaccatagtag

SEQ ID NO: 14196 - DNA, 50 bp, Homo sapiens
tgaggaacggtgcctggaaaagtgcaactgcagatagaagacctgactcg

SEQ ID NO: 14197 - DNA, 98 bp, Homo sapiens
cccgacgaccggatcctgaggaggcagctgcggtggcagctgctgagttctcggtgaagccactgaggcggctcccagctgcgttggcgacatggccg

SEQ ID NO: 14198 - DNA, 83 bp, Homo sapiens
cgggaggaaggaacgaggcaaggagctaaagcagcgtgcgttcagccctggggttggtgaaaaccctgtgtccttggagaaag

SEQ ID NO: 14199 - DNA, 100 bp, Homo sapiens
tgccaatcccccctcacccaggcccctgtcaagaaggtgccggtggtgcgagtcttcggagcgaccccggcagatgacactggatcaaaaatccatctga

SEQ ID NO: 14200 - DNA, 75 bp, Homo sapiens
gaaaagtgaagaaagtgatcataggagaaaaccatttcaggtatatgaatgacctaaaggtacaaataaagacgg

SEQ ID NO: 14201 - DNA, 90 bp, Homo sapiens
gggatatcccaagtagtacccgtcttccaggtatttgaagaattattgcttgatgcagattggagcataaatgctggaagttggatgtgg

SEQ ID NO: 14202 - DNA, 75 bp, Homo sapiens
gctgctgcggttgaaggcagccctgcacgaccagctgaaccgcctcaagatccgcggcaccctgaagagctggac

SEQ ID NO: 14203 - DNA, 100 bp, Homo sapiens
ggaagtcggacgtgggcgaggggcggggtgtctggactggaacctctgggcccacatccgagtgaagcctgacaggaccggtgtggtcacggatggtgtg

SEQ ID NO: 14204 - DNA, 83 bp, Homo sapiens
ttaaactccctaaaatctccgcagctctggttcctgttgcggccgagctccacgcaggagatcggtgaggagctgatcaacgg

SEQ ID NO: 14205 - DNA, 74 bp, Homo sapiens
atgtccccaacatcaaaaggaatgacttccagcatggagatatggaccaaaaggaacgagacgtgattatgagg

SEQ ID NO: 14206 - DNA, 75 bp, Homo sapiens
aatgatggagaaacaatggtaaatgtgccacatattcatgcaaggccagaagcctgtcttagatgttcatgcaga

SEQ ID NO: 14207 - DNA, 101 bp, Homo sapiens
cttcccatccaatacttggtgactggtctattcaagttcaagtgaatatcaatgaactgagccatgttcaaatccctgttatgttgatgccagatgacttc

SEQ ID NO: 14208 - DNA, 101 bp, Homo sapiens
gtcaagctcatggttaacttagggtatgggaatattgctccgagcactgaaggaggcaaaatcttttgtattttatatgccatctttggaattccactctt

SEQ ID NO: 14209 - DNA, 100 bp, Homo sapiens
ctgcagtacctgcagaaggtctctggagacatcttcagcaggttcagctttcaggagtacatcaagattgaccagcctgagaagcaggggctggagcagc

SEQ ID NO: 14210 - DNA, 100 bp, Homo sapiens
cgttctttaatatgctggatgagctgctgaagcccaccgaattaggccgccatggcatcagatgaaggcaaactttttgttggagggctgagttttgaca

SEQ ID NO: 14211 - DNA, 101 bp, Homo sapiens
agatcgccgtggtgggcggccagagcgccggcaagagctcggtgctcgagaacttcgtgggcagcttagaccatgctcagcctccaagcagccttgtcatc

SEQ ID NO: 14212 - DNA, 100 bp, Homo sapiens
atgttcaaaaattgctgaatgagcacaaggatttgaaggatctgtctggctccattgatgacctccccacgggaacggaagcaactttgagctcagcagt

SEQ ID NO: 14213 - DNA, 95 bp, Homo sapiens
ccagccttgatacccattaccactgcctcctttattgcagcaggaatttggtgcttttgaagatgatgatatcacgcacgttgaaggaagtgtag

SEQ ID NO: 14214 - DNA, 98 bp, Homo sapiens
aaaaaggagcggcagcctctgcattgggcagcttttctagaacgtaggcgttcccggtccacatcccgggagagagaacgcaggcgccgagaaaggtc

SEQ ID NO: 14215 - DNA, 82 bp, Homo sapiens
atcatgtctgcgagccaggattcccgaccatgtcgcctgaagaatggacgtatctagtggttcttcttatctccatccccat

SEQ ID NO: 14216 - DNA, 88 bp, Homo sapiens
ttttacagttaactctgctgtttgctgcatgctgcatgagacccagggtcctgtattttcatctcagcctagtgacgatgaatcaagt

SEQ ID NO: 14217 - DNA, 101 bp, Homo sapiens
tttcaaaagaaacatgttggaagatcaaaggcacaggaagaggagatcccagaactggagattgacgtggatgagctcctggacatggagagtgacgatgc

SEQ ID NO: 14218 - DNA, 83 bp, Homo sapiens
cacttccccaccggaggtttatcacaagggactttgaacatgtcggggatcgccctcagcagactcgcccaggagaggaaagc

SEQ ID NO: 14219 - DNA, 95 bp, Homo sapiens
ggcaaggaaactggccacaaccaccagagaaacggcggagaacaattgaggatttcaacaaattctgcagttttgttttggcatatgctggttac

SEQ ID NO: 14220 - DNA, 82 bp, Homo sapiens
gtctgctcctgtcgccttcgcctcctaatccctagccactatgacattaaaactaccactactatggaagtaccactactag

SEQ ID NO: 14221 - DNA, 100 bp, Homo sapiens
gtctgtggctacggatcccaggaccctcttcgcgggcgattcgcgtagcctcagatctctgttgaggagctggcgcggaatctggtcatcaaggtcaaca

SEQ ID NO: 14222 - DNA, 75 bp, Homo sapiens
actgggaggcactttgctgtctgcaatcgaagttgaggttttcaattcaaaaacagctgaactacttagtcatca

SEQ ID NO: 14223 - DNA, 50 bp, Homo sapiens
gcccaatccacatgcttttccaggttttgcgtgtgaagctgtgtggaaat

SEQ ID NO: 14224 - DNA, 100 bp, Homo sapiens
aaatgatcagccttgcaaataatcacagattagctgcagtataccttaaatggcaagaaggaaataaatcatctgacatcactcagattgaagaggagct

SEQ ID NO: 14225 - DNA, 50 bp, Homo sapiens
ctgacctcagctgacagagaaacagcagacctggtggtgaacttaaccca

SEQ ID NO: 14226 - DNA, 75 bp, Homo sapiens
gatggaaatcctaatgacagtctccaaattcgcctccatctgtaccatgagcccataggcagcatgtcatccatg

SEQ ID NO: 14227 - DNA, 98 bp, Homo sapiens
ttcacaacctccggggatgcgaaaacacccggccttactgaggaacaaagggtctttactgggattttcacagcagaaatggttctcaagatcattgc

SEQ ID NO: 14228 - DNA, 75 bp, Homo sapiens
cacgacacatgcagtggcttctggactgcgcgatgactggacgagtgtgaacatggctacgcctcttcattcccg

SEQ ID NO: 14229 - DNA, 82 bp, Homo sapiens
ctgctgctgcccggcctcggggaatgtatcctgtcaggtataatgtcagtgaatggcaagaaagttcttcatatggatcgaa

SEQ ID NO: 14230 - DNA, 75 bp, Homo sapiens
ggaacagcggaggacgaagagcgggacccgagccctgtttgcagaaaaaacttcagcatgtgccaggaacacaac

SEQ ID NO: 14231 - DNA, 82 bp, Homo sapiens
ggaggtgttcgagaacgaccccgagacggttcgagaacttgtcttggacaattgcaaatcaaatgatggaaaaattgagggc

SEQ ID NO: 14232 - DNA, 103 bp, Homo sapiens
gaccctttgccttcgccactgctcagcgtctgcacatccctacaatggctaaaacagcaatgggtgctggagaatctggtaaaagcaccattgtgaagcagat

SEQ ID NO: 14233 - DNA, 75 bp, Homo sapiens
gcctcagccgcttggggcccgcacggaccctctacttcagctggagcattggatttgctaaaggagcttaagaat

SEQ ID NO: 14234 - DNA, 98 bp, Homo sapiens
ggcgagggacctcgcagggagccatccgatcatgaagaagactttgaattacggaaagaactgattggacaggtgatgaaccagcttggacagcagct

SEQ ID NO: 14235 - DNA, 90 bp, Homo sapiens
cgagcgcatcgaggatttggcgctgcagaaccagatccgggagcacgtcatctccatcgaggacaatggcgatgaccactcagaaggagg

SEQ ID NO: 14236 - DNA, 100 bp, Homo sapiens
agacaaaagaccgtttgtgttttgtgatggaatatgttaatgggggcgagcttacaaaacactacacagcaaaataatgatctgctagactgctaacccg

SEQ ID NO: 14237 - DNA, 100 bp, Homo sapiens
gttccaatcttcgtgttcactttaagatgtggacactcctgcctgggttctgcacaaggcctacagatgtggccatctccttcaaagggctggcacggac

SEQ ID NO: 14238 - DNA, 83 bp, Homo sapiens
gcttccagttagtggatatagcacaccatccccagccagcttgggcactgtttaaaggaaagttccgagaaggcatcgacaag

SEQ ID NO: 14239 - DNA, 82 bp, Homo sapiens
gtcttgcaacagtggccgcacgcataggtacactgaggaggggacggctccgtcttcacattgtgcacagatctgaggatgg

SEQ ID NO: 14240 - DNA, 50 bp, Homo sapiens
ctgggtcctacctgtcagagccccaaggaaggacattccccaagaagggc

SEQ ID NO: 14241 - DNA, 96 bp, Homo sapiens
gattggcttcgggctgagctagcagtgagcaccttttggcccaatgaatatcagaactggttagatcctgctaaagaaataaagagacaactgaga

SEQ ID NO: 14242 - DNA, 100 bp, Homo sapiens
cacctggatgacaacgagaggagagcgccgccctgtgctgggctgccgggagctcgtcttcaggaacctctccaagatcctccctgccctgtgccacgac

SEQ ID NO: 14243 - DNA, 75 bp, Homo sapiens
ccgccgattcctcctccttggtcgccgcgtccttggctggcgtcctgtcctgggagctggagaggatgtcagcga

SEQ ID NO: 14244 - DNA, 50 bp, Homo sapiens
agtccggagacagagctcactggcctccaagcctttgggagtagcttctg

SEQ ID NO: 14245 - DNA, 75 bp, Homo sapiens
gcatttcctcctgacggctgtacttgagcagtcacctggcacagtcctcccgagagctggatgacagcagcagtg

SEQ ID NO: 14246 - DNA, 60 bp, Homo sapiens
ttgggacatgcaggacttgtatatgagtatacattggctgatcagctgaccgaagaacag

SEQ ID NO: 14247 - DNA, 96 bp, Homo sapiens
agggaggacggccagacacctggaagccggaaaatggatattgtacctgtggatgcatcttatgaagtaaaagaactatatgtgccagaaaataaa

SEQ ID NO: 14248 - DNA, 100 bp, Homo sapiens
accgagatgcagctcaaagaccagacaccaatgggaatcccaatggggaagtcgatgctggtgcttctcaccttcttggccttcgcctcgtgctgcattg

SEQ ID NO: 14249 - DNA, 82 bp, Homo sapiens
gaggctgacctagtgatatttcagactccatcaagaatgctggaggaagggtgtttgtccactgccaggcaggcatttcccg

SEQ ID NO: 14250 - DNA, 74 bp, Homo sapiens
tttgatagttctgacggagtctggcaggtctgcaaagtgcaccctcctgctggactgtgctgtgccaggaccga

SEQ ID NO: 14251 - DNA, 140 bp, Homo sapiens
ggatgtggataccccgagcggcaccaacagcggcgcgggcaagaagcgctttgaagtgaaaaaggcagactgccagattcacttacagccccagctaattccaccaaacatggaggagtacatgaacagccttctctcag

SEQ ID NO: 14252 - DNA, 100 bp, Homo sapiens
ccgaaacgcaggccaactcgaccacagtcccacaggatcacatgttgaatggtgtaaacagcttatagctgctacaatttctagtcagatttcaggttca

SEQ ID NO: 14253 - DNA, 89 bp, Homo sapiens
cccaggcctgcgtccgagtctccgccgctgcgggcccgctccgacgcggaagggaatgacagaggaagaggaagacaaacttctggcac

SEQ ID NO: 14254 - DNA, 49 bp, Homo sapiens
ccgaggatcaggaaaaactatggagttgatccccctcatattgtgtaca

SEQ ID NO: 14255 - DNA, 51 bp, Homo sapiens
attcagccagtccgcggtcctggtctgcgagctctgcaagggagcggcccc

SEQ ID NO: 14256 - DNA, 75 bp, Homo sapiens
tctactgttaattactgtggtttgaatgagatttcagaggaggagatgttaaagtaacccatcttgcaggacgac

SEQ ID NO: 14257 - DNA, 100 bp, Homo sapiens
tattttgtggattttcctgttccattttgtgcctcctggacacctcaggttggcgtgcagtggtgtgatctcagctcattgcaacctctgcctcccggac

SEQ ID NO: 14258 - DNA, 100 bp, Homo sapiens
cgacgccaaatacgtctgggcagccacggccgggggcgtctttcagagcattacgcacagacgcagtcttcagcaaggaagtgctgggaacgccctggag

SEQ ID NO: 14259 - DNA, 50 bp, Homo sapiens
cgtcactgtactggtatagcaatcaaatgatgccttcaattaagttgcag

SEQ ID NO: 14260 - DNA, 90 bp, Homo sapiens
ctagaaaattgttcagactcagcttgtctggtattggtcgtgcacttacatttcaatcgaccaagttccaaggacctatgccataatgat

SEQ ID NO: 14261 - DNA, 100 bp, Homo sapiens
ccctctgcagcctctctgacaagtgaatcatttgctgtttcaaatagagaactgtgcgatgatgagaaagagttcatacattttccagtatgtgagggga

SEQ ID NO: 14262 - DNA, 100 bp, Homo sapiens
agcctgatgctggaaggacgaagaaatcaacgaccgggagcagaagttgcatgcccttaaggaggtattaaagaaatttccaaaggaaaaccacgaagtc

SEQ ID NO: 14263 - DNA, 50 bp, Homo sapiens
ccgctgtaaacagtggatcaagaactgaagcgctgcggcatggcgcgcgc

SEQ ID NO: 14264 - DNA, 83 bp, Homo sapiens
cgctctgctgtgggcgctgctggcgctctggctgtgctgcgcgacccccgcgcatgtggtgctcatcggggactcaggcgtgg

SEQ ID NO: 14265 - DNA, 101 bp, Homo sapiens
gcggtctgctcatggcgcacagccagcggctgctcttccgaatcgggagggatttgttcgtgttgaccgagattatgtgctgaagtctgcagagctggcaa

SEQ ID NO: 14266 - DNA, 82 bp, Homo sapiens
caggaactgcgcagcctcttcgagcgccgcggacgcgtcatcgagtgtgacgtggtgaaagccttatgccagcctggaccat

SEQ ID NO: 14267 - DNA, 100 bp, Homo sapiens
aaatcagaaaaacatttgggaggtgtctagcccagtggaccttctgaaggagtagctcggagaggaggaaggagaagtcccgggatgctgcgcggtgccg

SEQ ID NO: 14268 - DNA, 96 bp, Homo sapiens
tccatttggggaccagagatggacggtcactcagcctatggagaacattgacatcaccaatttcagcagcagctggagcgatggcctggccttctg

SEQ ID NO: 14269 - DNA, 101 bp, Homo sapiens
ctgaacagaaacatgactgccgagcaaatttttcagaacataaaacaagaatatagtcgttatcagaggtggagacatttagaagttgttcttaatcagag

SEQ ID NO: 14270 - DNA, 100 bp, Homo sapiens
ggagcctcttcccgcacgcaatctgcctcggagacgttgataacgatacggttgctgttgaagaaatctggttgcagaacaccacggattgaattggaag

SEQ ID NO: 14271 - DNA, 90 bp, Homo sapiens
agactccgtgggcataggaccctccgagccagggctgggaagaaacggtggatgccgccatttcccacctgttgaagacttgcctgtcga

SEQ ID NO: 14272 - DNA, 74 bp, Homo sapiens
ggatcacttcaagatatttaccatggtgaaatgacaatggatgctctgttggctcgattgaaacttctgaatcc

SEQ ID NO: 14273 - DNA, 100 bp, Homo sapiens
cccgggtcccaccgccgccaccatgcctcggggaagccgcagcgcggcctcccggccagccagatggagatgggtgtcgtgagctggtggtgggctacac

SEQ ID NO: 14274 - DNA, 75 bp, Homo sapiens
ttggatcttgcacaggaaggaattaaagcctctgcgcttagataccttcatgaaaacagaatcatccatcgggat

SEQ ID NO: 14275 - DNA, 76 bp, Homo sapiens
cctgaagctccccatcaagggaatgaacttcacagatgaaattctgaaagcagcggtaatgaaatatgggaaaaat

SEQ ID NO: 14276 - DNA, 49 bp, Homo sapiens
gtgacggaggagcttgtaccaccggtagcacaggcggagtgcagcggag

SEQ ID NO: 14277 - DNA, 83 bp, Homo sapiens
ggaccacaagatcctcatcgacagccctgggcgctgcctatggcacagccaagagcggtaccggcattgcggccatgtctgtc

SEQ ID NO: 14278 - DNA, 100 bp, Homo sapiens
agttacacgaggttggtcatgaaagagattccttgcagagacagctcaacacggcacttccacagaaatcggccctgcctctgtgatggtggggaacctg

SEQ ID NO: 14279 - DNA, 100 bp, Homo sapiens
agtgattcttaatcagcgcactggcaagtgcagcgcctgtaatgtttggcgagtctggtgttatgaagcggagattgaggagatagatgaagaaaatggc

SEQ ID NO: 14280 - DNA, 101 bp, Homo sapiens
atccatcctcggatgtcgctgccttgcataaggccataatggttaaagatgcaaataatacggcactccgaacagacactaaaaacagctctcatctcaaa

SEQ ID NO: 14281 - DNA, 75 bp, Homo sapiens
gtttggataaaaagaaagcactgtggtttcctgcattgccacatgaaatgaagatcacctctgcctatctacagg

SEQ ID NO: 14282 - DNA, 98 bp, Homo sapiens
ccataaacgcccccaatttcccagctgctaaaggaagaggaagcactattcctgatcagagaactccagttgcttcaacacacagtatcagtagtgca

SEQ ID NO: 14283 - DNA, 83 bp, Homo sapiens
agagcaaaatctacaagatgatgcagggaggagctggacacctgttctgctgttgtgtcctgccattctcctgaagaacagag

SEQ ID NO: 14284 - DNA, 100 bp, Homo sapiens
aactgagccctgggagctgcttcttcctgccacgagggacaagggtgtataatgcactagtggcgtttatcaggttacaggcccaaaaactgcgactggc

SEQ ID NO: 14285 - DNA, 98 bp, Homo sapiens
agcgcgccagcaggatggcccacaagcagatctactactcggacaagtacttcgacgaacactacgagtaccgtttcaccagtgatcattaaagaatg

SEQ ID NO: 14286 - DNA, 90 bp, Homo sapiens
cgccggggaccggggcgaggcggcccccgccgccgccatggaggcgctgggacccggaatctggaaactgttcttcaggaagaaacccat

SEQ ID NO: 14287 - DNA, 101 bp, Homo sapiens
caagtccgaggaagaggcccagaaggcacagaagcatttcaacaagagcttcatcgacacatcccggatcacaaatcaaagaatcttcaggatggcagcaa

SEQ ID NO: 14288 - DNA, 100 bp, Homo sapiens
cagagaaagctttccagcagtcagttgaacaagacaacttatttgatggcaaaacatcagaggctcttgcaaagttaatttcactacaagctacagaagc

SEQ ID NO: 14289 - DNA, 75 bp, Homo sapiens
gaaaactacaaaaagcagtggagagctttacctggaatattaccatcttaaagctgctcatgtttcccacctgga

SEQ ID NO: 14290 - DNA, 101 bp, Homo sapiens
caagccctgttggagactatgcaaaacaagtttatcagtgcagtcgctttcaatctgaaatcaaacgcttgaaaatctcatccccggtgcgtgtttgtcag

SEQ ID NO: 14291 - DNA, 95 bp, Homo sapiens
gccccggccacctcggcctcttcctgttgcaccaggttcttcgaaaactgaagcagatgttgaacaacaaggatctcactggcatcgaatctatg

SEQ ID NO: 14292 - DNA, 75 bp, Homo sapiens
ccaagatggtgaagcagatcgagagcaagatccaagttgatgaagtcagaaggctggtatattttgaaggcacca

SEQ ID NO: 14293 - DNA, 83 bp, Homo sapiens
gtttttcggatcatgtctggtggctccgcggattataacaggtgagaagccctaccactgcaactgggacggctgcggctgga

SEQ ID NO: 14294 - DNA, 90 bp, Homo sapiens
ccctgctgaccttccttccgctggtaacaatctctgatgaaccagacatattatataagcgcctctcggttttggtgaaaggtcacgata

SEQ ID NO: 14295 - DNA, 75 bp, Homo sapiens
aggatgctggtttcttactaccgatacagattacagtagaatgcacattccttgactatataatgggaggatgtc

SEQ ID NO: 14296 - DNA, 75 bp, Homo sapiens
gctgccattctccacctggggaatgtggggttcatggaatgtgtctgtgaaaactacaagctggccgtaaactgc

SEQ ID NO: 14297 - DNA, 98 bp, Homo sapiens
tacctaagaaacaagcctgaaggaggagagagaagaaagaagagtcagaactagcactttcccagaaaaagcatgctttacgctgttattgtcaagcc

SEQ ID NO: 14298 - DNA, 85 bp, Homo sapiens
tacgaaattcttaattcccctgaccgtgcctgcagatgagacaaaaggacccagtgaaaggaatgacagcagatgactaaagccg

SEQ ID NO: 14299 - DNA, 75 bp, Homo sapiens
ggggagcccaagggtgcacagcccctggctacgagaggctggcggcgctcaagctggaagcagaggacatcgccc

SEQ ID NO: 14300 - DNA, 75 bp, Homo sapiens
agtaccgtttcctcagcggcgggtcctaatgccccgagccaagttccactggttcttcttgaagatgtatcgaat

SEQ ID NO: 14301 - DNA, 90 bp, Homo sapiens
ttcctgggcactcctccccgccagtgctggcgtaaagacactgctcccagtaccaagttttgaaggtcctgtccctgctatcagtggggc

SEQ ID NO: 14302 - DNA, 87 bp, Homo sapiens
aagagccgcagtgagttgggcaggttcttggccaagcaggtaaaacttccttttcctgtagatcaaatcacagatcttccaaggaac

SEQ ID NO: 14303 - DNA, 90 bp, Homo sapiens
ggggaatgagacccaaactgctcatacagaattacgcatttccacttctaatgagatggacagagacgtatgtgcgttggtctcctaagg

SEQ ID NO: 14304 - DNA, 100 bp, Homo sapiens
ctttgctgatgccgtacaagagctgctgcctcagtacaaggagagggaatctccaaaaaaagttggtgatgacattgccaaggcaacgggtgactggaag

SEQ ID NO: 14305 - DNA, 74 bp, Homo sapiens
tcacttatctcgaaagcctatcagcatagttaaggtttacccaaggtccagcctagcccctaggcaccatgtcg

SEQ ID NO: 14306 - DNA, 133 bp, Homo sapiens
ccggaagcggcggagtagagcggagcctggcgggcgtgggaacccaggccccgccgaggcggccaggtgtagacggggcactgccttcagagcaggtcctgccagcctcgctggagaggatgccctcgtgtcc

SEQ ID NO: 14307 - DNA, 98 bp, Homo sapiens
gtcttcccgcgtccgccgattcctcctccttggtcgccgcgtccttggctggcgtcactctcgagtggaccctgaggagctcttcaccaagctcgacc

SEQ ID NO: 14308 - DNA, 50 bp, Homo sapiens
cgcgcctttgtgcgcgcgccgagcatttatgacattaacagagaacagga

SEQ ID NO: 14309 - DNA, 82 bp, Homo sapiens
gcagccaggtgataaaattattcagatgatgataattccgaagaaggcttccacactattcattcaggaaggcatgaatatg

SEQ ID NO: 14310 - DNA, 75 bp, Homo sapiens
gcggttcggccgcgccggccggcgccaagcccatctttgtgtgcttgcatccaactgtgatgagcctatgtatgt

SEQ ID NO: 14311 - DNA, 98 bp, Homo sapiens
ctcggggccccccagcctccgccaacccagtgggtcctggccttcgagatcttcatccccctggtgctgttctttatcctgctggggctgcgacagaa

SEQ ID NO: 14312 - DNA, 100 bp, Homo sapiens
cccgagatggaagacgcgacaggttcctccccgggcagaagaaatcaccattccagctgatgtcaccccagagagagttccaacacacattgtagattac

SEQ ID NO: 14313 - DNA, 88 bp, Homo sapiens
aaaggcaaagaaaatgatatggaaatggaaattaaatgggttccagacggaatcagtccccaatgcctggaaattcctcattggatta

SEQ ID NO: 14314 - DNA, 95 bp, Homo sapiens
tgagtgtctgtccccagagcctcagtttgtgcaggacaccgacatggaacagggactcactggggaacacacgcaggacttgaaagatgttacta

SEQ ID NO: 14315 - DNA, 101 bp, Homo sapiens
tggtcactattcaggacacggttccagcgcagtgcgcgttagccatgtctcaggatattgctgcatatcgagctaaaggaaagcctgatgcagcaaaaaag

SEQ ID NO: 14316 - DNA, 75 bp, Homo sapiens
gagccgaagcccaaaaagctgaaggtggaggcgccgcaagcgctgagcaagaagttgagaactttaagaagctaa

SEQ ID NO: 14317 - DNA, 75 bp, Homo sapiens
ctatgtacggatgggatccttccctgtggtgcaaagtactgaatatgaattgagaattcgttatttgccaaaagg

SEQ ID NO: 14318 - DNA, 98 bp, Homo sapiens
gcgccggcaaggggacccagtgcgcccgcatcgtcgagaaactgccaagttttggaccttatctggaacagcgcaagaaaatcatagcagaaaacaag

SEQ ID NO: 14319 - DNA, 75 bp, Homo sapiens
gatcgactgtttgagcccggaagcgcagaagctggcgggtgccccggtgatgactggtgcgggagagagcaccaa

SEQ ID NO: 14320 - DNA, 80 bp, Homo sapiens
gatggtgaacaacctcaaatactgctgtttcggagcaacatcccctgtcacctggttgatatctcttgcggattaccctg

SEQ ID NO: 14321 - DNA, 100 bp, Homo sapiens
cacaacctccggggatgcgaaaacacccggccttactgaggaacaaaggtttctctcctgtcacaatggcatgatctcggctcactgcgacctctgcttc

SEQ ID NO: 14322 - DNA, 110 bp, Homo sapiens
acagtcttctgataggtttcctcggcatcagaagtccttcaaccctgcagatgggcctttgggtccccgaggattagctgaagctacagagatgtgcactcaagagtgct

SEQ ID NO: 14323 - DNA, 75 bp, Homo sapiens
ctgcgtaactttctcccttgatccgggagtctttccactggagaagatggcgaattagaagatggtgaaatagac

SEQ ID NO: 14324 - DNA, 100 bp, Homo sapiens
cgtcgcgggagcctttggggcaccacagagatgcggcagtagaagactcagaaagtggtgtttacatgcgattcatgaggtcacacaagtgttatgacat

SEQ ID NO: 14325 - DNA, 90 bp, Homo sapiens
agaatataaagagaaatgagatggtagccaaacacccaggtgacgttatattcctattcgaagaccaagagctcaaaacatcattcctcc

SEQ ID NO: 14326 - DNA, 87 bp, Homo sapiens
ggcgggcaggcgtgcggaggacactcctgcgaccagcaaaatgatgcttcaacacccaggccaggtctctgcctcggaagtgagtgc

SEQ ID NO: 14327 - DNA, 100 bp, Homo sapiens
attgggaacattatcacaaagctatcatcctgccaaactccaggctcagatgtcacagtgcatttgacctacctcaggatatccaaaggagaacagaggg

SEQ ID NO: 14328 - DNA, 51 bp, Homo sapiens
cagaacatttgggataacctatatagcaggaaattttatgctttggatcct

SEQ ID NO: 14329 - DNA, 80 bp, Homo sapiens
cgcctttgctgctcctctctctgcacgccatcactggtgcaagctatatttaacggagatcctgatgaagttcgagcact

SEQ ID NO: 14330 - DNA, 81 bp, Homo sapiens
ccaggcgcgcgccaagagggtcagctgggacttcaagacggccgagagccactgctgtactaatggtcacttgatgtgcgc

SEQ ID NO: 14331 - DNA, 100 bp, Homo sapiens
ttgctctctgcattccagttagcaaatggggatgctggtcgtttactatatattggccaaaatgagtggacacatgtaaattgtgctttgtggtcagcgg

SEQ ID NO: 14332 - DNA, 88 bp, Homo sapiens
ctggcaagaatcaaactgaagggcaccgtggggagtctgcagtttctgggagcagtgaacggtgcccccgtccagtctctctacaccc

SEQ ID NO: 14333 - DNA, 98 bp, Homo sapiens
ccagtggccctgagcaatagcacgaggcctgttgtctaccaagtgcagtttaaatatatggactttctgtcagattttgagatgatgttgcagcgaaa

SEQ ID NO: 14334 - DNA, 75 bp, Homo sapiens
ctgcccagagaattttgtagacatcaaggtgtatttcgggcgctggctgatcgagggaggccctctggtggtgct

SEQ ID NO: 14335 - DNA, 76 bp, Homo sapiens
ggagcgagtcagctggagtggggaacctgtgggaaatggatcctgagcttgaaaaaaaactgaaagagaataaaat

SEQ ID NO: 14336 - DNA, 75 bp, Homo sapiens
aagaaatacagcttggtgaagagttactagctcaaggtgagtccacctgtaggtggaagagccagtccagagagg

SEQ ID NO: 14337 - DNA, 75 bp, Homo sapiens
gagtaaggagaaaaagagtttccccagtgcctccccattgacaaaccttcagattctctcagtatagggaacggt

SEQ ID NO: 14338 - DNA, 100 bp, Homo sapiens
gccagttaccatgactcatccagtattgactcggagacaaaaagaggccaagaccaagagtgacagtgggacagctgcccagacttctctagacattgac

SEQ ID NO: 14339 - DNA, 98 bp, Homo sapiens
tgacttgaaatctcagcccagtgctgagtctctagtgaactaaggaatactcccccagttgcaagaggcgcaggaccgtggaagacttcaacaaattc

SEQ ID NO: 14340 - DNA, 100 bp, Homo sapiens
gcagggcgatggacggccgaaccccgcgcccgcaggacgccccagccagggccatcgatgcacccctcggagctaatagcggagatgagaaacagtgggt

SEQ ID NO: 14341 - DNA, 100 bp, Homo sapiens
gtgtgggacacgtgttccggaagcagcacccctacacgttcccgggtggcagtggcactgtctttgcccgagttaccttcctaatgacactgtagaatct

SEQ ID NO: 14342 - DNA, 100 bp, Homo sapiens
cggtcacctacccccagcaccacctccagcccctgcgcctcgattgccatcacgaaagccaaagtggatttctccagtgtggtgtgcctgcccccttccg

SEQ ID NO: 14343 - DNA, 100 bp, Homo sapiens
atggaaagccctaaagaagccctctcagcacagtccagggatcttttgaaagtctgggttctgcccgcacacattcctcgccaccttcttggtgtctgag

SEQ ID NO: 14344 - DNA, 76 bp, Homo sapiens
gttgctttactttttgcttcaccgacatagtcattatgccgaagagaaaggttctgcacttttaaaagaaaagcaa

SEQ ID NO: 14345 - DNA, 100 bp, Homo sapiens
agacaagtgtgcattgacccgaagctaaagtggattcaggagtacctggagaaagctttaaacaaggtttggttttcagataggagttaggtatgagaac

SEQ ID NO: 14346 - DNA, 50 bp, Homo sapiens
atcagctggctgatatagcctctgtggaaactggcgatggaatatgagag

SEQ ID NO: 14347 - DNA, 97 bp, Homo sapiens
ggagctggtgcctgtgcaagttgttgagctgcccaacatgttcggcgaccttcggtccacgtttattgccttgatgattgggtcctacgcctcctcg

SEQ ID NO: 14348 - DNA, 100 bp, Homo sapiens
ggctaacaatggacacccagaaggacgttcaacctccaaagcagcaaccaatgatatatatctgtggagatgtgtctgggaagctgaggatctgggatac

SEQ ID NO: 14349 - DNA, 100 bp, Homo sapiens
ggcttcattgacaaggaggacctgcacgacatgctggcctcgctgggtatgtggaggggacaagccttacattgcaccttcagatctggagcgaaaacac

SEQ ID NO: 14350 - DNA, 75 bp, Homo sapiens
tgcatctcctcggcccctggctcctgctcctggggcccttatattctcaagaccgaatccttcaagccatgggaa

SEQ ID NO: 14351 - DNA, 100 bp, Homo sapiens
ctggccgggctggctgcggccgccctgggccgggccccaccggacgatgagcagcaccagcagtaagagggctccgaccacggcaacccagaggctgaag

SEQ ID NO: 14352 - DNA, 100 bp, Homo sapiens
ctccagggtgtcaggactaagagaagtcacaaaacagcagatttcccaagagcagcggaaaatgatccagtcacaggtgacagatcagtcagtgaaagca

SEQ ID NO: 14353 - DNA, 100 bp, Homo sapiens
ccctgttgtacatccactggacctaaaatatgaccctgatccagatgcctgtgaggagccaccaacatttgaagctatggagctcattggtaaaccaaaa

SEQ ID NO: 14354 - DNA, 88 bp, Homo sapiens
ctatattcagtggctaaatggctccctgattcatgagctttcagcagaggccaaggcagcattgcttgaatttgaagaaagggagcga

SEQ ID NO: 14355 - DNA, 100 bp, Homo sapiens
ccgctccctcttctcactgaagcagatcttccaggaggatttgatgaagatgttaaagcgaaagtggagaaccttctcgggatttccagcctggaaaaaa

SEQ ID NO: 14356 - DNA, 83 bp, Homo sapiens
ctgatttcctgcttctccttttcatgagtgttcctgtggtctctgcacctcctttctttgctgctgacacgccgaccgcctgc

SEQ ID NO: 14357 - DNA, 110 bp, Homo sapiens
cgcaccatgccgctcctaagcctgcacagccgcggcggcagcagcagtgagagggaaattcaactactgaggaggttacggcacaaaaatgtcatccagctggtggatgt

SEQ ID NO: 14358 - DNA, 74 bp, Homo sapiens
ccacttgcttgggatcctttatcctggtcatcttctatttccaaaaaaccctccgtaactctaggtcagagcgc

SEQ ID NO: 14359 - DNA, 82 bp, Homo sapiens
ctagcctgacaaatgcttgctgacctgggccagagctcttcccttacgcaagttgaaaggattgtagacaagaggaagaaca

SEQ ID NO: 14360 - DNA, 83 bp, Homo sapiens
ggggaaatctggtgtatgttgtcaactatccaaaaggtcctgggaggaatggagaggggtcccactgactaacttttctgaga

SEQ ID NO: 14361 - DNA, 90 bp, Homo sapiens
attatattccaagacagagcacctaggattaaattggtttcctaagcagtgctcggaatgtgaccaggcagggagcagtgacatggaagc

SEQ ID NO: 14362 - DNA, 75 bp, Homo sapiens
attttttgcctttgttgattaactggacaaattcaggatggtacataactagtgccaattcagatgcagagggga

SEQ ID NO: 14363 - DNA, 100 bp, Homo sapiens
aatgatcgattcaggagaaaagaagcctgggcggagagcagaggtatggaaaagttgaggccactcgcatattgttagagaaaggaaagtgcaatccaaa

SEQ ID NO: 14364 - DNA, 107 bp, Homo sapiens
cggagcgcggcaggacttggctggacggcgcggccacggagaagggcgcggtgtcgtgaaaactacccctaaaagccaaaatgggaaaggaaaagactcatatcaac

SEQ ID NO: 14365 - DNA, 100 bp, Homo sapiens
ggcttaaagtaggacaaccatggagccttcctgtggcaggagagacaacaaagcgctattatcctaaggaggagatcgacgtgtggaccgaggagcggaa

SEQ ID NO: 14366 - DNA, 100 bp, Homo sapiens
ctctctgacagtccgtatagtgtagtgtgcaagtattttcagcgagggtactgtatttatggagaccgctgcagaaactgctttcccaaacagactgcgg

SEQ ID NO: 14367 - DNA, 132 bp, Homo sapiens
ctgcagactacattggaaaggagatttgctatttactctgctcgagatgatgaggaattggtccatgagatgagtatgatgtatgtgccatttgtttggatgagtatgaagatggagacaaactcagaatcc

SEQ ID NO: 14368 - DNA, 75 bp, Homo sapiens
gaactgaacttagctcgacggggctgaccgctctggcccagggtggaagctcttcgtgggcggtcttgactggag

SEQ ID NO: 14369 - DNA, 114 bp, Homo sapiens
ctgagggtgaagtggcaggaggaggaggaggggctccggctggtctgtggtgaggaagaggggatggagcgccagctggtggccctcctggaggagctgtcggctgagcactac

SEQ ID NO: 14370 - DNA, 98 bp, Homo sapiens
gatttttggaggatgatatgggagtataatgttgtgattttgactaaaggagaagttcaagtatcagataaagacacacacaactggagcagatgttt

SEQ ID NO: 14371 - DNA, 100 bp, Homo sapiens
ccgcccgcccgcgccgtgctggactccaccaacgccgacggtatcagcgccctgcaccagggcgccatgttttggaagtttgacctgcacacaagctcgc

SEQ ID NO: 14372 - DNA, 74 bp, Homo sapiens
gctcgggacggaggacgcgctagtgcaggtatgtttattcctaaaacgaggtgccaatcaacatgccactgatg

SEQ ID NO: 14373 - DNA, 99 bp, Homo sapiens
tgcacatcgtggtggtcggatttcaccacaagaagggctgccagggatagctgggagtatggccaccctgctccacgatgcggtaatgaatccagcaga

SEQ ID NO: 14374 - DNA, 100 bp, Homo sapiens
ccgccgtggcgccgcagacctccatcctgttaccctgaagagacttacccaatttatgacctttcagactgtatcaagcgtaggcaagaaacaatcttgg

SEQ ID NO: 14375 - DNA, 101 bp, Homo sapiens
ctgcaaaggggaagtggtccgcgtgcacaacaaccacttccacatcagatgcttcacctgtcaaggaagatgagaagtttttgtctgaagtttttgcacaa

SEQ ID NO: 14376 - DNA, 90 bp, Homo sapiens
cgccatcatagcctacctcatgcatagtaacgagcagaccttgcaggtattatacctgaagaaccttagccctcgggtgactgaaagaga

SEQ ID NO: 14377 - DNA, 101 bp, Homo sapiens
tcgacgcggacagcgggctggagcctgacgagctggcgggtgctggagaatctggtaaaagcaccattgtgaagcagatgaggatcctgcatgttaatggg

SEQ ID NO: 14378 - DNA, 100 bp, Homo sapiens
gttgctgcttcagcaaaacaagaaatttcaaaacttgatcaaggtggacccccaaaagtacaagggcatatttaacggattctcagttacacttaaagag

SEQ ID NO: 14379 - DNA, 82 bp, Homo sapiens
gcgtgtctaggtgagtcgcggtgggtcctcgcttgcagttcagcgaccacggggctagtgacatttgaagatgtagctgtgg

SEQ ID NO: 14380 - DNA, 82 bp, Homo sapiens
cgggaagagaagatcatcgagcatttcaaacggcgcccagacaccatgtcacaaccctccagaactgacgttggcaggaagt

SEQ ID NO: 14381 - DNA, 75 bp, Homo sapiens
gaagcacttctgttaggaatttacaatttgggtttttgctgcagctcaggtgggaatgcagtgtcatgctcttgg

SEQ ID NO: 14382 - DNA, 90 bp, Homo sapiens
ccactggacctccaaggaagccacgtgcagacatctacaaccttcgatctcctgacgacacattttctgtgacaagtttccaaacctagc

SEQ ID NO: 14383 - DNA, 98 bp, Homo sapiens
agagacaagctgagcttgccgcacaaaaagctagagaggttgatctgttccagctgcaggtgaacaccctacgacgttataaacgacactacaagttg

SEQ ID NO: 14384 - DNA, 96 bp, Homo sapiens
actgtccgccaggattggaatacttaagtcagttggagtcattcgttgcccagtttgcagccaagaatgtgcagagagacacatcatagataactt

SEQ ID NO: 14385 - DNA, 75 bp, Homo sapiens
aaagtcacccggcggccaaaggccagtgactaccaacgtttggaccagaaggaagtaatggctgaacacaatccc

SEQ ID NO: 14386 - DNA, 98 bp, Homo sapiens
gtcctcagaccgaccagcccaagaaacatctcaccaatttcaaatctgacctccacaatctaaattgcttcgtgaagataagaaccataacatgtatg

SEQ ID NO: 14387 - DNA, 100 bp, Homo sapiens
cccgaggcccctatggcagatttgaaaattcacccttgtagagtcattcctgcctttgagcggactcccttttaagatatacatcagtcaagtatgtgag

SEQ ID NO: 14388 - DNA, 83 bp, Homo sapiens
ggagccgttagtgatgtgcctgaagcaatcaaggtgaagaggacaataccagcgtcgtctggttttggctgcacaaaggcgag

SEQ ID NO: 14389 - DNA, 99 bp, Homo sapiens
tcctgcggctgcgactcaggctccggcgtctgcgcttccccatggggctggcctgcggcgcctgggcgctctgagggtttacactgtgattttgcttgc

SEQ ID NO: 14390 - DNA, 82 bp, Homo sapiens
gtgaaagagaagcacggctccgactactccaaggagaagtttttgcgatatgtggaagctgtgatgctttgggaaactggaa

SEQ ID NO: 14391 - DNA, 90 bp, Homo sapiens
gcgaggccctgggggacaacgtgaaacacttctgaaagttctgctgaagacagtgagcaggaagatgagagaggtgctcaagacatggat

SEQ ID NO: 14392 - DNA, 49 bp, Homo sapiens
cagaacattgcacgatgcctcctggtaatattaacggctgctatttgaa

SEQ ID NO: 14393 - DNA, 51 bp, Homo sapiens
tcacctccaacaacatccgcgagatcgagcccgtgctttgaagaagaggag

SEQ ID NO: 14394 - DNA, 100 bp, Homo sapiens
agtcctggtagaccagtgcccgtggccaccgagaccagcagctttaccactcctgaaggccctaaaccccgttccagatgctctgactgggcaagtgcag

SEQ ID NO: 14395 - DNA, 100 bp, Homo sapiens
accggtttctcccacatcgacctgcattcctgggagatggtcgggaagaagaagggagtctcaggccagaaggatggtggccagacggaatccaatgagg

SEQ ID NO: 14396 - DNA, 80 bp, Homo sapiens
gattgaggacaagaccatcgagctcatgctgtggaacaactattttcatctggcagtggcttttatcacccaggattctc

SEQ ID NO: 14397 - DNA, 74 bp, Homo sapiens
ttggagatgggaccacatcagtaattattcttgatgagacaaaaggacccagtgaaaggaatgacagcagatga

SEQ ID NO: 14398 - DNA, 103 bp, Homo sapiens
tttcgaaagctgggtttcccgggagatcccaggcggtgacagagtggagccatggctagagaattcagaaggagctggcggacatcactttagaccctccacc

SEQ ID NO: 14399 - DNA, 100 bp, Homo sapiens
acggaatgtatcctccgaagctatggcctgaagacgggattctttagctgacacttcctccatggcccatctatcgccggcatcctctcaagtggttacc

SEQ ID NO: 14400 - DNA, 100 bp, Homo sapiens
agcgatcagacatgatttataccatagaagatgttcctccctggtacctgtgtatatttctggggctacagtcctattttgtaacggattatgatccaac

SEQ ID NO: 14401 - DNA, 75 bp, Homo sapiens
ggagggaagacgccctggtgctcaccaagcaaggcgcctgtgtctggcagagctggtgtgagacgagacaatcct

SEQ ID NO: 14402 - DNA, 125 bp, Homo sapiens
gtcccctacacggatgaggcccggcggtcgcgcctcaaccggctgtacggaatccaaggtctctaattaacagaagatggcaaagcccagccacagcagctatgtccttcagcagctaaacaacc

SEQ ID NO: 14403 - DNA, 100 bp, Homo sapiens
cgacgctgctgtggtcgctgctgctgctgctcggagtcttcgccgccgccgccgcggccccgccaggacacagatctggtgcccagcgacattgcggcgg

SEQ ID NO: 14404 - DNA, 99 bp, Homo sapiens
gttcgatcaatcatcgggagtaagtcactgtgtgcccagtattctgcagacaaacgagaagatgagaagatgtgtgatcatttgataagagcagcaaaa

SEQ ID NO: 14405 - DNA, 90 bp, Homo sapiens
ctttgggaagcatgtcaccaacccggccttcaccaaactccctgtgcttgaggaatccaaagccctcgtgcgctgcaacatgaagatgga

SEQ ID NO: 14406 - DNA, 75 bp, Homo sapiens
aaaaggagattctgatgaagaagttattcaagatgatcaccggcgtaatcaacccagcgttggacaaatactttc

SEQ ID NO: 14407 - DNA, 75 bp, Homo sapiens
ggaaccgggatggcgacgtctacactgagtcggaggcgaaggagtcagagtcagaagcaaaggtagatggagaga

SEQ ID NO: 14408 - DNA, 51 bp, Homo sapiens
aggagaaaatacggcattgctagggccatgctatgatagtggaagcttatc

SEQ ID NO: 14409 - DNA, 100 bp, Homo sapiens
cgactgatgtagatgatagatttgagaccctggaacctgaagtatctcatgaagtccctcctcctatgtctccatcctccaaatctgtgagcactccaag

SEQ ID NO: 14410 - DNA, 83 bp, Homo sapiens
cctgggctacaagacgctggccgcgggctccatcagcatggctgagggcgtctctggccgagcctctttttgtggaaaacgac

SEQ ID NO: 14411 - DNA, 75 bp, Homo sapiens
aaaatagatcacaacccttttgcaaaaggatttcgggataattatgacacccctgaagatgctgagacatagaga

SEQ ID NO: 14412 - DNA, 75 bp, Homo sapiens
gctctcgcttcgtcctacacttgcgcaaatgtctccggattttttatcaagcagaaatgcatcgaacaacgagaa

SEQ ID NO: 14413 - DNA, 50 bp, Homo sapiens
gtgcaggcctgctcctccgtttgcaagtatcaccttttgccatgatagca

SEQ ID NO: 14414 - DNA, 96 bp, Homo sapiens
gtccatcaaacatcttccaccacagcttagaggtctcacagatttcaagcctggctactggattggtgtccgctatgatgagccactggggaaaaa

SEQ ID NO: 14415 - DNA, 100 bp, Homo sapiens
attgaaaatccccagtactttggcatcaccaacagtcagctcaagccagacacatttccatgtctgtgacaagcttggaggccgagttgcaagctaagat

SEQ ID NO: 14416 - DNA, 75 bp, Homo sapiens
agaatggagactacagagagagagaatccagaagctgaaactgtatctgtgttggtcaaagaaaaagtgatgtat

SEQ ID NO: 14417 - DNA, 75 bp, Homo sapiens
ttggagctcatcagactgaccgtgtcttacatcagttcagagaggaatttgaagcctacattaatgcttctggag

SEQ ID NO: 14418 - DNA, 101 bp, Homo sapiens
tgctgtttggccaccccctgttcctgcagaacacagcattccatattggaagaagagatttctacacatgaaaaaaatgcctttgtttagtaaatcacaca

SEQ ID NO: 14419 - DNA, 75 bp, Homo sapiens
gatggcggcgcccagacaggcctggagcacgtgaagtgtcagactctgacagcaacagctcctcttccagttcag

SEQ ID NO: 14420 - DNA, 96 bp, Homo sapiens
tcccagcttggtggtggattcccgagatgctggcatttgcctgcaaccccttcaggaccctttgaggatgccctgaagttgcatgagtgctcagtg

SEQ ID NO: 14421 - DNA, 100 bp, Homo sapiens
gcgggaggtgttcgagaacgaccccgagacggaacctagaaagattgtacaatgaatggtgattctcgtgctgcggtggtgacctcaccacccccgacca

SEQ ID NO: 14422 - DNA, 90 bp, Homo sapiens
gtttgttgaagtgggaagattggggccttctgattattttgccttgaaaagatcttttgaggtcgaggaggtcgagacacccaactccac

SEQ ID NO: 14423 - DNA, 100 bp, Homo sapiens
gaaggtctctggagacatcttcagcagaaacattctggtgagaatggtgagcgaagctgggacaggtttctgcttcaacaccaagagaaaccgactgcgg

SEQ ID NO: 14424 - DNA, 114 bp, Homo sapiens
ttcacggagcgcatgatggcctactgcgaccagatcttccaggacgagacgggcaagaaccgcagcctcccgcgacgatgcccctcaacgttagcttcaccaacaggaactatg

SEQ ID NO: 14425 - DNA, 97 bp, Homo sapiens
ggcggccgtcagcaacctcgtccggttggtcctgagaaaagggtgccagcgatgcctggatcgcctgtggaagtgaagatacagtccagatcctcac

SEQ ID NO: 14426 - DNA, 75 bp, Homo sapiens
ctccaatacagaagaatgaaggctgcaatcacatgcagtgtgctaagtctcacaccattttgctggtacagccta

SEQ ID NO: 14427 - DNA, 97 bp, Homo sapiens
atacgtgagcccggagcagctggctggctttgataagtacaagcatgccaatgaagatgtggaaagaatgttactaggaaacaagtgtgatatggac

SEQ ID NO: 14428 - DNA, 101 bp, Homo sapiens
gcctttgcctttgttacatttgcagatgatcaggtctgggaggggctgaacgtggtgaagacaggccgagtgatgcttggggagaccaatccagcagattc

SEQ ID NO: 14429 - DNA, 100 bp, Homo sapiens
tggagatcaacggggagaaggtgaagctgcagatctgggacacagcggggcaggagcgcttccgcaccatcacctccacttcatagccctgatgaagcaa

SEQ ID NO: 14430 - DNA, 100 bp, Homo sapiens
ctcggcggcgttcttctgtgtggcccgcctgcaggtcttcaaagcttcacctttctccaaaggcagatgtgaagaacttgatgtcttatgtggtaaccaa

SEQ ID NO: 14431 - DNA, 101 bp, Homo sapiens
aaaagcagcaaatctacttttgggttacaaaaatccagaccagttgaaacattgtagtcggtatatacatgacttatttccttcactcatcaagaatttgg

SEQ ID NO: 14432 - DNA, 80 bp, Homo sapiens
gagagagcattacaagccagcctctgggaccgaggaactcgcttcagacctttgtcttttgaggtgcccaaaccattgtt

SEQ ID NO: 14433 - DNA, 100 bp, Homo sapiens
ggcccagaattactagctcagatgtctggagcgatggctttgggtggtaccattggccatcaagccctgtcgtcctatgaccaacaatgctggcagactt

SEQ ID NO: 14434 - DNA, 88 bp, Homo sapiens
aattgagaaacaggcacacaagtgtgaggagttgctaaatgctcaggagatcatgaatcagacagataaaaatcaacaagaaatccca

SEQ ID NO: 14435 - DNA, 100 bp, Homo sapiens
ggacaagtcggcgccccagagcggacgagatgttgatatatcactacttgtgtcttttaacaaaatgaaaaaattgactactgatgggaagttaattgcc

SEQ ID NO: 14436 - DNA, 75 bp, Homo sapiens
tctttcttatcatcagtgtgttagctttccccaatggtgttcttcttttgggagacgcatataatatgaggcatc

SEQ ID NO: 14437 - DNA, 96 bp, Homo sapiens
cctggaatgatgtagatgccctattcaccacaaagggtgtccgcaatgttgccagtgtctgtctgcagattggctacccaactgttgcatcagtac

SEQ ID NO: 14438 - DNA, 50 bp, Homo sapiens
gcgtggaacggctgcttttggaaggctgaagccgacgtagcttctctgaa

SEQ ID NO: 14439 - DNA, 75 bp, Homo sapiens
gcgcaggcctggtgcaaacagactcaagaggctcggagaaccagcttggcctgacatttaccccggtaactgctg

SEQ ID NO: 14440 - DNA, 75 bp, Homo sapiens
acttgccactgagcccccaggggactgtgcgaactgcaggttgggcccatgagatgtgtgctctgtatattccgg

SEQ ID NO: 14441 - DNA, 100 bp, Homo sapiens
gtggatgtggatgggggccggagtctctatactcactcgtatgaggtaccagaagtttacaggcaagatcctactcacagaggctcttgggatcaaggct

SEQ ID NO: 14442 - DNA, 98 bp, Homo sapiens
cctcactattgatggtgtagcgctttaggggaagctattgacctgaaaagtggttctggaaaagtgtaccaaggccctgcaaaaggtgctgctgatac

SEQ ID NO: 14443 - DNA, 97 bp, Homo sapiens
caaggcctgagtagccggtaacaaacgagggttcccgggattggaccgacgcagccatgacctccgcgctctggcagctcctcttccgtgtgctctc

SEQ ID NO: 14444 - DNA, 83 bp, Homo sapiens
ctggacaggcagagtgctgatgtgaaaaataccacgacaaaaccaccctaaaccaggaagacagcgcttccagcaacccgttt

SEQ ID NO: 14445 - DNA, 96 bp, Homo sapiens
gtgcattcttttggtggctcgatgttaccctcatattttcagcactaattttagggccaacagagcacttatggcaaggcatctcgagggggtggc

SEQ ID NO: 14446 - DNA, 50 bp, Homo sapiens
atcactcgctcccttgatgatcttgagtctccctttatggcaagattgtc

SEQ ID NO: 14447 - DNA, 100 bp, Homo sapiens
gctgcgtgttgtccacccaagatggagttcctcctggggaacccgttcagcacaccagtggggcagtgcctcgggcttatttcaaaacctttgtccctca

SEQ ID NO: 14448 - DNA, 75 bp, Homo sapiens
gaagaatctagacagacaggcctttctagagttcttccatggaagcggaattgctggtttggaggatatgtgcat

SEQ ID NO: 14449 - DNA, 100 bp, Homo sapiens
cggagagtttgacaatgcaggtgccatgatgagtgtggatgaaacactaatgtgttcttttcagagtcttctgaagaggagtctgatgatgaaatagcag

SEQ ID NO: 14450 - DNA, 75 bp, Homo sapiens
tcaggaaaggattttgcacttgtgcagaccgggcgagcagagtaagaagcagaggcagaagaggcctggaccttg

SEQ ID NO: 14451 - DNA, 99 bp, Homo sapiens
ctccggagtagctgggactacagactccctgccctcggaccctgtacagccgcagtatggggcatggctcagcctggtggaccgtgcccaggtgaaggc

SEQ ID NO: 14452 - DNA, 50 bp, Homo sapiens
gccaggacgaagtccaggaaggccagaatgtgaaagatgttgcagaagtg

SEQ ID NO: 14453 - DNA, 100 bp, Homo sapiens
tattacctcagatgatgaaagccaagctatgcagacagttggtgtacattcaattgttcagtgaaacaaagagtcctcttcgtggaaaagaaaaaaatac

SEQ ID NO: 14454 - DNA, 75 bp, Homo sapiens
ttacatctaaagagctagggaggttcttcattagaagctgtaaccacctgtgaactatgtaaagagaagttggag

SEQ ID NO: 14455 - DNA, 100 bp, Homo sapiens
agttcgctacacagcaatgcatcgaggagaataaaggcagccccgttgatgactgaaaatgacaaagcatccacctaacagacgaggaatcagctttgaa

SEQ ID NO: 14456 - DNA, 101 bp, Homo sapiens
gttattatcaggttcacgccaacagtacctcattgctctttggcgactcttattggaggaacatatgcagcagaaaaaagaggaggaagaagttcttaaag

SEQ ID NO: 14457 - DNA, 97 bp, Homo sapiens
cagtgaagattgctgtaaaaaatttcaggattggtactacaagacctctgtgagtgaaagccttcagagggaagctgctaagaagcaggccatgaaa

SEQ ID NO: 14458 - DNA, 153 bp, Homo sapiens
ctcaacttaaacccgaagagttgccttctatgcaggatcttttggaagaagcatcctccagggacatgcaaatgacctagaggatcaagacataatgggagcatttttagacaagccaaagatggaaaagcataatgcccaggggcagggtaa

SEQ ID NO: 14459 - DNA, 100 bp, Homo sapiens
ttaaattctgggcatatgaacagttctgcttgagatttcaagaattttgaatactggcttagatatggaaactctgtctatttgtgtacggctttgtgaa

SEQ ID NO: 14460 - DNA, 75 bp, Homo sapiens
gcttcaggcacttcttggatatcatcgaccctcgcacactctttgtcactgagcgagaactatctaggaaaggac

SEQ ID NO: 14461 - DNA, 100 bp, Homo sapiens
aatgagggtcatattaaactgacggattttggcctttcaaaagttactttgaatagagttttaaacccaatgaaggagttatcataataggagccacaaa

SEQ ID NO: 14462 - DNA, 148 bp, Homo sapiens
gtgaacacaacccaaaaacgatacgccatctgttctgccctggctgcctcagccctaccagcactggtcatgtctaaagactggtcgaattgacaaatcttaccctacagtatgtggccacacaggaccagtgctggacatagactgg

SEQ ID NO: 14463 - DNA, 100 bp, Homo sapiens
gcatcctgacatcgaaaacccggacctcgcttacctgcatgctgaattaaacaaccaccatgtcgagcaaaaaggcaaagaccaagaccaccaagaagcg

SEQ ID NO: 14464 - DNA, 100 bp, Homo sapiens
cacaaatacgtgatttggagagagctgttgaggaagctgtgaggatcattactggtggggccccagagctagctgtagaaggcaacggccccgtggaaag

SEQ ID NO: 14465 - DNA, 50 bp, Homo sapiens
taaagatgcgcctctgcgatttgcagcaaaatgatgcttcaacacccagg

SEQ ID NO: 14466 - DNA, 51 bp, Homo sapiens
atcaggagcctgatgttgtgtggtataaggagccaggtggtggaaatgagg

SEQ ID NO: 14467 - DNA, 89 bp, Homo sapiens
atttggaatttgccaaggagcttcaaaaaaccttttctgggttgagcctagatgtgattgtagagaaggctccaaaagccagggtgcct

SEQ ID NO: 14468 - DNA, 75 bp, Homo sapiens
aaaaccttggccgaaagggttgtagacatggcggccatcaggacgtgcgatgggacacatttcccctaggccgaa

SEQ ID NO: 14469 - DNA, 100 bp, Homo sapiens
gaggagtacgagctcaacggcggcctgcctccgggcacacccggctccccggacgcctcgagcgtttcccaaagtgtattctgcggaactagcacctact

SEQ ID NO: 14470 - DNA, 100 bp, Homo sapiens
ggggcggccgggggctcagagatccaagtgcgcgccctggcgggtccggaccaagggagagctggtgacggcctccaaggccatcattgaaaaggagtac

SEQ ID NO: 14471 - DNA, 76 bp, Homo sapiens
aaaaagctgccctgagacggtgtcccgccgaaagattgccaacactcctgatagctgaatgtgtgctggtttacat

SEQ ID NO: 14472 - DNA, 100 bp, Homo sapiens
cagtccaacatggacatctccaccggccacatgatcctggattcaggagcagttccagaaaaatcccgacagttacaatggtgctgtccgagagaactac

SEQ ID NO: 14473 - DNA, 98 bp, Homo sapiens
cgcgggagccggcgtgggcggcggcaacggggcactgacctgggtggcgagaaccgaagtttggaggtagacgagcaggcgagcggtttgcccgggcg

SEQ ID NO: 14474 - DNA, 96 bp, Homo sapiens
gagagggaaggaacttgaagtcaagaaccttctggagaaaggcaagactgaacagcaggtaatagcctgcagctggtgttttgagaagccctactg

SEQ ID NO: 14475 - DNA, 80 bp, Homo sapiens
agagtattgccgcggtggaaatggagtgttctaagaacggaagcatctgggctggatggaatttagcatcaagcagagtc

SEQ ID NO: 14476 - DNA, 75 bp, Homo sapiens
cgccgtagccgcctccgagcccgccgccacatcctctgaggctgctctttggcgtaaattgcaatcgattaggga

SEQ ID NO: 14477 - DNA, 100 bp, Homo sapiens
aacatattacgaagtccttgttgtaagaacgcttggtttcatagagactgtttacagcaggagcgagaacccgagcagcgccatgagcaacactaccgtc

SEQ ID NO: 14478 - DNA, 87 bp, Homo sapiens
acagaagagtgagagatggaacccgaagaagaaaggattcgttacagccagagattgggtatgcagaagttggctagtcaatacctg

SEQ ID NO: 14479 - DNA, 153 bp, Homo sapiens
ctgcatgagcagaaaaagcggaaaagccaggattcggtgctggaccctgcagagcgtgctgtggtcagagtcgctgatgggagcttgcctgattgtcaacccatcggcctggaccccagagcccacccagttgagcgtgtgcagagggccccg

SEQ ID NO: 14480 - DNA, 75 bp, Homo sapiens
gcgtcgaagacatggaccagggctacggagttctggcataaagcatgcttccattgcgagacctgcaagatgaca

SEQ ID NO: 14481 - DNA, 83 bp, Homo sapiens
ctgcagttacaggaacatcgtctgcttcatgggggaagacgttttcatcccgctaatcttgggaataagaggaggaagcggct

SEQ ID NO: 14482 - DNA, 75 bp, Homo sapiens
taaaggccaagatccaggataaggaagtccaatggatgggaccccaatgaaatgttcaagttcaatgaggagaac

SEQ ID NO: 14483 - DNA, 100 bp, Homo sapiens
ccacaccgcagcctgcttacatagcctggctttagaagagcccacagtcatcaaaaatgggatccgagttggctacaccccagatgtcctgacagatacc

SEQ ID NO: 14484 - DNA, 98 bp, Homo sapiens
cgcgagcgggaacgcgagaaagagcgcgagcgcgagaaggagcgcgagcttgaacgcagcgtggctgcccaagcgccagaggtgacctatgaggcaga

SEQ ID NO: 14485 - DNA, 75 bp, Homo sapiens
aaatatcctcggaagagcgctcccaggagaaacaagtggttatcactaggctaaaactggacaaagaccgcaaaa

SEQ ID NO: 14486 - DNA, 87 bp, Homo sapiens
gtcttcgcgctctggctggtctcccctctgctgggtgtgcctaccgcatgttgccgctgctgtttctgctgggacgtctgactccag

SEQ ID NO: 14487 - DNA, 101 bp, Homo sapiens
gtggaattgctgatagacatgggggcctcaaacgtggagatcaactcctctctgttaatggagtggctctggattactgccacagcaagggaatcatgcac

SEQ ID NO: 14488 - DNA, 134 bp, Homo sapiens
cgcggcgtctccagcctcggtaccatggccgggatcatcaagaaacaaatcttgaagcacctctccagatggaagtgcagtgttccggggctgcttccgcaggcccgacaacctttccctggccttacccgtga

SEQ ID NO: 14489 - DNA, 75 bp, Homo sapiens
catcttcttactcttcatcaaccaaaccaccatcatgggttcgggtcccatagaccccaaagaacttctcaaggg

SEQ ID NO: 14490 - DNA, 75 bp, Homo sapiens
agaccgcggccgggaccgaggctaagaagtatagaaaggtcgctggcaaagagatctactcggataccttagaga

SEQ ID NO: 14491 - DNA, 77 bp, Homo sapiens
gcgcctgagcggggaagcccgcaaacaggtcaccacctggttgcagctgcagatacctcggattgaggatggtaaca

SEQ ID NO: 14492 - DNA, 74 bp, Homo sapiens
ctggtaatagatgtctgacaaactaaagaaagacttgtgttacactttttgaaaaggcctttagagagttatgt

SEQ ID NO: 14493 - DNA, 75 bp, Homo sapiens
gccactttccggggtgcacagcaagtggacctgctgaagttcccatgatgtcacccaatggatccattcctccca

SEQ ID NO: 14494 - DNA, 116 bp, Homo sapiens
aaggacagcggcaccgccagacggccagaaagttccgccatgagctggggcacggagctgtgggttcgagaacttgtcttggacaattgcaaatcaaatgatggaaaaattgaggg

SEQ ID NO: 14495 - DNA, 100 bp, Homo sapiens
tccgccgccaagagtgagcgagcggacccgcgatggaaacgcttcgttaagggactcaggcagtacgggaagaacttcttcagaattagaaaggagctgc

SEQ ID NO: 14496 - DNA, 75 bp, Homo sapiens
agccgactgatgactggagaggatggctactatttcaccaatctggaatctatggatttcctgaaatatgttgtt

SEQ ID NO: 14497 - DNA, 76 bp, Homo sapiens
aagactgtgatcgagcccttaaaaaaggtgctggaggaggaaaccggcggagcagcttccccactctcagttgcgc

SEQ ID NO: 14498 - DNA, 82 bp, Homo sapiens
aagaacagttggccaatactggtgcccaagcctggattaaaaagaccattaaaaatctcaagtgacgactttgggaaactct

SEQ ID NO: 14499 - DNA, 75 bp, Homo sapiens
gaacagttgttgcagcaagcgattcaggcttacatcaaaatctatcaaggagaagaacttccacatccaaagtcc

SEQ ID NO: 14500 - DNA, 100 bp, Homo sapiens
cacaacttgtagtcctcaacagccaggggagcagaaacatgattcccgtgacagaattccggcagttctctgagcagcagcctgccttccgagtgctgaa

SEQ ID NO: 14501 - DNA, 96 bp, Homo sapiens
tgggaataaagatgagtataagcagtgatgaggtcaacttcttggtatatagatacttgcaagagtcaggtatctcagatgaagacatcatcaaca

SEQ ID NO: 14502 - DNA, 75 bp, Homo sapiens
tggaattgtctggatgttgtgatcgttgtgacaacactaagcagttgagatttgaagatgtagtaaaccagtcaa

SEQ ID NO: 14503 - DNA, 82 bp, Homo sapiens
cttccccacctgcccggtgcccgaggaggcagccaagctcgtggcctgcctctgcgtgcatttggtcgtattgggcgcctgg

SEQ ID NO: 14504 - DNA, 97 bp, Homo sapiens
gctgcaaggggtgtgaggagaggagccgctgtttttcactgagctgccataccccgaaagagtgcctggaagagctgggatgtctggttgagtccta

SEQ ID NO: 14505 - DNA, 101 bp, Homo sapiens
cagcggacggcaaggcctgtgaagcaaccttggccatggaccagccggctggcctgcaggtggactacgtcttccggggtgtggagcatgccgtgcgggtg

SEQ ID NO: 14506 - DNA, 75 bp, Homo sapiens
gagcggccgccgccgctgccgcttccaccacaggtctcagccttagatccaaggacagtccaaggaagtcctaag

SEQ ID NO: 14507 - DNA, 100 bp, Homo sapiens
gggctgtcctgggccctccggccgccgcctcccgctccagttcgcagctgggcgacaagtggctggttgcttataaaaagggagtcaaacatctttctgc

SEQ ID NO: 14508 - DNA, 96 bp, Homo sapiens
tggaatgaagtggttacacagcagtacctctttgaccgccttgcccacgagagagcagagctgacatctgataaagacatgtaccttgacaacagc

SEQ ID NO: 14509 - DNA, 100 bp, Homo sapiens
gagttagcagagtgctgctggttccttcgacctgtcatttactccatcctttatagtgatgctacaggacgaagaggaatggataaaaacattggcgagc

SEQ ID NO: 14510 - DNA, 82 bp, Homo sapiens
cttcctgcttcatagataagaggaacttggatacgattggtgttgctgttgatttgattcttctgtttcgtgaactgcgagt

SEQ ID NO: 14511 - DNA, 100 bp, Homo sapiens
aatttgtccaaatacaaagacaggtggataatattaatgcagctgtgatggatttgaaaaaaaagaagatccgcagtctaagtgaagaggtcaaaatagg

SEQ ID NO: 14512 - DNA, 51 bp, Homo sapiens
gggtcccactcacgcccgccggccgccgatgagctgcttcagaaagagcaa

SEQ ID NO: 14513 - DNA, 100 bp, Homo sapiens
aacggggctgctggtgggccgcgtcgaagacatggaccagggctacggaggatgcccggccatccacccccgctgccgctggggagcggcgccttatcgg

SEQ ID NO: 14514 - DNA, 100 bp, Homo sapiens
caaaagagctccatggcggcggcggccaagcccaacaacctttccctggtggtgcacggaccgggggacttgcgcctgatggagtcttgctctgtcgccc

SEQ ID NO: 14515 - DNA, 90 bp, Homo sapiens
cgagaagcctgaaaagtcgcagcgagctggagccgccggaggtatatttgcgtgctctcgtgagaaatctttttaatgaaggaaatgacg

SEQ ID NO: 14516 - DNA, 89 bp, Homo sapiens
ggatcatgtctgcgagccaggattcccgggggatatgagactttctactcggaatatcctgagtgttgcgtggatgtaaaacccatttc

SEQ ID NO: 14517 - DNA, 90 bp, Homo sapiens
cggaaaatgagggagttcaactctggatgacgtagctttgccaaagacttagaagctaagcagaaaatgagcttaacatcctggtttttg

SEQ ID NO: 14518 - DNA, 80 bp, Homo sapiens
ggagtggagcttggtttcgggatctcggtgctgcagacggcgagacctcctgcacaggacatcgctgccggctcccatgt

SEQ ID NO: 14519 - DNA, 83 bp, Homo sapiens
tgtgttcaagaatgatcaggatacttgggactacacaaaccccaatctcagtggacaagtgtcgagttatagcagtgctggat

SEQ ID NO: 14520 - DNA, 100 bp, Homo sapiens
aagaaatactacgataaaaatgccatagctattacaaatgttggtcctacagctacacaagctatgcaagaatttcttactcgattacaagtgcatcttt

SEQ ID NO: 14521 - DNA, 75 bp, Homo sapiens
gtggcctaccaggaggccaggggtgtcgccatggccaccctggagaaatgtgccacgtgctcccagcccatcctg

SEQ ID NO: 14522 - DNA, 74 bp, Homo sapiens
agtcattggatttaccatggcctctttggtgaatcaaaaactctggttttaagcaacctctcctacagtgcaac

SEQ ID NO: 14523 - DNA, 90 bp, Homo sapiens
gtctgcgaaggccgggacccggttccccggcccacagtgggggtgtgcaaacccgagagaactgggaagctgcggatctgtcctccctga

SEQ ID NO: 14524 - DNA, 82 bp, Homo sapiens
cggagctgggcgcggattcgccgaggcaccgaggcactcagaggagatatgatgcttcctggtgtgtttagtggttggtgcc

SEQ ID NO: 14525 - DNA, 98 bp, Homo sapiens
cagagtatgagcattggcacatgctgttttcctggaacaaacagtgttctccgtggcccgatgcccccacagcctatgtgaataacagcccttcccca

SEQ ID NO: 14526 - DNA, 75 bp, Homo sapiens
agcagcacactgtggacaagctggtcaacatgacatctgtccctttccccccaacacatcgcttgacatctgaag

SEQ ID NO: 14527 - DNA, 98 bp, Homo sapiens
acattgcatcgtttgggcaaagtacttgttcaagagcatgcaagttgtccccttggacaaacagatcacaatcatagatagtccgagcttcatcgtat

SEQ ID NO: 14528 - DNA, 75 bp, Homo sapiens
agatgatgagggcgcggcagtatccttggggcactgtgcaggaactcacgtgctgtgtgtcagactgagctttcc

SEQ ID NO: 14529 - DNA, 82 bp, Homo sapiens
gaatcttctcaaagtgggagggatccttgtcatgccactggaagagaagtaaactgtttcacgttagacctgtaacccaagg

SEQ ID NO: 14530 - DNA, 83 bp, Homo sapiens
agcgacctggaccaacccgccttccaacagctgtgtaaacaggaacatcgataagtagtgtaaaaacttgcacaatgaaatcc

SEQ ID NO: 14531 - DNA, 100 bp, Homo sapiens
ccacattgctgcatttgttctgcctgacttggaccctggaaaacctggccctcttcaatttctgacaaaagctgtacaggaagaggcacatacaaagaaa

SEQ ID NO: 14532 - DNA, 75 bp, Homo sapiens
ctcggggacattattgcgcgtggaacggctgcttttggaagttgacttttgtgccctggtaattctgtatcctgt

SEQ ID NO: 14533 - DNA, 49 bp, Homo sapiens
gttcatgttaaccaggccaaacaacagagtgggaagctttggagctgac

SEQ ID NO: 14534 - DNA, 75 bp, Homo sapiens
gtctgccgagttcatgagtctagccctgcccagctggctgggctcacaccaggccatggtggcgtgttacccagg

SEQ ID NO: 14535 - DNA, 108 bp, Homo sapiens
ggaaaatggattcagtttgcatctctccctcctttaaacagcttctccgggtctcagcatgctacagagggccggagctggagatgtggtctctgggagtcactctgt

SEQ ID NO: 14536 - DNA, 98 bp, Homo sapiens
aaaagcagggaggttatgaggcttaataaagaagactgaacccggtgcctggctcctaccccacacagagctgccaccctcacctgtccccaagccac

SEQ ID NO: 14537 - DNA, 50 bp, Homo sapiens
ccagtcccgggtgctgagcaaggaagtcctgacggccacgctggatctgg

SEQ ID NO: 14538 - DNA, 100 bp, Homo sapiens
agaatcagagaagctttactcattttatgatctggagtcaagaagagccagtgaagtggaggtgaaaaatgaaatcgtggcgaatgtggggaaaagagaa

SEQ ID NO: 14539 - DNA, 75 bp, Homo sapiens
atttgttaaggattccaagtaactcttatttgcatctgagaagaagtcactggcaagtcgttcaaatgttgcaca

SEQ ID NO: 14540 - DNA, 51 bp, Homo sapiens
ttatttaaacaggttcattttggaaaaggataagtgcaagaaggctgcttc

SEQ ID NO: 14541 - DNA, 75 bp, Homo sapiens
cagatccttcagcaaaagctgtccttacagatattacagtgacagagagaaacacagaaaactggatgatcacag

SEQ ID NO: 14542 - DNA, 101 bp, Homo sapiens
tcccctcccttgcatgatggaaacaccatggctgcggcggcccagctctctctgacacaggtgattcgcaaggggtggctcaccatcagcaacattggcat

SEQ ID NO: 14543 - DNA, 90 bp, Homo sapiens
gcagcctggcctgttcaccagagatctcccacctcagtgtgggttccatcttacttgtcaccctgcctagggtagttaaaagacgagtga

SEQ ID NO: 14544 - DNA, 132 bp, Homo sapiens
ctatacgaagaactaacagctcggagcaggagaggacgggactgccaagagacatgttagaaggacaagtaccagcaactaaggtttcagagctgaaccctaatgcagaagtgtggggggctcctgtgttac

SEQ ID NO: 14545 - DNA, 100 bp, Homo sapiens
attcgttacagccagagattgaatatgcttttaaggctattaaccagggtggccttacatcagtagctgtcagagggaaagactgtgcagtaattgtcac

SEQ ID NO: 14546 - DNA, 74 bp, Homo sapiens
cctctaaatatcagaccatcaggaaagctggaaaagtggtgtgatccctcacatccacaaatctctgattggaa

SEQ ID NO: 14547 - DNA, 95 bp, Homo sapiens
ggacagtgcactccgggccgcagttactcttcagggatgtgctgacagcacccaagaaaacctcatttggctcgctgaaggatgaagaccggatt

SEQ ID NO: 14548 - DNA, 76 bp, Homo sapiens
cactgcagacgtctgtccgcctccagccgctctcctctgacggtccaagtgtgcctgccatcaactaactatccag

SEQ ID NO: 14549 - DNA, 98 bp, Homo sapiens
ccatgccttagaagaaacaattcttcgacatactctccagcttcaatactgaagataacagccagggaggacaagcagggctgggcctagggacagac

SEQ ID NO: 14550 - DNA, 87 bp, Homo sapiens
tggaagaggatcaggagctggagagaccagcatctcagacatgtcgaaaaagatgttttgatccctaaaataatgagagaaaaggcc

SEQ ID NO: 14551 - DNA, 82 bp, Homo sapiens
ctaaagagtcttgttatttcttctttgagaaaaacctgaaagatgtctcagaagaggatcacctagcccgggtagaagaggc

SEQ ID NO: 14552 - DNA, 75 bp, Homo sapiens
ggcaaaacgaaaaagctcaatgcctcagaaattcattgatgaggatggcaataaccagtggcccgaaggtttgaa

SEQ ID NO: 14553 - DNA, 75 bp, Homo sapiens
gcggaggaccgggaggctcccgggcttgcgtggatccagacatttaatgtggatgcaccatgccagaccgtggaa

SEQ ID NO: 14554 - DNA, 82 bp, Homo sapiens
gaggttatgaggcttaataaagaagctgatgttctaatcatgtcagataaagatgatattgagactccactgctaactgaag

SEQ ID NO: 14555 - DNA, 82 bp, Homo sapiens
tccgcgcggagccgagccggaactgcggcagtctctccctgccaggctcttcatccaagatttggtgcttccagatgtgagt

SEQ ID NO: 14556 - DNA, 90 bp, Homo sapiens
aaatgcctcctgaggatttctgtgcctggaaaatatctgttaacagactgcttttacacctacgacttgagaccaggagacgtatccagc

SEQ ID NO: 14557 - DNA, 74 bp, Homo sapiens
cccacgcaaccccagatccatttacactttacaggggggccctcagcctcttggccttgaacgggctgttcatc

SEQ ID NO: 14558 - DNA, 116 bp, Homo sapiens
gacagactgaaggacagcggcaccgccagacggccagaaagttccgccatgagctggggcacggagctgtgggtgagactgctgctcctcgggccattttgaccggccatgactat

SEQ ID NO: 14559 - DNA, 96 bp, Homo sapiens
aggaacgagccaagaaatttccaactggaggaagcaggagctggccaacagctcggatgcgaccctcccagaccggccgctctcccctcctctcac

SEQ ID NO: 14560 - DNA, 75 bp, Homo sapiens
agcctgcacagccgcggcggcagcagcagtgagagagaggaggttcagatgagcccctgctgacttgagagagac

SEQ ID NO: 14561 - DNA, 51 bp, Homo sapiens
aggctcttctagcaaacacgaagactttagtggtctggagccgaaccggca

SEQ ID NO: 14562 - DNA, 98 bp, Homo sapiens
ttgatccaagaaaagatgcccactccaatctcctagccaaaaaggaaacaagcaatctatacaaattacagttctctgctggatgaaccgaatcctaa

SEQ ID NO: 14563 - DNA, 83 bp, Homo sapiens
ggacggggaccagcagctgtcgccgccgctctcagtgagtgacctgcaggaagaaggcaagaatgccatcaactcaccgatgt

SEQ ID NO: 14564 - DNA, 100 bp, Homo sapiens
gacaggggacagcgtcatcagggaatgtcagtgacttggcgcagactgtcaaaacctttgataaccttaagccctgggcgctgcctatggcacagccaag

SEQ ID NO: 14565 - DNA, 74 bp, Homo sapiens
tgtatgaaaaagtggttacaggccaaaattaactctggttgcagatatcaagaaagtcaacaacttcatcagag

SEQ ID NO: 14566 - DNA, 90 bp, Homo sapiens
gctcaaagaaagatgattatagttcttggagtctctgcggagtccctgggccagatctcacagtgaaagctgcaggatcttccttctgac

SEQ ID NO: 14567 - DNA, 80 bp, Homo sapiens
ctaaacgtgccctactctgccccgggggagagaaacacccgccgggcagcagaggtctggatggatgaatacaaaaattt

SEQ ID NO: 14568 - DNA, 100 bp, Homo sapiens
tttatgaagctccgttgactaccgtggagagatcataatttggggttcaagattccaggaattgaatgatctggcacgggaccctccagcacagtgttca

SEQ ID NO: 14569 - DNA, 96 bp, Homo sapiens
ggatgaggaagggactggaagccccaagctgcatcttcctcccgtgaggctggccgagctccacgctgatctgaagatacaggagagggacgaact

SEQ ID NO: 14570 - DNA, 51 bp, Homo sapiens
acgtgaaatcactgtggcaaccgggggatgcatcatctgcagacatcagaa

SEQ ID NO: 14571 - DNA, 82 bp, Homo sapiens
gcctgccccgcggccaacatgagcttcttgttgttaaaaataagaagttggttgagctgctgagaaggaaagttcgtctcgc

SEQ ID NO: 14572 - DNA, 75 bp, Homo sapiens
catggggacacggcactgcatgctgctgcccgccagggcccagatgaaatttctgaataaattggcagaagaacg

SEQ ID NO: 14573 - DNA, 97 bp, Homo sapiens
gtgcaaccagtaagttgatccatccagatgaggatatatccctgtgaacgagataattgggagagacatgtcccagatttctgtttcccaaggagca

SEQ ID NO: 14574 - DNA, 113 bp, Homo sapiens
agctattgctggacggccagtgggagagcgaggcctgagcctctgcgtctaggtatgcaaccactcatgtattcggttcaggaagcattaaatgccagaccatggtggattcg

SEQ ID NO: 14575 - DNA, 50 bp, Homo sapiens
aagcaacaatcagtgctccacacatgaacaaatcacctgctgcagtaaca

SEQ ID NO: 14576 - DNA, 117 bp, Homo sapiens
aggttacttcttcctcaacaccagcaccgcagatgttgtcaaggtggcctaccaggaggccaggggtgtcgccatggaaaatggctttgtaaagaagtttgaacctaaatctggctg

SEQ ID NO: 14577 - DNA, 75 bp, Homo sapiens
acggctccccgtcgtcctggtgctgcagcgcaatcagccatgactgcctttgcactgtccatgctctcagcccac

SEQ ID NO: 14578 - DNA, 75 bp, Homo sapiens
gcaagaccagtccatttggggaaatccttcggatggtgaactcattagaagttctgatctacaatggccaactgg

SEQ ID NO: 14579 - DNA, 96 bp, Homo sapiens
ctggactctttcaggttctgaagtcattcactggaactcccccaagaagctccgggtgaagaacaagcatgtggagttttttcgcaacctctacct

SEQ ID NO: 14580 - DNA, 75 bp, Homo sapiens
gagggcctggccccagcgcccggtagatcgcggcggtcagcggtgagacgagttggattttatgttaatactttc

SEQ ID NO: 14581 - DNA, 96 bp, Homo sapiens
tgacagcacccggatctcactgtttggcaccttcctgttcaactcccctcaccagcgagtgaagcaaagcacgggctttagccgccagtcttcact

SEQ ID NO: 14582 - DNA, 83 bp, Homo sapiens
tcttgttataggagatcacaaatcaacatctcacttccgaaccgtgagaaaaaacgcaagcctgcatggaccgatcgcatcct

SEQ ID NO: 14583 - DNA, 82 bp, Homo sapiens
ggggggattctcgacctgctaacagaactggaccttttcgaaggatgccctgcagtggtctcgccatccagctacagtggag

SEQ ID NO: 14584 - DNA, 75 bp, Homo sapiens
tccaaatgcgattagttgatgtggcctgcaaggccctgggaggagcggggacactgaggacctctctccaaattg

SEQ ID NO: 14585 - DNA, 76 bp, Homo sapiens
cgctgccttgttaccagctggagcttgacgcagatctcagaaaactgatcttcacaatgaaggctacatcttggaa

SEQ ID NO: 14586 - DNA, 93 bp, Homo sapiens
cggcgagcagatgagaccgctactcacccgggtaacgagcaggattttaccaaatgttgcaagaactctggagttcttatggtagtaaaatgc

SEQ ID NO: 14587 - DNA, 118 bp, Homo sapiens
tgccaaatagcagaagaataccatgaggtcaaaaaggaaatcaccctgcttgagcaaaggaagatctagtgaaaagccatttgatgtatgcggtcagagaagaagtggaggtcctcaa

SEQ ID NO: 14588 - DNA, 83 bp, Homo sapiens
gtcagtcattttactgtcaagacatttcttcggcattctgcaacagtttgcctgagaatacagatcaacccacagaacaaagc

SEQ ID NO: 14589 - DNA, 100 bp, Homo sapiens
cagcccccgaaggccctatcaggacatggagtatgaaagacgctggacccacaaaccgtggagaccaagaactggcacacggacgtgattgagatgaacg

SEQ ID NO: 14590 - DNA, 51 bp, Homo sapiens
gtagtggcgtattccacatagcaaacagcaccaatagctgcaggaactggc

SEQ ID NO: 14591 - DNA, 51 bp, Homo sapiens
tctgcagtgtcttccacaacctggccaatggagatcttcgtggatgatgag

SEQ ID NO: 14592 - DNA, 83 bp, Homo sapiens
gcctgctcttcgcctttcgctgcagtccgtcggtaaattcgaaccaccattatttcacccgaatgtgtacccttcggggacag

SEQ ID NO: 14593 - DNA, 101 bp, Homo sapiens
gaacccaagcagtggcgaagggaatcgcaaggctcttccctgaccattttctactgtccctgcgcgaggtcccccggcagagggcagtagagatggccggc

SEQ ID NO: 14594 - DNA, 83 bp, Homo sapiens
gcatgcccagccagggcagggtggagagctgcagctgcagacaatgcagatcttcgtgaagactctgactggtaagaccatca

SEQ ID NO: 14595 - DNA, 80 bp, Homo sapiens
ccaaggtcaattgaagtagaaaatgactttctgccggtagaaaaggtcatcatcagatttgaaatatttaaagtggatac

SEQ ID NO: 14596 - DNA, 82 bp, Homo sapiens
cggagagagcgtgaatttgcctcggggacgcctctccaggtgtcgtgaaaactacccctaaaagccaaaatgggaaaggaaa

SEQ ID NO: 14597 - DNA, 75 bp, Homo sapiens
ttagtgcctgtgatggcatctttcatctaacacgactttatggacagcagcctgctaaccaagtcatcattcgag

SEQ ID NO: 14598 - DNA, 100 bp, Homo sapiens
cacactggtccaggacatctgttattctccagatacccaaaagctcctcgtccgcctcagtgacgtttacaacagatggagtgttgctctgtcacccagg

SEQ ID NO: 14599 - DNA, 75 bp, Homo sapiens
gacgaagacagtccctggatcaccgacagcacagacagaatccctgctaccagttactataacaacagtaccaag

SEQ ID NO: 14600 - DNA, 51 bp, Homo sapiens
ctgctgcagaaaagctgtttggcatgataccagtagtcctttgctaatcag

SEQ ID NO: 14601 - DNA, 90 bp, Homo sapiens
gagtttgcgactcgcggaccggcgtccccggcgcgaagaggctggactcggattcgttgcctgagacggaatcagtccccaatgcctgga

SEQ ID NO: 14602 - DNA, 96 bp, Homo sapiens
cacgctgtccgtccgcagtaccgacgcctgcagagtgtgaacatggctacgcctcttcattcccgtccatgccgagcccccgactgcagcattcaa

SEQ ID NO: 14603 - DNA, 75 bp, Homo sapiens
acttggttccccctccctcagcttccgccccaaaagcttccagtggtgtctgtagtgagagaaacagagtcccag

SEQ ID NO: 14604 - DNA, 75 bp, Homo sapiens
tgaggattccagaaatttcaaatattacaaccactcctcacacgacaatgcagatcttcgtgaagactctgactg

SEQ ID NO: 14605 - DNA, 59 bp, Homo sapiens
ggtccagttggctctccaggtcttcctgtaattaataaaatgtctccaacatctctaaa

SEQ ID NO: 14606 - DNA, 83 bp, Homo sapiens
gcaggaagctgcggctgagtcgaattaaacaaccaccatgtcgagcaaaaaggcaaagaccaagaccaccaagaagcgccctc

SEQ ID NO: 14607 - DNA, 100 bp, Homo sapiens
aagttataacgctacacgaagaactaagaatattattagcacaagagcaccatactttgagggccatcatctctcagcaaggtgacatatttgtttttga

SEQ ID NO: 14608 - DNA, 82 bp, Homo sapiens
ctacttcctcggtggctgcgccggaggcctgactctgggagcacgcaattcttctgatgtagagcgactggaaagattcttc

SEQ ID NO: 14609 - DNA, 90 bp, Homo sapiens
gagaccgtgaccgagagcgtgaccgagagcgcgaatatcgtcatcgttagaagattcttctgatgtagagcgactggaaagattcttcga

SEQ ID NO: 14610 - DNA, 93 bp, Homo sapiens
ttggagcttcggaagaaggtagaggttctagagaacactaataggagaatgccgtgaatggagaacacctgtggctggagaccaacgtctcgg

SEQ ID NO: 14611 - DNA, 100 bp, Homo sapiens
cccctctgctcgcggccgcgcctttgaggtgtaccaacagtaccgttattgccaccacaagtaaaccagtccctcacttctgtgccaccaatgaatccag

SEQ ID NO: 14612 - DNA, 83 bp, Homo sapiens
attcagaagaggacacagccatgcagatgactccttttcccacccaggatgctctggagttttggctgcaagctggcgtggat

SEQ ID NO: 14613 - DNA, 88 bp, Homo sapiens
gactacaaacggaacttgccgcgtcgaggactgtcggacctcttcagctcggatgcccggcagtgtcatacccccgcccctggtccga

SEQ ID NO: 14614 - DNA, 75 bp, Homo sapiens
gcactgaggaggccgagagatgaggccggagcccaccaagttctgggaagctttccttaaagtttcccatgtctc

SEQ ID NO: 14615 - DNA, 75 bp, Homo sapiens
tacaacctcccacaccgaccaatcctcacgattgagtgtcaaagaaggttcaggagctccatgaggaggaggcac

SEQ ID NO: 14616 - DNA, 83 bp, Homo sapiens
cattatgggcagacagcggcatacagaatgcctatgaccggcgtcgagaatttcaactgagcgtcctccaggctttgaccgtg

SEQ ID NO: 14617 - DNA, 109 bp, Homo sapiens
ctgggaggtcatcgaaggctaccgggcccagcacagccagcaccgcacgccctgcaagggagattctgcttctcagaagatgcactattatagatactctaacgccaag

SEQ ID NO: 14618 - DNA, 75 bp, Homo sapiens
gaagtcaacgggtccagcatgacaggatggaagtacaagtgtcagcacctattttgcgcgataacaatatctcag

SEQ ID NO: 14619 - DNA, 83 bp, Homo sapiens
agaacgtgtttttcgggagagcaaaggctgtgtctacggcagcctggggatatagagccttcacgtaaatgggtccagtcatg

SEQ ID NO: 14620 - DNA, 75 bp, Homo sapiens
gtctgcgagccaggattcccgacctccttgaggcccgccgcccgcgggcccacgagtgcctgggtgaggctctgc

SEQ ID NO: 14621 - DNA, 120 bp, Homo sapiens
cttcgtcaccccagaccttgccagagacctggcaaatgacatcatgacactggatatagacctgcagctaactggatttgatttataagagagaaatctgcagtcaatgcccactcttgc

SEQ ID NO: 14622 - DNA, 80 bp, Homo sapiens
ccagtagcttggatccttgtgggcatgatccataatcggtttcaagctcaaagccgtgcacgagcagcttgcagccctct

SEQ ID NO: 14623 - DNA, 98 bp, Homo sapiens
cagtttggagtctactcattggttagaacatatcaaggttgaaaacgttagcggaagaacttatgcaaacacagcagatgcttttaaacaaggaggag

SEQ ID NO: 14624 - DNA, 101 bp, Homo sapiens
gggggctccgcgagcggaattccggcggctgccgtgactccagtgcaagtactccaaagattcaggtttactcacgtcatccagcagagaatggaaagtca

SEQ ID NO: 14625 - DNA, 100 bp, Homo sapiens
taaggaactagtcacagtgttgctgcaacatagagctgacattaactgtcagatgcctgtgaggagccaccaacatttgaagctatggagctcattggta

SEQ ID NO: 14626 - DNA, 100 bp, Homo sapiens
tgaagacaacaaagagaagaaatctgccaaggatgcattgctgttgtggtgccagatgaagacagctggggcagagcggcttgggtaaatccaccttaat

SEQ ID NO: 14627 - DNA, 82 bp, Homo sapiens
ttcctgtacagcctgcagaactaacccagtgacttgattgtaaaaatttacagagcggaatcatatgctggtctccaagagt

SEQ ID NO: 14628 - DNA, 98 bp, Homo sapiens
tccaccaagctccttacttcggtgctgcagaagatagtttacgaagagaaaagaacctggaagaagcaaagaagattaccattaaaaatgatccaagt

SEQ ID NO: 14629 - DNA, 100 bp, Homo sapiens
tcagtctggttgtagcattgccagtgactctggaagcagcagtttatctgatatctatcagattgccatcagtttccaaacttaatggcagcgttgttac

SEQ ID NO: 14630 - DNA, 100 bp, Homo sapiens
ccagcctgcggagcctgtggggcaggaggcttcgacggcttccagggctgctgtcccgatctgtgctctgaggcccccgcccctgcgctgccgccaacag

SEQ ID NO: 14631 - DNA, 51 bp, Homo sapiens
gaaaattactgatggctctccttccaaagttctcagaggcactgtgactga

SEQ ID NO: 14632 - DNA, 75 bp, Homo sapiens
gacaagccgctggcagccgcggatctcaccgccgctcagggaacccaagacagaccaggatgaggagcattgccg

SEQ ID NO: 14633 - DNA, 74 bp, Homo sapiens
tcgcatctgctcaacgacgaggacctgacgcaggttcctcatgccatgcacctgctgtcacccagcatgcaccc

SEQ ID NO: 14634 - DNA, 80 bp, Homo sapiens
ctcccgcccaaggagaatgcgctcttcaagcggatcttggaacttagtgatttggcccgtgaccctccagcacaatgttc

SEQ ID NO: 14635 - DNA, 100 bp, Homo sapiens
aagtcttcatcaaccgggaccgtggcttcggcttcatccgcttgaaaaacacaccttgactttagtcagatacatcactgtctgttaaaggaaaccaagc

SEQ ID NO: 14636 - DNA, 95 bp, Homo sapiens
tgcctttgttacatttgcagatgatcagggtggagagattcaaccagttagcgtgaaagttggagataaagttcttctcccagaatatggaggca

SEQ ID NO: 14637 - DNA, 90 bp, Homo sapiens
cagattaagaaatctgccccaaagtcttagaactggcagtgtcagcctactgtgtcacctcacagcgaaacagcaccaattccagttcct

SEQ ID NO: 14638 - DNA, 71 bp, Homo sapiens
agaaggaggaggagatgagttggaaggtgtttgtaaaatgtatgaagaacatctgaaaagaatgaatccca

SEQ ID NO: 14639 - DNA, 139 bp, Homo sapiens
gatgatgctccacagaatgctaagaaagctaggcttctaccagaaggggaggagacgttggaatcaggttgacatgatgaaagaagcattagaaaaacttcagctcaatatagtagagatgaaagatgaaaatgcaact

SEQ ID NO: 14640 - DNA, 100 bp, Homo sapiens
tgtttccgcagaacggcgacctcaagaagcagctccacgaaaggcagccgcggatcgccgcgctcagcgacaaacaagggacggcaaaacagaacagaaa

SEQ ID NO: 14641 - DNA, 90 bp, Homo sapiens
gtcggcgcaggcccagatgcgcgcgatgctggaccagttgatgggcacctcccgggacgacttaattcagtgcacaaatgagatgaatgt

SEQ ID NO: 14642 - DNA, 100 bp, Homo sapiens
cacccgctgccccagctcaaagatgctgaagagtttctggcagaaggtttgcggaatgagaacctcagcgctgttgcaagggatcacagagaccatattc

SEQ ID NO: 14643 - DNA, 83 bp, Homo sapiens
ctcgtgatttccagcggcctccgcgcgcgcacgggtggcccagttgaaatccttcccttcctctaccttggaagtgcctacca

SEQ ID NO: 14644 - DNA, 90 bp, Homo sapiens
cagcaagcctgtgctcaccacaaaagtccttctggggcaggatgaggtgttggagagcacaatggctgaacaagtccttcctcaggcttt

SEQ ID NO: 14645 - DNA, 113 bp, Homo sapiens
catctgcctggaggtctatcaccggcccgtggccatcggcagctgcggccacacggggggccctcagcctcttggccttgaacgggctgttcatcttgattcacaaacacaac

SEQ ID NO: 14646 - DNA, 50 bp, Homo sapiens
tagcactcgcagagaaatatggcacctcttctgcctgtgagcgatttgtc

SEQ ID NO: 14647 - DNA, 111 bp, Homo sapiens
tcacgcacgggatccagagcgccgcgcacttcgtcatgttcttcgcgccctgttacagaatgtctgaaggggacagtgtgggagaatccgtccatgggaaaccttcggtgg

SEQ ID NO: 14648 - DNA, 100 bp, Homo sapiens
tgaagacttcagccagtgtcagcgacatcattgtggtggccaagcggatcagccccagggtcgagccgtgctgcacgtggctctgcggaaccggtcaaac

SEQ ID NO: 14649 - DNA, 50 bp, Homo sapiens
gaaaaaagtagggcttctcaaggagaaaccaaggtgtatgttggtaacct

SEQ ID NO: 14650 - DNA, 115 bp, Homo sapiens
ctcgggctccttctacttgcaagacactggtgcattgcaggtgtgtttccgcagaaggaggatcccttttcccccagaaattactcaatgctgaaacctctcaaagtggtattag

SEQ ID NO: 14651 - DNA, 100 bp, Homo sapiens
gcagctcaagcgccgctttgccattggctcccaggtgtctgagcacagcatcatcaaggacttcaccaagcagaggtcggaaaggtctgcttggaagcca

SEQ ID NO: 14652 - DNA, 100 bp, Homo sapiens
tttactaactagccccagtggaccaggctatcatatcatgttgcctttcattactacgttcagatctgtgcaggggatcccaacaagccctcaggattca

SEQ ID NO: 14653 - DNA, 100 bp, Homo sapiens
aaagccagaatggcatccagagagaggctctttgaactttggatgctttattgtacaaaggtctttgatttgcgtcagtgtcatcgacagatgcagcagc

SEQ ID NO: 14654 - DNA, 80 bp, Homo sapiens
ctttgacagactcacacttttggccctgtttgataggagaagctgtctttgctcggtgcttatcatctctgaaggatgag

SEQ ID NO: 14655 - DNA, 100 bp, Homo sapiens
agcccaaaccaggagattgcgagggagcgatgcggtgcagcgcgagcactgtcatccgtggtggccctgggagccaacatcatctgcaacaagattcctg

SEQ ID NO: 14656 - DNA, 100 bp, Homo sapiens
ggtgccagcacctttcggcttctgagacggcggcagcagcggcattcagataccatgtttgtgtggaagtgccccgtgtttgctatgccgatgctgtcct

SEQ ID NO: 14657 - DNA, 83 bp, Homo sapiens
tcctcttcgtctccgccatcagctcggcagtcgcgaagcagcaaccatgacacgttggtcgtcattgcctccgagcccacttt

SEQ ID NO: 14658 - DNA, 114 bp, Homo sapiens
agaagctcattgcatctgttgctggctctgtggagagagtaaacaagttgatctgtgtgaaagctttgaaaaccaggaaaatatgcccaggttaccaacaatcctgaaaatgat

SEQ ID NO: 14659 - DNA, 124 bp, Homo sapiens
cttacccgagaacgtgcgggaagagaagatcatcgagcatttcaaacggttaatttggagtggcccctggagtcagtttcctacaccatccgaggccccacccagcacgagctacagcctccac

SEQ ID NO: 14660 - DNA, 82 bp, Homo sapiens
ggaggagctgtgcagccgcgaggaggcgcgggaggtgttcgagaacgaccccgagacgggtggtgaaggaggagatctttga

SEQ ID NO: 14661 - DNA, 96 bp, Homo sapiens
aggcaagacagcctgtaaccatgccgacgaggtctggccaggcctctatctcggagaccattgatcatggccttgccaggttggtgacagtatatt

SEQ ID NO: 14662 - DNA, 100 bp, Homo sapiens
ccacttgctgataaaatacttatcagtatcttatatgttagcttgacctatgcagatcttattccagaactgataaatttcaaacggaagagagtggcag

SEQ ID NO: 14663 - DNA, 75 bp, Homo sapiens
agtacctgaagttgttgtatccaggtgcatgttacagacttgggaagacccagggcacaatgataaacatactgg

SEQ ID NO: 14664 - DNA, 76 bp, Homo sapiens
tctgctttaactgccgcctcacctgtggagctctgggtacagcagggagaaggttttaaggtgaaaacgaagaaag

SEQ ID NO: 14665 - DNA, 87 bp, Homo sapiens
tgtcaccaatttcctgcccgggatcccagagctacccttcttggagcccacagggtgtctcctttcctcttgggccgggcactttgg

SEQ ID NO: 14666 - DNA, 88 bp, Homo sapiens
ggccctcaaagtctccgtctggagtaaggtgctgcggagcgacgcggcctgggaggataaggtgtttcaggcctcacctgaagatcat

SEQ ID NO: 14667 - DNA, 83 bp, Homo sapiens
gctcggttttcttatgcttataagagtggaacaggttcgagaacttgtcttggacaattgcaaatcaaatgatggaaaaattg

SEQ ID NO: 14668 - DNA, 75 bp, Homo sapiens
agaaccattgttagtgaacgtggacaaagctgttgtctcagggagcacagaaacctctgactatgtgaagatacg

SEQ ID NO: 14669 - DNA, 98 bp, Homo sapiens
gccatcctcatggagctagaacgtgtcaaagcattaggcgtgaagcccccccagaatctctgggaatataagccacccgaaacaatgaaatgtaatac

SEQ ID NO: 14670 - DNA, 78 bp, Homo sapiens
gctgagttagctgaggaggtcaatttaaatggttctggcaaactgctcaagatgcttcctttaaataccaatattcga

SEQ ID NO: 14671 - DNA, 83 bp, Homo sapiens
attcactgggaaatagaggataatcaggttctcctcaaaatctaagtctatggacaaatcagatgaagaactccagtttccca

SEQ ID NO: 14672 - DNA, 100 bp, Homo sapiens
agcagctccacgaaaggcagccgcggatcgccgcgctcagcgacaaacaaatgactctggggacgacgacgaggctaccaccccagccgacaagagcgag

SEQ ID NO: 14673 - DNA, 50 bp, Homo sapiens
gggctgaagcgactgagtccgcgatggagatctattaatgagatgaagcg

SEQ ID NO: 14674 - DNA, 50 bp, Homo sapiens
caaagcccaacaccttcccccactggctacccacctttctgttctgagac

SEQ ID NO: 14675 - DNA, 97 bp, Homo sapiens
tgagccctgcgacagcctggacagcaactcaggttcaaaactggtcaaatcaatggtgatttgctgatataccatgtcttactgactttaaagccat

SEQ ID NO: 14676 - DNA, 83 bp, Homo sapiens
taaagactcccagctccgggagttgctgctgcctccaccagacaccaaaccaggaaatgacatcggagagagagacaagatca

SEQ ID NO: 14677 - DNA, 51 bp, Homo sapiens
agaacctcatcgctgcgacgaaaagtgttggagagcacaatggctgaacaa

SEQ ID NO: 14678 - DNA, 100 bp, Homo sapiens
gatccagcaaggtcggcagagcaaggggcttacgcagaaggacctggccacggtggctgggagcccgagccccacacctgccgggcagcaggtgctggac

SEQ ID NO: 14679 - DNA, 50 bp, Homo sapiens
caacgccccggtggagaagctgaggtttccctgcagtatgagaaaagtgg

SEQ ID NO: 14680 - DNA, 75 bp, Homo sapiens
tcattcttccgggcctccaaggaacttaagcaaagtttaatggatcgagaagtggcgttgcttgctgaaatggac

SEQ ID NO: 14681 - DNA, 83 bp, Homo sapiens
agctgcttctgtgtgatttcttccaaaatacatggacagagcagaatgggctgatatagatccggtgccgcagaatgatggcc

SEQ ID NO: 14682 - DNA, 96 bp, Homo sapiens
cccgcgagcaccagagtcggcgtaactatcgcctgacagggttggcattgtgggaagaaccggagctggaaaaagttccctcatctcagccctttt

SEQ ID NO: 14683 - DNA, 102 bp, Homo sapiens
ccgggtggcctatgtctcctttggacctcatgccggaaaattggtcgcgattgtagatgttattgatcagaacaggaaatttgcctgtaatggtactgtgat

SEQ ID NO: 14684 - DNA, 73 bp, Homo sapiens
tgtcttcggtggactccttcggcagtccacccaccgccgccgcctcccaggtccggcgccagctgccagtcga

SEQ ID NO: 14685 - DNA, 98 bp, Homo sapiens
gaacaccgcgccttcggaagcccgttcggcctggaggagccgcagtgggtcccggacaaggagatattctctaagccgctttcatcatgggagaaata

SEQ ID NO: 14686 - DNA, 75 bp, Homo sapiens
cgccctggccgctcgccgcccgcccgcccgacggagacggacaggaagatgtcacccaagcgcatagctaaaaga

SEQ ID NO: 14687 - DNA, 100 bp, Homo sapiens
tattcggaatgtcccattctatgaaggaggtttgctggctgcaacaggaatattcatgaacatggagtttctcttcagcaacgggtagcagaattggaaa

SEQ ID NO: 14688 - DNA, 75 bp, Homo sapiens
aattactgaagctataaggagattttttaaaaattaaacttcaacacaatgagctttcttcgggaagtatcttaa

SEQ ID NO: 14689 - DNA, 75 bp, Homo sapiens
attctggattcactggagccacagagcctggccagcctgctgagtgagtactggtgcgataccagcgggaggatg

SEQ ID NO: 14690 - DNA, 74 bp, Homo sapiens
aactacagaaacctcgtctccctggctgtcctgagaccatgttatctctacctgcattctggaatcagggagaa

SEQ ID NO: 14691 - DNA, 100 bp, Homo sapiens
tgggagcataaaggtgacctgaagggtgaggtggctttgaccccgggttgcccggccagcacgaccgaggaggtggctggacagctggaggatgaacgga

SEQ ID NO: 14692 - DNA, 80 bp, Homo sapiens
tgcccgaggagtagtcgctggagtccgcgcctccctggttccagggtctccctccactgctgtagtaacccgggtccggg

SEQ ID NO: 14693 - DNA, 100 bp, Homo sapiens
tcagaggagatgtaactatcgctccttcatgaccaagtaggggtaatccagtttggcccctacaagcaactgttcctacagacatacgcccgaggccgca

SEQ ID NO: 14694 - DNA, 100 bp, Homo sapiens
cttgaagacgacttcgaccctgcccagcacgaccagctcatgcagccacaagtatatggttatgatgacttgcagatgcttcagacaagatttccattgg

SEQ ID NO: 14695 - DNA, 82 bp, Homo sapiens
ctgggattcgcgctgctgggcacccacggagcctccggggctgaataccctctaccatctgctttggtcagggtgccgctcg

SEQ ID NO: 14696 - DNA, 100 bp, Homo sapiens
cttttgtgctgctcacagtcaccgctgtcattgtggatcctacagagcaggtgacaatacaagtgctgccaccaaaaaatgccatcaaagaaggggataa

SEQ ID NO: 14697 - DNA, 100 bp, Homo sapiens
cacgttctttgacttgcttgtggccgtagtgtcaggcctgtattgcacatttatgtctgtggtgcatttctccatctgactttgtgtggacagtaatgac

SEQ ID NO: 14698 - DNA, 96 bp, Homo sapiens
tgagctttgtggaagcatttggcggcataccaccctgcactgtgagaccattcctcaagaattttgtatccaaggcccaaaagtttgttacccaag

SEQ ID NO: 14699 - DNA, 100 bp, Homo sapiens
tacttacacagatgaagtccactttcgaaaagaagatgcaaaggcagcatgaacttagtgagaaactgggagtgatttttccatgtttgaagctttgcga

SEQ ID NO: 14700 - DNA, 96 bp, Homo sapiens
gcgattggatgcggcggcggcggcggatcccggagagccccggagtgagcggagtagcgagtcggcaacccggagacaatctccgggaaggggcag

SEQ ID NO: 14701 - DNA, 100 bp, Homo sapiens
cggctgcgtgcccctctcgcatcaggtggccgggcacatgtacgggaaggacaaagtgggaacatctggattatgagattatccagtctctaaatcctga

SEQ ID NO: 14702 - DNA, 100 bp, Homo sapiens
gaaccgtggagtcagaatgcctgcatgcagatctcatcaccatggcaaatgcagccctgaggatttggctactgcatataacaacagggggcaaatcaag

SEQ ID NO: 14703 - DNA, 90 bp, Homo sapiens
ggaccagttatgacataaggtaccgcttgttcagacttcttgagggactcctttgccagctcgaagacaacacacattgcaagcccctgg

SEQ ID NO: 14704 - DNA, 75 bp, Homo sapiens
gcggctgccgtacgtggccctcgatgtgctctgcgtgttgctggggagagtcccgtattctcagagtaaaagttg

SEQ ID NO: 14705 - DNA, 99 bp, Homo sapiens
gcatctatctatggcaaacagtttgaagatgaacttcatccagacttgaaattcacggtgaggaagtgtttgcccctctggaggacacagcaacaagga

SEQ ID NO: 14706 - DNA, 107 bp, Homo sapiens
cggccccaggtcaccgccagcacgcgcctgcttcccgtctgcgcgagtccacgcagctccccagtatgctcaggcttcagaagaggctcgcctctagtgtcctccgc

SEQ ID NO: 14707 - DNA, 100 bp, Homo sapiens
tcagcacagtgctgcgcctggctttacatgcaatacatgaagatgagaatgtgcctactgctcctgatcctccaagtcaacatttacgtgggcatgggac

SEQ ID NO: 14708 - DNA, 82 bp, Homo sapiens
agtatttgaagtctgtgtcaaacatccatatcataagtggaattttggagatattcaaagcaaatggttatgagccttagag

SEQ ID NO: 14709 - DNA, 51 bp, Homo sapiens
tggactgtgggctggtgtgtggaactgattgcaacacctgctcggtatacc

SEQ ID NO: 14710 - DNA, 100 bp, Homo sapiens
tttggagtatcgttctatttctctagctattgccttattttttctcatggatgttcttcttcgagtatttgtagaagggcttctcgtcagtgcctcgcag

SEQ ID NO: 14711 - DNA, 74 bp, Homo sapiens
agtggccacatactttctcagaaaccttcacatcttggtcaaggactccctggaggaaaagcggaagcggcagc

SEQ ID NO: 14712 - DNA, 98 bp, Homo sapiens
tcagatgcatcaacgtttgctcactgatctattattttcaatagaaacagatatacagatgtggagaagatgttttactgtgcctggctaactatagt

SEQ ID NO: 14713 - DNA, 98 bp, Homo sapiens
agtacagaagagtattttgaaaaagcattacaaatatgaagaggcattatttatgaccttttctatggaaaggctccttcctcagagaagcttcctgt

SEQ ID NO: 14714 - DNA, 100 bp, Homo sapiens
aaaggattcgttacagccagagattgattccacctgctcctacgaagcccgactttgatggtcctcgagagaagatgcagaaactgggagaaggtgaagg

SEQ ID NO: 14715 - DNA, 100 bp, Homo sapiens
caccaccgtggccgccggcgggaccagcacaggcggcgttttctccttcggaacgggagcgtctagttggcagatgtgaatggagtcattgaggaggagt

SEQ ID NO: 14716 - DNA, 100 bp, Homo sapiens
gcggggcggcggcggcggcggctgcggcccaatatagggagaaaatcctccacctccgggtttcataatgcatggaaatgttaatccaaatgctgctggt

SEQ ID NO: 14717 - DNA, 95 bp, Homo sapiens
tttaaatgcagcatctgcgatgtgaggaaaggcacctccaccaggaagtggacctctacagaatgaacagccaggacaagctgggcctcactgtg

SEQ ID NO: 14718 - DNA, 98 bp, Homo sapiens
ctgccctgtggggcaaggtgaacgtggatgaagttggtggtgagacctctggcagccaggaggaccagctgtgcacagctctggtgaaccagctgaac

SEQ ID NO: 14719 - DNA, 97 bp, Homo sapiens
tttacttgtaaatatgcagattatatttctagggacaaacctatcacatttactcagcctccatcaagaaatcggcgagagagagctgagctaaggc

SEQ ID NO: 14720 - DNA, 50 bp, Homo sapiens
cctcgattgtgccgcgagggctcagggtcctaaaaaggtggggacgctgt

SEQ ID NO: 14721 - DNA, 75 bp, Homo sapiens
gacgccgggcgtgcaaaggacaggaaggaccccaggaagccatctccccagaagtctgagcctctgctaccttct

SEQ ID NO: 14722 - DNA, 107 bp, Homo sapiens
ccccgcagctgcagccgcctgaccacggcgactggacttacgaggagcagtttaagcaggggaacgcccttttgcttgtgactggcagggctgcgacaagaagttcg

SEQ ID NO: 14723 - DNA, 50 bp, Homo sapiens
aaatgcgctcagcttcaattgagaaaagaaaccttgtttattccctgtga

SEQ ID NO: 14724 - DNA, 82 bp, Homo sapiens
tgggccccagccccacagaccagcccagcattcaggctggacggcagtctggaaacgaccaatgagatcttggactctgcct

SEQ ID NO: 14725 - DNA, 75 bp, Homo sapiens
ggcttctctgaggcggcgagagatggtcaggtctggagctcgaccgggccaggtccgtgacgagaagttattacc

SEQ ID NO: 14726 - DNA, 73 bp, Homo sapiens
caaaacttcaatcctggagcagcttctgtatgggaaccatgtagtgggttgctggtcaaattccctgagttga

SEQ ID NO: 14727 - DNA, 90 bp, Homo sapiens
atcaccacggacgagatgatcaaacgcctgaaggaattgaatgatctggcacgggaccctccagcacagtgttcagcaggtcctgttgga

SEQ ID NO: 14728 - DNA, 100 bp, Homo sapiens
tgccggagagaagaggattggtcctgcttttaagcctagctgaaattcttttcaaggatgagttccacccgttcatcgaggccctgctgcctcacgtccg

SEQ ID NO: 14729 - DNA, 100 bp, Homo sapiens
tctgcatttgtctgtttgatatcaccaaactggaggatgcctatgtattccctggggatggcgcatcacacaccaaagattcagaatctgataattcaga

SEQ ID NO: 14730 - DNA, 83 bp, Homo sapiens
ccagctccccaggagcttggggctgcagacaagcatggtgttgcagaatgaagaagagtctggagaacctgaacaggctgcag

SEQ ID NO: 14731 - DNA, 83 bp, Homo sapiens
aaaatgcgctcgggctggaccagcagcaccagaaatgtcagcagcccaggacacccagccccttggtcttggaggggaccatc

SEQ ID NO: 14732 - DNA, 80 bp, Homo sapiens
atttgagtcatttccttcgtacccacagtgcttcatgagaggaagccagttgagggaagttctccatgaatgtacgtcac

SEQ ID NO: 14733 - DNA, 100 bp, Homo sapiens
tcgttgctgccttcttcgtcaaggttctggacgtggcatgacgagcgcttcctctacatgctcatggagtacgtgccgggcggcgagctcttcagctacc

SEQ ID NO: 14734 - DNA, 90 bp, Homo sapiens
ctctgggggtgcagccgggggctacggaggagctggaggaggttcattaaagaagcggaagcagaatgaggctgccaaggaggcagagac

SEQ ID NO: 14735 - DNA, 90 bp, Homo sapiens
aataaggagaaggataagtcgaaggggaaggcgcctgaagaggacgaagtctctggaatctgttctgcgccacccggcagataatcgcac

SEQ ID NO: 14736 - DNA, 102 bp, Homo sapiens
tagccatagactctattcaccaacttggattcatccacagagacatcaaaccagacaaccttcttttggacagcaaggtggagtctcgctctgtcacccagg

SEQ ID NO: 14737 - DNA, 75 bp, Homo sapiens
ggatgctgcagacactgaacgaggagccagtgcactatcctgaggagcgacatgtggttgaacgccatggacggg

SEQ ID NO: 14738 - DNA, 96 bp, Homo sapiens
cagcacagaaccccagtgcccaggcactgggcctgggcaaacataattactgccgttgcatccttaatgtccagtcaaggagtggtgacaccagtg

SEQ ID NO: 14739 - DNA, 87 bp, Homo sapiens
aaagatccctggaatatgaagagacacagtatggtagccacacccccaggctccttgaatgtattgaggcctctcctctctgtacta

SEQ ID NO: 14740 - DNA, 100 bp, Homo sapiens
tacgacggcaaggtcttctacattgaccacaacaccaggaggaccagctggatcgacccccgggacaggcaatctgaaggcaaatcctgtttagacccag

SEQ ID NO: 14741 - DNA, 74 bp, Homo sapiens
cgcagatgggaagaagcgttagagcgagcagcactcacatctcaagtccaagtggtaagaagttcagaagcaag

SEQ ID NO: 14742 - DNA, 73 bp, Homo sapiens
cggccccggggaactagggagcgtctccggctgcacagcgctcaggtaaaatagaactgcacgggaaacccat

SEQ ID NO: 14743 - DNA, 82 bp, Homo sapiens
tccaggcatgccccgctacgagctggctttaatcctgaaagccatgcagcgggtgtggatgaggtcaccattgtcaacattt

SEQ ID NO: 14744 - DNA, 75 bp, Homo sapiens
cttgcccagcagttatccgggaaaaacaagctagcgctgaacacagcccagtttgcaaagagtctagccatgctt

SEQ ID NO: 14745 - DNA, 74 bp, Homo sapiens
cagatggcgtcttccgtgggcaacgtggccgacagcacagatgtccagctcgccgctgtccaagaaacgtcgcg

SEQ ID NO: 14746 - DNA, 90 bp, Homo sapiens
aaatttcttgggtgaaaaatatatccgcagggttcggatgagaccaggcagttgctatccctgcccagaaaccgtagatgtgaagtgtaa

SEQ ID NO: 14747 - DNA, 101 bp, Homo sapiens
ccctgaagaagtgcaagagcagaggccttctctagaccttgccaagatggcacaggttgtactcagactatctctactttgcaagttcgaataaatccgcg

SEQ ID NO: 14748 - DNA, 97 bp, Homo sapiens
gccagtgaccctggacagtaacaaaacatataaagcccgagcccaaaccccgccaccatcataggaagttccaggttaaaggcagcctcagctcacg

SEQ ID NO: 14749 - DNA, 82 bp, Homo sapiens
cggtctgggccgccgaatctccggccgaagagcggcggcggcagcggcggaattctgtggccacactgcgaggagatcggtt

SEQ ID NO: 14750 - DNA, 75 bp, Homo sapiens
gattcagacgccgattcgcccagtgcctccggagccagcgtggtggccatagacaacaagatcgaacaggccatg

SEQ ID NO: 14751 - DNA, 75 bp, Homo sapiens
acctaccccctggacctggtcagagcgcggatggccgtaaccccgaaggaaatgccctggccaacgtcaacattg

SEQ ID NO: 14752 - DNA, 90 bp, Homo sapiens
gaggaggagaagaggaaccccgcgctgtatgccagcaacgtgcggcgagtcatggccgacttggtttatggcagctccaggacctcgcac

SEQ ID NO: 14753 - DNA, 101 bp, Homo sapiens
gaaaaagaaaacagattattattgcaacaaagatgatcgttgccagcccaacagaaaatggacaggtacttcgtgtaattccacctacccagacaggaatg

SEQ ID NO: 14754 - DNA, 98 bp, Homo sapiens
aacactgctccagattactatgtcggaacagctggatttacctgtgagacaggcagatgaccctaattttcagtgcaaattcaaaggtctctggagta

SEQ ID NO: 14755 - DNA, 75 bp, Homo sapiens
agatgggttttagctgccgccggagtcgaggccaaatttgagtttcatcatggtgactatgaaaaacagtttctg

SEQ ID NO: 14756 - DNA, 83 bp, Homo sapiens
ccgcagccttgggcctcgcgccggctatggccgtgccctggggctgagccctcagcgtgaatgcatctcagtccacgtggggc

SEQ ID NO: 14757 - DNA, 100 bp, Homo sapiens
caaacagcagcacccgagcaaaccccagcaagatgcggaggctgcctcggcggagcagaggaaccacacgctgatcatgttcaacttcctcaattgcttt

SEQ ID NO: 14758 - DNA, 74 bp, Homo sapiens
aatgagctttgcacagtttgaaaatctactgacttcacgaaaacctcgtgaagagcgagatgtgtctcaatgtg

SEQ ID NO: 14759 - DNA, 83 bp, Homo sapiens
cggcgcccccgcagcccgtcacccacctcatctttgacatggacggacttcttctgggacttggtggggaaacttaaagatgc

SEQ ID NO: 14760 - DNA, 90 bp, Homo sapiens
aatctgccaactaatagtaatggcccggaaccgtgaagaaagtgactgagaccgaagatgatagtgatagtgacagcgatgatgatgaag

SEQ ID NO: 14761 - DNA, 98 bp, Homo sapiens
aaatggtcgccccgtccatggcctcccgagtgattgatcgtgcgattcagtgttctaagaacggaagcatctgggctggatggaatttagcatcaagc

SEQ ID NO: 14762 - DNA, 132 bp, Homo sapiens
gcatgatcatgctgattatggctttccaagttgtgagggtaaattcaattggcggtcccgcagcccccggaagccaatagactccctcagggactctcggtccctcagctactcgcctgtggagcgtcgccg

SEQ ID NO: 14763 - DNA, 100 bp, Homo sapiens
gatctacctgacgggcctgcgagggttgaagattgtgaagcaatagcctaagatttgattaaggaagtactgagcatggatgacgaaattcagaaactag

SEQ ID NO: 14764 - DNA, 98 bp, Homo sapiens
agagagaaaattgagacggagctaagagatatctgcaatgatgtactgatgagtgatgtgtctgcaggaggagccactgtttttcctgaagttggagc

SEQ ID NO: 14765 - DNA, 96 bp, Homo sapiens
aggctgtcatataactcctgagaatagtggttcttaactctgaatggaagttggatacactttgtgacttgtacgagacactgaccattacacagg

SEQ ID NO: 14766 - DNA, 75 bp, Homo sapiens
ctcagcctcctcagtagctgagactacaggctgctctttggcgtaaattgcaatcgattagggatcgtttctcag

SEQ ID NO: 14767 - DNA, 83 bp, Homo sapiens
gccggcgcggctcatgggcagagtcggccgggcgggccgggctccccatcaacccgggcagccgggatttaaattcacggtgg

SEQ ID NO: 14768 - DNA, 50 bp, Homo sapiens
aagacacttttcagaaagacagggtgctggaaatgtaaacaagaatagac

SEQ ID NO: 14769 - DNA, 75 bp, Homo sapiens
cgcggacttcatcatccctgtggagattgatggggtggtccaccagatgtatcctccactcctcgctggccacca

SEQ ID NO: 14770 - DNA, 88 bp, Homo sapiens
aaaagattttgctgtcaaagttgtgtcagtgaatacaaacaggcctcatgcattgtgcgtcagcagcaatgtttatggtgaaaaatgg

SEQ ID NO: 14771 - DNA, 74 bp, Homo sapiens
tttgtgaagatcggccgcccgggctacaaagggagtgcatccgccccaacccttttccccctcgtctcctgtga

SEQ ID NO: 14772 - DNA, 83 bp, Homo sapiens
ccttcggagacaacaacctgctgggcaccttcatctggaataagtgcctccggagccagcgtggtggccatagacaacaagat

SEQ ID NO: 14773 - DNA, 100 bp, Homo sapiens
cccagcccctctccagctcgaaatcgtggtgatgatgtccagcaactctgtgaagcaggagaagaggagtttttggaaatcatggcactcgtgggcatgg

SEQ ID NO: 14774 - DNA, 75 bp, Homo sapiens
cctccctcagcttccgccccaaaagggctattgagtggccagacttccccaacaaatgccaaattggagaaactg

SEQ ID NO: 14775 - DNA, 100 bp, Homo sapiens
ttgtgctccggcctgcagttgtccagagaacaaacctctggtcctttagatctgttgccacctactgtgggaactttgacaagggaacagcctggacatg

SEQ ID NO: 14776 - DNA, 75 bp, Homo sapiens
ttcctgaggcctccccagccatgcagaactgatgggtttccagatttccaggattctgtgcaaacactcttccag

SEQ ID NO: 14777 - DNA, 90 bp, Homo sapiens
gtgataatgctttgtggtgtatggattcatctcactgactgaaacctgagttttgattcaccagagtgtgaacatggctacgcctcttca

SEQ ID NO: 14778 - DNA, 98 bp, Homo sapiens
gatgattcaactccagaaaaacactgccaacatcaggaatatttgtgttttggctcatgttgaccatgagtcatcctttttgaacttccatgactcag

SEQ ID NO: 14779 - DNA, 75 bp, Homo sapiens
tgccgatccgccgcccgtccacacccgccgccaggtagtaacactctggtacagatctccagaagtattgctggg

SEQ ID NO: 14780 - DNA, 75 bp, Homo sapiens
ataccttctatctttgattctccatatcacctacaggcaggaattgatggcgagaaggagcacgccaatgccaag

SEQ ID NO: 14781 - DNA, 83 bp, Homo sapiens
tttttcgccgtcatgggcgcctcggccgccatggtcttcagcggtgaaaccagcccagagaagttacgggatttgcccccggg

SEQ ID NO: 14782 - DNA, 100 bp, Homo sapiens
cctgggaggccggccggtgccagcacctttcggcttctgagacggcggcagcagcggcattcaggctagcgagggcccaaagtttgcattcctgtccttt

SEQ ID NO: 14783 - DNA, 50 bp, Homo sapiens
tccgcttcgaccttcccccacaagctgccccagagcacatcagctatgtg

SEQ ID NO: 14784 - DNA, 101 bp, Homo sapiens
cctccgctcgattggttctactgtgggtctggactgatctccatgtcctgttgtggggcttttacagcctttggtactatactggcaattgctggagaaga

SEQ ID NO: 14785 - DNA, 90 bp, Homo sapiens
gtttgcagttcagcagctcagaaaaagtgggaaggtcgctgctattatcagccaaatggccgatgacacagtggcagaactggacaggca

SEQ ID NO: 14786 - DNA, 51 bp, Homo sapiens
agcccattcaaacagaggcatgggaaactggagcacccatcctaactgatg

SEQ ID NO: 14787 - DNA, 51 bp, Homo sapiens
ggaacacctcgccaaagcagagaaatactagaaagacttgagttagacaag

SEQ ID NO: 14788 - DNA, 74 bp, Homo sapiens
ttaatcctcaatttaagcctgatctaacccctagaaacagcttcagacagcaaagtcctgacatgtgcagccgt

SEQ ID NO: 14789 - DNA, 101 bp, Homo sapiens
tggtttctttacagtaatttcaacagaagagtgagagatggaacccgaagaagaaaggattcgttacagccagagattgtggcatggcagagagaaatgct

SEQ ID NO: 14790 - DNA, 100 bp, Homo sapiens
caagtttggaaagctcttttaacgatttggagcaagaggtggtggtggccttcccccgaagaaatttggtaatcctggggagcgtttgcgtaaaaaaaag

SEQ ID NO: 14791 - DNA, 80 bp, Homo sapiens
ccgtaaaatggtcccctcggctggacagctcgccctgttcgctctggggtttggaaatcccttgtctccaggttgctggg

SEQ ID NO: 14792 - DNA, 100 bp, Homo sapiens
cgccactttccggggtgcacagcaagtggcacttcaggtggcaagacagctccttcttcagcagcaacagcagcagcaagttagtggattaaaatctccc

SEQ ID NO: 14793 - DNA, 100 bp, Homo sapiens
atctggtgtaccaggcgaagctggccgagcaggctgagcgatacgacggttctgtcatatgttgaagaatccatacaccattaagaaacagcctctgcat

SEQ ID NO: 14794 - DNA, 101 bp, Homo sapiens
cgctggttcaccccgtggtcgaggagtcggagtgtgggctgctgctctcctctgagggcgagtgtcagggctgctacccgctggatgggcacatcttgtgc

SEQ ID NO: 14795 - DNA, 75 bp, Homo sapiens
ccccaggcctgcgtccgagtctccgccgctgcgggcccgctccgacgcggaagctggaagatctggaagttactg

SEQ ID NO: 14796 - DNA, 75 bp, Homo sapiens
aataattaaatattcttaccgagctctaagcgaaagacatgaggcctcagcctgaaatgaggttgttttgaggtc

SEQ ID NO: 14797 - DNA, 90 bp, Homo sapiens
tggggcgtgtgggagtccaggcttcacgcactctttgctgttcaattttaaggaagaaatctctaaacgttttaaatcacatactgacca

SEQ ID NO: 14798 - DNA, 96 bp, Homo sapiens
cctgaagatttgcctgccctcagtggttaacttttttgctgcaatcacaaaatatagccagtaccaacgtatgctgagcacgctgtctcaatgtga

SEQ ID NO: 14799 - DNA, 100 bp, Homo sapiens
cacaaagccggctacgcgctgcgagatggcagatgatcagggctgtattgaagagcagggggttgaggattcagcaaatgaagattcagtggatgctaag

SEQ ID NO: 14800 - DNA, 88 bp, Homo sapiens
ggaggacggagccaggcggcagcacttttaggtgaaaggtgtagcagtcactcggcctacacccacagcatcgaccttgtgaacccag

SEQ ID NO: 14801 - DNA, 100 bp, Homo sapiens
caagtcattacacaccacatgcagcgatatgcagtttggtttggaggatcaatgctggcttccacggttcattttccagacactgaaagagcagaatggc

SEQ ID NO: 14802 - DNA, 122 bp, Homo sapiens
gcgagggaggacccgacgcgcggcgtttacccagcgcagcgttccaccgctcgggtttggctggggtgataaaagaaaatgtggctgaagttacccgaagttcagcttgcagtgtaattcag

SEQ ID NO: 14803 - DNA, 90 bp, Homo sapiens
cgaacaagtgggacacaggcaagacgtcgagccatgaaccagagaatcagtcagagtgctccagtgaaacagccaccacccctggctccc

SEQ ID NO: 14804 - DNA, 75 bp, Homo sapiens
aagctaaaatgatgactaatttggttatggccaaggaccgcttacaacttctagatacgtttgaaatggtttctg

SEQ ID NO: 14805 - DNA, 73 bp, Homo sapiens
gaagaggcagtgaagactctgccaacaggtgtgatgttagctgttgatgctgtaattgctgaacttaaaaagc

SEQ ID NO: 14806 - DNA, 50 bp, Homo sapiens
gcttggaccagagctggaaatatgatgagatccgaaatggcccataccga

SEQ ID NO: 14807 - DNA, 75 bp, Homo sapiens
ccatcaggctcaacgaggaactcaaagtggatgaggaaaaagcccagtgcaaaccttactactccgactactccc

SEQ ID NO: 14808 - DNA, 82 bp, Homo sapiens
ctcttcagggatgagtcatgtggcagtggaaaatgcgctcgggctggaccagcaggggtcgggccccggctcagtggtccca

SEQ ID NO: 14809 - DNA, 50 bp, Homo sapiens
agacgcactgctacaaggtccatgaccagctttcattgttgaggttcctc

SEQ ID NO: 14810 - DNA, 98 bp, Homo sapiens
tgccctcccggctcccgtcctgcggcggcggggcgtgcagggccgttgctccagggagaactgcaaatatcttcatccacccccacatttaaaaacgc

SEQ ID NO: 14811 - DNA, 101 bp, Homo sapiens
cgcatcatcggtgccaaggaccacgcatccatccagatgaacgtggccgagggattgacagctggattaacttgagccgagtggacccagatgcagaagtg

SEQ ID NO: 14812 - DNA, 100 bp, Homo sapiens
gtactgggggattcgcagggaggatgtcgggacaccccggaagctgggaaatgagtccctgtgaagcaggaagagtgagggcaggttcactgcagctcag

SEQ ID NO: 14813 - DNA, 90 bp, Homo sapiens
agcctcagactccaggcttgaggtgcactttacaggtccccgatgaaccaagagaaccctccaccatatccaggccctggtccaacggcc

SEQ ID NO: 14814 - DNA, 90 bp, Homo sapiens
cccacatcctcccctgagtccggagctaccaaaaccatcctcctgggtggttatgctgcataccgctacgcccagcctacccctgccact

SEQ ID NO: 14815 - DNA, 100 bp, Homo sapiens
tttggacatgcacaccaaaccctgggttagagcaaggctactgggaacgttatttggaaacattcctgtggaaaaccactcttctcttccccacaatgtt

SEQ ID NO: 14816 - DNA, 86 bp, Homo sapiens
ccagcccgtgccgcgagcgcggcctgcaggagggaaatcctcattgacgattcaatttgttgaaggccaatttgtggactcctacg

SEQ ID NO: 14817 - DNA, 74 bp, Homo sapiens
gagaacggaaaactcccaacttcctggagaggagtcactcacaatttttgtggacaagcggaagttgagcaaac

SEQ ID NO: 14818 - DNA, 82 bp, Homo sapiens
caccggtggcgaggagctctacttgctctgcgacaaggtgcagaaagatgttgacgatgagtatgaggacgaggaccagtgg

SEQ ID NO: 14819 - DNA, 75 bp, Homo sapiens
ctcagcctcctgagtagcaattacagagaatgctctcatcactcagtcaaggctaatgcttttggaatcagtgtt

SEQ ID NO: 14820 - DNA, 101 bp, Homo sapiens
aattccgcgggcggtgtagaggcggcggacgggccggagggaggatgttaaagccccgcgaaatatggctacacacacctttctgcaggagagctgcttcg

SEQ ID NO: 14821 - DNA, 82 bp, Homo sapiens
gaggaggggagaggcctggaggacaccaacatgtgctgggattacaagcgtgagctaccacacccagcgaggaagccaagtt

SEQ ID NO: 14822 - DNA, 49 bp, Homo sapiens
tgcagcccgaggacaagcggctgtgtaccaacagtaccgttattgccac

SEQ ID NO: 14823 - DNA, 90 bp, Homo sapiens
ccttcgaagctttgaccaagcttccagcggttattactgtcctcctgcacttgtaaccattacaaacagatatgggaaaatagtctccac

SEQ ID NO: 14824 - DNA, 88 bp, Homo sapiens
tatatcaagtgtgtgacatccctcagccccagggctcgatcattaacccagtttcacatccatcatgcaagaaagcataagggtaaat

SEQ ID NO: 14825 - DNA, 51 bp, Homo sapiens
cctcgtctcactggagagtccgttcaggttacagcacggtcaccttcgacg

SEQ ID NO: 14826 - DNA, 75 bp, Homo sapiens
gcatgtgttaccaagctgtttcctaccaggtcacacactgttgcagcgcaggtcctgaggcacgtgaatggccag

SEQ ID NO: 14827 - DNA, 97 bp, Homo sapiens
cttcaccgtggacgtggagaacaacatctactgcgtgcgagactatcacactgtcaacctaagaaaaagtctacgccactgaagtatgaagttggag

SEQ ID NO: 14828 - DNA, 101 bp, Homo sapiens
agctagtgagcacaatgaaggcaagtgggactttgccttctcagcccaaagtcagcaaggaagaggcccagcagaagggactcgctgagccaccccccgcc

SEQ ID NO: 14829 - DNA, 121 bp, Homo sapiens
gcggaagtgtttcctgggtgagcgcggcagcgggacccgtttccggaaggctgattgcatcaggtttggcagttctctaccagtggaccaatcttttcatccccgtgtacctcaccatcag

SEQ ID NO: 14830 - DNA, 49 bp, Homo sapiens
gattggcaacggaagaacaggagaactgtaagagtaaatgggtccagta

SEQ ID NO: 14831 - DNA, 88 bp, Homo sapiens
ctgacagcagccatcgaggcgagccagagcctgcagtcccacacggcaaaagaaggggaacgtggcccagaaacactgggttggacct

SEQ ID NO: 14832 - DNA, 83 bp, Homo sapiens
cctgctcctgctcatggacgacaggagcaggagcggcttcgcttggagcaggagcgagagcaggaacagaagaaggccaatag

SEQ ID NO: 14833 - DNA, 144 bp, Homo sapiens
gtcaactattacaatcgcttgtacaaaggagagtttaaacagccaaaacagttcattcatattcagccgcgttccttcacctcgggcagaataactttgcagaagcccacaggttcttcacagagatcttaaggatggatccaa

SEQ ID NO: 14834 - DNA, 82 bp, Homo sapiens
tgatccagaagtccagagctgaggactgcctgtttgcagatgcatcactgtaagcgataccgctcccctgaaccagacccgt

SEQ ID NO: 14835 - DNA, 100 bp, Homo sapiens
agcatgtcagcttcgtatctctcaagtattgaagcccctgggtgataatttgatggaggaaaacataaggcagtctgtaacaaactctatcaaagcaggc

SEQ ID NO: 14836 - DNA, 87 bp, Homo sapiens
actctgttaaagctggtctgttctaactgaggttcccgtgtcagtggctatgatgacacctcaagttatcactccccagcaaatgca

SEQ ID NO: 14837 - DNA, 96 bp, Homo sapiens
cttaaaaacaaaagattgagctgcactgtattcctggccgttgctccagggagaactgcaaatatcttcatccacccccacatttaaaaacgcagt

SEQ ID NO: 14838 - DNA, 96 bp, Homo sapiens
acctgcgctccgcgctctggcgctacggtctggccgtcggctgcggcgccatcgtggaagaagttgttccgaatgtaattgaaccttccttcggcc

SEQ ID NO: 14839 - DNA, 83 bp, Homo sapiens
gaagacactccccagggcagaaatagcgaccatggcgagaacatccagtcatggataaaaatgagctggttcagaaggccaaa

SEQ ID NO: 14840 - DNA, 75 bp, Homo sapiens
ggaccgggccgcggtccagaccaacatgagagacgcattgtgtcgggcagaagatgaagaggatatccgtgcagc

SEQ ID NO: 14841 - DNA, 110 bp, Homo sapiens
agcccgtggatctggcctacgcctctcgggcctctgtggcctcagagcgtctgggccacactgtctgggaagaggtcaaaatgcagatcttcgtgaaaacccttaccggc

SEQ ID NO: 14842 - DNA, 76 bp, Homo sapiens
ccaacctcatctaccccatctttgtcacaatgtgtgaatgacaactactggtttgggagggacaaaagctgtgaat

SEQ ID NO: 14843 - DNA, 82 bp, Homo sapiens
gtcgcgtgtctaggtgagtcgcggtgggtcctcgcttgcagttcagcgaccacggttgatgataattagaagcatgctttcc

SEQ ID NO: 14844 - DNA, 75 bp, Homo sapiens
agctctcactgtggtggacgttcggccaagggaccaaggtggaaatcaaactgtcacatttgaagacgagcactg

SEQ ID NO: 14845 - DNA, 71 bp, Homo sapiens
caggtgtatgatcttttggaggaggaggatgaatttgatagagagtcagcagataagcagagagccctaga

SEQ ID NO: 14846 - DNA, 75 bp, Homo sapiens
gtccggcagcctacccggctcactcagggacagagcgggatgccaccagcttgtccaaagggaagttccaggagc

SEQ ID NO: 14847 - DNA, 90 bp, Homo sapiens
acgccgccgccgccgcctccagggtgggcgcctttcgccgtggacgccgaccgtccgggacgagtttaataagcaatcattgacccagac

SEQ ID NO: 14848 - DNA, 100 bp, Homo sapiens
gcaaaggcaaacttggaaagagcaagatcggcagccctaaatatctggagtccatctttcaccatcttctcctgagattgtactggaccgtgaccactct

SEQ ID NO: 14849 - DNA, 100 bp, Homo sapiens
tccgggctctagacagcgacatgcagaccctggtctatgagaactacaacaagttcatctcagccacagggcatgaccctggattgtgtggagatttctc

SEQ ID NO: 14850 - DNA, 82 bp, Homo sapiens
ccagtttggtccacaaggcttgctgcccaatctttgccaacaggctggtctccaatttctggcctcaagtgatcctcctgcc

SEQ ID NO: 14851 - DNA, 83 bp, Homo sapiens
caaatccaaaagctgctctcaagtctaagatagttgctgaatttcgaggcccatggaggaagtggagcggcaggtcctcccag

SEQ ID NO: 14852 - DNA, 95 bp, Homo sapiens
cgagttctcacgtgcccatcagtgacagcaagtccattcagaagcctgtgtcctgactgggactcttgggacgccagcaagcccgttaccaatgc

SEQ ID NO: 14853 - DNA, 98 bp, Homo sapiens
ctcagaagacagagggttttcttttgaggccgactgcagcagtggcccagggcaaagagtgtgcgtcatcgatgagattgggaagatggagctcttca

SEQ ID NO: 14854 - DNA, 99 bp, Homo sapiens
cacagaacatcgcgacgacgttgcctaccgtcaagatgattgtggaggacccttgaacatctgtgaagaaatgactattctgcatggaggcttcttgct

SEQ ID NO: 14855 - DNA, 75 bp, Homo sapiens
gccatgtccgaggagaagcccaaggtgcgcgcggagccatggttatcatgtcggagttcagcgcggaccccgcgg

SEQ ID NO: 14856 - DNA, 75 bp, Homo sapiens
gaaaaagatacaacgaactagcacaacgagggggccatggcacctgcaaggtgtttctcagcaagattgaggacc

SEQ ID NO: 14857 - DNA, 100 bp, Homo sapiens
agctcaaaatgaggaaattctgtatgttcttcgccattatattcagacattgctacaagtggttggtgtggtctctgtggctgtggccgtgattccttgg

SEQ ID NO: 14858 - DNA, 75 bp, Homo sapiens
ctttttggaagtttgtggcggagtcaccctcatcgattcctacgagtcttctagcttcatgttcctggtgtttga

SEQ ID NO: 14859 - DNA, 75 bp, Homo sapiens
ggatcgatgtttcaatattggaagcgctttgatttacagcagctgcagagatcccgctgtgcgctggctgtgacc

SEQ ID NO: 14860 - DNA, 101 bp, Homo sapiens
ggacatctgctcctccaaggcagagcggctcccccctttcggaaaaggggaagatagtgatgtactcagtataaatgcagatgcttatgacagcgacatag

SEQ ID NO: 14861 - DNA, 80 bp, Homo sapiens
ggagaacttaatccacttacgttcagggttatcattcataggaacgaatgcaggaatttgggaactgagctgtgcaagtg

SEQ ID NO: 14862 - DNA, 100 bp, Homo sapiens
atctgcgccccctgctggttgtgcgaaccccgggcagcccgggaaatctccaagtcagaaagggtgtgtccgcagccggccaggtggtatccctgaaggt

SEQ ID NO: 14863 - DNA, 82 bp, Homo sapiens
tggaggagtaccgcatcgcccagctgtacatgatacagatgatagaagatgttttgggagaagggtcagtctctgccagtcg

SEQ ID NO: 14864 - DNA, 85 bp, Homo sapiens
accgtgatgggagctgcagcacagtcgggggtgtaggttatgggggttcagtaagaagaaggacagcatagatccttacatatac

SEQ ID NO: 14865 - DNA, 71 bp, Homo sapiens
ctggagaacctggcacttatgtcctccctggggtctaggtgctggagtgcgcacggaggccgatgtagagg

SEQ ID NO: 14866 - DNA, 100 bp, Homo sapiens
gttcaggacctcatcaagatgatctttgatgtggaaagtatgaagaaagccatggtggagtatgagtgccaggtggagctcaacaggaaagtcctagcgg

SEQ ID NO: 14867 - DNA, 113 bp, Homo sapiens
caccagtcagccatcgtgctgggggacctgaagcttaggaagttcgtcttctccacggaggagagacaatgcagatcttcgtgaagactctgactggtaagaccatcaccctc

SEQ ID NO: 14868 - DNA, 98 bp, Homo sapiens
ccgaacgccccatgaagttcctccgggagcacttcgagaagctggagaaggcatttccggagagttcttttgaagtcacttcagaaggatctacatga

SEQ ID NO: 14869 - DNA, 75 bp, Homo sapiens
caggctgaaggtttagcgggtgccggtgggtttggaggatttgggacaacatctacaactgcaggttctgcattc

SEQ ID NO: 14870 - DNA, 90 bp, Homo sapiens
cgattcttaccactcagaatggagagcacaatgcccttgaagatctggtgatgaggtttaatgaggcctgcgtgttggatgaacttgaca

SEQ ID NO: 14871 - DNA, 98 bp, Homo sapiens
gctacccgagcggcggcggcggcagcagcggcagcggcaagcaccccgtgctatcaagactaatcaggaccttctcccagaaactccatggacgcaca

SEQ ID NO: 14872 - DNA, 83 bp, Homo sapiens
ttgacgccatgtcgggttattcgagtgaccgagaccgcggccgggaccgaggtgtttcctgaggttataggcgggtgtttgag

SEQ ID NO: 14873 - DNA, 100 bp, Homo sapiens
gatggatcctaaactcttggcttcaggttctgatgatgcaaaaggaccccaaattacgtgaacttttggatgtggggaacatcgggcgcctggagcagcg

SEQ ID NO: 14874 - DNA, 100 bp, Homo sapiens
cgaaaatgggaaaccacagtactctaagctctcaagaggcagaatttatataataatcctttcaactctatgagttacaccagtccttacagtccaaatg

SEQ ID NO: 14875 - DNA, 75 bp, Homo sapiens
cctcaacccagaggaatcgttactctttcagatgatgaataaggtatttggaggtactgtgcacaaaaaaagtgt

SEQ ID NO: 14876 - DNA, 98 bp, Homo sapiens
gtctgcaccttcagaaacagtgctgaagcctttaaatgcagcatctgcgatgtgaggaaaggcacctccaccaggcctaaagatattggaagacctaa

SEQ ID NO: 14877 - DNA, 75 bp, Homo sapiens
cagggggtcggctgccaggtacaggttgccgaggagcccaagtagaagaaatatggagtttagagcctgagaatt

SEQ ID NO: 14878 - DNA, 74 bp, Homo sapiens
ggcctaccaggaggccaggggtgtcgccatgaaacgggtatgcaggagattagaagccagtgggcatgagcgtg

SEQ ID NO: 14879 - DNA, 100 bp, Homo sapiens
tgcgagcgcggccgcggccccggccgctctgggcgactgtgctggcgctgggggcgctggcgggcgttggcgtaggaggccgagacgcatccagagcttt

SEQ ID NO: 14880 - DNA, 83 bp, Homo sapiens
cagcaagaaggctctaccagatgtgtccccttgaccttggggtccccagcctccagaactgtcaaaacttcacagctcatgat

SEQ ID NO: 14881 - DNA, 100 bp, Homo sapiens
catctcctctcacggatgcctcggctgcctgctgtttcccggggagatcatgaaacgaggtcgccttcccagcagcagtgaggattctgacgacaatggc

SEQ ID NO: 14882 - DNA, 100 bp, Homo sapiens
gcctgcgccggcggcagagaggatatcttgggcgggggatgtgagcgctgagcccttggcagatgagcagcagctgctcagggctgagcagggtcctggt

SEQ ID NO: 14883 - DNA, 112 bp, Homo sapiens
gccaggtttgactctgcagggcgtacgcgctttagggatggaaggaagaggaacgcggcaggaaggacacagcattgttggttttgccatgtactattttacctatgacccg

SEQ ID NO: 14884 - DNA, 73 bp, Homo sapiens
gccaatgagtttttgaacctccttttccagcaagatggaaagttgccttttgttcctccggaggaagaattta

SEQ ID NO: 14885 - DNA, 75 bp, Homo sapiens
ggaaggcgcgagtgaggaaaggaggtactgtagttttccaagagataacttcaccaagatgtccagtgataggca

SEQ ID NO: 14886 - DNA, 97 bp, Homo sapiens
accttccttctgacaagtcccagggtgatttcacctggaacagcatgtcaggccgcagtgtacggctgaggtcagtccccatccagagtctctcaga

SEQ ID NO: 14887 - DNA, 124 bp, Homo sapiens
ccggggccgccatggagcccgactcggtgattgaggacaagaccatcgagctcatgccctggcctcccacgactacatcctgaagattgtgcccacggtttatgaggacaagagtggcaagcag

SEQ ID NO: 14888 - DNA, 83 bp, Homo sapiens
ccgcagcctcccggggccctacggccgcccgccaccaggcagcctggcatcctcgctacaacctcattgttgtgggccgatac

SEQ ID NO: 14889 - DNA, 74 bp, Homo sapiens
agctacagccaattttgctaactttgcacatttcaacagtcatgcaggaggtagaaaagtatagagctgtatat

SEQ ID NO: 14890 - DNA, 96 bp, Homo sapiens
cttccttctgggggtcctgggggccctcactgagatgtgtgttgagcctgttgatgcccgccctgctgccgaccgaggactgaccactcgaccagg

SEQ ID NO: 14891 - DNA, 100 bp, Homo sapiens
gtcaatgtctatggtgttgtgaagttctttaagcccccatatctaagcaaaggaactgagttacactgttagaccttatgatagccaagataacgagtga

SEQ ID NO: 14892 - DNA, 75 bp, Homo sapiens
ctgaaacagaacaggtgaatggattattctaaacaggttggagaaggaaattgaggtgctggagcgtggagactc

SEQ ID NO: 14893 - DNA, 50 bp, Homo sapiens
acggggaaagcggaaggaatgtcgcgtgagacaaggtctcaccatgttgc

SEQ ID NO: 14894 - DNA, 75 bp, Homo sapiens
agtgccaagttagatgccgattacccacttcgagtcctttattgtggagtttttggctttcacccccaaccagtg

SEQ ID NO: 14895 - DNA, 101 bp, Homo sapiens
ttgtgtggactgtgagacttaccatacggccgcctctacccttggcagccaagggaatttaccagctgaagaaagcctgccggcgagagctacaaactgag

SEQ ID NO: 14896 - DNA, 80 bp, Homo sapiens
cacctgcgctgtgatgcctgcagagctgtggcttaccagccccacaggagacaggatccgaagcaaagttgagctgactc

SEQ ID NO: 14897 - DNA, 101 bp, Homo sapiens
cttccctttgtaaattgagctctgcacgctggggagtttgttgggatcagacctattgtgaccgcctggtgcaggacacgcctttcctgacaggccatggg

SEQ ID NO: 14898 - DNA, 82 bp, Homo sapiens
gggaaccatggggactgtgcacgcccggaggagaacgaggagcgcacgatgattgaccccacttccaaggaagaccccaagt

SEQ ID NO: 14899 - DNA, 100 bp, Homo sapiens
gaaatagggggcacggcagacgcggtcctggatatacttcaggcaagaactcccctggagcaggaaattttcaacctcctccataagaacaagcagccag

SEQ ID NO: 14900 - DNA, 97 bp, Homo sapiens
gcaatctggtcaaaaaaagtcctataccctgcgggtcagggagcatccagagatggggccctatgtacaagatgcagatggaaacctgtgtcgaagt

SEQ ID NO: 14901 - DNA, 98 bp, Homo sapiens
caacaagtgaaattgaggtcacaccttcagtccttcgagcaagggccctggcctccagtctgagtgctgacctcgaagagcccctgagtgaggaggag

SEQ ID NO: 14902 - DNA, 100 bp, Homo sapiens
ggagctgcagtcggcactgctactgcgaagacagctggcagatggactcaccctgtcacccaggttggactgcactggcctcaacctcctgagttcaagt

SEQ ID NO: 14903 - DNA, 87 bp, Homo sapiens
tgccatggtcaagttctacaatgttcgtggggagcacatcttcacactggacactctcgtgcaggttctcatcccaggccttgtgga

SEQ ID NO: 14904 - DNA, 75 bp, Homo sapiens
cagatgagaaggttcagttggcaaaccagatatatgacttgttggttgaatctggcgatgtggaacccatggata

SEQ ID NO: 14905 - DNA, 98 bp, Homo sapiens
atggaggaggaccctgaaaaatacgaggaacttcttcagtgccggatggagtgctgtgatgtgccagccgagacactctacgacgtcctacacgacat

SEQ ID NO: 14906 - DNA, 74 bp, Homo sapiens
tctctgctgcggcgcggggaccgctgtgctctcgcaaaccgtggggaactgtgggtcagagactctccagcatc

SEQ ID NO: 14907 - DNA, 82 bp, Homo sapiens
gttcgccaagatgaagggctacccacactggccggcccggtgtggacgaatgtggaacctcgctctgtggctgtgttccctt

SEQ ID NO: 14908 - DNA, 75 bp, Homo sapiens
agatgttggatatttgcttggaaaaacgtgtgggtacgaccttgatgtggacgagtgctcactagcagaaaaaac

SEQ ID NO: 14909 - DNA, 100 bp, Homo sapiens
gatttgaagcactacaaacaagcagctgagcgcagaatccgcatttgctgtgatgagttgaatctcttagtgccgttctgcaatgccgagactgacaagg

SEQ ID NO: 14910 - DNA, 75 bp, Homo sapiens
gcctgcgaaggtggcggcgctgctgctcgggctgctcttggaggttatcttgacgaatcagattacaacccatct

SEQ ID NO: 14911 - DNA, 82 bp, Homo sapiens
tccgggcacacccggctccccggacgcctcgaataccctctaccatctgctttggtcagggtgccgctcgaggatttaaaag

SEQ ID NO: 14912 - DNA, 73 bp, Homo sapiens
cgaggcctttgccgctgacatcccccgcatcctggtggccgggagggcatcctggctgtttcacccgtggact

SEQ ID NO: 14913 - DNA, 82 bp, Homo sapiens
tcggtcccgcgctgcgcatccccgcggacgccacagcgcttcctcctccgcctcctcctctctgcatgcgcgtcagagcccg

SEQ ID NO: 14914 - DNA, 75 bp, Homo sapiens
cgcggcgcgcgaggacccgagccaggcggggacaggacggcggggcgagccagtgttctcaggcgctgtggtctc

SEQ ID NO: 14915 - DNA, 74 bp, Homo sapiens
agtggtctgatgatgagaacacagccacgcttacgggaaaaaccttcagcatatggaaactgaatgatcttcgt

SEQ ID NO: 14916 - DNA, 51 bp, Homo sapiens
ctttaaaacagtattacttgcgaaaagtcctccatacattttctccccaat

SEQ ID NO: 14917 - DNA, 101 bp, Homo sapiens
ggcgaggagaaccaactggtcccgaaagagcaaagaagtttgtcatcctgatattggtggcaagatcataatgtgtcctcagtgtgataggctttgtccat

SEQ ID NO: 14918 - DNA, 75 bp, Homo sapiens
tggacaggatggtctgctttttaaagtgactctgggcttaattagaaacaggagtcctggcaaaataagcatgca

SEQ ID NO: 14919 - DNA, 101 bp, Homo sapiens
ggcgagctgggtggtctggagaccatggagaccctcacggagctgggcgacgagctgaccctgggagacatcgacggatctctctaggagctgacactcga

SEQ ID NO: 14920 - DNA, 75 bp, Homo sapiens
gaaaaatgtccttaaagcaattgagcaggctgatctactgcaggaggcatttgatgaagcaattgctgaattgga

SEQ ID NO: 14921 - DNA, 50 bp, Homo sapiens
ctggactggcagccctgcagggtcagggagtctccggtggactgcagcgt

SEQ ID NO: 14922 - DNA, 101 bp, Homo sapiens
atttccgtgagggtggaagaaaatcataccatatcagatgcctcgcagagcaccaggcccaccgtgaaaggattatagctgagaaggtaaaggacgttctg

SEQ ID NO: 14923 - DNA, 98 bp, Homo sapiens
ctttttatggtgtttaatctaatacacttaagctgcagtcccaaaattagggattcaactttcacgtatcaaaccaccctgggtggttaaaggtcagc

SEQ ID NO: 14924 - DNA, 100 bp, Homo sapiens
gtctgaaaggcactttattatgcaggtggtctgtgaagccacacagtgtccagatacgaggttaagtgggcagaccaacatccacctcagcaaaaacttc

SEQ ID NO: 14925 - DNA, 100 bp, Homo sapiens
tgcaaaaacgaaagcaactggagctcaggcatgttatttgaaagcaattgagacgcaaccgaactttgcagtagcttggagtaatcttggctgtgttttc

SEQ ID NO: 14926 - DNA, 100 bp, Homo sapiens
gaagcacgtcaaactgctctttgagatcgcttcagctcgcatcgaggagagaaaagtctctaagtttgtgatggcagtcttgggcacgtccatctgtaaa

SEQ ID NO: 14927 - DNA, 83 bp, Homo sapiens
catcctcatgacatcatcgatgacatcaacagtggtgctgtggaatgcccagccatgcttttactgactctgctatcagtgct

SEQ ID NO: 14928 - DNA, 50 bp, Homo sapiens
gtccggccatggacgacctcggggagtctctcaggaaaaagaagcccaga

SEQ ID NO: 14929 - DNA, 98 bp, Homo sapiens
ggagttcctcctggggaacccgttcagcacaccagtggggcagtgcctcgatgccatggacaatattaccaggcagaaccaattctacgatacccaag

SEQ ID NO: 14930 - DNA, 75 bp, Homo sapiens
atgggacttccccgcgtgacagcacagagataacggccagccctgggcgaaggacatgggcaagttttgcctcac

SEQ ID NO: 14931 - DNA, 100 bp, Homo sapiens
gcgattcctgtctaagaaaaggaggatttattggagctggagtgagccttccaggaattttggctgccaaatgtggtgcagaagtaatactgtcagacag

SEQ ID NO: 14932 - DNA, 76 bp, Homo sapiens
taaagtgaaatcagacccacaacgaatgaatgaacagccacgtcagttccagtctcatcagattttccatgtcctg

SEQ ID NO: 14933 - DNA, 100 bp, Homo sapiens
caccaagtctgtggtctcaaccccggtagacctggaggtgaagctgcggatcgcccaaggttgttcctcaaagtcattcaagctgtactcgccgaaggag

SEQ ID NO: 14934 - DNA, 100 bp, Homo sapiens
ccaacaagatgctagagcatcgagaagttcgtgatagacaccacagtcttgggacgtgtcctcggagtcggacaataacatcagacagatcaaccaggag

SEQ ID NO: 14935 - DNA, 75 bp, Homo sapiens
catcccctatctccccgggcggctagagaccgttggatggcagcttaaccttcagatggctcactctgctcaagc

SEQ ID NO: 14936 - DNA, 101 bp, Homo sapiens
cagcctggcagggcacagtttctagagggcccgtccccagcccgggccgtccatcctcgcattgctgttgaatggtcctgttttgctgcgttcctactgtc

SEQ ID NO: 14937 - DNA, 49 bp, Homo sapiens
ggataccctgaagtcgggaaatggcgtcacaatgtagcagggaccccag

SEQ ID NO: 14938 - DNA, 90 bp, Homo sapiens
agaagaccccggcgctggtgaacggatgctggtcgtttactatatattggccaaaatgagtggacacatgtaaattgtgctttgtggtca

SEQ ID NO: 14939 - DNA, 87 bp, Homo sapiens
tcactagttatgttcaaaaaaactacatgaggaaataattgacttttataacttcatgtccccttgtcctgaagaagcagctatgag

SEQ ID NO: 14940 - DNA, 97 bp, Homo sapiens
tctacctaccaatcgtgaaaactatattcacagatgtggaagatgtcaagtttgtgatcaactatgactatccaaacagctcagaggattatgtgca

SEQ ID NO: 14941 - DNA, 50 bp, Homo sapiens
tgggcacccacggagcctccggggctggtttacccaaggtccagcctagc

SEQ ID NO: 14942 - DNA, 90 bp, Homo sapiens
ttgatggaaccagaacaccccgagatgagaggagaagagcccagcacaacgaagatgagttttgatcatcctgagaaaaatgggccttgg

SEQ ID NO: 14943 - DNA, 89 bp, Homo sapiens
aaggacacgcgaatttgaagatagagacaggtctcatcgggaggaaatggaggtatggcaggaggaaaatatcgttcgtttttaatcca

SEQ ID NO: 14944 - DNA, 51 bp, Homo sapiens
agccaccccagccagtggaaccaagttccttcctcagagatcacctatggg

SEQ ID NO: 14945 - DNA, 100 bp, Homo sapiens
ggaagaggaaagcaaaggagtcagggatggctcttcctcaggtgttggagcgggccggagagaagtagagtgggctgcgaggagaaggaaacaggccttt

SEQ ID NO: 14946 - DNA, 75 bp, Homo sapiens
cgcattcagaatttgaccatcttggtgagaaacattaagacctactaccagcattccttcctagtagcttctgta

SEQ ID NO: 14947 - DNA, 82 bp, Homo sapiens
cttgtgggatgtgaaaactctgttactgaaggttcttgatagtccacaatgggtgaaccacagcaagtgagtgcacttccac

SEQ ID NO: 14948 - DNA, 101 bp, Homo sapiens
gatttaaaacaagaacgagaacaactagagcaaaaggtgaaacagctcagcaattccataagttcccgtggagtctccatctgagccctttcctagtccag

SEQ ID NO: 14949 - DNA, 51 bp, Homo sapiens
agaagtgcccgaggagagttaacagctctgctgtgtgcgtgcaccagctgc

SEQ ID NO: 14950 - DNA, 76 bp, Homo sapiens
ggctccgtcgtggaagcaggactgcgccgcgtcttcctcaagaacccttaggagaaatcttgagagtggacagcaa

SEQ ID NO: 14951 - DNA, 99 bp, Homo sapiens
caccacttagtaaactaatgaaagcctattgtgaacgacagttttcggctttgtgagaaaccttaccatcaaacacgatggccagcaacgttaccaaca

SEQ ID NO: 14952 - DNA, 83 bp, Homo sapiens
atctgcgaacacagtagtggaagatgtaaagcaatatttcgagcagtttggcaagagaaaagaaaccttgtttattccctgtg

SEQ ID NO: 14953 - DNA, 75 bp, Homo sapiens
tccgagctcgatccgctgctcgcacgggagccagctgggtggtgtgcaactgaggaacatggctcaagaaactaa

SEQ ID NO: 14954 - DNA, 127 bp, Homo sapiens
agaccggcacctctcgggctccgtcttgtaggacctcggcctggcttcgagggcttccatacaggatggtgccatgacaatggtgtgaactacaagattggagagaagtgggaccgtcagggagaaa

SEQ ID NO: 14955 - DNA, 75 bp, Homo sapiens
gctggtcttgaactcctaacctcagcctctgcctcggtgcaccctctcattgaccccctggcctcagggtctcac

SEQ ID NO: 14956 - DNA, 100 bp, Homo sapiens
aaccaatttgtggtgcacactgtacagttcctcaaccgcttttctacagtttgtgaggagtattggtaaaggttttcaaggtgtcatgaaaagatgggga

SEQ ID NO: 14957 - DNA, 97 bp, Homo sapiens
atcaagtccccagagaacacatttgtcttctgagctgctggcagttttgaggtgtcatggagaaactccagctgggcccagagattctgcagcggga

SEQ ID NO: 14958 - DNA, 100 bp, Homo sapiens
ctcctgagtagctaaggactacagaaaccgaccagagggcaaagtgttggagacagttggtgtgtttgaggtgccaaaacagaatggaaaatatgagacc

SEQ ID NO: 14959 - DNA, 50 bp, Homo sapiens
acagagacaacaccgagtatgagaaggactttctccctcgagggtcgggc

SEQ ID NO: 14960 - DNA, 98 bp, Homo sapiens
tcgatgccagcttcttcttgaaatgttatggatcgcagctttaaaaaggaattttctgaaattcctggtcatcaagtggatatactctacaaactttt

SEQ ID NO: 14961 - DNA, 75 bp, Homo sapiens
tctttggttataaattatgatctacctaccaatcgtgaaaactatattcacagacctgaaagatgtctgaaaatt

SEQ ID NO: 14962 - DNA, 75 bp, Homo sapiens
aaacaaaatacatgtcagttatcaagagactcaacagatgcagatgaaggcccacggatgacagtaaccagcccc

SEQ ID NO: 14963 - DNA, 75 bp, Homo sapiens
tccttatgacagacaggaatctgagggctctgacttacttgaggttttgcacactagggaccaagaagccctcgg

SEQ ID NO: 14964 - DNA, 83 bp, Homo sapiens
gtctcttacgtctgcggaagtgcagctgcctcagttcttagcgcaggtattaatctctggagaagacacatccacagttagca

SEQ ID NO: 14965 - DNA, 100 bp, Homo sapiens
aggagagttacctacaagagccttcatccaggagcatccacactgcaatgatataggaatgagatgcgtctgttactagagtggagagtctaccttcgtc

SEQ ID NO: 14966 - DNA, 100 bp, Homo sapiens
gcctgccttcacttgaaaactccaagtactgccgtttcaaccaggacccagaagcagaggatgccagcccccatcagattgcgggagctgatccggacca

SEQ ID NO: 14967 - DNA, 73 bp, Homo sapiens
tgaagatgaactccgagaacgaattgagaagttggagaagcggcaggccccagctttgagactgtggcagaat

SEQ ID NO: 14968 - DNA, 100 bp, Homo sapiens
caaatgcgattacatagagaagactttgaaatattaaaggtgattggtcgaggagcttttggggaggcttctctgcagaatgtcaaacaaagatcgacac

SEQ ID NO: 14969 - DNA, 90 bp, Homo sapiens
tcgaatcatggaatcccttgcatggctctcaattgtagaagattaaataggtaccaggagacatgaaagaatcatcttcaacatttctca

SEQ ID NO: 14970 - DNA, 115 bp, Homo sapiens
cgagaccgtgaccgagagcgtgaccgagagcgcgaatatcgtcatcgttagaagattcacaatttagaagaccgtttgaagaaatatgaaaagaatgtatatgcaacaactgtgg

SEQ ID NO: 14971 - DNA, 83 bp, Homo sapiens
gtgggtactgtcgcggaggcttgtcattctgacccggggattcctcacagcgtctggcaggaactgtggctgcaccatctgtc

SEQ ID NO: 14972 - DNA, 75 bp, Homo sapiens
atacatttgccgaagagcttcagaaatgagaaagatcagtctaaagaaaaggagaagaaagtgaaaaaaacaatt

SEQ ID NO: 14973 - DNA, 100 bp, Homo sapiens
aactatggcaacatcaggtgactgtcccagaagtgaatcgcaggcaatcctttatcacaggatattctcaacttataccaggacccagatggaacccgaa

SEQ ID NO: 14974 - DNA, 76 bp, Homo sapiens
ttctccccgcgggagcccccagcatggtctgcgctcctcagaccaccggcaggtgaacagcctgatgcagaccgag

SEQ ID NO: 14975 - DNA, 74 bp, Homo sapiens
gaaaacacaggagccggagcagaagcaaagagatggcgggtgaaaaagttgagaagccagatactaaagagaag

SEQ ID NO: 14976 - DNA, 97 bp, Homo sapiens
caatcttggacctaccacttgaaaccattagtgagctgattgttcagattccattctgtggggaaattgactgtgaggactggatcaaaaagaccac

SEQ ID NO: 14977 - DNA, 82 bp, Homo sapiens
atttggatgtgggatccggttccttggtgtcatccagccttagcaaaccagagtttcgccgtgaggaagatgcggaaaaggc

SEQ ID NO: 14978 - DNA, 100 bp, Homo sapiens
cttgctgcgcaacaggaacttctgggtcctgcggctgcccccgggcagcaagggggaggcccccaagattaaaaggagcccaagccccatctcatcctag

SEQ ID NO: 14979 - DNA, 74 bp, Homo sapiens
tttgacaatacaggaaatgtttccagagactgctgctactttgaaacgtacgatagaggccctgatggacagag

SEQ ID NO: 14980 - DNA, 75 bp, Homo sapiens
cgctggtgactgaaaacattcagtggcccaatggcatcaccctagatattgatgatgttaagaagttcaaaccgg

SEQ ID NO: 14981 - DNA, 76 bp, Homo sapiens
cgagggttcccgggattggaccgacgcagccatgaacaggacgcaggccttgatgccctttcctctatcataagtc

SEQ ID NO: 14982 - DNA, 98 bp, Homo sapiens
tgcgagggagcgatgcggtgcagcgcggctctgtgtgctccgggatggagcaggtgtgcagagggtgagaacccagctctgggaccaagtcacttgct

SEQ ID NO: 14983 - DNA, 46 bp, Homo sapiens
gcctctcaagtagctgggactacagagtttcactcatgttgcccag

SEQ ID NO: 14984 - DNA, 98 bp, Homo sapiens
accatgcttgccaacctcttctccatgaggtcattcataaagggctggctgggctccagctggcctccgcatcaatatttcatcggcgtcaataggag

SEQ ID NO: 14985 - DNA, 98 bp, Homo sapiens
gccttgctgctgctcaaagctgctgccgccccttgggctaaaaggtggctattatcatggaaaactaatttttcccagagaatttcctttcaaacctc

SEQ ID NO: 14986 - DNA, 100 bp, Homo sapiens
gaattgtaatggaaagcatatggacaggtctacgccacatcacttagcatccataccccagtttaccaattcccccacaatggtgatcatggtgggttta

SEQ ID NO: 14987 - DNA, 49 bp, Homo sapiens
cgcacacctggcagcaaaagagaaaaaggagaagcgggctctagggaac

SEQ ID NO: 14988 - DNA, 98 bp, Homo sapiens
atgaaatgagtctggaaaactgggccaaagcagtgaaacgctccatgaattgagactaagaaagcactgtgcatcaccttgaccctggggaccttcct

SEQ ID NO: 14989 - DNA, 75 bp, Homo sapiens
cccagttccaaagtgtcttaaagggtggcttgatgatattggcttaccccagtacaaagaccagtttcatgaatc

SEQ ID NO: 14990 - DNA, 109 bp, Homo sapiens
ccgggatttgggtcgcagttcttgtttgtggatcgctgtgatcgtcacttgatgaaggtcaccgtgtccaaagggggcgaccgggacagtgacgacgacagcgtcctcg

SEQ ID NO: 14991 - DNA, 100 bp, Homo sapiens
aaaacactcgctccatctgtctccttgagcaaaaaagaaaagttgtttcctccaacattgatgttcctccagcaagcggttatgtctttgactatgatta

SEQ ID NO: 14992 - DNA, 98 bp, Homo sapiens
acgccagaggaaatttggccagttatccaattgatgaactagtagatagagccaaacaatcttttcaaggagaggcagatgcgaaccagaacaatggg

SEQ ID NO: 14993 - DNA, 80 bp, Homo sapiens
ccacatgaaaatggatgttgcctgcaaggctttatcctgtggataaacgcagagtgaacgagtttggggagtcctacgag

SEQ ID NO: 14994 - DNA, 103 bp, Homo sapiens
cccatgctgaagcagagcaatggaagcattgttgtcgtctcctctctggctgatgcctgtgaggagccaccaacatttgaagctatggagctcattggtaaac

SEQ ID NO: 14995 - DNA, 90 bp, Homo sapiens
cgacactaccagctatccttaatactttgttgacactgcaagaggatcttcaagatgaagttcaaagggagaatactaatctgcaaaaac

SEQ ID NO: 14996 - DNA, 80 bp, Homo sapiens
tttccttgcccggggccgcgggaaggccgaccgactgccgcgactgattcttgctattccaaatcctcttccacgttgac

SEQ ID NO: 14997 - DNA, 90 bp, Homo sapiens
gagccaggacccccagggagtagagacgaccgactggaggtggaagggggagaatgtggccacaaccgaggtggcagaggtcttcgaggc

SEQ ID NO: 14998 - DNA, 100 bp, Homo sapiens
aagccacagagagaaccaccagcattgccaccaccaccaccaccaccacagagtctgtggaagaggtggttcgagctggtcacctgacttttgaatgccg

SEQ ID NO: 14999 - DNA, 149 bp, Homo sapiens
gctttcctttccaagaggaatcctcggcagataaactggactgtcctctacagaaggaagcacaaaaagggacagtcggccacggcagagacaacgtgtgtaccccaagtgcacatggctgaccacccctaaaagcacctggccccgct

SEQ ID NO: 15000 - DNA, 83 bp, Homo sapiens
tgcctggatctcagcaatggggataccattctggaagacttgcccatccaatctgaaaaatggagtgctggcatacattggga

SEQ ID NO: 15001 - DNA, 75 bp, Homo sapiens
cgaacattccttttaacctatgtcttacaaaggcccaagacccctcgtccagtcattgtggaacccatggagcag

SEQ ID NO: 15002 - DNA, 100 bp, Homo sapiens
ttcacatccttgtctgtgaagctaaactcaatgctgctgtgtgggaagaagatttgtaaagaaaactcttaggtgagcgagtgctgtgctttcatgggcc

SEQ ID NO: 15003 - DNA, 75 bp, Homo sapiens
gccgtgttccgtgtctctggattcaagtcccaggagtcctgaccagagagcagatggaggagatgtataagaaag

SEQ ID NO: 15004 - DNA, 83 bp, Homo sapiens
gctcgccttgtatctcaacaccctgagtgcggatttctgctatgatgacaggtaagaatgattgatgttggctgatattggag

SEQ ID NO: 15005 - DNA, 98 bp, Homo sapiens
tgcgttgctcttgcttttcctcgctggggtgtacgctcactccatcactcgatgagataatatgagatttctacttcggagaggccaagtctaatgaa

SEQ ID NO: 15006 - DNA, 100 bp, Homo sapiens
gcggggcgcgctgcccggccggcggggatgcgggaccggctgccagacctgacggcgacaatgcagatcttcgtgaagactctgactggtaagaccatca

SEQ ID NO: 15007 - DNA, 75 bp, Homo sapiens
attgcacgacagactgcacagggcatggagtctgcgcggggcggccattggcggcggagtgtcacgtgaccgcgg

SEQ ID NO: 15008 - DNA, 75 bp, Homo sapiens
gagactcatacgcaacctcaatggattttttatcaagcagaaatgcatcgaacaacgagaatcaagatcactgag

SEQ ID NO: 15009 - DNA, 100 bp, Homo sapiens
aacaatgagatcgtggacaagatcatgggcaaaggacagatccagtaacaaatgtggcaattattttggatctatcacctgtcatcataactggcttctg

SEQ ID NO: 15010 - DNA, 75 bp, Homo sapiens
caacactgtcctgaacaaaagctccaactgggggtttgatacaaccaagtcggatgggcagtttaagaagacagc

SEQ ID NO: 15011 - DNA, 97 bp, Homo sapiens
gagattggcttcgggctgagctagcagtgagcaccttttggcccaatgaatatcaggattgctgtcacgtctaatgtggctgctgcctcgtgtcaca

SEQ ID NO: 15012 - DNA, 100 bp, Homo sapiens
gccggcttcagcagcccgcgcccgggcagctctcctgccacagctcctcaccccctgaaaatgttcgcctgctccaagtttgtctccactccctccttgg

SEQ ID NO: 15013 - DNA, 90 bp, Homo sapiens
aaatgctgcgtatagtggaaccttatgtgacctggggtgtgtaaatatgttgctgtggagctgaagtcagcctttgaggaaaccggcaag

SEQ ID NO: 15014 - DNA, 74 bp, Homo sapiens
gaagagataggtcagctcaaacagttaatggagctgcttggtgatccagctatttttcctgccgtaattgtgga

SEQ ID NO: 15015 - DNA, 74 bp, Homo sapiens
ggaggccttccagctgtttgaccgaacagactgtcactgcgacacccaggctggagtgcaatggcgtgatctcg

SEQ ID NO: 15016 - DNA, 83 bp, Homo sapiens
ctcagctttaccatccctggaggagacctggcagcaggtcatgcatttagaagattttaatgaaggtgcttcattttcaaatt

SEQ ID NO: 15017 - DNA, 75 bp, Homo sapiens
gatttggcacatatggggcggtcaagagaagaccccgctgggatgggtgccaatgttaacagggctacagccaat

SEQ ID NO: 15018 - DNA, 100 bp, Homo sapiens
ctagaaaagttaagtcttcggaatcaaagaaccctcggcctcaggaaagtcggacagtattcagtggctcagtcagtattccatctatcaccaaatcccg

SEQ ID NO: 15019 - DNA, 50 bp, Homo sapiens
aggagattagacgtagcagattagatccaggatgagaagactgataaaag

SEQ ID NO: 15020 - DNA, 51 bp, Homo sapiens
ctcttggtttggtctctaaaagtaaaggtgttatccaagataaattctgtg

SEQ ID NO: 15021 - DNA, 100 bp, Homo sapiens
gccctgggctttaccatctttgtggctgtgcttgccaggcctggctccatgcttgcgctccaggcccgaaagaaaaggaccaaggccaagaaggacaaag

SEQ ID NO: 15022 - DNA, 97 bp, Homo sapiens
ggagcggccggggcctggggctgcctgccgggcggccgggcgcggcgagcccaggacgagattgaggagctgcgggccgagatgctggagatgcggg

SEQ ID NO: 15023 - DNA, 73 bp, Homo sapiens
ccagtcttgctcagctctcacaggagagggcgttcaggttttgcagatgtgaatggttggcaccttcgtttcc

SEQ ID NO: 15024 - DNA, 100 bp, Homo sapiens
ggccgcccggctgctgctggccgggctgctgtgcggcggcggggtctgggccgcgcgaggcctcttctgaagagctgaaagctgcctaccggaggctctg

SEQ ID NO: 15025 - DNA, 74 bp, Homo sapiens
gccgtcaccctgcctcccctgcgtcccgccaccggccgcttctgtcctcgagagaagacacggttcaatgtgta

SEQ ID NO: 15026 - DNA, 75 bp, Homo sapiens
ggcggcctgcctccgggcacacccggctccccggacgcctcgcattgatatgaaccatggacaagtatattctgc

SEQ ID NO: 15027 - DNA, 82 bp, Homo sapiens
aacaaagtgagtgacaagcaccccgagtactgggacactgccatcctcttcaccaggcaggctcccccccaaccaagcggca

SEQ ID NO: 15028 - DNA, 100 bp, Homo sapiens
cagatcttcaggaattttactgggataattatccaaataaattgcaagcattctatccaaatgatcacagattctgctggccatattctctactccaaag

SEQ ID NO: 15029 - DNA, 100 bp, Homo sapiens
catgttgttaccctcggacgtagcccggcttgtattgggtgagaattatgaagatgatgacctagtaaattctgatgaggttatgaagaaaccatgtcca

SEQ ID NO: 15030 - DNA, 82 bp, Homo sapiens
gtccttgctggtgcatgcgtcgtcggcctctgggcagcaggggctttgttatgcacctaaagccatattggaagctccagaa

SEQ ID NO: 15031 - DNA, 98 bp, Homo sapiens
ctcggcccggacccatgcagcttgggcccgcatcatcgcttgttcgggttacacatcattttggaatgactgtatatcatctggattacgtggctgta

SEQ ID NO: 15032 - DNA, 100 bp, Homo sapiens
gccgcgggacctctccgggccatggcagtggtctcggaaagagggtcgtggtcccgcacggatgcgcttgttgggagaaaccttggagattcacggcaag

SEQ ID NO: 15033 - DNA, 101 bp, Homo sapiens
ccaggatgtctgatctccatgttctgctgttaatggctctggtgggaaagacagcctgtggggctgctgacagtgatgatgaagatttggatgacttattt

SEQ ID NO: 15034 - DNA, 98 bp, Homo sapiens
ttacttcccccctctctctctgcttggtaccacagtttctccacagacactacccaaagcagtccttcactacagtggcagacagacctgaaaatttt

SEQ ID NO: 15035 - DNA, 100 bp, Homo sapiens
aagggcaacttcgctgtggtgaagctggggcggcaccggatcaccaagacggaggttaatttggagtggcccctggagtcagtttcctacaccatccgag

SEQ ID NO: 15036 - DNA, 101 bp, Homo sapiens
gaggaagccatggactctaccaagtctgaacccctgaagggatcaccagagtggtggacttgctttgtgaagagacagttcatgaacaagagtctttcagg

SEQ ID NO: 15037 - DNA, 73 bp, Homo sapiens
ccgcggccccggccggaggagacagggcgtgatggtgggcatgggtcagaaggattcctatgtgggcgacgag

SEQ ID NO: 15038 - DNA, 98 bp, Homo sapiens
aggtctctgtttcactccctccccgcggggcgcgcagctcgcgggtctttggacaccaccggtcctgagtccgcggccaaacgtaccaagaaagtcgg

SEQ ID NO: 15039 - DNA, 100 bp, Homo sapiens
actgtccatcttcgacagtgaggaagatatcaccaccttcgtcaagggcaagatacacggcttccgttacaagatgaggtctgtgtatgctcacttcccc

SEQ ID NO: 15040 - DNA, 100 bp, Homo sapiens
aagatcttggcaaagcttctccctcagtatttagaccagatccataatgagatggcatcaacatcagataaaggtgcccaaggaagaaatgacaagaaag

SEQ ID NO: 15041 - DNA, 124 bp, Homo sapiens
ccgtggttgtggggaccataactgatgatgtgcgggttcaggaggtacccaaactgaaggttcccgggaacctgagtgcagctcaggtggccgcgcagaatgcagtggaggctgccaagaacca

SEQ ID NO: 15042 - DNA, 75 bp, Homo sapiens
cagattacgaggattatggatgaacgtaacagacaggcagacctgttatcctaaactaggtgagtcagcttttgg

SEQ ID NO: 15043 - DNA, 100 bp, Homo sapiens
caaactcccaggctcaagcagtcctaccatgtcagccttcccagtagctgggaccacaggttcaagtgctggggccggcagtggagagttccacgtgtac

SEQ ID NO: 15044 - DNA, 98 bp, Homo sapiens
gaaagctttcctaggccaaaaagagctgtccaatgtgaaagaaaacccattgaagtatcacgagaaaaatcttccaactgtgccgcttcaacagaaaa

SEQ ID NO: 15045 - DNA, 101 bp, Homo sapiens
cggggagcacggacaacccctacccatgaggccctgatggaaaacacaaaggatctgttcttcgtgccatgaaggaggacagtgaaaaagttccgagcttg

SEQ ID NO: 15046 - DNA, 100 bp, Homo sapiens
agaggccaggatgtgggcccagccctgtgccaggaggctggctggaataaaggctaatctagacgaaatccagatgagttcacctacattccttagagct

SEQ ID NO: 15047 - DNA, 93 bp, Homo sapiens
ttcgcctcgcctcgggacccgcggtccccgctcttgctgaagaccagtatggtgctgtgaaatgttgcaaaacatgacctgatgacaacccaa

SEQ ID NO: 15048 - DNA, 98 bp, Homo sapiens
gcagcagctggaggaggatcgcactgctcatcttggccatcactatacacaacgttccaggtcacgcaatatttaaactcacgtatctaagcaatcac

SEQ ID NO: 15049 - DNA, 100 bp, Homo sapiens
ccggcctggagctcccagggccgaggagaaaggatcctgggttatgctgaggagccctgctatctctggtttgtcatggagttctgtgaaggtggagacc

SEQ ID NO: 15050 - DNA, 82 bp, Homo sapiens
cagttccaggatacacgtgccagatctgcaggtttgttacacagtggttggaataaaaacagggttgaatgagttccagaaa

SEQ ID NO: 15051 - DNA, 100 bp, Homo sapiens
tgcccaaggtgctgagccggcgcggggtcggcgctgggctggaggcggcggagcgcgagagcttcgagcggactcagctgaagaaacacttaaattctgg

SEQ ID NO: 15052 - DNA, 76 bp, Homo sapiens
aaaaccacgaccctgtcggatccatcttaatccagtgagaaagatcagtctaaagaaaaggagaagaaagtgaaaa

SEQ ID NO: 15053 - DNA, 75 bp, Homo sapiens
tccgggagcacgtcatcgccatcgaagccagcagacttcataggaaagcaagcactgaaacagattaaagccaag

SEQ ID NO: 15054 - DNA, 75 bp, Homo sapiens
ctccagcctgtccggctcgtcggtgtcctccggagcccagtttcctccaattgcagcacaagaccttccttttgt

SEQ ID NO: 15055 - DNA, 98 bp, Homo sapiens
gtcggcgggaaccccctgaaccggagattgcagtaacggatgctccgcagagtgtaccggagaaggaggatcaaaagaggtggtggggacttttaagg

SEQ ID NO: 15056 - DNA, 100 bp, Homo sapiens
cagcccgggctgcccggctctcgcaggcccccccgcgccgaccgcgttcctatggacagacgcacagacacctgcagctggtggagctgtctaaggctca

SEQ ID NO: 15057 - DNA, 83 bp, Homo sapiens
gtgaagcgtgaggccggcatcgtctttccgtcctctgaggcgacggccgcggctgcacagaacaagaggaaagtatggggaag

SEQ ID NO: 15058 - DNA, 100 bp, Homo sapiens
accaagatgacaaaagaagagttaaatgccctcaagtcgacaggggatgggaccctaggacaatcatatcctgattcagcccttcctccacaaaggcaag

SEQ ID NO: 15059 - DNA, 95 bp, Homo sapiens
aaggttgcattgatgaaattaaagatgcatgctgatggcgataagtcattaccacagatgccatggacaatattaccaggcagaaccaattctac

SEQ ID NO: 15060 - DNA, 76 bp, Homo sapiens
cacaagtccctggaggccgaggccctggcagaagtaacagttgacaaatgggaacctttgttgaacaacttggggc

SEQ ID NO: 15061 - DNA, 100 bp, Homo sapiens
cctgtgaaactccagaagcagaaagtacagtctatgaatgagatagtccagagcaacctctttaaaaagcaaggtgggatgtgtgtgggctgaaattccg

SEQ ID NO: 15062 - DNA, 74 bp, Homo sapiens
cagctgcctcagttcttagcgcagatgatgttgaatttgaagtatcatcggaccgacggactgggaaacccatt

SEQ ID NO: 15063 - DNA, 58 bp, Homo sapiens
ctccccagccatgtggaactgctctattccgttcgctggttcgccacctcaggggaac

SEQ ID NO: 15064 - DNA, 80 bp, Homo sapiens
ctgccctcagccgcccgctggccgggagcggagcccctgtgggagtgcctgtgaagaaaacggggtattgccctgaggct

SEQ ID NO: 15065 - DNA, 100 bp, Homo sapiens
gtgaaatgtacccagttagtaagagggaaacactactatgaagtatcctgtcatgaccaagggttatgcagggtcgggtggtctaccatgcaggcctctt

SEQ ID NO: 15066 - DNA, 75 bp, Homo sapiens
atgttcttcttcgagtatttgtagaaggatgtctttggtggacttgggaaagaggttgctagaagcagcaagaaa

SEQ ID NO: 15067 - DNA, 100 bp, Homo sapiens
ctgtgtcgccgccgcctcgggaccggctgtatgattaggccacaatcttcaatgagtaaacatattccttaaaggcatgacttcctggcaccacagggaa

SEQ ID NO: 15068 - DNA, 82 bp, Homo sapiens
gctctgtggggctctggccgcgcctggcctggccgggaccatgggattatcttgaacacataacctccattggccccaggac

SEQ ID NO: 15069 - DNA, 50 bp, Homo sapiens
gtccaagagccggcggcatgacgacaggttcaggagaagtggcacctggt

SEQ ID NO: 15070 - DNA, 75 bp, Homo sapiens
tggcggagcgcggcaggaagcggccgtgcggcccgcctctcatagttgtagccaacaaatgtgatgtgaagagaa

SEQ ID NO: 15071 - DNA, 90 bp, Homo sapiens
cgggcaccaccgtggccaacctccaggtggcccggctccacgacattgaacaggaggacccccgcgggcggaccccactggagctggccg

SEQ ID NO: 15072 - DNA, 100 bp, Homo sapiens
cttatcagagattgagaatgtccatggatttgtttctcattctcatatttcaccaataaagggcatccgtttccgaggctttagtatccctgaatgccag

SEQ ID NO: 15073 - DNA, 74 bp, Homo sapiens
tctatttggatttgccacagaatttcaagatatttgaaaactcctccttaacttggtagatcatactgaagtgg

SEQ ID NO: 15074 - DNA, 75 bp, Homo sapiens
ggccatgggcacgccttggacagtattctaccttgtaaatactgttatttgtatatactgtaaatgatgacatcg

SEQ ID NO: 15075 - DNA, 80 bp, Homo sapiens
aaggcatccacaaagaaactttatattgggttctctcaaacgtgtcttaaagacctgcctagagctggaacgttacctcc

SEQ ID NO: 15076 - DNA, 101 bp, Homo sapiens
ccgcgccgggccccggacgccgcgcggaaaaggtttcgtctaaggaaaaaaacatggaagaatcctggcactgtctttttggattatcatatttatgaaga

SEQ ID NO: 15077 - DNA, 75 bp, Homo sapiens
gaggtggtggagtgacctggccccagtgctgcgtccttatcagccgagccgttgctggatttgtgcgactcggtg

SEQ ID NO: 15078 - DNA, 100 bp, Homo sapiens
agatcgtcagcgctgactccatgcagattagtgatgatgaaccaggttatgaccttgatttattttgcatacctaatcattatgctgaggatttggaaag

SEQ ID NO: 15079 - DNA, 100 bp, Homo sapiens
taaagagctgggcttgaacttcgtgagtttcgctctaaactgcccttgaaatgaagctggacttggaggttttgagcaaaattttggactgtgaagcaag

SEQ ID NO: 15080 - DNA, 90 bp, Homo sapiens
caggcatttcgggaatgtacactggagaccacagttcatgccagcggctggaataagagcagcccgacggccatggaggctgaagagacg

SEQ ID NO: 15081 - DNA, 98 bp, Homo sapiens
aaggattccaagtaactcttatttgggaggacatgtatgcccaggactctatagagctactaacaacatctggtatccagtttaaaaaacatgaggag

SEQ ID NO: 15082 - DNA, 100 bp, Homo sapiens
ttcagaggtattctagaagaagaaattggatctcaatcaacagagggtgcagaagctggaagctgaagtggaccagtggcaggccaggatgcttgtcatg

SEQ ID NO: 15083 - DNA, 100 bp, Homo sapiens
tccaggctgtactgctccccaagaagactgagagtcaccacaaggccaagggctgtattcatcaccaaagaaaaaacttacaccaatgcagaaatcggtt

SEQ ID NO: 15084 - DNA, 99 bp, Homo sapiens
ccgggcggcacccgggcgggcgaatccgtcagctcccgcgggaggcccggcgagagaaggacccgttcattatgctgacatatcttttcatgttggcct

SEQ ID NO: 15085 - DNA, 100 bp, Homo sapiens
gcttcgtcctccatgacaacaagcacgactgcaaagaaggcggcttacagggagaacacagttggcctccaccgtttctgccccacagaaaacgtagcaa

SEQ ID NO: 15086 - DNA, 75 bp, Homo sapiens
gatctgtcagagtgtggcaaatttcagatcaggtttcaccaaaactcatgccaatgcagcagatcgcaaattgaa

SEQ ID NO: 15087 - DNA, 88 bp, Homo sapiens
cccgcctcgcccgccgtgagcgcccggagcggtccgcgagccaccgaggcccagaggcggggtttcaccatgttgcccagactggtct

SEQ ID NO: 15088 - DNA, 100 bp, Homo sapiens
acttccacagccaagtgcgggagtccacgaaataaactatcaatcttgcccagactggagaaaggactgcagcaacaaccctgtttcagtattctggaaa

SEQ ID NO: 15089 - DNA, 80 bp, Homo sapiens
atgccaaggaaaaactggagagcttcatcaaaaatagtgatagctttgataaacccggagtggcgttggatggaagcgag

SEQ ID NO: 15090 - DNA, 98 bp, Homo sapiens
cctctcccaggggctgtctctacctcaaagactggcacttgtgcagctggcagccaggaggcaggagcagcgggcgacagtgcgggccctgtggttct

SEQ ID NO: 15091 - DNA, 75 bp, Homo sapiens
acagttcgagaagttgtgaacagactcgatcgttagggaatgtgatccgggccaaggtggtggggaagaagctgg

SEQ ID NO: 15092 - DNA, 82 bp, Homo sapiens
ttttggacttcatagcctctagaactgaggaagacagcgaacccctcccaccacaggatgcccagacctctgggtcactgtt

SEQ ID NO: 15093 - DNA, 75 bp, Homo sapiens
catgtggctgccttgggctctgttgcttctctgggtcccaggaaacatgccctgaactgtcacagaatgaaacca

SEQ ID NO: 15094 - DNA, 60 bp, Homo sapiens
tggtatactcaaagaacctcacttccagacattaccagaaacatctttaccaaattatgc

SEQ ID NO: 15095 - DNA, 98 bp, Homo sapiens
cgggatctaacccaggagcagacagagaagctgctgcagtttcaggctctggctccgctactgcatcgtgtgcttctgtccaagaggcagagagactg

SEQ ID NO: 15096 - DNA, 76 bp, Homo sapiens
gtcaggtaccgcgtgcgcaagtcctacagtcgtcggaccactgaagctacctcaaaagatacagatattgtggatg

SEQ ID NO: 15097 - DNA, 89 bp, Homo sapiens
caaaagtgatccgagaactgcgggaggaagtcgagaaactgagagagcagctctctcaggcagagattcaaccctatgaaaagataaag

SEQ ID NO: 15098 - DNA, 99 bp, Homo sapiens
gcaccatgccgctcctaagcctgcacagccgcggcggcagcagcagtgagaggactggagactgatgcatgagggggctacggaggcgcaggagcggtg

SEQ ID NO: 15099 - DNA, 137 bp, Homo sapiens
caggctcagcctccccagagacaacaccgggagcctcatctctctcctcaccctgctgtgactccaccacagtcacgccgatgatggagctgaagcccaacgcaggtagcgaccgtgcctgggtctggaacacccac

SEQ ID NO: 15100 - DNA, 80 bp, Homo sapiens
tccagcctgcggagcctgtggggcaggaacgagtctttgggaacgtggtccacccagggatgtaaaactgtgcttaccga

SEQ ID NO: 15101 - DNA, 100 bp, Homo sapiens
ctgagatcaaatggcacttcattggccacctacagaaacaaaatgtcaacaaattgatggaggtcctcaaagagggcagcgggctgttcccagatctcct

SEQ ID NO: 15102 - DNA, 101 bp, Homo sapiens
gctggtgaaagtggagacggacggcaggatggattcacttggcgacatggcggggagctgggaagacggacaccgggcaaaggagatagaagtggatgaaa

SEQ ID NO: 15103 - DNA, 100 bp, Homo sapiens
aggcactcaagtcctggctcagcaagactctcgagcccatgatgtacagttacccagcacgtgtacctcctcctcctcctattgctcgggctgtagtgcc

SEQ ID NO: 15104 - DNA, 75 bp, Homo sapiens
tttaagatttacatgcaaagggatctaaagggtgccagaatctggcaatgggggcaggagctgttggagctttgc

SEQ ID NO: 15105 - DNA, 100 bp, Homo sapiens
caaatttagattattacaaagcacgaggagcagacctcatgaataaaagccgacatatctgaagagatggattaagaatgctttggattaaggattgtgg

SEQ ID NO: 15106 - DNA, 51 bp, Homo sapiens
gtttccggacagcttcgtgctgggttgcatcataaatacaaaggactgaag

SEQ ID NO: 15107 - DNA, 87 bp, Homo sapiens
gggcggccccctgcagcctcctgcccaggctccggttggatggcaagcatgtggtgtttggcaaagtgaaagaaggcatgaatattg

SEQ ID NO: 15108 - DNA, 100 bp, Homo sapiens
tctcgccaagggccccaatgagtggcacacagtctactatcaccgacagaaaagatgttggtttaaagcgattttttcctaagagtttactggattctgt

SEQ ID NO: 15109 - DNA, 100 bp, Homo sapiens
gcagatgttgtcaaggtggcctaccaggaggccaggggtgtcgccatggctaccaagcagtttctcgaagagattaacaagtggacagttcagtacaatg

SEQ ID NO: 15110 - DNA, 75 bp, Homo sapiens
atttgttctgtatcagaagacaatatcatgcaagtgtggcaaatgaatccagactccaaaatgatgcaaatcaac

SEQ ID NO: 15111 - DNA, 100 bp, Homo sapiens
ttgacatcagttatattccatctactgtctttttcttcaatgggcagcatatgaaagtggattatggattgaaaatcttcaagagcagcttagagacaag

SEQ ID NO: 15112 - DNA, 100 bp, Homo sapiens
cctaactaacctggagagcctcgagaagggacaaatgtaacacgattatcaggaagtggtttacccaaggtccagcctagcccctaggcaccatgtcgga

SEQ ID NO: 15113 - DNA, 82 bp, Homo sapiens
tcctctgcattcacatgcatgcaaatgtacttctgaatgcgcacgagaaatggcatgattcacgacgctggcagctctctgt

SEQ ID NO: 15114 - DNA, 100 bp, Homo sapiens
gatcagataaagagccaggagcagctgagtgtagcttccattggcaatactttaaacagcgtccatcttgctgtggaagcactacagaaaactgtggatg

SEQ ID NO: 15115 - DNA, 100 bp, Homo sapiens
ggagatggctgcgacgcgtgcgcagcgttacagtgtttctgccacctctgtacaaaagacaattttacttgtgtgacagatgggctctgctttgtctctg

SEQ ID NO: 15116 - DNA, 99 bp, Homo sapiens
aggaattgtaggtattgaaaggaaactggaagaaaaaagaaaagaaactgacaaaaacatttctgagccatccagtccaatggatcagatgggcaagat

SEQ ID NO: 15117 - DNA, 50 bp, Homo sapiens
ggacggaagaaaaggtctggccgaaaacgttgtgtgacgtgatcctcatg

SEQ ID NO: 15118 - DNA, 100 bp, Homo sapiens
aggactcgctcgacccgtccttcactcacgccatgcagctgctgacggcaggccctggccaacgtcaacattgggagcctcatctgcaatgtaggggccg

SEQ ID NO: 15119 - DNA, 100 bp, Homo sapiens
atgaatgccatccgggaagagcgggaccggctccggaggagggacccagatgatgtggtaccagttggccaaagaagagcctggtgttggtgcatgtgct

SEQ ID NO: 15120 - DNA, 75 bp, Homo sapiens
tgacggtggaggttcgcggctctaacggggctttctacaagcttcctttgctccaataagctttgcaatcaaggc

SEQ ID NO: 15121 - DNA, 74 bp, Homo sapiens
gcgcccggagcaagcggagctcccccaagagccggaaaggtaccgcagactcgcccttaagcaccacccgttga

SEQ ID NO: 15122 - DNA, 88 bp, Homo sapiens
gctgggaggagcactgcaaatttcactttggacacgtgagtcagaggtgatggtgaacgggatcctcttcgtgcagtacttccaccgc

SEQ ID NO: 15123 - DNA, 80 bp, Homo sapiens
cgagctcagcaggagctggctgcggagcggcgagggacctcgcagggagccatccgataacatccagtcatggataaaaa

SEQ ID NO: 15124 - DNA, 100 bp, Homo sapiens
agtcccttctacttcgttgcagcaactgggatgctgagactctcacagaggaccaggtgggtcatgataactgggtacgtggagttctgttccattctgg

SEQ ID NO: 15125 - DNA, 51 bp, Homo sapiens
cggcgccttcggcaaggtttacaagctgccactgcagagccccgccatgga

SEQ ID NO: 15126 - DNA, 82 bp, Homo sapiens
ccaagatggtgaagcagatcgagagcaagctatccagtcagttcgctgctattcccatgggtcacaggagacagatgaggag

SEQ ID NO: 15127 - DNA, 98 bp, Homo sapiens
ccaccatcgtcaagaccatcatcactttcattgtctcggacgtgcggggcctgggcctcccggtccgcaagcaggcagaggtggaggagacactgaag

SEQ ID NO: 15128 - DNA, 75 bp, Homo sapiens
tcccacaagagagttggctgtgcagatccagaaggtcttggtcttgatgccaagtttgggaaaggagctaagaag

SEQ ID NO: 15129 - DNA, 100 bp, Homo sapiens
attgaagcacatcgaccggcgacagcagccaggagtcatgagcgacagcggcgagcagaactacggcgagcgggtagagctgaagtttcctgcaccaggc

SEQ ID NO: 15130 - DNA, 97 bp, Homo sapiens
gcgagcagacgcgcacaccggcgagccaagttccgcagcctggcatggcttctggggacctttacgaggatgtacagttacccagcacgtgtacctc

SEQ ID NO: 15131 - DNA, 51 bp, Homo sapiens
taccactgtctctgctcacagtgccaaggcttcttctcatatcggtaattc

SEQ ID NO: 15132 - DNA, 98 bp, Homo sapiens
tgaagccgctggtcgtgttcgtcctcggcggccccggcgccggcaaggggacccagtgcgcccgcatcgtcgaggagggctctgagagatttcatttc

SEQ ID NO: 15133 - DNA, 90 bp, Homo sapiens
cagccttcggctcacggtcctgtgggggttaggagtgctgattcggtactgctttctgctgccgctcagcccgctcccaaaagacttcag

SEQ ID NO: 15134 - DNA, 100 bp, Homo sapiens
gctgtagagaggaccccggtacatctgaaagccgggaaatggatggaagagtgtagaaagtgtcccaaagttggtgtctgaatatatgtccaaaaagata

SEQ ID NO: 15135 - DNA, 75 bp, Homo sapiens
gcagtggtcgcttcttctccttgctgaccgtcctttccgaggagagagcggcgctgctggagctgtgggagctgc

SEQ ID NO: 15136 - DNA, 106 bp, Homo sapiens
ggcagggctgcggcgcagggcgaggcggaggcgcccaccctctatctgtggaagactggtgtgatgaatgcagactctgctaccattttggctgtttggatcctcc

SEQ ID NO: 15137 - DNA, 140 bp, Homo sapiens
ctgtgtgctggagttacgcttgtacagtggaaaccagcccaagctacaaaagtggtgattattcagagctgggagagcttcccccacgatctcctttagaaccagtttgtgaagatgggccctttggccccccaccagag

SEQ ID NO: 15138 - DNA, 80 bp, Homo sapiens
aagactgttccaaaaacagtggataattttgtggccttagctacaggagagggcgtcttactactgcaggcactaacaag

SEQ ID NO: 15139 - DNA, 75 bp, Homo sapiens
ctgtggaaagaagttgcaaaacactgggttcctgaggctgtggattgctgtgctggtgatctaccccaccaacca

SEQ ID NO: 15140 - DNA, 82 bp, Homo sapiens
cgtgaagtgtctgcgctgcctgctctacgccctcaatctgctcttttgggtgagcgagtgctgtgctttcatgggcctcttc

SEQ ID NO: 15141 - DNA, 82 bp, Homo sapiens
cgggcgccgcgggacctctccgggccatggaaacgtgaagagggctggtgggtggtgattggagatgccaagtccaatagcc

SEQ ID NO: 15142 - DNA, 50 bp, Homo sapiens
tattttgcaccactggatgttgtttactgaggactactgagcccagccag

SEQ ID NO: 15143 - DNA, 98 bp, Homo sapiens
cagaatttcaacagaggttcattctcaagagagatgatgccagtatggaccgagatgataaccagaacttcagtgaagatttcatacattggcctcat

SEQ ID NO: 15144 - DNA, 100 bp, Homo sapiens
ctttctggcctggaggctatccagcatccgagtgaagcctgacaggaccggtgtggtcacggatggtgtgaagcactccatgaaccccttctgtgagatc

SEQ ID NO: 15145 - DNA, 101 bp, Homo sapiens
atctgggcatgcctgcagtactcttggcccatggacctgaaggagaagcacctgctcaacgggacccaggtggagtctgtacagctcaaagtcaacatagc

SEQ ID NO: 15146 - DNA, 90 bp, Homo sapiens
tcttcctgtgaaaatgccttgtctctacctgcagacattagctagttttctggatatgccgcagaaggatccgtgccagaagcaagcctg

SEQ ID NO: 15147 - DNA, 90 bp, Homo sapiens
acttccgtgtcttcctgcaatatgagttcacccacttgggcctggacctgtacttggaggtacgccatgaagtgcctggacaaaaagcgc

SEQ ID NO: 15148 - DNA, 90 bp, Homo sapiens
cccgccgctgcgcccgacgctccctgtctgggaccttctccctgcctggacccctactattgcaacaagaccagagtgaactccgagcag

SEQ ID NO: 15149 - DNA, 83 bp, Homo sapiens
gttcctgttacctctcatcattgtgttaatggtgaagcacagcgattcccatgtcatcgcaacagataaagaagacgttgcct

SEQ ID NO: 15150 - DNA, 75 bp, Homo sapiens
gcagagggacgtggatgcctctccctcgcctctgtcagacagccagctaaaggtgtggatgagcaaatacggctg

SEQ ID NO: 15151 - DNA, 74 bp, Homo sapiens
ctgagatgtacgctaagactgaacaggatattcagagaagttctgtctacatgttcaagtgcgtgtggcggtgc

SEQ ID NO: 15152 - DNA, 98 bp, Homo sapiens
ggacaacgagaaactggacaaccaacggctcaagaatttcaagaacaaaggccgcgacttggagggtctcctatggacagaagtgcgggcaaggagct

SEQ ID NO: 15153 - DNA, 100 bp, Homo sapiens
gaaacagtccatttgtcataaagtaagatgcagctgtggcatgtcaaccagcttgactgctgagctagggaaaagagccccaagatggatccgagataat

SEQ ID NO: 15154 - DNA, 82 bp, Homo sapiens
gctgccgccgaacgacaggacgttggggcggcctggctccctcaggaattctgtggccacactgcgaggagatcggttctgg

SEQ ID NO: 15155 - DNA, 100 bp, Homo sapiens
tgtgatgatgaccgtcaccaactggttcaagcaggtaacttgcagactcacttacgacggcattctggtgaaaaaccatacatctgcgagatctgtggaa

SEQ ID NO: 15156 - DNA, 89 bp, Homo sapiens
ggcggcgactacgacggcgttgatatcggtggtaacgacggcctcagcaggcggggaagatgaaaggttcctctgtgacgagggtgcag

SEQ ID NO: 15157 - DNA, 100 bp, Homo sapiens
catgagcgacagcggcgagcagaactacggcgagcgggcaaatacgccatgcgagacctagtccacaggcttccaggagggaacaacagcaacaacactg

SEQ ID NO: 15158 - DNA, 83 bp, Homo sapiens
cagaaattctggaacacctatatggggccaaaccagtgctcctgccacctctctggctgccccctagagcctgcccatcccag

SEQ ID NO: 15159 - DNA, 100 bp, Homo sapiens
gacaggaggcagtagccaaacacccagcggacaaggcaaaatctcagcaagttcggacctctagtacaataaggcgaacctcctctttggatacaataac

SEQ ID NO: 15160 - DNA, 75 bp, Homo sapiens
gattcaggaacatggtgcaaactgcagtggtcccagtcaaggatttgttaaggattccaagtaactcttatttgg

SEQ ID NO: 15161 - DNA, 100 bp, Homo sapiens
aacatctaactagaagggatacccttccatttcaaagaacagaatgctaaggaagctgtggcaaatgtctttggtggacttgggaaagaggttgctagaa

SEQ ID NO: 15162 - DNA, 73 bp, Homo sapiens
agtggtcgcttcttctccttgcatccagagatacgctgtcatccctttatcgaccaactcgggcctcattggc

SEQ ID NO: 15163 - DNA, 75 bp, Homo sapiens
gcatttgacttgtttgatgttcgtgactttggaaaggaaaaattgaggcttcagaaattgtccagtctctccaga

SEQ ID NO: 15164 - DNA, 111 bp, Homo sapiens
gagccggagctgggcgcggattcgccgaggcaccgaggcactcagaggaggcctccggtgtggctgtctctgatggtgtcatcaaggtgttcaacgacatgaaggtgcgta

SEQ ID NO: 15165 - DNA, 100 bp, Homo sapiens
atgccctattcgacagaactgatattttatattgaaatggatcctccagatgatggtggtgctaccccagtacaggatgaacgggattcagggtcagacg

SEQ ID NO: 15166 - DNA, 75 bp, Homo sapiens
tgggcctgggagctgcctctgaggaacacgccgcaggaagctcttcgtgggcggtcttgactggagcacgaccca

SEQ ID NO: 15167 - DNA, 75 bp, Homo sapiens
gtggagtccaacttgcctggaccagcttaatggttctggtgatttgaagatattaaagctagaaattggaactag

SEQ ID NO: 15168 - DNA, 83 bp, Homo sapiens
gctgctccatgtcttcgccaaggactgcttccccgaggttaatttggagtggcccctggagtcagtttcctacaccatccgag

SEQ ID NO: 15169 - DNA, 87 bp, Homo sapiens
gaggctgaggagaaggaggagcgggccgtggaggcttcgccgcctagaatgcatctactcatgcctcgaaatctcctgacagtgtta

SEQ ID NO: 15170 - DNA, 90 bp, Homo sapiens
acgtgcgacccggtcactggtgcctgccacctaggcctcctgaaccggcccaaccccttgctggcgttgccccccgcccgcccccacggc

SEQ ID NO: 15171 - DNA, 100 bp, Homo sapiens
tgagaaccctacttgcctaaatgaggaatgtctttcctaccatctaaaatacgaaggtttctggctgggtggaggagaagatcaagcagacccaccgtaa

SEQ ID NO: 15172 - DNA, 83 bp, Homo sapiens
gcaggactgccgcgagtgcactggaggcatggttacactcctggcacaccttacaaagtgtcctgttcccccaccagcggggc

SEQ ID NO: 15173 - DNA, 97 bp, Homo sapiens
gaaaaaacaaaaatattgacaactttttaagcagattcttactactttgaccgcgatgatgtggctttgaagaactttgccaaatactttcttcacc

SEQ ID NO: 15174 - DNA, 98 bp, Homo sapiens
ctcggaccctggaccgtgcgtcgtgggcaccagaaacgagactcggccaaatcctgcctcaccaggagaataaaggcagccccgttgatgactgaaaa

SEQ ID NO: 15175 - DNA, 83 bp, Homo sapiens
tgtgaagctcaccgagacggcgatccgggcgctcgagacttaccagagccacaaggtggacgacatccttggagaaggcagcg

SEQ ID NO: 15176 - DNA, 83 bp, Homo sapiens
gtcagacgcagccgtagacaccagctccgaaatcaccaccaaggggtgagcccctccagactccgaataggagatcaagagtt

SEQ ID NO: 15177 - DNA, 101 bp, Homo sapiens
ggttttcttagccctctacttttcaagacaccaagtgagaggccaaccaggagctagagatgctgttattctattgtatgtgagaagtcggcccagagatg

SEQ ID NO: 15178 - DNA, 100 bp, Homo sapiens
gcggtggagccttcactatgggtgtcatcggtggcggagtcttccaggccatcaagggtttccgcaatgcccctgttgaggatgtcctcaacacccagtg

SEQ ID NO: 15179 - DNA, 75 bp, Homo sapiens
atgatgtagaaaccaaatatggtttgcttcaggctgaactcacgggaatcaaatggcgtaggtacaattttggag

SEQ ID NO: 15180 - DNA, 118 bp, Homo sapiens
ggacatgcgggagagagaatgagccagagggacacgctggtgcatctgtttgccggaggttttaacaggttttgaaactaataacaaatatgaaattaagaacagctttggacagagg

SEQ ID NO: 15181 - DNA, 100 bp, Homo sapiens
agaaggacctcctcggccacttcggctgtgtcaatgccattgaattctccaacaatggaggccagtggctggtctcagtaattcgccaaaatgacgaaca

SEQ ID NO: 15182 - DNA, 80 bp, Homo sapiens
gggaattgtgccggaggttctgaagaagatcgtaacaacttatgacatggtggagattctggacgcaaagacaagggaga

SEQ ID NO: 15183 - DNA, 75 bp, Homo sapiens
agttgaatatgcccaggaagcggtgaagaaaggatccaccgcgggcttaaaagacaaccttcttgcttctgggac

SEQ ID NO: 15184 - DNA, 82 bp, Homo sapiens
ggacacagcggggcaggagcgcttccgcaccatcacctccacgtgagaagccctaccactgcaactgggacggctgcggctg

SEQ ID NO: 15185 - DNA, 133 bp, Homo sapiens
gacaaaagtacagcagccacccaaccaaccagtcccagcttccagtcacagcatagatggctatatgcatccagttcatcctcatgtagttagaagacttgcataccaacataatcagaccgtctgcagaaat

SEQ ID NO: 15186 - DNA, 74 bp, Homo sapiens
cccgattgtcgatgggctcgctccagaggacatgagcaaggagcaggtcacacatcccgggtcctgagtctgac

SEQ ID NO: 15187 - DNA, 100 bp, Homo sapiens
ctcttccctgaccattttctactgtccctgcgcgaggaatgaatctgaagtctgctgcagtaaaacacagaaggctttaaaatgttttcttgcataaaat

SEQ ID NO: 15188 - DNA, 51 bp, Homo sapiens
cttcaatccgctctactggaatgtggttctggaggacacgtgccggcggca

SEQ ID NO: 15189 - DNA, 82 bp, Homo sapiens
acatccagacccttttacaaacgaatggacagaatcatggaatctcatttaaggtctaaggcttcttggcataggaagaaac

SEQ ID NO: 15190 - DNA, 50 bp, Homo sapiens
ctagaactacctctgatcatctttggtacagctggataacttgccaggaa

SEQ ID NO: 15191 - DNA, 82 bp, Homo sapiens
gaaaaagaaaaagtagctgatgaagatgatgccattttgcagactctgatcacagtgaaacgttccatgggaacttgggcca

SEQ ID NO: 15192 - DNA, 71 bp, Homo sapiens
actccggaagaaacctgccacagatgggtatacaaaactaggatatgctggaaatacagaaccacagttta

SEQ ID NO: 15193 - DNA, 83 bp, Homo sapiens
gtcctggagctgctgcagcggccggggaacgcgcgctgcgcggactgcggcgccccggctgcatcttcctcccgtgaggctgg

SEQ ID NO: 15194 - DNA, 82 bp, Homo sapiens
tctccttttccctctccctttccctaagaccctgtattcagtggatcagctggcaccacccaaatagataaattggcccatc

SEQ ID NO: 15195 - DNA, 101 bp, Homo sapiens
cagaccaactacctggtggtggctgccatgatgatttccattgtgggaataactgaagtgaagtgatggactccgatttggagagtagtaagacgtgaaag

SEQ ID NO: 15196 - DNA, 100 bp, Homo sapiens
agcccccgccgtagccgcctccgagcccgccgccacatcctctgagatgtaaacagtgttctagtttgagatccatacaaaatctaaattccctggttga

SEQ ID NO: 15197 - DNA, 101 bp, Homo sapiens
gttttggctgaggactgaagagatggccttggaagaaatggtgcagagattaaatgcggtttccaagcacacggagtccggcagcgtcttctcttgaggga

SEQ ID NO: 15198 - DNA, 80 bp, Homo sapiens
tcctcaccctgccgcagctgtgcttcccaggtcaaaatgcagatcttcgtgaaaacccttaccggcaagaccatcaccct

SEQ ID NO: 15199 - DNA, 82 bp, Homo sapiens
cttagctgtgctcgcgctactctctctttctggcctggaggctatccagcctcttggagtttgacaaggagttgtctgtctt

SEQ ID NO: 15200 - DNA, 98 bp, Homo sapiens
tattcctccagatggaaatttccgactcatatcataccgtgtcagctcacaaaaatttggtacacacagaggggcagcttcaaaatgaagaaattgtg

SEQ ID NO: 15201 - DNA, 101 bp, Homo sapiens
aggagcagctcttccatatcaagaagctgttgaagacctgtaggtttgctaacaggtggagcccctgttgttgctgaaggcagcccgcattctgcagacct

SEQ ID NO: 15202 - DNA, 100 bp, Homo sapiens
ctgccttattacgccgtctccaagatgtagctaatgaccgtggttcccactgaggtagtgggcagcagtcagtgacaggtgtaacctctgtggatgacag

SEQ ID NO: 15203 - DNA, 73 bp, Homo sapiens
gcgtttcccgcctgagcgcaactagcggcgggtcgtgggcacctccagcccgtggccacccaggagcccgatg

SEQ ID NO: 15204 - DNA, 75 bp, Homo sapiens
ttccaggatgtcaaatttgtcagcaactcgtcagacatagggcctgattacattccaacagaggaagaaaggaga

SEQ ID NO: 15205 - DNA, 83 bp, Homo sapiens
gatagggttcctcactagaacagttctggaaaatagcacaagacaactcctaaaagacccgcaagtgctatttgctggctaca

SEQ ID NO: 15206 - DNA, 98 bp, Homo sapiens
gcttggacgtcgtcctgtctgggtgtcgcgggccggccccgcggggagcgcccccggcgcgatgcccttcaggaaagtacaaaactttttaccaacaa

SEQ ID NO: 15207 - DNA, 100 bp, Homo sapiens
caagcactctagatgccctcaactatgctctccgctgtgtccacagcgttcaagttgctgaacagaagacttttgagagtcagcagaaatcttccacttt

SEQ ID NO: 15208 - DNA, 101 bp, Homo sapiens
aatcggggaggtggccctagctgtgatatttgatgttgcaagtatcatcctgggctccaaggagaggcacaagctccgggtggataaggcagctgctgcag

SEQ ID NO: 15209 - DNA, 120 bp, Homo sapiens
tggagagctcatctggaattttgccgatttcatgactaaccagtctgaacatccatgtgggaaacatttccctggtggaccagtttgagtgggacatgtcagagaaggagaactcaccag

SEQ ID NO: 15210 - DNA, 75 bp, Homo sapiens
aatccgcaacagcggatacgatagtcacctgatatgaaaaaggagcaagacccccctgccaagtgccacaccaaa

SEQ ID NO: 15211 - DNA, 90 bp, Homo sapiens
caatgaggacaacagtgtggtgtccttgtcccaggctgaagtggaggcacagctggcccgacagaaggaggaggaatcccaacagcaagc

SEQ ID NO: 15212 - DNA, 80 bp, Homo sapiens
accctggagcctcagttggaagcagccgatccagcctgcggagcctgtggggcagctctgaacagcaacatggggtgcaa

SEQ ID NO: 15213 - DNA, 75 bp, Homo sapiens
cagagcctcagtttgtgcaggacaccgacatggaacagggactcactggggagatctaccgcatcgtgtcacaga

SEQ ID NO: 15214 - DNA, 75 bp, Homo sapiens
gcccaagaagctgcgaccaccccctgccagggtgacccagggcctggtcatcgggcagctgagcagccacttctc

SEQ ID NO: 15215 - DNA, 95 bp, Homo sapiens
aattgctgaggcaggatccaggatggacaagcttggccgcaccattgcagaccatcaaccccaaggtccaggtggaggccatcgaagggggagcc

SEQ ID NO: 15216 - DNA, 75 bp, Homo sapiens
gagctaatccctgaatatctgagcatgggtagcaagaaactaaaacgagtgggtttatcacaagagctgtgtgac

SEQ ID NO: 15217 - DNA, 75 bp, Homo sapiens
ctcgaaggcccgcggcgccccgtgctgcaggacagaataacgggctcccagattcacaagccccaccaagaggat

SEQ ID NO: 15218 - DNA, 75 bp, Homo sapiens
tgctgcagacggcgagacctcctgcacagctgatccaccttgagatcaagccggccatccggaaccagatcatcc

SEQ ID NO: 15219 - DNA, 98 bp, Homo sapiens
ccaggagctgcggccccgtccggcccgggctgctggttccagcagtgccattggaactcaggagagtactgctcatttgttggtttcagatccaaacc

SEQ ID NO: 15220 - DNA, 101 bp, Homo sapiens
ccagtcccagcgctgtcgtgctcctctactcggtgtttggagtagatgacaatcaggattataataggcctgttatcaacgaaaaacataaagatctaata

SEQ ID NO: 15221 - DNA, 99 bp, Homo sapiens
ccggagacgccgcggaggagaccggaccgaagacggaccgtgccgggaagagtttctgtagaaaatgtttcctgactgcaatgagggaaagcggagcac

SEQ ID NO: 15222 - DNA, 123 bp, Homo sapiens
cggagaggtcagtaactaaattggagaaaagcattgatgacttagaaggatctagtgaaaagccatttgatgtatgcggtcagagaagaagtggaggtcctcaaagagcaaatcaaagaacta

SEQ ID NO: 15223 - DNA, 76 bp, Homo sapiens
gggagctgtgtatctgcatgcgagtctgccgaacttggagccgctgatacaaactggactctcaggacaaaacgac

SEQ ID NO: 15224 - DNA, 118 bp, Homo sapiens
agagggagtgcgtggaggagctgtgcagccgcgaggaggcgcgggaggtgttcgagaacgaccccgagacggctgaagccgacgtagcttctctgaacagacgcatccagctggttga

SEQ ID NO: 15225 - DNA, 82 bp, Homo sapiens
gtttatatgaagagaaacagaaagaacacatccatattggggagatgaagcagacatgatgtattgagtaaaaggaacttcg

SEQ ID NO: 15226 - DNA, 96 bp, Homo sapiens
ccaaggaagcgtgcaaatgccagaaagaggatttggccagagcgttttgtgcatccgtgtacaagatttgcagagaaatgtatgacgatggagtgg

SEQ ID NO: 15227 - DNA, 87 bp, Homo sapiens
gacctgcttccctaagcacgtggttcttccaccttcctttccattgcttttggaggaagtcatgaattcaagcactctgagccaaga

SEQ ID NO: 15228 - DNA, 100 bp, Homo sapiens
ccggaatgacctgtcgcctgccagctctggtcagcaaaacggttactggaccagattgttgaaaaaggaagaccagctcctggcttccatcatggcgatg

SEQ ID NO: 15229 - DNA, 100 bp, Homo sapiens
ttgggcccagtttatggcttccagtggaggcattttggggcagaatacagagatatggaatcagattttggtttcagtaacctcttcactcctgggcagc

SEQ ID NO: 15230 - DNA, 73 bp, Homo sapiens
aaattcgaaagtggattttgtgcaatttgacaggacgtggtgggtcctctggtgcgaaattccggatttcctt

SEQ ID NO: 15231 - DNA, 98 bp, Homo sapiens
cctgagcaacatccgcgagttcctgcgcggctgcggggcttccctgcggctggagagacacgctgtgaacaagacaggccttccccaaccacagcgcc

SEQ ID NO: 15232 - DNA, 100 bp, Homo sapiens
aggacctggtgaagctctgtcaacccaaaattcctgcctttctaaatgtggtggatattgctggccttgtgaaaggagctcacaatgggcagggcctggg

SEQ ID NO: 15233 - DNA, 100 bp, Homo sapiens
agattgcatcaggatattaatgattataaccggagattctcagggcaacccagatctgtgtgttccagagaacaagccttcagacatttgctatattgac

SEQ ID NO: 15234 - DNA, 90 bp, Homo sapiens
cttcgggctgacgctgctgctcgccgcgctgcgcccttcggccgcctacttcggaacccagtgacttgattgtaaaaatttacagagcgg

SEQ ID NO: 15235 - DNA, 96 bp, Homo sapiens
atgccagctctgaaaaactcttcaacactgttattgtaaacaaaggacatgtcctcatagagatttcaagtacccacaagaaactcaacgagagtc

SEQ ID NO: 15236 - DNA, 100 bp, Homo sapiens
tggagaagcggccgcggccagggaacggggcatcgcggttccaacggctttggaggagaagatacggaccacggagacacaggtgcttgtggcatctgca

SEQ ID NO: 15237 - DNA, 100 bp, Homo sapiens
ccacctccacagacccgtccgggtgctgaaagtccacggatgctatccctggtcaaatcagagacaccattcgcttttcacccaagatgatttgatgtct

SEQ ID NO: 15238 - DNA, 82 bp, Homo sapiens
cccagctcttccaggactttgagccagtccagaccctgctgctgtcttcaaagaagtgtactaatggtcacttgatgtgcgc

SEQ ID NO: 15239 - DNA, 76 bp, Homo sapiens
cggagtccgccccgtgaggagaatgtggacatttgggagcaataaaaataagaagaaaggaaaagccagaaaaata

SEQ ID NO: 15240 - DNA, 100 bp, Homo sapiens
ttgggatgccccatagagggaggctgaatttattgacaggccttctgcagttccctccagaggtggacatccccacaattggacagccatttcaagggag

SEQ ID NO: 15241 - DNA, 50 bp, Homo sapiens
tgcatttgctttataagtgaggagccccacagtcttcgttataacctcac

SEQ ID NO: 15242 - DNA, 82 bp, Homo sapiens
aggactgccactgcccggggatggggccgtcaagggattctgggccacccgcccttccttctccaccttctacttcgtcttt

SEQ ID NO: 15243 - DNA, 75 bp, Homo sapiens
tttccggatcaatccagatggcagccagtcagtggtggagggtgtgggccgaagatatgctcatgtggtgttgag

SEQ ID NO: 15244 - DNA, 75 bp, Homo sapiens
ctgttctgattaagcagttttacagtcttttggaggatttgacagctaaggatattgaagaaattattgatgagc

SEQ ID NO: 15245 - DNA, 75 bp, Homo sapiens
acagctgcctacagaaccgtcccaaaatatggcaaagaaacctattctgagaactggttccgaacatcagcagac

SEQ ID NO: 15246 - DNA, 82 bp, Homo sapiens
tggctgggagctccgccctggggcttctgctctgctcagacctcgcgacctgtgtcagcagagccgccctgcaccaccatgt

SEQ ID NO: 15247 - DNA, 76 bp, Homo sapiens
tctgactccaggttatcatggattcccagcgcgggacagccaggacaagaggaccctgccttggtgtgagagtgag

SEQ ID NO: 15248 - DNA, 100 bp, Homo sapiens
tagagggaaagcgagagggagacggacgttgagagaacgaggaggaaggagagaaaatggcgtccacgggtttcccggtcctctggcgaggatcctccaa

SEQ ID NO: 15249 - DNA, 82 bp, Homo sapiens
tgcttttttatctcatattagtgcctgtgatggcatctttcatctaacactgctgggcctaaaggagataacatttatgaat

SEQ ID NO: 15250 - DNA, 83 bp, Homo sapiens
gaacaccatggagccacccctgaccccgcccagcccagcaggtgactttccagcagatctgtaaggatgtgcatctggtgaag

SEQ ID NO: 15251 - DNA, 50 bp, Homo sapiens
atttaaagcgtttggaaaatccacagtcggcgaggctctggcctgggcaa

SEQ ID NO: 15252 - DNA, 83 bp, Homo sapiens
cagatcctggtcctcgatccgcccacagacctcaaattcaaagcaagagtgagccatggagctacgtgtggggaacaagtacc

SEQ ID NO: 15253 - DNA, 87 bp, Homo sapiens
tcagcacacagtatgtatggattgcagtagctacagtacatactggacattcagtcagaagaaggctgctattgaaagagagtatgc

SEQ ID NO: 15254 - DNA, 100 bp, Homo sapiens
gtggtttatcaaaatcacgttataatcagattttgaccaagcattttgtaagagccaggctttcgaggactgactcctccaattccttgggaacatgcac

SEQ ID NO: 15255 - DNA, 100 bp, Homo sapiens
cagctggctccaaaggagagagcggtaacaagggtgagcccccagctccgcctccaggggaaggtgcggatgacttggagggggagttcactgaggaaac

SEQ ID NO: 15256 - DNA, 90 bp, Homo sapiens
ctcaaactcccaggctcaagcaatcctaccatgtcagccttcccagtagctggaactacaggatcgcctgaaggacctgaacagccaggc

SEQ ID NO: 15257 - DNA, 98 bp, Homo sapiens
gaggactggaaccagaaaagatcattggggcaacagattcctgtggtgatttaatgttcctaatgaaatggtagaaacctgtgggttcttgttgtggg

SEQ ID NO: 15258 - DNA, 74 bp, Homo sapiens
cagtgggaagcatgtcgtctttatcgctcagcctcttagcaatgcataccacgagttagcacaagtgtattcaa

SEQ ID NO: 15259 - DNA, 76 bp, Homo sapiens
cggaggggaggaagtgagtatgagcgtagagtggaacggggtcaatgagctgaaggagaaaggcaacaaggccctg

SEQ ID NO: 15260 - DNA, 80 bp, Homo sapiens
aaatccatcctcaagctgctggacacggagcggccggtgaatcggtcaaaatgcagatcttcgtgaaaacccttaccggc

SEQ ID NO: 15261 - DNA, 82 bp, Homo sapiens
aggaggggagggggcgatgctggaagccatggcggagcccagtcccgaagatgacggtccttcgctacccaccaaacagaac

SEQ ID NO: 15262 - DNA, 90 bp, Homo sapiens
ggttggaatgctcttttaccgatgctttaacatacagccactaggtctcacaagaatcttttcttatctaagttgcaacatggaacccag

SEQ ID NO: 15263 - DNA, 101 bp, Homo sapiens
cgggggcgtacaggcgcagcggccgcagcagcagcggcagtcacaggcacatcagcaaagagatgccgacaaaaggatcaaggtggcgaagcccgtggtgg

SEQ ID NO: 15264 - DNA, 90 bp, Homo sapiens
tctggttccagtcaagcaaaattattcagcaccagctgtgatgcgccgctggctgcctgccggagacgccttgttgcagatgatcaccat

SEQ ID NO: 15265 - DNA, 83 bp, Homo sapiens
cgtggttggtgattggcaggatcctggtatccgctaacagtagtttatgccaacgtgacttcattcatacagatgaaccaagg

SEQ ID NO: 15266 - DNA, 75 bp, Homo sapiens
cgggactccggggcgccacgggggccatgtaagcagagagattggaacaattatcaggtcattaggatgctgtcc

SEQ ID NO: 15267 - DNA, 100 bp, Homo sapiens
ctgtgatcaaaacctctacacgacagtccctagagcgtccaagatttttggtttcaaaccaatttcctgctgaccagaatgaaatggagccacattccag

SEQ ID NO: 15268 - DNA, 75 bp, Homo sapiens
aattatacctagaagtctactaatggacagttagtcacccacctacatgttgagaactgaaggcagaagctagtc

SEQ ID NO: 15269 - DNA, 98 bp, Homo sapiens
ctgcatccaaaccctcctgcgttccgacgtcgtgcccatgaccacagaatcggcaaggttggaaaccagaagcgtgttgttggtgtgcttttggggtc

SEQ ID NO: 15270 - DNA, 95 bp, Homo sapiens
agagcgtcacggcgtacgccctcatggggaaaatctccccggtgactttcagaagccgagggcacccgcattcggtatgtaaccaccctgatctc

SEQ ID NO: 15271 - DNA, 98 bp, Homo sapiens
tactccacctgcatctccatcaccttctgtttcttctgcaacatctcagcgtgttgtgctcctacagactgcaaccctgctaggggtccttctcctgg

SEQ ID NO: 15272 - DNA, 88 bp, Homo sapiens
ggacttggtggaaagctcgttctgccgatgatcaaggaacacattatgcaaatgcttcaaaatcctttcccaggcagcagccagcatt

SEQ ID NO: 15273 - DNA, 97 bp, Homo sapiens
gcggcgtgtgcgcgcccgccagctgctccggagatacggctctgggcatcaccagcggccccagggaaaaagaaagaaatgggaaacagcatgaaat

SEQ ID NO: 15274 - DNA, 100 bp, Homo sapiens
gccgaggagcaggcgcggccgcggcgccatattgcggccctcagcggccgcgaccgagtcatggctgagacctacggatgaaaactttcggaagagaaag

SEQ ID NO: 15275 - DNA, 100 bp, Homo sapiens
tcagaatcgagagggcctgagggccctgcagaaggatctcagcctctctgggcttttgtttggggtagagtattaataacaagtaagatgtgacatggag

SEQ ID NO: 15276 - DNA, 100 bp, Homo sapiens
gccgtgctcccggtggaagcaagggagcccagccggagccatgtacatagtggaatgtcatgggatcacccttcttccccagttcttgggcatgtaccgg

SEQ ID NO: 15277 - DNA, 100 bp, Homo sapiens
ctgcgccccgctctgctgtgggcgctgctggcgctctggctgtgctgcgcgacccccgcgcatgagtatcctggctttaaatcctcgaacacaaactcat

SEQ ID NO: 15278 - DNA, 90 bp, Homo sapiens
gcctttctccgcgtcggggcggcccggagcgcggtggcgcggcgcgggctcggagtgaggatgccaggtcatctccctctcagagacgta

SEQ ID NO: 15279 - DNA, 90 bp, Homo sapiens
gttcaagattgccagatatcccaggaaagtgatttgcttgtaaatgcatcacgaagaggcagcccagaatgaagaaagcaagcaggagtg

SEQ ID NO: 15280 - DNA, 100 bp, Homo sapiens
ttggactagtttatatgaaatttgtgggttttaaaaagttgcagaaagaagaaaggaaagggaaagaaaagtgttcagaaatctttatatggggaaagag

SEQ ID NO: 15281 - DNA, 98 bp, Homo sapiens
ctgttttctttatttcaaacttggtggcgaatgtgttgcgggtcctgttgggctgctttctgtgaatccagacgctctgcagtgtcccatcgtcttat

SEQ ID NO: 15282 - DNA, 100 bp, Homo sapiens
gggtgcgcagtccagcgtgaactacagtcagggcagcctgaaggatgcagtctcgttcaacgctgtgtcattatccaaaaggaccagcatggcttcggct

SEQ ID NO: 15283 - DNA, 75 bp, Homo sapiens
tttcagatgacaatgctccctctccttatatggtcacatatcctggagcaggaaaacttccacacatcattggag

SEQ ID NO: 15284 - DNA, 100 bp, Homo sapiens
cgctgccgccgccgcgggagccgctgcccgaactcccggcccgaactccaggtgtcatggagaaactccagctgggcccagagattctgcagcgggaaaa

SEQ ID NO: 15285 - DNA, 83 bp, Homo sapiens
tgtcttcggtggactccttcggcagtccacccaccgccgccgcctcccaggtgttttggggaacgagtttagtatattaaaat

SEQ ID NO: 15286 - DNA, 141 bp, Homo sapiens
gcccatgtggacgccgtcatccgccactgcgcagggcggctgggcagctatgtcatcaacgggcgcaccaagaatggaggcaacctgctgtgtgcagtggatgaatccaatgatcacatgctctcggtgtgggactgggcc

SEQ ID NO: 15287 - DNA, 82 bp, Homo sapiens
cccacgcgcagcgacagggagagaaacgcttcgttaagggactcaggcagtacgggaagaacttcttcagaattagaaagga

SEQ ID NO: 15288 - DNA, 100 bp, Homo sapiens
agaaaagtttgatttgatctggaaccgggctcagtcctgtccaacaggtctcctatggacagaagtgcgggcaaggagctttgttcctccccgatgtcac

SEQ ID NO: 15289 - DNA, 83 bp, Homo sapiens
cgacggagcctttgggaaagtgtacaagaccatcccaatctggcaaaacaagccacatggggctgctcgaagtgtagtaagaa

SEQ ID NO: 15290 - DNA, 82 bp, Homo sapiens
tttctcagatgttggatatttgcttggaaaaacgtgtgggtacgaccttgatgaggtggaaagtgagaaatggtacctgtct

SEQ ID NO: 15291 - DNA, 75 bp, Homo sapiens
gtttgctgatcgccccagggatcaggaggtggaatccatagagctccccatggacaacaagaccaataagaggcg

SEQ ID NO: 15292 - DNA, 98 bp, Homo sapiens
tggaaaggaattgttttggcctaggatcatccagggacatatttggagaagactgtgtaagtgtaaaggatgactctattcttagcgtcacagtggac

SEQ ID NO: 15293 - DNA, 74 bp, Homo sapiens
ccggagccgcaatgcctaaaggagctttctctcctttgaaaacactaagaataatgtcactgcatcagttttta

SEQ ID NO: 15294 - DNA, 82 bp, Homo sapiens
ctggcgggcttccctgtcgccgttcgctgcgctgccgggctatgactttgcagccgtcctggagtggttcgcggagcgtgtg

SEQ ID NO: 15295 - DNA, 100 bp, Homo sapiens
aacagggttgcaaggaacaagaacgaatatttcaacttgaagttcaaaccttgtactactcagctgatcacaagctgcttgatgggaacctactagatgg

SEQ ID NO: 15296 - DNA, 100 bp, Homo sapiens
caggacctgacccaaccactgtctacgtggacatgagagccctgagacacgacagggaatctaagggaggaaattatcaactgtgcacaaggaaaaaaat

SEQ ID NO: 15297 - DNA, 82 bp, Homo sapiens
gtaaagaagactattcagaaaaagatgattgacgctcacaaacgtgcagatatctgatagccctttccgttgcactcaagag

SEQ ID NO: 15298 - DNA, 83 bp, Homo sapiens
atcaaaactgccttcagaagcaaaagatggattaccgggccttggtgcatgagcgagatgaggcagcctatggggagctcagg

SEQ ID NO: 15299 - DNA, 80 bp, Homo sapiens
ctgcacatccacactccgctgctcgacagggctgcgtccaaagaggactctgcggctggtgctctggactgcagaagaac

SEQ ID NO: 15300 - DNA, 82 bp, Homo sapiens
aagagttggatactcagcgtcgctggcagccgctgtacttgctgctgatgcaaggaatcccctgggctcccgtccactccac

SEQ ID NO: 15301 - DNA, 89 bp, Homo sapiens
tggaggcagaggtggcatggggagagccggacagggcagcggccggcactaccgcgctgcgatttgcgcagagctgaagaagcccctga

SEQ ID NO: 15302 - DNA, 100 bp, Homo sapiens
gggaaaaggccggagaaggtgaaattctgtgtgctccctccggcgagagactttgtcagctcccgcacagtaacatggagtctcactctgttgcccaggc

SEQ ID NO: 15303 - DNA, 98 bp, Homo sapiens
cctgtgcctgaccactgcccatggccaactctctgctgatgactggacttgactacacaagttgttgggctcataggcggaagggacttgccttgtct

SEQ ID NO: 15304 - DNA, 100 bp, Homo sapiens
tcccctctccttcctcctgaatctaggccgaaaacagaagatcccctggaactttcagcacatgatgatgttttcagaaacagatgattatgctgagatt

SEQ ID NO: 15305 - DNA, 75 bp, Homo sapiens
cttaaatactcatctactaggcaagcatggagttggcaccccaaaagaaagaatactcggtggagcaggcgcagc

SEQ ID NO: 15306 - DNA, 124 bp, Homo sapiens
ggacgagtccgacctctacaactgggaggtggccatcttcggaccccccaacaccctctacgaaggcggctacttcaagaagagagaaggcttctgccagctcctgcagcagatgaagaacaag

SEQ ID NO: 15307 - DNA, 83 bp, Homo sapiens
tccggaggttcacaacctctgtggtccgtaggagccactatgaggagggccctgggaaggatcatgaattttctaaaactgag

SEQ ID NO: 15308 - DNA, 98 bp, Homo sapiens
tttatgaaagcccaaatcacctgtacttggtcatgcagctatcaatgaactgagccatgttcaaatccctgttatgttgatgccagatgacttcaaag

SEQ ID NO: 15309 - DNA, 100 bp, Homo sapiens
gttgaagatgtccttaccagctttgacaatacaggaaatgtttgtagcccagccatgacccataggaatctgacttcctccagtctgaatgacatttctg

SEQ ID NO: 15310 - DNA, 155 bp, Homo sapiens
ttaatgtggatgcaccatgccagaccgtggaagatttaacgaatggggttgtgatggcccaggttcttcaaaagatacggagctaatagatctgtctacagtagatgtgattctcatctctaactatcactgtatgatggcgctgccatacatca

SEQ ID NO: 15311 - DNA, 83 bp, Homo sapiens
ggaaaaggaacaatattattctaaataatttagatttggaagacatcaatggcatcgttataacacccctgctcctgctgctt

SEQ ID NO: 15312 - DNA, 90 bp, Homo sapiens
ccaaggcagacattcaacacctttacatttagcagggtaaagcccacagcttgaagccaagcataaaggagaagctggcaggcagcccca

SEQ ID NO: 15313 - DNA, 90 bp, Homo sapiens
gggcccagtttatggcttccagtggaggcattttggggcagaatacagagatatggaatcagatgcagacagacatgctgaactatctgg

SEQ ID NO: 15314 - DNA, 76 bp, Homo sapiens
aagattaccattgttcacaatgaagactgcttctttaaagaccacgttgatgagcgaacaatatgcaatggaattg

SEQ ID NO: 15315 - DNA, 90 bp, Homo sapiens
tggagctacaacttctgaaggaggagaggagacgccgtgagcgggacgaccagatgtaccgagagcggctgcgcaccttgctggtcatcg

SEQ ID NO: 15316 - DNA, 80 bp, Homo sapiens
caaattcgaattccaaagatatcaataagactttgaccccgacgcaggcttcagtgattgccgcggatcagaagcctgag

SEQ ID NO: 15317 - DNA, 98 bp, Homo sapiens
agcgccggcaagagctcggtgctcgagaacttcgtgggcagaattccctgaccaggagcgcacccctccccaacgactcccaggcccgcagtggagct

SEQ ID NO: 15318 - DNA, 100 bp, Homo sapiens
ttttgtctccaaaataagagcagtgattaacgatattggggcataaggaaatggtggcaggcacttcctcctaacaagaaggaagtagttaaagaaaata

SEQ ID NO: 15319 - DNA, 98 bp, Homo sapiens
cagaggttagacttgtttcttatatgtgatgccattccagcactggactcatggaggctgagcatttattcaggactatcctattaagtgtaatctca

SEQ ID NO: 15320 - DNA, 75 bp, Homo sapiens
ccgattttgcgtgaattagaaaaggtcactcaagactgcttgcaactgattgcagacagtgaaacaccaactata

SEQ ID NO: 15321 - DNA, 73 bp, Homo sapiens
gaaaagatccggaagaaatatccggacagggtccccgtggttggaggcaaagtaaagaagcccggtaaacgtg

SEQ ID NO: 15322 - DNA, 100 bp, Homo sapiens
ggagagagcaagcagggaaagagagcgccaggtgcttagcagatgatgtctttctacctaaagatattgacctagacagtgtggatatggatgagacaga

SEQ ID NO: 15323 - DNA, 100 bp, Homo sapiens
gagccctgggcgctgcttgctaaagagccgagcacgcgggtctgtcatcatgtcgcgttacgggcggtacggaggaggtggagccgccaccaaaatgcag

SEQ ID NO: 15324 - DNA, 144 bp, Homo sapiens
ggatttccgaggcaagaaggtgatcgaactgggtgcggggacaggcatcgtggggatcttggcagcgctgcagggattataatgatgagatcaggcaagcacagctccaggagttaacatatttgaatggtggttcagaaaatg

SEQ ID NO: 15325 - DNA, 74 bp, Homo sapiens
cggcaagaagggggccagtgccaccaaacacgacagtgagggcaagaccgcgacttgattattcttagaaatgc

SEQ ID NO: 15326 - DNA, 100 bp, Homo sapiens
tcagccgcaagtacccgtccatcatagtcaactgcgtggaagagaagcttgcaaaccatactgggtacatcaaagttgactggcaacgagtggagaagga

SEQ ID NO: 15327 - DNA, 82 bp, Homo sapiens
agagaagacgctttacccgactctttgggccgttatctcacatttcctcctctgatgctcctcttcagcctttggtatcctc

SEQ ID NO: 15328 - DNA, 101 bp, Homo sapiens
aacagcagcaatgaccttccctcgggaattccacctctgcgtttttccctccaggggaacgcccttttgcttgtgactggcagggctgcgacaagaagttc

SEQ ID NO: 15329 - DNA, 98 bp, Homo sapiens
ctgcccagcccccattggcgagtttgagaagaaactaatctggattcactccctctggttgatacccactcaaaaaggacacttctgattaagacggt

SEQ ID NO: 15330 - DNA, 75 bp, Homo sapiens
gtggttgtgtggtcgcgtctcggaaaccggtagcgcttgcagcatggccaagatgctgaattatcagggacactt

SEQ ID NO: 15331 - DNA, 100 bp, Homo sapiens
tcacagaaaaagcaaggaggtagcttggaacctaacttctgttgaccttgttcgagcaagtgaggtgaatgaaaactttgccattgatttgatagcagag

SEQ ID NO: 15332 - DNA, 75 bp, Homo sapiens
atgggacctcgagtcactgtgaaaacctcggatcaattctcagctggtggcacaacaagtggcacaacagtatgc

SEQ ID NO: 15333 - DNA, 116 bp, Homo sapiens
gccgggcacctccgagcgcaaggacagcgcgaggtccgcgcagcccagcgcagccatacaatgcagatcttcgtgaagactctgactggtaagaccatcaccctcgaggttgagcc

SEQ ID NO: 15334 - DNA, 88 bp, Homo sapiens
cgcgtccgccgattcctcctccttggtcgccgcgtccttggctggcgtgtaaaccaagggaacatgccagggcttcagagcaccttcc

SEQ ID NO: 15335 - DNA, 80 bp, Homo sapiens
tgagcttcttcctatttgccatggatacttggtgttagatgaagctgatcggatgttggatatggggtttgagcctcaga

SEQ ID NO: 15336 - DNA, 82 bp, Homo sapiens
ctcgctccctctgctcttcctcccttcgctcgcaccatgggcgtgatggtgggcatgggtcagaaggattcctatgtgggcg

SEQ ID NO: 15337 - DNA, 75 bp, Homo sapiens
gggatcccaaatcggaagtgaattcggattgtttgctgggctggtgaattaccatatctccgtcaagtgcagtaa

SEQ ID NO: 15338 - DNA, 101 bp, Homo sapiens
gttgacggggacggccaacaaggcttccctgtgcatcagcaccaaaacgtgcagctgtggtcggcgcctttgtgaagagatgacggggcagtgccgctgcc

SEQ ID NO: 15339 - DNA, 100 bp, Homo sapiens
gatgagcatttggactttatccagtcacacctgcggaggttctgccttcagttgtacacctgtgaaaccactgtttggatcaagatacagaacattctgg

SEQ ID NO: 15340 - DNA, 78 bp, Homo sapiens
agggccttggaccccgcggcgcccctcggcctcggagcaacgagcgcagcgccggcatcaagcatgatggaaccatgt

SEQ ID NO: 15341 - DNA, 74 bp, Homo sapiens
accttataaattttttgagaagcatctttcaagtgtttactcatttgcctattgacgagatgcctgaggctgcc

SEQ ID NO: 15342 - DNA, 75 bp, Homo sapiens
gtcgtcttccacttgcacgaaagctttcctaggccaaaaagaggttatatgtcaccacacccatctccattagga

SEQ ID NO: 15343 - DNA, 100 bp, Homo sapiens
tccaccccacctgggccccagaccgtgctgatcttcgatgagctctcggattccttatgcagagtggccgacttggtcttagtggtgcaatggctagtat

SEQ ID NO: 15344 - DNA, 100 bp, Homo sapiens
tgggcctgcaggtctctgtcgagcagcggacgccggtctctgttccgcaggatgacttaattcagtgcacaaatgagatgaatgtgaacatcccacagtt

SEQ ID NO: 15345 - DNA, 75 bp, Homo sapiens
gggtccctgaagagggaagacacgcggaaacagggagcgctgacccagctgatccagctctatcatcgcttccac

SEQ ID NO: 15346 - DNA, 100 bp, Homo sapiens
cccggccctcagagctcagccggatgagcgcagcccagagacagcagcttctgttttttattggcacctcagtctcaacattttcttttcggattcatga

SEQ ID NO: 15347 - DNA, 100 bp, Homo sapiens
ttttgcgattacggcaacactggaaacttcgaaaagttggagataaaattctcggagatctgagctacagaagtgcagtttaattggttggggtcagata

SEQ ID NO: 15348 - DNA, 98 bp, Homo sapiens
gcaccagcctcactctctggtttctgagggtttcacagtcaaagccatgatgaaaaactcagtcctatatgttctcctttcagccaagacctttcacc

SEQ ID NO: 15349 - DNA, 100 bp, Homo sapiens
ggaagatggcgtctcccacagacgatgagcagcaccagcagtaagagggctccgaccacggcaacccagaggctgaagcaggactaccttcgcattaaga

SEQ ID NO: 15350 - DNA, 90 bp, Homo sapiens
cccaaatcaacccagatttggtcaggttccgccaagacgtcaccaagtgtcttttcctaggtattatttccattccaccttttgccaact

SEQ ID NO: 15351 - DNA, 100 bp, Homo sapiens
tccatatagggagaactgctcagattggccatgtctatcctgcatgttcacgccccgcgtcatcggcacagctgtggccaggtataactttgccgcccga

SEQ ID NO: 15352 - DNA, 75 bp, Homo sapiens
cgagtgaccgagaccgcggccgggaccgagggaaggtgctcgggtcttcggggcactgggtcccatcggtccctc

SEQ ID NO: 15353 - DNA, 100 bp, Homo sapiens
tttgatttctctagtggacagataacccaagtcaaatctaagcatttaaaagacaggctaaagaattacctccaaagccattgtcaagaccacagcagtc

SEQ ID NO: 15354 - DNA, 98 bp, Homo sapiens
gcaggtccgacttcaggctcggaagtggctggaagagcagctcaaacagtacagggtgaagcgccagcaggagaggggtctcactctgtcgcccaggc

SEQ ID NO: 15355 - DNA, 51 bp, Homo sapiens
cacgctgtccccgcagcccggcagcggtacgtgaacacactcctgaaactc

SEQ ID NO: 15356 - DNA, 82 bp, Homo sapiens
ctcagggagagcgggcagccttccaggtggacaggagggcctgaggctatggcaggaggagcaggagaggaaggtgcaagcc

SEQ ID NO: 15357 - DNA, 128 bp, Homo sapiens
tttcttcatgaccctgcccttgccagaatttcctgcgctgttccacctcattcaacttcagggattgtcaatgaggcagatcagattccgatttgacgggcaaccaatcaatgaaacagacacacctg

SEQ ID NO: 15358 - DNA, 101 bp, Homo sapiens
tggagccggccttgaggtggaggactcagaccctgagcctgaaggggaggcggaggacagagtgaagatgtctggctggaagcagccaggttgcagcctgg

SEQ ID NO: 15359 - DNA, 76 bp, Homo sapiens
ggattatctcaacattctgttggaagagaggatggtgatgcaccggttacaaaagatgagaccacctgcatttcac

SEQ ID NO: 15360 - DNA, 82 bp, Homo sapiens
tgaaggtcacaccacagcgcgtgtcgtgaaaactacccctaaaagccaaaatgggaaaggaaaagactcatatcaacattgt

SEQ ID NO: 15361 - DNA, 74 bp, Homo sapiens
actggatgaagaagcgcggccttcacacatcccagccggtgactgcagtgaggccagtgacatcctcatcctcc

SEQ ID NO: 15362 - DNA, 98 bp, Homo sapiens
ttgctcaccccgcaggagaacgagtccctcttcactttcctcggcaagaaatgtgtgctttcggaaaatgtgattgatcgaatgaaggaatcctctcc

SEQ ID NO: 15363 - DNA, 83 bp, Homo sapiens
gtcactactgcctgcctgcctgcctgctacggtaaaataccatgaagattttgaaaaaacaaaggggagaggctttactcccg

SEQ ID NO: 15364 - DNA, 86 bp, Homo sapiens
ggaagatactgcagagatattctactccatctcattcattgtacagtcttcccatgcacaagatgattaatacagatcttagcaga

SEQ ID NO: 15365 - DNA, 100 bp, Homo sapiens
tggcgaagcacgagcagatcctggtcctcgatccgcccacagacctcaaattcaaagaaatgcactcggtgatggaaagagagccactattctgaagaac

SEQ ID NO: 15366 - DNA, 98 bp, Homo sapiens
ggccccaccctgggcagtatagagacgtcggacttcacggtggagtttgtccatatgctcaatgctaccatgtgcgccactacccgtaccatctgcgc

SEQ ID NO: 15367 - DNA, 73 bp, Homo sapiens
ttgcttcacttcaggctgttatgaaagagccaacacagatctatagatttcttcgaactcggaatctcatagc

SEQ ID NO: 15368 - DNA, 82 bp, Homo sapiens
tgaagttcgagcactaatatttaagaaagaagatgttaactttcagaaatcgagctatagcagattatcttcgttcaaatgg

SEQ ID NO: 15369 - DNA, 96 bp, Homo sapiens
tccactcttaacatatcagtaagtgagtgatggatgaagtgaagaggtcaacgtggaggtaccaggccaccatgctcagtctcaagctgccccaac

SEQ ID NO: 15370 - DNA, 97 bp, Homo sapiens
cccgcctccccggccacgcgagcgggaacagtctcctccactcggagcggtttattccctgctgtcctgaatcttgcttctaatgctcttatcacga

SEQ ID NO: 15371 - DNA, 50 bp, Homo sapiens
ttctgggccagaggaagagaatgagtctgggttctgcccgcacacattcc

SEQ ID NO: 15372 - DNA, 80 bp, Homo sapiens
ccaaaccccagctggaactccggccacagccagcatgcaggtaactaggatttctacctcaaccgcgagacctatgcaag

SEQ ID NO: 15373 - DNA, 98 bp, Homo sapiens
ccacacatccccgaccacttgcggcctgagtatgaacatacggtccctaatgagcacagagaagaccaagggcttctgccagctggtggtctcgtcca

SEQ ID NO: 15374 - DNA, 51 bp, Homo sapiens
gtacgcggtgctgcgagggcagaacctggactgcttttggcttctggatgc

SEQ ID NO: 15375 - DNA, 83 bp, Homo sapiens
ccacactcacctctctctgctcatgcaggctgtctgtccccagaccccagagcacgtccggcaccaccatgactgggctgttg

SEQ ID NO: 15376 - DNA, 128 bp, Homo sapiens
gcagagaagggtatctgaaaaggaaaaggagagtattgccagagcaagagctggatctcgtctttctggcaggtaagccccctcccggtttacatctggatgtagtcaaaggagacaaactaattgag

SEQ ID NO: 15377 - DNA, 75 bp, Homo sapiens
gactaccacccccatgatggggatgaggcctaaatgtgcacagcatgctcaagcaccagacgctggtcctgacgc

SEQ ID NO: 15378 - DNA, 75 bp, Homo sapiens
ggagatttggagcccattttagaggcatctgttctatcttcccatcataaaaaacctgtgccatatttcgggagg

SEQ ID NO: 15379 - DNA, 95 bp, Homo sapiens
cggagagctgcaagccggtgcagcagccttcagcttttggcagcatgaaagttagcacactctgttttctacagtggacactgatgaaataccag

SEQ ID NO: 15380 - DNA, 75 bp, Homo sapiens
gtttgagaaccccgatcagaatgccaaatgtgtttgcatgctggctatcagttgagggatttgcagttgataaaa

SEQ ID NO: 15381 - DNA, 50 bp, Homo sapiens
agcttcacctccatgggcatcaacatggctgaccccgcactacatctacc

SEQ ID NO: 15382 - DNA, 82 bp, Homo sapiens
cccgcttccccatcatcgccagctgcacactcttggggctctacctctttttcaaaccctggcctcccacgactacatcctg

SEQ ID NO: 15383 - DNA, 100 bp, Homo sapiens
gcgactccggagacagcccaaatatcctcggaagagcgctcccaggagaaacaaggcaagaagtacaagcccctggacctgcggcctaagaagacacgtg

SEQ ID NO: 15384 - DNA, 98 bp, Homo sapiens
atcctctcaagcaccttaaagacgtttaagacgagccgttatttcccaaccagaaatttatccagttggcgaaggactttgaggatttccgtaaaaag

SEQ ID NO: 15385 - DNA, 100 bp, Homo sapiens
cgacgcggcctgggaggataagaaatggtggagtcaatgaagaaagtagcagggatggatgtggagctgacagttgaagaaagaaacctcctatctgttg

SEQ ID NO: 15386 - DNA, 100 bp, Homo sapiens
acagatgtccaaaaagactcctgactgctgaggaacagcatatgccatatatgagctggctgtggcttcatttcccaagaagcaggagtgacttcagtca

SEQ ID NO: 15387 - DNA, 101 bp, Homo sapiens
catgaagagactccagaaagggatcgggagcggtgccgagaaaaatttccttactagatgacatttcatcgcaatgtccgatcgtttggggcaaattacca

SEQ ID NO: 15388 - DNA, 100 bp, Homo sapiens
taaccttgaatggcgactagatgtacagatgaagttggagcccttgtttttgacattggatcctatactgtgagagctggttatgctggtgaggactgcc

SEQ ID NO: 15389 - DNA, 100 bp, Homo sapiens
tcgctcacctggatgacaacgagaggagggtccgcaagcaggtggtgaacatcccgtccttcattgtccgcctggattcccagaagcacatcgacttctc

SEQ ID NO: 15390 - DNA, 83 bp, Homo sapiens
cagaggtggccaataagttcgccaaagcgacaggagctgtaccaggtcatcagtacaccatctgatattttcatggtgatgga

SEQ ID NO: 15391 - DNA, 100 bp, Homo sapiens
acaaccggacccagcatgtgaaccaaggccaagtcttccagatgacctttagcttcagaggatgattccgaagaagacggagaccataacaggacatttg

SEQ ID NO: 15392 - DNA, 82 bp, Homo sapiens
cccagttcatccagcgtgcaagcccgacggccatggaggctgaagagacgatggaatgccttcaggagttccctgaacatca

SEQ ID NO: 15393 - DNA, 90 bp, Homo sapiens
cgcctcctccacaccccccgccgcagcagcaccggcgacagcagctccacagctgggtcctgctcctcagacaagatggggccagaggcg

SEQ ID NO: 15394 - DNA, 76 bp, Homo sapiens
ctgggatgatacaccttttccacagggaattgagttggtcccaggagaaaaaggaagaagctatcaccttactgaa

SEQ ID NO: 15395 - DNA, 100 bp, Homo sapiens
tgcagagatcagagtactaagagacagacaacaagggaggtgtcacagttttccatttagatcaacaacttcaagttcttaccatggaaaattccgagaa

SEQ ID NO: 15396 - DNA, 75 bp, Homo sapiens
tacggtttacagcgaagtccacccagcgtttccgagctcgcaaaggatctccttcatccctctccagaagaggag

SEQ ID NO: 15397 - DNA, 98 bp, Homo sapiens
tggctgccgtcatcaccatcaccttcaatccgctctactggaatgtgcttcttcgtgatcaatttaattataaaccaattttgacaaaaaagcagttt

SEQ ID NO: 15398 - DNA, 109 bp, Homo sapiens
ttttctcaggtgaaaggagcagtagatgatgatgtagcagaagacacgaatgcagagtttgagtccagatcccaaagcccagtacacaagtatctacggagccctcaag

SEQ ID NO: 15399 - DNA, 100 bp, Homo sapiens
gctgcacagacataccatggctgctgctcttcatcctcttctgcattgggatggtgaggtagccatcttgaggatgagggaagatgttggaagaatttta

SEQ ID NO: 15400 - DNA, 88 bp, Homo sapiens
cgcgcgctgagggtctcggggcgggcgccgcgggacctctccgggccatgggtgtcgtgaaaactacccctaaaagccaaaatgggaa

SEQ ID NO: 15401 - DNA, 100 bp, Homo sapiens
gcaggatggtctggaggctggtcctgctggctctgtgggtgtggcccagcacgcaagaatggggaatgcatcagcaacccccacacccccctccagatca

SEQ ID NO: 15402 - DNA, 90 bp, Homo sapiens
aagtgctgctgccccgaggcccttgatcatggccttgccaggttggtgacagtatattgtgagcatggtcataaagctgccaaaatcaac

SEQ ID NO: 15403 - DNA, 75 bp, Homo sapiens
tatacactcttagtgctgtccaggcagtgatggtttcagaaaattttgatatagaggcccctaactatttgtcca

SEQ ID NO: 15404 - DNA, 98 bp, Homo sapiens
tatgctgggtccagagcattgtccagactgccaaaccaaacaggaagcttacttttctctacctagccaatgatgtcatacagaacagcaagaggaag

SEQ ID NO: 15405 - DNA, 99 bp, Homo sapiens
cacaagtatgtatatgaatgatggctatgcaccacctgatatcaccaactctgatgactatcagccagttcgtctgctcagtaaacctggggaactgag

SEQ ID NO: 15406 - DNA, 100 bp, Homo sapiens
gggcacatgggagtccccaaaattacattgccaagatggttcacaggcaccagccagaccccctaaaccacgaccgcgcaggactgcaccagaaattcac

SEQ ID NO: 15407 - DNA, 85 bp, Homo sapiens
aaccggctggctgcagacccgattgtgatacaggttccagcccttggggacagtagtggttggccagatggttatgaagatctgg

SEQ ID NO: 15408 - DNA, 50 bp, Homo sapiens
ggactgtgggcatggaatgaaaaagtcctcagaatggttggaatgaccct

SEQ ID NO: 15409 - DNA, 82 bp, Homo sapiens
atgtgtatcctgtgaccattctatctggggataacctttttgaatggcacttcacggttagagggcccccagactccgattt

SEQ ID NO: 15410 - DNA, 126 bp, Homo sapiens
cctaaacctgtgcaggcacttccgggcgccggattccgggataacaaaattccagtcaatttgccggtgattgatgagatttatcgtgtgttgagatatgtcaattctaccagagcccctcaacga

SEQ ID NO: 15411 - DNA, 100 bp, Homo sapiens
agtatcgctacttcaaagggtactttttagaaccaaagcccagctgcagctccagcaggtggcgctgcagcagcagcagcaacagcagcagttccagcag

SEQ ID NO: 15412 - DNA, 100 bp, Homo sapiens
gagaaacttaaaagatctggctcaccgaatagccagtggcgaagagatgtttctttctcagcaaaatagaggagaagcttacccctcttccagaagataa

SEQ ID NO: 15413 - DNA, 101 bp, Homo sapiens
gtccctggcattttaggtgtcggttgggtagatgattcacagcgtaagcagtatgaagagtggctccaggagacccaacagctgcttcaaatgcagcagaa

SEQ ID NO: 15414 - DNA, 90 bp, Homo sapiens
cagtacagcgttcacaagacttcatcacctctttgtacatcttctgcaattactcggttttgcggctagttggctattcaagaaacctcg

SEQ ID NO: 15415 - DNA, 100 bp, Homo sapiens
ctgccatgattgtgaggcctccccagccacgtgaaacttggacatcctcatcatggatgatgacgacgtccccagctggcctcccaccaagctgtccccg

SEQ ID NO: 15416 - DNA, 51 bp, Homo sapiens
aagacccagcttggggctgtcaaagtttccgttactatggcaatgacggca

SEQ ID NO: 15417 - DNA, 100 bp, Homo sapiens
gtcattataccttcacccagcatttcatccctcgtcgaaaggattggattggcatctttagagatccgagccaggagacactgagcctttggagttagga

SEQ ID NO: 15418 - DNA, 90 bp, Homo sapiens
tactcggaaggcgcgggcaggagcctggcgaggatgcaccttcccctgccttggaaaggtagacgttacatccaagaggaaataatccag

SEQ ID NO: 15419 - DNA, 87 bp, Homo sapiens
gggatgtcgctgctggttcgggcagagtccgacgccaatcctgaggcaaaagaaacattttaattcactgcacattccaaaagcctt

SEQ ID NO: 15420 - DNA, 96 bp, Homo sapiens
gggcaaacctcgcgaggagaagaggacggccctgagcaagatggctctgagagattcctctgcgaatctgtttttagctatcaagtggcatccacg

SEQ ID NO: 15421 - DNA, 75 bp, Homo sapiens
gcgtctgccgctggattgtgataggaagcagagtgttcgtgtgtttttggctttcacccccaaccagtgaccaaa

SEQ ID NO: 15422 - DNA, 121 bp, Homo sapiens
cccggatacgtcaatggacagctacgccaaatctctactacacggccgatgttacgacaggtcatcactcctgaagaaatcattcacccggatgtggacgagcactcagttatgacttacc

SEQ ID NO: 15423 - DNA, 83 bp, Homo sapiens
gtagacgaagtcttttggaatacaaggattgtaccgattttgcgtgaattagaaaaggaactccatccggcacaacctgtcac

SEQ ID NO: 15424 - DNA, 100 bp, Homo sapiens
actacagctggtcctaccagaccccaccctcatcacccagcagctccagctcccggaagtccagcatgtgcagccccgacgaagacccatcatgagcaac

SEQ ID NO: 15425 - DNA, 98 bp, Homo sapiens
ggtggacaggtcagcggtggcagtgtacagttatagctgtgaagatcactttgggaagcagtgacatccaacctgtatcaagtcttctaatctgtgaa

SEQ ID NO: 15426 - DNA, 100 bp, Homo sapiens
caacatgtctgtacctactgatggtgctgtaaccacctcacagattccagcttcggaacaagagaccctgccgcggcgagtcctttgcacatgttggcaa

SEQ ID NO: 15427 - DNA, 50 bp, Homo sapiens
caggatattgagagacattatcgaaagtcccctgaaaagcaaaggcctca

SEQ ID NO: 15428 - DNA, 90 bp, Homo sapiens
ctacatctcaacagtactagcagattgggctgacaatgttaccagaatccgtagaagctagccctgtggtagttgagaaatccaacagtt

SEQ ID NO: 15429 - DNA, 75 bp, Homo sapiens
ccttagaaaaaatgtggcagttgagaaagatcagtctaaagaaaaggagaagaaagtgaaaaaaacaattccttc

SEQ ID NO: 15430 - DNA, 100 bp, Homo sapiens
gcaggaggaggaggaggggctccggctggtctgtggtgagggcagcgaggtcacaggccccacctttgctgatggcgagctcatccccagggaacccggc

SEQ ID NO: 15431 - DNA, 83 bp, Homo sapiens
ggaaggagaaacaaacttcagctctgaaatagaagatcttgcaagggatgacactcctgtccaggacactaaaatgtgaagaa

SEQ ID NO: 15432 - DNA, 83 bp, Homo sapiens
cgggcgacctgggcaccagcaggacccgaggccaggagccaggggcccagaaggtgaaatgacaatggatgctctgttggctc

SEQ ID NO: 15433 - DNA, 83 bp, Homo sapiens
atagcccagtggatggccattccaggcatttccggagagttcttttgaagtcacttcagaaggatctacatgaggaaatgaac

SEQ ID NO: 15434 - DNA, 87 bp, Homo sapiens
tggtgatatacatggagagtctggccttagcacatgcagatgagaagtccttaggacctctggtcctcaatcgagttcctctacgaa

SEQ ID NO: 15435 - DNA, 102 bp, Homo sapiens
aaataagacaagctttcaagaaattggcattgaagttacatcctgataaaaacccggaactgtggctgcaccatctgtcttcatcttcccgccatctgatga

SEQ ID NO: 15436 - DNA, 97 bp, Homo sapiens
ctacttcctcagcagcaccttcaagcagtaacgtgcctagtgttgggagcctagcagatccagactatctgaacacaccacagatgaacacacccgt

SEQ ID NO: 15437 - DNA, 75 bp, Homo sapiens
tcaacctgcgcccccagatgtcccaggacctcagcaggaccccaggctatactggcaggggggcccagcactggg

SEQ ID NO: 15438 - DNA, 101 bp, Homo sapiens
ctgagagtgacctttgcatctgcctgtccagccagcatggaaccaaagcggatcagagagggctaccttgtgaagaagttccgaaagacccgaaaccccag

SEQ ID NO: 15439 - DNA, 98 bp, Homo sapiens
gccacctgccgcaacctggccgatcgctacgagtgccattgcccccttggctatgcaggccctgaaggccctacaggacatgagctccacagcacccc

SEQ ID NO: 15440 - DNA, 82 bp, Homo sapiens
ggccaagttcgaggggaaaccgctgcttcagagacacaggctggagtgcaatggcacgatctcggctcaccgcaacctccgc

SEQ ID NO: 15441 - DNA, 116 bp, Homo sapiens
gtaaaatgcgaattccacattctcatgcatttattgatctgactgaagattttacagcaggcaaaataatcctatggtgaaaaaaatcaacaagataatctctgcttgagaaaaag

SEQ ID NO: 15442 - DNA, 100 bp, Homo sapiens
gcacctccatcacgacccattcaggagcctccaggagcccagacaccagccccccaccatggctgaaggtgatgtggccgccctcaaccgacgcatccag

SEQ ID NO: 15443 - DNA, 83 bp, Homo sapiens
ggaaaaggctataccaaagaccaagtagatggagttctcagtgtttacgaaaatggggttacagaagatgtgaagatatttgt

SEQ ID NO: 15444 - DNA, 88 bp, Homo sapiens
gccacgcgggcgagcggctgtgtggatgtcggcgaagccgcgggcgagaacccagcgggtgccgcttctccacccgaggcttccacct

SEQ ID NO: 15445 - DNA, 48 bp, Homo sapiens
tctcgcccaccgcccgaaccgaactgctgctggagtttgaatcgaaaa

SEQ ID NO: 15446 - DNA, 82 bp, Homo sapiens
ctccgggttccccggctcgcggggcccggcgaagggcagaacaagttgaaatcatcgcagaaggataaagttcgtcagttta

SEQ ID NO: 15447 - DNA, 114 bp, Homo sapiens
tggcgatcgctggagctaaactggagccgtccataggggtgaatgggggtgtcatggagaaactccagctgggcccagagattctgcagcgggaaaatccaaggcttatttatg

SEQ ID NO: 15448 - DNA, 100 bp, Homo sapiens
ttcttcacggaccagtttcagttcgccgatgggaaacccggagaccaaatccttgggtgaaaatcctatttataagagtgccgtaacaactgtggtcaat

SEQ ID NO: 15449 - DNA, 100 bp, Homo sapiens
agtgagacacaatttatcattgaataagtgttttaagaaagtggacaaagagaggagtcagctcccctttgaattggagatttactacattcagcatgtt

SEQ ID NO: 15450 - DNA, 96 bp, Homo sapiens
cttcccctcctgtctccagttctccacgctctgtctcctcaacctctacctggcggaggtgtccaaggcagctgcagatttgatggcctactgtga

SEQ ID NO: 15451 - DNA, 100 bp, Homo sapiens
gagcggagagtggacggtgtgagggggaccgggagaggcaccaaatctggcctgggggcccgagaagcttcctctcagatatatttttgccatcatggat

SEQ ID NO: 15452 - DNA, 128 bp, Homo sapiens
aaaaacgagaagcagtaaactcactgcaggaggaactagctaatgtccaagaccatttgaacctagcaaaacaggttacccatgcagttgttactgtaccagcctattttaatgatgcccaacgccaa

SEQ ID NO: 15453 - DNA, 100 bp, Homo sapiens
gggcagctggagcctcaggcggcagcgcttctaggatgaagatttgataaagtggaaggcactgtttgaggaagtccctgagttactcactgaggcagag

SEQ ID NO: 15454 - DNA, 98 bp, Homo sapiens
aggaactcccggggaagaagctgctctctgagaaaaagctggtgatgctgcattaccgctcagacctgctccagatgctggacacactggtcttctct

SEQ ID NO: 15455 - DNA, 101 bp, Homo sapiens
tggacttcatgcttagatacatgtataacaagagcttctcgaaacaagtctgagaagaagcgtcgggaccagttcaatgttctcatcaaagagctcagttc

SEQ ID NO: 15456 - DNA, 75 bp, Homo sapiens
cgggctggtgcagccccgggccaggccgcggccggggcaggagcgcaggatttgaccctaaagcatggctggagg

SEQ ID NO: 15457 - DNA, 75 bp, Homo sapiens
ccgcagggatgaacctcgagttgctgggttcgagaaatggctgctactaccttaagcggtctgctacagtgtaac

SEQ ID NO: 15458 - DNA, 50 bp, Homo sapiens
tgggccctggcatggccgacatagtgccatacacagaggctgcctctttg

SEQ ID NO: 15459 - DNA, 50 bp, Homo sapiens
attccatgtagagacccctggaggcctggtactgtggcgctccgtgaaat

SEQ ID NO: 15460 - DNA, 83 bp, Homo sapiens
ctgcggctctctacgtccctgcggagcagccggaagcgttgttgacgaccatggacatcatccacgatggatttggattcatg

SEQ ID NO: 15461 - DNA, 83 bp, Homo sapiens
agggcctgcagcgggagctggacggcgagcgcgagcggcgcgagaaagtgaaagaaaatggcccgaaccaagcagactgctcg

SEQ ID NO: 15462 - DNA, 97 bp, Homo sapiens
acccggacacctggaagctgggaaatgatatgaagatcaatgatgcagactgatggttttgatgaagctgggcatttataactagattcattaagga

SEQ ID NO: 15463 - DNA, 100 bp, Homo sapiens
caagtgttcgccgccttctggcagcggtacccgaatccctataggtgagcacctgcggatctgtccccagggctacacctgctgcaccagcgagatggag

SEQ ID NO: 15464 - DNA, 83 bp, Homo sapiens
cttgccaggaagagaaaatagatgccttacagttagaggtgaaatgacaatggatgctctgttggctcgattgaaacttctga

SEQ ID NO: 15465 - DNA, 100 bp, Homo sapiens
ctggcaagagatcttcgagggattgcctttgcactgaacacaaagaccagctacaccatgctgtttgactggatatattgatcagtggaataaagttatt

SEQ ID NO: 15466 - DNA, 100 bp, Homo sapiens
taggcattctgatgggaacttgtgtgttaaagtaacagatgatttagtttgcacaaaacaacttgcagcagcttttcatgaggaatttgttgtgagagaa

SEQ ID NO: 15467 - DNA, 88 bp, Homo sapiens
gacgttcggctactacttaataatgacaatctcctcagggaaggggcagcacacttttagaatgattccatacccgttagagaaagga

SEQ ID NO: 15468 - DNA, 142 bp, Homo sapiens
gggcccacccaatgctaatgaagactacagagaagcttcttcttgtgccgtgaacctcgttttgagattaagctgtgttgggagtggaagaggaggaggcccccgacatcggcatataccactgcccaaactatgagaaaac

SEQ ID NO: 15469 - DNA, 100 bp, Homo sapiens
caagaaaccccgccatggaggcttcattctggacgaggctgtgatcaataatgacaaccctttagaatcaaatgatgaaaaggagggccaagaagccact

SEQ ID NO: 15470 - DNA, 75 bp, Homo sapiens
tgaaggtggaggcagcgcggctctcagcacccaactggtcagctaactttgatgtcccaatggaaacaacccacg

SEQ ID NO: 15471 - DNA, 99 bp, Homo sapiens
cctcgggcggcatgacggatccagagaaactcatcaggatttatcctgtgaacagcagagaatttcaaaggaccttgctaatatctgtaagacggcagc

SEQ ID NO: 15472 - DNA, 75 bp, Homo sapiens
acatctggttggcaatatgatactcagtgttcactggcaggaggtggatattcagagtcaaagaaggatgatgct

SEQ ID NO: 15473 - DNA, 75 bp, Homo sapiens
caacaagagcgacctggtgcgctctcgtgaggtctcggtggatgattgttgatccatttcagatacttgtggcag

SEQ ID NO: 15474 - DNA, 100 bp, Homo sapiens
tccatggccaactccttcgtgggcacgcgctcctacatggctgttccagcttcctggggcctggaactttccctgagtccttcccacccaccacgcccag

SEQ ID NO: 15475 - DNA, 50 bp, Homo sapiens
gtgttcttgactccgctgctcgccatgggcgatgccagtccctccactcc

SEQ ID NO: 15476 - DNA, 88 bp, Homo sapiens
cagatgattttgcagacaaagaagtgacaggggcaattccaaaagtcttcagatttccaaaaggaaggactgcagcagacatttctgc

SEQ ID NO: 15477 - DNA, 87 bp, Homo sapiens
cgcctagcagtgtctcgggtcatcacttggacaacagaacccaaaagttctgatgttcggaagggtgtgtttgaccatcgaatgaag

SEQ ID NO: 15478 - DNA, 75 bp, Homo sapiens
catttagagctgcggaacaggacgccctctgattcgtgagatggagaataaagaaactctcaaagggttgcacaa

SEQ ID NO: 15479 - DNA, 83 bp, Homo sapiens
gagcactaatatttaagaaagaagatgttaactttcagatataattggtgattacaactttcctctataaattaactcttgac

SEQ ID NO: 15480 - DNA, 123 bp, Homo sapiens
ggatcatggcggatggccccaggtgtaagcgcagaaagcaggcgaacccgcggcgcaataacggtactaggttttgacaagcttgcatcatgcgtgagtataagctagtcgttcttggctcag

SEQ ID NO: 15481 - DNA, 90 bp, Homo sapiens
acattatgaacccaccactgggcaaagaaagtatccctttattactactttgtaaccagggaggtgatgcagcgtgacatagcagccggc

SEQ ID NO: 15482 - DNA, 78 bp, Homo sapiens
acctcaacccaggagttaaaaaggtgagaattatgaagatgatgacctagtaaattctgatgaggttatgaagaaacc

SEQ ID NO: 15483 - DNA, 101 bp, Homo sapiens
aaactgtgggctgcggtggctctggagctggtcagcgtgactctgccgttacctctgtccccttggagcttcagtttcagcgactcacccgagaactggaa

SEQ ID NO: 15484 - DNA, 100 bp, Homo sapiens
gattattctataaccaagagagcgcacacaccaacaccaggcatctacatgggcagaccaactcaatatggggagattgttaacattaatctcgtgcggg

SEQ ID NO: 15485 - DNA, 74 bp, Homo sapiens
tctaacgctgcctttgctttaaaacagtattacttgcgtgtaaacaggaacatcgataagtagtgtaaaaactt

SEQ ID NO: 15486 - DNA, 100 bp, Homo sapiens
tgggtccaggaaaagtgtttggggaattggctattctttacaactgtacccggacagcgaccgtcaagagctctgtgttagtggattcacaagcaacctg

SEQ ID NO: 15487 - DNA, 74 bp, Homo sapiens
atttcttggtgattacaggtgggatccaagtggtgaaatactggccagagatttcatcaagccatggattcttg

SEQ ID NO: 15488 - DNA, 75 bp, Homo sapiens
tacaaaggacaacaatattagagtaattggagatttccttgatagctgccgtgccagtactctattggctgagct

SEQ ID NO: 15489 - DNA, 76 bp, Homo sapiens
agggctaaatggaatgcacagaacctgctgtggaagtttaaggaagaaatctctaaacgttttaaatcacatactg

SEQ ID NO: 15490 - DNA, 50 bp, Homo sapiens
cacaagatcgtcttctttaaaggcactttcccacacaggatggagccggg

SEQ ID NO: 15491 - DNA, 100 bp, Homo sapiens
gcagaacctgctgcagcagaagagcttctcagatgaccaagatggtgctgcagatggtgctgaggatggagaacccaccaagccccgctaggagccacct

SEQ ID NO: 15492 - DNA, 75 bp, Homo sapiens
gtggagcggtacatcgcctcggtgcagggctccaccccgtcgcctcgacaggagaatgaagtttctagattagaa

SEQ ID NO: 15493 - DNA, 98 bp, Homo sapiens
cggagagcgggcattctggaaagcgtgggggtaaaggcagcagtaatgctaacgctagcaagtaaactgaagcgtgacgatggtctcaaagggtcccg

SEQ ID NO: 15494 - DNA, 82 bp, Homo sapiens
tgctgttgcggccgctgccccagggctgcggggacggtccctgtgcgttttattgcgacctgccggtgggaactttgtctcc

SEQ ID NO: 15495 - DNA, 100 bp, Homo sapiens
aatcataccatatcagatgcctcgcagagcaccaggcccaccgtgaaaggagtgggaatagctttgcgaaaaatgggcgcaatggccaagccagattgta

SEQ ID NO: 15496 - DNA, 90 bp, Homo sapiens
ggaacccacaaaatgacttgcagaatgcttcagacatgcctgaaacaatcaccagccgggatgccgcccgcttccccatcatcgccagct

SEQ ID NO: 15497 - DNA, 101 bp, Homo sapiens
gggaagagcacacagattcctcagagtactattaatcccgtagatgcaatatatcaacctagtcctttggaacctgtgatcagcacaatgccttcccagac

SEQ ID NO: 15498 - DNA, 100 bp, Homo sapiens
gccgagagggcgggccagggccgcactccggagactcgcggttgctacgcgcaccatggctggagattagcctgaggcctgctcagtcgttcctaatgaa

SEQ ID NO: 15499 - DNA, 82 bp, Homo sapiens
cgaccccagtcggtgctccggggaggtcacctgacgaggaggcaatactgaacactgcgcagcttgcagaggtctcctggca

SEQ ID NO: 15500 - DNA, 75 bp, Homo sapiens
aggagttgatggcagtttcaataacaggtcattgccgagaaaaggctgtattcatcaccaaagaaaaaacttaca

SEQ ID NO: 15501 - DNA, 143 bp, Homo sapiens
ttgttggggagaagaggattggaggtgtcagtgttaaaggaacctctacaacgaaggtgaagccacggaagataaggttctgggccggagaaggggcgacgttcgggcaccccccgaatggacaatctttccttctgtcaacg

SEQ ID NO: 15502 - DNA, 100 bp, Homo sapiens
cagagtcgggagagctttctggatgatgtaaaccttattctggccaacagtgttaagtataatgtggccactgcctccaccatggctgaggctttctcta

SEQ ID NO: 15503 - DNA, 100 bp, Homo sapiens
cgacgttacaatggtggagttggcaggtgtgcgcaggctcaagaatgggacatggacgcccggcggccaatgccttttcagttcccaccctttccagata

SEQ ID NO: 15504 - DNA, 100 bp, Homo sapiens
catacctctatgaatctttaagtgaaaagcaaggcatgacacaagaatcctttggtgttcctccaagaaaagctggttatattgaagacctggttttgat

SEQ ID NO: 15505 - DNA, 95 bp, Homo sapiens
caggaggggcaactgaagacggaggtgcccaaggtcagaaggaagcaccacacagaggatgttgcagctcggggcttagatctccctcaagtcac

SEQ ID NO: 15506 - DNA, 100 bp, Homo sapiens
ctagtattaaagattctgatgtcgaaggtggagaggtcctttacttggtgcattactgcggatggaatgtgagtagacccaaatgatttgtacattgtag

SEQ ID NO: 15507 - DNA, 100 bp, Homo sapiens
tgcatctgatgctctctctccagtccttgctgaagagactttccgttacatgagtgaatgaactggtgcaggtagaaacgtacctccgcagtgaaggtgt

SEQ ID NO: 15508 - DNA, 75 bp, Homo sapiens
ggcggcggagggagatggtgcgctggctggtcagctgtgccacagagattggcttgcagggtggcccccgctccg

SEQ ID NO: 15509 - DNA, 75 bp, Homo sapiens
agcatatacttttgaaggtgcaagatactatataaaagcaaacatgaacgttggagttgcccacagtgaagtgaa

SEQ ID NO: 15510 - DNA, 83 bp, Homo sapiens
cgcaaccattgacgccatgtcgggttattcgagtgaccgagaccgcggccgggaccgaggggttgtgagtcccggcccagccc

SEQ ID NO: 15511 - DNA, 82 bp, Homo sapiens
gggccagtcttaaatatctacccatggaataaagagctgtatttgatcaggacctgctgtcctttgagctgttggatataaa

SEQ ID NO: 15512 - DNA, 50 bp, Homo sapiens
agaagcttacaaagctgcctcgagattattcagagctgggagagcttccc

SEQ ID NO: 15513 - DNA, 102 bp, Homo sapiens
cgacatgaagggaacaggcatcatggactgtgcgcccaaggtgctggagaatctggtaaaagcaccattgtgaagcagatgaggatcctgcatgttaatggg

SEQ ID NO: 15514 - DNA, 100 bp, Homo sapiens
gaaagagcagaatggctaaataagggcttcgtgctgtgtcactccatcgctgggggtacgggttctggcctgggctcctacctcctggagcgactgaatg

SEQ ID NO: 15515 - DNA, 97 bp, Homo sapiens
aaaagaagccctattgtaatgcgcattttgttcccaacatcacctttggtcaccctgtggtagaaagccttcgaaagcagctaggccaggacccttt

SEQ ID NO: 15516 - DNA, 60 bp, Homo sapiens
gtcttcaagagcccacggacaccacctcaacgcactcccaccaaaggcatagagaacaaa

SEQ ID NO: 15517 - DNA, 100 bp, Homo sapiens
aacagcttaagcacttttaccgaaaaccttctccccagggtacagctcgcagaaagaagaaggtggtacatagaacagccacagctgatgacaaaaagct

SEQ ID NO: 15518 - DNA, 100 bp, Homo sapiens
gccgccgccgccgccgcggtttgtcgccagaaggaagatggcggatctggaggagcagttgtctgatgaagagaagacaccaatgggaatcccaatgggg

SEQ ID NO: 15519 - DNA, 83 bp, Homo sapiens
ctcggcgctccttcccgctccctcacacaccggcctcagcccgcaccggagtcagagtattcatcgaaaagaaagcacagcta

SEQ ID NO: 15520 - DNA, 83 bp, Homo sapiens
gcaagtcctgggagacgcacagctaagatgcccggacatcctggaagctgggaaatggctggctgtcaccaacaccaccatga

SEQ ID NO: 15521 - DNA, 100 bp, Homo sapiens
ggttgattacagcggcctcagggttcaggcaatgcaaataaggggttcagctgttgcaaaaataattggtaataatgtcaagaaacttcagaaatttgcc

SEQ ID NO: 15522 - DNA, 97 bp, Homo sapiens
cacacctggagcaacaacctggcggtgctcgagtgcctgcaggatgtgagggaggttaaaaagatcaagtggcatgagcagccttttggggaaaatt

SEQ ID NO: 15523 - DNA, 75 bp, Homo sapiens
cgcccgaaaacccggagtgccccgcacaggcatctaataggattcaggaatcaaagaatcagtgtactcaggtgg

SEQ ID NO: 15524 - DNA, 74 bp, Homo sapiens
cctgaggcctccccagccatgcagaactacttcaaatcatcccaacaccagagaacactaaatgacagtggaca

SEQ ID NO: 15525 - DNA, 50 bp, Homo sapiens
aaaggcagggcaaggaaactggccacaatatgccgagattttgctgtcct

SEQ ID NO: 15526 - DNA, 88 bp, Homo sapiens
ccatatcacaggaacatcaagaacttaaagccagagagaaatctcaggcccagcacactgggatgagaaattccaccacaagatggtg

SEQ ID NO: 15527 - DNA, 89 bp, Homo sapiens
ccgggatctgagcgagcgccggggccagcggagccggagccgccgggacatgggtgaaagaaaagatgttgtcccggttaagagtagtt

SEQ ID NO: 15528 - DNA, 75 bp, Homo sapiens
aaaagatcttatgtgaagatcctttgccacctattccgaaagcctgagttctaccaagtatgccacaccaaaaag

SEQ ID NO: 15529 - DNA, 100 bp, Homo sapiens
ggttaaaccagcacacaaggaaccgtcaagggcagtcatcagatccaccatctgcttcaacgctacttaaagagtttaaagatgaagactggaacatggg

SEQ ID NO: 15530 - DNA, 90 bp, Homo sapiens
atgggaaatctagaagaaatatgttctttccagcaaatgctcgtacagtctttagaagaatgcaccaagatgaccagtgtcccagtgaag

SEQ ID NO: 15531 - DNA, 80 bp, Homo sapiens
gttcgttggaggactccactgcaaacctgccaaacccctaccgaaggaaatggaagagtttgtgcagagctctggagaaa

SEQ ID NO: 15532 - DNA, 98 bp, Homo sapiens
gcagaacattgcttatgaatatctgtgccacttagaggaagccaaaaggtttgaaagagaagatagtgaggagctttgaagtctccccagatgggtcc

SEQ ID NO: 15533 - DNA, 87 bp, Homo sapiens
gaagccatcagcagtgccatccagcttctagaagacccattacagagggttggatggcaagcatgtggtgtttggcaaagtgaaaga

SEQ ID NO: 15534 - DNA, 85 bp, Homo sapiens
cttggttaacttgggagaaagtttcatctgtggatggagtattggaggaagaaggcacctacgatcaaactctggagttccgtag

SEQ ID NO: 15535 - DNA, 137 bp, Homo sapiens
agaccgcgtccgccccgcgagcacagagcctcgcctttgccgatccgccgcccgtccacacccgccgccaggccctgggcagtgacggggttcgggtgaccatggagagtgcgctcaccgcccgtgaccgggtgggg

SEQ ID NO: 15536 - DNA, 82 bp, Homo sapiens
cagaccctggagcctcagttggaagcagccgatccagcctgcggagcctgtggggcagtgttgaaaatgagcccatgagcac

SEQ ID NO: 15537 - DNA, 102 bp, Homo sapiens
tatacgtggcggacatgagcacccgccgcagtggcgcaggaatcacatgcagcccaactacagattcttatggaattcctcaaggttgcaagaagaaataag

SEQ ID NO: 15538 - DNA, 100 bp, Homo sapiens
ctggctgcagtaaaaatcattaaattggagcctgaatgtgacagtgatgataacatgggtgccaaaaatacttcaataggagaagaatttatatccacag

SEQ ID NO: 15539 - DNA, 75 bp, Homo sapiens
attcaagaaggacaaagagatcatagccgagtatgaaagtcaagtcaaaggtgtttaaaattatccaactgccat

SEQ ID NO: 15540 - DNA, 101 bp, Homo sapiens
ggggaaacacaaagccggctacgcgctgcgagggtgttttgaatgctgtatcaaatgcctggggggcattccctatgcctctctgattgccaccatcctgc

SEQ ID NO: 15541 - DNA, 83 bp, Homo sapiens
ttctacatcggcagctaccagcagtgcataaacgaggcgcagcgggtgaaggtttttagaacttcagccataaaaatgggcag

SEQ ID NO: 15542 - DNA, 83 bp, Homo sapiens
acgcaggagacacaagaagcggatccagatcttgatgtggaagaaatggaggactcagaaccaaggatttccaagtgatttct

SEQ ID NO: 15543 - DNA, 75 bp, Homo sapiens
aaaatccagagaccccctgaagattcggcacatagctggcaacctggaataaaaaatccctatcgtggtgttgtt

SEQ ID NO: 15544 - DNA, 50 bp, Homo sapiens
ggacatcctggaagctgggaaatgattagctttatttgctcaccgtgaag

SEQ ID NO: 15545 - DNA, 90 bp, Homo sapiens
gtcgcttcagcgttctcgggtgctacgctgctgcagctgccgcctcttccaggcgcaccagatcatggaagggaagtggttgctgtgtat

SEQ ID NO: 15546 - DNA, 100 bp, Homo sapiens
cccgtcccaggaagacaccccggccccagtgttgatgggaaccattttcagcatcctgctggtgactgtcatccttatggcattttgtgtctacaagccc

SEQ ID NO: 15547 - DNA, 95 bp, Homo sapiens
taataaagtgtttgcatctcagtggttgaatcataggcaagtggtgtgtggcacaaaatgcaacacggggtttgttaaagttgttaagaataagg

SEQ ID NO: 15548 - DNA, 75 bp, Homo sapiens
gttgatggatttagatgttgaacaacttggaattccatttctgctgcccctgttgattgagaaagtggattctga

SEQ ID NO: 15549 - DNA, 83 bp, Homo sapiens
ggacatgagggtccccgctcagctcctggggctcctgctgctctggctcccagggccatgttctgcaacgatttaaaggaaaa

SEQ ID NO: 15550 - DNA, 75 bp, Homo sapiens
tgtttatgaagcactgagaaatgcttgcattgatgacaatgttgatatggtgaagtttctggtagaaaatggagc

SEQ ID NO: 15551 - DNA, 100 bp, Homo sapiens
tcaatccagatggcagccagtcagtggtggagggcaagtgtccagagaatggctgggatgaaagtacacttgaactctttttacatgaacttgcaatcat

SEQ ID NO: 15552 - DNA, 100 bp, Homo sapiens
cggcagtatgcccacatttatgccacccgcctcatccaaatgagacccttcctggagaaccgggcccagcagcactgggcactgccaaggagatgagctc

SEQ ID NO: 15553 - DNA, 82 bp, Homo sapiens
cagctggaagccgtggctgcgctctcttccctctgctgggcgtcctgttcttccaggaaagctgtatgtgatggcttctgtg

SEQ ID NO: 15554 - DNA, 75 bp, Homo sapiens
gtcaaacgcagaaggactgcctcactgagcaaccaagaattttatttggagagaagcaagcatctttgcctcttt

SEQ ID NO: 15555 - DNA, 100 bp, Homo sapiens
cccagcagcgggcagtagccatcaataggttgttgtctatggttaattaccatgctcagcattaccatctcactccatttacagtcatcaatattatgta

SEQ ID NO: 15556 - DNA, 49 bp, Homo sapiens
aaaatgtcaacaaattgatgggtgctggtcgttatgtaccaggttctgc

SEQ ID NO: 15557 - DNA, 75 bp, Homo sapiens
gtgatgatagccagtcccgagagccaggaatgggacgcgagagataaagattctatccgacgagtagtacaacac

SEQ ID NO: 15558 - DNA, 51 bp, Homo sapiens
gcggtgtcctcttaagaaaatggccaagaagacgctggagggaggctgtta

SEQ ID NO: 15559 - DNA, 90 bp, Homo sapiens
gtagcaatgaacaaggaacatcataatggaaatttcacaggaattgaatgatctggcacgggaccctccagcacagtgttcagcaggtcc

SEQ ID NO: 15560 - DNA, 75 bp, Homo sapiens
cagagctgagttttcaagataactccagccagaggctgtgggtgagcgtggaggatgctcagatgcacaccgtca

SEQ ID NO: 15561 - DNA, 98 bp, Homo sapiens
gcgggaggcttgccaccttcagcccccccgcgaacgcccaaggtgtcatggagaaactccagctgggcccagagattctgcagcgggaaaatccaagg

SEQ ID NO: 15562 - DNA, 100 bp, Homo sapiens
ttcagataattggcctgggcactcaagtatctcagcgaccaggagcacaagcacttaaaatattccctctgtatacttgcatttttttctatcaattgac

SEQ ID NO: 15563 - DNA, 100 bp, Homo sapiens
atgatacctttgatccagaacttgcagcaacaatagatggaaagcccgtgtctctgtcaccgctggagtcccaggcacacagccccaggtacacggcctc

SEQ ID NO: 15564 - DNA, 100 bp, Homo sapiens
gggcggggtggagcagccagctgggtccggggagcgccgccgccgcctcgatgggtagccacgatggaggtgatgaacctgatggagcagcctatcaagg

SEQ ID NO: 15565 - DNA, 96 bp, Homo sapiens
gttgaatcagggatttctgaaagtggagaggtaccataatctatgtcagaaacaagttaaagcacaactcccaagatataattgaccctgcaatcc

SEQ ID NO: 15566 - DNA, 100 bp, Homo sapiens
agttgactaccaccagtggagtccaggatgagctgtttgaattgggtcctgatggaggagatcatgaaactgatggtgaccttcttgcagagactgatgt

SEQ ID NO: 15567 - DNA, 75 bp, Homo sapiens
tgaagaccaaatttcctgctgaacagtattacagtcagccataatggcaggtgaagaaattaatgaagactatcc

SEQ ID NO: 15568 - DNA, 82 bp, Homo sapiens
acagatgctactacaagccagctgaaattaagaataacctgaagcccccacaagcaaaaaggaagatacaacatgttacttg

SEQ ID NO: 15569 - DNA, 50 bp, Homo sapiens
atcaacaagtgcattgggaggaacattatctgcctggacctgtcagagga

SEQ ID NO: 15570 - DNA, 90 bp, Homo sapiens
caagaggtggaagaggacgggctttaggctggaagcgccttagaggagccatttttccaggacccagccgccgcctccatctctgacgga

SEQ ID NO: 15571 - DNA, 90 bp, Homo sapiens
ttgcccattatgtcaacagcatctgtggaaatcgatgatgcattgtatagaatgtttctccatcccagagagatgaagtaattcaatggc

SEQ ID NO: 15572 - DNA, 100 bp, Homo sapiens
ggctgaaaataaatagggaagatggagacaccctctgggggtcctctctgagtcaaatccagtgtgctaaagaagctgcgcgggacagctgacgtgaccc

SEQ ID NO: 15573 - DNA, 75 bp, Homo sapiens
ggagcacatccatttcattggcaaggtggcagcacaccctgggccccccactccccgccgcaagtcctgaggatg

SEQ ID NO: 15574 - DNA, 100 bp, Homo sapiens
gtcacctgcttttgccaaagggaacctgactttcacagctcagtacctaaggttccccacgtgtgaaagtcaagaatctgattgaaagcatgcaaataaa

SEQ ID NO: 15575 - DNA, 75 bp, Homo sapiens
ggcaagcccatgtgtgttgagagcttctcagactatccacctttggtttcatggacttcgcttccctttgtcaca

SEQ ID NO: 15576 - DNA, 80 bp, Homo sapiens
cgtccgccgccaccacccactccggacacagctggtaggtgagtgctgtcctcggctcactttcctcaagctctccggct

SEQ ID NO: 15577 - DNA, 100 bp, Homo sapiens
gagcaaagagctgcatcatgaattcaggagcatccaaagaacagtctgaacttgatcaagatttggatgatgttgaagaagtagaagaagaggaaactgg

SEQ ID NO: 15578 - DNA, 75 bp, Homo sapiens
caaaaacaaggtcgtcggctggcggagcggcgtggtgatgacaactccgtgagggtggagattatacatctctca

SEQ ID NO: 15579 - DNA, 100 bp, Homo sapiens
ccatggcccagattctgccaattcgttttcaggagcatctccagggctcattgtcatccccaagccaggccagttctccaggtggaactgtagtgtagcg

SEQ ID NO: 15580 - DNA, 90 bp, Homo sapiens
ccctgctctgtgcgcgcctccatctgggccatggatgggtagtcagatgcctccgcagccacccgggagccagtcagaatccagttccca

SEQ ID NO: 15581 - DNA, 90 bp, Homo sapiens
cacaagatggacattacattattagtgcatcctctgatggcactgtaaagaacagtccacaggaagaggttgaactaaagaagttgaaac

SEQ ID NO: 15582 - DNA, 90 bp, Homo sapiens
cgcgagcacagagcctcgcctttgccgatccgccgcccgtccacacccgccgccagccgccgccgcgccgccgtcgctctccaacgccag

SEQ ID NO: 15583 - DNA, 83 bp, Homo sapiens
cgtcctgcaggaacccgaacagttccccctggtgcagggagtggccatagtcatgatgatgggcagcgcccgagtggcggagc

SEQ ID NO: 15584 - DNA, 117 bp, Homo sapiens
aacagctggagcaaggcgacgaaccttggagagaggagaacgaacatcttctggacctttgtccaggtgtaatcctgagagattcacatggtgttgcacaagtacgttttgtgacag

SEQ ID NO: 15585 - DNA, 101 bp, Homo sapiens
agaagtgatgctggagaattacaggaatcttctctcattggggtcctgagaacattatctgtagctgtatctccccatgtggaagttggatagcctattct

SEQ ID NO: 15586 - DNA, 97 bp, Homo sapiens
tgagcaaggcatcaacgagtttctcagattatggtgacaagctgaacatggagctgagtgagaaatacaagctggacaaagagagctacccagtctt

SEQ ID NO: 15587 - DNA, 83 bp, Homo sapiens
agaaaaacgagccatttctccgtcgattaaagagccatctgtggtgccaattgaagggcgtgatggtgggcatgggtcagaag

SEQ ID NO: 15588 - DNA, 75 bp, Homo sapiens
gctcttctccaccacaccgggaggctatgacttctgccaggtcctgcagtggtttgccgagagggtggacaggat

SEQ ID NO: 15589 - DNA, 83 bp, Homo sapiens
cttgcttgaagagccatctcatcaacatgttacgcaggaaacacagaggatctgaagaggcaaaatgcagtattacaagctgc

SEQ ID NO: 15590 - DNA, 80 bp, Homo sapiens
ccgtggagggcctcgccatgtcctgctgcccgagtttatgtggccgaggcagacaagtggaattaggccttgctgcaggg

SEQ ID NO: 15591 - DNA, 75 bp, Homo sapiens
cctcaccatgccgggcctcaggttcgacaacatccaggaaaagaagatttttcagatcccctggatgcatgcggc

SEQ ID NO: 15592 - DNA, 96 bp, Homo sapiens
ttttgccaattaggtcacttcaacctcttgttggaagattattcaaaaggttgtccgcacaaaccagtgtgcaggggagtttgtcatcacttttcc

SEQ ID NO: 15593 - DNA, 75 bp, Homo sapiens
cgcagtggtcgcttcttctccttgctcttcatcgggtttggcttcccctacgagggccccgcccccctggaggcc

SEQ ID NO: 15594 - DNA, 98 bp, Homo sapiens
gtggagccgccgccggccacccggaaatgggcaagttcatgaaacctgggaaggtggtgcttgtcctggctggacgctactccggacgcaaagctgtc

SEQ ID NO: 15595 - DNA, 83 bp, Homo sapiens
ccggcccgcgctgcccgcactcctggtcctgctcggggctctgttcccaggaattttcaacgtccggttcatctaatacagac

SEQ ID NO: 15596 - DNA, 75 bp, Homo sapiens
cgcagttcatcttcctccctgtgtactttccatttgccttcctgggagccctctggcacaaatggaagaagaaag

SEQ ID NO: 15597 - DNA, 74 bp, Homo sapiens
gcggggcctccgcgcccccggctgctgctcacgccccgcccgggagccaggatatttggccttgacattaaagg

SEQ ID NO: 15598 - DNA, 60 bp, Homo sapiens
ctatacccatctggtcaaatctctgcaggaatcagacagataatcccaccgtttctggca

SEQ ID NO: 15599 - DNA, 50 bp, Homo sapiens
ggcatacctgctggctggatggtagcaacacaagtcggaatagaatggaa

SEQ ID NO: 15600 - DNA, 87 bp, Homo sapiens
cagcgccgacggcagccggcacctgacggcgtgaccgacccgagccgtgtaaacaggaacatcgataagtagtgtaaaaacttgcac

SEQ ID NO: 15601 - DNA, 74 bp, Homo sapiens
atctaaagcatgaacaggcatctaatgttcttagtgacattagtgcatcaacttctaactcatctcgccaggag

SEQ ID NO: 15602 - DNA, 100 bp, Homo sapiens
ccccaggctacacattctgtcagtgctgttctccaagaggcccagagacatgctgaaacatcgaaggataagcatgcactactggatgtgactccgaaag

SEQ ID NO: 15603 - DNA, 82 bp, Homo sapiens
ctccccaccatcaaaagtatcttctgctgtagcctggcacaaggagagaaatatgagttggagggaaggaaaagtggttcta

SEQ ID NO: 15604 - DNA, 93 bp, Homo sapiens
ggagttcgaggagtgcgtcaaggactccccgcgcttcagggtggatgtgaacactgaccggaagatcagtgccaaggagatgcagcgctggat

SEQ ID NO: 15605 - DNA, 100 bp, Homo sapiens
ctccaggagttcgtctcttacgtctgcggaagtgcagctgcctcagttcttagcgcaggctggagcattggatttgctaaaggagcttaagaatattcct

SEQ ID NO: 15606 - DNA, 75 bp, Homo sapiens
ccgaagcgaagggcgacgccaagccggagggtgtttgagaagctgcagctgctcaaccctgaaatagaagcagaa

SEQ ID NO: 15607 - DNA, 87 bp, Homo sapiens
ccacagagacaactgcagagctacaaagttccagagtcacggttcgaccgagattccggggagagtgaagaagcagaggaagaagtg

SEQ ID NO: 15608 - DNA, 100 bp, Homo sapiens
caaatcagaagtgccgtccttatctcatcaaagccaggctgctttattgcaggtgctgatatcaagagtctactcttcatcttgtgttgagacttcgtgg

SEQ ID NO: 15609 - DNA, 75 bp, Homo sapiens
ctggtggtctgcatcaccaccggatcaacttcgacaaatagagagctcaaaggatggctactgacatgcagagga

SEQ ID NO: 15610 - DNA, 100 bp, Homo sapiens
aacaagtatgttgattactcaaggattaattagtaaagcagagcatcctggccagaacaagccaaggagccaagacgagagggacacacggacaaacaac

SEQ ID NO: 15611 - DNA, 100 bp, Homo sapiens
agagttcaaggaggccttccagctgtttgaccgaacagcgtggggaattgagcacataatactccaaataaccatcagatgattctaattccaacatgac

SEQ ID NO: 15612 - DNA, 75 bp, Homo sapiens
gcgcacgtttaaacatctcaagttacatccagagcattccagttgttaatgaagaacacagaggtgatttttcct

SEQ ID NO: 15613 - DNA, 50 bp, Homo sapiens
cggcggactggctcgcggtgcagctgctactgtttgaacggtcttggatg

SEQ ID NO: 15614 - DNA, 75 bp, Homo sapiens
cgctccttgcccgagaacatccagtttgatgtttactacaagattttaggtgatgggcaagtcagaaagtcagat

SEQ ID NO: 15615 - DNA, 83 bp, Homo sapiens
gggctgggaacccgcggtggagcgggacacgaacgtgccttatgccagcctggaccatcttggaggcagtgtaggatcatgga

SEQ ID NO: 15616 - DNA, 80 bp, Homo sapiens
cttcgctcgtactcgtgcgcctcgcttcgtacctggagtagaacagaaaaattattatgtctgtgttcccttgggactca

SEQ ID NO: 15617 - DNA, 100 bp, Homo sapiens
tcactgaaacctctgcctttctggttcaagcaattctcatgtttcagcctcccagacgcaggaggagggagacgcactgatgacatcgggccgctcctgc

SEQ ID NO: 15618 - DNA, 90 bp, Homo sapiens
cattgctcagcgcggacctagacctggaatcgcccaagtccctctactcgcgagtactcgcttcccactcccaaagggggcaaatacgcc

SEQ ID NO: 15619 - DNA, 100 bp, Homo sapiens
ccagggccctgtggcatgaggaagctgggggcatcttctccccaggtgctgcagaaattggggaaagctgtagaaaccaaagatgaacgatttgaacaaa

SEQ ID NO: 15620 - DNA, 100 bp, Homo sapiens
cgtggccagctcctacgtgctggcggatgccattgacaaaggcaagaaggctggagaggagaatacttatctctggcgcacatcactatatttggctgcc

SEQ ID NO: 15621 - DNA, 90 bp, Homo sapiens
gtaccttttaaatctcattgatacaccggtgaaaaacaagcagctactcatgtaagtcttgatcaagaatatgattctgaatcctctcag

SEQ ID NO: 15622 - DNA, 75 bp, Homo sapiens
gcaagacaaagggaagaaataaaattttcccatactgactactgtgtgaagacattcacaggacacagagaatgg

SEQ ID NO: 15623 - DNA, 90 bp, Homo sapiens
cttcgccccgggccccccagcatgaagaccccggcggacacaggtcgcctgcgaggccgctggccaggcctgagcctctgccaccatggc

SEQ ID NO: 15624 - DNA, 131 bp, Homo sapiens
caggttgtccttctattcaggccactcttcgttttccatgtactgcatgctgtttgtggcacttccatgaggcaggctgaacctgcagatatgcgcccagagatatggatcgcccaagagttgcggcgtat

SEQ ID NO: 15625 - DNA, 100 bp, Homo sapiens
tcgcgcggctccgcctcctttcccgggctcttccagcggctcccggggcgcgtctgagaaaaggcgacggcggattgacagaagtatgattggagagccc

SEQ ID NO: 15626 - DNA, 75 bp, Homo sapiens
caggaccctcttcgcgggcgattcgcgtagcctcaggtgcctgactgacagaagttcttgcccccggggagctgg

SEQ ID NO: 15627 - DNA, 80 bp, Homo sapiens
ccggtggaggcgggagcggaaggcgaggaggacggcttcggggaagcagcagggtttccaggcctgaggtgcccgccctg

SEQ ID NO: 15628 - DNA, 100 bp, Homo sapiens
atgtgaatctcaggagagagcagccagagtggctatggaaagggcaaatggaatggagctggatggtagaagaattcgggtggattattctataaccaag

SEQ ID NO: 15629 - DNA, 90 bp, Homo sapiens
cttctgcaaggtccggctgctggatggaggggattttgtcagcttgtcgtcaaggtgctggagaatctggtaaaagcaccattgtgaagc

SEQ ID NO: 15630 - DNA, 82 bp, Homo sapiens
gctggggatccctgctcttcgctctcttcctggctgcgtccctaggtcagcccaaggccaaccccactgtcactctgttccc

SEQ ID NO: 15631 - DNA, 110 bp, Homo sapiens
gacgcggggccatgtgcaggaccctaacgacaggcgcctccggcccatttacggcattggaggtgatccttttaatggaacagattttattgactgcctcgaaatctttt

SEQ ID NO: 15632 - DNA, 90 bp, Homo sapiens
gtgatggcaataagaaacaaaatgatatcagaaggactagacccagatcttcttgatttgcatttatgtcggatcctcagtgaaaataaa

SEQ ID NO: 15633 - DNA, 78 bp, Homo sapiens
gcggagggagcgagtccgccccgagggagaggaggtgggcaggaggaacggccctttgtggcccggtttggatttgac

SEQ ID NO: 15634 - DNA, 98 bp, Homo sapiens
ctgcctggaccgggtctgagcgcggctgcccaggttgacctttctgcgggaggataaaagaatcagagtgtctcaacccttgacaagaggaccaagtg

SEQ ID NO: 15635 - DNA, 100 bp, Homo sapiens
gggcacacaccggcagccacagctccgaagctggcaagaagcgcacaactacgggattggcgccgccgcctgcgtgtactttggcatagcggcctccctg

SEQ ID NO: 15636 - DNA, 100 bp, Homo sapiens
aaaggaagaaaagtgcccaccagaagcctctgccccagcctgtcttctggcccctcctgaaagctgtcacccacaaattggtgctgaagacatggacggc

SEQ ID NO: 15637 - DNA, 100 bp, Homo sapiens
tttttccttagtactctcgttcattcacttacggccctgctgctcctgggggccgccgccctggcctgcctcgccctggacctcctcttcctgctcttct

SEQ ID NO: 15638 - DNA, 100 bp, Homo sapiens
ctatgccatcacagacaccgcctacaggagtatgatgcaaggtgaccctgagagtgtggctggggagtatgggcggcactccctctacaaaatgcttggt

SEQ ID NO: 15639 - DNA, 100 bp, Homo sapiens
ggcgcccctgctctgcctggcgctgctgcccgcgctcgccgcacgagcatcatcggctggttcgtgcgaagcttcaagtacttttacgggctccgcttcg

SEQ ID NO: 15640 - DNA, 100 bp, Homo sapiens
aatgagcgtcaaaattatccgaaaccgcctcactggctcctacagaagaagggaaaaaagagctgctgttcctaagtaacgcgaacccctcgctgctgga

SEQ ID NO: 15641 - DNA, 51 bp, Homo sapiens
ttaaggattccaagtaactcttatttggttttggagattttaggtaagaag

SEQ ID NO: 15642 - DNA, 83 bp, Homo sapiens
cgagtgagcctgcggaacctgcgcggctactacaaccagagcgaggacggatctcgaggacctggaagaagcagaggagccag

SEQ ID NO: 15643 - DNA, 83 bp, Homo sapiens
gtcatgagcgacagcggcgagcagaactacggcgagcggggggatatgagactttctactcggaatatcctgagtgttgcgtg

SEQ ID NO: 15644 - DNA, 100 bp, Homo sapiens
agccatagcaggagttattaaccagccatattacaactatgaggaccagtttggacaacatataaaatcagatgtacacttgaatttttatgtttattat

SEQ ID NO: 15645 - DNA, 100 bp, Homo sapiens
gcatcttcttcgtgaggctgctcttcgagcgagtgcttgtgatttcacgtatttttgctgaactcgtaaaagagacacttggatggtggattaaccagaa

SEQ ID NO: 15646 - DNA, 100 bp, Homo sapiens
ccttccgattcatgctggaatccaacaagggcaaatcaatgttggagttccagaagaaaggtgagcagccaacaggccagcagcggcggaaacaccagat

SEQ ID NO: 15647 - DNA, 97 bp, Homo sapiens
caagatctcaggatccaagtttaaaaagaaatggtgtaaaagttcctggtgaatatcgaagaaaggagaacggttgggtaaaggaagaagccccaga

SEQ ID NO: 15648 - DNA, 100 bp, Homo sapiens
ggcgctcatctggctctgctacgacgcgctggtgcacttcgcgctggcctcagctgttgaagaacgctctgcagagagcagtagagaggggccagttaga

SEQ ID NO: 15649 - DNA, 98 bp, Homo sapiens
aacccaaaactttcctcctgaagattgatgccaagaaggaacagctagcagatgcccggagagacctgaaaagtgctaaggctgatgccaaggtcatg

SEQ ID NO: 15650 - DNA, 50 bp, Homo sapiens
gttataaatgaaggctctcttgatcatgcaatgatgctacctgttctgac

SEQ ID NO: 15651 - DNA, 100 bp, Homo sapiens
tggagtgtgtgcccactgaggagtccaacatcaccatgcagtgaagagtgaatctaccaagaacgttggcaatgaaaattgagcattttttctggaagaa

SEQ ID NO: 15652 - DNA, 75 bp, Homo sapiens
ggcgcagtgagaagaaggctatcaagtgggcctttgcagaacgggcagccctcagcagagatccaagaagaagtg

SEQ ID NO: 15653 - DNA, 75 bp, Homo sapiens
gcgagctgtttgacccctttgacctcttcgatgtgcgagactttggaaagatttctccacccaggtgaactcctc

SEQ ID NO: 15654 - DNA, 100 bp, Homo sapiens
caggaatgccagtgcatcttttgcacagctattcatagtgaccacttagtagctagtgagaaacagcatatgctccagtgggacaacttcatgaaggagc

SEQ ID NO: 15655 - DNA, 98 bp, Homo sapiens
atttggctttgcctttctggacacagaagtatttgtgacagattgccaatgaagtaattggagaaatgaacttgaaaccagaggaggttttccttgcc

SEQ ID NO: 15656 - DNA, 100 bp, Homo sapiens
gcagcccgcgcgcggcccacactcgcctcccctcggcacccccggccccggagctgcctggaggcggccgcactcgggttatcctgaatacatgtctaac

SEQ ID NO: 15657 - DNA, 75 bp, Homo sapiens
attttcctcggtgggggcttagcgcactggaggagcggcgggcttcagacagcatgcttttcacttccactgcat

SEQ ID NO: 15658 - DNA, 100 bp, Homo sapiens
acatggccttcaattttggggctccctcgggcacctccggtaccgctgcagccaccgcggcccccgcggatgttggtcaggcgtcatttaaatattttca

SEQ ID NO: 15659 - DNA, 75 bp, Homo sapiens
ttcaacctgacccacatcagcgctgagaagaggaaagggatcatagacggtatttctatgtaaacgaacagtcgg

SEQ ID NO: 15660 - DNA, 100 bp, Homo sapiens
tcatggatgttcttcttcgagtatttgtagaaggggatcagtttcattcacggatgtgactgtggactttacccaggaggaatgggaacaactggacccc

SEQ ID NO: 15661 - DNA, 100 bp, Homo sapiens
gcacttggaagagtgagcgggtcatcacgtcccgtcaggggccgcacatccgcgtggacggcgtctccggagggagcccacctacgatgcagaattccag

SEQ ID NO: 15662 - DNA, 50 bp, Homo sapiens
cgcggggctcggcccgagctcaggaggaaatctggcattttttaaagttt

SEQ ID NO: 15663 - DNA, 90 bp, Homo sapiens
aaattgctgagaaagatgatgatctaaaacgaacagccaaaagatatgaagaaatccttgataagtccaaggcttgcgagaaggtcattt

SEQ ID NO: 15664 - DNA, 75 bp, Homo sapiens
gcggtcgacatgttccaggtcccggatagcgagggcggccgcgccggctccagcagcagccgctcttctaaaaca

SEQ ID NO: 15665 - DNA, 98 bp, Homo sapiens
ttgactggagccgggagcccttgccggggcacctaattacaacaagcatgcacattttggtgcattcaagaatggaaaatcagaatagcagcattgat

SEQ ID NO: 15666 - DNA, 50 bp, Homo sapiens
gcgcgaggaaaatgcgggacgcccaggtcagcctgccagtatactggggg

SEQ ID NO: 15667 - DNA, 80 bp, Homo sapiens
tctgacaagatggccgggctgccccgcaggatcatcaaggcctatgaaaggaggttccctacatgtcctttgattccgat

SEQ ID NO: 15668 - DNA, 100 bp, Homo sapiens
tcgcctgtgcgtggtactcaagggcaccagtattcccgcggtcggcagcatgggtcgggagtcacggacttcattgacttaactagagagaccagaccaa

SEQ ID NO: 15669 - DNA, 59 bp, Homo sapiens
tcatagacaagtttgtacatccaaatctccaaacgtccacaactatcccgatatggaag

SEQ ID NO: 15670 - DNA, 100 bp, Homo sapiens
ttcaacgccgcccagaacaaagcagagattctgaggataagaactgggcccttaaagaacagctcaagtcctggcagcggctccggcatgacttggagcg

SEQ ID NO: 15671 - DNA, 75 bp, Homo sapiens
gatgaaatttatggcattcagaacagctgagggtaaaaagctgggattggtaggctgggtccagaacactgaccg

SEQ ID NO: 15672 - DNA, 50 bp, Homo sapiens
caagaaggtagaaatcatcataggagttcatgatcaagtgttgcccacac

SEQ ID NO: 15673 - DNA, 98 bp, Homo sapiens
gttcatcacatcattcatgattttcagggtcatgatcagagttcgactcttgcccaacactctgttgaactgactttacccaatcatcatccatttca

SEQ ID NO: 15674 - DNA, 100 bp, Homo sapiens
ggagaaagactactttggacttttgtttcaggaaagccctgagcagaaagatgaagtcagattcttttctccaggaaatgccaaatgtaactaatatacc

SEQ ID NO: 15675 - DNA, 96 bp, Homo sapiens
cggagcccaccaagttctgggaagtcctggtgcttgatggtcgaggccatctcctgggccgcctggcggccatcgtggctaaacaggtactgctgg

SEQ ID NO: 15676 - DNA, 99 bp, Homo sapiens
aagtctctgaggtcttctaaatcagaatcaagattagccggatcgagctgggagatgtgacaccacacaatattaaacagttgaaaagattgaatcagg

SEQ ID NO: 15677 - DNA, 82 bp, Homo sapiens
ccgccctggggacgaagagctgcagctcctcctgtgcggcaatggctgccatccggaagaaactggtgattgttggtgatgg

SEQ ID NO: 15678 - DNA, 100 bp, Homo sapiens
tggcttcctccttcacgtcaccaggacaggtgcccactacatcctctttccctgcgacccagcctccggctgtgacccccagcctcacacctgcctctgg

SEQ ID NO: 15679 - DNA, 75 bp, Homo sapiens
aaggaaaaactggagagcttcatcaaaaatagtgatagctttgataaggctgcttccccaagcccacagtctgta

SEQ ID NO: 15680 - DNA, 73 bp, Homo sapiens
accattggagaaactggaggtcacctcgaaagttctcaccactaaaggccaagtcctgtatctgccatgtctg

SEQ ID NO: 15681 - DNA, 100 bp, Homo sapiens
cgagcacagagcctcgcctttgccgatccgccgcccgtccacacccgccgccagaaccgggctgtgggtcggcccaaggggaagctgggcccggcctccg

SEQ ID NO: 15682 - DNA, 100 bp, Homo sapiens
gcccatcgcggtctcggccttctatgtcgccatattgaaggtggtatcatcggtcctgcagcttggaaatatcgtcttcaagaaggaaagaaacacagac

SEQ ID NO: 15683 - DNA, 100 bp, Homo sapiens
atcggaaaaaggaaggagaaaagatccggaagaaatatccggacagggtccccgacacagccagtgtgaagtcctctagtagtcttgaacccaatctttt

SEQ ID NO: 15684 - DNA, 74 bp, Homo sapiens
tatcacaagctgcaccagcttctaaccgaagaacagcccatcttcaccacccgagcgcatgtcttccagattga

SEQ ID NO: 15685 - DNA, 82 bp, Homo sapiens
tcatgtctgcgagccaggattcccggaatcccagtcagaagttccagcctgccactgttctctgatgccatgccagcaccaa

SEQ ID NO: 15686 - DNA, 101 bp, Homo sapiens
gctgcggagggcttgaggctcgcgagcctccttcgccgcgccccacttgctcgtgcactttacacacatgagctgatgaccaaacacccaggcaaacgtct

SEQ ID NO: 15687 - DNA, 75 bp, Homo sapiens
ggacatcgtaaacgatcttctcgacctgcttcagcctccagctctactaaagttcctcgatgaccccggcctgag

SEQ ID NO: 15688 - DNA, 97 bp, Homo sapiens
gcccgaccccgtcccgaccctggccgccccgagcggagcctggagatggagaaggaggagacaacccgggagctgctgctgcccaactggcagggta

SEQ ID NO: 15689 - DNA, 75 bp, Homo sapiens
cctactcatccctttcactgaagaagtggggaaaacaaggctcagacaggtacgtagagaaatcgacactcttaa

SEQ ID NO: 15690 - DNA, 80 bp, Homo sapiens
ctggcaagcacggccacgccaagaagctgcacacatacatgtaagagaagcaaaaatgtcagatgatatcaggaaaaggt

SEQ ID NO: 15691 - DNA, 74 bp, Homo sapiens
ctcgctcaagatggcggcgcagccaccccgcgggatacgcctcagcgcgtcagcctgggcttctgcccaccaca

SEQ ID NO: 15692 - DNA, 100 bp, Homo sapiens
tcaagatccccatggacaacaaggaggaggagctggctctgtgtggctccaggctgctggtcttgggctccttcctgcttctcttctgtggccttctctg

SEQ ID NO: 15693 - DNA, 90 bp, Homo sapiens
tatttgcgatctatagcaattgctgggaaaactcttcagatttttaacattgaaatgaaaagtaaaatgaaggctcataccatgactgat

SEQ ID NO: 15694 - DNA, 127 bp, Homo sapiens
tcacaggccacgtagaacgtgcccttgagactcggcacgagcaggaacctctgtgacctgcctgctgcctccctcaacgaccagttgccccaacatacatttcgcgtcatttggacagcaggcgatg

SEQ ID NO: 15695 - DNA, 90 bp, Homo sapiens
cgacaatttaccaattcctgtggtgacgtcagaccagtgaaaaaccatttcgctgtgatgaatgtggtatgagattcatacaaaaatatc

SEQ ID NO: 15696 - DNA, 96 bp, Homo sapiens
tcaagatcagaaatttcaaagagaacttatacagaatggttttacaaggttgggggccgtcccgctcctaaggcaggaagatggtggccgcaaaga

SEQ ID NO: 15697 - DNA, 100 bp, Homo sapiens
gaggatgggagacggggcagtgaaacaaggcttcttgtatcttcagcagcagcagacgtttggaaagtgtaaacaggaacatcgataagtagtgtaaaaa

SEQ ID NO: 15698 - DNA, 87 bp, Homo sapiens
gcatcaactacctgcactttggggagcctaagtcctgggagtgcatccgccccaacccttttccccctcgtctcctgtgagaattcc

SEQ ID NO: 15699 - DNA, 100 bp, Homo sapiens
aaacacattctgggatgtggatggaagcatggtgcctcctgaatggtgctgctggtgagtagcagccggtacccagaccagtggattgtcccaggaggag

SEQ ID NO: 15700 - DNA, 88 bp, Homo sapiens
ggtcaaaggagagcacaaccatcgcagttggaagcccatggggcagatgagtttgatgcctacatcattgtgtctttcgtgaatgcca

SEQ ID NO: 15701 - DNA, 100 bp, Homo sapiens
actacagcaagatgtggaagacacaaagcctgcgaaagtgctcgggaagagggagagcaaacttggctcagcccagtcccttcaccgatgttgtcaccac

SEQ ID NO: 15702 - DNA, 76 bp, Homo sapiens
ccctcacagcaaccagcaccagatgaaggagcattcctcttggaattacggatccagatcaggagatttgaggagc

SEQ ID NO: 15703 - DNA, 83 bp, Homo sapiens
cgggactgtgatggccagagagatgacgatcttaggccaagaagcttgagagaagaaaaatttcagaaaaattgtctcaattt

SEQ ID NO: 15704 - DNA, 100 bp, Homo sapiens
agagaagaggaatcattccgccttttggggaccagagagtcaaatcattcctgtgatgccagttaatgttggagaagattgtccagtgtttgatggactc

SEQ ID NO: 15705 - DNA, 75 bp, Homo sapiens
ccacctccaaagttgcttgcacagcagatcatgtatcagttggaggacttggagacagcttctatgagtatttgc

SEQ ID NO: 15706 - DNA, 101 bp, Homo sapiens
cgcggccgcggccccggccgctctgggcgactgtgctggcgctgggggcgctggcgggcgttggcgtaggaggttcctgggtggagctacccatgaacagc

SEQ ID NO: 15707 - DNA, 100 bp, Homo sapiens
atatatctaaaaggattttatgagggtttacagaatgtctgaaggggacagtgtgggagaatccgtccatgggaaaccttcggtggtgtacagatttttc

SEQ ID NO: 15708 - DNA, 101 bp, Homo sapiens
ggaaagaagttgcaaaacactggacattccacttcttccatctattacatctctgagtctaaatgaaaatgaagagaagaccggaccttttgttgtacact

SEQ ID NO: 15709 - DNA, 100 bp, Homo sapiens
cctcaatgctacagtgaggtgaggagagaagatggcatacaggcggaagcatcagcaaatgaatgctggaagatgaccttaagctaagcagtgatgaaga

SEQ ID NO: 15710 - DNA, 90 bp, Homo sapiens
cggagtagtcctcatggccgccccgccggagcccggtgagcccgaggagaggaagagagattggaacaattatcaggtcattaggatgct

SEQ ID NO: 15711 - DNA, 88 bp, Homo sapiens
acctgctgtgtacccctgaagtgagtcaggagctgtatgaccttaacgtggagctctccaagtacaatgccagtgtttcagtcccaga

SEQ ID NO: 15712 - DNA, 101 bp, Homo sapiens
ccacgggggctccgcggcgtcctcggcgctgaaggggttaattcaacagttcaccaccattaccggtactaggttttgacaagcttgcatcatgcgtgagt

SEQ ID NO: 15713 - DNA, 90 bp, Homo sapiens
ctccgcgtcccgctcgctgggagagaggtacctctccttttccctctccctttccctaagcgccgtgccgtccctgcagtgacaccgagg

SEQ ID NO: 15714 - DNA, 107 bp, Homo sapiens
ctgacacaggtcacctgtcactcagccctgctggacctggagaagctcccagaattcaacaggtacgtgcagcactacggcctgggcagtgcctgtgacaacgtaga

SEQ ID NO: 15715 - DNA, 75 bp, Homo sapiens
gaagaggtcggcggcccctgcgggcgccagtcaggtctgtcgagttgcttatgaaattatgcaaacactacatcc

SEQ ID NO: 15716 - DNA, 75 bp, Homo sapiens
gtgtcagccaccttgttctctaaaggcaaccacacctccaaatcaaggaaggccagattctcctgtctatgctaa

SEQ ID NO: 15717 - DNA, 100 bp, Homo sapiens
attcccggacacagtgcagaggagaagcagtctgtatggcagaaagcaatggatcatattgaggtttttgatgagaagtactttctggtggaaatggatg

SEQ ID NO: 15718 - DNA, 100 bp, Homo sapiens
gaaaaggctactcaagagctaattcctattgaagattttattacccctctaaagttcttggataaagcaagagtgatgacagacctaatgctctattaag

SEQ ID NO: 15719 - DNA, 83 bp, Homo sapiens
gcgaacgcggagagcacgccatgaaggcctcgggcacgatcttcgtgaagactctgactggtaagaccatcaccctcgaggtt

SEQ ID NO: 15720 - DNA, 75 bp, Homo sapiens
ggaggcggcgggactggtccctggtactccaaagattcaggtttactcacgtcatccagcagagaatggaaagtc

SEQ ID NO: 15721 - DNA, 90 bp, Homo sapiens
tggcggacatcactttagaccctccacctaattgcaggtgaggaagatcttctcagtcctccccaggacacaagcacagggttagaggag

SEQ ID NO: 15722 - DNA, 80 bp, Homo sapiens
gtgcccgagaatagctccgtccagcagagccagcccctgggcaacaaagtggaaatggagattgtgagcatgttggaaaa

SEQ ID NO: 15723 - DNA, 101 bp, Homo sapiens
cttcacagcacagttcctgggaaggtggagccaccagcctctccttgatgatcatgggaacagcaatagtagtcatgtaaaaatctttttaccgaaaaagc

SEQ ID NO: 15724 - DNA, 75 bp, Homo sapiens
ggaaaggctctcagtgaaaaagagtgagctggacttggaaaagggcttggagatgagaaaatgggtcctgtcggg

SEQ ID NO: 15725 - DNA, 75 bp, Homo sapiens
ggagcggcacgagcaaaggccctgaaacaggagggagcgcgggctacggggaccacaagcccaagtcttccactg

SEQ ID NO: 15726 - DNA, 50 bp, Homo sapiens
aatcatattatagatggagtaaaggagcgcctggaccatgctgctgagcg

SEQ ID NO: 15727 - DNA, 75 bp, Homo sapiens
gcatctgggaagctacctgcattaagtcaggactgaggtttccatgctgagctcctgcccatcttcagtcctgaa

SEQ ID NO: 15728 - DNA, 90 bp, Homo sapiens
ccaatatccacaacagtcgcttgaacagattggcacccgaattgccaaagttttggaaaaggccgggctcggtggctcatgtctgtaatc

SEQ ID NO: 15729 - DNA, 51 bp, Homo sapiens
cctggaacgccctctttttaaaaaaggtcacacagcggcagtgataaagag

SEQ ID NO: 15730 - DNA, 83 bp, Homo sapiens
ccatatcataagtggaattttggagatattcaaagacccttccaagtaagtccaacgaaagccatgaccacatggatgatatg

SEQ ID NO: 15731 - DNA, 100 bp, Homo sapiens
gtccgccagacctgctgctgcttcaatgtccgcatcgcaaccaccgccctggccatctaccatgtggccaagtcctgtatctgccatgtctgtggcgtcc

SEQ ID NO: 15732 - DNA, 88 bp, Homo sapiens
cgactcttaagttttcttttcctctccagaggggccgattagggagaggtgaccaagaatatggcccaggtgaccaaagccctggaca

SEQ ID NO: 15733 - DNA, 75 bp, Homo sapiens
cagcgagggcaccaccgtcctgctcttccagttcgggatgggggacttgatctcatcttcatgccaggccttggg

SEQ ID NO: 15734 - DNA, 75 bp, Homo sapiens
ggctgctcctgtacgtagtcacggtcttgtgctctaaggcattttgttcccaacatcacctttggtcaccctgtg

SEQ ID NO: 15735 - DNA, 83 bp, Homo sapiens
ttcagatcttcacagcacagttcctgggaaggtggagccaccagcctctccttggactccctggaggaaaagcggaagcggca

SEQ ID NO: 15736 - DNA, 100 bp, Homo sapiens
atcaagatcaccttccggcccgactcagccgatggaatagccaggtctggctgggtcggcacaacctgtttgagcctgaagacacaggccagagggtccc

SEQ ID NO: 15737 - DNA, 100 bp, Homo sapiens
ctgctactggtcagtcaacccagaggatccccagtatgcatctcaagatgtgcataactaatgatgccagagaagatgaaatggaagagaacctgactca

SEQ ID NO: 15738 - DNA, 100 bp, Homo sapiens
acaattggaatacatgcgaaatatgataaagcatgccgaaatggagaggacatctgtcttagagaaacaagcccctagcagtcttcttgatgctttggaa

SEQ ID NO: 15739 - DNA, 82 bp, Homo sapiens
agcaaataaccgttttgaaattgcagtcgatgatgtgaagaaaggttacatcaaagcagaagaaaagtcctatcaattacag

SEQ ID NO: 15740 - DNA, 98 bp, Homo sapiens
aacacagactctcagcaactcagcagacaatttcatcacgaaaacctggtcaatctgattgaagtttttagacagaaaaagaaaattcatttggtatt

SEQ ID NO: 15741 - DNA, 88 bp, Homo sapiens
cgatacactatcaaagttctctttgcatctcaggaaacagtgcagatctccgattagtaaaaacttacattgaacttggattgcctgg

SEQ ID NO: 15742 - DNA, 88 bp, Homo sapiens
ttggatgactctgactctcatttagaaatccaaaaggttgacctgacagttcaagaaaaggagaaatatcttaatgtgtctcgctggt

SEQ ID NO: 15743 - DNA, 100 bp, Homo sapiens
cccaaccgcacctgggactgcgtcctggtcaaccccaggaactcacagagtggattccggctagcttgtcactttctgcaaaggtttccctcagggagcc

SEQ ID NO: 15744 - DNA, 90 bp, Homo sapiens
taagcaaggaaattgaactaagaaatggagagcctaggcgaggacttctaccgcgaggccatcgagcactgccgcagttacaacgcgcgc

SEQ ID NO: 15745 - DNA, 74 bp, Homo sapiens
cttcaggaatggagacacggcttcccccaaggaatatacaggtgaaagacccctgacaaaagacaatcatcttc

SEQ ID NO: 15746 - DNA, 137 bp, Homo sapiens
ttggggagaagaggattggaggtgtcagtgttaaaggaacctctacaacgaaggtgaagccacggaagataagtattaaaggtggaagaaggtccatatctttttctgtgggtgcttcaagtgttgttggaagtgga

SEQ ID NO: 15747 - DNA, 75 bp, Homo sapiens
ggattgctgtgtgaaaaccgagctgctgggagaaggtcatcatcagatttgaaatatttaaagtggatacaaaac

SEQ ID NO: 15748 - DNA, 80 bp, Homo sapiens
acctgaccttgggactcaagtgaaagtgatcgttgacccaggaggagattgtatttcgttactaccacaaactcaggatg

SEQ ID NO: 15749 - DNA, 90 bp, Homo sapiens
atttcccctatgtttccatattggacccacggacagttaaaagaagatggatgcacagtgttcagccaaggtcaatgcaaggaagaggag

SEQ ID NO: 15750 - DNA, 97 bp, Homo sapiens
ggcagactgacaactgtgagacatgcacttgctacgaaacagaaatttcatgttgcaccctcgccactggcttcaccacgcggtcagacattgggcc

SEQ ID NO: 15751 - DNA, 100 bp, Homo sapiens
gcgggaagaacgggaaaacaacctgcccgaagacagctgatgcacctaatccaggactcattccagatgcagatgcagtaggcgtaactgttgtgctaat

SEQ ID NO: 15752 - DNA, 75 bp, Homo sapiens
tggagcctcagttggaagcagccgatccagcctgcggagcctgtggggcagatagaaaatcctcgatacctgaga

SEQ ID NO: 15753 - DNA, 50 bp, Homo sapiens
gggcgcccctgaacctgcaccaggtaaaatgtcggttccaggaccttacc

SEQ ID NO: 15754 - DNA, 50 bp, Homo sapiens
agagtcggcacctgaaggacatggagacaaatttacatgtattggagacc

SEQ ID NO: 15755 - DNA, 51 bp, Homo sapiens
ctttcccgctggcgcgcagcctcagctagatggagtttcactcttgttgcc

SEQ ID NO: 15756 - DNA, 95 bp, Homo sapiens
ttggaaaagagactgttcaaaccactgaggatcagattttgaagagagatatgccaccagcatttattaagatccatgctgcagaatggtgtctc

SEQ ID NO: 15757 - DNA, 80 bp, Homo sapiens
tctgtgacattgcaagggaaaaagtaaataaagctgctgtttttgaagagattcgggaactggagcctctcctctgtcac

SEQ ID NO: 15758 - DNA, 100 bp, Homo sapiens
acgccagtcaccagcaggagcagccaaccagcagcagccatcatggaggagagaacattgaaagtattctctaagctatttgaagagagtgactaaatgc

SEQ ID NO: 15759 - DNA, 75 bp, Homo sapiens
aggacattgaaaataagatggaacccatccacataaggtctgccacaagagatttagcagcaccagcaatctcaa

SEQ ID NO: 15760 - DNA, 90 bp, Homo sapiens
cagagacagaagatgaagaggagaaaagccaagaggaccaggagcagaagaggaagagtctcaggggccagccaagcccccacccccaag

SEQ ID NO: 15761 - DNA, 90 bp, Homo sapiens
gttcgagtgttgcagagcctgcggggcaagatctgagctgacatggacccaaatcctcgggccgccctggagcgccagcagctccgcctt

SEQ ID NO: 15762 - DNA, 88 bp, Homo sapiens
agaaccagaagacgatgaggctcctgcaaaagcgtgcttatgcgcgaagagactgaactgaagacgctgcagactcagatagcaaaat

SEQ ID NO: 15763 - DNA, 96 bp, Homo sapiens
atttacagtcggaggagtactcggtgaaatcctgtcctgaagactgtaagattctggaacttttcaaagcctgactctcttcttgaaacagtggag

SEQ ID NO: 15764 - DNA, 99 bp, Homo sapiens
tgcaagcttttttaaatggtgccaaaggaggtaacccttttcttttccgacaagtactggagaactttaaactaaagaatctcgctctgtcgcccaggc

SEQ ID NO: 15765 - DNA, 75 bp, Homo sapiens
cagacctgcatatttggtgaccttaagtgtacaggtggaacctgaaaatgctgcagtgccggagctgcctgcagt

SEQ ID NO: 15766 - DNA, 75 bp, Homo sapiens
tgtctagaccccacggcgacaccgccaagaagcccatcatcggactgagcagggggaggaacatttaagctgatg

SEQ ID NO: 15767 - DNA, 100 bp, Homo sapiens
ctgcagtcgcctccaacacccgctgctgcccgcccgctgcctgcctgcctggcatctctctctcccgagctccttaataagcatttatagtcagtttttg

SEQ ID NO: 15768 - DNA, 82 bp, Homo sapiens
ttgcgctccgtgcacctcttgcgggaaataatgaagatgtttcattttcaagaccagcagatcttgaccttattcagtcaac

SEQ ID NO: 15769 - DNA, 71 bp, Homo sapiens
aggatcttaaccaccattatcttaactgaggcacccaaaatgctgggcgaggaccatgagaagaccaagga

SEQ ID NO: 15770 - DNA, 96 bp, Homo sapiens
taaccgctataatgaggatgatgcaaaggcagcaagagatgcacaggaggatactgctggtcaagagaggtttagaacattaactcccagctatta

SEQ ID NO: 15771 - DNA, 75 bp, Homo sapiens
ccctgtcaagaaggtgccggtggtgcgagtcttcggagcgaccccggcagatcggacagctggcttttaaaggaa

SEQ ID NO: 15772 - DNA, 49 bp, Homo sapiens
tccagggctgttacatgcctacccggacttgaaagaggagattgatatt

SEQ ID NO: 15773 - DNA, 83 bp, Homo sapiens
cgggtctgctctgtgtgccatggacgggaatactcccccagttgcaagaggcgcaggaccgtggaagacttcaacaaattctg

SEQ ID NO: 15774 - DNA, 97 bp, Homo sapiens
tcgattcgctgtcggaggagaatgagaccctggtggagtttgctattggtattggcaagcttgccagtgtacctgctggtggggctgtagccgtctc

SEQ ID NO: 15775 - DNA, 82 bp, Homo sapiens
tgtggtgcctacccccatcactgcttccctcagccataacagatgggggactcaaggagatttcaccaccacccatcctcgg

SEQ ID NO: 15776 - DNA, 75 bp, Homo sapiens
ccgagggctaccacgttctgcgggaagaagaagaattttcagttcttgccagctgcctgggacttctgccaacgt

SEQ ID NO: 15777 - DNA, 80 bp, Homo sapiens
cggcgaggccctcatgtaccacacggacctgaagaagtacggggctaccactgtggtgcgtgtgtgtgaagtgacctatg

SEQ ID NO: 15778 - DNA, 83 bp, Homo sapiens
ggatccgcttcgtagtagattccgagtttatgtggccgaggcagacaagtggaattaggccttgctgcaggggacttcatttc

SEQ ID NO: 15779 - DNA, 75 bp, Homo sapiens
gcaaagcgaaattggtcattctcgctaacaactgcccagctttgagccaagtctgaaactagctgggaatctccc

SEQ ID NO: 15780 - DNA, 101 bp, Homo sapiens
gtaaggtccagctggtcaccgacagggatcacttcatccgaaccctcagcctcaagccgctgctcttcgtggatccggattggtgccaatgtctccaactt

SEQ ID NO: 15781 - DNA, 49 bp, Homo sapiens
gaacaagaagtcttaccctcaggtcaaaaatacgatgcaaagccatata

SEQ ID NO: 15782 - DNA, 90 bp, Homo sapiens
caaaggaaaatgcatcttctaagtttttggcaccatatactactttttccagaattcatacaaagagtaatgtgacagtgatgataacat

SEQ ID NO: 15783 - DNA, 75 bp, Homo sapiens
cactttttgcttgcagcgtccatgaagcagtgtttgaggcacgagagcagaagacatgggaaagcggaaccacca

SEQ ID NO: 15784 - DNA, 100 bp, Homo sapiens
cacttgcctccctgcttcctgctgctggcactggtccttgtcccctcagctcgagctgtaaaagccaaaggtccggtgatgatcccatacccttttttcc

SEQ ID NO: 15785 - DNA, 95 bp, Homo sapiens
gagggattgtgtgctcccgggtgggtgtgctggcgactggcacggccgagtgttggagcgggccggagagaagtagagtgggctgcgaggagaag

SEQ ID NO: 15786 - DNA, 83 bp, Homo sapiens
caatgagggagtctcctgtatcagcaccgttagagggccagtactaaagtggaagtggacatggagaaagcagaaagcctgca

SEQ ID NO: 15787 - DNA, 100 bp, Homo sapiens
ctgctggttagtgtgctctgagggagggtccgagccagccgctgttttgccggaggagcccctcaggcccttgccttgcgccatggactggcagccagac

SEQ ID NO: 15788 - DNA, 74 bp, Homo sapiens
tgctgcggacggcgctgcggtacatccagcttgcattgaaaggctctagttacagtggacttcttgaacgacat

SEQ ID NO: 15789 - DNA, 98 bp, Homo sapiens
cgggactcccagggctccagggccctcctccggccccaggcctaccccagtcacggacgattgggctaatggatactacagacaacagagaaaacttg

SEQ ID NO: 15790 - DNA, 74 bp, Homo sapiens
cgagctgggcgacggcgccttcggcaaggtttacaagggtggttctcttcccaaagtggaagccaaattcatca

SEQ ID NO: 15791 - DNA, 88 bp, Homo sapiens
gcctcccaaaccaccacagattcactattgtgatgtttgtaagatcagctgtgctggaccacaggaggaaaaggcttctcttttacat

SEQ ID NO: 15792 - DNA, 89 bp, Homo sapiens
gcagtcctcctgcctcagtctcccaaagtgctggaattacagggtcttaaaatccttgcacgtttgatgactgccaaattcttgcatac

SEQ ID NO: 15793 - DNA, 99 bp, Homo sapiens
gcaccaaatcccacagaggcatctgagtttgcattgagactccttgcattccgccagatacacaaagttctaggcatggatccattaccgcaaatgagc

SEQ ID NO: 15794 - DNA, 100 bp, Homo sapiens
caagaagaaggaaaggacccagagggacaacccactgctagcaccccagagagtgaggagtggagcagcagccagcctgtgaataaccctataccttcca

SEQ ID NO: 15795 - DNA, 88 bp, Homo sapiens
ttcaggaggtacccaaactgaaggctgcccaagcgccagaggtgacctatgaggcagaagagggctccttgtggacgttgctactcac

SEQ ID NO: 15796 - DNA, 88 bp, Homo sapiens
gcttccctgcggatgctttcactctcagcaactttgccaccagcagccacaacagatcagaacaagcgagtgagcatcaataaagatg

SEQ ID NO: 15797 - DNA, 75 bp, Homo sapiens
atgattacacatggtgtggatgtgacagcccaagatactaccgttgtggaagatatcaataagcgcagagagccg

SEQ ID NO: 15798 - DNA, 75 bp, Homo sapiens
cttatggcctttgtctgctccctgcctcgaaatcacctggctgagcacgcagacactgtgcagctggtgtccggc

SEQ ID NO: 15799 - DNA, 98 bp, Homo sapiens
gctgccgccgctctgaggagttaaagggacgtgtcctcggagtcggacaataacatcagacagatcaaccaggaggcagcacaccggcgcttccgctc

SEQ ID NO: 15800 - DNA, 89 bp, Homo sapiens
cattttggaagcccctgtttgccaggcgtgaaaaaatacctcactgtgacctacgcatgtgtacaagcccaccaccaacagcagttgta

SEQ ID NO: 15801 - DNA, 98 bp, Homo sapiens
gaaatagtgaagaatgatgatggtgtcattccctgtcaaaataagtatccatttcaggcttgtttctgtgatgatcatacaaggagcaaagtgtttaa

SEQ ID NO: 15802 - DNA, 53 bp, Homo sapiens
cagattcgcagtggtcgcttcttctccttgtaaaacgatgtttgcagaaatgg

SEQ ID NO: 15803 - DNA, 98 bp, Homo sapiens
aaaagcaaaaattgttgaaccatacaataagatagttgcccggactgcacaactagcaagacttcaggaagaagaatttggtgttgatgattcttatt

SEQ ID NO: 15804 - DNA, 100 bp, Homo sapiens
accctaatggtctttttgttcaagataaagtgattttttgcctttgttgattaactggacaaattcaggaggcaagtgaggcctatctggttggcctttt

SEQ ID NO: 15805 - DNA, 95 bp, Homo sapiens
ggggggagcgcggggcgacgctggctgcagggacccggtgacagcgtgagagtaacagtgtatcatgtatgccactgattccaggggacactccc

SEQ ID NO: 15806 - DNA, 100 bp, Homo sapiens
agaagtgcaagagcagaggccttctctagaccttgccaagatggcacagggggatatgagactttctactcggaatatcctgagtgttgcgtggatgtaa

SEQ ID NO: 15807 - DNA, 83 bp, Homo sapiens
agcaccgcagccttgggcctcgcgccggctatggccgtgccctggggctgagccctcagggcgaccattgacgaggtggagac

SEQ ID NO: 15808 - DNA, 95 bp, Homo sapiens
aaaatcaagtaaaggaacccaacagagatctcttctgttctccactgctagactccagatgtggacttttggattatccccatgatccaaggttt

SEQ ID NO: 15809 - DNA, 88 bp, Homo sapiens
ggctgtggaccgggcggcacgcacgcggtgcagggtaacatggcggatgcggaagaccatcttgattcaaaacatctatcgtaatccc

SEQ ID NO: 15810 - DNA, 85 bp, Homo sapiens
acacctccaggagaagaacccagaaaattgatcagttctaaaaaaccatgccccacaaactggtacggtgcaaggcctgtgctga

SEQ ID NO: 15811 - DNA, 98 bp, Homo sapiens
gagaaaaagaacattactgtcttgagcagcctgggagcatcctgggccccgaatgtgcctcctgcaaaagagtattttctccctacttcaaaaaggag

SEQ ID NO: 15812 - DNA, 98 bp, Homo sapiens
cagcgacaacagcctggaccccgataaggtgtacctcggccccccacgcctcttccaggagctgcaggacctgcagaaggacctggccgtggtggagc

SEQ ID NO: 15813 - DNA, 120 bp, Homo sapiens
caaagagctgctttgaatcagcagatcctgaaagccgtgcggatgaggaccggagcggaaaaccttctgaagcaggaaactgcatatcttctggtttacatgaagatggagtgctaatgg

SEQ ID NO: 15814 - DNA, 100 bp, Homo sapiens
ctggtgaacgggaggtgtgtcctgggccggaagaccaagtggggcatcattgaaggtgtcatggagaaactccagctgggcccagagattctgcagcggg

SEQ ID NO: 15815 - DNA, 75 bp, Homo sapiens
gcggagttgctgggtccaccgacccttaccctcagcgagagaagtaaccattgtctccagctttaagaccacgac

SEQ ID NO: 15816 - DNA, 144 bp, Homo sapiens
gacgcaccgctccagccgcccgcgggccagcgcaccggtcccccagcggcagccgagcccgcccgcgcgccgcagaaatgatggaagaattgcatagcctggacccacgacggcaggaattattggaggccaggtttactggag

SEQ ID NO: 15817 - DNA, 100 bp, Homo sapiens
ccagcagcatgtcaagtttggcaagactacagtggtagtggaggccgaagcggcgggaacagctacggctcaggcggggcatcctacaacccagggtcac

SEQ ID NO: 15818 - DNA, 100 bp, Homo sapiens
caggctgagctgaaggcacttagtgcccacaaccgcaccaagaagcacgacctgctgagcgggacgaccctgggacagtctccactggggcagatccagc

SEQ ID NO: 15819 - DNA, 76 bp, Homo sapiens
acctgtttcacggaacctcaggatctggcatcagcccctcccatagccaggtgtgactgcacagaaaagttacaaa

SEQ ID NO: 15820 - DNA, 90 bp, Homo sapiens
ctcgccagcagccgtccggagccagccaacgagcggccctgccctgggagaagccctgccacacgtcgtgcccacgctgagggcctgtct

SEQ ID NO: 15821 - DNA, 75 bp, Homo sapiens
gtttttatactcattcaccattgacaattcaacttactctctcttcccacagagatgtgctccggcatctattcg

SEQ ID NO: 15822 - DNA, 100 bp, Homo sapiens
gaaaggtctgcaggtacaaggggagtggaagcaaaggctccataggtctcggaagggtgctgacctggaccgggagaagaaggctgccgagtgcaaggtg

SEQ ID NO: 15823 - DNA, 74 bp, Homo sapiens
accacgacaaaaccaccctagtagatatagttgtaggtactccgggaagactagatgacttggtgtcaactgga

SEQ ID NO: 15824 - DNA, 98 bp, Homo sapiens
tggttccttgttccgttttccaattgcaacaacggtgagcttgtcggccacagactgctacattgtgcatgagatctacaatggggagaatgcccaag

SEQ ID NO: 15825 - DNA, 98 bp, Homo sapiens
caaagatgagatttacctgtgagatgtttcatcccaacaacggggtctggctctgtcacccaggctggagtgcagtggcacgattatggctcattgca

SEQ ID NO: 15826 - DNA, 89 bp, Homo sapiens
gggagaatatttaatggaaaatcgcttggttaaaacctgacacttttaacagattttaggtgatgggcaagtcagaaagtcagatggat

SEQ ID NO: 15827 - DNA, 50 bp, Homo sapiens
cgagaagtccccgaccgactggaggaaaaggcttctcttttacatcgtac

SEQ ID NO: 15828 - DNA, 100 bp, Homo sapiens
atcgcaaggctcttccctgaccattttctactgtccctgcgcgaggtccctgtgcgttttattgcgacctgccggtgggaactttgtctccgagtcggag

SEQ ID NO: 15829 - DNA, 75 bp, Homo sapiens
gcgagccgaccatgtcttcatttgcttccacaagaaccgcgaggacagaggtgcgcacacggtcagtgggcgagt

SEQ ID NO: 15830 - DNA, 90 bp, Homo sapiens
gagcagttgggaatcaggtctggaatactcctaaccaagaagttgcccaggaagtcctggctgagcaaggttggaagccctagttctcgc

SEQ ID NO: 15831 - DNA, 74 bp, Homo sapiens
acaaatactactacatcccgcagtacaagaactggagagagattaagaattcagtgtccagcagatcagcagct

SEQ ID NO: 15832 - DNA, 100 bp, Homo sapiens
agagggtgctggctgccgcgcggccgaggaacgttcactcacagggtacgctcatggagagagggcgcagagcaaaccatgtcacgccatccaatgacac

SEQ ID NO: 15833 - DNA, 81 bp, Homo sapiens
cggggtgagcgtcgaggaggcgcaggagactgaccgcaacggcagggtgaatgaaaactttgccattgatttgatagcaga

SEQ ID NO: 15834 - DNA, 75 bp, Homo sapiens
ctccttgccaggccttcaaccactatctcagtgcaatggtggcagctagactgtcttgcttgcttgctgaagtta

SEQ ID NO: 15835 - DNA, 80 bp, Homo sapiens
aaactcagcatgcttagcattcgagagaacaaaattaaacaactacctgctgaaattgatgctctctgtgtgggtatgtg

SEQ ID NO: 15836 - DNA, 100 bp, Homo sapiens
cgaagacatgacacttacaagatggacagggatgataattgggcctccaagaggatcagtgtccttcagtgatgtggctgtgggcttcacccaggaggag

SEQ ID NO: 15837 - DNA, 96 bp, Homo sapiens
tcaaaaactttcatgtagacctttgtcgtccatttgctgctcactgatctcactctgttgcccaggctggagtgcagtggcacaatcacagctgac

SEQ ID NO: 15838 - DNA, 101 bp, Homo sapiens
gctgacacttgtgtttgaatatgtgggtcagtatagaccttctgatttgctgtgccctgagacatatgtttgggtacccattgagcaatgcctgccttcac

SEQ ID NO: 15839 - DNA, 74 bp, Homo sapiens
cccaaaggctcccatggagagctcaggtggatgaagacctgatcattgaagttcaccagttatttttctcaaga

SEQ ID NO: 15840 - DNA, 100 bp, Homo sapiens
gcactatcgcatcgacaaagacaagacagggaagctctccatccccgagggaaagaagttcgacacgctctggcagatgaaggatttgggggcagagcac

SEQ ID NO: 15841 - DNA, 96 bp, Homo sapiens
gatggatatcaggggtcacagacatttcatggggctccactaacaggcctgtatccggtgtccgaggcgaactcagtaagatgatgttaagaggaa

SEQ ID NO: 15842 - DNA, 100 bp, Homo sapiens
ctccttcctccgcctctcgctaccaccgccgacggtcttcagggtcacgagatgagcgctatcggtcaggaggcactggctacaattaggcttctcgacg

SEQ ID NO: 15843 - DNA, 100 bp, Homo sapiens
tccagaacttccagctgcccccaggtgttgagccagtgcaggttcaggaaactgtggaaaatcacttgaagagtttgctgatcaaacattttgacccccg

SEQ ID NO: 15844 - DNA, 75 bp, Homo sapiens
accgtgaggcagggggacacagccatcctcaggtggaatgaatcttacttgttgaatatcttctggttactagtt

SEQ ID NO: 15845 - DNA, 100 bp, Homo sapiens
ccctctacgaaggcggctacttcaagactggtcgaattgacaaatcttaccctacagtatgtggccacacaggaccagtgctggacatagactggtgccc

SEQ ID NO: 15846 - DNA, 90 bp, Homo sapiens
tagaaacttttgccagcacattcttacgacagggagcccagaaggcaatggtggcttgctatccgggaaatggaacaggttatgttcgcc

SEQ ID NO: 15847 - DNA, 100 bp, Homo sapiens
atcagacagtgttgatgaggcatgaaaacattttggacggacaccctccctgtggtgattatttccaacatgaaccagctctcaattgcctgggcttcag

SEQ ID NO: 15848 - DNA, 75 bp, Homo sapiens
ctcttctgcactgacaagaacgagcggtctattatcctcccagtccacaacgctgaaccgtggctggacgaatgt

SEQ ID NO: 15849 - DNA, 100 bp, Homo sapiens
atcccaccaaagggggctgctgaccgagagagctcactcagccaggctgacggggtacgggatccaccactgctttgccaggagcatgatgggccacgag

SEQ ID NO: 15850 - DNA, 74 bp, Homo sapiens
cacaaaagctggacaagcgaagcttttaatctagacaacgagcaaccagattatgatatggattcagaagatga

SEQ ID NO: 15851 - DNA, 100 bp, Homo sapiens
tggtttgtgtatgacgccgagggacctcacatcaacttctaccagctgggcaagctggcctcattttttctgtctagggtggatgccttgagccctcagc

SEQ ID NO: 15852 - DNA, 103 bp, Homo sapiens
aagatgcgactgctacagggaccatgggacactattacgcaacagggtcaaagaattgactgtagatccaactgctgctggtgatgttcgtccaataatgcac

SEQ ID NO: 15853 - DNA, 156 bp, Homo sapiens
aaccagggtccctggcggtgcggcggggccggcgggtgcagcggaggcggcggcggcggcggcagtgacgtcgccgggggaaactgactctactctgtgatgccaagacagatgggagtttccttgtacaccactttctctccttctatctcaaag

SEQ ID NO: 15854 - DNA, 50 bp, Homo sapiens
cttgcagaagctgttcccaccatgaaggattgttaaaatgagtcttcgga

SEQ ID NO: 15855 - DNA, 87 bp, Homo sapiens
cgctgagctggtcgccacctggcgacccttcccctccagtcacctggggatcgcttacacctgagacgaactacagaacagcacgta

SEQ ID NO: 15856 - DNA, 100 bp, Homo sapiens
aagtaaaacggtacaagctgaaccacttattcaagacaatcctgaatgccttaagatggtgataagtaataatagacgtggatggaatacaactagccag

SEQ ID NO: 15857 - DNA, 71 bp, Homo sapiens
aaaacggcgagagtgggcgagaacgtccactgcgggccggcgaaagctgctccacagcacctgttgccttc

SEQ ID NO: 15858 - DNA, 83 bp, Homo sapiens
cctgcaacaagttaagctgaagaccgaagcaagagctggttcaggagtctcgctctcagtcaaaatctccaacgggaactcct

SEQ ID NO: 15859 - DNA, 100 bp, Homo sapiens
ctgccagcatttatgaaactgtgctccaagtagggctttcatgagaaggacaagaagccatattgccgaaaggatttcttagccatgttctcacccaagt

SEQ ID NO: 15860 - DNA, 87 bp, Homo sapiens
tcaaccgattctattcagtaccaccttcagatggaggataagaatggacggtatatttgcgtgctctcgtgagaaatctttttaatg

SEQ ID NO: 15861 - DNA, 103 bp, Homo sapiens
agcattgtaaatcaggtttttctaagaaaaccaagctctgtccgtatcgatcaactggatcgtgaacagttcaaccccgatgtgattacttttccgattatcg

SEQ ID NO: 15862 - DNA, 100 bp, Homo sapiens
gactgaaccaagacttacccgaagttgccgcggggccttccgatcccctaacccgagcaacttcccgagaagagaagaacctccaaggctttctggaaca

SEQ ID NO: 15863 - DNA, 82 bp, Homo sapiens
aaatccatcaagctcatcaaaagaccctggctgggcatccatcagcaggggtgtgctggtgtgtgacgagtgctgcagcgtg

SEQ ID NO: 15864 - DNA, 96 bp, Homo sapiens
tgatgcccccatgttcgtcatgggtgtgaaccatgagaagtatgacaacagcctcaagatcatcagcactgcccaacaacaccagctcctctcccc

SEQ ID NO: 15865 - DNA, 74 bp, Homo sapiens
tgacaagggcagagatgatccaggacaacaggaacattatacatggcagtgattctgtggagagtgcagagaag

SEQ ID NO: 15866 - DNA, 100 bp, Homo sapiens
attgcattttctggaaacaaatgggaacaaaaagtatactcttcgcatactgggaaaacgggccttactatacatcatatcccccatcaccagatttgtg

SEQ ID NO: 15867 - DNA, 75 bp, Homo sapiens
gagcccctggaggacttggacccctactatgcagacaaaaagatatttagcttcctgtggtatactgatgagcag

SEQ ID NO: 15868 - DNA, 83 bp, Homo sapiens
gttcttcgggtgctgcggagccatgcgggagtcgcaatgtgtgcttggatcagtcagtttaggggctggtgcaaaggatgagt

SEQ ID NO: 15869 - DNA, 100 bp, Homo sapiens
cgagaccgcggccgggaccgagggtcatccacagcaccgtggtggacacgtctgtgctcttcccccaccgcctgggcctcccctacaagcggtccctgcg

SEQ ID NO: 15870 - DNA, 100 bp, Homo sapiens
aacctcattgattttggccagaaaaagaatgaggtgcagaacatcaagttcaacagttcaggccagtgcgaagtgcccttggttcggacagacaacccca

SEQ ID NO: 15871 - DNA, 96 bp, Homo sapiens
ccctggtcgagaactgccttgtcccagacttatggatccgttacagtcagtacctagtcccagcatgccttctgagaccccccaggcagaagtggg

SEQ ID NO: 15872 - DNA, 75 bp, Homo sapiens
gtaccttagaactctatggagttgaattccactatgcaaggcagtgtttggccagcgcttggatgagactgtggc

SEQ ID NO: 15873 - DNA, 100 bp, Homo sapiens
aggatttttggcctaccctccaaagaaaagtggtgcttcatgccccacctccaaccaagatcaaacgggagctgcacagcccctcctctgagctgtcgtc

SEQ ID NO: 15874 - DNA, 75 bp, Homo sapiens
ccagcctgcggagcctgtggggcagcacaagtgcatacaccttgatagcaccaaatataaaccggagaaatgaga

SEQ ID NO: 15875 - DNA, 100 bp, Homo sapiens
ctagcagatgtggttggaatccttgctgtgctgaatcctggctgtgtgaccccaaggtatttgaagtataccatacaactgttttgaaaatccagcgtgg

SEQ ID NO: 15876 - DNA, 100 bp, Homo sapiens
atcaactgccatcagggaaagccgttgcctatgggagagtcccgtattctcagagtaaaagttgtttctggaattgatctcgccaaaaaggacatctttg

SEQ ID NO: 15877 - DNA, 82 bp, Homo sapiens
gctgccagcacttttaaacattacagttgtataaggcctggttgcagtatgcctgaaatttgggatgtagaagatcctgcca

SEQ ID NO: 15878 - DNA, 100 bp, Homo sapiens
caggatgattgtgcatgtgccttttggaactcgcgggggagaagctgttctttgccaggtgctgctgcatgaggaggcgggtgattctggctttgtcagt

SEQ ID NO: 15879 - DNA, 75 bp, Homo sapiens
gcgggccccgaaggctctccatcgaaggcaacattggtaagaatgattgatgttggctgatattggagtgctcat

SEQ ID NO: 15880 - DNA, 82 bp, Homo sapiens
ggaggagtacaaggacatcctgcgcaaggccgtgcagaaggccctgggaggagcggggacactgaggacctctctccaaatt

SEQ ID NO: 15881 - DNA, 100 bp, Homo sapiens
accaaagccctggcagggaagctggtggagacgccaaatggagcggagtccctgaaagatttttgccaggaagatctggaagaagaggaaaacctgcctg

SEQ ID NO: 15882 - DNA, 82 bp, Homo sapiens
ggcctccagggtctgcagacaaggcaggtttttgaatcagagccgacaggcacttgaattgaaaatggaaaaccctactgct

SEQ ID NO: 15883 - DNA, 100 bp, Homo sapiens
ggacaacatcaccgtgaggcagggggacacagccatcctcagtggaaggagaacatgaatctctcagaggcccaagtacaggcgttagcattaagtagac

SEQ ID NO: 15884 - DNA, 80 bp, Homo sapiens
cgacgttgaggccgcgttgggcggttcagactcagggtgctgctctgttaaaagcgaaaatgaaacaattgcctgcggca

SEQ ID NO: 15885 - DNA, 83 bp, Homo sapiens
cgtggagatcgtcccgcgcctgccggtcctcagccctcgctctcgctggcggagcagcacctggagtcgcccgtgcccagcgc

SEQ ID NO: 15886 - DNA, 83 bp, Homo sapiens
cagccgctcgtcagactccagcagccaagatggtgaagcagatcgagagcaagtcattgaaattatgagactatcattcaaat

SEQ ID NO: 15887 - DNA, 100 bp, Homo sapiens
ggatagagttcctgctgacttacgcttgtttgagccatccagtccaatggatcagatgggcaagatgagacctcagccatatggcgggactaacccatac

SEQ ID NO: 15888 - DNA, 100 bp, Homo sapiens
tagggccaagtcaattctggagacctgggtgtgggtcaagcaaccagggaagctgccaaagaatgtcgacgtcgaaagaaagaatatgtaaaatgtctgg

SEQ ID NO: 15889 - DNA, 90 bp, Homo sapiens
gtcgaatctgagcaaaggcacgggcagccggaaggacaccaagatgcggatccgggcctttccgaaaccacaacaaaggtgcttgcccat

SEQ ID NO: 15890 - DNA, 100 bp, Homo sapiens
caagcatgtacggcaaaggcaagagtaacagcagcgccgtcccgtccgacagccaggcccgggagaactgagctgactgctgcccactttggaggaggcg

SEQ ID NO: 15891 - DNA, 82 bp, Homo sapiens
cggcgcggcttctgcctggagagttatacatgggaagctgttgataccaaaaataatgtactttataaaatcaacatctgtg

SEQ ID NO: 15892 - DNA, 97 bp, Homo sapiens
ctggaagatgggaagaaagaagcagctgccagtgagagtctgagaaaactgtgcgtcttcaagaaaattgagaggcattccattcactggccctgcc

SEQ ID NO: 15893 - DNA, 100 bp, Homo sapiens
ggggaccccctcgcttcctgctcgacctgcggcagtacttgggcagccttaagtgccttgaaacaattttctgaacaaggactggatccaatcgatggag

SEQ ID NO: 15894 - DNA, 82 bp, Homo sapiens
atgtttgcctggtctatagttgctgtttttggaaggaagaaagatggaaagcggtgcagttctgctggaatccaaatcctcc

SEQ ID NO: 15895 - DNA, 80 bp, Homo sapiens
gactctcggactgagaaacgcaaggtgaaatgacaatggatgctctgttggctcgattgaaacttctgaatccagatgac

SEQ ID NO: 15896 - DNA, 73 bp, Homo sapiens
gcacgcggtgcagggtaacatggcggatgcggaagctttacatggtgagaaccatgctagagtccctcattgc

SEQ ID NO: 15897 - DNA, 75 bp, Homo sapiens
tgggcccgttcctggtcttctcccccaggtatggaaaagttgaggccactcgcatattgttagagaaaggaaagt

SEQ ID NO: 15898 - DNA, 51 bp, Homo sapiens
cagaccagctctcaggatgactttatcatggaagggaagtggttgctgtgt

SEQ ID NO: 15899 - DNA, 75 bp, Homo sapiens
ccctgctgatgtcagtgttatatcctccaggaatactggccaggtggataatattaatgcagctgtgatggattt

SEQ ID NO: 15900 - DNA, 50 bp, Homo sapiens
cgaatatcgtcatcgttagaaggttcttcagaagaggatgaggtcattca

SEQ ID NO: 15901 - DNA, 82 bp, Homo sapiens
ccctgtgggtgctgggcctctgctgcgtcctgctgaccttcggtctcctctgagcctccggcctccataagacccaaaacag

SEQ ID NO: 15902 - DNA, 75 bp, Homo sapiens
aactgaaacctccaaagcgtcagccagagactgctgctactttgaaacgtacgatagaggccctgatggacagag

SEQ ID NO: 15903 - DNA, 75 bp, Homo sapiens
ccttgatcctcctcctaattgcagcaatgtttttggaacagtgccagtggttgcttctgcacagacacagcctgc

SEQ ID NO: 15904 - DNA, 74 bp, Homo sapiens
gccccgaccgcgtgctggagctcttcgacccacccaagtttaaaattggtggtgaatggtggacatggatcgat

SEQ ID NO: 15905 - DNA, 100 bp, Homo sapiens
cttcggaagcccgttcggcctggaggagccgcagtgggtcccggacaaggaggaatactcccccagttgcaagaggcgcaggaccgtggaagacttcaac

SEQ ID NO: 15906 - DNA, 74 bp, Homo sapiens
agaagctgaatatgctgcattagacaaacgagaggtatcatgatattagctggtttgacatcaagtcatttgtg

SEQ ID NO: 15907 - DNA, 100 bp, Homo sapiens
ctcacaattactatgaacttctgtatgcctttcacatctatcgccacaattaccgcaaggattactccaaaggtttcggcggcaaatacggtatcgacaa

SEQ ID NO: 15908 - DNA, 100 bp, Homo sapiens
agcgacttccagcgcagagtgccctacaactacctgcagcgggcctacatcaaggatgacacttctgtggtgtgtagtgagtctctacttttatggaatc

SEQ ID NO: 15909 - DNA, 74 bp, Homo sapiens
tcttgaatgacatccgagcgaaagagaaagaggtagacaagggcgtggtccccctggcagggacaaatggcgag

SEQ ID NO: 15910 - DNA, 75 bp, Homo sapiens
catggagtcttgtgaaatcgcgtggactgcaacacccagcagcgcggatcttaagattgaaagtgatgttcaaga

SEQ ID NO: 15911 - DNA, 100 bp, Homo sapiens
tcggagctgcgcgcggaaccgtgctgccccgccccgctccacccgtgagggaaagaccacagcaagattctttcattcgtctcctcctagcctgggggac

SEQ ID NO: 15912 - DNA, 73 bp, Homo sapiens
tcaggtggccagccctcagcccccacatcctggcgaagacgggaaggaggtgaccccagtgtccagcatccct

SEQ ID NO: 15913 - DNA, 110 bp, Homo sapiens
aacctactgttgacaagaggagttgatggcagttttttggcaaggcctagtaaaagtaaccctggagacttcacactttccgttagaaatcgagctatagcagattatct

SEQ ID NO: 15914 - DNA, 51 bp, Homo sapiens
cttgttaatcacatggatgttatcagttggccttatttcctcagtggaaat

SEQ ID NO: 15915 - DNA, 100 bp, Homo sapiens
tcgggggtaggcaagacctgcctcctgttccgcttctcagaggacgccttcaacaccaccttcatctccaccatcggttctttatagagttggaagcaag

SEQ ID NO: 15916 - DNA, 112 bp, Homo sapiens
ccaaaagagaaagtggatgctctatcacagtttgatctcaacaattatgcaagagcagacgcctccgcctagacctgaagcctaccccatccccactcagacgtacaccaga

SEQ ID NO: 15917 - DNA, 83 bp, Homo sapiens
tagagataaaatgctctaatccccagagctcttcagtatccccatcagccagtttccgaggtgctgagaagcacagaaactcc

SEQ ID NO: 15918 - DNA, 100 bp, Homo sapiens
ctgaaggatggggaggagcggggggaggaggacccagaaggaataatcaagctgggaaggtggaaccctctccccctcagttatgtgacagatgcacccg

SEQ ID NO: 15919 - DNA, 89 bp, Homo sapiens
tgtgattaccatggcgaggagtctctgtccgggggcctggctaaggaaaccctattacctccagtatttgattttcatcaagcagctga

SEQ ID NO: 15920 - DNA, 98 bp, Homo sapiens
caacatcacagtcacatacagagatggccgagtggcacagctggagcaggtagtaggcctgtatcgattatgtggttcggcagcagtcaagaaagaac

SEQ ID NO: 15921 - DNA, 75 bp, Homo sapiens
ttgtagaaattcttatgaggcctacgatctctatccggggacagaaactgaaaaacttgcctaacgatatctcac

SEQ ID NO: 15922 - DNA, 98 bp, Homo sapiens
tgcagagcgcgcagtacctccgatataattgaccctgcaatcctgcgcccgggccgcctggacaaaacactgtttgtgggtttaccgccccctgcaga

SEQ ID NO: 15923 - DNA, 88 bp, Homo sapiens
ggacggctgcgtcgcccgaggcgaggaggagcgctggcgcatgtgcagtctttgccaacaaaaaaaattaccaagaaacctattccag

SEQ ID NO: 15924 - DNA, 73 bp, Homo sapiens
gagaaccgtcagtttgagccagatgggggtcctgatgacaacttaattgaaggtggaggaacaaaatttgtct

SEQ ID NO: 15925 - DNA, 100 bp, Homo sapiens
attttgaagtcatttcacatcgaagccatgatttaaatatcggcgttaaggtttctaagcatgaattgaggaacagaagaagcagagcagatgatcggag

SEQ ID NO: 15926 - DNA, 83 bp, Homo sapiens
cagtcatcagatccaccatctgcttcaacggtcgggtcacaaatcttcgaagagtgacatatgttgttttagatgaagcagac

SEQ ID NO: 15927 - DNA, 134 bp, Homo sapiens
gactgtgctctcaaactttactttgcctcatttgaggagtgggaacaggcttcggcgaacacaaagctattgtggacgatgaaaggctctctgcagaggagatggatgagaggaggcggcagaacattgcttat

SEQ ID NO: 15928 - DNA, 97 bp, Homo sapiens
catcgcttgtcctgagctggttgccggggcaggggcggaggcggaggcagaggtggaggcgctttgaaaggggctgcgtattgtcagtttatggaca

SEQ ID NO: 15929 - DNA, 101 bp, Homo sapiens
cgaagatccggactctgggtgttttgctaccgtgaccgtttagccttatgtttgatcatcggccaaggtcctggcgagaactgcctctgcggctagctgat

SEQ ID NO: 15930 - DNA, 100 bp, Homo sapiens
aaaccaaacaccctcagctccacattgagagcaaaatctacaagatgatgcagggaggagtcaagccaagccagaccccgcagccgaaggacaagtgaag

SEQ ID NO: 15931 - DNA, 98 bp, Homo sapiens
tctcatctacagggacctgaagccggagaatctgctcattgaccagcagggctacattcaggtgacgtgcagctgtttgatctccagaaaagctccca

SEQ ID NO: 15932 - DNA, 51 bp, Homo sapiens
acggcgaagcagagggtccttgacattgggtgttgatgatgccttctatac

SEQ ID NO: 15933 - DNA, 100 bp, Homo sapiens
ccaagcccctcttcaggagtaagaggggttcgagttctggagcctggatgtgaatggaggcgatgagtggaaggtggaggatctctctcgagaccagagg

SEQ ID NO: 15934 - DNA, 97 bp, Homo sapiens
cctgcccttgccagtgcctgggccgctgggagccgttattggctgccgttaaggaccgttacgtttcccggcagtaaagactcctctcccactctgg

SEQ ID NO: 15935 - DNA, 50 bp, Homo sapiens
agaagtagatggagcagatgatggtggtcaagacgttaaaaagaaagttc

SEQ ID NO: 15936 - DNA, 101 bp, Homo sapiens
gagaagcctgggtctcctcccagagaagtggtccctcggccccgccctggtgtcacagaggctactattactgggcttcgtgggacacatatgcaacatgc

SEQ ID NO: 15937 - DNA, 100 bp, Homo sapiens
gacgtttccaccatagaccatttcctagaaataagcagtgaagaaaaacctggcgttgaacgtgtacataaattgtgcttttcctccgcaaccatgtctg

SEQ ID NO: 15938 - DNA, 83 bp, Homo sapiens
tggggagagcagcaccgaggccagcaagacgctgcccgccatcgagctcttggataagcacaagaatacagagagcatggtgg

SEQ ID NO: 15939 - DNA, 74 bp, Homo sapiens
ccgcgagccccgcactctctcgatgagtcggagaagtcccgtgattgcccacagtgagtatcaaaagtccaaaa

SEQ ID NO: 15940 - DNA, 75 bp, Homo sapiens
cgtacgccctcatggggaaaatctccccggtgactttcagagtctgtagaagaggcgacaccagggcttccaaat

SEQ ID NO: 15941 - DNA, 75 bp, Homo sapiens
cgcatcgcccgccgagccacagccacgatgatcgcgggctcccttctcctggtctatgctccatcagcaagcact

SEQ ID NO: 15942 - DNA, 74 bp, Homo sapiens
aaaaagttatcagccatgggggttccatcaatggtgagcaccagcctgaatgcagaagcgctccagtatctcca

SEQ ID NO: 15943 - DNA, 100 bp, Homo sapiens
gcggctgcggtcgaagaaggggacgccgacaagagacaagaggagcagcagcggcaccgcccctcaccctggagggtcctgtacaatctcatcatgggac

SEQ ID NO: 15944 - DNA, 100 bp, Homo sapiens
aaactcatcaggacggaagcacaggggccactcagagtcgcccgagaacactgttgcaagaattcaattccgtcttcctgatggttcttcctttacaaat

SEQ ID NO: 15945 - DNA, 51 bp, Homo sapiens
gcccggcgtctgcctcgagactgaagaccgcatggcacattacacttctgt

SEQ ID NO: 15946 - DNA, 100 bp, Homo sapiens
ggacattgtggcaatcatcctgaatgaatttagagccaaactgtccaaggctttggcagccaggagacaagcttctcaagtctttacagccgagaagatt

SEQ ID NO: 15947 - DNA, 83 bp, Homo sapiens
gaggagtagtcgctggagtccgcgcctccctgggacctagatgtgaaggctggtggaggctgtgtaatgaccattggagaaat

SEQ ID NO: 15948 - DNA, 50 bp, Homo sapiens
atttaaacaagagatttccacagaaggaagaaggtagataatgactataa

SEQ ID NO: 15949 - DNA, 100 bp, Homo sapiens
atccgggacagtgtgcacctcaagtatcgaatgataacagaaggcggagtcagcataaatcaccaacaagtaacaaatcctgagagtgttttaattgttg

SEQ ID NO: 15950 - DNA, 90 bp, Homo sapiens
tcctgaagaagatgaggacccaggtgttcagtgtactaatggtcacttgatgtgcgctggctgttttatccacctactagcagatgcccg

SEQ ID NO: 15951 - DNA, 87 bp, Homo sapiens
agcaccagatgcttcgggacctcataaaggaaagagcacaacatttggctgatatcctttcttctaaaggctttcctgctgagtgca

SEQ ID NO: 15952 - DNA, 90 bp, Homo sapiens
aatctcaaacaagacaacttgagctgaaagcgaaaaactatgctgaccagagtcacacagcggcagtgataaagagcacagggatgtgga

SEQ ID NO: 15953 - DNA, 100 bp, Homo sapiens
gggcgcgcgcgtcccgagccctccacccgtcgtgccggcgccgcccggaccgccagtgagttattctccccacctcagaagtaccagcttttggtgtatc

SEQ ID NO: 15954 - DNA, 75 bp, Homo sapiens
ttaaattgacaacaatggccatgtatccttgactggtctgagtgtctccaatggaaaggaccaacttgtagtgtt

SEQ ID NO: 15955 - DNA, 100 bp, Homo sapiens
ctacacggcccagggagagatgttctcagaccatctgcctgtgggacatcagtgccgttccaaaggagggaaaagtggtagatgcgaagaccatctttac

SEQ ID NO: 15956 - DNA, 82 bp, Homo sapiens
gcagccttgcgctgctctaatggtccggacttccgtgtccgcttacaaacacgcagatggcaagaagattgatggcaggagg

SEQ ID NO: 15957 - DNA, 82 bp, Homo sapiens
tcagcagacatgtcacatgtagcactactagccaaacacgttcatccacaccctggagaaccagcgggagttctcggcccgc

SEQ ID NO: 15958 - DNA, 101 bp, Homo sapiens
aatagactgcacctggctatcccaaccaggagggacgataagtacgtagagaaatcgacactcttaatgaacgtttagctgctgaaggacaagcgattgat

SEQ ID NO: 15959 - DNA, 74 bp, Homo sapiens
ggcgatgtcgaggttgtcctgagggatggacgcggggacacttcaaaccaaagcagtgggccacattcccccgt

SEQ ID NO: 15960 - DNA, 50 bp, Homo sapiens
gcaatagcccttcagtactgttgtacgggctacttctacaagtccgaaca

SEQ ID NO: 15961 - DNA, 90 bp, Homo sapiens
atttggagaagaatggaaagagaagactgatagagacttcgttaagaaaacatccagtacagacctttctgatatccctgctctccctgc

SEQ ID NO: 15962 - DNA, 83 bp, Homo sapiens
gagcaggctctgcgggaggtggagcacctgaagagatgccagcaggctgaccccgcactacatctacccaccagccatcgtgc

SEQ ID NO: 15963 - DNA, 100 bp, Homo sapiens
gggaatgcctatgccttcctgacactctacaacctcacacaggacatgaagtacctgtatagggcctgtaagatcctccaggtcctattgacaatactaa

SEQ ID NO: 15964 - DNA, 83 bp, Homo sapiens
cgagtttactgcatcagtgatggaggacagagtgcgacttaattcagtgcacaaatgagatgaatgtgaacatcccacagttg

SEQ ID NO: 15965 - DNA, 102 bp, Homo sapiens
aactcccaggctcaagcagtcctaccatgtcagccttcccagtagctgggaccacagctccccagcaaactacatctatcccttctacacctaaacgacgcc

SEQ ID NO: 15966 - DNA, 88 bp, Homo sapiens
tccgggagagggggagtgcgcggcggccgcagctgccacaaaccagggacctgatgcccagaaccctggacgggcagatcaccatgga

SEQ ID NO: 15967 - DNA, 82 bp, Homo sapiens
ctcagttggaagcagccgatccagcctgcggagcctgtggggcaggggcataaggaaatggtggcaggcacttcctcctaac

SEQ ID NO: 15968 - DNA, 97 bp, Homo sapiens
tcgacagggaccctacagtcttcgcccccatcctcaacttcctgcgcaccaaagagttggatcccagactggcacagcctccaggttggcgggctca

SEQ ID NO: 15969 - DNA, 75 bp, Homo sapiens
aactgcaggaacctggcctcactagatgcgacctaaagtcatgtggcacctccttcgaaggtacatggcatcccg

SEQ ID NO: 15970 - DNA, 75 bp, Homo sapiens
tcaacaatcaaaaagaaagctgctgttatcatcatggctgtagagggccgttgttcgagagagaactgcaagtat

SEQ ID NO: 15971 - DNA, 75 bp, Homo sapiens
ccttgttatagaagccttaaaggccacggacacagtcattccctctttaatggtgctctagatcaggcacatggc

SEQ ID NO: 15972 - DNA, 49 bp, Homo sapiens
gtggaggcagaggtggcatgggaggagtaaaggatgttctaaagaagag

SEQ ID NO: 15973 - DNA, 97 bp, Homo sapiens
cgggggtggaggacatcgacatccaggcgaactcggcctatcgctaccctccgaagtccggttgaattgaccaaagcaatggtgatggagaagccta

SEQ ID NO: 15974 - DNA, 100 bp, Homo sapiens
cccctttccagagagccagaaagaagccggagcctcaacagaaagctcctttagttcctcctcctccaccgccaccaccaccaccaccgccacctttgcc

SEQ ID NO: 15975 - DNA, 90 bp, Homo sapiens
ccgggacttcctctttcctcacctgcgggaggagatcctcagcggcgccttgcggagggaccccagggaagatggtgaaaggaatgggag

SEQ ID NO: 15976 - DNA, 76 bp, Homo sapiens
gacaaggccctgctcaatgtcatccacaccccgccaccttctgggtgaaccctcagttcaagatccggctggatga

SEQ ID NO: 15977 - DNA, 80 bp, Homo sapiens
aaatctggacgtgtaaaaagaactcttaacggccgatgcagctcttccaaagctaagccccactgtgttctccttgcctc

SEQ ID NO: 15978 - DNA, 75 bp, Homo sapiens
caaagagcttgctccctacgatgagaactggttctacacgcgagctggcaacgccctgctgcggcggctggtccg

SEQ ID NO: 15979 - DNA, 50 bp, Homo sapiens
gcctcccaaagtgctgtgattacagtcctccgggcctcatatgaacagga

SEQ ID NO: 15980 - DNA, 98 bp, Homo sapiens
gggcaaggctggaccctgagccctgggacctctgaagtgaacactgcagggccatttgggcactgcacttggctgtgattcatcagcatgaacccttc

SEQ ID NO: 15981 - DNA, 74 bp, Homo sapiens
atgccctgcgggccaaggtcagccttattgaaaggttgatcttcactcgaaaaggggtactccgtgtggagggg

SEQ ID NO: 15982 - DNA, 82 bp, Homo sapiens
gccgagcaggctgagcgatacgacgtaaaatgtttattggaggcttgagctgggatacaagcaaaaaagatctgacagagta

SEQ ID NO: 15983 - DNA, 75 bp, Homo sapiens
cctagagagatcccggctcccagcccactgagtggcttcagcctcgctgacaaatttacatgtattggagaccag

SEQ ID NO: 15984 - DNA, 100 bp, Homo sapiens
gcggcaagatcatcgtgggcgacgccacagagaaaggagtacttcttgcaagcagagctgacaagcaacgtcttaaaaacaggcgtggtgcgctgctgcg

SEQ ID NO: 15985 - DNA, 100 bp, Homo sapiens
ggagccccagagcacttctgcttccagaacctcggaggcggggtgtattacctgactgcttaaccgatggctctgatgtggtcagtgaccttgaacacga

SEQ ID NO: 15986 - DNA, 78 bp, Homo sapiens
tccatgtcttctccatttctgccgtggaggtgccgcaggtcttttctggagaggctgacactttttaaggtcagacaa

SEQ ID NO: 15987 - DNA, 50 bp, Homo sapiens
aagtcgacaggggatgggaccctagaagagaagctgaatttggacgacag

SEQ ID NO: 15988 - DNA, 51 bp, Homo sapiens
tgagaaaaggcctaagaattttggcattggctggcgcccatgcggctctac

SEQ ID NO: 15989 - DNA, 95 bp, Homo sapiens
attggtgacatggaaaaggagccaggaattcccagtttgacaccacaggctgagctccctgaaccaggaaagaccggcagagaccaatgccaatg

SEQ ID NO: 15990 - DNA, 100 bp, Homo sapiens
agaggagagttctccaaacatgatcgtttactgcaaagtccgtggcactcaggtagttggttctgacatgactgtgacagttgagtttaccaatccttta

SEQ ID NO: 15991 - DNA, 100 bp, Homo sapiens
cagagatcatcctcttcagaaacaggaatcacttcagtcactgccattacagtgctctacttcctctctcggagaattccccttcctagaaggaccaaga

SEQ ID NO: 15992 - DNA, 100 bp, Homo sapiens
atggtgttggaaagcactatggtgtggatgctccagaccttgtatgattacttctggtgggaacgtctgtggctgcctgtgaacttgacctgggccgatc

SEQ ID NO: 15993 - DNA, 100 bp, Homo sapiens
cagtgctacctgcagctgcagccaccctcccacccactgcaggactcagtggcctctgaggatgtggctgtgaacttcacacttgaggagtgggctttgc

SEQ ID NO: 15994 - DNA, 82 bp, Homo sapiens
gcggatttagataaactcaacatcgacagcattatccaacggctgctggaaggttttggcttggtttgaagaaggtgaagaa

SEQ ID NO: 15995 - DNA, 75 bp, Homo sapiens
gtaacaataacaagaaaaacagcctagactagacgcacatcaggaagacagagcaaaggcacaacaccacttgct

SEQ ID NO: 15996 - DNA, 75 bp, Homo sapiens
tgactcctttgacgacgttgaccgcacactggatgaatggaagcgctccactttgaggctctgatgaacattcca

SEQ ID NO: 15997 - DNA, 50 bp, Homo sapiens
atttggagtgtgcgtgcgcgccgagcgaggctgaggggatctggcggtgg

SEQ ID NO: 15998 - DNA, 74 bp, Homo sapiens
ccgctcaccccgcggccgcaccttcccgccttctcaggacatttcattaccatccagaagtgtctcccactgaa

SEQ ID NO: 15999 - DNA, 97 bp, Homo sapiens
cccgactcttcctggtgaagcatctgatgcacgttccatccggcgctcagctgggcttgagaaagaagcttccggttctgaggtcctggaggtgcca

SEQ ID NO: 16000 - DNA, 100 bp, Homo sapiens
aaggaaagcgcccatctgaaaatcttggtcaggtactattcggggaaagaattgaaccttcaccatataaggtggaagttgatgggtcgaaactaaatgt

SEQ ID NO: 16001 - DNA, 73 bp, Homo sapiens
ggagcggtacatcgcctcggtgcagggctccaccccgtcgcctcgacagctgtttggggcaacttcgttaata

SEQ ID NO: 16002 - DNA, 50 bp, Homo sapiens
cctgaagcaacatctggttctacagtgccagaacagataaagcccagtgt

SEQ ID NO: 16003 - DNA, 100 bp, Homo sapiens
agaaataccaagggtggagatgctccagctgctggtgaagatgcatgaataggtccatccaagctgaatgatcgcgctgactcaagaagaagcctttggg

SEQ ID NO: 16004 - DNA, 100 bp, Homo sapiens
ggaaatgcctgaaccctgcacagagggctttatacagggccgtgatgttggagaactacaggaacctggagtctgtggtgtgtgattaataaagtttcac

SEQ ID NO: 16005 - DNA, 99 bp, Homo sapiens
cccaacgcctggtgctcaagactttctccgaggtcaaaatgcagatcttcgtgaaaacccttaccggcaagaccatcacccttgaggtggagcccagtg

SEQ ID NO: 16006 - DNA, 100 bp, Homo sapiens
ctcgatccgcctgcctgcgcacctgcgttatgaagacagtatggagtttccagaccatagtagacatttgctacagtgtctgagcgagcagagacaccag

SEQ ID NO: 16007 - DNA, 90 bp, Homo sapiens
caccccctgaggggcttccactgtccgcggggtgagaatgcccctgggatgaacacagtgactctggtaatgatctggcactggaagacc

SEQ ID NO: 16008 - DNA, 99 bp, Homo sapiens
gccccgtcctccttcgccgccgcgcacaaccgcacgtgcagcgcgtgcctgcagacgaggcctacttcatagtcaaagagattctcgctacagaacgaa

SEQ ID NO: 16009 - DNA, 83 bp, Homo sapiens
tgcgggtgaagatggcggcagccgaggccgcgaactgcatcatggaggagaactacgatgacccgcacaaaacccctgcctcc

SEQ ID NO: 16010 - DNA, 51 bp, Homo sapiens
caggtcacacactgttgcagcacaggctaccggctctctgaccagttccac

SEQ ID NO: 16011 - DNA, 74 bp, Homo sapiens
ctatacctactgggttcccctggcttacagtggaacacctctaacagaagaaaaggagaaaatagtctgggtca

SEQ ID NO: 16012 - DNA, 83 bp, Homo sapiens
ggacaacatagcggtgaaggcgaacgcggtctgcaagctgacgtatgtctgcagcccagagggcaccttctgcaaacatgtct

SEQ ID NO: 16013 - DNA, 95 bp, Homo sapiens
ccgaggagaacctgcccttcgccaaggagatcgtctctctcatcgaggcccaaaccgccaaggtgaaaggtgtagcagtcactcggcctacaccc

SEQ ID NO: 16014 - DNA, 100 bp, Homo sapiens
catctgcgtgtgcggggtgcgtgggtgcctggagatgaagctggaaaggagaaactcagccttaatctggatcataagtctcggatctttcagaacctca

SEQ ID NO: 16015 - DNA, 98 bp, Homo sapiens
gagggcgccagctacttcatcgagatctgtgaggatggcgcacctgctgggcagccaggcctgcatggagagcctgcgcacagacctcaccgacctgc

SEQ ID NO: 16016 - DNA, 99 bp, Homo sapiens
tgagaaggttcagttggcaaaccagatatatgacttggaaagaccacagcaagattctttcattcgtctcctcctagcctgggggaccaggctcgaact

SEQ ID NO: 16017 - DNA, 87 bp, Homo sapiens
tgaacattactcttccagaagagctttgcccgaagtttttacatacaaattctactagtcacacctggccattcagtgcagttgctg

SEQ ID NO: 16018 - DNA, 89 bp, Homo sapiens
ggacgtggaaaaccacagtgaagccgacgaagagaccgccgtccaggatcgtctttaatgagtgccggtggtggtgtgcacattgagcc

SEQ ID NO: 16019 - DNA, 89 bp, Homo sapiens
aacaggaactggatgccaactctgcccttatggaattggacaaagatcatccaattatgatgggttttgaaccccttgtgaaccagagg

SEQ ID NO: 16020 - DNA, 83 bp, Homo sapiens
ggagaggctgagctgctccaggacttggggaaaatggcaaatgcacgacagcggcctcctgaacatcaccaaggtatccttct

SEQ ID NO: 16021 - DNA, 100 bp, Homo sapiens
ctttgttctaaaattacctcataggacaggggagtaggttgcatctttgttgaaatgatccaaggagttgctgcttttccaggaatgaaagacattcagg

SEQ ID NO: 16022 - DNA, 82 bp, Homo sapiens
ttttatccacaactggccacagctgtgcttcttgttggtagctggcagtgttgtgatggcttttgaagaagtatgcccggac

SEQ ID NO: 16023 - DNA, 100 bp, Homo sapiens
gtggagtcgacggctggagagaagccgggagcgagcccaggcggcagtttatgcaaaggggactggactcagaaaccaagaaacaactagaagaagaaga

SEQ ID NO: 16024 - DNA, 50 bp, Homo sapiens
caacagcctggcgtccgccacggtgccagaaccctgtggagcatcatgaa

SEQ ID NO: 16025 - DNA, 51 bp, Homo sapiens
gatgcaactgcaaagagaagccgagaatggtgaggttctggagaattgatg

SEQ ID NO: 16026 - DNA, 75 bp, Homo sapiens
ttatgatctacctaccaatcgtgaaaactatattcacaggtctgtttggcaccccactgctgaccagcctcccag

SEQ ID NO: 16027 - DNA, 100 bp, Homo sapiens
atggggaagatgagatgtcagaagctaaggacaatggcagtagagatgagtgtggaaccatcagagaatctacaatccctgatggagaagaatcagtccc

SEQ ID NO: 16028 - DNA, 98 bp, Homo sapiens
aagacttcacttgacttcttgatcctgcataaaaccaaggtgaatctggattgggaaagtcgacattaatcaactcattattcctcacagatttgtat

SEQ ID NO: 16029 - DNA, 74 bp, Homo sapiens
tgtttgctgcacggttcaatgatgccctcacagtcgtggaaaggagtccaaaactacttacctggaagaccttc

SEQ ID NO: 16030 - DNA, 100 bp, Homo sapiens
acgtgggcaagggcgagatcctggcgagcctgcaggatggcgcggccgagtccccgtacggccacccggcggggactggtgattgcagctggaagtgccc

SEQ ID NO: 16031 - DNA, 75 bp, Homo sapiens
tgcacgtgcgaggggcatttcaggagtttcctgtctgtcagtactatgaagtattccttcgacagtctccattgg

SEQ ID NO: 16032 - DNA, 75 bp, Homo sapiens
ccgggatttgggtcgcagttcttgtttgtggatcgctgtgatcgtcacttgacatctgaatgggactccgagtgc

SEQ ID NO: 16033 - DNA, 74 bp, Homo sapiens
cttcctcatgctgtgccatgtggcccagacctatggttcagagaaattgcccaggttattgcctcatacaccgc

SEQ ID NO: 16034 - DNA, 100 bp, Homo sapiens
tcatgatgaactaatttccaagatctgcattaccgttggaaaacagcagcctcagaaccacagtagccatgaagaccatcagccttcaaccaccaccctt

SEQ ID NO: 16035 - DNA, 82 bp, Homo sapiens
gtcctccgttagctaattaaaacatttttcagggacgtagccatccagaggtgagcgtccctatcaatgtccttactgtgaa

SEQ ID NO: 16036 - DNA, 90 bp, Homo sapiens
ctgtgtgacagcaatgaggtgaacccaggggccgaagcccacccagggagttgatgggaatatggagccattgatgatgtagatattgat

SEQ ID NO: 16037 - DNA, 51 bp, Homo sapiens
cgcgaatatcgtcatcgttagaaggcagggctcaacgtcattaaagaggca

SEQ ID NO: 16038 - DNA, 100 bp, Homo sapiens
ttgaaggacaccagctgcggaatttgcggctttggcaggtcctggtgcttgatggtcgaggccatctcctgggccgcctggcggccatcgtggctaaaca

SEQ ID NO: 16039 - DNA, 100 bp, Homo sapiens
gggcctcccgtttctggctccgggctgagcttcctggagaagaggaagagtccttcgatatctcctaatacgagtttcacatctgatggctccccgtctc

SEQ ID NO: 16040 - DNA, 127 bp, Homo sapiens
ccccgtccgggagggaggtggggggggtcagccccccgcccggccagccgccccgtccgggagagggagacgtggtgggcggtccttcctgtgacacgacccttgagtgacagttctatttgattgc

SEQ ID NO: 16041 - DNA, 109 bp, Homo sapiens
tgacgccatgtcgggttattcgagtgaccgagaccgcggccgggaccgagggattatatctgtccaagatgcgagtctggttttatcgaggagcttccggaagagacca

SEQ ID NO: 16042 - DNA, 98 bp, Homo sapiens
tgactcaagcggaggcgcgcggaacagtcgccgaggcgattcccgcccaggtgtgcctagattgatcggtataaggctcactctcccgccccccaaag

SEQ ID NO: 16043 - DNA, 73 bp, Homo sapiens
gtgaaggggccgaagaaggttgagaagaactatgctgccatgaagctggtgaagcccttcagctgaggactct

SEQ ID NO: 16044 - DNA, 75 bp, Homo sapiens
caggcaatgctggatagataccgaattcttatcacaaagtttttcagaagaagtgaagtcaagatgaagaaccat

SEQ ID NO: 16045 - DNA, 99 bp, Homo sapiens
cggccccagaacgtggagtactgtgactacagaaagcacagttcctgggataatcttgtgccgtggaaatcagaagggcaaaacgaagcagtcatgatg

SEQ ID NO: 16046 - DNA, 75 bp, Homo sapiens
ttagtgttatgccaaaagatgaagacattctccaagtgtgctgtccccggcataggtccatctctgcagaagcca

SEQ ID NO: 16047 - DNA, 101 bp, Homo sapiens
ttgttggtgacttcagaggcttctataggcagctcacaagtgatgggcagctcagatggactcgagaacaggaagaactggaagaagctttagaagtggaa

SEQ ID NO: 16048 - DNA, 82 bp, Homo sapiens
gaacaagcccatgatcctgctggtgggccagtacagcaccggcaagaccaccttcatcagatgatcatgacgcagtcctgag

SEQ ID NO: 16049 - DNA, 82 bp, Homo sapiens
acagatcccatcagaggcaccccagacacagtagacttcccaagtaagaagcggaagaggagccgctggaaccaagacacaa

SEQ ID NO: 16050 - DNA, 96 bp, Homo sapiens
aagttatggcagagttagctaaagaactccctcaagtttcatttgtgaagagctcagccatcagccctactccggaaatttcttcagagactcctg

SEQ ID NO: 16051 - DNA, 106 bp, Homo sapiens
tggcgccgcgacctccggatgacccgggcttcggcccccaccagagactcggtgcgcgcggagccatggttatcatgtcggagttcagcgcggaccccgcgggcca

SEQ ID NO: 16052 - DNA, 51 bp, Homo sapiens
gtattgttatgtggatcatctggatgaatacttcagagagtcagagttgtg

SEQ ID NO: 16053 - DNA, 101 bp, Homo sapiens
tgacaccgcccggagttggcgtcccttctccctctccgagtgctgctcctgtcattgtggccatggacggtgctggagaatctggtaaaagcaccattgtg

SEQ ID NO: 16054 - DNA, 92 bp, Homo sapiens
catttcaggaaaacagagaaagaagtgataggagggctctgtagattttgcaagaacgaggctcaaggatgtgagggacacagtattgacag

SEQ ID NO: 16055 - DNA, 130 bp, Homo sapiens
attgcactctaatgaagcaatacattgagtttgtggcagacagacttatgctggaactgggttttagcaagatcaccggcgtaatcaacccagcgttggacaaatactttccgtcagactctggagtgag

SEQ ID NO: 16056 - DNA, 100 bp, Homo sapiens
tgcatgttttgagtgagcttaaagaagtggagcccaaattagccgcctggatccaaaaacttaatagctttggtactacctctgcttgcagttgcgagat

SEQ ID NO: 16057 - DNA, 82 bp, Homo sapiens
tgggtgcattggagccttgccttgctgctctacctccaccatgccaaggatgaccagtgtcccagtgaaggaacgagtgaag

SEQ ID NO: 16058 - DNA, 82 bp, Homo sapiens
gaaagatctaccttctggaagctactactacgtggtgcttggaaagtagtttatgccaacgtgacttcattcatacagatga

SEQ ID NO: 16059 - DNA, 100 bp, Homo sapiens
gtgggatatggggaccgttctcgtttcatccaactggtccagaaggcacggctagaggagagcaaggagcaggtgtctgaaggtggctattcactgagcg

SEQ ID NO: 16060 - DNA, 75 bp, Homo sapiens
tttccacgacggtgacacgcttccctggattggggccatgatccaaaggaaccagagcagttgagaaaactgttt

SEQ ID NO: 16061 - DNA, 82 bp, Homo sapiens
aaggacgtggccactgtggccttctgcgacgcgcagtccacgcaggagatccatgagaagggctgaaggcctttcggcagca

SEQ ID NO: 16062 - DNA, 97 bp, Homo sapiens
ctccatctcagcttctggtttctaagtccatgtgccaaaggctgccaggaaggaggcgagaaccgaagtttggaggtagacgagcaggcgagcggtt

SEQ ID NO: 16063 - DNA, 88 bp, Homo sapiens
cgagagtcctggtgactttgaacatgctggtgccgctagccaagctgtcctgcctgggacactcaatcacttgtcggaagtccctcaa

SEQ ID NO: 16064 - DNA, 95 bp, Homo sapiens
aattttccagtgccctgaaaaatagagaactagtggctctgaagaaggtgagactagacaatgagaaagagggcttcccaatcacagccattcgt

SEQ ID NO: 16065 - DNA, 83 bp, Homo sapiens
agaaaacatgatgttggaaatcttagtggatgcagaatcagatgaacttgtccaagcatctcattttgaaggcctaatcacaa

SEQ ID NO: 16066 - DNA, 98 bp, Homo sapiens
ttgcgatttccgtgtaaaagatcttcaatattcaacagactacacttttaaggttcaaaccttgtactactcagctgatcacaagctgcttgatggga

SEQ ID NO: 16067 - DNA, 88 bp, Homo sapiens
acgaggcaaggagctaaagcagcgtgcgttcagccctgggtgtgtcccggcatggatatccggaacaacctcactaggttgcatgagc

SEQ ID NO: 16068 - DNA, 75 bp, Homo sapiens
ctgggacacagcggggcaggagcgcttccgcaccatcacctccacggagtggggaaggccagggccagattctgc

SEQ ID NO: 16069 - DNA, 101 bp, Homo sapiens
caggacgtcttcaacacggtgggcgccgacatcatccagctgcctcaaatcgtcgtagtgggaacgcaggctgtattcatcaccaaagaaaaaacttacac

SEQ ID NO: 16070 - DNA, 74 bp, Homo sapiens
gagccatcggatctaagatccaaaaggatggagctatgacattgaagagaggaaggttccaaaacccaagtcca

SEQ ID NO: 16071 - DNA, 50 bp, Homo sapiens
aaatgcgctcgggctggaccagcagccttatgccagcctggaccatcttg

SEQ ID NO: 16072 - DNA, 88 bp, Homo sapiens
ttccaggcaatagctgaagaagaagaggaagtagccaaagagcaactaactgatgctgacaccaaagacctcagtactataagttgat

SEQ ID NO: 16073 - DNA, 100 bp, Homo sapiens
atggaggtggagatcgaagacctgcacctgcagattgatgacatcgccaaagccaagacagcggaggtcaccatcaaccagagcttgctcacccccctcc

SEQ ID NO: 16074 - DNA, 139 bp, Homo sapiens
ccagatctcagaggagcctggctaagcaaaaccctgcagaacggctgcctaatttacagcaaccatgaggtattggtttgccttaaaaaggggttaccatgcagcttttaaatatgacagcaatactagtaacttcgtg

SEQ ID NO: 16075 - DNA, 51 bp, Homo sapiens
ggaagcacaaaaagggacagtcgagaatgccacgggtgacctggccaccag

SEQ ID NO: 16076 - DNA, 98 bp, Homo sapiens
gttgctgcgagtgggacgcgcactggtcggtgccggctcaggagccggggaggaatgccagctcctgagcaggcctcattggtggaggaggggcaacc

SEQ ID NO: 16077 - DNA, 75 bp, Homo sapiens
tgggaactgccatctcctgcatcgtcataggactttttaaaactgtggacttaaatgttctgcaaagtcttacac

SEQ ID NO: 16078 - DNA, 50 bp, Homo sapiens
aaatttcaagacagcagtatcgcaggtggtaatcactcaaggaaaaggaa

SEQ ID NO: 16079 - DNA, 98 bp, Homo sapiens
gtgtggtcgcgtctcggaaaccggtagcgcttgcagcatggtgccagaaccctgtggagcatcatgaactgggaagagtagctgagccccagagcctc

SEQ ID NO: 16080 - DNA, 74 bp, Homo sapiens
tgttacacaaattgatgcacaaaataagctggaaaaatctgagcaggatcaggcaaaaatgatcatgccgaaaa

SEQ ID NO: 16081 - DNA, 82 bp, Homo sapiens
gtgctggccctgtccactgagcgagaactatttgcctggggccgtggagacagcgacctgcctagagctggaacgttacctc

SEQ ID NO: 16082 - DNA, 83 bp, Homo sapiens
tgatgatgctgtggagggggtgctgagaactgaagtctttgaggagtgatgttcctccatcttacgttcaaactaaattttct

SEQ ID NO: 16083 - DNA, 83 bp, Homo sapiens
gtcgctgaggggcttgcctgaagcgagggagatgctgcaatttgtcagtaatcaagtgggagagttccctgacttgttttcag

SEQ ID NO: 16084 - DNA, 50 bp, Homo sapiens
ctaggactctatgacacggccggacaggctgaccccgcactacatctacc

SEQ ID NO: 16085 - DNA, 100 bp, Homo sapiens
ttaatcagtgcaagcgaaattaagggaaaatggatgtagaaaatgagcagatactgaatgtaaaccctgcagtgagaaagatcagtctaaagaaaaggag

SEQ ID NO: 16086 - DNA, 100 bp, Homo sapiens
gcttttcctgagcaaacaaacaccaaagactggacagtgacacctgagcacgtcttgcctgagtcccagtaacaacatgctgtaccccaaggaagacaag

SEQ ID NO: 16087 - DNA, 51 bp, Homo sapiens
gcgagcgccgcgcgcaccactgataagatgctcccaagtcccttgcagctc

SEQ ID NO: 16088 - DNA, 50 bp, Homo sapiens
taaacttcctgaatgtgaagcaggcaccatgactcctgtgaggatgcagc

SEQ ID NO: 16089 - DNA, 99 bp, Homo sapiens
cgcggccaagccatgctcggccccaggctgaactccagtgcacccagttagacttggagcggaaactcaagttgaatgaaaatgccatctccaggctcc

SEQ ID NO: 16090 - DNA, 90 bp, Homo sapiens
tattggacactgcaaagctatctacccttttgatgcaggaggatgcattagcacaacaggcctttgaagaggctcggagaaggacacgcg

SEQ ID NO: 16091 - DNA, 74 bp, Homo sapiens
ttaagagctgcgggccgggtgcggacggcggaggcggcgggactggtccctgtgttcacaataatgtttcgacc

SEQ ID NO: 16092 - DNA, 82 bp, Homo sapiens
aactccttcttcccacgctgctactgcctgggggctgaggatgacaaaaaagccttcatagctagacttcgggctccttgag

SEQ ID NO: 16093 - DNA, 98 bp, Homo sapiens
aagtggatggaggaggcgatgcacatggtttctgctttgggacaaccatacatctaattccttaaagtagttttatatgtaaaacttgcaaagaatca

SEQ ID NO: 16094 - DNA, 82 bp, Homo sapiens
acaataagagcagaggatggaacacttcagtgcattcaaggttgcctgcggacacgctgggcctctgtcctgatgctgctga

SEQ ID NO: 16095 - DNA, 90 bp, Homo sapiens
ggtttggcactgctcctgctggccgcctggacggctcgggcgctggagggcgatgccagtccctccactccagaggagaacgaaaccacg

SEQ ID NO: 16096 - DNA, 74 bp, Homo sapiens
gttattcgagtgaccgagaccgcggccgggaccgaggaataacatagctgatccagaagaactgttcacaaaat

SEQ ID NO: 16097 - DNA, 100 bp, Homo sapiens
ctcggcctcggagcaacgagcgcagcgccgctgagtcagtgctgattctctcaaatagagcttgaaggataaatcttcatttttgtttcaacaaaacttc

SEQ ID NO: 16098 - DNA, 100 bp, Homo sapiens
ttctacagcagtggttgttgctgaacttttgaagataatggcctgcattttattggtctacaaagacagcaaaataagcgggttttgaaaacaaaaaaaa

SEQ ID NO: 16099 - DNA, 50 bp, Homo sapiens
ctcgtagcctgccactccgtgccgacatcaccccgcccggagagcctgtg

SEQ ID NO: 16100 - DNA, 88 bp, Homo sapiens
gcgcccaagcagcagctgccggagcccgagtggatcggggacggagagaacacgagcccatcagagacggggtctcactatgttgccc

SEQ ID NO: 16101 - DNA, 75 bp, Homo sapiens
catgggcaccatgatctgtggctgggataagagaggccctggagcccctcaatagtgaagatgatgtgagtgatg

SEQ ID NO: 16102 - DNA, 100 bp, Homo sapiens
cagctgtggaaagaagttgcaaaacactgggactttccgtgacatttctgaagatctgaaatcttcagtaggttgatgtggtttcctctgcagtgatttt

SEQ ID NO: 16103 - DNA, 100 bp, Homo sapiens
atcttacaaaactggaaactgaggcatctaatatgaaggatttttcaagccacattcaattgataggatgaaaaaatttaagagaaggctatccctcaca

SEQ ID NO: 16104 - DNA, 100 bp, Homo sapiens
gacaagaccatcgagctcatgtaaattcctcatctatgcctgtctgctgctgttctctgtgctgctggcccttcgtttggatggcatcatacagtggagt

SEQ ID NO: 16105 - DNA, 75 bp, Homo sapiens
aaccagaatagaaagggatgatgcaagtacgtttactggatttggtgctatggagaaatttttggtagaatataa

SEQ ID NO: 16106 - DNA, 75 bp, Homo sapiens
gacagtctgcatgtgcagttttcaggccagaagcggactcctagaagaggggagcagcaaggatggaatgacagc

SEQ ID NO: 16107 - DNA, 98 bp, Homo sapiens
aaagaaggagggtcctctcagtgattaagaaatgacttcatctgttatatctgtaaaaaatgcctcttctgagtactctgggacatacagctgtacag

SEQ ID NO: 16108 - DNA, 49 bp, Homo sapiens
cggtggcgcccctcctcatcatgccgatgcctttcatcaccaccattct

SEQ ID NO: 16109 - DNA, 98 bp, Homo sapiens
gaagcctttgaagaattaagatacgcctgcctcacaccttgcgatgcgccaacatcaccatcattgagcaccagaagtgtgagaacgcctaccccggc

SEQ ID NO: 16110 - DNA, 82 bp, Homo sapiens
cggccagccgaagatggtggcggctactcctcctgctccacagcacctgttgccttcattagcagcttttcctcctcttccc

SEQ ID NO: 16111 - DNA, 106 bp, Homo sapiens
cggctgcagcgctctcgtcttctgcggctctcggtgccctctccttttcgtttccggaaacatggttggtgttcgaggaagagacattgttgttcttggtgtggag

SEQ ID NO: 16112 - DNA, 75 bp, Homo sapiens
tggtgattctgctaaccctggtggcaattctagatcttcctcagaactgtgatcctaacattcccctagttgctc

SEQ ID NO: 16113 - DNA, 100 bp, Homo sapiens
tctttcgagtgtgtaaaactttccaaatggcagaatacctgaaactggagtttatcaagcagcaatgcagagtccctggacaggctcctgccacctgtgg

SEQ ID NO: 16114 - DNA, 82 bp, Homo sapiens
agcctggagctgtgccagcctgacatggccatgacagttgaaaaagcaagtccagtgggtgatggaaatttccggaatcgtt

SEQ ID NO: 16115 - DNA, 75 bp, Homo sapiens
agtcatgggagcagagctcagacatgttctcaccacccttggtgactccccggacagctcaacaccaaagctttc

SEQ ID NO: 16116 - DNA, 75 bp, Homo sapiens
ctgactgtgatgtagtttcctgacctctgacacgtattgtctcaagattaaagtgttaaccttgatgcctgaaag

SEQ ID NO: 16117 - DNA, 82 bp, Homo sapiens
ggccctgggggcccgcaatccacgccacggaatccccgagatgtgaagttcatttccaatccgccctccatggtggcagcgg

SEQ ID NO: 16118 - DNA, 87 bp, Homo sapiens
gagctgaccctgggagacatcgacgctcaaactttggaacaaataccgaatttccaacattccatcactaatattcctcgacgccac

SEQ ID NO: 16119 - DNA, 75 bp, Homo sapiens
gactccatccatcagcttcattacgtgcacaggtgccgacgccaccgccgagcccatgatcctggaacagtacgt

SEQ ID NO: 16120 - DNA, 98 bp, Homo sapiens
ctcgatgaggataacatccctccagaagatgaaatctcctgcaaagaagctgagccatgcaattagtaaatctttggggtgtgtacccacgagagaac

SEQ ID NO: 16121 - DNA, 100 bp, Homo sapiens
atcgcccgccatggctttacttactgcggccgcccggctcttgggaaccaagcactcggacatgccagaggagatgcgcgtggagaccatggagctatgt

SEQ ID NO: 16122 - DNA, 100 bp, Homo sapiens
tcgtctcggaaaccccgcctcttacagtcacgaggacgcacacaggctgcagtaaggagttcaaccggccggacaagctgaaggcccacatcctctccca

SEQ ID NO: 16123 - DNA, 75 bp, Homo sapiens
taaaaaggcttataagaagctcgcccgggaatggttgtacatcctggagacctgaagaattctgttgaagtcgca

SEQ ID NO: 16124 - DNA, 97 bp, Homo sapiens
aaaagttccaccgcgcgcgcctcgacctgctgctggagacctggatctcgcgccacaaggagatggccatcaccatcgaggctgagccaagagctga

SEQ ID NO: 16125 - DNA, 97 bp, Homo sapiens
ggtcatgaaggagtacttgacaaaggtggaacgtgtgatcaccattatgcagaatccacgccagtacaagatcccagactggttcttgaacagacag

SEQ ID NO: 16126 - DNA, 98 bp, Homo sapiens
gcgagacttcgggaccgtgtcctgagcgctctccatgcgcccggcgcgagatatagccagtaccaacgtatgctgagcacgctgtctcaatgtgaatt

SEQ ID NO: 16127 - DNA, 75 bp, Homo sapiens
ctttaagcagctatagtcttgtattgatggttttgcactatttacaaacaacaggtcaccttcaagccagtgtcc

SEQ ID NO: 16128 - DNA, 100 bp, Homo sapiens
gacactcctgagctacagagactgaagaggactcaggagcaaatcagtaattgcagtcattggagaaatcgatgaagaaacagattctgcgcttgatttg

SEQ ID NO: 16129 - DNA, 100 bp, Homo sapiens
cagattcgcagtggtcgcttcttctccttggtgtatggaatgattcggttctcaggcaccacaggccagatgtctgacctgaacaaaatgatggtccagg

SEQ ID NO: 16130 - DNA, 90 bp, Homo sapiens
aagaccagcgcgagggccctgggcaaggcccgacaggtgatgcaggcccagtgtgtcaaaacagaaactgaattctaccgccgtagtcgc

SEQ ID NO: 16131 - DNA, 98 bp, Homo sapiens
cctggagaagccccgggccattgccttgcatcccatggaggggttgttggaaaggacaccaatgtcatgttggtggctttggcagcaaaatgtcttac

SEQ ID NO: 16132 - DNA, 101 bp, Homo sapiens
gcatcatcaatttcgagcagaaggaggaggagaacggggctgaggaggaagaagaagaaactgccgaggatggagaggaggaagatgaaggggaagaagaa

SEQ ID NO: 16133 - DNA, 90 bp, Homo sapiens
ttcgggctgagctagcagtgagcaccttttggcccaatgaatatcagctgagctttcagcacaagatcgggatcctttattgcaaagcag

SEQ ID NO: 16134 - DNA, 51 bp, Homo sapiens
cagctacgaggaggcgctgaggagagcccccattcactggggagaatagaa

SEQ ID NO: 16135 - DNA, 101 bp, Homo sapiens
tcgagactcatgactcccagagaggatggcatctagaaggctctgacgcccgctctgcggcttcggtgtttgaacaggccacagtccaggagcgcttacat

SEQ ID NO: 16136 - DNA, 90 bp, Homo sapiens
ggcgctgcacagcccaaactcgctgtcatccaggaagcccggtttgcccagagcgccccagtcccacagtgttttgttcgccccacggag

SEQ ID NO: 16137 - DNA, 51 bp, Homo sapiens
tctggaggcacctgttgcaagtgacagcagccgagaccgacccgcccgccc

SEQ ID NO: 16138 - DNA, 90 bp, Homo sapiens
cagagtgtgcacactggctatcattgatccaggcggtgtgcgctatctttgagaagtctgttaagacgctgctggatgactttgccccca

SEQ ID NO: 16139 - DNA, 50 bp, Homo sapiens
ccagcagggcccctgggctcccggaaggtttctaggtaatagtaaaagtg

SEQ ID NO: 16140 - DNA, 74 bp, Homo sapiens
tcaatttaagcctgatctaacccctagaaacaggttcaacttatggtaactgatagtgagttgtccaatcagtt

SEQ ID NO: 16141 - DNA, 98 bp, Homo sapiens
catgagtgatgtggaggaaaacaacttcgagggcagattcctgtgccttaagaacattagaaccttcctgtccacctgctgtgagaagttcggcctca

SEQ ID NO: 16142 - DNA, 83 bp, Homo sapiens
ccgggctgggctttcctcacccggacaatgcagatcttcgtgaagactctgactggtaagaccatcaccctcgaggttgagcc

SEQ ID NO: 16143 - DNA, 100 bp, Homo sapiens
ctgttcgtctctggaggagatgactataagattaagatacagaagatcattgagacactgacacagcagcttcaggcaaagggaaaagaactaaatgaat

SEQ ID NO: 16144 - DNA, 80 bp, Homo sapiens
tgacgggtctggagtgcgtgggggaccggctgttggcggctggagcagatccgcagggacatccgagacttccggtctag

SEQ ID NO: 16145 - DNA, 50 bp, Homo sapiens
ggcggtccgggctccacacttagcttcgaagtgagctcacaatgactcaa

SEQ ID NO: 16146 - DNA, 83 bp, Homo sapiens
ccgacagtgccctgagggccttcgagagctaccgcgccagacagcgagcagctgatgcagctgtacagtgcgcgccagcggcg

SEQ ID NO: 16147 - DNA, 100 bp, Homo sapiens
gaagatgaagaagtctttgagcagaagcacgttaagaagcccgaagggcttttcagaaatcggtttgaagttagaaatgatgcagccctgttggaagctg

SEQ ID NO: 16148 - DNA, 51 bp, Homo sapiens
cgaacagttttttctaatggctattcaaggagttcatgatcaagtgttgcc

SEQ ID NO: 16149 - DNA, 112 bp, Homo sapiens
tattctcctccgaaccccttcatgcccaaatcccggaaactccagcgtgtctccagccgtggcctccggtgtggctgtctctgatggtgtcatcaaggtgttcaacgacatg

SEQ ID NO: 16150 - DNA, 95 bp, Homo sapiens
tccaacagaagcttctggtgcccaaagaatcttatgtggaagagagaagggcacagttacctaagtatcaacgtaatcttcctcggccaggacag

SEQ ID NO: 16151 - DNA, 83 bp, Homo sapiens
gaaggagcaggattaccaaagggcaacatttcatacaccatttagtcacctaggccaaagtccggaaggatgctcctcttaca

SEQ ID NO: 16152 - DNA, 50 bp, Homo sapiens
ggcgtgatcacggccagcgaggacaggtctaacttcaaacttgtggctgt

SEQ ID NO: 16153 - DNA, 97 bp, Homo sapiens
ccgacttcgatgatcgtgtgtcggatgaggagaaggtctcctctgagcctccggcctccataagacccaaaacagatgacacctcttcccagtcccc

SEQ ID NO: 16154 - DNA, 90 bp, Homo sapiens
ctgaagaaatacttggattctatccctcctggtcagtacatggattcttcacttgttaagggaatgggtactgttcaaaaaggaatgccc

SEQ ID NO: 16155 - DNA, 83 bp, Homo sapiens
gcggcgaccggcggcgtccgaggaggtctcctctgagcctccggcctccataagacccaaaacagatgacacctcttcccagt

SEQ ID NO: 16156 - DNA, 100 bp, Homo sapiens
atgttggactcatagtcactgccagaaaggccaagtcatcaaggcatgggacattggggtggctaccatgaagaaaggagagatatgccatttactgtgc

SEQ ID NO: 16157 - DNA, 75 bp, Homo sapiens
ttcatagcattcgcgtactccgtgaagggtcctgcagttctgagcttgggttccctttgcctggacaccaaccaa

SEQ ID NO: 16158 - DNA, 80 bp, Homo sapiens
cgcctcctacgtttacctgtccatggtcactgtgattgcccggcagcggggtgaccagctagtcccattctccaccaagt

SEQ ID NO: 16159 - DNA, 90 bp, Homo sapiens
catatccagaatgaaatccatgctcagagatgccaagaagaatctagacagacaggcctttctagtccacctaaacccactgtgttcatc

SEQ ID NO: 16160 - DNA, 131 bp, Homo sapiens
ccgggagctgcctgagccgctcttcccttacagtttctttgagcagtttgtggaagcgatcatggtgaactatgacaatgtagtggacacaggttctgaaacagatgaggaagacaagcttcatattgctg

SEQ ID NO: 16161 - DNA, 90 bp, Homo sapiens
cgcgggccgcggaggaggtctcaggatctgtgcgagagcgagagagtcacagtcgaaagagtgccagctcctgtgatgtttcatccagcc

SEQ ID NO: 16162 - DNA, 83 bp, Homo sapiens
gactaatgggagttgcttttggaatgaatttggaatcttcccttgaagagacgggctcatcttcgcttgtgcctggagaagtt

SEQ ID NO: 16163 - DNA, 75 bp, Homo sapiens
gcggcctcctgcagcgggcggccccctgcagcctcctgcccaggctccggattgatctgaagttaaacaaaaaac

SEQ ID NO: 16164 - DNA, 100 bp, Homo sapiens
gaggaagagagggccctcgccagataccggacctgctgacaccttgatcttggacttcccatcttccaggaagatagtagttcctcagggaagaacagaa

SEQ ID NO: 16165 - DNA, 100 bp, Homo sapiens
aaatccccacctcccacctggctacctatttccccagtttccagggtgacgcatccaaagaagacattgacactgctatgaaattaggagccggttaccc

SEQ ID NO: 16166 - DNA, 100 bp, Homo sapiens
cttcaactcatgcaccatgaaaagctgctgttttgcaggagatcgtgaccaggtaaatttggaaggcaaagccagccctctgtcacttctacaaatggcc

SEQ ID NO: 16167 - DNA, 137 bp, Homo sapiens
attgaaaccagttttaattcttctgcccgggagacctaaccgccgaatgcgttcggagacaagttggatggcttgaggactggtactaaaaggaaacgtgactgggaggccattgccagcagaatggaggattatct

SEQ ID NO: 16168 - DNA, 97 bp, Homo sapiens
ccttcagggaagatgggaggcgaggagaagccgattagtcactgctacccagagtacctaagtaattttcctcaagaggtgaaagatcttctctcct

SEQ ID NO: 16169 - DNA, 83 bp, Homo sapiens
attaggcttcgccggctacgattgcgaacatccagtcatggataaaaatgagctggttcagaaggccaaactggccgagcagg

SEQ ID NO: 16170 - DNA, 100 bp, Homo sapiens
gggaggaacatgacatcgcggagctcaccatctgctacctggatatgctgatgaccagtgaggagcgccggaagcagctgagggaccagtactgctttga

SEQ ID NO: 16171 - DNA, 100 bp, Homo sapiens
tgacagctgtaaagcacgaacaggaatacatggaagtccgggagagaatacacagagccacatcaacaccattctggagtttttgccaaagcagaggaga

SEQ ID NO: 16172 - DNA, 100 bp, Homo sapiens
ctcagcctcctaagtagctgggactacagatctttaatctcatgaagtacgacagctacagccgcttcttaaagtctgacttgtttttaaaacacaagcg

SEQ ID NO: 16173 - DNA, 51 bp, Homo sapiens
ctgagtgcttctttcttggagctgaccatgttgtggtcagaaatgagaaga

SEQ ID NO: 16174 - DNA, 83 bp, Homo sapiens
ttgtcgtggccggagcggcccgcgcctgggctgccggcacttcgcggcaggttcatgcagcatcccaagaactttggcctgat

SEQ ID NO: 16175 - DNA, 82 bp, Homo sapiens
aagtcaccaagaaattactgtctcaagtgatacggattcccgagaaagcaccaagagggtagagaaggacattgtcttctgt

SEQ ID NO: 16176 - DNA, 82 bp, Homo sapiens
cgcgtccagcacctacgtcccgctgccgtcgccgccgccaccatgcccaagagaaaggctggcctgccactcctcctgctat

SEQ ID NO: 16177 - DNA, 97 bp, Homo sapiens
atggagagagactgcatggggagcttctcgtagtaaacctattgatggcaattttgctgactgtggaagtgactcatccaaactccatgccagctgt

SEQ ID NO: 16178 - DNA, 100 bp, Homo sapiens
atgttcttttgttagtgacaaagatgcaagcctggcattttttgatgattgtgtagataaacatccacccgttttgtcaagtgtgaaaagtgtcatcatt

SEQ ID NO: 16179 - DNA, 75 bp, Homo sapiens
ctctgggcagctggatggctacagagagctgaagaagcaggtggagagtgccgagctgaagaaccagcggctcaa

SEQ ID NO: 16180 - DNA, 75 bp, Homo sapiens
gctgccagcgccgccagctccaggaatgggtaccacagaccatgtcatcgtcctggcgtccacgaaccgagctga

SEQ ID NO: 16181 - DNA, 90 bp, Homo sapiens
tgtcccttcagcatcatgcagccgccgccgaggaagcaagagtgagccatggagctacgtgtggggaacaagtaccgcctgggacggaag

SEQ ID NO: 16182 - DNA, 100 bp, Homo sapiens
cctcggtttccgcacccataagatgaacgtcagatcagcaggtcaaaaggtacaagattgttacttctatcaaatttttatggaaaaaaatgagaaagtt

SEQ ID NO: 16183 - DNA, 88 bp, Homo sapiens
attcgggaactgactgctgtagttcagaagaggtttggctttccagagggcagtgtagaggagcaggggagagaagacagaagaggtt

SEQ ID NO: 16184 - DNA, 100 bp, Homo sapiens
aggatcatgtctgcgagccaggattcccgctctggcaggctgccctgagcacgctcaaccccaaccccacggacagctgtcccctctacctgaactacgc

SEQ ID NO: 16185 - DNA, 105 bp, Homo sapiens
gaagttgcggattgcagccgagaacgagctcaaccaggttgttgatcattatgaaaatcctagaaacgtggggtcccttgacaagacatctaaaaatgttggaac

SEQ ID NO: 16186 - DNA, 76 bp, Homo sapiens
tcccttacctcgacccttttgattccgcctcacagttgatggagccagatcctgataacttaagtgactctctctt

SEQ ID NO: 16187 - DNA, 90 bp, Homo sapiens
gaaagaaatattttgttatatgggcttctcatatcttacccacagaagttaatattatgtgggccggacaccaaacacatcatagttctg

SEQ ID NO: 16188 - DNA, 129 bp, Homo sapiens
ctttccagtggacctgggctgttgttgcggttgttttccttctctccgtgcaacgctggtttttcgttggaatatacgttgcacatttatggcgattctgagtgtgagggcagacttctgccaggctca

SEQ ID NO: 16189 - DNA, 101 bp, Homo sapiens
tggttcaccatactcttcgcctcccatgttcaagcgattctcctggctcagcctcctgctgggattacaggtgtggaaacaggaagagaactagaactgga

SEQ ID NO: 16190 - DNA, 100 bp, Homo sapiens
ccgagagtgggtgtggaggaggaagactggatgccaatgatccttccaaaatgcagcacgctggctaatattggaagaaccaacatctataagaataaaa

SEQ ID NO: 16191 - DNA, 74 bp, Homo sapiens
tggaaaaaagccgaaataccctcccaacaaagggactttgaacatgtcggggatcgccctcagcagactcgccc

SEQ ID NO: 16192 - DNA, 98 bp, Homo sapiens
caaagatgagatttacctgtgagatgtttcatcccaacacgtatctggtgcaggccgtgagagcagcgggcaagtgcgatgcggtcttcaagggcttt

SEQ ID NO: 16193 - DNA, 100 bp, Homo sapiens
ctcggatacagcagtgaataaaaggacaaaaggtcttgaatgggaaaaagaaagctgctgcttgtgggggattccacagtagagacggggtttcgccatg

SEQ ID NO: 16194 - DNA, 100 bp, Homo sapiens
tgtggatgttgaacctaaggtgaaatctaagaaaagggaagctgtcaagtatatgaaggacgtctcaccgtatttcaagaactctactggtgggacctcg

SEQ ID NO: 16195 - DNA, 75 bp, Homo sapiens
agcacattctctcatctagcacactctttcttgggaacatatcctgcattagagacattaacagaacctcaccag

SEQ ID NO: 16196 - DNA, 75 bp, Homo sapiens
ggcggatgccctgcagtacctgcagaaggtctctggagacatcttcagcagtcaggaagcatctaaatatggtgt

SEQ ID NO: 16197 - DNA, 50 bp, Homo sapiens
tccacctcattttagagtatcaagcagaacccctaagacatcagtgaagg

SEQ ID NO: 16198 - DNA, 78 bp, Homo sapiens
taactgccaaacccaagttggttggagatgtggattttgaaggtggacccccaaaagtacaagggcatatttaacgga

SEQ ID NO: 16199 - DNA, 100 bp, Homo sapiens
ggttgtgagaagacgtctgtgtcgtgcggtaatcttcagcaagtactgcaactccagcgacatcatggacctgttctgcatcgccaccggcctgcctcgg

SEQ ID NO: 16200 - DNA, 75 bp, Homo sapiens
gcctacacgccgccgcttgtgctgcagccatgctgcatccagtggaactaaagccgttccaggattatcaaaaac

SEQ ID NO: 16201 - DNA, 90 bp, Homo sapiens
ctccgctcgattttgtcaccgttatgtgggaagcgaatccagtctgctggagtttgctggaggtccactccagaccctgtttgcctgggt

SEQ ID NO: 16202 - DNA, 75 bp, Homo sapiens
caagcttctaaataagcacaaagttttcctacttagagaagcttctgttggttcatggagcctggagctacaacc

SEQ ID NO: 16203 - DNA, 100 bp, Homo sapiens
gccaagactggagaaacaattgctggacccaaaggagacaacatttatgaatggaggtcaactatattgggacccccaggatctgtctatgaaggagggg

SEQ ID NO: 16204 - DNA, 97 bp, Homo sapiens
agaactgtccttacgtgacctaaagctggagtattttgagattggagaattaaggagaagaaactgaggcctggaatttgattaactcattcaaggt

SEQ ID NO: 16205 - DNA, 74 bp, Homo sapiens
cggcggcggcggcggcacagagccggtggtggagccgccgagatgagctctgtgaaaatgttacagcctcgtct

SEQ ID NO: 16206 - DNA, 100 bp, Homo sapiens
cattgacctcacagcgggggctgcagattgatatagaaatcaacggcagtgcagtggatcttcacatgaagttgggtgataacggagaagctttctttgt

SEQ ID NO: 16207 - DNA, 82 bp, Homo sapiens
ctcggtcaccatgtggtcctcagtccagttacaacacagggatcacaacaaacacaaccgccacagaagcactatggcatta

SEQ ID NO: 16208 - DNA, 100 bp, Homo sapiens
cactggcccgctccctggcggtgcagagaccagcatccttggagaaggacaaccctccatatgataagggagccttcagaatcgaaatcaactttccagc

SEQ ID NO: 16209 - DNA, 50 bp, Homo sapiens
agaagatatttatgaagtcttgccagcaccagtggcagttcgcagcctcc

SEQ ID NO: 16210 - DNA, 100 bp, Homo sapiens
atggatttttctaccatatcagagatgacagactcgagttgccgcgtcgggctgggcgcgccgccgggtcccatggagctggaggggcagtggtggcgag

SEQ ID NO: 16211 - DNA, 74 bp, Homo sapiens
gaacagctctttgcatccggagagtggacaagaaactcctgttcaagaagataacacatttttagaagatgaca

SEQ ID NO: 16212 - DNA, 51 bp, Homo sapiens
cgaccgcccgacgtgcattcccgcttgccagcaaagcacggacagagaagg

SEQ ID NO: 16213 - DNA, 76 bp, Homo sapiens
gatgttgtcaacatggccatcaccgagcaccctgagaacttcaagtaattattcgaggtggaggacatattttacc

SEQ ID NO: 16214 - DNA, 50 bp, Homo sapiens
ccaaagaggactttagacttgcagccaaaatgaagtttaatccctttgtg

SEQ ID NO: 16215 - DNA, 74 bp, Homo sapiens
tgtgcggcgacctcatccacgccatgccagacttgaaactgcatctgcagagcactgattatggtaacttcctg

SEQ ID NO: 16216 - DNA, 98 bp, Homo sapiens
gcactttaagggctgccctgcggacctagtggtgtgtgacggggctcctgatgctggccgccaccgctgccacctgctcagagtgaaataatgaaggt

SEQ ID NO: 16217 - DNA, 82 bp, Homo sapiens
cacgggctcctacctcctggacggcaagccgctcagcaagctccacatccccgtggtgagaagccctaccactgcaactggg

SEQ ID NO: 16218 - DNA, 83 bp, Homo sapiens
gggagaggagctgtggataacgggaggtgaatttccatgtcaacatagtcctgtgaagtaagaactctgctagagaggaaatg

SEQ ID NO: 16219 - DNA, 100 bp, Homo sapiens
gatgcaaatgatgtagttattactgtcccgtttgattttggagaaaagcaaaaaaatgctcttgggcttggtttagaaagaggggaaacagctaaagaag

SEQ ID NO: 16220 - DNA, 75 bp, Homo sapiens
gagtgccatggagaggctgaagcgcgactctcttggaagtttaggatatttcacagttctgaatgttagccactg

SEQ ID NO: 16221 - DNA, 90 bp, Homo sapiens
gacactaaagactttgtagccatcaacccgagtgcagtttcgatggaaaatgaaggtaactgcacttttgtgagattataaatataccac

SEQ ID NO: 16222 - DNA, 101 bp, Homo sapiens
cggatgagtacgataccgaagcgggctgtgtgccccttctccacccagagtgatcggcatgttggtaaaatttattccaaatgttcttcttttctggatta

SEQ ID NO: 16223 - DNA, 86 bp, Homo sapiens
ggatgcacctggaaggggaccctgaaagaatacgagacaatgcagatcttcgtgaagactctgactggtaagaccatcaccctcga

SEQ ID NO: 16224 - DNA, 74 bp, Homo sapiens
accagtggaagcagcaccatcggggagacaagcaaagttgatctctctaatgtattagatcttcatgcctttga

SEQ ID NO: 16225 - DNA, 100 bp, Homo sapiens
cggcctctgccggtgctgctgcgccctgcggagctccgaacacgtgcgcggtgatgaattagaagacaatggaaagaatttctacgaatctgatgatgat

SEQ ID NO: 16226 - DNA, 50 bp, Homo sapiens
cttgccgcagccagcaactatttcagtgggtaattccagaattgattggc

SEQ ID NO: 16227 - DNA, 100 bp, Homo sapiens
ttgagaccgtgaagagaaagatgcagaccccaccaacaactgaacgctttggtcaggctgctacaatggaaggaattggggcaattggtggaactcctcc

SEQ ID NO: 16228 - DNA, 75 bp, Homo sapiens
taagatggccgccccggctcgggctgccaggcccagacatgtccgtccttgtaagttaaaagcttccatgggagc

SEQ ID NO: 16229 - DNA, 138 bp, Homo sapiens
ttccggaggcccggccacctctgagaagggagacgacgctgctgggtccgctgagcggggcgacccgagactgtgaaccagaagagctgactgactggtctatggatgaaaaatgttcattttgtaacctacagagag

SEQ ID NO: 16230 - DNA, 50 bp, Homo sapiens
ccggtctctgttccgcaggatggtattagtcactgtaccactggctttac

SEQ ID NO: 16231 - DNA, 101 bp, Homo sapiens
caggaccctacagaagatgctgaagctgaggacacacccaggaaaagactcaggacggacaagcacagtcttcggaagctctttcgacgtgtagcagcagc

SEQ ID NO: 16232 - DNA, 100 bp, Homo sapiens
cggcccgccgccgcacccaggacggaggctgcatgcccgaggaccaggccggcgcagccatggtcctcagaatggttggaatgaccctccagctttgaac

SEQ ID NO: 16233 - DNA, 90 bp, Homo sapiens
ctgacctggcctatcagcttcagagttcactgacttgaagtatactcagttaaaatcggggctggaggtgcagacggtgtctgaccggag

SEQ ID NO: 16234 - DNA, 90 bp, Homo sapiens
cgaggttggtcatgaaagagattccttgcagagacagctcaacacggcacttccacaggctcctctgcacccgagcactctccccgcact

SEQ ID NO: 16235 - DNA, 99 bp, Homo sapiens
tggcaattgacctcacctcaagcacacccaatggacagcatgcctcaccaagtcacatgacaagcagaaagtcttaatagacatcgatacttgaattct

SEQ ID NO: 16236 - DNA, 98 bp, Homo sapiens
gcagacatctccaaaacagtcatgtcacacctggataggagccctggaggtatcacctgccaaagaagcaatttttattttatattatgttcgagaat

SEQ ID NO: 16237 - DNA, 100 bp, Homo sapiens
gggagcaggaggctgacaatgaggtagttttgctgtcagccacaatgccttctgatgtgcttgaggtgaccaagaagttcatgagggaccccattcggat

SEQ ID NO: 16238 - DNA, 100 bp, Homo sapiens
agggtcggcagcggcacctacggggacgtctataagataggaaccaaggctttagccttctcaactcattgactggaacaaaccatagcattgggtcagc

SEQ ID NO: 16239 - DNA, 75 bp, Homo sapiens
gacatcactttagaccctccacctaattgcagaaacagcacttcttctcagtctcagacaagtactgcctccaga

SEQ ID NO: 16240 - DNA, 98 bp, Homo sapiens
catcatcttgctctggcggacgctcaagtacctgtggaccgtgtgctgccactgcgggggcaagacgaaggagctgctgctcttcctccagaacctgc

SEQ ID NO: 16241 - DNA, 99 bp, Homo sapiens
cgggctgccacaccagcttcaccggacaagggactaatgcaagcgagacccctgccactcggatgtccataattcagggccgttgttcgagagagaact

SEQ ID NO: 16242 - DNA, 75 bp, Homo sapiens
agattcgcagtggtcgcttcttctccttgatctgactgcagccatgagcagcaatgagtgcttcaagtgtggacg

SEQ ID NO: 16243 - DNA, 100 bp, Homo sapiens
tcaagaacttcctcgcactgtgacatgtctgatcccttgctcccatccctgcagcatgaacaaggctcatcagattcaagagatgtttccccaggttcca

SEQ ID NO: 16244 - DNA, 75 bp, Homo sapiens
tggcgctggcgctggccaaggctctggaggagcaccggaattcacagaagcagatgaagctcctacagaaaaagc

SEQ ID NO: 16245 - DNA, 98 bp, Homo sapiens
cctgatcgagcggcgggagcgaggttgtgatcaattattcaatcgtgaaagggctgaagtacaatcaggccacgccaaccttccaccagtggcgagat

SEQ ID NO: 16246 - DNA, 90 bp, Homo sapiens
ggaagatcggccgccgcggccagcggcaacctttggcactgcatccatgagcatgcccacaggattcggcactcctgctccctacagtct

SEQ ID NO: 16247 - DNA, 96 bp, Homo sapiens
attgtgtccattgctctcttgcagcacctggggctcatgggtgatttgaagatattaaagctagaaattggaactagaaaatcaaaagaattcaag

SEQ ID NO: 16248 - DNA, 97 bp, Homo sapiens
aggacacctacagccccgacgaacatttctgggtgacactcaacaggattcccggttcagcagactgtacaggatctttttggcagagccccaagta

SEQ ID NO: 16249 - DNA, 80 bp, Homo sapiens
ggcactgaaggactacgcgctagagaaggcccgcggcgccatggctcacgtcggctcccgcaagcgctcgaggagtcgca

SEQ ID NO: 16250 - DNA, 74 bp, Homo sapiens
tgcaactattcgcagtccgagcgatgtggacgagtgctcactagcagaaaaaacctgtgtgaggaaaaacgaaa

SEQ ID NO: 16251 - DNA, 98 bp, Homo sapiens
actgtcctgctcatagacgtcagctgcttcctggcccggaaacaaaactcatgctgtgccatcatgtgatgcagcctgccagaggcccaatgctggaa

SEQ ID NO: 16252 - DNA, 51 bp, Homo sapiens
atggggattggaatgtagtctgatcctgggaagactctgcctgaagccctt

SEQ ID NO: 16253 - DNA, 50 bp, Homo sapiens
ggcaattaatggaaatggacccaccaaggaaaatcctgccttgcttcgtt

SEQ ID NO: 16254 - DNA, 50 bp, Homo sapiens
tcgtgttctgatcactactgacttgttgggggacttaggagccattgatg

SEQ ID NO: 16255 - DNA, 97 bp, Homo sapiens
tggagcgagagcacacaaagaatgtttgggaagagtagacaattgtggcagagttaattctggtggtgctgcagaaattggggaaagctgtagaaac

SEQ ID NO: 16256 - DNA, 80 bp, Homo sapiens
atctccatcacccaccaacaacaccacaataatccacagccaagattgtcttctcctccaaggtctacatgattacctga

SEQ ID NO: 16257 - DNA, 100 bp, Homo sapiens
agaagtacctaatcacctcctagaatcaaaactctaagaaggagctgatgtggaggagcagctgagacagttcaagatgacgaccacagtagccacagac

SEQ ID NO: 16258 - DNA, 90 bp, Homo sapiens
tcgcccgaggcgaggaggagcgctggcggattcagtttagctgcatttaaaagaaacaagaggaaactagagctggcagaaagggtggac

SEQ ID NO: 16259 - DNA, 75 bp, Homo sapiens
tcgggctgctggtgctgtgcgcgaggctcctcactgcagcgaaggacaatgcagatcttcgtgaagactctgact

SEQ ID NO: 16260 - DNA, 51 bp, Homo sapiens
ggaccaaagctgacagtttctttacttgactgtgccctgtccacggtgcct

SEQ ID NO: 16261 - DNA, 75 bp, Homo sapiens
gcgagccggacttgcacgtggagaaagcgaagcagttcaggtacttttgaagcattctgcagatgttaatgctcg

SEQ ID NO: 16262 - DNA, 75 bp, Homo sapiens
actggaccaccatcctgaatggtttaacgtgtacaacaagcgggaacttcattgcaggccgtgtgtcaccctgac

SEQ ID NO: 16263 - DNA, 90 bp, Homo sapiens
cttcaagatgtgttacttattcctgttattggacccagggacagagcagaatgggctgatatagatccggtgccgcagaatgatggcccc

SEQ ID NO: 16264 - DNA, 50 bp, Homo sapiens
caagcgggcacggctggccaagggggccccactgcacccaggtcatccct

SEQ ID NO: 16265 - DNA, 82 bp, Homo sapiens
gactggaggacgagcaaaagatgcttaccgaatccggagatcctgaggagtgaagtaagaactctgctagagaggaaatggc

SEQ ID NO: 16266 - DNA, 75 bp, Homo sapiens
cgccgcaaatacgaagctttcctgcaaaggcctccagaggaagaagtccaagttccgcttgtccaagatctggtc

SEQ ID NO: 16267 - DNA, 100 bp, Homo sapiens
gcagctacgataagaaccaaggtgtttgtgtggggcctgaatgacaaggaccagctgggcgggctgaaaggctccaagaaaattcatttgcaaattgccc

SEQ ID NO: 16268 - DNA, 98 bp, Homo sapiens
ctgcgagacggcccggctgcagcgagcgctggacggagaggaaagcggtgacagagctgaatgaacctctctccaatgaagatcgaaatctcctctct

SEQ ID NO: 16269 - DNA, 49 bp, Homo sapiens
cagacaccagccccccaccatggaaatctgaaatagagtactatgctat

SEQ ID NO: 16270 - DNA, 100 bp, Homo sapiens
caggcgtacatcaggggctgttcttttgctgcaaatgaagttgatggaattacactgtgatacgactgactggtgataaaagaaaatgtggctgaagtta

SEQ ID NO: 16271 - DNA, 75 bp, Homo sapiens
ttttcagaaatgcgcagagcaaacatctttcaaaggttggagtaatagatttttccctctaccttaaggatgtgc

SEQ ID NO: 16272 - DNA, 74 bp, Homo sapiens
gtgggaaacaatccctcgcctccggaggcggcgaggagcggcggcgtgagtgcatctccatccacgttggccag

SEQ ID NO: 16273 - DNA, 50 bp, Homo sapiens
ggtgggcctctgagatatgccgtttacggctatgagggcactggccggtc

SEQ ID NO: 16274 - DNA, 49 bp, Homo sapiens
gccagcagtcagtaatacagaagccattgccgaaatctaaaaaaacttg

SEQ ID NO: 16275 - DNA, 100 bp, Homo sapiens
ctaggacgcttcacgtgtcccgtgtgcttagaggtgtacgagaagccggtacaggtgccctgcggacacgtgctagcttgtcactttctgcaaaggtttc

SEQ ID NO: 16276 - DNA, 87 bp, Homo sapiens
aaaaggcaaaaatcccatctaccgcaactctcagttcgagagtaaaggttttaaaatcaaagatgggaaaatcggagaaaattgccc

SEQ ID NO: 16277 - DNA, 100 bp, Homo sapiens
ggcgacacccacttcgatcagctccgcactgcagaagctctctgatgtcaccctggtacctgtgtcctgctcagaactggagaaggctggcgccgggctc

SEQ ID NO: 16278 - DNA, 82 bp, Homo sapiens
aactgcagccgtgtattcagccttaggtgactgctggctgctggcagccattgcctccctcaccttgaatgaagaaatcctg

SEQ ID NO: 16279 - DNA, 100 bp, Homo sapiens
accttgaatgggatgcaggtcataaaaccaatgtccagcagtgttactgctattgtggaggccctggagatagtattattgattccacagaatacagcca

SEQ ID NO: 16280 - DNA, 50 bp, Homo sapiens
tccatgccaagcttactgtcctccgaggcacccaggcatgtggaatatgc

SEQ ID NO: 16281 - DNA, 87 bp, Homo sapiens
cctgtggaccagtttcaactttatcagaggttaaaatttgaaagagaaattctccagaatttcagaaacttctgggcatcgctatgg

SEQ ID NO: 16282 - DNA, 80 bp, Homo sapiens
attatgtctctggtcagtgaagaatttccagaagagtggatccaaacttctacagcaaaaacttacttcttttaggaaag

SEQ ID NO: 16283 - DNA, 50 bp, Homo sapiens
tgaaactgatgagacgacaactgagaatcctcattgacactggagaacca

SEQ ID NO: 16284 - DNA, 112 bp, Homo sapiens
cgcagaacccgggagtaggagactcagaatcgaatctcttctccctccccttcttggccgttaattaaggaaaagttgagccagggcgtgaccctcgtcgtggacagatacg

SEQ ID NO: 16285 - DNA, 100 bp, Homo sapiens
ccgccccgaaactttcaccgcgagcgggaaatggctagtgatgagctgaaagagatgcggaaaaacttgaccaaagaagccatcagagagcatcagatgg

SEQ ID NO: 16286 - DNA, 98 bp, Homo sapiens
tcactgtgaggcacacagaattctctacatttgtgaaagtcagtttctgaggaatttcatcagagagtactgcaaggacctgaatgcctcagacaaca

SEQ ID NO: 16287 - DNA, 82 bp, Homo sapiens
gatgaaacgtcaggaatttactacacaggtaccctcagtgtttacacatgttagagctgctccaatatgaacacttccgaaa

SEQ ID NO: 16288 - DNA, 98 bp, Homo sapiens
cgagtacttcgttccaacatggacatcctgaagccaatcctggatgatcctagtgctccccacaaaatccaggaggttctcaagtcctgcctgaaaga

SEQ ID NO: 16289 - DNA, 75 bp, Homo sapiens
tggacaacacggacctggtgtttggccagtaccgggaggcagatccagtgcacattgcaggacgtcggctcggcc

SEQ ID NO: 16290 - DNA, 100 bp, Homo sapiens
gtatttatactccaaccccaagacaccaagtactatactggcaattgctggagaagattttgcaattgttgcttctgatactcgattgagtgaagggttt

SEQ ID NO: 16291 - DNA, 82 bp, Homo sapiens
cagggaaccctggtcaccgtctcctcagaagaggacgagtcagcattaaagaggagcgagcttgttaactggtacttgaagg

SEQ ID NO: 16292 - DNA, 97 bp, Homo sapiens
atgaccacaaacagccatcaagatgaagttgcggagaataatgaacatgatgtcacttctactgaattagatccctttctgacaaacttatctgaaa

SEQ ID NO: 16293 - DNA, 101 bp, Homo sapiens
ctactggggccccacgacctccacgctggactggtgcgaggagaactactccgtgacctggtacatcgccgagttctgtctggctctgggagaggagtgga

SEQ ID NO: 16294 - DNA, 85 bp, Homo sapiens
agaagctgatacctgggggagataatgtaactgtgtgcaaggataacaggaagacagagatgtcaatgaccccatgcccaaccga

SEQ ID NO: 16295 - DNA, 50 bp, Homo sapiens
cgcggatctcaccgccgctcagggtcttattagtaggtaagaaacagctg

SEQ ID NO: 16296 - DNA, 74 bp, Homo sapiens
ttgtaatgaactatccacatattacaaatcttaccaagttacccatgcagttgttactgtaccagcctatttta

SEQ ID NO: 16297 - DNA, 75 bp, Homo sapiens
tgcttcccaataaggaaacagttgattcttcaccacactgaaaccattaggaaaaatccttgtggttaacagcag

SEQ ID NO: 16298 - DNA, 73 bp, Homo sapiens
tccatgctctccatcacctatcacagcagcatccgctctctggaggtttccaaggtgctattgggagctcatg

SEQ ID NO: 16299 - DNA, 100 bp, Homo sapiens
cagcgacacagcctggatctcctccatcctgctggccatgctctacgggacaggactttccttatcccagttgattgtgcagaatacactgcctgtcgct

SEQ ID NO: 16300 - DNA, 100 bp, Homo sapiens
gggcagcatctctggtgcatgctgatgacgaaaaacggagaactggagaagttaaatcagtccacggatgatatcaacagacgggagactgaacttgagg

SEQ ID NO: 16301 - DNA, 90 bp, Homo sapiens
ggcagcgcgggatcccagcctcaggcgtgcgcggacggtgtgcggtaatccttcccctctaccaccggatatggctcctgggcagagtta

SEQ ID NO: 16302 - DNA, 97 bp, Homo sapiens
gtttaccatcgtctaccccaagctctttcccttgagagagacgccaatggcagggctgcaccagtggtgaggtttatacatggggcgacaatgatga

SEQ ID NO: 16303 - DNA, 75 bp, Homo sapiens
cgtcaatttcgcggaattctccaagaagtgttcggagagatggaaggaagcgttgttgacgaccatggacatcat

SEQ ID NO: 16304 - DNA, 75 bp, Homo sapiens
gagagggagaggttgaaggaacagaaaaatgagaagacaactcactgcttcccattgaccggggtggaggtgaag

SEQ ID NO: 16305 - DNA, 100 bp, Homo sapiens
attagagaaaattaggaagactgaaaggcaaggccatttaaatgtagtatgccaagatggaaggaagcctcatacagtgagattaataatccgtcggtat

SEQ ID NO: 16306 - DNA, 82 bp, Homo sapiens
ctgccaggggggacagccagccagcagcaggaggcagagagggtgtgtatgaaatcagcctgtcacccacaggtgtatctag

SEQ ID NO: 16307 - DNA, 100 bp, Homo sapiens
gcaagattgtcattgactttgattcaattaacagcagaccgagtcaaaagcttcacattgcagtgtcgagatggctatgaaccctgtgtaaatgaaggaa

SEQ ID NO: 16308 - DNA, 51 bp, Homo sapiens
ctttgcagctgacctacatctcgaagatctacaacttactgctttgtaaac

SEQ ID NO: 16309 - DNA, 96 bp, Homo sapiens
gtttgccatttctacagagactccacattcagtattctgaagaagccaataatctcattgaagaatgtgaacaagctgaacgacttggagcagtgg

SEQ ID NO: 16310 - DNA, 100 bp, Homo sapiens
gagggaggaccttggagtccagcactctgcatgtgactccccgcagcctggacagatctgactgcagccatgagcagcaatgagtgcttcaagtgtggac

SEQ ID NO: 16311 - DNA, 82 bp, Homo sapiens
gtcgttcttcgacaacatctcttctgaactcaagaccagaacaccttccaccatgaccacctcagcaagttcccacttaaat

SEQ ID NO: 16312 - DNA, 75 bp, Homo sapiens
catccttccttttctcggggctcccgtggtagtgagcctgatgcccccagactactgccttcccctgtcacctgc

SEQ ID NO: 16313 - DNA, 75 bp, Homo sapiens
tgcatcatgcggcagtgcatcgcggaaagaccacagcaagattctttcattcgtctcctcctagcctgggggacc

SEQ ID NO: 16314 - DNA, 100 bp, Homo sapiens
ctggaaggccacgcctcctcccgcctgccccctcagccctgtggctgggggcagagctcagattactctcgtggctttggtggccggtacggggtggaga

SEQ ID NO: 16315 - DNA, 100 bp, Homo sapiens
atggagtgcctccaaaggttgctgaggaatgtatcctgtcaggtataatgtcagtgaatggcaagaaagttcttcatatggatcgaaacccttactacgg

SEQ ID NO: 16316 - DNA, 100 bp, Homo sapiens
ctgtggcagaatgtcgtgtgctgcagaagctgggagcagacgctgttgggctctacggtatttaatggggcccagaatggtgtgtctcagctaatccaaa

SEQ ID NO: 16317 - DNA, 82 bp, Homo sapiens
acaggaccaagagtccaggacccaggcaccatgactcctgtgaggatgcagcactccctggcaggtcagacctatgccgtgc

SEQ ID NO: 16318 - DNA, 98 bp, Homo sapiens
gaaaagacggtgcaatgggacccaggggcccaccagggccgccgttccatgccattgcagtgtcaactaggcctcagttacttttcagtttgcccaaa

SEQ ID NO: 16319 - DNA, 78 bp, Homo sapiens
tgcaagtgacgggactttatctgcagtaggttcccttgaggattactacagcatcccatttcccacacccactactcc

SEQ ID NO: 16320 - DNA, 82 bp, Homo sapiens
gatacgctgggactcgtacgagaacctcagtgcagatggagaaggtgaaaggtgtagcagtcactcggcctacacccacagc

SEQ ID NO: 16321 - DNA, 75 bp, Homo sapiens
ataccagtccccagtgagggtgtacaaatacccctttgaattaattatggctgtgtcagttgtacccgaggcgtt

SEQ ID NO: 16322 - DNA, 83 bp, Homo sapiens
agaataagagatgtgattaatgtattccaccacctccgccagttaagaggaaaaagacaatgcagatcttcgtgaagactctg

SEQ ID NO: 16323 - DNA, 82 bp, Homo sapiens
ctgccctctcgctttccctctcgcgtctctggctgcagtgtggacgaatgtggaacctcgctctgtggctgtgttcccttgg

SEQ ID NO: 16324 - DNA, 75 bp, Homo sapiens
ccgagtacatctcccggaccttcctgggctgctggtcagcgcctcccaggatgggaagctcatcatctgggacag

SEQ ID NO: 16325 - DNA, 76 bp, Homo sapiens
cgggcacggcgcgctacatgagcatcaacacgcacctgggcaagggtggccagcatcgaaatgttcagccttttag

SEQ ID NO: 16326 - DNA, 74 bp, Homo sapiens
ctgtgcagagaggtggcaccttccagatggggggtagcagcagccataacagagtgacctccattgcagacagg

SEQ ID NO: 16327 - DNA, 50 bp, Homo sapiens
ggcagttgcagtgttggagctaaaacaggtgatttggcttctgcacagtt

SEQ ID NO: 16328 - DNA, 96 bp, Homo sapiens
tctgaggcggcgcggccatggctcacctccggggatttgccaaccagatcctccccggcgtgaaggtcatcatcgcacacaccgagaccaaaggac

SEQ ID NO: 16329 - DNA, 100 bp, Homo sapiens
cagtgcgtgtcagccaagtccccccaacactgcatggagcggatccaggtggtgagccggctgggcctggactccctgtgccccttcagccctaaggagc

SEQ ID NO: 16330 - DNA, 83 bp, Homo sapiens
aaagctttggaagatgcagatgagaaggttcagttggcaaaccagatatatgacttgagctcgtttggaggttccagcagggg

SEQ ID NO: 16331 - DNA, 100 bp, Homo sapiens
tctcaaggactgtccaagtgggaggctaaatctcgaggaatttcagcagctctatgtgaagccaatggagatcttcgtggatgatgagacgaagttgacg

SEQ ID NO: 16332 - DNA, 75 bp, Homo sapiens
ctgaaaccaccgtggaagtcgcctggtgtgaactgcagatgtttgagacggaggcagatgagaagagggagatgg

SEQ ID NO: 16333 - DNA, 100 bp, Homo sapiens
ggggtcggcgccgagtgggaggatggcggaacccgagcgggaagaagttccgcagcaagccgcagctggcgcgctacctgggcggctccatggacctgag

SEQ ID NO: 16334 - DNA, 101 bp, Homo sapiens
agactgttgagtatgctccatgtagatcacactcagatatcagtgatcttattagctttttcacaagccagaacataatggtgacgatgattaatgacagt

SEQ ID NO: 16335 - DNA, 90 bp, Homo sapiens
cgaggccacccagtcccacttcaaacattcgtctcggaaaccccgcctcttacagtcacgaggaagtgacctcacaatgactcaagctac

SEQ ID NO: 16336 - DNA, 50 bp, Homo sapiens
caactcgggcgccgacgagatcgggaggccatgtcgggtgaggacgctga

SEQ ID NO: 16337 - DNA, 83 bp, Homo sapiens
ttgcctttgtcaagaaaccatttatggtctctagaatagacaagcaagcagatctgatatcattaggaaaagttgtgttggct

SEQ ID NO: 16338 - DNA, 87 bp, Homo sapiens
cagactaaagcccctcccaaaccaggaaaaaggcctgtgtcatatcaacacttatctaacagcatggcacaaaagagaaactatgag

SEQ ID NO: 16339 - DNA, 85 bp, Homo sapiens
aggagtcagctgcaaatattctcttctgttctacagacctctctcctcttcctgctcatggcaaatacttccctggacaagaaag

SEQ ID NO: 16340 - DNA, 82 bp, Homo sapiens
aaaggatgttggcggtccctgtgacctgtggagacacggccagatctgccctccaccttatgccagcctggaccatcttgga

SEQ ID NO: 16341 - DNA, 80 bp, Homo sapiens
aacagcaagcagttttggaagaggagcgctaagctgccggggaggtccatgactccagctcaggctgacttggagtttct

SEQ ID NO: 16342 - DNA, 82 bp, Homo sapiens
ccaggccagttctctgaatgtcgaggtgtcgtgaaaactacccctaaaagccaaaatgggaaaggaaaagactcatatcaac

SEQ ID NO: 16343 - DNA, 51 bp, Homo sapiens
cccattttcttttttggaactcatgagacgacccctatggtgtagccgtgg

SEQ ID NO: 16344 - DNA, 90 bp, Homo sapiens
gaggctgcaaatgttgtggtcaagtgcctcacccctttctacaaggagggcaagtttgcttccaagctctggccaggctgccgcacctct

SEQ ID NO: 16345 - DNA, 100 bp, Homo sapiens
aggtggcgctcatgcatatttgagacaacatctggatggttggggagaacgctaccaagtcaggattgttacccccaccacctgcgctccctccaagacc

SEQ ID NO: 16346 - DNA, 73 bp, Homo sapiens
taagcaaggtcttcgctgtgctccggagagatgactgccctccagatgcagaagatttcagagcccagcagtg

SEQ ID NO: 16347 - DNA, 82 bp, Homo sapiens
tcgcctgggtggttgttggcgtgtccctgcagcgaaggatcctgatcatggaagggaagtggttgctgtgtatgttactggt

SEQ ID NO: 16348 - DNA, 98 bp, Homo sapiens
taaagcttcggcacaagggcccaactggaattccacttacgggtaaagaacaagcacctttggagatgagtatgcatccagcggcaagcgctccactc

SEQ ID NO: 16349 - DNA, 75 bp, Homo sapiens
cccaggaggaagcaggagcagcccaagcgccttccctcacgtgagaagccctaccactgcaactgggacggctgc

SEQ ID NO: 16350 - DNA, 76 bp, Homo sapiens
ggcgagcctggaggattgtcactccaacctcttttcgctgatgaacgactttcgaagtaaaatgcaatcaatattt

SEQ ID NO: 16351 - DNA, 75 bp, Homo sapiens
cttcctcaaaggctactgccccctgggtgcaaaggtctgtttctgtcgactgtggaccacttatgtgcgatccgt

SEQ ID NO: 16352 - DNA, 124 bp, Homo sapiens
ctgggggccagaagacaagagagacggcgaggcgcgctccctgcccggcagcgactcggagacttaattcagtgcacaaatgagatgaatgtgaacatcccacagttggcagacagtttatttg

SEQ ID NO: 16353 - DNA, 100 bp, Homo sapiens
tgggaacccaggccccgccgaggcggccaggctgaccccgcactacatctacccaccagccatcgtgcagcccagcgtggtgatcccagccgcccctgtc

SEQ ID NO: 16354 - DNA, 96 bp, Homo sapiens
gccaagagggatccttcacccgtgtctggaactgggaagtaacagccctccacagagaaactggaagggaattgctattgctctgctggtgatttt

SEQ ID NO: 16355 - DNA, 43 bp, Homo sapiens
ggagctactctcaggctgcgtgcagtgacagtgcccagggctc

SEQ ID NO: 16356 - DNA, 96 bp, Homo sapiens
catgcaatggcaatgaccagattggtcttgagagctgatgacaataacatgggcaatggctgctctcagaagctggcgactgctaacctcctccgg

SEQ ID NO: 16357 - DNA, 75 bp, Homo sapiens
tttggaaacatctttaccctgttcattgggccagaggaaaattgcctaagaattatgacccaaaagttaccccag

SEQ ID NO: 16358 - DNA, 100 bp, Homo sapiens
cggtgagccctctcctaagagacccaggggaagacccaaaggcagcaaaaacaagagtccctctaaagcagctcaaaagtgtcttctcagaaacaaccag

SEQ ID NO: 16359 - DNA, 89 bp, Homo sapiens
tacgagcagcaggacgcccacgagttcctcatcgcggccctggacgtgctccaccgacactgcaaagaaactggcgatggaatatgaga

SEQ ID NO: 16360 - DNA, 100 bp, Homo sapiens
aaacaagactttcccagcagactgaaggtggggacccatcgtgaagatggcgtggccctgagaggcagccattctcttctgccaaaccaggttccggttc

SEQ ID NO: 16361 - DNA, 50 bp, Homo sapiens
caaggccaagggcaagtgatttgacaggtgaggaagaggatggagatgaa

SEQ ID NO: 16362 - DNA, 109 bp, Homo sapiens
ttcgcctccaggatgcgctgagccctacaacacccccagcggccgccggctcccccacgaggtgtctcgtgcctctgctggaccctgactctgggctcctggtcctggc

SEQ ID NO: 16363 - DNA, 75 bp, Homo sapiens
caggaatcaggagagcaaactataaggttcttcagatagatcctgaagttacagatgaagaaataaaaaagaggt

SEQ ID NO: 16364 - DNA, 102 bp, Homo sapiens
ccatgaacggaagcgtctttgctcaaggatcccagttttctctggatgacgtggtgagaagccctaccactgcaactgggacggctgcggctggaagtttgc

SEQ ID NO: 16365 - DNA, 100 bp, Homo sapiens
ttgcacgatcctcaccgcaacattccttatccaatcccttaccggcagcaaatatgaagtctatggaccctgcctcaggttattcaaataacatcctcac

SEQ ID NO: 16366 - DNA, 101 bp, Homo sapiens
cttcttggaaaaccagatccagaaactggaggagtcccgctcgaagctagggaaaactgaggctgccatcaaaaacttcagtccctactacagtcgtcagt

SEQ ID NO: 16367 - DNA, 82 bp, Homo sapiens
tattgttacaattttttttcaagaactgccgtcttctttgcctgcactaatgggaccagttactctccacaagaaaattcac

SEQ ID NO: 16368 - DNA, 51 bp, Homo sapiens
catcaccggagcgtcccagctgcgaggaggatggatagaatgacagaagat

SEQ ID NO: 16369 - DNA, 95 bp, Homo sapiens
aagcccaatggtctatcaggaagtagaagagcagctcatgggcctcctgagtgacccagaattaggtccagcagcagctgatggcttctctctgc

SEQ ID NO: 16370 - DNA, 74 bp, Homo sapiens
aaccaagttaatcgaaaagttctcaattttgaacaagctatcaaggtgctgatattgatgcgttgtgtgttgca

SEQ ID NO: 16371 - DNA, 100 bp, Homo sapiens
tggaaggggttgcccgaaggatgacgtctctgacagtggttttccgagagcccttcccagtacagccccaggacagcgagagcccccctgcccaactggt

SEQ ID NO: 16372 - DNA, 100 bp, Homo sapiens
ggaagatggcggacggcgtggaccacatagacatttacgcggatgtcggcgaagagttcaaccaggccaagtcctgtatctgccatgtctgtggcgtcca

SEQ ID NO: 16373 - DNA, 100 bp, Homo sapiens
ctcagcaagactctcgagcccatattggcggcagtaagcacacaatgaatgatcacctgcatgtcggcagccacgctcacggacagatccaggttcaaca

SEQ ID NO: 16374 - DNA, 100 bp, Homo sapiens
cctccctgaggagtacttcacaccagctccttcccctggcgatcagagctcagggatacttcaggccagggaagattttgtaccatattccgctcctact

SEQ ID NO: 16375 - DNA, 100 bp, Homo sapiens
cataatgaacttctctggaccaacttgaccgtctactggaaatctgaatgctgttatcacgtcacatatcctggagcaggaaaacttccacacatcattg

SEQ ID NO: 16376 - DNA, 83 bp, Homo sapiens
ctgcaagtcttctttggaattttattgttctcttatgcagacaaaatggggccaaagcacccctacgcagaaaggagtaggca

SEQ ID NO: 16377 - DNA, 100 bp, Homo sapiens
tgaaggaggctcagttcaaagacctgttcttaaaaaaagaaggactccatgaaagatgacagaagaagttattgtgatagccaagtgggactacaccgcc

SEQ ID NO: 16378 - DNA, 82 bp, Homo sapiens
ttgctcttttaaatgcttttggaagtgccaaacccaagtctgaaatccacgtgtctatggccactccggtcactgtgtccat

SEQ ID NO: 16379 - DNA, 90 bp, Homo sapiens
catgatgtccagtgaatatggttccattattgctttttttgatgttcgcacattctcaaatgagctgatccaccttgagatcaagccggc

SEQ ID NO: 16380 - DNA, 102 bp, Homo sapiens
gcggctgctgctgctgctgacgctgctgctgcccggcctcggggtcaaaatgcagatcttcgtgaaaacccttaccggcaagaccatcacccttgaggtgga

SEQ ID NO: 16381 - DNA, 98 bp, Homo sapiens
caaggatctggggatcttcgcactatcccaaggtgtcatggagaaactccagctgggcccagagattctgcagcgggaaaatccaaggcttatttatg

SEQ ID NO: 16382 - DNA, 100 bp, Homo sapiens
gatgaaaggccacaggcctcagatgaagaacacaggcattcagatgatgaagaggaacaggatcataaatcagagtcacctaaggtcctgcgagtacaag

SEQ ID NO: 16383 - DNA, 90 bp, Homo sapiens
ctcacactctcctctcacaaagcctctagatatctgtgtgaagtacttgtcaggtctccttgaggcaacagcattattgagaaaagccct

SEQ ID NO: 16384 - DNA, 73 bp, Homo sapiens
caagtcgtgttctgatcactactgacttgttgactgtcctgcctggctgtgggcctggccctgctgaagcgct

SEQ ID NO: 16385 - DNA, 82 bp, Homo sapiens
cgtgtccctgcagcgaaggatcctggctgaaggtgatgtggccgccctcaaccgacgcatccagctcgttgaggaggagttg

SEQ ID NO: 16386 - DNA, 100 bp, Homo sapiens
cagccgccgacggttcgctcttcgacaaccccaggacgttctccagacgtcccccagcccaggcgagtcgggccttgtgaaaaagggtaaagaacaaaac

SEQ ID NO: 16387 - DNA, 100 bp, Homo sapiens
cgtcggttgagcggcggcgaacatgcgcttttgacacattggaggtaccccaagaagctagtgcagacttattcagtgtttccctaccaggacgagatga

SEQ ID NO: 16388 - DNA, 100 bp, Homo sapiens
ccaccatcacggacgcaggcctcgagtgattcggaatgtcaagtttaagatcctggatgcggtggttgcccaggagcccctgcaccggggcgggggccag

SEQ ID NO: 16389 - DNA, 90 bp, Homo sapiens
gatctttcagataatttcatctctcaggttcagtgtatctttgcctgcctacatcaatctgcaagggagttgcagaaagcctcatgttca

SEQ ID NO: 16390 - DNA, 100 bp, Homo sapiens
aggagaatgcgctcttcaagcggatcttgctctcaagaggcagaatttatataataatcctttcaactctatgagttacaccagtccttacagtccaaat

SEQ ID NO: 16391 - DNA, 80 bp, Homo sapiens
cgttcggccaccggaggagcgggagccaagcaggtccgcgggagagctgtggggcttggtgagtgtttcgtggcctctcg

SEQ ID NO: 16392 - DNA, 75 bp, Homo sapiens
gcccgctgccttcacaccccggacatccgcgccacacgtctaaagaacctggtgctgacctatgtcaatgccatc

SEQ ID NO: 16393 - DNA, 50 bp, Homo sapiens
aggcttccatgcagcctgccttaccgatggctcatgatgccctcaatgcc

SEQ ID NO: 16394 - DNA, 82 bp, Homo sapiens
gaggaatcccgcaaccgaagcacaaaagttatcaaacccggtggaccatatgtagatttcctccttcttcacccctgaaacc

SEQ ID NO: 16395 - DNA, 50 bp, Homo sapiens
agctccggaatacatcacatcaaccttcgttcagaaaaacctggtctatg

SEQ ID NO: 16396 - DNA, 50 bp, Homo sapiens
cggagtgaccaagagcaggtttgaggttgcacactgggccacagaggatc

SEQ ID NO: 16397 - DNA, 83 bp, Homo sapiens
caggtcaagagcctctgcgagaagcctgcttgaatttcttgaaactgtgcaaaataaaatattacaattattgccttattcac

SEQ ID NO: 16398 - DNA, 100 bp, Homo sapiens
gctgttgatcctgaagaatcattacattgatgaccacagctggaccctttttgagcacctgcctcacataggtgtaggcaattaagttggaatatgcaag

SEQ ID NO: 16399 - DNA, 101 bp, Homo sapiens
ccggaggcgacatggggcacccggtgtaccgcggcgagaagccccagctgcactacgcgcgggaatgcatatcagtccacgtgggccaagcgggagttcag

SEQ ID NO: 16400 - DNA, 75 bp, Homo sapiens
gaacaccttgactaaaccgacttctgatccatggatgccatcaggagtcggagaagctggaaagtgtgaatgctg

SEQ ID NO: 16401 - DNA, 50 bp, Homo sapiens
tgcggccacaccttccacttgcagtggcagtagacagcagggactccctg

SEQ ID NO: 16402 - DNA, 100 bp, Homo sapiens
gctcaccccgcggccgcaccttcccgccttctcagggaagaccactgggatccccatccatgtctttggcacagagactcacatgacggccattgtgggc

SEQ ID NO: 16403 - DNA, 82 bp, Homo sapiens
cttcatagcttcggggatggtcaatcagcggccgcaaactgacacctcagggacaaagagatctggacagaatcgccggaca

SEQ ID NO: 16404 - DNA, 75 bp, Homo sapiens
accacttctgtggctgctaccccactcctgggccgtccctgaagaggctggcgaaggttcctgccagtgggcttg

SEQ ID NO: 16405 - DNA, 80 bp, Homo sapiens
tcttcgactacttcaaccaggaggttttccgagacaacaacggcaccgcggttcttcccaggagactctgccggcctttt

SEQ ID NO: 16406 - DNA, 75 bp, Homo sapiens
gtggatgctgcattccgtcaaggtcacaacagtgtctttctgatcaagactggtgacatggcttccagatatgcc

SEQ ID NO: 16407 - DNA, 100 bp, Homo sapiens
atctgtgcaaagaacccggcgagagtgattgccatttggctgaagtgtggtgtggctctgttggggaactataccgaggatatatgagcaatttaatcca

SEQ ID NO: 16408 - DNA, 83 bp, Homo sapiens
cgagcggtggtttggacgccggcggagacgcgggcgaggtgaaatgacaatggatgctctgttggctcgattgaaacttctga

SEQ ID NO: 16409 - DNA, 101 bp, Homo sapiens
gccccggccgcggccgggtcctcaggaattgacagaagaaggactgccttttctcatactctttcacatgaaagaagatacagaaagtttagaaatattcc

SEQ ID NO: 16410 - DNA, 75 bp, Homo sapiens
tcaggacagctgttccttggccatcccaaagctattctgggggcaacagaggtcatacagcagatggaacaaaaa

SEQ ID NO: 16411 - DNA, 51 bp, Homo sapiens
cagatgtctgtgatgaggggtcagggttatagagtggaaagtcccacaatc

SEQ ID NO: 16412 - DNA, 83 bp, Homo sapiens
ctgtaatacttctggaatccagacagaatgagttgcacggtcaattggcccgtgaaggggacgcctactttcaaacaaggcag

SEQ ID NO: 16413 - DNA, 83 bp, Homo sapiens
gctatcgtggacgtcactggccctggtggggattgacagccacgggaaggttgtgaccgagattcccgacgagagagactgag

SEQ ID NO: 16414 - DNA, 95 bp, Homo sapiens
acttggatgaagagctggtcattaagggatccatcctacagaacaaagccttctagacaagctcagtggaatctgaagggcccaccccatggagg

SEQ ID NO: 16415 - DNA, 90 bp, Homo sapiens
cgagatcttgtctgatgtggcatctagactttggtttacatacaggaaaaactttccagccattgctggttcccttcttgccaagcaaca

SEQ ID NO: 16416 - DNA, 75 bp, Homo sapiens
gaatttgtggctggctggatctctgagacgagttgtactgctgtcacaggaaatggacgctggattacaagcatg

SEQ ID NO: 16417 - DNA, 83 bp, Homo sapiens
ccaagatcttcacattctggatctcagctgctcttgaagcaattctgtggtgttcttggtcacacatttatggagtttctgaa

SEQ ID NO: 16418 - DNA, 87 bp, Homo sapiens
gagtggcggtccgacagagtcctccgtgtcctcccccgcatgacccccttggtagagttggctttgtgggacacagctgggcaggaa

SEQ ID NO: 16419 - DNA, 75 bp, Homo sapiens
aaaacgccaggcggatctcagaaggccagttcaaagctcgatgcattctatttctcatcatttggctcataactg

SEQ ID NO: 16420 - DNA, 75 bp, Homo sapiens
aagcctgaatttcaggatctttcaggtggagccgccaccaaaatgcagattttcgtgaaaacccttacggggaag

SEQ ID NO: 16421 - DNA, 100 bp, Homo sapiens
cgggcggcgcgcggcggcggcgctcggcgatggtaggcgtccctggagcggccgccttccagcccatatgtgtcattggctcagcagatggcaccaccta

SEQ ID NO: 16422 - DNA, 100 bp, Homo sapiens
acgagagaggcaccgggatcgtgaccgagaccgtgaccgagagcgtgaccgagagcgcgaatatcgtcatcgttagaagaaaaatggctacaaacttcct

SEQ ID NO: 16423 - DNA, 76 bp, Homo sapiens
gcagtccagcacggccaagtcagccacctggacgctttccccagacatggccaacaagggtccttcctatggcatg

SEQ ID NO: 16424 - DNA, 100 bp, Homo sapiens
atcagcgagaagaagatgtcaacgcccatcgaggtcctctgcaaaggctatccctatctcaggaaacaggctcgacagctggaaaatgaacttgacctga

SEQ ID NO: 16425 - DNA, 100 bp, Homo sapiens
agctcccagttttaacatttcgccacctactgaagacatcatttgggaccaagctgatgagcccttgaagcacagcaggatacatgatcccttaattcag

SEQ ID NO: 16426 - DNA, 83 bp, Homo sapiens
ggagctcgagaaccgtttggcaatatgtacgacgcggatgaggttggttgaatctggcgatgtggaacccatggatatggagg

SEQ ID NO: 16427 - DNA, 100 bp, Homo sapiens
aggaagagcactcaggagaccaggaaaatggccacagggctcctgagagccaaaaaagaggtggttctggaatggagccgagatcaataccatgttttgt

SEQ ID NO: 16428 - DNA, 100 bp, Homo sapiens
catatcctgctgtgggatttacaggaaagctcgagccaggctgtggtgaccttgggaaaggtgttgaaagtgatcgtcgtcatgcggagcctgttcattg

SEQ ID NO: 16429 - DNA, 100 bp, Homo sapiens
ccagctggtggctggagcgaccccttgttctttggtggcgctgggccgcggcggcaaaggcagcatctacgtgtgggcctccggggacggcggcagctat

SEQ ID NO: 16430 - DNA, 75 bp, Homo sapiens
gtttggtgtacccatgtgactaatttgtccaaagagagcattagtgaccagaaggatcccaaggatcgaatggtt

SEQ ID NO: 16431 - DNA, 75 bp, Homo sapiens
actctaccatgtgctagagacagccaacaaaatattcatggttcttgagatttgtttagtgaatgaccctaggcc

SEQ ID NO: 16432 - DNA, 100 bp, Homo sapiens
caggcttactgaatatcctcttataattaatgcaataaaacgcttccatctttatccagaggtccagagccaaacccgtcactgaccccccagcccaggc

SEQ ID NO: 16433 - DNA, 100 bp, Homo sapiens
ggcgctgcccagccccttgtcagccagggctgaacccccgcagagaacaccttctgcagtggggaccatgtgtcctggcacagccctttggataacagtg

SEQ ID NO: 16434 - DNA, 100 bp, Homo sapiens
gcggcaacatgtctgtggctttcgcggccccgaggcagcgaggcaagggggagatcactcccgctgcgattcagaagtcctcctgcatatgcccaagagg

SEQ ID NO: 16435 - DNA, 74 bp, Homo sapiens
agatgtcatgctggagaccttcaagcacctggcctcagtagaaataggaaggttgttgattactcacagtttca

SEQ ID NO: 16436 - DNA, 50 bp, Homo sapiens
cggcctggagctcccagggccgagggatgcttgaagatggaaagaaattt

SEQ ID NO: 16437 - DNA, 75 bp, Homo sapiens
aagcagccgatccagcctgcggagcctgtggggcaggaaactactttgcttcgcactttttcatgggaggagaga

SEQ ID NO: 16438 - DNA, 82 bp, Homo sapiens
aaaaagaggaaagtggactgtccggggccgggctcaggagcagagggggatatgagactttctactcggaatatcctgagtg

SEQ ID NO: 16439 - DNA, 75 bp, Homo sapiens
aaccagagcttgtgtagcgtcagatccttgagtgataaaggagtagaggagccctctggcacaaatggaagaaga

SEQ ID NO: 16440 - DNA, 73 bp, Homo sapiens
gtcagtcaactttggttttagtaagctcccagtaccagccttgcaagagaacttttcttcactgttgggagta

SEQ ID NO: 16441 - DNA, 95 bp, Homo sapiens
cgagaggtgcggcgaaggaggcagaggcacttatgcttgtcagcccccaaatacatcaagatgtttgtactggatgaagctgacgaaatgttaag

SEQ ID NO: 16442 - DNA, 75 bp, Homo sapiens
gacaatgccggtggaggaatttgtggctggctggatctctggtctctggacctctgactgacactgtgcctgccc

SEQ ID NO: 16443 - DNA, 100 bp, Homo sapiens
ctcagagccccacctgagcctgccgactggttccccactgaaggacttggtccagctgtctggcagggaggagagacagaagctctggcccgcctggata

SEQ ID NO: 16444 - DNA, 82 bp, Homo sapiens
tccagcaaagcaccgcaacatgaccgaaatgagcttcctgagcagcgaggtatgctgccccacaaaaccaagcgaggccagg

SEQ ID NO: 16445 - DNA, 82 bp, Homo sapiens
gccgaccgctacgctgtctactggaacagcagcaaccccaggtggaaatgagttctcaacagtttcctcggttaggagcccc

SEQ ID NO: 16446 - DNA, 111 bp, Homo sapiens
cgagtctcaatatctgtcttcggtggactccttcggcagtccacccaccgccgccgcctcccagttttgggaggtcatcagcgatgagcatgggatcgaccccacaggcag

SEQ ID NO: 16447 - DNA, 75 bp, Homo sapiens
ctcttctgcctcttgatctccgccaccgtcttcaggccaggtctagatccagaagaagctcccgaaggcattata

SEQ ID NO: 16448 - DNA, 51 bp, Homo sapiens
acttatcttcaccaaaggcaagccctacctgaacccatccttccatccctc

SEQ ID NO: 16449 - DNA, 100 bp, Homo sapiens
ctcctcgccagcagccgtccggagccagccaacgagcggcgaagcatgaagcggaaggcactattcacctgccccttcaacggggactgccgcatcacca

SEQ ID NO: 16450 - DNA, 97 bp, Homo sapiens
tgatatggaaatggaaattaaatgggttccaggaaaatgactcaggcactttggacacggtaggcgctgtggttgtggaccacgaagggaatgttgc

SEQ ID NO: 16451 - DNA, 98 bp, Homo sapiens
agaaaaagtcaagaaagcattggctcaggtcttctgtgaggaatctggattgtcacctttgctgcaaaaaattacggataacaacgaacttgatgcaa

SEQ ID NO: 16452 - DNA, 101 bp, Homo sapiens
atctactagggcaacatacaactgccctctgagtcagaagatcagaagttgctgtggctacacatacaccctgaagcgggcccttgaagtcttcaagcagc

SEQ ID NO: 16453 - DNA, 100 bp, Homo sapiens
cccagctctgcagccacatactatccgtttgttcaggaaccaccagtgacagacaaacggggattcagcgtccgatcctttggaacagggactcacgtga

SEQ ID NO: 16454 - DNA, 95 bp, Homo sapiens
gaaggctacaagaagaccaaggaagctgttttgctccttaagaaacttaaagcctggaatgatatcaaaaagaagcaatatccaaggcagtgtca

SEQ ID NO: 16455 - DNA, 101 bp, Homo sapiens
tcaggacagggctgaggaaccatgtctccatccccgaccgccctcttctgtcttggaattgaatgatctggcacgggaccctccagcacagtgttcagcag

SEQ ID NO: 16456 - DNA, 75 bp, Homo sapiens
ctgaaccgcgcggccgaaccctccggccgccccatgaacattcagcttgtcacgtcacagattgacgcacagcgg

SEQ ID NO: 16457 - DNA, 75 bp, Homo sapiens
tgcagggcagagcaggaggccccccgagggacaaactggcagagctccacgggaacatgtttgtggaagaatgtg

SEQ ID NO: 16458 - DNA, 101 bp, Homo sapiens
ccgtcgccgccgccaccatgcccaagagaaaggacggggaggtttactgcatcgacgcgcggttctacgggaacgtcagccggttcatcaaccaccactgc

SEQ ID NO: 16459 - DNA, 83 bp, Homo sapiens
gtcaaagtcatcccgcagagccgcgtcgccaagccgcatcagcgcgagaagttttaaccatgctgaccaacgaaactggcttt

SEQ ID NO: 16460 - DNA, 51 bp, Homo sapiens
ctattttcacgttttaatgccgagagggagtggggccagccagcagaaaca

SEQ ID NO: 16461 - DNA, 101 bp, Homo sapiens
aggagtcagcgcaggccgagaatcacctcaatggcaagaattcctctttgactctgactggagaggtccagtttggccatgctggagcttgtgccaaccag

SEQ ID NO: 16462 - DNA, 90 bp, Homo sapiens
gaagcctcctgcgccggccttgcctcgggttcacctttccttgccagtgaagatggcgtgcttggcggagtgattgtcctccgttcatgc

SEQ ID NO: 16463 - DNA, 90 bp, Homo sapiens
gcccaacccgctgcaggacgcgaacctctgctcacgcgtgttcttctgaaagtgaagtcactgcttttgctgtcttggatcaagaccaga

SEQ ID NO: 16464 - DNA, 75 bp, Homo sapiens
ccgaaaccggtttgcaagtccttgtagaggcggtaaccagcgtgagctcgcccgccagaagaatatgaaaaagca

SEQ ID NO: 16465 - DNA, 90 bp, Homo sapiens
cctgcacaccaagggcgcccttcccctggatacggtcactttctacaagccacccacacagaatatgcctatgggtcctggagggatgaa

SEQ ID NO: 16466 - DNA, 100 bp, Homo sapiens
ctcaactctgcctggacaggctgcagctggaggctattcataaggcctccagaggaagaagtccaagttccgcttgtccaagatctggtcaccaaaaagc

SEQ ID NO: 16467 - DNA, 98 bp, Homo sapiens
ccgatggcaatgtcttcaccactgggttcagccgcatgagcgagcggcagctggctctctggaatccgaactggcattgcccgccttgtcgaggaatc

SEQ ID NO: 16468 - DNA, 100 bp, Homo sapiens
ttttggaataaaaagattcccaggatgtgagcaacacgggaccgaatctcttccagtaatagcagctccatccatgtggacacgacctcagatcaaagac

SEQ ID NO: 16469 - DNA, 110 bp, Homo sapiens
tgagaggtgatagctatgaaagcggctgtttaggaagaacagcctcagggcttttgcctctgctgttcctgcagcttggaatgcactccctccacctccaaccagagctc

SEQ ID NO: 16470 - DNA, 75 bp, Homo sapiens
tctaaaggagcaattctccaatacttacagtaatctcatattaacagggaaactgaacagccaagactcctataa

SEQ ID NO: 16471 - DNA, 83 bp, Homo sapiens
gaattaagcagaacagaacagataagaaaagagttgagcattaaggtatcatgatattagctggtttgacatcaagtcatttg

SEQ ID NO: 16472 - DNA, 74 bp, Homo sapiens
cttcttatagtctatggtagtttcaggttctcctcagtgaactggcagtaccagtgtgggcttacctgtgagca

SEQ ID NO: 16473 - DNA, 83 bp, Homo sapiens
ctgctgtgggcgctgctggcgctctggctgtgctgcgcgacccccgcgcatggttttgagcaaaattttggactgtgaagcaa

SEQ ID NO: 16474 - DNA, 100 bp, Homo sapiens
aattaagccatcataccagtgccttatctgttgtggcatgttactaccagattcagcgtgagaagcttaactaggctgcataacagcttgaaaactggat

SEQ ID NO: 16475 - DNA, 75 bp, Homo sapiens
gtcgacgacgaagacagcggagaggagagcggtgcggaggactgagggtcctggcggcagagaccacgtcccagc

SEQ ID NO: 16476 - DNA, 100 bp, Homo sapiens
tatactactgcagtgaaccaacattggatgtgaaaattgccttttgtcaggatcaaaatacttgctggatggtggactcagagaccaataaaaataaact

SEQ ID NO: 16477 - DNA, 112 bp, Homo sapiens
tccggacagccgcgcgctgagggtctcggggcgggcgccgcgggacctctccgggccatggtttggtgccctggttgtcagatgttggaaagcagtaggacggaacatactc

SEQ ID NO: 16478 - DNA, 75 bp, Homo sapiens
tttaagattgcgtacccactgcagagtgctgaagacggggtagccacgaggtatgatctcgtgaaaccttgagag

SEQ ID NO: 16479 - DNA, 100 bp, Homo sapiens
gtctgcaacgggaagagaaagcgaagccagtaccagcgtttcacctaccttcccgccaacggttctgactcagaagatcttttggaagaattgctgtgct

SEQ ID NO: 16480 - DNA, 100 bp, Homo sapiens
gttcaatgggtagcctcaccatgaaatcacagcttcagatcactggaactcgaatcatttatgacagaaagtttctgttggatcgtcgcaattctcccat

SEQ ID NO: 16481 - DNA, 83 bp, Homo sapiens
aaaaaacacaataccaggcatacatttggcagaataaatgaaccaggaattacatgaacgacagccttcgcaccgacgtcttc

SEQ ID NO: 16482 - DNA, 50 bp, Homo sapiens
cgggcagaagccgcccgctctccgggtgtttttccacagcaggaaatgat

SEQ ID NO: 16483 - DNA, 88 bp, Homo sapiens
gcatctttatgtcagaaacacaaagcagcccaaccaaaggtgccggtggtggtgtgcacattgagccccggtatagacagttccccca

SEQ ID NO: 16484 - DNA, 49 bp, Homo sapiens
cgcgagcgtctgggcgggtggtaggagagctcaaaggatggctactgac

SEQ ID NO: 16485 - DNA, 82 bp, Homo sapiens
tgttcgtgctgctgggattcgcgctgctgggcacccacggagcctccggggctgcgaggagccacccctggatctgacaggc

SEQ ID NO: 16486 - DNA, 90 bp, Homo sapiens
ccgatcaagcctgacttctagccaagattttaccaaatgttgcaagaactctggagttcttatggtagtaaaatgccggaaagaaaattc

SEQ ID NO: 16487 - DNA, 100 bp, Homo sapiens
ggactgttgccaggagcacagtggccacaccatagtctccctggatgcagcccgcagggacaaggaggaggatttgacagctaaggatattgaagaaatt

SEQ ID NO: 16488 - DNA, 90 bp, Homo sapiens
acttcttgcaaaccacatacacagcacaaagaatgtcagacagattcctacgagaagcaacaggcacaaggctctggtcggaaaaaatta

SEQ ID NO: 16489 - DNA, 75 bp, Homo sapiens
cagcaaggaatatgagcgcttttccaagtacatgcccagcgtcaaggccctcgggaccaaggatcacgtcatgac

SEQ ID NO: 16490 - DNA, 75 bp, Homo sapiens
ggtttttcggatcatgtctggtggctccgcggattataacagtgacagctatattgtgcgtgtcaaggctgtggt

SEQ ID NO: 16491 - DNA, 100 bp, Homo sapiens
gcttcacctggtgtttgaatattgtgaccacacagttctccatgagttggacagataccaaagaggggaaccccaacattccaaaacctcggcgaatctt

SEQ ID NO: 16492 - DNA, 100 bp, Homo sapiens
tgaccatgtatttgtggcttaaactcttggcatttggctttgcctttctggacacagaagtatttgtgacaggtaagcagaattttgtacagtttctgta

SEQ ID NO: 16493 - DNA, 85 bp, Homo sapiens
gttggaaagaggcaggtacggaagctgagctgcagagttagccggcatctgacagaaaaatccggtgatgaacaatgacaagcac

SEQ ID NO: 16494 - DNA, 75 bp, Homo sapiens
tctgccacaaaaaaatataataaggctgagtgcggagccaagcagaaaaagtcctacctggagcgaagcgttaag

SEQ ID NO: 16495 - DNA, 74 bp, Homo sapiens
tttgggataataaaacacctgtttgtgacagatgacgtagctttgccaaagacttagaagctaagcagaaaatg

SEQ ID NO: 16496 - DNA, 105 bp, Homo sapiens
ggagaaacaggcgccgcgggctccgcgcccggccggacccgggcccgaggaaggtgctcgggtcttcggggcactgggtcccatcggtccctcctcacctgggct

SEQ ID NO: 16497 - DNA, 100 bp, Homo sapiens
tgatgatgagggtccagtgtccaaccagggctacatgccttatttaaacaggttcattttggaaaagagtttgctctccaaagctcggggaattgattcc

SEQ ID NO: 16498 - DNA, 100 bp, Homo sapiens
aaattaatgaagctgtacctcaggtgaagttttatgaagagatgtccaacatcacagtcacatacagagatggccgagtggcacagctggagcaggtata

SEQ ID NO: 16499 - DNA, 98 bp, Homo sapiens
cagatcagcttgaagaactatgatccccagaaggacaagcgcttctcgggcaccgtcaggctcaggcagctgtccaaggacctgttggtacagatttc

SEQ ID NO: 16500 - DNA, 99 bp, Homo sapiens
gtcactggcactttgaagcaaaatattccaagactcaagctaacctacaaaggtgtatgcaacagcgttattgcaacaggctaacgaaaacagacaaaa

SEQ ID NO: 16501 - DNA, 83 bp, Homo sapiens
ccgccggcccgcgggtctacttcctcaaagatggagaaggaggagacaacccgggagctgctgctgcccaactggcagggtag

SEQ ID NO: 16502 - DNA, 117 bp, Homo sapiens
tgaccagttttcaccggaagcagatgccgccatgagcgagatgacggggaatacagcactgcttgctcaggtgattatcctgaaccatccaggccaaataagcgccggctatgcccc

SEQ ID NO: 16503 - DNA, 50 bp, Homo sapiens
ttatgatagtagcatggagtcacggaattacatgaatgacagtcttcgaa

SEQ ID NO: 16504 - DNA, 100 bp, Homo sapiens
ctacatgggaaagtgcctctggctgcaaccgctggattaaattcagatgagctccctgtgctgtcaggaatctacaggacttggctcgtatttacattcg

SEQ ID NO: 16505 - DNA, 98 bp, Homo sapiens
gctccgtggccttagctgtgctcgcgctactctctctttctggcctggaggctatccagcggtctctcattcatcacttttatctgctatgtggcgtc

SEQ ID NO: 16506 - DNA, 74 bp, Homo sapiens
agagggggagtgcgcggcggccgcagctgccacaaaccaggtttgctggttggctcccgagcagacagcaggaa

SEQ ID NO: 16507 - DNA, 82 bp, Homo sapiens
cctgtacagcctgcagaactgggcctagaagacagttcccaggaggccgaggacgaggcatcggggctggggctatctgagc

SEQ ID NO: 16508 - DNA, 75 bp, Homo sapiens
tccccggcccacagtgggggtgtgcaaacccgagagaactggtatcagaggttctggtgatagcagtcattcaca

SEQ ID NO: 16509 - DNA, 75 bp, Homo sapiens
caccaaggtcagcgactggcaggttctctacaagagttgagtccacgctccatgagaatgctgaacaccatccaa

SEQ ID NO: 16510 - DNA, 74 bp, Homo sapiens
tggcattggtctagagctttataagtcggaattgagatgggcgattggcaggaagtctgggatgagaacacggg

SEQ ID NO: 16511 - DNA, 74 bp, Homo sapiens
gctgaaaatatatctcatgatgctctttatagccagtgaaactgaaattgcattcttctgtgaagaagattata

SEQ ID NO: 16512 - DNA, 74 bp, Homo sapiens
tgtgcagcagcaaggatgatggccaggccttgatgatcctcagcaggtacctgacgcgctgggctcctggctcc

SEQ ID NO: 16513 - DNA, 100 bp, Homo sapiens
aaaagaaataaaaatgaagttaagataagaagtaatctggaatcagaaagcactacgctaagaagaaatgttggctatttggcgatgagaggtggtgaac

SEQ ID NO: 16514 - DNA, 51 bp, Homo sapiens
tctaggaagagagaatattgatattggctggaatgcaatggtgcaatcttg

SEQ ID NO: 16515 - DNA, 75 bp, Homo sapiens
ctgcacctactgcactaaggagttcgtctttgacaccatccagctcctccacccccaccacctgtgatccgaaat

SEQ ID NO: 16516 - DNA, 100 bp, Homo sapiens
caggaaggcgctggagaccttacgacgggttggggatggcgtgcagcgcaaccacgagacggccttccaagacacgatgaggcgagtggtacgacagagc

SEQ ID NO: 16517 - DNA, 51 bp, Homo sapiens
gggggtatgctacagccacctcttggtgactattatatggttaaaaagatt

SEQ ID NO: 16518 - DNA, 74 bp, Homo sapiens
ttgtgcaagatgagcctcaagtgcttctgcattacaactatatcatcatgtacatagaaaaatccaaaggattc

SEQ ID NO: 16519 - DNA, 100 bp, Homo sapiens
tttacagtaatttcaacagaagagtgagagatggaacccgaagaagaaaggattcgttacagccagagattggtaaaatctgtaaaaactgggtcagttt

SEQ ID NO: 16520 - DNA, 100 bp, Homo sapiens
agaggactggtgatctacgtgtgctttttcaagggagctgataaagaacttcttcccaaaatggcccctggactttcaccttctgggaaaacaacagatt

SEQ ID NO: 16521 - DNA, 50 bp, Homo sapiens
agaaacaaaatgtcaacaaattgatggttgctgatcccacaccctttcat

SEQ ID NO: 16522 - DNA, 87 bp, Homo sapiens
gggagctgtcaggttggctccgcatggctgctcctgtcccgtgggcctgctgtgctgtgcttgccgccgccgccgcagttgtctacg

SEQ ID NO: 16523 - DNA, 75 bp, Homo sapiens
attttggggtagcaggtcaacttacagcctcgaaaaagcccaagacagcagaagcagacacctccagtgaactag

SEQ ID NO: 16524 - DNA, 100 bp, Homo sapiens
gcggggaggaggcggtggccgtggtgcgggctctgcagcgagcgctcgatggaacctcatcccaggcctatatgaacccaatagcaatggcgagatcaag

SEQ ID NO: 16525 - DNA, 74 bp, Homo sapiens
ccagctctgcagccacatactatccgtttgttcaggaaccaccagtgacagaacgaggagaagaccttttcatg

SEQ ID NO: 16526 - DNA, 75 bp, Homo sapiens
tgttacatgagagagccaatcttggacctaccacttgaaaccattagtgagctgttcctctgtgacgagggtgca

SEQ ID NO: 16527 - DNA, 102 bp, Homo sapiens
aatggatatgaaaagtgaagaaagtgatcataggagaaaaccatttcaggcaattaagttggaatatgcaaggttggttaagttggcccaagaagacacccc

SEQ ID NO: 16528 - DNA, 96 bp, Homo sapiens
cagaaggaaatttccaccagttggtggcactgctacactgccgcagcctgcacaaggagggagccatggatttgctgcgggagctgaaggccatgc

SEQ ID NO: 16529 - DNA, 75 bp, Homo sapiens
cgcaccacctaacgctggccgacaacagcctggcgtccgccacgaatttcgctaaggagtttgtgatcagtgatc

SEQ ID NO: 16530 - DNA, 80 bp, Homo sapiens
ctaatggcacaactgtccacgtaggcattcaccccagcaaggctgacaacagccctgattccaaaatctgcttctacgat

SEQ ID NO: 16531 - DNA, 75 bp, Homo sapiens
tgctgcctctcctgcctgcgctggtcctcagcaccaggtgcgtataacccgtatatagagataattgaacaaccc

SEQ ID NO: 16532 - DNA, 97 bp, Homo sapiens
aagaataatgggaggagacaggacctttttcaacttgacaaatagatataattgaccctgcaatcctgcgcccgggccgcctggacaaaacactgtt

SEQ ID NO: 16533 - DNA, 100 bp, Homo sapiens
agaggaggccgtccagcagatggcggatgccctgcagtacctgcagaaggtctctggagacatcttcagcagccgctacgtcctccacatccaaggcagc

SEQ ID NO: 16534 - DNA, 90 bp, Homo sapiens
gccatccgagttactcatgagaccagtgcccatgaaggtcagactgagaattaaacaaccaccatgtcgagcaaaaaggcaaagaccaag

SEQ ID NO: 16535 - DNA, 51 bp, Homo sapiens
ggggtgtgcaaacccgagagaactggaactcagcctcctcccaagctccct

SEQ ID NO: 16536 - DNA, 100 bp, Homo sapiens
gctccagtgcttttgccacattcaactttggcagcatgtaagcagctgtttgccaagaacccaggtcactgctaagaaagggtgccttcgggagaagagt

SEQ ID NO: 16537 - DNA, 75 bp, Homo sapiens
ggcctgcagaggtgccgacatggggcttaagatgtcctgcctgaaaggcatgagccatgagcccaagtccccttc

SEQ ID NO: 16538 - DNA, 100 bp, Homo sapiens
acacaggtcacctgtcactcagccctgctggacctggagaagctcccagaattcaacagtggccagacgcaccgggtctgcctcctcatctgcaactcac

SEQ ID NO: 16539 - DNA, 75 bp, Homo sapiens
aagttagttgttctcattctttttcttctggacaacgggacagtcattttgtttactcattcagccctgttgcag

SEQ ID NO: 16540 - DNA, 100 bp, Homo sapiens
agaaactgaatactccttccttcctccccacccattcctttaaatccggagggggaaaaaatcccaaggtctgcaaagacctcctgccccccgaggtctg

SEQ ID NO: 16541 - DNA, 75 bp, Homo sapiens
cgccggaacaccctggaagccgagaaatggatgtgtttcacatggtagttgaagtaccacgctggtctaatgcaa

SEQ ID NO: 16542 - DNA, 100 bp, Homo sapiens
ggctggaacacctcgccaaagcagagaaatagagagaattcaaggatcaccagacatttgaagaaaacatcaaatatgaatgagatcaaaatgaacaatc

SEQ ID NO: 16543 - DNA, 88 bp, Homo sapiens
cagaccctggagcctcagttggaagcagccgatccagcctgcggagcctgtggggcaggaacttgcttgctagaaaacaaagtgcaag

SEQ ID NO: 16544 - DNA, 98 bp, Homo sapiens
aggaggaagaggcggtagggggtacgggggctggtcccagaagatggcggaggcgggggtaagaagacaagaggtttcttctcctagaaaagaaactt

SEQ ID NO: 16545 - DNA, 100 bp, Homo sapiens
cctcagcctcctgctgaagaggatgaagatgactttgatgatacccttgttgctattgacacctgctcccccccaaccaagcggcagcggcggagtcggg

SEQ ID NO: 16546 - DNA, 90 bp, Homo sapiens
gccggggaggcagcgcgggatcccagcctcaggcgtgcgcggacggtgtgcggactgctgagaaggaagaatttgaacatcaacagaaag

SEQ ID NO: 16547 - DNA, 83 bp, Homo sapiens
ggacaacagacctctgtttggggagacgtccgccaaggcgagtatagtgttggaaacaagcaccgtgatccctttgaagcccc

SEQ ID NO: 16548 - DNA, 100 bp, Homo sapiens
agccggccaaggatgaagcctcacttcaggttcccagtgcccccgacaagcccctgctggtgtctccatctcctgccaagcatcctccagtgcctcctcc

SEQ ID NO: 16549 - DNA, 100 bp, Homo sapiens
cctggaggcagcacgggcgaccccccggcgcagcagcatcatcaagatcgtcagtatttaaacagatcacatcatgcgtgagtacaagctagtggtcctt

SEQ ID NO: 16550 - DNA, 83 bp, Homo sapiens
ctccttcaagcatataagtggtcaaacaagaaatgagccgtcagactgctacagcattacctaccggtacctcgaagtgtcca

SEQ ID NO: 16551 - DNA, 85 bp, Homo sapiens
aagtttaatcagacctgctcacacttcagaatagagaagggcttccgagtggacctgccaatcaagtcggcccgctaccgtggcc

SEQ ID NO: 16552 - DNA, 82 bp, Homo sapiens
tgatggacttggagctgccgccgccgggactcccgtcccagcaggtgacttaagagattaaaattaatttggttgctgttgg

SEQ ID NO: 16553 - DNA, 75 bp, Homo sapiens
cctgcagaaggtctctggagacatcttcagcagatttcaggtatgctgctgaaagtgggaatcctctacattggt

SEQ ID NO: 16554 - DNA, 50 bp, Homo sapiens
aaccttcgatctcctgacgaaatcaggaaacccaggcccaacggcaggtg

SEQ ID NO: 16555 - DNA, 83 bp, Homo sapiens
gaacaccccgagatgagaggagaagagcccagcacaacgaaggtaccccctgtaccggctgggtggcccacaacttcgggtgt

SEQ ID NO: 16556 - DNA, 100 bp, Homo sapiens
agcaggctctgtggttcaggactcccgacttgacacgatattttttgctaagcaggaatttgctgcactgacaaaagaattaaatgcctgcagggaacaa

SEQ ID NO: 16557 - DNA, 75 bp, Homo sapiens
ggggcgtgctcacacagaagaagccgtttgcagcagattgctgttccccgcaatgatgaatgggcacggtttggc

SEQ ID NO: 16558 - DNA, 100 bp, Homo sapiens
cgggtccctggtctgggccatgtctggctgtgatgctcgggagggagactgttgttcccggagatgcggcgcgcagtttggtgccctggttgtcagatgt

SEQ ID NO: 16559 - DNA, 100 bp, Homo sapiens
gatcgattttaccttggataccctgctttggaatgccgggtctaagttgtagattttatcaacacaaatttcctgaggtggaagatgtagtgatggtgaa

SEQ ID NO: 16560 - DNA, 95 bp, Homo sapiens
aagatgcgccgcgccagctcctactcctccctcaactccctcatcgacaatgcagatcttcgtgaagactctgactggtaagaccatcaccctcg

SEQ ID NO: 16561 - DNA, 83 bp, Homo sapiens
gtggtctaccgacagccggggaccgcggccatgggagggctcgcaggcataatcaccagcaacacccgggacaataatacggg

SEQ ID NO: 16562 - DNA, 80 bp, Homo sapiens
ctacacttgagtatttcatcagagattgtactaatggtcacttgatgtgcgctggctgttttatccacctactagcagat

SEQ ID NO: 16563 - DNA, 100 bp, Homo sapiens
cagatggtccccgagttcgctgccagccccaagaaggagaccctcatccagctgatgcccttcttcgttttaattagacacttcagaattttgatcacct

SEQ ID NO: 16564 - DNA, 90 bp, Homo sapiens
ttcagccccctgtgcgccaccattgcagccaaagactaaatccggctacttgcagaaatataaagaaatacagcacatcttggacagcac

SEQ ID NO: 16565 - DNA, 99 bp, Homo sapiens
ccagggagggaaatatgtcatgtatcccatagctgtgagtggcgatcacgagaacaataagattgtagaaggcatgaaacaaaaaatgtggagtattga

SEQ ID NO: 16566 - DNA, 75 bp, Homo sapiens
aaaactgggcccaggtgtcatcgaccttactcggccagaagatgcagaggataatgtggatgcaaatgatcttaa

SEQ ID NO: 16567 - DNA, 100 bp, Homo sapiens
agcaagtttctgaagttggtggccgccatcaaagccgccttggctcagggctaatgcgccctgaaggcagagggcgggctctacgaggcggtgaatgagg

SEQ ID NO: 16568 - DNA, 100 bp, Homo sapiens
agtgaccgttggagtttaatgagaggaatatactcatcatcagtctatttagaagagggttggggcgtgagacacatcacatttgtggacaatgccaaga

SEQ ID NO: 16569 - DNA, 96 bp, Homo sapiens
gagttttttgatcttccaagtctcaataaaaacatccccgtcatcgagtatgagcagttcatcgcaggtctcagtgtgaagatcaaaatagcctgc

SEQ ID NO: 16570 - DNA, 88 bp, Homo sapiens
tgtacttctatatctacaagggggtccgcaagacaatgcagatcttcgtgaagactctgactggtaagaccatcaccctcgaggttga

SEQ ID NO: 16571 - DNA, 88 bp, Homo sapiens
cgggagatggtgcgtgcccagaacaagaagaagaagaagtctggaggcttccagtccatggatctttggatggattatatgaaagaag

SEQ ID NO: 16572 - DNA, 75 bp, Homo sapiens
gtcagtcagaggggcgagcaggagcgattccgtcgccaaacaggactgcaatgtgccgatcttagctgctgcctg

SEQ ID NO: 16573 - DNA, 82 bp, Homo sapiens
accagaatactacgttcagctaaattaagatgtggaagatgtgaaatttgtcatcaattatgactaccctaactcctcagag

SEQ ID NO: 16574 - DNA, 56 bp, Homo sapiens
gcccggccgcgcccgcggaaccagaccagtaggtaaccagttaggggccttggtac

SEQ ID NO: 16575 - DNA, 100 bp, Homo sapiens
cagacttcttagacttggaggaggtatgcctggactgggccaggtaagaagacaagaggtttcttctcctagaaaagaaacttcagcaaggagtcttggc

SEQ ID NO: 16576 - DNA, 100 bp, Homo sapiens
gcacctggtggatgagactatggatccttttgtagatcggattggattttgaagatgtaactgagtttctggaagaggtcattgaagccttgatattgga

SEQ ID NO: 16577 - DNA, 75 bp, Homo sapiens
aaggtcaaggctgaccaggactcggaggcaatgaaacgacttcaggctgggctgggcgagtatctcttcgaaagg

SEQ ID NO: 16578 - DNA, 99 bp, Homo sapiens
cctgtacccattcaccggcggctaccggcggcggcgcgcagcgtgtcaggcggagagacccgccgccagatgccacagtggagctatccttggacagca

SEQ ID NO: 16579 - DNA, 82 bp, Homo sapiens
cgggctgaagcgactgagtccgcgatggagcaggttacgggcaggacttgagtggcttcggacagggcttctcagaccccag

SEQ ID NO: 16580 - DNA, 119 bp, Homo sapiens
gtgggacgcggcacctacggtcacgtctacaaggcgaggcggaaagatgggtgagcacctgcggatctgtccccagggctacacctgctgcaccagcgagatggaggagaacctggcca

SEQ ID NO: 16581 - DNA, 75 bp, Homo sapiens
cacagcagtttggcgtcagtctgcaatactccagttagtgaaatggatcatacacacagaagatatggacatcaa

SEQ ID NO: 16582 - DNA, 120 bp, Homo sapiens
cacgtgggctacatcctgaccagtgtcctgggcctctttgctcatgagctgttctacagcatcctgctggtgggccagccggccgtacacttgaagcgtgacttcttcctggccaatgcg

SEQ ID NO: 16583 - DNA, 75 bp, Homo sapiens
cagccgatccagcctgcggagcctgtggggcagagatatagatcagctatcaggaagggacttctgccattcaaa

SEQ ID NO: 16584 - DNA, 84 bp, Homo sapiens
gccggactgggaagatggacgcaggttccccctaaaggactcaaaacgtctaatccaatggttaaaagctgttcagagggataa

SEQ ID NO: 16585 - DNA, 83 bp, Homo sapiens
attccctccgcacctccaggcggcattttgaaagcgaagcagaagccgtagaatcagcggcgagcctgttgaaagaacccaca

SEQ ID NO: 16586 - DNA, 101 bp, Homo sapiens
cagttactgctatgggaattctgaatacaattgatacacttcttagtgtagttgaagatcataaagaggctggcagtgatggtgaaagcataggaaactgc

SEQ ID NO: 16587 - DNA, 75 bp, Homo sapiens
tttcattgtgaaagatcttctcatgaatgatcgggagtggagtcaacatatcaatggagcaagtcacagtcgtcg

SEQ ID NO: 16588 - DNA, 82 bp, Homo sapiens
gccacttgcttgggatcctttatcctggtcatcttctatttccaaaattggcggcagtaagcacacaatgaatgatcacctg

SEQ ID NO: 16589 - DNA, 75 bp, Homo sapiens
aatagaagctgtggatgaatttgcttttctggaagctgccgggccgcaagtacagccctgggtacaacaccgagg

SEQ ID NO: 16590 - DNA, 75 bp, Homo sapiens
cattgaagcttggaattacatagctggaaaggatcttacagcccaagacctgcaaaatttacagagcgccctcgg

SEQ ID NO: 16591 - DNA, 99 bp, Homo sapiens
ctaagtctgaagatgggcattatgcaagaacagattatgcagatacactactgctgcagctcacaaacacctctgcatattacatgtacctcctcctgc

SEQ ID NO: 16592 - DNA, 83 bp, Homo sapiens
cctttagcaaagtcgccaaaagctggatgaacttgaaaagggctacttctacaagtccgaacagccagtccagcaaaatgaac

SEQ ID NO: 16593 - DNA, 93 bp, Homo sapiens
cttggagctgccgccgccgggactcccgtcccagcaggtgaaaggtgtagcagtcactcggcctacacccacagcatcgaccttgtgaaccca

SEQ ID NO: 16594 - DNA, 75 bp, Homo sapiens
agaagattactctgcaacagctaaaggccaaccaagccctcgagcagttattcccatgtcctgtataaccaatgg

SEQ ID NO: 16595 - DNA, 74 bp, Homo sapiens
cccaggggctgggctggcccccatgtgggaaggtcctgcggaaggtccctatgttaactacttgagacaaaaat

SEQ ID NO: 16596 - DNA, 101 bp, Homo sapiens
gccttggaagtcaacactgtcaattttgaagatgtaactgagtttctggaagaggtcattgaagccttgatattggatgaggaagttagaacatttccaga

SEQ ID NO: 16597 - DNA, 100 bp, Homo sapiens
attgaattctccaacaatggaggccagtggctggtctcagacaagttggatggcttgaggactggtactaaaaggaaacgtgactgggaggccattgcca

SEQ ID NO: 16598 - DNA, 76 bp, Homo sapiens
gctcaccaacagatgaagacagatgcaccaacgagaaaggcctaaagaatgtatttgacgaagcaatattggctgc

SEQ ID NO: 16599 - DNA, 100 bp, Homo sapiens
acagttatgcactttaccctttttaatattggccaatcatcaagacaagccagcagctcgctcagtacaagagggtatttgaagtataccatacaactgt

SEQ ID NO: 16600 - DNA, 75 bp, Homo sapiens
ttgtaacttttgatgatcatgatacagttgataaaattgttgggaagctatgcgaaattatttaaaagagcgagg

SEQ ID NO: 16601 - DNA, 98 bp, Homo sapiens
aggtttgctgagctggttggccctgtgatccctcaagactggtccacggagtgtatgaccacaaacagccatcaaggatgcagactcttcttatttta

SEQ ID NO: 16602 - DNA, 100 bp, Homo sapiens
atcgaccgcaacctccgtgaggacggcgagaaggcggcgcgcgaggtcaagctgctgctgctcggtggtgaagctgctgctgcggtacggagggaacccg

SEQ ID NO: 16603 - DNA, 74 bp, Homo sapiens
tttgcgccttgcagcactgctggaccaggctttccttaaagtttcccatgtctcaatggactcctgaatataac

SEQ ID NO: 16604 - DNA, 75 bp, Homo sapiens
agcagccaggagtcatgagcgacagcggcgagcagaactacggcgagcggaattggcagagggggtcgatttggg

SEQ ID NO: 16605 - DNA, 100 bp, Homo sapiens
agtcagtgtgacagtccatatgtaaccaaatattatggatcctatctgaaggaccaggcctcctcttcccacctgtccagcagcatgaaagcagcatgat

SEQ ID NO: 16606 - DNA, 75 bp, Homo sapiens
atcaagaagatcttcgagttcaaagagaccctcggaacgtagatataatctgtggtgatcacctgttggagcagt

SEQ ID NO: 16607 - DNA, 98 bp, Homo sapiens
gattcaagccaagctgaccaagaagccaaagaactggctaggcaaataagctttaaggacggcatcagaattaatgtaactacactgaaagatgatgg

SEQ ID NO: 16608 - DNA, 77 bp, Homo sapiens
tgcgcgcctgcgacctgcccgcctggagctttcagcagaggccaaggcagcattgcttgaatttgaagaaagggagc

SEQ ID NO: 16609 - DNA, 100 bp, Homo sapiens
gctggtgtgtgaacactgctggggtcagaagaacagacaaggacactgaaataacctgctctgagcgagtgagaacctatttctagcatggacaatccag

SEQ ID NO: 16610 - DNA, 90 bp, Homo sapiens
gatagaccggacagcggaggaaatcaagcaaggcaatgacaatgaaagaagagattttatcgacatcgaaagtaaatttgccctaaggac

SEQ ID NO: 16611 - DNA, 75 bp, Homo sapiens
gcgggagacgccagcgagctggtgattggagccctgcggaggtggaagcagggaaaggcctggagatgaggaagc

SEQ ID NO: 16612 - DNA, 75 bp, Homo sapiens
aagccttgcttcaaaccttcccatgtcagaggaaattcttcagattattaaggaatcccagcagcagcatggttt

SEQ ID NO: 16613 - DNA, 90 bp, Homo sapiens
gatgaaaggagacgtcagaacgtggcttatgagtacctttgtcatttggaagaagcgaagaggtttggtgcacctcgatttggaggaagt

SEQ ID NO: 16614 - DNA, 98 bp, Homo sapiens
aaaaaaagacttcaagaaaaccttagaagagaagcatttagagagcatcagcaatagtaagtaaggaggtctctgtaccatggctcgtacaaagcaga

SEQ ID NO: 16615 - DNA, 90 bp, Homo sapiens
ggcctcagctgggattcccgcgcccctcggacggccacgagactcgggtctccaattgagaaacatggcactgtttttcctgcactctac

SEQ ID NO: 16616 - DNA, 108 bp, Homo sapiens
gtcaggtcacccagcagagatcagcaatccttggctcactgaggaggtttgaaatcatgaggtccaatggattttgtttagcaaataccgaaacaatagttattgacc

SEQ ID NO: 16617 - DNA, 75 bp, Homo sapiens
gacaaaacgccaggcggatctcagaaggccagttcaaaggaatggatataaatttctctactgttctgcccgtgc

SEQ ID NO: 16618 - DNA, 74 bp, Homo sapiens
gtactcttattgattcacttaagaaaactcagcctgagaatgtttcttcactagttgaagaaggagaaaaacag

SEQ ID NO: 16619 - DNA, 51 bp, Homo sapiens
gagacttattcatgctgtcagaggagcctggagaaagttcttgtggaattc

SEQ ID NO: 16620 - DNA, 100 bp, Homo sapiens
aagatgtcagcctcccctgtcccgaacgcagtgtgtggaaaggtttggtgcacctcgatttggaggaagtagggcagggcccttatctggaaagaagttt

SEQ ID NO: 16621 - DNA, 90 bp, Homo sapiens
ttggaggcgagcgttgggtgtggaacatcattctcaccaccagtctcttctctgggcagcaaggcgaaccccatccctactcactggagc

SEQ ID NO: 16622 - DNA, 100 bp, Homo sapiens
cgggttattcgagtgaccgagaccgcggccgggaccgaggcgccatcagggcagtggccaagaacaccacccccggggcagccctgcctgcgggggagtg

SEQ ID NO: 16623 - DNA, 75 bp, Homo sapiens
ttttccaaacgtatggacagctttttatcctccgttgcagacatggttcaaagattttcacccgatggaagacta

SEQ ID NO: 16624 - DNA, 75 bp, Homo sapiens
cccaaagttgcatttcctcgtcgagcgcaacccaaggcttatcagtaacatcagaacaaataaatcctcatagta

SEQ ID NO: 16625 - DNA, 102 bp, Homo sapiens
catgcaaggctggcgcgtctccatggagatgagctttgatccaaaccttctccacaacaatggacataatgggtaccctaatggtacttcagcagcactgcg

SEQ ID NO: 16626 - DNA, 106 bp, Homo sapiens
gacgagttcaaggtgcgcctgcaggacctcagctcttgcatcacccaggggaaagccattgagacccagagcagcagttctgaagagatagtgcccagccctccct

SEQ ID NO: 16627 - DNA, 89 bp, Homo sapiens
gcagagccgcccagccctgccagctgcgccgggacggacctgccctcattcacccagaatgtgcacaggctggtcaacgacctgcgcta

SEQ ID NO: 16628 - DNA, 90 bp, Homo sapiens
ctgggattcgcgctgctgggcacccacggagcctccggggctggagctggtgactgccctcatgtgtgatttgcggcggccagcggcagg

SEQ ID NO: 16629 - DNA, 100 bp, Homo sapiens
tccagaaagcggcttatcgaacagagccgggagttcaagaagaacactccagagagcatgcttgagaagggaggataaaaactttcagaatgagcaaaac

SEQ ID NO: 16630 - DNA, 100 bp, Homo sapiens
tacaactacaaccagctggaaggcagattcaagcagctgcaagaacacggagagttcctggctctggatcttggagggaccaacttccgtgtgctttggg

SEQ ID NO: 16631 - DNA, 100 bp, Homo sapiens
gtttgggaccttgaacaaggcaaatatggttttggtgtcatggagaaactccagctgggcccagagattctgcagcgggaaaatccaaggcttatttatg

SEQ ID NO: 16632 - DNA, 95 bp, Homo sapiens
tcggttcctgctattccggcgcctccactccgtcccccgcgggtctgctctgtgtgccatggacgggatgctccagaccttgtatgattacttct

SEQ ID NO: 16633 - DNA, 100 bp, Homo sapiens
gaatatcaaagcccatatccacatgttgctagaggcaaacatcctgggtctcgccgccggccagcgctgtggcgcctcctgaccgtcgtctcctcactcc

SEQ ID NO: 16634 - DNA, 73 bp, Homo sapiens
gattgaagcccaggttgggggcgagaaagacctgcgccgggccaaggaggcatccgctcgacggcgggagatt

SEQ ID NO: 16635 - DNA, 100 bp, Homo sapiens
tgtcatgtcctacttcaatgggaaagaccacagcaagattctttcattcgtctcctcctagcctgggggaccaggctcgaactgaccctggacatcaaag

SEQ ID NO: 16636 - DNA, 100 bp, Homo sapiens
gacttggacaaggatgattttctgggcaggtgaagaagttcggaatccccagaaagctattcccattggaattgtgacgtctttgcttgtttgctttatg

SEQ ID NO: 16637 - DNA, 75 bp, Homo sapiens
caagagggtgttcgactgctagagccgagcgaagcaaccgggctgtgggtcggcccaaggggaagctgggcccgg

SEQ ID NO: 16638 - DNA, 75 bp, Homo sapiens
aggaggagactctccctggaaaacttcccttccctttcggtattacaagtggataaataatgtgcactgctctga

SEQ ID NO: 16639 - DNA, 74 bp, Homo sapiens
cttccagagcgtgaagatcaagatcgagatgccctgtatccaagcccaatatgggacaccagcaccgagtccgg

SEQ ID NO: 16640 - DNA, 96 bp, Homo sapiens
atcagagcgcggcggtcttcaagctctcagtgtcatggagaaactccagctgggcccagagattctgcagcgggaaaatccaaggcttatttatgc

SEQ ID NO: 16641 - DNA, 102 bp, Homo sapiens
agaccgtgaccgagagcgtgaccgagagcgcgaatatcgtcatcgttagaagaaccccatgcatcccagctcaaggtggtcagagctagaccttcttattct

SEQ ID NO: 16642 - DNA, 75 bp, Homo sapiens
tcagacgcagccgtagacaccagctccgaaatcaccaccaagatcctgcccggcctgtacatcggcaacttcaaa

SEQ ID NO: 16643 - DNA, 75 bp, Homo sapiens
ggggaaaccgcagcagccgtcggagcacttactggagtccaagatgctaatgcggaaggagagttttacatggaa

SEQ ID NO: 16644 - DNA, 97 bp, Homo sapiens
gacttctggccagatgtggaaccatatccgtggacctccatatgctcataagaacccacacaatggacaagtgaggacagttatgggatggatggga

SEQ ID NO: 16645 - DNA, 83 bp, Homo sapiens
ctggaccagaccatggccgcggccttcgggcgaccattgacgaggtggagacggacgtggtggagattgaggccaaactggac

SEQ ID NO: 16646 - DNA, 100 bp, Homo sapiens
ataaaatactatttttggagaaagaggagaaatatgctgtatttaaaaacccccaggtgtatgtggaatttgatgatcttgaatgggataaacgagagtg

SEQ ID NO: 16647 - DNA, 74 bp, Homo sapiens
ctcaccctcggggagcaacatggtaactctcaggagccttctccgcagttggcttcctcggtagcttccacacg

SEQ ID NO: 16648 - DNA, 50 bp, Homo sapiens
ccagagtccgcggccggggcgcgggagagcctggaaacctggccggcgtc

SEQ ID NO: 16649 - DNA, 75 bp, Homo sapiens
ccgacatgaagaaagacgtgcggatcctgctggtgggagaacgtactccaaagattcaggtttactcacgtcatc

SEQ ID NO: 16650 - DNA, 82 bp, Homo sapiens
aaaggaacggctgaaggccctacgggagaaaaccgggcgcaaggacaagatccagaagctttatgaacgaaagataaaggag

SEQ ID NO: 16651 - DNA, 100 bp, Homo sapiens
cacgtagaatatgagtggaatcttcgacaggaggagatagatgagagcgatgatgatctggatgacaaaatcattgccactgcggtttgccacaccgatg

SEQ ID NO: 16652 - DNA, 80 bp, Homo sapiens
gatggtcttgaaacacaaatggtttttgtcttcccaagggattgttgaagaaacttctgaagagggaaactctgtacctg

SEQ ID NO: 16653 - DNA, 100 bp, Homo sapiens
cactaccatttcgagggtgaagctcctcgacaccatggtggacacttttcttcagaagctggtcgccgccggcagctttagccacagtagaagacttcca

SEQ ID NO: 16654 - DNA, 56 bp, Homo sapiens
aacgccatccaggactccctgactcgatgtcccaggacatcaaagctctgcagaaa

SEQ ID NO: 16655 - DNA, 95 bp, Homo sapiens
aggttgatgaagctaatttattgacttggcaagggcttattgttcctggagaccctcacgcagggcttagagttctgtcggcggcagcagagggc

SEQ ID NO: 16656 - DNA, 80 bp, Homo sapiens
ctcggccgatgaagtgcagaggtttttttctgatatgagggaaggcaccattggagatatggctatcctgggtataacag

SEQ ID NO: 16657 - DNA, 96 bp, Homo sapiens
gacagcctgagctccatggaaagacaccattcgcttttcacccaagatgatttgatgtcttataaaactctgatgaaccatgatggctacacagac

SEQ ID NO: 16658 - DNA, 75 bp, Homo sapiens
tatgttctctaggccttttagaaaacatggtgtcagttgtacccgaggcgttctcagcagcagcaagtacctgtg

SEQ ID NO: 16659 - DNA, 100 bp, Homo sapiens
aaacaatttctcctgctctgcagcttctgttcagggaagcagctcgagagtgtcgtagaaagaagaaagaatatgtgaaatgtttagaaaacagagtggc

SEQ ID NO: 16660 - DNA, 51 bp, Homo sapiens
ccagtctgatccttttgttggcagttttgatacttatagaggactcccttc

SEQ ID NO: 16661 - DNA, 102 bp, Homo sapiens
gagtcgtctggtccccatacagagggacctctacaaggaggtgatgctggagaactataacagcattgtgtcattggtagagacggggtttcaccgtgttag

SEQ ID NO: 16662 - DNA, 80 bp, Homo sapiens
gcggaggcagaggtggaggcgctttgaaagatacgatgaatggattaaagcagataaaatagtaagacctgctgataaaa

SEQ ID NO: 16663 - DNA, 82 bp, Homo sapiens
gaaagatcttcagcttatagcaaaagttcgtgggagtaagggagaagttttgtacattttggatgctaccaacccacggcac

SEQ ID NO: 16664 - DNA, 101 bp, Homo sapiens
cctgcttctgccccagaaccggtcgaaaaccgtgtatgagggattcatctcggctcagaatcatgtcaaccctgccatggacttcacgcagactccacctg

SEQ ID NO: 16665 - DNA, 50 bp, Homo sapiens
cgaacccgagcacaccaaggagcgcgtcatccggccccacatcgcaactc

SEQ ID NO: 16666 - DNA, 105 bp, Homo sapiens
cggaaatcagggagctcttaacccagtttgaaacgtaactggttccctgaccagaaatgagccgtcagactgctacagcattacctaccggtacctcgaagtgtc

SEQ ID NO: 16667 - DNA, 100 bp, Homo sapiens
cggaggagcctggcggccaccccctcttcctcacttccctgtactctcatcgctctcggcctccgacacgccacaagtatatggttatgatgacttgcag

SEQ ID NO: 16668 - DNA, 98 bp, Homo sapiens
cctgtcccacctggcggccatcgtcatcctgctgctgaagatctggaagacgcgctcctgcgccgtctgcgggccaggcatcgacatccgcaacgact

SEQ ID NO: 16669 - DNA, 75 bp, Homo sapiens
cctcaacttcgtctggagaaaagtggtgacttattgatacactgaagagatggtgccttggcacccttgcctgga

SEQ ID NO: 16670 - DNA, 100 bp, Homo sapiens
tgccaatctgcaagcagttattaatgaagtttgtaggcacagaccgctgaatttgggacagagcgggatgccaccagcttgtccaaagggaagttccagg

SEQ ID NO: 16671 - DNA, 121 bp, Homo sapiens
cgtccttctccactttcgccagcccgtgccgcgagcgcggcctgcaggaggttgtgaccgagattcccgacgagagagactgaggggaagagaggaaggaggggcgggctcctggcaaggc

SEQ ID NO: 16672 - DNA, 90 bp, Homo sapiens
atcttccctttgactgtgtcctgctgctgctgctgctactacttacaacttgacaaaagtaagctgaagccaggaacaagagttgctttg

SEQ ID NO: 16673 - DNA, 50 bp, Homo sapiens
atcccctcaacaacttttcagtggcaaattctgagcagagcactggttca

SEQ ID NO: 16674 - DNA, 83 bp, Homo sapiens
ccacgagctagtgttggagtgcaccaagaaatgagtatggtgtttgcgaaaacttgcggaagctggagatcacaggcgtgtct

SEQ ID NO: 16675 - DNA, 105 bp, Homo sapiens
cgggatttgggtcgcagttcttgtttgtggatcgctgtgatcgtcacttggtatcatgatattagctggtttgacatcaagtcatttgtgagtcatcagatcttc

SEQ ID NO: 16676 - DNA, 100 bp, Homo sapiens
tagcccctatcactgactttgaatattcccagcaatacgtttggtttaatattggcagtgtggacacctttgaacggaatctggaaactttacagcagga

SEQ ID NO: 16677 - DNA, 75 bp, Homo sapiens
cccatttttattgaaagatgtattgagtacattgaagccacagggtgttgaaagcagcaggggcctagaagacat

SEQ ID NO: 16678 - DNA, 102 bp, Homo sapiens
aacgtttggattgcaaagtcatcagccggtgccaaaggaaatggggggctattttataatcaatggcattgaaaaagtcatccgaatgttgattatgcctcg

SEQ ID NO: 16679 - DNA, 100 bp, Homo sapiens
tttaaagcccgagtggattcatttttctacatattaggatataaccctgagacaagtgaatcagacgtcccaatagatgtggagacggtcacatcaacgc

SEQ ID NO: 16680 - DNA, 100 bp, Homo sapiens
atgagaagaggtgttggagtgttgactttaatttgatggatcctaaactcttggcttcaggttctgatgatgcaaaaggcctggtactgtggcgctccgt

SEQ ID NO: 16681 - DNA, 100 bp, Homo sapiens
gcgggggctgcaggctgagtatgagacgcaagtcaaagggtaccgtgagggttttctctggaagcgtggccgggacaacgggcagtttttgagccggaag

SEQ ID NO: 16682 - DNA, 75 bp, Homo sapiens
aatgaacacacacattccagagaactgtgaatacagattctgttcatcttgctctgaaattaaataattctgaac

SEQ ID NO: 16683 - DNA, 88 bp, Homo sapiens
caaatcttgtttttaaggagattgagaagaaacttgaagaggatggagatgaagatgaggaagctgagtcagctacgggcaagcgggc

SEQ ID NO: 16684 - DNA, 75 bp, Homo sapiens
tccactgccactacagggaagtgcatcacatgtcaggaattgattcggaaggccatgcagctaactttgtagaaa

SEQ ID NO: 16685 - DNA, 50 bp, Homo sapiens
gcctcctgggtagctgggactacaggaaaccacccctactcctaatcccc

SEQ ID NO: 16686 - DNA, 90 bp, Homo sapiens
ggcagagggcacctgagcggctggagagcctgttggagaaacacaaagagggaatgtcactagtgcatctgggtctcagatggcaagcgg

SEQ ID NO: 16687 - DNA, 83 bp, Homo sapiens
cttcaaccacctcgagcggctgctggacgaaggatttttagactctgaggagcagttggagctaatccacattatggaaatgg

SEQ ID NO: 16688 - DNA, 50 bp, Homo sapiens
gaacctcacctgcagtgtctctgagcttctggcaagtatgaggcaaggat

SEQ ID NO: 16689 - DNA, 82 bp, Homo sapiens
ggaacaacgtcggcgagcgggcatgatgccttcttctgtagagtgggcgctttgcagaatacgtgttgaatgaaatcactga

SEQ ID NO: 16690 - DNA, 75 bp, Homo sapiens
acactggaagatgggaagaaagaagcagctgccaggttacacgcatggggagatactctggaggaagcatttgag

SEQ ID NO: 16691 - DNA, 83 bp, Homo sapiens
ctttggtccccagcgcagtgaagtggtgagcctttttgtcactggatagagactcttaatggaacaatgattctgaaaagaac

SEQ ID NO: 16692 - DNA, 100 bp, Homo sapiens
cagaactgattagccgtctggagcaaagacaggagccctggaatgtgaagagacatgagaccatagccaaacccccaggatcttctatgtctctcatgat

SEQ ID NO: 16693 - DNA, 83 bp, Homo sapiens
ccgccgccgccgttggctggagctacccgtacagtgaggacgcccgccagggtgagcagtacatgaacacccggtgcccagcc

SEQ ID NO: 16694 - DNA, 100 bp, Homo sapiens
tggtggactggctgctggctcagtttgaataccagcaggctcagctggaggctgagatcgaaaacctctcatggaaagtggagcgtgcagacagctatga

SEQ ID NO: 16695 - DNA, 75 bp, Homo sapiens
tgccacctccaaatgaggaagtgccacctcctctcccacctgaggaaccccagacagggtctccctctgttgccc

SEQ ID NO: 16696 - DNA, 100 bp, Homo sapiens
cgcgctgctgggcacccacggagcctccggggctgtgttctaagaacggaagcatctgggctggatggaatttagcatcaagcagagtcccctttctgtt

SEQ ID NO: 16697 - DNA, 98 bp, Homo sapiens
gcggtggagatcgcaggtcgctcaggtgaaaaattagacgatttcaagaattggagctgaatctgatgttaagtaatggcaacaggtgacttaaaaag

SEQ ID NO: 16698 - DNA, 101 bp, Homo sapiens
gcggtatttgtgagaggagtcggcgtttgaagaggtggaactcctagggcttttttgagagtggtactgtccaagaagctggaacattattatccagcaag

SEQ ID NO: 16699 - DNA, 73 bp, Homo sapiens
gagggcacccaacttcagcctggagcggacactggcagccgagatggcggccgcaaactgacacctcagggac

SEQ ID NO: 16700 - DNA, 83 bp, Homo sapiens
atcaactcggcgccttgggaaccgctcgagcctaccaggacagccagtagaggtgacttcatgttttctgcggatcgtttggt

SEQ ID NO: 16701 - DNA, 100 bp, Homo sapiens
cgcggaccccgccatcgctgcctcggaccccgccaccaagaattaaacaaccaccatgtcgagcaaaaaggcaaagaccaagaccaccaagaagcgccct

SEQ ID NO: 16702 - DNA, 98 bp, Homo sapiens
agaaatccgcagaagcttattaaagttaaggtgctgtaccctgtgtgccatgtgcgtaacctgatgctgtggagtgcagtgtacctgccctgcccatc

SEQ ID NO: 16703 - DNA, 54 bp, Homo sapiens
gcggcggcgggtccctgagctggaagccgtctacatggggaggacagagaagcg

SEQ ID NO: 16704 - DNA, 100 bp, Homo sapiens
cacggattatactggaaagtatgcaccagctgtcatcgtttgtcagaagaaagcagctggctcagaaaacaggttcttctgtgtggcagttcagaatgat

SEQ ID NO: 16705 - DNA, 117 bp, Homo sapiens
ctgcacctaaattctctgttccagaatctgtcatgaaggaaactctatatccaaaatatgagtgcaaacggttagagcaggagcttcatcatgtgaaagagcagaaccagacttcag

SEQ ID NO: 16706 - DNA, 86 bp, Homo sapiens
atcatgtctgcgagccaggattcccggggcctagaagacagttcccaggaggccgaggacgaggcatcggggctggggctatctga

SEQ ID NO: 16707 - DNA, 75 bp, Homo sapiens
agggagatgacccagaggatgccaaggcaaaggttgaagaagaggatgaacttgaatctggagaccaagaggatg

SEQ ID NO: 16708 - DNA, 74 bp, Homo sapiens
ttgttcctggaacgccctctttttaaaaaagtgtgacccagagaccagtagcatcagcatcacctgagacctgt

SEQ ID NO: 16709 - DNA, 100 bp, Homo sapiens
tggtcctccaaacgtctgagggttcaggttcttcggaatgctggagaagaagtgactctaacagtgtcatttttaaaaagagcacctgctttcctcaaac

SEQ ID NO: 16710 - DNA, 100 bp, Homo sapiens
gtcgtctcagcagtgctcgggcgcaggtgagtgtggctgtgaagtgcctgaagcccgatgtcctgagccagccagaagccatggacgacttcatccggga

SEQ ID NO: 16711 - DNA, 83 bp, Homo sapiens
gtcctggccaacctgctgctggaggaggataacaagttttgtgcagattgccagtctaaagttgttgacctcctgtactggag

SEQ ID NO: 16712 - DNA, 75 bp, Homo sapiens
ctgaggcctggagaggttaaagagacccgttcagagtcctacagtggcagaaagaagatgctgatatgctacaac

SEQ ID NO: 16713 - DNA, 90 bp, Homo sapiens
ccagccctttgtgttttaattcatcacacagatgtaaatgaaggggatgattatgaagtcattcctaacagtaatttctatgtatccaga

SEQ ID NO: 16714 - DNA, 100 bp, Homo sapiens
attttcacctcgcgtcgcgcccgggaggaaggaacgaggcaaggagctaaagcagcgtgcgttcagccctggggtttgaccccaggactcccctacccac

SEQ ID NO: 16715 - DNA, 100 bp, Homo sapiens
gcagccccggcgtccggagttctggcctgggcctcaccctgctcatcttttactactccttcgccatcgtgggcatggagttcttctgcgggatcgtctt

SEQ ID NO: 16716 - DNA, 98 bp, Homo sapiens
aaccgccagaaaggagtcggaagaggtctcacgaggctgtcatcaccgccatgcccaagaataaagcatcccagccatcactcttccacctgctcctt

SEQ ID NO: 16717 - DNA, 82 bp, Homo sapiens
cgacgagcgctgcactaacgcaggatccggctgccgaaggtcctcgccagacctgcctagagctggaacgttacctccagag

SEQ ID NO: 16718 - DNA, 95 bp, Homo sapiens
cgggaaatacttcctgtttggcttcaacattgtcttctggaatctagatttccaagcactagaagaaactacagaatatgacggtggctatacca

SEQ ID NO: 16719 - DNA, 78 bp, Homo sapiens
gttgatatcggtggtaacgacggcctcagcaggcggggaagatgaaaggggccaattcctgtccccccagcagcatgg

SEQ ID NO: 16720 - DNA, 100 bp, Homo sapiens
agggcctcccaggcccagagaagctgccgggctccttgcggaaggggattccacggaccaagtctgtagggggggccctcagcctcttggccttgaacgg

SEQ ID NO: 16721 - DNA, 75 bp, Homo sapiens
gacgaaggggccgacagcttccacagcttccaccaaagggaacgttggatagaaatcaccatccatcttcaagaa

SEQ ID NO: 16722 - DNA, 90 bp, Homo sapiens
ggccacgcgcctcttccgcgccctctcaggtgaaaggaaagcaagccaggatggatatttacgacactcaaaccttgggggttgtggtct

SEQ ID NO: 16723 - DNA, 90 bp, Homo sapiens
gccttccaagctctactgtgacttcagagacactgccaagcagccttagccctagtgtagaggtgcgtgctctggaggaggccaacgccg

SEQ ID NO: 16724 - DNA, 98 bp, Homo sapiens
gagaattataggaacctggtctccctggccattcgttcctggttaactcggaaacacatccagaggctgcatgcagctgccacagtcatcaagcgtgc

SEQ ID NO: 16725 - DNA, 100 bp, Homo sapiens
gggatgcagcagagaggagcagctggaagccgtggctgcgctctcttccctctgctgggcgtcctgttcttccagggacttcctcgttctgcccatcttc

SEQ ID NO: 16726 - DNA, 99 bp, Homo sapiens
gaggacattacgttttcaacgttggtcgagagagtcattcagcagttgggctctgtacacatatgaagatggctccgatgacctcaagcttgcagcatc

SEQ ID NO: 16727 - DNA, 100 bp, Homo sapiens
acctgctttctctcgatgaggataacatccctccagaagatgcgtgcctgccagtgtagagccggtggagcagctgggctcggcgctgaggtttcgccct

SEQ ID NO: 16728 - DNA, 75 bp, Homo sapiens
caaagttgtgtcagtgaatacaaacagaacccagtgacttgattgtaaaaatttacagagcggaatcatatgctg

SEQ ID NO: 16729 - DNA, 150 bp, Homo sapiens
agctgttgctgcccaaaaaccacatagcaacaccagaaaactgggaagcattttgaatgaatttggacatcacaagcttttgcgagaattgaagcaccctaatgtgattgcattgcagaaggtgttcctttctcacagtgacaggaaggt

SEQ ID NO: 16730 - DNA, 89 bp, Homo sapiens
ggatgttttaaaaaaactagaaatgtgttcagaaattaaaggtccacagaaggagaccccttatccctctggacagaatgcaggtccaa

SEQ ID NO: 16731 - DNA, 98 bp, Homo sapiens
agcgcgagagcttcgagcggactcaggttttgcacactagggaccaagaagccctcggggacactgctgagaaaagactgccgaagggaagaccagcg

SEQ ID NO: 16732 - DNA, 100 bp, Homo sapiens
ttcgtgtccccactgctttctggaattatgtctggaattttattcttcctggttcgtgcattcatcctccataaggtgactctgacatcattagaagcat

SEQ ID NO: 16733 - DNA, 83 bp, Homo sapiens
ccttcattgctctgtgtgccaccgaattaaatgtgagggagtctgacgtaagagtttgtgatgagtcatcatgtaaatatgga

SEQ ID NO: 16734 - DNA, 82 bp, Homo sapiens
agcgacaagccgctggcagccgcggatctcaccgccgctcaggcgggtccatatggaatatttgctggtagggatgcctcca

SEQ ID NO: 16735 - DNA, 75 bp, Homo sapiens
ccatcgtggattccaagacatccctgctgagagagccaaggtagagcgggaaaaggccattcttttggccaacct

SEQ ID NO: 16736 - DNA, 83 bp, Homo sapiens
cgcctgcgaccccagtcggtgctccggggaggtcacctgacgaggaggtcagaccgggaagctgatgtatgtgatgcacaact

SEQ ID NO: 16737 - DNA, 100 bp, Homo sapiens
aacaaggagaagaaccatggagactggaggaagaattcccaagccagagctttccagggacacttagtcggtctggatgaaccagcttcgggagctgggc

SEQ ID NO: 16738 - DNA, 139 bp, Homo sapiens
tttggatctacgagatgacagtctgctaaaaaatttagatataagatgtataagaagtcttaacgctcctgggcaacgtgctggtctgtgtgctggcccatcactttggcaaagaattcaccccaccagtgcaggctgc

SEQ ID NO: 16739 - DNA, 100 bp, Homo sapiens
ctttcttctggcatcattaacggaccttttaccatgaatagttctactccttctacaggtgacaaacagcatgtttggtgcttcaagaaagaagtttgta

SEQ ID NO: 16740 - DNA, 100 bp, Homo sapiens
gggggcggctctgcgctggccgggggcgcgggcggcggcgccggcaggaagagtcgggtttctccattcaaggacatgattttatgcttctctgaagagg

SEQ ID NO: 16741 - DNA, 101 bp, Homo sapiens
tggctgtgatgctcgggagggagactgttgttcccggagatgcggcgcgcaggaagaggagcaggacttggatggtgagaaggggccatcatcggaagggc

SEQ ID NO: 16742 - DNA, 98 bp, Homo sapiens
ttcgccaaagagcttttcctaggcaaaatcaagaagagagctgtagtacacatggatgaacgacgagaagaacaaattgtacagttactgaattctgt

SEQ ID NO: 16743 - DNA, 75 bp, Homo sapiens
ctggtttcacactccaccaagcatcccattacagatagaagaggtaatcctcccacttcttaaaagtgatcttta

SEQ ID NO: 16744 - DNA, 74 bp, Homo sapiens
aaaaagtatcgtcgagaagcctatcatcgcatggtggggagttatatttcagtgacgtctatacgagccttgaa

SEQ ID NO: 16745 - DNA, 75 bp, Homo sapiens
cacggaagccaagctggccgagaaccagacgtcctgggtcctctccagcatggcagccctctactggagggtgaa

SEQ ID NO: 16746 - DNA, 89 bp, Homo sapiens
tgcaggtattgggagatccacagctaagacgccaggacccactggaagcctagaaatggtgccaatgggtcatgtttggttagaaggtg

SEQ ID NO: 16747 - DNA, 100 bp, Homo sapiens
ttcctgcctccagctgccaggggggacagccagccagcagcaggaggggccctccagaatttccacagcatacacctggacctgttcccaacagtttcag

SEQ ID NO: 16748 - DNA, 89 bp, Homo sapiens
tatcagcagatcaaaggataaacttgaccaggtttccagtgaaataacatctgcaaacatagagaattctgggcttccacacaactcca

SEQ ID NO: 16749 - DNA, 100 bp, Homo sapiens
ctttggacagtccaatgtcaacattgcccagcaagtgacctgcctgaccagtgcacgcccaacccctgcgataggaaggggacccaagcctgccaggacc

SEQ ID NO: 16750 - DNA, 82 bp, Homo sapiens
gtttgccaatgttggagccgtctgcaaagtgtccccggcaagaaggaagtcctgagttgaggcttgcgggatcctttccgga

SEQ ID NO: 16751 - DNA, 50 bp, Homo sapiens
ctcatggaggctgagcatttattcagacccaacatgagtgaagtttcctg

SEQ ID NO: 16752 - DNA, 100 bp, Homo sapiens
atgctgcttagattaaatgcgttgttgataaatttgcgcctcattttggtaagcggaaaaacaaaagagttcctgttttctcctaacgattctgcttctg

SEQ ID NO: 16753 - DNA, 90 bp, Homo sapiens
gaactggcaagaaagctaagcattgatattcataggacaacacagcgagaccttcaccagatgcaggcccctcactttcccagtgttcag

SEQ ID NO: 16754 - DNA, 98 bp, Homo sapiens
cttcccacttaacagacccattttggctttctatcactcaaaggaccctgatgcttggtgtgacctgagtaaatttgacctccctgaggaaccatctg

SEQ ID NO: 16755 - DNA, 82 bp, Homo sapiens
agtgctccctgcaggccgcagccatccttggtccacgaatcttacaagcacctgaagtcactgcagtccaagctctgaagtg

SEQ ID NO: 16756 - DNA, 113 bp, Homo sapiens
gggagtcggggtggtggcttctcggaaccgagccccgacaggctatgacgtagatccagtttatggaaaaggaaaacttggagaaatccagggacttatcttgggaatgttag

SEQ ID NO: 16757 - DNA, 98 bp, Homo sapiens
tgatagaatgaagaccacaataaaagagacctctacttagctcagcaattcttaccttatttggatcatacagcagatgtccagtgagtatagcggga

SEQ ID NO: 16758 - DNA, 73 bp, Homo sapiens
gtttgtccacggagaaagcctgcagctaagggagaacattgagcaattcttcaccaaatttgtagatgagggg

SEQ ID NO: 16759 - DNA, 100 bp, Homo sapiens
agatgattcagccttctgcatctggatctcttgttggaagagaaaatgaggttgtctttcttctggggaattggaatgaatttctatatggaaatagcaa

SEQ ID NO: 16760 - DNA, 51 bp, Homo sapiens
tactaaaaatggacgcctggcaaccaagaagggatgagaccatgcagcctg

SEQ ID NO: 16761 - DNA, 87 bp, Homo sapiens
tctggagcaaataaaagagccctgcaatttgaagatacatgagacagcagccaaacccccaggagtctaccatggctcaagaatctc

SEQ ID NO: 16762 - DNA, 100 bp, Homo sapiens
ctgcttgcagaaaatacctcaggaaaggccaacatcagcagaactattaaggccctggtacctgacagtgtaaagaaggagctcctacaaagaataagaa

SEQ ID NO: 16763 - DNA, 98 bp, Homo sapiens
acggagccaggggcccgagggcggggaccggcggcgctggaggagcgaggcagctgtactaggactgggaacgggtcttgagagctgatgacaataac

SEQ ID NO: 16764 - DNA, 75 bp, Homo sapiens
gggagggagccgcaggcgcagacccacccgccatgaagccccccgcaggactgcgtgatctttgaggaagtggct

SEQ ID NO: 16765 - DNA, 82 bp, Homo sapiens
tgattccattactgcccaaactcttcaagttttagaaaagcataaagctgatgttgtaaagccttatgattctgcagatgac

SEQ ID NO: 16766 - DNA, 100 bp, Homo sapiens
tgctgacgacctgctacaacagaagtctggtgagctgtaccttctttctggcagtgaatggtctgtattcctctagtgatgatgtgatcgaattaactcc

SEQ ID NO: 16767 - DNA, 50 bp, Homo sapiens
actatggcccatcactcttcctcctagagatcctgaaggagctagacgag

SEQ ID NO: 16768 - DNA, 100 bp, Homo sapiens
acaaccctacctgaaagccatctcaagactcctcagatgccaccaacaaccccatccagcagttccttcaccaagctccgacagttagttaatatgtgca

SEQ ID NO: 16769 - DNA, 100 bp, Homo sapiens
ctatgtgggaatgtgcttctcttctttttgctggcacattgaggatcactggagttattccatcaactacttgcactgacgtgaacgatcaagagagagg

SEQ ID NO: 16770 - DNA, 89 bp, Homo sapiens
cttagtgtagttgaagatcataaagagggcacctcctctgaatttgaagtggtcactcctgaggagcagaattcaccagagagcagcag

SEQ ID NO: 16771 - DNA, 82 bp, Homo sapiens
acacagggcatggcgacagtgacccccgccactgctggggcttcccggacaggattgacgatctctgcgatatgataccagc

SEQ ID NO: 16772 - DNA, 74 bp, Homo sapiens
agacactgaacgaggagccagtgagtgctcagagcaccatatggagcccaggaaaagaaggggaggagagtgag

SEQ ID NO: 16773 - DNA, 76 bp, Homo sapiens
tcccccaaagatgagatttacctgtgagatgtttcatcccaacagtggagtccaacttgcctggaccagcttaatg

SEQ ID NO: 16774 - DNA, 100 bp, Homo sapiens
cgctggccctctgtctgcctgtgtccctgaccatggctccctgcagtaccctttaacggtagccctaatggagaaccttgtggaaagacttgtttggaag

SEQ ID NO: 16775 - DNA, 50 bp, Homo sapiens
cagaaagagtcaacagcagtggcaacagagatggatttataaaagctatt

SEQ ID NO: 16776 - DNA, 100 bp, Homo sapiens
cagaacctagaccagaagcaaagactatgcccaattcttcaactcctaccagccagatcaacacaattgatactatgaaggaggagattttgaaaaagct

SEQ ID NO: 16777 - DNA, 100 bp, Homo sapiens
atccctacaaacacattgcttttggaacagaagttcaattttgtggggaaattgcttggaccaagaggaaactccttgaagaggctacaggaagaaacag

SEQ ID NO: 16778 - DNA, 82 bp, Homo sapiens
ggatacagttcatgacaatgactttgagccctaccttactggacagtcaaatcaggtgacttaagagattaaaattaatttg

SEQ ID NO: 16779 - DNA, 50 bp, Homo sapiens
agaaaattaagcttcagatatggagcccagcagccggggccgccctatta

SEQ ID NO: 16780 - DNA, 81 bp, Homo sapiens
cagctgcagtctgacgagagggggtttggaaatcccttgtctccaggttgctgggattgacttcttgctcaattgaaacac

SEQ ID NO: 16781 - DNA, 97 bp, Homo sapiens
ggtgtctctcatcctgactggggatccagagtaggagggagcctttggtggggtcccggctggccgacttccatgccaattgtcgagcctcctacca

SEQ ID NO: 16782 - DNA, 100 bp, Homo sapiens
caccactgcacaatttaacttacgtcagaattatcatctagtgatgagagtgagaattttcccaaaccatgttcacaattagaagacttcaaggtttgta

SEQ ID NO: 16783 - DNA, 83 bp, Homo sapiens
caaatttttggagggtatctcagatcacgcgggttagtcagcaacataaaatcaacctaatgacagcagacaacttatccatc

SEQ ID NO: 16784 - DNA, 100 bp, Homo sapiens
ctttgaggactttgtctctgatgagctgagaaacaaagccacccagccaatgaaggagcgagcccagggcgtggtgctgaaagtgctcacaaacttcaag

SEQ ID NO: 16785 - DNA, 100 bp, Homo sapiens
tactcctttttacctttggttcacaacatcatcaaatgggtcttgctctgttgcccacgctggagtgcagcggcgtgatctctgctcactgcaacctcca

SEQ ID NO: 16786 - DNA, 100 bp, Homo sapiens
atatgaaggggaaaaatttcaacttctatttaaatttagtagtcgatatccttttgactctcctcagagccagccccagtgcctgctgagccgtttgaca

SEQ ID NO: 16787 - DNA, 136 bp, Homo sapiens
gggtccagtcctgctccttctgcatggaggaggtcattctgccctttcttgggctgtgttcacgcttcttaatgaagaggataactcagaatcatcggctatagagcagccacctacttcaaacccagcaccgcag

SEQ ID NO: 16788 - DNA, 75 bp, Homo sapiens
tgtctgccaccgtcatcttgcactcaggcctaactccacccaccactcctcctcataaagccaaccaagataacc

SEQ ID NO: 16789 - DNA, 100 bp, Homo sapiens
ccgagatgtctcgctccgtggccttagctgtgctcgcgctactctctctttctggcctggaggctatccagcgtgctggcaaaaccccgactctgggtgg

SEQ ID NO: 16790 - DNA, 82 bp, Homo sapiens
agaaaatcagaagctggatttcagtactggaaacttcaatgtgttagctgttaggtgaaatgacaatggatgctctgttggc

SEQ ID NO: 16791 - DNA, 100 bp, Homo sapiens
tcaactgggactcatgtccctgcagctacaggagagtaatcaagtcagaggattatatgacttttatctgcctagagaagaactatggatctacaacatg

SEQ ID NO: 16792 - DNA, 75 bp, Homo sapiens
cctgacgccatctcacgcctgctggagcgaaaccttgaaagccatttgatgtcccctgctgagattccaggccag

SEQ ID NO: 16793 - DNA, 109 bp, Homo sapiens
aaaccttggccgaaagggttgtagacatggcggccatcagggtacaggacacaatatccaatcctaggcctcctatatgatgactacgaatatataccaccaggtagtg

SEQ ID NO: 16794 - DNA, 96 bp, Homo sapiens
ccctgagcctcctgcaacacctgcggcctcactgggacccccaggaggtgaccctgcaggccgagacagcggctaacaggatatgtaaggttcttg

SEQ ID NO: 16795 - DNA, 75 bp, Homo sapiens
ccgggcacacccggctccccggacgcctcgctgtgttggggtggaagaggaggaggcgcccgacatcgacatata

SEQ ID NO: 16796 - DNA, 75 bp, Homo sapiens
ctgggaaatagtaaccctgccaaatacatcagcttgtaggagacagagtccacaggttcatgatggcgctgctgg

SEQ ID NO: 16797 - DNA, 99 bp, Homo sapiens
cgtgtgcggggaggtaacaagaaataccgtgccctgaggttggacgtggggaatttctcctggggctcagagtccctcaggcagcccctccacagggcc

SEQ ID NO: 16798 - DNA, 74 bp, Homo sapiens
atggatgttcttcttcgagtatttgtagaagggacagagcgggatgccaccagcttgtccaaagggaagttcca

SEQ ID NO: 16799 - DNA, 82 bp, Homo sapiens
gcctgaagccagtgggctggggactcacggccgggacactcagggcaggttaatttggagtggcccctggagtcagtttcct

SEQ ID NO: 16800 - DNA, 83 bp, Homo sapiens
ggaagcctgggaagcatcacataatacctggagtagaacagaaaaattattatgtctgtgttcccttgggactcattggaaat

SEQ ID NO: 16801 - DNA, 97 bp, Homo sapiens
cggcccctgcgccggcctcggccaccgagatcctgctgacgccggctaggcaaaatgatgcttcaacacccaggccaggtctctgcctcggaagtga

SEQ ID NO: 16802 - DNA, 101 bp, Homo sapiens
gttgaagaagtcaaagaccagtttgcaacccatgaaatacagatgtcatcatgaagaggaaaagaggagggagccctgctgtaacacttcttattagtgaa

SEQ ID NO: 16803 - DNA, 98 bp, Homo sapiens
gatgccagcatgatgcagatatctcagggtatgatcggccctccttggcaccaaagctaccattccaggtagctacagcaagctgggtagcaggcaga

SEQ ID NO: 16804 - DNA, 99 bp, Homo sapiens
cgaacacctgccgcggtcctcccgccggcgctggatgaggtttatataactttccaagacaaggaagttgtgcaaagcctcacagctactaagaggctg

SEQ ID NO: 16805 - DNA, 82 bp, Homo sapiens
gccgatccagcctgcggagcctgtggggcagaaaggaaggaggagacctgaacagtacatccggagaatccagcaaagcata

SEQ ID NO: 16806 - DNA, 100 bp, Homo sapiens
aaactttcagctttggctttgctctctcttctgccatctgataataggtcttctttgatgtgaggattggagacaaagatgttggcagaattgtgattgg

SEQ ID NO: 16807 - DNA, 82 bp, Homo sapiens
agctgcagtcggcactgctactgcgaagacagctggcagtgtggacgaatgtggaacctcgctctgtggctgtgttcccttg

SEQ ID NO: 16808 - DNA, 99 bp, Homo sapiens
caccttcagtatctcagtcctccagtgtttggatattcaggtggagccgccaccaaaatgcagattttcgtgaaaacccttacggggaagaccatcacc

SEQ ID NO: 16809 - DNA, 100 bp, Homo sapiens
gccgtggacacagacggggtggagcccatggaatcggtcctggaggacagggaaaacagaaatggtttatgaaacagaacacagaagaatcaactattgg

SEQ ID NO: 16810 - DNA, 75 bp, Homo sapiens
ctcagacgcggtggagccgccggagtctgagaaggcagcacgctggctcttctcctgaacttcctcgcctgcctg

SEQ ID NO: 16811 - DNA, 100 bp, Homo sapiens
agacagagctgagggagcaagaggtgtcggaggtctcatctttgaactactgccggagcttctgccagatcactcagtccctggtgtttctgctgttggc

SEQ ID NO: 16812 - DNA, 100 bp, Homo sapiens
atttttgaatacgcctaccgatgctctggatcaatttgaaagtattgggaaagggtcgttgtggtgcatagacccagagtatagacaaaatctaattcag

SEQ ID NO: 16813 - DNA, 102 bp, Homo sapiens
tgttaaggattccaagtaactcttatttggttattcagcttctcaaggctggaaaagcgaaggaagtttcctacaatgcactagcctcacacataatctcag

SEQ ID NO: 16814 - DNA, 126 bp, Homo sapiens
ccgagatgtctcgctccgtggccttagctgtgctcgcgctactctctctttctggcctggaggctatccagcaggctgggaggcggcagaatgcagccagaggagggcacaggctggctgctggag

SEQ ID NO: 16815 - DNA, 90 bp, Homo sapiens
cacccttccagatgatttttgaggtggctgagatctgcgttgaaatggagctgcgggacgagattctgcccagagcccagaacatccaga

SEQ ID NO: 16816 - DNA, 98 bp, Homo sapiens
tgttggcgctgaggacccggacagccggtgctggagaatctggtaaaagcaccattgtgaagcagatgaggatcctgcatgttaatgggtttaatgga

SEQ ID NO: 16817 - DNA, 75 bp, Homo sapiens
ccggagctgcctggaggcggccgcactcggatattgaaatggattccaggcgtgtgcctcgagacaagctggcct

SEQ ID NO: 16818 - DNA, 75 bp, Homo sapiens
acaatcacctaatgcccacaagagtcattcttatagaagagcatcagaggaagataaaaaagaatcctcaatgtc

SEQ ID NO: 16819 - DNA, 50 bp, Homo sapiens
gttgggcccagcgtccctcccggaacgtgccctctggtggtcagaagatg

SEQ ID NO: 16820 - DNA, 76 bp, Homo sapiens
cctggacatggaggagaaggtccgcttcaaggctttgttcgcgggggtcacagctctcatggctgcagctagcgtg

SEQ ID NO: 16821 - DNA, 100 bp, Homo sapiens
ttgatcccaaaccgccgccgttgactttggaatatgacagatacctagcatctagcaaaataatggcagctgcttaccttgaccccaacttgaatcacac

SEQ ID NO: 16822 - DNA, 100 bp, Homo sapiens
actttgttccagctacatgtaataccaagttctctttaagagtcatcagatgcaaagcagccatactctggaagcctggtgcaccattttctattgaaga

SEQ ID NO: 16823 - DNA, 103 bp, Homo sapiens
gagagcttggttaacttgggagaaagtttcatctgtggatggagtattgggggaaatttgcagtggtgagaaaatgtataaagaaagattctgggaaagaatt

SEQ ID NO: 16824 - DNA, 75 bp, Homo sapiens
ggaggcggaggcagaggtggaggcgctttgaaagtacacattttggaactttatacccaagaatttatttgaaca

SEQ ID NO: 16825 - DNA, 75 bp, Homo sapiens
agccctttgatgaccgcagcaggaatttttaccattcgcctgcccaaagaaacccctggccagcattttgagggg

SEQ ID NO: 16826 - DNA, 100 bp, Homo sapiens
aacacctcacttccccatcatgtaggcaaggagcaggacatcgagactttacatggctctgttcacgtcacgctgtgtgggactcccaagggaaaccggc

SEQ ID NO: 16827 - DNA, 90 bp, Homo sapiens
aaagagattgtattgctgttttggaaagaattagcagattggccgatgattcagggcaagttaaagtcttcagagccctgtatacgtttg

SEQ ID NO: 16828 - DNA, 75 bp, Homo sapiens
tcatgtatctgcttgccgccctctttggatacctaacattttacggctgtaccagtgcaggtcctcactttaatc

SEQ ID NO: 16829 - DNA, 83 bp, Homo sapiens
atccaggccacttttcacttctgctgcactgctttcagcatgcaaccatcactggtgcaagctatatttaacggagatcctga

SEQ ID NO: 16830 - DNA, 99 bp, Homo sapiens
gtgttttgttcaccagttctggaggaggaccagcaaaggttgatactgcctctccaagcccaatggaaacatctggatgtgcccctgcagaagaagacc

SEQ ID NO: 16831 - DNA, 82 bp, Homo sapiens
tcccactccctgaaatctggagtgaagaacgccgccatccagccaccattccaaggtcttccgaccccgaactccaccggag

SEQ ID NO: 16832 - DNA, 100 bp, Homo sapiens
accgcgttcctatggacagacgcacagacacctgcagaaaatgcatccgatgcagatttatggctcctgaacagttgcactgtaaaaaacccagctgaag

SEQ ID NO: 16833 - DNA, 101 bp, Homo sapiens
ggggatccgggagaagcacccacaaaactagcatcctcctggaggagctcggaggtatgaaggttattgaaaaccgggccttaaaagatgaagaaaagatg

SEQ ID NO: 16834 - DNA, 95 bp, Homo sapiens
taaattggtttgatgaaagagcatggtatccactaggaagaatagtaggtggtactcctgaagagttgagagaaatcattgagaagacaagagag

SEQ ID NO: 16835 - DNA, 101 bp, Homo sapiens
gaaaggagcagtagatgatgatgtagcagaagatgttctcagtgcagctgagtcttggtgagcagacatgggaatccgaaggcagcagtataaagaaggct

SEQ ID NO: 16836 - DNA, 75 bp, Homo sapiens
tttttatcctttttcccctgaagctcgtagagaaatgtgggtgagcttgtcggccacagactgctacattgtgca

SEQ ID NO: 16837 - DNA, 96 bp, Homo sapiens
cctgaagttacatttagagactgaaatcactgcaccttaaaaacaaaagattgagctgcactgtattccttttggatttaggtggcgagtagaaaa

SEQ ID NO: 16838 - DNA, 75 bp, Homo sapiens
tccgcatcaacaagatgttgtcctgtgctggggctgacaggggcctttttatcattgatgataagggtattcttc

SEQ ID NO: 16839 - DNA, 100 bp, Homo sapiens
ggagaagcagcgcctgttcccggggcagatccaggttcaggttttgaacgaagaatgtgatcagaactggtacaaggcagagcttaatggaaaagacggc

SEQ ID NO: 16840 - DNA, 75 bp, Homo sapiens
cgcttcctggagttcacgactctgagtgctgcagcccctgtcaaagggaacaggaagcagtccacggagggtgac

SEQ ID NO: 16841 - DNA, 50 bp, Homo sapiens
tcatattatagatggagtaaagtggaaggagaacatgaatctctcagagg

SEQ ID NO: 16842 - DNA, 100 bp, Homo sapiens
cttgacaagcctatagaatcggcctggagctgctgaagactgctattgggaaagctggctacactgataaggtggtcatcggcatggacgtagcggcctc

SEQ ID NO: 16843 - DNA, 100 bp, Homo sapiens
ccaccttcctttataacactacagattaaagactttctgaatggaccaggaactcattatacaatgacaaatggaggcagcattaacagttctacacatt

SEQ ID NO: 16844 - DNA, 98 bp, Homo sapiens
aaattcaagaagttgaaaaacgcttttcacgtcacctggagagatgcacagggttttggccaaattgggcgagggcacaaaataaccacttacccctt

SEQ ID NO: 16845 - DNA, 82 bp, Homo sapiens
gagaaggacgtacggtcctgctagtagaggaatatgtcgagtttctctagggcgccccagtccacaggtcctggctaccctg

SEQ ID NO: 16846 - DNA, 82 bp, Homo sapiens
gtctggcaggaggtttttgatgataaagcaaagatgagattgtggggaacctgggtgaaggcacctttggcaaggtggtgga

SEQ ID NO: 16847 - DNA, 87 bp, Homo sapiens
cagactccaggtgaagcagccagcagaggtcagagagagacagctcacgttccggcattactctactgactggcagagacaggagag

SEQ ID NO: 16848 - DNA, 100 bp, Homo sapiens
tagggctcaagggagagctgaagattgctgacttcggctggtctgtgcatgcgccctccctgaggttgtacgtggacactataaaggtcagcaaattggc

SEQ ID NO: 16849 - DNA, 92 bp, Homo sapiens
accttctttcttcagccgaggccgccgccgcctctccttgctgcagccatggaacctgcctagagctggaacgttacctccagagcgagccc

SEQ ID NO: 16850 - DNA, 98 bp, Homo sapiens
gggatcgtgaccgagaccgtgaccgagagcgtgaccgagagcgcgaatatcgtcatcgttagaaggttcaagctgaagttcctggatctcccatattt

SEQ ID NO: 16851 - DNA, 74 bp, Homo sapiens
gcgcctggacctggttctgccttctggacaatctttccggtgataacgtggtgctggaccagacctacctgtgg

SEQ ID NO: 16852 - DNA, 75 bp, Homo sapiens
cacacccttctcatggcaatcgagttgagtacttggatagacttatacctcaggaaacaagctcctacttccaga

SEQ ID NO: 16853 - DNA, 74 bp, Homo sapiens
agagagagcactttaggcaacttctggatgaaacttctgcagccgcaaaagataagtaccgtgaattggctgtg

SEQ ID NO: 16854 - DNA, 90 bp, Homo sapiens
gacaaatttacatgtattggagaccagaccagaagcccttctgaattaagggagtgcatccgccccaacccttttccccctcgtctcctg

SEQ ID NO: 16855 - DNA, 98 bp, Homo sapiens
aaaagatggacaaaaaggcatatttcttggggatgatgaatggagagagactgcatggggagcttctcaaacaggaagattggaatctgcctggaaca

SEQ ID NO: 16856 - DNA, 75 bp, Homo sapiens
ggaatctgcttttcaagtatgccaccaacagtgaagaggttggatgaagctaacttaccaaaagaaatcaatctg

SEQ ID NO: 16857 - DNA, 100 bp, Homo sapiens
caagactttggacttcattgatgtactcctgctgagcaaggtttccctagaaagagaacgacaacatgatcaaacacatgttcagagccaacttgaaaaa

SEQ ID NO: 16858 - DNA, 120 bp, Homo sapiens
ccagaccctggagcctcagttggaagcagccgatccagcctgcggagcctgtggggcagattgctggactcgctgaagagagactacgcaggaaagccccagccacccatcaaatcagag

SEQ ID NO: 16859 - DNA, 75 bp, Homo sapiens
tgaaggccggcagcatcaatgtctggaacatctgtcccctgttcaaaggtctgaaggggcgtctcgattacctga

SEQ ID NO: 16860 - DNA, 75 bp, Homo sapiens
tagtcccccgcgcggccccttattcgctccgacaagccttatgtttgatcatcggccaaggtcctggcgagaact

SEQ ID NO: 16861 - DNA, 101 bp, Homo sapiens
tccacgcagcaagacccgcgccgccgggacccccaggacgacgtgtacctggacatcaccgctgtcgcctggttgggcccggaaatgggacgtcgcgcttt

SEQ ID NO: 16862 - DNA, 98 bp, Homo sapiens
gtcctgtgtgagaagctgcaagccgccataaaatcaaggatctggattttgcataactggtaaaatagaagctggttatatccaaactggtgaccgac

SEQ ID NO: 16863 - DNA, 75 bp, Homo sapiens
cctgttgcagggttttgtttatataactcaagttgtttggctaaattcttcagtggccacagatgtctttaattc

SEQ ID NO: 16864 - DNA, 80 bp, Homo sapiens
gcgcctcggaaaccaggagatcatgaggacagagcgggatgccaccagcttgtccaaagggaagttccaggagctcctgg

SEQ ID NO: 16865 - DNA, 50 bp, Homo sapiens
gtccctctctccacggtaaggggttatgaagacagtatggagtttccaga

SEQ ID NO: 16866 - DNA, 74 bp, Homo sapiens
ccacccgcatgctctttgtcactccccggcggcagcacgaaagtaccatggaggagatatcaccaaacatgatg

SEQ ID NO: 16867 - DNA, 50 bp, Homo sapiens
cgaccaccaggacctccagcaagccctgtatgatgagattcgtcagtttc

SEQ ID NO: 16868 - DNA, 83 bp, Homo sapiens
ccgcagccttgggcctcgcgccggctatggccgtgccctggggctgagccctcaggtgcgctcccctggggccccagggcccc

SEQ ID NO: 16869 - DNA, 75 bp, Homo sapiens
gaaaatgtaaaggccaagatccaggataaggaaggtgtattacctgactgcttaaccgatggctctgatgtggtc

SEQ ID NO: 16870 - DNA, 90 bp, Homo sapiens
aaagctggtgttattgctgttattgtggttgtggtgatagcagttgttgctggaattgttgtgctggtagatatagttgtaggtactccg

SEQ ID NO: 16871 - DNA, 75 bp, Homo sapiens
tctcctgtgtggcgatggtcttcctgctggggctcatgtttgagactgctgtggatgtttttcgaaggataattt

SEQ ID NO: 16872 - DNA, 98 bp, Homo sapiens
acgtgttggaccttccggagcttctcagaagacagagggttttcttttgaggctttgatgcggcctggaagaattgatagaatcatctatgtgccttt

SEQ ID NO: 16873 - DNA, 100 bp, Homo sapiens
cctgatgttccatggcgtcttctcaagctagaaattctagttgaggataaggaaacaggagatggatgatgatgacgacgacgatgacgtaggagatcat

SEQ ID NO: 16874 - DNA, 100 bp, Homo sapiens
gggcgacgctggctgcagggacccggtgacagcgtgagaggctttgaattgtattccatggtgccatctatttgtcctctagaaactcttcataatgccc

SEQ ID NO: 16875 - DNA, 74 bp, Homo sapiens
cgccaaggaggtcacccgcgtgctaatggtggaaacccacaacggtgacagattccgctctattattgatgatg

SEQ ID NO: 16876 - DNA, 89 bp, Homo sapiens
ccctaagagtacatgtaacataatgtaagggtgacccagagaagacagctaaagtggaatgtggggacttctacaacactggggacaga

SEQ ID NO: 16877 - DNA, 100 bp, Homo sapiens
agcctattatgcccagacaagtccccagggaatgccacagcatcctccagcacctcaggattagaatggctgaacacagaagaacctatttctgtctaca

SEQ ID NO: 16878 - DNA, 101 bp, Homo sapiens
gttcagtgggacccccgtgatccgactgcgcttcaagaggctgcagcccaccagcgcctgaagggaaacgatcctcaggcctgacagccgtttgggtcgct

SEQ ID NO: 16879 - DNA, 50 bp, Homo sapiens
atagaagccgggattgagcgcatcaaggctgaccccgcactacatctacc

SEQ ID NO: 16880 - DNA, 75 bp, Homo sapiens
gcgacggcgtcgggagagcgcgcctagccggctcgcgaattcttgagtatcagaacaccaccttctttggtggaa

SEQ ID NO: 16881 - DNA, 83 bp, Homo sapiens
ggacgacgtaatcaaagtgtggagcccaaaaaggaactgtccaatgtgaaagaaaacccattgaagtatcacgagaaaaatct

SEQ ID NO: 16882 - DNA, 74 bp, Homo sapiens
cctatggctcaaagaaagatgattatgtcactgaactgatgcaggagcagtcatacctgaagtctgaattgggc

SEQ ID NO: 16883 - DNA, 50 bp, Homo sapiens
gcaagatcgagcacctagcaaattgttaaaggaaatgggctggcaggaag

SEQ ID NO: 16884 - DNA, 80 bp, Homo sapiens
agtcttcccaggggacgagatatcagaccagacaggctgtgaaaggtcagaagaggccaagtgatggaaatagtggatta

SEQ ID NO: 16885 - DNA, 50 bp, Homo sapiens
cgccagcgttctccttcataaacgaggactatctgctgccaaactcttga

SEQ ID NO: 16886 - DNA, 51 bp, Homo sapiens
gacaccctcttctccaaggccttaaaaaccactcacgaattcttgtttggt

SEQ ID NO: 16887 - DNA, 90 bp, Homo sapiens
cgttgtggtccaaaacagtttacctcttatctaacagcctatgaaagagacaaccagcaccaagatgaagcagaaggagatccaggtaat

SEQ ID NO: 16888 - DNA, 100 bp, Homo sapiens
ctcccagggccagatggtcaacggggctcacagtgcttccaccctggacgaagccacccccaccctcaccaatgagaaggcaaccaaagtgcaggacatc

SEQ ID NO: 16889 - DNA, 83 bp, Homo sapiens
aaaggagagcacaaccatcgcagttggaagcccatggggcagcctgaactctttgcttccggaatccgggattgttgctgaca

SEQ ID NO: 16890 - DNA, 100 bp, Homo sapiens
cttcagcatggctcatattctacttcattcagaagatcaggtacacaaatgcacgcgacaggaaccaggtggaagttgatgggtcgaaactaaatgtgac

SEQ ID NO: 16891 - DNA, 80 bp, Homo sapiens
ggagtaggagactcagaatcgaatctcttctccctccccttcttgaccaaactagagtcagaacgaatactagcatcagt

SEQ ID NO: 16892 - DNA, 119 bp, Homo sapiens
cgcgtcgcagcccccgccgtagccgcctccgagcccgccgccacatcctctgagttgtatcacggactgattcaccgagcccaaccgtactcaactcacatatttctaccccaaatgtg

SEQ ID NO: 16893 - DNA, 95 bp, Homo sapiens
ccaagccctccctcagcagccacccaacgtcgccaacagctggccaggagccgggaccccacccacaggccatgcggaccctcagttggaagcac

SEQ ID NO: 16894 - DNA, 96 bp, Homo sapiens
aaaagaaactaaaaaatggcagctctcagaatgggaagaatgagagaagtcatatgcccggcacagcagagactccccctaatgggccagattgtg

SEQ ID NO: 16895 - DNA, 88 bp, Homo sapiens
cggccgctctgcgggactctgaggaaaagctcgcaccagggcgtgatggtgggcatgggtcagaaggattcctatgtgggcgacgagg

SEQ ID NO: 16896 - DNA, 96 bp, Homo sapiens
tatctttgattctccatatcacctacaggtgagggttcagagtatggtgccagtggagaagatgcgctcagcaggatccagaggctgatggcggag

SEQ ID NO: 16897 - DNA, 98 bp, Homo sapiens
gagtattcagctcttcacagggggtagaacaagtggtactaggattatacattgtaagaggtgacaacgtgacatctccaagtttgcagagaaagaca

SEQ ID NO: 16898 - DNA, 80 bp, Homo sapiens
gtctgggcccttggcactccgttcatgcgggagatggcaggggctggcacatgacagtggagcagaaatttggcctgttt

SEQ ID NO: 16899 - DNA, 50 bp, Homo sapiens
agagtatctgaaagtatttaagggtcaacatatttcactggcacctattc

SEQ ID NO: 16900 - DNA, 50 bp, Homo sapiens
gaaattctgagacactaaaagaacctgttgtatatgaacacagatcaaga

SEQ ID NO: 16901 - DNA, 100 bp, Homo sapiens
gcccctgataaaggatacgttggccataggaaaaggatacagagtagagtttcatgaacctgaaacttggtggaaatttgatcctgaagaattagaaaag

SEQ ID NO: 16902 - DNA, 75 bp, Homo sapiens
aatgcctgtaacccagtagatgtcagataaatgtcgctggatttgtgactgttgtcagcgggcccccccaacacc

SEQ ID NO: 16903 - DNA, 131 bp, Homo sapiens
ggcgagatggacattctgaaatcagagatccttcggaagcggcagctggtggaggacaggaacctgctggtggaaggggaacagtttgtgaagaaaatcggtggtatttttgccttcaaggtgaaagatgg

SEQ ID NO: 16904 - DNA, 98 bp, Homo sapiens
atgacgtgcaggtctctagcgccaagagtgagccatggagctacgtgtggggaacaagtaccgcctgggacggaagatcgggagcgggtccttcggag

SEQ ID NO: 16905 - DNA, 97 bp, Homo sapiens
agagacaagaagaggctaacatgactgataccactataatttagtggtgagcagggcagcatttccttctcccactgctgctgagatggcagaaatt

SEQ ID NO: 16906 - DNA, 101 bp, Homo sapiens
ctgcctttttaggccgctcacatgaaagttggatatgtcaagtgaccagatagctgccaatctgcaagcagttattaatgaagtttgtaggcacagaccgc

SEQ ID NO: 16907 - DNA, 100 bp, Homo sapiens
ctaaaccagtacagacaatcactccacatgagcacaggaagcttggaaacatgactgtgacggtgaagaagactgtcccctctcctgaggctgtgcagat

SEQ ID NO: 16908 - DNA, 100 bp, Homo sapiens
gtattgtttgcactcttcagcaaattggaaagagctcaaaaaagatggtccaagaaggctccctagtggacacgctgcaatctagtgacaaagtcgaaag

SEQ ID NO: 16909 - DNA, 82 bp, Homo sapiens
ggaggcagccaagctcgtagcctgccactccgtgcgataaagataaagtttctctaaccaagaccccaaaactggagcgtgg

SEQ ID NO: 16910 - DNA, 83 bp, Homo sapiens
ctcgcgctactctctctttctggcctggaggctatccagcgtggacgacatccttggagaaggcagcgacgacagcgacagcg

SEQ ID NO: 16911 - DNA, 100 bp, Homo sapiens
ggaaaacccagtgcagccagttcaaagactaaactgccaaagttcaccatcctccaaacaagtgaaggttctcatgtatcagccatcttctgtaagggtg

SEQ ID NO: 16912 - DNA, 100 bp, Homo sapiens
ccactacagggaagtgcatcacatgtcagctgcaagctttcttcctggtggcagatgacatcatggattcatcccttacccgccggggacagatctgctg

SEQ ID NO: 16913 - DNA, 74 bp, Homo sapiens
ggctctcacgctttctgctcaagtcctgtcctcttctgaccaaagagtgagcgtcctgaccaccctggagcgta

SEQ ID NO: 16914 - DNA, 98 bp, Homo sapiens
tcgccctggacatcgatagggatgcagaggatcagaaccggtacctggatggcatggtgaaaagtagtgatgaggcagtgatcctgtgtaaaacagca

SEQ ID NO: 16915 - DNA, 83 bp, Homo sapiens
gaagacagcagatttatcactgttaatccagatttcaacactacacttgcacaatgtctttgaaaccaagagtagtagatttt

SEQ ID NO: 16916 - DNA, 101 bp, Homo sapiens
ggcggcttcctagtgagtcggcggctgatttagaaggaggttcaggctacgagatcctacagtaaggaattgtttgaagaagttatttcaaagatgcggaa

SEQ ID NO: 16917 - DNA, 100 bp, Homo sapiens
aggaaagaaacgaaggagagatccagccagaagatacctgaaattcctgcagatgttgtgggtgcccttctgttcctggaggattatgttcggtacacaa

SEQ ID NO: 16918 - DNA, 74 bp, Homo sapiens
gaagaaggtgaagaagcggatgaggtgaagattgtccccagtggatggtccctatcacaatctctactagtgaa

SEQ ID NO: 16919 - DNA, 97 bp, Homo sapiens
tgcatgtaccgaccttctgaacaaggccaacacctatgcaggaactgccttctgttgaagaactcactattattctgcctgaagatattgagttaaa

SEQ ID NO: 16920 - DNA, 100 bp, Homo sapiens
gccctcttcctgctcgtcacctccgtcacactcactctcttccagcaagacccccagggtggccagcggcagagccagcagacacagcatttctccttga

SEQ ID NO: 16921 - DNA, 100 bp, Homo sapiens
ccatctgtggtgccaattgaaggaacggtgctggaccacctggtcggggaggagaccatggctgactacctgctgtacaccctcaacaaacaccagcgct

SEQ ID NO: 16922 - DNA, 100 bp, Homo sapiens
ctggaggaggcatggagcccgaggaggagccaagtgtggcagcagttcgtgaagtctgtgaggagttgtacaatggtagatggagtgatgattcttcctg

SEQ ID NO: 16923 - DNA, 74 bp, Homo sapiens
agtcactgtcagcgacagacccctcggggtgtccatcacaaaagccgagaggtatgaaggttattgaaaaccgg

SEQ ID NO: 16924 - DNA, 100 bp, Homo sapiens
gcagagaacatttataatgatgaagaccctgaaggaagcgtggatccagaaggacaaggccaaggccacctttgatgccatttctaagacctacagctac

SEQ ID NO: 16925 - DNA, 75 bp, Homo sapiens
ctcttccagttgcggcttattgcatcacagtaattgctgtacgaaggtgctggagaatctggtaaaagcaccatt

SEQ ID NO: 16926 - DNA, 100 bp, Homo sapiens
gaggggtggtgaccatcgaaaggagcaagagcaagatcaccgtgacatccgaggtgcctttctccaaaagtttgcagaaaaaacttcagcatgtgccagg

SEQ ID NO: 16927 - DNA, 82 bp, Homo sapiens
atgaagagccgccacctaagagaagacacagctccgaattgattccttctttagattagcacaacaggagaaagaagatgct

SEQ ID NO: 16928 - DNA, 100 bp, Homo sapiens
ttgcagaaatgtgtgcagactacatggcatctaccatagggtcatccgtccttggctcaggatttggagagcttgcaccaccaaaaatggcaaacatcac

SEQ ID NO: 16929 - DNA, 83 bp, Homo sapiens
gacggagttctacgtgtcccccgaggatctggaggcacagctgcagtctgacgagagggaggtggggctggtgtccgagcact

SEQ ID NO: 16930 - DNA, 87 bp, Homo sapiens
gacaacaatgagatcgtggacaagatcatgggcaaaggacagatccaggtattgttgcagcatctggcagtgagactgaggatgagg

SEQ ID NO: 16931 - DNA, 83 bp, Homo sapiens
cggctcacctggcggtgcccgaggagtagtcgctggagtccgcgcctccctgggtggtccgtactgagaagaacagtttgaac

SEQ ID NO: 16932 - DNA, 82 bp, Homo sapiens
cgcggccccttagcgcggtcaggccgccctccttttccagaatgaactctggaagcccagccagggacaatgcaccttcaca

SEQ ID NO: 16933 - DNA, 100 bp, Homo sapiens
gcgttcttccgctggctcagccgcaagtacccgtccatcatagtcaactgcgtggaagagaaggtgtacgtgaacggagagtgggtgaccaacatcagcg

SEQ ID NO: 16934 - DNA, 97 bp, Homo sapiens
gcgcgggcctcgcacagatcgcctgctttgggccttccatgtcgtcagaggaacgagccagaatctattcatcagacagtgatgagggatcagaaga

SEQ ID NO: 16935 - DNA, 90 bp, Homo sapiens
cggaggtcgataagctggaactgatggcggtggttatcatgggtgtggtgctacaaggtgccaacctgtatggttacatcaggtgtaagg

SEQ ID NO: 16936 - DNA, 100 bp, Homo sapiens
cattctccagggaaaggatgacatatttttggacctgaaacagaaattctggaacacctatatggtcacgaacgagatcacgccggtgctgtcgtactcc

SEQ ID NO: 16937 - DNA, 75 bp, Homo sapiens
gcagaaaatagcagccaggaaccaagaaaacttggttaccttttcgacaaaatgattcatctagtcattgccaga

SEQ ID NO: 16938 - DNA, 100 bp, Homo sapiens
ggggccacactgcaggcctccgcgctcagtgggtgtgctgatctgcaaaccctggacacaatgcagccaattgagaggaaaagacagggctatattcatg

SEQ ID NO: 16939 - DNA, 100 bp, Homo sapiens
gaacgatgtgcgagaactgcgcagacctggtggaggtgttaaatgaaagaagatgagaagtttttgtctgaagtttttgcacaattaacagatgaggcta

SEQ ID NO: 16940 - DNA, 98 bp, Homo sapiens
gcagtaggcaactttgcttccaaaagaagttaccaacatttagaatttctacttattctgagagacgtctcagagaggctgtgcagctgctggaggac

SEQ ID NO: 16941 - DNA, 50 bp, Homo sapiens
gtcggcccttgccttggcagagctgaggtactgtccaagaagctggaaca

SEQ ID NO: 16942 - DNA, 73 bp, Homo sapiens
gagaggccagctcagacctcccggctcgacaggcggcgcgggcggcggtcagttgctctcccctgaaggaaga

SEQ ID NO: 16943 - DNA, 50 bp, Homo sapiens
ttaaaaatcaccagttactttaatgaaatctcattttcagcttctgccag

SEQ ID NO: 16944 - DNA, 100 bp, Homo sapiens
gctactaaccagagccggctctttctcgacatgtctgctctgatttcactcaggaaacgtgctcagggggagaagcccttggctggtgctaaaatagtgg

SEQ ID NO: 16945 - DNA, 51 bp, Homo sapiens
gtcttggtgaagacatccttcaggaagggaaaaggccgaggcatcagcgtg

SEQ ID NO: 16946 - DNA, 82 bp, Homo sapiens
agaaggcaacgacgttccatctgtggaaggacctaccaaccaggacaagaaggggctttccgggaaacagaataatttcgag

SEQ ID NO: 16947 - DNA, 120 bp, Homo sapiens
ctgtcagtcgcgagcgaacgaccaagagggtgttcgactgctagagccgagcgaagcggttacacatcattttggaatgactgtatatcatctggattacgtggctgtatgttaattgaa

SEQ ID NO: 16948 - DNA, 75 bp, Homo sapiens
ccggtgcaagaggcgcaaacaagccaatcccaggaggaaaaacgccagagcagctgagttccagataaaaactgt

SEQ ID NO: 16949 - DNA, 102 bp, Homo sapiens
gcagccccgagcactgtggccgaggcccacctgctgacatctacctgccaggtgatgtgtccaatctagatcccaacttctcatttgaaggcaccaaactgg

SEQ ID NO: 16950 - DNA, 74 bp, Homo sapiens
tctgtgagggtttcaatgaggtgctgaaacagtgccgacttgcaaacggattgggtgcaaggagttggtgttga

SEQ ID NO: 16951 - DNA, 112 bp, Homo sapiens
gtggaggttgctagacctgggatccagcccttctggtgtcacctcccagggtgactcaactccaggaatattcaacgaagcagctgaccaatctggtgaatgtttgcctggg

SEQ ID NO: 16952 - DNA, 75 bp, Homo sapiens
caagagggatccttcacccgtgtctggtgtctcccagtctgctaaagccctaaggccatcaccatggacttccag

SEQ ID NO: 16953 - DNA, 118 bp, Homo sapiens
ggctacaggccgcggaggaggaggaggtggagttgctgcccttccggagtccgccccgtgaggagaatgaatggtgagagtatcatggttgaactcgcagctggaccttttggaaata

SEQ ID NO: 16954 - DNA, 75 bp, Homo sapiens
gacttcggctcttgcctcaagctgcgggcagatggaacgtctcgcccaagaacttcaaggtgaaaatgatcatga

SEQ ID NO: 16955 - DNA, 80 bp, Homo sapiens
ccttccaagtagctgggactacagacatgcgccagcacgcctgtgcccttggtttctagaatatgcccaaatgatgtctg

SEQ ID NO: 16956 - DNA, 100 bp, Homo sapiens
tcttccacatgaaaaggataagttagagatgtttatgattacttccgagctgtcctgcagcgtgatgaaagaagtgaacgagcttttaagctaacccggg

SEQ ID NO: 16957 - DNA, 100 bp, Homo sapiens
ctcgtgctggggctctggctggcgttgctgcgctccgtggccggggagcaagcgccaggtaccgacgccgaggagaccattcttaacgccttcaagatgc

SEQ ID NO: 16958 - DNA, 50 bp, Homo sapiens
atggagatggtgatgaccaagcatctgggtcacaggccccagttccaccc

SEQ ID NO: 16959 - DNA, 80 bp, Homo sapiens
tcttggatccgcgggacaagaaaattcatgcggattttttatcaagcagaaatgcatcgaacaacgagaatcaagatcac

SEQ ID NO: 16960 - DNA, 75 bp, Homo sapiens
acccgcttcaagaagcctgctgagttcaccacagaaacctgctcctccaaagccagagcccaagcctaaaaaggc

SEQ ID NO: 16961 - DNA, 96 bp, Homo sapiens
cgtgtgcgttctccccgtccgcccgaagcgttctcccggggaagtacttggaagagatcgccacacagatgcgcacgcacagcatcaacgcgctgc

SEQ ID NO: 16962 - DNA, 74 bp, Homo sapiens
ttagcccaagaaacattatattcatgtatgggctacgtgagttcgtggtgattgcccctgctgcacacagtgac

SEQ ID NO: 16963 - DNA, 100 bp, Homo sapiens
ccagtttaggggctcacctgccttgcatcgttccgagtcctgtactggactgcatcaggccgcgtctcctcaggaacgtgctggccaaagcgctctatga

SEQ ID NO: 16964 - DNA, 75 bp, Homo sapiens
cagctgtggaaagaagttgcaaaacactgggccagaacacaaagcgtgaatccggaagaaaagttcaatctggaa

SEQ ID NO: 16965 - DNA, 100 bp, Homo sapiens
catgtcagccttcccagtagctggaactacagagctagcgctgaacacagcccagtttgcaaagagtctagccatgcttgggagctctgaggacaacacg

SEQ ID NO: 16966 - DNA, 82 bp, Homo sapiens
ccgcagtggagaaggcgcctgtggaacatcggtaaaatgtcggttccaggaccttaccaggcggccactgggccttcctcag

SEQ ID NO: 16967 - DNA, 100 bp, Homo sapiens
taatggtcgtcgtcggcatcctcctggcctacctggcaggttgagcttcagcgacagcgagagtgacaacagcgccgactcctccctgcccagccgtgag

SEQ ID NO: 16968 - DNA, 80 bp, Homo sapiens
cttgggacccaccgctgccctcagctccgagtccagggcgaggtaaagagaaatgtgtatgaccttacaagtatccccgt

SEQ ID NO: 16969 - DNA, 100 bp, Homo sapiens
ctcgcccggaagcaaggcctctggaaaaccgcggcccctgagttgcaaacaaatgtcagatcccaggagaagaggaagattcctgctgtaccaaatggaa

SEQ ID NO: 16970 - DNA, 101 bp, Homo sapiens
gagcccttagcgtggactgggctggccccggaagcccccacgggctctacctgaccctgcagaatttcgctaaggagtttgtgatcagtgatcggaaggag

SEQ ID NO: 16971 - DNA, 50 bp, Homo sapiens
tgatgatgaagaaccgcagatccatgttccattggcaagctacaataatg

SEQ ID NO: 16972 - DNA, 75 bp, Homo sapiens
cctcccaagaagctgggattacaggtgctcagattgatgacaacattccccgccgcaccacccagcgtatcgtgg

SEQ ID NO: 16973 - DNA, 75 bp, Homo sapiens
tggaattcgcgaagctgccaaagccttagacaagatgaatagccttggaagatagagatcgtgtctccctccaga

SEQ ID NO: 16974 - DNA, 100 bp, Homo sapiens
ctccagctccagccgcagcttaggcagcggaggttctgtgtcccagcgacagagtccaggccctctcctatgcacagcacacgcgacaattgatctcctg

SEQ ID NO: 16975 - DNA, 124 bp, Homo sapiens
acgtcccgataacttgcagactgtggcgcaactggtcttggtagcggaggcacccgaatgctgcccgggtgagacttccttgccgtccaggaagggatttcgacaccagaccaccaagtttttg

SEQ ID NO: 16976 - DNA, 90 bp, Homo sapiens
ttttgaggatgaacttcatgatcatggagtttcaagcctgagtgtgaagattggctacttctacaagtccgaacagccagtccagcaaaa

SEQ ID NO: 16977 - DNA, 51 bp, Homo sapiens
gggccatctggctgtgtactacagagctggagataagatgggtagactgct

SEQ ID NO: 16978 - DNA, 97 bp, Homo sapiens
gaagaactcagatcaaaacctgttactgaaggaactggtgatattattaaggaattccagagacgctgtaacactctgatttcattgattgagaaag

SEQ ID NO: 16979 - DNA, 97 bp, Homo sapiens
ctcattgaagcttggaattacatagctggaaaggatcttacaggtatgatctcgtgaaatcttgagagaaactgaatgacgaatgaaactattgttc

SEQ ID NO: 16980 - DNA, 75 bp, Homo sapiens
aacaccacaataatccacagccaagacagcaaggccatcgtggacgggaacctgaagctgatcctgggcctcatc

SEQ ID NO: 16981 - DNA, 97 bp, Homo sapiens
gaagaagcaggatgaactgaaacggattgccagagaattggcagaagctagaagaaccacacctcttttggaatatattaaaaatagaaaattagaa

SEQ ID NO: 16982 - DNA, 90 bp, Homo sapiens
gtttctgcatagaaacagatttcttgaatctatcttctggatttaatctacattgattctgcatatcctgcctcaggcagtatcatggaa

SEQ ID NO: 16983 - DNA, 83 bp, Homo sapiens
ggactgagtcctgcaggacacagaacactcgtgaaactgctcaggccatcaagggtatgcatatacgaaaagccacgaagtat

SEQ ID NO: 16984 - DNA, 90 bp, Homo sapiens
cgcttacaaaggatggcagtttcttctcctcggtatcagaagctctgtaagacaacatgccaatttggctggcacgctgagcggccatgc

SEQ ID NO: 16985 - DNA, 101 bp, Homo sapiens
cccgggcgactgtggccccccgctctctgacctgctgaaagcctacccgttccatcccgggctatcccagttccccactgccagggaaccccacgccaccc

SEQ ID NO: 16986 - DNA, 100 bp, Homo sapiens
agaatataagacttctgtcttggtgcagcaggctgggctggcggtggccctatgcacccaggtagccctgggcatggagcacctgtccaacaaccgcttt

SEQ ID NO: 16987 - DNA, 139 bp, Homo sapiens
atccccaaggaggacggcgagagcacggacagactcatggggaagggccaggtccaggtagcaatgaagtgatgaggatactgatctctagaagcctgcttcaggagtagaacccacacttgttctggcctggtgttca

SEQ ID NO: 16988 - DNA, 98 bp, Homo sapiens
tagattcagctaaacgtgggtttcttactaaggacgagctgatcaagtatatgactgaagaaggtattgcacatctattacaaatttcctggttatgg

SEQ ID NO: 16989 - DNA, 83 bp, Homo sapiens
aagaggccaaagatctgacagaactggttcagcggagaataacatatcttcaggtactgctagttgaacagctcttccgcaag

SEQ ID NO: 16990 - DNA, 74 bp, Homo sapiens
ttgtttgtggatcgctgtgatcgtcacttgtcccaggggcagccactggcctcccagcccccggtcgtcgaccc

SEQ ID NO: 16991 - DNA, 74 bp, Homo sapiens
actttgaaaatgatttaattgaatcaagctgcaaagtaactagcatttaaatcaaacggtattgagatggattg

SEQ ID NO: 16992 - DNA, 51 bp, Homo sapiens
gatgacatgccagcccagactttcatgcatcaactgtgaaatctgtgttag

SEQ ID NO: 16993 - DNA, 98 bp, Homo sapiens
cgggagggcatcccgttggggatccttccgcacactgaagagtacgtcttcgggtctacccctaatcacgggttgtggaaaccagaacttcgcctgga

SEQ ID NO: 16994 - DNA, 75 bp, Homo sapiens
gaggaatctgtgctttctgtcccagaactccaggtttggcagttctctaccagtggaccaatcttttcatccccg

SEQ ID NO: 16995 - DNA, 100 bp, Homo sapiens
gcaggagctggctgcggagcggcgagggacctcgcagggagccatccgatacttataagctagcaattacagatttaactacagctatcagcatggacaa

SEQ ID NO: 16996 - DNA, 90 bp, Homo sapiens
cgcgcgcgggcctcgcacagatcgcctgctttgggccttccatgtcgtcaggaattgaatgatctggcacgggaccctccagcacagtgt

SEQ ID NO: 16997 - DNA, 90 bp, Homo sapiens
ggagatttcaatggtgatggcatagatgcatcacttaggagctgctactccagaaaatccagaaatagagctgcttcgcctagaactggc

SEQ ID NO: 16998 - DNA, 83 bp, Homo sapiens
cgtcgtcggcctctgggcagcagctccatttatcttaaagaaattggacagcatatgaagacaggacatcacatatgaatgca

SEQ ID NO: 16999 - DNA, 101 bp, Homo sapiens
ggacgccagttactgcacggaaagcagcgtcaggagccatagtacctacagcagcactccagatctctattccagctttctcggtaaccctaataaagaaa

SEQ ID NO: 17000 - DNA, 100 bp, Homo sapiens
cagccgccgcgcggcctcctgctcccggcgcaccggagccaggttcgtgctggccgtgggcagcgccgtctttgatgccatgttcaacgggggaatggcc

SEQ ID NO: 17001 - DNA, 75 bp, Homo sapiens
tttcatcgcttgaatcaaatattgttggttgtctgcattcaaaagagcattctattaaagctaccttaatttggc

SEQ ID NO: 17002 - DNA, 83 bp, Homo sapiens
ctttattgaagctcacctttgtctaaataaggtctccgtctctccaccgggggcttcatccttccagggaggagaagagggac

SEQ ID NO: 17003 - DNA, 88 bp, Homo sapiens
ttcacctattgcctgatctccatgcattagaacacacatactctgataaagggtgaaaatcctatttataagagtgccgtaacaactg

SEQ ID NO: 17004 - DNA, 90 bp, Homo sapiens
cctggaggcagtgcagaagatgaaagccaaggaggagaggcgagtgacagaactgaaggttgcccacattcccaaatcagatgctttgta

SEQ ID NO: 17005 - DNA, 80 bp, Homo sapiens
cagtattcacctaagcactccaaattgacttgttctacgaagacgaagatctccggaaagtgaagaagacccggaggaaa

SEQ ID NO: 17006 - DNA, 100 bp, Homo sapiens
tggaacatggacaggaactgtggacagtgaagagaggcctctcccaaagcacctgcgcaggacttggtggggaaacttaaagatgcttcgaaaagcctgg

SEQ ID NO: 17007 - DNA, 90 bp, Homo sapiens
ggaatatgccaaggaaaaactggagagcttcatcaaaaatagtgatagctttgataagtcccaggaaggtggcgtcagcatctgcagccg

SEQ ID NO: 17008 - DNA, 80 bp, Homo sapiens
ctctgcaaaaatgggcctggttgaaacaaaattggcgattattcctggtggagtgaaacagattcagatagttcaagttc

SEQ ID NO: 17009 - DNA, 100 bp, Homo sapiens
caggagatgagggaggacggccagacacctggaagccggaaaatggagtacaagcgcaagctagccagagtttccctggtgcgcaaagaactcaggtccc

SEQ ID NO: 17010 - DNA, 75 bp, Homo sapiens
aagtgaaagaggaagaggaagagccattaccatcttacttatttaagggtctggtggttccagtcatcaggaatg

SEQ ID NO: 17011 - DNA, 90 bp, Homo sapiens
gttttgcctgaatacatgatttaaacaagagatttccacagaaggcggtggatgaattttattccaagatagaaggccagaaaattgact

SEQ ID NO: 17012 - DNA, 100 bp, Homo sapiens
tctgaagactgcactggtggctgcggtaaaataccatgaagattttgaaaaaacaaaggggagaggctttactcccgtcgtggacgatcctgtgacagag

SEQ ID NO: 17013 - DNA, 90 bp, Homo sapiens
cggagtgcagcggggttaggatggacgaggacgtgttgcaccctgaagagcctcatcatcgggaggaataagtttttttcatctgtaatt

SEQ ID NO: 17014 - DNA, 82 bp, Homo sapiens
actccttcggcagtccacccaccgccgccgcctcccaggtatttactaccagggagcacccaattcttcttgagaacaccaa

SEQ ID NO: 17015 - DNA, 75 bp, Homo sapiens
ggtggccgacaacctggccatccagcttgctgacaaagtgatggcatctccccttcagatcacaccacagacagc

SEQ ID NO: 17016 - DNA, 50 bp, Homo sapiens
cagggtcccccttcctggtggctgtgaagacatgggagtcccaccgtatt

SEQ ID NO: 17017 - DNA, 90 bp, Homo sapiens
aaaaactggatgttggtagaaaaagcaagagtttgttatatagcaatacaaggcagatccaaccatccccaccgtggtcctacgatcagt

SEQ ID NO: 17018 - DNA, 74 bp, Homo sapiens
gatcagctatgccattaagaacatccatggagtcagggggatatgagactttctactcggaatatcctgagtgt

SEQ ID NO: 17019 - DNA, 75 bp, Homo sapiens
gtaagcgcagaaagcaggcgaacccgcggcgcaataacggtgatgtgtccaatctagatcccaacttctcatttg

SEQ ID NO: 17020 - DNA, 51 bp, Homo sapiens
ctcaagggaggccgtttctaccagaaaactctctgcagaggaattagagcg

SEQ ID NO: 17021 - DNA, 103 bp, Homo sapiens
acagcgacggctacgccgaagcactcgttccgggggtgaagcctcctgcgccggccttgcctcgggtcatttggatccaggattcctagcaagtgacaaaaca

SEQ ID NO: 17022 - DNA, 82 bp, Homo sapiens
tgaaaggaaccactcattcacttctagacgacaaaatgcaaaaaaggaggccaaagactttatcgagatagacaatggggat

SEQ ID NO: 17023 - DNA, 82 bp, Homo sapiens
ctgcgacgctgccccacggccgttttcatggctgcttaaaatggtctatggtctgtctctactgattcttgctattccaaat

SEQ ID NO: 17024 - DNA, 100 bp, Homo sapiens
gtacttcaaggacaacgaggtgctgctgcagatcgacaaagatgtccggtgccccacctcaaccagaatgcctggaacaacctggagaaatatagccgca

SEQ ID NO: 17025 - DNA, 83 bp, Homo sapiens
cccaggctcctgctgacccgggcagagaagatttagctttggagtcaaacccttctgaccatccaagggcaagcacaattttc

SEQ ID NO: 17026 - DNA, 75 bp, Homo sapiens
cccagcctcgaagagtggctgctgttacaccagaagatcagctgccatgttacttgactcacaccaaccctagag

SEQ ID NO: 17027 - DNA, 51 bp, Homo sapiens
ggcagccaccccatctgggaagattacaagaagttctgggcaggcctgcag

SEQ ID NO: 17028 - DNA, 75 bp, Homo sapiens
ggaggctggacgcttgcatggcgcttgagggcactgtgtttagtcttgagtcagaggaggaggaataccctggaa

SEQ ID NO: 17029 - DNA, 75 bp, Homo sapiens
aaggagagaatgtatgaagaacagtcacaggacagggtttggattcaggatttgttcctagtgtccaagattttg

SEQ ID NO: 17030 - DNA, 83 bp, Homo sapiens
tggactgagtcctgcaggacacaggaaagaccacagcaagattctttcattcgtctcctcctagcctgggggaccaggctcga

SEQ ID NO: 17031 - DNA, 100 bp, Homo sapiens
ctacctattgtccaaagcagtcgtaagaagaggtcccaatcccccactctttccgccctaatggaggtctccagtttcgattcctcgaggtctgaacaag

SEQ ID NO: 17032 - DNA, 51 bp, Homo sapiens
caagatcaagaccggcgtggtgaagcgattgctgacagaactggaatctcc

SEQ ID NO: 17033 - DNA, 100 bp, Homo sapiens
gaagaatcctgcaaaaatgtctctctatccatctctcgaagacttgaagactcagaaccgtgctgcatactatcctcctagccaaattgctcaactaaga

SEQ ID NO: 17034 - DNA, 74 bp, Homo sapiens
gagccagcgcccggagcaagcggagctcccccaagagccggaaagtgctatacgtattggtcacgttggaatgc

SEQ ID NO: 17035 - DNA, 100 bp, Homo sapiens
aattcctgtccttactccctctttaagattgcgtacccactgcagagtgctgaagacggggtagccacgaggaggagatgttaaagtaacccatcttgca

SEQ ID NO: 17036 - DNA, 100 bp, Homo sapiens
ggctgcctgggtgttagcaaagaagcccagtggttcccagacacaggtaatcttgggcacctccaagagcaaagtttaggagaagagggaagtcatttga

SEQ ID NO: 17037 - DNA, 100 bp, Homo sapiens
ggatctttatctggcttactttgtccacactccggccccaactggaccctaggcaaaagtgagtggcactcctctgccaggactccaggcaagccccggc

SEQ ID NO: 17038 - DNA, 98 bp, Homo sapiens
tgctcgcagaattaccgcctcttctttaagtatctgactgtcttctctcagatgattgcatttcatgatccagagctgagtaatcatctcaatgagat

SEQ ID NO: 17039 - DNA, 100 bp, Homo sapiens
ggatgatgtactggattgtttttgctctctatactgtgattgaaacagtagccgatcaaacagttgcttgagcaacttatgactctcatctctgctgcac

SEQ ID NO: 17040 - DNA, 75 bp, Homo sapiens
caaacaagcttcattgttttcagctaacagtaaccccagacaatggcgatgaccactcagaaggaggcctggtgg

SEQ ID NO: 17041 - DNA, 76 bp, Homo sapiens
aacatacatatatgatatcccagagatgtttcggcagatgctgcagttggagaagaaacttgaacgtgaacttgag

SEQ ID NO: 17042 - DNA, 74 bp, Homo sapiens
ccagatcaacctggagctctacgcctcctacgtttacctgtccatgagaacatggcggcccagagggaatggac

SEQ ID NO: 17043 - DNA, 126 bp, Homo sapiens
aaagtggttgccccaaatgtgtcacttacttctgctgtatcccagtctaaagagctcacaaagacagaggcaatcttcccagccggcattctgcagccccccttctttagtgcccagcagtccaac

SEQ ID NO: 17044 - DNA, 82 bp, Homo sapiens
agccgatccagcctgcggagcctgtggggcagaccacagagtattcagccatggcctcgctggctggtgggctggacgacat

SEQ ID NO: 17045 - DNA, 75 bp, Homo sapiens
ggaagttagtgaatctatggattttagatatctgccagatgaaaaagagcatttgtgcagaatgtcatcagatga

SEQ ID NO: 17046 - DNA, 98 bp, Homo sapiens
gggagcccaggacgccctcctgcacatgcgcaggaggctcaatgacagtcgagctttggctaaggacctgaaggagaagaaggagaaggtggaggaga

SEQ ID NO: 17047 - DNA, 100 bp, Homo sapiens
cgggtctgtcatacacggaggaagcggctgttctacagtgatcagcagctggactgtgccttggacctaatgaggcgcctgcctccccagcaaatcgaga

SEQ ID NO: 17048 - DNA, 100 bp, Homo sapiens
tcctgctgctgaagatctggaagacgcgctcctgcgccggtatatttgcttacttaaactaccatgttcctcgaacgagacgagaaatcctggagaccct

SEQ ID NO: 17049 - DNA, 96 bp, Homo sapiens
ccgaagagttctacaacctggtgcgcttccggatcgggggcaagcggaaggtgatgcccaagatggaccaggttggtgttcgaggaagagacattg

SEQ ID NO: 17050 - DNA, 100 bp, Homo sapiens
gggaagtgaaaagagatctgttttcagtgcacgatctgattttctggagagatgtgaagaagactgggtttgtctttggcaccacgctgatcatgctgct

SEQ ID NO: 17051 - DNA, 75 bp, Homo sapiens
ttgaaggaaggtgatacaatgatggggcagcaagtggccaacatgtcctcctcacattcttccaccagagaagag

SEQ ID NO: 17052 - DNA, 80 bp, Homo sapiens
ggagatgccccgcggcagccgcgctcggggctctaagggaataccttggcaagcagctccagtccgagcagccccagacc

SEQ ID NO: 17053 - DNA, 83 bp, Homo sapiens
cagataaaccaaaggaattttgaagtcaccactgaggaggaattcaccctgttcgtctatgatgatgaggagtctgatgagga

SEQ ID NO: 17054 - DNA, 129 bp, Homo sapiens
ccaacaccacagtgtgtaccaagtgtggaggggctggccacattgcttcagactgtaaattccaaagcctgcttagacgcctggtgactctcatttcgcagcaggccacgctgctggcctccaatgaag

SEQ ID NO: 17055 - DNA, 82 bp, Homo sapiens
tgccggccgtctgtcccagtgatggatgcacctggaaggggaccctgaaagaatacgagctgcatcttcctcccgtgaggct

SEQ ID NO: 17056 - DNA, 100 bp, Homo sapiens
catcaagatgatttatggtaataagctctcaaaggtctatggccctgtgttcactctgtattttggcctgaaacccatagtggtgctgcatggatatgaa

SEQ ID NO: 17057 - DNA, 87 bp, Homo sapiens
tccgacagtcagtcctaagagaactctttaagaaagctcaacagggctttggtgtcatccccagcactcctctggccatccatacac

SEQ ID NO: 17058 - DNA, 80 bp, Homo sapiens
caccgacctcgacgtcttgcctgtgtcccacttgttcgcggcctatagtgcaagaagaaacacacgctgctgtgccccga

SEQ ID NO: 17059 - DNA, 82 bp, Homo sapiens
cgggacagcgcggcggggagcgacgacaaacggggattcagcgtccgatcctttggaacagggactcacgtgaagcttccag

SEQ ID NO: 17060 - DNA, 110 bp, Homo sapiens
gtgtaccagatatattgactgtgacctgaatcgcatttttgaccttgaaaatcttggtgagaaagatcagtctaaagaaaaggagaagaaagtgaaaaaaacaattcctt

SEQ ID NO: 17061 - DNA, 95 bp, Homo sapiens
gactgggagacgcgctccacagaaacccggactgagaggcagcgagaggggttccccactgaaggacttggtccagctgtctggcagggaggaga

SEQ ID NO: 17062 - DNA, 101 bp, Homo sapiens
atcgccggcatgatctacaaatacatcgagtaccaagggtaacgactgcgagaccttctgggacaaggaccagctgactgacagctgctaccagtttaact

SEQ ID NO: 17063 - DNA, 82 bp, Homo sapiens
tgtggtgtcggttaatcgtcacggcttccgggagttaaagcgggctgacgcacgaggcacacaggaaggaggtggagcaggt

SEQ ID NO: 17064 - DNA, 50 bp, Homo sapiens
aacagtttgacctgaactatggaagcacagaaagctgaaggtgctggaga

SEQ ID NO: 17065 - DNA, 111 bp, Homo sapiens
gcaaggtgctgctggacgacacggtgccgctgacagcagccatcgaggcgagccagagcctgcagtcccacacgctctttcgacgtgtagcagcagctttgccgggaatgg

SEQ ID NO: 17066 - DNA, 50 bp, Homo sapiens
tgagactcctgctcagtgtagcattaaggactaccgaccagactcccgga

SEQ ID NO: 17067 - DNA, 83 bp, Homo sapiens
gtggactctgccgacaccggagagaggcgccatgtcagaaccggctggggatgtccgtcagaacccatgcggcagcaaggcct

SEQ ID NO: 17068 - DNA, 100 bp, Homo sapiens
cgtctagctggaggattgtaaatgcaccaatcagcatgctgtgtctagctcaagagcaattgtatgatggctatgatgaagagtatgactgtcccatttt

SEQ ID NO: 17069 - DNA, 95 bp, Homo sapiens
gaaacagtagctcaagaacacatggatcctgggaactgaaggttctgccacttgctgggaaaacagcaacagaaggatattaaggagccacccct

SEQ ID NO: 17070 - DNA, 82 bp, Homo sapiens
tggaaacgtctgctaagactgcttccaatgtagaagagatttggccaattgggagagaaatcaactgtaagtgcttaaagac

SEQ ID NO: 17071 - DNA, 90 bp, Homo sapiens
caaaatctgcctggaagataatgttggatgtttccaaggattgtcttcagtcatggccttgggattaaagtgcttccgcatggtccaccc

SEQ ID NO: 17072 - DNA, 83 bp, Homo sapiens
cagtaaggccaaaaatgtgcatactcacagagttagagagagggatggtgggcaccattcccaaactcacagctaaatccaac

SEQ ID NO: 17073 - DNA, 90 bp, Homo sapiens
tcctcaccgccagggagttctgcctgggcctgggtatgtgcactgcgcgtgaccagccgggcccgcagccgcatcctcagggcagggggc

SEQ ID NO: 17074 - DNA, 90 bp, Homo sapiens
ctgtcaacctctcaggggacttgctggacacaacatttgcctgcaacaaggacagcggccagtggcactactttgatgacaacagcgtct

SEQ ID NO: 17075 - DNA, 74 bp, Homo sapiens
gcatgggggtactgctcacacagaggacgctgctcactccggtgccctaccagaactattacgatcgggaggtc

SEQ ID NO: 17076 - DNA, 90 bp, Homo sapiens
caagcagcgccgcggggtgtggggcggacccaggagatgaaatgacaacgtcaaccctccagggtttggattttgaggccaaaaaccagc

SEQ ID NO: 17077 - DNA, 89 bp, Homo sapiens
agagattcagtatcactcgctcccttgatgatcttgagggcactccacagaaggatgttattatcaagtcagatgcaccggacactttg

SEQ ID NO: 17078 - DNA, 100 bp, Homo sapiens
catgctccagctgacaacaggaggagaaacccagcagcagattcaagcagctatgggattcaagattgatgagattgggtctctccacattgccccggct

SEQ ID NO: 17079 - DNA, 74 bp, Homo sapiens
cttgacgaggctgcggtgtctgctgctattctccgagcttcgcaatggaggtggacatctataccgtcaaggtg

SEQ ID NO: 17080 - DNA, 100 bp, Homo sapiens
ttacagagggccgagaaggacaggatcagagcttacaagaccctatgaaaaaattagttgagaaagaagagaagaagaaaatcaaccagcaggaaagtac

SEQ ID NO: 17081 - DNA, 100 bp, Homo sapiens
ggtattcctgcaatccttccgagacacctaagctgctgatgtacagttacccagcacgtgtacctcctcctcctcctattgctcgggctgtagtgccctc

SEQ ID NO: 17082 - DNA, 82 bp, Homo sapiens
cgcctcgaggtgcgcgccggcccggactcggcgggcatcgccctctacagccgtgacagagctgaatgaacctctctccaat

SEQ ID NO: 17083 - DNA, 83 bp, Homo sapiens
cttatcagtgcaggagaggattgtgtctgcttggtgtggagccatgaaggtgctgccttcacctgcctggagactgccttccg

SEQ ID NO: 17084 - DNA, 83 bp, Homo sapiens
cgtggaagcaggactgcgccgcgtcttcctcaagccccagcatgagaccagatgtaagctctcctccatccagctcctcaaca

SEQ ID NO: 17085 - DNA, 100 bp, Homo sapiens
cgtctatttgccacacacttccctgatgaaatgtctggatttggactaaagaaaaaaggaaaggctagcagtcatccaaatttgttcccgacaaggagtt

SEQ ID NO: 17086 - DNA, 74 bp, Homo sapiens
ctaaacttggcaccaagtatggggaacttcctgtgtgccttctatcctgatgacaccccctcactgaaatcctg

SEQ ID NO: 17087 - DNA, 98 bp, Homo sapiens
tccagcatcatcgaggtcccatcagacagaagccctgcagcagctgcagaaggactctgaggccatccgcagccagtacgctcactactttgacctct

SEQ ID NO: 17088 - DNA, 97 bp, Homo sapiens
tgtgtcttgttgcatttggtaatttagcagaacttgtttgtcagaggaatggctgtgaatggatgcctggaaggaccatcctctaattttctcagtt

SEQ ID NO: 17089 - DNA, 75 bp, Homo sapiens
tctactcaagagtggaagttttcacaggtttattttcttgaaaaggctccaggcttcggcttggaaaatcccacc

SEQ ID NO: 17090 - DNA, 89 bp, Homo sapiens
catatacaacacgattcttctaatggatgggaacatgggggagttaaatacctgtgcatcccagcagcggattcaccatctcaaaacct

SEQ ID NO: 17091 - DNA, 100 bp, Homo sapiens
cctgaaggctcctgatgagaggaggcagatcttggagtctctgtggatcgttatgagccggaatgtgagcctgctgttcaccactgtcactacactcttg

SEQ ID NO: 17092 - DNA, 90 bp, Homo sapiens
cacatgaagaccaatttttacgtctagatttccatgcccatggaagaatatactgatgataatgctctgattcctaagaattcttctgta

SEQ ID NO: 17093 - DNA, 90 bp, Homo sapiens
cgctgcagcgcgggccccgcagaggaaggaagccggcgggcggggctcaggcagctgtccaaggacctgttggtacagatttcaaaccct

SEQ ID NO: 17094 - DNA, 50 bp, Homo sapiens
ctgctattgaaagagagtatgcacaggtcactgcagccagaggggtccag

SEQ ID NO: 17095 - DNA, 90 bp, Homo sapiens
tgaagagagagcagagacagctcgtctgatacaggtatccccgtttttacaacagatgttcatgcccctgcttcatgcaatttttgaagt

SEQ ID NO: 17096 - DNA, 98 bp, Homo sapiens
agttcacggatcagcgaaccaaagctgaacaaggcaactgttcaaccaggagaaaagacagcaatggaccgagcagcaaagtggggcaccaaggccct

SEQ ID NO: 17097 - DNA, 82 bp, Homo sapiens
cattcataagaattcggaatgtctgaaagagcagcagaaacgctactttccagacaatcaagctttcgatgatcatgtgatg

SEQ ID NO: 17098 - DNA, 100 bp, Homo sapiens
tgtttcgccacagttcctaccttatgagctcggttttcttatgcttataagagtggaacaggaatgcacggtgcagagtggtgtgcacaggagcctgact

SEQ ID NO: 17099 - DNA, 90 bp, Homo sapiens
ataaatttgtcagctcccatcatgtcccgattcgatctcttctttatccttgtggatgaatgtaatgagaaaattttcagagaatccaca

SEQ ID NO: 17100 - DNA, 75 bp, Homo sapiens
gacagtaaacggcacctaacccccgaagaggaggcaaaccacagggaagctggaaaagaagcggccctggcagaa

SEQ ID NO: 17101 - DNA, 90 bp, Homo sapiens
taattctgctcctctcctgggcggcggggatgggaggcatcttataagccattgttgaagcaagttgtggaggaaatatttcatcccgag

SEQ ID NO: 17102 - DNA, 82 bp, Homo sapiens
ctggaaaaacttcttgccaaccaaattcaaaagaatgctgaaccgggagctgacacacctctcagagatgagccgatcaggg

SEQ ID NO: 17103 - DNA, 75 bp, Homo sapiens
caactgtgcagaagagcgcgacgcccacaacgggtctgtggggaaaggtcacagatgtgacattgatgtgtccac

SEQ ID NO: 17104 - DNA, 80 bp, Homo sapiens
tgatgttacaaatgaacaaggatctcccaggagatcaaagacgctggccttcagacctgatcagactcccaggggcagcc

SEQ ID NO: 17105 - DNA, 100 bp, Homo sapiens
aggaggcggggctttccctaccatcgttgagagagagccttgggacggcagggatggcgaggaggagatgttaaagtaacccatcttgcaggacgacatt

SEQ ID NO: 17106 - DNA, 90 bp, Homo sapiens
gccccttaagagcaaaatgatttatgccagctccaaggacgccatcaagaagaagctgacagggatctagaactagaaataccatttgac

SEQ ID NO: 17107 - DNA, 75 bp, Homo sapiens
caacgaggaggaggaaggcgtgtgctgtgggctggccccggctccatttccaggtgtggtcccaggacagctttg

SEQ ID NO: 17108 - DNA, 75 bp, Homo sapiens
cccggaatgacctgtcgcctgccagctctgatggtcagcaagaggatgaagccagtaaaattgaagctctgcaca

SEQ ID NO: 17109 - DNA, 95 bp, Homo sapiens
agagacctctacttagctcagcaattcttaccttccctgcctctttcttgtcgcagtcagtttcatcatcagatagaaacagtgttacagtactt

SEQ ID NO: 17110 - DNA, 82 bp, Homo sapiens
ggcgcgatgcgtcaagtacactgaaattcatcctgagatgagacttcccaagtaagaagcggaagaggagccgctggaacca

SEQ ID NO: 17111 - DNA, 100 bp, Homo sapiens
ctcgcgagggttggagttttggcgagagtttgtggaagatggcgcctgttgtgacaggttgttgacctcctgtactggagagacattaagaagactggag

SEQ ID NO: 17112 - DNA, 51 bp, Homo sapiens
cagattaaagactttctgaatggaccagtgaggatgaggatgatgaccttc

SEQ ID NO: 17113 - DNA, 83 bp, Homo sapiens
ctggccgatgccacggagcaagtgggccagacaatgcagatcttcgtgaagactctgactggtaagaccatcaccctcgaggt

SEQ ID NO: 17114 - DNA, 98 bp, Homo sapiens
gcttggtttggaaaaatttcattagaggtgtcatggagaaactccagctgggcccagagattctgcagcgggaaaatccaaggcttatttatgccagg

SEQ ID NO: 17115 - DNA, 73 bp, Homo sapiens
tgcatcatcagcatggttgtgggccagcttaagccaatggagatcttcgtggatgatgagacgaagttgacgc

SEQ ID NO: 17116 - DNA, 100 bp, Homo sapiens
gggagctcgtaaggtccctcaaagcgggaaatgcgtcaaagtattgactcggagacaaaaagaggccaagaccaagagtgacagtgggacagctgcccag

SEQ ID NO: 17117 - DNA, 83 bp, Homo sapiens
agcagcgtgcgttcagccctgggcgcacaggcgatgccaagcccagcttcttccaggactgcctgatggaggtgtttgacgac

SEQ ID NO: 17118 - DNA, 82 bp, Homo sapiens
ggataaaaataatgtgaggcgacaagcaacaacaatcatagctgcgactgcatttgcctccagacttgtcagacacagtgag

SEQ ID NO: 17119 - DNA, 113 bp, Homo sapiens
gaagaagacaaccatcttcccccccagaccaaaagaagtagcagaaaccctgtctttcaggattcctgggacacagaggaataggatgagtgataatccacccagaatggaag

SEQ ID NO: 17120 - DNA, 50 bp, Homo sapiens
agaagcttgggctcacttccacaaatgaatacaaacagaagcttgcacga

SEQ ID NO: 17121 - DNA, 100 bp, Homo sapiens
accgtccaccatctgcaagtactaccagaagggctactgtgcctatggaactcggtgcagatcttactgtgccgagatcgctcacaatgtttcctccaag

SEQ ID NO: 17122 - DNA, 74 bp, Homo sapiens
acaagggctatctggtatctgtagatggctacatgaacatgcagctcacaatggaggttgatggtaaggtagag

SEQ ID NO: 17123 - DNA, 75 bp, Homo sapiens
cagctgctgtggaagggctccttcaagcccagcgagcatggagcagcctcagaacaaagtgagacagtccagcct

SEQ ID NO: 17124 - DNA, 74 bp, Homo sapiens
cttggattgtctgcttcaagccctggctcaaaataagcattggggagtcagcaatgtccgttgtgttaaatcag

SEQ ID NO: 17125 - DNA, 74 bp, Homo sapiens
tggcggtccctgtgacctgtggagacacggccagatctgccctccaattctctcgggcctagccgtccttggaa

SEQ ID NO: 17126 - DNA, 75 bp, Homo sapiens
acgcacatcaaagctcctgaacagcaagtgaaaagtaaaaaagctccagttttatttaataaagaaatgattgag

SEQ ID NO: 17127 - DNA, 109 bp, Homo sapiens
cgagccgccccccgagcccgccttctccgaggcgcagaagtggattgaggatttgcctcaaagggcactgcaaaaattgaacagaggaatcccaaggaagctgcctgaa

SEQ ID NO: 17128 - DNA, 75 bp, Homo sapiens
gtgtacttgcaagaaacctcaggacttgagtaacagcaacatgtactaaggctcgtacgtctgcatcgattatct

SEQ ID NO: 17129 - DNA, 82 bp, Homo sapiens
cgattcctcctccttggtcgccgcgtccttggctggcgtgtgtttcccattaaacactaccaggacaaaatcaggccttaca

SEQ ID NO: 17130 - DNA, 101 bp, Homo sapiens
caaggaggttggcttcttcatcatccgggccagccagagctccccaggggacttctccatctctgtcagggatacctcagacaatggcagcttttggattg

SEQ ID NO: 17131 - DNA, 98 bp, Homo sapiens
atgagaatggagaaggtccaggacacgtgggtgggggaagctgagcgctgagaccaagggctaaagctgggagattcatgcattgatcacaggcccat

SEQ ID NO: 17132 - DNA, 75 bp, Homo sapiens
aaatttcctgaacacaccattatgttcttctcaccactaaatccaatacgagttcatattgatattggagctgat

SEQ ID NO: 17133 - DNA, 96 bp, Homo sapiens
acggccagatctgccctccaacatgtcatgctgcccaaggacatagccaagctggtccctaaaacccatctgatgtctgaatctgaatggaggaat

SEQ ID NO: 17134 - DNA, 98 bp, Homo sapiens
aagcagaggggatcgagtacctccgggtcatccttaggcactcaaggagttgcccctggtcctgtaattggacttcaggcaccatctactggtcttct

SEQ ID NO: 17135 - DNA, 51 bp, Homo sapiens
ttgacaccttttgacatgagcatccaggtggcacgcactacccttcttcct

SEQ ID NO: 17136 - DNA, 90 bp, Homo sapiens
cggggctgctggtgggccgcgtcgaagacatggaccagggctacggaggtgatgatgaacagtctacacagatggctgcaagttgggaag

SEQ ID NO: 17137 - DNA, 71 bp, Homo sapiens
ttcaatcccatcatttccagaaaggacatcacaggtttcaggatctgataaagaaaatcaaaaaggtagga

SEQ ID NO: 17138 - DNA, 80 bp, Homo sapiens
cgctggaagccgtgcttcggtatcttgggagtgcatccgccccaacccttttccccctcgtctcctgtgagaattccccg

SEQ ID NO: 17139 - DNA, 88 bp, Homo sapiens
tagctcgacggggctgaccgctctggcccagggtggccctacatcattcgaggaatggcgcccccgacgacgccctgcagcaccgacg

SEQ ID NO: 17140 - DNA, 75 bp, Homo sapiens
tgggcggcccgctctgcacgcttgccagcgcggtggattattgcatcgagcttttagtgtcttcttattcaacac

SEQ ID NO: 17141 - DNA, 98 bp, Homo sapiens
gggcatgcacgtgatactcacacagtggcttctgctcaccaacagatgaagacagatgcaccaacgagccatggcaatgacaggctcaacaccttgct

SEQ ID NO: 17142 - DNA, 100 bp, Homo sapiens
ccatccctgcagcatgaacaaggaactttccatcttacctactttttggactttaagaccataaaggacttcctctgctgaggacccaaactgaacccca

SEQ ID NO: 17143 - DNA, 82 bp, Homo sapiens
gctggtgcatgcgtcgtcggcctctgggcagcagactggcagggtacttccatagacaggaacattctggatgctctgatgc

SEQ ID NO: 17144 - DNA, 100 bp, Homo sapiens
gtgacagggcatgccagagctggttttaacaacctgggcatccagtgtgtgaggaagaaggagattgaggctgccattgagcggaagattcaactgggca

SEQ ID NO: 17145 - DNA, 51 bp, Homo sapiens
agcggcgttggaggccaccgtttccagggtgaatctgtaaaatatttcctg

SEQ ID NO: 17146 - DNA, 100 bp, Homo sapiens
tctgggcttctctgaggcggcgagagatggtcaggtctggagctcgaccgggccaggcaagaagctcttctggctgccattagtgaaaaagacgccaata

SEQ ID NO: 17147 - DNA, 100 bp, Homo sapiens
ctcggccatatggaggggtcatataatacccttgtgtcttcagtttgaggtacctcccataattttaaggggtgctgttggcagcagcggtctgcacaaa

SEQ ID NO: 17148 - DNA, 100 bp, Homo sapiens
gcaggaaatgtgaatctcaggagagagcagccagagtgatgctgttgcatgaaaaagcagaagccctgcaagaagaggtagaagagttactaagattgcc

SEQ ID NO: 17149 - DNA, 75 bp, Homo sapiens
gtgaggcgtgtcaccagtttatcacagggaaagtcctggaggttttccggacagacttgatcacagccatgaaga

SEQ ID NO: 17150 - DNA, 100 bp, Homo sapiens
cagcaagtgaatcaatagcagaagacctggaagaaccatcctataaacgggaaagattgactagtttcacaggggtgacagtccaaagattgacttggcc

SEQ ID NO: 17151 - DNA, 98 bp, Homo sapiens
tcgggacaccccggaagctgggaaatggaggaactctctggaatgaaaaataaaatacaagtagttgtgcttgaaaacgaagggctccagcaacagct

SEQ ID NO: 17152 - DNA, 100 bp, Homo sapiens
cgccgacgacgaaccggggcgacccgggcacatcaacgaggaggtctcctctgagcctccggcctccataagacccaaaacagatgacacctcttcccag

SEQ ID NO: 17153 - DNA, 75 bp, Homo sapiens
gctggcgcaggacgccgacatcgtgtgccgctgccagagataatagtagcagaatttcacaaaaaaatcaaagag

SEQ ID NO: 17154 - DNA, 83 bp, Homo sapiens
gtcagaaggggaacggatctgtgtgcccacagctcctggagccccacagggatgtttcagcagcccctgagaaggaagaggag

SEQ ID NO: 17155 - DNA, 82 bp, Homo sapiens
gggacaggaagtggccgtagcggcttgttggataagctgatcttgcatctttaatggataaaacatttgagagaaagttgcc

SEQ ID NO: 17156 - DNA, 101 bp, Homo sapiens
ctggcagaacggcgcgactgcaaagattacgtgagcatcttcgtctgcagtgattggcagctcctgcgggtgctggcccagcagggggagtacagtgaggc

SEQ ID NO: 17157 - DNA, 90 bp, Homo sapiens
accctggtggcctttccctccagctctgtctatcctaccaaggttgactatagtcaatggggccaatggagccaagtgtatggaaaccca

SEQ ID NO: 17158 - DNA, 100 bp, Homo sapiens
ctgggacaacgcgtacgagttcaacctcagcgctctgaacacggaaaagaggcgcagggagcaagaaaataaatatttagaagaactagctgagttactg

SEQ ID NO: 17159 - DNA, 100 bp, Homo sapiens
ccgcttaccgcatctggctggagccctgcattcgcggcgtgtgcagatcatgacaagatgtttaagatgagtgaaaagatattactcctgtgtgttggag

SEQ ID NO: 17160 - DNA, 98 bp, Homo sapiens
ctgtacctgccttgggatccggagggaggaagctgggacacccgggagtcaggaaatgttcttcagtgccctactccacagccaaaacacctcaccca

SEQ ID NO: 17161 - DNA, 90 bp, Homo sapiens
gcttactatgagtctatatatcctggggaatttaagatgccaaagcagctcattcacatacagcatgatgtgatgccagccacttactgt

SEQ ID NO: 17162 - DNA, 100 bp, Homo sapiens
gaagcatattcacgagcatgcgaaggcgaagcggcacaacctggaggtggtgcggagctcctgtttgacggtattaagaaacatcgagtcactttgcctg

SEQ ID NO: 17163 - DNA, 100 bp, Homo sapiens
gaccctaaaaatggcgattctgcaaccaagcacctgaaacagcaggtacgttgtatgttaaacatttggggtgtgatgcttttcattagattgtcatgga

SEQ ID NO: 17164 - DNA, 74 bp, Homo sapiens
attctcacctcctcctccgcctccaaagtcgcgcttccacagcgcggcacctgtacctccggggtggcgctggg

SEQ ID NO: 17165 - DNA, 100 bp, Homo sapiens
gagagtgggaacatgacgcaggtgcaggtgtctcttctcgccctggcggggaagaggctgggaggcggcagaatgcagccagaggagggcacaggctggc

SEQ ID NO: 17166 - DNA, 76 bp, Homo sapiens
cctttgccctggcaaacactggaatcctactttttctcattaaaacttccttttggcaaaacaacagtgatgcatt

SEQ ID NO: 17167 - DNA, 98 bp, Homo sapiens
cagtcagaagaaggctgctattgaaagagagtatgcacaggattctggactctacttataatatccctaactgctggattctcctgttgcagcttttc

SEQ ID NO: 17168 - DNA, 72 bp, Homo sapiens
gctgcctcagttcttagcgcaggaggcagttccctccatccccatcagccccgaagatcccctcctggcaga

SEQ ID NO: 17169 - DNA, 100 bp, Homo sapiens
aactagagccgcatcacatggggacttctgcaaatacagagactcggattaaagtgtgaagcctcagtttaggtcatctggtggttcagaacactcaaca

SEQ ID NO: 17170 - DNA, 100 bp, Homo sapiens
tcattttgattgtagtagcagtggaggatattaatatgattctctcaatgatggatatcaacccaggtgatactgttttggaagctggctcaggctctgg

SEQ ID NO: 17171 - DNA, 83 bp, Homo sapiens
gtttcatcctggtttatagcctggttaatcaacagtcttttcaggttgcagagaacacatcttagaagatgaaaaacctgaat

SEQ ID NO: 17172 - DNA, 100 bp, Homo sapiens
gacgacctgatacgccactgtaacgggaagctgggcagctacaaaatcaatggccggacgaaaatagtgacgagaggctgcgagactgtggaaatgaccc

SEQ ID NO: 17173 - DNA, 100 bp, Homo sapiens
cctcagcagcccccaccacggccggaccgaaggtgcggcggcggaggggagccagggcgccccagcagtgaatggtagtgtctagaaagggtatgtccct

SEQ ID NO: 17174 - DNA, 100 bp, Homo sapiens
attatgttcccatgaacccaaacctgtccagtgaagacccagttcagggtcggagggagaagatggctttcaggtagagttggagctagtggagttgact

SEQ ID NO: 17175 - DNA, 74 bp, Homo sapiens
gagagagaggagtgcatcaaagattactcccaggctacagcatgctggccatagggattggaaccctgatctac

SEQ ID NO: 17176 - DNA, 75 bp, Homo sapiens
gtcatcggttcggtaaagtttctgttctctgtatatttgccttccctccatgatctccaacactatccgataaag

SEQ ID NO: 17177 - DNA, 90 bp, Homo sapiens
agcatcccacattaagtcaacgggcaacgggcatgaggaggtagttgcatgcgcctgggatggacagacatatatcattgatcacaaccg

SEQ ID NO: 17178 - DNA, 80 bp, Homo sapiens
tactgagcctgttggaggaactggcccggaaacaggaggacccttatgccagcctggaccatcttggaggcagtgtagga

SEQ ID NO: 17179 - DNA, 98 bp, Homo sapiens
tgacagatgcctccagctgctgttgaagctgttgaacacatgcaggttgaaaggttccagtgcccaagatgatcagttggccttatttcctcagtgga

SEQ ID NO: 17180 - DNA, 101 bp, Homo sapiens
gctaagacgccaggacccactggaagcctagaaatgtccacaagaatcggaatgtcagttaatgctattcgcaagcagagtacagatgaggaagttacatc

SEQ ID NO: 17181 - DNA, 83 bp, Homo sapiens
gggagatgcagcatcccagtttttggtcttctgtcaaaaacacagggatgaggctttaccaagttttggagggagagaataag

SEQ ID NO: 17182 - DNA, 100 bp, Homo sapiens
cgccaagggccccaatgagtggcacacagtctactatcaccgacaggctgtatcgcatccattgaatactgtgaccgaggacatgtacaccaacgggtct

SEQ ID NO: 17183 - DNA, 74 bp, Homo sapiens
aagcagctgacttcccagcagcatgcgattcttattgaccttggtgtattttgacctacgaattggagatgaag

SEQ ID NO: 17184 - DNA, 98 bp, Homo sapiens
tgctatggtcatgccagcgaatgtgcccctgtggatggattcaatgaagaagtggaaggaatgcgtccgtctccaagagagtatgaagagagtgcgtc

SEQ ID NO: 17185 - DNA, 50 bp, Homo sapiens
cttcgaggaccttacagataggaacatacaggggcaagtgtccgagtggt

SEQ ID NO: 17186 - DNA, 50 bp, Homo sapiens
gcttccccggagcagccgacagccaggtgactttatacacactttgggag

SEQ ID NO: 17187 - DNA, 75 bp, Homo sapiens
agaagaggaggttgcccagaagaaaaaggacttggtggggaaacttaaagatgcttcgaaaagcctggaaagagc

SEQ ID NO: 17188 - DNA, 100 bp, Homo sapiens
gccatgctgggtgcagtagctgcccaggaagtgctgaaggaggcagttccctccatccccatcagccccgaagatcccctcctggcagatcccagtcaag

SEQ ID NO: 17189 - DNA, 100 bp, Homo sapiens
tctccctcgagaagctccagatggcgtcttccgtgggcaacgtggccgacagcacaggttgttcaaggctacaagcccccggggagagccccaggatgga

SEQ ID NO: 17190 - DNA, 100 bp, Homo sapiens
agcgtcaggcgcttgatttccctgagtcccggtgcctcagctgcccagtgcccacgggccattatgctgtgatgaacaaccccaccagacagcctttggc

SEQ ID NO: 17191 - DNA, 100 bp, Homo sapiens
cttttgtggcgctcttgctcctctctccttggcctctcctgggatcggcccaaggccagttctccgcagcacaggcgtgtctccttcaagggggtctctg

SEQ ID NO: 17192 - DNA, 100 bp, Homo sapiens
tatcgttctatttctctagctattgccttattttttctcatggatgttcttcttcgagtatttgtagaaggagccaggactgtctccagtttggtcctcc

SEQ ID NO: 17193 - DNA, 98 bp, Homo sapiens
tatgtaatgtcaactttactgagaattttccacctcctgacacaacaccactcactcctctggtgcaagtgtggtagctattgacaacaaaatcgagc

SEQ ID NO: 17194 - DNA, 83 bp, Homo sapiens
gtgggaggccgctgccgtcgcgcgccttgataccatggcctgggagaccatcctgatggatacactggaggacaacatccccc

SEQ ID NO: 17195 - DNA, 75 bp, Homo sapiens
ggaagcagccgatccagcctgcggagcctgtggggcagaacaactctgctcatggtgattacatgcaaaataacg

SEQ ID NO: 17196 - DNA, 106 bp, Homo sapiens
cagtgagggtgtacaaatacccctttgaattaattatggctgatatgttcaaggaatgagtgatttactttcccctcttttatatgtgatggaaaatgaagtggat

SEQ ID NO: 17197 - DNA, 100 bp, Homo sapiens
cgaagtcagaatttcctgtgttccctttgccgctcctggagttcactggttgactactggcaaaattgctggagctggccttttgtttgttggtggaggt

SEQ ID NO: 17198 - DNA, 82 bp, Homo sapiens
agcggacggattcgattcaacggggttccggaccgcgctgcgctatggagcaggaccatgaatggcacctacaacacctgtg

SEQ ID NO: 17199 - DNA, 90 bp, Homo sapiens
cttgttgtggatgaagctcacaggttgaaaaaccaaagctccctgctgcataagaccttgtcagagttattttaccaagaaaatggtttg

SEQ ID NO: 17200 - DNA, 75 bp, Homo sapiens
cacccagctggattcaacagtggaagagggtggaatgtaactcaaaactggaccccacccagacctcgttcctca

SEQ ID NO: 17201 - DNA, 74 bp, Homo sapiens
aaaagaatgaacactgtccttcaaaacgagccggaaggtggtggtcgtacgctgtgaaggcatcaacatttctg

SEQ ID NO: 17202 - DNA, 99 bp, Homo sapiens
gaaagaaacaagttcttggcaagagaggcatcctccttgaagtatttggctgaggagttttcaatcccaagcagcccgacggccatggaggctgaagag

SEQ ID NO: 17203 - DNA, 98 bp, Homo sapiens
ccatctcacatttccaagtacattctcaggtggagacctcttgatgatgaacgtatggagcaaatgtcaaatatgactttgatgaaggaaaccataag

SEQ ID NO: 17204 - DNA, 86 bp, Homo sapiens
cagaagttggcaggagcatgggcttcggaggcctatagcccgcagcttccttggaaatcattgactagcatcattgaatattatta

SEQ ID NO: 17205 - DNA, 80 bp, Homo sapiens
catccctgtgtgtgccgtgcgaggacgcaacgtcgagaacatgaagaatgggtaccacagaccatgtcatcgtcctggcg

SEQ ID NO: 17206 - DNA, 100 bp, Homo sapiens
caggaaatagaaatggggcttaagttccgtgaactcagtactgatgcccagtggggcattcgtcttggtaaacttggtgaaatgcacaattttgaggaag

SEQ ID NO: 17207 - DNA, 90 bp, Homo sapiens
gtccaagggaactgggtggtgaagaggtcagaagccaatgacctggccctgaggctggctcgccactacacgggacaccaggacgtggtg

SEQ ID NO: 17208 - DNA, 75 bp, Homo sapiens
gacactgtccgaaccctgagacactgcaggactaaccagtttgcaaacttccttgataacatgcttttgcgaagt

SEQ ID NO: 17209 - DNA, 73 bp, Homo sapiens
agtttcctgaggcctccccagccacgctttctgtacagcctgcagaactgacccattggtggtggaactttca

SEQ ID NO: 17210 - DNA, 97 bp, Homo sapiens
ttccagaaggctgtagaccagagtatcgagaagggcctgtcctcccaaagccaactctaaggagaggagaggaagagcagttcttggggcagagttg

SEQ ID NO: 17211 - DNA, 50 bp, Homo sapiens
ctcttctccctccccttcttgctcctttagcggcagagttttccgagtga

SEQ ID NO: 17212 - DNA, 100 bp, Homo sapiens
tccgaggattgcaaccaggcactactgaccaagatcttgtcaagctgtgtcagccagttcttcgtaagtacatcttaaagctgtcaagatggttctagca

SEQ ID NO: 17213 - DNA, 83 bp, Homo sapiens
caaagattgcattaggagcgaacagcgctgcagaaatagatggcagcttcgtgtcagaactgtggctgcaccatctgtcttca

SEQ ID NO: 17214 - DNA, 83 bp, Homo sapiens
tagacatagctggcaagagtattttcgtggtgaccattgtgaggtagatattttgttctaattttccagatgaggaagctgag

SEQ ID NO: 17215 - DNA, 75 bp, Homo sapiens
cgacggcggcggtggcggcttggacgactcggagagccgggcgaccattgacgaggtggagacggacgtggtgga

SEQ ID NO: 17216 - DNA, 83 bp, Homo sapiens
caatttgtggaaggcgagttctcggaaggctacgatcctacagtggagaataacgaggagaagaccttttcatgtgtatggac

SEQ ID NO: 17217 - DNA, 83 bp, Homo sapiens
agaccctccagcgctgcctggaggagaatcaagagctccgaggccaccagcttgggctccccacggagggcagcaagtgggac

SEQ ID NO: 17218 - DNA, 100 bp, Homo sapiens
ctgacagatgccagcgtagctgaatccagtaccaaaaacgtcaacaacagttttacgatctgttctcagggaagctgagatggagatgagtgggcagcag

SEQ ID NO: 17219 - DNA, 74 bp, Homo sapiens
ctgcccgtatgaccgcgccgggcgccgccgggcgctgccctcccacgattgccctcctgaagatcctgttggct

SEQ ID NO: 17220 - DNA, 100 bp, Homo sapiens
ccggctccggcttctgctgttgctcttctccgccgcggcactgatccccacaggctgcctgctgtttcccggggagatcatgaaacgaggtcgccttccc

SEQ ID NO: 17221 - DNA, 82 bp, Homo sapiens
gagccggagctgggcgcggattcgccgaggcaccgaggcactcagaggagggagtgaggattctttggacaccagcctgaga

SEQ ID NO: 17222 - DNA, 101 bp, Homo sapiens
gtcggatggggcaggatggctgcgttgacacgtcttatttaatccacatcatagaaatgacatcagatgtaccatcactgggtccagccattgcctctgga

SEQ ID NO: 17223 - DNA, 76 bp, Homo sapiens
agatgcaaaaccagcgtggcggccgcgctctcttccaggacatcaagggcagccaagcccagttgaaggaggtgtg

SEQ ID NO: 17224 - DNA, 74 bp, Homo sapiens
gagctggagcggcagcagaaggaggaagaaaggccaaggatattataaatgcagctcgggaaagcctcgcgaag

SEQ ID NO: 17225 - DNA, 100 bp, Homo sapiens
gggaggggcgaaggcgggcggcagaggcgatcaggcccggctgccccaagctacaggggagaccttttccatgtgtatcccacctcccaatgtcactggc

SEQ ID NO: 17226 - DNA, 100 bp, Homo sapiens
tctaggccttttagaaaacatggaggcaagtgaggcctatctggttggcctttttgaagacaccaacctgtgtgctatccatgccaaacgtgtaacaatt

SEQ ID NO: 17227 - DNA, 83 bp, Homo sapiens
agagctttcacgaaggcaccgacgtcatcatgctgaccaccaatcagatccgtaagactgcctctgtcaccgggtccctccac

SEQ ID NO: 17228 - DNA, 100 bp, Homo sapiens
cagaggccccgagccccgtggatccgctggagcggagccggccgtacgcggtgctgcgagggcagaacctggttccatcaccgggacagcttcaacacag

SEQ ID NO: 17229 - DNA, 96 bp, Homo sapiens
tcttcgaagtgaccagcgctaacgttgtcaaggacccgccctccaagtacgtggcacaccagattaatattggttattatttgacattactgtttt

SEQ ID NO: 17230 - DNA, 95 bp, Homo sapiens
cactaagctaccagagaatcaagctatccaaatgcgattagttgatgtggcctgcaaggacagaactgtaccgctctctttttggccagctccac

SEQ ID NO: 17231 - DNA, 98 bp, Homo sapiens
atccatgaaacgtaaacttccttttactattagcccatcaagaaatgaagaacgagattcagacacagggtgtcaaattgagaaccaggtagatcccc

SEQ ID NO: 17232 - DNA, 100 bp, Homo sapiens
caaagaaaaattggagcaggctgccattgtcaaagagaagggaaccgtatacttcaaggaatggaaactgaaagtggaaatcaggaaaaggtaatggaag

SEQ ID NO: 17233 - DNA, 78 bp, Homo sapiens
ccagatgtacttgtgcttcctgctggccgtgctgctgcagaattcagcttagagaactatcaacacaggacaatgcaa

SEQ ID NO: 17234 - DNA, 74 bp, Homo sapiens
tgacgggctggggcaacacgcagtactatgatcactggcgatacatctacccactggtgtgtgctttctttgtg

SEQ ID NO: 17235 - DNA, 101 bp, Homo sapiens
gtctcaagggcggttcctgggcaccgagccggagccggatgcagtagggctgaagtgcagtagtggagtagcgcaatcatggctcactgtagcattgactc

SEQ ID NO: 17236 - DNA, 50 bp, Homo sapiens
ttggacttccagcctccagaactgtagagttggctttgtgggacacagct

SEQ ID NO: 17237 - DNA, 100 bp, Homo sapiens
gacggagtcctgttccaccttcagagcgtcacggcgtacgccctcatggggaaaatctccccggtgactttcagaaccgggctgtgggtcggcccaaggg

SEQ ID NO: 17238 - DNA, 96 bp, Homo sapiens
actcccaggctcaagcaatcctaccatgtcagccttcccagtagctggaactacaggccagtacgggatccctgaaccatggaattttccttttcg

SEQ ID NO: 17239 - DNA, 75 bp, Homo sapiens
gggcccgcgctgcagcgtggatgagcctcggggacactgtgccgaatgaagaattacatgaacgacagccttcgc

SEQ ID NO: 17240 - DNA, 51 bp, Homo sapiens
tttcgacatgacaggtcactagaggaaatcacattctgcctgatgaagatc

SEQ ID NO: 17241 - DNA, 90 bp, Homo sapiens
cgccttttgccacctttccctttatttccggagaaatgagccgtcagactgctacagcattacctaccggtacctcgaagtgtccaccat

SEQ ID NO: 17242 - DNA, 75 bp, Homo sapiens
ccgaggcctcgggcgggggctggcccggggttccagttcacggcgaagcagctggagaagctggccaagaaggcg

SEQ ID NO: 17243 - DNA, 100 bp, Homo sapiens
ggaactgatggcgttcctgttacctctcatcattgtgttaatggtgaagcacagcgattcccgtaaaatgtcggttccaggaccttaccaggcggccact

SEQ ID NO: 17244 - DNA, 103 bp, Homo sapiens
tcgggacctcttcatctgagagcactcatccagaaggccctgaggaagggttatgatgatggctacgggggtgaatatgatgaccagacctatgagacttatg

SEQ ID NO: 17245 - DNA, 100 bp, Homo sapiens
cttcggcagtccacccaccgccgccgcctcccagtttgtttcagtgttggaaggcgtgttgtctaagctgtcaaggtatgatgaaggcactttcttttca

SEQ ID NO: 17246 - DNA, 82 bp, Homo sapiens
agaagatctacctgtacacgcacctgaagcaacagcccatctggtgaccctggcaaagatgagagtgcacatttcgtcctgc

SEQ ID NO: 17247 - DNA, 104 bp, Homo sapiens
ctggattgtgctgcggatcaaccacgcactcctcaacaagaaggacgtggaagaggcagtctcgatacagaaggtggtcatggcactaggagactacatgggcg

SEQ ID NO: 17248 - DNA, 90 bp, Homo sapiens
ggaacgaggggtgaagcggcccaggtgaggaacccttaggagaaatcttgagagtggacagcaattgtgaagatcgccagagagttctgt

SEQ ID NO: 17249 - DNA, 124 bp, Homo sapiens
tcactgcactccatactgaggaggaaaattataatgtggttgcaccaggctgtctttcacaatccagacacgaagatcgattgagaagttattagaatgggaaaacaataggttataccacaag

SEQ ID NO: 17250 - DNA, 98 bp, Homo sapiens
gcccgagaaggtggacgtgctggtgtctgagtggatggggacctgcctgctggtgacagagctgaatgaacctctctccaatgaagatcgaaatctcc

SEQ ID NO: 17251 - DNA, 75 bp, Homo sapiens
tggtacatcatgctcagatattgcggagggcgtggtgaccaagatgaagatgcagaggaccattgtcatccgccg

SEQ ID NO: 17252 - DNA, 100 bp, Homo sapiens
aatgctaaatttgtgaatgctgtgtatgataccttacttaatactagaccatttgtttgtgactatgaagggtgtggcaaggccttcatcagggactacc

SEQ ID NO: 17253 - DNA, 50 bp, Homo sapiens
gggcgtccccaacgggcgcatgctagtggcggttggcaggaacctgaaaa

SEQ ID NO: 17254 - DNA, 74 bp, Homo sapiens
ccttcggcagtccacccaccgccgccgcctcccaggaggacccctcgctggaaaggcattttaagggccaccga

SEQ ID NO: 17255 - DNA, 100 bp, Homo sapiens
caaactgtatgatatggcagatgtatgggtgaagatccaagatgttctacagtttcacaataaggtgacctgcttcatgctgcatcacattgaagaaccc

SEQ ID NO: 17256 - DNA, 75 bp, Homo sapiens
ctacagctccggctgggcatgtggacgccctgcttcatctggcccgccagaatcgggctgtggcccgcacagccc

SEQ ID NO: 17257 - DNA, 102 bp, Homo sapiens
tctgtaaacctgataacactgcatgaaatgttagaggtcacggtctagatcacattctcgatccagaggaaggcgatactctcgctcacgcagcaggagcag

SEQ ID NO: 17258 - DNA, 75 bp, Homo sapiens
gcccactcaaagtttcttacggcatagatacacctatgaagattataagaacactgcagaatggcttctgtctca

SEQ ID NO: 17259 - DNA, 75 bp, Homo sapiens
caccgttcaacttctgctgactctgcttcctcctccgatacttcccgcagtcggacttgtttacactgggcatgt

SEQ ID NO: 17260 - DNA, 98 bp, Homo sapiens
agttgggaggacccgggacaccgcacagccgggaaatgaaccgtgcccggaaaaaaaggctgaatattattattgtggctgaaggagcaattgatacc

SEQ ID NO: 17261 - DNA, 82 bp, Homo sapiens
ccgtttgttcaggaaccaccagtgacagattatttctcaaactctgaggctgcggagttcacacattgaaatctgtcatctt

SEQ ID NO: 17262 - DNA, 108 bp, Homo sapiens
ccgggagttgaagagggctgcaaggtgggaagtgaagtcagtgcctcagttgctggaatccaaatgagactcagaacaatagcacaagctggcctgtcttcaaaagca

SEQ ID NO: 17263 - DNA, 98 bp, Homo sapiens
ggaccttcacccattgtttgatgagacctttgaattgcctcccccagggaagaacttcactatgcctcggtggtgtttgattctaacaccaacaggat

SEQ ID NO: 17264 - DNA, 74 bp, Homo sapiens
gagatatttgcagtgtagttggccagcaagctactgaagaaatgttggaggagatgttaaagtaacccatcttg

SEQ ID NO: 17265 - DNA, 83 bp, Homo sapiens
ggggcacagaccaccctccactgagtgcggagcagccaagacaatgcagatcttcgtgaagactctgactggtaagaccatca

SEQ ID NO: 17266 - DNA, 100 bp, Homo sapiens
cgcagactttctcaactcgttcggtatgtcctggatgatgaatacacaagctcagtaggctccaaatttccagtccggtggtccccaccggaagtcctga

SEQ ID NO: 17267 - DNA, 100 bp, Homo sapiens
ctttattaaaagtgaatgtttaaataatattggtgactcctctcctctgattagagccactgttggaatagggtttggtggtctggaagcaatgaatagc

SEQ ID NO: 17268 - DNA, 98 bp, Homo sapiens
attcattctactacatcctgttttgctccaagggtgcctgataggtgaccaagaatatggcccaggtgaccaaagccctggacaaggccctgagcacc

SEQ ID NO: 17269 - DNA, 82 bp, Homo sapiens
accgggaccagcggagcgcctcccgggacaggcgacgacgcagaacatgctgtttgagagcatccaggagggcaagtacgag

SEQ ID NO: 17270 - DNA, 124 bp, Homo sapiens
tttcacagcaaccagcttagtgctatcattgacttggtctgttccactttggggatgaagccgccaccggcaactaacctatgaccttctgacctctgaactcttcacccaatgatgacctgac

SEQ ID NO: 17271 - DNA, 80 bp, Homo sapiens
gctcccacggattctacattatggtaatctgtaagtcagatgctccaacaggggatgttcttcttgatgaagctctgaag

SEQ ID NO: 17272 - DNA, 82 bp, Homo sapiens
cctggctccggggtggggggatcgggcctggatcggctgccggtgcctgccagtggggttagctttatacgtctacgaatat

SEQ ID NO: 17273 - DNA, 83 bp, Homo sapiens
cttggctagtgcaagccttgtttattttcctcaccactgaatctacagcttggattagaagaacaagaaagactccacctact

SEQ ID NO: 17274 - DNA, 90 bp, Homo sapiens
tcgcatccaaaatggaatccgagacagaaagaggaccttagttatgccccgtggtgccctgcttgtcaaaatcttcaaccggaatgggaa

SEQ ID NO: 17275 - DNA, 101 bp, Homo sapiens
cgtggtggaggatgagattgatcagtacctcagcaaacaggacgggaagatttacagaagccgagacccacagctgatcaactcactatcctgaaggtcca

SEQ ID NO: 17276 - DNA, 100 bp, Homo sapiens
ctatgtggcagatatcgaggtggatggaaagcagtgtgactatgaaaatgttccaaccactgtatttactcctttggaatatggtgcttgtggcctttct

SEQ ID NO: 17277 - DNA, 95 bp, Homo sapiens
gggtgctggtcaccggggcaggcaaaggcctcctttcatgtactctgcccaacggttttgggggacaatctgggccagaaggggagcgcagcttg

SEQ ID NO: 17278 - DNA, 99 bp, Homo sapiens
tgaagatgcagagcccatttcagaacctgagaaagtagagactggtgggagatgccatcccagcagtggaggtgtttgaaggggagccagggaacaagg

SEQ ID NO: 17279 - DNA, 107 bp, Homo sapiens
ctgaatcctgaattttccttgatggtcaaaagattaaggatattaatgcacacgcctgtgttactggtaaacccatcagccaagggggaatccatggacgcatctct

SEQ ID NO: 17280 - DNA, 51 bp, Homo sapiens
gcaagagctggatctcgtctttctgagggaatcctatggctgtggtcagca

SEQ ID NO: 17281 - DNA, 100 bp, Homo sapiens
gagcttcaggaatgccaggagcaggatctgcagaagacgcagggctcaagatgatgaagaacgagagcttcaaatggatcctgcagactatggaaagcaa

SEQ ID NO: 17282 - DNA, 102 bp, Homo sapiens
cctggaccctgcccagcagaatttgtatagagatgtgatgttggagaactacagaaacctggtctccctagtggtgaactatgacaatgtagtggacacagg

SEQ ID NO: 17283 - DNA, 73 bp, Homo sapiens
ggcactgagcccagcctcccggatgggttgaaaaataccggccacagaccctgaatgatctcatttctcatca

SEQ ID NO: 17284 - DNA, 74 bp, Homo sapiens
ggcaagttgttggaacagtgacttgcaagaagaacatgagctgcctgtggacatggaaaccatcaacctggaca

SEQ ID NO: 17285 - DNA, 80 bp, Homo sapiens
cactgcagcactggtggaacttgagatggcccactgcgtgaccttggttcagctgtccatttcctgtgaccatctcattg

SEQ ID NO: 17286 - DNA, 100 bp, Homo sapiens
ccagttgggatcaaatgtgagcctatggatcaagggaagaggaagaacgtctgagaaataaaattcgagctgatcatgagaaggccttggaagaagcaaa

SEQ ID NO: 17287 - DNA, 50 bp, Homo sapiens
cgttggtcctgtgcggtcacttagccaagccatccatttcaaggccaata

SEQ ID NO: 17288 - DNA, 120 bp, Homo sapiens
gcacaaagagcttgctccctacgatgagaactggttctacacgcgagctggtgctggagaatctggtaaaagcaccattgtgaagcagatgaggatcctgcatgttaatgggtttaatgg

SEQ ID NO: 17289 - DNA, 90 bp, Homo sapiens
acttgaggggaatttctgcaacccatagtcaacgattacatggtgctggaatacagagaggaaccaaacagataaaaatccttgcctgca

SEQ ID NO: 17290 - DNA, 90 bp, Homo sapiens
ggaattcgccgtgcccgagaatagctccgtccagcaggagaaaatgcacaagctcttggaggtgtacgagcagctgggtggggaagaaga

SEQ ID NO: 17291 - DNA, 75 bp, Homo sapiens
catcccatctcaatcagaattactagattttctctcaaactacgaggaaccaaatggcgagacaccatcatcttt

SEQ ID NO: 17292 - DNA, 105 bp, Homo sapiens
gcgagctgtcagagcccggggacggcgaggccctcatgtaccacacggaaagcaatctcccgggcaggcctccagcatctggctcctgcacatcccctcagcctt

SEQ ID NO: 17293 - DNA, 75 bp, Homo sapiens
aaatgccagaaagaggatttggccagagcgttttgtatcttgagccagatgattgtgcatccatttacatcttta

SEQ ID NO: 17294 - DNA, 100 bp, Homo sapiens
gaaaaagttctgggtgatactgaaggggtcgtcactgtactggtatagcaatcaaatgccattacaacacaagctagcatggagtttcgacggaaagggt

SEQ ID NO: 17295 - DNA, 50 bp, Homo sapiens
aggcatcatccgctatgcaattgggatgagacaaaaggacccagtgaaag

SEQ ID NO: 17296 - DNA, 101 bp, Homo sapiens
ctttactgggggatttgcctcagatggagttacagttcgaagcattcagcaaacaatggcaaggcagagccaccagaaacgtacacctgattttcatgaca

SEQ ID NO: 17297 - DNA, 75 bp, Homo sapiens
cgcagtggtcgcttcttctccttggctcatgctgaagattcggttatggaccatcatttccggaagccagcaaat

SEQ ID NO: 17298 - DNA, 71 bp, Homo sapiens
ggttcagccctttgatgaccgcagcagcattccaaaatatgcccggtgctatccgcccagctgctcctaga

SEQ ID NO: 17299 - DNA, 75 bp, Homo sapiens
ggggagggttctgctgcttcgaaagctggatgaaaactttcggaagagaaagttgcctgtggtaagttcagttgt

SEQ ID NO: 17300 - DNA, 78 bp, Homo sapiens
caggagaactggtcgccatcaagaaagtattgcaggacaagagatttaagggtttggtgcaattctccattaatgaag

SEQ ID NO: 17301 - DNA, 98 bp, Homo sapiens
atccgccgacgactgcaagcagtttcgggaggagttcaaccgaagcagcagttttgggaatttcgatcgttttcggaataattctttatcaaaaccag

SEQ ID NO: 17302 - DNA, 100 bp, Homo sapiens
gggagaatgtgacctaatttatgacaaatacgtagagctcaggacagagcgggatgccaccagcttgtccaaagggaagttccaggagctcctggtgggc

SEQ ID NO: 17303 - DNA, 50 bp, Homo sapiens
atgaagtgcagaggtttttttctgctggaaggggtctgtgtacatcagca

SEQ ID NO: 17304 - DNA, 100 bp, Homo sapiens
cttctcgcgggccggggccacgctcagcgccgagggcgagatcgtgcagacttccttgtgaaacctcctagtagaaaaagttcttgggacaaacttcatt

SEQ ID NO: 17305 - DNA, 74 bp, Homo sapiens
gtcccagcaggagcgccaactcaggcagcttggacacagctgaacttcacagtagccattgacttcacggcttc

SEQ ID NO: 17306 - DNA, 96 bp, Homo sapiens
gccgtgcccacggtgttcgcctttcaggaccccacacagttaagtgggcagaccaacatccacctcagcaaaaacttcttcctgacgaatcgcgcc

SEQ ID NO: 17307 - DNA, 83 bp, Homo sapiens
gtcgttcccgctgcgctaggggaagcgggcagggttaccttcccgccaatgtagaccggagaccagccactctccagagaaaa

SEQ ID NO: 17308 - DNA, 100 bp, Homo sapiens
caagacagtgcctggataccttcgaatagggactaaaaacagcccttgtagaaagagatgatttctcatcagggaccagcagcagaagcactaaattgat

SEQ ID NO: 17309 - DNA, 100 bp, Homo sapiens
tacaaaataaaattgatttggtaaaagaaagtcaggctaaagaacaatacgagcagatccttgcatttgtccaaggcaaaagctgtgcctcacttctgcg

SEQ ID NO: 17310 - DNA, 95 bp, Homo sapiens
tgctgtgcacctgggggtacagccacatgaaatgaagatcacctctgcctatctacaggacattgagaatgcctataagaaaacctttctccctg

SEQ ID NO: 17311 - DNA, 90 bp, Homo sapiens
cggacggggagctgaacgtggacagcctcatcacccggctgctggaggcaaacggggattcagcgtccgatcctttggaacagggactca

SEQ ID NO: 17312 - DNA, 100 bp, Homo sapiens
aggtgaccaaccccaaggaggacgagggccggttgccgggcgcgggcgagaaaggcctacaggatgatgaggatctacaggcgctgctgaagggcagcca

SEQ ID NO: 17313 - DNA, 100 bp, Homo sapiens
gatctgtcgaagagccctgacatgcagggaagccaccagctgctcgtcgtatcagaggagcagttcaagttatcaggaactgttgccgttattacatcag

SEQ ID NO: 17314 - DNA, 88 bp, Homo sapiens
tgcattgcccgactccgtaggagcgcgggggcggctcctgctcttcctggactcctgagcagaggaacttagtgatttggcccgtgac

SEQ ID NO: 17315 - DNA, 98 bp, Homo sapiens
taaaaatgaaacaatgctttctcctcgagaaaagattttctattacttcagcaacagtccttcaaagtataaatcaaagccattctgtgaaaaactgc

SEQ ID NO: 17316 - DNA, 75 bp, Homo sapiens
ctgtacaagtggaccaactatctgagcggacccggtcagcccaaggagcaggggtccagcagctctgcggaggca

SEQ ID NO: 17317 - DNA, 147 bp, Homo sapiens
cagagttggtgagcagcgctctggggctcgccttgtatctcaacaccctgagtgcggatttctgctatgatgacagcctgcctagggtagttaaaagacgagtgaatgctctcaaaaacctgcaagttaaatgtgcacagatagaag

SEQ ID NO: 17318 - DNA, 74 bp, Homo sapiens
gttatccagcacctggaggatacctgctacctgtgagaattatgaagatgatgacctagtaaattctgatgagg

SEQ ID NO: 17319 - DNA, 82 bp, Homo sapiens
tcagtctgggatatggcatcgtcaagttgaaggtcgaggagctggaaggcgagcggagtcggctggaggaggaaaagaggat

SEQ ID NO: 17320 - DNA, 98 bp, Homo sapiens
ctgctggcagccctggtcctggcccaggctcctgcagctttagcagatgttctggaaggagacagctcaggcactttcccacacaggatggagccggg

SEQ ID NO: 17321 - DNA, 100 bp, Homo sapiens
gcagatttgaaaattcacccttgtagagtcattcctgcctttgagcggactcccttttaaggctcgtgaagctgtggaaatgcgtgcccaagtagagaga

SEQ ID NO: 17322 - DNA, 75 bp, Homo sapiens
gtgcaaacccgagagaactggcatgctcatgtttctatggcagaagtgattggtctgttaggaggaagatactca

SEQ ID NO: 17323 - DNA, 83 bp, Homo sapiens
gtgcaatgacaacatcatcttctcagaaggtttaactatagatcaacacatcatcttgcatctcatgggttctatgaattttt

SEQ ID NO: 17324 - DNA, 90 bp, Homo sapiens
aataattcatcaaattacacaactgttctggaaagctggcttgatttcacaggggagttggagccaccagatcctcttgcaagattgccc

SEQ ID NO: 17325 - DNA, 117 bp, Homo sapiens
gccatgagcactgcagcgattgcgagaatgaggaggacaacagctacaaccgggggcctccccatggccacccatggaccagtcggcattcacttcctcccttctgcggcccataaa

SEQ ID NO: 17326 - DNA, 100 bp, Homo sapiens
cagaaaacaaaacaaagacgctggggaaacttcaccaagagcctcggcagctccagagcgacgggaaacgaaagatggcccactgcgtgaccttggttca

SEQ ID NO: 17327 - DNA, 100 bp, Homo sapiens
gagactgtgaatacaacaatatcattctccttcaagggaataaaattttctaaggatattaatgcacacgcctgtgttactggtaaacccatcagccaag

SEQ ID NO: 17328 - DNA, 131 bp, Homo sapiens
tggagaccttacgacgggttggggatggcgtgcagcgcaaccacgagacggccttccaagacaatgcagatcttcgtgaagactctgactggtaagaccatcaccctcgaggttgagcccagtgacaccat

SEQ ID NO: 17329 - DNA, 111 bp, Homo sapiens
ctcaactttctgggcgttcatgatcctggccagcctgctcatcgcctactgcagtgagaagccctaccactgcaactgggacggctgcggctggaagtttgcgcgctcaga

SEQ ID NO: 17330 - DNA, 74 bp, Homo sapiens
agaagccctacgagtgcaacatctgcaaggtccgcttcaccagttccagggtctccctccactgctgtagtaac

SEQ ID NO: 17331 - DNA, 89 bp, Homo sapiens
caagtgcagggagttcccgttacaatcactagtgttgcagatttgagttttgtcaccggctcccacgtcggagagctgatcatctggga

SEQ ID NO: 17332 - DNA, 83 bp, Homo sapiens
agctcctggaggcggcgggatggaggcggcggccggttcccaacaaggctacgcagaagaacccccttgactgaagcaatgga

SEQ ID NO: 17333 - DNA, 100 bp, Homo sapiens
gtgggaagccgcacttacctatgaggccagcaagcggaggtgctgggagcgagttggctggtatcgagaaccttccctgcgaacttcagaggaacttcca

SEQ ID NO: 17334 - DNA, 101 bp, Homo sapiens
gcgctgctggactacaaggacgagttctcgggcagaggcgacctccccgcgttccatgcgcacagggacaggggtctgggaagatccgaggtatctcctgg

SEQ ID NO: 17335 - DNA, 100 bp, Homo sapiens
ggatcccctcagtgtttctccggggcaaagcagcaaatgcattccacgtgtatcagggtctccctcttttgtccaaggctggagtgtggtagtgctatca

SEQ ID NO: 17336 - DNA, 75 bp, Homo sapiens
actacaggcctgctctctggttccaggtctcttaaccttcattaactgtgcctatgtcaaatggggaaccctggt

SEQ ID NO: 17337 - DNA, 75 bp, Homo sapiens
aggaagtattagaaatgagctgaagaccattcacagcaacagcttgcacaactacagaaagaaaaatcagagatt

SEQ ID NO: 17338 - DNA, 83 bp, Homo sapiens
tgcagacccgcgacccggagcagctcggaggcggtgaacttgaggcagccctaggtgaggccaagaagcaacttcaggatgag

SEQ ID NO: 17339 - DNA, 75 bp, Homo sapiens
acgtgtcgttaatagaaagaagaacaggcaagaagtggtccagccggcgaagacaaatttacatgtattggagac

SEQ ID NO: 17340 - DNA, 93 bp, Homo sapiens
aggccctggataatgtgctgccttctgctcagctgatgatggacaagcctgccgagtgcctgcgattgcaggcgcgcgccgccacgcctgact

SEQ ID NO: 17341 - DNA, 83 bp, Homo sapiens
cgcggattcgccgaggcaccgaggcactcagaggagactctcagcgttctcatctctcttccttcaccatgaagctgatggac

SEQ ID NO: 17342 - DNA, 100 bp, Homo sapiens
aaatttatcatgtccacatggcatgggagaaagaggaatgggcctggcctgtgggcaggaacaggctgcacagctcagcacaacattccaagctcaaaat

SEQ ID NO: 17343 - DNA, 100 bp, Homo sapiens
tgcagccggcgacttctgcctgctggagctggagcccacgctgtgccagcagctggaggatggacacagaatgtccctcttccagtggaaagcccaacca

SEQ ID NO: 17344 - DNA, 96 bp, Homo sapiens
gtggtgacgtgctgtggatacctcccccaggtgcccaaggaccaagtccttgacactgtctacctgttccatatgccccgaaaacgaatgatttcc

SEQ ID NO: 17345 - DNA, 101 bp, Homo sapiens
aatcaacaaagcctttgaactgatgcattctggaaagaggtgtgaggacttctgcatcttacagtcagcacagaacacactgagacttgaatcaagtcagc

SEQ ID NO: 17346 - DNA, 75 bp, Homo sapiens
accgagagcgtgaccgagagcgcgaatatcgtcatcgttagaagggtaagaaggtggatggctctgtaaatgcct

SEQ ID NO: 17347 - DNA, 100 bp, Homo sapiens
agaagtcattccttttttgaagaatgtgaaagatgttgcagaagtgttccagaagtggctgaagatagaaggaaaaaagtgccactgcctatcagaaaaa

SEQ ID NO: 17348 - DNA, 75 bp, Homo sapiens
tgccgacttcagccagatgtccaagcttcctgcctgacacagctcacttcaagaagtgcacaatgtcagaacgtg

SEQ ID NO: 17349 - DNA, 82 bp, Homo sapiens
cctctatgccgacatcgacgccgcctggcaggccctgcgcaccagtgatcagggccaaagcggtcagtgagaaggaagtgga

SEQ ID NO: 17350 - DNA, 89 bp, Homo sapiens
cggctgcgcgggacggctctgtaggaaggaacttggttccccctccctcagcttccgccccaaaaggcctgctgaaaatgactgaatat

SEQ ID NO: 17351 - DNA, 100 bp, Homo sapiens
atggagcccgactcggtgattgaggacaagaccatcgagctcatggcaccgaccgtcacgagctaacttcctggaagagctttccgtctattttcaaatt

SEQ ID NO: 17352 - DNA, 82 bp, Homo sapiens
ggaggacttcgagctgattcagcgcatcggcagcggcacctacggcgacgtctacaagatacgtcggtaacctttccagaga

SEQ ID NO: 17353 - DNA, 83 bp, Homo sapiens
ggaaaaacgtgtgggtacgaccttgcagcctcccgcgacgatgcccctcaacgttagcttcaccaacaggaactatgacctcg

SEQ ID NO: 17354 - DNA, 75 bp, Homo sapiens
tccacattgagagcaaaatctacaagatgatgcagggaggagcgcgagcttcggcctcggctctgtaccatgaag

SEQ ID NO: 17355 - DNA, 51 bp, Homo sapiens
cacaggttttccagtcgcactgcggtccttcaagggttagattacttacac

SEQ ID NO: 17356 - DNA, 74 bp, Homo sapiens
cagggaagggggccggacgggcggagcgagagagctggaagtcgagtgtgctactcaactcaggagatttggag

SEQ ID NO: 17357 - DNA, 73 bp, Homo sapiens
gggccctggggccgcctccaggggtacgtcgaaggccttgtgaacaggtacggttcctggagcagcagaacaa

SEQ ID NO: 17358 - DNA, 50 bp, Homo sapiens
aacagctggaggagatcctggagatgaagaaattcagttcatgaagataa

SEQ ID NO: 17359 - DNA, 83 bp, Homo sapiens
taccgggccacgcaccgcctgctgctgctgggagaactacgatgacccgcacaaaacccctgcctccccagttgtccacatca

SEQ ID NO: 17360 - DNA, 90 bp, Homo sapiens
cttgtggggccatccagtacatcccaactgagctggatcaagaagagagaagggcacagttacctaagtatcaacgtaatcttcctcggc

SEQ ID NO: 17361 - DNA, 112 bp, Homo sapiens
ccgctgccgccctgagtcactgcctgcgcagctccggccgcctggctccccatactagtcgccggtatcattgcccagtgcctaagatcttttatgttcagctcactgtagg

SEQ ID NO: 17362 - DNA, 73 bp, Homo sapiens
tgcagggttcgtggataataaactcaagcagcgagtcatccaggcctggtactgtggcgctccgtgaaattag

SEQ ID NO: 17363 - DNA, 100 bp, Homo sapiens
ttggattctacagcaacatattgacctgatggccaaaagaaaggaagaaaatttttcctctcctaaaaatgccaaaaggccaagacaagaagaattggag

SEQ ID NO: 17364 - DNA, 100 bp, Homo sapiens
cggctggagagaagccgggagcgagcccaggcggcagcctgggctctgagcagagcttccggattcacttctccagagaggaccaggctgggaagacact

SEQ ID NO: 17365 - DNA, 82 bp, Homo sapiens
caacgcctggctcggagcagcagcctctgaggtttttagaacttcagccataaaaatgggcagaattttccttgatcatatc

SEQ ID NO: 17366 - DNA, 78 bp, Homo sapiens
attcaagattatttgcaacagctcacgggagcaagaacgacttcaggcccgcatagctcataggatacaagaactgga

SEQ ID NO: 17367 - DNA, 100 bp, Homo sapiens
tgataagcagaggattagaaaagatgctgtgggcccgcaagagaaagcagaggtgcaacagctgcagcccggaaagaggtgataaggaacaagatccgag

SEQ ID NO: 17368 - DNA, 75 bp, Homo sapiens
attgaagaggaagaactgaccagagctgatcccgagcagcgtcatgtacccctccatgtttcctgagagactggg

SEQ ID NO: 17369 - DNA, 90 bp, Homo sapiens
aacgttcgcgtcatcacggacgagaactggagagaactgctggaaggagactggatgatagaattgcagttgcagtggtgcagaatggct

SEQ ID NO: 17370 - DNA, 100 bp, Homo sapiens
ccggagcgggtctccaggctggcgagcgcccagagcttggggcttccttggtcgcacccaccacctgcctgcccactggtcagccttcagggaccctgag

SEQ ID NO: 17371 - DNA, 75 bp, Homo sapiens
gtgcagacatctacaaccttcgatctcctgacgaaaaacataccgtttcatttactgctccgacaccggctgggc

SEQ ID NO: 17372 - DNA, 101 bp, Homo sapiens
gttttgaagatgaacaccaagatgaaagcagcagttttcatcatctaagtgaaaggtggttgaagatggatatgaattttttgcaaagaggcagttggtca

SEQ ID NO: 17373 - DNA, 100 bp, Homo sapiens
tgataatgaaggcattgctatttttgcacttcagttcacatactatttatggaaagccatggctgaaaccttttacctttctaacattgtgcctcaggat

SEQ ID NO: 17374 - DNA, 75 bp, Homo sapiens
acaatggcatttacagaaagagtcaacagcagtggcaacaggacacagcattgttggttttgccatgtactattt

SEQ ID NO: 17375 - DNA, 100 bp, Homo sapiens
cacacgatggccagtgccacctgaacgaggccaacgagtacactgcatccaaccagatggtgcttccaatagtcctggtcagcctaattctgtgaagaga

SEQ ID NO: 17376 - DNA, 83 bp, Homo sapiens
cacgaatctgcccacccctcctgtaacccagcctgtttcacttcttggtacttgctacagccaagagacaatggaaacaagtc

SEQ ID NO: 17377 - DNA, 82 bp, Homo sapiens
ggacgagtaatcgcctgctttgattcattgaaatagcctctagttcgttagtcaaaacgtgaaaaaaaagacctgctttgcc

SEQ ID NO: 17378 - DNA, 100 bp, Homo sapiens
tttcagacatacacaccaaattgttgagaagatgggatttcaccatgctactcaggcttgtcttgaactcctgggctcaagcgatctgcctgcctcagcc

SEQ ID NO: 17379 - DNA, 75 bp, Homo sapiens
tttaaaggaacctgttgataaatgcaaaacagtggctgttgcagtggaggccatagtggagtttgactaccaggc

SEQ ID NO: 17380 - DNA, 98 bp, Homo sapiens
ccatgacagaggagcagcataagtctgtggtcatcgattgcagcagctcccagcctcagttctgcaatgcagctccatttctttcacctcaaagctgg

SEQ ID NO: 17381 - DNA, 73 bp, Homo sapiens
agctgggaaaattgttgtgaacctcacaggcaggctaaacaaggtgaatccagtctggaaaaagtgtttggaa

SEQ ID NO: 17382 - DNA, 101 bp, Homo sapiens
gccaggcctctgtggcctaagtaacttgggaaatacgtgtttcatgaactcagctattcagattcgagtggtgaatgcatttcgtagttctttatatgaag

SEQ ID NO: 17383 - DNA, 90 bp, Homo sapiens
gatggcgtggtggagatcaccgcaagacactaagggcgactaccagaaagcgctgctgtacctgtgtggtggagatgactgaagcccgac

SEQ ID NO: 17384 - DNA, 75 bp, Homo sapiens
cacagttggagaaaatcggcagctgagacggccttggccggtctggccagcatgacccagaacttagagccactt

SEQ ID NO: 17385 - DNA, 76 bp, Homo sapiens
atcggcctcctgcagaacctccagaacctagccatcacggccaaccggttccaacaggatggattcctggtgctgg

SEQ ID NO: 17386 - DNA, 90 bp, Homo sapiens
ccgcgccctcggcctgcacgggtgctggtctcagtgtcagtgataatgaatctggtcaaggcagccaggaggggggcaccttgactgact

SEQ ID NO: 17387 - DNA, 90 bp, Homo sapiens
ccagaacttgcagcaacaatagcaagtaacttctaggtctgcagacaagaggaagagaagatgaaggaagactgtctgccgagttctcac

SEQ ID NO: 17388 - DNA, 50 bp, Homo sapiens
tttgcaggggagcctgagagccacagtcaaatgtcgctgcctccaatgcc

SEQ ID NO: 17389 - DNA, 75 bp, Homo sapiens
tgtggtacttctcgcagtccccgcgcgtggtcatccagggactggtgattgcagctggaagtgcccatgaccgag

SEQ ID NO: 17390 - DNA, 75 bp, Homo sapiens
aagaggtactgtccatcaaacatcttccaccacagcttagaggcttgccttttgtcactgctccgaataaatttg

SEQ ID NO: 17391 - DNA, 115 bp, Homo sapiens
tattccaatggctgagccgttttgccccaaaacgagagaggtttctggtcctcataccgtgtggttgagtgaaatcaaaacttccacgatagcaatgctgattggacaaagaatg

SEQ ID NO: 17392 - DNA, 124 bp, Homo sapiens
cttgtctcttatttagttctggggagcgcctcgtcgacatgagtgatgtggaggaaaacaacttcgagggcagacctactttggggataaaggattatttggtcttctggatttggaggcaatc

SEQ ID NO: 17393 - DNA, 74 bp, Homo sapiens
ggatttgttaaggattccaagtaactcttatttgactaggactcaatgaaattgctgcccccatgttcctgagg

SEQ ID NO: 17394 - DNA, 83 bp, Homo sapiens
ggcgctggagctgggtcagtccgccgctcaccccgcggccgcaccttcccgccttctcagctcaccatggatgatgatatcgc

SEQ ID NO: 17395 - DNA, 98 bp, Homo sapiens
ggactattttcacgttttaatgccgagagggggcagtacccaaaggaaacgctacgaaagaatacatggagagcttgcagctgaagcccggggaagtc

SEQ ID NO: 17396 - DNA, 116 bp, Homo sapiens
aaagaacatccacagaatagacctgaagacaaaaatccagaagtacaagcagtctggggctttgaccacgacctttgaagagcttcattttgagatcaagccccacgatgactgca

SEQ ID NO: 17397 - DNA, 75 bp, Homo sapiens
agggtactttttagaaccaaaggaatcacctcctcatgtagaaaattactgtctaccagaagctatttcatttat

SEQ ID NO: 17398 - DNA, 78 bp, Homo sapiens
tgaactctgtccagttttcaaaccacacaggttatgaagacagtatggagtttccagaccatagtagacatttgctac

SEQ ID NO: 17399 - DNA, 100 bp, Homo sapiens
cctcccccagcagtgagatggtcaccttggaggagttcctggaggagagcaaccgcagctcccccacccatagaccccactggcttttgccagcatccca

SEQ ID NO: 17400 - DNA, 95 bp, Homo sapiens
tgaacatagaccaaatggaaaaagataaagtgaagattcatggaatattgtccaatactcatcggcaagctgcacttttgctctgcatgcctgca

SEQ ID NO: 17401 - DNA, 98 bp, Homo sapiens
gtgagacttcccttggaagttgaaaaacaggcacttggcagacagaaccgctgagctggagcgagtaaatagagtcaaccaatgcttacaggaggact

SEQ ID NO: 17402 - DNA, 83 bp, Homo sapiens
ttttgcgaactatcttctccagcggagatggccaatattagccgatgaattacatatgccatctctccctgaaatgatgtttg

SEQ ID NO: 17403 - DNA, 99 bp, Homo sapiens
acttgctagtggctgcagattccatcactaacactatgtcctctcttgtgaaagagctgaattctgatcatcattttctgggtggaagtattcagctaa

SEQ ID NO: 17404 - DNA, 60 bp, Homo sapiens
ggagaactacagaaacctggtctccctaggtggctttctttcagatgcaggctggtacag

SEQ ID NO: 17405 - DNA, 109 bp, Homo sapiens
ctgcactcgcagcccatcgtcagcatccgcgtgtggggcgtgggccgcgacaatggccgctcaaatagctataactgtaccaaagacatggaagaaaccaaaagatcgg

SEQ ID NO: 17406 - DNA, 142 bp, Homo sapiens
gccactggcaggggtggaccccagcacaggcaaggtacaactgaccagggacatcatcaaaaggaatatccagctgcagccagctggaaggacattcaggtacccgggtaggctcctccctgcgacagaccttcagcttcct

SEQ ID NO: 17407 - DNA, 100 bp, Homo sapiens
agacattaacagtatttactgagagctcatcagaaataaactatcaatcttgcccagactggagaaaggactgcagcaacaaccctgtttcagtattctg

SEQ ID NO: 17408 - DNA, 75 bp, Homo sapiens
cttccgaaaccacaagtttgccgatgccttggacaagattcgctatgagagcctgacagacccttcgaagttgga

SEQ ID NO: 17409 - DNA, 78 bp, Homo sapiens
ttgaagagactgaaatacattggaaactgattccaattacagctgtcggaaaaggtaacagaagatggaactcgaaat

SEQ ID NO: 17410 - DNA, 97 bp, Homo sapiens
ttgctgcccagcagctaggcatcaagtacatcgggatgaggaatgagcaagcggcctgtgattggaattgaaacagtacaactgcctccaccagagg

SEQ ID NO: 17411 - DNA, 82 bp, Homo sapiens
aactctttgggaaagccactcgaaaagatggcgattttgctgacagctgccaagaaaatgcttcactcaacagtcctcatgt

SEQ ID NO: 17412 - DNA, 82 bp, Homo sapiens
cttggcttctcccagcatagccccagtgatggccaaaaaatgagcaaacggaaaaagaattatccagatccagtttccatca

SEQ ID NO: 17413 - DNA, 83 bp, Homo sapiens
aagaagtggtttatcaaaatcacgttataatcagattttgaccaagcattttgtaagatttccccaggagagcttttctgcaa

SEQ ID NO: 17414 - DNA, 83 bp, Homo sapiens
ccggagatgcctgacgcatctgtctgaggagcggtcagtgacgcgatggagcgggcaagcagaaaaagtcctacctggagcga

SEQ ID NO: 17415 - DNA, 100 bp, Homo sapiens
tcctctgtggagaacacccccccatggaggcgaggtagagttggggtcgcaggaacgaatgcaggaatttgggaactgagctgtgcaagtgctgaagaag

SEQ ID NO: 17416 - DNA, 136 bp, Homo sapiens
aaacatttgatttttggaaggatatagttgctgctatacaacacaattataaaatgtcagcttttaaggtacctggagtagaacagaaaaattattatgtctgtgttcccttgggactcattggaaattgtacagt

SEQ ID NO: 17417 - DNA, 90 bp, Homo sapiens
caccatgattctgagacctccccagcaatgtggaactgacacattcagctaacgtattttagcaggtggagtgaggttgaagattcctgt

SEQ ID NO: 17418 - DNA, 101 bp, Homo sapiens
ctttaaagcgcataagaatgtcctggcagcattcagccagtattttagcactgggttctaatcttcacgtcgaagtgaagggttatgaggatggagggatc

SEQ ID NO: 17419 - DNA, 73 bp, Homo sapiens
agcactagatgaaatccggttgctgaagtcagatttggatcaaaggtacaacactattctgcagatgtatgga

SEQ ID NO: 17420 - DNA, 80 bp, Homo sapiens
gctgttttggaactgtcaggtacctcaaagcgcacctgaatggacagaagaggacctcagccaactgacaagaagtatgg

SEQ ID NO: 17421 - DNA, 100 bp, Homo sapiens
agatacatggagcccatcagaatggcagatggcttatgaaccacagttccgatgaagttaaattccgtcaagatttaatgaatattgcgggcacaacatt

SEQ ID NO: 17422 - DNA, 100 bp, Homo sapiens
aaaatgtctctctatccatctctcgaagacttgaaggtagacaaagtaattcagactttgagaatcactacaagaaaaactccttgtggtgaaggttcta

SEQ ID NO: 17423 - DNA, 75 bp, Homo sapiens
ggagatgtcagcccttcagaaacagtattacaaggcatatcaagagaggagatttctttcacaactcatccagaa

SEQ ID NO: 17424 - DNA, 76 bp, Homo sapiens
ccgcagatgttgtcaaggtggcctaccaggaggccaggggtgtcgccatgacgctgaccggaaaggagattgagat

SEQ ID NO: 17425 - DNA, 100 bp, Homo sapiens
gccgaagaggtgcaggcctgggcgcagcgcaaggagcgggaagtgctgcagctgcaggttattcagcttctcaaggctggaaaagcgaaggaagtttcct

SEQ ID NO: 17426 - DNA, 90 bp, Homo sapiens
ctccagagtagctgggattacaggagagaagaccaagaggtcggagaagaggtagaaaatgtggcagaggccataaaggagaaaggcaaa

SEQ ID NO: 17427 - DNA, 100 bp, Homo sapiens
ccggaagtctcaattcttcctgaagacctagaggagctctacgacttattcaagactatctgtcaaaaaacacctaaggactctccgaagtatgaagtct

SEQ ID NO: 17428 - DNA, 100 bp, Homo sapiens
cggcgagcggttccttgtgggctaggttactataacaacagtaccaaggtggctgtgaaaaccctgaagccaggaactatgtctgtgcaagccttcctgg

SEQ ID NO: 17429 - DNA, 98 bp, Homo sapiens
cgacatcaccaagctggaggtggacgccatcgtcaacgccggctcttgtcaggatggtgaagctgttcatcggaaacctgccccgggaggctacagag

SEQ ID NO: 17430 - DNA, 83 bp, Homo sapiens
ggcccggggccaccggctgtgaagcgagggatggaggttgtgcaggtgagtacagaccgcgtccccgtggttctttgggtagt

SEQ ID NO: 17431 - DNA, 102 bp, Homo sapiens
cagaaatcaaattgaagagagcagttgaagaagtgaagaaattattggtacctgcagagggtgcatctgcccggaagactcagactcctgcagcccagccag

SEQ ID NO: 17432 - DNA, 80 bp, Homo sapiens
gcacgttcttccaagaaaccaacattcccaacagccaccaccaccaccagatgatatctcccggggccaattcagcatct

SEQ ID NO: 17433 - DNA, 78 bp, Homo sapiens
cggcagcagtcccttgggggcttctttaaaggcctgggattgttcattgctgctggaggaagatcatggactgtcgcg

SEQ ID NO: 17434 - DNA, 82 bp, Homo sapiens
tccgagcggggcccaacatggcggagagagaggtggagtccggcccccgaaagagggaacccaagccagaccgtctccttgt

SEQ ID NO: 17435 - DNA, 82 bp, Homo sapiens
gtctgcttccactcctgccgtgattgtcagcttcctgaggtctcctcagccatgctgaactacgctgaccggaaaggagatt

SEQ ID NO: 17436 - DNA, 75 bp, Homo sapiens
ggtttttcctaagctcaactctagccagctaggttcctggtgctttgggggtgctggagaatctggtaaaagcac

SEQ ID NO: 17437 - DNA, 99 bp, Homo sapiens
gaggaaagaatgcatgatgaacttctacaagcagtatccaaggtgccagcgagatttcagattcctgtaaacctctaaagaaaaggagtcgcgcctcaa

SEQ ID NO: 17438 - DNA, 82 bp, Homo sapiens
cgggaggcagagcggctcagccagcggcagacagaacgggacctgtgtcaggttatggaaacaaaggacatgctttacatcg

SEQ ID NO: 17439 - DNA, 90 bp, Homo sapiens
tgaagatatgaatgccttcatgatgaactcggactacatccccgtggagggtgagctgctgttccagcctggggaggcctggaaagagct

SEQ ID NO: 17440 - DNA, 51 bp, Homo sapiens
cagaacgctggactctccctttgcaggttgctatcaagatcatagataaga

SEQ ID NO: 17441 - DNA, 100 bp, Homo sapiens
tgtctgtgtagcaaggaattaccttggagaggctgtgagccacaatgcatcgctggaagtagccaggtctccaactgaattccttgaagagaaaatggcc

SEQ ID NO: 17442 - DNA, 74 bp, Homo sapiens
aactgaacattggtctaaagtctttccaaaaggtcaaggttcacaagggattaaagcctgtggtttccacagaa

SEQ ID NO: 17443 - DNA, 82 bp, Homo sapiens
gaccgtgtccttaccgtgacgtccaccgacggggtccactggacggggcctgagctacaacttcacccacctggacgggtac

SEQ ID NO: 17444 - DNA, 100 bp, Homo sapiens
ggcagttatgggagccctagagggcctgagagttgctattggaccatgtagaatgttgcaatattgtttacagatatttagcttcctgtggtatactgat

SEQ ID NO: 17445 - DNA, 82 bp, Homo sapiens
cgccagcccgcgcggggaccgccaccgagcgaggtttttcgttggaatatacgttgcacatttatggcgattctgagtgtga

SEQ ID NO: 17446 - DNA, 82 bp, Homo sapiens
ctcggctgcgggaaatcgggctgaagcgactgagtccgcgatggagggactttgaacatgtcggggatcgccctcagcagac

SEQ ID NO: 17447 - DNA, 76 bp, Homo sapiens
ccggaatgtcatccagcgagtgattagggtgtccgcaatgttgccagtgtctgtctgcagattggctacccaactg

SEQ ID NO: 17448 - DNA, 90 bp, Homo sapiens
agatggatctcagagcggtatccctgtctcagcgaagtggtgaaagagcatcaggaaaatcctgccttgcttcgttgggcctatgcaaga

SEQ ID NO: 17449 - DNA, 57 bp, Homo sapiens
ccaccatggcttccgaggagctgtacgagagggtgtttgtgagatatggttgaccag

SEQ ID NO: 17450 - DNA, 76 bp, Homo sapiens
cccggtgcaagaggcgcaaacaagccaatcccaggaggaaaaacgtggcaacatgaagatctacttatcaatagac

SEQ ID NO: 17451 - DNA, 100 bp, Homo sapiens
tttaaatcctttggcttctggtcaagatgatgattattctccaccgtctaagagaccaaaggccaatgagctaccgcagccaccagtcccggaacccgcc

SEQ ID NO: 17452 - DNA, 80 bp, Homo sapiens
gtcttggagctctttgaccgctatgatggtcttcgtcgtctggtgaacttggtactgctataaccagaatttggtagaaa

SEQ ID NO: 17453 - DNA, 75 bp, Homo sapiens
gcagcttcaagcttaggaccacccaccatgcctatccagacgagctcatctgcgcctttgtttagaacgcttaaa

SEQ ID NO: 17454 - DNA, 82 bp, Homo sapiens
gcggtgcagggtaacatggcggatgcggaaggtcgcaatggaagaagagatcgccgcgctggtcattgacaatggctccggc

SEQ ID NO: 17455 - DNA, 83 bp, Homo sapiens
ctcaaaatcagcctacatgccatctttggagttggtaaaatattaaagaagatcaacaaggccatcgtctccaagaagaataa

SEQ ID NO: 17456 - DNA, 82 bp, Homo sapiens
cgctctggctgtgctgcgcgacccccgcgcatggagactacacagacttctattcctctcggcagcatgctaccaacgtcgg

SEQ ID NO: 17457 - DNA, 83 bp, Homo sapiens
cccccgagggtcaacgagaaagagatcggtcatcatcagatttgaaatatttaaagtggatacaaaactatttcagcaatgca

SEQ ID NO: 17458 - DNA, 75 bp, Homo sapiens
aaggagcaggctctgcgggaggtggagcacctgaagagatgccagcagcctgggccgagccagtggcccccagag

SEQ ID NO: 17459 - DNA, 80 bp, Homo sapiens
ccatggttctcactaaaatgaaagaaaccgctgaggcttatttgggaaagaaggaagcaagatttccagatgtagcaaat

SEQ ID NO: 17460 - DNA, 75 bp, Homo sapiens
gcccgtgccgcgagcgcggcctgcaggaggtggccgtctgcccggcccagcaccatgcacacgcttgtgttcttg

SEQ ID NO: 17461 - DNA, 100 bp, Homo sapiens
agatgcgtctcgctcaagtgatctttgataagaatgattcagattttgaagctaaagttaagcagcacttgctagaagtaaattctttaaagcacctgac

SEQ ID NO: 17462 - DNA, 100 bp, Homo sapiens
cagctggctgtggatcaacttttttcagagaccttggcgataaagaattgcttcagattgctggaattagcccacatggtaatgctttaggagcatcaat

SEQ ID NO: 17463 - DNA, 75 bp, Homo sapiens
tcgactccttcccgacctactcgccgaccttcatccgcggctctgacgcccgctctgcggcttcggtgtttgaac

SEQ ID NO: 17464 - DNA, 83 bp, Homo sapiens
aaagacatcttaattgggcacgaaagaggttcatcatgcctagtggcgtataagaagaccccgccaccggtccctccacgcac

SEQ ID NO: 17465 - DNA, 75 bp, Homo sapiens
tttccggtcaatgagcactattttggattagtcaatcttcaaacatacccatatagataaaccagactgctcagg

SEQ ID NO: 17466 - DNA, 75 bp, Homo sapiens
tcttgatgcacccaagttagctggcatccaggagtttcaaggtgccactgattaatgaacttgaatcagcaatac

SEQ ID NO: 17467 - DNA, 82 bp, Homo sapiens
ctgggcgctccggtggcggcggagggcttcccacggcacgacatggagacctgtggttgcgaggctccctggggctcggctt

SEQ ID NO: 17468 - DNA, 75 bp, Homo sapiens
aagcccgcgcccaacaccttctatgtaggtacggcttcaggtccagagcgtggagaagcctcagtaccgcgggac

SEQ ID NO: 17469 - DNA, 80 bp, Homo sapiens
gacttgctagttaggattttattactggcagcatgtatatcttttcgggcaggctctggatctcggcgggatcaggccag

SEQ ID NO: 17470 - DNA, 75 bp, Homo sapiens
cggagctgggcgcggattcgccgaggcaccgaggcactcagaggagatcaggatcctcatgaccagccaaagaga

SEQ ID NO: 17471 - DNA, 74 bp, Homo sapiens
gagatgcgcctgaaggaggcgggcacagtgggctacccacctttctgttctgagacccctcaagagacatataa

SEQ ID NO: 17472 - DNA, 73 bp, Homo sapiens
ttaagaaacatcgagtcactttgcctggacaggaggaaccctattcttcagaggaggcccctccagccactca

SEQ ID NO: 17473 - DNA, 88 bp, Homo sapiens
ccaggagctgggctggagcagtgaggagtgtttcttccaagagaagatgactgcctgagagttcatgaccaagaaccccaccatgcgc

SEQ ID NO: 17474 - DNA, 100 bp, Homo sapiens
tcccactgattctacattatgggccaaagattctgttaaacactttcatgttgaatatactggatattcatttaaatttggctttaatgaattctcatct

SEQ ID NO: 17475 - DNA, 75 bp, Homo sapiens
atgaattggatatcaagccagagaagtgcccgaggagagttaacagaacttcagtgaagatttcatacattggcc

SEQ ID NO: 17476 - DNA, 100 bp, Homo sapiens
caagattaacgatgaggacaaacagaagattctggacaagtgtaatgaaattatcaactggcttgataagaatcagagtattgttacaatcacatttgac

SEQ ID NO: 17477 - DNA, 98 bp, Homo sapiens
atcgtgtcgcacacgcacctcggagtgaggatttgacagctaaggatattgaagaaattattgatgagctcaaggctggcaaaatcccaaaaccaggg

SEQ ID NO: 17478 - DNA, 80 bp, Homo sapiens
ggaacgctctacaagctgcacccgcggtgagaagccctaccactgcaactgggacggctgcggctggaagtttgcgcgct

SEQ ID NO: 17479 - DNA, 95 bp, Homo sapiens
ttgcaaattccagtcaaggccctaaaatataggtgatctttagacagtgactgagtatggatcatttgaacgaggcaactcaggggaaagaacat

SEQ ID NO: 17480 - DNA, 75 bp, Homo sapiens
atccagcctgcggagcctgtggggcagatgtctctgcccacccacgcaacccagactatgaagagtccggtgaaa

SEQ ID NO: 17481 - DNA, 82 bp, Homo sapiens
ctgtggtattcgccggcacgcgaagtggccgcatccgcaagtaagactttgaccccgacgcaggcttcagtgattgccgcgg

SEQ ID NO: 17482 - DNA, 90 bp, Homo sapiens
gttcaattgtttcagctttgaagagagaagctttggttaaagtttgtcccgctggctggaagcctggcagtgacacgattaagcccaacg

SEQ ID NO: 17483 - DNA, 100 bp, Homo sapiens
cccggaatcagttccttgatgagctcatggagatgcctttgaagatgagaaacccccaaagaagagccttctctccaaagtttcacaaggaaagaggaaa

SEQ ID NO: 17484 - DNA, 95 bp, Homo sapiens
gttccttcttctttgctggcactgttattacaaccataggagtgttcagcctgggtgttcctgtagatgctctcttctttattggtaaccagttg

SEQ ID NO: 17485 - DNA, 100 bp, Homo sapiens
ataaaggaaaacaagaggccccagagggaaaagaagcccaaagttttaaaggttaatgactccagagagtaagatcagattcgtccacaaagagatgggc

SEQ ID NO: 17486 - DNA, 50 bp, Homo sapiens
ggcgccgggtcccgcggggaaagtactccaaagattcaggtttactcacg

SEQ ID NO: 17487 - DNA, 75 bp, Homo sapiens
tgcagttgtggttccagggaccagaagcagtggaagtatgcgagacttaagagctcaagtgactagtggtctcct

SEQ ID NO: 17488 - DNA, 100 bp, Homo sapiens
ggccattccggcagcctgtggatgctgtcaaactgggtctaccggacacagcattgttggttttgccatgtactattttacctatgacccgtggattggc

SEQ ID NO: 17489 - DNA, 89 bp, Homo sapiens
attcagcagctttccattgatttgcaaaaggtgattgtagagaaggctccaaaagccagggtgcctgatctggacaagaggaagtacct

SEQ ID NO: 17490 - DNA, 121 bp, Homo sapiens
agggaccacatcaaagacagctttcacagtttgcgggactcagtcccatcactccaaggagagaaggaatgtcgttgtctgctgggtcttcccctcttcattcccccaagattactccaca

SEQ ID NO: 17491 - DNA, 50 bp, Homo sapiens
ccagcatcaagatgatttatggtaataagaatcctggtaattgatgtcca

SEQ ID NO: 17492 - DNA, 83 bp, Homo sapiens
cctccgagggcttcagtctggagccgcccagaggagcggtggtgccccccccgggcacggggccatgtacaacgggatcgggc

SEQ ID NO: 17493 - DNA, 52 bp, Homo sapiens
aggaccagagacccccaactatatagcagaaactggcgatggaatatgagag

SEQ ID NO: 17494 - DNA, 100 bp, Homo sapiens
tttctccagtgctcatcttgttctcgagttttctctgccatgttgctattgcaggacggagaggactggaatgaaattgaccccattaaaaagaaagacc

SEQ ID NO: 17495 - DNA, 75 bp, Homo sapiens
gtctcgctctccaaaagtgtctccatacagaacattactgggagaagatggtataaactggtccatcagtgacaa

SEQ ID NO: 17496 - DNA, 100 bp, Homo sapiens
agggggaagaagcccaaggagacatatgggggtagtgaccttcgtaccgtgtgactgtgccgctgatgggggctgtgtccgacctgtgcgaggctctctc

SEQ ID NO: 17497 - DNA, 74 bp, Homo sapiens
ttttggggtagtgtctgggatccagtacgagttgaatcattgttcaaataagaggcaaccagaaggatgaatga

SEQ ID NO: 17498 - DNA, 90 bp, Homo sapiens
gcatgccccgctacgagctggctttaatcctgaaagccatgcagcgggaaagtatgtgatggtgatgggagtggttcaggcctgcagccc

SEQ ID NO: 17499 - DNA, 73 bp, Homo sapiens
actggctctacccccaggcagtgtcatttcgtaccctttggagaattgggtcatcgccagagagcggtttcag

SEQ ID NO: 17500 - DNA, 101 bp, Homo sapiens
agagagacctgggatttggttccagctctggttgttaattcttctgtattccttccgtgggggtggctagggtagagtggcacatggattaattgatgtat

SEQ ID NO: 17501 - DNA, 90 bp, Homo sapiens
caggtgtcttcctcgagaggcaggcaggggatcccggactttccaaccggaggccctatcggcagtactacgtggaggcttttggagatc

SEQ ID NO: 17502 - DNA, 100 bp, Homo sapiens
aataacactaaaaggatgatggacagcagcctgagagacacaatctgacgaaatgggatttgaccgatacaaaatggtggtgcaagtagtgattggagaa

SEQ ID NO: 17503 - DNA, 90 bp, Homo sapiens
aaagccattcccaaattatagagctaattacaactttcggggcatgtacaatcagagatgcacagtttgaaaatgatgaacgaattacac

SEQ ID NO: 17504 - DNA, 83 bp, Homo sapiens
ggcagacggatggcgaacgtgcaggtcgccgtgcgggtccggccgctcagcaagaggtgtcgtgaaaactacccctaaaagcc

SEQ ID NO: 17505 - DNA, 100 bp, Homo sapiens
ggaaatcatgtcaagcgaagccttgaaaaagctgccctgagacggtgtcccgccgaaagagccctaatttgtttagaactgtaatatgcacagttaaaac

SEQ ID NO: 17506 - DNA, 83 bp, Homo sapiens
ccagagttcgaggtggtgggactcaccgctctggccagggtgcttttggaaacacagtcaatgtggatgagaactaatcgctg

SEQ ID NO: 17507 - DNA, 78 bp, Homo sapiens
ctcagcctcccgagtaggtgggattacaggaaattcgaaatgagtcccatgactatcctcatagagtggccaagtttc

SEQ ID NO: 17508 - DNA, 101 bp, Homo sapiens
ccaccatcctgggttgacaattctacacaaggagtgtgtaaatatgttgctgtggagctgaagtcagcctttgaggaaaccggcaagaccaaggaggtgat

SEQ ID NO: 17509 - DNA, 76 bp, Homo sapiens
gatccaaggagaatataagtacacccaagtgggtcctgatcacaacaggaggagatgttaaagtaacccatcttgc

SEQ ID NO: 17510 - DNA, 100 bp, Homo sapiens
ttttggatagattaactgttccagtagtttatcctgatggatgaactgagcgccaatggacaatatcaatgtcttgctgaactgtccaccagccccatca

SEQ ID NO: 17511 - DNA, 100 bp, Homo sapiens
ataccaaacagtggcatggaccacacccagcggaaggcagcttttggcaaggagtctgaagttcttattgggaacctgggtgataaattaatccctccac

SEQ ID NO: 17512 - DNA, 100 bp, Homo sapiens
agtaccagtacattaggaaacatgctagaattacctggaacttcatcatcatctacttcacaggaattgccatttgagtggagtcaacatatcaatggag

SEQ ID NO: 17513 - DNA, 98 bp, Homo sapiens
acaacgaactttatattttaccacttccttgaataggactctgtctactagtgacgatgtcgaagacagggaaaatgaaaagggtcgccttgaagaag

SEQ ID NO: 17514 - DNA, 101 bp, Homo sapiens
gtcacatgtcattataccttcacccagcatttcatccctcgtcgaaaggattggattggcatctttagagccatcttggcagcaggcagcatgatgcagac

SEQ ID NO: 17515 - DNA, 75 bp, Homo sapiens
aggctgtgcgcatgcagcacctgagtacaggggctcaggtccaggtggcaggggatatgctacccaactcaactg

SEQ ID NO: 17516 - DNA, 83 bp, Homo sapiens
accgtcctggttaacgcggatggcgagggctttgttcgcgggggtcacagctctcatggctgcagctagcgtgaccccccctg

SEQ ID NO: 17517 - DNA, 82 bp, Homo sapiens
ggcctgctcggccctcacagggccggtctaattgaagccaacggagaactcaaggtcttcatagaccagaaccttagtcccg

SEQ ID NO: 17518 - DNA, 100 bp, Homo sapiens
tctgtgtgttccttattttgtgcttgaacttgatcaaacaggggcatggtctagtggcccagtcaggacgcggaaacactccctggaggttctgacccac

SEQ ID NO: 17519 - DNA, 75 bp, Homo sapiens
ctcgcggaagcagaggtttgggatgtgacaagccgaggcggtgagccgggcaggaggaaggagcctccctcaggg

SEQ ID NO: 17520 - DNA, 100 bp, Homo sapiens
attctgttgatcttcaaaatgctgcagaaatgctcactgcaaaagtgaaagaaaaagcggatggtggttcctgctgccctcaaggtcgtgcgtctgaagc

SEQ ID NO: 17521 - DNA, 100 bp, Homo sapiens
catggagggcggccttctggacaagccagacaactgtcctgacatgctgctgaccccgcactacatctacccaccagccatcgtgcagcccagcgtggtg

SEQ ID NO: 17522 - DNA, 99 bp, Homo sapiens
ctgatccaggagtggttcaccctggtcaacaagaagaacgctctcatccggaggcaggaccagctgcagctgctacccaagtcttggattgaggaacag

SEQ ID NO: 17523 - DNA, 82 bp, Homo sapiens
gagccctaccttactggacagtcaaatcagggagtgcatccgccccaacccttttccccctcgtctcctgtgagaattcccc

SEQ ID NO: 17524 - DNA, 82 bp, Homo sapiens
tttttcggatcatgtctggtggctccgcggattataacagagatatagatcagctatcaggaagggacttctgccattcaaa

SEQ ID NO: 17525 - DNA, 74 bp, Homo sapiens
tgacgaagatgatgaggatgacgatgacgatgaggaagatggcctagttccccgagagcgttcagacagtgggg

SEQ ID NO: 17526 - DNA, 90 bp, Homo sapiens
cttcgaaaaaagcttattgggaagaaggttatgaagacagtatggagtttccagaccatagtagacatttgctacagtgtctgagcgagc

SEQ ID NO: 17527 - DNA, 74 bp, Homo sapiens
agtgttgtgccagcctacaggaggaaaggccagactcacagaaggtactccaaagattcaggtttactcacgtc

SEQ ID NO: 17528 - DNA, 96 bp, Homo sapiens
agcatagagacgctactggaggcggcccgcttcctggaatggcaagcgcagcaacaacagagagcacgtgggccgttgccgtctgcacccagaccc

SEQ ID NO: 17529 - DNA, 75 bp, Homo sapiens
cgaggagaacgtcccgctggatctgacccgaggttttctgtctcaactggtctctgacaagcctctgactgaatg

SEQ ID NO: 17530 - DNA, 98 bp, Homo sapiens
ggcggccacggcggcggctggggccgaggtgcaaggaaccatcttcccagctcccaatttcaatcccataatggatgcccaaatgctaggaggagcac

SEQ ID NO: 17531 - DNA, 98 bp, Homo sapiens
ggactattcagtgctattacccgggcgccctgcgtccggcagaggaggcgagcatcccgctcaggtgatgaggaacccctcgcgcacccagcgcagaa

SEQ ID NO: 17532 - DNA, 90 bp, Homo sapiens
gccgaggcggagccgctgtcctcgtccccagcggtcccgcccaacgcccgactctgcataagatgcacatttttctgctctggagccggg

SEQ ID NO: 17533 - DNA, 75 bp, Homo sapiens
cttctgtcttttcagctgcagtgaaggctcggggctgcagacaatgcagatcttcgtgaagactctgactggtaa

SEQ ID NO: 17534 - DNA, 75 bp, Homo sapiens
tggtagttaaaggcccagatgataggaatcccatctcatttagaaatcacctgcccaccaccccctgttatctac

SEQ ID NO: 17535 - DNA, 100 bp, Homo sapiens
atctgtggcaggagcttttcgtaaagggaagtcatttctactggacttcatgcttagatacatgtataacaagaccaaacctggaccacccaaaaagccg

SEQ ID NO: 17536 - DNA, 98 bp, Homo sapiens
acaacaagcagcctattatgcccagacaagtccccagggaatgccacagcatcctccagcacctcaggtgtacctgaaggaaatcttaaaagaaattg

SEQ ID NO: 17537 - DNA, 97 bp, Homo sapiens
ggacctcgccccgggacagcgaggagctgagggaccctgccgaatacatcaagcaatggtaacatctttaaatgaagataatgaaagtgtaactgtt

SEQ ID NO: 17538 - DNA, 101 bp, Homo sapiens
tactctctctttctggcctggaggctatccagcgggtatagaacaggctatgcttacaggcatcctctcattcgagagaagcctaggcacaagagtgatgt

SEQ ID NO: 17539 - DNA, 75 bp, Homo sapiens
ccatcaaagtgattccccggaatcgtgtgctgggctggtcccccttggtctgtttggcaccccactgctgaccag

SEQ ID NO: 17540 - DNA, 87 bp, Homo sapiens
ctgatgtaccaggcccaggagaggaagacccagtacagctggacgtttgccgtccactctgagattttgcaagaacgaggctcaagg

SEQ ID NO: 17541 - DNA, 97 bp, Homo sapiens
ttgaggaccgactgaggctggaggatgagaacgagaagcagtctatccttcactggagtctgatgatgatgaccctgctttgaaatctcgacccaag

SEQ ID NO: 17542 - DNA, 75 bp, Homo sapiens
aagacgccaggtaccccggaagcctagaaatggttcacagctggagcaaagctgttgtttcacctgaggcagctg

SEQ ID NO: 17543 - DNA, 101 bp, Homo sapiens
gaccagaaccgtgatggcttcattgacaaggaggacctgcacgacatgctggcctcgctgggcaaactgtccttggaagaattcatcagaggtgccaagag

SEQ ID NO: 17544 - DNA, 100 bp, Homo sapiens
cgatggtcggcggcgcccggatgggcagctgagctcaaagttatgaagtttcaggatgaattggaatctgggaaaagacctaaaaaaccaggccagagtt

SEQ ID NO: 17545 - DNA, 90 bp, Homo sapiens
aaacatctggttggcaatatgatactcagtgttcactggcaggagccattcgttcctggttaactcggaaacacatccagaggctgcatg

SEQ ID NO: 17546 - DNA, 75 bp, Homo sapiens
cgggagccgccgccatgggggcctgcctgggagcctgctccctgctcagctgcagtccggcagcgtcttctcttg

SEQ ID NO: 17547 - DNA, 50 bp, Homo sapiens
tagtgaagttgacgctcaagagcagtgtcagagatggctttggattcccc

SEQ ID NO: 17548 - DNA, 75 bp, Homo sapiens
aggtgacaaagctaaggatggagttgcaggtgtccagcgggagtgcatccgccccaacccttttccccctcgtct

SEQ ID NO: 17549 - DNA, 101 bp, Homo sapiens
atcaagtgcccttggacaaagcctgaaaccaggacattggctccctggattatcaagagtttgtagttgacattgaatccaggctgaggatggaaggtgtg

SEQ ID NO: 17550 - DNA, 73 bp, Homo sapiens
caacagtatgaaatgtactgcaaagattcacgggtcatacttacctggttgcttgcgcatctagtaatgttgg

SEQ ID NO: 17551 - DNA, 87 bp, Homo sapiens
ttctttatccttcgaaggaagcctgtggagttgagccccatatgggggttggcaggcagcagagaggcccctttcaaggtgttcggg

SEQ ID NO: 17552 - DNA, 101 bp, Homo sapiens
cgtgcaggcggccgtcagcaacctcgtccgggtgtgcaactgaggaacatggctcaagaaactaatcacagccaagtgcctatgctttgttccactggctg

SEQ ID NO: 17553 - DNA, 85 bp, Homo sapiens
gtttgcagctcgtgccatcatttcagagctggttgggataattcttcactattccacccttgccacagtactatgggtaggagtg

SEQ ID NO: 17554 - DNA, 83 bp, Homo sapiens
gtgaggagtgtgagctcatgctacagggggatatgagactttctactcggaatatcctgagtgttgcgtggatgtaaaaccca

SEQ ID NO: 17555 - DNA, 100 bp, Homo sapiens
gaaggcgtatacaggaacaatattgatgatgtagtaaggccccttcacagatgtagtcactacaaatcttaaattgcgaaatccatcggatagaaaagtg

SEQ ID NO: 17556 - DNA, 100 bp, Homo sapiens
gactcggccaatgccaatgatgtggaaacagctggagtcttttgtgcaattgtttctcaccctgctgattctgtggtatctgtgttgaataaagaaaaag

SEQ ID NO: 17557 - DNA, 90 bp, Homo sapiens
gcctctgcctgttcttctggaatgtcttgggggttttgatcctgtcactgtgctgaggtcatttttgcaagtaaggaaatacagtttgga

SEQ ID NO: 17558 - DNA, 83 bp, Homo sapiens
ggagaagtggcctaaaacttcggcgttggggcgccctgcgtccggcagaggaggcgagcatcccgctcaggtgatgaggaacc

SEQ ID NO: 17559 - DNA, 51 bp, Homo sapiens
aggttcatgttcctacctaagtcctggccttctccacagtaggcactcctg

SEQ ID NO: 17560 - DNA, 100 bp, Homo sapiens
gcagtatgaggcaatggcgtccagcaacatgcatgaagccgaagagtggtaccgctccaaggcgggatgtagctcattttgggatacgagtctccatcgt

SEQ ID NO: 17561 - DNA, 75 bp, Homo sapiens
aactgcagaggatgccaaactagagaagattttgagcaaacagagacccatgaatacactgaccctaacaggcca

SEQ ID NO: 17562 - DNA, 82 bp, Homo sapiens
cgggtggcagcgacagagccaaaatcagagctggaacctgaggagagagctggagctctcaaacactgctgtcctgcaccag

SEQ ID NO: 17563 - DNA, 100 bp, Homo sapiens
ctactacctggacatcagcctctacaaagaagtgactgactccagatctggaaatgagctgatccgcaagggcatcccccaccacttccgggccatcgtg

SEQ ID NO: 17564 - DNA, 100 bp, Homo sapiens
gccctatgagcatctcatctgcggcaagaacgccaatgacaatgcagatcttcgtgaagactctgactggtaagaccatcaccctcgaggttgagcccag

SEQ ID NO: 17565 - DNA, 50 bp, Homo sapiens
ggaagaccaagatcatcgagatgacctgatggccaaaagaaaggaagaaa

SEQ ID NO: 17566 - DNA, 82 bp, Homo sapiens
ccgcctccgggcatcttcaactgatgtccttggtgaggattttgaaaatttgatcttcacaagagttgcctggatcatttga

SEQ ID NO: 17567 - DNA, 50 bp, Homo sapiens
cttcctgtagctcagataatacaccagattgggaaaatgaggtacgttag

SEQ ID NO: 17568 - DNA, 100 bp, Homo sapiens
aggaagcagctgaaagagctattgaaaaaatgaatggaatgctcctaaatgatcgcaaagtgactttgtgttttatgccccacgtctgagaatcaacaag

SEQ ID NO: 17569 - DNA, 100 bp, Homo sapiens
tcttcaattcagggacttctccaagctctgtctgggttctgctgtcaatggtgttgtccagaatacatgcaccacctgctcgccctggagcatcgcgctg

SEQ ID NO: 17570 - DNA, 82 bp, Homo sapiens
gttcattgaagctatcactgtcagtgctgaataagaaagccttgagttttgtgaaaaaccggagaagagaaactaaaaggac

SEQ ID NO: 17571 - DNA, 102 bp, Homo sapiens
ttgttccgttgcgagctgcagctgcgatctctgtggtaggcccagggaggtggttgactcaatggttcagcattttaaagtaactatatttggagaccgtag

SEQ ID NO: 17572 - DNA, 74 bp, Homo sapiens
cggcatctagtctttccgcttcttgaatttctctctgtaaaggagggcatccgcttcgatcctgaaattccgca

SEQ ID NO: 17573 - DNA, 86 bp, Homo sapiens
tggggaggtcctccatgcgcagtcatgagtcgcttcaagtttatcgatgtgttttcgcattataacaaggacctgttgacagagca

SEQ ID NO: 17574 - DNA, 96 bp, Homo sapiens
gcacgactagaagcattgctagaagcagcagagttgtctgctggttctcagcttgaagaagattctgcagtccttattgatcctttttcttggcgt

SEQ ID NO: 17575 - DNA, 95 bp, Homo sapiens
cagaaattgcttgcggagtttgcttcacgacagaaaagctttatggaaactgcaatggatgttgtccctcctcctatgtctccatcctccaaatc

SEQ ID NO: 17576 - DNA, 115 bp, Homo sapiens
ccgccgaaaaagagaagacgctttacccgactctttgggccgttatctcacgtgagaagccctaccactgcaactgggacggctgcggctggaagtttgcgcgctcagacgagct

SEQ ID NO: 17577 - DNA, 100 bp, Homo sapiens
aagagccctggaatatgaagcaacatgagatggtggatgaacccacaggtcctcttcctgatggatgggaacaagccatgactcaggatggagaaattta

SEQ ID NO: 17578 - DNA, 100 bp, Homo sapiens
agcagcagaagagaagaagaagcaggatgaactgaaacggattgccagagaattggcagaagatcctgtgccccagaaaccgtgagatgtctcaattccc

SEQ ID NO: 17579 - DNA, 100 bp, Homo sapiens
tgtgcaggatcttgatggtggcaaggacaaaaagaagctctgtgccctctatgggaagtggactgaatgtttatacagtgttgaccctgccacgtttgac

SEQ ID NO: 17580 - DNA, 89 bp, Homo sapiens
aaacaagccgtggaataggtgtatcaagtaatggtgcaaagcctgaactaacaggcctcacctcttccattccggagatgatccttgga

SEQ ID NO: 17581 - DNA, 82 bp, Homo sapiens
taataaactagttgagaagcagaacccagctgaaggactgtgagaaagatcagtctaaagaaaaggagaagaaagtgaaaaa

SEQ ID NO: 17582 - DNA, 82 bp, Homo sapiens
aaggcgaacgcggtctgcaagctgacgtatgccagaagcggactcctagaagaggggagcagcaaggatggaatgacagccg

SEQ ID NO: 17583 - DNA, 82 bp, Homo sapiens
ctgggtcagtccgccgctcaccccgcggccgcaccttcccgccttctcagagacacctatggctgccgatgaaggctcagca

SEQ ID NO: 17584 - DNA, 98 bp, Homo sapiens
cgggcccctggacggcgtcgccaaggagctgggatcgcacttgctgcaggtgcccaacaaccagcatgtgaaggtgcgcttcaaattcttctacctgc

SEQ ID NO: 17585 - DNA, 76 bp, Homo sapiens
ccaacatcgatgcccatgactatgtattcaggcagtgacatcagtgtctggcccaggtgagcacctccgaaatgcc

SEQ ID NO: 17586 - DNA, 98 bp, Homo sapiens
atgatagaactcgggaggagcgaggactggaggctgaaaggttccctgagtcgaggtgactggtacaagacaaaggagatcctgctgaaggggcccga

SEQ ID NO: 17587 - DNA, 75 bp, Homo sapiens
aggaggtgctgaagagcgaggaggcaaccactgagaaaacggaaccgaatagtcaagaggacaagaatgatggtg

SEQ ID NO: 17588 - DNA, 82 bp, Homo sapiens
cttcttcatagttacgttatactgcccctgcattgttggtattgaaagagtatgcgaccagtggttggaacctgaatgtgat

SEQ ID NO: 17589 - DNA, 90 bp, Homo sapiens
cgccagcctggaggccacatttgtgaaggtggtctttgggaagaagcttcctgcctttgccaccatccccatccaccagctgcagcatga

SEQ ID NO: 17590 - DNA, 83 bp, Homo sapiens
gcatgaactctcccaacgagtcgggtggtacaagctgcactccaagccaggcaagaaggagaaggaacgcggcgagattgaag

SEQ ID NO: 17591 - DNA, 98 bp, Homo sapiens
cgctgcatcttcctcttctgctgccgcgagcagccgtgctgtgccggcctgcgagatagactagaagaagctttggatccagatgaagaacgtcgaat

SEQ ID NO: 17592 - DNA, 51 bp, Homo sapiens
gaccgtcttcgggcaagagctccgagtagtctgaaccggacggcttttctc

SEQ ID NO: 17593 - DNA, 100 bp, Homo sapiens
tggtctctcccagggcaacctccgcgtccactacaaagacggaaatggagagctggatttctccacttttctgaccattatgcacatgcaaataaaacaa

SEQ ID NO: 17594 - DNA, 95 bp, Homo sapiens
acccgaagctaaagtggattcaggagtacctggagaaagctttaaacaagaaccacgtgaatgttgagggggcgacacacaagcaggtggtggac

SEQ ID NO: 17595 - DNA, 90 bp, Homo sapiens
cgaggggccttcgccaccacgcactgggtcgtcacggaggacgggaaaatccagcagcaggcctcctcgaaagatgttgtcagacagctg

SEQ ID NO: 17596 - DNA, 98 bp, Homo sapiens
tttaaaggagcagccctggtgtcacctatcagtaaaaggaatccctaacactggaggatgtggctgtggacttcacctgggaggagtggcagttcctg

SEQ ID NO: 17597 - DNA, 73 bp, Homo sapiens
ttacagaccctgaaaaactggaccaaattagacagaggcctgaagaagtcagtgatttatagttcactaaaac

SEQ ID NO: 17598 - DNA, 50 bp, Homo sapiens
cggagagttctgcatgttgattcgggtgacagtccaaagattgacttggc

SEQ ID NO: 17599 - DNA, 100 bp, Homo sapiens
cacgcagctggatgtaccgcatgtgatcactctgggactcgtggggctgcagcaccgtgtggcgccatgttgacaagggcacggcagaaggggctgtgga

SEQ ID NO: 17600 - DNA, 75 bp, Homo sapiens
ttgtcctatcgacccagctggatcgtgtaaccagtctatgggaagtgaggcaagaaacctattggaattcgagac

SEQ ID NO: 17601 - DNA, 80 bp, Homo sapiens
aatgactttgagccctaccttactggacagtcaaatcagtgagaaagatcagtctaaagaaaaggagaagaaagtgaaaa

SEQ ID NO: 17602 - DNA, 74 bp, Homo sapiens
atcattggtgaggtgctatctcggagacacatgaaggtggcattttttggcagctcctgttcgacacagtggag

SEQ ID NO: 17603 - DNA, 98 bp, Homo sapiens
tcctgagtagctgggactgcaggaactgcctcttttctaaagaggactccaaaggaaggactggtcatctctttcatatctcaaaaccatggctcagg

SEQ ID NO: 17604 - DNA, 100 bp, Homo sapiens
cactggttaaaagtggcatgtatgaatattatgccagtgaaggacaaaatcctttgcattgagctaagagaacgagagatagaacgactgtcagttgctt

SEQ ID NO: 17605 - DNA, 100 bp, Homo sapiens
ttctcctgcctcagcctcccaggacagcaagaatcacttgacaattggtttgtgaccataatggcatctataaacagaaccattgaaataatgaaaaaac

SEQ ID NO: 17606 - DNA, 75 bp, Homo sapiens
ggtctttacctgcttcatcgtgaccaccggcctggtattgggatggatatcctaaacctgaggaaggaatacttg

SEQ ID NO: 17607 - DNA, 74 bp, Homo sapiens
gccactgccgcaggaggcgtgaggactctagtatgggattcctttctacctacaatacctcgcccactggccag

SEQ ID NO: 17608 - DNA, 100 bp, Homo sapiens
ctataacatcatcggcgagagcccagccagcgcgcccgtggaggtctttgtcggcgaggctggtgatgagacaaaccatgcttctgccacatcaacacag

SEQ ID NO: 17609 - DNA, 89 bp, Homo sapiens
ccacccgggagtttgaggaggttgtggccggaccagaatatggccaagggatgaaccctattagccgcctggcgcaaattcaacaggcc

SEQ ID NO: 17610 - DNA, 75 bp, Homo sapiens
atgagatttacctgtgagatgtttcatcccaacaaagaagaagaggacagtgctccagtgaaagtggaagaacaa

SEQ ID NO: 17611 - DNA, 75 bp, Homo sapiens
cctcggcggccccggcgccggcaaggggacccagtgcgcccgcatcgtcgagataaactcatcctgaaagtcgct

SEQ ID NO: 17612 - DNA, 83 bp, Homo sapiens
aaggatgtcatgttcctggcctgctggaggaaagcaggaatgttcagaggcaaatgaagattctgcagaataagcaagctcag

SEQ ID NO: 17613 - DNA, 85 bp, Homo sapiens
acaagcccatggagtccctggacttgaaggacaagaccaaggttcaagtatgtcctggtcaatatgtccacgggcttggtagagg

SEQ ID NO: 17614 - DNA, 100 bp, Homo sapiens
ctctggccctctccaaggagtaccggttacagtacttggcctctgaaacagtgctgaacttggcttttgcgcaggtgggtttggaggatttgggacaaca

SEQ ID NO: 17615 - DNA, 75 bp, Homo sapiens
agaaaacggcgagagtgggcgagaacgtccactgcgggccggcgaaagctggtgtggtggacacaggcctattca

SEQ ID NO: 17616 - DNA, 82 bp, Homo sapiens
tctacccgacacttacatgccatggccttctacgttgtgaaaatgataacccaggaggctggagaattcatgatcactttcc

SEQ ID NO: 17617 - DNA, 100 bp, Homo sapiens
tcctgctctgtggaagaaatgggcatgccagatgcctggaagatcagaggctcacattccaggagagcaagccctggaggttcactctttcaagaagtcg

SEQ ID NO: 17618 - DNA, 83 bp, Homo sapiens
catcattctgttgaagaaacgcttaacccatttttcagaagaagtgaagtcaagatgaagaaccatttgcttttctggggagt

SEQ ID NO: 17619 - DNA, 98 bp, Homo sapiens
caaatgcactgtccagacggagatccggccactgaggcggctcccagctgcgttggcgacatggccgacacccccagagatgccgggctcaagcaggc

SEQ ID NO: 17620 - DNA, 51 bp, Homo sapiens
attggagaaacaccaaaaggaatccgcaggaaatcatgaccagatctgaaa

SEQ ID NO: 17621 - DNA, 83 bp, Homo sapiens
cggcgagtcctgagcggccaggacgacgaggagcagggcctgactgcgcaggaactgtggctgcaccatctgtcttcatcttc

SEQ ID NO: 17622 - DNA, 75 bp, Homo sapiens
agaaccgaggaacgaagaaacagacattcaacatgattgcatttgaaccgtgtggttttgccatgttctgttcag

SEQ ID NO: 17623 - DNA, 74 bp, Homo sapiens
ttttgatatctggggccaagggacaatggtcaccgtctcttcagggataccaataactagtgcctcgtactacg

SEQ ID NO: 17624 - DNA, 94 bp, Homo sapiens
aatttgtatcttgtctgtgcttgttatgagctaggtaacctagggctgtgaacccaggcaggtccctgttcctgctatacgccctcaagagctc

SEQ ID NO: 17625 - DNA, 99 bp, Homo sapiens
gacctgaaggtttccaacttgctcatgaccgacaagggttgtgtgaagacagggcgcggatggcgtcggggcgccccgaggagctgtgggaggccgtgg

SEQ ID NO: 17626 - DNA, 83 bp, Homo sapiens
tacagcttcagaagaccgaagcgttcgtatctggaagaatgagtccctggaacgccagatgcgtgaaatggaagagaactttg

SEQ ID NO: 17627 - DNA, 101 bp, Homo sapiens
agaagctttatcatcggttattaaggagcttcgcaaggctactgaagcactgaaggttccggagcatttgctccatgccctcgcctgcctgcagggccccg

SEQ ID NO: 17628 - DNA, 75 bp, Homo sapiens
gcagcgtgtccagggcggctgtggaggtgttcgggaagctgaagacgttggacctctcgaacaaccagctgagcg

SEQ ID NO: 17629 - DNA, 97 bp, Homo sapiens
cagtagttaaaaaactagatccaggttggaatcctcaggtccccagtctatgtgaggatctcctgtcttctgttgaccagccactgaaaattgccag

SEQ ID NO: 17630 - DNA, 100 bp, Homo sapiens
ggacgagggggccaaggcttcctccggggtcagtatgggaatcctttaaataaatatatcagacattatgaaggattatcttacaatgtggattcattac

SEQ ID NO: 17631 - DNA, 100 bp, Homo sapiens
aacaccggtgcctggggctccttcgcagacctgcttcgtgacctctttcgagcctatgagcggcaggtcccaccacgagccgtcatcaacagtgcaggct

SEQ ID NO: 17632 - DNA, 100 bp, Homo sapiens
agccgggcgtttctcgccctgctgggatcgctgctcctctctggggtcctggcggccgaccgagaacgcagcatccacgtttcaccagtgatcattaaag

SEQ ID NO: 17633 - DNA, 100 bp, Homo sapiens
attactaggaaaagcctccagactactagtacgaggacgtaggaacgtcaaggtcgtgggaaataaaaggcagttctacacagactgcagcaacggttgc

SEQ ID NO: 17634 - DNA, 75 bp, Homo sapiens
gggccttgacaaagtgtaaaccgcatggcatggtaagtttagcgatggctgttcttgcggaaatctagttttgcg

SEQ ID NO: 17635 - DNA, 82 bp, Homo sapiens
aatgttttgaaaatgtctgtgagctggatttgattttccatgtagacaaggtgccactgattaatgaacttgaatcagcaat

SEQ ID NO: 17636 - DNA, 83 bp, Homo sapiens
agaaacccttcaggaaactcaacgcctttggcaacgccttcttgaacagcataatgcagtgaagatgggtgaagagagatgtg

SEQ ID NO: 17637 - DNA, 100 bp, Homo sapiens
ggaagcctagtcctgatgaatcaagcctgtgatcagctgtctcttggggtggctgccatcttcgggccttcacacagctcatcagcaaacgcagtgcagt

SEQ ID NO: 17638 - DNA, 100 bp, Homo sapiens
caaaatgcatgaaaaagtgggctcacagttgaaactgaagtccttgctctccgtgtgaaatggtcccatctcagactgccctgggtagacctagactggc

SEQ ID NO: 17639 - DNA, 83 bp, Homo sapiens
attggaccctcctcccaactgtaggcatgtgggcacattccatgacagtacaggattatcaggatctcatagaccgaggatgg

SEQ ID NO: 17640 - DNA, 74 bp, Homo sapiens
acacggaaactaggaagaggaaattaactatctgtacttataagccgtgttgccgcccgctgtgctatgagcag

SEQ ID NO: 17641 - DNA, 75 bp, Homo sapiens
cggatgccctgcagtacctgcagaaggtctctggagacatcttcagcaggctttctcctgtttctcagaggattt

SEQ ID NO: 17642 - DNA, 82 bp, Homo sapiens
ggcaaccccaaagccgcgcgagcagtgggaggagcaatgagaggcaatcctgacatttcattaccatccagaagtgtctccc

SEQ ID NO: 17643 - DNA, 88 bp, Homo sapiens
aagccgtggaataggtgtatcaagtaatggtgcaaagcctgaaactgcttccccacaacaaagagaaatgatggatcaggcagctgct

SEQ ID NO: 17644 - DNA, 100 bp, Homo sapiens
gcagaaagttgatataggtggacttttttacaggtgtgatgaatgcagactctgctaccattttggctgtttggatcctcctttgaaaaagtctcctaaa

SEQ ID NO: 17645 - DNA, 51 bp, Homo sapiens
gggatctttgagccttttggaagaggccatcactgtgcatgtccccatgcc

SEQ ID NO: 17646 - DNA, 100 bp, Homo sapiens
catggcccaggcagaccttgcagtcaaactgggggctcctatttcatgatctctcgttcactggggccagaatttggaggtgctgtgggcctgtgcttct

SEQ ID NO: 17647 - DNA, 100 bp, Homo sapiens
ctgttctcttcagctgccaaagtgtcacaggttacccacaggtgaagctgtacttcacaaaaacagtagaggagccgtcaaatccagaggctagcagttc

SEQ ID NO: 17648 - DNA, 100 bp, Homo sapiens
gccggactcaaccgcgtaaaaatcatgcaacagatgagtgaccaccgctacgacaaactcactgtgcctgatgacatagcagcaaactgtatatatctaa

SEQ ID NO: 17649 - DNA, 117 bp, Homo sapiens
aatcctgcggcagaagccgagttcaacatcctcctggccaccgactcctacaaggagaactgcgacacatcaccaagctgaagccctggagcctctttgatgtacttgtggaaaagt

SEQ ID NO: 17650 - DNA, 90 bp, Homo sapiens
accgtgactcctggcacctgcgccaccaagtcctgctgcatgtgggctgtatagtagttgaagattgtttgattttgctccaaaacttat

SEQ ID NO: 17651 - DNA, 74 bp, Homo sapiens
gggagggccgggcaattcccgaccgaaccaaacggatgtcacatgtacttcagtttgaggataaaagcagaaaa

SEQ ID NO: 17652 - DNA, 100 bp, Homo sapiens
taatggttcttgaagcttatcagaagtaccttgcacagaagccatatgctgggattctctctgaaagtatgaagcaggttcgatggatgatgtactggat

SEQ ID NO: 17653 - DNA, 90 bp, Homo sapiens
cagactggagtgatcctcctcagcataacatggcttgaagtaaaaggcagtatccaagtccttcacctggtcttgccctgtctactttct

SEQ ID NO: 17654 - DNA, 101 bp, Homo sapiens
aagcgatgtttgatattgaatatttcagaaaagatccaagaccattcttcaagtttgcaaagcttgaagaagtcatggaaaaagaaacttacaagacggct

SEQ ID NO: 17655 - DNA, 75 bp, Homo sapiens
tttatccaacgctctctcagcagcttccaagagaaccaatggaatggagaagttccatgccattgcagtgtcaac

SEQ ID NO: 17656 - DNA, 76 bp, Homo sapiens
gggcatttggcgagaaggctggcgttagtgaagcgcgcccggcgtcacgatgtccctggtagatttgggaaagaag

SEQ ID NO: 17657 - DNA, 130 bp, Homo sapiens
ggcacactcaacggccggaccggctggttccccagcaactacgtgcgcgaggtcaaggccagcgttttttgtagcatcagatccaacagttaaaacagatcgactgtggcacgacaagtatactttgagg

SEQ ID NO: 17658 - DNA, 90 bp, Homo sapiens
gctgcaagatttggggaatctatagttaatcttggcgacattgacaatgatggctttgaaggtcttgtggatgagcagcagaaagttcgg

SEQ ID NO: 17659 - DNA, 100 bp, Homo sapiens
ggatggggcagcgggctgcagctggcggccggaatccgcgcgcagcccgggatttgaatttgttgaaatgagcagtcgtaaatcaaagagtaacagctta

SEQ ID NO: 17660 - DNA, 82 bp, Homo sapiens
attccaagtaactcttatttgttcctggtccagaactttacacagaaaaggtgctcaaaggatatttgtttaatgaatgtgg

SEQ ID NO: 17661 - DNA, 82 bp, Homo sapiens
agacaacaaagcgctattatcctaagctgacggcctccaaccacgtgagcaacgtcaccgtgaactacaacatcaccgtgga

SEQ ID NO: 17662 - DNA, 51 bp, Homo sapiens
cacattgccaatgccaacctcatggtaaccaaggagcagtgaacagcagct

SEQ ID NO: 17663 - DNA, 82 bp, Homo sapiens
tggacagctgtccctccactacagaaacctcacagaacacagcaaaggttgatgctatgaaactgggagtaaaggaaatgaa

SEQ ID NO: 17664 - DNA, 75 bp, Homo sapiens
actcagcagcaagcacagagtatgaccaccactattaagtgagccaccagctgggcagcatcatggacctcttca

SEQ ID NO: 17665 - DNA, 100 bp, Homo sapiens
tgtggactgtcttgggcagcatgcagtgctttctggcacaccgttccggaaggcaaaagccttgtatgcctgcaaagctgaacatgactcagaactttcg

SEQ ID NO: 17666 - DNA, 98 bp, Homo sapiens
accggcgccgcgcttgctgctggtaacagggccttgcctagtgggccttccttcccaggtgtcccgacccaggctaagcttgagcatggctgagcagg

SEQ ID NO: 17667 - DNA, 100 bp, Homo sapiens
ggcgaatggggctcacgtcgagccagaggcattgatgtgcagcaggtttctttagtcatcaactatgaccttcccaccaacagggaaaactatatccaca

SEQ ID NO: 17668 - DNA, 75 bp, Homo sapiens
gcagtgcctgtctccgcacttacggatcactactcttggaatcaaagataaatccaaatactgcatatcagaaac

SEQ ID NO: 17669 - DNA, 75 bp, Homo sapiens
gccgagcccactggggctcacaccacgcaggatcaccccttctgtgtcattctctgaggaaaacaagttcttctc

SEQ ID NO: 17670 - DNA, 100 bp, Homo sapiens
aagtgtgtggagtttgcaaacaaattattgacggtcaaggtatttcatgccgagtgccggtggtggtgtgcacattgagccccggtatagacagttcccc

SEQ ID NO: 17671 - DNA, 74 bp, Homo sapiens
agagattatgggtgtgagccatcatgcccagctggctagatatttcatgtgtcacccccaaccacagtgccttt

SEQ ID NO: 17672 - DNA, 100 bp, Homo sapiens
cgtggctgcgtcaccgccgcccccccagacaagatggacaccgcggaggaagggcaaatttattcggatcaactttgatgtaactggctatatcgttggg

SEQ ID NO: 17673 - DNA, 100 bp, Homo sapiens
gagcagttcgacttcaacgctgagccaccttgggaacctagctgatgataggggggttccatctcccaacttgtccatagtacagttgtgaatttggctc

SEQ ID NO: 17674 - DNA, 75 bp, Homo sapiens
ctggtgggccgcgtcgaagacatggaccagggctacggaggagaatggggtactaagagaaaagcacgaagctgt

SEQ ID NO: 17675 - DNA, 74 bp, Homo sapiens
gctgtccgccaggccctgcaggacctgctttcggagtacatgggcaatgatgctcgacatgcagcagaaggaga

SEQ ID NO: 17676 - DNA, 100 bp, Homo sapiens
tgctgccgctgccgccctgagtcactgcctgcgcagctccggccgcctggctccccatactagtcgccggatgacacagcaagaaggccctcaccagatg

SEQ ID NO: 17677 - DNA, 75 bp, Homo sapiens
ccggtgcccgaggaggcagccaagctcgtagcctgccactccgtgcccatgccagtgacggtaacccgcaccacc

SEQ ID NO: 17678 - DNA, 82 bp, Homo sapiens
aatgagccctccctgccagccattcacaagacctgcctagagctggaacgttacctccagagcgagccctgctatgtttcag

SEQ ID NO: 17679 - DNA, 74 bp, Homo sapiens
aggaacactcaggctctgaggaggcccagaagccaaacctggaagagctggtggagttgagatctataatggag

SEQ ID NO: 17680 - DNA, 146 bp, Homo sapiens
gtctataggaaaagaggagtcagacacggggcaggctgagttcctcttgctcacagagctctgtaaagctgagctgactgctgcccactttggaggaggcggtgggctccttcacaagaagactcaacaggaaggcgaggagcggg

SEQ ID NO: 17681 - DNA, 100 bp, Homo sapiens
cctccttcgcctcggagtgggatgaggcctttgtgacactaaccacaaacgatgcctacgccaaaggtgccctggtcctgggatcatctctgaaacagca

SEQ ID NO: 17682 - DNA, 99 bp, Homo sapiens
tggcaggacgtgaaggggaagaggcccaccctggagtaaccctcactggagaatccagagaaagttcaggagccctggaaaggagaaggaataagacgg

SEQ ID NO: 17683 - DNA, 98 bp, Homo sapiens
caaaaccacaatcccacatgcacttcacagagaatgcagttgtcttgacttcaggtctgtctgttctgttggcaagtaaatgcagtactgttctgatc

SEQ ID NO: 17684 - DNA, 50 bp, Homo sapiens
ggttgggagcctgcagagcaatttggcttggtcaagtcagtgttcaaact

SEQ ID NO: 17685 - DNA, 78 bp, Homo sapiens
tggcctataatacaacctcccacaccgaccaatcctcacgattgagtgtcaaagaagctgtcacgggaagtcttttta

SEQ ID NO: 17686 - DNA, 88 bp, Homo sapiens
cgtgggataccagattcggttagaaagtgtcaaggaggcaggtggaagtcatcataaagtttctgtttcacccgtcgtccatgttcga

SEQ ID NO: 17687 - DNA, 82 bp, Homo sapiens
ggattgaagccgcctctgtattacttaccagagtttgctctccaaagctcggggaattgattccagctctgttaaactccgg

SEQ ID NO: 17688 - DNA, 75 bp, Homo sapiens
ccgagcggcggctccggggcagctccggcgggcggctcccaatcgtcaactcatgacttactggttacaggagct

SEQ ID NO: 17689 - DNA, 90 bp, Homo sapiens
ggcaggcgcggccatggcgcagctgggaaagctgctcaaggagcagaagtacgaccggcagctgagaatcaactggcagtataattgaag

SEQ ID NO: 17690 - DNA, 50 bp, Homo sapiens
ctggaagagtcgctggccgaagtgtgccatgcggagctgaatgccatcat

SEQ ID NO: 17691 - DNA, 75 bp, Homo sapiens
ctaccaagggatcacagccatcagaaacggagtcccatgaagctgaggtcttgaagcagctggctgagaaacgag

SEQ ID NO: 17692 - DNA, 100 bp, Homo sapiens
aggaactgtggacagtgaagagaggcctctcccaaagcacctgcgcaggctgtgcatttggatcagctgctatttggcaatacgaatcactgaaatccag

SEQ ID NO: 17693 - DNA, 50 bp, Homo sapiens
cgggaggaagatggcgctgcgaattcgaatggcattgtgcccatcgtgga

SEQ ID NO: 17694 - DNA, 74 bp, Homo sapiens
ggcccgcggggagcgcagcccggcggagggctaggggcaaggtaaagcattgtcgcatcaaccgggacggccgg

SEQ ID NO: 17695 - DNA, 87 bp, Homo sapiens
ctggaggggctgctgctgggaacacctggagtctccgcgggcaggtttgtttctgcgtcacatgatcttggcctacagtaagctttc

SEQ ID NO: 17696 - DNA, 98 bp, Homo sapiens
agcggagcgaacccgagagcgtggagcgggctgggccagttggatatgtcaagtgaccagatagctgccaatctgcaagcagttattaatgaagtttg

SEQ ID NO: 17697 - DNA, 75 bp, Homo sapiens
catctctgctgctctctcatttgctggccatcggattgggctggaagagcctgtattgtcctcacaatagtatag

SEQ ID NO: 17698 - DNA, 83 bp, Homo sapiens
caggtcttcatgctgctgtgggtgatattactggtcctggccaagacaatgcaaactccagtgaacattcccgtgcctgtgct

SEQ ID NO: 17699 - DNA, 99 bp, Homo sapiens
gagatgtgacccggcagtacggcaaatatggcggaggtccccagtctatgtgaggatctcctgtcttctgttgaccagccactgaaaattgccagagac

SEQ ID NO: 17700 - DNA, 90 bp, Homo sapiens
cttggaagcaagaggcagtatgcaggccggccacgcagacgtacagcctggaaccctttaggagaagcagcacccccaggggagctgtac

SEQ ID NO: 17701 - DNA, 75 bp, Homo sapiens
aaatgccaacgccgtgtctgaaggcctccccatggccacccatggaccagtcggcattcacttcctcccttctgc

SEQ ID NO: 17702 - DNA, 100 bp, Homo sapiens
ttaacttctgtttacatggaactcagacatctgcaaatcatgattctcgctgaagtctgttaattctactttttgagtacttatgaataaccacgtgtct

SEQ ID NO: 17703 - DNA, 50 bp, Homo sapiens
gtttgtgttgcgggggccggacttcaaggcataatgattataaagtggtt

SEQ ID NO: 17704 - DNA, 100 bp, Homo sapiens
cgcacttgtcttagcagttctcgctgaccgcgctagctgtatgacgccgtgcccatccagtccagcgtggtgttatgttcctgcccatccccatcaatgg

SEQ ID NO: 17705 - DNA, 75 bp, Homo sapiens
tccacctgtgggaagcaatttaagaggcaaggacctagcaacacttatgaagatcctcgaatgaactgtggtttc

SEQ ID NO: 17706 - DNA, 74 bp, Homo sapiens
tggcattgacatttaattttagggtcctttatatagaagggagagtaggcaaaatcctgacagatgactttgca

SEQ ID NO: 17707 - DNA, 51 bp, Homo sapiens
aaagagccatctgtggtgccaattgaagcaatttgcaacccaaaatgtctt

SEQ ID NO: 17708 - DNA, 96 bp, Homo sapiens
cggcccgggaccggcggcgcgcggcggccgaggccagggccagttctgtgactattgcaattctgaagaccccaggaaagcacatcctgtcaccaa

SEQ ID NO: 17709 - DNA, 50 bp, Homo sapiens
gaaaacgttcgtcaacatcacggctcttgtcaggatggtgaagctgttca

SEQ ID NO: 17710 - DNA, 100 bp, Homo sapiens
ctggaattgaagatgaaactgctgaaaatggtgtaccaaaaccggtatgtctgattgacccgggctgcttccgagaaattgatgagctaataaaaaagga

SEQ ID NO: 17711 - DNA, 85 bp, Homo sapiens
tgaatgccaggagatacaagcactttaaagtcacaacaacgtctattgaaagcccattcaaggccaaacagcctttgatgtagca

SEQ ID NO: 17712 - DNA, 75 bp, Homo sapiens
ccgtcgtcctggtgctgcagcgatgatggagcagtggtatcacctgaccttggggacatgtctcctgaagggccg

SEQ ID NO: 17713 - DNA, 98 bp, Homo sapiens
gcagccgcggcggttaagtatgcggcgccaggagcttctgctccatctggacacaagcatctgacggtagaagagttatttggaacctctttgccaaa

SEQ ID NO: 17714 - DNA, 75 bp, Homo sapiens
cgggatcaagctgtgtgcattagtacaaatggtttgagctggctgaagaagacgcgaaagcaggaagaggtctgc

SEQ ID NO: 17715 - DNA, 75 bp, Homo sapiens
cttggacctgttggaagcagtagagtgcaagccgatcgggattggtacatgatggacgagggctatgacgagttc

SEQ ID NO: 17716 - DNA, 100 bp, Homo sapiens
aatgcacgctggaactttatccaccacaggttgaaacaaatgctaaatgaacttatgcgccagcaaaatcagcatccagaaaaacctggaggcaaggaaa

SEQ ID NO: 17717 - DNA, 82 bp, Homo sapiens
gaagagtttgctaagcttgtgggaatgtctgtcctcctagccaaagaaagatatttgatttaatggatgccaaagcacgtgc

SEQ ID NO: 17718 - DNA, 83 bp, Homo sapiens
cagaggtggaagtccaagtcaaacgcagaaggactgcctcactgagcaaccaagatggaaattttgctcagccgacaaaagaa

SEQ ID NO: 17719 - DNA, 82 bp, Homo sapiens
agtcccagcagaggtaccagccgcagcaggtagcctttccagtaaatatatgactcagggaaaagcctcagcgaagaggacc

SEQ ID NO: 17720 - DNA, 75 bp, Homo sapiens
ttttgccggaggagcccctcaggccgttgatgataattagaagcatgctttccactgaacttcccgacaacattt

SEQ ID NO: 17721 - DNA, 100 bp, Homo sapiens
cgtctggctgcacgctcccctcaaggcctgggtgcttctactgcagaaatatcagctagaaccatgcagtcaaaacatctgctcaaattaatgaccatgg

SEQ ID NO: 17722 - DNA, 88 bp, Homo sapiens
cgtacccggcgcagccagagccaccagcgcagcgctgccatggagcccagcagcaagagctggaatacggctggcatcggagaaaccc

SEQ ID NO: 17723 - DNA, 50 bp, Homo sapiens
tccaaggaagaatttcctctgaagcaccgatctcacattcttgaaggtgg

SEQ ID NO: 17724 - DNA, 75 bp, Homo sapiens
gacatggaacagggactcactgggggagcagattctggccagatttctgaagaaacatggaattttctgcagtct

SEQ ID NO: 17725 - DNA, 51 bp, Homo sapiens
tagctgcggtcgcgccgagaaaggaattgaatgatctggcacgggaccctc

SEQ ID NO: 17726 - DNA, 100 bp, Homo sapiens
acttcgtggccaactgcaccctgcagttccaggagctgctgcgcacgaccggcgcctcggacaccttcgagggttgggttatcaatactctggctgacca

SEQ ID NO: 17727 - DNA, 80 bp, Homo sapiens
gatggacttgattctgatgagagccttcaaaagtatgttcgggaacagattctactagcagtagcagtaattgtaaaaag

SEQ ID NO: 17728 - DNA, 100 bp, Homo sapiens
gactcgaagccgaggctccactaatctctttagtaaattaacttcaaaactcacaaggagcatttggccatccagtgtcattggtctcagaggccagcag

SEQ ID NO: 17729 - DNA, 101 bp, Homo sapiens
taggtacctctgatctagacaaaacacagttggaacagctgtatcagtgggcacagcttctgcagaaagccgtcattacacctgattttgaaaaaaaccac

SEQ ID NO: 17730 - DNA, 100 bp, Homo sapiens
cgttggtgcggaaagcggcggactatgtccgaagcaaggatttccgggactacctcatgagaagacgccaaaagactcatgtacccatgttacaggtatg

SEQ ID NO: 17731 - DNA, 101 bp, Homo sapiens
atgccaagaagaatctagacagacaggcctttctaggaagaggatcacctagcccgggtagaagaggcaatcacccgtatgcttgtgtgtgccctgaaaac

SEQ ID NO: 17732 - DNA, 74 bp, Homo sapiens
tgaccagtacctgcaccgctttgctgcgtacttccagcagagacgagttgtactgctgtcacaggaaatggacg

SEQ ID NO: 17733 - DNA, 83 bp, Homo sapiens
gtgctcgctgccatggatgccaccaagctggcctgccttgctctgccaggaaccatgagtgaggcccgcagggacagcacgag

SEQ ID NO: 17734 - DNA, 82 bp, Homo sapiens
ggaggccgaggcgagccgcaagaagcacgaactgggactatgcagccatcgtcttctttgctaacaaccgctttgagacagg

SEQ ID NO: 17735 - DNA, 101 bp, Homo sapiens
ggctacaggatgggcgcgaacaatggcaaacagtacggcagtgaggctgatcactggagattccatcgttagtgctgaggcagtatgggatcacgtcacca

SEQ ID NO: 17736 - DNA, 83 bp, Homo sapiens
cagttcagaagtaagcgctctaagaatcaagaaaatggaccagtttgttcgttacgagctgctgtgacttactcgaagcctcg

SEQ ID NO: 17737 - DNA, 74 bp, Homo sapiens
tcacttctgcctttccagtgacaaaatggtgtgacgaaggggaggaccaggctggcgatgaagatgaagatgat

SEQ ID NO: 17738 - DNA, 75 bp, Homo sapiens
gacagattctagccgctactttgtaatccggatccaggatggtactgatcgttctgcagtgggagcgtgtgactg

SEQ ID NO: 17739 - DNA, 98 bp, Homo sapiens
cttaaaggagtggacattgctagcaatgagctcccaaagccatccagatgtggaagatgtgaaatttgtcatcaattatgactaccctaactcctcag

SEQ ID NO: 17740 - DNA, 97 bp, Homo sapiens
ggaaggttcacgaaaagttcacgttgattgatggcatccgcgtggcaacaggctcctacaggtatccaaatatatcttgtgagttgctcacttctga

SEQ ID NO: 17741 - DNA, 50 bp, Homo sapiens
cgtgtattgaaatcctgctggtgtctacttccagtggaggtgagaatggg

SEQ ID NO: 17742 - DNA, 104 bp, Homo sapiens
gagaggctttgcagttcccacctcgggaagctccggcagaacccaggcgagggacagctccggacaggtttccctgtctccttccagtcccagagtcaactctg

SEQ ID NO: 17743 - DNA, 100 bp, Homo sapiens
gaagacgatctgcacttcgcattttggcattgacatttaattttagggtcctttatatagaagggagagtagacaaatttacatgtattggagaccagac

SEQ ID NO: 17744 - DNA, 101 bp, Homo sapiens
gtgtccatggtcgctgtattgctccaaacacctgtcagtgtgagcctggctggggagggaccaactgctccagtgactgaacattcttcacgatctgaaag

SEQ ID NO: 17745 - DNA, 101 bp, Homo sapiens
cgcctcttcctttttcgacgcctccgccgccgcctgaggaggcgagctagccgggagttacaccgccaccgccaggtatgggcactaggaaaagacttctt

SEQ ID NO: 17746 - DNA, 83 bp, Homo sapiens
atttttgtattattctgcgtggaagctacacttactccagtgggaggaggactccagtttggttttcctaaacaaatcctttc

SEQ ID NO: 17747 - DNA, 50 bp, Homo sapiens
cgccactgccgcaggaggcgtgagccctgaccctctattctgcaccctgt

SEQ ID NO: 17748 - DNA, 100 bp, Homo sapiens
gatcgtggagagagatttccagtggacggacaacaccgggctgaaaccagcctggacaccaagtctgtgtcagaaggccacctcaagaggaacatcgtgg

SEQ ID NO: 17749 - DNA, 101 bp, Homo sapiens
cgttctggaatcagcttctctcattttctttccctgcaccaactagcaggtcatactaatagtgcctttctatgactgctatgagcccatggtgagaatgg

SEQ ID NO: 17750 - DNA, 100 bp, Homo sapiens
cttcttttttgagaaaggaaggaatatatcctgactgattgtggccatggtggaggtgcagctggagagtgaccacgagtacccaccaggcctgctggtg

SEQ ID NO: 17751 - DNA, 105 bp, Homo sapiens
cctctgcccccccttccccacgcaaccccagatccatttacactttacagttaacacagaaatctgcctcctgggccatgccgcttctaaggcctgtttcttctc

SEQ ID NO: 17752 - DNA, 75 bp, Homo sapiens
agatggtcaggtctggagctcgaccgggccaggtgtccctacaccacaccgaagatactcaccttgtggagattg

SEQ ID NO: 17753 - DNA, 90 bp, Homo sapiens
tgagtcgcttcaagtttatcggtattttgacagagatgttaaatgcattaaagatttctttatgaaacgtttcagctacgaaagtgagct

SEQ ID NO: 17754 - DNA, 75 bp, Homo sapiens
gtctcacattggccggcaacttgttccagttattgccttgtctgtcaagatccgcagttatgaagaacacttgga

SEQ ID NO: 17755 - DNA, 50 bp, Homo sapiens
cagaatactacgttcagctaaattaagatctgagagacctgctgtgtgac

SEQ ID NO: 17756 - DNA, 100 bp, Homo sapiens
ttggactttgtggaacagaaatgtgaaggaattcctcctgatcagcagagactgatctttgctggcaagcagctggaagatggacgtactttgtctgact

SEQ ID NO: 17757 - DNA, 88 bp, Homo sapiens
gcaagcccacgggtagcagccgaggccccagaatggagccaaaaacctgtatatcatctccgtgaaggggatcaagggacggctgaac

SEQ ID NO: 17758 - DNA, 82 bp, Homo sapiens
ctgtgacgaggacgaggaggcagccacggggcccctggagacgaggtcttgctacattgtccaggatggagaagtaggaatt

SEQ ID NO: 17759 - DNA, 100 bp, Homo sapiens
tttcctgtacctacagccacccgctatgttggggatcagccaggtgaggtaggttattcaggctctcctgctgaagctcctccaagcaagtcaccatcga

SEQ ID NO: 17760 - DNA, 100 bp, Homo sapiens
ggatgtgcgcagcgacttccagcgcagagtgccctacaactacctgcagcgggcctacatcaaggtgggaactttgaggctcagagacagagcagaagac

SEQ ID NO: 17761 - DNA, 88 bp, Homo sapiens
agcgacacaattgtctgtgacagtaacagtacttgggatcccccagttccaaagtgtcttaaaggagtgtatatgacaggaaaagaac

SEQ ID NO: 17762 - DNA, 85 bp, Homo sapiens
cagcaaggtgggcccggacggcacaccctacgttaccgtgctcaagggcgtctctggccgagcctctttttgtggaaaacgacag

SEQ ID NO: 17763 - DNA, 100 bp, Homo sapiens
ggaagcagttcagcagaagatgaaaaaaatactgcactaaagaccattcagaaggcagctctcctttctccaggtgtcatcaatcttacagaagaagtgc

SEQ ID NO: 17764 - DNA, 100 bp, Homo sapiens
ggagaatctggtccttaaggatatgtcagatggcctttttgacagccccccaggttcagatgatgcaaagcttattgatatattttatcccggagatcag

SEQ ID NO: 17765 - DNA, 50 bp, Homo sapiens
ggcgaaggcgggcggcagaggcgatcagagatgggtctcactgtgttgcc

SEQ ID NO: 17766 - DNA, 96 bp, Homo sapiens
cccaaggccatctacctggacatcgatggacgcattcagaagggccctgagcaccccaatcccggaaagccgttcactgccagagggtttccccgc

SEQ ID NO: 17767 - DNA, 139 bp, Homo sapiens
ccacccttgccctacttggactcttgattggaatgttctccctgcagcagtcagcccaaaggaagcatttcttgagacttaaagtggcattctaaaggcaatttaaaaatcatgtcaagctcagttgaacagaaaaaag

SEQ ID NO: 17768 - DNA, 74 bp, Homo sapiens
tcgacgtcttgcctgtgtcccacttgttcgcggcctatagattattttcgaaataccagtatttcgactccagg

SEQ ID NO: 17769 - DNA, 100 bp, Homo sapiens
taaggacagcaggaaccatctgccttgagacctttaaagacttccctcagatgggtcgtttcaccttaagagatgagggaacaggaaatatagtggtcat

SEQ ID NO: 17770 - DNA, 109 bp, Homo sapiens
cttggatgtgggaggattgcattcagtctagttcctggttgccggctgaaataacctggacaaagtattttggacagatatcatcaacgaagccattttcagtgccaac

SEQ ID NO: 17771 - DNA, 75 bp, Homo sapiens
ttccttcgtacccacagtgcttcatgagagtgcatacatagagacgtgaagccagaaaatatcctcatcacgaaa

SEQ ID NO: 17772 - DNA, 75 bp, Homo sapiens
tccttgatttgtccctcccagttttagatgatcagggtgtccgcaatgttgccagtgtctgtctgcagattggct

SEQ ID NO: 17773 - DNA, 100 bp, Homo sapiens
cttggagcttcggaagaaggtagaggttctagagaacactaataggcctatatgaacccaatagcaatggcgagatcaaggggtccaatccagtcttcag

SEQ ID NO: 17774 - DNA, 104 bp, Homo sapiens
gaccagtttcagttcgccgatgggaaacccggagaccaaatccttggtactaggttttgacaagcttgcatcatgcgtgagtataagctagtcgttcttggctc

SEQ ID NO: 17775 - DNA, 87 bp, Homo sapiens
ggacaactaatggatacaaatcaggattcactcagacagagccagccccagtgcctgctgagccgtttgacaacactacctacaaga

SEQ ID NO: 17776 - DNA, 83 bp, Homo sapiens
ctgtttctctgctgcaccgacctcgacgtcttgcctgtgtcccacttgttcgcggcctatagccctgggcgctgcctatggca

SEQ ID NO: 17777 - DNA, 82 bp, Homo sapiens
tgctggaggagttgatgacttagatgaagacacacccccaatagtgtcacaatttcccgacatgaagagtatttctggagaa

SEQ ID NO: 17778 - DNA, 82 bp, Homo sapiens
ccggcctggaagcctacgccctggggctggacaccaaatgctttgtggtctacagccacaccaccccaaatgtgcctgatct

SEQ ID NO: 17779 - DNA, 74 bp, Homo sapiens
atcttggatactgcaggaacgggcagcaggatgggtgtggaagcagtgatggcacttttggaggggaccccaga

SEQ ID NO: 17780 - DNA, 74 bp, Homo sapiens
gatgaagagagagcagagacagctcgtctggtatccagatggttcccatcagctggtgtgagatgcagtgccct

SEQ ID NO: 17781 - DNA, 82 bp, Homo sapiens
acctcaggacttgagtaacagcaacatggaatactcccccagttgcaagaggcgcaggaccgtggaagacttcaacaaattc

SEQ ID NO: 17782 - DNA, 83 bp, Homo sapiens
cagtctgatccttttgttggcagcgcgggcggtgatgaactttgtggttcgctaccggccagacgagcagccgtctctgcggc

SEQ ID NO: 17783 - DNA, 51 bp, Homo sapiens
cgcgagtgaggaaaggaggtactgtagctcttctcccctgtattgctagtc

SEQ ID NO: 17784 - DNA, 100 bp, Homo sapiens
tcgcttgaggccaggagttcaagaccagcctattgtgaatagtaccactataaatatgactgtccaagtgcctccaaagtgtacaaagcatcagattcag

SEQ ID NO: 17785 - DNA, 100 bp, Homo sapiens
cttggtaaaggatcatttgctggtgtctacagagctgagtccattcacactggtttggaagttgcaatcaaaatgacagccagctaaaggtgtggatgag

SEQ ID NO: 17786 - DNA, 50 bp, Homo sapiens
cccgtcagagctgaggtacttcgtgaaggcgtccgagctgggccacagcc

SEQ ID NO: 17787 - DNA, 98 bp, Homo sapiens
gttactccattgctgaggagtgattctgtcccctctgggacgaattaatgaagcagtgaatgacctcactaaagctatccaactgcagccctcagcac

SEQ ID NO: 17788 - DNA, 50 bp, Homo sapiens
ccccaggggagttctctgtgtctgtgaagccagcatccttcagaaaaagc

SEQ ID NO: 17789 - DNA, 82 bp, Homo sapiens
cctccacaacctccccctttccaatctggcaatcccagtacttggaccatgagactgtttcagccactttcatcgacagcag

SEQ ID NO: 17790 - DNA, 100 bp, Homo sapiens
atcagctctagaaagggtgtggccgttttacattggctgttttcctcacattcctcaagcagatagtcgtgcaagcactgcagtgttcccattattcgat

SEQ ID NO: 17791 - DNA, 125 bp, Homo sapiens
aacagttacagtgaactctatagattctgctggtatacagctacatccaggagagaatgctgacagtcctgcagttaccttatcccatatcacacaactggtcctcagccataacaagctaacaa

SEQ ID NO: 17792 - DNA, 100 bp, Homo sapiens
tcaccgcgggcgccaatggggagcagaaggactcggacacaggataaaagaatcagagtgtctcaacccttgacaagaggaccaagtgcctttattccag

SEQ ID NO: 17793 - DNA, 90 bp, Homo sapiens
gggccgcccgccgcagacacgggacccgcttcgaggccgctttggcgccaaatcctgagcaggtagagcagagccggagccaggtgcagg

SEQ ID NO: 17794 - DNA, 99 bp, Homo sapiens
catggtaaaaagcagtgggatttggatgtgggatccggttccttggtgtcatccagccttagcaaaccagagaacactcctatgccaccttcaccagct

SEQ ID NO: 17795 - DNA, 97 bp, Homo sapiens
agttctttggaattccattcttttccttattcttctgatgtggatccaggtgtggccgacgacgatgccctcgctgaggagcgcatgcggagaggcc

SEQ ID NO: 17796 - DNA, 114 bp, Homo sapiens
aacgtgttgcgcgaggcggtgcgtcgcgagctgcgcgagttcctggacaagtgcgcaggaagcaagatatggaggtaccacatggttctcagagcagcgaaagttttcagtttc

SEQ ID NO: 17797 - DNA, 98 bp, Homo sapiens
cacaggttccaggtctttaacgtgagcccgctgcaggtgtgcggcccagtccgagacagcagatgacttcctgaagccacagatcatcacccagccag

SEQ ID NO: 17798 - DNA, 83 bp, Homo sapiens
gccctgctggccgcgccgggagcggcgctggccccaaggcgctgccctgcgcagggagcatcagatccatgctgctgctgact

SEQ ID NO: 17799 - DNA, 75 bp, Homo sapiens
cgcggctctaacggggctttctacaaggccaccaccacctatcatgacagatggtgaagatgcggattacactca

SEQ ID NO: 17800 - DNA, 100 bp, Homo sapiens
atgaacctgttctgtgtagtaggaccacttgccgtgcagttttgaatcctttatgattgaaatcagcaagggatgtggttaccagaacaggacactcatt

SEQ ID NO: 17801 - DNA, 80 bp, Homo sapiens
aaatcccatctaccgcaactctcagttcgagagtaaaggttggtgttcgaggaagagacattgttgttcttggtgtggag

SEQ ID NO: 17802 - DNA, 100 bp, Homo sapiens
gttcaagaggaaatgtttgttcaaggcaaaaaattatttctcagtaaccatcatagctaacatttataaggtatgaagaggagatcaacaaacgcacagc

SEQ ID NO: 17803 - DNA, 103 bp, Homo sapiens
ccagagactgctgagcccgtccgtccgccgccaccacccactccggacacaggtctcggcgcggaagatggccggcggcgtggacggccccatcgggatcccg

SEQ ID NO: 17804 - DNA, 103 bp, Homo sapiens
caggaatcttgggatttagaggaaaaactgcttgatattagaaagaagagattgcgtagtcaaaccacacactccattaataaggtttcctgacagaagagac

SEQ ID NO: 17805 - DNA, 50 bp, Homo sapiens
ctctgtaagaaatatgctgatcttgtaactaaatgaccatggaatctgga

SEQ ID NO: 17806 - DNA, 82 bp, Homo sapiens
ggtgctggccgccggttgcaagcagatactggtgcctttatctccagaagaagaagagaaaaggagaatccgaagggaaagg

SEQ ID NO: 17807 - DNA, 50 bp, Homo sapiens
ccgcgcccggccggacccgggcccgagaatctccggcctgtgaaactgtg

SEQ ID NO: 17808 - DNA, 96 bp, Homo sapiens
ctccgtgtcctcccccgcatgacccccttgagttgtggaaagtaaaaatgtagccctaccaaaaggaactattgtactggcttctccaggctggac

SEQ ID NO: 17809 - DNA, 90 bp, Homo sapiens
cttccctgccggcaaggccatctgggtcacgggctggggacacacccagtatggaggccaagttcccacctggtgggaagcactgtgcag

SEQ ID NO: 17810 - DNA, 98 bp, Homo sapiens
ctgacagactaagagcaaagctacttccattccagaaagatggcatcatttttgccctcaaaagaaatggcaggaaatctactttcttcaatgtgtta

SEQ ID NO: 17811 - DNA, 50 bp, Homo sapiens
tcaactctaccaacaagtaccagttgtctattcataagaaccccaacaca

SEQ ID NO: 17812 - DNA, 80 bp, Homo sapiens
ctgcaaccgcaacatcgaccagaccatgctctccatcctgctcttcttccacaggtattttgaaggtggcgtctcatctg

SEQ ID NO: 17813 - DNA, 100 bp, Homo sapiens
cgcctatgcaacttcttatggacagcctcccactgggaaaagcttcactctgaccatcactgtcttcacaaacccaccgcaagtcgccacctaccacaga

SEQ ID NO: 17814 - DNA, 75 bp, Homo sapiens
tcacgctccactgcaacatcacggaaatcatcgagttccccatcctaaagctaaatggccggaccatggagattg

SEQ ID NO: 17815 - DNA, 74 bp, Homo sapiens
cagagagcagaagatattcacagacatgcggaatttgagttgtggacatcggatacccaaggagacgaagctga

SEQ ID NO: 17816 - DNA, 100 bp, Homo sapiens
ttcgactctgtgcgggactgctacgaaggtactctgatggctaccgcagctcctccctcctccgggccgtggcccacctgcggtcccagctctgggccca

SEQ ID NO: 17817 - DNA, 95 bp, Homo sapiens
ccattcctaggctgggagcaaaacgagtgtggtgatggtggtcttcagtgaagacaaaaacagagatgaacagctcaaatactggaaatactggc

SEQ ID NO: 17818 - DNA, 100 bp, Homo sapiens
ctgagactcctgctcagtgtagcattaagggcccagtcatatatgcacagttagaccactccggcggacatcacagtgacaagattaacaagtcagagtc

SEQ ID NO: 17819 - DNA, 90 bp, Homo sapiens
tgtgttcagacctacatccgtgagtggctaatcgtgaaccggaagtatgctatacctccggagcatggaaaacgacttgaaagactagct

SEQ ID NO: 17820 - DNA, 98 bp, Homo sapiens
ctaagaacaacagtcaggccaagccttctgcctgtgatgccaagaagtatgatgcgtttttggcctcagagtctctgatcaagcagattccacgaatc

SEQ ID NO: 17821 - DNA, 100 bp, Homo sapiens
tcccctggcagtgtgacggctgggcgacttgcgaggatgagagcgacgaagccaactgtccaggcaagccgattttttcagttgatattcaccctgacgg

SEQ ID NO: 17822 - DNA, 100 bp, Homo sapiens
cccttgcataatgtgtgtctgcttgtgatttaaagggagtgatagtcactctgagtgatgatggtcacttgcagtgttcatacctggggacagatccttc

SEQ ID NO: 17823 - DNA, 90 bp, Homo sapiens
gtattgacattacacagtgttaacaatgcatccacagaggcacaacagggttctatcaaggaggaaatggactgggcaacgcagccggtt

SEQ ID NO: 17824 - DNA, 83 bp, Homo sapiens
tgaagaatgatgatggtgtcattccctgtcaaaataagtatccatttcaggccctcgggaccaaggatcacgtcatgactccg

SEQ ID NO: 17825 - DNA, 100 bp, Homo sapiens
acagacattgtcatggatgttggctgcagtataaatccagccattgacataggccagctatcagttgagggatttgcagttgataaaatggctggagagg

SEQ ID NO: 17826 - DNA, 50 bp, Homo sapiens
aaggccagcacctgaagaattgatggtccggcctctttggcctacccccg

SEQ ID NO: 17827 - DNA, 76 bp, Homo sapiens
ctcctgagagccagccctgacgtgaactcattttatctgccacgacccagaagggtgcatgagctggaggagatgg

SEQ ID NO: 17828 - DNA, 88 bp, Homo sapiens
ccggattgtactgtatggggactccaattgcttggatgacagtcaccgacagaaggcagtggccggtgtccagctgcctactttctgc

SEQ ID NO: 17829 - DNA, 90 bp, Homo sapiens
cttctacaacaggaaagacttcaggtattaagcatcgatgtgactgacagaaacatcagcctacataattttacttcattgacgtggata

SEQ ID NO: 17830 - DNA, 90 bp, Homo sapiens
gaaaaaatggttgacctcacccaggaagggtgcaggtacaacgtgatgcatgttgctgccaaagagaaccaggcttccatctgccagctg

SEQ ID NO: 17831 - DNA, 101 bp, Homo sapiens
atctggttactgctgtgtggctgcactcactctacgtggagttgggccctgcaggaaggacggacttcaggggcagattacaggctgtgccagccctggaa

SEQ ID NO: 17832 - DNA, 91 bp, Homo sapiens
aaatgcttgctgacctgggccagagctcttcccttacgcaaataacgaaggaggcccaacttcattcaataaggagcctgacggatttatc

SEQ ID NO: 17833 - DNA, 83 bp, Homo sapiens
ctggtggtcctggtctacgtcatcgggacttgaaagaggagattgatattcgactctccagggttcaggatatcaagtatgag

SEQ ID NO: 17834 - DNA, 90 bp, Homo sapiens
gcccccccagacaagatggacaccgcggaggaagactcccaggaaggaaattacaagtcagaagtcaacagcaaacccaggaaagaaagg

SEQ ID NO: 17835 - DNA, 105 bp, Homo sapiens
caagacacagatatgcacttatacccataccattagcagtaattacaacatgtattgtgctgtatatgaatgactatggaaatgatgttagacaaaaagcaaatt

SEQ ID NO: 17836 - DNA, 74 bp, Homo sapiens
gggtgatgtggctgcggcatcgccggcctcgctatgtgtggcttcctgttgtggtgcatggccccgagcccttc

SEQ ID NO: 17837 - DNA, 100 bp, Homo sapiens
ctcggagcggcgggtcccgtctcgacagatgcgtttagcccagcccctgctggtaaccaaggtcctcctccaatgatgggtatgaatatgaacaacagag

SEQ ID NO: 17838 - DNA, 101 bp, Homo sapiens
tctgaatgtataccgaaataaagatgccttaagccattttgtaattgcaggagccaagcaagagcattttcctgataacctgctcccatcctgggccatta

SEQ ID NO: 17839 - DNA, 83 bp, Homo sapiens
ttgacgtccagaagaccaagtacctgcagatcctgacctctctgatgagatggatcgaacatccagtcatggataaaaatgag

SEQ ID NO: 17840 - DNA, 100 bp, Homo sapiens
gggagatgatcctggcggattttcaggactcacaccacccggcaagaactgctcactacggctccctgccccagaagtcacacggccggacccaagatga

SEQ ID NO: 17841 - DNA, 75 bp, Homo sapiens
ggagcgtcaacagcagcaccatgggaacttagtgatttggcccgtgaccctccagcacaatgttctgcaggtcca

SEQ ID NO: 17842 - DNA, 82 bp, Homo sapiens
ctgactctgactctcggactgagaaacgcaaggaatagctattcagtcagacagaaccacttatcacgttttgcagtatctc

SEQ ID NO: 17843 - DNA, 100 bp, Homo sapiens
cttacactttcttgtacaaagtggaatttcctactgtatcatgatcatcataggagtggagaacatgcacaagattcagaactggagtttcctgaaagac

SEQ ID NO: 17844 - DNA, 75 bp, Homo sapiens
agaccatatctcttctttggattattttacaaaaccagactaccaggttttgggatttgagattgacgcggtgaa

SEQ ID NO: 17845 - DNA, 74 bp, Homo sapiens
cagaggtggaggcgctttgaaagacccatcctcatgccaacaaactacccttgaaggattctttcacttacgag

SEQ ID NO: 17846 - DNA, 75 bp, Homo sapiens
agaatgagtacctacgctatcaggaggccctgagtgagctggccactgcatattactgcaatgtctgtgactgtg

SEQ ID NO: 17847 - DNA, 50 bp, Homo sapiens
gctgagggcagagactctcccgtgagacggtttaagcggaagcatcttac

SEQ ID NO: 17848 - DNA, 90 bp, Homo sapiens
tgggacttaagttgaacggcagatatatttcactgatcctcgcggtgcaaatagtgcagctgtctgcttcagaaagtgagggctccagga

SEQ ID NO: 17849 - DNA, 100 bp, Homo sapiens
accctcgtgcctccctgaaccactccactgcctttaaccctcagcctcagagtcagatgcagggtatcatgatattagctggtttgacatcaagtcattt

SEQ ID NO: 17850 - DNA, 75 bp, Homo sapiens
gccctgtctcctcgcagatgagattctgaagggagtggtaatggaagtgaagatgcttcaaaggacagtggagaa

SEQ ID NO: 17851 - DNA, 75 bp, Homo sapiens
aacattcagggtgtctatagcccgattgttttcggctttgtgagaaaccttaccatcaaacacgatggccagcaa

SEQ ID NO: 17852 - DNA, 83 bp, Homo sapiens
gggggacccgcggtccccaccgtgcagcggggcatcatcaagatggttgataacactgatgctgaggggaggctcatactggc

SEQ ID NO: 17853 - DNA, 87 bp, Homo sapiens
agaagtcattgtaagaatttcacatacattatatgacctagacaagactcatatgaacgagcaaaacatatcttgaaaactcatgca

SEQ ID NO: 17854 - DNA, 97 bp, Homo sapiens
cagccctcagcccacttaggataatggcgacagctgagggatatggaatattatcttgtaaaatggaaaggatggccagattctacaaatacttggg

SEQ ID NO: 17855 - DNA, 100 bp, Homo sapiens
agcagaaagcatttaaccagcatggctacttcatattttggaaagcagtttttaagacaagtgaccaagaatatggcccaggtgaccaaagccctggaca

SEQ ID NO: 17856 - DNA, 96 bp, Homo sapiens
ctcagctctctgagtacttcctagcatttggacctgtggccagtgttgtcatggacaaggacaaggttgtgaccgagattcccgacgagagagact

SEQ ID NO: 17857 - DNA, 90 bp, Homo sapiens
atggacggtttcgccggcagtctcgtgccgcagaatggaattcggcattgttcctacacagcttctcggcaacatctctatgttgataaa

SEQ ID NO: 17858 - DNA, 82 bp, Homo sapiens
ctgggagctggaggaaccgcgctatgctaagaaggaatctgatcttaatggcgcccagatcaagcttcgagaatatgaagca

SEQ ID NO: 17859 - DNA, 100 bp, Homo sapiens
aatcaagatttaacattccaacacataaaaattatttatccaacagctcctcccaggctttaaaggagatagatgaagttggggacctattgcagctgaa

SEQ ID NO: 17860 - DNA, 75 bp, Homo sapiens
acggccagatctgccctccacaattctgtggtgttcttggtcacacatttatggagtttctgaagggcagtggag

SEQ ID NO: 17861 - DNA, 125 bp, Homo sapiens
gcggaagatggtgttgctgagagtgttaattctgctcctctcctgggcggcggggatgggaggcctcattgctacgatttcagagtaccctggtaatagctgagcatgcaaatgattccctagca

SEQ ID NO: 17862 - DNA, 100 bp, Homo sapiens
ctagaaggatctagggaggcctattgtttagatggaatgtggactacaccaccattgtgtttagaaacatgttccaaatcaagtatagatattgagaatg

SEQ ID NO: 17863 - DNA, 100 bp, Homo sapiens
gcttgaggggctgcgtgaggcgcggaggcaggaggcaagtgaggcctatctggttggcctttttgaagacaccaacctgtgtgctatccatgccaaacgt

SEQ ID NO: 17864 - DNA, 74 bp, Homo sapiens
caaagacagtgaagaactcgagcctcccaaagtgaaatgcctgaccaagatctggcaccccaacatcacagaga

SEQ ID NO: 17865 - DNA, 109 bp, Homo sapiens
gaagtcagttccttgtggagccggagctgggcgcggattcgccgaggcaccgaggcactcagaggaggttaacacagaaatctgcctcctgggccatgccgcttctaag

SEQ ID NO: 17866 - DNA, 83 bp, Homo sapiens
ccgctctcagctggtgaagacatgacgaccctggactccaacaacaacacaggaactgtggctgcaccatctgtcttcatctt

SEQ ID NO: 17867 - DNA, 100 bp, Homo sapiens
tcttcagatcttcacagcacagttcctgggaaggtggagccaccagcctctccctgagttcttcgtaagtacatcttaaagctgtcaagatggttctagc

SEQ ID NO: 17868 - DNA, 75 bp, Homo sapiens
gctcgagaaccgtttggcaatatgtacgacgcggatgaggctatccaacttgataaagtcaatcttcaagtatat

SEQ ID NO: 17869 - DNA, 83 bp, Homo sapiens
gataaattcccggaaccgcgattcggcgtgtcaggcttgggcactgtttaaaggaaagttccgagaaggcatcgacaagccgg

SEQ ID NO: 17870 - DNA, 76 bp, Homo sapiens
aaggacttcaaggatttctacctttccatagcaggtgctgctagctgaggaggggatagctcctctttcttctgca

SEQ ID NO: 17871 - DNA, 98 bp, Homo sapiens
cgccaccgctcccggccgccgcgctccggtacacacagccacagtagaatgttacaatccaagaacaaatgaatggacctatgttgccaaaatgagtg

SEQ ID NO: 17872 - DNA, 97 bp, Homo sapiens
cggatcaggagccgccgccgccatatcaggactcctgagagcagcctccatgaggccctggaccagtgcatgaccgccctggacctcttcctcacca

SEQ ID NO: 17873 - DNA, 82 bp, Homo sapiens
ccctcatcctggttctggaatcctcagttcaagcccaactatggaaaccagcaatatggaccaaacagccagttccccaccc

SEQ ID NO: 17874 - DNA, 100 bp, Homo sapiens
acccttcctgcgattctacttagatattgaagcacagattcgagaaattcaaggcaagaaggcagctcttgatgaagctcaaggagtgggcctcgattct

SEQ ID NO: 17875 - DNA, 87 bp, Homo sapiens
taatccaactcagtatgaagagcggatgaggatacagaaggctggaggaaacgtcagaactgataaatttcaaacggaagagagtgg

SEQ ID NO: 17876 - DNA, 75 bp, Homo sapiens
tgacatacaagtgtgcagtggttgatatgtgtcacaaagatgtctacacggaactgccagggaatggactcagtg

SEQ ID NO: 17877 - DNA, 96 bp, Homo sapiens
gactcgagccctccagcgaggcaacaggtcctggacccaagccagaagcctctgcaaagcttccttccagacctgcagataactatgacaactttg

SEQ ID NO: 17878 - DNA, 84 bp, Homo sapiens
aagaccacggcgtagcagaagccattccgacaatgatagggaagtcgagataacatgagtattgtactagtttgcttttcaaat

SEQ ID NO: 17879 - DNA, 100 bp, Homo sapiens
tacctgcggccaattcggtggaacgaggacgcggactgcgaaggcaggaaactacagtcgtcgggaaggaacaagaggctccagttggagtgctcagaat

SEQ ID NO: 17880 - DNA, 50 bp, Homo sapiens
caccgaggactccgctcctgcccagggctcattgtcatccccaagccagg

SEQ ID NO: 17881 - DNA, 98 bp, Homo sapiens
tattatccaccgggacctgaagggaattgtgggtaacttggccagcggcaagtctgccctggtgcaccggtacctgacgggcacatatgtccaggagg

SEQ ID NO: 17882 - DNA, 106 bp, Homo sapiens
ttgcatgtccagagagcagacatgaaccgcctcatcatgaactacctggtcacaggtggaatgaggtaccatctactgtctccagaggaccgagaagaacttgtag

SEQ ID NO: 17883 - DNA, 78 bp, Homo sapiens
tgctctgtgtgccatggacgggagggtgtgaagacagagaatgaccacatcaacctgaaggtggccgggcaggacggc

SEQ ID NO: 17884 - DNA, 50 bp, Homo sapiens
ctcctgagtagctgggatcacaggtatgtgccaccacacctggctaattt

SEQ ID NO: 17885 - DNA, 98 bp, Homo sapiens
ggctccccaaccgggagcggctcacggcggaggacgacgcgctcaaccagatcgcgcgggagaccatcatcaaagaggggatgctgaccaaacagaac

SEQ ID NO: 17886 - DNA, 100 bp, Homo sapiens
tcttccaaggcactaccaatatgttatctccagatgccgcgcaactgtctgatctcagttcatgcttcgggctcagaatcaggttctgaaaaaaggtgtt

SEQ ID NO: 17887 - DNA, 100 bp, Homo sapiens
tctctttaattggttgcagttgagctaatggtggagccaaaatgctattgccctgtcttcatcaacatttaatcagtggcttcgtcctgttcatcgccaa

SEQ ID NO: 17888 - DNA, 104 bp, Homo sapiens
atcgacaagaccatgctggcaagtctgaaggtcaagccgagacgcatccagagctttcgtgaccggggactgttctgaagcaggcctcgtggatgacgtatccg

SEQ ID NO: 17889 - DNA, 50 bp, Homo sapiens
gaccctgcggactactgcaaagatgtgttttcgcattataacaaggacct

SEQ ID NO: 17890 - DNA, 100 bp, Homo sapiens
aaggacaaaactattcaacatgtggaagtattttgttatgccaggagctgtgactgatgagaattaaaggccatggatgaagatgggcttgaattacaac

SEQ ID NO: 17891 - DNA, 100 bp, Homo sapiens
gaagaagcttatgagtttgttcgtaaaggacttcgtaatgatgtcaagagtcatgtctattatggcgatgagatcgccattgagctgcggagcagcgtgg

SEQ ID NO: 17892 - DNA, 99 bp, Homo sapiens
ctggatgccaactctgcccttatggaattggacaaagggaaatcaatattatgtagcaaagaagttccagcacaagacttgagaaaactctgtgagaga

SEQ ID NO: 17893 - DNA, 100 bp, Homo sapiens
tgaagccgaagagtggtaccgctccaagacacctggatttcattagcatcatgacctacgattttcatggagcctggcgtgggaccacaggccatcacag

SEQ ID NO: 17894 - DNA, 50 bp, Homo sapiens
tgaagatgccttctcagtcagttgaggacccagatgatgtggtaccagtt

SEQ ID NO: 17895 - DNA, 75 bp, Homo sapiens
agacccatctttatgcaaagccagcgttacagtaatgttccagtgagaacaacatgcccagaaccaacaaaaccg

SEQ ID NO: 17896 - DNA, 82 bp, Homo sapiens
gccgcctggctccccatactagtcgccgaaacatgattcccgtgacagaattccggcagttctctgagcagcagcctgcctt

SEQ ID NO: 17897 - DNA, 100 bp, Homo sapiens
tgagagttcaaagattctttgtagcagacactgcaaatgaagctctcgaggctgctaagagactaactcttcgtgcgagaacctgagaagaggctgggcg

SEQ ID NO: 17898 - DNA, 89 bp, Homo sapiens
aatgtcggggatggacctccagatttccttactggcaagagggcacattgggagattcagcttgcaagagtcctgaatctgatctagaa

SEQ ID NO: 17899 - DNA, 74 bp, Homo sapiens
ggcccttttggttcactacaaggagcatttcagccgaaggccatcgaagacggcaatttggaggaaatggaaga

SEQ ID NO: 17900 - DNA, 97 bp, Homo sapiens
cggagtgactgggacctgggaacctactgtggggccgcggccggaccgagcgcctcgacctcggtctgagatggcggcagctatgccatccacgact

SEQ ID NO: 17901 - DNA, 78 bp, Homo sapiens
gcctccaggacctgcacatccactcccggcaggagctggcgtgcggccaggatgggcagctgaagggcttcgcggtgc

SEQ ID NO: 17902 - DNA, 100 bp, Homo sapiens
gcgcatgcagctgctgctgaccctggccttcaaccccgagccgctggtgctacagagcggttctggtgaggttggaaggatgcagccacccggttgtcat

SEQ ID NO: 17903 - DNA, 51 bp, Homo sapiens
cagacccaggactctgcgactttacagtgctgcagcagctcccagtccagt

SEQ ID NO: 17904 - DNA, 82 bp, Homo sapiens
gagctggacggcgagcgcgagcggcgcgagaaagccaccttgaacaaagaatcctgcaggtgctgacagaggctggctcccc

SEQ ID NO: 17905 - DNA, 97 bp, Homo sapiens
ccagggggatgttgacgaagatcttatctgccctatttgcagtggagtcttggaggagccagtacaggttccccctactgagacagttcctcaggtc

SEQ ID NO: 17906 - DNA, 83 bp, Homo sapiens
ccagcccttccgccacggccgtctctggagagcagcagccaggcccagacatgtccgtccttgtaagttaaaagcttccatgg

SEQ ID NO: 17907 - DNA, 82 bp, Homo sapiens
aaggacaaaagccaagaggaggacagttcgctacacagcaatgcatcgaggattttttatcaagcagaaatgcatcgaacaa

SEQ ID NO: 17908 - DNA, 100 bp, Homo sapiens
gctggcagagcaacgggtgcccctgagtgtgcaactgaagcctgaggtctccccaacgcaggacatcagttacatggacacagaacagtatgaagaagca

SEQ ID NO: 17909 - DNA, 98 bp, Homo sapiens
cgagaccttccaccagcaaagactcatctcatccaaggtgaccattgtgaggtagatattttgttctaattttccagatgaggaagctgagaccctaa

SEQ ID NO: 17910 - DNA, 82 bp, Homo sapiens
ccccaagctaggatttctgcagctcatgaagccttggagataaatgagacagcctttcctgcctcagggaagaagagagaga

SEQ ID NO: 17911 - DNA, 75 bp, Homo sapiens
aaaaagcctatattcagtagctcgcaggtgagccggcctcatcctagtgactaccccctcctgatcctctttgtg

SEQ ID NO: 17912 - DNA, 83 bp, Homo sapiens
gaggcatgagaagtcccgcaagtttctgcttagcaatgtccttgtggcgggcgtgtttgtgtgcctgctggagtacccccggg

SEQ ID NO: 17913 - DNA, 74 bp, Homo sapiens
ccgagctgcaaccgcctccgcctattacagagacggaaacgaggtgaaaagggagaagtggtggaaactgttga

SEQ ID NO: 17914 - DNA, 100 bp, Homo sapiens
gagtccgggtccagctcaaacaggaagatgggagcctctgccttgtacagttcccatcacgtatttcagagagatgggaatgatttgcacatgacatata

SEQ ID NO: 17915 - DNA, 51 bp, Homo sapiens
gaaatggtacacgcagaacatgggccaggaaaagctgcttataagactcac

SEQ ID NO: 17916 - DNA, 90 bp, Homo sapiens
cagagatgtgatgttggagaactatagcaatctggttttcttggtatttggaaaccatgttcacactactttttcagttactgcagcaag

SEQ ID NO: 17917 - DNA, 75 bp, Homo sapiens
gaaaacatcagcaaatggcttagaaacatagatgaggttatatatgccgcaattttacagggtcttctgctttgc

SEQ ID NO: 17918 - DNA, 82 bp, Homo sapiens
ctgagcgcaactagcggcgggtcgtgggcacctccagcaaccatgtccaagggacctgcagttggtattgatcttggcacca

SEQ ID NO: 17919 - DNA, 74 bp, Homo sapiens
ccaacatcttcttcatgattgacagcttcgaggagttcgatcctttggtacagaagacagaccgacagatcgtc

SEQ ID NO: 17920 - DNA, 74 bp, Homo sapiens
gcggaggtcgataagctggaactgatggaattagcttaccgaaaggagatggtgagagctgacctaattaacaa

SEQ ID NO: 17921 - DNA, 87 bp, Homo sapiens
tcctgtggtgacgtcagaccaagaggtgtgggaaatggaactggatagactcaagaatcaggatggcgaaataaataggaacattat

SEQ ID NO: 17922 - DNA, 75 bp, Homo sapiens
attccaagtaactcttatttgactgggcagtttgacccttaagcctgaagattcaactgtcctgctctttgaagc

SEQ ID NO: 17923 - DNA, 98 bp, Homo sapiens
tgagggcttctgcagatgctaagaaggattgtcagctgacctctgtcctgtgtgcccagtggccccaggtgacgtgtcttcaagaagaggctgagctg

SEQ ID NO: 17924 - DNA, 83 bp, Homo sapiens
aagaaattgagggttcttgccatggaactgtggctgcaccatctgtcttcatcttcccgccatctgatgagcagttgaaatct

SEQ ID NO: 17925 - DNA, 82 bp, Homo sapiens
catcgttaaagtctctcttcaccctgccgtcatgtctaagtcagaggttgaaaggattgttgacaaaaggaaaaataaaaaa

SEQ ID NO: 17926 - DNA, 100 bp, Homo sapiens
cacgattcttctaatggatgggaacatggggcaactcatgcagcaattccagaaccccgacttcccacccgaagtagaggaacaggatgccagcaccctg

SEQ ID NO: 17927 - DNA, 96 bp, Homo sapiens
ctcagccggacctgcttccgccagtggagacaacagggcagcaggatgggtgtggaagcagtgatggcacttttggaggggaccccagatacccca

SEQ ID NO: 17928 - DNA, 50 bp, Homo sapiens
gggagcagaaggactcggacacaggtcacgaacgagatcacgccggtgct

SEQ ID NO: 17929 - DNA, 50 bp, Homo sapiens
tgtgaaagggtggggagcagaataccggattaagttgtcatcattctggg

SEQ ID NO: 17930 - DNA, 75 bp, Homo sapiens
caagaaacatttcttacgtgataatgtgaagcgtcagaggtccctgtttgatagttactggggcttccggatgca

SEQ ID NO: 17931 - DNA, 75 bp, Homo sapiens
aaatatctttggcttgcagccaacaatgggacagagtgcaagacgatgacttgcaaaatgtcgcagctggaacgc

SEQ ID NO: 17932 - DNA, 100 bp, Homo sapiens
gccgcttgtgctgcgcggccacctcatgaaaaatggctacaaacttcctagcacatgagaagatctggttcgacaagttcaaatatgacgacgcagaaag

SEQ ID NO: 17933 - DNA, 100 bp, Homo sapiens
ccgccgccatgggctcctcgcaaagcgtcgagatcccgggcgggggcaccgagggctaccacgttctgcggaccccctggttgtggaatacgaggcattg

SEQ ID NO: 17934 - DNA, 98 bp, Homo sapiens
aactaccgctgctggaccacaaaccgctgccagaaaaggagaactaatgccgacgtgatgaccgccctgtcccagggctacaggatgccccgtgtgga

SEQ ID NO: 17935 - DNA, 74 bp, Homo sapiens
gctcgatcttgggacccaccgctgccctcagctccgagtccagggcgaggctgaccccgcactacatctaccca

SEQ ID NO: 17936 - DNA, 75 bp, Homo sapiens
ctcatcttggctgctgccgacccaaggattataaggactgaaagaggtgtccccactgcctctaaatctcaaacg

SEQ ID NO: 17937 - DNA, 51 bp, Homo sapiens
gtccatatggccatatctccaaaaggatgaggagaacaatccccttgagac

SEQ ID NO: 17938 - DNA, 100 bp, Homo sapiens
ctgcagtggcgtgcccacaccactcctgaccacccgctgttcttgctgctgaacgccaaggcacaggctgttaccctcaccgtagcccaggccttcaaag

SEQ ID NO: 17939 - DNA, 98 bp, Homo sapiens
aaaggagacccgactgcaactgctggattgctgcaaggctgagggacgagaacgaggttcctgatgttattagcagcataaggcaattatctaaagcg

SEQ ID NO: 17940 - DNA, 100 bp, Homo sapiens
cggcagcggctccttcggagacatctatctcgttggaaatggaggatgaagatacaattgatgtgttccaacagcagacgggaggtgtctactgaaaagg

SEQ ID NO: 17941 - DNA, 100 bp, Homo sapiens
ccggactaaggaccggggacttcttgattgagctccagaacctgggtatcaacccagcaaacattggcttcagtaccctgactatggagtctgacaaatt

SEQ ID NO: 17942 - DNA, 98 bp, Homo sapiens
gcctggaaggtgcgtgtggggctgggtctcggagtgggagacgtggagtgcagctggctggaggcgtgatcctgggtgtggccctgtggctccgccat

SEQ ID NO: 17943 - DNA, 88 bp, Homo sapiens
gacccggcggctgtggaggccacgctcagctcgccaggcggcgcagggttcctcatgagagtgctggactcctacggggatgactacc

SEQ ID NO: 17944 - DNA, 76 bp, Homo sapiens
gaacagttgcatgctgggcctgccacggaggagccaggtccctgtctgagccagggaggagaaccagccaggctgg

SEQ ID NO: 17945 - DNA, 75 bp, Homo sapiens
gacagaaagctggaagttgaaatgggagtgttcctgtgtggctcctgctcctgctgtgtgtcgggcttattattg

SEQ ID NO: 17946 - DNA, 83 bp, Homo sapiens
atggagctctaatccccacgcctgggatgagtgcagaatatgccccgcagggtatttaactgagcccactcgcaagttggagc

SEQ ID NO: 17947 - DNA, 100 bp, Homo sapiens
aagaaaccaaatcctccaaaatgaaaagaaaaaaatgcaagcacatattcaggattgcctacagcgctcctttaaggcacaggttttctcctgccctgct

SEQ ID NO: 17948 - DNA, 75 bp, Homo sapiens
ttcatttccgagcgggtggaggtggtgtccccactgagctcttggaagagagccccgtcgcagaatttagtctca

SEQ ID NO: 17949 - DNA, 100 bp, Homo sapiens
ggaatgcctggacaaactggccccaagccccaaagatggcccacacagggaccaccccctgggcggcgttcaccccatggagttgggccccacagccact

SEQ ID NO: 17950 - DNA, 78 bp, Homo sapiens
ggtttcatggacgggaagcaggcgtgcgtgctcatgattttggaagatggcaaagttcatgacacccgtgatccagga

SEQ ID NO: 17951 - DNA, 51 bp, Homo sapiens
atgatcaagggtgttacactgattgctctggaagcagccaaagcactggat

SEQ ID NO: 17952 - DNA, 100 bp, Homo sapiens
cctctccagggagtgctctgttcacggctccatcgctgttagacttaaccaccaccatgtcgagcaaaagaacaaagaccaagaccaagaagcgccctca

SEQ ID NO: 17953 - DNA, 90 bp, Homo sapiens
ccaggacgcccagggccagcgcatcggccacttcgagttccatgatattctctaagccgctttcatcatgggagaaatagagcagaggcc

SEQ ID NO: 17954 - DNA, 100 bp, Homo sapiens
gctgccgccaaggtgttcggtccttccgaggaagctaaggccgcgttggggtgagaccctcacttcatccgattcaaccctatgaaaagataaaggccag

SEQ ID NO: 17955 - DNA, 82 bp, Homo sapiens
tggggactacgacgtccctcaaaccttgcttctaggagataaaaagattctgcttctcagaagatgcactattatagatact

SEQ ID NO: 17956 - DNA, 100 bp, Homo sapiens
tacccgccaagctgtcatcacaaaagagttgattgaaattatctctggtgctgcagctctaccagcatctcagacatgtcgaaaaagatgttttgatccc

SEQ ID NO: 17957 - DNA, 100 bp, Homo sapiens
ttagtaggcaaagacacttctaccacaacaatcagagtggattcaactgcacataagaagaacataatgttgaagtcatttcagagtgcaaatatcattg

SEQ ID NO: 17958 - DNA, 88 bp, Homo sapiens
gcggcgttcggggaaatggctgcgagaccctagaggcctgcgattgggtaactcaaggcgtccctggagtacactgaggataagtgtt

SEQ ID NO: 17959 - DNA, 74 bp, Homo sapiens
gacgcccgaggacagggaggtgcgtctgcagctggcgcggaagagaggctgaggggatctggcggtggagcgct

SEQ ID NO: 17960 - DNA, 90 bp, Homo sapiens
tgttttcaaaactggatatggccaggatgctatagcattgtcagtcaacatcggcaagtatagacagaagcgctcccttagaaataggtc

SEQ ID NO: 17961 - DNA, 98 bp, Homo sapiens
tctttccgccctaatggaggtctccagtttcggctcccagaaccctggccgaagctcacctccccctggctatgttcctgagcggcagcagcacattg

SEQ ID NO: 17962 - DNA, 78 bp, Homo sapiens
aaaattcgatttgcaaatcattcagtgaatcccaactgttatgccaaaggttcgtggtttacagctacaagtacgtgc

SEQ ID NO: 17963 - DNA, 82 bp, Homo sapiens
gacacggtggctactctgcctcggggacgaaagcagaccaagatcactccatggatgaaatgacagctgtggtgaaaattga

SEQ ID NO: 17964 - DNA, 98 bp, Homo sapiens
cgagtcaaggcctcccactccttcctccgagggctgtttggcctgcctagggtagttaaaagacgagtgaatgctctcaaaaacctgcaagttaaatg

SEQ ID NO: 17965 - DNA, 75 bp, Homo sapiens
cctgcaggattattgaggatggagatggtgctggtgcagacgaagcggcgggctctggagaagattgaccttaag

SEQ ID NO: 17966 - DNA, 98 bp, Homo sapiens
ttccagtgccaaaccaaactggagctggtgcagcaggaattgggatcgtgtcgctgcggtgactgtaggacgaggatttggtgtcacataccaactgg

SEQ ID NO: 17967 - DNA, 101 bp, Homo sapiens
ttaaaggaacctctacaacgaaggtgaagccacggaagataagactgtccaggacggccggcagtttctaaagtatgttgaccccaagctgggagtcccac

SEQ ID NO: 17968 - DNA, 75 bp, Homo sapiens
gtggaatcaataagccatggcatctaagaaatttgctgttaaatgtggggctgccttccaggaggatgatgtcat

SEQ ID NO: 17969 - DNA, 100 bp, Homo sapiens
tgagttgcctagtcgcggctacggcgtcatggaggagatccggcggcagggcaagctgtgcgacgtgaccctcaagaaaacctcggatcaattctcagct

SEQ ID NO: 17970 - DNA, 75 bp, Homo sapiens
ctgagcttcaaaaggggggacatcctcaaggcaagttaggaaatcaacattgaatcccaatgcaaaggagttcaa

SEQ ID NO: 17971 - DNA, 100 bp, Homo sapiens
gcactatcgaagtccccaaatgcttcaaggaatgcagtaatagtggccttgtcttcaaaatcatgggatgtagagactgcaacagaattgcttctgagta

SEQ ID NO: 17972 - DNA, 83 bp, Homo sapiens
caacagatgaagacagatgcaccaacgaggttgaaaggattgttgacaaaaggaaaaataaaaaagggaagacagagtatttg

SEQ ID NO: 17973 - DNA, 75 bp, Homo sapiens
aagatctacctgtacacgcacctgaagcaacagcccatctgcttcttacaccagtaatttggcctacagcttcta

SEQ ID NO: 17974 - DNA, 98 bp, Homo sapiens
cacatatttacctgaatcacatcgagccactgaaaattcagagtgacaaaaagagtagtccccagaaagaagttaagtatgaacccttttcttttgct

SEQ ID NO: 17975 - DNA, 75 bp, Homo sapiens
attcggtggactgagagatggctattatatccaagtggtggacttgctttgtgaagagacagttcatgaacaaga

SEQ ID NO: 17976 - DNA, 102 bp, Homo sapiens
ttggccttgaggaagaagacatgctctacagtgctcagtctttgagcatcgcacagaattattttaaaaaaaagcagtgatccaagcaattgaattggaagc

SEQ ID NO: 17977 - DNA, 83 bp, Homo sapiens
cccttgccttgagtcagtgcgccgctctccagcccgcttgaacgaacatgaaaggctcccggagcagcgctgactcctccagg

SEQ ID NO: 17978 - DNA, 100 bp, Homo sapiens
aaggtcagctgctggtacaagtacctccttttcagctacaacatcatcttctggcatgatggaagtggttcattgcatgatattcaactgtcattgccat

SEQ ID NO: 17979 - DNA, 105 bp, Homo sapiens
aaagcacaggaatctcactctgttaaagctggtctgttctaactgaggcgatggatgactacagtgtgatcggccgctccctgttcaaaaaggaaaccaacatcc

SEQ ID NO: 17980 - DNA, 98 bp, Homo sapiens
ggagaatggcatgctggtgacggacagtgcagggaagcaactgcagagtcacaaggacatagtagctgaggggttgcgccagctgctgggggaggaga

SEQ ID NO: 17981 - DNA, 83 bp, Homo sapiens
ctggtcgacgtgggtcagaggctgcgccgtgtccagaatgacagggtccagaaactggcgagccacgagggacatgtgtaggt

SEQ ID NO: 17982 - DNA, 96 bp, Homo sapiens
ggcgatcttcctgtttgtggataagacagtcccacagtccaggtgtggaaatgctcctttggaccaccttcctctaaacagaataaccaccatgag

SEQ ID NO: 17983 - DNA, 100 bp, Homo sapiens
ttgtcgccagaaggaagatggcggatctggaggagcagttgtctgatgaagagaagtgaatgagttcacggtgatcaggaagaagttcaagtgtccgtac

SEQ ID NO: 17984 - DNA, 82 bp, Homo sapiens
ccgaacttcagggtttccaccgttcgttcaagtcccgggtcacagtgaagcatctcgaagagattgtagagaagctaaaagg

SEQ ID NO: 17985 - DNA, 90 bp, Homo sapiens
gacggctgcccttcaagtaccacaagacactaagggcgactaccagaaagcgctgctgtacctgtgtggtggagatgactgaagcccgac

SEQ ID NO: 17986 - DNA, 98 bp, Homo sapiens
attgatcaggatttttggcctaccctccaaagaaaagacctgatggccaaaagaaaggaagaaaatttttcctctcctaaaaatgccaaaaggccaag

SEQ ID NO: 17987 - DNA, 149 bp, Homo sapiens
tcggagccgttccggatgctttaggctgccggatgtctgatctccgaataactgaggcgtttctgtacatggattatctgacatccacgacagcgatggcagttccagcagcagccaccagagcctcaagagcacagccaaatgggcgg

SEQ ID NO: 17988 - DNA, 90 bp, Homo sapiens
aaaaatttattaaaggaagcacacctaagaaccaggacaatcctgtgattgatgaaatagacttccttgaagcttttaaaaatattcagc

SEQ ID NO: 17989 - DNA, 80 bp, Homo sapiens
gtggtgaatgtcagtagcctctcactgaatgagcctgaagacaaggatgtgactgtgcaggtgatggtcctaccagtgtg

SEQ ID NO: 17990 - DNA, 90 bp, Homo sapiens
gtctgaaaaccttggccgaaagggttgtagacatggcggccatcaggatgaggggtatgtctgataagtcactccgactagtgctgtcca

SEQ ID NO: 17991 - DNA, 82 bp, Homo sapiens
ggcccccgacggctctgcagttaacgggaccagctctgcggatgtctccaagcagccagccatcatgcctggtcagtcatac

SEQ ID NO: 17992 - DNA, 96 bp, Homo sapiens
aagcagagacaccaggacagaaaagacagtgttctgctttcatggagttcacagaagagtcgaggagatagcaaagccattgtggatgggaacctg

SEQ ID NO: 17993 - DNA, 97 bp, Homo sapiens
gagagagtgaggagccagacgacaagcacacactatggcgctgaaacggattaataagttacccggctgtatgtgaattcttacagcacaataactt

SEQ ID NO: 17994 - DNA, 89 bp, Homo sapiens
acagtatcagttaaggagcttgatttgtttttggcatactacgtgcaggagcaaggtgtcctgatggcaaatttcaagggccacgcgct

SEQ ID NO: 17995 - DNA, 74 bp, Homo sapiens
ggacgtcggtttgctatcgggactcggcgaggacggagccaagttacaccctgtttaaccctgccttcaaaggg

SEQ ID NO: 17996 - DNA, 80 bp, Homo sapiens
cgcatcgagcgttgcaaccagctgctgcgggccctgaagggactttgaacatgtcggggatcgccctcagcagactcgcc

SEQ ID NO: 17997 - DNA, 105 bp, Homo sapiens
cgcgctgctgcttggcgccctgctctgcgcacacgacttaattcagtgcacaaatgagatgaatgtgaacatcccacagttggcagacagtttatttgaaagaac

SEQ ID NO: 17998 - DNA, 75 bp, Homo sapiens
tccacactgcaatgtttttgtggaacatggttcaacagagtttggaaaagatttctaaactggagcaggaaaaag

SEQ ID NO: 17999 - DNA, 90 bp, Homo sapiens
tatacagaatcttgaatcagaaattgagaagctggtttagtcccaggaagcaccactctgcacagtgctgagattttggctgaaatcgcc

SEQ ID NO: 18000 - DNA, 75 bp, Homo sapiens
cccccttgctcctgctgctgctccagggaggctggagagcaaaatccgggagcacttggagaagaagggacccca

SEQ ID NO: 18001 - DNA, 98 bp, Homo sapiens
ctgccctgtgccctccacttgcagccagggactgggcatccacccggccaggttcccaggaagagccgctcccgaggccccggcgcggcgcgagggcg

SEQ ID NO: 18002 - DNA, 75 bp, Homo sapiens
gagtccatgtgaaagaattaggtgtcgtactgggttttggcaagcgttctgcaggaagttttaggcgtggctgtg

SEQ ID NO: 18003 - DNA, 75 bp, Homo sapiens
aatactttcaagtcatcccaaatatggttccatccctaaacttatactgttacgagatgacttccgacaaaaccc

SEQ ID NO: 18004 - DNA, 74 bp, Homo sapiens
acggacaggtggtgctcatcaagcaggagaaagaccgatttagcgatattgacatgggagaaattatcatgggg

SEQ ID NO: 18005 - DNA, 100 bp, Homo sapiens
agagccctgaggatccacaggtcttggataagcactggtgaggtggattgatgatgaatcttctggcacacctggagcaactccagaacacagtcgtgag

SEQ ID NO: 18006 - DNA, 74 bp, Homo sapiens
gaagaaagtgttagaaacagtagtggagaatcaaggctaacatttccaatgatcactggccatctttggttcaa

SEQ ID NO: 18007 - DNA, 89 bp, Homo sapiens
acacagacatgcaagttgcagctggaaagctgcactgcctccttacctgtgaggaatgcaaaataaagcatggattaagtgagaaggga

SEQ ID NO: 18008 - DNA, 95 bp, Homo sapiens
ggtcccgatcccgaccccaaaagagtattcttggatcttgcacaggaaggaattaaaggtgctggagaatctggtaaaagcaccattgtgaagca

SEQ ID NO: 18009 - DNA, 100 bp, Homo sapiens
tacactgaaattcatcctgagatgagtgcaaagcagctggtccgaggagaacccaatgtttcgtatatctgttctcggtactatagggcaccagagttga

SEQ ID NO: 18010 - DNA, 82 bp, Homo sapiens
gcttccgtttgttggtggaggaggtggcaggcctcggcggtactctgtggatatccccttggacaaaactgtcgtcaataag

SEQ ID NO: 18011 - DNA, 74 bp, Homo sapiens
ggtgcccgaggagtagtcgctggagtccgcgcctccctggacaggtgatttggcttctgcacagttaggaggag

SEQ ID NO: 18012 - DNA, 101 bp, Homo sapiens
ctgaagagaaaggtgactctgatgatgagaaaccaaggaaaggagaaagacgatcatctagggtcagacagatcagcaatcgagtcctgtatgtgtttttc

SEQ ID NO: 18013 - DNA, 100 bp, Homo sapiens
tatgggaagattttggtagagaagaatgaacattgtattgagaacaatatagatttgcagatatcattaacggagctcaagaaaaatgtgtattgcctcc

SEQ ID NO: 18014 - DNA, 73 bp, Homo sapiens
gagttcgtctcttacgtctgcggaagtgcagctgcctcagttcttagcgcagttactctttcaacctgatcag

SEQ ID NO: 18015 - DNA, 82 bp, Homo sapiens
gccgcgtgggagccacgcacatcgtgacagccgccaccggcacggccaggccagcatggtggaccacttacttccagtggac

SEQ ID NO: 18016 - DNA, 75 bp, Homo sapiens
cgcgggagagctcggggcgcctggttgtggcagcactgcctgaaggtatgagaccagattctaatctttatggtt

SEQ ID NO: 18017 - DNA, 82 bp, Homo sapiens
caacgacgttccatctgtggaaggacctaccaaccaggacctgggggcacccggagcctctatccgtaccttggccttcaat

SEQ ID NO: 18018 - DNA, 100 bp, Homo sapiens
gcagtgtgtgcctacctgtggggacggcttctaccaagatcgccattcctgtgcagagggtgtttgtgagatatggttgaccagtgaagacacgggggct

SEQ ID NO: 18019 - DNA, 88 bp, Homo sapiens
gtgcaactacctacatcggccttaatcctgcactgccagtgaaagatgtagaagataaacctgaacaacaaaccagaacaagagagac

SEQ ID NO: 18020 - DNA, 97 bp, Homo sapiens
ctggagatgatgatgaaatccagtttgacgatattggagatgatgatgaagacattgatgattatgtccgtggttcagaccctgtattaaagctttt

SEQ ID NO: 18021 - DNA, 98 bp, Homo sapiens
catctaaaggaggttttaaacagtataacagagttcacccagggcatgatcttacctacaatgaatggagagtcagtagacccagtggggcagccagc

SEQ ID NO: 18022 - DNA, 98 bp, Homo sapiens
gaacaaagaaatcaagaaaactgcgaataaaattcgagccaagttaaaggtgaaaccaatccgtaatctaaatggacattcaattgggcaatatagaa

SEQ ID NO: 18023 - DNA, 82 bp, Homo sapiens
aatcccaatttgcctccacttagtgagcggaagaatgggggatatgagactttctactcggaatatcctgagtgttgcgtgg

SEQ ID NO: 18024 - DNA, 100 bp, Homo sapiens
ataaacaaaagctattacaatgtggtgagaaaactgatgcttggagatgtgatcactgcccagggtcacccaatgataacatgcatgcatatggaacttg

SEQ ID NO: 18025 - DNA, 76 bp, Homo sapiens
ggggaaaccccgtaaagtggttggttgcagttgtgtagtagttaaggacaagcgcttcacctcgggaaagtaccag

SEQ ID NO: 18026 - DNA, 100 bp, Homo sapiens
agtcaactttggttttagtaaatatggtccagacctgtacatgaataactttggttagtcagagtgaaatattcaataatgagtggtgcagctttgggac

SEQ ID NO: 18027 - DNA, 106 bp, Homo sapiens
aacccacttcgttcaagacaggtgtttaagcccactgaggcggctcccagctgcgttggcgacatggccgacacccccagagatgccgggctcaagcaggcgcctg

SEQ ID NO: 18028 - DNA, 100 bp, Homo sapiens
ctgacgggactgccaggagacgagtccccggttgtcatgaaagtggcctacaccacagtgctgcaggagtggctgcgcctggcctgccgcagcgacgcac

SEQ ID NO: 18029 - DNA, 100 bp, Homo sapiens
tccttgcccgtgaccgtcgctagaactcagttgtgcgttgcggccagtcgccactgctggttcatagtggcgtcatgcacgcagactcctgcaagttccc

SEQ ID NO: 18030 - DNA, 82 bp, Homo sapiens
agagaacctcctaagagtcacccaaacaatcggctgagaatgagaagaggagtcagagtcagaagcaaaggtagatggagag

SEQ ID NO: 18031 - DNA, 98 bp, Homo sapiens
ttttagggtcctttatatagaagggagagtaggctccgtgtgtttgacagtggcgtcatggtaattgagcttcagtctcacaaggaagaggaaatggt

SEQ ID NO: 18032 - DNA, 95 bp, Homo sapiens
ggataatgtggttggccaaggcctgttggtccatccagagtggttatgaagacagtatggagtttccagaccatagtagacatttgctacagtgt

SEQ ID NO: 18033 - DNA, 83 bp, Homo sapiens
cctggggctcctcatggcccggctccttagcacctctccagagacacctatggctgccgatgaaggctcagcagagaaacagg

SEQ ID NO: 18034 - DNA, 97 bp, Homo sapiens
gacgttgagagaacgaggaggaaggagagaaaatggcgtccacgggccggaaggtggtggtcgtacgctgtgaaggcatcaacatttctggcaattt

SEQ ID NO: 18035 - DNA, 100 bp, Homo sapiens
tcgggactttgcagccggccttagtgctcgcgcagaaactctataaaacaggtcgggagatgcaggagaggatcatggacctgcttgtggtggtggagaa

SEQ ID NO: 18036 - DNA, 98 bp, Homo sapiens
tagcctgacactccatgggaaccccatggaggaagagaaagggtatagaaatcatttctaccagttcggagagatccggacgatcactgttgtgcaga

SEQ ID NO: 18037 - DNA, 100 bp, Homo sapiens
ggtggaactggctgaactgggacccctgctagaagagaagggcaaacgggtaatcgccaacccacccaaaaattttgaaaaccaacctggacaaggttca

SEQ ID NO: 18038 - DNA, 96 bp, Homo sapiens
ctctgggaaaattgtaattgccagatatgggaaagttttcagaggaaataagggccgttgctccagggagaactgcaaatatcttcatccaccccc

SEQ ID NO: 18039 - DNA, 100 bp, Homo sapiens
tcctggacttcgcctttcccgagccctggaggtggggagaaaaggcctgtagtggtggagacacgcccagtggatgatcctactgctcccagcaacctct

SEQ ID NO: 18040 - DNA, 83 bp, Homo sapiens
tgtccctcacaccccttccagctacatcgaaacgaacttggatacgattggtgttgctgttgatttgattcttctgtttcgtg

SEQ ID NO: 18041 - DNA, 100 bp, Homo sapiens
cgaggaattctatgatgcccctgaagatgtgcacctagggggcggctaccccgtgggccgccgccatgtctgcgcatctgcaatggatggtcgtgcggaa

SEQ ID NO: 18042 - DNA, 88 bp, Homo sapiens
ggaaattatgacggtgttctttaccggcactttcagatacccagagcccacaggcggttttgtgagctgcttccccaggagcagcgga

SEQ ID NO: 18043 - DNA, 100 bp, Homo sapiens
tgtgttggagttgggagtttcgctgatccagatgacctgccggggctggcacactttttggagcacatgcacagccagagaacaacacatcacacacagg

SEQ ID NO: 18044 - DNA, 83 bp, Homo sapiens
gttgttaccgaacatctcataaataagtgataaaaagttgattgcagaaggacctggggaaacagtattggttgcagaagaag

SEQ ID NO: 18045 - DNA, 80 bp, Homo sapiens
gaaaacaacttcgagggcagatactatactggcaattgctggagaagattttgcaattgttgcttctgatactcgattga

SEQ ID NO: 18046 - DNA, 75 bp, Homo sapiens
atccagcctgcggagcctgtggggcaggagttttgagagcaaaatgacaacacccagaaattcagtaaatgggac

SEQ ID NO: 18047 - DNA, 74 bp, Homo sapiens
ttcagcctctactaaagttgtcatccgtggagcaggaaaccagcgcctgaattctgctattatctatgaccgag

SEQ ID NO: 18048 - DNA, 100 bp, Homo sapiens
gctaccataaacacatcaccttgatttttaatcccacgggctgacgcgccactatgtagcgggtttcgggcgggccacgcgtgcgggacaggaacccaac

SEQ ID NO: 18049 - DNA, 98 bp, Homo sapiens
ccatgtcagccttcccagtagctggaactacaggaccttctaccgctttgaggctgtgtgggatagctctctgcataactcccttcttctgaaccgag

SEQ ID NO: 18050 - DNA, 48 bp, Homo sapiens
cagtggtcgcttcttctccttgaatgtactcaagactgatcttctaag

SEQ ID NO: 18051 - DNA, 98 bp, Homo sapiens
tttttttaaaaaacaaaaaccacaaaaattcccaaaccatacttgctaaaaattctggcatgtcagagcgggagcgacaggtgatgaagaagctgaag

SEQ ID NO: 18052 - DNA, 100 bp, Homo sapiens
gctggggctgaggatggagtccaagactgagaaatggatggaacgaatacacctcaatgtctctgacttggagtccaggtgtgagaaatttctacaaaaa

SEQ ID NO: 18053 - DNA, 83 bp, Homo sapiens
cgtccccctgccccgttcacaatgagctggaagctatcaaagctcgagtcagggagatggaggaagaagctgagaagctaaag

SEQ ID NO: 18054 - DNA, 100 bp, Homo sapiens
gctgtcctaaatgtggcgacttgtgcacacatgtagagacctttgtatatgaaagctttgccagggtggtgctggcaccccaggacgtggtagtagcgag

SEQ ID NO: 18055 - DNA, 94 bp, Homo sapiens
tgaaaacctctcaccccgtcgttgcctccacttggcccgtccatagagccagacaatgcagatcttcgtgaagactctgactggtaagaccatc

SEQ ID NO: 18056 - DNA, 97 bp, Homo sapiens
cttctatggagtggcgtttactaccagtagcagcaattgcagagacagatgaatctgcagaatcagaaggtgtaattgattctcataaacgtagaga

SEQ ID NO: 18057 - DNA, 83 bp, Homo sapiens
cgtctgcgtgagaatagagaccaccgagcaaattgtggctactaatttgccccctgaagatcaagatggctctggggatgact

SEQ ID NO: 18058 - DNA, 90 bp, Homo sapiens
gcaataattatcacaattactgatgggagcaagttgactaccaccagtggagtccaggatgaggaggaggcaaaacagattcagaatctg

SEQ ID NO: 18059 - DNA, 88 bp, Homo sapiens
ctgactgagagcgtctgcttgatccaagagttgaagattggctcctcatgtcctcgcctctgccacaaaccatcctcctaggattcta

SEQ ID NO: 18060 - DNA, 80 bp, Homo sapiens
ctaatggaggtctccagtttcggtgagtggcatcaaggcgctgtacgagtcggagctggccgatgcccggagagtcctgg

SEQ ID NO: 18061 - DNA, 75 bp, Homo sapiens
ccacttcgttcaagacaggtgtttaagcgtacgctatttgaagaacaggtttccatgctcttagaggagcatcag

SEQ ID NO: 18062 - DNA, 99 bp, Homo sapiens
ggagcctcggggtccggaaccagacgatgagacagagttgcgaccgcgcggcagcttaaagcttttcaagccaggccaagaagctgtgaagtaccaggg

SEQ ID NO: 18063 - DNA, 90 bp, Homo sapiens
gactaagagaagtcacaaaacagcagatttcccaagagcagcggaaaatgatccagtcacagaaagttcaggagccctggaaaggagaag

SEQ ID NO: 18064 - DNA, 50 bp, Homo sapiens
ccagcatcaagatccgtctgacaggtacttgaagaagcagaagctcaaca

SEQ ID NO: 18065 - DNA, 75 bp, Homo sapiens
atagagaattctgggcttccacacaactccagtgctaactcaacaggtcctgagggagtctaacaagttagcaga

SEQ ID NO: 18066 - DNA, 100 bp, Homo sapiens
ccacagccagcatggccgtcccactgctggagttcctgtccagtaaatgggcttgatactgtgagagtgcctatgtctgtcgtgaactttgagaagccca

SEQ ID NO: 18067 - DNA, 100 bp, Homo sapiens
gctgaagagtacgagcgtgccacgcgctacaactacaccagcgaggagaagtttgccctagtggaggacatgctgctcagttcctccaggacatgagaag

SEQ ID NO: 18068 - DNA, 82 bp, Homo sapiens
cgccagcggacacgcgggcgaggaagcgagtcacgtcccagcgctgctccctggagtttctggaagatgccgtgggatgcgc

SEQ ID NO: 18069 - DNA, 100 bp, Homo sapiens
cgccgctgcctcagtcatgccgtttttgaagagccggaagatccaagcaacagatcatttttctctgaaattatctcttcgatttcggatgtgaagttca

SEQ ID NO: 18070 - DNA, 100 bp, Homo sapiens
tctacttttgggttacaaaaatccagaccagcatagttgttgcccaaatctcttggtacagaatgtttttgtagaaacacacaacaggaattttccattg

SEQ ID NO: 18071 - DNA, 100 bp, Homo sapiens
acgacgcccaggaatacagacgggtcaaaatgcagatcttcgtgaaaacccttaccggcaagaccatcacccttgaggtggagcccagtgacaccatcga

SEQ ID NO: 18072 - DNA, 75 bp, Homo sapiens
cccgctgcggcagaaggccatcttcctgcgcaacctcatgcaggaggtatatgaatgacctaaaggtacaaataa

SEQ ID NO: 18073 - DNA, 87 bp, Homo sapiens
acccagaacactatattaaacatcccctacagaacaggaccatggccaacctggagcgcaccttcatcgccatcaagccggacggcg

SEQ ID NO: 18074 - DNA, 51 bp, Homo sapiens
acccacagaagcagaccttcagctcagggcatgctgttgaagcgaagtggc

SEQ ID NO: 18075 - DNA, 75 bp, Homo sapiens
ttcctccagacctctcggcgcggtactgtaaggagttcttctctcaatgtgtgacctgccctgtctatcaccagt

SEQ ID NO: 18076 - DNA, 75 bp, Homo sapiens
caagccctggagaaggcctacatcaaggactgtgtctcccccagcgagactccctccccagctcggtcattagtg

SEQ ID NO: 18077 - DNA, 50 bp, Homo sapiens
accctggtgaaggaggtcgtacaggtcatgctttcagaacgaaaaggcac

SEQ ID NO: 18078 - DNA, 51 bp, Homo sapiens
cttctaccccatgagaaagaccagattatttctcaagatgaagctgacaga

SEQ ID NO: 18079 - DNA, 98 bp, Homo sapiens
agcaaattcgtcagatcaaagaacaagtgaaagaaaggatgtcttaagagaagctgaaattttacacaaagctagatttagttacattcttccaattt

SEQ ID NO: 18080 - DNA, 100 bp, Homo sapiens
ctagctttggcgaggggacggagccggatcaggagccgccgccgccatatcagtccatcaataaagccatggagaaagaccatgaagaatacaacattgg

SEQ ID NO: 18081 - DNA, 82 bp, Homo sapiens
gtggaaaatgcgctcgggctggaccagcagacatgggaaagcggaaccaccaaaaggagtgatgatcaacgatctcatgata

SEQ ID NO: 18082 - DNA, 97 bp, Homo sapiens
cgggattcgcggcccggagctcgggaccggttatcaatactctggctgaccatcatcatcgtgggactgactttggtggaagtccttggttacatgt

SEQ ID NO: 18083 - DNA, 100 bp, Homo sapiens
cggcatcctccgcaatgtgtccagcctcgtcgccacccgtgaggactacagggagaaggctctggccctcacagggaaccagggcatcgaggctgcgatg

SEQ ID NO: 18084 - DNA, 50 bp, Homo sapiens
gcactagtgtctagaaggcactaaggggaactctaatgatccaggacaaa

SEQ ID NO: 18085 - DNA, 100 bp, Homo sapiens
aagaattagtgtctccatcgtcatcagaaactgaaggcaactttgtctatcgcacagcggatactctgttttcaaggaagctgaatgggaaatacagact

SEQ ID NO: 18086 - DNA, 83 bp, Homo sapiens
cttgcttgagcttcagcggaattcgaaatgggacccagacatggagctgcgggaagaagcctggtctccggggccgctggatt

SEQ ID NO: 18087 - DNA, 83 bp, Homo sapiens
attgatttcaagtttgaacaagggatcatagacggtatttctatgtaaacgaacagtcgggcgagtctcagtgggagtttcca

SEQ ID NO: 18088 - DNA, 75 bp, Homo sapiens
aggatgggaacacaaaaagagccttcagatcctacatacttttaccaacagtaacacagaccaccagtgcaaaac

SEQ ID NO: 18089 - DNA, 83 bp, Homo sapiens
gaaacaagatggtccttaaaaccgaagaggaggacgggtgttggaactcgccataaggcattgatcaggattatggtttcccg

SEQ ID NO: 18090 - DNA, 88 bp, Homo sapiens
gagaacagcgtttcagttttggtcatcggaagtggtgccttcagcacaggaacttgcatcagcactgaagtcagccttatctggccac

SEQ ID NO: 18091 - DNA, 100 bp, Homo sapiens
tttggagcattaaggtctggtcggatggggcaggatggctgcgttgacacgtcttatttaatccacatcatagttttcagataactattatcgtgcagaa

SEQ ID NO: 18092 - DNA, 96 bp, Homo sapiens
cggaaatctggaaccgggatggcgacgtctacactgagtcggaggcgaagcctgtgggccaaagctgaccaactcccccaccgtcatcgtcatggt

SEQ ID NO: 18093 - DNA, 51 bp, Homo sapiens
cgggaaaaatagtagcaccacttcacttaaaggacaagaagcgatttgaaa

SEQ ID NO: 18094 - DNA, 75 bp, Homo sapiens
tgtcacttacaacattaatcagatactgcatttaaggacttcactgaggatgtcaactgtgcttttgagttcctg

SEQ ID NO: 18095 - DNA, 49 bp, Homo sapiens
agttcctcaagatggagactttgactttcaaataaagcatgagctgttg

SEQ ID NO: 18096 - DNA, 77 bp, Homo sapiens
acccacttcaacaagggcccttcctatgggctctcggccgaagtcaagaacaagtataccaaatactacattcaccg

SEQ ID NO: 18097 - DNA, 88 bp, Homo sapiens
tggcgctatagctattgctgtattgtgctcaggatttgcaggacacagcattgttggttttgccatgtactattttacctatgacccg

SEQ ID NO: 18098 - DNA, 74 bp, Homo sapiens
gccgcggcgctgtcgccggagagggagggcaccgctgtcgtcgccttgttcgggagtctagcagttctcgctca

SEQ ID NO: 18099 - DNA, 51 bp, Homo sapiens
tgaaattatctctggtgctgcagctcttggctgtgacgtgaacagtcccag

SEQ ID NO: 18100 - DNA, 75 bp, Homo sapiens
cccggcgcggcggcggcacgatggtcatggcgtatttcgtcgagaatttttggatataccttagatgaatttgga

SEQ ID NO: 18101 - DNA, 50 bp, Homo sapiens
aaagccagtaggacacgaaggtggagctggtcaggctcaccatcgagaag

SEQ ID NO: 18102 - DNA, 97 bp, Homo sapiens
cagggagtcctaagcaggaatgactggagagcaggctggataggtgaagatggagctggaaaaacaagcttaataagaaaaattcagggaatagagg

SEQ ID NO: 18103 - DNA, 90 bp, Homo sapiens
attcttttgaactagatcgagctgatagagaccctagtaacatgggaacactgactatgccaaatggagactacattgaaggttatttta

SEQ ID NO: 18104 - DNA, 75 bp, Homo sapiens
tcaccgtccagagccaaggtccagggggcaaggtcgtggtacgccgtcatgaaatacacaaatcgaagaatagag

SEQ ID NO: 18105 - DNA, 75 bp, Homo sapiens
cagttgatggaccaatcaggctgccaattgtggataagtacaaggtaccggtggcctcgtggtttgacaacatga

SEQ ID NO: 18106 - DNA, 100 bp, Homo sapiens
tgggaagcaagagaaaaagaacattactgtcttgggatgaattgtaaaagcaacatcagcttgaccagtataaaattacagtggattgctcatctcagtc

SEQ ID NO: 18107 - DNA, 74 bp, Homo sapiens
tgcgagcagctcaacgaggactttgaggggcttgctactcagcctggcccacagaccagaagcaattagtgaga

SEQ ID NO: 18108 - DNA, 50 bp, Homo sapiens
gtgcccttgttgatgccagagccagggagttgatccccctcatattgtgt

SEQ ID NO: 18109 - DNA, 74 bp, Homo sapiens
cctgagaaccatgctcaccgaccctgtggctattatcatggaaaactaatttttcccagagaatttcctttcaa

SEQ ID NO: 18110 - DNA, 125 bp, Homo sapiens
cctcccctgcagcgactcggaagattcgaggcggcgggggacaagtcggcgccccagagcggacgagtgtcaaaaacggtatttcgctgcctggcacaagctgattcttgatcataggattaagc

SEQ ID NO: 18111 - DNA, 90 bp, Homo sapiens
aaattcctgaggcgctgggagccgcaccacctaacgctggccgacaacagcctggcgtccgccacgtaacagtgtatcatgtatgccact

SEQ ID NO: 18112 - DNA, 100 bp, Homo sapiens
cttctaatggatgggaacatgggcgatatgccaatttcaaggacgaacctactttgaaggagaaagaaatacagtctattcctcttctggagtatgtgtt

SEQ ID NO: 18113 - DNA, 85 bp, Homo sapiens
gggaccgagggcctacactgcctcctcccacgccgtgcttagggagggccctcctggacccgggagcggaccctggtggcggtga

SEQ ID NO: 18114 - DNA, 51 bp, Homo sapiens
ggccgcagccgctctggggcaggttgtaaagaagaaagttctaccctttct

SEQ ID NO: 18115 - DNA, 103 bp, Homo sapiens
agtcgaagcaccgcagcctggtgcagatcatctacgacgagaaccggcacatgattaagtaccggtacatcccgttcacacatgggaagagaaggtacagagg

SEQ ID NO: 18116 - DNA, 75 bp, Homo sapiens
atccgctgctgctgaggagaggagcgtcaacagcagcaccatggggaaatcctcattgacgattcaatttgttga

SEQ ID NO: 18117 - DNA, 100 bp, Homo sapiens
cgacaggaaaaaaatttgctggatattgatgcgccagtcactgaggctgcctaccacaaggactttagcttactttttaaagattgaagaaaaaaaagaa

SEQ ID NO: 18118 - DNA, 75 bp, Homo sapiens
gacctgaggaatatcgtgcagcccaaacccttgccttcccaggacactcaatcacttgtcggaagtccctcaacc

SEQ ID NO: 18119 - DNA, 74 bp, Homo sapiens
cccgtcttatgggacttgaggccctcaaggatggccaggccatgttatgggatctcaacgaaggcaaacacctt

SEQ ID NO: 18120 - DNA, 100 bp, Homo sapiens
cgctgttggcaaatcaagcctagtgcttcgttttgtgaaaggccaatttcatgaatttcaagagagtaccattgggggatatatgattggatgcctgaac

SEQ ID NO: 18121 - DNA, 75 bp, Homo sapiens
atgttcttaacccagaagtagctgaatgtgttactccattgctgaggagtgggaagagacttccaccttaggata

SEQ ID NO: 18122 - DNA, 83 bp, Homo sapiens
atattggtcaagttgctgaccttgaatattctaccttgtaaatactgttatttgtatatactgtaaatgatgacatcggtggg

SEQ ID NO: 18123 - DNA, 82 bp, Homo sapiens
catgtcccaacattacatcccagtcaagagcaatctgaatccaaatgcaaaggagtttgttcctggggtgaagtacggaaat

SEQ ID NO: 18124 - DNA, 111 bp, Homo sapiens
tttcaaactttgcacaggcaccccagttgtctgtgccaggtggcctccttggtatgccagcttctttatgaaaaaggcatcagcctcagggcctccttcatcttcatctct

SEQ ID NO: 18125 - DNA, 75 bp, Homo sapiens
cagaaggcgtctcatggcgttggaataccggctctcagcggctgaatttaaactttgggataatgagctgcagta

SEQ ID NO: 18126 - DNA, 100 bp, Homo sapiens
gagaactacagaaacctggtctccctaggattggcagccaccatttgcatgtgatgttgataaacttcattttacgccacgtatccagagactgaatgaa

SEQ ID NO: 18127 - DNA, 82 bp, Homo sapiens
ctgtaacttacgtgtactttaccaacgagctgaagcaggttaaacactttaagatgagaaaaattgatctctgtctgagctc

SEQ ID NO: 18128 - DNA, 83 bp, Homo sapiens
cacagttcctgggaaggtggagccaccagcctctccctgtgatcagggccaaagcggtcagtgagaaggaagtggactctgga

SEQ ID NO: 18129 - DNA, 100 bp, Homo sapiens
tcgtgtttgtcgtcttcttcatctgctttggcctgaccatcttcgttgggatcagaggaccagtcctgcctctgttgtagaagacatgtggtgtatataa

SEQ ID NO: 18130 - DNA, 100 bp, Homo sapiens
gaacacagcagggcggaggaaagtgcaggccgctgtgctcgctgtggagaaaacgtagttggggaaggtacaggatgcactgccatggatcaggtcttcc

SEQ ID NO: 18131 - DNA, 100 bp, Homo sapiens
agcttcagactacgtgcagctaacaaaatggggggctttgactctatcctctcctgaagttcgattccacatggacagtgaaactcacgatcctatagat

SEQ ID NO: 18132 - DNA, 82 bp, Homo sapiens
tattgggccttaggaaattcgttgatgttctggtggattatggatcagatccaaatcatccagaacacatattacataatgg

SEQ ID NO: 18133 - DNA, 101 bp, Homo sapiens
aagattgcaaggtgaataaagaagtggagcgtgtcctgaaggagttccaccaggccgggaagcccatcggaaaatgaaactgaagccgtggtcacgtgaca

SEQ ID NO: 18134 - DNA, 83 bp, Homo sapiens
ccctcaatgacttcttgcatggatccgagaagggtaacaacgatgatctcatcctgtcctgctgcctccactactgcaaagac

SEQ ID NO: 18135 - DNA, 83 bp, Homo sapiens
cctaaaaaaccttcgcctcatcctaggagaggagcagctagaagggtcaaaatgcagatcttcgtgaaaacccttaccggcaa

SEQ ID NO: 18136 - DNA, 82 bp, Homo sapiens
catggatctggaagctgagggcacgtgtttgcggttcagccctttgatgaccgcagcagaacgtgctgagtttatgggatat

SEQ ID NO: 18137 - DNA, 100 bp, Homo sapiens
cgtgtacatcatttacggcatgtacttctgcatgaacatctccagccaggctacaatcaacctaaattcagccaatgatagctggtttggcagcttaaag

SEQ ID NO: 18138 - DNA, 82 bp, Homo sapiens
tccccacgcaaccccagatccatttacactttacagagcaggccgggctctcgccatgggtcactgtcgcctctgccacggg

SEQ ID NO: 18139 - DNA, 96 bp, Homo sapiens
ccagagggtcggcagcggcacctacggggacgtctataaggtctatggaaatgcaggacctagcaagtcctcatactcttgttggaggtggtgata

SEQ ID NO: 18140 - DNA, 75 bp, Homo sapiens
tccgtccatggccccagatgacacttcagactgcctgcgctgctgacttaaggccccaacaccaaacacagaagc

SEQ ID NO: 18141 - DNA, 75 bp, Homo sapiens
agaggaccatgtgagtgggctccggagcctcagcgccgcgcagaatttcgctaaggagtttgtgatcagtgatcg

SEQ ID NO: 18142 - DNA, 90 bp, Homo sapiens
gatatttccaacacacttataatgctcgcagataagcatgctaggattaaagcctgtggtttccacagaagcaccacctatcatatttgc

SEQ ID NO: 18143 - DNA, 74 bp, Homo sapiens
ggggacggccgcgagctcgctggaggcacttctggatccagctgtgtgatagccgcactaggaaatacctggag

SEQ ID NO: 18144 - DNA, 101 bp, Homo sapiens
gtgcattgcagttgcgtgttgttcagaaagctgatggtgagaccattctaaaaggcctccagtccattttccaggagcaggggatggcggagtcggtgcac

SEQ ID NO: 18145 - DNA, 74 bp, Homo sapiens
gttcttctccagggacgctcggcggatgacagcaaagtgggccccgaagtagggacttccttccccgcggttca

SEQ ID NO: 18146 - DNA, 100 bp, Homo sapiens
cggggagatgctttacatcctcgaccaacggctgcgggcccagaacatcccgggagacaaggcccgcaaaggtgcagtcagcctcagtttccaaagccgg

SEQ ID NO: 18147 - DNA, 100 bp, Homo sapiens
ctcacaccttcctcagaatggacccccaggttactgaagctaaaggagatgtttaactccaagtttggatctattcccaagttttatgttcgagcaccag

SEQ ID NO: 18148 - DNA, 83 bp, Homo sapiens
gaaggaacgaggcaaggagctaaagcagcgtgcgttcagccctgggatgagcgggatcgtgtgcagaagaaaaccttcaccaa

SEQ ID NO: 18149 - DNA, 88 bp, Homo sapiens
cccagtgacgggtctggagtgcgtgggggaccggctgttggcggatccagagacaatggccccgatgggatggagcccgaaggcgtca

SEQ ID NO: 18150 - DNA, 82 bp, Homo sapiens
gccctctttgcaacatttcaggaaaacagagaaagaagtgataggagggctctgtaggagaatggggtactaagagaaaagc

SEQ ID NO: 18151 - DNA, 75 bp, Homo sapiens
gctcgatctaggttctgcggcacgggatggcggaggcgcctcctgtctcagatcttccacctccttccacaagag

SEQ ID NO: 18152 - DNA, 73 bp, Homo sapiens
ggatcaccgtcatccacagcaaggactgtttcctcaaaggtcactgagtcaaggaagcacaaattcaaacatg

SEQ ID NO: 18153 - DNA, 51 bp, Homo sapiens
gagaacacagccacgcttacgatgtaaagaacctatatccatcatcatctc

SEQ ID NO: 18154 - DNA, 74 bp, Homo sapiens
gagcagtagtgctcctggatcccctcctgacctgtatgctgttgtgaaatgttctaagtctggagacctctacg

SEQ ID NO: 18155 - DNA, 83 bp, Homo sapiens
cagcagcaccgaccctagcatcatggagcccacagcatcctcagaacaagttgaaatcatcgcagaaggataaagttcgtcag

SEQ ID NO: 18156 - DNA, 100 bp, Homo sapiens
cactctggatggggtcaagtcctggctgaagccacggctgggacaggaagccacaattgcaggatacctatatggggtgagcccaccagataacccccag

SEQ ID NO: 18157 - DNA, 130 bp, Homo sapiens
cttagcttgattgaatactatcaatgggacaagtttgcatacctctatgacagtgacagaggtattgctattaaggagtcagcaaaagtgggtgatcaagctcaaaggagggtgatgaaaggtgttgatg

SEQ ID NO: 18158 - DNA, 101 bp, Homo sapiens
gatgcgtcagtagggtgagcacataaaaaatccatgtcttgcacctgtattttagcgtactatgcaggccgccagatcccacccttggacccccatgaaaa

SEQ ID NO: 18159 - DNA, 75 bp, Homo sapiens
gccggcgaggatcaaaatcttcgaaggaggatcttcagtcgtgctggtgaagcctgcaaaaaggtgatacttaat

SEQ ID NO: 18160 - DNA, 100 bp, Homo sapiens
agctctcctctgatggcaggacctgccaagcctcgtatcaatagccgtgcccatgcccgtacccgtgcacgttcccgagcctgtgcccgccaacatcagg

SEQ ID NO: 18161 - DNA, 75 bp, Homo sapiens
gagagctcggctgttccagccaggaggtcggaaaggtctgcttggaagccagacgaaacggctccacagagttcc

SEQ ID NO: 18162 - DNA, 100 bp, Homo sapiens
ccgggcggagacccgcagccgggccaaggacgacatcaagaaggtgatggcggccatcgagaaagtgcggaaatggccgcttccgctttcctacaggctt

SEQ ID NO: 18163 - DNA, 97 bp, Homo sapiens
tacatcctcagcaaccagggctacgtgcgccagctctcccagggagaagacgttggttatgttgccagtgaaataacgatgagcgatgaggagcgga

SEQ ID NO: 18164 - DNA, 82 bp, Homo sapiens
gtgtagagactcggaggccgaggtcaaaatgcagatcttcgtgaaaacccttaccggcaagaccatcacccttgaggtggag

SEQ ID NO: 18165 - DNA, 101 bp, Homo sapiens
atacatttggtcctggagatgatgatgaaattcagtttgatgacattggagatgatgatgaagatattgatgactggcagcatggaacctgcatttcatag

SEQ ID NO: 18166 - DNA, 82 bp, Homo sapiens
atccagcaaggtcggcagagcaaggggcttacgcagaaggacctggccacggtggccctcatgacactgacgctcttcccgg

SEQ ID NO: 18167 - DNA, 100 bp, Homo sapiens
gtgggagcactggaagtacgggcagttgcagtgttggagctaaacgttttaccaacgaggatcatttggctgtccataaacataaacatgagatgacact

SEQ ID NO: 18168 - DNA, 100 bp, Homo sapiens
ctccccgccggccgaatctgcaggccccgcgcgccaggcaggcttcgcggctgcgcccccggcccgcgcagaatgctgtccgtgtcccacgagactttga

SEQ ID NO: 18169 - DNA, 100 bp, Homo sapiens
ctctgtccttattatcggaccccgaggatcaggaaaaactatgccaaaacctattgatgtacaagtcattacacaccacatgcagcgatatgcagtttgg

SEQ ID NO: 18170 - DNA, 100 bp, Homo sapiens
ctacttcctggaggagcgcatgcaacagaagtatgaggccagccgggaggacatctacaagcgggactcaactattgttactccaattattttgaggact

SEQ ID NO: 18171 - DNA, 100 bp, Homo sapiens
ctgtttgacggtattaagaaacatcgagtcactttgcctggacaggaggaaccctgaagtcgccgagttaattgaccagcatgagacgatgatgaagctt

SEQ ID NO: 18172 - DNA, 74 bp, Homo sapiens
tcgcagtggtcgcttcttctccttgacctcaaaggaagaccttctgcaggctgattttgaaggtgctttaaagt

SEQ ID NO: 18173 - DNA, 82 bp, Homo sapiens
catagattgtgtaggcgttggtcttctgatagcaactttaatgtggtatgggcactaggaaaagacttcttccatcaagctt

SEQ ID NO: 18174 - DNA, 83 bp, Homo sapiens
tctccttctatgtgctgtgtccggacaacggctgcggcgacaatttttatatttaaagttggagttcgttgctaaagatggca

SEQ ID NO: 18175 - DNA, 100 bp, Homo sapiens
tgaagccacaggaggagggattccagagggattccaggaagaccaacactgtcatctgaagttggaatcatcatctgtgatattgctaatccagcctcgc

SEQ ID NO: 18176 - DNA, 75 bp, Homo sapiens
gtgcccgagaagctaaacaaccagctcctgagcctcccaaaccttacagggcagaagataagattattggactga

SEQ ID NO: 18177 - DNA, 82 bp, Homo sapiens
gacttgcagtcatcatccattaccacaaaattaggttttacctcacaaaaactactacaagcaccaagctccctgatggaaa

SEQ ID NO: 18178 - DNA, 72 bp, Homo sapiens
agtcttcagcctcatctactgcacacttgagtccatgagattttagagtggagatgttcggaatgacattta

SEQ ID NO: 18179 - DNA, 107 bp, Homo sapiens
ctggccgtccaaaatccaccaaagaaagtgacctctgagaaagtgagccagaaacatgctgagcctttgacaggcactactgcagtcttcagttaagcaacaagtag

SEQ ID NO: 18180 - DNA, 100 bp, Homo sapiens
tcacatcctcagccgaagatctcacttcctcccagaggcctttgctgactgacccctcagtgtctgcgagattaatctctcatggccgctgcacaagaac

SEQ ID NO: 18181 - DNA, 99 bp, Homo sapiens
ggggcatggccctccggagtgcgcagggcgacggccccacctccggccactgggacggcggcgcggagaaggcaggctgatcagctgaccgaagaacag

SEQ ID NO: 18182 - DNA, 98 bp, Homo sapiens
cttcatcatcaccattgggcactcgaggctggaacagatggagtcggataactgttcaggaggagatgatgactggacccatctgtcttcaaaagaag

SEQ ID NO: 18183 - DNA, 75 bp, Homo sapiens
gaccctgcagaaatgggtgccggaatctgtctcctgatcatcattcagggctctctaaatacgtacagattctgc

SEQ ID NO: 18184 - DNA, 98 bp, Homo sapiens
tgcagccagtactctatatgaacaatccgtctggatcacggatgtaggaagtgaggcggggtttcaccatgttgcccagactggtcttgaactcctga

SEQ ID NO: 18185 - DNA, 83 bp, Homo sapiens
cgacagcggcgagcagaactacggcgagcggtgaagctgtggtctaccaatctagacaactcagtggcaagcattgaggcaaa

SEQ ID NO: 18186 - DNA, 75 bp, Homo sapiens
agattctggctttctaacaagctcccaggcttataccagccagtttgtatcccttgtgatgtttgcccttatgat

SEQ ID NO: 18187 - DNA, 98 bp, Homo sapiens
ccaatcttttgtagatgtcagcataaaggatttccctcttgaggtgctgctacatcctcatcctcctcttcaccttcatccagttccataacagctgc

SEQ ID NO: 18188 - DNA, 51 bp, Homo sapiens
cctgaacctggaagttgtgctttttaaggtcctgacctgagggctgcatca

SEQ ID NO: 18189 - DNA, 88 bp, Homo sapiens
gaaaaccatgggctggctgtgcccaccccctcggttccagatgattttgcagacaaagaagtgacagatgaagtctcactctgttgcc

SEQ ID NO: 18190 - DNA, 100 bp, Homo sapiens
ttgagcggctggaccacctggagaatgtcatcaagcagcacattcaaggtggggtgaccgctctctgttgggacccagtccagcgggtgttgttctcagg

SEQ ID NO: 18191 - DNA, 97 bp, Homo sapiens
ggcagcgcgagctgggaccagcgtctcggaggcgccgcaggccaagactaaggggctgcagagcggggtggacattggcgtcaagtactcggagaag

SEQ ID NO: 18192 - DNA, 100 bp, Homo sapiens
agcagaaaattacctaaatgcactctttcgaaagaaaggcagagtctccagagatttgggccgctacaaaaagtgcattttgcccattcggctgtggata

SEQ ID NO: 18193 - DNA, 98 bp, Homo sapiens
aaaaattacggagtgttgcatgtgacgtttcccttgctgtttccaacctgtcagttagaggagcttcattacaatgagaagctcgtctactggcggga

SEQ ID NO: 18194 - DNA, 83 bp, Homo sapiens
tggtctgtgagatgtcctcactgtttcaggagattttggctatggaaaggggaaatgttctaagcagagcccgtcaggagccc

SEQ ID NO: 18195 - DNA, 100 bp, Homo sapiens
gtgggggctctgccgcttctctccctctccgggcagcgggtggcatgagacgtgggaacatgggccacctcacacggatcgccaacgcggtggtgcagaa

SEQ ID NO: 18196 - DNA, 100 bp, Homo sapiens
gtggagcgctgagaagaggcggcctctcaagtccagcttggactcagatgccactgcatcatcagataacagcgagacggaggggacacccaagttgtct

SEQ ID NO: 18197 - DNA, 76 bp, Homo sapiens
actgcgccgactgcgaggccaaagagttttccagaaaaagaccttctgcactgtccatctaaggatgcaattgaag

SEQ ID NO: 18198 - DNA, 83 bp, Homo sapiens
aagcacttttaccgaaaaccttctccccagagcctctgttgagttcccttctgaggaggatgccagaattagagactctggag

SEQ ID NO: 18199 - DNA, 83 bp, Homo sapiens
gtgaaatggccccgctatatcaggttgcagacaggagagttattagcactaccgatgctgaaagacaagcagttacaccccca

SEQ ID NO: 18200 - DNA, 98 bp, Homo sapiens
tgctctcaggcagcaccagtggttggaaggacatgttcaataatacatccagcctgtgtgcctcccagctgccggccaggccctggtggatggcaaga

SEQ ID NO: 18201 - DNA, 99 bp, Homo sapiens
cagaaacagagatcatctttaattcaatacagggatccacaaatgctaaagagctgtcttccaagggagtgaaaatctgggatgccaatggatcccgag

SEQ ID NO: 18202 - DNA, 75 bp, Homo sapiens
cacgatcctgtaactgccaaacccaagttggttggagatgtggattttgaagtctatcaggtgtttgaaagtgtg

SEQ ID NO: 18203 - DNA, 82 bp, Homo sapiens
aaggtagaacttgacaactgcccttctgtgtctccttacctcagccatttggatatggttcgctttctacttgaagctggtg

SEQ ID NO: 18204 - DNA, 98 bp, Homo sapiens
caatggcatttacagaaagagtcaacagcagtggcaacagtacaaaactttttaccaacaaaaaaaagcaagtagttatactcaggaagaacttcaag

SEQ ID NO: 18205 - DNA, 100 bp, Homo sapiens
cttgggcagcatgcagtgctttctggcaatactggagtaaccgcttcctaaaccattttgcagaaatgtaagggtgttcggttgcgtgcatgtgcgtttt

SEQ ID NO: 18206 - DNA, 100 bp, Homo sapiens
tcagaaggttctaggacaaggaaaatggacgtcttccatgtatgcaccttttccaccaagtgtgtgttgaccaatggttgattaccaataagaagtgccc

SEQ ID NO: 18207 - DNA, 75 bp, Homo sapiens
gcccgcccgaccccgtcccgaccctggccgccccgagcggagcctggagtaagactttgaccccgacgcaggctt

SEQ ID NO: 18208 - DNA, 96 bp, Homo sapiens
cacgaaatggattggagtgaaccggagaccccgaaaacggaagcgcagggagaaggaagaggtgtttgaaaaggcactgaagtggcagcagcatca

SEQ ID NO: 18209 - DNA, 97 bp, Homo sapiens
tggaatgatcatcaaacagctatggtgatgattagagacatactaatgtacatggctgcagctatgactccaccagaggaggaattgaagagaatgg

SEQ ID NO: 18210 - DNA, 82 bp, Homo sapiens
gggggcgcgcgacgccatgggccggccgggcccagagctcctgtctctcagacaatgcagatcttcgtgaagactctgactg

SEQ ID NO: 18211 - DNA, 96 bp, Homo sapiens
ggagccatagtacctacagcagcactccagagctgcagaaactggagggcagcagtggacctgtgcggacgtctcctcacagcccacggccagggc

SEQ ID NO: 18212 - DNA, 101 bp, Homo sapiens
actctcagagtaactgtcccctctgactaccatttctaagctgcaagctttcttcctggtggcagatgacatcatggattcatcccttacccgccggggac

SEQ ID NO: 18213 - DNA, 99 bp, Homo sapiens
aacttgcaaaagtatctcatatgaccagtgatgagtataggatcaaaccagtggaagaggtcaaatacatgaaaaatggggcagaagaagagcagaaaa

SEQ ID NO: 18214 - DNA, 87 bp, Homo sapiens
ccccctccggcgtgttcatgcccccggggatgaccgagtgggagacagcagcaccagcggtggcagagaccccagacatcaagctct

SEQ ID NO: 18215 - DNA, 119 bp, Homo sapiens
gctcggcttccagctcaatcctgccggttgcgccttcttcctggacatgaccaactggttcactaagaatctttccccagacaaaatcaacctgagcaccctgaaaggggagggtcagc

SEQ ID NO: 18216 - DNA, 101 bp, Homo sapiens
catgcaggaattgctacacaagctgtggatgagatgaacggaaaggagctcaatggaaaacaaatttatgttggtcgagctcagaaaaaggtggaacggca

SEQ ID NO: 18217 - DNA, 75 bp, Homo sapiens
caagaaggaggtcagccgggtgctgtgcaagcggtgcggctccccttccctgcgggcatatccgctcctctcggt

SEQ ID NO: 18218 - DNA, 100 bp, Homo sapiens
cggagaccatgttccgagcggcggctccggggcagctccggcgggcggttaaaaatctgtaagagcctgattttagaattcaccagctcctcagaagttt

SEQ ID NO: 18219 - DNA, 51 bp, Homo sapiens
cctacccgggatacggaggagggaccctctttcccagctgcccgctcctca

SEQ ID NO: 18220 - DNA, 76 bp, Homo sapiens
aaagatctctcggaccgcagcaatgacattgtacgaggatgtcgtccaggaaagattgtgcagatgactgaagcag

SEQ ID NO: 18221 - DNA, 83 bp, Homo sapiens
gaggaaggaacgaggcaaggagctaaagcagcgtgcgttcagccctggggaaccctaaggactctgcaatatgaataattccc

SEQ ID NO: 18222 - DNA, 100 bp, Homo sapiens
tacgctaggccgcggccttcgttcctcccagaaaggtgctggagaatctggtaaaagcaccattgtgaagcagatgaggatcctgcatgttaatgggttt

SEQ ID NO: 18223 - DNA, 73 bp, Homo sapiens
tacaacttagcagtcacagacaagttgaagatgaccttgcgcctgattgaggaagagaacatgctggcaccat

SEQ ID NO: 18224 - DNA, 90 bp, Homo sapiens
cccgccgagtcctagcgcctggcctgcgcgccgctgcccgcgccacagctgccttcctatttcaaggaaagacgccaaggtaattttgac

SEQ ID NO: 18225 - DNA, 75 bp, Homo sapiens
gacacagcaatatctctgggctttcacagctccataatgggagaagtaaagaacaaagacttaaggaacagcttg

SEQ ID NO: 18226 - DNA, 51 bp, Homo sapiens
atgctgaagcagatgcttttcaggtttcgcctcgtgccctttttgactgag

SEQ ID NO: 18227 - DNA, 80 bp, Homo sapiens
ccgatccagcctgcggagcctgtggggcaggactcctaaatgcaaagtccctggatgtttcttgcaagaccttgaaaagt

SEQ ID NO: 18228 - DNA, 75 bp, Homo sapiens
ctctgcagcggagccccctgcccatttggttttggccttatgccagcctggaccatcttggaggcagtgtaggat

SEQ ID NO: 18229 - DNA, 83 bp, Homo sapiens
acgcttctcatcctggacatctgcaaattgtggctactaatttgccccctgaagatcaagatggctctggggatgactctgac

SEQ ID NO: 18230 - DNA, 100 bp, Homo sapiens
gtggaattcagctgctcaaacaccagatgatgcatgtggtccatattctccggatgagtgcatctctttgcctgtttacacaagtgctgaaagggatcgt

SEQ ID NO: 18231 - DNA, 82 bp, Homo sapiens
gggcagattagcgacatccgagtgcagaacctgcaaggtgtggacactgccagcggctgcagccgacttggaatgacctggg

SEQ ID NO: 18232 - DNA, 74 bp, Homo sapiens
tgcgcttccccatggggctggcctgcggcgcctgggcgctctgagcccgagcgggaagaagttccgcagcaagc

SEQ ID NO: 18233 - DNA, 100 bp, Homo sapiens
ttacaagtggaaatccacaaggattcttttcaatacatcctaaaacaggcaacagatcccctaatttgtggctgaaagatgttctcaaggaagaaggtgt

SEQ ID NO: 18234 - DNA, 96 bp, Homo sapiens
cccactctcaatgccttggagaggggcttcctgagtgccatgatggaagaactggagcaaggcctgttgatgcagccatgggcgtggctacagctt

SEQ ID NO: 18235 - DNA, 154 bp, Homo sapiens
gggaccccagcggacagcgaggcgggcctcctggaggcagcacgggcgaccccccggcgcagcagcatcatcaagtgccctataaggactgccaggcaataatgaaggttcttttactgaaggatgcgaaggaagatgactgtggccaggatcc

SEQ ID NO: 18236 - DNA, 106 bp, Homo sapiens
cggagaactcaaggtcttcatagaccagaaccttagtcccgggaaagctgaaaatgtgtgtctgacatgcaagctcagtggggcagagacccgtggattgctgtgc

SEQ ID NO: 18237 - DNA, 74 bp, Homo sapiens
cgaccttaatgggaggccccgggaggccgaggttcgggatgcagaaggctatcaacaggctgagcaggcttctg

SEQ ID NO: 18238 - DNA, 80 bp, Homo sapiens
ggatattcctcatgtatcatgcaaggatattcctcatatatcatggtctgggggtggtggcatctcccctaaaggaagtg

SEQ ID NO: 18239 - DNA, 75 bp, Homo sapiens
cctggctttctgcgccatcctgcaccgccaccggcccgacctcatcaagaggtggaaacatacagaagaagcaag

SEQ ID NO: 18240 - DNA, 83 bp, Homo sapiens
attttttagtctaaatgatgggcagtcatggtcccagaaacgtcactatcaagaagtgtctttggtgcaacactaacaaggct

SEQ ID NO: 18241 - DNA, 75 bp, Homo sapiens
tgagacggagctaagagatatctgcaatgatgtactgggccgttgctccagggagaactgcaaatatcttcatcc

SEQ ID NO: 18242 - DNA, 99 bp, Homo sapiens
catggaacttatcgctgttaatgctacatatccagagctgcaatttgcattgtatgagaggaaatttccagttccaaagccaattgattacaatcgtca

SEQ ID NO: 18243 - DNA, 86 bp, Homo sapiens
agtaaatactttgtactacaggtacactatggggatattagtgcttttagagttactggctgaccaacaaagttcctatcaaaaga

SEQ ID NO: 18244 - DNA, 88 bp, Homo sapiens
gctgctggcctgggggaacagcattggagctaagcaggctaagaaggaggcagctgaaaaggaacaggagctgctaagacaaaaacag

SEQ ID NO: 18245 - DNA, 75 bp, Homo sapiens
gtgggcaccttgcgcttcttgcagtcggtgcaaagttccccatcaagtggacggcccccgaggcagccctgtacg

SEQ ID NO: 18246 - DNA, 89 bp, Homo sapiens
ggaaatggctgcgagaccctagaggcctgcggcctgcggggccagtgtcattcaaagatgtggctgtggatttcacccaggaggagtgg

SEQ ID NO: 18247 - DNA, 113 bp, Homo sapiens
cccatcgcaaacccaaagatccccgttcctggagattctgattgaggtgtcatggagaaactccagctgggcccagagattctgcagcgggaaaatccaaggcttatttatgc

SEQ ID NO: 18248 - DNA, 75 bp, Homo sapiens
ctgagccactctccaggctgctccagtactcaagggaacgggataacaaagccattgacctttgccgattgtgtt

SEQ ID NO: 18249 - DNA, 51 bp, Homo sapiens
ttcactggtccacagtgtgaaagagaactgataaatttcaaacggaagaga

SEQ ID NO: 18250 - DNA, 76 bp, Homo sapiens
gaaaaagctcaaaatgaggaaattctgtatgttcttcgccattatattcagatggtgagaacaagaccaagattgg

SEQ ID NO: 18251 - DNA, 80 bp, Homo sapiens
cgattagccttttctctgccttgcttgcttgagcttcagcggaattcgaaatggtccctgtgcgttttattgcgacctgc

SEQ ID NO: 18252 - DNA, 101 bp, Homo sapiens
agaggaagaggcgttgcggcgaaaggaacggctgaaggccctacgggagaaaaccgggcgcaagggaccatgcctggccggatgctgccgcctggcttcag

SEQ ID NO: 18253 - DNA, 82 bp, Homo sapiens
ttggaagcagccgatccagcctgcggagcctgtggggcaggaatccagcactacgccctgccctctactgactggaggcagg

SEQ ID NO: 18254 - DNA, 82 bp, Homo sapiens
gttgaagtgggtcattggagacaaaggaaaattgcctaagaattatgacccaaaagttaccccagatccagaaagatggctg

SEQ ID NO: 18255 - DNA, 100 bp, Homo sapiens
taaaactaaaaaacttacacaaggctattgaagattcttctaaggctggatgcagtccctctgatattggtattattgcaccgtacaggcagcaattaaa

SEQ ID NO: 18256 - DNA, 116 bp, Homo sapiens
ccgacctcccggctgacctattcacctcctgcctcaccacccccatcaagatcgccctgcgctgattgtaaaccatggctgtgtggatacaagctcagcagctccaaggagaagcc

SEQ ID NO: 18257 - DNA, 101 bp, Homo sapiens
cgacaagccgctggcagccgcggatctcaccgccgctcaggatgatgataattccgaagaaggcttccacactattcattcaggaaggcatgaatatgcat

SEQ ID NO: 18258 - DNA, 97 bp, Homo sapiens
gctaccgctcaggtgctgcaggcacagcccgagaaaccgcagcactacacgccgccgctgcccagcagatcccgatctcccttcacacatctctgca

SEQ ID NO: 18259 - DNA, 101 bp, Homo sapiens
cacatatggatactttcacagttcagctaaaggagcagcccagtggttttcaagaagtgctaaagtgcactgactgtctcatgatgactggtgcctcaggg

SEQ ID NO: 18260 - DNA, 101 bp, Homo sapiens
gccgggggtcgctggctctgctgctgccgccggcgaaggaggaggcgttgccgggtccttttggaataaatcatgggattgagcttcattcagatgtggtg

SEQ ID NO: 18261 - DNA, 98 bp, Homo sapiens
gggctgctgtgcggcggcggggtctgggccgcgcgagcatcgagagtaaacatgaggttacgatcctgggaggacttaatgaatttgtagtgaagttt

SEQ ID NO: 18262 - DNA, 82 bp, Homo sapiens
agctacatgtaataccaagttctctttaagagaatgtcagtttactatcctcaagtaagaaaagcattagatagcatcctca

SEQ ID NO: 18263 - DNA, 74 bp, Homo sapiens
tgaccaatgactcagaagggaaaatgggatttaaacacccaaagtgtggtttattgacaatcatttacaatgcc

SEQ ID NO: 18264 - DNA, 129 bp, Homo sapiens
gacggcaggcgctggaggcccgaagacgccgaggaggcagagcaccgcggcgccgagcgcagacccgagaggcacaaatcctgaagagcccgtgggcgtggactgctcatctgtaaagaaagtggagac

SEQ ID NO: 18265 - DNA, 82 bp, Homo sapiens
accagccttagactatttttcaaacacgtttagtgggctacagatggcatggcatctaaaaccttacaatgcttgattttca

SEQ ID NO: 18266 - DNA, 75 bp, Homo sapiens
gtcagtgagatggcttctaacaagaaaccgaagctgaaagactggcatcctcctgggggctttattctgggatta

SEQ ID NO: 18267 - DNA, 83 bp, Homo sapiens
ggctttggcaccgtcttcgcaggacaccgcctcacagatcgactccagatcatccagacttgaaacatatcgacccagtggtt

SEQ ID NO: 18268 - DNA, 75 bp, Homo sapiens
gcggcttaaatgatgtattttgtgatcgcagcgatgaaaggtgatcagactctgagaatatgggatgtgaaggca

SEQ ID NO: 18269 - DNA, 97 bp, Homo sapiens
accgtgtgggagcgggagctgcggaaagaatcttccccaggtgtgactgaggtgaccatcatagaaaagcctcctgctgaacgtcatatgatttctt

SEQ ID NO: 18270 - DNA, 90 bp, Homo sapiens
tgattttcaagttggagaagacccacctttgtttcctagtgagaaccgagtcagtgctcttacccagctgggctcaaaatgcagagaact

SEQ ID NO: 18271 - DNA, 75 bp, Homo sapiens
gaggcgggggtcggcccggggctcggagaatgggcagaatataacaccagcaatcctgacttgttgctagtcata

SEQ ID NO: 18272 - DNA, 95 bp, Homo sapiens
cctgtctggagcaaataaaagagccctgcaatttgaagatacatgagacagcagccaaacccccaggtattatagctgcaaatgtccttgtattc

SEQ ID NO: 18273 - DNA, 80 bp, Homo sapiens
ggaggaggggctccggctggtctgtggtgaggccatcaaccgtgctatgcagaaaccccaggaagagtacagcatcggtg

SEQ ID NO: 18274 - DNA, 75 bp, Homo sapiens
cttagaggagtatttcctgaactgtgtggtttggacccaattaaatcctttgaagctcctgcaaccatcaattct

SEQ ID NO: 18275 - DNA, 71 bp, Homo sapiens
agattttaagcagcatgttcagataaatctgaatggaagagtgaggacagtcattttgtttactcattcag

SEQ ID NO: 18276 - DNA, 104 bp, Homo sapiens
agaggctgctgctggtgcagacgggctccagctccccgtgcctcgacctcaggtctcctctgagcctccggcctccataagacccaaaacagatgacacctctt

SEQ ID NO: 18277 - DNA, 143 bp, Homo sapiens
ggaacacggaggataaagtcagccatgtgagcactgggggtggtgccagtttggagctcctggaaggtccatttgtgatgaacaccaatgaagagatttctcaagctattcttgatttcagaaacgcaaaaaatgggtttgaa

SEQ ID NO: 18278 - DNA, 100 bp, Homo sapiens
gcgaatgatcctgaagcctcaaagtttcatgaccattcctcaagaattttgtatccaaggcccaaaagtttgttacccaagatgatgaatgctgacatgg

SEQ ID NO: 18279 - DNA, 76 bp, Homo sapiens
cgttggggagggggctgtgccgggcggagagaactcagcgaggattctgagatatgaggccccaggattcctggcg

SEQ ID NO: 18280 - DNA, 75 bp, Homo sapiens
cttcaagcatataagtggtcaaacaaggaaagcaaaatgaactctctgacacagcaggaagggaaattaacctgg

SEQ ID NO: 18281 - DNA, 100 bp, Homo sapiens
ccgctcctaagcctgcacagccgcggcggcagcagcagtgagaggcatctgcatctgggaccgacctcctgggctggctgatcaaagaggaagcagcagc

SEQ ID NO: 18282 - DNA, 82 bp, Homo sapiens
cagcagccaagatggtgaagcagatcgagagcaaggaagtgggaaaactcttgcctttgccatcccaatgattcatgcggtg

SEQ ID NO: 18283 - DNA, 75 bp, Homo sapiens
atacctcaagggttctcttgtttatcgagggttttgggctggtggtctcggcagattagtgacaagagctggggt

SEQ ID NO: 18284 - DNA, 100 bp, Homo sapiens
cagagggtctggagggctgagcagtcaactcaaatgcaagtccaagaggaggaggaggcggaggtccaagcggaaagggttttggccaaattgggcgagg

SEQ ID NO: 18285 - DNA, 101 bp, Homo sapiens
gagtctcggagaagatgtggtggcttccgtttgttggtggaggaggtggcaggcctcggcgtacacgagcaagaagccattaactctgacccagagttgtc

SEQ ID NO: 18286 - DNA, 76 bp, Homo sapiens
cacatatcgtctgtattgaaagactgtgggaggattcagctgttgcctttccccatcttcctggttctgctccttc

SEQ ID NO: 18287 - DNA, 83 bp, Homo sapiens
atgtgaagctcaccgagacggcgatccgggcgctcgagacttaccagagccacaaggcaggtgacagcagggacatgtctcgg

SEQ ID NO: 18288 - DNA, 100 bp, Homo sapiens
ctgcccagagaggactgcctgctggggaaagggggtactcctgagctcctgacagcccagcttcaggtgagatcggactggaactgttcggctgcgacca

SEQ ID NO: 18289 - DNA, 86 bp, Homo sapiens
cagctattaaaaccagggctccacagttaggaggacagagcgggatgccaccagcttgtccaaagggaagttccaggagctcctgg

SEQ ID NO: 18290 - DNA, 75 bp, Homo sapiens
atagacatgggggcctcaaacgtggagatcaactcctctctgttaatggagtggacttggatgttgtgggtgatg

SEQ ID NO: 18291 - DNA, 100 bp, Homo sapiens
tcgcagtggtcgcttcttctccttgattgatgactacagcatggttcgatttttaccttacgatcagtcagatgaagaaagcatgaacattgtattgcag

SEQ ID NO: 18292 - DNA, 101 bp, Homo sapiens
acagtccccgacacgtcgtcttacatcaaggtgctggagaatctggtaaaagcaccattgtgaagcagatgaggatcctgcatgttaatgggtttaatgga

SEQ ID NO: 18293 - DNA, 75 bp, Homo sapiens
aagtacttgggattttaaagaaaaatgtggtattcatgggtagtttgaaatatccagatgagaatggatttgatg

SEQ ID NO: 18294 - DNA, 75 bp, Homo sapiens
tgagaaccgagtcagtgctcttacccagatgtccggtctgtgctacgacagcaaaatgttccaggtgcatcaggt

SEQ ID NO: 18295 - DNA, 135 bp, Homo sapiens
aaaaaacttccagaacatctgggagaatatttaatggaaaatcgcttggttaaaacctgacacttttaacaggttgtttacattcagagctctatcaataagaggaatacatattacagtgaattcgacaaccgc

SEQ ID NO: 18296 - DNA, 98 bp, Homo sapiens
ccagacctactgcagccacgcgggcgagcggctgtgtggatgtcggcgaagccgcgggcgagactgtggtacagacctccatgagccggtcccaggta

SEQ ID NO: 18297 - DNA, 108 bp, Homo sapiens
caagttgggggctcagaggggagtcatcatgagcgatgttaccattgtgaaagaaggttgggttcagaagaggggtaagaatgattgatgttggctgatattggagtg

SEQ ID NO: 18298 - DNA, 82 bp, Homo sapiens
agcaggacagcggcccggaggacctgcctctcgtcagatgtcgtgatctcaacagcttgtcacccaacagaaaacatcatcg

SEQ ID NO: 18299 - DNA, 141 bp, Homo sapiens
gttcgtgggctgtggaggcgacggagcagggggccagtggggccagctcagggaggacctgcctggatatcctcatacctctgcgacttttctgacttcatccaagaagaatatgaatttgccaattttgtttcaagttcc

SEQ ID NO: 18300 - DNA, 74 bp, Homo sapiens
ggcgagcagtctcaggcctttagtgatgatgctgggagaaccaccacagacgacgagctagaagagatgctgga

SEQ ID NO: 18301 - DNA, 50 bp, Homo sapiens
cggaatggagaaggaagaggagtcggtgatggaactgtactggaacaatg

SEQ ID NO: 18302 - DNA, 75 bp, Homo sapiens
gagccactgacgccgggaccgggaccgccgccgccgccgccaccatggccgagacgcatccagagctttcgtgac

SEQ ID NO: 18303 - DNA, 75 bp, Homo sapiens
aagcaaatgagctgatggaagatctgtttgaaacttgtccccagttgtcctcatccagggtgctattcgagtcca

SEQ ID NO: 18304 - DNA, 50 bp, Homo sapiens
actctgatttctggctcatatgataagcccatccaagccagattgctggc

SEQ ID NO: 18305 - DNA, 74 bp, Homo sapiens
ccaggaagccagagccacacacaccatcatggtcctggacagagtgcacagtttcctctcctgtgggaaggaga

SEQ ID NO: 18306 - DNA, 90 bp, Homo sapiens
gctctggagtggcccagcctaactgcccagtggcttccagatgtaaccagtgtaaggcaaacattggtgggcaccgatcttcctgttcat

SEQ ID NO: 18307 - DNA, 82 bp, Homo sapiens
aggatcccaagccctgcagactaccgcagccagcgggtggatgtggcccatcttgtcctgtatcacctcagtgtttgctgta

SEQ ID NO: 18308 - DNA, 83 bp, Homo sapiens
ccgagaccgtgaccgagagcgtgaccgagagcgcgaatatcgtcatcgttagaaggattgtttgatggtgggtctccacactt

SEQ ID NO: 18309 - DNA, 48 bp, Homo sapiens
tctgcggcgcatggaggaggaggagaaaaagcttgtggtgaagggggg

SEQ ID NO: 18310 - DNA, 75 bp, Homo sapiens
gctattgaaaaaatgaatggaatgctcctaaatgatcgcaaagtaatacagattctgttcatcttgctctgaaat

SEQ ID NO: 18311 - DNA, 90 bp, Homo sapiens
gcgctggagctggagaacgaccggctcctgctcaagatctcagagaaggaggaggtgaccacgcgcgagctctctgaacaacggggccca

SEQ ID NO: 18312 - DNA, 82 bp, Homo sapiens
tggatcatggctgccgcgccgccgctacgggaccgcctgagctttctacaccgggagaactacgatgacccgcacaaaaccc

SEQ ID NO: 18313 - DNA, 75 bp, Homo sapiens
tgagcgtgctgcggacggcgctgcggtacatccagcttcgagagctgtgcccaggagtgaacaaccagccctacc

SEQ ID NO: 18314 - DNA, 75 bp, Homo sapiens
gactgatcaggtcttacaattctaaaaccatgacctgtactacagtggtagtggaggccgaagcggcgggaacag

SEQ ID NO: 18315 - DNA, 100 bp, Homo sapiens
ttgctcctttgcctgcaaacctgaacaagaactgcacagccatctgggaagcctttaaagtggcgctggacaaggatccctgctccgtgctgccctcaga

SEQ ID NO: 18316 - DNA, 100 bp, Homo sapiens
aggagtttcctgtgtccagcgctgccggagccgcctgaggcaaccccgtggccaactggattcacgcccgctccacgaggaagaagcgctgcccctacac

SEQ ID NO: 18317 - DNA, 75 bp, Homo sapiens
gcgttgtgcgcagagctggaaagcatggctgttcaacagccaactcagtttataaatccagaaacacctggctat

SEQ ID NO: 18318 - DNA, 97 bp, Homo sapiens
atgaacatcgacatcgccagcatcgacatggtttccgaagtcaacatggtgtcatggagaaactccagctgggcccagagattctgcagcgggaaaa

SEQ ID NO: 18319 - DNA, 75 bp, Homo sapiens
gatgctgctggaacacagcttcactttgctggccctggagagtgaatttgtttcctgccagcttcaccaatggat

SEQ ID NO: 18320 - DNA, 80 bp, Homo sapiens
catgactacaaagcagccagtatgcattgtcaggagctgatggccacagtctctggaatctgttctgcgccacccggcag

SEQ ID NO: 18321 - DNA, 91 bp, Homo sapiens
tctctctcaacctcagatgctaatagtttcagatattgaagagcggtctgggaggagagcaaagggcaagaagagtgactcgaagaggaag

SEQ ID NO: 18322 - DNA, 97 bp, Homo sapiens
catgggctggccagagcacacaccaggcactgtctccggagtagagatgaagagagaatttctaaacctggggctgtctcaactcctgtaaagcatg

SEQ ID NO: 18323 - DNA, 101 bp, Homo sapiens
cgcaccctctgatgttccagaaactccaggaccagggcaggagcgatttggcaacatgacccgagtatactacaaggaagctgttggtgcttttgtagtct

SEQ ID NO: 18324 - DNA, 100 bp, Homo sapiens
tgtcctgagatcaaatggcacttcattggccacctacagaaacaaaatgtcaacaaattgatgggcggcaaagatctgcaacaacatgctgttagctatt

SEQ ID NO: 18325 - DNA, 97 bp, Homo sapiens
cggcgttcaccgagaccattcacgccgacagcgtggccaagcgtccggagcacaatagatctgaagccttgaaggccaggacttcctgagggcttcg

SEQ ID NO: 18326 - DNA, 101 bp, Homo sapiens
tcagcctcctgagcagctgggactacaggctctcaccacacacttgttcatgggcgcagcaaagaagagggatccacagagctggagccatgagggctgac

SEQ ID NO: 18327 - DNA, 82 bp, Homo sapiens
gagcgcggagcccggctcccgcaccatggaggaggacgacagctacggattctgcaggacagagagatgaaactggaaataa

SEQ ID NO: 18328 - DNA, 97 bp, Homo sapiens
gaaaagcctctgggagcagaagggaggctccaagacctcatcaacaattaagggcagctgcaatgactctccgcacggtattattgtcattgcaagc

SEQ ID NO: 18329 - DNA, 98 bp, Homo sapiens
cctcatcctagtgggggttggcttgcccatttcctctggaaatcctcattgacgattcaatttgttgaaggccaatttgtggactcctacgatccaac

SEQ ID NO: 18330 - DNA, 74 bp, Homo sapiens
catcgagactatcgctaatgagtatagcgaccgctgcacgccgattctgaaaccttccttgtatccctcctgag

SEQ ID NO: 18331 - DNA, 75 bp, Homo sapiens
ccttggcccgccggaagggcaggcacatgggcatagtaatccggtacaacagtgatctggttcagaaatatcacc

SEQ ID NO: 18332 - DNA, 100 bp, Homo sapiens
tcaacagccacaacgtgtcaaagccggagtcgtcatcggtcctgacggagactcgtttgtgaacagccaggagtggacgctgagccgctccgtaccggag

SEQ ID NO: 18333 - DNA, 49 bp, Homo sapiens
gctgcagtcgctgcgtctccaaggtctctaattaacagaagatggcaaa

SEQ ID NO: 18334 - DNA, 75 bp, Homo sapiens
atcctgatggtggagatcaggaaactgcaaagactgggaagttcttaaaaagtgagaaagatcagtctaaagaaa

SEQ ID NO: 18335 - DNA, 83 bp, Homo sapiens
aaaggccaccatcctggatctgtcttgtaataaactgactactctaccggaagtagatgttcaactgaacctcataaaaggtg

SEQ ID NO: 18336 - DNA, 83 bp, Homo sapiens
cctgacgcagccgcaggtggtggcgcgcgccgtgtgcttgacaatgcagatcttcgtgaagactctgactggtaagaccatca

SEQ ID NO: 18337 - DNA, 83 bp, Homo sapiens
ctgctgctgggggccttcccgccggccgccgccgcccgaggtcctgaacgaggctgtgggggccctgatgtaccacaccatca

SEQ ID NO: 18338 - DNA, 100 bp, Homo sapiens
ctttgaagtctctaatttttcatttggctatcctggttcagcctgaaagaattctgacttaccttgtactactagttggacaaagcaggacctcataagg

SEQ ID NO: 18339 - DNA, 100 bp, Homo sapiens
ggacgcggttctgccgagagccggccgtttgagcaaggaagacattgaacgtatggtccaggaagctgagaagtacaaagctgaagatgagaagcagagg

SEQ ID NO: 18340 - DNA, 75 bp, Homo sapiens
gagaatactggaacaatagagctcgaccttatctctgtgaccagtatgcactgaagatgaggtttgtggaccatg

SEQ ID NO: 18341 - DNA, 90 bp, Homo sapiens
cagcagaagaaacacttcctataaatctcgcccaaacaggaaaggtgactcgaaaagccctgtttcctggtgactctgagattgaccagc

SEQ ID NO: 18342 - DNA, 100 bp, Homo sapiens
gagtggggaatgaggcgggggtcggcccggggctcggagaatgggcagatggcaccgaaagcgaaggaagctcctgctcctcctaaagccgaagccaaag

SEQ ID NO: 18343 - DNA, 75 bp, Homo sapiens
ttcaagaagtggccggagagttctgcatgttgattcaatacagtcgctttgaatcgaagatacatgacttacgag

SEQ ID NO: 18344 - DNA, 98 bp, Homo sapiens
agagggagcttgccttgaaggacaagaacagcgccgtcaccagcagatagcagaccccacgttagctgaaatgggaaaaaacttgaaggaggcagtga

SEQ ID NO: 18345 - DNA, 75 bp, Homo sapiens
atgtgaagcgtcagaggtccctgtttgataggaactgtggctgcaccatctgtcttcatcttcccgccatctgat

SEQ ID NO: 18346 - DNA, 83 bp, Homo sapiens
cgcgccggctatggccgtgccctggggctgagccctcagtgtctccagaacgctatagctatggcacctccagctcttcaaag

SEQ ID NO: 18347 - DNA, 100 bp, Homo sapiens
cgacttccccacagcgcttccgccgccgcctgccgtgcttgatgtgcagaaagaagccggacaccatgatcctaacactggacagaggactgcagaaaat

SEQ ID NO: 18348 - DNA, 80 bp, Homo sapiens
gcaaattttcagtctaatctcattgaaagccactcaacaactctttatgtgacaggatcagtgaatgcttgtgaaaagac

SEQ ID NO: 18349 - DNA, 100 bp, Homo sapiens
ggaacaaaaacccccatcctgggaaaaatggggaagctgtccctcctcctatgtctccatcctccaaatctgtgagcactccaagtgaagctggaagcca

SEQ ID NO: 18350 - DNA, 97 bp, Homo sapiens
gatcctggaggatgtgcggggtgcgccggcagaggatccagtgttcaccatcctggccccggaaggagccgtcactctgctaagcctgtatctgctg

SEQ ID NO: 18351 - DNA, 100 bp, Homo sapiens
gaggcaaagggaagggcaagaagaaggagcgaggctccggcaagaagccggagtccgcggcgggcagccagagcccagtaagaagactgttagaatgccc

SEQ ID NO: 18352 - DNA, 98 bp, Homo sapiens
aagccagcggcaggaccagcgggcgggggcccacgagtggtggtgaagtttattaagaaggagaaggtcttggaggattgttggattgaggatcccaa

SEQ ID NO: 18353 - DNA, 100 bp, Homo sapiens
aagtggctttcttattgcagcaaaaattcccgtaccaatgtcagtgctagggtattgctattgattgacattcaagtctcttacatcaacaccaaccatg

SEQ ID NO: 18354 - DNA, 95 bp, Homo sapiens
tgtacctgttaccactttcaaaaattacctaaaacctcgggcagaagaggagaggaggatagcagcagaagagaagaagaagcaggatgaactga

SEQ ID NO: 18355 - DNA, 100 bp, Homo sapiens
actgtttgaaacgggagttactgatgggaatttttgaaatgggctgggaaaagccatctcctattcagctaatggttgcagagaagaatggaacaatccg

SEQ ID NO: 18356 - DNA, 90 bp, Homo sapiens
aatctacctcttccaaagaggcagaattcaccagtgaacctgcaactgagatgtctccaacagcactttcatttggacccgtggataccc

SEQ ID NO: 18357 - DNA, 100 bp, Homo sapiens
aacgtcaacaacagttttacgtgccggatggagtgctgtgatgtgccagccgagacactctacgacgtcctacacgacattgagtaccgcaagaaatggg

SEQ ID NO: 18358 - DNA, 99 bp, Homo sapiens
cagcgctctcgtcttctgcggctctcggtgccctctccttttcgtttccggaaacatgcttccccgggcgctgcctggacaggcctgcctgcgtgctgg

SEQ ID NO: 18359 - DNA, 75 bp, Homo sapiens
gaatgaagtgctcgctggactggaactgggacgtgcttccttaacacaagagaaagagaagtttgcccatgaaca

SEQ ID NO: 18360 - DNA, 100 bp, Homo sapiens
aagtatgcaccagctgtcatcgtttgtcagaagaaagcagctggctcagaaaacagatgtggtgctggaaaaagccatgcacaagtgcatcttgaagccc

SEQ ID NO: 18361 - DNA, 76 bp, Homo sapiens
aggtgctggcgaacccgcggcggacttacgtcacgcctcctggcacaggttttggggaaggatcaccccgatgttg

SEQ ID NO: 18362 - DNA, 98 bp, Homo sapiens
acgttcatcatggtgcctggctgccaggcaggaattctcaagaaatttgaggaagaagatttggatgacattttaaggaaaagattgaaggactcaag

SEQ ID NO: 18363 - DNA, 133 bp, Homo sapiens
gcgaaattaagggaaaatggatgtagaaaatgagcagatactgaatgtaaaccctgcagagtaatcaagtcagaggattatatgacttttatctgcctagagaagaactatggatctacaacatggagactgg

SEQ ID NO: 18364 - DNA, 100 bp, Homo sapiens
ggcagcatgcagtgctttctggggctccttcagtggtagatgtcccctgtatggtgtggccaccctgaatggctcctccctggccttatcccgtccctca

SEQ ID NO: 18365 - DNA, 98 bp, Homo sapiens
tccaaacaagtgcatgattcttaaaattttccaaaggagttgctcaggacaaaataacactggttcctaatgtgagaggctagacccagatcatggag

SEQ ID NO: 18366 - DNA, 50 bp, Homo sapiens
agacggagctggtcggcccgaaggtgctggagaatctggtaaaagcacca

SEQ ID NO: 18367 - DNA, 98 bp, Homo sapiens
gctcgggaacatggccctggagcggctctgctcggtcctcaaagggtggcaatgaccatgagatcttcacagaccccagaaccatgggctactccgtg

SEQ ID NO: 18368 - DNA, 50 bp, Homo sapiens
ggtcaacctgcgcccccagatgtcccaggcatttgttgctatcggggact

SEQ ID NO: 18369 - DNA, 100 bp, Homo sapiens
gactgctgtagttcagaagaggtttggctttccagagggcagtgtagagacttcacagagaatgcagttgtcttgacttcaggtctgtctgttctgttgg

SEQ ID NO: 18370 - DNA, 87 bp, Homo sapiens
acttaaatgaagccactgattagcaatttaaagatcctctccaaggtcctatggcagcgtatacaaagctattcataaagagaccgg

SEQ ID NO: 18371 - DNA, 50 bp, Homo sapiens
cacaatcttcaatgagtaaacatattcctccacacccactcgcccgggtc

SEQ ID NO: 18372 - DNA, 100 bp, Homo sapiens
ttcatcagcacagataattcagagatctttctcttctccagaaaattttcagagacaagcagtggtgctgttgggaacacagaggaagtgactggctggg

SEQ ID NO: 18373 - DNA, 82 bp, Homo sapiens
tacttagttcatcctcggctccaacaaaatctggaactcacgctataatgatccagccttttatgaagaatgcaaaatggaa

SEQ ID NO: 18374 - DNA, 95 bp, Homo sapiens
caagagttaggagctcgagaaccgtttggcaatatgtacgacgcggatgagggctgtattcatcaccaaagaaaaaacttacaccaatgcagaaa

SEQ ID NO: 18375 - DNA, 147 bp, Homo sapiens
aagaagtagacatggcgagcgactccccggctcgaagcctggatgaaatagatctctcggctctgagggaataagacgagttggaagaagacctgatcaacaacttcagggtgaagggaaaataattgatagaagaccagaaaggcg

SEQ ID NO: 18376 - DNA, 89 bp, Homo sapiens
atgtggattactatccagatgaagacaatggtgtaaaattggttgatcctttgggtgaaatgttggcaccatcctgggaggaacatgcc

SEQ ID NO: 18377 - DNA, 100 bp, Homo sapiens
cttaggaccacccaccatgcctatccagatttcaggtatgctgctgaaagtgggaatcctctacattggtgggcagctggtgaccagtggggctgtaagc

SEQ ID NO: 18378 - DNA, 75 bp, Homo sapiens
tcggtgaagcgattcctgcaggcgttggttcccctctttgacctgcctcctgacagtgggcctccaccattgcca

SEQ ID NO: 18379 - DNA, 100 bp, Homo sapiens
ccgcggagcagtagccgccgtgggagggagccatgaagcattacgagggagatgtcctttgcttctcagatgtaaatgcactttaagtttgttattcaac

SEQ ID NO: 18380 - DNA, 82 bp, Homo sapiens
ggcagctagcagggcgcttcgggggactcattctcacagttccggtttgctgaggagaaagaatgggatagtgaagcttctt

SEQ ID NO: 18381 - DNA, 101 bp, Homo sapiens
ctatggatctattcgactttttcagagactgggacttggagcagcagtggacctgagggcactcgctttgctcctgtcagtacacactcccaaacagttaa

SEQ ID NO: 18382 - DNA, 51 bp, Homo sapiens
agcagatcgaatgtttgacatgggatttgttattcattttggacctggaga

SEQ ID NO: 18383 - DNA, 97 bp, Homo sapiens
tctggaggagcagttgtctgatgaagagaaggacccttcaaagttgtacaagaaagcagatgatgttgcagccattgaatgccagtctgaagaagtc

SEQ ID NO: 18384 - DNA, 74 bp, Homo sapiens
aattggtggaacttgttggaaatggaacatacgggcaagtttataaggttggaatgttgcatcagcaggtagaa

SEQ ID NO: 18385 - DNA, 101 bp, Homo sapiens
atctcagctgaacaccagtctaccattccttcaaaatttgaacatggaattcaatccttcagatcatcctcgggccagcacaatattcctcagtaaatctc

SEQ ID NO: 18386 - DNA, 80 bp, Homo sapiens
gtgcagcgcaaccacgagacggccttccaaggtgagaagccctaccactgcaactgggacggctgcggctggaagtttgc

SEQ ID NO: 18387 - DNA, 97 bp, Homo sapiens
gccgctgttgttagtcaccgcggagccgccgaaacctgcagcttcgtgctctgtctgatgatggagtatctgatcttgaagacccaaccttgactcc

SEQ ID NO: 18388 - DNA, 100 bp, Homo sapiens
ggaaaatggcggacgggaaggcgggagacgagaagcctgaaaagtcgcagcgagctggagccgccggagcggcccctttgttgctttatgcaaacagacg

SEQ ID NO: 18389 - DNA, 76 bp, Homo sapiens
tttggaagaaaaccagcatgaaattacttgaccaagttgtccctccagctggtgagtggaacagatgtgcattcag

SEQ ID NO: 18390 - DNA, 90 bp, Homo sapiens
gaccatgatcaacgccattcctgtagcctctcttgaccccatcaaggaatggttgaaatggccgccctgctcccccaatgaaaggccagc

SEQ ID NO: 18391 - DNA, 90 bp, Homo sapiens
gccggccgtacgcggtgctgcgagggcagaacctgggtgaatcacaagcctttgagaacagcctgagccttcagccctcacagatgccca

SEQ ID NO: 18392 - DNA, 98 bp, Homo sapiens
ctgtataccaactgtctcaagctaccgatgtgaatgcaacatgggttataagcaggatgcaaatggagattgtatagccaatcgactttgaaacaaat

SEQ ID NO: 18393 - DNA, 50 bp, Homo sapiens
tcacgggagaatctcgactcggatgctcgacatgcagcagaaggagaaat

SEQ ID NO: 18394 - DNA, 101 bp, Homo sapiens
gtggtgggctcctgcatgaccgacctggtcagatcgaaagctgctttgcgtcgcagttggagcagcacccccaccgcaggtggcattgaagggagcgtgaa

SEQ ID NO: 18395 - DNA, 90 bp, Homo sapiens
gtacacactgctgtttaccttggcgaggcctttcaccaagtccatgtgggcctttggagtgacgctgtgggaactcatgactctgggcca

SEQ ID NO: 18396 - DNA, 83 bp, Homo sapiens
atcctgctgggcttcgtccagatcgggaaggggtttgccttcccggattgggcctacaagccagagtcgtcccctggctcaag

SEQ ID NO: 18397 - DNA, 82 bp, Homo sapiens
ggaagactctacacccttctcgttattcaggagtcaaattgactttatcagctttaatcgatgggaagaacttcagtgcagg

SEQ ID NO: 18398 - DNA, 88 bp, Homo sapiens
gctaatccagtatttgcggatagctccaaactgggatatgtcaaaatgcagatcttcgtgaaaacccttaccggcaagaccatcaccc

SEQ ID NO: 18399 - DNA, 150 bp, Homo sapiens
gcactgtgattcatggtatcaagacagtgtctactatattgatacccttggaagaattatgaatttaacagtaatgctgtttgcaggtcgaagtaagaaggaaaccaaatattctcttaaggctgtcgaagacatgttggaaacattgca

SEQ ID NO: 18400 - DNA, 75 bp, Homo sapiens
tcaacttaaaagatgccacctctaaggccatggagaagtgtaaagatgcaggattggccaagtccatcggggtgt

SEQ ID NO: 18401 - DNA, 75 bp, Homo sapiens
ctccggggcatttttttctacacggaaccacgtgaatgttgagggggcgacacacaagcaggtggtggacctgat

SEQ ID NO: 18402 - DNA, 82 bp, Homo sapiens
gatcatgtctgcgagccaggattcccggttaatttggagtggcccctggagtcagtttcctacaccatccgaggccccaccc

SEQ ID NO: 18403 - DNA, 123 bp, Homo sapiens
gctggccatggcctccaactttaacgacatagtcaagcagggctacgtgaaaatccgcagcaggaagcttgggcattttgaaagcgaagcagaagccgtagaatcagcggcgagcctgttgaa

SEQ ID NO: 18404 - DNA, 100 bp, Homo sapiens
tacacttcgactctcaaagcaataccaggatagctgttgtttcagagaaagattgctctggaagcagccaaagcactggatgacaagaactgctgggaaa

SEQ ID NO: 18405 - DNA, 90 bp, Homo sapiens
gaagcccctctgaagcctcctcgccgccgtttctgagaagtgattcgcctttgccagtctcatctcgtgtctgctttgttaagttccatg

SEQ ID NO: 18406 - DNA, 50 bp, Homo sapiens
cagacggcagctattactacaaagagatcccaggcccacaaatcaacgca

SEQ ID NO: 18407 - DNA, 103 bp, Homo sapiens
aagcccacaaccgccctcctggacaaggtggccgacaacctggccatccagcttgctgttcctggtacagttcagacaggacaaagtatgtgtgaagtttatt

SEQ ID NO: 18408 - DNA, 100 bp, Homo sapiens
ggctgcggcagcaagggcggcggtggcggcggcggcagctgcagtgacatgtccagcatgaatcccgaataatggtccccatccctgctggagtatttac

SEQ ID NO: 18409 - DNA, 100 bp, Homo sapiens
tggcagcgcaccataagtgcatgagagaatctgtggaacttgcattaaaacttttggatgaagatgaaattagaggctacaaattacatgttgaggtggc

SEQ ID NO: 18410 - DNA, 98 bp, Homo sapiens
ggggccaaggcttcctccggggaaaatggctttgtaaagaagtttgaacctaaatctggctggatgacttttctagaagttacaggaaagatctgtga

SEQ ID NO: 18411 - DNA, 100 bp, Homo sapiens
gacttttttcaggcagaaaacaagtctcgtctggacgaggttggcgatttgaaggagctgcagacactagacatttctaccaatcgtttgctaactttac

SEQ ID NO: 18412 - DNA, 100 bp, Homo sapiens
atcgtgtacgacttggacacatcaggggggctgatggaggattgtgcacctgtgcctgcgaaaggctgaccagaagctggtgatcatcaagcagattcca

SEQ ID NO: 18413 - DNA, 95 bp, Homo sapiens
cctgctcagaggactctatacagggacgtgatgctggagaattataggaacctggtctccctgggagtctgcagtttctgggagcagtgaacggt

SEQ ID NO: 18414 - DNA, 100 bp, Homo sapiens
atctccatcaccgacgacaccttcactggggagaagaccatcaaccttactgtagatggttttcctttggaatatggataaatacaccatgatacggaaa

SEQ ID NO: 18415 - DNA, 99 bp, Homo sapiens
gagaatatagaagacatcccaaaggaagtgctgatggactgtgcccaccttgtgaaggccaatagcattcaaggcatttcgtgtcctgtctgaaccaat

SEQ ID NO: 18416 - DNA, 82 bp, Homo sapiens
gccgccctgggccgggccccaccggacgtaagactttgaccccgacgcaggcttcagtgattgccgcggatcagaagcctga

SEQ ID NO: 18417 - DNA, 89 bp, Homo sapiens
ctcttggcaggagtagctgatcaaaccaaggatggtcgggaacatgccctgtgtgccgccgtcatttcccacctgcggttattgaagca

SEQ ID NO: 18418 - DNA, 83 bp, Homo sapiens
cgcggtgctgcgagggcagaacctggaagtttgcctgcaatggtactgtaattgagcatccggaatatggagaagtaattcag

SEQ ID NO: 18419 - DNA, 84 bp, Homo sapiens
tccttcggcagtccacccaccgccgccgcctcccagggccaattcctgtccccccagcagcatggcatcgtgtgctgaaccctc

SEQ ID NO: 18420 - DNA, 75 bp, Homo sapiens
ccgcggtcggcagcatgggtcgggagtcacggtccctgactatggctccccagagcctgccttcatctaggatgg

SEQ ID NO: 18421 - DNA, 93 bp, Homo sapiens
gctgtgctcgcgctactctctctttctggcctggaggctatccagcctgcatcttcctcccgtgaggctggccgagctccacgctgatctgaa

SEQ ID NO: 18422 - DNA, 80 bp, Homo sapiens
ggctagttaaacaaagaggctggtttgtgggaggtatctgaaagccacttcaagtacccaattgtggagcagtacttgaa

SEQ ID NO: 18423 - DNA, 75 bp, Homo sapiens
ctcttgtgctgtttggcccctgcctactcggaatggaacaaagggacctaatacctatcattgctgctctggaat

SEQ ID NO: 18424 - DNA, 100 bp, Homo sapiens
atccggagcaagcgggcgagggcagcgccctaagcaggaaagaccacagcaagattctttcattcgtctcctcctagcctgggggaccaggctcgaactg

SEQ ID NO: 18425 - DNA, 98 bp, Homo sapiens
ctcccgagtacctgggactacaggacaaccatgtcgtgatgatgatgatgacgacgatgacagcgatggcggtggtgaaagaggaagacatcccttca

SEQ ID NO: 18426 - DNA, 80 bp, Homo sapiens
ggtccgcgcagcccagcgcagccatgtggctattatcatggaaaactaatttttcccagagaatttcctttcaaacctcc

SEQ ID NO: 18427 - DNA, 100 bp, Homo sapiens
ccagaaagatggcatcatttttgccctcaaaagaaatggcagcatcaacaaagagagcattgtggatgtagaaggtgttgtgagaaaagtgaatcagaaa

SEQ ID NO: 18428 - DNA, 90 bp, Homo sapiens
gagccgcggaacccggccgggagccgcgcgaggcggctgtaccagtgcaggtcctcactttaatcctctatccagaaaacacggtgggcc

SEQ ID NO: 18429 - DNA, 134 bp, Homo sapiens
tgacctgcctgcgggactactgcctaatgcctgacccacacagtgaggagggagcccaggacaatggctgccatccggaagaaactggtgattgttggtgatggagcctgtggaaagacatgcttgctcatagt

SEQ ID NO: 18430 - DNA, 100 bp, Homo sapiens
gacattacagttgaggacatgtatggcatttcaaatatagatacaaccattgaaggaacgtcagatgacctgactgttgtagatgcagcttcactaagac

SEQ ID NO: 18431 - DNA, 83 bp, Homo sapiens
attaaaggagtcatacctgatgctattcaagatctctggcagtggaggaagtctctttaagaaaatagtttaaacaatttgtt

SEQ ID NO: 18432 - DNA, 74 bp, Homo sapiens
agcggcggaaaccgaaggggagccatggcggctgacagtcgggaggagaaaggcaccacactgtaactcgaggc

SEQ ID NO: 18433 - DNA, 98 bp, Homo sapiens
cttgcttgtccaaacccagaagacagtgcatgaagccaggggacatccgccatgctccaaacaacttggcctcagaggagaaggcagagcccccccag

SEQ ID NO: 18434 - DNA, 97 bp, Homo sapiens
gaccgagagcgtgaccgagagcgcgaatatcgtcatcgttagaaggacagaacattattccatcctgtgagcaacagctgcatggattgcaaccccg

SEQ ID NO: 18435 - DNA, 82 bp, Homo sapiens
cggggcgcaggaggcggtgcacagcgccaaggtaaaagttttgtttgtgagaaacttggctactacggtgacagaagaaata

SEQ ID NO: 18436 - DNA, 100 bp, Homo sapiens
caggaaggcgctggagaccttacgacgggttggggatggcgtgcagcgcaaccacgagacggccttccaagctttggcagcatgtaagcagctgtttgcc

SEQ ID NO: 18437 - DNA, 100 bp, Homo sapiens
aagcagcaacttcgaaaggcgatgttggaaaaagacggagcagtagtaatgttggggacacactccccaccgggcagctgtccaacataccatggcgtcg

SEQ ID NO: 18438 - DNA, 75 bp, Homo sapiens
ggaaagagaaggtggacctgtccaaccagctggaggaggagaggagtgattacagtggcgagatcttgaacaact

SEQ ID NO: 18439 - DNA, 82 bp, Homo sapiens
cctttagaagtcctaagcactgaaaattcagacacagcccttgacgtagcagtaaaaaccttcccccctgagagacacgtgg

SEQ ID NO: 18440 - DNA, 87 bp, Homo sapiens
gcagcagccagtattcgggaaaggcagacaggcttctggactttgattcagaatatcaggagctctgggattggctgattgacatgg

SEQ ID NO: 18441 - DNA, 100 bp, Homo sapiens
gaaaaacagaatcagctgttccctgcgaaaggtgcccgtggttgacacgagctgtgtccccagctgttcccgtctacaatggcatcatcttcctctttgt

SEQ ID NO: 18442 - DNA, 95 bp, Homo sapiens
ccgtgttcggtgaccgcagcactggggaaacgatccgctcccaaaacgcataccataaagtctccaaaggatggcacagtaaagaaagtgttcta

SEQ ID NO: 18443 - DNA, 83 bp, Homo sapiens
gctcgcgctactctctctttctggcctggaggctatccagcgtcttgaggaccggcccagctcaggctcctggggcagcggcg

SEQ ID NO: 18444 - DNA, 101 bp, Homo sapiens
ctccaacgattgagagcatttaaagattgatgagttggaacaattcatggaaaatcaaggtgcatcgagcccaggtatcctcattttaacaacaaacctca

SEQ ID NO: 18445 - DNA, 101 bp, Homo sapiens
aatcaaccaactgttacaatcaaggtctatgaagaattctgcttggtcagaatcgtgatggcattgtgttcagcactgatgactattttcaccatcaagat

SEQ ID NO: 18446 - DNA, 73 bp, Homo sapiens
gctcagaagaagggcagtgccattgataggtctatccagaagttaaaggagagattgctcgtaaagatgaaaa

SEQ ID NO: 18447 - DNA, 83 bp, Homo sapiens
caggatggtacctggccccaaaaggaatcctggagaggaggacagtgacaacagacatttatgcagtgtgtgattctttctaa

SEQ ID NO: 18448 - DNA, 100 bp, Homo sapiens
cgctgaaggatggggtggtcctctgcaggctgctggagcgcctgctccccgggaccatcgagaaaatgatgattattctccaccgtctaagagaccaaag

SEQ ID NO: 18449 - DNA, 92 bp, Homo sapiens
cggcagccctgcgagaggcagcagcggagacgcggtgctcctcgggcgccaagcgcaatagcgtttatggcagcatttagcggacacagaag

SEQ ID NO: 18450 - DNA, 51 bp, Homo sapiens
cagcccaggcgcgggggcgacgacaggaacttagtgatttggcccgtgacc

SEQ ID NO: 18451 - DNA, 75 bp, Homo sapiens
gcttcagttctcccggtgtggccacgagtcggccgtgctatcaagactaatcaggaccttctcccagaaactcca

SEQ ID NO: 18452 - DNA, 80 bp, Homo sapiens
tggtggctcctgcacatttttacagttctccagtccttctctttcggttctatttcaccaattggcatggaaccaacgac

SEQ ID NO: 18453 - DNA, 75 bp, Homo sapiens
acagatgtccaagctgccaagtggccatggtggaggtgcagctggagagtgaccacgagtacccaccaggcctgc

SEQ ID NO: 18454 - DNA, 50 bp, Homo sapiens
tttagtccattgactatgcagcctaatgctgagtcagtgctgattctctc

SEQ ID NO: 18455 - DNA, 82 bp, Homo sapiens
tgcgccttgctcgcccgcagccccgagaccgcagccttatgccagcctggaccatcttggaggcagtgtaggatcatggaag

SEQ ID NO: 18456 - DNA, 100 bp, Homo sapiens
aggacatgaaaaggcagatccttcccagtttgaacttttaaaagtattagggcagggatcatttggaaaggatcccaggatgctggtatcctgcatagat

SEQ ID NO: 18457 - DNA, 75 bp, Homo sapiens
caaggtggcctaccaggaggccaggggtgtcgccatggcacctgcggaactcgagtcatgcaggagcttttgtga

SEQ ID NO: 18458 - DNA, 119 bp, Homo sapiens
aaggggataagattgctatcatctatgacagtcctgttacaaacactaaagcaacctttacctataaagaagttctggagcagatgttgcaagagcaattgaattactggaaaaactac

SEQ ID NO: 18459 - DNA, 75 bp, Homo sapiens
aaatgaacttcaatgcagattctagccaacataaagcggacaaggcaaaatctcagcaagttcggacctctagta

SEQ ID NO: 18460 - DNA, 116 bp, Homo sapiens
cgaatacaggacttgatcgatatggggtatggttatgatgaatccgactccttcatcgataactctgaggcgaagctgtctgtgggcaccctgaagaagctggggctagaacagtc

SEQ ID NO: 18461 - DNA, 50 bp, Homo sapiens
taaggattccaagtaactcttatttgggcgatgccagtccctccactcca

SEQ ID NO: 18462 - DNA, 50 bp, Homo sapiens
tggaaacatcaatgctgccaaggtatgacttgctcttcatgccaccgtcc

SEQ ID NO: 18463 - DNA, 100 bp, Homo sapiens
aggttctggttgcagatctagtgaatgctcagaaagacagtatgcaagatgagtcaagtcagacttcattacagaaagaggcggatttccctgactgaag

SEQ ID NO: 18464 - DNA, 100 bp, Homo sapiens
ctatcaatgcgaatgatcctgaagcctcaaagtttcatgggaatggatttgtaaactcaagagcttctccaaatttgattggagctactggtgcaaatag

SEQ ID NO: 18465 - DNA, 100 bp, Homo sapiens
ctcggcccgaggcccccaggacctccatctcccaatgttggagagctgaggcttcgaagacctcagaggacttctctcagcactcacagaaacctcctac

SEQ ID NO: 18466 - DNA, 100 bp, Homo sapiens
tggcgggcgatcacaagcagctgccccccaccacagtctctcacaatgatgattcctgcgtattccaagaaccgggcctatgccatcttcttcatagtct

SEQ ID NO: 18467 - DNA, 99 bp, Homo sapiens
agaagatccgcagctccacgcagcaagacccgcgccgccgggacccccaggacgacgtgtacctggacatcaccgaacccttaggagaaatcttgagag

SEQ ID NO: 18468 - DNA, 96 bp, Homo sapiens
ggagtcactgctgctctttgagacttcacagagaatgcagttgtcttgacttcaggtctgtctgttctgttggcaagtaaatgcagtactgttctg

SEQ ID NO: 18469 - DNA, 75 bp, Homo sapiens
gcttcaaagagaaaaggcaacatcctgtcacaggccatgctctggcaaaaacgtgtgactgcacagaaaagttac

SEQ ID NO: 18470 - DNA, 82 bp, Homo sapiens
gccggagtcgaggattccagggtcgaacactcgtgtcaggggaagctgatggagaatcgagctctggatccagggactcggg

SEQ ID NO: 18471 - DNA, 75 bp, Homo sapiens
gtgaccccagcgtgggtgaagataggatcaagatggccatgtggcaggagggtgatgagactggtgtgatggata

SEQ ID NO: 18472 - DNA, 100 bp, Homo sapiens
aggagccccgcgagtggcgcgccggggatagcttggggcttccttggtcgcacccaccacctgcctgcccactggtcagccttcagggaccctgagcacc

SEQ ID NO: 18473 - DNA, 101 bp, Homo sapiens
agagacctaagctttttccagagaagagaagctttactggtgttccagccctaagggacccgtgacattaaaggatgttattgtggaattcaccaaggaag

SEQ ID NO: 18474 - DNA, 98 bp, Homo sapiens
caagcttgaatacccagggcatctatgctggtggaggggtctgcattaactgtcagttcaaacgatatgtcaataaacttcgaagcaagagtacagtt

SEQ ID NO: 18475 - DNA, 100 bp, Homo sapiens
ctcctgccttgagcaaataaaagagccctggaatgtgaagagacatgagacagtagtcaaatactcagggatcatagacggtatttctatgtaaacgaac

SEQ ID NO: 18476 - DNA, 100 bp, Homo sapiens
gttgaggaccatcttgcctggagcaagggccgcctttttgcctatcctgacactcaccgccatcgcctgggacccaattatcttcatatacctgtgaact

SEQ ID NO: 18477 - DNA, 101 bp, Homo sapiens
gcaaggagcctcagagagggatgggttacatgcccaagaggggacttgatgttaacaaatgtgagattgccaggtctggttctgaacagagaccagaggct

SEQ ID NO: 18478 - DNA, 102 bp, Homo sapiens
gtccagctgtgccgcaccgaggcgagcaggagcagggaacaggtcaatgggaaggatctttcaaaggccactcatgaagaggcagtggaagcttttcgcaat

SEQ ID NO: 18479 - DNA, 80 bp, Homo sapiens
agtccacccaccgccgccgcctcccaggtcccagaagaggaggccagtcacaatggacagcgccggggcctccccaaggc

SEQ ID NO: 18480 - DNA, 98 bp, Homo sapiens
tggttggccctgtgatccctcaagactggtccacggagtgtatgaccacaaacagccatcaaggttacttttcacatagaaccatatagcaatcgaga

SEQ ID NO: 18481 - DNA, 50 bp, Homo sapiens
cttcatgatgaaatttctgtaaatgagagaagaagaaggaggttcctgct

SEQ ID NO: 18482 - DNA, 98 bp, Homo sapiens
taacgatgaagaaacaattcaacaacaaattttggccttatcagctctggaggagagcaggagtgttcagaagcaaatgaagatcctgcagaagaagc

SEQ ID NO: 18483 - DNA, 100 bp, Homo sapiens
ccggcggcgggaggagctagggctggagcctctccagcctcccgcgaagaagaagaagaggacagtgctccagtgaaagtggaagaacaaaggaagatga

SEQ ID NO: 18484 - DNA, 97 bp, Homo sapiens
tcagtttggtttcactcagaccgggcccaatgtaaaggctgttgctactgctgtggaacagatttacccatttgtgtttgaaagcaggaaagaaatt

SEQ ID NO: 18485 - DNA, 100 bp, Homo sapiens
cttccatcaatcatatctcacaggccaaagaactgccaactctgaaagataatgatttcattaatgagggccaaaagatttatattgatgacaacaacaa

SEQ ID NO: 18486 - DNA, 90 bp, Homo sapiens
ggcgagggtgcagagcctggagagcatgccccggccccctgagcagatgccagcagctcttccttgccagagatgatctgacccggtggg

SEQ ID NO: 18487 - DNA, 100 bp, Homo sapiens
acaatattaaaagccacagaagtccagttccctgtaaaaccggttgtaagcagtgaagccaagggacactttgtgagaaatttaggtgatgttggagaga

SEQ ID NO: 18488 - DNA, 100 bp, Homo sapiens
gtgaaagccaaaaaggagaattctctctttcaggtctgacggtaactgctgtaaaagactcaggagaatggaatttggaggctggggcattagttcttgc

SEQ ID NO: 18489 - DNA, 100 bp, Homo sapiens
tttccctccagctctgtctatcctaccaagagagcacgttttcaatatcataggagcatttgatattccacgctttgtgtacaattcagaaagaaaaaaa

SEQ ID NO: 18490 - DNA, 117 bp, Homo sapiens
cggcgccgaggcgcggcggcaggacgggaaccacgcgagctgcagccaggaacaggagtacagctgtgtagtaaagatgccttctggtgaatttgcacgtatatgccgagatctcag

SEQ ID NO: 18491 - DNA, 101 bp, Homo sapiens
caaggggctggaatgcaacttcggcgccagctccaccgctctgaaggggatctgcagaggtgagggtggcctgcagagcctgctgggaaacatgagccaca

SEQ ID NO: 18492 - DNA, 74 bp, Homo sapiens
tgcccttcgccaaggagatcgtctctctcatcgaggcccaaaccgccaaggaagcaagatttccagatgtagca

SEQ ID NO: 18493 - DNA, 90 bp, Homo sapiens
cccgcgactacagccactactacacgaccatccaggacctgcgggacaaggggcaagattcttgccaagagaattaatgtgcgtattgag

SEQ ID NO: 18494 - DNA, 75 bp, Homo sapiens
tgtatggagcgattttgcagatgaattggggcttgttgatggacaagaactggcggttgctgatgtcaccacccc

SEQ ID NO: 18495 - DNA, 90 bp, Homo sapiens
ctcctccccacgacactctgaagcagcgacggcacagcgggaagaatgaatgctgcgtttttatatggccttggtttggtctacttctac

SEQ ID NO: 18496 - DNA, 82 bp, Homo sapiens
tggaccacggcgcagacgcgggcgagctgcggctcggacgccagcggacacgcgggcgagggcactttccctcatggtattg

SEQ ID NO: 18497 - DNA, 100 bp, Homo sapiens
ctcggcacgctcattacccagcgactctgcccatctgatactccagccggagagtccagagccccagcagcaagagcaacgacaccctgagtggcatctc

SEQ ID NO: 18498 - DNA, 90 bp, Homo sapiens
tccacagcaccctccatgggctcagtcttgctcccgggaagatggttaattccatcaggtggatccataaagaacccagccaacccgcag

SEQ ID NO: 18499 - DNA, 74 bp, Homo sapiens
acctcaagaagcgctttgaccacagtgaaatatacgtggtttggacaccctcaatattgcctgctcttttctag

SEQ ID NO: 18500 - DNA, 112 bp, Homo sapiens
gccagcacctttcggcttctgagacggcggcagcagcggcattcaggccaccccagcagacatgtttgccaaggcctttcgggtcaagtccaacacggccatcaaggggtcg

SEQ ID NO: 18501 - DNA, 75 bp, Homo sapiens
caggatatgaagaaattgagggttcttgccatggcatcaagcatgatggaaccatgtgtgatacctgccgccagc

SEQ ID NO: 18502 - DNA, 97 bp, Homo sapiens
ttatgacatgtactcctatgtttgggatatcaagagtataatgtctatggtgaagtcttttgtacagtggttaggttgttcctcaaagtcattcaag

SEQ ID NO: 18503 - DNA, 100 bp, Homo sapiens
aaagaagaggcaaccacgttctccaatgcaatgctgtttgccctgaacatcatgaattcccaagaaggaggtcagcccaaggccaaccccactgtcactc

SEQ ID NO: 18504 - DNA, 75 bp, Homo sapiens
ccaatggcacggaggcctgcgtgtgtccctggccagtgtccttccacctgtccacaagcatggggaacatcttcg

SEQ ID NO: 18505 - DNA, 80 bp, Homo sapiens
gtccatcagatttctttaaaagccatagttatgaataaaacatcagcttcgagttcacttgtcttttggattggattgtc

SEQ ID NO: 18506 - DNA, 83 bp, Homo sapiens
cagggaactaatgaacctcactggaacaatccctgtgccttatagagatgacagacaaccttctgtgccttcatcaagctggt

SEQ ID NO: 18507 - DNA, 100 bp, Homo sapiens
ctggggatggacaacctgcattggacccagctattgctgcagcatttgccaaggagacatccctcttagtggctgacaagattttgaaaaagaaagaata

SEQ ID NO: 18508 - DNA, 100 bp, Homo sapiens
tgtgagaaaatggaaggaaaaggtggcctggccgcggcttaccaaggaggatatcaagagtcattcttatagaagagcatcagaggaagataaaaaagaa

SEQ ID NO: 18509 - DNA, 78 bp, Homo sapiens
cctcactctgagtacggtctcacagacaacgttgagctgactggaaataccggcatgcaggattgatggccttatctg

SEQ ID NO: 18510 - DNA, 82 bp, Homo sapiens
tgggaatttccgtcccccaccaagtccggatgctcactccaaagtctcagcagggcgtgatggtgggcatgggtcagaagga

SEQ ID NO: 18511 - DNA, 98 bp, Homo sapiens
cacaatggaaccaattgttttacagtctgttccacatgatcattgtaataagaaatgcactcggtgatggaaagagagccactattctgaagaacact

SEQ ID NO: 18512 - DNA, 75 bp, Homo sapiens
tggtgtcctcctggcctcagcaacctgacaattctgtcgtgtcccggaaaggttgaaacttgaacgtaacaaaga

SEQ ID NO: 18513 - DNA, 83 bp, Homo sapiens
ctccggccagggccgggagccgggccggcctagccagctctacgaactcgacggggaccccaagaggaaggaattcctggatg

SEQ ID NO: 18514 - DNA, 75 bp, Homo sapiens
cctctcgggaagagatagatcatgcagagtattacctttacaagttggtcaaagaaaaagtgatgtatgaaaaag

SEQ ID NO: 18515 - DNA, 83 bp, Homo sapiens
ccgggaccgccaggccaccaccggccgcctcagccatggacgcgtccctggagaaggagacagaagaaattctggcagatgtg

SEQ ID NO: 18516 - DNA, 74 bp, Homo sapiens
tgcacgacctgctcctacagccggcgatccactcccggctgttcccccggagatgtaacctcgggtatggtgaa

SEQ ID NO: 18517 - DNA, 75 bp, Homo sapiens
tgggcacctcgacctcccccagaatttgtccgagatgtcatggaccccaccaacaactgaacgctttggtcaggc

SEQ ID NO: 18518 - DNA, 74 bp, Homo sapiens
gcctggcgacccattcaggcacttatggccatttcagccactctggaggctgccatcgagaacctcaatgaagc

SEQ ID NO: 18519 - DNA, 75 bp, Homo sapiens
tacattcgccggtgcgcttgcgcggcctccagcgacgagagtcccgggagtgtctttggtgcaacactaacaagg

SEQ ID NO: 18520 - DNA, 87 bp, Homo sapiens
cgccgcgcacttcgtcatgttcttcgcgccctggcaagtgaaccggagcaaacgacttccgatccagtctgcgctgttgcggctccc

SEQ ID NO: 18521 - DNA, 83 bp, Homo sapiens
cttagtgcttggcagattagtactgggagtccaggttgtcaatcggtcacagagaaagaagcatcttcattcctgcctttcct

SEQ ID NO: 18522 - DNA, 90 bp, Homo sapiens
tagaggatggcaaggaagactgaggtttgctcgaaagcccttctgtgttataggatcataaaaggattcctctgtactagcacactcccc

SEQ ID NO: 18523 - DNA, 51 bp, Homo sapiens
gcttgagccttaagactaccttaaggagatgatgtctgtcctcatgaacac

SEQ ID NO: 18524 - DNA, 100 bp, Homo sapiens
cgccgagccgggctgcgagccgggctgcgagccgggcggcagcggggtcggaggtcgtgggcggcagcgggcgtgagggatctcactgatgaaaaggcct

SEQ ID NO: 18525 - DNA, 98 bp, Homo sapiens
caatactggtgcccaagcctggattaaaaaggtggttggttttgacggctcttccacggttgatgagttcctccagcggctgaaccaggagataggca

SEQ ID NO: 18526 - DNA, 74 bp, Homo sapiens
gctcatcatcccccccgacgccgtcgcggtggactgcaagcacaaacgtgcagatatctgatagccctttccgt

SEQ ID NO: 18527 - DNA, 100 bp, Homo sapiens
ttctctgagatctcagccctccggttcctgggcagagagaaaggaagaaggagagacgaccatcttgcaactagaaaaagatttgcgcacccaagtggaa

SEQ ID NO: 18528 - DNA, 83 bp, Homo sapiens
gcatcaacgtgactcccatcgccgccctgctctacacacctgtgctcatcaggtacggctcctacctggtctggaaagagctg

SEQ ID NO: 18529 - DNA, 103 bp, Homo sapiens
ccgccgtcgccccgccgcgccgcgctccaaccgcctcctcctcctcagtaacgcggtcttcccttggaccagacgcttcctcgccagggtcctggccaatccc

SEQ ID NO: 18530 - DNA, 82 bp, Homo sapiens
ccacgtcgtacatggcttcctggacaccaaccctgccatccgggagcagacggtcaagccatccgcagagccatcctgtgca

SEQ ID NO: 18531 - DNA, 75 bp, Homo sapiens
tcgcagtggtcgcttcttctccttgaacgacaccgtaactatccgcactagaaagttcatgaccaaccgactact

SEQ ID NO: 18532 - DNA, 75 bp, Homo sapiens
cttctgctgccgtctgtgcctccagcacctccaggggcagctggactctctgtgacatctaaagttatcgggggc

SEQ ID NO: 18533 - DNA, 76 bp, Homo sapiens
aagatcggcaggcgagattgcctgacccaggcctgctcggccctcacagggtggagattctggacgcaaagacaag

SEQ ID NO: 18534 - DNA, 80 bp, Homo sapiens
cagagaccaggtccaagatcttcccccgtttcacaattagaaggcggctgtctagagcaggattcctggttttcaagcct

SEQ ID NO: 18535 - DNA, 75 bp, Homo sapiens
gcaaagtgtgtgcaagcaaatgcttttattcagactggattatggacagaacttggaaatattgagaataatttc

SEQ ID NO: 18536 - DNA, 74 bp, Homo sapiens
aggaccctaacgacaggcgcctccggcccatttacgctttgggatgcgacatcagcaaatgagaggaaaagcat

SEQ ID NO: 18537 - DNA, 75 bp, Homo sapiens
gaaactggagccaccatcaagctgtctaagtccaaagatttttacccagcactgaacctaccagatgtatttggg

SEQ ID NO: 18538 - DNA, 98 bp, Homo sapiens
gaagacagcagcatacgctccgagatcccatgcagcggctgcagaatcaactgaggcgcctgcaggacatggagagaaaccagcctggacaccaagtc

SEQ ID NO: 18539 - DNA, 75 bp, Homo sapiens
aatagttacctcttttaaactcattctactggagcaaatgcttccacagcgcggcacctgtacctccggggtggc

SEQ ID NO: 18540 - DNA, 100 bp, Homo sapiens
cgctctcgctctggccgacgagtggagaaaacctagaggatcaagacataatgggagcatttttagacaagccaaagatggaaaagcataatgcccaggg

SEQ ID NO: 18541 - DNA, 100 bp, Homo sapiens
gcgcactagagtttaactggcacccagtgctcatggtcaccggcttcgtcttcatccagggcatcgatgaaggatttgggggcagagcacttggcaggtc

SEQ ID NO: 18542 - DNA, 98 bp, Homo sapiens
tgctgcaaggctgacgataaggagacctgctttgccgaggaggagtggagcaccagcaactgttagacctcgcccagaagcacctcggtggcatccca

SEQ ID NO: 18543 - DNA, 80 bp, Homo sapiens
aaaccactgtaatcacagggactaccagaatatttcaagaaatggttgaaacagttcctcaggctacagtgaagactgga

SEQ ID NO: 18544 - DNA, 50 bp, Homo sapiens
tcggcatccagagccccggcgcacaggaatatgcactttctggttggaat

SEQ ID NO: 18545 - DNA, 100 bp, Homo sapiens
cctggtcttgctcggccgatgaagtgcagaggtttttttctggccacgcccagatttcttctaccgctgcttccctgatgggctagcccattctgacttg

SEQ ID NO: 18546 - DNA, 100 bp, Homo sapiens
acaaatgctccttctcctggagacgcaactcaagggggcgctctcgcagaaggctttcaagtgaggatgtttgagtttcagaattttgagaggagatttg

SEQ ID NO: 18547 - DNA, 132 bp, Homo sapiens
tcgaggtgcactcgctgaagctcctggcagcccactgcttcatccagcaccagtcaagaactatttgtcaggactctcttcccctcctcctggatcacaggacacgggagctccgggcccgacaagaatgct

SEQ ID NO: 18548 - DNA, 100 bp, Homo sapiens
cgggatcgtgaccgagaccgtgaccgagagcgtgaccgagagcgcgaatatcgtcatcgttagaagctggacacagagtatagaaaaaaatgggatgccc

SEQ ID NO: 18549 - DNA, 75 bp, Homo sapiens
cctggagcagctgcggcggctcggggtgctctactggaaggtgtcgtgaaaactacccctaaaagccaaaatggg

SEQ ID NO: 18550 - DNA, 100 bp, Homo sapiens
aggggtgagctctacaaggagctgcagaaaagcgagaaattagatgaacagcgcacagccacggtgaggaggcaacgcacgggccacaggcatgttcctg

SEQ ID NO: 18551 - DNA, 98 bp, Homo sapiens
aggcttttgctctgcgacggctgcgatgcggggctttatcctgtggataaacgcagagtgaacgagtttggggagtcctacgaggagaaggccacgcg

SEQ ID NO: 18552 - DNA, 90 bp, Homo sapiens
aacctcagaagactctgttcatccagtgcgatgtggctgaccagcaacaactgagaggaggagatgttaaagtaacccatcttgcaggac

SEQ ID NO: 18553 - DNA, 83 bp, Homo sapiens
cggaggagcaggtgcagagcactgcgctgtcagcgatagcccagtggatggccattccagataatctgatagtggaggaagca

SEQ ID NO: 18554 - DNA, 75 bp, Homo sapiens
cgtgaaggaatctggaggaaagctgaccaggcggcttgtgaacagtcaggtgtctgtgacctttgaggatgtggc

SEQ ID NO: 18555 - DNA, 75 bp, Homo sapiens
tcctggtgtagaatctgcaaacaggctgagtcatcactagagagtgggaagggcagcagcagcagagaatccaaa

SEQ ID NO: 18556 - DNA, 74 bp, Homo sapiens
caatgaacattcctgctcttgttggcaaaaggatggggaggcacgtgagagggatgaaatccggcatgacaggc

SEQ ID NO: 18557 - DNA, 50 bp, Homo sapiens
atagatcagaaatttgtattacagcatgaattgtttaagggtaagccaca

SEQ ID NO: 18558 - DNA, 91 bp, Homo sapiens
ctcgctgtacgccgagcacccaggcgactgcctcatcttcaaggccctccccagccactgccgctgttcccagttctcagcccaaaactga

SEQ ID NO: 18559 - DNA, 99 bp, Homo sapiens
cacaactctgcagtggaccacagcattcctgaaatacatccaggaaagacatggagattctcttaaaaaggacttggatgtgaaatcattgctgctaga

SEQ ID NO: 18560 - DNA, 80 bp, Homo sapiens
tcctgctcggctggtcctactacgcctacgccatccagctgtgcatagggaaatattagtcgtcaagaagctgttagcat

SEQ ID NO: 18561 - DNA, 51 bp, Homo sapiens
gtccatctaccctgactccttcacagttccatcagcaccagagaaccccag

SEQ ID NO: 18562 - DNA, 82 bp, Homo sapiens
ccatggcccaatttgtccgtaaccttgtggagaagaccccggcgctggtgaacggcacccagattggctgaaaacttctgtg

SEQ ID NO: 18563 - DNA, 78 bp, Homo sapiens
tctaccttttgagctgggaaaactgtttcagttgcagactttaggcctgaaaggcactggagatattattgctgtcat

SEQ ID NO: 18564 - DNA, 83 bp, Homo sapiens
atggagggagtggacatcagccccaaacaggacgaaggcgtgctgaagatgatatcatcaagttgaatcgaaaggaagggaag

SEQ ID NO: 18565 - DNA, 96 bp, Homo sapiens
cattcgaagctgccattgaatatattcggcaaggaagcctctctgctaaaccccctgtaatcattaccaaatgaggaggaaaggacgatgtcatcg

SEQ ID NO: 18566 - DNA, 100 bp, Homo sapiens
agctccagagatgattactctcgggatgattataggcgtgatgatagagctaccaccacacaatcaaagcggaaaggccacttctctaggtgccccaagc

SEQ ID NO: 18567 - DNA, 76 bp, Homo sapiens
gaattaaaaggtgtcaagaagctcagaatgcacaagtgcatacaccttgatagcaccaaatataaaccggagaaat

SEQ ID NO: 18568 - DNA, 100 bp, Homo sapiens
atgttcccgaggctgtcaccagaattatatccagatcgagagacagaagattctgaaagggttcaatgaaatgagagtcatcttggacaatgaggagcag

SEQ ID NO: 18569 - DNA, 100 bp, Homo sapiens
ggggcgcaggaccggccgcagtgccacttcgacatcgagatcaaccgggagccgggtgtcatggagaaactccagctgggcccagagattctgcagcggg

SEQ ID NO: 18570 - DNA, 97 bp, Homo sapiens
gtgccgtgttccggagccagcagcaggctatttttatgattcccacaaatccaccaccaacattcagaaagccagaactttggtccgatgatttcac

SEQ ID NO: 18571 - DNA, 83 bp, Homo sapiens
ggagccgagcatctgggccgagaccattccgtatggagagccggaaccgagattaagcgtagctcctgaaatggatatcatgg

SEQ ID NO: 18572 - DNA, 75 bp, Homo sapiens
tgttgatggtggtggtgctggtcatcaatgttactcaggtagagccctcaaacacagatgcggccaagcctactt

SEQ ID NO: 18573 - DNA, 100 bp, Homo sapiens
agtcacagagaaggctcagttcttccttcctatatgtggccccatggtattggatgctttaatcaagattaagaatgaagttgactctactttgaccttc

SEQ ID NO: 18574 - DNA, 99 bp, Homo sapiens
ccgccgtctacccgtggccgctgccggtctacatgcagagcaaagcggcagtccccggacagggatgggctctgaccaggaggacagcaagcccatcac

SEQ ID NO: 18575 - DNA, 98 bp, Homo sapiens
atcattaaggacggaggcacgctcagtgaattttccatggacaaagaagcagagatgtcaaaaggaaacagttgtgttttcctgggttcatagtagcc

SEQ ID NO: 18576 - DNA, 100 bp, Homo sapiens
ctttcagagagaacagcgtttcagttttggtcatcggaagtggtgccttcagcacaggttaatccctatatcctgaagaagaacatgatcctcatgacaa

SEQ ID NO: 18577 - DNA, 76 bp, Homo sapiens
ctggatctttgctagaaagagaggatggagagcaatacatcatcatctttggagaatttagcgacggcgcctgtga

SEQ ID NO: 18578 - DNA, 82 bp, Homo sapiens
cagtgattcatcttgtggttggactgtcatcagtcatgagatcctgataacttaagtgactctctcttttccggtgatgaag

SEQ ID NO: 18579 - DNA, 100 bp, Homo sapiens
gctggccagaagaagagaaaccgctgggagctgagacttctgcagctgtgtcagcgtgttatgatgccgtcccgtaccaacctggctactggaatcccca

SEQ ID NO: 18580 - DNA, 97 bp, Homo sapiens
cagaaatggaagttcatgaagagagtcgacagtttacaagcctactttggggataaaggattatttggtcttctggatttggaggcaatcagcggac

SEQ ID NO: 18581 - DNA, 80 bp, Homo sapiens
tgtgggtgtagagtctaaactcatccttaaaggggtcatactgctgttggcaatctgacagctcatacatcctatgagat

SEQ ID NO: 18582 - DNA, 76 bp, Homo sapiens
agcaagcccaggcacagccgacgccgcggggggtgctgagttcttcacctccttttagactgagatctgccaagtt

SEQ ID NO: 18583 - DNA, 97 bp, Homo sapiens
ctacaatctaagaaggatttcagcaaatttggagcaggacaagttggatggcttgaggactggtactaaaaggaaacgtgactgggaggccattgcc

SEQ ID NO: 18584 - DNA, 100 bp, Homo sapiens
ggacattctgctgaacatcatcgaacggctccttcagcagctccagctggctggaggcgtgatcctgggtgtggccctgtggctccgccatgacccgcag

SEQ ID NO: 18585 - DNA, 75 bp, Homo sapiens
ggacttccaatcgagtgactgcctggcacggtattgcggaatgctgcagcactccttactctcttttgggtttgg

SEQ ID NO: 18586 - DNA, 100 bp, Homo sapiens
gagccgtgctcccggtggaagcaagggagcccagccggagccatggaaatgctgtctatgatttcttcattggccgtgaattaaaccctcgaattggtac

SEQ ID NO: 18587 - DNA, 75 bp, Homo sapiens
aatggagtacaagggctatctggtatctgtagatggctacatgaacatgcaggctattcaagatctctggcagtg

SEQ ID NO: 18588 - DNA, 82 bp, Homo sapiens
ggaatcgcccaagtccctctactcgcgaggtccgcgggagagctgtggggcttggtgagtgtttcgtggcctctcgggttgg

SEQ ID NO: 18589 - DNA, 90 bp, Homo sapiens
ggagtctccgcgtcccgctcgctgggagagaggtacctctccttttccctctccctttccctaaggttcctcaagccaggacctacgcac

SEQ ID NO: 18590 - DNA, 97 bp, Homo sapiens
aggacccgcagggccccgggccagccatcaagttctctggagaccttcttcgactccctggtgacacaagcaaacatccccaacgttttctccatgc

SEQ ID NO: 18591 - DNA, 100 bp, Homo sapiens
cggactcagccaagttccccaacggctccccgtcgtcctggtgctgcagcggaccaacttggaggccttgcagaagaagctggaggagctagagcttgat

SEQ ID NO: 18592 - DNA, 98 bp, Homo sapiens
atttggctttgcctttctggacacagaagtatttgtgacaggacccatgtgggcagagaggagagttctcacctggagttcagcatggtggacttggg

SEQ ID NO: 18593 - DNA, 76 bp, Homo sapiens
caggggccagaagacaaagtcaattccatttgtggacatcggatacccaaggagacgaagctgaagcaggagaagg

SEQ ID NO: 18594 - DNA, 82 bp, Homo sapiens
gccaggccagccgggacggacgccgatgcccggggctgcgacggctgcagacgttggacctctcgaacaaccagctgagcga

SEQ ID NO: 18595 - DNA, 75 bp, Homo sapiens
actctggtctgtggcgggtgtgctgcatcgaagtcaggatggctaaaggtgaccccaagaaaccaaagggcaaga

SEQ ID NO: 18596 - DNA, 76 bp, Homo sapiens
accagcactacatcctggccaaggagttgatccctgaattttattatctccctgagatgtttgtcaacttcaataa

SEQ ID NO: 18597 - DNA, 75 bp, Homo sapiens
agggatcccactggcagcaaagttcttatttacagaatcgataagaaggctgactgcacaatcacaatggctgac

SEQ ID NO: 18598 - DNA, 100 bp, Homo sapiens
ccgtcgcgagcgggttctcaagttaggggagagtttcgagaagcagccgcgctgcgccttccacactgtgcgctgggatcccaacaagccctcaggattc

SEQ ID NO: 18599 - DNA, 100 bp, Homo sapiens
caggaatatgttagcgttgtatcttgggagaaagacacagtctccatcatcccaggtgctgttggcagcagcggtctgcacaaaagcaggaaaggctatt

SEQ ID NO: 18600 - DNA, 50 bp, Homo sapiens
aggcaaatggagtcgttgggaatctggttggtggagaatttgaactggag

SEQ ID NO: 18601 - DNA, 50 bp, Homo sapiens
cagccctgcctctccctgggctctgggttccgagtctgaggaagacataa

SEQ ID NO: 18602 - DNA, 88 bp, Homo sapiens
gaattctctttgggccctgcctggaagtaagagccacggagcctgcccagaagatttagcaccactatctccgttccatctgggctta

SEQ ID NO: 18603 - DNA, 82 bp, Homo sapiens
gccgccacggccctttggggaaatgcgtgcactgcgtccctctagaggagcaagagcagctctacctgaggtcaggtgtggt

SEQ ID NO: 18604 - DNA, 75 bp, Homo sapiens
caggcacaagacacgtcggatgttgcagcagagccagcagctagcgcaggttctaaggcccagcagctactacaa

SEQ ID NO: 18605 - DNA, 95 bp, Homo sapiens
agagagaggcgatgggcctattcccactttccttgtggaactgtccagagtgctggcaaatccaggaaacagtcaggttgccagagttgcagctg

SEQ ID NO: 18606 - DNA, 75 bp, Homo sapiens
cgagcgcaaggacagcgcgaggtccgcgcagcccagcgcagccatgtgaccagaagtcagcagcttcccagaagc

SEQ ID NO: 18607 - DNA, 85 bp, Homo sapiens
gccgatccagcctgcggagcctgtggggcagatttgcttgtaaatgcatcacgaagaggcagcccagaatgaagaaagcaagcag

SEQ ID NO: 18608 - DNA, 75 bp, Homo sapiens
cgtttagagagtgcttccccttgccgagcactgggagcaggaaaattcagattcgaaacatccctcctcacctgc

SEQ ID NO: 18609 - DNA, 74 bp, Homo sapiens
caaccttctttgaaatttatagtggaaagaattccttgtgtggatatcagatccggatggaatctcgagcttgt

SEQ ID NO: 18610 - DNA, 90 bp, Homo sapiens
aggctttatgggagcatgggttaccagcgacgcaccctgctctccgtgtgaaatggtcccatctcagactgccctgggtagacctagact

SEQ ID NO: 18611 - DNA, 137 bp, Homo sapiens
ccaggaagagggactggaaccatctcagaagccatgcccctcaggctggaacttgccctgtctcctcgcagatgagattcacaatgacatcctttcaagaagtcccattgcagacttccaactttgcccatgtcatc

SEQ ID NO: 18612 - DNA, 49 bp, Homo sapiens
tcagccaccgctccctcttcccacgatcaatgtccgagttaccaccatg

SEQ ID NO: 18613 - DNA, 75 bp, Homo sapiens
ccaattccggacacataacaagcagcagtgaggacaccaaagatgtcatttgtcagagtgaaccgctgtggtccc

SEQ ID NO: 18614 - DNA, 50 bp, Homo sapiens
catacatgtcttcagaatcaagacaggagacaatttatccagcatgttgc

SEQ ID NO: 18615 - DNA, 50 bp, Homo sapiens
aatccctggagaagactgattgctggagtgcaatggcgcaatctcggctc

SEQ ID NO: 18616 - DNA, 98 bp, Homo sapiens
ggttgcatctgctaaagaggatcctgccaacattttacaggtgtccaaggcagctgcagatttgatggcctactgtgaagcacatgccaaggaagacc

SEQ ID NO: 18617 - DNA, 98 bp, Homo sapiens
cggcagggctgtgaggcccgccgctcgcatgagcacctcatacggctgcttctggagaaggtgtcagttgtacccgaggcgttctcagcagcagcaag

SEQ ID NO: 18618 - DNA, 83 bp, Homo sapiens
gcgggagctggacggcgagcgcgagcggcgcgagaaacagaaaggacccaggagcgataacagtaaatcaaataagatatttg

SEQ ID NO: 18619 - DNA, 75 bp, Homo sapiens
ctgacctcacccaccaactgttcccatgggggtctgtctccaagacttcacagagaatgcagttgtcttgacttc

SEQ ID NO: 18620 - DNA, 114 bp, Homo sapiens
tcagccgctgtgggctcctggggagatggaggggccggggctgggctcgcagatgaaggagcttctatgcacccttgtgatgacacatactgtggcccttttccagaatctgag

SEQ ID NO: 18621 - DNA, 98 bp, Homo sapiens
gtggctgcaaccttagcgacatcaggaagaacagggtcgaggatcgagatgaacagactagccactttgcattgactggaaacaatggcatttacaga

SEQ ID NO: 18622 - DNA, 75 bp, Homo sapiens
cactacaacaggaaaatcatattatagatggagtaaagacggcagttctgctactgcgaattgatgacatcgttt

SEQ ID NO: 18623 - DNA, 83 bp, Homo sapiens
gggcggcaaggacttcgagcagcctctcgccatttcccggacaatgcagatcttcgtgaagactctgactggtaagaccatca

SEQ ID NO: 18624 - DNA, 75 bp, Homo sapiens
gttggaccgtgtgggacgccggcggcagatgagagcatccaacggccgaagaacagttgagaattgttgaagaac

SEQ ID NO: 18625 - DNA, 85 bp, Homo sapiens
tttggcccctttgctgcaaagtggtgatgcaactgtgacaatagctcacagatacacccccaaagagcaactgaagattcatacg

SEQ ID NO: 18626 - DNA, 100 bp, Homo sapiens
taactgaacattggtctaaagtctttccaaaaggtcaaggttcacaaggaaaccactgattgcttgtgtggagaaacagctattaggagaacatttaaca

SEQ ID NO: 18627 - DNA, 83 bp, Homo sapiens
attttgtggccttagctacaggagaggcttacacagcttacctctcaggaatgctacgttttgaacatcaagaatggaaagct

SEQ ID NO: 18628 - DNA, 71 bp, Homo sapiens
agaaagtcctacaacagtttggcgtgcaacatggggcttgagaaaggggcagagcggcttgggtaaatcca

SEQ ID NO: 18629 - DNA, 75 bp, Homo sapiens
gcagtgtaggagatggagaaactgtagagtttgatgtggttgaaggagagaagacaggtgctctagttcacagct

SEQ ID NO: 18630 - DNA, 90 bp, Homo sapiens
atttttacagttctccagtccttctctttcggtgctggtaaaccgcctatgtttggtgattatgaagctcagagacactggcaagaaata

SEQ ID NO: 18631 - DNA, 98 bp, Homo sapiens
tgggcgacaaggaagaagaaccctcagtcaaattgcctagtgtaccttctactcatctgccggcagggccagaccaagttttacaggaaaactccagt

SEQ ID NO: 18632 - DNA, 82 bp, Homo sapiens
gccgtggcccctgcagcggaaccggacccagtccctgagccgcccctacacccacagattgtagaaggcatgaaacaaaaaa

SEQ ID NO: 18633 - DNA, 75 bp, Homo sapiens
caatatgatatacaagacaaggtgaagcctcggaagctggcacagtgatgtttgagtatggaatgcggcttggca

SEQ ID NO: 18634 - DNA, 80 bp, Homo sapiens
cagattccattagctgctgtcatcaagccctttgccaccattccttcaaatgaggtgtgagttcttgatacgaatgaaag

SEQ ID NO: 18635 - DNA, 75 bp, Homo sapiens
ggaagagcgctcccaggagaaacaactcctagagtggcctcagctaggtaaccaacgggagtcgacttatctatg

SEQ ID NO: 18636 - DNA, 100 bp, Homo sapiens
ctgacatcgcgacgctgctcaaaacctcgctccggaaaggggacacctgtactggagaaaatgaaactgggattgacccatcaagatgcttggctcaata

SEQ ID NO: 18637 - DNA, 100 bp, Homo sapiens
ctcagcgtcctgctgctgccgctgctgggcgggacttgccatgaggtgttgaagccttgtttcactgagttggagagactggacctaaatggcgcagcat

SEQ ID NO: 18638 - DNA, 89 bp, Homo sapiens
gagcttgaagaagaaactggctacaaaggggacattgccgaatgttctccagctgcaggactcatgcacacgttcaatgcccacgccgc

SEQ ID NO: 18639 - DNA, 90 bp, Homo sapiens
tttagtaactttagctaaaggggacttaaaatttcccctgaagatatttcagcattccaaaccagatgagtctcccaaactgccccaaca

SEQ ID NO: 18640 - DNA, 75 bp, Homo sapiens
ggacacctttcacagctatcagggaagtattaagggacatcagcgagagaggcagggatcttgagcagattttat

SEQ ID NO: 18641 - DNA, 80 bp, Homo sapiens
caccccgcaggagaacgagtccctcttcactttcctcggcaagaaatgtgtggcaaaacaacgagtggatgagaaaccca

SEQ ID NO: 18642 - DNA, 83 bp, Homo sapiens
caccactggaacgccaaccggctggacctgttcgagatcagccagccgaccgagacaatgcagatcttcgtgaagactctgac

SEQ ID NO: 18643 - DNA, 90 bp, Homo sapiens
cgccggccccgacatcctgcggacctactcgggcgccttcgtctgcctggagattgacctagatgtgaaggctggtggaggctgtgtaat

SEQ ID NO: 18644 - DNA, 98 bp, Homo sapiens
cactctctaaaggagcaacagtttacagcccttccagatacagctaccagggcaattgaaggaacagactaaaaatcgtgtcctggaaggaaactaca

SEQ ID NO: 18645 - DNA, 75 bp, Homo sapiens
ctgggcgcggattcgccgaggcaccgaggcactcagaggagaaagaagatgctgatatgctacaacacggatgaa

SEQ ID NO: 18646 - DNA, 88 bp, Homo sapiens
cgtgtcccgtgagtccagggctctcgtggagggggtatgcatgctgggcaacaggaccctgtcccgggaccagtttgacatctgtgcc

SEQ ID NO: 18647 - DNA, 100 bp, Homo sapiens
gggaagtgagaagcccaactaaagccccacatttgcagctcattgaaggaaaggtacatggactatatcgcacaacaggtgctagttttgagaaggccca

SEQ ID NO: 18648 - DNA, 90 bp, Homo sapiens
cgaggccaagatggcggtgctgtcaggcaaaatacatatctcagtgcattgatgagatcaagcaggagctgaagcaggacaacatagcgg

SEQ ID NO: 18649 - DNA, 75 bp, Homo sapiens
ggaacagacaagcaggttgtcttggcctcaggagtgcaagtagctgatgaagtatgtcgcattttttatgacatg

SEQ ID NO: 18650 - DNA, 101 bp, Homo sapiens
gccatcttcatcctggtgatggcaaatgtcgtggacatgattgactggggcgactttggggtagaggcagtgtctgaggggactgactctggcatctctgc

SEQ ID NO: 18651 - DNA, 100 bp, Homo sapiens
gtcctcgagtgaatgggcggatctcatatcttcacttggcaaactcaacaaggccaaatttgagtccctctttaggacgtatgacaaggacatcaccttt

SEQ ID NO: 18652 - DNA, 90 bp, Homo sapiens
gcggcccgcgcggagcggacgcgcgtggcgctgcccgtacatggactggacctgcctggagcccagcccagagcatctcctcagtgctca

SEQ ID NO: 18653 - DNA, 99 bp, Homo sapiens
gcagcaagcgggtgctgctcatctgcctcgacctcttctgcctcttcatggcaagtccgcatgcaacaccatcgactcttcatttcccgacatcaccca

SEQ ID NO: 18654 - DNA, 82 bp, Homo sapiens
gtggaccctcgtgagcgacccggacaccgacgcgctcatctgctggagcccggcagcctgcttctgcaaagtggtacgatcg

SEQ ID NO: 18655 - DNA, 74 bp, Homo sapiens
tctgaggacgggaaggtgttcttctgggacctggtggagtctattatcctcccagtccacaacgctgaaccgtg

SEQ ID NO: 18656 - DNA, 83 bp, Homo sapiens
cccagtcctgcagcgccagcagctggactatggcatctatgttatcaaccagactgcagcccgtgctgatgactgtggctgtg

SEQ ID NO: 18657 - DNA, 100 bp, Homo sapiens
ctcgttcccctcccattactcccaactgaaaccgaaccctcaccaaacagatctgcttgcacatccacttgcacgtagacctcagataagtgagatctgg

SEQ ID NO: 18658 - DNA, 74 bp, Homo sapiens
tttccttgcagtcgcctgctgctgtcgtcgggagtgacaccacagccaaagccctatgggaagctttactgaac

SEQ ID NO: 18659 - DNA, 100 bp, Homo sapiens
ggccaacgactttttccggcggctgctcatggaagatggtgctcatctctcagagatctagaacttgcctaccaagtacatggccttttaaaaaccggag

SEQ ID NO: 18660 - DNA, 75 bp, Homo sapiens
ctcgctcgtcaccagcaagcttgcgggacttgcacctagctgcggagctggggaagactctgctggagaggaaca

SEQ ID NO: 18661 - DNA, 100 bp, Homo sapiens
ttcgtttttcggatgatgccttcaatactacctttatttccaccatagttggattggatgctgctggcaagacaaccattctgtataaactgaagttagg

SEQ ID NO: 18662 - DNA, 80 bp, Homo sapiens
ccataaataatatggggctgaacagctgcaggaatgaaaaggtcaaaatgcagatcttcgtgaaaacccttaccggcaag

SEQ ID NO: 18663 - DNA, 100 bp, Homo sapiens
agacgacgctgctgggtccgctgagcggggcgacccgaggtttctaagcatgaattgaggaacagaagaagcagagcagatgatcggagcagcatttgtt

SEQ ID NO: 18664 - DNA, 117 bp, Homo sapiens
ggcggcggcaagggcgggagggagcggtcgccgcgggatttggagctgcctagcctcgcggtcggtcaccatagaggtggtcgacggtcctgactctgaagcagataaagatcagca

SEQ ID NO: 18665 - DNA, 90 bp, Homo sapiens
tgatccagaacttgcagcaacaataggtgtgatgaatgcagactctgctaccattttggctgtttggatcctcctttgaaaaagtctcct

SEQ ID NO: 18666 - DNA, 100 bp, Homo sapiens
cttcagaatacttcaagaatagcagaggagcagctgacagcagccatggcgagcggcagtggagacagcgtcacccgtcggagcgtggcatcacagtttt

SEQ ID NO: 18667 - DNA, 75 bp, Homo sapiens
gataaggaccagtacctgcccaggaaactgagcgacaccacaggcaagctgggctttgaggaattcaagtacttg

SEQ ID NO: 18668 - DNA, 75 bp, Homo sapiens
atgctcatctctatttgcagccaggaatggaagatggatggataatcaaatagtggtttctgactatgcccagat

SEQ ID NO: 18669 - DNA, 75 bp, Homo sapiens
atgtgatggagaagttatcaactggtgttttcagcgtcagcttttctttcgcaaaaagctgcttcactcatccca

SEQ ID NO: 18670 - DNA, 96 bp, Homo sapiens
tcgccagcggagcgaacccgagagcgtggagcgggctgggccaggcctccccatggccacccatggaccagtcggcattcacttcctcccttctgc

SEQ ID NO: 18671 - DNA, 134 bp, Homo sapiens
ctcggtgtagctgccgtggttgccaggagagctgcgccggcgagaagcggccgagccagcagcagatgctctacccatggtaccccaggaccagaaggcaaccatatttcagatttaccacttctagacagtcc

SEQ ID NO: 18672 - DNA, 100 bp, Homo sapiens
tcagaacatcagcctgcccagtgccgccagcttcaccttctccttccacagcaggaggtcagcatgcccggggtcagcacgccatgcagttccccgccga

SEQ ID NO: 18673 - DNA, 98 bp, Homo sapiens
gcgggcgtgggaacccaggccccgccgaggcggccaggccacccagaggagaaggccaccccgcctggaggcacaggccatgaggggctctcaggagg

SEQ ID NO: 18674 - DNA, 98 bp, Homo sapiens
tcgaagcagcagctctcgctccagaagcttcactttggtaaaataccatgaagattttgaaaaaacaaaggggagaggctttactcccgtcgtggacg

SEQ ID NO: 18675 - DNA, 50 bp, Homo sapiens
ccttcatcctcaacgccctcacctggttagaggatgcattgggctcagtg

SEQ ID NO: 18676 - DNA, 95 bp, Homo sapiens
gcgtctcggaaaccggtagcgcttgcagcatggtaaagatgagcccagcagctacacatgtacaacttgcaaacagccattcaccagtgcatggt

SEQ ID NO: 18677 - DNA, 100 bp, Homo sapiens
ctgatgtggtgcttttgaaccactggaaagtgaggaattttgaagtacaccgtggtgacattgtatcattggtagggagaaccgaagattacaggaggcc

SEQ ID NO: 18678 - DNA, 100 bp, Homo sapiens
ctcctttggatattcctcgtgtctccgattctgagatatggctcgtggacagcagaaaattcagtctcagcagaaaaatgccaaaaagcaagctggacaa

SEQ ID NO: 18679 - DNA, 83 bp, Homo sapiens
atctcttctccctccccttcttggtgagaagccctaccactgcaactgggacggctgcggctggaagtttgcgcgctcagacg

SEQ ID NO: 18680 - DNA, 101 bp, Homo sapiens
ggccgcgcgggagccgcagggcgccctagccttcgcagaaacgatggcggaggaagaaggttccagcaacagatagaaatgctttaagttcactctgggga

SEQ ID NO: 18681 - DNA, 100 bp, Homo sapiens
gcctgacccgaagtaccgacccgagttatgcccaccctccaactttgcgacggaaatgtgtcatcgaaagccagactttggcttcatgtttgaaagctcg

SEQ ID NO: 18682 - DNA, 90 bp, Homo sapiens
ctggtgctgtctgggcttcatagcattcgcctactccgtgaagtacaagccagctgccatgttgtgagcacataccacatagctccatgg

SEQ ID NO: 18683 - DNA, 73 bp, Homo sapiens
aactatggatgctgggaaactggtctctgcatggattcccccagccctatggacccccacatggcggagcaga

SEQ ID NO: 18684 - DNA, 75 bp, Homo sapiens
aagagacgcccctgctaacgggaatgctcaggatcaaggtgaaaaggagaaccccatgcgggaacttcgcatccg

SEQ ID NO: 18685 - DNA, 100 bp, Homo sapiens
tccgtcgctgcttcggtgtccctgtcgggcttcccagcagcggcctagcgggtgagcgaggagctgatccgagtggccatcctctggcatgagatgtggc

SEQ ID NO: 18686 - DNA, 85 bp, Homo sapiens
ggcggcggcggggccgagcgcggccctgcaggcgatgtcgccgaaaccgggctgcaggcgggctgttcggctcttgaatcccagc

SEQ ID NO: 18687 - DNA, 100 bp, Homo sapiens
tgctgtgttaaattcagcccctcttccagataccatttggctttcggctgtgcagatgcctaccttaatgcctctgaaacaaccactctgagcccttctg

SEQ ID NO: 18688 - DNA, 83 bp, Homo sapiens
ctggaggacgccttatggagccagcatattccagccgcacggttgtttatggagctttgggcgggggctgagcccgcggtcgt

SEQ ID NO: 18689 - DNA, 100 bp, Homo sapiens
cccggtggtcgtccgcggctccggtcacgtcaccgtgtttgtcctggttgtggtcaagactggatgatgtaactggctctctaggaagcctcacttggcc

SEQ ID NO: 18690 - DNA, 75 bp, Homo sapiens
cacccctcctgtaacccagcctgtttcacttcttggctcagctatgtgaaccatgcagaggacctggcctccaag

SEQ ID NO: 18691 - DNA, 75 bp, Homo sapiens
tacctaacggacaagggctgcaataaattgacattgaacgctgtgtgagagaatctatcaacctgttttgttgga

SEQ ID NO: 18692 - DNA, 98 bp, Homo sapiens
agatgatgatgaaattcagtttgatgacattggagatgatgatgaagatattgatgacacctgaaggaaaagattatgcccttcattggctagtgctg

SEQ ID NO: 18693 - DNA, 75 bp, Homo sapiens
cagacatctccaactgtgggaactctttccagcttgtgtctgctatcatggtgaacttacttcagattgtgcggg

SEQ ID NO: 18694 - DNA, 51 bp, Homo sapiens
ggcctccctagccacgtggaacttgttcttccagctccctgccccacatcc

SEQ ID NO: 18695 - DNA, 75 bp, Homo sapiens
ctcaattcaaagaataccggcctgaaactggttcttgggtgtttaagatctcttccgttccctgctggcagttca

SEQ ID NO: 18696 - DNA, 80 bp, Homo sapiens
ggagaacatcctggaccccaggctgctgatcgccttccagaacagatgaaggatttgggggcagagcacttggcaggtca

SEQ ID NO: 18697 - DNA, 90 bp, Homo sapiens
agatggcggatgccctgcagtacctgcagaaggtctctggagacatcttcagcaggttcttcacacacccccattcggcgtagtacccag

SEQ ID NO: 18698 - DNA, 100 bp, Homo sapiens
cgaggggacatcgagcataagaagcggaaagctaaggaggcagccccagccccacccaccgattcctccgtgtcacaaagcagtacctgccccacgtggc

SEQ ID NO: 18699 - DNA, 100 bp, Homo sapiens
ttgaatgatgtatttgatcctgattctacccaagtacatatgatttcagctgcaatggcagaacctgcacttgttgccaagtcttccatcttactagatg

SEQ ID NO: 18700 - DNA, 50 bp, Homo sapiens
gtcggagtgggtgtcctcaagaaagtctcacaccattttgctggtacagc

SEQ ID NO: 18701 - DNA, 48 bp, Homo sapiens
gtggatgtggaagaaagtgatgagacaaatcttcctattttcaagctg

SEQ ID NO: 18702 - DNA, 98 bp, Homo sapiens
gggtcgcgatgctgcccggtttggcactgctcctgctggccgcctggacggctcgggcgctggaggcatattggcgttcctgtgctatgatgatgggc

SEQ ID NO: 18703 - DNA, 49 bp, Homo sapiens
ctgccatccactgactcgtaaacaagccagggctgagcaggaagaagaa

SEQ ID NO: 18704 - DNA, 71 bp, Homo sapiens
cacggccaacgccttggcactaggaacaagattgtggaccagtgtgagaggctgcagttacagagtgctgc

SEQ ID NO: 18705 - DNA, 98 bp, Homo sapiens
aaagtgatacagcaataccaccttcagtacttggcaagatttgatgctcttgtgctcagtgacatcattcagtggaatgcagtagccctctgggcctg

SEQ ID NO: 18706 - DNA, 50 bp, Homo sapiens
ggggaaggcgcctgaagaggacgaaggctattgcattacctcctatagcc

SEQ ID NO: 18707 - DNA, 110 bp, Homo sapiens
gggcgaagcgggcgagcggtggtttggacgccggcggagacgcgggcgaggcatgaagtcatcaatatcaacctgaaaaataagcctgagtggttctttaagaaaaatcc

SEQ ID NO: 18708 - DNA, 100 bp, Homo sapiens
cgacgcacataaagacgtacgaagccgtcgccaagtataattgaaatcctcaaaggaatgcaagaattgggagtacatcctgatcaggaaacatatacag

SEQ ID NO: 18709 - DNA, 75 bp, Homo sapiens
gttggcccaaccagtcccagcgctgtcgtgctcctctactcggagctggtacatacactacctcttctttgagca

SEQ ID NO: 18710 - DNA, 106 bp, Homo sapiens
cacagcggcctcggcctccccttggattcagacgccgattcgcccaggtgactgaaaactcctgaggcatttcctggactagaatgggtagtgaagacccatgtca

SEQ ID NO: 18711 - DNA, 89 bp, Homo sapiens
tcacagtggacgaggtgttggcggaagtccacaggtcctggctaccctgggaagagacaagaagtaaatgaagaaagaggaagattcca

SEQ ID NO: 18712 - DNA, 75 bp, Homo sapiens
caaatttttggatgatgatggatccatttctcctattgaggagtcaacaactcagcctcctcccaagctccctgt

SEQ ID NO: 18713 - DNA, 100 bp, Homo sapiens
cagaatttgatgctgtggttggatatttagaggacattatcatggaaacctcattgccttctctgaagacggctctgacccctatgtccgcatgtattta

SEQ ID NO: 18714 - DNA, 98 bp, Homo sapiens
ggcgctgaaacggattaataagggaaagaatcaaatattgctgtgagcagctgcgtactctcttgccgtatgtaaaagggagaaagaatgatgcggct

SEQ ID NO: 18715 - DNA, 90 bp, Homo sapiens
ggaatcctccctcagttcctgcagaaacagtagtagcactgtgtcatacctgaaaaagcctcctgacaaggtgatccgggcgggccccgc

SEQ ID NO: 18716 - DNA, 100 bp, Homo sapiens
ccgagaaggagaacaccccgagcgaggccaaccttcaggaggaggagcccctctcatgacagccgtgtgatgagcagccagaggtacttgctgaagtgga

SEQ ID NO: 18717 - DNA, 75 bp, Homo sapiens
cccagggaatgccacagcatcctccagcacctcagaaatgatgtgctcacgggtgccctctgaacagtcttctgg

SEQ ID NO: 18718 - DNA, 100 bp, Homo sapiens
cttatgcagccatgggaggattaactggtttcagctcgctggcggaaggctacatgcggttagatgacagtgggattgcaatggcagattgtccttctag

SEQ ID NO: 18719 - DNA, 101 bp, Homo sapiens
acacagttcacatcctggagatgtacgaggatttatcatagaatccccgactcagacccatcttctagcaaaacaaggcagatcatctccaccatccggac

SEQ ID NO: 18720 - DNA, 98 bp, Homo sapiens
ggaagttacacgaggttggtcatgaaagagattccttgcagagacagctcaacacggcacttccacaggtatctacgagaccccagcaggcaccatcc

SEQ ID NO: 18721 - DNA, 100 bp, Homo sapiens
gcggtttcaaacggcttagagcaggccgcttggttctgacccagctgaggtttgctggttggctcccgagcagacagcaggaaagaagaagcccttcgtg

SEQ ID NO: 18722 - DNA, 83 bp, Homo sapiens
cggcccccgctcctgctgctgacggcgcccaggccgacggtcgcaaggtcctacggtcaagcatccgggagtttctatgcagc

SEQ ID NO: 18723 - DNA, 100 bp, Homo sapiens
attgcagagttcagctccttccagcttgggaacaggctacttcctgggaagttatcaattccaaaccagatgaaagacccaggctcagccactgtattgc

SEQ ID NO: 18724 - DNA, 80 bp, Homo sapiens
tcattgaataagtgttttaagaaagtggacaaagagaggagtcaggagaacaaggggtctgtggaaatcatgagaaagga

SEQ ID NO: 18725 - DNA, 75 bp, Homo sapiens
tcctggtcctgctcggggctctgttcccagattcatgatgttgctatcaaaagttgagaaattgtcagaagaaat

SEQ ID NO: 18726 - DNA, 90 bp, Homo sapiens
tgctggctcagaggctctatgcaggttccactgtcaaggtgaactaccgaggccaggtggtgagcctgatccggatgcggaacccctggg

SEQ ID NO: 18727 - DNA, 100 bp, Homo sapiens
tgccgcttcagtccgaaggaggaagggaaccaacccactttctcggcgccgcggctcttttctaaaagtggaactactggagaccacgtgccgcctggcc

SEQ ID NO: 18728 - DNA, 101 bp, Homo sapiens
tgccaaaggctgccaggaaggaggacttggatgttgtgggtgatggtatgcagtgtcctccttcacctttgctttttgatccttcactaacccttgaagat

SEQ ID NO: 18729 - DNA, 90 bp, Homo sapiens
cgccgggagccttgctgcaagcgctctgcttatgataatgtcaacaaagttcgagtagctatcaagaaaatcagcccctttgagcaccag

SEQ ID NO: 18730 - DNA, 98 bp, Homo sapiens
aagagatttgaaaccacatgaagatcaacaagatataaataaagatgtgggtgtgaaggctgaaaatacctcctgattgcactactgaattaaatcat

SEQ ID NO: 18731 - DNA, 97 bp, Homo sapiens
caggaacctataattggaaggaaatggctcagggaactgttggaggcgtgttcatcacgacggcaggttccacgtctaacggcacaaggttctctgc

SEQ ID NO: 18732 - DNA, 110 bp, Homo sapiens
caaacatcgatggcctactggggataacattcatgcagaacatcagggtcatgtaggtacaacagcaaccaagaagatcgatgtctacctccctctgcactcgagccagg

SEQ ID NO: 18733 - DNA, 108 bp, Homo sapiens
agaggattacctttccaagccaatgcccaagacattataaacgaagattttcagtcaatgacttatggatttaaaatggctaacagtgtgacagatcttcgagttaca

SEQ ID NO: 18734 - DNA, 74 bp, Homo sapiens
cccaccatctacagcaacgtgatcaaagaaaatgcttggacagaagagatgagtactatttccactaaggccta

SEQ ID NO: 18735 - DNA, 75 bp, Homo sapiens
cggcctgcagcacccgccaccgtcgccggccgcccgcacgtccgtccgtactatactggcaattgctggagaaga

SEQ ID NO: 18736 - DNA, 100 bp, Homo sapiens
aaggacaaaagccaagaggaggacagttcgctacacagcaatgcatcgagggtaaatgggaagttggtagctctgaaggtgatcaggctgcaggaagaag

SEQ ID NO: 18737 - DNA, 88 bp, Homo sapiens
ggcggtgacagagtggagccatggctagaggaatccagcactacgccctgccctctactgactggaggcaggcctctgcctactttag

SEQ ID NO: 18738 - DNA, 100 bp, Homo sapiens
aagggcgaggtcagccccaaactaccggtgaatgaaaactttgccattgatttgatagcagagcagcccgtgagcgaggtggagactcgggtgatagcgt

SEQ ID NO: 18739 - DNA, 74 bp, Homo sapiens
gccctgcgcgtgcgccgtggcgcggcccggctgacaggctccaaacaggcatgcgaggtgcctttggaaagccc

SEQ ID NO: 18740 - DNA, 85 bp, Homo sapiens
cttcggagcgggagtgttcgttgtgccagcgactaaaaagaggtagataatttcctagatttagaagatttggacatggatgaag

SEQ ID NO: 18741 - DNA, 50 bp, Homo sapiens
gcagctccagtttaaagatctcagagtttagattttgaagaatgtgctca

SEQ ID NO: 18742 - DNA, 50 bp, Homo sapiens
tgcaactattcgcagtccgagcggcaagaaattatagagcagcttctatc

SEQ ID NO: 18743 - DNA, 100 bp, Homo sapiens
gaaggccctatcaggacatggagtatgaaagacggtggaacaggaggattttgtaatggaagggcatggcaagactccacctcctggtgaagaaagcaaa

SEQ ID NO: 18744 - DNA, 89 bp, Homo sapiens
caacagcttcatatggacagatggacttcaaatgctgtttgtattccagagactagtttgtcccgctggctggaagcctggcagtgaca

SEQ ID NO: 18745 - DNA, 75 bp, Homo sapiens
ggagcactcggtcatgtacccggtggactcggtgaagatcccatgcgaggcccaagaaaactagaagtagtggag

SEQ ID NO: 18746 - DNA, 90 bp, Homo sapiens
gaaagtgtgactggactacaggcaatcctggccttggcagggactggttaaatatgttgagcccaccaatcgttcctcccagtcaacagc

SEQ ID NO: 18747 - DNA, 110 bp, Homo sapiens
ggaaaggttggcgctaatggtcagaatgctgctgggccctctgcagattctgtaactgaaaaatcagccaaatggccgatgacacagtggcagaactggacaggcatctg

SEQ ID NO: 18748 - DNA, 75 bp, Homo sapiens
caaacatccatatcataagtggaattttggagatattcaaagtgtgtaatgctgtgtcatggagctaaaatcgga

SEQ ID NO: 18749 - DNA, 100 bp, Homo sapiens
cggcgagagcacggacagactcatggggaagggccaggtccaggactttctgcagggcgactgcaccaaagcgaaacagaagctgaactggaagccccgg

SEQ ID NO: 18750 - DNA, 80 bp, Homo sapiens
ctctgcagtgtcttccacaacctgggtattgttggtgaggctgatgaaaatggagaagattactatctttggacctataa

SEQ ID NO: 18751 - DNA, 100 bp, Homo sapiens
gcaaaagttgtgcattggcccgatcaagcctgacttctagccaagttgttgacctcctgtactggagagacattaagaagactggagtggtgtttggtgc

SEQ ID NO: 18752 - DNA, 100 bp, Homo sapiens
aggggttatctccttaaacaagcactgaaaagagaattaaatagaggagtcatcaaacagcaatcccacagagtattgatgaggaaactgaagtttggag

SEQ ID NO: 18753 - DNA, 141 bp, Homo sapiens
cttcctcattctattcatgttgctttttgatggccatggcataaggaactctatcccaggaatacagctttgcattaggaatctatgggcaaaagttcagatggaaagtcgtatgttattacggggagctggaatccaaaa

SEQ ID NO: 18754 - DNA, 74 bp, Homo sapiens
gtttcccggagcacagggcagcggagatccggtgtcaacattgcatacttgaatactggcatcggaggacacaa

SEQ ID NO: 18755 - DNA, 75 bp, Homo sapiens
ttcaacctccccagcagtcacttaagacctgttactggagttggctataatcaatttggggaagtgattgttgat

SEQ ID NO: 18756 - DNA, 75 bp, Homo sapiens
ccgtgagagccgcagtggatggctggaggtgcagggccaggaggaacatgagcatgttttagaggttcgtcctct

SEQ ID NO: 18757 - DNA, 100 bp, Homo sapiens
gaggctaagaaagtggtgaatcccctgtttgagaaaaggcctaagaattttggcattgatgaggaagtgctggctgatgtccgcaccatcgtgaaccaga

SEQ ID NO: 18758 - DNA, 83 bp, Homo sapiens
agactttcagctacttgaagatagccatcagccgctacgtgactcttttctccagatggctctgagagattcctctgcgaatc

SEQ ID NO: 18759 - DNA, 75 bp, Homo sapiens
gactttgatggacctcagcacaaagcggatctgaaaagaacaattgctgtccttctggatgacattttgcaacga

SEQ ID NO: 18760 - DNA, 82 bp, Homo sapiens
ctgattcaagtgttggcggatggaagggaggagactcctgaccctcagaatggaagctcttcgtgggcggtcttgactggag

SEQ ID NO: 18761 - DNA, 100 bp, Homo sapiens
gaaacctttccaacacagatgtccaagctgccaagtttcaagtgatcctcccgcctcagcctgcccaggtgctgagattacatgtatgagccactgcacc

SEQ ID NO: 18762 - DNA, 100 bp, Homo sapiens
cgaatccataacaagttccgatcagaggtgaaaccaacagccagtgatatgctatacatgctttgacagatccaaatgcttctgctgcccagcaggctgt

SEQ ID NO: 18763 - DNA, 100 bp, Homo sapiens
tgataataaagcactgtatgatacattttctgcttttggtaacatcctttcatgtaaggtgatctgtgaaaatggttcgctattcacttgacccggagaa

SEQ ID NO: 18764 - DNA, 75 bp, Homo sapiens
ccgcaccaaattgcatcgtttcccagggatccatatggctttggagacagtcgagattcaaggcgtgatcgatcc

SEQ ID NO: 18765 - DNA, 100 bp, Homo sapiens
cggacctgcctgccgcccggagcgcatcgctgcattgtggagtcagtggatcggtggggaaaatgctgcttaccctgggccctgggctgtagaaagaaga

SEQ ID NO: 18766 - DNA, 80 bp, Homo sapiens
gtccccatccactagtaggaagctgctttgaagacttagcagagattcaaccctatgaaaagataaaggccaggggcttg

SEQ ID NO: 18767 - DNA, 100 bp, Homo sapiens
ttatgcccaccctccaactttgcgacggaaatgtgtcatcgaaagccaggggaccccgtggaacagctggtccgccatttcctcatcgagactgggccca

SEQ ID NO: 18768 - DNA, 83 bp, Homo sapiens
gggtcgagtcagtgcgttcgcgcgaggtgtcgtgaaaactacccctaaaagccaaaatgggaaaggaaaagactcatatcaac

SEQ ID NO: 18769 - DNA, 100 bp, Homo sapiens
atgaagtggtgaaggagtgtgtgcagcgggcccagcactagaagatttcagtcatctgccaccagaacagagacgtaaaaaactacagcagcgcattgat

SEQ ID NO: 18770 - DNA, 87 bp, Homo sapiens
cagatcttattaaacctcttcctcttcataaaaagaaagatgctggtttcgagttttggagatccttgttttttatggaacacagtt

SEQ ID NO: 18771 - DNA, 50 bp, Homo sapiens
tcgagcaccccaacgtggtcagaggacaagaattttgggcagatttgaat

SEQ ID NO: 18772 - DNA, 100 bp, Homo sapiens
gagaagcatgggaaggaggccgagccgggatctcaggtcctcgggggcggcggccacgccaaggacgggtatatgtctcgagtccacggtatgcacccta

SEQ ID NO: 18773 - DNA, 115 bp, Homo sapiens
ctccactgttcctggaggaatccgagaagagcagagcggagggagccccagacacgggaacccaccaagaccaacctggtcacattcttccataccgacctcagcggttacctcc

SEQ ID NO: 18774 - DNA, 53 bp, Homo sapiens
tctcatgtccatcatggaaatgcaggtgggagaaggagaagcacgaagacggg

SEQ ID NO: 18775 - DNA, 100 bp, Homo sapiens
cttgcctttgcctcttccacgcttcaacggaccacaccaaaatgccatctcaaatggaacacgccatggaaaccatgatgtttacatttcacaaattcgc

SEQ ID NO: 18776 - DNA, 101 bp, Homo sapiens
ttcttgggaactgccatctcctgcatcgtcataggcatattcctccaacacaccctccatacctctgtgtccctgatggcaactataggagtggctggagc

SEQ ID NO: 18777 - DNA, 50 bp, Homo sapiens
actgtaaaggagatgggttagatgttgtctcctctgagcctccggcctcc

SEQ ID NO: 18778 - DNA, 82 bp, Homo sapiens
ggctatggccgtgccctggggctgagccctcagcattttgaaagcgaagcagaagccgtagaatcagcggcgagcctgttga

SEQ ID NO: 18779 - DNA, 101 bp, Homo sapiens
ggggaatttccttgtgcctccattcccgggaggggggagcggcgttggaggccaccgtttccaggtttattaatgcccggagaagaatagtgcagcccatg

SEQ ID NO: 18780 - DNA, 100 bp, Homo sapiens
gccatcaagacggagaagctggaggagccgcccgaagacagcccccccgtggaagaagtcaggactgtgatcaggttcatgcagcatcccaagaactttg

SEQ ID NO: 18781 - DNA, 83 bp, Homo sapiens
cctcgctccggctgacggacaccgcaggctgtaggggcagcagcgcaggtcagcccaaggccaaccccactgtcactctgttc

SEQ ID NO: 18782 - DNA, 75 bp, Homo sapiens
ccggccaccagcaattgtccggtgcagaaaagactgactcattttatcattcttctggtgggctggagttatatg

SEQ ID NO: 18783 - DNA, 100 bp, Homo sapiens
ttttggtatgcagataatcactgggctcatgggtcttgctctttacaaagaggtaaatcttacaaaccattgtggttttatgggaggactacaaaaaaac

SEQ ID NO: 18784 - DNA, 124 bp, Homo sapiens
ttgtttcccattgcagcccaggtggataaggaacatctcttcccagcggctcagaaccttttgcccagagtagcagccaaacttgaggttgccccgatttctgacatcattgcaatcaagtcac

SEQ ID NO: 18785 - DNA, 74 bp, Homo sapiens
ttgaccgactgcagttttgtcccaaagatactcaactcaaccccacaggagacaggatccgaagcaaagttgag

SEQ ID NO: 18786 - DNA, 82 bp, Homo sapiens
gggcggcttcctggcctgggcgctccggtggcggcggagtacctggagtagaacagaaaaattattatgtctgtgttccctt

SEQ ID NO: 18787 - DNA, 83 bp, Homo sapiens
gttaaatgtgatcagccttgaattttcagatacaaatcgttgctgctcctagcttacctcataaggaatggatcagagcgtgt

SEQ ID NO: 18788 - DNA, 82 bp, Homo sapiens
gtttcagtgagcgggagctggcagagtttcctgctctacgaaacgcactcttttgccttgaagcggcattggacagtggtgt

SEQ ID NO: 18789 - DNA, 100 bp, Homo sapiens
gcctgccatgccccagccagtccccacagcataacagggtcatcctaaagtatgtgaaaaattaaaggctcttatggttgaatggacagatgaatttaag

SEQ ID NO: 18790 - DNA, 74 bp, Homo sapiens
aagatccaagaccattcttcaagtttgcaaagggtatcagcatggaagccatgagtgagaataaaatggtgccc

SEQ ID NO: 18791 - DNA, 100 bp, Homo sapiens
cgagagaacccccgcatcctgtttttcctgagcaaccagagaaaccacttgaccttgcacatatagtgctgtggaaaatctctgttctcacaaagtctcc

SEQ ID NO: 18792 - DNA, 75 bp, Homo sapiens
cgggatactgtgtagaagggacacttgccaaggttcaacagagtttggaaaagatttctaaactggagcaggaaa

SEQ ID NO: 18793 - DNA, 75 bp, Homo sapiens
gtgtcgatccttttccctccagtcaggacactggggttgggaaatcaagcatcgtgtgtcgatttgtccaggatc

SEQ ID NO: 18794 - DNA, 100 bp, Homo sapiens
agaaccacaagaaacctacgaaggcactgggacagagcctggctgctgaacccttaggagaaatcttgagagtggacagcaattgtgaagatcgccagag

SEQ ID NO: 18795 - DNA, 100 bp, Homo sapiens
agcaagcagttcagaagagccaaggaataaacatgcaatgaacccaaaaggaaaaatatggtgttatccctaagaaatgcttccctgaatcttatacaac

SEQ ID NO: 18796 - DNA, 98 bp, Homo sapiens
gtcgctgacggcgactgcgggaggccagtcggaggcctgcaggactttggcacccgagaaggacaaggccaccaagcactgctgcattcatctcccgg

SEQ ID NO: 18797 - DNA, 100 bp, Homo sapiens
tcaactgtcctattgggatatagaaagtgactgagaccgaagatgatagtgatagtgacagcgatgatgatgaagatgatgttcatgtcactataggaga

SEQ ID NO: 18798 - DNA, 100 bp, Homo sapiens
cttaaggacactacatgcaacagccagtgagagcaggagacatcggtgtttccagagtccagacccaccacagtatgttatgcataaaagtggataattt

SEQ ID NO: 18799 - DNA, 100 bp, Homo sapiens
gcactacaagggtcctgaagtcagttgttgcatcaaatacttcatatttggcttcaatgtcatattttggatgaggacggggacttggttgccttttcca

SEQ ID NO: 18800 - DNA, 101 bp, Homo sapiens
ctgagctcgtcaagcagctgtcggccaagctcatcgccaacgcaaatggttatgagccttagagtttctgaactccaagtactgttgggctacgccgggag

SEQ ID NO: 18801 - DNA, 78 bp, Homo sapiens
aatagtggcaggtgacagtctgcatgtgcagttttcagggcagcagaatcaactgaggaagtatctagcctccgtccc

SEQ ID NO: 18802 - DNA, 90 bp, Homo sapiens
ccacagtggtggtgggcaagggcagacttgggccagcagggccctagtggaatggcatcccaggggtgcccttctgcctccagagctgag

SEQ ID NO: 18803 - DNA, 100 bp, Homo sapiens
taattccacacctctagtggacccctcagtatatggatacggagtacaaaaacggcccttggatgatggagatcatccagacttgaaacatatcgaccca

SEQ ID NO: 18804 - DNA, 74 bp, Homo sapiens
ctatatactttggttacctatgtacctgttaccactttcaaaagtatagacacgtgtggccgtttacgctgtag

SEQ ID NO: 18805 - DNA, 80 bp, Homo sapiens
tgaacttaatacagcaagaaagaccatcaagtttaccactcttttaagagcctgtgccgatggaggtgccaaccgcttat

SEQ ID NO: 18806 - DNA, 100 bp, Homo sapiens
ggcaagagagggctggtggcaccgcagaacacatttttggagaacatcgtcaggcgctccagtggatctggagtgggagagcaggatgggggactgatcg

SEQ ID NO: 18807 - DNA, 90 bp, Homo sapiens
ctgcgaccgagacacctactcagagaagtccctccaccggctctgtggcagtcgacaagtactttaagcttcctcatgcttccagtaaac

SEQ ID NO: 18808 - DNA, 100 bp, Homo sapiens
gcgcttttcaccgcggccatcctgcaggcacagttgccgattacaggtttttcgttggaatatacgttgcacatttatggcgattctgagtgtgagggca

SEQ ID NO: 18809 - DNA, 90 bp, Homo sapiens
cacataaacacttcaatgcacacctcaaaatcgctgctcctgtatcacgtggaagagatagttatggaggtccacctcgaagggaaccgc

SEQ ID NO: 18810 - DNA, 75 bp, Homo sapiens
gctcagcgtcctcatgtggggggtaaaccactcgctatatgttctcctttcagccaagacctttcaccagtgcag

SEQ ID NO: 18811 - DNA, 87 bp, Homo sapiens
tcttcgcgcccctgggagggaggtgggaggctctaggctccaagacgccgtcgcttgaggtacgggaaaaacactcttggcacgagc

SEQ ID NO: 18812 - DNA, 95 bp, Homo sapiens
aaagtgagcggtatagctccagcgggtccccggcaaactccttccacttcaagctgaaggaagaggatcaccttccaagacaaaacagtcttcat

SEQ ID NO: 18813 - DNA, 50 bp, Homo sapiens
tggaaaccaaagagttctcaccaagcagcccggacatatatccagtccct

SEQ ID NO: 18814 - DNA, 76 bp, Homo sapiens
aggatggcactggtgaagaggttcatccaggcccgcagtggaagccgtgaggtggtggatgaaggcttgatccctg

SEQ ID NO: 18815 - DNA, 101 bp, Homo sapiens
aggctttgatgagatgctgcctggtcaagtggatcctgtccagcacagccccacagggctcagactgcctgcgctgctgacttaaggccccaacaccaaac

SEQ ID NO: 18816 - DNA, 114 bp, Homo sapiens
ctgcaagggggggcaccctggggcttcacccttaaggggggtctggaacactgtgagccgctcacagtgtctaagacaatgcagatcttcgtgaagactctgactggtaagacc

SEQ ID NO: 18817 - DNA, 76 bp, Homo sapiens
ccgaagtcatcccagaacccgaggtcagcacacagccacccccggaagaaccaggagcctcacagtctactcagag

SEQ ID NO: 18818 - DNA, 100 bp, Homo sapiens
tacgacggcgttgatatcggtggtaacgacggcctcagcaggcggggaagatgaaagggtgtcatggagaaactccagctgggcccagagattctgcagc

SEQ ID NO: 18819 - DNA, 82 bp, Homo sapiens
attatttatcatctccagaattaaagcttacacaagtgaatgagagaaaaggaacagttccgtaagctctttattggtggct

SEQ ID NO: 18820 - DNA, 83 bp, Homo sapiens
ctcatcatggggctcctgtacaagggtttgccttcccggattgggcctacaagccagagtcgtcccctggctcaaggcagatc

SEQ ID NO: 18821 - DNA, 90 bp, Homo sapiens
cagcaccgcagatgttgtcaaggtggcctaccaggaggccaggggtgtcgccatggatgagaatgacaaccctcccaccttcagcaagcc

SEQ ID NO: 18822 - DNA, 88 bp, Homo sapiens
atggagagaatttcactatattcagctgtccgcaggcttgtccaaaaggaaacatcggaatgaccacttaacatctacaacttccagc

SEQ ID NO: 18823 - DNA, 75 bp, Homo sapiens
gagacctccaaacccctttggccctgtatcaggagcacaggtgaaaggtgtagcagtcactcggcctacacccac

SEQ ID NO: 18824 - DNA, 95 bp, Homo sapiens
actgtgacatgtctgatcccttgctcccatccctgcagcatgaacaagcataagcagtactataatggatgtagacagcacaatttccagtgggc

SEQ ID NO: 18825 - DNA, 100 bp, Homo sapiens
cgagagcgctcgaggtcgtatgaacgcacaggccgtcgctatgagcgggaccaccctgggcacagcaggcatcggagggccatgaagcccccaggaggag

SEQ ID NO: 18826 - DNA, 75 bp, Homo sapiens
tgaacccaaaacatcaaatctgtgtgggaatcgagcatatggaaaatctctgagttgatctctctaatgtattag

SEQ ID NO: 18827 - DNA, 100 bp, Homo sapiens
ctggggattggccagctgactgctcaggaagtaaaatcggtgactctcctattccatctgtttcttcgggatcatcttcacctctttcagccacttctgc

SEQ ID NO: 18828 - DNA, 100 bp, Homo sapiens
ggtgacagtctgcatgtgcagttttcagacctgcgaccgcatcaagcagtccgccagcggaaccaagcggcgcgtgttcatcatcgagaccatgggcggc

SEQ ID NO: 18829 - DNA, 75 bp, Homo sapiens
agttcacgaaagcctacaaaagtgtggagaggttccttcaggaggatcaggttctacatgaaacattttctcaac

SEQ ID NO: 18830 - DNA, 100 bp, Homo sapiens
caggggcttgagagctgggttctattttccctcctcaaactgactttgcagccacggagagtggcttttcatggcctgccactgaaaatcaagaaagaac

SEQ ID NO: 18831 - DNA, 98 bp, Homo sapiens
cggcgtgtcaggtggttgcggagctggatgctggaggtcagcagattggcttcttgctaggaagctgtggtattgccttagctcttaccagtgaagtt

SEQ ID NO: 18832 - DNA, 82 bp, Homo sapiens
tgggggaccggctgttggcggacaaggcgaccagccagctcctgttggagacagattgggagtccattttgcagatctgcga

SEQ ID NO: 18833 - DNA, 100 bp, Homo sapiens
tccaggattgtgtctgggcagaatagatcctaaaggtgtctttgagattatcctcataacttctctgattggtggaggccttcttattctcattatcctg

SEQ ID NO: 18834 - DNA, 75 bp, Homo sapiens
ctgtttccacgtgcggtgctcgtcgggagtgatcacctaccctacagtgttctaagaacggaagcatctgggctg

SEQ ID NO: 18835 - DNA, 74 bp, Homo sapiens
gagcgtgcagcaggatttcacctccgggaatcatattgacaggtcatgaaaatgagaccaaaagatctctggaa

SEQ ID NO: 18836 - DNA, 75 bp, Homo sapiens
cccgctacatccttaccaaccgtggcatcgcccagatgcccatgcagaatgccaccaagtatggcaacatgacag

SEQ ID NO: 18837 - DNA, 51 bp, Homo sapiens
ctgtctttcaggattcctgggacacagaggaatatattaaaggaatctgtg

SEQ ID NO: 18838 - DNA, 100 bp, Homo sapiens
cagccccagcagcacccagcccgtgaccagcacgacaccttcttccttcgagcaaatcagccggcaccaggagcagttcatccagatgctgaacgagccc

SEQ ID NO: 18839 - DNA, 76 bp, Homo sapiens
gtaggaaaccggtaccaggcagacatcaccgacttgttaaaagaaggtgctgccttcacctgcctggagactgcct

SEQ ID NO: 18840 - DNA, 74 bp, Homo sapiens
gaaagatcgtgtcgcacacgcacctcggagtagagagtcagtactgaaacaggaaataaatgaccttgtaaaac

SEQ ID NO: 18841 - DNA, 80 bp, Homo sapiens
gcaggtgcactgggtggggatgatcggcgggctaggttgcaaggccgttgctccagggagaactgcaaatatcttcatcc

SEQ ID NO: 18842 - DNA, 89 bp, Homo sapiens
gtcgcggggacacaggagtcttcctacagtacacacacgcccgcctccacagtatcctgtggagcacccagacaaattcctgaagtttg

SEQ ID NO: 18843 - DNA, 100 bp, Homo sapiens
gctgggctagtgctaggccacttcatagcttcggggatggtcaatcagtgattcatcagaaagtggcatgctgtcccgcctgggtgatttgctcttttac

SEQ ID NO: 18844 - DNA, 98 bp, Homo sapiens
ggcgcgtgcggttgggaacgcggagcggacggattcgattcaacggggttccggaccgcgctgcgctatggagcagaacatgctgtttgagagcatcc

SEQ ID NO: 18845 - DNA, 100 bp, Homo sapiens
accacattacctttgccatgctgctggcaagaatcaaactgaagggcaccgtggggtggttgtgtcaaaccgattggtgacatctccatgctgtattgtc

SEQ ID NO: 18846 - DNA, 83 bp, Homo sapiens
cggccgatgcagctcttccaaagctaaggaggcaggtggaagtcatcataaagtttctgtttcacccgtcgtccatgttcgag

SEQ ID NO: 18847 - DNA, 100 bp, Homo sapiens
agcctggggaatgagacccaaactgctcatacagaattacgcatttccacttctaatgacattcagtcccctgaagctgaatatgtagatttgcttctta

SEQ ID NO: 18848 - DNA, 103 bp, Homo sapiens
ctggagaacccgaagcacctcccggcgccgggacgcttcttctataaatttgcgcctcattttggtaagcggaaaaacaaaagagttcctgttttctcctaac

SEQ ID NO: 18849 - DNA, 100 bp, Homo sapiens
catctcagtgacagacactcctgcaacccagttttccagccaccagtgggatgatgatccttggtgtttggctagcaatgagatttcggaatcagaagga

SEQ ID NO: 18850 - DNA, 78 bp, Homo sapiens
gccgccaccgtctgaactaggatgtcccgacatgaaggttgacatcatggacatatgtgagtccatcctggagaggaa

SEQ ID NO: 18851 - DNA, 100 bp, Homo sapiens
cttcccagccttcagaaattgccggtctgggagttgggggcaaggagaagatcctgttggtcgcattatgtttcagctcttctcagacatatgtccaaaa

SEQ ID NO: 18852 - DNA, 74 bp, Homo sapiens
cgaccgggagcggcggcagcggcggcgcggaggcggctgaggtgcgagccggttgacaatggtctccaggatgg

SEQ ID NO: 18853 - DNA, 51 bp, Homo sapiens
catcacctgcagtcagtccagagctgcccaccaaaagaatgcaatggtgta

SEQ ID NO: 18854 - DNA, 83 bp, Homo sapiens
gttgatctgtttaggaagtggtatcatgagagatatagcccacttagaaatcacagaaattgcaagacctaacatggctgaaa

SEQ ID NO: 18855 - DNA, 90 bp, Homo sapiens
cggcggtggcggcggcaccaaggcccccaagccctccttcgtgtcgtacgtacgccctgaggtacctgaaagaattccgcacagagcagt

SEQ ID NO: 18856 - DNA, 100 bp, Homo sapiens
cttgagtcagtccaaaagtttccgtcgtcggcacaactcctaaataaactatcaatcttgcccagactggagaaaggactgcagcaacaaccctgtttca

SEQ ID NO: 18857 - DNA, 75 bp, Homo sapiens
ttgtagacacagccgggcaagtttgtggaatcttgcttcccttttttccaacctttgtttatttgtattgatgcc

SEQ ID NO: 18858 - DNA, 99 bp, Homo sapiens
cacgcccagaataaagccaagctcatctctgagacccggaggaggttcgaagctgagtatgtgacagcaccttatgaagctaggcagccccttgtccag

SEQ ID NO: 18859 - DNA, 74 bp, Homo sapiens
caatggctcaaattgatcaagcagatatgccagaacacttcctcgtgggtactgtataacatggcttcatttta

SEQ ID NO: 18860 - DNA, 83 bp, Homo sapiens
gctgagcggcgagtttccgatttaaagctgagctgcgaggaaaatggcggcgggaggcctgaaagcaggagatgagattcttg

SEQ ID NO: 18861 - DNA, 60 bp, Homo sapiens
aagatgctgaggccccaggcatcagagatcatgagagtcgcctgctgctgtcgtcgggag

SEQ ID NO: 18862 - DNA, 101 bp, Homo sapiens
ctccaatggcgctttctacaaggtgtggccgacgacgatgccctcgctgaggagcgcatgcggagaggccagaacgccctgccagcccagcctgccggcct

SEQ ID NO: 18863 - DNA, 138 bp, Homo sapiens
tggtggaatatgccaaggaaaaactggagagcttcatcaaaaatagtgatagctttgataataacaaatgtggcaattattttggatctatcacctgtcatcataactggcttctgcttgtcatccacacaacaccag

SEQ ID NO: 18864 - DNA, 82 bp, Homo sapiens
agagaaaaggcaacatcctgtcacaggccatgctctggcaaaaacaactcccccactggaaaggattctgaaagaaatgaag

SEQ ID NO: 18865 - DNA, 100 bp, Homo sapiens
aagccctgtggcaaactgaccaagcccaaacctcaagacaacagcagttctgtagagagtttaaatatgaaggaatggcaggacgggctaagggcacttc

SEQ ID NO: 18866 - DNA, 78 bp, Homo sapiens
tggatgaaagaaagataaaaggggtcattgacttctcaataggtttggcatggacaagatctatgaaggccaagtgga

SEQ ID NO: 18867 - DNA, 100 bp, Homo sapiens
cttcccctcccccggcgccctctggggctccgagcccggcgggaccatgttcaccagcaccggctccagtgggctctaacccttaggagaaatcttgaga

SEQ ID NO: 18868 - DNA, 82 bp, Homo sapiens
atggtcttcagagagcaactatcctccccaggaacttgatactaaatttgggactctttgctgcgggagtttggctggccag

SEQ ID NO: 18869 - DNA, 82 bp, Homo sapiens
gccccgcctggcgctggctgtcagcctcagcatctgggtaggtgagaagccctaccactgcaactgggacggctgcggctgg

SEQ ID NO: 18870 - DNA, 80 bp, Homo sapiens
gaggctcggagaaacaggcgccgcgggctccgcgcccggccggacccgggcccgagctcctggccactctgaatccactt

SEQ ID NO: 18871 - DNA, 49 bp, Homo sapiens
aaaaggcctaagaattttggcattgcggcgtcttcgacatcttcggaac

SEQ ID NO: 18872 - DNA, 101 bp, Homo sapiens
catggagaggggccgtggcccctgcagcggaaccggacccagtccctgagccgcccctacacccacaggtttttcgttggaatatacgttgcacatttatg

SEQ ID NO: 18873 - DNA, 100 bp, Homo sapiens
catcaaaaagtgattaagcagagaatggagaagaaggttgattccagttttacagctcccagcacagtaggaaagagaaatttgagtcctagtcaagagg

SEQ ID NO: 18874 - DNA, 100 bp, Homo sapiens
aagccccagcgagcggctgcagcggggccgtgaggagcagccagcgggaggcggcggcgagtcggtcttgttcagcgttgcgtaatcatccagaaagatg

SEQ ID NO: 18875 - DNA, 100 bp, Homo sapiens
aagcctggcgcggaacggtcgtggagaagaagagctgctgatgaggactgggacaggttattcagcttctcaaggctggaaaagcgaaggaagtttccta

SEQ ID NO: 18876 - DNA, 97 bp, Homo sapiens
ccaaaaacatcaccaggatggggctaacaaacttcaccctcaactacctcaggcctgattacatcaaccccagagccgtgcagctgggctcccttct

SEQ ID NO: 18877 - DNA, 74 bp, Homo sapiens
ctttcttccagcttctgctgtccttctttgtggagagcaagggagaagagaagtttacctttattgagaaatgt

SEQ ID NO: 18878 - DNA, 74 bp, Homo sapiens
ggaggcgcggcccgggacgctcgagcttagggaggaatcagagatcattgatttcttcctgggggcctctctca

SEQ ID NO: 18879 - DNA, 122 bp, Homo sapiens
ggacttcgaaggagggctctcctgtctgccaccatcctgggttgacaattctacacaaggagtcgcagatatggccagtacactatgaaccaggaaagcaccaccatcaaagttatggagaa

SEQ ID NO: 18880 - DNA, 98 bp, Homo sapiens
gacaatcgagcaaggaaacctgggtaaagtgttgagagaggagaaccagtgcattgctcctgtggtttccagccgcgtgagtccagggacaagaccaa

SEQ ID NO: 18881 - DNA, 50 bp, Homo sapiens
gcgaagccgaaaaaggcagcagcgaagtctctagtgatccctgaaaagtt

SEQ ID NO: 18882 - DNA, 97 bp, Homo sapiens
agttgagattatagagaaggacaccaagtacagtgtcattgtgatccggagtcctggcattgatgtgcctgctccagacatgagcacaggtgagcgg

SEQ ID NO: 18883 - DNA, 83 bp, Homo sapiens
caagttcaagagcgcgggacccggtcagaagctcaaagagtccgtgggtcggagtctcaggaccaggtcttcctacgctggag

SEQ ID NO: 18884 - DNA, 100 bp, Homo sapiens
cacagaattatcaaagacttcatgatccaaggaggtgacccaacagggacaggaatagccaggccagaagaaggaaggcctgtggtgagtgggacaggaa

SEQ ID NO: 18885 - DNA, 87 bp, Homo sapiens
acagcaaaaatgacccaccaatggaagcagctggcttcactgctcaggtcacaatccaaggtccggctcctccgcgtcccagggccg

SEQ ID NO: 18886 - DNA, 89 bp, Homo sapiens
tagaaatggctgaaggaaaacctccttatgctgatatacatccaatgaggactaagaaaaatggctttgtcagcccaacagatacccag

SEQ ID NO: 18887 - DNA, 100 bp, Homo sapiens
gcaatattgtggatattggccccgacagcttaacaattgaacccttgaatcagaaaggcaaggcagaagctcctcctggggtagagacagatcttattga

SEQ ID NO: 18888 - DNA, 148 bp, Homo sapiens
attaactagagatgatgtgatccaaatctgtggccctgcagatggaatcagactttttaatgcattaaaaggccgtttgtcccgctggctggaagcctggcagtgacacgattaagcccaacgtggatgacagcaaggaatatttctc

SEQ ID NO: 18889 - DNA, 75 bp, Homo sapiens
cccagggcaagccccgctccggccaacaaaactcccccactggaaaggattctgaaagaaatgaagtcagccctc

SEQ ID NO: 18890 - DNA, 125 bp, Homo sapiens
ctttaccagcacctggaatctaaggagtggtttgtgcagctctattaccacgggaagatggagttcgctcttgttgcccaggctggaatgcaatggcatgaccttggctcactgcaacctctgcc

SEQ ID NO: 18891 - DNA, 60 bp, Homo sapiens
gcaagtgaagaacggcttctggaagagggcatgtgtggctcctgctgggccttctcagtc

SEQ ID NO: 18892 - DNA, 82 bp, Homo sapiens
tggctgcgtcaccgccgcccccccagacaagatggacaccgcggaggaagtcctggctggtgccttgttagaagaagcggag

SEQ ID NO: 18893 - DNA, 98 bp, Homo sapiens
gtgggtgctcgccctggtcttcgggctgtcgctcgtctacttcctcagcagcaccttcaagcagggagaggaaattcgatgtcagtatgttgtgacat

SEQ ID NO: 18894 - DNA, 50 bp, Homo sapiens
gggctgccgccacggccgcccggaggtgtctcccagtctgctaaagccct

SEQ ID NO: 18895 - DNA, 83 bp, Homo sapiens
gccccaggggggccttcagtgcttcccacagcctcctgtcaaccctctcaagatgatatcatcaagttgaatcgaaaggaagg

SEQ ID NO: 18896 - DNA, 98 bp, Homo sapiens
cttcacttccctcggtctgggcttctctgaggcggcgagagatggtcaggtctggagctcgaccgggccagtttgctaatccagactttacacaacct

SEQ ID NO: 18897 - DNA, 75 bp, Homo sapiens
tggatgtcgtggaccccaaacagctggtcaccaacgcctgcctcataaagacacaggctcagtctgctggagcgg

SEQ ID NO: 18898 - DNA, 101 bp, Homo sapiens
ttcggtaccggggggagactccggggctttgttatgcacctaaagccatattggaagctccagaagaaagagcaccccccggaagtcagcagggaaacgca

SEQ ID NO: 18899 - DNA, 88 bp, Homo sapiens
caggcctcgtgccgttacggccatcacggcggccgcagtggcgtcctggagccctcctcaggacaagttggatggctttgttcccgcg

SEQ ID NO: 18900 - DNA, 101 bp, Homo sapiens
gtttcttttcgggtcgaacagcaaaaggtcacaaattacattacccaatggtggaatattgtatacctactcagcccacctgcacccaggtgaaataaaca

SEQ ID NO: 18901 - DNA, 101 bp, Homo sapiens
ctgatagcgggcgtgagcggcggcgtcttatccaaccttgcgctgcatccgctcgacctcgtgaagatccgcttcgccgatgaagaaactgaggttcagag

SEQ ID NO: 18902 - DNA, 87 bp, Homo sapiens
atcctcagacggtgggcgtgggacgcgcgcgcttcaccacctatgaggttcgcatgcggcagatcctggccatgagagctccgcacc

SEQ ID NO: 18903 - DNA, 100 bp, Homo sapiens
gaagagatggatattgaaatggacagtggagatgaagcctaagaatatgatcaggacttgttctacgaagacgaagatctccggaaagtgaagaagaccc

SEQ ID NO: 18904 - DNA, 82 bp, Homo sapiens
gaggctgcccgcgcacggcgctggagtactgcaagctcatcctgagggtcggcactcttcaccctcccgagccctgcccgtc

SEQ ID NO: 18905 - DNA, 75 bp, Homo sapiens
ctggacccactggactcctctggaggtgtgttccagagaacaagccttcagacatttgctatattgacgctgagc

SEQ ID NO: 18906 - DNA, 116 bp, Homo sapiens
gccggactgcggttggggcgggaagagccggggccgtggctgacatggagcagactgggactcttcaattaatctgacatttcacaaatccaaaattgccgtggatgaactcttta

SEQ ID NO: 18907 - DNA, 50 bp, Homo sapiens
ctcccaaagtgatgggattacaggctgaacttcctgtactgatgctggga

SEQ ID NO: 18908 - DNA, 75 bp, Homo sapiens
tctcaggaaactctgttaaccattgtagagaaatctcctgcaaagaagctgagccatgcaattagtaaatctttg

SEQ ID NO: 18909 - DNA, 87 bp, Homo sapiens
ccggaggaggatgggctgcagacacagcaggctgagcagctgcaaacccccgaaaaagctgatcttgcatctttaatggataaaaca

SEQ ID NO: 18910 - DNA, 97 bp, Homo sapiens
ctggttggccctgtgatccctcaagactggtccacggagtgtatgaccacaaacagccatcaagtagctttccacagccccaccaccaggatcaaga

SEQ ID NO: 18911 - DNA, 101 bp, Homo sapiens
ggaggccttccagctgtttgaccgaacagccatttccccaaaggaatgtcttgcatattactgacatttggtatgtttcattcattggaatatttcttatt

SEQ ID NO: 18912 - DNA, 82 bp, Homo sapiens
tttgggaaagccactcgaaaaggaagatgagaatgtgcctactgctcctgatcctccaagtcaacatttacgtgggcatggg

SEQ ID NO: 18913 - DNA, 101 bp, Homo sapiens
caccatccttcaagtgaacaattgttcccgaggagagatggatgccgcgtccccttcgcagcgacgagacttccctgccgtgtttgtgaccccctcctgcc

SEQ ID NO: 18914 - DNA, 76 bp, Homo sapiens
gttaacagtgccaccggtgttccaactgtttaaatactgagacaaggattggcattcagtcaaatctatcgttttt

SEQ ID NO: 18915 - DNA, 75 bp, Homo sapiens
gaggacaattcaccatagttttctttaagggagatgcacttatttacatggaaccagagaaacaagtgatgtcca

SEQ ID NO: 18916 - DNA, 100 bp, Homo sapiens
gccctctcagcaagaacgggaacaaaactctggctttgatgcggcctggaagaattgatagaatcatctatgtgcctttaccggatgcagcaacaagaag

SEQ ID NO: 18917 - DNA, 82 bp, Homo sapiens
gtggactccttcggcagtccacccaccgccgccgcctcccaggtttttcacgactgaaaacaacatagcaaaataagccaag

SEQ ID NO: 18918 - DNA, 98 bp, Homo sapiens
aagaagggatggatgtcgatcttggacgagcctggagaggccatccagagccgtgaccggatccagttgcagtactcacagagcctcatcgagaagga

SEQ ID NO: 18919 - DNA, 100 bp, Homo sapiens
tcgccagaaggaagatggcggatctggaggagcagttgtctgatgaagagaagttgtcacaggtagtactgatggaattggaaaatcatatgcagaagag

SEQ ID NO: 18920 - DNA, 88 bp, Homo sapiens
ggtcgatggtcggcggcgcccggatgggcagctgagatgccatggacaatattaccaggcagaaccaattctacgatacccaagtcat

SEQ ID NO: 18921 - DNA, 50 bp, Homo sapiens
gagacaacggccacacactgtggggtcagcaatctgaagatggtcttacg

SEQ ID NO: 18922 - DNA, 80 bp, Homo sapiens
gtgcagcttcaagcttaggaccacccaccatgcctatccagattgatctggatactattgatgtaagcaacctcaacaga

SEQ ID NO: 18923 - DNA, 90 bp, Homo sapiens
gacagatccgtagggaggacaccgtgacttcccggacgctgggaaatgaaataagcgggttttgaaaacaaaaaaaagaaggagtggaag

SEQ ID NO: 18924 - DNA, 75 bp, Homo sapiens
ggggaaccgccgtcccaacatcacaaaaaggtcacaagctacctaactaagaagtttgctgaactacgcagcccc

SEQ ID NO: 18925 - DNA, 75 bp, Homo sapiens
gcggagtctgccaggtggtgtccatcatggacaaccctccatatgataagggagccttcagaatcgaaatcaact

SEQ ID NO: 18926 - DNA, 90 bp, Homo sapiens
gatgtacgatgcagaccttttagaagaagaggtcatcatcagctggtcggaaaaggaacagcgtttacattttctaaagcaacaggagcg

SEQ ID NO: 18927 - DNA, 74 bp, Homo sapiens
gggggaagctcattgaagcagaggacaacatgaactgccagatgatccagatcctgatgatggatttaactata

SEQ ID NO: 18928 - DNA, 100 bp, Homo sapiens
gttggagctttgcagctgacctacatctcgaaggcccgatgagagaaagggaaagttaaggatgctggagcagaacaatggatttctctttctctttcat

SEQ ID NO: 18929 - DNA, 75 bp, Homo sapiens
gcctagcgctatgcctgcggcggagactgcatcaggctctcggtgcaggcctggggtagtctcctgtctggacag

SEQ ID NO: 18930 - DNA, 100 bp, Homo sapiens
tgctgagggctgatgtcattctccacaaggtgacaaatgtgtcatgcctggagacaagctccagcgccagccctgctagagactcgctcatgcgccatgc

SEQ ID NO: 18931 - DNA, 75 bp, Homo sapiens
acttcaaggataagggcgacagcaacagctctgccggctggaaggtcagtttgctgagaacgaaaccaatgaggt

SEQ ID NO: 18932 - DNA, 50 bp, Homo sapiens
aaggataagtctcatgacacctattgctgacagacagaacgccttggagg

SEQ ID NO: 18933 - DNA, 101 bp, Homo sapiens
gacatcaagattaaaagagcgaataaagtttatcacgccggggttgatgataattagaagcatgctttccactgaacttcccgacaacatttgttatgcag

SEQ ID NO: 18934 - DNA, 125 bp, Homo sapiens
cggaggatgagtccaccccggagaagcgcacagacaagatcttcaggcagatggacaccaacaatgacggtatgccttacactttcttgtacaaagtggaatttcctactgtatcatgatcatca

SEQ ID NO: 18935 - DNA, 100 bp, Homo sapiens
cccttggcctaactttttctttcccctgtcgacagactaaactggaagagtgcaagaactatatcagccagtattctgaaattgctatccagatgatgat

SEQ ID NO: 18936 - DNA, 100 bp, Homo sapiens
gtggaccaagttgctctgcgtcatcaaagacaccaaactgctgagaggcgtttccatcaaccagttttgcaaggagttcaatgagaggacaaaggacatc

SEQ ID NO: 18937 - DNA, 109 bp, Homo sapiens
caagaggaggacagttcgctacacagcaatgcatcgagtctatgactttgaaagaagccatcaagtcttcactcatcatcctcaaacaagtaatggaggagaagctgaa

SEQ ID NO: 18938 - DNA, 75 bp, Homo sapiens
aagcacacactatggcgctgaaacggattaataagcagaaaaagtcctacctggagcgaagcgttaaggaagctg

SEQ ID NO: 18939 - DNA, 100 bp, Homo sapiens
gatagttcttcaggaacagaacgaacaggtgtcatcaatcttacagaagaagtgctgtgggtcaaagtgaatataaacatgaatggttattatattgtac

SEQ ID NO: 18940 - DNA, 51 bp, Homo sapiens
ctgcaagcgaggcacttgctaactcttgggcaagtgtcaattgaggaggga

SEQ ID NO: 18941 - DNA, 76 bp, Homo sapiens
ggaagaacctcatcgctgcgacgaaaagtaagaatgattgatgttggctgatattggagtgctcattcacatgaag

SEQ ID NO: 18942 - DNA, 111 bp, Homo sapiens
ttctgtctcgctgggacccgcactgacagcgggaggcagagggaggaacctggacgccggaagccgggaaatgatcgtaaagctgaaaattgaaatcatgaaagtagacag

SEQ ID NO: 18943 - DNA, 75 bp, Homo sapiens
aaggattccaagtaactcttatttgtataaatcaaagccattctgtgaaaaactgctttcctgggtgaaaagcag

SEQ ID NO: 18944 - DNA, 75 bp, Homo sapiens
cgactggagtccaacaaggaaggaactcggtgatctgtgaaaatggttcgctattcacttgacccggagaacccc

SEQ ID NO: 18945 - DNA, 72 bp, Homo sapiens
ggacttcagcacaacccctctctctgttgaagtcttgacaggcaagtgaaaattacatcctgtgtagtgata

SEQ ID NO: 18946 - DNA, 49 bp, Homo sapiens
caggactgcgccgcgtcttcctcaagattgacgagatgcctgaggctgc

SEQ ID NO: 18947 - DNA, 75 bp, Homo sapiens
cacgacccccggcggcacgctcttcagcaccaccccgggaggtttacccaaggtccagcctagcccctaggcacc

SEQ ID NO: 18948 - DNA, 75 bp, Homo sapiens
gacagattcgcagtggtcgcttcttctccttggtcctacatcgccaatcgagtgactgacaagctgacacctatt

SEQ ID NO: 18949 - DNA, 139 bp, Homo sapiens
aaatggttcgttacatcagaaggatacagttcatgacaatgactttgagccctaccttactggacagtcaaatcagcccgtgaaaacagaaaccatgactgtcagcagtctggccattagaaagaagattgagccggag

SEQ ID NO: 18950 - DNA, 92 bp, Homo sapiens
atgactctggaagaagtccgcggccaggacacagttccggaaagcacagccagacaatgcagatcttcgtgaagactctgactggtaagacc

SEQ ID NO: 18951 - DNA, 74 bp, Homo sapiens
gaacatgcgcttttgacacattggagatgggtttcagcccagcagaagcattatctttgccagttggagtgctg

SEQ ID NO: 18952 - DNA, 75 bp, Homo sapiens
agatgttaaccaaattcgagaccaagagcgcgcgggtcaaagtttacaggctggtaacctacatctttgtctacg

SEQ ID NO: 18953 - DNA, 75 bp, Homo sapiens
tgctgagtccggagcgcctagccctaccggactacgagtatctggatatttggagttcttacaacatggcagaca

SEQ ID NO: 18954 - DNA, 50 bp, Homo sapiens
caaacacttcctcgagcagattctggattaaactgcaaatatctcatgaa

SEQ ID NO: 18955 - DNA, 100 bp, Homo sapiens
caaggcgctgatgagggcccttgaggggaaatggatgctaaagaggctggaggcggcgactggcggcgcgatggacctgaccgggctcctgctggacgaa

SEQ ID NO: 18956 - DNA, 55 bp, Homo sapiens
cactgcaatgtttttgtggaacatggtatctacgagaccccagcaggcaccatcc

SEQ ID NO: 18957 - DNA, 74 bp, Homo sapiens
attttttgcctttgttgattaactggacaaattcagtactatactggcaattgctggagaagattttgcaattg

SEQ ID NO: 18958 - DNA, 100 bp, Homo sapiens
ggaggatgtcaataaccctgggctcagggtcagagcccagcctggggactatgtgctggtgaaggccaaaatagaatctgatcgagtcattggatctgta

SEQ ID NO: 18959 - DNA, 51 bp, Homo sapiens
atgtaccaagtgttcctgcacttgatttaaagggagtgatagtcactctga

SEQ ID NO: 18960 - DNA, 50 bp, Homo sapiens
tggtcttcaccaagaacttcgcaggcttctaatgtagatgtgaagatgac

SEQ ID NO: 18961 - DNA, 83 bp, Homo sapiens
tgtggaggggcgggccggacgctgagcggagcagctgcgccacggtcaaaatgcagatcttcgtgaaaacccttaccggcaag

SEQ ID NO: 18962 - DNA, 136 bp, Homo sapiens
caaagccattgcttttgaagttattaaagtctgttggtgcacaaaaagacacttatactatgaaagaggagctcactgacccaaagatttgcaccgtgtgggtctgacctcatcatgtggagtgcagagggccctg

SEQ ID NO: 18963 - DNA, 75 bp, Homo sapiens
aactgagagagatgcttaaaaatcaccagttactttaatgaacatatgtagagtgtgtcggtcagaaggaacacc

SEQ ID NO: 18964 - DNA, 96 bp, Homo sapiens
aaaagaggaaagtggactgtccggggccgggctcaggagcagagtaatctatgccagcaattatgacaatgttagcagaccatgcagctcgtcagc

SEQ ID NO: 18965 - DNA, 112 bp, Homo sapiens
cctgagatcaaatggcacttcattggccacctacagaaacaaaatgtcaacaaattgatggcccatgactgaagagttgctgaaacaacaaaagctgaattcacatgagacc

SEQ ID NO: 18966 - DNA, 96 bp, Homo sapiens
cgccagcggagcgaacccgagagcgtggagcgggctgggccagggctgcttgagcggccagtgctgctgccgcctgtgtccattgacactgccagc

SEQ ID NO: 18967 - DNA, 100 bp, Homo sapiens
gctccggactcagccaagttccccaacggctccccgtcgtcctggtgctgcagcggatggtgattgctcacaccaaagccttggacccctcccagcctgt

SEQ ID NO: 18968 - DNA, 50 bp, Homo sapiens
cggacggctgcttcctgggcgacgtggagtttcgctcttgttgcccaggc

SEQ ID NO: 18969 - DNA, 85 bp, Homo sapiens
atgatgaagagtatcaggaatttgaagagatgctggaacatgcagagtctgcacaagtgacttaagagattaaaattaatttggt

SEQ ID NO: 18970 - DNA, 146 bp, Homo sapiens
acgaaatggattggagtgaaccggagaccccgaaaacggaagcgcagggagaaggaagaggtgtttgaaaagagttcctgagttggaggtagaagaagaaacccaagttcaagagatgactttagatgagtggaaaaatcttcaag

SEQ ID NO: 18971 - DNA, 98 bp, Homo sapiens
aagaaagcagcttatgctggaggcttggttttggaccccaaagttggcaaggattactgcaaagtaatatttccatatgaggcacagaatgatgatga

SEQ ID NO: 18972 - DNA, 100 bp, Homo sapiens
cattcagaaaagacaagagccctgtgagacacatcatctcagagttggagcacctgacgtttgtcaacacggatgtgggccgctgccgggcatggctgcg

SEQ ID NO: 18973 - DNA, 134 bp, Homo sapiens
gggcagatgaaggtagtcggcttagcaggtttcgaatgctctttacttcctttgtggagcgctcagtttatgaacctcttaaaagcattaatcttccaagacctgataatgaaactctctgggataagttggac

SEQ ID NO: 18974 - DNA, 100 bp, Homo sapiens
tgacgttgacatttatgttaacagcattggtcctgtgtcatcaataaacatgctactggtcagaagttatatgtaaggctctttcaacgtaaattaagct

SEQ ID NO: 18975 - DNA, 100 bp, Homo sapiens
cagacctggctgtggtcaaacccacccggcccaactcactgtttctatatatgctgtaccagaaaagattggtcaagttcattatgccttggaaacaact

SEQ ID NO: 18976 - DNA, 98 bp, Homo sapiens
gcagccggtgtaaatgttgagcctttttggcctggcttgtttgcaaagcttctcaataggtttggcatggacaagatctatgaaggccaagtggaggt

SEQ ID NO: 18977 - DNA, 99 bp, Homo sapiens
ggccagattttctccaattaaccagatcttgccctggtgcagacaagacttagtatgccccagagtgcctgaaggagtataagttctactatgcgtcag

SEQ ID NO: 18978 - DNA, 100 bp, Homo sapiens
ctggaggaatccgagaagagcagagcggagggagccccagacacgttcctgtgccttaagaacattagaaccttcctgtccacctgctgtgagaagttcg

SEQ ID NO: 18979 - DNA, 82 bp, Homo sapiens
ctcagaatttcctgacaaatttggatcctgtgttcctcgaattagaaggtgacgaggagggagaagacgaggatgatgcgga

SEQ ID NO: 18980 - DNA, 100 bp, Homo sapiens
gctgggccgtgtttggactcctgcctcgattttgcaagaacgaggctcaaggatgtgagggacacagtattgacagctgaagaaatgatttacgttttcc

SEQ ID NO: 18981 - DNA, 75 bp, Homo sapiens
cgctcgtcccgctcgtcatggcctacccgggatacggaggaggggatcttttgccagaaatgagggcatactggc

SEQ ID NO: 18982 - DNA, 75 bp, Homo sapiens
gactgcgtcaggcatctcaatcatgggaagtaagcaatggcatagaaaaaaaaggaaagaaaaaatctgtaggtc

SEQ ID NO: 18983 - DNA, 75 bp, Homo sapiens
ccggcttccaagcaaccaacttcgggcgcgctgtacagcaagtcaatgccatggagttgaactgaatgaccgact

SEQ ID NO: 18984 - DNA, 78 bp, Homo sapiens
aacagtctgcccacctgtggacaccagatctcccttgagtttagaaatctggctgagaaataccaaacagtgattgcc

SEQ ID NO: 18985 - DNA, 95 bp, Homo sapiens
agacacatcagtggagtccatgctacctgattgcccccgggtctcagcagcatcaggtattatctactgctgtctgcagaattcagacatggagg

SEQ ID NO: 18986 - DNA, 75 bp, Homo sapiens
atcaaccctctgcatacagtaaaggtttcatatgtccccagtgtatgaaatctcttggatctgctgatgaacttt

SEQ ID NO: 18987 - DNA, 80 bp, Homo sapiens
gcctcctgcctccaaatgcccccatcgctatacaaaaacaagaagctccgccacgcccgcagtggggcccccgctggagg

SEQ ID NO: 18988 - DNA, 100 bp, Homo sapiens
tccatccagatcagctgaatcagagtttgcattgttaacaaggtccctccttgtggtccatttctgggcaccatgggctccacagtgtgcacagatgaac

SEQ ID NO: 18989 - DNA, 82 bp, Homo sapiens
gctccttaggagaaactaacaagaggaacacggtagatctagaggaaaaggcttctcttttacatcgtactcaggaagaaag

SEQ ID NO: 18990 - DNA, 99 bp, Homo sapiens
gctgaaggaagatggcggacggcgtggaccacatagacatttacgcggatgtcggcgaagagttcaaccagggtgaggtggctttgaccccgggttgcc

SEQ ID NO: 18991 - DNA, 100 bp, Homo sapiens
ctcgacccaagaaaaagaagaattcagatgatgctccatggagtcctaaagatcgtaaagctgaaaattgaaatcatgaaagtagacaggactaaactga

SEQ ID NO: 18992 - DNA, 100 bp, Homo sapiens
caattacgcggcagacacacactcaaactcgcgcggggcagccaagagacgagaattaaacaaccaccatgtcgagcaaaaaggcaaagaccaagaccac

SEQ ID NO: 18993 - DNA, 95 bp, Homo sapiens
ggaaattaattgctatcaatgcgaatgatcctgaagcctcaaagtttcatggaagtaagtgaaggacaagtgttggttcttggggccacaaatcg

SEQ ID NO: 18994 - DNA, 88 bp, Homo sapiens
gttcgagagaagaaaattttagaagttcatattgacaaagactgaaactgttgaggagcccatggaggaagaagaagcagccaaagaa

SEQ ID NO: 18995 - DNA, 100 bp, Homo sapiens
aggcttttgtgtggacataagttgtcgactcatttggataaagaccaagaagtgggattactggattatatgtaaatggggagcaggagaaccgagtgca

SEQ ID NO: 18996 - DNA, 82 bp, Homo sapiens
gaacgacctgatgggcacggccgaggacttcgccgaccaggatagtaatgatgacactgaagatgtttcactgtttgatgcg

SEQ ID NO: 18997 - DNA, 100 bp, Homo sapiens
gctcctcctggaaaaagcaagctgaagacatcaagaagatcttcgagttcaaagagaccctcggaacggatgatccaccaacacattctcagccagacag

SEQ ID NO: 18998 - DNA, 97 bp, Homo sapiens
cggggacgtgctggccggccccggcggcggcggcggccttgggccggtggacgtacccagcgctcgatctttgtagaatttgatggctgtaactgga

SEQ ID NO: 18999 - DNA, 115 bp, Homo sapiens
gcatggcaggctccctgcctccctgcgtggtggactgtggcaccggatttaatccagagactgacttcactatagaacccacagttgtatcaatggttggggaaagatagtggca

SEQ ID NO: 19000 - DNA, 100 bp, Homo sapiens
ctcccgtgatctttgatagatccagggaagaggttgcaaaagcttctcatttcagagagatgccaggatcctaagtgcctgccaaacttaccaattctaa

SEQ ID NO: 19001 - DNA, 101 bp, Homo sapiens
agcacatgcagtacttgggcatgcttttgtgaagaaatatgggaacctttttagcttggagcttggtgacatatctgcagttcttattactggcttgccct

SEQ ID NO: 19002 - DNA, 90 bp, Homo sapiens
gagctcaatgggggaccacagcatgcacttccttccagcagctacacaggtgccagatgtgacatccagatgacccagtctccatcctcc

SEQ ID NO: 19003 - DNA, 101 bp, Homo sapiens
gtgctttgtcgcgagtctcaagtgtccatcttgcagtccttgtttggagagatgctgagatgaatcgtcacctgtgtgtttggctttttagacatccatct

SEQ ID NO: 19004 - DNA, 98 bp, Homo sapiens
cggcacgtgcgatttttccagcgctgcctccaggttttgccggagcgctattcttcactcgagacaagcaggctggaagcgcaattcattgaccccga

SEQ ID NO: 19005 - DNA, 78 bp, Homo sapiens
ccacgggccagccccgccgccctcgcaacctggcagccgccgccgtggaaggatacagtagagaagatttgtataaaa

SEQ ID NO: 19006 - DNA, 100 bp, Homo sapiens
gtagacctggcgacgacggggctgcagctgcaggggctgagctggctgggcaagcgcgggccgcggaggaggtctcaggcaggggaaatgctgtctgtag

SEQ ID NO: 19007 - DNA, 90 bp, Homo sapiens
agctgggaaaaagagaccaccggaggccagagccgagccaagtaatatattcttagtagatacaaaacaagtaaagattggagactttgg

SEQ ID NO: 19008 - DNA, 82 bp, Homo sapiens
ctggaactgggcatcatagccgacgctaccgtccgctccctggagtctgaaggaaggcctgacggtgcaagaacggttgaag

SEQ ID NO: 19009 - DNA, 50 bp, Homo sapiens
aggactctatgacacggccggacagatgggtgagtcaagtgaagacatag

SEQ ID NO: 19010 - DNA, 97 bp, Homo sapiens
atccaaatactgcatatcagaaacaacagggaagtcgagataacatgagtattgtactagtttgcttttcaaatgctcccaaggtctcagatgaagc

SEQ ID NO: 19011 - DNA, 50 bp, Homo sapiens
gtttctcggcgaatgacagcacagaatgagaagactttgggacatttcat

SEQ ID NO: 19012 - DNA, 96 bp, Homo sapiens
cagttggccttcatcgacttgagacaagctgaccggttccctgatgtgttacctgcttctgctactgatccaaactgcagaacttctcattcatcc

SEQ ID NO: 19013 - DNA, 100 bp, Homo sapiens
ggacaatccagacggctgaggcactgggtgtgccctatgaacagtggaaggtcctcaacgagatcgatgcgggcactccacagaaggatgttattatcaa

SEQ ID NO: 19014 - DNA, 100 bp, Homo sapiens
aggacatggacgagatgaatgactacaatgagtcaccggatgatggagaggtcaatgagtagtcgtgaaaggtgccaaattggcagaggctcacgtttct

SEQ ID NO: 19015 - DNA, 100 bp, Homo sapiens
ctgccctcgcgccccgctagggccagatacattccaccgttgatctgggggaaaagtggacacatccagacagccttgtatgggaagatgggaagggtga

SEQ ID NO: 19016 - DNA, 101 bp, Homo sapiens
catcgcccggcaccagatcgtggaggtggcaggctgttgagctaatggaccgaactgaaatgccatgccaggcattagtgaggatgctagccaagaaacct

SEQ ID NO: 19017 - DNA, 100 bp, Homo sapiens
ctctatggaagaaattggaccatacactttctcagatcaggcagatcttgtctggactaccagactcaagagaccaaatcaagcctttctaagacccttg

SEQ ID NO: 19018 - DNA, 74 bp, Homo sapiens
aagctcagctggtggtgattgcacacgacgtggatcccatcgaggagaaggaccgtccccacgaggggacccgg

SEQ ID NO: 19019 - DNA, 75 bp, Homo sapiens
ctcagcctccccagtagctgagattacagtttttccagaggcctcaaatacagcctcctagagctaccatcccga

SEQ ID NO: 19020 - DNA, 74 bp, Homo sapiens
tccgcattgcttaactggagcaactgaggttgccaacttggcctgttccatctcaaataatgaagaaggtgtaa

SEQ ID NO: 19021 - DNA, 90 bp, Homo sapiens
ttgctcctctctccttggcctctcctgggatcggcccaaggccagttctccgcaggtctgcagccaccccagctcatacctctctgcctc

SEQ ID NO: 19022 - DNA, 75 bp, Homo sapiens
aaacagtggatcgataccaagcacctccaataggcatttcagaagatggacacaaagaagaaggaggaacagttg

SEQ ID NO: 19023 - DNA, 75 bp, Homo sapiens
tggacatctgatcatggacatgtcaagaaagatgttcctccttcagctgtcacaagaccaatatttggtatactg

SEQ ID NO: 19024 - DNA, 87 bp, Homo sapiens
ggtgctggcacatccgaggcgttctcccgactctggaccgacgtgatgggtatcctggtattagaaaactactcggatgctccaatg

SEQ ID NO: 19025 - DNA, 50 bp, Homo sapiens
accaggccctgcagcagcagcttcaccagctccatggctacatggaaaac

SEQ ID NO: 19026 - DNA, 96 bp, Homo sapiens
gtagagatgacaacactgataaaatccactcattgctgtgcatttgcacagtataacttggaccagtttactccagtaaaaattgaaggttatgaa

SEQ ID NO: 19027 - DNA, 50 bp, Homo sapiens
cagatgtgttcctcaatgaatcacataacaacgaacttgatgcaagtgat

SEQ ID NO: 19028 - DNA, 78 bp, Homo sapiens
tcttacaacaaaatggttttccactccattgttgttagaagccagaaaccatatcattctacaggaaaatgcacagca

SEQ ID NO: 19029 - DNA, 50 bp, Homo sapiens
cggttgccgccaccaactctgaaactggcctccagaggaagaagtccaag

SEQ ID NO: 19030 - DNA, 51 bp, Homo sapiens
cccgcatcttcgccgtctggaaagagccagtggcagccccagctgcagcag

SEQ ID NO: 19031 - DNA, 75 bp, Homo sapiens
accagagtcggcgtaactatcgcctgacagggtatctgaagtaaaagggggtttctgcccacttggctataggga

SEQ ID NO: 19032 - DNA, 51 bp, Homo sapiens
acagaaattctggaacacctatatggaggagcaaatacgacatcctcatgg

SEQ ID NO: 19033 - DNA, 75 bp, Homo sapiens
ctaaaggagcccatcgtgcgggtcttgcaaagcattgatctggtagccttgctccagaagcctgttcctcacagt

SEQ ID NO: 19034 - DNA, 75 bp, Homo sapiens
gaaatatgggagacgacagaccgtttgtgtgcaatgccccgggctgtggacagatgtgtcttgctgaatcagggc

SEQ ID NO: 19035 - DNA, 100 bp, Homo sapiens
aatctctatccggtgaagctctacgtgtacgacctgtccaaaggcctggcccggcggctcagccccatcatgctgggtcgacactacccctaaagcaaga

SEQ ID NO: 19036 - DNA, 76 bp, Homo sapiens
aggcataattaggataataaatcctataacaatgcagtgtataaagtgtcactactccatccagaagggagctgcg

SEQ ID NO: 19037 - DNA, 100 bp, Homo sapiens
ttcacagaatattactatccagatggaaaggattttccaagctgaacaagaagcatggcaccagcatctgcttctggtgaggacctcaggaagcttccaa

SEQ ID NO: 19038 - DNA, 100 bp, Homo sapiens
ctttgcaccctgcttggagacggacttgcttccgggttatgtaccgaaggactctaccgtgtcagcgggaataaaactgaccaagacaatattcaaaagc

SEQ ID NO: 19039 - DNA, 100 bp, Homo sapiens
cccgcccctctcttccctggctggacttgcggagtccccgccgaagaacccgagaacaccttccaccatgaccacctcagcaagttcccacttaaataaa

SEQ ID NO: 19040 - DNA, 75 bp, Homo sapiens
caacactgtggttggagaaaagggtgttctcctctcaggtttcctatcctgggagcaggagagtgtgcctatttg

SEQ ID NO: 19041 - DNA, 74 bp, Homo sapiens
tttccccgtcagcatcccagccgtgctcacggccaagactaaggggctgcagagcggggtggacattggcgtca

SEQ ID NO: 19042 - DNA, 82 bp, Homo sapiens
ctggggacgcgtcctcagacgcagcgtctagtccctggccatagctccgccgctgcccggactggagactgatgcatgaggg

SEQ ID NO: 19043 - DNA, 83 bp, Homo sapiens
gagaaggttcgaggcctacagaacctagcctatcagctggggctggatgagtactgctgcagtaagaatgtcttttccacctc

SEQ ID NO: 19044 - DNA, 100 bp, Homo sapiens
cgagcaaggagcgcggaatcggggagcgtccggagctagctggatcctctaggcaggtatgttaagctactgcgacagatacagcgaaggcataaaacat

SEQ ID NO: 19045 - DNA, 101 bp, Homo sapiens
ggccgcaggatccccaaggacgtggttgaggaattcagcgatttatacaacgagctcccaacacagagacagagcccttgctgacctggaagaaggcccag

SEQ ID NO: 19046 - DNA, 100 bp, Homo sapiens
gtatatttgcagccagtactctatatgaacaatccgtctggatcacggatgtaggaagtgagaaccatggagtctggcagtaccgccgccagtgaggagg

SEQ ID NO: 19047 - DNA, 100 bp, Homo sapiens
atgacatcagtcagttgtttgatttcatcgatgatctggcagacctcagctgcctggtggatgcccgggtagttaaagacatggcaactggaaaatccaa

SEQ ID NO: 19048 - DNA, 100 bp, Homo sapiens
ggctgggttggcttaggctgctgtgaactggctattgccttggagtgtcgacaggcatgcaagcagtatcctgtggagcacccagacaaattcctgaagt

SEQ ID NO: 19049 - DNA, 99 bp, Homo sapiens
gtcctgcccccgcaggcagcgcgcgaacgtgggcgtggggatggccaccagtttccggacagcttcgtgctggccctgactataatgtggaatttttcc

SEQ ID NO: 19050 - DNA, 50 bp, Homo sapiens
ccgagggcagtctgtgtcaaacgcagattcccgacagttaagcaatgggg

SEQ ID NO: 19051 - DNA, 106 bp, Homo sapiens
tgataaagacttcaaatggaaattagatgcaatattgaaaaacgtgcccaatttgttacacatgggttcccctcttccaagacgggtgccaagtgatgagtatcag

SEQ ID NO: 19052 - DNA, 51 bp, Homo sapiens
gttcaagaccagcttgggcaacatggaatacggttggacagaatgaactga

SEQ ID NO: 19053 - DNA, 100 bp, Homo sapiens
ggagaacctgaagtagcaaaggcaagaaggcaacgacgttccatctgtggaaggacctaccaaccaggcatgaattgctggaggaagcccggagacaagg

SEQ ID NO: 19054 - DNA, 49 bp, Homo sapiens
ggaaggcagcggccggagcgcgcaaggtcggagcagagcatggacatgg

SEQ ID NO: 19055 - DNA, 98 bp, Homo sapiens
aacagccccgtgccccccacaaagaaagatacacatggtctacagtaagcggtcaggaaagccccgtggctatgccttcatcgagtacgaacacgagc

SEQ ID NO: 19056 - DNA, 100 bp, Homo sapiens
atgggttcactggtccacagtgtgaaagaggtttggaaagcagagtggagaacaaagagttgattccaatgcaacaaattttagaagaagcggagccaca

SEQ ID NO: 19057 - DNA, 100 bp, Homo sapiens
agatgcttgtttcttcctcttccctaacgccctttccaccagtgcggactgcaggtaaagtcagtgataaatcttttgtttgctgcatatactggagatg

SEQ ID NO: 19058 - DNA, 112 bp, Homo sapiens
cgccgagcgtcgccgccgccgccgccatgaacaactcgggcgccgacgagatcgggtgagaagccctaccactgcaactgggacggctgcggctggaagtttgcgcgctcag

SEQ ID NO: 19059 - DNA, 89 bp, Homo sapiens
ggaggaggaccacgcctgcatccccatcaaggcaaactttgaaagcagatttgatgtgaaaatgctggagagcttgctcaactcaatgt

SEQ ID NO: 19060 - DNA, 100 bp, Homo sapiens
ctacattgctgtcgcgagaagtggcggcatcgagaccatcgccaatgagtacagcgacaggtgtaccccctgttccatttcctccaagtcaccggcttac

SEQ ID NO: 19061 - DNA, 78 bp, Homo sapiens
cgccgtcggcagtcaagcagttctgcaaattctcagcagggtcagtgggagacagattctgatgatggtgggcctgcc

SEQ ID NO: 19062 - DNA, 98 bp, Homo sapiens
gagaagactcgaacggctcccacagccgggcgttgggggaaaggtcgcctgcgaggccgctggccaggcctgagcctctgccaccatggccattgtgc

SEQ ID NO: 19063 - DNA, 50 bp, Homo sapiens
tccaaattcgcctccatctgtaccatggctgaccaactgactgaagagca

SEQ ID NO: 19064 - DNA, 100 bp, Homo sapiens
ggacaagaggactgaagcagatggcaactctgatcccaactctggttatacattggctcttcaaagacgttcacctcatcagagaaatccctgactcctt

SEQ ID NO: 19065 - DNA, 97 bp, Homo sapiens
aggagatggtggaggaggctgaaggtccggcgccagctgccagtcgaggaaccgaacccagccaaaaggcttctctttctgctgctcaccatcgtct

SEQ ID NO: 19066 - DNA, 75 bp, Homo sapiens
tgcagacttgattagcctgcctaccactgtagagggacttcagaagcggatattcaactcctttgtttacactga

SEQ ID NO: 19067 - DNA, 100 bp, Homo sapiens
cctcgctgcagcggccctggcgggtgccctggctaccatggaccatcctgctggtcagcactgcggctgatgatagtatttctgctgcaagtacttctga

SEQ ID NO: 19068 - DNA, 100 bp, Homo sapiens
tgaaatccaccctgttaacaatgtgaaggttctaaaggctgtggatagctatatttgggttcagagtatgcagagaacatcggggacggccggagcccgg

SEQ ID NO: 19069 - DNA, 98 bp, Homo sapiens
gccaaaaggaaggtctacatgtactactggccagacaagcatgagacgaagctgaagggagtcatctatttccaggccattgaggaagtgtactacga

SEQ ID NO: 19070 - DNA, 100 bp, Homo sapiens
cgcagccggagtggggccgtgagataatcacatttttgcctggggcaatggtggtaatggccgcctggcaatgacccccacagagagaccacatggctct

SEQ ID NO: 19071 - DNA, 100 bp, Homo sapiens
tatcttccatgttttacatttctttccagaattatacaatatttgagacttccagtgtcctactattgaagcctgcacctgctgcattgctgttttcctg

SEQ ID NO: 19072 - DNA, 100 bp, Homo sapiens
ccggaacagctccagtctgcagctcccagcgtgatcgacgcagaagacaggtgatttctgcatttccgactgaggtgccagatgtgacatccagatgacc

SEQ ID NO: 19073 - DNA, 98 bp, Homo sapiens
cctgaggaggcaggacgtgcccggccccgcgtcgtctggcgccgccgccgccagcgcgggggacttgatctcatcttcatgccaggccttgggtttga

SEQ ID NO: 19074 - DNA, 90 bp, Homo sapiens
tttgttaaggattccaagtaactcttatttggaagttattccaacttttgacatggctgtcaatgaaatcttctttgaccgttaccctga

SEQ ID NO: 19075 - DNA, 100 bp, Homo sapiens
tgtggccgcggcttcaccagcgccaccaactataagaatcacgtgcgcatccacacaggcaccatgactcctgtgaggatgcagcactccctggcaggtc

SEQ ID NO: 19076 - DNA, 100 bp, Homo sapiens
tggcatctggggtgtgctcgcacctgcgaagaatccagcttctagggagcaccgcgagctgcgagtaaccagctcataaatcacatcgaacagtttttgg

SEQ ID NO: 19077 - DNA, 100 bp, Homo sapiens
tggagcccgaagccccccgtcgccgccacacccatcagcgcggctacctgctgacacggaaccctcacctcaacaagaattaaacaaccaccatgtcgag

SEQ ID NO: 19078 - DNA, 97 bp, Homo sapiens
caagtctgaagttttacaggaatctattagaaaacaaagtgtcaattatttcaagaattaccatagagtatcttaaagtgaggtcacatgaccctga

SEQ ID NO: 19079 - DNA, 75 bp, Homo sapiens
ttttctcagatgttggatatttgcttggaaaaacgtgtgggtacgaccttggtgtgtgcagtggcctcagggatc

SEQ ID NO: 19080 - DNA, 51 bp, Homo sapiens
ttgacgcacacggcaccaaactgtgctggagaatctggtaaaagcaccatt

SEQ ID NO: 19081 - DNA, 75 bp, Homo sapiens
gccggagtacgtcgttcccgctgcgctaggggaagcgggcagtttgcagttaacatgtttcgaacattaccacct

SEQ ID NO: 19082 - DNA, 100 bp, Homo sapiens
ctggcactgccgctccggcctcgggctgcccgtggcgcccgcaggcggcaggaatcctcctccggcgataggtggagctatatacctttctggaattgac

SEQ ID NO: 19083 - DNA, 75 bp, Homo sapiens
gaaacttgtcaaatttcatcaggggctttgttatgcacctaaagccatattggaagctccagaagaaagagcacc

SEQ ID NO: 19084 - DNA, 100 bp, Homo sapiens
caaaatatggtgtgaaggttggcctgacaaattatgctgcagcatattgtactggcctgctgctggcccgcaggacctttgatgaatgtgtagcagaagg

SEQ ID NO: 19085 - DNA, 76 bp, Homo sapiens
gagagtcagctgcaacaggaagacccaatggatagatacaagacacacaaactcgggccacttctaagagtctctt

SEQ ID NO: 19086 - DNA, 90 bp, Homo sapiens
gcagtctggccacccgcttccatgcggttcgggtccaagatgatgccggatctaacttggcaagatgagcactctgcccctttctcctgg

SEQ ID NO: 19087 - DNA, 90 bp, Homo sapiens
ctcctgagtagctgggattgcagttgattggctgcataatcgggcgtcaaggcgccaaaatcaatgagatccgtcagatgtctggggcgc

SEQ ID NO: 19088 - DNA, 50 bp, Homo sapiens
gaaagaagttgcaaaacactggaccattgtgatgaatgactgtattatcc

SEQ ID NO: 19089 - DNA, 101 bp, Homo sapiens
ctgggaaccctggaggggccttcctcatccgggagagccagaccaggagagatggactagaggcttttaccagatttcttaaaactgaattcagtgaagaa

SEQ ID NO: 19090 - DNA, 82 bp, Homo sapiens
atggacagttttttgctgtgagtgttgtttgcccagaaacaggaggtgggctaccacagggacctgagccgcaacactgccg

SEQ ID NO: 19091 - DNA, 98 bp, Homo sapiens
ctcttgacagagaagaactatatgccactgttgctggagaaatgtcactgctagagaacagaagactattattccaaagggtatttgagactgactga

SEQ ID NO: 19092 - DNA, 50 bp, Homo sapiens
ctaacatccagaagatcacacagtgttgcaagagggcacattgggagatt

SEQ ID NO: 19093 - DNA, 83 bp, Homo sapiens
ttaatcccaagttgcttcagttggtcgaagacagaggttcagttccagtctcatcagattttccatgtcctggtggtggcagc

SEQ ID NO: 19094 - DNA, 75 bp, Homo sapiens
cagggcacgcaagaccatgccgaagtccgtcgtgggcctgagaaagatgctggtttcgagttttggagatccttg

SEQ ID NO: 19095 - DNA, 90 bp, Homo sapiens
gacacccaggaggcatttgaagttccagtctatgaaggcctagacatcatcaccaacaaggtttctgcccaagagcagagaatctgccgg

SEQ ID NO: 19096 - DNA, 90 bp, Homo sapiens
ttcagcagcatgaagaagtactgccaagtcatccgtgtcattgcccacacccagatgcccctgggcagtacggagcctatttccacgatg

SEQ ID NO: 19097 - DNA, 82 bp, Homo sapiens
gtccagaagaccaagtacctgcagatcctgacctctctgatgagatggatcgggttgtgagtcccggcccagcccctccacc

SEQ ID NO: 19098 - DNA, 99 bp, Homo sapiens
ctacctggcctacttcgtgcgtgagcgaggtgtcatggagaaactccagctgggcccagagattctgcagcgggaaaatccaaggcttatttatgccag

SEQ ID NO: 19099 - DNA, 100 bp, Homo sapiens
agcccagcagccccgcagcggcgccgaggacagtgcagccgagttgcgtctccctcgcgcgaggagttccatctggaatatgacaaattagaagaacggc

SEQ ID NO: 19100 - DNA, 90 bp, Homo sapiens
cggctggtggcaagtattgctgtgggtgctgggacttcccgtccgcggcgtggaggggtctcactccattgcccaggccagagtgcgggg

SEQ ID NO: 19101 - DNA, 126 bp, Homo sapiens
gaagggcatcgcttcaaatgggaggccaatcaatgcagcattaggaaggcttcattcagctcagcaccaccttggaacattaaccaggtggtatttgttggaaatttcttgagaattaatacgatc

SEQ ID NO: 19102 - DNA, 74 bp, Homo sapiens
ggaagtccaagtcaaacgcagaaggactgcctcactgagcaaccaagactctattaccaggttttaaacttcgc

SEQ ID NO: 19103 - DNA, 90 bp, Homo sapiens
cgggcgaggagaggaggtgaccccgcgaaagagatcttgcagctgctatagatcgaatggacaagtataattttgatacaatgatatatg

SEQ ID NO: 19104 - DNA, 131 bp, Homo sapiens
catttggaccgatcttttacatgttccacaagaagtgcagcttataatccaagctattactcagtgttggaaaaccttggacagacaattgtccccgatttgggatcactggaaagtcagcatgattttcg

SEQ ID NO: 19105 - DNA, 100 bp, Homo sapiens
atttccttgtgcctccattcccgggaggggggagcggcgttggaggccaccgtttccagttgttgaatgttgggtcacgaagatctcaacctggccaaag

SEQ ID NO: 19106 - DNA, 101 bp, Homo sapiens
aaacccaggaggagactctccctggaaaacttcccttccctttcgagccagtcttggtgctctgtgttcacctggttcatctgaggagctgcatctaccct

SEQ ID NO: 19107 - DNA, 75 bp, Homo sapiens
gtctgctcttctgcctcttgatctccgccaccgtcttcaggccaggatttttagactctgaggagcagttggagc

SEQ ID NO: 19108 - DNA, 100 bp, Homo sapiens
tgctgcgggtggatctccgctggacacaccgcctccgaggtgtggatgaggtcaccattgtcaacattttgaccaaccgcagcaatgcacagagacagga

SEQ ID NO: 19109 - DNA, 74 bp, Homo sapiens
gtcgcagatcctgagacccggacagtggcagtgaaacaggaacagaagtgtgtcccggccagtggagaactctc

SEQ ID NO: 19110 - DNA, 98 bp, Homo sapiens
tcggattctcgtagctgtgccggattattcaggacagggagttgaccaactgcaaagagtgattgacaccatcaaaaccaaccctgacgacagaagaa

SEQ ID NO: 19111 - DNA, 96 bp, Homo sapiens
aggcggcggcgccgccggctttgtaaaatgtttattggaggcttgagctgggatacaagcaaaaaagatctgacagagtacttgtctcgatttggg

SEQ ID NO: 19112 - DNA, 75 bp, Homo sapiens
gtggacagaggctatttcagtatagaggtgaccaagaatatggcccaggtgaccaaagccctggacaaggccctg

SEQ ID NO: 19113 - DNA, 74 bp, Homo sapiens
atggaggaaatgcaccaggttgcaagtaccacgagtggatgaaatcagaggagctgcagcgtttgacagcctcg

SEQ ID NO: 19114 - DNA, 73 bp, Homo sapiens
ttgcagcagcctattttgagagccttctagagaaaagagagaccacatctcatccccgagcttcagctgcagg

SEQ ID NO: 19115 - DNA, 75 bp, Homo sapiens
ggcagctgcagtagcggcagcagccccagcctcaaggccaggttggtcaaagaaaaagtgatgtatgaaaaagag

SEQ ID NO: 19116 - DNA, 151 bp, Homo sapiens
cagcctttgaaaaaatgtctgtcacatatgatgattccgttggagtagaagtgtccagcgacagcttctgggagttacagcaagctgctgaagtttctcagctgcggggagcaagggtaatcactcctgaagatcttctgtttttgatgcg

SEQ ID NO: 19117 - DNA, 123 bp, Homo sapiens
cttcattcagatgtggtggaatatgccaaggaaaaactggagagcttcatcaaaaatagtgatagctttgataaattggtttttcagcagcagatgctgtaacaggactgaaattggtagaag

SEQ ID NO: 19118 - DNA, 104 bp, Homo sapiens
ctctgggagcctagaatgcatcagtgcccttgtggcgaatggggctcacgtcgatggtattggaaggaactggccctgggcctctggaggcagcagtattctgg

SEQ ID NO: 19119 - DNA, 100 bp, Homo sapiens
gtgatccagaagtccagagctgaggactgcctgtttgcagtcacaatatggagcttccgtttctgccaagcctgaactacccctcttttacactcctatt

SEQ ID NO: 19120 - DNA, 90 bp, Homo sapiens
ctttcactatggggtggagacgtggtactcagcaagctcgagttaaagttggatgtgctggaacaggaaagaccacagcaagattctttc

SEQ ID NO: 19121 - DNA, 75 bp, Homo sapiens
gatgtcttccagactcggtgctgtacccgccaatgacaaaggacagatccctgctgatgttgttccagacccagt

SEQ ID NO: 19122 - DNA, 100 bp, Homo sapiens
tatcagttcatagagccttttggcctttctgtatagagcccacaaacatcgtgaatgtgaatcatgtcattcagagggttagtgaccatgcctctgccat

SEQ ID NO: 19123 - DNA, 75 bp, Homo sapiens
cggcggcttccgtcacctccgctcccccgatcctattcccagtcgtagtgcctggtgaagaatgtgatgggatca

SEQ ID NO: 19124 - DNA, 100 bp, Homo sapiens
cccggcggcagcacgaaagtaccatgtaacctgtctggtcagagtgcagcttcagtcttgcacccccagcagaccctccaccctcctggcaacatcccag

SEQ ID NO: 19125 - DNA, 95 bp, Homo sapiens
cggcaaaggagcagccatgagggccgggcccagtcaccgaccgaacattttagtggacaaaccaaatgaccaatcttcaagatggtcttcagaga

SEQ ID NO: 19126 - DNA, 100 bp, Homo sapiens
atgagcaggtgcttcggagtgcttatgccaagaggaacagcagtgtaaatgactcagggtttttaagtaccggtgaccaggcagcaaaaggcaactatgg

SEQ ID NO: 19127 - DNA, 83 bp, Homo sapiens
cctcaaggtggggttcggggggccaccgaatcgctgtcacgccggcaggtgtcgtgaaaactacccctaaaagccaaaatggg

SEQ ID NO: 19128 - DNA, 99 bp, Homo sapiens
aaggaggagcgggccgtggaggcttcgccgcctaggaaggagatggataaagcagatgtttattggggcattccttatcccagctatggtgtgtggcac

SEQ ID NO: 19129 - DNA, 100 bp, Homo sapiens
cgttcaagcaaggggcgcctggccagcactcgaaatatggctacacacacctttctgcaggagagctgcttcgtgatgaaaggaagaacccagattcaca

SEQ ID NO: 19130 - DNA, 74 bp, Homo sapiens
tgctgcaagttccccagatcttgagctggttgtcttcttgcctgccctgtgtcgtaaaatgggggtcccttact

SEQ ID NO: 19131 - DNA, 75 bp, Homo sapiens
gaaaagaggctggcccaccccttctccttggccgtctttgagatgtgcactcccagcaacacccctgccacgccg

SEQ ID NO: 19132 - DNA, 50 bp, Homo sapiens
ctgtccatccactcaggacatctgcagggtgcagcagttggaggaagaaa

SEQ ID NO: 19133 - DNA, 100 bp, Homo sapiens
tgacaactttcgtttccctctgagggaattgggaggtcggcggccccaaaacagtctgagctatcagctgaagaaagtccagaaaaattaggaacctccc

SEQ ID NO: 19134 - DNA, 83 bp, Homo sapiens
acactgacacagccccagcttcattccctgctcctggtatcctagaaggaaaacatcaccatggctacagaaattggttctcc

SEQ ID NO: 19135 - DNA, 100 bp, Homo sapiens
acttcctcgctgcagcggccctggcgggtgccctggctaccatggaccatcctgctggtcagcactgcggctgatacttgccagaactaatacagctgat

SEQ ID NO: 19136 - DNA, 75 bp, Homo sapiens
tttttctggtgtcctgaacctggaagttgtgctttttaagttggaatcgaagcctcttaaaatggcagatgactt

SEQ ID NO: 19137 - DNA, 83 bp, Homo sapiens
gctggccggccccggcggcggcggcggccttgggccggtggacgtacccagcgctcgagacaagaggagcagcagcggcaccg

SEQ ID NO: 19138 - DNA, 100 bp, Homo sapiens
ttagttacttcctgtctagagttgtagcttccacctgctgagatctgtatctgtggacctgaatgttgatccctcgcttcagattgacatacctgatgcg

SEQ ID NO: 19139 - DNA, 74 bp, Homo sapiens
actggatcctcggcatagcggacggacacacctcatggactgagaatgaccagtgcctgccaccggaagtgtgt

SEQ ID NO: 19140 - DNA, 51 bp, Homo sapiens
agaggtggtggattcgaatccctacagaagtcttgcatttgaagaaggaag

SEQ ID NO: 19141 - DNA, 74 bp, Homo sapiens
aactgcaaagaggacatagttaccatggtcctcaaattaaagccatggtctgaaaaagttcttttcttgtcgtg

SEQ ID NO: 19142 - DNA, 97 bp, Homo sapiens
gctgcttccctgggctgggcgtcagccgccaccggcagcagcagcaccaccggacgaatgttgtaccatctttgggtaggcagacttccctgacgac

SEQ ID NO: 19143 - DNA, 90 bp, Homo sapiens
ttggcaacatcgctcggttggaacttaattactgcgtccccatgggagtacagacaggcgacagcgttttgctgctgacatcatctccgt

SEQ ID NO: 19144 - DNA, 50 bp, Homo sapiens
tccaggtgaagtagatttttattatgtcatctgggtgattctcagtgtgg

SEQ ID NO: 19145 - DNA, 90 bp, Homo sapiens
gtttgagagtgccgagaaagcatccgtggaaacgctgacagagatgctgcagagcttagagatgaggtttctccatgttggtcaggctgg

SEQ ID NO: 19146 - DNA, 100 bp, Homo sapiens
ctgaggcctggagaggttaaagagacccgttcagagtcctacagtggcagcttctcggtgaactactactagatagacacaacttcacaattatgacaaa

SEQ ID NO: 19147 - DNA, 99 bp, Homo sapiens
tgtaatggcctttcttatactctagaatatacaaagacaaaaggagattctgatgaagaagttattcaagatgaaaatatttacaccagcagctccagt

SEQ ID NO: 19148 - DNA, 90 bp, Homo sapiens
atcccttgcagtgttgctgcttatgtgccaagaggtagtgatgaagagctcacaatgtctctctgcaccaagctccatgactcaggattt

SEQ ID NO: 19149 - DNA, 116 bp, Homo sapiens
tcatagagtggccaagtttccagaaaacagaaatcgaaacagatacagagatgtaagcccatgtaaaagtcttgcagtgaaaaacccgaggacccttaccgcaagtgtcttttgct

SEQ ID NO: 19150 - DNA, 100 bp, Homo sapiens
gtttggaagaagcccttcgtcatgaatgggatctgcagagttcgggcgagaggaggcgagaggcgcaaagggtgaggtggctttgaccccgggttgcccg

SEQ ID NO: 19151 - DNA, 101 bp, Homo sapiens
aagtgattaagcagagaatggagaagaaggttgattccagatcgtcagtatttaaacagatcacatcatgcgtgagtacaagctagtggtccttggttcag

SEQ ID NO: 19152 - DNA, 100 bp, Homo sapiens
tccagggccagcatggcaccgatgccgagaggagacacgcaatacatggtccataaatcaaaatactataaaaaggtatacagtgaaaagaagtgctccc

SEQ ID NO: 19153 - DNA, 87 bp, Homo sapiens
ccaaagagtgtctgacatttcttttgtgcaagatgagcctcaagtgcttctgcattacatattctaccttgtaaatactgttatttg

SEQ ID NO: 19154 - DNA, 83 bp, Homo sapiens
acacgcccctccacatggctgccctcctcctgcttccctggctcatgttgctcacagacatgcaagaaagcacttcagccaag

SEQ ID NO: 19155 - DNA, 100 bp, Homo sapiens
tgttatgttttcatcacttctctccagaaggttatcaagttatacccaaccagcagcaaaactaccaaggaatagttggagttcagcaaccccagagtca

SEQ ID NO: 19156 - DNA, 87 bp, Homo sapiens
caggctaccatggtctacaagactctcttcgctctttgcatcttaactgcaggctgcctgctgtttcccggggagatcatgaaacga

SEQ ID NO: 19157 - DNA, 82 bp, Homo sapiens
cctccaccgagtcgtgctctcgccccaacccgcgcgccagggacccagacatggagctgcgggaagaagcctggtctccggg

SEQ ID NO: 19158 - DNA, 75 bp, Homo sapiens
cgccacgcggccctgctctaccgaggacacattcagctaacgtattttagcaggtggagtgaggttgaagattcc

SEQ ID NO: 19159 - DNA, 100 bp, Homo sapiens
ggcgggccgcgcctggtgatcggctccttaccagctcacctctcgccgcacatgtttggaggatattaccttccaaatgatgatggagaattttatcagt

SEQ ID NO: 19160 - DNA, 145 bp, Homo sapiens
gtcgccgcgtccaagtcggtgactgcccacttggccgcgaagtggcccgagaccccgctgctgctggaggcaaggtggctcaatcccttgtttaaaattggccataaacggagattagaggaagatgatatgtattcagtgctgc

SEQ ID NO: 19161 - DNA, 75 bp, Homo sapiens
gaggaactaaggcggaggaactgagacgtttcgaattccagcgggctacattgagagacctcagctgattcgagc

SEQ ID NO: 19162 - DNA, 75 bp, Homo sapiens
cccgccacccgtgatcgtgcgccgaggcccgcgaggggtcgccgcccaggtgggagtgactgtggcacaaaccac

SEQ ID NO: 19163 - DNA, 83 bp, Homo sapiens
agaaggaagatctcatcagtgcgtttggaacagatgaccaaactgaaatcttttttcagctggtggaatagctacaataaggc

SEQ ID NO: 19164 - DNA, 98 bp, Homo sapiens
agagaaaagtgaaacaattcaggacactgtggcccacaaactctttaacaacttgaaataaatgtgtggacttaattcaccccagtcttcatcatctg

SEQ ID NO: 19165 - DNA, 90 bp, Homo sapiens
caaatagcaaatgtacttggaaaatcacaatccatttgaaccacagcgacgtctccccgcgaagaaaagtcgacaacaacttcagcgaga

SEQ ID NO: 19166 - DNA, 83 bp, Homo sapiens
cgagcaatttccacctctgtgtgtgtacgagctcatgctgatgcttttttcaaagccgctataagccttgttccggaagttcc

SEQ ID NO: 19167 - DNA, 100 bp, Homo sapiens
cccgtgtcctgcaggtattgggagatccacagctaagacaccgggacctcctggaagccaaaaatggtcctggtccagcctcagatcatcaagacagatt

SEQ ID NO: 19168 - DNA, 76 bp, Homo sapiens
catctggacacccttcgcgttgttgctcaggagggtgtccgcaatgttgccagtgtctgtctgcagattggctacc

SEQ ID NO: 19169 - DNA, 95 bp, Homo sapiens
agccctccagctacttcctgcctgccatgccccaggtggacatgatctcactagccaagcagatcatcgaagccacaccggagcggattaaacga

SEQ ID NO: 19170 - DNA, 75 bp, Homo sapiens
gccctcctctccggctttgccatggctccgtatgtggatgtgatctgtttgaacagctactactcttggtatcac

SEQ ID NO: 19171 - DNA, 96 bp, Homo sapiens
cagcaggcctcgaaagcaatcggtccaaattagaacagctgtaaagaagaaagtccagctgttgttaaaaaggaggaaaaagtgcttcatgaatta

SEQ ID NO: 19172 - DNA, 83 bp, Homo sapiens
tcggctgcgggaaatcgggctgaagcgactgagtccgcgatggagggcaaaataacatggcagccagacgaattacacaggag

SEQ ID NO: 19173 - DNA, 75 bp, Homo sapiens
gcagcccccggagacagcggcacagaggtgcttctgccaggagcctgcagacagggggatttgcctgggaaggag

SEQ ID NO: 19174 - DNA, 95 bp, Homo sapiens
gcgtcccgctcgctgggagagagtcgtgagatggagaataaagaaactctcaaagggttgcacaagatggatgatcgtccagaggaacgaatgat

SEQ ID NO: 19175 - DNA, 85 bp, Homo sapiens
gttcttgtttgtggatcgctgtgatcgtcacttgactactggacttggaggatcagcagttgcaggtcatgcctcagacaagatt

SEQ ID NO: 19176 - DNA, 90 bp, Homo sapiens
agcggcgcatgctactgattcagcacttagtatggactttctgtcagattttgagatgatgttgcagcgaaaaaagagcatgagtggcaa

SEQ ID NO: 19177 - DNA, 94 bp, Homo sapiens
attttgaagtacaccgtggtgacattgtatcattggtttggctgattgcaattctggcccaactcaaccctctctttggaccgcaattgaaaaa

SEQ ID NO: 19178 - DNA, 74 bp, Homo sapiens
ggagaatgatggcgccactgccttggcagaagcttttaggagggctgtgctgaagtttgctgctgccactggag

SEQ ID NO: 19179 - DNA, 83 bp, Homo sapiens
aggaggaggaggggctccggctggtctgtggtgagcaaattgtggctactaatttgccccctgaagatcaagatggctctggg

SEQ ID NO: 19180 - DNA, 75 bp, Homo sapiens
ttttcgtgccgtgcatctgcacagcggagaggagctggtgtgcaaggtagatatagttgtaggtactccgggaag

SEQ ID NO: 19181 - DNA, 88 bp, Homo sapiens
ctggaggaggagctgcaggaagcgatccggagggcgcagaaatggtggagtcaatgaagaaagtagcagggatggatgtggagctgac

SEQ ID NO: 19182 - DNA, 83 bp, Homo sapiens
agaacgtgtttttcgggagagcaaaggctgtgtctacggcagcctggggatataacaatgcagatcttcgtgaagactctgac

SEQ ID NO: 19183 - DNA, 98 bp, Homo sapiens
aacttggagagagagaagtgactttagttcatgtgacagactggatagagaagaaactggagcaagagtttcaggttttgggatttgagattgacgcg

SEQ ID NO: 19184 - DNA, 74 bp, Homo sapiens
ggatttgttaaggattccaagtaactcttatttgggacaggccttcagtatttggcatcacctttacatggagc

SEQ ID NO: 19185 - DNA, 75 bp, Homo sapiens
gacgaaacaataaagaccggaagctgagtttttatccgaatctttgtgacattctctctcagcattctttatccc

SEQ ID NO: 19186 - DNA, 50 bp, Homo sapiens
gagctggacaccctcctggactcgctggatgccttcgtgaagatcgtgag

SEQ ID NO: 19187 - DNA, 89 bp, Homo sapiens
ccccaagttctgcagccagtgcggagagaggctgcctcctgcagcccccatagcaggtgtggatgaggtcaccattgtcaacattttga

SEQ ID NO: 19188 - DNA, 100 bp, Homo sapiens
ttttgagccttacggagccgtctaccagatcaacgtcctccgggaccggagtcagaaccctccgcagagtaaagatgccgcatcctcgaaggtaccactc

SEQ ID NO: 19189 - DNA, 100 bp, Homo sapiens
acctcgcgtcgcgcccgggaggaaggaacgaggcaaggagctaaagcagcgtgcgttcagccctggggattggagaatccatgttgaccaaatgcaccag

SEQ ID NO: 19190 - DNA, 83 bp, Homo sapiens
tcacctttgatcccctgacctgcattaccttggtattaaaaagtgtcagcaaactgcattgaataacagacatcctaagaggg

SEQ ID NO: 19191 - DNA, 98 bp, Homo sapiens
agaggagcgttggagaatggaaatgagcccgacggccatggaggctgaagagacgatggaatgccttcaggagttccctgaacatcataaaatgatcc

SEQ ID NO: 19192 - DNA, 74 bp, Homo sapiens
cctgggctttaccatctttgtggctgtgcttgccaggcctggctccagaactgtggctgcaccatctgtcttca

SEQ ID NO: 19193 - DNA, 100 bp, Homo sapiens
gcaaaacctgtccactcttatggcaccaacatataagaaacttgcacctgatgcatataataatcaggtgggacgctcgtccctgctggtggggaatctc

SEQ ID NO: 19194 - DNA, 90 bp, Homo sapiens
cgtgtctcgaccgcgtcttctgagtcaggattatatgcgtcaggcaggagaagtgacttatgcagatgctcacaagggacgcaaaaatga

SEQ ID NO: 19195 - DNA, 95 bp, Homo sapiens
ctttttcatgggccggctcccattgctccggcgcgttctcaagggcttgcagctgatctgtctcgtaactgtgtaatcaaggaactagcaccaca

SEQ ID NO: 19196 - DNA, 100 bp, Homo sapiens
cagagcctcagcaggagcctgttctcatcaccatggcaacagacttcagtgccctgaacggttagagaaattaatgaaggagctccaccaggtgccttca

SEQ ID NO: 19197 - DNA, 100 bp, Homo sapiens
tgctgaggtcatagccagaaggagtttccaaagggtgtacaactatgagcctttgacacagctcaagaatgtcagagcaaattactatggaaaatacatt

SEQ ID NO: 19198 - DNA, 97 bp, Homo sapiens
cgtgtctcaggagcttgatccagacctctacaagcaaatggagaagttcaggaaggtgaaaagagatttgaatgcccggaatgttctaaaaggttta

SEQ ID NO: 19199 - DNA, 100 bp, Homo sapiens
gacgttccctcagcctctgcccaaagaaagaaggagcaattctgtggtgttcttggtcacacatttatggagtttctgaagggcagtggagattactgcc

SEQ ID NO: 19200 - DNA, 74 bp, Homo sapiens
aaaaaacaggggcagaagaacaaggaagcggagaggcaagagattctttcttgtggagaagttattcatgtgaa

SEQ ID NO: 19201 - DNA, 50 bp, Homo sapiens
gcggcacctacggggacgtctataaggatcttaaatgtatttcggcattg

SEQ ID NO: 19202 - DNA, 102 bp, Homo sapiens
tgcggtcgctctgaaatcgacgagctgatcaaggagatgaaaggttgtatcaaagttcttaaggaccaacctcctaatagtgtggaaggtcttctaaatgct

SEQ ID NO: 19203 - DNA, 75 bp, Homo sapiens
caaaatcagaggcatactttataggcagaagctcctcctggggtagagacagatcttattgatgttggattcaca

SEQ ID NO: 19204 - DNA, 75 bp, Homo sapiens
gcaactgtgcagtgttcccactgcaaactacggatggggttttgctgttactgctcagtgtagtcacaccttgaa

SEQ ID NO: 19205 - DNA, 71 bp, Homo sapiens
ccaagctatcttctcgctagcagggcaaactctttgattctacaatagctgatgagggaacatggactttg

SEQ ID NO: 19206 - DNA, 75 bp, Homo sapiens
atgcttaggccccgtaggcaggaggcgaaggaggaggacgcaggttttgagcaaaattttggactgtgaagcaag

SEQ ID NO: 19207 - DNA, 83 bp, Homo sapiens
cgtgccgcgtctgtcccagagctggggccgcaggagcggaggcaagaggtgagaagccctaccactgcaactgggacggctgc

SEQ ID NO: 19208 - DNA, 90 bp, Homo sapiens
ttgaataagtgttttaagaaagtggacaaagagaggagtcagttttttgtagcatcagatccaacagttaaaacagatcgactgtggcac

SEQ ID NO: 19209 - DNA, 120 bp, Homo sapiens
aagaagcagaaagttgagcgcattgcatcacatgattttgaccccacaggtgtcagctgtgatgcatgtttaaaaggaaattttcgaggtcgcagatataagtgtttaatttgctacgat

SEQ ID NO: 19210 - DNA, 74 bp, Homo sapiens
gggcgtggggatggccaccagtttccggacagcttcgtgctgggtcactacaggaaaagatatcttcattaaag

SEQ ID NO: 19211 - DNA, 50 bp, Homo sapiens
ctcaattgaagcaagagatttctgaatggccctcgggaccaaggatcacg

SEQ ID NO: 19212 - DNA, 50 bp, Homo sapiens
ctgccttatgggacagatcaagttcaaaccttgtactactcagctgatca

SEQ ID NO: 19213 - DNA, 100 bp, Homo sapiens
aagagatatctgcaatgatgtactgggatgactctgttccagaagacaacatctggagaggcatcctctctgttattttcttctttcttatcatcagtgt

SEQ ID NO: 19214 - DNA, 90 bp, Homo sapiens
gaagatcatcaagcgcaagcacaccctaccgaattacaagatcaggtctgtgtatgatgaccaaccaaatgcgcacaagaagtttatgga

SEQ ID NO: 19215 - DNA, 82 bp, Homo sapiens
ccgaggccaggagccaggggcccagaagaggagaagaagatgattctttggccatcaaaccaccccagcaaatgtctcggaa

SEQ ID NO: 19216 - DNA, 100 bp, Homo sapiens
caagagtataatgtctatggtgaagtcttttgtacagtggttagccctccaggggacccctctctcagccaccctctctctggtgatgtcacagtgctgc

SEQ ID NO: 19217 - DNA, 98 bp, Homo sapiens
tataagcatgggaccctgcgcccgggggtcaccaatgaacaggatagagattccttctgccatcagatgtctttctgcttgactgaactgcacctgtg

SEQ ID NO: 19218 - DNA, 100 bp, Homo sapiens
cggcccccgcagcgggacccggaaatgcaccagtgccggagtgacgagtacaactgcagttccggcatgtgcatccgctcctcctgggtatgtgacgggg

SEQ ID NO: 19219 - DNA, 95 bp, Homo sapiens
ccagcacctttcggcttctgagacggcggcagcagcggcattcaggtgtggacactgccagcggctgcagccgacttggaatgacctgggagaca

SEQ ID NO: 19220 - DNA, 100 bp, Homo sapiens
cggggtcttgtgggagagattatcaagcgttttgagcagaaaggattccgccttgttggtctgaaattcatgcaagatctatcttgggatcccatggctt

SEQ ID NO: 19221 - DNA, 75 bp, Homo sapiens
cggcgatatgatgatcctgaagtacagaaagacatgaggagatgttaaagtaacccatcttgcaggacgacattg

SEQ ID NO: 19222 - DNA, 51 bp, Homo sapiens
ggggcggcggccacgccaaggacgggttacaagatgttcacctaagattga

SEQ ID NO: 19223 - DNA, 51 bp, Homo sapiens
cagcctcccgagcggctgggattacagggtctgggatccccaaggcctggg

SEQ ID NO: 19224 - DNA, 82 bp, Homo sapiens
gtcccaggtcaagagcctctgcgagaaggtgtgttccagagaacaagccttcagacatttgctatattgacgctgagctgtc

SEQ ID NO: 19225 - DNA, 75 bp, Homo sapiens
gcgttggtggcgacggccgagtcaggtgtgttccagagaacaagccttcagacatttgctatattgacgctgagc

SEQ ID NO: 19226 - DNA, 101 bp, Homo sapiens
tgctctatatgtgatttgccagttcattctaataaggactgcttgcattaaaggacttcctcatcctttttttcatgaaactgagcttgcttaatcagaga

SEQ ID NO: 19227 - DNA, 100 bp, Homo sapiens
gatggaagcataagaacatgagaactgcgactcagcatgcagaagggacgtccagatcggtgacatcgtcacagtgggcgagtgccggcctctgagcaag

SEQ ID NO: 19228 - DNA, 87 bp, Homo sapiens
ggggagctgcgacgcgcaagggctgcggagccgcgggccggcgagcgcgtcgccaccatggactgagcagggggaggaacatttaag

SEQ ID NO: 19229 - DNA, 101 bp, Homo sapiens
caaggagtcacggatcggattcctcagctacgaggaggcgctgaggagaggtttggtgcacctcgatttggaggaagtagggcagggcccttatctggaaa

SEQ ID NO: 19230 - DNA, 87 bp, Homo sapiens
gacattgcttcgggaagccatccatttagccaggtctctaattaacagaagatggcaaagcccagccacagcagctatgtccttcag

SEQ ID NO: 19231 - DNA, 82 bp, Homo sapiens
cagatagcacctgaggacagaacatatcaggaagaaggtagataatgactataatgcccttcgagaaagactcagcaccttg

SEQ ID NO: 19232 - DNA, 100 bp, Homo sapiens
cttcgcagccagctgtaccagggggacttcgtgcacgccatggagggcaaagagaagtcattcagaattcaaaagaagttctaagtttattgcaagaaaa

SEQ ID NO: 19233 - DNA, 89 bp, Homo sapiens
tctgaagcctggaaacgaggcactcagttggaagagtccagcaagtgggctcgggatgagtttgaaggcctcttcaagcagccagcaga

SEQ ID NO: 19234 - DNA, 100 bp, Homo sapiens
tgaacttagtgctatacaagaagtagagtcaccagcaattggcagaacttctatactagaacagaaactgttcatacttggtgcgctgtggactcttgtg

SEQ ID NO: 19235 - DNA, 115 bp, Homo sapiens
cttgatcaggtggaacagattcagaaggagcaggattaccaaagggtgctggagctggcaggtaatgcttctaaggatctcaaagtaaagcgtatcactccgcgtcacttgcagc

SEQ ID NO: 19236 - DNA, 98 bp, Homo sapiens
gtggaattctccgtccctttccagggagggaacaaagcccacagcaccgggatttcccagatgacccaggcatgcagtgggacacagagcacgtggcc

SEQ ID NO: 19237 - DNA, 71 bp, Homo sapiens
gccaccaccaccgccgctgccccggctgcctcctccctgaggatctcactctgttgcctaggctggaatgt

SEQ ID NO: 19238 - DNA, 82 bp, Homo sapiens
cggtgggactgcctcgactggcagcgcgggaaacgtcaaactcgagccgagaggccccagcaacatgcagctacaattccag

SEQ ID NO: 19239 - DNA, 110 bp, Homo sapiens
ccgagttcccggaggtctctcgcgggacctctctcaccgccaccgagatcgagatggtgatcatggagcgtagcaagctctcagagctggccgccagcacctccgtgcag

SEQ ID NO: 19240 - DNA, 87 bp, Homo sapiens
gctttccgggagactggagtcgaaggccgtgaggtgatgatgaacagtctacacagatggctgcaagttgggaagatgataaagtta

SEQ ID NO: 19241 - DNA, 100 bp, Homo sapiens
accaacaacaccacaataatccacagccaagccccatggctgggggttatggagtgatgggtgacgatggttctattgattatactgttcacgaagcctg

SEQ ID NO: 19242 - DNA, 101 bp, Homo sapiens
cctgtcggcagactggtgacttcacttttgagtgcaactgccttccagtgacagtgctggccattttccatgaactgcacgtcgaccctgacctgtacaca

SEQ ID NO: 19243 - DNA, 76 bp, Homo sapiens
agggaggatgtcgggacaccccggaagctgggaaatggtgaatgaaaactttgccattgatttgatagcagagcag

SEQ ID NO: 19244 - DNA, 96 bp, Homo sapiens
gctactatgggccgagtggcagggacgacgcccagtattgactcggagacaaaaagaggccaagaccaagagtgacagtgggacagctgcccagac

SEQ ID NO: 19245 - DNA, 90 bp, Homo sapiens
gcaggtgaccaccctccagctacccccggaataagtttgtggagtttgacatgaagccagtctgtaagaagtgctatgagaaatttccat

SEQ ID NO: 19246 - DNA, 75 bp, Homo sapiens
ctctgactcccaaagccccggctggggcccggccagcccgaggcagaggcagaggtgaatgtggtttctaccaaa

SEQ ID NO: 19247 - DNA, 100 bp, Homo sapiens
tacagcactggaaaacgaaaagagaatcccatcgaagacgatttgatctttcgagtgggccaagcaaataaagtagccaaagaagctgctaacagatgga

SEQ ID NO: 19248 - DNA, 75 bp, Homo sapiens
cgaaattgtcacctatgggaaaattccctacccagggatcgaaaattgtacaatttgggattaaaaggctattac

SEQ ID NO: 19249 - DNA, 74 bp, Homo sapiens
tgggactggtttgaatccttccttgatgatgaagaggctattgattactatttgaaagcgctaaggtcattggg

SEQ ID NO: 19250 - DNA, 96 bp, Homo sapiens
ctcttcaaagttcttctgtctccagattacctcccagccatgcggaggaggagaagttctgatccccttggtttctaagcatgaattgaggaacag

SEQ ID NO: 19251 - DNA, 90 bp, Homo sapiens
gccaggtcaggatattttggacatctggtttgatagcggaacttcatggtcttatgttcttccagagtcaagaaattggagcatggctat

SEQ ID NO: 19252 - DNA, 74 bp, Homo sapiens
cccaggctcaagcagtcctaccatgtcagccttcccagtagctgggaccacagtcagattgttcgatatggtga

SEQ ID NO: 19253 - DNA, 100 bp, Homo sapiens
aaaggcctggagagtcgtgcggacagcattgggagcggccgagccatcccaattaaacaggtgtgacgtatgcagccaaaggctactttgacgccctggt

SEQ ID NO: 19254 - DNA, 90 bp, Homo sapiens
tgatgctgtaattgctgaacttaaaaagcagtctaaacctgtgaccacccctgaagaaattgcacagtgctcccaagaagatattgctga

SEQ ID NO: 19255 - DNA, 75 bp, Homo sapiens
cctgcgtggggggccgccaccggccgccgccgccgccgcccaggcgcagatcaggatcctcatgaccagccaaag

SEQ ID NO: 19256 - DNA, 100 bp, Homo sapiens
ctcatcaatgcagttgaggcctcctgtatccgaacacgcaacggcagcctttaacagttgagcacatgtatgaagacatcagtcaggatcatgtgaagaa

SEQ ID NO: 19257 - DNA, 100 bp, Homo sapiens
tcaccctgcctcccctgcgtcccgccaccggccgcttctgtcctcggtaactgtgacatttgatgatgtggccttatatttttcggaacaagagtgggag

SEQ ID NO: 19258 - DNA, 80 bp, Homo sapiens
ccggatctcagcccaggacgccaagcaagcaggtggtgaacatcccgtccttcattgtccgcctggattcccagaagcac

SEQ ID NO: 19259 - DNA, 100 bp, Homo sapiens
agacataatggaacaagaacaaaaactgaaagaacatcacacagttgaagctccaggaggtcaaaagggaaacatctgggaacagattttacgaataccc

SEQ ID NO: 19260 - DNA, 100 bp, Homo sapiens
ccaaggacagcttttttcctgcaagaaatacaaacctggtcgatgtgatgatattttgaaatggaagcctcccagtctgaattctgtggattttcgtcta

SEQ ID NO: 19261 - DNA, 75 bp, Homo sapiens
agtatgtcattaacaaggaacggaaaggagattacttggggaaaactgtccaagcaattgtgggcacacttgaag

SEQ ID NO: 19262 - DNA, 75 bp, Homo sapiens
aaaagtccttctggggcaggatgaggcgtgcaatggaattgagttttgccctggtaaatgggaataatatccgag

SEQ ID NO: 19263 - DNA, 75 bp, Homo sapiens
ggagatgctgatcgggacccccccgcagaagctgttccatttcctccaagtcaccggcttacagcaaaagaagtg

SEQ ID NO: 19264 - DNA, 75 bp, Homo sapiens
cgacaagttcaagcagctgcttgccggccccaacacggaccttgaatacagattctgttcatcttgctctgaaat

SEQ ID NO: 19265 - DNA, 75 bp, Homo sapiens
aaggttgaagttcaagagctcagaccctaaaaacagctttgctgagccatcaaggtctaatggaagcatggttcg

SEQ ID NO: 19266 - DNA, 101 bp, Homo sapiens
ggtgctgcgcaagaagggccctacggccgcccaggccaaatccaagcagggggggccctcagcctcttggccttgaacgggctgttcatcttgattcacaa

SEQ ID NO: 19267 - DNA, 100 bp, Homo sapiens
gcgaatggggctcacgtcgagatgaatttcacccattcatcgaggcacttcttccacatgtccgtgcaattgcctatacttggttcaacctgcaggctcg

SEQ ID NO: 19268 - DNA, 82 bp, Homo sapiens
ctgtggacatcagcgccatccccgagcagcggtggaagctgatgacgacaacccccccgtgtcttttgtgaagttctccccg

SEQ ID NO: 19269 - DNA, 82 bp, Homo sapiens
gagaacgtccactgcgggccggcgaaagctggctgaagctcagggccctgtctgctctgtggactcaacagtttgtggcaag

SEQ ID NO: 19270 - DNA, 75 bp, Homo sapiens
ggcagcgctagcaggaggaaccaccatgatctagaggaagaagctattcagttggatggattaaatgcatcacaa

SEQ ID NO: 19271 - DNA, 75 bp, Homo sapiens
acaaatcacacgcataatggatgaaaggaaccgacagctcgggttcatgacgctctcgatattcctgtgcagaaa

SEQ ID NO: 19272 - DNA, 75 bp, Homo sapiens
gcccggggcccaaaaagtcggacatgtgcgagcctagagtcctggggagcttctgtccacctgtcctgcagagga

SEQ ID NO: 19273 - DNA, 74 bp, Homo sapiens
tactgtggggccgcggccggaccgagcgcctcgacctcggtctgaggtcgccttttaaaaaaatccctgcggtg

SEQ ID NO: 19274 - DNA, 100 bp, Homo sapiens
caggaaggcatgaatatgcattcagcttcgagcttccacagacgtcacatgtgccaatttaacgaacggtggaaagtcagaacttctgaaatcaggaagc

SEQ ID NO: 19275 - DNA, 75 bp, Homo sapiens
ggcaagaactgctggagacacactggatgtttttaccatgttcacaagaatgtactttaaacatgtactctttga

SEQ ID NO: 19276 - DNA, 83 bp, Homo sapiens
gtgtgctgggctggtcccccttgaccctgactaaagcttgaaatgctacatttccaaggtgaagatgtgtgggcacatgttat

SEQ ID NO: 19277 - DNA, 100 bp, Homo sapiens
tgacgctctgaacatcatcgacatggccctgagtgaatacccagaaaatttcatatgcacaaagcagggtcatcagaagcctctcgattcaaaagatgat

SEQ ID NO: 19278 - DNA, 80 bp, Homo sapiens
ccaagatggtgaagcagatcgagagcaaggttaaagatcgaggtccggaagccactaggagattttttaattggttttat

SEQ ID NO: 19279 - DNA, 100 bp, Homo sapiens
gatgccggccgtgagcctcccgcccaaggagaatgcgctcttcaagcggatcttggacagaatctggatagtatgcttcatggcactgggatgaaatcag

SEQ ID NO: 19280 - DNA, 74 bp, Homo sapiens
aggcccacgccagacacgacgtctggcaggaacctcggcctcagagagggaccacagagcaccagcctgcatgg

SEQ ID NO: 19281 - DNA, 96 bp, Homo sapiens
cgaaataccaccggaactggtcgaatgaggcacctaaaaattgtataccgcagattcagcgctcctttaccctcatcgtggaggcctgggactggg

SEQ ID NO: 19282 - DNA, 101 bp, Homo sapiens
acttgggctcagagcaaggatgcgtgaaattgtccatattcagattggccagtgtggcaaccagatcggagccaagcctctacggcagacacatgcaggcc

SEQ ID NO: 19283 - DNA, 51 bp, Homo sapiens
aaagatctcgtacaagatccttctttggttagtcagcaacataaaatcaac

SEQ ID NO: 19284 - DNA, 100 bp, Homo sapiens
tatgaacagtctggccacctctgtattcagcatagctattcctgttgatggtgatgaagacagtccgaggatcagaaggactgtacatggtgaatggacc

SEQ ID NO: 19285 - DNA, 97 bp, Homo sapiens
atatcctgacatgtgacaatgaaattgaattgaagaaaattgcacgtaatcacccaaatgccaagccaagttaagccgattatgtgaacaagataaa

SEQ ID NO: 19286 - DNA, 102 bp, Homo sapiens
aatgatttttccagaaggaacttgtacaaacaggacctgcctaattaccttcaaacctggctgctcctgcgtttggtggatgatttcttgttggtgacacct

SEQ ID NO: 19287 - DNA, 95 bp, Homo sapiens
ggacacgccccgtgatgtggctgctcgaattcggaacagcatatgccatatatgagctggctgtggcttcatttcccaagaagcaggagtgactt

SEQ ID NO: 19288 - DNA, 80 bp, Homo sapiens
gattccaagtaactcttatttggtcttgggcgtctttggtactggcttttttaggggtctgcctggggattacccttgct

SEQ ID NO: 19289 - DNA, 75 bp, Homo sapiens
ctggtacagcagcttaagcagcaggtttgaagactgcttcattctgcctctagtaccagcggtttctctgttctg

SEQ ID NO: 19290 - DNA, 74 bp, Homo sapiens
ccgccaccatgcccaagagaaagcccgcggcgccatggctcacgtcggctcccgcaagcgctcgaggagtcgca

SEQ ID NO: 19291 - DNA, 100 bp, Homo sapiens
cagttctgcagggaccgagggcgagacacgcctgggcccaggtgtggcgtctctgtccccatctggttttaggtatttacttatgggatgtagaaggcag

SEQ ID NO: 19292 - DNA, 83 bp, Homo sapiens
aaaaacaagtgtgtgcatctggctgttagaagaattcatgctcatccggggtttgaaagtattcttgaagggctgtttggacc

SEQ ID NO: 19293 - DNA, 100 bp, Homo sapiens
atttattggaactggagctactggagcaacactgtatctcttgcgtctggcattgttcaatccagatgtttgtgtgtgcaggaacggagaataaactgag

SEQ ID NO: 19294 - DNA, 90 bp, Homo sapiens
tggcttccgaggagctgtacgagtattggatacaaatgaccgatttctacgaaaaataaccatcgggcagggaaacacagagaagggcca

SEQ ID NO: 19295 - DNA, 96 bp, Homo sapiens
gatagctctgtttgccgagattacgtcttgaactgttccatccttaatcctttgttaacaacaccttccaccatgaccacctcagcaagttcccac

SEQ ID NO: 19296 - DNA, 76 bp, Homo sapiens
ggccaatcatcaagacaagccagcagctcgctcagtacaagaggtatgccattgcattggccttaagggaaaagca

SEQ ID NO: 19297 - DNA, 97 bp, Homo sapiens
gactctgaggctgatatgcaatgtcacttacaacattaatcagatactgcatttaagagcattgaatgaaatgtggaaatgtcaaaatctgctccga

SEQ ID NO: 19298 - DNA, 101 bp, Homo sapiens
cgccctgttcgagctgtgcgggcgggcggtgagcgcccatatgggggttctggagagcggggtgtgggttttctttttaaaagcggaaggagagttttaca

SEQ ID NO: 19299 - DNA, 98 bp, Homo sapiens
gccagaggggaaagtatttgtggtaataacccttaccgggagtttcactgaaggacccagatgatgtggtaccagttggccaaagaagagcctggtgt

SEQ ID NO: 19300 - DNA, 88 bp, Homo sapiens
ttggacctggttggagacagaaccccgacctcagagaagatggatgaggtgttcgtactggcgttcaccttcctcatcctcttcctcg

SEQ ID NO: 19301 - DNA, 100 bp, Homo sapiens
cagcgcggcagagtcatggggtacctaagactaatgctttctgtggacaccactgagctctgcctcaactccaccctctgcgaccggaggactatgcccc

SEQ ID NO: 19302 - DNA, 75 bp, Homo sapiens
tctgtatcctgtagcatcaccatctcttcagcaactggtagtagaggaaagtgactattttaccccacagggaga

SEQ ID NO: 19303 - DNA, 101 bp, Homo sapiens
aatggcggattaaaacctgtagatacgtttggctttaggagtctggacatggatttgattgacatactttggaggcaagatatagatcttggagtaagtcg

SEQ ID NO: 19304 - DNA, 97 bp, Homo sapiens
aattaatgaagctcttgcagaaaatccaggacttgtaaacaaatcttgttatgaagatgctcaggtacctgacaatgatgagcagtttgtaccagac

SEQ ID NO: 19305 - DNA, 80 bp, Homo sapiens
cggggaaccttggggagaacacgggacaccgcggaagccgggaaatgagcttcttcgagacaccttcacttccctgggct

SEQ ID NO: 19306 - DNA, 50 bp, Homo sapiens
cttcatcctcaacgccctcacctgtgccctctggtggtcagaagatgctg

SEQ ID NO: 19307 - DNA, 101 bp, Homo sapiens
ttccactcaacggagctgtggccgtgaagatgcgcgccttccaggcccaggctggctggctgcagcatgactttgggcacctgtcggtcttcagcacctca

SEQ ID NO: 19308 - DNA, 96 bp, Homo sapiens
caagatgtggcagaagaacaagaagttgagaccgagaatgtggaaacaggttttcctttggaatatggataaatacaccatgatacggaaactaga

SEQ ID NO: 19309 - DNA, 98 bp, Homo sapiens
tacttctgatgcagctgtggacctcagttcatttaaaaatgtgcaacatctggagcttcccaagggtagggctctacttcactgggcctgtgatcgag

SEQ ID NO: 19310 - DNA, 75 bp, Homo sapiens
ctcacaccagacctacggagggagctggaaattcctgacgttcattgatctggttgactgcattcagccagtgcc

SEQ ID NO: 19311 - DNA, 82 bp, Homo sapiens
ggcagagcaaggggcttacgcagaaggacctggccacgctggtaggtgagtgctgtcctcggctcactttcctcaagctctc

SEQ ID NO: 19312 - DNA, 150 bp, Homo sapiens
ggaaagggaagatggaaaagaagacatttcagatcctatggacccgaacccttgtagtgcaacatacagcaacttagggggcagctggcattttatgctatgtgggagcctatgtcttcatcacttatgatgactatgaccacttctttg

SEQ ID NO: 19313 - DNA, 98 bp, Homo sapiens
gcccgggacccggccagccgtggagacaggtacatgctggtcacctacgacgaacccccgtactgcatcaaggagatctattgggaaactgattataa

SEQ ID NO: 19314 - DNA, 82 bp, Homo sapiens
ctacccttatcccggagagctgacaatgatgaatctcagaattctcaagaaatttgaggaagaagatttggatgacatttta

SEQ ID NO: 19315 - DNA, 100 bp, Homo sapiens
agaagttcgattcactaatgtcccagaaaggacacaaatagatgtaggcagaatacctttacagaggttaaaattgacctttttgctacttgatgagata

SEQ ID NO: 19316 - DNA, 82 bp, Homo sapiens
gggtcggcgccgagtgggaggatggcggaagccgtcctcatcgtcagcgggaacctcagcttcctgaactggctgactatgg

SEQ ID NO: 19317 - DNA, 100 bp, Homo sapiens
agcctccattctccatccgctgcgtggaggtgtcggacgatcaggtggtgacgctccgagaggagcagcaccagcagcagattgccttctcggaactgga

SEQ ID NO: 19318 - DNA, 75 bp, Homo sapiens
cggcgcttggctggtggggcccgcggcgggattttcccgggcggcgagagcggaagttctactacatcaccctgc

SEQ ID NO: 19319 - DNA, 100 bp, Homo sapiens
ggagctgcgagaagagagagcccgggaagagatgcagcgctatgcggaggatgttggggccgtcaaattaagcctgatcaagatgacaacctcccaaaag

SEQ ID NO: 19320 - DNA, 83 bp, Homo sapiens
actacctggtgcctctagtgaaaagaacaagaagtcttaccctcaggtcaaaggagttctgggaaatcgttcattcatttaca

SEQ ID NO: 19321 - DNA, 101 bp, Homo sapiens
ctggctgtcttccacctggactcggaggccagcgtgaggctcacagccgaacaggcacgcttcttcctggctcccagccccattgccaataccttcctcca

SEQ ID NO: 19322 - DNA, 90 bp, Homo sapiens
ggagacgcagatgtggacttgaaagaagctgcagcggaggaaggcgagctccccgaagtgcataccaacagctgtgacaacatctcccag

SEQ ID NO: 19323 - DNA, 100 bp, Homo sapiens
cagcagactcaaccctatgctgtctaccctcaggcaacccaaacgtatggactacctccttttgcctccaggaccactggctgcccatgagagacgaagg

SEQ ID NO: 19324 - DNA, 50 bp, Homo sapiens
ctgcccgaactcccggcccgaactccagaaaagcctgccattgctccgcc

SEQ ID NO: 19325 - DNA, 83 bp, Homo sapiens
caggaggtgccggtggccgcgctcggacccgagaggaggttcagatgagcccctgctgacttgagagagacagagagaccacg

SEQ ID NO: 19326 - DNA, 51 bp, Homo sapiens
cccagctctctctgggcatctggaaagacgttggaacttgccaggaatcca

SEQ ID NO: 19327 - DNA, 100 bp, Homo sapiens
cgtgctgggggacggcgcctccgggaaggtgaattatgtaacctcattacgctggatgtagctcacaatcaacttgaacaccttccaaaggagattggaa

SEQ ID NO: 19328 - DNA, 98 bp, Homo sapiens
tcgaggccgtggcccagaggctggagctgcgggagcgcaaatctgtccaaggctgcctggggagcattggagaagaatggcacccagctgatgatccg

SEQ ID NO: 19329 - DNA, 83 bp, Homo sapiens
gttaagtcccccaaagatgagatttacctgtgagatgtttcatcccaacaattgatgacacagatgccatggaagatgtccat

SEQ ID NO: 19330 - DNA, 75 bp, Homo sapiens
catgcatgacgaggctgtgacgcaccttgatgaccagatcctgcagctcacagggctgacagtgagtgacgtgga

SEQ ID NO: 19331 - DNA, 75 bp, Homo sapiens
gttagctgtctgttgtctgtagcccaggtatggatcctggcgggagccagtcaacccctattatgtcaatgccgg

SEQ ID NO: 19332 - DNA, 100 bp, Homo sapiens
atcctaatgacagtctccaaattcgcctccatctgtaccatgtctgaaaacttagagaatacagtaatcataccagatatcaaactacatagcaatcctt

SEQ ID NO: 19333 - DNA, 100 bp, Homo sapiens
cgcggcgcccctcggcctcggagcaacgagcgcagcgccgaaagctcctgctgcttctgtaccccgcctgtccctcccagctgcgcagggccccttcgtg

SEQ ID NO: 19334 - DNA, 50 bp, Homo sapiens
ggagaatagagtacattgaagctcggacaccttggaagagcttaaggaaa

SEQ ID NO: 19335 - DNA, 90 bp, Homo sapiens
agaaggagaacaagccaggaaaaccccgaaaacgcaagaagcgtcacttttcatccaaggatttcaaagtgctttacaaatacgcactaa

SEQ ID NO: 19336 - DNA, 100 bp, Homo sapiens
ccaagaccgttttgcccaagaaggagaaaatgaagctgaggcgtgagcaatggttgcagattccagatttcggaaggttcacgagtgttgccgacacgcc

SEQ ID NO: 19337 - DNA, 50 bp, Homo sapiens
tttgccatctttgttgcagagaatcggaactgagctctccatagacaaac

SEQ ID NO: 19338 - DNA, 82 bp, Homo sapiens
cggagatccagtgggaagagccggcggctgcccgggcgaagactatgaccgtctgaggcctttatcttacccaatgaccgat

SEQ ID NO: 19339 - DNA, 80 bp, Homo sapiens
aaacagcagcttcagaagcccaggcttaaatgataatcccagcccctggatctatcgagagctcaaaagatccttggata

SEQ ID NO: 19340 - DNA, 90 bp, Homo sapiens
gtgccgtttaacctttattgtggtggagtccaccccgctgtggtgcttttgaagatgatgatatcacgcacgttgaaggaagtgtagatc

SEQ ID NO: 19341 - DNA, 75 bp, Homo sapiens
ctcctgaaattaggaaaattgccactgctttataagggtgaagttgaacaaattgctatgatgaaaccaaaaggc

SEQ ID NO: 19342 - DNA, 50 bp, Homo sapiens
acatcccagccggtgactgcagtgaggtttctaccatgaatgaaatgaag

SEQ ID NO: 19343 - DNA, 96 bp, Homo sapiens
tcagaatgaacgctgcctacacatgttcctgcaagaggaggcaattgacaggaactacgtcccggggaaggatgacgtcatgatgccccagcgggt

SEQ ID NO: 19344 - DNA, 100 bp, Homo sapiens
ttcttattgcagcaaaaattcccgtaccaatgtcagtgctaggatgccagaggaacaagcattctgtgttttggtgaaaatcatgtacgactatggtttg

SEQ ID NO: 19345 - DNA, 116 bp, Homo sapiens
tctcagcgccgctcccagccacagcctcccgcgcctcgctcagctccaacatggacagtactgcttttaaagagacagtgttagggatcttggaagcacagccaacatgtgtgaca

SEQ ID NO: 19346 - DNA, 100 bp, Homo sapiens
gtaccccttcgagcaggtggtcgccagctttctccgaaaggtgagccttccagatggtcaccctcacactgcgattgctgctgcaagaatggcaaaggtg

SEQ ID NO: 19347 - DNA, 82 bp, Homo sapiens
agcgagctgagtggttgtgtggtcgcgtctcggaaaccggtagcgcttgcagcatggccaaacgtaccaagaaagtcgggat

SEQ ID NO: 19348 - DNA, 100 bp, Homo sapiens
taactttaagccaggtgtatatgcggtgtcagtcactggtcgcctgccccaaggagacagtgtttcacaaaatgattttccttctgaagctcccatctcc

SEQ ID NO: 19349 - DNA, 90 bp, Homo sapiens
catccctcgaggaagtttcatcagcagtgattccagcagtagttcaagtgatgattctccagctcgatcagttcagtctgcagcagtccc

SEQ ID NO: 19350 - DNA, 90 bp, Homo sapiens
tttgttggtggcattggcctgttcttcagttttacagagataattgatggagagatgtatcctcccacagtcaaagatactcaggcagag

SEQ ID NO: 19351 - DNA, 75 bp, Homo sapiens
ctcgacttcttactgtccagcatcctttagaagaatccagactctaaaatagagctcaagcttgagaagagagaa

SEQ ID NO: 19352 - DNA, 75 bp, Homo sapiens
tcaaagtcaaccgcaggacgcaggcaaccacgagacagacaacatgaaccagatctacggtttcgagggtgaggt

SEQ ID NO: 19353 - DNA, 98 bp, Homo sapiens
agcccggaagcgcagaagctggatcattttacttctccagatgaatatgatgaccctactgtgctctatgaagccatagtatctcatgagaagaacct

SEQ ID NO: 19354 - DNA, 83 bp, Homo sapiens
gagtgggtctacaccgaccagccgcacgccgaccggcgccgggagatcctggggaatgacgttggccggagctcctatggcgc

SEQ ID NO: 19355 - DNA, 75 bp, Homo sapiens
gttccagctaattgacattgcccggcagacggctcagggaatggaatagaagagtgatggatgtcatttctcgtt

SEQ ID NO: 19356 - DNA, 75 bp, Homo sapiens
cggcctcgtgcccttcgccttcgtgcgcttcgaggacccccgccgtttccctggggagatggtaaccatactcta

SEQ ID NO: 19357 - DNA, 98 bp, Homo sapiens
ggatgcagcaaggaaataggatttaaccgctctctgcctcccaggaggaactctctggaatgaaaaataaaatacaagtagttgtgcttgaaaacgaa

SEQ ID NO: 19358 - DNA, 75 bp, Homo sapiens
gggcacgggcacccccgcggtccccgggaggctagagatgaggacggggacttggttgccttttccagtgacgag

SEQ ID NO: 19359 - DNA, 88 bp, Homo sapiens
acctcctgtatctggagctgggagacaagcccgcgcccaacaccttctatgtagggcagagcggcttgggtaaatccaccttaatcaa

SEQ ID NO: 19360 - DNA, 75 bp, Homo sapiens
acctcattcaggggaagagtacactcgagatgaaggatgcaattttgagacacaatctgcaccttactctcaatt

SEQ ID NO: 19361 - DNA, 95 bp, Homo sapiens
cccgcctaagccatgcacctctgtgggggcaatgggctgctgacccagacaggagggcaatgagccaggggagaccactcagatcacataccatc

SEQ ID NO: 19362 - DNA, 75 bp, Homo sapiens
cttggctgaggaactgctgttgtgaaccttttgccctggtgggattatttatgccgagattttgctgtcctggag

SEQ ID NO: 19363 - DNA, 82 bp, Homo sapiens
cccgggggcgcagggaaggagggcgtccgagtcaacaaccgcttcgagctggctgaccaactgactgaagagcagattgcag

SEQ ID NO: 19364 - DNA, 100 bp, Homo sapiens
gggaaaatgaagaaggaacgatctcgtaagaaggattcagaaggcgaccggcagcctcgggcaggggagacaggactgtatgtcagagaagagacggcgc

SEQ ID NO: 19365 - DNA, 50 bp, Homo sapiens
ctccgcaccgcaccctccacctcagttacagaatgtctgaaggggacagt

SEQ ID NO: 19366 - DNA, 75 bp, Homo sapiens
ctcacggctgctgtgcatattatcctggttattaatgcagtaactgtggcctctacaaatgggaacgggacggaa

SEQ ID NO: 19367 - DNA, 100 bp, Homo sapiens
acctcgatggcagcgacacaattgtctgtgacagtaacagtacttgggatcccccagttccaaagtgtcttaaaggacctgatcccaaccttgaagaaag

SEQ ID NO: 19368 - DNA, 83 bp, Homo sapiens
taccgtagaggtaaagaactatggagcatttcgtggcaaacacctctctcttatagttcggtttccaaaccagggcagacagg

SEQ ID NO: 19369 - DNA, 83 bp, Homo sapiens
ttcagtcagaagaaggctgctattgaaagagagtatgcacagcctagtgtgttaattgtaacctacaaggagcctgcaaaatc

SEQ ID NO: 19370 - DNA, 100 bp, Homo sapiens
ccgacctgcgggacgccacccacgacgaggcggtgcaggcgttgaagcgcgcgggcaaggaagtgctgctggaagagccctgaggatgatgacaggaagg

SEQ ID NO: 19371 - DNA, 90 bp, Homo sapiens
tgcgactcgcggaccggcgtccccggcgcgaagaggctggactcggattcgttgcctgaggcacgtgacacaagctgacctcaagagctc

SEQ ID NO: 19372 - DNA, 82 bp, Homo sapiens
ccgggttgggctgtgacgctgctgctggggtcagcacatggattaattgatgtatgttgagtttatggagctgccttttggt

SEQ ID NO: 19373 - DNA, 100 bp, Homo sapiens
gccactgtcctccagaagacatccttcacccctgtaggccaggtctaaactgcagtaatccatttactcagctggagaggagacatcaagaacatgccag

SEQ ID NO: 19374 - DNA, 90 bp, Homo sapiens
ttgggcccaaccagcgcccagccccctgctatgacccttgcgagcgttatctggaatgcgacacgtatggcgaaaggtggatacagtctg

SEQ ID NO: 19375 - DNA, 90 bp, Homo sapiens
tgttacggacgttttataccagagagctctctaacttttatttcagtataatcaaagatagactgtggatattcataaggagaaagtggc

SEQ ID NO: 19376 - DNA, 75 bp, Homo sapiens
cttgttctcaccgatcttcttgtgtcaccatgctattatgcatagaaagaaaaagcttgtggtgaaggggggcaa

SEQ ID NO: 19377 - DNA, 83 bp, Homo sapiens
ctggagcctcagttggaagcagccgatccagcctgcggagcctgtggggcagtgtctagtgaactagaaaatcacccaatgaa

SEQ ID NO: 19378 - DNA, 104 bp, Homo sapiens
cgagcgcggcccgggcgccatcgagccttggcggcggacgtgcagcaaattgtggctactaatttgccccctgaagatcaagatggctctggggatgactctga

SEQ ID NO: 19379 - DNA, 100 bp, Homo sapiens
gtgacggacagtgcagggaagcaactgcagagaaaaatggctacaaacttcctagcacatgagaagatctggttcgacaagttcaaatatgacgacgcag

SEQ ID NO: 19380 - DNA, 75 bp, Homo sapiens
gggggcagctggagcctcaggcggcagcgcttctaggtgtgttccagagaacaagccttcagacatttgctatat

SEQ ID NO: 19381 - DNA, 100 bp, Homo sapiens
tttgtttttaagccaaactccaaaaagagaaagatctctctgccaatagcactcacctttgccctgggtactcttcttgtatgtgtttccatatatctct

SEQ ID NO: 19382 - DNA, 82 bp, Homo sapiens
tttctggcctggaggctatccagcgagcgcagctcagctgggctggaactgccctcctggaactcccccagcctacaaccta

SEQ ID NO: 19383 - DNA, 75 bp, Homo sapiens
gagctgcccggctcggcagcgggaagacatgcaagaaagcacttcagccaagcagaagggagccagctggacgag

SEQ ID NO: 19384 - DNA, 100 bp, Homo sapiens
gcgtgaccgagagcgcgaatatcgtcatcgttagaagggaccattgcaatttagagatgtggccatagaattctctctggaggagtggcattgcctggac

SEQ ID NO: 19385 - DNA, 75 bp, Homo sapiens
gaaaggcccacctgtgtcctggttgagggtctccagggttctttggggcccgagtggaagatagatgataagcct

SEQ ID NO: 19386 - DNA, 130 bp, Homo sapiens
gtcgttgtcgccccctcctcgtcgggaagaatcgtttggtctcctgccgtgcccgccccccaggttcgcctaatagtcttggctacttccctacagctgctaatcttagcggtgtccctccacagcctgg

SEQ ID NO: 19387 - DNA, 100 bp, Homo sapiens
aaagaaggacgtggtgggaagagcaagagggaagaattttcatctattgaagaaaaattcaaaattattgagagagctgaaaaatttggactcccgccag

SEQ ID NO: 19388 - DNA, 75 bp, Homo sapiens
atcagcactaaacatcgtgggggatctcttacggaaagtaggggccttggacaagattcgctatgagagcctgac

SEQ ID NO: 19389 - DNA, 100 bp, Homo sapiens
aatgtctaagctgtctgtgaatgcccctgaattttacccttcaggttattcttccagttacacaggggctcgaatggttcgtgaactctttgaaatggcc

SEQ ID NO: 19390 - DNA, 100 bp, Homo sapiens
accctaaaaatggcgattctgcaaccaagcacctgaaacagcagcaataggagtgaaacatccacatctgataacacagaaacttaccaagagaatacaa

SEQ ID NO: 19391 - DNA, 98 bp, Homo sapiens
agagcacgaggatggtgtctactggaagtactgtgagatacctgcttgccagataccaaaagaattggtggagctccatttgaagctgatgaggaaaa

SEQ ID NO: 19392 - DNA, 100 bp, Homo sapiens
ctatgaggtagatattaaaccagacaagtgtcctaggagagtgaacaggtatctagaagagcagaagacagagaatggaaaagataaggaacagaaacaa

SEQ ID NO: 19393 - DNA, 100 bp, Homo sapiens
gagaacaaaaaacaccacagtactatcgtctatcattggatgaagtggctccggagatatgttcccgctgcctgtcaccaacgggaagggccggcccgcc

SEQ ID NO: 19394 - DNA, 100 bp, Homo sapiens
ggggacctgcgctgactaggtccggggaaggagtatgctgctgctgttccgctttgcgtcctcgctacaaacgcctggtggacaacatattccctgaaga

SEQ ID NO: 19395 - DNA, 74 bp, Homo sapiens
cagccgcgtgctccacgctgtcaagtgtcgcgtggggcaggcagtggcgctgcgggccaaggccttcggcttca

SEQ ID NO: 19396 - DNA, 51 bp, Homo sapiens
cctgatctaacccctagaaacaggatctgccagagcatcttttggagatcg

SEQ ID NO: 19397 - DNA, 100 bp, Homo sapiens
aagggaaggcgcgagtgaggaaaggaggtactgtaggtgcggccggccggacggacctactacgactgcgcagacggtttatgagggaccaggagaagct

SEQ ID NO: 19398 - DNA, 100 bp, Homo sapiens
cgccggcgccgagggacaccgcagtatgaggcagagactcagcccacctgcacccaggtgaaataaacagctttattgctcacacgaagcctgtttggtg

SEQ ID NO: 19399 - DNA, 75 bp, Homo sapiens
ccgcccgccggatcccccggaccccccgaccggctgaaatctctttaatgatggagggaagcaggcagacgcgag

SEQ ID NO: 19400 - DNA, 78 bp, Homo sapiens
ccgctcctaagcctgcacagccgcggcggcagcagcagtgagagctttatgtgattgacacagacatggaagagatct

SEQ ID NO: 19401 - DNA, 100 bp, Homo sapiens
ggctaccatctctgaggatgtgataattgtcacaagcaggcttctgaacaatgcctttgaggagctggttgccttccagcgggccttaaaggattttgtg

SEQ ID NO: 19402 - DNA, 75 bp, Homo sapiens
cgggagcgcaaggtcgccctcaaggccatgatcaaaacgcccggcagatgtttgagggggaggtggccagcctgg

SEQ ID NO: 19403 - DNA, 75 bp, Homo sapiens
ccggcgtcgccgccatggacctagaaaaagcttgagtctccacccccatctaccaatcccttcctggaagatgag

SEQ ID NO: 19404 - DNA, 50 bp, Homo sapiens
ccaggagtcctgaccagagagcagaagccaccagtgtccaacagaaggtc

SEQ ID NO: 19405 - DNA, 82 bp, Homo sapiens
cccggctgccggtcgacgaccgccccgcgtcatgcggctcctcggctggtggaccatggccaacctggagcgcaccttcatc

SEQ ID NO: 19406 - DNA, 90 bp, Homo sapiens
ggatgacctggagccaggggggccttcggaacagatgcacacccttcctgggtgatgggtctccatcacccaactccatgcttcgagtcc

SEQ ID NO: 19407 - DNA, 100 bp, Homo sapiens
ccagagtgacttcgtggggcagacggtggaactgggcgagctgcggctgcgggtgcggcgggtcctggccgaagagcgcatcagcgaggaggtggggctg

SEQ ID NO: 19408 - DNA, 100 bp, Homo sapiens
ccttctcgcggcgctcgagggaccatggccgatcctcgcgtgagacagatcaagatcaagaccggcgtggtgaagcgtcagaagaagaagttgtagaagg

SEQ ID NO: 19409 - DNA, 82 bp, Homo sapiens
aggaaatgtgtgaaacagctgttgaatatgctccagattatcaaagcttttggacttgtggaaaagccactggcagtgattc

SEQ ID NO: 19410 - DNA, 50 bp, Homo sapiens
ccgggatctcggctgtccttcctcccgtttccgttactatggcaatgacg

SEQ ID NO: 19411 - DNA, 100 bp, Homo sapiens
cttggatgccatagctaaagatgttttccagcattcacaggtactccaaagattcaggtttactcacgtcatccagcagagaatggaaagtcaaatttcc

SEQ ID NO: 19412 - DNA, 82 bp, Homo sapiens
cgcttcagttctcccggtgtggccacgagtcggacaatgcagatcttcgtgaagactctgactggtaagaccatcaccctcg

SEQ ID NO: 19413 - DNA, 100 bp, Homo sapiens
tcactgagctcaagaaagacactgatttcgaggccttcaccgccctgtgctactctgcagacggccacagcatcctggcgggaggcatgtccaagttcgt

SEQ ID NO: 19414 - DNA, 101 bp, Homo sapiens
agcaggaatgttttgctacaaatggaggaggaggaggacgacgacgatggggatatcgaaaaccatgagctgttttccaagagcttcatctccatggaagt

SEQ ID NO: 19415 - DNA, 100 bp, Homo sapiens
ttgcaccataacttcctcagcttgagcagtttgttaaggaatgaggttacagggtgccattattatccatgaagtttatgaagaaggagcagcatgtaaa

SEQ ID NO: 19416 - DNA, 98 bp, Homo sapiens
cagagcctggagtgcccactgaaaccataaagcatgctccttttgatgcaatgattatggtgaacatcagttattatgtggatgagaaaatttttcag

SEQ ID NO: 19417 - DNA, 75 bp, Homo sapiens
tggagcgagtgtcagccatcgcttcggaggggaaggctgaggaaaggaagaaatcccagcaccccagccacaggc

SEQ ID NO: 19418 - DNA, 75 bp, Homo sapiens
cagaagctggaggaggcagaaaaagctgcagatgagagtgagaggaagaaatgttggctatttggcgatgagagg

SEQ ID NO: 19419 - DNA, 83 bp, Homo sapiens
taggtgagtcgcggtgggtcctcgcttgcagttcagcgaccacggtcagcccaaggccaaccccactgtcactctgttcccgc

SEQ ID NO: 19420 - DNA, 83 bp, Homo sapiens
agtgcatgctgtgtcttggggccctttgggacgagtgctgtgactgtgttgattccgaagaggctcaatctgtaaatccttct

SEQ ID NO: 19421 - DNA, 90 bp, Homo sapiens
gttttggaactgtcaggtacctcaaagcaaaaagcttgtggtgaaggggggcaaaaaaaagaagcaagttctgaagttcactcttgattg

SEQ ID NO: 19422 - DNA, 100 bp, Homo sapiens
gccggcctccgcggtgcctgccttcgctctcagggctgttttggagtcagcggaagatcaccaaggccagggagtggttccaccgcactgtgaagattga

SEQ ID NO: 19423 - DNA, 75 bp, Homo sapiens
cctggaggaggagctggagaggaaggcgaggacacagcattgttggttttgccatgtactattttacctatgacc

SEQ ID NO: 19424 - DNA, 100 bp, Homo sapiens
ctgcgattggactgcacaggattgaggagctgtatgcggccggggagaaccgcctgggaacagacgagtccaagttcaatgcggttctgtgctcccggag

SEQ ID NO: 19425 - DNA, 98 bp, Homo sapiens
gccacgtgcagacatctacaaccttcgatctcctgacgatatgatcttagctttgataaatgactgaagctggagaagccgtggttgaagtcagccta

SEQ ID NO: 19426 - DNA, 82 bp, Homo sapiens
gacctaccggtctgtcagtgagatggcttctaacaaggttacaaaagtggatgaaaccagagggatcgcacatgtttattta

SEQ ID NO: 19427 - DNA, 82 bp, Homo sapiens
atgtcgggttattcgagtgaccgagaccgcggccgggaccgaggggaacggcaggagcagctgatgggatatcggaagagag

SEQ ID NO: 19428 - DNA, 100 bp, Homo sapiens
tgcctctttctctcaggctttcctacaactcatgcccagcagcagcaagcaggtcacgagaagagaatgccttctagatgcaaaatcacctccaaaccag

SEQ ID NO: 19429 - DNA, 75 bp, Homo sapiens
cgctcgtcctcatcctggtcactagcggactcttcttcgccttcgatcgcagatatggccagtacactatgaacc

SEQ ID NO: 19430 - DNA, 50 bp, Homo sapiens
ggattacagtgggtttgactcaattcaagcactgcaggaaaggaaaagga

SEQ ID NO: 19431 - DNA, 100 bp, Homo sapiens
caatcatgggaatttccaaggggattcaaacttcaacagaatgtggcaaccaggaaacagagcaaatgcagcgttacaatcaaagacttattgaggaatt

SEQ ID NO: 19432 - DNA, 82 bp, Homo sapiens
agaaaagttagcaatgatggaaagtggggtgagagactatagcaagcagcccccttacccaggaatggaacaacctccacac

SEQ ID NO: 19433 - DNA, 82 bp, Homo sapiens
gctcctctgacagcgaagactccgaaacaggatccatgctgcagaatggtgtctctgattttgagaccaagtctttgactat

SEQ ID NO: 19434 - DNA, 82 bp, Homo sapiens
cggcccggaggacctgcctctcgtcagtaattcgccaaaatgacgaacacaaagggaaagaggagaggcacccgatatatgt

SEQ ID NO: 19435 - DNA, 50 bp, Homo sapiens
gccttcccagtagctgggaccacaggttctggcctgccattgacgatggg

SEQ ID NO: 19436 - DNA, 99 bp, Homo sapiens
tgaaaagaaaaaactgaagaaaaaacttgtcaggtctgaagaaaacatctcagaaaaccagtagattcccagacatcgcgaagtgaatctgaaattgtg

SEQ ID NO: 19437 - DNA, 100 bp, Homo sapiens
acctgaatctttatggaagccccagagagtacacgggattcccagacccctatgatgagctgaatactggaaaggaagaggacgaaccggtagtgataaa

SEQ ID NO: 19438 - DNA, 100 bp, Homo sapiens
aagtaagcttctacaaaatacttcagtggactaaagaggatggacatagaacttccacctctgctgtccctaacctgtttgttccattgaacactaaccc

SEQ ID NO: 19439 - DNA, 75 bp, Homo sapiens
tactacctttatttccaccataggctccatggagtgtgctgatgagccctgtgatgcctacgaggtggagcagac

SEQ ID NO: 19440 - DNA, 90 bp, Homo sapiens
tcctgtgctaagagaagaaaaactacctgtggtaggaattggaaagcatctgtgtggtatggcaacagacggagtcttgctctgtcgccc

SEQ ID NO: 19441 - DNA, 75 bp, Homo sapiens
ctggtggcctttccctccagctctgtctatcctaccaaggtggacatcttcaataaggagctactgctaatcccc

SEQ ID NO: 19442 - DNA, 100 bp, Homo sapiens
gtgagggtccggcccatgaatcgcaggggaaggtgtggctcattgactttaatccatttggtgaagtcacagattcactgctgttcacctgggaagaact

SEQ ID NO: 19443 - DNA, 75 bp, Homo sapiens
cggagcccggcgctttccccgcaagatggacggtttcgccggcagtctcggtactccaaagattcaggtttactc

SEQ ID NO: 19444 - DNA, 95 bp, Homo sapiens
gtgggtgtggaggaggaagactggatgccaatgatcctataaaggctggtggtgggagaatgctatcgctgccctgtttcggagacacattcccg

SEQ ID NO: 19445 - DNA, 100 bp, Homo sapiens
agcagctgagaaaggagctcggggactcccccaaagacaagaattatatccagatcgagagacagaagattctgaaagggttcaatgaaatgagagtcat

SEQ ID NO: 19446 - DNA, 100 bp, Homo sapiens
gaaagcaggaggaggtggcggcggcgggaagatgaaggttgtgcaggaccagcgttccctgtgcaggcgccactgcgtttcctgcagattccgaccggca

SEQ ID NO: 19447 - DNA, 76 bp, Homo sapiens
gacctctacttagctcagcaattcttaccttgcatgtggagaccccaaggcaaaaccatcctatcttatcgacaaa

SEQ ID NO: 19448 - DNA, 100 bp, Homo sapiens
tgaagcttggaattacatagctggaaaggatcttacagattccaaggagatagatcgcagacgagcgagaatcaaacatagtgaagggggagacatccct

SEQ ID NO: 19449 - DNA, 87 bp, Homo sapiens
atgctgccaaaagaaatgtcttagatagtagttctgacttcccttcaagaggactactgagcccagccaggctgtatgccattgctg

SEQ ID NO: 19450 - DNA, 73 bp, Homo sapiens
ctgcagtgacatgtccagcatgaatcccgaatattatacatgggaagctgttgataccaaaaataatgtactt

SEQ ID NO: 19451 - DNA, 82 bp, Homo sapiens
ttgctactgctgcctctgtcactcctggtgaccagcattcaagcaaagggttaccttccagttcaacatttaccttggaaga

SEQ ID NO: 19452 - DNA, 96 bp, Homo sapiens
ggtcccgggaggaagatggcgctgcgaattcgtgccaggcttcccgtatccagcagccaccgccgcggccgcctaccgaggggcgcacctgcgagg

SEQ ID NO: 19453 - DNA, 83 bp, Homo sapiens
cttttctcagatgttggatatttgcttggaaaaacgtgtgggtacgaccttggtgtgagagggttgctgttgtattgcaatca

SEQ ID NO: 19454 - DNA, 75 bp, Homo sapiens
tctggccacgtgcttcaacgctctgctgcccgctgtgagggaaaagaccacctgttcagaacattgcttacagaa

SEQ ID NO: 19455 - DNA, 104 bp, Homo sapiens
gattcgcagtggtcgcttcttctccttggcatgcccaagagaatcgtaaatgcaaaaattgcttgccttgacttcagcctgcaaaaaacaaaaatgaagcttgg

SEQ ID NO: 19456 - DNA, 75 bp, Homo sapiens
tcgacatgttccaggtcccggatagcgagggcggccgcgccggctccaggtgtggagagcagcctgcgtgtcact

SEQ ID NO: 19457 - DNA, 100 bp, Homo sapiens
tcacgcctggggcctgctcttcagaagtccccagcgccgttccttccagatcagaatccagcaactatcacaagaatactccttagccacttcaattggg

SEQ ID NO: 19458 - DNA, 71 bp, Homo sapiens
cgcagggaggtggagaggaagcagaagggctctgaagctgagctgactgctgcccactttggaggaggcgg

SEQ ID NO: 19459 - DNA, 100 bp, Homo sapiens
gagtacaacgagccgcatgagagccggacaaactcagacatcgtggaggggaagatggtgaaaggaatgggaggtgctatggatttagtgtccagtgcga

SEQ ID NO: 19460 - DNA, 90 bp, Homo sapiens
ggctgagagctagcaaggaaaactcaggaccatgatggctcagtttcccacagctatgaatggaatgaatctgaagtctgctgcagtaaa

SEQ ID NO: 19461 - DNA, 100 bp, Homo sapiens
ctggggcccacgggggcacagttcctgaggaggctggtggcatgttgtcctcaatctcgacactactatcgccatcacccaaaattttgccagcagcacc

SEQ ID NO: 19462 - DNA, 75 bp, Homo sapiens
gacatccgagcgaaagagaaagagagaaaggagccgaaaggcgaggccagctcttccaaccctgccacgcccatc

SEQ ID NO: 19463 - DNA, 100 bp, Homo sapiens
tttcctcctcctgcttccccctattatctttgagtctggatattcattacacaagggagctgagcacataacgacttacacgttcaatactcacaaagcc

SEQ ID NO: 19464 - DNA, 100 bp, Homo sapiens
gccaccgccccggagcctcacagcctgggcatcctccatgcctcctacagcgtcagggtggatccatgctgtgctgacgcctgtggactgccttgccttt

SEQ ID NO: 19465 - DNA, 100 bp, Homo sapiens
tgactacccctaacgcacaataatatggctccgatgggctcaaagaagtccattggaatattaagcccaggagttgctttggggatggctggaagtgcaa

SEQ ID NO: 19466 - DNA, 100 bp, Homo sapiens
ctcaagcccgcgaacatcctgctggatgcccactaccacgtcaaggtcatattgaacattccagatacctatcattactcgatgctgttgataacagcaa

SEQ ID NO: 19467 - DNA, 98 bp, Homo sapiens
gagtccatgatggaggcagaggtaaacttggagagcaagggcaagtattttgtaaccttcccatatccatatatgaatggacgccttcatttgggaca

SEQ ID NO: 19468 - DNA, 75 bp, Homo sapiens
gcctagaatgcatcagtgcccttgtggcgaatggggctcacgtcgacgagtaaccagctcataaatcacatcgaa

SEQ ID NO: 19469 - DNA, 101 bp, Homo sapiens
gtgaagatggcggcagccgaggccgcgaactgcatcatggagtttgcctatctggggcgcctggctcacgaggttggctggaagtaccaggcagtgacagc

SEQ ID NO: 19470 - DNA, 96 bp, Homo sapiens
cttccctctcgcccacctctacccggcagcgggggcagtcagagcggagccaagatgcgaatgggctagagttgggaagacatcactgattatgtc

SEQ ID NO: 19471 - DNA, 82 bp, Homo sapiens
cggcaccatcatccacctcaagtacccgctgaactgctccgatcccactagtgagaggtcaaaatgcagatcttcgtgaaaa

SEQ ID NO: 19472 - DNA, 100 bp, Homo sapiens
gtgaggctgagctgggggctggcctgcccctgcgtctgaaggacggggggcatgtgctctgtgtacctgaaggacagtgagaaggttgtcagcatttcca

SEQ ID NO: 19473 - DNA, 75 bp, Homo sapiens
ccatgtcaggtccaaaaacagagacttttccctcccagtccctaagtttaagaggctgacccgcggctgattgag

SEQ ID NO: 19474 - DNA, 99 bp, Homo sapiens
cattcagatgggatctttccggatcaatccagatggcagccagtcagtggtggagggcatgccgccgatgactcaggcgccccgcattatgcaccacat

SEQ ID NO: 19475 - DNA, 83 bp, Homo sapiens
acgggatccagagcgccgcgcacttcgtcatgttcttcgcgccctggaagacagagatgtcaatgaccccatgcccaaccgag

SEQ ID NO: 19476 - DNA, 75 bp, Homo sapiens
gatgtcgggacaccccggaagctgggaaatgaatgagtctgcaggtcttaaacgacaaaaatgtcagcaatgaaa

SEQ ID NO: 19477 - DNA, 100 bp, Homo sapiens
ccacccctgaagaaattgcacaggagatctattgggaaactgattataaccactcgggcaccatcgatgcccacgagatgaggacagccctcaggaaggc

SEQ ID NO: 19478 - DNA, 100 bp, Homo sapiens
ccggccacgaccccgtctgggagggccaggaaggaatactgggagaatcttcggatagcctcaggccggccatacaacccttcaatgtcaaagccagatg

SEQ ID NO: 19479 - DNA, 103 bp, Homo sapiens
aggctgctgaccagaagaggtttagtgccctcctgagtgactgcgtcaggcatctcaatcatgatgttgaaacatttgtagcagatatactgaaaggagaaaa

SEQ ID NO: 19480 - DNA, 100 bp, Homo sapiens
aggcctacagcctcctcaacgaatacggcgacgacatgtatgggccagaaaagctgacagctctgacaactctgatttggaagatgacatcatcttatct

SEQ ID NO: 19481 - DNA, 75 bp, Homo sapiens
ctgtgccgggcggagagaactcagcgaggattctgagaggacttctgaatgatgctttccagaaagggggaccag

SEQ ID NO: 19482 - DNA, 100 bp, Homo sapiens
tggtaggcgtccctggagcggccgccttccagcgtccgtggcactcaggtagttggttctgacatgactgtgacagttgagtttaccaatcctttaaaag

SEQ ID NO: 19483 - DNA, 100 bp, Homo sapiens
aagcagttgcaggacaaacgggagcggaagagaggccctagaaagtgaatttgtttcttgccaacttcatcagtggatcgaccttatatttggctataag

SEQ ID NO: 19484 - DNA, 83 bp, Homo sapiens
gtcaccagcagcggcccggtcatcaaccatggcatgtggcagacagcgccatgtcagaaccggctggggatgtccgtcagaac

SEQ ID NO: 19485 - DNA, 100 bp, Homo sapiens
catcaccctggacaaagtctgcaacatggctagagactgccgggactggtcagatgaacccatcaaagagtgcgccaaagtggaacaggtgaagttcgat

SEQ ID NO: 19486 - DNA, 75 bp, Homo sapiens
ggcctcaaacgtggagatcaactcctctctgttaatggagtggtccttgcctacacacttagctgtgtatgtaca

SEQ ID NO: 19487 - DNA, 75 bp, Homo sapiens
aaaaatggttgacctcacccagaaaaagcttgtggtgaaggggggcaaaaaaaagaagcaagttctgaagttcac

SEQ ID NO: 19488 - DNA, 83 bp, Homo sapiens
ctgctggatggaggggattttgtcagcttgtcgtcaaggtaccagctggaggatgagtctgcgcatttggatgaaatgccact

SEQ ID NO: 19489 - DNA, 82 bp, Homo sapiens
gcgagacctcacctgcatggacttccactatgagtaagactttgaccccgacgcaggcttcagtgattgccgcggatcagaa

SEQ ID NO: 19490 - DNA, 83 bp, Homo sapiens
tatgaccaggagagggctgcgggactctcattcctctgaagatcttgcaggagagagagttactgcctgtgaagaaatttgaa

SEQ ID NO: 19491 - DNA, 76 bp, Homo sapiens
ttcaaggtcaagatggtggacgagcttaagagagatggcagtggcagcaccatgatgcaaaccaagaccttctcct

SEQ ID NO: 19492 - DNA, 75 bp, Homo sapiens
ttagcgcactggaggagcggcgggcttcagacaggtttgaagatcagcttcagcaatggttgtctgaagactcag

SEQ ID NO: 19493 - DNA, 100 bp, Homo sapiens
tgtggtcccgcctcacctggggtatggagaggaaggaagagctgcagcttatcttctggtgtcccttataccaagcaattcattccgtcagatgttccgg

SEQ ID NO: 19494 - DNA, 90 bp, Homo sapiens
gcgagcggaggtgtgtgcggactgcagcgccccgggttgaaatcacaaagattagacacctttttagataggtgttcttcagcaccactg

SEQ ID NO: 19495 - DNA, 74 bp, Homo sapiens
ggggaggcgaggccggacgcacctctgtttgggggtcctcagaggcacagttgaatgctgttgatgctttgatt

SEQ ID NO: 19496 - DNA, 50 bp, Homo sapiens
ggagaatccaccgccatccgccaccatgtgtactaatggtcacttgatgt

SEQ ID NO: 19497 - DNA, 100 bp, Homo sapiens
cacagaacacagcatatctggagtcagcgaccccttcctgcagactgcaaaattcaaaatggggctcaaggtattcgtttcatctacaccagagaaggca

SEQ ID NO: 19498 - DNA, 75 bp, Homo sapiens
attttatgcatcagcaacgatcgtggactatctgggcttccatcagtgtctccatgcaaccccacaaagacatcc

SEQ ID NO: 19499 - DNA, 83 bp, Homo sapiens
cggtaaccgggacccggtgtctgctcctgtcgccttcgcctcctaatccctagccactatggcgcggcagctttgccccaggc

SEQ ID NO: 19500 - DNA, 100 bp, Homo sapiens
aggaatgacaatgacagttgggactacactaaaccatatttgggaagacgagctgaaggaagaggatcaccttccaagacaaaacagtcttcatggggga

SEQ ID NO: 19501 - DNA, 100 bp, Homo sapiens
gtaacacttaaaatggtactcggggacctccaaagactaaactgacaagccttcaaggagcccagggtgatggaggcctaagccaatcacaagatgacag

SEQ ID NO: 19502 - DNA, 75 bp, Homo sapiens
agcttcctgaccaatgacatccttcacgagatgtttccaggagactgacaaggcgtggcatgggggatgtctggc

SEQ ID NO: 19503 - DNA, 49 bp, Homo sapiens
tatatgtccctcacactgtgtacagtttgcagaaaaaacttcagcatgt

SEQ ID NO: 19504 - DNA, 82 bp, Homo sapiens
catggagggagtggacatcagccccaaacaggacgaaggcgtgctgaagggatagctgggagtatggccaccctgctccacg

SEQ ID NO: 19505 - DNA, 83 bp, Homo sapiens
cacagcaatgctggactgcagtgactatgttctagcaattctgtggtgttcttggtcacacatttatggagtttctgaagggc

SEQ ID NO: 19506 - DNA, 75 bp, Homo sapiens
cccaggcagagcccggagaaaagccacatgatatgaggccccaggattcctggcgaggtcctcctccccttttcc

SEQ ID NO: 19507 - DNA, 89 bp, Homo sapiens
gagggctgcaaggtgggaagtgaagtcagtgcctcagttgctggaggttgtggctcactggattgctgaaagccgcattgccattgaga

SEQ ID NO: 19508 - DNA, 100 bp, Homo sapiens
acctcagcactcaagcagcaggagcagcccgcggcgaccaagatcaggaacctgccctggatcgtagggcatcagaaaaacaaaaagaaatagagagagt

SEQ ID NO: 19509 - DNA, 100 bp, Homo sapiens
gtcgggaactcgacaaggcagaatctgagattaaaaaaaacagttctatcattggtgactataagcaggccagaagaatgtttgaaggtgagatggcaag

SEQ ID NO: 19510 - DNA, 100 bp, Homo sapiens
ggagcgccgccgccgcctcgatgggtctgcagatctccaggggagcccaccagcctagtcaacatggcctcggaagacattgccaagctggcagagacac

SEQ ID NO: 19511 - DNA, 75 bp, Homo sapiens
gaagagggaagacacgcggaaacaggtattatccatgcagcagaagagaaggactggaaaactgcgtactcatac

SEQ ID NO: 19512 - DNA, 74 bp, Homo sapiens
cgagctcaaggagcacaacgggcaggtgacagcctcacttgcacaagattgtgaacagctctatggagctcgcg

SEQ ID NO: 19513 - DNA, 82 bp, Homo sapiens
gttgaagaagaatcaattaccaaaggtgatcttgaggtgggtgtttgtgtgggaaaagggctaccaggaaactgactccgtg

SEQ ID NO: 19514 - DNA, 100 bp, Homo sapiens
cagcaaagattacaccaagatctgtgctgaccacaggaattggatctactagtgcaggacccatccattttcacagtattgactgctaagtctgtccgcc

SEQ ID NO: 19515 - DNA, 90 bp, Homo sapiens
cacagtccttctgcagtccctcgtccagccacccccagattgtgactgcagcgcggcagggacccagggcaacgcctgccggaaggaccc

SEQ ID NO: 19516 - DNA, 74 bp, Homo sapiens
ccgtgcagagcagcacctccatcaggtacaacctcgaggagctctaccagaaagaatcttcaagagggagacat

SEQ ID NO: 19517 - DNA, 76 bp, Homo sapiens
agtcccccaaagatgagatttacctgtgagatgtttcatcccaacaactgtagaatgtgaagagggaagtgaagac

SEQ ID NO: 19518 - DNA, 51 bp, Homo sapiens
ggcatgacgtgcaggtctctagcgcaaataggaaggttgttgattactcac

SEQ ID NO: 19519 - DNA, 91 bp, Homo sapiens
cgccgaggcaccgaggcactcagaggagagaagatggcgaattagaagatggtgaaatagacgatgcaggatttgaagaaatacaagaaaa

SEQ ID NO: 19520 - DNA, 76 bp, Homo sapiens
gtgctggtgtctgagtggatggggacctgcctgctggaaacctatgagaatatcccaggccagtcaaagatcacat

SEQ ID NO: 19521 - DNA, 100 bp, Homo sapiens
ctaagggcggcgactacgacggcgttgatatcggtggtaacgacggcctcagcaggcggggaagatgaaagggtaagaatgattgatgttggctgatatt

SEQ ID NO: 19522 - DNA, 82 bp, Homo sapiens
cttcactaaaaagcttccccatcctgatctgtgctactatatttcatgaactggtatataaacaaaccaaaattatttcttc

SEQ ID NO: 19523 - DNA, 82 bp, Homo sapiens
caaatacctggctatattgtcgatgattcagtcagagttctttatagctccaagctctacagattcttcaaatatattgaga

SEQ ID NO: 19524 - DNA, 82 bp, Homo sapiens
cggcccgcttcctggaatggcaagcgcagcaacaacagagagcacgtgcatcccagccatcactcttccacctgctccttag

SEQ ID NO: 19525 - DNA, 76 bp, Homo sapiens
ggccggtcatccccctgaagttctgagctcagggcacagggtaccccaatctgaagtcagtaaatgaactaatcta

SEQ ID NO: 19526 - DNA, 82 bp, Homo sapiens
aaagtggagagcatcttaatccagaccagttgaattcaattcgtcataatctgtccctacacagcaagttcattcgtgtgca

SEQ ID NO: 19527 - DNA, 98 bp, Homo sapiens
cagacatcaccatcatgtttgaggccgccatggcatcagatgaaggcaaactttttgttggagggctgagttttgacaccaatgagcagtcgctggag

SEQ ID NO: 19528 - DNA, 151 bp, Homo sapiens
cccatgttgtacagcttccagacatcgctgcctcgcctgccggtcccggctgtcaaagacactgtgaacagggaggtgttcttccctggacgccatggtgttccctgcacttgggtgtggaccatcttcttcttctccctgggctgactga

SEQ ID NO: 19529 - DNA, 99 bp, Homo sapiens
gggagacgcacagctaagatgcccggacatcctggaagctgggaaatgaaaaagcttgtggtgaaggggggcaaaaaaaagaagcaagttctgaagttc

SEQ ID NO: 19530 - DNA, 74 bp, Homo sapiens
gtgattctacatctcaagctcatattttgaagtgtttacggaccaagatcactccatggatgaaatgacagctg

SEQ ID NO: 19531 - DNA, 117 bp, Homo sapiens
cagagtggaaaaaagagaggatttgcttttgtaacttttgatgatcatgatacagttgataaaattgttgctgcagaaccttggcctgaaaatgctacattatatcagcaattgaaa

SEQ ID NO: 19532 - DNA, 100 bp, Homo sapiens
ccaacacataaaaattatttatccaacagctcctcccagcaagatcaactttatacctgggctgcagttagtcaacccacacactcattggactattcag

SEQ ID NO: 19533 - DNA, 75 bp, Homo sapiens
catgcgtcgtcggcctctgggcagcagacaaatttacatgtattggagaccagaccagaagcccttctgaattaa

SEQ ID NO: 19534 - DNA, 100 bp, Homo sapiens
tgggggagctgaattttgggctggttgaggttgtatatgagtgggcccggggcatggtggacaacctggaggaatttctgaacgacccgctgaagaagca

SEQ ID NO: 19535 - DNA, 100 bp, Homo sapiens
ctgcagtggcgcctaaagtctgagagagggaagtcgcctctgtgctcggggggccctcagcctcttggccttgaacgggctgttcatcttgattcacaaa

SEQ ID NO: 19536 - DNA, 75 bp, Homo sapiens
ggctgcggcaacttcggggagctccgcctagaaaccaaggtgtatgttggtaacctgggaactggcgctggcaaa

SEQ ID NO: 19537 - DNA, 75 bp, Homo sapiens
gcagccgcaggtggtggcgcgcgccgtgtgcttgtaagactttgaccccgacgcaggcttcagtgattgccgcgg

SEQ ID NO: 19538 - DNA, 99 bp, Homo sapiens
aaactgatctgataagacctcagatcagacagagtgctgtgtttacctggacaaatttgttggtggttgtggttgagctggatgggtcggaacaagaag

SEQ ID NO: 19539 - DNA, 100 bp, Homo sapiens
gctccaggagcagttgctggtgctgctgaagtccctagggaaccaccaattcttcccaggaaatgagtggcttatactctcctgtcagtgaggatagcac

SEQ ID NO: 19540 - DNA, 100 bp, Homo sapiens
gcgggctccagactcgccgtggtcaagttcaccatgagaggcctctgaagagccaatccattcaggatgggaaaccacgcaggcaaacgagaattaaatg

SEQ ID NO: 19541 - DNA, 82 bp, Homo sapiens
ccaaacaggacgaaggcgtgctgaagcttgtagaccctggagttaaggcatggacacccactaaaggaaaacaaaatgtgat

SEQ ID NO: 19542 - DNA, 100 bp, Homo sapiens
agctaagtccccagattggaggaggctggctctggtcttcgatgcacaggagtggccgttatggaacgcaggttggtactaagaagtgcctttcctgacg

SEQ ID NO: 19543 - DNA, 100 bp, Homo sapiens
cagcagcccccgaaggccctatcaggacatggagtatgaaagacgaatgttgttccagctgaggtgtcccttgtttgtgtggtaaagccagatgaattct

SEQ ID NO: 19544 - DNA, 82 bp, Homo sapiens
taaagatgcagtacgccacggggccgctgctcaagttccagatttggagccttcacgtaaatgggtccagtcatgcctccca

SEQ ID NO: 19545 - DNA, 90 bp, Homo sapiens
cttgctttcatcctgtggcctcccaccaagcactgcctcagctgtgcgcaggctatgctccagggcatgagatactttgatagagcagcc

SEQ ID NO: 19546 - DNA, 75 bp, Homo sapiens
gaggacagttcgctacacagcaatgcatcgagccacataaagaagatccctaatagtcatttctcaacaattata

SEQ ID NO: 19547 - DNA, 50 bp, Homo sapiens
gaagacggagagaccttggccagggtggatccataaagaacccagccaac

SEQ ID NO: 19548 - DNA, 75 bp, Homo sapiens
ttggatataacaccaccttcaaaaatttctggaattgcaacccagtgaagaagttacctggaagtaaagactggc

SEQ ID NO: 19549 - DNA, 75 bp, Homo sapiens
gcgcaatacaccgcttctgggtcaggtaaatattgcagattttcaagagaatcagtgggtgacttgtttccagga

SEQ ID NO: 19550 - DNA, 75 bp, Homo sapiens
cacggctttggaaacgacgtcatgtgttagattctgaaggaagatttccattaggtaatttgtttaatcagtgca

SEQ ID NO: 19551 - DNA, 100 bp, Homo sapiens
ccctttgcctcatcccaggttgccttggaaaatgccaacgccgtgtctgaaggtttttgaatctgaaaattcaagaaggtgaagctcacaacattttttg

SEQ ID NO: 19552 - DNA, 83 bp, Homo sapiens
atgtgtatgattcccaggctgaagccatgaaaacatcagcatttattgctggtgcaaaggactccttctaatggagctgaagg

SEQ ID NO: 19553 - DNA, 132 bp, Homo sapiens
cgaggcggagagcgctgaggcgggggccgtgccctcggaggcggcgtgggcggcagagagcggggcggcggcagttccagggtctccctccactgctgtagtaacccgggtccggggcctcggtggtgctcc

SEQ ID NO: 19554 - DNA, 98 bp, Homo sapiens
tccataacaagttccgatcagaggtgaaaccaacagccagtgatatgctatacatgatgttttcagtcatccccaacaaattccttccaaacagtaag

SEQ ID NO: 19555 - DNA, 101 bp, Homo sapiens
ggagaaggaagaagcagatcttcttttggagcagcagagactggcctcaaggggaaggtatatcaggaacctttgtcccccaatgcctgcatggatactac

SEQ ID NO: 19556 - DNA, 98 bp, Homo sapiens
ggatctggaggagcagttgtctgatgaagagaaggacatattttggcatcgtgttcaacagatggtaccactgtcctatggaatactgaaaatggaca

SEQ ID NO: 19557 - DNA, 100 bp, Homo sapiens
aagggctcattgtacagtcaaggcggcaggtgtggtcactcacctgtctaccactcccgtgaaatggcagctcgtgccttggtcccatttgttatgatag

SEQ ID NO: 19558 - DNA, 80 bp, Homo sapiens
cttggagtgctgtcccttggaacaggaggagtaagattgaggttatcaatactctggctgaccatcatcatcgtgggact

SEQ ID NO: 19559 - DNA, 73 bp, Homo sapiens
gtggtgtacctgaccaagtccagccccagcatggcaacacttaaagaatcctgtaatagcacagaagatccag

SEQ ID NO: 19560 - DNA, 74 bp, Homo sapiens
aaaacggaagcgcagggagaaggaagaggtgtttgaaaagggatatcagtatgaacaacattactcagttgcca

SEQ ID NO: 19561 - DNA, 75 bp, Homo sapiens
cccattcattctggattggtggatctgaagtacaaaatattttccagggactatgttcggagtgaactggagttt

SEQ ID NO: 19562 - DNA, 100 bp, Homo sapiens
aagctgctgagtgtcctgcagcagaataacctcaacgtgggaagtgacaccacatcagaaaccagcttttctctctccaaagaagcaccaagggagcatc

SEQ ID NO: 19563 - DNA, 100 bp, Homo sapiens
tgattttgaattttttggcagcagaagggcgactgagtactcaacatattgactgtatttgggctgcagcacaggaaataatgcaaaaggtgtcccaagg

SEQ ID NO: 19564 - DNA, 50 bp, Homo sapiens
ggatgtggggaagtcctaaaagccaagaatcgggaaagttgacagtcatc

SEQ ID NO: 19565 - DNA, 87 bp, Homo sapiens
cagacggattcatttagagctgcggaacaggacgccctctgatgtggcacaagatctctgtaaagtagcaggcatagcaaaagttct

SEQ ID NO: 19566 - DNA, 74 bp, Homo sapiens
ggaactgtgtgtctagatgtaattaatcaaacttggacagctctctatgacttagaaggttttgactccgtggt

SEQ ID NO: 19567 - DNA, 100 bp, Homo sapiens
gctttggagcagtgtattttggccatgctatgatagtggaagcttatccaaaataatagatccagaagaagtgacctgaagtttctgtgcaacactcaca

SEQ ID NO: 19568 - DNA, 74 bp, Homo sapiens
gggagttgctctattccctagaattccttgacaaagacagtgtttaagaatgaaagcctcaacgcagaatcaaa

SEQ ID NO: 19569 - DNA, 75 bp, Homo sapiens
attattagtcctgaatccaataaagagaggcagcttggaagttcaaaccttgtactactcagctgatcacaagct

SEQ ID NO: 19570 - DNA, 83 bp, Homo sapiens
gcctttgcctgactcagggcagctcagagtgtgggggcagctgcaatgactctccgcacggtattattgtcattgcaagcact

SEQ ID NO: 19571 - DNA, 90 bp, Homo sapiens
cccggcgcaggagcggccgcgtttcggcctcagaagttggaagtactccatgacacacactcggagaaagtcccttcccatgctgagttc

SEQ ID NO: 19572 - DNA, 75 bp, Homo sapiens
ctcatggagatggtgatgaccaacctgtggcagctgggggtcgattactttgattactgccccgagctgggccga

SEQ ID NO: 19573 - DNA, 83 bp, Homo sapiens
cgaggaggtcatgaaggacctgagcctgacgcgggccgcgcgggttttaaaatcaaagatgggaaaatcggagaaaattgccc

SEQ ID NO: 19574 - DNA, 99 bp, Homo sapiens
tgtcattgcaagcactattggcagctgcagagccagatgatccacaggatgctgtagtagcaaatcagcatgattccacctttccactgatagactcaa

SEQ ID NO: 19575 - DNA, 100 bp, Homo sapiens
tcttaacagcaattgctttgaacatctcatacgactgctacagaactgcaaggaagctgccctctgtcgacagctccccatggaagctgagactcttgcc

SEQ ID NO: 19576 - DNA, 100 bp, Homo sapiens
cattagataatcctcatgcaaatagcgggaagaacaaaggaaggggagcccgggacccccgggggcgcaggcataagatgcacatttttctgctctggag

SEQ ID NO: 19577 - DNA, 75 bp, Homo sapiens
aaaaaacgtgtgcacacctttttacagcttatatagaattggtgataggatcacaacttctgaggtcccagcaag

SEQ ID NO: 19578 - DNA, 75 bp, Homo sapiens
cttgaataccttgatccagcgttccaaccacactcaggccaccaacgttatcctcaaaataagagacctgttcac

SEQ ID NO: 19579 - DNA, 46 bp, Homo sapiens
gctctcagcataccgtgcaacaggacatggtccggcgaggagagat

SEQ ID NO: 19580 - DNA, 89 bp, Homo sapiens
cccagcgtggatgagggcgcctgcagatcccggctagggcacggaccgcctaggccgaggttccatcataatgaatggatccaatatgg

SEQ ID NO: 19581 - DNA, 76 bp, Homo sapiens
ggtcgatggtcggcggcgcccggatgggcagctgagggtctccaactgaattccttgaagagaaaatggcctacca

SEQ ID NO: 19582 - DNA, 87 bp, Homo sapiens
aaagaccttaggagagacgagcagccttcagggagcgtggagacagatgtacttgaaggatataatggaacaatatttgcatatgga

SEQ ID NO: 19583 - DNA, 82 bp, Homo sapiens
ctgcagcgggagctggacggcgagcgcgagcggcgcgagaaagaatagctattcagtcagacagaaccacttatcacgtttt

SEQ ID NO: 19584 - DNA, 50 bp, Homo sapiens
agtagcccccgggcccccgtcagatgaaggatttgggggcagagcacttg

SEQ ID NO: 19585 - DNA, 100 bp, Homo sapiens
gcaagactggatttcctgaagatgtttacagtgcagtcttatcgaaggatgtgcatgaaggacagcctcttctcaatgtagagaaatggtcagaaggaac

SEQ ID NO: 19586 - DNA, 100 bp, Homo sapiens
cctcccgagtagctggaattacagaacagtccaggctctgcagacagcatcccacctgtcccagcaggctgacctgaggagcatcgtggaggagattgag

SEQ ID NO: 19587 - DNA, 74 bp, Homo sapiens
cgagcaggaggcgccatcatggtctcagccttagatccaaggacagtccaaggaagtcctaagaccatggagtt

SEQ ID NO: 19588 - DNA, 73 bp, Homo sapiens
gagacgatcaggacgaaggaaactgtggagggagagaagtggatgggccctatacctccagccgtgaatgcca

SEQ ID NO: 19589 - DNA, 83 bp, Homo sapiens
ctgttctgtggattttggatttgccaaggcagccctcacaatccggattgggccgagcctatgccctggcttttgcagaaaga

SEQ ID NO: 19590 - DNA, 97 bp, Homo sapiens
gctgcagtacctgctggagaagggagactacaaggacagcagcgactttggggcccgtcaccctcaggtcagcccaagactaccccgtcggtcattc

SEQ ID NO: 19591 - DNA, 100 bp, Homo sapiens
ctgctgcacattaggttgcagtatgtggccagttatttgcctcagtaaaagatctgttcggcacttgaagtactccttgtttaagaaatcactactgggc

SEQ ID NO: 19592 - DNA, 100 bp, Homo sapiens
cgccgacccgcagcgcgagaagctcaagcaggagcttttcgccttcaacaaggccaggtcagagcagcccaccatgggatggggagggggtggaggctgc

SEQ ID NO: 19593 - DNA, 50 bp, Homo sapiens
ggaggagaaggtccgcttcaagtacttccggaacctgtgctcagatgaca

SEQ ID NO: 19594 - DNA, 74 bp, Homo sapiens
ctgcccaggcacatcttaaactcggagaagttagtgttgaatctgttatcggcaggggaggtgagcagatttca

SEQ ID NO: 19595 - DNA, 100 bp, Homo sapiens
gaatcatccacgcacctgcagctctgctgagagagtgcaagccgtggggtaattcatttgcacacctgttagcaagaaacagaagttgaaggactggaac

SEQ ID NO: 19596 - DNA, 90 bp, Homo sapiens
cacagtgtagatgacttcagttcagctttaaaggccaaatttgagtttcatcatggtgactatgaaaaacagtttctgcatgtactgagc

SEQ ID NO: 19597 - DNA, 51 bp, Homo sapiens
gcccttgttaactacaacagaccatctgagcaccaaaactactttggaata

SEQ ID NO: 19598 - DNA, 74 bp, Homo sapiens
gttgtgtccccaaggaaggatgagaatagctactgaagaggaataaacatggtgtgtctcgaaagaagattgct

SEQ ID NO: 19599 - DNA, 82 bp, Homo sapiens
ggaaccctggtcaccgtctcctcagaagctccaccatgaggcgaggtggatggaggaagcgagctgaaaatgatggctggga

SEQ ID NO: 19600 - DNA, 82 bp, Homo sapiens
aaggagctaaagcagcgtgcgttcagccctgggatccagcacacggaagacatggagaacgagatcgacgagctgctgcagg

SEQ ID NO: 19601 - DNA, 101 bp, Homo sapiens
gctctcattttgaatatttccagccaacctgaggacatagagacactgcatattttaccaaggctttgactggaatggcatgctttcaaatataaacagac

SEQ ID NO: 19602 - DNA, 100 bp, Homo sapiens
cgggtggaggtgtccgtgtcctgcagccaaaatgaagtttaatccctttgtgacttccgaccgaagcaagaatcgcaaaaggcatttcaatgcaccttcc

SEQ ID NO: 19603 - DNA, 83 bp, Homo sapiens
gagctagttcctctccagctcagccgcgtagggtggactccattatgctggtggaagagggcttcagtgtgacgagtgtggat

SEQ ID NO: 19604 - DNA, 75 bp, Homo sapiens
ctggggctgctcccatcattgatgtggtgcgatcggaggaagttaacatccctaataggagggttctggttactg

SEQ ID NO: 19605 - DNA, 120 bp, Homo sapiens
caggcgctcgggggccgaactggccctggactacctctgcaggtgaatgtaaaagctttaaagagaaattcatgaagtgtcttcataacaataattttgaaaatgctttgtgcagaaagg

SEQ ID NO: 19606 - DNA, 73 bp, Homo sapiens
gtacacctgcactatctgcagtcgggcatacacatcagttcaggagtttgaacatgttaatgggcgctggagc

SEQ ID NO: 19607 - DNA, 75 bp, Homo sapiens
ccaccatcaccgaacggggcatcaccagccgacacctgctgatttgtgatggacgcctctgaccccacccagctc

SEQ ID NO: 19608 - DNA, 83 bp, Homo sapiens
ccatgtaaaaatctgatgaacacactgaataatttgcatcagcaattggcaaaattcgtgatgagaggagatggattgaaaag

SEQ ID NO: 19609 - DNA, 88 bp, Homo sapiens
aaaaaaatggtggtgttgttactacagccttctatgatccaagaagtctggcttgaagagaaactcactgctgagaaattgatggaat

SEQ ID NO: 19610 - DNA, 82 bp, Homo sapiens
cagaagtcgcgtgtctaggtgagtcgcggtgggtcctcgcttgcagttcagcgaccacgttcacatgagagatcctaataat

SEQ ID NO: 19611 - DNA, 50 bp, Homo sapiens
atgtgatgcctgctagccaaaagggtgactctgacatcattagaagcatg

SEQ ID NO: 19612 - DNA, 137 bp, Homo sapiens
cttgattctcttatacgctacttttactcagagtttgaaggttgtgaccaaaagaggctccgtcaattgaccctggccagcagttcacttgggaacattcaaacttggaagtaaacaaaccaaagaatagatacgcg

SEQ ID NO: 19613 - DNA, 87 bp, Homo sapiens
aatcccgggcatgggcggcaactctttgatgtactactataatgggaaagcggttgcttatcaagtgtcccacaaatgaaaaaaatt

SEQ ID NO: 19614 - DNA, 100 bp, Homo sapiens
caagaacaacctgtattgagtttctctttgagatgattggactgctctatccagcatcattgaggttaatccctatatcctgaagaagaacatgatcctc

SEQ ID NO: 19615 - DNA, 50 bp, Homo sapiens
ggcaacggtggacacgtcattctgagaggactcagaattcatgattgaag

SEQ ID NO: 19616 - DNA, 75 bp, Homo sapiens
attttactgtcaagacatttcttcggcattctgcaacagtgaatggacctgagtggaccctttgatcacatcagt

SEQ ID NO: 19617 - DNA, 74 bp, Homo sapiens
ttgagaaaatggaaaattaactgtaagacctggcaacgtgtttatgtattatggactgtctaatttctatcaaa

SEQ ID NO: 19618 - DNA, 83 bp, Homo sapiens
ggccaagtatgcgcccagcggattctacattgcctccggagccgtactatgccacgagggtgaatgcggctgacattgagaac

SEQ ID NO: 19619 - DNA, 74 bp, Homo sapiens
cgggtcgccggagccgcgccccaccccgccagctccagagccacgagaaattgtcgtaaatgaagtcaattttg

SEQ ID NO: 19620 - DNA, 75 bp, Homo sapiens
tcgagatgtagttcctgagcatgaggctcccagcagtgaggtgcaccctgacattggcatctctgccaaggccat

SEQ ID NO: 19621 - DNA, 101 bp, Homo sapiens
cttgtgggtcctactgaggaaaggatatgatcgtgtgtctgtgatgcgtccacagccaggagacacgacatggttttgctgggtgagtcaagaaggccctc

SEQ ID NO: 19622 - DNA, 74 bp, Homo sapiens
tagcgaacacggtgctactcaaggcccgggaaggttggattatctcaagatgcccaggatcaaatgagaaagat

SEQ ID NO: 19623 - DNA, 90 bp, Homo sapiens
aagagaaagctcacaatcaagaccttgggtccctgatgggcctgggtgacattatctcacagcagctggtggagaggcggggtctgcagg

SEQ ID NO: 19624 - DNA, 100 bp, Homo sapiens
agtaacttggccaggctggccccgagcggaactggagaaagctgagggctgcacaaggcccaggaggagcaccgcacagtggaggtggagaaggtccatc

SEQ ID NO: 19625 - DNA, 95 bp, Homo sapiens
agcaccgagagcctgctggaggagcgggccgggcggggggcctcggaagaaaactctcccaccatgtcgcagaatggatacttcgaggattcaag

SEQ ID NO: 19626 - DNA, 87 bp, Homo sapiens
ccagatgtccgtcactccccagggcggcatcgtcgtctatgggggctactcgaaacaggagccgaggaggtgctgctgctggcccgg

SEQ ID NO: 19627 - DNA, 119 bp, Homo sapiens
cccctaggagtgcaccacccccggagcccccctcaacacggaccgcgcccgccgggcacacaagaatggtcacttgccggtggtggtgtgcacattgagccccggtatagacagttccc

SEQ ID NO: 19628 - DNA, 83 bp, Homo sapiens
gtaagggatactggagtgactggagtgaagaagcaagtgggatcacctatgaagatattcacacaaaagatgttggacaattt

SEQ ID NO: 19629 - DNA, 96 bp, Homo sapiens
gcgtcgcgcccgggaggaaggaacgaggcaaggagctaaagcagcgtgcgttcagccctggggagcttactccacgggaacagcctctagataatc

SEQ ID NO: 19630 - DNA, 100 bp, Homo sapiens
gctgggtctggagacgccgtggcagcctgaacggagtgtgcgacggattgggaggttgggggccgtcccgctcctaaggcaggaagatggtggccgcaaa

SEQ ID NO: 19631 - DNA, 76 bp, Homo sapiens
gtccccgccagtcagaagttgagtactggagaaaatgaaactgggattgacccatcaagatgcttggctcaataag

SEQ ID NO: 19632 - DNA, 100 bp, Homo sapiens
ctccatccctttgggcagacagcccatggcacagcgcgagcccagcattgacctgctgcaggccttcgtggagcactggaagggcatcacgcactactac

SEQ ID NO: 19633 - DNA, 82 bp, Homo sapiens
caaaacccctcgcctggctcggacccacggagccggcagcccagcactccgatgtgaagttcatttccaatccgccctccat

SEQ ID NO: 19634 - DNA, 99 bp, Homo sapiens
cgcccgggtgtccccgcggcgcaggaggcggtggagcgcagagcgggcgagcgcgaaagaacacccaggttaatgcctgataaagaaagcatgtattac

SEQ ID NO: 19635 - DNA, 74 bp, Homo sapiens
agatgatccacgatttcttactgcaagagataaggatgtgatggtggcaggtgggatggagagcatgtccaatg

SEQ ID NO: 19636 - DNA, 75 bp, Homo sapiens
ggggtcatcgtttctgcctacatgcactacagcaagatctctgcaggctgtaagaaaagcctggagtgcacgaag

SEQ ID NO: 19637 - DNA, 83 bp, Homo sapiens
tgagcgggaggcagggggacgacaaggagggcatgatcaacctcgtcatgtcctacgcggccaagcccttattccgatctaca

SEQ ID NO: 19638 - DNA, 80 bp, Homo sapiens
cactccaccaagcatcccattacagatagaagagtttaattagacacttcagaattttgatcacctaatgttgatttcag

SEQ ID NO: 19639 - DNA, 74 bp, Homo sapiens
tcggcatctagtctttccgcttcttgaatttctctctgtaaaggaggtagtaacactctggtacagatctccag

SEQ ID NO: 19640 - DNA, 75 bp, Homo sapiens
gggccgccgccacccgcctcccaccatggctctgaagagaatccacaaggtggatggaagtttgcttagttgaag

SEQ ID NO: 19641 - DNA, 98 bp, Homo sapiens
tgcggaagcctttgcagaaaaattgtccagagagctgcaggtgctagatggggttttcctttggaatatggataaatacaccatgatacggaaactag

SEQ ID NO: 19642 - DNA, 75 bp, Homo sapiens
ccagaaaaattacagcacatctcagtgaatttgcaagtggttggtcaaagaaaaagtgatgtatgaaaaagaggc

SEQ ID NO: 19643 - DNA, 100 bp, Homo sapiens
tcaggccagagttgtgggccgccgtcggcagcaagaacagagagagaggtggacagatctgagagatactgagatgagctccccacacaagaactctgtg

SEQ ID NO: 19644 - DNA, 80 bp, Homo sapiens
agctgagtggggcgctccgcttctacgacagatccgacatcgacgcagtctacgatgatgaagtggttctgcagtgcacc

SEQ ID NO: 19645 - DNA, 90 bp, Homo sapiens
cggtactccaggtccgacccgcgaacccctctgggatccccgccgctctgtctacaacccgaggttatgaagacagtatggagtttccag

SEQ ID NO: 19646 - DNA, 75 bp, Homo sapiens
aacctgagccttcagtcaagaccctccagcttgcctgtagcagcaccgcctgcattgtggtgctggacagaacca

SEQ ID NO: 19647 - DNA, 75 bp, Homo sapiens
gatcctttatcctggtcatcttctatttccaaaggcaaatccagacagaacctttgacttggtgttgaaagtgaa

SEQ ID NO: 19648 - DNA, 83 bp, Homo sapiens
gccggctatggccgtgccctggggctgagccctcagatcatggaagggaagtggttgctgtgtatgttactggtgcttggaac

SEQ ID NO: 19649 - DNA, 74 bp, Homo sapiens
ttggttataaattatgatctacctaccaatcgtgaaaactatattcacaggtcattacacctactctgagaatc

SEQ ID NO: 19650 - DNA, 100 bp, Homo sapiens
ccgataacagtgcttgttggctaggaattcttctttgcctttatcagcttgtgaaaaattatgaagttgatctctctaatgtattagatcttcatgcctt

SEQ ID NO: 19651 - DNA, 100 bp, Homo sapiens
agaggataagtacatgttggtgagaaagaggaagaccgtggatggctacatgaataaagggactaaggctcctcaggctgcaggaaagattcacacagat

SEQ ID NO: 19652 - DNA, 82 bp, Homo sapiens
ctgacctcatctgggccaaaatgctgagttctaaggaggctggcttccccgggcgctgcctggacaggcctgcctgcgtgct

SEQ ID NO: 19653 - DNA, 83 bp, Homo sapiens
ggggacattaccggacaggccttgtccggcaataccaagacctgcctagagctggaacgttacctccagagcgagccctgcta

SEQ ID NO: 19654 - DNA, 83 bp, Homo sapiens
cgcggacatcgtctcctgtgtggcgatggtcttcctgctggggctcatgtttgaggtgaatgaaaactttgccattgatttga

SEQ ID NO: 19655 - DNA, 50 bp, Homo sapiens
gcgcgttcggctgttaaccgaaagggtagaatccgccaagctttgagaga

SEQ ID NO: 19656 - DNA, 88 bp, Homo sapiens
aggcatgggagttgtcatgttgggaacatgctagacctcagtatccttgagacacatgtgtatggtaatgcgaggtgtacagaaaatg

SEQ ID NO: 19657 - DNA, 51 bp, Homo sapiens
gagagatctctgctgcctgcattgagggaatgacctggatgaccctgaaag

SEQ ID NO: 19658 - DNA, 82 bp, Homo sapiens
gccctggccacggggactctcttctggatgggagtgcatccgccccaacccttttccccctcgtctcctgtgagaattcccc

SEQ ID NO: 19659 - DNA, 100 bp, Homo sapiens
gagcagcggaaaatgatccagtcacaggtggatgaaaatactaggaaaagtttatttaagttacgttctacatgggatgaaatattccctttgaagaaac

SEQ ID NO: 19660 - DNA, 100 bp, Homo sapiens
cacaggcggcggagccggtatgggcccgcctgaccctgggcgccgcgccgcacgagcaccagcctagagccaggggttaaagggaatgtccagggaaacc

SEQ ID NO: 19661 - DNA, 73 bp, Homo sapiens
gagtccctcaactctctacgctttgcctccaaggttggccgccttgaaaatgcaatcgggtggtatcatagcc

SEQ ID NO: 19662 - DNA, 80 bp, Homo sapiens
caaatggaaacccttaattcgcaacaagattgacctggctgaaaggagagaggtttcccagcagcgagctgaagaattct

SEQ ID NO: 19663 - DNA, 133 bp, Homo sapiens
caattttcttcagctatctacgggttcagttgataaaaataagaacaaagtgacaccactgcagagaatacataaaccagtccgttcccaaaaggcccgctggctctgtgcagaatcctgtctatcacaatca

SEQ ID NO: 19664 - DNA, 144 bp, Homo sapiens
cttctttgtgcgtcagttttatcgtctgcaaaatgggaatcatggtagcacctgtctgatgacgttattacaaggtctgggacaagcggctggccagggctgccgaagcctgggccacccagtgcatctgggcacatgggcctt

SEQ ID NO: 19665 - DNA, 98 bp, Homo sapiens
ccggaaagtttatacaaaaagctcccacttaaaggcccaccagaggactcacacaggtatgagttaatacagaaaggagtgactgaacttagaactgt

SEQ ID NO: 19666 - DNA, 90 bp, Homo sapiens
atcacatgaagactaaagcatctgtcagaaaataacaaatgtggcaattattttggatctatcacctgtcatcataactggcttctgctt

SEQ ID NO: 19667 - DNA, 100 bp, Homo sapiens
ctcctgcgcgaggcggccaaggcctgctggcccggagccgcgcctccacccgcgcgagggcagtccagatgaaaagagtaccaatgaatctgcctccagc

SEQ ID NO: 19668 - DNA, 100 bp, Homo sapiens
gttacaatggtggagttggcaggtgtgcgcagggcctgctatggtgtgctgcggttcatcatggagagtggggccaaaggctgcgaggttgtggtgtctg

SEQ ID NO: 19669 - DNA, 82 bp, Homo sapiens
ccgagtccgcgggaagatggcggcgccgctcatccccctctcccagcagaaatctatgacaagttcaagcagagtacacaca

SEQ ID NO: 19670 - DNA, 100 bp, Homo sapiens
ataacttcaagccagaagatatcaccgaggctctgagatggggcattctcttctcccaccctcgggactttaccccagtgtgcaccacagagcttggcag

SEQ ID NO: 19671 - DNA, 100 bp, Homo sapiens
gagcaaggaaaagagccctggaatatgaagagacatgcgatggtagatcaacccccagacatatctgaagagatggattaagaatgctttggattaagga

SEQ ID NO: 19672 - DNA, 89 bp, Homo sapiens
tgccgctgccgctgccgccatcgtgccagcccctcggttttgatgaagcaagaacacagagaagagattgatttgtcttcagttccatc

SEQ ID NO: 19673 - DNA, 75 bp, Homo sapiens
gccttccagagacgcggcgcgcccgccctgcagctgcccaagcattgcttctgcaggaagcctttttggtggcat

SEQ ID NO: 19674 - DNA, 97 bp, Homo sapiens
atgccatgcagaactgcacactcagtccctctgtgctccaggactccctcaataatgaaccactcgttttgactattattttatcactctttgtgaa

SEQ ID NO: 19675 - DNA, 100 bp, Homo sapiens
gcggctgtgtggatgtcggcgaagccgcgggcgaggactttccttatcccagttgattgtgcagaatacactgcctgtcgcttgtcttctattcaccatg

SEQ ID NO: 19676 - DNA, 75 bp, Homo sapiens
cggaggaagagccgggcagtccctggagcgggccaggtctcggcgcggaagatggccggcggcgtggacggcccc

SEQ ID NO: 19677 - DNA, 100 bp, Homo sapiens
ttctctcccaggccacaagacatttcctgctcggaaccttgtttactaattcatgattatgatatgagggtggatgatttccttcgtcgcacacaagctg

SEQ ID NO: 19678 - DNA, 135 bp, Homo sapiens
gttaaagatgagcgggtggcagcgacagagccaaaatcagagctggaacctgaggagagagattttggaattacagatgcaaagtataatggaaaagaaaatgaaaaccaagagaaatattgccaagcattacaa

SEQ ID NO: 19679 - DNA, 52 bp, Homo sapiens
gtatgaccttcacctcattaacaggagtgcatccgccccaacccttttcccc

SEQ ID NO: 19680 - DNA, 100 bp, Homo sapiens
cggagtctgggggttcgcgcccgccgacccgcgccctgctccctctcagcacctgggcggacggcatcattcttaacaaagaagttaaatattggtggga

SEQ ID NO: 19681 - DNA, 74 bp, Homo sapiens
cgtttgttcaggaaccaccagtgacagaggtgctggtgacagctttgtgggagctctggccttctacctggctt

SEQ ID NO: 19682 - DNA, 96 bp, Homo sapiens
gggcgagactggagcagagccgctgggcgccggagccgaggcgagcgccgcgcgcaccactgttcttatcaggagaggatcaatggaagtgaaagc

SEQ ID NO: 19683 - DNA, 100 bp, Homo sapiens
ctggacaactgctataaaaacaacaacaaatacttttattaattcggggagcctggtcaccaactggatgctcagatatcttaatgcaattcagacaatg

SEQ ID NO: 19684 - DNA, 96 bp, Homo sapiens
acatgttaggaactgggtccccaaagtcttggaacagcgacgacaaggcttggaaacatacttacaggtcagggaagtcaaagatgcatccctgag

SEQ ID NO: 19685 - DNA, 98 bp, Homo sapiens
ccattgagctgtgcacgaccacaccgctgatgaagacaaggactcacagtggctgcaaggcaagataacccctgtgacagaaggctactgttgctgta

SEQ ID NO: 19686 - DNA, 83 bp, Homo sapiens
tttaggagctctgctcaaagccagacggtcacagaattttccacactccttgacagaggtgcttaacccttatccatcagcat

SEQ ID NO: 19687 - DNA, 83 bp, Homo sapiens
agagcctcgcctttgccgatccgccgcccgtccacacccgccgccaggttttctaaatagctttgaggagttacaggctgagg

SEQ ID NO: 19688 - DNA, 75 bp, Homo sapiens
gccatggcgtccaacatggaccgggagatgatcctggcggattttcagaccaagatcactccatggatgaaatga

SEQ ID NO: 19689 - DNA, 107 bp, Homo sapiens
ctctgcttgtgttcgtggccacgctgctgatcgtcctgctgctgatggtgtgcggtacaccaggggttggaaaaaccacactaggcaaagaacttgcgtcaaaatca

SEQ ID NO: 19690 - DNA, 90 bp, Homo sapiens
agctctctcttgagccgctgccttgttaccagctggagcttgacgcaggttacggcctccgctgccacagggccatcatcaccatctgcc

SEQ ID NO: 19691 - DNA, 101 bp, Homo sapiens
aagaaaccagcttgatatgttggtttcaagtgccccatttgctccaagtctgtggcttctgacgagatggaaatgcactttataatgtgtttgagcaaacc

SEQ ID NO: 19692 - DNA, 127 bp, Homo sapiens
aagaggttgtggtgctcttccggatgagaagtgcttagattctggatacattttgaaggtaaactttggagtcggagtttaaaactagcttatactctacttaataaactgacaagtaagaatgaac

SEQ ID NO: 19693 - DNA, 97 bp, Homo sapiens
tcgctgttgctgccgccatacgcgctctccctgtttaggtgaacgtgctggccctcagcatctgcacacgggaagcctaccagtccatgaaggagcg

SEQ ID NO: 19694 - DNA, 89 bp, Homo sapiens
tgataacttcatagctgcctgtacagaaaagaaaatccccgttgtttttcgattgcaagaggagcgagaacccgagcagcgccatgagc

SEQ ID NO: 19695 - DNA, 83 bp, Homo sapiens
cgcggattcgccgaggcaccgaggcactcagaggagaatggtgctggaaggaaaccctgaagtggggtccccccgaacctcag

SEQ ID NO: 19696 - DNA, 75 bp, Homo sapiens
aaacttaaggaaagagtgggaaagtgagggccgaggagtcttgtaaatgtaatggctggaaaaaccctaacccct

SEQ ID NO: 19697 - DNA, 75 bp, Homo sapiens
ccggagtgtatgtctttggagaacttctggagctggccaacgtgcaggaggaatgctgtctctgcaatttgagag

SEQ ID NO: 19698 - DNA, 74 bp, Homo sapiens
agataaacccgggacccacttcactccagtgcctccgacgcctcctgatgggactggtgattgcagctggaagt

SEQ ID NO: 19699 - DNA, 90 bp, Homo sapiens
ccagtgtgcagaagttctcgaatcattctttgtacagaaattgaaaggcttcaaagctagcaggggagcggttacctaagccggagcggg

SEQ ID NO: 19700 - DNA, 50 bp, Homo sapiens
tgtcgcgttacgggcggtacggaggagcctcctccagctggtgatctcgg

SEQ ID NO: 19701 - DNA, 99 bp, Homo sapiens
cctggtgctcggttcctcggggagctctggatggagaggccccaaggggcatctcctcaggtgcaacacgcaggactacatctggcacaaggggatgcg

SEQ ID NO: 19702 - DNA, 82 bp, Homo sapiens
gcaggtccggacccactggctgctggagcttgtcaccaccaggtatcgagaaccttccctgcgaacttcagaggaacttcca

SEQ ID NO: 19703 - DNA, 123 bp, Homo sapiens
ggaagatgccgctggcgcagctggcggacccgtggcagaagatggctgtggagagcccgtccgacagcgctgaggtgaaaggtgtagcagtcactcggcctacacccacagcatcgaccttgt

SEQ ID NO: 19704 - DNA, 50 bp, Homo sapiens
ttggccccgtccttacctcacaggttctctacttaaaagacaatgactac

SEQ ID NO: 19705 - DNA, 82 bp, Homo sapiens
cttgcagttgaaggagtataacacagagcggggccatggagggggagactcttcacacattctacactcagctggtgttgat

SEQ ID NO: 19706 - DNA, 73 bp, Homo sapiens
actttcttccagcttctgctgtccttctttgtggagagcaagcttttccagaagcctgttaaaagcaaggtct

SEQ ID NO: 19707 - DNA, 100 bp, Homo sapiens
tttgaaacaaaaatgggtggagtacagatctctgcagttacaggaacatcgtctgcttcatggccggagcctcaacagaaagctcctttagttcctcctc

SEQ ID NO: 19708 - DNA, 75 bp, Homo sapiens
gcctgaatacacctgcatgaggtggctgaagactccagttggggacggcaaaacagaacagaaaggcggagataa

SEQ ID NO: 19709 - DNA, 101 bp, Homo sapiens
ggctagtccgcttctaccagcgtttcattttgcctgcctgagctcctctagtagtggccacaattgccagagaagatagagcaggtctctcccaggacttg

SEQ ID NO: 19710 - DNA, 74 bp, Homo sapiens
aaaggcagcgcaaaaaacagccaccgattttgctatgtctctgagctgcgaggacatacagtgggagaagttat

SEQ ID NO: 19711 - DNA, 111 bp, Homo sapiens
attgaacttcatccccagttcctgtgaagctttctggatctcgtcttccaaggccctgggaggagcggggacactgaggacctctctccaaattggcctctcaactcacag

SEQ ID NO: 19712 - DNA, 82 bp, Homo sapiens
atgccaatgccgctggtgcttattatcagcctgcagaattttcttcctgccccttgaactctgatgaagaagtgaataaatg

SEQ ID NO: 19713 - DNA, 75 bp, Homo sapiens
ttcccgcgtccgccgattcctcctccttggtcgccgcgtccttggctggcgtctacaggcctcgggcctccccgg

SEQ ID NO: 19714 - DNA, 100 bp, Homo sapiens
cagaggaagatggacagctgggaattgctgaattagaactgcagaggttcctctacagcaagtctattatcctcccagtccacaacgctgaaccgtggct

SEQ ID NO: 19715 - DNA, 75 bp, Homo sapiens
agagcatctgccgggagatgtccggggacctggaggagggcatgctggccgtggcaatgtgtattcctccatcat

SEQ ID NO: 19716 - DNA, 99 bp, Homo sapiens
gggtcctgaagtcagttgttgcatcaaatacttcatatttggcttcaatgtcatattttggctaaaagatggcggcaaggcagcccaggcaaatgtaag

SEQ ID NO: 19717 - DNA, 100 bp, Homo sapiens
tttttaggagagttagagaagtgccttgaagatccagaaaaactaggatccctttttgttaaacacaacagctttgctgagccatcaaggtctaatggaa

SEQ ID NO: 19718 - DNA, 100 bp, Homo sapiens
cctgtcccacaggtatgggctctacgtgtgcttcttgggcgtcgttgtcaccatcgtctccgccttccagttcggagagcaacagttttcctggagtttt

SEQ ID NO: 19719 - DNA, 90 bp, Homo sapiens
tctttcccgtccgcgatgagaagaggggcaagcggccgtctcccctcgcacaccagctgttcgggggtcttgtctggattttggttgcct

SEQ ID NO: 19720 - DNA, 101 bp, Homo sapiens
ctggagcctcagttggaagcagccgatccagcctgcggagcctgtggggcaggctaccggctctctgaccagttccacgacatcctcattcgaaagtttga

SEQ ID NO: 19721 - DNA, 100 bp, Homo sapiens
aagaaagcacatccgatctcaacattcacgtcctgccctataaccgattaattaattgatccccagctagactaggtaagaatgattgatgttggctgat

SEQ ID NO: 19722 - DNA, 98 bp, Homo sapiens
gggactaaactggcgggctccgtggaagcgtggccggcagcgtcccggacgaggagatgtcatcctcaaattccgggacaagattgagaaaatggaga

SEQ ID NO: 19723 - DNA, 74 bp, Homo sapiens
caatagagtttaccagcttggatgcccacaagggagtaggaagttgccttaaagaatagacaagagctgtatgc

SEQ ID NO: 19724 - DNA, 82 bp, Homo sapiens
aggcccctccggccagggccgggagccgggccggcctagccaggtgacagagctgaatgaacctctctccaatgaagatcga

SEQ ID NO: 19725 - DNA, 75 bp, Homo sapiens
ctccttttcctccacctaccttcccgagtttgcctgcaatgagatttcattctctacatttaaaggacatccttt

SEQ ID NO: 19726 - DNA, 82 bp, Homo sapiens
tttgctaggaaacatacatgctgtcactaagcagccatcactggtgcaagctatatttaacggagatcctgatgaagttcga

SEQ ID NO: 19727 - DNA, 100 bp, Homo sapiens
atggccccgaccgcgtgctggagctcttcgacccacccaaggttaaataggattgcgaatcaggtggccattcagcggaagaagcagtttgtggagcgag

SEQ ID NO: 19728 - DNA, 80 bp, Homo sapiens
cgccgcagccatgaccgtggagttcgaggagtgcgtcaaggactccccgcgcttcaggtcacaccgacaaatctgaagcg

SEQ ID NO: 19729 - DNA, 100 bp, Homo sapiens
gccgccccccgaaaccccagacatcaaccagctgccgccgtccatcctgctcaaggatccagtttatggaaaaggaaaacttggagaaatccagggactt

SEQ ID NO: 19730 - DNA, 136 bp, Homo sapiens
cccccggccgctaccgctcaggtgctgcaggcacagcccgagaaaccgcagcactacacgtttttcttcccccagtccctcagctgctgctgctgctcaggaggtcagatctgccactgatggtaataccagcacc

SEQ ID NO: 19731 - DNA, 96 bp, Homo sapiens
gagaaataaaaatgacttcccattatgtgattgccatctttgccctgatgagctcctgtttagccactgcagactctgatgccagtatggactgga

SEQ ID NO: 19732 - DNA, 80 bp, Homo sapiens
ctaggactctatgacacggccggacaggacagagcgggatgccaccagcttgtccaaagggaagttccaggagctcctgg

SEQ ID NO: 19733 - DNA, 109 bp, Homo sapiens
ccgggatcgtgaccgagaccgtgaccgagagcgtgaccgagagcgcgaatatcgtcatcgttagaaggaaaccagaatccgggcaatggataaggatgccaagaaaaga

SEQ ID NO: 19734 - DNA, 100 bp, Homo sapiens
ggaggcggcgggcgagggcgactacgaccagtgaggcggccgccgcagcccaggcgcgggggcgacgacaggtgaacggcatggattctgagaaccagga

SEQ ID NO: 19735 - DNA, 75 bp, Homo sapiens
aggcacaggaatatccatgtcggcttgtagagagattgcaatgtcatctgggtgattctcagtgtggaggtgggt

SEQ ID NO: 19736 - DNA, 75 bp, Homo sapiens
gtttgtggcagacagacttatgctggaactgggttttagcaaggatatcaatgcttacaattgtgaagagcccac

SEQ ID NO: 19737 - DNA, 100 bp, Homo sapiens
gtttcccattggtcactgtacacttggaaaaccagaatctggtgatttagaagagaagattgaacaaccaagatgaaaacccctgcttcctttacctgag

SEQ ID NO: 19738 - DNA, 90 bp, Homo sapiens
ccgcctagagtggttcagccacaaggaggaccacggaggggtgatcgtgaacatcactgccaccctggggaaccgggggcaggcgctcca

SEQ ID NO: 19739 - DNA, 89 bp, Homo sapiens
gcggctctccgccgtccccagccctgcctctccctgggctctgaacctgtacgacagcatccgaaatgagcccttcaagattcctgagg

SEQ ID NO: 19740 - DNA, 75 bp, Homo sapiens
tgattatgttgctgtagctaccagacttattcgtctaatggaagagatcatgagtgagaaggagaataaaaccat

SEQ ID NO: 19741 - DNA, 100 bp, Homo sapiens
aggaacagattgttcctaaaccagaagaggaggttgcccagaagaaaaagcctgtggacatctctacagcaatgagtgaacgggcacttgctcagaaaag

SEQ ID NO: 19742 - DNA, 82 bp, Homo sapiens
gggtgattaaagctggctttgcaggagaccagattcccaaatactgtttcccaaactagtgtttgagaagtcccccctgcgg

SEQ ID NO: 19743 - DNA, 83 bp, Homo sapiens
gcccgcactcctggtcctgctcggggctctgttcccagggtgtttgctttgatgtacctaccgcatcagtaacagaaatacag

SEQ ID NO: 19744 - DNA, 136 bp, Homo sapiens
ggcgcagagggctcctccggcgccgccgagctgcgcccgctgccttcacaccccggacatccgcgccacacgatgaccgagtgggagacagcagcaccagcggtggcagagaccccagacatcaagctctttggga

SEQ ID NO: 19745 - DNA, 101 bp, Homo sapiens
atgtttcatcatactgctatactgaaacctgaatcaggctgtcttgataacatcaaatgaagcagatgatgatgatgatccagaatataatttcctggaag

SEQ ID NO: 19746 - DNA, 101 bp, Homo sapiens
catccagtggggaggaaaaggccaagagtagctggtttggcttgagagaagccaaggacccgactcagaaacccaggagtagctcggagaggaggaaggag

SEQ ID NO: 19747 - DNA, 76 bp, Homo sapiens
acttctcatttaagctactcaagaaagagtgcccaattccaaatgtacaggagccagcaccgctctttgaccttgc

SEQ ID NO: 19748 - DNA, 100 bp, Homo sapiens
ctgcgggtggcggtggtgtgctcgagcaaccagaaccggagcatggaggcgcacaacatcctcagttattgccttgtctgtcaagatccgcagttatgaa

SEQ ID NO: 19749 - DNA, 83 bp, Homo sapiens
gttgatggcctggagaagaaagatgttttgcctactgttgatccgagaaccatggagtctggcagtaccgccgccagtgagga

SEQ ID NO: 19750 - DNA, 98 bp, Homo sapiens
catcaatcttactggtgggaaatataattccaccttcctgggagtccctttcgtcatgctagtttccaagccagcgccctactgggaaggaacagctg

SEQ ID NO: 19751 - DNA, 100 bp, Homo sapiens
cggaagtctccttcatggagctggacaaattcctggaggatgtcaggcggaaggtgctctaccagcgtgcacccaggaatatccaccgccatgtgatcct

SEQ ID NO: 19752 - DNA, 100 bp, Homo sapiens
ctgtatttgggccaaattgctttcatatgcattgcctcttcagctagtgaataaccaaaccatgacaacatggatggagatcttccgaactattatcgac

SEQ ID NO: 19753 - DNA, 75 bp, Homo sapiens
agcaccagcttccagttagtggatatagcacaccatccccagccaaatgtccctcttccagtggaaagcccaacc

SEQ ID NO: 19754 - DNA, 97 bp, Homo sapiens
acctatatacttggagttggagacaggcacctggataaccttttgctaacaaaaacagggaagacactgatcaaggtggcagaagctgaaaagcaac

SEQ ID NO: 19755 - DNA, 87 bp, Homo sapiens
agccaggcgatattatcattgtgttagatcagaaggaccatgctgtttttactcgtttcggagcaacatcccctgtcacctggttga

SEQ ID NO: 19756 - DNA, 100 bp, Homo sapiens
caagaggttgtgtatttctcggctgctgatcacgaaccggagagcaaggttgaggaagatattcctcgtcagcttgtctacattggtctttacctcttcc

SEQ ID NO: 19757 - DNA, 78 bp, Homo sapiens
ggaaaacgaggaaagtcccaggatgactactgtgtcaagttggactccatgaaagaattgcacaaaacaaatcgacag

SEQ ID NO: 19758 - DNA, 74 bp, Homo sapiens
atgaagacagttcctgtcataccttttaaaggtacttcttgcaagggatatgcattagcacatactcaagaagg

SEQ ID NO: 19759 - DNA, 100 bp, Homo sapiens
tcttccaaccagagcttgtgtagcgtcagatccttgagtgataaaggagtagagagcaaaatatgctgtgaattccatcaagaagaaagtcaacgacaag

SEQ ID NO: 19760 - DNA, 50 bp, Homo sapiens
catgatccataatcggtttcaagcaaggatggaacattactgtggacctg

SEQ ID NO: 19761 - DNA, 107 bp, Homo sapiens
agcagctccacgaaaggcagccgcggatcgccgcgctcagcgacaaacaagtgaaaggtgtagcagtcactcggcctacacccacagcatcgaccttgtgaacccag

SEQ ID NO: 19762 - DNA, 101 bp, Homo sapiens
atgtttttccgaagcctgcatttttttgtggagtggtttgaatatcgtaagcgcacgtttaaacatctcaaggtccattcggatgatgaagtgtttgaaag

SEQ ID NO: 19763 - DNA, 104 bp, Homo sapiens
ggaagcgtctccgttgggtccggccgctctgcgggactctgaggaaaagctcgcaccaggttttaaaatcaaagatgggaaaatcggagaaaattgcccttccc

SEQ ID NO: 19764 - DNA, 98 bp, Homo sapiens
cgccactggccagaccgggctcaccaccctggcgcaggcggtgcaagcagcctcctttttattgccgagatgttgctgaaatgtatgacaatatcctt

SEQ ID NO: 19765 - DNA, 98 bp, Homo sapiens
agaaaggcaggagagatagaggcagcagaagccagggcagctgaaagacagagaccttcaggaagacaaacttttgcttgagagccagctcatcctag

SEQ ID NO: 19766 - DNA, 95 bp, Homo sapiens
tcaggaattttactgggataattatccaaataaattgcaagcattctatccaaatgggcttttcttatccacctcatgttggattatcccttggc

SEQ ID NO: 19767 - DNA, 100 bp, Homo sapiens
tgaaaagcggcacgacaacattaaaccatcagatgagatacggacggcctgaccctctgctccggagagaacacgacattcgcgtgagcctccggatggc

SEQ ID NO: 19768 - DNA, 101 bp, Homo sapiens
ggaggctgctggcaatggcctacgtcgtcataccgggcttccttgccctgtccggggactcacaccacccggcaagaactgctcactacggctccctgccc

SEQ ID NO: 19769 - DNA, 98 bp, Homo sapiens
aggatttggcgctgcagaaccagatccgggagcacgtcatctccatcgaggatgccatggacaatattaccaggcagaaccaattctacgatacccaa

SEQ ID NO: 19770 - DNA, 75 bp, Homo sapiens
agcgggcggacggccggcgggggcggcgtgcggcctagcgtctcaggctgaccaactgactgaagagcagattgc

SEQ ID NO: 19771 - DNA, 100 bp, Homo sapiens
agagagcattctttcctttcatattcctaaggaattgatttcccttcacattaaagaagatttgtgcaggaaagtgaaaaggtttctgaatatccagcag

SEQ ID NO: 19772 - DNA, 75 bp, Homo sapiens
cctgatggaggaagtgctcctgctgggcctcaaggaccgcgaggtccgcgggagagctgtggggcttggtgagtg

SEQ ID NO: 19773 - DNA, 101 bp, Homo sapiens
cccgtcaacaccaagaatcaagctgtgaaggtgctggagaatctggtaaaagcaccattgtgaagcagatgaggatcctgcatgttaatgggtttaatgga

SEQ ID NO: 19774 - DNA, 87 bp, Homo sapiens
gagattcagccagcacactcctcgcgagcaaggacatggaggagtgaatcagcttgggggggtttttgtgaatggacggccactccc

SEQ ID NO: 19775 - DNA, 75 bp, Homo sapiens
gtcgaagacatggaccagggctacggagatcgcaccccctccctccctggcggagcccctgaaggagctgttcag

SEQ ID NO: 19776 - DNA, 100 bp, Homo sapiens
gcagagcgtggagcgcgtgcgcacagatagcacgggctctgctgtctccacggacgactcagagcaagaagctccaccatgaggcgaggtggatggagga

SEQ ID NO: 19777 - DNA, 95 bp, Homo sapiens
gaatgtcaacgattagtcatgcaataaatgttctggttttaaaaaatacatatctggttttgtattcatccacaatgcgatacctttcatagggt

SEQ ID NO: 19778 - DNA, 100 bp, Homo sapiens
atgaagtctcctagtttccgatccattcgagagcatcagaaggtgctttacaaggccaagtacggtccaatgtggatgtcctacttagggcctcagatgc

SEQ ID NO: 19779 - DNA, 98 bp, Homo sapiens
gaggaggaggattcagggaataggagctggggagcccttctgcgccacagaccagcatctcagacatgtcgaaaaagatgttttgatccctaaaataa

SEQ ID NO: 19780 - DNA, 89 bp, Homo sapiens
tgttcttcgacattgccgtcgacggcgagcccttgggccgcgtctcctttgagctgtccccaatctcttcatgctggaaacagtggatt

SEQ ID NO: 19781 - DNA, 97 bp, Homo sapiens
tctgcacttcgtattcaaagtgggaaaccgcttccagacggcgcgtttctatcgggacgtcctggggatgaaggtggccccaatgtcagtgtatgct

SEQ ID NO: 19782 - DNA, 100 bp, Homo sapiens
aacgcctgcaagtgccatctcaaacaaagaggcaagcagtggctctgtgtaaacaggaacatcgataagtagtgtaaaaacttgcacaatgaaatccgaa

SEQ ID NO: 19783 - DNA, 100 bp, Homo sapiens
ccattccagaaagatggcatcatttttgccctcaaaagaaatggcagatttctttaaagactcgtgcagcacatcattatcgctggatgcccggacatgt

SEQ ID NO: 19784 - DNA, 87 bp, Homo sapiens
cagacagacttatgctggaactgggttttagcaagggcaattgaaggaacagactaaaaatcgtgtcctggaaggaaactacaggta

SEQ ID NO: 19785 - DNA, 98 bp, Homo sapiens
gcgcaagcaggtagcgccgctgctgaagagtttccaaggagagggggagctgctgagcccatgccgctgtgatggctcggtcaagtgcacacaccagc

SEQ ID NO: 19786 - DNA, 83 bp, Homo sapiens
ctgaaagatacatggcttgcaaaaagtaaaccacgatcgttatgctgaggggatatgagactttctactcggaatatcctgag

SEQ ID NO: 19787 - DNA, 82 bp, Homo sapiens
tccaagtggctcatgatcccgactgtggagatgtggtgcgactagtgatgttcctccatcttacgttcaaactaaattttct

SEQ ID NO: 19788 - DNA, 82 bp, Homo sapiens
gctgtgcttgccaggcctggctccaggggatatgagactttctactcggaatatcctgagtgttgcgtggatgtaaaaccca

SEQ ID NO: 19789 - DNA, 88 bp, Homo sapiens
agtaacccgcgaaatgatgggatagcgttgcaaatccttaaaagagtcttaacggtgctggagaatctggtaaaagcaccattgtgaa

SEQ ID NO: 19790 - DNA, 50 bp, Homo sapiens
atttcagtcactggtttgcagagtccagtaaccccaagaaaggcatcagg

SEQ ID NO: 19791 - DNA, 82 bp, Homo sapiens
tcctgtacagcctgcagaactggtaacaagatgctcaactatagtgctcccagtgcagggggttgcctgctggacagaaagg

SEQ ID NO: 19792 - DNA, 100 bp, Homo sapiens
gtagccacaaatatcatgagggcgtggctgttccagcatctaacagccctctttggattccagtacgatgcatcagaccataccatggcgtggctaggac

SEQ ID NO: 19793 - DNA, 98 bp, Homo sapiens
gcaaatcaagcctagtgcttcgttttgtgaaaggccaatttcatgaatttcaagagagtaccattggggagggtgatgagactggtgtgatggataat

SEQ ID NO: 19794 - DNA, 90 bp, Homo sapiens
tggaagactaccaggctgcggaggaggttccaattgtggacaagataaggaccattgctcaggctgtctatggagccaaagatattgaac

SEQ ID NO: 19795 - DNA, 100 bp, Homo sapiens
agggatgactccgctgaggtggacgtgtacaacccgacgaggaacgaatgggacaagatcccgtccatgaatcaggtttctaagcatgaattgaggaaca

SEQ ID NO: 19796 - DNA, 99 bp, Homo sapiens
ttcccagccgcgcggcttcctccagacctctcggcgcggctccatgtgcaagaagcttccggcaaccacctgaacccagagcccaaccagccggccccc

SEQ ID NO: 19797 - DNA, 96 bp, Homo sapiens
tttggaaggccgggtgggccgagtgctttctcctgctcaagacagccacacgaacacggatctccccccagtgtcagagcagatcatgcagactct

SEQ ID NO: 19798 - DNA, 83 bp, Homo sapiens
ctcgggcctcacgctgaagtccgaggcccttcgcaactggcaagaaattgatgatgcaatgcgcaactttgctgaaaaagtgt

SEQ ID NO: 19799 - DNA, 128 bp, Homo sapiens
atttaccagaagagatggctctgttccacttccagcagaagttcttgctggaggctgtaataacaagcctttgtattcatttgaagataatgcagactatgtttatgatgttatgtggtcacctaccc

SEQ ID NO: 19800 - DNA, 101 bp, Homo sapiens
ctacctgcggcccggctctcctccgcgcccccactcgcgctgcgatgacgcgctcactgttcaagggaaacttttgggaacattttagtggacaaaccaaa

SEQ ID NO: 19801 - DNA, 50 bp, Homo sapiens
ctgccggttcaggtgtttaacttgcaggccacgtgcccgtagaaaagata

SEQ ID NO: 19802 - DNA, 100 bp, Homo sapiens
gctgctggaagacgaggagcgcgtcgtgcgcctgggggtgcgcgcctgcgacctgcccgcctggatcctgaggaggatgaaggggctggccctggaggcc

SEQ ID NO: 19803 - DNA, 50 bp, Homo sapiens
atctcaggaatctggtctcattggcaaatccagtttgctgatgacatgca

SEQ ID NO: 19804 - DNA, 50 bp, Homo sapiens
ctacaatcacctaatgcccacaagaatcctcactatggatgggctcattg

SEQ ID NO: 19805 - DNA, 96 bp, Homo sapiens
ctggtcaatcatgacttcacccctctggaggtggattttgcaaatcgggaaagtcagctggctttttatcactgcatggagaaatctggtcaagac

SEQ ID NO: 19806 - DNA, 82 bp, Homo sapiens
ctggtcctcctccacctcccacatttcatcaggaatctgagaaaaaggggttgattgaaagaatctatatggtacaggatat

SEQ ID NO: 19807 - DNA, 100 bp, Homo sapiens
caactccggagcccgctctgcgttttgttttcccctcggcactaggcagcggaggagcccgaccgacccgggatacccacccaccatcccagggtctaca

SEQ ID NO: 19808 - DNA, 75 bp, Homo sapiens
ttcgcagtggtcgcttcttctccttggtggagttggcatgaacttaacagcagcagatactgtgatttttgttga

SEQ ID NO: 19809 - DNA, 101 bp, Homo sapiens
gaatctcaggaacaccaccttctgtcaggcaagaaactatattcagtctttgactcagatgccgaagatgaactttgcgaatgtatttattggtgccaatc

SEQ ID NO: 19810 - DNA, 100 bp, Homo sapiens
tcccgagaagaagttgaggcgctataccatggtgaatccgggcagcagctcgcagccgcccccggtgacggccggctccctctcctggaagcggtgcgca

SEQ ID NO: 19811 - DNA, 100 bp, Homo sapiens
tggggccaacagcggcctctagtgtctggaggaggaagtgtcagcgctactgccgcagctactgctcctcagcaggaagcggatgctgaggtgaacacag

SEQ ID NO: 19812 - DNA, 75 bp, Homo sapiens
actgaaaaaccaaacatgagggtagcagaaatgcactcggtgatggaaagagagccactattctgaagaacactt

SEQ ID NO: 19813 - DNA, 51 bp, Homo sapiens
ccctcagctgctctctgctacaaggaggatagtgatgaggaagaagaagac

SEQ ID NO: 19814 - DNA, 75 bp, Homo sapiens
gcttgccctggtcttgctcggccgatgaagtgcagaggtttttttctgatgaatacgttgccagcttgcatctgc

SEQ ID NO: 19815 - DNA, 82 bp, Homo sapiens
gtccgccagcgccgtctacgtgctggacctgaagggcaagaagataccatcccacgaacacagatagaaagaaggaaaacaa

SEQ ID NO: 19816 - DNA, 82 bp, Homo sapiens
attttccgagtgaatctgcggacgctgcgcggctactacaatcagagcgaggccggggagactggactcgaccgaactgaag

SEQ ID NO: 19817 - DNA, 51 bp, Homo sapiens
tgttaacaatgcatccacagaggtctactggggttcatcccatctgagcca

SEQ ID NO: 19818 - DNA, 100 bp, Homo sapiens
cgcttcgtcgttcgccaatgtttgaggagaaggccagcagtccttcagggaagatgggaggcgaggagaagccggactctgcagacagtgggcccatccc

SEQ ID NO: 19819 - DNA, 88 bp, Homo sapiens
ctgcccgacgaagtgctgcagggtggtgtgatatacaggatggaacaatacctggtcctatcgcacaacgttttaaaaaaactttgga

SEQ ID NO: 19820 - DNA, 86 bp, Homo sapiens
aaagagctcattaaggacgggaagaacctcatcgctgcgacgaaaagatctaagcctttcccacgttatggttataaaccctcccc

SEQ ID NO: 19821 - DNA, 90 bp, Homo sapiens
catcacccaggtcagcaagggcacctgcgagcaagggctggtggacgaagccattgataccaaatctctgttggatgcttcagaagaagc

SEQ ID NO: 19822 - DNA, 82 bp, Homo sapiens
gaagcagcagctcaccgaggacggggactcgtggaccaggtgctctgaggctggcgtacagacacagcacgtgcgacggagt

SEQ ID NO: 19823 - DNA, 87 bp, Homo sapiens
gatcgctgaggagcagatggagaatgagccccagttcagtgccatcatgcaggttggtcaaagaaaaagtgatgtatgaaaaagagg

SEQ ID NO: 19824 - DNA, 51 bp, Homo sapiens
cgcctcccggccgagctgacggtccaggggcaagttcatcctactctcgag

SEQ ID NO: 19825 - DNA, 75 bp, Homo sapiens
ctcgggccgtcgggagcggagcctcctcgggaccagggggggccctcagcctcttggccttgaacgggctgttca

SEQ ID NO: 19826 - DNA, 90 bp, Homo sapiens
ccatgtgtcatctgaaactacaggccttctctgctgccattgaaagctgtaacaaggcccatgtccaaactggaatcacagcagccccgc

SEQ ID NO: 19827 - DNA, 100 bp, Homo sapiens
agatcatgagtgtgaaaaactggaaatcccaaagcctcgaatggctgccactcagaaacttgttaaagacattattgcaagaggtggaaacatacagaag

SEQ ID NO: 19828 - DNA, 50 bp, Homo sapiens
ggttctctccaggacatctaccaagaaatctatgacaagttcaagcagag

SEQ ID NO: 19829 - DNA, 90 bp, Homo sapiens
tctgctcacgcgtgttcttctgtatgcaaccgaggatggacttatacacacaaatgaccaggccaggactctacccaaagaatgggtttg

SEQ ID NO: 19830 - DNA, 110 bp, Homo sapiens
cacatcggtcagaaaaagatgtttgtggaaggaatgcttaacatttgttacaatgccgttgatcgtcatattgaaaatggtaaaggggataagattgctatcatctatga

SEQ ID NO: 19831 - DNA, 100 bp, Homo sapiens
gggaaaatccctactcctggcgagaaaggattaacaatgcttcccagactgtgtatgtgaagatgcttataacaatacctatgcctgtgtgaggacaatg

SEQ ID NO: 19832 - DNA, 100 bp, Homo sapiens
gcagattggctgtgtggagttgcaccagcgtgcccgggagtacatctacatgcattttggggagtcctggatcagtgacattcgagcaggaaccgcccct

SEQ ID NO: 19833 - DNA, 96 bp, Homo sapiens
cagcatcccacattaagtcaacggtgcggcggcagcacatggagcgttgtaccagcttcctggtggatgagctgggcgtggtggatcgatcccagg

SEQ ID NO: 19834 - DNA, 95 bp, Homo sapiens
tgaggcggccaccgcgactccggctctgcgctcggctgcctgacttcttcctgctgctgcttttcagggagcagttcagagccccagttgcagac

SEQ ID NO: 19835 - DNA, 100 bp, Homo sapiens
ccagatgccggggctgggtccttcccaaggttgaggctgaccccgcactacatctacccaccagccatcgtgcagcccagcgtggtgatcccagccgccc

SEQ ID NO: 19836 - DNA, 87 bp, Homo sapiens
tcccgctgcagccgagatgccgggggagcggggccttccacaccccctccgtgggtgtgtgacagcccacctgaggatattgaccat

SEQ ID NO: 19837 - DNA, 98 bp, Homo sapiens
caccgttcacagagctagccggacgtcctccgactcaagaatacactttcagacttgatgttgaagaaggagtgggaatcccccgaatacctgtacat

SEQ ID NO: 19838 - DNA, 75 bp, Homo sapiens
ataaagaccggaagctgagtttttatccttccaagagcctctgagttcctgccttttttcatctctgaatcccca

SEQ ID NO: 19839 - DNA, 110 bp, Homo sapiens
taaaactccagcgagatccgggccgtgaacgaaagcagtgacggaggagcttgtaccaccgacctgcctagagctggaacgttacctccagagcgagccctgctatgttt

SEQ ID NO: 19840 - DNA, 100 bp, Homo sapiens
ttcgagaggaggcagattcccctctacatagacgacaccctgacggtcacaaggcacttaaagcattgttgaggtcattggtaggtcttcaggaagagtt

SEQ ID NO: 19841 - DNA, 100 bp, Homo sapiens
attgatataaaaccaggcacacctccaatcgctggtagaagcaccacaccaacatctagtcccttccgtcactccatggattcctttgggcaacccagac

SEQ ID NO: 19842 - DNA, 100 bp, Homo sapiens
attgcagatttccaggatgtcctgaaggagccctcaattgcattggaaaagctgcgggaactcagctttagtggtggaggccacaagcaggaaagaaaag

SEQ ID NO: 19843 - DNA, 100 bp, Homo sapiens
cctgctgctactggccctgctgggctggctgctgctggccgaagcgaagggcgacgccaagccggagggacatggtctgctatacagctcagactctcgt

SEQ ID NO: 19844 - DNA, 100 bp, Homo sapiens
ggatggactcagacaagttctggaggagatgaaagctttgtatgaacaaaaccagtctgatgtaacaagttgaaatcatcgcagaaggataaagttcgtc

SEQ ID NO: 19845 - DNA, 101 bp, Homo sapiens
atgagtctgaggcagaccaactgttgggaaatacaatgaaagtatcaccttttgccatgatagcatttctttcattggacagttccttacaagggctccac

SEQ ID NO: 19846 - DNA, 100 bp, Homo sapiens
ggaatatcggattcctctgccaatgaccgtggaggagtaccgcatcgcccagctgtacatgatacaggaggagcgagctgggctggaggcctcactcctg

SEQ ID NO: 19847 - DNA, 100 bp, Homo sapiens
aaccactgtaatcacagggactaccagaatatttcaagaaatggtgaatctggattgggaaagtcgacattaatcaactcattattcctcacagatttgt

SEQ ID NO: 19848 - DNA, 83 bp, Homo sapiens
ttactgacttctggaactgacaaggttattaagcccctgtcaaagggaacaggaagcagtccacggagggtgacgccctagac

SEQ ID NO: 19849 - DNA, 98 bp, Homo sapiens
ataatgatagaatgaagaccacaataaaagagacctctacttagctcagcaattcttaccttaataactgaagtgaagtgatggactccgatttggag

SEQ ID NO: 19850 - DNA, 100 bp, Homo sapiens
ttggaatcttggacctcatccagagctggagtggaccagagaaattgcttgctttagatgaactcattgatagttgtgaaccaacacaagtaaaacatat

SEQ ID NO: 19851 - DNA, 89 bp, Homo sapiens
acatctttggcacatcaatttgtggaaggcgagttctcggaaggctacgatcctacagtggagaataggttcagaggaagaaggagaag

SEQ ID NO: 19852 - DNA, 100 bp, Homo sapiens
tacctccatcaggaccccagatgtctgacagccctgtgtgacaccaagataagtaacgatgaccagtgtcccagtgaaggaacgagtgaaggtgtctcag

SEQ ID NO: 19853 - DNA, 49 bp, Homo sapiens
gacctttttgaagcctttgcaaaagagaggagttcattacttcggaagt

SEQ ID NO: 19854 - DNA, 100 bp, Homo sapiens
gggcttttgtatttcctgcctctgccccacccccaaactacattaacaagctattctgaaaatgtggaacgcacaaaatatgctggggaaagcagtaaag

SEQ ID NO: 19855 - DNA, 100 bp, Homo sapiens
cagcacctttcggcttctgagacggcggcagcagcggcattcagggtcactggtggggagctctttgaagacattgtggcgagagagtactacagcgagg

SEQ ID NO: 19856 - DNA, 82 bp, Homo sapiens
aaaggagcaattgctggtcctgagcctgagggggatatgagactttctactcggaatatcctgagtgttgcgtggatgtaaa

SEQ ID NO: 19857 - DNA, 98 bp, Homo sapiens
atgagaggatgtggtggtctactctgatgtcaatcttgagggctagagagactagcttgcaaaattttcctcatattgaggtggttcggaaaaaagag

SEQ ID NO: 19858 - DNA, 100 bp, Homo sapiens
atttgattacatactgttagagaccactggattggcagacccagttggcaggatcttgtggccagtggggtagtggagtatattgataccctggaagaag

SEQ ID NO: 19859 - DNA, 89 bp, Homo sapiens
gcggatgaactttctttacagatcggagacactgtgcacatcttagaaacatatgaagatccctcatgtccatgatccggaaacgatcc

SEQ ID NO: 19860 - DNA, 100 bp, Homo sapiens
cacagacaatgtcggctgcatccatctcatcagcaagaaacccacgggcctcttctacctgctggacgaggagagcaaatccacacaacttaaagatctg

SEQ ID NO: 19861 - DNA, 80 bp, Homo sapiens
acaagcaccccaataacctcaagcaaattgtggctactaatttgccccctgaagatcaagatggctctggggatgactct

SEQ ID NO: 19862 - DNA, 101 bp, Homo sapiens
ttggagttcttacaacatggcagacattgacaaatctttggcgttgccagttccttttaccttttgtgagtttaggtttgatgtgctttggggctttgatc

SEQ ID NO: 19863 - DNA, 109 bp, Homo sapiens
cacgccagccgcaccatgccgctcctaagcctgcacagccgcggcggcagcagcagtgagaggtgagcgagtgctgtgctttcatgggcctcttctttatgaagcaaag

SEQ ID NO: 19864 - DNA, 100 bp, Homo sapiens
ggggacccagaccctggagcctcagttggaagcagccgatccagcctgcggagcctgtggggcaggtgtgagcgccactttgaagggcatccaacccgcg

SEQ ID NO: 19865 - DNA, 101 bp, Homo sapiens
ggatgaagctgctgctgggcatcgccttgctggcctacgtcgcctgttcagccgtctgtatatctccccagatacctgaaactgaccacctgagtacgttt

SEQ ID NO: 19866 - DNA, 74 bp, Homo sapiens
cgccaacagtacctcattgctctttggcgactcttattggtactccaaagattcaggtttactcacgtcatcca

SEQ ID NO: 19867 - DNA, 95 bp, Homo sapiens
cagaaagagtcaacagcagtggcaacaggccctgagcctgtgcaattatttcgagagtcaaaatgtggatttccgaggcaagaaggtgatcgaac

SEQ ID NO: 19868 - DNA, 75 bp, Homo sapiens
cttcccagtagctggaactacaggcgatcattatttcgaagttctagtattctggatcaccgtgaaggaagtgga

SEQ ID NO: 19869 - DNA, 100 bp, Homo sapiens
cagggcggatggtggtgatggaagcaggtggaattatgccctgttggttccaatgctgggattggctgcttttcgttgaaggggcccggccaggactcgg

SEQ ID NO: 19870 - DNA, 80 bp, Homo sapiens
caggaggctttggagcggctaaaaacctgcgtccgagctgggccacagcctgaacgagaacgtcctcaagcctgcgcagg

SEQ ID NO: 19871 - DNA, 75 bp, Homo sapiens
gcaacagccccttcgtcccaagtgacttaagagattaaaattaatttggttgctgttggttctgaacaaataatg

SEQ ID NO: 19872 - DNA, 107 bp, Homo sapiens
cggaaaggccgcgtcgtgatcgactcggacacagaggacagcggcagcgacgagaacctggatcaggaaatttgcgagaatccccgatttatcattgatggagccaa

SEQ ID NO: 19873 - DNA, 100 bp, Homo sapiens
tggagcctcagttggaagcagccgatccagcctgcggagcctgtggggcaggtaattcagaggtccgtggggccagccagcctgagcttgctcaccttca

SEQ ID NO: 19874 - DNA, 74 bp, Homo sapiens
tagagaaaagggctatgaacgattaaaagaagaactcgcaaaagctcagaggtcctacaagattatcaattttg

SEQ ID NO: 19875 - DNA, 50 bp, Homo sapiens
gaatgacaaacaaccagctcttcaggctctttgtcccttaagagatgtgc

SEQ ID NO: 19876 - DNA, 133 bp, Homo sapiens
gatcctggtgcggaacatccccttccaggcccacagccgggagatccgagagctcttcaggaacctgcgcaagggacccagtggcctggctgatgagatcaatttcgaggacttcctgaccatcatgtcctac

SEQ ID NO: 19877 - DNA, 76 bp, Homo sapiens
cacaaggattctcgctgtgacagagacaacaccgagtatgagaaaatctgcaaaatggctgataatttggatgaat

SEQ ID NO: 19878 - DNA, 121 bp, Homo sapiens
ggaaggacgtgctcccgtggttgcgggcgcagcgggcagtgtcggaggccagcggggccggaagcggcggcgcagttgccttgttgaaggggatgctaaagaagaaatactgcagccaccg

SEQ ID NO: 19879 - DNA, 87 bp, Homo sapiens
ggcgcggctggggcccgaggctagcatctctcgggagccgcaaggcgagagctgcaaaggtatagctgtggaccaactgtatatgat

SEQ ID NO: 19880 - DNA, 82 bp, Homo sapiens
tttccaccccgaaattcgccccgattaaagactgtgttgcattatcaggtccaatgatgcatcagcagcctccttctcagca

SEQ ID NO: 19881 - DNA, 73 bp, Homo sapiens
gaaccttctgagaaaacatggtcaacgtcttgaaaggagtgcttatagaatgcacctgtggaatcctctcaag

SEQ ID NO: 19882 - DNA, 98 bp, Homo sapiens
gtctcgctccgtggccttagctgtgctcgcgctactctctctttctggcctggaggctatccagctgccgcagaatggaattcggcattgttcctaca

SEQ ID NO: 19883 - DNA, 82 bp, Homo sapiens
ggctgctgcaggccatcgacccccagagcaacgtacatgtgaagattttttggcagcttagcgtggaaaccattgatcaccc

SEQ ID NO: 19884 - DNA, 110 bp, Homo sapiens
gaatgccaccgaggaatctgatgctttggcaaaacttcggaaaaccatcataaacgagagccttaatttcaaggaagaaggtgagacattggatgttactgcagtcatta

SEQ ID NO: 19885 - DNA, 74 bp, Homo sapiens
gccaagcagagctgggggggcggtggccggcaccgcagaccaagaatcgccttcagccctgtctggtgcatcct

SEQ ID NO: 19886 - DNA, 100 bp, Homo sapiens
gacaagagcttccgcggtgtcattctgacctcggctgaaggtgatgtggccgccctcaaccgacgcatccagctcgttgaggaggagttggacagggctc

SEQ ID NO: 19887 - DNA, 100 bp, Homo sapiens
ctgccctctatatcagtaacaagactcaggacggggagacagccctccagctggccatcagaaaccagcttccactcgtagttgatgccatatgcacccg

SEQ ID NO: 19888 - DNA, 50 bp, Homo sapiens
atatgatgttccttgtcaccttcaaggttcttctgtgtggcagttcagaa

SEQ ID NO: 19889 - DNA, 100 bp, Homo sapiens
agaagctggagctggcagagaaaaaggccaccgatgacttcactgaggatgtcaactgtgcttttgagttcctgctgaagctcacccccttgttggacaa

SEQ ID NO: 19890 - DNA, 100 bp, Homo sapiens
catggccatgttggcccagcaaatgcaactagccaatgccatgatgcctggtgccccattacaacccgtgggttttttgattaactcaaaaccagagaat

SEQ ID NO: 19891 - DNA, 96 bp, Homo sapiens
tggcagtcactgctacaatgtgggctgttcttgaggagtccaagattgatctccttgatcggaaggaggatgtgaagaaaaaactgaagaaggcct

SEQ ID NO: 19892 - DNA, 50 bp, Homo sapiens
atccatctcactgcaatgttttggagtctcaggagcaggggctgcggcag

SEQ ID NO: 19893 - DNA, 100 bp, Homo sapiens
cacaggagctgtagagaggaccccggtacatctgaaagccgggaaatgccatctgtgagaaagacacactgcagtggaaggaaacacaaagagaatgtga

SEQ ID NO: 19894 - DNA, 75 bp, Homo sapiens
attcagtccccttctggggtgattctgcaagaggtacaggtttgcagattccgccagcagcacagcaagctctac

SEQ ID NO: 19895 - DNA, 100 bp, Homo sapiens
ggagtttccaattaacaatgaagcaggaagaagaggaggatgatgactggggagaagatacaactgaggaagctcaaaggcgtcgaatggatgaaatcag

SEQ ID NO: 19896 - DNA, 90 bp, Homo sapiens
gatctcgggctcggaacgagactgcacgagagcaagcgagacattctgttcctctttgacggctcagccaatcttgtgggccagttccct

SEQ ID NO: 19897 - DNA, 155 bp, Homo sapiens
ggcaacttttatccagctctaaactttatttcctcccagaagacactccccagggcagaaatagcgaccatggcgaggtccggaccctatttgtcagtggccttcctctggatatcaaacctcgggagctctatctgcttttcagaccatttaag

SEQ ID NO: 19898 - DNA, 100 bp, Homo sapiens
tgaaaaagtctcctaaacagacaggctacggatggatatgtcaggaatgtgattcttcatcttccaagaacaactcttggaatttatgcaccagttgcct

SEQ ID NO: 19899 - DNA, 82 bp, Homo sapiens
aaaacttcaagccaaacatcaagcagaatgtgatttgcttgaagatatgaggaggcaagtgaggcctatctggttggccttt

SEQ ID NO: 19900 - DNA, 83 bp, Homo sapiens
cgcgagcggcggtttccttgcccggggccgcgggaaggccgaccgactgccgcgacaatgcagatcttcgtgaagactctgac

SEQ ID NO: 19901 - DNA, 83 bp, Homo sapiens
ggacagccgcgcgctgagggtctcggggcgggcgccgcgggacctctccgggccatggggtcaatgtctgtggagggcggtgc

SEQ ID NO: 19902 - DNA, 122 bp, Homo sapiens
tatatcactttgtcagcgctcctaaagcaaacgccaccattgaagtgaaagggttcttttcctatgactccatcaattccagctaatcctcccatggctttcaatccttacataccacatcc

SEQ ID NO: 19903 - DNA, 98 bp, Homo sapiens
ggaggaaccaggggacctccctcacggggaggacacatggttttcagcattgcaaataacaatctcagctactgggatgcccccctgggaagttctta

SEQ ID NO: 19904 - DNA, 100 bp, Homo sapiens
tcttcttgaactggtgctgtctgggcttcatagcattcgcctactccgtgaaggcattttgggcccctggagatgctggtgtggtgtttgtgggctggtg

SEQ ID NO: 19905 - DNA, 87 bp, Homo sapiens
tggcactacccgtcttgaggaatatgcttcaggactgccccaaggcccgcagggaggtggagctgcactggcgggcctcccagtgcc

SEQ ID NO: 19906 - DNA, 98 bp, Homo sapiens
cgggcggcacgcacgcggtgcagggtaacatggcggatgcggaaggaaagtctttgggttcggaggattccagaaacatgaaggagaagttggaggac

SEQ ID NO: 19907 - DNA, 97 bp, Homo sapiens
gagtctcccgcgcgcacctcagccgcctcctagcggcgcggcgctcgctcctacgacagattatgagggacaagccaagaaactcctggaactgatg

SEQ ID NO: 19908 - DNA, 50 bp, Homo sapiens
gcccagacttgggaactcagtacctgggctgcccttgagatggagttgct

SEQ ID NO: 19909 - DNA, 50 bp, Homo sapiens
ttcacagagagtccagttgccaaggaagcaaaatgtggattcagcaaaca

SEQ ID NO: 19910 - DNA, 100 bp, Homo sapiens
ggagaaagacattacaccatctgaattgcctgcaaacccagattcagaatggacagtttagaagaacctcagaaaaaagtctttaaggctcgaaaaacga

SEQ ID NO: 19911 - DNA, 75 bp, Homo sapiens
cccggccgcctccgcgagggcaccatggaggtgaatgcaggtgctggagaatctggtaaaagcaccattgtgaag

SEQ ID NO: 19912 - DNA, 100 bp, Homo sapiens
gaatatctggttttgtctctgctgggcctgtgtgcctggaaaggaattgttttggcctaggatcatccagtactcccctgccctcaacaagatgttttgc

SEQ ID NO: 19913 - DNA, 100 bp, Homo sapiens
caaagagtctcttaccttgtgtttgatgaagcagatcgaatgtttgacatgggatttgatatgggcacggttatgaaatattttgtgttacttgtaacag

SEQ ID NO: 19914 - DNA, 100 bp, Homo sapiens
gtggagcaggtcctgagcctcgagccgcagcacgagctcaaattccgagagtttattaaccacttaacctctcagaactgaacaaagacaacattgttcc

SEQ ID NO: 19915 - DNA, 100 bp, Homo sapiens
agggtactgtatttatggagaccgctgcaggtctgccatgtgaatctggaggggcagccgttctactccaagaaggacagacccctgtgcaagaagcacg

SEQ ID NO: 19916 - DNA, 87 bp, Homo sapiens
ttcagcaagaatggggtggtgcaattccttgccaggtcaaagagccccctgaaatcaatttagttttgtaccctcaaggcctaactg

SEQ ID NO: 19917 - DNA, 74 bp, Homo sapiens
caagactggggctgctcccatcattgatgtggtgcgatcgagcagttgaagacatctcttcatcgaggactaac

SEQ ID NO: 19918 - DNA, 99 bp, Homo sapiens
tttctactctgcagaaaaggaagatgttgctgggcacccagatttgcttgtaaatgcatcacgaagaggcagcccagaatgaagaaagcaagcaggagt

SEQ ID NO: 19919 - DNA, 100 bp, Homo sapiens
ccctcagtaccagagacagaagcagatggattcgtccttttaggcaattcaaaatcccaatgacattcagcttcaagaaaaagcttggaatgcggtgtgc

SEQ ID NO: 19920 - DNA, 99 bp, Homo sapiens
gttggaacgaggagaagagccatggacatcatttgcaggtcatacctgcttgggtttgaattttgggaagattttgaagaagaccatgggaaggggaga

SEQ ID NO: 19921 - DNA, 98 bp, Homo sapiens
ctgaggcccgtggaaggagtcaaacttgcgggaattttgcaggtggtaagttttcttcatacagttcttttgtgtgacaaactggatttcagcacggc

SEQ ID NO: 19922 - DNA, 90 bp, Homo sapiens
caaattgcctccttatgtctccaacatggaccgcctgggggactcggaactgtgcattgtcctgttttcacttttggcatgggtttatgc

SEQ ID NO: 19923 - DNA, 100 bp, Homo sapiens
gtggaaatgaaatgctcttaactttacacaaaatgggtatcaccactgctacttttcccattttgcagaatttcagaaactgtggaggagtgtcactgta

SEQ ID NO: 19924 - DNA, 96 bp, Homo sapiens
aagaaacactggagatattcagaagccaaagagtgtggccagatgcaaaataagtggctgatgataaacattcaaaatgttcaagactttgcatgt

SEQ ID NO: 19925 - DNA, 51 bp, Homo sapiens
cacattttatgttgtgtcatttcgaagggtgtcacgtcttgaaattttaaa

SEQ ID NO: 19926 - DNA, 101 bp, Homo sapiens
ccgaaggggaagcccaaatcggggcgagtgtggaaggaccgctccaagaaaagaacaccgaaaatctctcccagcactttagaaaggggaccctgactgtg

SEQ ID NO: 19927 - DNA, 75 bp, Homo sapiens
cagggtgcgggcgagcgtcgacccgggccgctcctggaggaggaggtgggaggatgtgtgctgtgtttggtggaa

SEQ ID NO: 19928 - DNA, 82 bp, Homo sapiens
actccccaggatacctcgttaagcctctttccaacaactgatcctgtgggtactttgctccaagttccagaacagatctctg

SEQ ID NO: 19929 - DNA, 83 bp, Homo sapiens
ggcatacatctttcttcgacaaagggtaccctcagtgtttacacatgttagagctgctccaatatgaacacttccgaaaggag

SEQ ID NO: 19930 - DNA, 83 bp, Homo sapiens
gggccggtggcgcccgtgtcggagaccccgcgccggaccctgaggcagcgagtcaaaatgcagatcttcgtgaaaacccttac

SEQ ID NO: 19931 - DNA, 50 bp, Homo sapiens
atgctcctagtgcctgtgtcagtccttgtcagcagataagcagagagccc

SEQ ID NO: 19932 - DNA, 85 bp, Homo sapiens
gccagaaagttccgccatgagctggggcacggagctgtgggaagcagacagtatgagcatgaccagtggagaaggtactagtcaa

SEQ ID NO: 19933 - DNA, 100 bp, Homo sapiens
atgaagctccccaaggagctgcagtgtctcctcccaaagacctcgttgtgacagaagtgacggaagagacggtcaacctggcctgggacaatgagatgcg

SEQ ID NO: 19934 - DNA, 100 bp, Homo sapiens
gctcccgtgccgtcatgggtgccatgaagccagttttctggatatgccgcagaaggatccgtgccagaagcaagcctgtgagatacagaaatgtttacaa

SEQ ID NO: 19935 - DNA, 82 bp, Homo sapiens
cagccgcgcgctgagggtctcggggcgggcgccgcgggacctctccgggccatgggtgtgagatgcacaatgcgaaacctag

SEQ ID NO: 19936 - DNA, 101 bp, Homo sapiens
cttctcctggcggcgctgcggatccagggggtcggctgccaggtacagaacctcaacctactggcttactcgcatccagtcttttctctactgcaatgaga

SEQ ID NO: 19937 - DNA, 50 bp, Homo sapiens
tgaagatgcctgggccagcaagagaaagagatgacttgatgtctgcacta

SEQ ID NO: 19938 - DNA, 100 bp, Homo sapiens
ggagcgtgtggctcatctacgaagagtccaggtgctcctgatccaacagcaggtgctagtatagatgatgaaaactgctggcacttagatgaagagcagg

SEQ ID NO: 19939 - DNA, 76 bp, Homo sapiens
cggcctgacccagagccacttctcaccgagatgattcatgaagcactggtgaggtggattgatgatgaatcttctg

SEQ ID NO: 19940 - DNA, 75 bp, Homo sapiens
gtttgtggatcgctgtgatcgtcacttggagctgctgctcttcctccagaacctgcccacagcccactgggatga

SEQ ID NO: 19941 - DNA, 100 bp, Homo sapiens
cgtccgcaaggccttcaagagccacgtggaagttaaacgagctgagcctcgggacagcaagagccaagcgccgggacagccaggtgccagccagtggggg

SEQ ID NO: 19942 - DNA, 74 bp, Homo sapiens
gctctcctggctcccttctgccccagctccgtctcggcggcggcgggtaccaagtgatgcagcaatgctgggag

SEQ ID NO: 19943 - DNA, 98 bp, Homo sapiens
cacgagagccgcacctttgccgtgtacctcaatagcactggctaccggacaggtcttggtggatgtcagtgcttactccccatgaaattaaattttac

SEQ ID NO: 19944 - DNA, 97 bp, Homo sapiens
aaaagtccattcagaaaagacaagagccctgtgaggttcagaaacagcatatttagaaaacagatctaattctagacctttagaaagcaaaagatac

SEQ ID NO: 19945 - DNA, 50 bp, Homo sapiens
gcagtcgcgaagcagcaaccatgggtacctgctcttccgagacttctgcc

SEQ ID NO: 19946 - DNA, 74 bp, Homo sapiens
tcaagtaaaggaacccaacagagatctcttctgttctccactgctaggtgcttttgaagatgatgatatcacgc

SEQ ID NO: 19947 - DNA, 82 bp, Homo sapiens
ctgtaaccacctcacagattccagcttcggaacaagagaccctgggatacaccagtgcacagaatcctccaccaacatccat

SEQ ID NO: 19948 - DNA, 90 bp, Homo sapiens
cacgtgatcattggggggcacgattctccctctcctagaggcgacaatggcgatgaccactcagaaggaggcctggtggagaaccacgtg

SEQ ID NO: 19949 - DNA, 100 bp, Homo sapiens
cgaagacggaaccggagccggttgcgggcagtggacgcggttctgccgagagccggtttgacctgatggggctgagtccagatgccccagaggacgaggc

SEQ ID NO: 19950 - DNA, 96 bp, Homo sapiens
acacgactctgcggagaagctgcctccgggccttgtggcataaggtttccaatacttatctacaggaatcgccatgaccccagctctgagggaggc

SEQ ID NO: 19951 - DNA, 96 bp, Homo sapiens
agagagagagggggactctgtgtgagggaaagaaaacaatttctcctgctctgcagcttctgttcagatgcctaccttaatgcctctgaaacaacc

SEQ ID NO: 19952 - DNA, 90 bp, Homo sapiens
ccagaagggagcgaaggtttttgctgcgccaacgcagtgaccgaaggctccgctcacgcccggggctctctaaatacgtacagattctgc

SEQ ID NO: 19953 - DNA, 101 bp, Homo sapiens
aggaacctgttgataaatgcaaaacagtggctgttgcagtggtagtcgctcttctaaaacttttaaaccaaagaagaacattccagagggttctcaccagt

SEQ ID NO: 19954 - DNA, 100 bp, Homo sapiens
agcccaaggcaattgatcccaagttgtcgacgaccgacagggtggtgaaagggtatacctcagttaccatgtgccaaagcattatacaactatgaaggaa

SEQ ID NO: 19955 - DNA, 83 bp, Homo sapiens
cagcgaagctgctgcggttcctgagccggaggtcatgatgatgggcagcgcccgagtggcggagctgctgctgctccacggcg

SEQ ID NO: 19956 - DNA, 50 bp, Homo sapiens
cgaagacgcggtgggccgcccctccgctgaaacagataagatagtcgttg

SEQ ID NO: 19957 - DNA, 87 bp, Homo sapiens
tggcagccaccacgggctcggagcactccgctggtccaggcggcaacatgtccatgcttttagtgatgtccctgcctctaatccaga

SEQ ID NO: 19958 - DNA, 146 bp, Homo sapiens
gggggacactgcagccggagcccgggaggggccgcgccgccaccgtctgaactaggatgtcccgacatgaagacctgatggccaaaagaaaggaagaaaatttttcctctcctaaaaatgccaaaaggccaagacaagaagaattg

SEQ ID NO: 19959 - DNA, 75 bp, Homo sapiens
tgatattttaggccaaggagctactgcaaatgtctttcgtggaagacataaggatgttgagaaagagaaggaaac

SEQ ID NO: 19960 - DNA, 100 bp, Homo sapiens
cttgccttagcgacataccagtctctgtacccactcaccttgtttgtcccaggactcctctatctcctccagacataaccagtgcggtgcaatccaagcg

SEQ ID NO: 19961 - DNA, 88 bp, Homo sapiens
attgacatctatggaacttctgttatggttcaggctgttaaaagacataatctgactaaaagatggcttatgaaaatcgtcgatgaaa

SEQ ID NO: 19962 - DNA, 75 bp, Homo sapiens
gaatcgctgtttcatgtgcaggaagaaagtgggacttactgccagcctggacaagcacaaccgcacccacaccgg

SEQ ID NO: 19963 - DNA, 82 bp, Homo sapiens
gcctcagttggaagcagccgatccagcctgcggagcctgtggggcaggaggtatatcgaattccaaagaaaagtcaaactga

SEQ ID NO: 19964 - DNA, 75 bp, Homo sapiens
atccagaggccctgagcagctttcagcactggagggatcgcttacacctgagacgaactacagaacagcacgtac

SEQ ID NO: 19965 - DNA, 50 bp, Homo sapiens
agaatcaccagcactggctgaaggaggtgctaatgatgctggataactat

SEQ ID NO: 19966 - DNA, 75 bp, Homo sapiens
cctgaaccagtaactgaagtatctgcccctgtcaaatcattccaggatggctacaatagactagttaatattgtg

SEQ ID NO: 19967 - DNA, 75 bp, Homo sapiens
aggatctggaggacggagaggacctgttcaccagcactgtctccaccctagagattttatttggagagaagcaag

SEQ ID NO: 19968 - DNA, 83 bp, Homo sapiens
cgctgagcttggcgcacgggccgaccaggagaactgcgctatcctcaaggagctggtgacgctgcgggcccagaagtcccgcc

SEQ ID NO: 19969 - DNA, 119 bp, Homo sapiens
ctgaacgccgccttggacctcctgggaggcgaggacggtctctgccagtataaatgcagtgacggtccagcccagaatcaaatgcaggttccatctggatatggattgcatcatcaaaa

SEQ ID NO: 19970 - DNA, 108 bp, Homo sapiens
gcctggtgtcggtggttagtttctgcgacttgtgttgggactggatcccctaacaacagtgagagagcaatgcgagcagttggagaaatgtgtaaaggcccgggagcg

SEQ ID NO: 19971 - DNA, 100 bp, Homo sapiens
ggctttggagcggctaaaaacctatcgccggggagtggcctgtacagcaacctccagcagtacgatctcccgtaccccgaggccatttttgaactcccat

SEQ ID NO: 19972 - DNA, 100 bp, Homo sapiens
agttacatgtatggagaatggctggtctcctactcccagatgcatccgtgtcagggttggggacatgggcagagcctattgggacataatgatatccaat

SEQ ID NO: 19973 - DNA, 100 bp, Homo sapiens
gagaaagccagttatccacggactggaagatcaaaagagggttaccttgaggatagttttgtaaaatctggagtcttcaatgtatcagaacttgtaagag

SEQ ID NO: 19974 - DNA, 75 bp, Homo sapiens
cccgcgttccatgcgcacagggacagggtgtgcaaggagcccccctacaaagtagaggagtcggggtacgctggc

SEQ ID NO: 19975 - DNA, 80 bp, Homo sapiens
ggcagccgcggatctcaccgccgctcagggaaagatgaatgggagggctgattttcgagagccgaatgcagaggttccaa

SEQ ID NO: 19976 - DNA, 75 bp, Homo sapiens
gtcaactccatctgcagtgttcaagacactgccctaaccatcatggaggtggccgaggtggaaagtcctctgaac

SEQ ID NO: 19977 - DNA, 75 bp, Homo sapiens
aaccgcctcaccgttctgcccccagaactagtggctgcttcaacccccaactccactgctggtgcagccatgaac

SEQ ID NO: 19978 - DNA, 75 bp, Homo sapiens
ggcagattcaggagagagtttgtgccaggtctcgtctacagaggactggtctttcaatagcaagttttcacttca

SEQ ID NO: 19979 - DNA, 113 bp, Homo sapiens
ctcacctttgtctccccgatctacggggctgacatcagcggctctttgtatgatgactaagactttgaccccgacgcaggcttcagtgattgccgcggatcagaagcctgagc

SEQ ID NO: 19980 - DNA, 100 bp, Homo sapiens
cgccgattcctcctccttggtcgccgcgtccttggctggcgtgtgcgggagtatgagttaagaaaaaacaacttctcagatactggaaactttggttttg

SEQ ID NO: 19981 - DNA, 104 bp, Homo sapiens
ttttagggtcctttatatagaagggagagtagggaagtgggaatgtccttggcatcattgtgacgtgtgtggcaaaccttcgacttcattttgccacctctgcc

SEQ ID NO: 19982 - DNA, 100 bp, Homo sapiens
aaagtatttgtggtaataacccttaccgggagtttcactgaagatttgaggcttaagcaacttcttccggggaagagtgccagtgcagccactgttacaa

SEQ ID NO: 19983 - DNA, 74 bp, Homo sapiens
ctgctgcccggctcgggcctgagcgccgagcaggatctttaccttatatagtaaatctctgcccctcgacctgg

SEQ ID NO: 19984 - DNA, 75 bp, Homo sapiens
acttcgaccctgcccagcacgaccagctcatgcagggtgtgggccgaagatatgctcatgtggtgttgaggaaag

SEQ ID NO: 19985 - DNA, 96 bp, Homo sapiens
ccagccccatgggccggacatctactgggtcagcttcatcctcggcggcggtggccgctagctccaaggaagattcttgctcacttgtggcatctg

SEQ ID NO: 19986 - DNA, 100 bp, Homo sapiens
ctctggaaagtacgaggagaatcctgggtttagccattgagtgggaaaagcaaggatgaacaatttgcagttacctcaacatgaagcctttaatgatgaa

SEQ ID NO: 19987 - DNA, 96 bp, Homo sapiens
cagaaaggaactcccaagcgactgcaggcagaagctgagacggctaagcatgttggcagataaattgaacatgactccagaagaagctgaaaggtg

SEQ ID NO: 19988 - DNA, 131 bp, Homo sapiens
cttcaccatggcctagcagtggctctccccagtcacccccttcacccccagtccagcagcccaagagagcgaaatgtcatcagtgcagtcacaacaggagcagttgtcccagtcagatccatctccgtcac

SEQ ID NO: 19989 - DNA, 100 bp, Homo sapiens
ctccttgcccgaggacagagatggcgagcgcccggattggggatgagtatgcggaggacagctctgatgaggaggacattgacaagcagtacgtgggctt

SEQ ID NO: 19990 - DNA, 88 bp, Homo sapiens
gtgcccgcgaggagccgccgcgcgcccgcgccctccgcgcgacgccagttccagggtctccctccactgctgtagtaacccgggtccg

SEQ ID NO: 19991 - DNA, 98 bp, Homo sapiens
aatcatgtcttctgtatgacttgtattcttaaatgggcagaggtgaggcatgaaattcaagatggaaccatacatctttatatttattctatacacag

SEQ ID NO: 19992 - DNA, 73 bp, Homo sapiens
atctgggtcaacaagcttgacatggagattcagatatgccagatcatgatttagagcctccaagatttgccca

SEQ ID NO: 19993 - DNA, 76 bp, Homo sapiens
gtaaatctcaggtgttacatcattgcacttcagattatgagcttacagaaagcctggcctacattttactcttttt

SEQ ID NO: 19994 - DNA, 73 bp, Homo sapiens
tttacccaagaaccattggtggagatagaaggactccatcagaaagtttgagcgagagctgatgttggagcag

SEQ ID NO: 19995 - DNA, 100 bp, Homo sapiens
agactgctgagcccgtccgtccgccgccaccacccactccggacacaggcttcctgtgtccagtaccggttagtggtccgggatgtgaacacccttcaga

SEQ ID NO: 19996 - DNA, 83 bp, Homo sapiens
agcgacggctgaacgcagcccgccctccccaagtcgacgccgcaacccggggaaagcaggttgcgaggggcggtgttgaagaa

SEQ ID NO: 19997 - DNA, 121 bp, Homo sapiens
caaacgcaacgagtcttcgccagcccaaaggcgactcgacaccgtcccagctgaagagagaaggaaggggagttcaccctgcacggccgggccatcctggagatggagcaatacatccggg

SEQ ID NO: 19998 - DNA, 75 bp, Homo sapiens
tggcaagtttgaattgagatgtgctatgagcagcaccagcagtaagagggctccgaccacggcaacccagaggct

SEQ ID NO: 19999 - DNA, 75 bp, Homo sapiens
gttttgtattaatggatcacattttgaatttgaaggtggttgtgtcaaaccgattggtgacatctccatgctgta

SEQ ID NO: 20000 - DNA, 98 bp, Homo sapiens
gctcaaaagatctgcagagctcccagggcggacagcagcctcgggtgcaatcctggagccccccagtgagggttgtatcagagtaagatggacggtag

SEQ ID NO: 20001 - DNA, 90 bp, Homo sapiens
aaggacatcctgcgcaaggccgtgcagaagacaatgcagatcttcgtgaagactctgactggtaagaccatcaccctcgaggttgagccc

SEQ ID NO: 20002 - DNA, 88 bp, Homo sapiens
gagctgcctgctcaaagagctgcaccgcttcgagtctattgccattgcccaagggaaccacagtcagatatcacgagtacctgttgct

SEQ ID NO: 20003 - DNA, 90 bp, Homo sapiens
aatgagatgattgaggcagccaagctggaggaggcccagaagcagcggcatgaccgtcttgtggctgggcagcagcaggtcctgcaacag

SEQ ID NO: 20004 - DNA, 100 bp, Homo sapiens
gcgagtcgacttcccatcctgagttggtgttggggatgtcctttgcactgaccctgaactgccagattgacaaaaccagccagaccatagggctatgatc

SEQ ID NO: 20005 - DNA, 98 bp, Homo sapiens
agagcttgtgtgcggagctgagaggcctatggatgaggaggacgcggcggccccggccttcctggatgctctgcagaaccaggctgaggccagcagca

SEQ ID NO: 20006 - DNA, 90 bp, Homo sapiens
ccgggaagtgggagcttcaggctcgctccgtgcgggtggatggaagtttgcttagttgaagaattgccaccaaccactgaattggaagaa

SEQ ID NO: 20007 - DNA, 50 bp, Homo sapiens
ccctaagaaggtctgcccaggactcaggtgccatcgcctgcaggattctt

SEQ ID NO: 20008 - DNA, 99 bp, Homo sapiens
gtggagctcagaccggtgggctagggaaaacaaagtgcatgatgaagtcttcagactgtgtcataaagcatgctggtgtatacagtactggccttgcaa

SEQ ID NO: 20009 - DNA, 75 bp, Homo sapiens
tgaccatcttggtgagaaacattaagacctactaccagtgtactaatggtcacttgatgtgcgctggctgtttta

SEQ ID NO: 20010 - DNA, 101 bp, Homo sapiens
ccttcactactcactggcgagctcagttggaaattcactcccaataggagttccacggcagacacatcgacccattccaacaatctcgtaaaacatggtgg

SEQ ID NO: 20011 - DNA, 101 bp, Homo sapiens
aaagaatatcagacaatgcgagagagtcagctgcaacaggaagacccaatggatagatacaagatgcctcctatgtggacccacttggccctcaaatagaa

SEQ ID NO: 20012 - DNA, 119 bp, Homo sapiens
tggctgcagccgagggagaccaggaagatctgcatggtgggaaggacctgatgatacagagttttcggctttgtgagaaaccttaccatcaaacacgatggccagcaacgttaccaaca

SEQ ID NO: 20013 - DNA, 74 bp, Homo sapiens
tgaaaatcagcagataaggcaattgaaagggaagaagagtgcctggaagagctgggatgtctggttgagtccta

SEQ ID NO: 20014 - DNA, 75 bp, Homo sapiens
ccggaggttgagagtgcaagattattctgcgcctgcgcggcccgggatgtttcgtctgaactcactttctgcttt

SEQ ID NO: 20015 - DNA, 100 bp, Homo sapiens
tggtatctgtggcaggagcttttcgtaaagggaagtcatttctactggacttcatgcttagatacatgtataacaagagagcagctctaaattgggaagc

SEQ ID NO: 20016 - DNA, 100 bp, Homo sapiens
catccatctacacctttaaaaactttatttcaaaatgacttctggggaacccctatgtctgaggttcaaggagtagttccagttccagagaggccacctg

SEQ ID NO: 20017 - DNA, 51 bp, Homo sapiens
cagccctccatcttgcagcccagaagatatcagttttagagaatgtggcgt

SEQ ID NO: 20018 - DNA, 98 bp, Homo sapiens
ggttattaaatggcctagcccagcaaatgatcagccttgcaaataatcacagattagctattgaaagtatccagctgatgatggacagtgaaactggt

SEQ ID NO: 20019 - DNA, 97 bp, Homo sapiens
ggctgtagaacccagcagctcagaatccattaaaaggagagctgggaggaggttgaatataagctgggattccaagtggacaatgttttggcaatgg

SEQ ID NO: 20020 - DNA, 83 bp, Homo sapiens
cccagagtcagctcccctttctcgcccagcgcccccaggccgctcccggggctcacgatgtcatgtggcctgtgttttggacc

SEQ ID NO: 20021 - DNA, 73 bp, Homo sapiens
gccctcaacatctctcagagacgaaagaatgcttcagacatgcctgaaacaatcaccagccgggatgccgccc

SEQ ID NO: 20022 - DNA, 98 bp, Homo sapiens
atggttctccggacctggtcccacgtggttcccaggtattgatgtcaagctgaaccatcgtaggaagttgaaagccttagaaagaggacttggtaaag

SEQ ID NO: 20023 - DNA, 100 bp, Homo sapiens
tactacaccgcctgggtgattctcttgcatgtgtcaatggcctgtgtccacctggcttccaagatagaagaggccccaagacgcatacgggacgtcatca

SEQ ID NO: 20024 - DNA, 90 bp, Homo sapiens
cctgaccccgcggccggacgacccaagcccgctgagcaggatgaggacaatgcagatcttcgtgaagactctgactggtaagaccatcac

SEQ ID NO: 20025 - DNA, 135 bp, Homo sapiens
cgtgccccgacgtacagcgggccgggaaaagtggcactgaggctctggaacttctgcccagctctccttggcatggagggatttttgaaatcagatgagaggcagagattggccaaagaaagacgagaagaaaga

SEQ ID NO: 20026 - DNA, 80 bp, Homo sapiens
cgacatgagtgatgtggaggaaaacaacttcgagggcagactacagagggccggagctggagatgtggtctctgggagtc

SEQ ID NO: 20027 - DNA, 83 bp, Homo sapiens
gaaaaatctgttacttgatgaacttcagaagatgagtaacgaaagaggctttgaaaatgtagaactgggagtcataggaaaaa

SEQ ID NO: 20028 - DNA, 100 bp, Homo sapiens
cgaacgcggagagcacgccatgaaggcctcgggcacgtttcactgttacatgccttgaagtgatgaggaggtttctgttactatatgctacacagcaggg

SEQ ID NO: 20029 - DNA, 90 bp, Homo sapiens
ctcgggcttctcgccccggccgcggccgggtcctcagtgacgggtcagtcttacgagaatatggtaactgagatcatgtcaatgggctat

SEQ ID NO: 20030 - DNA, 100 bp, Homo sapiens
ccaacacccgctgctgcccgcccgctgcctgcctgcctggcatctctctctcccgaatcccacgtggcgaagtctcgattttggaattatgccagaccgt

SEQ ID NO: 20031 - DNA, 100 bp, Homo sapiens
cgctggaggagctgtcggtgcagcaggagacggaggaccagaactacggcatcgggacctggacttcaccatcgacctggacttcaagggccagctgtgc

SEQ ID NO: 20032 - DNA, 83 bp, Homo sapiens
ctggtggaacgttaccatttcaacatggggctgctgatgggatcagggagcttccaaggcatttgatacctttttgatgggaa

SEQ ID NO: 20033 - DNA, 75 bp, Homo sapiens
gttggctaggaattcttctttgcctttatcagcttgtgaaaaattatgacctgaaagtactttactaattatctg

SEQ ID NO: 20034 - DNA, 75 bp, Homo sapiens
cccattatgaaaaggaatacattctttcatcattaagaaatcagcaaagccttctagacaagctcagtggaatct

SEQ ID NO: 20035 - DNA, 75 bp, Homo sapiens
acactaattgccaacaacaatgtttcaaatcgccactgtcaccgaaaaaggtgttgaaatagagggaccattgtc

SEQ ID NO: 20036 - DNA, 96 bp, Homo sapiens
gcagatcctactggtaccagaaaacttacatggacatatgcagcaaatgttggggaacatgatctgttaaaggctccatctactctttgaagcttc

SEQ ID NO: 20037 - DNA, 74 bp, Homo sapiens
cgagtaaatgtagagtcattaacaaggagcatgtactggccgcagcaaagcctgattacatcaaccccagagcc

SEQ ID NO: 20038 - DNA, 82 bp, Homo sapiens
ccttagctgtgctcgcgctactctctctttctggcctggaggctatccagcgccagcagagccagccgcagagcagccagcc

SEQ ID NO: 20039 - DNA, 97 bp, Homo sapiens
ctataaagctttggaagatgcagatgagaaggttcagttggcaaaccagatatatgacttggtttccaaggtgctattgggagctcatgcactcttg

SEQ ID NO: 20040 - DNA, 100 bp, Homo sapiens
gggagctgataaagaacttcttcccaaaatgggagttaaagttcctcgtaattttcgcttgttggaagaacttgaagaaggacaaaaaggagtaggcgac

SEQ ID NO: 20041 - DNA, 75 bp, Homo sapiens
aataaagtctcccttaaaatgcaccctccttccacctggccaggaatcagtttcaccagtgatcattaaagaatg

SEQ ID NO: 20042 - DNA, 75 bp, Homo sapiens
tgaatggaagacgcttgtgaggcgggctgtgaggtcgttgaaacaagacctttaatgaactctttgatgctcaca

SEQ ID NO: 20043 - DNA, 100 bp, Homo sapiens
aatgagcctccctcagaaaccatggaggaaatagagcacacatgcccacagcctcgactgccagtgatgatcagccagagaagcctcactttgactctcg

SEQ ID NO: 20044 - DNA, 75 bp, Homo sapiens
ccggagattctcagggcaacccagatctgaatggaagttggatacactttgtgacttgtacgagacactgaccat

SEQ ID NO: 20045 - DNA, 101 bp, Homo sapiens
ggatgggggcctcgggcgccccgcagccccccaacatcctgctcctgctcatggacgacggtaagaaggtggatggctctgtaaatgcctatgccataaat

SEQ ID NO: 20046 - DNA, 75 bp, Homo sapiens
agctggagaggaggagccaagagatgggagctcttttgaaacagatggtcaccatgtttagatattagcagtccc

SEQ ID NO: 20047 - DNA, 105 bp, Homo sapiens
aggcagagtgctgatgtgaaaaataccacgacaaaaccaccctagaccgcagctgaatgcacagctagaaggttggctttcacaagtacagtctacaaaaagacc

SEQ ID NO: 20048 - DNA, 90 bp, Homo sapiens
cttacttggagagacatatgtctgaatttatggagtatcatctcctgtacacatcatagccactagcaaaagtttacattcctatgcacg

SEQ ID NO: 20049 - DNA, 75 bp, Homo sapiens
gtgacaaaaaattctgctcccctcatcagggaggaatcaatgctgctctggggaacatggaggaggacaactgga

SEQ ID NO: 20050 - DNA, 100 bp, Homo sapiens
tcgtgcgcttcgaggacccccggactatacaggctccaacccaagttccagtggttgtgtctcctaggaatcagcagttgcatacagtaacactccaaac

SEQ ID NO: 20051 - DNA, 98 bp, Homo sapiens
atgggatgcagtctgtgcagcctgcagaagcaagaggagcagtacaaattactctatgaagtttgtcagtgttgaaaatgagcccatgagcacaagtc

SEQ ID NO: 20052 - DNA, 82 bp, Homo sapiens
gcgagcgcgagcggcgcgagaaaatttgagttctgtgaacctgcatttgttgttggtaattgcctccagatagcttctgaca

SEQ ID NO: 20053 - DNA, 90 bp, Homo sapiens
ggacgctccgtggatgaggctctgcggctggtccaggccttccagtacacagacgagcatggggaagggactggtttggctgaaagacaa

SEQ ID NO: 20054 - DNA, 75 bp, Homo sapiens
gttctccagccatcagtggaaccaacccagccgaccccccagccaaggccacctttgatgccatttctaagacct

SEQ ID NO: 20055 - DNA, 75 bp, Homo sapiens
ggggggatggcgtctccccgactccacctgagggactggctcctgggggccttcgtgtacctgagcaacctgctg

SEQ ID NO: 20056 - DNA, 100 bp, Homo sapiens
ccctggaagtggcgaggaggctgtggccctggtagaggagctgcagaaagaccttgatggaccagcaatacaatggctagatgattgtaagaggacattt

SEQ ID NO: 20057 - DNA, 74 bp, Homo sapiens
caacaacaccacaataatccacagccaaggattgtctcaaagcttgccaggagcagattgaggcggtgctcctc

SEQ ID NO: 20058 - DNA, 100 bp, Homo sapiens
ccggttcgtcgcctccttgcccgtgaccgtcgctagaactcagttgtgcgttgcggccagtcgccactgctgatgcaacctgaagatcttcaacaaccag

SEQ ID NO: 20059 - DNA, 75 bp, Homo sapiens
gccagggtccctgaagagggaagacacgcggaaacagatctgaccctggctgtgcccatctgtaactctctggct

SEQ ID NO: 20060 - DNA, 82 bp, Homo sapiens
gccaagtcctccgcgctcttcttcggaaacgcgttcatcgtgtctgccatccccatctgtaatagcctgcagctggtgtttt

SEQ ID NO: 20061 - DNA, 82 bp, Homo sapiens
caaagactacattatgaacccaccactgggcaaagaaagtatccctttcccaagccttgtcagtactgtaacataattgcag

SEQ ID NO: 20062 - DNA, 100 bp, Homo sapiens
gggagctgtgcagctccttatcatggtcaactttgtagtgtgccaactctttgccttgctagcagccatttggtttcgaacttatctacattcaagcaaa

SEQ ID NO: 20063 - DNA, 100 bp, Homo sapiens
gcaaaatggagctggaggagctttatttgtggttcagaattttcacagctgtattcaggtaactgaagattttgtgtctccagaacatcttgtagagtca

SEQ ID NO: 20064 - DNA, 76 bp, Homo sapiens
ggagaaggggttgaaattgttgatagaggaagaggatcacctagcccgggtagaagaggcaatcacccgtatgctt

SEQ ID NO: 20065 - DNA, 75 bp, Homo sapiens
ggtctgttagagttcgaaaagctgagaatcctcagtgtttgctagtagagacggggtttcgccgtgttagccagg

SEQ ID NO: 20066 - DNA, 80 bp, Homo sapiens
gatgattcacaacttttagctgtgccagaatacagattctgttcatcttgctctgaaattaaataattctgaactcatgg

SEQ ID NO: 20067 - DNA, 50 bp, Homo sapiens
gggcgctccaggaggcactcacaggcaaggtgcccggcgacgactgcccg

SEQ ID NO: 20068 - DNA, 82 bp, Homo sapiens
tatctgtcttcggtggactccttcggcagtccacccaccgccgccgcctcccagcaagaggcggagtccaacctgcgcaagg

SEQ ID NO: 20069 - DNA, 81 bp, Homo sapiens
gctgtggccgctgacggccgcatcgagcccggcgacatgttgctgcagggatcaagcatgaattgcaagcaaactgctacg

SEQ ID NO: 20070 - DNA, 50 bp, Homo sapiens
ctggagcgaatcctaccttccaaacagatgaaggaactgagacacagagg

SEQ ID NO: 20071 - DNA, 89 bp, Homo sapiens
ggccatttcacctctaaaaaatgggatgggttacaaaagcaggttggtcactggaagatgttgacatatttgaaatcaatgaagccttt

SEQ ID NO: 20072 - DNA, 95 bp, Homo sapiens
catttattttggatcctaatgaataaagagtgcaaggactaagactacagttatttgaacaggtatgctatgttgactatggttttagtgaaaat

SEQ ID NO: 20073 - DNA, 75 bp, Homo sapiens
agatgcccctcctccaccagaggactgggaggagcatgtcaacagaagctccaccatgaggcgaggtggatggag

SEQ ID NO: 20074 - DNA, 75 bp, Homo sapiens
ccggctccgtcgtggaagcaggactgcgccgcgtcttcctcaagggatcgactacaagaccaccaccatcctgct

SEQ ID NO: 20075 - DNA, 100 bp, Homo sapiens
ccgcgttctcccctctccgcgggcagtgctagctcgccgcggccgcctccggggcctcatgcattgtgcgtcagcagcaatgtttatggtgaaaaatggc

SEQ ID NO: 20076 - DNA, 82 bp, Homo sapiens
cgacagtacaaagaagactcttgtcacactaattgccaacaacaatgcttggaagctcgaagtctggctgtggccatgggag

SEQ ID NO: 20077 - DNA, 75 bp, Homo sapiens
gagaccacagcccacaagacagaaggatcttaccaacagtatcattacagctgtgttcctttcagtagttgccat

SEQ ID NO: 20078 - DNA, 80 bp, Homo sapiens
ggggcgagcctggaggattgtcactccaacctcttttcgctgtgtggcaaagcgctccctggcctttcaaagcaagagga

SEQ ID NO: 20079 - DNA, 98 bp, Homo sapiens
gatcttttggaggaggaggatgaatttgatagagaggacataccgagggattgcatatgttaaatggaaattttataaagaagcaactcaagattttt

SEQ ID NO: 20080 - DNA, 74 bp, Homo sapiens
cttgatatcacagaggaaactctgcattctcgcttcctggaggttcaagggcagcaggaaagacgagatcctgg

SEQ ID NO: 20081 - DNA, 98 bp, Homo sapiens
tagcaggctccactaactggggctacgactctgatgggcaggcgaggaaacgagacctctttcgttccttctagaaggtctggaggacgtagagttat

SEQ ID NO: 20082 - DNA, 100 bp, Homo sapiens
agaaaaaccaagggaagaaccagtactaaaagaggaagccccaggacagagcagaatgggctgatatagatccggtgccgcagaatgatggccccaatcc

SEQ ID NO: 20083 - DNA, 100 bp, Homo sapiens
gagtgtggactttttgaatttcaagaacagtaaagttggaacacagcagagggtgtgtaataaaatacagagtgtgaacatggctacgcctcttcattcc

SEQ ID NO: 20084 - DNA, 100 bp, Homo sapiens
acaggcggtacctctggagcacccctcatccccctgggggtcagccagcagccggcccggggtgtcagccaccccacccaagtccccggtctacctggac

SEQ ID NO: 20085 - DNA, 50 bp, Homo sapiens
aaaagactaactcaaagcttcaagaagagccgttggacataccagatggt

SEQ ID NO: 20086 - DNA, 75 bp, Homo sapiens
tcttgctcggccgatgaagtgcagaggtttttttctggattcttggactatgtctgttacagaatgaactatgtc

SEQ ID NO: 20087 - DNA, 100 bp, Homo sapiens
tttttcacagccacggcacatttccgttgcaatggataagtttggattcagctctcctgccacagctcctcaccccctgaaaatgttcgcctgctccaag

SEQ ID NO: 20088 - DNA, 83 bp, Homo sapiens
cggcaagctggtgattaacaaagacctcgcggaggaaggttgaagaagcctcagcggaggcgatacggcctcctcgccaacac

SEQ ID NO: 20089 - DNA, 97 bp, Homo sapiens
ggacccactggaagcctagaaatggagtgagagcgcagagagccctgagacagcccctactggagcacctcctggggagcagccagatgtcatcccc

SEQ ID NO: 20090 - DNA, 95 bp, Homo sapiens
ccagcaatcctcagacgcctcacttaggacaagcgcagtcccagcatttctggaggccaaggcaggaagatcgcttgattccaggagtttgaaac

SEQ ID NO: 20091 - DNA, 50 bp, Homo sapiens
ggtctctgccagttccccaatgaaggcctcccccgtcgccgcgcggcttc

SEQ ID NO: 20092 - DNA, 50 bp, Homo sapiens
aagcatcccattacagatagaagagattccaaaagatgagcatattcttc

SEQ ID NO: 20093 - DNA, 75 bp, Homo sapiens
cttcaagagcccacggacaccacctcaacggaacggaaaacagttcttccttcaaagcatgcagtacctgaagta

SEQ ID NO: 20094 - DNA, 89 bp, Homo sapiens
gttcacagcaagctcaagctgctgggcctgctggttgacctctccccagatggcctgatgatccctgaggacggggctaacgatgaaga

SEQ ID NO: 20095 - DNA, 83 bp, Homo sapiens
ctgacaagcccttgcgcctgcctctccaggatgtctacaaaattggtgcccagacacatggccccaggccaagcaccccatca

SEQ ID NO: 20096 - DNA, 100 bp, Homo sapiens
attaggaaggcttcattcagctcagcaccaccttggaacaaaatccagtctcatagcagaggagaatataatgtttacagcaccttccagagccatgaac

SEQ ID NO: 20097 - DNA, 100 bp, Homo sapiens
ctgcagccaccgcggcccccgcggtaacaaatgtggcaattattttggatctatcacctgtcatcataactggcttctgcttgtcatccacacaacacca

SEQ ID NO: 20098 - DNA, 96 bp, Homo sapiens
taagtttgatttgccctatgggatgagaacatcaggaatagccaggccagaagaaggaaggcctgtggtgagtgggacaggaaatgacatcaccac

SEQ ID NO: 20099 - DNA, 100 bp, Homo sapiens
gaaagttcgaaaagttcctccaggtttgccatcttcaatgtctgctccaatgaggatctccctgaagttgagctggtgagtctgctagaagaacaactac

SEQ ID NO: 20100 - DNA, 51 bp, Homo sapiens
atatgcaccagaaggagatgaagaactacatcaagatcgttcttctccccc

SEQ ID NO: 20101 - DNA, 75 bp, Homo sapiens
caggagagcctagatgagctcatacagaattcctcaacatattgggagggcaatccggaaatggaaacattgcag

SEQ ID NO: 20102 - DNA, 50 bp, Homo sapiens
cggaaacaaagttattttgctcgggagaaatgcctgctgcctctccagtt

SEQ ID NO: 20103 - DNA, 106 bp, Homo sapiens
ataacagctaaggtattcctggaagcagagtaaataaagctcatggcccaccagctagaaaggaaatctactttcttcaatgtgttaaccaatagtcaggcttcag

SEQ ID NO: 20104 - DNA, 75 bp, Homo sapiens
acagaaacaaaatgtcaacaaattgatggtgatgcggctgactaagcctactttattcaccaatatcccagtaac

SEQ ID NO: 20105 - DNA, 100 bp, Homo sapiens
gactggtctgagttatcgaggtgtccatgaacttctatgtatggtcagcagggcctgtgccccaaagatgcaaacggggcgccgatgtgtgttgaaagac

SEQ ID NO: 20106 - DNA, 100 bp, Homo sapiens
atggtgtagtaaagtccatgttaggtcttggtcagctgtctactgttatcactcaggtgaatggagtgcatgctaacagatcatgtttgagaccttcaac

SEQ ID NO: 20107 - DNA, 87 bp, Homo sapiens
tgcgtcccgcctccctgggagctccgcacggggaggagtctgctactagtcttatcagctcttaaaaacagaaactcatctgtccaa

SEQ ID NO: 20108 - DNA, 100 bp, Homo sapiens
tccctcttcatgcttaatgaagtaaaacgggcccaaagacaggtgtcgtgaaaactacccctaaaagccaaaatgggaaaggaaaagactcatatcaaca

SEQ ID NO: 20109 - DNA, 101 bp, Homo sapiens
ggccaagaaggagaagcagctgcggaaaatgctagaagaacatccagtcatggataaaaatgagctggttcagaaggccaaactggccgagcaggctgagc

SEQ ID NO: 20110 - DNA, 75 bp, Homo sapiens
tgaggcccaaagcaagaaaattactaaagaggagtttgccaatgaatttctgttaatatgatcctctgttgaagc

SEQ ID NO: 20111 - DNA, 73 bp, Homo sapiens
ccttcttccggaagttacgtctgattcgaggagagaccttggaaattggttgaggagctcaagcttgggaaaa

SEQ ID NO: 20112 - DNA, 90 bp, Homo sapiens
tgagtgatgaaggaagacttgaacctagaaaatttcactgcaaagtcacagcaaactgtacaatggcagttgagtgggttttgaaaaacg

SEQ ID NO: 20113 - DNA, 75 bp, Homo sapiens
ttcctcacacacagttacttgccaagacgattgaagatgttgacaatgcgtctctggcacgtcttgaccttgaac

SEQ ID NO: 20114 - DNA, 82 bp, Homo sapiens
agaagagcccagcacaacgaaggatctggtgaagaatcatctgatgtatgctgtgagagaggaggtggagatcctgaaggag

SEQ ID NO: 20115 - DNA, 100 bp, Homo sapiens
aaaagggaaaagctgatgctggcaaggaggggaataaccctgcagaaaatggagatgccaaaacagaccagctgtggccccccagagggcccctatcctg

SEQ ID NO: 20116 - DNA, 100 bp, Homo sapiens
agcaaacggttaaacccccagtgcataccctacaccctgcagaatcactattaccgcaacaataggttcggactaaggatcaccgctttgaaagtgtcag

SEQ ID NO: 20117 - DNA, 75 bp, Homo sapiens
cagaggccggggaccttgccaaccctcccaagaagttcagaggaactgcaagcacatgttgaccagataactgaa

SEQ ID NO: 20118 - DNA, 101 bp, Homo sapiens
gcagaagttctcgaatcattctttgtacagaaattgaaaggcttcaaagctagcaggaaccctaaggactctgcaatatgaataattccctagagaacacc

SEQ ID NO: 20119 - DNA, 98 bp, Homo sapiens
tctcctgaccttgtgatccgcccatctcggcctcttgaagtgctaggattacagcaaaagatacagatattgtggatgaagccatctattacttcaag

SEQ ID NO: 20120 - DNA, 100 bp, Homo sapiens
gaccctgggtgagcggcccggagccaagactcgagagtttcgctctgctgcccaggctggagtacagtgatgtgatctcctgacgtcaagtgatccattc

SEQ ID NO: 20121 - DNA, 100 bp, Homo sapiens
agtccgactctcccacctgctaaggtatatgccctcattttgcttaagacctctggccagagcagggcatggaagattccttttaaaaagtaatactgag

SEQ ID NO: 20122 - DNA, 100 bp, Homo sapiens
tgacaacattaacacagaatgccagttcatcagcagccgactcacggagtggtcgaaagagcaatttaatgagtggtgttaagaataatgttggaagagg

SEQ ID NO: 20123 - DNA, 100 bp, Homo sapiens
cgtgatcccggcgacatactacctctggccccgagatcagaatgccggtgaagtattacagacacttagcacctgatcacttgctgcaaatatgtcatcg

SEQ ID NO: 20124 - DNA, 147 bp, Homo sapiens
cggtgttgaagatcccccggaccaggggcgagggctacccgctctttgccgtgacaacaccgttcccccagccgggctgacttccaagtgctggccttcatctccccgcaagatgcgccccctccaactctcagccttcatcttcct

SEQ ID NO: 20125 - DNA, 82 bp, Homo sapiens
tccaatgggcctttccagcccgtggtccttctccatattcgagtctggccgggaccttcaacagtatcagagtcaggctaag

SEQ ID NO: 20126 - DNA, 100 bp, Homo sapiens
gacgacgaccccctgcacaagcagccccgcttctgggctagcatgatggaggcagccagagatcaaagacgctggccttcagacctgatcagactcccag

SEQ ID NO: 20127 - DNA, 100 bp, Homo sapiens
ggagtggggacctctggatcccagtgaagagcttcgactccaagataacttgttcaaacccaaagaacggtgcatttcagagaaggagatgcatatgcga

SEQ ID NO: 20128 - DNA, 100 bp, Homo sapiens
aaagagcagatgccaaatctgtaaaggcatgacttcctggcaccacagggaaaatcgggtgcaagcccagaaactatttccccaccaccacttgttgaaa

SEQ ID NO: 20129 - DNA, 75 bp, Homo sapiens
ttacacatcccctgataaactaaagtcttgccacttgcctagtgaggcttttccgaacctggaaggagacgtcta

SEQ ID NO: 20130 - DNA, 101 bp, Homo sapiens
ttccgggagtggagccgacttggaaactcaaggccaatctcaggttgagacatggccctgggctgcatcttgtacctgctgtgcttccggcagcacccttt

SEQ ID NO: 20131 - DNA, 50 bp, Homo sapiens
ctacacctctccattactctgtccagtataaccccgttttcacacgaatg

SEQ ID NO: 20132 - DNA, 82 bp, Homo sapiens
caaggctgaaattatcctacaaaggttactcaaatgagtcgtccagacttgattctctttctgatgaaatacctgatggctc

SEQ ID NO: 20133 - DNA, 100 bp, Homo sapiens
aagcctcaaactcctgagctccaggaatcctcccaccacagtctctcaaatacttgggactacaggaggatttgttggtattgaggaaaacggtgaaatc

SEQ ID NO: 20134 - DNA, 51 bp, Homo sapiens
gatggaggaagctatgacctacacaggcacagaaagctgaaggtgctggag

SEQ ID NO: 20135 - DNA, 82 bp, Homo sapiens
gcgtccgccgattcctcctccttggtcgccgcgtccttggctggcgtatgtgtatatctcatgattgatatggagaaactag

SEQ ID NO: 20136 - DNA, 83 bp, Homo sapiens
agcgagctgtttgacccctttgacctcttcgatgtgcgagactttggaaagacaatgcagatcttcgtgaagactctgactgg

SEQ ID NO: 20137 - DNA, 122 bp, Homo sapiens
tacaatctaccacctacagccaagtggcagatttgttattggtgggcctcagtgggctgagagtggttactcttcccagtggtgctatgagaactttgtacagttcagatcgatgcgccgag

SEQ ID NO: 20138 - DNA, 80 bp, Homo sapiens
aagtctgagagagggaagtcgcctctgtgctcgtgagtgcatggggtataaggtggatccataaagaacccagccaaccc

SEQ ID NO: 20139 - DNA, 83 bp, Homo sapiens
cgcagaactcccctgcggcccgcactggggtggtcaaggagggcacccactacctgcggggcgtgaacaacgcgcgccagccg

SEQ ID NO: 20140 - DNA, 100 bp, Homo sapiens
ggaatgcttttttatctcatattagtgcctgtgatggcatctttcatctaacacacatgccaccactgctctttgaggtgtcatccctggagaatgcttt

SEQ ID NO: 20141 - DNA, 100 bp, Homo sapiens
tccggcccgagatgaatcctgcggcagaagccgagttcaacatcctcctggccaccgactcctacaaggtggatatcatccagtgaaaattggagacctc

SEQ ID NO: 20142 - DNA, 90 bp, Homo sapiens
tctgcttctgggcagttcagcaagcctttctcattttctccatcaggaaaaggaacggctgtagtagatctctctgggaatggcgacccc

SEQ ID NO: 20143 - DNA, 82 bp, Homo sapiens
tcgggctcggaacgagactgcacggtgaacctgagcaaggtgggcgagtattggtggaacgccatcctggagggagaagagc

SEQ ID NO: 20144 - DNA, 87 bp, Homo sapiens
cccacatccactcgcacctgcacctgcaccagcaagatgctatccatgcagatcgccacatcacagaatcgtatctatctcacagct

SEQ ID NO: 20145 - DNA, 75 bp, Homo sapiens
tgttaaccaggatacaagattagacaacagagtcattgatcttagggtacaagaaaattccccaggacacagagc

SEQ ID NO: 20146 - DNA, 99 bp, Homo sapiens
atattcttgaagttaagcgcctccttgatcaccaggataatattctctcattgattaatgtcaatgggaggtggggaagacagggctccagctaccaca

SEQ ID NO: 20147 - DNA, 113 bp, Homo sapiens
ccgagcccggcgggaccatgttcaccagcaccggctccagtgggctctgctgtctcctggttcggacatctatgtgacggtctcatccatggctttagcaagatcccagtgtc

SEQ ID NO: 20148 - DNA, 100 bp, Homo sapiens
aaggcagtaagctctgctccctagcagccttggtgctggagaatctggtaaaagcaccattgtgaagcagatgaggatcctgcatgttaatgggtttaat

SEQ ID NO: 20149 - DNA, 82 bp, Homo sapiens
cggtgacagcgtgagaggttcgcagaatgatatcatcaagttgaatcgaaaggaagggaagaagcagaattttccaagacta

SEQ ID NO: 20150 - DNA, 75 bp, Homo sapiens
ggaaatgagagaaatgcttacacacagaaatgtccagcctagggtgaatgtttccccctccaagaaggggccctt

SEQ ID NO: 20151 - DNA, 74 bp, Homo sapiens
tcattgtactgatgattctccagatccatgtatagaatatgaggtatatgaatggcacctgcccagaaggaaac

SEQ ID NO: 20152 - DNA, 98 bp, Homo sapiens
tctagaggtccgtctgaccgcggcgtcgggacctggtttccgggcatgagctgagagcaccacgccgaggccacgagatgcagcagcttttttatgag

SEQ ID NO: 20153 - DNA, 95 bp, Homo sapiens
ggccttgcctagtgggccttccttcccaggttcgagaacttgtcttggacaattgcaaatcaaatgatggaaaaattgagggcttaacagctgaa

SEQ ID NO: 20154 - DNA, 74 bp, Homo sapiens
tagaaagtaacgattttgaaatgctaaatgtctatgttaacaatgaatgggcaaccagtgttggggaaggaggg

SEQ ID NO: 20155 - DNA, 100 bp, Homo sapiens
cgcgggatcccagcctcaggcgtgcgcggacggtgtgcgggcgcagacggggaagcggagccaacatgccagtggcccggagctgggtttgtcgcaaaac

SEQ ID NO: 20156 - DNA, 82 bp, Homo sapiens
cgcctccagcttgccaccaaagacctgcgactttgctcagcaagagtgagccatggagctacgtgtggggaacaagtaccgc

SEQ ID NO: 20157 - DNA, 90 bp, Homo sapiens
aggcagaggtggaggcgctttgaaagctgagctccttgccaaaaaacagccattaaaaaccagtgaggtctactctgatgatgaagagga

SEQ ID NO: 20158 - DNA, 90 bp, Homo sapiens
gtccctgctctgtgcgcgcctccatctgggccatggatggggatgtctgacttccagtacttggctgtgcatacggaagcaggcggcaag

SEQ ID NO: 20159 - DNA, 75 bp, Homo sapiens
gttgttctcggcgggctgtggggcctccgcgccgcggccgttagtcatgtcgggcctttagcaaaaaacagatag

SEQ ID NO: 20160 - DNA, 100 bp, Homo sapiens
ttcaagacaggtgtttaagcgctgtcattatttgtatcaaaaacaaagaatttgaaaaggcttcaaaaattttgaaaaaacatatgtccaaggaccccac

SEQ ID NO: 20161 - DNA, 100 bp, Homo sapiens
tgtctgtccccagagcctcagtttgtgcaggacaccgacatggaacagggactcactggggattagtgatgatgaaccaggttatgaccttgatttattt

SEQ ID NO: 20162 - DNA, 88 bp, Homo sapiens
tccgagtctccgccgctgcgggcccgctccgacgcggaagctgcagatctgggacacggccggccaggagcggttccgcaccatcacc

SEQ ID NO: 20163 - DNA, 101 bp, Homo sapiens
gaaaacaaggtgtctgcaggaccaacctctcctctggatgctctaggaatttgagagcgtattttgcggtaaaactggccgaaggctaaagctgaccagac

SEQ ID NO: 20164 - DNA, 100 bp, Homo sapiens
ccgatcatggcggatggcccccggtgcaagaggcgcaaacaagccaatcccaggaggaaaaacgatacagatgaatatagacctcctgtttggaaatctt

SEQ ID NO: 20165 - DNA, 98 bp, Homo sapiens
agaagctgcttccaggatactacatggctaaagaattacctccaaagccattgtcaagaccacagcagtcatctgcaccagtccagctgaactctggc

SEQ ID NO: 20166 - DNA, 100 bp, Homo sapiens
gcaaagaccagaacaaacagaaggaagccagcagccaagccggggcagtttcagtctccaccccaaatgcagacttaattcagtgcacaaatgagatgaa

SEQ ID NO: 20167 - DNA, 75 bp, Homo sapiens
gtaccaggcgaagctggccgagcaggctgagcgatacgacgggacctgatgcccagaaccctggacgggcagatc

SEQ ID NO: 20168 - DNA, 78 bp, Homo sapiens
gaggcggcggtgtgggcgcgtcaggccgcgacgagggcgctgagaactgataaatttcaaacggaagagagtggcagc

SEQ ID NO: 20169 - DNA, 100 bp, Homo sapiens
agtcagaggaatagaaactttggaatctgtacccattattggtggtttttgggagactatctttggcaacaggttcctctacctggcatgaaatgggtag

SEQ ID NO: 20170 - DNA, 100 bp, Homo sapiens
ggactcgtgcgagccttcctgtggtgaggtcaaccaaccagacgaaagaaagatctctgggaaacttggatttaactggccagaagcaggtattcaaagc

SEQ ID NO: 20171 - DNA, 96 bp, Homo sapiens
cagaacttctattttcattgcacacagattgtcaacagtggttgatgcagatgaaatcattgtcttggatcaggctttggtatcaggatgatgctg

SEQ ID NO: 20172 - DNA, 90 bp, Homo sapiens
cctgtttagtaaatatctttccctagctggtgaacatgattaaagatgatgggacagttattcatttcaacaatcccaaagtccaagctt

SEQ ID NO: 20173 - DNA, 100 bp, Homo sapiens
agatatgcctgctaacatggataagcatgccctgaaaaagtatcgtcgagaagcctatcatcgggctggtgaattaccatatctccgtcaagtgcagtaa

SEQ ID NO: 20174 - DNA, 82 bp, Homo sapiens
aaatccctggtgccaaaggctttagaaggttatatcacaggtgagcgagtgctgtgctttcatgggcctcttctttatgaag

SEQ ID NO: 20175 - DNA, 75 bp, Homo sapiens
tggcagttgtcatatgtactgtgtcagccatcatgtgtgtcagcatgagagaatccacattcatctcaatggaag

SEQ ID NO: 20176 - DNA, 100 bp, Homo sapiens
cttgttcactgctgtgtgccaagctgctgacagcatctggctatcgcagcttcaaagacttctatgagctggagcctcataagttccagaataagaccaa

SEQ ID NO: 20177 - DNA, 82 bp, Homo sapiens
tggaattctaatttgaaccatgtttggattgaagccgcctctgtattacttaccaggaggcatacacggaatacctgaggag

SEQ ID NO: 20178 - DNA, 100 bp, Homo sapiens
ggacggcgtggaccacatagacatttacgcggatgtcggcgaagagttcaaccaggatcccatggtccattattgcctttaccaagtcgttacagaatgg

SEQ ID NO: 20179 - DNA, 83 bp, Homo sapiens
gcctctactacctctggatgtacaatgcagatcttcgtgaagactctgactggtaagaccatcaccctcgaggttgagcccag

SEQ ID NO: 20180 - DNA, 100 bp, Homo sapiens
actagacaaagatcagaatcaaaacacaaatcgcctaagaaaaagactggaaaggattctcaccacccagctatgcagaagtggtaacagaggaacaaag

SEQ ID NO: 20181 - DNA, 50 bp, Homo sapiens
acgaagaccaccagcggctatgcaggtgtttccctcccagatgatgaccc

SEQ ID NO: 20182 - DNA, 76 bp, Homo sapiens
cgccctcatggggaaaatctccccggtgactttcagcaaagtgcagaggaaagttccacttccagaaaaagaacta

SEQ ID NO: 20183 - DNA, 75 bp, Homo sapiens
gtcggtttgctatcgggactcggcgaggacgggtcctcgaagacaagccatgaaagagatgtccatcgatcaagc

SEQ ID NO: 20184 - DNA, 100 bp, Homo sapiens
cgtgactctgcaccctgcccagaggtccctcagcaaagatggtacaaaagagtctttggaggatgcggctttgatggaagtcctccagctctgcatcttc

SEQ ID NO: 20185 - DNA, 75 bp, Homo sapiens
tgatgatatcattatgctgacctctgacgagctgcaatttggttatgagatgaggagcgggaaggcctcctgcac

SEQ ID NO: 20186 - DNA, 100 bp, Homo sapiens
ttgactacggaggggttgccaggcattgtgtggctgctcaattaatgtaccaacactggatggaagaaacatacctatgtcagtaaatgatattgtgaaa

SEQ ID NO: 20187 - DNA, 103 bp, Homo sapiens
gttcgcccaggctttggcccggcttccggagaggccaagaagatgaccacctttgagtatctcattaataaccgcaaagaagagagttcaaaacatcaagcag

SEQ ID NO: 20188 - DNA, 83 bp, Homo sapiens
cagacccgcgccgccgacgacccagcagccgccatggctctgctccgagcaccagcagaaccaaaatcgtgtgtggtggcaga

SEQ ID NO: 20189 - DNA, 83 bp, Homo sapiens
ctggaagggatgtcgtctcagcagtgctcgggcgcaggtcagaagttgagtagcaggggcctaggagggctcgaagccttcac

SEQ ID NO: 20190 - DNA, 90 bp, Homo sapiens
aaagccttgaagtacttgtttagattcatcatccaatcccgagtgctctacttgaggtaaataccagctgtcccctacagtgaatatgcc

SEQ ID NO: 20191 - DNA, 100 bp, Homo sapiens
ccttgcttttgcctggacccccagcatcatggtttcccatttcatggggtctctcagtggacagaggactgcagaaaatcaacctatcctccttcaggac

SEQ ID NO: 20192 - DNA, 100 bp, Homo sapiens
ccacagcatctttgtctagccccagtgcaggtacatcaggaacgtctctatcaagaatacaatttcagcaaggctgagggccatctgaaacagatggaga

SEQ ID NO: 20193 - DNA, 50 bp, Homo sapiens
gagcaatcagaaatgatcaaggaggaattccagggaagaaatgtggtaca

SEQ ID NO: 20194 - DNA, 90 bp, Homo sapiens
gccgttcgttcgtttccagcctcaggaatttatggtcgcctttttgaatgagttctttatagctccaagctctacagattcttcaaatat

SEQ ID NO: 20195 - DNA, 98 bp, Homo sapiens
caatatccaaatcaagcattcaaaagactacatgatcttatgcacttcaatactctgaacaacattgatgtgatcgaggaaacatctcaacatcttct

SEQ ID NO: 20196 - DNA, 82 bp, Homo sapiens
tggagcctcagttggaagcagccgatccagcctgcggagcctgtggggcagattcctgacattcagacaactgacttgtaac

SEQ ID NO: 20197 - DNA, 82 bp, Homo sapiens
agagggttctgtggaggacataagggagatagtgcagagactgaagccaagacaatgcaaactccagtgaacattcccgtgc

SEQ ID NO: 20198 - DNA, 80 bp, Homo sapiens
tggaagcaggtggaattatgccctgttggttccaatgctgggattggctgcttttcgaatgtatcctgtcaggtataatg

SEQ ID NO: 20199 - DNA, 50 bp, Homo sapiens
gaaaaacttcttgccaaccaaaccctgggcgctgcctatggcacagccaa

SEQ ID NO: 20200 - DNA, 100 bp, Homo sapiens
gaaagaaacaaatgcagcaggtcctgatagtcgatcaaaaattgtgcttctggtagatgcttcacagcaaactgaatatattgtggctttcaatggatac

SEQ ID NO: 20201 - DNA, 100 bp, Homo sapiens
tttgggctgtatgttagcaagcatgatctttcgaagggaaccattcttccatggacaggacaactatgaccagatcaagcttcaggagtctccggaagac

SEQ ID NO: 20202 - DNA, 96 bp, Homo sapiens
gggggagctgaaacagaacctgtccaggagctggcatgacgtgcaggtctctagcgcaggtggtttgtgctccccctactgcctatatcgacttcg

SEQ ID NO: 20203 - DNA, 74 bp, Homo sapiens
ctgaagttgccaggcttcccaacattcttgtctgtgtacgagctcaactggaggcagtcctgtgcggaaatctg

SEQ ID NO: 20204 - DNA, 98 bp, Homo sapiens
aacgcattgccgccggtcctgaccaccgtgaacggacagtcccccccaggtctctaattaacagaagatggcaaagcccagccacagcagctatgtcc

SEQ ID NO: 20205 - DNA, 83 bp, Homo sapiens
ggcgactgggggctgaagagcgcgccgccctctcgtcccactttccaggtgccagaaccctgtggagcatcatgaactgggaa

SEQ ID NO: 20206 - DNA, 100 bp, Homo sapiens
ctcctcgccagcagccgtccggagccagccaacgagcgaacatccagtcatggataaaaatgagctggttcagaaggccaaactggccgagcaggctgag

SEQ ID NO: 20207 - DNA, 90 bp, Homo sapiens
ccaatgttggtgctggcaaaaagacaaagcacagttgcttctagaccaagaggctgaatcagcatcccaaaagatagaagatggtaaaac

SEQ ID NO: 20208 - DNA, 90 bp, Homo sapiens
cgtgaagattccaagttcaggagaactcgaccgctttctgaaacaaagactcattttgaagatgtttaacaaatcatttggaacaccctt

SEQ ID NO: 20209 - DNA, 100 bp, Homo sapiens
ccgactccaccctggctggaggaactgggtgctcctgcccgctggcccctcgcgcgtgaggatctatctcaggctggccactactgcaggtctccagcag

SEQ ID NO: 20210 - DNA, 100 bp, Homo sapiens
tgatcttaatgggaaagaatactggcttgtgaaaaacagaggctgacccgcggctgattgagtccctctcccagatgctgtccatgggcttctctgatga

SEQ ID NO: 20211 - DNA, 74 bp, Homo sapiens
agcgtcagaaataagccgttttttgacatctgtacttcaagaaagggcggcgactggcggcgcgatggacctga

SEQ ID NO: 20212 - DNA, 75 bp, Homo sapiens
tcttcaaaactcatctcctgggtgactgagtaaagccaatcccagctgaaggaatcaagtcaaatccttccaagc

SEQ ID NO: 20213 - DNA, 150 bp, Homo sapiens
aatgagcccaaccacgtggagctgggacgtaaggatgacgcaaaagttcacaagatgttccttgaccatactgctgcctctctccagaatgatctcaaccagggtggcccagggagcactaattccaagaggcaggccaactggtccttg

SEQ ID NO: 20214 - DNA, 97 bp, Homo sapiens
gcaggcccatacgatttgagccaccaatgctggatttccatgaacaggcggcgactggcggcgcgatggacctgaccgggctcctgctggacgaaga

SEQ ID NO: 20215 - DNA, 75 bp, Homo sapiens
ctcccaaggtgctggaattacaggtgctggtggatgtgccctgtaccacagaccgccactcccttcatgaggagg

SEQ ID NO: 20216 - DNA, 75 bp, Homo sapiens
gtcaagcatggcgtcatggacatcggcctggacagccaagccctttctaaggcacaaaatgatgtgatggaaatg

SEQ ID NO: 20217 - DNA, 101 bp, Homo sapiens
agtttgtgcagtttgtgtgctcggatggctcgggccaggccaccggacaggtcatcgccaccatcccgaccagcagactcaagttcctcaaggaggcaggc

SEQ ID NO: 20218 - DNA, 100 bp, Homo sapiens
cgggaactctgcgggagtcgcggcagctccgctcccagagacccaggagttgggcccagcgtccctcccggaacggtgcatctgcagacgcagcaggagg

SEQ ID NO: 20219 - DNA, 90 bp, Homo sapiens
ctctgctggccgtgcagaagctcatggtgcacaactgtccacaagaatcggaatgtcagttaatgctattcgcaagcagagtacagatga

SEQ ID NO: 20220 - DNA, 75 bp, Homo sapiens
gccgccgagctggacccggaccggttttggctcattcagttcctgatctcactggtgcagtcaaaccggatcctg

SEQ ID NO: 20221 - DNA, 80 bp, Homo sapiens
caattccccccgcaccaaattgcatcgtttcccaggtcagcccaaggccaaccccactgtcactctgttcccgccctcct

SEQ ID NO: 20222 - DNA, 75 bp, Homo sapiens
taggagaatgactccgattcgtgaccctcagcgccggtgcatgtcgatagtctggtgctggcagaaagtagtcct

SEQ ID NO: 20223 - DNA, 75 bp, Homo sapiens
cagaagtccagagctgaggactgcctgtttgcagaatttggtgttcacttggcagaactgactgtagatccccag

SEQ ID NO: 20224 - DNA, 100 bp, Homo sapiens
gaagaaggacttcggaatgcactacaacaggaaaatcatattatagatggagtaaagcggatgaccaccaggctctcatctgggacatccagcaaatgcc

SEQ ID NO: 20225 - DNA, 100 bp, Homo sapiens
gtttatcttccttcggcttaatgttcttcgtgaggttctgcttggattctgctagacagacccgacaaagactgtctatcaactggtccaattttagctt

SEQ ID NO: 20226 - DNA, 98 bp, Homo sapiens
gatcagctgaggaagtagaagaaataaaggcagaaaaagaggctaaaactcaggctatacttttggagatggagagaagtggatgggccctatacctc

SEQ ID NO: 20227 - DNA, 112 bp, Homo sapiens
gcagcgccagcggccgagcgggcggcttcctggcctgggcgctccggtggcggcggagtgtaaatgagcaaagatggatcaggaaggtgggggagatgggcagaaggccccg

SEQ ID NO: 20228 - DNA, 75 bp, Homo sapiens
aactgaccacccaatgcagtgcatattaacaagggtagattttgtgtaaacaggaacatcgataagtagtgtaaa

SEQ ID NO: 20229 - DNA, 74 bp, Homo sapiens
agacccgcttggccaagagaggcatcctcaaacatctggagcctggcctggcggacaacaccaatgacctggag

SEQ ID NO: 20230 - DNA, 100 bp, Homo sapiens
gcgagcggctgcgggacgcgaggtttccgggcaaagttggccaagaattacggcatgacccgcatggacccctactgccgactgcgcctgggctacgcgg

SEQ ID NO: 20231 - DNA, 100 bp, Homo sapiens
acaccatccaagcagccaggcagtatcgggagcaggaaagccagtgttgtggaccctagcacagagctgagtccacctcaggacgaggccagtgcctgaa

SEQ ID NO: 20232 - DNA, 100 bp, Homo sapiens
ctgatagcggacagtggacttaaaatacttgcttgtgatgacttggatgaagctgctagaatgattcttgtagacactgtttgggctctgtcatacttga

SEQ ID NO: 20233 - DNA, 98 bp, Homo sapiens
tgaagcaaaagatcagcgaggagcagcagcagctccagcaggcgctggctcctgctcagattcttctactcaaaacaaaagagccaacagaacagaag

SEQ ID NO: 20234 - DNA, 99 bp, Homo sapiens
tcccagagaaaaatcggcagatgttacagctgctcatgaaccacttggcaaagattatcgagattgcagcctgtcactccacacacacgtctgcggcca

SEQ ID NO: 20235 - DNA, 100 bp, Homo sapiens
cctcaccgccctcagccagaagggctacgccagcggcgtcgagaggaccatcctgggtgctggccctgtgctggagtcttccctgcgttgactatttgga

SEQ ID NO: 20236 - DNA, 100 bp, Homo sapiens
cggggcctgaggagcgggcacagggcaaggcggcggacggctgcgtcgcccgaggcgaggaggagcgctggcgatggcccactgcgtgaccttggttcag

SEQ ID NO: 20237 - DNA, 97 bp, Homo sapiens
cgcccattgtaaccaggtcatcagataacaacgaacttgatgcaagtgataggtttgccaaggtcagacctctcatcatccggatgaactgcaattt

SEQ ID NO: 20238 - DNA, 100 bp, Homo sapiens
caagaacagcagctgtggaggtggaatcagtagcagcagcagcagccgcggtggcagtgcaaaaggctggcagtacaggaaagaccacagcaagattctt

SEQ ID NO: 20239 - DNA, 75 bp, Homo sapiens
cggagaagtgcggcggagcggcgcctgcattagcaggcctgcacagctgaccacagttgggaaacgttgctgtct

SEQ ID NO: 20240 - DNA, 82 bp, Homo sapiens
gcggacagcgggctggagcctgacgagctggcgggaggagtatttgaagacttctgagcggaggagtcgcatgtcagagctg

SEQ ID NO: 20241 - DNA, 100 bp, Homo sapiens
cggtgttccacgtgaagctcaccgacagtgccctgagggccttcgagagctaccgcgccagacagccacaatggtgcgcatgaatgtcctggcagatgct

SEQ ID NO: 20242 - DNA, 75 bp, Homo sapiens
ccatgtcggtgcccaccacacccaccctgggcttcagcactggcagcccccagctgtcgcctggttgggcccgga

SEQ ID NO: 20243 - DNA, 96 bp, Homo sapiens
tggcgtgtctcctcctagtgcttcccgtctcagaggcaaactgatttccagactgtattaccatcatttgagctcttctcaaagtatggaaaatta

SEQ ID NO: 20244 - DNA, 82 bp, Homo sapiens
atgatcccaatttccagatgccttgttcaacagcatccggtgaaagacagagatcacatttcaactagattcttaggaagta

SEQ ID NO: 20245 - DNA, 105 bp, Homo sapiens
cccgggaggtgttcaagacccagggggtgatcaagtacatggggccggcagtggagtacgacaaggagttctcccctcgtcagcgacaccacaaagagttcaagt

SEQ ID NO: 20246 - DNA, 98 bp, Homo sapiens
gcccacccctcacctcacgcggattggggggtcctcacgccaggccggagctggacgccatgaccaggatttgcctcaaagggcactgcaaaaattga

SEQ ID NO: 20247 - DNA, 98 bp, Homo sapiens
aggggtgacagacgttttgaaaaaccaggacgaaaagatgtagcaagtctggaaaagtttgaaattccagtaaaaattcgtttgagtcctgaaccgtg

SEQ ID NO: 20248 - DNA, 100 bp, Homo sapiens
agagtcggagtgaaaagaaggcacggaaggctatctatgtgcctgctgatgacttgactgaccctgcccctgctactacgtttgcccatttggatgctac

SEQ ID NO: 20249 - DNA, 76 bp, Homo sapiens
gaggagccctcgttttcgagatcaggcctgaccgggataagctccagtaccaaggatgattgcttcaatgttaata

SEQ ID NO: 20250 - DNA, 74 bp, Homo sapiens
cgttacaagctttgtctccttcgacttggagtctttgtccaggacgttacagaatgtctgaaggggacagtgtg

SEQ ID NO: 20251 - DNA, 90 bp, Homo sapiens
tgttcatcaggaacgtcgcggacgccaccaggaacaccagtgtattcagtagcgtggggccctgattcagaaaaggttctttatacagca

SEQ ID NO: 20252 - DNA, 82 bp, Homo sapiens
cagacgtcaggcagaaattggagaggggaactgtggctgcaccatctgtcttcatcttcccgccatctgatgagcagttgaa

SEQ ID NO: 20253 - DNA, 100 bp, Homo sapiens
atgcaagatgcagaagtcagcaagagtgacataggagaagtgattcttgtgggtggcatgactaggatgcccaaggcatttattgaaatggcaaccacag

SEQ ID NO: 20254 - DNA, 50 bp, Homo sapiens
ctcgacctcgtgaagatccgcttcgccgttgttgacctcctgtactggag

SEQ ID NO: 20255 - DNA, 98 bp, Homo sapiens
gattgtaccagttgagataaccatcagtttattaaagagggtgaaatgacaatggatgctctgttggctcgattgaaacttctgaatccagatgacct

SEQ ID NO: 20256 - DNA, 75 bp, Homo sapiens
acgtgtacatctctagcagtgctggagccaggtggcgagagtgatcagggccaaagcggtcagtgagaaggaagt

SEQ ID NO: 20257 - DNA, 75 bp, Homo sapiens
ttgtttgtggatcgctgtgatcgtcacttgattatgatgcatcattatcacagaagaaattcgtgtctatagctt

SEQ ID NO: 20258 - DNA, 101 bp, Homo sapiens
ccagaggcgggcgatgtgaagatgtcagtgggctgtgcctgtcctggtgaaaggtgtagcagtcactcggcctacacccacagcatcgaccttgtgaaccc

SEQ ID NO: 20259 - DNA, 90 bp, Homo sapiens
ctgggagttgggggcaaggagaagatcctggtgtgcaactgaggaacatggctcaagaaactaatcacagccaagtgcctatgctttgtt

SEQ ID NO: 20260 - DNA, 101 bp, Homo sapiens
tcagagctgggagctggcacttggaactcaacaaatagcccaagagctcccagctcccactcccagcagcaggcactgcgagcaagactggccgccggatt

SEQ ID NO: 20261 - DNA, 74 bp, Homo sapiens
ccagctgcttcaaattggacttaagtctgaatttcggcagaatttagacaatgcagatcttcgtgaagactctg

SEQ ID NO: 20262 - DNA, 50 bp, Homo sapiens
atccaatcccttgtccttaaaaggacctgatcccaaccttgaagaaagtc

SEQ ID NO: 20263 - DNA, 98 bp, Homo sapiens
cagcaggaaggtctcacctgaggtgaaccttcgaccttggacttctcagcctccagaatggatttggagttccatggagtgatgagattttattttca

SEQ ID NO: 20264 - DNA, 82 bp, Homo sapiens
gagaccctcacggagctgggcgacgagctgaccctgggagacatcgacggttgactttggcagaatatcatgaacaggaaga

SEQ ID NO: 20265 - DNA, 82 bp, Homo sapiens
ccaagcttccagcagtctgagcacaacaggagcacgtgaattgcctctgcttacgttcaggccctgtcctaaacccagccgt

SEQ ID NO: 20266 - DNA, 75 bp, Homo sapiens
aggccagttcgtcggctgccagcaacaatcaccaggagccttcacgtaaatgggtccagtcatgcctcccagtaa

SEQ ID NO: 20267 - DNA, 96 bp, Homo sapiens
gaaagagacagcctgctggatactcatccagggaccgaaggctccggtggcacccgggctatttctcagaggacaattagtaacgtgtcgccatga

SEQ ID NO: 20268 - DNA, 90 bp, Homo sapiens
gccatggttctcctaggggcaaagggaaacaccgcaacccagatggcccagcatggcacattacacttctgtggatttaaagtccttgcc

SEQ ID NO: 20269 - DNA, 110 bp, Homo sapiens
aacgcaggctgaggtcggagcgcgcgggcgtggtgcgggagctgtgcgcgcagccgggccaggtggtcgccccagggtttggaaggcgctttgagtccccgctgctgtgg

SEQ ID NO: 20270 - DNA, 100 bp, Homo sapiens
cagcatctttgggcagccattgagattatacggaaccagaagcagattgccaacattgaccgtattacaaagatgcatcatctgcagacatcagaaaagc

SEQ ID NO: 20271 - DNA, 90 bp, Homo sapiens
acaccatgagcaaagctcaccctcccgagttgaaaaatggatgttcaaatgagagaatttgaagtgttgaaaaaactcaatcacaaaaat

SEQ ID NO: 20272 - DNA, 101 bp, Homo sapiens
aacttggcagcaagatacctgtgcatcccaacgatcatgttaataaaagccagggagtccacggcctttgcggggaaacatgttgtattccggaagtgagc

SEQ ID NO: 20273 - DNA, 100 bp, Homo sapiens
gacgtagaggaattagttgaaaaggatattggtgctggaaaaggcaaatactatgctgtcaattttccaatgagagatggtatagatgatgagtcatatg

SEQ ID NO: 20274 - DNA, 97 bp, Homo sapiens
ttggccacctacagaaacaaaatgtcaacaaattgatggaggccatgtggaagtgttacatcaccttttgcttggaaagatttactaagaagtcaaa

SEQ ID NO: 20275 - DNA, 100 bp, Homo sapiens
agaattatgcagttgctcgatgtgcctcctggtgaagacaaggggggatatgtgatcaaagcatcagaaggttgctgctccaagatagccaaaatgtgga

SEQ ID NO: 20276 - DNA, 85 bp, Homo sapiens
cttggagtccggacatctgaaacttggtctgaatttcctgctgctgttcacaaagatgctttttatctttaactttttgttttcc

SEQ ID NO: 20277 - DNA, 50 bp, Homo sapiens
ggctctaacggggctttctacaagatgacacacaataatttttggttgaa

SEQ ID NO: 20278 - DNA, 100 bp, Homo sapiens
caggagctcaatgcccacaaccagggaaaggggcgcagggagtctgaaagctccaggagcagcagaaggcccagtggccggtctccaaccagtactgaga

SEQ ID NO: 20279 - DNA, 50 bp, Homo sapiens
atttaaacaagagatttccacagaagcccctgcagatcaagtcagtagtg

SEQ ID NO: 20280 - DNA, 100 bp, Homo sapiens
cactctgcgctttgagctactgggctgtgagctgaacgtgggtcggaagcagttcatgaggtttgagtgggcaaactacgcagctgaggccctgggctgc

SEQ ID NO: 20281 - DNA, 90 bp, Homo sapiens
gcatcgcttgtcagcgaccagtaggactggtccttatggaaggagtgacagatactaagccaggactcatctgatgatgtgagaagagtt

SEQ ID NO: 20282 - DNA, 98 bp, Homo sapiens
actgaacattggtctaaagtctttccaaaaggtcaaggttcacaagtgaatgaaaggaatactctacaggaagaaaataaaaagctttctgaacaact

SEQ ID NO: 20283 - DNA, 89 bp, Homo sapiens
ctttgctccagcctggcttaatttccctactccaccatcatcaacaaaggcgaacctgaagaagttcatggactacgtccagctgcata

SEQ ID NO: 20284 - DNA, 100 bp, Homo sapiens
acagccagtggcgccagatagaaaacggcgagagtgggcgagaacgtccactgcgggccggcgaaagctgaaccgggggcggctggcagacaagaggaca

SEQ ID NO: 20285 - DNA, 90 bp, Homo sapiens
ctttttgcttagcactgaaaattctggataatggtgaatgggaaaggaaacagattcattgtctgtctgaggatgagttaagttcttcta

SEQ ID NO: 20286 - DNA, 101 bp, Homo sapiens
ggtgtatcaagtaatggtgcaaagcctgaaaccacagctcctttcaaaatccctaaaactcaagcatcttccaacctgttagccttggttactcgtcatgg

SEQ ID NO: 20287 - DNA, 82 bp, Homo sapiens
cgccccgccgctgagccgtcgcggagccgcgcagccctcggagcacgcttccccgggcgctgcctggacaggcctgcctgcg

SEQ ID NO: 20288 - DNA, 83 bp, Homo sapiens
ctacaacatattgctgcaatcaggaccattgcaataaaatagaacttccaactactggaacatgtttgacaagctgaaccgtg

SEQ ID NO: 20289 - DNA, 80 bp, Homo sapiens
ccggggacaagaaactagagcaaataaccgttttgaaattgtacatcaggaacgtctctatcaagaatacaatttcagca

SEQ ID NO: 20290 - DNA, 83 bp, Homo sapiens
cagatgcttggacgataccgagaatacagtaatggacaggcgggtgcgatagaacatgacttgccggagcagccttacttgca

SEQ ID NO: 20291 - DNA, 119 bp, Homo sapiens
tatacatctctcatcatttcagcaacaaggaaataaattagtggcagagtaagggtgacttgcggagctggagtttgttcagatcatcatcatcgtggtggtgatgatggtgatggtgg

SEQ ID NO: 20292 - DNA, 83 bp, Homo sapiens
tggcggatgccctgcagtacctgcagaaggtctctggagacatcttcagcagtttggcaatgaggagcagcagctggcgtggg

SEQ ID NO: 20293 - DNA, 90 bp, Homo sapiens
tactgttagagaccactggattagcagaccctgattgccacggcagtgaagtttctacagaattcccgggtccgccagagcccacttgca

SEQ ID NO: 20294 - DNA, 82 bp, Homo sapiens
gttctaattccacgcgctccaaaatatccgccatggagaaatcttgggtggcccggtggaaatcctgccctttctgtacctg

SEQ ID NO: 20295 - DNA, 74 bp, Homo sapiens
gctcctcgtgggcatccacctcctcaagaatttgaggaagccaggaagtgggtgtcgaagaagttacactttga

SEQ ID NO: 20296 - DNA, 100 bp, Homo sapiens
cagagaagcttctgaaaacatttttgaaaagacaagccatcaaaactgccttcagaagcaaaagagatacaatcttgcttgaccgtttgggacatcaatc

SEQ ID NO: 20297 - DNA, 74 bp, Homo sapiens
gccagctgctccggagatacgcacgtcagctaactgttcagatgatgcaaaatcctcagattcttgcagccctt

SEQ ID NO: 20298 - DNA, 100 bp, Homo sapiens
cggaggagagctgcatgctgggagtgccctctgccctttccagggcaatttcaccatcattttgtatggaagcttcagaggatgattccgaagaagacgg

SEQ ID NO: 20299 - DNA, 75 bp, Homo sapiens
tattctgattgctacagatgtggcctccagagggctagacagagtctcactcccatcgcccagacttgagtgtag

SEQ ID NO: 20300 - DNA, 50 bp, Homo sapiens
gccgagcaggctgagcgatacgacggagggagccatggatttgctgcggg

SEQ ID NO: 20301 - DNA, 74 bp, Homo sapiens
acagccctcagcgagagtgccaaccaggccttcctgtgatgaacggcagcagccactcaccaacagccatcaat

SEQ ID NO: 20302 - DNA, 101 bp, Homo sapiens
tggccagccatttattgtaactgtgcaagatggacagcaaggatctcaaagatttcatgagacaagctggggaagtaacgtttgcggatgcacaccgacct

SEQ ID NO: 20303 - DNA, 100 bp, Homo sapiens
ctcgatgtgctctgcgtgttgctgggatttgcagatttacagaatggctgcacattaatggaaagagaagcataaacctatcttctttcattatggaggg

SEQ ID NO: 20304 - DNA, 101 bp, Homo sapiens
ggcagatcgtagccagccagctggagcgatgcaagctcggatccgagactggcagcatgagcagcatgagagttctatatgaagggaaagaacggcttatt

SEQ ID NO: 20305 - DNA, 74 bp, Homo sapiens
gaagactcgatccgcctgcctgcgcacctgctgggaaagaagcctaaggaataaagtcatctctctagaccata

SEQ ID NO: 20306 - DNA, 82 bp, Homo sapiens
aaagtgttagaaacagtagtggagaatcaagcttgcattgaaaggctctagttacagtggacttcttgaacgacatcatatt

SEQ ID NO: 20307 - DNA, 100 bp, Homo sapiens
gctgccttaggcttataacatcacatttaaaagcatctcaggggactgtgaccctcctgggaatccagttcatggctattttgaaggaaataacttcacc

SEQ ID NO: 20308 - DNA, 100 bp, Homo sapiens
aacatccttcagctggtgaaagcggccagtgatatccaggaaggcgatcttattgaagtggtcttgtcaggtaggagcaacggtgggaatgccctctgag

SEQ ID NO: 20309 - DNA, 85 bp, Homo sapiens
cttcactcacgccatgcagctgctgacggcagcaggggaaatgctgtctgtagctgagcacttcctggagcagcagatgcaccca

SEQ ID NO: 20310 - DNA, 83 bp, Homo sapiens
tcatcctggtcactagcggactcttcttcgccttcgaggggatatgagactttctactcggaatatcctgagtgttgcgtgga

SEQ ID NO: 20311 - DNA, 100 bp, Homo sapiens
agaaagaccatcaagtttaccagcaagagggcacattgggagattcagcttgcaagagtcctgaatctgatctagaagacttctccgatgaaacaaatac

SEQ ID NO: 20312 - DNA, 100 bp, Homo sapiens
ggaacgaatctctcaggctgcatcaggatgaatgatgacccaagtatggaagcactactgcagtcttcagttaagcaacaagtagaagctattgaaaaac

SEQ ID NO: 20313 - DNA, 129 bp, Homo sapiens
ctcgcgcaccacgcgccccgcgcggcccgcccggatcgtggcctctcgagagcaagatgagcgtgaagccgtgcagaagaagaccttcaccaagtgggtcaattcccaccttgcccgtgtgtcctgccg

SEQ ID NO: 20314 - DNA, 74 bp, Homo sapiens
tggatggaagccatggatggccgggaacctgaacaagttccagttccagtctaccacccaacacctagccagac

SEQ ID NO: 20315 - DNA, 50 bp, Homo sapiens
accaaaattgtggaaaagtcactctggatccaaggagctggttctgctgg

SEQ ID NO: 20316 - DNA, 75 bp, Homo sapiens
cttcatcaaaaatagtgatagctttgataagtccagagggggcaaacctctttatttaccaccttccacaggaat

SEQ ID NO: 20317 - DNA, 50 bp, Homo sapiens
ttacacccctggtccaaaagaaacggggacaagggcctgtccgacacgcc

SEQ ID NO: 20318 - DNA, 90 bp, Homo sapiens
gacaaggtgtcaacaatgtgccgctactctgggcagttgaaaagtagaaagtcatacatgatacctgaaaatgagtttcatcacaaagac

SEQ ID NO: 20319 - DNA, 101 bp, Homo sapiens
tctatgtgaccggcgggcccggagcagccgccgccgcagcgcgaacatggacgccgtcaacgccttcaaccaggaggaagtgtttggattgtgagctattt

SEQ ID NO: 20320 - DNA, 98 bp, Homo sapiens
atgaacaacttttgcagacagagaatctttctgcacaagtaaaagcaactgtcttacaacagttagccaaaggcacgtccctgacagctgaaaatagc

SEQ ID NO: 20321 - DNA, 82 bp, Homo sapiens
tggggtcggcgccgagtgggaggatggcggaaggaaagcaggcaggatgggagagtcgccgatagaaccacctcttccctgc

SEQ ID NO: 20322 - DNA, 144 bp, Homo sapiens
ccgccaaccgcaaccattgacgccatgtcgggttattcgagtgaccgagaccgcggccgggaccgaggcatttaaatcaaacggtattgagatggattgggttatgaaacataatggtccaaatgacgctagtgatgggacagt

SEQ ID NO: 20323 - DNA, 100 bp, Homo sapiens
gtctctggcccgcaatcaccccttcctcactcagttgttctgctgctttcagaccccctgtttctgaaagatctatccagcactccgatggccagcaaca

SEQ ID NO: 20324 - DNA, 90 bp, Homo sapiens
agagccttcaccaccacccaacaggtcctggacctgctgttcaaaaggtgactgtccatgttcacggccaggaagtcctgtcagaggaga

SEQ ID NO: 20325 - DNA, 82 bp, Homo sapiens
gaaatgcttctttgtgaaattttttggaacagaagatcagagctcgaggccatgagcagatataccagcccagtgaacccag

SEQ ID NO: 20326 - DNA, 98 bp, Homo sapiens
tgagggcagctgttcccactggctctgctgaccttgtgccttggacgtagacaagtttggcaacgagatcacccagctggcccggcccctgcctgtgg

SEQ ID NO: 20327 - DNA, 100 bp, Homo sapiens
cagaactatcttcaacttttcagacactgccctaaccatcatggaggtggccgaggtggaaagtcctctgaaccccagctgtaagataatgaccttcaga

SEQ ID NO: 20328 - DNA, 83 bp, Homo sapiens
gcggaggcttcgagtgacccgggtgccgaggagcgggaagagttgctggggatctgatgacgcaaaatggaataagctacgtc

SEQ ID NO: 20329 - DNA, 98 bp, Homo sapiens
aacattcatgcacaaatttttatgtggagactcctcagacccctgcacaattgagagaaaagcccgaagaattagcgtgacctccaaagtacaggcag

SEQ ID NO: 20330 - DNA, 100 bp, Homo sapiens
cagcctcatgttttcaccagtcacatctcttactactgctagtcgctgcaacactcctctacagtttgaggttcattgtctgagatcagttgataactta

SEQ ID NO: 20331 - DNA, 75 bp, Homo sapiens
agcggcacagaggtgcttctgccaggagtcgatagcagcagttggtgacgagatggcactcagaaacggcgttga

SEQ ID NO: 20332 - DNA, 96 bp, Homo sapiens
ttttgccatggtggattttgatgaaggctctgatgtatttcagatgataaaatcagtggttctggaagtaactctgatatgatggaaaacagcaag

SEQ ID NO: 20333 - DNA, 102 bp, Homo sapiens
gcagagtccaagaagcaataatccactttcgggaggccatacggctcgcaccttgtcgcttagattgttatgaagtcccagttgatccaagcctcattatag

SEQ ID NO: 20334 - DNA, 51 bp, Homo sapiens
gctgctgggcaggtcatgagtcaccatgaattatatccagatcgagagaca

SEQ ID NO: 20335 - DNA, 98 bp, Homo sapiens
tgttttgaagcgttcgatcttttaacatcacatcacatgctgacagcacaagaaggaattacatgaatgacagtcttcgaaccaatgtgtttgttcga

SEQ ID NO: 20336 - DNA, 75 bp, Homo sapiens
aggcactgggctacgtgctggacagatttgaacatggaattcaatccttcagatcatcctcgggccagcacaata

SEQ ID NO: 20337 - DNA, 100 bp, Homo sapiens
tgcagcttcaagcttaggaccacccaccatgcctatccagactggcacagcctccaggttggcgggctcatctgcgctggggttctgtgcgccatgggca

SEQ ID NO: 20338 - DNA, 75 bp, Homo sapiens
tatctggtgaagtggaaaggatggcccccaaaaagatggctgtgccacccacgtatgccgatcttggcaaatctg

SEQ ID NO: 20339 - DNA, 75 bp, Homo sapiens
gttgataccattaagtgcctaattcaaatgggagcagcggtggaagcgaagcctccagggtgcagaatagttaaa

SEQ ID NO: 20340 - DNA, 75 bp, Homo sapiens
gggcacgcgcgcaggagctcatgtggcctgcggctcctgtcgcctgtaatcactttgggaagcagtgacatccaa

SEQ ID NO: 20341 - DNA, 100 bp, Homo sapiens
gaatcagcccattgcaggaatgggataccaagtctcccaacaacagagacaggacccagatgatgtggtaccagttggccaaagaagagcctggtgttgg

SEQ ID NO: 20342 - DNA, 100 bp, Homo sapiens
ggaaagccaaagagctgaatgttatgtttattgaaactagtgcaaaagctggatacaatgtaaagcaggtgctcatgtgactatcacggatcgaaaagta

SEQ ID NO: 20343 - DNA, 100 bp, Homo sapiens
tgagggacgatatgaatatgaaagaattccgagagaacgagcacctcctcgaagtcatcccagtgcttctaaccctcctttatgtgactcagagaaagga

SEQ ID NO: 20344 - DNA, 100 bp, Homo sapiens
ccacatcgggaataacacaccggagacttttggggggaaactaggtcgatggtcggcggcgcccggatgggcagctgagatcaatgaactgagccatgtt

SEQ ID NO: 20345 - DNA, 101 bp, Homo sapiens
ttggggctgtgggacttcgaaggagggctctcctgtctgccaccatcctgggttgacaattctacacaaggaggcccaggctgcaagcacaaaggaagttt

SEQ ID NO: 20346 - DNA, 100 bp, Homo sapiens
ttgtgttgtgccaatggtggagaagaaaacttcggatctcccttgagtttagaaatctggctgagaaataccaaacagtgattgccgacatttgccggag

SEQ ID NO: 20347 - DNA, 75 bp, Homo sapiens
ccgccgcctctagggatggacggtcagtgctgacagttgcttgtgaacaaactgaagttctgctttttgacccta

SEQ ID NO: 20348 - DNA, 73 bp, Homo sapiens
ggtggccccagcgccctcagccgacggagaacgttctcaggttgaccagctgctgaatatttctttaagggag

SEQ ID NO: 20349 - DNA, 75 bp, Homo sapiens
cagagcccggggacggcgaggccctcatgtaccacacgagccttgcaaaggaccatcgcatgaaacttatgcaac

SEQ ID NO: 20350 - DNA, 83 bp, Homo sapiens
tgaaacttaagcctgattttcctgatgcttattgtaacttggctcattgcctgcagtatgatgggggatgatgaagatgcctg

SEQ ID NO: 20351 - DNA, 95 bp, Homo sapiens
atggaaaaattaacgtgcatgactttaagaagaatgaggtagagagctgtgcagtgattagacaggaaccccgaaaccaaagactcttaaaagct

SEQ ID NO: 20352 - DNA, 100 bp, Homo sapiens
ctacgtcctgagcttcctgcggacgtccaagctgctgcttccggatgactttaaggagcctgattccccacgtgtcacattggtccgtgacgtttcccca

SEQ ID NO: 20353 - DNA, 82 bp, Homo sapiens
ttatgacttttggacagtccaagctatatcgaaggtggatagatacttctcaagacatcacacagcgtgagtcaatcaagga

SEQ ID NO: 20354 - DNA, 83 bp, Homo sapiens
ctttatgaaccagtgtatcccaactgcacatcattgactcctgggcccaactgtgaccgatttaaactgcacataccatatgc

SEQ ID NO: 20355 - DNA, 75 bp, Homo sapiens
gcggcctgctggccgagcgcctgcgcatcagcccggacaggcagttgcagtggtgcagaatggctgacctcagtc

SEQ ID NO: 20356 - DNA, 75 bp, Homo sapiens
ctttaacaatgcttcagagtcagaacagtccactttggaaagtgaagaatggaatccttgggaaggagatgaaaa

SEQ ID NO: 20357 - DNA, 83 bp, Homo sapiens
caggcagacgggctacatgctgagatgttccctgtctcacgccatcactctgctcggcttgcccttcccctgcttgtgccgtg

SEQ ID NO: 20358 - DNA, 82 bp, Homo sapiens
cccaaaaccggcaaaaaaagcaaacagcaagctttcatcaactggtcaaaatgtctttggaagtttcctaaagtctgaattc

SEQ ID NO: 20359 - DNA, 87 bp, Homo sapiens
ccacaggaaactacatcattattatggatgctgatctctcacaccatatcttcgcaaatactgtggacaatgcccgcatcgttctgc

SEQ ID NO: 20360 - DNA, 97 bp, Homo sapiens
gacgctgggctgagcggccggcggcgcgggcccggcggcggcggcagcggggtccgggtccggagcgccacagtgtgtgatcctgtaaaattaaatc

SEQ ID NO: 20361 - DNA, 100 bp, Homo sapiens
agcggccccgggacgggcagctagcgcgaccctgagccggcgcccgtggtccggccatggacgacctcggcaatgccaccgtagataagttggaggactt

SEQ ID NO: 20362 - DNA, 82 bp, Homo sapiens
ctggagcctcagttggaagcagccgatccagcctgcggagcctgtggggcaggatgctccaggatgaaacgccataggcctg

SEQ ID NO: 20363 - DNA, 75 bp, Homo sapiens
gcaaacttgacactcaccctgaccggattaaactgcaaatatctcatgaagctgctgcctgtatcactggtctcc

SEQ ID NO: 20364 - DNA, 75 bp, Homo sapiens
gtggggttggtgtgattagcttcgcagtctggaaagctttaggagttcacagtaaccaaggtgggaagctggcag

SEQ ID NO: 20365 - DNA, 50 bp, Homo sapiens
tgcagagcgcgcagtacctccgcatcagaggctccttgaaatgctagata

SEQ ID NO: 20366 - DNA, 100 bp, Homo sapiens
aaacagttgaattacaaggaaagaagatcaagctacagatatggagcctcacagtctactcagagaaaaataaaagaaggcaaaatgagtcctccccatt

SEQ ID NO: 20367 - DNA, 101 bp, Homo sapiens
aaaaaccgaaacaaaaaaagaatcgctgtttcatgtgcaggaagaaagtgggacttactggtgctggagaatctggtaaaagcaccattgtgaagcagatg

SEQ ID NO: 20368 - DNA, 75 bp, Homo sapiens
tgcgagcccgtgtggacttccacaacaacctcgtgggtgtgaaggctgaagctcagggccctgtctgctctgtgg

SEQ ID NO: 20369 - DNA, 78 bp, Homo sapiens
aagtcacagggctactgttttccaatcctcagctgatgaaaccaaggccctgaaaggttcaccaagttgccagggtcg

SEQ ID NO: 20370 - DNA, 78 bp, Homo sapiens
ggagcgcctcgtcgacatgagtgatgtggaggaaaacaacttcgagggcagagaacttaaaaggagtctagaaaatcc

SEQ ID NO: 20371 - DNA, 75 bp, Homo sapiens
ctcttctcgccctggcggggaaggttggacgtgataagtatgagcctgcagctgtttcagaacaaggtgataaaa

SEQ ID NO: 20372 - DNA, 82 bp, Homo sapiens
cttgaaaagactgggcttgtccttgctggtgcatgcgtcgtcggcctctgggcagcaggatatttcatgtctgaatcgggac

SEQ ID NO: 20373 - DNA, 90 bp, Homo sapiens
caccttatcacccacacccacacgtgttcaatacacctcccacctgtcctcaggcatatcaaaggtgataaaagaagccatggttgaaag

SEQ ID NO: 20374 - DNA, 100 bp, Homo sapiens
tggaaaccagcccaagctacaaaagtggtgacaccaagctggatggtttccttttaggcaagaaggaggtcatcagcaggctcccaacaataatgccgaa

SEQ ID NO: 20375 - DNA, 100 bp, Homo sapiens
aagaccgcccaagtctgcccttgtttgaggccttcacagcatgtggttttgtgcagaaactctataaaacaggtcgggagatgcaggagaggatcatgga

SEQ ID NO: 20376 - DNA, 101 bp, Homo sapiens
gccggttcgcgtctctctgctgcggcgcggggaccgctgtgctctcggtgaaattgctcaaataatggagcaaggtgacctctcagtgagagatgctgccg

SEQ ID NO: 20377 - DNA, 75 bp, Homo sapiens
ataatcaacagtaaggatgtcaaagttcaggcagaggaagcggctgctgagattactaggaagctggagaaacag

SEQ ID NO: 20378 - DNA, 74 bp, Homo sapiens
ctcagctgatcttcccttccagactacgagagacaagaggagcagcagcggcaccgcccctcaccctggagggt

SEQ ID NO: 20379 - DNA, 100 bp, Homo sapiens
attcgagcgaaatatcccgacagggttccggtcagcccaaggccaaccccactgtcactctgttcccgccctcctctgaggagctccaagccaacaaggc

SEQ ID NO: 20380 - DNA, 100 bp, Homo sapiens
agcaaaggtggaacagaagtacctcagacaatggtttattaagacaaccgcttatgcaaaggtttgtggtaaatatgccagctctagaacacatgaatca

SEQ ID NO: 20381 - DNA, 75 bp, Homo sapiens
gagcctagcacctcttatactgatttaacagccaggtccttgcctgctgtgcagtctgatgaaagacttcagcct

SEQ ID NO: 20382 - DNA, 51 bp, Homo sapiens
agcgagcccgaggacatggagatggaagacatgggagtcccaccgtattgt

SEQ ID NO: 20383 - DNA, 90 bp, Homo sapiens
tcgcccacgcccagcgccgcctcctcctcggccagcaacagcgagttggtgacaaagttcctgctgatataaggttaacttccatcaaat

SEQ ID NO: 20384 - DNA, 90 bp, Homo sapiens
gcgccgcagtctgctctccccgcccgcggcccgtgcagctacgagttccagggagctctgtcctggtgaccgtgcccgggttatgacgac

SEQ ID NO: 20385 - DNA, 100 bp, Homo sapiens
atggaatcctaccaggaggtgacgtcatccgtccttggctcaggatttggagagcttgcaccaccaaaaatggcaaacatcaccagctcccagattttgg

SEQ ID NO: 20386 - DNA, 94 bp, Homo sapiens
gcgcgcagggcctgcagcgggagctggacggcgagcgcgagcggcgcgagaaagtatcatgatattagctggtttgacatcaagtcatttgtga

SEQ ID NO: 20387 - DNA, 90 bp, Homo sapiens
ctgaggtggacgtgtacaacccgacgaggaacgaatgggacaagatcccgtccatgaatcagcaagatggaaagttgccttttgttcctc

SEQ ID NO: 20388 - DNA, 83 bp, Homo sapiens
ccccaaaagccgtcaaaggatttgaaactgctccacttaccaagaattattatactgtggttgctatcaagatcatagataag

SEQ ID NO: 20389 - DNA, 100 bp, Homo sapiens
cacccatcctggtagacggcaaggatgtgatgccagaggtcaacaaggttctggacaagatgaagtctttctgccagcttcttggacacttaatgattgt

SEQ ID NO: 20390 - DNA, 100 bp, Homo sapiens
ctgaagagggacgggtcccgcggcgagcgagctcctgaggtacggcgtcggggccctccctatcctgaagacattagctgagagtctggcaccttttaaa

SEQ ID NO: 20391 - DNA, 75 bp, Homo sapiens
tagtgattggggaattccagtttaaagctcataggaatgtgctggcctcctttactggtgccgacaagaaagccg

SEQ ID NO: 20392 - DNA, 75 bp, Homo sapiens
gctgtgaatcttgagccttctccattgcagccatccctggccggatgagtctgaatgtacttcagatgaggaaat

SEQ ID NO: 20393 - DNA, 108 bp, Homo sapiens
aatgtgttcctgcgacaggctgaaatcgagaaccccctggaggatcctgtgactaagcagctgaagatactcacggacattatgtggccaattatcgcaaagctggcc

SEQ ID NO: 20394 - DNA, 83 bp, Homo sapiens
caagaatcagacccaattttaaagacaatgcagatcttcgtgaagactctgactggtaagaccatcaccctcgaggttgagcc

SEQ ID NO: 20395 - DNA, 50 bp, Homo sapiens
caggactgcgccgcgtcttcctcaagacccgtgcctgtatattccacgct

SEQ ID NO: 20396 - DNA, 100 bp, Homo sapiens
aggtcacaaaggatctgcttgatatgattggtggggtggaagacaacccgtgagtattacaccttcatgtgggttactttgcccattgacctaaacaaca

SEQ ID NO: 20397 - DNA, 100 bp, Homo sapiens
tttgatgtgaatgccattgtcgcccatgttctcttacggtatccaactgttgaaaaacgagccagagtcttcaatggagcaagttatgtgcctgttcctg

SEQ ID NO: 20398 - DNA, 100 bp, Homo sapiens
ggccggctccgttatggcgacccgcagccctggcgtcgtgcccagggccttgctgccgccatgactgaggaatcagaggagacagtcctgtacattgagc

SEQ ID NO: 20399 - DNA, 98 bp, Homo sapiens
gcgttggttcccctctttgacctggtaagaagagttcctgggtcaagtggtcaccttcataaaaccgaagacggggactgggagtggagtgacgacga

SEQ ID NO: 20400 - DNA, 82 bp, Homo sapiens
gggcgcccagagccgcgccgtccgcgccgcccgttctgcttcggaaccaaaaagaagcttcccagagccggggccaggagcc

SEQ ID NO: 20401 - DNA, 75 bp, Homo sapiens
tcgctcggctgcgggaaatcgggctgaagcgactgagtccgcgatggaggccactcttcacctccaccatgagcc

SEQ ID NO: 20402 - DNA, 100 bp, Homo sapiens
tgtggatagccaggaagacctgaccttcctctgggatatgtttggtgaaaaaagcctgcattcattggtaaagggaccagttactctccacaagaaaatt

SEQ ID NO: 20403 - DNA, 75 bp, Homo sapiens
atagaattttctacagaagtcaaggcagtcaagctgcggcgagataggggtcggcgctttgcctgatgaccctac

SEQ ID NO: 20404 - DNA, 50 bp, Homo sapiens
gagggatccttcacccgtgtctggtgccgtgagcgatgtggagatgcagg

SEQ ID NO: 20405 - DNA, 100 bp, Homo sapiens
acagtggctgtttatatagttgttcagatgataaacatattgtggaatggaacgtacagacatgcaaagtaaagtgataattttccccagatggcccatc

SEQ ID NO: 20406 - DNA, 95 bp, Homo sapiens
catttgctacagcatcccacattaagtcaacgcttggagatttccttgattaagaagaatgaaggactgacctggccagagctagtaattggaga

SEQ ID NO: 20407 - DNA, 95 bp, Homo sapiens
aaggaactgaaggagatcagggccttggacaaggccttcagaccagaattgagagaggaattttctagggtggaatagtgagttgttacaaagcc

SEQ ID NO: 20408 - DNA, 100 bp, Homo sapiens
acagtcctcgtcagcactgactttcagctatggaatcgctgttcgggggtcttgtctggattttggttgcctcctccaatgttcctctacctctactaca

SEQ ID NO: 20409 - DNA, 80 bp, Homo sapiens
ggaaagaatcccggccagacgtgcgaacagctccagctgggagaactcctggaagccccgtcttcctcctcatgcccatt

SEQ ID NO: 20410 - DNA, 50 bp, Homo sapiens
tgctgatcctccagctgctgaccctctgggggacacagcgattgccacgc

SEQ ID NO: 20411 - DNA, 83 bp, Homo sapiens
gagagcttgtgaaactgagggaatagctacaccaaaattgcattgagccaaacttgccaccaagagcccaacaatcaccatga

SEQ ID NO: 20412 - DNA, 90 bp, Homo sapiens
gttatccagaaagctcttgagtttattccttcagaccagcaggtaattgatattgattgggtacagacagagaagcatgtgtttgagcag

SEQ ID NO: 20413 - DNA, 90 bp, Homo sapiens
ctctgggtttgcgctagcagcgtaagtccatctcaggttttgcgcacagctgcttccagtatgccatccagaagaaatggccgctgtaca

SEQ ID NO: 20414 - DNA, 75 bp, Homo sapiens
cggggactactggtgcctgcgctgaaaaagtgcccactgttgatgtctttcagatttccacaaaagagcgatttg

SEQ ID NO: 20415 - DNA, 75 bp, Homo sapiens
caactggaattccacttacggatgcatcaatctcaaataattctacaagtaaaaggaaatctgagtctgccactt

SEQ ID NO: 20416 - DNA, 75 bp, Homo sapiens
ctgcccgccttggcctcccgaagtgctgggattacagctcctagagtggcctcagctaggtaaccaacgggagtc

SEQ ID NO: 20417 - DNA, 51 bp, Homo sapiens
ctccactccccagctgtgaaagggtgcttgtgaatgacttcttcttggtgg

SEQ ID NO: 20418 - DNA, 90 bp, Homo sapiens
gcaagagattaaagatgcagtacgccacggggccgctgctcaagttccagatttgaaatgtagacaaccaatttcctgggcaagctgctc

SEQ ID NO: 20419 - DNA, 83 bp, Homo sapiens
gcggccgcggggcccgagcgcagaaaaggagaacaacttcccgccactgcccaagttcatccctgtgaagccctgcttctacc

SEQ ID NO: 20420 - DNA, 75 bp, Homo sapiens
gagaagtggatttgggagacatttaggaggtattgctattaaggagtcagcaaaagtgggtgatcaagctcaaag

SEQ ID NO: 20421 - DNA, 73 bp, Homo sapiens
gggtgtgtggacgccgctttgttgcctgagacagttaatcaactggcccatgcccttcacatggacaaagatt

SEQ ID NO: 20422 - DNA, 90 bp, Homo sapiens
ctctaagccgccgcgcagcctgcgttttctccggtacaggttgaggctactaaggtatgaaaatgaaagtcttcagaatggaaggaagtc

SEQ ID NO: 20423 - DNA, 100 bp, Homo sapiens
gatggcacggtgggcctgctcacatacccagtactccaggcagccgacattctgttgtacaagtggtactgtgaaggcaaggagcttgaaaattccccag

SEQ ID NO: 20424 - DNA, 99 bp, Homo sapiens
aaaaaagaaattagtgaaggagatgaagtagaggtgttcaggcgcttcgtggaggttggccgggtggcctatgtctcctttggacctcatgccggaaaa

SEQ ID NO: 20425 - DNA, 100 bp, Homo sapiens
ccgccagtcaataggaagtacgagtacctggaatggccaaatatcaaggtgaagttcaaagtttgaaactggatgatgattcagttatagaaggagtaag

SEQ ID NO: 20426 - DNA, 98 bp, Homo sapiens
caaggcgttcaagcgaaaacatgaccgctgagcccatgaggccagaaatgtacacacaggagagctggctgcagtaaaaatcattaaattggagcctg

SEQ ID NO: 20427 - DNA, 98 bp, Homo sapiens
agggctgcagcgcccaccctgcgccagagaccagataaatatccatatattcctgcacatattacaaagcctaaggaacataagaagttgtttctggt

SEQ ID NO: 20428 - DNA, 100 bp, Homo sapiens
gccaagatgccgcagtccaagtcccggaagatcgcgatcctgggctaccggtctgtgggctactgcagcactggggtgtcagttgttggtccgacccaga

SEQ ID NO: 20429 - DNA, 100 bp, Homo sapiens
tagcagaatttagcatctattgggatgtcgattgcactttactgggggatttgcctcagatggagttacagattaaggtcaccgttgcaggcctggctgg

SEQ ID NO: 20430 - DNA, 75 bp, Homo sapiens
taacactgcatgaaatgttagaggtatcgagaaccttccctgcgaacttcagaggaacttccagctgatgcgaga

SEQ ID NO: 20431 - DNA, 99 bp, Homo sapiens
tctggacagactgcactgggacctctatattgggacgccgctggacttcttgactatagtaatttcatctgtgccaaagcctccagaggacaagccaga

SEQ ID NO: 20432 - DNA, 75 bp, Homo sapiens
ccgcaggaaggactggggccacgtggagctgctggagggagtcgttcacgcctactgaggagcatgtgttggtgg

SEQ ID NO: 20433 - DNA, 100 bp, Homo sapiens
ggacggagaggacctgttcaccagcactgtctccaccctagagaaggcagacggtaacaagtactccttgctggattgaacttcatctgaatggacctct

SEQ ID NO: 20434 - DNA, 87 bp, Homo sapiens
catgtccggcttctccaacacggaggaggagcagacgctcaaccagcttctggtagaaatggatggcctccggtgtggctgtctctg

SEQ ID NO: 20435 - DNA, 108 bp, Homo sapiens
gaggagtgtgttgctgaagaggaattgcctcacctgctcaccgaaagggtattccatgcaacaacagaacttttaagtgtggcaatgatatttgctttaggaaacaaa

SEQ ID NO: 20436 - DNA, 100 bp, Homo sapiens
gatatctccgccctctcgtgtgttccttgtggagctaaccagaggcaagatgcccgagatgtaacctcgggtatggtgaaagacccaccggacgtcttgg

SEQ ID NO: 20437 - DNA, 101 bp, Homo sapiens
tccttggccgactacctgacctctgcaaaattccttctctaccttggtcattctctctctacttgggtaaaatttatgaagaccattcctggtacagcact

SEQ ID NO: 20438 - DNA, 100 bp, Homo sapiens
cagtcgcattgtctctttttcttggatggttgggagcagatcgattttaccttggataccctgctttgggttctgcacttttaaaagaaaagcaaaggca

SEQ ID NO: 20439 - DNA, 100 bp, Homo sapiens
tcatctccagctgcctcagttttcttatcactaaaacagcagtggcgttcaagatgtacttgggcatcactccaagcattactaattggagcccagctgg

SEQ ID NO: 20440 - DNA, 95 bp, Homo sapiens
accactgtggagttggaagggcaggatgaaaaccaagaaggagattttgaagatgcagatacccagcctcttagcaatgcataccacgagttagc

SEQ ID NO: 20441 - DNA, 97 bp, Homo sapiens
gaaagcttacaaaaaagccaaggagcgggagaaatcatctttggacaaaagaaagcaagaccccgagtggaaggcagactcagtgggatcctcctac

SEQ ID NO: 20442 - DNA, 48 bp, Homo sapiens
gagtgaagctgcataccttcgcggaaagaccacagcaagattctttca

SEQ ID NO: 20443 - DNA, 74 bp, Homo sapiens
aggagactcagaatcgaatctcttctccctccccttcttggagtgagctgagtcgacagaaacttcatacccaa

SEQ ID NO: 20444 - DNA, 75 bp, Homo sapiens
aacaaaagaagaagtatttggggagaatgactgaggagccattgatgtgtactggattatggacagaacttggaa

SEQ ID NO: 20445 - DNA, 106 bp, Homo sapiens
caaggtcggcagagcaaggggcttacgcagaaggacctggccacgtgctggcctacatgcagttgctggaggactactcggagccgcagccctctatgttctacca

SEQ ID NO: 20446 - DNA, 75 bp, Homo sapiens
tgggagcacatccatttcattggcaagatatgcatgactcttggccagtgattctcaacctcggctgcacattgg

SEQ ID NO: 20447 - DNA, 75 bp, Homo sapiens
catcagtggagtccatgctacctgattgcccccgggtctcagcaggatcaaatctaaatcgctgtggtttccgag

SEQ ID NO: 20448 - DNA, 75 bp, Homo sapiens
ctccgggatgctgtactccttgtctttgcaaacaaacagctgccactggtgacatgccaacttaccagatccgag

SEQ ID NO: 20449 - DNA, 75 bp, Homo sapiens
catggacgttacgccccgggagtctctcagtatcttggtagtggctgggtccggcatcctgattttcaactgcta

SEQ ID NO: 20450 - DNA, 100 bp, Homo sapiens
gggaggctccgttgcctgctcccggagggagacgcgctgccgaggagaacccagcgggtgtgatctccattcctttgtacatccctcacacgctgttcga

SEQ ID NO: 20451 - DNA, 98 bp, Homo sapiens
acacagtgttaacaatgcatccacagaggttcatcctaagttccactataaacaggctcatgactcgggcacagacacttcttgcgtgactttttcct

SEQ ID NO: 20452 - DNA, 100 bp, Homo sapiens
cggccctcattctgcacgacgatgaggtgacagtcacgatggtaaaagatgactatgaggacgattcccatgttttccggaaacccgccaatgacatcac

SEQ ID NO: 20453 - DNA, 98 bp, Homo sapiens
acctacccactacaatacctcttgggactgggctcgatttgagatgacagatttgaagatctggaagaggcaaatccattctcttttagagagtttct

SEQ ID NO: 20454 - DNA, 100 bp, Homo sapiens
cgtgtggccaacgagctcaacgccaggcgccgctcctttacagccctggcccgccaccgctacatgaagcaggcccaggccctaggtcctcagatgatgg

SEQ ID NO: 20455 - DNA, 82 bp, Homo sapiens
ccgcccaccagttcgcccgtccccctgccccgttcacaatgctaccggctctctgaccagttccacgacatcctcattcgaa

SEQ ID NO: 20456 - DNA, 101 bp, Homo sapiens
gtggcccaagggtctcccttctcggtgaacgttcagctgctgcaggaccacggggaaattgccaagaatggcaggatggtggctggcaaagtgttgatggc

SEQ ID NO: 20457 - DNA, 75 bp, Homo sapiens
caaggacagcgcctggatcttcctgggcgatcgccagctcgagtgcagattccttgctgtgaccgaggttcagag

SEQ ID NO: 20458 - DNA, 82 bp, Homo sapiens
aggagcagttgctggtgctgctgaagtccctagggaaccaccaattcttcccagaaatggactcggcactactgcgccattg

SEQ ID NO: 20459 - DNA, 89 bp, Homo sapiens
tgccccgcgctgacaggggggcctggccgcgcagccgatgtgaagttcatttccaatccgccctccatggtggcagcggggagcgtggt

SEQ ID NO: 20460 - DNA, 90 bp, Homo sapiens
cgaagatggggagaaggaagcgagactcatacgcaacctcaatgggaagcccgtcagcctgagctacagatgcccatgccgattcttcga

SEQ ID NO: 20461 - DNA, 73 bp, Homo sapiens
ggggagctcggctccaagttctgggtggcatggaatattcacatgggagagccgcatgaggccgcccaccacg

SEQ ID NO: 20462 - DNA, 101 bp, Homo sapiens
aaacacgggcaatatattatgcatggccctgtgtactgtgttgcatctgacagagagacttttccttgaccacccgcatagactcactggcaacaaagttc

SEQ ID NO: 20463 - DNA, 100 bp, Homo sapiens
cttggacagagacccaacagcttatgcattagctgaacatctttcagagttgtatccgtgtggtgtcagcacagcggcaggtcaccgttcaggaaggacc

SEQ ID NO: 20464 - DNA, 97 bp, Homo sapiens
atgccaagaagcgaaatgtgctcattggccattcctacggttggactaaatgctcttccttcagaggattatccggggcatctactcaatgaaaaac

SEQ ID NO: 20465 - DNA, 50 bp, Homo sapiens
ataaagaagaagtcaccgtttctacctgtactggagaaaatgaaactggg

SEQ ID NO: 20466 - DNA, 90 bp, Homo sapiens
cagctcgagaaggagctgcagggccaggcctcctcgctggggaggcagagtcctcgcgtggtctcctgcctcgagcacagcctgtgccca

SEQ ID NO: 20467 - DNA, 82 bp, Homo sapiens
cctcccagtgacgggtctggagtgcgtgggggaccggctgttggcggctggtgccgacaagaaagccgaggctggggctggg

SEQ ID NO: 20468 - DNA, 95 bp, Homo sapiens
tctgtaatagatggtgtgactgttctaggaggtcaattccatggtttcacaagaagtactgtggctgtatacagtacctgtatgctggttgttct

SEQ ID NO: 20469 - DNA, 83 bp, Homo sapiens
tcatgctggcacacgatggacacaactgcctgggagcgagcccagggcgtggtgctgaaagtgctcacaaacttcaagagcag

SEQ ID NO: 20470 - DNA, 75 bp, Homo sapiens
gtgcctcccagcaccacagtccttctgcagtccctcgtccagccacccccaggactccctggaggaaaagcggaa

SEQ ID NO: 20471 - DNA, 100 bp, Homo sapiens
ccaacttcgacgtggatgacgacgtgctgagaaacacgcccctggatgaaacactgaagaaagcccttacaggtcaccttgaggaggttgttttagctct

SEQ ID NO: 20472 - DNA, 100 bp, Homo sapiens
ataggcgtgagccaccgtgcctggctgaagaaagcataacccctactgtagaactaaatgcactgtgcatgaaacttggaaaaaaaccaatgtataagcc

SEQ ID NO: 20473 - DNA, 99 bp, Homo sapiens
ggctgtgatattgccacagaactcagccgcacagcagaacagagttattgatttaggagtcatgactccatgtgataagatactgaaagctgctcttga

SEQ ID NO: 20474 - DNA, 50 bp, Homo sapiens
tgcccgcacgccccgaccttccatcactcggtgaaatacctggagtgctc

SEQ ID NO: 20475 - DNA, 74 bp, Homo sapiens
aagagccggcggctgcccgggcacatggcccatgaacatggacatgagcatggacatcataaaatggaacttcc

SEQ ID NO: 20476 - DNA, 75 bp, Homo sapiens
tgaggctccagtcaaaaaccattaaggtcgcacggggcaggcggttgcagttcgagccaaggcctttggattcag

SEQ ID NO: 20477 - DNA, 82 bp, Homo sapiens
gttgggactaacagctggagagaacagttcattgaagctatcactgtcagtgctgtctattgcgtctgcagacatggatttc

SEQ ID NO: 20478 - DNA, 82 bp, Homo sapiens
tcagttcgtgtgtggagacaggggcttttatttcagacacattcagctaacgtattttagcaggtggagtgaggttgaagat

SEQ ID NO: 20479 - DNA, 78 bp, Homo sapiens
ccagcagagacaccagtggctactagcccaacagcaactgacaggcagagattgtcaagaggctgaatgctatctgtg

SEQ ID NO: 20480 - DNA, 100 bp, Homo sapiens
gtgccgtttaacctttattgtggtggagtccaccccgctgtgagtctgtagaagaggcgacaccagggcttccaaatgaacaaccgaaaggaagatatgg

SEQ ID NO: 20481 - DNA, 75 bp, Homo sapiens
cttgaaagagaagctcttcctgtgaggaattacatgaacgacagccttcgcaccgacgtcttcgtgcggttccag

SEQ ID NO: 20482 - DNA, 75 bp, Homo sapiens
tcgctactaccccgcagttcccggacatgatcctctccgcctctcgaggacagaagtggcggttgctgacgcctg

SEQ ID NO: 20483 - DNA, 82 bp, Homo sapiens
cagagcaaggggcttacgcagaaggacctggccacggaatactcccccagttgcaagaggcgcaggaccgtggaagacttca

SEQ ID NO: 20484 - DNA, 100 bp, Homo sapiens
gattgagcaggcagccgagatgctttatggattgatccacgcccgctacatccttaccaaccgtggcatcgcccagatgcgtgtgaaggcaaagaagaat

SEQ ID NO: 20485 - DNA, 82 bp, Homo sapiens
gcttgggatcctttatcctggtcatcttctatttccaaaatgatcaagcggtgctgattcacgagagtggaagcctccagag

SEQ ID NO: 20486 - DNA, 100 bp, Homo sapiens
ggtttcggaaatgcccttacagcagcagaactggaagaagttcgggaactcagagtttgacccccccggacccaatgtggccaccaccactgtcagtgac

SEQ ID NO: 20487 - DNA, 83 bp, Homo sapiens
gctggctacagcttcagaagaccgaagcgttcgtatctggaagatgtgcactcccagcaacacccctgccacgccgcccaact

SEQ ID NO: 20488 - DNA, 83 bp, Homo sapiens
catggcgacgcggggccatgtgcaggaccctaacgacaggcgcctccggcccatttacgatggcccactgcgtgaccttggtt

SEQ ID NO: 20489 - DNA, 98 bp, Homo sapiens
ccgggagcggcccagcgccaccgcagcccgagcgggaagaagttccgcagcaagccgcagctggcgcgctacctgggcggctccatggacctgagcac

SEQ ID NO: 20490 - DNA, 139 bp, Homo sapiens
gacgctggtgcggcgcggggtgagcgtcgaggaggcgcaggagactgaccgcaacggcaggactggtcgaattgacaaatcttaccctacagtatgtggccacacaggaccagtgctggacatagactggtgcccacat

SEQ ID NO: 20491 - DNA, 51 bp, Homo sapiens
ctcctgtaacccagcctgtttcacttcttgacggaatcagtccccaatgcc

SEQ ID NO: 20492 - DNA, 75 bp, Homo sapiens
aaccacagagtacttaaaaacatcatggatcaatctcaaacaaagttacagaatgtctgaaggggacagtgtggg

SEQ ID NO: 20493 - DNA, 101 bp, Homo sapiens
gaagaaaaagccatcttacactactcaaagggtttctacgataaagacagttcagggtggagttctagcaaagataaggatgcgtatagcagttttggatc

SEQ ID NO: 20494 - DNA, 100 bp, Homo sapiens
ctgggctcctactgttcttagagatgtacctttctcagggtctcttgcaacgtgtgagctgcctcttgccaagagtgagtggcaaaagaaactaaccccg

SEQ ID NO: 20495 - DNA, 96 bp, Homo sapiens
agagcatgggactagtatcttgcagtctgttaagcctagggactccacgtaccccagctgggtctcattgttccagaactgcattagttaagatta

SEQ ID NO: 20496 - DNA, 100 bp, Homo sapiens
agtgacgagagggagagcaagaccatcatgctgcgcggccttcccatcaccatcacagagagcgatttggactaaatgctcttccttcagaggattatcc

SEQ ID NO: 20497 - DNA, 50 bp, Homo sapiens
tgacatccgagcgaaagagaaagagttaagtgggcagaccaacatccacc

SEQ ID NO: 20498 - DNA, 98 bp, Homo sapiens
gaaacctgtagggtatggtccagctgtgccgcaccgaggcgagcaggagcagggaacagggacatgagagatggctttagaagaaaaagtttctactc

SEQ ID NO: 20499 - DNA, 75 bp, Homo sapiens
gcagccactgccacacggccgggaggccgagggcgcagaaggacagagcgggatgccaccagcttgtccaaaggg

SEQ ID NO: 20500 - DNA, 100 bp, Homo sapiens
acttctgcgggatcttcaaccacctcgagcggctgctggacgaaggcatctggccatctgaagaggttttggcttactactgcctcaagcacaataatat

SEQ ID NO: 20501 - DNA, 100 bp, Homo sapiens
ccatgacccccgatgccaaacacctgtggctgggtgaagaaggtgaatacagtgaagaggaaaactccaaagtggagctgaaatcagaagctaatgatgc

SEQ ID NO: 20502 - DNA, 98 bp, Homo sapiens
ctgagaacttcctgatctctctcgctgtgagacatgtctgagactcctgctcagtgtagcattaaggttccctggttgtgaaaatacatgagataaat

SEQ ID NO: 20503 - DNA, 82 bp, Homo sapiens
ggtcccagagcacgacgagcgcggaggaccgggaggctcccgggcttgcgtggggtcagccaggaggaaagggaaagaccag

SEQ ID NO: 20504 - DNA, 75 bp, Homo sapiens
gaaggccctcaacatcccggagcagctgccacaatgggacatgtgcaacatgggtggtaaagtaccacctgctac

SEQ ID NO: 20505 - DNA, 102 bp, Homo sapiens
cggccgcactctccctgcccgagacccggatctagtgaaaagccatttgatgtatgcggtcagagaagaagtggaggtcctcaaagagcaaatcaaagaact

SEQ ID NO: 20506 - DNA, 98 bp, Homo sapiens
taaacccggaaaaaagcatccttttccaacaatctcaggggctgacgtttaccctacgtcctggtgaggtgacggcgctggtgggacccaatgggtct

SEQ ID NO: 20507 - DNA, 97 bp, Homo sapiens
gcagggctttggggaggagtccagggagcccagcacaggtgacagagttagtccttgataattgcctgtgtgtcaatggggaaattgaaggcctgaa

SEQ ID NO: 20508 - DNA, 88 bp, Homo sapiens
cgtcagaacgtggcttatgagtacctttgtcatttggaagaagcgaagaggatacccagagccagaggtgacctggtacaaggatgat

SEQ ID NO: 20509 - DNA, 104 bp, Homo sapiens
ctcatctggcttggcgcctgaggttctcccattagtgtggaaaagccactggcagtgattcaagtggtgtcattgatctcacaatggatgatgaagagagtgga

SEQ ID NO: 20510 - DNA, 75 bp, Homo sapiens
ccggcagatcctcaggggcaagtacagttactctggggagtatccagcagaaatcaggaagtatgagtatgaccc

SEQ ID NO: 20511 - DNA, 51 bp, Homo sapiens
acgagatcttccgccactacgaacctgatggccaaaagaaaggaagaaaat

SEQ ID NO: 20512 - DNA, 75 bp, Homo sapiens
tgtggaattaccttcactctgggaaaaggcactgaagttgatttgataatgggctgcattaaaagtaaagaaaac

SEQ ID NO: 20513 - DNA, 100 bp, Homo sapiens
gcggagccgcagccgcccagaccgcgcagcgcgggaggcaggttccgcacgctgtttgaattgggtcctgatggaggagatcatgaaactgatggtgacc

SEQ ID NO: 20514 - DNA, 85 bp, Homo sapiens
cagacttaaaccagttataggggtaaacactgatccagaacgctatatcgagaagtttactgactttcttcggctctttgtgagt

SEQ ID NO: 20515 - DNA, 100 bp, Homo sapiens
atcccccacagaagccccctcggtccatcaccctcaggatcaatgagctgagcaatgttcctgttcctgtcatgctaatgccagatgacttcaaagccta

SEQ ID NO: 20516 - DNA, 75 bp, Homo sapiens
cttggaattacctgctgcgatttttcttcacagccagtttctgacggcaaacttgatgtcaattctaactgtgtt

SEQ ID NO: 20517 - DNA, 100 bp, Homo sapiens
gcgtcaacatgaccgagtgcgtcccggtgcccagctccgagcacgtcgccgagatcgtgggtcgccagggcaagagcggtgagcggggcgcctatgcctc

SEQ ID NO: 20518 - DNA, 75 bp, Homo sapiens
gggagcgggcgcaccgcggcccccaggacacgcgctccaggaggaggcccaggccgtggaccaggagctatttaa

SEQ ID NO: 20519 - DNA, 75 bp, Homo sapiens
ggccaagctgcaaagctgggagagactggaccagaccatgggcctgagcatcagaaaatggacccaagtggggtc

SEQ ID NO: 20520 - DNA, 100 bp, Homo sapiens
tcatttccttcgtacccacagtgcttcatgagaggagaggcagatgcgaaccagaacaatgggacctcctctcaggacacagcggtgactgactccaagc

SEQ ID NO: 20521 - DNA, 75 bp, Homo sapiens
cccaagttgaccctgggtctgatctggaccattattttgcatttccagaacttgaaggtgcacattcttgatact

SEQ ID NO: 20522 - DNA, 75 bp, Homo sapiens
gccaagctctactccaggaagtgaaaatgtgctgcctcgagagccgctgaaggtagaagatagcaccatgccgat

SEQ ID NO: 20523 - DNA, 100 bp, Homo sapiens
caggcgcctggcgtccgcgtcggcgatccggggtctgggcgcggcgagcaagagtgagccatggagctacgtgtggggaacaagtaccgcctgggacgga

SEQ ID NO: 20524 - DNA, 95 bp, Homo sapiens
ggcgccgcgccctcggcctgcacggaaactatgttccaacttcctgtcaacaatcttggcagtttaagaaaagcccggaaaactgtgaaaaaaat

SEQ ID NO: 20525 - DNA, 90 bp, Homo sapiens
cgtccggagccagccaacgagcgtgtggcaaaggagcagagaactttgacaagttcttcacacgaggacagcccgtcttaacaccacctg

SEQ ID NO: 20526 - DNA, 98 bp, Homo sapiens
cgcgccgctgcatcccgcgtccagcacctacgtcccgctgccgtcgccgccgccaccatgcccaagagaaagcaggacagctggcctgaagctcagag

SEQ ID NO: 20527 - DNA, 98 bp, Homo sapiens
gtcgctctacacgcaggccaccgacctgctaatcaagacctttgtacagacgcaatcggcccagggaatagccaggtctggctgggtcggcacaacct

SEQ ID NO: 20528 - DNA, 100 bp, Homo sapiens
gcggcgcgagtgggcgcgggcccggtgggccaggggaccagctgctgagtgcccgagtgttcttcgagaacttcaagtacgaggacgcactacgcctgct

SEQ ID NO: 20529 - DNA, 100 bp, Homo sapiens
atagagcgaggccagccatgtaacgcctgtggtgaccagtgccctgggttcgccttgcataaatggaggtccaatgatgcatcagcagcctccttctcag

SEQ ID NO: 20530 - DNA, 100 bp, Homo sapiens
aactctacctgagagagctaaatgtcattactgaaactcagtgcactctagtaattacaagtagtggctacagccccagatcagcacatcagtattcccc

SEQ ID NO: 20531 - DNA, 96 bp, Homo sapiens
ctttgacataataactgaggaagtgccagaagacgagcctgctgagggtgttggaactcgccataaggcattgatcaggattatggtttcccgttc

SEQ ID NO: 20532 - DNA, 101 bp, Homo sapiens
gtgaaaatgaaggtgaagtcctccagattccatttatcacagacaacccttgcataatgtgtgtctgcttggtaattgctctagcagatgcagtggaggaa

SEQ ID NO: 20533 - DNA, 123 bp, Homo sapiens
caaaaattaccattttatgatttactggatgaactgataaaacccaccagtctagatatccttggaacagaagatcttattgtggaagtgacttccaatgatgctgtgagattttatccctgg

SEQ ID NO: 20534 - DNA, 100 bp, Homo sapiens
tccaggcgcccgctagcttcggcggcgacccagacggggaaagcggaaggaatgtcgcgtgatgatgattattctccaccgtctaagagaccaaaggcca

SEQ ID NO: 20535 - DNA, 75 bp, Homo sapiens
gaggacaagattaaagtcaagagaagccttgaggatgagccaaggctcagcagggagctgctggatgagaaaggg

SEQ ID NO: 20536 - DNA, 50 bp, Homo sapiens
ccttggctaccttggcctgaacaggctagagtgcagtggcgcgatcttgg

SEQ ID NO: 20537 - DNA, 74 bp, Homo sapiens
agatccgcaccttggcggcagagagacatgcacggctcaatgattcatacaggcacatgatggctccgctactt

SEQ ID NO: 20538 - DNA, 100 bp, Homo sapiens
atatgcagattatatttctagggacaaacctatcacatttactcaggaggacttgctgcgtttaaagaaacaaatgagagtattttgtcagatatgtcaa

SEQ ID NO: 20539 - DNA, 74 bp, Homo sapiens
tcaaggtggcctaccaggaggccaggggtgtcgccatgcatggcctgtatgagaagaaaaagacctcaagaaag

SEQ ID NO: 20540 - DNA, 100 bp, Homo sapiens
attttagccatggatgaaggacaatatgatggcaaagtagatgtgtggtctcttggaataacatgtattgaactagatgaaatcgttagcaccttaggag

SEQ ID NO: 20541 - DNA, 100 bp, Homo sapiens
gttctacgtgtcccccgaggatctggaggcacagctgcagtctgacgagagggcaagagtgagccatggagctacgtgtggggaacaagtaccgcctggg

SEQ ID NO: 20542 - DNA, 60 bp, Homo sapiens
gacagatctgagagatactgaggtcaaatttgagctgattgtgtcagaggcctcctacct

SEQ ID NO: 20543 - DNA, 80 bp, Homo sapiens
ccacccaaacttgctggtcactgggaggtgagcatgggtttatgcgtcttaggcattattgtgatggcgagcaccaattc

SEQ ID NO: 20544 - DNA, 75 bp, Homo sapiens
ctggacgccgcgatcgtggggcccgcgaggcgggcagccggggcgtccagtttgcagatggcgtgtacctggttc

SEQ ID NO: 20545 - DNA, 100 bp, Homo sapiens
aggagaggcgcccccgccggccgccgcgccgcccggcagcctcggcagggcgaactttctgaccaagtatacaactacccagagggcctaggagaagtgc

SEQ ID NO: 20546 - DNA, 100 bp, Homo sapiens
tggacgaattccaacttgtttcacgctatatcaggatgagataactgaaagggaagcagaaccatactatgctatggaagaaatgaatggcaaagacttg

SEQ ID NO: 20547 - DNA, 100 bp, Homo sapiens
gccggttgctgcggctcctcgtgctggggctctggctggcgttgctgcgctccgtggccggggagcaagcgccagcctcttcggtgatctttggtctgaa

SEQ ID NO: 20548 - DNA, 98 bp, Homo sapiens
ggggacagtgaccgtggggttcctcgcccagagcgtcttggcgcaaaagctggcaggctgacagaggcggcctcaggacggaccttctggctactgac

SEQ ID NO: 20549 - DNA, 76 bp, Homo sapiens
cactccatctgcacagatgagacgagcactgcagtttcctcctgaaggctggctccggctctccctcaataatggc

SEQ ID NO: 20550 - DNA, 75 bp, Homo sapiens
gtgaggagttgctaaatgctcagatcatcaatgctgtggtactgttgattttattgagtgccctggctgatccgg

SEQ ID NO: 20551 - DNA, 100 bp, Homo sapiens
gacgtggctggtggctggagaagctggatttgccctttgatggtggccctcttgatccccggcttgctgaagtcaaaggtctccctctgttgcccaggct

SEQ ID NO: 20552 - DNA, 100 bp, Homo sapiens
cgactcgagggtgacgctcgctccgctcgtcccgctcgtcatggcctacccgggatacggaggaggggcccttccttctaccatgattatagtagcagtt

SEQ ID NO: 20553 - DNA, 74 bp, Homo sapiens
ttattggtgaaaaagaattccaggcaacagcattattgagaaaagcccttacagaagagtgtggccgtaggtca

SEQ ID NO: 20554 - DNA, 49 bp, Homo sapiens
agaacgtgccatggagacgcttaacggactcgctgattcttgagaagag

SEQ ID NO: 20555 - DNA, 100 bp, Homo sapiens
atttgaactgcccatgggaaccaccgagcagcccccactgccgcagcagacacagcctccagcaaagcgcaagcaccaggaaatccgagccatgagaagt

SEQ ID NO: 20556 - DNA, 100 bp, Homo sapiens
tggctgtggaagatggagctacagaaatcgacgtggtaattaacagaagcttggtgctgacaggccagtgggaagcaaagtgtgggatgctgtctcagga

SEQ ID NO: 20557 - DNA, 75 bp, Homo sapiens
ggaggcgttcagctgcttcaagatgaagagctcaggccccggggcctccagcggcaccagcggagaccacggtga

SEQ ID NO: 20558 - DNA, 75 bp, Homo sapiens
gtgccgctgagtcactgcctgggcatctgggcctggaacctcgggaagatgatccctatgatcttgaagatgttt

SEQ ID NO: 20559 - DNA, 82 bp, Homo sapiens
ggctgaggcggccgcggggcccgagcgcagcaaaatgatgcttcaacacccaggccaggtctctgcctcggaagtgagtgct

SEQ ID NO: 20560 - DNA, 51 bp, Homo sapiens
ctgcctttgagcggactcccttttaagaccattaaaaatctcaagtgacga

SEQ ID NO: 20561 - DNA, 100 bp, Homo sapiens
cccatccccactttgtgattccctaccgctgcttagtgggtgaatttgtaagtgatgtcctgctagttccagaaaagtgccagtttttccacaaagagcg

SEQ ID NO: 20562 - DNA, 71 bp, Homo sapiens
tttataagtattgacattacacagtgttaacaatgcatccacagaggattcaggagcagttccagaaaaat

SEQ ID NO: 20563 - DNA, 98 bp, Homo sapiens
cgggctggcaggcggtcgtccggccggggacccggcccgggaccggcggcgcgcggcggccgaggccaggtcactctgtgagactgctgggtcagaaa

SEQ ID NO: 20564 - DNA, 75 bp, Homo sapiens
atcaccaagctggaggtggacgccatcgtcaacgccgagagacaagagagacacctccaacttcgacaaagagtt

SEQ ID NO: 20565 - DNA, 75 bp, Homo sapiens
caagaaggttctccaggacaagaggttcaagatataaagatgaagcgcagctgtataaagaagagcacctgagga

SEQ ID NO: 20566 - DNA, 100 bp, Homo sapiens
cctgtcggcagactggtgacttcacttttgagtgcaactgccttccaggttaagtagcctgtcttctctgggagattctgcaccagagcgcaagtcccct

SEQ ID NO: 20567 - DNA, 64 bp, Homo sapiens
ttctcaatcagccatcccccatgatgcagagaagttttggtagcaggatgatgttggcctcata

SEQ ID NO: 20568 - DNA, 75 bp, Homo sapiens
ctgctgcccgccagggcccagatgggaaagttctatctggtcatcgaggagctgagccagctgttccgatccctt

SEQ ID NO: 20569 - DNA, 100 bp, Homo sapiens
ggcgggctgacctcatcctgccttgtgctcacagcttttgtcagaagtgtattgataaatggtccaagtgtgcctgccatcaactaactatccaggctac

SEQ ID NO: 20570 - DNA, 100 bp, Homo sapiens
ggtgacagcctcaagggcttcagcaccgcgcccatggcagagccagaccagctccatgaacctgcctccagacaaggcccggctcctgcggcagtatgac

SEQ ID NO: 20571 - DNA, 74 bp, Homo sapiens
aggcagcatggaccacggttgctgggcggatggggagcgtctatggtcaggcagacctgttatcctaaactagg

SEQ ID NO: 20572 - DNA, 100 bp, Homo sapiens
cattgaggactttccttacctgtttttccagctcacccactgccagcagaggtactctatcatcacccccaacatcttgcggctggagagcgaggagacc

SEQ ID NO: 20573 - DNA, 100 bp, Homo sapiens
caaagattgcttgaagaaatccatgccatgaagtgaccaatggggctgaggctgtgtccactgaggctaagatgactgcctttcctgattggccttggct

SEQ ID NO: 20574 - DNA, 98 bp, Homo sapiens
ggagatcttgacaaagcctcttctgtttccaatgggcatgttgacatagcggctttattgataaaatacaacacgtgtgtaaatgcaacagataagtg

SEQ ID NO: 20575 - DNA, 96 bp, Homo sapiens
ggcatttcagtcactggtttgcagagtccagcaagctgcgaatattgtgcgtgctctggaactttttgtgaaagcagatgtcctgagtggagagaa

SEQ ID NO: 20576 - DNA, 82 bp, Homo sapiens
gcggcggcgggcaggcgtgcggaggacactcctgcgaccagacaatgcagatcttcgtgaagactctgactggtaagaccat

SEQ ID NO: 20577 - DNA, 74 bp, Homo sapiens
cctgggaatcggtcgcctggaggaccagtatttcccatggagggtgagaagccctaccactgcaactgggacgg

SEQ ID NO: 20578 - DNA, 100 bp, Homo sapiens
gcggatagcgtggagtgacggtgccaccgcggcgcgattgacttctaaggactcttggtacatgaggaagaaacccggaaggggaagaggaaagcaaagg

SEQ ID NO: 20579 - DNA, 101 bp, Homo sapiens
cgcatccccgcggacgccacagcgctgtactccaaagattcaggtttactcacgtcatccagcagagaatggaaagtcaaatttcctgaattgctatgtgt

SEQ ID NO: 20580 - DNA, 75 bp, Homo sapiens
cagagatcctggaagccatgaagcacccctcgtgacagagctgaatgaacctctctccaatgaagatcgaaatct

SEQ ID NO: 20581 - DNA, 90 bp, Homo sapiens
gcagcagctgccttcttggacgcctttcagaaagtggctgacatggccaccaacacacgtgctttataaaaagctcaatactcatgtggc

SEQ ID NO: 20582 - DNA, 80 bp, Homo sapiens
ctcaacttgaaggtcatttaaccaacctcagctttacaaaccctgaatttataactgaggggaaatttgcagtggtgaga

SEQ ID NO: 20583 - DNA, 80 bp, Homo sapiens
ggggctgctgaggctgcgaggaggaggaggaggaggaggtgagaagccctaccactgcaactgggacggctgcggctgga

SEQ ID NO: 20584 - DNA, 75 bp, Homo sapiens
cagaaacaaaatgtcaacaaattgatgggaaaaccaattctgtgtcctcggaggaccacagcccagttgggcccc

SEQ ID NO: 20585 - DNA, 94 bp, Homo sapiens
gcccgtccccggcacacgcgcagccccggcctctcggcctctgccggagaaacaggtgagaagccctaccactgcaactgggacggctgcggct

SEQ ID NO: 20586 - DNA, 100 bp, Homo sapiens
cagtcaccattaacggagatgatgccgaaaacgcaaggccgaagccaaagccaggaaaaccagcattggaatcagctgattcaggatgctcagaagcgtg

SEQ ID NO: 20587 - DNA, 99 bp, Homo sapiens
gagatctacgagctgtatgacgatgtggaacccagagatgactccagccccagccccaagggcagaggcctggcgctgctgctgccgcccgtcaccctg

SEQ ID NO: 20588 - DNA, 73 bp, Homo sapiens
cctgctggaggagcgggccgggcggggggcctcggaaggtacaccaggggttggaaaaaccacactaggcaaa

SEQ ID NO: 20589 - DNA, 75 bp, Homo sapiens
ctcctactgtcccacggccaccgaagaggtagttttggatgttgggtgtggaactggaattctctctatgtttgc

SEQ ID NO: 20590 - DNA, 83 bp, Homo sapiens
cctcctggcgggcccggcggctctcactatccagaggagcaggagcggcttcgcttggagcaggagcgagagcaggaacagaa

SEQ ID NO: 20591 - DNA, 98 bp, Homo sapiens
cagcctcagtgatgtccatgagagttgtctgctggttctcagcttgaagaagattctgcagtccttattgatcctttttcttggcgttaccatttttg

SEQ ID NO: 20592 - DNA, 75 bp, Homo sapiens
ggcggaggtcgataagctggaactgatggtcaataagcatgcgttttctggagggagagacaccatcgaggagca

SEQ ID NO: 20593 - DNA, 75 bp, Homo sapiens
cgcggagcgccagctcaatgaagtccaagacaactttgacaagattgaattcaataggatgtgttggaccctctg

SEQ ID NO: 20594 - DNA, 98 bp, Homo sapiens
atgagattgcagcacctcgatcatttatttttctctggtgtggttctggggaggggttggaccttggaagagtgatcacatgtacatgaagacaatgg

SEQ ID NO: 20595 - DNA, 100 bp, Homo sapiens
ctatgagagtaagaaggaagaacacaagtggatatacgaggagtccttgcaatctggcccatcactcccaagtcatggatggtgagggagaagtacatcc

SEQ ID NO: 20596 - DNA, 101 bp, Homo sapiens
agcgccaccttaactccgccctcccccaggcagaggcaaggctggcagcaaaacgggctgcccgggcagaagcaagagatatacgcatgagagaactggaa

SEQ ID NO: 20597 - DNA, 90 bp, Homo sapiens
cttctgcactgtttacaggcacagttgagtggtgattttatgcaatggcttcaagccacagttcttcaccagtgcctcaaggaagcagca

SEQ ID NO: 20598 - DNA, 100 bp, Homo sapiens
ccgacctctacaactgggaggtggccatcttcggaccccccaacaccctctacgaaggcggctacttcaagagacacctatggctgccgatgaaggctca

SEQ ID NO: 20599 - DNA, 87 bp, Homo sapiens
agaaagaaactcagaggaagaggaaagaaagaagaggagggaatggctctttctcagatatggccgcgtggaaagtgtcaaaattct

SEQ ID NO: 20600 - DNA, 51 bp, Homo sapiens
ctgatgagccttttaggcctgttcagtatgtgccaagtgctctctgctgcc

SEQ ID NO: 20601 - DNA, 75 bp, Homo sapiens
cgagccttggcggcggacgtgcagaagctccaccatgaggcgaggtggatggaggaagcgagctgaaaatgatgg

SEQ ID NO: 20602 - DNA, 83 bp, Homo sapiens
tcgcctacttcctgccggcgcaggcttcggaaccaaaaagaagcttcccagagccggggccaggagccccaagcgccctctag

SEQ ID NO: 20603 - DNA, 100 bp, Homo sapiens
ggaatcctcggcagataaactggactgtcctctacagaaggaagcacaaaaagggacagtcggaattacatgaacgacagccttcgcaccgacgtcttcg

SEQ ID NO: 20604 - DNA, 100 bp, Homo sapiens
tgctcgtgcactttacacacatgaggtttccacgagcgcgagggccgcccctactgccgccgggacttcctgcagctgttcgccccgcgctgccagggct

SEQ ID NO: 20605 - DNA, 90 bp, Homo sapiens
attttagtttgccttggaacaaggtggtccacaattagtgaaaatctgtttgcaaccactggttatcctggcaaaatggcaagccagttt

SEQ ID NO: 20606 - DNA, 50 bp, Homo sapiens
tgagctcaaagttattttacattgtcctaggcctacttacaagcctccag

SEQ ID NO: 20607 - DNA, 80 bp, Homo sapiens
aaacaccctcagctccacattgagagcaaaatctacaagatgatgcagggaggagggacgcatggaatacctcgtgaaat

SEQ ID NO: 20608 - DNA, 100 bp, Homo sapiens
aagcgccccggaatgacctgtcgcctgccagctctggaggcaagtgaggcctatctggttggcctttttgaagacaccaacctgtgtgctatccatgcca

SEQ ID NO: 20609 - DNA, 50 bp, Homo sapiens
tggagacacacaggcagacccatactgattgtggtggtgccatgcagcaa

SEQ ID NO: 20610 - DNA, 90 bp, Homo sapiens
cgccgtccgcaccgggaccggagaggaagcggagggggggccctcagcctcttggccttgaacgggctgttcatcttgattcacaaacac

SEQ ID NO: 20611 - DNA, 100 bp, Homo sapiens
atctcgaccagaggctagtaggactggagaggcactttcccacacaggatggagccgggccaccctcacagctcctgccctgcagacgctggccttgtgg

SEQ ID NO: 20612 - DNA, 100 bp, Homo sapiens
ctcggatgtctggtggggcggagcagacacagactatgcagatgggaggcctgtttaaagaagaaaacccgtatgctagatttgaaaacaactaaagcgc

SEQ ID NO: 20613 - DNA, 101 bp, Homo sapiens
ggtgcaagaggcgcaaacaagccaatcccaggaggaaaaacggtggaatatgtgatcaagtgtgacatgtcagctctgcagaagattctgtatcgccatat

SEQ ID NO: 20614 - DNA, 50 bp, Homo sapiens
acgccgccatccgggaggcccagggaaggcaggtgacagcagggacatgt

SEQ ID NO: 20615 - DNA, 100 bp, Homo sapiens
gggaaatgtctgccgccgccggctctcgggagcgcaacactgcaggtttaatagactacaacttccactgtttccgaaaagctattcatgaggtttttga

SEQ ID NO: 20616 - DNA, 75 bp, Homo sapiens
cagccaaaacagttcattcatattcagcttgttgacctcctgtactggagagacattaagaagactggagtggtg

SEQ ID NO: 20617 - DNA, 101 bp, Homo sapiens
ttgactcacgttcttggagttgctggtgttctatactggaagaggcatgccagaggtagagcagcaatcccacagagtattgatgaggaaactgaagtttg

SEQ ID NO: 20618 - DNA, 98 bp, Homo sapiens
ctgttcccaggatggtgatccgtgtatatattgcatcttcctctggctctacagcgggaagacatgtaaggaatttgcataagacagttatgcaaaat

SEQ ID NO: 20619 - DNA, 98 bp, Homo sapiens
cgtgaccgagagcgtgaccgagagcgcgaatatcgtcatcgttagaagggatcaaggtggtcggacattgtgtggtgtaatgaggattggcctggttg

SEQ ID NO: 20620 - DNA, 100 bp, Homo sapiens
tgacagatgaagacgaacctgctttgaaacgccagcgactagaaatcaattgccaggatccatctataaaggtgatgtgtccaatctagatcccaacttc

SEQ ID NO: 20621 - DNA, 90 bp, Homo sapiens
gaacagatgagaaacccggcaatgaaagtttttccagcgctcttgggaggtgggctgtgccactgcctggcccacctggcccacctggcc

SEQ ID NO: 20622 - DNA, 74 bp, Homo sapiens
aagagtttactggattctgtcaagagtttttggtcatgaagaggaagagaggcaggcctaaggggtccacgaag

SEQ ID NO: 20623 - DNA, 145 bp, Homo sapiens
aggaatcatggcggctgcgctgttcgtgctgctgggattcgcgctgctgggcacccacggagcctccggggctgccctgggcgctgcctatggcacagccaagagcggtaccggcattgcggccatgtctgtcatgcggccggag

SEQ ID NO: 20624 - DNA, 74 bp, Homo sapiens
aatatcgtgaaaatggccatactgcccaagcgggctggttactgaacctgcagcatttgacattgggagcacag

SEQ ID NO: 20625 - DNA, 82 bp, Homo sapiens
cgccaccctgtggacatcagcgccatccccgagcagcggtggaagctggagcaggccgggctctcgccatgggtcactgtcg

SEQ ID NO: 20626 - DNA, 100 bp, Homo sapiens
gaaaagctaaagaggcaccattcgtacccgttgccgcgccagggagctcgcggcgcgcggcccctgtcctccggcccgagatgaatcctgcggcagaagc

SEQ ID NO: 20627 - DNA, 100 bp, Homo sapiens
gcaaggggatcgttttctccagttccatacgttttgaagagctgtgcagaatttatagagactcacggcatcgtggatggaatctatcggctttcaggag

SEQ ID NO: 20628 - DNA, 98 bp, Homo sapiens
gggatgcctggaatagaagagaatgacctagcaaaagttgatgatcttccccctggcatttgttgctatcggggactacaatggccacgtcggtctgg

SEQ ID NO: 20629 - DNA, 50 bp, Homo sapiens
tctgaggcgacggccgcggctgcacagatgacaatgaggggagcagcagt

SEQ ID NO: 20630 - DNA, 100 bp, Homo sapiens
gcgctgctcagctgtctgcttctcacaggtatccgttacagcactgatgtgagtgtagatgaagtaaaagctttggcttctctgatgacatacaagtgtg

SEQ ID NO: 20631 - DNA, 82 bp, Homo sapiens
ctgcaggcgatgtcgccgaaaccgggctgcaggcgggaaataatgcaaaaggtgtcccaaggctcctgaccagtgaacaaag

SEQ ID NO: 20632 - DNA, 101 bp, Homo sapiens
cttctgggagctgaggaaccagatatcttgaaaagctgccagaaaggtaacaactccaagtttcctttggataatacacctgttcgaaatcggggcgatgg

SEQ ID NO: 20633 - DNA, 75 bp, Homo sapiens
tccagaagtccagagctgaggactgcctgtttgcagcatttttgaaacgttggggttgttggagtggttggattt

SEQ ID NO: 20634 - DNA, 99 bp, Homo sapiens
tttactgaagataagccaactttgaatttcttctatcaacagggtgttcctgaaaagccccatagtgattgagtcttcaaaaccaccgattctgagagc

SEQ ID NO: 20635 - DNA, 75 bp, Homo sapiens
cagaagccttcttccccttcatctcgagagggaaagaactcctttgggcctcacagcatggaaccacaggttact

SEQ ID NO: 20636 - DNA, 76 bp, Homo sapiens
gcctctactcagaaaatgaccgactgagaatcagtgtgaagcctcagtttaggtcatctggtggttcagaacactc

SEQ ID NO: 20637 - DNA, 90 bp, Homo sapiens
cgagagaaggaaattagtgatgatgagacagagaaagagctggacccagatgggctgaagaaggagtcagagcgggatcgggcaatgctg

SEQ ID NO: 20638 - DNA, 50 bp, Homo sapiens
ccgcctggctccccatactagtcgccggaacaagatcactcaaggtgaag

SEQ ID NO: 20639 - DNA, 75 bp, Homo sapiens
atagacctaaagccacagtcttcaagagcccacggacaccacctcaacgagttcgcagtatgtgcagtgcgtggc

SEQ ID NO: 20640 - DNA, 100 bp, Homo sapiens
cagcatcccagactctctgctgatccgaagaatcacaggaaggggttatggttttgtgaaattcacagatgaactggaacagaagcgagccctgacggag

SEQ ID NO: 20641 - DNA, 75 bp, Homo sapiens
cgaatatcgtcatcgttagaagagcatgcttgagaagggaggataaaaactttcagaatgagcaaaacaccatca

SEQ ID NO: 20642 - DNA, 105 bp, Homo sapiens
tccagatcttgcagccgctttttgaagggaaccgcgggctctgccaggagagaagactgggtctcccttgatctgagaatggctacctctcgatatgagccagtg

SEQ ID NO: 20643 - DNA, 133 bp, Homo sapiens
gcgaaggccgggacccggttccccggcccacagtgggggtgtgcaaacccgagagaactggactggatacacgtctgtttaactacgcaaaaggtaatgctggcatggcttactgggaccctaagtgtggcga

SEQ ID NO: 20644 - DNA, 98 bp, Homo sapiens
taaagtgcggtactgcgggattcagccgatttccttcttcctctgactgcccggaaatatcagccaaaggccagcgttgaagatcctctttgtaactt

SEQ ID NO: 20645 - DNA, 50 bp, Homo sapiens
cacaggcccaacagacttttataggagcgagaacccgagcagcgccatga

SEQ ID NO: 20646 - DNA, 82 bp, Homo sapiens
agttcgaagagttggatactcagcgtcgctggcagccgctgtacttggtgtcgtgaaaactacccctaaaagccaaaatggg

SEQ ID NO: 20647 - DNA, 97 bp, Homo sapiens
agcgccttggaacgccgacctgaaaccatctctgagcccaagacctagactgagcagggggaggaacatttaagctgatggaagtggaagtggaagt

SEQ ID NO: 20648 - DNA, 74 bp, Homo sapiens
cttcgcgtcccctgcaccatgagctggggcaccgagctctggctgagctgactgctgcccactttggaggaggc

SEQ ID NO: 20649 - DNA, 100 bp, Homo sapiens
ccagttttgaaatcgacacacaaagaatagagttgagcctgtgggacacttcgggttattcagcttctcaaggctggaaaagcgaaggaagtttcctaca

SEQ ID NO: 20650 - DNA, 75 bp, Homo sapiens
gtacccatgtgactaatttgtccaaagagaggtatctagaagagcagaagacagagaatggaaaagataaggaac

SEQ ID NO: 20651 - DNA, 100 bp, Homo sapiens
catgaacagaactcaggagttgtctggccagcttagtgaaaacccgcctagtgccaagcaaccctccaagatgctagttatcaaaaaagtttccaaagag

SEQ ID NO: 20652 - DNA, 101 bp, Homo sapiens
ggaggagtttcatgaagagcccaaaacctattacgaactcaaaagtcaaccgctgaagagcagaataactgaagtgaagtgatggactccgatttggagag

SEQ ID NO: 20653 - DNA, 82 bp, Homo sapiens
tcgttggctgccgtccccgctgctgtgcattgggtggtatggtcaggaaaaagactacaatgtactagtcatggatcttctg

SEQ ID NO: 20654 - DNA, 100 bp, Homo sapiens
atgttccggatgttacaagctctggaaagggagccaatgaatttagcttcccagatgaataaaccaggaatgcagggatttgtatcgttgtgcccgtgtc

SEQ ID NO: 20655 - DNA, 75 bp, Homo sapiens
tcctcttcatcctggagcacatcatggtgaatcatttgctgtttcaaatagagaactgtgcgatgatgagaaaga

SEQ ID NO: 20656 - DNA, 83 bp, Homo sapiens
acgtctgcggaagtgcagctgcctcagttcttagcgcagatatggatgaatgtcaagaccccagtagttgtattgatggccag

SEQ ID NO: 20657 - DNA, 87 bp, Homo sapiens
gccgcgggagaggtaaacagaacaccaggacatcccagagtctgggaaatgggaggacaagctctttggggctaccaaacagaagca

SEQ ID NO: 20658 - DNA, 130 bp, Homo sapiens
aatcagacagaacagttaatcctcaatttaagcctgatctaacccctagaaacagacgcaagatggctgtcctctctaaggaatatggttttgtgcttctaactggtgctgccagctttataatggtggc

SEQ ID NO: 20659 - DNA, 96 bp, Homo sapiens
agagcagagaccatatagctgccctcagctgcactgtggcaaggcttttgcttccaaatacaagctgtatagggcatcttttatgaccaaaactgt

SEQ ID NO: 20660 - DNA, 90 bp, Homo sapiens
tatttaatggaaaatcgcttggttaaaacctgacacttttaacaggtgatctgtgaaaatggttcgctattcacttgacccggagaaccc

SEQ ID NO: 20661 - DNA, 75 bp, Homo sapiens
gctaagcccatccattcttgagagcttcatacatctcactggggctgatcagagcaacaagatatggatttggat

SEQ ID NO: 20662 - DNA, 51 bp, Homo sapiens
cggatggatgagcagtcacacagactttggctgctttgctggctctgcaag

SEQ ID NO: 20663 - DNA, 90 bp, Homo sapiens
agactaaatgaagattttaggcggtatcaaatggaaagtttttccaaatattcatctgtacaggtggatgtgaaattggaccccaaggat

SEQ ID NO: 20664 - DNA, 100 bp, Homo sapiens
ccgaccggagagcggagcgcgagcaggacccgcgtgtcgcccctcagcagtgatattatcaactcactggtaacaacagtattcatgctcatcgtatctg

SEQ ID NO: 20665 - DNA, 82 bp, Homo sapiens
caccttatcttagagttattcaaggggatggagtagatattaataccttacaagaggatgaatgctatcaagtaagacaagt

SEQ ID NO: 20666 - DNA, 83 bp, Homo sapiens
catggacatgaagaggaggatccacctggagctgaggaaccggaccccggcagctgtggctattatcatggaaaactaatttt

SEQ ID NO: 20667 - DNA, 74 bp, Homo sapiens
ggtctactctgatgtcaatcttgagggctaggctgagcagcgtgttatgtcccgggtacactctctggagcggc

SEQ ID NO: 20668 - DNA, 75 bp, Homo sapiens
atcccacgtgaggaaggagcacgggaaggtagttggcaaaaaaggagaaagccactaaggtacaaaagacactgg

SEQ ID NO: 20669 - DNA, 50 bp, Homo sapiens
tagcaatcgcacagctgaggaggggacactacacagaaaatgagaactgc

SEQ ID NO: 20670 - DNA, 83 bp, Homo sapiens
cgcagatccagcaggaggttatcaaagcctatggcttcagctgcgacggggaaggtacaatgactcttcttgcttttcaccta

SEQ ID NO: 20671 - DNA, 75 bp, Homo sapiens
tctcaggacaacccagatgtgcaacaaagtgcgatgaggcagaagaggcctggaccttggcgcacacagacccag

SEQ ID NO: 20672 - DNA, 101 bp, Homo sapiens
tggtggcctatgcctactgcaccatccccacctaccccagcggccagatcggcttcatgctgtgcagcaagaacccgagacagggtctccctctgtcaccc

SEQ ID NO: 20673 - DNA, 90 bp, Homo sapiens
tcgaagagtccccccaagtctcctgaagaggaaggagcggtgtcctcttaagaaaatgttaagtgggcagaccaacatccacctcagcaa

SEQ ID NO: 20674 - DNA, 74 bp, Homo sapiens
ttcgcctcagacgcggtggagccgccggagtctgagaaggcttacctatttctactccatgtaccaccataaac

SEQ ID NO: 20675 - DNA, 141 bp, Homo sapiens
gaaatagaaggctttccttctccacccgacttcatactgatggccgactgcatatactatgaagagcattgttggtgctctgagggtgtcagccaggccactcatgcagaccattgcggcagcactgaaaatggaagaaag

SEQ ID NO: 20676 - DNA, 74 bp, Homo sapiens
ttctctgaggcggcgagagatggtcaggtctggagctcgaccgggccagcggaagatccatccaaaagctatgt

SEQ ID NO: 20677 - DNA, 73 bp, Homo sapiens
ggaggagctggactccatcctcttcctttttgaaaatgaccagtcaacaggggacataaaagtaattggtgga

SEQ ID NO: 20678 - DNA, 100 bp, Homo sapiens
agcctcgggacccgggaagctatccctgccctcgggggctcgagcctggagtggggcttgcagagcaccaaaagtggtctgaagtcagagaagttggtgg

SEQ ID NO: 20679 - DNA, 117 bp, Homo sapiens
cccagaggcaaattttagacaaatcttactatcttgggcttcttaggaaaggagaaatatcttcagaggaagactgccgccatactgaggctgagcacagatttgtctttttcattg

SEQ ID NO: 20680 - DNA, 100 bp, Homo sapiens
ccaatttgtccgtaaccttgtggagaagaccccggcgctggtgaacggatccagatgaagaaatggccaaaatcgacaggacggcgagggaccagtgtgg

SEQ ID NO: 20681 - DNA, 101 bp, Homo sapiens
aagtctcccaacaacagagacagctcaagactgtcggtgattgtggtcaggaagaagtgcatgccacgattctttaccgaaatgaaccgcactgtacagaa

SEQ ID NO: 20682 - DNA, 101 bp, Homo sapiens
gagaaagactcttggtcataatcttctagtttctgaattatataatcagctgaaatttccagtaaaggtgggcgggggcaggacggaagcccggttatcac

SEQ ID NO: 20683 - DNA, 98 bp, Homo sapiens
gagagcatggatcctgaggtcccaggtacgagtggctgctttacagaatctggtgaagataatgtccttatattatcagtacatggagacatatatgg

SEQ ID NO: 20684 - DNA, 50 bp, Homo sapiens
cctaaggcactcaaggaaaggatacaggtggaggagaatgagattgagtg

SEQ ID NO: 20685 - DNA, 100 bp, Homo sapiens
cgactgtggcagagttgaaggctggagatgatatgcctgccatcatgcttgttaatactccaacagttacccctactactacacctcctccagcggcggc

SEQ ID NO: 20686 - DNA, 75 bp, Homo sapiens
gagtggtgggagaaccagccgactggagcaggcagcagcccagaacattactactggatggaaatccattccgag

SEQ ID NO: 20687 - DNA, 100 bp, Homo sapiens
caagcagatcgagcgctactcgcgcttttcgccgtcgccgctctccatcaaacaattcctggacttcgtgtaaacaggaacatcgataagtagtgtaaaa

SEQ ID NO: 20688 - DNA, 50 bp, Homo sapiens
ccgggtgaggccggccacgccccgcacgcagtctctggtcccagcccacc

SEQ ID NO: 20689 - DNA, 75 bp, Homo sapiens
gtaaactcaatgcacagaaacttaaagaccttggttcgatacaagaggctgttttcctagcgtggcttgctgcct

SEQ ID NO: 20690 - DNA, 90 bp, Homo sapiens
aggacactgaaattcagagaggggaagtgatttgcctcagcttgtactaaatcggccctgcctctgtgatggtggggaacctggtctctg

SEQ ID NO: 20691 - DNA, 74 bp, Homo sapiens
gcgcagtcgggctctgcaggagcgcgcggagctgggagtgtccactcgccttccaccagcatggcaacgtcttc

SEQ ID NO: 20692 - DNA, 50 bp, Homo sapiens
gacattgacaatgatggctttgaaggtggtcgagatatccagtctgacgg

SEQ ID NO: 20693 - DNA, 121 bp, Homo sapiens
agagaggcaccgggatcgtgaccgagaccgtgaccgagagcgtgaccgagagcgcgaatatcgtcatcgttagaaggatatgtcgttattgatccagctcaactttatgtatatgagaaac

SEQ ID NO: 20694 - DNA, 99 bp, Homo sapiens
ctggatgcaacttgtgattttgatttatcacatttctggagcaagtacaactcctgtggaagaggtccctgctgctattgccccattccaggggagggt

SEQ ID NO: 20695 - DNA, 98 bp, Homo sapiens
tggggatcctctgtacgcccgttcactggcagtggagctactgctgtggttcaggcagccctatgcaaacccaggcaagaacgtgtagcaataaaacg

SEQ ID NO: 20696 - DNA, 100 bp, Homo sapiens
gacgcaaccggcagcagcgctgccgccgcgtcctcagccaccgctccctcttcccacggaaataaagtctttgcttttgctttttggaggtcagtttgcc

SEQ ID NO: 20697 - DNA, 90 bp, Homo sapiens
agaaatgaccaacagataactgaggacaatggacctgcctgggcatagacttccttaagaatgattacggacctgaagccaaagaacaag

SEQ ID NO: 20698 - DNA, 96 bp, Homo sapiens
aacccttaccacccagcagcagggcatcaagcaacaggaacaagatcctaccaacctctacatttctaatttgccactctccatggatgagcaaga

SEQ ID NO: 20699 - DNA, 147 bp, Homo sapiens
gtttatttccaaagttgaagaagtcttgaatgactggaaactgattggaaactctttgggaaagccactcgaaaagatgcagacagacatgctgaactatctggaagtccactgaaaagcaaaagcactaggaagcctttggcatgt

SEQ ID NO: 20700 - DNA, 95 bp, Homo sapiens
attccgcttttgaggatgagatcgtttctctcagtttggggtcagaggtccttctatatgatccactctttgactggaccatgaatcctttgaaa

SEQ ID NO: 20701 - DNA, 103 bp, Homo sapiens
ctctgatatagatggtgattatagagtggagatctattgggaaactgattataaccactcgggcaccatcgatgcccacgagatgaggacagccctcaggaag

SEQ ID NO: 20702 - DNA, 100 bp, Homo sapiens
cccagacggaaagagctacttgctgacttcttggacacttaatgattgttggcaagaaatgtgctgctgatctgggcctgaataagggttatcgaatggt

SEQ ID NO: 20703 - DNA, 82 bp, Homo sapiens
acagctaagatgtcaggacatcctggaagctgggaaagggaagaaaaaatgctgggcatcttggtgcagcacaaagtccgga

SEQ ID NO: 20704 - DNA, 100 bp, Homo sapiens
gaagaggtcccaatcccccactctttccgccctaatggaggtctccagtttcggtgatgcagaagatggggaagaatatgatgacccttttgctgggcct

SEQ ID NO: 20705 - DNA, 101 bp, Homo sapiens
gaaaagagaaagaaaaaggaaaaaatagaaaaacaaattgctacatccgggcccccaccagaaggtggacttagggaaattcacagtatggccaacagcaa

SEQ ID NO: 20706 - DNA, 75 bp, Homo sapiens
ggcggatctggaggagcagttgtctgatgaagagaaggtttgttggcatccaaagctgttggggttgatggtgct

SEQ ID NO: 20707 - DNA, 98 bp, Homo sapiens
gagatgtctttatgtggttgaagcatgaagctacccgaggcaatgcagcagctcagcttctttgcccaaaatgcagtgccaagttgggttccttcaac

SEQ ID NO: 20708 - DNA, 82 bp, Homo sapiens
tttgccgatccgccgcccgtccacacccgccgccaggttgacatcatggacatatgtgagtccatcctggagaggaagcggc

SEQ ID NO: 20709 - DNA, 122 bp, Homo sapiens
cagaaatatcagaagaagcttcaagactttaatctgcagttggaagacatatacagctgaggacgatgacatgaatgaggacacagtagagaggattgttcgctgcatcatccagaatgaag

SEQ ID NO: 20710 - DNA, 100 bp, Homo sapiens
gcgcgaagtgaagctgtgggacacgcggttcttctccagcgccctggcctccctcaccttggacacctcgcttggaaatcacctaagagacgtaccggag

SEQ ID NO: 20711 - DNA, 119 bp, Homo sapiens
tctcgctccgtggccttagctgtgctcgcgctactctctctttctggcctggaggctatccagcctcttcagtgggtcatctgtgtgtcacagcctcagaagaccagcgagatggctgc

SEQ ID NO: 20712 - DNA, 75 bp, Homo sapiens
gccgcgccgcgctccaaccgcctcctcctcctcagtaacgcggataatatcgtctactgcattatttttggctgc

SEQ ID NO: 20713 - DNA, 111 bp, Homo sapiens
cggaggatgcggcgcggggctgcgctcgctacgtccgctgctgctgcccggctcgggcctgagcgccgagcagatatgaggccccaggattcctggcgaggtcctcctccc

SEQ ID NO: 20714 - DNA, 100 bp, Homo sapiens
gccgctactggaacctccacctcgactccagcggccccgacagcacggaagcagctggataaagaacagacgcatcttctctccagactgccgatcccag

SEQ ID NO: 20715 - DNA, 88 bp, Homo sapiens
gtggcccaggaggcggcaggacggccaagaccagcgcgagggccctgggcaaggcccgacagggttggggtctgctaggtccccggaa

SEQ ID NO: 20716 - DNA, 74 bp, Homo sapiens
aaaaggtgtacttgcaagaaacctcaggacttgagtaacagcaacatggttaagaatgtctgaggggtcaggcg

SEQ ID NO: 20717 - DNA, 100 bp, Homo sapiens
gaaaaacagacagctgtgtcagtagaaaacttcattgcagaattgctgcctgacaagaggagcatattatttaatatctagaagtctagggccagaattt

SEQ ID NO: 20718 - DNA, 90 bp, Homo sapiens
cccaccgccatggccgaggaagggtttcgcatcgccgaagatagattctgttgctgctcagcccaccgcaacaagcccagtagtttatac

SEQ ID NO: 20719 - DNA, 82 bp, Homo sapiens
ccgcgagcagaccggcctggaagcctacgccctggggctggacaccacaacagtgattgactacgtgaagccctcggatctc

SEQ ID NO: 20720 - DNA, 83 bp, Homo sapiens
agccccgcagctgcagccgcctgaccacggcgactggacttacgaggagcagtttaagcagcgggactacttgttgatatttg

SEQ ID NO: 20721 - DNA, 100 bp, Homo sapiens
agccgtgatgcaggcgcttaagtatttccacaagcgtttcccggagcacagggcagcggagatccggccttgcttatccaagagtcaaaatggaaattac

SEQ ID NO: 20722 - DNA, 100 bp, Homo sapiens
tcaagatgtggagctctccttgcagatcggtgacacagttcacatcctggagatgtacgagggctctagaccaagatagaacagcccttcagaaagtgaa

SEQ ID NO: 20723 - DNA, 74 bp, Homo sapiens
acagctggccgccgatattcaccaagcgcttcgctacaagatttgatgcagtttgatgataaaggaaacaagac

SEQ ID NO: 20724 - DNA, 101 bp, Homo sapiens
tggctgcccacgggggctccgcggcgtcctcggcgctgaaggggttaattcaacagttcaccaccattaccgaactgataaatttcaaacggaagagagtg

SEQ ID NO: 20725 - DNA, 75 bp, Homo sapiens
tcattgctctttggcgactcttattgcttgcactggtttccgcctccgacctgtggctggcctgctttcctctcg

SEQ ID NO: 20726 - DNA, 89 bp, Homo sapiens
cttgtttctccatctgtacaatggaaatgatgaagatgcccacctgatagggtttttgtggcaaataatagagatggggtttcgccgtg

SEQ ID NO: 20727 - DNA, 83 bp, Homo sapiens
gagctgctggagtgcttggatctggagaagagcagctgctgcatgggcctgagccgggtgaagatcatgacggagaaggaact

SEQ ID NO: 20728 - DNA, 100 bp, Homo sapiens
ccgagccttcagcagaggcggcagcctggagagtcgaagcagcagctctcgctccagaagcttcactttggtgtctgacttccagcaactgctggcctgt

SEQ ID NO: 20729 - DNA, 75 bp, Homo sapiens
tgaaaatccatcagtgccagcataccaatgaacctctattcaagtttgtcaacttcagagacaacccactgaaat

SEQ ID NO: 20730 - DNA, 75 bp, Homo sapiens
cctgcataacaatgaggccggcaggaaggaaagaccacagcaagattctttcattcgtctcctcctagcctgggg

SEQ ID NO: 20731 - DNA, 100 bp, Homo sapiens
ggtctccccaacgcaggacatcaggagagtccatcccgatccggctcttcctggccgggtatgagctcacgcccaccatgcgggacatcaacaagaagtt

SEQ ID NO: 20732 - DNA, 82 bp, Homo sapiens
gtgcgccggcccagcgccgcggccaaaccctcagggcgtgatggtgggcatgggtcagaaggattcctatgtgggcgacgag

SEQ ID NO: 20733 - DNA, 83 bp, Homo sapiens
aagcgccgcggttaaccacgtctcgtccacgacctccctaggaaagatgaatgggagggctgattttcgagagccgaatgcag

SEQ ID NO: 20734 - DNA, 76 bp, Homo sapiens
cccatcttggcctcccgagtagctgggaccacagacagcacccaagaaaacctcatttggctcgctgaaggatgaa

SEQ ID NO: 20735 - DNA, 100 bp, Homo sapiens
ccgggcctctgcaccccttcaccctggcatcccatctccgaactgtatgcagagccccatcagaccaggttcatgaaccatcgagctccagccaatggcc

SEQ ID NO: 20736 - DNA, 100 bp, Homo sapiens
ctattgagcatgcagattttgcaggtgtggaacgcctagctcttgtcacaggtggccagacgggagttccagaccagtgttgtctcccgggacattgaca

SEQ ID NO: 20737 - DNA, 75 bp, Homo sapiens
atgtggattcagcaaacaaattctggaaatactaaatagtactggagttgatctctctaatgtattagatcttca

SEQ ID NO: 20738 - DNA, 100 bp, Homo sapiens
catgcagtgtttacaattaaaggagaccctggccacccaggaacccacagataaccaagtcagacttcgtaagagaaagtgtgctgttggaacaactggc

SEQ ID NO: 20739 - DNA, 76 bp, Homo sapiens
cgtacgtccaacttcagccccagatgtcaccaaggtgataaaagaaaatgtggctgaagttacccgaagttcagct

SEQ ID NO: 20740 - DNA, 82 bp, Homo sapiens
gaagaagctgcagccgcacctggccaaggctgctacaggagctgagagaccctaccctcactttccgtctgcttggctcccc

SEQ ID NO: 20741 - DNA, 100 bp, Homo sapiens
ctggcagccggggagctgcaggaaccagactgggggcgagctgagcacctgtagtcaatcacacgcagtactatactggcaattgctggagaagattttg

SEQ ID NO: 20742 - DNA, 80 bp, Homo sapiens
ggccaaagtggctgttgagcacttgaaagtatttgattttcatcaagcagctgatggtatccaggaacaacagagacaag

SEQ ID NO: 20743 - DNA, 90 bp, Homo sapiens
gggcagcctcgggacggggcgccgcggccgggcgggcagcaaggcggggtttcaccatgttgcccagactggtcttgaactcctgagctt

SEQ ID NO: 20744 - DNA, 120 bp, Homo sapiens
gcacctcagagtaaagctgctggacaacaccatggaaatatttgacattgagatcacccggaagttcaggctgaattctgaaggcaaacttgagcagacggtctccatggcaaccacgac

SEQ ID NO: 20745 - DNA, 82 bp, Homo sapiens
ctctcagcacgattttcccgagagttcacaggctgaaggtgatgtggccgccctcaaccgacgcatccagctcgttgaggag

SEQ ID NO: 20746 - DNA, 88 bp, Homo sapiens
gtagaatgtgactacttcgggatggagtttcaaaatactcagtcctactggctcgccatggccaaacagctgcaggcccgaaggctag

SEQ ID NO: 20747 - DNA, 75 bp, Homo sapiens
ctcttctccctccccttcttggctgcctgctgtttcccggggagatcatgaaacgaggtcgccttcccagcagca

SEQ ID NO: 20748 - DNA, 51 bp, Homo sapiens
ctccaaacatgatcgtttactgcaaagtatatttgcttacttaaactacca

SEQ ID NO: 20749 - DNA, 90 bp, Homo sapiens
gtggcagctttgagtgagcgctatgacaaattgaagtccaaggtttacactcgcacaccaaccttatatttggacttcaaattggaccca

SEQ ID NO: 20750 - DNA, 75 bp, Homo sapiens
aatccagtcagactctggcaacttttagggagagaagtcttttttcctccagccaggagagcagctggaacaagg

SEQ ID NO: 20751 - DNA, 50 bp, Homo sapiens
attggatttccctctgtgggtaaggcatgggctgatgcctttcgaagcag

SEQ ID NO: 20752 - DNA, 83 bp, Homo sapiens
tttcggtatcatcgtttcatgccctgccacaatggtgcgcatgaatgtcctggcagatgctctcaagagtatcaacaatgccg

SEQ ID NO: 20753 - DNA, 78 bp, Homo sapiens
aagcctgagccggttcctgttcaaaagagcaaaggcacaacaccacttgctccaccacctaaacctgttcgaagaaga

SEQ ID NO: 20754 - DNA, 126 bp, Homo sapiens
ggaatttccttgtgcctccattcccgggaggggggagcggcgttggaggccaccgtttccaggatttttagactctgaggagcagttggagctaatccacattatggaaatggaaaccaccgaacc

SEQ ID NO: 20755 - DNA, 82 bp, Homo sapiens
gcttgttcgaatgtctgcaagccagttagaagccctctgtcctcagatgtatcctccactcctcgctggccaccatcctgct

SEQ ID NO: 20756 - DNA, 73 bp, Homo sapiens
catcccattcaagccaggcacatttgatggttgcatcagatgatgattattctccaccgtctaagagaccaaa

SEQ ID NO: 20757 - DNA, 98 bp, Homo sapiens
gatgaaacagagtatggctgcagaggatccatctgtcttagcaaggctgtcatcacatacgctgggagcggactcttggagctattgtaagacaaaag

SEQ ID NO: 20758 - DNA, 99 bp, Homo sapiens
ggacatcgtgtccctgtacgcggagggctcggtcaacggcttcatcagcaccttgggtataaaagaacgtgtggatcactttgctgagtacatccaaga

SEQ ID NO: 20759 - DNA, 75 bp, Homo sapiens
agctgtttctcatctttatactcttccagcggagctggagtttgttcagatcatcatcatcgtggtggtgatgat

SEQ ID NO: 20760 - DNA, 83 bp, Homo sapiens
aaattccacaatgaattaaatgcccacataaaactttctaatttgtacaagtactgccaaatctgtcgaaagggagataatga

SEQ ID NO: 20761 - DNA, 73 bp, Homo sapiens
gggatattcccacaaggatgaggagatgaaggaatttagcaaccaggtggtcggccaggtcaacgtggagatg

SEQ ID NO: 20762 - DNA, 100 bp, Homo sapiens
cctttgttgctgctgcacattaggttgcagtatgtggccagttatttgcctcagtaaaagacttaaagaaagtggttattgtacaggtcatgaaccagat

SEQ ID NO: 20763 - DNA, 100 bp, Homo sapiens
caaacgagagtcagcctttaacgaaacttttcagcattacctaagaagcaaaggctcaattttggctgcttcattcttatctcttctgccacagttctaa

SEQ ID NO: 20764 - DNA, 80 bp, Homo sapiens
gcgccaggcagtgggaagtcaggttcttccgccacctcccagccaggacatcgcgttgatggatgaccaccagagggaag

SEQ ID NO: 20765 - DNA, 100 bp, Homo sapiens
tcccaggatggtgatccgtgtatatattgcatcttcctctggctctacagcgaataagaccacagcttgccaaagagaagattgaaggatgccatatttg

SEQ ID NO: 20766 - DNA, 90 bp, Homo sapiens
gccaaattgggcgagggcacaaaataaccacttaccccttctcaccgaggaagagcgggagaaaggacaactgggactggacctggtgcc

SEQ ID NO: 20767 - DNA, 83 bp, Homo sapiens
agaaatctgaaaatgcccctggggagacacatgcacaagacagttttgggatttgagattgacgcggtgaactctgtccagtt

SEQ ID NO: 20768 - DNA, 75 bp, Homo sapiens
cttgttgcgggcaccgcagtcgccgtgaagatggcgtctaccagccggtccagctgggagctccccgacctccag

SEQ ID NO: 20769 - DNA, 80 bp, Homo sapiens
cgggctgggtgaggggcgcccgcctcaagctagagttggaatcgaagcctcttaaaatggcagatgacttggacttcgag

SEQ ID NO: 20770 - DNA, 75 bp, Homo sapiens
cgctccctggcacagcaccccagcgccctgcgcttcctggccgaccatgatctgccgacaccccaggccatcgag

SEQ ID NO: 20771 - DNA, 103 bp, Homo sapiens
taaattgctggcttccatgatgtgcaaagctgggcaagaggattatgacagattacgaccgctgagttatccacaaacagatgtatttctagtctgtttttca

SEQ ID NO: 20772 - DNA, 51 bp, Homo sapiens
ccgaactggcgcaggggccgctgcggcaagtaaatcttgctgctgctcact

SEQ ID NO: 20773 - DNA, 82 bp, Homo sapiens
cggccggtgagattggaagtggcggcggcggcaggcggcagaggggaggttatggaaacaaaggacatgctttacatcgtca

SEQ ID NO: 20774 - DNA, 74 bp, Homo sapiens
gagacgcctatggcaactgtgtcacgggcggctgtgagtgtggaccccttctatgagatgctggcagcgagaaa

SEQ ID NO: 20775 - DNA, 98 bp, Homo sapiens
taggctgcaggcagctcgaggacccgcggccccgccccggctcggcctggcaggtgctgtcagggacactgctcgcagatgcagttacgtggcttttc

SEQ ID NO: 20776 - DNA, 101 bp, Homo sapiens
ggagagcttcatcaaaaatagtgatagctttgataacccctcatatggaaaatttgaaatgcagaggggaaacagtagcaaaggagatcagtgaagccatg

SEQ ID NO: 20777 - DNA, 76 bp, Homo sapiens
gcggaatttgcggctttggcaggaatgtatcctgtcaggtataatgtcagtgaatggcaagaaagttcttcatatg

SEQ ID NO: 20778 - DNA, 75 bp, Homo sapiens
tcatcgaggtcgtcgacgccatcatgaccacggcccagaggtgcaagagggccgcgggtatcccccagggctgga

SEQ ID NO: 20779 - DNA, 75 bp, Homo sapiens
gctgactgcaatccgttcgggagaggctgctgccaaattgaaaagggtcatgatgatgggcagcgcccgagtggc

SEQ ID NO: 20780 - DNA, 83 bp, Homo sapiens
ccggggcatcgagtggaagcgccccacgctgtacccaagaattaaaccaagacaaaggagcttggcctgaaacttccacacag

SEQ ID NO: 20781 - DNA, 97 bp, Homo sapiens
gtgccaggaccatctacaagagccaaatcaagattgcgtttctcaaagtcctacagcttggattagaagaacaagaaagactccacctactatggag

SEQ ID NO: 20782 - DNA, 96 bp, Homo sapiens
ctacaggccaggatggggtgtcagagaaaagggtgcttttgaagatgatgatatcacgcacgttgaaggaagtgtagatcctattcgagatataga

SEQ ID NO: 20783 - DNA, 100 bp, Homo sapiens
acattattgcgcgtggaacggctgcttttggaagatgaatgatttcggaatcaagaatatggaccaggtagcccctgtggctaacagttacagagggaca

SEQ ID NO: 20784 - DNA, 100 bp, Homo sapiens
aatgtttccatctcttcagagatgaaccagccaagagtcgaagctaaaccagaagttcaatctcagccacctcgtgtgcgtgaacaacgacctagagaac

SEQ ID NO: 20785 - DNA, 95 bp, Homo sapiens
gaaatgagtcgcataagaattgcgatttccgtgtaaaagatcttcaatattcaacagactacacttttaagttagtgtgactctggatccagata

SEQ ID NO: 20786 - DNA, 100 bp, Homo sapiens
ctaaaagtagttctgaatgaatgttatttaatggtgccaatgatgttggaggatacctgtgcggaagatccatccaaaagctatgtgaaattacgagact

SEQ ID NO: 20787 - DNA, 75 bp, Homo sapiens
cccctatccagacggctgcccttcaagtaccagtacatcgagtacatgtgtgacatggtggcggaggagcccatc

SEQ ID NO: 20788 - DNA, 100 bp, Homo sapiens
cctcccgtttctggctccgggctgagcttcctggagaagaggaagaataccctctaccatctgctttggtcagggtgccgctcgaggatttaaaagcaac

SEQ ID NO: 20789 - DNA, 82 bp, Homo sapiens
ttgaaggaggccctggcttaggcatgtcctctgcggcccttctcagcattcctggctttgttgagcggctttgcaaactggc

SEQ ID NO: 20790 - DNA, 100 bp, Homo sapiens
accatcccccaatcctctcatcttgtcctacctgaagtatgccattagttcccagaagcgaatgtctgtgacggagggtggcatcaaatacccagagacg

SEQ ID NO: 20791 - DNA, 75 bp, Homo sapiens
ctcggatctgctggacgaggtcttcttcaacagcgaggtggacgagaaagtgatgctggacgagaaccaccacct

SEQ ID NO: 20792 - DNA, 100 bp, Homo sapiens
cgggtctggagtgcgtgggggaccggctgttggcggtgcagagcagagcgggcggaggaccccgggcgcgggcgcggacggcacgcggggcatgaacctg

SEQ ID NO: 20793 - DNA, 101 bp, Homo sapiens
gcggaaacgaccaaagaggccgggcgaccactggagatggctgtgtccgagcccgaggccagcgccgcggtctccaattgagaaacatggcactgtttttc

SEQ ID NO: 20794 - DNA, 88 bp, Homo sapiens
gttaacatgaaggaaattgtcacagataaacaagatgcactggatttcaagaaggacaaagacatcaaggagcacgtgaaacagctag

SEQ ID NO: 20795 - DNA, 75 bp, Homo sapiens
gaatcatccacgcacctgcagctctgctgagagagtgcaagccgtgggctcagtaaacgctctgccactgacctg

SEQ ID NO: 20796 - DNA, 83 bp, Homo sapiens
ggagcatcccaggacctaccagaatctggcttcccagctggcgtgtatgttgtaaagagagttcttcagcttcagcgtcatca

SEQ ID NO: 20797 - DNA, 75 bp, Homo sapiens
acaggaggcagcagacggacatccagggagatacttcaggggattaccggaagattctgctgaagatctgtggtg

SEQ ID NO: 20798 - DNA, 51 bp, Homo sapiens
aagaaagcatactgcgagccctgctacattctggttggtggagaatttgaa

SEQ ID NO: 20799 - DNA, 75 bp, Homo sapiens
tggaagctgatgctgctggacgccactttccggggtgcacagcaagtggagtggttaatgtgttgctaacaactc

SEQ ID NO: 20800 - DNA, 96 bp, Homo sapiens
ggaaggaaatcatgtcaagcgaagccttgaaaaagctgccctgagacggtgtcccgccgaaagatactgggtcgtcaggatggagttttgcaagac

SEQ ID NO: 20801 - DNA, 75 bp, Homo sapiens
ggagcattgtgtaattctaatccagagctggtgagagcggtgactttggagctagccatccaagaaaacaccatg

SEQ ID NO: 20802 - DNA, 153 bp, Homo sapiens
gttggctctcctcgcccctcgttcccttgggaaccgcctgggaactccgccatgtcatccacttcgcccaacctccaggcccgcaatggatgccctgcaactagcaaattcggcttttgccgttgatctgttcaaacaactatgtgaaaagga

SEQ ID NO: 20803 - DNA, 100 bp, Homo sapiens
cctccgagccccttcctgagaagatcccaggtgtggacactgccagcggctgcagccgacttggaatgacctgggagacaaatacaacagcatggaagat

SEQ ID NO: 20804 - DNA, 98 bp, Homo sapiens
gcagtggcgcctaaagtctgagagagggaagtcgcctctgtgctcagcctgctccaagttttcctcagtgaggccttttgctggattggtctgaggaa

SEQ ID NO: 20805 - DNA, 90 bp, Homo sapiens
aatttgctggatttaagcactgctgcactttatgagctcctcccacggttcgtattgtgcactcaggcttggcctgtaacattgaagagg

SEQ ID NO: 20806 - DNA, 100 bp, Homo sapiens
ccactgtctctgctcacagtgccaagggcattcttcttgagcaccgagaaaaagaatttggagacaaagtaaacctactttctgttctggaagctgctaa

SEQ ID NO: 20807 - DNA, 100 bp, Homo sapiens
ggtccttctgcagaggcctgagcaggaggaagagccagcaggccgaacgagagtatgagaagatcaagtcccagctggagggcctggaggagagcgtgcg

SEQ ID NO: 20808 - DNA, 96 bp, Homo sapiens
gcaagacggtgccgagaagcagctgcgaggtccaggtgcaggtacagcagtctccgcaacaggtctcggctcagctctccccacaactcaccgttc

SEQ ID NO: 20809 - DNA, 96 bp, Homo sapiens
gaagccggagctagtggaagaactggggcagcacctactccgtgtcagtggtggagaccgactacgaccagtacgcgctgctgtacagccagggca

SEQ ID NO: 20810 - DNA, 50 bp, Homo sapiens
gagcacttcagaaaacctgtgaaatattctcaccttcagctggcacaaca

SEQ ID NO: 20811 - DNA, 100 bp, Homo sapiens
ggaggcggtgcgggacatccgcagatgcgtagcatttgctgcatgggttaattgagaatagaaatttgcccctggcaaatgcacacacctcatgctagcc

SEQ ID NO: 20812 - DNA, 98 bp, Homo sapiens
tgcacgcgctggctccgggtgacagccgcgcgcctcggccaggagaactacgatgacccgcacaaaacccctgcctccccagttgtccacatcagggg

SEQ ID NO: 20813 - DNA, 80 bp, Homo sapiens
ctctcttcgctctttgcatcttaactgcagattgtcactgctgttccaagggcacacgcagagggatttggaattcctgg

SEQ ID NO: 20814 - DNA, 74 bp, Homo sapiens
cagaaaatggaccaggccgagtaccaggccaagtttgatgaaggccggaacaactttgaaggggaggtcaccaa

SEQ ID NO: 20815 - DNA, 100 bp, Homo sapiens
cagagactttgtgccatcctctgctatattatcctgaagagtgcctggctcatgctagatacactgtcagatcctttggcatccggagaaatgaaaagat

SEQ ID NO: 20816 - DNA, 83 bp, Homo sapiens
aactgcgcagcctcttcgagcgccgcggacgcgtcatcgagtgtgacgtggtgaaaggagtggagtcaacatatcaatggagc

SEQ ID NO: 20817 - DNA, 100 bp, Homo sapiens
aagtcccgtcttatgggacttgaggccctcaaggatggaacaaaattcatctgtattggggctctgtattctgaacttctggctgtcagcagtaaaggag

SEQ ID NO: 20818 - DNA, 75 bp, Homo sapiens
agccaccgattttgctatgtctctgagctgcgaggagtggagtcaacatatcaatggagcaagtcacagtcgtcg

SEQ ID NO: 20819 - DNA, 75 bp, Homo sapiens
cctcgctagtagctgggattacagtggcaacatgaagatctacttatcaatagaccacaagccatgtcagtcaca

SEQ ID NO: 20820 - DNA, 74 bp, Homo sapiens
gcagcgtctccttcccgttctccagggatctgctggaggaaggaaaggccacggttccctgcctggcagaaaaa

SEQ ID NO: 20821 - DNA, 75 bp, Homo sapiens
tgctgcctccaaaccaatgcaccatcaccaaccaagtctcctctcggaagagccatccagaaatgggcttggtga

SEQ ID NO: 20822 - DNA, 100 bp, Homo sapiens
cgggactagtggaccagctggtgaaggcagacagcgagtggcgacgatgtagaaaatctggtgtattaactgtgaaaattttagagctgcatgaggaatg

SEQ ID NO: 20823 - DNA, 75 bp, Homo sapiens
aatggcacttgagttccaagctggaagcacaggctggttttaacctacgcaaagttaacaaacacataaagtttc

SEQ ID NO: 20824 - DNA, 75 bp, Homo sapiens
gcggcggaggctttggcagctcgggactgagtgcaaggtgttctttgcagaagatgtgggttcaaacaaaggtgc

SEQ ID NO: 20825 - DNA, 106 bp, Homo sapiens
cctattttgatggacttagtgagactattcttgctgtggggcttgtgaagccaaaagcaggtgtgagagggtccagcagaaggaaacatggctgccaaagtgtttg

SEQ ID NO: 20826 - DNA, 87 bp, Homo sapiens
gcagacttgaaagtcttgtgtaatgaagcagaagctgctgaacaattgggaaagaatgttaagttagtggagcgtttggtggaatgg

SEQ ID NO: 20827 - DNA, 100 bp, Homo sapiens
gcagttcaacttcagaacctcctgaaccagatgacctggtcaagagaaagaagcatgccattcatagtagtgacacaacttcttctgatgaggaacgctt

SEQ ID NO: 20828 - DNA, 122 bp, Homo sapiens
cagaaagcggcttatcgaacagagccgggagttcaagaagaacactccagagatggcccctgagttctgcagcctcgaggaaggcctgccctatctggacatggtgattgcagagacgctga

SEQ ID NO: 20829 - DNA, 96 bp, Homo sapiens
tggacattcgacagtacttggctgtctggattgaagaccagaactggcctctcttctgtggaaactctgaagccgaccagttgggcaaaatctttg

SEQ ID NO: 20830 - DNA, 99 bp, Homo sapiens
attcaggagaaggaccctacagatggagggaatgcaggaaagctaagaagaatcacacctcattgcaggcaagaaacctattggaattcgagacttaat

SEQ ID NO: 20831 - DNA, 100 bp, Homo sapiens
agggactcctctccgtctccctggaccgctgtgtaggcacctgagttaacggacgctaagcggggtaggggaagaatgccagaggattcaacatgagcat

SEQ ID NO: 20832 - DNA, 100 bp, Homo sapiens
gcgggggaggcgccgggaagtcgacggcgccggcggctcctgcacaggaagtcctggagaacctgaaggaccgctggtaccaggcggacagcccccctgc

SEQ ID NO: 20833 - DNA, 75 bp, Homo sapiens
cctttgtatggagaagaccccataacgtttgcaccatttaaaatttcttgtatctggcagtgtggtggggttctg

SEQ ID NO: 20834 - DNA, 91 bp, Homo sapiens
gtggcgtccggcgctgccaggatccgcggggagaccttgggcatcatcggacttggtgagaagccctaccactgcaactgggacggctgcg

SEQ ID NO: 20835 - DNA, 105 bp, Homo sapiens
cggggtcacttagactaccccaggaacccgcgccgcgagggctccttccctcagagtgaagacatttccacctggacacctgaccatgtgcctgccctgagcagc

SEQ ID NO: 20836 - DNA, 104 bp, Homo sapiens
acagctcccagcgtgagcgacgcagaagacgggtgatttctgcatttccatctgaggtttgctgggatgggaaacctgctcaaagtccttaccagggaaattga

SEQ ID NO: 20837 - DNA, 96 bp, Homo sapiens
tcagcctccgaagtagctgggattacaggtgctgcgggaacccctggagccggccgctctccagcgtgagcttccccgtgaggtggaccaggtaca

SEQ ID NO: 20838 - DNA, 71 bp, Homo sapiens
caaggtcggcagagcaaggggcttacgcagaaggacctggccacggcgcaccacgaggtctgccccaagtt

SEQ ID NO: 20839 - DNA, 100 bp, Homo sapiens
tggggttggtgtgattagcttcgcagtctggaaagctttaggagttcacagtgaggaacgatgatgaatgtcgggcatttgtgaagagagtcataatgag

SEQ ID NO: 20840 - DNA, 96 bp, Homo sapiens
gaaggaggtcatgcaggaggtggcacagctcagccagtttgatgaagaactttataagaatgctgaccccctgaaggtgtacccgccactgaaggg

SEQ ID NO: 20841 - DNA, 100 bp, Homo sapiens
gtcccccgcttggcttccagcgccgcttgcgctccggagcgctggctctgctggcgctgaggttgcagatatcaagaaagtcaacaacttcatcagagaa

SEQ ID NO: 20842 - DNA, 82 bp, Homo sapiens
gcggatcgggtggagtgtaggtcatatcgccgcggtctcggcgcggaagatggccggcggcgtggacggccccatcgggatc

SEQ ID NO: 20843 - DNA, 75 bp, Homo sapiens
tgagaaactgtggagctttaccaaaaaggcctcgcacattcagttggacagggttacacatcattttggaatgac

SEQ ID NO: 20844 - DNA, 100 bp, Homo sapiens
tgatgaagatgccggccagtggatgatgaggagcgggaaggcctcctgcaccctggagaccgtgtgggaagacaagcacaagtatgaggaggccgagcgg

SEQ ID NO: 20845 - DNA, 80 bp, Homo sapiens
gaactgtggaagcctgtcccgttgtcagagtggaaggcgcagttgtgtagcagttgagtaatgctggttagctgttaagg

SEQ ID NO: 20846 - DNA, 75 bp, Homo sapiens
gtttaggtctcaaggcaagcctattgagttaacacctctgccgctgctaaaagggggaaatttgcagtggtgaga

SEQ ID NO: 20847 - DNA, 75 bp, Homo sapiens
agctggatcccgagaatactggaacaatagagctcgaccttatctctacaaagacccgtatagttttgggaggac

SEQ ID NO: 20848 - DNA, 74 bp, Homo sapiens
gcaatgagcggttccggtgtccggaggcgctgttccagccttccttcctgggcacagttggcgggcagctccca

SEQ ID NO: 20849 - DNA, 100 bp, Homo sapiens
cctggctttcgtattcgttgttctcggcgggctgtggggcctccgcgccgcggccgttagtcatgtcgggatatcacgcagcagcacctctgtgaccccc

SEQ ID NO: 20850 - DNA, 75 bp, Homo sapiens
ctctatggtgtatataaagtacatgggaattatggtcgagttttcagtgatgttgcacctgtaaccatcttttta

SEQ ID NO: 20851 - DNA, 76 bp, Homo sapiens
gtaactgctgccatcttctccgcgctatggctgcgttcggccgtcagagaatggatcttggagaatgtctgaaagt

SEQ ID NO: 20852 - DNA, 98 bp, Homo sapiens
tggctgggaccgtgcgcgtgcgcctgggggcaccgctgccgttccgagaaaatggacccaagtggggtcaaagtgctggaaacagcagaggacatcca

SEQ ID NO: 20853 - DNA, 101 bp, Homo sapiens
tcccattcatgtgcctccaggttatatctcacagatcaaatggggagcctgcggccttgtgttggcaggcaatgcagtcattttccttacaattcaagggt

SEQ ID NO: 20854 - DNA, 98 bp, Homo sapiens
tcagttcagtatgaagaaaaatttcagaaccatcacaaactgattccgaagaggctcaatctgtaaatccttctagtgttgatgaaaatattgactct

SEQ ID NO: 20855 - DNA, 73 bp, Homo sapiens
ttcatgtcaaagctttttccaaagatcaggtacctaaaacagatccaggacctgcccccaactggcctccctg

SEQ ID NO: 20856 - DNA, 100 bp, Homo sapiens
gggcgcgcgggtggtggctgtgagccggactcaggcggatcttgacagccttgtccgcgagaagcagcagtccgcggcgtgcggcaggcccaggcagaag

SEQ ID NO: 20857 - DNA, 101 bp, Homo sapiens
ggccgctctgggcgactgtgctggcgctgggggcgctggcgggcgttggcgtaggagcaagacagatcggcttgccaaaggatcagaatgttaccaaaaga

SEQ ID NO: 20858 - DNA, 75 bp, Homo sapiens
gttttaattcatcacacagatgtaaatgataaagtagccaatatttggtgcagcttcaatgtctttctgaagatt

SEQ ID NO: 20859 - DNA, 98 bp, Homo sapiens
ggggtgtgcaaacccgagagaactggttgatgcggatgaaattaaaaggctaggaaagagatttaagaagcttgatttggacaattctggttctttga

SEQ ID NO: 20860 - DNA, 75 bp, Homo sapiens
cagcgaggtgtgcgctgactgcagcgggccggttggtgacaaagttcctgctgatataaggttaacttccatcaa

SEQ ID NO: 20861 - DNA, 83 bp, Homo sapiens
gtggaagacttgcagaaagaacctggaagacagaggctggaggctttatcctgtggataaacgcagagtgaacgagtttgggg

SEQ ID NO: 20862 - DNA, 74 bp, Homo sapiens
ggatttgttaaggattccaagtaactcttatttgggaaaaaatgcatttttcaaagacctaacttcaattcagt

SEQ ID NO: 20863 - DNA, 100 bp, Homo sapiens
gcccgaagtatgggcggcaaggaggacttgatctgggagcttctcaaccaggcccaggaagctgagaagtacaaagctgaagatgagaagcagagggaca

SEQ ID NO: 20864 - DNA, 50 bp, Homo sapiens
cgcgctcgttcccgtcggccggggtctttactcacctggagacctgtggc

SEQ ID NO: 20865 - DNA, 50 bp, Homo sapiens
gcttggagctgacgccgacgggagggaatgcaagaagcccagaagaccag

SEQ ID NO: 20866 - DNA, 100 bp, Homo sapiens
cctggaacagcagcatcattgtcaaagatgtgttcagagcaacattgttttgttgacacaagcatttagaagaaagtttgtgattcctgactttatgtct

SEQ ID NO: 20867 - DNA, 82 bp, Homo sapiens
cccggcccggccgccccgccgcccccgcggccccggccggaggagacaggcgccatgtcagaaccggctggggatgtccgtc

SEQ ID NO: 20868 - DNA, 119 bp, Homo sapiens
ccgacatggagctgttcctcgcgggccgccgggtgctggtcaccggggcaggcaaaggaattgaatgatctggcacgggaccctccagcacagtgttcagcaggtcctgttggagatga

SEQ ID NO: 20869 - DNA, 82 bp, Homo sapiens
ctcagctcgcagcgcatccccgcgcacagagagcggcgggagcccggacgtgctgcagatgctgaagatccaccgcagcgac

SEQ ID NO: 20870 - DNA, 48 bp, Homo sapiens
gtcggacctgcacgagctgtctggtccttggcccttgccagacattag

SEQ ID NO: 20871 - DNA, 96 bp, Homo sapiens
aattgataacaccctgtaacagctgaaacccctgaacagtgcccaagtgttgtctctttgttgtcagagagttacaaccctcatgtgcgctacgga

SEQ ID NO: 20872 - DNA, 50 bp, Homo sapiens
aactgctgcatctgcaacaacagcaggtcagcagcaaggacaagatggag

SEQ ID NO: 20873 - DNA, 98 bp, Homo sapiens
cacgttcatgggcgagggaacagatgagaaacccggcaatgaaaaaatagccaggcaagcagcacaaataaagcttttgagaaaacttcaaaagcagg

SEQ ID NO: 20874 - DNA, 96 bp, Homo sapiens
acctttcaccctgggcaaggagttcaaagaaggacacagctactactacatctaccaatgatgcgagctcagagtcaatagcatccttctctaaac

SEQ ID NO: 20875 - DNA, 82 bp, Homo sapiens
cgcaaccacgagacggccttccaaggaaacatttactagggacaacttttgagtgtcagaccctgtggacacaaagaaaaag

SEQ ID NO: 20876 - DNA, 74 bp, Homo sapiens
aacattccagttttttaagaagggacaaaaggaagggcctgtcccagtcggctttaccctatcgacgcagcgtc

SEQ ID NO: 20877 - DNA, 89 bp, Homo sapiens
cagctttgtggctgccgtcatcaccatcaccttcaatccgctctactggaatgtggtctatgttaacaatgaatgggcaaccagtgttg

SEQ ID NO: 20878 - DNA, 97 bp, Homo sapiens
agaagatcttattcttacagaaccagagcctgaacacactgggaaatgccgtgtcagtggggttgttttggagtcaccttatctctctaagccgaga

SEQ ID NO: 20879 - DNA, 100 bp, Homo sapiens
tctcctctagagctttggaaggctgaatgcactaaacatgaagagcttgaaagcgaagttcaggaagagtgacacgttatgaagaggacatgtactggag

SEQ ID NO: 20880 - DNA, 100 bp, Homo sapiens
aatcattcttgcagcatttcgtgttttgaacgaagaatgtgatcagaactggtacaaggcagagcttaatggaaaagacggcttcattcccaagaactac

SEQ ID NO: 20881 - DNA, 83 bp, Homo sapiens
cactatcagaaagaaatgaacccaccttctccttctaatccccgctgatgttctaatcatgtcagataaagatgatattgaga

SEQ ID NO: 20882 - DNA, 97 bp, Homo sapiens
cgcctgcacaagcgtttccccgcggccttcgcgccccaggcttcgcggggctacatgacatcaggacatggatttgattgacatactttggaggcaa

SEQ ID NO: 20883 - DNA, 90 bp, Homo sapiens
gtcctggatcagtttctttgtcatgtagccaagactggagaaacaattgaatctaacattataagcatttggaataatgggaaaggcatt

SEQ ID NO: 20884 - DNA, 100 bp, Homo sapiens
cgctcccatggcgcacattaccattaaccagtacctgcagcaggtgtcgtgaaaactacccctaaaagccaaaatgggaaaggaaaagactcatatcaac

SEQ ID NO: 20885 - DNA, 75 bp, Homo sapiens
cttcaacagggccctcagatggagcagcgtggagcctatggaggctccagtcatgctgtgggatgagtccagctt

SEQ ID NO: 20886 - DNA, 100 bp, Homo sapiens
ccatttgccagtgatggaccgtgctagtgacctgactgatgccttcgtggaggtatgttatgcataaaagtggataatttacatgataaatgaaaatggc

SEQ ID NO: 20887 - DNA, 75 bp, Homo sapiens
acaacaagcaagcatgcagcttactgcttgaaaggtcatcatcagatttgaaatatttaaagtggatacaaaact

SEQ ID NO: 20888 - DNA, 82 bp, Homo sapiens
aggagatccgtatcagatccgccgacgactgcaagcagtttcgggaggagttcaacggtcatgaaatggctgtgaatttgtc

SEQ ID NO: 20889 - DNA, 51 bp, Homo sapiens
ctcccaaagtgctgggattacaggccaaggcaaggtacttctatagaaggg

SEQ ID NO: 20890 - DNA, 146 bp, Homo sapiens
cggaggcttcgcgggaagacgcggcggcggcggcggaggatgagcctgcagagcgcgcagtacctccggttgaaggggaccagctgcctccaggacacacagtcagtcaatatgaaacctgtaagatcaggaccataaaagctggc

SEQ ID NO: 20891 - DNA, 100 bp, Homo sapiens
caggccaagagggatccttcacccgtgtctgggaacaccagctggctgatgagcctggagaacccgctcagccctttctcctcggacatcaacaacatgc

SEQ ID NO: 20892 - DNA, 98 bp, Homo sapiens
ttccggcgcctccactccgtcccccgcgggtctgctctgtgtgccatggacgggctgaaggggatgctaagggagataaagcaaaggtgaaggacgaa

SEQ ID NO: 20893 - DNA, 83 bp, Homo sapiens
cgccggagaggctgggcggctgccggtgacagcaattctgtggtgttcttggtcacacatttatggagtttctgaagggcagt

SEQ ID NO: 20894 - DNA, 101 bp, Homo sapiens
aaaactacgagcacaacaccagcgtcgtcaagaagatccacattgaggtagtggacaaagcaccacaccccactctggccggagcacgccaagcagctccc

SEQ ID NO: 20895 - DNA, 75 bp, Homo sapiens
cagaccagtattgctactgcttatagagagaagggtgatgaatcagagttggtgatggagttttgtggtgctggc

SEQ ID NO: 20896 - DNA, 100 bp, Homo sapiens
ctttgtttctgtggctaaagagaagaaatactacctccaggcagctgctcccaaccccagaacctttgctgtcttgggacggatcaccgctgcaagaggg

SEQ ID NO: 20897 - DNA, 82 bp, Homo sapiens
tgaggccggacggggcggacggcgacgcagcccgcggcagaaggtcccatacccgcgctgctcatcactgagatcttcctgc

SEQ ID NO: 20898 - DNA, 50 bp, Homo sapiens
gtccgctatccagaacctccactctttcgattgtcactgctgttccaagg

SEQ ID NO: 20899 - DNA, 90 bp, Homo sapiens
tgctgctaaaaacaagactggggctgctcccatcattgatgtggtgcgatcggttaaaaatgtgtctgcaggcacacaggacgtgccttc

SEQ ID NO: 20900 - DNA, 90 bp, Homo sapiens
gcgaggaaaatggcggcgggagtatacgctcaacggcaagaaagtggaagttgccgtcaaacagatcatcgctggaaaagccgtggagca

SEQ ID NO: 20901 - DNA, 75 bp, Homo sapiens
acagacaacagagaaaacttgttgaagagattggctggtcctatacagacccagttcaaaatgtggttcaggtcc

SEQ ID NO: 20902 - DNA, 108 bp, Homo sapiens
gttttgaaatcgacacacaaagaatagagttgagcctgtgggacacttcggccctgggcgctgcctatggcacagccaagagcggtaccggcattgcggccatgtctg

SEQ ID NO: 20903 - DNA, 76 bp, Homo sapiens
aggaggcagtagccaaacacccaggatttaagtgccctgtatgctcaaaatttgtatcctcagatgaaatggattt

SEQ ID NO: 20904 - DNA, 100 bp, Homo sapiens
gccgaaggggcgtctgcggctctccgccgtccccagccctgcctctccctgggctctggtgctactcgtgagcagtagtcgccatccagacagatggatt

SEQ ID NO: 20905 - DNA, 75 bp, Homo sapiens
gagacgacgctgctgggtccgctgagcggggcgacccgagatgtgttcagagcaacattgttttgttgacacaag

SEQ ID NO: 20906 - DNA, 82 bp, Homo sapiens
gataaataacagtttatctgagttgagaagacttgtgccaactgcttttgaaaaacaactgtgcggtcagagaagaaacgcc

SEQ ID NO: 20907 - DNA, 50 bp, Homo sapiens
aggtcgtattgaatggtgttgtagatggcagaagattttttcatttaatg

SEQ ID NO: 20908 - DNA, 90 bp, Homo sapiens
tttcccccttggaggcttccagaggaattgactactatgacaggaacctggcactgtttgagctgtctgagtggtggctcaagaccgcct

SEQ ID NO: 20909 - DNA, 83 bp, Homo sapiens
ccgccggcagcgcgacaggaacccctccgagacccagtccaaaagttatcctcctggattccaaagcctcccaggccgagctg

SEQ ID NO: 20910 - DNA, 83 bp, Homo sapiens
catatttgagtcatttccttcgtacccacagtgcttcatgagagcaccagcagacgtttttgaatcaactgagagaaattacg

SEQ ID NO: 20911 - DNA, 82 bp, Homo sapiens
gcatttccagcccgcccacccagagtaatcaagtcagaggattatatgacttttatctgcctagagaagaactatggatcta

SEQ ID NO: 20912 - DNA, 100 bp, Homo sapiens
cagcaacagatagcagtggacacatccaacgaacatgcacctgcatattcttaccaacagtctaagtttaactatagatcaacacatcatcttgcatctc

SEQ ID NO: 20913 - DNA, 88 bp, Homo sapiens
cttgtgagaagttgggctatcaatggaagaaaagttgtatgaatcaggggttcatgtgggatgtggctgaggaactgaaagctatgtt

SEQ ID NO: 20914 - DNA, 100 bp, Homo sapiens
gacctgcatgtactgggggattcgcagggaggatgtcgggacaccccggaagctgggaaatgaaccgggcggcccgagtacgcgtaagcaagggggacaa

SEQ ID NO: 20915 - DNA, 75 bp, Homo sapiens
ggaacaggaggaaaccattcagaggtttctctggaaacccccctggtaagtgtggaggaggcgggacactctgac

SEQ ID NO: 20916 - DNA, 90 bp, Homo sapiens
aggacaaaggacatcaaggaaggcattcctctgcctaccaagattttagtgaagcctggccaagcaccgaatagggacaaagaggcaccg

SEQ ID NO: 20917 - DNA, 90 bp, Homo sapiens
agataaactttcaactcctttgagtagataccaagcagagcaactattggattgtattgacgcagccgtagacaccagctccgaaatcac

SEQ ID NO: 20918 - DNA, 85 bp, Homo sapiens
aaaatcagaaattaagattctaagcataggcggaggtgcaggattgaaatgtcaaaagatgcacttcctgagaaggcctgtcagt

SEQ ID NO: 20919 - DNA, 81 bp, Homo sapiens
ggaatatgccaaggaaaaactggagagcttcatcaaaaatagtgatagctttgataagtgtggagagagtatgctctgtgt

SEQ ID NO: 20920 - DNA, 100 bp, Homo sapiens
cagcacccaactcccgccctccctcaccgccaaggtcctgcttcaccgaacagcacctcaggagcagggctctgccagcagacagccttggcacacaggc

SEQ ID NO: 20921 - DNA, 100 bp, Homo sapiens
caagtgtgaaggaaaatactatgaagtacatggaaacacttaagaataaactgtgcaggagggtgcatctgcccggaagactcagactcctgcagcccag

SEQ ID NO: 20922 - DNA, 73 bp, Homo sapiens
tataatgggtatggaggaggacctggaggtggctatggaggcttttacaacagtgatggatatggaggaaatt

SEQ ID NO: 20923 - DNA, 82 bp, Homo sapiens
atcgtggcctctcgagagcaagggccggtgcataaacttctcccgagttccatctcagtaaaagggaagcaggaagaccaag

SEQ ID NO: 20924 - DNA, 89 bp, Homo sapiens
gtgcgggccatcaagtgctgtttgtatgcacgacttgaagacacgcacttatcattcagtggatatttggagttcttacaacatggcag

SEQ ID NO: 20925 - DNA, 82 bp, Homo sapiens
gctgatttagaaggaggttcaggctacggtgagccgaaggttggtttcatcgactacattgtccatccattgtgggagacat

SEQ ID NO: 20926 - DNA, 100 bp, Homo sapiens
gacctcagatgctcccttctgctcctgcggggatctgatgagcttctttcttctggcatcattaacggaccttttaccatgaatagttctactccttcta

SEQ ID NO: 20927 - DNA, 75 bp, Homo sapiens
gttgaatttaagaatatttttgggacgccggaatttgttgatttgattagaactatccgggacccagaaaagccc

SEQ ID NO: 20928 - DNA, 75 bp, Homo sapiens
cgagaggtgcggcgaaggaggcagaggcacttatgcttgtcagggttctgagcaaggttcaaccagtcaagaaca

SEQ ID NO: 20929 - DNA, 71 bp, Homo sapiens
gccaggaagcccccctggtgctctacaggcctgtgggcgaccagtggcagtagagacgggggttcaccatg

SEQ ID NO: 20930 - DNA, 100 bp, Homo sapiens
tcaacacattcactgacaaactctcacgctcacaccgggtcatctgattcaaaagctgatgaagcattgaaagccaaagaaagaaatgaggaagaagcaa

SEQ ID NO: 20931 - DNA, 100 bp, Homo sapiens
ctggacagaagctctgagtccacacttggcccccaggcgctggagctgtctaccctgatgggagagtctgcatttccatcctccacgcgccaggcgatga

SEQ ID NO: 20932 - DNA, 100 bp, Homo sapiens
ggaaaagctcaataacttgcatgtccagagagcagacatgaaccgcctcatcatgaactacctggtcacagaactcagcctcctcccaagctccctgtgg

SEQ ID NO: 20933 - DNA, 82 bp, Homo sapiens
aacccgccaccacctccgagggaggagccacgtcgccgacctcgccttgctaaccttgccgcgggccgagccctgcctcgcc

SEQ ID NO: 20934 - DNA, 98 bp, Homo sapiens
tcggacctaggtcgcggcgacatggtgtagacggggcactgccttcagagcaggtcctgccagcctcgctggagaggatgccctcgtgtccgtgatgg

SEQ ID NO: 20935 - DNA, 100 bp, Homo sapiens
gtccgacgcctggggcgatggatccgtttacggagggatcgcttacacctgagacgaactacagaacagcacgtaccagaggtggaagtccaagtcaaac

SEQ ID NO: 20936 - DNA, 104 bp, Homo sapiens
gagtggacggcagagttttcaagctgtgacagatgatctagtgaaaagccatttgatgtatgcggtcagagaagaagtggaggtcctcaaagagcaaatcaaag

SEQ ID NO: 20937 - DNA, 80 bp, Homo sapiens
agcccgtgccgcgagcgcggcctgcaggagccctgctggtttaccgtgtcttcaggaacgaagctaaacgcaccaccaag

SEQ ID NO: 20938 - DNA, 89 bp, Homo sapiens
cgaacttcaaaggggaaagcaaggccaaagacagggagaagttttctggatatgccgcagaaggatccgtgccagaagcaagcctgtga

SEQ ID NO: 20939 - DNA, 100 bp, Homo sapiens
ccacgactgcctgggacctggccaagggctccacacaccaagaccaagtccacaggtcctggctaccctgggaagagacaagaagtaaatgaagaaagag

SEQ ID NO: 20940 - DNA, 87 bp, Homo sapiens
gtccatgcggaagatcgtcgccacctggatgctggaggttgacatcatggacatatgtgagtccatcctggagaggaagcggcatga

SEQ ID NO: 20941 - DNA, 75 bp, Homo sapiens
gagtcagatgtcaggatggtggctgacgaatgcctcaacaaagttatcaaaggagagctggtgacggcctccaag

SEQ ID NO: 20942 - DNA, 100 bp, Homo sapiens
ggcagcggcctgcacaccaagggcgcccttcccctggatacggtcactttctacaagtttggatttaggtggcgagtagaaaaagaagtaatttcaggaa

SEQ ID NO: 20943 - DNA, 83 bp, Homo sapiens
ggacgctcgcacccgcttcgcagacaggcgcacgcagtggagagcctgcctgctccgcttcagcggactctcgctggtctacc

SEQ ID NO: 20944 - DNA, 98 bp, Homo sapiens
agaggtccgggcttggagttcgcctcagacgcggtggagccgccggagtctgagaaggctggaggctcccaggtgattttcacaaatcctttagaaat

SEQ ID NO: 20945 - DNA, 96 bp, Homo sapiens
ggtggaatatttgaagtttgctggaatgcagcaggagacaaagttggagccagtgcatcagatggttcagaagttggtgaaccatctaaagaagag

SEQ ID NO: 20946 - DNA, 75 bp, Homo sapiens
ggattcatacgacccctatgacttcagtgacacagaggaggaaatgcctcaagacccccccaagacacatatgac

SEQ ID NO: 20947 - DNA, 83 bp, Homo sapiens
tccagccctcactcggaaccgcacatgagttttgatcatcctgagaaaaatgggccttggcctgcagacccaataaaccttcc

SEQ ID NO: 20948 - DNA, 100 bp, Homo sapiens
ccaaagcaagtgcttctttaaatggggacagtcattttgtttactcattcagccctgttgcaggtcccaataaactcttcataaggttgacagaagcacc

SEQ ID NO: 20949 - DNA, 74 bp, Homo sapiens
cgcctttgatcgtcttcctcttcagccatccagtatgctcaggcttcagaagaggctcgcctctagtgtcctcc

SEQ ID NO: 20950 - DNA, 100 bp, Homo sapiens
tccccggagaactctaccctggaggagattctggggcagtatcaacggagtctccgggatctcccagctgatgacagagagtagccgggagggactaaca

SEQ ID NO: 20951 - DNA, 100 bp, Homo sapiens
ttaaagaaagatttgaagcactacaaacaagcagctgaaaatctcctgcaaagaagctgagccatgcaattagtaaatctttggggtgtgtacccacgag

SEQ ID NO: 20952 - DNA, 98 bp, Homo sapiens
gagaccccgaaaacggaagcgcagggagaaggaagaggtgtttgaaaaggtcccctcttgctgttggctgcacatcaggaaggctgtgatgggaatga

SEQ ID NO: 20953 - DNA, 87 bp, Homo sapiens
gcggccagagggaggtggtggccgactccgtgtgggtggacgtcaaggactcctgcgtgggctcggacatcaaggacgccctgcgca

SEQ ID NO: 20954 - DNA, 90 bp, Homo sapiens
aaggattccaagtaactcttatttgagtggtgcacgtatcaacatctcagaagggaattgtcctgagagaattatcactttggctggacc

SEQ ID NO: 20955 - DNA, 90 bp, Homo sapiens
cacgctgctggcagagctgcggctgctgagctctgcctgcagttgaacacaaagacctggaggagactcccacctccttcagggagaaga

SEQ ID NO: 20956 - DNA, 51 bp, Homo sapiens
aacagacattcaacatgattgcatttgaaaagagaatgaaccctctcaggc

SEQ ID NO: 20957 - DNA, 102 bp, Homo sapiens
gacgcggcggcggcggcggaggatgagcctgcagagcgcgcagtacctccggaaaatgtttataggaggccttagctgggacactacaaagaaagatctgaa

SEQ ID NO: 20958 - DNA, 87 bp, Homo sapiens
tccttcagccaaagaaacaagccgtggaataggtgtatcaagtaatggtgcaaagcctgaatcctcactgggctttgtggccctcgt

SEQ ID NO: 20959 - DNA, 104 bp, Homo sapiens
tgcatttatgtacccaccaaatccatggagagaaatttctggtgaagcaagattaccttatgctggctactttggatgagaatgaggaagtgatagatggaggc

SEQ ID NO: 20960 - DNA, 83 bp, Homo sapiens
aatgcggtggcatcgacaaaagaaccattgaaaaatttgagaaggaggctgctgagagtgatggaccagcacaaacttaccag

SEQ ID NO: 20961 - DNA, 100 bp, Homo sapiens
tttggtgccctcaacatctctcagagacgaaaggttggaaaagagactgttcaaaccactgaggatcagattttgaagagagatatgccaccagcattta

SEQ ID NO: 20962 - DNA, 82 bp, Homo sapiens
aagctactactacgtggtgcttggaaagcacatcatgcagcgaattcagaggcttcaggctgactgggtcttggaaatagac

SEQ ID NO: 20963 - DNA, 73 bp, Homo sapiens
cagccttcagcagtcggctacgaaacagcagcggaagtagccgggaattgaatgatctggcacgggaccctcc

SEQ ID NO: 20964 - DNA, 101 bp, Homo sapiens
ggggacaggcatcgtggggatcttggcagcgctgcagggatgccaaagaagaccatgaaagaacacatcaaatggtcttactgagaaagctttgtctgcca

SEQ ID NO: 20965 - DNA, 100 bp, Homo sapiens
aatggacatccccaaaattgacatctatcattatgaattggatatcaagccagagaagtgcccgaggagagttaacagggtgagcagggcagcatttcct

SEQ ID NO: 20966 - DNA, 75 bp, Homo sapiens
cagccgtgaagcaagtgcagatagatggccttagtggagactgctgcacggactctggaaccatgaacatatttg

SEQ ID NO: 20967 - DNA, 100 bp, Homo sapiens
gcaattgtgatgagatattctgctgagtggaaggatgaatctcctccgaaacaacagctgcctctccaaaatgaagaattccatggcttccatgtctcag

SEQ ID NO: 20968 - DNA, 100 bp, Homo sapiens
tcttctcttccctcgggtgacttgaggatacaatgtctctttgctatatgaccttgaaaatcttccggcatccaaggattccattgtgcatcaagctggc

SEQ ID NO: 20969 - DNA, 100 bp, Homo sapiens
ggagtggggaagacctgcgtcctttttcgtttttcggatgatgccttcaatactacctttatttccaccataggctgtggatctttccattgatgagtcc

SEQ ID NO: 20970 - DNA, 98 bp, Homo sapiens
tggccatgttcatgggcctcaaccttatgacacggatcctctacaccttgggatctcatagatcagaacatactggagcctgtaacccgtgcacagag

SEQ ID NO: 20971 - DNA, 98 bp, Homo sapiens
ttcatttctgattacgttgacacttaccatgctgctgcccttagaacatccatgatagcagtcttctgtaaatcgaacttttcaagaattctctgaag

SEQ ID NO: 20972 - DNA, 90 bp, Homo sapiens
cagcaagaagcaccgcacgtggttcttctcggcctcctccgaggaggagcgcaagatcaagctgtgggacctgaggaccacgaagtgcgt

SEQ ID NO: 20973 - DNA, 98 bp, Homo sapiens
ccaaatgggggagtgagaggccatagctgtctggcatgggcctctccaccgtgcctgacctgctgctgccactgggattgtgtgcacactctgcattc

SEQ ID NO: 20974 - DNA, 90 bp, Homo sapiens
gaaaagctggcccgtgacctgaaggctgtcaagtatgtggagtgttctgcacttacacaggatcagttcttaagagcagccccggtaact

SEQ ID NO: 20975 - DNA, 90 bp, Homo sapiens
ctggttgttccgttgcgagctgcagctgcgatctctgtggtaggcccaggggaacttcaacatggagttacttttgatccctcagtttta

SEQ ID NO: 20976 - DNA, 75 bp, Homo sapiens
tatgcttccatgagcatttttagttgactggattgttgctgacatcttggccatcaggcagaatgcgctaggaca

SEQ ID NO: 20977 - DNA, 80 bp, Homo sapiens
ctgcaagcaggcaacctgaatacagcccactttccctgtaggtcccgcgatagggacaaatacggctattagctttgctc

SEQ ID NO: 20978 - DNA, 100 bp, Homo sapiens
acttcctatggaggccctgtctgcaatgatcgctgaccccgcactacatctacccaccagccatcgtgcagcccagcgtggtgatcccagccgcccctgt

SEQ ID NO: 20979 - DNA, 98 bp, Homo sapiens
ttggttacagtcaaaaccccagcgtttgcagaatctgtcacagagggagatgtcaggtgggagaaaggctggctataagaaaaaattatggaaaaaga

SEQ ID NO: 20980 - DNA, 90 bp, Homo sapiens
caaaaatgacatcaacattctgaaatgtggcagtattcggcttggagaaaagtggagttcaagagtttttaagaatgtggcagtgatccc

SEQ ID NO: 20981 - DNA, 80 bp, Homo sapiens
gggttgggagagcgcgttggtggcgacggccgagtcagtctgatgacagtaaaacttctgtgagggatcgctttaatgca

SEQ ID NO: 20982 - DNA, 100 bp, Homo sapiens
cggcagggcagccagcccgcacctgtcagggggaaatttgcagtggtgagaaaatgtataaagaaagattctgggaaagaatttgctgcaaagttcatga

SEQ ID NO: 20983 - DNA, 100 bp, Homo sapiens
aggttgctatggtgacagactatggggcctttatcaaaatcccaggctgtcggaagcaagggaggtggggaagacagggctccagctaccacaggacggg

SEQ ID NO: 20984 - DNA, 75 bp, Homo sapiens
atcaccatgggccgggatcacattctgattgtgctctgtggatgtgtatagttttaaacccccactgcaagttgg

SEQ ID NO: 20985 - DNA, 96 bp, Homo sapiens
acaatcactttgccatgaactccatgcactggcctgtgtttgtggaggtgaaagaccttttgacattggtgccgcccctggtgggcctgaagggga

SEQ ID NO: 20986 - DNA, 98 bp, Homo sapiens
acgtcttcactcacgtgctctactacatgtacagcgaccacactgaggtgaccctggcaaagatgagagtgcacatttcgtcctgcctgaaggtccag

SEQ ID NO: 20987 - DNA, 82 bp, Homo sapiens
acggggcgagcctggaggattgtcactccaacctcttttcgctgatcctggtgtatagcctggaagcaggacgccgcctctt

SEQ ID NO: 20988 - DNA, 98 bp, Homo sapiens
gctcctaagtctacccaggaactgaccctgctctctcctttccctgttagacatggtttcataggcgcaacaggaactttgggacaagtggattcttc

SEQ ID NO: 20989 - DNA, 75 bp, Homo sapiens
agcacctgccgcgtggcggggctgtggagcggccgctgaccccgggtatggacctgtctgccaatcaggacgagg

SEQ ID NO: 20990 - DNA, 50 bp, Homo sapiens
cttccgaaatgttgattgggatatgaggtatgaaggttattgaaaaccgg

SEQ ID NO: 20991 - DNA, 100 bp, Homo sapiens
gaggaggcgagctagccgggagttacaccgccaccgccaggctctgacgcccgctctgcggcttcggtgtttgaacaggccacagtccaggagcgcttac

SEQ ID NO: 20992 - DNA, 98 bp, Homo sapiens
ggcctggctttctgcgccatcctgcaccgccaccggcccgacctcatggtcttgctccgtcgcccagtctggagtgcagtggcaagatctctgctcag

SEQ ID NO: 20993 - DNA, 100 bp, Homo sapiens
gcggcgggggacaagtcggcgccccagagcggacgaggttgtggcagcactgcctgaaggtatgagaccagattctaatctttatggttttccatgggaa

SEQ ID NO: 20994 - DNA, 50 bp, Homo sapiens
ctcctgagtagctgggattgcagcacctgtggaatcctctcaagaggaac

SEQ ID NO: 20995 - DNA, 74 bp, Homo sapiens
gatgtaatgcctggaaagtatacaatgatgctgtggagcatccgagtgtgccagagtctccagaattcgtcagg

SEQ ID NO: 20996 - DNA, 75 bp, Homo sapiens
agcttttggaatctgaacaaggggttgcacagagcattgaggatcaccatcaggaagtgattggtttctgcagag

SEQ ID NO: 20997 - DNA, 82 bp, Homo sapiens
ccaacatggcggaacgcaggagacacaagaagcggatccagatgatatcatcaagttgaatcgaaaggaagggaagaagcag

SEQ ID NO: 20998 - DNA, 100 bp, Homo sapiens
ctggagtctgcgaaggccgggacccggttccccggcccacagtgggggtgtgcaaacccgagagaactgggtggtcaagaagaatacgtcttatcttatg

SEQ ID NO: 20999 - DNA, 90 bp, Homo sapiens
gtgggctctgccatcagcaggaagcttggagacatgagaacaccttccaccatgaccacctcagcaagttcccacttaaataaaggcatc

SEQ ID NO: 21000 - DNA, 82 bp, Homo sapiens
agaagcgtgtcgttctgcaccagcgccttgatcgagtacttgaggtgtttccccccgggccggcctgccgtgacgatcacag

SEQ ID NO: 21001 - DNA, 56 bp, Homo sapiens
tctacactcaggacttcacggtgcccgtgagcagcggttccatcgcagtgaacgcc

SEQ ID NO: 21002 - DNA, 75 bp, Homo sapiens
ggcctcccaccaaaaccaagcactgacatgccactcatggatgccagcctgttattgcgctccaggccactatca

SEQ ID NO: 21003 - DNA, 90 bp, Homo sapiens
cgcaccatggagatcttccagctcctgaggaacatgcagaaatacactttcgggaaatggcctctaaatcctggctgaattttttaacct

SEQ ID NO: 21004 - DNA, 97 bp, Homo sapiens
ctggtcaccacagtcaccttcactgggatgatgcgctgcagccagctggcccccagggccctgcaggccatgcggaccctcagttggaagcacaccc

SEQ ID NO: 21005 - DNA, 74 bp, Homo sapiens
atttacctgaatcacatcgagccactgaaaattcaggccacatccacgtcctccgagcctacatcaagacccaa

SEQ ID NO: 21006 - DNA, 74 bp, Homo sapiens
ttccagcccagcagccaggccgggctcaaccaaaagctgaaactggagcacccatcctaactgatgatgttagc

SEQ ID NO: 21007 - DNA, 100 bp, Homo sapiens
agcgtggcctccgccaccgtgcacatccgaatggaagtccaaggcttgcgagaaggtcatttccgtgggtcaaacggtcatcacgaagcatcggaacacc

SEQ ID NO: 21008 - DNA, 75 bp, Homo sapiens
atagtacaatgaggcagccagcggatcttgggatctcatctggccaccgcgttctggaagaggcgagagggagag

SEQ ID NO: 21009 - DNA, 88 bp, Homo sapiens
gagtgaggaaaggaggtactgtagtggatgattcaacagccacacaaagcagcaacattttttggatgcattgggatagataaatttg

SEQ ID NO: 21010 - DNA, 83 bp, Homo sapiens
ctttctggcctggaggctatccagcgcgggaggcagcaccgggctcttgatggacttggcagccaatgaaaaggccgttcatg

SEQ ID NO: 21011 - DNA, 50 bp, Homo sapiens
gcgagcccgaggacatggagatggaagatgctgagccagggaggcggccc

SEQ ID NO: 21012 - DNA, 50 bp, Homo sapiens
taaacatgcaatgaacccaaaagggttgcagaggcagtgttaacatccca

SEQ ID NO: 21013 - DNA, 100 bp, Homo sapiens
agaggttggagatgggaccacatcagtaattattcttgtgtgaagcctcagtttaggtcatctggtggttcagaacactcaacagagggctctgtatcct

SEQ ID NO: 21014 - DNA, 89 bp, Homo sapiens
cgggcactatgtgaatttgggtattctaccttgtaaatactgttatttgtatatactgtaaatgatgacatcggtgggcactaaccgag

SEQ ID NO: 21015 - DNA, 83 bp, Homo sapiens
ctccttcagcctcctggcgcccatccgcagcaaggacgtccgcagcaggttgtgaccgagattcccgacgagagagactgagg

SEQ ID NO: 21016 - DNA, 50 bp, Homo sapiens
ccgggacctcctggaagccaaaaatggtgccacctgactgggagagagca

SEQ ID NO: 21017 - DNA, 85 bp, Homo sapiens
gactaccaacgtttggaccagaaggaactttatattgctgttggaatatctggagccatccaacatttagctgggatgaaagaca

SEQ ID NO: 21018 - DNA, 82 bp, Homo sapiens
caaaaccccagcgtttgcagaatctgtcacagagggagatgtcaggtgggagaaaggaggatgaactctgcgactctgggag

SEQ ID NO: 21019 - DNA, 51 bp, Homo sapiens
gctgggtccagagcattgtccagactggcacttcgtcttagtaacatggcc

SEQ ID NO: 21020 - DNA, 75 bp, Homo sapiens
ccgccatggctgccccgtgtttgctgcggcaaggacgagccggggcgctgaagtacgtcccggaggacctccttc

SEQ ID NO: 21021 - DNA, 100 bp, Homo sapiens
caagcacacccaatggacagcatgcctcaccaagtcacatgacaagcaaagagaagctgaatttggacgacagccagtgggaggacatccacgttgtcac

SEQ ID NO: 21022 - DNA, 100 bp, Homo sapiens
ccaggctacacattctgtcagtgctgttctccaagaggcccagagacatgctgaaacatcgaagcacatggattaattgatgtatgttgagtttatggag

SEQ ID NO: 21023 - DNA, 100 bp, Homo sapiens
aacgaccatgagaaggtggagctcacggcactcaggtatgaaaatgaaagtcttcagaatggaaggaagtcaactgaatttccaagaaaaatacgtgaac

SEQ ID NO: 21024 - DNA, 74 bp, Homo sapiens
tcaagcaaagaagagttgagcacaatcaggctcatgctgaagattcggttatggaccatcatttccggaagcca

SEQ ID NO: 21025 - DNA, 89 bp, Homo sapiens
gtttgacgacactgatggtttgatgttttcaaactgcagtaaacaatcaatctataagaccattgaaagtaaggcccaggagtgttttc

SEQ ID NO: 21026 - DNA, 75 bp, Homo sapiens
gtcccgctcgctgggagagaggtacctctccttttccctctccctttccctaagttttccaagagataacttcac

SEQ ID NO: 21027 - DNA, 98 bp, Homo sapiens
aacaatcatgggaatttccaaggggattcaaacttcaacagaatgtggcaaccagaccacagcaccgggaagtccagtcagcggcagatggtgttcgg

SEQ ID NO: 21028 - DNA, 75 bp, Homo sapiens
ccaactgccactgccgctgccgccgccctccacgctcagattgtcagaagcttcagttctggtaaaagagaaggt

SEQ ID NO: 21029 - DNA, 100 bp, Homo sapiens
atgctattgccctgtcttcatcaacatttaatcacctacaacacagcagtcccctcaggatgagcaggaaaagctcttggatgaagccatacaggctgtg

SEQ ID NO: 21030 - DNA, 96 bp, Homo sapiens
cacttactgggattggtcagatagcgagtttgaatggcagagttcgcagtatgtgcagtgcgtggccgggtgtttgcagctgatgctccgggtcaa

SEQ ID NO: 21031 - DNA, 75 bp, Homo sapiens
ttggactacagaagagcagcttctcgccgtacaaggtttatttatgaaacagagcatcataatggcatagcagag

SEQ ID NO: 21032 - DNA, 100 bp, Homo sapiens
gggtgtcacccttagcggaggacagcgtgcccggattgcccttgctcgtgctgtctaccagtcttgccacttgcctagtgaggcttttccgaacctggaa

SEQ ID NO: 21033 - DNA, 98 bp, Homo sapiens
tgacttcctctttgtgatgggaacttctggaaagaagacaagcccacacttccagaaatttcagatacagatccacgggttttagaaaaacaagaatt

SEQ ID NO: 21034 - DNA, 82 bp, Homo sapiens
ccatgccgctcctaagcctgcacagccgcggcggcagcagcagtgagaggcatgtcgggccccaggcctgtggtgctgagcg

SEQ ID NO: 21035 - DNA, 141 bp, Homo sapiens
acatgatctgctactgggatggctctgctcattatctgatgtacctggtgatggtggcagccatagcatgggagttccaatgattcttgttggtaataagtgtgacttggaagatgaaagagttgtagggaaggaacaagg

SEQ ID NO: 21036 - DNA, 82 bp, Homo sapiens
gttcacgcacgggatccagagcgccgcgcacttcgtcatgttcttcgcgccctgcgtccgtctccaagagagtatgaagaga

SEQ ID NO: 21037 - DNA, 75 bp, Homo sapiens
gccgtggccccgagggcggatccgagaaaatgcatccgatgcagatttatggctcctgaacagttgcactgtaaa

SEQ ID NO: 21038 - DNA, 90 bp, Homo sapiens
ttaaaagagcgaataaagtttatcacgccgggggaattgtgggtaacttggccagcggcaagtctgccctggtgcaccggtacctgacgg

SEQ ID NO: 21039 - DNA, 75 bp, Homo sapiens
aataccacaacaacacattttgcagagtgaatgtggtggaggcacttcaggaattctggcagatgaagcagtccc

SEQ ID NO: 21040 - DNA, 82 bp, Homo sapiens
attcatcatggacgtgatgttggtgtgttcacatttgatcatggcatggttgtggccaagccagtccattttccaccttaac

SEQ ID NO: 21041 - DNA, 83 bp, Homo sapiens
ggcgctctggctgtgctgcgcgacccccgcgcatgaacatccagtcatggataaaaatgagctggttcagaaggccaaactgg

SEQ ID NO: 21042 - DNA, 75 bp, Homo sapiens
aagtgcttggagtgcagaactgaaagagtgccggtggtggtgtgcacattgagccccggtatagacagttccccc

SEQ ID NO: 21043 - DNA, 100 bp, Homo sapiens
atattagcctcacctgcatagcaactggtagaccagagcctacggttacttggagacacatctctcccaaaggtgatgggcagaatctgtttacgaaaga

SEQ ID NO: 21044 - DNA, 88 bp, Homo sapiens
tttatcgtggtggagtccaccctggctgtgagtttattaaccacttaacctctcagaactgaacaaagacaacattgttcctggaacg

SEQ ID NO: 21045 - DNA, 97 bp, Homo sapiens
gatcttcaggaattttactgggataattatccaaataaattgcaagcattctatccaaatggtgtcatggagaaactccagctgggcccagagattc

SEQ ID NO: 21046 - DNA, 75 bp, Homo sapiens
gcaagagaaggcactcaagtttatgattcctgttcatcctgtacccgatcccttagttcatgaagttctaaactt

SEQ ID NO: 21047 - DNA, 100 bp, Homo sapiens
tccgggccagcgagccgatcctcagcgtcctgatgtggggggtgaaccacacggtcatttcttcagatagctccccagctgtggaaaatgagcatcctca

SEQ ID NO: 21048 - DNA, 98 bp, Homo sapiens
ttggtgggatgttacgtggccggaatcattcccttggctgttaatttctcagagatacacattccagttttcctgatggtgaacaaataggccctgaa

SEQ ID NO: 21049 - DNA, 100 bp, Homo sapiens
gccagtgcgggaaagaggagatgcttctggcctggtactgtggcgctccgtgaaattagacgttatcagaagtccactgaacttctgattcgcaaacttc

SEQ ID NO: 21050 - DNA, 106 bp, Homo sapiens
taatcagctgaggccatgtcaggagacggagccacggagcagagcactagacaaactgaatggatttcagttagagaatttcaccttgaaagtagcctatatccct

SEQ ID NO: 21051 - DNA, 97 bp, Homo sapiens
cgtattcttttagtggaccaccagagtataaatcaaagccattctgtgaaaaactgctttcctgggtgaaaagcagtggctgtgccagagtcattgt

SEQ ID NO: 21052 - DNA, 95 bp, Homo sapiens
tcgctgacggcgactgcgggaggccaggagcttgatcctggatagtgtttgtatgatgtgcacacgtctctgcaaatgcttgtttgaagattggc

SEQ ID NO: 21053 - DNA, 50 bp, Homo sapiens
aagagggaagacacgcggaaacaggacatgatccacatcgcggacaccaa

SEQ ID NO: 21054 - DNA, 98 bp, Homo sapiens
atggctaaccatggaaaagtgaaagaaaatgatattgtctttgatccatttgttggaacaggtcacctcaaataccacaaaatgaatgggaagatgaa

SEQ ID NO: 21055 - DNA, 82 bp, Homo sapiens
cttggatctgtggtctctggagctgtggttgctgctgtgatatggaggaagaagagctcagctgaagtcctgagcgaggagc

SEQ ID NO: 21056 - DNA, 51 bp, Homo sapiens
gcggcgcccggatgggcagctgagagttgctttaatgtgaagtattttcct

SEQ ID NO: 21057 - DNA, 100 bp, Homo sapiens
ctggcaggtgcccccgccagcccctgaggtccaaattcggacaccaagggtcaactgtccagagaaagtggagaccctcctgttcttaactgtgggcgat

SEQ ID NO: 21058 - DNA, 50 bp, Homo sapiens
tgatcgttggcggacattttgaagtagtccccaccttagtacaaatgggg

SEQ ID NO: 21059 - DNA, 149 bp, Homo sapiens
ttacagacaagttcattccattattagacgttccctgccagcaacactaccacacgagcccacagcctcggtgccccccgagtcggacgtgtaccggatgctccacgacaatcggaatgagcccacacagcctcgccagtcgggctcct

SEQ ID NO: 21060 - DNA, 51 bp, Homo sapiens
accgcagtcgtgcaggatctgaaggaggtatcagaacaaggtttaatagaa

SEQ ID NO: 21061 - DNA, 128 bp, Homo sapiens
ggcggggaaaatggcggacgggaaggcgggagacgagaagcctgaaaagtcgcagcgagctggagccgccggagatcgcttgacaatatcttattgtcggagtagtggtcctggggggcagaatgtga

SEQ ID NO: 21062 - DNA, 75 bp, Homo sapiens
acgattcagagactgaaaaacctgaggctgatgacccaaaggtccttttggtgtgaaccatggggtggaacttca

SEQ ID NO: 21063 - DNA, 98 bp, Homo sapiens
tggagagcttcatcaaaaatagtgatagctttgataagctacgtgtgccgcctggccattcaaactgtcaattttaggtccagaagtgtccaaaccac

SEQ ID NO: 21064 - DNA, 98 bp, Homo sapiens
acaaggggtgcccgagcggctgctggggacggcggggaccggtatccgttacagcactgatgtgagtgtagatgaagtaaaagctttggcttctctga

SEQ ID NO: 21065 - DNA, 74 bp, Homo sapiens
aagccaccagcgctttggatgccgagagcgagtatctgtgaagtaagaactctgctagagaggaaatggctgct

SEQ ID NO: 21066 - DNA, 82 bp, Homo sapiens
tgcgggcccgctccgacgcggaaggtcttgagtcaccacgtccgaatataattcttgggttagtaatctgccaaaaaatcaa

SEQ ID NO: 21067 - DNA, 74 bp, Homo sapiens
cttgcttgggatcctttatcctggtcatcttctatttccaaaattcatgttacatgtaaagctgtcctcatttg

SEQ ID NO: 21068 - DNA, 88 bp, Homo sapiens
tggcacttcattggccacctacagaaacaaaatgtcaacaaattgatggagaactcaatttcctgtatctactgagtctcaaaaaccc

SEQ ID NO: 21069 - DNA, 49 bp, Homo sapiens
ttatggagccatgggggttggccactatgccatcccgcccactttctac

SEQ ID NO: 21070 - DNA, 75 bp, Homo sapiens
caggcgaacccgcggcgcaataacgcctctacggcagacacatgcaggccaacccagaaccaccgaagaagaata

SEQ ID NO: 21071 - DNA, 110 bp, Homo sapiens
ttttggatcggcatctagtctttccgcttcttgaatttctctctgtaaaggaggtgactctgctaatctaacctgcagagctttctttgggtacagcggagatgtcagtc

SEQ ID NO: 21072 - DNA, 83 bp, Homo sapiens
tccaacagcccagtgcttctgtctcgactgcactttgagaagtttatcatctggacttcaagctgcaggcagttctgtttttc

SEQ ID NO: 21073 - DNA, 100 bp, Homo sapiens
gcgaacagggctgggcctgagcatcgttgggggttcagacacgctgctgttttccttccagcagggtggatggggagcatcgctggctgacaggctggtc

SEQ ID NO: 21074 - DNA, 50 bp, Homo sapiens
ccgaaacgctctgaaaatcgagccggtacaagaaaattccccaggacaca

SEQ ID NO: 21075 - DNA, 75 bp, Homo sapiens
ctgggtgacactcaacaggattcccgttattggagggtggtgaagagaggatggagacaccccaggaagaccacc

SEQ ID NO: 21076 - DNA, 95 bp, Homo sapiens
acgcccctgaggacggttgacggctcccccatgatgaaggcagggccgttgccgtctgcacccagaccctgagccgccgccgccggccatggagg

SEQ ID NO: 21077 - DNA, 83 bp, Homo sapiens
gatgctgccatctttccaggaggctttggagcggctaaaaaccttgcagagcagagcgggcggaggaccccgggcgcgggcgc

SEQ ID NO: 21078 - DNA, 100 bp, Homo sapiens
gcacctgccttcgctcccgcaccggatcctgatggtgaacatgccaggagagcaatgcaaaaggtgatggctacgactggtgggatgggtatgggaccag

SEQ ID NO: 21079 - DNA, 89 bp, Homo sapiens
agtttattttcactgtgcagctgttacaccagctgaactcacgggaatcaaatggcgtaggtacaattttggagggcatggggactgtg

SEQ ID NO: 21080 - DNA, 100 bp, Homo sapiens
ggttataaattatgatctacctaccaatcgtgaaaactatattcacaggcccttctgcgatgttttacctggctgcggctgtgtcagatttctatgttcc

SEQ ID NO: 21081 - DNA, 83 bp, Homo sapiens
ctactactacgtggtgcttggaaagtgaacacctacctcttcatgatgcaagcccaaggcattctgatccgggacaacgtgag

SEQ ID NO: 21082 - DNA, 82 bp, Homo sapiens
caacatctgcaaggtccgcttcaccaggccgccatggcatcagatgaaggcaaactttttgttggagggctgagttttgaca

SEQ ID NO: 21083 - DNA, 97 bp, Homo sapiens
aggccaccagcagcgcgcgcgggagcccggggaacagcggtaaaatgtcggttccaggaccttaccaggcggccactgggccttcctcagcaccatc

SEQ ID NO: 21084 - DNA, 100 bp, Homo sapiens
ccgaagcactcgttccgggggtgaagcctcctgcgccggccttgcctcgggttatgggtgctacatgtgtgctttcagagcagtagtgtgaggaagcttg

SEQ ID NO: 21085 - DNA, 50 bp, Homo sapiens
cgcggatacacattctagatatattaaaggtggtggctgtggccttgaaa

SEQ ID NO: 21086 - DNA, 75 bp, Homo sapiens
caatgcgaatgatcctgaagcctcaaagtttcatggcagtagatcatctaatgcaaaattgccctcagttccaac

SEQ ID NO: 21087 - DNA, 75 bp, Homo sapiens
ccgtccgaggtaattgtctgccacgagtgcacattctgaaaacagctgagtcagtgctgattctctcaaatagag

SEQ ID NO: 21088 - DNA, 50 bp, Homo sapiens
ccaatgtagtgatgaagaatggtatggcgtgagtcccgagaacattatcc

SEQ ID NO: 21089 - DNA, 74 bp, Homo sapiens
tctcttctcgccctggcggggaagaaattccgggtagatatgcctggctcaggcagtgcattcatccccaccat

SEQ ID NO: 21090 - DNA, 117 bp, Homo sapiens
gaggaggttttcaggaccaaaattgtggaaaagtcactctggcgacattgactacagcaccgtgctcctcggcatgctggtgacgcaggacgtgcagctcgggctcttcatggccgt

SEQ ID NO: 21091 - DNA, 90 bp, Homo sapiens
ccccgcgctgctgggtcccgccagacacgccgccgccgcaggcacgtgtggttctcaaatataggcattctgatgggaacttgtgtgtta

SEQ ID NO: 21092 - DNA, 98 bp, Homo sapiens
aagccggaggaggacaacgactaccaccgcagcgacgagcaggagaactacgatgacccgcacaaaacccctgcctccccagttgtccacatcagggg

SEQ ID NO: 21093 - DNA, 100 bp, Homo sapiens
ctcgaagtgcgcaaacttgacactcaccctgaccgcatttgaagacacttcgtcacccttgcttgctaagatttttatcttgtactgtggaagcggatgg

SEQ ID NO: 21094 - DNA, 75 bp, Homo sapiens
ggcacgctctgcataatgacctaaaggtcagagtggtgctgggaacaactgggccaaggggcactacacagaagg

SEQ ID NO: 21095 - DNA, 74 bp, Homo sapiens
cccccgtggatccaggaactggcataggtgcactcagcaacgctcgtttgacagcaagtttgtttaccagcaaa

SEQ ID NO: 21096 - DNA, 75 bp, Homo sapiens
tcgtcatgctctttgtagcgtggtgcttctgttgctcacaggggcccagatcattgatctgatgatgctggtcat

SEQ ID NO: 21097 - DNA, 74 bp, Homo sapiens
gcagatctactactcggacaagtacttcgacgaacactacgagtaccggtcatccatgcctggcttattatatc

SEQ ID NO: 21098 - DNA, 75 bp, Homo sapiens
cgcaatggagggcagatccttatcgccgacctcaggggaaggtgggtgcggctgctatttggacgagagttcccc

SEQ ID NO: 21099 - DNA, 50 bp, Homo sapiens
agtcttgtagatattttaacccaaaggaaagaccacagcaagattctttc

SEQ ID NO: 21100 - DNA, 100 bp, Homo sapiens
cttcgacagaagtggaagtgctgaaaaatgctcatctctcacacagacttttgatggacaggagatatccttggaacagaagatcttattgtggaagtga

SEQ ID NO: 21101 - DNA, 98 bp, Homo sapiens
caagcacacgactcttggtgagcgaggagctctccgagaagcaatgaggaagatgagaatgtgcctactgctcctgatcctccaagtcaacatttacg

SEQ ID NO: 21102 - DNA, 98 bp, Homo sapiens
aaataagtaatgccatctgttttcctaaaagactgaaatgggggcgaccattcttaggcgtttgcaatggctgctactgtgaacttggaacttgatcc

SEQ ID NO: 21103 - DNA, 96 bp, Homo sapiens
caccaatatgccagctgtcaaagccatcatatatcagtatatggaagaggccgtcgctttcgggttctctcatcgcttcgtcgttcgccaatgttt

SEQ ID NO: 21104 - DNA, 100 bp, Homo sapiens
atacgggtacatatgacacagaaggtgtgaccccaacgaagagtggagaacggcaacccatccagatcaccatgccgaagaccatcaaatgaattgtcac

SEQ ID NO: 21105 - DNA, 100 bp, Homo sapiens
aggacaactccaattccctgcaggtgaaaacgtgccacctggtcagggacaacaccttccatccacatatgggacgccatgaccaaacacaccctctcca

SEQ ID NO: 21106 - DNA, 76 bp, Homo sapiens
tgcctacggaggtggcagccatctccttctcgcagaagatgactcaagaccggcctctgcttgccgtgcaggaggc

SEQ ID NO: 21107 - DNA, 75 bp, Homo sapiens
ttggactggaaaactcacacccggtctggacacagaaagagaatttacaggagacatatgaggccaaaaggaacg

SEQ ID NO: 21108 - DNA, 108 bp, Homo sapiens
taaatggcgcagcatgattttgttcctgcttggctaaatttctcaacaccacagtcagctaaggaagctttataagcgatatgcttttctacgttgcgaagaagaaag

SEQ ID NO: 21109 - DNA, 50 bp, Homo sapiens
tcgcctggatgtgagtttcagccagccgagtgtttaagacggatatggag

SEQ ID NO: 21110 - DNA, 100 bp, Homo sapiens
gctagagcctcactcctgtcaatatattcttggggccatgaccttgcctcctttcctggagttcggtgtcccgtccccagcccacctcagagcctggacg

SEQ ID NO: 21111 - DNA, 109 bp, Homo sapiens
cagcaaaaggtcacaaattacattacccaatggtggaatattgtatacctgaagccacagatgatggacataacaacaaccttcttcctcagattattcagtgttttgc

SEQ ID NO: 21112 - DNA, 75 bp, Homo sapiens
aaggatggtttagaaatggaaaaatgtcctcaagttgaagtgttatcagaggaagaaggggaagaagaagaggag

SEQ ID NO: 21113 - DNA, 90 bp, Homo sapiens
gctggatccccaagatcttcaagaagaagacctgcacgacgttcatagttgactccacagatccggggcgcagcccagcctcgaaatgca

SEQ ID NO: 21114 - DNA, 51 bp, Homo sapiens
ttcctggagcacctgcgtgtcagccaggttcaggagaagtggcacctggtg

SEQ ID NO: 21115 - DNA, 94 bp, Homo sapiens
cccagctgcagctgtggctgcagtttgaggctctgaacaagatggctcgcccaagaacgatgacggacacaagactgaacagcctgacgaagag

SEQ ID NO: 21116 - DNA, 74 bp, Homo sapiens
ctcggagaccccgcgccgacggctgctcaaacatcagggaactaccaggttgtttttcaaagcagcggcactat

SEQ ID NO: 21117 - DNA, 100 bp, Homo sapiens
tgccaagaagtgccaggtggagcggcaggaaggccactcacagggcttcaacaagctagctgagggattgtcaatgaggcagatcagattccgatttgac

SEQ ID NO: 21118 - DNA, 50 bp, Homo sapiens
ctcaggcctgtccagccggggcaagaagactcaggatgtgcagaaggcga

SEQ ID NO: 21119 - DNA, 101 bp, Homo sapiens
cactagtctacaaggccagagctttctggaagggggcacctcctgacaaggtgatccgggcgggccccgcaggaattttatcccctcaccggcctcacact

SEQ ID NO: 21120 - DNA, 125 bp, Homo sapiens
cgggagctgggccgcctgaagcagctgctgtcccgggcctaccccctggactccctggagaagcagatggaaaaggatgaccggaaagaagggatgaccgcgtttgtggaaaagagaaaggccaa

SEQ ID NO: 21121 - DNA, 51 bp, Homo sapiens
taagaggggttggctgtgaatgtactccaaagattcaggtttactcacgtc

SEQ ID NO: 21122 - DNA, 76 bp, Homo sapiens
tgataatcaagtgattcactgggaaatagaggataatcagctgtcaccactgactaaagaagagaaaactgcggca

SEQ ID NO: 21123 - DNA, 75 bp, Homo sapiens
gtacgtcagctgccatgccgcattcctccagcgccaagtctattatcctcccagtccacaacgctgaaccgtggc

SEQ ID NO: 21124 - DNA, 98 bp, Homo sapiens
agcgggagctggacggcgagcgcgagcggcgcgagaaagcaaaacaacgagtggatgagaaacccagcctgggagccgtgaagctgcaggaggccccc

SEQ ID NO: 21125 - DNA, 102 bp, Homo sapiens
gttctcaatgcatcatgtcaggcagcttatgatgccaatttgtcccatgatgtgaattggggatcctctacacaagccctgacttacctgaatgcactgcag

SEQ ID NO: 21126 - DNA, 50 bp, Homo sapiens
gccaagaggaagaaggaggaggaagaaggtggtcttctgccctgttaaag

SEQ ID NO: 21127 - DNA, 83 bp, Homo sapiens
caagccgctggcagccgcggatctcaccgccgctcagggatttggaatgccctgacagataattatgggaatgtgatgcctgt

SEQ ID NO: 21128 - DNA, 100 bp, Homo sapiens
gagcgcctcgtcgacatgagtgatgtggaggaaaacaacttcgagggcagagagcttgaagaaatccgcaaatgtgggatgaaaaacttccgtaacatcc

SEQ ID NO: 21129 - DNA, 98 bp, Homo sapiens
ctgatttggagcgtaaaatgttgcagaggatcagctcagctactatttaataaaacaaaatctgtagaattcacgttttgtaatgacactgtcgtcat

SEQ ID NO: 21130 - DNA, 100 bp, Homo sapiens
gctggaccacaaaccgctgccagaaaacaagaactctacatcttcaacattttgtagagcattccctgcgatgtggaaaattctgctgggctattccctg

SEQ ID NO: 21131 - DNA, 100 bp, Homo sapiens
ccgggtgctgctggttagtgtgctctgagggagggtccgagccagccgctgttttgccggaggagcccctcaggccggattaaagcctgtggtttccaca

SEQ ID NO: 21132 - DNA, 74 bp, Homo sapiens
ccgcgctgcgcagccgacgcgggaatgaagcgggcgctgggcagcagatataatttctacagtagaatttaatc

SEQ ID NO: 21133 - DNA, 75 bp, Homo sapiens
tgctcggccgatgaagtgcagaggtttttttctgattctgattttgcaagtctgagatgggctcaagattatgca

SEQ ID NO: 21134 - DNA, 83 bp, Homo sapiens
cgttgcggccatcgccctgccggaccgcgcctcaggctcccccagcacttctcagaacttctggatgagttttcccagaacgt

SEQ ID NO: 21135 - DNA, 98 bp, Homo sapiens
aaaagtttgtcattaaacccatcgacaagaaggcacctgagcacatggatgaagtatgctcctcgcagcttctaacttcagtaaggcgcatggttttg

SEQ ID NO: 21136 - DNA, 75 bp, Homo sapiens
aggagcatgaatggagcaaaatggcggatcatgtgcagatttggagcaagaggtggtggtggccttcccccgaag

SEQ ID NO: 21137 - DNA, 100 bp, Homo sapiens
gtccatagctgaagaggagcgccagatggtggaggaatacacttatttatgaagtttgtaaaagaatggacttggtctgccagagaatgttgaatcaggg

SEQ ID NO: 21138 - DNA, 50 bp, Homo sapiens
agaaggttgggttcagaagagggagggtgcctcagaagaggagatcagac

SEQ ID NO: 21139 - DNA, 96 bp, Homo sapiens
cgcgtccagtggtacccggagggcgtcaagcagcatgtgaaggagaccaagaccaatgatgcgagctcagagtcaatagcatccttctctaaacag

SEQ ID NO: 21140 - DNA, 78 bp, Homo sapiens
gaggctggctgagtccaagcaggcgtttggtatcctgatgtgcagactcgagtgcaggcagaattggatcaggtcgtg

SEQ ID NO: 21141 - DNA, 134 bp, Homo sapiens
cagccgggaaaactcagggtacagtgcagcacctgcaggcaggcaacgctcaccttgacccaggcagagtggctcctcacagcctgaagctcatccttctgcacgggccagccaggccagcacagaggcaccag

SEQ ID NO: 21142 - DNA, 100 bp, Homo sapiens
ctgatctcttttccaaggaagaggtgggagattttattcaacgctaccaggatattgagaaagaatctgagtcagatatttgaatggtggtacttccata

SEQ ID NO: 21143 - DNA, 90 bp, Homo sapiens
gcaaaggcaaaggcggctcgggagattcagccgtgaagcaagtgcagatagatggccttatgttctcagtgcagctgagtcttggtgagc

SEQ ID NO: 21144 - DNA, 98 bp, Homo sapiens
tccgtgagatgggttttagctgccgccggagtcgaggtcagaatggcggcagtggagcatcgtcattcttcaggattgccctactggccctacctcac

SEQ ID NO: 21145 - DNA, 100 bp, Homo sapiens
cacctcatcccctggatgggggaccacaagatcctcatcgacagacccgtgcctgtatattccacgctttgcgcacctgctggaattcggggagaagaac

SEQ ID NO: 21146 - DNA, 76 bp, Homo sapiens
caaaacatcactgtaattcttgctgtagaaagcttaaacttccaggggccacctacagatgctcctgcagtggaca

SEQ ID NO: 21147 - DNA, 103 bp, Homo sapiens
ggaagctgagggcacgtgtttgcggttcagccctttgatgaccgcagcaggacagagcgggatgccaccagcttgtccaaagggaagttccaggagctcctgg

SEQ ID NO: 21148 - DNA, 100 bp, Homo sapiens
ggagttcttacaacatggcagacattgacaattcctctgtgacgagggtgcaggtatctctggggactacatcgatcgcgtggacgagcccttgtcctgc

SEQ ID NO: 21149 - DNA, 102 bp, Homo sapiens
aaggaacgaggcaaggagctaaagcagcgtgcgttcagccctgggtttgctggcctagacctgaactcttcagataatcagagtggaggaagtacagccagc

SEQ ID NO: 21150 - DNA, 98 bp, Homo sapiens
tcatacctgctgatgtggggactgctcacgttcatcatggtgcctggctgccaggcagatgtgtcaccggtggtggccggcctcatcggggcctctgt

SEQ ID NO: 21151 - DNA, 85 bp, Homo sapiens
cggtctgggagttgggggcaaggagaagatcctggccaaaggtgtccaaactatacagacccacagaatctaacaacagatgtct

SEQ ID NO: 21152 - DNA, 89 bp, Homo sapiens
ctttgtggtagagaagaagctcttcatgtgtgtgaccgatgtcggcagaaaactcgaagtaccaaaaagttgacagtacaaagattccc

SEQ ID NO: 21153 - DNA, 75 bp, Homo sapiens
ctgggctacggactatgggcgaatagctctgaccacccggcgaagggccgtctggcttgcctgtgttcagcccac

SEQ ID NO: 21154 - DNA, 87 bp, Homo sapiens
tccctctacgcgttttggttcccggttggtgcttcctgttcgcagctgcggcataataatttttcaccatgcatcggaaaaaggtgg

SEQ ID NO: 21155 - DNA, 75 bp, Homo sapiens
gaaacttatttctgttgacacggccatcgatgcacccctcggagctaatagcggagatgagaaacagtgggtttg

SEQ ID NO: 21156 - DNA, 82 bp, Homo sapiens
tcaactcctgaaagaacactctgaacttcagggatggcatatgccctactagctgcagttcctgtcggatatggtctctact

SEQ ID NO: 21157 - DNA, 104 bp, Homo sapiens
ctatgacggagaatccgtttcaggaaagtcataccctaatgatcccagcaagataatgtcctgtcttctaagatgtgcatcaagcctggtacatactgaaaacc

SEQ ID NO: 21158 - DNA, 74 bp, Homo sapiens
tttgtggcagccctgcatggagcaagtctgtcagcaccatctttctaacagttatgggggcttggggctgagta

SEQ ID NO: 21159 - DNA, 75 bp, Homo sapiens
caccagccgtgtgcagcctatcaagctggccaggtacctggagtagaacagaaaaattattatgtctgtgttccc

SEQ ID NO: 21160 - DNA, 76 bp, Homo sapiens
attctcacaaataaacatggtgcttggggagcagtttctcatagaattcaattcgtcataatctgtccctacacag

SEQ ID NO: 21161 - DNA, 101 bp, Homo sapiens
ttgcccgaccgctttccgggagactggagtcgaaggccgtgaggtatttttctaagggtatgttagagcccaccaaggaaccactgaaaccactttctgct

SEQ ID NO: 21162 - DNA, 100 bp, Homo sapiens
ttggtggccttgcatggtttctgcagatccactccttcacagctataccaaacttaaagttccaggaatggatggaggtgctttaactgatacaagtctc

SEQ ID NO: 21163 - DNA, 75 bp, Homo sapiens
aggagcaagagcaagatcaccgtgacatccgaggtgcctttctccaaaagcagccatggcaatgacaggctcaac

SEQ ID NO: 21164 - DNA, 103 bp, Homo sapiens
cttgcagtctgcagcttctcctgtcatcggaaatgccaggccaaggtgcagattcactttataggaacagcttcagcttcagtgatgaaaaactgaattctcc

SEQ ID NO: 21165 - DNA, 75 bp, Homo sapiens
tttgcagtgtatttgattccgatcattcgagcccttttcactcaaaattgccattgccttcagaaagtgttgata

SEQ ID NO: 21166 - DNA, 97 bp, Homo sapiens
aatgaacaagaaaggcgctagaattgattttaaaggtgttcttctctatgggcctccaggctgtggtaaaacgttgattgccaaggccacagccaaa

SEQ ID NO: 21167 - DNA, 100 bp, Homo sapiens
gttcaagtacagatcacacgcccactaaagcccagaagaatgtggctaccagcgaagaggcagaggaggtggacacggtggacgtctccggcgtgcccgc

SEQ ID NO: 21168 - DNA, 102 bp, Homo sapiens
cctgtgtgacaccaagataagtaactctccaaaaaaagttggtgatgacattgccaaggcaacgggtgactggaagggcctgaggattacagtgaaactgac

SEQ ID NO: 21169 - DNA, 74 bp, Homo sapiens
tgcatgccaacattccagttttttaagaagggacaaaaggtggccaaagcattctggatggcaatcgggggaga

SEQ ID NO: 21170 - DNA, 88 bp, Homo sapiens
ctggggatcttcgcactatcccaagttacatcttccggcccagctgtactcgcctggggcagtgggccatcggctatgtgagctcaga

SEQ ID NO: 21171 - DNA, 75 bp, Homo sapiens
ctggagaagctgggattggagattccacccaaacttgctggtcactgggaggattgtcagtggcttcgccccgag

SEQ ID NO: 21172 - DNA, 96 bp, Homo sapiens
ggaagagaaagaccgagtgctaaagaagcaggatgcattctacaaagaacagctggctagactggaggagagggaggaatttgatggggtcctgag

SEQ ID NO: 21173 - DNA, 83 bp, Homo sapiens
ctcagagggctctagccttcctgtgcaacctgaggtggcactgaagagctgataccccaatgtccttctttgactttgtggtt

SEQ ID NO: 21174 - DNA, 100 bp, Homo sapiens
aggaaaactaggaatctatgatgctgatggtgatggagattttgatgtggatgatgccaaagttttattagcaaaagttcaaacagaccctccctcagtt

SEQ ID NO: 21175 - DNA, 75 bp, Homo sapiens
ctctccagcagctgggattacaggattcactttaagagatttggaaactcttccctttggaattgctcttcccat

SEQ ID NO: 21176 - DNA, 78 bp, Homo sapiens
agggagacacatgtttgtctttcagcccatcgccgaagcaccattcaagttcgacatggaattggatgacttgcctaa

SEQ ID NO: 21177 - DNA, 75 bp, Homo sapiens
acgaaaagctagctggggtattctgaccagtcaagaatgagctgaaagccagtggtggcgaaatcaaaattcata

SEQ ID NO: 21178 - DNA, 97 bp, Homo sapiens
ctatacccacagtccaaaagcagactcactgtgtcccaggctaccagttcctccaaggtactgcttctccgagatggccccagtgtgtgcggtggtt

SEQ ID NO: 21179 - DNA, 50 bp, Homo sapiens
gagaacacaaagaagtgtgatggaggataagatcaatgccctcattaaag

SEQ ID NO: 21180 - DNA, 82 bp, Homo sapiens
ccccgccgagtcctagcgcctggcctgcgcgccgctgcccgcgccacagggtggaaaagcaattgaattttgcattgctcgt

SEQ ID NO: 21181 - DNA, 100 bp, Homo sapiens
cgggcccgtagctgggctctgcgaggccctgtgcaccaaggtgccggaactgatcagaaccatcatgggctggacattggacttcctccgggagcggctg

SEQ ID NO: 21182 - DNA, 74 bp, Homo sapiens
gcggcgggtgaagctgcagctctgtaaggtacctgccgtgggcagatctgagctttcttcttggacaccccata

SEQ ID NO: 21183 - DNA, 100 bp, Homo sapiens
atcgttttgatggatatatcttccttgacagcaaaggtaatagcagtgagtgcccgcctccaggaaatgctgaagatgacactgtttgcttggatcttgg

SEQ ID NO: 21184 - DNA, 75 bp, Homo sapiens
ctctgagggaattgggaggtcggcggccccaaaaagttttgccgaattgacaagcccctgtgtcacagtgaggat

SEQ ID NO: 21185 - DNA, 101 bp, Homo sapiens
cgatcccgccagccactcgcccctggcctcgcgggccgtgtctccggcatcatgtgtggtattccataaaacctaccaactcatggattcccaagatgtga

SEQ ID NO: 21186 - DNA, 98 bp, Homo sapiens
tggcggaggggctggacgttccacgccaaaggctgttggagaagtctgggggcttggaaatcatctttgatgtttaccaggccgacgctgtggccaca

SEQ ID NO: 21187 - DNA, 98 bp, Homo sapiens
ctgggtgttttgctaccgtgaccgtttagaactgtcatacataaagtacacagaaatgaagagaaaagtcgtgaatactcacaagctgagattgagtc

SEQ ID NO: 21188 - DNA, 75 bp, Homo sapiens
ccctggtgtcacctatcagtaaaagttggcttttgaaacgatgagtgttatatctgtggtcactaactgtgcgct

SEQ ID NO: 21189 - DNA, 83 bp, Homo sapiens
tgtgctcgctggcaccccgaacgggttgcttcccccgctgcgaggcccactgctcagtggagcgtggaggacgaggaggaggc

SEQ ID NO: 21190 - DNA, 102 bp, Homo sapiens
tgaccatcgctccaaccaaaaccgtgaatggtgtctggaggagtgagagccggcagggtggcccagttgaaatccttcccttcctctaccttggaagtgcct

SEQ ID NO: 21191 - DNA, 96 bp, Homo sapiens
caacggagcgctgaggcgggcgttttcttggatgaattgcttgctttggaggaccgtataatagacgctggccccaaaggaaactactctcgattt

SEQ ID NO: 21192 - DNA, 74 bp, Homo sapiens
ttaattttagggtcctttatatagaagggagagtagtttaagtgctgtggggctgctaactacacagattggga

SEQ ID NO: 21193 - DNA, 100 bp, Homo sapiens
ataagcctcgacttagaagctaccgagttaccctaagaaaggaagacagagatgtcaatgaccccatgcccaaccgaggcggcaatggactagctcctgg

SEQ ID NO: 21194 - DNA, 74 bp, Homo sapiens
gactttcttcgttgccatgaggaaagaattctccgaggttatgatgtgattgctcaagcccaatctgggactgg

SEQ ID NO: 21195 - DNA, 88 bp, Homo sapiens
ggagttttggctgcaagctggcgtggatgggttccaggttcgggacatagagaatctgaagaaaccagactgtgatgactgggagagc

SEQ ID NO: 21196 - DNA, 99 bp, Homo sapiens
gaagtgcggggctccaatggcgctttctacaaggatgaagtcattgctgtttccgaaaaggtgattgtgaagcttgaagacctggtcaagtgggtacat

SEQ ID NO: 21197 - DNA, 83 bp, Homo sapiens
gatcgagaggatctggtgtaccaggcgaagctggccgagcaggctgagcgatacgacgtgtctccagaacgctatagctatgg

(The sequence listing continues in the following parts.)
